United States Patent Application Publication US 2011/0183924 A1 - sequence listing, part 266

SEQ ID NO: 758721 - protein, 883 aa, Homo sapiens
GVKAMSDYWVVGKKSNYEVLEKDVGLKRFFPKSLLDSVKAKTLRKLIQQTFRQFANLNREESILKFFEILSPVYRFDKECFKCALGSSWIISVELAIGPEEGISYLTDKGCNPTHLADFTQVQTIQYSNSEDKDRKGMLQLKIAGAPEPLTVTAPSLTIAENMADLIDGYCRLVNGTSQSFIIRPQKEGERALPSIPKLANSEKQGMRTHAVSVSETDDYAEIIDEEDTYTMPSTRDYEIQRERIELGRCIGEGQFGDVHQGIYMSPENPALAVAIKTCKNCTSDSVREKFLQEACHYTSLHWNWCRYISDPNVDACPDPRNAELTMRQFDHPHIVKLIGVITENPVWIIMELCTLGELRSFLQVRKYSLDLASLILYAYQLSTALAYLESKRFVHRDIAARNVLVSSNDCVKLGDFGLSRYMEDSTYYKASKGKLPIKWMAPESINFRRFTSASDVWMFGVCMWEILMHGVKPFQGVKNNDVIGRIENGERLPMPPNCPPTLYSLMTKCWAYDPSRRPRFTELKAQLSTILEEEKAQQEERMRMESRRQATVSWDSGGSDEAPPKPSRPGYPSPRSSEGFYPSPQHMVQTNHYQVSGYPGSHGITAMAGSIYPGQASLLDQTDSWNHRPQEIAMWQPNVEDSTVLDLRGIGQVLPTHLMEERLIRQQQEMEEDQRWLEKEERFLIGNQHIYQPVGKPDPAAPPKKPPRPGAPGHLGSLASLSSPADSYNEGVKLQPQEISPPPTANLDRSNDKVYENVTGLVKAVIEMSSKIQPAPPEEYVPMVKEVGLALRTLLATVDETIPLLPASTHREIEMAQKLLNSDLGELINKMKLAQQYVMTSLQQEYKKQMLTAAHALAVDAKNLLDVIDQARLKMLGQTRPH

SEQ ID NO: 758722 - protein, 841 aa, Homo sapiens
MAAAYLDPNLNHTPNSSTKTHLGTGMERSPGAMERVLKVFHYFESNSEPTTWASIIRHGDATDVRGIIQKIVDSHKVKHVACYGFRLSHLRSEEVHWLHVDMGVSSVREKYELAHPPEEWKYELRIRYLPKGFLNQFTEDKPTLNFFYQQVKSDYMLEIADQVDQEIALKLGCLEIRRSYWEMRGNALEKKSNYEVLEKDVGLKRFFPKSLLDSVKAKTLRKLIQQTFRQFANLNREESILKFFEILSPVYRFDKECFKCALGSSWIISVELAIGPEEGISYLTDKGCNPTHLADFTQVQTIQYSNSEDKDRKGMLQLKIAGAPEPLTVTAPSLTIAENMADLIDGYCRLVNGTSQSFIIRPQKEGERALPSIPKLANSEKQGMRTHAVSVSETDDYAEIIDEEDTYTMPSTRDYEIQRERIELGRCIGEGQFGDVHQGIYMSPENPALAVAIKTCKNCTSDSVREKFLQEALTMRQFDHPHIVKLIGVITENPVWIIMELCTLGELRSFLQVRKYSLDLASLILYAYQLSTALAYLESKRFVHRDIAARNVLVSSNDCVKLGDFGLSRYMEDSTYYKASKGKLPIKWMAPESINFRRFTSASDVWMFGVCMWEILMHGVKPFQGVKNNDVIGRIENGERLPMPPNCPPTLYSLMTKCWAYDPSRRPRFTELKAQLSTILEEEKAQQEERMRMESRRQATVSWDSGGSDEAPPKPSRPGYPSPRSSEGFYPSPQHMVQTNHYQVSGYPGSHGITAMAGSIYPGQASLLDQTDSWNHRPQEIAMWQPNVEDSTVLDLRGIGQVLPTHLMEERLIRQQQEMEEDQRWLEKEERFLMQCGKTVL

SEQ ID NO: 758723 - protein, 1052 aa, Homo sapiens; identical to SEQ ID NO: 758720

SEQ ID NO: 758724 - protein, 1052 aa, Homo sapiens; identical to SEQ ID NO: 758720

SEQ ID NO: 758725 - protein, 381 aa, Homo sapiens
MCCLSSTILEEEKAQQEERMRMESRRQATVSWDSGGSDEAPPKPSRPGYPSPRSSEGFYPSPQHMVQTNHYQVSGYPGSHGITAMAGSIYPGQASLLDQTDSWNHRPQEIAMWQPNVEDSTVLDLRGIGQVLPTHLMEERLIRQQQEMEEDQRWLEKEERFLKPDVRLSRGSIDREDGSLQGPIGNQHIYQPVGKPDPAAPPKKPPRPGAPGHLGSLASLSSPADSYNEGVKLQPQEISPPPTANLDRSNDKVYENVTGLVKAVIEMSSKIQPAPPEEYVPMVKEVGLALRTLLATVDETIPLLPASTHREIEMAQKLLNSDLGELINKMKLAQQYVMTSLQQEYKKQMLTAAHALAVDAKNLLDVIDQARLKMLGQTRPH

SEQ ID NO: 758726 - protein, 297 aa, Homo sapiens
MAGSIYPGQASLLDQTDSWNHRPQEIAMWQPNVEDSTVLDLRGIGQVLPTHLMEERLIRQQQEMEEDQRWLEKEERFLKPDVRLSRGSIDREDGSLQGPIGNQHIYQPVGKPDPAAPPKKPPRPGAPGHLGSLASLSSPADSYNEGVKLQPQEISPPPTANLDRSNDKVYENVTGLVKAVIEMSSKIQPAPPEEYVPMVKEVGLALRTLLATVDETIPLLPASTHREIEMAQKLLNSDLGELINKMKLAQQYVMTSLQQEYKKQMLTAAHALAVDAKNLLDVIDQARLKMLGQTRPH

SEQ ID NO: 758727 - protein, 235 aa, Homo sapiens
RSLSTQRWLEKEERFLKPDVRLSRGSIDREDGSLQGPIGNQHIYQPVGKPDPAAPPKKPPRPGAPGHLGSLASLSSPADSYNEGVKLQPQEISPPPTANLDRSNDKVYENVTGLVKAVIEMSSKIQPAPPEEYVPMVKEVGLALRTLLATVDETIPLLPASTHREIEMAQKLLNSDLGELINKMKLAQQYVMTSLQQEYKKQMLTAAHALAVDAKNLLDVIDQARLKMLGQTRPH

SEQ ID NO: 758728 - protein, 115 aa, Homo sapiens
MSSKIQPAPPEEYVPMVKEVGLALRTLLATVDETIPLLPASTHREIEMAQKLLNSDLGELINKMKLAQQYVMTSLQQEYKKQMLTAAHALAVDAKNLLDVIDQARLKMLGQTRPH

SEQ ID NO: 758729 - protein, 1052 aa, Homo sapiens; identical to SEQ ID NO: 758720

SEQ ID NO: 758730 - protein, 1052 aa, Homo sapiens; identical to SEQ ID NO: 758720

SEQ ID NO: 758731 - protein, 845 aa, Homo sapiens
MAAAYLDPNLNHTPNSSTKTHLGTGMERSPGAMERVLKVFHYFESNSEPTTWASIIRHGDATDVRGIIQKIVDSHKVKHVACYGFRLSHLRSEEVHWLHVDMGVSSVREKYELAHPPEEWKYELRIRYLPKGFLNQFTEDKPTLNFFYQQVKSDYMLEIADQVDQEIALKLGCLEIRRSYWEMRGNALEKKSNYEVLEKDVGLKRFFPKSLLDSVKAKTLRKLIQQTFRQFANLNREESILKFFEILSPVYRFDKECFKCALGSSWIISVELAIGPEEGISYLTDKGCNPTHLADFTQVQTIQYSNSEDKDRKGMLQLKIAGAPEPLTVTAPSLTIAENMADLIDGYCRLVNGTSQSFIIRPQKEGERALPSIPKLANSEKQGMRTHAVSVSETDDYAEIIDEEDTYTMPSTRDYEIQRERIELGRCIGEGQFGDVHQGIYMSPENPALAVAIKTCKNCTSDSVREKFLQEALTMRQFDHPHIVKLIGVITENPVWIIMELCTLGELRSFLQVRKYSLDLASLILYAYQLSTALAYLESKRFVHRDIAARNVLVSSNDCVKLGDFGLSRYMEDSTYYKASKGKLPIKWMAPESINFRRFTSASDVWMFGVCMWEILMHGVKPFQGVKNNDVIGRIENGERLPMPPNCPPTLYSLMTKCWAYDPSRRPRFTELKAQLSTILEEEKAQQEERMRMESRRQATVSWDSGGSDEAPPKPSRPGYPSPRSSEGFYPSPQHMVQTNHYQVSGYPGSHGITAMAGSIYPGQASLLDQTDSWNHRPQEIAMWQPNVEDSTVLDLRGIGQVLPTHLMEERLIRQQQEMEEDQRWLEKEERFLVIVFLKGFFDFL

SEQ ID NO: 758732 - protein, 1052 aa, Homo sapiens; identical to SEQ ID NO: 758720

SEQ ID NO: 758733 - protein, 1052 aa, Homo sapiens; identical to SEQ ID NO: 758720

SEQ ID NO: 758734 - protein, 1052 aa, Homo sapiens; identical to SEQ ID NO: 758720

SEQ ID NO: 758735 - protein, 360 aa, Homo sapiens
MESRRQATVSWDSGGSDEAPPKPSRPGYPSPRSSEGFYPSPQHMVQTNHYQVSGYPGSHGITAMAGSIYPGQASLLDQTDSWNHRPQEIAMWQPNVEDSTVLDLRGIGQVLPTHLMEERLIRQQQEMEEDQRWLEKEERFLKPDVRLSRGSIDREDGSLQGPIGNQHIYQPVGKPDPAAPPKKPPRPGAPGHLGSLASLSSPADSYNEGVKLQPQEISPPPTANLDRSNDKVYENVTGLVKAVIEMSSKIQPAPPEEYVPMVKEVGLALRTLLATVDETIPLLPASTHREIEMAQKLLNSDLGELINKMKLAQQYVMTSLQQEYKKQMLTAAHALAVDAKNLLDVIDQARLKMLGQTRPH

SEQ ID NO: 758736 - protein, 360 aa, Homo sapiens; identical to SEQ ID NO: 758735

SEQ ID NO: 758737 - protein, 1018 aa, Homo sapiens
MAAAYLDPNLNHTPNSSTKTHLGTGMERSPGAMERVLKVFHYFESNSEPTTWASIIRHGDATDVRGIIQKIVDSHKVKHVACYGFRLSHLRSEEVHWLHVDMGVSSVREKYELAHPPEEWKYELRIRYLPKGFLNQFTEDKPTLNFFYQQVKSDYMLEIADQVDQEIALKLGCLEIRRSYWEMRGNALEKKSNYEVLEKDVGLKRFFPKSLLDSVKAKTLRKLIQQTFRQFANLNREESILKFFEILSPVYRFDKECFKCALGSSWIISVELAIGPEEGISYLTDKGCNPTHLADFTQVQTIQYSNSEDKDRKGMLQLKIAGAPEPLTVTAPSLTIAENMADLIDGYCRLVNGTSQSFIIRPQKEGERALPSIPKLANSEKQGMRTHAVSVSETDDYAEIIDEEDTYTMPSTRDYEIQRERIELGRCIGEGQFGDVHQGIYMSPENPALAVAIKTCKNCTSDSVREKFLQEALTMRQFDHPHIVKLIGVITENPVWIIMELCTLGELRSFLQVRKYSLDLASLILYAYQLSTALAYLESKRFVHRDIAARNVLVSSNDCVKLGDFGLSRYMEDSTYYKASKGKLPIKWMAPESINFRRFTSASDVWMFGVCMWEILMHGVKPFQGVKNNDVIGRIENGERLPMPPNCPPTLYSLMTKCWAYDPSRRPRFTELKAQLSTILEEEKAQQEERMRMESRRQATVSWDSGGSDEAPPKPSRPGYPSPRSSEGFYPSPQHMVQTNHYQVSGYPGSHGITAMAGSIYPGQASLLDQTDSWNHRPQEIAMWQPNVEDSTVLDLRGIGQVLPTHLMEERLIRQQQEMEEDQRWLEKEERFLKPDVRLSRGSIDREDGSLQGPIGNQHIYQPVGKPDPAAPPKKPPRPGAPGHLGSLASLSSPADSYNEGVKLQPQEISPPPTANLDRSNDKVYENVTGLVKAVIEMSSKIQPAPPEIEMAQKLLNSDLGELINKMKLAQQYVMTSLQQEYKKQMLTAAHALAVDAKNLLDVIDQARLKMLGQTRPH

SEQ ID NO: 758738 - protein, 1060 aa, Homo sapiens
MAAAYLDPNLNHTPNSSTKTHLGTGMERSPGAMERVLKVFHYFESNSEPTTWASIIRHGDATDVRGIIQKIVDSHKVKHVACYGFRLSHLRSEEVHWLHVDMGVSSVREKYELAHPPEEWKYELRIRYLPKGFLNQFTEDKPTLNFFYQQVKSDYMLEIADQVDQEIALKLGCLEIRRSYWEMRGNALEKKSNYEVLEKDVGLKRFFPKSLLDSVKAKTLRKLIQQTFRQFANLNREESILKFFEILSPVYRFDKECFKCALGSSWIISVELAIGPEEGISYLTDKGCNPTHLADFTQVQTIQYSNSEDKDRKGMLQLKIAGAPEPLTVTAPSLTIAENMADLIDGYCRLVNGTSQSFIIRPQKEGERALPSIPKLANSEKQGMRTHAVSVSETDDYAEIIDEEDTYTMPSTRDYEIQRERIELGRCIGEGQFGDVHQGIYMSPENPALAVAIKTCKNCTSDSVREKFLQEALTMRQFDHPHIVKLIGVITENPVWIIMELCTLGELRSFLQVRKYSLDLASLILYAYQLSTALAYLESKRFVHRDIAARNVLVSSNDCVKLGDFGLSRYMEDSTYYKASKGKLPIKWMAPESINFRRFTSASDVWMFGVCMWEILMHGVKPFQGVKNNDVIGRIENGERLPMPPNCPPTLYSLMTKCWAYDPSRRPRFTELKAQLSTILEEEKAQQEERMRMESRRQATVSWDSGGSDEAPPKPSRPGYPSPRSSEGFYPSPQHMVMIGCTMCCGLGYNQVSGYPGSHGITAMAGSIYPGQASLLDQTDSWNHRPQEIAMWQPNVEDSTVLDLRGIGQVLPTHLMEERLIRQQQEMEEDQRWLEKEERFLKPDVRLSRGSIDREDGSLQGPIGNQHIYQPVGKPDPAAPPKKPPRPGAPGHLGSLASLSSPADSYNEGVKLQPQEISPPPTANLDRSNDKVYENVTGLVKAVIEMSSKIQPAPPEEYVPMVKEVGLALRTLLATVDETIPLLPASTHREIEMAQKLLNSDLGELINKMKLAQQYVMTSLQQEYKKQMLTAAHALAVDAKNLLDVIDQARLKMLGQTRPH

SEQ ID NO: 758739 - protein, 399 aa, Homo sapiens
MYMLDKVLRGISQRNSVLLKINFCTILEEEKAQQEERMRMESRRQATVSWDSGGSDEAPPKPSRPGYPSPRSSEGFYPSPQHMVQTNHYQVSGYPGSHGITAMAGSIYPGQASLLDQTDSWNHRPQEIAMWQPNVEDSTVLDLRGIGQVLPTHLMEERLIRQQQEMEEDQRWLEKEERFLKPDVRLSRGSIDREDGSLQGPIGNQHIYQPVGKPDPAAPPKKPPRPGAPGHLGSLASLSSPADSYNEGVKLQPQEISPPPTANLDRSNDKVYENVTGLVKAVIEMSSKIQPAPPEEYVPMVKEVGLALRTLLATVDETIPLLPASTHREIEMAQKLLNSDLGELINKMKLAQQYVMTSLQQEYKKQMLTAAHALAVDAKNLLDVIDQARLKMLGQTRPH

SEQ ID NO: 758740 - protein, 1027 aa, Homo sapiens
MAAAYLDPNLNHTPNSSTKTHLGTGMERSPGAMERVLKVFHYFESNSEPTTWASIIRHGDATDVRGIIQKIVDSHKVKHVACYGFRLSHLRSEEVHWLHVDMGVSSVREKYELAHPPEEWKYELRIRYLPKGFLNQFTEDKPTLNFFYQQVKSDYMLEIADQVDQEIALKLGCLEIRRSYWEMRGNALEKKSNYEVLEKDVGLKRFFPKSLLDSVKAKTLRKLIQQTFRQFANLNREESILKFFEILSPVYRFDKECFKCALGSSWIISVELAIGPEEGISYLTDKGCNPTHLADFTQVQTIQYSNSEDKDRKGMLQLKIAGAPEPLTVTAPSLTIAENMADLIDGYCRLVNGTSQSFIIRPQKEGERALPSIPKLANSEKQGMRTHAVSVSETDDYAEIIDEEDTYTMPSTRDYEIQRERIELGRCIGEGQFGDVHQGIYMSPENPALAVAIKTCKNCTSDSVREKFLQEALTMRQFDHPHIVKLIGVITENPVWIIMELCTLGELRSFLQVRKYSLDLASLILYAYQLSTALAYLESKRFVHRDIAARNVLVSSNDCVKLGDFGLSRYMEDSTYYKASKGKLPIKWMAPESINFRRFTSASDVWMFGVCMWEILMHGVKPFQGVKNNDVIGRIENGERLPMPPNCPPTLYSLMTKCWAYDPSRRPRFTELKAQLSTILEEEKAQQEERMRMESRRQATVSWDSGGSDEAPPKPSRPGYPSPRSSEGFYPSPQHMVQTNHYQVSGYPGSHGITAMAGSIYPGQASLLDQTDSWNHRPQEIAMWQPNVEDSTVLDLRGIGQVLPTHLMEERLIRQQQEMEEDQRWLEKEERFLKPDVRLSRGSIDREDGSLQGPIGNQHIYQPVGKPDPAAPPKKPPRPGAPGHLGSLASLSSPADSYNEGVKLQPQEISPPPTANLDRSNDKVYENVTGLVKAVIEMSSKIQPAPPEEYVPMVKEVGLALRTLLATVDETIPLLPASTHREIEMAQKLLNSDLGELINKMKLAQQYVMTSLQQEYKNYSMSLTKQD

SEQ ID NO: 758741 - protein, 367 aa, Homo sapiens
SQPAPPEEYVPMVKEVGLSLRTLWDTVDETIPLLPASTHREIEMAQKLLNSDLGELINKMKLAQQYVMTAMAGSIYPGQASLLDQTDSWNHRPQEIAMWQPNVEDSTVLDLRGIGQVLPTHLMEERLIRQQQEMEEDQRWLEKEERFLKPDVRLSRGSIDREDGSLQGPIGNQHIYQPVGKPDPAAPPKKPPRPGAPGHLGSLASLSSPADSYNEGVKLQPQEISPPPTANLDRSNDKVYENVTGLVKAVIEMSSKIQPAPPEEYVPMVKEVGLALRTLLATVDETIPLLPASTHREIEMAQKLLNSDLGELINKMKLAQQYVMTSLQQEYKKQMLTAAHALAVDAKNLLDVIDQARLKMLGQTRPH

SEQ ID NO: 758742 - protein, 115 aa, Homo sapiens; identical to SEQ ID NO: 758728

SEQ ID NO: 758743 - protein, 906 aa, Homo sapiens
MAAAYLDPNLNHTPNSSTKTHLGTGMERSPGAMERVLKVFHYFESNSEPTTWASIIRHGDATDVRGIIQKIVDSHKVKHVACYGFRLSHLRSEEVHWLHVDMGVSSVREKYELAHPPEEWKYELRIRYLPKGFLNQFTEDKPTLNFFYQQVKSDYMLEIADQVDQEIALKLGCLEIRRSYWEMRGNALEKKSNYEVLEKDVGLKRFFPKSLLDSVKAKTLRKLIQQTFRQFANLNREESILKFFEILSPVYRFDKECFKCALGSSWIISVELAIGPEEGISYLTDKGCNPTHLADFTQVQTIQYSNSEDKDRKGMLQLKIAGAPEPLTVTAPSLTIAENMADLIDGYCRLVNGTSQSFIIRPQKEGERALPSIPKLANSEKQGMRTHAVSVSETDDYAEIIDEEDTYTMPSTRDYEIQRERIELGRCIGEGQFGDVHQGIYMSPENPALAVAIKTCKNCTSDSVREKFLQEALTMRQFDHPHIVKLIGVITENPVWIIMELCTLGELRSFLQVRKYSLDLASLILYAYQLSTALAYLESKRFVHRDIAARNVLVSSNDCVKLGDFGLSRYMEDSTYYKASKGKLPIKWMAPESINFRRFTSASDVWMFGVCMWEILMHGVKPFQGVKNNDVIGRIENGERLPMPPNCPPTLYSLMTKCWAYDPSRRPRFTELKAQLSTILEEEKAQQEERMRMESRRQATVSWDSGGSDEAPPKPSRPGYPSPRSSEGFYPSPQHMVQTNHYQVSGYPGSHGITAMAGSIYPGQASLLDQTDSWNHRPQEIAMWQPNVEDSTVLDLRGIGQVLPTHLMEERLIRQQQEMEEDQRWLEKEERFLKPDVRLSRGSIDREDGSLQGPIGNQHIYQPVGKPDPAAPPKKPPRPGAPGHLGSLASLSSPADSYNEGVKVGI

SEQ ID NO: 758744 - protein, 750 aa, Homo sapiens
MAAAYLDPNLNHTPNSSTKTHLGTGMERSPGAMERVLKVFHYFESNSEPTTWASIIRHGDATDVRGIIQKIVDSHKVKHVACYGFRLSHLRSEEVHWLHVDMGVSSVREKYELAHPPEEWKYELRIRYLPKGFLNQFTEDKPTLNFFYQQVKSDYMLEIADQVDQEIALKLGCLEIRRSYWEMRGNALEKKSNYEVLEKDVGLKRFFPKSLLDSVKAKTLRKLIQQTFRQFANLNREESILKFFEILSPVYRFDKECFKCALGSSWIISVELAIGPEEGISYLTDKGCNPTHLADFTQVQTIQYSNSEDKDRKGMLQLKIAGAPEPLTVTAPSLTIAENMADLIDGYCRLVNGTSQSFIIRPQKEGERALPSIPKLANSEKQGMRTHAVSVSETDDYAEIIDEEDTYTMPSTRDYEIQRERIELGRCIGEGQFGDVHQGIYMSPENPALAVAIKTCKNCTSDSVREKFLQEALTMRQFDHPHIVKLIGVITENPVWIIMELCTLGELRSFLQVRKYSLDLASLILYAYQLSTALAYLESKRFVHRDIAARNVLVSSNDCVKLGDFGLSRYMEDSTYYKASKGKLPIKWMAPESINFRRFTSASDVWMFGVCMWEILMHGVKPFQGVKNNDVIGRIENGERLPMPPNCPPTLYSLMTKCWAYDPSRRPRFTELKAQLSTILEEEKAQQEERMRMESRRQATVSWDSGGSDEAPPKPSRPGYPSPRSSEGFYPSPQHMVQTNHYQVCQSLQI

SEQ ID NO: 758745 - protein, 300 aa, Homo sapiens
HRSWNETTCRVSTMDPKQTTLLCLVLCLGQRIQAQEGDFPMPFISAKSSPVIPLDGSVKIQCQAIREAYLTQLMIIKNSTYREIGRRLKFWNETDPEFVIDHMDANKAGRYQCQYRIGHYRFRYSDTLELVVTGLYGKPFLSADRGLVLMPGENISLTCSSAHIPFDRFSLAKEGELSLPQHQSGEHPANFSLGPVDLNVSGIYRCYGWYNRSPYLWSFPSNALELVVTDSIHQDYTTQNLIRMAVAGLVLVALLAILVENWHSHTALNKEASADVAEPSWSQQMCQPGLTFARTPSVCK

SEQ ID NO: 758746 - protein, 278 aa, Homo sapiens
HRSWNETTCRVSTMDPKQTTLLCLVLCLGQRIQAQEGDFPMPFISAKSSPVIPLDGSVKIQCQAIREAYLTQLMIIKNSTYREIGRRLKFWNETDPEFVIDHMDANKAGRYQCQYRIGHYRFRYSDTLELVVTGLYGKPFLSADRGLVLMPGENISLTCSSAHIPFDRFSLAKEGELSLPQHQSGEHPANFSLGPVDLNVSGIYRCYDSIHQDYTTQNLIRMAVAGLVLVALLAILVENWHSHTALNKEASADVAEPSWSQQMCQPGLTFARTPSVCK

SEQ ID NO: 758747 - protein, 204 aa, Homo sapiens
HRSWNETTCRVSTMDPKQTTLLCLVLCLGQRIQAQEGDFPMPFISAKSSPVIPLDGSVKIQCQAIREAYLTQLMIIKNSTYREIGRRLKFWNETDPEFVIDHMDANKAGRYQCQYRIGHYRFRYSDTLELVVTDSIHQDYTTQNLIRMAVAGLVLVALLAILVENWHSHTALNKEASADVAEPSWSQQMCQPGLTFARTPSVCK

SEQ ID NO: 758748 - protein, 266 aa, Homo sapiens
HRSWNETTCRVSTMDPKQTTLLCLGDFPMPFISAKSSPVIPLDGSVKIQCQAIREAYLTQLMIIKNSTYREIGRRLKFWNETDPEFVIDHMDANKAGRYQCQYRIGHYRFRYSDTLELVVTGLYGKPFLSADRGLVLMPGENISLTCSSAHIPFDRFSLAKEGELSLPQHQSGEHPANFSLGPVDLNVSGIYRCYDSIHQDYTTQNLIRMAVAGLVLVALLAILVENWHSHTALNKEASADVAEPSWSQQMCQPGLTFARTPSVCK

SEQ ID NO: 758749 - protein, 288 aa, Homo sapiens
HRSWNETTCRVSTMDPKQTTLLCLGDFPMPFISAKSSPVIPLDGSVKIQCQAIREAYLTQLMIIKNSTYREIGRRLKFWNETDPEFVIDHMDANKAGRYQCQYRIGHYRFRYSDTLELVVTGLYGKPFLSADRGLVLMPGENISLTCSSAHIPFDRFSLAKEGELSLPQHQSGEHPANFSLGPVDLNVSGIYRCYGWYNRSPYLWSFPSNALELVVTDSIHQDYTTQNLIRMAVAGLVLVALLAILVENWHSHTALNKEASADVAEPSWSQQMCQPGLTFARTPSVCK

SEQ ID NO: 758750 - protein, 252 aa, Homo sapiens
HRSWNETTCRVSTMDPKQTTLLCLVLCLGQRIQAQEGDFPMPFISAKSSPVIPLDGSVKIQCQAIREAYLTQLMIIKNSTYREIGRRLKFWNETDPEFVIDHMDANKAGRYQCQYRIGHYRFRYSDTLELVVTGLYGKPFLSADRGLVLMPGENISLTCSSAHIPFDRFSLAKEGELSLPQHQSGEHPANFSLGPVDLNVSGIYRCYGWYNRSPYLWSFPSNALELVVTGRYRPVQPCVWVGCPGPCHRAGI

SEQ ID NO: 758751 - protein, 191 aa, Homo sapiens
HRSWNETTCRVSTMDPKQTTLLCLGLYGKPFLSADRGLVLMPGENISLTCSSAHIPFDRFSLAKEGELSLPQHQSGEHPANFSLGPVDLNVSGIYRCYGWYNRSPYLWSFPSNALELVVTDSIHQDYTTQNLIRMAVAGLVLVALLAILVENWHSHTALNKEASADVAEPSWSQQMCQPGLTFARTPSVCK

SEQ ID NO: 758752 - protein, 240 aa, Homo sapiens
HRSWNETTCRVSTMDPKQTTLLCLGDFPMPFISAKSSPVIPLDGSVKIQCQAIREAYLTQLMIIKNSTYREIGRRLKFWNETDPEFVIDHMDANKAGRYQCQYRIGHYRFRYSDTLELVVTGLYGKPFLSADRGLVLMPGENISLTCSSAHIPFDRFSLAKEGELSLPQHQSGEHPANFSLGPVDLNVSGIYRCYGWYNRSPYLWSFPSNALELVVTGRYRPVQPCVWVGCPGPCHRAGI

SEQ ID NO: 758753 - protein, 164 aa, Homo sapiens
MPFISAKSSPVIPLDGSVKIQCQAIREAYLTQLMIIKNSTYREIGRRLKFWNETDPEFVIDHMDANKAGRYQCQYRIGHYRFRYSDTLELVVTDSIHQDYTTQNLIRMAVAGLVLVALLAILVENWHSHTALNKEASADVAEPSWSQQMCQPGLTFARTPSVCK

SEQ ID NO: 758754 - protein, 238 aa, Homo sapiens
MPFISAKSSPVIPLDGSVKIQCQAIREAYLTQLMIIKNSTYREIGRRLKFWNETDPEFVIDHMDANKAGRYQCQYRIGHYRFRYSDTLELVVTGLYGKPFLSADRGLVLMPGENISLTCSSAHIPFDRFSLAKEGELSLPQHQSGEHPANFSLGPVDLNVSGIYRCYDSIHQDYTTQNLIRMAVAGLVLVALLAILVENWHSHTALNKEASADVAEPSWSQQMCQPGLTFARTPSVCK

SEQ ID NO: 758755 - protein, 164 aa, Homo sapiens; identical to SEQ ID NO: 758753

SEQ ID NO: 758756 - protein, 192 aa, Homo sapiens
HRSWNETTCRVSTMDPKQTTLLCLGDFPMPFISAKSSPVIPLDGSVKIQCQAIREAYLTQLMIIKNSTYREIGRRLKFWNETDPEFVIDHMDANKAGRYQCQYRIGHYRFRYSDTLELVVTDSIHQDYTTQNLIRMAVAGLVLVALLAILVENWHSHTALNKEASADVAEPSWSQQMCQPGLTFARTPSVCK

SEQ ID NO: 758757 - protein, 197 aa, Homo sapiens
HRSWNETTCRVSTMDPKQTTLLCLVLCLGQRIQAQEGDFPMPFISAKSSPVIPLDGSVKIQCQAIREAYLTQLMIIKNSTYREIGRRLKFWNETDPEFVIDHMDANKAGRYQCQYRIGHYRFRYSDTLELVVTGLYGKPFLSADRGLVLMPGENISLTCSSAHIPFDRFSLAKDPSKGITGLDLADMKGMGKSPSCA

SEQ ID NO: 758758 - protein, 189 aa, Homo sapiens
HRSWNETTCRVSTMDPKQTTLLCLVLCLGQRIQAQEGDFPMPFISAKSSPVIPLDGSVKIQCQAIREAYLTQLMIIKNSTYREIGRRLKFWNETDPEFVIDHMDANKAGRYQCQYRIGHYRFRYSDTLELVVTGLYGKPFLSADRGLVLMPGENISLTCSSAHIPFDRFSLAKLCLALAPKLGPAVRSF

SEQ ID NO: 758759 - protein, 109 aa, Homo sapiens
RRSSPSGGNQPIHVEVLKSQEPAHRRLPGFESWQVLNSLSLSYSICNRTCLPGIAGKIQGENLGQAIGSQISKSSTGEVPRLGLEPREVRTPGEVRGNPHTGLFHVLFL

SEQ ID NO: 758760 - protein, 546 aa, Homo sapiens
MEDTTSILPKLKRNSNAYGIGALAKSSFSGISRSMKDHVTKPTAMGQGRVAHMIEWQGWGKTPAVQPQHSHESVRRDTDAYSDLSDGEKEARFLAGVMEQFAISEATLMAWSSMDGEDMSVNSTQEPLGCNYSDNYQELMDSQDALAQAPMDGWPHSYVSQGMYCLGSSDAWEASDQSLIASPATGSYLGPAFDDSQPSLHEMGPSQPASGYSALEPPPLLGGDTDWAPGVGAVDLARGPAEEEKRPLAPEEEEDAGCRDLESLSPREDPEMSTALSRKVSDVTSSGVQSFDEEEGEANNCFLPQCPAFHSHLRAMAVTHTLPPPSSTAETGQTTLGNPGASSPLLEMEDQDGILSRLTSRNPQAWELRPGQLDGRELGVAVEKDLGCGLLGLCRQSLQCVHPEDGGSAAVLKTGSQFFTPRFRLPGAVTLLSECLLSPFHSCFSQLCFLWLWPQLIPTERTDLRGCWTWLDRRRGGCLKGTSMGRVERLPQQVIWLLRSGVEEEVDVAAEIYRGHGCGSFYQGLPGDKRVTEETKNKHSPLLWDL

SEQ ID NO: 758761 - protein, 606 aa, Homo sapiens
MGCIGSRTVGNEVIAVDWKGLKDVDQINMDSTSSLHGSSLHRPSTEQTRTDFSWDGINLSMEDTTSILPKLKRNSNAYGIGALAKSSFSGISRSMKDHVTKPTAMGQGRVAHMIEWQGWGKTPAVQPQHSHESVRRDTDAYSDLSDGEKEARFLAGVMEQFAISEATLMAWSSMDGEDMSVNSTQEPLGCNYSDNYQELMDSQDALAQAPMDGWPHSYVSQGMYCLGSSDAWEASDQSLIASPATGSYLGPAFDDSQPSLHEMGPSQPASGYSALEPPPLLGGDTDWAPGVGAVDLARGPAEEEKRPLAPEEEEDAGCRDLESLSPREDPEMSTALSRKVSDVTSSGVQSFDEEEGEANNCFLPQCPAFHSHLRAMAVTHTLPPPSSTAETGQTTLGNPGASSPLLEMEDQDGILSRLTSRNPQAWELRPGQLDGRELGVAVEKDLGCGLLGLCRQSLQCVHPEDGGSAAVLKTGSQFFTPRFRLPGAVTLLSECLLSPFHSCFSQLCFLWLWPQLIPTERTDLRGCWTWLDRRRGGCLKGTSMGRVERLPQQVIWLLRSGVEEEVDVAAEIYRGHGCGSFYQGLPGDKRVTEETKNKHSPLLWDL

SEQ ID NO: 758762 - protein, 557 aa, Homo sapiens
VVDLAGSYVIPFVCQSPFQRKLKRNSNAYGIGALAKSSFSGISRSMKDHVTKPTAMGQGRVAHMIEWQGWGKTPAVQPQHSHESVRRDTDAYSDLSDGEKEARFLAGVMEQFAISEATLMAWSSMDGEDMSVNSTQEPLGCNYSDNYQELMDSQDALAQAPMDGWPHSYVSQGMYCLGSSDAWEASDQSLIASPATGSYLGPAFDDSQPSLHEMGPSQPASGYSALEPPPLLGGDTDWAPGVGAVDLARGPAEEEKRPLAPEEEEDAGCRDLESLSPREDPEMSTALSRKVSDVTSSGVQSFDEEEGEANNCFLPQCPAFHSHLRAMAVTHTLPPPSSTAETGQTTLGNPGASSPLLEMEDQDGILSRLTSRNPQAWELRPGQLDGRELGVAVEKDLGCGLLGLCRQSLQCVHPEDGGSAAVLKTGSQFFTPRFRLPGAVTLLSECLLSPFHSCFSQLCFLWLWPQLIPTERTDLRGCWTWLDRRRGGCLKGTSMGRVERLPQQVIWLLRSGVEEEVDVAAEIYRGHGCGSFYQGLPGDKRVTEETKNKHSPLLWDL

SEQ ID NO: 758763 - protein, 175 aa, Homo sapiens [sequence omitted]

SEQ ID NO: 758764 - protein, 606 aa, Homo sapiens; identical to SEQ ID NO: 758761

SEQ ID NO: 758765 - protein, 175 aa, Homo sapiens [sequence omitted]

SEQ ID NO: 758766 - protein, 216 aa, Homo sapiens
GKKHGLKMLERSFSARRSKRNRKCPVKFDDTSDDEQESGDGSDNLNQENFDKEKSDRNDSEDPGSEYNAEEDELEEEMSDEYSDIEEQSEKDHNDAEEEPEAGDSVGNVHEGLTPVVIQNSNKKILQCPKCDKTFDRIGKYESHTRVHTGEKPFECDICHQRYSTKSNLTVHRKKHSNETEFHKKEHKCPYCNKLHASKKTLAKHVKRQVLSCFHN

SEQ ID NO: 758767 - protein, 396 aa, Homo sapiens
MLITVYCVRRDLSEVTFSLQVSPDFELRNFKVLCEAESRVPVEEIQIIHMERLLIEDHCSLGSYGLKDGDIVVLLQKDNVGPRAPGRAPNQPRVDFSGIAVPGTSSSRPQHPGQQQQRTPAAQRSQGLASGEKVAGLQGLGSPALIRSMLLSKPHDLSLLKERKPPLAEALLSGSLETFSQVLMEQQREKALREQERLRLYTADPLDREAQAKIEEEIRQQNIEENMNIAIEEAPESFGQVTMLYINCKVNGHPLKAFVDSGAQMTIMSQACAERCNIMRLVDRRWAGVAKGVGTQRIIGRVHLAQIQIEGDFLQCSFSILEDQPMDMLLGLDMLRRHQCSIDLKKNVLVIGTTGTQTYFLPEGELPLCSRMVSGQDESSDKEITHSVMDSGRKEH

SEQ ID NO: 758768 - protein, 113 aa, Homo sapiens
ICKPLHYTTIMQQGICHLLVVIAWIGGILHATVQILFMTDLPFVVPNVIDHFMCDLFPLLKLACRDTYRLGMLVAANSGAMCLLIFSLLVISYIVILSSLKSYSSEGQHKALS

SEQ ID NO: 758769 - protein, 559 aa, Homo sapiens
RKTGSRRHPLGLTKMLPGAWLLWTSLLLLARPAQPCPMGCDCFVQEVFCSDEELATVPLDIPPYTKNIIFVETSFTTLETRAFGSNPNLTKVVFLNTQLCQFRPDAFGGLPRLEDLEVTGSSFLNLSTNIFSNLTSLGKLTLNFNMLEALPEGLFQHLAALESLHLQGNQLQALPRRLFQPLTHLKTLNLAQNLLAQLPEELFHPLTSLQTLKLSNNALSGLPQGVFGKLGSLQELFLDSNNISELPPQVFSQLFCLERLWLQRNAITHLPLSIFASLGNLTFLSLQWNMLRVLPAGLFAHTPCLVGLSLTHNQLETVAEGTFAHLSNLRSLMLSYNAITHLPAGIFRDLEELVKLYLGSNNLTALHPALFQNLSKLELLSLSKNQLTTLPEGIFDTNYNLFNLALHGNPWQCDCHLAYLFNWLQQYTDRLLNIQTYCAGPAYLKGQVVPALNEKQLVCPVTRDHLGFQVTWPDESKAGGSWDLAVQERAARSQCTYSNPEGTVVLACDQAQCRWLNVQLSPWQGSLGLQYNASQEWDLRSSCGSLRLTVSIEARAAGP

SEQ ID NO: 758770 - protein, 150 aa, Homo sapiens
RKTGSRRHPLGLTKMLPGAWLLWTSLLLLARPAQPCPMGCDCFVQEVFCSDEELATVPLDIPPYTKNIIFVETSFTTLETRAFGSNPNLTKVVFLNTQLCQFRPDAFGGLPRLEDLEVTGSSFLNLSTNIFSNLTSLGKLTLNNCQPENV

SEQ ID NO: 758771 - protein, 559 aa, Homo sapiens; identical to SEQ ID NO: 758769

SEQ ID NO: 758772 - protein, 193 aa, Homo sapiens
APGNSLETRVLGLRPDPPNRNSCGARCQPEGPAVQGSPDISHLRTEAARSGEPGQGHGRERPDSGSLGPSPHSAPSESKVPCREGPSTLPIPYWLHPLKPRPAACRTSPRHQVVPGASLMPGPGETCGHRTHVLPGDGQEAPLLRRSCRFFFLNTVCPSLHPPSHLCPSLQQSFRQAGPAPCLPLLPPPTHTF

SEQ ID NO: 758773 - protein, 113 aa, Homo sapiens
APGNSLETRVLGLRPDPPNRNSCGARCQPEGPAVQGSPDISHLRTEAARSGEPGQGHGRERPDSGSLGPSPHSAPSESKVPCREGPSTLVSATAHFAQVKDAALARVAHDLHF

SEQ ID NO: 758774 - protein, 385 aa, Homo sapiens
MIISTPQRLTSSGSVLIGSPYTPAPAMVTQTHIAEATGWVPGDRKRARKFIDSDFSESKRSKKGDKNGKGLRHFSMKVCEKVQRKGTTSYNEVADELVSEFTNSNNHLAADSAYDQKNIRRRVYDALNVLMAMNIISKEKKEIKWIGLPTNSAQECQNLEIEKQRRIERIKQKRAQLQELLLQQIAFKNLVQRNRQNEQQNQGPPALNSTIQLPFIIINTSRKTVIDCSISSDKFEYLFNFDNTFEIHDDIEVLKRMGMSFGLESGKCSLEDLKLAKSLVPKALEGYITDISTGPSWLNQGLLLNSTQSVSNLDLTTGATLPQSSVNQGLCLDAEVALATGQFLAPNSHQSSSAASHCSESRGETPCSFNDEDEEDDEEDSSSPE

SEQ ID NO: 758775 - protein, 385 aa, Homo sapiens; identical to SEQ ID NO: 758774

SEQ ID NO: 758776 - protein, 431 aa, Homo sapiens
LVANSARGFLRPGNISFVAFPVSNTNSPTKILPKTLGPINVNVGPQMIISTPQRLTSSGSVLIGSPYTPAPAMVTQTHIAEATGWVPGDRKRARKFIDSDFSESKRSKKGDKNGKGLRHFSMKVCEKVQRKGTTSYNEVADELVSEFTNSNNHLAADSAYDQKNIRRRVYDALNVLMAMNIISKEKKEIKWIGLPTNSAQECQNLEIEKQRRIERIKQKRAQLQELLLQQIAFKNLVQRNRQNEQQNQGPPALNSTIQLPFIIINTSRKTVIDCSISSDKFEYLFNFDNTFEIHDDIEVLKRMGMSFGLESGKCSLEDLKLAKSLVPKALEGYITDISTGPSWLNQGLLLNSTQSVSNLDLTTGATLPQSSVNQGLCLDAEVALATGQFLAPNSHQSSSAASHCSESRGETPCSFNDEDEEDDEEDSSSPE

SEQ ID NO: 758777 - protein, 429 aa, Homo sapiens
KGAPWTLSAIRMQPEGIIFEAENKPSPGTESAGTFILDLSATSRTIISTPQRLTSSGSVLIGSPYTPAPAMVTQTHIAEATGWVPGDRKRARKFIDSDFSESKRSKKGDKNGKGLRHFSMKVCEKVQRKGTTSYNEVADELVSEFTNSNNHLAADSAYDQKNIRRRVYDALNVLMAMNIISKEKKEIKWIGLPTNSAQECQNLEIEKQRRIERIKQKRAQLQELLLQQIAFKNLVQRNRQNEQQNQGPPALNSTIQLPFIIINTSRKTVIDCSISSDKFEYLFNFDNTFEIHDDIEVLKRMGMSFGLESGKCSLEDLKLAKSLVPKALEGYITDISTGPSWLNQGLLLNSTQSVSNLDLTTGATLPQSSVNQGLCLDAEVALATGQFLAPNSHQSSSAASHCSESRGETPCSFNDEDEEDDEEDSSSPE

SEQ ID NO: 758778 - protein, 349 aa, Homo sapiens
MLDPKCDRKRARKFIDSDFSESKRSKKGDKNGKGLRHFSMKVCEKVQRKGTTSYNEVADELVSEFTNSNNHLAADSAYDQKNIRRRVYDALNVLMAMNIISKEKKEIKWIGLPTNSAQECQNLEIEKQRRIERIKQKRAQLQELLLQQIAFKNLVQRNRQNEQQNQGPPALNSTIQLPFIIINTSRKTVIDCSISSDKFEYLFNFDNTFEIHDDIEVLKRMGMSFGLESGKCSLEDLKLAKSLVPKALEGYITDISTGPSWLNQGLLLNSTQSVSNLDLTTGATLPQSSVNQGLCLDAEVALATGQFLAPNSHQSSSAASHCSESRGETPCSFNDEDEEDDEEDSSSPE

SEQ ID NO: 758779 - protein, 289 aa, Homo sapiens
MIISTPQRLTSSGSVLIGSPYTPAPAMVTQTHIAEATGWVPGDRKRARKFIDSDFSESKRSKKGDKNGKGLRHFSMKVCEKVQRKGTTSYNEVADELVSEFTNSNNHLAADSAYDQKNIRRRVYDALNVLMAMNIISKEKKEIKWIGLPTNSAQECQNLEIEKQRRIERIKQKRAQLQELLLQQIAFKNLVQRNRQNEQQNQGPPALNSTIQLPFIIINTSRKTVIDCSISSDKFEYLFNFDNTFEIHDDIEVLKRMGICICNELWCFLSIKVYLCPSYKIKGKKKHLK

SEQ ID NO: 758780 - protein, 447 aa, Homo sapiens
MTAKNVGLTSTNAEVRGFIDQNLSPTKGSNISFVAFPVSNTNSPTKILPKTLGPINVNVGPQMIISTPQRLTSSGSVLIGSPYTPAPAMVTQTHIAEATGWVPGDRKRARKFIDSDFSESKRSKKGDKNGKGLRHFSMKVCEKVQRKGTTSYNEVADELVSEFTNSNNHLAADSAYDQKNIRRRVYDALNVLMAMNIISKEKKEIKWIGLPTNSAQECQNLEIEKQRRIERIKQKRAQLQELLLQQIAFKNLVQRNRQNEQQNQGPPALNSTIQLPFIIINTSRKTVIDCSISSDKFEYLFNFDNTFEIHDDIEVLKRMGMSFGLESGKCSLEDLKLAKSLVPKALEGYITDISTGPSWLNQGLLLNSTQSVSNLDLTTGATLPQSSVNQGLCLDAEVALATGQFLAPNSHQSSSAASHCSESRGETPCSFNDEDEEDDEEDSSSPE

SEQ ID NO: 758781 - protein, 438 aa, Homo sapiens
CFGASRYSDMYNSNYAGFTSNISFVAFPVSNTNSPTKILPKTLGPINVNVGPQMIISTPQRLTSSGSVLIGSPYTPAPAMVTQTHIAEATGWVPGDRKRARKFIDSDFSESKRSKKGDKNGKGLRHFSMKVCEKVQRKGTTSYNEVADELVSEFTNSNNHLAADSAYDQKNIRRRVYDALNVLMAMNIISKEKKEIKWIGLPTNSAQECQNLEIEKQRRIERIKQKRAQLQELLLQQIAFKNLVQRNRQNEQQNQGPPALNSTIQLPFIIINTSRKTVIDCSISSDKFEYLFNFDNTFEIHDDIEVLKRMGMSFGLESGKCSLEDLKLAKSLVPKALEGYITDISTGPSWLNQGLLLNSTQSVSNLDLTTGATLPQSSVNQGLCLDAEVALATGQFLAPNSHQSSSAASHCSESRGETPCSFNDEDEEDDEEDSSSPE

SEQ ID NO: 758782 - protein, 385 aa, Homo sapiens; identical to SEQ ID NO: 758774

SEQ ID NO: 758783 - protein, 424 aa, Homo sapiens
MLDPKWMQPEGIIFEAENKPSPGTESAGTFILDLSATSRTIISTPQRLTSSGSVLIGSPYTPAPAMVTQTHIAEATGWVPGDRKRARKFIDSDFSESKRSKKGDKNGKGLRHFSMKVCEKVQRKGTTSYNEVADELVSEFTNSNNHLAADSAYDQKNIRRRVYDALNVLMAMNIISKEKKEIKWIGLPTNSAQECQNLEIEKQRRIERIKQKRAQLQELLLQQIAFKNLVQRNRQNEQQNQGPPALNSTIQLPFIIINTSRKTVIDCSISSDKFEYLFNFDNTFEIHDDIEVLKRMGMSFGLESGKCSLEDLKLAKSLVPKALEGYITDISTGPSWLNQGLLLNSTQSVSNLDLTTGATLPQSSVNQGLCLDAEVALATGQFLAPNSHQSSSAASHCSESRGETPCSFNDEDEEDDEEDSSSPE

SEQ ID NO: 758784 - protein, 402 aa, Homo sapiens
SVVECCWYCSERHASLDQIISTPQRLTSSGSVLIGSPYTPAPAMVTQTHIAEATGWVPGDRKRARKFIDSDFSESKRSKKGDKNGKGLRHFSMKVCEKVQRKGTTSYNEVADELVSEFTNSNNHLAADSAYDQKNIRRRVYDALNVLMAMNIISKEKKEIKWIGLPTNSAQECQNLEIEKQRRIERIKQKRAQLQELLLQQIAFKNLVQRNRQNEQQNQGPPALNSTIQLPFIIINTSRKTVIDCSISSDKFEYLFNFDNTFEIHDDIEVLKRMGMSFGLESGKCSLEDLKLAKSLVPKALEGYITDISTGPSWLNQGLLLNSTQSVSNLDLTTGATLPQSSVNQGLCLDAEVALATGQFLAPNSHQSSSAASHCSESRGETPCSFNDEDEEDDEEDSSSPE

SEQ ID NO: 758785 - protein, 339 aa, Homo sapiens
MIISTPQRLTSSGSVLIGSPYTPAPAMVTQTHIAEATGWVPGDRKRARKFIDSDFSESKRSKKGDKNGKGLRHFSMKVCEKVQRKGTTSYNEVADELVSEFTNSNNHLAADSAYDQKNIRRRVYDALNVLMAMNIISKEKKEIKWIGLPTNSAQECQNLEIEKQRRIERIKQKRAQLQELLLQQIAFKNLVQRNRQNEQQNQGPPALNSTIQLPFIIINTSRKTVIDCSISSDKFEYLFNFDNTFEIHDDIEVLKRMGMSFGLESGKCSLEDLKLAKSLVPKALEGYITDISTGPSWLNQGLLLNSTQSVSNLDLTTGATLPQSRYVFFSGLERQTPEP

SEQ ID NO: 758786 - protein, 259 aa, Homo sapiens
MDAWVRFSAQSQARERLCRAAQYACSLLGHALQRHGASPELQKQIRQLESHLSLGRKLLRLGNSADALESAKRAVHLSDVVLRFCITVSHLNRALYFACDNVLWAGKSGLAPRVDQEKWAQRSFRYYLFSLIMNLSRDAYEIRLLMEQESSACSRRLKGSGGGVPGGSETGGLGGPGTPGGGLPQLALKLRLQVLLLARVLRGHPPLLLDVVRNACDLFIPLDKLGLWRCGPGIVGLCGLVSSILSILTLIYPWLRLKP

SEQ ID NO: 758787 - protein, 228 aa, Homo sapiens
MASTRLGCWLQKQIRQLESHLSLGRKLLRLGNSADALESAKRAVHLSDVVLRFCITVSHLNRALYFACDNVLWAGKSGLAPRVDQEKWAQRSFRYYLFSLIMNLSRDAYEIRLLMEQESSACSRRLKGSGGGVPGGSETGGLGGPGTPGGGLPQLALKLRLQVLLLARVLRGHPPLLLDVVRNACDLFIPLDKLGLWRCGPGIVGLCGLVSSILSILTLIYPWLRLKP

SEQ ID NO: 758788 - protein, 245 aa, Homo sapiens
MGKLRAAQYACSLLGHALQRHGASPELQKQIRQLESHLSLGRKLLRLGNSADALESAKRAVHLSDVVLRFCITVSHLNRALYFACDNVLWAGKSGLAPRVDQEKWAQRSFRYYLFSLIMNLSRDAYEIRLLMEQESSACSRRLKGSGGGVPGGSETGGLGGPGTPGGGLPQLALKLRLQVLLLARVLRGHPPLLLDVVRNACDLFIPLDKLGLWRCGPGIVGLCGLVSSILSILTLIYPWLRLKP

SEQ ID NO: 758789 - protein, 176 aa, Homo sapiens
MPLSQPHLNRALYFACDNVLWAGKSGLAPRVDQEKWAQRSFRYYLFSLIMNLSRDAYEIRLLMEQESSACSRRLKGSGGGVPGGSETGGLGGPGTPGGGLPQLALKLRLQVLLLARVLRGHPPLLLDVVRNACDLFIPLDKLGLWRCGPGIVGLCGLVSSILSILTLIYPWLRLKP

SEQ ID NO: 758790 - protein, 259 aa, Homo sapiens; identical to SEQ ID NO: 758786

SEQ ID NO: 758791 - protein, 259 aa, Homo sapiens; identical to SEQ ID NO: 758786

SEQ ID NO: 758792 - protein, 251 aa, Homo sapiens
MPFPSSGLEKWAAQYACSLLGHALQRHGASPELQKQIRQLESHLSLGRKLLRLGNSADALESAKRAVHLSDVVLRFCITVSHLNRALYFACDNVLWAGKSGLAPRVDQEKWAQRSFRYYLFSLIMNLSRDAYEIRLLMEQESSACSRRLKGSGGGVPGGSETGGLGGPGTPGGGLPQLALKLRLQVLLLARVLRGHPPLLLDVVRNACDLFIPLDKLGLWRCGPGIVGLCGLVSSILSILTLIYPWLRLKP

SEQ ID NO: 758793 - protein, 124 aa, Homo sapiens
RDHSRAEIKGCFLFLLKPGCFFGVHPPEPGAQALAESRDCFRKAHLPSVGRQPGHLNSTAEAASLNLLILQRIDLYQLIRERKKNHLVILNHMRSPVPSANNCKEMQLEECIEITTGSSFLMRK

SEQ ID NO: 758794 - protein, 468 aa, Homo sapiens
MEPPPSSPTLSAAASATLASSCGEAVASGLQPAVRRLLQVKPEQVLLLPQPQAQNEEAAASSAQARLLQFRPDLRLLQPPTASDGATSRPELHPVQPLALHVKAKKQKLGPSLDQSVGPRGAVETGPRASRVVKLEGPGPALGYFRGDEKGKLEAEEVMRDSMQGGAGKSPAAIREGVIKTEEPERLLEDCRLGAEPASNGLVHGSAEVILAPTSGAFGPHQQDLRIPLTLHTVPPGARIQFQGAPPSELIRLTKVPLTPVPTKMQSLLEPSVKIETKDVPLTVLPSDAGIPDTPFSKDRNGHVKRPMNAFMVWARIHRPALAKANPAANNAEISVQLGLEWNKLSEEQKKPYYDEAQKIKEKHREEFPGWVYQPRPGKRKRFPLSVSNVFSGTTQNIISTNPTTVYPYRSPTYSVVIPSLQNPITHPVVHALTVGLPLAMEIFRVQCQNALVIMKTGTQNMRVSFQL

SEQ ID NO: 758795 - protein, 104 aa, Homo sapiens
MVGLLSGMELRSEDPAQAIPFCDETIAMETKVLGQRGLRLQDQDWCLSGRPLAKASRSGCFLNESAISCGVLTPSRRRSLFQCQLPRETYLAHPYKWCLALVNS

SEQ ID NO: 758796 - protein, 739 aa, Homo sapiens
  misc_feature (558)..(558): Xaa can be any naturally occurring amino acid
  misc_feature (561)..(561): Xaa can be any naturally occurring amino acid
  misc_feature (565)..(565): Xaa can be any naturally occurring amino acid
  misc_feature (569)..(570): Xaa can be any naturally occurring amino acid
MEPPPSSPTLSAAASATLASSCGEAVASGLQPAVRRLLQVKPEQVLLLPQPQAQNEEAAASSAQARLLQFRPDLRLLQPPTASDGATSRPELHPVQPLALHVKAKKQKLGPSLDQSVGPRGAVETGPRASRVVKLEGPGPALGYFRGDEKGKLEAEEVMRDSMQGGAGKSPAAIREGVIKTEEPERLLEDCRLGAEPASNGLVHGSAEVILAPTSGAFGPHQQDLRIPLTLHTVPPGARIQFQGAPPSELIRLTKVPLTPVPTKMQSLLEPSVKIETKDVPLTVLPSDAGIPDTPFSKDRNGHVKRPMNAFMVWARIHRPALAKANPAANNAEISVQLGLEWNKLSEEQKKPYYDEAQKIKEKHREEFPGWVYQPRPGKRKRFPLSVSNVFSGTTQNIISTNPTTVYPYRSPTYSVVIPSLQNPITHPVGETSPAIQLPTPAVQSPSPVTLFQPSVSSAAQVAVQDPSLPVYPALPPQRFTGPSQTDTHQLHSEATHTVKQPTPVSLESANRISSSASTAHARFATSTIQPPREYSSVSPCPRSAPIPQGAFLSPPQXFSXTNPXTIWXXLTPGPPFPPLGPIPGPALVFGTPPRFSFHHPYFLPGPHYFPSSTCPYSRPPFGYGNFPSSMPECLSYYEDRYPKHEGIFSTLNRDYSFRDYSSECTHSENSRSCENMNGTSYYNSHSHSGEENLNPVPQLDIGTLENVFTAPTSTPSSIQQVNVTDSDEEEEEKVLRDL

SEQ ID NO: 758797 - protein, 104 aa, Homo sapiens; identical to SEQ ID NO: 758795

SEQ ID NO: 758798 - protein, 753 aa, Homo sapiens [sequence omitted]

SEQ ID NO: 758799 - protein, 753 aa, Homo sapiens [sequence omitted]

SEQ ID NO: 758800 - protein, 448 aa, Homo sapiens
MEKCCRGKEQSLLCIQQGIPDTPFSKDRNGHVKRPMNAFMVWARIHRPALAKANPAANNAEISVQLGLEWNKLSEEQKKPYYDEAQKIKEKHREEFPGWVYQPRPGKRKRFPLSVSNVFSGTTQNIISTNPTTVYPYRSPTYSVVIPSLQNPITHPVGETSPAIQLPTPAVQSPSPVTLFQPSVSSAAQVAVQDPSLPVYPALPPQRFTGPSQTDTHQLHSEATHTVKQPTPVSLESANRISSSASTAHARFATSTIQPPREYSSVSPCPRSAPIPQASPIPHPHVYQPPPLGHPATLFGTPPRFSFHHPYFLPGPHYFPSSTCPYSRPPFGYGNFPSSMPECLSYYEDRYPKHEGIFSTLNRDYSFRDYSSECTHSENSRSCENMNGTSYYNSHSHSGEENLNPVPQLDIGTLENVFTAPTSTPSSIQQVNVTDSDEEEEEKVLRDL

SEQ ID NO: 758801 - protein, 233 aa, Homo sapiens
MSAKRAELKKTHLSKNYKAVCLELKPEPTKTFDYKAVKQEGRFTKAGVTQDLKNELREVREELKEKMEEIKQIKDLMDKDFDKLHEFVEIMKEMQKDMDEKMDILINTQKNYKLPLRRAPKEQQELRLMGKTHREPQLRPKKMDGASGVNGAPCALHKKTMAPQKTKQGSLDPLHHCGTCCEKCLLCALKNNYNRGNIPSEASGLYKGGEEPVTTQPSVGHAVPAPKSQTEGR

SEQ ID NO: 758802 - protein, 247 aa, Homo sapiens
MSAKRAELKKTHLSKNYKAVCLELKPEPTKTFDYKAVKQEGRFTKAGVTQDLKNELREVREELKEKMEEIKQIKDLMDKDFDKLHEFVEIMKEMQKDMDEKMDILINTQKNYKLPLRRAPKEQQELRLMGKTHREPQLRPKKMDGASGVNGAPCALHKKTMAPQKTKQGSLDPLHHCGTCCVYTLQWDCWIYGSSIFSFLRNNLQTVLHSGCTNLHSHQQCTKIPFSPGQVLNGCKLMSNVFGASDK

SEQ ID NO: 758803 - protein, 224 aa, Homo sapiens
MSAKRAELKKTHLSKNYKAVCLELKPEPTKTFDYKAVKQEGRFTKAGVTQDLKNELREVREELKEKMEEIKQIKDLMDKDFDKLHEFVEIMKEMQKDMDEKMDILINTQKNYKLPLRRAPKEQQELRLMGKTHREPQLRPKKMDGASGVNGAPCALHKKTMAPQKTKQGSLDPLHHCGTCCEKCLLCALKNNYNRVGNIHTRSGHPFHPWLLELPSDLSVPQPR

SEQ ID NO: 758804 - protein, 212 aa, Homo sapiens
MSAKRAELKKTHLSKNYKAVCLELKPEPTKTFDYKAVKQEGRFTKAGVTQDLKNELREVREELKEKMEEIKQIKDLMDKDFDKLHEFVEIMKEMQKDMDEKMDILINTQKNYKLPLRRAPKEQQELRLMGKTHREPQLRPKKMDGASGVNGAPCALHKKTMAPQKTKQGSLDPLHHCGTCCEKCLLCALKNNYNRAQLQNLPAVPIHHLQAP

SEQ ID NO: 758805 - protein, 215 aa, Homo sapiens
MSAKRAELKKTHLVKERHCWTSKNYKAVCLELKPEPTKTFDYKAVKQEGRFTKAGVTQDLKNELREVREELKEKMEEIKQIKDLMDKDFDKLHEFVEIMKEMQKDMDEKMDILINTQKNYKLPLRRAPKEQQELRLMGKTHREPQLRPKKMDGASGVNGAPCALHKKTMAPQKTKQGSLDPLHHCGTCCEKCLLCALKNNYNRGIYAAVGLLDLW

SEQ ID NO: 758806 - protein, 207 aa, Homo sapiens
MSAKRAELKKTHLSKNYKAVCLELKPEPTKTFDYKAVKQEGRFTKAGVTQDLKNELREVREELKEKMEEIKQIKDLMDKDFDKLHEFVEIMKEMQKDMDEKMDILINTQKNYKLPLRRAPKEQQELRLMGKTHREPQLRPKKMDGASGVNGAPCALHKKTMAPQKTKQGSLDPLHHCGTCCEKCLLCALKNNYNRGIYAAVGLLDLW

SEQ ID NO: 758807 - protein, 243 aa, Homo sapiens
AGSGLRWGAESILAPQPPPPQQHQERPGAAAIGSARGQSTGKGPPQSPVFEGVYNNSRMLHFLTAVVGSTCDVKVKNGTTYEGIFKTLSSKFELAVDAVHRKASEPAGGPRREDIVDTMVFKPSDVMLVHFRNVDFNYATKDKFTDSAIAMNSKVNGEHKEKVLQRWERGDSNSDDYDLESNMSNGWDPNEMFKFNEENYGVKTTYDSSLSSYTVPLEKDNSEEFRQRELRAAQLAPEIESSP

SEQ ID NO: 758808 - protein, 222 aa, Homo sapiens
AGSGLRWGAESILAPQPPPPQQHQERPGAAAIGSARGQSTGKGPPQSPVFEGVYNNSRMLHFLTAVVGSTCDVKVKNGTTYEGIFKTLSSKFELAVDAVHRKASEPAGGPRREDIVDTMVFKPSDVMLVHFRNVDFNYATKDKFTDSAIAMNSKVNGEHKEKSNGWDPNEMFKFNEENYGVKTTYDSSLSSYTVPLEKDNSEEFRQRELRAAQLAPEIESSP

SEQ ID NO: 758809 - protein, 99 aa, Homo sapiens
KGIVGVEDDTMAGKLRVVGDVGRIGRGGKSEGYELESDMSNGWDPNEMFKFNEENYGVKTTYDSSLSSYTVPLEKDNSEEFRQRELRAAQLAPEIESSP

SEQ ID NO: 758810 - protein, 504 aa, Homo sapiens
MSKAIAFEIIQKYEPIEEVRKAHQMSLEGFTRYMDSRECLLFKNECRKVYQDMTHPLNDYFISSSHNTYLVSDQLLGPSDLWGYVSALVKGCRCLEIDCWDGAQNEPVVYHGYTLTSKLLFKTVIQAIHKYAFMTSDYPVVLSLENHCSTAQQEVMADNLQATFGESLLSDMLDDFPDTLPSPEALKFKILVKNKKIGTLKETHERKGSDKRGDNQDKETGVKKLPGVMLFKKKKTRKLKIALALSDLVIYTKAEKFKSFQHSRLYQQFNENNSIGETQARKLSKLRVHEFIFHTRKFITRIYPKATRADSSNFNPQEFWNIGCQMVALNFQTPGLPMDLQNGKFLDNGGSGYILKPHFLRESKSYFNPSNIKEGMPITLTIRLISGIQLPLTHSSSNKGDSLVIIEVFGVPNDQMKQQTRVIKKNAFSPRWNETFTFIIHVPELALIRFVVEGQGLIAGNEFLGQYTLPLLCMNKGYRRIPLFSRMGESLEPASLFVYVWYVR

SEQ ID NO: 758811 - protein, 504 aa, Homo sapiens; identical to SEQ ID NO: 758810

SEQ ID NO: 758812 - protein, 343 aa, Homo sapiens
MGALVKGCRCLEIDCWDGAQNEPVVYHGYTLTSKLLFKTVIQAIHKYAFMTSDYPVVLSLENHCSTAQQEVMADNLQATFGESLLSDMLDDFPDTLPSPEALKFKILVKNKKIGTLKETHERKGSDKRGDNQDKETGVKKLPGVMLFKKKKTRKLKIALALSDLVIYTKAEKFKSFQHSRLYQQFNENNSIGETQARKLSKLRVHEFIFHTRKFITRIYPKATRADSSNFNPQEFWNIGCQMVALNFQTPGLPMDLQNGKFLDNGGSGYILKPHFLRESKSYFNPSNIKEGMPITLTIRLISGIQLPLTHSSSNKGYRRIPLFSRMGESLEPASLFVYVWYVR

SEQ ID NO: 758813 - protein, 204 aa, Homo sapiens
MSKAIAFEIIQKYEPIEEVRKAHQMSLEGFTRYMDSRECLLFKNECRKVYQDMTHPLNDYFISSSHNTYLVSDQLLGPSDLWGYVSALVKGCRCLEIDCWDGAQNEPVVYHGYTLTSKLLFKTVIQAIHKYAFMTSDYPVVLSLENHCSTAQQEVMADNLQATFGESLLSDMLDDFPDTLPSPELLVQDGMKHSHLLFMSQNWH

SEQ ID NO: 758814 - protein, 420 aa, Homo sapiens
MGALVKGCRCLEIDCWDGAQNEPVVYHGYTLTSKLLFKTVIQAIHKYAFMTSDYPVVLSLENHCSTAQQEVMADNLQATFGESLLSDMLDDFPDTLPSPEALKFKILVKNKKIGTLKETHERKGSDKRGDNQDKETGVKKLPGVMLFKKKKTRKLKIALALSDLVIYTKAEKFKSFQHSRLYQQFNENNSIGETQARKLSKLRVHEFIFHTRKFITRIYPKATRADSSNFNPQEFWNIGCQMVALNFQTPGLPMDLQNGKFLDNGGSGYILKPHFLRESKSYFNPSNIKEGMPITLTIRLISGIQLPLTHSSSNKGDSLVIIEVFGVPNDQMKQQTRVIKKNAFSPRWNETFTFIIHVPELALIRFVVEGQGLIAGNEFLGQYTLPLLCMNKGYRRIPLFSRMGESLEPASLFVYVWYVR

SEQ ID NO: 758815 - protein, 480 aa, Homo sapiens
MSLEGFTRYMDSRECLLFKNECRKVYQDMTHPLNDYFISSSHNTYLVSDQLLGPSDLWGYVSALVKGCRCLEIDCWDGAQNEPVVYHGYTLTSKLLFKTVIQAIHKYAFMTSDYPVVLSLENHCSTAQQEVMADNLQATFGESLLSDMLDDFPDTLPSPEALKFKILVKNKKIGTLKETHERKGSDKRGDNQDKETGVKKLPGVMLFKKKKTRKLKIALALSDLVIYTKAEKFKSFQHSRLYQQFNENNSIGETQARKLSKLRVHEFIFHTRKFITRIYPKATRADSSNFNPQEFWNIGCQMVALNFQTPGLPMDLQNGKFLDNGGSGYILKPHFLRESKSYFNPSNIKEGMPITLTIRLISGIQLPLTHSSSNKGDSLVIIEVFGVPNDQMKQQTRVIKKNAFSPRWNETFTFIIHVPELALIRFVVEGQGLIAGNEFLGQYTLPLLCMNKGYRRIPLFSRMGESLEPASLFVYVWYVR

SEQ ID NO: 758816 - protein, 125 aa, Homo sapiens
MLSVQPDTKPKGCAGCNRKIKDRYLLKALDKYWHEDCPKCACCDCRWERLFGVTGNCAACSKLIPAFEMVMRAKDNVYHLDCFACQLCNQRFCVGDKFFLKNNMILCQTDYEEGLMKEGYAPQVR

SEQ ID NO: 758817 - protein, 145 aa, Homo sapiens
MLSVQPDTKPKGCAGCNRKIKDRYLLKALDKYWHEDCLKCACCDCRLGEVGSTLYTKANLILCRRDYLRLFGVTGNCAACSKLIPAFEMVMRAKDNVYHLDCFACQLCNQRFCVGDKFFLKNNMILCQTDYEEGLMKEGYAPQVR

SEQ ID NO: 758818 - protein, 145 aa, Homo sapiens; identical to SEQ ID NO: 758817

SEQ ID NO: 758819 - protein, 125 aa, Homo sapiens; identical to SEQ ID NO: 758816

SEQ ID NO: 758820 - protein, 145 aa, Homo sapiens; identical to SEQ ID NO: 758817

SEQ ID NO: 758821 - protein, 145 aa, Homo sapiens; identical to SEQ ID NO: 758817

SEQ ID NO: 758822 - protein, 125 aa, Homo sapiens; identical to SEQ ID NO: 758816

SEQ ID NO: 758823 - protein, 205 aa, Homo sapiens
TRVLVCLCASVCIMYACVCTPVHVAIWACTRVVRYMYVCVLLFMHVGGCACICVRGHGLQLGNLSVGPGPLRDPGLPAGCGQPRSPLTPCRRLVAEPGPTPPAAPASPACWSDSPGQHYFSSLAAAACPPASPSDAAGASSSSASSSSAASGPAPPRPVEGQLSARSRSNSAERLLEAVAATAAEEPPEAAPGRARAVENQYSFY

SEQ ID NO: 758824 - protein, 240 aa, Homo sapiens
PTSGEQGAETDPEAEPELELSDYPWFHGTLSRVKAAQLVLAGGPRNHGLFVIRQSETRPGEYVLTFNFQGKAKHLRLSLNGHGQCHVQHLWFQSVLDMLRHFHTHPIPLESGGSADITLRSYVRAQDPPPEPGPTPPAAPASPACWSDSPGQHYFSSLAAAACPPASPSDAAGASSSSASSSSAASGPAPPRPVEGQLSARSRSNSAERLLEAVAATAAEEPPEAAPGRARAVENQYSFY

SEQ ID NO: 758825 - protein, 130 aa, Homo sapiens
MIFPPSSRDQRELIECDNDSLAGTAEASGSFLRSAVKEDEKHGYALLLVPLFLYLISTSFYKYIRATLSLCISNKAKRGCNYTLLQSSVSPGNRNAKALKASLFADMVSWVPWAKSFCCPPLSPSKLGPF

SEQ ID NO: 758826 - protein, 130 aa, Homo sapiens; identical to SEQ ID NO: 758825

SEQ ID NO: 758827 - protein, 100 aa, Homo sapiens
LFQVINTLADHHHCGTGFRGSPWLHFIIAFPRSYKVFIILWTVYLWMSLLKTILWSRNGHDGSTDVQQRAWRSNRCRQKGNKIGLKDVITLWRHVETKVR

SEQ ID NO: 758828 - protein, 799 aa, Homo sapiens
DLYLLLLSYSDKKDHLTVEELAQFLKVEQKMNNVTTDYCLDIIKKFEVSEENKVKNVLGIEGFTNFMRSPACDIFNPLHHEVYQDMDQPLCNYYIASSHNTYLTGDQLLSQSKVDMYARVLQEGCRCVEVDCWDGPDGEPVVHHGYTLTSKILFRDVVETINKHAFVKNEFPVILSIENHCSIQQQRKIAQYLKGIFGDKLDLSSVDTGECKQLPSPQSLKGKILVKGKKLPYHLGDDAEEGEVSDEDSADEIEDECKFKLHYSNGTTEHQVESFIRKKLESLLKESQIRDKEDPDSFTVRALLKATHEGLNAHLKQSPDVKESGKKSHGRSLMTNFGKHKKTTKSRSKSYSTDDEEDTQQSTGKEGGQLYRLGRRRKTMKLCRELSDLVVYTNSVAAQDIVDDGTTGNVLSFSETRAHQVVQQKSEQFMIYNQKQLTRIYPSAYRIDSSNFNPLPYWNAGCQLVALNYQSEGRMMQLNRAKFKANGNCGYVLKPQQMCKGTFNPFSGDPLPANPKKQLILKVISGQQLPKPPDSMFGDRGEIIDPFVEVEIIGLPVDCCKDQTRVVDDNGFNPVWEETLTFTVHMPEIALVRFLVWDHDPIGRDFVGQRTVTFSSLVPGYRHVYLEGLTEASIFVHITINEIYGKNRQLQGLKGLFNKNPRHSSSENNSHYVRKRSIGDRILRRTASAPAKGRKKSKMGFQEMVEIKDSVSEATRDQDGVLRRTTRSLQARPVSMPVDRNLLGALSLPVSETAKDIEGKENSLDSSFCRPTEQAKAEMCKVPFPRQLECVMKMEISET

SEQ ID NO: 758829 - protein, 797 aa, Homo sapiens
DLYLLLLSYSDKKDHLTVEELAQFLKVEQKMNNVTTDYCLDIIKKFEVSEENKVKNVLGIEGFTNFMRSPACDIFNPLHHEVYQDMDQPLCNYYIASSHNTYLTGDQLLSQSKVDMYARVLQEGCRCVEVDCWDGPDGEPVVHHGYTLTSKILFRDVVETINKHAFVKNEFPVILSIENHCSIQQQRKIAQYLKGIFGDKLDLSSVDTGECKQLPSPQSLKGKILVKGKKLPYHLGDDAEEGEVSDEDSADEIEDECKFKLHYSNGTTEHQVESFIRKKLESLLKESQIRDKEDPDSFTVRALLKATHEGLNAHLKQSPDVKESGKKSHGRSLMTNFGKHKKTTKSRSKSYSTDDEEDTQQSTGKEGGQLYRLGRRRKTMKLCRELSDLVVYTNSVAAQDIVDDGTTGNVLSFSETRAHQVVQQKSEQFMIYNQKQLTRIYPSAYRIDSSNFNPLPYWNAGCQLVALNYQSEGRMMQLNRAKFKANGNCGYVLKPQQMCKGTFNPFSGDPLPANPKKQLILKVISGQQLPKPPDSMFGDRGEIIDPFVEVEIIGLPVDCCKDQTRVVDDNGFNPVWEETLTFTVHMPEIALVRFLVWDHDPIGRDFVGQRTVTFSSLVPGYRHVYLEGLTEASIFVHITINEIYGKWSPLILNPSYTILHFLGATKNRQLQGLKGLFNKNPRHSSSENNSHYVRKRSIGDRILRRTASAPAKGRKKSKMGFQEMVEIKDSVSEATRDQDGVLRRTTRSLQARPVSMPVDRNLLGALSLPVSETAKDIEGKENSLEKIKMAEEKGKQV

SEQ ID NO: 758830 - protein, 1487 aa, Homo sapiens
DLYLLLLSYSDKKDHLTVEELAQFLKVEQKMNNVTTDYCLDIIKKFEVSEENKVKNVLGIEGFTNFMRSPACDIFNPLHHEVYQDMDQPLCNYYIASSHNTYLTGDQLLSQSKVDMYARVLQEGCRCVEVDCWDGPDGEPVVHHGYTLTSKILFRDVVETINKHAFVKNEFPVILSIENHCSIQQQRKIAQYLKGIFGDKLDLSSVDTGECKQLPSPQSLKGKILVKGKKLPYHLGDDAEEGEVSDEDSADEIEDECKFKLHYSNGTTEHQVESFIRKKLESLLKESQIRDKEDPDSFTVRALLKATHEGLNAHLKQSPDVKESGKKSHGRSLMTNFGKHKKTTKSRSKSYSTDDEEDTQQSTGKEGGQLYRLGRRRKTMKLCRELSDLVVYTNSVAAQDIVDDGTTGNVLSFSETRAHQVVQQKSEQFMIYNQKQLTRIYPSAYRIDSSNFNPLPYWNAGCQLVALNYQSEGRMMQLNRAKFKANGNCGYVLKPQQMCKGTFNPFSGDPLPANPKKQLILKVISGQQLPKPPDSMFGDRGEIIDPFVEVEIIGLPVDCCKDQTRVVDDNGFNPVWEETLTFTVHMPEIALVRFLVWDHDPIGRDFVGQRTVTFSSLVPGYRHVYLEGLTEASIFVHITINEIYGKWSPLILNPSYTILHFLGATKNRQLQGLKGLFNKNPRHSSSENNSHYVRKRSIGDRILRRTASAPAKGRKKSKMGFQEMVEIKDSVSEATRDQDGVLRRTTRSLQARPVSMPVDRNLLGALSLPVSETAKDIEGKENSLVQIWIGNNLREDKDGRRKGKASIKDPHFLNFNKKLSSSSSALLHKDTSQGDTIVSTAHMSVTGEQLGMSSPRGGRTTSNATSNCQENPCPSKSLSPKQHLAPDPVVNPTQDLHGVKIKEKGNPEDFVEGKSILSGSVLSHSNLEIKNLEGNRGKGRAATSFSLSDVSMLCSDIPDLHSTAILQESVISHLIDNVTLTNENEPGSSISALIGQFDETNNQALTVVSHLHNTSVMSGHCPLPSLGLKMPIKHGFCKGKSKSSFLCSSPELIALSSSETTKHATNTVYETTCTPISKTKPDDDLSSKAKTAALESNLPGSPNTSRGWLPKSPTKGEDWETLKSCSPASSPDLTLEDVIADPTLCFNSGESSLVEIDGESENLSLTTCEYRREGTSQLASPLKLKYNQGVVEHFQRGLRNGYCKETLRPSVPEIFNNIQDVKTQSISYLAYQGAGFVHNHFSDSDAKMFQTCVPQQSSAQDMHVPVPKQLAHLPLPALKLPSPCKSKSLGDLTSEDIACNFESKYQCISKSFVTTGIRDKKGVTVKTKSLEPIDALTEQLRKLVSFDQEDNCQVLYSKQDANQLPRALVRKLSSRSQSRVRNIASRAKEKQEANKQKVPNPSNGAGVVLRNKPSAPTPAVNRHSTGSYIAGYLKNTKGGGLEGRGIPEGACTALHYGHVDQFCSDNSVLQTEPSSDDKPEIYFLLRL

SEQ ID NO: 758831 - protein, 1478 aa, Homo sapiens
DLYLLLLSYSDKKDHLTVEELAQFLKVEQKMNNVTTDYCLDIIKKFEVSEENKVKNVLGIEGFTNFMRSPACDIFNPLHHEVYQDMDQPLCNYYIASSHNTYLTGDQLLSQSKVDMYARVLQEGCRCVEVDCWDGPDGEPVVHHGYTLTSKILFRDVVETINKHAFVKNEFPVILSIENHCSIQQQRKIAQYLKGIFGDKLDLSSVDTGECKQLPSPQSLKGKILVKGKKLPYHLGDDAEEGEVSDEDSADEIEDECKFKLHYSNGTTEHQVESFIRKKLESLLKESQIRDKEDPDSFTVRALLKATHEGLNAHLKQSPDVKESGKKSHGRSLMTNFGKHKKTTKSRSKSYSTDDEEDTQQSTGKEGGQLYRLGRRRKTMKLCRELSDLVVYTNSVAAQDIVDDGTTGNVLSFSETRAHQVVQQKSEQFMIYNQKQLTRIYPSAYRIDSSNFNPLPYWNAGCQLVALNYQSEGRMMQLNRAKFKANGNCGYVLKPQQMCKGTFNPFSGDPLPANPKKQLILKVISGQQLPKPPDSMFGDRGEIIDPFVEVEIIGLPVDCCKDQTRVVDDNGFNPVWEETLTFTVHMPEIALVRFLVWDHDPIGRDFVGQRTVTFSSLVPGYRHVYLEGLTEASIFVHITINEIYGKWSPLILNPSYTILHFLGATKNRQLQGLKGLFNKNPRHSSSENNSHYVRKRSIGDRILRRTASAPAKGRKKSKMGFQEMVEIKDSVSEATRDQDGVLRRTTRSLQARPVSMPVDRNLLGALSLPVSETAKDIEGKENSLEKIKMAEEKGKQVYKDPHFLNFNKKLSSSSSALLHKDTSQGDTIVSTAHMSVTGEQLGMSSPRGGRTTSNATSNCQENPCPSKSLSPKQHLAPDPVVNPTQDLHGVKIKEKGNPEDFVEGKSILSGSVLSHSNLEIKNLEGNRGKGRAATSFSLSDVSMLCSDIPDLHSTAILQESVISHLIDNVTLTNENEPGSSISALIGQFDETNNQALTVVSHLHNTSVMSGHCPLPSLGLKMPIKHGFCKGKSKSSFLCSSPELIALSSSETTKHATNTVYETTCTPISKTKPDDDLSSKAKTAALESNLPGSPNTSRGWLPKSPTKGEDWETLKSCSPASSPDLTLEDVIADPTLCFNSGESSLVEIDGESENLSLTTCEYRREGTSQLASPLKLKYNQGVVEHFQRGLRNGYCKETLRPSVPEIFNNIQDVKTQSISYLAYQGAGFVHNHFSDSDAKMFQTCVPQQSSAQDMHVPVPKQLAHLPLPALKLPSPCKSKSLGDLTSEDIACNFESKYQCISKSFVTTGIRDKKGVTVKTKSLEPIDALTEQLRKLVSFDQEDNCQVLYSKQDANQLPRALVRKLSSRSQSRVRNIASRAKEKQEANKQKVPNPSNGAGVVLRNKPSAPTPAVNRHSTGSYIAGYLKNTKGGGLEGRGIPEGACTALHYGHVDQFCSDNSVLQTEPSSDDKPEIYFLLRL

SEQ ID NO: 758832 - protein, 58 aa, Homo sapiens
MSNSPEGTYGVELAVQFGRRVGCAQRSYAKGSWTGGLCSGKEISIPCTILVVEEPLID

SEQ ID NO: 758833 - protein, 103 aa, Homo sapiens
KNTLERALPSFIYIILEMDFRVSTGFLQNSSPGGARSPQASRIAVCFVPSLPNRFALFKGPTFRAAKDFLRAAPWSLRQPGMAFILGPGCGEVLTSLGVRGGG

SEQ ID NO: 758834 - protein, 402 aa, Homo sapiens
MSPCGPLNLSLAGEATTCAAPWVPNTSAVPPSGASPALPIFSMTLGAVSNLLALALLAQAAGRLRRRRSAATFLLFVASLLATDLAGHVIPGALVLRLYTAGRAPAGGACHFLGGCMVFFGLCPLLLGCGMAVERCVGVTRPLLHAARVSVARARLALAAVAAVALAVALLPLARVGRYELQYPGTWCFIGLGPPGGWRQALLAGLFASLGLVALLAALVCNTLSGLALLRARWRRRSRRPPPASGPDSRRRWGAHGPRSASASSASSIASASTFFGGSRSSGSARRARAHDVEMVGQLVGIMVVSCICWSPMLVLVALAVGGWSSTSLQRPLFLAVRLASWNQILDPWVYILLRQAVLRQLLRLLPPRAGAKGGPAGLGLTPSAWEASSLRSSRHSGLSHF

SEQ ID NO: 758835 - protein, 106 aa, Homo sapiens
SASTFFGGSRSSGSARRARAHDVEMVGQLVGIMVVSCICWSPMLVRGAPAPRATLLPAPSRHPPALCRPRTPGASILDSTKAPAPRGPTCPESQHRLLHLTSHPSS

SEQ ID NO: 758836 - protein, 360 aa, Homo sapiens
MTLGAVSNLLALALLAQAAGRLRRRRSAATFLLFVASLLATDLAGHVIPGALVLRLYTAGRAPAGGACHFLGGCMVFFGLCPLLLGCGMAVERCVGVTRPLLHAARVSVARARLALAAVAAVALAVALLPLARVGRYELQYPGTWCFIGLGPPGGWRQALLAGLFASLGLVALLAALVCNTLSGLALLRARWRRRSRRPPPASGPDSRRRWGAHGPRSASASSASSIASASTFFGGSRSSGSARRARAHDVEMVGQLVGIMVVSCICWSPMLVLVALAVGGWSSTSLQRPLFLAVRLASWNQILDPWVYILLRQAVLRQLLRLLPPRAGAKGGPAGLGLTPSAWEASSLRSSRHSGLSHF

SEQ ID NO: 758837 - protein, 132 aa, Homo sapiens [sequence omitted]

SEQ ID NO: 758838 - protein, 925 aa, Homo sapiens
MAWLRLQPLTSAFLHFGLVTFVLFLNGLRAEAGGSGDVPSTGQNNESCSGSSDCKEGVILPIWYPENPSLGDKIARVIVYFVALIYMFLGVSIIADRFMASIEVITSQEREVTIKKPNGETSTTTIRVWNETVSNLTLMALGSSAPEILLSLIEVCGHGFIAGDLGPSTIVGSAAFNMFIIIGICVYVIPDGETRKIKHLRVFFITAAWSIFAYIWLYMILAVFSPGVVQVWEGLLTLFFFPVCVLLAWVADKRLLFYKYMHKKYRTDKHRGIIIETEGDHPKGIEMDGKMMNSHFLDGNLVPLEGKEVDESRREMIRILKDLKQKHPEKDLDQLVEMANYYALSHQQKSRAFYRIQATRMMTGAGNILKKHAAEQAKKASSMSEVHTDEPEDFISKVFFDPCSYQCLENCGAVLLTVVRKGGDMSKTMYVDYKTEDGSANAGADYEFTEGTVVLKPGETQKEFSVGIIDDDIFEEDEHFFVRLSNVRIEEEQPEEGMPPAIFNSLPLPRAVLASPCVATVTILDDDHAGIFTFECDTIHVSESIGVMEVKVLRTSGARGTVIVPFRTVEGTAKGGGEDFEDTYGELEFKNDETVKTIHIKVIDDEAYEKNKNYFIEMMGPRMVDMSFQKGSCYVTDRKLTMEEEEAKRIAEMGKPVLGEHPKLEVIIEESYEFKTTVDKLIKKTNLALVVGTHSWRDQFMEAITVSAAGDEDEDESGEERLPSCFDYVMHFLTVFWKVLFACVPPTEYCHGWACFAVSILIIGMLTAIIGDLASHFGCTIGLKDSVTAVVFVAFGTSVPDTFASKAAALQDVYADASIGNVTGSNAVNVFLGIGLAWSVAAIYWALQGQEFHVSAGTLAFSVTLFTIFAFVCISVLLYRRRPHLGGELGGPRGCKLATTWLFVSLWLLYILFATLEAYCYIKGF

SEQ ID NO: 758839 - protein, 921 aa, Homo sapiens
MAWLRLQPLTSAFLHFGLVTFVLFLNGLRAEAGGSGDVPSTGQNNESCSGSSDCKEGVILPIWYPENPSLGDKIARVIVYFVALIYMFLGVSIIADRFMASIEVITSQEREVTIKKPNGETSTTTIRVWNETVSNLTLMALGSSAPEILLSLIEVCGHGFIAGDLGPSTIVGSAAFNMFIIIGICVYVIPDGETRKIKHLRVFFITAAWSIFAYIWLYMILAVFSPGVVQVWEGLLTLFFFPVCVLLAWVADKRLLFYKYMHKKYRTDKHRGIIIETEGDHPKGIEMDGKMMNSHFLDGNLVPLEGKEVDESRREMIRILKDLKQKHPEKDLDQLVEMANYYALSHQQKSRAFYRIQATRMMTGAGNILKKHAAEQAKKASSMSEVHTDEPEDFISKVFFDPCSYQCLENCGAVLLTVVRKGGDMSKTMYVDYKTEDGSANAGADYEFTEGTVVLKPGETQKEFSVGIIDDDIFEEDEHFFVRLSNVRIEEEQPEEGMPPAIFNSLPLPRAVLASPCVATVTILDDDHAGIFTFECDTIHVSESIGVMEVKVLRTSGARGTVIVPFRTVEGTAKGGGEDFEDTYGELEFKNDETVKTIRVKIVDEEEYERQENFFIALGEPKWMERGISGCTDRKLTMEEEEAKRIAEMGKPVLGEHPKLEVIIEESYEFKTTVDKLIKKTNLALVVGTHSWRDQFMEAITVSAAGDEDEDESGEERLPSCFDYVMHFLTVFWKVLFACVPPTEYCHGWACFAVSILIIGMLTAIIGDLASHFGCTIGLKDSVTAVVFVAFGTSVPDTFASKAAALQDVYADASIGNVTGSNAVNVFLGIGLAWSVAAIYWALQGQEFHVSAGTLAFSVTLFTIFAFVCISVLLYRRRPHLGGELGGPRGCKLATTWLFVSLWLLYILFATLEAYCYIKGF

SEQ ID NO: 758840 - protein, 847 aa, Homo sapiens
MAWLRLQPLTSAFLHFGLVTFVLFLNGLRAEAGGSGDVPSTGQNNESCSGSSDCKEGVILPIWYPENPSLGDKIARVIVYFVALIYMFLGVSIIADRFMASIEVITSQEREVTIKKPNGETSTTTIRVWNETVSNLTLMALGSSAPEILLSLIEVCGHGFIAGDLGPSTIVGSAAFNMFIIIGICVYVIPDGETRKIKHLRVFFITAAWSIFAYIWLYMILAVFSPGVVQVWEGLLTLFFFPVCVLLAWVADKRLLFYKYMHKKYRTDKHRGIIIETEGDHPKGIEMDGKMMNSHFLDGNLVPLEGKEVDESRREMIRILKDLKQKHPEKDLDQLVEMANYYALSHQQKSRAFYRIQATRMMTGAGNILKKHAAEQAKKASSMSEVHTDEPEDFISKVFFDPCSYQCLENCGAVLLTVVRKGGDMSKTMYVDYKTEDGSANAGADYEFTEGTVVLKPGETQKEFSVGIIDDDIFEEDEHFFVRLSNVRIEEEQPEEGMPPAIFNSLPLPRAVLASPCVATVTILDDDHAGIFTFECDTIHVSESIGVMEVKVLRTSGARGTVIVPFRTVEGTAKGGGEDFEDTYGELEFKNDETVKTIRVKIVDEEEYERQENFFIALGEPKWMERGISGCTDRKLTMEEEEAKRIAEMGKPVLGEHPKLEVIIEESYEFKTTVDKLIKKTNLALVVGTHSWRDQFMEAITVSAAGDEDEDESGEERLPSCFDYVMHFLTVFWKVLFACVPPTEYCHGWACFAVSILIIGMLTAIIGDLASHFGCTIGLKDSVTAVVFVAFGTSVPGESERCLNLQRGFYLVQMTPGLHLIIFHTISDLNLTEPLPLKCTKVNQRDE

SEQ ID NO: 758841 - protein, 318 aa, Homo sapiens
MRRNTKGKRISSLPLVNRNGWNVEYQDVTDRKLTMEEEEAKRIAEMGKPVLGEHPKLEVIIEESYEFKTTVDKLIKKTNLALVVGTHSWRDQFMEAITVSAAGDEDEDESGEERLPSCFDYVMHFLTVFWKVLFACVPPTEYCHGWACFAVSILIIGMLTAIIGDLASHFGCTIGLKDSVTAVVFVAFGTSVPDTFASKAAALQDVYADASIGNVTGSNAVNVFLGIGLAWSVAAIYWALQGQEFHVSAGTLAFSVTLFTIFAFVCISVLLYRRRPHLGGELGGPRGCKLATTWLFVSLWLLYILFATLEAYCYIKGF

SEQ ID NO: 758842 - protein, 284 aa, Homo sapiens
MEEEEAKRIAEMGKPVLGEHPKLEVIIEESYEFKTTVDKLIKKTNLALVVGTHSWRDQFMEAITVSAAGDEDEDESGEERLPSCFDYVMHFLTVFWKVLFACVPPTEYCHGWACFAVSILIIGMLTAIIGDLASHFGCTIGLKDSVTAVVFVAFGTSVPDTFASKAAALQDVYADASIGNVTGSNAVNVFLGIGLAWSVAAIYWALQGQEFHVSAGTLAFSVTLFTIFAFVCISVLLYRRRPHLGGELGGPRGCKLATTWLFVSLWLLYILFATLEAYCYIKGF

SEQ ID NO: 758843 - protein, 270 aa, Homo sapiens
PLGLATLSSEYACSDFLSLSILPYSEYARSDFLFGFFQNQSQTAPGAMNGDDAFARRPTVGAQIPEKIQKAFDDIAKYFSKEEWEKMKASEKIFYVYMKRKYEAMTKLGFKATLPPFMCNKRAEDFQGNDLDNDPNRGNQVERPQMTFGRLQGISPKIMPKKPAEEGNDSEEVPEASGPQNDGKELCPPGKPTTSEKIHERSGNREAQEKEERRGTAHRWSSQNTHNIGRFSLSTSMGAVHGTPKTITHNRDPKGGNMPGPTDCVRENSW

SEQ ID NO: 758844 - protein, 261 aa, Homo sapiens
PLGLATLSSEYACSDFLSLSILPYSEYARSDFLFGFFQNQSQTAPGAMNGDDAFARRPTVGAQIPEKIQKAFDDIAKYFSKEEWEKMKASEKIFYVYMKRKYEAMTKLGFKATLPPFMCNKRAEDFQGNDLDNDPNRGNQVERPQMTFGRLQGISPKIMPKKPAEEGNDSEEVPEASGPQNDGKELCPPGKPTTSEKIHERSGNREAQEKEERRGTAHRWSSQNTHNIGPKRGEHAWTHRLRERKQLVIYEEISDPEEDDE

SEQ ID NO: 758845 - protein, 235 aa, Homo sapiens
PLGLATLSSEYACSDFLSLSILPYSEYARSDFLFGFFQNQSQTAPGAMNGDDAFARRPTVGAQIPEKIQKAFDDIAKYFSKEEWEKMKASEKIFYVYMKRKYEAMTKLGFKATLPPFMCNKRAEDFQGNDLDNDPNRGNQVERPQMTFGRLQGISPKIMPKKPAEEGNDSEEVPEASGPQNDGKELCPPGKPTTSEKIHERSGPKRGEHAWTHRLRERKQLVIYEEISDPEEDDE

SEQ ID NO: 758846 - protein, 217 aa, Homo sapiens
PLGLATLSSEYACSDFLSLSILPYSEYARSDFLFGFFQNQSQTAPGAMNGDDAFARRPTVGAQIPEKIQKAFDDIAKYFSKEEWEKMKASEKIFYVYMKRKYEAMTKLGFKATLPPFMCNKRAEDFQGNDLDNDPNRGNQVERPQMTFGRLQGISPKIMPKKPAEEGNDSEEVPEASGPQNDGKELCPPGKPTTSEKIHERSGVLQRYCRFSSRPLQ

SEQ ID NO: 758847 - protein, 206 aa, Homo sapiens
PPTLQPPALQPTPLPVAPPLTPGLGHKESALAPTAAPALPPALAADQAPAPSPAPAPTVAEPSPPVSAPAPALRPSRPARAGTRVPVQPGARPVRMACMEMVLANELQLPCLTAVVEGVVAAGPLRLGQLTTRARHWLPFQVLNSCPCKCYCHHQPRHRRLPRNVSAWLSTSTNHLGEPPWVATIKLSGSLVAKLEHYDLQATHSN

SEQ ID NO: 758848 - protein, 224 aa, Homo sapiens
MGNLQSEPSAGGGSRKVQPSDRAPDSRRTSLVEPEMTSQAMRLTRGLGVWFPGSATPPGLMVPREPQASPSTLPLTLERPSPVMPPPEEAAAVSAPPPAPAGTLLPGPSKWQKPAGTPVPRIRRLLEASHRGQGDPPSLRPLKPPPPPRQLSVKDTVPRAPSQFPPPLETWKPPPPLPSERQPADRRITPALATPASPPTESQAGPRNQGQTAGRARGGAPPHA

SEQ ID NO: 758849 - protein, 338 aa, Homo sapiens
MGNLQSEPSAGGGSRKVQPSDRAPDSRRTSLVEPEMTSQAMRLTRGLGVWFPGSATPPGLMVPREPQASPSTLPLTLERPSPVMPPPEEAAAVSAPPPAPAGTLLPGPSKWQKPAGTPVPRIRRLLEASHRGQGDPPSLRPLKPPPPPRQLSVKDTVPRAPSQFPPPLETWKPPPPLPSERQPADRRITPALATPACVRARTRGCAHQDPHAQEQGFPCSPGRDPYRMACMEMVLANELQLPCLTAVVEGVVAAGPLRLGQLTTRARHWLPFQVLNSCPCKCYCHHQPRHRRLPRNVSAWLSTSTNHLGEPPWVATIKLSGSLVAKLEHYDLQATHSN

SEQ ID NO: 758850 - protein, 105 aa, Homo sapiens
NQKAWGRGTRPRSISRGDLVPCPAPGPGRRGLNSARLEDSVLNSCPCKCYCHHQPRHRRLPRNVSAWLSTSTNHLGEPPWVATIKLSGSLVAKLEHYDLQATHSN

SEQ ID NO: 758851 - protein, 422 aa, Homo sapiens
YGYEYLGNSPRLVITPLTDRCYRTLMGALKLNLGGAPEGPAGTGKTETTKDLAKALAKQCVVFNCSDGLDYKAMGKFFKGLAQAGAWACFDEFNRIEVEVLSVVAQQILSIQQAIIRKLKTFIFEGTELSLNPTCAVFITMNPGYAGRAELPDNLKALFRTVAMMVPDYALIGEISLYSMGFLDSRSLAQKIVATYRLCSEQLSSQHHYDYGMRAVKSVLTAAGNLKLKYPEENESVLLLRALLDVNLAKFLAQDVPLFQGIISDLFPGVVLPKPDYEVFLKVLNDNIKKMKLQPVPWFIGKIIQIYEMMLVRHGYMIVGDPMGGKTSAYKVLAAALGDLHAANQMEEFAVEYKIINPKAITMGQLYGCFDQVSHEWMDGVLANAFREQASSLSDDRKWIIFDGPVDAIWIENMNTVLDDNK

SEQ ID NO: 758852 - protein, 613 aa, Homo sapiens
FRGAGGRAGGRDRRRRRRRRRLTDNEGGGAALSGGGGGGGGERRGARGRGGAPAMDNQCTVQVRLELGHRAQLRKKPTTEGFTHDWMVFVRGPEQCDIQHFVEKVVFWLHDSFPKPRRVCKEPPYKVEESGYAGFIMPIEVHFKNKEEPRKVCFTYDLFLNLEGNPPVNHLRCEKLTFNNPTTEFRYKLLRAGGVMVMPEGADTVSRPSPDYPMLPTIPLSAFSDPKKTKPSHGSKDANKESSKTSKPHKVTKEHRERPRKDSESKSSSKELEREQAKSSKDTSRKLGEGRLPKEEKAPPPKAAFKEPKMALKETKLESTSPNPGPPPPPPPPPRASSKRPATADSPKPSAKKQKKSSSKGSRSAPGTSPRTSSSSSFSDKKPAKDKSSTRGEKVKAESEPREAKKALEVEESNSEDEASFKSESAQSSPSNSSSSSDSSSDSDFEPSQNHSQGPLRSMVEDLQSEESDEDDSSSGEEAAGKTNPGRDSRLSFSDSESDNSADSSLPSREPPPPQKPPPPNSKVSGRRSPESCSKPEKILKKGTYDKAYTDELVELHRRLMALRERNVLQQIVNLIEETGHFNVTNTTFDFDLFSLDETTVRKLQSCLEAVAT

SEQ ID NO: 758853 - protein, 153 aa, Homo sapiens
FRGAGGRAGGRDRRRRRRRRRLTDNEGGGAALSGGGGGGGGERRGARGRGGAPAMDNQCTVQVRLELGHRAQLRKKPTTEGFTHDWMVFVRGPEQCDIQHFVEKVVFWLHDSFPKPRRVCKEPPYKVEESGYAGFIMPIEVHFKNICVLPSLL

SEQ ID NO: 758854 - protein, 498 aa, Homo sapiens
TLNILSTLSNGNSSKQKIPADGVHRIRVDFKEEPRKVCFTYDLFLNLEGNPPVNHLRCEKLTFNNPTTEFRYKLLRAGGVMVMPEGADTVSRPSPDYPMLPTIPLSAFSDPKKTKPSHGSKDANKESSKTSKPHKVTKEHRERPRKDSESKSSSKELEREQAKSSKDTSRKLGEGRLPKEEKAPPPKAAFKEPKMALKETKLESTSPNPGPPPPPPPPPRASSKRPATADSPKPSAKKQKKSSSKGSRSAPGTSPRTSSSSSFSDKKPAKDKSSTRGEKVKAESEPREAKKALEVEESNSEDEASFKSESAQSSPSNSSSSSDSSSDSDFEPSQNHSQGPLRSMVEDLQSEESDEDDSSSGEEAAGKTNPGRDSRLSFSDSESDNSADSSLPSREPPPPQKPPPPNSKVSGRRSPESCSKPEKILKKGTYDKAYTDELVELHRRLMALRERNVLQQIVNLIEETGHFNVTNTTFDFDLFSLDETTVRKLQSCLEAVAT

SEQ ID NO: 758855 - protein, 86 aa, Homo sapiens
YPMLPTIPLSAFSDPKKTKPSHGSKVSEAEGPVAWERRGPAVVGLAPAPSLHWAGPSAPARSLGVFLFELSAHPSLRTAASLGFQE

SEQ ID NO: 758856 - protein, 85 aa, Homo sapiens
QAPRLWQLASTPLRMCVNSRVGCWGCGFRLTPQAPHLLVFRWSGTLVILTEKFQPKRKLMLCLSVEQNPPPAILIFKQVPHQPLF

SEQ ID NO: 758857 - protein, 125 aa, Homo sapiens
MERHTSHPNRKVPAKEEANAVPLCRAKPSPSYINLQASSPPATFLNIQTTKLPSVDHKPKECLGLLECMYANLQLQTQLAQQQMAVLEHLQASVTQLAPGRGSNNSSLPALSPNPLLNHLPQFSK

SEQ ID NO: 758858 - protein, 297 aa, Homo sapiens
MEEPTAVEGQVQLPSPHQGSLRKAVAAALALDGESTMGHRKKKRKESRPESIIIYRSDNEKTDEEPGESEGGDQPKEEEGDDFLDYPVDDDMWNLPLDSRYVTLTGTITRGKKKGQMVDIHVTLTEKELQELTKPKESSRETTPEGRMACQMGADRGPHVVLWTLICLPVVFILSFVVSFYYGTITWYNIFLVYNEERTFWHKISYCPCLVLFYPVLIMAMASSLGLYAAVVQLSWSWEAWWQAARDMEKGFCGWLCSKLGLEDCSPYSIVELLESDNISSTLSNKDPIQEVETSTV

SEQ ID NO: 758859 - protein, 297 aa, Homo sapiens; identical to SEQ ID NO: 758858

SEQ ID NO: 758860 - protein, 169 aa, Homo sapiens
MKGSRIELGDVTPHNIKQLKRLNQVIFPVSYNDKFYKDVLEVGELAKLAYFNDIAVGAVCCRVDHSQNQKRLYIMTLGCLAPYRRLGIGTKMLNHVLNICEKDGTFDNIYLHVQISNESAIDFYRKFGFEIIETKKNYYKRIEPADAHVLQKNLKVPSGQNADVQKTDN

SEQ ID NO: 758861 - protein, 169 aa, Homo sapiens; identical to SEQ ID NO: 758860

SEQ ID NO: 758862 - protein, 169 aa, Homo sapiens; identical to SEQ ID NO: 758860

SEQ ID NO: 758863 - protein, 169 aa, Homo sapiens; identical to SEQ ID NO: 758860

SEQ ID NO: 758864 - protein, 169 aa, Homo sapiens; identical to SEQ ID NO: 758860

SEQ ID NO: 758865 - protein, 169 aa, Homo sapiens; identical to SEQ ID NO: 758860

SEQ ID NO: 758866 - protein, 169 aa, Homo sapiens; identical to SEQ ID NO: 758860

SEQ ID NO: 758867 - protein, 130 aa, Homo sapiens
RSCTSFPRAAHFPAGRLMRERHDTGACAEPRVGLLFRLKGRCRGGRKMELGSCLEGGREAAEEEGEPEVKKRRLLCVEFASVASCDAAVAQCFLAENDWEMERALNSYFEPPVEESALERRPETISEPKT

SEQ ID NO: 758868 - protein, 409 aa, Homo sapiens
RSCTSFPRAAHFPAGRLMRERHDTGACAEPRVGLLFRLKGRCRGGRKMELGSCLEGGREAAEEEGEPEVKKRRLLCVEFASVASCDAAVAQCFLAENDWEMERALNSYFEPPVEESALERRPETISEPKTYVDLTNEETTDSTTSKISPSEDTQQENGSMFSLITWNIDGLDLNNLSERARGVCSYLALYSPDVIFLQEVIPPYYSYLKKRSSNYEIITGHEEGYFTAIMLKKSRVKLKSQEIIPFPSTKMMRNLLCVHVNVSGNELCLMTSHLESTRGHAAERMNQLKMVLKKMQEAPESATVIFAGDTNLRDREVTRCGGLPNNIVDVWEFLGKPKHCQYTWDTQMNSNLGITAACKLRFDRIFFRAAAEEGHIIPRSLDLLGLEKLDCGRFPSDHWGLLCNLDIIL

SEQ ID NO: 758869 - protein, 409 aa, Homo sapiens; identical to SEQ ID NO: 758868

SEQ ID NO: 758870 - protein, 286 aa, Homo sapiens [sequence omitted]

SEQ ID NO: 758871 - protein, 391 aa, Homo sapiens
RSCTSFPRAAHFPAGRLMRERHDTGACAEPRVGLLFRLKGRCRGGRKMELGSCLEGGREAAEEEGEPEVKKRRLLCVEFASVASCDAAVAQCFLAENDWEMERALNSYFEPPVEESALERRPETISEPKTYVDLTNEETTDSTTSKISPSEDTQQENLSERARGVCSYLALYSPDVIFLQEVIPPYYSYLKKRSSNYEIITGHEEGYFTAIMLKKSRVKLKSQEIIPFPSTKMMRNLLCVHVNVSGNELCLMTSHLESTRGHAAERMNQLKMVLKKMQEAPESATVIFAGDTNLRDREVTRCGGLPNNIVDVWEFLGKPKHCQYTWDTQMNSNLGITAACKLRFDRIFFRAAAEEGHIIPRSLDLLGLEKLDCGRFPSDHWGLLCNLDIIL

SEQ ID NO: 758872 - protein, 409 aa, Homo sapiens; identical to SEQ ID NO: 758868

SEQ ID NO: 758873 - protein, 322 aa, Homo sapiens
RSCTSFPRAAHFPAGRLMRERHDTGACAEPRVGLLFRLKGRCRGGRKMELGSCLEGGREAAEEEGEPEVKKRRLLCVEFASVASCDAAVAQCFLAENDWEMERALNSYFEPPVEESALERRPETISEPKTYVDLTNEETTDSTTSKISPSEDTQQENGSMFSLITWNIDGLDLNNLSERARGVCSYLALYSPDVIFLQEVIPPYYSYLKKRSSNYEIITGHEEGYFTAIMLKKSRVKLKSQEIIPFPSTKMMRNLLCVHVNVSGNELCLMTSHLESTRGHAAERMNQLKMVLKKMQEAPESATVIFAGDTNLRDREIVTKSV

SEQ ID NO: 758874 - protein, 409 aa, Homo sapiens; identical to SEQ ID NO: 758868

SEQ ID NO: 758875 - protein, 124 aa, Homo sapiens
RSCTSFPRAAHFPAGRLMRERHDTGACAEPRVGLLFRLKGRCRGGRKMELGSCLEGGREAAEEEGEPEVKKRRLLCVEFASVASCDAAVAQCFLAENDWEMERAPELLLRSLPCRTDELPMRTA

SEQ ID NO: 758876 - protein, 409 aa, Homo sapiens; identical to SEQ ID NO: 758868

SEQ ID NO: 758877 - protein, 303 aa, Homo sapiens
VERTNLIPCAFVFQRALNSYFEPPVEESALERRPETISEPKTYVDLTNEETTDSTTSKISPSEDTQQENLSERARGVCSYLALYSPDVIFLQEVIPPYYSYLKKRSSNYEIITGHEEGYFTAIMLKKSRVKLKSQEIIPFPSTKMMRNLLCVHVNVSGNELCLMTSHLESTRGHAAERMNQLKMVLKKMQEAPESATVIFAGDTNLRDREVTRCGGLPNNIVDVWEFLGKPKHCQYTWDTQMNSNLGITAACKLRFDRIFFRAAAEEGHIIPRSLDLLGLEKLDCGRFPSDHWGLLCNLDIIL

SEQ ID NO: 758878 - protein, 263 aa, Homo sapiens
RSCTSFPRAAHFPAGRLMRERHDTGACAEPRVGLLFRLKGRCRGGRKMELGSCLEGGREAAEEEGEPEVKKRRLLCVEFASVASCDAAVAQCFLAENDWEMERALNSYFEPPVEESALERRPETISEPKTYVDLTNEETTDSTTSKISPSEDTQQENGSMFSLITWNIDGLDLNNLSERARGVCSYLALYSPDVIFLQEVIPPYYSYLKKRSSNYEIITGHEEGYFTAIMLKKSRVKLKSQEIIPFPSTKMMRNLLCVHPRGL

SEQ ID NO: 758879 - protein, 263 aa, Homo sapiens; identical to SEQ ID NO: 758878

SEQ ID NO: 758880 - protein, 230 aa, Homo sapiens
MPLPDTMFCAQQIHIPPELPDILKQFTKAAIRTQPADVLRWSAGYFSALSRGDPLPVKDRMEMPTATQKTDTGLTQGLLKVLHKQCHHKRYVELTDLEQKWKNLCLPKEKFKALLQLDPCENKIKWINFLALGCSMLGGSLNTALKHLCEILTDDPEGGPARIPFKTFSYVYRYLARLDSDVSPLETESYLASLKENIDARKNGMIGLSDFFFPKRKLLESIENSEDVGH

SEQ ID NO: 758881 - protein, 230 aa, Homo sapiens; identical to SEQ ID NO: 758880

SEQ ID NO: 758882 - protein, 230 aa, Homo sapiens; identical to SEQ ID NO: 758880

SEQ ID NO: 758883 - protein, 241 aa, Homo sapiens
MMPPRMQATAPGAGAQVIRQPPPPFLCQWSLRSVPCPTCPSRPRLLVPSTSFPLLPSNSHPLCPPWAEPLDSMVPLFPPSSVIHCHSNPPVLVEDRSSQAIPSVRLILDTILAGVCSHMDDTVLCPQLSSWCPQPLLLHRHPGHAGPLLLPDPRTSSLLLCSLMRLLRLTEPPGTWVVPSHSKSMSQASKELGPCAAATSPTTFLRSQVIKKEKPMHIAPIFSPRNKATFIIRFGALCTRK

SEQ ID NO: 758884 - protein, 230 aa, Homo sapiens; identical to SEQ ID NO: 758880

SEQ ID NO: 758885 - protein, 304 aa, Homo sapiens
GGAGVQRPGSVCSRCPAEVCRPHTPAHSSRGEARLVISSEHVVRLLRESECRFARRPSVRALSRSQHSSPELHGQYAGMPSCDHRELRIRDSQPGWTVRSALVRGGRNFVHGVWSMERGSSFAAKWTRDVKMPYGHSQQQQTPGSASQGTPEGFWHYSYCHHKRYVELTDLEQKWKNLCLPKEKFKALLQLDPCENKIKWINFLALGCSMLGGSLNTALKHLCEILTDDPEGGPARIPFKTFSYVYRYLARLDSDVSPLETESYLASLKENIDARKNGMIGLSDFFFPKRKLLESIENSEDVGH

SEQ ID NO: 758886 - protein, 158 aa, Homo sapiens
RPQTFLFQTASLEENGKVYGNWTFGTIVFTVLVFTVTLKLALDTRFWTWINHFVIWGSLAFYVFFSFFWGGIIWPFLKQQRMYFVFAQMLSSVSTWLAIILLIFISLFPEILLIVLKNVRRRSARRNLSCRRASDSLSARPSVRPLLLRTFSDESNVL

SEQ ID NO: 758887 - protein, 260 aa, Homo sapiens
TAGGRPSSGSRQRFQVQFQGLAGSPSRRARSGQRGPDRRLLWGPRSWEAASGSPRRRMGCRHSRLSSCKPPKKKRQEPEPEQPPRPEPHELGPLNGDTAITVQLCASEEAERHQKDITRILQQHEEEKKKWAQQVEKERELELRDRLDEQQRVLGTGASLVVVSPFIYQSWNLIPAQMRKPRHGAVPRVESRSHLSSGSYPLLCFSLQALENQICDLIFLSLALTHLVSFSFLLPALTPPPTAPDPRPRLLQPGAQLPHQ

SEQ ID NO: 758888 - protein, 194 aa, Homo sapiens
GGRPPQLRLKTALPGSVSGSRRQPQPAGAERAAGPGSQAPLGAPELGSGVREPPEEDGLQTQQAEQLQTPEKGKGRRRRSLLSEERGVRNRSAAEDSAPRALSGRPGIPDGEPGEASSETREALLGGALYPGPSRTKQPSLQTRHPGQGKAADSRCLGWGDVVCLWQVPSAFGLGLFAVWPWTSDLTSLGLRLP

SEQ ID NO: 758889 - protein, 353 aa, Homo sapiens
TAGGRPSSGSRQRFQVQFQGLAGSPSRRARSGQRGPDRRLLWGPRSWEAASGSPRRRMGCRHSRLSSCKPPKKKRQEPEPEQPPRPEPHELGPLNGDTAITVQLCASEEAERHQKDITRILQQHEEEKKKWAQQVEKERELELRDRLDEQQRVLEGKNEEALQVLRASYEQEKEALTHSFREASSTQQETIDRLTSQLEAFQAKMKRVEESILSRNYKKHIQDYGSPSQFWEQELESLHFVIEMKNERIHELDRRLILMETVKEKNLILEEKITTLQQENEDLHVRSRNQVVLSRQLSEDLLLTREALEKEVQLRRQLQQEKEELLYRVLGANASPAFPLAPVTPTEVSFLAT

SEQ ID NO: 758890 - protein, 270 aa, Homo sapiens
TAGGRPSSGSRQRFQVQFQGLAGSPSRRARSGQRGPDRRLLWGPRSWEAASGSPRRRMGCRHSRLSSCKPPKKKRQEPEPEQPPRPEPHELGPLNGDTAITVQLCASEEAERHQKDITRILQQHEEEKKKWAQQVEKERELELRDRLDEQQRVLEGKNEEALQVLRASYEQEKEALTHSFREASSTQQETIDRLTSQLEAFQAKMKRVEESILSRNYKKHIQDYGSPSQFWEQELESLHFVIEMKNERIHELEREKSDIGGKNYDPATGK

SEQ ID NO: 758891 - protein, 258 aa, Homo sapiens
SWCCCCEDIIQEYKNIAFYVKSKVRRSCYESPEKKWAQQVEKERELELRDRLDEQQRVLEGKNEEALQVLRASYEQEKEALTHSFREASSTQQETIDRLTSQLEAFQAKMKRVEESILSRNYKKHIQDYGSPSQFWEQELESLHFVIEMKNERIHELDRRLILMETVKEKNLILEEKITTLQQENEDLHVRSRNQVVLSRQLSEDLLLTREALEKEVQLRRQLQQEKEELLYRVLGANASPAFPLAPVTPTEVSFLAT

SEQ ID NO: 758892 - protein, 135 aa, Homo sapiens
HFGRLRRADHLRSGVQDQLGQHGKTLSLLKIQKLDRRLILMETVKEKNLILEEKITTLQQENEDLHVRSRNQVVLSRQLSEDLLLTREALEKEVQLRRQLQQEKEELLYRVLGANASPAFPLAPVTPTEVSFLAT

SEQ ID NO: 758893 - protein, 353 aa, Homo sapiens; identical to SEQ ID NO: 758889

SEQ ID NO: 758894 - protein, 160 aa, Homo sapiens
TAGGRPSSGSRQRFQVQFQGLAGSPSRRARSGQRGPDRRLLWGPRSWEAASGSPRRRMGCRHSRLSSCKPPKKKRQEPEPEQPPRPEPHELGPLNGDTAITVQLCASEEAERHQKDITRILQQHEEEKKKWAQQVSPGAPTPCLSPAQLTLVNPRVSAYP

SEQ ID NO: 758895 - protein, 213 aa, Homo sapiens
TAGGRPSSGSRQRFQVQFQGLAGSPSRRARSGQRGPDRRLLWGPRSWEAASGSPRRRMGCRHSRLSSCKPPKKKRQEPEPEQPPRPEPHELGPLNGDTAITVQLCASEEAERHQKDITRILQQHEEEKKKWAQQVEKERELELRDRLDEQQRVLEGKNEEALQGKGRDVPLAKVVGGASFWPHLPSSPGHSHCSLPVCLIHKQLTQIYRILGP

SEQ ID NO: 758896 - protein, 127 aa, Homo sapiens
MGRKEHESPSQPHMCGWEDSQKPSVPSHGPKTPSCKGVKAPHSSRPRAWKQDLEQSLAAAYVPVVVDSKGQNPDKLRFNFYTSQYSNSLNPFYTLQKPTCGYLYRRDTDHTRKRFDVPPANLVLWRS

SEQ ID NO: 758897 - protein, 201 aa, Homo sapiens
MGNVMEGKSVEELSSTECHQWYKKFMTECPSGQLTLYEFRQFFGLKNLSPSASQYVEQMFETFDFNKDGYIDFMEYVAALSLVLKGKVEQKLRWYFKLYDVDGNGCIDRDELLTIIQAIRAINPCSDTTMTAEEFTDTVFSKIDVNGDGELSLEEFIEGVQKDQMLLDTLTRSLDLTRIVRRLQNGEQDEEGADEAAEAAG

SEQ ID NO: 758898 - protein, 201 aa, Homo sapiens; identical to SEQ ID NO: 758897

SEQ ID NO: 758899 - protein, 166 aa, Homo sapiens
MVFMQQVFFFFMTIRNLKLQSSCSHGDIDIAMGNVMEGKSVEELSSTECHQWYKKFMTECPSGQLTLYEFRQFFGLKNLSPSASQYVEQMFETFDFNKDGYIDFMEYVAALSLVLKGKVEQKLRWYFKLYDVDGNGCIDRDELLTIIQVQRARPGCGAAVWGGTRN

SEQ ID NO: 758900 - protein, 87 aa, Homo sapiens
MGNVMEGKSVEELSSTECHQWYKKFMTECPSGQLTLYEFRQFFGLKNLSPSASQYVEQMFETFDFNKATYNILLDMRTGDRQGCLVP

SEQ ID NO: 758901 - protein, 122 aa, Homo sapiens
  misc_feature (1)..(1): Xaa can be any naturally occurring amino acid
XRPAYFIIMMFVCVSHHELYDVDGNGCIDRDELLTIIQAIRAINPCSDTTMTAEEFTDTVFSKIDVNGDGELSLEEFIEGVQKDQMLLDTLTRSLDLTRIVRRLQNGEQDEEGADEAAEAAG

SEQ ID NO: 758902 - protein, 201 aa, Homo sapiens; identical to SEQ ID NO: 758897

SEQ ID NO: 758903 - protein, 135 aa, Homo sapiens
MGNVMEGKSVEELSSTECHQWYKKFMTECPSGQLTLYEFRQFFGLKNLSPSASQYVEQMFETFDFNKDGYIDFMEYVAALSLVLKGKVEQKLRWYFKLYDVDGNGCIDRDELLTIIQVQRARPGCGAAVWGGTRN

SEQ ID NO: 758904 - protein, 121 aa, Homo sapiens
RSSFTPCSSWGRLGPWVHLGGGGRSPDLTPPRPHPDSPPCPGPQPSQDSARRRALWPEVTEARAAALAGCRELPPHQLVPPRPPPTCLLPACSRLIRPGPLPCQPGWACCGAGAWAVALGF

SEQ ID NO: 758905 - protein, 71 aa, Homo sapiens
KIPEMWLVSLPGSLLEDCPVPHASVGQGASPGFRIMLLLPADATISDHGLIRLLFKNCLRCSSDPEFQQES

SEQ ID NO: 758906 - protein, 418 aa, Homo sapiens
MIHSLFLINCSGDIFLEKHWKSVVSQSVCDYFFEAQEKAADVENVPPVISTPHHYLISIYRDKLFFVSVIQTEVPPLFVIEFLHRVADTFQDYFGECSEAAIKDNVVIVYELLEEMLDNGFPLATESNILKELIKPPTILRSVVNSITGSSNVGDTLPTGQLSNIPWRRAGVKYTNNEAYFDVVEEIDAIIDKSGSTVFAEIQGVIDACIKLSGMPDLSLSFMNPRLLDDVSFHPCIRFKRWESERVLSFIPPDGNFRLISYRVSSQNLVAIPVYVKHSISFKENSSCGRFDITIGPKQNMGKTIEGITVTVHMPKVVLNMNLTPTQGSYTFDPVTKVLTWDVGKITPQKLPSLKGLVNLQSGAPKPEENPSLNIQFKIQQLAISGLKVNRLDMYGEKYKPFKGVKYVTKAGKFQVRT

SEQ ID NO: 758907 - protein, 418 aa, Homo sapiens; identical to SEQ ID NO: 758906

SEQ ID NO: 758908 - protein, 392 aa, Homo sapiens
MIHSLFLINCSGDIFLEKHWKSVVSQSVCDYFFEAQEKAADVENVPPVISTPHHYLISIYRDKLFFVSVIQTEVPPLFVIEFLHRVADTFQDYFGECSEAAIKDNVVIVYELLEEMLDNGFPLATESNILKELIKPPTILRSVVNSITGSSNVGDTLPTGQLSNIPWRRAGVKYTNNEAYFDVVEEIDAIIDKSGSTVFAEIQGVIDACIKLSGMPDLSLSFMNPRLLDDVSFHPCIRFKRWESERVLSFIPPDGNFRLISYRVSSQNLVAIPVYVKHSISFKENSSCGRFDITIGPKQNMGKTIEGITVTVHMPKVVLNMNLTPTQGSYTFDPVTKVLTWDVGKITPQKLPSLKGLVNLQSGAPKPEENPSLNIQFKIQQLAISGKDKVDL

SEQ ID NO: 758909 - protein, 418 aa, Homo sapiens; identical to SEQ ID NO: 758906

SEQ ID NO: 758910 - protein, 360 aa, Homo sapiens
MLRDKLFFVSVIQTEVPPLFVIEFLHRVADTFQDYFGECSEAAIKDNVVIVYELLEEMLDNGFPLATESNILKELIKPPTILRSVVNSITGSSNVGDTLPTGQLSNIPWRRAGVKYTNNEAYFDVVEEIDAIIDKSGSTVFAEIQGVIDACIKLSGMPDLSLSFMNPRLLDDVSFHPCIRFKRWESERVLSFIPPDGNFRLISYRVSSQNLVAIPVYVKHSISFKENSSCGRFDITIGPKQNMGKTIEGITVTVHMPKVVLNMNLTPTQGSYTFDPVTKVLTWDVGKITPQKLPSLKGLVNLQSGAPKPEENPSLNIQFKIQQLAISGLKVNRLDMYGEKYKPFKGVKYVTKAGKFQVRT

SEQ ID NO: 758911 - protein, 418 aa, Homo sapiens; identical to SEQ ID NO: 758906

SEQ ID NO: 758912 - protein, 418 aa, Homo sapiens; identical to SEQ ID NO: 758906

SEQ ID NO: 758913 - protein, 312 aa, Homo sapiens
MIHSLFLINCSGDIFLEKHWKSVVSQSVCDYFFEAQEKAADVENVPPVISTPHHYLISIYRDKLFFVSVIQTEVPPLFVIEFLHRVADTFQDYFGECSEAAIKDNVVIVYELLEEMLDNGFPLATESNILKELIKPPTILRSVVNSITGSSNVGDTLPTGQLSNIPWRRAGVKYTNNEAYFDVVEEIDAIIDKSGSTVFAEIQGVIDACIKLSGMPDLSLSFMNPRLLDDVSFHPCIRFKRWESERVLSFIPPDGNFRLISYRVSSQKYVDASARICHHTYQVQLTFPCFFLKVEYLRSSLLTLTIAHQETQ

SEQ ID NO: 758914 - protein, 116 aa, Homo sapiens
MSSEETSCNHGWDCPYQEPSAVSAMRGEPHPHETSSWPSSTTLCPSLSLPAEALARQPRCTRSTFTTLSSPKESRLSDCHQRRIIRSSQGCPRHTGTRSSENIRGRCKWIPMPGHL

SEQ ID NO: 758915 - protein, 225 aa, Homo sapiens
MAGSSEEAPDYGRGVVIMDDWPGYDLNLFTYPQHYYGDLEYVLIPHGIIVDRIERLAKDIMKDIGYSDIMVLCVLKGGYKFCADLVEHLKNISRNSDRFVSMKVDFIRLKSYRNDQSMGEMQIIGGDDLSTLAGKNVLIVEDVVGTGRTMKALLSNIEKYKPNMIKVASLLVKRTSRSDGFRPDYAGFEIPNLFVVGYALDYNEYFRDLNHICVINEHGKEKYRV

SEQ ID NO: 758916 - protein, 159 aa, Homo sapiens
MKDIGYSDIMVLCVLKGGYKFCADLVEHLKNISRNSDRFVSMKVDFIRLKSYRNDQSMGEMQIIGGDDLSTLAGKDVVGTGRTMKALLSNIEKYKPNMIKVASLLVKRTSRSDGFRPDYAGFEIPNLFVVGYALDYNEYFRDLNHICVINEHGKEKYRV

SEQ ID NO: 758917 - protein, 208 aa, Homo sapiens
MDDWPGYDLNLFTYPQHYYGDLEYVLIPHGIIVDRIERLAKDIMKDIGYSDIMVLCVLKGGYKFCADLVEHLKNISRNSDRFVSMKVDFIRLKSYRNDQSMGEMQIIGGDDLSTLAGKNVLIVEDVVGTGRTMKALLSNIEKYKPNMIKVASLLVKRTSRSDGFRPDYAGFEIPNLFVVGYALDYNEYFRDLNHICVINEHGKEKYRV

SEQ ID NO: 758918 - protein, 173 aa, Homo sapiens
MAGSSEEAPDYGRGVVIMDDWPGYDLNLFTYPQHYYGDLEYVLIPHGIIVDRIERLAKDIMKDIGYSDIMVLCVLKGGYKFCADLVEHLKNISRNSDRFVSMKVDFIRLKSYRLRARLKRTTICDRGGLAFSQGYMSSCAPLQESPNTLWRGYLQVLIPCFHIRFQLPRSEQN

SEQ ID NO: 758919 - protein, 190 aa, Homo sapiens
MAGSSEEAPDYGRGVVIMDDWPGYDLNLFTYPQHYYGDLEYVLIPHGIIVDRIERLAKDIMKDIGYSDIMVLCVLKGGYKFCADLVEHLKNISRNSDRFVSMKVDFIRLKSYRNDQSMGEMQIIGGDDLSTLAGKNVLIVEDVVGTGRTMKALLSNIEKYKPNMIKVASLLVKRTSRSDGFRPDSHMRHQ

SEQ ID NO: 758920 - protein, 221 aa, Homo sapiens
RKVEKGGGRWREIMDDWPGYDLNLFTYPQHYYGDLEYVLIPHGIIVDRIERLAKDIMKDIGYSDIMVLCVLKGGYKFCADLVEHLKNISRNSDRFVSMKVDFIRLKSYRNDQSMGEMQIIGGDDLSTLAGKNVLIVEDVVGTGRTMKALLSNIEKYKPNMIKVASLLVKRTSRSDGFRPDYAGFEIPNLFVVGYALDYNEYFRDLNHICVINEHGKEKYRV

SEQ ID NO: 758921 - protein, 147 aa, Homo sapiens
KSTVPTWGPWSPGEPMSSESRQLLPSQTPFPPPFLKRPLGSCLQCLFSPSLLNSLSGFWLFLRSHQTKVISSPQDAQCSGWFPVPSPLAHLRQWTLLILLFLEILSTWTPPSPSLCTLPAAPPHPASIPGLCPPHPASIPGLCPLAP

SEQ ID NO: 758922 - protein, 92 aa, Homo sapiens
MTAEPVKNGILAKSQPNMDQECDVVLNSSIQNKTALFNCLPWSVMAVLTVIVCEEKLKKSEVFRLEDANSRILETAEHNNAIRVKNELVLIV

SEQ ID NO: 758923 - protein, 47 aa, Homo sapiens
MNCIGLYQNEQESKLTGIKRMLCTQRGYFNKIFVNIFRCKIKCVPWI

SEQ ID NO: 758924 - protein, 110 aa, Homo sapiens
HILRGRLCAQPQGPHTHTICSASQTCTSPTKPAPIEAHTSMHSQCAECHSSVHTHTHAYLLKHAYWFTLTEEYICTHICIDMQVHVLRPVQRYTHTHTHTHTHTHTHTRL

SEQ ID NO: 758925 - protein, 781 aa, Homo sapiens
MPGCCRYLKEFRTEQCPLFVQHKCTQHRPYTCFHWHFVNQRRRRSIRRRDGTFNYSPDVYCTKYDEATGLCPEGDECPFLHRTTGDTERRYHLRYYKTGICIHETDSKGNCTKNGLHCAFAHGPHDLRSPVYDIRELQAMEALQNGQTTVEGSIEGQSAGAASHAMIEKILSEEPRWQETAYVLGNYKTEPCKKPPRLCRQGYACPYYHNSKDRRRSPRKHKYRSSPCPNVKHGDEWGDPGKCENGDACQYCHTRTEQQFHPEIYKSTKCNDMQQSGSCPRGPFCAFAHVEQPPLSDDLQPSSAVSSPTQPGPVLYMPSAAGDSVPVSPSSPHAPDLSALLCRNSSLGSPSNLCGSPPGSIRKPPNLEGIVFPGESGLAPGSYKKAPGFEREDQVGAEYLKNFKCQAKLKPHSLEPRSQEQPLLQPKQDMLGILPAGSPLTSSISSSITSSLAATPPSPVGTSSVPGMNANALPFYPTSDTVESVIESALDDLDLNEFGVAALEKTFDNSTVPHPGSITIGGSLLQSSAPVNIPGSLGSSASFHSASPSPPVSLSSHFLQQPQGHLSQSENTFLGTSASHGSLGLNGMNSSIWEHFASGSFSPGTSPAFLSGPGAAELARLRQELDEANSTIKQWEESWKQAKQACDAWKKEAEEAGERASAAGAECELAREQRDALEVQVKKLQEELERLHAGPEPQALPAFSDLEALSLSTLYSLQKQLRAHLEQVDKAVFHMQSVKCLKCQEQKRAVLPCQHAALCELCAEGSECPICQPGRAHTLQS

SEQ ID NO: 758926 - protein, 429 aa, Homo sapiens
VGGGEEEGGVCMHVKRGCMSATTCPLVPAASGSDGLRTPQHHIHPLPEFSLSGGAKLKPHSLEPRSQEQPLLQPKQDMLGILPAGSPLTSSISSSITSSLAATPPSPVGTSSVPGMNANALPFYPTSDTVESVIESALDDLDLNEFGVAALEKTFDNSTVPHPGSITIGGSLLQSSAPVNIPGSLGSSASFHSASPSPPVSLSSHFLQQPQGHLSQSENTFLGTSASHGSLGLNGMNSSIWEHFASGSFSPGTSPAFLSGPGAAELARLRQELDEANSTIKQWEESWKQAKQACDAWKKEAEEAGERASAAGAECELAREQRDALEVQVKKLQEELERLHAGPEPQALPAFSDLEALSLSTLYSLQKQLRAHLEQVDKAVFHMQSVKCLKCQEQKRAVLPCQHAALCELCAEGSECPICQPGRAHTLQS

SEQ ID NO: 758927 - protein, 775 aa, Homo sapiens
MPGCCRYLKEFRTEQCPLFVQHKCTQHRPYTCFHWHFVNQRRRRSIRRRDGTFNYSPDVYCTKYDEATGLCPEGDECPFLHRTTGDTERRYHLRYYKTGICIHETDSKGNCTKNGLHCAFAHGPHDLRSPVYDIRELQAMEALQNGQTTVEGSIEGQSAGAASHAMIEKILSEEPRWQETAYVLGNYKTEPCKKPPRLCRQGYACPYYHNSKDRRRSPRKHKYRSSPCPNVKHGDEWGDPGKCENGDACQYCHTRTEQQFHPEIYKSTKCNDMQQSGSCPRGPFCAFAHVEQPPLSDDLQPSSAVSSPTQPGPVLYMPSAAGDSVPVSPSSPHAPDLSALLCRNSSLGSPSNLCGSPPGSIRKPPNLEGIVFPGESGLAPGSYKKAPGFEREDQVGAEYLKNFKCQAKLKPHSLEPRSQEQPLLQPKQDMLGILPAGSPLTSSISSSITSSLAATPPSPVGTSSVPGMNANALPFYPTSDTVESVIESALDDLDLNEFGVAALEKTFDNSTVPHPGSITIGGSLLQSSAPVNIPGSLGSSASFHSASPSPPVSLSSHFLQQPQGHLSQSENTFLGTSASHGSLGLNGMNSSIWEHFASGSFSPGTSPAFLSGPGAAELARLRQELDEANSTIKQWEESWKQAKQACDAWKKEAEEAGERASAAGAECELAREQRDALEVQVKKLQEELERLHAGPEPQALPAFSDLEALSLSTLYSLQKQLRAHLEQVDKSVKCLKCQEQKRAVLPCQHAALCELCAEGSECPICQPGRAHTLQS

SEQ ID NO: 758928 - protein, 781 aa, Homo sapiens; identical to SEQ ID NO: 758925

SEQ ID NO: 758929 - protein, 783 aa, Homo sapiens
MPGCCRYLKEFRTEQCPLFVQHKCTQHRPYTCFHWHFVNQRRRRSIRRRDGTFNYSPDVYCTKYDEATGLCPEGDECPFLHRTTGDTERRYHLRYYKTGICIHETDSKGNCTKNGLHCAFAHGPHDLRSPVYDIRELQAMEALQNGQTTVEGSIEGQSAGAASHAMIEKILSEEPRWQETAYVLGNYKTEPCKKPPRLCRQGYACPYYHNSKDRRRSPRKHKYRSSPCPNVKHGDEWGDPGKCENGDACQYCHTRTEQQFHPEIYKSTKCNDMQQSGSCPRGPFCAFAHVEQPPLSDDLQPSSAVSSPTQPGPVLYMPSAAGDSVPVSPSSPHAPDLSALLCRNSSLGSPSNLCGSPPGSIRKPPNLEGIVFPGESGLAPGSYKKAPGFEREDQVGAEYLKNFKCQAKLKPHSLEPRSQEQPLLQPKQDMLGILPAGSPLTSSISSSITSSLAATPPSPVGTSSVPGMNANALPFYPTSDTVESVIESALDDLDLNEFGVAALEKTFDNSTVPHPGSITIGGSLLQSSAPVNIPGSLGSSASFHSASPSPPVSLSSHFLQQPQGHLSQSENTFLGTSASHGSLGLNGMNSSIWEHFASGSFSPGTSPAFLSGPGAAELARLRQELDEANSTIKQWEESWKQAKQACDAWKKEAEEAGERASAAGAECELAREQRDALEVQVKKLQEELERLHAGPEPQALPAFSDLEALSLSTLYSLQKQLRAHLEQVDKAVFHMQSVKCLKCQEQKRAVLPCQHAALCELCAEGSECPMLPLGLSTKGLSMN

SEQ ID NO: 758930 - protein, 836 aa, Homo sapiens
GALGPRRGPRRLNNKRGAAKRQEDKTMSKGPGPGGSAASSAPPAATAQVLQAQPEKPQHYTYLKEFRTEQCPLFVQHKCTQHRPYTCFHWHFVNQRRRRSIRRRDGTFNYSPDVYCTKYDEATGLCPEGDECPFLHRTTGDTERRYHLRYYKTGICIHETDSKGNCTKNGLHCAFAHGPHDLRSPVYDIRELQAMEALQNGQTTVEGSIEGQSAGAASHAMIEKILSEEPRWQETAYVLGNYKTEPCKKPPRLCRQGYACPYYHNSKDRRRSPRKHKYRSSPCPNVKHGDEWGDPGKCENGDACQYCHTRTEQQFHPEIYKSTKCNDMQQSGSCPRGPFCAFAHVEQPPLSDDLQPSSAVSSPTQPGPVLYMPSAAGDSVPVSPSSPHAPDLSALLCRNSSLGSPSNLCGSPPGSIRKPPNLEGIVFPGESGLAPGSYKKAPGFEREDQVGAEYLKNFKCQAKLKPHSLEPRSQEQPLLQPKQDMLGILPAGSPLTSSISSSITSSLAATPPSPVGTSSVPGMNANALPFYPTSDTVESVIESALDDLDLNEFGVAALEKTFDNSTVPHPGSITIGGSLLQSSAPVNIPGSLGSSASFHSASPSPPVSLSSHFLQQPQGHLSQSENTFLGTSASHGSLGLNGMNSSIWEHFASGSFSPGTSPAFLSGPGAAELARLRQELDEANSTIKQWEESWKQAKQACDAWKKEAEEAGERASAAGAECELAREQRDALEVQVKKLQEELERLHAGPEPQALPAFSDLEALSLSTLYSLQKQLRAHLEQVDKAVFHMQSVKCLKCQEQKRAVLPCQHAALCELCAEGSECPICQPGRAHTLQS

SEQ ID NO: 758931 - protein, 781 aa, Homo sapiens; identical to SEQ ID NO: 758925

SEQ ID NO: 758932 - protein, 569 aa, Homo sapiens
EVGPRGEVGPRGGAGNTGQEMTKPAHSCWRKGSLPGLPSGLSLTCLCSALQIYKSTKCNDMQQSGSCPRGPFCAFAHVEQPPLSDDLQPSSAVSSPTQPGPVLYMPSAAGDSVPVSPSSPHAPDLSALLCRNSSLGSPSNLCGSPPGSIRKPPNLEGIVFPGESGLAPGSYKKAPGFEREDQVGAEYLKNFKCQAKLKPHSLEPRSQEQPLLQPKQDMLGILPAGSPLTSSISSSITSSLAATPPSPVGTSSVPGMNANALPFYPTSDTVESVIESALDDLDLNEFGVAALEKTFDNSTVPHPGSITIGGSLLQSSAPVNIPGSLGSSASFHSASPSPPVSLSSHFLQQPQGHLSQSENTFLGTSASHGSLGLNGMNSSIWEHFASGSFSPGTSPAFLSGPGAAELARLRQELDEANSTIKQWEESWKQAKQACDAWKKEAEEAGERASAAGAECELAREQRDALEVQVKKLQEELERLHAGPEPQALPAFSDLEALSLSTLYSLQKQLRAHLEQVDKAVFHMQSVKCLKCQEQKRAVLPCQHAALCELCAEGSECPICQPGRAHTLQS

SEQ ID NO: 758933 - protein, 781 aa, Homo sapiens; identical to SEQ ID NO: 758925

SEQ ID NO: 758934 - protein, 70 aa, Homo sapiens
LVDQEKQCRRLIFDGSDYNGLRYEAGWRLPYSLPGQGWSVEDVGPPEQAWPPAVRASGRPEGECWGSQLA

SEQ ID NO: 758935 - protein, 69 aa, Homo sapiens
PPYAGLPLLLLFPLSLQDMLGILPAGSPLTSSISSSITSSLAATPPSPVGTSSVPGMNANALPFYPTSD

SEQ ID NO: 758936 - protein, 133 aa, Homo sapiens
AEIVFANRKCGTPATEALESVMEAYEQVQKGPLKLKGVAELGVTKRKKKKKDKDKAKLLEAMGTSKKNEEEKRRGLDKRTPAQAAFEKMQEKRQMERILKKASKTHKQRVEDFNRHLDTLTEHYDIPKVSWTK

SEQ ID NO: 758937 - protein, 168 aa, Homo sapiens
GNSVCKQEVWHSSYRSTGECHGGLRAGPKGTPEAERRRRAGSDQAVRPEGPRDSVFIPLRPFLGTPGPDPPTRRLLMSFSRKKKKKDKDKAKLLEAMGTSKKNEEEKRRGLDKRTPAQAAFEKMQEKRQMERILKKASKTHKQRVEDFNRHLDTLTEHYDIPKVSWTK

SEQ ID NO: 758938 - protein, 143 aa, Homo sapiens
VLELVNPPAAGIRQESARRAGPKGTPEAERRRRAGSDQAEEEKEGQRQSETPGSNGNEQKERGGEAARPGQADPGPGGLRENAGEAEMRFHHVGQADLELLISSDPPASASQSAGITGVSHRTQSQLLILNGHAHDDFVCIVL

SEQ ID NO: 758939 - protein, 133 aa, Homo sapiens; identical to SEQ ID NO: 758936

SEQ ID NO: 758940 - protein, 168 aa, Homo sapiens; identical to SEQ ID NO: 758937

SEQ ID NO: 758941 - protein, 133 aa, Homo sapiens; identical to SEQ ID NO: 758936

SEQ ID NO: 758942 - protein, 128 aa, Homo sapiens
AEIVFANRKCGTPATEALESVMEAYEQVQKGPLKLKGVAELGVTKRKKKKKDKDKAKLLEAMGTSKKNEEEKRRGLDKRTPAQAAFEKMQEKRQGHQTSCTATGFQGHKANAARSYAWTQNWYCVPSS

SEQ ID NO: 758943 - protein, 71 aa, Homo sapiens
DSRSVDSRGSQTPEGKELAPWWPAVCRAPQDPAWAPFQASSSFGPMLSPAGPREATCNYAAFRLPPQPPGH

SEQ ID NO: 758944 - protein, 116 aa, Homo sapiens
GEVMLALTQRSPALGQRRTNAPNPTPFSGPFTLSTCKCSCLVTLGTPIRQRPVPPAPVDRFSMLGLWRLYSCRASLPPPFQVLLMGVAIADAANASQHSLKWNQTQPASQSSAGGS

SEQ ID NO: 758945 - protein, 312 aa, Homo sapiens
MRMLLALLALSAARPSASAESHWCYEVQAESSNYPCLVPVKWGGNCQKDRQSPINIVTTKAKVDKKLGRFFFSGYDKKQTWTVQNNGHSVMMLLENKASISGGGLPAPYQAKQLHLHWSDLPYKGSEHSLDGEHFAMEMHIVHEKEKGTSRNVKEAQDPEDEIAVLAFLVEAGTQVNEGFQPLVEALSNIPKPEMSTTMAESSLLDLLPKEEKLRHYFRYLGSLTTPTCDEKVVWTVFREPIQLHREQILAFSQKLYYDKEQTVSMKDNVRPLQQLGQRTVIKSGAPGRPLPWALPALLGPMLACLLAGFLR

SEQ ID NO: 758946 - protein, 144 aa, Homo sapiens
FTGEPPGNKGFPTLCGSPFLKFPKPEMSTTMAESSLLDLLPKEEKLRHYFRYLGSLTTPTCDEKVVWTVFREPIQLHREQILAFSQKLYYDKEQTVSMKDNVRPLQQLGQRTVIKSGAPGRPLPWALPALLGPMLACLLAGFLR

SEQ ID NO: 758947 - protein, 117 aa, Homo sapiens
RQSLTLPPRLEHSGMIFAHCNLCLLGSSDSHTSASRVAGITGVHHHIQLIFVVLAVMGFHHVGQAGLELLASSDPPISASQSVGITGVSHCAQSTLGILNPILKISNGGTKKQPAHN

SEQ ID NO: 758948 - protein, 100 aa, Homo sapiens
VALTDSVHNVWHQEAGKTIREWMRENCCNWVSSSEPLDTSVESMLPDCPRVSAGTDRHELTSWKSFPSIFKFFTEASEAKTSSLKPAVTRRSHRIKHEEL

SEQ ID NO: 758949 - protein, 437 aa, Homo sapiens
MSEEKDCGGGDALSNGIKKHRTSLPSPMFSRNDFSIWSILRKCIGMELSKITMPVIFNEPLSFLQRLTEYMEHTYLIHKASSLSDPVERMQCVAAFAVSAVASQWERTGKPFNPLLGETYELVRDDLGFRLISEQVSHHPPISAFHAEGLNNDFIFHGSIYPKLKFWGKSVEAEPKGTITLELLEHNEAYTWTNPTCCVHNIIVGKLWIEQYGNVEIINHKAGDKCVLNFKPCGLFGKELHKVEGYIQDKSKKKLCALYGKWTECLYSVDPATFDAYKKNDKKNTEEKKNSKQMSTSEELDEMPVPDSESVFIIPGSVLLWRIAPRPPNSAQMYNFTSFAMVLNEVDKDMESVIPKTDCRLRPDIRAMENGEIDQASEEKKRLEEKQRAARKNRSKSEEDWKTRWFHQGPNPYNGAQDWIYSGSYWDRNYFNLPDIY

SEQ ID NO: 758950 - protein, 109 aa, Homo sapiens
FIFFFIEMLPSFLQKVEVVSEASRETCVALTDCLNLFTKQEGVRNFKLEQEQEKNKILSEALETLATEHHELEQSLVKGSPPASILSEDEFYDALSGNSGILPSALLVI

SEQ ID NO: 758951 - protein, 558 aa, Homo sapiens
MLPSFLQKVEVVSEASRETCVALTDCLNLFTKQEGVRNFKLEQEQEKNKILSEALETLATEHHELEQSLVKGSPPASILSEDEFYDALSDSESERSLSRLEAVTARSFEEEGEHLGSRKHRMSEEKDCGGGDALSNGIKKHRTSLPSPMFSRNDFSIWSILRKCIGMELSKITMPVIFNEPLSFLQRLTEYMEHTYLIHKASSLSDPVERMQCVAAFAVSAVASQWERTGKPFNPLLGETYELVRDDLGFRLISEQVSHHPPISAFHAEGLNNDFIFHGSIYPKLKFWGKSVEAEPKGTITLELLEHNEAYTWTNPTCCVHNIIVGKLWIEQYGNVEIINHKAGDKCVLNFKPCGLFGKELHKVEGYIQDKSKKKLCALYGKWTECLYSVDPATFDAYKKNDKKNTEEKKNSKQMSTSEELDEMPVPDSESVFIIPGSVLLWRIAPRPPNSAQMYNFTSFAMVLNEVDKDMESVIPKTDCRLRPDIRAMENGEIDQASEEKKRLEEKQRAARKNRSKSEEDWKTRWFHQGPNPYNGAQDWIYSGSYWDRNYFNLPDIY

SEQ ID NO: 758952 - protein, 775 aa, Homo sapiens
GNTPLHCAAYRAHKQCALKLLRSGADPNLKNKNDQKPLDLAQGAEMKHILVGNKVIYKALKRYEGPLWKSSRFFGWRLFWVVLEHGVLSWYRKQPDAVHNIYRQGCKHLTQAVCTVKSTDSCLFFIKCFDDTIHGFRVPKNSLQQSREDWLEAIEEHSAYSTHYCSQDQLTDEEEEDTVSAADLKKSLEKAQSCQQRLDREISNFLKMIKECDMAKEMLPSFLQKVEVVSEASRETCVALTDCLNLFTKQEGVRNFKLEQEQEKNKILSEALETLATEHHELEQSLVKGSPPASILSEDEFYDALSDSESERSLSRLEAVTARSFEEEGEHLGSRKHRMSEEKDCGGGDALSNGIKKHRTSLPSPMFSRNDFSIWSILRKCIGMELSKITMPVIFNEPLSFLQRLTEYMEHTYLIHKASSLSDPVERMQCVAAFAVSAVASQWERTGKPFNPLLGETYELVRDDLGFRLISEQVSHHPPISAFHAEGLNNDFIFHGSIYPKLKFWGKSVEAEPKGTITLELLEHNEAYTWTNPTCCVHNIIVGKLWIEQYGNVEIINHKAGDKCVLNFKPCGLFGKELHKVEGYIQDKSKKKLCALYGKWTECLYSVDPATFDAYKKNDKKNTEEKKNSKQMSTSEELDEMPVPDSESVFIIPGSVLLWRIAPRPPNSAQMYNFTSFAMVLNEVDKDMESVIPKTDCRLRPDIRAMENGEIDQASEEKKRLEEKQRAARKNRSKSEEDWKTRWFHQGPNPYNGAQDWIYSGSYWDRNYFNLPDIY

SEQ ID NO: 758953 - protein, 146 aa, Homo sapiens
MLLWCPPQCACSLGVFPSAPSPVWGTRRSCEPATRVPEVWILSPLLRHGGHTQTQNHTASPRSPVMESPKKKNQQLKVGILHLGSRQKKIRIQLRSQCATWKVICKSCISQTPGINLDLGSGVKVKIIPKEEHCKMPEAGEEQPQV

SEQ ID NO: 758954 - protein, 146 aa, Homo sapiens; identical to SEQ ID NO: 758953

SEQ ID NO: 758955 - protein, 160 aa, Homo sapiens
MRCHAHGPSCLVTAITREEGGPRSGGAQAKLGCCWGYPSPRSTWNPDRRFWTPQTGPGEGRHERHTQTQNHTASPRSPVMESPKKKNQQLKVGILHLGSRQKKIRIQLRSQCATWKVICKSCISQTPGINLDLGSGVKVKIIPKEEHCKMPEAGEEQPQV

SEQ ID NO: 758956 - protein, 146 aa, Homo sapiens; identical to SEQ ID NO: 758953

SEQ ID NO: 758957 - protein, 146 aa, Homo sapiens; identical to SEQ ID NO: 758953

SEQ ID NO: 758958 - protein, 105 aa, Homo sapiens
EILQQKVAGVQRELEDFKKEALKSIHYLEDAFCEMNGALVQQEEQAARVRQRLREEEDRGIVRNKVLTFLLPREKQLREHCKRLEDLLLDRGRDALRATKKSQAD

SEQ ID NO: 758959 - protein, 111 aa, Homo sapiens
ICKPLLYPAIMTNGLCIRYCYVGGLLHALIHEGFLFRLTFCNSNVVHHIYCDIIPLSKISCTDSSINFLMVFIFSGSIQVFTIGTGLISYTFVLFTILKKKSVKGIRKAFS

SEQ ID NO: 758960 - protein, 323 aa, Homo sapiens
DSREHHPLQTGVSGNRPKMLGRNTWKTSAFSFLVEQMWAPLWSRSMRPGRWCSQRSCAWQTSNNTLHPLWTVPVSVPGGTRQSPINIQWRDSVYDPQLKPLRVSYEAASCLYIWNTGYLFQVEFDDATEASGISGGPLENHYRLKQFHFHWGAVNEGGSEHTVDGHAYPAELHLVHWNSVKYQNYKEAVVGENGLAVIGVFLKLGAHHQTLQRLVDILPEIKHKDARAAMRPFDPSTLLPTCWDYWTYAGSLTTPPLTESVTWIIQKEPVEVAPSQLSAFRTLLFSALGEEEKMMVNNYRPLQPLMNRKVWASFQATNEGTRS

SEQ ID NO: 758961 - protein, 122 aa, Homo sapiens
MPPLAPQLCRAVFLVPILLLLQVKPLNGSPGPKDGSQTEKTPSADQNQEQFEEHFVASSVGEMWQVVDMAQQEEDQSSKTAAVHKHSFHLSFCFSLASVMVFSGGPLRRTFPNIQLCFMLTH

SEQ ID NO: 758962 - protein, 152 aa, Homo sapiens
MTHCGHLGSLGHPCWLCSILVPRHWNALVSRNEVQAHGCDVTEHVKSEVLWKVKPLNGSPGPKDGSQTEKTPSADQNQEQFEEHFVASSVGEMWQVVDMAQQEEDQSSKTAAVHKHSFHLSFCFSLASVMVFSGGPLRRTFPNIQLCFMLTH

SEQ ID NO: 758963 - protein, 122 aa, Homo sapiens; identical to SEQ ID NO: 758961

SEQ ID NO: 758964 - protein, 64 aa, Homo sapiens
RRVFCTNKTIVLTNSHGQWQSDGPGPWMTPLQEHLQGSREVTGATYWKLAGPEDRPAPHALAQG

SEQ ID NO: 758965 - protein, 191 aa, Homo sapiens [sequence omitted]

SEQ ID NO: 758966 - protein, 191 aa, Homo sapiens [sequence omitted]

SEQ ID NO: 758967 - protein, 191 aa, Homo sapiens [sequence omitted]

SEQ ID NO: 758968 - protein, 287 aa, Homo sapiens
MDMAWQMMQLLLLALVTAAGSAQPRSARARTDLLNVCMNAKHHKTQPSPEDELYGQVGAPQGPSPGSVPLDDLPGAEEPEYGGDGCGGERLSPVSSPPSAVPGRRMPAARPAPARSCTRTPPACTTLTGITVVRWNPPASATLSRTAVSECSPNLGPWIRQVNQSWRKERILNVPLCKEDCERWWEDCRTSYTCKSNWHKGWNWTSGINECPAGALCSTFESYFPTPAALCEGLWSHSFKVSNYSRGSGRCIQMWFDSAQGNPNEEVAKFYAAAMNAGAPSRGIIDS

SEQ ID NO: 758969 - protein, 135 aa, Homo sapiens
GWWTPCPLPQLWSPSRVKLLRYVADRSILSPPHSGQPELAQRAAGGRTVAPPTPAKATGTKAGIGPQGLMSVRPGPSAAPLSPTSPLQPPFVKASGATPSRSATIVEGAAAASRCGLTQPRATPMRRWPSSMLRP

SEQ ID NO: 758970 - protein, 199 aa, Homo sapiens [sequence omitted]

SEQ ID NO: 758971 - protein, 326 aa, Homo sapiens
MYQDYPGNFDTSSRGSSGSPAHAESYSSGGGGQQKFRVDMPGSGSAFIPTINAITTSQDLQWMVQPTVITSMSNPYPRSHPYSPLPGLASVPGHMALPRPGVIKTIGTTVGRRRRDEQLSPEEEEKRRIRRERNKLAAAKCRNRRRELTEKLQAETEELEEEKSGLQKEIAELQKEKEKLEFMLVAHGPVCKISPEERRSPPAPGLQPMRSGGGSVGAVVVKQEPLEEDSPSSSSAGLDKAQRSVIKPISIAGGFYGEEPLHTPIVVTSTPAVTPGTSNLVFTYPSVLEQESPASPSESCSKAHRRSSSSGDQSSDSLNSPTLLAL

SEQ ID NO: 758972 - protein, 326 aa, Homo sapiens; identical to SEQ ID NO: 758971

SEQ ID NO: 758973 - protein, 326 aa, Homo sapiens; identical to SEQ ID NO: 758971

SEQ ID NO: 758974 - protein, 326 aa, Homo sapiens; identical to SEQ ID NO: 758971

SEQ ID NO: 758975 - protein, 326 aa, Homo sapiens; identical to SEQ ID NO: 758971

SEQ ID NO: 758976 - protein, 326 aa, Homo sapiens; identical to SEQ ID NO: 758971

SEQ ID NO: 758977 - protein, 287 aa, Homo sapiens
MPGSGSAFIPTINAITTSQDLQWMVQPTVITSMSNPYPRSHPYSPLPGLASVPGHMALPRPGVIKTIGTTVGRRRRDEQLSPEEEEKRRIRRERNKLAAAKCRNRRRELTEKLQAETEELEEEKSGLQKEIAELQKEKEKLEFMLVAHGPVCKISPEERRSPPAPGLQPMRSGGGSVGAVVVKQEPLEEDSPSSSSAGLDKAQRSVIKPISIAGGFYGEEPLHTPIVVTSTPAVTPGTSNLVFTYPSVLEQESPASPSESCSKAHRRSSSSGDQSSDSLNSPTLLAL

SEQ ID NO: 758978 - protein, 341 aa, Homo sapiens
CRLYPSPPSAAPTRRSPGEGGGRGAGEIERQKALCWEGPILLHRVGRPKKFRVDMPGSGSAFIPTINAITTSQDLQWMVQPTVITSMSNPYPRSHPYSPLPGLASVPGHMALPRPGVIKTIGTTVGRRRRDEQLSPEEEEKRRIRRERNKLAAAKCRNRRRELTEKLQAETEELEEEKSGLQKEIAELQKEKEKLEFMLVAHGPVCKISPEERRSPPAPGLQPMRSGGGSVGAVVVKQEPLEEDSPSSSSAGLDKAQRSVIKPISIAGGFYGEEPLHTPIVVTSTPAVTPGTSNLVFTYPSVLEQESPASPSESCSKAHRRSSSSGDQSSDSLNSPTLLAL

SEQ ID NO: 758979 - protein, 287 aa, Homo sapiens; identical to SEQ ID NO: 758977

SEQ ID NO: 758980 - protein, 326 aa, Homo sapiens; identical to SEQ ID NO: 758971

SEQ ID NO: 758981 - protein, 122 aa, Homo sapiens
MSVGLDLPQMLPGSPSPSLKEAFAEDGEAGEGGGRPSLEWRLQQLLPQHPLSLSWLLTSPQGTGPFLPSVVICHLLDQVLSLLHSPVPTPVHSSGPGSKQAVNSWPELSLWLVAHAPFLVVC

SEQ ID NO: 758982 - protein, 326 aa, Homo sapiens; identical to SEQ ID NO: 758971

SEQ ID NO: 758983 - protein, 326 aa, Homo sapiens; identical to SEQ ID NO: 758971

SEQ ID NO: 758984 - protein, 326 aa, Homo sapiens; identical to SEQ ID NO: 758971

SEQ ID NO: 758985 - protein, 326 aa, Homo sapiens; identical to SEQ ID NO: 758971

SEQ ID NO: 758986 - protein, 326 aa, Homo sapiens; identical to SEQ ID NO: 758971

SEQ ID NO: 758987 - protein, 326 aa, Homo sapiens; identical to SEQ ID NO: 758971

SEQ ID NO: 758988 - protein, 99 aa, Homo sapiens
ISGALAIHTERLNWKSLGFLMACPPSSLSHTHTHPCSRITRHLHGSSYGNSCIGAAFLFGLGTSVLLVAPLARQLGGVDSDWAAGSSGTAQGGRSDQLV

SEQ ID NO: 758989 - protein, 326 aa, Homo sapiens; identical to SEQ ID NO: 758971

SEQ ID NO: 758990 - protein, 159 aa, Homo sapiens
MYQDYPGNFDTSSRGSSGSPAHAESYSSGGGGQQKFRVDMPGSGSAFIPTINAITTSQDLQWMVQPTVITSMSNPYPRSHPYSPLPGLASVPGHMALPRPGVIKTIGTTVGRRRRDEQLSPEEEEKRRIRRERNKLAAAKCRNRRRELTEKLQAVRNSA

SEQ ID NO: 758991 - protein, 242 aa, Homo sapiens
  misc_feature (7)..(7): Xaa can be any naturally occurring amino acid
RPRRYRXELLGFAAGFTTGLVLNSGAGVTQSVPIFEGYCLPHGVQQLDLAGLDLTNYLMVLMKNHGIMLLSASDRKIVEDIKESFCYVAMNYEEEMAKKPDCLEKVYQLPDGKVIQLHDQLFSCPEALFSPCHMNLEAPGIDKICFSSIMKCDTGLRNSFFSNIILAGGSTSFPGLDKRLVKDIAKVAPANTAVQVIAPPERKISVWMGGSILASLSAFQDMWITAAEFKEVGPNIVHQRCF

SEQ ID NO: 758992 - protein, 372 aa, Homo sapiens
MNHCQLPVVIDNGSGMIKAGVAGCREPQFIYPNIIGRAKGQSRAAQGGLELCVGDQAQDWRSSLFISYPVERGLITSWEDMEIMWKHIYDYNLKLKPCDGPVLITEPALNPLANRQQITEMFFEHLGVPAFYMSIQAVLALFAAGFTTGLVLNSGAGVTQSVPIFEGYCLPHGVQQLDLAGLDLTNYLMVLMKNHGIMLLSASDRKIVEDIKESFCYVAMNYEEEMAKKPDCLEKVYQLPDGKVIQLHDQLFSCPEALFSPCHMNLEAPGIDKICFSSIMKCDTGLRNSFFSNIILAGGSTSFPGLDKRLVKDIAKVAPANTAVQVIAPPERKISVWMGGSILASLSAFQDMWITAAEFKEVGPNIVHQRCF

SEQ ID NO: 758993 - protein, 229 aa, Homo sapiens
ASRILRKSKDSGAGVTQSVPIFEGYCLPHGVQQLDLAGLDLTNYLMVLMKNHGIMLLSASDRKIVEDIKESFCYVAMNYEEEMAKKPDCLEKVYQLPDGKVIQLHDQLFSCPEALFSPCHMNLEAPGIDKICFSSIMKCDTGLRNSFFSNIILAGGSTSFPGLDKRLVKDIAKVAPANTAVQVIAPPERKISVWMGGSILASLSAFQDMWITAAEFKEVGPNIVHQRCF

SEQ ID NO: 758994 - protein, 314 aa, Homo sapiens
CGKAFRSSSQISQHQRMHLGEKPYKCRECGKAFPSTAQLNLHQRIHTDEKYYESKACGKAFTRPSHLFRHQRIHTGEKPHKCKECGKAFRYDTQLSLHQIIHTGERRYECRECGKVYSCASQLSLHQRIHTGEKPHECKECGKAFISDSHLIRHQSVHTGEKPCKCKECGKSFRRGSELTRHQRAHTGEKPYECKECGKAFTCSTELVRHQKVHTGERPHKCKECGKAFIRRSELTHHERSHTGEKPYECKECGKPLVVAQNLVDTRKFILVRNHMNVSSVERPSFGPHTLVNIKEFIQDRGVNEEMRDGSEFD

SEQ ID NO: 758995 - protein, 686 aa, Homo sapiens
APAAGAPGRPGPASAGTAAGRMLRERTVRLQYGSRVEAVYVLGTYLWTDVYSAAPAGAQTFSLKHSEHVWVEVVRDGEAEEVATNGKQRWLLSPSTTLRVTMSQASTEASSDKVTVNYYDEEGSIPIDQAGLFLTAIEISLDVDADRDGVVEKNNPKKASWTWGPEGQGAILLVNCDRETPWLPKEDCRDEKVYSKEDLKDMSQMILRTKGPDRLPAGYEIVLYISMSDSDKVGVFYVENPFFGQRYIHILGRRKLYHVVKYTGGSAELLFFVEGLCFPDEGFSGLVSIHVSLLEYMAQDIPLTPIFTDTVIFRIAPWIMTPNILPPVSVFVCCMKDNYLFLKEVKNLVEKTNCELKVCFQYLNRGDRWIQDEIEFGYIEAPHKGFPVVLDSPRDGNLKDFPVKELLGPDFGYVTREPLFESVTSLDSFGNLEVSPPVTVNGKTYPLGRILIGSSFPLSGGRRMTKVVRDFLKAQQVQAPVELYSDWLTVGHVDEFMSFVPIPGTKKFLLLMASTSACYKLFREKQKDGHGEAIMFKGLGGMSSKRITINKILSNESLVQENLYFQRCLDWNRDILKKELGLTEQDIIDLPALFKMDEDHRARAFFPNMVNMIVLDKDLGIPKPFGPQVEEECCLEMHVRGLLEPLGLECTFIDDISAYHKFLGEVHCGTNVRRKPFTFKWWHMVP

SEQ ID NO: 758996 - protein, 686 aa, Homo sapiens; identical to SEQ ID NO: 758995

SEQ ID NO: 758997 - protein, 187 aa, Homo sapiens
APAAGAPGRPGPASAGTAAGRMLRERTVRLQYGSRVEAVYVLGTYLWTDVYSEPAHRDARAEISSPEILRRAQTRGRGQPLSSPSCPSSRAPEPRNPKNLIQKPDNPRTLCPPSRNPETLPDPLTQPQPQLPHRPSLSPVTLRLALSSSPPGGPHTPSASLPSSPLSLPLRTSLPLGPTSTQPLSCF

SEQ ID NO: 758998 - protein, 123 aa, Homo sapiens
SGFDLPKCWKQESPLEAPHPTYPRALPEPSLISPHSAAPAGAQTFSLKHSEHVWVEVVRDGEAEEVATNGKQRWLLSPSTTLRVTMSQASTEASSDKVPRREVQPLRARDHARIEAGWTSPVP

SEQ ID NO: 758999 - protein, 89 aa, Homo sapiens
PRGALGPDTDLATFPRKPQSSANSQPSKTQLQSSQPRKVLQLSAVASLFSVSMPSRMKKISSKVSYYFYQETTIGIPQTAPLAVHNACS

SEQ ID NO: 759000 - protein, 375 aa, Homo sapiens
MGLLVFVRNLLLALCLFLVLGFLYYSAWKLHLLQWEEDSNSVVLSFDSAGQTLGSEYDRLGFLLNLDSKLPAELATKYANFSEGACKPGYASALMTAIFPRFSKPAPMFLDDSFRKWARIREFVPPFGIKGQDNLIKAILSVTKEYRLTPALDSLRCRRCIIVGNGGVLANKSLGSRIDDYDIVVRLNSAPVKGFEKDVGSKTTLRITYPEGAMQRPEQYERDSLFVLAGFKWQDFKWLKYIVYKERVSASDGFWKSVATRVPKEPPEIRILNPYFIQEAAFTLIGLPFNNGLMGRGNIPTLGSVAVTMALHGCDEVAVAGFGYDMSTPNAPLHYYETVRMAAIKESWTHNIQREKEFLRKLVKARVITDLSSGI

SEQ ID NO: 759001 - protein, 320 aa, Homo sapiens
MNTHQCQRVQGKCKWPAELATKYANFSEGACKPGYASALMTAIFPRFSKPAPMFLDDSFRKWARIREFVPPFGIKGQDNLIKAILSVTKEYRLTPALDSLRCRRCIIVGNGGVLANKSLGSRIDDYDIVVRLNSAPVKGFEKDVGSKTTLRITYPEGAMQRPEQYERDSLFVLAGFKWQDFKWLKYIVYKERVSASDGFWKSVATRVPKEPPEIRILNPYFIQEAAFTLIGLPFNNGLMGRGNIPTLGSVAVTMALHGCDEVAVAGFGYDMSTPNAPLHYYETVRMAAIKESWTHNIQREKEFLRKLVKARVITDLSSGI

SEQ ID NO: 759002 - protein, 390 aa, Homo sapiens
MGLLVFVRNLLLALCLFLVLGFLYYSAWKLHLLQWEEDSSKYSHSSSPQEKPVADSVVLSFDSAGQTLGSEYDRLGFLLNLDSKLPAELATKYANFSEGACKPGYASALMTAIFPRFSKPAPMFLDDSFRKWARIREFVPPFGIKGQDNLIKAILSVTKEYRLTPALDSLRCRRCIIVGNGGVLANKSLGSRIDDYDIVVRLNSAPVKGFEKDVGSKTTLRITYPEGAMQRPEQYERDSLFVLAGFKWQDFKWLKYIVYKERVSASDGFWKSVATRVPKEPPEIRILNPYFIQEAAFTLIGLPFNNGLMGRGNIPTLGSVAVTMALHGCDEVAVAGFGYDMSTPNAPLHYYETVRMAAIKESWTHNIQREKEFLRKLVKARVITDLSSGI

SEQ ID NO: 759003 - protein, 386 aa, Homo sapiens
MGLLVFVRNLLLALCLFLVLGFLYYSAWKLHLLQWEEDSNSVVLSFDSAGQTLGSEYDRLGFLLNLDSKLPAELATKYANFSEGACKPGYASALMTAIFPRFSKPAPMFLDDSFRKWARIREFVPPFGIKGQDNLIKAILSVTKEYRLTPALDSLRCRRCIIVGNGGVLANKSLGSRIDDYDIVVSAQALSGPALCRLNSAPVKGFEKDVGSKTTLRITYPEGAMQRPEQYERDSLFVLAGFKWQDFKWLKYIVYKERVSASDGFWKSVATRVPKEPPEIRILNPYFIQEAAFTLIGLPFNNGLMGRGNIPTLGSVAVTMALHGCDEVAVAGFGYDMSTPNAPLHYYETVRMAAIKESWTHNIQREKEFLRKLVKARVITDLSSGI

SEQ ID NO: 759004 - protein, 433 aa, Homo sapiens
MGLLVFVRNLLLALCLFLVLGFLYYSAWKLHLLQWEEDSNSVVLSFDSAGQTLGSEYDRLGFLLNLDSKLPAELATKYANFSEGACKPGYASALMTAIFPRAKRNGAWRQKHIQAYVLRQRRRQRIVGTQRRPFSWRSDERLTGETSWGSLMPELCWERFSKPAPMFLDDSFRKWARIREFVPPFGIKGQDNLIKAILSVTKEYRLTPALDSLRCRRCIIVGNGGVLANKSLGSRIDDYDIVVRLNSAPVKGFEKDVGSKTTLRITYPEGAMQRPEQYERDSLFVLAGFKWQDFKWLKYIVYKERVSASDGFWKSVATRVPKEPPEIRILNPYFIQEAAFTLIGLPFNNGLMGRGNIPTLGSVAVTMALHGCDEVAVAGFGYDMSTPNAPLHYYETVRMAAIKESWTHNIQREKEFLRKLVKARVITDLSSGI

SEQ ID NO: 759005 - protein, 384 aa, Homo sapiens
MGLLVFVRNLLLALCLFLVLGFLYYSAWKLHLLQWEEDSKYDRLGFLLNLDSKLPAELATKYANFSEGACKPGYASALMTAIFPRFSKPAPMFLDDSFRKWARIREFVPPFGIKGQDNLIKAILSVTKEYRLTPALDSLRCRRCIIVGNGGVLANKSLGSRIDDYDIVVRLNSAPVKGFEKDVGSKTTLRITYPEGAMQRPEQYERDSLFVLAGFKWQDFKWLKYIVYKERVSASDGFWKSVATRVPKEPPEIRILNPYFIQEAAFTLIGLPFNNGLMGRGNIPTLGSVAVTMALHGCDEVAVAGFGYDMSTPNAPLHYYETVRMAAIKEVSTVTEYWRVVTKKAPSPGRGSKGLSKGPTDHFISPFSPGRTISSERKSFCGSW

SEQ ID NO: 759006 - protein, 155 aa, Homo sapiens
MGLLVFVRNLLLALCLFLVLGFLYYSAWKLHLLQWEEDSNSVVLSFDSAGQTLGSEYDRLGFLLNLDSKLPAELATKYANFSEGACKPGYASALMTAIFPRFSKPAPMFLDDSFRKWARIREFVPPFGIKGQVLDAQYPARERVSAEAGESSRHH

SEQ ID NO: 759007 - protein, 375 aa, Homo sapiens; identical to SEQ ID NO: 759000

SEQ ID NO: 759008 - protein, 359 aa, Homo sapiens
MGLLVFVRNLLLALCLFLVLGFLYYSAWKLHLLQWEEDSKYDRLGFLLNLDSKLPAELATKYANFSEGACKPGYASALMTAIFPRFSKPAPMFLDDSFRKWARIREFVPPFGIKGQDNLIKAILSVTKEYRLTPALDSLRCRRCIIVGNGGVLANKSLGSRIDDYDIVVRLNSAPVKGFEKDVGSKTTLRITYPEGAMQRPEQYERDSLFVLAGFKWQDFKWLKYIVYKERVSASDGFWKSVATRVPKEPPEIRILNPYFIQEAAFTLIGLPFNNGLMGRGNIPTLGSVAVTMALHGCDEVAVAGFGYDMSTPNAPLHYYETVRMAAIKESWTHNIQREKEFLRKLVKARVITDLSSGI

SEQ ID NO: 759009 - protein, 375 aa, Homo sapiens; identical to SEQ ID NO: 759000

SEQ ID NO: 759010 - protein, 281 aa, Homo sapiens [sequence omitted]

SEQ ID NO: 759011 - protein, 395 aa, Homo sapiens
MGLLVFVRNLLLALCLFLVLGFLYYSAWKLHLLQWEEDSNSVVLSFDSAGQTLGSEYDRLGFLLNLDSKLPAELATKYANFSEGACKPGYASALMTAIFPRFEDEAILFLSKQCTYKQRLRFSKPAPMFLDDSFRKWARIREFVPPFGIKGQDNLIKAILSVTKEYRLTPALDSLRCRRCIIVGNGGVLANKSLGSRIDDYDIVVRLNSAPVKGFEKDVGSKTTLRITYPEGAMQRPEQYERDSLFVLAGFKWQDFKWLKYIVYKERVSASDGFWKSVATRVPKEPPEIRILNPYFIQEAAFTLIGLPFNNGLMGRGNIPTLGSVAVTMALHGCDEVAVAGFGYDMSTPNAPLHYYETVRMAAIKESWTHNIQREKEFLRKLVKARVITDLSSGI

SEQ ID NO: 759012 - protein, 220 aa, Homo sapiens
SIPHPVPARRLPSYPPLLHTGAPPHALFTIIPLVPVTHSISPNTDGLPTPQALGSPLNASCSRLTVPTWGPCHSPRLIPCCVPRGGPLLLCPQSASDGFWKSVATRVPKEPPEIRILNPYFIQEAAFTLIGLPFNNGLMGRGNIPTLGSVAVTMALHGCDEVAVAGFGYDMSTPNAPLHYYETVRMAAIKESWTHNIQREKEFLRKLVKARVITDLSSGI

SEQ ID NO: 759013 - protein, 246 aa, Homo sapiens
MGLLVFVRNLLLALCLFLVLGFLYYSAWKLHLLQWEEDSKYDRLGFLLNLDSKLPAELATKYANFSEGACKPGYASALMTAIFPRFSKPAPMFLDDSFRKWARIREFVPPFGIKGQDNLIKAILSVTKEYRLTPALDSLRCRRCIIVGNGGVLANKSLGSRIDDYDIVVRLNSAPVKGFEKDVGSKTTLRITYPEGAMQRPEQYERDSLFVLAGFKWQDFKWLKYIVYKERVLFPKQGQVQAVSSR

SEQ ID NO: 759014 - protein, 916 aa, Homo sapiens
MTAGAGVLLLLLSLSGALRAHNEDLTTRETCKAGFSEDDYTALISQNILEGEKLLQVKFSSCVGTKGTQYETNSMDFKVGADGTVFATRELQVPSEQVAFTVTAWDSQTAEKWDAVVRLLVAQTSSPHSGHKPQKGKKVVALDPSPPPKDTLLPWPQHQNANGLRRRKRDWVIPPINVPENSRGPFPQQLVRIRSDKDNDIPIRYSITGVGADQPPMEVFSIDSMSGRMYVTRPMDREEHASYHLRAHAVDMNGNKVENPIDLYIYVIDMNDNRPEFINQVYNGSVDEGSKPGTYVMTVTANDADDSTTANGMVRYRIVTQTPQSPSQNMFTINSETGDIVTVAAGLDREKVQQYTVIVQATDMEGNLNYGLSNTATAIITVTDVNDNPPEFTASTFAGEVPENRVETVVANLTVMDRDQPHSPNWNAVYRIISGDPSGHFSVRTDPVTNEGMVTVVKAVDYELNRAFMLTVMVSNQAPLASGIQMSFQSTAGVTISIMDINEAPYFPSNHKLIRLEEGVPPGTVLTTFSAVDPDRFMQQAVRYSKLSDPASWLHINATNGQITTAAVLDRESLYTKNNVYEATFLAADNGIPPASGTGTLQIYLIDINDNAPELLPKEAQICEKPNLNAINITAADADVDPNIGPYVFELPFVPAAVRKNWTITRLNGDYAQLSLRILYLEAGMYDVPIIVTDSGNPPLSNTSIIKVKVCPCDDNGDCTTIGAVAAAGLGTGAIVAILICILILLTMVLLFVMWMKRREKERHTKQLLIDPEDDVRDNILKYDEEGGGEEDQDYDLSQLQQPEAMGHVPSKAPGVRRVDERPVGAEPQYPIRPMVPHPGDIGDFINEGLRAADNDPTAPPYDSLLVFDYEGSGSTAGSVSSLNSSSSGDQDYDYLNDWGPRFKKLADMYGGGEED

SEQ ID NO: 759015 - protein, 106 aa, Homo sapiens
MPCAPRAQRREAVGVLVAPPRVPPRTPRRGSLGAAVFSSSDLTFDAEAQGQVRRPRPAQAVGPSGARRPEAPGWFRKSDRSGRAGTGAWSQWPQANPDEQQPQVAY

SEQ ID NO: 759016 - protein, 73 aa, Homo sapiens
AGWYGRSLGYFDAEAQGQVRRPRPAQAVGPSGARRPEAPGWFRKSDRSGRAGTGAWSQWPQANPDEQQPQVAY

SEQ ID NO: 759017 - protein, 106 aa, Homo sapiens; identical to SEQ ID NO: 759015

SEQ ID NO: 759018 - protein, 106 aa, Homo sapiens; identical to SEQ ID NO: 759015

SEQ ID NO: 759019 - protein, 106 aa, Homo sapiens; identical to SEQ ID NO: 759015

SEQ ID NO: 759020 - protein, 470 aa, Homo sapiens
GRLGFPEGPEGGRGRHVRAARGPVGPRAGEGPCAAWVGVGPGSAPGTSLREGPGAGAPQRPAGGRASGRAARSRPEARAEGAPSPVVGAPPAGSAGWAAPGPAMSSPPPARSGFYRQEVTKTAWEVRAVYRDLQPVGSGAYGAVCSAVDGRTGAKVAIKKLYRPFQSELFAKRAYRELRLLKHMRHENVIGLLDVFTPDETLDDFTDFYLVMPFMGTDLGKLMKHEKLGEDRIQFLVYQMLKGLRYIHAAGIIHRDLKPGNLAVNEDCELKILDFGLARQADSEMTGYVVTRWYRAPEVILNWMRYTQTVDIWSVGCIMAEMITGKTLFKGSDHLDQLKEIMKVTGTPPAEFVQRLQSDEAKNYMKGLPELEKKDFASILTNASPLAVNLLEKMLVLDAEQRVTAGEALAHPYFESLHDTEDEPQVQKYDDSFDDVDRTLDEWKRVTYKEVLSFKPPRQLGARVSKETPL

SEQ ID NO: 759021 - protein, 444 aa, Homo sapiens
AAGGAGGACAGCPAFPLSGPPRSSAVDGRTGAKVAIKKLYRPFQSELFAKRAYRELRLLKHMRHENVIGLLDVFTPDETLDDFTDFYLVMPFMGTDLGKLMKHEKLGEDRIQFLVYQMLKGLRYIHAAGIIHRVSPGGEAAHQPSPSAIPPPPRPTCEDVMGSGCCATPYAQPLVGTCLGAQVPWSALEGLQRARGPGPVAPSLGATQALGCAHAWEGGAQWPPFLCPQDLKPGNLAVNEDCELKILDFGLARQADSEMTGYVVTRWYRAPEVILNWMRYTQTVDIWSVGCIMAEMITGKTLFKGSDHLDQLKEIMKVTGTPPAEFVQRLQSDEAKNYMKGLPELEKKDFASILTNASPLAVNLLEKMLVLDAEQRVTAGEALAHPYFESLHDTEDEPQVQKYDDSFDDVDRTLDEWKRVTYKEVLSFKPPRQLGARVSKETPL

SEQ ID NO: 759022 - protein, 289 aa, Homo sapiens
LARKPRGTGKGVEKVTPDETLDDFTDFYLVMPFMGTDLGKLMKHEKLGEDRIQFLVYQMLKGLRYIHAAGIIHRDLKPGNLAVNEDCELKILDFGLARQADSEMTGYVVTRWYRAPEVILNWMRYTQTVDIWSVGCIMAEMITGKTLFKGSDHLDQLKEIMKVTGTPPAEFVQRLQSDEAKNYMKGLPELEKKDFASILTNASPLAVNLLEKMLVLDAEQRVTAGEALAHPYFESLHDTEDEPQVQKYDDSFDDVDRTLDEWKRVTYKEVLSFKPPRQLGARVSKETPL

SEQ ID NO: 759023 - protein, 579 aa, Homo sapiens
GRLGFPEGPEGGRGRHVRAARGPVGPRAGEGPCAAWVGVGPGSAPGTSLREGPGAGAPQRPAGGRASGRAARSRPEARAEGAPSPVVGAPPAGSAGWAAPGPAMSSPPPARSGFYRQEVTKTAWEVRAVYRDLQPVGSGAYGAVCSAVDGRTGAKVAIKKLYRPFQSELFAKRAYRELRLLKHMRHENVIGLLDVFTPDETLDDFTDFYLVMPFMGTDLGKLMKHEKLGEDRIQFLVYQMLKGLRYIHAAGIIHRDLKPGNLAVNEDCELKILDFGLARQADSEMTGYVVTRWYRAPEVILNWMRYTQTVDIWSVGCIMAEMITGKTLFKGSDHLDQLKEIMKVTGTPPAEFVQRLQSDEAKNYMKGLPELEKKDFASILTNASPLAVNLLEKMLVLDAEQRVTAGEALAHPYFESLHDTEDEPQVQKYDDSFDDVDRTLDEWKREWGAPGTACVDPSGGLWAGPVWTCELGAPGGPVWTRELGAPGRACVDPVGPVQVARLRVLDPHPWDAGQVRRMGGQGSMGPCGLVEMTSGWSWKLKGRVFLAGSAQRLAQKEPGVVKGSCESGNQGPLSPSWPP

SEQ ID NO: 759024 - protein, 470 aa, Homo sapiens; identical to SEQ ID NO: 759020

SEQ ID NO: 759025 - protein, 186 aa, Homo sapiens
MTGYVVTRWYRAPEVILNWMRYTQTVDIWSVGCIMAEMITGKTLFKGSDHLDQLKEIMKVTGTPPAEFVQRLQSDEAKNYMKGLPELEKKDFASILTNASPLAVNLLEKMLVLDAEQRVTAGEALAHPYFESLHDTEDEPQVQKYDDSFDDVDRTLDEWKRVTYKEVLSFKPPRQLGARVSKETPL

SEQ ID NO: 759026 - protein, 446 aa, Homo sapiens
GRLGFPEGPEGGRGRHVRAARGPVGPRAGEGPCAAWVGVGPGSAPGTSLREGPGAGAPQRPAGGRASGRAARSRPEARAEGAPSPVVGAPPAGSAGWAAPGPAMSSPPPARSGFYRQEVTKTAWEVRAVYRDLQPVGSGAYGAVCSAVDGRTGAKVAIKKLYRPFQSELFAKRAYRELRLLKHMRHENVIGLLDVFTPDETLDDFTDFYLVMPFMGTDLGKLMKHEKLGEDRIQFLVYQMLKGLRYIHAAGIIHRDLKPGNLAVNEDCELKILDFGLARQADSEMTGYVVTRWYRAPEVILNWMRYTQTDLDQLKEIMKVTGTPPAEFVQRLQSDEAKNYMKGLPELEKKDFASILTNASPLAVNLLEKMLVLDAEQRVTAGEALAHPYFESLHDTEDEPQVQKYDDSFDDVDRTLDEWKRVTYKEVLSFKPPRQLGARVSKETPL

SEQ ID NO: 759027 - protein, 315 aa, Homo sapiens
MRTCVLLSAVLWCLTGDKIYVELHQNSPVLICMDFKLSKKEIVDPTYLWIGPNEKTLTGNNRINITETGQLMVKDFLEPLSGLYTCTLSYKTVKAETQEEKTVKKRYDFMVFAYREPDYSYQMAVRFTTRSCIGRYNDVFFRVLKKILDSLISDLSCHVIEPSYKCHSVEIPEHGLIHELFIAFQVNPFAPGWKGACNGSVDCEDTTNHNILQARDRIEDFFRSQAYIFYHNFNKTLPAMHFVDHSLQVVRLDSCRPGFGKNERLHSNCASCCVVCSPATFSPDVNVTCQTCVSVLTYGAKSCPQTSNKNQQYED

SEQ ID NO: 759028 - protein, 315 aa, Homo sapiens; identical to SEQ ID NO: 759027

SEQ ID NO: 759029 - protein, 219 aa, Homo sapiens
MRTCVLLSAVLWCLTGAYREPDYSYQMAVRFTTRSCIGRYNDVFFRVLKKILDSLISDLSCHVIEPSYKCHSVEIPEHGLIHELFIAFQVNPFAPGWKGACNGSVDCEDTTNHNILQARDRIEDFFRSQAYIFYHNFNKTLPAMHFVDHSLQVVRLDSCRPGFGKNERLHSNCASCCVVCSPATFSPDVNVTCQTCVSVLTYGAKSCPQTSNKNQQYED

SEQ ID NO: 759030 - protein, 337 aa, Homo sapiens
MRTCVLLSAVLWCLTGVQCPRFTLFNKKGFIYGKTGQPDKIYVELHQNSPVLICMDFKLSKKEIVDPTYLWIGPNEKTLTGNNRINITETGQLMVKDFLEPLSGLYTCTLSYKTVKAETQEEKTVKKRYDFMVFAYREPDYSYQMAVRFTTRSCIGRYNDVFFRVLKKILDSLISDLSCHVIEPSYKCHSVEIPEHGLIHELFIAFQVNPFAPGWKGACNGSVDCEDTTNHNILQARDRIEDFFRSQAYIFYHNFNKTLPAMHFVDHSLQVVRLDSCRPGFGKNERLHSNCASCCVVCSPATFSPDVNVTCQTCVSVLTYGAKSCPQTSNKNQQYED

SEQ ID NO: 759031 - protein, 66 aa, Homo sapiens
GNSINPCFSNPDRPHWLELPPSSPAPARSLQASATTCCYGKHTDNRLGQTWQRYGLSAIFSPCLRE

SEQ ID NO: 759032 - protein, 69 aa, Homo sapiens
RSLPASGSRAQPPVHAPCSASFALQCASRDDWRCARSMHEFSAKDIDGHMVNLDKYRGFVCIVTNVASQ

SEQ ID NO: 759033 - protein, 107 aa, Homo sapiens
ALWRAWPWERRRGKPTRVHWSAGRGEEPLAPSPAAMSLGRLCRLLKPALLCGALAAPGLAGTMCASRDDWRCARSMHEFSAKDIDGHMVNLDKYRGFVCIVTNVASQ

SEQ ID NO: 759034 - protein, 107 aa, Homo sapiens; identical to SEQ ID NO: 759033

SEQ ID NO: 759035 - protein, 107 aa, Homo sapiens; identical to SEQ ID NO: 759033

SEQ ID NO: 759036 - protein, 109 aa, Homo sapiens
MGRAGAGSPGRRRQRCQSRGRRRPRAPRRRKAPACRRRRARRRRKKPCPRSLRPEIHECPKSQDPCASRDDWRCARSMHEFSAKDIDGHMVNLDKYRGFVCIVTNVASQ

SEQ ID NO: 759037 - protein, 132 aa, Homo sapiens
  misc_feature (12)..(12): Xaa can be any naturally occurring amino acid
  misc_feature (20)..(21): Xaa can be any naturally occurring amino acid
  misc_feature (25)..(26): Xaa can be any naturally occurring amino acid
  misc_feature (32)..(32): Xaa can be any naturally occurring amino acid
  misc_feature (37)..(37): Xaa can be any naturally occurring amino acid
PWFNLVTSDRPXPRPPPPTXXPSPXXANHRTXPRDSXLVDLHARYAECGLRILAFPCNQFGKQEPGSNEEIKEFRRGLQRQIRYVQQDLRERGRRPPAVEVDEDPNPRARASWEMPSSGTSPSSSSTRTAAW

SEQ ID NO: 759038 - protein, 364 aa, Homo sapiens
MFSKICVNGDDAHPLWKWMKIPTQGQGHPGKCHQVELHQVPHRQERLRGEALRTHGGAPGDREGPAPLFLAPQVLWPRPSPCPRPWSLPPALMTACLQTCWWGRPENPACTPPEEGPMACWAWLGAPTPGYLVGINRQISLLEHTPQKGTNRTKRYPRSGAQHTPDNPHNRGTHVHHTSEQHQHTKNWAEEKKQQKMQKIGTHAETTRNTHHQPPGRTHNTRTKAHTTDQYTAQNGTPTHPNEAHTACTATHTTHTPTKHGTKRNKTHTHNYTTSNNTPQDTETKHKKDNKQKQKPRKKNKRRAHYTGRSTEDTQSTKATNNNKNHRPPHEKEERRKDRQKGKRENTTSLSPLRIKTRRRTRPD

SEQ ID NO: 759039 - protein, 150 aa, Homo sapiens
MFSKICVNGDDAHPLWKWMKIPTQGQGHPGKCHQVELHQVPHRQERLRGEALRTHGGAPGDREGPAPLFLAPQVLWPRPQPWVVGAPAEDQDSTWTSHSLSHRYHEGLRGSPRCHPHCYCPLRSRICLPIFLGHQTLLLCLHCPPTARAH

SEQ ID NO: 759040 - protein, 107 aa, Homo sapiens; identical to SEQ ID NO: 759033

SEQ ID NO: 759041 - protein, 107 aa, Homo sapiens; identical to SEQ ID NO: 759033

SEQ ID NO: 759042 - protein, 107 aa, Homo sapiens; identical to SEQ ID NO: 759033

SEQ ID NO: 759043 - protein, 107 aa, Homo sapiens; identical to SEQ ID NO: 759033

SEQ ID NO: 759044 - protein, 134 aa, Homo sapiens
MFSKICVNGDDAHPLWKWMKIPTQGQGHPGKCHQVELHQVPHRQERLRGEALRTHGGAPGDREGPAPLFLAPQVLWPRPSPCPRPWSLPPALMTACLQTCWWGRPENPACTPPEEGPMACWAWSGPTWYCGITT

SEQ ID NO: 759045 - protein, 113 aa, Homo sapiens
GSVQGARTEGVPAPDSLTHLGRHRSQGVTKRSKSFAAGYNVKFDMFSKICVNGDDAHPLWKWMKIPTQGQGHPGKDSLGTVGGCWGRSRPCASFPVPSSGTSPSSSSTRTAAW

SEQ ID NO: 759046 - protein, 399 aa, Homo sapiens
RDAWVDPRVRRTRWVSQGVTKRSKSFAAGYNVKFDMFSKICVNGDDAHPLWKWMKIPTQGQGHPGKCHQVELHQVPHRQERLRGEALRTHGGAPGDREGPAPLFLAPQVLWPRPSPCPRPWSLPPALMTACLQTCWWGRPENPACTPPEEGPMACWAWLGAPTPGYLVGINRQISLLEHTPQKGTNRTKRYPRSGAQHTPDNPHNRGTHVHHTSEQHQHTKNWAEEKKQQKMQKIGTHAETTRNTHHQPPGRTHNTRTKAHTTDQYTAQNGTPTHPNEAHTACTATHTTHTPTKHGTKRNKTHTHNYTTSNNTPQDTETKHKKDNKQKQKPRKKNKRRAHYTGRSTEDTQSTKATNNNKNHRPPHEKEERRKDRQKGKRENTTSLSPLRIKTRRRTRPD

SEQ ID NO: 759047 - protein, 147 aa, Homo sapiens
MFSKICVNGDDAHPLWKWMKIPTQGQGHPGKCHQVELHQVPHRQERLRGEALRTHGGAPGDREGPAPLFLAPQVLWPRPSPCPRPWSLPPALMTACLQTCWWGRPENPACTPPEEGPMACWAWLGAPTPGYLVGINRQISLLEKIKK

SEQ ID NO: 759048 - protein, 107 aa, Homo sapiens; identical to SEQ ID NO: 759033

SEQ ID NO: 759049 - protein, 106 aa, Homo sapiens
MARGPVGGCWDSHTAWPPGVRWLWGGLGALWLWRQPGKLTPCGLLETGQLGDCGGLLGTLTSMCFFSSAIKWNFTKFLIDKNGCVVKRYGPMEEPLVIEKDLPHYF

SEQ ID NO: 759050 - protein, 107 aa, Homo sapiens; identical to SEQ ID NO: 759033

SEQ ID NO: 759051 - protein, 107 aa, Homo sapiens; identical to SEQ ID NO: 759033

SEQ ID NO: 759052 - protein, 337 aa, Homo sapiens
ARYEAWCWKNTMDLVLKRCLLHLAVIGALLAVGATKVPRNQDWLGVSRQLRTKAWNRQLYPEWTEAQRLDCWRGGQVSLKVSNDGPTLIGANASFSIALNFPGSQKVLPDGQVIWVNNTIINGSQVWGGQPVYPQETDDACIFPDGGPCPSGSWSQKRSFVYVWKTWGQYWQVLGGPVSGLSIGTGRAMLGTHTMEVTVYHRRGSRSYVPLAHSSSAFTITDQVPFSVSVSQLRALDGGNKHFLRNQPLTFALQLHDPSGYLAEADLSYTWDFGDSSGTLISRALVVTHTYLEPGPVTAGGLGGFLSSWVPRAAPWAALGPPQGALPGVPGPDLACC

SEQ ID NO: 759053 - protein, 680 aa, Homo sapiens
MGQGSHLMLVPLVAGGKNTMDLVLKRCLLHLAVIGALLAVGATKVPRNQDWLGVSRQLRTKAWNRQLYPEWTEAQRLDCWRGGQVSLKVSNDGPTLIGANASFSIALNFPGSQKVLPDGQVIWVNNTIINGSQVWGGQPVYPQETDDACIFPDGGPCPSGSWSQKRSFVYVWKTWGQYWQVLGGPVSGLSIGTGRAMLGTHTMEVTVYHRRGSRSYVPLAHSSSAFTITDQVPFSVSVSQLRALDGGNKHFLRNQPLTFALQLHDPSGYLAEADLSYTWDFGDSSGTLISRALVVTHTYLEPGPVTAQVVLQAAIPLTSCGSSPVPGTTDGHRPTAEAPNTTAGQVPTTEVVGTTPGQAPTAEPSGTTSVQVPTTEVISTAPVQMPTAESTGMTPEKVPVSEVMGTTLAEMSTPEATGMTPAEVSIVVLSGTTAAQVTTTEWVETTARELPIPEPEGPDASSIMSTESITGSLGPLLDGTATLRLVKRQVPLDCVLYRYGSFSVTLDIVQGIESAEILQAVPSGEGDAFELTVSCQGGLPKEACMEISSPGCQPPAQRLCQPVLPSPACQLVLHQILKGGSGTYCLNVSLADTNSLAVVSTQLIMPGQEAGLGQVPLIVGILLVLMAVVLASLIYRRRLMKQDFSVPQLPHSSSHWLRLPRIFCSCPIGENSPLLSGQQV

SEQ ID NO: 759054 - protein, 673 aa, Homo sapiens
GWYRSGEFGKNTMDLVLKRCLLHLAVIGALLAVGATKVPRNQDWLGVSRQLRTKAWNRQLYPEWTEAQRLDCWRGGQVSLKVSNDGPTLIGANASFSIALNFPGSQKVLPDGQVIWVNNTIINGSQVWGGQPVYPQETDDACIFPDGGPCPSGSWSQKRSFVYVWKTWGQYWQVLGGPVSGLSIGTGRAMLGTHTMEVTVYHRRGSRSYVPLAHSSSAFTITDQVPFSVSVSQLRALDGGNKHFLRNQPLTFALQLHDPSGYLAEADLSYTWDFGDSSGTLISRALVVTHTYLEPGPVTAQVVLQAAIPLTSCGSSPVPGTTDGHRPTAEAPNTTAGQVPTTEVVGTTPGQAPTAEPSGTTSVQVPTTEVISTAPVQMPTAESTGMTPEKVPVSEVMGTTLAEMSTPEATGMTPAEVSIVVLSGTTAAQVTTTEWVETTARELPIPEPEGPDASSIMSTESITGSLGPLLDGTATLRLVKRQVPLDCVLYRYGSFSVTLDIVQGIESAEILQAVPSGEGDAFELTVSCQGGLPKEACMEISSPGCQPPAQRLCQPVLPSPACQLVLHQILKGGSGTYCLNVSLADTNSLAVVSTQLIMPGQEAGLGQVPLIVGILLVLMAVVLASLIYRRRLMKQDFSVPQLPHSSSHWLRLPRIFCSCPIGENSPLLSGQQV

SEQ ID NO: 759055 - protein, 680 aa, Homo sapiens; identical to SEQ ID NO: 759053

SEQ ID NO: 759056 - protein, 680 aa, Homo sapiens; identical to SEQ ID NO: 759053

SEQ ID NO: 759057 - protein, 654 aa, Homo sapiens
MGQGSHLMLVPLVAGGKNTMDLVLKRCLLHLAVIGALLAVGATKVPRNQDWLGVSRQLRTKAWNRQLYPEWTEAQRLDCWRGGQVSLKVSNDGPTLIGANASFSIALNFPGSQKVLPDGQVIWVNNTIINGSQVWGGQPVYPQETDDACIFPDGGPCPSGSWSQKRSFVYVWKTWGQYWQVLGGPVSGLSIGTGRAMLGTHTMEVTVYHRRGSRSYVPLAHSSSAFTITDQVPFSVSVSQLRALDGGNKHFLRNQPLTFALQLHDPSGYLAEADLSYTWDFGDSSGTLISRALVVTHTYLEPGPVTAQVVLQAAIPLTSLPTTEVVGTTPGQAPTAEPSGTTSVQVPTTEVISTAPVQMPTAESTGMTPEKVPVSEVMGTTLAEMSTPEATGMTPAEVSIVVLSGTTAAQVTTTEWVETTARELPIPEPEGPDASSIMSTESITGSLGPLLDGTATLRLVKRQVPLDCVLYRYGSFSVTLDIVQGIESAEILQAVPSGEGDAFELTVSCQGGLPKEACMEISSPGCQPPAQRLCQPVLPSPACQLVLHQILKGGSGTYCLNVSLADTNSLAVVSTQLIMPGQEAGLGQVPLIVGILLVLMAVVLASLIYRRRLMKQDFSVPQLPHSSSHWLRLPRIFCSCPIGENSPLLSGQQV

SEQ ID NO: 759058 - protein, 640 aa, Homo sapiens
KGMGQGSHLMLVPLVAGGKNTMDLVLKRCLLHLAVIGALLAVGATKVPRNQDWLGVSRQLRTKAWNRQLYPEWTEAQRLDCWRGGQVSLKVSNDGPTLIGANASFSIALNFPGSQKVLPDGQVIWVNNTIINGSQVWGGQPVYPQETDDACIFPDGGPCPSGSWSQKRSFVYVWKTWGQYWQVLGGPVSGLSIGTGRAMLGTHTMEVTVYHRRGSRSYVPLAHSSSAFTITDQVPFSVSVSQLRALDGGNKHFLRNQPLTFALQLHDPSGYLAEADLSYTWDFGDSSGTLISRALVVTHTYLEPGPVTAQVVLQAAIPLTSCGSSPVPGTTDGHRPTAEAPNTTAGQVPTTEVVGTTPGQAPTAEPSGTTSVQVPTTEVISTAPVQMPTAESTAAQVTTTEWVETTARELPIPEPEGPDASSIMSTESITGSLGPLLDGTATLRLVKRQVPLDCVLYRYGSFSVTLDIVQGIESAEILQAVPSGEGDAFELTVSCQGGLPKEACMEISSPGCQPPAQRLCQPVLPSPACQLVLHQILKGGSGTYCLNVSLADTNSLAVVSTQLIMPGQEAGLGQVPLIVGILLVLMAVVLASLIYRRRLMKQDFSVPQLPHSSSHWLRLPRIFCSCPIGENSPLLSGQQV

SEQ ID NO: 759059 - protein, 432 aa, Homo sapiens
KGMGQGSHLMLVPLVAGGKNTMDLVLKRCLLHLAVIGALLAVGATKVPRNQDWLGVSRQLRTKAWNRQLYPEWTEAQRLDCWRGGQVSLKVSNDGPTLIGANASFSIALNFPGSQKVLPDGQVIWVNNTIINGSQVWGGQPVYPQETDDACIFPDGGPCPSGSWSQKRSFVYVWKTWGQYWQVLGGPVSGLSIGTGRAMLGTHTMEVTVYHRRGSRSYVPLAHSSSAFTITDQVPFSVSVSQLRALDGGNKHFLRNQPLTFALQLHDPSGYLAEADLSYTWDFGDSSGTLISRALVVTHTYLEPGPVTAQVVLQAAIPLTSCGSSPVPGTTDGHRPTAEAPNTTAGQVPTTEVVGTTPGQAPTAEPSGTTSVQVPTTEVISTAPVQMPTAESTGMTPEKVPVSEVMGTTLAEMSTPDTEGWLGDILPQCVSG

SEQ ID NO: 759060 - protein, 663 aa, Homo sapiens
MAFDSYCALVLLHLAVIGALLAVGATKVPRNQDWLGVSRQLRTKAWNRQLYPEWTEAQRLDCWRGGQVSLKVSNDGPTLIGANASFSIALNFPGSQKVLPDGQVIWVNNTIINGSQVWGGQPVYPQETDDACIFPDGGPCPSGSWSQKRSFVYVWKTWGQYWQVLGGPVSGLSIGTGRAMLGTHTMEVTVYHRRGSRSYVPLAHSSSAFTITDQVPFSVSVSQLRALDGGNKHFLRNQPLTFALQLHDPSGYLAEADLSYTWDFGDSSGTLISRALVVTHTYLEPGPVTAQVVLQAAIPLTSCGSSPVPGTTDGHRPTAEAPNTTAGQVPTTEVVGTTPGQAPTAEPSGTTSVQVPTTEVISTAPVQMPTAESTGMTPEKVPVSEVMGTTLAEMSTPEATGMTPAEVSIVVLSGTTAAQVTTTEWVETTARELPIPEPEGPDASSIMSTESITGSLGPLLDGTATLRLVKRQVPLDCVLYRYGSFSVTLDIVQGIESAEILQAVPSGEGDAFELTVSCQGGLPKEACMEISSPGCQPPAQRLCQPVLPSPACQLVLHQILKGGSGTYCLNVSLADTNSLAVVSTQLIMPGQEAGLGQVPLIVGILLVLMAVVLASLIYRRRLMKQDFSVPQLPHSSSHWLRLPRIFCSCPIGENSPLLSGQQV

SEQ ID NO: 759061 - protein, 596 aa, Homo sapiens
KGMGQGSHLMLVPLVAGGKNTMDLVLKRCLLHLAVIGALLAVGATKGSQVWGGQPVYPQETDDACIFPDGGPCPSGSWSQKRSFVYVWKTWGQYWQVLGGPVSGLSIGTGRAMLGTHTMEVTVYHRRGSRSYVPLAHSSSAFTITDQVPFSVSVSQLRALDGGNKHFLRNQPLTFALQLHDPSGYLAEADLSYTWDFGDSSGTLISRALVVTHTYLEPGPVTAQVVLQAAIPLTSCGSSPVPGTTDGHRPTAEAPNTTAGQVPTTEVVGTTPGQAPTAEPSGTTSVQVPTTEVISTAPVQMPTAESTGMTPEKVPVSEVMGTTLAEMSTPEATGMTPAEVSIVVLSGTTAAQVTTTEWVETTARELPIPEPEGPDASSIMSTESITGSLGPLLDGTATLRLVKRQVPLDCVLYRYGSFSVTLDIVQGIESAEILQAVPSGEGDAFELTVSCQGGLPKEACMEISSPGCQPPAQRLCQPVLPSPACQLVLHQILKGGSGTYCLNVSLADTNSLAVVSTQLIMPGQEAGLGQVPLIVGILLVLMAVVLASLIYRRRLMKQDFSVPQLPHSSSHWLRLPRIFCSCPIGENSPLLSGQQV

SEQ ID NO: 759062 - protein, 625 aa, Homo sapiens
DAWVDPRVRGKNTMDLVLKRCLLHLAVIGALLAVGATKVPRNQDWLGVSRQLRTKAWNRQLYPEWTEAQRLDCWRGSQVWGGQPVYPQETDDACIFPDGGPCPSGSWSQKRSFVYVWKTWGQYWQVLGGPVSGLSIGTGRAMLGTHTMEVTVYHRRGSRSYVPLAHSSSAFTITDQVPFSVSVSQLRALDGGNKHFLRNQPLTFALQLHDPSGYLAEADLSYTWDFGDSSGTLISRALVVTHTYLEPGPVTAQVVLQAAIPLTSCGSSPVPGTTDGHRPTAEAPNTTAGQVPTTEVVGTTPGQAPTAEPSGTTSVQVPTTEVISTAPVQMPTAESTGMTPEKVPVSEVMGTTLAEMSTPEATGMTPAEVSIVVLSGTTAAQVTTTEWVETTARELPIPEPEGPDASSIMSTESITGSLGPLLDGTATLRLVKRQVPLDCVLYRYGSFSVTLDIVQGIESAEILQAVPSGEGDAFELTVSCQGGLPKEACMEISSPGCQPPAQRLCQPVLPSPACQLVLHQILKGGSGTYCLNVSLADTNSLAVVSTQLIMPGQEAGLGQVPLIVGILLVLMAVVLASLIYRRRLMKQDFSVPQLPHSSSHWLRLPRIFCSCPIGENSPLLSGQQV

SEQ ID NO: 759063 - protein, 524 aa, Homo sapiens
  misc_feature (3)..(3): Xaa can be any naturally occurring amino acid
SGXRTSCVVKKLVYVWKTWGQYWQVLGGPVSGLSIGTGRAMLGTHTMEVTVYHRRGSRSYVPLAHSSSAFTITDQVPFSVSVSQLRALDGGNKHFLRNQPLTFALQLHDPSGYLAEADLSYTWDFGDSSGTLISRALVVTHTYLEPGPVTAQVVLQAAIPLTSCGSSPVPGTTDGHRPTAEAPNTTAGQVPTTEVVGTTPGQAPTAEPSGTTSVQVPTTEVISTAPVQMPTAESTGMTPEKVPVSEVMGTTLAEMSTPEATGMTPAEVSIVVLSGTTAAQVTTTEWVETTARELPIPEPEGPDASSIMSTESITGSLGPLLDGTATLRLVKRQVPLDCVLYRYGSFSVTLDIVQGIESAEILQAVPSGEGDAFELTVSCQGGLPKEACMEISSPGCQPPAQRLCQPVLPSPACQLVLHQILKGGSGTYCLNVSLADTNSLAVVSTQLIMPGQEAGLGQVPLIVGILLVLMAVVLASLIYRRRLMKQDFSVPQLPHSSSHWLRLPRIFCSCPIGENSPLLSGQQV

SEQ ID NO: 759064 - protein, 206 aa, Homo sapiens
GRVGRPTRPRLVKRQVPLDCVLYRYGSFSVTLDIVQGIESAEILQAVPSGEGDAFELTVSCQGGLPKEACMEISSPGCQPPAQRLCQPVLPSPACQLVLHQILKGGSGTYCLNVSLADTNSLAVVSTQLIMPGQEAGLGQVPLIVGILLVLMAVVLASLIYRRRLMKQDFSVPQLPHSSSHWLRLPRIFCSCPIGENSPLLSGQQV

SEQ ID NO: 759065 - protein, 189 aa, Homo sapiens
QPIASRGRVVNRPRLDIAQGIESAEILQAVPSGEGDAFELTVSCQGGLPKEACMEISSPGCQPPAQRLCQPVLPSPACQLVLHQILKGGSGTYCLNVSLADTNSLAVVSTQLIMPGQEAGLGQVPLIVGILLVLMAVVLASLIYRRRLMKQDFSVPQLPHSSSHWLRLPRIFCSCPIGENSPLLSGQQV

SEQ ID NO: 759066 - protein, 205 aa, Homo sapiens
DAWVDPRVRGKNTMDLVLKRCLLHLAVIGALLAVGATKVPRNQDWLGVSRQLRTKAWNRQLYPEWTEAQRLDCWRGGQVSLKVSNDGPTLIGANASFSIALNFPGSQKVLPDGQVIWVNNTIINGSQVWGGQPVYPQETDDACIFPDGGPCPSGSWSQKRSFVYVWKTWGEGLPSQPIIHTCVYFFLPDHLSFGRPFHLNFCDFL

SEQ ID NO: 759067 - protein, 206 aa, Homo sapiens; identical to SEQ ID NO: 759064

SEQ ID NO: 759068 - protein, 674 aa, Homo sapiens
DAWVDPRVRGKNTMDLVLKRCLLHLAVIGALLAVGATKVPRNQDWLGVSRQLRTKAWNRQLYPEWTEAQRLDCWRGGQVSLKVSNDGPTLIGANASFSIALNFPGSQKVLPDGQVIWVNNTIINGSQVWGGQPVYPQETDDACIFPDGGPCPSGSWSQKRSFVYVWKTWGQYWQVLGGPVSGLSIGTGRAMLGTHTMEVTVYHRRGSRSYVPLAHSSSAFTITDQVPFSVSVSQLRALDGGNKHFLRNQPLTFALQLHDPSGYLAEADLSYTWDFGDSSGTLISRALVVTHTYLEPGPVTAQVVLQAAIPLTSCGSSPVPGTTDGHRPTAEAPNTTAGQVPTTEVVGTTPGQAPTAEPSGTTSVQVPTTEVISTAPVQMPTAESTGMTPEKVPVSEVMGTTLAEMSTPEATGMTPAEVSIVVLSGTTAAQVTTTEWVETTARELPIPEPEGPDASSIMSTESITGSLGPLLDGTATLRLVKRQVPLDCVLYRYGSFSVTLDIVQGIESAEILQAVPSGEGDAFELTVSCQGGLPKEACMEISSPGCQPPAQRLCQPVLPSPACQLVLHQILKGGSGTYCLNVSLADTNSLAVVSTQLIMPGQEAGLGQVPLIVGILLVLMAVVLASLIYRRRLMKQDFSVPQLPHSSSHWLRLPRIFCSCPIGENSPLLSGQQV

SEQ ID NO: 759069 - protein, 680 aa, Homo sapiens; identical to SEQ ID NO: 759053

SEQ ID NO: 759070 - protein, 687 aa, Homo sapiens
MGQGSHLMLVPLVAGGKNTMDLVLKRCLLHLAVIGALLAVGATKVPRNQDWLGVSRQLRTKAWNRQLYPEWTEAQRLDCWRGGQVSLKVSNDGPTLIGANASFSIALNFPGSQKVLPDGQVIWVNNTIINGSQVWGGQPVYPQETDDACIFPDGGPCPSGSWSQKRSFVYVWKTWGQYWQVLGGPVSGLSIGTGRAMLGTHTMEVTVYHRRGSRSYVPLAHSSSAFTITDQVPFSVSVSQLRALDGGNKHFLRNQPLTFALQLHDPSGYLAEADLSYTWDFGDSSGTLISRALVVTHTYLEPGPVTAQVVLQAAIPLTSCGSSPVPGTTDGHRPTAEAPNTTAGQVPTTEVVGTTPGQAPTAEPSGTTSVQVPTTEVISTAPVQMPTAESTGMTPEKVPVSEVMGTTLAEMSTPEATGMTPAEVSIVVLSGTTAAQVTTTEWVETTARELPIPEPEGPDASSIMSTESITGSLGPLLDGTATLRLVKRQVPLDCVLYRYGSFSVTLDIVQGIESAEILQAVPSGEGDAFELTVSCQGGLPKEACMEISSPGCQPPAQRLCQPVLPSPACQLVLHQILKGGSGTYCLNVSLADTNSLAVVSTQLIMPVPGILLTGQEAGLGQVPLIVGILLVLMAVVLASLIYRRRLMKQDFSVPQLPHSSSHWLRLPRIFCSCPIGENSPLLSGQQV

SEQ ID NO: 759071 - protein, 537 aa, Homo sapiens
KGMGQGSHLMLVPLVAGGKNTMDLVLKRCLLHLAVIGALLAVGATKVPRNQDWLGVSRQLRTKAWNRQLYPEWTEAQRLDCWRGGQVSLKVSNDGPTLIGANASFSIALNFPGSQKVLPDGQVIWVNNTIINGSQVWGGQPVYPQETDDACIFPDGGPCPSGSWSQKRSFVYVWKTWGQYWQVLGGPVSGLSIGTGRAMLGTHTMEVTVYHRRGSRSYVPLAHSSSAFTITDQVPFSVSVSQLRALDGGNKHFLRNQPLTFALQLHDPSGYLAEADLSYTWDFGDSSGTLISRALVVTHTYLEPGPVTAQVVLQAAIPLTSCGSSPVPGTTDGHRPTAEAPNTTAGQVPTTEVVGTTPGQAPTAEPSGTTSVQVPTTEVISTAPVQMPTAESTGMTPEKVPVSEVMGTTLAEMSTPEATGMTPAEVSIVVLSGTTAAQVTTTEWVETTARELPIPEPEGPDASSIMSTESITGSLGPLLDGTATLRLVKRQVPLDCVLYRYGSFSVTLDIVHGIESSEILQAIPSCYVNVFIIICSI

SEQ ID NO: 759072 - protein, 440 aa, Homo sapiens
MGQGSHLMLVPLVAGGKNTMDLVLKRCLLHLAVIGALLAVGATKVPRNQDWLGVSRQLRTKAWNRQLYPEWTEAQRLDCWRGGQVSLKVSNDGPTLIGANASFSIALNFPGSQKVLPDGQVIWVNNTIINGSQVWGGQPVYPQETDDACIFPDGGPCPSGSWSQKRSFVYVWKTWGQYWQVLGGPVSGLSIGTGRAMLGTHTMEVTVYHRRGSRSYVPLAHSSSAFTITDQVPFSVSVSQLRALDGGNKHFLRNQPLTFALQLHDPSGYLAEADLSYTWDFGDSSGTLISRALVVTHTYLEPGPVTAQVVLQAAIPLTSCGSSPVPGTTDGHRPTAEAPNTTAGQVPTTEVVGTTPGQAPTAEPSGTTSVQVPTTEVISTAPVQMPTAESTAAQVTTTEWVETTARELPIPEPEGPDASSIMSTESITGSLGPPLDLAMR

SEQ ID NO: 759073 - protein, 347 aa, Homo sapiens
KGMGQGSHLMLVPLVAGGKNTMDLVLKRCLLHLAVIGALLAVGATKVPRNQDWLGVSRQLRTKAWNRQLYPEWTEAQRLDCWRGGQVSLKVSNDGPTLIGANASFSIALNFPGSQKVLPDGQVIWVNNTIINGSQVWGGQPVYPQETDDACIFPDGGPCPSGSWSQKRSFVYVWKTWGQYWQVLGGPVSGLSIGTGRAMLGTHTMEVTVYHRRGSRSYVPLAHSSSAFTITDQVPFSVSVSQLRALDGGNKHFLRNQPLTFALQLHDPSGYLAEADLSYTWDFGDSSGTLISRALVVTHTYLEPGPVTAGGLGGFLSSWVPRAAPWAALGPPQGALPGVPGPDLACC

SEQ ID NO: 759074 - protein, 478 aa, Homo sapiens
MEVTVYHRRGSRSYVPLAHSSSAFTITDQVPFSVSVSQLRALDGGNKHFLRNQPLTFALQLHDPSGYLAEADLSYTWDFGDSSGTLISRALVVTHTYLEPGPVTAQVVLQAAIPLTSCGSSPVPGTTDGHRPTAEAPNTTAGQVPTTEVVGTTPGQAPTAEPSGTTSVQVPTTEVISTAPVQMPTAESTGMTPEKVPVSEVMGTTLAEMSTPEATGMTPAEVSIVVLSGTTAAQVTTTEWVETTARELPIPEPEGPDASSIMSTESITGSLGPLLDGTATLRLVKRQVPLDCVLYRYGSFSVTLDIVQGIESAEILQAVPSGEGDAFELTVSCQGGLPKEACMEISSPGCQPPAQRLCQPVLPSPACQLVLHQILKGGSGTYCLNVSLADTNSLAVVSTQLIMPGQEAGLGQVPLIVGILLVLMAVVLASLIYRRRLMKQDFSVPQLPHSSSHWLRLPRIFCSCPIGENSPLLSGQQV

SEQ ID NO: 759075 - protein, 620 aa, Homo sapiens
DAWVDPRVRGKNTMDLVLKRCLLHLAVIGALLAVGATKVPRNQDWLGVSRQLRTKAWNRQLYPEWTEAQRLDCWRGGQVSLKVSNDGPTLIGANASFSIALNFPGSQKVLPDGQVIWVNNTIINGSQVWGGQPVYPQETDDACIFPDGGPCPSGSWSQKRSFVYVWKTWDQVPFSVSVSQLRALDGGNKHFLRNQPLTFALQLHDPSGYLAEADLSYTWDFGDSSGTLISRALVVTHTYLEPGPVTAQVVLQAAIPLTSCGSSPVPGTTDGHRPTAEAPNTTAGQVPTTEVVGTTPGQAPTAEPSGTTSVQVPTTEVISTAPVQMPTAESTGMTPEKVPVSEVMGTTLAEMSTPEATGMTPAEVSIVVLSGTTAAQVTTTEWVETTARELPIPEPEGPDASSIMSTESITGSLGPLLDGTATLRLVKRQVPLDCVLYRYGSFSVTLDIVQGIESAEILQAVPSGEGDAFELTVSCQGGLPKEACMEISSPGCQPPAQRLCQPVLPSPACQLVLHQILKGGSGTYCLNVSLADTNSLAVVSTQLIMPGQEAGLGQVPLIVGILLVLMAVVLASLIYRRRLMKQDFSVPQLPHSSSHWLRLPRIFCSCPIGENSPLLSGQQV

SEQ ID NO: 759076 - protein, 274 aa, Homo sapiens
  misc_feature (3)..(3): Xaa can be any naturally occurring amino acid
SGXRTSCVVKKLVYVWKTWGQYWQVLGGPVSGLSIGTGRAMLGTHTMEVTVYHRRGSRSYVPLAHSSSAFTITDQVPFSVSVSQLRALDGGNKHFLRNQPLTFALQLHDPSGYLAEADLSYTWDFGDSSGTLISRALVVTHTYLEPGPVTAQVVLQAAIPLTSCGSSPVPGTTDGHRPTAEAPNTTAGQVPTTEVVGTTPGQAPTAEPSGTTSVQVPTTEVISTAPVQMPTAESTGMTPEKVPVSEVMGTTLAEMSTPDTEGWLGDILPQCVSG

SEQ ID NO: 759077 - protein, 90 aa, Homo sapiens
LCAWSETENLEPDLPASDSLLLGVRLKTGSRLPCLLQARRTYPFSACAPPCACALPASRRRALQPLRDSAAHSPRMVFPPEFFPGRGSQD

SEQ ID NO: 759078 - protein, 90 aa, Homo sapiens; identical to SEQ ID NO: 759077

SEQ ID NO: 759079 - protein, 90 aa, Homo sapiens; identical to SEQ ID NO: 759077

SEQ ID NO: 759080 - protein, 375 aa, Homo sapiens
PRQEQRKQNDIIPGKNNLSNVENGHLSRKRSSSDSWEPTSAGSKQNKFPEKRKRNSVDSDLKSTRESMIPKARESFLEKRPDGPHQKEKFIKHIALKTPGDVLRLEDISKEPSDETDGSSAGLAPSNSGNSGHHSTRNSDQIQVAGTKETKMQKPHLPLSQEKSAIKKASNLQKNKTASSTTKEKETKLPLLSRVPSAGSSLVPLNAKNCALPVSKKDKERSSSKECSGHSTESTKHKEHKAKTNKADSNVSSGKISGGPLRSEYGTPTKSPPAALEVVPCIPSPAAPSDKAPSEGESSGNSNAGSSALKRKLRGDFDSDEESLGYNLDSDEEEETLKSLEEIMALNFNQTPAATGKPPALSKGLRSLSSDYTVS

SEQ ID NO: 759081 - protein, 94 aa, Homo sapiens
LYDDLRCDPERDHFRKICEEYITGKFDPQDIETKNLDLILNYFLLSTLLTLCLVFLYEGFTAEIDVCSLPSSLPKPGPAHTHWTVPVLTAASLL

SEQ ID NO: 759082 - protein, 488 aa, Homo sapiens
MFAAGLAPFYASNFSLWSAAYCSSAGPGGCSFPLDPAAVKKPSFCIADILHAGVGDLGAAPEGLAGASAAALTAHLGSVHPHASFQAAARSPLRPTPVVAPSEVPAGFPQRLSPLSAAYHHHHPQQQQQQQQPQQQQPPPPPRAGALQPPASGTRVVPNPHHSGSAPAPSSKDLKFGIDRILSAEFDPKVKEGNTLRDLTSLLTGGRPAGVHLSGLQPSAGQFFASLDPINEASAILSPLNSNPRNSVQHQFQDTFPGPYAVLTKDTMPQTYKRKRSWSRAVFSNLQRKGLEKRFEIQKYVTKPDRKQLAAMLGLTDAQVKVWFQNRRMKWRHSKEAQAQKDKDKEAGEKPSGGAPAADGEQDERSPSRSEGEAESESSDSESLDMAPSDTERTEGSERSLHQTTVIKAPVTGALITASSAGSGGSSGGGGNSFSFSSASSLSSSSTSAGCASSLGGGGASELLPATQPTASSAPKSPEPAQGALGCL

SEQ ID NO: 759083 - protein, 301 aa, Homo sapiens
TGSLLTSLNKNLTSLLTGGRPAGVHLSGLQPSAGQFFASLDPINEASAILSPLNSNPRNSVQHQFQDTFPGPYAVLTKDTMPQTYKRKRSWSRAVFSNLQRKGLEKRFEIQKYVTKPDRKQLAAMLGLTDAQVKVWFQNRRMKWRHSKEAQAQKDKDKEAGEKPSGGAPAADGEQDERSPSRSEGEAESESSDSESLDMAPSDTERTEGSERSLHQTTVIKAPVTGALITASSAGSGGSSGGGGNSFSFSSASSLSSSSTSAGCASSLGGGGASELLPATQPTASSAPKSPEPAQGALGCL

SEQ ID NO: 759084 - protein, 160 aa, Homo sapiens [sequence omitted]

SEQ ID NO: 759085 - protein, 338 aa, Homo sapiens
MFAAGLAPFYASNFSLWSAAYCSSAGPGGCSFPLDPAAVKKPSFCIADILHAGVGDLGAAPEGLAGASAAALTAHLGSVHPHASFQAAARSPLRPTPVVAPSEVPAGFPQRLSPLSAAYHHHHPQQQQQQQQPQQQQPPPPPRAGALQPPASGTRVVPNPHHSGSAPAPSSKDLKFGIDRILSAEFDPKVKEGNTLRDLTSLLTGGRPAGVHLSGLQPSAGQFFASLDPINEASAILSPLNSNPRNSVQHQFQDTFPGPYAVLTKDTMPQTYKRKRSWSRAVFSNLQRKGLEKRFEIQKYVTKPDRKQLAAMLGLTDAQVRQFWLQRTAPSGGQQRTA

SEQ ID NO: 759086 - protein, 128 aa, Homo sapiens
AAARPLGRGAAGGGVGARVCECVRAVAPPPPAPRSVPLARPGRAALSRVRALFPPPPPPPFCELVSVTGARVTACPSGTDSVGGRRRRSRSGRSSWDRDGARAPGSPDPRSPARGGGLACQLGNGRLS

SEQ ID NO: 759087 - protein, 91 aa, Homo sapiens
MDSKESLTPGREENPSSVLAQERGDVMDFYKTLRGGATVKVSASSPSLAVASQSDSKQRRLLVDFPKGSVSNAQQPDLSKAVSLSMGLYMG

SEQ ID NO: 759088 - protein, 64 aa, Homo sapiens
MEQQTISVAKAGLVCKLNTRTTILAATNPKGQYDPQESVSVNIALGSPLLSRFDLILVLLDTKN

SEQ ID NO: 759089 - protein, 789 aa, Homo sapiens
METLLGGLLAFGMAFAVVDACPKYCVCQNLSESLGTLCPSKGLLFVPPDIDRRTVELRLGGNFIIHISRQDFANMTGLVDLTLSRNTISHIQPFSFLDLESLRSLHLDSNRLPSLGEDTLRGLVNLQHLIVNNNQLGGIADEAFEDFLLTLEDLDLSYNNLHGLPWDSVRRMVNLHQLSLDHNLLDHIAEGTFADLQKLARLDLTSNRLQKLPPDPIFARSQASALTATPFAPPLSFSFGGNPLHCNCELLWLRRLERDDDLETCGSPGGLKGRYFWHVREEEFVCEPPLITQHTHKLLVLEGQAATLKCKAIGDPSPLIHWVAPDDRLVGNSSRTAVYDNGTLDIFITTSQDSGAFTCIAANAAGEATAMVEVSIVQLPHLSNSTSRTAPPKSRLSDITGSSKTSRGGGGSGGGEPPKSPPERAVLVSEVTTTSALVKWSVSKSAPRVKMYQLQYNCSDDEVLIYRMIPASNKAFVVNNLVSGTGYDLCVLAMWDDTATTLTATNIVGCAQFFTKADYPQCQSMHSQILGGTMILVIGGIIVATLLVFIVILMVRYKVCNHEAPSKMAAAVSNVYSQTNGAQPPPPSSAPAGAPPQGPPKVVVRNELLDFTASLARASDSSSSSSLGSGEAAGLGRAPWRIPPSAPRPKPSLDRLMGAFASLDLKSQRKEELLDSRTPAGRGAGTSARGHHSDREPLLGPPAARARSLLPLPLEGKAKRSHSFDMGDFAAAAAGGVVPGGYSPPRKVSNIWTKRSLSVNGMLLPFEESDLVGARGTFGSSEWVMESTV

SEQ ID NO: 759090 - protein, 148 aa, Homo sapiens
MFLELDVSPPAVFEMEFSHDQEQDPRALHMERLMRLDSFLERPSTSKVRKSRSWCHRIFFLSMLPTPIPQACMPKPPLIPLITSLLSSLISHLPLFASLPHPHFLPLCVNPSLFSVIDSISIPKTTLCLSVSLSLRVPQPGLMGSSES

SEQ ID NO: 759091 - protein, 793 aa, Homo sapiens
MASKTKASEALKVVARCRPLSRKEEAAGHEQILTMDVKLGQVTLRNPRAAPGELPKTFTFDAVYDASSKQADLYDETVRPLIDSVLQGFNGTVFAYGQTGTGKTYTMQGTWVEPELRGVIPNAFEHIFTHISRSQNQQYLVRASYLEIYQEEIRDLLSKEPGKRLELKENPETGVYIKDLSSFVTKNVKEIEHVMNLGNQTRAVGSTHMNEVSSRSHAIFIITVECSERGSDGQDHIRVGKLNLVDLAGSERQNKAGPNTAGGAATPSSGGGGGGGGSGGGAGGERPKEASKINLSLSALGNVIAALAGNRSTHIPYRDSKLTRLLQDSLGGNAKTIMVATLGPASHSYDESLSTLRFANRAKNIKNKPRVNEDPKDTLLREFQEEIARLKAQLEKRGMLGKRPRRKSSRRKKAVSAPPGYPEGPVIEAWVAEEEDDNNNNHRPPQPILESALEKNMENYLQEQKERLEEEKAAIQDDRSLVSEEKQKLLEEKEKMLEDLRREQQATELLAAKYKAMESKLLIGGRNIMDHTNEQQKMLELKRQEIAEQKRREREMQQEMMLRDEETMELRGTYTSLQQEVEVKTKKLKKLYAKLQAVKAEIQDQHDEYIRVRQDLEEAQNEQTRELKLKYLIIENFIPPEEKNKIMNRLFLDCEEEQWKFQPLVPAGVSSSQMKKRPTSAVGYKRPISQYARVAMAMGSHPRYRAENIMFLELDVSPPAVFEMEFSHDQEQDPRALHMERLMRLDSFLERPSTSKVRKSRSWCQSPQRPPPSTTHASLASASLRPATVADHE

SEQ ID NO: 759092 - protein, 458 aa, Homo sapiens
MIPQLGGRTPGEPLPSGGPGPPAAHDRQPTLWIPRGRRRRQLAAHPHPIFLFLYLIVAEAVYGSAPSAPAWGGLRRKKAVSAPPGYPEGPVIEAWVAEEEDDNNNNHRPPQPILESALEKNMENYLQEQKERLEEEKAAIQDDRSLVSEEKQKLLEEKEKMLEDLRREQQATELLAAKYKAMESKLLIGGRNIMDHTNEQQKMLELKRQEIAEQKRREREMQQEMMLRDEETMELRGTYTSLQQEVEVKTKKLKKLYAKLQAVKAEIQDQHDEYIRVRQDLEEAQNEQTRELKLKYLIIENFIPPEEKNKIMNRLFLDCEEEQWKFQPLVPAGVSSSQMKKRPTSAVGYKRPISQYARVAMAMGSHPRYRAENIMFLELDVSPPAVFEMEFSHDQEQDPRALHMERLMRLDSFLERPSTSKVRKSRSWCQSPQRPPPSTTHASLASASLRPATVADHE

SEQ ID NO: 759093 - protein, 789 aa, Homo sapiens
MASKTKASEALKVVARCRPLSRKEEAAGHEQILTMDVKLGQVTLRNPRAAPGELPKTFTFDAVYDASSKQADLYDETVRPLIDSVLQGFNGTVFAYGQTGTGKTYTMQGTWVEPELRGVIPNAFEHIFTHISRSQNQQYLVRASYLEIYQEEIRDLLSKEPGKRLELKENPETGVYIKDLSSFVTKNVKEIEHVMNLGNQTRAVGSTHMNEVSSRSHAIFIITVECSERGSDGQDHIRVGKLNLVDLAGSERQNKAGPNTAGGAATPSSGGGGGGGGSGGGAGGERPKEASKINLSLSALGNVIAALAGNRSTHIPYRDSKLTRLLQDSLGGNAKTIMVATLGPASHSYDESLSTLRFANRAKNIKNKPRVNEDPKDTLLREFQEEIARLKAQLEKRGMLGKRPRRKSSRRKKAVSAPPGYPEGPVIEAWVAEEEDDNNNNHRPPQPILESALEKNMENYLQEQKERLEEEKAAIQDDRSLVSEEKQKLLEEKEKMLEDLRREQQATELLAAKYKAMESKLLIGGRNIMDHTNEQQKMLELKRQEIAEQKRREREMQQEMMLRDEETMELRGTYTSLQQEVEVKTKKLKKLYAKLQAVKAEIQDQHDEYIRVRQDLEEAQNEQTRELKLKYLIIENFIPPEEKNKIMNRLFLDCEEEQWKFQPLVPAGVSSSQMKKRPTSAVGYKRPISQYARVAMAMGSHPRYRLSLRWNSLTTKNKTLVRYTWRGSCDWTAFWKDLPRLKSESPDPGARVLSGLHLPPHMPPWPLLLCALQQWRTMSDNHHVRLPIQ

SEQ ID NO: 759094 - protein, 793 aa, Homo sapiens; identical to SEQ ID NO: 759091

SEQ ID NO: 759095 - protein, 672 aa, Homo sapiens
MASKTKASEALKVVARCRPLSRKEEAAGHEQILTMDVKLGQVTLRNPRAAPGELPKTFTFDAVYDASSKQADLYDETVRPLIDSVLQGFNGTVFAYGQTGTGKTYTMQGTWVEPELRGVIPNAFEHIFTHISRSQNQQYLVRASYLEIYQEEIRDLLSKEPGKRLELKENPETGVYIKDLSSFVTKNVKEIEHVMNLGNQTRAVGSTHMNEVSSRSHAIFIITVECSERGSDGQDHIRVGKLNLVDLAGSERQNKAGPNTAGGAATPSSGGGGGGGGSGGGAGGERPKEASKINLSLSALGNVIAALAGNRSTHIPYRDSKLTRLLQDSLGGNAKTIMVATLGPASHSYDESLSTLRFANRAKNIKNKPRVNEDPKDTLLREFQEEIARLKAQLEKRGMLGKRPRRKSSRRKKAVSAPPGYPEGPVIEAWVAEEEDDNNNNHRPPQPILESALEKNMENYLQEQKERLEEEKAAIQDDRSLVSEEKQKLLEEKEKMLEDLRREQQATELLAAKYKAMESKLLIGGRNIMDHTNEQQKMLELKRQEIAEQKRREREMQQEMMLRDEETMELRGTYTSLQQEVEVKTKKLKKLYAKLQAVKAEIQDQHDEYIRVRQDLEEAQNEQTRELKLKYLIIENFIPPEEKNKIMNRLFLDCEEEQWKFQPLVPAGVYFM

SEQ ID NO: 759096 - protein, 857 aa, Homo sapiens
MASKTKASEALKVVARCRPLSRKEEAAGHEQILTMDVKLGQVTLRNPRAAPGELPKTFTFDAVYDASSKQADLYDETVRPLIDSVLQGFNGTVFAYGQTGTGKTYTMQGTWVEPELRGVIPNAFEHIFTHISRSQNQQYLVRASYLEIYQEEIRDLLSKEPGKRLELKENPETGVYIKDLSSFVTKNVKEIEHVMNLGNQTRAVGSTHMNEVSSRSHAIFIITVECSERGSDGQDHIRVGKLNLVDLAGSERQNKAGPNTAGGAATPSSGGGGGGGGSGGGAGGERPKEASKINLSLSALGNVIAALAGNRSTHIPYRDSKLTRLLQDSLGGNAKTIMVATLGPASHSYDESLSTLRFANRAKNIKNKPRVNEDPKDTLLREFQEEIARLKAQLEKRGMLGKRPRRKSSRRKKAVSAPPGYPEGPVIEAWVAEEEDDNNNNHRPPQPILESALEKNMENYLQEQKERLEEEKAAIQDDRSLVSEEKQKLLEEKEKMLEDLRREQQATELLAAKYKAMESKLLIGGRNIMDHTNEQQKMLELKRQEIAEQKRREREMQQEMMLRDEETMELRGTYTSLQQEVEVKTKKLKKLYAKLQAVKAEIQDQHDEYIRVRQDLEEAQNEQTRELKLKYLIIENFIPPEEKNKIMNRLFLDCEEEQWKFQPLVPAGVSSSQMKKRPTSAVGYKRPISQYARVAMAMGSHPRYRAENIMFLELDVSPPAVFEMEFSHDQEQDPRALHMERLMRLDSFLERPSTSKVRKSRSWCHRIFSSAMLPTPIPQACMPKPPLIPLITSLLSSLISHLPLFASLPHPHFLPLCVNPSLFSVIDSISIPKTTLCLSVSLSLRVPQPGLMGSSES

SEQ ID NO: 759097 - protein, 616 aa, Homo sapiens
MASKTKASEALKVVARCRPLSRKEEAAGHEQILTMDVKLGQVTLRNPRAAPGELPKTFTFDAVYDASSKQADLYDETVRPLIDSVLQGFNGTVFAYGQTGTGKTYTMQGTWVEPELRGVIPNAFEHIFTHISRSQNQQYLVRASYLEIYQEEIRDLLSKEPGKRLELKENPETGVYIKDLSSFVTKNVKEIEHVMNLGNQTRAVGSTHMNEVSSRSHAIFIITVECSERGSDGQDHIRVGKLNLVDLAGSERQNKAGPNTAGGAATPSSGGGGGGGGSGGGAGGERPKEASKINLSLSALGNVIAALAGNRSTHIPYRDSKLTRLLQDSLGGNAKTIMVATLGPASHSYDESLSTLRFANRAKNIKNKPRVNEDPKDTLLREFQEEIARLKAQLEKRGMLGKRPRRKSSRRKKAVSAPPGYPEGPVIEAWVAEEEDDNNNNHRPPQPILESALEKNMENYLQEQKERLEEEKAAIQDDRSLVSEEKQKLLEEKEKMLEDLRREQQATELLAAKYKAMESKLLIGGRNIMDHTNEQQKMLELKRQEIAEQKRREREMQQEMMLRDEETMELRGTYTSLRGCAVNQESRALASAAGAGSAAVGFRWALGGKGPDQQTS

SEQ ID NO: 759098 - protein, 793 aa, Homo sapiens; identical to SEQ ID NO: 759091

SEQ ID NO: 759099 - protein, 535 aa, Homo sapiens
MIPQLGGRTPGEPLPSGGPGPPAAHDRQPTLWIPRGRRRRQLAAHPHPIFLFLYLIVAEAVYGSAPLLQDSLGGNAKTIMVATLGPASHSYDESLSTLRFANRAKNIKNKPRVNEDPKDTLLREFQEEIARLKAQLEKRGMLGKRPRRKSSRRKKAVSAPPGYPEGPVIEAWVAEEEDDNNNNHRPPQPILESALEKNMENYLQEQKERLEEEKAAIQDDRSLVSEEKQKLLEEKEKMLEDLRREQQATELLAAKYKAMESKLLIGGRNIMDHTNEQQKMLELKRQEIAEQKRREREMQQEMMLRDEETMELRGTYTSLQQEVEVKTKKLKKLYAKLQAVKAEIQDQHDEYIRVRQDLEEAQNEQTRELKLKYLIIENFIPPEEKNKIMNRLFLDCEEEQWKFQPLVPAGVSSSQMKKRPTSAVGYKRPISQYARVAMAMGSHPRYRAENIMFLELDVSPPAVFEMEFSHDQEQDPRALHMERLMRLDSFLERPSTSKVRKSRSWCQSPQRPPPSTTHASLASASLRPATVADHE

SEQ ID NO: 759100 - protein, 669 aa, Homo sapiens
MASKTKASEALKVVARCRPLSRKEEAAGHEQILTMDVKLGQVTLRNPRAAPGELPKTFTFDAVYDASSKQADLYDETVRPLIDSVLQGFNGTVFAYGQTGTGKTYTMQGTWVEPELRGVIPNAFEHIFTHISRSQNQQYLVRASYLEIYQEEIRDLLSKEPGKRLELKENPETGVYIKDLSSFVTKNVKEIEHVMNLGNQTRAVGSTHMNEVSSRSHAIFIITVECSERGSDGQDHIRVGKLNLVDLAGSERQNKAGPNTAGGAATPSSGGGGGGGGSGGGAGGERPKEASKINLSLSALGNVIAALAGNRSTHIPYRDSKLTRLLQDSLGGNAKTIMVATLGPASHSYDESLSTLRFANRAKNIKNKPRVNEDPKDTLLREFQEEIARLKAQLEKRGMLGKRPRRKSSRRKKAVSAPPGYPEGPVIEAWVAEEEDDNNNNHRPPQPILESALEKNMENYLQEQKERLEEEKAAIQDDRSLVSEEKQKLLEEKEKMLEDLRREQQATELLAAKYKAMESKLLIGGRNIMDHTNEQQKMLELKRQEIAEQKRREREMQQEMMLRDEETMELRGTYTSLQQEVEVKTKKLKKLYAKLQAVKAEIQDQHDEYIRVRQDLEEAQNEQTRELKLKYLIIENFIPPEEKNKIMNRLFLDCEEEQWKFQPLVPAGV

SEQ ID NO: 759101 - protein, 169 aa, Homo sapiens
TGEKPYKCLECGKAFKRRSYLMQHHPIHTGEKPYECSQCRKAFTHRSTFIRHNRTHTGEKPFECKECEKAFSNRAHLIQHYIIHTGEKPYDCMACGKAFRCSSELIQHQRIHTGEKPYECTQCGKAFHRSTYLIQHSVIHTGEMPYKCIECGKAFKRRSHLLQHQRVHT

SEQ ID NO: 759102 - protein, 145 aa, Homo sapiens
KAKNSPVPAMSNVPHKSSLPEGIRPGTVLRIRGLVPPNASRFHVNLLCGEEQGSDAALHFNPRLDTSEVVFNSKEQGSWGREERGPGVPFQRGQPFEVLIIASDDGFKAVVGDAQYHHFRHRLPLARVRLVEVGGDVQLDSVRIF

SEQ ID NO: 759103 - protein, 145 aa, Homo sapiens; identical to SEQ ID NO: 759102

SEQ ID NO: 759104 - protein, 90 aa, Homo sapiens
GFGRFGQLLYCILFYLRSLLNSYLTAFASEYSRCQQGFELFALSSIFFLSPQDSLYSHLGFSKRILHGEFQMMFSDKFVPQTTWDSEEYF

SEQ ID NO: 759105 - protein, 69 aa, Homo sapiens
KRFRPQPAHLAEEEPRDALSGIGFSQQSLEGLAARRAQRALLCLFGACGLREREDREARRLLPFWRLPH

SEQ ID NO: 759106 - protein, 69 aa, Homo sapiens; identical to SEQ ID NO: 759105

SEQ ID NO: 759107 - protein, 69 aa, Homo sapiens; identical to SEQ ID NO: 759105

SEQ ID NO: 759108 - protein, 124 aa, Homo sapiens
NEFSSNLWNEEQAYIIVYLCMVCNFKNFNDSKINKAVYISWKIRQQYFSFPVAVITVQPSDAPLRHSARKKFPSLGHPASCLSPAVFYQIGEHSHSGLEIKFYKNPMPQPELQWCSTFPAPRTY

SEQ ID NO: 759109 - protein, 332 aa, Homo sapiens
MSTVKEQLIEKLIEDDENSQCKITIVGTGAVGMACAISILLKDLADELALVDVALDKLKGEMMDLQHGSLFFSTSKITSGKDYSVSANSRIVIVTAGARQQEGETRLALVQRNVAIMKSIIPAIVHYSPDCKILVVSNPVDILTYIVWKISGLPVTRVIGSGCNLDSARFRYLIGEKLGVHPTSCHGWIIGEHGDSSVPLWSGVNVAGVALKTLDPKLGTDSDKEHWKNIHKQVIQSAYEIIKLKGYTSWAIGLSVMDLVGSILKNLRRVHPVSTMVKGLYGIKEELFLSIPCVLGRNGVSDVVKINLNSEEEALFKKSAETLWNIQKDVIF

SEQ ID NO: 759110 - protein, 332 aa, Homo sapiens; identical to SEQ ID NO: 759109

SEQ ID NO: 759111 - protein, 216 aa, Homo sapiens
MKSIIPAIVHYSPDCKILVVSNPVDILTYIVWKISGLPVTRVIGSGCNLDSARFRYLIGEKLGVHPTSCHGWIIGEHGDSSVPLWSGVNVAGVALKTLDPKLGTDSDKEHWKNIHKQVIQSAYEIIKLKGYTSWAIGLSVMDLVGSILKNLRRVHPVSTMVKGLYGIKEELFLSIPCVLGRNGVSDVVKINLNSEEEALFKKSAETLWNIQKDVIF

SEQ ID NO: 759112 - protein, 696 aa, Homo sapiens
MLLWILLLETSLCFAAGNVTGDVCKEKICSCNEIEGDLHVDCEKKGFTSLQRFTAPTSQFYHLFLHGNSLTRLFPNEFANFYNAVSLHMENNGLHEIVPGAFLGLQLVKRLHINNNKIKSFRKQTFLGLDDLEYLQADFNLLRDIDPGAFQDLNKLEVLILNDNLISTLPANVFQYVPITHLDLRGNRLKTLPYEEVLEQIPGIAEILLEDNPWDCTCDLLSLKEWLENIPKNALIGRVVCEAPTRLQGKDLNETTEQDLCPLKNRVDSSLPAPPAQEETFAPGPLPTPFKTNGQEDHATPGSAPNGGTKIPGNWQIKIRPTAAIATGSSRNKPLANSLPCPGGCSCDHIPGSGLKMNCNNRNVSSLADLKPKLSNVQELFLRDNKIHSIRKSHFVDYKNLILLDLGNNNIATVENNTFKNLLDLRWLYMDSNYLDTLSREKFAGLQNLEYLNVEYNAIQLILPGTFNAMPKLRILILNNNLLRSLPVDVFAGVSLSKLSLHNNYFMYLPVAGVLDQLTSIIQIDLHGNPWECSCTIVPFKQWAERLGSEVLMSDLKCETPVNFFRKDFMLLSNDEICPQLYARISPTLTSHSKNSTGLAETGTHSNSYLDTSRVSISVLVPGLLLVFVTSAFTVVGMLVFILRNRKRSKRRDANSSASEINSLQTVCDSSYWHNGPYNADGAHRVYDCGSHSLSD

SEQ ID NO: 759113 - protein, 1358 aa, Homo sapiens
PGLSRHQSLNPGLCKRHLIPGSRALPALHPLPNLPRLPRSLPRSLPARFLPHHRSARRKGPGLKMALAGLCALLACCWGPAAVLATAAGDVDPSKELECKLKSITVSALPFLRENDLSIMHSPSASEPKLLFSVRNDFPGEMVVVDDLENTELPYFVLEISGNTEDIPLVRWRQQWLENGTLLFHIHHQDGAPSLPGQDPTEEPQHESAEEELRILHISVMGGMIALLLSILCLVMILYTRRRWCKRRRVPQPQKSASAEAANEIHYIPSVLIGGHGRESLRNARVQGHNSSGTLSIRETPILDGYEYDITDLRHHLQRECMNGGEDFASQVTRTLDSLQGCNEKSGMDLTPGSDNAKLSLMNKYKDNIIATSPVDSNHQQATLLSHTSSSQRKRINNKARAGSAFLNPEGDSGTEAENDPQLTFYTDPSRSRRRSRVGSPRSPVNKTTLTLISITSCVIGLVCSSHVNCPLVVKITLHVPEHLIADGSRFILLEGSQLDASDWLNPAQVVLFSQQNSSGPWAMDLCARRLLDPCEHQCDPETGECLCYEGYMKDPVHKHLCIRNEWGTNQGPWPYTIFQRGFDLVLGEQPSDKIFRFTYTLGEGMWLPLSKSFVIPPAELAINPSAKCKTDMTVMEDAVEVREELMTSSSFDSLEVLLDSFGPVRDCSKDNGGCSKNFRCISDRKLDSTGCVCPSGLSPMKDSSGCYDRHIGVDCSDGFNGGCEQLCLQQMAPFPDDPTLYNILMFCGCIEDYKLGVDGRSCQLITETCPEGSDCGESRELPMNQTLFGEMFFGYNNHSKEVAAGQVLKGTFRQNNFARGLDQQLPDGLVVATVPLENQCLEEISEPTPDPDFLTGMVNFSEVSGYPVLQHWKVRSVMYHIKLNQVAISQALSNALHSLDGATSRADFVALLDQFGNHYIQEAIYGFEESCSIWYPNKQVQRRLWLEYEDISKGNSPSDESEERERDPKVLTFPEYITSLSDSGTKHMAAGVRMECHSKGRCPSSCPLCHVTSSPDTPAEPVLLEVTKAAPIYELVTNNQTQRLLQEATMSSLWCSGTGDVIEDWCRCDSTAFGADGLPTCAPLPQPVLRLSTVHEPSSTLVVLEWEHSEPPIGVQIVDYLLRQEKVTDRMDHSKVETETVLSFVDDIISGAKSPCAMPSQVPDKQLTTISLIIRCLEPDTIYMFTLWGVDNTGRRSRPSDVIVKTPCPVVDDVKAQEIADKIYNLFNGYTSGKEQQTAYNTLLDLGSPTLHRVLYHYNQHYESFGEFTWRCEDELGPRKAGLILSQLGDLSSWCNGLLQEPKISLRRSSLKYLGCRYSEIKPYGLDWAELSRDLRKTCEEQTLSIPYNDYGDSKEI

SEQ ID NO: 759114 - protein, 1358 aa, Homo sapiens; identical to SEQ ID NO: 759113

SEQ ID NO: 759115 - protein, 1358 aa, Homo sapiens; identical to SEQ ID NO: 759113

SEQ ID NO: 759116 - protein, 1280 aa, Homo sapiens
PGLSRHQSLNPGLCKRHLIPGSRALPALHPLPNLPRLPRSLPRSLPARFLPHHRSARRKGPGLKMALAGLCALLACCWGPAAVLATAAGDVDPSKELECKLKSITVSALPFLRENDLSIMHSPSASEPKLLFSVRNDFPGEMVVVDDLENTELPYFVLEISGNTEDIPLVRWRQQWLENGTLLFHIHHQDGAPSLPGQDPTEEPQHESAEEELRILHISVMGGMIALLLSILCLVMILYTRRRWCKRRRVPQPQKSASAEAANEIHYIPSVLIGGHGRESLRNARVQGHNSSGTLSIRETPILDGYEYDITDLRHHLQRECMNGGEDFASQVTRTLDSLQGCNEKSGMDLTPGSDNAKLSLMNKYKDNIIATSPVDSNHQQATLLSHTSSSQRKRINNKARAGSAFLNPEGDSGTEAENDPQLTFYTDPSRSRRRSRVGSPRSPVNKTTLTLISITSCVIGLVCSSHVNCPLVVKITLHVPEHLIADGSRFILLEGSQLDASDWLNPAQVVLFSQQNSSGPWAMDLCARRLLDPCEHQCDPETGECLCYEGYMKDPVHKHLCIRNEWGTNQGPWPYTIFQRGFDLVLGEQPSDKIFRFTYTLGEGMWLPLSKSFVIPPAELAINPSAKCKTDMTVMEDAVEVREELMTSSSFDSLEVLLDSFGPVRDCSKDNGGCSKNFRCISDRKLDSTGCVCPSGLSPMKDSSGCYDRHIGVDCSDGFNGGCEQLCLQQMAPFPDDPTLYNILMFCGCIEDYKLGVDGRSCQLITETCPEGSDCGESRELPMNQTLFGEMFFGYNNHSKEVAAGQVLKGTFRQNNFARGLDQQLPDGLVVATVPLENQCLEEISEPTPDPDFLTGMVNFSEVSGYPVLQHWKVRSVMYHIKLNQVAISQALSNALHSLDGATSRADFVALLDQFGNHYIQEAIYGFEESCSIWYPNKQVQRRLWLEYEDISKGNSPSDESEERERDPKVLTFPEYITSLSDSGTKHMAAGVRMECHSKGRCPSSCPLCHVTSSPDTPAEPVLLEVTKAAPIYELVTNNQTQRLLQEATMSSLWCSGTGDVIEDWCRCDSTAFGADGLPTCAPLPQPVLRLSTVHEPSSTLVVLEWEHSEPPIGVQIVDYLLRQEKVTDRMDHSKVETETVLSFVDDIISGAKSPCAMPSQVPDKQLTTISLIIRCLEPDTIYMFTLWGVDNTGRRSRPSDVIVKTPCPVVDDVKAQEIADKIYNLFNGYTSGKEQQTAYNTLLDLGSPTLHRVLYHYNQHYESFGEFTWRCEDELGPR

SEQ ID NO: 759117 - protein, 1168 aa, Homo sapiens
PGLSRHQSLNPGLCKRHLIPGSRALPALHPLPNLPRLPRSLPRSLPARFLPHHRSARRKGPGLKMALAGLCALLACCWGPAAVLATAAGDVDPSKELECKLKSITVSALPFLRENDLSIMHSPSASEPKLLFSVRNDFPGEMVVVDDLENTELPYFVLEISGNTEDIPLVRWRQQWLENGTLLFHIHHQDGAPSLPGQDPTEEPQHESAEEELRILHISVMGGMIALLLSILCLVMILYTRRRWCKRRRVPQPQKSASAEAANEIHYIPSVLIGGHGRESLRNARVQGHNSSGTLSIRETPILDGYEYDITDLRHHLQRECMNGGEDFASQVTRTLDSLQGCNEKSGMDLTPGSDNAKLSLMNKYKDNIIATSPVDSNHQQATLLSHTSSSQRKRINNKARAGSAFLNPEGDSGTEAENDPQLTFYTDPSRSRRRSRVGSPRSPVNKTTLTLISITSCVIGLVCSSHVNCPLVVKITLHVPEHLIADGSRFILLEGSQLDASDWLNPAQVVLFSQQNSSGPWAMDLCARRLLDPCEHQCDPETGECLCYEGYMKDPVHKHLCIRNEWGTNQGPWPYTIFQRGFDLVLGEQPSDKIFRFTYTLGEGMWLPLSKSFVIPPAELAINPSAKCKTDMTVMEDAVEVREELMTSSSFDSLEVLLDSFGPVRDCSKDNGGCSKNFRCISDRKLDSTGCVCPSGLSPMKDSSGCYDRHIGVDCSDGFNGGCEQLCLQQMAPFPDDPTLYNILMFCGCIEDYKLGVDGRSCQLITETCPEGSDCGESRELPMNQTLFGEMFFGYNNHSKEVAAGQVLKGTFRQNNFARGLDQQLPDGLVVATVPLENQCLEEISEPTPDPDFLTGMVNFSEVSGYPVLQHWKVRSVMYHIKLNQVAISQALSNALHSLDGATSRADFVALLDQFGNHYIQEAIYGFEESCSIWYPNKQVQRRLWLEYEDISKGNSPSDESEERERDPKVLTFPEYITSLSDSGTKHMAAGVRMECHSKGRCPSSCPLCHVTSSPDTPAEPVLLEVTKAAPIYELVTNNQTQRLLQEATMSSLWCSGTGDVIEDWCRCDSTAFGADGLPTCAPLPQPVLRLSTVHEPSSTLVVLEWEHSEPPIGVQIVDYLLRQEKVTDRMDHSKVETETVLSFVDDIISGAKSPCAMPSQVPDKQK

SEQ ID NO: 759118 - protein, 151 aa, Homo sapiens
MTSSQSGPILNIETPKNSRQLLQTQQVIGPERGGDPRPQERERGQRWFPAPRTIMALPLRPLTRGLASAAKGGHGGAGARTWRLLTFVLALPSVALCTFNSYLHSGHRPRPEFRPYQHLRIRTKPYPWGDGNHTLFHNSHVNPLPTGYEHP

SEQ ID NO: 759119 - protein, 131 aa, Homo sapiens
MALPLRPLTRGLASAAKGGHGGAGGEWGTGGSGGSPTLPTCSQARRPRTAALTPLLSAARTWRLLTFVLALPSVALCTFNSYLHSGHRPRPEFRPYQHLRIRTKPYPWGDGNHTLFHNSHVNPLPTGYEHP

SEQ ID NO: 759120 - protein, 90 aa, Homo sapiens
PLTRGLRGKAMMVRGAGARTWRLLTFVLALPSVALCTFNSYLHSGHRPRPEFRPYQHLRIRTKPYPWGDGNHTLFHNSHVNPLPTGYEHP

SEQ ID NO: 759121 - protein, 592 aa, Homo sapiens
MEMQDLTSPHSRLSGSSESPSGPKLGNSHINSNSMTPNGTEVKTEPMSSSETASTTADGSLNNFSGSAIGSSSFSPRPTHQFSPPQIYPSNRPYPHILPTPSSQTMAAYGQTQFTTGMQQATAYATYPQPGQPYGISSYGALWAGIKTEGGLSQSQSPGQTGFLSYGTSFSTPQPGQAPYSYQMQGSSFTTSSGIYTGNNSLTNSSGFNSSQQDYPSYPSFGQGQYAQYYNSSPYPAHYMTSSNTSPTTPSTNATYQLQEPPSGITSQAVTDPTAEYSTIHSPSTPIKDSDSDRLRRGSDGKSRGRGRRNNNPSPPPDSDLERVFIWDLDETIIVFHSLLTGSYANRYGRDPPTSVSLGLRMEEMIFNLADTHLFFNDLEECDQVHIDDVSSDDNGQDLSTYNFGTDGFPAAATSANLCLATGVRGGVDWMRKLAFRYRRVKEIYNTYKNNVGGLLGPAKREAWLQLRAEIEALTDSWLTLALKALSLIHSRTNCVNILVTTTQLIPALAKVLLYGLGIVFPIENIYSATKIGKESCFERIIQRFGRKVVYVVIGDGVEEEQGAKKHAMPFWRISSHSDLMALHHALELEYL

SEQ ID NO: 759122 - protein, 592 aa, Homo sapiens; identical to SEQ ID NO: 759121

SEQ ID NO: 759123 - protein, 557 aa, Homo sapiens
MLFIFVVKTEPMSSSETASTTADGSLNNFSGSAIGSSSFSPRPTHQFSPPQIYPSNRPYPHILPTPSSQTMAAYGQTQFTTGMQQATAYATYPQPGQPYGISSYGALWAGIKTEGGLSQSQSPGQTGFLSYGTSFSTPQPGQAPYSYQMQGSSFTTSSGIYTGNNSLTNSSGFNSSQQDYPSYPSFGQGQYAQYYNSSPYPAHYMTSSNTSPTTPSTNATYQLQEPPSGITSQAVTDPTAEYSTIHSPSTPIKDSDSDRLRRGSDGKSRGRGRRNNNPSPPPDSDLERVFIWDLDETIIVFHSLLTGSYANRYGRDPPTSVSLGLRMEEMIFNLADTHLFFNDLEECDQVHIDDVSSDDNGQDLSTYNFGTDGFPAAATSANLCLATGVRGGVDWMRKLAFRYRRVKEIYNTYKNNVGGLLGPAKREAWLQLRAEIEALTDSWLTLALKALSLIHSRTNCVNILVTTTQLIPALAKVLLYGLGIVFPIENIYSATKIGKESCFERIIQRFGRKVVYVVIGDGVEEEQGAKKHAMPFWRISSHSDLMALHHALELEYL

SEQ ID NO: 759124 - protein, 479 aa, Homo sapiens
PSPNATYQLQEPPSGITSQAVTDPTAGALWAGIKTEGGLSQSQSPGQTGFLSYGTSFSTPQPGQAPYSYQMQGSSFTTSSGIYTGNNSLTNSSGFNSSQQDYPSYPSFGQGQYAQYYNSSPYPAHYMTSSNTSPTTPSTNATYQLQEPPSGITSQAVTDPTAEYSTIHSPSTPIKDSDSDRLRRGSDGKSRGRGRRNNNPSPPPDSDLERVFIWDLDETIIVFHSLLTGSYANRYGRDPPTSVSLGLRMEEMIFNLADTHLFFNDLEECDQVHIDDVSSDDNGQDLSTYNFGTDGFPAAATSANLCLATGVRGGVDWMRKLAFRYRRVKEIYNTYKNNVGGLLGPAKREAWLQLRAEIEALTDSWLTLALKALSLIHSRTNCVNILVTTTQLIPALAKVLLYGLGIVFPIENIYSATKIGKESCFERIIQRFGRKVVYVVIGDGVEEEQGAKKHAMPFWRISSHSDLMALHHALELEYL

SEQ ID NO: 759125 - protein, 185 aa, Homo sapiens
PSPNATYQLQEPPSGITSQAVTDPTAGALWAGIKTEGGLSQSQSPGQTGFLSYGTSFSTPQPGQAPYSYQMQGSSFTTSSGIYTGNNSLTNSSGFNSSQQDYPSYPSFGQGQYAQYYNSSPYPAHYMTSSNTSPTTPSTNATYQLQEPPSGITSQAVTDPTAVKTEPMSSSETASTTADCHLQGV

SEQ ID NO: 759126 - protein, 379 aa, Homo sapiens
MVFFTCNACGESVKKIQVEKHVSVCRNCECLSCIDCGKDFWGDDYKNHVKCISEDQKYGGKGYEGKTHKGDIKQQAWIQKISELIKRPNVSPKVRELLEQISAFDNVPRKKAKFQNWMKNSLKVHNESILDQVWNIFSEASNSEPVNKEQDQRPLHPVANPHAEISTKVPASKVKDAVEQQGEVKKNKRERKEERQKKRKREKKELKLENHQENSRNQKPKKRKKGQEADLEAGGEEVPEANGSAGKRSKKKKQRKDSASEEEARVGAGKRKRRHSEVETDSKKKKMKLPEHPEGGEPEDDEAPAKGKFNWKGTIKAILKQAPDNEITIKKLRKKVLAQYYTVTDEHHRSEEELLVIFNKKISKNPTFKLLKDKVKLVK

SEQ ID NO: 759127 - protein, 83 aa, Homo sapiens
  misc_feature (15)..(15): Xaa can be any naturally occurring amino acid
GGARAAGSFFPQSVXKPGGDFKHSETGPNMKKPSKTKEKVLAQYYTVTDEHHRSEEELLVIFNKKISKNPTFKLLKDKVKLVK

SEQ ID NO: 759128 - protein, 379 aa, Homo sapiens; identical to SEQ ID NO: 759126

SEQ ID NO: 759129 - protein, 260 aa, Homo sapiens
MVFFTCNACGESVKKIQVEKHVSVCRNCECLSCIDCGKDFWGDDYKNHVKCISEDQKYGGKGYEGKTHKGDIKQQAWIQKISELIKRPNVSPKVRELLEQISAFDNVPRKKAKFQNWMKNSLKVHNESILDQVWNIFSEASNSEPVNKEQDQRPLHPVANPHAEISTKVPASKVKDAVEQQGEVKKNKRERKEERQKKRKREKKELKLENHQENSRNQKPKKRKKGQEADLEAGGEEVPEANGSAGKRSKKKKQRKDSSQ

SEQ ID NO: 759130 - protein, 212 aa, Homo sapiens
MVFFTCNACGESVKKIQVEKHVSVCRNCECLSCIDCGKDFWGDDYKNHVKCISEDQKYGGKGYEGKTHKGDIKQQAWIQKISELIKRPNVSPKVRELLEQISAFDNVPRKKAKFQNWMKNSLKVHNESILDQVWNIFSEASNSEPVNKEQDQRPLHPVANPHAEISTKVPASKVKDAVEQQGEVKKNKRERKEECARKPLPIPHWCGVRRTR

SEQ ID NO: 759131 - protein, 97 aa, Homo sapiens
QKLFLYPSRSTTKRNVLNIIIYIVGKFNWKGTIKAILKQAPDNEITIKKLRKKVLAQYYTVTDEHHRSEEELLVIFNKKISKNPTFKLLKDKVKLVK

SEQ ID NO: 759132 - protein, 111 aa, Homo sapiens
AVLPFFLFYSSSPPLAVPRRLSLWRLEPWWRFLHVKCISEDQKYGGKGYEGKTHKGDIKQQAWIQKISELIKRPNVSPKVRELLEQIRSLLFFFTSPCCSTASFTLEAGTL

SEQ ID NO: 759133 - protein, 379 aa, Homo sapiens; identical to SEQ ID NO: 759126

SEQ ID NO: 759134 - protein, 167 aa, Homo sapiens
MVFFTCNACGESVKKIQVEKHVSVCRNCECLSCIDCGKDFWGDDYKNHVKCIVLFLISPSSSQTFKAPRKAQSLGSSTVEMAANVVLTSRFLNLELKSFVTDPTSCPNVFPIIFLYGPCSSQPLILELGTGSATSMLLSCCSPAWNVNYLANSYCSSVTLQGGRAGL

SEQ ID NO: 759135 - protein, 132 aa, Homo sapiens
YFSSKMSENCDQVVWTGYYGLVYNLVKISWELQGDEEQDGLRNMIWQTLQKTKDYEEDVRIQNAINIAQAELNDPTDPFTRYSTNISSNVGEEVFSKYIGWRIANTLSKLFFPPIEAHFLPLKKPSIKKDQT

SEQ ID NO: 759136 - protein, 75 aa, Homo sapiens
VFTLNHPLTIASVDKQVGPYPGLPMPLGLCWPYADGDFFKNRNEIHVSSCSTIENNDGETLPAPNWNLKHGNSSV

SEQ ID NO: 759137 - protein, 120 aa, Homo sapiens
MALISPKSILLWPLHPCWHSLAYHSYNLILSLTPPSSIIPPSLTQGIVWGRGIAAQSRRQVHIQGLTSPFFENYWLGPISKDFLCPAVFMRLLSVHAIVTAFLFLHSSSLPSSLEPSAST

SEQ ID NO: 759138 - protein, 114 aa, Homo sapiens [sequence omitted]

SEQ ID NO: 759139 - protein, 702 aa, Homo sapiens
MAAPMTPAARPEDYEAALNAALADVPELARLLEIDPYLKPYAVDFQRRYKQFSQILKNIGENEGGIDKFSRGYESFGVHRCADGGLYCKEWAPGAEGVFLTGDFNGWNPFSYPYKKLDYGKWELYIPPKQNKSVLVPHGSKLKVVITSKSGEILYRISPWAKYVVREGDNVNYDWIHWDPEHSYEFKHSRPKKPRSLRIYESHVGISSHEGKVASYKHFTCNVLPRIKGLGYNCIQLMAIMEHAYYASFGYQITSFFAASSRYGTPEELQELVDTAHSMGIIVLLDVVHSHASKNSADGLNMFDGTDSCYFHSGPRGTHDLWDSRLFAYSSWEVLRFLLSNIRWWLEEYRFDGFRFDGVTSMLYHHHGVGQGFSGDYSEYFGLQVDEDALTYLMLANHLVHTLCPDSITIAEDVSGMPALCSPISQGGGGFDYRLAMAIPDKWIQLLKEFKDEDWNMGDIVYTLTNRRYLEKCIAYAESHDQALVGDKSLAFWLMDAEMYTNMSVLTPFTPVIDRGIQLHKMIRLITHGLGGEGYLNFMGNEFGHPEWLDFPRKGNNESYHYARRQFHLTDDDLLRYKFLNNFDRDMNRLEERYGWLAAPQAYVSEKHEGNKIIAFERAGLLFIFNFHPSKSYTDYRVGTALPGKFKIVLDSDAAEYGGHQRLDHSTDFFSEAFEHNGRPYSLLVYIPSRVALILQNVDLPN

SEQ ID NO: 759140 - protein, 702 aa, Homo sapiens; identical to SEQ ID NO: 759139

SEQ ID NO: 759141 - protein, 702 aa, Homo sapiens; identical to SEQ ID NO: 759139

SEQ ID NO: 759142 - protein, 90 aa, Homo sapiens
GGAARQRQPDRALPGVHSKQSGPHPSECGSAELKRPDFSSTRCRFVFCFLVITVTQLITCMLFRIQLSSQAIKCLKFNIGLCKYSKLLFK

SEQ ID NO: 759143 - protein, 153 aa, Homo sapiens
MAAPMTPAARPEDYEAALNAALADVPELARLLEIDPYLKPYAVDFQRRYKQFSQILKNIGENEGGIDKFSRGYESFGVHRCADGGLYCKEWAPGAEGVFLTGDFNGWNPFSYPYKKLDYGKWELYIPPKQNKSVLVPHGSKLKNFQNSGQLSY

SEQ ID NO: 759144 - protein, 702 aa, Homo sapiens; identical to SEQ ID NO: 759139

SEQ ID NO: 759145 - protein, 644 aa, Homo sapiens
PAYIFLPCWMLKARRTSDSKILQFWDLEWLSLLLSLQTAYRGTLPLHGWNPFSYPYKKLDYGKWELYIPPKQNKSVLVPHGSKLKVVITSKSGEILYRISPWAKYVVREGDNVNYDWIHWDPEHSYEFKHSRPKKPRSLRIYESHVGISSHEGKVASYKHFTCNVLPRIKGLGYNCIQLMAIMEHAYYASFGYQITSFFAASSRYGTPEELQELVDTAHSMGIIVLLDVVHSHASKNSADGLNMFDGTDSCYFHSGPRGTHDLWDSRLFAYSSWEVLRFLLSNIRWWLEEYRFDGFRFDGVTSMLYHHHGVGQGFSGDYSEYFGLQVDEDALTYLMLANHLVHTLCPDSITIAEDVSGMPALCSPISQGGGGFDYRLAMAIPDKWIQLLKEFKDEDWNMGDIVYTLTNRRYLEKCIAYAESHDQALVGDKSLAFWLMDAEMYTNMSVLTPFTPVIDRGIQLHKMIRLITHGLGGEGYLNFMGNEFGHPEWLDFPRKGNNESYHYARRQFHLTDDDLLRYKFLNNFDRDMNRLEERYGWLAAPQAYVSEKHEGNKIIAFERAGLLFIFNFHPSKSYTDYRVGTALPGKFKIVLDSDAAEYGGHQRLDHSTDFFSEAFEHNGRPYSLLVYIPSRVALILQNVDLPN

SEQ ID NO: 759146 - protein, 686 aa, Homo sapiens
MAAPMTPAARPEDYEAALNAALADVPELARLLEIDPYLKPYAVDFQRRYKQFSQILKNIGENEGGIDKFSRGYESFGVHRCADGGLYCKEWAPGAEGVFLTGDFNGWNPFSYPYKKLDYGKWELYIPPKQNKSVLVPHGSKLKVVITSKSGEILYRISPWAKYVVREGDNVNYDWIHWDPEHSYEFKHSRPKKPRSLRIYESHVGISSHEGKVASYKHFTCNVLPRIKGLGYNCIQLMAIMEHAYYASFGYQITSFFAASSRYGTPEELQELVDTAHSMGIIVLLDVVHSHASKNSADGLNMFDGTDSCYFHSGPRGTHDLWDSRLFAYSSWEVLRFLLSNIRWWLEEYRFDGFRFDGVTSMLYHHHGVGQGFSGDYSEYFGLQVDEDALTYLMLANHLVHTLCPDSITIAEDVSGMPALCSPISQGGGGFDYRLAMAIPDKWIQLLKEFKDEDWNMGDIVYTLTNRRYLEKCIAYAESHDQALVGDKSLAFWLMDAEMYTNMSVLTPFTPVIDRGIQLHKMIRLITHGLGGEGYLNFMGNEFGHPEWLDFPRKGNNESYHYARRQFHLTDDDLLRYKFLNNFDRDMNRLEERYGWLAAPQAYVSEKHEGNKIIAFERAGLLFIFNFHPSKSYTDYRVGTALPGNTALTFFLRLLNIMGVPILFWCTFQAEWPSSFRMWICRIEEA

SEQ ID NO: 759147 - protein, 170 aa, Homo sapiens
LVPNSARYLEKCIAYAESHDQALVGDKSLAFWLMDAEMYTNMSVLTPFTPVIDRGIQLHKMIRLITHGLGGEGYLNFMGNEFGHPEWLDFPRKGNNESYHYARRQFHLTDDDLLRYKFLNNFDRDMNRLEERYGWLAAPQVFFSFSTSIQARATLTTELEQHCQGNSKLC

SEQ ID NO: 759148 - protein, 719 aa, Homo sapiens
MAAPMTPAARPEDYEAALNAALADVPELARLLEIDPYLKPYAVDFQRRYKQFSQILKNIGENEGGIDKFSRGYESFGVHRCADGGLYCKEWAPGAEGVFLTGDFNGWNPFSYPYKKLDYGKWELYIPPKQNKSVLVPHGSKLKVVITSKSGEILYRISPWAKYVVREGDNVNYDWIHWDPEHSYEFKHSRPKKPRSLRIYESHVGISSHEGKVASYKHFTCNVLPRIKGLGYNCIQLMAIMEHAYYASFGYQITSFFAASSRYGTPEELQELVDTAHSMGIIVLLDVVHSHASKNSADGLNMFDGTDSCYFHSGPRGTHDLWDSRLFAYSSWEVLRFLLSNIRWWLEEYRFDGFRFDGVTSMLYHHHGVGQGFSGDYSEYFGLQVDEDALTYLMLANHLVHTLCPDSITIAEDVSGMPALCSPISQGGGGFDYRLAMAIPDKWIQLLKEFKDEDWNMGDIVYTLTNRRYLEKCIAYAESHDQALVGDKSLAFWLMDAEMYTNMSVLTPFTPVIDRGIQLHKMIRLITHGLGGEGYLNFMGNEFGHPEWLDFPRKGNNESYHYARRQFHLTDDDLLRYKFLNNFDRDMNRLEERYGWLAAPQAYVSEKHEGNKIIAFERAGLLFIFNFHPSKSYTDYRVGTALPGKFKIVLDSDAAEYGGHQRLDHSTDFFSEAFEHNGRPYSLLVSKFLNIFPMQICVLFSCYHCHTAYNMYAFQNTVV

SEQ ID NO: 759149 - protein, 492 aa, Homo sapiens
MAAPMTPAARPEDYEAALNAALADVPELARLLEIDPYLKPYAVDFQRRYKQFSQILKNIGENEGGIDKFSRGYESFGVHRCADGGLYCKEWAPGAEGVFLTGDFNGWNPFSYPYKKLDYGKWELYIPPKQNKSVLVPHGSKLKVVITSKSGEILYRISPWAKYVVREGDNVNYDWIHWDPEHSYEFKHSRPKKPRSLRIYESHVGISSHEGKVASYKHFTCNVLPRIKGLGYNCIQLMAIMEHAYYASFGYQITSFFAASSRYGTPEELQELVDTAHSMGIIVLLDVVHSHASKNSADGLNMFDGTDSCYFHSGPRGTHDLWDSRLFAYSSWEVLRFLLSNIRWWLEEYRFDGFRFDGVTSMLYHHHGVGQGFSGDYSEYFGLQVDEDALTYLMLANHLVHTLCPDSITIAEDVSGMPALCSPISQGGGGFDYRLAMAIPDKWIQLLKEFKDEDWNMGDIVYTLTNRRYLEKCIAYAESHDQVNEYVHKFIY

SEQ ID NO: 759150 - protein, 698 aa, Homo sapiens
PSVPPCGSEALCRRPLLTSSSLGMDPSYCPAHGFPSQDPLWPLSSQQWSSAHYSEPAAGGCDGTEAMNGAGPGPAAAAPVPVPVPVPDWRQFCELHAQAAAVDFAHKFCRFLRDNPAYDTPDAGASFSRHFAANFLDVFGEEVRRVLVAGPTTRGAAVSAEAMEPELADTSALKAAPYGHSRSSEDVSTHAATKARVRKGFSLRNMSLCVVDGVRDMWHRRASPEPDAAAAPRTAEPRDKWTRRLRLSRTLAAKVELVDIQREGALRFMVADDAAAGSGGSAQWQKCRLLLRRAVAEERFRLEFFVPPKASRPKVSIPLSAIIEVRTTMPLEMPEKDNTFVLKVENGAEYILETIDSLQKHSWVADIQGCVDPGDSEEDTELSCTRGGCLASRVASCSCELLTDAVDLPRPPETTAVGAVVTAPHSRGRDAVRESLIHVPLETFLQTLESPGGSGSDSNNTGEQGAETDPEAEPELELSDYPWFHGTLSRVKAAQLVLAGGPRNHGLFVIRQSETRPGEYVLTFNFQGKAKHLRLSLNGHGQCHVQHLWFQSVLDMLRHFHTHPIPLESGGSADITLRSYVRAQDPPPEPGPTPPAAPASPACWSDSPGQHYFSSLAAAACPPASPSDAAGASSSSASSSSAASGPAPPRPVEGQLSARSRSNSAERLLEAVAATAAEEPPEAAPGRARAVENQYSFY

SEQ ID NO: 759151 - protein, 370 aa, Homo sapiens
MPLEMPEKDNTFVLKVENGAEYILETIDSLQKHSWVADIQGCVDPGDSEEDTELSCTRGGCLASRVASCSCELLTDAVDLPRPPETTAVGAVVTAPHSRGRDAVRESLIHVPLETFLQTLESPGGSGSDSNNTGEQGAETDPEAEPELELSDYPWFHGTLSRVKAAQLVLAGGPRNHGLFVIRQSETRPGEYVLTFNFQGKAKHLRLSLNGHGQCHVQHLWFQSVLDMLRHFHTHPIPLESGGSADITLRSYVRAQDPPPEPGPTPPAAPASPACWSDSPGQHYFSSLAAAACPPASPSDAAGASSSSASSSSAASGPAPPRPVEGQLSARSRSNSAERLLEAVAATAAEEPPEAAPGRARAVENQYSFY

SEQ ID NO: 759152 - protein, 445 aa, Homo sapiens
HQFLLVGPRRSAAGPSSLLPPWGWIQAIVLPMASHLRTLSGRYHPSSGVQPTTLNQASRPKVSIPLSAIIEVRTTMPLEMPEKDNTFVLKVENGAEYILETIDSLQKHSWVADIQGCVDPGDSEEDTELSCTRGGCLASRVASCSCELLTDAVDLPRPPETTAVGAVVTAPHSRGRDAVRESLIHVPLETFLQTLESPGGSGSDSNNTGEQGAETDPEAEPELELSDYPWFHGTLSRVKAAQLVLAGGPRNHGLFVIRQSETRPGEYVLTFNFQGKAKHLRLSLNGHGQCHVQHLWFQSVLDMLRHFHTHPIPLESGGSADITLRSYVRAQDPPPEPGPTPPAAPASPACWSDSPGQHYFSSLAAAACPPASPSDAAGASSSSASSSSAASGPAPPRPVEGQLSARSRSNSAERLLEAVAATAAEEPPEAAPGRARAVENQYSFY

SEQ ID NO: 759153 - protein, 711 aa, Homo sapiens
LERAELGCQRAARGTRRDREERRSLRGGERGREPSPPRAMSHRARGARPRSGQRSAGAPARSAAAARLYAAGGCDGTEAMNGAGPGPAAAAPVPVPVPVPDWRQFCELHAQAAAVDFAHKFCRFLRDNPAYDTPDAGASFSRHFAANFLDVFGEEVRRVLVAGPTTRGAAVSAEAMEPELADTSALKAAPYGHSRSSEDVSTHAATKARVRKGFSLRNMSLCVVDGVRDMWHRRASPEPDAAAAPRTAEPRDKWTRRLRLSRTLAAKVELVDIQREGALRFMVADDAAAGSGGSAQWQKCRLLLRRAVAEERFRLEFFVPPKASRPKVSIPLSAIIEVRTTMPLEMPEKDNTFVLKVENGAEYILETIDSLQKHSWVADIQGCVDPGDSEEDTELSCTRGGCLASRVASCSCELLTDAVDLPRPPETTAVGAVVTAPHSRGRDAVRESLIHVPLETFLQTLESPGGSGSDSNNTGEQGAETDPEAEPELELSDYPWFHGTLSRVKAAQLVLAGGPRNHGLFVIRQSETRPGEYVLTFNFQGKAKHLRLSLNGHGQCHVQHLWFQSVLDMLRHFHTHPIPLESGGSADITLRSYVRAQDPPPEPGPTPPAAPASPACWSDSPGQHYFSSLAAAACPPASPSDAAGASSSSASSSSAASGPAPPRPVEGQLSARSRSNSAERLLEAVAATAAEEPPEAAPGRARAVENQYSFY

SEQ ID NO: 759154 - protein, 148 aa, Homo sapiens
MTKALLIYLVSSFLALNQASLISRCDLAQVLQLEDLDGFEGYSLSDWLCLAFVESKFNISKINENADGSFDYGLFQINSHYWCNDYKSYSENLCHVDCQDLLNPNLLAGIHCAKRIVSGARGMNNWVEWRLHCSGRPLFYWLTGCRLR

SEQ ID NO: 759155 - protein, 117 aa, Homo sapiens
MTKALLIYLVSSFLALNQASLISRCDLAQVLQLEDLDGFEGYSLSDWLCLAFVESKFNISKINENADGSFDYGLFQINSHYWCNDYKSYSENLCHVDCQGIHCAKRIVSGARGMNNW

SEQ ID NO: 759156 - protein, 148 aa, Homo sapiens; identical to SEQ ID NO: 759154

SEQ ID NO: 759157 - protein, 93 aa, Homo sapiens
APYARLTKNWVMCVEELLSVRQEPCLFSPQGRMEVALFRPATLLLADRMPPEMKQGAGAPWSHSKTPVLTQGFFISSSYCLHFMLFSSLPIYN

SEQ ID NO: 759158 - protein, 250 aa, Homo sapiens
MDMLQDLESLQFEYGVPEEDRIWLYLQGRSRGLMIEACAHATFFCKLLYNLRASLNKNQSSRHLSIGSLNSATPEEFKVGIIGGGHLGKQLAGTLLQLGPIPAESLRISTRRPETLGELQKLGIKCFYHNADLVSWADVIFLCCLPSQLPNICVEIYTSLEKASIVYSFVAAIPLPRLKLLLNHTNILRPQYQYDEDSVSVWGANKGVIAALQDPTILQATCPYSPAGHGSTYFWHSFENYFPVGPLLSY

SEQ ID NO: 759159 - protein, 271 aa, Homo sapiens
SRIRSTEEQSQSSLFGNSGLEMDMLQDLESLQFEYGVPEEDRIWLYLQGRSRGLMIEACAHATFFCKLLYNLRASLNKNQSSRHLSIGSLNSATPEEFKVGIIGGGHLGKQLAGTLLQLGPIPAESLRISTRRPETLGELQKLGIKCFYHNADLVSWADVIFLCCLPSQLPNICVEIYTSLEKASIVYSFVAAIPLPRLKLLLNHTNILRPQYQYDEDSVSVWGANKGVIAALQDPTILQATCPYSPAGHGSTYFWHSFENYFPVGPLLSY

SEQ ID NO: 759160 - protein, 105 aa, Homo sapiens [sequence omitted]

SEQ ID NO: 759161 - protein, 91 aa, Homo sapiens
  misc_feature (10)..(10): Xaa can be any naturally occurring amino acid
  misc_feature (20)..(20): Xaa can be any naturally occurring amino acid
RKRGPGLTQXEKNLKTHGLXNHAHKKNNKGKKGPGKTPKLKKTWAASEWLIMSTQEMHIKFNREKSSLPLRLPIRLGRCRETGVHPGRCFG

SEQ ID NO: 759162 - protein, 198 aa, Homo sapiens
MCCSLVQSPQPQKGAMEADTPSGRPPALSCFGHCGRVQDPGILGGLWLCGQPAWPAQSACPEGETQVKPTDPLAPLLGPPGSQTTPPYPVLAQANERQGLPGLLLSRPLWGRRRCPQRLGGDSQEMGWHLHYPSSAAHGGLSGGGCWSLPPAPPLMSAPETKVGRVLKRKCLPRERLRLLLKHQPCGSCLQNLRPVKL

SEQ ID NO: 759163 - protein, 148 aa, Homo sapiens
MSLDIQSLDIQCEELSDARWAELLPLLQQCQVVRLDDCGLTEARCKDISSALRVNPALAELNLRSNELGDVGVHCVLQGLQTPSCKIQKLSLQNCCLTGAGCGVLSSTLRTLPTLQELHLSDNLLGDAGLQLLCEGLLDPQCRLEKLQ

SEQ ID NO: 759164 - protein, 440 aa, Homo sapiens
MSLDIQSLDIQCEELSDARWAELLPLLQQCQVVRLDDCGLTEARCKDISSALRVNPALAELNLRSNELGDVGVHCVLQGLQTPSCKIQKLSLQNCCLTGAGCGVLSSTLRTLPTLQELHLSDNLLGDAGLQLLCEGLLDPQCRLEKLQLEYCSLSAASCEPLASVLRAKPDFKELTVSNNDINEAGVRVLCQGLKDSPCQLEALKLESCGVTSDNCRDLCGIVASKASLRELALGSNKLGDVGMAELCPGLLHPSSRLRTLWIWECGITAKGCGDLCRVLRAKESLKELSLAGNELGDEGARLLCETLLEPGCQLESLWVKSCSFTAACCSHFSSVLAQNRFLLELQISNNRLEDAGVRELCQGLGQPGSVLRVLWLADCDVSDSSCSSLAATLLANHSLRELDLSNNCLGDAGILQLVESVPAAGLPPGAAGPVRHLLV

SEQ ID NO: 759165 - protein, 115 aa, Homo sapiens
VPEVPDFDAFLLELQISNNRLEDAGVRELCQGLGQPGSVLRVLWLADCDVSDSSCSSLAATLLANHSLRELDLSNNCLGDAGILQLVESVPAAGLPPGAAGPVDIYWSEENASKS

SEQ ID NO: 759166 - protein, 440 aa, Homo sapiens; identical to SEQ ID NO: 759164

SEQ ID NO: 759167 - protein, 440 aa, Homo sapiens; identical to SEQ ID NO: 759164

SEQ ID NO: 759168 - protein, 440 aa, Homo sapiens; identical to SEQ ID NO: 759164

SEQ ID NO: 759169 - protein, 440 aa, Homo sapiens; identical to SEQ ID NO: 759164

SEQ ID NO: 759170 - protein, 507 aa, Homo sapiens
RGCVVNSAEAASYASNPGPAELASPNPVILDLIPPKKRPPGKERPGGEDSNGSHSRALGERPLFTSTMSLDIQSLDIQCEELSDARWAELLPLLQQCQVVRLDDCGLTEARCKDISSALRVNPALAELNLRSNELGDVGVHCVLQGLQTPSCKIQKLSLQNCCLTGAGCGVLSSTLRTLPTLQELHLSDNLLGDAGLQLLCEGLLDPQCRLEKLQLEYCSLSAASCEPLASVLRAKPDFKELTVSNNDINEAGVRVLCQGLKDSPCQLEALKLESCGVTSDNCRDLCGIVASKASLRELALGSNKLGDVGMAELCPGLLHPSSRLRTLWIWECGITAKGCGDLCRVLRAKESLKELSLAGNELGDEGARLLCETLLEPGCQLESLWVKSCSFTAACCSHFSSVLAQNRFLLELQISNNRLEDAGVRELCQGLGQPGSVLRVLWLADCDVSDSSCSSLAATLLANHSLRELDLSNNCLGDAGILQLVESVPAAGLPPGAAGPVRHLLV

SEQ ID NO: 759171 - protein, 440 aa, Homo sapiens; identical to SEQ ID NO: 759164

SEQ ID NO: 759172 - protein, 522 aa, Homo sapiens
EAKQARSRLGVNWPRARAGSNTPAPLTGGWGCRHVQPVLLARERSRPSRSGSPGPRPSASRPEESPACETVRGFGQDVLFPLPPTQATLLDIQCEELSDARWAELLPLLQQCQVVRLDDCGLTEARCKDISSALRVNPALAELNLRSNELGDVGVHCVLQGLQTPSCKIQKLSLQNCCLTGAGCGVLSSTLRTLPTLQELHLSDNLLGDAGLQLLCEGLLDPQCRLEKLQLEYCSLSAASCEPLASVLRAKPDFKELTVSNNDINEAGVRVLCQGLKDSPCQLEALKLESCGVTSDNCRDLCGIVASKASLRELALGSNKLGDVGMAELCPGLLHPSSRLRTLWIWECGITAKGCGDLCRVLRAKESLKELSLAGNELGDEGARLLCETLLEPGCQLESLWVKSCSFTAACCSHFSSVLAQNRFLLELQISNNRLEDAGVRELCQGLGQPGSVLRVLWLADCDVSDSSCSSLAATLLANHSLRELDLSNNCLGDAGILQLVESVPAAGLPPGAAGPVRHLLV

SEQ ID NO: 759173 - protein, 197 aa, Homo sapiens
MAELCPGLLHPSSRLRTLWIWECGITAKGCGDLCRVLRAKESLKELSLAGNELGDEGARLLCETLLEPGCQLESLWVKSCSFTAACCSHFSSVLAQNRFLLELQISNNRLEDAGVRELCQGLGQPGSVLRVLWLADCDVSDSSCSSLAATLLANHSLRELDLSNNCLGDAGILQLVESVPAAGLPPGAAGPVRHLLV

SEQ ID NO: 759174 - protein, 414 aa, Homo sapiens
MTLGSAHRLDDCGLTEARCKDISSALRVNPALAELNLRSNELGDVGVHCVLQGLQTPSCKIQKLSLQNCCLTGAGCGVLSSTLRTLPTLQELHLSDNLLGDAGLQLLCEGLLDPQCRLEKLQLEYCSLSAASCEPLASVLRAKPDFKELTVSNNDINEAGVRVLCQGLKDSPCQLEALKLESCGVTSDNCRDLCGIVASKASLRELALGSNKLGDVGMAELCPGLLHPSSRLRTLWIWECGITAKGCGDLCRVLRAKESLKELSLAGNELGDEGARLLCETLLEPGCQLESLWVKSCSFTAACCSHFSSVLAQNRFLLELQISNNRLEDAGVRELCQGLGQPGSVLRVLWLADCDVSDSSCSSLAATLLANHSLRELDLSNNCLGDAGILQLVESVPAAGLPPGAAGPVRHLLV

SEQ ID NO: 759175 - protein, 440 aa, Homo sapiens; identical to SEQ ID NO: 759164

SEQ ID NO: 759176 - protein, 440 aa, Homo sapiens; identical to SEQ ID NO: 759164

SEQ ID NO: 759177 - protein, 440 aa, Homo sapiens; identical to SEQ ID NO: 759164

SEQ ID NO: 759178 - protein, 440 aa, Homo sapiens; identical to SEQ ID NO: 759164

SEQ ID NO: 759179 - protein, 440 aa, Homo sapiens; identical to SEQ ID NO: 759164

SEQ ID NO: 759180 - protein, 68 aa, Homo sapiens
EAKQARSRLGVNWPRARAGSNTPAPLTGGWGCRHVQPVLLARERSRPSRSGSPGPRPSASRPEGMKNS

SEQ ID NO: 759181 - protein, 411 aa, Homo sapiens
MSLDIQSLDIQCEELSDARWAELLPLLQQCQVVRLDDCGLTEARCKDISSALRVNPALAELNLRSNELGDVGVHCVLQGLQTPSCKIQKLSLQNCCLTGAGCGVLSSTLRTLPTLQELHLSDNLLGDAGLQLLCEGLLDPQCRLEKLQLEYCSLSAASCEPLASVLRAKPDFKELTVSNNDINEAGVRVLCQGLKDSPCQLEALKLESCGVTSDNCRDLCGIVASKASLRELALGSNKLGDVGMAELCPGLLHPSSRLRTLWIWECGITAKGCGDLCRVLRAKESLKELSLAGNELGDEGARLLCETLLEPGCQLESLWVKSCSFTAACCSHFSSVLAQNRFLLELQISNNRLEDAGVRELCQGLGQPGSVLRVLWLGMDVSDRVESSRTCWQTQLVNDSEMLGERHLDVK

SEQ ID NO: 759182 - protein, 418 aa, Homo sapiens
MSLDIQSLDIQCEELSDARWAELLPLLQQCQVVRLDDCGLTEARCKDISSALRVNPALAELNLRSNELGDVGVHCVLQGLQTPSCKIQKLSLQNCCLTGAGCGVLSSTLRTLPTLQELHLSDNLLGDAGLQLLCEGLLDPQCRLEKLQLEYCSLSAASCEPLASVLRAKPDFKELTVSNNDINEAGVRVLCQGLKDSPCQLEALKLESCGVTSDNCRDLCGIVASKASLRELALGSNKLGDVGMAELCPGLLHPSSRLRTLWIWECGITAKGCGDLCRVLRAKESLKELSLAGNELGDEGARLLCETLLEPGCQLESLWVKSCSFTAACCSHFSSVLAQNRFLLELQISNNRLEDAGVRELCQGLGQPGSVLRVLWLADCDVSVTTRTLPSHLCTMSCDKAATLSPSSMEPRIPSPAL

SEQ ID NO: 759183 - protein, 247 aa, Homo sapiens
MSLDIQSLDIQCEELSDARWAELLPLLQQCQVVRLDDCGLTEARCKDISSALRVNPALAELNLRSNELGDVGVHCVLQGLQTPSCKIQKLSLQNCCLTGAGCGVLSSTLRTLPTLQELHLSDNLLGDAGLQLLCEGLLDPQCRLEKLQLEYCSLSAASCEPLASVLRAKPDFKELTVSNNDINEAGVRVLCQGLKDSPCQLEALKRAFRQPGCLLEQLVLYDIYWSEEMEDRLQALEKDKPSLRVIS

SEQ ID NO: 759184 - protein, 262 aa, Homo sapiens
MSLDIQSLDIQCEELSDARWAELLPLLQQCQVVRLDDCGLTEARCKDISSALRVNPALAELNLRSNELGDVGVHCVLQGLQTPSCKIQKLSLQNCCLTGAGCGVLSSTLRTLPTLQELHLSDNLLGDAGLQLLCEGLLDPQCRLEKLQLEYCSLSAASCEPLASVLRAKPDFKELTVSNNDINEAGVRVLCQGLKDSPCQLEALKLESCGVTSDNCRDLCGIVASKASLRELALGSNKPCTTFTGLRRWRTGCRPWRRTSHP

SEQ ID NO: 759185 - protein, 262 aa, Homo sapiens; identical to SEQ ID NO: 759184

SEQ ID NO: 759186 - protein, 267 aa, Homo sapiens
MSLDIQSLDIQCEELSDARWAELLPLLQQCQVVRLDDCGLTEARCKDISSALRVNPALAELNLRSNELGDVGVHCVLQGLQTPSCKIQKLSLQNCCLTGAGCGVLSSTLRTLPTLQELHLSDNLLGDAGLQLLCEGLLDPQCRLEKLQLEYCSLSAASCEPLASVLRAKPDFKELTVSNNDINEAGVRVLCQGLKDSPCQLEALKLESCGVTSDNCRDLCGIVASKASLRELALGSNKLGDVGMAELWGVPRSGRPWLGGPARGRRP

SEQ ID NO: 759187 - protein, 266 aa, Homo sapiens
MSLDIQSLDIQCEELSDARWAELLPLLQQCQVVRLDDCGLTEARCKDISSALRVNPALAELNLRSNELGDVGVHCVLQGLQTPSCKIQKLSLQNCCLTGAGCGVLSSTLRTLPTLQELHLSDNLLGDAGLQLLCEGLLDPQCRLEKLQLEYCSLSAASCEPLASVLRAKPDFKELTVSNNDINEAGVRVLCQGLKDSPCQLEALKLESCGVTSDNCRDLCGIVASKASLRELALGSNKPHPAYPRFEEKRSDPLISASIFWTLYNH

SEQ ID NO: 759188 - protein, 177 aa, Homo sapiens
MSLDIQSLDIQCEELSDARWAELLPLLQQCQVVRLDDCGLTEARCKDISSALRVNPALAELNLRSNELGDVGVHCVLQGLQTPSCKIQKLSLQNCCLTGAGCGVLSSTLRTLPTLQELHLSDNLLGDAGLQLLCEGLLDPQCRLEKLQSTEPSVQCEPWSGRASRSGPTVAQDIRGG

SEQ ID NO: 759189 - protein, 181 aa, Homo sapiens
MSLDIQSLDIQCEELSDARWAELLPLLQQCQVVRLDDCGLTEARCKDISSALRVNPALAELNLRSNELGDVGVHCVLQGLQTPSCKIQKLSLQNCCLTGAGCGVLSSTLRTLPTLQELHLSDNLLGDAGLQLLCEGLLDPQCRLEKLHCPLQGTAAPGPDGGNRCLAVSQVPLTASVCVGD

SEQ ID NO: 759190 - protein, 200 aa, Homo sapiens
EAKQARSRLGVNWPRARAGSNTPAPLTGGWGCRHVQPVLLARERSRPSRSGSPGPRPSASRPEVSSSSGASASSQASPTPALVGLLVDAGLALLRPLLRGRVARSRGGAGSGGAGVRGYRGGAEVALGSCAAGRTWRALRTSSRCTLPFGACRKSLPGGRGCACVVRPHVAVKPSSALDSSELRKQSWPSRACFPKSRNP

SEQ ID NO: 759191 - protein, 200 aa, Homo sapiens; identical to SEQ ID NO: 759190

SEQ ID NO: 759192 - protein, 267 aa, Homo sapiens; identical to SEQ ID NO: 759186

SEQ ID NO: 759193 - protein, 307 aa, Homo sapiens
MTRFIYWRTGRAVVSAVPGGLKDSPCQLEALKLESCGVTSDNCRDLCGIVASKASLRELALGSNKLGDVGMAELCPGLLHPSSRLRTLWIWECGITAKGCGDLCRVLRAKESLKELSLAGNELGDEGARLLCETLLEPGCQLESLWVKSCSFTAACCSHFSSVLAQNRFLLELQISNNRLEDAGVRELCQGLGQPGSVLRVLWLADCDVSDSSCSSLAATLLANHSLRELDLSNNCLGDAGILQLVESVPAAGLPPGAAGPVRHYWSERMRTVRPGEGKPSGGIPEDSEGAPGTAENWAQPGVTGSR

SEQ ID NO: 759194 - protein, 440 aa, Homo sapiens; identical to SEQ ID NO: 759164

SEQ ID NO: 759195 - protein, 440 aa, Homo sapiens; identical to SEQ ID NO: 759164

SEQ ID NO: 759196 - protein, 440 aa, Homo sapiens; identical to SEQ ID NO: 759164

SEQ ID NO: 759197 - protein, 440 aa, Homo sapiens; identical to SEQ ID NO: 759164

SEQ ID NO: 759198 - protein, 197 aa, Homo sapiens; identical to SEQ ID NO: 759173

SEQ ID NO: 759199 - protein, 440 aa, Homo sapiens; identical to SEQ ID NO: 759164

SEQ ID NO: 759200 - protein, 414 aa, Homo sapiens; identical to SEQ ID NO: 759174

SEQ ID NO: 759201 - protein, 459 aa, Homo sapiens
MPWHYSHESSGTIAAVDVSMMRNGVRMRLDVLHPRLQSLSLGCQSWVLGARHELVVRVEREARCKDISSALRVNPALAELNLRSNELGDVGVHCVLQGLQTPSCKIQKLSLQNCCLTGAGCGVLSSTLRTLPTLQELHLSDNLLGDAGLQLLCEGLLDPQCRLEKLQLEYCSLSAASCEPLASVLRAKPDFKELTVSNNDINEAGVRVLCQGLKDSPCQLEALKLESCGVTSDNCRDLCGIVASKASLRELALGSNKLGDVGMAELCPGLLHPSSRLRTLWIWECGITAKGCGDLCRVLRAKESLKELSLAGNELGDEGARLLCETLLEPGCQLESLWVKSCSFTAACCSHFSSVLAQNRFLLELQISNNRLEDAGVRELCQGLGQPGSVLRVLWLADCDVSDSSCSSLAATLLANHSLRELDLSNNCLGDAGILQLVESVPAAGLPPGAAGPVRHLLV

SEQ ID NO: 759202 - protein, 440 aa, Homo sapiens; identical to SEQ ID NO: 759164

SEQ ID NO: 759203 - protein, 397 aa, Homo sapiens
MGRAPPSAPAVPSGQAGRLWPHGSTVQGHQLCTSSQPCTGRAQPAQQRAGRCRRALRAPGPADPLLQDPEAEQELHLSDNLLGDAGLQLLCEGLLDPQCRLEKLQLEYCSLSAASCEPLASVLRAKPDFKELTVSNNDINEAGVRVLCQGLKDSPCQLEALKLESCGVTSDNCRDLCGIVASKASLRELALGSNKLGDVGMAELCPGLLHPSSRLRTLWIWECGITAKGCGDLCRVLRAKESLKELSLAGNELGDEGARLLCETLLEPGCQLESLWVKSCSFTAACCSHFSSVLAQNRFLLELQISNNRLEDAGVRELCQGLGQPGSVLRVLWLADCDVSDSSCSSLAATLLANHSLRELDLSNNCLGDAGILQLVESVPAAGLPPGAAGPVRHLLV

SEQ ID NO: 759204 - protein, 338 aa, Homo sapiens
RTVSRALLSWPCGQELHLSDNLLGDAGLQLLCEGLLDPQCRLEKLQLEYCSLSAASCEPLASVLRAKPDFKELTVSNNDINEAGVRVLCQGLKDSPCQLEALKLESCGVTSDNCRDLCGIVASKASLRELALGSNKLGDVGMAELCPGLLHPSSRLRTLWIWECGITAKGCGDLCRVLRAKESLKELSLAGNELGDEGARLLCETLLEPGCQLESLWVKSCSFTAACCSHFSSVLAQNRFLLELQISNNRLEDAGVRELCQGLGQPGSVLRVLWLADCDVSDSSCSSLAATLLANHSLRELDLSNNCLGDAGILQLVESVPAAGLPPGAAGPVRHLLV

SEQ ID NO: 759205 - protein, 444 aa, Homo sapiens
MSLDIQSLDIQCEELSDARWAELLPLLQQCQVVRLDDCGLTEARCKDISSALRVNPALAELNLRSNELGDVGVHCVLQGLQTPSCKIQKLSLQNCCLTGAGCGVLSSTLRTLPTLQELHLSDNLLGDAGLQLLCEGLLDPQCRLEKLQLEYCSLSAASCEPLASVLRAKPDFKELTVSNNDINEAGVRVLCQGLKDSPCQLEALKLESCGVTSDNCRDLCGIVASKASLRELALGSNKLGDVGMAELCPGLLHPSSRLRTLWIWECGITAKGCGDLCRVLRAKESLKELSLAGNELGDEGARLLCETLLEPGCQLESLWVKSCSFTAACCSHFSSVLAQNRFLLELQISNNRLEDAGVRELCQGLGQPGSVLRVLWLADCDVSDSSCSSLAATLLANHSLRELDLSNNCLGDAGILQLVESVPAAGLPPGAAGVCARAGRVVRP

SEQ ID NO: 759206 - protein, 173 aa, Homo sapiens
MGTMKTQRDGHSLGRWSLVLLLLGLVMPLAIIAQVLSYKEAVLRAIDGINQRSSDANLYRLLDLDPRPTMDGDPDTPKPVSFTVKETVCPRTTQQSPEDCDFKKDGLVKRCMGTVTLNQARGSFDISCDKDNKRFALLGDFFRKSKEKIGKEFKRIVQRIKDFLRNLVPRTES

SEQ ID NO: 759207 - protein, 172 aa, Homo sapiens
CSDLEDPEFGSLGRWSLVLLLLGLVMPLAIIAQVLSYKEAVLRAIDGINQRSSDANLYRLLDLDPRPTMDGDPDTPKPVSFTVKETVCPRTTQQSPEDCDFKKDGLVKRCMGTVTLNQARGSFDISCDKDNKRFALLGDFFRKSKEKIGKEFKRIVQRIKDFLRNLVPRTES

SEQ ID NO: 759208 - protein, 1342 aa, Homo sapiens
MRANDALQVLGLLFSLARGSEVGNSQAVCPGTLNGLSVTGDAENQYQTLYKLYERCEVVMGNLEIVLTGHNADLSFLQWIREVTGYVLVAMNEFSTLPLPNLRVVRGTQVYDGKFAIFVMLNYNTNSSHALRQLRLTQLTEILSGGVYIEKNDKLCHMDTIDWRDIVRDRDAEIVVKDNGRSCPPCHEVCKGRCWGPGSEDCQTLTKTICAPQCNGHCFGPNPNQCCHDECAGGCSGPQDTDCFACRHFNDSGACVPRCPQPLVYNKLTFQLEPNPHTKYQYGGVCVASCPHNFVVDQTSCVRACPPDKMEVDKNGLKMCEPCGGLCPKACEGTGSGSRFQTVDSSNIDGFVNCTKILGNLDFLITGLNGDPWHKIPALDPEKLNVFRTVREITGYLNIQSWPPHMHNFSVFSNLTTIGGRSLYNRGFSLLIMKNLNVTSLGFRSLKEISAGRIYISANRQLCYHHSLNWTKVLRGPTEERLDIKHNRPRRDCVAEGKVCDPLCSSGGCWGPGPGQCLSCRNYSRGGVCVTHCNFLNGEPREFAHEAECFSCHPECQPMEGTATCNGSGSDTCAQCAHFRDGPHCVSSCPHGVLGAKGPIYKYPDVQNECRPCHENCTQGCKGPELQDCLGQTLVLIGKTHLTMALTVIAGLVVIFMMLGGTFLYWRGRRIQNKRAMRRYLERGESIEPLDPSEKANKVLARIFKETELRKLKVLGSGVFGTVHKGVWIPEGESIKIPVCIKVIEDKSGRQSFQAVTDHMLAIGSLDHAHIVRLLGLCPGSSLQLVTQYLPLGSLLDHVRQHRGALGPQLLLNWGVQIAKGMYYLEEHGMVHRNLAARNVLLKSPSQVQVADFGVADLLPPDDKQLLYSEAKTPIKWMALESIHFGKYTHQSDVWSYGVTVWELMTFGAEPYAGLRLAEVPDLLEKGERLAQPQICTIDVYMVMVKCWMIDENIRPTFKELANEFTRMARDPPRYLVIKRESGPGIAPGPEPHGLTNKKLEEVELEPELDLDLDLEAEEDNLATTTLGSALSLPVGTLNRPRGSQSLLSPSSGYMPMNQGNLGESCQESAVSGSSERCPRPVSLHPMPRGCLASESSEGHVTGSEAELQEKVSMCRSRSRSRSPRPRGDSAYHSQRHSLLTPVTPLSPPGLEEEDVNGYVMPDTHLKGTPSSREGTLSSVGLSSVLGTEEEDEDEEYEYMNRRRRHSPPHPPRPSSLEELGYEYMDVGSDLSASLGSTQSCPLHPVPIMPTAGTTPDEDYEYMNRQRDGGGPGGDYAAMGACPASEQGYEEMRAFQGPGHQAPHVHYARLKTLRSLEATDSAFDNPDYWHSRLFPKANAQRT

SEQ ID NO: 759209 - protein, 628 aa, Homo sapiens
MRANDALQVLGLLFSLARGSEVGNSQAVCPGTLNGLSVTGDAENQYQTLYKLYERCEVVMGNLEIVLTGHNADLSFLQWIREVTGYVLVAMNEFSTLPLPNLRVVRGTQVYDGKFAIFVMLNYNTNSSHALRQLRLTQLTEILSGGVYIEKNDKLCHMDTIDWRDIVRDRDAEIVVKDNGRSCPPCHEVCKGRCWGPGSEDCQTLTKTICAPQCNGHCFGPNPNQCCHDECAGGCSGPQDTDCFACRHFNDSGACVPRCPQPLVYNKLTFQLEPNPHTKYQYGGVCVASCPHNFVVDQTSCVRACPPDKMEVDKNGLKMCEPCGGLCPKEQSLLSPSSGYMPMNQGNLGESCQESAVSGSSERCPRPVSLHPMPRGCLASESSEGHVTGSEAELQEKVSMCRSRSRSRSPRPRGDSAYHSQRHSLLTPVTPLSPPGLEEEDVNGYVMPDTHLKGTPSSREGTLSSVGLSSVLGTEEEDEDEEYEYMNRRRRHSPPHPPRPSSLEELGYEYMDVGSDLSASLGSTQSCPLHPVPIMPTAGTTPDEDYEYMNRQRDGGGPGGDYAAMGACPASEQGYEEMRAFQGPGHQAPHVHYARLKTLRSLEATDSAFDNPDYWHSRLFPKANAQRT

SEQ ID NO: 759210 - protein, 1276 aa, Homo sapiens
MGGEVRKRRSAAALNPVTSFPTSEILSGGVYIEKNDKLCHMDTIDWRDIVRDRDAEIVVKDNGRSCPPCHEVCKGRCWGPGSEDCQTCGFEIPSKNFTHTLSYPFLPKPGSTLWGRHEQWPQNSVLGALTAMLSLLSIVTKTICAPQCNGHCFGPNPNQCCHDECAGGCSGPQDTDCFACRHFNDSGACVPRCPQPLVYNKLTFQLEPNPHTKYQYGGVCVASCPHNFVVDQTSCVRACPPDKMEVDKNGLKMCEPCGGLCPKACEGTGSGSRFQTVDSSNIDGFVNCTKILGNLDFLITGLNGDPWHKIPALDPEKLNVFRTVREITGYLNIQSWPPHMHNFSVFSNLTTIGGRSLYNRGFSLLIMKNLNVTSLGFRSLKEISAGRIYISANRQLCYHHSLNWTKVLRGPTEERLDIKHNRPRRDCVAEGKVCDPLCSSGGCWGPGPGQCLSCRNYSRGGVCVTHCNFLNGEPREFAHEAECFSCHPECQPMEGTATCNGSGSDTCAQCAHFRDGPHCVSSCPHGVLGAKGPIYKYPDVQNECRPCHENCTQGCKGPELQDCLGQTLVLIGKTHLTMALTVIAGLVVIFMMLGGTFLYWRGRRIQNKRAMRRYLERGESIEPLDPSEKANKVLARIFKETELRKLKVLGSGVFGTVHKGVWIPEGESIKIPVCIKVIEDKSGRQSFQAVTDHMLAIGSLDHAHIVRLLGLCPGSSLQLVTQYLPLGSLLDHVRQHRGALGPQLLLNWGVQIAKGMYYLEEHGMVHRNLAARNVLLKSPSQVQVADFGVADLLPPDDKQLLYSEAKTPIKWMALESIHFGKYTHQSDVWSYGVTVWELMTFGAEPYAGLRLAEVPDLLEKGERLAQPQICTIDVYMVMVKCWMIDENIRPTFKELANEFTRMARDPPRYLVIKRESGPGIAPGPEPHGLTNKKLEEVELEPELDLDLDLEAEEDNLATTTLGSALSLPVGTLNRPRGSQSLLSPSSGYMPMNQGNLGESCQESAVSGSSERCPRPVSLHPMPRGCLASESSEGHVTGSEAELQEKVSMCRSRSRSRSPRPRGDSAYHSQRHSLLTPVTPLSPPGLEEEDVNGYVMPDTHLKGTPSSREGTLSSVGLSSVLGTEEEDEDEEYEYMNRRRRHSPPHPPRPSSLEELGYEYMDVGSDLSASLGSTQSCPLHPVPIMPTAGTTPDEDYEYMNRQRDGGGPGGDYAAMGACPASEQGYEEMRAFQGPGHQAPHVHYARLKTLRSLEATDSAFDNPDYWHSRLFPKANAQRT

SEQ ID NO: 759211 - protein, 1039 aa, Homo sapiens
MVRSCKETAFPLSLRRPPPLNLSYIAACEGTGSGSRFQTVDSSNIDGFVNCTKILGNLDFLITGLNGDPWHKIPALDPEKLNVFRTVREITGYLNIQSWPPHMHNFSVFSNLTTIGGRSLYNRGFSLLIMKNLNVTSLGFRSLKEISAGRIYISANRQLCYHHSLNWTKVLRGPTEERLDIKHNRPRRDCVAEGKVCDPLCSSGGCWGPGPGQCLSCRNYSRGGVCVTHCNFLNGEPREFAHEAECFSCHPECQPMEGTATCNGSGSDTCAQCAHFRDGPHCVSSCPHGVLGAKGPIYKYPDVQNECRPCHENCTQGCKGPELQDCLGQTLVLIGKTHLTMALTVIAGLVVIFMMLGGTFLYWRGRRIQNKRAMRRYLERGESIEPLDPSEKANKVLARIFKETELRKLKVLGSGVFGTVHKGVWIPEGESIKIPVCIKVIEDKSGRQSFQAVTDHMLAIGSLDHAHIVRLLGLCPGSSLQLVTQYLPLGSLLDHVRQHRGALGPQLLLNWGVQIAKGMYYLEEHGMVHRNLAARNVLLKSPSQVQVADFGVADLLPPDDKQLLYSEAKTPIKWMALESIHFGKYTHQSDVWSYGVTVWELMTFGAEPYAGLRLAEVPDLLEKGERLAQPQICTIDVYMVMVKCWMIDENIRPTFKELANEFTRMARDPPRYLVIKRESGPGIAPGPEPHGLTNKKLEEVELEPELDLDLDLEAEEDNLATTTLGSALSLPVGTLNRPRGSQSLLSPSSGYMPMNQGNLGESCQESAVSGSSERCPRPVSLHPMPRGCLASESSEGHVTGSEAELQEKVSMCRSRSRSRSPRPRGDSAYHSQRHSLLTPVTPLSPPGLEEEDVNGYVMPDTHLKGTPSSREGTLSSVGLSSVLGTEEEDEDEEYEYMNRRRRHSPPHPPRPSSLEELGYEYMDVGSDLSASLGSTQSCPLHPVPIMPTAGTTPDEDYEYMNRQRDGGGPGGDYAAMGACPASEQGYEEMRAFQGPGHQAPHVHYARLKTLRSLEATDSAFDNPDYWHSRLFPKANAQRT

SEQ ID NO: 759212 - protein, 331 aa, Homo sapiens
MRANDALQVLGLLFSLARGSEVGNSQAVCPGTLNGLSVTGDAENQYQTLYKLYERCEVVMGNLEIVLTGHNADLSFLQWIREVTGYVLVAMNEFSTLPLPNLRVVRGTQVYDGKFAIFVMLNYNTNSSHALRQLRLTQLTEILSGGVYIEKNDKLCHMDTIDWRDIVRDRDAEIVVKDNGRSCPPCHEVCKGRCWGPGSEDCQTLTKTICAPQCNGHCFGPNPNQCCHDECAGGCSGPQDTDCFACRHFNDSGACVPRCPQPLVYNKLTFQLEPNPHTKYQYGGVCVASCPHNFVVDQTSCVRACPPDKMEVDKNGLKMCEPCGGLCPKGG

SEQ ID NO: 759213 - protein, 186 aa, Homo sapiens [sequence omitted]

SEQ ID NO: 759214 - protein, 183 aa, Homo sapiens
MRANDALQVLGLLFSLARGSEVGNSQAVCPGTLNGLSVTGDAENQYQTLYKLYERCEVVMGNLEIVLTGHNADLSFLQWIREVTGYVLVAMNEFSTLPLPNLRVVRGTQVYDGKFAIFVMLNYNTNSSHALRQLRLTQLTGQFPMVPSGLTPQPAQDWYLLDDDPRLLTLSASSKVPVTLAAV

SEQ ID NO: 759215 - protein, 1298 aa, Homo sapiens
MQSVNVEEPVRGTQVYDGKFAIFVMLNYNTNSSHALRQLRLTQLTEILSGGVYIEKNDKLCHMDTIDWRDIVRDRDAEIVVKDNGRSCPPCHEVCKGRCWGPGSEDCQTCGFEIPSKNFTHTLSYPFLPKPGSTLWGRHEQWPQNSVLGALTAMLSLLSIVTKTICAPQCNGHCFGPNPNQCCHDECAGGCSGPQDTDCFACRHFNDSGACVPRCPQPLVYNKLTFQLEPNPHTKYQYGGVCVASCPHNFVVDQTSCVRACPPDKMEVDKNGLKMCEPCGGLCPKACEGTGSGSRFQTVDSSNIDGFVNCTKILGNLDFLITGLNGDPWHKIPALDPEKLNVFRTVREITGYLNIQSWPPHMHNFSVFSNLTTIGGRSLYNRGFSLLIMKNLNVTSLGFRSLKEISAGRIYISANRQLCYHHSLNWTKVLRGPTEERLDIKHNRPRRDCVAEGKVCDPLCSSGGCWGPGPGQCLSCRNYSRGGVCVTHCNFLNGEPREFAHEAECFSCHPECQPMEGTATCNGSGSDTCAQCAHFRDGPHCVSSCPHGVLGAKGPIYKYPDVQNECRPCHENCTQGCKGPELQDCLGQTLVLIGKTHLTMALTVIAGLVVIFMMLGGTFLYWRGRRIQNKRAMRRYLERGESIEPLDPSEKANKVLARIFKETELRKLKVLGSGVFGTVHKGVWIPEGESIKIPVCIKVIEDKSGRQSFQAVTDHMLAIGSLDHAHIVRLLGLCPGSSLQLVTQYLPLGSLLDHVRQHRGALGPQLLLNWGVQIAKGMYYLEEHGMVHRNLAARNVLLKSPSQVQVADFGVADLLPPDDKQLLYSEAKTPIKWMALESIHFGKYTHQSDVWSYGVTVWELMTFGAEPYAGLRLAEVPDLLEKGERLAQPQICTIDVYMVMVKCWMIDENIRPTFKELANEFTRMARDPPRYLVIKRESGPGIAPGPEPHGLTNKKLEEVELEPELDLDLDLEAEEDNLATTTLGSALSLPVGTLNRPRGSQSLLSPSSGYMPMNQGNLGESCQESAVSGSSERCPRPVSLHPMPRGCLASESSEGHVTGSEAELQEKVSMCRSRSRSRSPRPRGDSAYHSQRHSLLTPVTPLSPPGLEEEDVNGYVMPDTHLKGTPSSREGTLSSVGLSSVLGTEEEDEDEEYEYMNRRRRHSPPHPPRPSSLEELGYEYMDVGSDLSASLGSTQSCPLHPVPIMPTAGTTPDEDYEYMNRQRDGGGPGGDYAAMGACPASEQGYEEMRAFQGPGHQAPHVHYARLKTLRSLEATDSAFDNPDYWHSRLFPKANAQRT

SEQ ID NO: 759216 - protein, 400 aa, Homo sapiens
MRANDALQVLGLLFSLARGSEVGNSQAVCPGTLNGLSVTGDAENQYQTLYKLYERCEVVMGNLEIVLTGHNADLSFLQWIREVTGYVLVAMNEFSTLPLPNLRVVRGTQVYDGKFAIFVMLNYNTNSSHALRQLRLTQLTEILSGGVYIEKNDKLCHMDTIDWRDIVRDRDAEIVVKDNGRSCPPCHEVCKGRCWGPGSEDCQTLTKTICAPQCNGHCFGPNPNQCCHDECAGGCSGPQDTDCFACRHFNDSGACVPRCPQPLVYNKLTFQLEPNPHTKYQYGGVCVASCPHNFVVDQTSCVRACPPDKMEVDKNGLKMCEPCGGLCPKACEGTGSGSRFQTVDSSNIDGFVNCTKILGNLDFLITGLNGLEILPSLLRPQPTHPSQFISLAKTFLCGAD

SEQ ID NO: 759217 - protein, 595 aa, Homo sapiens [sequence omitted]

SEQ ID NO: 759218 - protein, 193 aa, Homo sapiens
MLRSGNDERWNQGKCVEGMVEIFDMLLATSSRFRMMNLQGEEFVCLKSIILLNSGVYTFLSSTLKSLEEKDHIHRVLDKITDTLIHLMAKAGLTLQQQHQRLAQLLLILSHIRHMSNKGMEHLYSMKCKNVVPLYDLLLEMLDAHRLHAPTSRGGASVEETDQSHLATAGSTSSHSLQKYYITGEAEGFPATV

SEQ ID NO: 759219 - protein, 294 aa, Homo sapiens
MTMTLHTKASGMALLHQIQGNELEPLNRPPSRMCLARDPDDWSRLALHGAPSEATVCSYTCSWTGFVDLTLHDQVHLLECAWLEILMIGLVWRSMEHPGKLLFAPNLLLDRNQGKCVEGMVEIFDMLLATSSRFRMMNLQGEEFVCLKSIILLNSGVYTFLSSTLKSLEEKDHIHRVLDKITDTLIHLMAKAGLTLQQQHQRLAQLLLILSHIRHMSNKGMEHLYSMKCKNVVPLYDLLLEMLDAHRLHAPTSRGGASVEETDQSHLATAGSTSSHSLQKYYITGEAEGFPATV

SEQ ID NO: 759220 - protein, 220 aa, Homo sapiens [sequence omitted]

SEQ ID NO: 759221 - protein, 700 aa, Homo sapiens
MTMTLHTKASGMALLHQIQGNELEPLNRPQLKIPLERPLGEVYLDSSKPAVYNYPEGAAYEFNAAAAANAQVYGQTGLPYGPGSEAAAFGSNGLGGFPPLNSVSPSPLMLLHPPPQLSPFLQPHGQQVPYYLENEPSGYTVREAGPPAFYRPNSDNRRQGGRERLASTNDKGSMAMESAKETRYCAVCNDYASGYHYGVWSCEGCKAFFKRSIQGHNDYMCPATNQCTIDKNRRKSCQACRLRKCYEVGMMKGGIRKDRRGGRMLKHKRQRDDGEGRGEVGSAGDMRAANLWPSPLMIKRSKKNSLALSLTADQMVSALLDAEPPILYSEYDPTRPFSEASMMGLLTNLADRELVHMINWAKRVPGFVDLTLHDQVHLLECAWLEILMIGLVWRSMEHPGKLLFAPNLLLDRNQGKCVEGMVEIFDMLLATSSRFRMMNLQGEEFVCLKSIILLNSGVYTFLSSTLKSLEEKDHIHRVLDKITDTLIHLMAKAGLTLQQQHQRLAQLLLILSHIRHMRTRENVYEGMVEIFDMLLATSSRFRMMNLQGEEFVCLKSIILLNSGVYTFLSSTLKSLEEKDHIHRVLDKITDTLIHLMAKAGLTLQQQHQRLAQLLLILSHISTCNKGMEHLYSMKCKNVVPLYDLLLEMLDAHRLHAPTSRGGASVEETDQSHLATAGSTSSHSLQKYYITGEAEGFPATV

SEQ ID NO: 759222 - protein, 700 aa, Homo sapiens; identical to SEQ ID NO: 759221

SEQ ID NO: 759223 - protein, 386 aa, Homo sapiens
MTMTLHTKASGMALLHQIQGNELEPLNRPQLKIPLERPLGEVYLDSSKPAVYNYPEGAAYEFNAAAAANAQVYGQTGLPYGPGSEAAAFGSNGLGGFPPLNSVSPSPLMLLHPPPQLSPFLQPHGQQVPYYLENEPSGYTVREAGPPAFYRPNSDNRRQGGRERLASTNDKGSMAMESAKETRYCAVCNDYASGYHYGVWSCEGCKAFFKRSIQGHNDYMCPATNQCTIDKNRRKSCQACRLRKCYEVGMMKGGIRKDRRGGRMLKHKRQRDDGEGRGELMAKAGLTLQQQHQRLAQLLLILSHIRHMSNKGMEHLYSMKCKNVVPLYDLLLEMLDAHRLHAPTSRGGASVEETDQSHLATAGSTSSHSLQKYYITGEAEGFPATV

SEQ ID NO: 759224 - protein, 483 aa, Homo sapiens
MTMTLHTKASGMALLHQIQGNELEPLNRPQLKIPLERPLGEVYLDSSKPAVYNYPEGAAYEFNAAAAANAQVYGQTGLPYGPGSEAAAFGSNGLGGFPPLNSVSPSPLMLLHPPPQLSPFLQPHGQQVPYYLENEPSGYTVREAGPPAFYRPNSDNRRQGGRERLASTNDKGSMAMESAKETRYCAVCNDYASGYHYGVWSCEGCKAFFKRSIQGHNDYMCPATNQCTIDKNRRKSCQACRLRKCYEVGMMKGGFVDLTLHDQVHLLECAWLEILMIGLVWRSMEHPGKLLFAPNLLLDRNQGKCVEGMVEIFDMLLATSSRFRMMNLQGEEFVCLKSIILLNSGVYTFLSSTLKSLEEKDHIHRVLDKITDTLIHLMAKAGLTLQQQHQRLAQLLLILSHIRHMSNKGMEHLYSMKCKNVVPLYDLLLEMLDAHRLHAPTSRGGASVEETDQSHLATAGSTSSHSLQKYYITGEAEGFPATV

SEQ ID NO: 759225 - protein, 171 aa, Homo sapiens
MTMTLHTKASGMALLHQIQGNELEPLNRPQLKIPLERPLGEVYLDSSKPAVYNYPEGAAYEFNAAAAANAQVYGQTGLPYGPGSEAAAFGSNGLGGFPPLNSVSPSPLMLLHPPPQLSPFLQPHGQQVPYYLENEPSGYTVREAGPPAFYRMVLSCGLSSRVSHWMFREFM

SEQ ID NO: 759226 - protein, 595 aa, Homo sapiens [sequence omitted]

SEQ ID NO: 759227 - protein, 405 aa, Homo sapiens
SLARTSSAEYNVNNLVSPVLFQEALWHVPEHAVVLEIAPHALLQAVLKRGLKPSCTIIPLMKKDHRDNLEFFLAGIRRLHLSGIDANPNALFPPVEFPAPRGTPLISPLIKWDHSLALSLTADQMVSALLDAEPPILYSEYDPTRPFSEASMMGLLTNLADRELVHMINWAKRVPGFVDLTLHDQVHLLECAWLEILMIGLVWRSMEHPGKLLFAPNLLLDRNQGKCVEGMVEIFDMLLATSSRFRMMNLQGEEFVCLKSIILLNSGVYTFLSSTLKSLEEKDHIHRVLDKITDTLIHLMAKAGLTLQQQHQRLAQLLLILSHIRHMSNKGMEHLYSMKCKNVVPLYDLLLEMLDAHRLHAPTSRGGASVEETDQSHLATAGSTSSHSLQKYYITGEAEGFPATV

SEQ ID NO: 759228 - protein, 334 aa, Homo sapiens
MTMTLHTKASGMALLHQIQGNELEPLNRPQLKIPLERPLGEVYLDSSKPAVYNYPEGAAYEFNAAAAANAQVYGQTGLPYGPGSEAAAFGSNGLGGFPPLNSVSPSPLMLLHPPPQLSPFLQPHGQQVPYYLENEPSGYTVREAGPPAFYRNQGKCVEGMVEIFDMLLATSSRFRMMNLQGEEFVCLKSIILLNSGVYTFLSSTLKSLEEKDHIHRVLDKITDTLIHLMAKAGLTLQQQHQRLAQLLLILSHIRHMSNKGMEHLYSMKCKNVVPLYDLLLEMLDAHRLHAPTSRGGASVEETDQSHLATAGSTSSHSLQKYYITGEAEGFPATV

SEQ ID NO: 759229 - protein, 700 aa, Homo sapiens; identical to SEQ ID NO: 759221

SEQ ID NO: 759230 - protein, 700 aa, Homo sapiens; identical to SEQ ID NO: 759221

SEQ ID NO: 759231 - protein, 549 aa, Homo sapiens
MTMTLHTKASGMALLHQIQGNELEPLNRPQLKIPLERPLGEVYLDSSKPAVYNYPEGAAYEFNAAAAANAQVYGQTGLPYGPGSEAAAFGSNGLGGFPPLNSVSPSPLMLLHPPPQLSPFLQPHGQQVPYYLENEPSGYTVREAGPPAFYRPNSDNRRQGGRERLASTNDKGSMAMESAKETRYCAVCNDYASGYHYGVWSCEGCKAFFKRSIQGHNDYMCPATNQCTIDKNRRKSCQACRLRKCYEVGMMKGGIRKDRRGGRMLKHKRQRDDGEGRGEVGSAGDMRAANLWPSPLMIKRSKKNSLALSLTADQMVSALLDAEPPILYSEYDPTRPFSEASMMGLLTNLAEQGAGSHDQLGEEGARNQGKCVEGMVEIFDMLLATSSRFRMMNLQGEEFVCLKSIILLNSGVYTFLSSTLKSLEEKDHIHRVLDKITDTLIHLMAKAGLTLQQQHQRLAQLLLILSHIRHMSNKGMEHLYSMKCKNVVPLYDLLLEMLDAHRLHAPTSRGGASVEETDQSHLATAGSTSSHSLQKYYITGEAEGFPATV

SEQ ID NO: 759232 - protein, 382 aa, Homo sapiens
MTMTLHTKASGMALLHQIQGNELEPLNRPQLKIPLERPLGEVYLDSSKPAVYNYPEGAAYEFNAAAAANAQVYGQTGLPYGPGSEAAAFGSNGLGGFPPLNSVSPSPLMLLHPPPQLSPFLQPHGQQVPYYLENEPSGYTVREAGPPAFYRPNSDNRRQGGRERLASTNDKGSMAMESAKETRYCAVCNDYASGYHYGVWSCEGCKAFFKRSIQGHNDYMCPATNQCTIDKNRRKSCQACRLRKCYEVGMMKGGIRKDRRGGRMLKHKRQRDDGEGRGEVGSAGDMRAANLWPSPLMIKRSKKNSLALSLTADQMVSALLDAEPPILYSEYDPTRPFSEASMMGLLTNLADRELVHMINWAKRVPERMDICVILGVPNAVAS

SEQ ID NO: 759233 - protein, 92 aa, Homo sapiens
SAGDMRAANLWPSPLMIKRSKKNSLALSLTADQMVSALLDAEPPILYSEYDPTRPFSEASMMGLLTNLADRELVHMINWAKRVPGKNAKRSF

SEQ ID NO: 759234 - protein, 569 aa, Homo sapiens
MDAGSSRSLENAVNRIYHDQLVPKINTSKKMSTLAHPPNILEMSQEIKKNCGGKQVEITLERTKMTKGIKEKQSNDLEKAAFKRKAEGEEKPTRKKQAKITELDNQLITMPLPHIPLKNIMDVEMKLVYIDEMGVRYEFVESFMSTGSQPTCQAAEIVDPLSVHNFSFLPQIDKWLQVALKDASSCYRQKKYALAAGQFRTALELCSKGAVLGEPFDAPAEDIASVASFIETKLVTCYLRMRKPDLALNHAHRSIVLNPAYFRNHLRQATVFRCLERYSEAARSAVIADYMFWLGGGREESISKLIKLYWQAMIEEAITRAESFSVMYTPFATKIRADKIEKVKDAFTKTHPAYAEYMYTDLQALHMLPQTVDWSSFPPQQYLLTLGFKNKDDGKFLEKISSRKLPIFTEHKTPFGLTREDTVRQMETMGKRILPILDFIRSTQLNGSFPASSGVMEKLQYASLLSQLQRVKEQSQVINQAMAELATIPYLQDISQQEAELLQSLMADAMDTLEGRRNNNERVWNMIQKVGQIEDFLYQLEDSFLKTKKLRTARRQKTKMKRLQTVQQR

SEQ ID NO: 759235 - protein, 207 aa, Homo sapiens
MDAGSSRSLENAVNRIYHDQLVPKINTSKKMSTLAHPPNILEMSQEIKKNCGGKQVEITLERTKMTKGIKEKQSNDLEKAAFKRKAEGEEKPTRKKQAKITELDNQLITMPLPHIPLKNIMDVEMKLVYIDEMGVRYEFVESFMSTGSQPTCQAAEIVDPLSVHNFSFLPQIDKWLQVALKDASSCYRQKKYALAAGQFRTALEVWD

SEQ ID NO: 759236 - protein, 532 aa, Homo sapiens
MDAGSSRSLENAVNRIYHDQLVPKINTSKKMSTLAHPPNILEMSQEIKKNCGGKQVEITLERTKMTKGIKEKQSNDLEKAAFKRKAEGEEKPTRKKQAKITELDNQLITMPLPHIPLKNIMDVEMKLVYIDEMGVRYEFVESFMSTGSQPTCQAAEIVDPLSVHNFSFLPQIDKWLQVALKDASSCYRQKKYALAAGQFRTALELCSKGAVLGEPFDAPAEDIASVASFIETKLVTCYLRMRKPDLALNHAHRSIVLNPAYFRNHLRQATVFRCLERYSEAARSAVIADYMFWLGGGREESISKLIKLYWQAMIEEAITRAESFSVMYTPFATKIRADKIEKVKDAFTKTHPAYAEYMYTDLQALHMLPQTVDWSSFPPQQYLLTLGFKNKDDGKFLEKISSRKLPIFTEHKTPFGLTREDTVRQMETMGKRILPILDFIRSTQLNGSFPASSGVMEKLQYASLLSQLQRVKEQSQVINQAMAELATIPYLQDISQQEAELLQSLMADAMDTLEGRRNNNERVWNMIQKVKL

SEQ ID NO: 759237 - protein, 76 aa, Homo sapiens
MGLVARDVSSPGVPASKQPDQASQWDVGKPVLADAVAGRSPERSPCPRGAEPQLLRSFGQDRWMQEAVGVWRICSH

SEQ ID NO: 759238 - protein, 74 aa, Homo sapiens
EEILGRTEAEPGSNSRKEKLRGRRAVREDILERPGPGRQHAGLQGGSVGVLKSLDSFFLLTPFILKSLPLAAQR

SEQ ID NO: 759239 - protein, 117 aa, Homo sapiens
KAGGQWCSLGSLQTPSPELKQFSCLSLLSSWDYRSPPPHPANFCTFSRDGQAGLKLLTSGDPPASASQSAWITVMSHHSQPLMVFWFLNFSRNAFYTTVPKITIYRYLKHCRISQKH

SEQ ID NO: 759240 - protein, 120 aa, Homo sapiens
MSSSAGSGHQPSQSRAIPTRTVAISDAAQLPHDYCTTPGGTLFSTTPGGTRIIYDRKFLLDRRNSPMAQTPPCHLPNIPGVTSPGTLIEDSKVEVNNLNNLNNHDRKHAVGDDAQFEMDI

SEQ ID NO: 759241 - protein, 120 aa, Homo sapiens; identical to SEQ ID NO: 759240

SEQ ID NO: 759242 - protein, 120 aa, Homo sapiens; identical to SEQ ID NO: 759240

SEQ ID NO: 759243 - protein, 120 aa, Homo sapiens; identical to SEQ ID NO: 759240

SEQ ID NO: 759244 - protein, 120 aa, Homo sapiens; identical to SEQ ID NO: 759240

SEQ ID NO: 759245 - protein, 120 aa, Homo sapiens; identical to SEQ ID NO: 759240

SEQ ID NO: 759246 - protein, 120 aa, Homo sapiens; identical to SEQ ID NO: 759240

SEQ ID NO: 759247 - protein, 120 aa, Homo sapiens; identical to SEQ ID NO: 759240

SEQ ID NO: 759248 - protein, 120 aa, Homo sapiens; identical to SEQ ID NO: 759240

SEQ ID NO: 759249 - protein, 120 aa, Homo sapiens; identical to SEQ ID NO: 759240

SEQ ID NO: 759250 - protein, 120 aa, Homo sapiens; identical to SEQ ID NO: 759240

SEQ ID NO: 759251 - protein, 120 aa, Homo sapiens; identical to SEQ ID NO: 759240

SEQ ID NO: 759252 - protein, 617 aa, Homo sapiens
MDFSKLPKILDEDKESTFGYVHGVSGPVVTACDMAGAAMYELVRVGHSELVGEIIRLEGDMATIQVYEETSGVSVGDPVLRTGKPLSVELGPGIMGAIFDGIQRPLSDISSQTQSIYIPRGVNVSALSRDIKWDFTPCKNLRVGSHITGGDIYGIVSENSLIKHKIMLPPRNRGTVTYIAPPGNYDTSDVVLELEFEGVKEKFTMVQVWPVRQVRPVTEKLPANHPLLTGQRVLDALFPCVQGGTTAIPGAFGCGKTVISQSLSKYSNSDVIIYVGCGERGNEMSEVLRDFPELTMEVDGKVESIMKRTALVANTSNMPVAAREASIYTGITLSEYFRDMGYHVSMMADSTSRWAEALREISGRLAEMPADSGYPAYLGARLASFYERAGRVKCLGNPEREGSVSIVGAVSPPGGDFSDPVTSATLGIVQVFWGLDKKLAQRKHFPSVNWLISYSKYMRALDEYYDKHFTEFVPLRTKAKEILQEEEDLAEIVQLVGKASLAETDKITLEVAKLIKDDFLQQNGYTPYDRFCPFYKTVGMLSNMIAFYDMARRAVETTAQSDNKITWSIIREHMGDILYKLSSMKFKDPLKDGEAKIKSDYAQLLEDMQNAFRSLED

SEQ ID NO: 759253 - protein, 617 aa, Homo sapiens; identical to SEQ ID NO: 759252

SEQ ID NO: 759254 - protein, 634 aa, Homo sapiens
SPPRGQPLGPRSVQSLHLAPQQLPKILDEDKESTFGYVHGVSGPVVTACDMAGAAMYELVRVGHSELVGEIIRLEGDMATIQVYEETSGVSVGDPVLRTGKPLSVELGPGIMGAIFDGIQRPLSDISSQTQSIYIPRGVNVSALSRDIKWDFTPCKNLRVGSHITGGDIYGIVSENSLIKHKIMLPPRNRGTVTYIAPPGNYDTSDVVLELEFEGVKEKFTMVQVWPVRQVRPVTEKLPANHPLLTGQRVLDALFPCVQGGTTAIPGAFGCGKTVISQSLSKYSNSDVIIYVGCGERGNEMSEVLRDFPELTMEVDGKVESIMKRTALVANTSNMPVAAREASIYTGITLSEYFRDMGYHVSMMADSTSRWAEALREISGRLAEMPADSGYPAYLGARLASFYERAGRVKCLGNPEREGSVSIVGAVSPPGGDFSDPVTSATLGIVQVFWGLDKKLAQRKHFPSVNWLISYSKYMRALDEYYDKHFTEFVPLRTKAKEILQEEEDLAEIVQLVGKASLAETDKITLEVAKLIKDDFLQQNGYTPYDRFCPFYKTVGMLSNMIAFYDMARRAVETTAQSDNKITWSIIREHMGDILYKLSSMKFKDPLKDGEAKIKSDYAQLLEDMQNAFRSLED

SEQ ID NO: 759255 - protein, 501 aa, Homo sapiens
MDFSKLPKILDEDKESTFGYVHGVSGPVVTACDMAGAAMYELVRVGHSELVGEIIRLEGDMATIQVYEETSGVSVGDPVLRTGKPLSVELGPGIMGAIFDGIQRPLSDISSQTQSIYIPRGVNVSALSRDIKWDFTPCKNLRVGSHITGGDIYGIVSENSLIKHKIMLPPRNRGTVTYIAPPGNYDTSDVVLELEFEGVKEKFTMVQVWPVRQVRPVTEKLPANHPLLTGQRVLDALFPCVQGGTTAIPGAFGCGKTVISQSLSKYSNSDVIIYVGCGERGNEMSEVLRDFPELTMEVDGKVESIMKRTALVANTSNMPVAAREASIYTGITLSEYFRDMGYHVSMMADSTSRWAEALREISGRLAEMPADSGYPAYLGARLASFYERAGRVKCLGNPEREGSVSIVGAVSPPGGDFSDPVTSATLGIVQVFWGLDKKLAQRKHFPSVNWLISYSKYMRALDEYYDKHFTEFVPLRTKAKEILQEEEDLAEIVQLVGKVSC

SEQ ID NO: 759256 - protein, 617 aa, Homo sapiens; identical to SEQ ID NO: 759252

SEQ ID NO: 759257 - protein, 617 aa, Homo sapiens; identical to SEQ ID NO: 759252

SEQ ID NO: 759258 - protein, 519 aa, Homo sapiens
EFRRAATVGALFAGVTALMAAASVTPPGSLELLQPGFSKTLLGTKLEAKYLCSACRNVLRRPFQAQCGHRYCSFCLASILSSGPQNCAACVHEGIYEEGISILESSSAFPDNAARREVESLPAVCPSDGCTWKGTLKEYESCHEGRCPLMLTECPACKGLVRLGEKERHLEHECPERSLSCRHCRAPCCGADVKAHHEVCPKFPLTCDGCGKKKIPREKFQDHVKTCGKCRVPCRFHAIGCLETVEGEKQQEHEVQWLREHLAMLLSSVLEAKPLLGDQSHAGSELLQRCESLEKKTATFENIVCVLNREVERVAMTAEACSRQHRLDQDKIEALSSKVQQLERSIGLKDLAMADLEQKVRPFQAQCGHRYCSFCLASILRKRQEAVAGRIPAIFSPAFYTSRYGYKMCLRIYLNGDGTGRGTHLSLFFVVMKGPNDALLRWPFNQKVTLMLLDQNNREHVIDAFRPDVTSSSFQRPVNDMNIASGCPLFCPVSKMEAKNSYVRDDAIFIKAIVDLTGL

SEQ ID NO: 759259 - protein, 131 aa, Homo sapiens
MAAASVTPPGSLELLQPGFSKTLLGTKLEAKYLCSACRNVLRRPFQAQCGHRYCSFCLASILSSGPQNCAACVHEGIYEEGISILESSSAFPDNAARREVESLPAVCPSDGCTWKGTLKEYEVKMPACGMV

SEQ ID NO: 759260 - protein, 182 aa, Homo sapiens
RSVGRAATVGALFAGVTALMAAASVTPPGSLELLQPGFSKTLLGTKLEAKYLCSACRNVLRRPFQAQCGHRYCSFCLASILSSGPQNCAACVHEGIYEEGISILESSSATTSSGASRRSRGPSRRTWPKRTSFPPLSLITLEIFLQQETRAAELLFFSVNKRIKAGLILGEQYTCLQHLSKS

SEQ ID NO: 759261 - protein, 114 aa, Homo sapiens
LCAARVQAEDRQNGPGGTVEDEDGEDGPGGTVEDEDGEDGPGGVWRTGMGRMGLGTWWRTGTGRMGLGMWWRTRTGGGWAWGHVEDEDGEDGSGGTWWRTRMGRMGLGARGGED

SEQ ID NO: 759262 - protein, 519 aa, Homo sapiens
SSGRAATVGALFAGVTALMAAASVTPPGSLELLQPGFSKTLLGTKLEAKYLCSACRNVLRRPFQAQCGHRYCSFCLASILSSGPQNCAACVHEGIYEEGISILESSSAFPDNAARREVESLPAVCPSDGCTWKGTLKEYESCHEGRCPLMLTECPACKGLVRLGEKERHLEHECPERSLSCRHCRAPCCGADVKAHHEVCPKFPLTCDGCGKKKIPREKFQDHVKTCGKCRVPCRFHAIGCLETVEGEKQQEHEVQWLREHLAMLLSSVLEAKPLLGDQSHAGSELLQRCESLEKKTATFENIVCVLNREVERVAMTAEACSRQHRLDQDKIEALSSKVQQLERSIGLKDLAMADLEQKVLEMEASTYDGVFIWKISDFARKRQEAVAGRIPAIFSPAFYTSRYGYKMCLRIYLNGDGTGRGTHLSLFFVVMKGPNDALLRWPFNQKVTLMLLDQNNREHVIDAFRPDVTSSSFQRPVNDMNIASGCPLFCPVSKMEAKNSYVRDDAIFIKAIVDLTGL

SEQ ID NO: 759263 - protein, 556 aa, Homo sapiens
SSGRAATVGALFAGVTALMAAASVTPPGSLELLQPGFSKTLLGTKLEAKYLCSACRNVLRRPFQAQCGHRYCSFCLASILSSGPQNCAACVHEGIYEEGISILESSSAFPDNAARREVESLPAVCPSDGCTWKGTLKEYESCHEGRCPLMLTECPACKGLVRLGEKERHLEHECPERSLSCRHCRAPCCGADVKAHHEVCPKFPLTCDGCGKKKIPREKFQDHVKTCGKCRVPCRFHAIGCLETVEGEKQQEHEVQWLREHLAMLLSSVLEAKPLLGDQSHAGSELLQRCESLEKKTATFENIVCVLNREVERVAMTAEACSRQHRLDQDKIEALSSKVQQLERSIGLKDLAMADLEQKVLEMEASTYDGVFIWKISDFARKRQEAVAGRIPAIFSPAAGSADCICWELCTKRWVKGQHCGGPARRWSSWELHSAFYTSRYGYKMCLRIYLNGDGTGRGTHLSLFFVVMKGPNDALLRWPFNQKVTLMLLDQNNREHVIDAFRPDVTSSSFQRPVNDMNIASGCPLFCPVSKMEAKNSYVRDDAIFIKAIVDLTGL

SEQ ID NO: 759264 - protein, 519 aa, Homo sapiens; identical to SEQ ID NO: 759262

SEQ ID NO: 759265 - protein, 519 aa, Homo sapiens; identical to SEQ ID NO: 759262

SEQ ID NO: 759266 - protein, 501 aa, Homo sapiens
MAAASVTPPGSLELLQPGFSKTLLGTKLEAKYLCSACRNVLRRPFQAQCGHRYCSFCLASILSSGPQNCAACVHEGIYEEGISILESSSAFPDNAARREVESLPAVCPSDGCTWKGTLKEYESCHEGRCPLMLTECPACKGLVRLGEKERHLEHECPERSLSCRHCRAPCCGADVKAHHEVCPKFPLTCDGCGKKKIPREKFQDHVKTCGKCRVPCRFHAIGCLETVEGEKQQEHEVQWLREHLAMLLSSVLEAKPLLGDQSHAGSELLQRCESLEKKTATFENIVCVLNREVERVAMTAEACSRQHRLDQDKIEALSSKVQQLERSIGLKDLAMADLEQKVLEMEASTYDGVFIWKISDFARKRQEAVAGRIPAIFSPAFYTSRYGYKMCLRIYLNGDGTGRGTHLSLFFVVMKGPNDALLRWPFNQKVTLMLLDQNNREHVIDAFRPDVTSSSFQRPVNDMNIASGCPLFCPVSKMEAKNSYVRDDAIFIKAIVDLTGL

SEQ ID NO: 759267 - protein, 501 aa, Homo sapiens; identical to SEQ ID NO: 759266

SEQ ID NO: 759268 - protein, 501 aa, Homo sapiens; identical to SEQ ID NO: 759266

SEQ ID NO: 759269 - protein, 501 aa, Homo sapiens; identical to SEQ ID NO: 759266

SEQ ID NO: 759270 - protein, 508 aa, Homo sapiens
SSGRAATVGALFAGVTALMAAASVTPPGSLELLQPGFSKTLLGTKLEAKYLCSACRNVLRRPFQAQCGHRSGPQNCAACVHEGIYEEGISILESSSAFPDNAARREVESLPAVCPSDGCTWKGTLKEYESCHEGRCPLMLTECPACKGLVRLGEKERHLEHECPERSLSCRHCRAPCCGADVKAHHEVCPKFPLTCDGCGKKKIPREKFQDHVKTCGKCRVPCRFHAIGCLETVEGEKQQEHEVQWLREHLAMLLSSVLEAKPLLGDQSHAGSELLQRCESLEKKTATFENIVCVLNREVERVAMTAEACSRQHRLDQDKIEALSSKVQQLERSIGLKDLAMADLEQKVLEMEASTYDGVFIWKISDFARKRQEAVAGRIPAIFSPAFYTSRYGYKMCLRIYLNGDGTGRGTHLSLFFVVMKGPNDALLRWPFNQKVTLMLLDQNNREHVIDAFRPDVTSSSFQRPVNDMNIASGCPLFCPVSKMEAKNSYVRDDAIFIKAIVDLTGL

SEQ ID NO: 759271 - protein, 519 aa, Homo sapiens; identical to SEQ ID NO: 759262

SEQ ID NO: 759272 - protein, 501 aa, Homo sapiens
  misc_feature (8)..(8): Xaa can be any naturally occurring amino acid
  misc_feature (21)..(21): Xaa can be any naturally occurring amino acid
  misc_feature (28)..(28): Xaa can be any naturally occurring amino acid
  misc_feature (36)..(37): Xaa can be any naturally occurring amino acid
  misc_feature (42)..(42): Xaa can be any naturally occurring amino acid
  misc_feature (46)..(46): Xaa can be any naturally occurring amino acid
  misc_feature (48)..(48): Xaa can be any naturally occurring amino acid
  misc_feature (55)..(56): Xaa can be any naturally occurring amino acid
  misc_feature (58)..(58): Xaa can be any naturally occurring amino acid
  misc_feature (64)..(66): Xaa can be any naturally occurring amino acid
  misc_feature (69)..(69): Xaa can be any naturally occurring amino acid
  misc_feature (74)..(74): Xaa can be any naturally occurring amino acid
  misc_feature (76)..(76): Xaa can be any naturally occurring amino acid
  misc_feature (80)..(80): Xaa can be any naturally occurring amino acid
  misc_feature (87)..(87): Xaa can be any naturally occurring amino acid
  misc_feature (96)..(96): Xaa can be any naturally occurring amino acid
  misc_feature (103)..(103): Xaa can be any naturally occurring amino acid
  misc_feature (115)..(115): Xaa can be any naturally occurring amino acid
  misc_feature (122)..(122): Xaa can be any naturally occurring amino acid
  misc_feature (129)..(129): Xaa can be any naturally occurring amino acid
  misc_feature (132)..(132): Xaa can be any naturally occurring amino acid
  misc_feature (139)..(139): Xaa can be any naturally occurring amino acid
  misc_feature (141)..(141): Xaa can be any naturally occurring amino acid
LAARLPLXPPGSLVLLLLGFXLLLLGVXAGLLRSCXXLVVLXSAVXFXVVWPLVXXFXLGLFLXXXAFXLCCLXFXGFFXCWFFFFXLLFGFFCFXVFVVVVXLLVVCSVMVVSXGVLFFFXFCFVGCXLFXLFVCFVXYXCVCFGVLVRHLEHECPERSLSCRHCRAPCCGADVKAHHEVCPKFPLTCDGCGKKKIPREKFQDHVKTCGKCRVPCRFHAIGCLETVEGEKQQEHEVQWLREHLAMLLSSVLEAKPLLGDQSHAGSELLQRCESLEKKTATFENIVCVLNREVERVAMTAEACSRQHRLDQDKIEALSSKVQQLERSIGLKDLAMADLEQKVLEMEASTYDGVFIWKISDFARKRQEAVAGRIPAIFSPAFYTSRYGYKMCLRIYLNGDGTGRGTHLSLFFVVMKGPNDALLRWPFNQKVTLMLLDQNNREHVIDAFRPDVTSSSFQRPVNDMNIASGCPLFCPVSKMEAKNSYVRDDAIFIKAIVDLTGL

SEQ ID NO: 759273 - protein, 536 aa, Homo sapiens
SSGRAATVGALFAGVTALMAAASVTPPGSLELLQPGFSKTLLGTKLEAKYLCSACRNVLRRPFQAQCGHRYCSFCLASILSSGPQNCAACVHEGIYEEGISILESSSAFPDNAARREVESLPAVCPSDGCTWKGTLKEYESCHEGRCPLMLTECPACKGLVRLGEKERHLEHECPERSLSCRHCRAPCCGADVKAHHEVCPKFPLTCDGCGKKKIPREKFQDHVKTCGKCRVPCRFHAIGCLETVEGEKQQEHEVQWLREHLAMLLSSVLEAKPLLGDQSHAGSELLQRCESLEKKTATFENIVCVLNREVERVAMTAEACSRQHRLDQDKIEALSSKVQQLERSIGLKDLAMADLEQKVLEMEASTYDGVFIWKISDFARKRQEAVAGRIPAIFSPAFYTSRYGYKMCLRIYLNGDGTGRGTHLSLFFVVMKGPNDALLRWPFNQKVTLMLLDQNNREHVIDAFRPDVTSSSFQRPVNDMNIASGCPLFCPVSKMEAKNSYVRDDAMPGWLWERVWSHAASAQTTVWEVHSTACG

SEQ ID NO: 759274 - protein, 144 aa, Homo sapiens
RGCGRLPSIPENRNLTELVVAVTDENIVGLFAALLAERRVLLTASKLSTLTSCVHASCALLYPLLRWPFNQKVTLMLLDQNNREHVIDAFRPDVTSSSFQRPVNDMNIASGCPLFCPVSKMEAKNSYVRDDAIFIKAIVDLTGL

SEQ ID NO: 759275 - protein, 266 aa, Homo sapiens
SSGRAATVGALFAGVTALMAAASVTPPGSLELLQPGFSKTLLGTKLEAKYLCSACRNVLRRPFQAQCGHRYCSFCLASILSSGPQNCAACVHEGIYEEGISILESSSAFPDNAARREVESLPAVCPSDGCTWKGTLKEYESCHEGRCPLMLTECPACKGLVRLGEKERHLEHECPERSLSCRHCRAPCCGADVKAHHEVCPKFPLTCDGCGKKKIPREKFQDHVKTCGKCRVPCRFHAIGCLETGFAVSARQGCSGMISAHCSVNL

SEQ ID NO: 759276 - protein, 249 aa, Homo sapiens
SSGRAATVGALFAGVTALMAAASVTPPGSLELLQPGFSKTLLGTKLEAKYLCSACRNVLRRPFQAQCGHRYCSFCLASILSSGPQNCAACVHEGIYEEGISILESSSAFPDNAARREVESLPAVCPSDGCTWKGTLKEYESCHEGRCPLMLTECPACKGLVRLGEKERHLEHECPERSLSCRHCRAPCCGADVKAHHEVCPKFPLTCDGCGKKKIPREKFQDHVKTCGKCRVPCRFHAIGCLETVSRGV

SEQ ID NO: 759277 - protein, 253 aa, Homo sapiens
SSGRAATVGALFAGVTALMAAASVTPPGSLELLQPGFSKTLLGTKLEAKYLCSACRNVLRRPFQAQCGHRYCSFCLASILSSGPQNCAACVHEGIYEEGISILESSSAFPDNAARREVESLPAVCPSDGCTWKGTLKEYESCHEGRCPLMLTECPACKGLVRLGEKERHLEHECPERSLSCRHCRAPCCGADVKAHHEVCPKFPLTCDGCGKKKIPREKVSVLHLLGGPQGGAHVLDVRVPWVGVGQVMTLVP

SEQ ID NO: 759278 - protein, 82 aa, Homo sapiens
AGVTALMAAASVTPPGSLELLQPGFSKTLLGTKLEAKYLCSACRNVLRRPFQAQCGHRYCSFCLASILRCMGPAGWEEGQAG

SEQ ID NO: 759279 - protein, 288 aa, Homo sapiens
MGHTRRQGTSPSKCPYLNFFQLLVLAGLSHFCSGVIHVTKEVKEVATLSCGHNVSVEELAQTRIYWQKEKKMVLTMMSGDMNIWPEYKNRTIFDITNNLSIVILALRPSDEGTYECVVLKYEKDAFKREHLAEVTLSVKADFPTPSISDFEIPTSNIRRIICSTSGGFPEPHLSWLENGEELNAINTTVSQDPETELYAVSSKLDFNMTTNHSFMCLIKYGHLRVNQTFNWNTTKQEHFPDNLLPSWAITLISVNGIFVICCLTYCFAPRCRERRRNERLRRESVRPV

SEQ ID NO: 759280 - protein, 288 aa, Homo sapiens; identical to SEQ ID NO: 759279

SEQ ID NO: 759281 - protein, 115 aa, Homo sapiens
SISRLPRTRPRQLGSEQDSEVFPSDQGVKKNCMQIESAKLLPDTPVQFIPPNTLNLRSFTKIIKRLAELHPEVSRDHIINALQEVRIRHKGFLNGLSITTIVEMTSSLLKNSASS

SEQ ID NO: 759282 - protein, 115 aa, Homo sapiens; identical to SEQ ID NO: 759281

SEQ ID NO: 759283 - protein, 148 aa, Homo sapiens
AAAPPRFPPPAAWPGGRGAAASLRASGCSGERRPGSLGPPAPGVLREWGLRPRGQTPVRPGPAWSPGARMKVTVCFGRTGIVVPCKEGQLRVGELTQQALQRYLKTREKVSAARRSGARLQPRHLPGSWLLGEDSSLRIYRWRNPGSR

SEQ ID NO: 759284 - protein, 110 aa, Homo sapiens
AAAPPRFPPPAAWPGGRGAAASLRASGCSGERRPGSLGPPAPGVLREWGLRPRGQTPVRPGPAWSPGARMKVTVCFGRTGIVVPCKEGQLRVGELTQQALQRYLKTREKA

SEQ ID NO: 759285 - protein, 256 aa, Homo sapiens
AAAPPRFPPPAAWPGGRGAAASLRASGCSGERRPGSLGPPAPGVLREWGLRPRGQTPVRPGPAWSPGARMKVTVCFGRTGIVVPCKEGQLRVGELTQQALQRYLKTREKGPGYWVKIHHLEYTDGGILDPDDVLADVVEDKDKLIAVFEEQEPLHKIESPSGNPADRQSPDAFETEVAAQLAAFKPIGGEIEVTPSALKLGTPLLVRRSSDPVPGPPADTQPSASHPGGQSLKLVVPVGILLLVVLMKDQSAVPIG

SEQ ID NO: 759286 - protein, 372 aa, Homo sapiens
MLDGIKMEEHALRPGPATLGVLLGSDCPHPAVCEGCQRPISDRFLMRVNESSWHEECLQCAACQQALTTSCYFRDRKLYCKQDYQQLFAAKCSGCMEKIAPTEFVMRALECVYHLGCFCCCVCERQLRKGDEFVLKEGQLLCKGDYEKEKDLLSSVSPDESDSVKSEDEDGDMKPAKGQGSQSKGSGDDGKDPRRPKRPRTILTTQQRRAFKASFEVSSKPCRKVRETLAAETGLSVRVVQVWFQNQRAKMKKLARRHQQQQEQQNSQRLGQEVLSSRMEGMMASYTPLAPPQQQIVAMEQSPYGSSDPFQQGLTPPQMPGNDSIFHDIDSDTSLTSLSDCFLGSSDVGSLQARVGNPIDRLYSMQSSYFAS

SEQ ID NO: 759287 - protein, 378 aa, Homo sapiens
MDLGKPMKSVLVVALLVIFQVCLCQDEVTDDYIGDNTTVDYTLFESLCSKKDVRNFKAWFLPIMYSIICFVGLLGNGLVVLTYIYFKRLKTMTDTYLLNLAVADILFLLTLPFWAYSAAKSWVFGVHFCKLIFAIYKMSFFSGMLLLLCISIDRYVAIVQAVSAHRHRARVLLISKLSCVGIWILATVLSIPELLYSDLQRSSSEQAMRCSLITEHVEAFITIQVAQMVIGFLVPLLAMSFCYLVIIRTLLQARNFERNKAIKVIIAVVVVFIVFQLPYNGVVLAQTVANFNITSSTCELSKQLNIAYDVTYSLACVRCCVNPFLYAFIGVKFRNDLFKLFKDLGCLSQEQLRQWSSCRHIRRSSMSVEAETTTTFSP

SEQ ID NO: 759288 - protein, 383 aa, Homo sapiens
RDRGSARPGTAFLCGFTAQRASWTWVCLCQDEVTDDYIGDNTTVDYTLFESLCSKKDVRNFKAWFLPIMYSIICFVGLLGNGLVVLTYIYFKRLKTMTDTYLLNLAVADILFLLTLPFWAYSAAKSWVFGVHFCKLIFAIYKMSFFSGMLLLLCISIDRYVAIVQAVSAHRHRARVLLISKLSCVGIWILATVLSIPELLYSDLQRSSSEQAMRCSLITEHVEAFITIQVAQMVIGFLVPLLAMSFCYLVIIRTLLQARNFERNKAIKVIIAVVVVFIVFQLPYNGVVLAQTVANFNITSSTCELSKQLNIAYDVTYSLACVRCCVNPFLYAFIGVKFRNDLFKLFKDLGCLSQEQLRQWSSCRHIRRSSMSVEAETTTTFSP

SEQ ID NO: 759289 - protein, 837 aa, Homo sapiens
AGLSPPPLLPDPAMRGLGLWLLGAMMLPAIAPSRPWALMEQYEVVLPRRLPGPRVRRALPSHLGLHPERVSYVLGATGHNFTLHLRKNRDLLGSGYTETYTAANGSEVTEQPRGQDHCFYQGHVEGYPDSAASLSTCAGLRGFFQVGSDLHLIEPLDEGGEGGRHAVYQAEHLLQTAGTCGVSDDSLGSLLGPRTAAVFRPRPGDSLPSRETRYVELYVVVDNAEFQMLGSEAAVRHRVLEVVNHVDKLYQKLNFRVVLVGLEIWNSQDRFHVSPDPSVTLENLLTWQARQRTRRHLHDNVQLITGVDFTGTTVGFARVSAMCSHSSGAVNQDHSKNPVGVACTMAHEMGHNLGMDHDENVQGCRCQERFEAGRCIMAGSIGSSFPRMFSDCSQAYLESFLERPQSVCLANAPDLSHLVGGPVCGNLFVERGEQCDCGPPEDCRNRCCNSTTCQLAEGAQCAHGTCCQECKVKPAGELCRPKKDMCDLEEFCDGRHPECPEDAFQENGTPCSGGYCYNGACPTLAQQCQAFWGPGGQAAEESCFSYDILPGCKASRYRADMCGVLQCKGGQQPLGRAICIVDVCHALTTEDGTAYEPVPEGTRCGPEKVCWKGRCQDLHVYRSSNCSAQCHNHGVCNHKQECHCHAGWAPPHCAKLLTEVHAASGSLPVLVVVVLVLLAVVLVTLAGIIVYRKARSRILSRNVAPKTTMGRSNPLFHQAASRVPAKGGAPAPSRGPQELVPTTHPGQPARHPASSVALKRPPPAPPVTVSSPPFPVPVYTRQAPKQVIKPTFAPPVPPVKPGAGAANPGPAEGAVGPKVALKPPIQRKQGAGAPTAP

SEQ ID NO: 759290 - protein, 811 aa, Homo sapiens
AGLSPPPLLPDPAMRGLGLWLLGAMMLPAIAPSRPWALMEQYEVVLPRRLPGPRVRRALPSHLGLHPERVSYVLGATGHNFTLHLRKNRDLLGSGYTETYTAANGSEVTEQPRGQDHCFYQGHVEGYPDSAASLSTCAGLRGFFQVGSDLHLIEPLDEGGEGGRHAVYQAEHLLQTAGTCGVSDDSLGSLLGPRTAAVFRPRPGDSLPSRETRYVELYVVVDNAEFQMLGSEAAVRHRVLEVVNHVDKLYQKLNFRVVLVGLEIWNSQDRFHVSPDPSVTLENLLTWQARQRTRRHLHDNVQLITGVDFTGTTVGFARVSAMCSHSSGAVNQDHSKNPVGVACTMAHEMGHNLGMDHDENVQGCRCQERFEAGRCIMAGSIGSSFPRMFSDCSQAYLESFLERPQSVCLANAPDLSHLVGGPVCGNLFVERGEQCDCGPPEDCRNRCCNSTTCQLAEGAQCAHGTCCQECKVKPAGELCRPKKDMCDLEEFCDGRHPECPEDAFQENGTPCSGGYCYNGACPTLAQQCQAFWGPGGQAAEESCFSYDILPGCKASRYRADMCGVLQCKGGQQPLGRAICIVDVCHALTTEDGTAYEPVPEGTRCGPEKVCWKGRCQDLHVYRSSNCSAQCHNHGVCNHKQECHCHAGWAPPHCAKLLTEVHAASGSLPVLVVVVLVLLAVVLVTLAGIIVYRKARSRILSRNVAPKTTMGRSNPLFHQAASRVPAKGGAPAPSRGPQELVPTTHPGQPARHPASSVALKRPPPAPPVTVSSPPFPVPVYTRQAPKQGAVGPKVALKPPIQRKQGAGAPTAP

SEQ ID NO: 759291 - protein, 943 aa, Homo sapiens
AGLSPPPLLPDPAMRGLGLWLLGAMMLPAIAPSRPWALMEQYEVVLPRRLPGPRVRRALPSHLGLHPERVSYVLGATGHNFTLHLRKNRDLLGSGYTETYTAANGSEVTEQPRGQDHCFYQGHVEGYPDSAASLSTCAGLRWVWRTNARAPAGGEEGLSLWWGWGREAGRVPPPPTQAFAVLHGGLLRGRQAQEAHPPVPWGLKSPAGGCWWQGRGSCRQQTGASGPSGQDQATLKPTAHPAPTPLRGFFQVGSDLHLIEPLDEGGEGGRHAVYQAEHLLQTAGTCGVSDDSLGSLLGPRTAAVFRPRPGDSLPSRETRYVELYVVVDNAEFQMLGSEAAVRHRVLEVVNHVDKLYQKLNFRVVLVGLEIWNSQDRFHVSPDPSVTLENLLTWQARQRTRRHLHDNVQLITGVDFTGTTVGFARVSAMCSHSSGAVNQDHSKNPVGVACTMAHEMGHNLGMDHDENVQGCRCQERFEAGRCIMAGSIGSSFPRMFSDCSQAYLESFLERPQSVCLANAPDLSHLVGGPVCGNLFVERGEQCDCGPPEDCRNRCCNSTTCQLAEGAQCAHGTCCQECKVKPAGELCRPKKDMCDLEEFCDGRHPECPEDAFQENGTPCSGGYCYNGACPTLAQQCQAFWGPGGQAAEESCFSYDILPGCKASRYRADMCGVLQCKGGQQPLGRAICIVDVCHALTTEDGTAYEPVPEGTRCGPEKVCWKGRCQDLHVYRSSNCSAQCHNHGVCNHKQECHCHAGWAPPHCAKLLTEVHAASGSLPVLVVVVLVLLAVVLVTLAGIIVYRKARSRILSRNVAPKTTMGRSNPLFHQAASRVPAKGGAPAPSRGPQELVPTTHPGQPARHPASSVALKRPPPAPPVTVSSPPFPVPVYTRQAPKQVIKPTFAPPVPPVKPGAGAANPGPAEGAVGPKVALKPPIQRKQGAGAPTAP

SEQ ID NO: 759292 - protein, 870 aa, Homo sapiens
AGLSPPPLLPDPAMRGLGLWLLGAMMLPAIAPSRPWALMEQYEVVLPRRLPGPRVRRALPSHLGLHPERVSYVLGATGHNFTLHLRKNRDLLGSGYTETYTAANGSEVTEQPRGQDHCFYQGHVEGYPDSAASLSTCAGLRGFFQVGSDLHLIEPLDEGGEGGRHAVYQAEHLLQTAGTCGVSDDSLGSLLGPRTAAVFRPRPGDSLPSRETRYVELYVVVDNAEFQMLGSEAAVRHRVLEVVNHVDKLYQKLNFRVVLVGLEIWNSQDRFHVSPDPSVTLENLLTWQARQRTRRHLHDNVQLITGVDFTGTTVGFARVSAMCSHSSGAVNQDHSKNPVGVACTMAHEMGHNLGMDHDENVQGCRCQERFEAGRCIMAGSIGEAARPCRARVCWRYEVGGEGARPPPPMLPRLPSSSFPRMFSDCSQAYLESFLERPQSVCLANAPDLSHLVGGPVCGNLFVERGEQCDCGPPEDCRNRCCNSTTCQLAEGAQCAHGTCCQECKVKPAGELCRPKKDMCDLEEFCDGRHPECPEDAFQENGTPCSGGYCYNGACPTLAQQCQAFWGPGGQAAEESCFSYDILPGCKASRYRADMCGVLQCKGGQQPLGRAICIVDVCHALTTEDGTAYEPVPEGTRCGPEKVCWKGRCQDLHVYRSSNCSAQCHNHGVCNHKQECHCHAGWAPPHCAKLLTEVHAASGSLPVLVVVVLVLLAVVLVTLAGIIVYRKARSRILSRNVAPKTTMGRSNPLFHQAASRVPAKGGAPAPSRGPQELVPTTHPGQPARHPASSVALKRPPPAPPVTVSSPPFPVPVYTRQAPKQVIKPTFAPPVPPVKPGAGAANPGPAEGAVGPKVALKPPIQRKQGAGAPTAP

SEQ ID NO: 759293 - protein, 375 aa, Homo sapiens
AGLSPPPLLPDPAMRGLGLWLLGAMMLPAIAPSRPWALMEQYEVVLPRRLPGPRVRRALPSHLGLHPERVSYVLGATGHNFTLHLRKNRDLLGSGYTETYTAANGSEVTEQPRGQDHCFYQGHVEGYPDSAASLSTCAGLRWVWRTNARAPAGGEEGLSLWWGWGREAGRVPPPPTQAFAVLHGGLLRGRQAQEAHPPVPWGLKSPAGGCWWQGRGSCRQQTGASGPSGQDQATLKPTAHPAPTPLRGFFQVGSDLHLIEPLDEGGEGGRHAVYQAEHLLQTAGTCGVSDDSLGSLLGPRTAAVFRPRPGDSLPSRETRYVELYVVVDNAEFQMLGSEAAVRHRVLEVVNHVDKVGSGPGCRGARAPGGRWGGVL

SEQ ID NO: 759294 - protein, 83 aa, Homo sapiens
ARSVGSFVPGPEKVMSRLEPGLPGGPMSAVSVSSQVIKPTFAPPVPPVKPGAGAANPGPAEVRPQHTPGRVHCAMDGTASPRG

SEQ ID NO: 759295 - protein, 902 aa, Homo sapiens
AGLSPPPLLPDPAMRGLGLWLLGAMMLPAIAPSRPWALMEQYEVVLPRRLPGPRVRRALPSHLGGQFRPQPCPYLSIRGTYYRPARCPGLIQPVAQLRLSQSSAGRAPACTWGLEMQWSSRRLCRHHQGLHPERVSYVLGATGHNFTLHLRKNRDLLGSGYTETYTAANGSEVTEQPRGQDHCFYQGHVEGYPDSAASLSTCAGLRGFFQVGSDLHLIEPLDEGGEGGRHAVYQAEHLLQTAGTCGVSDDSLGSLLGPRTAAVFRPRPGDSLPSRETRYVELYVVVDNAEFQMLGSEAAVRHRVLEVVNHVDKLYQKLNFRVVLVGLEIWNSQDRFHVSPDPSVTLENLLTWQARQRTRRHLHDNVQLITGVDFTGTTVGFARVSAMCSHSSGAVNQDHSKNPVGVACTMAHEMGHNLGMDHDENVQGCRCQERFEAGRCIMAGSIGSSFPRMFSDCSQAYLESFLERPQSVCLANAPDLSHLVGGPVCGNLFVERGEQCDCGPPEDCRNRCCNSTTCQLAEGAQCAHGTCCQECKVKPAGELCRPKKDMCDLEEFCDGRHPECPEDAFQENGTPCSGGYCYNGACPTLAQQCQAFWGPGGQAAEESCFSYDILPGCKASRYRADMCGVLQCKGGQQPLGRAICIVDVCHALTTEDGTAYEPVPEGTRCGPEKVCWKGRCQDLHVYRSSNCSAQCHNHGVCNHKQECHCHAGWAPPHCAKLLTEVHAASGSLPVLVVVVLVLLAVVLVTLAGIIVYRKARSRILSRNVAPKTTMGRSNPLFHQAASRVPAKGGAPAPSRGPQELVPTTHPGQPARHPASSVALKRPPPAPPVTVSSPPFPVPVYTRQAPKQVIKPTFAPPVPPVKPGAGAANPGPAEGAVGPKVALKPPIQRKQGAGAPTAP

SEQ ID NO: 759296 - protein, 941 aa, Homo sapiens
AGLSPPPLLPDPAMRGLGLWLLGAMMLPAIAPSRPWALMEQYEVVLPRRLPGPRVRRALPSHLGLHPERVSYVLGATGHNFTLHLRKNRDLLGSGYTETYTAANGSEVTEQPRGQDHCFYQGHVEGYPDSAASLSTCAGLRGFFQVGSDLHLIEPLDEGGEGGRHAVYQAEHLLQTAGTCGVSDDSLGSLLGPRTAAVFRPRPGDSLPSRETRYVELYVVVDNAEFQMLGSEAAVRHRVLEVVNHVDKLYQKLNFRVVLVGLEIWNSQDRFHVSPDPSVTLENLLTWQARQRTRRHLHDNVQLITGVDFTGTTVGFARVSAMCSHSSGAVNQDHSKNPVGVACTMAHEMGHNLGMDHDENVQGCRCQERFEAGRCIMAGSIGSSFPRMFSDCSQAYLESFLERPQSVCLANAPDLSHLVGGPVCGNLFVERGEQCDCGPPEVLHAPYLLPSALGATTSVPSGQGDHCTSTRGTWGSVGVQSGHREGVAAGHPSGQGRRPGPPWSPARPQCSLPRPLPSPQDCRNRCCNSTTCQLAEGAQCAHGTCCQECKVKPAGELCRPKKDMCDLEEFCDGRHPECPEDAFQENGTPCSGGYCYNGACPTLAQQCQAFWGPGEVGTELAWQGGCRPCQGYPAPGPTGGQAAEESCFSYDILPGCKASRYRADMCGVLQCKGGQQPLGRAICIVDVCHALTTEDGTAYEPVPEGTRCGPEKVCWKGRCQDLHVYRSSNCSAQCHNHGVCNHKQECHCHAGWAPPHCAKLLTEVHAASGSLPVLVVVVLVLLAVVLVTLAGIIVYRKARSRILSRNVAPKTTMGRSNPLFHQAASRVPAKGGAPAPSRGPQELVPTTHPGQPARHPASSVALKRPPPAPPVTVSSPPFPVPVYTRQAPKQVIKPTFAPPVPPVKPGAGAANPGPAEGAVGPKVALKPPIQRKQGAGAPTAP

SEQ ID NO: 759297 - protein, 527 aa, Homo sapiens
SKKQNTNNRTRTHTLVLSLGYRDHSKNPVGVACTMAHEMGHNLGMDHDENVQGCRCQERFEAGRCIMAGSIGSSFPRMFSDCSQAYLESFLERPQSVCLANAPDLSHLVGGPVCGNLFVERGEQCDCGPPEDCRNRCCNSTTCQLAEGAQCAHGTCCQECKVKPAGELCRPKKDMCDLEEFCDGRHPECPEDAFQENGTPCSGGYCYNGACPTLAQQCQAFWGPGGQAAEESCFSYDILPGCKASRYRADMCGVLQCKGGQQPLGRAICIVDVCHALTTEDGTAYEPVPEGTRCGPEKVCWKGRCQDLHVYRSSNCSAQCHNHGVCNHKQECHCHAGWAPPHCAKLLTEVHAASGSLPVLVVVVLVLLAVVLVTLAGIIVYRKARSRILSRNVAPKTTMGRSNPLFHQAASRVPAKGGAPAPSRGPQELVPTTHPGQPARHPASSVALKRPPPAPPVTVSSPPFPVPVYTRQAPKQVIKPTFAPPVPPVKPGAGAANPGPAEGAVGPKVALKPPIQRKQGAGAPTAP

SEQ ID NO: 759298 - protein, 283 aa, Homo sapiens
LQSSEPPTAAAMLCLLLTLGVALVCGVPAMDIPQTKQDLELPKLAGTWHSMAMATNNISLMATLKAPLRVHITSLLPTPEDNLEIVLHRWENNSCVEKKVLGEKTENPKKFKINYTVANEATLLDTDYDNFLFLCLQDTTTPIQSMMCQYLARVLVEDDEIMQGFIRAFRPLPRHLWYLLDLKQMEEPCRFYGELLPGPASWVTCKPNSSPPPPGRPDSHPSTPPEQWDFLLPFQRITTAQKTMTWSSVSPSPSCCTPAPRPWGGCSLGAESLAEVINKPLEH

SEQ ID NO: 759299 - protein, 136 aa, Homo sapiens
MAARKSHIQLKKGGETPLNACILSSGSSALVRCSGARRSSLLFPPPCSELLAAGPDAASHEQRIDLGAWWVISAQTKHENPKSSGTGHRPATAAHACPGDSRQCRGKGEIIHSAIHSLTQAIIHSFIQQILTESSL

SEQ ID NO: 759300 - protein, 122 aa, Homo sapiens
MVPPSSVFIRTWFQAEISTQRLFSFNSNPASNFGTLGNIFTHLSFPFREQEIIYIVELFGAGTGNHAHQRFNIRFNIIQMLPSFSCSHHMTDIPAPILPSTMIVSFLKPSPEAKEIIGAMLI

SEQ ID NO: 759301 - protein, 107 aa, Homo sapiens
PRYLQLLPDTFLTGPPSPSHLGSYRSPAGSRPPMCASASASLEQAYCGGGRGQAAGIRKLSLALVEREQQGSSGHSETHMSTSAVALGGGDKGAVENGSNLVYFKTH

SEQ ID NO: 759302 - protein, 192 aa, Homo sapiens
QSSSHQHDHVNPKAFFSVLRIYLSGWKGNPQLSDGLVYEGFWEDPKEFAGGSAGQSSVFQCFDVLLGIQQTAGGGHAAQFLQDMRRYMPPAHRNFLCSLESNPSVREFVLSKGDAGLREAYDACVKALVSLRSYHLQIVTKYILIPASQQPKENKTSEDPSKLEAKGTGGTDLMNFLKTVRSTTEKSLLKEG

SEQ ID NO: 759303 - protein, 418 aa, Homo sapiens
MAHAMENSWTISKEYHIDEEVGFALPNPQENLPDFYNDWMFIAKHLPDLIESGQLRERVEKLNMLSIDHLTDHKSQRLARLVLGCITMAYVWGKGHGDVRKVLPRNIAVPYCQLSKKLELPPILVYADCVLANWKKKDPNKPLTYESIASWLLFIRPLTYENMDVLFSFRDGDCSKGFFLVSLLVEIAAASAIKVIPTVFKAMQMQERDTLLKALLEIASCLEKALQVFHQIHDHVNPKAFFSVLRIYLSGWKGNPQLSDGLVYEGFWEDPKEFAGGSAGQSSVFQCFDVLLGIQQTAGGGHAAQFLQDMRRYMPPAHRNFLCSLESNPSVREFVLSKGDAGLREAYDACVKALVSLRSYHLQIVTKYILIPASQQPKENKTSEDPSKLEAKGTGGTDLMNFLKTVRSTTEKSLLKEG

SEQ ID NO: 759304 - protein, 201 aa, Homo sapiens
MAHAMENSWTISKEYHIDEEVGFALPNPQENLPDFYNDWMFIAKHLPDLIESGQLRERVEKLNMLSIDHLTDHKSQRLARLVLGCITMAYVWGKGHGDVRKVLPRNIAVPYCQLSKKLELPPILVYADCVLANWKKKDPNKPLTYENMDVLFSFRDGDCSKGFFLVSLLVEIAAASAIKVRLSSLQNLYVNLRKQSNHFGA

SEQ ID NO: 759305 - protein, 403 aa, Homo sapiens [sequence omitted]

SEQ ID NO: 759306 - protein, 154 aa, Homo sapiens
MAHAMENSWTISKEYHIDEEVGFALPNPQENLPDFYNDWMFIAKHLPDLIESGQLRERVEKLNMLSIDHLTDHKSQRLARLVLGCITMAYVWGKGHGDVRKVLPRNIAVPYCQLSKKLELPPILVYADCVLANWKKKDPNKPLTYESIASWLLS

SEQ ID NO: 759307 - protein, 136 aa, Homo sapiens
MMCLMITNFIWNTNFQFVHMMHRDAFVVLLVFILQTKKLENETIPKVEVISHCPCDKLWSLAVAATIIRCSENSSDTEGHQRSRLQEWHTLWKTPGQSVKSTILMKKWALLCQIHRKIYLIFIMTGCSLLNICLIS

SEQ ID NO: 759308 - protein, 170 aa, Homo sapiens
DCELNWHQASEGLTDYSFYRVWGNNTETLVSKGKEATLTKPMVGPEDAGSYRCELGSVNSSPATIINFHVTVLPKMIKEEKPSPNIVTPGEATTESSISLQPLQPEKMLASRLLGLLICGSLALITGLTFAIFRRRKVIDFIKSSLFGLGSGVAEQTQVPKEKATDSRQQ

SEQ ID NO: 759309 - protein, 71 aa, Homo sapiens
MEGSRFHSKSSGEPLKAYGKGVGCHLFPVAAMEEVGTRKGETSGKAAVEAPGDAGVTSATAAAGGMENQGL

SEQ ID NO: 759310 - protein, 127 aa, Homo sapiens
MCSAYPPTVTSVVEPLTSQGSIWEGEKSTHSIWGCCSSHISLPGGMWGCLPPCPPSADVPPLRLSRCHLTQAAVQRQAGKPKPHSQGGPQPPESRFSRGYDLRRLRGKTGGKEKSYNCQEWGTFPCP

SEQ ID NO: 759311 - protein, 479 aa, Homo sapiens
VPGGPMPRCPAGAMDEGPVDLRTRPKAAGLPGAALPLRKRPLRAPSPEPAAPRGAAGLVVPLDPLRGGCDLPAVPGPPHGLARPEALYYPGALLPLYPTRAMGSPFPLVNLPTPLYPMMCPMEHPLSADIAMATRADEDGDTPLHIAVVQGNLPAVHRLVNLFQQGGRELDIYNNLRQTPLHLAVITTLPSVVRLLVTAGASPMALDRHGQTAAHLACEHRSPTCLRALLDSAAPGTLDLEARNYDGLTALHVAVNTECQETVQLLLERGADIDAVDIKSGRSPLIHAVENNSLSMVQLLLQHGANVNAQMYSGSSALHSASGRGLLPLVRTLVRSGADSSLKNCHNDTPLMVARSRRVSRGSCGHAPCTRVSAGWLQVIDILRGKATRPASTSQPDPSPDRSANTSPESSSRLSSNGLLSASPSSSPSQSPPRDPPGFPMAPPNFFLPSPSPPAFLPFAGVLRGPGRPVPPSPAPGGS

SEQ ID NO: 759312 - protein, 401 aa, Homo sapiens
VPGGPMPRCPAGAMDEGPVDLRTRPKAAGLPGAALPLRKRPLRAPSPEPAAPRGAAGLVVPLDPLRGGCDLPAVPGPPHGLARPEALYYPGALLPLYPTRAMGSPFPLVNLPTPLYPMMCPMEHPLSADIAMATRADEDGDTPLHIAVVQGNLPAVHRLVNLFQQGGRELDIYNNLRQTPLHLAVITTLPSVVRLLVTAGASPMALDRHGQTAAHLACEHRSPTCLRALLDSAAPGTLDLEARNYDGLTALHVAVNTECQETVQLLLERGADIDAVDIKSGRSPLIHAVENNSLSMVQLLLQHGANVNAQMYSGSSALHSASGRGLLPLVRTLVRSGADSSLKNCHNDTPLMVARSRRVSRGSCGHAPCTRVSAGWLQASVPERRGVRVSVPLRGGEWVSL

SEQ ID NO: 759313 - protein, 459 aa, Homo sapiens
VPGGPMPRCPAGAMDEGPVDLRTRPKAAGLPGAALPLRKRPLRAPSPEPAAPRGAAGLVVPLDPLRGGCDLPAVPGPPHGLARPEALYYPGALLPLYPTRAMGSPFPLVNLPTPLYPMMCPMEHPLSADIAMATRADEDGDTPLHIAVVQGNLPAVHRLVNLFQQGGRELDIYNNLRQTPLHLAVITTLPSVVRLLVTAGASPMALDRHGQTAAHLACEHRSPTCLRALLDSAAPGTLDLEARNYDGLTALHVAVNTECQETVQLLLERGADIDAVDIKSGRSPLIHAVENNSLSMVQLLLQHGANVNAQMYSGSSALHSASGRGLLPLVRTLVRSGADSSLKNCHNDTPLMVARSRRVIDILRGKATRPASTSQPDPSPDRSANTSPESSSRLSSNGLLSASPSSSPSQSPPRDPPGFPMAPPNFFLPSPSPPAFLPFAGVLRGPGRPVPPSPAPGGS

SEQ ID NO: 759314 - protein, 249 aa, Homo sapiens
MGTPRIQHLLILLVLGASLLTSGLELYCQKGLSMTVEADPANMFNWTTEEVETCDKGALCQETILIIKAGTETAILATKGCIPEGEEAITIVQHSSPPGLIVTSYSNYCEDSFCNDKDSLSQFWEFSETTASTVSTTLHCPTCVALGTCFSAPSLPCPNGTTRCYQGKLEITGGGIESSVEVKGCTAMIGCRLMSGILAVGPMFVREACPHQLLTQPRKTENGATCLPIPVWGLQLLLPLLLPSFIHFS

SEQ ID NO: 759315 - protein, 249 aa, Homo sapiens; identical to SEQ ID NO: 759314

SEQ ID NO: 759316 - protein, 287 aa, Homo sapiens
AGRRKRMPSPGRRRSGPQLWRREILIQTSSSQTSPEEAMGTPRIQHLLILLVLGASLLTSGLELYCQKGLSMTVEADPANMFNWTTEEVETCDKGALCQETILIIKAGTETAILATKGCIPEGEEAITIVQHSSPPGLIVTSYSNYCEDSFCNDKDSLSQFWEFSETTASTVSTTLHCPTCVALGTCFSAPSLPCPNGTTRCYQGKLEITGGGIESSVEVKGCTAMIGCRLMSGILAVGPMFVREACPHQLLTQPRKTENGATCLPIPVWGLQLLLPLLLPSFIHFS

SEQ ID NO: 759317 - protein, 279 aa, Homo sapiens
MTKNEKKSLNQSLAEWKLFIYNPTTGEFLGRTAKSWGLILLFYLVFYGFLAALFSFTMWVMLQTLNDEVPKYRDQIPSPGLMVFPKPVTALEYTFSRSDPTSYAGYIEDLKKFLKPYTLEEQKNLTVCPDGALFEQKGPVYVACQFPISLLQACSGMNDPDFGYSQGNPCILVKMNRIIGLKPEGVPRIDCVSKNEDIPNVAVYPHNGMIDLKYFPYYGKKLHVGYLQPLVAVQVSFAPNNTGKEVTVECKIDGSANLKSQDDRDKFLGRVMFKITARA

SEQ ID NO: 759318 - protein, 279 aa, Homo sapiens; identical to SEQ ID NO: 759317

SEQ ID NO: 759319 - protein, 297 aa, Homo sapiens
MTKNEKKSLNQSLAEWKLFIYNPTTGEFLGRTAKSWGLILLFYLVFYGFLAALFSFTMWVMLQTLNDEVPKYRDQIPSPGLMVFPKPVTALEYTFSRSDPTSYAGYIEDLKKFLKPYTLEEQKNLTVCPDGALFEQKGPVYVACQFPISLLQACSGMNDPDFGYSQGNPCILVKMNRIIGLKPEGVPRIDCVSKNEDIPNVAVYPHNGMIDLKYFPYYGKKLHVSIEKFLCGDYSFGKLEHVLTYHLSGVGRRQPCLICGSSIQVLFYFNGDGKWSSHIYNSEHRTQADTLKLDDYF

SEQ ID NO: 759320 - protein, 279 aa, Homo sapiens; identical to SEQ ID NO: 759317

SEQ ID NO: 759321 - protein, 301 aa, Homo sapiens
MTKNEKKSLNQSLAEWKLFIYNPTTGEFLGRTAKSWGLILLFYLVFYGFLAALFSFTMWVMLQTLNDEVPKYRDQIPSPGLMVFPKPVTALEYTFSRSDPTSYAGYIEDLKKFLKPYTLEEQKNLTVCPDGALFEQKGPVYVACQFPISLLQACSGMNDPDFGYSQGNPCILVKMNRIIGLKPEGVPRIDCVSKNEDIPNVAVYPHNGMIDLKYFPYYGKKLHVGYLQPLVAVQVSFAPNNTGKEVTVECKIDGSANLKSQDDRDKFLGRVIMLCCLSSFCNSWTFHSRIMRPPWRKVCGT

SEQ ID NO: 759322 - protein, 373 aa, Homo sapiens
AEAAARRGAAESARVLPVTRRCSRPSHPSLPSPGCAAGAGTRLRSPRRLHPRGRSSSRRPRAHHDEEREEVPQPEPGRVEALHLQPDHRRIPGAHRQELGIAVCGREVMLSEGDILFSSLLSSPSLFWPPGLILLFYLVFYGFLAALFSFTMWVMLQTLNDEVPKYRDQIPSPGLMVFPKPVTALEYTFSRSDPTSYAGYIEDLKKFLKPYTLEEQKNLTVCPDGALFEQKGPVYVACQFPISLLQACSGMNDPDFGYSQGNPCILVKMNRIIGLKPEGVPRIDCVSKNEDIPNVAVYPHNGMIDLKYFPYYGKKLHVGYLQPLVAVQVSFAPNNTGKEVTVECKIDGSANLKSQDDRDKFLGRVMFKITARA

SEQ ID NO: 759323 - protein, 222 aa, Homo sapiens
MWVMLQTLNDEVPKYRDQIPSPGLMVFPKPVTALEYTFSRSDPTSYAGYIEDLKKFLKPYTLEEQKNLTVCPDGALFEQKGPVYVACQFPISLLQACSGMNDPDFGYSQGNPCILVKMNRIIGLKPEGVPRIDCVSKNEDIPNVAVYPHNGMIDLKYFPYYGKKLHVGYLQPLVAVQVSFAPNNTGKEVTVECKIDGSANLKSQDDRDKFLGRVMFKITARA

SEQ ID NO: 759324 - protein, 230 aa, Homo sapiens
TRRGRVGRPTRPLQTLNDEVPKYRDQIPSPGLMVFPKPVTALEYTFSRSDPTSYAGYIEDLKKFLKPYTLEEQKNLTVCPDGALFEQKGPVYVACQFPISLLQACSGMNDPDFGYSQGNPCILVKMNRIIGLKPEGVPRIDCVSKNEDIPNVAVYPHNGMIDLKYFPYYGKKLHVGYLQPLVAVQVSFAPNNTGKEVTVECKIDGSANLKSQDDRDKFLGRVMFKITARA

SEQ ID NO: 759325 - protein, 212 aa, Homo sapiens
MLGHNTDRFLARRLMVFPKPVTALEYTFSRSDPTSYAGYIEDLKKFLKPYTLEEQKNLTVCPDGALFEQKGPVYVACQFPISLLQACSGMNDPDFGYSQGNPCILVKMNRIIGLKPEGVPRIDCVSKNEDIPNVAVYPHNGMIDLKYFPYYGKKLHVGYLQPLVAVQVSFAPNNTGKEVTVECKIDGSANLKSQDDRDKFLGRVMFKITARA

SEQ ID NO: 759326 - protein, 104 aa, Homo sapiens
MTKNEKKSLNQSLAEWKLFIYNPTTGEFLGRTAKSWGLILLFYLVFYGFLAALFSFTMWVMLQTLNDEVPKYRDQIPSPAHWNIHSVGLIQLRMQGTLKTLRSF

SEQ ID NO: 759327 - protein, 279 aa, Homo sapiens; identical to SEQ ID NO: 759317

SEQ ID NO: 759328 - protein, 269 aa, Homo sapiens
MTKNEKKSLNQSLAEWKLFIYNPTTGEFLGRTAKSWGLILLFYLVFYGFLAALFSFTMWVMLQTLNDEVPKYRDQIPSPGLMVFPKPVTALEYTFSRSDPTSYAGYIEDLKKFLKPYTLEEQKNLTVCPDGALFEQKGPVYVACQFPISLLQACSGMNDPDFGYSQGNPCILVKMNRIIGLKPEGVPRIDCVSKNEDIPNVAVYPHNGMIDLKYFPYYGKKLHVGYLQPLVAVQVSFAPNNTGKEVTCPSEVTALLPLLPFEPSVQSPR

SEQ ID NO: 759329 - protein, 127 aa, Homo sapiens
HASRTRGSTHASAQGNPCILVKMNRIIGLKPEGVPRIDCVSKNEDIPNVAVYPHNGMIDLKYFPYYGKKLHVGYLQPLVAVQVSFAPNNTGKEVTVECKIDGSANLKSQDDRDKFLGRVMFKITARA

SEQ ID NO: 759330 - protein, 297 aa, Homo sapiens; identical to SEQ ID NO: 759319

SEQ ID NO: 759331 - protein, 99 aa, Homo sapiens
GDLRHPHLCKHDRRNEDIPNVAVYPHNGMIDLKYFPYYGKKLHVGYLQPLVAVQVSFAPNNTGKEVTVECKIDGSANLKSQDDRDKFLGRVMFKITARA

SEQ ID NO: 759332 - protein, 212 aa, Homo sapiens
  misc_feature (201)..(202): Xaa can be any naturally occurring amino acid
  misc_feature (210)..(210): Xaa can be any naturally occurring amino acid
MTKNEKKSLNQSLAEWKLFIYNPTTGEFLGRTAKSWGLILLFYLVFYGFLAALFSFTMWVMLQTLNDEVPKYRDQIPSPGLMVFPKPVTALEYTFSRSDPTSYAGYIEDLKKFLKPYTLEEQKNLTVCPDGALFEQKGPVYVACQFPISLLQACSGMNDPDFGYSQGNPCILVKMNRIIGLKPEGVPRIDCVSKNEDIPMXXVILSESGXRI

SEQ ID NO: 759333 - protein, 373 aa, Homo sapiens; identical to SEQ ID NO: 759322

SEQ ID NO: 759334 - protein, 126 aa, Homo sapiens
MTKNEKKSLNQSLAEWKLFIYNPTTGEFLGRTAKSWGLILLFYLVFYGFLAALFSFTMWVMLQTLNDEVPKYRDQIPSPGLMVFPKPVTALEYTFSRSDPTSYAGYIEDLKKFLKQLSARLMDQPT

SEQ ID NO: 759335 - protein, 279 aa, Homo sapiens; identical to SEQ ID NO: 759317

SEQ ID NO: 759336 - protein, 279 aa, Homo sapiens; identical to SEQ ID NO: 759317

SEQ ID NO: 759337 - protein, 204 aa, Homo sapiens
MTKNEKKSLNQSLAEWKLFIYNPTTGEFLGRTAKSWGLILLFYLVFYGFLAALFSFTMWVMLQTLNDEVPKYRDQIPSPGLMVFPKPVTALEYTFSRSDPTSYAGYIEDLKKFLKPYTLEEQKNLTVCPDGALFEQKGPVYVACQFPISLLQACSGMNDPDFGYSQGNPCILVKMNRIIGLKPEGVPRIDCVSKLVGVLVISAI

SEQ ID NO: 759338 - protein, 222 aa, Homo sapiens; identical to SEQ ID NO: 759323

SEQ ID NO: 759339 - protein, 284 aa, Homo sapiens
LNLDSEKALKRIAVCGREVMLSEGDILFSSLLSSPSLFWPPGLILLFYLVFYGFLAALFSFTMWVMLQTLNDEVPKYRDQIPSPGLMVFPKPVTALEYTFSRSDPTSYAGYIEDLKKFLKPYTLEEQKNLTVCPDGALFEQKGPVYVACQFPISLLQACSGMNDPDFGYSQGNPCILVKMNRIIGLKPEGVPRIDCVSKNEDIPNVAVYPHNGMIDLKYFPYYGKKLHVGYLQPLVAVQVSFAPNNTGKEVTVECKIDGSANLKSQDDRDKFLGRVMFKITARA

SEQ ID NO: 759340 - protein, 279 aa, Homo sapiens; identical to SEQ ID NO: 759317

SEQ ID NO: 759341 - protein, 212 aa, Homo sapiens
YPSIRRAQSPSPGLMVFPKPVTALEYTFSRSDPTSYAGYIEDLKKFLKPYTLEEQKNLTVCPDGALFEQKGPVYVACQFPISLLQACSGMNDPDFGYSQGNPCILVKMNRIIGLKPEGVPRIDCVSKNEDIPNVAVYPHNGMIDLKYFPYYGKKLHVGYLQPLVAVQVSFAPNNTGKEVTVECKIDGSANLKSQDDRDKFLGRVMFKITARA

SEQ ID NO: 759342 - protein, 279 aa, Homo sapiens; identical to SEQ ID NO: 759317

SEQ ID NO: 759343 - protein, 123 aa, Homo sapiens [sequence omitted]

SEQ ID NO: 759344 - protein, 279 aa, Homo sapiens; identical to SEQ ID NO: 759317

SEQ ID NO: 759345 - protein, 488 aa, Homo sapiens
MTKNEKKSLNQSLAEWKLFIYNPTTGEFLGRTAKSWGLILLFYLVFYGFLAALFSFTMWVMLQTLNDEVPKYRDQIPSPGLMVFPKPVTALEYTFSRSDPTSYAGYIEDLKKFLKPYTLEEQKNLTVCPDGALFEQKGPVYVACQFPISLLQACSGMNDPDFGYSQGNPCILVKMNRIIGLKPEGVPRIDCVSKNEDIPNVAVYPHNGMIDLKYFPYYGKKLHVGYLQPLVAVQVSFAPNNTGKEVTTSPEPPTYQAYDEHRPASRAHPLAPPDPRVRYVRPLQYLTDQHARKEANGPHNIFSYVHQVTKQTNPEREFNVKSLYCIVRKLPFTHAGLSFLIAAAPNTAQTNKRLYKASVCCRTMFGVLRNDARYHEMILHSQTHPPVRHPRPHCSSPHPQAPTIRGRTTQSPQTHAPTPPHSLGLLSTPTHVAYQSMRTPHNVPVSNISPSTRPNLKTTHETSNNRQRSAEMTHTITTPRPLLHPPSP

SEQ ID NO: 759346 - protein, 116 aa, Homo sapiens
MTKNEKKSLNQSLAEWKLFIYNPTTGEFLGRTAKSWGLILLFYLVFYGFLAALFSFTMWVMLQTLNDEVPKYRDQIPSPGLMVFPKPVTALEYTFSRSDPTSYAGYIEDLKKFLKQ

SEQ ID NO: 759347 - protein, 131 aa, Homo sapiens
MTKNEKKSLNQSLAEWKLFIYNPTTGEFLGRTAKSWGLILLFYLVFYGFLAALFSFTMWVMLQTLNDEVPKYRDQIPSPGLMVFPKPVTALEYTFSRSDPTSYAGYIEDLKKFLKRWVSTAIGCCSGQLCS

SEQ ID NO: 759348 - protein, 204 aa, Homo sapiens; identical to SEQ ID NO: 759337

SEQ ID NO: 759349 - protein, 218 aa, Homo sapiens
LVRLAPGGSAPGAAPAAAMDLGPGDAAGGGPLAPRPRRRRSLRRLFSRFLLALGSRSRPGDSPPRPQPGHCDGDGEGGFACAPGPVPAAPGSPGEERPPGPQPQLQLPAGDGARPPGAQGLKNHGNTCFMNAVVQCLSNTDLLAEFLALGRYRAAPGRAEVTEQLAALVRALWTREYTPQLSAEFKVGSAAPPTALSPWFRLLKSVCTIRKGFSWGLL

SEQ ID NO: 759350 - protein, 264 aa, Homo sapiens
LVRLAPGGSAPGAAPAAAMDLGPGDAAGGGPLAPRPRRRRSLRRLFSRFLLALGSRSRPGDSPPRPQPGHCDGDGEGGFACAPGPVPAAPGSPGEERPPGPQPQLQLPAGDGARPPGAQGLKNHGNTCFMNAVVQCLSNTDLLAEFLALGRYRAAPGRAEVTEQLAALVRALWTREYTPQLSAEFKNAVSKYGSQFQGNSQHDALEFLLWLLDRVHEDLEGSSRGPVSEKLPPEATKTSENCLSPSAQLPLGQSFVQSHFQAQY

SEQ ID NO: 759351 - protein, 401 aa, Homo sapiens
MAHVSSETQDVSPKDELTASEASTRSPLCEHTFPGDSDLRSMIEEHAFQVLSQGSLLESPSYTVCVSEPDKDDDFLSLNFPRKLWKIVESDQFKSISWDENGTCIVINEELFKKEILETKAPYRIFQTDAIKSFVRQLNLYGFSKIQQNFQRSAFLATFLSEEKESSVLSKLKFYYNPNFKRGYPQLLVRVKRRIGVKNASPISTLFNEDFNKKHFRAGANMENHNSALAAEASEESLFSASKNLNMPLTRESSVRQIIANSSVPIRSGFPPPSPSTSVGPSEQIATDQHAILNQLTTIHMHSHSTYMQARGHIVNFITTTTSQYHIISPLQNGYFGLTVEPSAVPTRYPLVSVNEAPYRNMLPAGNPWLQMPTIADRSAAPHSRLALQPSPLDKYHPNYN

SEQ ID NO: 759352 - protein, 204 aa, Homo sapiens [sequence omitted]

SEQ ID NO: 759353 - protein, 188 aa, Homo sapiens
MAPQKHGGGGGGGSGPSAGSGGGGFGGSAAVAAATASGGKSGGGSCGGGGSYSASSSSSAAAAAGAAVLPVKKPKMEHVQADHELFLQAFEKPTQIYRFLRTRNLIAPIFLHRTLTYMSHRNSRTNIKRKTFKVDDMLSKVEKMKGEQESHSLSAHLQLTFLVSSTKMISHHQTQKMNKILLPWKSCL

SEQ ID NO: 759354 - protein, 188 aa, Homo sapiens; identical to SEQ ID NO: 759353

SEQ ID NO: 759355 - protein, 188 aa, Homo sapiens; identical to SEQ ID NO: 759353

SEQ ID NO: 759356 - protein, 188 aa, Homo sapiens; identical to SEQ ID NO: 759353

SEQ ID NO: 759357 - protein, 188 aa, Homo sapiens; identical to SEQ ID NO: 759353

SEQ ID NO: 759358 - protein, 188 aa, Homo sapiens; identical to SEQ ID NO: 759353

SEQ ID NO: 759359 - protein, 77 aa, Homo sapiens
SNFWLVAAVLGQGKEGTRRPPSPRHLLPASPQPRLREMCRAGGPGSPSRRRDTLGRPQSGAGQSQHRSIDFFELGIS

SEQ ID NO: 759360 - protein, 188 aa, Homo sapiens; identical to SEQ ID NO: 759353

SEQ ID NO: 759361 - protein, 122 aa, Homo sapiens
LIFGWWRRCWARGRKGHGGRPRPATSYQLPPSPGSGRCAGRGARVRRAAGETRWADPRAALDRKTFKVDDMLSKVEKMKGEQESHSLSAHLQLTFLVSSTKMISHHQTQKMNKILLPWKSCL

SEQ ID NO: 759362 - protein, 188 aa, Homo sapiens; identical to SEQ ID NO: 759353

SEQ ID NO: 759363 - protein, 122 aa, Homo sapiens; identical to SEQ ID NO: 759361

SEQ ID NO: 759364 - protein, 188 aa, Homo sapiens; identical to SEQ ID NO: 759353

SEQ ID NO: 759365 - protein, 188 aa, Homo sapiens; identical to SEQ ID NO: 759353

SEQ ID NO: 759366 - protein, 165 aa, Homo sapiens
GLGRVSGSEAERGSEETLFLPPSFPPLLLPSLPLSSPLSSFSPRSAGACWGERLVLQALTLRGRPASSWPGKEAGTAMAPQKHGGGGGGGSGPSAGSGGGGFGGSAATASSGKSGGGGCGGGGSYSASSSSAALPVKKSKMEHVQADHELFLQAFEKPTQIYRFL

SEQ ID NO: 759367 - protein, 188 aa, Homo sapiens; identical to SEQ ID NO: 759353

SEQ ID NO: 759368 - protein, 218 aa, Homo sapiens
SNFWLVAAVLGQGKEGTRRPPSPRHLLPASPQPRLREMCRAGGPGSPSRRRDTLGRPQSGAGQLVSSFAAYIFGFFHKNDKPSPNSENEQNSVTLEVLLVKVCHKKRKDVCCPIRQVPTGKKQVPLNPDLNQTKPGNFPSLAVSSNEFEPSNSHMVKSYSLLFRVTRPRRREFNGMINGETMKILVIFFFTRFYHWRLRWSLKMIVPVFLHDSHGAES

SEQ ID NO: 759369 - protein, 165 aa, Homo sapiens; identical to SEQ ID NO: 759366

SEQ ID NO: 759370 - protein, 165 aa, Homo sapiens; identical to SEQ ID NO: 759366

SEQ ID NO: 759371 - protein, 1280 aa, Homo sapiens
SAADKVDAGLPTAIAVSSLIAVGTSHGLALIFDQNQALRLCLGSTSVGGQYGAISALSINNDCSRLLCGFAKGQITMWDLASGKLLRSITDAHPPGTAILHIKFTDDPTLAICNDSGGSVFELTFKRVMGVRTCESRCLFSGSKGEVCCIEPLHSKPELKDHPITQFSLLAMASLTKILVIGLKPSLKVWMTFPYGRMDPSSVPLLAWHFVAVQNYVNPMLAFCRGDVVHFLLVKRDESGAIHVTKQKHLHLYYDLINFTWINSRTVVLLDSVEKLHVIDRQTQEELETVEISEVQLVYNSSHFKSLATGGNVSQALALVGEKACYQSISSYGGQIFYLGTKSVYVMMLRSWRERVDHLLKQDCLTEALALAWSFHEGKAKAVVGLSGDASKRKAIVADRMVEILFHYADRALKKCPDQGKIQVMEQHFQDMVPVIVDYCLLLQRKDLLFSQMYDKLSENSVAKGVFLECLEPYILSDKLVGITPQVMKDLIVHFQDKKLMENVEALIVHMDITSLDIQQVVLMCWENRLYDAMIYVYNRGMNEFISPMEKLFRVIAPPLNAGKTLTDEQVVMGNKLLVYISCCLAGRAYPLGDIPEDLVPLVKNQVFEFLIRLHSAEASPEEEIYPYIRTLLHFDTREFLNVLALTFEDFKNDKQAVEYQQRIVDILLKVMVENSDFTPSQVGCLFTFLARQLAKPDNTLFVNRTLFDQVLEFLCSPDDDSRHSERQQVLLELLQAGGIVQFEESRLIRMAEKAEFYQICEFMYEREHQYDKIIDCYLRDPLREEEVFNYIHNILSIPGHSAEEKQSVWQKAMDHIEELVSLKPCKAAELVATHFSGHIETVIKKLQNQVLLFKFLRSLLDPREGIHVNQELLQISPCITEQFIELLCQFNPTQVIETLQVLECYRLEETIQITQKYQLHEVTAYLLEKKGDIHGAFLIMLERLQSKLQEVTHQGENTKEDPSLKDVEDTMVETIALCQRNSHNLNQQQREALWFPLLEAMMAPQKLSSSAIPHLHSEALKSLTMQVLNSMAAFIALPSILQRILQDPVYGKGKLGEIQGLILGMLDTFNYEQTLLETTTSLLNQDLHWSLCNLRASVTRGLNPKQDYCSICLQQYKRRQEMADEIIVFSCGHLYHSFCLQNKECTVEFEGQTRWTCYKCSSSNKVGKLSENSSEIKKGRITPSQVKMSPSYHQSKGDPTAKKGTSEPVLDPQQIQAFDQLCRLYRGSSRLALLTELSQNRSSESYRPFSGSQSAPAFNSIFQNENFQLQLIPPPVTED

SEQ ID NO: 759372 - protein, 213 aa, Homo sapiens
  misc_feature (5)..(5): Xaa can be any naturally occurring amino acid
RGSRXASTLLETTTSLLNQDLHWSLCNLRASVTRGLNPKQDYCSICLQQYKRRQEMADEIIVFSCGHLYHSFCLQNKECTVEFEGQTRWTCYKCSSSNKVGKLSENSSEIKKGRITPSQVKMSPSYHQSKGDPTAKKGTSEPVLDPQQIQAFDQLCRLYRGSSRLALLTELSQNRSSESYRPFSGSQSAPAFNSIFQNENFQLQLIPPPVTED

SEQ ID NO: 759373 - protein, 161 aa, Homo sapiens
MLNDSLNLHRYSCGHLYHSFCLQNKECTVEFEGQTRWTCYKCSSSNKVGKLSENSSEIKKGRITPSQVKMSPSYHQSKGDPTAKKGTSEPVLDPQQIQAFDQLCRLYRGSSRLALLTELSQNRSSESYRPFSGSQSAPAFNSIFQNENFQLQLIPPPVTED

SEQ ID NO: 759374 - protein, 1201 aa, Homo sapiens
MWDLASGKLLRSITDAHPPGTAILHIKFTDDPTLAICNDSGGSVFELTFKRVMGVRTCESRCLFSGSKGEVCCIEPLHSKPELKDHPITQFSLLAMASLTKILVIGLKPSLKVWMTFPYGRMDPSSVPLLAWHFVAVQNYVNPMLAFCRGDVVHFLLVKRDESGAIHVTKQKHLHLYYDLINFTWINSRTVVLLDSVEKLHVIDRQTQEELETVEISEVQLVYNSSHFKSLATGGNVSQALALVGEKACYQSISSYGGQIFYLGTKSVYVMMLRSWRERVDHLLKQDCLTEALALAWSFHEGKAKAVVGLSGDASKRKAIVADRMVEILFHYADRALKKCPDQGKIQVMEQHFQDMVPVIVDYCLLLQRKDLLFSQMYDKLSENSVAKGVFLECLEPYILSDKLVGITPQVMKDLIVHFQDKKLMENVEALIVHMDITSLDIQQVVLMCWENRLYDAMIYVYNRGMNEFISPMEKLFRVIAPPLNAGKTLTDEQVVMGNKLLVYISCCLAGRAYPLGDIPEDLVPLVKNQVFEFLIRLHSAEASPEEEIYPYIRTLLHFDTREFLNVLALTFEDFKNDKQAVEYQQRIVDILLKVMVENSDFTPSQVGCLFTFLARQLAKPDNTLFVNRTLFDQVLEFLCSPDDDSRHSERQQVLLELLQAGGIVQFEESRLIRMAEKAEFYQICEFMYEREHQYDKIIDCYLRDPLREEEVFNYIHNILSIPGHSAEEKQSVWQKAMDHIEELVSLKPCKAAELVATHFSGHIETVIKKLQNQVLLFKFLRSLLDPREGIHVNQELLQISPCITEQFIELLCQFNPTQVIETLQVLECYRLEETIQITQKYQLHEVTAYLLEKKGDIHGAFLIMLERLQSKLQEVTHQGENTKEDPSLKDVEDTMVETIALCQRNSHNLNQQQREALWFPLLEAMMAPQKLSSSAIPHLHSEALKSLTMQVLNSMAAFIALPSILQRILQDPVYGKGKLGEIQGLILGMLDTFNYEQTLLETTTSLLNQDLHWSLCNLRASVTRGLNPKQDYCSICLQQYKRRQEMADEIIVFSCGHLYHSFCLQNKECTVEFEGQTRWTCYKCSSSNKVGKLSENSSEIKKGRITPSQVKMSPSYHQSKGDPTAKKGTSEPVLDPQQIQAFDQLCRLYRGSSRLALLTELSQNRSSESYRPFSGSQSAPAFNSIFQNENFQLQLILPRF

SEQ ID NO: 759375 - protein, 1199 aa, Homo sapiens
MWDLASGKLLRSITDAHPPGTAILHIKFTDDPTLAICNDSGGSVFELTFKRVMGVRTCESRCLFSGSKGEVCCIEPLHSKPELKDHPITQFSLLAMASLTKILVIGLKPSLKVWMTFPYGRMDPSSVPLLAWHFVAVQNYVNPMLAFCRGDVVHFLLVKRDESGAIHVTKQKHLHLYYDLINFTWINSRTVVLLDSVEKLHVIDRQTQEELETVEISEVQLVYNSSHFKSLATGGNVSQALALVGEKACYQSISSYGGQIFYLGTKSVYVMMLRSWRERVDHLLKQDCLTEALALAWSFHEGKAKAVVGLSGDASKRKAIVADRMVEILFHYADRALKKCPDQGKIQVMEQHFQDMVPVIVDYCLLLQRKDLLFSQMYDKLSENSVAKGVFLECLEPYILSDKLVGITPQVMKDLIVHFQDKKLMENVEALIVHMDITSLDIQQVVLMCWENRLYDAMIYVYNRGMNEFISPMEKLFRVIAPPLNAGKTLTDEQVVMGNKLLVYISCCLAGRAYPLGDIPEDLVPLVKNQVFEFLIRLHSAEASPEEEIYPYIRTLLHFDTREFLNVLALTFEDFKNDKQAVEYQQRIVDILLKVMVENSDFTPSQVGCLFTFLARQLAKPDNTLFVNRTLFDQVLEFLCSPDDDSRHSERQQVLLELLQAGGIVQFEESRLIRMAEKAEFYQICEFMYEREHQYDKIIDCYLRDPLREEEVFNYIHNILSIPGHSAEEKQSVWQKAMDHIEELVSLKPCKAAELVATHFSGHIETVIKKLQNQVLLFKFLRSLLDPREGIHVNQELLQISPCITEQFIELLCQFNPTQVIETLQVLECYRLEETIQITQKYQLHEVTAYLLEKKGDIHGAFLIMLERLQSKLQEVTHQGENTKEDPSLKDVEDTMVETIALCQRNSHNLNQQQREALWFPLLEAMMAPQKLSSSAIPHLHSEALKSLTMQVLNSMAAFIALPSILQRILQDPVYGKGKLGEIQGLILGMLDTFNYEQTLLETTTSLLNQDLHWSLCNLRASVTRGLNPKQDYCSICLQQYKRRQEMADEIIVFSCGHLYHSFCLQNKECTVEFEGQTRWTCYKCSSSNKVGKLSENSSEIKKGRITPSQVKMSPSYHQSKGDPTAKKGTSEPVLDPQQIQAFDQLCRLYRGSSRLALLTELSQNRSSESYRPFSGSQSAPAFNSIFQNENFQLQLIYN

SEQ ID NO: 759376 - protein, 757 aa, Homo sapiens
MWDLASGKLLRSITDAHPPGTAILHIKFTDDPTLAICNDSGGSVFELTFKRVMGVRTCESRCLFSGSKGEVCCIEPLHSKPELKDHPITQFSLLAMASLTKILVIGLKPSLKVWMTFPYGRMDPSSVPLLAWHFVAVQNYVNPMLAFCRGDVVHFLLVKRDESGAIHVTKQKHLHLYYDLINFTWINSRTVVLLDSVEKLHVIDRQTQEELETVEISEVQLVYNSSHFKSLATGGNVSQALALVGEKACYQSISSYGGQIFYLGTKSVYVMMLRSWRERVDHLLKQDCLTEALALAWSFHEGKAKAVVGLSGDASKRKAIVADRMVEILFHYADRALKKCPDQGKIQVMEQHFQDMVPVIVDYCLLLQRKDLLFSQMYDKLSENSVAKGVFLECLEPYILSDKLVGITPQVMKDLIVHFQDKKLMENVEALIVHMDITSLDIQQVVLMCWENRLYDAMIYVYNRGMNEFISPMEKLFRVIAPPLNAGKTLTDEQVVMGNKLLVYISCCLAGRAYPLGDIPEDLVPLVKNQVFEFLIRLHSAEASPEEEIYPYIRTLLHFDTREFLNVLALTFEDFKNDKQAVEYQQRIVDILLKVMVENSDFTPSQVGCLFTFLARQLAKPDNTLFVNRTLFDQVLEFLCSPDDDSRHSERQQVLLELLQAGGIVQFEESRLIRMAEKAEFYQICEFMYEREHQYDKIIDCYLRDPLREEEVFNYIHNILSIPGHSAEEKQSVWQKAMDNTEELQLLQGTVVGQAAV

SEQ ID NO: 759377 - protein, 1204 aa, Homo sapiens
MWDLASGKLLRSITDAHPPGTAILHIKFTDDPTLAICNDSGGSVFELTFKRVMGVRTCESRCLFSGSKGEVCCIEPLHSKPELKDHPITQFSLLAMASLTKILVIGLKPSLKVWMTFPYGRMDPSSVPLLAWHFVAVQNYVNPMLAFCRGDVVHFLLVKRDESGAIHVTKQKHLHLYYDLINFTWINSRTVVLLDSVEKLHVIDRQTQEELETVEISEVQLVYNSSHFKSLATGGNVSQALALVGEKACYQSISSYGGQIFYLGTKSVYVMMLRSWRERVDHLLKQDCLTEALALAWSFHEGKAKAVVGLSGDASKRKAIVADRMVEILFHYADRALKKCPDQGKIQVMEQHFQDMVPVIVDYCLLLQRKDLLFSQMYDKLSENSVAKGVFLECLEPYILSDKLVGITPQVMKDLIVHFQDKKLMENVEALIVHMDITSLDIQQVVLMCWENRLYDAMIYVYNRGMNEFISPMEKLFRVIAPPLNAGKTLTDEQVVMGNKLLVYISCCLAGRAYPLGDIPEDLVPLVKNQVFEFLIRLHSAEASPEEEIYPYIRTLLHFDTREFLNVLALTFEDFKNDKQAVEYQQRIVDILLKVMVENSDFTPSQVGCLFTFLARQLAKPDNTLFVNRTLFDQVLEFLCSPDDDSRHSERQQVLLELLQAGGIVQFEESRLIRMAEKAEFYQICEFMYEREHQYDKIIDCYLRDPLREEEVFNYIHNILSIPGHSAEEKQSVWQKAMDHIEELVSLKPCKAAELVATHFSGHIETVIKKLQNQVLLFKFLRSLLDPREGIHVNQELLQISPCITEQFIELLCQFNPTQVIETLQVLECYRLEETIQITQKYQLHEVTAYLLEKKGDIHGAFLIMLERLQSKLQEVTHQGENTKEDPSLKDVEDTMVETIALCQRNSHNLNQQQREALWFPLLEAMMAPQKLSSSAIPHLHSEALKSLTMQVLNSMAAFIALPSILQRILQDPVYGKGKLGEIQGLILGMLDTFNYEQTLLETTTSLLNQDLHWSLCNLRASVTRGLNPKQDYCSICLQQYKRRQEMADEIIVFSCGHLYHSFCLQNKECTVEFEGQTRWTCYKCSSSNKVGKLSENSSEIKKGRITPSQVKMSPSYHQSKGDPTAKKGTSEPVLDPQQIQAFDQLCRLYRGSSRLALLTELSQNRSSESYRPFSGSQSAPAFNSIFQNENFQLQLIPPPVTED

SEQ ID NO: 759378 - protein, 278 aa, Homo sapiens [sequence omitted]

SEQ ID NO: 759379 - protein, 1204 aa, Homo sapiens; identical to SEQ ID NO: 759377

SEQ ID NO: 759380 - protein, 77 aa, Homo sapiens
  misc_feature (7)..(7): Xaa can be any naturally occurring amino acid
  misc_feature (16)..(16): Xaa can be any naturally occurring amino acid
RCTATPXGWLLATQAXDQLCRLFGGSSGLALLTELSQNRSSESYRPFSGSQSAPAFNSIFQNENFQLQLIPPPVTED

SEQ ID NO: 759381 - protein, 282 aa, Homo sapiens
MWDLASGKLLRSITDAHPPGTAILHIKFTDDPTLAICNDSGGSVFELTFKRVMGVRTCESRCLFSGSKGEVCCIEPLHSKPELKDHPITQFSLLAMASLTKILVIGLKPSLKVWMTFPYGRMDPSSVPLLAWHFVAVQNYVNPMLAFCRGDVVHFLLVKRDESGAIHVTKQKHLHLYYDLINFTWINSRTVVLLDSVEKLHVIDRQTQEELETVEISEVQLVYNSSHFKSLATGGNVSQALALVGEKACYQSISSYGGQIFYLGTKSVYVMMLRSWREVSSK

SEQ ID NO: 759382 - protein, 876 aa, Homo sapiens
MWDLASGKLLRSITDAHPPGTAILHIKFTDDPTLAICNDSGGSVFELTFKRVMGVRTCESRCLFSGSKGEVCCIEPLHSKPELKDHPITQFSLLAMASLTKILVIGLKPSLKVWMTFPYGRMDPSSVPLLAWHFVAVQNYVNPMLAFCRGDVVHFLLVKRDESGAIHVTKQKHLHLYYDLINFTWINSRTVVLLDSVEKLHVIDRQTQEELETVEISEVQLVYNSSHFKSLATGGNVSQALALVGEKACYQSISSYGGQIFYLGTKSVYVMMLRSWRERVDHLLKQDCLTEALALAWSFHEGKAKAVVGLSGDASKRKAIVADRMVEILFHYADRALKKCPDQGKIQVMEQHFQDMVPVIVDYCLLLQRKDLLFSQMYDKLSENSVAKGVFLECLEPYILSDKLVGITPQVMKDLIVHFQDKKLMENVEALIVHMDITSLDIQQVVLMCWENRLYDAMIYVYNRGMNEFISPMEKLFRVIAPPLNAGKTLTDEQVVMGNKLLVYISCCLAGRAYPLGDIPEDLVPLVKNQVFEFLIRLHSAEASPEEEIYPYIRTLLHFDTREFLNVLALTFEDFKNDKQAVEYQQRIVDILLKVMVENSDFTPSQVGCLFTFLARQLAKPDNTLFVNRTLFDQVLEFLCSPDDDSRHSERQQVLLELLQAGGIVQFEESRLIRMAEKAEFYQICEFMYEREHQYDKIIDCYLRDPLREEEVFNYIHNILSIPGHSAEEKQSVWQKAMDHIEELVSLKPCKAAELVATHFSGHIETVIKKLQNQVLLFKFLRSLLDPREGIHVNQELLQISPCITEQFIELLCQFNPTQVIETLQVLECYRLEETIQITQKYQLHEVTAYLLEKKGDIHGAFLIMLERRTKQTSKR

SEQ ID NO: 759383 - protein, 690 aa, Homo sapiens
MFCTKLKDLKITGECPFSLLAPGQVPNESSEEAAGSSESCKATVPICQDIPEKNIQESLPQRKTSRSRVYLHTLAESICKLIFPEFERLNVALQRTLAKHKIKESRKSLEREDFEKTIAEQAVAAGVPVEVIKESLGEEVFKICYEEDENILGVVGGTLKDFLNSFSTLLKQSSHCQEAGKRGRLEDASILCLDKEDDFLHVYYFFPKRTTSLILPGIIKAAAHVLYETEVEVSLMPPCFHNDCSEFVNQPYLLYSVHMKSTKPSLSPSKPQSSLVIPTSLFCKTFPFHFMFDKDMTILQFGNGIRRLMNRRDFQGKPNFEEYFEILTPKINQTFSGIMTMLNMQFVVRVRRWDNSVKKSSRVMDLKGQMIYIVESSAILFLGSPCVDRLEDFTGRGLYLSDIPIHNALRDVVLIGEQARAQDGLKKRLGKLKATLEQAHQALEEEKKKTVDLLCSIFPCEVAQQLWQGQVVQAKKFSNVTMLFSDIVGFTAICSQCSPLQVITMLNALYTRFDQQCGELDVYKVETIGDAYCVAGGLHKESDTHAVQIALMALKMMELSDEVMSPHGEPIKMRIGLHSGSVFAGVVGVKMPRYCLFGNNVTLANKFESCSVPRKINVSPTTYRLLKDCPGFVFTPRSREELPPNFPSEIPGICHFLDAYQQGTNSKPCFQKKDVEDGNANFLGKASGID

SEQ ID NO: 759384 - protein, 690 aa, Homo sapiens; identical to SEQ ID NO: 759383

SEQ ID NO: 759385 - protein, 690 aa, Homo sapiens; identical to SEQ ID NO: 759383

SEQ ID NO: 759386 - protein, 143 aa, Homo sapiens
MFCTKLKDLKITGECPFSLLAPGQVPNESSEEAAGSSESCKATVPICQDIPEKNIQESLPQRKTSRSRVYLHTLAESICKLIFPEFERLNVALQRTLAKHKIKESRKSLEREDFEKTIAEQAVAAGGDHWRCLLCSWGITQRE

SEQ ID NO: 759387 - protein, 286 aa, Homo sapiens
MFCTKLKDLKITGECPFSLLAPGQVPNESSEEAAGSSESCKATVPICQDIPEKNIQESLPQRKTSRSRVYLHTLAESICKLIFPEFERLNVALQRTLAKHKIKESRKSLEREDFEKTIAEQAVAAGVPVEVIKESLGEEVFKICYEEDENILGVVGGTLKDFLNSFSTLLKQSSHCQEAGKRGRLEDASILCLDKEDDFLHVYYFFPKRTTSLILPGIIKAAAHVLYETEVEVSLMPPCFHNDCSEFVNQPYLLYSVHMKSTKPSLSPIKHFSRPQFAYNLYSKSL

SEQ ID NO: 759388 - protein, 34 aa, Homo sapiens
QIALMALKMMELSDEVMSPHGEPIKVRQMIYCPK

SEQ ID NO: 759389 - protein, 690 aa, Homo sapiens; identical to SEQ ID NO: 759383

SEQ ID NO: 759390 - protein, 690 aa, Homo sapiens; identical to SEQ ID NO: 759383

SEQ ID NO: 759391 - protein, 366 aa, Homo sapiens
MFCTKLKDLKITGECPFSLLAPGQVPNESSEEAAGSSESCKATVPICQDIPEKNIQESLPQRKTSRSRVYLHTLAESICKLIFPEFERLNVALQRTLAKHKIKESRKSLEREDFEKTIAEQAVAAGVPVEVIKESLGEEVFKICYEEDENILGVVGGTLKDFLNSFSTLLKQSSHCQEAGKRGRLEDASILCLDKEDDFLHVYYFFPKRTTSLILPGIIKAAAHVLYETEVEVSLMPPCFHNDCSEFVNQPYLLYSVHMKSTKPSLSPSKPQSSLVIPTSLFCKTFPFHFMFDKDMTILQFGNGIRRLMNRRDFQGKPNFEEYFEILTPKINQTFSGIMTMLNMQFVVRVRRWDNSVKKSSRVRKT

SEQ ID NO: 759392 - protein, 624 aa, Homo sapiens
MFCTKLKDLKITGECPFSLLAPGQVPNESSEEAAGSSESCKATVPICQDIPEKNIQESLPQRKTSRSRVYLHTLAESICKLIFPEFERLNVALQRTLAKHKIKESRKSLEREDFEKTIAEQAVAAGVPVEVIKESLGEEVFKICYEEDENILGVVGGTLKDFLNSFSTLLKQSSHCQEAGKRGRLEDASILCLDKEDDFLHVYYFFPKRTTSLILPGIIKAAAHVLYETEVEVSLMPPCFHNDCSEFVNQPYLLYSVHMKSTKPSLSPSKPQSSLVIPTSLFCKTFPFHFMFDKDMTILQFGNGIRRLMNRRDFQGKPNFEEYFEILTPKINQTFSGIMTMLNMQFVVRVRRWDNSVKKSSRVMDLKGQMIYIVESSAILFLGSPCVDRLEDFTGRGLYLSDIPIHNALRDVVLIGEQARAQDGLKKRLGKLKATLEQAHQALEEEKKKTVDLLCSIFPCEVAQQLWQGQVVQAKKFSNVTMLFSDIVGFTAICSQCSPLQVITMLNALYTRFDQQCGELDVYKVETIGDAYCVAGGLHKESDTHAVQIALMALKMMELSDEVMSPHGEPIKMRIGLHSGSVFAGVVGVKMPRYCLFGNNVTLANKFESCSVPRKINVSPTTYR

SEQ ID NO: 759393 - protein, 434 aa, Homo sapiens
GNEKITLFHCGERADVQPQNFWNCFLVLAALVTLSTLKRTVLLRGRHSPTVLILPHVDIQLKYFDLGLPNRDQTDDQVTIDSALATQKYSVAVKCATITPDEARVEEFKLKKMWKSPNGTIRNILGGTVFREPIICKNIPRLVPGWTKPITIGRHAHGDQYKATDFVADRAGTFKMVFTPKDGSGVKEWEVYNFPAGGVGMGMYNTDESISGFAHSCFQYAIQKKWPLYMSTKNTILKAYDGRFKDIFQEIFDKHYKTDFDKNKIWYEHRLIDDMVAQVLKSSGGFVWACKNYDGDVQSDILAQGFGSLGLMTSVLVCPDGKTIEAEAAHGTVTRHYREHQKGRPTSTNPIASIFAWTRGLEHRGKLDGNQDLIRFAQMLEKVCVETVESGAMTKDLAGCIHGLSNVKLNEHFLNTTDFLDTIKSNLDRALGRQ

SEQ ID NO: 759394 - protein, 81 aa, Homo sapiens
YYYKIRGRVEKKRNGHEQLQAYSCLLGYPIRRECLFIPSSSSNARLSHMTTSEPITEALGRKASDWISQGHTVNPSARPGN

SEQ ID NO: 759395 - protein, 115 aa, Homo sapiens
KWPLYMSTKNTILKAYDGRFKDIFQEIFDKHHWQAAHGAQYKATDFVADRAGTFKMVFTPKDGSGVKEWEVYNFPAGGVGMGMYNTDELISGLRTVLQYASEEWPHHAAVRAGYG

SEQ ID NO: 759396 - protein, 452 aa, Homo sapiens
MAGYLRVVRSLCRASGSRPAWAPAALTAPTSQEQPRRHYADKRIKVAKPVVEMDGDEMTRIIWQFIKEKLILPHVDIQLKYFDLGLPNRDQTDDQVTIDSALATQKYSVAVKCATITPDEARVEEFKLKKMWKSPNGTIRNILGGTVFREPIICKNIPRLVPGWTKPITIGRHAHGDQYKATDFVADRAGTFKMVFTPKDGSGVKEWEVYNFPAGGVGMGMYNTDESISGFAHSCFQYAIQKKWPLYMSTKNTILKAYDGRFKDIFQEIFDKHYKTDFDKNKIWYEHRLIDDMVAQVLKSSGGFVWACKNYDGDVQSDILAQGFGSLGLMTSVLVCPDGKTIEAEAAHGTVTRHYREHQKGRPTSTNPIASIFAWTRGLEHRGKLDGNQDLIRFAQMLEKVCVETVESGAMTKDLAGCIHGLSNVKLNEHFLNTTDFLDTIKSNLDRALGRQ

SEQ ID NO: 759397 - protein, 489 aa, Homo sapiens
LNLPNSREPSVSPRPGSREERRALGPLPPCSFALQLGMAGYLRVVRSLCRASGSRPAWAPAALTAPTSQEQPRRHYADKRIKVAKPVVEMDGDEMTRIIWQFIKEKLILPHVDIQLKYFDLGLPNRDQTDDQVTIDSALATQKYSVAVKCATITPDEARVEEFKLKKMWKSPNGTIRNILGGTVFREPIICKNIPRLVPGWTKPITIGRHAHGDQYKATDFVADRAGTFKMVFTPKDGSGVKEWEVYNFPAGGVGMGMYNTDESISGFAHSCFQYAIQKKWPLYMSTKNTILKAYDGRFKDIFQEIFDKHYKTDFDKNKIWYEHRLIDDMVAQVLKSSGGFVWACKNYDGDVQSDILAQGFGSLGLMTSVLVCPDGKTIEAEAAHGTVTRHYREHQKGRPTSTNPIASIFAWTRGLEHRGKLDGNQDLIRFAQMLEKVCVETVESGAMTKDLAGCIHGLSNVKLNEHFLNTTDFLDTIKSNLDRALGRQ

SEQ ID NO: 759398 - protein, 452 aa, Homo sapiens; identical to SEQ ID NO: 759396

SEQ ID NO: 759399 - protein, 492 aa, Homo sapiens
PARPAPARPSVPSVSPRPGSREERRALGPLPPCSFALQLGMAGYLRVVRSLCRASGSRPAWAPAALTAPTSQEQPRRHYADKRIKVAKPVVEMDGDEMTRIIWQFIKEKLILPHVDIQLKYFDLGLPNRDQTDDQVTIDSALATQKYSVAVKCATITPDEARVEEFKLKKMWKSPNGTIRNILGGTVFREPIICKNIPRLVPGWTKPITIGRHAHGDQYKATDFVADRAGTFKMVFTPKDGSGVKEWEVYNFPAGGVGMGMYNTDESISGFAHSCFQYAIQKKWPLYMSTKNTILKAYDGRFKDIFQEIFDKHYKTDFDKNKIWYEHRLIDDMVAQVLKSSGGFVWACKNYDGDVQSDILAQGFGSLGLMTSVLVCPDGKTIEAEAAHGTVTRHYREHQKGRPTSTNPIASIFAWTRGLEHRGKLDGNQDLIRFAQMLEKVCVETVESGAMTKDLAGCIHGLSNVKLNEHFLNTTDFLDTIKSNLDRALGRQ

SEQ ID NO: 759400 - protein, 452 aa, Homo sapiens; identical to SEQ ID NO: 759396

SEQ ID NO: 759401 - protein, 452 aa, Homo sapiens; identical to SEQ ID NO: 759396

SEQ ID NO: 759402 - protein, 452 aa, Homo sapiens; identical to SEQ ID NO: 759396

SEQ ID NO: 759403 - protein, 452 aa, Homo sapiens; identical to SEQ ID NO: 759396

SEQ ID NO: 759404 - protein, 510 aa, Homo sapiens
MAGYLRVVRSLCRASGSRPAWAPAALTAPTSQEQPRRHYADKRIKVAKPVVEMDGDEMTRIIWQFIKEKLILPHVDIQLKYFDLGLPNRDQTDDQVTIDSALATQKYSVAVKCATITPDEARVEEFKLKKMWKSPNGTIRNILGGTVFREPIICKNIPRLVPGWTKPITIGRHAHGDQYKATDFVADRAGTFKMVFTPKDGSGVKEWEVYNFPAGGVGMGMYNTDESISGFAHSCFQYAIQKKWPLYMSTKNTILKAYDGRFKDIFQEIFDNKASSMYSVAFLPFPPCCSHPTLGRSLLECIWLSSEAQGGIPNLSAFCPLPITDLFTPRHYKTDFDKNKIWYEHRLIDDMVAQVLKSSGGFVWACKNYDGDVQSDILAQGFGSLGLMTSVLVCPDGKTIEAEAAHGTVTRHYREHQKGRPTSTNPIASIFAWTRGLEHRGKLDGNQDLIRFAQMLEKVCVETVESGAMTKDLAGCIHGLSNVKLNEHFLNTTDFLDTIKSNLDRALGRQ

SEQ ID NO: 759405 - protein, 458 aa, Homo sapiens
MASVHSSLTNGTGPCQEREREREEGTKGRKEGKKGKEGKKGKEVNADKRIKVAKPVVEMDGDEMTRIIWQFIKEKLILPHVDIQLKYFDLGLPNRDQTDDQVTIDSALATQKYSVAVKCATITPDEARVEEFKLKKMWKSPNGTIRNILGGTVFREPIICKNIPRLVPGWTKPITIGRHAHGDQYKATDFVADRAGTFKMVFTPKDGSGVKEWEVYNFPAGGVGMGMYNTDESISGFAHSCFQYAIQKKWPLYMSTKNTILKAYDGRFKDIFQEIFDKHYKTDFDKNKIWYEHRLIDDMVAQVLKSSGGFVWACKNYDGDVQSDILAQGFGSLGLMTSVLVCPDGKTIEAEAAHGTVTRHYREHQKGRPTSTNPIASIFAWTRGLEHRGKLDGNQDLIRFAQMLEKVCVETVESGAMTKDLAGCIHGLSNVKLNEHFLNTTDFLDTIKSNLDRALGRQ

SEQ ID NO: 759406 - protein, 322 aa, Homo sapiens
MWKSPNGTIRNILGGTVFREPIICKNIPRLVPGWTKPITIGRHAHGDQYKATDFVADRAGTFKMVFTPKDGSGVKEWEVYNFPAGGVGMGMYNTDESISGFAHSCFQYAIQKKWPLYMSTKNTILKAYDGRFKDIFQEIFDKHYKTDFDKNKIWYEHRLIDDMVAQVLKSSGGFVWACKNYDGDVQSDILAQGFGSLGLMTSVLVCPDGKTIEAEAAHGTVTRHYREHQKGRPTSTNPIASIFAWTRGLEHRGKLDGNQDLIRFAQMLEKVCVETVESGAMTKDLAGCIHGLSNVKLNEHFLNTTDFLDTIKSNLDRALGRQ

SEQ ID NO: 759407 - protein, 311 aa, Homo sapiens
YGLVSLGHFGRGCKNIPRLVPGWTKPITIGRHAHGDQYKATDFVADRAGTFKMVFTPKDGSGVKEWEVYNFPAGGVGMGMYNTDESISGFAHSCFQYAIQKKWPLYMSTKNTILKAYDGRFKDIFQEIFDKHYKTDFDKNKIWYEHRLIDDMVAQVLKSSGGFVWACKNYDGDVQSDILAQGFGSLGLMTSVLVCPDGKTIEAEAAHGTVTRHYREHQKGRPTSTNPIASIFAWTRGLEHRGKLDGNQDLIRFAQMLEKVCVETVESGAMTKDLAGCIHGLSNVKLNEHFLNTTDFLDTIKSNLDRALGRQ

SEQ ID NO: 759408 - protein, 346 aa, Homo sapiens
AAGTGLRCYGWPSVSPRPGSREERRALGPLPPCSFALQLGMAGYLRVVRSLCRASGSRPAWAPAALTAPTSQEQPRRHYADKRIKVAKPVVEMDGDEMTRIIWQFIKEKLILPHVDIQLKYFDLGLPNRDQTDDQVTIDSALATQKYSVAVKCATITPDEARVEEFKLKKMWKSPNGTIRNILGGTVFREPIICKNIPRLVPGWTKPITIGRHAHGDQYKATDFVADRAGTFKMVFTPKDGSGVKEWEVYNFPAGGVGMGMYNTDESISGFAHSCFQYAIQKKWPLYMSTKNTILKAYDGRFKDIFQEIFDKHYKTDFDKNKIWYDAAEGEPHSPSLEAFLGDVFL

SEQ ID NO: 759409 - protein, 293 aa, Homo sapiens
AAGTGLRCYGWPSVSPRPGSREERRALGPLPPCSFALQLGMAGYLRVVRSLCRASGSRPAWAPAALTAPTSQEQPRRHYADKRIKVAKPVVEMDGDEMTRIIWQFIKEKLILPHVDIQLKYFDLGLPNRDQTDDQVTIDSALATQKYSVAVKCATITPDEARVEEFKLKKMWKSPNGTIRNILGGTVFREPIICKNIPRLVPGWTKPITIGRHAHGDQYKATDFVADRAGTFKMVFTPKDGSGVKEWEVYNFPAGGVGMGMYNTDEVRLAWASWAPPLPACLFISVSWLSFLL

SEQ ID NO: 759410 - protein, 103 aa, Homo sapiens
  misc_feature (2)..(3): Xaa can be any naturally occurring amino acid
  misc_feature (12)..(12): Xaa can be any naturally occurring amino acid
  misc_feature (23)..(23): Xaa can be any naturally occurring amino acid
  misc_feature (31)..(31): Xaa can be any naturally occurring amino acid
  misc_feature (33)..(34): Xaa can be any naturally occurring amino acid
  misc_feature (41)..(41): Xaa can be any naturally occurring amino acid
MXXISSVWPSPXYGAQKAATGPXPCRLADTXGXXGEVMETXASQFAQMLEKVCVETVESGAMTKDLAGCIHGLSNVKLNEHFLNTTDFLDTIKSNLDRALGRQ

SEQ ID NO: 759411 - protein, 243 aa, Homo sapiens
AAGTGLRCYGWPSVSPRPGSREERRALGPLPPCSFALQLGMAGYLRVVRSLCRASGSRPAWAPAALTAPTSQEQPRRHYADKRIKVAKPVVEMDGDEMTRIIWQFIKEKLILPHVDIQLKYFDLGLPNRDQTDDQVTIDSALATQKYSVAVKCATITPDEARVEEFKLKKMWKSPNGTIRNILGGTVFREPIICKNIPRLVPGWTKPITIGRSPGQAVGGGATHGCSGGARAEPAGPPERGRG

SEQ ID NO: 759412 - protein, 243 aa, Homo sapiens; identical to SEQ ID NO: 759411

SEQ ID NO: 759413 - protein, 299 aa, Homo sapiens
AAGTGLRCYGWPSVSPRPGSREERRALGPLPPCSFALQLGMAGYLRVVRSLCRASGSRPAWAPAALTAPTSQEQPRRHYADKRIKVAKPVVEMDGDEMTRIIWQFIKEKLILPHVDIQLKYFDLGLPNRDQTDDQVTIDSALATQKYSVAVKCATITPDEARVEEFKLKKMWKSPNGTIRNILGGTVFREPIICKNIPRLVPGWTKPITIGRHAHGDQYKGHRHLLARTGARAPFQKWGLSTPKRRCQWDVQGKCGNVVITISPDGELRAIGRIVTKPGRKTISRIGRTQLVTRYTIQD

SEQ ID NO: 759414 - protein, 176 aa, Homo sapiens
MWKSPNGTIRNILGGTVFREPIICKNIPRLVPGWTKPITIGRHAHGDQYKATDFVADRAGTFKMVFTPKDGSGVKEWEVYNFPAGGVGMGMYNTDESISGFAHSCFQYAIQKKWPLYMSTKNTILKAYDGRFKDIFQEIFDKHYKTDFDKNKIWYDAAEGEPHSPSLEAFLGDVFL

SEQ ID NO: 759415 - protein, 135 aa, Homo sapiens
GKRIGRLQSPHICTLDSTAFLMKNFRTPVWLCCCLGFKFWLKDGGCSGTTIISVLTEFKLKKMWKSPNGTIRNILGGTVFREPIICKNIPRLVPGWTKPITIGRSPGQAVGGGATHGCSGGARAEPAGPPERGRG

SEQ ID NO: 759416 - protein, 249 aa, Homo sapiens
  misc_feature (205)..(205): Xaa can be any naturally occurring amino acid
  misc_feature (207)..(207): Xaa can be any naturally occurring amino acid
  misc_feature (214)..(214): Xaa can be any naturally occurring amino acid
  misc_feature (240)..(240): Xaa can be any naturally occurring amino acid
AAGTGLRCYGWPSVSPRPGSREERRALGPLPPCSFALQLGMAGYLRVVRSLCRASGSRPAWAPAALTAPTSQEQPRRHYADKRIKVAKPVVEMDGDEMTRIIWQFIKEKLILPHVDIQLKYFDLGLPNRDQTDDQVTIDSALATQKYSVAVKCATITPDEARVEEFKLKKMWKSPNGTIRNILGGTVFREPIICKNIPRLVPGWXPXLPLGRAXPGAPSPGPAFVGARGGPFPLVFPPPXGRGVPAWAV

SEQ ID NO: 759417 - protein, 139 aa, Homo sapiens
AAGTGLRCYGWPSVSPRPGSREERRALGPLPPCSFALQLGMAGYLRVVRSLCRASGSRPAWAPAALTAPTSQEQPRRHYADKRIKVAKPVVEMDGDEMTRIIWQFIKEKLILPHVDIQLKYFDLGLPNRDQTDDQVTID

SEQ ID NO: 759418 - protein, 160 aa, Homo sapiens
AAGTGLRCYGWPSVSPRPGSREERRALGPLPPCSFALQLGMAGYLRVVRSLCRASGSRPAWAPAALTAPTSQEQPRRHYADKRIKVAKPVVEMDGDEMTRIIWQFIKEKLILPHVDIQLKYFDLGLPNRDQRLSRRVLLSAAEGEPHSPSLEAFLGDVFL

SEQ ID NO: 759419 - protein, 142 aa, Homo sapiens
MRPQRHTYSKKKLMQQGRRAQTTRNKETRNTKKSRRQGKQKKSKAERKQQRETERKKKNRTRKGGRREGEGRRGQGTKRAASEHKEKKRRAGEEEKKQGRGGGGREGGRDDDRGREQRQGGGEETREGNAEEERRQGREQEG

SEQ ID NO: 759420 - protein, 124 aa, Homo sapiens
AAGTGLRCYGWPSVSPRPGSREERRALGPLPPCSFALQLGMAGYLRVVRSLCRASGSRPAWAPAALTAPTSQEQPRRHYADKRIKVAKPVVEMDGDEMTRIIWQFIKEKHNQPHETTNKKKKTT

SEQ ID NO: 759421 - protein, 332 aa, Homo sapiens
  misc_feature (111)..(111): Xaa can be any naturally occurring amino acid
  misc_feature (113)..(113): Xaa can be any naturally occurring amino acid
  misc_feature (115)..(115): Xaa can be any naturally occurring amino acid
  misc_feature (117)..(117): Xaa can be any naturally occurring amino acid
  misc_feature (149)..(149): Xaa can be any naturally occurring amino acid
  misc_feature (152)..(152): Xaa can be any naturally occurring amino acid
  misc_feature (154)..(154): Xaa can be any naturally occurring amino acid
  misc_feature (161)..(161): Xaa can be any naturally occurring amino acid
  misc_feature (168)..(169): Xaa can be any naturally occurring amino acid
  misc_feature (183)..(183): Xaa can be any naturally occurring amino acid
  misc_feature (209)..(209): Xaa can be any naturally occurring amino acid
  misc_feature (218)..(218): Xaa can be any naturally occurring amino acid
  misc_feature (223)..(223): Xaa can be any naturally occurring amino acid
  misc_feature (234)..(234): Xaa can be any naturally occurring amino acid
  misc_feature (237)..(237): Xaa can be any naturally occurring amino acid
  misc_feature (239)..(241): Xaa can be any naturally occurring amino acid
  misc_feature (247)..(247): Xaa can be any naturally occurring amino acid
  misc_feature (249)..(249): Xaa can be any naturally occurring amino acid
AAGTGLRCYGWPSVSPRPGSREERRALGPLPPCSFALQLGMAGYLRVVRSLCRASGSRPAWAPAALTAPTSQEQPRRHYADKRIKVAKPVVEMDGDEMTRIIWQFIKEKHXSXAXVXKHAERYFNHGPTTNTWTHELNDTVVTTLELLXLDXTXKKSCWRXKVVATTXXPEMKVPLWKEVSKXERKNVGKKFPKWKQIRETIPVGGELXLSGVDPIHXVKKTXPTSLVPLCLVXKSXSXXXGGERPXGXTQLQGPQTFVGKNRGPGTFSKMGSFNPKKKVEVRCSGEVRKCGITISPDGELRAIGRIVTKPGRKTISRIGRTQLVTRYTIQD

SEQ ID NO: 759422 - protein, 732 aa, Homo sapiens
MSRRKISSESFSSLGSDYLETSPEEEGECPLSRLCWNGSRSPPGPLEPSPAAAAAAAAPAPTPAASAAAAAATAGARRVQRRRRVNLDSLGESISRLTAPSPQTIQQTLKRTLQYYEHQVIGYRDAEKNFHNISNRCSYADHSNKEEIEDVSGILQCTANILGLKFEEIQKRFGEEFFNICFHENERVLRAVGGTLQDFFNGFDALLEHIRTSFGKQATLESPSFLCKELPEGTLMLHYFHPHHIVGFAMLGMIKAAGKKIYRLDVEVEQVANEKLCSDVSNPGNCSCLTFLIKECENTNIMKNLPQGTSQVPADLRISINTFCRAFPFHLMFDPSMSVLQLGEGLRKQLRCDTHKVLKFEDCFEIVSPKVNATFERVLLRLSTPFVIRTKPEASGSENKDKVMEVKGQMIHVPESNSILFLGSPCVDKLDELMGRGLHLSDIPIHDATRDVILVGEQAKAQDGLKKRMDKLKATLERTHQALEEEKKKTVDLLYSIFPGDVAQQLWQGQQVQARKFDDVTMLFSDIVGFTAICAQCTPMQVISMLNELYTRFDHQCGFLDIYKVETIGDAYCVAAGLHRKSLCHAKPIALMALKMMELSEEVLTPDGRPIQMRIGIHSGSVLAGVVGVRMPRYCLFGNNVTLASKFESGSHPRRINVSPTTYQLLKREESFTFIPRSREELPDNFPKEIPGICYFLEVRTGPKPPKPSLSSSRIKKVSYNIGTMFLRETSL

SEQ ID NO: 759423 - protein, 763 aa, Homo sapiens
MSRRKISSESFSSLGSDYLETSPEEEGECPLSRLCWNGSRSPPGPLEPSPAAAAAAAAPAPTPAASAAAAAATAGARRVQRRRRVNLDSLGESISRLTAPSPQTIQQTLKRTLQYYEHQVIGYRDAEKNFHNISNRCSYADHSNKEEIEDVSGILQCTANILGLKFEEIQKRFGEEFFNICFHENERVLRAVGGTLQDFFNGFDALLEHIRTSFGKQATLESPSFLCKELPEGTLMLHYFHPHHIVGFAMLGMIKAAGKKIYRLDVEVEQVANEKLCSDVSNPGNCSCLTFLIKECENTNIMKNLPQGTSQVPADLRISINTFCRAFPFHLMFDPSMSVLQLGEGLRKQLRCDTHKVLKFEDCFEIVSPKVNATFERVLLRLSTPFVIRTKPEASGSENKDKVMEVKGQMIHVPESNSILFLGSPCVDKLDELMGRGLHLSDIPIHDATRDVILVGEQAKAQDGLKKRMDKLKATLERTHQALEEEKKKTVDLLYSIFPGDVAQQLWQGQQVQARKFDDVTMLFSDIVGFTAICAQCTPMQVISMLNELYTRFDHQCGFLDIYKVETIGDAYCVAAGLHRKSLCHAKPIALMALKMMELSEEVLTPDGRPIQPQRSELLFSFPVSIQLVPDQHQSETDLGTEKMRIGIHSGSVLAGVVGVRMPRYCLFGNNVTLASKFESGSHPRRINVSPTTYQLLKREESFTFIPRSREELPDNFPKEIPGICYFLEVRTGPKPPKPSLSSSRIKKVSYNIGTMFLRETSL

SEQ ID NO: 759424 - protein, 308 aa, Homo sapiens
MNPIVVVHGGGAGPISKDRKERVHQGMVRAATVGYGILREGGSAVDAVEGAVVALEDDPEFNAGCGSVLNTNGEVEMDASIMDGKDLSAGAVSAVQCIANPIKLARLVMEKTPHCFLTDQGAAQFAAAMGVPEIPGEKLVTERNKKRLEKEKHEKGAQKTDCQKNLGTVGAVALDCKGNVAYATSTGGIVNKMVGRVGDSPCLGAGGYADNDIGAVSTTGHGESILKVNLARLTLFHIEQGKTVEEAADLSLGYMKSRVKGLGGLIVVSKTGDWVAKWTSTSMPWAAAKDGKLHFGIDPDDTTITDLP

SEQ ID NO: 759425 - protein, 282 aa, Homo sapiens
MVRAATVGYGILREGGSAVDAVEGAVVALEDDPEFNAGCGSVLNTNGEVEMDASIMDGKDLSAGAVSAVQCIANPIKLARLVMEKTPHCFLTDQGAAQFAAAMGVPEIPGEKLVTERNKKRLEKEKHEKGAQKTDCQKNLGTVGAVALDCKGNVAYATSTGGIVNKMVGRVGDSPCLGAGGYADNDIGAVSTTGHGESILKVNLARLTLFHIEQGKTVEEAADLSLGYMKSRVKGLGGLIVVSKTGDWVAKWTSTSMPWAAAKDGKLHFGIDPDDTTITDLP

SEQ ID NO: 759426 - protein, 106 aa, Homo sapiens [sequence omitted]

SEQ ID NO: 759427 - protein, 232 aa, Homo sapiens
MDASIMDGKDLSAGAVSAVQCIANPIKLARLVMEKTPHCFLTDQGAAQFAAAMGVPEIPGEKLVTERNKKRLEKEKHEKGAQKTDCQKNLGTVGAVALDCKGNVAYATSTGGIVNKMVGRVGDSPCLGAGGYADNDIGAVSTTGHGESILKVNLARLTLFHIEQGKTVEEAADLSLGYMKSRVKGLGGLIVVSKTGDWVAKWTSTSMPWAAAKDGKLHFGIDPDDTTITDLP

SEQ ID NO: 759428 - protein, 292 aa, Homo sapiens
MNPIVVVHGGGAGPISKDRKERVHQGMVRAATVGYGILREGGSAVDAVEGAVVALEDDPEFNAGCGSVLNTNGEVEMDASIMDGKDLSAGAVSAVQCIANPIKLARLVMEKTPHCFLTDQGAAQFAAAMGVPEIPGEKLVTERNKKRLEKEKHEKGAQKTDCQKNLGTVGAVALDCKGNVAYATSTGGIVNKMVGRVGDSPCLGAGGYADNDIGAVSTTGHGESILKVNLARLTPVQCFEILPTSPSSPAGSGAVQCGQHGEESHFLGGQYSSLSLITLEMLFLLYHPCSTF

SEQ ID NO: 759429 - protein, 164 aa, Homo sapiens
MNPIVVVHGGGAGPISKDRKERVHQGMVRAATVGYGILREGGSAVDAVEGAVVALEDDPEFNAGCGSVLNTNGEVEMDASIMDGKDLSAGAVSAVQCIANPIKLARLVMEKTPHCFLTDQGAAQFAAAMGVPEIPGEKLVTERNKKRLEKEKHEKGAQKTDCQK

SEQ ID NO: 759430 - protein, 106 aa, Homo sapiens [sequence omitted]

SEQ ID NO: 759431 - protein, 246 aa, Homo sapiens
MNPIVVVHGGGAGPISKDRKERVHQGMVRAATVGYGILREGGSAVDAVEGAVVALEDDPEFNAGCGSVLNTNGEVEMDASIMDGKDLSAGAVSAVQCIANPIKLARLVMEKTPHCFLTDQGAAQFAAAMGVPEIPGEKLVTERNKKRLEKEKHEKGAQKTDCQKFFRGHKLTTRLTVDVLGNLSSTCPQMTTLYLTFTLEKSTHVGHQMKGWPAPLHLVGVSHQVGRETEKRKKRLGAVGSTPCIP

SEQ ID NO: 759432 - protein, 232 aa, Homo sapiens; identical to SEQ ID NO: 759427

SEQ ID NO: 759433 - protein, 308 aa, Homo sapiens; identical to SEQ ID NO: 759424

SEQ ID NO: 759434 - protein, 180 aa, Homo sapiens
MGVPEIPGEKLVTERNKKRLEKEKHEKGAQKTDCQKNLGTVGAVALDCKGNVAYATSTGGIVNKMVGRVGDSPCLGAGGYADNDIGAVSTTGHGESILKVNLARLTLFHIEQGKTVEEAADLSLGYMKSRVKGLGGLIVVSKTGDWVAKWTSTSMPWAAAKDGKLHFGIDPDDTTITDLP

SEQ ID NO: 759435 - protein, 308 aa, Homo sapiens; identical to SEQ ID NO: 759424

SEQ ID NO: 759436 - protein, 292 aa, Homo sapiens; identical to SEQ ID NO: 759428

SEQ ID NO: 759437 - protein, 138 aa, Homo sapiens
MVRAATVGYGILREGGSAVDAVEGAVVALEDDPEFNAGCGSVLNTNGEVEMDASIMDGKDLSAGAVSAVQCIANPIKLARLVMEKTPHCFLTDQGAAQFAAAMGVPEIPGEKLVTERNKKRLEKEKHEKGAQKTDCQK

SEQ ID NO: 759438 - protein, 76 aa, Homo sapiens
GGGAGPISKDRKERVHQGMVRAATVGYGILREGGSAVDAVEGAVVALEDDPEFNAGKCAFQLVNNVSQVKLLLQNK

SEQ ID NO: 759439 - protein, 49 aa, Homo sapiens
MTSTVNFSDKPSITRSINGKTICSQQHPGGTPCTKTHQWRQMFSMANAD

SEQ ID NO: 759440 - protein, 66 aa, Homo sapiens
RDPPIIGTSLIIGTPPISMNFEVPFAPSGLKVRYLKVFEPKLNYSDHDVIKWVRYIGRSGIYETRC

SEQ ID NO: 759441 - protein, 145 aa, Homo sapiens
ALGLSKDVYNSEYYTSPGLGAAALDVCRSLPHHTSVSPPSCFAAFPLHQPESRSGPSTLQVGPVEQPLGSLGRGVLRLLLSHPPVCPGLMPGSEFCDQSPGGFPFLPTPVATALEWEGWLPLTSELPQRPVMDPRPQSLLCFGIV

SEQ ID NO: 759442 - protein, 251 aa, Homo sapiens
MSPQGQVLSAHVSGRVVMKSYLSGMPECKFGMNDKIVIEKQGKGTADETSKSGKQSIAIDDCTFHQCVRLSKFDSERSISFIPPDGEFELMRYRTTKDIILPFRVIPLVREVGRTKLEVKVVIKSNFKPSLLAQKIEVRIPTPLNTSGVQVICMKGKAKYKASENAIVWKIKRMAGMKESQISAEIELLPTNDKKKWARPPISMNFEVPFAPSGLKVRYLKVFEPKLNYSDHDVIKWVRYIGRSGIYETRC

SEQ ID NO: 759443 - protein, 251 aa, Homo sapiens; identical to SEQ ID NO: 759442

SEQ ID NO: 759444 - protein, 251 aa, Homo sapiens; identical to SEQ ID NO: 759442

SEQ ID NO: 759445 - protein, 251 aa, Homo sapiens; identical to SEQ ID NO: 759442

SEQ ID NO: 759446 - protein, 238 aa, Homo sapiens
MSPQGQVLSAHVSGRVVMKSYLSGMPECKFGMNDKIVIDGKQSIAIDDCTFHQCVRLSKFDSERSISFIPPDGEFELMRYRTTKDIILPFRVIPLVREVGRTKLEVKVVIKSNFKPSLLAQKIEVRIPTPLNTSGVQVICMKGKAKYKASENAIVWKIKRMAGMKESQISAEIELLPTNDKKKWARPPISMNFEVPFAPSGLKVRYLKVFEPKLNYSDHDVIKWVRYIGRSGIYETRC

SEQ ID NO: 759447 - protein, 242 aa, Homo sapiens
MSPQGQVLSAHVSGRVVMKSYLSGMPECKFGMNDKIVIEKQGKGTADETSKSGKQSIAIDDCTFHQCVRLSKFDSERSISFIPPDGEFELMRYRTTKDIILPFRVIPLVREVGRTKLEVKVVIKSNFKPSLLAQKIEVRIPTPLNTSGVQVICMKGKAKYKASENAIVWKIKRMAGMKESQISAEIELLPTNDKKKWARPPISMNFEGMAEEGPRVMPGYAGRPLRDHSDKPLHLRGEETEA

SEQ ID NO: 759448 - protein, 170 aa, Homo sapiens
MSPQGQVLSAHVSGRVVMKSYLSGMPECKFGMNDKIVIEKQGKGTADETSKSGKQSIAIDDCTFHQCVRLSKFDSERSISFIPPDGEFELMRYRTTKDIILPFRVIPLVREVGRTKLEVKVVIKSNFKPSLLAQKIEVRIPTPLNTSGVQVICMKGKAKYKASENAIVWK

SEQ ID NO: 759449 - protein, 211 aa, Homo sapiens
MSPQGQVLSAHVSGRVVMKSYLSGMPECKFGMNDKIVIEKQGKGTADETSKRYRTTKDIILPFRVIPLVREVGRTKLEVKVVIKSNFKPSLLAQKIEVRIPTPLNTSGVQVICMKGKAKYKASENAIVWKIKRMAGMKESQISAEIELLPTNDKKKWARPPISMNFEVPFAPSGLKVRYLKVFEPKLNYSDHDVIKWVRYIGRSGIYETRC

SEQ ID NO: 759450 - protein, 139 aa, Homo sapiens
MSPQGQVLSAHVSGRVVMKSYLSGMPECKFGMNDKIVIEKQGKGTADETSKSGKQSIAIDDCTFHQCVRLSKFDSERSISFIPPDGEFELMRYRTTKDIILPFRVIPLVREVGRTKLEVKVVIKSNFKPSLLAQKIESR

SEQ ID NO: 759451 - protein, 251 aa, Homo sapiens; identical to SEQ ID NO: 759442

SEQ ID NO: 759452 - protein, 196 aa, Homo sapiens
MAAYFGKISEENIKNNFVLIYELLDEILDFGYPQNSETGALKTFISAAGHQESASDKRRAVTDHQPGNWADWLAARGYQSRWVRIPTPLNTSGVQVICMKGKAKYKASENAIVWKIKRMAGMKESQISAEIELLPTNDKKKWARPPISMNFEVPFAPSGLKVRYLKVFEPKLNYSDHDVIKWVRYIGRSGIYETRC

SEQ ID NO: 759453 - protein, 249 aa, Homo sapiens
MSPQGQVLSAHVSGRVVMKSYLSGMPECKFGMNDKIVIEKQGKGTADETSKSGKQSIAIDDCTFHQCVRLSKFDSERSISFIPPDGEFELMRYRTTKDIILPFRVIPLVREVGRTKLEVKVVIKSNFKPSLLAQKIEVRIPTPLNTSGVQVICMKGKAKYKASENAIVWKIKRMAGMKESQISAEIELLPTNDKKKWARPPISMNFEVPFAPSGLKVRYLKVFEPKLNYSDHDVIKWPLRPMKRTHLMR

SEQ ID NO: 759454 - protein, 244 aa, Homo sapiens
MSPQGQVLSAHVSGRVVMKSYLSGMPECKFGMNDKIVIEKQGKGTADETSKSGKQSIAIDDCTFHQCVRLSKFDSERSISFIPPDGEFELMRYRTTKDIILPFRVIPLVREVGRTKLEVKVVIKSNFKPSLLAQKIEVRIPTPLNTSGVQVICMKGKAKYKASENAIVWKIKRMAGMKESQISAEIELLPTNDKKKWARPPISMNFEVPFAPSGLKVRYLKVFEPKLNYSDHDVIKWPSPQLVK

SEQ ID NO: 759455 - protein, 213 aa, Homo sapiens
  misc_feature (209)..(209): Xaa can be any naturally occurring amino acid
MSPQGQVLSAHVSGRVVMKSYLSGMPECKFGMNDKIVIEKQGKGTADETSKSGKQSIAIDDCTFHQCVRLSKFDSERSISFIPPDGEFELMRYRTTKDIILPFRVIPLVREVGRTKLEVKVVIKSNFKPSLLAQKIEVRIPTPLNTSGVQVICMKGKAKYKASENAIVWKIKRMAGMKESQISAEIELLPTNDKKKWARPPISMNFEQXQEAS

SEQ ID NO: 759456 - protein, 243 aa, Homo sapiens
MSPQGQVLSAHVSGRVVMKSYLSGMPECKFGMNDKIVIEKQGKGTADETSKSGKQSIAIDDCTFHQCVRLSKFDSERSISFIPPDGEFELMRYRTTKDIILPFRVIPLVREVGRTKLEVKVVIKSNFKPSLLAQKIEVRIPTPLNTSGVQVICMKGKAKYKASENAIVWKIKRMAGMKESQISAEIELLPTNDKKKWARGGEWRESGGWGREGRHPYQTQTDAAAPWSQGCWPRVAGLEKAQV

SEQ ID NO: 759457 - protein, 170 aa, Homo sapiens; identical to SEQ ID NO: 759448

SEQ ID NO: 759458 - protein, 231 aa, Homo sapiens
MSPQGQVLSAHVSGRVVMKSYLSGMPECKFGMNDKIVIEKQGKGTADETSKSGKQSIAIDDCTFHQCVRLSKFDSERSISFIPPDGEFELMRYRTTKDIILPFRVIPLVREVGRTKLEVKVVIKSNFKPSLLAQKIESRCPTHEHSGVRDLLRGGQLQQRDASVGDQALQLRSKQARGLLQEEKGSPLRMGARLARAEGAGHGQVHTGGATREGPPTGATTGTESWQQGTE

SEQ ID NO: 759459 - protein, 151 aa, Homo sapiens
MSPQGQVLSAHVSGRVVMKSYLSGMPECKFGMNDKIVIEKQGKGTADETSKSGKQSIAIDDCTFHQCVRLSKFDSERSISFIPPDGEFELMRYRTTKDIILPFRVIPLVREVGRTKLEVKVVIKSNFKPSLLAQKIESRCPHPTDTRGECR

SEQ ID NO: 759460 - protein, 167 aa, Homo sapiens
MSPQGQVLSAHVSGRVVMKSYLSGMPECKFGMNDKIVIEKQGKGTADETSKSGKQSIAIDDCTFHQCVRLSKFDSERSISFIPPDGEFELMRYRTTKDIILPFRVIPLVREVGRTKLEVKVVIKSNFKPSLLAQKIELRAPPKASNGSPASVPTLLWDSVSFILYTC

SEQ ID NO: 759461 - protein, 189 aa, Homo sapiens
MSPQGQVLSAHVSGRVVMKSYLSGMPECKFGMNDKIVIEKQGKGTADETSKSGKQSIAIDDCTFHQCVRLSKFDSERSISFIPPDGEFELMRSHNQGLFIYNHKGEVLISRVYRDDIGRNAVDAFRVNVIHARQQVRSPVTNIARTSFFHVKRSNIWLAAVTKQNVNAAMVFEFLYKMCDVMRLLKRIS

SEQ ID NO: 759462 - protein, 93 aa, Homo sapiens
  misc_feature (7)..(7): Xaa can be any naturally occurring amino acid
LGRASVXGRVMAAYFGKISEENIKNNFVLIYELLDEILDFGYPQNSETGALKTFISAAGHQESASDKRRAVTDHQPGNWADWLAARGYQVSSE

SEQ ID NO: 759463 - protein, 66 aa, Homo sapiens; identical to SEQ ID NO: 759440

SEQ ID NO: 759464 - protein, 92 aa, Homo sapiens
DPRVRTHASGKIKRMAGMKESQISAEIELLPTNDKKKWARPPISMNFEVPFAPSGLKVRYLKVFEPKLNYSDHDVIKWVRYIGRSGIYETRC

SEQ ID NO: 759465 - protein, 251 aa, Homo sapiens; identical to SEQ ID NO: 759442

SEQ ID NO: 759466 - protein, 251 aa, Homo sapiens; identical to SEQ ID NO: 759442

SEQ ID NO: 759467 - protein, 254 aa, Homo sapiens
MSPQGQVLSAHVSGRVVMKSYLSGMPECKFGMNDKIVIEKQGKGTADETSKSGKQSIAIDDCTFHQCVRLSKFDSERSISFIPPDGEFELMRYRTTKDIILPFRVIPLVREVGRTKLEVKVVIKSNFKPSLLAQKIESRRVRIPTPLNTSGVQVICMKGKAKYKASENAIVWKIKRMAGMKESQISAEIELLPTNDKKKWARPPISMNFEVPFAPSGLKVRYLKVFEPKLNYSDHDVIKWVRYIGRSGIYETRC

SEQ ID NO: 759468 - protein, 242 aa, Homo sapiens
MSPQGQVLSAHVSGRVVMKSYLSGMPECKFGMNDKIVIEKQGKGTADETSKSGKQSIAIDDCTFHQCVRLSKFDSERSISFIPPDGEFELMRYRTTKDIILPFRVIPLVREVGRTKLEVKVVIKSNFKPSLLAQKIEVRIPTPLNTSGVQVICMKGKAKYKASENAIVWKIKRMAGMKESQISAEIELLPTNDKKKWARPPISMNFEVRYLKVFEPKLNYSDHDVIKWVRYIGRSGIYETRC

SEQ ID NO: 759469 - protein, 251 aa, Homo sapiens; identical to SEQ ID NO: 759442

SEQ ID NO: 759470 - protein, 251 aa, Homo sapiens; identical to SEQ ID NO: 759442

SEQ ID NO: 759471 - protein, 312 aa, Homo sapiens
MSPQGQVLSAHVSGRVVMKSYLSGMPECKFGMNDKIVIEKQGKGTADETSKSGKQSIAIDDCTFHQCVRLSKFDSERSISFIPPDGEFELMRYRTTKDIILPFRVIPLVREVGRTKLEVKVVIKSNFKPSLLAQKIEVRIPTPLNTSGVQVICMKGKAKYKASENAIVWKIKRMAGMKESQISAEIELLPTNDKKKWARPPISMNFEVPFAPSGLKVRYLKVFEPKLNYSDHDVIKWCPGKLPNFPATLLHRVKSRFLPNHTSAAPSFCFGGFPFDQAPARLRPSTFPSRNPSTQPLGVLGKGKLMRPVFPL

SEQ ID NO: 759472 - protein, 242 aa, Homo sapiens; identical to SEQ ID NO: 759447

SEQ ID NO: 759473 - protein, 221 aa, Homo sapiens
MSPQGQVLSAHVSGRVVMKSYLSGMPECKFGMNDKIVIEKQGKGTADETSKSGKQSIAIDDCTFHQCVRLSKFDSERSISFIPPDGEFELMRYRTTKDIILPFRVIPLVREVGRTKLEVKVVIKSNFKPSLLAQKIEVRIPTPLNTSGVQVICMKGKAKYKASENAIVWKIKRMAGMKESQISAEIELLPTNDKKKWARPPISMNFEAIRALWPCTWPSPS

SEQ ID NO: 759474 - protein, 236 aa, Homo sapiens
MSPQGQVLSAHVSGRVVMKSYLSGMPECKFGMNDKIVIEKQGKGTADETSKSGKQSIAIDDCTFHQCVRLSKFDSERSISFIPPDGEFELMRYRTTKDIILPFRVIPLVREVGRTKLEVKVVIKSNFKPSLLAQKIEVPLPPPPHISVSSLLLCCLQPLGSLGRGVLRLLLSHPPVCPGLMPGSEFCDQSPGGFPFLPTPVATALEWEGWLPLTSELPQRPVMDPRPQSLLCFGIV

SEQ ID NO: 759475 - protein, 106 aa, Homo sapiens
MSPQGQVLSAHVSGRVVMKSYLSGMPECKFGMNDKIVIEKQGKGTADETSKSGKQSIAIDDCTFHQCVRLSKFDSERSISFIPPDGEFELMRSHNQGHHPSLPNLS

SEQ ID NO: 759476 - protein, 222 aa, Homo sapiens
WDFGGATLGLPESCHPAAATMLPPGTATLLTLLLAAGSLGQKPQRPRRPASPISTIQPKANFDAQQFAGTWLLVAVGSACRFLQEQGHRAEATTLHVAPQGTAMAVSTFRKLDGICWQVRQLYGDTGVLGRFLLQARGARGAVHVVVAETDYQSFAVLYLERAGQLSVKLYARSLPVSDSVLSGFEQRVQEAHLTEDQIFYFPKYGFCEAADQFHVLDEVRR

SEQ ID NO: 759477 - protein, 113 aa, Homo sapiens
MGTHFLSPILILLLSRGPGSSDRQAWCGSRERAPRGQGTHRPRSQSPPRRLVPGPQDPVCPAARSLPVSDSVLSGFEQRVQEAHLTEDQIFYFPKYGFCEAADQFHVLDEVRR

SEQ ID NO: 759478 - protein, 139 aa, Homo sapiens
MGTHFLSPILILLLSRGPGSSDRQAWCGSRERAPRGQGTHRPRSQSPPRRLVPGPQDPVCPAARSLPVSDSVLSGFEQRVQEAHLTEDQIFYFPKYGFCEAADQFHVLDGECTAGQAWRRGEGGHCHRLSLVSAAEVRR

SEQ ID NO: 759479 - protein, 231 aa, Homo sapiens
WDFGGATLGLPESCHPAAATMLPPGTATLLTLLLAAGSLGQKPQRPRRPASPISTIQPKANFDAQQFAGTWLLVAVGSACRFLQEQGHRAEATTLHVAPQGTAMAVSTFRKLDGICWQVRQLYGDTGVLGRFLLQARGARGAVHVVVAETDYQSFAVLYLERAGQLSVKLYGPQDPVCPAARSLPVSDSVLSGFEQRVQEAHLTEDQIFYFPKYGFCEAADQFHVLDEVRR

SEQ ID NO: 759480 - protein, 110 aa, Homo sapiens
MLSGLAFDWQGPRCCFSLTPLLCRKKVQRSAAYSPSALESAVPLHVDHQMPVQSHLPRGVPAGLAGHHMKHAGATHRPAMEVELLFCGANQNVNFFGCWVDRMRYSKPRV

SEQ ID NO: 759481 - protein, 214 aa, Homo sapiens
YGYEYLGNSPRLVITPLTDRCYRTLFGALHLHLGGAPEGPAGTGKTETTKDLAKAVAKQCVVFNCSDGLDYLALGKFFKGLLSCGAWACFDEFNRIDLEVLSVVAQQILTIQRGINAGADILMFEGTELKLDPTCAVFITMNPGYAGRSELPDNLKALFRTVAMMVPDYAMIAEIVLYSCGFVTARPLSVKIVATYRLCSEQLSSQHHYDYGMR

SEQ ID NO: 759482 - protein, 309 aa, Homo sapiens
GGRRACGAHTAAAGAAATPGSMKDRTQELRTAKDSDDDDDVAVTVDRDRFMDEFFEQVEEIRGFIDKIAENVEEVKRKHSAILASPNPDEKTKEELEELMSDIKKTANKVRSKLKSIEQSIEQEEGLNRSSADLRIRKTQHSTLSRKFVEVMSEYNATQSDYRERCKGRIQRQLEITGRTTTSEELEDMLESGNPAIFASGIIMDSSISKQALSEIETRHSEIIKLENSIRELHDMFMDMAMLVESQGEMIDRIEYNVEHAVDYVERAVSDTKKAVKYQSKARRKKIMIIICCVILGIVIASTVGGIFA

SEQ ID NO: 759483 - protein, 272 aa, Homo sapiens
GGRRACGAHTAAAGAAATPGSMKDRTQELRTAKDSDDDDDVAVTVDRDRFMDEFFEQVEEIRGFIDKIAENVEEVKRKHSAILASPNPDEKTKEELEELMSDIKKTANKVRSKLKSIEQSIEQEEGLNRSSADLRIRKTQHSTLSRKFVEVMSEYNATQSDYRERCKGRIQRQLEITGRTTTSEELEDMLESGNPAIFASGIIMDSSISKQALSEIETRHSEIIKLENSIRELHDMFMDMAMLVESQTMWRGPCLTPRRPSSTRARRAGRKS

SEQ ID NO: 759484 - protein, 296 aa, Homo sapiens
RLVRPELRDEGRTQELRTAKDSDDDDDVAVTVDRDRFMDEFFEQVEEIRGFIDKIAENVEEVKRKHSAILASPNPDEKTKEELEELMSDIKKTANKVRSKLKSIEQSIEQEEGLNRSSADLRIRKTQHSTLSRKFVEVMSEYNATQSDYRERCKGRIQRQLEITGRTTTSEELEDMLESGNPAIFASGIIMDSSISKQALSEIETRHSEIIKLENSIRELHDMFMDMAMLVESQGEMIDRIEYNVEHAVDYVERAVSDTKKAVKYQSKARRKKIMIIICCVILGIVIASTVGGIFA

SEQ ID NO: 759485 - protein, 301 aa, Homo sapiens
GGRRACGAHTAAAGAAATPGSMKDRTQELRTAKDSDDDDDVAVTVDRDRFMDEFFEQVEEIRGFIDKIAENVEEVKRKHSAILASPNPDEKTKEELEELMSDIKKTANKVRSKLKSIEQSIEQEEGLNRSSADLRIRKTQHSTLSRKFVEVMSEYNATQSDYRERCKGRIQRQLEITGRTTTSEELEDMLESGNPAIFASGIIMDSSISKQALSEIETRHSEIIKLENSIRELHDMFMDMAMLVESQVSAGPPCPPLQPTPAPRAALTSPFLPDTLPCRGGTKFSASGCFPEVLPRAPTQP

SEQ ID NO: 759486 - protein, 339 aa, Homo sapiens
GGRRACGAHTAAAGAAATPGSMKDRTQELRTAKDSDDDDDVAVTVDRDRFMDEFFEQVEEIRGFIDKIAENVEEVKRKHSAILASPNPDEKTKEELEELMSDIKKTANKVRSKLKSIEQSIEQEEGLNRSSADLRIRKTQHSTLSRKFVEVMSEYNATQSDYRERCKGRIQRQLEITGRTTTSEELEDMLESGNPAIFASGIIMDSSISKQALSEIETRHSEIIKLENSIRELHDMFMDMAMLVESQPQGAFLKSCPEPQPNPEEGALWSSGAPGPAGEMIDRIEYNVEHAVDYVERAVSDTKKAVKYQSKARRKKIMIIICCVILGIVIASTVGGIFA

SEQ ID NO: 759487 - protein, 137 aa, Homo sapiens
MFGMVAPVVLRSGKSDVISGLQSHPALAILPSMCHVGVTCPRCSIRQPAGEGYLLLLTTLGLLMGNVPPPQDPLPCGQAGRCMRVHAAGDGAVSVCPTLPRLYSCPVTVTTVRVAFLNSDSPQPLHQRSWYNQLPIL

SEQ ID NO: 759488 - protein, 137 aa, Homo sapiens; identical to SEQ ID NO: 759487

SEQ ID NO: 759489 - protein, 309 aa, Homo sapiens; identical to SEQ ID NO: 759482

SEQ ID NO: 759490 - protein, 301 aa, Homo sapiens; identical to SEQ ID NO: 759485

SEQ ID NO: 759491 - protein, 128 aa, Homo sapiens
GGRRACGAHTAAAGAAATPGSMKDRTQELRTAKDSDDDDDVAVTVDRDRFMDEFFEQVEEIRGFIDKIAENVEEVKRKHSAILASPNPDEKTKEELEELMSDIKKTANKVRSKLKSESGLSGGGWGAF

SEQ ID NO: 759492 - protein, 246 aa, Homo sapiens
GGRRACGAHTAAAGAAATPGSMKDRTQELRTAKDSDDDDDVAVTVDRDRFMDEFFEQVEEIRGFIDKIAENVEEVKRKHSAILASPNPDEKTKEELEELMSDIKKTANKVRSKLKSIEQSIEQEEGLNRSSADLRIRKTQHSTLSRKFVEVMSEYNATQSDYRERCKGRIQRQLEITGRTTTSEELEDMLESGNPAIFASGFSWEMCPRPRTLSLVDRQGDACECMQQGMGPCPCAPPSLGFTPAQ

SEQ ID NO: 759493 - protein, 312 aa, Homo sapiens
GGRRACGAHTAAAGAAATPGSMKDRTQELRTAKDSDDDDDVAVTVDRDRFMDEFFEQVEEIRGFIDKIAENVEEVKRKHSAILASPNPDEKTKEELEELMSDIKKTANKVRSKLKSIEQSIEQEEGLNRSSADLRIRKTQVRPRSLGWAGTCVSGSVPAGPDPCTSISGPQHSTLSRKFVEVMSEYNATQSDYRERCKGRIQRQLEITGRTTTSEELEDMLESGNPAIFASGIIMDSSISKQALSEIETRHSEIIKLENSIRELHDMFMDMAMLVESQPQGAFLKSCPEPQPNPEEGALWSSGAPGPAGRDD

SEQ ID NO: 759494 - protein, 381 aa, Homo sapiens
MGCLGGNSKTTEDQGVDEKERREANKKIEKQLQKERLAYKATHRLLLLGAGESGKSTIVKQMRILHVNGFNPEEKKQKILDIRKNVKDAIVTIVSAMSTIIPPVPLANPENQFRSDYIKSIAPITDFEYSQEFFDHVKKLWDDEGVKACFERSNEYQLIDCAQYFLERIDSVSLVDYTPTDQDLLRCRVLTSGIFETRFQVDKVNFHMFDVGGQRDERRKWIQCFNDVTAIIYVAACSSYNMVIREDNNTNRLRESLDLFESIWNNRWLRTISIILFLNKQDMLAEKVLAGKSKIEDYFPEYANYTVPEDATPDAGEDPKVTRAKFFIRDLFLRISTATGDGKHYCYPHFTCAVDTENIRRVFNDCRDIIQRMHLKQYELL

SEQ ID NO: 759495 - protein, 199 aa, Homo sapiens
MGLCYSLRPLLFGGPGDDPCAASEPPVEDAQPAPAPALAPVRAAARDTARTLLPRGGEGSPACARPKADKPKEKRQRTEQLSAEEREAAKEREAVKEARKVSRGIDRMLRDQKRDLQQTHRLLLLGTSGASRGRDLESASQEATGETQVSPRIMEHTFASTPAVFSFLGKYQPLELGQTQESVDTKLASRARLRTQEWH

SEQ ID NO: 759496 - protein, 458 aa, Homo sapiens
MGLCYSLRPLLFGGPGDDPCAASEPPVEDAQPAPAPALAPVRAAARDTARTLLPRGGEGSPACARPKADKPKEKRQRTEQLSAEEREAAKEREAVKEARKVSRGIDRMLRDQKRDLQQTHRLLLLGAGESGKSTIVKQMRILHVNGFNPEEKKQKILDIRKNVKDAIVTIVSAMSTIIPPVPLANPENQFRSDYIKSIAPITDFEYSQEFFDHVKKLWDDEGVKACFERSNEYQLIDCAQYFLERIDSVSLVDYTPTDQDLLRCRVLTSGIFETRFQVDKVNFHMFDVGGQRDERRKWIQCFNDVTAIIYVAACSSYNMVIREDNNTNRLRESLDLFESIWNNRWLRTISIILFLNKQDMLAEKVLAGKSKIEDYFPEYANYTVPEDATPDAGEDPKVTRAKFFIRDLFLRISTATGDGKHYCYPHFTCAVDTENIRRVFNDCRDIIQRMHLKQYELL

SEQ ID NO: 759497 - protein, 589 aa, Homo sapiens
GLFPVLWPFANKCLTRPALPPHSQPPSKSSMSACRSFAVAICILEISILTAQYTTSYDPELTESSGSASHIDCRMSPWSEWSQCDPCLRQMFRSRSIEVFGQFNGKRCTDAVGDRRQCVPTEPCEDAEDDCGNDFQCSTGRCIKMRLRCNGDNDCGDFSDEDDCESEPRPPCRDRVVEESELARTAGYGINILGMDPLSTPFDNEFYNGLCNRDRDGNTLTYYRRPWNVASLIYETKGEKNFRTEHYEEQIEAFKSIIQEKTSNFNAAISLKFTPTETNKAEQCCEETASSISLHGKGSFRFSYSKNETYQLFLSYSSKKEKMFLHVKGEIHLGRFVMRNRDVVLTTTFVDDIKALPTTYEKGEYFAFLETYGTHYSSSGSLGGLYELIYVLDKASMKRKGVELKDIKRCLGYHLDVSLAFSEISVGAEFNKDDCVKRGEGRAVNITSENLIDDVVSLIRGGTRKYAFELKEKLLRGTVIDVTDFVNWASSINDAPVLISQKLSPIYNLVPVKMKNAHLKKQNLERAIEDYINEFSVRKCHTCQNGGTVILMDGKCLCACPFKFEGIACEISKQKISEGLPALEFPNEK

SEQ ID NO: 759498 - protein, 589 aa, Homo sapiens; identical to SEQ ID NO: 759497

SEQ ID NO: 759499 - protein, 571 aa, Homo sapiens
GLFPVLWPFANKCLTRPALPPHSQPPSKSSMSACRSFAVAICILEISILTAQYTTSYDPELTESSGSASHIDCRMSPWSEWSQCDPCLRQMFRSRSIEVFGQFNGKRCTDAVGDRRQCVPTEPCEDAEDDCGNDFQCSTGRCIKMRLRCNGDNDCGDFSDEDDCESEPRPPCRDRVVEESELARTAGYGINILGMDPLSTPFDNEFYNGLCNRDRDGNTLTYYRRPWNVASLIYETKGEKNFRTEHYEEQIEAFKSIIQEKTSNFNAAISLKFTPTETNKAEQCCEETASSISLHGKGSFRFSYSKNETYQLFLSYSSKKEKMFLHVKGEIHLGRFVMRNRDVVLTTTFVDDIKALPTTYAGSLGGLYELIYVLDKASMKRKGVELKDIKRCLGYHLDVSLAFSEISVGAEFNKDDCVKRGEGRAVNITSENLIDDVVSLIRGGTRKYAFELKEKLLRGTVIDVTDFVNWASSINDAPVLISQKLSPIYNLVPVKMKNAHLKKQNLERAIEDYINEFSVRKCHTCQNGGTVILMDGKCLCACPFKFEGIACEISKQKISEGLPALEFPNEK

SEQ ID NO: 759500 - protein, 553 aa, Homo sapiens
GLFPVLWPFANKCLTRPALPPHSQPPSKSSMSACRSFAVAICILEISILTAQYTTSYDPELTESSGSASHIDCRMSPWSEWSQCDPCLRQMFRSRSIEVFGQFNGCEDAEDDCGNDFQCSTGRCIKMRLRCNGDNDCGDFSDEDDCESEPRPPCRDRVVEESELARTAGYGINILGMDPLSTPFDNEFYNGLCNRDRDGNTLTYYRRPWNVASLIYETKGEKNFRTEHYEEQIEAFKSIIQEKTSNFNAAISLKFTPTETNKAEQCCEETASSISLHGKGSFRFSYSKNETYQLFLSYSSKKEKMFLHVKGEIHLGRFVMRNRDVVLTTTFVDDIKALPTTYAGSLGGLYELIYVLDKASMKRKGVELKDIKRCLGYHLDVSLAFSEISVGAEFNKDDCVKRGEGRAVNITSENLIDDVVSLIRGGTRKYAFELKEKLLRGTVIDVTDFVNWASSINDAPVLISQKLSPIYNLVPVKMKNAHLKKQNLERAIEDYINEFSVRKCHTCQNGGTVILMDGKCLCACPFKFEGIACEISKQKISEGLPALEFPNEK

SEQ ID NO: 759501 - protein, 108 aa, Homo sapiens
LGGVFFFLFVSGCWKTPSLRVRFQNPTASQGQGNGAASPTKKKVVAKAKAPKAGQGPNTKAAAPAKGSGSKVVPAHLSRKTEAPKGPRKAGLPIKASSSKVSSQRAEA

SEQ ID NO: 759502 - protein, 68 aa, Homo sapiens
PGQEGCGFHTLVLVRASHLPHLGGPSVSAAAWARQGAACLCWSCLEGGLGGERRTTDLNHSSCEMLEV

SEQ ID NO: 759503 - protein, 153 aa, Homo sapiens
MGVIGIQLVVTMVMASVMQKIIPHYSLARWLLCNGSLRWYQHPTEEELRILAGKQQKGKTKKDRKYNGHIESKPLTIPKDIDLHLETKSVTEVDTLALHYFPEYQWLVDFTVAATVVYLVTEVYYNFMKPTQEMNISLVWCLLVLSFAIRRWW

SEQ ID NO: 759504 - protein, 307 aa, Homo sapiens
MGVIGIQLVVTMVMASVMQKIIPHYSLARWLLCNGSLRWYQHPTEEELRILAGKQQKGKTKKDRKYNGHIESKPLTIPKDIDLHLETKSVTEVDTLALHYFPEYQWLVDFTVAATVVYLVTEVYYNFMKPTQEMNISLVWCLLVLSFAIKVLFSLTTHYFKVEDGGERSVCVTFGFFFFVKAMAVLIVTENYLEFGLETGFTNFSDSAMQFLEKQGLESQSPVSKLTFKFFLAIFCSFIGAFLTFPGLRLAQMHLDALNLATEKITQTLLHINFLAPLFMVLLWVKPITKDYIMNPPLGKEISPSGR

SEQ ID NO: 759505 - protein, 131 aa, Homo sapiens
MPNIPGDLESREAMVAFFNSAGASAQEEQRVCCQPLAHPVASSQKKPEVAAPAPESGGESVFGETHRALQGAMEKLQESTSARGQCQRRSTGRGGHRQAGPGPGGDEGEPAGAAGQVLQLVGDHKEGHGKF

SEQ ID NO: 759506 - protein, 186 aa, Homo sapiens
MAGPGHPDAGLGRPGRHREGRDGRPRPSAVPATPQGGCQSLSPAPSSENIPAPHPPPPPAASAPCQAPPVTPGGSHPGEGVCHLPPGHSSGHPGWGILGPWGAVFGTCVRQGCSDNQVSSTGGGMGMVTVVLLMSPMMLSASFSAWCMCSISSCCCACSANSSISVFWFPHEYILASGSEMMNSGV

SEQ ID NO: 759507 - protein, 186 aa, Homo sapiens; identical to SEQ ID NO: 759506

SEQ ID NO: 759508 - protein, 147 aa, Homo sapiens
MLTRTQRHLHQLPAHSCLACSEDHPSCSGRQGLLTNVRLSFLHLRAFHGSLLPTALNPNKSYSLDFEGSPPCALDLEPLGVWLFTRASIPLRLEDPPPHCLFSLRWGHRGPEEKTPVKCHRSGRGLKTYHAKRTPVYSVFFWWGGGR

SEQ ID NO: 759509 - protein, 129 aa, Homo sapiens [sequence omitted]

SEQ ID NO: 759510 - protein, 186 aa, Homo sapiens; identical to SEQ ID NO: 759506

SEQ ID NO: 759511 - protein, 186 aa, Homo sapiens; identical to SEQ ID NO: 759506

SEQ ID NO: 759512 - protein, 70 aa, Homo sapiens
QRVCCQPLAHPVASSQKKPEVAAPAPESGGESVFGETHRALQGAMEKLQVSRSWHGPTRGAGGQDKAGDS

SEQ ID NO: 759513 - protein, 590 aa, Homo sapiens
MTLHNNSTTSPLFPNISSSWIHSPSDAGLPPGTVTHFGSYNVSRAAGNFSSPDGTTDDPLGGHTVWQVVFIAFLTGILALVTIIGNILVIVSFKVNKQLKTVNNYFLLSLACADLIIGVISMNLFTTYIIMNRWALGNLACDLWLAIDYVASNASVMNLLVISFDRYFSITRPLTYRAKRTTKRAGVMIGLAWVISFVLWAPAILFWQYFVGKRTVPPGECFIQFLSEPTITFGTAIAAFYMPVTIMTILYWRIYKETEKRTKELAGLQASGTEAETENFVHPTGSSRSCSSYELQQQSMKRSNRRKYGRCHFWFTTKSWKPSSEQMDQDHSSSDSWNNNDAAASLENSASSDEEDIGSETRAIYSIVLKLPGHSTILNSTKLPSSDNLQVPEEELGMVDLERKADKLQAQKSVDDGGSFPKSFSKLPIQLESAVDTAKTSDVNSSVGKSTATLPLSFKEATLAKRFALKTRSQITKRKRMSLVKEKKAAQTLSAILLAFIITWTPYNIMVLVNTFCDSCIPKTFWNLGYWLCYINSTVNPVCYALCNKTFRTTFKMLLLCQCDKKKRRKQQYQQRQSVIFHKRAPEQAL

SEQ ID NO: 759514 - protein, 614 aa, Homo sapiens
YRNQITIARDYKAQHNALLCQRVTMTLHNNSTTSPLFPNISSSWIHSPSDAGLPPGTVTHFGSYNVSRAAGNFSSPDGTTDDPLGGHTVWQVVFIAFLTGILALVTIIGNILVIVSFKVNKQLKTVNNYFLLSLACADLIIGVISMNLFTTYIIMNRWALGNLACDLWLAIDYVASNASVMNLLVISFDRYFSITRPLTYRAKRTTKRAGVMIGLAWVISFVLWAPAILFWQYFVGKRTVPPGECFIQFLSEPTITFGTAIAAFYMPVTIMTILYWRIYKETEKRTKELAGLQASGTEAETENFVHPTGSSRSCSSYELQQQSMKRSNRRKYGRCHFWFTTKSWKPSSEQMDQDHSSSDSWNNNDAAASLENSASSDEEDIGSETRAIYSIVLKLPGHSTILNSTKLPSSDNLQVPEEELGMVDLERKADKLQAQKSVDDGGSFPKSFSKLPIQLESAVDTAKTSDVNSSVGKSTATLPLSFKEATLAKRFALKTRSQITKRKRMSLVKEKKAAQTLSAILLAFIITWTPYNIMVLVNTFCDSCIPKTFWNLGYWLCYINSTVNPVCYALCNKTFRTTFKMLLLCQCDKKKRRKQQYQQRQSVIFHKRAPEQAL

SEQ ID NO: 759515 - protein, 114 aa, Homo sapiens
SETGTAASKHDIQGHLEAGFGPWFVSLTHSFNNCLLCVYWVPDTGLRHRAPSRKPNGQPPALVDCIFLLQWSCLYSAKMDFVPRYLCPPSCKGVQIKQLGKKGGRDEGTGRSLV

SEQ ID NO: 759516 - protein, 1358 aa, Homo sapiens
IGIPASDGRPVPPRPVTAPRRPRGPARAGGGGPSRGSGGGGRGGLRADGRAPGLRGLGAAPHCPAGLGPGAMSGGGGGGGSAPSRFADYFVICGLDTETGLEPDELSALCQYIQASKARDGASPFISSTTEGENFEQTPLRRTFKSKVLARYPENVEWNPFDQDAVGMLCMPKGLAFKTQADPREPQFHAFIITREDGSRTFGFALTFYEEVTSKQICSAMQTLYHMHNAEYDVLHAPPADDRDQSSMEDGEDTPVTKLQRFNSYDISRDTLYVSKCICLITPMSFMKACRSVLEQLHQAVTSPQPPPLPLESYIYNVLYEVPLPPPGRSLKFSGVYGPIICQRPSTNELPLFDFPVKEVFELLGVENVFQLFTCALLEFQILLYSQHYQRLMTVAETITALMFPFQWQHVYVPILPASLLHFLDAPVPYLMGLHSNGLDDRSKLELPQEANLCFVDIDNHFIELPEDLPQFPNKLEFVQEVSEILMAFGIPPEGNLHCSESASKLKRLRASELVSDKRNGNIAGSPLHSYELLKENETIARLQALVKRTGVSLEKLEVREDPSSNKDLKVQCDEEELRIYQLNIQIREVFANRFTQMFADYEVFVIQPSQDKESWFTNREQMQNFDKASFLSDQPEPYLPFLSRFLETQMFASFIDNKIMCHDDDDKDPVLRVFDSRVDKIRLLNVRTPTLRTSMYQKCTTVDEAEKAIELRLAKIDHTAIHPHLLDMKIGQGKYEPGFFPKLQSDVLSTGPASNKWTKRNAPAQWRRKDRQKQHTEHLRLDNDQREKYIQEARTMGSTIRQPKLSNLSPSVIAQTNWKFVEGLLKECRNKTKRMLVEKMGREAVELGHGEVNITGVEENTLIASLCDLLERIWSHGLQVKQGKSALWSHLLHYQDNRQRKLTSGSLSTSGILLDSERRKSDASSLMPPLRISLIQDMRHIQNIGEIKTDVGKARAWVRLSMEKKLLSRHLKQLLSDHELTKKLYKRYAFLRCDDEKEQFLYHLLSFNAVDYFCFTNVFTTILIPYHILIVPSKKLGGSMFTANPWICISGELGETQIMQIPRNVLEMTFECQNLGKLTTVQIGHDNSGLYAKWLVEYVMVRNEITGHTYKFPCGRWLGKGMDDGSLERILVGELLTSQPEVDERPCRTPPLQQSPSVIRRLVTISPNNKPKLNTGQIQESIGEAVNGIVKHFHKPEKERGSLTLLLCGECGLVSALEQAFQHGFKSPRLFKNVFIWDFLEKAQTYYETLEKNEVVPEENWHTRARNFCRFVTAINNTPRNIGKDGKFQMLVCLGARDHLLHHWIALLADCPITAHMYEDVALIKDHTLVNSLIRVLQTLQEFNITLETSLVKGIDI

SEQ ID NO: 759517 - protein, 280 aa, Homo sapiens
RLGRAWVVNSPRKSDASSLMPPLRISLIQDMRHIQNIGEIKTDVGKARAWVRLSMEKKLLSRHLKQLLSDHELTKKLYKRYAFLRCDDEKEQFLYHLLSFNAVDYFCFTNVFTTILIPYHILIVPSKKLGGSMFTANPWICISGELGETQIMQIPRNVLEMTFECQNLGKLTTVQIGHDNSGLYAKWLVEYVMVRNEITGHTYKFPCGRWLGKGMDDGSLERILVGELLTSQPEVDERPCRTPPLQQSPSVIRRLVTISPNNKPKLKTADQESRGAARLE

SEQ ID NO: 759518 - protein, 223 aa, Homo sapiens
IGIPASDGRPVPPRPVTAPRRPRGPARAGGGGPSRGSGGGGRGGLRADGRAPGLRGLGAAPHCPAGLGPGAMSGGGGGGGSAPSRFADYFVICGLDTETGLEPDELSGAAKPHIFETQKLDLMTEVSELKLKLVGMEKEQREQEEKQKKQRSYCKSSGTSEIKVEELENERNQYEWKLKATKAEVAQLQEQVALKDAEIERLHSQLSRTAALHSESHTERDQE

SEQ ID NO: 759519 - protein, 1370 aa, Homo sapiens
IGIPASDGRPVPPRPVTAPRRPRGPARAGGGGPSRGSGGGGRGGLRADGRAPGLRGLGAAPHCPAGLGPGAMSGGGGGGGSAPSRFADYFVICGLDTETGLEPDELSALCQYIQASKARDGASPFISSTTEEIIEMHSLFWILGENFEQTPLRRTFKSKVLARYPENVEWNPFDQDAVGMLCMPKGLAFKTQADPREPQFHAFIITREDGSRTFGFALTFYEEVTSKQICSAMQTLYHMHNAEYDVLHAPPADDRDQSSMEDGEDTPVTKLQRFNSYDISRDTLYVSKCICLITPMSFMKACRSVLEQLHQAVTSPQPPPLPLESYIYNVLYEVPLPPPGRSLKFSGVYGPIICQRPSTNELPLFDFPVKEVFELLGVENVFQLFTCALLEFQILLYSQHYQRLMTVAETITALMFPFQWQHVYVPILPASLLHFLDAPVPYLMGLHSNGLDDRSKLELPQEANLCFVDIDNHFIELPEDLPQFPNKLEFVQEVSEILMAFGIPPEGNLHCSESASKLKRLRASELVSDKRNGNIAGSPLHSYELLKENETIARLQALVKRTGVSLEKLEVREDPSSNKDLKVQCDEEELRIYQLNIQIREVFANRFTQMFADYEVFVIQPSQDKESWFTNREQMQNFDKASFLSDQPEPYLPFLSRFLETQMFASFIDNKIMCHDDDDKDPVLRVFDSRVDKIRLLNVRTPTLRTSMYQKCTTVDEAEKAIELRLAKIDHTAIHPHLLDMKIGQGKYEPGFFPKLQSDVLSTGPASNKWTKRNAPAQWRRKDRQKQHTEHLRLDNDQREKYIQEARTMGSTIRQPKLSNLSPSVIAQTNWKFVEGLLKECRNKTKRMLVEKMGREAVELGHGEVNITGVEENTLIASLCDLLERIWSHGLQVKQGKSALWSHLLHYQDNRQRKLTSGSLSTSGILLDSERRKSDASSLMPPLRISLIQDMRHIQNIGEIKTDVGKARAWVRLSMEKKLLSRHLKQLLSDHELTKKLYKRYAFLRCDDEKEQFLYHLLSFNAVDYFCFTNVFTTILIPYHILIVPSKKLGGSMFTANPWICISGELGETQIMQIPRNVLEMTFECQNLGKLTTVQIGHDNSGLYAKWLVEYVMVRNEITGHTYKFPCGRWLGKGMDDGSLERILVGELLTSQPEVDERPCRTPPLQQSPSVIRRLVTISPNNKPKLNTGQIQESIGEAVNGIVKHFHKPEKERGSLTLLLCGECGLVSALEQAFQHGFKSPRLFKNVFIWDFLEKAQTYYETLEKNEVVPEENWHTRARNFCRFVTAINNTPRNIGKDGKFQMLVCLGARDHLLHHWIALLADCPITAHMYEDVALIKDHTLVNSLIRVLQTLQEFNITLETSLVKGIDI

SEQ ID NO: 759520 - protein, 962 aa, Homo sapiens
DGPWVGENSCNEGHVYVPILPASLLHFLDAPVPYLMGLHSNGLDDRSKLELPQEANLCFVDIDNHFIELPEDLPQFPNKLEFVQEVSEILMAFGIPPEGNLHCSESASKLKRLRASELVSDKRNGNIAGSPLHSYELLKENETIARLQALVKRTGVSLEKLEVREDPSSNKDLKVQCDEEELRIYQLNIQIREVFANRFTQMFADYEVFVIQPSQDKESWFTNREQMQNFDKASFLSDQPEPYLPFLSRFLETQMFASFIDNKIMCHDDDDKDPVLRVFDSRVDKIRLLNVRTPTLRTSMYQKCTTVDEAEKAIELRLAKIDHTAIHPHLLDMKIGQGKYEPGFFPKLQSDVLSTGPASNKWTKRNAPAQWRRKDRQKQHTEHLRLDNDQREKYIQEARTMGSTIRQPKLSNLSPSVIAQTNWKFVEGLLKECRNKTKRMLVEKMGREAVELGHGEVNITGVEENTLIASLCDLLERIWSHGLQVKQGKSALWSHLLHYQDNRQRKLTSGSLSTSGILLDSERRKSDASSLMPPLRISLIQDMRHIQNIGEIKTDVGKARAWVRLSMEKKLLSRHLKQLLSDHELTKKLYKRYAFLRCDDEKEQFLYHLLSFNAVDYFCFTNVFTTILIPYHILIVPSKKLGGSMFTANPWICISGELGETQIMQIPRNVLEMTFECQNLGKLTTVQIGHDNSGLYAKWLVEYVMVRNEITGHTYKFPCGRWLGKGMDDGSLERILVGELLTSQPEVDERPCRTPPLQQSPSVIRRLVTISPNNKPKLNTGQIQESIGEAVNGIVKHFHKPEKERGSLTLLLCGECGLVSALEQAFQHGFKSPRLFKNVFIWDFLEKAQTYYETLEKNEVVPEENWHTRARNFCRFVTAINNTPRNIGKDGKFQMLVCLGARDHLLHHWIALLADCPITAHMYEDVALIKDHTLVNSLIRVLQTLQEFNITLETSLVKGIDI

SEQ ID NO: 759521 - protein, 1358 aa, Homo sapiens; identical to SEQ ID NO: 759516

SEQ ID NO: 759522 - protein, 630 aa, Homo sapiens
MKIGQGKYEPGFFPKLQSDVLSTGPASNKWTKRNAPAQWRRKDRQKQHTEHLRLDNDQREKYIQEARTMGSTIRQPKLSNLSPSVIAQTNWKFVEGLLKECRNKTKRMLVEKMGREAVELGHGEVNITGVEENTLIASLCDLLERIWSHGLQVKQGKSALWSHLLHYQDNRQRKLTSGSLSTSGILLDSERRKSDASSLMPPLRISLIQDMRHIQNIGEIKTDVGKARAWVRLSMEKKLLSRHLKQLLSDHELTKKLYKRYAFLRCDDEKEQFLYHLLSFNAVDYFCFTNVFTTILIPYHILIVPSKKLGGSMFTANPWICISGELGETQIMQIPRNVLEMTFECQNLGKLTTVQIGHDNSGLYAKWLVEYVMVRNEITGHTYKFPCGRWLGKGMDDGSLERILVGELLTSQPEVDERPCRTPPLQQSPSVIRRLVTISPNNKPKLNTGQIQESIGEAVNGIVKHFHKPEKERGSLTLLLCGECGLVSALEQAFQHGFKSPRLFKNVFIWDFLEKAQTYYETLEKNEVVPEENWHTRARNFCRFVTAINNTPRNIGKDGKFQMLVCLGARDHLLHHWIALLADCPITAHMYEDVALIKDHTLVNSLIRVLQTLQEFNITLETSLVKGIDI

SEQ ID NO: 759523 - protein, 569 aa, Homo sapiens
LYSDWSLHTGTIRQPKLSNLSPSVIAQTNWKFVEGLLKECRNKTKRMLVEKMGREAVELGHGEVNITGVEENTLIASLCDLLERIWSHGLQVKQGKSALWSHLLHYQDNRQRKLTSGSLSTSGILLDSERRKSDASSLMPPLRISLIQDMRHIQNIGEIKTDVGKARAWVRLSMEKKLLSRHLKQLLSDHELTKKLYKRYAFLRCDDEKEQFLYHLLSFNAVDYFCFTNVFTTILIPYHILIVPSKKLGGSMFTANPWICISGELGETQIMQIPRNVLEMTFECQNLGKLTTVQIGHDNSGLYAKWLVEYVMVRNEITGHTYKFPCGRWLGKGMDDGSLERILVGELLTSQPEVDERPCRTPPLQQSPSVIRRLVTISPNNKPKLNTGQIQESIGEAVNGIVKHFHKPEKERGSLTLLLCGECGLVSALEQAFQHGFKSPRLFKNVFIWDFLEKAQTYYETLEKNEVVPEENWHTRARNFCRFVTAINNTPRNIGKDGKFQMLVCLGARDHLLHHWIALLADCPITAHMYEDVALIKDHTLVNSLIRVLQTLQEFNITLETSLVKGIDI

SEQ ID NO: 759524 - protein, 562 aa, Homo sapiens [sequence omitted]

SEQ ID NO: 759525 - protein, 1156 aa, Homo sapiens
IGIPASDGRPVPPRPVTAPRRPRGPARAGGGGPSRGSGGGGRGGLRADGRAPGLRGLGAAPHCPAGLGPGAMSGGGGGGGSAPSRFADYFVICGLDTETGLEPDELSALCQYIQASKARDGASPFISSTTEGENFEQTPLRRTFKSKVLARYPENVEWNPFDQDAVGMLCMPKGLAFKTQADPREPQFHAFIITREDGSRTFGFALTFYEEVTSKQICSAMQTLYHMHNAEYDVLHAPPADDRDQSSMEDGEDTPVTKLQRFNSYDISRDTLYVSKCICLITPMSFMKACRSVLEQLHQAVTSPQPPPLPLESYIYNVLYEVPLPPPGRSLKFSGVYGPIICQRPSTNELPLFDFPVKEVFELLGVENVFQLFTCALLEFQILLYSQHYQRLMTVAETITALMFPFQWQHVYVPILPASLLHFLDAPVPYLMGLHSNGLDDRSKLELPQEANLCFVDIDNHFIELPEDLPQFPNKLEFVQEVSEILMAFGIPPEGNLHCSESASKLKRLRASELVSDKRNGNIAGSPLHSYELLKENETIARLQALVKRTGVSLEKLEVREDPSSNKDLKVQCDEEELRIYQLNIQIREVFANRFTQMFADYEVFVIQPSQDKESWFTNREQMQNFDKASFLSDQPEPYLPFLSRFLETQMFASFIDNKIMCHDDDDKDPVLRVFDSRVDKIRLLNVRTPTLRTSMYQKCTTVDEAEKAIELRLAKIDHTAIHPHLLDMKIGQGKYEPGFFPKLQSDVLSTGPASNKWTKRNAPAQWRRKDRQKQHTEHLRLDNDQREKYIQEARTMGSTIRQPKLSNLSPSVIAQTNWKFVEGLLKECRNKTKRMLVEKMGREAVELGHGEVNITGVEENTLIASLCDLLERIWSHGLQVKQGKSALWSHLLHYQDNRQRKLTSGSLSTSGILLDSERRKSDASSLMPPLRISLIQDMRHIQNIGEIKTDVGKARAWVRLSMEKKLLSRHLKQLLSDHELTKKLYKRYAFLRCDDEKEQFLYHLLSFNAVDYFCFTNVFTTILIPYHILIVPSKKLGGSMFTANPWICISGELGETQIMQIPRNVLEMTFECQNLGKLTTVQIGHDNSGLYAKWLVEYVMVRNEITGHTYKFPCGRWLGKGMDDGSLERILVGELLTSQLSSGGLLPSHPTTSPS

SEQ ID NO: 759526 - protein, 1004 aa, Homo sapiens
IGIPASDGRPVPPRPVTAPRRPRGPARAGGGGPSRGSGGGGRGGLRADGRAPGLRGLGAAPHCPAGLGPGAMSGGGGGGGSAPSRFADYFVICGLDTETGLEPDELSALCQYIQASKARDGASPFISSTTEGENFEQTPLRRTFKSKVLARYPENVEWNPFDQDAVGMLCMPKGLAFKTQADPREPQFHAFIITREDGSRTFGFALTFYEEVTSKQICSAMQTLYHMHNAEYDVLHAPPADDRDQSSMEDGEDTPVTKLQRFNSYDISRDTLYVSKCICLITPMSFMKACRSVLEQLHQAVTSPQPPPLPLESYIYNVLYEVPLPPPGRSLKFSGVYGPIICQRPSTNELPLFDFPVKEVFELLGVENVFQLFTCALLEFQILLYSQHYQRLMTVAETITALMFPFQWQHVYVPILPASLLHFLDAPVPYLMGLHSNGLDDRSKLELPQEANLCFVDIDNHFIELPEDLPQFPNKLEFVQEVSEILMAFGIPPEGNLHCSESASKLKRLRASELVSDKRNGNIAGSPLHSYELLKENETIARLQALVKRTGVSLEKLEVREDPSSNKDLKVQCDEEELRIYQLNIQIREVFANRFTQMFADYEVFVIQPSQDKESWFTNREQMQNFDKASFLSDQPEPYLPFLSRFLETQMFASFIDNKIMCHDDDDKDPVLRVFDSRVDKIRLLNVRTPTLRTSMYQKCTTVDEAEKAIELRLAKIDHTAIHPHLLDMKIGQGKYEPGFFPKLQSDVLSTGPASNKWTKRNAPAQWRRKDRQKQHTEHLRLDNDQREKYIQEARTMGSTIRQPKLSNLSPSVIAQTNWKFVEGLLKECRNKTKRMLVEKMGREAVELGHGEVNITGVEENTLIASLCDLLERIWSHGLQVKQGKSALWSHLLHYQDNRQRKLTSGSLSTSGILLDSERRKSDASSLMPPLRISLIQDMRHIQNIGEIKTDVGKARAWVRLSMEKKLLSRHLKQLLSDHELTKKLYKRYAFLRCDDEKEQFLYH

SEQ ID NO: 759527 - protein, 1014 aa, Homo sapiens
IGIPASDGRPVPPRPVTAPRRPRGPARAGGGGPSRGSGGGGRGGLRADGRAPGLRGLGAAPHCPAGLGPGAMSGGGGGGGSAPSRFADYFVICGLDTETGLEPDELSALCQYIQASKARDGASPFISSTTEGENFEQTPLRRTFKSKVLARYPENVEWNPFDQDAVGMLCMPKGLAFKTQADPREPQFHAFIITREDGSRTFGFALTFYEEVTSKQICSAMQTLYHMHNAEYDVLHAPPADDRDQSSMEDGEDTPVTKLQRFNSYDISRDTLYVSKCICLITPMSFMKACRSVLEQLHQAVTSPQPPPLPLESYIYNVLYEVPLPPPGRSLKFSGVYGPIICQRPSTNELPLFDFPVKEVFELLGVENVFQLFTCALLEFQILLYSQHYQRLMTVAETITALMFPFQWQHVYVPILPASLLHFLDAPVPYLMGLHSNGLDDRSKLELPQEANLCFVDIDNHFIELPEDLPQFPNKLEFVQEVSEILMAFGIPPEGNLHCSESASKLKRLRASELVSDKRNGNIAGSPLHSYELLKENETIARLQALVKRTGVSLEKLEVREDPSSNKDLKVQCDEEELRIYQLNIQIREVFANRFTQMFADYEVFVIQPSQDKESWFTNREQMQNFDKASFLSDQPEPYLPFLSRFLETQMFASFIDNKIMCHDDDDKDPVLRVFDSRVDKIRLLNVRTPTLRTSMYQKCTTVDEAEKAIELRLAKIDHTAIHPHLLDMKIGQGKYEPGFFPKLQSDVLSTGPASNKWTKRNAPAQWRRKDRQKQHTEHLRLDNDQREKYIQEARTMGSTIRQPKLSNLSPSVIAQTNWKFVEGLLKECRNKTKRMLVEKMGREAVELGHGEVNITGVEENTLIASLCDLLERIWSHGLQVKQGKSALWSHLLHYQDNRQRKLTSGSLSTSGILLDSERRKSDASSLMPPLRISLIQDMRHIQNIGEIKTDVGKARAWVRLSMEKKLLSRHLKQLLSDHELTNDPVPHSDRTKQEAGGLHVHCQPMDLYIRRIG

SEQ ID NO: 759528 - protein, 1378 aa, Homo sapiens
IGIPASDGRPVPPRPVTAPRRPRGPARAGGGGPSRGSGGGGRGGLRADGRAPGLRGLGAAPHCPAGLGPGAMSGGGGGGGSAPSRFADYFVICGLDTETGLEPDELSALCQYIQASKARDGASPFISSTTEGENFEQTPLRRTFKSKVLARYPENVEWNPFDQDAVGMLCMPKGLAFKTQADPREPQFHAFIITREDGSRTFGFALTFYEEVTSKQICSAMQTLYHMHNAEYDVLHAPPADDRDQSSMEDGEDTPVTKLQRFNSYDISRDTLYVSKCICLITPMSFMKACRSVLEQLHQAVTSPQPPPLPLESYIYNVLYEVPLPPPGRSLKFSGVYGPIICQRPSTNELPLFDFPVKEVFELLGVENVFQLFTCALLEFQILLYSQHYQRLMTVAETITALMFPFQWQHVYVPILPASLLHFLDAPVPYLMGLHSNGLDDRSKLELPQEANLCFVDIDNHFIELPEDLPQFPNKLEFVQEVSEILMAFGIPPEGNLHCSESASKLKRLRASELVSDKRNGNIAGSPLHSYELLKENETIARLQALVKRTGVSLEKLEVREDPSSNKDLKVQCDEEELRIYQLNIQIREVFANRFTQMFADYEVFVIQPSQDKESWFTNREQMQNFDKASFLSDQPEPYLPFLSRFLETQMFASFIDNKIMCHDDDDKDPVLRVFDSRVDKIRLLNVRTPTLRTSMYQKCTTVDEAEKAIELRLAKIDHTAIHPHLLDMKIGQGKYEPGFFPKLQSDVLSTGPASNKWTKRNAPAQWRRKDRQKQHTEHLRLDNDQREKYIQEARTMGSTIRQPKLSNLSPSVIAQTNWKFVEGLLKECRNKTKRMLVEKMGREAVELGHGEVNITGVEENTLIASLCDLLERIWSHGLQVKQGKSALWSHLLHYQDNRQRKLTSGSLSTSGILLDSERRKSDASSLMPPLRISLIQDMRHIQNIGEIKTDVGKARAWVRLSMEKKLLSRHLKQLLSDHELTKKLYKRYAFLRCDDEKEQFLYHLLSFNAVDYFCFTNVFTTILIPYHILIVPSKKLGGSMFTANPWICISGELGETQIMQIPRNVLEMTFECQNLGKLTTVQIGHDNSGLYAKWLVEYVMVRNEITGHTYKFPCGRWLGKGMDDGSLERILVGELLTSQPEVDERPCRTPPLQQSPSVIRRLVTISPNNKPKLNTGQIQESIGEAVNGIVKHFHKPEKERGSLTLLLCGECGLVSALEQAFQHGFKSPRLFKNVFIWDFLEKAQTYYETLEKNEVVPEENWHTRARNFCRFVTAINNTPRNIGKDGKFQMLVCLGARVIMKIKSLMSVPAHAECYVRDHLLHHWIALLADCPITAHMYEDVALIKDHTLVNSLIRVLQTLQEFNITLETSLVKGIDI

SEQ ID NO: 759529 - protein, 1312 aa, Homo sapiens
IGIPASDGRPVPPRPVTAPRRPRGPARAGGGGPSRGSGGGGRGGLRADGRAPGLRGLGAAPHCPAGLGPGAMSGGGGGGGSAPSRFADYFVICGLDTETGLEPDELSALCQYIQASKARDGASPFISSTTEGENFEQTPLRRTFKSKVLARYPENVEWNPFDQDAVGMLCMPKGLAFKTQADPREPQFHAFIITREDGSRTFGFALTFYEEVTSKQICSAMQTLYHMHNAEYDVLHAPPADDRDQSSMEDGEDTPVTKLQRFNSYDISRDTLYVSKCICLITPMSFMKACRSVLEQLHQAVTSPQPPPLPLESYIYNVLYEVPLPPPGRSLKFSGVYGPIICQRPSTNELPLFDFPVKEVFELLGVENVFQLFTCALLEFQILLYSQHYQRLMTVAETITALMFPFQWQHVYVPILPASLLHFLDAPVPYLMGLHSNGLDDRSKLELPQEANLCFVDIDNHFIELPEDLPQFPNKLEFVQEVSEILMAFGIPPEGNLHCSESASKLKRLRASELVSDKRNGNIAGSPLHSYELLKENETIARLQALVKRTGVSLEKLEVREDPSSNKDLKVQCDEEELRIYQLNIQIREVFANRFTQMFADYEVFVIQPSQDKESWFTNREQMQNFDKASFLSDQPEPYLPFLSRFLETQMFASFIDNKIMCHDDDDKDPVLRVFDSRVDKIRLLNVRTPTLRTSMYQKCTTVDEAEKAIELRLAKIDHTAIHPHLLDMKIGQGKYEPGFFPKLQSDVLSTGPASNKWTKRNAPAQWRRKDRQKQHTEHLRLDNDQREKYIQEARTMGSTIRQPKLSNLSPSVIAQTNWKFVEGLLKECRNKTKRMLVEKMGREAVELGHGEVNITGVEENTLIASLCDLLERIWSHGLQVKQGKSALWSHLLHYQDNRQRKLTSGSLSTSGILLDSERRKSDASSLMPPLRISLIQDMRHIQNIGEIKTDVGKARAWVRLSMEKKLLSRHLKQLLSDHELTKKLYKRYAFLRCDDEKEQFLYHLLSFNAVDYFCFTNVFTTILIPYHILIVPSKKLGGSMFTANPWICISGELGETQIMQIPRNVLEMTFECQNLGKLTTVQIGHDNSGLYAKWLVEYVMVRNEITGHTYKFPCGRWLGKGMDDGSLERILVGELLTSQPEVDERPCRTPPLQQSPSVIRRLVTISPNNKPKLNTGQIQESIGEAVNGIVKHFHKPEKERGSLTLLLCGECGLVSALEQAFQHGFKSPRLFKNVFIWDFLEKAQTYYETLEKNEVVPEENWHTRARNFCRFVTAINNTPRNIGKDEITSYTTGLPCWLTAPSLHTCMRMWH

SEQ ID NO: 759530 - protein, 1359 aa, Homo sapiens
IGIPASDGRPVPPRPVTAPRRPRGPARAGGGGPSRGSGGGGRGGLRADGRAPGLRGLGAAPHCPAGLGPGAMSGGGGGGGSAPSRFADYFVICGLDTETGLEPDELSALCQYIQASKARDGASPFISSTTEGENFEQTPLRRTFKSKVLARYPENVEWNPFDQDAVGMLCMPKGLAFKTQADPREPQFHAFIITREDGSRTFGFALTFYEEVTSKQICSAMQTLYHMHNAEYDVLHAPPADDRDQSSMEDGEDTPVTKLQRFNSYDISRDTLYVSKCICLITPMSFMKACRSVLEQLHQAVTSPQPPPLPLESYIYNVLYEVPLPPPGRSLKFSGVYGPIICQRPSTNELPLFDFPVKEVFELLGVENVFQLFTCALLEFQILLYSQHYQRLMTVAETITALMFPFQWQHVYVPILPASLLHFLDAPVPYLMGLHSNGLDDRSKLELPQEANLCFVDIDNHFIELPEDLPQFPNKLEFVQEVSEILMAFGIPPEGNLHCSESASKLKRLRASELVSDKRNGNIAGSPLHSYELLKENETIARLQALVKRTGVSLEKLEVREDPSSNKDLKVQCDEEELRIYQLNIQIREVFANRFTQMFADYEVFVIQPSQDKESWFTNREQMQNFDKASFLSDQPEPYLPFLSRFLETQMFASFIDNKIMCHDDDDKDPVLRVFDSRVDKIRLLNVRTPTLRTSMYQKCTTVDEAEKAIELRLAKIDHTAIHPHLLDMKIGQGKYEPGFFPKLQSDVLSTGPASNKWTKRNAPAQWRRKDRQKQHTEHLRLDNDQREKYIQEARTMGSTIRQPKLSNLSPSVIAQTNWKFVEGLLKECRNKTKRMLVEKMGREAVELGHGEVNITGVEENTLIASLCDLLERIWSHGLQVKQGKSALWSHLLHYQDNRQRKLTSGSLSTSGILLDSERRKSDASSLMPPLRISLIQDMRHIQNIGEIKTDVGKARAWVRLSMEKKLLSRHLKQLLSDHELTKKLYKRYAFLRCDDEKEQFLYHLLSFNAVDYFCFTNVFTTILIPYHILIVPSKKLGGSMFTANPWICISGELGETQIMQIPRNVLEMTFECQNLGKLTTVQIGHDNSGLYAKWLVEYVMVRNEITGHTYKFPCGRWLGKGMDDGSLERILVGELLTSQPEVDERPCRTPPLQQSPSVIRRLVTISPNNKPKLNTGQIQESIGEAVNGIVKHFHKPEKERGSLTLLLCGECGLVSALEQAFQHGFKSPRLFKNVFIWDFLEKAQTYYETLEKNEVVPEENWHTRARNFCRFVTAINNTPRNIGKDEITSYTTGLPCWTDQRPYTCQFLDSCAADIAGVQHHAGDVPCQGHRHLTSQHQPAAGLRKTHPAALTFFPKGT

SEQ ID NO: 759531 - protein, 1004 aa, Homo sapiens; identical to SEQ ID NO: 759526

SEQ ID NO: 759532 - protein, 1358 aa, Homo sapiens; identical to SEQ ID NO: 759516

SEQ ID NO: 759533 - protein, 313 aa, Homo sapiens
SKVISSTFLGICMICVSPNSPDIQILGCQNLGKLTTVQIGHDNSGLYAKWLVEYVMVRNEITGHTYKFPCGRWLGKGMDDGSLERILVGELLTSQPEVDERPCRTPPLQQSPSVIRRLVTISPNNKPKLNTGQIQESIGEAVNGIVKHFHKPEKERGSLTLLLCGECGLVSALEQAFQHGFKSPRLFKNVFIWDFLEKAQTYYETLEKNEVVPEENWHTRARNFCRFVTAINNTPRNIGKDGKFQMLVCLGARDHLLHHWIALLADCPITAHMYEDVALIKDHTLVNSLIRVLQTLQEFNITLETSLVKGIDI

SEQ ID NO: 759534 - protein, 318 aa, Homo sapiens
MGPSQGCEEEGYVQHVGSEGQGHRAHTHTLGTGEGSLLSTDTKEFKQSPPGTVLQNGESDHSRNEITGHTYKFPCGRWLGKGMDDGSLERILVGELLTSQPEVDERPCRTPPLQQSPSVIRRLVTISPNNKPKLNTGQIQESIGEAVNGIVKHFHKPEKERGSLTLLLCGECGLVSALEQAFQHGFKSPRLFKNVFIWDFLEKAQTYYETLEKNEVVPEENWHTRARNFCRFVTAINNTPRNIGKDGKFQMLVCLGARDHLLHHWIALLADCPITAHMYEDVALIKDHTLVNSLIRVLQTLQEFNITLETSLVKGIDI

SEQ ID NO: 759535 - protein, 159 aa, Homo sapiens
MRGSLTLLLCGECGLVSALEQAFQHGFKSPRLFKNVFIWDFLEKAQTYYETLEKNEVVPEENWHTRARNFCRFVTAINNTPRNIGKDGKFQMLVCLGARDHLLHHWIALLADCPITAHMYEDVALIKDHTLVNSLIRVLQTLQEFNITLETSLVKGIDI

SEQ ID NO: 759536 - protein, 1212 aa, Homo sapiens
IGIPASDGRPVPPRPVTAPRRPRGPARAGGGGPSRGSGGGGRGGLRADGRAPGLRGLGAAPHCPAGLGPGAMSGGGGGGGSAPSRFADYFVICGLDTETGLEPDELSALCQYIQASKARDGASPFISSTTEGENFEQTPLRRTFKSKVLARYPENVEWNPFDQDAVGMLCMPKGLAFKTQADPREPQFHAFIITREDGSRTFGFALTFYEEVTSKQICSAMQTLYHMHNAEYDVLHAPPADDRDQSSMEDGEDTPVTKLQRFNSYDISRDTLYVSKCICLITPMSFMKACRSVLEQLHQAVTSPQPPPLPLESYIYNVLYEVPLPPPGRSLKFSGVYGPIICQRPSTNELPLFDFPVKEVFELLGVENVFQLFTCALLEFQILLYSQHYQRLMTVAETITALMFPFQWQHVYVPILPASLLHFLDAPVPYLMGLHSNGLDDRSKLELPQEANLCFVDIDNHFIELPEDLPQFPNKLEFVQEVSEILMAFGIPPEGNLHCSESASKLKRLRASELVSDKRNGNIAGSPLHSYELLKENETIARLQALVKRTGVSLEKLEVREDPSSNKDLKVQCDEEELRIYQLNIQIREVFANRFTQMFADYEVFVIQPSQDKESWFTNREQMQNFDKASFLSDQPEPYLPFLSRFLETQMFASFIDNKIMCHDDDDKDPVLRVFDSRVDKIRLLNVRTPTLRTSMYQKCTTVDEAEKAIELRLAKIDHTAIHPHLLDMKIGQGKYEPGFFPKLQSDVLSTGPASNKWTKRNAPAQWRRKDRQKQHTEHLRLDNDQREKYIQEARTMGSTIRQPKLSNLSPSVIAQTNWKFVEGLLKECRNKTKRMLVEKMGREAVELGHGEVNITGVEENTLIASLCDLLERIWSHGLQVKQGKSALWSHLLHYQDNRQRKLTSGSLSTSGILLDSERRKSDASSLMPPLRISLIQDMRHIQNIGEIKTDVGKARAWVRLSMEKKLLSRHLKQLLSDHELTKKLYKRYAFLRCDDEKEQFLYHLLSFNAVDYFCFTNVFTTILIPYHILIVPSKKLGGSMFTANPWICISGELGETQIMQIPRNVLEMTFECQNLGKLTTVQIGHDNSGLYAKWLVEYVMVRNEITGHTYKFPCGRWLGKGMDDGSLERILVGELLTSQPEVDERPCRTPPLQQSPSVIRRLVTISPNNKPKLNTGQIQESIGEAVNGIVKHFHKPEKEVSLPALQSRALH

SEQ ID NO: 759537 - protein, 735 aa, Homo sapiens
IGIPASDGRPVPPRPVTAPRRPRGPARAGGGGPSRGSGGGGRGGLRADGRAPGLRGLGAAPHCPAGLGPGAMSGGGGGGGSAPSRFADYFVICGLDTETGLEPDELSALCQYIQASKARDGASPFISSTTEGENFEQTPLRRTFKSKVLARYPENVEWNPFDQDAVGMLCMPKGLAFKTQADPREPQFHAFIITREDGSRTFGFALTFYEEVTSKQICSAMQTLYHMHNAEYDVLHAPPADDRDQSSMEDGEDTPVTKLQRFNSYDISRDTLYVSKCICLITPMSFMKACRSVLEQLHQAVTSPQPPPLPLESYIYNVLYEVPLPPPGRSLKFSGVYGPIICQRPSTNELPLFDFPVKEVFELLGVENVFQLFTCALLEFQILLYSQHYQRLMTVAETITALMFPFQWQHVYVPILPASLLHFLDAPVPYLMGLHSNGLDDRSKLELPQEANLCFVDIDNHFIELPEDLPQFPNKLEFVQEVSEILMAFGIPPEGNLHCSESASKLKRLRASELVSDKRNGNIAGSPLHSYELLKENETIARLQALVKRTGVSLEKLEVREDPSSNKDLKVQCDEEELRIYQLNIQIREVFANRFTQMFADYEVFVIQPSQDKESWFTNREQMQNFDKASFLSDQPEPYLPFLSRFLETQMFASFIDNKIMCHDDDDKDPVLRVFDSRVDKIRLLNVRTPTLRTSMYQKCTTVDEAVCICVRLLLDSLFCFIDLLVYIYTNTTLS

SEQ ID NO: 759538 - protein, 728 aa, Homo sapiens
IGIPASDGRPVPPRPVTAPRRPRGPARAGGGGPSRGSGGGGRGGLRADGRAPGLRGLGAAPHCPAGLGPGAMSGGGGGGGSAPSRFADYFVICGLDTETGLEPDELSALCQYIQASKARDGASPFISSTTEGENFEQTPLRRTFKSKVLARYPENVEWNPFDQDAVGMLCMPKGLAFKTQADPREPQFHAFIITREDGSRTFGFALTFYEEVTSKQICSAMQTLYHMHNAEYDVLHAPPADDRDQSSMEDGEDTPVTKLQRFNSYDISRDTLYVSKCICLITPMSFMKACRSVLEQLHQAVTSPQPPPLPLESYIYNVLYEVPLPPPGRSLKFSGVYGPIICQRPSTNELPLFDFPVKEVFELLGVENVFQLFTCALLEFQILLYSQHYQRLMTVAETITALMFPFQWQHVYVPILPASLLHFLDAPVPYLMGLHSNGLDDRSKLELPQEANLCFVDIDNHFIELPEDLPQFPNKLEFVQEVSEILMAFGIPPEGNLHCSESASKLKRLRASELVSDKRNGNIAGSPLHSYELLKENETIARLQALVKRTGVSLEKLEVREDPSSNKDLKVQCDEEELRIYQLNIQIREVFANRFTQMFADYEVFVIQPSQDKESWFTNREQMQNFDKASFLSDQPEPYLPFLSRFLETQMFASFIDNKIMCHDDDDKDPVLRVFDSRVDKIRLLNVRTPTLRTSMYQKCTTVDEAGKASLEMYIQASWIMALTCPFS

SEQ ID NO: 759539 - protein, 416 aa, Homo sapiens
IGIPASDGRPVPPRPVTAPRRPRGPARAGGGGPSRGSGGGGRGGLRADGRAPGLRGLGAAPHCPAGLGPGAMSGGGGGGGSAPSRFADYFVICGLDTETGLEPDELSALCQYIQASKARDGASPFISSTTEGENFEQTPLRRTFKSKVLARYPENVEWNPFDQDAVGMLCMPKGLAFKTQADPREPQFHAFIITREDGSRTFGFALTFYEEVTSKQICSAMQTLYHMHNAEYDVLHAPPADDRDQSSMEDGEDTPVTKLQRFNSYDISRDTLYVSKCICLITPMSFMKACRSVLEQLHQAVTSPQPPPLPLESYIYNVLYEVPLPPPGRSLKFSGVYGPIICQRPSTNELPLFDFPVKEVFELLGVENVFQLFTCALLEFQILLYSQRKSVLTRAFCLPQASLLSMFRYSEADCKG

SEQ ID NO: 759540 - protein, 636 aa, Homo sapiens
IGIPASDGRPVPPRPVTAPRRPRGPARAGGGGPSRGSGGGGRGGLRADGRAPGLRGLGAAPHCPAGLGPGAMSGGGGGGGSAPSRFADYFVICGLDTETGLEPDELSALCQYIQASKARDGASPFISSTTEGENFEQTPLRRTFKSKVLARYPENVEWNPFDQDAVGMLCMPKGLAFKTQADPREPQFHAFIITREDGSRTFGFALTFYEEVTSKQICSAMQTLYHMHNAEYDVLHAPPADDRDQSSMEDGEDTPVTKLQRFNSYDISRDTLYVSKCICLITPMSFMKACRSVLEQLHQAVTSPQPPPLPLESYIYNVLYEVPLPPPGRSLKFSGVYGPIICQRPSTNELPLFDFPVKEVFELLGVENVFQLFTCALLEFQILLYSQHYQRLMTVAETITALMFPFQWQHVYVPILPASLLHFLDAPVPYLMGLHSNGLDDRSKLELPQEANLCFVDIDNHFIELPEDLPQFPNKLEFVQEVSEILMAFGIPPEGNLHCSESASKLKRLRASELVSDKRNGNIAGSPLHSYELLKENETIARLQALVKRTGVSLEKLEVREDPSSNKDLKVQCDEEELRIYQLNIQIREVFANRFTQMFADYEVFVIQPSQDKESWFTNRERHMRWGSSRSTAGSK

SEQ ID NO: 759541 - protein, 686 aa, Homo sapiens
IGIPASDGRPVPPRPVTAPRRPRGPARAGGGGPSRGSGGGGRGGLRADGRAPGLRGLGAAPHCPAGLGPGAMSGGGGGGGSAPSRFADYFVICGLDTETGLEPDELSALCQYIQASKARDGASPFISSTTEGENFEQTPLRRTFKSKVLARYPENVEWNPFDQDAVGMLCMPKGLAFKTQADPREPQFHAFIITREDGSRTFGFALTFYEEVTSKQICSAMQTLYHMHNAEYDVLHAPPADDRDQSSMEDGEDTPVTKLQRFNSYDISRDTLYVSKCICLITPMSFMKACRSVLEQLHQAVTSPQPPPLPLESYIYNVLYEVPLPPPGRSLKFSGVYGPIICQRPSTNELPLFDFPVKEVFELLGVENVFQLFTCALLEFQILLYSQHYQRLMTVAETITALMFPFQWQHVYVPILPASLLHFLDAPVPYLMGLHSNGLDDRSKLELPQEANLCFVDIDNHFIELPEDLPQFPNKLEFVQEVSEILMAFGIPPEGNLHCSESASKLKRLRASELVSDKRNGNIAGSPLHSYELLKENETIARLQALVKRTGVSLEKLEVREDPSSNKDLKVQCDEEELRIYQLNIQIREVFANRFTQMFADYEVFVIQPSQDKESWFTNREQMQNFDKASFLSDQPEPYLPFLSRFLETQMFASFIDNKIMCHDDDDKDPVLRVFDSRVDKIRLHA

SEQ ID NO: 759542 - protein, 598 aa, Homo sapiens
EKTSDSSHRPSRHGFLFLRLVGLSPFSYLCVPPSRPVPGSPRSLSAMRLLPLAPGRLRRGSPRHLPSCSPALLLLVLGGCLGVFGVAAGTRRPNVVLLLTDDQDEVLGGMTPLKKTKALIGEMGMTFSSAYVPSALCCPSRASILTGKYPHNHHVVNNTLEGNCSSKSWQKIQEPNTFPAILRSMCGYQTFFAGKYLNEYGAPDAGGLEHVPLGWSYWYALEKNSKYYNYTLSINGKARKHGENYSVDYLTDVLANVSLDFLDYKSNFEPFFMMIATPAPHSPWTAAPQYQKAFQNVFAPRNKNFNIHGTNKHWLIRQAKTPMTNSSIQFLDNAFRKRWQTLLSVDDLVEKLVKRLEFTGELNNTYIFYTSDNGYHTGQFSLPIDKRQLYEFDIKVPLLVRGPGIKPNQTSKMLVANIDLGPTILDIAGYDLNKTQMDGMSLLPILRGASNLTWRSDVLVEYQGEGRNVTDPTCPSLSPGVSQCFPDCVCEDAYNNTYACVRTMSALWNLQYCEFDDQEVFVEVYNLTADPDQITNIAKTIDPELLGKMNYRLMMLQSCSGPTCRTPGVFDPGYRFDPRLMFSNRGSVRTRRFSKHLL

SEQ ID NO: 759543 - protein, 4357 aa, Homo sapiens
MATMIPPVKLKWLEHLNSSWITEDSESIATREGVAVLYSKLVSNKEVVPLPQQVLCLKGPQLPDFERESLSSDEQDHYLDALLSSQLALAKMVCSDSPFAGALRKRLLVLQRVFYALSNKYHDKGKVKQQQHSPESSSGSADVHSVSERPRSSTDALIEMGVRTGLSLLFALLRQSWMMPVSGPGLSLCNDVIHTAIEVVSSLPPLSLANESKIPPMGLDCLSQVTTFLKGVTIPNSGADTLGRRLASELLLGLAAQRGSLRYLLEWIEMALGASAVVHTMEKGKLLSSQEGMISFDCFMTILMQMRRSLGSSADRSQWREPTRTSDGLCSLYEAALCLFEEVCRMASDYSRTCASPDSIQTGDAPIVSETCEVYVWGSNSSHQLVEGTQEKILQPKLAPSFSDAQTIEAGQYCTFVISTDGSVRACGKGSYGRLGLGDSNNQSTLKKLTFEPHRSIKKVSSSKGSDGHTLAFTTEGEVFSWGDGDYGKLGHGNSSTQKYPKLIQGPLQGKVVVCVSAGYRHSAAVTEDGELYTWGEGDFGRLGHGDSNSRNIPTLVKDISNVGEVSCGSSHTIALSKDGRTVWSFGGGDNGKLGHGDTNRVYKPKVIEALQGMFIRKVCAGSQSSLALTSTGQVYAWGCGACLGCGSSEATALRPKLIEELAATRIVDVSIGDSHCLALSHDNEVYAWGNNSMGQCGQGNSTGPITKPKKVSGLDGIAIQQISAGTSHSLAWTALPRDRQVVAWHRPYCVDLEESTFSHLRSFLERYCDKINSEIPPLPFPSSREHHSFLKLCLKLLSNHLALALAGGVATSILGRQAGPLRNLLFRLMDSTVPDEIQEVVIETLSVGATMLLPPLRERMELLHSLLPQGPDRWESLSKGQRMQLDIILTSLQDHTHVASLLGYSSPSDAADLSSVCTGYGNLSDQPYGTQSCHPDTHLAEILMKTLLRNLGFYTDQAFGELEKNSDKFLLGTSSSENSQPAHLHELLCSLQKQLLAFCHINNISENSSSVALLHKHLQLLLPHATDIYSRSANLLKESPWNGSVGEKLRDVIYVSAAGSMLCQIVNSLLLLPVSVARPLLSYLLDLLPPLDCLNRLLPAADLLEDQELQWPLHGGPELIDPAGLPLPQPAQSWVWLVDLERTIALLIGRCLGGMLQGSPVSPEEQDTAYWMKTPLFSDGVEMDTPQLDKCMSCLLEVALSGNEEQKPFDYKLRPEIAVYVDLALGCSKEPARSLWISMQDYAVSKDWDSATLSNESLLDTVSRFVLAALLKHTNLLSQACGESRYQPGKHLSEVYRCVYKVRSRLLACKNLELIQTRSSSRDRWISENQDSADVDPQEHSFTRTIDEEAEMEEQAERDREEGHPEPEDEEEEREHEVMTAGKIFQCFLSAREVARSRDRDRMNSGAGSGARADDPPPQSQQERRVSTDLPEGQDVYTAACNSVIHRCALLILGVSPVIDELQKRREEGQLQQPSTSASEGGGLMTRSESLTAESRLVHTSPNYRLIKSRSESDLSQPESDEEGYALSGRRNVDLDLAASHRKRGPMHSQLESLSDSWARLKHSRDWLCNSSYSFESDFDLTKSLGVHTLIENVVSFVSGDVGNAPGFKEPEESMSTSPQASIIAMEQQQLRAELRLEALHQILVLLSGMEEKGSISLAGSRLSSGFQSSTLLTSVRLQFLAGCFGLGTVGHTGAKGESGRLHHYQDGIRAAKRNIQIEIQVAVHKIYQQLSATLERALQANKHHIEAQQRLLLVTVFALSVHYQPVDVSLAISTGLLNVLSQLCGTDTMLGQPLQLLPKTGVSQLSTALKVASTRLLQILAITTGTYADKLSPKVVQSLLDLLCSQLKNLLSQTGVLHMASFGEGEQEDGEEEEKKVDSSGETEKKDFRAALRKQHAAELHLGDFLVFLRRVVSSKAIQSKMASPKWTEVLLNIASQKCSSGIPLVGNLRTRLLALHVLEAVLPACESGVEDDQMAQIVERLFSLLSDCMWETPIAQAKHAIQIKEKEQEIKLQKQGELEEEDENLPIQEVSFDPEKAQCCLVENGQILTHGSGGKGYGLASTGVTSGCYQWKFYIVKENRGNEGTCVGVSRWPVHDFNHRTTSDMWLYRAYSGNLYHNGEQTLTLSSFTQGDFITCVLDMEARTISFGKNGEEPKLAFEDVDAAELYPCVMFYSSNPGEKVKICDMQMRGTPRDLLPGDPICSPVAAVLAEATIQLIRILHRTDRWTYCINKKMMERLHKIKICIKESGQKLKKSRSVQSREENEMREEKESKEEEKGKHTRHGLADLSELQLRTLCIEVWPVLAVIGGVDAGLRVGGRCVHKQTGRHATLLGVVKEGSTSAKVQWDEAEITISFPTFWSPSDTPLYNLEPCEPLPFDVARFRGLTASVLLDLTYLTGVHEDMGKQSTKRHEKKHRHESEEKGDVEQKPESESALDMRTGLTSDDVKSQSTTSSKSENEIASFSLDPTLPSVESQHQITEGKRKNHEHMSKNHDVAQSEIRAVQLSYLYLGAMKSLSALLGCSKYAELLLIPKVLAENGHNSDCASSPVVHEDVEMRAALQFLMRHMVKRAVMRSPIKRALGLADLERAQAMIYKLVVHGLLEDQFGGKIKQEIDQQAEESDPAQQAQTPVTTSPSASSTTSFMSSSLEDTTTATTPVTDTETVPASESPGVMPLSLLRQMFSSYPTTTVLPTRRAQTPPISSLPTSPSDEVGRRQSLTSPDSQSARPANRTALSDPSSRLSTSPPPPAIAVPLLEMGFSLRQIAKAMEATGARGEADAQNITVLAMWMIEHPGHEDEEEPQSGSTADSRPGAAVLGSGGKSNDPCYLQSPGDIPSADAAEMEEGFSESPDNLDHTENAASGSGPSARGRSAVTRRHKFDLAARTLLARAAGLYRSVQAHRNQSRREGISLQQDPGALYDFNLDEELEIDLDDEAMEAMFGQDLTSDNDILGMWIPEVLDWPTWHVCESEDREEVVVCELCECSVVSFNQHMKRNHPGCGRSANRQGYRSNGSYVDGWFGGECGSGNPYYLLCGTCREKYLAMKTKSKSTSSERYKGQAPDLIGKQDSVYEEDWDMLDVDEDEKLTGEEEFELLAGPLGLNDRRIVPEPVQFPDSDPLGASVAMVTATNSMEETLMQIGCHGSVEKSSSGRITLGEQAAALANPHDRVVALRRVTAAAQVLLARTMVMRALSLLSVSGSSCSLAAGLESLGLTDIRTLVRLMCLAAAGRAGLSTSPSAMASTSERSRGGHSKANKPISCLAYLSTAVGCLASNAPSAAKLLVQLCTQNLISAATGVNLTTVDDSIQRKFLPSFLRGIAEENKLVTSPNFVVTQALVALLADKGAKLRPNYDKSEVEKKGPLELANALAACCLSSRLSSQHRQWAAQQLVRTLAAHDRDNQTTLQTLADMGGDLRKCSFIKLEAHQNRVMTCVWCNKKGLLATSGNDGTIRVWNVTKKQYSLQQTCVFNRLEGDAEESLGSPSDPSFSPVSWSISGKYLAGALEKMVNIWQVNGGKGLVDIQPHWVSALAWPEEGPATAWSGESPELLLVGRMDGSLGLIEVVDVSTMHRRELEHCYRKDVSVTCIAWFSEDRPFAVGYFDGKLLLGTKEPLEKGGIVLIDAHKDTLISMKWDPTGHILMTCAKEDSVKLWGSISGCWCCLHSLCHPSIVNGIAWCRLPGKGSKLQLLMATGCQSGLVCVWRIPQDTTQTNVTSAEGWWDQESNCQDGYRKSSGAKCVYQLRGHITPVRTVAFSSDGLALVSGGLGGLMNIWSLRDGSVLQTVVIGSGAIQTTVWIPEVGVAACSNRSKDVLVVNCTAEWAAANHVLATCRTALKQQGVLGLNMAPCMRAFLERLPMMLQEQYAYEKPHVVCGDQLVHSPYMQCLASLAVGLHLDQLLCNPPVPPHHQNCLPDPASWNPNEWAWLECFSTTIKAAEALTNGAQFPESFTVPDLEPVPEDELVFLMDNSKWINGMDEQIMSWATSRPEDWHLGGKCDVYLWGAGRHGQLAEAGRNVMVPAAAPSFSQAQQVICGQNCTFVIQANGTVLACGEGSYGRLGQGNSDDLHVLTVISALQGFVVTQLVTSCGSDGHSMALTESGEVFSWGDGDYGKLGHGNSDRQRRPRQIEALQGEEVVQMSCGFKHSAVVTSDGKLFTFGNGDYGRLGLGNTSNKKLPERVTALEGYQIGQVACGLNHTLAVSADGSMVWAFGDGDYGKLGLGNSTAKSSPQKIDVLCGIGIKKVACGTQFSVALTKDGHVYTFGQDRLIGLPEGRARNHNRPQQIPVLAGVIIEDVAVGAEHTLALASNGDVYAWGSNSEGQLGLGHTNHVREPTLVTGLQGKNVRQISAGRCHSAA

SEQ ID NO: 759544 - protein, 74 aa, Homo sapiens
AAAYYYYCSEFKLLTMYGLEAVLPACESGVEDDQMAQVFIFKIIRRCFPYLQNDSPKSVLNSLFSCKCVFYSIA

SEQ ID NO: 759545 - protein, 3756 aa, Homo sapiens
MATMIPPVKLKWLEHLNSSWITEDSESIATREGVAVLYSKLVSNKEVVPLPQQVLCLKGPQLPDFERESLSSDEQDHYLDALLSSQLALAKMVCSDSPFAGALRKRLLVLQRVFYALSNKYHDKGKVKQQQHSPESSSGSADVHSVSERPRSSTDALIEMGVRTGLSLLFALLRQSWMMPVSGPGLSLCNDVIHTAIEVVSSLPPLSLANESKIPPMGLDCLSQVTTFLKGVTIPNSGADTLGRRLASELLLGLAAQRGSLRYLLEWIEMALGASAVVHTMEKGKLLSSQEGMISFDCFMTILMQMRRSLGSSADRSQWREPTRTSDGLCSLYEAALCLFEEVCRMASDYSRTCASPDSIQTGDAPIVSETCEVYVWGSNSSHQLVEGTQEKILQPKLAPSFSDAQTIEAGQYCTFVISTDGSVRACGKGSYGRLGLGDSNNQSTLKKLTFEPHRSIKKVSSSKGSDGHTLAFTTEGEVFSWGDGDYGKLGHGNSSTQKYPKLIQGPLQGKVVVCVSAGYRHSAAVTEDGELYTWGEGDFGRLGHGDSNSRNIPTLVKDISNVGEVSCGSSHTIALSKDGRTVWSFGGGDNGKLGHGDTNRVYKPKVIEALQGMFIRKVCAGSQSSLALTSTGQVYAWGCGACLGCGSSEATALRPKLIEELAATRIVDVSIGDSHCLALSHDNEVYAWGNNSMGQCGQGNSTGPITKPKKVSGLDGIAIQQISAGTSHSLAWTALPRDRQVVAWHRPYCVDLEESTFSHLRSFLERYCDKINSEIPPLPFPSSREHHSFLKLCLKLLSNHLALALAGGVATSILGRQAGPLRNLLFRLMDSTVPDEIQEVVIETLSVGATMLLPPLRERMELLHSLLPQGPDRWESLSKGQRMQLDIILTSLQDHTHVASLLGYSSPSDAADLSSVCTGYGNLSDQPYGTQSCHPDTHLAEILMKTLLRNLGFYTDQAFGELEKNSDKFLLGTSSSENSQPAHLHELLCSLQKQLLAFCHINNISENSSSVALLHKHLQLLLPHATDIYSRSANLLKESPWNGSVGEKLRDVIYVSAAGSMLCQIVNSLLLLPVSVARPLLSYLLDLLPPLDCLNRLLPAADLLEDQELQWPLHGGPELIDPAGLPLPQPAQSWVWLVDLERTIALLIGRCLGGMLQGSPVSPEEQDTAYWMKTPLFSDGVEMDTPQLDKCMSCLLEVALSGNEEQKPFDYKLRPEIAVYVDLALGCSKEPARSLWISMQDYAVSKDWDSATLSNESLLDTVSRFVLAALLKHTNLLSQACGESRQELKTILRQIFALMMSEIRELFYFGSSFRYQPGKHLSEVYRCVYKVRSRLLACKNLELIQTRSSSRDRWISENQDSADVDPQEHSFTRTIDEEAEMEEQAERDREEGHPEPEDEEEEREHEVMTAGKIFQCFLSAREVARSRDRDRMNSGAGSGARADDPPPQSQQERRVSTDLPEGQDVYTAACNSVIHRCALLILGVSPVIDELQKRREEGQLQQPSTSASEGGGLMTRSESLTAESRLVHTSPNYRLIKSRSESDLSQPESDEEGYALSGRRNVDLDLAASHRKRGPMHSQLESLSDSWARLKHSRDWLCNSSYSFESDFDLTKSLGVHTLIENVVSFVSGDVGNAPGFKEPEESMSTSPQASIIAMEQQQLRAELRLEALHQILVLLSGMEEKGSISLAGSRLSSGFQSSTLLTSVRLQFLAGCFGLGTVGHTGAKGESGRLHHYQDGIRAAKRNIQIEIQVAVHKIYQQLSATLERALQANKHHIEAQQRLLLVTVFALSVHYQPVDVSLAISTGLLNVLSQLCGTDTMLGQPLQLLPKTGVSQLSTALKVASTRLLQILAITTGTYADKLSPKVVQSLLDLLCSQLKNLLSQTGVLHMASFGEGEQEDGEEEEKKVDSSGETEKKDFRAALRKQHAAELHLGDFLVFLRRVVSSKAIQSKMASPKWTEVLLNIASQKCSSGIPLVGNLRTRLLALHVLEAVLPACESGVEDDQMAQIVERLFSLLSDCMWETPIAQAKHAIQIKEKEQEIKLQKQGELEEEDENLPIQEVSFDPEKAQCCLVENGQILTHGSGGKGYGLASTGVTSGCYQWKFYIVKENRGNEGTCVGVSRWPVHDFNHRTTSDMWLYRAYSGNLYHNGEQTLTLSSFTQGDFITCVLDMEARTISFGKNGEEPKLAFEDVDAAELYPCVMFYSSNPGEKVKICDMQMRGTPRDLLPGDPICSPVAAVLAEATIQLIRILHRTDRWTYCINKKMMERLHKIKICIKESGQKLKKSRSVQSREENEMREEKESKEEEKGKHTRHGLADLSELQLRTLCIEVWPVLAVIGGVDAGLRVGGRCVHKQTGRHATLLGVVKEGSTSAKVQWDEAEITISFPTFWSPSDTPLYNLEPCEPLPFDVARFRGLTASVLLDLTYLTGVHEDMGKQSTKRHEKKHRHESEEKGDVEQKPESESALDMRTGLTSDDVKSQSTTSSKSENEIASFSLDPTLPSVESQHQITEGKRKNHEHMSKNHDVAQSEIRAVQLSYLYLGAMKSLSALLGCSKYAELLLIPKVLAENGHNSDCASSPVVHEDVEMRAALQFLMRHMVKRAVMRSPIKRALGLADLERAQAMIYKLVVHGLLEDQFGGKIKQEIDQQAEESDPAQQAQTPVTTSPSASSTTSFMSSSLEDTTTATTPVTDTETVPASESPGVMPLSLLRQMFSSYPTTTVLPTRRAQTPPISSLPTSPSDEVGRRQSLTSPDSQSARPANRTALSDPSSRLSTSPPPPAIAVPLLEMGFSLRQIAKAMEATGARGEADAQNITVLAMWMIEHPGHEDEEEPQSGSTADSRPGAAVLGSGGKSNDPCYLQSPGDIPSADAAEMEEGFSESPDNLDHTENAASGSGPSARGRSAVTRRHKFDLAARTLLARAAGLYRSVQAHRNQSRREGISLQQDPGALYDFNLDEELEIDLDDEAMEAMFGQDLTSDNDILGMWIPEHVCESEDREEVVVCELCECSVVSFNQHMKRNHPGCGRSANRQGYRSNGSYVDGWFGGECGSGNPYYLLCGTCREKYLAMKTKSKSTSSERYKGQAPDLIGKQDSVYEEDWDMLDVDEDEKLTGEEEFELLAGPLGLNDRRIVPEPVQFPDSDPLGASVAMVTATNSMEETLMQIGCHGSVEKSSSGRITLGEQAAALANPHDRVVALRRVTAAAQVLLARTMVMRALSLLSVSGSSCSLAAGLESLGLTDIRTLVRLMCLAAAGRAGLSTSPSAMASTSERSRGGHSKANKPISCLAYLSTAVGCLASNAPSAAKLLVQLCTQNLISAATGVNLTTVDDSIQRKFLPSFLRGIAEENKLVTSPNFVVTQALVALLADKGAKLRPNYDKSEVEKKGPLELANALAACCLSSRLSSQHRQWAAQQLVRTLAAHDRDNQTTLQTLADMGGDLRKCSFIKLEAHQNRVMTCVWCNKKGLLATSGNDGTIRVWNVTKKQYSLQQTCVFNRLEGDAEESLGSPSDPSFSPVSWSISGKYLAGALEKMVNIWQVNGGKGLVDIQPHWVSALAWPEEGPATAWSGESPELLLVGRMDGSLGLIEVVDVSTMHRRELEHCYRKDVSVTCIAWFSEDRPFAVGYFDGKLLLGTKEPLEKGGIVLIDAHKDTLISMKWDPTGHILMTCAKEDSVKLWGSISGCWCCLHSLCHPSIVNGIAWCRLPGKGSKLQLLMATGCQSGLVCVWRIPQDTTQTNVTSAEGWWDQESNCQVTFWCF

SEQ ID NO: 759546 - protein, 4330 aa, Homo sapiens
GPKFATHGVKETLRLGHGDSNSRNIPTLVKDISNVGEVSCGSSHTIALSKDGRTVWSFGGGDNGKLGHGDTNRVYKPKVIEALQGMFIRKVCAGSQSSLALTSTGQVYAWGCGACLGCGSSEATALRPKLIEELAATRIVDVSIGDSHCLALSHDNEVYAWGNNSMGQCGQGNSTGPITKPKKVSGLDGIAIQQISAGTSHSLAWTALPRDRQVVAWHRPYCVDLEESTFSHLRSFLERYCDKINSEIPPLPFPSSREHHSFLKLCLKLLSNHLALALAGGVATSILGRQAGPLRNLLFRLMDSTVPDEIQEVVIETLSVGATMLLPPLRERMELLHSLLPQGPDRWESLSKGQRMQLDIILTSLQDHTHVASLLGYSSPSDAADLSSVCTGYGNLSDQPYGTQSCHPDTHLAEILMKTLLRNLGFYTDQAFGELEKNSDKFLLGTSSSENSQPAHLHELLCSLQKQLLAFCHINNISENSSSVALLHKHLQLLLPHATDIYSRSANLLKESPWNGSVGEKLRDVIYVSAAGSMLCQIVNSLLLLPVSVARPLLSYLLDLLPPLDCLNRLLPAADLLEDQELQWPLHGGPELIDPAGLPLPQPAQSWVWLVDLERTIALLIGRCLGGMLQGSPVSPEEQDTAYWMKTPLFSDGVEMDTPQLDKCMSCLLEVALSGNEEQKPFDYKLRPEIAVYVDLALGCSKEPARSLWISMQDYAVSKDWDSATLSNESLLDTVSRFVLAALLKHTNLLSQACGESRQELKTILRQIFALMMSEIRELFYFGSSFRYQPGKHLSEVYRCVYKVRSRLLACKNLELIQTRSSSRDRWISENQDSADVDPQEHSFTRTIDEEAEMEEQAERDREEGHPEPEDEEEEREHEVMTAGKIFQCFLSAREVARSRDRDRMNSGAGSGARADDPPPQSQQERRVSTDLPEGQDVYTAACNSVIHRCALLILGVSPVIDELQKRREEGQLQQPSTSASEGGGLMTRSESLTAESRLVHTSPNYRLIKSRSESDLSQPESDEEGYALSGRRNVDLDLAASHRKRGPMHSQLESLSDSWARLKHSRDWLCNSSYSFESDFDLTKSLGVHTLIENVVSFVSGDVGNAPGFKEPEESMSTSPQASIIAMEQQQLRAELRLEALHQILVLLSGMEEKGSISLAGSRLSSGFQSSTLLTSVRLQFLAGCFGLGTVGHTGAKGESGRLHHYQDGIRAAKRNIQIEIQVAVHKIYQQLSATLERALQANKHHIEAQQRLLLVTVFALSVHYQPVDVSLAISTGLLNVLSQLCGTDTMLGQPLQLLPKTGVSQLSTALKVASTRLLQILAITTGTYADKLSPKVVQSLLDLLCSQLKNLLSQTGVLHMASFGEGEQEDGEEEEKKVDSSGETEKKDFRAALRKQHAAELHLGDFLVFLRRVVSSKAIQSKMASPKWTEVLLNIASQKCSSGIPLVGNLRTRLLALHVLEAVLPACESGVEDDQMAQIVERLFSLLSDCMWETPIAQAKHAIQIKEKEQEIKLQKQGELEEEDENLPIQEVSFDPEKAQCCLVENGQILTHGSGGKGYGLASTGVTSGCYQWKFYIVKENRGNEGTCVGVSRWPVHDFNHRTTSDMWLYRAYSGNLYHNGEQTLTLSSFTQGDFITCVLDMEARTISFGKNGEEPKLAFEDVDAAELYPCVMFYSSNPGEKVKICDMQMRGTPRDLLPGDPICSPVAAVLAEATIQLIRILHRTDRWTYCINKKMMERLHKIKICIKESGQKLKKSRSVQSREENEMREEKESKEEEKGKHTRHGLADLSELQLRTLCIEVWPVLAVIGGVDAGLRVGGRCVHKQTGRHATLLGVVKEGSTSAKVQWDEAEITISFPTFWSPSDTPLYNLEPCEPLPFDVARFRGLTASVLLDLTYLTGVHEDMGKQSTKRHEKKHRHESEEKGDVEQKPESESALDMRTGLTSDDVKSQSTTSSKSENEIASFSLDPTLPSVESQHQITEGKRKNHEHMSKNHDVAQSEIRAVQLSYLYLGAMKSLSALLGCSKYAELLLIPKVLAENGHNSDCASSPVVHEDVEMRAALQFLMRHMVKRAVMRSPIKRALGLADLERAQAMIYKLVVHGLLEDQFGGKIKQEIDQQAEESDPAQQAQTPVTTSPSASSTTSFMSSSLEDTTTATTPVTDTETVPASESPGVMPLSLLRQMFSSYPTTTVLPTRRAQTPPISSLPTSPSDEVGRRQSLTSPDSQSARPANRTALSDPSSRLSTSPPPPAIAVPLLEMGFSLRQIAKAMEATGARGEADAQNITVLAMWMIEHPGHEDEEEPQSGSTADSRPGAAVLGSGGKSNDPCYLQSPGDIPSADAAEMEEGFSESPDNLDHTENAASGSGPSARGRSAVTRRHKFDLAARTLLARAAGLYRSVQAHRNQSRREGISLQQDPGALYDFNLDEELEIDLDDEAMEAMFGQDLTSDNDILGMWIPEHVCESEDREEVVVCELCECSVVSFNQHMKRNHPGCGRSANRQGYRSNGSYVDGWFGGECGSGNPYYLLCGTCREKYLAMKTKSKSTSSERYKGQAPDLIGKQDSVYEEDWDMLDVDEDEKLTGEEEFELLAGPLGLNDRRIVPEPVQFPDSDPLGASVAMVTATNSMEETLMQIGCHGSVEKSSSGRITLGEQAAALANPHDRVVALRRVTAAAQVLLARTMVMRALSLLSVSGSSCSLAAGLESLGLTDIRTLVRLMCLAAAGRAGLSTSPSAMASTSERSRGGHSKANKPISCLAYLSTAVGCLASNAPSAAKLLVQLCTQNLISAATGVNLTTVDDSIQRKFLPSFLRGIAEENKLVTSPNFVVTQALVALLADKGAKLRPNYDKSEVEKKGPLELANALAACCLSSRLSSQHRQWAAQQLVRTLAAHDRDNQTTLQTLADMGGDLRKCSFIKLEAHQNRVMTCVWCNKKGLLATSGNDGTIRVWNVTKKQYSLQQTCVFNRLEGDAEESLGSPSDPSFSPVSWSISGKYLAGALEKMVNIWQVNGGKGLVDIQPHWVSALAWPEEGPATAWSGESPELLLVGRMDGSLGLIEVVDVSTMHRRELEHCYRKDVSVTCIAWFSEDRPFAVGYFDGKLLLGTKEPLEKGGIVLIDAHKDTLISMKWDPTGHILMTCAKEDSVKLWGSISGCWCCLHSLCHPSIVNGIAWCRLPGKGSKLQLLMATGCQSGLVCVWRIPQDTTQTNVTSAEGWWDQESNCQDGYRKSSGAKCVYQLRGHITPVRTVAFSSDGLALVSGGLGGLMNIWSLRDGSVLQTVVIGSGAIQTTVWIPEVGVAACSNRSKDVLVVNCTAEWAAANHVLATCRTALKQQGVLGLNMAPCMRAFLERLPMMLQEQYAYEKPHVVCGDQLVHSPYMQCLASLAVGLHLDQLLCNPPVPPHHQNCLPDPASWNPNEWAWLECFSTTIKAAEALTNGAQFPESFTVPDLEPVPEDELVFLMDNSKWINGMDEQIMSWATSRPEDWHLGGKCDVYLWGAGRHGQLAEAGRNVMVPAAAPSFSQAQQVICGQNCTFVIQANGTVLACGEGSYGRLGQGNSDDLHVLTVISALQGFVVTQLVTSCGSDGHSMALTESGEVFSWGDGDYGKLGHGNSDRQRRPRQIEALQGEEVVQMSCGFKHSAVVTSDGKLFTFGNGDYGRLGLGNTSNKKLPERVTALEGYQIGQVACGLNHTLAVSADGSMVWAFGDGDYGKLGLGNSTAKSSPQKIDVLCGIGIKKVACGTQFSVALTKDGHVYTFGQDRLIGLPEGRARNHNRPQQIPVLAGVIIEDVAVGAEHTLALASNGDVYAWGSNSEGQLGLGHTNHVREPTLVTGLQGKNVRQISAGRCHSAAWTAPPVPPRAPGVSVPLQLGLPDTVPPQYGALREVSIHTVRARLRLLYHFSDLMYSSWRLLNLSPNNQNSTSHYNAGTWGIVQGQLRPLLAPRVYTLPMVRSIGKTMVQGKNYGPQITVKRISTRGRKCKPIFVQIARQVVKLNASDLRLPSRAWKVKLVGEGADDAGGVFDDTITEMCQELETGIVDLLIPSPNATAEVGYNRDRFLFNPSACLDEHLMQFKFLGILMGVAIRTKKPLDLHLAPLVWKQLCCVPLTLEDLEEVDLLYVQTLNSILHIEDSGITEESFHEMIPLDSFVGQSADGKMVPIIPGGNSIPLTFSNRKEYVERAIEYRLHEMDRQVAAVREGMSWIVPVPLLSLLTAKQLEQMVCGMPEISVEVLKKVVRYREVDEQHQLVQWFWHTLEEFSNEERVLFMRFVSGRSRLPANTADISQRFQIMKVDRPYDSLPTSQTCFFQLRLPPYSSQLVMAERLRYAINN

SEQ ID NO: 759547 - protein, 3160 aa, Homo sapiens
MATMIPPVKLKWLEHLNSSWITEDSESIATREGVAVLYSKLVSNKEVVPLPQQVLCLKGPQLPDFERESLSSDEQDHYLDALLSSQLALAKMVCSDSPFAGALRKRLLVLQRVFYALSNKYHDKGKVKQQQHSPESSSGSADVHSVSERPRSSTDALIEMGVRTGLSLLFALLRQSWMMPVSGPGLSLCNDVIHTAIEVVSSLPPLSLANESKIPPMGLDCLSQVTTFLKGVTIPNSGADTLGRRLASELLLGLAAQRGSLRYLLEWIEMALGASAVVHTMEKGKLLSSQEGMISFDCFMTILMQMRRSLGSSADRSQWREPTRTSDGLCSLYEAALCLFEEVCRMASDYSRTCASPDSIQTGDAPIVSETCEVYVWGSNSSHQLVEGTQEKILQPKLAPSFSDAQTIEAGQYCTFVISTDGSVRACGKGSYGRLGLGDSNNQSTLKKLTFEPHRSIKKVSSSKGSDGHTLAFTTEGEVFSWGDGDYGKLGHGNSSTQKYPKLIQGPLQGKVVVCVSAGYRHSAAVTEDGELYTWGEGDFGRLGHGDSNSRNIPTLVKDISNVGEVSCGSSHTIALSKDGRTVWSFGGGDNGKLGHGDTNRVYKPKVIEALQGMFIRKVCAGSQSSLALTSTGQVYAWGCGACLGCGSSEATALRPKLIEELAATRIVDVSIGDSHCLALSHDNEVYAWGNNSMGQCGQGNSTGPITKPKKVSGLDGIAIQQISAGTSHSLAWTALPRDRQVVAWHRPYCVDLEESTFSHLRSFLERYCDKINSEIPPLPFPSSREHHSFLKLCLKLLSNHLALALAGGVATSILGRQAGPLRNLLFRLMDSTVPDEIQEVVIETLSVGATMLLPPLRERMELLHSLLPQGPDRWESLSKGQRMQLDIILTSLQDHTHVASLLGYSSPSDAADLSSVCTGYGNLSDQPYGTQSCHPDTHLAEILMKTLLRNLGFYTDQAFGELEKNSDKFLLGTSSSENSQPAHLHELLCSLQKQLLAFCHINNISENSSSVALLHKHLQLLLPHATDIYSRSANLLKESPWNGSVGEKLRDVIYVSAAGSMLCQIVNSLLLLPVSVARPLLSYLLDLLPPLDCLNRLLPAADLLEDQELQWPLHGGPELIDPAGLPLPQPAQSWVWLVDLERTIALLIGRCLGGMLQGSPVSPEEQDTAYWMKTPLFSDGVEMDTPQLDKCMSCLLEVALSGNEEQKPFDYKLRPEIAVYVDLALGCSKEPARSLWISMQDYAVSKDWDSATLSNESLLDTVSRFVLAALLKHTNLLSQACGESRQELKTILRQIFALMMSEIRELFYFGSSFRYQPGKHLSEVYRCVYKVRSRLLACKNLELIQTRSSSRDRWISENQDSADVDPQEHSFTRTIDEEAEMEEQAERDREEGHPEPEDEEEEREHEVMTAGKIFQCFLSAREVARSRDRDRMNSGAGSGARADDPPPQSQQERRVSTDLPEGQDVYTAACNSVIHRCALLILGVSPVIDELQKRREEGQLQQPSTSASEGGGLMTRSESLTAESRLVHTSPNYRLIKSRSESDLSQPESDEEGYALSGRRNVDLDLAASHRKRGPMHSQLESLSDSWARLKHSRDWLCNSSYSFESDFDLTKSLGVHTLIENVVSFVSGDVGNAPGFKEPEESMSTSPQASIIAMEQQQLRAELRLEALHQILVLLSGMEEKGSISLAGSRLSSGFQSSTLLTSVRLQFLAGCFGLGTVGHTGAKGESGRLHHYQDGIRAAKRNIQIEIQVAVHKIYQQLSATLERALQANKHHIEAQQRLLLVTVFALSVHYQPVDVSLAISTGLLNVLSQLCGTDTMLGQPLQLLPKTGVSQLSTALKVASTRLLQILAITTGTYADKLSPKVVQSLLDLLCSQLKNLLSQTGVLHMASFGEGEQEDGEEEEKKVDSSGETEKKDFRAALRKQHAAELHLGDFLVFLRRVVSSKAIQSKMASPKWTEVLLNIASQKCSSGIPLVGNLRTRLLALHVLEAVLPACESGVEDDQMAQIVERLFSLLSDCMWETPIAQAKHAIQIKEKEQEIKLQKQGELEEEDENLPIQEVSFDPEKAQCCLVENGQILTHGSGGKGYGLASTGVTSGCYQWKFYIVKENRGNEGTCVGVSRWPVHDFNHRTTSDMWLYRAYSGNLYHNGEQTLTLSSFTQGDFITCVLDMEARTISFGKNGEEPKLAFEDVDAAELYPCVMFYSSNPGEKVKICDMQMRGTPRDLLPGDPICSPVAAVLAEATIQLIRILHRTDRWTYCINKKMMERLHKIKICIKESGQKLKKSRSVQSREENEMREEKESKEEEKGKHTRHGLADLSELQLRTLCIEVWPVLAVIGGVDAGLRVGGRCVHKQTGRHATLLGVVKEGSTSAKVQWDEAEITISFPTFWSPSDTPLYNLEPCEPLPFDVARFRGLTASVLLDLTYLTGVHEDMGKQSTKRHEKKHRHESEEKGDVEQKPESESALDMRTGLTSDDVKSQSTTSSKSENEIASFSLDPTLPSVESQHQITEGKRKNHEHMSKNHDVAQSEIRAVQLSYLYLGAMKSLSALLGCSKYAELLLIPKVLAENGHNSDCASSPVVHEDVEMRAALQFLMRHMVKRAVMRSPIKRALGLADLERAQAMIYKLVVHGLLEDQFGGKIKQEIDQQAEESDPAQQAQTPVTTSPSASSTTSFMSSSLEDTTTATTPVTDTETVPASESPGVMPLSLLRQMFSSYPTTTVLPTRRAQTPPISSLPTSPSDEVGRRQSLTSPDSQSARPANRTALSDPSSRLSTSPPPPAIAVPLLEMGFSLRQIAKAMEATGARGEADAQNITVLAMWMIEHPGHEDEEEPQSGSTADSRPGAAVLGSGGKSNDPCYLQSPGDIPSADAAEMEEGFSESPDNLDHTENAASGSGPSARGRSAVTRRHKFDLAARTLLARAAGLYRSVQAHRNQSRREGISLQQDPGALYDFNLDEELEIDLDDEAMEAMFGQDLTSDNDILGMWIPEHVCESEDREEVVVCELCECSVVSFNQHMKRNHPGCGRSANRQGYRSNGSYVDGWFGGECGSGNPYYLLFAVTWRHTITDAAEMEEGFSESPDNLDHTENAASGSGPSARGRSAVTRRHKFDLAARTLLARAAGLYRSVQAHRNQSRREGISLQQDPGALYDFNLDEEVESD

SEQ ID NO: 759548 - protein, 2672 aa, Homo sapiens
MATMIPPVKLKWLEHLNSSWITEDSESIATREGVAVLYSKLVSNKEVVPLPQQVLCLKGPQLPDFERESLSSDEQDHYLDALLSSQLALAKMVCSDSPFAGALRKRLLVLQRVFYALSNKYHDKGKVKQQQHSPESSSGSADVHSVSERPRSSTDALIEMGVRTGLSLLFALLRQSWMMPVSGPGLSLCNDVIHTAIEVVSSLPPLSLANESKIPPMGLDCLSQVTTFLKGVTIPNSGADTLGRRLASELLLGLAAQRGSLRYLLEWIEMALGASAVVHTMEKGKLLSSQEGMISFDCFMTILMQMRRSLGSSADRSQWREPTRTSDGLCSLYEAALCLFEEVCRMASDYSRTCASPDSIQTGDAPIVSETCEVYVWGSNSSHQLVEGTQEKILQPKLAPSFSDAQTIEAGQYCTFVISTDGSVRACGKGSYGRLGLGDSNNQSTLKKLTFEPHRSIKKVSSSKGSDGHTLAFTTEGEVFSWGDGDYGKLGHGNSSTQKYPKLIQGPLQGKVVVCVSAGYRHSAAVTEDGELYTWGEGDFGRLGHGDSNSRNIPTLVKDISNVGEVSCGSSHTIALSKDGRTVWSFGGGDNGKLGHGDTNRVYKPKVIEALQGMFIRKVCAGSQSSLALTSTGQVYAWGCGACLGCGSSEATALRPKLIEELAATRIVDVSIGDSHCLALSHDNEVYAWGNNSMGQCGQGNSTGPITKPKKVSGLDGIAIQQISAGTSHSLAWTALPRDRQVVAWHRPYCVDLEESTFSHLRSFLERYCDKINSEIPPLPFPSSREHHSFLKLCLKLLSNHLALALAGGVATSILGRQAGPLRNLLFRLMDSTVPDEIQEVVIETLSVGATMLLPPLRERMELLHSLLPQGPDRWESLSKGQRMQLDIILTSLQDHTHVASLLGYSSPSDAADLSSVCTGYGNLSDQPYGTQSCHPDTHLAEILMKTLLRNLGFYTDQAFGELEKNSDKFLLGTSSSENSQPAHLHELLCSLQKQLLAFCHINNISENSSSVALLHKHLQLLLPHATDIYSRSANLLKESPWNGSVGEKLRDVIYVSAAGSMLCQIVNSLLLLPVSVARPLLSYLLDLLPPLDCLNRLLPAADLLEDQELQWPLHGGPELIDPAGLPLPQPAQSWVWLVDLERTIALLIGRCLGGMLQGSPVSPEEQDTAYWMKTPLFSDGVEMDTPQLDKCMSCLLEVALSGNEEQKPFDYKLRPEIAVYVDLALGCSKEPARSLWISMQDYAVSKDWDSATLSNESLLDTVSRFVLAALLKHTNLLSQACGESRQELKTILRQIFALMMSEIRELFYFGSSFRYQPGKHLSEVYRCVYKVRSRLLACKNLELIQTRSSSRDRWISENQDSADVDPQEHSFTRTIDEEAEMEEQAERDREEGHPEPEDEEEEREHEVMTAGKIFQCFLSAREVARSRDRDRMNSGAGSGARADDPPPQSQQERRVSTDLPEGQDVYTAACNSVIHRCALLILGVSPVIDELQKRREEGQLQQPSTSASEGGGLMTRSESLTAESRLVHTSPNYRLIKSRSESDLSQPESDEEGYALSGRRNVDLDLAASHRKRGPMHSQLESLSDSWARLKHSRDWLCNSSYSFESDFDLTKSLGVHTLIENVVSFVSGDVGNAPGFKEPEESMSTSPQASIIAMEQQQLRAELRLEALHQILVLLSGMEEKGSISLAGSRLSSGFQSSTLLTSVRLQFLAGCFGLGTVGHTGAKGESGRLHHYQDGIRAAKRNIQIEIQVAVHKIYQQLSATLERALQANKHHIEAQQRLLLVTVFALSVHYQPVDVSLAISTGLLNVLSQLCGTDTMLGQPLQLLPKTGVSQLSTALKVASTRLLQILAITTGTYADKLSPKVVQSLLDLLCSQLKNLLSQTGVLHMASFGEGEQEDGEEEEKKVDSSGETEKKDFRAALRKQHAAELHLGDFLVFLRRVVSSKAIQSKMASPKWTEVLLNIASQKCSSGIPLVGNLRTRLLALHVLEAVLPACESGVEDDQMAQIVERLFSLLSDCMWETPIAQAKHAIQIKEKEQEIKLQKQGELEEEDENLPIQEVSFDPEKAQCCLVENGQILTHGSGGKGYGLASTGVTSGCYQWKFYIVKENRGNEGTCVGVSRWPVHDFNHRTTSDMWLYRAYSGNLYHNGEQTLTLSSFTQGDFITCVLDMEARTISFGKNGEEPKLAFEDVDAAELYPCVMFYSSNPGEKVKICDMQMRGTPRDLLPGDPICSPVAAVLAEATIQLIRILHRTDRWTYCINKKMMERLHKIKICIKESGQKLKKSRSVQSREENEMREEKESKEEEKGKHTRHGLADLSELQLRTLCIEVWPVLAVIGGVDAGLRVGGRCVHKQTGRHATLLGVVKEGSTSAKVQWDEAEITISFPTFWSPSDTPLYNLEPCEPLPFDVARFRGLTASVLLDLTYLTGVHEDMGKQSTKRHEKKHRHESEEKGDVEQKPESESALDMRTGLTSDDVKSQSTTSSKSENEIASFSLDPTLPSVESQHQITEGKRKNHEHMSKNHDVAQSEIRAVQLSYLYLGAMKSLSALLGCSKYAELLLIPKVLAENGHNSDCASSPVVHEDVEMRAALQFLMRHMVKRAVMRSPIKRALGLADLERAQAMIYKLVVHGLLEDQFGGKIKQGMLSDFFFFCFCAVEIIFIIVRSDTFCK

SEQ ID NO: 759549 - protein, 1728 aa, Homo sapiens
VIQRIPVARCHGSVEKSSSGRITLGEQAAALANPHDRVVALRRVTAAAQVLLARTMVMRALSLLSVSGSSCSLAAGLESLGLTDIRTLVRLMCLAAAGRAGLSTSPSAMASTSERSRGGHSKANKPISCLAYLSTAVGCLASNAPSAAKLLVQLCTQNLISAATGVNLTTVDDSIQRKFLPSFLRGIAEENKLVTSPNFVVTQALVALLADKGAKLRPNYDKSEVEKKGPLELANALAACCLSSRLSSQHRQWAAQQLVRTLAAHDRDNQTTLQTLADMGGDLRKCSFIKLEAHQNRVMTCVWCNKKGLLATSGNDGTIRVWNVTKKQYSLQQTCVFNRLEGDAEESLGSPSDPSFSPVSWSISGKYLAGALEKMVNIWQVNGGKGLVDIQPHWVSALAWPEEGPATAWSGESPELLLVGRMDGSLGLIEVVDVSTMHRRELEHCYRKDVSVTCIAWFSEDRPFAVGYFDGKLLLGTKEPLEKGGIVLIDAHKDTLISMKWDPTGHILMTCAKEDSVKLWGSISGCWCCLHSLCHPSIVNGIAWCRLPGKGSKLQLLMATGCQSGLVCVWRIPQDTTQTNVTSAEGWWDQESNCQDGYRKSSGAKCVYQLRGHITPVRTVAFSSDGLALVSGGLGGLMNIWSLRDGSVLQTVVIGSGAIQTTVWIPEVGVAACSNRSKDVLVVNCTAEWAAANHVLATCRTALKQQGVLGLNMAPCMRAFLERLPMMLQEQYAYEKPHVVCGDQLVHSPYMQCLASLAVGLHLDQLLCNPPVPPHHQNCLPDPASWNPNEWAWLECFSTTIKAAEALTNGAQFPESFTVPDLEPVPEDELVFLMDNSKWINGMDEQIMSWATSRPEDWHLGGKCDVYLWGAGRHGQLAEAGRNVMVPAAAPSFSQAQQVICGQNCTFVIQANGTVLACGEGSYGRLGQGNSDDLHVLTVISALQGFVVTQLVTSCGSDGHSMALTESGEVFSWGDGDYGKLGHGNSDRQRRPRQIEALQGEEVVQMSCGFKHSAVVTSDGKLFTFGNGDYGRLGLGNTSNKKLPERVTALEGYQIGQVACGLNHTLAVSADGSMVWAFGDGDYGKLGLGNSTAKSSPQKIDVLCGIGIKKVACGTQFSVALTKDGHVYTFGQDRLIGLPEGRARNHNRPQQIPVLAGVIIEDVAVGAEHTLALASNGDVYAWGSNSEGQLGLGHTNHVREPTLVTGLQGKNVRQISAGRCHSAAWTAPPVPPRAPGVSVPLQLGLPDTVPPQYGALREVSIHTVRARLRLLYHFSDLMYSSWRLLNLSPNNQNSTSHYNAGTWGIVQGQLRPLLAPRVYTLPMVRSIGKTMVQGKNYGPQITVKRISTRGRKCKPIFVQIARQVVKLNASDLRLPSRAWKVKLVGEGADDAGGVFDDTITEMCQELETGIVDLLIPSPNATAEVGYNRDRFLFNPSACLDEHLMQFKFLGILMGVAIRTKKPLDLHLAPLVWKQLCCVPLTLEDLEEVDLLYVQTLNSILHIEDSGITEESFHEMIPLDSFVGQSADGKMVPIIPGGNSIPLTFSNRKEYVERAIEYRLHEMDRQVAAVREGMSWIVPVPLLSLLTAKQLEQMVCGMPEISVEVLKKVVRYREVDEQHQLVQWFWHTLEEFSNEERVLFMRFVSGRSRLPANTADISQRFQIMKVDRPYDSLPTSQTCFFQLRLPPYSSQLVMAERLRYAINNCRSIDMDNYMLSRNVDNAEGSDTDY

SEQ ID NO: 759550 - protein, 1289 aa, Homo sapiens [sequence omitted]

SEQ ID NO: 759551 - protein, 890 aa, Homo sapiens [sequence omitted]

SEQ ID NO: 759552 - protein, 859 aa, Homo sapiens
HNVCPALSKHSGRNVMVPAAAPSFSQAQQVICGQNCTFVIQANGTVLACGEGSYGRLGQGNSDDLHVLTVISALQGFVVTQLVTSCGSDGHSMALTESGEVFSWGDGDYGKLGHGNSDRQRRPRQIEALQGEEVVQMSCGFKHSAVVTSDGKLFTFGNGDYGRLGLGNTSNKKLPERVTALEGYQIGQVACGLNHTLAVSADGSMVWAFGDGDYGKLGLGNSTAKSSPQKIDVLCGIGIKKVACGTQFSVALTKDGHVYTFGQDRLIGLPEGRARNHNRPQQIPVLAGVIIEDVAVGAEHTLALASNGDVYAWGSNSEGQLGLGHTNHVREPTLVTGLQGKNVRQISAGRCHSAAWTAPPVPPRAPGVSVPLQLGLPDTVPPQYGALREVSIHTVRARLRLLYHFSDLMYSSWRLLNLSPNNQNSTSHYNAGTWGIVQGQLRPLLAPRVYTLPMVRSIGKTMVQGKNYGPQITVKRISTRGRKCKPIFVQIARQVVKLNASDLRLPSRAWKVKLVGEGADDAGGVFDDTITEMCQELETGIVDLLIPSPNATAEVGYNRDRFLFNPSACLDEHLMQFKFLGILMGVAIRTKKPLDLHLAPLVWKQLCCVPLTLEDLEEVDLLYVQTLNSILHIEDSGITEESFHEMIPLDSFVGQSADGKMVPIIPGGNSIPLTFSNRKEYVERAIEYRLHEMDRQVAAVREGMSWIVPVPLLSLLTAKQLEQMVCGMPEISVEVLKKVVRYREVDEQHQLVQWFWHTLEEFSNEERVLFMRFVSGRSRLPANTADISQRFQIMKVDRPYDSLPTSQTCFFQLRLPPYSSQLVMAERLRYAINNCRSIDMDNYMLSRNVDNAEGSDTDY

SEQ ID NO: 759553 - protein, 4368 aa, Homo sapiens
MATMIPPVKLKWLEHLNSSWITEDSESIATREGVAVLYSKLVSNKEVVPLPQQVLCLKGPQLPDFERESLSSDEQDHYLDALLSSQLALAKMVCSDSPFAGALRKRLLVLQRVFYALSNKYHDKGKVKQQQHSPESSSGSADVHSVSERPRSSTDALIEMGVRTGLSLLFALLRQSWMMPVSGPGLSLCNDVIHTAIEVVSSLPPLSLANESKIPPMGLDCLSQVTTFLKGVTIPNSGADTLGRRLASELLLGLAAQRGSLRYLLEWIEMALGASAVVHTMEKGKLLSSQEGMISFDCFMTILMQMRRSLGSSADRSQWREPTRTSDGLCSLYEAALCLFEEVCRMASDYSRTCASPDSIQTGDAPIVSETCEVYVWGSNSSHQLVEGTQEKILQPKLAPSFSDAQTIEAGQYCTFVISTDGSVRACGKGSYGRLGLGDSNNQSTLKKLTFEPHRSIKKVSSSKGSDGHTLAFTTEGEVFSWGDGDYGKLGHGNSSTQKYPKLIQGPLQGKVVVCVSAGYRHSAAVTEDGELYTWGEGDFGRLGHGDSNSRNIPTLVKDISNVGEVSCGSSHTIALSKDGRTVWSFGGGDNGKLGHGDTNRVYKPKVIEALQGMFIRKVCAGSQSSLALTSTGQVYAWGCGACLGCGSSEATALRPKLIEELAATRIVDVSIGDSHCLALSHDNEVYAWGNNSMGQCGQGNSTGPITKPKKVSGLDGIAIQQISAGTSHSLAWTALPRDRQVVAWHRPYCVDLEESTFSHLRSFLERYCDKINSEIPPLPFPSSREHHSFLKLCLKLLSNHLALALAGGVATSILGRQAGPLRNLLFRLMDSTVPDEIQEVVIETLSVGATMLLPPLRERMELLHSLLPQGPDRWESLSKGQRMQLDIILTSLQDHTHVASLLGYSSPSDAADLSSVCTGYGNLSDQPYGTQSCHPDTHLAEILMKTLLRNLGFYTDQAFGELEKNSDKFLLGTSSSENSQPAHLHELLCSLQKQLLAFCHINNISENSSSVALLHKHLQLLLPHATDIYSRSANLLKESPWNGSVGEKLRDVIYVSAAGSMLCQIVNSLLLLPVSVARPLLSYLLDLLPPLDCLNRLLPAADLLEDQELQWPLHGGPELIDPAGLPLPQPAQSWVWLVDLERTIALLIGRCLGGMLQGSPVSPEEQDTAYWMKTPLFSDGVEMDTPQLDKCMSCLLEVALSGNEEQKPFDYKLRPEIAVYVDLALGCSKEPARSLWISMQDYAVSKDWDSATLSNESLLDTVSRFVLAALLKHTNLLSQACGESRQELKTILRQIFALMMSEIRELFYFGSSFRYQPGKHLSEVYRCVYKVRSRLLACKNLELIQTRSSSRDRWISENQDSADVDPQEHSFTRTIDEEAEMEEQAERDREEGHPEPEDEEEEREHEVMTAGKIFQCFLSAREVARSRDRDRMNSGAGSGARADDPPPQSQQERRVSTDLPEGQDVYTAACNSVIHRCALLILGVSPVIDELQKRREEGQLQQPSTSASEGGGLMTRSESLTAESRLVHTSPNYRLIKSRSESDLSQPESDEEGYALSGRRNVDLDLAASHRKRGPMHSQLESLSDSWARLKHSRDWLCNSSYSFESDFDLTKSLGVHTLIENVVSFVSGDVGNAPGFKEPEESMSTSPQASIIAMEQQQLRAELRLEALHQILVLLSGMEEKGSISLAGSRLSSGFQSSTLLTSVRLQFLAGCFGLGTVGHTGAKGESGRLHHYQDGIRAAKRNIQIEIQVAVHKIYQQLSATLERALQANKHHIEAQQRLLLVTVFALSVHYQPVDVSLAISTGLLNVLSQLCGTDTMLGQPLQLLPKTGVSQLSTALKVASTRLLQILAITTGTYADKLSPKVVQSLLDLLCSQLKNLLSQTGVLHMASFGEGEQEDGEEEEKKVDSSGETEKKDFRAALRKQHAAELHLGDFLVFLRRVVSSKAIQSKMASPKWTEVLLNIASQKCSSGIPLVGNLRTRLLALHVLEAVLPACESGVEDDQMAQIVERLFSLLSDCMWETPIAQAKHAIQIKEKEQEIKLQKQGELEEEDENLPIQEVSFDPEKAQCCLVENGQILTHGSGGKGYGLASTGVTSGCYQWKFYIVKENRGNEGTCVGVSRWPVHDFNHRTTSDMWLYRAYSGNLYHNGEQTLTLSSFTQGDFITCVLDMEARTISFGKNGEEPKLAFEDVDAAELYPCVMFYSSNPGEKVKICDMQMRGTPRDLLPGDPICSPVAAVLAEATIQLIRILHRTDRWTYCINKKMMERLHKIKICIKESGQKLKKSRSVQSREENEMREEKESKEEEKGKHTRHGLADLSELQLRTLCIEVWPVLAVIGGVDAGLRVGGRCVHKQTGRHATLLGVVKEGSTSAKVQWDEAEITISFPTFWSPSDTPLYNLEPCEPLPFDVARFRGLTASVLLDLTYLTGVHEDMGKQSTKRHEKKHRHESEEKGDVEQKPESESALDMRTGLTSDDVKSQSTTSSKSENEIASFSLDPTLPSVESQHQITEGKRKNHEHMSKNHDVAQSEIRAVQLSYLYLGAMKSLSALLGCSKYAELLLIPKVLAENGHNSDCASSPVVHEDVEMRAALQFLMRHMVKRAVMRSPIKRALGLADLERAQAMIYKLVVHGLLEDQFGGKIKQEIDQQAEESDPAQQAQTPVTTSPSASSTTSFMSSSLEDTTTATTPVTDTETVPASESPGVMPLSLLRQMFSSYPTTTVLPTRRAQTPPISSLPTSPSDEVGRRQSLTSPDSQSARPANRTALSDPSSRLSTSPPPPAIAVPLLEMGFSLRQIAKAMEATGARGEADAQNITVLAMWMIEHPGHEDEEEPQSGSTADSRPGAAVLGSGGKSNDPCYLQSPGDIPSADAAEMEEGFSESPDNLDHTENAASGSGPSARGRSAVTRRHKFDLAARTLLARAAGLYRSVQAHRNQSRREGISLQQDPGALYDFNLDEELEIDLDDEAMEAMFGQDLTSDNDILGMWIPEHVCESEDREEVVVCELCECSVVSFNQHMKRNHPGCGRSANRQGYRSNGSYVDGWFGGECGSGNPYYLLCGTCREKYLAMKTKSKSTSSERYKGQAPDLIGKQDSVYEEDWDMLDVDEDEKLTGEEEFELLAGPLGLNDRRIVPEPVQFPDSDPLGASVAMVTATNSMEETLMQIGCHGSVEKSSSGRITLGEQAAALANPHDRVVALRRVTAAAQVLLARTMVMRALSLLSVSGSSCSLAAGLESLGLTDIRTLVRLMCLAAAGRAGLSTSPSAMASTSERSRGGHSKANKPISCLAYLSTAVGCLASNAPSAAKLLVQLCTQNLISAATGVNLTTVDDSIQRKFLPSFLRGIAEENKLVTSPNFVVTQALVALLADKGAKLRPNYDKSEVEKKGPLELANALAACCLSSRLSSQHRQWAAQQLVRTLAAHDRDNQTTLQTLADMGGDLRKCSFIKLEAHQNRVMTCVWCNKKGLLATSGNDGTIRVWNVTKKQYSLQQTCVFNRLEGDAEESLGSPSDPSFSPVSWSISGKYLAGALEKMVNIWQVNGGKGLVDIQPHWVSALAWPEEGPATAWSGESPELLLVGRMDGSLGLIEVVDVSTMHRRELEHCYRKDVSVTCIAWFSEDRPFAVGYFDGKLLLGTKEPLEKGGIVLIDAHKDTLISMKWDPTGHILMTCAKEDSVKLWGSISGCWCCLHSLCHPSIVNGIAWCRLPGKGSKLQLLMATGCQSGLVCVWRIPQDTTQTNVTSAEGWWDQESNCQDGYRKSSGAKCVYQLRGHITPVRTVAFSSDGLALVSGGLGGLMNIWSLRDGSVLQTVVIGSGAIQTTVWIPEVGVAACSNRSKDVLVVNCTAEWAAANHVLATCRTALKQQGVLGLNMAPCMRAFLERLPMMLQEQYAYEKPHVVCGDQLVHSPYMQCLASLAVGLHLDQLLCNPPVPPHHQNCLPDPASWNPNEWAWLECFSTTIKAAEALTNGAQFPESFTVPDLEPVPEDELVFLMDNSKWINGMDEQIMSWATSRPEDWHLGGKCDVYLWGAGRHGQLAEAGRNVMVPAAAPSFSQAQQVICGQNCTFVIQANGTVLACGEGSYGRLGQGNSDDLHVLTVISALQGFVVTQLVTSCGSDGHSMALTESGEVFSWGDGDYGKLGHGNSDRQRRPRQIEALQGEEVVQMSCGFKHSAVVTSDGKLFTFGNGDYGRLGLGNTSNKKLPERVTALEGYQIGQVACGLNHTLAVSADGSMVWAFGDGDYGKLGLGNSTAKSSPQKIDVLCGIGIKKVACGTQFSVALTKDGHVYTFGQDRLIGLPEGRARNHNRPQQIPVLAGVIIEDVAVGAEHTLALASNGDVYAWGSNSEGQLGLGHTNHVREPTLVTGLQGKNVR

SEQ ID NO: 759554 - protein, 4368 aa, Homo sapiens
MATMIPPVKLKWLEHLNSSWITEDSESIATREGVAVLYSKLVSNKEVVPLPQQVLCLKGPQLPDFERESLSSDEQDHYLDALLSSQLALAKMVCSDSPFAGALRKRLLVLQRVFYALSNKYHDKGKVKQQQHSPESSSGSADVHSVSERPRSSTDALIEMGVRTGLSLLFALLRQSWMMPVSGPGLSLCNDVIHTAIEVVSSLPPLSLANESKIPPMGLDCLSQVTTFLKGVTIPNSGADTLGRRLASELLLGLAAQRGSLRYLLEWIEMALGASAVVHTMEKGKLLSSQEGMISFDCFMTILMQMRRSLGSSADRSQWREPTRTSDGLCSLYEAALCLFEEVCRMASDYSRTCASPDSIQTGDAPIVSETCEVYVWGSNSSHQLVEGTQEKILQPKLAPSFSDAQTIEAGQYCTFVISTDGSVRACGKGSYGRLGLGDSNNQSTLKKLTFEPHRSIKKVSSSKGSDGHTLAFTTEGEVFSWGDGDYGKLGHGNSSTQKYPKLIQGPLQGKVVVCVSAGYRHSAAVTEDGELYTWGEGDFGRLGHGDSNSRNIPTLVKDISNVGEVSCGSSHTIALSKDGRTVWSFGGGDNGKLGHGDTNRVYKPKVIEALQGMFIRKVCAGSQSSLALTSTGQVYAWGCGACLGCGSSEATALRPKLIEELAATRIVDVSIGDSHCLALSHDNEVYAWGNNSMGQCGQGNSTGPITKPKKVSGLDGIAIQQISAGTSHSLAWTALPRDRQVVAWHRPYCVDLEESTFSHLRSFLERYCDKINSEIPPLPFPSSREHHSFLKLCLKLLSNHLALALAGGVATSILGRQAGPLRNLLFRLMDSTVPDEIQEVVIETLSVGATMLLPPLRERMELLHSLLPQGPDRWESLSKGQRMQLDIILTSLQDHTHVASLLGYSSPSDAADLSSVCTGYGNLSDQPYGTQSCHPDTHLAEILMKTLLRNLGFYTDQAFGELEKNSDKFLLGTSSSENSQPAHLHELLCSLQKQLLAFCHINNISENSSSVALLHKHLQLLLPHATDIYSRSANLLKESPWNGSVGEKLRDVIYVSAAGSMLCQIVNSLLLLPVSVARPLLSYLLDLLPPLDCLNRLLPAADLLEDQELQWPLHGGPELIDPAGLPLPQPAQSWVWLVDLERTIALLIGRCLGGMLQGSPVSPEEQDTAYWMKTPLFSDGVEMDTPQLDKCMSCLLEVALSGNEEQKPFDYKLRPEIAVYVDLALGCSKEPARSLWISMQDYAVSKDWDSATLSNESLLDTVSRFVLAALLKHTNLLSQACGESRQELKTILRQIFALMMSEIRELFYFGSSFRYQPGKHLSEVYRCVYKVRSRLLACKNLELIQTRSSSRDRWISENQDSADVDPQEHSFTRTIDEEAEMEEQAERDREEGHPEPEDEEEEREHEVMTAGKIFQCFLSAREVARSRDRDRMNSGAGSGARADDPPPQSQQERRVSTDLPEGQDVYTAACNSVIHRCALLILGVSPVIDELQKRREEGQLQQPSTSASEGGGLMTRSESLTAESRLVHTSPNYRLIKSRSESDLSQPESDEEGYALSGRRNVDLDLAASHRKRGPMHSQLESLSDSWARLKHSRDWLCNSSYSFESDFDLTKSLGVHTLIENVVSFVSGDVGNAPGFKEPEESMSTSPQASIIAMEQQQLRAELRLEALHQILVLLSGMEEKGSISLAGSRLSSGFQSSTLLTSVRLQFLAGCFGLGTVGHTGAKGESGRLHHYQDGIRAAKRNIQIEIQVAVHKIYQQLSATLERALQANKHHIEAQQRLLLVTVFALSVHYQPVDVSLAISTGLLNVLSQLCGTDTMLGQPLQLLPKTGVSQLSTALKVASTRLLQILAITTGTYADKLSPKVVQSLLDLLCSQLKNLLSQTGVLHMASFGEGEQEDGEEEEKKVDSSGETEKKDFRAALRKQHAAELHLGDFLVFLRRVVSSKAIQSKMASPKWTEVLLNIASQKCSSGIPLVGNLRTRLLALHVLEAVLPACESGVEDDQMAQIVERLFSLLSDCMWETPIAQAKHAIQIKEKEQEIKLQKQGELEEEDENLPIQEVSFDPEKAQCCLVENGQILTHGSGGKGYGLASTGVTSGCYQWKFYIVKENRGNEGTCVGVSRWPVHDFNHRTTSDMWLYRAYSGNLYHNGEQTLTLSSFTQGDFITCVLDMEARTISFGKNGEEPKLAFEDVDAAELYPCVMFYSSNPGEKVKICDMQMRGTPRDLLPGDPICSPVAAVLAEATIQLIRILHRTDRWTYCINKKMMERLHKIKICIKESGQKLKKSRSVQSREENEMREEKESKEEEKGKHTRHGLADLSELQLRTLCIEVWPVLAVIGGVDAGLRVGGRCVHKQTGRHATLLGVVKEGSTSAKVQWDEAEITISDTPLYNLEPCEPLPFDVARFRGLTASVLLDLTYLTGVHEDMGKQSTKRHEKKHRHESEEKGDVEQKPESESALDMRTGLTSDDVKSQSTTSSKSENEIASFSLDPTLPSVESQHQITEGKRKNHEHMSKNHDVAQSEIRAVQLSYLYLGAMKSLSALLGCSKYAELLLIPKVLAENGHNSDCASSPVVHEDVEMRAALQFLMRHMVKRAVMRSPIKRALGLADLERAQAMIYKLVVHGLLEDQFGGKIKQEIDQQAEESDPAQQAQTPVTTSPSASSTTSFMSSSLEDTTTATTPVTDTETVPASESPGVMPLSLLRQMFSSYPTTTVLPTRRAQTPPISSLPTSPSDEVGRRQSLTSPDSQSARPANRTALSDPSSRLSTSPPPPAIAVPLLEMGFSLRQIAKAMEATGARGEADAQNITVLAMWMIEHPGHEDEEEPQSGSTADSRPGAAVLGSGGKSNDPCYLQSPGDIPSADAAEMEEGFSESPDNLDHTENAASGSGPSARGRSAVTRRHKFDLAARTLLARAAGLYRSVQAHRNQSRREGISLQQDPGALYDFNLDEELEIDLDDEAMEAMFGQDLTSDNDILGMWIPEHVCESEDREEVVVCELCECSVVSFNQHMKRNHPGCGRSANRQGYRSNGSYVDGWFGGECGSGNPYYLLCGTCREKYLAMKTKSKSTSSERYKGQAPDLIGKQDSVYEEDWDMLDVDEDEKLTGEEEFELLAGPLGLNDRRIVPEPVQFPDSDPLGASVAMVTATNSMEETLMQIGCHGSVEKSSSGRITLGEQAAALANPHDRVVALRRVTAAAQVLLARTMVMRALSLLSVSGSSCSLAAGLESLGLTDIRTLVRLMCLAAAGRAGLSTSPSAMASTSERSRGGHSKANKPISCLAYLSTAVGCLASNAPSAAKLLVQLCTQNLISAATGVNLTTVDDSIQRKFLPSFLRGIAEENKLVTSPNFVVTQALVALLADKGAKLRPNYDKSEVEKKGPLELANALAACCLSSRLSSQHRQWAAQQLVRTLAAHDRDNQTTLQTLADMGGDLRKCSFIKLEAHQNRVMTCVWCNKKGLLATSGNDGTIRVWNVTKKQYSLQQTCVFNRLEGDAEESLGSPSDPSFSPVSWSISGKYLAGALEKMVNIWQVNGGKGLVDIQPHWVSALAWPEEGPATAWSGESPELLLVGRMDGSLGLIEVVDVSTMHRRELEHCYRKDVSVTCIAWFSEDRPFAVGYFDGKLLLGTKEPLEKGGIVLIDAHKDTLISMKWDPTGHILMTCAKEDSVKLWGSISGCWCCLHSLCHPSIVNGIAWCRLPGKGSKLQLLMATGCQSGLVCVWRIPQDTTQTNVTSAEGWWDQESNCQDGYRKSSGAKCVYQLRGHITPVRTVAFSSDGLALVSGGLGGLMNIWSLRDGSVLQTVVIGSGAIQTTVWIPEVGVAACSNRSKDVLVVNCTAEWAAANHVLATCRTALKQQGVLGLNMAPCMRAFLERLPMMLQEQYAYEKPHVVCGDQLVHSPYMQCLASLAVGLHLDQLLCNPPVPPHHQNCLPDPASWNPNEWAWLECFSTTIKAAEALTNGAQFPESFTVPDLEPVPEDELVFLMDNSKWINGMDEQIMSWATSRPEDWHLGGKCDVYLWGAGRHGQLAEAGRNVMVPAAAPSFSQAQQVICGQNCTFVIQANGTVLACGEGSYGRLGQGNSDDLHVLTVISALQGFVVTQLVTSCGSDGHSMALTESGEVFSWGDGDYGKLGHGNSDRQRRPRQIEALQGEEVVQMSCGFKHSAVVTSDGKLFTFGNGDYGRLGLGNTSNKKLPERVTALEGYQIGQVACGLNHTLAVSADGSMVWAFGDGDYGKLGLGNSTAKSSPQKIDVLCGIGIKKVACGTQFSVALTKDGHVYTFGQDRLIGLPEGRARNHNRPQQIPVLAGVIIEDVAVGAEHTLALASNGDVYAWGSNSEGQLGLGHTNHVREPTLVTGLQGKNVRQISAGRCH

SEQ ID NO: 759555 - protein, 3914 aa, Homo sapiens
ACMIVGGIDKHLVFIDATLLCSLQKQLLAFCHINNISENSSSVALLHKHLQLLLPHATDIYSRSANLLKESPWNGSVGEKLRDVIYVSAAGSMLCQIVNSLLLLPVSVARPLLSYLLDLLPPLDCLNRLLPAADLLEDQELQWPLHGGPELIDPAGLPLPQPAQSWVWLVDLERTIALLIGRCLGGMLQGSPVSPEEQDTAYWMKTPLFSDGVEMDTPQLDKCMSCLLEVALSGNEEQKPFDYKLRPEIAVYVDLALGCSKEPARSLWISMQDYAVSKDWDSATLSNESLLDTVSRFVLAALLKHTNLLSQACGESRQELKTILRQIFALMMSEIRELFYFGSSFRYQPGKHLSEVYRCVYKVRSRLLACKNLELIQTRSSSRDRWISENQDSADVDPQEHSFTRTIDEEAEMEEQAERDREEGHPEPEDEEEEREHEVMTAGKIFQCFLSAREVARSRDRDRMNSGAGSGARADDPPPQSQQERRVSTDLPEGQDVYTAACNSVIHRCALLILGVSPVIDELQKRREEGQLQQPSTSASEGGGLMTRSESLTAESRLVHTSPNYRLIKSRSESDLSQPESDEEGYALSGRRNVDLDLAASHRKRGPMHSQLESLSDSWARLKHSRDWLCNSSYSFESDFDLTKSLGVHTLIENVVSFVSGDVGNAPGFKEPEESMSTSPQASIIAMEQQQLRAELRLEALHQILVLLSGMEEKGSISLAGSRLSSGFQSSTLLTSVRLQFLAGCFGLGTVGHTGAKGESGRLHHYQDGIRAAKRNIQIEIQVAVHKIYQQLSATLERALQANKHHIEAQQRLLLVTVFALSVHYQPVDVSLAISTGLLNVLSQLCGTDTMLGQPLQLLPKTGVSQLSTALKVASTRLLQILAITTGTYADKLSPKVVQSLLDLLCSQLKNLLSQTGVLHMASFGEGEQEDGEEEEKKVDSSGETEKKDFRAALRKQHAAELHLGDFLVFLRRVVSSKAIQSKMASPKWTEVLLNIASQKCSSGIPLVGNLRTRLLALHVLEAVLPACESGVEDDQMAQIVERLFSLLSDCMWETPIAQAKHAIQIKEKEQEIKLQKQGELEEEDENLPIQEVSFDPEKAQCCLVENGQILTHGSGGKGYGLASTGVTSGCYQWKFYIVKENRGNEGTCVGVSRWPVHDFNHRTTSDMWLYRAYSGNLYHNGEQTLTLSSFTQGDFITCVLDMEARTISFGKNGEEPKLAFEDVDAAELYPCVMFYSSNPGEKVKICDMQMRGTPRDLLPGDPICSPVAAVLAEATIQLIRILHRTDRWTYCINKKMMERLHKIKICIKESGQKLKKSRSVQSREENEMREEKESKEEEKGKHTRHGLADLSELQLRTLCIEVWPVLAVIGGVDAGLRVGGRCVHKQTGRHATLLGVVKEGSTSAKVQWDEAEITISFPTFWSPSDTPLYNLEPCEPLPFDVARFRGLTASVLLDLTYLTGVHEDMGKQSTKRHEKKHRHESEEKGDVEQKPESESALDMRTGLTSDDVKSQSTTSSKSENEIASFSLDPTLPSVESQHQITEGKRKNHEHMSKNHDVAQSEIRAVQLSYLYLGAMKSLSALLGCSKYAELLLIPKVLAENGHNSDCASSPVVHEDVEMRAALQFLMRHMVKRAVMRSPIKRALGLADLERAQAMIYKLVVHGLLEDQFGGKIKQEIDQQAEESDPAQQAQTPVTTSPSASSTTSFMSSSLEDTTTATTPVTDTETVPASESPGVMPLSLLRQMFSSYPTTTVLPTRRAQTPPISSLPTSPSDEVGRRQSLTSPDSQSARPANRTALSDPSSRLSTSPPPPAIAVPLLEMGFSLRQIAKAMEATGARGEADAQNITVLAMWMIEHPGHEDEEEPQSGSTADSRPGAAVLGSGGKSNDPCYLQSPGDIPSADAAEMEEGFSESPDNLDHTENAASGSGPSARGRSAVTRRHKFDLAARTLLARAAGLYRSVQAHRNQSRREGISLQQDPGALYDFNLDEELEIDLDDEAMEAMFGQDLTSDNDILGMWIPEHVCESEDREEVVVCELCECSVVSFNQHMKRNHPGCGRSANRQGYRSNGSYVDGWFGGECGSGNPYYLLCGTCREKYLAMKTKSKSTSSERYKGQAPDLIGKQDSVYEEDWDMLDVDEDEKLTGEEEFELLAGPLGLNDRRIVPEPVQFPDSDPLGASVAMVTATNSMEETLMQIGCHGSVEKSSSGRITLGEQAAALANPHDRVVALRRVTAAAQVLLARTMVMRALSLLSVSGSSCSLAAGLESLGLTDIRTLVRLMCLAAAGRAGLSTSPSAMASTSERSRGGHSKANKPISCLAYLSTAVGCLASNAPSAAKLLVQLCTQNLISAATGVNLTTVDDSIQRKFLPSFLRGIAEENKLVTSPNFVVTQALVALLADKGAKLRPNYDKSEVEKKGPLELANALAACCLSSRLSSQHRQWAAQQLVRTLAAHDRDNQTTLQTLADMGGDLRKCSFIKLEAHQNRVMTCVWCNKKGLLATSGNDGTIRVWNVTKKQYSLQQTCVFNRLEGDAEESLGSPSDPSFSPVSWSISGKYLAGALEKMVNIWQVNGGKGLVDIQPHWVSALAWPEEGPATAWSGESPELLLVGRMDGSLGLIEVVDVSTMHRRELEHCYRKDVSVTCIAWFSEDRPFAVGYFDGKLLLGTKEPLEKGGIVLIDAHKDTLISMKWDPTGHILMTCAKEDSVKLWGSISGCWCCLHSLCHPSIVNGIAWCRLPGKGSKLQLLMATGCQSGLVCVWRIPQDTTQTNVTSAEGWWDQESNCQDGYRKSSGAKCVYQLRGHITPVRTVAFSSDGLALVSGGLGGLMNIWSLRDGSVLQTVVIGSGAIQTTVWIPEVGVAACSNRSKDVLVVNCTAEWAAANHVLATCRTALKQQGVLGLNMAPCMRAFLERLPMMLQEQYAYEKPHVVCGDQLVHSPYMQCLASLAVGLHLDQLLCNPPVPPHHQNCLPDPASWNPNEWAWLECFSTTIKAAEALTNGAQFPESFTVPDLEPVPEDELVFLMDNSKWINGMDEQIMSWATSRPEDWHLGGKCDVYLWGAGRHGQLAEAGRNVMVPAAAPSFSQAQQVICGQNCTFVIQANGTVLACGEGSYGRLGQGNSDDLHVLTVISALQGFVVTQLVTSCGSDGHSMALTESGEVFSWGDGDYGKLGHGNSDRQRRPRQIEALQGEEVVQMSCGFKHSAVVTSDGKLFTFGNGDYGRLGLGNTSNKKLPERVTALEGYQIGQVACGLNHTLAVSADGSMVWAFGDGDYGKLGLGNSTAKSSPQKIDVLCGIGIKKVACGTQFSVALTKDGHVYTFGQDRLIGLPEGRARNHNRPQQIPVLAGVIIEDVAVGAEHTLALASNGDVYAWGSNSEGQLGLGHTNHVREPTLVTGLQGKNVRQISAGRCHSAAWTAPPVPPRAPGVSVPLQLGLPDTVPPQYGALREVSIHTVRARLRLLYHFSDLMYSSWRLLNLSPNNQNSTSHYNAGTWGIVQGQLRPLLAPRVYTLPMVRSIGKTMVQGKNYGPQITVKRISTRGRKCKPIFVQIARQVVKLNASDLRLPSRAWKVKLVGEGADDAGGVFDDTITEMCQELETGIVDLLIPSPNATAEVGYNRDRFLFNPSACLDEHLMQFKFLGILMGVAIRTKKPLDLHLAPLVWKQLCCVPLTLEDLEEVDLLYVQTLNSILHIEDSGITEESFHEMIPLDSFVGQSADGKMVPIIPGGNSIPLTFSNRKEYVERAIEYRLHEMDRQVAAVREGMSWIVPVPLLSLLTAKQLEQMVCGMPEISVEVLKKVVRYREVDEQHQLVQWFWHTLEEFSNEERVLFMRFVSGRSRLPANTADISQRFQIMKVDRPYDSLPTSQTCFFQLRLPPYSSQLVMAERLRYAINNCRSIDMDNYMLSRNVDNAEGSDTDY

SEQ ID NO: 759556 - protein, 2862 aa, Homo sapiens
MATMIPPVKLKWLEHLNSSWITEDSESIATREGVAVLYSKLVSNKEVVPLPQQVLCLKGPQLPDFERESLSSDEQDHYLDALLSSQLALAKMVCSDSPFAGALRKRLLVLQRVFYALSNKYHDKGKVKQQQHSPESSSGSADVHSVSERPRSSTDALIEMGVRTGLSLLFALLRQSWMMPVSGPGLSLCNDVIHTAIEVVSSLPPLSLANESKIPPMGLDCLSQVTTFLKGVTIPNSGADTLGRRLASELLLGLAAQRGSLRYLLEWIEMALGASAVVHTMEKGKLLSSQEGMISFDCFMTILMQMRRSLGSSADRSQWREPTRTSDGLCSLYEAALCLFEEVCRMASDYSRTCASPDSIQTGDAPIVSETCEVYVWGSNSSHQLVEGTQEKILQPKLAPSFSDAQTIEAGQYCTFVISTDGSVRACGKGSYGRLGLGDSNNQSTLKKLTFEPHRSIKKVSSSKGSDGHTLAFTTEGEVFSWGDGDYGKLGHGNSSTQKYPKLIQGPLQGKVVVCVSAGYRHSAAVTEDGELYTWGEGDFGRLGHGDSNSRNIPTLVKDISNVGEVSCGSSHTIALSKDGRTVWSFGGGDNGKLGHGDTNRVYKPKVIEALQGMFIRKVCAGSQSSLALTSTGQVYAWGCGACLGCGSSEATALRPKLIEELAATRIVDVSIGDSHCLALSHDNEVYAWGNNSMGQCGQGNSTGPITKPKKVSGLDGIAIQQISAGTSHSLAWTALPRDRQVVAWHRPYCVDLEESTFSHLRSFLERYCDKINSEIPPLPFPSSREHHSFLKLCLKLLSNHLALALAGGVATSILGRQAGPLRNLLFRLMDSTVPDEIQEVVIETLSVGATMLLPPLRERMELLHSLLPQGPDRWESLSKGQRMQLDIILTSLQDHTHVASLLGYSSPSDAADLSSVCTGYGNLSDQPYGTQSCHPDTHLAEILMKTLLRNLGFYTDQAFGELEKNSDKFLLGTSSSENSQPAHLHELLCSLQKQLLAFCHINNISENSSSVALLHKHLQLLLPHATDIYSRSANLLKESPWNGSVGEKLRDVIYVSAAGSMLCQIVNSLLLLPVSVARPLLSYLLDLLPPLDCLNRLLPAADLLEDQELQWPLHGGPELIDPAGLPLPQPAQSWVWLVDLERTIALLIGRCLGGMLQGSPVSPEEQDTAYWMKTPLFSDGVEMDTPQLDKCMSCLLEVALSGNEEQKPFDYKLRPEIAVYVDLALGCSKEPARSLWISMQDYAVSKDWDSATLSNESLLDTVSRFVLAALLKHTNLLSQACGESRQELKTILRQIFALMMSEIRELFYFGSSFRYQPGKHLSEVYRCVYKVRSRLLACKNLELIQTRSSSRDRWISENQDSADVDPQEHSFTRTIDEEAEMEEQAERDREEGHPEPEDEEEEREHEVMTAGKIFQCFLSAREVARSRDRDRMNSGAGSGARADDPPPQSQQERRVSTDLPEGQDVYTAACNSVIHRCALLILGVSPVIDELQKRREEGQLQQPSTSASEGGGLMTRSESLTAESRLVHTSPNYRLIKSRSESDLSQPESDEEGYALSGRRNVDLDLAASHRKRGPMHSQLESLSDSWARLKHSRDWLCNSSYSFESDFDLTKSLGVHTLIENVVSFVSGDVGNWDPTGHILMTCAKEDSVKLWGSISGCWCCLHSLCHPSIVNGIAWCRLPGKGSKLQLLMATGCQSGLVCVWRIPQDTTQTNVTSAEGWWDQESNCQDGYRKSSGAKCVYQLRGHITPVRTVAFSSDGLALVSGGLGGLMNIWSLRDGSVLQTVVIGSGAIQTTVWIPEVGVAACSNRSKDVLVVNCTAEWAAANHVLATCRTALKQQGVLGLNMAPCMRAFLERLPMMLQEQYAYEKPHVVCGDQLVHSPYMQCLASLAVGLHLDQLLCNPPVPPHHQNCLPDPASWNPNEWAWLECFSTTIKAAEALTNGAQFPESFTVPDLEPVPEDELVFLMDNSKWINGMDEQIMSWATSRPEDWHLGGKCDVYLWGAGRHGQLAEAGRNVMVPAAAPSFSQAQQVICGQNCTFVIQANGTVLACGEGSYGRLGQGNSDDLHVLTVISALQGFVVTQLVTSCGSDGHSMALTESGEVFSWGDGDYGKLGHGNSDRQRRPRQIEALQGEEVVQMSCGFKHSAVVTSDGKLFTFGNGDYGRLGLGNTSNKKLPERVTALEGYQIGQVACGLNHTLAVSADGSMVWAFGDGDYGKLGLGNSTAKSSPQKIDVLCGIGIKKVACGTQFSVALTKDGHVYTFGQDRLIGLPEGRARNHNRPQQIPVLAGVIIEDVAVGAEHTLALASNGDVYAWGSNSEGQLGLGHTNHVREPTLVTGLQGKNVRQISAGRCHSAAWTAPPVPPRAPGVSVPLQLGLPDTVPPQYGALREVSIHTVRARLRLLYHFSDLMYSSWRLLNLSPNNQNSTSHYNAGTWGIVQGQLRPLLAPRVYTLPMVRSIGKTMVQGKNYGPQITVKRISTRGRKCKPIFVQIARQVVKLNASDLRLPSRAWKVKLVGEGADDAGGVFDDTITEMCQELETGIVDLLIPSPNATAEVGYNRDRFLFNPSACLDEHLMQFKFLGILMGVAIRTKKPLDLHLAPLVWKQLCCVPLTLEDLEEVDLLYVQTLNSILHIEDSGITEESFHEMIPLDSFVGQSADGKMVPIIPGGNSIPLTFSNRKEYVERAIEYRLHEMDRQVAAVREGMSWIVPVPLLSLLTAKQLEQMVCGMPEISVEVLKKVVRYREVDEQHQLVQWFWHTLEEFSNEERVLFMRFVSGRSRLPANTADISQRFQIMKVDRPYDSLPTSQTCFFQLRLPPYSSQLVMAERLRYAINNCRSIDMDNYMLSRNVDNAEGSDTDY

SEQ ID NO: 759557 - protein, 1332 aa, Homo sapiens
MATMIPPVKLKWLEHLNSSWITEDSESIATREGVAVLYSKLVSNKEVVPLPQQVLCLKGPQLPDFERESLSSDEQDHYLDALLSSQLALAKMVCSDSPFAGALRKRLLVLQRVFYALSNKYHDKGKVKQQQHSPESSSGSADVHSVSERPRSSTDALIEMGVRTGLSLLFALLRQSWMMPVSGPGLSLCNDVIHTAIEVVSSLPPLSLANESKIPPMGLDCLSQVTTFLKGVTIPNSGADTLGRRLASELLLGLAAQRGSLRYLLEWIEMALGASAVVHTMEKGKLLSSQEGMISFDCFMTILMQMRRSLGSSADRSQWREPTRTSDGLCSLYEAALCLFEEVCRMASDYSRTCASPDSIQTGDAPIVSETCEVYVWGSNSSHQLVEGTQEKILQPKLAPSFSDAQTIEAGQYCTFVISTDGSVRACGKGSYGRLGLGDSNNQSTLKKLTFEPHRSIKKVSSSKGSDGHTLAFTTEGEVFSWGDGDYGKLGHGNSSTQKYPKLIQGPLQGKVVVCVSAGYRHSAAVTEDGELYTWGEGDFGRLGHGDSNSRNIPTLVKDISNVGEVSCGSSHTIALSKDGRTVWSFGGGDNGKLGHGDTNRVYKPKVIEALQGMFIRKVCAGSQSSLALTSTGQVYAWGCGACLGCGSSEATALRPKLIEELAATRIVDVSIGDSHCLALSHDNEVYAWGNNSMGQCGQGNSTGPITKPKKVSGLDGIAIQQISAGTSHSLAWTALPRDRQVVAWHRPYCVDLEESTFSHLRSFLERYCDKINSEIPPLPFPSSREHHSFLKLCLKLLSNHLALALAGGVATSILGRQAGPLRNLLFRLMDSTVPDEIQEVVIETLSVGATMLLPPLRERMELLHSLLPQGPDRWESLSKGQRMQLDIILTSLQDHTHVASLLGYSSPSDAADLSSVCTGYGNLSDQPYGTQSCHPDTHLAEILMKTLLRNLGFYTDQAFGELEKNSDKFLLGTSSSENSQPAHLHELLCSLQKQLLAFCHINNISENSSSVALLHKHLQLLLPHATDIYSRSANLLKESPWNGSVGEKLRDVIYVSAAGSMLCQIVNSLLLLPVSVARPLLSYLLDLLPPLDCLNRLLPAADLLEDQELQWPLHGGPELIDPAGLPLPQPAQSWVWLVDLERTIALLIGRCLGGMLQGSPVSPEEQDTAYWMKTPLFSDGVEMDTPQLDKCMSCLLEVALSGNEEQKPFDYKLRPEIAVYVDLALGCSKEPARSLWISMQDYAVSKDWDSATLSNESLLDTVSRFVLAALLKHTNLLSQACGESRYQPGKHLSEVYRCVYKVRSRLLACKNLELIQTRSSSRDRWVKFEIN

SEQ ID NO: 759558 - protein, 1060 aa, Homo sapiens [sequence omitted]

SEQ ID NO: 759559 - protein, 67 aa, Homo sapiens
GSDGHSMALTESGEVFSWGDGDYGKLGHGNSDRQRRPRQIEALQGEEVVQVRQEMDKFAFHCKYTSC

SEQ ID NO: 759560 - protein, 70 aa, Homo sapiens
PITRLSPDVGNPNAVGLHFSSSFHWLPTDPPETPDLYRAIHGSCPGTESKISLEKHFSSLQDPVARSFLH

SEQ ID NO: 759561 - protein, 266 aa, Homo sapiens
AGAESGPQRALSSPTAAAGLVTITPREEPQLPQPAPVTITATMSSEAETQQPPATHPRPALSAADTKPGTTGSGAGSGGPGGLTSAAPAGGHKKVIATKVLGTVKWFNVRNGYGFIHRNDTKEDVFVHQGAEAANVTGPGGVPVQGSKYAADRNHYRRYPRRRGPPRNYQQNYQNSESGEKNEGSESAPEGQAQQRRPYRRRRFPPYYMRRPYGRRPQYSNPPVQGEVMEGADNQGAGDETQGQQPPQRRYRRNFNYRRRRPENPK

SEQ ID NO: 759562 - protein, 55 aa, Homo sapiens
RPQYSNPPVQGEVMEGADNQGAGEQGRPVRQNMYRGYRPRFRRGPPLQRQPREDG

SEQ ID NO: 759563 - protein, 180 aa, Homo sapiens [sequence omitted]

SEQ ID NO: 759564 - protein, 194 aa, Homo sapiens [sequence omitted]

SEQ ID NO: 759565 - protein, 183 aa, Homo sapiens
MAVLAWKFPRTRLPMGASALCVVVLCWLYIFPVYRLPNEKEIVQGVLQQGTAWRRNQTAARAFRKQMEDCCDPAHLFAMTKMNSPMGKSMWYDGEFLYSFTIDNSTYSLFPQATPFQLPLKKCAVVGNGGILKKSGCGRQIDEANFVMRCNLPPLSSEYTKDVGSKSQLVTANPSIIRQRSGG

SEQ ID NO: 759566 - protein, 206 aa, Homo sapiens
MSPCGRARRQTSRGAMAVLAWKFPRTRLPMGASALCVVVLCWLYIFPVYRLPNEKEIVQGVLQQGTAWRRNQTAARAFRKQMEDCCDPAHLFAMTKMNSPMGKSMWYDGEFLYSFTIDNSTYSLFPQATPFQLPLKKCAVVGNGGILKKSGCGRQIDEANFVMRCNLPPLSSEYTKDVGSKSQLVTANPSIIRQRFWYQDDAGLIK

SEQ ID NO: 759567 - protein, 356 aa, Homo sapiens
MSPCGRARRQTSRGAMAVLAWKFPRTRLPMGASALCVVVLCWLYIFPVYRLPNEKEIVQGVLQQGTAWRRNQTAARAFRKQMEDCCDPAHLFAMTKMNSPMGKSMWYDGEFLYSFTIDNSTYSLFPQATPFQLPLKKCAVVGNGGILKKSGCGRQIDEANFVMRCNLPPLSSEYTKDVGSKSQLVTANPSIIRQRFQNLLWSRKTFVDNMKIYNHSYIYMPAFSMKTGTEPSLRVYYTLSDVGANQTVLFANPNFLRSIGKFWKSRGIHAKRLSTGLFLVSAALGLCEEVAIYGFWPFSVNMHEQPISHHYYDNVLPFSGFHAMPEEFLQLWYLHKIGALRMQLDPCEDTSLQPTS

SEQ ID NO: 759568 - protein, 356 aa, Homo sapiens; identical to SEQ ID NO: 759567

SEQ ID NO: 759569 - protein, 240 aa, Homo sapiens
MVNEYKNSTVIATPFQLPLKKCAVVGNGGILKKSGCGRQIDEANFVMRCNLPPLSSEYTKDVGSKSQLVTANPSIIRQRFQNLLWSRKTFVDNMKIYNHSYIYMPAFSMKTGTEPSLRVYYTLSDVGANQTVLFANPNFLRSIGKFWKSRGIHAKRLSTGLFLVSAALGLCEEVAIYGFWPFSVNMHEQPISHHYYDNVLPFSGFHAMPEEFLQLWYLHKIGALRMQLDPCEDTSLQPTS

SEQ ID NO: 759570 - protein, 134 aa, Homo sapiens
MSPCGRARRQTSRGAMAVLAWKFPRTRLPMGASALCVVVLCWLYIFPVYRLPNEKEIVQGVLQQGTAWRRNQTAARAFRKQMEDCCDPAHLFAMTKMNSPMGKSMWYDGEFLYSFTIDNSTYSLFPQQPHSSCH

SEQ ID NO: 759571 - protein, 196 aa, Homo sapiens
  misc_feature (156)..(156): Xaa can be any naturally occurring amino acid
  misc_feature (169)..(169): Xaa can be any naturally occurring amino acid
  misc_feature (178)..(178): Xaa can be any naturally occurring amino acid
MLFNLRILLNNAAFRNGHNFMVRNFRCGQPLQNKVQLKGRDLLTLKNFTGEEIKYMLWLSADLKFRIKQKGEYLPLLQGKSLGMIFEKRSTRTRLSTETGFALLGGPSLFLTTQDIHLGVNESLTDTARVLSSMADAVLARVYKQSDLDTLAKEAXIPNINGLSELYHXIQILADYLXAQEHYSSLKGLTLSWIGD

SEQ ID NO: 759572 - protein, 178 aa, Homo sapiens
  misc_feature (138)..(138): Xaa can be any naturally occurring amino acid
  misc_feature (151)..(151): Xaa can be any naturally occurring amino acid
  misc_feature (160)..(160): Xaa can be any naturally occurring amino acid
MLFNLRILLNNAAFRNGHNFMVRNFRCGQPLQNKVQLKGRDLLTLKNFTGEEIKYMLWLSADLKFRIKQKGEYLPLLQGKSLGMIFEGPSLFLTTQDIHLGVNESLTDTARVLSSMADAVLARVYKQSDLDTLAKEAXIPNINGLSELYHXIQILADYLXAQEHYSSLKGLTLSWIGD

SEQ ID NO: 759573 - protein, 586 aa, Homo sapiens
MARGYGATVSLVLLGLGLALAVIVLAVVLSRHQAPCGPQAFAHAAVAADSKVCSDIGRAILQQQGSPVDATIAALVCTSVVNPQSMGLGGGVIFTIYNVTTGKVEVINARETVPASHAPSLLDQCAQALPLGTGAQWIGVPGELRGYAEAHRRHGRLPWAQLFQPTIALLRGGHVVAPVLSRFLHNSILRPSLQASTLRQLFFNGTEPLRPQDPLPWPALATTLETVATEGVEVFYTGRLGQMLVEDIAKEGSQLTLQDLAKFQPEVVDALEVPLGDYTLYSPPPPAGGAILSFILNVLRGFNFSTESMARPEGRVNVYHHLVETLKFAKGQRWRLGDPRSHPKLQNASRDLLGETLAQLIRQQIDGRGDHQLSHYSLAEAWGHGTGTSHVSVLGEDGSAVAATSTINTPFGAMVYSPRTGIILNNELLDLCERCPRGSGTTPSPVSGDRVGGAPGRCWPPVPGERSPSSMVPSILINKAQGSKLVIGGAGGELIISAVAQAIMSKLWLGFDLRAAIAAPILHVNSKGCVEYEPNFSQEVQRGLQDRGQNQTQRPFFLNVVQAVSQEGACVYAVSDLRKSGEAAGY

SEQ ID NO: 759574 - protein, 533 aa, Homo sapiens
MARGYGATVSLVLLGLGLALAVIVLAVVLSRHQAPCGPQAFAHAAVAADSKVCSDIGRAILQQQGSPVDATIAALVCTSVVNPQSMGLGGGVIFTIYNVTTGAQWIGVPGELRGYAEAHRRHGRLPWAQLFQPTIALLRGGHVVAPVLSRFLHNSILRPSLQASTLRQLFFNGTEPLRPQDPLPWPALATTLETVATEGVEVFYTGRLGQMLVEDIAKEGSQLTLQDLAKFQPEVVDALEVPLGDYTLYSPPPPAGGAILSFILNVLRGFNFSTESMARPEGRVNVYHHLVETLKFAKGQRWRLGDPRSHPKLQNASRDLLGETLAQLIRQQIDGRGDHQLSHYSLAEAWGHGTGTSHVSVLGEDGSAVAATSTINTPFGAMVYSPRTGIILNNELLDLCERCPRGSGTTPSPVSGDRVGGAPGRCWPPVPGERSPSSMVPSILINKAQGSKLVIGGAGGELIISAVAQAIMSKLWLGFDLRAAIAAPILHVNSKGCVEYEPNFSQRRCLALLPWLFSNSWPQVILPPWLPSG

SEQ ID NO: 759575 - protein, 530 aa, Homo sapiens
MARGYGATVSLVLLGLGLALAVIVLAVVLSRHQAPCGPQAFAHAAVAADSKVCSDIGRAILQQQGSPVDATIAALVCTSVVNPQSMGLGGGVIFTIYNVTTGKVEVINARETVPASHAPSLLDQCAQALPLGTGAQWIGVPGELRGYAEAHRRHGRLPWAQLFQPTIALLRGGHVVAPVLSRFLHNSILRPSLQASTLRQLFFNGTEPLRPQDPLPWPALATTLETVATEGVEVFYTGRLGQMLVEDIAKEGSQLTLQDLAKFQPEVVDALEVPLGDYTLYSPPPPAGGAILSFILNVLRGFNFSTESMARPEGRVNVYHHLVETLKFAKGQRWRLGDPRSHPKLQNASRDLLGETLAQLIRQQIDGRGDHQLSHYSLAEAWGHGTGTSHVSVLGEDGSAVAATSTINTPFGAMVYSPRTGIILNNELLDLCERCPRGSGTTPHLAIMSKLWLGFDLRAAIAAPILHVNSKGCVEYEPNFSQEVQRGLQDRGQNQTQRPFFLNVVQAVSQEGACVYAVSDLRKSGEAAGY

SEQ ID NO: 759576 - protein, 330 aa, Homo sapiens
LQTLPTPFIRPCTQQRQLTWSVTVTYVHPGPNKCYVLSPIHIERRAEGEVYCVPSTHCSITPATLRAILVRRVRSMARLYYRHIYDPLPDNASRDLLGETLAQLIRQQIDGRGDHQLSHYSLAEAWGHGTGTSHVSVLGEDGSAVAATSTINTPFGAMVYSPRTGIILNNELLDLCERCPRGSGTTPSPVSGDRVGGAPGRCWPPVPGERSPSSMVPSILINKAQGSKLVIGGAGGELIISAVAQAIMSKLWLGFDLRAAIAAPILHVNSKGCVEYEPNFSQEVQRGLQDRGQNQTQRPFFLNVVQAVSQEGACVYAVSDLRKSGEAAGY

SEQ ID NO: 759577 - protein, 520 aa, Homo sapiens
EGQQRDLIRRIECLPTSGHLSSLDQDLLMLKATSMATMNCLNDCFHILQLQHASHQKGSLPSGTTIEWLEPKISLSNHYKNGADQPFATDQSKPVAVPEEQPVAESGLLAREPEEINADDEIEDTCDHKEDDLGAVEEQRSVILHLLSQLKLGMDLTRVVLPTFILEKRSLLEMYADFMSHPDLFIAITNGATAEDRMIRFVEYYLTSFHEGRKGAIAKKPYNPIIGETFHCSWKMPKSEVASSVFSSSSTQGVTNHAPLSGESLTQVGSDCYTVRFVAEQVSHHPPVSGFYAECTERKMCVNAHVWTKSKFLGMSIGVTMVGEGILSLLEHGEEYTFSLPCAYARSILTVPWVELGGKVSVNCAKTGYSASITFHTKPFYGGKLHRVTAEVKHNITNTVVCRVQGEWNSVLEFTYSNGETKYVDLTKLAVTKKRVRPLEKQDPFESRRLWKNVTDSLRESEIDKATEHKHTLEERQRTEERHRTETGTPWKTKYFIKEGDGWVYHKPLWKIIPTTQPAE

SEQ ID NO: 759578 - protein, 120 aa, Homo sapiens
CARSAVPLFGGAEAGSSNGETKYVDLTKLAVTKKRVRPLEKQDPFESRRLWKNVTDSLRESEIDKATEHKHTLEERQRTEERHRTETGTPWKTKYFIKEGDGWVYHKPLWKIIPTTQPAE

SEQ ID NO: 759579 - protein, 520 aa, Homo sapiens; identical to SEQ ID NO: 759577

SEQ ID NO: 759580 - protein, 392 aa, Homo sapiens
EGQQRDLIRRIECLPTSGHLSSLDQDLLMLKATSMATMNCLNDCFHILQLQHASHQKGSLPSGTTIEWLEPKISLSNHYKNGADQPFATDQSKPVAVPEEQPVAESGLLAREPEEINADDEIEDTCDHKEDDLGAVEEQRSVILHLLSQLKLGMDLTRVVLPTFILEKRSLLEMYADFMSHPDLFIAITNGATAEDRMIRFVEYYLTSFHEGRKGAIAKKPYNPIIGETFHCSWKMPKSEVASSVFSSSSTQGVTNHAPLSGESLTQVGSDCYTVRFVAEQVSHHPPVSGFYAECTERKMCVNAHVWTKSKFLGMSIGVTMVGEGILSLLEHGEEYTFSLPCAYARSILTVPWVELGGKVSVNCAKTGYSASITFHTKPFYGGKLHRAISSP

SEQ ID NO: 759581 - protein, 114 aa, Homo sapiens
ESQELLRRSHCLHATCFDDPALPSLCSKGRALPLPVPDGSQGDAGQQVCMARPGHQGPDSMAASFILSLFVPLARLMRFLEDKTPSCHLVCFLNIHCTSTAPGRSPWESGRRPW

SEQ ID NO: 759582 - protein, 794 aa, Homo sapiens
MLTRNCLSLLLWVLFDGGLLTPLQPQPQQTLATEPRENVIHLPGQRSHFQRVKRGWVWNQFFVLEEYVGSEPQYVGKLHSDLDKGEGTVKYTLSGDGAGTVFTIDETTGDIHAIRSLDREEKPFYTLRAQAVDIETRKPLEPESEFIIKVQDINDNEPKFLDGPYVATVPEMSPVGAYVLQVKATDADDPTYGNSARVVYSILQGQPYFSIDPKTGVIRTALPNMDREVKEQYQVLIQAKDMGGQLGGLAGTTIVNITLTDVNDNPPRFPKSIFHLKVPESSPIGSAIGRIRAVDPDFGQNAEIEYNIVPGDGGNLFDIVTDEDTQEGVIKLKKPLDFETKKAYTFKVEASNLHLDHRFHSAGPFKDTATVKISVLDVDEPPVFSKPLYTMEVYEDTPVGTIIGAVTAQDLDVGSSAVRYFIDWKSDGDSYFTIDGNEGTIATNELLDRESTAQYNFSIIASKVSNPLLTSKVNILINVLDVNEFPPEISVPYETAVCENAKPGQIIQIVSAADRDLSPAGQQFSFRLSPEAAIKPNFTVRDFRNNTAGIETRRNGYSRRQQELYFLPVVIEDSSYPVQSSTNTMTIRVCRCDSDGTILSCNVEAIFLPVGLSTGALIAILLCIVILLAIVVLYVALRRQKKKDTLMTSKEDIRDNVIHYDDEGGGEEDTQAFDIGALRNPKVIEENKIRRDIKPDSLCLPRQRPPMEDNTDIRDFIHQRLQENDVDPTAPPYDSLATYAYEGSGSVAESLSSIDSLTTEADQDYDYLTDWGPRFKVLADMFGEEESYNPDKVT

SEQ ID NO: 759583 - protein, 208 aa, Homo sapiens
MQAGFGRQPNRPCLDKTWSDESKILSAMGHPVESSIWPRASPPFKCTYVLPLTSPFNVTCFSKSPGANNPGSSNPSYWGQIIQIVSAADRDLSPAGQQFSFRLSPEAAIKPNFTVRDFRNNTAGIETRRNGYSRRQQELYFLPVVIEDSSYPVQSSTNTMTIRVCRCDSDGTILSCNVEAIFLPVGLSTGALIAILLCIVILLGWFQY

SEQ ID NO: 759584 - protein, 346 aa, Homo sapiens
MLTRNCLSLLLWVLFDGGLLTPLQPQPQQTLATEPRENVIHLPGQRSHFQRVKRGWVWNQFFVLEEYVGSEPQYVGKLHSDLDKGEGTVKYTLSGDGAGTVFTIDETTGDIHAIRSLDREEKPFYTLRAQAVDIETRKPLEPESEFIIKVQDINDNEPKFLDGPYVATVPEMSPVGAYVLQVKATDADDPTYGNSARVVYSILQGQPYFSIDPKTGVIRTALPNMDREVKEQYQVLIQAKDMGGQLGGLAGTTIVNITLTDVNDNPPRFPKSIFHLKVPESSPIGSAIGRIRAVDPDFGQNAEIEYNIVPGDGGNLFDIVTDEDTQEGVIKLKKVYRQMLGQLTTK

SEQ ID NO: 759585 - protein, 794 aa, Homo sapiens; identical to SEQ ID NO: 759582

SEQ ID NO: 759586 - protein, 637 aa, Homo sapiens [sequence omitted]

SEQ ID NO: 759587 - protein, 300 aa, Homo sapiens
LFITHKKRTSRIIQIVSAADRDLSPAGQQFSFRLSPEAAIKPNFTVRDFRNNTAGIETRRNGYSRRQQELYFLPVVIEDSSYPVQSSTNTMTIRVCRCDSDGTILSCNVEAIFLPVGLSTGALIAILLCIVILLAIVVLYVALRRQKKKDTLMTSKEDIRDNVIHYDDEGGGEEDTQAFDIGALRNPKVIEENKIRRDIKPDSLCLPRQRPPMEDNTDIRDFIHQRLQENDVDPTAPPYDSLATYAYEGSGSVAESLSSIDSLTTEADQDYDYLTDWGPRFKVLADMFGEEESYNPDKVT

SEQ ID NO: 759588 - protein, 118 aa, Homo sapiens
KLPTKLLPTQRTPGPPLPPEGLRLPVTLRPTSRRYGLMRECWHAAPSQRPTFKQLVEALDKVLLAVSEEYLDLRLTFGPYSPSGGDASSTCSSSDSVFSHDPLPLGSSSFPFGSGVQT

SEQ ID NO: 759589 - protein, 872 aa, Homo sapiens
EVGRSRPRRRRGYIPRSRPRSARAVCGPCRVQGSRPAGAGSEAAEEPGEEEPGRQLVGSPAWVPESCEKEMRLLLALLGVLLSVPGPPVLSLEASEEVELEPCLAPSLEQQEQELTVALGQPVRLCCGRAERGGHWYKEGSRLAPAGRVRGWRGRLEIASFLPEDAGRYLCLARGSMIVLQNLTLITGDSLTSSNDDEDPKSHRDLSNRHSYPQQAPYWTHPQRMEKKLHAVPAGNTVKFRCPAAGNPTPTIRWLKDGQAFHGENRIGGIRLRHQHWSLVMESVVPSDRGTYTCLVENAVGSIRYNYLLDVLERSPHRPILQAGLPANTTAVVGSDVELLCKVYSDAQPHIQWLKHIVINGSSFGADGFPYVQVLKTADINSSEVEVLYLRNVSAEDAGEYTCLAGNSIGLSYQSAWLTVLPEEDPTWTAAAPEARYTDIILYASGSLALAVLLLLAGLYRGQALHGRHPRPPATVQKLSRFPLARQFSLESGSSGKSSSSLVRGVRLSSSGPALLAGLVSLDLPLDPLWEFPRDRLVLGKPLGEGCFGQVVRAEAFGMDPARPDQASTVAVKMLKDNASDKDLADLVSEMEVMKLIGRHKNIINLLGVCTQEGPLYVIVECAAKGNLREFLRARRPPGPDLSPDGPRSSEGPLSFPVLVSCAYQVARGMQYLESRKCIHRDLAARNVLVTEDNVMKIADFGLARGVHHIDYYKKTSNGRLPVKWMAPEALFDRVYTHQSDVWSFGILLWEIFTLGGSPYPGIPVEELFSLLREGHRMDRPPHCPPELYGLMRECWHAAPSQRPTFKQLVEALDKVLLAVSEEYLDLRLTFGPYSPSGGDASSTCSSSDSVFSHDPLPLGSSSFPFGSGVQT

SEQ ID NO: 759590 - protein, 802 aa, Homo sapiens
MRLLLALLGVLLSVPGPPVLSLEASEEVELEPCLAPSLEQQEQELTVALGQPVRLCCGRAERGGHWYKEGSRLAPAGRVRGWRGRLEIASFLPEDAGRYLCLARGSMIVLQNLTLITGDSLTSSNDDEDPKSHRDLSNRHSYPQQAPYWTHPQRMEKKLHAVPAGNTVKFRCPAAGNPTPTIRWLKDGQAFHGENRIGGIRLRHQHWSLVMESVVPSDRGTYTCLVENAVGSIRYNYLLDVLERSPHRPILQAGLPANTTAVVGSDVELLCKVYSDAQPHIQWLKHIVINGSSFGADGFPYVQVLKTADINSSEVEVLYLRNVSAEDAGEYTCLAGNSIGLSYQSAWLTVLPEEDPTWTAAAPEARYTDIILYASGSLALAVLLLLAGLYRGQALHGRHPRPPATVQKLSRFPLARQFSLESGSSGKSSSSLVRGVRLSSSGPALLAGLVSLDLPLDPLWEFPRDRLVLGKPLGEGCFGQVVRAEAFGMDPARPDQASTVAVKMLKDNASDKDLADLVSEMEVMKLIGRHKNIINLLGVCTQEGPLYVIVECAAKGNLREFLRARRPPGPDLSPDGPRSSEGPLSFPVLVSCAYQVARGMQYLESRKCIHRDLAARNVLVTEDNVMKIADFGLARGVHHIDYYKKTSNGRLPVKWMAPEALFDRVYTHQSDVWSFGILLWEIFTLGGSPYPGIPVEELFSLLREGHRMDRPPHCPPELYGLMRECWHAAPSQRPTFKQLVEALDKVLLAVSEEYLDLRLTFGPYSPSGGDASSTCSSSDSVFSHDPLPLGSSSFPFGSGVQT

SEQ ID NO: 759591 - protein, 832 aa, Homo sapiens
EVGRSRPRRRRGYIPRSRPRSARAVCGPCRVQGSRPAGAGSEAAEEPGEEEPGRQLVGSPAWVPESCEKEMRLLLALLGVLLSVPGPPVLSLEASEEVELEPCLAPSLEQQEQELTVALGQPVRLCCGRAERGGHWYKEGSRLAPAGRVRGWRGRLEIASFLPEDAGRYLCLARGSMIVLQNLTLITGDSLTSSNDDEDPKSHRDLSNRHSYPQQAPYWTHPQRMEKKLHAVPAGNTVKFRCPAAGNPTPTIRWLKDGQAFHGENRIGGIRLRHQHWSLVMESVVPSDRGTYTCLVENAVGSIRYNYLLDVLERSPHRPILQAGLPANTTAVVGSDVELLCKVYSDAQPHIQWLKHIVINGSSFGADGFPYVQVLKTADINSSEVEVLYLRNVSAEDAGEYTCLAGNSIGLSYQSAWLTVLPGTGRIPHLTCDSLTPAGRTKSPTLQFSLESGSSGKSSSSLVRGVRLSSSGPALLAGLVSLDLPLDPLWEFPRDRLVLGKPLGEGCFGQVVRAEAFGMDPARPDQASTVAVKMLKDNASDKDLADLVSEMEVMKLIGRHKNIINLLGVCTQEGPLYVIVECAAKGNLREFLRARRPPGPDLSPDGPRSSEGPLSFPVLVSCAYQVARGMQYLESRKCIHRDLAARNVLVTEDNVMKIADFGLARGVHHIDYYKKTSNGRLPVKWMAPEALFDRVYTHQSDVWSFGILLWEIFTLGGSPYPGIPVEELFSLLREGHRMDRPPHCPPELYGLMRECWHAAPSQRPTFKQLVEALDKVLLAVSEEYLDLRLTFGPYSPSGGDASSTCSSSDSVFSHDPLPLGSSSFPFGSGVQT

SEQ ID NO: 759592 - protein, 266 aa, Homo sapiens
EVGRSRPRRRRGYIPRSRPRSARAVCGPCRVQGSRPAGAGSEAAEEPGEEEPGRQLVGSPAWVPESCEKEMRLLLALLGVLLSVPGPPVLSLEASEEVELDSLTSSNDDEDPKSHRDLSNRHSYPQQAPYWTHPQRMEKKLHAVPAGNTVKFRCPAAGNPTPTIRWLKDGQAFHGENRIGGIRLRHQHWSLVMESVVPSDRGTYTCLVENAVGSIRYNYLLDVLERSRTGPSEAGSGTHSVVGASDCFMVRIRPFVVSLLRRVSGP

SEQ ID NO: 759593 - protein, 247 aa, Homo sapiens
EVGRSRPRRRRGYIPRSRPRSARAVCGPCRVQGSRPAGAGSEAAEEPGEEEPGRQLVGSPAWVPESCEKEMRLLLALLGVLLSVPGPPVLSLEASEEVELEPCLAPSLEQQEQELTVALGQPVRLCCGRAERGGHWYKEGSRLAPAGRVRGWRGRLEIASFLPEDAGRYLCLARGSMIVLQNLTLITGEQHSGRDVSLRGLRLCSQLLSLSGLEAIQRYSKDSGLLTVIQAENGKSNFLSLLCGLGF

SEQ ID NO: 759594 - protein, 839 aa, Homo sapiens
MRLLLALLGVLLSVPGPPVLSLEASEEVELEPCLAPSLEQQEQELTVALGQPVRLCCGRAERGGHWYKEGSRLAPAGRVRGWRGRLEIASFLPEDAGRYLCLARGSMIVLQNLTLITGDSLTSSNDDEDPKSHRDLSNRHSYPQQGQWSPRTCVPAAAHLITEKRRPVWEHTVILGAFPCPPAPYWTHPQRMEKKLHAVPAGNTVKFRCPAAGNPTPTIRWLKDGQAFHGENRIGGIRLRHQHWSLVMESVVPSDRGTYTCLVENAVGSIRYNYLLDVLERSPHRPILQAGLPANTTAVVGSDVELLCKVYSDAQPHIQWLKHIVINGSSFGADGFPYVQVLKTADINSSEVEVLYLRNVSAEDAGEYTCLAGNSIGLSYQSAWLTVLPEEDPTWTAAAPEARYTDIILYASGSLALAVLLLLAGLYRGQALHGRHPRPPATVQKLSRFPLARQFSLESGSSGKSSSSLVRGVRLSSSGPALLAGLVSLDLPLDPLWEFPRDRLVLGKPLGEGCFGQVVRAEAFGMDPARPDQASTVAVKMLKDNASDKDLADLVSEMEVMKLIGRHKNIINLLGVCTQEGPLYVIVECAAKGNLREFLRARRPPGPDLSPDGPRSSEGPLSFPVLVSCAYQVARGMQYLESRKCIHRDLAARNVLVTEDNVMKIADFGLARGVHHIDYYKKTSNGRLPVKWMAPEALFDRVYTHQSDVWSFGILLWEIFTLGGSPYPGIPVEELFSLLREGHRMDRPPHCPPELYGLMRECWHAAPSQRPTFKQLVEALDKVLLAVSEEYLDLRLTFGPYSPSGGDASSTCSSSDSVFSHDPLPLGSSSFPFGSGVQT

SEQ ID NO: 759595 - protein, 713 aa, Homo sapiens
MRTPSPIGTSRIGTVTPSKVSRSPRTCVPAAAHLITEKRRPVWEHTVILGAFPCPPAPYWTHPQRMEKKLHAVPAGNTVKFRCPAAGNPTPTIRWLKDGQAFHGENRIGGIRLRHQHWSLVMESVVPSDRGTYTCLVENAVGSIRYNYLLDVLERSPHRPILQAGLPANTTAVVGSDVELLCKVYSDAQPHIQWLKHIVINGSSFGADGFPYVQVLKTADINSSEVEVLYLRNVSAEDAGEYTCLAGNSIGLSYQSAWLTVLPEEDPTWTAAAPEARYTDIILYASGSLALAVLLLLAGLYRGQALHGRHPRPPATVQKLSRFPLARQFSLESGSSGKSSSSLVRGVRLSSSGPALLAGLVSLDLPLDPLWEFPRDRLVLGKPLGEGCFGQVVRAEAFGMDPARPDQASTVAVKMLKDNASDKDLADLVSEMEVMKLIGRHKNIINLLGVCTQEGPLYVIVECAAKGNLREFLRARRPPGPDLSPDGPRSSEGPLSFPVLVSCAYQVARGMQYLESRKCIHRDLAARNVLVTEDNVMKIADFGLARGVHHIDYYKKTSNGRLPVKWMAPEALFDRVYTHQSDVWSFGILLWEIFTLGGSPYPGIPVEELFSLLREGHRMDRPPHCPPELYGLMRECWHAAPSQRPTFKQLVEALDKVLLAVSEEYLDLRLTFGPYSPSGGDASSTCSSSDSVFSHDPLPLGSSSFPFGSGVQT

SEQ ID NO: 759596 - protein, 692 aa, Homo sapiens
MLPSVPDVDSLTSSNDDEDPKSHRDLSNRHSYPQQAPYWTHPQRMEKKLHAVPAGNTVKFRCPAAGNPTPTIRWLKDGQAFHGENRIGGIRLRHQHWSLVMESVVPSDRGTYTCLVENAVGSIRYNYLLDVLERSPHRPILQAGLPANTTAVVGSDVELLCKVYSDAQPHIQWLKHIVINGSSFGADGFPYVQVLKTADINSSEVEVLYLRNVSAEDAGEYTCLAGNSIGLSYQSAWLTVLPEEDPTWTAAAPEARYTDIILYASGSLALAVLLLLAGLYRGQALHGRHPRPPATVQKLSRFPLARQFSLESGSSGKSSSSLVRGVRLSSSGPALLAGLVSLDLPLDPLWEFPRDRLVLGKPLGEGCFGQVVRAEAFGMDPARPDQASTVAVKMLKDNASDKDLADLVSEMEVMKLIGRHKNIINLLGVCTQEGPLYVIVECAAKGNLREFLRARRPPGPDLSPDGPRSSEGPLSFPVLVSCAYQVARGMQYLESRKCIHRDLAARNVLVTEDNVMKIADFGLARGVHHIDYYKKTSNGRLPVKWMAPEALFDRVYTHQSDVWSFGILLWEIFTLGGSPYPGIPVEELFSLLREGHRMDRPPHCPPELYGLMRECWHAAPSQRPTFKQLVEALDKVLLAVSEEYLDLRLTFGPYSPSGGDASSTCSSSDSVFSHDPLPLGSSSFPFGSGVQT

SEQ ID NO: 759597 - protein, 788 aa, Homo sapiens
MRLLLALLGVLLSVPGPPVLSLEASEEVELEPCLAPSLEQQEQELTVALGQPVRLCCGRAERGGHWYKEGSRLAPAGRVRGWRGRLEIASFLPEDAGRYLCLARGSMIVLQNLTLITGDSLTSSNDDEDPKSHRDLSNRHSYPQQAPYWTHPQRMEKKLHAVPAGNTVKFRCPAAGNPTPTIRWLKDGQAFHGENRIGGIRLRHQHWSLVMESVVPSDRGTYTCLVENAVGSIRYNYLLDVLERSPHRPILQAGLPANTTAVVGSDVELLCKVYSDAQPHIQWLKHIVINGSSFGADGFPYVQVLKTADINSSEVEVLYLRNVSAEDAGEYTCLAGNSIGLSYQSAWLTVLPEEDPTWTAAAPEARYTDIILYASGSLALAVLLLLAGLYRGQALHGRHPRPPATVQKLSRFPLARQFSLESGSSGKSSSSLVRGVRLSSSGPALLAGLVSLDLPLDPLWEFPRDRLVLGKPLGEGCFGQVVRAEAFGMDPARPDQASTVAVKMLKDNASDKDLADLVSEMEVMKLIGRHKNIINLLGVCTQEGPLYVIVECAAKGNLREFLRARRPPGPDLSPDGPRSSEGPLSFPVLVSCAYQVARGMQYLESRKCIHRDLAARNVLVTEDNVMKIADFGLARGVHHIDYYKKTSNDRVYTHQSDVWSFGILLWEIFTLGGSPYPGIPVEELFSLLREGHRMDRPPHCPPELYGLMRECWHAAPSQRPTFKQLVEALDKVLLAVSEEYLDLRLTFGPYSPSGGDASSTCSSSDSVFSHDPLPLGSSSFPFGSGVQT

SEQ ID NO: 759598 - protein, 762 aa, Homo sapiens
MRLLLALLGVLLSVPGPPVLSLEASEEVELEPCLAPSLEQQEQELTVALGQPVRLCCGRAERGGHWYKEGSRLAPAGRVRGWRGRLEIASFLPEDAGRYLCLARGSMIVLQNLTLITGDSLTSSNDDEDPKSHRDLSNRHSYPQQAPYWTHPQRMEKKLHAVPAGNTVKFRCPAAGNPTPTIRWLKDGQAFHGENRIGGIRLRHQHWSLVMESVVPSDRGTYTCLVENAVGSIRYNYLLDVLERSPHRPILQAGLPANTTAVVGSDVELLCKVYSDAQPHIQWLKHIVINGSSFGADGFPYVQVLKTADINSSEVEVLYLRNVSAEDAGEYTCLAGNSIGLSYQSAWLTVLPGTGRIPHLTCDSLTPAGRTKSPTLQFSLESGSSGKSSSSLVRGVRLSSSGPALLAGLVSLDLPLDPLWEFPRDRLVLGKPLGEGCFGQVVRAEAFGMDPARPDQASTVAVKMLKDNASDKDLADLVSEMEVMKLIGRHKNIINLLGVCTQEGPLYVIVECAAKGNLREFLRARRPPGPDLSPDGPRSSEGPLSFPVLVSCAYQVARGMQYLESRKCIHRDLAARNVLVTEDNVMKIADFGLARGVHHIDYYKKTSNGRLPVKWMAPEALFDRVYTHQSDVWSFGILLWEIFTLGGSPYPGIPVEELFSLLREGHRMDRPPHCPPELYGLMRECWHAAPSQRPTFKQLVEALDKVLLAVSEEYLDLRLTFGPYSPSGGDASSTCSSSDSVFSHDPLPLGSSSFPFGSGVQT

SEQ ID NO: 759599 - protein, 454 aa, Homo sapiens
MVQRLGVNRPSAAAPEARYTDIILYASGSLALAVLLLLAGLYRGQALHGRHPRPPATVQKLSRFPLARQFSLESGSSGKSSSSLVRGVRLSSSGPALLAGLVSLDLPLDPLWEFPRDRLVLGKPLGEGCFGQVVRAEAFGMDPARPDQASTVAVKMLKDNASDKDLADLVSEMEVMKLIGRHKNIINLLGVCTQEGPLYVIVECAAKGNLREFLRARRPPGPDLSPDGPRSSEGPLSFPVLVSCAYQVARGMQYLESRKCIHRDLAARNVLVTEDNVMKIADFGLARGVHHIDYYKKTSNGRLPVKWMAPEALFDRVYTHQSDVWSFGILLWEIFTLGGSPYPGIPVEELFSLLREGHRMDRPPHCPPELYGLMRECWHAAPSQRPTFKQLVEALDKVLLAVSEEYLDLRLTFGPYSPSGGDASSTCSSSDSVFSHDPLPLGSSSFPFGSGVQT

SEQ ID NO: 759600 - protein, 376 aa, Homo sapiens
MYEAGCESAEGLSSSGPALLAGLVSLDLPLDPLWEFPRDRLVLGKPLGEGCFGQVVRAEAFGMDPARPDQASTVAVKMLKDNASDKDLADLVSEMEVMKLIGRHKNIINLLGVCTQEGPLYVIVECAAKGNLREFLRARRPPGPDLSPDGPRSSEGPLSFPVLVSCAYQVARGMQYLESRKCIHRDLAARNVLVTEDNVMKIADFGLARGVHHIDYYKKTSNGRLPVKWMAPEALFDRVYTHQSDVWSFGILLWEIFTLGGSPYPGIPVEELFSLLREGHRMDRPPHCPPELYGLMRECWHAAPSQRPTFKQLVEALDKVLLAVSEEYLDLRLTFGPYSPSGGDASSTCSSSDSVFSHDPLPLGSSSFPFGSGVQT

SEQ ID NO: 759601 - protein, 449 aa, Homo sapiens
MRLLLALLGVLLSVPGPPVLSLEASEEVELEPCLAPSLEQQEQELTVALGQPVRLCCGRAERGGHWYKEGSRLAPAGRVRGWRGRLEIASFLPEDAGRYLCLARGSMIVLQNLTLITGDSLTSSNDDEDPKSHRDLSNRHSYPQQAPYWTHPQRMEKKLHAVPAGNTVKFRCPAAGNPTPTIRWLKDGQAFHGENRIGGIRLRHQHWSLVMESVVPSDRGTYTCLVENAVGSIRYNYLLDVLERSPHRPILQAGLPANTTAVVGSDVELLCKVYSDAQPHIQWLKHIVINGSSFGADGFPYVQVLKTADINSSEVEVLYLRNVSAEDAGEYTCLAGNSIGLSYQSAWLTVLPEEDPTWTAAAPEARYTDIILYASGSLALAVLLLLAGLYRGQALHGRHPRPPATVQKLSRFPLARSSPWSQALPASQAHPWYEACVSPPAAPPCSPAS

SEQ ID NO: 759602 - protein, 902 aa, Homo sapiens
MRLLLALLGVLLSVPGPPVLSLEASEEVELEPCLAPSLEQQEQELTVALGQPVRLCCGRAERGGHWYKEGSRLAPAGRVRGWRGRLEIASFLPEDAGRYLCLARGSMIVLQNLTLITGDSLTSSNDDEDPKSHRDLSNRHSYPQQAPYWTHPQRMEKKLHAVPAGNTVKFRCPAAGNPTPTIRWLKDGQAFHGENRIGGIRLRHQHWSLVMESVVPSDRGTYTCLVENAVGSIRYNYLLDVLERSPHRPILQAGLPANTTAVVGSDVELLCKVYSDAQPHIQWLKHIVINGSSFGADGFPYVQVLKTADINSSEVEVLYLRNVSAEDAGEYTCLAGNSIGLSYQSAWLTVLPEEDPTWTAAAPEARYTDIILYASGSLALAVLLLLAGLYRGQALHGRHPRPPATVQKLSRFPLARQFSLESGSSGKSSSSLVRGVRLSSSGPALLAGLVSLDLPLDPLWEFPRDRLVLGKPLGEGCFGQVVRAEAFGMDPARPDQASTVAVKMLKDNASDKDLADLVSEMEVMKLIGRHKNIINLLGVCTQEGPLYVIVECAAKGNLREFLRARRPPGPDLSPDGPRSSEGPLSFPVLVSCAYQVARGMQYLESRKCIHRDLAARNVLVTEDNVMKIADFGLARGVHHIDYYKKTSNGRLPVKWMAPEALFDRVYTHQSDVWSFGILLWEIFTLGGSPYPGIPVEELFSLLREGHRMDRPPHCPPELYGLMRECWHAAPSQRPTFKQLVEALDKVLLAVSEEASGWDRTAQPGQLFMEAIGIAPVCPQGVVAENAYAVRGVRQRDWRLGPPWKTERQLMIVYPHSGLLPALSIASPADGIPHRTHLTPRTVPPPGQEPGSHLTTSLKNPVPGQVRQLTPVIPALWETEAGGSPEVKNSRPFWTTWQNPVST

SEQ ID NO: 759603 - protein, 583 aa, Homo sapiens
MRLLLALLGVLLSVPGPPVLSLEASEEVELEPCLAPSLEQQEQELTVALGQPVRLCCGRAERGGHWYKEGSRLAPAGRVRGWRGRLEIASFLPEDAGRYLCLARGSMIVLQNLTLITGDSLTSSNDDEDPKSHRDLSNRHSYPQQAPYWTHPQRMEKKLHAVPAGNTVKFRCPAAGNPTPTIRWLKDGQAFHGENRIGGIRLRHQHWSLVMESVVPSDRGTYTCLVENAVGSIRYNYLLDVLERSPHRPILQAGLPANTTAVVGSDVELLCKVYSDAQPHIQWLKHIVINGSSFGADGFPYVQVLKTADINSSEVEVLYLRNVSAEDAGEYTCLAGNSIGLSYQSAWLTVLPEEDPTWTAAAPEARYTDIILYASGSLALAVLLLLAGLYRGQALHGRHPRPPATVQKLSRFPLARQFSLESGSSGKSSSSLVRGVRLSSSGPALLAGLVSLDLPLDPLWEFPRDRLVLGKPLGEGCFGQVVRAEAFGMDPARPDQASTVAVKMLKDNASDKDLADLVSEMEVMKLIGRHKNIINLLGVCTQEGPLYVIVGLYARPDRASSAVLARLCEAKLPHLCKPPFPLV

SEQ ID NO: 759604 - protein, 206 aa, Homo sapiens
MLPSVPDVDSLTSSNDDEDPKSHRDLSNRHSYPQQAPYWTHPQRMEKKLHAVPAGNTVKFRCPAAGNPTPTIRWLKDGQAFHGENRIGGIRLRHQHWSLVMESVVPSDRGTYTCLVENAVGSIRYNYLLDVLERSPHRPILQAGLPANTTAVVGSDVELLCKVYSDAQPHIQWLKHIVSRGVGPRFPWQAKRDSCPGGRREGGEGP

SEQ ID NO: 759605 - protein, 163 aa, Homo sapiens
EVGRSRPRRRRGYIPRSRPRSARAVCGPCRVQGSRPAGAGSEAAEEPGEEEPGRQLVGSPAWVPESCEKEMRLLLALLGVLLSVPGPPVLSLEASEEVELGMASEVGEGGRGGKSGHQEGAAGLSKAGKDPCPGPEKVAAGQGSTTETQSVPGFPRLDGSIGP

SEQ ID NO: 759606 - protein, 244 aa, Homo sapiens
MDTESNRRANLALPQEPSSVPAFEVLEISPQEVSSGRLLKSASSPPLHTWLTVLKKEQEFLGVTQILTAMICLCFGTVVCSVLDISHIEGDIFSSFKAGYPFWGAIFFSISGMLSIISERRNATYLVRGSLGANTASSIAGGTGITILIINLKKSLAYIHIHSCQKFFETKCFMASFSTEIVVMMLFLTILGLGSAVSLTICGAGEELKGNKVPEDRVYEELNIYSATYSELEDPGEMSPPIDL

SEQ ID NO: 759607 - protein, 167 aa, Homo sapiens
MIITTWIVYILARKGVGLPFLPITSSDIDVVESEAVSVLHHWLKKTEEEASRGIKEKLSINHPSQGVREKMSTDSPPTHGQDIHVTRDVVKHHLSKSDLLANQSQEVLEERTRIQFIRWSHTRIFQVPSEMTEDIMRDRIEQVRRSISRLTDVSAQDFSMRPSSSDC

SEQ ID NO: 759608 - protein, 167 aa, Homo sapiens; identical to SEQ ID NO: 759607

SEQ ID NO: 759609 - protein, 166 aa, Homo sapiens
MKYTSYILAFQLCIVLGSLGCYCQDPYVKEAENLKKYFNAGHSDVADNGTLFLGILKNWKEESDRKIMQSQIVSFYFKLFKNFKDDQSIQKSVETIKEDMNVKFFNSNKKKRDDFEKLTNYSVTDLNVQRKAIHELIQVMAELSPAAKTGKRKRSQMLFRGRRASQ

SEQ ID NO: 759610 - protein, 46 aa, Homo sapiens
LSRNPRTSPPCNHQRVTGTGGSSTHTVEESVLIVKALNPLNTEYFE

SEQ ID NO: 759611 - protein, 629 aa, Homo sapiens
MENSTTTISREELEELQEAFNKIDIDNSGYVSDYELQDLFKEASLPLPGYKVREIVEKILSVADSNKDGKISFEEFVSLMQELKSKDISKTFRKIINKREGITAIGGTSTISSEGTQHSYSEEEKVAFVNWINKALENDPDCKHLIPMNPNDDSLFKSLADGILLCKMINLSEPDTIDERAINKKKLTPFTISENLNLALNSASAIGCTVVNIGASDLKEGKPHLVLGLLWQIIKVGLFADIEISRNEALIALLNEGEELEELMKLSPEELLLRWVNYHLTNAGWHTISNFSQDIKDSRAYFHLLNQIAPKGGEDGPAIAIDLSGINETNDLKRAGLMLQEADKLGCKQFVTPADVVSGNPKLNLAFVANLFNTYPCLHKPNNNDIDMNLLEGESKEERTFRNWMNSLGVNPYINHLYSDLADALVIFQLYEMIRVPVNWSHVNKPPYPALGGNMKKIENCNYAVELGKNKAKFSLVGIAGQDLNEGNSTLTLALVWQLMRRYTLNVLSDLGEGEKVNDEIIIKWVNQTLKSANKKTSISSFKDKSISTSLPVLDLIDAIAPNAVRQEMIRRENLSDEDKLNNAKYAISVARKIGARIYALPDDLVEVKPKMVMTVFACLMGKGLNRIK

SEQ ID NO: 759612 - protein, 138 aa, Homo sapiens
LKRAGLMLKKQITGRQTVCYSADGVQANPKLNLACVANLFNTYPCLHKPNNNDIDMNLLEGESKEERTFRNWMNSLGVNPYINHLYSDLADALVIFQLYEMIRVPVNWSHVNKPPYPALGGNMKKVNEIMAMDILLLF

SEQ ID NO: 759613 - protein, 629 aa, Homo sapiens; identical to SEQ ID NO: 759611

SEQ ID NO: 759614 - protein, 629 aa, Homo sapiens; identical to SEQ ID NO: 759611

SEQ ID NO: 759615 - protein, 629 aa, Homo sapiens; identical to SEQ ID NO: 759611

SEQ ID NO: 759616 - protein, 127 aa, Homo sapiens
APIGQRNASRHNGAGRRRRAGQRRGFPLSPQPPAAGKVRARGRSLPARSGPGARRGERGRPGLESRRILRVKTPTGSSLCFQLPTRPHYLDGPQVIVNLFCEKSEGDLFNAFFLRIFQIETNCRGSS

SEQ ID NO: 759617 - protein, 87 aa, Homo sapiens
APIGQRNASRHNGAGRRRRAGQRRGFPLSPQPPAAGKVRARGRSLPARSGPGARRGERGRPGLESRRMKTNTEMVCLRNFKRCRPPD

SEQ ID NO: 759618 - protein, 67 aa, Homo sapiens
APIGQRNASRHNGAGRRRRAGQRRGFPLSPQPPAAGKVRARGRSLPARSGPGARRGERGRPGLESRR

SEQ ID NO: 759619 - protein, 86 aa, Homo sapiens
APIGQRNASRHNGAGRRRRAGQRRGFPLSPQPPAAGKVRARGRSLPARSGPGARRGERGRPGLESRRAPVCVFSCLLDLTTWMAHR

SEQ ID NO: 759620 - protein, 108 aa, Homo sapiens
APIGQRNASRHNGAGRRRRAGQRRGFPLSPQPPAAGKVRARGRSLPARSGPGARRGERGRPGLESRRILRVKTPTVIVNLFCEKSEGDLFNAFFLRIFQIETNCRGSS

SEQ ID NO: 759621 - protein, 116 aa, Homo sapiens
APIGQRNASRHNGAGRRRRAGQRRGFPLSPQPPAAGKVRARGRSLPARSGPGARRGERGRPGLESRRILRVKTPTGSSLCFQLPTRPHYLDGPQLWRLEGPRSRYYRFDFWTLNMV

SEQ ID NO: 759622 - protein, 104 aa, Homo sapiens
APIGQRNASRHNGAGRRRRAGQRRGFPLSPQPPAAGKVRARGRSLPARSGPGARRGERGRPGLESRRAPVCVFSCLLDLTTWMAHSSGDWKVQDQDTTDLISGR

SEQ ID NO: 759623 - protein, 655 aa, Homo sapiens
MTECFLPPTSSPSEHRRVEHGSGLTRTPSSEEISPTKFPGLYRTGEPSPPHDILHEPPDVVSDDEKDHGKKKGKFKKKEKRTEGYAAFQEDSSGDEAESPSKMKRSKGIHVFKKPSFSKKKEKDFKIKEKPKEEKHKEEKHKEEKHKEKKSKDLTAADVVKQWKEKKKKKKPIQEPEVPQIDVPNLKPIFGIPLADAVERTMMYDGIRLPAVFRECIDYVEKYGMKCEGIYRVSGIKSKVDELKAAYDREESTNLEDYEPNTVASLLKQYLRDLPENLLTKELMPRFEEACGRTTETEKVQEFQRLLKELPECNYLLISWLIVHMDHVIAKELETKMNIQNISIVLSPTVQISNRVLYVFFTHVQELFGNVVLKQVMKPLRWSNMATMPTLPETQAGIKEEIRRQEFLLNCLHRDLQGGIKDLSKEERLWEVQRILTALKRKLREAKRQECETKIAQEIASLSKEDVSKEEMNENEEVINILLAQENEILTEQEELLAMEQFLRRQIASEKEEIERLRAEIAEIQSRQQHGRSETEEYSSESESESEDEEELQIILEDLQRQNEELEIKNNHLNQAIHEEREAIIELRVQLRLLQMQRAKAEQQAQEDEEPEWRGGAVQPPRDGVLEPKAAKEQPKAGKEPAKPSPSRDRKETSI

SEQ ID NO: 759624 - protein, 215 aa, Homo sapiens
MTECFLPPTSSPSEHRRVEHGSGLTRTPSSEEISPTKFPGLYRTGEPSPPHDILHEPPDVVSDDEKDHGKKKGKFKKKEKRTEGYAAFQEDSSGDEAESPSKMKRSKGIHVFKKPSFSKKKEKDFKIKEKPKEEKHKEEKHNKQAQPAQHNRATHRPQHTRTPGGGRVPIGLRERITITGADKRVMGKRGTIMAGRSLGWYKKRGWSNDRRRMKK

SEQ ID NO: 759625 - protein, 655 aa, Homo sapiens; identical to SEQ ID NO: 759623

SEQ ID NO: 759626 - protein, 655 aa, Homo sapiens; identical to SEQ ID NO: 759623

SEQ ID NO: 759627 - protein, 655 aa, Homo sapiens; identical to SEQ ID NO: 759623

SEQ ID NO: 759628 - protein, 655 aa, Homo sapiens; identical to SEQ ID NO: 759623

SEQ ID NO: 759629 - protein, 572 aa, Homo sapiens
MTECFLPPTSSPSEHRRVEHGSGLTRTPSSEEISPTKFPGLYRTGEPSPPHDILHEPPDVVSDDEKDHGKKKGKFKKKEKRTEGYAAFQEDSSGDEAESPSKMKRSKGIHVFKKPSFSKKKEKDFKIKEKPKEEKHKEEKHKEEKHKEKKSKDLTAADVVKQWKEKKKKKKPIQEPEVPQIDVPNLKPIFGIPLADAVERTMMYDGIRLPAVFRECIDYVEKYGMKCEGIYRVSGIKSKVDELKAAYDREESTNLEDYEPNTVASLLKQYLRDLPENLLTKELMPRFEEACGRTTETEKVQEFQRLLKELPECNYLLISWLIVHMDHVIAKELETKMNIQNISIVLSPTVQISNRVLYVFFTHVQELFGNVVLKQVMKPLRWSNMATMPTLPETQAGIKEEIRRQEFLLNCLHRDLQGGIKDLSKEERLWEVQRILTALKRKLREAKRQECETKIAQEIASLSKEDVSKEEMNENEEVINILLAQENEILTEQEELLAMEQFLRRQIASEKEEIERLRAEIAEIQSRQQHGRSETEEYSSESESESEDEEELQIILEDLQMSFPDSVSLFED

SEQ ID NO: 759630 - protein, 655 aa, Homo sapiens; identical to SEQ ID NO: 759623

SEQ ID NO: 759631 - protein, 266 aa, Homo sapiens
MIRLHCLPIKEEIRRQEFLLNCLHRDLQGGIKDLSKEERLWEVQRILTALKRKLREAKRQECETKIAQEIASLSKEDVSKEEMNENEEVINILLAQENEILTEQEELLAMEQFLRRQIASEKEEIERLRAEIAEIQSRQQHGRSETEEYSSESESESEDEEELQIILEDLQRQNEELEIKNNHLNQAIHEEREAIIELRVQLRLLQMQRAKAEQQAQEDEEPEWRGGAVQPPRDGVLEPKAAKEQPKAGKEPAKPSPSRDRKETSI

SEQ ID NO: 759632 - protein, 111 aa, Homo sapiens
MRSARPSSSCACSCGCSRCSEPRPSSRRRRTRSLSGAGVPSSRPETASLSQKQLKSSQRQARSRQSHRPAGIGRRRPSEQPAWPSGVRETERTRASYCNPGARPALSLYIL

SEQ ID NO: 759633 - protein, 655 aa, Homo sapiens; identical to SEQ ID NO: 759623

SEQ ID NO: 759634 - protein, 137 aa, Homo sapiens
GRVGRPTRRQQHGRSETEEYSSESESESEDEEELQIILEDLQRQNEELEIKNNHLNQAIHEEREAIIELRVQLRLLQMQRAKAEQQAQEDEEPEWRGGAVQPPRDGVLEPKAAKEQPKAGKEPAKPSPSRDRKETSI

SEQ ID NO: 759635 - protein, 129 aa, Homo sapiens
MRSARPSSSCACSCGCSRCSEPRPSSRRRRTRSLSGAGVPSSRPETASLSQKQLKSSQRQARSRQSHRPAGIGRRRPSEQPAWSSGEEAARSCQFLTAGTSKGLLTGLVKGSHLGLVHPQRMLFKPEIF

SEQ ID NO: 759636 - protein, 655 aa, Homo sapiens; identical to SEQ ID NO: 759623

SEQ ID NO: 759637 - protein, 386 aa, Homo sapiens
MAGYEYVSPEQLAGFDKYKYSAVDTNPLSLYVMHPFWNTIVKVFPTWLAPNLITFSGFLLVVFNFLLMAYFDPDFYASAPGHKHVPDWVWIVVGILNFVAYTLDGVDGKQARRTNSSTPLGELFDHGLDSWSCVYFVVTVYSIFGRGSTGVSVFVLYLLLWVVLFSFILSHWEKYNTGILFLPWGYDISQVTISFVYIVTAVVGVEAWYEPFLFNFLYRDLFTAMIIGCALCVTLPMSLLNFFRSYKNNTLKLNSVYEAMVPLFSPCLLFILSTAWILWSPSDILELHPRVFYFMVGTAFANSTCQLIVCQMSSTRCPTLNWLLVPLFLVVLVVNLGVASYVESILLYTLTTAFTLAHIHYGVRVVKQLSSHFQIYPFSLRKPNSD

SEQ ID NO: 759638 - protein, 186 aa, Homo sapiens
MHPFWNTIVKVFPTWLAPNLITFSGFLLVVFNFLLMAYFDPDFYASAPGHKHVPDWVWIVVGILNFVAYTLDGVDGKQARRTNSSTPLGELFDHGLDSWSCVYFVVTVYSIFGRGSTGVSVFVLYLLLWVVLFSFILSHWEKYNTGILFLPWGYDISQVVSMCSTLNFQYYHDTFGKLLSLLIYCS

SEQ ID NO: 759639 - protein, 119 aa, Homo sapiens
AWLRAGWRAFLRRSCGSWGLGVGERGSILSPPPVVGTPREISFSLGERSVIMERGNSLPIFFKLIIFVSPRKDGVPSVVSIAFILVKFPLACHAYNFGGGDDRLADEAREGSDLPMPSC

SEQ ID NO: 759640 - protein, 110 aa, Homo sapiens
MRPARRRGGRRQLLLRALDAVRHLLGEALRAARPGLQGLLARPVLALRGEENQRGRGRAWRRASFCRLVGDLGPSLDAARAPRRAQDLEKGARLAAAGSRRRPALHAPKA

SEQ ID NO: 759641 - protein, 103 aa, Homo sapiens
QVPPKPALWALLLALLGTAPSRAYSPACSVPDVLRHYRAIIFEDLQAAVKWGGAGAEKTRPGSRHFHFIQKNLTRPGSSGRRGRPRASCGAQKVWRRRPYPSS

SEQ ID NO: 759642 - protein, 173 aa, Homo sapiens
SPGSPPGGPARAPPPASRGPTHHPPHRRRRLVRPAQPDQCRGGNGLGAGPIRAGGFLRRRPSPQLLDCSGAGGTNTWRFFRRGEDFLRAQRIHFLHINLSCWRDTAGKRRPIFVQRTLDLGRNKDDLDPCPHYLEFSMLAKIWTRAVPEGRGPWREAPVTAHPGVGLWALLLC

SEQ ID NO: 759643 - protein, 175 aa, Homo sapiens
FKPDSIRCCSLPWRLLLLCVRSTEISEFRNEWKNTHGGQEEKSPCYIPIVSSATLWDRSTPSAKHIPCYERTSVPCSRFINHMKNFSESPKFRSLHFLNFPGSHHGQATQKLQGAMVLHLEERRMMRRAKSKTTMKTPILFINCTNRLNNSHPNLQCTILVSFHYVMIINHITPK

SEQ ID NO: 759644 - protein, 175 aa, Homo sapiens
TQRECSSSRGGGCGRRPGIGTLQLQVDAGSAGLAPWQGEVEPDRLLSAAPRDSSRAREKRQHGSKGQGAEGVELVKLMSTVICMKQRDEEFLLTIRPFANRMQKSPCYIPIVSSATLWDRSTPSAKHIPCYERTSVPCSRFINHMKNFSESPKFRSLHFLNFPVFPEQDSKFNGV

SEQ ID NO: 759645 - protein, 139 aa, Homo sapiens
TQRECSSSRGGGCGRRPGIGTLQLQGVELVKLMSTVICMKQRDEEFLLTIRPFANRMQKSPCYIPIVSSATLWDRSTPSAKHIPCYERTSVPCSRFINHMKNFSESPKFRSLHFLNFPGSHHGQATQKLQGAMVLHLEE

SEQ ID NO: 759646 - protein, 167 aa, Homo sapiens
TQRECSSSRGGGCGRRPGIGTLQLQVDAGSAGLAPWQGEVEPDRLLSAAPRDSSRAREKRQHGSKGQGAEGVELVKLMSTVICMKQRDEEFLLTIRPFANRMQKSPCYIPIVSSATLWDRSTPSAKHIPCYERTSVPCSRFINHMKNFSESPKFRSLHFLNFPGPFH

SEQ ID NO: 759647 - protein, 136 aa, Homo sapiens
TQRECSSSRGGGCGRRPGIGTLQLQVDAGSAGLAPWQGEVEPDRLLSAAPRDSSRAREKRQHGSKGQGAEGVELVKLMSTVICMKQRDEEFLLTIRPFANRMQKSPCYIPIVSSATLWDRSTPSAKIKLLKLREVK

SEQ ID NO: 759648 - protein, 138 aa, Homo sapiens
TQRECSSSRGGGCGRRPGIGTLQLQVDAGSAGLAPWQGEVEPDRLLSAAPRDSSRAREKRQHGSKGQGAEGVELVKLMSTVICMKQRDEEFLLTIRPFANRMQKSPCYIPIVSSATLWDRSTPSAKPLVFIILECKQI

SEQ ID NO: 759649 - protein, 75 aa, Homo sapiens
LRRSFPGFSQSEGTASSHLVKPFQDLPVRGRLVLTVCRAPYSLSVGERVCELLSISSVICVLLEITDFVSYTLES

SEQ ID NO: 759650 - protein, 527 aa, Homo sapiens
MEMQQNIENYRATAGVEALQLVDREAKPHMESYNAGVKHYEADDFEMAIRHFEQALREYFVEDTECRTLCEGPQRFEEYEYLGYKAGLYEAIADHYMQVLVCQHECVRELATRPGRLSPIENFLPLHYDYLQFAYYRVGEYVKALECAKAYLLCHPDDEDVLDNVDYYESLLDDSIDPASIEAREDLTMFVKRHKLESELIKSAAEGLGFSYTEPNYWIRYGGRQDENRVPSGVNVEGAEVHGFSMGKKLSPKIDRDLREGGPLLYENITFVYNSEQLNGTQRVLLDNVLSEEQCRELHSVASGIMLVGDGYRGKTSPHTPNEKFEGATVLKALKSGYEGRVPLKSARLFYDISEKARRIVESYFMLNSTLYFSYTHMVCRTALSGQQDRRNDLSHPIHADNCLLDPEANECWKEPPAYTFRDYSALLYMNDDFEGGEFIFTEMDAKTVTASIKPKCGRMISFSSGGENPHGVKAVTKGKRCAVALWFTLDPLYRELERIQADEVIAILDQEQQGKHELNINPKDEL

SEQ ID NO: 759651 - protein, 708 aa, Homo sapiens
MRERIWAPPLLLLLPLLLPPPLWGGPPDSPRRELELEPGPLQPFDLLYASGAAAYYSGDYERAVRDLEAALRSHRRLREIRTRCARHCAARHPLPPPPPGEGPGAELPLFRSLLGRARCYRSCETQRLGGPASRHRVSEDVRSDFQRRVPYNYLQRAYIKLNQLEKAVEAAHTFFVANPEHMEMQQNIENYRATAGVEALQLVDREAKPHMESYNAGVKHYEADDFEMAIRHFEQALREYFVEDTECRTLCEGPQRFEEYEYLGYKAGLYEAIADHYMQVLVCQHECVRELATRPGRLSPIENFLPLHYDYLQFAYYRVGEYVKALECAKAYLLCHPDDEDVLDNVDYYESLLDDSIDPASIEAREDLTMFVKRHKLESELIKSAAEGLGFSYTEPNYWIRYGGRQDENRVPSGVNVEGAEVHGFSMGKKLSPKIDRDLREGGPLLYENITFVYNSEQLNGTQRVLLDNVLSEEQCRELHSVASGIMLVGDGYRGKTSPHTPNEKFEGATVLKALKSGYEGRVPLKSARLFYDISEKARRIVESYFMLNSTLYFSYTHMVCRTALSGQQDRRNDLSHPIHADNCLLDPEANECWKEPPAYTFRDYSALLYMNDDFEGGEFIFTEMDAKTVTASIKPKCGRMISFSSGGENPHGVKAVTKGKRCAVALWFTLDPLYRELERIQADEVIAILDQEQQGKHELNINPKDEL

SEQ ID NO: 759652 - protein, 603 aa, Homo sapiens
MLPLFRSLLGRARCYRSCETQRLGGPASRHRVSEDVRSDFQRRVPYNYLQRAYIKLNQLEKAVEAAHTFFVANPEHMEMQQNIENYRATAGVEALQLVDREAKPHMESYNAGVKHYEADDFEMAIRHFEQALREYFVEDTECRTLCEGPQRFEEYEYLGYKAGLYEAIADHYMQVLVCQHECVRELATRPGRLSPIENFLPLHYDYLQFAYYRVGEYVKALECAKAYLLCHPDDEDVLDNVDYYESLLDDSIDPASIEAREDLTMFVKRHKLESELIKSAAEGLGFSYTEPNYWIRYGGRQDENRVPSGVNVEGAEVHGFSMGKKLSPKIDRDLREGGPLLYENITFVYNSEQLNGTQRVLLDNVLSEEQCRELHSVASGIMLVGDGYRGKTSPHTPNEKFEGATVLKALKSGYEGRVPLKSARLFYDISEKARRIVESYFMLNSTLYFSYTHMVCRTALSGQQDRRNDLSHPIHADNCLLDPEANECWKEPPAYTFRDYSALLYMNDDFEGGEFIFTEMDAKTVTASIKPKCGRMISFSSGGENPHGVKAVTKGKRCAVALWFTLDPLYRELERIQADEVIAILDQEQQGKHELNINPKDEL

SEQ ID NO: 759653 - protein, 708 aa, Homo sapiens; identical to SEQ ID NO: 759651

SEQ ID NO: 759654 - protein, 708 aa, Homo sapiens; identical to SEQ ID NO: 759651

SEQ ID NO: 759655 - protein, 708 aa, Homo sapiens; identical to SEQ ID NO: 759651

SEQ ID NO: 759656 - protein, 131 aa, Homo sapiens
ANDFKNTVLHVLRKKTTLTDHIAIYLLSKTPLTYKHLKPGMLFFISQCNPSLSLRSRSIQYPIYLDDPESTKTLLFENKGFFVCLFVCLFVCFFLSVSLQESYNAGVKHYEADDFEMAIRHFEQALREYFV

SEQ ID NO: 759657 - protein, 119 aa, Homo sapiens
IISCIYQSPVHLLPQTHTHTHTHTHTIKLLQIQKLRENKLLGGETTTLTCAPVLKLTCAWSLKPFLALCLSATSLGANGHELRLSKVSSTLGLRSPWQSPRCLRYHGRNDHPGSGRSHG

SEQ ID NO: 759658 - protein, 1586 aa, Homo sapiens
MASPSRNSQSRRRCKEPLRYSYNPDQFHNMDLRGGPHDGVTIPRSTSDTDLVTSDSRSTLMVSSSYYSIGHSQDLVIHWDIKEEVDAGDWIGMYLIDEVLSENFLDYKNRGVNGSHRGQIIWKIDASSYFVEPETKICFKYYHGVSGALRATTPSVTVKNSAAPIFKSIGADETVQGQGSRRLISFSLSDFQAMGLKKGMFFNPDPYLKISIQPGKHSIFPALPHHGQERRSKIIGNTVNPIWQAEQFSFVSLPTDVLEIEVKDKFAKSRPIIKRFLGKLSMPVQRLLERHAIGDRVVSYTLGRRLPTDHVSGQLQFRFEITSSIHPADDEEISLSTEPESAQIQDSPMNNLMESGSGEPRSEAPESSESWKPEQLGEGSVPDGPGNQSIELSRPAEEAAVITEAGDQGMVSVGPEGAGELLAQVQKDIQPAPSAEELAEQLDLGEEASALLLEDGEAPASTKEEPLEEEATTQSRAGREEEEKEQEEEGDVSTLEQGEGRLQLRASVKRKSRPCSLPVSELETVIASACGDPETPRTHYIRIHTLLHSMPSAQGGSAAEEEDGAEEESTLKDSSEKDGLSEVDTVAADPSALEEDREEPEGATPGTAHPGHSGGHFPSLANGAAQDGDTHPSTGSESDSSPRQGGDHSCEGCDASCCSPSCYSSSCYSTSCYSSSCYSASCYSPSCYNGNRFASHTRFSSVDSAKISESTVFSSQDDEEEENSAFESVPDSMQSPELDPESTNGAGPWQDELAAPSGHVERSPEGLESPVAGPSNRREGECPILHNSQPVSQLPSLRPEHHHYPTIDEPLPPNWEARIDSHGRVFYVDHVNRTTTWQRPTAAATPDGMRRSGSIQQMEQLNRRYQNIQRTIATERSEEDSGSQSCEQAPAGGGGGGGSDSEAESSQSSLDLRREGSLSPVNSQKITLLLQSPAVKFITNPEFFTVLHANYSAYRVFTSSTCLKHMILKVRRDARNFERYQHNRDLVNFINMFADTRLELPRGWEIKTDQQGKSFFVDHNSRATTFIDPRIPLQNGRLPNHLTHRQHLQRLRSYSAGEASEVSRNRGASLLARPGHSLVAAIRSQHQHESLPLAYNDKIVAFLRQPNIFEMLQERQPSLARNHTLREKIHYIRTEGNHGLEKLSCDADLVILLSLFEEEIMSYVPLQAAFHPGYSFSPRCSPCSSPQNSPGLQRASARAPSPYRRDFEAKLRNFYRKLEAKGFGQGPGKIKLIIRRDHLLEGTFNQVMAYSRKELQRNKLYVTFVGEEGLDYSGPSREFFFLLSQELFNPYYGLFEYSANDTYTVQISPMSAFVENHLEWFRFSGRILGLALIHQYLLDAFFTRPFYKALLRLPCDLSDLEYLDEEFHQSLQWMKDNNITDILDLTFTVNEEVFGQVTERELKSGGANTQVTEKNKKEYIERMVKWRVERGVVQQTEALVRGFYEVVDSRLVSVFDARELELVIAGTAEIDLNDWRNNTEYRGGYHDGHLVIRWFWAAVERFNNEQRLRLLQFVTGTSSVPYEGFAALRGSNGLRRFCIEKWGKITSLPRAHTCFNRLDLPPYPSYSMLYEKLLTAVEETSTFGLE

SEQ ID NO: 759659 - protein, 131 aa, Homo sapiens
MIFKSIGADETVQGQGSRRLISFSLSDFQAMGLKKGMFFNPDPYLKISIQPGKHSIFPALPHHGQERRSKIIGNTVNPIWQAEQFSFVSLPTDVLEIEVKDKFAKSRPIIKRFLGKLSMPVQRLLERHAIG

SEQ ID NO: 759660 - protein, 1281 aa, Homo sapiens
PEASDLFWKPGCCPPDREAPLHSDDEEISLSTEPESAQIQDSPMNNLMESGSGEPRSEAPESSESWKPEQLGEGSVPDGPGNQSIELSRPAEEAAVITEAGDQGMVSVGPEGAGELLAQVQKDIQPAPSAEELAEQLDLGEEASALLLEDGEAPASTKEEPLEEEATTQSRAGREEEEKEQEEEGDVSTLEQGEGRLQLRASVKRKSRPCSLPVSELETVIASACGDPETPRTHYIRIHTLLHSMPSAQGGSAAEEEDGAEEESTLKDSSEKDGLSEVDTVAADPSALEEDREEPEGATPGTAHPGHSGGHFPSLANGAAQDGDTHPSTGSESDSSPRQGGDHSCEGCDASCCSPSCYSSSCYSTSCYSSSCYSASCYSPSCYNGNRFASHTRFSSVDSAKISESTVFSSQDDEEEENSAFESVPDSMQSPELDPESTNGAGPWQDELAAPSGHVERSPEGLESPVAGPSNRREGECPILHNSQPVSQLPSLRPEHHHYPTIDEPLPPNWEARIDSHGRVFYVDHVNRTTTWQRPTAAATPDGMRRSGSIQQMEQLNRRYQNIQRTIATERSEEDSGSQSCEQAPAGGGGGGGSDSEAESSQSSLDLRREGSLSPVNSQKITLLLQSPAVKFITNPEFFTVLHANYSAYRVFTSSTCLKHMILKVRRDARNFERYQHNRDLVNFINMFADTRLELPRGWEIKTDQQGKSFFVDHNSRATTFIDPRIPLQNGRLPNHLTHRQHLQRLRSYSAGEASEVSRNRGASLLARPGHSLVAAIRSQHQHESLPLAYNDKIVAFLRQPNIFEMLQERQPSLARNHTLREKIHYIRTEGNHGLEKLSCDADLVILLSLFEEEIMSYVPLQAAFHPGYSFSPRCSPCSSPQNSPGLQRASARAPSPYRRDFEAKLRNFYRKLEAKGFGQGPGKIKLIIRRDHLLEGTFNQVMAYSRKELQRNKLYVTFVGEEGLDYSGPSREFFFLLSQELFNPYYGLFEYSANDTYTVQISPMSAFVENHLEWFRFSGRILGLALIHQYLLDAFFTRPFYKALLRLPCDLSDLEYLDEEFHQSLQWMKDNNITDILDLTFTVNEEVFGQVTERELKSGGANTQVTEKNKKEYIERMVKWRVERGVVQQTEALVRGFYEVVDSRLVSVFDARELELVIAGTAEIDLNDWRNNTEYRGGYHDGHLVIRWFWAAVERFNNEQRLRLLQFVTGTSSVPYEGFAALRGSNGLRRFCIEKWGKITSLPRAHTCFNRLDLPPYPSYSMLYEKLLTAVEETSTFGLE

SEQ ID NO: 759661 - protein, 1281 aa, Homo sapiens; identical to SEQ ID NO: 759660

SEQ ID NO: 759662 - protein, 806 aa, Homo sapiens
GRGIHQTFAVDKDNNITDILDLTFTVNEEVFWTDWEARIDSHGRVFYVDHVNRTTTWQRPTAAATPDGMRRSGSIQQMEQLNRRYQNIQRTIATERSEEDSGSQSCEQAPAGGGGGGGSDSEAESSQSSLDLRREGSLSPVNSQKITLLLQSPAVKFITNPEFFTVLHANYSAYRVFTSSTCLKHMILKVRRDARNFERYQHNRDLVNFINMFADTRLELPRGWEIKTDQQGKSFFVDHNSRATTFIDPRIPLQNGRLPNHLTHRQHLQRLRSYSAGEASEVSRNRGASLLARPGHSLVAAIRSQHQHESLPLAYNDKIVAFLRQPNIFEMLQERQPSLARNHTLREKIHYIRTEGNHGLEKLSCDADLVILLSLFEEEIMSYVPLQAAFHPGYSFSPRCSPCSSPQNSPGLQRASARAPSPYRRDFEAKLRNFYRKLEAKGFGQGPGKIKLIIRRDHLLEGTFNQVMAYSRKELQRNKLYVTFVGEEGLDYSGPSREFFFLLSQELFNPYYGLFEYSANDTYTVQISPMSAFVENHLEWFRFSGRILGLALIHQYLLDAFFTRPFYKALLRLPCDLSDLEYLDEEFHQSLQWMKDNNITDILDLTFTVNEEVFGQVTERELKSGGANTQVTEKNKKEYIERMVKWRVERGVVQQTEALVRGFYEVVDSRLVSVFDARELELVIAGTAEIDLNDWRNNTEYRGGYHDGHLVIRWFWAAVERFNNEQRLRLLQFVTGTSSVPYEGFAALRGSNGLRRFCIEKWGKITSLPRAHTCFNRLDLPPYPSYSMLYEKLLTAVEETSTFGLE

SEQ ID NO: 759663 - protein, 1052 aa, Homo sapiens
PEASDLFWKPGCCPPDREAPLHSDDEEISLSTEPESAQIQDSPMNNLMESGSGEPRSEAPESSESWKPEQLGEGSVPDGPGNQSIELSRPAEEAAVITEAGDQGMVSVGPEGAGELLAQVQKDIQPAPSAEELAEQLDLGEEASALLLEDGEAPASTKEEPLEEEATTQSRAGREEEEKEQEEEGDVSTLEQGEGRLQLRASVKRKSRPCSLPVSELETVIASACGDPETPRTHYIRIHTLLHSMPSAQGGSAAEEEDGAEEESTLKDSSEKDGLSEVDTVAADPSALEEDREEPEGATPGTAHPGHSGGHFPSLANGAAQDGDTHPSTGSESDSSPRQGGDHSCEGCDASCCSPSCYSSSCYSTSCYSSSCYSASCYSPSCYNGNRFASHTRFSSVDSAKISESTVFSSQDDEEEENSAFESVPDSMQSPELDPESTNGAGPWQDELAAPSGHVERSPEGLESPVAGPSNRREGECPILHNSQPVSQLPSLRPEHHHYPTIDEPLPPNWEARIDSHGRVFYVDHVNRTTTWQRPTAAATPDGMRRSGSIQQMEQLNRRYQNIQRTIATERSEEDSGSQSCEQAPAGGGGGGGSDSEAESSQSSLDLRREGSLSPVNSQKITLLLQSPAVKFITNPEFFTVLHANYSAYRVFTSSTCLKHMILKVRRDARNFERYQHNRDLVNFINMFADTRLELPRGWEIKTDQQGKSFFVDHNSRATTFIDPRIPLQNGRLPNHLTHRQHLQRLRSYSAGEARVQWCDLGSLQPPPPRFKQFSCLSLSSSWDYRFRFSGRILGLALIHQYLLDAFFTRPFYKALLRLPCDLSDLEYLDEEFHQSLQWMKDNNITDILDLTFTVNEEVFGQVTERELKSGGANTQVTEKNKKEYIERMVKWRVERGVVQQTEALVRGFYEVVDSRLVSVFDARELELVIAGTAEIDLNDWRNNTEYRGGYHDGHLVIRWFWAAVERFNNEQRLRLLQFVTGTSSVPYEGFAALRGSNGLRRFCIEKWGKITSLPRAHTCFNRLDLPPYPSYSMLYEKLLTAVEETSTFGLE

SEQ ID NO: 759664 - protein, 164 aa, Homo sapiens
MVKWRVERGVVQQTEALVRGFYEVVDSRLVSVFDARELELVIAGTAEIDLNDWRNNTEYRGGYHDGHLVIRWFWAAVERFNNEQRLRLLQFVTGTSSVPYEGFAALRGSNGLRRFCIEKWGKITSLPRAHTCFNRLDLPPYPSYSMLYEKLLTAVEETSTFGLE

SEQ ID NO: 759665 - protein, 783 aa, Homo sapiens
PEASDLFWKPGCCPPDREAPLHSDDEEISLSTEPESAQIQDSPMNNLMESGSGEPRSEAPESSESWKPEQLGEGSVPDGPGNQSIELSRPAEEAAVITEAGDQGMVSVGPEGAGELLAQVQKDIQPAPSAEELAEQLDLGEEASALLLEDGEAPASTKEEPLEEEATTQSRAGREEEEKEQEEEGDVSTLEQGEGRLQLRASVKRKSRPCSLPVSELETVIASACGDPETPRTHYIRIHTLLHSMPSAQGGSAAEEEDGAEEESTLKDSSEKDGLSEVDTVAADPSALEEDREEPEGATPGTAHPGHSGGHFPSLANGAAQDGDTHPSTGSESDSSPRQGGDHSCEGCDASCCSPSCYSSSCYSTSCYSSSCYSASCYSPSCYNGNRFASHTRFSSVDSAKISESTVFSSQDDEEEENSAFESVPDSMQSPELDPESTNGAGPWQDELAAPSGHVERSPEGLESPVAGPSNRREGECPILHNSQPVSQLPSLRPEHHHYPTIDEPLPPNWEARIDSHGRVFYVDHVNRTTTWQRPTAAATPDGMRRSGSIQQMEQLNRRYQNIQRTIATERSEEDSGSQSCEQAPAGGGGGGGSDSEAESSQSSLDLRREGSLSPVNSQKITLLLQSPAVKFITNPEFFTVLHANYSAYRVFTSSTCLKHMILKVRRDARNFERYQHNRDLVNFINMFADTRLELPRGWEIKTDQQGKSFFVDHNSRATTFIDPRIPLQNGRLPNHLTHRQHLQRLRSYSAGEVTLPTPRPTVHRSQSLPLPWEQNSSSVARI

SEQ ID NO: 759666 - protein, 83 aa, Homo sapiens
FFSLVCSQSFFVDHNSRATTFIDPRIPLQNGRLPNHLTHRQHLQRLRSYSAGEVTLPTPRPTVHRSQSLPLPWEQNSSSVARI

SEQ ID NO: 759667 - protein, 115 aa, Homo sapiens
NYIVEKRDVRRKGWQTVDTTVKDTKCTVTPLTEGSLYVFRVAAENAIGQSDYTEIEDSVLAKDTFTTPGPPYALAVVDVTKRHVDLKWEPPKNDGGRPIQRYVIEKKERLGTRWV

SEQ ID NO: 759668 - protein, 88 aa, Homo sapiens
LRSDELVASLFRVIFCNRSPRVVLPVWLNFDGEPRQPYPTLPPGTGRRIHSYRGTGPALRPDPAGTIARSEAPLPPRGPFCRRGTEAP

SEQ ID NO: 759669 - protein, 141 aa, Homo sapiens
LRSDELVASLFRVIFCNRSPRVVLPVWLNFDGEPRQPYPTLPPGTGRRIHSYRGHLWLFRDAGTHDGLLVNQTELFVPSLNVDGQPIFANITLPVYTLKERCLQVVRSLVKPENYRRLDIVRSLYEDLGRPPKCAERPGSG

SEQ ID NO: 759670 - protein, 117 aa, Homo sapiens
LRSDELVASLFRVIFCNRSPRVVLPVWLNFDGEPRQPYPTLPPGTGRRIHSYRVYTLKERCLQVVRSLVKPENYRRLDIVRSLYEDLEDHPNVQKDLGAADTGAHCTSTDGEIEDFC

SEQ ID NO: 759671 - protein, 103 aa, Homo sapiens
KNPVKKIVYGKACALKRKMEACPVFPLPGLFSTIPQLPHNTVTSGISTHFSKVNSNFFPYITLYKAFLEILHQTKLLCISTSITAFTFYIEIISWYVCLHEAN

SEQ ID NO: 759672 - protein, 40 aa, Homo sapiens
TGGSLEGQGACPILFTSASPHRPNARADAFKKCLQKEEMK

SEQ ID NO: 759673 - protein, 1186 aa, Homo sapiens
MSVACVLKRKAVLWQDSFSPHLKHHPQEPANPNMPVVLTSGTGSQAQPQPAANQALAAGTHSSPVPGSIGVAGRSQDDAMVDYFFQRQHGEQLGGGGSGGGGYNNSKHRWPTGDNIHAEHQVRSMDELNHDFQALALEGRAMGEQLLPGKKFWETDESSKDGPKGIFLGDQWRDSAWGTSDHSVSQPIMVQRRPGQSFHVNSEVNSVLSPRSESGGLGVSMVEYVLSSSPGDSCLRKGGFGPRDADSDENDKGEKKNKGTFDGDKLGDLKEEGDVMDKTNGLPVQNGIDADVKDFSRTPGNCQNSANEVDLLGPNQNGSEGLAQLTSTNGAKPVEDFSNMESQSVPLDPMEHVGMEPLQFDYSGTQVPVDSAAATVGLFDYNSQQQLFQRPNALAVQQLTAAQQQQYALAAAHQPHIGLAPAAFVPNPYIISAAPPGTDPYTAGLAAAATLGPAVVPHQYYGVTPWGVYPASLFQQQAAAAAAATNSANQQTTPQAQQGQQQVLRGGASQRPLTPNQNQQGQQTDPLVAAAAVNSALAFGQGLAAGMPGYPVLAPAAYYDQTGALVVNAGARNGLGAPVRLVAPAPVIISSSAAQAAVAAAAASANGAAGGLAGTTNGPFRPLGTQQPQPQPQQQPNNNLASSSFYGNNSLNSNSQSSSLFSQGSAQPANTSLGFGSSSSLGATLGSALGGFGTAVANSNTGSGSRRDSLTGSSDLYKRTSSSLTPIGHSFYNGLSFSSSPGPVGMPLPSQGPGHSQTPPPSLSSHGSSSSLNLGGLTNGSGRYISAAPGAEAKYRSASSASSLFSPSSTLFSSSRLRYGMSDVMPSGRSRLLEDFRNNRYPNLQLREIAGHIMEFSQDQHGSRFIQLKLERATPAERQLVFNEILQAAYQLMVDVFGNYVIQKFFEFGSLEQKLALAERIRGHVLSLALQMYGCRVIQKALEFIPSDQQNEMVRELDGHVLKCVKDQNGNHVVQKCIECVQPQSLQFIIDAFKGQVFALSTHPYGCRVIQRILEHCLPDQTLPILEELHQHTEQLVQDQYGNYVIQHVLEHGRPEDKSKIVAEIRGNVLVLSQHKFASNVVEKCVTHASRTERAVLIDEVCTMNDGPHSALYTMMKDQYANYVVQKMIDVAEPGQRKIVMHKIRPHIATLRKYTYGKHILAKLEKYYMKNGVDLGPICGPPNGII

SEQ ID NO: 759674 - protein, 1186 aa, Homo sapiens; identical to SEQ ID NO: 759673

SEQ ID NO: 759675 - protein, 1159 aa, Homo sapiens
MSVACVLKRKAVLWQDSFSPHLKHHPQEPANPNMPVVLTSGTGSQAQPQPAANQALAAGTHSSPVPGSIGVAGRSQDDAMVDYFFQRQHGEQLGGGGSGGGGYNNSKHRWPTGDNIHAEHQVRSMDELNHDFQALALEGRAMGEQLLPGKKFWETDESSKDGPKGIFLGDQWRDSAWGTSDHSVSQPIMVQRRPGQSFHVNSEVNSVLSPRSESGGLGVSMVEYVLSSSPGDSCLRKGGFGPRDADSDENDKGEKKNKGTFDGDKLGDLKEEGDVMDKTNGLPVQNGIDADVKDFSRTPGNCQNSANEVDLLGPNQNGSEGLAQLTSTNGAKPVEDFSNMESQSVPLDPMEHVGMEPLQFDYSGTQVPVDSAAATVGLFDYNSQQQLFQRPNALAVQQLTAAQQQQYALAAAHQPHIGLAPAAFVPNPYIISAAPPGTDPYTAGLAAAATLGPAVVPHQYYGVTPWGVYPASLFQQQAAAAAAATNSANQQTTPQAQQGQQQVLRGGASQRPLTPNQNQQGQQTDPLVAAAAVNSALAFGQGLAAGMPGYPVLAPAAYYDQTGALVVNAGARNGLGAPVRLVAPAPVIISSSAAQAGTQQPQPQPQQQPNNNLASSSFYGNNSLNSNSQSSSLFSQGSAQPANTSLGFGSSSSLGATLGSALGGFGTAVANSNTGSGSRRDSLTGSSDLYKRTSSSLTPIGHSFYNGLSFSSSPGPVGMPLPSQGPGHSQTPPPSLSSHGSSSSLNLGGLTNGSGRYISAAPGAEAKYRSASSASSLFSPSSTLFSSSRLRYGMSDVMPSGRSRLLEDFRNNRYPNLQLREIAGHIMEFSQDQHGSRFIQLKLERATPAERQLVFNEILQAAYQLMVDVFGNYVIQKFFEFGSLEQKLALAERIRGHVLSLALQMYGCRVIQKALEFIPSDQQNEMVRELDGHVLKCVKDQNGNHVVQKCIECVQPQSLQFIIDAFKGQVFALSTHPYGCRVIQRILEHCLPDQTLPILEELHQHTEQLVQDQYGNYVIQHVLEHGRPEDKSKIVAEIRGNVLVLSQHKFASNVVEKCVTHASRTERAVLIDEVCTMNDGPHSALYTMMKDQYANYVVQKMIDVAEPGQRKIVMHKIRPHIATLRKYTYGKHILAKLEKYYMKNGVDLGPICGPPNGII

SEQ ID NO: 759676 - protein, 1186 aa, Homo sapiens; identical to SEQ ID NO: 759673

SEQ ID NO: 759677 - protein, 1040 aa, Homo sapiens
MSVACVLKRKAVLWQDSFSPHLKHHPQEPANPNMPVVLTSGTGSQAQPQPAANQALAAGTHSSPVPGSIGVAGRSQDDAMVDYFFQRQHGEQLGGGGSGGGGYNNSKHRWPTGDNIHAEHQVRSMDELNHDFQALALEGRAMGEQLLPGKKFWETDESSKDGPKGIFLGDQWRDSAWGTSDHSVSQPIMVQRRPGQSFHVNSEVNSVLSPRSESGGLGVSMVEYVLSSSPGDSCLRKGGFLFQRPNALAVQQLTAAQQQQYALAAAHQPHIGLAPAAFVPNPYIISAAPPGTDPYTAGLAAAATLGPAVVPHQYYGVTPWGVYPASLFQQQAAAAAAATNSANQQTTPQAQQGQQQVLRGGASQRPLTPNQNQQGQQTDPLVAAAAVNSALAFGQGLAAGMPGYPVLAPAAYYDQTGALVVNAGARNGLGAPVRLVAPAPVIISSSAAQAAVAAAAASANGAAGGLAGTTNGPFRPLGTQQPQPQPQQQPNNNLASSSFYGNNSLNSNSQSSSLFSQGSAQPANTSLGFGSSSSLGATLGSALGGFGTAVANSNTGSGSRRDSLTGSSDLYKRTSSSLTPIGHSFYNGLSFSSSPGPVGMPLPSQGPGHSQTPPPSLSSHGSSSSLNLGGLTNGSGRYISAAPGAEAKYRSASSASSLFSPSSTLFSSSRLRYGMSDVMPSGRSRLLEDFRNNRYPNLQLREIAGHIMEFSQDQHGSRFIQLKLERATPAERQLVFNEILQAAYQLMVDVFGNYVIQKFFEFGSLEQKLALAERIRGHVLSLALQMYGCRVIQKALEFIPSDQQNEMVRELDGHVLKCVKDQNGNHVVQKCIECVQPQSLQFIIDAFKGQVFALSTHPYGCRVIQRILEHCLPDQTLPILEELHQHTEQLVQDQYGNYVIQHVLEHGRPEDKSKIVAEIRGNVLVLSQHKFASNVVEKCVTHASRTERAVLIDEVCTMNDGPHSALYTMMKDQYANYVVQKMIDVAEPGQRKIVMHKIRPHIATLRKYTYGKHILAKLEKYYMKNGVDLGPICGPPNGII

SEQ ID NO: 759678 - protein, 1090 aa, Homo sapiens
MSVACVLKRKAVLWQDSFSPHLKHHPQEPANPNMPVVLTSGTGSQAQPQPAANQALAAGTHSSPVPGSIGVAGRSQDDAMVDYFFQRQHGEQLGGGGSGGGGYNNSKHRWPTGDNIHAEHQVRSMDELNHDFQALALEGRAMGEGPRDADSDENDKGEKKNKGTFDGDKLGDLKEEGDVMDKTNGLPVQNGIDADVKDFSRTPGNCQNSANEVDLLGPNQNGSEGLAQLTSTNGAKPVEDFSNMESQSVPLDPMEHVGMEPLQFDYSGTQVPVDSAAATVGLFDYNSQQQLFQRPNALAVQQLTAAQQQQYALAAAHQPHIGLAPAAFVPNPYIISAAPPGTDPYTAGLAAAATLGPAVVPHQYYGVTPWGVYPASLFQQQAAAAAAATNSANQQTTPQAQQGQQQVLRGGASQRPLTPNQNQQGQQTDPLVAAAAVNSALAFGQGLAAGMPGYPVLAPAAYYDQTGALVVNAGARNGLGAPVRLVAPAPVIISSSAAQAAVAAAAASANGAAGGLAGTTNGPFRPLGTQQPQPQPQQQPNNNLASSSFYGNNSLNSNSQSSSLFSQGSAQPANTSLGFGSSSSLGATLGSALGGFGTAVANSNTGSGSRRDSLTGSSDLYKRTSSSLTPIGHSFYNGLSFSSSPGPVGMPLPSQGPGHSQTPPPSLSSHGSSSSLNLGGLTNGSGRYISAAPGAEAKYRSASSASSLFSPSSTLFSSSRLRYGMSDVMPSGRSRLLEDFRNNRYPNLQLREIAGHIMEFSQDQHGSRFIQLKLERATPAERQLVFNEILQAAYQLMVDVFGNYVIQKFFEFGSLEQKLALAERIRGHVLSLALQMYGCRVIQKALEFIPSDQQNEMVRELDGHVLKCVKDQNGNHVVQKCIECVQPQSLQFIIDAFKGQVFALSTHPYGCRVIQRILEHCLPDQTLPILEELHQHTEQLVQDQYGNYVIQHVLEHGRPEDKSKIVAEIRGNVLVLSQHKFASNVVEKCVTHASRTERAVLIDEVCTMNDGPHSALYTMMKDQYANYVVQKMIDVAEPGQRKIVMHKIRPHIATLRKYTYGKHILAKLEKYYMKNGVDLGPICGPPNGII

SEQ ID NO: 759679 - protein, 997 aa, Homo sapiens
MIFKHLLWREERWESSSCQVKSFGKQMNPAKMDQKEYSWVINGETVPGEHQGPRDADSDENDKGEKKNKGTFDGDKLGDLKEEGDVMDKTNGLPVQNGIDADVKDFSRTPGNCQNSANEVDLLGPNQNGSEGLAQLTSTNGAKPVEDFSNMESQSVPLDPMEHVGMEPLQFDYSGTQVPVDSAAATVGLFDYNSQQQLFQRPNALAVQQLTAAQQQQYALAAAHQPHIGLAPAAFVPNPYIISAAPPGTDPYTAGLAAAATLGPAVVPHQYYGVTPWGVYPASLFQQQAAAAAAATNSANQQTTPQAQQGQQQVLRGGASQRPLTPNQNQQGQQTDPLVAAAAVNSALAFGQGLAAGMPGYPVLAPAAYYDQTGALVVNAGARNGLGAPVRLVAPAPVIISSSAAQAAVAAAAASANGAAGGLAGTTNGPFRPLGTQQPQPQPQQQPNNNLASSSFYGNNSLNSNSQSSSLFSQGSAQPANTSLGFGSSSSLGATLGSALGGFGTAVANSNTGSGSRRDSLTGSSDLYKRTSSSLTPIGHSFYNGLSFSSSPGPVGMPLPSQGPGHSQTPPPSLSSHGSSSSLNLGGLTNGSGRYISAAPGAEAKYRSASSASSLFSPSSTLFSSSRLRYGMSDVMPSGRSRLLEDFRNNRYPNLQLREIAGHIMEFSQDQHGSRFIQLKLERATPAERQLVFNEILQAAYQLMVDVFGNYVIQKFFEFGSLEQKLALAERIRGHVLSLALQMYGCRVIQKALEFIPSDQQNEMVRELDGHVLKCVKDQNGNHVVQKCIECVQPQSLQFIIDAFKGQVFALSTHPYGCRVIQRILEHCLPDQTLPILEELHQHTEQLVQDQYGNYVIQHVLEHGRPEDKSKIVAEIRGNVLVLSQHKFASNVVEKCVTHASRTERAVLIDEVCTMNDGPHSALYTMMKDQYANYVVQKMIDVAEPGQRKIVMHKIRPHIATLRKYTYGKHILAKLEKYYMKNGVDLGPICGPPNGII

SEQ ID NO: 759680 - protein, 640 aa, Homo sapiens
MPGYPVLAPAAYYDQTGALVVNAGARNGLGAPVRLVAPAPVIISSSAAQAAVAAAAASANGAAGGLAGTTNGPFRPLGTQQPQPQPQQQPNNNLASSSFYGNNSLNSNSQSSSLFSQGSAQPANTSLGFGSSSSLGATLGSALGGFGTAVANSNTGSGSRRDSLTGSSDLYKRTSSSLTPIGHSFYNGLSFSSSPGPVGMPLPSQGPGHSQTPPPSLSSHGSSSSLNLGGLTNGSGRYISAAPGAEAKYRSASSASSLFSPSSTLFSSSRLRYGMSDVMPSGRSRLLEDFRNNRYPNLQLREIAGHIMEFSQDQHGSRFIQLKLERATPAERQLVFNEILQAAYQLMVDVFGNYVIQKFFEFGSLEQKLALAERIRGHVLSLALQMYGCRVIQKALEFIPSDQQNEMVRELDGHVLKCVKDQNGNHVVQKCIECVQPQSLQFIIDAFKGQVFALSTHPYGCRVIQRILEHCLPDQTLPILEELHQHTEQLVQDQYGNYVIQHVLEHGRPEDKSKIVAEIRGNVLVLSQHKFASNVVEKCVTHASRTERAVLIDEVCTMNDGPHSALYTMMKDQYANYVVQKMIDVAEPGQRKIVMHKIRPHIATLRKYTYGKHILAKLEKYYMKNGVDLGPICGPPNGII

SEQ ID NO: 759681 - protein, 606 aa, Homo sapiens
MWPVPFIAKRFAFFFIAVAAAAASANGAAGGLAGTTNGPFRPLGTQQPQPQPQQQPNNNLASSSFYGNNSLNSNSQSSSLFSQGSAQPANTSLGFGSSSSLGATLGSALGGFGTAVANSNTGSGSRRDSLTGSSDLYKRTSSSLTPIGHSFYNGLSFSSSPGPVGMPLPSQGPGHSQTPPPSLSSHGSSSSLNLGGLTNGSGRYISAAPGAEAKYRSASSASSLFSPSSTLFSSSRLRYGMSDVMPSGRSRLLEDFRNNRYPNLQLREIAGHIMEFSQDQHGSRFIQLKLERATPAERQLVFNEILQAAYQLMVDVFGNYVIQKFFEFGSLEQKLALAERIRGHVLSLALQMYGCRVIQKALEFIPSDQQNEMVRELDGHVLKCVKDQNGNHVVQKCIECVQPQSLQFIIDAFKGQVFALSTHPYGCRVIQRILEHCLPDQTLPILEELHQHTEQLVQDQYGNYVIQHVLEHGRPEDKSKIVAEIRGNVLVLSQHKFASNVVEKCVTHASRTERAVLIDEVCTMNDGPHSALYTMMKDQYANYVVQKMIDVAEPGQRKIVMHKIRPHIATLRKYTYGKHILAKLEKYYMKNGVDLGPICGPPNGII

SEQ ID NO: 759682 - protein, 566 aa, Homo sapiens
VAEDHSQETPEPQQQPNNNLASSSFYGNNSLNSNSQSSSLFSQGSAQPANTSLGFGSSSSLGATLGSALGGFGTAVANSNTGSGSRRDSLTGSSDLYKRTSSSLTPIGHSFYNGLSFSSSPGPVGMPLPSQGPGHSQTPPPSLSSHGSSSSLNLGGLTNGSGRYISAAPGAEAKYRSASSASSLFSPSSTLFSSSRLRYGMSDVMPSGRSRLLEDFRNNRYPNLQLREIAGHIMEFSQDQHGSRFIQLKLERATPAERQLVFNEILQAAYQLMVDVFGNYVIQKFFEFGSLEQKLALAERIRGHVLSLALQMYGCRVIQKALEFIPSDQQNEMVRELDGHVLKCVKDQNGNHVVQKCIECVQPQSLQFIIDAFKGQVFALSTHPYGCRVIQRILEHCLPDQTLPILEELHQHTEQLVQDQYGNYVIQHVLEHGRPEDKSKIVAEIRGNVLVLSQHKFASNVVEKCVTHASRTERAVLIDEVCTMNDGPHSALYTMMKDQYANYVVQKMIDVAEPGQRKIVMHKIRPHIATLRKYTYGKHILAKLEKYYMKNGVDLGPICGPPNGII

SEQ ID NO: 759683 - protein, 484 aa, Homo sapiens
TQSPVGRHVVGVKGKGERERQREKIGGLKSIFILPLRPPGPVGMPLPSQGPGHSQTPPPSLSSHGSSSSLNLGGLTNGSGRYISAAPGAEAKYRSASSASSLFSPSSTLFSSSRLRYGMSDVMPSGRSRLLEDFRNNRYPNLQLREIAGHIMEFSQDQHGSRFIQLKLERATPAERQLVFNEILQAAYQLMVDVFGNYVIQKFFEFGSLEQKLALAERIRGHVLSLALQMYGCRVIQKALEFIPSDQQNEMVRELDGHVLKCVKDQNGNHVVQKCIECVQPQSLQFIIDAFKGQVFALSTHPYGCRVIQRILEHCLPDQTLPILEELHQHTEQLVQDQYGNYVIQHVLEHGRPEDKSKIVAEIRGNVLVLSQHKFASNVVEKCVTHASRTERAVLIDEVCTMNDGPHSALYTMMKDQYANYVVQKMIDVAEPGQRKIVMHKIRPHIATLRKYTYGKHILAKLEKYYMKNGVDLGPICGPPNGII

SEQ ID NO: 759684 - protein, 442 aa, Homo sapiens
AAAEQEGRRGVRPAQPPEPWASAAGAARWSPSAACSCGRYISAAPGAEAKYRSASSASSLFSPSSTLFSSSRLRYGMSDVMPSGRSRLLEDFRNNRYPNLQLREIAGHIMEFSQDQHGSRFIQLKLERATPAERQLVFNEILQAAYQLMVDVFGNYVIQKFFEFGSLEQKLALAERIRGHVLSLALQMYGCRVIQKALEFIPSDQQNEMVRELDGHVLKCVKDQNGNHVVQKCIECVQPQSLQFIIDAFKGQVFALSTHPYGCRVIQRILEHCLPDQTLPILEELHQHTEQLVQDQYGNYVIQHVLEHGRPEDKSKIVAEIRGNVLVLSQHKFASNVVEKCVTHASRTERAVLIDEVCTMNDGPHSALYTMMKDQYANYVVQKMIDVAEPGQRKIVMHKIRPHIATLRKYTYGKHILAKLEKYYMKNGVDLGPICGPPNGII

SEQ ID NO: 759685 - protein, 196 aa, Homo sapiens
AAAYYYYRRGRVDPYGCRVIQRILEHCLPDQTLPILEELHQHTEQLVQDQYGNYVIQHVLEHGRPEDKSKIVAEIRGNVLVLSQHKFASNVVEKCVTHASRTERAVLIDEVCTMNDGPHSALYTMMKDQYANYVVQKMIDVAEPGQRKIVMHKIRPHIATLRKYTYGKHILAKLEKYYMKNGVDLGPICGPPNGII

SEQ ID NO: 759686 - protein, 225 aa, Homo sapiens
GRGARRAPRRAARAAPGAMGKCSGRCTLVAFCCLQLVAALERQIFDFLGYQWAPILANFLHIMAVILGIFGTVQYRSRYLILYAAWLVLWVGWNAFIICFYLEVGQLSQDRDFIMTFNTSLHRSWWMENGPGCLVTPVLNSRLALEDHHVISVTGCLLDYPYIEALSSALQIFLALFGFVFACYVSKVFLEEEDSFDFIGGFDSYGYQAPQKTSHLQLQPLYTSG

SEQ ID NO: 759687 - protein, 781 aa, Homo sapiens
MSVACVLKRKAVLWQDSFSPHLKHHPQEPANPNMPVVLTSGTGSQAQPQPAANQALAAGTHSSPVPGSIGVAGRSQDDAMVDYFFQRQHGEQLGGGGSGGGGYNNSKHRWPTGDNIHAEHQVRSMDELNHDFQALALEGRAMGEQLLPGKKFWETDESSKDGPKGIFLGDQWRDSAWGTSDHSVSQPIMVQRRPGQSFHVNSEVNSVLSPRSESGGLGVSMVEYVLSSSPGDSCLRKGGFGPRDADSDENDKGEKKNKGTFDGDKLGDLKEEGDVMDKTNGLPVQNGIDADVKDFSRTPGNCQNSANEVDLLGPNQNGSEGLAQLTSTNGAKPVEDFSNMESQSVPLDPMEHVGMEPLQFDYSGTQVPVDSAAATVGLFDYNSQQQLFQRPNALAVQQLTAAQQQQYALAAAHQPHIGLAPAAFVPNPYIISAAPPGTDPYTAGLAAAATLGPAVVPHQYYGVTPWGVYPASLFQQQAAAAAAATNSANQQTTPQAQQGQQQVLRGGASQRPLTPNQNQQGQQTDPLVAAAAVNSALAFGQGLAAGMPGYPVLAPAAYYDQTGALVVNAGARNGLGAPVRLVAPAPVIISSSAAQAAVAAAAASANGAAGGLAGTTNGPFRPLGTQQPQPQPQQQPNNNLASSSFYGNNSLNSNSQSSSLFSQGSAQPANTSLGFGSSSSLGATLGSALGGFGTAVANSNTGSGSRRDSLTGSSDLYKRTSSSLTPIGHSFYNGLSFSSSPGPVGMPLPSQGPGHSQTPPPSLSSHGSSSSLNLGKNHYSN

SEQ ID NO: 759688 - protein, 225 aa, Homo sapiens; identical to SEQ ID NO: 759686

SEQ ID NO: 759689 - protein, 325 aa, Homo sapiens
MSVACVLKRKAVLWQDSFSPHLKHHPQEPANPNMPVVLTSGTGSQAQPQPAANQALAAGTHSSPVPGSIGVAGRSQDDAMVDYFFQRQHGEQLGGGGSGGGGYNNSKHRWPTGDNIHAEHQVRSMDELNHDFQALALEGRAMGEQLLPGKKFWETDESSKDGPKGIFLGDQWRDSAWGTSDHSVSQPIMVQRRPGQSFHVNSEVNSVLSPRSESGGLGVSMVEYVLSSSPGDSCLRKGGFGPRDADSDENDKGEKKNKGTFDGDKLGDLKEEGDVMDKTNGLPVQNGIDADVKDFSYRTPGIPDSAITQVFSKSRTIVNDGPVQA

SEQ ID NO: 759690 - protein, 216 aa, Homo sapiens
MSVACVLKRKAVLWQDSFSPHLKHHPQEPANPNMPVVLTSGTGSQAQPQPAANQALAAGTHSSPVPGSIGVAGRSQDDAMVDYFFQRQHGEQLGGGGSGGGGYNNSKHRWPTGDNIHAEHQVRSMDELNHDFQALALEGRAMGEQLLPGKKFWETDESSKDGPKGIFLGDQWRDSAWGTSDHSVSQPIMVQRRPGQSFHVNSEVNSVLSGYQLDSI

SEQ ID NO: 759691 - protein, 130 aa, Homo sapiens
MSVACVLKRKAVLWQDSFSPHLKHHPQEPANPNMPVVLTSGTGSQAQPQPAANQALAAGTHSSPVPGSIGVAGRSQDDAMVDYFFQRQHGEQLGGGGSGGGGYNNSKHRWPTGDNIHAEHQQRSHHCTPA

SEQ ID NO: 759692 - protein, 78 aa, Homo sapiens
GRVGFFSKNTSLITRTLPPALTSLTPTLPQAPFYSTGVATGALKPFVFIRWFLQGDQVLFSLGPCKEGSALLVSVQAG

SEQ ID NO: 759693 - protein, 1209 aa, Homo sapiens
MSVACVLKRKAVLWQDSFSPHLKHHPQEPANPNMPVVLTSGTGSQAQPQPAANQALAAGTHSSPVPGSIGVAGRSQDDAMVDYFFQRQHGEQLGGGGSGGGGYNNSKHRWPTGDNIHAEHQVRSMDELNHDFQALALEGRAMGEQLLPGKKFWETDESSKDGPKGIFLGDQWRDSAWGTSDHSVSQPIMVQRRPGQSFHVNSEVNSVLSPRSESGGLGVSMVEYVLSSSPGDSCLRKGGFGPRDADSDENDKGEKKNKGTFDGDKLGDLKEEGDVMDKTNGLPVQNGIDADVKDFSRTPGNCQNSANEVDLLGPNQNGSEGLAQLTSTNGAKPVEDFSNMESQSVPLDPMEHVGMEPLQFDYSGTQVPVDSAAATVGLFDYNSQQQLFQRPNALAVQQLTAAQQQQYALAAAHQPHIGLAPAAFVPNPYIISAAPPGTDPYTAGLAAAATLGPAVVPHQYYGVTPWGVYPASLFQQQAAAAAAATNSANQQTTPQAQQGQQQVLRGGASQRPLTPNQNQQGQQTDPLVAAAAVNSALAFGQGLAAGMPGYPVLAPAAYYDQTGALVVNAGARNGLGAPVRLVAPAPVIISSSAAQAGERTSEWTPARDLKVATDSEILKTVAAAAASANGAAGGLAGTTNGPFRPLGTQQPQPQPQQQPNNNLASSSFYGNNSLNSNSQSSSLFSQGSAQPANTSLGFGSSSSLGATLGSALGGFGTAVANSNTGSGSRRDSLTGSSDLYKRTSSSLTPIGHSFYNGLSFSSSPGPVGMPLPSQGPGHSQTPPPSLSSHGSSSSLNLGGLTNGSGRYISAAPGAEAKYRSASSASSLFSPSSTLFSSSRLRYGMSDVMPSGRSRLLEDFRNNRYPNLQLREIAGHIMEFSQDQHGSRFIQLKLERATPAERQLVFNEILQAAYQLMVDVFGNYVIQKFFEFGSLEQKLALAERIRGHVLSLALQMYGCRVIQKALEFIPSDQQNEMVRELDGHVLKCVKDQNGNHVVQKCIECVQPQSLQFIIDAFKGQVFALSTHPYGCRVIQRILEHCLPDQTLPILEELHQHTEQLVQDQYGNYVIQHVLEHGRPEDKSKIVAEIRGNVLVLSQHKFASNVVEKCVTHASRTERAVLIDEVCTMNDGPHSALYTMMKDQYANYVVQKMIDVAEPGQRKIVMHKIRPHIATLRKYTYGKHILAKLEKYYMKNGVDLGPICGPPNGII

SEQ ID NO: 759694 - protein, 1152 aa, Homo sapiens
MSVACVLKRKAVLWQDSFSPHLKHHPQEPANPNMPVVLTSGTGSQAQPQPAANQALAAGTHSSPVPGSIGVAGRSQDDAMVDYFFQRQHGEQLGGGGSGGGGYNNSKHRWPTGDNIHAEHQVRSMDELNHDFQALALEGRAMGEQLLPGKKFWETDESSKDGPKGIFLGDQWRDSAWGTSDHSVSQPIMVQRRPGQSFHVNSEVNSVLSPRSESGGLGVSMVEYVLSSSPGDSCLRKGGFGPRDADSDENDKGEKKNKGTFDGDKLGDLKEEGDVMDKTNGLPVQNGIDADVKDFSRTPGNCQNSANEVDLLGPNQNGSEGLAQLTSTNGAKPVEDFSNMESQSVPLDPMEHVGMEPLQFDYSGTQVPVDSAAATVGLFDYNSQQQLFQRPNALAVQQLTAAQQQQYALAAAHQPHIGPAVVPHQYYGVTPWGVYPASLFQQQAAAAAAATNSANQQTTPQAQQGQQQVLRGGASQRPLTPNQNQQGQQTDPLVAAAAVNSALAFGQGLAAGMPGYPVLAPAAYYDQTGALVVNAGARNGLGAPVRLVAPAPVIISSSAAQAAVAAAAASANGAAGGLAGTTNGPFRPLGTQQPQPQPQQQPNNNLASSSFYGNNSLNSNSQSSSLFSQGSAQPANTSLGFGSSSSLGATLGSALGGFGTAVANSNTGSGSRRDSLTGSSDLYKRTSSSLTPIGHSFYNGLSFSSSPGPVGMPLPSQGPGHSQTPPPSLSSHGSSSSLNLGGLTNGSGRYISAAPGAEAKYRSASSASSLFSPSSTLFSSSRLRYGMSDVMPSGRSRLLEDFRNNRYPNLQLREIAGHIMEFSQDQHGSRFIQLKLERATPAERQLVFNEILQAAYQLMVDVFGNYVIQKFFEFGSLEQKLALAERIRGHVLSLALQMYGCRVIQKALEFIPSDQQNEMVRELDGHVLKCVKDQNGNHVVQKCIECVQPQSLQFIIDAFKGQVFALSTHPYGCRVIQRILEHCLPDQTLPILEELHQHTEQLVQDQYGNYVIQHVLEHGRPEDKSKIVAEIRGNVLVLSQHKFASNVVEKCVTHASRTERAVLIDEVCTMNDGPHSALYTMMKDQYANYVVQKMIDVAEPGQRKIVMHKIRPHIATLRKYTYGKHILAKLEKYYMKNGVDLGPICGPPNGII

SEQ ID NO: 759695 - protein, 1066 aa, Homo sapiens
MVRSMDELNHDFQALALEGRAMGEQLLPGKKFWETDESSKDGPKGIFLGDQWRDSAWGTSDHSVSQPIMVQRRPGQSFHVNSEVNSVLSPRSESGGLGVSMVEYVLSSSPGDSCLRKGGFGPRDADSDENDKGEKKNKGTFDGDKLGDLKEEGDVMDKTNGLPVQNGIDADVKDFSRTPGNCQNSANEVDLLGPNQNGSEGLAQLTSTNGAKPVEDFSNMESQSVPLDPMEHVGMEPLQFDYSGTQVPVDSAAATVGLFDYNSQQQLFQRPNALAVQQLTAAQQQQYALAAAHQPHIGLAPAAFVPNPYIISAAPPGTDPYTAGLAAAATLGPAVVPHQYYGVTPWGVYPASLFQQQAAAAAAATNSANQQTTPQAQQGQQQVLRGGASQRPLTPNQNQQGQQTDPLVAAAAVNSALAFGQGLAAGMPGYPVLAPAAYYDQTGALVVNAGARNGLGAPVRLVAPAPVIISSSAAQAAVAAAAASANGAAGGLAGTTNGPFRPLGTQQPQPQPQQQPNNNLASSSFYGNNSLNSNSQSSSLFSQGSAQPANTSLGFGSSSSLGATLGSALGGFGTAVANSNTGSGSRRDSLTGSSDLYKRTSSSLTPIGHSFYNGLSFSSSPGPVGMPLPSQGPGHSQTPPPSLSSHGSSSSLNLGGLTNGSGRYISAAPGAEAKYRSASSASSLFSPSSTLFSSSRLRYGMSDVMPSGRSRLLEDFRNNRYPNLQLREIAGHIMEFSQDQHGSRFIQLKLERATPAERQLVFNEILQAAYQLMVDVFGNYVIQKFFEFGSLEQKLALAERIRGHVLSLALQMYGCRVIQKALEFIPSDQQNEMVRELDGHVLKCVKDQNGNHVVQKCIECVQPQSLQFIIDAFKGQVFALSTHPYGCRVIQRILEHCLPDQTLPILEELHQHTEQLVQDQYGNYVIQHVLEHGRPEDKSKIVAEIRGNVLVLSQHKFASNVVEKCVTHASRTERAVLIDEVCTMNDGPHSALYTMMKDQYANYVVQKMIDVAEPGQRKIVMHKIRPHIATLRKYTYGKHILAKLEKYYMKNGVDLGPICGPPNGII

SEQ ID NO: 759696 - protein, 905 aa, Homo sapiens
MIFKHLLWREERWESRTPGNCQNSANEVDLLGPNQNGSEGLAQLTSTNGAKPVEDFSNMESQSVPLDPMEHVGMEPLQFDYSGTQVPVDSAAATVGLFDYNSQQQLFQRPNALAVQQLTAAQQQQYALAAAHQPHIGLAPAAFVPNPYIISAAPPGTDPYTAGLAAAATLGPAVVPHQYYGVTPWGVYPASLFQQQAAAAAAATNSANQQTTPQAQQGQQQVLRGGASQRPLTPNQNQQGQQTDPLVAAAAVNSALAFGQGLAAGMPGYPVLAPAAYYDQTGALVVNAGARNGLGAPVRLVAPAPVIISSSAAQAAVAAAAASANGAAGGLAGTTNGPFRPLGTQQPQPQPQQQPNNNLASSSFYGNNSLNSNSQSSSLFSQGSAQPANTSLGFGSSSSLGATLGSALGGFGTAVANSNTGSGSRRDSLTGSSDLYKRTSSSLTPIGHSFYNGLSFSSSPGPVGMPLPSQGPGHSQTPPPSLSSHGSSSSLNLGGLTNGSGRYISAAPGAEAKYRSASSASSLFSPSSTLFSSSRLRYGMSDVMPSGRSRLLEDFRNNRYPNLQLREIAGHIMEFSQDQHGSRFIQLKLERATPAERQLVFNEILQAAYQLMVDVFGNYVIQKFFEFGSLEQKLALAERIRGHVLSLALQMYGCRVIQKALEFIPSDQQNEMVRELDGHVLKCVKDQNGNHVVQKCIECVQPQSLQFIIDAFKGQVFALSTHPYGCRVIQRILEHCLPDQTLPILEELHQHTEQLVQDQYGNYVIQHVLEHGRPEDKSKIVAEIRGNVLVLSQHKFASNVVEKCVTHASRTERAVLIDEVCTMNDGPHSALYTMMKDQYANYVVQKMIDVAEPGQRKIVMHKIRPHIATLRKYTYGKHILAKLEKYYMKNGVDLGPICGPPNGII

SEQ ID NO: 759697 - protein, 441 aa, Homo sapiens
MPLPSQGPGHSQTPPPSLSSHGSSSSLNLGGLTNGSGRYISAAPGAEAKYRSASSASSLFSPSSTLFSSSRLRYGMSDVMPSGRSRLLEDFRNNRYPNLQLREIAGHIMEFSQDQHGSRFIQLKLERATPAERQLVFNEILQAAYQLMVDVFGNYVIQKFFEFGSLEQKLALAERIRGHVLSLALQMYGCRVIQKALEFIPSDQQNEMVRELDGHVLKCVKDQNGNHVVQKCIECVQPQSLQFIIDAFKGQVFALSTHPYGCRVIQRILEHCLPDQTLPILEELHQHTEQLVQDQYGNYVIQHVLEHGRPEDKSKIVAEIRGNVLVLSQHKFASNVVEKCVTHASRTERAVLIDEVCTMNDGPHSALYTMMKDQYANYVVQKMIDVAEPGQRKIVMHKIRPHIATLRKYTYGKHILAKLEKYYMKNGVDLGPICGPPNGII

SEQ ID NO: 759698 - protein, 1186 aa, Homo sapiens; identical to SEQ ID NO: 759673

SEQ ID NO: 759699 - protein, 1135 aa, Homo sapiens
MSVACVLKRKAVLWQDSFSPHLKHHPQEPANPNMPVVLTSGTGSQAQPQPAANQALAAGTHSSPVPGSIGVAGRSQDDAMVDYFFQRQHGEQLGGGGSGGGGYNNSKHRWPTGDNIHAEHQVRSMDELNHDFQALALEGRAMGEQLLPGKKFWETDESSKDGPKGIFLGDQWRDSAWGTSDHSVSQPIMVQRRPGQSFHVNSEVNSVLSPRSESGGLGVSMVEYVLSSSPGDSCLRKGGFGPRDADSDENDKGEKKNKGTFDGDKLGDLKEEGDVMDKTNGLPVQNGIDADVKDFSRTPGNCQNSANEVDLLGPNQNGSEGLAQLTSTNGAKPVEDFSNMESQSVPLDPMEHVGMEPLQFDYSGTQVPVDSAAATVGLFDYNSQQQLFQRPNALAVQQLTAAQQQQYALAAAHQPHIGLAPAAFVPNPYIISAAPPGTDPYTAGLAAAATLGPAVVPHQYYGVTPWGVYPASLFQQQAAAAAAATNSANQQTTPQAQQGQQQVLRGGASQRPLTPNQNQQGQQTDPLVAAAAVNSALAFGQGLAAGMPGYPVLAPAAYYDQTGALVVNAGARNGLGAPVRLVAPAPVIISSSAAQAAVAAAAASANGAAGGLAGTTNGPFRPLGTQQPQPQPQQQPNNNLASSSFYGNNSLNSNSQSSSLFSQGSAQPANTSLGFGSSSSLGATLGSALGGFGTAVANSNTGSGSRRDSLTGSSDLYKRTSSSLTPIGHSFYNGLSFSSSPGPVGMPLPSQGPGHSQTPPPSLSSHGSSSSLNLGGLTNGSGRYISAAPGAEAKYRSASSASSLFSPSSTLFSSSRLRYGMSDVMPSGRSRLLEDFRNNRYPNLQLREIAGHIMEFSQDQHGSRFIQLKLERATPAERQLVFNEILQAAYQLMVDVFGNYVIQKFFEFGSLEQKLALAERIRGHVLSLALQMYGCRVIQKALEFIPSDQQNEMVRELDGHVLKCVKDQNGNHVVQKCIECVQPQSLQFIIDAFKGQVFALSTHPYGCRVIQRILEHCLPDQTLPILEELHQHTEQLVQHKALYLIGCFFIYVTISCVKKSLGRFCGQLGSPLGNPPGKKEFMSQGNKMLLTFHTDFSNEENGTIMFYKGFLAYYQAVDLDECASRSKSGEEDPQP

SEQ ID NO: 759700 - protein, 126 aa, Homo sapiens [sequence omitted]

SEQ ID NO: 759701 - protein, 1246 aa, Homo sapiens
MMETERLVLPPPDPLDLPLRAVELGCTGHWELLNLPGAPESSLPHGLPPCAPDLQQEAEQLFLSSPAWLPLHGVEHSARKWQRKTDPWSLLAVLGAPVPSDLQAQRHPTTGQILGYKEVLLENTNLSATTSLSLRRPPGPASQSLWGNPTRYPFWPGGMDEPTITDLNTREEAEEEIDFEKDLLTIPPGFKKGMDFAPKDCPTPAPGLLSLSCLLEPLDLGGGDEDENEAVGQPGGPRGDTVSASPCSAPLARASSLEDLVLKEASTAVSTPEAPEPPSQEQWAIPVDATSPVGDFYRLIPQPAFQWAFEPDVFQKQAILHLERHDSVFVAAHTSAGKTVVAEYAIALAQKHMTRTIYTSPIKALSNQKFRDFRNTFGDVGLLTGDVQLHPEASCLIMTTEILRSMLYSGSDVIRDLEWVIFDEVHYINDVERGVVWEEVLIMLPDHVSIILLSATVPNALEFADWIGRLKRRQIYVISTVTRPVPLEHYLFTGNSSKTQGELFLLLDSRGAFHTKGYYAAVEAKKERMSKHAQTFGAKQPTHQGGPAQDRGVYLSLLASLRTRAQLPVVVFTFSRGRCDEQASGLTSLDLTTSSEKSEIHLFLQRCLARLRGSDRQLPQVLHMSELLNRGLGVHHSGILPILKEIVEMLFSRGLVKVLFATETFAMGVNMPARTVVFDSMRKHDGSTFRDLLPGEYVQMAGRAGRRGLDPTGTVILLCKGRVPEMADLHRMMMGKPSQLQSQFRLTYTMILNLLRVDALRVEDMMKRSFSEFPSRKDSKAHEQALAELTKRLGALEEPDMTGQLVDLPEYYSWGEELTETQHMIQRRIMESVNGLKSLSAGRVVVVKNQEHHNALGVILQVSSNSTSRVFTTLVLCDKPLSQDPQDRGPATAEVPYPDDLVGFKLFLPEGPCDHTVVKLQPGDMAAITTKVLRVNGEKILEDFSKRQQPKFKKDPPLAAVTTAVQELLRLAQAHPAGPPTLDPVNDLQLKDMSVVEGGLRARKLEELIQGAQCVHSPRFPAQYLKLRERMQIQKEMERLRFLLSDQSLLLLPEYHQRVEVLRTLGYVDEAGTVKLAGRVACAMSSHELLLTELMFDNALSTLRPEEIAALLSGLVCQSPGDAGDQLPNTLKQGIERVRAVAKRIGEVQVACGLNQTVEEFVGELNFGLVEVVYEWARGMPFSELAGLSGTPEGLVVRCIQRLAEMCRSLRGAARLVGEPVLGAKMETAATLLRRDIVFAASLYTQ

SEQ ID NO: 759702 - protein, 1148 aa, Homo sapiens
MMETERLVLPPPDPLDLPLRAVELGCTGHWELLNLPGAPESSLPHGLPPCAPDLQQEAEQLFLSSPAWLPLHGVEHSARKWQRKTDPWSLLAVLGAPVPSDLQAQRHPTTGQILGYKEVLLENTNLSATTSLSLRRPPGPASQSLWGNPTRYPFWPGGMDEPTITDLNTREEAEEEIDFEKDLLTIPPGFKKGMDFAPKDCPTPAPGLLSLSCLLEPLDLGGGDEDENEAVGQPGGPRGDTVSASPCSAPLARASSLEDLVLKEASTAVSTPEAPEPPSQEQWAIPVDATSPVGDFYRLIPQPAFQWAFEPDVFQKQAILHLERHDSVFVAAHTSAGKTVVAEYAIALAQKHMTRTIYTSPIKALSNQKFRDFRNTFGDVGLLTGDVQLHPEASCLIMTTEILRSMLYSGSDVIRDLEWVIFDEVHYINDVERGVVWEEVLIMLPDHVSIILLSATVPNALEFADWIGRLKRRQIYVISTVTRPVPLEHYLFTGNSSKTQGELFLLLDSRGAFHTKGYYAAVEAKKERMSKHAQTFGAKQPTHQGGPAQDRGVYLSLLASLRTRAQLPVVVFTFSRGRCDEQASGLTSLDLTTSSEKSEIHLFLQRCLARLRGSDRQLPQVLHMSELLNRGLGVHHSGILPILKEIVEMLFSRGLVKVLFATETFAMGVNMPARTVVFDSMRKHDGSTFRDLLPGEYVQMAGRAGRRGLDPTGTVILLCKGRVPEMADLHRMMMGKPSQLQSQFRLTYTMILNLLRVDALRVEDMMKRSFSEFPSRKDSKAHEQALAELTKRLGALEEPDMTGQLVDLPEYYSWGEELTETQHMIQRRIMESVNGLKSLSAGRVVVVKNQEHHNALGVILQVSSNSTSRVFTTLVLCDKPLSQDPQDRGPATAEVPYPDDLVGFKLFLPEGPCDHTVVKLQPGDMAAITTKVLRVNGEKILEDFSKRQQPKFKKDPPLAAVTTAVQELLRLAQAHPAGPPTLDPVNDLQLKDMSVVEGGLRARKLEELIQGAQCVHSPRFPAQYLKLRERMQIQKEMERLRFLLSDQSLLLLPEYHQRVEVLRTLGYVDEAGTVKLAGRVACAMSSHELLLTELMFDNALSTLRPEEIAALLSGLVCQSPGDAGDQLPNTLKQVGDTTPFSLPGLWHS

SEQ ID NO: 759703 - protein, 1127 aa, Homo sapiens
  misc_feature (1127)..(1127): Xaa can be any naturally occurring amino acid
MMETERLVLPPPDPLDLPLRAVELGCTGHWELLNLPGAPESSLPHGLPPCAPDLQQEAEQLFLSSPAWLPLHGVEHSARKWQRKTDPWSLLAVLGAPVPSDLQAQRHPTTGQILGYKEVLLENTNLSATTSLSLRRPPGPASQSLWGNPTRYPFWPGGMDEPTITDLNTREEAEEEIDFEKDLLTIPPGFKKGMDFAPKDCPTPAPGLLSLSCLLEPLDLGGGDEDENEAVGQPGGPRGDTVSASPCSAPLARASSLEDLVLKEASTAVSTPEAPEPPSQEQWAIPVDATSPVGDFYRLIPQPAFQWAFEPDVFQKQAILHLERHDSVFVAAHTSAGKTVVAEYAIALAQKHMTRTIYTSPIKALSNQKFRDFRNTFGDVGLLTGDVQLHPEASCLIMTTEILRSMLYSGSDVIRDLEWVIFDEVHYINDVERGVVWEEVLIMLPDHVSIILLSATVPNALEFADWIGRLKRRQIYVISTVTRPVPLEHYLFTGNSSKTQGELFLLLDSRGAFHTKGYYAAVEAKKERMSKHAQTFGAKQPTHQGGPAQDRGVYLSLLASLRTRAQLPVVVFTFSRGRCDEQASGLTSLDLTTSSEKSEIHLFLQRCLARLRGSDRQLPQVLHMSELLNRGLGVHHSGILPILKEIVEMLFSRGLVKVLFATETFAMGVNMPARTVVFDSMRKHDGSTFRDLLPGEYVQMAGRAGRRGLDPTGTVILLCKGRVPEMADLHRMMMGKPSQLQSQFRLTYTMILNLLRVDALRVEDMMKRSFSEFPSRKDSKAHEQALAELTKRLGALEEPDMTGQLVDLPEYYSWGEELTETQHMIQRRIMESVNGLKSLSAGRVVVVKNQEHHNALGVILQVSSNSTSRVFTTLVLCDKPLSQDPQDRGPATAEVPYPDDLVGFKLFLPEGPCDHTVVKLQPGDMAAITTKVLRVNGEKILEDFSKRQQPKFKSEMLGRPFSSRGARRGREGQWSGSFLQPEGDHEVVVVVVRGLPQPKGDCEVEVVVRGLPQPEGGFWGREDLTPDLKICSLFRKDPPLAAVTTAVQELLRLAQAHPAGPPTLDPVNDLQLKDMSVVEGGLRARKLEELIQGAQCVHSPRFPAQYLKLRERMQIQKEMGKDETHRX

SEQ ID NO: 759704 - protein, 1159 aa, Homo sapiens
MMETERLVLPPPDPLDLPLRAVELGCTGHWELLNLPGAPESSLPHGLPPCAPDLQQEAEQLFLSSPAWLPLHGVEHSARKWQRKTDPWSLLAVLGAPVPSDLQAQRHPTTGQILGYKEVLLENTNLSATTSLSLRRPPGPASQSLWGNPTRYPFWPGGMDEPTITDLNTREEAEEEIDFEKDLLTIPPGFKKGMDFAPKDCPTPAPGLLSLSCLLEPLDLGGGDEDENEAVGQPGGPRGDTVSASPCSAPLARASSLEDLVLKEASTAVSTPEAPEPPSQEQWAIPVDATSPVGDFYRLIPQPAFQWAFEPDVFQKQAILHLERHDSVFVAAHTSAGKTVVAEYAIALAQKHMTRTIYTSPIKALSNQKFRDFRNTFGDVGLLTGDVQLHPEASCLIMTTEILRSMLYSGSDVIRDLEWVIFDEVHYINDVERGVVWEEVLIMLPDHVSIILLSATVPNALEFADWIGRLKRRQIYVISTVTRPVPLEHYLFTGNSSKTQGELFLLLDSRGAFHTKGYYAAVEAKKERMSKHAQTFGAKQPTHQGGPAQDRGVYLSLLASLRTRAQLPVVVFTFSRGRCDEQASGLTSLDLTTSSEKSEIHLFLQRCLARLRGSDRQLPQVLHMSELLNRGLGVHHSGILPILKEIVEMLFSRGLVKVLFATETFAMGVNMPARTVVFDSMRKHDGSTFRDLLPGEYVQMAGRAGRRGLDPTGTVILLCKGRVPEMADLHRMMMGKPSQLQSQFRLTYTMILNLLRVDALRVEDMMKRSFSEFPSRKDSKAHEQALAELTKRLGALEEPDMTGQLVDLPEYYSWGEELTETQHMIQRRIMESVNGLKSLSAGRVVVVKNQEHHNALGVILQVSSNSTSRVFTTLVLCDKPLSQDPQDRGPATAEVPYPDDLVGFKLFLPEGPCDHTVVKLQPGDMAAITTKVLRVNGEKILEDFSKRQQPKFKKDPPLAAVTTAVQELLRLAQAHPAGPPTLDPVNDLQLKDMSVVEGGLRARKLEELIQGAQCVHSPRFPAQPLSSAAPLLTGRHRDRPDGVALLQYPAPLPASDLPNSRHATASRACAFLTVRNPSLAAASLQLPIHASYHACLPKPLSALHRCAPLRRRSHPLPRIALAPRRPGPWSPYGWHHCHSHRSQLYRFGLPLSTSHTPST

SEQ ID NO: 759705 - protein, 94 aa, Homo sapiens
SGWGRGARGQQCVQCPPFFLQVLRTLGYVDEAGTVKLAGRVACAMSSHELLLTELMFDNALSTLRPEEIAALLSGLVCQSPGDAGDQLPNTLKQ

SEQ ID NO: 759706 - protein, 1328 aa, Homo sapiens
MMETERLVLPPPDPLDLPLRAVELGCTGHWELLNLPGAPESSLPHGLPPCAPDLQQEAEQLFLSSPAWLPLHGVEHSARKWQRKTDPWSLLAVLGAPVPSDLQAQRHPTTGQILGYKEVLLENTNLSATTSLSLRRPPGPASQSLWGNPTRYPFWPGGMDEPTITDLNTREEAEEEIDFEKDLLTIPPGFKKGMDFAPKDCPTPAPGLLSLSCLLEPLDLGGGDEDENEAVGQPGGPRGDTVSASPCSAPLARASSLEDLVLKEASTAVSTPEAPEPPSQEQWAIPVDATSPVGDFYRLIPQPAFQWAFEPDVFQKQAILHLERHDSVFVAAHTSAGKTVVAEYAIALAQKHMTRTIYTSPIKALSNQKFRDFRNTFGDVGLLTGDVQLHPEASCLIMTTEILRSMLYSGSDVIRDLEWVIFDEVHYINDVERGVVWEEVLIMLPDHVSIILLSATVPNALEFADWIGRLKRRQIYVISTVTRPVPLEHYLFTGNSSKTQGELFLLLDSRGAFHTKGYYAAVEAKKERMSKHAQTFGAKQPTHQGGPAQDRGVYLSLLASLRTRAQLPVVVFTFSRGRCDEQASGLTSLDLTTSSEKSEIHLFLQRCLARLRGSDRQLPQVLHMSELLNRGLGVHHSGILPILKEIVEMLFSRGLVKVLFATETFAMGVNMPARTVVFDSMRKHDGSTFRDLLPGEYVQMAGRAGRRGLDPTGTVILLCKGRVPEMADLHRMMMGKPSQLQSQFRLTYTMILNLLRVDALRVEDMMKRSFSEFPSRKDSKAHEQALAELTKRLGALEEPDMTGQLVDLPEYYSWGEELTETQHMIQRRIMESVNGLKSLSAGRVVVVKNQEHHNALGVILQVSSNSTSRVFTTLVLCDKPLSQDPQDRGPATAEVPYPDDLVGFKLFLPEGPCDHTVVKLQPGDMAAITTKVLRVNGEKILEDFSKRQQPKFKSEMLGRPFSSRGARRGREGQWSGSFLQPEGDHEVVVVVVRGLPQPKGDCEVEVVVRGLPQPEGGFWGREDLTPDLKICSLFRKDPPLAAVTTAVQELLRLAQAHPAGPPTLDPVNDLQLKDMSVVEGGLRARKLEELIQGAQCVHSPRFPAQYLKLRERMQIQKEMERLRFLLSDQSLLLLPEYHQRVEVLRTLGYVDEAGTVKLAGRVACAMSSHELLLTELMFDNALSTLRPEEIAALLSGLVCQSPGDAGDQLPNTLKQGIERVRAVAKRIGEVQVACGLNQTVEEFVGELNFGLVEVVYEWARGMPFSELAGLSGTPEGLVVRCIQRLAEMCRSLRGAARLVGEPVLGAKMETAATLLRRDIVFAASLYTQ

SEQ ID NO: 759707 - protein, 1183 aa, Homo sapiens
MMETERLVLPPPDPLDLPLRAVELGCTGHWELLNLPGAPESSLPHGLPPCAPDLQQEAEQLFLSSPAWLPLHGVEHSARKWQRKTDPWSLLAVLGAPVPSDLQAQRHPTTGQILGYKEVLLENTNLSATTSLSLRRPPGPASQSLWGNPTRYPFWPGGMDEPTITDLNTREEAEEEIDFEKDLLTIPPGFKKGMDFAPKDCPTPAPGLLSLSCLLEPLDLGGGDEDENEAVGQPGGPRGDTVSASPCSAPLARASSLEDLVLKEASTAVSTPEAPEPPSQEQWAIPVDATSPVGDFYRLIPQPAFQWAFEPDVFQKQAILHLERHDSVFVAAHTSAGKTVVAEYAIALAQKHMTRTIYTSPIKALSNQKFRDFRNTFGDVGLLTGDVQLHPEASCLIMTTEILRSMLYSGSDVIRDLEWVIFDEVHYINDVERGVVWEEVLIMLPDHVSIILLSATVPNALEFADWIGRLKRRQIYVISTVTRPVPLEHYLFTGNSSKTQGELFLLLDSRGAFHTKGYYAAVEAKKERMSKHAQTFGAKQPTHQGGPAQDRGVYLSLLASLRTRAQLPVVVFTFSRGRCDEQASGLTSLDLTTSSEKSEIHLFLQRCLARLRGSDRQLPQVLHMSELLNRGLGVHHSGILPILKEIVEMLFSRGLVKVLFATETFAMGVNMPARTVVFDSMRKHDGSTFRDLLPGEYVQMAGRAGRRGLDPTGTVILLCKGRVPEMADLHRMMMGKPSQLQSQFRLTYTMILNLLRVDALRVEDMMKRSFSEFPSRKDSKAHEQALAELTKRLGALEEPDMTGQLVDLPEYYSWGEELTETQHMIQRRIMESVNGLKSLSAGRVVVVKNQEHHNALGVILQVSSNSTSRVFTTLVLCDKPLSQDPQDRGPATAEVPYPDDLVGFKLFLPEGPCDHTVVKLQPGDMAAITTKVLRVNGEKILEDFSKRQQPKFKKDPPLAAVTTAVQELLRLAQAHPAGPPTLDPVNDLQLKDMSVVEGGLRARKLEELIQGAQCVHSPRFPAQYLKLRERMQIQKEMERLRFLLSDQSLLLLPEYHQRVEVLRTLGYVDEAGTVKLAGRVACAMSSHELLLTELMFDNALSTLRPEEIAALLSGLVCQSPGDAGDQLPNTLKQGIERVRAVAKRIGEVQVACGLNQTVEEFVGELNFGLVEVVYEWARGMVST

SEQ ID NO: 759708 - protein, 169 aa, Homo sapiens
RRLTGGSLQYLKLRERMQIQKEMERLRFLLSDQSLLLLPEYHQRVEVLRTLGYVDEAGTVKLAGRVACAMSSHELLLTELMFDNALSTLRPEEIAALLSGLVCQSPGDAGDQLPNTLKQGIERVRAVAKRIGEVQVACGLNQTVEEFVGELNFGLVEVVYEWARGMVST

SEQ ID NO: 759709 - protein, 520 aa, Homo sapiens
MPGSLPLNAEACWPKDVGIVALEIYFPSQYVDQAELEKYDGVDAGKYTIGLGQAKMGFCTDREDINSLCMTVVQNLMERNNLSYDCIGRLEVGTETIIDKSKSVKTNLMQLFEESGNTDIEGIDTTNACYGGTAAVFNAVNWIESSSWDGRYALVVAGDIAVYATGNARPTGGVGAVALLIGPNAPLIFERGLRGTHMQHAYDFYKPDMLSEYPIVDGKLSIQCYLSALDRCYSVYCKKIHAQWQKEGNDKDFTLNDFGFMIFHSPYCKLVQKSLARMLLNDFLNDQNRDKNSIYSGLEAFGDVKLEDTYFDRDVEKAFMKASSELFSQKTKASLLVSNQNGNMYTSSVYGSLASVLAQYSPQQLAGKRIGVFSYGSGLAATLYSLKVTQDATPGSALDKITASLCDLKSRLDSRTGVAPDVFAENMKLREDTHHLVNYIPQGSIDSLFEGTWYLVRVDEKHRRTYARRPTPNDDTLDEGVGLVHSNIATEHIPSPAKKVPRLPATAAEPEAAVISNGEH

SEQ ID NO: 759710 - protein, 520 aa, Homo sapiens; identical to SEQ ID NO: 759709

SEQ ID NO: 759711 - protein, 520 aa, Homo sapiens; identical to SEQ ID NO: 759709

SEQ ID NO: 759712 - protein, 359 aa, Homo sapiens [sequence omitted]

SEQ ID NO: 759713 - protein, 140 aa, Homo sapiens
  misc_feature (8)..(8): Xaa can be any naturally occurring amino acid
WLVRSAVXIRMLQPRSALDKITASLCDLKSRLDSRTGVAPDVFAENMKLREDTHHLVNYIPQGSIDSLFEGTWYLVRVDEKHRRTYARRPTPNDDTLDEGVGLVHSNIATEHIPSPAKKVPRLPATAAEPEAAVISNGEH

SEQ ID NO: 759714 - protein, 528 aa, Homo sapiens
MPGSLPLNAEACWPKDVGIVALEIYFPSQYVDQAELEKYDGVDAGKYTIGLGQAKMGFCTDREDINSLCMTVVQNLMERNNLSYDCIGRLEVGTETIIDKSKSVKTNLMQLFEESGNTDIEGIDTTNACYGGTAAVFNAVNWIESSSWDGRYALVVAGDIAVYATGNARPTGGVGAVALLIGPNAPLIFERGLRGTHMQHAYDFYKPDMLSEYPIVDGKLSIQCYLSALDRCYSVYCKKIHAQWQKEGNDKDFTLNDFGFMIFHSPYCKLVQKSLARMLLNDFLNDQNRDKNSIYSGLEAFGDVKLEDTYFDRDVEKAFMKASSELFSQKTKASLLVSNQNGNMYTSSVYGSLASVLAQYSPQQLAGKRIGVFSYGSGLAATLYSLKVTQDATPGSALDKITASLCDLKSRLDSRTGVAPDVFAENMKLREDTHHLVNYIPQGSIDSLFEGTWYLVRVDEKHRRTYARRPTPNDDTLDEGVGLVHSNIATEHIPSPAKKVPRLPATVNILGLASHIWSLSHILLTFLR

SEQ ID NO: 759715 - protein, 445 aa, Homo sapiens [sequence omitted]

SEQ ID NO: 759716 - protein, 359 aa, Homo sapiens [sequence omitted]

SEQ ID NO: 759717 - protein, 520 aa, Homo sapiens; identical to SEQ ID NO: 759709

SEQ ID NO: 759718 - protein, 570 aa, Homo sapiens
PSRLPATLGGAGVGWVGGYKAGGEGEAPRTVLSWLTPFPLLPLGHACSFTMPGSLPLNAEACWPKDVGIVALEIYFPSQYVDQAELEKYDGVDAGKYTIGLGQAKMGFCTDREDINSLCMTVVQNLMERNNLSYDCIGRLEVGTETIIDKSKSVKTNLMQLFEESGNTDIEGIDTTNACYGGTAAVFNAVNWIESSSWDGRYALVVAGDIAVYATGNARPTGGVGAVALLIGPNAPLIFERGLRGTHMQHAYDFYKPDMLSEYPIVDGKLSIQCYLSALDRCYSVYCKKIHAQWQKEGNDKDFTLNDFGFMIFHSPYCKLVQKSLARMLLNDFLNDQNRDKNSIYSGLEAFGDVKLEDTYFDRDVEKAFMKASSELFSQKTKASLLVSNQNGNMYTSSVYGSLASVLAQYSPQQLAGKRIGVFSYGSGLAATLYSLKVTQDATPGSALDKITASLCDLKSRLDSRTGVAPDVFAENMKLREDTHHLVNYIPQGSIDSLFEGTWYLVRVDEKHRRTYARRPTPNDDTLDEGVGLVHSNIATEHIPSPAKKVPRLPATAAEPEAAVISNGEH

SEQ ID NO: 759719 - protein, 545 aa, Homo sapiens
VTRGSTHASVLCCRSVTLALSPSFTMPGSLPLNAEACWPKDVGIVALEIYFPSQYVDQAELEKYDGVDAGKYTIGLGQAKMGFCTDREDINSLCMTVVQNLMERNNLSYDCIGRLEVGTETIIDKSKSVKTNLMQLFEESGNTDIEGIDTTNACYGGTAAVFNAVNWIESSSWDGRYALVVAGDIAVYATGNARPTGGVGAVALLIGPNAPLIFERGLRGTHMQHAYDFYKPDMLSEYPIVDGKLSIQCYLSALDRCYSVYCKKIHAQWQKEGNDKDFTLNDFGFMIFHSPYCKLVQKSLARMLLNDFLNDQNRDKNSIYSGLEAFGDVKLEDTYFDRDVEKAFMKASSELFSQKTKASLLVSNQNGNMYTSSVYGSLASVLAQYSPQQLAGKRIGVFSYGSGLAATLYSLKVTQDATPGSALDKITASLCDLKSRLDSRTGVAPDVFAENMKLREDTHHLVNYIPQGSIDSLFEGTWYLVRVDEKHRRTYARRPTPNDDTLDEGVGLVHSNIATEHIPSPAKKVPRLPATAAEPEAAVISNGEH

SEQ ID NO: 759720 - protein, 502 aa, Homo sapiens
MPGSLPLNAEACWPKDVGIVALEIYFPSQYVDQAELEMGFCTDREDINSLCMTVVQNLMERNNLSYDCIGRLEVGTETIIDKSKSVKTNLMQLFEESGNTDIEGIDTTNACYGGTAAVFNAVNWIESSSWDGRYALVVAGDIAVYATGNARPTGGVGAVALLIGPNAPLIFERGLRGTHMQHAYDFYKPDMLSEYPIVDGKLSIQCYLSALDRCYSVYCKKIHAQWQKEGNDKDFTLNDFGFMIFHSPYCKLVQKSLARMLLNDFLNDQNRDKNSIYSGLEAFGDVKLEDTYFDRDVEKAFMKASSELFSQKTKASLLVSNQNGNMYTSSVYGSLASVLAQYSPQQLAGKRIGVFSYGSGLAATLYSLKVTQDATPGSALDKITASLCDLKSRLDSRTGVAPDVFAENMKLREDTHHLVNYIPQGSIDSLFEGTWYLVRVDEKHRRTYARRPTPNDDTLDEGVGLVHSNIATEHIPSPAKKVPRLPATAAEPEAAVISNGEH

SEQ ID NO: 759721 - protein, 214 aa, Homo sapiens
PSRLPATLGGAGVGWVGGYKAGGEGEAPRTVLSWLTPFPLLPLGHACSFTMPGSLPLNAEACWPKDVGIVALEIYFPSQYVDQAELEKYDGVDAGKYTIGLGQAKMGFCTDREDINSLCMTVVQNLMERNNLSYDCIGRLEVGTETIIDKSKSVKTNLMQLFEESGNTDIEGIDTTNACYGGTAAVFNAVNWIESSSWDGMLHAYSPPSPKIFF

SEQ ID NO: 759722 - protein, 520 aa, Homo sapiens; identical to SEQ ID NO: 759709

SEQ ID NO: 759723 - protein, 501 aa, Homo sapiens [sequence omitted]

SEQ ID NO: 759724 - protein, 397 aa, Homo sapiens
MPGSLPLNAEACWPKDVGIVALEIYFPSQYVDQAELEKYDGVDAGKYTIGLGQAKMGFCTDREDINSLCMTVVQNLMERNNLSYDCIGRLEVGTETIIDKSKSVKTNLMQLFEESGNTDIEGIDTTNACYGGTAAVFNAVNWIESSSWDGRYALVVAGDIAVYATGNARPTGGVGAVALLIGPNAPLIFERGLRGTHMQHAYDFYKPDMLSEYPIVDGKLSIQCYLSALDRCYSVYCKKIHAQWQKEGNDKDFTLNDFGFMIFHSPYCKLVQKSLARMLLNDFLNDQNRDKNSIYSGLEAFGDVKLEDTYFDRDVEKAFMKASSELFSQKTKASLLVSNQNGNMYTSSVYGSLASVLAQYSPQQLAGKRIGVFSYGSGLAATLYSLKVTQDATPGKC

SEQ ID NO: 759725 - protein, 178 aa, Homo sapiens
MPGSLPLNAEACWPKDVGIVALEIYFPSQYVDQAELEKYDGVDAGKYTIGLGQAKMGFCTDREDINSLCMTVVQNLMERNNLSYDCIGRLEVGTETIIDKSKSVKTNLMQLFEESGNTDIEGIDTTNACYGGTAAVFNAVNWIESSSWDGRYALVVAGLLNTIIRTTLEAPSKNTSWV

SEQ ID NO: 759726 - protein, 179 aa, Homo sapiens
TFFGNVNESAVVRHDLHFHFTARYIRIVPLAWNPRGKIGLRLGLYGCPYKADILYFDGDDAISYRFPRGVSRSLWDVFAFSFKTEEKDGLLLHAEGAQGDYVTLELEGAHLLLHMSLGSSPIQPRPGHTTVSAGGVLNDQHWHYVRVDRFGRDVNFTLDGYVQRFILNGDFERLNLDTE

SEQ ID NO: 759727 - protein, 122 aa, Homo sapiens
PPRLMCSSRCAPSSRSLWDVFAFSFKTEEKDGLLLHAEGAQGDYVTLELEGAHLLLHMSLGSSPIQPRPGHTTVSAGGVLNDQHWHYVRVDRFGRDVNFTLDGYVQRFILNGDFERLNLDTE

SEQ ID NO: 759728 - protein, 760 aa, Homo sapiens
ANTAFLSMETFEPISQEPLSQASYDKAPDPVPELQDSFYAELQRAESLQEKSIKEAKTKCRTIASLLTAAPNPHSKGVLMFKKRRQRAKKYTLVSFGAAAGTGAEEEDGVPPTSESELDEEAFSDARSLTNQSDWDSPYLDMELARAGSRASEGQGSGLGGQLSEVSGRGVQLFEQQRQRADSSTQELARVEPAAMLNGEGLQSPPRAQSAPPEAAVLPPSPLPAPVASPRPFQPGGGAPTPAPSIFNRSARPFTPGLQGQRPTTTSVIFRPLAPKRANDSLGGLSPAPPPFLSSQGPTPLPSFTSGVPSHAPVSGSPSTPRSSGPVTATSSLYIPAPSRPVTPGGAPEPPAPPSAAAMTSTASIFLSAPLRPSARPEAPAPGPGAPEPPSAREQRISVPAARTGILQEARRRGTRKQMFRPGKEETKNSPNPELLSLVQNLDEKPRAGGAESGPEEDALSLGAEACNFMQPVGARSYKTLPHVTPKTPPPMAPKTPPPMTPKTPPPVAPKPPSRGLLDGLVNGAASSAGTPEPPRLQGRGGELFAKRQSRADRYVVEGTPGPGLGPRPRSPSPTPSLPPSWKYSPNIRAPPPIAYNPLLSPFFPQAARTLPKAQSQGPRATPKQGIKALDFMRHQPYQLKTAMFCFDEVPPTPGPIASGSPKTARVQEIRRFSTPAPQPTAEPLAPTVLAPRAATTLDEPIWRTELASAPVPSPAPPPEAPRGLGASPSSCGFQVARPRFSATRTGLQAHVWRPGAGHQ

SEQ ID NO: 759729 - protein, 860 aa, Homo sapiens
MEILWKTLTWILSLIMASSEFHSDHRLSYSSQEEFLTYLEHYQLTIPIRVDQNGAFLSFTVKNDKHSRRRRSMDPIDPQQAVSKLFFKLSAYGKHFHLNLTLNTDFVSKHFTVEYWGKDGPQWKHDFLDNCHYTGYLQDQRSTTKVALSNCVGLHGVIATEDEEYFIEPLKNTTEDSKHFSYENGHPHVIYKKSALQQRHLYDHSHCGVSDFTRSGKPWWLNDTSTVSYSLPINNTHIHHRQKRSVSIERFVETLVVADKMMVGYHGRKDIEHYILSVMNIVAKLYRDSSLGNVVNIIVARLIVLTEDQPNLEINHHADKSLDSFCKWQKSILSHQSDGNTIPENGIAHHDNAVLITRYDICTYKNKPCGTLGLASVAGMCEPERSCSINEDIGLGSAFTIAHEIVHNFGMNHDGIGNSCGRKVMKQQNYGSSHYCEYQSFFLVCLQSRLHHQLFREVCRELWCLSKSNRCVTNSIPAAEGTLCQTGNIEKGWCYQGDCVPFGTWPQSIDGGWGPWSLWGECSRTCGGGVSSSLRHCDSPAPSGGGKYCLGERKRYRSCNTDPCPLGSRDFREKQCADFDNMPFRGKYYNWKPYTGGGVKPCALNCLAEGYNFYTERAPAVIDGTQCNADSLDICINGECKHVGCDNILGSDAREDRCRVCGGGGSTCDAIEGFFNDSLPRGGYMEVVQIPRGSVHIEVREVAMSKNYIALKSEGDDYYINGAWTIDWPRKFDVAGTAFHYKRPTDEPESLEALGPTSENLIVMVLLQEQNLGIRYKFNVPITRTGSGDNEVGFTWNHQPWSECSATCAGGKMPTRQPTQRARWRTKHILSYALCLLKKLIGNISCRFASSCNLAKETLL

SEQ ID NO: 759730 - protein, 571 aa, Homo sapiens
LEDPPTGRLYSWILSLIMASSEFHSDHRLSYSSQEEFLTYLEHYQLTIPIRVDQNGAFLSFTVKNDKHSRRRRSMDPIDPQQAVSKLFFKLSAYGKHFHLNLTLNTDFVSKHFTVEYWGKDGPQWKHDFLDNCHYTGYLQDQRSTTKVALSNCVGLHGVIATEDEEYFIEPLKNTTEDSKHFSYENGHPHVIYKKSALQQRHLYDHSHCGVSDFTRSGKPWWLNDTSTVSYSLPINNTHIHHRQKRSVSIERFVETLVVADKMMVGYHGRKDIEHYILSVMNIVAKLYRDSSLGNVVNIIVARLIVLTEDQPNLEINHHADKSLDSFCKWQKSILSHQSDGNTIPENGIAHHDNAVLITRYDICTYKNKPCGTLGLASVAGMCEPERSCSINEDIGLGSAFTIAHEIVHNFGMNHDGIGNSCGRKVMKQQNYGSSHYCEYQSFFLVCLQSRLHHQLFREVCRELWCLSKSNRCVTNSIPAAEGTLCQTGNIEKGWCYQGDCVPFGTWPQSIDGGWGPWSLWGECSRTCGGGVSSSLRHCDSPAPSGGGKYCLGERKRYRSCNTDQIIRRYS

SEQ ID NO: 759731 - protein, 218 aa, Homo sapiens
LDQEVQLASPLRHMNRITCSLITVGLCRSKTIIKSNHLMSGTISVRTERQTRSLMTPLLFPPPQLNLHSSSTLFQEQQKMNMSQASVSFQDVTVEFTREEWQHLGPVERTLYRDVMLENYSHLISVGYCITKPKVISKLEKGEEPWSLEDEFLNQRYPGYFKVDHIKGIREKQEKLLWQEIFISDADKTLSKEGQKVLEKPFNLEIAPELSEKISCKC

SEQ ID NO: 759732 - protein, 145 aa, Homo sapiens
KEFLRLKIQYRSDLELHSITMKKSGVLFLLGIILLVLIGVQGTPVVRKGRCSCISTNQGTIHLQSLKDLKQFAPSPSCEKIEIIATLKNGVQTCLNPDSADVKELIKKWEKQVSQKKKQKNGKKHQKKKVLKVRKSQRSRQKKTT

SEQ ID NO: 759733 - protein, 145 aa, Homo sapiens; identical to SEQ ID NO: 759732

SEQ ID NO: 759734 - protein, 145 aa, Homo sapiens; identical to SEQ ID NO: 759732

SEQ ID NO: 759735 - protein, 145 aa, Homo sapiens; identical to SEQ ID NO: 759732

SEQ ID NO: 759736 - protein, 145 aa, Homo sapiens; identical to SEQ ID NO: 759732

SEQ ID NO: 759737 - protein, 160 aa, Homo sapiens
AVSTATLRSRLGAPSSARAASRAGSRCVPFGWSAEEGRQLVRHSEATTGLPLPSPVCSLTQPPQQTTPRPGARVCGPLYRTWFWLWAPGPVAARGRREGRMRATGVRLACGTLLPQWSEEVRKRRSCLHGCGDNWAILTGLSTLPFFDRPVHTHQLLPRK

SEQ ID NO: 759738 - protein, 207 aa, Homo sapiens
MSPLLRRLLLAALLQLAPAQAPVSQPDAPGHQRKVVSWIDVYTRATCQPREVVVPLTVELMGTVAKQLVPSCVTVQRCGGCCPDDGLECVPTGQHQVRMQILMIRYPSSQLGEMSLEEHSQCECRPKKKDSAVKPDRAATPHHRPQPRSVPGWDSAPGAPSPADITHPTPAPGPSAHAAPSTTSALTPGPAAAAADAAASSVAKGGA

SEQ ID NO: 759739 - protein, 147 aa, Homo sapiens
MGTVAKQLVPSCVTVQRCGGCCPDDGLECVPTGQHQVRMQILMIRYPSSQLGEMSLEEHSQCECRPKKKDSAVKPDRAATPHHRPQPRSVPGWDSAPGAPSPADITHPTPAPGPSAHAAPSTTSALTPGPAAAAADAAASSVAKGGA

SEQ ID NO: 759740 - protein, 167 aa, Homo sapiens
PPMDVTWQQAPKSSLVECFVCLCPSCQPREVVVPLTVELMGTVAKQLVPSCVTVQRCGGCCPDDGLECVPTGQHQVRMQILMIRYPSSQLGEMSLEEHSQCECRPKKKDSAVKPDSPRPLCPRCTQHHQRPDPRTCRCRCRRRSFLRCQGRGLELNPDTCRCRKLRR

SEQ ID NO: 759741 - protein, 207 aa, Homo sapiens; identical to SEQ ID NO: 759738

SEQ ID NO: 759742 - protein, 77 aa, Homo sapiens
QHRLVQAGCELVSWIDVYTRATCQPREVVVPLTVELMGTVAKQLVPSCVTVQRCGGCCPDDGLECVPTGQHQVRMQT

SEQ ID NO: 759743 - protein, 207 aa, Homo sapiens; identical to SEQ ID NO: 759738

SEQ ID NO: 759744 - protein, 188 aa, Homo sapiens
MSPLLRRLLLAALLQLAPAQAPVSQPDAPGHQRKVVSWIDVYTRATCQPREVVVPLTVELMGTVAKQLVPSCVTVQRCGGCCPDDGLECVPTGQHQVRMQILMIRYPSSQLGEMSLEEHSQCECRPKKKDSAVKPDSPRPLCPRCTQHHQRPDPRTCRCRCRRRSFLRCQGRGLELNPDTCRCRKLRR

SEQ ID NO: 759745 - protein, 207 aa, Homo sapiens; identical to SEQ ID NO: 759738

SEQ ID NO: 759746 - protein, 207 aa, Homo sapiens; identical to SEQ ID NO: 759738

SEQ ID NO: 759747 - protein, 207 aa, Homo sapiens; identical to SEQ ID NO: 759738

SEQ ID NO: 759748 - protein, 179 aa, Homo sapiens
MGSWHWEWYGAPTSTLSLGCLLLPGEKWTFLILPSHYGTTTHAHSLQGCVERQWQDSKQLAISPGPTLLRSEYVGSLSPVCSSLTQVHRVPWGQHRACPVMLLVFTKWLQRYLHFEKPAEPASVGQDPDFFGKSEGERATCLLSRSCLYLASVCNLRENDSCMGRSGGTGKSDLPGSCR

SEQ ID NO: 759749 - protein, 164 aa, Homo sapiens
MATNFLAHEKIWFDKFKYDDAERRFYEQMNGPVAGASRQENGASVILRDIARARENIQKSLAGSSGPGASSGTSGDHGELVVRIASLEVENQSLRGVVQELQQAISKLEARLNVLEKSSPGHRATAPQTQHVSPMRQVEPPAKKPATPAEDDEDDDIDLFGSDN

SEQ ID NO: 759750 - protein, 248 aa, Homo sapiens
PAPARWPPRASLGSCRLPDPSPPATPLAAKRRGGARAAARSQHLCRLLRGRAASAVISNGILPLKCRGTARRGSWRPGGACARVASPPRAPGPWLLVEPSASFPVRGPGGPPFHHPFISLPASADSSSLVAASLAGVRKMATNFLAHEKIWFDKFKYDDAERRFYEQMNGPVAGASRQENGASVILRDIARARENIQKSLAGSSGPGASSGTSGHVSPMRQVEPPAKKPATPAEDDEDDDIDLFGSDN

SEQ ID NO: 759751 - protein, 102 aa, Homo sapiens
  misc_feature (12)..(12): Xaa can be any naturally occurring amino acid
SGPYYYYIRGRXVGIDDDGTMGSSLEGLVCALFQAGTGLVWGGLPKLAARGLPGIRKSYRFSVWVEDDKVGTDLLEEEITKFEEHSLRSHVQSVDIAAFNKI

SEQ ID NO: 759752 - protein, 183 aa, Homo sapiens
RLVEAGGVSWSRVLAGVRKMATNFLAHEKIWFDKFKYDDAERRFYEQMNGPVAGASRQENGASVILRDIARARENIQKSLAGSSGPGASSGTSGDHGELVVRIASLEVENQSLRGVVQELQQAISKLEARLNVLEKSSPGHRATAPQTQHVSPMRQVEPPAKKPATPAEDDEDDDIDLFGSDN

SEQ ID NO: 759753 - protein, 146 aa, Homo sapiens
DAWVDPRVRLQLTDGGQGGGTAAGGSGYGKIRGETKGQESLQPGGQVLHPCVDVKALGIDDDGTMGSSLEGLVCALFQAGTGLVWGGLPKLAARGLPGIRKSYRFSVWVEDDKVGTDLLEEEITKFEEHSLRSHVQSVDIAAFNKI

SEQ ID NO: 759754 - protein, 149 aa, Homo sapiens
MRDAPLGQRTVQLTDGGQGGGTAAGGSGYGKIRGETKGQESLQPGGQVLHPCVDVKALGIDDDGTMGSSLEGLVCALFQAGTGLVWGGLPKLAARGLPGIRKSYRFSVWVEDDKVGTDLLEEEITKFEEHSLRSHVRWPNTCVAQRAEL

SEQ ID NO: 759755 - protein, 114 aa, Homo sapiens
MSPPWSRVLAGVRKMATNFLAHEKIWFDKFKYDDAERRFYWGLMTTGPWAQAWRALCALYSKLEPGWSGGGFPSWLPVGYRVSGKATDSVCWWRTTRWGQTCWRRRSPSLRSTV

SEQ ID NO: 759756 - protein, 189 aa, Homo sapiens
  misc_feature (3)..(3): Xaa can be any naturally occurring amino acid
PAXKYLRLGSEAGWRVAASLAGVRKMATNFLAHEKIWFDKFKYDDAERRFYEQMNGPVAGASRQENGASVILRDIARARENIQKSLAGSSGPGASSGTSGDHGELVVRIASLEVENQSLRGVVQELQQAISKLEARLNVLEKSSPGHRATAPQTQHVSPMRQVEPPAKKPATPAEDDEDDDIDLFGSDN

SEQ ID NO: 759757 - protein, 163 aa, Homo sapiens
WLGRGWGVDSSSLVAASLAGVRKMATNFLAHEKIWFDKFKYDDAERRFYEQMNGPVAGASRQSSGPGASSGTSGDHGELVVRIASLEVENQSLRGVVQELQQAISKLEARLNVLEKSSPGHRATAPQTQHVSPMRQVEPPAKKPATPAEDDEDDDIDLFGSDN

SEQ ID NO: 759758 - protein, 140 aa, Homo sapiens
MATNFLAHEKIWFDKFKYDDAERRFYEQMNGPVAGASRQSSGPGASSGTSGDHGELVVRIASLEVENQSLRGVVQELQQAISKLEARLNVLEKSSPGHRATAPQTQHVSPMRQVEPPAKKPATPAEDDEDDDIDLFGSDN

SEQ ID NO: 759759 - protein, 173 aa, Homo sapiens
SCKAESHHSLRRVREKEKICLYGTEAHCKILLFSYRYVEFFFFHFSFTLISTGQFHISILHCLFLTILEVLLKGSVQFKHLAERKLTGGQDHVTQNRLIRRVLRGVVQELQQAISKLEARLNVLEKSSPGHRATAPQTQHVSPMRQVEPPAKKPATPAEDDEDDDIDLFGSDN

SEQ ID NO: 759760 - protein, 135 aa, Homo sapiens
MHYYEVVAGASRQENGASVILRDIARARENIQKSLAGSSGPGASSGTSGDHGELVVRIASLEVENQSLRGVVQELQQAISKLEARLNVLEKSSPGHRATAPQTQHVSPMRQVEPPAKKPATPLEACHNRDPLDSQ

SEQ ID NO: 759761 - protein, 585 aa, Homo sapiens
MRSGKASCTLETVWEDKHKYEEAERRFYEHEATQAAASAQQLPAEGPAMNGPGQDDPEDADEAEAPDGGSRRDPRKSQDSRKPLQKKRKRSPKSGLGPADLALLGLSAERVWLDKSLFDQAESSYRQKLADVAAQAAWPPALAPWGLCTHGNQVACHHVTWGIWVNKSSFDQAERAFVEWSQALLLAPEGSRRQGTPNTGQQVAVPDLAHQPSPPVNGQPPLGSLQALVREVWLEKPRYDAAERGFYEALFDGHPPGKVRLQERAGLAEGARRGRRDRRGRNILGNKRAGLRRADGEAPSALPYCYFLQKDAEAPWLSKPAYDSAECRHHAAEALRVAWCLEAASLSHRPGPRSGLSVSSLRPKYGETCWVGTQPGLWAQGQPSQAGAPPASSPAHLGWGLPETRGPSRVECRSRLSKGRKMATNFLAHEKIWFDKFKYDDAERRFYEQMNGPVAGASRQENGASVILRDIARARENIQKSLAGSSGPGASSGTSGDHGELVVRIASLEVENQSLRGVVQELQQAISKLEARLNVLEKSSPGHRATAPQTQHVSPMRQVEPPAKKPATPAEDDEDDDIDLFGSDN

SEQ ID NO: 759762 - protein, 164 aa, Homo sapiens; identical to SEQ ID NO: 759749

SEQ ID NO: 759763 - protein, 585 aa, Homo sapiens; identical to SEQ ID NO: 759761

SEQ ID NO: 759764 - protein, 585 aa, Homo sapiens; identical to SEQ ID NO: 759761

SEQ ID NO: 759765 - protein, 140 aa, Homo sapiens; identical to SEQ ID NO: 759758

SEQ ID NO: 759766 - protein, 585 aa, Homo sapiens; identical to SEQ ID NO: 759761

SEQ ID NO: 759767 - protein, 585 aa, Homo sapiens; identical to SEQ ID NO: 759761

SEQ ID NO: 759768 - protein, 585 aa, Homo sapiens; identical to SEQ ID NO: 759761

SEQ ID NO: 759769 - protein, 585 aa, Homo sapiens; identical to SEQ ID NO: 759761

SEQ ID NO: 759770 - protein, 585 aa, Homo sapiens; identical to SEQ ID NO: 759761

SEQ ID NO: 759771 - protein, 585 aa, Homo sapiens; identical to SEQ ID NO: 759761

SEQ ID NO: 759772 - protein, 585 aa, Homo sapiens; identical to SEQ ID NO: 759761

SEQ ID NO: 759773 - protein, 585 aa, Homo sapiens; identical to SEQ ID NO: 759761

SEQ ID NO: 759774 - protein, 585 aa, Homo sapiens; identical to SEQ ID NO: 759761

SEQ ID NO: 759775 - protein, 585 aa, Homo sapiens; identical to SEQ ID NO: 759761

SEQ ID NO: 759776 - protein, 585 aa, Homo sapiens; identical to SEQ ID NO: 759761

SEQ ID NO: 759777 - protein, 585 aa, Homo sapiens; identical to SEQ ID NO: 759761

SEQ ID NO: 759778 - protein, 364 aa, Homo sapiens [sequence omitted]

SEQ ID NO: 759779 - protein, 724 aa, Homo sapiens
  misc_feature (563)..(563): Xaa can be any naturally occurring amino acid
  misc_feature (592)..(592): Xaa can be any naturally occurring amino acid
MRSGKASCTLETVWEDKHKYEEAERRFYEHEATQAAASAQQLPAEGPAMNGPGQDDPEDADEAEAPDGGSRRDPRKSQDSRKPLQKKRKRSPKSGLGPADLALLGLSAERVWLDKSLFDQAESSYRQKLADVAAQAAWPPALAPWGLCTHGNQVACHHVTWGIWVNKSSFDQAERAFVEWSQALLLAPEGSRRQGTPNTGQQVAVPDLAHQPSPPVNGQPPLGSLQALVREVWLEKPRYDAAERGFYEALFDGHPPGKVRLQERAGLAEGARRGRRDRRGRNILGNKRAGLRRADGEAPSALPYCYFLQKDAEAPWLSKPAYDSAECRHHAAEALRVAWCLEAASLSHRPGPRSGLSVSSLRPKYGETCWVGTQPGLWAQGQPSQAGAPPASSPAHLGWGLPETRGPSRVECRSRLSKGRKMATNFLAHEKIWFDKFKYDDAERRFYEQMNGPVAGASRQENGASVILRDIARARENIQKSLAGSSGPGASSGTSGDHGELVVRIASLEVENQSLRGVVQELQQAISKLEARLNVLEKSSPGHRATAPQTQHVSPMRQMATNXLAHEKIWFDKFKYDDAERRFYEQMNGPVXGQLTDGGQGGGTAAGGSGYGKIRGETKGQESLQPGGQVLHPCVDVKALGIDDDGTMGSSLEGLVCALFQAGTGLVWGGLPKLAARGLPGIRKSYRFSVWVEDDKVGTDLLEEEITKFEEHVQSVDIAAFNKI

SEQ ID NO: 759780 - protein, 585 aa, Homo sapiens; identical to SEQ ID NO: 759761

SEQ ID NO: 759781 - protein, 585 aa, Homo sapiens; identical to SEQ ID NO: 759761

SEQ ID NO: 759782 - protein, 585 aa, Homo sapiens; identical to SEQ ID NO: 759761

SEQ ID NO: 759783 - protein, 585 aa, Homo sapiens; identical to SEQ ID NO: 759761

SEQ ID NO: 759784 - protein, 585 aa, Homo sapiens; identical to SEQ ID NO: 759761

SEQ ID NO: 759785 - protein, 140 aa, Homo sapiens; identical to SEQ ID NO: 759758

SEQ ID NO: 759786 - protein, 113 aa, Homo sapiens
LCSDPPLCSDESLQPGGQVLHPCVDVKALGIDDDGTMGSSLEGLVCALFQAGTGLVWGGLPKLAARGLPGIRKSYRFSVLVEDDKVGTDLLEEEITKFEEHVQSVDIAAFNKI

SEQ ID NO: 759787 - protein, 109 aa, Homo sapiens
MATNFLAHEKIWFDKFKYDDAERRFYEQMNGPVAGASRQENGASVILRDIARARENIQKSLAGSSGPGASSGTSGHVSPMRQVEPPAKKPATPAEDDEDDDIDLFGSDN

SEQ ID NO: 759788 - protein, 140 aa, Homo sapiens; identical to SEQ ID NO: 759758

SEQ ID NO: 759789 - protein, 585 aa, Homo sapiens; identical to SEQ ID NO: 759761

SEQ ID NO: 759790 - protein, 600 aa, Homo sapiens
MRSGKASCTLETVWEDKHKYEEAERRFYEHEATQAAASAQQLPAEGPAMNGPGQDDPEDADEAEAPDGGSRRDPRKSQDSRKPLQKKRKRSPKSGLGPADLALLGLSAERVWLDKSLFDQAESSYRQKLADVAAQAAWPPALAPWGLCTHGNQVACHHVTWGIWVNKSSFDQAERAFVEWSQALLLAPEGSRRQGTPNTGQQVAVPDLAHQPSPPVNGQPPLGSLQALVREVWLEKPRYDAAERGFYEALFDGHPPGKVRLQERAGLAEGARRGRRDRRGRNILGNKRAGLRRADGEAPSALPYCYFLQKDAEAPWLSKPAYDSAECRHHAAEALRVAWCLEAASLSHRPGPRSGLSVSSLRPKYGETCWVGTQPGLWAQGQPSQAGAPPASSPAHLGWGLPETRGPSRVECRSRLSKGRKMATNFLAHEKIWFDKFKYDDAERRFYEQMNGPVAGASRQENGASVILRDIARARENIQKSLAGSSGPGASSGTSGDHGELVVRIASLEVENQSLRGVVQELQQAISKLEARLNVLEKSSPGHRATAPQTQTTDGRRTRRRHSCGRERLRPDTRSNEGPRKPATWWPSPPSLRGCQSLGD

SEQ ID NO: 759791 - protein, 364 aa, Homo sapiens [sequence omitted]

SEQ ID NO: 759792 - protein, 130 aa, Homo sapiens
GSTGCHLPEPFHQSSRVRRFLLLGRRVLGWRVSTAAPAGRSRARQRRPRGREGGRPGLRQKLAPLGTEAQVRQRGLRGRGPSAALGASAERRGDGGHVAGLEGVRGTGAPGALSHGASRSWKPLGQAAGA

SEQ ID NO: 759793 - protein, 130 aa, Homo sapiens; identical to SEQ ID NO: 759792

SEQ ID NO: 759794 - protein, 108 aa, Homo sapiens
MPAKNSMFHLEASECSARGAFPKVLPAWVERRQLSTPRGALEPALVLLGKDVRRGAKTHSHWCEGSALDRRLPPSGCRPGRWSQSRCPGATGSVCPQAPLDTPAEAAD

SEQ ID NO: 759795 - protein, 104 aa, Homo sapiens
MTTQKGDSTRARLATGPRPHRPSTYLPCAKWSPQPRSQPHQQRMTRMMTLTCLAVTTDGRRTRRRHSCGRERLRQDTRSNEGPRKPATWWPSPPSLLGCQSLGD

SEQ ID NO: 759796 - protein, 585 aa, Homo sapiens; identical to SEQ ID NO: 759761

SEQ ID NO: 759797 - protein, 585 aa, Homo sapiens; identical to SEQ ID NO: 759761

SEQ ID NO: 759798 - protein, 702 aa, Homo sapiens
MRSGKASCTLETVWEDKHKYEEAERRFYEHEATQAAASAQQLPAEGPAMNGPGQDDPEDADEAEAPDGGSRRDPRKSQDSRKPLQKKRKRSPKSGLGPADLALLGLSAERVWLDKSLFDQAESSYRQKLADVAAQAAWPPALAPWGLCTHGNQVACHHVTWGIWVNKSSFDQAERAFVEWSQALLLAPEGSRRQGTPNTGQQVAVPDLAHQPSPPVNGQPPLGSLQALVREVWLEKPRYDAAERGFYEALFDGHPPGKVRLQERAGLAEGARRGRRDRRGRNILGNKRAGLRRADGEAPSALPYCYFLQKDAEAPWLSKPAYDSAECRHHAAEALRVAWCLEAASLSHRPGPRSGLSVSSLRPKYGETCWVGTQPGLWAQGQPSQAGAPPASSPAHLGWGLPETRGPSRVECRSRLSKGRKMATNFLAHEKIWFDKFKYDDAERRFYEQMNGPVAGASRQENGASVILRDIARARENIQKSLAGSSGPGASSGTSGDHGELVVRIASLEVENQSLRGVVQELQQAISKLEARLNVLEKSSPGHRATAPQTQHVSPMRQVEPPAKKPATPAEDDEDDDIDLFGSGAATARYAEKRRAKKACNLVAKSSIPAWMSKPWGLMTTGPWAQAWRALCALYSKLEPGWSGGGFPSWLPVGYRVSGKATDSVCWWRTTRWGQTCWRRRSPSLRSTCRVSISQLSTRSEA

SEQ ID NO: 759799 - protein, 654 aa, Homo sapiens
MRSGKASCTLETVWEDKHKYEEAERRFYEHEATQAAASAQQLPAEGPAMNGPGQDDPEDADEAEAPDGGSRRDPRKSQDSRKPLQKKRKRSPKSGLGPADLALLGLSAERVWLDKSLFDQAESSYRQKLADVAAQAAWPPALAPWGLCTHGNQVACHHVTWGIWVNKSSFDQAERAFVEWSQALLLAPEGSRRQGTPNTGQQVAVPDLAHQPSPPVNGQPPLGSLQALVREVWLEKPRYDAAERGFYEALFDGHPPGKVRLQERAGLAEGARRGRRDRRGRNILGNKRAGLRRADGEAPSALPYCYFLQKDAEAPWLSKPAYDSAECRHHAAEALRVAWCLEAASLSHRPGPRSGLSVSSLRPKYGETCWVGTQPGLWAQGQPSQAGAPPASSPAHLGWGLPETRGPSRVECRSRLSKGRKMATNFLAHEKIWFDKFKYDDAERRFYEQMNGPVAGASRQENGASVILRDIARARENIQKSLAGSSGPGASSGTSGDHGELVVRIASLEVENQSLRGVVQELQQAISKLEARLNVLEKSSPGHRATAPQTQESLQPGGQVLHPCVDVKALGIDDDGTMGSSLEGLVCALFQAGTGLVWGGLPKLAARGLPGIRKSYRFSVWVEDDKVGTDLLEEEITKFEEHVQSVDIAAFNKI

SEQ ID NO: 759800 - protein, 364 aa, Homo sapiens [sequence omitted]

SEQ ID NO: 759801 - protein, 702 aa, Homo sapiens; identical to SEQ ID NO: 759798

SEQ ID NO: 759802 - protein, 585 aa, Homo sapiens; identical to SEQ ID NO: 759761

SEQ ID NO: 759803 - protein, 364 aa, Homo sapiens [sequence omitted]

SEQ ID NO: 759804 - protein, 130 aa, Homo sapiens; identical to SEQ ID NO: 759792

SEQ ID NO: 759805 - protein, 116 aa, Homo sapiens
MATNFLAHEKIWFDKFKYDDAERRFYEQMNGPVAGASRQSSGPGASSGTSGDHGELVVRIASLEVENQSLRGVVQELQQAISKLEARLNVLEKSSPGHRATAPQTQHVSSHVPVHR

SEQ ID NO: 759806 - protein, 109 aa, Homo sapiens
SQALGDIDPSQRHVPFLLVERRCTSTCGPGIREEAYSLARLHTCTDSIYVFKGREMQSQARKSIHSFDTSRGVSGWKQNQTNLKVGECDALSSSSLLSSLPDASSLPFY

SEQ ID NO: 759807 - protein, 104 aa, Homo sapiens
PSPARLRSFCFSFPPTGQDCLACLCVVENSAVATPTSELPNFRELQSPRPTAREASCPDAMHPPVTSSRLSIPQDRKGSSSPREPRAVLGASGCRGKLRTLHSS

SEQ ID NO: 759808 - protein, 173 aa, Homo sapiens
ICCHEKREAAFAKHCCLKKLSSLRPILPLLVWVQLKATLRDLAVEIQGLPWGWQLRVQLELYLKNVKSKIGSTENLKHQPGGGKVQIVYKPVDLSKVTSKCGSLGNIHHKPGGGQVEVKSEKLDFKDRVQSKIGSLDNITHVPGGGNKKIETHKLTFRENAKAKTDHGAEIVY

SEQ ID NO: 759809 - protein, 162 aa, Homo sapiens
MTILNIHEPNTGAPKFIKQLLVDIRNEIDSNTMIVGDFNTLLTALDRSSRQKVNKETLDLNYTLEQMDLTDIYRTFHPTTTEYTFYSTAHGIFSKIDHMIGHKMSLSKLKKIEIVSRTLSDHSGTKLKINSKRNLQNHANTWNLNNLLLNEHWVKNEIMVEM

SEQ ID NO: 759810 - protein, 476 aa, Homo sapiens
MKKIRTSLKGDLITVTNMGKALFGVQAFLGIEKRTVRNLMNGISVERPLGRNLIPVIGVLKVSVGAQTLLNTKESTLGKNLINVMSVGKPSVRAQILLYIRESIIGEKPYQCRHCSKSFSQRSDLVKHQRIHTGEKPYTCNQCNKHFSQSSDVKNIKESTLGRNHINVMCVGKPSVRAQILFCIRESILGRNHIHVISVAKVSVRIQTLLNIEGSTLERNPINVMSVGKLLIRAQSLFYIRGFILERNPIPVINVAKPSVGFQILLIINEFTLERSLTHVISAIKCLVEDEILLNITEFIQVRNPMNVMNVGKPLVRAPTLFFIRESTLERNLMHVVIVLKALVAVQILLSIKEYTLERNHMHVISVIKVLVKAQTSLNIREYTLVKSLIIAIVVRKPSVRVLTLFFIREFTLEKNYYLCTQCSKSFSQISDLIKHQRIHTGEKPYKCSECRKAFSQCSALSPTPENPHWEETKSM

SEQ ID NO: 759811 - protein, 367 aa, Homo sapiens
MILCSRLCLPQSASLRMEPAPGLVEQPKCLEAGSPEPEPAPWQALPVLSEKQSGDVELVLAYAAPVLDKRQTSRLLKEVSALHPLPAQPHLKRVRPSRDAGSPHALEMLLCLAGPASGPRSLAELLPRPAVDPRGLGQPFLVPVPARPPLTRGQFEEARAHWPTSFHEDKQVTSALAGRLFSTQERAAMQSHMERAVWAARRAAARGLRAVGAVVVDPASDRVLATGHDCSCADNPLLHAVMVCVDLVARGQGRGTYDFRPFPACSFAPAAAPQAVRAGAVRKLDADEDGLPYLCTGYDLYVTREPCAMCAMALVHARILRVFYGAPSPDGALGTRFRIHARPDLNHRFQVFRGVLEEQCRWLDPDT

SEQ ID NO: 759812 - protein, 191 aa, Homo sapiens
MILCSRLCLPQSASLRMEPAPGLVEQPKCLEAGSPEPEPAPWQALPVLSEKQSGDVELVLAYAAPVLDKRQTSRLLKEVSALHPLPAQPHLKRVRPSRDAGSPHALEMLLCLAGPASGPRSLAELLPRPAVDPRGLGQPFLVPVPARPPLTRGQFEEARAHWPTSFHEDKQVTSAPCCVCVPSVSRAGKLL

SEQ ID NO: 759813 - protein, 367 aa, Homo sapiens; identical to SEQ ID NO: 759811

SEQ ID NO: 759814 - protein, 292 aa, Homo sapiens
MILCSRLCLPQSASLRMEPAPGLVEQPKCLEAGSPEPEPAPWQALPVLSEKQSGDVELVLAYAAPVLDKRQTSRLLKEVSALHPLPAQPHLKRVRPSRDAGSPHALEMLLCLAGPASGPRSLAELLPRPPLPVHWLRPVRDPRALRHVRHGPGARTHPARLLRCALARRRPGHPLPHPRTARPQPPLPGVPRGAGGAVPLAGPRHVGAALLPPDPSRSRPWGAPPGLPGLDFFRTSLTVDFRDTYRLQRGARVLPSVRIELSWTRSLGPPRASGALLRPPLLRLCPLCLAGR

SEQ ID NO: 759815 - protein, 125 aa, Homo sapiens
GQLRLWFGGVQVGWMPEMWEPEAWRSSAAGWTPTRRRRPPASGPFPLPAVGRPSWTSGPRFLPHKPDRGFQGHIPPPAGSTGAAFRADRAFLDSVIGATPCQRCPSAAALAAFVSPLSQRAGKLL

SEQ ID NO: 759816 - protein, 87 aa, Homo sapiens
DLLLLHCPSWTHTGKGFPGLPLGWRGRTQEDAVCSIHPLQSIFGGFADMQAAWGGGLSVGHPKRQLESGVRPGNGPEGMPAGSSCLL

SEQ ID NO: 759817 - protein, 65 aa, Homo sapiens
YSKFTETRKMFERSVHESGQNNRYSPKKEKAGGSEPQDEWGGSKSNRGSTDSLDSLSSRTEAVSP

SEQ ID NO: 759818 - protein, 120 aa, Homo sapiens
QDQRCRDRVQDLSWLRVEPTGLGVQAWASVEDQPLQLSTEAVEQVAHGSQLDSEPRSAPAARWSSQGHHPESLGLTLNSQQEGGVSASAPECRCSLLAREGLLCGQPEVGASGPAMAEPH

SEQ ID NO: 759819 - protein, 309 aa, Homo sapiens
MEPENDTGISEFVLLGLSEEPELQPFLFGLFLSMYLVTVLGNLLIILATISDSHLHTPMYFFLSNLSFADICFISTTIPKMLINIQTQSRVITYAGCITQMCFFVLFGGLDSLLLAVMAYDRFVAICHPLHYTVIMNPRLCGLLVLASWMIAALNSLSQSLMVLWLSFCTDLEIPHFFCELNQVIHLACSDTFLNDMGMYFAAGLLAGGPLVGILCSYSKIVSSIRAISSAQGKYKAFSTCASHLSVVSLFCCTGLGVYLTSAATHNSHTSATASVMYTVATPMLNPFIYSLRNKDIKRALKMSFRGKQ

SEQ ID NO: 759820 - protein, 311 aa, Homo sapiens
RGFKAPGASKSSLLPRMSVSQDPRKLCLMEEAVSEFEPGKATKSETQPQVSATVVLLPDGQASVVPHASENLASQVPQGHLQSMPTGNMQASQELCDLMSARRSNMGHKEPRNPNCQGSCKSQSPMFPPTHKRENSRKPNLEKHEEMFQGLRTPQLTPGRKTEDTRQNEGVQLLPSKKQPPSISHFGENIKQFFQTIFSKKERKPAPVTAESQKTVKNRSCVYGSSAEAERLMTAVGQILEENMSLCHARHASKVNQQRQQFQAPVCGFPCNHRHPFYSEHSRMLSYAASSQQATLKNQSRPNRDRQIRDQ

SEQ ID NO: 759821 - protein, 127 aa, Homo sapiens
ASVMPGDPPPTKLYHFRSTSDCCAGSENFKPMVLRFLGCVGVGPTKRDHLAPWLQPPFQGSERFHLTGVPGATGRKKLKAQQIYALSQGQERNSRTRSKRQIPSTSEFMTFLLAQVTFCLTAKSQCI

SEQ ID NO: 759822 - protein, 72 aa, Homo sapiens
KRAANRSIMLAKKIIIKDGGTPQGIGSPSVYHAVIVIFLEFFAWGLLTAPTLVVLHETFPKQQCVTVLIQQI

SEQ ID NO: 759823 - protein, 103 aa, Homo sapiens
SCRCSQEKQGLGEKSSSALMSLPLSTRPYQSAMTNHESLQSPCPHLLPQFPLCPASPHPTAPWLPPSLLHKMPLLNGLFPLGCIWKAKPPFESCLPLTWVTWR

SEQ ID NO: 759824 - protein, 74 aa, Homo sapiens
GLQAEGPWTDVISLASAESPTNPPCAHPPITESSCWRRQHETLKTSRSRRHRRQWPGWSWWRGYAITDFCLPAP

SEQ ID NO: 759825 - protein, 66 aa, Homo sapiens
NHIWEVLAYLSLKMMEQIGRDVEDSNKLLNKIGLIEARIGQYTMGPGAVAHTCNPSTLGGRGGWIT

SEQ ID NO: 759826 - protein, 149 aa, Homo sapiens
EVETTPGSLRNGPGEESNFRTSSQQEINYSTHIFSPGGSPEGSPVLDPPPHLEPNRSTSRKHSAQHKNNRDDSLDWFDFMATHQSEPKNTVVVSPHPKTSGENMASKISNSTSQGKEKSEPGQRSKVDIGLLPSPGETGVPWRADNVES

SEQ ID NO: 759827 - protein, 165 aa, Homo sapiens
MAPNASCLCVHVRSEEWDLMTFDANPYDSVKKIKEHVRSKTKVPVQDQVLLLGSKILKPRRSLSSYGIDKEKTIHLTLKVVKPSDEELPLFLVESGDEAKRHLLQVRRSSSVAQVKAMIETKTGIIPETQIVTCNGKRLEDGKMMADYGIRKGNLLFLACYCIGG

SEQ ID NO: 759828 - protein, 165 aa, Homo sapiens; identical to SEQ ID NO: 759827

SEQ ID NO: 759829 - protein, 323 aa, Homo sapiens
MDPKYQRVELNDGHFMPVLGFGTYAPPEVPRNRAVEVTKLAIEAGFRHIDSAYLYNNEEQVGLAIRSKIADGSVKREDIFYTSKLWCTFFQPQMVQPALESSLKKLQLDYVDLYLLHFPMALKPGETPLPKDENGKVIFDTVDLSATWEVMEKCKDAGLAKSIGVSNFNCRQLEMILNKPGLKYKPVCNQVECHPYLNQSKLLDFCKSKDIVLVAHSALGTQRHKLWVDPNSPVLLEDPVLCALAKKHKRTPALIALRYQLQRGVVVLAKSYNEQRIRENIQVFEFQLTSEDMKVLDGLNRNYRYVVMDFLMDHPDYPFSDEY

SEQ ID NO: 759830 - protein, 305 aa, Homo sapiens
MDPKYQRVELNDGHFMPVLGFGTYAPPEVPRNRAVEVTKLAIEAGFRHIDSAYLYNNEEQVGLAIRSKIADGSVKREDIFYTSKLWCTFFQPQMVQPALESSLKKLQLDYVDLYLLHFPMALKPGETPLPKDENGKVIFDTVDLSATWEVMEKCKDAGLAKSIGVSNFNCRQLEMILNKPGLKYKPVCNQVECHPYLNQSKLLDFCKSKVDPNSPVLLEDPVLCALAKKHKRTPALIALRYQLQRGVVVLAKSYNEQRIRENIQVFEFQLTSEDMKVLDGLNRNYRYVVMDFLMDHPDYPFSDEY

SEQ ID NO: 759831 - protein, 323 aa, Homo sapiens; identical to SEQ ID NO: 759829

SEQ ID NO: 759832 - protein, 173 aa, Homo sapiens
MEKCKDAGLAKSIGVSNFNCRQLEMILNKPGLKYKPVCNQVECHPYLNQSKLLDFCKSKDIVLVAHSALGTQRHKLWVDPNSPVLLEDPVLCALAKKHKRTPALIALRYQLQRGVVVLAKSYNEQRIRENIQVFEFQLTSEDMKVLDGLNRNYRYVVMDFLMDHPDYPFSDEY

SEQ ID NO: 759833 - protein, 767 aa, Homo sapiens
MDEQGCEHTSRTEDPFIQPTDFGPSEPPLSVPQPFLPVFTMPLLSPSPAPPPISPVLPLVPPPATALNPPAPPTFHQPQKFAGVNKAPSVITHTASATLTHDAPATTFSQSQGLVITTHHPAPSAAPCGLALSPVTRPPQPRLTFVHPKPVSLTGGRPKQPHKIVPAPKPEPVSLVLKNARIAPAAFSGQPQAVIMTSGPLKREGMLASTVSQSNVVIAPAAIARAPGVPEFHSSILVTDLGHGTSSPPAPVSRLFPSTAQDPLGKGEQVPLHGGSPQVTVTGPSRDCPNSGQASPCASEQSPSPQSPQNNCSGKSDPKNVAALKNRQMKHISAEQKRRFNIKMCFDMLNSLISNNSKLTSHAITLQKTVEYITKLQQERGQMQEEARRLREEIEELNATIISCQQLLPATGVPVTRRQFDHMKDMFDEYVKTRTLQNWKFWIFSIIIKPLFESFKGMVSTSSLEELHRTALSWLDQHCSLPILRPMVLSTLRQLSTSTSILTDPAQLPEQASKAVTRIGKRLGESCCLAGMWPHEMPGDPSLPMESRLRPPALPDAQPRGLSPTLPAHRGIEEAMLRSEAGLGPADSNSPPLGTPCCELSHSVTSVTNLLCPRGSPHKREVLAVLVLPCWWPAGPGAGERNRWDEGDRACSCPEAQPCPSCHVLSTCMPLPDALLHSLVCPWGSWKASFFLPSTLTAPSPCGWTWASIQAYAWQAARGKCLLQRSSRTHVCRNGGCGTHRTRMEACDARWLLWLRGPAGHVSSVPF

SEQ ID NO: 759834 - protein, 526 aa, Homo sapiens
MDEQGCEHTSRTEDPFIQPTDFGPSEPPLSVPQPFLPVFTMPLLSPSPAPPPISPVLPLVPPPATALNPPAPPTFHQPQKFAGVNKAPSVITHTASATLTHDAPATTFSQSQGLVITTHHPAPSAAPCGLALSPVTRPPQPRLTFVHPKPVSLTGGRPKQPHKIVPAPKPEPVSLVLKNARIAPAAFSGQPQAVIMTSGPLKREGMLASTVSQSNVVIAPAAIARAPGVPEFHSSILVTDLGHGTSSPPAPVSRLFPSTAQDPLGKGEQVPLHGGSPQVTVTGPSRDCPNSGQASPCASEQSPSPQSPQNNCSGKSDPKNVAALKNRQMKHISAEQKRRFNIKMCFDMLNSLISNNSKLTSHAITLQKTVEYITKLQQERGQMQEEARRLREEIEELNATIISCQQLLPATGVPVTRRQFDHMKDMFDEYVKTRTLQNWKFWIFSIIIKPLFESFKGMVSTSSLEELHRTALSWLDQHCSLPILRPMVLSTLRQLSTSTSILTDPAQLPEQASKAVTRIGKRLGES

SEQ ID NO: 759835 - protein, 767 aa, Homo sapiens; identical to SEQ ID NO: 759833

SEQ ID NO: 759836 - protein, 767 aa, Homo sapiens; identical to SEQ ID NO: 759833

SEQ ID NO: 759837 - protein, 108 aa, Homo sapiens [sequence omitted]

SEQ ID NO: 759838 - protein, 239 aa, Homo sapiens
MVPPRGLKNKPEKSLVWPEAPSGPRHPEYTPLIALLSRSTFPPAVFNTTMHFLNYICIQDNKDTLFFLKSQKKKKKKKKPLRAPSGPQRSPFPQPTQSRWGQRAAPPQEGDTSRQHGWHIKAGVPPREEKPRGTRMNNRAPGGKLNHPQYKEKRPGGNTGERLLAQQTPRRWISPKHHQTGTSSQPAAPKAETATTTNKRPRPVVTHKRATGKTRHDYTRKTHTAAPRAHHAAQTHTHD

SEQ ID NO: 759839 - protein, 767 aa, Homo sapiens; identical to SEQ ID NO: 759833

SEQ ID NO: 759840 - protein, 239 aa, Homo sapiens; identical to SEQ ID NO: 759838

SEQ ID NO: 759841 - protein, 239 aa, Homo sapiens; identical to SEQ ID NO: 759838

SEQ ID NO: 759842 - protein, 767 aa, Homo sapiens; identical to SEQ ID NO: 759833

SEQ ID NO: 759843 - protein, 767 aa, Homo sapiens; identical to SEQ ID NO: 759833

SEQ ID NO: 759844 - protein, 239 aa, Homo sapiens; identical to SEQ ID NO: 759838

SEQ ID NO: 759845 - protein, 767 aa, Homo sapiens; identical to SEQ ID NO: 759833

SEQ ID NO: 759846 - protein, 239 aa, Homo sapiens; identical to SEQ ID NO: 759838

SEQ ID NO: 759847 - protein, 526 aa, Homo sapiens; identical to SEQ ID NO: 759834

SEQ ID NO: 759848 - protein, 526 aa, Homo sapiens; identical to SEQ ID NO: 759834

SEQ ID NO: 759849 - protein, 102 aa, Homo sapiens
VAAPALFAGCDVLIVRHRCRWARGSREGKEEGGRSGGGGGGAGGGGGGGGGGGEKLKLKQSQRRRGGVLGGAARAQKRWNPELRRLRLKTAGVAGPPPSPER

SEQ ID NO: 759850 - protein, 208 aa, Homo sapiens
FSFLNANPFSFFLSMSRNSLSIPVESLGHVYLMLMGSPFLGVGLTLVDSASVYPSCGLICMHESTVCIPLCFPQASLSCPFHFPCPIGLLSCTLPNGFGGQSGPEGERSLAPPDASILISNVCSIGDHVAQELFQGSDLGMAEEAERPGEKAGQHSPLREEHVTCVQSILDEFLQTYGSLIPLSTDEVVEKLEDIFQQEFSTPSRGEA

SEQ ID NO: 759851 - protein, 102 aa, Homo sapiens; identical to SEQ ID NO: 759849

SEQ ID NO: 759852 - protein, 340 aa, Homo sapiens
KPLGRVHERRPESGSRGESGPEGERSLAPPDASILISNVCSIGDHVAQELFQGSDLGMAEEAERPGEKAGQHSPLREEHVTCVQSILDEFLQTYGSLIPLSTDEVVEKLEDIFQQEFSTPSRKGLVLQLIQSYQRMPGNAMVRGFRVAYKRHVLTMDDLGTLYGQNWLNDQVMNMYGDLVMDTVPEKVHFFNSFFYDKLRTKGYDGVKRWTKNVDIFNKELLLIPIHLEVHWSLISVDVRRRTITYFDSQRTLNRRCPKHIAKYLQAEAVKKDRLDFHQGWKGYFKMNVARQNNDSDCGAFVLQYCKHLALSQPFSFTQQDMPKLRRQIYKELCHCKLTV

SEQ ID NO: 759853 - protein, 423 aa, Homo sapiens
FSFLNANPFSFFLSMSRNSLSIPVESLGHVYLMLMGSPFLGVGLTLVDSASVYPSCGLICMHESTVCIPLCFPQASLSCPFHFPCPIGLLSCTLPNGFGGQSGPEGERSLAPPDASILISNVCSIGDHVAQELFQGSDLGMAEEAERPGEKAGQHSPLREEHVTCVQSILDEFLQTYGSLIPLSTDEVVEKLEDIFQQEFSTPSRKGLVLQLIQSYQRMPGNAMVRGFRVAYKRHVLTMDDLGTLYGQNWLNDQVMNMYGDLVMDTVPEKVHFFNSFFYDKLRTKGYDGVKRWTKNVDIFNKELLLIPIHLEVHWSLISVDVRRRTITYFDSQRTLNRRCPKHIAKYLQAEAVKKDRLDFHQGWKGYFKMNVARQNNDSDCGAFVLQYCKHLALSQPFSFTQQDMPKLRRQIYKELCHCKLTV

SEQ ID NO: 759854 - protein, 548 aa, Homo sapiens
MKETIQGTGSWGPEPPGPGIPPAYSSPRRERLRWPPPPKPRLKSGGGFGPDPGSGTTVPARRLPVPRPSFDASASEEEEEEEEEEDEDEEEEVAAWRLPPRWSQLGTSQRPRPSRPTHRKTCSQRRRRAMRAFRMLLYSKSTSLTFHWKLWGRHRGRRRGLAHPKNHLSPQQGGATPQVPSPCCRFDSPRGPPPPRLGLLGALMAEDGVRGSPPVPSGPPMEEDGLRWTPKSPLDPDSGLLSCTLPNGFGGQSGPEGERSLAPPDASILISNVCSIGDHVAQELFQGSDLGMAEEAERPGEKAGQHSPLREEHVTCVQSILDEFLQTYGSLIPLSTDEVVEKLEDIFQQEFSTPSRKGLVLQLIQSYQRMPGNAMVRGFRVAYKRHVLTMDDLGTLYGQNWLNDQVMNMYGDLVMDTVPEKVDIFNKELLLIPIHLEVHWSLISVDVRRRTITYFDSQRTLNRRCPKHIAKYLQAEAVKKDRLDFHQGWKGYFKMNVARQNNDSDCGAFVLQYCKHLALSQPFSFTQQDMPKLRRQIYKELCHCKLTV

SEQ ID NO: 759855 - protein, 185 aa, Homo sapiens
MDDLGTLYGQNWLNDQVMNMYGDLVMDTVPEKVHFFNSFFYDKLRTKGYDGVKRWTKNVDIFNKELLLIPIHLEVHWSLISVDVRRRTITYFDSQRTLNRRCPKHIAKYLQAEAVKKDRLDFHQGWKGYFKMNVARQNNDSDCGAFVLQYCKHLALSQPFSFTQQDMPKLRRQIYKELCHCKLTV

SEQ ID NO: 759856 - protein, 136 aa, Homo sapiens
LGAKRWTKNVDIFNKELLLIPIHLEVHWSLISVDVRRRTITYFDSQRTLNRRCPKHIAKYLQAEAVKKDRLDFHQGWKGYFKMNVARQNNDSDCGAFVLQYCKHLALSQPFSFTQQDMPKLRRQIYKELCHCKLTV

SEQ ID NO: 759857 - protein, 591 aa, Homo sapiens
MKETIQGTGSWGPEPPGPGIPPAYSSPRRERLRWPPPPKPRLKSGGGFGPDPGSGTTVPARRLPVPRPSFDASASEEEEEEEEEEDEDEEEEVAAWRLPPRWSQLGTSQRPRPSRPTHRKTCSQRRRRAMRAFRMLLYSKSTSLTFHWKLWGRHRGRRRGLAHPKNHLSPQQGGATPQVPSPCCRFDSPRGPPPPRLGLLGALMAEDGVRGSPPVPSGPPMEEDGLRWTPKSPLDPDSGLLSCTLPNGFGGQSGPEGERSLAPPDASILISNVCSIGDHVAQELFQGSDLGMAEEAERPGEKAGQHSPLREEHVTCVQSILDEFLQTYGSLIPLSTDEVVEKLEDIFQQEFSTPSRKGLVLQLIQSYQRMPGNAMVRGFRVAYKRHVLTMDDLGTLYGQNWLNDQVMNMYGDLVMDTVPEKVHFFNSFFYDKLRTKGYDGVKRWTKNVDIFNKELLLIPIHLEVHWSLISVDVRRRTITYFDSQRTLNRRCPKHIAKYLQAEAVKKDRLDFHQGWKGYFKMNVARQNNDSDCGAFVLQYCKHLALSQPFSFTQQDMPKLRRQIYKELCHCKLTLPFGFSYLNVSISVFFFL

SEQ ID NO: 759858 - protein, 362 aa, Homo sapiens
MKETIQGTGSWGPEPPGPGIPPAYSSPRRERLRWPPPPKPRLKSGGGFGPDPGSGTTVPARRLPVPRPSFDASASEEEEEEEEEEDEDEEEEVAAWRLPPRWSQLGTSQRPRPSRPTHRKTCSQRRRRAMRAFRMLLYSKSTSLTFHWKLWGRHRGRRRGLAHPKNHLSPQQGGATPQVPSPCCRFDSPRGPPPPRLGLLGALMAEDGVRGSPPVPSGPPMEEDGLRWTPKSPLDPDSGLLSCTLPNGFGGQSGPEGERSLAPPDASILISNVCSIGDHVAQELFQGSDLGMAEEAERPGEKAGQHSPLREEHVTCVQSILDEFLQTYGSLIPLSTDEVVEKLEDIFQQEFSTPSRRAWCCS

SEQ ID NO: 759859 - protein, 430 aa, Homo sapiens
MKETIQGTGSWGPEPPGPGIPPAYSSPRRERLRWPPPPKPRLKSGGGFGPDPGSGTTVPARRLPVPRPSFDASASEEEEEEEEEEDEDEEEEVAAWRLPPRWSQLGTSQRPRPSRPTHRKTCSQRRRRAMRAFRMLLYSKSTSLTFHWKLWGRHRGRRRGLAHPKNHLSPQQGGATPQVPSPCCRFDSPRGPPPPRLGLLGALMAEDGVRGSPPVPSGPPMEEDGLRWTPKSPLDPDSGLLSCTLPNGFGGQSGPEGERSLAPPDASILISNVCSIGDHVAQELFQGSDLGMAEEAERPGEKAGQHSPLREEHVTCVQSILDEFLQTYGSLIPLSTDEVVEKLEDIFQQEFSTPSSTSLWFFIFKCFNFCIFFSLREYLLISDVQGVATEKPLSSSVCRGVWPCGLGGAVILPLPRAGSRKSVLGVVGGQ

SEQ ID NO: 759860 - protein, 574 aa, Homo sapiens
MKETIQGTGSWGPEPPGPGIPPAYSSPRRERLRWPPPPKPRLKSGGGFGPDPGSGTTVPARRLPVPRPSFDASASEEEEEEEEEEDEDEEEEVAAWRLPPRWSQLGTSQRPRPSRPTHRKTCSQRRRRAMRAFRMLLYSKSTSLTFHWKLWGRHRGRRRGLAHPKNHLSPQQGGATPQVPSPCCRFDSPRGPPPPRLGLLGALMAEDGVRGSPPVPSGPPMEEDGLRWTPKSPLDPDSGLLSCTLPNGFGGQSGPEGERSLAPPDASILISNVCSIGDHVAQELFQGSDLGMAEEAERPGEKAGQHSPLREEHVTCVQSILDEFLQTYGSLIPLSTDEVVEKLEDIFQQEFSTPSRKGLVLQLIQSYQRMPGNAMVRGFRVAYKRHVLTMDDLGTLYGQNWLNDQVMNMYGDLVMDTVPEKVHFFNSFFYDKLRTKGYDGVKRWTKNVDIFNKELLLIPIHLEVHWSLISVDVRRRTITYFDSQRTLNRRCPKHIAKYLQAEAVKKDRLDFHQGWKGYFKMNVARQNNDSDCGAFVLQYCKHLALSQPFSFTQQDMPKLRRQIYKELCHCKLTV

SEQ ID NO: 759861 - protein, 266 aa, Homo sapiens
RGPRARDCVQSILDEFLQTYGSLIPLSTDEVVEKLEDIFQQEFSTPSRKGLVLQLIQSYQRMPGNAMVRGFRVAYKRHVLTMDDLGTLYGQNWLNDQVMNMYGDLVMDTVPEKVHFFNSFFYDKLRTKGYDGVKRWTKNVDIFNKELLLIPIHLEVHWSLISVDVRRRTITYFDSQRTLNRRCPKHIAKYLQAEAVKKDRLDFHQGWKGYFKMNVARQNNDSDCGAFVLQYCKHLALSQPFSFTQQDMPKLRRQIYKELCHCKLTV

SEQ ID NO: 759862 - protein, 283 aa, Homo sapiens [sequence omitted]

SEQ ID NO: 759863 - protein, 547 aa, Homo sapiens
FSFLNANPFSFFLSMSRNSLSIPVESLGHVYLMLMGSPFLGVGLTLVDSASVYPSCGLICMHESTVCIPLCFPQASLSCPFHFPCPIGLLSCTLPNGFGGQSGPEGERSLAPPDASILISNVCSIGDHVAQELFQGSDLGMAEEAERPGEKAGQHSPLREEHVTCVQSILDEFLQTYGSLIPLSTDEVVEKLEDIFQQEFSTPSRGEAVKALLERRAGALGMWREYCCLFFHRAVVGEEEAELKGRTLQAGAKSLEADGRVFTWDPEMFYLSSHVYLSGEWAFRRSSEGPIMSQKKGSQLEFVFQGVVGISVCPSCIIFLCDSTLGLLRKGLVLQLIQSYQRMPGNAMVRGFRVAYKRHVLTMDDLGTLYGQNWLNDQVMNMYGDLVMDTVPEKVHFFNSFFYDKLRTKGYDGVKRWTKNVDIFNKELLLIPIHLEVHWSLISVDVRRRTITYFDSQRTLNRRCPKHIAKYLQAEAVKKDRLDFHQGWKGYFKMNVARQNNDSDCGAFVLQYCKHLALSQPFSFTQQDMPKLRRQIYKELCHCKLTV

SEQ ID NO: 759864 - protein, 557 aa, Homo sapiens
MKETIQGTGSWGPEPPGPGIPPAYSSPRRERLRWPPPPKPRLKSGGGFGPDPGSGTTVPARRLPVPRPSFDASASEEEEEEEEEEDEDEEEEVAAWRLPPRWSQLGTSQRPRPSRPTHRKTCSQRRRRAMRAFRMLLYSKSTSLTFHWKLWGRHRGRRRGLAHPKNHLSPQQGGATPQVPSPCCRFDSPRGPPPPRLGLLGALMAEDGVRGSPPVPSGPPMEEDGLRWTPKSPLDPDSGLLSCTLPNGFGGQSGPEGERSLAPPDASILISNVCSIGDHVAQELFQGSDLGMAEEAERPGEKAGQHSPLREEHVTCVQSILDEFLQTYGSLIPLSTDEVVEKLEDIFQQEFSTPSRKGLVLQLIQSYQRMPGNAMVRGFRVAYKRHVLTMDDLGTLYGQNWLNDQVMNMYGDLVMDTVPEKVHFFNSFFYDKLRTKGYDGVKRWTKNVDIFNKELLLIPIHLEVHWSLISVDVRRRTITYFDSQRTLNRRCPKHIAKYLQAEAVKKDRLDFHQGWKGYFKMYCKHLALSQPFSFTQQDMPKLRRQIYKELCHCKLTV

SEQ ID NO: 759865 - protein, 574 aa, Homo sapiens; identical to SEQ ID NO: 759860

SEQ ID NO: 759866 - protein, 421 aa, Homo sapiens
MKETIQGTGSWGPEPPGPGIPPAYSSPRRERLRWPPPPKPRLKSGGGFGPDPGSGTTVPARRLPVPRPSFDASASEEEEEEEEEEDEDEEEEVAAWRLPPRWSQLGTSQRPRPSRPTHRKTCSQRRRRAMRAFRMLLYSKSTSLTFHWKLWGRHRGRRRGLAHPKNHLSPQQGGATPQVPSPCCRFDSPRGPPPPRLGLLGALMAEDGVRGSPPVPSGPPMEEDGLRWTPKSPLDPDSGLLSCTLPNGFGGQSGPEGERSLAPPDASILISNVCSIGDHVAQELFQGSDLGMAEEAERPGEKAGQHSPLREEHVTCVQSILDEFLQTYGSLIPLSTDEVVEKLEDIFQQEFSTPSRKGLVLQLIQSYQRMPGNAMVRGFRVAYKRHVLTMDDLGTLYGQNWLNDQVMNMYGDLVMDTVPEK

SEQ ID NO: 759867 - protein, 155 aa, Homo sapiens
MKETIQGTGSWGPEPPGPGIPPAYSSPRRDVFVGPHLPNPDSSQVEGLGQILGQGLLSCTLPNGFGGQSGPEGERSLAPPDASILISNVCSIGDHVAQELFQGSDLGMAEEAERPGEKAGQHSPLREEHVTCVQIILPLPRAGSRKSVLGVVGGQ

SEQ ID NO: 759868 - protein, 103 aa, Homo sapiens
LFVTTLFHCAIFALFTLPRQPVSLALSDFLCLVSFGRSGDYRGVGLGALLSYLSLPYPGMGKMRTCHSVRPRTVLQNSESFPDGWRSRSLPAEVPSLPCWEDK

SEQ ID NO: 759869 - protein, 103 aa, Homo sapiens; identical to SEQ ID NO: 759868

SEQ ID NO: 759870 - protein, 103 aa, Homo sapiens; identical to SEQ ID NO: 759868

SEQ ID NO: 759871 - protein, 103 aa, Homo sapiens; identical to SEQ ID NO: 759868

SEQ ID NO: 759872 - protein, 103 aa, Homo sapiens; identical to SEQ ID NO: 759868

SEQ ID NO: 759873 - protein, 103 aa, Homo sapiens; identical to SEQ ID NO: 759868

SEQ ID NO: 759874 - protein, 103 aa, Homo sapiens; identical to SEQ ID NO: 759868

SEQ ID NO: 759875 - protein, 103 aa, Homo sapiens; identical to SEQ ID NO: 759868

SEQ ID NO: 759876 - protein, 237 aa, Homo sapiens
GGIGEGGAPPPRGWREGAQSQPRASKQPGGLASHPQPVRRSSCQRSRQRRHIPLWALNVTPRLDSPCPVKMLVLLAFIIAFHITSAALLFIATVDNAWWVGDEFFADVWRICTNNTNCTVINDSFQEYSTLQAVQATMILSTILCCIAFFIFVLQLFRLKQGERFVLTSIIQLMSCLCVMIAASIYTDRREDIHDKNAKFYPVTREGSYGYSYILAWVAFACTFISGMMYLILRKRK

SEQ ID NO: 759877 - protein, 237 aa, Homo sapiens; identical to SEQ ID NO: 759876

SEQ ID NO: 759878 - protein, 237 aa, Homo sapiens; identical to SEQ ID NO: 759876

SEQ ID NO: 759879 - protein, 237 aa, Homo sapiens; identical to SEQ ID NO: 759876

SEQ ID NO: 759880 - protein, 167 aa, Homo sapiens
MLVLLAFIIAFHITSAALLFIATVDNAWWVGDEFFADVWRICTNNTNCTVINDSFQEYSTLQAVQATMILSTILCCIAFFIFVLQLFRLKQGERFVLTSIIQLMSCLCVMIAASIYTDRREDIHDKNAKFYPVTREGSYGYSYILAWVAFACTFISGMMYLILRKRK

SEQ ID NO: 759881 - protein, 237 aa, Homo sapiens; identical to SEQ ID NO: 759876

SEQ ID NO: 759882 - protein, 237 aa, Homo sapiens; identical to SEQ ID NO: 759876

SEQ ID NO: 759883 - protein, 237 aa, Homo sapiens; identical to SEQ ID NO: 759876

SEQ ID NO: 759884 - protein, 237 aa, Homo sapiens; identical to SEQ ID NO: 759876

SEQ ID NO: 759885 - protein, 237 aa, Homo sapiens; identical to SEQ ID NO: 759876

SEQ ID NO: 759886 - protein, 237 aa, Homo sapiens; identical to SEQ ID NO: 759876

SEQ ID NO: 759887 - protein, 237 aa, Homo sapiens; identical to SEQ ID NO: 759876

SEQ ID NO: 759888 - protein, 237 aa, Homo sapiens; identical to SEQ ID NO: 759876

SEQ ID NO: 759889 - protein, 237 aa, Homo sapiens; identical to SEQ ID NO: 759876

SEQ ID NO: 759890 - protein, 237 aa, Homo sapiens; identical to SEQ ID NO: 759876

SEQ ID NO: 759891 - protein, 237 aa, Homo sapiens; identical to SEQ ID NO: 759876

SEQ ID NO: 759892 - protein, 237 aa, Homo sapiens; identical to SEQ ID NO: 759876

SEQ ID NO: 759893 - protein, 108 aa, Homo sapiens
MDCRGFHYASCLNTGLRGTGLRHYPVYKGRLNMKASTITSSHRSIIATTQRKLPFGNIHHLYKCYPHLTPPEPSLLPLTSIFSEAGSQQKGLIPFIGRGEESSTETPF

SEQ ID NO: 759894 - protein, 55 aa, Homo sapiens
RRCRYPLRAPGKPTAFPLLPAPALPALGPLSQVQRYHHPSCEAAINTHISLELHA

SEQ ID NO: 759895 - protein, 1872 aa, Homo sapiens
MGLCGLLERCWLHHDPDGVLTLNAENTNYAYQVPNFHKCEICLLSFPKESQFQRHMRDHERNDKPHRCDQCPQTFNVEFNLTLHKCTHSGEDPTCPVCNKKFSRVASLKAHIMLHEKEENLICSECGDEFTLQSQLAVHMEEHRQELAGTRQHACKACKKEFETSSELKEHMKTHYKIRVSSTRSYNRNIDRSGFTYSCPHCGKTFQKPSQLTRHIRIHTGERPFKCSECGKAFNQKGALQTHMIKHTGEKPHACAFCPAAFSQKGNLQSHVQRVHSEVKNGPTYNCTECSCVFKSLGSLNTHISKMHMGGPQNSTSSTETAHVLTATLFQTLPLQQTEAQATSASSQPSSQAVSDVIQQLLELSEPAPVESGQSPQPGQQLSITVGINQDILQQALENSGLSSIPAAAHPNDSCHAKTSAPHAQNPDVSSVSNEQTDPTDAEQEKEQESPEKLDKKEKKMIKKKSPFLPGSIREENGVRWHVCPYCAKEFRKPSDLVRHIRIHTHEKPFKCPQCFRAFAVKSTLTAHIKTHTGIKAFKCQYCMKSFSTSGSLKVHIRLHTGVRPFACPHCDKKFRTSGHRKTHIASHFKHTELRKMRHQRKPAKVRVGKTNVPVPDIPLQEPILITDLGLIQPIPKNQFFQSYFNNNFVNEADRPYKCFYCHRAYKKSCHLKQHIRSHTGEKPFKCSQCGRGFVSAGVLKAHIRTHTGLKSFKCLICNGAFTTGGSLRRHMGIHNDLRPYMCPYCQKTFKTSLNCKKHMKTHRYELAQQLQQHQQAASIDDSTVDQQSMQASTQMQVEIESDELPQTAEVVAANPEAMLDLEPQHVVGTEEAGLGQQLADQPLEADEDGFVAPQDPLRGHVDQFEEQSPAQQSFEPAGLPQGFTVTDTYHQQPQFPPVQQLQDSSTLESQALSTSFHQQSLLQAPSSDGMNVTTRLIQESSQEELDLQAQGSQFLEDNEDQSRRSYRCDYCNKGFKKSSHLKQHVRSHTGEKPYKCKLCGRGFVSSGVLKSHEKTHTGVKAFSCSVCNASFTTNGSLTRHMATHMSMKPYKCPFCEEGFRTTVHCKKHMKRHQTVPSAVSATGETEGGDICMEEEEEHSDRNASRKSRPEVITFTEEETAQLAKIRPQESATVSEKVLVQSAAEKDRISELRDKQAELQDEPKHANCCTYCPKSFKKPSDLVRHVRIHTGEKPYKCDECGKSFTVKSTLDCHVKTHTGQKLFSCHVCSNAFSTKGSLKVHMRLHTGAKPFKCPHCELRFRTSGRRKTHMQFHYKPDPKKARKPMTRSSSEGLQPVNLLNSSSTDPNVFIMNNSVLTGQFDQNLLQPGLVGQAILPASVSAGGDLTVSLTDGSLATLEGIQLQLAANLVGPNVQISGIDAASINNITLQIDPSILQQTLQQGNLLAQQLTGEPGLAPQNSSLQTSDSTVPASVVIQPISGLSLQPTVTSANLTIGPLSEQDSVLTTNSSGTQDLTQVMTSQGLVSPSGGPHEITLTINNSSLSQVLAQAAGPTATSSSGSPQEITLTISGSRSVQHSVGPQECGSVEALYLENSSTKLNTTSGSLPSTTPTSPSAISTQNLVMSSSGVGGDASVTLTLADTQGMLSGGLDTVTLNITSQGQQFPALLTDPSLSGQGGAGSPQVILVSHTPQSASAACEEIAYQVAGVSGNLAPGNQPEKEGRAHQCLECDRAFSSAAVLMHHSKEVHGRERIHGCPVCRKAFKRATHLKEHMQTHQAGPSLSSQKPRVFKCDTCEKAFAKPSQLERHSRIHTGERPFHCTLCEKAFNQKSALQVHMKKHTGERPYKCAYCVMGFTQKSNMKLHMKRAHSYAGALQESAGHPEQDGEELSRTLHLEEVVQEAAGEWQALTHVF

SEQ ID NO: 759896 - protein, 1845 aa, Homo sapiens
MRITTGIYCLYLCNFIDGVLTLNAENTNYAYQVPNFHKCEICLLSFPKESQFQRHMRDHERNDKPHRCDQCPQTFNVEFNLTLHKCTHSGEDPTCPVCNKKFSRVASLKAHIMLHEKEENLICSECGDEFTLQSQLAVHMEEHRQELAGTRQHACKACKKEFETSSELKEHMKTHYKIRVSSTRSYNRNIDRSGFTYSCPHCGKTFQKPSQLTRHIRIHTGERPFKCSECGKAFNQKGALQTHMIKHTGEKPHACAFCPAAFSQKGNLQSHVQRVHSEVKNGPTYNCTECSCVFKSLGSLNTHISKMHMGGPQNSTSSTETAHVLTATLFQTLPLQQTEAQATSASSQPSSQAVSDVIQQLLELSEPAPVESGQSPQPGQQLSITVGINQDILQQALENSGLSSIPAAAHPNDSCHAKTSAPHAQNPDVSSVSNEQTDPTDAEQEKEQESPEKLDKKEKKMIKKKSPFLPGSIREENGVRWHVCPYCAKEFRKPSDLVRHIRIHTHEKPFKCPQCFRAFAVKSTLTAHIKTHTGIKAFKCQYCMKSFSTSGSLKVHIRLHTGVRPFACPHCDKKFRTSGHRKTHIASHFKHTELRKMRHQRKPAKVRVGKTNVPVPDIPLQEPILITDLGLIQPIPKNQFFQSYFNNNFVNEADRPYKCFYCHRAYKKSCHLKQHIRSHTGEKPFKCSQCGRGFVSAGVLKAHIRTHTGLKSFKCLICNGAFTTGGSLRRHMGIHNDLRPYMCPYCQKTFKTSLNCKKHMKTHRYELAQQLQQHQQAASIDDSTVDQQSMQASTQMQVEIESDELPQTAEVVAANPEAMLDLEPQHVVGTEEAGLGQQLADQPLEADEDGFVAPQDPLRGHVDQFEEQSPAQQSFEPAGLPQGFTVTDTYHQQPQFPPVQQLQDSSTLESQALSTSFHQQSLLQAPSSDGMNVTTRLIQESSQEELDLQAQGSQFLEDNEDQSRRSYRCDYCNKGFKKSSHLKQHVRSHTGEKPYKCKLCGRGFVSSGVLKSHEKTHTGVKAFSCSVCNASFTTNGSLTRHMATHMSMKPYKCPFCEEGFRTTVHCKKHMKRHQTVPSAVSATGETEGGDICMEEEEEHSDRNASRKSRPEVITFTEEETAQLAKIRPQESATVSEKVLVQSAAEKDRISELRDKQAELQDEPKHANCCTYCPKSFKKPSDLVRHVRIHTGEKPYKCDECGKSFTVKSTLDCHVKTHTGQKLFSCHVCSNAFSTKGSLKVHMRLHTGAKPFKCPHCELRFRTSGRRKTHMQFHYKPDPKKARKPMTRSSSEGLQPVNLLNSSSTDPNVFIMNNSVLTGQFDQNLLQPGLVGQAILPASVSAGGDLTVSLTDGSLATLEGIQLQLAANLVGPNVQISGIDAASINNITLQIDPSILQQTLQQGNLLAQQLTGEPGLAPQNSSLQTSDSTVPASVVIQPISGLSLQPTVTSANLTIGPLSEQDSVLTTNSSGTQDLTQVMTSQGLVSPSGGPHEITLTINNSSLSQVLAQAAGPTATSSSGSPQEITLTISELNTTSGSLPSTTPTSPSAISTQNLVMSSSGVGGDASVTLTLADTQGMLSGGLDTVTLNITSQGQQFPALLTDPSLSGQGGAGSPQVILVSHTPQSASAACEEIAYQVAGVSGNLAPGNQPEKEGRAHQCLECDRAFSSAAVLMHHSKEVHGRERIHGCPVCRKAFKRATHLKEHMQTHQAGPSLSSQKPRVFKCDTCEKAFAKPSQLERHSRIHTGERPFHCTLCEKAFNQKSALQVHMKKHTGERPYKCAYCVMGFTQKSNMKLHMKRAHSYAGALQESAGHPEQDGEELSRTLHLEEVVQEAAGEWQALTHVF

SEQ ID NO: 759897 - protein, 1854 aa, Homo sapiens
MRITTGIYCLYLCNFIDGVLTLNAENTNYAYQVPNFHKCEICLLSFPKESQFQRHMRDHERNDKPHRCDQCPQTFNVEFNLTLHKCTHSGEDPTCPVCNKKFSRVASLKAHIMLHEKEENLICSECGDEFTLQSQLAVHMEEHRQELAGTRQHACKACKKEFETSSELKEHMKTHYKIRVSSTRSYNRNIDRSGFTYSCPHCGKTFQKPSQLTRHIRIHTGERPFKCSECGKAFNQKGALQTHMIKHTGEKPHACAFCPAAFSQKGNLQSHVQRVHSEVKNGPTYNCTECSCVFKSLGSLNTHISKMHMGGPQNSTSSTETAHVLTATLFQTLPLQQTEAQATSASSQPSSQAVSDVIQQLLELSEPAPVESGQSPQPGQQLSITVGINQDILQQALENSGLSSIPAAAHPNDSCHAKTSAPHAQNPDVSSVSNEQTDPTDAEQEKEQESPEKLDKKEKKMIKKKSPFLPGSIREENGVRWHVCPYCAKEFRKPSDLVRHIRIHTHEKPFKCPQCFRAFAVKSTLTAHIKTHTGIKAFKCQYCMKSFSTSGSLKVHIRLHTGVRPFACPHCDKKFRTSGHRKTHIASHFKHTELRKMRHQRKPAKVRVGKTNVPVPDIPLQEPILITDLGLIQPIPKNQFFQSYFNNNFVNEADRPYKCFYCHRAYKKSCHLKQHIRSHTGEKPFKCSQCGRGFVSAGVLKAHIRTHTGLKSFKCLICNGAFTTGGSLRRHMGIHNDLRPYMCPYCQKTFKTSLNCKKHMKTHRYELAQQLQQHQQAASIDDSTVDQQSMQASTQMQVEIESDELPQTAEVVAANPEAMLDLEPQHVVGTEEAGLGQQLADQPLEADEDGFVAPQDPLRGHVDQFEEQSPAQQSFEPAGLPQGFTVTDTYHQQPQFPPVQQLQDSSTLESQALSTSFHQQSLLQAPSSDGMNVTTRLIQESSQEELDLQAQGSQFLEDNEDQSRRSYRCDYCNKGFKKSSHLKQHVRSHTGEKPYKCKLCGRGFVSSGVLKSHEKTHTGVKAFSCSVCNASFTTNGSLTRHMATHMSMKPYKCPFCEEGFRTTVHCKKHMKRHQTVPSAVSATGETEGGDICMEEEEEHSDRNASRKSRPEVITFTEEETAQLAKIRPQESATVSEKVLVQSAAEKDRISELRDKQAELQDEPKHANCCTYCPKSFKKPSDLVRHVRIHTGEKPYKCDECGKSFTVKSTLDCHVKTHTGQKLFSCHVCSNAFSTKGSLKVHMRLHTGAKPFKCPHCELRFRTSGRRKTHMQFHYKPDPKKARKPMTRSSSEGLQPVNLLNSSSTDPNVFIMNNSVLTGQFDQNLLQPGLVGQAILPASVSAGGDLTVSLTDGSLATLEGIQLQLAANLVGPNVQISGIDAASINNITLQIDPSILQQTLQQGNLLAQQLTGEPGLAPQNSSLQTSDSTVPASVVIQPISGLSLQPTVTSANLTIGPLSEQDSVLTTNSSGTQDLTQVMTSQGLVSPSGGPHEITLTINNSSLSQVLAQAAGPTATSSSGSPQEITLTISELNTTSGSLPSTTPTSPSAISTQNLVMSSSGVGGDASVTLTLADTQGMLSGGLDTVTLNITSQGQQFPALLTDPSLSGQGGAGSPQVILVSHTPQSASAACEEIAYQVAGVSGNLAPGNQPEKEGRAHQCLECDRAFSSAAVLMHHSKEVHGRERIHGCPVCRKAFKRATHLKEHMQTHQAGPSLSSQKPRVFKCDTCEKAFAKPSQLERHSRIHTGERPFHCTLCEKAFNQKSALQVHMKKHTGERPYKCAYCVMGFTQKSNMKLHMKRAHSYAGGCRRVAGPHPRLLMRVGSTPLRMFLKLRFVKSKALGISVLKLQVLKMLQ

SEQ ID NO: 759898 - protein, 1602 aa, Homo sapiens
MIKHTGEKPHACAFCPAAFSQKGNLQSHVQRVHSEVKNGPTYNCTECSCVFKSLGSLNTHISKMHMGGPQNSTSSTETAHVLTATLFQTLPLQQTEAQATSASSQPSSQAVSDVIQQLLELSEPAPVESGQSPQPGQQLSITVGINQDILQQALENSGLSSIPAAAHPNDSCHAKTSAPHAQNPDVSSVSNEQTDPTDAEQEKEQESPEKLDKKEKKMIKKKSPFLPGSIREENGVRWHVCPYCAKEFRKPSDLVRHIRIHTHEKPFKCPQCFRAFAVKSTLTAHIKTHTGIKAFKCQYCMKSFSTSGSLKVHIRLHTGVRPFACPHCDKKFRTSGHRKTHIASHFKHTELRKMRHQRKPAKVRVGKTNVPVPDIPLQEPILITDLGLIQPIPKNQFFQSYFNNNFVNEADRPYKCFYCHRAYKKSCHLKQHIRSHTGEKPFKCSQCGRGFVSAGVLKAHIRTHTGLKSFKCLICNGAFTTGGSLRRHMGIHNDLRPYMCPYCQKTFKTSLNCKKHMKTHRYELAQQLQQHQQAASIDDSTVDQQSMQASTQMQVEIESDELPQTAEVVAANPEAMLDLEPQHVVGTEEAGLGQQLADQPLEADEDGFVAPQDPLRGHVDQFEEQSPAQQSFEPAGLPQGFTVTDTYHQQPQFPPVQQLQDSSTLESQALSTSFHQQSLLQAPSSDGMNVTTRLIQESSQEELDLQAQGSQFLEDNEDQSRRSYRCDYCNKGFKKSSHLKQHVRSHTGEKPYKCKLCGRGFVSSGVLKSHEKTHTGVKAFSCSVCNASFTTNGSLTRHMATHMSMKPYKCPFCEEGFRTTVHCKKHMKRHQTVPSAVSATGETEGGDICMEEEEEHSDRNASRKSRPEVITFTEEETAQLAKIRPQESATVSEKVLVQSAAEKDRISELRDKQAELQDEPKHANCCTYCPKSFKKPSDLVRHVRIHTGEKPYKCDECGKSFTVKSTLDCHVKTHTGQKLFSCHVCSNAFSTKGSLKVHMRLHTGAKPFKCPHCELRFRTSGRRKTHMQFHYKPDPKKARKPMTRSSSEGLQPVNLLNSSSTDPNVFIMNNSVLTGQFDQNLLQPGLVGQAILPASVSAGGDLTVSLTDGSLATLEGIQLQLAANLVGPNVQISGIDAASINNITLQIDPSILQQTLQQGNLLAQQLTGEPGLAPQNSSLQTSDSTVPASVVIQPISGLSLQPTVTSANLTIGPLSEQDSVLTTNSSGTQDLTQVMTSQGLVSPSGGPHEITLTINNSSLSQVLAQAAGPTATSSSGSPQEITLTISELNTTSGSLPSTTPTSPSAISTQNLVMSSSGVGGDASVTLTLADTQGMLSGGLDTVTLNITSQGQQFPALLTDPSLSGQGGAGSPQVILVSHTPQSASAACEEIAYQVAGVSGNLAPGNQPEKEGRAHQCLECDRAFSSAAVLMHHSKEVHGRERIHGCPVCRKAFKRATHLKEHMQTHQAGPSLSSQKPRVFKCDTCEKAFAKPSQLERHSRIHTGERPFHCTLCEKAFNQKSALQVHMKKHTGERPYKCAYCVMGFTQKSNMKLHMKRAHSYAGALQESAGHPEQDGEELSRTLHLEEVVQEAAGEWQALTHVF

SEQ ID NO: 759899 - protein, 1600 aa, Homo sapiens
GLCSVAVASPCTASLASFAHFSLTCKSFSILLEFFVILGAYPLSDFRVTTVFSPLAARPSVNSGASCQNSTSSTETAHVLTATLFQTLPLQQTEAQATSASSQPSSQAVSDVIQQLLELSEPAPVESGQSPQPGQQLSITVGINQDILQQALENSGLSSIPAAAHPNDSCHAKTSAPHAQNPDVSSVSNEQTDPTDAEQEKEQESPEKLDKKEKKMIKKKSPFLPGSIREENGVRWHVCPYCAKEFRKPSDLVRHIRIHTHEKPFKCPQCFRAFAVKSTLTAHIKTHTGIKAFKCQYCMKSFSTSGSLKVHIRLHTGVRPFACPHCDKKFRTSGHRKTHIASHFKHTELRKMRHQRKPAKVRVGKTNVPVPDIPLQEPILITDLGLIQPIPKNQFFQSYFNNNFVNEADRPYKCFYCHRAYKKSCHLKQHIRSHTGEKPFKCSQCGRGFVSAGVLKAHIRTHTGLKSFKCLICNGAFTTGGSLRRHMGIHNDLRPYMCPYCQKTFKTSLNCKKHMKTHRYELAQQLQQHQQAASIDDSTVDQQSMQASTQMQVEIESDELPQTAEVVAANPEAMLDLEPQHVVGTEEAGLGQQLADQPLEADEDGFVAPQDPLRGHVDQFEEQSPAQQSFEPAGLPQGFTVTDTYHQQPQFPPVQQLQDSSTLESQALSTSFHQQSLLQAPSSDGMNVTTRLIQESSQEELDLQAQGSQFLEDNEDQSRRSYRCDYCNKGFKKSSHLKQHVRSHTGEKPYKCKLCGRGFVSSGVLKSHEKTHTGVKAFSCSVCNASFTTNGSLTRHMATHMSMKPYKCPFCEEGFRTTVHCKKHMKRHQTVPSAVSATGETEGGDICMEEEEEHSDRNASRKSRPEVITFTEEETAQLAKIRPQESATVSEKVLVQSAAEKDRISELRDKQAELQDEPKHANCCTYCPKSFKKPSDLVRHVRIHTGEKPYKCDECGKSFTVKSTLDCHVKTHTGQKLFSCHVCSNAFSTKGSLKVHMRLHTGAKPFKCPHCELRFRTSGRRKTHMQFHYKPDPKKARKPMTRSSSEGLQPVNLLNSSSTDPNVFIMNNSVLTGQFDQNLLQPGLVGQAILPASVSAGGDLTVSLTDGSLATLEGIQLQLAANLVGPNVQISGIDAASINNITLQIDPSILQQTLQQGNLLAQQLTGEPGLAPQNSSLQTSDSTVPASVVIQPISGLSLQPTVTSANLTIGPLSEQDSVLTTNSSGTQDLTQVMTSQGLVSPSGGPHEITLTINNSSLSQVLAQAAGPTATSSSGSPQEITLTISELNTTSGSLPSTTPTSPSAISTQNLVMSSSGVGGDASVTLTLADTQGMLSGGLDTVTLNITSQGQQFPALLTDPSLSGQGGAGSPQVILVSHTPQSASAACEEIAYQVAGVSGNLAPGNQPEKEGRAHQCLECDRAFSSAAVLMHHSKEVHGRERIHGCPVCRKAFKRATHLKEHMQTHQAGPSLSSQKPRVFKCDTCEKAFAKPSQLERHSRIHTGERPFHCTLCEKAFNQKSALQVHMKKHTGERPYKCAYCVMGFTQKSNMKLHMKRAHSYAGALQESAGHPEQDGEELSRTLHLEEVVQEAAGEWQALTHVF

SEQ ID NO: 759900 - protein, 1038 aa, Homo sapiens
MRITTGIYCLYLCNFIDGVLTLNAENTNYAYQVPNFHKCEICLLSFPKESQFQRHMRDHERNDKPHRCDQCPQTFNVEFNLTLHKCTHSGEDPTCPVCNKKFSRVASLKAHIMLHEKEENLICSECGDEFTLQSQLAVHMEEHRQELAGTRQHACKACKKEFETSSELKEHMKTHYKIRVSSTRSYNRNIDRSGFTYSCPHCGKTFQKPSQLTRHIRIHTGERPFKCSECGKAFNQKGALQTHMIKHTGEKPHACAFCPAAFSQKGNLQSHVQRVHSEVKNGPTYNCTECSCVFKSLGSLNTHISKMHMGGPQNSTSSTETAHVLTATLFQTLPLQQTEAQATSASSQPSSQAVSDVIQQLLELSEPAPVESGQSPQPGQQLSITVGINQDILQQALENSGLSSIPAAAHPNDSCHAKTSAPHAQNPDVSSVSNEQTDPTDAEQEKEQESPEKLDKKEKKMIKKKSPFLPGSIREENGVRWHVCPYCAKEFRKPSDLVRHIRIHTHEKPFKCPQCFRAFAVKSTLTAHIKTHTGIKAFKCQYCMKSFSTSGSLKVHIRLHTGVRPFACPHCDKKFRTSGHRKTHIASHFKHTELRKMRHQRKPAKVRVGKTNVPVPDIPLQEPILITDLGLIQPIPKNQFFQSYFNNNFVNEADRPYKCFYCHRAYKKSCHLKQHIRSHTGEKPFKCSQCGRGFVSAGVLKAHIRTHTGLKSFKCLICNGAFTTGGSLRRHMGIHNDLRPYMCPYCQKTFKTSLNCKKHMKTHRYELAQQLQQHQQAASIDDSTVDQQSMQASTQMQVEIESDELPQTAEVVAANPEAMLDLEPQHVVGTEEAGLGQQLADQPLEADEDGFVAPQDPLRGHVDQFEEQSPAQQSFEPAGLPQGFTVTDTYHQQPQFPPVQQLQDSSTLESQALSTSFHQQSLLQAPSSDGMNVTTRLIQESSQEELDLQAQGSQFLEDNEDQSRRSYRCDYCNKGFKKSSHLKQHVRSHTGEKPYKCKLCGRGFVSSGVLKSHEKTHTGYNDDDVQITEDTINDIQTS

SEQ ID NO: 759901 - protein, 592 aa, Homo sapiens
MRITTGIYCLYLCNFIDGVLTLNAENTNYAYQVPNFHKCEICLLSFPKESQFQRHMRDHERNDKPHRCDQCPQTFNVEFNLTLHKCTHSGEDPTCPVCNKKFSRVASLKAHIMLHEKEENLICSECGDEFTLQSQLAVHMEEHRQELAGTRQHACKACKKEFETSSELKEHMKTHYKIRVSSTRSYNRNIDRSGFTYSCPHCGKTFQKPSQLTRHIRIHTGERPFKCSECGKAFNQKGALQTHMIKHTGEKPHACAFCPAAFSQKGNLQSHVQRVHSEVKNGPTYNCTECSCVFKSLGSLNTHISKMHMGGPQNSTSSTETAHVLTATLFQTLPLQQTEAQATSASSQPSSQAVSDVIQQLLELSEPAPVESGQSPQPGQQLSITVGINQDILQQALENSGLSSIPAAAHPNDSCHAKTSAPHAQNPDVSSVSNEQTDPTDAEQEKEQESPEKLDKKEKKMIKKKSPFLPGSIREENGVRWHVCPYCAKEFRKPSDLVRHIRIHTHEKPFKCPQCFRAFAVKSTLTAHIKTHTGIKAFKCQYCMKSFSTSGSLKVHIRLHTGMASGLGPHGHWPRGPHTLLRTYTKHRYGTQ

SEQ ID NO: 759902 - protein, 218 aa, Homo sapiens
MIKHTGEKPHACAFCPAAFSQKGNLQSHVQRVHSEVKNGPTYNCTECSCVFKSLGSLNTHISKMHMGGPQNSTSSTETAHVLTATLFQTLPLQQTEAQATSASSQPSSQAVSDVIQQLLELSEPAPVESGQSPQPGQQLSITVGINQDILQLQHILMTPAMPRPLHHTLKTQMFPAFQMSRRTPQTQSKKKNRKARRNWIKIESPFLPGSIREENVCV

SEQ ID NO: 759903 - protein, 1845 aa, Homo sapiens [sequence omitted]

SEQ ID NO: 759904 - protein, 1845 aa, Homo sapiens; identical to SEQ ID NO: 759896

SEQ ID NO: 759905 - protein, 1590 aa, Homo sapiens
MIKHTGEKPHACAFCPAAFSQKGNLQSHVQRVHSEVKNGPTYNCTECSCVFKSLGSLNTHISKMHMGGPQNSTSSTETAHVLTATLFQTLPLQQTEAQATSASSQPSSQAVSDVIQQLLELSEPAPVESGQSPQPGQQLSITVGINQDILQLQHILMTPAMPRPLHHTLKTQMFPAFQMSRRTPQTQSKKKNRKARRNWIKKKKKMIKKKSPFLPGSIREENGVRWHVCPYCAKEFRKPSDLVRHIRIHTHEKPFKCPQCFRAFAVKSTLTAHIKTHTGIKAFKCQYCMKSFSTSGSLKVHIRLHTGVRPFACPHCDKKFRTSGHRKTHIASHFKHTELRKMRHQRKPAKVRVGKTNVPVPDIPLQEPILITDLGLIQPIPKNQFFQSYFNNNFVNEADRPYKCFYCHRAYKKSCHLKQHIRSHTGEKPFKCSQCGRGFVSAGVLKAHIRTHTGLKSFKCLICNGAFTTGGSLRRHMGIHNDLRPYMCPYCQKTFKTSLNCKKHMKTHRYELAQQLQQHQQAASIDDSTVDQQSMQASTQMQVEIESDELPQTAEVVAANPEAMLDLEPQHVVGTEEAGLGQQLADQPLEADEDGFVAPQDPLRGHVDQFEEQSPAQQSFEPAGLPQGFTVTDTYHQQPQFPPVQQLQDSSTLESQALSTSFHQQSLLQAPSSDGMNVTTRLIQESSQEELDLQAQGSQFLEDNEDQSRRSYRCDYCNKGFKKSSHLKQHVRSHTGEKPYKCKLCGRGFVSSGVLKSHEKTHTGVKAFSCSVCNASFTTNGSLTRHMATHMSMKPYKCPFCEEGFRTTVHCKKHMKRHQTVPSAVSATGETEGGDICMEEEEEHSDRNASRKSRPEVITFTEEETAQLAKIRPQESATVSEKVLVQSAAEKDRISELRDKQAELQDEPKHANCCTYCPKSFKKPSDLVRHVRIHTGEKPYKCDECGKSFTVKSTLDCHVKTHTGQKLFSCHVCSNAFSTKGSLKVHMRLHTGAKPFKCPHCELRFRTSGRRKTHMQFHYKPDPKKARKPMTRSSSEGLQPVNLLNSSSTDPNVFIMNNSVLTGQFDQNLLQPGLVGQAILPASVSAGGDLTVSLTDGSLATLEGIQLQLAANLVGPNVQISGIDAASINNITLQIDPSILQQTLQQGNLLAQQLTGEPGLAPQNSSLQTSDSTVPASVVIQPISGLSLQPTVTSANLTIGPLSEQDSVLTTNSSGTQDLTQVMTSQGLVSPSGGPHEITLTINNSSLSQVLAQAAGPTATSSSGSPQEITLTISELNTTSGSLPSTTPTSPSAISTQNLVMSSSGVGGDASVTLTLADTQGMLSGGLDTVTLNITSQGQQFPALLTDPSLSGQGGAGSPQVILVSHTPQSASAACEEIAYQVAGVSGNLAPGNQPEKEGRAHQCLECDRAFSSAAVLMHHSKEVHGRERIHGCPVCRKAFKRATHLKEHMQTHQAGPSLSSQKPRVFKCDTCEKAFAKPSQLERHSRIHTGERPFHCTLCEKAFNQKSALQVHMKKHTGERPYKCAYCVMGFTQKSNMKLHMKRAHSYAGALQESAGHPEQDGEELSRTLHLEEVVQEAAGEWQALTHVF

SEQ ID NO: 759906 - protein, 972 aa, Homo sapiens
MRITTGIYCLYLCNFIDGVLTLNAENTNYAYQVPNFHKCEICLLSFPKESQFQRHMRDHERNDKPHRCDQCPQTFNVEFNLTLHKCTHSGEDPTCPVCNKKFSRVASLKAHIMLHEKEENLICSECGDEFTLQSQLAVHMEEHRQELAGTRQHACKACKKEFETSSELKEHMKTHYKIRVSSTRSYNRNIDRSGFTYSCPHCGKTFQKPSQLTRHIRIHTGERPFKCSECGKAFNQKGALQTHMIKHTGEKPHACAFCPAAFSQKGNLQSHVQRVHSEVKNGPTYNCTECSCVFKSLGSLNTHISKMHMGGPQNSTSSTETAHVLTATLFQTLPLQQTEAQATSASSQPSSQAVSDVIQQLLELSEPAPVESGQSPQPGQQLSITVGINQDILQQALENSGLSSIPAAAHPNDSCHAKTSAPHAQNPDVSSVSNEQTDPTDAEQEKEQESPEKLDKKEKKMIKKKSPFLPGSIREENGVRWHVCPYCAKEFRKPSDLVRHIRIHTHEKPFKCPQCFRAFAVKSTLTAHIKTHTGIKAFKCQYCMKSFSTSGSLKVHIRLHTGVRPFACPHCDKKFRTSGHRKTHIASHFKHTELRKMRHQRKPAKVRVGKTNVPVPDIPLQEPILITDLGLIQPIPKNQFFQSYFNNNFVNEADRPYKCFYCHRAYKKSCHLKQHIRSHTGEKPFKCSQCGRGFVSAGVLKAHIRTHTGLKSFKCLICNGAFTTGGSLRRHMGIHNDLRPYMCPYCQKTFKTSLNCKKHMKTHRYELAQQLQQHQQAASIDDSTVDQQSMQASTQMQVEIESDELPQTAEVVAANPEAMLDLEPQHVVGTEEAGLGQQLADQPLEADEDGFVAPQDPLRGHVDQFEEQSPAQQSFEPAGLPQGFTVTDTYHQQPQFPPVQQLQDSSTLESQALSTSFHQQSLLQAPSSDGMNVVSMDRGVHTWQYLAGAMLFFTVIIKNFLKGNFKRHAHFL

SEQ ID NO: 759907 - protein, 638 aa, Homo sapiens
MRITTGIYCLYLCNFIDGVLTLNAENTNYAYQVPNFHKCEICLLSFPKESQFQRHMRDHERNDKPHRCDQCPQTFNVEFNLTLHKCTHSGEDPTCPVCNKKFSRVASLKAHIMLHEKEENLICSECGDEFTLQSQLAVHMEEHRQELAGTRQHACKACKKEFETSSELKEHMKTHYKIRVSSTRSYNRNIDRSGFTYSCPHCGKTFQKPSQLTRHIRIHTGERPFKCSECGKAFNQKGALQTHMIKHTGEKPHACAFCPAAFSQKGNLQSHVQRVHSEVKNGPTYNCTECSCVFKSLGSLNTHISKMHMGGPQNSTSSTETAHVLTATLFQTLPLQQTEAQATSASSQPSSQAVSDVIQQLLELSEPAPVESGQSPQPGQQLSITVGINQDILQQALENSGLSSIPAAAHPNDSCHAKTSAPHAQNPDVSSVSNEQTDPTDAEQEKEQESPEKLDKKEKKMIKKKSPFLPGSIREENGVRWHVCPYCAKEFRKPSDLVRHIRIHTHEKPFKCPQCFRAFAVKSTLTAHIKTHTGIKAFKCQYCMKSFSTSGSLKVHIRLHTGVRPFACPHCDKKFRTSGHRKTHIASHFKHTELRKMRHQRKPAKVRVGKTNVPVPDIPLQEPILITDLGKMDCRASL

SEQ ID NO: 759908 - protein, 61 aa, Homo sapiens
TQASHSSGIFPTTRNPEALDLEKNMKERCQEVQSGLLMMINGGSVSWWTWETGQINCCHLL

SEQ ID NO: 759909 - protein, 358 aa, Homo sapiens
MAEQIIQEIYSQIQSKKKILATPPQEDAPSVDIANIRMPSLPSYKVGDKIATRKAYGQALAKLGHASDRIIALDGDTKNSTFSEIFKKEHPDRFIECYIAEQNMVSIAVGCATRNRTVPFCSTFAAFFTRAFDQIRMAAISESNINLCGSHCGVSIGEDGPSQMALEDLAMFRSVPTSTVFYPSDGVATEKAVELAANTKGICFIRTSRPENAIIYNNNEDFQVGQAKVVLKSKDDQVTVIGAGVTLHEALAAAELLKKEKINIRVLDPFTIKPLDRKLILDSARATKGRILTVEDHYYEGGIGEAVSSAVVGEPGITVTHLAVNRVPRSGKPAELLKMFGIDRDAIAQAVRGLITKA

SEQ ID NO: 759910 - protein, 210 aa, Homo sapiens
GRVGRPTRREDGPSQMALEDLAMFRSVPTSTVFYPSDGVATEKAVELAANTKGICFIRTSRPENAIIYNNNEDFQVGQAKVVLKSKDDQVTVIGAGVTLHEALAAAELLKKEKINIRVLDPFTIKPLDRKLILDSARATKGRILTVEDHYYEGGIGEAVSSAVVGEPGITVTHLAVNRVPRSGKPAELLKMFGIDRDAIAQAVRGLITKA

SEQ ID NO: 759911 - protein, 318 aa, Homo sapiens
MESYHKPDQQKLQALKDTANRLRISSIQATTAAGSGHPTSCCSAAEIMAVLFFHTMRYKSQDPRNPHNDRFVLSKGHAAPILYAVWAEAGFLAEAELLNLRKISSDLDGHPVPKQAFTDVATGSLGQGLGAACGMAYTGKYFDKASYRVYCLLGDGELSEGSVWEAMAFASIYKLDNLVAILDINRLGQSDPAPLQHQMDIYQKRCEAFGWHAIIVDGHSVEELCKAFGPGPSTSQQPSLPRPSRAEGSRGRRQESGWKPPKNGGRHQGISRSEKESAPPGASGSTSVPPPQWTNPGAGDMAKRCRGALRKRRKRKAE

SEQ ID NO: 759912 - protein, 146 aa, Homo sapiens
  misc_feature (16)..(16): Xaa can be any naturally occurring amino acid
QKAFFIPHEASRWPTXVVLKSKDDQVTVIGAGVTLHEALAAAELLKKEKINIRVLDPFTIKPLDRKLILDSARATKGRILTVEDHYYEGGIGEAVSSAVVGEPGITVTHLAVNRVPRSGKPAELLKMFGIDRDAIAQAVRGLITKA

SEQ ID NO: 759913 - protein, 150 aa, Homo sapiens
REGTRMKNDAVLELNKKWVLEEQEIIQVNRYRGKRVNTAKGSWADAEAAKEKKINIRVLDPFTIKPLDRKLILDSARATKGRILTVEDHYYEGGIGEAVSSAVVGEPGITVTHLAVNRVPRSGKPAELLKMFGIDRDAIAQAVRGLITKA

SEQ ID NO: 759914 - protein, 142 aa, Homo sapiens
AAELLKKEKINSGQGLVQGHPSPDNGHLVILAEALAAAELLKKEKINIRVLDPFTIKPLDRKLILDSARATKGRILTVEDHYYEGGIGEAVSSAVVGEPGITVTHLAVNRVPRSGKPAELLKMFGIDRDAIAQAVRGLITKA

SEQ ID NO: 759915 - protein, 358 aa, Homo sapiens; identical to SEQ ID NO: 759909

SEQ ID NO: 759916 - protein, 358 aa, Homo sapiens; identical to SEQ ID NO: 759909

SEQ ID NO: 759917 - protein, 358 aa, Homo sapiens; identical to SEQ ID NO: 759909

SEQ ID NO: 759918 - protein, 358 aa, Homo sapiens; identical to SEQ ID NO: 759909

SEQ ID NO: 759919 - protein, 358 aa, Homo sapiens; identical to SEQ ID NO: 759909

SEQ ID NO: 759920 - protein, 358 aa, Homo sapiens; identical to SEQ ID NO: 759909

SEQ ID NO: 759921 - protein, 358 aa, Homo sapiens; identical to SEQ ID NO: 759909

SEQ ID NO: 759922 - protein, 358 aa, Homo sapiens; identical to SEQ ID NO: 759909

SEQ ID NO: 759923 - protein, 317 aa, Homo sapiens
MAEQIIQEIYSQIQSKKKILATPPQEDAPSVDIANIRMPSLPSYKVGDKIATRKAYGQALAKLGHASDRIIALDGDTKNSTFSEIFKKEHPDRFIECYIAEQNMVSIAVGCATRNRTVPFCSTFAAFFTRAFDQIRMAAISESNINLCGSHCGVSIGEDGPSQMALEDLAMFRSVPTSTVFYPSDGVATEKAVELAANTKGICFIRTSRPENAIIYNNNEDFQVGQAKVVLKSKDDQVTVIGAGVTLHEALAAAELLKKEKINIRVLDPFTIKPLDRKLILDSARATKGRILTVEDHYYEGGIGEAVSSAVVGEHKL

SEQ ID NO: 759924 - protein, 358 aa, Homo sapiens; identical to SEQ ID NO: 759909

SEQ ID NO: 759925 - protein, 358 aa, Homo sapiens; identical to SEQ ID NO: 759909

SEQ ID NO: 759926 - protein, 289 aa, Homo sapiens
RRLNAPPPRARPRQPPVAAGAAAISVCPRVRPVPACRTMESYHKPDQQKLQALKDTANRLRISSIQATTAAGSGHPTSCCSAAEIMAVLFFHTMRYKSQDPRNPHNDRFVLSKGHAAPILYAVWAEAGFLAEAELLNLRKISSDLDGHPVPKQAFTDVATGSLGQGLGAACGMAYTGKYFDKASYRVYCLLGDGELSEGSVWEAMAFASIYKLDNLVAILDINRLGQSDPAPLQHQMDIYQKRCEAFGWHAIIVDGHSVEELCKAFGPGPSTSQQPSLPRPSRAEGSRG

SEQ ID NO: 759927 - protein, 358 aa, Homo sapiens; identical to SEQ ID NO: 759909

SEQ ID NO: 759928 - protein, 289 aa, Homo sapiens; identical to SEQ ID NO: 759926

SEQ ID NO: 759929 - protein, 358 aa, Homo sapiens; identical to SEQ ID NO: 759909

SEQ ID NO: 759930 - protein, 358 aa, Homo sapiens; identical to SEQ ID NO: 759909

SEQ ID NO: 759931 - protein, 358 aa, Homo sapiens; identical to SEQ ID NO: 759909

SEQ ID NO: 759932 - protein, 358 aa, Homo sapiens; identical to SEQ ID NO: 759909

SEQ ID NO: 759933 - protein, 358 aa, Homo sapiens; identical to SEQ ID NO: 759909

SEQ ID NO: 759934 - protein, 358 aa, Homo sapiens; identical to SEQ ID NO: 759909

SEQ ID NO: 759935 - protein, 346 aa, Homo sapiens
RMPSLRMLAMSTEGASSCGGIANIRMPSLPSYKVGDKIATRKAYGQALAKLGHASDRIIALDGDTKNSTFSEIFKKEHPDRFIECYIAEQNMVSIAVGCATRNRTVPFCSTFAAFFTRAFDQIRMAAISESNINLCGSHCGVSIGEDGPSQMALEDLAMFRSVPTSTVFYPSDGVATEKAVELAANTKGICFIRTSRPENAIIYNNNEDFQVGQAKVVLKSKDDQVTVIGAGVTLHEALAAAELLKKEKINIRVLDPFTIKPLDRKLILDSARATKGRILTVEDHYYEGGIGEAVSSAVVGEPGITVTHLAVNRVPRSGKPAELLKMFGIDRDAIAQAVRGLITKA

SEQ ID NO: 759936 - protein, 356 aa, Homo sapiens
RRLNAPPPRARPRQPPVAAGAAAISVCPRVRPVPACRTMESYHKPDQQKLQALKDTANRLRISSIQATTAAGSGHPTSCCSAAEIMAVLFFHTMRYKSQDPRNPHNDRFVLSKGHAAPILYAVWAEAGFLAEAELLNLRKISSDLDGHPVPKQAFTDVATGSLGQGLGAACGMAYTGKYFDKASYRVYCLLGDGELSEGSVWEAMAFASIYKLDNLVAILDINRLGQSDPAPLQHQMDIYQKRCEAFGWHAIIVDGHSVEELCKAFGPGPSTSQQPSLPRPSRAEGSRGRRQESGWKPPKNGGRHQGTSRSEKESAPPGASGSTSVPPPQWTNPGAGDMAKRCRGAPRKRRKRKAE

SEQ ID NO: 759937 - protein, 255 aa, Homo sapiens [sequence omitted]

SEQ ID NO: 759938 - protein, 215 aa, Homo sapiens
MEPGQTPAAKADLSLEGSSVLWPLGIAPYSLPPVPSVFYPSDGVATEKAVELAANTKGICFIRTSRPENAIIYNNNEDFQVGQAKVVLKSKDDQVTVIGAGVTLHEALAAAELLKKEKINIRVLDPFTIKPLDRKLILDSARATKGRILTVEDHYYEGGIGEAVSSAVVGEPGITVTHLAVNRVPRSGKPAELLKMFGIDRDAIAQAVRGLITKA

SEQ ID NO: 759939 - protein, 145 aa, Homo sapiens
VIPLVIMDFQVGQAKVVLKSKDDQVTVIGAGVTLHEALAAAELLKKEKINIRVLDPFTIKPLDRKLILDSARATKGRILTVEDHYYEGGIGEAVSSAVVGEPGITVTHLAVNRVPRSGKPAELLKMFGIDRDAIAQAVRGLITKA

SEQ ID NO: 759940 - protein, 209 aa, Homo sapiens
  misc_feature (188)..(189): Xaa can be any naturally occurring amino acid
RRLNAPPPRARPRQPPVAAGAAAISVCPRVRPVPACRTMESYHKPDQQKLQALKDTANRLRISSIQATTAAGSGHPTSCCSAAEIMAVLFFHTMRYKSQDPRNPHNDRFVLSKGHAAPILYAVWAEAGFLAEAELLNLRKISSDLDGHPVPKQAFTDVATGSLGQGLGAACGMAYTGKYFDKASTIIXXERGCRSYGAIASQHLCWLWL

SEQ ID NO: 759941 - protein, 133 aa, Homo sapiens
VFTPGAPLTFAPGGMGGGWARIPAHGWGGRGLISAYPFPHTPGEDGPSQMALEDLAMFRSVPTSTVFYPSDGVATEKAVELAANTKVGCMAVLSPAGSHHFPRETEEEARAGHLLPQGVFPDLAPGVRVACGS

SEQ ID NO: 759942 - protein, 358 aa, Homo sapiens; identical to SEQ ID NO: 759909

SEQ ID NO: 759943 - protein, 358 aa, Homo sapiens; identical to SEQ ID NO: 759909

SEQ ID NO: 759944 - protein, 275 aa, Homo sapiens
MAEQIIQEIYSQIQSKKKILATPPQEDAPSVDIANIRMPSLPSYKVGDKIATRKAYGQALAKLGHASDRIIALDGDTKNSTFSEIFKKEHPDRFIECYIAEQNMVSIAVGCATRNRTVPFCSTFAAFFTRAFDQIRMAAISESNINLCGSHCGVSIGEDGPSQMALEDLAMFRSVPTSTVFYPSDGVATEKAVELAANTKGICFIRTSRPENAIIYNNNEDFQVGQAKVVLKSKDDQVTVIGAGVITDRVSRPRSLLLNNRQMSRTRVYSSRGIL

SEQ ID NO: 759945 - protein, 358 aa, Homo sapiens; identical to SEQ ID NO: 759909

SEQ ID NO: 759946 - protein, 358 aa, Homo sapiens; identical to SEQ ID NO: 759909

SEQ ID NO: 759947 - protein, 358 aa, Homo sapiens; identical to SEQ ID NO: 759909

SEQ ID NO: 759948 - protein, 358 aa, Homo sapiens; identical to SEQ ID NO: 759909

SEQ ID NO: 759949 - protein, 289 aa, Homo sapiens; identical to SEQ ID NO: 759926

SEQ ID NO: 759950 - protein, 289 aa, Homo sapiens; identical to SEQ ID NO: 759926

SEQ ID NO: 759951 - protein, 355 aa, Homo sapiens
MARYEPGFQIQSKKKILATPPQEDAPSVDIANIRMPSLPSYKVGDKIATRKAYGQALAKLGHASDRIIALDGDTKNSTFSEIFKKEHPDRFIECYIAEQNMVSIAVGCATRNRTVPFCSTFAAFFTRAFDQIRMAAISESNINLCGSHCGVSIGEDGPSQMALEDLAMFRSVPTSTVFYPSDGVATEKAVELAANTKGICFIRTSRPENAIIYNNNEDFQVGQAKVVLKSKDDQVTVIGAGVTLHEALAAAELLKKEKINIRVLDPFTIKPLDRKLILDSARATKGRILTVEDHYYEGGIGEAVSSAVVGEPGITVTHLAVNRVPRSGKPAELLKMFGIDRDAIAQAVRGLITKA

SEQ ID NO: 759952 - protein, 289 aa, Homo sapiens; identical to SEQ ID NO: 759926

SEQ ID NO: 759953 - protein, 255 aa, Homo sapiens [sequence omitted]

SEQ ID NO: 759954 - protein, 205 aa, Homo sapiens
RGPLQPSPTLGPLEDLAMFRSVPTSTVFYPSDGVATEKAVELAANTKGICFIRTSRPENAIIYNNNEDFQVGQAKVVLKSKDDQVTVIGAGVTLHEALAAAELLKKEKINIRVLDPFTIKPLDRKLILDSARATKGRILTVEDHYYEGGIGEAVSSAVVGEPGITVTHLAVNRVPRSGKPAELLKMFGIDRDAIAQAVRGLITKA

SEQ ID NO: 759955 - protein, 145 aa, Homo sapiens; identical to SEQ ID NO: 759939

SEQ ID NO: 759956 - protein, 49 aa, Homo sapiens
MSHQAPTRADSGAQPSPQPRRVLSLTEKINIRVLDPFTIKPLDRKLILD

SEQ ID NO: 759957 - protein, 93 aa, Homo sapiens
KNMAEQIIQEIYSQIQSKKKILATPPQEDAPSVDIANIRMPSLPSYKVGDKVQSGACFSEPIVLRFPKSVAQIHPLEGWEREESDSFRARSDP

SEQ ID NO: 759958 - protein, 642 aa, Homo sapiens
MDSVSFEDVAVNFTLEEWALLDSSQKKLYEDVMQETFKNLVCLGKKWEDQDIEDDHRNQGKNRRCHMVERLCESRRGSKCGETTSQMPNVNINKETFTGAKPHECSFCGRDFIHHSSLNRHMRSHTGQKPNEYQEYEKQPCKCKAVGKTFSYHHCFRKHERTHTGVKPYECKQCGKAFIYYQPFQRHERTHAGQKPYECKQCGKTFIYYQSFQKHAHTGKKPYECKQCGKAFICYQSFQRHKRTHTGEKPYECKQCGKAFSCPTYFRTHERTHSGEKPYKCKECGKAFSFLSSFRRHKRTHSGEKPYECKECGKAFFYSASFRAHVIIHTGARPYKCKECGKAFNSSNSCRVHERTHIGEKPYECKRCGKSFSWSISLRLHERTHTGEKPYECKQCHKTFSFSSSLREHETTHTGEKPYECKQCGKTFSFSSSLQRHERTHNAEKPYECKQCGKAFRCSSYFRIHERSHTGEKPYECKQCGKVFIRSSSFRLHERTHTGEKPYECKLCGKTFSFSSSLREHEKIHTGNKPFECKQCGKAFLRSSQIRLHERTHTGEKPYQCKQCGKAFISSSKFRMHERTHTGEKPYRCKQCGKAFRFSSSVRIHERSHTGEKPYECKQCGKAFISSSHFRLHERTHMGEKV

SEQ ID NO: 759959 - protein, 622 aa, Homo sapiens
MVERLCESRRGSKCGETTSQMPNVNINKETFTGAKPHECSFCGRDFIHHSSLNRHMRSHTGQKPNEYQEYEKQPCKCKAVGKTFSYHHCFRKHERTHTGVKPYECKQCGKAFIYYQPFQRHERTHAGQKPYECKQCGKTFIYYQSFQKHAHTGKKPYECKQCGKAFICYQSFQRHKRTHTGEKPYECKQCGKAFSCPTYFRTHERTHSGEKPYKCKECGKAFSFLSSFRRHKRTHSGEKPYECKECGKAFFYSASFRAHVIIHTGARPYKCKECGKAFNSSNSCRVHERTHIGEKPYECKRCGKSFSWSISLRLHERTHTGEKPYECKQCHKTFSFSSSLREHETTHTGEKPYECKQCGKTFSFSSSLQRHERTHNAEKPYECKQCGKAFRCSSYFRIHERSHTGEKPYECKQCGKVFIRSSSFRLHERTHTGEKPYECKLCGKTFSFSSSLREHELPSFQSNSDCMKGLTLERNRINVNNVEKPSFLPVNFECMRELTRERNPIDVNNVGKPSDFQVLFEFMKGLTLERNLMNANNVEKPSFLPVTFDCMKGLIWERKSKNISNILKPSVVPAPSEYTKEFILDRSCVNTNIVLKPLIVPVSFEHERIPTGEKQYECKHCD

SEQ ID NO: 759960 - protein, 268 aa, Homo sapiens
MMTGYNNGRCPRNSLYSDCIIEEKTVVLQKKDNEGFGFVLRGAKADTPIEEFTPTPAFPALQYLESVDEGGVAWQAGLRTGDFLIEVNNENVVKVGHRQVVNMIRQGGNHLVLKVVTVTRNLDPDDTARKKAPPPPKRAPTTALTLRSKSMTSELEELWIKASVRKKKDKPEEIVPASKPSRAAENMAVEPRVATIKQRPSSRCFPAGSDMNSVYERQGIAVMTPTVPGSPKAPFLGIPRGTMRRQKSIGKKCGTPPQKLPLGFQTQP

SEQ ID NO: 759961 - protein, 1250 aa, Homo sapiens
VPETRADAAEAVQHYTVGSYDSFDTSSDCIIEEKTVVLQKKDNEGFGFVLRGAKADTPIEEFTPTPAFPALQYLESVDEGGVAWQAGLRTGDFLIEVNNENVVKVGHRQVVNMIRQGGNHLVLKVVTVTRNLDPDDTARKKAPPPPKRAPTTALTLRSKSMTSELEELVVNKPEEIVPASKPSRAAENMAVEPRVATIKQRPSSRCFPAGSDMNSVYERQGIAVMTPTVPGSPKAPFLGIPRGTMRRQKSIDSRIFLSGITEEERQFLAPPMLKFTRSLSMPDTSEDIPPPPQSVPPSPPPPSPTTYNCPKSPTPRVYGTIKPAFNQNSAAKVSPATRSDTVATMMREKGMYFRRELDRYSLDSEDLYSRNAGPQANFRNKRGQMPENPYSEVGKIASKAVYVPAKPARRKGMLVKQSNVEDSPEKTCSIPIPTIIVKEPSTSSSGKSSQGSSMEIDPQAPEPPSQLRPDESLTVSSPFAAAIAGAVRDREKRLEARRNSPAFLSTDLGDEDVGLGPPAPRTRPSMFPEEGDFADEDSAEQLSSPMPSATPREPENHFVGGAEASAPGEAGRPLNSTSKAQGPESSPAVPSASSGTAGPGNYVHPLTGRLLDPSSPLALALSARDRAMKESQQGPKGEAPKADLNKPLYIDTKMRPSLDAGFPTVTRQNTRGPLRRQETENKYETDLGRDRKGDDKKNMLIDIMDTSQQKSAGLLMVHTVDATKLDNALQEEDEKAEVEMKPDSSPSEVPEGVSETEGALQISAAPEPTTVPGRTIVAVGSMEEAVILPFRIPPPPLASVDLDEDFIFTEPLPPPLEFANSFDIPDDRAASVPALSDLVKQKKSDTPQSPSLNSSQPTNSADSKKPASLSNCLPASFLPPPESFDAVADSGIEEVDSRSSSDHHLETTSTISTVSSISTLSSEGGENVDTCTVYADGQAFMVDKPPVPPKPKMKPIIHKSNALYQDALVEEDVDSFVIPPPAPPPPPGSAQPGMAKVLQPRTSKLWGDVTEIKSPILSGPKANVISELNSILQQMNREKLAKPGEGLDSPMGAKSASLAPRSPEIMSTISGTRSTTVTFTVRPGTSQPITLQSRPPDYESRTSGTRRAPSPVVSPTEMNKETLPAPLSAATASPSPALSDVFSLPSQPPSGDLFGLNPAGRSRSPSPSILQQPISNKPFTTKPVHLWTKPDVADWLESLNLGEHKEAFMDNEIDGSHLPNLQKEDLIDLGVTRVGHRMNIERALKQLLDR

SEQ ID NO: 759962 - protein, 979 aa, Homo sapiens [sequence omitted]

SEQ ID NO: 759963 - protein, 31 aa, Homo sapiens
MSTISGTRSTTVTFTVRPGTSQPITLQSRPP

SEQ ID NO: 759964 - protein, 1784 aa, Homo sapiens
PVPAMPGGPSPRSPAPLLRPLLLLLCALAPGAPGPAPGRATEGRAALDIVHPVRVDAGGSFLSYELWPRALRKRDVSVRRDAPAFYELQYRGRELRFNLTANQHLLAPGFVSETRRRGGLGRAHIRAHTPACHLLGEVQDPELEGGLAAISACDGLKGVFQLSNEDYFIEPLDSAPARPGHAQPHVVYKRQAPERLAQRGDSSAPSTCGVQVYPELESRRERWEQRQQWRRPRLRRLHQRSVSKEKWVETLVVADAKMVEYHGQPQVESYVLTIMNMVAGLFHDPSIGNPIHITIVRLVLLEDEEEDLKITHHADNTLKSFCKWQKSINMKGDAHPLHHDTAILLTRKDLCAAMNRPCETLGLSHVAGMCQPHRSCSINEDTGLPLAFTVAHELGHSFGIQHDGSGNDCEPVGKRPFIMSPQLLYDAAPLTWSRCSRQYITRFLDRGWGLCLDDPPAKDIIDFPSVPPGVLYDVSHQCRLQYGAYSAFCEDMDNVCHTLWCSVGTTCHSKLDAAVDGTRCGENKWCLSGECVPVGFRPEAVDGGWSGWSAWSICSRSCGMGVQSAERQCTQPTPKYKGRYCVGERKRFRLCNLQACPAGRPSFRHVQCSHFDAMLYKGQLHTWVPVVNDVNPCELHCRPANEYFAKKLRDAVVDGTPCYQVRASRDLCINGICKNVGCDFEIDSGAMEDRCGVCHGNGSTCHTVSGTFEEAEGLGYVDVGLIPAGAREIRIQEVAEAANFLALRSEDPEKYFLNGGWTIQWNGDYQVAGTTFTYARRGNWENLTSPGPTKEPVWIQVPASRGPGGGSRGGVPRPSTLHGRSRPGGVSPGSVTEPGSEPGPPAAASTSVSPSLKWPNLVAAVHRGGWGQAPLGLGGWRRHLVLMGPRLPTQLLFQESNPGVHYEYTIHREAGGHDEVPPPVFSWHYGPWTKCTVTCGRGVQRQNVYCLERQAGPVDEEHCDPLGRPDDQQRKCSEQPCPARWWAGEWQLCSSSCGPGGLSRRAVLCIRSVGLDEQSALEPPACEHLPRPPTETPCNRHVPCPATWAVGNWSQCSVTCGEGTQRRNVLCTNDTGVPCDEAQQPASEVTCSLPLCRWPLGTLGPEGSGSGSSSHELFNEADFIPHHLAPRPSPASSPKPGTMGNAIEEEAPELDLPGPVFVDDFYYDYNFINFHEDLSYGPSEEPDLDLAGTGDRTPPPHSHPAAPSTGSPVPATEPPAAKEEGVLGPWSPSPWPSQAGRSPPPPSEQTPGNPLINFLPEEDTPIGAPDLGLPSLSWPRVSTDGLQTPATPESQNDFPVGKDSQSQLPPPWRDRTNEVFKDDEEPKGRGAPHLPPRPSSTLPPLSPVGSTHSSPSPDVAELWTGGTVAWEPALEGGLGPVDSELWPTVGVASLLPPPIAPLPEMKVRDSSLEPGTPSFPTPGPGSWDLQTVAVWGTFLPTTLTGLGHMPEPALNPGPKGQPESLSPEVPLSSRLLSTPAWDSPANSHRVPETQPLAPSLAEAGPPADPLVVRNASWQAGNWSECSTTCGLGAVWRPVRCSSGRDEDCAPAGRPQPARRCHLRPCATWHSGNWSKCSRSCGGGSSVRDVQCVDTRDLRPLRPFHCQPGPAKPPAHRPCGAQPCLSWYTSSWRECSEACGGGEQQRLVTCPEPGLCEEALRPNTTRPCNTHPCTQWVVGPWGQCSAPCGGGVQRRLVKCVNTQTGLPEEDSDQCGHEAWPESSRPCGTEDCEPVEPPRCERDRLSFGFCETLRLLGRCQLPTIRTQCCRSCSPPSHGAPSRGHQRVARR

SEQ ID NO: 759965 - protein, 335 aa, Homo sapiens
RGGPQAAHLCARSHRILNLLGVFSSLSGLACLLSSVSLTPSGLVFHQLAFVPPFLCLSQPVAAPGHATFCLGPASLGLSLGFFSYSPGLGRGPGCLSRHTPHGVTPVGLHMGMCPYTSLGPQCSRSCGGGSSVRDVQCVDTRDLRPLRPFHCQPGPAKPPAHRPCGAQPCLSWYTSSWRECSEACGGGEQQRLVTCPEPGLCEEALRPNTTRPCNTHPCTQWVVGPWGQCSAPCGGGVQRRLVKCVNTQTGLPEEDSDQCGHEAWPESSRPCGTEDCEPVEPPRCERDRLSFGFCETLRLLGRCQLPTIRTQCCRSCSPPSHGAPSRGHQRVARR

SEQ ID NO: 759966 - protein, 1001 aa, Homo sapiens
PVPAMPGGPSPRSPAPLLRPLLLLLCALAPGAPGPAPGRATEGRAALDIVHPVRVDAGGSFLSYELWPRALRKRDVSVRRDAPAFYELQYRGRELRFNLTANQHLLAPGFVSETRRRGGLGRAHIRAHTPACHLLGEVQDPELEGGLAAISACDGLKGVFQLSNEDYFIEPLDSAPARPGHAQPHVVYKRQAPERLAQRGDSSAPSTCGVQVYPELESRRERWEQRQQWRRPRLRRLHQRSVSKEKWVETLVVADAKMVEYHGQPQVESYVLTIMNMVAGLFHDPSIGNPIHITIVRLVLLEDEEEDLKITHHADNTLKSFCKWQKSINMKGDAHPLHHDTAILLTRKDLCAAMNRPCETLGLSHVAGMCQPHRSCSINEDTGLPLAFTVAHELGHSFGIQHDGSGNDCEPVGKRPFIMSPQLLYDAAPLTWSRCSRQYITRFLDRGWGLCLDDPPAKDIIDFPSVPPGVLYDVSHQCRLQYGAYSAFCEDMDNVCHTLWCSVGTTCHSKLDAAVDGTRCGENKWCLSGECVPVGFRPEAVDGGWSGWSAWSICSRSCGMGVQSAERQCTQPTPKYKGRYCVGERKRFRLCNLQACPAGRPSFRHVQCSHFDAMLYKGQLHTWVPVVNDVNPCELHCRPANEYFAKKLRDAVVDGTPCYQVRASRDLCINGICKNVGCDFEIDSGAMEDRCGVCHGNGSTCHTVSGTFEEAEGLGYVDVGLIPAGAREIRIQEVAEAANFLALRSEDPEKYFLNGGWTIQWNGDYQVAGTTFTYARRGNWENLTSPGPTKEPVWIQVPASRGPGGGSRGGVPRPSTLHGRSRPGGVSPGSVTEPGSEPGPPAAASTSVSPSLKWPNLVAAVHRGGWGQAPLGLGGWRRHLVLMGPRLPTQLLFQESNPGVHYEYTIHREAGGHDEVPPPVFSWHYGPWTKCTVTCGRGEKWGRHSPTCRGLVSGQGHWLQLPAHCWATTGLEVCFSEPQFSICEMRLAIALCPRPAGRVHG

SEQ ID NO: 759967 - protein, 95 aa, Homo sapiens
APETGALCLVGSCWSLLKVVGCREPGSGYPKLLVLMPLCPPTPGCERDRLSFGFCETLRLLGRCQLPTIRTQCCRSCSPPSHGAPSRGHQRVARR

SEQ ID NO: 759968 - protein, 193 aa, Homo sapiens
STTRPRTRGPAAAARGAPSSAKPLAPSPPGSGSPAAAGAPASEPLSEVSHGIDSGLPGGRALRRELRARGEGDGAKKNRGDSAAAVTAGTRRGRAAPSPRPDRSPAGEGLRRRRRRRPWWQWWRRSSLPGSCPELEERVVPGELCTGAAASPPVPPPQSPRSRRIRRRRRRQDMELENIVANSLLLKARQGRI

SEQ ID NO: 759969 - protein, 257 aa, Homo sapiens
STTRPRTRGPAAAARGAPSSAKPLAPSPPGSGSPAAAGAPASEPLSEVSHGIDSGLPGGRALRRELRARGEGDGAKKNRGDSAAAVTAGTRRGRAAPSPRPDRSPAGEGLRRRRRRRPWWQWWRRSSLPGSCPELEERVVPGELCTGAAASPPVPPPQSPRSRRIRRRRRRQDMELENIVANSLLLKARQVLCIPPQKHQLVQPFSGRPPQSSVQSSVSDLMSPLPASQESWRQSLGPQVPVLATVVLHTPSLLRNC

SEQ ID NO: 759970 - protein, 397 aa, Homo sapiens
STTRPRTRGPAAAARGAPSSAKPLAPSPPGSGSPAAAGAPASEPLSEVSHGIDSGLPGGRALRRELRARGEGDGAKKNRGDSAAAVTAGTRRGRAAPSPRPDRSPAGEGLRRRRRRRPWWQWWRRSSLPGSCPELEERVVPGELCTGAAASPPVPPPQSPRSRRIRRRRRRQDMELENIVANSLLLKARQGGYGKKSGRSKKWKEILTLPPVSQCSELRHSIEKDYSSLCDKQPIGRRLFRQFCDTKPTLKRHIEFLDAVAEYEVADDEDRSDCGLSILDRFFNDKLAAPLPEIPPDVVTECRLGLKEENPSKKAFEECTRVAHNYLRGEPFEEYQESSYFSQFLQWKWLERQPVTKNTFRHYRVLGKGGFGEQSPVGCAVDGSWKKQQPNVDDTEA

SEQ ID NO: 759971 - protein, 1376 aa, Homo sapiens
MALKNINYLLIFYLSFSLLIYIKNSFCNKNNTRCLSNSCQNNSTCKDFSKDNDCSCSDTANNLDKDCDNMKDPCFSNPCQGSATCVNTPGERSFLCKCPPGYSGTICETTIGSCGKNSCQHGGICHQDPIYPVCICPAGYAGRFCEIDHDECASSPCQNGAVCQDGIDGYSCFCVPGYQGRHCDLEVDECASDPCKNEATCLNEIGRYTCICPHNYSGVNCELEIDECWSQPCLNGATCQDALGAYFCDCAPGFLGDHCELNTDECASQPCLHGGLCVDGENRYSCNCTGSGFTGTHCETLMPLCWSKPCHNNATCEDSVDNYTCHCWPGYTGAQCEIDLNECNSNPCQSNGECVELSSEKQYGRITGLPSSFSYHEASGYVCICQPGFTGIHCEEDVNECSSNPCQNGGTCENLPGNYTCHCPFDNLSRTFYGGRDCSDILLGCTHQQCLNNGTCIPHFQDGQHGFSCLCPSGYTGSLCEIATTLSFEGDGFLWVKSGSVTTKGSVCNIALRFQTVQPMALLLFRSNRDVFVKLELLSGYIHLSIQVNNQSKVLLFISHNTSDGEWHFVEVIFAEAVTLTLIDDSCKEKCIAKAPTPLESDQSICAFQNSFLGGLPVGMTSNGVALLNFYNMPSTPSFVGCLQDIKIDWNHITLENISSGSSLNVKAGCVRKDWCESQPCQSRGRCINLWLSYQCDCHRPYEGPNCLREYVAGRFGQDDSTGYVIFTLDESYGDTISLSMFVRTLQPSGLLLALENSTYQYIRVWLERGRLAMLTPNSPKLVVKFVLNDGNVHLISLKIKPYKIELYQSSQNLGFISASTWKIEKGDVIYIGGLPDKQETELNGGFFKGCIQDVRLNNQNLEFFPNPTNNASLNPVLVNVTQGCAGDNSCKSNPCHNGGVCHSRWDDFSCSCPALTSGKACEEVQWCGFSPCPHGAQCQPVLQGFECIANAVFNGQSGQILFRSNGNITRELTNITFGFRTRDANVIILHAEKEPEFLNISIQDSRLFFQLQSGNSFYMLSLTSLQSVNDGTWHEVTLSMTDPLSQTSRWQMEVDNETPFVTSTIATGSLNFLKDNTDIYVGDRAIDNIKGLQGCLSTIEIGGIYLSYFENVHGFINKPQEEQFLKISTNSVVTGCLQLNVCNSNPCLHGGNCEDIYSSYHCSCPLGWSGKHCELNIDECFSNPCIHGNCSDRVAAYHCTCEPGYTGVNCEVDIDNCQSHQCANGATCISHTNGYSCLCFGNFTGKFCRQSRLPSTVCGNEKTNLTCYNGGNCTEFQTELKCMCRPGFTGEWCEKDIDECASDPCVNGGLCQDLLNKFQCLCDVAFAGERCEVDVSSLSFYVSLLFWQNLFQLLSYLILRMNDEPVVEWGEQEDY

SEQ ID NO: 759972 - protein, 1406 aa, Homo sapiens
MALKNINYLLIFYLSFSLLIYIKNSFCNKNNTRCLSNSCQNNSTCKDFSKDNDCSCSDTANNLDKDCDNMKDPCFSNPCQGSATCVNTPGERSFLCKCPPGYSGTICETTIGSCGKNSCQHGGICHQDPIYPVCICPAGYAGRFCEIDHDECASSPCQNGAVCQDGIDGYSCFCVPGYQGRHCDLEVDECASDPCKNEATCLNEIGRYTCICPHNYSGVNCELEIDECWSQPCLNGATCQDALGAYFCDCAPGFLGDHCELNTDECASQPCLHGGLCVDGENRYSCNCTGSGFTGTHCETLMPLCWSKPCHNNATCEDSVDNYTCHCWPGYTGAQCEIDLNECNSNPCQSNGECVELSSEKQYGRITGLPSSFSYHEASGYVCICQPGFTGIHCEEDVNECSSNPCQNGGTCENLPGNYTCHCPFDNLSRTFYGGRDCSDILLGCTHQQCLNNGTCIPHFQDGQHGFSCLCPSGYTGSLCEIATTLSFEGDGFLWVKSGSVTTKGSVCNIALRFQTVQPMALLLFRSNRDVFVKLELLSGYIHLSIQVNNQSKVLLFISHNTSDGEWHFVEVIFAEAVTLTLIDDSCKEKCIAKAPTPLESDQSICAFQNSFLGGLPVGMTSNGVALLNFYNMPSTPSFVGCLQDIKIDWNHITLENISSGSSLNVKAGCVRKDWCESQPCQSRGRCINLWLSYQCDCHRPYEGPNCLREYVAGRFGQDDSTGYVIFTLDESYGDTISLSMFVRTLQPSGLLLALENSTYQYIRVWLERGRLAMLTPNSPKLVVKFVLNDGNVHLISLKIKPYKIELYQSSQNLGFISASTWKIEKGDVIYIGGLPDKQETELNGGFFKGCIQDVRLNNQNLEFFPNPTNNASLNPVLVNVTQGCAGDNSCKSNPCHNGGVCHSRWDDFSCSCPALTSGKACEEVQWCGFSPCPHGAQCQPVLQGFECIANAVFNGQSGQILFRSNGNITRELTNITFGFRTRDANVIILHAEKEPEFLNISIQDSRLFFQLQSGNSFYMLSLTSLQSVNDGTWHEVTLSMTDPLSQTSRWQMEVDNETPFVTSTIATGSLNFLKDNTDIYVGDRAIDNIKGLQGCLSTIEIGGIYLSYFENVHGFINKPQEEQFLKISTNSVVTGCLQLNVCNSNPCLHGGNCEDIYSSYHCSCPLGWSGKHCELNIDECFSNPCIHGNCSDRVAAYHCTCEPGYTGVNCEVDIDNCQSHQCANGATCISHTNGYSCLCFGNFTGKFCRQSRLPSTVCGNEKTNLTCYNGGNCTEFQTELKCMCRPGFTGEWCEKDIDECASDPCVNGGLCQDLLNKFQCLCDVAFAGERCEVDLADDLISDIFTTIGSVTVALLLILLLAIVASVVTSNKRATQGTYSPSRQEKEGSRVEMWNLMPPPAMERLI

SEQ ID NO: 759973 - protein, 1336 aa, Homo sapiens
MALKNINYLLIFYLSFSLLIYIKNSFCNKNNTRCLSNSCQNNSTCKDFSKDNDCSCSDTANNLDKDCDNMKDPCFSNPCQGSATCVNTPGERSFLCKCPPGYSGTICETTIGSCGKNSCQHGGICHQDPIYPVCICPAGYAGRFCEIDHDECASSPCQNGAVCQDGIDGYSCFCVPGYQGRHCDLEVDECASDPCKNEATCLNEIGRYTCICPHNYSGVNCELEIDECWSQPCLNGATCQDALGAYFCDCAPGFLGDHCELNTDECASQPCLHGGLCVDGENRYSCNCTGSGFTGTHCETLMPLCWSKPCHNNATCEDSVDNYTCHCWPGYTGAQCEIDLNECNSNPCQSNGECVELSSEKQYGRITGLPSSFSYHEASGYVCICQPGFTGIHCEEDVNECSSNPCQNGGTCENLPGNYTCHCPFDNLSRTFYGGRDCSDILLGCTHQQCLNNGTCIPHFQDGQHGFSCLCPSGYTGSLCEIATTLSFEGDGFLWVKSGSVTTKGSVCNIALRFQTVQPMALLLFRSNRDVFVKLELLSGYIHLSIQVNNQSKVLLFISHNTSDGEWHFVEVIFAEAVTLTLIDDSCKEKCIAKAPTPLESDQSICAFQNSFLGGLPVGMTSNGVALLNFYNMPSTPSFVGCLQDIKIDWNHITLENISSGSSLNVKAGCVRKDWCESQPCQSRGRCINLWLSYQCDCHRPYEGPNCLREYVAGRFGQDDSTGYVIFTLDESYGDTISLSMFVRTLQPSGLLLALENSTYQYIRVWLERGRLAMLTPNSPKLVVKFVLNDGNVHLISLKIKPYKIELYQSSQNLGFISASTWKIEKGDVIYIGGLPDKQETELNGGFFKGCIQDVRLNNQNLEFFPNPTNNASLNPVLVNVTQGCAGDNSCKSNPCHNGGVCHSRWDDFSCSCPALTSGKACEEVQWCGFSPCPHGAQCQPVLQGFECIANAVFNGQSGQILFRSNGNITRELTNITFGFRTRDANVIILHAEKEPEFLNISIQDSRLFFQLQSGNSFYMLSLTSLQSVNDGTWHEVTLSMTDPLSQTSRWQMEVDNETPFVTSTIATGSLNFLKDNTDIYVGDRAIDNIKGLQGCLSTIEIGGIYLSYFENVHGFINKPQEEQFLKISTNSVVTGCLQLNVCNSNPCLHGGNCEDIYSSYHCSCPLGWSGKHCELNIDECFSNPCIHGNCSDRVAAYHCTCEPGYTGVNCEVDIDNCQSHQCANGATCISHTNGYSCLCFGNFTGKFCRQSRLPSTVCGNEKTNLTCYNGGNCTEFQTELKCMCRPGFTGEWCEKDIDECASDPCVNGGLCQDLLNKFQCLCDVAFAGERCEVDY

SEQ ID NO: 759974 - protein, 1364 aa, Homo sapiens
MALKNINYLLIFYLSFSLLIYIKNSFCNKNNTRCLSNSCQNNSTCKDFSKDNDCSCSDTANNLDKDCDNMKDPCFSNPCQGSATCVNTPGERSFLCKCPPGYSGTICETTIGSCGKNSCQHGGICHQDPIYPVCICPAGYAGRFCEIDHDECASSPCQNGAVCQDGIDGYSCFCVPGYQGRHCDLEVDECASDPCKNEATCLNEIGRYTCICPHNYSGVNCELEIDECWSQPCLNGATCQDALGAYFCDCAPGFLGDHCELNTDECASQPCLHGGLCVDGENRYSCNCTGSGFTGTHCETLMPLCWSKPCHNNATCEDSVDNYTCHCWPGYTGAQCEIDLNECNSNPCQSNGECVELSSEKQYGRITGLPSSFSYHEASGYVCICQPGFTGIHCEEDVNECSSNPCQNGGTCENLPGNYTCHCPFDNLSRTFYGGRDCSDILLGCTHQQCLNNGTCIPHFQDGQHGFSCLCPSGYTGSLCEIATTLSFEGDGFLWVKSGSVTTKGSVCNIALRFQTVQPMALLLFRSNRDVFVKLELLSGYIHLSIQVNNQSKVLLFISHNTSDGEWHFVEVIFAEAVTLTLIDDSCKEKCIAKAPTPLESDQSICAFQNSFLGGLPVGMTSNGVALLNFYNMPSTPSFVGCLQDIKIDWNHITLENISSGSSLNVKAGCVRKDWCESQPCQSRGRCINLWLSYQCDCHRPYEGPNCLREYVAGRFGQDDSTGYVIFTLDESYGDTISLSMFVRTLQPSGLLLALENSTYQYIRVWLERGRLAMLTPNSPKLVVKFVLNDGNVHLISLKIKPYKIELYQSSQNLGFISASTWKIEKGDVIYIGGLPDKQETELNGGFFKGCIQDVRLNNQNLEFFPNPTNNASLNPVLVNVTQGCAGDNSCKSNPCHNGGVCHSRWDDFSCSCPALTSGKACEEVQWCGFSPCPHGAQCQPVLQGFECIANAVFNGQSGQILFRSNGNITRELTNITFGFRTRDANVIILHAEKEPEFLNISIQDSRLFFQLQSGNSFYMLSLTSLQSVNDGTWHEVTLSMTDPLSQTSRWQMEVDNETPFVTSTIATGSLNFLKDNTDIYVGDRAIDNIKGLQGCLSTIEIGGIYLSYFENVHGFINKPQEEQFLKISTNSVVTGCLQLNVCNSNPCLHGGNCEDIYSSYHCSCPLGWSGKHCELNIDECFSNPCIHGNCSDRVAAYHCTCEPGYTGVNCEVDIDNCQSHQCANGATCISHTNGYSCLCFGNFTGKFCRQSRLPSTVCGNEKTNLTCYNGGNCTEFQTELKCMCRPGFTGEWCEKDIDECASDPCVNGGLCQDLLNKFQCLCDVAFAGERCEVDATLRLPYCEEAWNENNMSRESPSHARHPC

SEQ ID NO: 759975 - protein, 661 aa, Homo sapiens
MEPEEYRERGREMVDYICQYLSTVRERRVTPDVQPGYLRAQLPESAPEDPDSWDSIFGDIERIIMPGVVHWQSPHMHAYYPALTSWPSLLGDMLADAINCLGFTWASSPACTELEMNVMDWLAKMLGLPEHFLHHHPSSQGGGVLQSTVSESTLIALLAARKNKILEMKTSEPDADESCLNARLVAYASDQAHSSVEKAGLISLVKMKFLPVDDNFSLRGEALQKAIEEDKQRGLVPVFVCATLGTTGVCAFDCLSELGPICAREGLWLHIDAAYAGTAFLCPEFRGFLKGIEYADSFTFNPSKWMMVHFDCTGFWVKDKYKLQQTFSVNPIYLRHANSGVATDFMHWQIPLSRRFRSVKLWFVIRSFGVKNLQAHVRHGTEMAKYFESLVRNDPSFEIPAKRHLGLVVFRLKGPNCLTENVLKEIAKAGRLFLIPATIQDKLIIRFTVTSQFTTRDDILRDWNLIRDAATLILSQHCTSQPSPRVGNLISQIRGARAWACGTSLQSVSGAGDDPVQARKIIKQPQRVGAGPMKRENGLHLETLLDPVDDCFSEEAPDATKHKLSSFLFSYLSVQTKKKTVRSLSCNSVPVSAQKPLPTEASVKNGGSSRVRIFSRFPEDMMMLKKSAFKKLIKFYSVPSFPECSSQCGLQLPCCPLQAMV

SEQ ID NO: 759976 - protein, 936 aa, Homo sapiens
MEPEEYRERGREMVDYICQYLSTVRERRVTPDVQPGYLRAQLPESAPEDPDSWDSIFGDIERIIMPGVVHWQSPHMHAYYPALTSWPSLLGDMLADAINCLGFTWASSPACTELEMNVMDWLAKMLGLPEHFLHHHPSSQGGGVLQSTVSESTLIALLAARKNKILEMKTSEPDADESCLNARLVAYASDQAHSSVEKAGLISLVKMKFLPVDDNFSLRGEALQKAIEEDKQRGLVPVFVCATLGTTGVCAFDCLSELGPICKYLPSVAEEDKEYIFKCLLKQGPETSSMGLFLFLFGQCRDMGRTTKGHEGLFQGSLDIAFPSGVTRVRGGLPCLLSQEATVGEPSVFSSSYLYVELYLMQAISKIQCELGRIEMLSILPSEKEKGRVGEIMGEIKGREETQMGLFNPQARNHRKERYLPSNFCIRCTDIALCAGGKLISVPGCSRLRPRGCWPFTQWKKKARVRLCRLSHSEVMMPPSAPLLQTDSTCSHLHTPPVSHLAKAHHPCSPPLSLARCETSFPTSYLPSGQVMFASSGAREGLWLHIDAAYAGTAFLCPEFRGFLKGIEYADSFTFNPSKWMMVHFDCTGFWVKDKYKLQQTFSVNPIYLRHANSGVATDFMHWQIPLSRRFRSVKLWFVIRSFGVKNLQAHVRHGTEMAKYFESLVRNDPSFEIPAKRHLGLVVFRLKGPNCLTENVLKEIAKAGRLFLIPATIQDKLIIRFTVTSQFTTRDDILRDWNLIRDAATLILSQHCTSQPSPRVGNLISQIRGARAWACGTSLQSVSGAGDDPVQARKIIKQPQRVGAGPMKRENGLHLETLLDPVDDCFSEEAPDATKHKLSSFLFSYLSVQTKKKTVRSLSCNSVPVSAQKPLPTEASVKNGGSSRVRIFSRFPEDMMMLKKSAFKKLIKFYSVPSFPECSSQCGLQLPCCPLQAMV

SEQ ID NO: 759977 - protein, 96 aa, Homo sapiens
  misc_feature (95)..(95): Xaa can be any naturally occurring amino acid
RHKSPTNCPIFALTFALVVLAFPAYLLGIDSGRLQEKLTSRKMDSRWGGRSESINVTLNVEQAAYTRDALAKGLYARLFDFLVEINRAMHEHTPXV

SEQ ID NO: 759978 - protein, 258 aa, Homo sapiens
MGYISKVSGGGEKVQHVKDIILQSNPLLEAFGNAKTVRNNNSSRFGKYFEIQFSRGGEPDGGKISNFLLEKSRVVMQNENERNFHIYYQLLEGASQEQRQNLGLMTPDYYYYLNQSDTYQVDGTDDRSDFGETLSAMQVIGIPPSIQQLVLQLVAGILHLGNISFCEDGNYARVESVDLLAFPAYLLGIDSGRLQEKLTSRKMDSRWGGRSESINVTLNVEQAAYTRDALAKGLYARLFDFLVERPSTVLSSNPTEER

SEQ ID NO: 759979 - protein, 280 aa, Homo sapiens
MGYISKVSGGGEKVQHVKDIILQSNPLLEAFGNAKTVRNNNSSRFGKYFEIQFSRGGEPDGGKISNFLLEKSRVVMQNENERNFHIYYQVQEKGPGEREHHLEPSGVDNGKLLEGASQEQRQNLGLMTPDYYYYLNQSDTYQVDGTDDRSDFGETLSAMQVIGIPPSIQQLVLQLVAGILHLGNISFCEDGNYARVESVDLLAFPAYLLGIDSGRLQEKLTSRKMDSRWGGRSESINVTLNVEQAAYTRDALAKGLYARLFDFLVERPSTVLSSNPTEER

SEQ ID NO: 759980 - protein, 542 aa, Homo sapiens
MRKIRANAIAILTVAWILGTFYYLWQDNRAHAASSGGRGAQRAGRRSEQLREDRTIPLIVTGTPSKGFDEKAYLSAKQLKAGEDPYRQHAFNQLESDKLSPDRPIRDTRHYSCPSVSYSSDLPATSVIITFHNEARSTLLRTVKSVLNRTPANLIQEIILVDDFSSDPEDCLLLTRIPKVKCLRNDRREGLIRSRVRGADVAAATVLTFLDSHCEVNTEWLPPMLQRVKEDHTRVVSPIIDVISLDNFAYLAASADLRGGFDWSLHFKWEQIPLEQKMTRTDPTRPIRTPVIAGGIFVIDKSWFNHLGKYDAQMDIWGGENFELSFRVWMCGGSLEIVPCSRVGHVFRKRHPYNFPEGNALTYIRNTKRTAEVWMDEYKQYYYEARPSAIGKAFGSVATRIEQRKKMNCKSFRWYLENVYPELTVPVKEALPGIIKQGVNCLESQGQNTAGDFLLGMGICRGSAKNPQPAQAWLFSDHLIQQQGKCLAATSTLMSSPGSPVILQMCNPREGKQVSLLASGPEAQQPEGPCLRVADLGRRAPD

SEQ ID NO: 759981 - protein, 108 aa, Homo sapiens
SALGGSLLPQLRTELGPGQRPLPRGWTRRPGHTRAWTFGAGEQGLRCLNVRAKCLWSAAPALEGSPAVSPPDSHQRPLGSTPVPKRTPLDLPAQAPSLPGPCFACPLS

SEQ ID NO: 759982 - protein, 147 aa, Homo sapiens
PEKARTEAHTGVFWVMRPSCAGRQGQGKLGSMDGEAEGWEEGRGEGQPAGVAEEQEGGEKPGDLSEMPSPGWHWVGWGRMVSWQQRMGNLQMNMDRRAAKHQKNKVSYPGHSPFHTLPAPGSEPDAASSGPVPVGAHILSKRLQRDL

SEQ ID NO: 759983 - protein, 558 aa, Homo sapiens
MRKIRANAIAILTVAWILGTFYYLWQDNRAHAASSGGRGAQRAGRRSEQLREDRTIPLIVTGTPSKGFDEKAYLSAKQLKAGEDPYRQHAFNQLESDKLSPDRPIRDTRHYSCPSVSYSSDLPATSVIITFHNEARSTLLRTVKSVLNRTPANLIQEIILVDDFSSDPEDCLLLTRIPKVKCLRNDRREGLIRSRVRGADVAAATVLTFLDSHCEVNTEWLPPMLQRVKEDHTRVVSPIIDVISLDNFAYLAASADLRGGFDWSLHFKWEQIPLEQKMTRTDPTRPIRTPVIAGGIFVIDKSWFNHLGKYDAQMDIWGGENFELSFRVWMCGGSLEIVPCSRVGHVFRKRHPYNFPEGNALTYIRNTKRTAEVWMDEYKQYYYEARPSAIGKAFGSVATRIEQRKKMNCKSFRWYLENVYPELTVPVKEALPGIIKQGVNCLESQGQNTAGDFLLGMGICRGSAKNPQPAQAWLFSDHLIQQQGKCLAATSTLMSSPGSPVILQMCNPREGKQKWRRKGSFIQHSVSGLCLETKPAQLVTSKCQADAQAQQWQLLPHT

SEQ ID NO: 759984 - protein, 558 aa, Homo sapiens; identical to SEQ ID NO: 759983

SEQ ID NO: 759985 - protein, 329 aa, Homo sapiens
LLKPTGRWHSAGMTMETQMSQNVCPRNLWLLQPLTVLLLLASADSQAAAPPKAVLKLEPPWINVLQEDSVTLTCQGARSPESDSIQWFHNGNLIPTHTQPSYRFKANNNDSGEYTCQTGQTSLSDPVHLTVLSEWLVLQTPHLEFQEGETIMLRCHSWKDKPLVKVTFFQNGKSQKFSRLDPTFSIPQANHSHSGDYHCTGNIGYTLFSSKPVTITVQVPSMGSSSPMGIIVAVVIATAVAAIVAAVVALIYCRKKRISANSTDPVKAAQFEPPGRQMIAIRKRQLEETNNDYETADGGYMTLNPRAPTDDDKNIYLTLPPNDHVNSNN

SEQ ID NO: 759986 - protein, 329 aa, Homo sapiens; identical to SEQ ID NO: 759985

SEQ ID NO: 759987 - protein, 178 aa, Homo sapiens [sequence omitted]

SEQ ID NO: 759988 - protein, 155 aa, Homo sapiens
IESSSYQIPFSIPQANHSHSGDYHCTGNIGYTLFSSKPVTITVQVPSMGSSSPMGIIVAVVIATAVAAIVAAVVALIYCRKKRISANSTDPVKAAQFEPPGRQMIAIRKRQLEETNNDYETADGGYMTLNPRAPTDDDKNIYLTLPPNDHVNSNN

SEQ ID NO: 759989 - protein, 288 aa, Homo sapiens
LLKPTGRWHSAGMTMETQMSQNVCPRNLWLLQPLTVLLLLASADSQAAAPPKAVLKLEPPWINVLQEDSVTLTCQGARSPESDSIQWFHNGNLIPTHTQPSYRFKANNNDSGEYTCQTGQTSLSDPVHLTVLSEWLVLQTPHLEFQEGETIMLRCHSWKDKPLVKVTFFQNGKSQKFSRLDPTFSIPQANHSHSGDYHCTGNIGYTLFSSKPVTITVQANSTDPVKAAQFEPPGRQMIAIRKRQLEETNNDYETADGGYMTLNPRAPTDDDKNIYLTLPPNDHVNSNN

SEQ ID NO: 759990 - protein, 137 aa, Homo sapiens
MLRCHSWKDKPLVKVTFFQNGKSQKFSRLDPTFSIPQANHSHSGDYHCTGNIGYTLFSSKPVTITVQANSTDPVKAAQFEPPGRQMIAIRKRQLEETNNDYETADGGYMTLNPRAPTDDDKNIYLTLPPNDHVNSNN

SEQ ID NO: 759991 - protein, 77 aa, Homo sapiens
AHEEEAAVSYNHTTAVCLGDRVRPRGLKEQGGTEIRFRADRLADHGKYMTLNPRAPTDDDKNIYLTLPPNDHVNSNN

SEQ ID NO: 759992 - protein, 329 aa, Homo sapiens; identical to SEQ ID NO: 759985

SEQ ID NO: 759993 - protein, 329 aa, Homo sapiens; identical to SEQ ID NO: 759985

SEQ ID NO: 759994 - protein, 329 aa, Homo sapiens; identical to SEQ ID NO: 759985

SEQ ID NO: 759995 - protein, 83 aa, Homo sapiens
LLKPTGRWHSAGMTMETQMSQNVCPRNLWLLQPLTVLLLLGVRVILKWGNFRHSYCLDSRYQCGKEQAWALEAGDRLKEERGP

SEQ ID NO: 759996 - protein, 99 aa, Homo sapiens
IKKINAIRRDREDKKITDSTDLVKAAQFEPPGRQMIAIRKRQLEETNNDYETADGGYMTLNPRAPTDDDKNIYLTLPPNDHVCSYQKDVTFSEKSFQAD

SEQ ID NO: 759997 - protein, 262 aa, Homo sapiens
LLKPTGRWHSAGMTMETQMSQNVCPRNLWLLQPLTVLLLLAAPPKAVLKLEPPWINVLQEDSVTLTCQGARSPESDSIQWFHNGNLIPTHTQPSYRFKANNNDSGEYTCQTGQTSLSDPVHLTVLSEWLVLQTPHLEFQEGETIMLRCHSWKDKPLVKVTFFQNGKSQKFSRLDPTFSIPQANHSHSGDYHCTGNIGYTLFSSKPVTITVQGMGSLPRCREGRRGDGQGLRSHGPTWRSEKAHSSKIGHWSKEEWGGSLAKY

SEQ ID NO: 759998 - protein, 318 aa, Homo sapiens
LLKPTGRWHSAGMTMETQMSQNVCPRNLWLLQPLTVLLLLASADSQAAAPPKAVLKLEPPWINVLQEDSVTLTCQGARSPESDSIQWFHNGNLIPTHTQPSYRFKANNNDSGEYTCQTGQTSLSDPVHLTVLSEWLVLQTPHLEFQEGETIMLRCHSWKDKPLVKVTFFQNGKSQKFSRLDPTFSIPQANHSHSGDYHCTGNIGYTLFSSKPVTITVQVPSMGSSSPMGIIVAVVIATAVAAIVAAVVALIYCRKKRISANSTDPVKAAQFEMSNPSHLLFFLPCPFSPVSSLFAFVNAKLKWRLGLKTPEQTKPPRP

SEQ ID NO: 759999 - protein, 108 aa, Homo sapiens
MGSSSPMGIIVAVVIATAVAAIVAAVVALIYCRKKRISANSTDPVKAAQFEPPGRQMIAIRKRQLEETNNDYETADGGYMTLNPRAPTDDDKNIYLTLPPNDHVNSNN

SEQ ID NO: 760000 - protein, 329 aa, Homo sapiens; identical to SEQ ID NO: 759985

SEQ ID NO: 760001 - protein, 329 aa, Homo sapiens; identical to SEQ ID NO: 759985

SEQ ID NO: 760002 - protein, 333 aa, Homo sapiens
LLKPTGRWHSAGMTMETQMSQNVCPRNLWLLQPLTVLLLLASADSQAAAPPKAVLKLEPPWINVLQEDSVTLTCQGARSPESDSIQWFHNGNLIPTHTQPSYRFKANNNDSGEYTCQTGQTSLSDPVHLTVLSEWLVLQTPHLEFQEGETIMLRCHSWKDKPLVKVTFFQNGKSQKFSRLDPTFSIPQANHSHSGDYHCTGNIGYTLFSSKPVTITVQVPSMGSSSPMGIIVAVVIATAVAAIVAAVVALIYCRKKRISANSTDPVKAAQFEPPGRQMIAIRKRQLEETNNDYETADGGYMTLNPRAPTDDDKNIYLTLPPNDHVGCIDWGVD

SEQ ID NO: 760003 - protein, 329 aa, Homo sapiens; identical to SEQ ID NO: 759985

SEQ ID NO: 760004 - protein, 108 aa, Homo sapiens
THTGEKKFVCSECSKCFVRSDHLAEHTKTQQNKKGIHSSSTVLASVEAARDDTLITAGGTKLILANIQQGSVSGIGTVNTSATSNQDILTNTEIPLQLVTVSGNETME

SEQ ID NO: 760005 - protein, 212 aa, Homo sapiens
MAQTDKPTCIPPELPKMLKEFAKAAIRAQPQDLIQWGADYFEALSRGETPPVRERSERVALCNWAELTPELLKILHSQVAGRLIIRAEELAQMWKVVNLPTDLFNSVMNVGRFTEEIEWLKFLALACSALGVTITKTLKIVCEVLSCDHNGGLPRIPFSTFQFLYTYIAEVDGEICASHVSRMLNYIEQEVIGPDGLITVNDFTQNPRVWLE

SEQ ID NO: 760006 - protein, 212 aa, Homo sapiens; identical to SEQ ID NO: 760005

SEQ ID NO: 760007 - protein, 212 aa, Homo sapiens; identical to SEQ ID NO: 760005

SEQ ID NO: 760008 - protein, 120 aa, Homo sapiens
MWKVVNLPTDLFNSVMNVGRFTEEIEWLKFLALACSALGVTITKTLKIVCEVLSCDHNGGLPRIPFSTFQFLYTYIAEVDGEICASHVSRMLNYIEQEVIGPDGLITVNDFTQNPRVWLE

SEQ ID NO: 760009 - protein, 212 aa, Homo sapiens; identical to SEQ ID NO: 760005

SEQ ID NO: 760010 - protein, 331 aa, Homo sapiens
MRFRFGVVVPPAVAGARPELLVVGSRPELGRWEPRGAVRLRPAGTAAGDGALALQEPGLWLGEVELAAEEAAQDGAEPGRVDTFWYKFLKREPGGELSWEGNGPHHDRCCTYNENNLVDGVYCLPIGHWIEATGHTNEMKHTTDFYFNIAGHQAMHYSRILPNIWLGSCPRQVEHVTIKLKHELGITAVMNFQTEWDIVQNSSGCNRYPEPMTPDTMIKLYREEGLAYIWMPTPDMSTEGRVQMLPQAVCLLHALLEKGHIVYVHCNAGVGRSTAAVCGWLQYVMGWNLRKVQYFLMAKRPAVYIDEEALARAQEDFFQKFGKVRSSVCSL

SEQ ID NO: 760011 - protein, 224 aa, Homo sapiens
MRFRFGVVVPPAVAGARPELLVVGSRPELGRWEPRGAVRLRPAGTAAGDGALALQEPGLWLGEVELAAEEAAQDGAEPGRVDTFWYKFLKREPGGELSWEGNGPHHDRCCTYNENNLVDGVYCLPIGHWIEATGHTNEMKHTTDFYFNIAGHQAMHYSRPSTDAAPGGVPAACAAGEGTHRVRALQRWGGPLHRGCLRLAPVCDGLESEEGAVFPHGQEAGCLH

SEQ ID NO: 760012 - protein, 162 aa, Homo sapiens
QTKNLRPARVSDLVKIGSAPETRSKIFPRFTIRRRLSRGNGPHHDRCCTYNENNLVDGVYCLPIGHWIEATGHTNEMKHTTDFYFNIAGHQAMHYSRPSTDAAPGGVPAACAAGEGTHRVRALQRWGGPLHRGCLRLAPVCDGLESEEGAVFPHGQEAGCLH

SEQ ID NO: 760013 - protein, 142 aa, Homo sapiens
MNFQTEWDIVQNSSGCNRYPEPMTPDTMIKLYREEGLAYIWMPTPDMSTEGRVQMLPQAVCLLHALLEKGHIVYVHCNAGVGRSTAAVCGWLQYVMGWNLRKVQYFLMAKRPAVYIDEEALARAQEDFFQKFGKVRSSVCSL

SEQ ID NO: 760014 - protein, 317 aa, Homo sapiens
MRFRFGVVVPPAVAGARPELLVVGSRPELGRWEPRGAVRLRPAGTAAGDGALALQEPGLWLGEVELAAEEAAQDGAEPGRVDTFWYKFLKREPGGELSWEGNGPHHDRCCTYNENNLVDGVYCLPIGHWIEATGHTNEMKHTTDFYFNIAGHQAMHYSRILPNIWLGSCPRQVEHVTIKLKHELGITAVMNFQTEWDIVQNSSGCNRYPEPMTPDTMIKLYREEGLAYIWMPTPDMSTEGRVQMLPQAVCLLHALLEKGHIVYVHCNAGVGRSTAAVCGWLQYVMGWNLRKVQYFLMAKRPAVYIDEEAASQDTFPL

SEQ ID NO: 760015 - protein, 224 aa, Homo sapiens; identical to SEQ ID NO: 760011

SEQ ID NO: 760016 - protein, 177 aa, Homo sapiens
MIFNKILPNIWLGSCPRQVEHVTIKLKHELGITAVMNFQTEWDIVQNSSGCNRYPEPMTPDTMIKLYREEGLAYIWMPTPDMSTEGRVQMLPQAVCLLHALLEKGHIVYVHCNAGVGRSTAAVCGWLQYVMGWNLRKVQYFLMAKRPAVYIDEEALARAQEDFFQKFGKVRSSVCSL

SEQ ID NO: 760017 - protein, 233 aa, Homo sapiens
MIFNKILPNIWLGSCPRQVEHVTIKLKHELGITAVMNFQTEWDIVQNSSGCNRYPEPMTPDTMIKLYREEGLAYIWMPTPDMSTEGWQSDPEHCSRQQLYQLMKLLPAFLHRRFRQVLQTHAISTPYVHDHLELGRAYKLKGRVQMLPQAVCLLHALLEKGHIVYVHCNAGVGRSTAAVCGWLQYVMGWNLRKVQYFLMAKRPAVYIDEEALARAQEDFFQKFGKVRSSVCSL

SEQ ID NO: 760018 - protein, 267 aa, Homo sapiens
MRFRFGVVVPPAVAGARPELLVVGSRPELGRWEPRGAVRLRPAGTAAGDGALALQEPGLWLGEVELAAEEAAQDGAEPGRVDTFWYKFLKREPGGELSWEGNGPHHDRCCTYNENNLVDGVYCLPIGHWIEATGHTNEMKHTTDFYFNIAGHQAMHYSRILPNIWLGSCPRQVEHVTIKLKHELGITAVMNFQTEWDIVQNSSGCNRYPEPMTPDTMIKLYREEGLAYIWMPTPDMSTEGKDQNCSASLLYFRETLAVCLSIYNLIS

SEQ ID NO: 760019 - protein, 92 aa, Homo sapiens
SDADLAERREESGRSAGGRGAADHGAPESLVNVFWTKQEDVTEILKGAGSCSTRIMIHLGTFLFTAFDSGSKVLTKCTSLKGVKERNLFIKP

SEQ ID NO: 760020 - protein, 682 aa, Homo sapiens
MNPPAAFLAGRQNIGSEVEISTIEKQRKELQLLIGELKDRDKELNDMVAVHQQQLLSWEEDRQKVLTLEERCSKLEGELHKRTEIIRSLTKKVKALESNQMECQTALQKTQLQLQEMAQKATHSSLLSEDLEARNETLSNTLVELSAQVGQLQAREQALTTMIKLKDKDIIEAVNHIADCSGKFKMLEHALRDAKMAETCIVKEKQDYKQKLKALKIEVNKLKEDLNEKTTENNEQREEIIRLKQEKSCLHDELLFTVEREKRKDELLNIAKSKQERTNSELHNLRQIYVKQQSDLQFLNFNVENSQELIQMYDSKMEESKALDSSRDMCLSDLENNHPKVDIKREKNQKSLFKDQKFEAMLVQQNRSDKSSCDECKEKKQQIDTVFGEKSVITLSSIFTKDLVEKHNLPWSLGGKTQIEPENKITLCKIHTKSPKCHGTGVQNEGKQPSETPTLSDEKQWHDVSVYLGLTNCPSSKHPEKLDVECQDQMERSEISCCQKNEACLGESGMCDSKCCHPSNFIIEAPGHMSDVEWMSIFKPSKMQRIVRLKSGCTCSESICGTQHDSPASELIAIQDSHSLGSSKSALREDETESSSNKKNSPTSLLIYKDAPAFNEKASIVLPSQDDFSPTSKLQRLLAESRQMVTDLELNTLLPISHENLTGSATNISHLCGRQKADTNTE

SEQ ID NO: 760021 - protein, 684 aa, Homo sapiens
MNPPAAFLAGRQNIGSEVEISTIEKQRKELQLLIGELKDRDKELNDMVAVHQQQLLSWEEDRQKVLTLEERCSKLEGELHKRTEIIRSLTKKVKALESNQMECQTALQKTQLQLQEMAQKATHSSLLSEDLEARNETLSNTLVELSAQVGQLQAREQALTTMIKLKDKDIIEAVNHIADCSGKFKMLEHALRDAKMAETCIVKEKQDYKQKLKALKIEVNKLKEDLNEKTTENNEQREEIIRLKQEKSCLHDELLFTVEREKRKDELLNIAKSKQERTNSELHNLRQIYVKQQSDLQFLNFNVENSQELIQMYDSKMEESKALDSSRDMCLSDLENNHPKVDIKREKNQKSLFKDQKFEAMLVQQNRSDKSSCDECKEKKQQIDTVFGEKSVITLSSIFTKDLVEKHNLPWSLGGKTQIEPENKITLCKIHTKSPKCHGTGVQNEGKQPSETPTLSDEKQWHDVSVYLGLTNCPSSKHPEKLDVECQDQMERSEISCCQKNEACLGESGMCDSKCCHPSNFIIEAPGHMSDVEWMSIFKPSKMQRIVRLKSGCTCSESICGTQHDSPASELIAIQDSHSLGSSKSALREDETESSSNKKNSPTSLLIYKDAPAFNEKASIVLPSQDDFSPTSKLQRLLAESRQMVTDLELNTLLPISHENLTGSATNKSEVPEESAQKNTFVSY

SEQ ID NO: 760022 - protein, 87 aa, Homo sapiens
SRQMVTDLELSTLLPISHENLTAVPQKVRGPRRVSSKKYLCQLLKETKGNFSIHRDHEFLIYVEGRKQTPILNEYLTVKLKEDSSSS

SEQ ID NO: 760023 - protein, 684 aa, Homo sapiens; identical to SEQ ID NO: 760021

SEQ ID NO: 760024 - protein, 672 aa, Homo sapiens
MNPPAAFLAGRQNIGSEVEISTIEKQRKELQLLIGELKDRDKELNDMVAVHQQQLLSWEEDRQKVLTLEERCSKLEGELHKRTEIIRSLTKKVKALESNQMECQTALQKTQLQLQEMAQKATHSSLLSEDLEARNETLSNTLVELSAQVGQLQAREQALTDNDKAKDCSGKFKMLEHALRDAKMAETCIVKEKQDYKQKLKALKIEVNKLKEDLNEKTTENNEQREEIIRLKQEKSCLHDELLFTVEREKRKDELLNIAKSKQERTNSELHNLRQIYVKQQSDLQFLNFNVENSQELIQMYDSKMEESKALDSSRDMCLSDLENNHPKVDIKREKNQKSLFKDQKFEAMLVQQNRSDKSSCDECKEKKQQIDTVFGEKSVITLSSIFTKDLVEKHNLPWSLGGKTQIEPENKITLCKIHTKSPKCHGTGVQNEGKQPSETPTLSDEKQWHDVSVYLGLTNCPSSKHPEKLDVECQDQMERSEISCCQKNEACLGESGMCDSKCCHPSNFIIEAPGHMSDVEWMSIFKPSKMQRIVRLKSGCTCSESICGTQHDSPASELIAIQDSHSLGSSKSALREDETESSSNKKNSPTSLLIYKDAPAFNEKASIVLPSQDDFSPTSKLQRLLAESRQMVTDLELNTLLPISHENLTGSATNKSEVPEESAQKNTFVSY

SEQ ID NO: 760025 - protein, 120 aa, Homo sapiens
DLGELSPMPMMISWEPFCFLPRWLGHLQGVGAKSMARLSRAQQAEVDGHSGVRSLGPDSPSRVGQDRAGLEDLQSHKWAGLYLQKGVDSPGLGDSPSSVSLLSSWDYRHPPLRPANFLYF

SEQ ID NO: 760026 - protein, 95 aa, Homo sapiens
VTWSLVAPARERGTLPAPSWSGEGLVAAQVQWAGGQGSPCRGTAWPLFSVPLPWVGLQALSHGFGWGAASPSSPSSKLLRKSWAEHSRGGLGPQD

SEQ ID NO: 760027 - protein, 404 aa, Homo sapiens
MVRGWVLNGRGSGIHRSLGVHCSKVRSLTLDSWEPELLKLMCELGNSAVNQIYEAQCEGAGSRKPTASSSRQDKEAWIKDKYVEKKFLRKAPMAPALEAPRRWRVQKCLRPHSSPRAPTARRKVRLEPVLPCVAALSSVGTLDRKFRRDSLFCPDELDSLFSYFDAGAAGAGPRSLSSDSGLGGSSDGSSDVLAFGSGSVVDSVTEEEGAESEESSGEADGDTEAEAWGLADVRELHPGLLAHRAARARDLPALAAALAHGAEVNWADAEDEGKTPLVQAVLGGSLIVCEFLLQNGADVNQRDSRGRAPLHHATLLGRTGQVCLFLKRGADQHALDQEQRDPLAIAVQAANADIVTLLRLARMAEEMREAEAAPGPPGALAGSPTELQFRRCIQEFISLHLEES

SEQ ID NO: 760028 - protein, 135 aa, Homo sapiens
RAVRAGAAAARRRGPRASERRGRRSHDRGVRGVRQGLPALQLVKLCSGMVEAGKAYVSTSRLFVSGVRDLSQQCQGDTVISVRGRLTSDLKECLQRFADSLQEVVNYHMILFDQAQRSVRQQLQSFVKEPGGACL

SEQ ID NO: 760029 - protein, 826 aa, Homo sapiens
ERSGPARLPLGAAVLVPVSAAAAAAMTVEFEECVKDSPRFRATIDEVETDVVEIEAKLDKLVKLCSGMVEAGKAYVSTSRLFVSGVRDLSQQCQGDTVISECLQRFADSLQEVVNYHMILFDQAQRSVRQQLQSFVKEDVRKFKETKKQFDKVREDLELSLVRNAQAPRHRPHEVEEATGALTLTRKCFRHLALDYVLQINVLQAKKKFEILDSMLSFMHAQSSFFQQGYSLLHQLDPYMKKLAAELDQLVIDSAVEKREMERKHAAIQQRTLLQDFSYDESKVEFDVDAPSGVVMEGYLFKRASNAFKTWNRRWFSIQNSQLVYQKKLKDALTVVVDDLRLCSVKPCEDIERRFCFEVLSPTKSCMLQADSEKLRQAWVQAVQASIASAYRESPDSCYSERLDRTASPSTSSIDSATDTRERGVKGESVLQRVQSVAGNSQCGDCGQPDPRWASINLGVLLCIECSGIHRSLGVHCSKVRSLTLDSWEPELLKLMCELGNSAVNQIYEAQCEGAGSRKPTASSSRQDKEAWIKDKYVEKKFLRKAPMAPALEAPRRWRVQKCLRPHSSPRAPTARRKVRLEPVLPCVAALSSVGTLDRKFRRDSLFCPDELDSLFSYFDAGAAGAGPRKGAESEESSGEADGDTEAEAWGLADVRELHPGLLAHRAARARDLPALAAALAHGAEVNWADAEDEGKTPLVQAVLGGSLIVCEFLLQNGADVNQRDSRGRAPLHHATLLGRTGQVCLFLKRGADQHALDQEQRDPLAIAVQAANADIVTLLRLARMAEEMREAEAAPGPPGALAGSPTELQFRRCIQEFISLHLEES

SEQ ID NO: 760030 - protein, 796 aa, Homo sapiens
MEAKKPLCIPKATIDEVETDVVEIEAKLDKLVKLCSGMVEAGKAYVSTSRLFVSGVRDLSQQCQGDTVISECLQRFADSLQEVVNYHMILFDQAQRSVRQQLQSFVKEDVRKFKETKKQFDKVREDLELSLVRNAQAPRHRPHEVEEATGALTLTRKCFRHLALDYVLQINVLQAKKKFEILDSMLSFMHAQSSFFQQGYSLLHQLDPYMKKLAAELDQLVIDSAVEKREMERKHAAIQQRTLLQDFSYDESKVEFDVDAPSGVVMEGYLFKRASNAFKTWNRRWFSIQNSQLVYQKKLKDALTVVVDDLRLCSVKPCEDIERRFCFEVLSPTKSCMLQADSEKLRQAWVQAVQASIASAYRESPDSCYSERLDRTASPSTSSIDSATDTRERGVKGESVLQRVQSVAGNSQCGDCGQPDPRWASINLGVLLCIECSGIHRSLGVHCSKVRSLTLDSWEPELLKLMCELGNSAVNQIYEAQCEGAGSRKPTASSSRQDKEAWIKDKYVEKKFLRKAPMAPALEAPRRWRVQKCLRPHSSPRAPTARRKVRLEPVLPCVAALSSVGTLDRKFRRDSLFCPDELDSLFSYFDAGAAGAGPRKGAESEESSGEADGDTEAEAWGLADVRELHPGLLAHRAARARDLPALAAALAHGAEVNWADAEDEGKTPLVQAVLGGSLIVCEFLLQNGADVNQRDSRGRAPLHHATLLGRTGQVCLFLKRGADQHALDQEQRDPLAIAVQAANADIVTLLRLARMAEEMREAEAAPGPPGALAGSPTELQFRRCIQEFISLHLEES

SEQ ID NO: 760031 - protein, 826 aa, Homo sapiens; identical to SEQ ID NO: 760029

SEQ ID NO: 760032 - protein, 897 aa, Homo sapiens
RWSPLWPQSLAPCGAFACLWDSSPGHHPGQRLAAGRSGYFGIGESPPGVGDGSTSHQELGTGPPVTRSWQPSLTGFLPLPPPAPALQTLLQVSEHGPWAGCGSGETRWGGAFPSSTPRALQHQGHLPPVSAPAADAAVRGWLRPDLHIPRGVGGSCPFPSHVAWGAGGRPSPLLPWPARWRDTQGPQLTPRPPEWGSVRPAGHMNGALRMRRVGAQLLPDRSLLVPAGLGWGRHSRAPSCEREGSAPRVAGLGALLRSRSGCGEQRVSRLSVWSVGRVAASDKDLTTHLCSGKARRVAGPLGWALRGRVPSPQDFSYDESKVEFDVDAPSGVVMEGYLFKRASNAFKTWNRRWFSIQNSQLVYQKKLKDALTVVVDDLRLCSVKPCEDIERRFCFEVLSPTKSCMLQADSEKLRQAWVQAVQASIASAYRESPDSCYSERLDRTASPSTSSIDSATDTRERGVKGESVLQRVQSVAGNSQCGDCGQPDPRWASINLGVLLCIECSGIHRSLGVHCSKVRSLTLDSWEPELLKLMCELGNSAVNQIYEAQCEGAGSRKPTASSSRQDKEAWIKDKYVEKKFLRKAPMAPALEAPRRWRVQKCLRPHSSPRAPTARRKVRLEPVLPCVAALSSVGTLDRKFRRDSLFCPDELDSLFSYFDAGAAGAGPRSLSSDSGLGGSSDGSSDVLAFGSGSVVDSVTEEEGAESEESSGEADGDTEAEAWGLADVRELHPGLLAHRAARARDLPALAAALAHGAEVNWADAEDEGKTPLVQAVLGGSLIVCEFLLQNGADVNQRDSRGRAPLHHATLLGRTGQVCLFLKRGADQHALDQEQRDPLAIAVQAANADIVTLLRLARMAEEMREAEAAPGPPGALAGSPTELQFRRCIQEFISLHLEES

SEQ ID NO: 760033 - protein, 675 aa, Homo sapiens
RWSPLWPQSLAPCGAFACLWDSSPGHHPGQRLAAGRSGYFGIGESPPGVGDGSTSHQELGTGPPVTRSWQPSLTGFLPLPPPAPALQTLLQDFSYDESKVEFDVDAPSGVVMEGYLFKRASNAFKTWNRRWFSIQNSQLVYQKKLKDALTVVVDDLRLCSVKPCEDIERRFCFEVLSPTKSCMLQADSEKLRQAWVQAVQASIASAYRESPDSCYSERLDRTASPSTSSIDSATDTRERGVKGESVLQRVQSVAGNSQCGDCGQPDPRWASINLGVLLCIECSGIHRSLGVHCSKVRSLTLDSWEPELLKLMCELGNSAVNQIYEAQCEGAGSRKPTASSSRQDKEAWIKDKYVEKKFLRKAPMAPALEAPRRWRVQKCLRPHSSPRAPTARRKVRLEPVLPCVAALSSVGTLDRKFRRDSLFCPDELDSLFSYFDAGAAGAGPRSLSSDSGLGGSSDGSSDVLAFGSGSVVDSVTEEEGAESEESSGEADGDTEAEAWGLADVRELHPGLLAHRAARARDLPALAAALAHGAEVNWADAEDEGKTPLVQAVLGGSLIVCEFLLQNGADVNQRDSRGRAPLHHATLLGRTGQVCLFLKRGADQHALDQEQRDPLAIAVQAANADIVTLLRLARMAEEMREAEAAPGPPGALAGSPTELQFRRCIQEFISLHLEES

SEQ ID NO: 760034 - protein, 572 aa, Homo sapiens
SRELDTGLGAQAVGLRVSKVKQEVGGRGRVVAEGRGHSGAAQQDALTVVVDDLRLCSVKPCEDIERRFCFEVLSPTKSCMLQADSEKLRQAWVQAVQASIASAYRESPDSCYSERLDRTASPSTSSIDSATDTRERGVKGESVLQRVQSVAGNSQCGDCGQPDPRWASINLGVLLCIECSGIHRSLGVHCSKVRSLTLDSWEPELLKLMCELGNSAVNQIYEAQCEGAGSRKPTASSSRQDKEAWIKDKYVEKKFLRKAPMAPALEAPRRWRVQKCLRPHSSPRAPTARRKVRLEPVLPCVAALSSVGTLDRKFRRDSLFCPDELDSLFSYFDAGAAGAGPRSLSSDSGLGGSSDGSSDVLAFGSGSVVDSVTEEEGAESEESSGEADGDTEAEAWGLADVRELHPGLLAHRAARARDLPALAAALAHGAEVNWADAEDEGKTPLVQAVLGGSLIVCEFLLQNGADVNQRDSRGRAPLHHATLLGRTGQVCLFLKRGADQHALDQEQRDPLAIAVQAANADIVTLLRLARMAEEMREAEAAPGPPGALAGSPTELQFRRCIQEFISLHLEES

SEQ ID NO: 760035 - protein, 717 aa, Homo sapiens
ERSGPARLPLGAAVLVPVSAAAAAAMTVEFEECVKDSPRFRATIDEVETDVVEIEAKLDKLVKLCSGMVEAGKAYVSTSRLFVSGVRDLSQQCQGDTVISECLQRFADSLQEVVNYHMILFDQAQRSVRQQLQSFVKEDVRKFKETKKQFDKVREDLELSLVRNAQAPRHRPHEVEEATGALTLTRKCFRHLALDYVLQINVLQAKKKFEILDSMLSFMHAQSSFFQQGYSLLHQLDPYMKKLAAELDQLVIDSAVEKREMERKHAAIQQRTLLQDFSYDESKVEFDVDAPSGVVMEGYLFKRASNAFKTWNRRWFSIQNSQLVYQKKLKDALTVVVDDLRLCSVKPCEDIERRFCFEVLSPTKSCMLQADSEKLRQAWVQAVQASIASAYRESPDSCYSERLDRTASPSTSSIDSATDTRERGVKGESVLQRVQSVAGNSQCGDCGQPDPRWASINLGVLLCIECSGIHRSLGVHCSKVRSLTLDSWEPELLKLMCELGNSAVNQIYEAQCEGAGSRKPTASSSRQDKEAWIKDKYVEKKFLRKAPMAPALEAPRRWRVQKCLRPHSSPRAPTARRKVRLEPVLPCVAALSSVGTLDRKFRRDSLFCPDELDSLFSYFDAGAAGAGPRSLSSDSGLGGSSDGSSDVLAFGSGSVVDSVTEEADEEGATVRQRAKAKNTGTRRPRPGPGQTPHDPSLGHTQRPNRVRGRTDSLEPDT

SEQ ID NO: 760036 - protein, 117 aa, Homo sapiens
MFTDVCTSVHRLCLVDIWQTTMEAKKPLCIPKATIDEVETDVVEIEAKLDKVKGGPGAPCARPSLGWPHGQTRPPGLTKPLTPPICGACVWCSRSWSLCLSMCVPGCTCHMHTCGWP

SEQ ID NO: 760037 - protein, 759 aa, Homo sapiens
MVEAGKAYVSTSRLFVSGVRDLSQQCQGDTVISECLQRFADSLQEVVNYHMILFDQAQRSVRQQLQSFVKEDVRKFKETKKQFDKVREDLELSLVRNAQAPRHRPHEVEEATGALTLTRKCFRHLALDYVLQINVLQAKKKFEILDSMLSFMHAQSSFFQQGYSLLHQLDPYMKKLAAELDQLVIDSAVEKREMERKHAAIQQRTLLQDFSYDESKVEFDVDAPSGVVMEGYLFKRASNAFKTWNRRWFSIQNSQLVYQKKLKDALTVVVDDLRLCSVKPCEDIERRFCFEVLSPTKSCMLQADSEKLRQAWVQAVQASIASAYRESPDSCYSERLDRTASPSTSSIDSATDTRERGVKGESVLQRVQSVAGNSQCGDCGQPDPRWASINLGVLLCIECSGIHRSLGVHCSKVRSLTLDSWEPELLKLMCELGNSAVNQIYEAQCEGAGSRKPTASSSRQDKEAWIKDKYVEKKFLRKAPMAPALEAPRRWRVQKCLRPHSSPRAPTARRKVRLEPVLPCVAALSSVGTLDRKFRRDSLFCPDELDSLFSYFDAGAAGAGPRKGAESEESSGEADGDTEAEAWGLADVRELHPGLLAHRAARARDLPALAAALAHGAEVNWADAEDEGKTPLVQAVLGGSLIVCEFLLQNGADVNQRDSRGRAPLHHATLLGRTGQVCLFLKRGADQHALDQEQRDPLAIAVQAANADIVTLLRLARMAEEMREAEAAPGPPGALAGSPTELQFRRCIQEFISLHLEES

SEQ ID NO: 760038 - protein, 138 aa, Homo sapiens
ERSGPARLPLGAAVLVPVSAAAAAAMTVEFEECVKDSPRFRATIDEVETDVVEIEAKLDKLVKLCSGMVEAGKAYVSTSRLFVSGVRDLSQQCQGDTVISECLQRFADSLQEVVNYHMILFDQAQRSVRQQLQSFVKE

SEQ ID NO: 760039 - protein, 817 aa, Homo sapiens
MFTDVCTSVHRLCLVDIWQTTMEAKKPLCIPKATIDEVETDVVEIEAKLDKLVKLCSGMVEAGKAYVSTSRLFVSGVRDLSQQCQGDTVISECLQRFADSLQEVVNYHMILFDQAQRSVRQQLQSFVKEDVRKFKETKKQFDKVREDLELSLVRNAQAPRHRPHEVEEATGALTLTRKCFRHLALDYVLQINVLQAKKKFEILDSMLSFMHAQSSFFQQGYSLLHQLDPYMKKLAAELDQLVIDSAVEKREMERKHAAIQQRTLLQDFSYDESKVEFDVDAPSGVVMEGYLFKRASNAFKTWNRRWFSIQNSQLVYQKKLKDALTVVVDDLRLCSVKPCEDIERRFCFEVLSPTKSCMLQADSEKLRQAWVQAVQASIASAYRESPDSCYSERLDRTASPSTSSIDSATDTRERGVKGESVLQRVQSVAGNSQCGDCGQPDPRWASINLGVLLCIECSGIHRSLGVHCSKVRSLTLDSWEPELLKLMCELGNSAVNQIYEAQCEGAGSRKPTASSSRQDKEAWIKDKYVEKKFLRKAPMAPALEAPRRWRVQKCLRPHSSPRAPTARRKVRLEPVLPCVAALSSVGTLDRKFRRDSLFCPDELDSLFSYFDAGAAGAGPRKGAESEESSGEADGDTEAEAWGLADVRELHPGLLAHRAARARDLPALAAALAHGAEVNWADAEDEGKTPLVQAVLGGSLIVCEFLLQNGADVNQRDSRGRAPLHHATLLGRTGQVCLFLKRGADQHALDQEQRDPLAIAVQAANADIVTLLRLARMAEEMREAEAAPGPPGALAGSPTELQFRRCIQEFISLHLEES

SEQ ID NO: 760040 - protein, 680 aa, Homo sapiens
RWSAPEVRDLPHLALDYVLQINVLQAKKKFEILDSMLSFMHAQSSFFQQGYSLLHQLDPYMKKLAAELDQLVIDSAVEKREMERKHAAIQQRTLLQDFSYDESKVEFDVDAPSGVVMEGYLFKRASNAFKTWNRRWFSIQNSQLVYQKKLKDALTVVVDDLRLCSVKPCEDIERRFCFEVLSPTKSCMLQADSEKLRQAWVQAVQASIASAYRESPDSCYSERLDRTASPSTSSIDSATDTRERGVKGESVLQRVQSVAGNSQCGDCGQPDPRWASINLGVLLCIECSGIHRSLGVHCSKVRSLTLDSWEPELLKLMCELGNSAVNQIYEAQCEGAGSRKPTASSSRQDKEAWIKDKYVEKKFLRKAPMAPALEAPRRWRVQKCLRPHSSPRAPTARRKVRLEPVLPCVAALSSVGTLDRKFRRDSLFCPDELDSLFSYFDAGAAGAGPRSLSSDSGLGGSSDGSSDVLAFGSGSVVDSVTEEEGAESEESSGEADGDTEAEAWGLADVRELHPGLLAHRAARARDLPALAAALAHGAEVNWADAEDEGKTPLVQAVLGGSLIVCEFLLQNGADVNQRDSRGRAPLHHATLLGRTGQVCLFLKRGADQHALDQEQRDPLAIAVQAANADIVTLLRLARMAEEMREAEAAPGPPGALAGSPTELQFRRCIQEFISLHLEES

SEQ ID NO: 760041 - protein, 162 aa, Homo sapiens
MCGCARARWVSWDLLASQHVCGGTGSLCIPGALTRRLRSLGVGGSGPARRVAPSPGQRNWGHPLLSQGRKGGPSREPTSTSLSDPSIQAGVAGAGREGLWPGSSALAGRGRPKATWLATKVPVPDSPSRIPASSGGTFSWYSAQSLRIKPLCHFAALISCSL

SEQ ID NO: 760042 - protein, 259 aa, Homo sapiens
ERSGPARLPLGAAVLVPVSAAAAAAMTVEFEECVKDSPRFRATIDEVETDVVEIEAKLDKLVKLCSGMVEAGKAYVSTSRLFVSGVRDLSQQCQGDTVISECLQRFADSLQEVVNYHMILFDQAQRSVRQQLQSFVKEDVRKFKETKKQFDKVREDLELSLVRNAQAPRHRPHEVEEATGALTLTRKCFRHLALDYVLQINVLQAKKKFEILDSMLSFMHAQSSFFQQGYSLLHQLDPYMKKLAAEVSLWEGWGWARPP

SEQ ID NO: 760043 - protein, 174 aa, Homo sapiens
YTSCLCVWSWLESLSLTCQTTPPPSSPCLLHSPETFIHTMPPNLTGYYRFVSQKNMEDYLQALNISLAVRKIALLLKPDKEIEHQGNHMTVRTLSTFRNYTVQFDVGVEFEEDLRSVDGRKCQTIVTWEEEHLVCVQKGEVPNRGWRHWLEGEMLYLELTARDAVCEQVFRKVR

SEQ ID NO: 760044 - protein, 136 aa, Homo sapiens
YTSCLCVWSWLESLSLTCQTTPPPSSPCLLHSPETFIHTMPPNLTGYYRFVSQKNMEDYLQALNISLAVRKIALLLKPDKEIEHQGNHMTVRTLSTFRNYTVQFDVGVEFEEDLRSVDGRKCQAALGMNSPARAIS

SEQ ID NO: 760045 - protein, 103 aa, Homo sapiens
VEANTDLWMAEFWMTDSPRSCSRFLPQEGSYISLAVRKIALLLKPDKEIEHQGNHMTVRTLSTFRNYTVQFDVGVEFEEDLRSVDGRKCQAALGMNSPARAIS

SEQ ID NO: 760046 - protein, 174 aa, Homo sapiens; identical to SEQ ID NO: 760043

SEQ ID NO: 760047 - protein, 143 aa, Homo sapiens
YTSCLCVWSWLESLSLTCQTTPPPSSPCLLHSPETFIHTMPPNLTGYYRFVSQKNMEDYLQALNISLAVRKIALLLKPDKEIEHQGNHMTVRTLSTFRNYTVQFDVGVEFEEDLRSVDGRKCQGRSPTGAGDTGWRERCCIWN

SEQ ID NO: 760048 - protein, 164 aa, Homo sapiens
YHQPKGQRTGQPRPKSKHLPTLQPVTLLVTQSPFYFSINNFTLLHFFLLLTYSFLASFADPSPPINPLNWSFLRRVLFLMSSPFCLPTIHRLNHLHPCLLLPSIGCPWHEFSSQSHLLSSRAMFSTAYKIQLALHIHGFCIHSFSKLQMEKYLGKIKIKNNNTK

SEQ ID NO: 760049 - protein, 665 aa, Homo sapiens
MAGLSGAQIPDGEFTALVYRLIRDARYAEAVQLLGRELQRSPRSRAGLSLLGYCYYRLQEFALAAECYEQLGQLHPELEQYRLYQAQALYKACLYPEATRVAFLLLDNPAYHSRVLRLQAAIKYSEGDLPGSRSLVEQLLSGEGGEESGGDNETDGQVNLGCLLYKEGQYEAACSKFSATLQASGYQPDLSYNLALAYYSSRQYASALKHIAEIIERGIRQHPELGVGMTTEGFDVRSVGNTLVLHQTALVEAFNLKAAIEYQLRNYEVAQETLTDMPPRAEEELDPVTLHNQALMNMDARPTEGFEKLQFLLQQNPFPPETFGNLLLLYCKYEYFDLAADVLAENAHLTYKFLTPYLYDFLDALITCQTAPEEAFIKLDGLAGMLTEQLRRLTKQVQEARHNRDDEAIKKAVNEYDETMEKYIPVLMAQAKIYWNLENYPMVEKIFRKSVEFCNDHDVWKLNVAHVLFMQENKYKEAIGFYEPIVKKHYDNILNVSAIVLANLCVSYIMTSQNEEAEELMRKIEKEEEQLSYDDPNRKMYHLCIVNLVIGTLYCAKGNYEFGISRVIKSLEPYNKKLGTDTWYYAKRCFLSLLENMSKHMIVIHDSVIQECVQFLGHCELYGTNIPAVIEQPLEEERMHVGKNTVTDESRQLKALIYEIIGWNK

SEQ ID NO: 760050 - protein, 665 aa, Homo sapiens; identical to SEQ ID NO: 760049

SEQ ID NO: 760051 - protein, 557 aa, Homo sapiens
MKKMSNIYESAANTLGIFNSPCLTKVELRVACKGISDRDALSKPDPCVILKMQSHGQWFEVDRTEVIRTCINPVYSKLFTVDFYFEEVQRLRFEVHDISSNHNGLKEADFLGGMECTLGQIVSQRKLSKSLLKHGNTAGKSSITVIAEELSGNDDYVELAFNARKLDDKDFFSKSDPFLEIFRMNDDATQQLVHRTEVVMNNLSPAWKSFKVSVNSLCSGDPDRRLKCIVWDWDSNGKHDFIGEFTSTFKEMRGAMEGKQVQWECINPKYKAKKKNYKNSGTVILNLCKIHKMHSFLDYIMGGCQIQFTVAIDFTASNGDPRNSCSLHYIHPYQPNEYLKALVAVGEICQDYDSDKMFPAFGFGARIPPEYTVSHDFAINFNEDNPECAGIQGVVEAYQSCLPKLQLYGPTNIAPIIQKVAKSASEETNTKEASQYFILLILTDGVITDMADTREAIVHASHLPMSVIIVGVGNADFSDMQMLDGDDGILRSPKGEPVLRDIVQFVPFRNFKHASPAALAKSVLAEVPNQVVDYYNGKGIKPKCSSEMYESSRTLAP

SEQ ID NO: 760052 - protein, 478 aa, Homo sapiens
TTTKFAAASTRLRFEVHDISSNHNGLKEADFLGGMECTLGQIVSQRKLSKSLLKHGNTAGKSSITVIAEELSGNDDYVELAFNARKLDDKDFFSKSDPFLEIFRMNDDATQQLVHRTEVVMNNLSPAWKSFKVSVNSLCSGDPDRRLKCIVWDWDSNGKHDFIGEFTSTFKEMRGAMEGKQVQWECINPKYKAKKKNYKNSGTVILNLCKIHKMHSFLDYIMGGCQIQFTVAIDFTASNGDPRNSCSLHYIHPYQPNEYLKALVAVGEICQDYDSDKMFPAFGFGARIPPEYTVSHDFAINFNEDNPECAGIQGVVEAYQSCLPKLQLYGPTNIAPIIQKVAKSASEETNTKEASQYFILLILTDGVITDMADTREAIVHASHLPMSVIIVGVGNADFSDMQMLDGDDGILRSPKGEPVLRDIVQFVPFRNFKHASPAALAKSVLAEVPNQVVDYYNGKGIKPKCSSEMYESSRTLAP

SEQ ID NO: 760053 - protein, 557 aa, Homo sapiens; identical to SEQ ID NO: 760051

SEQ ID NO: 760054 - protein, 408 aa, Homo sapiens
MKKMSNIYESAANTLGIFNSPCLTKVELRVACKGISDRDALSKPDPCVILKMQSHGQWFEVDRTEVIRTCINPVYSKLFTVDFYFEEVQRLRFEVHDISSNHNGLKEADFLGGMECTLGQIVSQRKLSKSLLKHGNTAGKSSITVIAEELSGNDDYVELAFNARKLDDKDFFSKSDPFLEIFRMNDDATQQLVHRTEVVMNNLSPAWKSFKVSVNSLCSGDPDRRLKCIVWDWDSNGKHDFIGEFTSTFKEMRGAMEGKQVQWECINPKYKAKKKNYKNSGTVILNLCKIHKMHSFLDYIMGGCQIQFTVAIDFTASNGDPRNSCSLHYIHPYQPNEYLKALVAVGEICQDYDSDKMFPAFGFGARIPPEYTFSLSRLLSTTLNTTLKMLTILGFGTPLLRLYSYATT

SEQ ID NO: 760055 - protein, 557 aa, Homo sapiens; identical to SEQ ID NO: 760051

SEQ ID NO: 760056 - protein, 255 aa, Homo sapiens
MECTLGQVAIDFTASNGDPRNSCSLHYIHPYQPNEYLKALVAVGEICQDYDSDKMFPAFGFGARIPPEYTVSHDFAINFNEDNPECAGIQGVVEAYQSCLPKLQLYGPTNIAPIIQKVAKSASEETNTKEASQYFILLILTDGVITDMADTREAIVHASHLPMSVIIVGVGNADFSDMQMLDGDDGILRSPKGEPVLRDIVQFVPFRNFKHASPAALAKSVLAEVPNQVVDYYNGKGIKPKCSSEMYESSRTLAP

SEQ ID NO: 760057 - protein, 156 aa, Homo sapiens
MCSEATWVSNWYCIVLVSLTSSPPNHHGASELQQYFILLILTDGVITDMADTREAIVHASHLPMSVIIVGVGNADFSDMQMLDGDDGILRSPKGEPVLRDIVQFVPFRNFKHASPAALAKSVLAEVPNQVVDYYNGKGIKPKCSSEMYESSRTLAP

SEQ ID NO: 760058 - protein, 262 aa, Homo sapiens
MSEGRGLPPPPRRDWGDHGRREDDRSWQGTADGGMMDRDHKRWQGEEQLWAGTRMCWGVMERWRPRLLSLGEHRRCSALSAGMRNEEHSRHRLLSGGLAQELDSGRSRVLSAGRKPGRLWSLCPGVFLGPASCGYLGASPKGVEWAKCAVGSTPCAQVPCVKARLSSRWREKHVRSLRAWPHDEPRRNVRARQLCPRRGLPGPPHPTRWHAGRVWRPEPGEQAQRCPLHSPLLSTWNPVSCLVATRLCSVRSYLKLCKNIFF

SEQ ID NO: 760059 - protein, 382 aa, Homo sapiens
VGPGAGECSRELCLRGGSDRRPGPARRSWPAGEGREARAGGSARPGPRALAEAGRAPSPPGAHARRLASAAAEGGARLCMAPAADMTSLPLGVKVEDSAFGKPAGGGAGQAPSAAAATAAAMGADEEGAKPKVSPSLLPFSVEALMADHRKPGAKESALAPSEGVQAAGGSAQPLGVPPGSLGAPDAPSSPRPLGHFSVGGLLKLPEDALVKAESPEKPERTPWMQSPRFSPPPARRLSPPACTLRKHKTNRKPRTPFTTAQLLALERKFRQKQYLSIAERAEFSSSLSLTETQVKIWFQNRRAKAKRLQEAELEKLKMAAKPMLPPAAFGLSFPLGGPAAVAAAAGASLYGASGPFQRAALPVAPVGLYTAHVGYSMYHLT

SEQ ID NO: 760060 - protein, 303 aa, Homo sapiens
MAPAADMTSLPLGVKVEDSAFGKPAGGGAGQAPSAAAATAAAMGADEEGAKPKVSPSLLPFSVEALMADHRKPGAKESALAPSEGVQAAGGSAQPLGVPPGSLGAPDAPSSPRPLGHFSVGGLLKLPEDALVKAESPEKPERTPWMQSPRFSPPPARRLSPPACTLRKHKTNRKPRTPFTTAQLLALERKFRQKQYLSIAERAEFSSSLSLTETQVKIWFQNRRAKAKRLQEAELEKLKMAAKPMLPPAAFGLSFPLGGPAAVAAAAGASLYGASGPFQRAALPVAPVGLYTAHVGYSMYHLT

SEQ ID NO: 760061 - protein, 160 aa, Homo sapiens
MHGTEALGGTQYAGRLSPPACTLRKHKTNRKPRTPFTTAQLLALERKFRQKQYLSIAERAEFSSSLSLTETQVKIWFQNRRAKAKRLQEAELEKLKMAAKPMLPPAAFGLSFPLGGPAAVAAAAGASLYGASGPFQRAALPVAPVGLYTAHVGYSMYHLT

SEQ ID NO: 760062 - protein, 190 aa, Homo sapiens
MHGTEALGGTQYLVLFGYYYYFLGSSCSDASLLTPCFFFFRPSGRLSPPACTLRKHKTNRKPRTPFTTAQLLALERKFRQKQYLSIAERAEFSSSLSLTETQVKIWFQNRRAKAKRLQEAELEKLKMAAKPMLPPAAFGLSFPLGGPAAVAAAAGASLYGASGPFQRAALPVAPVGLYTAHVGYSMYHLT

SEQ ID NO: 760063 - protein, 445 aa, Homo sapiens
VGPGAGECSRELCLRGGSDRRPGPARRSWPAGEGREARAGGSARPGPRALAEAGRAPSPPGAHARRLASAAAEGGARLCMAPAADMTSLPLGVKVEDSAFGKPAGGGAGQAPSAAAATAAAMGADEEGAKPKVSPSLLPFSVEALMADHRKPGAKESALAPSEGVQAAGGSAQPLGVPPGSLGAPDAPSSPRPLGHFSVGGLLKLPEDALVKAESPEKPERTPWMQSPRFSPPPARWVWSPPGFDPFGETPPKDGHPCKPGEDAPFSTNGRQGFGGGARWDADKGFPAKNGMGTPVVPLQTRNAAGGSSSKVRFQRFKLWTHARQRVGKDCWASQENPGRRQGANEGPTEEGQHVWEQSLEVWACQGLVVGPRGGLGASSFPFGGAPELCTGPRRVAPHLRGAGAPSGARVAVAPGEPYRPLVVNVSLIEARPHLEVLRWVPDAR

SEQ ID NO: 760064 - protein, 170 aa, Homo sapiens
LKPFSSGEAAKSSVHKTKSGCQRPRPQVGIRDHPLTGHKVSFPPEPGPLSPYSASVVPGAPVWSGESRSSACLGKRGPWPATPQRHYTTPGAPARIEAMTRCRWVPGPLWVGTGPQHHSPLPGRPGTSRLLSQPCPLARPCHREGPQPIMGIGRAWPLPPPARSLASVDA

SEQ ID NO: 760065 - protein, 134 aa, Homo sapiens
STDGIGFLRSTEERKNILHLDHASLESASTDGISFEPGHSQGWETGRLSPVRKELNLNATRPSFPPKEALKVLPKSVTQTAPAPAKAEVLFSRMGAKQRLLPECSFLPSLLKEQSVVTCLLSVSNCSLTCTCTM

SEQ ID NO: 760066 - protein, 247 aa, Homo sapiens
MFVGVARHSGSQDEVSRGVEPLEAARAQPAKDRRAKGTPKSSKPGKKHRYLRLLPEALIRFGGFRKRKKAKSSVSKKPGEVDDSLEQPCGLGCLVSTCCECCNNIRCFMIFYCILLICQGVVFGLIDVSIGDFQKEYQLKTIEKLALEKSYDISSGLVAIFIAFYGDRKKVIWFVASSFLIGLGSLLCAFPSINEENKQSKVGIEAFIGIAECTSMIGYALGYVLGAPLVKVPENTTSATKFNTDKS

SEQ ID NO: 760067 - protein, 343 aa, Homo sapiens
MFVGVARHSGSQDEVSRGVEPLEAARAQPAKDRRAKGTPKSSKPGKKHRYLRLLPEALIRFGGFRKRKKAKSSVSKKPGEVDDSLEQPCGLGCLVSTCCECCNNIRCFMIFYCILLICQGVVFGLIDVSIGDFQKEYQLKTIEKLALEKMFIGIAECTSMIGYALGYVLGAPLVKVPENTTSATNTTVNNGSPEWLWTWWINFLFAAVVAWCTLIPLSCFPNNMPGSTRIKARKRKQLHFFDSRLKDLKLGTNIKDLCAALWILMKNPVLICLALSKATEYLVIIGASEFLPIYLENQFILTPTVATTLAGLVLIPGGALGQLLGGVIVSTLEMSCKALMRFI

SEQ ID NO: 760068 - protein, 419 aa, Homo sapiens
MAGDSRNAMNQDMEIGVTPWDPKKIPKQARDYVPIATDRTRLLAEGKKPRQRYMEKSGKCNVHHGNVQETYRYLSDLFTTLVDLKWRFNLLVFTMVYTVTWLFFGFIWWLIAYIRGDLDHVGDQEWIPCVENLSGFVSAFLFSIETETTIGYGFRVITEKCPEGIILLLVQAILGSIVNAFMVGCMFVKISQPKKRAETLMFSNNAVISMRDEKLCLMFRVGDLRNSHIVEASIRAKLIKSRQTKEGEFIPLNQTDINVGFDTGDDRLFLVSPLIISHEINEKSPFWEMSQAQLHQEEFEVVVILEGMVEATGMTCQARSSYMDTEVLWGHRFTPVLTLEKGFYEVDYNTFHDTYETNTPSCCAKELAEMKREGRLLQYLPSPPLLGGCAEAGLDAEAEQNEEDEPKGLGGSREARGSV

SEQ ID NO: 760069 - protein, 419 aa, Homo sapiens; identical to SEQ ID NO: 760068

SEQ ID NO: 760070 - protein, 483 aa, Homo sapiens
MDTCFAHACTGHACTGHMHRMHVLYRTHVLHMETHIHALQRDTGKHAYNGYMFTHGRMFCTGHMHRMHVLHTDTHVYIGQVHRARFAPDVFCARDARFADASTHTPRRDGRSGVGSDSGVRTQGQRSGNLPRRRELQLPARSPRDDARPSADWPRPAAPRGPAQVPAPRVAARPPVSRMEPRAADGCFLGDVGFWVERTPVHEAAQRGESLQLQQLIESGACVNQVTVDSITPLHAASLQGQARCVQLLLAAGAQVDARNIDGSTPLCDACASGSIECVKLLLSYGAKVNPPLYTASPLHEACMSGSSECVRLLIDVGANLEAHDCHFGTPLHVACAREHLDCVKVLLNAAVMNVCSYREKVEEAELTLFSELPTVLGANVNAAKLHETALHHAAKVKNVDLIEMLIEFGGNIYARDNRGKKPSDYTWSSSAPAKCFEYYEKTPLTLSQLCRVNLRKATGVRGLEKIAKLNIPPRLIDYLSYN

SEQ ID NO: 760071 - protein, 378 aa, Homo sapiens
IHGHMFCTRLHRTRLHRTHAQDACFVQDTCFAHGNTYPCFAKGHREACLQWIHVYTRTHVLHRTYAQDACFAHGHTRLHRTSAQGTFCTGRILCTGRTVCRCKHTHSSARRAKRGFWVERTPVHEAAQRGESLQLQQLIESGACVNQVTVDSITPLHAASLQGQARCVQLLLAAGAQVDARNIDGSTPLCDACASGSIECVKLLLSYGAKVNPPLYTASPLHEACMSGSSECVRLLIDVGANLEAHDCHFGTPLHVACAREHLDCVKVLLNAGANVNAAKLHETALHHAAKVKNVDLIEMLIEFGGNIYARDNRGKKPSDYTWSSSAPAKCFEYYEKTPLTLSQLCRVNLRKATGVRGLEKIAKLNIPPRLIDYLSYN

SEQ ID NO: 760072 - protein, 134 aa, Homo sapiens
GAAVRPTVALKWGSHSSPREFACPWGVRGANVNAAKLHETALHHAAKVKNVDLIEMLIEFGGNIYARDNRGKKPSDYTWSSSAPAKCFEYYEKTPLTLSQLCRVNLRKATGVRGLEKIAKLNIPPRLIDYLSYN

SEQ ID NO: 760073 - protein, 392 aa, Homo sapiens
MDTCFAHACTGHACTGHMHRMHVLYRTHVLHMETHIHALQRDTGKHAYNGYMFTHGRMFCTGHMHRMHVLHTDTHVYIGQVHRARFAPDVFCARDARFADASTHTPRRDGRSGVGSDSGVRTQGQRSGNLPRRRELQLPARSPRDDARPSADWPRPAAPRGPAQVPAPRVAARPPVSRMEPRAADGCFLGDVGFWVERTPVHEAAQRGESLQLQQLIESGACVNQVTVDSITPLHAASLQGQARCVQLLLAAGAQVDARNIDGSTPLCDACASGSIECVKLLLSYGAKVNPPLYTASPLHEACMSELSPPPEHPGFDALDQLSQVELLGDMDRNEFDQYLNTPGHPDSATGAMALSGHVPVSQVTPTGPTETSLISVLADATATYYNSYSVS

SEQ ID NO: 760074 - protein, 328 aa, Homo sapiens
MDTCFAHACTGHACTGHMHRMHVLYRTHVLHMETHIHALQRDTGKHAYNGYMFTHGRMFCTGHMHRMHVLHTDTHVYIGQVHRARFAPDVFCARDARFADASTHTPRRDGRSGVGSDSGVRTQGQRSGNLPRRRELQLPARSPRDDARPSADWPRPAAPRGPAQVPAPRVAARPPVSRMEPRAADGCFLGDVGTCGRRGGQSEAAAPAPEPAAYPMACAGEVVARPALAPWAGAFGGVGRGESRVPVVPRIPDGLSCLVPCPRPAHCGVAVRAARQVWGFATANPPSAARPGEGAGRVRGRCPVAGESLGNAHGAPSRGSQARAHGKS

SEQ ID NO: 760075 - protein, 114 aa, Homo sapiens
KQTPKAHKRQSQWTSCPELHFLGSLPRVPGCPSREGLQDTSRFQGKGRRFRFPLSLCSIAGVVLLPEINLTSFLAPFFRDTSDSVTALQGELEEGHWRPRAGEDCQVKHPAPAH

SEQ ID NO: 760076 - protein, 456 aa, Homo sapiens
MDTCFAHACTGHACTGHMHRMHVLYRTHVLHMETHIHALQRDTGKHAYNGYMFTHGRMFCTGHMHRMHVLHTDTHVYIGQVHRARFAPDVFCARDARFADASTHTPRRDGRSGVGSDSGVRTQGQRSGNLPRRRELQLPARSPRDDARPSADWPRPAAPRGPAQVPAPRVAARPPVSRMEPRAADGCFLGDVGFWVERTPVHEAAQRGESLQLQQLIESGACVNQVTVDSITPLHAASLQGQARCVQLLLAAGAQVDARNIDGSTPLCDACASGSIECVKLLLSYGAKVNPPLYTASPLHEACMSGSSECVRLLIDVGANLEAHDCHFGTPLHVACAREHLDCVKVLLNAGANVNAAKLHETALHHAAKVKNVDLIEMLIEFGGNIYARDNRGKKPSDYTWSSSAPAKCFEYYEKTPLTLSQLCRVNLRKATGVRGLEKIAKLNIPPRLIDYLSYN

SEQ ID NO: 760077 - protein, 260 aa, Homo sapiens
MDTCFAHACTGHACTGHMHRMHVLYRTHVLHMETHIHALQRDTGKHAYNGYMFTHGRMFCTGHMHRMHVLHTDTHVYIGQVHRARFAPDVFCARDARFADASTHTPRRDGRSGVGSDSGVRTQGQRSGNLPRRRELQLPARSPRDDARPSADWPRPAAPRGPAQVPAPRVAARPPVSRMEPRAADGCFLGDVGFWVERTPVHEAAQRGESLQLQQLIESGACVNQVTVDSITPLHAASLQGQARCVQLLLAAGAQGVPNV

SEQ ID NO: 760078 - protein, 456 aa, Homo sapiens; identical to SEQ ID NO: 760076

SEQ ID NO: 760079 - protein, 456 aa, Homo sapiens; identical to SEQ ID NO: 760076

SEQ ID NO: 760080 - protein, 107 aa, Homo sapiens
MADQNQVWVGSEDSVIYIINVHSMSCNKQLTAHCSSVTDLIVQDGQEAPSNVYSCSMDGMVLVWNVSTLQVTSRFQLPRGGLTSIRLHGGRLWCFFSGKILQLLFHL

SEQ ID NO: 760081 - protein, 237 aa, Homo sapiens
GGAAGPQGSAGDCAAEAPECGTGGGRRAAMAEAASPHLSLPSGLLELCALLGAPRDSLRSLEQVAYKKGVKHLSALLDPEVLSIFVPPFISKEDSQTAGANCGTLGKTRMRSLRKKREKPRPEQWKGLPGPPRAPEPEDVAVPGGVDLLTLPQLCFPGGVCVATEPKEDCVHFLVLTDVCGNRTYGVVAQYYRPLHDEYCFYNGKTHRECPGCFVPFAVCVVSRFPYYNSLKDCLSW

SEQ ID NO: 760082 - protein, 1307 aa, Homo sapiens
GGAAGPQGSAGDCAAEAPECGTGGGRRAAMAEAASPHLSLPSGLLELCALLGAPRDSLRSLEQVAYKKGVKHLSALLDPEVLSIFVPPFISKEDSQTAGANCGTLGKTRMRSLRKKREKPRPEQWKGLPGPPRAPEPEDVAVPGGVDLLTLPQLCFPGGVCVATEPKEDCVHFLVLTDVCGNRTYGVVAQYYRPLHDEYCFYNGKTHRECPGCFVPFAVCVVSRFPYYNSLKDCLSCLLALLKPCKDFEVDSHIKDFAAKLSLIPSPPPGPLHLVFNMKSLQIVLPARADPESPILDLDLHLPLLCFRPEKVLQILTCILTEQRIVFFSSDWALLTLVTECFMAYLYPLQWQHPFVPILSDQMLDFVMAPTSFLMGCHLDHFEEVSKEADGLVLINIDHGSITYSKSTDDNVDIPDVPLLAAQTFIQRVQSLQLHHELHAAHLLSSTDLKEGRAHRRSWQQKLNCQIQQTTLQLLVSIFRDVKNHLNYEHRVFNSEEFLKTRAPGDHQFYKQVLDTYMFHSFLKARLNRRMDAFAQMDLDTQSEEDRINGMLLSPRRPTVEKRASRKSSHLHVTHRRMVVSMPNLQDIAMPELAPRNSSLRLTDTAGCRGSSAVLNVTPKSPYTFKIPEIHFPLESKCVQAYHAHFVSMLSEAMCFLAPDNSLLLARYLYLRGLVYLMQGQLLNALLDFQNLYKTDIRIFPTDLVKRTVESMSAPEWEGAEQAPELMRLISEILDKPHEASKLDDHVKKFKLPKKHMQLGDFMKRVQESGIVKDASIIHRLFEALTVGQEKQIDPETFKDFYNCWKETEAEAQEVSLPWLVMEHLDKNECVCKLSSSVKTNLGVGKIAMTQKRLFLLTEGRPGYLEISTFRNIEEVRRTTTTFLLRRIPTLKIRVASKKEVFEANLKTECDLWHLMVKEMWAGKKLADDHKDPHYVQQALTNVLLMDAVVGTLQSPGAIYAASKLSYFDKMSNEMPMTLPETTLETLKHKINPSAGEAFPQAVDVLLYTPGHLDPAEKVEDAHPKLWCALSEGKVTVFNASSWTIHQHSFKVGTAKVNCMVMADQNQVWVGSEDSVIYIINVHSMSCNKQLTAHCSSVTDLIVQDGQEAPSNVYSCSMDGMVLVWNVSTLQVTSRFQLPRGGLTSIRLHGGRLWCCTGNSIMVMKMNGSLHQELKIEENFKDTSTSFLAFQLLPEEEQLWAACAGRSEVYIWSLKDLAQPPQRVPLEDCSEINCMIRVKKQVWVGSRGLGQGTPKGKIYVIDAERKTVEKELVAHMDTVRTLCSAEDRYVLSGSGREEGKVAIWKGE

SEQ ID NO: 760083 - protein, 1198 aa, Homo sapiens
MRSLRKKREKPRPEQWKGLPGPPRAPEPEDVAVPGGVDLLTLPQLCFPGGVCVATEPKEDCVHFLVLTDVCGNRTYGVVAQYYRPLHDEYCFYNGKTHRECPGCFVPFAVCVVSRFPYYNSLKDCLSCLLALLKPCKDFEVDSHIKDFAAKLSLIPSPPPGPLHLVFNMKSLQIVLPARADPESPILDLDLHLPLLCFRPEKVLQILTCILTEQRIVFFSSDWALLTLVTECFMAYLYPLQWQHPFVPILSDQMLDFVMAPTSFLMGCHLDHFEEVSKEADGLVLINIDHGSITYSKSTDDNVDIPDVPLLAAQTFIQRVQSLQLHHELHAAHLLSSTDLKEGRAHRRSWQQKLNCQIQQTTLQLLVSIFRDVKNHLNYEHRVFNSEEFLKTRAPGDHQFYKQVLDTYMFHSFLKARLNRRMDAFAQMDLDTQSEEDRINGMLLSPRRPTVEKRASRKSSHLHVTHRRMVVSMPNLQDIAMPELAPRNSSLRLTDTAGCRGSSAVLNVTPKSPYTFKIPEIHFPLESKCVQAYHAHFVSMLSEAMCFLAPDNSLLLARYLYLRGLVYLMQGQLLNALLDFQNLYKTDIRIFPTDLVKRTVESMSAPEWEGAEQAPELMRLISEILDKPHEASKLDDHVKKFKLPKKHMQLGDFMKRVQESGIVKDASIIHRLFEALTVGQEKQIDPETFKDFYNCWKETEAEAQEVSLPWLVMEHLDKNECVCKLSSSVKTNLGVGKIAMTQKRLFLLTEGRPGYLEISTFRNIEEVRRTTTTFLLRRIPTLKIRVASKKEVFEANLKTECDLWHLMVKEMWAGKKLADDHKDPHYVQQALTNVLLMDAVVGTLQSPGAIYAASKLSYFDKMSNEMPMTLPETTLETLKHKINPSAGEAFPQAVDVLLYTPGHLDPAEKVEDAHPKLWCALSEGKVTVFNASSWTIHQHSFKVGTAKVNCMVMADQNQVWVGSEDSVIYIINVHSMSCNKQLTAHCSSVTDLIVQDGQEAPSNVYSCSMDGMVLVWNVSTLQVTSRFQLPRGGLTSIRLHGGRLWCCTGNSIMVMKMNGSLHQELKIEENFKDTSTSFLAFQLLPEEEQLWAACAGRSEVYIWSLKDLAQPPQRVPLEDCSEINCMIRVKKQVWVGSRGLGQGTPKGKIYVIDAERKTVEKELVAHMDTVRTLCSAEDRYVLSGSGREEGKVAIWKGE

SEQ ID NO: 760084 - protein, 1102 aa, Homo sapiens
RWGDSSVIRNANDDNCVLIFILRFEFCVSNFSLLALLKPCKDFEVDSHIKDFAAKLSLIPSPPPGPLHLVFNMKSLQIVLPARADPESPILDLDLHLPLLCFRPEKVLQILTCILTEQRIVFFSSDWALLTLVTECFMAYLYPLQWQHPFVPILSDQMLDFVMAPTSFLMGCHLDHFEEVSKEADGLVLINIDHGSITYSKSTDDNVDIPDVPLLAAQTFIQRVQSLQLHHELHAAHLLSSTDLKEGRAHRRSWQQKLNCQIQQTTLQLLVSIFRDVKNHLNYEHRVFNSEEFLKTRAPGDHQFYKQVLDTYMFHSFLKARLNRRMDAFAQMDLDTQSEEDRINGMLLSPRRPTVEKRASRKSSHLHVTHRRMVVSMPNLQDIAMPELAPRNSSLRLTDTAGCRGSSAVLNVTPKSPYTFKIPEIHFPLESKCVQAYHAHFVSMLSEAMCFLAPDNSLLLARYLYLRGLVYLMQGQLLNALLDFQNLYKTDIRIFPTDLVKRTVESMSAPEWEGAEQAPELMRLISEILDKPHEASKLDDHVKKFKLPKKHMQLGDFMKRVQESGIVKDASIIHRLFEALTVGQEKQIDPETFKDFYNCWKETEAEAQEVSLPWLVMEHLDKNECVCKLSSSVKTNLGVGKIAMTQKRLFLLTEGRPGYLEISTFRNIEEVRRTTTTFLLRRIPTLKIRVASKKEVFEANLKTECDLWHLMVKEMWAGKKLADDHKDPHYVQQALTNVLLMDAVVGTLQSPGAIYAASKLSYFDKMSNEMPMTLPETTLETLKHKINPSAGEAFPQAVDVLLYTPGHLDPAEKVEDAHPKLWCALSEGKVTVFNASSWTIHQHSFKVGTAKVNCMVMADQNQVWVGSEDSVIYIINVHSMSCNKQLTAHCSSVTDLIVQDGQEAPSNVYSCSMDGMVLVWNVSTLQVTSRFQLPRGGLTSIRLHGGRLWCCTGNSIMVMKMNGSLHQELKIEENFKDTSTSFLAFQLLPEEEQLWAACAGRSEVYIWSLKDLAQPPQRVPLEDCSEINCMIRVKKQVWVGSRGLGQGTPKGKIYVIDAERKTVEKELVAHMDTVRTLCSAEDRYVLSGSGREEGKVAIWKGE

SEQ ID NO: 760085 - protein, 1307 aa, Homo sapiens; identical to SEQ ID NO: 760082

SEQ ID NO: 760086 - protein, 718 aa, Homo sapiens
MMCQGHVFIWKVCANGLLFPLNVLVLNVTPKSPYTFKIPEIHFPLESKCVQAYHAHFVSMLSEAMCFLAPDNSLLLARYLYLRGLVYLMQGQLLNALLDFQNLYKTDIRIFPTDLVKRTVESMSAPEWEGAEQAPELMRLISEILDKPHEASKLDDHVKKFKLPKKHMQLGDFMKRVQESGIVKDASIIHRLFEALTVGQEKQIDPETFKDFYNCWKETEAEAQEVSLPWLVMEHLDKNECVCKLSSSVKTNLGVGKIAMTQKRLFLLTEGRPGYLEISTFRNIEEVRRTTTTFLLRRIPTLKIRVASKKEVFEANLKTECDLWHLMVKEMWAGKKLADDHKDPHYVQQALTNVLLMDAVVGTLQSPGAIYAASKLSYFDKMSNEMPMTLPETTLETLKHKINPSAGEAFPQAVDVLLYTPGHLDPAEKVEDAHPKLWCALSEGKVTVFNASSWTIHQHSFKVGTAKVNCMVMADQNQVWVGSEDSVIYIINVHSMSCNKQLTAHCSSVTDLIVQDGQEAPSNVYSCSMDGMVLVWNVSTLQVTSRFQLPRGGLTSIRLHGGRLWCCTGNSIMVMKMNGSLHQELKIEENFKDTSTSFLAFQLLPEEEQLWAACAGRSEVYIWSLKDLAQPPQRVPLEDCSEINCMIRVKKQVWVGSRGLGQGTPKGKIYVIDAERKTVEKELVAHMDTVRTLCSAEDRYVLSGSGREEGKVAIWKGE

SEQ ID NO: 760087 - protein, 439 aa, Homo sapiens
RLSEGCHANRYTHFSFSECSQRLKIRVASKKEVFEANLKTECDLWHLMVKEMWAGKKLADDHKDPHYVQQALTNVLLMDAVVGTLQSPGAIYAASKLSYFDKMSNEMPMTLPETTLETLKHKINPSAGEAFPQAVDVLLYTPGHLDPAEKVEDAHPKLWCALSEGKVTVFNASSWTIHQHSFKVGTAKVNCMVMADQNQVWVGSEDSVIYIINVHSMSCNKQLTAHCSSVTDLIVQDGQEAPSNVYSCSMDGMVLVWNVSTLQVTSRFQLPRGGLTSIRLHGGRLWCCTGNSIMVMKMNGSLHQELKIEENFKDTSTSFLAFQLLPEEEQLWAACAGRSEVYIWSLKDLAQPPQRVPLEDCSEINCMIRVKKQVWVGSRGLGQGTPKGKIYVIDAERKTVEKELVAHMDTVRTLCSAEDRYVLSGSGREEGKVAIWKGE

SEQ ID NO: 760088 - protein, 1073 aa, Homo sapiens
GGAAGPQGSAGDCAAEAPECGTGGGRRAAMAEAASPHLSLPSGLLELCALLGAPRDSLRSLEQVAYKKGVKHLSALLDPEVLSIFVPPFISKEDSQTAGANCGTLGKTRMRSLRKKREKPRPEQWKGLPGPPRAPEPEDVAVPGGVDLLTLPQLCFPGGVCVATEPKEDCVHFLVLTDVCGNRTYGVVAQYYRPLHDEYCFYNGKTHRECPGCFVPFAVCVVSRFPYYNSLKDCLSCLLALLKPCKDFEVDSHIKDFAAKLSLIPSPPPGPLHLVFNMKSLQIVLPARADPESPILDLDLHLPLLCFRPEKVLQILTCILTEQRIVFFSSDWALLTLVTECFMAYLYPLQWQHPFVPILSDQMLDFVMAPTSFLMGCHLDHFEEVSKEADGLVLINIDHGSITYSKSTDDNVDIPDVPLLAAQTFIQRVQSLQLHHELHAAHLLSSTDLKEGRAHRRSWQQKLNCQIQQTTLQLLVSIFRDVKNHLNYEHRVFNSEEFLKTRAPGDHQFYKQVLDTYMFHSFLKARLNRRMDAFAQMDLDTQSEEDRINGMLLSPRRPTVEKRASRKSSHLHVTHRRMVVSMPNLQDIAMPELAPRNSSLRLTDTAGCRGSSAVLNVTPKSPYTFKIPEIHFPLESKCVQAYHAHFVSMLSEAMCFLAPDNSLLLARYLYLRGLVYLMQGQLLNALLDFQNLYKTDIRIFPTDLVKRTVESMSAPEWEGAEQAPELMRLISEILDKPHEASKLDDHVKKFKLPKKHMQLGDFMKRVQESGIVKDASIIHRLFEALTVGQEKQIDPETFKDFYNCWKETEAEAQEVSLPWLVMEHLDKNECVCKLSSSVKTNLGVGKIAMTQKRLFLLTEGRPGYLEISTFRNIEEVRRTTTTFLLRRIPTLKIRVASKKEVFEANLKTECDLWHLMVKEMWAGKKLADDHKDPHYVQQALTNVLLMDAVVGTLQSPGAIYAASKLSYFDKMSNEMPMTLPETTLETLKHKINPSAGEAFPQAVDVLLYTPGHLDPAEKVEDAHPKLWCALSEGKVTVFNASSWTIHQHSFKVGTAKVNCMVMADQPTAPVSRI

SEQ ID NO: 760089 - protein, 1307 aa, Homo sapiens; identical to SEQ ID NO: 760082

SEQ ID NO: 760090 - protein, 848 aa, Homo sapiens
GGAAGPQGSAGDCAAEAPECGTGGGRRAAMAEAASPHLSLPSGLLELCALLGAPRDSLRSLEQVAYKKGVKHLSALLDPEVLSIFVPPFISKEDSQTAGANCGTLGKTRMRSLRKKREKPRPEQWKGLPGPPRAPEPEDVAVPGGVDLLTLPQLCFPGGVCVATEPKEDCVHFLVLTDVCGNRTYGVVAQYYRPLHDEYCFYNGKTHRECPGCFVPFAVCVVSRFPYYNSLKDCLSCLLALLKPCKDFEVDSHIKDFAAKLSLIPSPPPGPLHLVFNMKSLQIVLPARADPESPILDLDLHLPLLCFRPEKVLQILTCILTEQRIVFFSSDWALLTLVTECFMAYLYPLQWQHPFVPILSDQMLDFVMAPTSFLMGCHLDHFEEVSKEADGLVLINIDHGSITYSKSTDDNVDIPDVPLLAAQTFIQRVQSLQLHHELHAAHLLSSTDLKEGRAHRRSWQQKLNCQIQQTTLQLLVSIFRDVKNHLNYEHRVFNSEEFLKTRAPGDHQFYKQVLDTYMFHSFLKARLNRRMDAFAQMDLDTQSEEDRINGMLLSPRRPTVEKRASRKSSHLHVTHRRMVVSMPNLQDIAMPELAPRNSSLRLTDTAGCRGSSAVLNVTPKSPYTFKIPEIHFPLESKCVQAYHAHFVSMLSEQRVLVQHGRHGAGVECEHTAGDQPLPAAARWPDVHQTARRPPVVCTGNSIMVMKMNGSLHQELKIEENFKDTSTSFLAFQLLPEEEQLWAACAGRSEVYIWSLKDLAQPPQRVPLEDCSEINCMIRVKKQVWVGSRGLGQGTPKGKIYVIDAERKTVEKELVAHMDTVRTLCSAEDRYVLSGSGREEGKVAIWKGE

SEQ ID NO: 760091 - protein, 248 aa, Homo sapiens
MVMADQNQVWVGSEDSVIYIINVHSMSCNKQLTAHCSSVTDLIVQDGQEAPSNVYSCSMDGMVLVWNVSTLQVTSRFQLPRGGLTSIRLHGGRLWCCTGNSIMVMKMNGSLHQELKIEENFKDTSTSFLAFQLLPEEEQLWAACAGRSEVYIWSLKDLAQPPQRVPLEDCSEINCMIRVKKQVWVGSRGLGQGTPKGKIYVIDAERKTVEKELVAHMDTVRTLCSAEDRYVLSGSGREEGKVAIWKGE

SEQ ID NO: 760092 - protein, 146 aa, Homo sapiens
MVMKMNGSLHQELKIEENFKDTSTSFLAFQLLPEEEQLWAACAGRSEVYIWSLKDLAQPPQRVPLEDCSEINCMIRVKKQVWVGSRGLGQGTPKGKIYVIDAERKTVEKELVAHMDTVRTLCSAEDRYVLSGSGREEGKVAIWKGE

SEQ ID NO: 760093 - protein, 1488 aa, Homo sapiens
GGAAGPQGSAGDCAAEAPECGTGGGRRAAMAEAASPHLSLPSGLLELCALLGAPRDSLRSLEQVAYKKGVKHLSALLDPEVLSIFVPPFISKEDSQTAGANCGTLGKTRMRSLRKKREKPRPEQWKGLPGPPRAPEPEDVAVPGGVDLLTLPQLCFPGGVCVATEPKEDCVHFLVLTDVCGNRTYGVVAQYYRPLHDEYCFYNGKTHRECPGCFVPFAVCVVSRFPYYNSLKDCLSCLLALLKPCKDFEVDSHIKDFAAKLSLIPSPPPGPLHLVFNMKSLQIVLPARADPESPILDLDLHLPLLCFRPEKVLQILTCILTEQRIVFFSSDWALLTLVTECFMAYLYPLQWQHPFVPILSDQMLDFVMAPTSFLMGCHLDHFEEVSKEADGLVLINIDHGSITYSKSTDDNVDIPDVPLLAAQTFIQRVQSLQLHHELHAAHLLSSTDLKEGRAHRRSWQQKLNCQIQQTTLQLLVSIFRDVKNHLNYEHRVFNSEEFLKTRAPGDHQFYKQVLDTYMFHSFLKARLNRRMDAFAQMDLDTQSEEDRINGMLLSPRRPTVEKRASRKSSHLHVTHRRMVVSMPNLQDIAMPELAPRNSSLRLTDTAGCRGSSAVLNVTPKSPYTFKIPEIHFPLESKCVQAYHAHFVSMLSEAMCFLAPDNSLLLARYLYLRGLVYLMQGQLLNALLDFQNLYKTDIRIFPTDLVKRTVESMSAPEWEGAEQAPELMRLISEILDKPHEASKLDDHVKKFKLPKKHMQLGDFMKRVQESGIVKDASIIHRLFEALTVGQEKQIDPETFKDFYNCWKETEAEAQEVSLPWLVMEHLDKNECVCKLSSSVKTNLGVGKIAMTQKRLFLLTEGRPGYLEISTFRNIEEVRRTTTTFLLRRIPTLKIRVASKKEVFEANLKTECDLWHLMVKEMWAGKKLADDHKDPHYVQQALTNVLLMDAVVGTLQSPGAIYAASKLSYFDKMSNEMPMTLPETTLETLKHKINPSAGEAFPQAVDVLLYTPGHLDPAEKVEDAHPKLWCALSEGKVTVFNASSWTIHQHSFKVGTAKVNCMVMADQNQVWVGSEDSVIYIINVHSMSCNKQLTAHCSSVTDLIVQDGQEAPSNVYSCSMDGMVLVWNVSTLQVTSRFQLPRGGLTSIRLHGGRLWCCTGNSIMVMKMNGSLHQELKIEENFKDTSTSFLAFQLLPEEEQLWAACAGRSEVYIWSLKDLAQPPQRVPLEDCSEINCMIRVKKQVGWRARHPQHPRQVSLALAASPCSREPATRPCALLPSPLRAPLLTGTCRVGANGPQVTMCWFHGVVQALHSAFPQTGWLQMTELNFLTVLDAGGPKPRCRQSRFPRGLGGSVHSRPFSPPPAHVAAVLGVPWLWTWHSNLCLHHMALSLPVCVSYGDAGRTGLTSVTTSELSADSTSKEAHILRFRGYGFGGTLFNPLQSALWPPKSTSVPHAKYTPSITTSPEVPVPPVSVLSPKSPSEAKALRCG

SEQ ID NO: 760094 - protein, 1449 aa, Homo sapiens
GGAAGPQGSAGDCAAEAPECGTGGGRRAAMAEAASPHLSLPSGLLELCALLGAPRDSLRSLEQVAYKKGVKHLSALLDPEVLSIFVPPFISKEDSQTAGANCGTLGKTRMRSLRKKREKPRPEQWKGLPGPPRAPEPEDVAVPGGVDLLTLPQLCFPGGVCVATEPKEDCVHFLVLTDVCGNRTYGVVAQYYRPLHDEYCFYNGKTHRECPGCFVPFAVCVVSRFPYYNSLKDCLSCLLALLKPCKDFEVDSHIKDFAAKLSLIPSPPPGPLHLVFNMKSLQIVLPARADPESPILDLDLHLPLLCFRPEKVLQILTCILTEQRIVFFSSDWALLTLVTECFMAYLYPLQWQHPFVPILSDQMLDFVMAPTSFLMGCHLDHFEEVSKEADGLVLINIDHGSITYSKSTDDNVDIPDVPLLAAQTFIQRVQSLQLHHELHAAHLLSSTDLKEGRAHRRSWQQKLNCQIQQTTLQLLVSIFRDVKNHLNYEHRVFNSEEFLKTRAPGDHQFYKQVLDTYMFHSFLKARLNRRMDAFAQMDLDTQSEEDRINGMLLSPRRPTVEKRASRKSSHLHVTHRRMVVSMPNLQDIAMPELAPRNSSLRLTDTAGCRGSSAVLNVTPKSPYTFKIPEIHFPLESKCVQAYHAHFVSMLSEAMCFLAPDNSLLLARYLYLRGLVYLMQGQLLNALLDFQNLYKTDIRIFPTDLVKRTVESMSAPEWEGAEQAPELMRLISEILDKPHEASKLDDHVKKFKLPKKHMQLGDFMKRVQESGIVKDASIIHRLFEALTVGQEKQIDPETFKDFYNCWKETEAEAQEVSLPWLVMEHLDKNECVCKLSSSVKTNLGVGKIAMTQKRLFLLTEGRPGYLEISTFRNIEEVRRTTTTFLLRRIPTLKIRVASKKEVFEANLKTECDLWHLMVKEMWAGKKLADDHKDPHYVQQALTNVLLMDAVVGTLQSPGAIYAASKLSYFDKMSNEMPMTLPETTLETLKHKINPSAGEAFPQAVDVLLYTPGHLDPAEKVEDAHPKLWCALSEGKVTVFNASSWTIHQHSFKVGTAKVNCMVMADQNQVWVGSEDSVIYIINVHSMSCNKQLTAHCSSVTDLIVQDGQEAPSNVYSCSMDGMVLVWNVSTLQVTSRFQLPRGGLTSIRLHGGRLWCCTGNSIMVMKMNGSLHQELKIEENFKDTSTSFLAFQLLPEEEQLWAACAGRSEVYIWSLKDLAQPPQRVPLEDCSEINCMIRVKKQVGWRARHPQHPRQVSLALAASPCSREPATRPCALLPSPLRAPLLTGTCRVGANGPQVTMCWFHGVVQALHSAFPQTGWLQMTELNFLTVLDAGGPKPRCRQSRFPRGLGGSVHSRPFSPPPAHVAAVLGVPWLWTWHSNLCLHHMALSLPVCVSYGDAGRTGLTSVTTSELSAEENYVASSSPKAVLAARAPSHFLALERLDFAFVNT

SEQ ID NO: 760095 - protein, 1266 aa, Homo sapiens
GGAAGPQGSAGDCAAEAPECGTGGGRRAAMAEAASPHLSLPSGLLELCALLGAPRDSLRSLEQVAYKKGVKHLSALLDPEVLSIFVPPFISKEDSQTAGANCGTLGKTRMRSLRKKREKPRPEQWKGLPGPPRAPEPEDVAVPGGVDLLTLPQLCFPGGVCVATEPKEDCVHFLVLTDVCGNRTYGVVAQYYRPLHDEYCFYNGKTHRECPGCFVPFAVCVVSRFPYYNSLKDCLSCLLALLKPCKDFEVDSHIKDFAAKLSLIPSPPPGPLHLVFNMKSLQIVLPARADPESPILDLDLHLPLLCFRPEKVLQILTCILTEQRIVFFSSDWALLTLVTECFMAYLYPLQWQHPFVPILSDQMLDFVMAPTSFLMGCHLDHFEEVSKEADGLVLINIDHGSITYSKSTDDNVDIPDVPLLAAQTFIQRVQSLQLHHELHAAHLLSSTDLKEGRAHRRSWQQKLNCQIQQTTLQLLVSIFRDVKNHLNYEHRVFNSEEFLKTRAPGDHQFYKQVLDTYMFHSFLKARLNRRMDAFAQMDLDTQSEEDRINGMLLSPRRPTVEKRASRKSSHLHVTHRRMVVSMPNLQDIAMPELAPRNSSLRLTDTAGCRGSSAVLNVTPKSPYTFKIPEIHFPLESKCVQAYHAHFVSMLSEAMCFLAPDNSLLLARYLYLRGLVYLMQGQLLNALLDFQNLYKTDIRIFPTDLVKRTVESMSAPEWEGAEQAPELMRLISEILDKPHEASKLDDHVKKFKLPKKHMQLGDFMKRVQESGIVKDASIIHRLFEALTVGQEKQIDPETFKDFYNCWKETEAEAQEVSLPWLVMEHLDKNECVCKLSSSVKTNLGVGKIAMTQKRLFLLTEGRPGYLEISTFRNIEEVRRTTTTFLLRRIPTLKIRVASKKEVFEANLKTECDLWHLMVKEMWAGKKLADDHKDPHYVQQALTNVLLMDAVVGTLQSPGAIYAASKLSYFDKMSNEMPMTLPETTLETLKHKINPSAGEAFPQAVDVLLYTPGHLDPAEKVEDAHPKLWCALSEGKVTVFNASSWTIHQHSFKVGTAKVNCMVMADQNQVWVGSEDSVIYIINVHSMSCNKQLTAHCSSVTDLIVQDGQEAPSNVYSCSMDGMVLVWNVSTLQVTSRFQLPRGGLTSIRLHGGRLWCCTGNSIMVMKMNGSLHQELKIEENFKDTSTSFLAFQLLPEEEQLWAACAGRSEVYIWSLKDLAQPPQRVPLEDCSEINCMIRVKKQVGWRARHPQHPRRVPPGAEPTPLAP

SEQ ID NO: 760096 - protein, 1071 aa, Homo sapiens
GGAAGPQGSAGDCAAEAPECGTGGGRRAAMAEAASPHLSLPSGLLELCALLGAPRDSLRSLEQVAYKKGVKHLSALLDPEVLSIFVPPFISKEDSQTAGANCGTLGKTRMRSLRKKREKPRPEQWKGLPGPPRAPEPEDVAVPGGVDLLTLPQLCFPGGVCVATEPKEDCVHFLVLTDVCGNRTYGVVAQYYRPLHDEYCFYNGKTHRECPGCFVPFAVCVVSRFPYYNSLKDCLSCLLALLKPCKDFEVDSHIKDFAAKLSLIPSPPPGPLHLVFNMKSLQIVLPARADPESPILDLDLHLPLLCFRPEKVLQILTCILTEQRIVFFSSDWALLTLVTECFMAYLYPLQWQHPFVPILSDQMLDFVMAPTSFLMGCHLDHFEEVSKEADGLVLINIDHGSITYSKSTDDNVDIPDVPLLAAQTFIQRVQSLQLHHELHAAHLLSSTDLKEGRAHRRSWQQKLNCQIQQTTLQLLVSIFRDVKNHLNYEHRVFNSEEFLKTRAPGDHQFYKQVLDTYMFHSFLKARLNRRMDAFAQMDLDTQSEEDRINGMLLSPRRPTVEKRASRKSSHLHVTHRRMVVSMPNLQDIAMPELAPRNSSLRLTDTAGCRGSSAVLNVTPKSPYTFKIPEIHFPLESKCVQAYHAHFVSMLSEAMCFLAPDNSLLLARYLYLRGLVYLMQGQLLNALLDFQNLYKTDIRIFPTDLVKRTVESMSAPEWEGAEQAPELMRLISEILDKPHEASKLDDHVKKFKLPKKHMQLGDFMKRVQESGIVKDASIIHRLFEALTVGQEKQIDPETFKDFYNCWKETEAEAQEVSLPWLVMEHLDKNECVCKLSSSVKTNLGVGKIAMTQKRLFLLTEGRPGYLEISTFRNIEEVRRTTTTFLLRRIPTLKIRVASKKEVFEANLKTECDLWHLMVKEMWAGKKLADDHKDPHYVQQALTNVLLMDAVVGTLQSPGAIYAASKLSYFDKMSNEMPMTLPETTLETLKHKINPSAGEAFPQAVDVLLYTPGHLDPAEKVEDAHPKLWCALSEGKVTVFNASSWTIHQHSFKVGTAKVVSTRSVRKEASEFT

SEQ ID NO: 760097 - protein, 960 aa, Homo sapiens
GGAAGPQGSAGDCAAEAPECGTGGGRRAAMAEAASPHLSLPSGLLELCALLGAPRDSLRSLEQVAYKKGVKHLSALLDPEVLSIFVPPFISKEDSQTAGANCGTLGKTRMRSLRKKREKPRPEQWKGLPGPPRAPEPEDVAVPGGVDLLTLPQLCFPGGVCVATEPKEDCVHFLVLTDVCGNRTYGVVAQYYRPLHDEYCFYNGKTHRECPGCFVPFAVCVVSRFPYYNSLKDCLSCLLALLKPCKDFEVDSHIKDFAAKLSLIPSPPPGPLHLVFNMKSLQIVLPARADPESPILDLDLHLPLLCFRPEKVLQILTCILTEQRIVFFSSDWALLTLVTECFMAYLYPLQWQHPFVPILSDQMLDFVMAPTSFLMGCHLDHFEEVSKEADGLVLINIDHGSITYSKSTDDNVDIPDVPLLAAQTFIQRVQSLQLHHELHAAHLLSSTDLKEGRAHRRSWQQKLNCQIQQTTLQLLVSIFRDVKNHLNYEHRVFNSEEFLKTRAPGDHQFYKQVLDTYMFHSFLKARLNRRMDAFAQMDLDTQSEEDRINGMLLSPRRPTVEKRASRKSSHLHVTHRRMVVSMPNLQDIAMPELAPRNSSLRLTDTAGCRGSSAVLNVTPKSPYTFKIPEIHFPLESKCVQAYHAHFVSMLSEAMCFLAPDNSLLLARYLYLRGLVYLMQGQLLNALLDFQNLYKTDIRIFPTDLVKRTVESMSAPEWEGAEQAPELMRLISEILDKPHEASKLDDHVKKFKLPKKHMQLGDFMKRVQESGIVKDASIIHRLFEALTVGQEKQIDPETFKDFYNCWKETEAEAQEVSLPWLVMEHLDKNECVCKLSSSVKTNLGVGKIAMTQKRLFLLTEGRPGYLEISTFRNIEEVRRTTTTFLLRRIPTLKIRVASKKEVFEANLKTECDLWHLMVKEMWAGKKLADDHKVGDAGPLCPLLWLPQGPLATCGSCGSPQL

SEQ ID NO: 760098 - protein, 929 aa, Homo sapiens
GGAAGPQGSAGDCAAEAPECGTGGGRRAAMAEAASPHLSLPSGLLELCALLGAPRDSLRSLEQVAYKKGVKHLSALLDPEVLSIFVPPFISKEDSQTAGANCGTLGKTRMRSLRKKREKPRPEQWKGLPGPPRAPEPEDVAVPGGVDLLTLPQLCFPGGVCVATEPKEDCVHFLVLTDVCGNRTYGVVAQYYRPLHDEYCFYNGKTHRECPGCFVPFAVCVVSRFPYYNSLKDCLSCLLALLKPCKDFEVDSHIKDFAAKLSLIPSPPPGPLHLVFNMKSLQIVLPARADPESPILDLDLHLPLLCFRPEKVLQILTCILTEQRIVFFSSDWALLTLVTECFMAYLYPLQWQHPFVPILSDQMLDFVMAPTSFLMGCHLDHFEEVSKEADGLVLINIDHGSITYSKSTDDNVDIPDVPLLAAQTFIQRVQSLQLHHELHAAHLLSSTDLKEGRAHRRSWQQKLNCQIQQTTLQLLVSIFRDVKNHLNYEHRVFNSEEFLKTRAPGDHQFYKQVLDTYMFHSFLKARLNRRMDAFAQMDLDTQSEEDRINGMLLSPRRPTVEKRASRKSSHLHVTHRRMVVSMPNLQDIAMPELAPRNSSLRLTDTAGCRGSSAVLNVTPKSPYTFKIPEIHFPLESKCVQAYHAHFVSMLSEAMCFLAPDNSLLLARYLYLRGLVYLMQGQLLNALLDFQNLYKTDIRIFPTDLVKRTVESMSAPEWEGAEQAPELMRLISEILDKPHEASKLDDHVKKFKLPKKHMQLGDFMKRVQESGIVKDASIIHRLFEALTVGQEKQIDPETFKDFYNCWKETEAEAQEVSLPWLVMEHLDKNECVCKLSSSVKTNLGVGKIAMTQKRLFLLTEGRPGYLEISTFRNIEVRTAQADGARPHLCLGDRWLEWALSSLPAMPSTSCSPSADRMPSCPSVCSSVKQE

SEQ ID NO: 760099 - protein, 340 aa, Homo sapiens
ACGRLWCCTGNSIMVMKMNGSLHQELKIEENFKDTSTSFLAFQLLPEEEQLWAACAGRSEVYIWSLKDLAQPPQRVPLEDCSEINCMIRVKKQVGWRARHPQHPRQVSLALAASPCSREPATRPCALLPSPLRAPLLTGTCRVGANGPQVTMCWFHGVVQALHSAFPQTGWLQMTELNFLTVLDAGGPKPRCRQSRFPRGLGGSVHSRPFSPPPAHVAAVLGVPWLWTWHSNLCLHHMALSLPVCVSYGDAGRTGLTSVTTSELSADSTSKEAHILRFRGYGFGGTLFNPLQSALWPPKSTSVPHAKYTPSITTSPEVPVPPVSVLSPKSPSEAKALRCG

SEQ ID NO: 760100 - protein, 118 aa, Homo sapiens
GLPLPKYTSLCATCQALPQTWGHSAVTQQLGDFAFGERSWSCCCRRWGDSSVIRNANDDNCVLIFILRFEFCVSNFSLLALLKPCKDFEVDSHIKDFAAKLSLIPSPPPGPLHLVKYI

SEQ ID NO: 760101 - protein, 50 aa, Homo sapiens
MCTVFSGAQVKGVCVCFVPPNVYSCSMDGMVLVWNVSTLQVTSRFQLPRG

SEQ ID NO: 760102 - protein, 139 aa, Homo sapiens
HDSTRPSSCVVSADQALCGLEECRPLLLRPGPRASLMGAPQEGSDAGRGRFLGSEVRHSGPGAAFTPGVSISSWNLQPPPFPVFHSPVLAAPHCPPEGVVSSPPESGLGPRPSSSARKSPETQVLDQGPQGGDPAARVG

SEQ ID NO: 760103 - protein, 139 aa, Homo sapiens; identical to SEQ ID NO: 760102

SEQ ID NO: 760104 - protein, 586 aa, Homo sapiens
APCSLRGNKVLRAGDGGGANPAGPPVTLVLHFPACVCEWVCVFSYKGYFAIDRLIRSSPPRAFALCAVIELPPSQVLLRSSKRQRLDVSAGRRFVPSVPASPLQIELGKCKAEHDQLLLNYAKKESDLNGAQIKLREYEAALNSKDAALATALGDKKSLEGDLEDLKDQIAQLEASLAAAKKQLADETLLKVDLENRCQSLTEDLEFRKSMYEEEINETRRKHETRLVEVDSGRQIEYEYKLAQALHEMREQHDAQVRLYKEELEQTYHAKLENARLSSEMNTSTVNSAREELMESRMRIESLSSQLSNLQKESRACLERIQELEDLLAKEKDNSRRMLTDKEREMAEIRDQMQQQLNDYEQLLDVKLALDMEISAYRKLLEGEEERLKLSPSPSSRVTVSRASSSRSVRTTRGKRKRVDVEESEASSSVSISHSASATGNVCIEEIDVDGKFIRLKNTSEQDQPMGGWEMIRKIGDTSVSYKYTSRYVLKAGQTVTIWAANAGVTASPPTDLIWKNQNSWGTGEDVKVILKNSQGEEVAQRSTVFKTTIPEEEEEEEEAAGVVVEEELFHQQGTPRASNRSCAIM

SEQ ID NO: 760105 - protein, 338 aa, Homo sapiens
MREQHDAQVRLYKEELEQTYHAKLENARLSSEMNTSTVNSAREELMESRMRIESLSSQLSNLQKESRACLERIQELEDLLAKEKDNSRRMLTDKEREMAEIRDQMQQQLNDYEQLLDVKLALDMEISAYRKLLEGEEERLKLSPSPSSRVTVSRASSSRSVRTTRGKRKRVDVEESEASSSVSISHSASATGNVCIEEIDVDGKFIRLKNTSEQDQPMGGWEMIRKIGDTSVSYKYTSRYVLKAGQTVTIWAANAGVTASPPTDLIWKNQNSWGTGEDVKVILKNSQGEEVAQRSTVFKTTIPEEEEEEEEAAGVVVEEELFHQQGTPRASNRSCAIM

SEQ ID NO: 760106 - protein, 286 aa, Homo sapiens
MFLESKYVSLHLKSRACLERIQELEDLLAKEKDNSRRMLTDKEREMAEIRDQMQQQLNDYEQLLDVKLALDMEISAYRKLLEGEEERLKLSPSPSSRVTVSRASSSRSVRTTRGKRKRVDVEESEASSSVSISHSASATGNVCIEEIDVDGKFIRLKNTSEQDQPMGGWEMIRKIGDTSVSYKYTSRYVLKAGQTVTIWAANAGVTASPPTDLIWKNQNSWGTGEDVKVILKNSQGEEVAQRSTVFKTTIPEEEEEEEEAAGVVVEEELFHQQGTPRASNRSCAIM

SEQ ID NO: 760107 - protein, 586 aa, Homo sapiens
MATATPVPPRMGSRAGGPTTPLSPTRLSRLQEKEELRELNDRLAVYIDKVRSLETENSALQLQVTEREEVRGRELTGLKALYETELADARRALDDTARERAKLQIELGKCKAEHDQLLLNYAKKESDLNGAQIKLREYEAALNSKDAALATALGDKKSLEGDLEDLKDQIAQLEASLAAAKKQLADETLLKVDLENRCQSLTEDLEFRKSMYEEEINETRRKHETRLVEVDSGRQIEYEYKLAQALHEMREQHDAQVRLYKEELEQTYHAKLENARLSSEMNTSTVNSAREELMESRMRIESLSSQLSNLQKESRACLERIQELEDLLAKEKDNSRRMLTDKEREMAEIRDQMQQQLNDYEQLLDVKLALDMEISAYRKLLEGEEERLKLSPSPSSRVTVSRASSSRSVRTTRGKRKRVDVEESEASSSVSISHSASATGNVCIEEIDVDGKFIRLKNTSEQDQPMGGWEMIRKIGDTSVSYKYTSRYVLKAGQTVTIWAANAGVTASPPTDLIWKNQNSWGTGEDVKVILKNSQGEEVAQRSTVFKTTIPEEEEEEEEAAGVVVEEELFHQQGTPRASNRSCAIM

SEQ ID NO: 760108 - protein, 387 aa, Homo sapiens
MATATPVPPRMGSRAGGPTTPLSPTRLSRLQEKEELRELNDRLAVYIDKVRSLETENSALQLQVTEREEVRGRELTGLKALYETELADARRALDDTARERAKLQIELGKCKAEHDQLLLNYAKKESDLNGAQIKLREYEAALNSKDAALATALGDKKSLEGDLEDLKDQIAQLEASLAAAKKQLADETLLKVDLENRCQSLTEDLEFRKSMYEEEINETRRKHETRLVEVDSGRQIEYEYKLAQALHEMREQHDAQVRLYKEELEQTYHAKLENARLSSEMNTSTVNSAREELMESRMRIESLSSQLSNLQKESRACLERIQELEDLLAKEKDNSRRMLTDKEREMAEIRDQMQQQLNDYEQLLDVKLALDMEISAYRKLLEGEEER

SEQ ID NO: 760109 - protein, 586 aa, Homo sapiens; identical to SEQ ID NO: 760107

SEQ ID NO: 760110 - protein, 586 aa, Homo sapiens; identical to SEQ ID NO: 760107

SEQ ID NO: 760111 - protein, 586 aa, Homo sapiens; identical to SEQ ID NO: 760107

SEQ ID NO: 760112 - protein, 586 aa, Homo sapiens; identical to SEQ ID NO: 760107

SEQ ID NO: 760113 - protein, 222 aa, Homo sapiens [sequence omitted]

SEQ ID NO: 760114 - protein, 114 aa, Homo sapiens
MHNVTHSHTFLFSSEPSKVICQQRWHCSFAWLLSLEASLPREGTAGEAVVLAHCLSPSVLKEKRQPAVRAVRKASRPPCSSPPSVAQGFVEVELPTSNLVWLLLRREADPSLLS

SEQ ID NO: 760115 - protein, 114 aa, Homo sapiens; identical to SEQ ID NO: 760114

SEQ ID NO: 760116 - protein, 327 aa, Homo sapiens
PPETHSALALTCLLIGGWLLRIMTSRTPLLVTACLYYSYCNSRHLQQGVRKSKRPVFSHCQVPETQKTDTRHLSGARAGVCPCCHPDGLLATMRDLLQYIACFFAFFSAGFLIVATWTDCWMVNADDSLEVSTKCRGLWWECVTNAFDGIRTCDEYDSILAEHPLKLVVTRALMITADILAGFGFLTLLLGLDCVKFLPDEPYIKVRICFVAGATLLIAGTPGIIGSVWYAVDVYVERSTLVLHNIFLGIQYKFGWSCWLGMAGSLGCFLAGAVLTCCLYLFKDVGPERNYPYSLRKAYSAAGVSMAKSYSAPRTETAKMYAVDTRV

SEQ ID NO: 760117 - protein, 128 aa, Homo sapiens
SGSCKCSLPRACVPHCAHPPSQILTAVMACPLEKALDVMVSTFHKYSGKEGDKFKLNKSELKELLTRELPSFLGKRTDEAAFQKLMSNLDSNRDNEVDFQEYCVFLSCIAMMCNEFFEGFPDKQPRKK

SEQ ID NO: 760118 - protein, 146 aa, Homo sapiens
AVEAGDIKRVFVPSSGFTFQAEILPLSTTLSPQRFFFLGLILTAVMACPLEKALDVMVSTFHKYSGKEGDKFKLNKSELKELLTRELPSFLGKRTDEAAFQKLMSNLDSNRDNEVDFQEYCVFLSCIAMMCNEFFEGFPDKQPRKK

SEQ ID NO: 760119 - protein, 146 aa, Homo sapiens; identical to SEQ ID NO: 760118

SEQ ID NO: 760120 - protein, 146 aa, Homo sapiens; identical to SEQ ID NO: 760118

SEQ ID NO: 760121 - protein, 146 aa, Homo sapiens; identical to SEQ ID NO: 760118

SEQ ID NO: 760122 - protein, 146 aa, Homo sapiens; identical to SEQ ID NO: 760118

SEQ ID NO: 760123 - protein, 146 aa, Homo sapiens; identical to SEQ ID NO: 760118

SEQ ID NO: 760124 - protein, 128 aa, Homo sapiens; identical to SEQ ID NO: 760117

SEQ ID NO: 760125 - protein, 146 aa, Homo sapiens; identical to SEQ ID NO: 760118

SEQ ID NO: 760126 - protein, 146 aa, Homo sapiens; identical to SEQ ID NO: 760118

SEQ ID NO: 760127 - protein, 146 aa, Homo sapiens; identical to SEQ ID NO: 760118

SEQ ID NO: 760128 - protein, 474 aa, Homo sapiens
MRFTFTSRCLALFLLLNHPTPILPAFSNQTYPTIEPKPFLYVVGRKKMMDAQYKCYDRMQQLPAYQGEGPYCNRTWDGWLCWDDTPAGVLSYQFCPDYFPDFDPSEKVTKYCDEKGVWFKHPENNRTWSNYTMCNAFTPEKLKNAYVLYYLAIVGHSLSIFTLVISLGIFVFFRSLGCQRVTLHKNMFLTYILNSMIIIIHLVEVVPNGELVRRDPVSCKILHFFHQYMMACNYFWMLCEGIYLHTLIVVAVFTEKQRLRWYYLLGWGFPLVPTTIHAITRAVYFNDNCWLSVETHLLYIIHGPVMAALVVNFFFLLNIVRVLVTKMRETHEAESHMYLKAVKATMILVPLLGIQFVVFPWRPSNKMLGKIYDYVMHSLIHFQGFFVATIYCFCNNEVQTTVKRQWAQFKIQWNQRWGRRPSNRSARAAAAAAEAGDIPIYICHQELRNEPANNQGEESAEIIPLNIIEQESSA

SEQ ID NO: 760129 - protein, 474 aa, Homo sapiens; identical to SEQ ID NO: 760128

SEQ ID NO: 760130 - protein, 508 aa, Homo sapiens
MQFSGEKISGQRDLQKSKMRFTFTSRCLALFLLLNHPTPILPAFSNQTYPTIEPKPFLYVVGRKKMMDAQYKCYDRMQQLPAYQGEGPYCNRTWDGWLCWDDTPAGVLSYQFCPDYFPDFDPSEKVTKYCDEKGVWFKHPENNRTWSNYTMCNAFTPEKLKNAYVLYYLAIVGHSLSIFTLVISLGIFVFFRKLTTIFPLNWKYRKALSLGCQRVTLHKNMFLTYILNSMIIIIHLVEVVPNGELVRRDPVSCKILHFFHQYMMACNYFWMLCEGIYLHTLIVVAVFTEKQRLRWYYLLGWGFPLVPTTIHAITRAVYFNDNCWLSVETHLLYIIHGPVMAALVVNFFFLLNIVRVLVTKMRETHEAESHMYLKAVKATMILVPLLGIQFVVFPWRPSNKMLGKIYDYVMHSLIHFQGFFVATIYCFCNNEVQTTVKRQWAQFKIQWNQRWGRRPSNRSARAAAAAAEAGDIPIYICHQELRNEPANNQGEESAEIIPLNIIEQESSA

SEQ ID NO: 760131 - protein, 76 aa, Homo sapiens
VTYAIYTVSELQPSDSCDGRLCLGSYILVRKLENMAVGPALWLTPVIPALWEAEAGGSRGQEIETILANTVKPRIY

SEQ ID NO: 760132 - protein, 181 aa, Homo sapiens [sequence omitted]

SEQ ID NO: 760133 - protein, 225 aa, Homo sapiens
MERAEPQRRALRFDVTSCEPGGDNGNMALNGAEVDDFSWEPPTEAETKVLQARRERQDRISRLMGDYLLRGYRMLGETCADCGTILLQDKQRKIYCVACQELDSDVDKDNPALNAQAALSQAREHQLASASELPLGSRPAPQPPVPRPEHCEGAAAGLKAAQGPPAPAVPPNTDVMACTQTALLQKLTWASAELGSSTSLETSIQLCGLIRACAEALRSLQQLQH

SEQ ID NO: 760134 - protein, 225 aa, Homo sapiens; identical to SEQ ID NO: 760133

SEQ ID NO: 760135 - protein, 202 aa, Homo sapiens
  misc_feature (4)..(4): Xaa can be any naturally occurring amino acid
  misc_feature (6)..(6): Xaa can be any naturally occurring amino acid
SRSXPXNGAEVDDFSWEPPTEAETKVLQARRERQDRISRLMGDYLLRGYRMLGETCADCGTILLQDKQRKIYCVACQELDSDVDKDNPALNAQAALSQAREHQLASASELPLGSRPAPQPPVPRPEHCEGAAAGLKAAQGPPAPAVPPNTDVMACTQTALLQKLTWASAELGSSTSLETSIQLCGLIRACAEALRSLQQLQH

SEQ ID NO: 760136 - protein, 304 aa, Homo sapiens
MERAEPQRRALRFDVTSCEPGGDNGNMALNGAEVDDFSWEPPTEAETKVLQARRERQDRISRLMGDYLLRGYRMLGETCADCGTILLQDKQRKIYCVACQELDSDVDKDNPGGCGSVDMSLLCQLWGLYESIQDYKHLCQDLSFCQDLSSSLHSDSSYPPDAGLSDDEEPPDASLPPDPPPLTVPQTHNARDQWLQDAFHISLLKGWGAGGMHPCKRLRNSPSGKPSDFGACAFPPTAHLTGGPGMYSSEATLPNSFSCLGWLALGRASSVQPLLMALRPPVLPHVCTPSLASLSSRGARRISY

SEQ ID NO: 760137 - protein, 225 aa, Homo sapiens; identical to SEQ ID NO: 760133

SEQ ID NO: 760138 - protein, 162 aa, Homo sapiens
MGDYLLRGYRMLGETCADCGTILLQDKQRKIYCVACQELDSDVDKDNPALNAQAALSQAREHQLASASELPLGSRPAPQPPVPRPEHCEGAAAGLKAAQGPPAPAVPPNTDVMACTQTALLQKLTWASAELGSSTSLETSIQLCGLIRACAEALRSLQQLQH

SEQ ID NO: 760139 - protein, 162 aa, Homo sapiens; identical to SEQ ID NO: 760138

SEQ ID NO: 760140 - protein, 274 aa, Homo sapiens
SSTCWPLDTSVTMWFLVLCLALSLGGTGAAPPIQSRIVGGWECEQHSQPWQAALYHFSTFQCGGILVHRQWVLTAAHCISDNYQLWLGRHNLFDDENTAQFVHVSESFPHPGFNMSLLENHTRQADEDYSHDLMLLRLTEPADTITDAVKVVELPTEEPEVGSTCLASGWGSIEPENFSFPDDLQCVDLKILPNDECKKAHVQKVTDFMLCVGHLEGGKDTCVGDSGGPLMCDGVLQGVTSWGYVPCGTPNKPSVAVRVLSYVKWIEDTIAENS

SEQ ID NO: 760141 - protein, 274 aa, Homo sapiens; identical to SEQ ID NO: 760140

SEQ ID NO: 760142 - protein, 162 aa, Homo sapiens
SSTCWPLDTSVTMWFLVLCLALSLGGTGAAPPIQSRIVGGWECEQHSQPWQAALYHFSTFQCGGILVHRQWVLTAAHCISDNYQLWLGRHNLFDDENTAQFVHVSESFPHPGFNMSLLENHTRQADEDYSHDLMLSHFQMISSVWTSKSCLMMSAKKPTSRR

SEQ ID NO: 760143 - protein, 271 aa, Homo sapiens
MYGSGYGIFTCRSGSVLACPLGGLGAAPPIQSRIVGGWECEQHSQPWQAALYHFSTFQCGGILVHRQWVLTAAHCISDNYQLWLGRHNLFDDENTAQFVHVSESFPHPGFNMSLLENHTRQADEDYSHDLMLLRLTEPADTITDAVKVVELPTEEPEVGSTCLASGWGSIEPENFSFPDDLQCVDLKILPNDECKKAHVQKVTDFMLCVGHLEGGKDTCVGDSGGPLMCDGVLQGVTSWGYVPCGTPNKPSVAVRVLSYVKWIEDTIAENS

SEQ ID NO: 760144 - protein, 83 aa, Homo sapiens
PGLPAETGPPPLFLISLPGKTLKEQRCGRHILDGVSPSAGTGHPLFLISLPEKTLKEQRCGRLILLETGFHRVGQDGLNLLKS

SEQ ID NO: 760145 - protein, 544 aa, Homo sapiens
NNPRDDIATEAYEDELDMGRSGSYLNSSINSAWSEHSLDPEDIRDELKKLYAQLEIYKRKKMITNNPHLQKKRCSKKGLGRSIMRRITEIPETVSRQCSKEDKEGADHGTAKGTALIRKNPPESSGNTGKSKEETLKNRVFSLKKSHSTYDHVRDQTEESSSLPTESQEEETTENSTLESLSGKKLTQKLKEDSEAESTESVPLVCKSASAHNLSSEKKTGHPRTSMLQKSLSVIASAKEKTLGLAGKTQTAGVEERTKSQKPLPKDKETNRNHSNSDNTETKDPAPQNSNPAEEPRKPQKSGIMKQQRVNPTTANSDLNPGTTQMKDNFDIGEVCPWEVYDLTPGPVPSESKVQKHVSIVASEMEKNPTFSLKEKSHHKPKAAEVCQQSNQKRIDKAEVCLWESQGQSILEDEKLLISKTPVLPERAKEENGGQPRAANVCAGQSEELPPKAVASKTENENLNQIGHQEKKTSSSEENVRGSYNSSNNFQQPLTSRAEVCPWEFETPAQPNAGRSVALPASSALSANKIAGPRKEEIWDSFKV

SEQ ID NO: 760146 - protein, 172 aa, Homo sapiens
MSCTIEKALADAKALVERLRDHDDAAESLIEQTTALNKRVEAMKQYQEEIQELNEVARHRPRSTLVMGIQQENRQIRELQQENKELRTSLEEHQSALELIMSKYREQMFRLLMASKKDDPGIIMKLKEQHSKIDMVHRNKSEGFFLDASRHILEAPQHGLERRHLEANQNVH

SEQ ID NO: 760147 - protein, 140 aa, Homo sapiens
MSCTIEKALADAKALVERLRDHDDAAESLIEQTTALNKRVEAMKQYQEEIQELNEVARHRPRSTLVMGIQQENRQIRELQQENKELRTSLEEHQSALELIMSKYREQMFRLLMASKKDDPGIIMKLKEQHSKVIHSINVT

SEQ ID NO: 760148 - protein, 253 aa, Homo sapiens
MSCTIEKALADAKALVERLRDHDDAAESLIEQTTALNKRVEAMKQYQEEIQELNEVARHRPRSTLVMGIQQENRQIRELQQENKELRTSLEEHQSALELIMSKYREQMFRLLMASKKDDPGIIMKLKEQHSKIDMVHRNKSEGFFLDASRHILEAPQHGLERRHLEANQNELQAHVDQITEMAAVMRKAIEIDEQQGCKEQERIFQLEQENKGLREILQITRESFLNLRKDDASESTSLSALVTNSDLSLRKS

SEQ ID NO: 760149 - protein, 253 aa, Homo sapiens; identical to SEQ ID NO: 760148

SEQ ID NO: 760150 - protein, 215 aa, Homo sapiens
MSCTIEKALADAKALVERLRDHDDAAESLIEQTTALNKRVEAMKQYQEEIQELNEVARHRPRSTLVMGIQQENRQIRELQQENKELRTSLEEHQSALELIMSKYREQMFRLLMASKKDDPGIIMKLKEQHSKELQAHVDQITEMAAVMRKAIEIDEQQGCKEQERIFQLEQENKGLREILQITRESFLNLRKDDASESTSLSALVTNSDLSLRKS

SEQ ID NO: 760151 - protein, 253 aa, Homo sapiens; identical to SEQ ID NO: 760148

SEQ ID NO: 760152 - protein, 453 aa, Homo sapiens
MPKSTKKWVTKNAKRPTTQPPVMPTTKHSRAQSPPDLTSQTTAALTTEASRRPTSEFTRRPTTEAPQRWTSHTTATLTPQAPRERTTKTMAMLTTQGPQEMTSESTIKSIPQASLEPSAEIPEGSPESPKDPAPSPSVSTTGESGLFRVRLADGPNRCAGRLEVWHAGRWGTVCDDNWDLRDATVACWELGCGKVRPRVGKTHYGPGTGPIWLDDMGCKGSEASLSDCPSGVGGSTTVTTRKTWGSPALVPGHGGGGGVVGGGQENGVRVGPGDGTMVDSKELGMRGRGGEIPELLQKIPKGEGRAAARTSEKEDGVNHYPNFSKGYTDYDDYPPWTWDPTSREDLAKGTTTAGVPGHTLPWRTTRRPGSSSPAIRRLPDTGSKDGYKLPWTWDTPSGRGLAEGTPTAGKLGPTLGAGTTRSPGSPPTLRVHGDTGSPKKNRGPERRPPRPAA

SEQ ID NO: 760153 - protein, 573 aa, Homo sapiens
DAGAVCDGMPLGYVPPTAPTDSNNSTPREAASRPPSTMTSQAPGTAGVSPPPASPTVLWEPGPEAGPPGLDSISDPFSWSWIPGLGRDRDAWLPGELATKPSASVTASVLEKTTTKAPGKMPKSTKKWVTKNAKRPTTQPPVMPTTKHSRAQSPPDLTSQTTAALTTEASRRPTSEFTRRPTTEAPQRWTSHTTATLTPQAPRERTTKTMAMLTTQGPQEMTSESTIKSIPQASLEPSAEIPEGSPESPKDPAPSPSVSTTGESGLFRVRLADGPNRCAGRLEVWHAGRWGTVCDDNWDLRDATVACWELGCGKVRPRVGKTHYGPGTGPIWLDDMGCKGSEASLSDCPSGVGGSTTVTTRKTWGSPALVPGHGGGGGVVGGGQENGVRVGPGDGTMVDSKELGMRGRGGEIPELLQKIPKGEGRAAARTSEKEDGVNHYPNFSKGYTDYDDYPPWTWDPTSREDLAKGTTTAGVPGHTLPWRTTRRPGSSSPAIRRLPDTGSKDGYKLPWTWDTPSGRGLAEGTPTAGKLGPTLGAGTTRSPGSPPTLRVHGDTGSPKKNRGPERRPPRPAA

SEQ ID NO: 760154 - protein, 615 aa, Homo sapiens
PGSPQLRLVAGPSKCSGRLEVWHDQRWGTVCDDSWDMRDSAVVCRELGCGGPQQPDPAAGRFGWGAGPIWLDDVGCVGTEASLSDCPAAPWGKHNCAHNEDVGVTCTGPPGLDSISDPFSWSWIPGLGRDRDAWLPGELATKPSASVTASVLEKTTTKAPGKMPKSTKKWVTKNAKRPTTQPPVMPTTKHSRAQSPPDLTSQTTAALTTEASRRPTSEFTRRPTTEAPQRWTSHTTATLTPQAPRERTTKTMAMLTTQGPQEMTSESTIKSIPQASLEPSAEIPEGSPESPKDPAPSPSVSTTGESGLFRVRLADGPNRCAGRLEVWHAGRWGTVCDDNWDLRDATVACWELGCGKVRPRVGKTHYGPGTGPIWLDDMGCKGSEASLSDCPSGVGGSTTVTTRKTWGSPALVPGHGGGGGVVGGGQENGVRVGPGDGTMVDSKELGMRGRGGEIPELLQKIPKGEGRAAARTSEKEDGVNHYPNFSKGYTDYDDYPPWTWDPTSREDLAKGTTTAGVPGHTLPWRTTRRPGSSSPAIRRLPDTGSKDGYKLPWTWDTPSGRGLAEGTPTAGKLGPTLGAGTTRSPGSPPTLRVHGDTGSPKKNRGPERRPPRPAA

SEQ ID NO: 760155 - protein, 401 aa, Homo sapiens
TGDLEDPVYRASVLEKTTTKAPGKMPKSTKKWVTKNAKRPTTQPPVMPTTKHSRAQSPPDLTSQTTAALTTEASRRPTSEFTRRPTTEAPQRWTSHTTATLTPQAPRERTTKTMAMLTTQGPQEMTSESTIKSIPQASLEPSAEIPEGSPESPKDPAPSPSVSTTGESGLFRVRLADGPNRCAGRLEVWHAGRWGTVCDDNWDLRDATVACWELGCGKVRPRVGKTHYGPGTGPIWLDDMGCKGSEASLSDCPSGAWGKHNCDHEEDVGLTCTGYTDYDDYPPWTWDPTSREDLAKGTTTAGVPGHTLPWRTTRRPGSSSPAIRRLPDTGSKDGYKLPWTWDTPSGRGLAEGTPTAGKLGPTLGAGTTRSPGSPPTLRVHGDTGSPKKNRGPERRPPRPAA

SEQ ID NO: 760156 - protein, 303 aa, Homo sapiens
MLETLRERLLSVQQDFTSGLKTLSDKSREAKVKSKPRTVPFLPKYSAGLELLSRYEDTWAALHRRAKDCASAGELVDSEVVMLSAHWEKKKTSLVELQEQLQQLPALIADLESMTANLTHLEASFEEVENNLLHLEDLCGQCELERCKHMQSQQLENYKKNKRKELETFKAELDAEHAQKVLEMEHTQQMKLKERQKFFEEAFQQDMEQYLSTGYLQIAERREPIGSMSSMEVNVDMLEQMDLMDISDQEALDVFLNSGGEENTVLSPALGRVDKLALAEPGQYRCHSPPKVRRENHLPVTYA

SEQ ID NO: 760157 - protein, 351 aa, Homo sapiens
MLETLRERLLSVQQDFTSGLKTLSDKSREAKVKSKPRTVPFLPKYSAGLELLSRYEDTWAALHRRAKDCASAGELVDSEVVMLSAHWEKKKTSLVELQEQLQQLPALIADLESMTANLTHLEASFEEVENNLLHLEDLCGQCELERCKHMQSQQLENYKKNKRKELETFKAELDAEHAQKVLEMEHTQQMKLKERQKFFEEAFQQDMEQYLSTGYLQIAERREPIGSMSSMEVNVDMLEQMDLMDISDQEALDVFLNSGGEENTVLSPALGPESSTCQNEITLQVPNPSELRAKPPSSSSTCTDSATRDISEGGESPVVQSDEEEVQVDTALATSHTDREATPDGGEDSDS

SEQ ID NO: 760158 - protein, 351 aa, Homo sapiens; identical to SEQ ID NO: 760157

SEQ ID NO: 760159 - protein, 334 aa, Homo sapiens
MLETLRERLLSVQQDFTSGLKTLSDKSREAKVKSKPRYEDTWAALHRRAKDCASAGELVDSEVVMLSAHWEKKKTSLVELQEQLQQLPALIADLESMTANLTHLEASFEEVENNLLHLEDLCGQCELERCKHMQSQQLENYKKNKRKELETFKAELDAEHAQKVLEMEHTQQMKLKERQKFFEEAFQQDMEQYLSTGYLQIAERREPIGSMSSMEVNVDMLEQMDLMDISDQEALDVFLNSGGEENTVLSPALGPESSTCQNEITLQVPNPSELRAKPPSSSSTCTDSATRDISEGGESPVVQSDEEEVQVDTALATSHTDREATPDGGEDSDS

SEQ ID NO: 760160 - protein, 224 aa, Homo sapiens
IESFLSMCRVGVSHMRILCPASGENEKILPRFYACLRGEGQGEAELDAEHAQKVLEMEHTQQMKLKERQKFFEEAFQQDMEQYLSTGYLQIAERREPIGSMSSMEVNVDMLEQMDLMDISDQEALDVFLNSGGEENTVLSPALGPESSTCQNEITLQVPNPSELRAKPPSSSSTCTDSATRDISEGGESPVVQSDEEEVQVDTALATSHTDREATPDGGEDSDS

SEQ ID NO: 760161 - protein, 168 aa, Homo sapiens [sequence omitted]

SEQ ID NO: 760162 - protein, 286 aa, Homo sapiens
MLETLRERLLSVQQDFTSGLKTLSDKSREAKVKSKPRTVPFLPKYSAGLELLSRYEDTWAALHRRAKDCASAGELVDSEVVMLSAHWEKKKTSLVELQEQLQQLPALIADLESMTANLTHLEASFEEVENNLLHLEDLCGQCELERCKHMQSQQLENYKKNKRKELETFKAELDAEHAQKVLEMEHTQQMKLKERQKFFEEAFQQDMEQYLSTGYLQIAERREPIGSMSSMEVNVDMLEQMDLMDISDQEALDVFLNSGGEENTVLSPALDTDREATPDGGEDSDS

SEQ ID NO: 760163 - protein, 150 aa, Homo sapiens
MFTFFRLKTLSDKSREAKVKSKPRTVPFLPKYSAGLELLSRYEDTWAALHRRAKDCASAGELVDSEVVMLSAHWEKKKTSLVELQEQLQQLPALIADLESMTANLTHLEASFEEVENNLLHLEDLCGQCELERCKHMQSQQLENYKKNKS

SEQ ID NO: 760164 - protein, 195 aa, Homo sapiens
MSSPGLTENSQRDPSELDAEHAQKVLEMEHTQQMKLKERQKFFEEAFQQDMEQYLSTGYLQIAERREPIGSMSSMEVNVDMLEQMDLMDISDQEALDVFLNSGGEENTVLSPALGPESSTCQNEITLQVPNPSELRAKPPSSSSTCTDSATRDISEGGESPVVQSDEEEVQVDTALATSHTDREATPDGGEDSDS

SEQ ID NO: 760165 - protein, 351 aa, Homo sapiens; identical to SEQ ID NO: 760157

SEQ ID NO: 760166 - protein, 316 aa, Homo sapiens
MLETLRERLLSVQQDFTSGYEDTWAALHRRAKDCASAGELVDSEVVMLSAHWEKKKTSLVELQEQLQQLPALIADLESMTANLTHLEASFEEVENNLLHLEDLCGQCELERCKHMQSQQLENYKKNKRKELETFKAELDAEHAQKVLEMEHTQQMKLKERQKFFEEAFQQDMEQYLSTGYLQIAERREPIGSMSSMEVNVDMLEQMDLMDISDQEALDVFLNSGGEENTVLSPALGPESSTCQNEITLQVPNPSELRAKPPSSSSTCTDSATRDISEGGESPVVQSDEEEVQVDTALATSHTDREATPDGGEDSDS

SEQ ID NO: 760167 - protein, 270 aa, Homo sapiens
MLSAHWEKKKTSLVELQEQLQQLPALIADLESMTANLTHLEASFEEVENNLLHLEDLCGQCELERCKHMQSQQLENYKKNKRKELETFKAELDAEHAQKVLEMEHTQQMKLKERQKFFEEAFQQDMEQYLSTGYLQIAERREPIGSMSSMEVNVDMLEQMDLMDISDQEALDVFLNSGGEENTVLSPALGPESSTCQNEITLQVPNPSELRAKPPSSSSTCTDSATRDISEGGESPVVQSDEEEVQVDTALATSHTDREATPDGGEDSDS

SEQ ID NO: 760168 - protein, 279 aa, Homo sapiens
MLETLRERLLSVQQDFTSGLKTLSDKSREAKVKSKPRTVPFLPKYSAGLELLSRYEDTWAALHRRAKDCASAGELVDSEVVMLSAHWEKKKTSLVELQEQLQQLPALIADLESMTANLTHLEASFEEVENNLLHLEDLCGQCELERCKHMQSQQLENYKKNKRKELETFKAELDAEHAQKVLEMEHTQQMKLKERQKFFEEAFQQDMEQYLSTGYLQIAERREPIGSMSSMEVNVDMLEQMDLMDISDQEALDVFLNSGGEENTVLSPALASRFQIPQN

SEQ ID NO: 760169 - protein, 255 aa, Homo sapiens
MLETLRERLLSVQQDFTSGLKTLSDKSREAKVKSKPRTVPFLPKYSAGLELLSRYEDTWAALHRRAKDCASAGELVDSEVVMLSAHWEKKKTSLVELQEQLQQLPALIADLESMTANLTHLEASFEEVENNLLHLEDLCGQCELERCKHMQSQQLENYKKNKRKELETFKAELDAEHAQKVLEMEHTQQMKLKERQKFFEEAFQQDMEQYLSTGYLQIAERREPIGSMSSMEVNVDMLEQMDLMDISDGGEDSDS

SEQ ID NO: 760170 - protein, 104 aa, Homo sapiens
MGRRKHFNLQNDFYHKLNILVTFWSSALVKVVSPWSSDSCWSSEDLPPPCTLPCSLVLWCSPIPGSMWDVRTQDQDACTHQNGAFSFSLSQDLRESKKQTNTNK

SEQ ID NO: 760171 - protein, 193 aa, Homo sapiens
MGVHECPAWLWLLLSLLSLPLGLPVLGAPPRLICDSRVLERYLLEAKEAENITTGCAEHCSLNENITVPDTKVNFYAWKRMEVGQQAVEVWQGLALLSEAVLRGQALLVNSSQPWEPLQLHVDKAVSGLRSLTTLLRALRAQKEAISPPDAASAAPLRTITADTFRKLFRVYSNFLRGKLKLYTGEACRTGDR

SEQ ID NO: 760172 - protein, 918 aa, Homo sapiens
PAPEFPGEAAAARRHRGGCGALGAPRARGPGSSVCAPARAGAPGPPDTMNHLNVLAKALYDNVAESPDELSFRKGDIMTVLEQDTQGLDGWWLCSLHGRQGIVPGNRLKILVGMYDKKPAGPGSGPPATPAQPQPGLHAPAPPASQYTPMLPNTYQPQPDSVYLVPTPSKAQQGLYQVPGPSPQFQSPPAKQTSTFSKQTPHHPFPSPATDLYQVPPGPGGPAQDIYQVPPSAGMGHDIYQVPPSMDTRSWEGTKPPAKVVVPTRVGQGYVYEAAQPEQDEYDIPRHLLAPGPQDIYDVPPVRGLLPSQYGQEVYDTPPMAVKGPNGRDPLLEVYDVPPSVEKGLPPSNHHAVYDVPPSVSKDVPDGPLLREETYDVPPAFAKAKPFDPARTPLVLAAPPPDSPPAEDVYDVPPPAPDLYDVPPGLRRPGPGTLYDVPRERVLPPEVADGGVVDSGVYAVPPPAEREAPAEGKRLSASSTGSTRSSQSASSLEVAGPGREPLELEVAVEALARLQQGVSATVAHLLDLAGSAGATGSWRSPSEPQEPLVQDLQAAVAAVQSAVHELLEFARSAVGNAAHTSDRALHAKLSRQLQKMEDVHQTLVAHGQALDAGRGGSGATLEDLDRLVACSRAVPEDAKQLASFLHGNASLLFRRTKATAPGPEGGGTLHPNPTDKTSSIQSRPLPSPPKFTSQDSPDGQYENSEGGWMEDYDYVHLQGKEEFEKTQKELLEKGSITRQGKSQLELQQLKQFERLEQEVSRPIDHDLANWTPAQPLAPGRTGGLGPSDRQLLLFYLEQCEANLTTLTNAVDAFFTAVATNQPPKIFVAHSKFVILSAHKLVFIGDTLSRQAKAADVRSQVTHYSNLLCDLLRGIVATTKAAALQYPSPSAAQDMVERVKELGHSTQQFRRVLGQLAAA

SEQ ID NO: 760173 - protein, 92 aa, Homo sapiens
GSHLLCVSPHVPAWGGCVPHMPACTTGPGWVTRRGWSVRVLQPAGPRATPRAEPGPTRVPCPLTGPVQFGVSSALPGEEPEELFFVIGFPII

SEQ ID NO: 760174 - protein, 870 aa, Homo sapiens [sequence omitted]

SEQ ID NO: 760175 - protein, 740 aa, Homo sapiens
LNREPGGGGVWAQCARGLENPTREALTSPRQGDLQGRRLPGMAPTRFRLVLVRGPVALGRPLCCLPLHPLCGPWLPGLWVMVVVPTRVGQGYVYEAAQPEQDEYDIPRHLLAPGPQDIYDVPPVRGLLPSQYGQEVYDTPPMAVKGPNGRDPLLEVYDVPPSVEKGLPPSNHHAVYDVPPSVSKDVPDGPLLREETYDVPPAFAKAKPFDPARTPLVLAAPPPDSPPAEDVYDVPPPAPDLYDVPPGLRRPGPGTLYDVPRERVLPPEVADGGVVDSGVYAVPPPAEREAPAEGKRLSASSTGSTRSSQSASSLEVAGPGREPLELEVAVEALARLQQGVSATVAHLLDLAGSAGATGSWRSPSEPQEPLVQDLQAAVAAVQSAVHELLEFARSAVGNAAHTSDRALHAKLSRQLQKMEDVHQTLVAHGQALDAGRGGSGATLEDLDRLVACSRAVPEDAKQLASFLHGNASLLFRRTKATAPGPEGGGTLHPNPTDKTSSIQSRPLPSPPKFTSQDSPDGQYENSEGGWMEDYDYVHLQGKEEFEKTQKELLEKGSITRQGKSQLELQQLKQFERLEQEVSRPIDHDLANWTPAQPLAPGRTGGLGPSDRQLLLFYLEQCEANLTTLTNAVDAFFTAVATNQPPKIFVAHSKFVILSAHKLVFIGDTLSRQAKAADVRSQVTHYSNLLCDLLRGIVATTKAAALQYPSPSAAQDMVERVKELGHSTQQFRRVLGQLAAA

SEQ ID NO: 760176 - protein, 870 aa, Homo sapiens [sequence omitted]

SEQ ID NO: 760177 - protein, 221 aa, Homo sapiens
LQGKEEFEKTQKVDVVIVLLQGKEEFEKTQKELLEKGSITRQGKSQLELQQLKQFERLEQEVSRPIDHDLANWTPAQPLAPGRTGGLGPSDRQLLLFYLEQCEANLTTLTNAVDAFFTAVATNQPPKIFVAHSKFVILSAHKLVFIGDTLSRQAKAADVRSQVTHYSNLLCDLLRGIVATTKAAALQYPSPSAAQDMVERVKELGHSTQQFRRVLGQLAAA

SEQ ID NO: 760178 - protein, 96 aa, Homo sapiens
LNREPGGGGVWAQCARGLENPTREALTSPRQGDLQGRRLPGMAPTRFRLVLVRGPVALGRPLCCLPLHPLCGPWLPWALGHGKSTWGGEGWPWTHF

SEQ ID NO: 760179 - protein, 896 aa, Homo sapiens
HLVVSGEGMHCPGEAPLAAPRPTPKDPCLRNVLAKALYDNVAESPDELSFRKGDIMTVLEQDTQGLDGWWLCSLHGRQGIVPGNRLKILVGMYDKKPAGPGSGPPATPAQPQPGLHAPAPPASQYTPMLPNTYQPQPDSVYLVPTPSKAQQGLYQVPGPSPQFQSPPAKQTSTFSKQTPHHPFPSPATDLYQVPPGPGGPAQDIYQVPPSAGMGHDIYQVPPSMDTRSWEGTKPPAKVVVPTRVGQGYVYEAAQPEQDEYDIPRHLLAPGPQDIYDVPPVRGLLPSQYGQEVYDTPPMAVKGPNGRDPLLEVYDVPPSVEKGLPPSNHHAVYDVPPSVSKDVPDGPLLREETYDVPPAFAKAKPFDPARTPLVLAAPPPDSPPAEDVYDVPPPAPDLYDVPPGLRRPGPGTLYDVPRERVLPPEVADGGVVDSGVYAVPPPAEREAPAEGKRLSASSTGSTRSSQSASSLEVAGPGREPLELEVAVEALARLQQGVSATVAHLLDLAGSAGATGSWRSPSEPQEPLVQDLQAAVAAVQSAVHELLEFARSAVGNAAHTSDRALHAKLSRQLQKMEDVHQTLVAHGQALDAGRGGSGATLEDLDRLVACSRAVPEDAKQLASFLHGNASLLFRRTKATAPGPEGGGTLHPNPTDKTSSIQSRPLPSPPKFTSQDSPDGQYENSEGGWMEDYDYVHLQGKEEFEKTQKELLEKGSITRQGKSQLELQQLKQFERLEQEVSRPIDHDLANWTPAQPLAPGRTGGLGPSDRQLLLFYLEQCEANLTTLTNAVDAFFTAVATNQPPKIFVAHSKFVILSAHKLVFIGDTLSRQAKAADVRSQVTHYSNLLCDLLRGIVATTKAAALQYPSPSAAQDMVERVKELGHSTQQFRRVLGQLAAA

SEQ ID NO: 760180 - protein, 471 aa, Homo sapiens
MIIRNEGQTVYAVPPPAEREAPAEGKRLSASSTGSTRSSQSASSLEVAGPGREPLELEVAVEALARLQQGVSATVAHLLDLAGSAGATGSWRSPSEPQEPLVQDLQAAVAAVQSAVHELLEFARSAVGNAAHTSDRALHAKLSRQLQKMEDVHQTLVAHGQALDAGRGGSGATLEDLDRLVACSRAVPEDAKQLASFLHGNASLLFRRTKATAPGPEGGGTLHPNPTDKTSSIQSRPLPSPPKFTSQDSPDGQYENSEGGWMEDYDYVHLQGKEEFEKTQKELLEKGSITRQGKSQLELQQLKQFERLEQEVSRPIDHDLANWTPAQPLAPGRTGGLGPSDRQLLLFYLEQCEANLTTLTNAVDAFFTAVATNQPPKIFVAHSKFVILSAHKLVFIGDTLSRQAKAADVRSQVTHYSNLLCDLLRGIVATTKAAALQYPSPSAAQDMVERVKELGHSTQQFRRVLGQLAAA

SEQ ID NO: 760181 - protein, 219 aa, Homo sapiens
PKQPGACSPAPPRPMAGPATQSPMKLMALQLLLWHSALWTVQEATPLGPASSLPQSFLLKCLEQVRKIQGDGAALQEKLVCATYKLCHPEELVLLGHSLGIPWAPLSSCPSQALQLAGCLSQLHSGLFLYQGLLQALEGISPELGPTLDTLQLDVADFATTIWQQMEELGMAPALQPTQGAMPAFASAFQRRAGGVLVASHLQSFLEVSYRVLRHLAQP

SEQ ID NO: 760182 - protein, 249 aa, Homo sapiens
MSPEPALSPALQLLLWHSALWTVQEATPLGPASSLPQSFLLKCLEQVRKIQGDGAALQEKLVCATYKLCHPEELVLLGHSLGIPWAPLSSCPSQALQLVVSGKDKANEEGEGEEEHPWAPPCLQVPSWGPDVSQAAPPNSSALSHRAGCLSQLHSGLFLYQGLLQALEGISPELGPTLDTLQLDVADFATTIWQQMEELGMAPALQPTQGAMPAFASAFQRRAGGVLVASHLQSFLEVSYRVLRHLAQP

SEQ ID NO: 760183 - protein, 67 aa, Homo sapiens
MDRAQYTGPAGCLSQLHSGLFLYQGLLQALEGISPELGPTLDTLQLDVADFATTIWQQVSLVGQGGQ

SEQ ID NO: 760184 - protein, 169 aa, Homo sapiens
MAGPATQSPMKLMALQLLLWHSALWTVQEATPLGPASSLPQSFLLKCLEQVRKIQGDGAALQEKLVAGCLSQLHSGLFLYQGLLQALEGISPELGPTLDTLQLDVADFATTIWQQMEELGMAPALQPTQGAMPAFASAFQRRAGGVLVASHLQSFLEVSYRVLRHLAQP

SEQ ID NO: 760185 - protein, 108 aa, Homo sapiens
MPLWVFFFVILTLSNSSHCSPPPPLTLRMRRYADAIFTNSYRKVLGQLSARKLLQDIMSRQQGESNQERGARARLGRQVDSMWAEQKQMELESILVALLQKHSRNSQG

SEQ ID NO: 760186 - protein, 100 aa, Homo sapiens
MLVEAWVYSAERELRQCNLQQFIQQTGAALPPPPRPDRGPPGTQGPLPPAREESLLGAPSESHAGAQPRPRGGPHDAELLEVAAAPAPEWCPLAAQPQAL

SEQ ID NO: 760187 - protein, 352 aa, Homo sapiens
WYRPEFGMAGERPTGMLLGLAAMELKVWVDGIQRVVCGVSEQTTCQEVVIALAQAIGQTGRFVLVQRLREKERQLLPQECPVGAQATCGQFASDVQFVLRRTGPSLAGRPSSDSCPPPERCLIRASLPVKPRAALGCEPRKTLTPEPAPSLSRPGPAAPVTPTPGCCTDLRGLELRVQRNAEELGHEAFWEQELRREQAREREGQARLQALSAATAEHAARLQALDAQARALEAELQLAAEAPGPPSPMASATERLHQDLAVQERQSAEVQGSLALVSRALEAAERALQAQAQELEELNRELRQCNLQQFIQQTGAALPPPPRPDRGPPGTQVGVVLGGGWEVRTWPSPTPS

SEQ ID NO: 760188 - protein, 485 aa, Homo sapiens
RRVPGTWERGARLEPAGRRLQLGRVFRDARTESGGGAAPAPALRNGDALAPARLGSRRGLRCPRRGPGLSGRAQRLGGSGGAPRAGGGCSDPESAPSAGSRSGLRPRAPLRPEQVGVGRSHCRRPRGLACGRLRAARGGGSVLRARTGMLLGLAAMELKVWVDGIQRVVCGVSEQTTCQEVVIALAQAIGQTGRFVLVQRLREKERQLLPQECPVGAQATCGQFASDVQFVLRRTGPSLAGRPSSDSCPPPERCLIRASLPVKPRAALGCEPRKTLTPEPAPSLSRPGPAAPVTPTPGCCTDLRGLELRVQRNAEELGHEAFWEQELRREQAREREGQARLQALSAATAEHAARLQALDAQARALEAELQLAAEAPGPPSPMASATERLHQDLAVQERQSAEVQGSLALVSRALEAAERALQAQAQELEELNRELRQCNLQQFIQQTGAALPPPPRPDRGPPGTQVGVVLGGGWEVRTWPSPTPS

SEQ ID NO: 760189 - protein, 346 aa, Homo sapiens
LVRSEFGTGMLLGLAAMELKVWVDGIQRVVCGVSEQTTCQEVVIALAQAIGQTGRFVLVQRLREKERQLLPQECPVGAQATCGQFASDVQFVLRRTGPSLAGRPSSDSCPPPERCLIRASLPVKPRAALGCEPRKTLTPEPAPSLSRPGPAAPVTPTPGCCTDLRGLELRVQRNAEELGHEAFWEQELRREQAREREGQARLQALSAATAEHAARLQALDAQARALEAELQLAAEAPGPPSPMASATERLHQDLAVQERQSAEVQGSLALVSRALEAAERALQAQAQELEELNRELRQCNLQQFIQQTGAALPPPPRPDRGPPGTQVGVVLGGGWEVRTWPSPTPS

SEQ ID NO: 760190 - protein, 343 aa, Homo sapiens
GAGGGRLRRRRSGSPGWRAPRTGMLLGLAAMELKVWVDGIQRVVCGVSEQTTCQEVVIALAQAIGQTGRFVLVQRLREKERQLLPQECPVGAQATCGQFASDVQFVLRRTGPSLAGRPSSDSCPPPERCLIRASLPVKPRAALGCEPRKTLTPEPAPSLSRPGPAAPVTPTPGCCTDLRGLELRVQRNAEELGHEAFWEQELRREQAREREGQARLQALSAATAEHAARLQALDAQARALEAELQLAAEAPGPPSPMASATERLHQDLAVQERQSAEVQGSLALVSRALEAAERALQAQAQELEELNRELRQCNLQQFIQQTGAALPPPPRPDRGPPGTQWPP

SEQ ID NO: 760191 - protein, 386 aa, Homo sapiens
IRGEGAVSSEPTGMLLGLAAMELKVWVDGIQRVVCGVSEQTTCQEVVIALAQAIGQTGRFVLVQRLREKERQLLPQECPVGAQATCGQFASDVQFVLRRTGPSLAGRPSSDSCPPPERCLIRASLPVKPRAALGCEPRKTLTPEPAPSLSRPGPAAPVTPTPGCCTDLRGLELRVQRNAEELGHEAFWEQELRREQAREREGQARLQALSAATAEHAARLQALDAQARALEAELQLAAEAPGPPSPMASATERLHQDLAVQERQSAEVQGSLALVSRALEAAERALQAQAQELEELNRELRQCNLQQFIQQTGAALPPPPRPDRGPPGTQGPLPPAREESLLGAPSESHAGAQPRPRGGPHDAELLEVAAAPAPEWCPLAAQPQAL

SEQ ID NO: 760192 - protein, 360 aa, Homo sapiens
GAGGGRLRRRRSGSPGWRAPRTGMLLGLAAMELKVWVDGIQRVVCGVSEQTTCQEVVIALAQAIGQTGRFVLVQRLREKERQLLPQECPVGAQATCGQFASDVQFVLRRTGPSLAGRPSSDSCPPPERCLIRASLPVKPRAALGCEPRKTLTPEPAPSLSRPGPAAPVTPTPGCCTDLRGLELRVQRNAEELGHEAFWEQELRREQAREREGQARLQALSAATAEHAARLQALDAQARALEAELQLAAEAPGPPSPMASATERLHQDLAVQERQSAEVQGSLALVSRALEAAERALQAQAQELEELNRELRQCNLQQFIQQTGAALPPPPRPDRGPPGTQVGVVLGGGWEVRTWPSPTPS

SEQ ID NO: 760193 - protein, 337 aa, Homo sapiens
MLLGLAAMELKVWVDGIQRVVCGVSEQTTCQEVVIALAQAIGQTGRFVLVQRLREKERQLLPQECPVGAQATCGQFASDVQFVLRRTGPSLAGRPSSDSCPPPERCLIRASLPVKPRAALGCEPRKTLTPEPAPSLSRPGPAAPVTPTPGCCTDLRGLELRVQRNAEELGHEAFWEQELRREQAREREGQARLQALSAATAEHAARLQALDAQARALEAELQLAAEAPGPPSPMASATERLHQDLAVQERQSAEVQGSLALVSRALEAAERALQAQAQELEELNRELRQCNLQQFIQQTGAALPPPPRPDRGPPGTQVGVVLGGGWEVRTWPSPTPS

SEQ ID NO: 760194 - protein, 343 aa, Homo sapiens; identical to SEQ ID NO: 760190

SEQ ID NO: 760195 - protein, 135 aa, Homo sapiens
LGSTLSVQELSGIWVASCTVKESVTQASHRWHTYRLGLILDSCSEQSGRRQRHKPCERCVWNHLVSKSHVIPRSKETGWIWGWSGMKKHLSASEGCMAHGSISIMPCPFAHLVLLVVTSLVTGKVSKDIGVEHPG

SEQ ID NO: 760196 - protein, 448 aa, Homo sapiens
LEDLCYHRHPAEHSVFGEDGSGKTTLMTKLQGAEHGKKGRGLEYLYLSVHDEDRDDHTRCNVWILDGDLYHKGLLKFAVSAESLPETLVIFVADMSRPWTVMESLQKWASVLREHIDKMKIPPEKMRELERKFVKDFQDYMEPEEGCQGSPQRRGPLTSGSDEENVALPLGDNVLTHNLGIPVLVVCTKCDAVSVLEKEHDYRDEHLDFIQSHLRRFCLQYGAALIYTSVKEEKNLDLLYKYIVHKTYGFHFTTPALVVEKDAVFIPAGWDNEKKIAILHENFTTVKPEDAYEDFIVKPPVRKLVHDKELAAEDEQVFLMKQQSLLAKQPATPTRASESPARGPSGSPRTQGRGGPASVPSSSPGTSVKKPDPNIKNNAASEGVLASFFNSLLSKKTGSPGSPGAGGVQSTAKKSGQKTVLSNVQEELDRMTRKPDSMVTNSSTENEA

SEQ ID NO: 760197 - protein, 421 aa, Homo sapiens
PLGPSSSFFSTPTRARSKLPSGKNILVFDHTRCNVWILDGDLYHKGLLKFAVSAESLPETLVIFVADMSRPWTVMESLQKWASVLREHIDKMKIPPEKMRELERKFVKDFQDYMEPEEGCQGSPQRRGPLTSGSDEENVALPLGDNVLTHNLGIPVLVVCTKCDAVSVLEKEHDYRDEHLDFIQSHLRRFCLQYGAALIYTSVKEEKNLDLLYKYIVHKTYGFHFTTPALVVEKDAVFIPAGWDNEKKIAILHENFTTVKPEDAYEDFIVKPPVRKLVHDKELAAEDEQVFLMKQQSLLAKQPATPTRASESPARGPSGSPRTQGRGGPASVPSSSPGTSVKKPDPNIKNNAASEGVLASFFNSLLSKKTGSPGSPGAGGVQSTAKKSGQKTVLSNVQEELDRMTRKPDSMVTNSSTENEA

SEQ ID NO: 760198 - protein, 255 aa, Homo sapiens
MSSTLRLYVFDFVSSCSELIFLEQIDSDGAALIYTSVKEEKNLDLLYKYIVHKTYGFHFTTPALVVEKDAVFIPAGWDNEKKIAILHENFTTVKPEDAYEDFIVKPPVRKLVHDKELAAEDEQVFLMKQQSLLAKQPATPTRASESPARGPSGSPRTQGRGGPASVPSSSPGTSVKKPDPNIKNNAASEGVLASFFNSLLSKKTGSPGSPGAGGVQSTAKKSGQKTVLSNVQEELDRMTRKPDSMVTNSSTENEA

SEQ ID NO: 760199 - protein, 129 aa, Homo sapiens [sequence omitted]

SEQ ID NO: 760200 - protein, 500 aa, Homo sapiens
AGGAAVGKMAPVGVEKKLLLGPNGPAVAAAGDLTSEEEEGQSLWSSILSEVSTRARSKLPSGKNILVFGEDGSGKTTLMTKLQGAEHGKKGRGLEYLYLSVHDEDRDDHTRCNVWILDGDLYHKGLLKFAVSAESLPETLVIFVADMSRPWTVMESLQKWASVLREHIDKMKIPPEKMRELERKFVKDFQDYMEPEEGCQGSPQRRGPLTSGSDEENVALPLGDNVLTHNLGIPVLVVCTKCDAVSVLEKEHDYRDEHLDFIQSHLRRFCLQYGAALIYTSVKEEKNLDLLYKYIVHKTYGFHFTTPALVVEKDAVFIPAGWDNEKKIAILHENFTTVKPEDAYEDFIVKPPVRKLVHDKELAAEDEQVFLMKQQSLLAKQPATPTRASESPARGPSGSPRTQGRGGPASVPSSSPGTSVKKPDPNIKNNAASEGVLASFFNSLLSKKTGSPGSPGAGGVQSTAKKSGQKTVLSNVQEELDRMTRKPDSMVTNSSTENEA

SEQ ID NO: 760201 - protein, 500 aa, Homo sapiens; identical to SEQ ID NO: 760200

SEQ ID NO: 760202 - protein, 500 aa, Homo sapiens; identical to SEQ ID NO: 760200

SEQ ID NO: 760203 - protein, 481 aa, Homo sapiens
AGGAAVGKMAPVGVEKKLLLGPNGPAVAAAGDLTSEEEEGQSLWSSILSEVSTRARSKLPSGKNILVFGEDGSGKTTLMTKLQGAEHGKKGRGLEYLYLSVHDEDRDDHTRCNVWILDGDLYHKGLLKFAVSAESLPETLVIFVADMSRPWTVMESLQKWASVLREHIDKMKIPPEKMRELERKFVKDFQDYMEPEEGCQGSPQRRGPLTSGSDEENVALPLGDNVLTHNLGIPVLVVCTKCDAVSVLEKEHDYRDEHLDFIQSHLRRFCLQYGAALIYTSVKEEKNLDLLYKYIVHKTYGFHFTTPALVVEKDAVFIPAGWDNEKKIAILHENFTTVKPEDAYEDFIVKPPVRKLVHDKELAAEDEQVFLMKQQSLLAKQPATPTRASESPARGPSGSPRTQGRGGPASVPSSSPGTSVKKPDPNIKNNAASEGVLASFFNSLLSKKTGSPGSPGAGGVQSTAKKSGTEGPWRLVTLVVE

SEQ ID NO: 760204 - protein, 318 aa, Homo sapiens
AGGAAVGKMAPVGVEKKLLLGPNGPAVAAAGDLTSEEEEGQSLWSSILSEVSTRARSKLPSGKNILVFGEDGSGKTTLMTKLQGAEHGKKGRGLEYLYLSVHDEDRDDHTRCNVWILDGDLYHKGLLKFAVSAESLPETLVIFVADMSRPWTVMESLQKWASVLREHIDKMKIPPEKMRELERKFVKDFQDYMEPEEGCQGSPQRRGPLTSGSDEENVALPLGDNVLTHNLGIPVLVVCTKCDAVSVLEKEHDYRDEHLDFIQSHLRRFCLQYGAALIYTSVKEEKNLDLLYKYIVHKTYGFHFTTPALVVEKDAVFM

SEQ ID NO: 760205 - protein, 172 aa, Homo sapiens [sequence omitted]

SEQ ID NO: 760206 - protein, 252 aa, Homo sapiens
  misc_feature (251)..(251): Xaa can be any naturally occurring amino acid
AGGAAVGKMAPVGVEKKLLLGPNGPAVAAAGDLTSEEEEGQSLWSSILSEVSTRARSKLPSGKNILVFGEDGSGKTTLMTKLQGAEHGKKGRGLEYLYLSVHDEDRDDHTRCNVWILDGDLYHKGLLKFAVSAESLPETLVIFVADMSRPWTVMESLQKWASVLREHIDKMKIPPEKMRELERKFVKDFQDYMEPEEGCQGSPQRRGPLTSGSDEENVALPLGDNVLTHNLGIPVLVVCTKCNPLMSRKKXT

SEQ ID NO: 760207 - protein, 500 aa, Homo sapiens; identical to SEQ ID NO: 760200

SEQ ID NO: 760208 - protein, 500 aa, Homo sapiens; identical to SEQ ID NO: 760200

SEQ ID NO: 760209 - protein, 500 aa, Homo sapiens; identical to SEQ ID NO: 760200

SEQ ID NO: 760210 - protein, 196 aa, Homo sapiens
MALRRLSLVALVAWLLGGGGGDPSSILHENFTTVKPEDAYEDFIVKPPVRKLVHDKELAAEDEQVFLMKQQSLLAKQPATPTRASESPARGPSGSPRTQGRGGPASVPSSSPGTSVKKPDPNIKNNAASEGVLASFFNSLLSKKTGSPGSPGAGGVQSTAKKSGQKTVLSNVQEELDRMTRKPDSMVTNSSTENEA

SEQ ID NO: 760211 - protein, 500 aa, Homo sapiens; identical to SEQ ID NO: 760200

SEQ ID NO: 760212 - protein, 500 aa, Homo sapiens; identical to SEQ ID NO: 760200

SEQ ID NO: 760213 - protein, 404 aa, Homo sapiens
AGGAAVGKMAPVGVEKKLLLGPNGPAVAAAGDLTSEEEEGQSLWSSILSEVSTRARSKLPSGKNILVFGEDGSGKTTLMTKLQGAEHGKKGRGLEYLYLSVHDEDRDDHTRCNVWILDGDLYHKGLLKFAVSAESLPETLVIFVADMSRPWTVMESLQKWASVLREHIDKMKIPPEKMRELERKFVKDFQDYMEPEEGCQGSPQRRGPLTSGSDEENVALPLGDNVLTHNLGIPVLVVCTKCDAVSVLEKEHDYRDEHLDFIQSHLRRFCLQYGAALIYTSVKEEKNLDLLYKYIVHKTYGFHFTTPALVVEKDAVFIPAGWDNEKKIAILHENFTTVKPEDAYEDFIVKPPVRKLVHDKELAAEDEQVFLMKQQSLLAKQPATPTRASESPARGPWVLGEPGR

SEQ ID NO: 760214 - protein, 712 aa, Homo sapiens
MASDCEPALNQAEGRNPTLERYLGALREAKNDSEQFAALLLVTKAVKAGDIDAKTRRRIFDAVGFTFPNRLLTTKEAPDGCPDHVLRALGVALLACFCSDPELAAHPQVLNKIPILSTFLTARGDPDDAARRSMIDDTYQCLTAVAGTPRGPRHLIAGGTVSALCQAYLGHGYGFDQALALLVGLLAAAETQCWKEAEPDLLAVLRGLSEDFQKAEDASKFELCQLLPLFLPPTTVPPECYRDLQAGLARILGSKLSSWQRNPALKLAARLAHACGSDWIPAGSSGSKFLALLVNLACVEVRLALEETGTEVKEDVVTACYALMELGIQECTRCEQSLLKEPQKVQLVSVMKEAIGAVIHYLLQVGSEKQKEPFVFASVRILGAWLAEETSSLRKEVCQLLPFLVRYAKTLYEEAEEANDLSQQVANLAISPTTPGPTWPGDALRLLLPGWCHLTVEDGPREILIKEGAPSLLCKYFLQQWELTSPGHDTSVLPDSVEIGLQTCCHIFLNLVVTAPGLIKRDACFTSLMNTLMTSLPALVQQQGRLLLAANVATLGLLMARLLSTSPALQGTPASRGFFAAAILFLSQSHVARATPGSDQAVLALSPEYEGIWADLQELWFLGMQAFTGCVPLLPWLAPAALRSRWPQELLQLLGSVSPNSVKPEMVAAYQGVLVELARANRLCREAMRLQAGEETASHYRMAALEQCLSEP

SEQ ID NO: 760215 - protein, 712 aa, Homo sapiens; identical to SEQ ID NO: 760214

SEQ ID NO: 760216 - protein, 729 aa, Homo sapiens
MSCCDLAAAGQLGKASIMASDCEPALNQAEGRNPTLERYLGALREAKNDSEQFAALLLVTKAVKAGDIDAKTRRRIFDAVGFTFPNRLLTTKEAPDGCPDHVLRALGVALLACFCSDPELAAHPQVLNKIPILSTFLTARGDPDDAARRSMIDDTYQCLTAVAGTPRGPRHLIAGGTVSALCQAYLGHGYGFDQALALLVGLLAAAETQCWKEAEPDLLAVLRGLSEDFQKAEDASKFELCQLLPLFLPPTTVPPECYRDLQAGLARILGSKLSSWQRNPALKLAARLAHACGSDWIPAGSSGSKFLALLVNLACVEVRLALEETGTEVKEDVVTACYALMELGIQECTRCEQSLLKEPQKVQLVSVMKEAIGAVIHYLLQVGSEKQKEPFVFASVRILGAWLAEETSSLRKEVCQLLPFLVRYAKTLYEEAEEANDLSQQVANLAISPTTPGPTWPGDALRLLLPGWCHLTVEDGPREILIKEGAPSLLCKYFLQQWELTSPGHDTSVLPDSVEIGLQTCCHIFLNLVVTAPGLIKRDACFTSLMNTLMTSLPALVQQQGRLLLAANVATLGLLMARLLSTSPALQGTPASRGFFAAAILFLSQSHVARATPGSDQAVLALSPEYEGIWADLQELWFLGMQAFTGCVPLLPWLAPAALRSRWPQELLQLLGSVSPNSVKPEMVAAYQGVLVELARANRLCREAMRLQAGEETASHYRMAALEQCLSEP

SEQ ID NO: 760217 - protein, 712 aa, Homo sapiens; identical to SEQ ID NO: 760214

SEQ ID NO: 760218 - protein, 712 aa, Homo sapiens; identical to SEQ ID NO: 760214

SEQ ID NO: 760219 - protein, 712 aa, Homo sapiens; identical to SEQ ID NO: 760214

SEQ ID NO: 760220 - protein, 563 aa, Homo sapiens
SGGDFAARGAAGGDRQEPSSPSHLPISAALLRLSGFWILRCPGNYPGPPLASPAPAGIHRLVAGREGEKRERKGLILLLPPPLLLLLQPLPEGGKGEELGKASIMASDCEPALNQAEGRNPTLERYLGDWIPAGSSGSKFLALLVNLACVEVRLALEETGTEVKEDVVTACYALMELGIQECTRCEQSLLKEPQKVQLVSVMKEAIGAVIHYLLQVGSEKQKEPFVFASVRILGAWLAEETSSLRKEVCQLLPFLVRYAKTLYEEAEEANDLSQQVANLAISPTTPGPTWPGDALRLLLPGWCHLTVEDGPREILIKEGAPSLLCKYFLQQWELTSPGHDTSVLPDSVEIGLQTCCHIFLNLVVTAPGLIKRDACFTSLMNTLMTSLPALVQQQGRLLLAANVATLGLLMARLLSTSPALQGTPASRGFFAAAILFLSQSHVARATPGSDQAVLALSPEYEGIWADLQELWFLGMQAFTGCVPLLPWLAPAALRSRWPQELLQLLGSVSPNSVKPEMVAAYQGVLVELARANRLCREAMRLQAGEETASHYRMAALEQCLSEP

SEQ ID NO: 760221 - protein, 240 aa, Homo sapiens
FRVDPLVRKCGVSSGPRLPEHRAGRRLRRSGPQPVGQGEHHGLGLRASSEPGRGPKPHPGALPGTALVQQQGRLLLAANVATLGLLMARLLSTSPALQGTPASRGFFAAAILFLSQSHVARATPGSDQAVLALSPEYEGIWADLQELWFLGMQAFTGCVPLLPWLAPAALRSRWPQELLQLLGSVSPNSVKPEMVAAYQGVLVELARANRLCREAMRLQAGEETASHYRMAALEQCLSEP

SEQ ID NO: 760222 - protein, 611 aa, Homo sapiens
MSCCDLAAAGQLGKASIMASDCEPALNQAEGRNPTLERYLGALREAKNDSEQFAALLLVTKAVKAGDIDAKTRRRIFDAVGFTFPNRLLTTKEAPDGCPDHVLRALGVALLACFCSDPELAAHPQVLNKIPILSTFLTARGDPDDAARRSMIDDTYQCLTAVAGTPRGPRHLIAGGTVSALCQAYLGHGYGFDQALALLVGLLAAAETQCWKEAEPDLLAVLRGLSEDFQKAEDASKFELCQLLPLFLPPTTVPPECYRDLQAGLARILGSKLSSWQRNPALKLAARLAHACGSDWIPAGSSGSKFLALLVNLACVEVRLALEETGTEVKEDVVTACYALMELGIQECTRCEQSLLKEPQKVQLVSVMKEAIGAVIHYLLQVGSEKQKEPFVFASVRILGAWLAEETSSLRKEVCQLLPFLVRYAKTLYEEAEEANDLSQQVANLAISPTTPGPTWPGDALRLLLPGWCHLTVEDGPREILIKEGAPSLLCKYFLQQWELTSPGHDTSVLPDSVEIGLQTCCHIFLNLVVTAPGLIKRDACFTSLMNTLMTSLPALVQQQGRLLLAANVATLGLLMARLLSTSPALQGTPAFRGFFASGTAARFVGPPFIL

SEQ ID NO: 760223 - protein, 100 aa, Homo sapiens
MIAHTPYEVTKAVKAGDIDAKTRRRIFDAVGFTFPNRLLTTKEAPDGCPDHVLRALGVALLACFCSDPELAAHPQVLNKIPILSTFLTARGDPDDAARRS

SEQ ID NO: 760224 - protein, 712 aa, Homo sapiens; identical to SEQ ID NO: 760214

SEQ ID NO: 760225 - protein, 729 aa, Homo sapiens; identical to SEQ ID NO: 760216

SEQ ID NO: 760226 - protein, 712 aa, Homo sapiens; identical to SEQ ID NO: 760214

SEQ ID NO: 760227 - protein, 712 aa, Homo sapiens; identical to SEQ ID NO: 760214

SEQ ID NO: 760228 - protein, 712 aa, Homo sapiens; identical to SEQ ID NO: 760214

SEQ ID NO: 760229 - protein, 464 aa, Homo sapiens
ISKAGSFEQSDLVTKAEPCKARQPRGKLHDLDDALGIQLTELVPQPQIQLHAVRLALEETGTEVKEDVVTACYALMELGIQECTRCEQSLLKEPQKVQLVSVMKEAIGAVIHYLLQVGSEKQKEPFVFASVRILGAWLAEETSSLRKEVCQLLPFLVRYAKTLYEEAEEANDLSQQVANLAISPTTPGPTWPGDALRLLLPGWCHLTVEDGPREILIKEGAPSLLCKYFLQQWELTSPGHDTSVLPDSVEIGLQTCCHIFLNLVVTAPGLIKRDACFTSLMNTLMTSLPALVQQQGRLLLAANVATLGLLMARLLSTSPALQGTPASRGFFAAAILFLSQSHVARATPGSDQAVLALSPEYEGIWADLQELWFLGMQAFTGCVPLLPWLAPAALRSRWPQELLQLLGSVSPNSVKPEMVAAYQGVLVELARANRLCREAMRLQAGEETASHYRMAALEQCLSEP

SEQ ID NO: 760230 - protein, 136 aa, Homo sapiens
MSCCDLAAAGQLGKASIMASDCEPALNQAEGRNPTLERYLGALREAKNDSEQFAALLLVTKAVKAGDIDAKTRRRIFDAVGFTFPNRLLTTKEAPDGCPDHVLRALGVALLACFCSDPELAAHPQVLNKIPIGGGH

SEQ ID NO: 760231 - protein, 92 aa, Homo sapiens
LLHLKGVLWQQVGSEKQKEPFVFASVRILGAWLAEETSSLRKEVCQLLPFLVRYAKTLYEEAEEANDLSQQVANLAISPTTPGPTWPGDALR

SEQ ID NO: 760232 - protein, 144 aa, Homo sapiens
MLIPEGKTTAGKDTKNDEGWFRSRKDLTPPLLMIIPGKGFLVLCNPKGRNSPMGGRILLGMKKFLFPCHECPAREQGGSVREGLSSWRKWDSKSRMLRLSGSQRGGSKCGMWVALWFSGSVVVPSTADFMTPHLSPSHIVYPSV

SEQ ID NO: 760233 - protein, 230 aa, Homo sapiens
MNEMYLRCDHENQYAQWMAACMLASKGKTMADSSYQPEVLNILSFLRMKNRNSASQVASSLENMDMNPECFVSPRCAKRHKSKQLAARILEAHQNVAQMPLVEAKLRFIQAWQSLPEFGLTYYLVRFKGSKKDDILGVSYNRLIKIDAATGIPVTTWRFTNIKQWNVNWETRQVVIEFDQNVFTAFTCLSADCKIVHEYIGGYIFLSTRSKDQNETLDEDLFHKLTGGQD

SEQ ID NO: 760234 - protein, 677 aa, Homo sapiens
MLSSTDFTFASWELVVRVDHPNEEQQKDVTLRVSGDLHVGGVMLKLVEQINISQDWSDFALWWEQKHCWLLKTHWTLDKYGVQADAKLLFTPQHKMLRLRLPNLKMVRLRVSFSAVVFKAVSDICKILNIRRSEELSLLKPSGDYFKKKKKKDKNNKEPIIEDILNLESSPTASGSSVSPGLYSKTMTPIYDPINGTPASSTMTWFSDSPLTEQNCSILAFSQPPQSPEALADMYQPRSLVDKAKLNAGWLDSSRSLMEQGIQEDEQLLLRFKYYSFFDLNPKYDAVRINQLYEQARWAILLEEIDCTEEEMLIFAALQYHISKLSLSAETQDFAGESEVDEIEAALSNLEVTLEGGKADSLLEDITDIPKLADNLKLFRPKKLLPKAFKQYWFIFKDTSIAYFKNKELEQGEPLEKLNLRGCEVVPDVNVAGRKFGIKLLIPVADGMNEMYLRCDHENQYAQWMAACMLASKGKTMADSSYQPEVLNILSFLRMKNRNSASQVASSLENMDMNPECFVSPRCAKRHKSKQLAARILEAHQNVAQMPLVEAKLRFIQAWQSLPEFGLTYYLVRFKGSKKDDILGVSYNRLIKIDAATGIPVTTWRFTNIKQWNVNWETRQVVIEFDQNVFTAFTCLSADCKIVHEYIGGYIFLSTRSKDQNETLDEDLFHKLTGGQD

SEQ ID NO: 760235 - protein, 364 aa, Homo sapiens
MLSSTDFTFASWELVVRVDHPNEEQQKDVTLRVSGDLHVGGVMLKLVEQINISQDWSDFALWWEQKHCWLLKTHWTLDKYGVQADAKLLFTPQHKMLRLRLPNLKMVRLRVSFSAVVFKAVSDICKILNIRRSEELSLLKPSGDYFKKKKKKDKNNKEPIIEDILNLESSPTASGSSVSPGLYSKTMTPIYDPINGTPASSTMTWFSDSPLTEQNCSILAFSQPPQSPEALADMYQPRSLVDKAKLNAGWLDSSRSLMEQGIQEDEQLLLRFKYYSFFDLNPKYDAVRINQLYEQARWAILLEEIDCTEEEMLIFAALQYHISKLSLSAETQDFAGESEVDEIEAALSNLEVTLEGGKADSLLV

SEQ ID NO: 760236 - protein, 677 aa, Homo sapiens; identical to SEQ ID NO: 760234

SEQ ID NO: 760237 - protein, 677 aa, Homo sapiens; identical to SEQ ID NO: 760234

SEQ ID NO: 760238 - protein, 576 aa, Homo sapiens
MLSSTDFTFASWELVVRVDHPNEEQQKDVTLRVSGDLHVGGVMLKLVEQINISQDWSDFALWWEQKHCWLLKTHWTLDKYGVQADAKLLFTPQHKMLRLRLPNLKMVRLRVSFSAVVFKAVSDICKILNIRRSEELSLLKPSGDYFKKKKKKDKNNKEPIIEDILNLESSPTASGSSVSPGLYSKTMTPIYDPINGTPASSTMTWFSDSPLTEQNCSILAFSQPPQSPEALADMYQPRSLVDKAKLNAGWLDSSRSLMEQGIQEDEQLLLRFKYYSFFDLNPKYDAVRINQLYEQARWAILLEEIDCTEEEMLIFAALQYHISKLSLSAETQDFAGESEVDEIEAALSNLEVTLEGGKADSLLEDITDIPKLADNLKLFRPKKLLPKAFKQYWFIFKDTSIAYFKNKELEQGEPLEKLNLRGCEVVPDVNVAGRKFGIKLLIPVADGMNEMYLRCDHENQYAQWMAACMLASKGKTMADSSYQPEVLNILSFLRMKNRNSASQVASSLENMDMNPECFVSPRCAKRHKSKQLAARILEAHQNVAQMPLVEAKLRFIQAWQSLPEFGLTYYLVRFIG

SEQ ID NO: 760239 - protein, 296 aa, Homo sapiens
MLSSTDFTFASWELVVRVDHPNEEQQKDVTLRVSGDLHVGGVMLKLVEQINISQDWSDFALWWEQKHCWLLKTHWTLDKYGVQADAKLLFTPQHKMLRLRLPNLKMVRLRVSFSAVVFKAVSDICKILNIRRSEELSLLKPSGDYFKKKKKKDKNNKEPIIEDILNLESSPTASGSSVSPGLYSKTMTPIYDPINGTPASSTMTWFSDSPLTEQNCSILAFSQPPQSPEALADMYQPRSLVDKAKLNAGWLDSSRSLMEQGIQEDEQLLLRFKYYSFFDLNPKVSNFFSFVFLFLI

SEQ ID NO: 760240 - protein, 52 aa, Homo sapiens
LCGGEGPSLGPGVIISATAGPSQAGKLLPELVSPLQVKPGLGHSYFISCAGR

SEQ ID NO: 760241 - protein, 34 aa, Homo sapiens
NLSILVSGGDVRLAWGFVSALGSFPTRLTLKEQP

SEQ ID NO: 760242 - protein, 358 aa, Homo sapiens
MDKTFERKLPVSSLTISRLIDNISSREEIDHAEYYLYKFRHSPNCWYLRNWTIHTWIRQCLKYDAQDKALYTLVNKVQYGIFPDNFTFNLLMDSFIKKENYKDALSVVFEVMMQEAFEVPSTQLLSLYVLFHCLAKKTDFSWEEERNFGASLLLPGLKQKNSVGFSSQLYGYALLGKVELQQGLRAVYHNMPLIWKPGYLDRALQVMEKVAASPEDIKLCREALDVLGAVLKALTSADGASEEQSQNDEDNQGSEKLVEQLDIEETEQSKLPQYLERFKALHSKLQALGKIESEGLLSLTTQLVKEKLSTCEAEDIATYEQNLQQWHLDLVQLIQREQQQREQAKQEYQAQKAAKASA

SEQ ID NO: 760243 - protein, 428 aa, Homo sapiens
LSVTRWLFLLVRSKMAASIVRRGMLLARQVVLPQLSPAGKRYLLSSAYVDSHKWEAREKEHYCLADLASLMDKTFERKLPVSSLTISRLIDNISSREEIDHAEYYLYKFRHSPNCWYLRNWTIHTWIRQCLKYDAQDKALYTLVNKVQYGIFPDNFTFNLLMDSFIKKENYKDALSVVFEVMMQEAFEVPSTQLLSLYVLFHCLAKKTDFSWEEERNFGASLLLPGLKQKNSVGFSSQLYGYALLGKVELQQGLRAVYHNMPLIWKPGYLDRALQVMEKVAASPEDIKLCREALDVLGAVLKALTSADGASEEQSQNDEDNQGSEKLVEQLDIEETEQSKLPQYLERFKALHSKLQALGKIESEGLLSLTTQLVKEKLSTCEAEDIATYEQNLQQWHLDLVQLIQREQQQREQAKQEYQAQKAAKASA

SEQ ID NO: 760244 - protein, 358 aa, Homo sapiens; identical to SEQ ID NO: 760242

SEQ ID NO: 760245 - protein, 358 aa, Homo sapiens; identical to SEQ ID NO: 760242

SEQ ID NO: 760246 - protein, 388 aa, Homo sapiens
MAASIVRRGMLLARQVVLPQLSPAADLASLMDKTFERKLPVSSLTISRLIDNISSREEIDHAEYYLYKFRHSPNCWYLRNWTIHTWIRQCLKYDAQDKALYTLVNKVQYGIFPDNFTFNLLMDSFIKKENYKDALSVVFEVMMQEAFEVPSTQLLSLYVLFHCLAKKTDFSWEEERNFGASLLLPGLKQKNSVGFSSQLYGYALLGKVELQQGLRAVYHNMPLIWKPGYLDRALQVMEKVAASPEDIKLCREALDVLGAVLKALTSADGASEEQSQNDEDNQGSEKLVEQLDIEETEQSKLPQYLERFKALHSKLQALGKIESEGLLSLTTQLVKEKLSTCEAEDIATYEQNLQQWHLDLVQLIQREQQQREQAKQEYQAQKAAKASA

SEQ ID NO: 760247 - protein, 517 aa, Homo sapiens
QGTLRRVGVGFMCQSAVSPEPCPAGEYGEREVLASRSGLAVPVPPLFVLVADCARELLGEGPSVRAVSQRRGRGGRQCSCLGPAPAVRPEGPGANVRTPPRSALSAASQGRCQFHRGEEETGREPHFPFRPKSFLSDCCSTSDSTIGSSAYIETDLASLMDKTFERKLPVSSLTISRLIDNISSREEIDHAEYYLYKFRHSPNCWYLRNWTIHTWIRQCLKYDAQDKALYTLVNKVQYGIFPDNFTFNLLMDSFIKKENYKDALSVVFEVMMQEAFEVPSTQLLSLYVLFHCLAKKTDFSWEEERNFGASLLLPGLKQKNSVGFSSQLYGYALLGKVELQQGLRAVYHNMPLIWKPGYLDRALQVMEKVAASPEDIKLCREALDVLGAVLKALTSADGASEEQSQNDEDNQGSEKLVEQLDIEETEQSKLPQYLERFKALHSKLQALGKIESEGLLSLTTQLVKEKLSTCEAEDIATYEQNLQQWHLDLVQLIQREQQQREQAKQEYQAQKAAKASA

SEQ ID NO: 760248 - protein, 428 aa, Homo sapiens; identical to SEQ ID NO: 760243

SEQ ID NO: 760249 - protein, 428 aa, Homo sapiens; identical to SEQ ID NO: 760243

SEQ ID NO: 760250 - protein, 428 aa, Homo sapiens; identical to SEQ ID NO: 760243

SEQ ID NO: 760251 - protein, 168 aa, Homo sapiens
MPLIWKPGYLDRALQVMEKVAASPEDIKLCREALDVLGAVLKALTSADGASEEQSQNDEDNQGSEKLVEQLDIEETEQSKLPQYLERFKALHSKLQALGKIESEGLLSLTTQLVKEKLSTCEAEDIATYEQNLQQWHLDLVQLIQREQQQREQAKQEYQAQKAAKASA

SEQ ID NO: 760252 - protein, 428 aa, Homo sapiens; identical to SEQ ID NO: 760243

SEQ ID NO: 760253 - protein, 144 aa, Homo sapiens
PTLTLQREALDVLGAVLKALTSADGASEEQSQNDEDNQGSEKLVEQLDIEETEQSKLPQYLERFKALHSKLQALGKIESEGLLSLTTQLVKEKLSTCEAEDIATYEQNLQQWHLDLVQLIQREQQQREQAKQEYQAQKAAKASA

SEQ ID NO: 760254 - protein, 195 aa, Homo sapiens [sequence omitted]

SEQ ID NO: 760255 - protein, 164 aa, Homo sapiens
LRARHPTPPESKVEKVAASPEDIKLCREALDVLGAVLKALTSADGASEEQSQNDEDNQGSEKLVEQLDIEETEQSKLPQYLERFKALHSKLQALGKIESEGLLSLTTQLVKEKLSTCEAEDIATYEQNLQQWHLDLVQLIQREQQQREQAKQEYQAQKAAKASA

SEQ ID NO: 760256 - protein, 144 aa, Homo sapiens; identical to SEQ ID NO: 760253

SEQ ID NO: 760257 - protein, 109 aa, Homo sapiens
EIYRLGSEAGWRRSKMAASIVRRGMLLARQVVLPQLSPAGKRYLLSSAYVDSHKWEAREKEHYCLADLASLMDKTFERKLPVSSLTISRLIDNISSREEIDHAEYYLYK

SEQ ID NO: 760258 - protein, 112 aa, Homo sapiens
MAASIVRRGMLLARQVVLPQLSPAGKRYLLSSAYVDSHKWEAREKEHYCLADLASLMDKTFERKLPVSSLTISRLIDNISSREEIDHAEYYLYKWNFTRCELLCTYFQLTLF

SEQ ID NO: 760259 - protein, 853 aa, Homo sapiens [sequence omitted]

SEQ ID NO: 760260 - protein, 851 aa, Homo sapiens
MSDDIDWLRSHRGVCKVDLYNPEGQQDQDRKVICFVDVSTLNVEDKDYKDAASSSSEGNLNLGSLEEKEIIVIKDTEKKDQSKVFFFFRTEGSVCLFKQAPSDPVSVLNWLLSDLQKYALGFQHALSPSTSTCKHKVGDTEGEYHRASSENCYSVYADQVNIDYLMNRPQNLRLEMTAAKNTNNNQSPSAPPAKPPSTQRAVISPDGECSIDDLSFYVNRLSSLVIQMAHKEIKEKLEGKSKCLHHSICPSPGNKERISPRTPASKIASEMAYEAVELTAAEMRGTGEESREGGQKSFLYSELSNKSKSGDKQMSQRESKEFADSISKGLMVYANQVASDMMVSLMKTLKVHSSGKPIPASVVLKRVLLRHTKEIVSDLIDSCMKNLHNITGVLMTDSDFVSAVKRNLFNQWKQNATDIMEAMLKRLVSALIGEEKETKSQSLSYASLKAGSHDPKCRNQSLEFSTMKAEMKERDKGKMKSDPCKSLTSAEKVGEHILKEGLTIWNQKQGNSCKVATKACSNKDEKGEKINASTDSLAKDLIVSALKLIQYHLTQQTKGKDTCEEDCPGSTMGYMAQSTQYEKCGGGQSAKALSVKQLESHRAPGPSTCQKENQHLDSQKMDMSNIVLMLIQKLLNENPFKCEDPCEGENKCSEPRASKAASMSNRSDKAEEQCQEHQELDCTSGMKQANGQFIDKLVESVMKLCLIMAKYSNDGAALAELEEQAASANKPNFRGTRCIHSGAMPQNYQDSLGHEVIVNNQCSTNSLQKQLQAVLQWIAASQFNVPMLYFMGDKDGQLEKLPQVSAKAAEKGYSVGGLLQEVMKFAKERQPDEAVGKVARKQLLDWLLANL

SEQ ID NO: 760261 - protein, 845 aa, Homo sapiens
MSDDIDWLRSHRGVCKVDLYNPEGQQDQDRKVICFVDVSTLNVEDKDYKDAASSSSEGNLNLGSLEEKEIIVIKDTEKKDQSKTEGSVCLFKQAPSDPVSVLNWLLSDLQKYALGFQHALSPSTSTCKHKVGDTEGEYHRASSENCYSVYADQVNIDYLMNRPQNLRLEMTAAKNTNNNQSPSAPPAKPPSTQRAVISPDGECSIDDLSFYVNRLSSLVIQMAHKEIKEKLEGKSKCLHHSICPSPGNKERISPRTPASKIASEMAYEAVELTAAEMRGTGEESREGGQKSFLYSELSNKSKSGDKQMSQRESKEFADSISKGLMVYANQVASDMMVSLMKTLKVHSSGKPIPASVVLKRVLLRHTKEIVSDLIDSCMKNLHNITGVLMTDSDFVSAVKRNLFNQWKQNATDIMEAMLKRLVSALIGEEKETKSQSLSYASLKAGSHDPKCRNQSLEFSTMKAEMKERDKGKMKSDPCKSLTSAEKVGEHILKEGLTIWNQKQGNSCKVATKACSNKDEKGEKINASTDSLAKDLIVSALKLIQYHLTQQTKGKDTCEEDCPGSTMGYMAQSTQYEKCGGGQSAKALSVKQLESHRAPGPSTCQKENQHLDSQKMDMSNIVLMLIQKLLNENPFKCEDPCEGENKCSEPRASKAASMSNRSDKAEEQCQEHQELDCTSGMKQANGQFIDKLVESVMKLCLIMAKYSNDGAALAELEEQAASANKPNFRGTRCIHSGAMPQNYQDSLGHEVIVNNQCSTNSLQKQLQAVLQWIAASQFNVPMLYFMGDKDGQLEKLPQVSAKAAEKGYSVGGLLQEVMKFAKERQPDEAVGKVARKQLLDWLLANL

SEQ ID NO: 760262 - protein, 845 aa, Homo sapiens; identical to SEQ ID NO: 760261

SEQ ID NO: 760263 - protein, 125 aa, Homo sapiens
SADLGPILRLFLRLFKPCLQVLFYSGALGTELSQKCSVASTEPLWSVNPQQCQSYKSRAGLHSTFPTSPLPPCHLLLQAVVLFHADSHPASCLPFPSTEKADGTGQPTTLESAASLSGRGVLVNI

SEQ ID NO: 760264 - protein, 100 aa, Homo sapiens
GPGRVVGSRRRPPRKLVPLAYKQFSPNVPEKTLGASGRYEGKIARSSERFKELTPNYNPHSSRHIQRLLLSVGRVLCSGQCDRSAGDWGRWVGCACHPPG

SEQ ID NO: 760265 - protein, 317 aa, Homo sapiens
ENTGADRLMTQRCKDRLNSLAISVMNQWPGVKLRVTEGWDEDGHHSEESLHYEGRAVDITTSDRDRNKYGLLARLAVEAGFDWVYYESKAHVHCSVKSEHSAAAKTGGCFPAGAQVRLESGARVALSAVRPGDRVLAMGEDGSPTFSDVLIFLDREPHRLRAFQVIETQDPPRRLALTPAHLLFTADNHTEPAARFRATFASHVQPGQYVLVAGVPGLQPARVAAVSTHVALGAYAPLTKHGTLVVEDVVASCFAAVADHHLAQLAFWPLRLFHSLAWGSWTPGEGVHWYPQLLYRLGRLLLEEGSFHPLGMSGAGS

SEQ ID NO: 760266 - protein, 317 aa, Homo sapiens; identical to SEQ ID NO: 760265

SEQ ID NO: 760267 - protein, 102 aa, Homo sapiens
RRKLQKQALGPEQNLETLLNLATSVFYNRDQEEQVQKEKRDQRKAAALVMALRQTNLGGSERTEHEAGQSPGKACYQCGLLGHFKKDCPMRNKLPPRPCPLC

SEQ ID NO: 760268 - protein, 102 aa, Homo sapiens; identical to SEQ ID NO: 760267

SEQ ID NO: 760269 - protein, 199 aa, Homo sapiens
VSIGHFVREAAAPPLLSRPRLFLRLLLRLFLPPPGFRRRHSSLIPTPGRSVFLFISVFSPLQPPDKVIRAGPAGILSPHRPHTSIACPLSRTSNLSTPLLMQLRVTTYSRQGLEDYIHIRIQQRNGRKTLTTVQGIADDYDKKKLVKAFKKKFACNGTVIEHPEYGEVIQLQGDQRKNICQFLLEVGIVKEEQLKVHGF

SEQ ID NO: 760270 - protein, 215 aa, Homo sapiens
PDALSDALSVGDALSVGDALSVGGEAAAPPLLSRPRLFLRLLLRLFLPPPGFRRRHSSLIPTPGRSVFLFISVFSPLQPPDKVIRAGPAGILSPHRPHTSIACPLSRTSNLSTPLLMQLRVTTYSRQGLEDYIHIRIQQRNGRKTLTTVQGIADDYDKKKLVKAFKKKFACNGTVIEHPEYGEVIQLQGDQRKNICQFLLEVGIVKEEQLKVHGF

SEQ ID NO: 760271 - protein, 207 aa, Homo sapiens
PDALSDALSVGDALSVGDALSVGGEAAAPPLLSRPRLFLPPPGFRRRHSSLIPTPGRSVFLFISVFSPLQPPDKVIRAGPAGILSPHRPHTSIACPLSRTSNLSTPLLMQLRVTTYSRQGLEDYIHIRIQQRNGRKTLTTVQGIADDYDKKKLVKAFKKKFACNGTVIEHPEYGEVIQLQGDQRKNICQFLLEVGIVKEEQLKVHGF

SEQ ID NO: 760272 - protein, 199 aa, Homo sapiens; identical to SEQ ID NO: 760269

SEQ ID NO: 760273 - protein, 199 aa, Homo sapiens; identical to SEQ ID NO: 760269

SEQ ID NO: 760274 - protein, 102 aa, Homo sapiens
MSTIQNLQSFGKIPSPPPPSLARRASRPFARLATAPRGPLSALPAPLVGLCLGAQKMATGPLATPSPRTAPDSEPSSRSPGRGPCATPCPVLDPALASASAP

SEQ ID NO: 760275 - protein, 199 aa, Homo sapiens; identical to SEQ ID NO: 760269

SEQ ID NO: 760276 - protein, 199 aa, Homo sapiens; identical to SEQ ID NO: 760269

SEQ ID NO: 760277 - protein, 193 aa, Homo sapiens
VSIGHFVREAAAPPLLSRPRLFLRLLLRLFLPPPGFRRRHSSLIPTPGRSVFLFISVFSPLQPPDKVIRAGPAGILSPHRPHTSIACPLSRTSNLSTPLLMQLRVTTYSRQGLEDYIHIRIQQRNGRKTLTTVQGIADDYDKKKLVKAFKKKFACNGTVIEHPEYGEVIQLQGDQRKNICQFLLEVSDWVLYV

SEQ ID NO: 760278 - protein, 2540 aa, Homo sapiens
RAQSSRAHLGLPLRLHLRLCPGGATPSRRGPQQSRAVSLAPAAQSGPGAMGAAAGRSPHLGPAPARRPQRSLLLLQLLLLVAAPGSTQAQAAPFPELCSYTWEAVDTKNNVLYKINICGSVDIVQCGPSSAVCMHDLKTRTYHSVGDSVLRSATRSLLEFNTTVSCDQQGTNHRVQSSIAFLCGKTLGTPEFVTATECVHYFEWRTTAACKKDIFKANKEVPCYVFDEELRKHDLNPLIKLSGAYLVDDSDPDTSLFINVCRDIDTLRDPGSQLRACPPGTAACLVRGHQAFDVGQPRDGLKLVRKDRLVLSYVREEAGKLDFCDGHSPAVTITFVCPSERREGTIPKLTAKSNCRYEIEWITEYACHRDYLESKTCSLSGEQQDVSIDLTPLAQSGGSSYISDGKEYLFYLNVCGETEIQFCNKKQAAVCQVKKSDTSQVKAAGRYHNQTLRYSDGDLTLIYFGGDECSSGFQRMSVINFECNKTAGNDGKGTPVFTGEVDCTYFFTWDTEYACVKEKEDLLCGATDGKKRYDLSALVRHAEPEQNWEAVDGSQTETEKKHFFINICHRVLQEGKARGCPEDAAVCAVDKNGSKNLGKFISSPMKEKGNIQLSYSDGDDCGHGKKIKTNITLVCKPGDLESAPVLRTSGEGGCFYEFEWRTAAACVLSKTEGENCTVFDSQAGFSFDLSPLTKKNGAYKVETKKYDFYINVCGPVSVSPCQPDSGACQVAKSDEKTWNLGLSNAKLSYYDGMIQLNYRGGTPYNNERHTPRATLITFLCDRDAGVGFPEYQEEDNSTYNFRWYTSYACPEEPLECVVTDPSTLEQYDLSSLAKSEGGLGGNWYAMDNSGEHVTWRKYYINVCRPLNPVPGCNRYASACQMKYEKDQGSFTEVVSISNLGMAKTGPVVEDSGSLLLEYVNGSACTTSDGRQTTYTTRIHLVCSRGRLNSHPIFSLNWECVVSFLWNTEAACPIQTTTDTDQACSIRDPNSGFVFNLNPLNSSQGYNVSGIGKIFMFNVCGTMPVCGTILGKPASGCEAETQTEELKNWKPARPVGIEKSLQLSTEGFITLTYKGPLSAKGTADAFIVRFVCNDDVYSGPLKFLHQDIDSGQGIRNTYFEFETALACVPSPVDCQVTDLAGNEYDLTGLSTVRKPWTAVDTSVDGRKRTFYLSVCNPLPYIPGCQGSAVGSCLVSEGNSWNLGVVQMSPQAAANGSLSIMYVNGDKCGNQRFSTRITFECAQISGSPAFQLQDGCEYVFIWRTVEACPVVRVEGDNCEVKDPRHGNLYDLKPLGLNDTIVSAGEYTYYFRVCGKLSSDVCPTSDKSKVVSSCQEKREPQGFHKVAGLLTQKLTYENGLLKMNFTGGDTCHKVYQRSTAIFFYCDRGTQRPVFLKETSDCSYLFEWRTQYACPPFDLTECSFKDGAGNSFDLSSLSRYSDNWEAITGTGDPEHYLINVCKSLAPQAGTEPCPPEAAACLLGGSKPVNLGRVRDGPQWRDGIIVLKYVDGDLCPDGIRKKSTTIRFTCSESQVNSRPMFISAVEDCEYTFAWPTATACPMKSNEHDDCQVTNPSTGHLFDLSSLSGRAGFTAAYSEKGLVYMSICGENENCPPGVGACFGQTRISVGKANKRLRYVDQVLQLVYKDGSPCPSKSGLSYKSVISFVCRPEAGPTNRPMLISLDKQTCTLFFSWHTPLACEQATECSVRNGSSIVDLSPLIHRTGGYEAYDESEDDASDTNPDFYINICQPLNPMHAVPCPAGAAVCKVPIDGPPIDIGRVAGPPILNPIANEIYLNFESSTPCLADKHFNYTSLIAFHCKRGVSMGTPKLLRTSECDFVFEWETPVVCPDEVRMDGCTLTDEQLLYSFNLSSLSTSTFKVTRDSRTYSVGVCTFAVGPEQGGCKDGGVCLLSGTKGASFGRLQSMKLDYRHQDEAVVLSYVNGDRCPPETDDGVPCVFPFIFNGKSYEECIIESRAKLWCSTTADYDRDHEWGFCRHSNSYRTSSIIFKCDEDEDIGRPQVFSEVRGCDVTFEWKTKVVCPPKKLECKFVQKHKTYDLRLLSSLTGSWSLVHNGVSYYINLCQKIYKGPLGCSERASICRRTTTGDVQVLGLVHTQKLGVIGDKVVVTYSKGYPCGGNKTASSVIELTCTKTVGRPAFKRFDIDSCTYYFSWDSRAACAVKPQEVQMVNGTITNPINGKSFSLGDIYFKLFRASGDMRTNGDNYLYEIQLSSITSSRNPACSGANICQVKPNDQHFSRKVGTSDKTKYYLQDGDLDVVFASSSKCGKDKTKSVSSTIFFHCDPLVEDGIPEFSHETADCQYLFSWYTSAVCPLGVGFDSENPGDDGQMHKGLSERSQAVGAVLSLLLVALTCCLLALLLYKKERRETVISKLTTCCRRSSNVSYKYSKVNKEEETDENETEWLMEEIQLPPPRQGKEGQENGHITTKSVKALSSLHGDDQDSEDEVLTIPEVKVHSGRGAGAESSHPVRNAQSNALQEREDDRVGLVRGEKARKGKSSSAQQKTVSSTKLVSFHDDSDEDLLHI

SEQ ID NO: 760279 - protein, 2540 aa, Homo sapiens; identical to SEQ ID NO: 760278

SEQ ID NO: 760280 - protein, 623 aa, Homo sapiens
MATVLSRALKLPGKKSPDLGEYDPLTQADSDESEDDLVLNLQKNGGVKNGKSPLGEAPEPDSDAEVAEAAKPHLSEVTTEGYPSEPLGGLEQKAASSLVSYVRTSVFLLTLGISMILVLLCAFLIPCPPRDLHSTWSRHLGSQGEVGTCLHWNWLMWNGDGLRDVLLSFVMSRNGSAVGVSRPAANLVCLSGMNGSTLWSSLLPEEARDITCLELMPGSLAETICLVTGTHKMLSAFNATSGKAIWTLNPNYLSNGTLAAPVVVLPDLDEDGVRDLVVLAIGELQPDLCFLLVSGRTGNPVGRPVKYNIVGVGNLIGPQVYITTNGAVYILFGFGNIQAVALRDIFVQAQNRDSSPPSLQIEEPEWEKRRSINLSELIDVYSDGVELLQMVKAPDSNCSNLLITTRQSLVLLRGQNLTPYWALRLQGLRSQPTPGYFTDDQTLDFLLQIQDGVGMKKMMVVDGDSGSIVWSYRAPCHMKETPATSAVTSDQKSVFLFWAEGLSAASPNSDIILGTEPPSLHHLYLLHPAFPSILLDLANTTGTVTASEVGINDLWKDAFYVTRTTGPSSEGHPAALVVSKLSLRWALMEGQMAQLQESTPKIGRGELRRFLSRIKFVEAPYEI

SEQ ID NO: 760281 - protein, 157 aa, Homo sapiens
MERSPSRRRRLEEAPKLPYKNPTHLAQQQEPWSRLNSTPTITSMRRDAYYFDPEIPKDDLDFRLAALYNHHTGTFKNKSEILLNQKTTQDTYRTKIQFPGEFLTPPTPPITFLANIRHWINPKKESIHSIQGSIVSPHTAATNGGYSRKKDGGFFST

SEQ ID NO: 760282 - protein, 72 aa, Homo sapiens
SYASEAVLRLSGPPIPLKRVRHLAMPPTRDPFQQPTLDNDDSYLGELRASKNQDPIPWRIFNPSHSTHHFPG

SEQ ID NO: 760283 - protein, 154 aa, Homo sapiens
SYASEAVLRLSGPPIPLKRVRHLAMPPTRDPFQQPTLDNDDSYLGELRASKIPKDDLDFRLAALYNHHTGTFKNKSEILLNQKTTQDTYRTKIQFPGEFLTPPTPPITFLANIRHWINPKKESIHSIQGSIVSPHTAATNGGYSRKKDGGFFST

SEQ ID NO: 760284 - protein, 494 aa, Homo sapiens
MVSKLSQLQTELLAALLESGLSKEALIQALGEPGPYLLAGEGPLDKGESCGGGRGELAELPNGLGETRGSEDETDDDGEDFTPPILKELENLSPEEAAHQKAVVETLLQEDPWRVAKMVKSYLQQHNIPQREVVDTTGLNQSHLSQHLNKGTPMKTQKRAALYTWYVRKQREVAQQFTHAGQGGLIEEPTGDELPTKKGRRNRFKWGPASQQILFQAYERQKNPSKEERETLVEECNRAECIQRGVSPSQAQGLGSNLVTEVRVYNWFANRRKEEAFRHKLAMDTYSGPPPGPGPGPALPAHSSPGLPPPALSPSKVHGVRYGQPATSETAEVPSSSGGPLVTVSTPLHQVSPTGLEPSHSLLSTEAKLVSAAGGPLPPVSTLTALHSLEQTSPGLNQQPQNLIMASLPGVMTIGPGEPASLGPTFTNTGASTLVIGKLVGMGGHLGGRLMGQPQNPGAGRATGTHSFIHSFIQHVFIQCLLWTSHCATSVIPG

SEQ ID NO: 760285 - protein, 631 aa, Homo sapiens
MVSKLSQLQTELLAALLESGLSKEALIQALGEPGPYLLAGEGPLDKGESCGGGRGELAELPNGLGETRGSEDETDDDGEDFTPPILKELENLSPEEAAHQKAVVETLLQEDPWRVAKMVKSYLQQHNIPQREVVDTTGLNQSHLSQHLNKGTPMKTQKRAALYTWYVRKQREVAQQFTHAGQGGLIEEPTGDELPTKKGRRNRFKWGPASQQILFQAYERQKNPSKEERETLVEECNRAECIQRGVSPSQAQGLGSNLVTEVRVYNWFANRRKEEAFRHKLAMDTYSGPPPGPGPGPALPAHSSPGLPPPALSPSKVHGVRYGQPATSETAEVPSSSGGPLVTVSTPLHQVSPTGLEPSHSLLSTEAKLVSAAGGPLPPVSTLTALHSLEQTSPGLNQQPQNLIMASLPGVMTIGPGEPASLGPTFTNTGASTLVIGLASTQAQSVPVINSMGSSLTTLQPVQFSQPLHPSYQQPLMPPVQSHVTQNPFMATMAQLQSPHALYSHKPEVAQYTHTGLLPQTMLITDTTNLSALASLTPTKQVFTSDTEASSESGLHTPASQATTLHVPSQDPAGIQHLQPAHRLSASPTVSSSSLVLYQSSDSSNGQSHLLPSNHSVIETFISTQMASSSQ

SEQ ID NO: 760286 - protein, 270 aa, Homo sapiens
RLGSEAGCREDEQRLKDYIQQLKNDRAAVKLTMLELESIHIDPLSYDVKPRGDSQRLDLENAVLMQELMAMKEEMAELKAQLYLLEKEKKALELKLSTREAQEQAYLVHIEHLKSEVEEQKEQRMRSLSSTSSGSKDKPGKECADAASPALSLAELRTTCSENELAAEFTNAIRREKKLKARVQELVSALERLTKSSEIRHQQSAEFVNDLKRANSNLVAAYEKAKKKHQNKLKKLESQMMAMVERHETRWGAQQNAVRGPGHQDRITPP

SEQ ID NO: 760287 - protein, 829 aa, Homo sapiens
MNSGVAMKYGNDSSAELSELHSAALASLKGDIVELNKRLQQTERERDLLEKKLAKAQCEQSHLMREHEDVQERTTLRYEERITELHSVIAELNKKIDRLQGTTIREEDEYSELRSELSQSQHEVNEDSRSMDQDQTSVSIPENQSTMVTADMDNCSDLNSELQRVLTGLENVVCGRKKSSCSLSVAEVDRHIEQLTTASEHCDLAIKTVEEIEGVLGRDLYPNLAEERSRWEKELAGLREENESLTAMLCSKEEELNRTKATMNAIREERDRLRRRVRELQTRLQSVQATGPSSPGRLTSTNRPINPSTGELSTSSSSNDIPIAKIAERVKLSKTRSESSSSDRPVLGSEISSIGVSSSVAEHLAHSLQDCSNIQEIFQTLYSHGSAISESKIREFEVETERLNSRIEHLKSQNDLLTITLEECKSNAERMSMLVGKYESNATALRLALQYSEQCIEAYELLLALAESEQSLILGQFRAAGVGSSPGDQSGDENITQMLKRAHDCRKTAENAAKALLMKLDGSCGGAFAVAGCSVQPWESLSSNSHTSTTSSTASSCDTEFTKEDEQRLKDYIQQLKNDRAAVKLTMLELESIHIDPLSYDVKPRGDSQRLDLENAVLMQELMAMKEEMAELKAQLYLLEKEKKALELKLSTREAQEQAYLVHIEHLKSEVEEQKEQRMRSLSSTSSGSKDKPGKECADAASPALSLAELRTTCSENELAAEFTNAIRREKKLKARVQELVSALERLTKSSEIRHQQSAEFVNDLKRANSNLVAAYEKAKKKHQNKLKKLESQMMAMVERHETQVRMLKQRIALLEEENSRPHTNETSL

SEQ ID NO: 760288 - protein, 829 aa, Homo sapiens; identical to SEQ ID NO: 760287

SEQ ID NO: 760289 - protein, 463 aa, Homo sapiens
MEFCSVTRLKCSGVILAHCNLCLLSSWNYRCPPPYPASFFVFLVETGFHHVGQAGLELLTTDPPTSASQSAGITGMSQCAWPFLGFFRIFHFSYKVAFYHEENVLAEKHMPQKKKNQFFTIFPACLGKRPPLSKVGCAWLFFVIKQASNGQFSFSLTQKHVAEAGIKSCLLTSVSILAPGKIREPPLLGPLIPPGRGGSSSCEGPQFYSCYLTLVLVLSNVIWVKTILQAKVLIFYKMYNKKAIKVFLFLYFSNTPQDTILEGELGGTVIMLIVGATESILIKLNACRFLGEFSFVNNLALPEFFSEQTSPMRVNNDLDSNLYEVKNLQISYFELFSLVSSVVTPFYVSNHLCSEFSLWLLKKWAQSQRTHFTVPLEYISHCWTEANKTNCANHKQKRLLSVVASAISVSLPATKICHGLGNSMIPYCNFHPHRLACQRSEVNIHCCLKQMLCLTEHLTFKIA

SEQ ID NO: 760290 - protein, 829 aa, Homo sapiens; identical to SEQ ID NO: 760287

SEQ ID NO: 760291 - protein, 829 aa, Homo sapiens; identical to SEQ ID NO: 760287

SEQ ID NO: 760292 - protein, 789 aa, Homo sapiens
MNSGVAMKYGNDSSAELSELHSAALASLKGDIVELNKRLQQTERERDLLEKKLAKAQCEQSHLMREHEDVQERTTLRYEERITELHSVIAELNKKIDRLQGTTIREEDEYSELRSELSQSQHEVNEDSRSMDQDQTSVSIPENQSTMVTADMDNCSDLNSELQRVLTGLENVVCGRKKSSCSLSVAEVDRHIEQLTTASEHCDLAIKTVEEIEGVLGRDLYPNLAEERSRWEKELAGLREENESLTAMLCSKEEELNRTKATMNAIREERDRLRRRVRELQTRLQSVQATGPSSPGRLTSTNRPINPSTGELSTSSSSNDIPIAKIAERVKLSKTRSESSSSDRPVLGSEISSIGVSSSVAEHLAHSLQDCSNIQEIFQTLYSHGSAISESKIREFEVETERLNSRIEHLKSQNDLLTITLEECKSNAERMSMLVGKYESNATALRLALQYSEQCIEAYELLLALAESEQSLILGQFRAAGVGSSPGDQSGDENITQMLKRAHDCRKTAENAAKALLMKLDGSCGGAFAVAGCSVQPWESLSSNSHTSTTSSTASSCDTEFTKEDEQRLKDYIQQLKNDRAAVKLTMLELESIHIDPLSYDVKPRGDSQRLDLENAVLMQELMAMKEEMAELKAQLYLLEKEKKALELKLSTREAQEQAYLVHIEHLKSEVEEQKEQRMRSLSSTSSGSKDKPGKECADAASPALSLAELRTTCSENELAAEFTNAIRREKKLKARVQELVSALERLTKSSEIRHQQLLICLLQQGFGFQVPGLNFKIEAAIRGDLWEL

SEQ ID NO: 760293 - protein, 682 aa, Homo sapiens
MTKSKEAVTFKDVAVVFSEEELQLLDLAQRKLYRDVMLENFRNVVSVGHQSTPDGLPQLEREEKLWMMKMATQRDNSSGAKNLKEMETLQEVGLRYLPHEELFCSQIWQQITRELIKYQDSVVNIQRTGCQLEKRDDLHYKDEGFSNQSSHLQVHRVHTGEKPYKGEHCVKSFSWSSHLQINQRAHAGEKPYKCEKCDNAFRRFSSLQAHQRVHSRAKSYTNDASYRSFSQRSHLPHHQRVPTGENPYKYEECGRNVGKSSHCQAPLIVHTGEKPYKCEECGVGFSQRSYLQVHLKVHTGKKPYKCEECGKSFSWRSRLQAHERIHTGEKPYKCNACGKSFSYSSHLNIHCRIHTGEKPYKCEECGKGFSVGSHLQAHQISHTGEKPYKCEECGKGFCRASNLLDHQRGHTGEKPYQCDACGKGFSRSSDFNIHFRVHTGEKPYKCEECGKGFSQASNLLAHQRGHTGEKPYKCGTCGKGFSRSSDLNVHCRIHTGEKPYKCERCGKAFSQFSSLQVHQRVHTGEKPYQCAECGKGFSVGSQLQAHQRCHTGEKPYQCEECGKGFCRASNFLAHRGVHTGEKPYRCDVCGKRFRQRSYLQAHQRVHTGERPYKCEECGKVFSWSSYLQAHQRVHTGEKPYKCEECGKGFSWSSSLIIHQRVHADDEGDKDFPSSEDSHRKTR

SEQ ID NO: 760294 - protein, 812 aa, Homo sapiens
MFQAHLQTFNLAEIIHATDLCTCLELRDTVKRLQVAFCLLKTPENHPSGLWNSTQLNQDFAVNVYIFCSLSYISQYSVHVLLKLWGVRSELAQQASMARMSFVIAACQLVLGLLMTSLTESSIQNSECPQLCVCEIRPWFTPQSTYREATTVDCNDLRLTRIPSNLSSDTQVLLLQSNNIAKTVDELQQLFNLTELDFSQNNFTNIKEVGLANLTQLTTLHLEENQITEMTDYCLQDLSNLQELYINHNQISTISAHAFAGLKNLLRLHLNSNKLKVIDSRWFDSTPNLEILMIGENPVIGILDMNFKPLANLRSLVLAGMYLTDIPGNALVGLDSLESLSFYDNKLVKVPQLALQKVPNLKFLDLNKNPIHKIQEGDFKNMLRLKELGINNMGELVSVDRYALDNLPELTKLEATNNPKLSYIHRLAFRSVPALESLMLNNNALNAIYQKTVESLPNLREISIHSNPLRCDCVIHWINSNKTNIRFMEPLSMFCAMPPEYKGHQVKEVLIQDSSEQCLPMISHDSFPNRLNVDIGTTVFLDCRAMAEPEPEIYWVTPIGNKITVETLSDKYKLSSEGTLEISNIQIEDSGRYTCVAQNVQGADTRVATIKVNGTLLDGTQVLKIYVKQTESHSILVSWKVNSNVMTSNLKWSSATMKIDNPHITYTARVPVDVHEYNLTHLQPSTDYEVCLTVSNIHQQTQKSCVNVTTKNAAFAVDISDQETSTALAAVMGSMFAVISLASIAVYFAKRFKRKNYHHSLKKYMQKTSSIPLNELYPPLINLWEGDSEKDKDGSADTKPTQVDTSRSYYMW

SEQ ID NO: 760295 - protein, 812 aa, Homo sapiens; identical to SEQ ID NO: 760294

SEQ ID NO: 760296 - protein, 716 aa, Homo sapiens
MARMSFVIAACQLVLGLLMTSLTESSIQNSECPQLCVCEIRPWFTPQSTYREATTVDCNDLRLTRIPSNLSSDTQVLLLQSNNIAKTVDELQQLFNLTELDFSQNNFTNIKEVGLANLTQLTTLHLEENQITEMTDYCLQDLSNLQELYINHNQISTISAHAFAGLKNLLRLHLNSNKLKVIDSRWFDSTPNLEILMIGENPVIGILDMNFKPLANLRSLVLAGMYLTDIPGNALVGLDSLESLSFYDNKLVKVPQLALQKVPNLKFLDLNKNPIHKIQEGDFKNMLRLKELGINNMGELVSVDRYALDNLPELTKLEATNNPKLSYIHRLAFRSVPALESLMLNNNALNAIYQKTVESLPNLREISIHSNPLRCDCVIHWINSNKTNIRFMEPLSMFCAMPPEYKGHQVKEVLIQDSSEQCLPMISHDSFPNRLNVDIGTTVFLDCRAMAEPEPEIYWVTPIGNKITVETLSDKYKLSSEGTLEISNIQIEDSGRYTCVAQNVQGADTRVATIKVNGTLLDGTQVLKIYVKQTESHSILVSWKVNSNVMTSNLKWSSATMKIDNPHITYTARVPVDVHEYNLTHLQPSTDYEVCLTVSNIHQQTQKSCVNVTTKNAAFAVDISDQETSTALAAVMGSMFAVISLASIAVYFAKRFKRKNYHHSLKKYMQKTSSIPLNELYPPLINLWEGDSEKDKDGSADTKPTQVDTSRSYYMW

SEQ ID NO: 760297 - protein, 716 aa, Homo sapiens; identical to SEQ ID NO: 760296

SEQ ID NO: 760298 - protein, 888 aa, Homo sapiens
MDESALLDLLECPVCLERLDASAKVLPCQHTFCKRCLLGIVGSRNELRCPECRTLVGSGVEELPSNILLVRLLDGIKQRPWKPGPGGGSGTNCTNALRSQSSTVANCSSKDLQSSQGGQQPRVQSWSPPVRGIPQLPCAKALYNYEGKEPGDLKFSKGDIIILRRQVDENWYHGEVNGIHGFFPTNFVQIIKPLPQPPPQCKALYDFEVKDKEADKDCLPFAKDDVLTVIRRVDENWAEGMLADKIGIFPISYVEFNSAAKQLIEWDKPPVPGVDAGECSSAAAQSSTAPKHSDTKKNTKKRHSFTSLTMANKSSQASQNRHSMEISPPVLISSSNPTAAARISELSGLSCSAPSQVHISTTGLIVTPPPSSPVTTGPSFTFPSDVPYQAALGTLNPPLPPPPLLAATVLASTPPGATAAAAAAGMGPRPMAGSTDQIAHLRPQTRPSVYVAIYPYTPRKEDELELRKGEMFLVFERCQDGWFKGTSMHTSKIGVFPGNYVAPVTRAVTNASQAKVPMSTAGQTSRGVTMVSPSTAGGPAQKLQGNGVAGSPSVVPAAVVSAAHIQTSPQAKVLLHMTGQMTVNQARNAVRTVAAHNQERPTAAVTPIQVQNAAGLSPASVGLSHHSLASPQPAPLMPGSATHTAAISISRASAPLACAAAAPLTSPSITSASLEAEPSGRIVTVLPGLPTSPDSASSACGNSSATKPDKDSKKEKKGLLKLLSGASTKRKPRVSPPASPTLEVELGSAELPLQGAVGPELPPGGGHGRAGSCPVDGDGPVTTAVAGAALAQDAFHRKASSLDSAVPIAPPPRQACSSLGPVLNESRPVVCERHRVVVSYPPQSEAELELKEGDIVFVHKKREDGWFKGTLQRNGKTGLFPGSFVENI

SEQ ID NO: 760299 - protein, 556 aa, Homo sapiens
RLVRGRVESAEGELSGFSCSAPSQVHISTTGLIVTPPPSSPVTTGPSFTFPSDVPYQAALGTLNPPLPPPPLLAATVLASTPPGATAAAAAAGMGPRPMAGSTDQIAHLRPQTRPSVYVAIYPYTPRKEDELELRKGEMFLVFERCQDGWFKGTSMHTSKIGVFPGNYVAPVTRAVTNASQAKVPMSTAGQTSRGVTMVSPSTAGGPAQKLQGNGVAGSPSVVPAAVVSAAHIQTSPQAKVLLHMTGQMTVNQARNAVRTVAAHNQERPTAAVTPIQVQNAAGLSPASVGLSHHSLASPQPAPLMPGSATHTAAISISRASAPLACAAAAPLTSPSITSASLEAEPSGRIVTVLPGLPTSPDSASSACGNSSATKPDKDSKKEKKGLLKLLSGASTKRKPRVSPPASPTLEVELGSAELPLQGAVGPELPPGGGHGRAGSCPVDGDGPVTTAVAGAALAQDAFHRKASSLDSAVPIAPPPRQACSSLGPVLNESRPVVCERHRVVVSYPPQSEAELELKEGDIVFVHKKREDGWFKGTLQRNGKTGLFPGSFVENI

SEQ ID NO: 760300 - protein, 348 aa, Homo sapiens
MDESALLDLLECPVCLERLDASAKVLPCQHTFCKRCLLGIVGSRNELRCPECRTLVGSGVEELPSNILLVRLLDGIKQRPWKPGPGGGSGTNCTNALRSQSSTVANCSSKDLQSSQGGQQPRVQSWSPPVRGIPQLPCAKALYNYEGKEPGDLKFSKGDIIILRRQVDENWYHGEVNGIHGFFPTNFVQIIKPLPQPPPQCKALYDFEVKDKEADKDCLPFAKDDVLTVIRRVDENWAEGMLADKIGIFPISYVEFNSAAKQLIEWDKPPVPGVDAGECSSAAAQSSTAPKHSDTKKNTKKRHSFTSLTMANKSSQASQNRHSMEISPPVLIISVEPVPLWPVQQLLH

SEQ ID NO: 760301 - protein, 634 aa, Homo sapiens
WGDLEDPTEDEWDKPPVPGVDAGECSSAAAQSSTAPKHSDTKKNTKKRHSFTSLTMANKSSQASQNRHSMEISPPVLISSSNPTAAARISELSGLSCSAPSQVHISTTGLIVTPPPSSPVTTGPSFTFPSDVPYQAALGTLNPPLPPPPLLAATVLASTPPGATAAAAAAGMGPRPMAGSTDQIAHLRPQTRPSVYVAIYPYTPRKEDELELRKGEMFLVFERCQDGWFKGTSMHTSKIGVFPGNYVAPVTRAVTNASQAKVPMSTAGQTSRGVTMVSPSTAGGPAQKLQGNGVAGSPSVVPAAVVSAAHIQTSPQAKVLLHMTGQMTVNQARNAVRTVAAHNQERPTAAVTPIQVQNAAGLSPASVGLSHHSLASPQPAPLMPGSATHTAAISISRASAPLACAAAAPLTSPSITSASLEAEPSGRIVTVLPGLPTSPDSASSACGNSSATKPDKDSKKEKKGLLKLLSGASTKRKPRVSPPASPTLEVELGSAELPLQGAVGPELPPGGGHGRAGSCPVDGDGPVTTAVAGAALAQDAFHRKASSLDSAVPIAPPPRQACSSLGPVLNESRPVVCERHRVVVSYPPQSEAELELKEGDIVFVHKKREDGWFKGTLQRNGKTGLFPGSFVENI

SEQ ID NO: 760302 - protein, 888 aa, Homo sapiens; identical to SEQ ID NO: 760298

SEQ ID NO: 760303 - protein, 137 aa, Homo sapiens [sequence omitted]

SEQ ID NO: 760304 - protein, 502 aa, Homo sapiens
RSAEHPGELSKLGKAHATREKLRVSKLLERQVRKVSVNVKTVRGSLERQAGQIKKLEVKRRPEALAFAVLPATFKVMIYQDEVKLPAKLSISKSAEQSRRPHPAGPARLRVAMEDPTLYIVERPLPGYPDAEAPEPSSAGAQAAEEPSGAGSEELIKSDQVNGVLVLSLLDKIIGAVDQIQLTQAQLEERQAEMEGAVQSIQGELSKLGKAHATTSNTVSKLLEKVRKVSVNVKTVRGSLERQAGQIKKLEVNEAELLRRRNFKVMIYQDEVKLPAKLSISKSLKESEALPEKEGEELGEGERPEEDAAALELSSDEAVEVEEVIEESRAERIKRSGLRRVDDFKKAFSKEKMEKTKVRTRENLEKTRLKTKENLEKTRHTLEKRMNKLGTRLVPAERREKLKTSRDKLRKSFTPDHVVYARSKTAVYKVPPFTFHVKKIREGQVEVLKATEMVEVGADDDEGGAERGEAGDLRRGSSPDVHALLEITEESDAVLVDKSDSD

SEQ ID NO: 760305 - protein, 390 aa, Homo sapiens
MEDPTLYIVERPLPGYPDAEAPEPSSAGAQAAEEPSGAGSEELIKSDQVNGVLVLSLLDKIIGAVDQIQLTQAQLEERQAEMEGAVQSIQGELSKLGKAHATTSNTVSKLLEKVRKVSVNVKTVRGSLERQAGQIKKLEVNEAELLRRRNFKVMIYQDEVKLPAKLSISKSLKESEALPEKEGEELGEGERPEEDAAALELSSDEAVEVEEVIEESRAERIKRSGLRRVDDFKKAFSKEKMEKTKVRTRENLEKTRLKTKENLEKTRHTLEKRMNKLGTRLVPAERREKLKTSRDKLRKSFTPDHVVYARSKTAVYKVPPFTFHVKKIREGQVEVLKATEMVEVGADDDEGGAERGEAGDLRRGSSPDVHALLEITEESDAVLVDKSDSD

SEQ ID NO: 760306 - protein, 198 aa, Homo sapiens
MEDAAALELSSDEAVEVEEVIEESRAERIKRSGLRRVDDFKKAFSKEKMEKTKVRTRENLEKTRLKTKENLEKTRHTLEKRMNKLGTRLVPAERREKLKTSRDKLRKSFTPDHVVYARSKTAVYKVPPFTFHVKKIREGQVEVLKATEMVEVGADDDEGGAERGEAGDLRRGSSPDVHALLEITEESDAVLVDKSDSD

SEQ ID NO: 760307 - protein, 390 aa, Homo sapiens; identical to SEQ ID NO: 760305

SEQ ID NO: 760308 - protein, 390 aa, Homo sapiens; identical to SEQ ID NO: 760305

SEQ ID NO: 760309 - protein, 390 aa, Homo sapiens; identical to SEQ ID NO: 760305

SEQ ID NO: 760310 - protein, 390 aa, Homo sapiens; identical to SEQ ID NO: 760305

SEQ ID NO: 760311 - protein, 152 aa, Homo sapiens
CESWCCSWALRHIISDGGCSCPGDVAKAFGAGADFVMLGGMLALSPPGIRVRMKKSSVSGMTAAGWVVWGEAEGKADFSKSRKLGSQKGAAAGWELGGRAGCRPCHQVESWRGGGERTSQSSQPWFTPGSFFSSSFPRSMVARACGLSYLGG

SEQ ID NO: 760312 - protein, 390 aa, Homo sapiens; identical to SEQ ID NO: 760305

SEQ ID NO: 760313 - protein, 170 aa, Homo sapiens
MEDPTLYIVERPLPGYPDAEAPEPSSAGAQAAEEPSGAGSEELIKSDQVNGVLVLSLLDKIIGAVDQIQLTQAQLEERQAEMEGAVQSIQGELSKLGKAHATTSNTVSKLLEKVRKVSVNVKTVRGSLERQAGQIKKLEVNEAELLRRRNFKVMIYQDEVKLPRTPRAEF

SEQ ID NO: 760314 - protein, 390 aa, Homo sapiens; identical to SEQ ID NO: 760305

SEQ ID NO: 760315 - protein, 390 aa, Homo sapiens; identical to SEQ ID NO: 760305

SEQ ID NO: 760316 - protein, 390 aa, Homo sapiens; identical to SEQ ID NO: 760305

SEQ ID NO: 760317 - protein, 390 aa, Homo sapiens; identical to SEQ ID NO: 760305

SEQ ID NO: 760318 - protein, 390 aa, Homo sapiens; identical to SEQ ID NO: 760305

SEQ ID NO: 760319 - protein, 390 aa, Homo sapiens; identical to SEQ ID NO: 760305

SEQ ID NO: 760320 - protein, 390 aa, Homo sapiens; identical to SEQ ID NO: 760305

SEQ ID NO: 760321 - protein, 390 aa, Homo sapiens; identical to SEQ ID NO: 760305

SEQ ID NO: 760322 - protein, 305 aa, Homo sapiens
MEDPTLYIVERPLPGYPDAEAPEPSSAGAQAAEEPSGAGSEELIKSDQVNGVLVLSLLDKIIGAVDQIQLTQAQLEERQAEMEGAVQSIQGELSKLGKAHATTSNTVSKLLEKVRKVSVNVKTVRGSLERQAGQIKKLEVNEAELLRRRNFKVMIYQDEVKLPAKLSISKSLKESEALPEKEGEELGEGERPEEDAAALELSSDEAVEVEEVIEESRAERIKRSGLRRVDDFKKAFSKEKMEKTKVRTRENLEKTRLKTKENLEKTRHTLEKRMNKLGTRLVPAERREKLKTSRDKLRKSFTPDQ

SEQ ID NO: 760323 - protein, 172 aa, Homo sapiens
MEDPTLYIVERPLPGYPDAEAPEPSSAGAQAAEEPSGAGSEELIKSDQVNGVLVLSLLDKIIGAVDQIQLTQAQLEERQAEMEGAVQSIQGELSKLGKAHATTSNTVSKLLEKVRKVSVNVKTVRGSLERQAGQIKKLEVNEAELLRRRNFKVMIYQPGKHPISTKRSQRGE

SEQ ID NO: 760324 - protein, 764 aa, Homo sapiens
SSCTIPAFACAAAFLLHLFSSASAGAMGEPLTDSEKRKQISVRGLAGLGDVAEVRKSFNRHLHFTLVKDRNVATPRDYFFALAHTVRDHLVGRWIRTQQHYYERDPKRIYYLSLEFYMGRTLQNTMVNLGLQNACDEAIYQLGLDLEELEEIEEDAGLGNGGLGRLAACFLDSMATLGLAAYGYGIRYEFGIFNQKIVNGWQVEEADDWLRYGNPWEKARPEYMLPVHFYGRVEHTPDGVKWLDTQVVLAMPYDTPVPGYKNNTVNTMRLWSAKAPNDFKLQDFNVGDYIEAVLDRNLAENISRVLYPNDNFFEGKELRLKQEYFVVAATLQDIIRRFKSSKFGCRDPVRTCFETFPDKVAIQLNDTHPALSIPELMRILVDVEKVDWDKAWEITKKTCAYTNHTVLPEALERWPVSMFEKLLPRHLEIIYAINQRHLDHVAALFPGDVDRLRRMSVIEEGDCKRINMAHLCVIGSHAVNGVARIHSEIVKQSVFKDFYELEPEKFQNKTNGITPRRWLLLCNPGLADTIVEKIGEEFLTDLSQLKKLLPLVSDEVFIRDVAKVKQENKLKFSAFLEKEYKVKINPSSMFDVHVKRIHEYKRQLLNCLHVVTLYNRIKRDPAKAFVPRTVMIGGKAAPGYHMAKLIIKLVTSIGDVVNHDPVVGDRLKVIFLENYRVSLAEKVIPAADLSQQISTAGTEASGTGNMKFMLNGALTIGTMDGANVEMAEEAGAENLFIFGLRVEDVEALDRKGYNARSTTTTCPS

SEQ ID NO: 760325 - protein, 125 aa, Homo sapiens
GLNQAEMETKAVMETRLRKVTLEACVGQKTHSCRGTGVVLALGLSSSASSALPGHPDLASRAAGEQGTALGSAPRAVRRTHSASRGALHVTGSVIPQQGTLTAAPAWPALCILPPLPSPPAPQPC

SEQ ID NO: 760326 - protein, 245 aa, Homo sapiens
  misc_feature (4)..(4): Xaa can be any naturally occurring amino acid
APSXICDQPRRRVKIGEEFLTDLSQLKKLLPLVSDEVFIRDVAKVKQENKLKFSAFLEKEYKVKINPSSMFDVHVKRIHEYKRQLLNCLHVVTLYNRIKRDPAKAFVPRTVMIGGKAAPGYHMAKLIIKLVTSIGDVVNHDPVVGDRLKVIFLENYRVSLAEKVIPAADLSQQISTAGTEASGTGNMKFMLNGALTIGTMDGANVEMAEEAGAENLFIFGLRVEDVEALDRKGYNARSTTTTCPS

SEQ ID NO: 760327 - protein, 214 aa, Homo sapiens
MWHQPLCPSRSASDDISLTVKGAGGIGFRLTSHLCSSRSLLKGLVTTHGHWLLPWTVQALSSQAILGQGLCQAPTWLVLQGGPPGALAADSWPIASQVQCQEYYDHLPELKQAVDQISSGFFSPKEPDCFKDIVNMLMHHDRFKVFADYEAYMQCQAQVDQLYRNPKEWTKKVIRNIACSGKFSSDRTITEYAREIWGVEPSDLQIPPPNIPRD

SEQ ID NO: 760328 - protein, 99 aa, Homo sapiens
MQCQAQLVHLCLALHVGFIVCKHLEPVMVHQHVHDVLEAVWLLGTNWYRNPKEWTKKVIRNIACSGKFSSDRTITEYAREIWGVEPSDLQIPPPNIPRD

SEQ ID NO: 760329 - protein, 764 aa, Homo sapiens; identical to SEQ ID NO: 760324

SEQ ID NO: 760330 - protein, 764 aa, Homo sapiens; identical to SEQ ID NO: 760324

SEQ ID NO: 760331 - protein, 764 aa, Homo sapiens; identical to SEQ ID NO: 760324

SEQ ID NO: 760332 - protein, 186 aa, Homo sapiens
MWHQPLCPSRSASDDISLTVKGAGGIGFRLTSHLCSSRSLLKGLVTTHGHWLLPWTVQALSSQAILGQGLCQAPTWLVLQGGPPGALAADSWPIASQEPDCFKDIVNMLMHHDRFKVFADYEAYMQCQAQVDQLYRNPKEWTKKVIRNIACSGKFSSDRTITEYAREIWGVEPSDLQIPPPNIPRD

SEQ ID NO: 760333 - protein, 764 aa, Homo sapiens; identical to SEQ ID NO: 760324

SEQ ID NO: 760334 - protein, 746 aa, Homo sapiens
SSCTIPAFACAAAFLLHLFSSASAGAMGEPLTDSEKRKQISVRGLAGLGDVAEVRKSFNRHLHFTLVKDRNVATPRDYFFALAHTVRDHLVGRWIRTQQHYYERDPKRIYYLSLEFYMGRTLQNTMVNLGLQNACDEAIYQLGLDLEELEEIEEDAGLGNGGLGRLAACFLDSMATLGLAAYGYGIRYEFGIFNQKIVNGWQVEEADDWLRYGNPWEKARPEYMLPVHFYGRVEHTPDGVKWLDTQVVLAMPYDTPVPGYKNNTVNTMRLWSAKAPNDFKLQDFNVGDYIEAVLDRNLAENISRVLYPNDNFFEGKELRLKQEYFVVAATLQDIIRRFKSSKFGCRDPVRTCFETFPDKVAIQLNDTHPALSIPELMRILVDVEKVDWDKAWEITKKTCAYTNHTVLPEALERWPVSMFEKLLPRHLEIIYAINQRHLDHVAALFPGDVDRLRRMSVIEEGDCKRINMAHLCVIGSHAVNGVARIHSEIVKQSVFKDFYELEPEKFQNKTNGITPRRWLLLCNPGLADTIVEVVSDEVFIRDVAKVKQENKLKFSAFLEKEYKVKINPSSMFDVHVKRIHEYKRQLLNCLHVVTLYNRIKRDPAKAFVPRTVMIGGKAAPGYHMAKLIIKLVTSIGDVVNHDPVVGDRLKVIFLENYRVSLAEKVIPAADLSQQISTAGTEASGTGNMKFMLNGALTIGTMDGANVEMAEEAGAENLFIFGLRVEDVEALDRKGYNARSTTTTCPS

SEQ ID NO: 760335 - protein, 764 aa, Homo sapiens; identical to SEQ ID NO: 760324

SEQ ID NO: 760336 - protein, 764 aa, Homo sapiens; identical to SEQ ID NO: 760324

SEQ ID NO: 760337 - protein, 764 aa, Homo sapiens; identical to SEQ ID NO: 760324

SEQ ID NO: 760338 - protein, 764 aa, Homo sapiens; identical to SEQ ID NO: 760324

SEQ ID NO: 760339 - protein, 107 aa, Homo sapiens
YHAMMGASEVAQTLAKETFASTASQLHSNVVNYVQQIVAPKGSERLVCMAPASSGSPGFQNNCLFPNSCSLINFLEFISPQDNLFSSLGICDSWASALVGTYFSIAH

SEQ ID NO: 760340 - protein, 72 aa, Homo sapiens
NKQYELVENSAEASSVKVQCVCVYVCMCVRVSVPDPVSPTLPPVLRCFPETPLSWPVGHGKPPGWEAGPQVG

SEQ ID NO: 760341 - protein, 715 aa, Homo sapiens
MHLLPALAGVLATLVLAQPCEGTDPASPGAVETSVLRDCIAEAKLLVDAAYNWTQKSIKQRLRSGSASPMDLLSYFKQPVAATRTVVRAADYMHVALGLLEEKLQPQRSGPFNVTDVLTEPQLRLLSQASGCALRDQAERCSDKYRTITGRCNNKRRPLLGASNQALARWLPAEYEDGLSLPFGWTPSRRRNGFLLPLVRAVSNQIVRFPNERLTSDRGRALMFMQWGQFIDHDLDFSPESPARVAFTAGVDCERTCAQLPPCFPIKIPPNDPRIKNQRDCIPFFRSAPSCPQNKNRVRNQINALTSFVDASMVYGSEVSLSLRLRNRTNYLGLLAINQRFQDNGRALLPFDNLHDDPCLLTNRSARIPCFLAGDTRSTETPKLAAMHTLFMREHNRLATELRRLNPRWNGDKLYNEARKIMGAMVQIITYRDFLPLVLGKARARRTLGHYRGYCSNVDPRVANVFTLAFRFGHTMLQPFMFRLDSQYRASAPNSHVPLSSAFFASWRIVYEGGIDPILRGLMATPAKLNRQDAMLVDELRDRLFRQVRRIGLDLAALNMQRSRDHGLPGYNAWRRFCGLSQPRNLAQLSRVLKNQDLARKFLNLYGTPDNIDIWIGAIAEPLLPGARVGPLLACLFENQFRRARDGDRFWWQKRGVFTKRQRKALSRISLSRIICDNTGITTVSRDIFRANIYPRGFVNCSRIPRLNLSAWRGT

SEQ ID NO: 760342 - protein, 253 aa, Homo sapiens
MSSYMVNSKYVDPKFPPCEEYLQGGYLGEQGADYYGGGAQGADFQPPGLYPRPDFGEQPFGGSGPGPGSALPARGHGQEPGGPGGHYAAPGEPCPAPPAPPPAPLPGARAYSQSDPKQPPSGTALKQPAVVYPWMKKVHVNSVNPNYTGGEPKRSRTAYTRQQVLELEKEFHFNRYLTRRRRIEIAHTLCLSERQIKIWFQNRRMKWKKDHKLPNTKGRSSSSSSSSSCSSSVAPSQHLQPMAKDHHTDLTTL

SEQ ID NO: 760343 - protein, 253 aa, Homo sapiens; identical to SEQ ID NO: 760342

SEQ ID NO: 760344 - protein, 769 aa, Homo sapiens
MLGLRPPLLALVGLLSLGCVLSQECTKFKVSSCRECIESGPGCTWCQKLNFTGPGDPDSIRCDTRPQLLMRGCAADDIMDPTSLAETQEDHNGGQKQLSPQKVTLYLRPGQAAAFNVTFRRAKGYPIDLYYLMDLSYSMLDDLRNVKKLGGDLLRALNEITESGRIGFGSFVDKTVLPFVNTHPDKLRNPCPNKEKECQPPFAFRHVLKLTNNSNQFQTEVGKQLISGNLDAPEGGLDAMMQVAACPEEIGWRNVTRLLVFATDDGFHFAGDGKLGAILTPNDGRCHLEDNLYKRSNEFDYPSVGQLAHKLAENNIQPIFAVTSRMVKTYEKLTEIIPKSAVGELSEDSSNVVHLIKNAYNKLSSRVFLDHNALPDTLKVTYDSFCSNGVTHRNQPRGDCDGVQINVPITFQVKVTATECIQEQSFVIRALGFTDIVTVQVLPQCECRCRDQSRDRSLCHGKGFLECGICRCDTGYIGKNCECQTQGRSSQELEGSCRKDNNSIICSGLGDCVCGQCLCHTSDVPGKLIYGQYCECDTINCERYNGQVCGGPGRGLCFCGKCRCHPGFEGSACQCERTTEGCLNPRRVECSGRGRCRCNVCECHSGYQLPLCQECPGCPSPCGKYISCAECLKFEKGPFGKNCSAACPGLQLSNNPVKGRTCKERDSEGCWVAYTLEQQDGMDRYLIYVDESRECVAGPNIAAIVGGTVAGIVLIGILLLVIWKALIHLSDLREYRRFEKEKLKSQWNNDNPLFKSATTTVMNPKFAES

SEQ ID NO: 760345 - protein, 789 aa, Homo sapiens
AQALLTEDLGHTGAECTHRDMLGLRPPLLALVGLLSLGCVLSQECTKFKVSSCRECIESGPGCTWCQKLNFTGPGDPDSIRCDTRPQLLMRGCAADDIMDPTSLAETQEDHNGGQKQLSPQKVTLYLRPGQAAAFNVTFRRAKGYPIDLYYLMDLSYSMLDDLRNVKKLGGDLLRALNEITESGRIGFGSFVDKTVLPFVNTHPDKLRNPCPNKEKECQPPFAFRHVLKLTNNSNQFQTEVGKQLISGNLDAPEGGLDAMMQVAACPEEIGWRNVTRLLVFATDDGFHFAGDGKLGAILTPNDGRCHLEDNLYKRSNEFDYPSVGQLAHKLAENNIQPIFAVTSRMVKTYEKLTEIIPKSAVGELSEDSSNVVHLIKNAYNKLSSRVFLDHNALPDTLKVTYDSFCSNGVTHRNQPRGDCDGVQINVPITFQVKVTATECIQEQSFVIRALGFTDIVTVQVLPQCECRCRDQSRDRSLCHGKGFLECGICRCDTGYIGKNCECQTQGRSSQELEGSCRKDNNSIICSGLGDCVCGQCLCHTSDVPGKLIYGQYCECDTINCERYNGQVCGGPGRGLCFCGKCRCHPGFEGSACQCERTTEGCLNPRRVECSGRGRCRCNVCECHSGYQLPLCQECPGCPSPCGKYISCAECLKFEKGPFGKNCSAACPGLQLSNNPVKGRTCKERDSEGCWVAYTLEQQDGMDRYLIYVDESRECVAGPNIAAIVGGTVAGIVLIGILLLVIWKALIHLSDLREYRRFEKEKLKSQWNNDNPLFKSATTTVMNPKFAES

SEQ ID NO: 760346 - protein, 769 aa, Homo sapiens; identical to SEQ ID NO: 760344

SEQ ID NO: 760347 - protein, 769 aa, Homo sapiens; identical to SEQ ID NO: 760344

SEQ ID NO: 760348 - protein, 689 aa, Homo sapiens
ATLGYHAAISVSCVSTKATEKISLTHALLNSSRVGSPETAQFKGYPIDLYYLMDLSYSMLDDLRNVKKLGGDLLRALNEITESGRIGFGSFVDKTVLPFVNTHPDKLRNPCPNKEKECQPPFAFRHVLKLTNNSNQFQTEVGKQLISGNLDAPEGGLDAMMQVAACPEEIGWRNVTRLLVFATDDGFHFAGDGKLGAILTPNDGRCHLEDNLYKRSNEFDYPSVGQLAHKLAENNIQPIFAVTSRMVKTYEKLTEIIPKSAVGELSEDSSNVVHLIKNAYNKLSSRVFLDHNALPDTLKVTYDSFCSNGVTHRNQPRGDCDGVQINVPITFQVKVTATECIQEQSFVIRALGFTDIVTVQVLPQCECRCRDQSRDRSLCHGKGFLECGICRCDTGYIGKNCECQTQGRSSQELEGSCRKDNNSIICSGLGDCVCGQCLCHTSDVPGKLIYGQYCECDTINCERYNGQVCGGPGRGLCFCGKCRCHPGFEGSACQCERTTEGCLNPRRVECSGRGRCRCNVCECHSGYQLPLCQECPGCPSPCGKYISCAECLKFEKGPFGKNCSAACPGLQLSNNPVKGRTCKERDSEGCWVAYTLEQQDGMDRYLIYVDESRECVAGPNIAAIVGGTVAGIVLIGILLLVIWKALIHLSDLREYRRFEKEKLKSQWNNDNPLFKSATTTVMNPKFAES

SEQ ID NO: 760349 - protein, 444 aa, Homo sapiens
MSLLMCGRGDPGAGQCGSAGRAPSCRLTLALGSEHQLFLLLVTTFLPTLNPPGPLQRPGGEGWELGCHPGHRGSPPEPSTALQITFQVKVTATECIQEQSFVIRALGFTDIVTVQVLPQCECRCRDQSRDRSLCHGKGFLECGICRCDTGYIGKNCECQTQGRSSQELEGSCRKDNNSIICSGLGDCVCGQCLCHTSDVPGKLIYGQYCECDTINCERYNGQVCGGPGRGLCFCGKCRCHPGFEGSACQCERTTEGCLNPRRVECSGRGRCRCNVCECHSGYQLPLCQECPGCPSPCGKYISCAECLKFEKGPFGKNCSAACPGLQLSNNPVKGRTCKERDSEGCWVAYTLEQQDGMDRYLIYVDESRECVAGPNIAAIVGGTVAGIVLIGILLLVIWKALIHLSDLREYRRFEKEKLKSQWNNDNPLFKSATTTVMNPKFAES

SEQ ID NO: 760350 - protein, 711 aa, Homo sapiens
MLGLRPPLLALVGLLSLGCVLSQECTKFKVSSCRECIESGPGCTWCQKLNFTGPGDPDSIRCDTRPQLLMRGCAADDIMDPTSLAETQEDHNGGQKQLSPQKVTLYLRPGQAAAFNVTFRRAKGYPIDLYYLMDLSYSMLDDLRNVKKLGGDLLRALNEITESGRIGFGSFVDKTVLPFVNTHPDKLRNPCPNKEKECQPPFAFRHVLKLTNNSNQFQTEVGKQLISGNLDAPEGGLDAMMQVAACPEEIGWRNVTRLLVFATDDGFHFAGDGKLGAILTPNDGRCHLEDNLYKRSNEFDYPSVGQLAHKLAENNIQPIFAVTSRMVKTYEKLTEIIPKSAVGELSEDSSNVVHLIKNAYNKLSSRVFLDHNALPDTLKVTYDSFCSNGVTHRNQPRGDCDGVQINVPITFQVKVTATECIQEQSFVIRALGFTDIVTVQVLPQCECRCRDQSRDRSLCHGKGFLECGICRCDTGYIGKNCECQTQGRSSQELEGSCRKDNNSIICSGLGDCVCGQCLCHTSDVPGKLIYGQYCECDTINCERYNGQVCGGPGRGLCFCGKCRCHPGFEGSACQCERTTEGCLNPRRVECSGRGRCRCNVCECHSGYQLPLCQECPGCPSPCGKYISCAECLKFEKGPFGKNCSAACPGLQLSNNPVKGRTCKERDSEGCWVAYTLEQQDGMDRYLIYVDESRECVAGPNIPPSRGCFKYR

SEQ ID NO: 760351 - protein, 149 aa, Homo sapiens
NCSAACPGLQLSNNPVKGRSYQLPLCQECPGCPSPCGKYISCAECLKFEKGPFGKNCSQDGMDRYLIYVDESRECVAGPNIAAIVGGTVAGIVLIGILLLVIWKALIHLSDLREYRRFEKEKLKSQWNNDNPLFKSATTTVMNPKFAES

SEQ ID NO: 760352 - protein, 221 aa, Homo sapiens
MLGLRPPLLALVGLLSLGCVLSQECTKFKVSSCRECIESGPGCTWCQKLNFTGPGDPDSIRCDTRPQLLMRGCAADDIMDPTSLAETQEDHNGGQKQLSPQKVTLYLRPGQAAAFNVTFRRAKGYPIDLYYLMDLSYSMLDDLRNVKKLGGDLLRALNEITESGRIGFGSFVDKTVLPFVNTHPDKLRNPCPNKEKECQPPFAFRHVLKLTNNSNHFPPSK

SEQ ID NO: 760353 - protein, 187 aa, Homo sapiens
MLGLRPPLLALVGLLSLGCVLSQECTKFKVSSCRECIESGPGCTWCQKLNFTGPGDPDSIRCDTRPQLLMRGCAADDIMDPTSLAETQEDHNGGQKQLSPQKVTLYLRPGQAAAFNVTFRRAKGYPIDLYYLMDLSYSMLDDLRNVKKLGGDLLRALNEITESGRIGFGSFVDKTVCVFPVQVRTSV

SEQ ID NO: 760354 - protein, 126 aa, Homo sapiens
EELRGTGSVRTLRPAPPAEVSRRDPGQTGSKAPTPSQEHRRGLQHTEGHAGPAPPTARPGGAALPRVRPLSGVHEVQGQQLPGMHRVGARLHLVPEAGSGFGSSSPRHRGEQSPEEKPGGSRLSSD

SEQ ID NO: 760355 - protein, 769 aa, Homo sapiens; identical to SEQ ID NO: 760344

SEQ ID NO: 760356 - protein, 840 aa, Homo sapiens
PRPAGGELHGWSAPGVGPETVTKTPSLHRTCWACAPHCSPWWGCSPSGAVSSVFHGGDSTRDIPIRENRACPHFPKTEVPGRLGKDLATGVLSQECTKFKVSSCRECIESGPGCTWCQKLNFTGPGDPDSIRCDTRPQLLMRGCAADDIMDPTSLAETQEDHNGGQKQLSPQKVTLYLRPGQAAAFNVTFRRAKGYPIDLYYLMDLSYSMLDDLRNVKKLGGDLLRALNEITESGRIGFGSFVDKTVLPFVNTHPDKLRNPCPNKEKECQPPFAFRHVLKLTNNSNQFQTEVGKQLISGNLDAPEGGLDAMMQVAACPEEIGWRNVTRLLVFATDDGFHFAGDGKLGAILTPNDGRCHLEDNLYKRSNEFDYPSVGQLAHKLAENNIQPIFAVTSRMVKTYEKLTEIIPKSAVGELSEDSSNVVHLIKNAYNKLSSRVFLDHNALPDTLKVTYDSFCSNGVTHRNQPRGDCDGVQINVPITFQVKVTATECIQEQSFVIRALGFTDIVTVQVLPQCECRCRDQSRDRSLCHGKGFLECGICRCDTGYIGKNCECQTQGRSSQELEGSCRKDNNSIICSGLGDCVCGQCLCHTSDVPGKLIYGQYCECDTINCERYNGQVCGGPGRGLCFCGKCRCHPGFEGSACQCERTTEGCLNPRRVECSGRGRCRCNVCECHSGYQLPLCQECPGCPSPCGKYISCAECLKFEKGPFGKNCSAACPGLQLSNNPVKGRTCKERDSEGCWVAYTLEQQDGMDRYLIYVDESRECVAGPNIAAIVGGTVAGIVLIGILLLVIWKALIHLSDLREYRRFEKEKLKSQWNNDNPLFKSATTTVMNPKFAES

SEQ ID NO: 760357 - protein, 769 aa, Homo sapiens; identical to SEQ ID NO: 760344

SEQ ID NO: 760358 - protein, 425 aa, Homo sapiens
LEDLFCGCFPSLRIAYNKLSSRVFLDHNALPDTLKVTYDSFCSNGVTHRNQPRGDCDGVQINVPITFQVKVTATECIQEQSFVIRALGFTDIVTVQVLPQCECRCRDQSRDRSLCHGKGFLECGICRCDTGYIGKNCECQTQGRSSQELEGSCRKDNNSIICSGLGDCVCGQCLCHTSDVPGKLIYGQYCECDTINCERYNGQVCGGPGRGLCFCGKCRCHPGFEGSACQCERTTEGCLNPRRVECSGRGRCRCNVCECHSGYQLPLCQECPGCPSPCGKYISCAECLKFEKGPFGKNCSAACPGLQLSNNPVKGRTCKERDSEGCWVAYTLEQQDGMDRYLIYVDESRECVAGPNIAAIVGGTVAGIVLIGILLLVIWKALIHLSDLREYRRFEKEKLKSQWNNDNPLFKSATTTVMNPKFAES

SEQ ID NO: 760359 - protein, 222 aa, Homo sapiens
AAAVPLCPSSLLCAPAAGPGIRLPVHPLHPHLPHLGPLLGLRAPQPHLPPLVDTHPSPSPRCRSPRTPWHRCSHLAPRSSCAECLKFEKGPFGKNCSAACPGLQLSNNPVKGRTCKERDSEGCWVAYTLEQQDGMDRYLIYVDESRECVAGPNIAAIVGGTVAGIVLIGILLLVIWKALIHLSDLREYRRFEKEKLKSQWNNDNPLFKSATTTVMNPKFAES

SEQ ID NO: 760360 - protein, 221 aa, Homo sapiens; identical to SEQ ID NO: 760352

SEQ ID NO: 760361 - protein, 135 aa, Homo sapiens
MLGLRPPLLALVGLLSLGCVLSQECTKFKVSSCRECIESGPGCTWCQKLNFTGPGDPDSIRCDTRPQLLMRGCAADDIMDPTSLAETQEDHNGGQKQLSPQKVTLYLRPGQAAAFNVTFRRAKGYPIDLYYLMDT

SEQ ID NO: 760362 - protein, 149 aa, Homo sapiens
PRPAGGELHGWSAPGVGPETVTKTPSLHRTCWACAPHCSPWWGCSPSGAVSSVFHGGDSTRDIPIRENRACPHFPIDRSSREAGEGPCHWGPLSGVHEVQGQQLPGMHRVGARLHLVPEAGSGFGSSSPRHRGEQSPEEKPGGSRLSSD

SEQ ID NO: 760363 - protein, 351 aa, Homo sapiens
MAAAANSGSSLPLFDCPTWAGKPPPGLHLDVVKGDKLIEKLIIDEKKYYLFGRNPDLCDFTIDHQSCSRVHAALVYHKHLKRVFLIDLNSTHGTFLGHIRLEPHKPQQIPIDSTVSFGASTRAYTLREKPQTLPSAVKGDEKMGGEDDELKGLLGLPEEETELDNLTEFNTAHNKRISTLTIEEGNLDIQRPKRKRKNSRVTFSEDDEIINPEDVDPSVGRFRNMVQTAVVPVKKKRVEGPGSLGLEESGSRRMQNFAFSGGLYGGLPPTHSEAGSQPHGIHGTALIGGLPMPYPNLAPDVDLTPVVPSAVNMNPAPNPAVYNPEAVNEPKKKKYAKEAWPGKKPTPSLLI

SEQ ID NO: 760364 - protein, 328 aa, Homo sapiens
IRLGTRLGVARRQLIEKLIIDEKKYYLFGRNPDLCDFTIDHQSCSRVHAALVYHKHLKRVFLIDLNSTHGTFLGHIRLEPHKPQQIPIDSTVSFGASTRAYTLREKPQTLPSAVKGDEKMGGEDDELKGLLGLPEEETELDNLTEFNTAHNKRISTLTIEEGNLDIQRPKRKRKNSRVTFSEDDEIINPEDVDPSVGRFRNMVQTAVVPVKKKRVEGPGSLGLEESGSRRMQNFAFSGGLYGGLPPTHSEAGSQPHGIHGTALIGGLPMPYPNLAPDVDLTPVVPSAVNMNPAPNPAVYNPEAVNEPKKKKYAKEAWPGKKPTPSLLI

SEQ ID NO: 760365 - protein, 351 aa, Homo sapiens; identical to SEQ ID NO: 760363

SEQ ID NO: 760366 - protein, 209 aa, Homo sapiens
MGGEDDELKGLLGLPEEETELDNLTEFNTAHNKRISTLTIEEGNLDIQRPKRKRKNSRVTFSEDDEIINPEDVDPSVGRFRNMVQTAVVPVKKKRVEGPGSLGLEESGSRRMQNFAFSGGLYGGLPPTHSEAGSQPHGIHGTALIGGLPMPYPNLAPDVDLTPVVPSAVNMNPAPNPAVYNPEAVNEPKKKKYAKEAWPGKKPTPSLLI

SEQ ID NO: 760367 - protein, 352 aa, Homo sapiens
MAAAANSGSSLPLFDCPTWAGKPPPGLHLDVVKGDKLIEKLIIDEKKYYLFGRNPDLCDFTIDHQSCSRVHAALVYHKHLKRVFLIDLNSTHGTFLGHIRLEPHKPQQIPIDSTVSFGASTRAYTLREKPQTLPSAVKGDEKMGGEDDELKGLLGLPEEETELDNLTEFNTAHNKRISTLTIEEGNLDIQRPKRKRKNSRVTFSEDDEIINPEDVDPSVGRFRNMVQTAVVPVKKKRVEGPGSLGLEESGSRRMQNFAFSGGLYGGLPPTHSEAGSQPHGIHGTALIGGLPMPYPNLAPDVDLTPVVPSAVNMNPAPNPAVYNPEAVNEPKKKKYAKEAWLWVQAVNLSLSH

SEQ ID NO: 760368 - protein, 127 aa, Homo sapiens
MVQTAVVPVKKKRVEGPGSLGLEESGSRRMQNFAFSGGLYGGLPPTHSEAGSQPHGIHGTALIGGLPMPYPNLAPDVDLTPVVPSAVNMNPAPNPAVYNPEAVNEPKKKKYAKEAWPGKKPTPSLLI

SEQ ID NO: 760369 - protein, 209 aa, Homo sapiens; identical to SEQ ID NO: 760366

SEQ ID NO: 760370 - protein, 351 aa, Homo sapiens; identical to SEQ ID NO: 760363

SEQ ID NO: 760371 - protein, 1068 aa, Homo sapiens
MNSIKNVPARVLSRRPGHSLEAEREQFDKTQAISISKAINTQEAPVKEKHARRIILGTHHEKGAFTFWSYAIGLPLPSSSILSWKFCHVLHKVLRDGHPNVLHDCQRYRSNIREIGDLWGHLHDRYGQLVNVYTKLLLTKISFHLKHPQFPAGLEVTDEVLEKAAGTDVNNIFQLTVEMFDYMDCELKLSESVFRQLNTAIAVSQMSSGQCRLAPLIQVIQDCSHLYHYTVKLLFKLHSCLPADTLQGHRDRFHEQFHSLRNFFRRASDMLYFKRLIQIPRLPEGPPNFLRASALAEHIKPVVVIPEEAPEDEEPENLIEISTGPPAGEPVVVADLFDQTFGPPNGSVKDDRDLQIESLKREVEMLRSELEKIKLEAQRYIAQLKSQVNALEGELEEQRKQKQKALVDNEQLRHELAQLRAAQLEGERSQGLREEAERKASATEARYNKLKEKHSELVHVHAELLRKNADTAKQLTVTQQSQEEVARVKEQLAFQVEQVKRESELKLEEKSDQLEKLKRELEAKAGELARAQEALSHTEQSKSELSSRLDTLSAEKDALSGAVRQREADLLAAQSLVRETEAALSREQQRSSQEQGELQGRLAERESQEQGLRQRLLDEQFAVLRGAAAEAAGILQDAVSKLDDPLHLRCTSSPDYLVSRAQEALDAVSTLEEGHAQYLTSLADASALVAALTRFSHLAADTIINGGATSHLAPTDPADRLIDTCRECGARALELMGQLQDQQALRHMQASLVRTPLQGILQLGQELKPKSLDVRQEELGAVVDKEMAATSAAIEDAVRRIEDMMNQARHASSGVKLEVNERILNSCTDLMKAIRLLVTTSTSLQKEIVESGRGAATQQEFYAKNSRWTEGLISASKAVGWGATQLVEAADKVVLHTGKYEELIVCSHEIAASTAQLVAASKVKANKHSPHLSRLQECSRTVNERAANVVASTKSGQEQIEDRDTMDFSGLSLIKLKKQEMETQVRVLELEKTLEAERMRLGELRKQHYVLAGASGSPGEEVAIRPSTAPRSVTTKKPPLAQKPSVAPRQDHQLDKKDGIYPAQLVNY

SEQ ID NO: 760372 - protein, 103 aa, Homo sapiens
QGAHWCVGAGLGPCFTVGPPWTGCPAPKGSRSSSCPFCTVFRQLNTAIAVSQMSSGQCRLAPLIQVIQDCSHLYHYTVKLLFKLHSCEWPRATPGPEGCVYMA

SEQ ID NO: 760373 - protein, 883 aa, Homo sapiens
MRSRTRGVFRQLNTAIAVSQMSSGQCRLAPLIQVIQDCSHLYHYTVKLLFKLHSCLPADTLQGHRDRFHEQFHSLRNFFRRASDMLYFKRLIQIPRLPEGPPNFLRASALAEHIKPVVVIPEEAPEDEEPENLIEISTGPPAGEPVVVADLFDQTFGPPNGSVKDDRDLQIESLKREVEMLRSELEKIKLEAQRYIAQLKSQVNALEGELEEQRKQKQKALVDNEQLRHELAQLRAAQLEGERSQGLREEAERKASATEARYNKLKEKHSELVHVHAELLRKNADTAKQLTVTQQSQEEVARVKEQLAFQVEQVKRESELKLEEKSDQLEKLKRELEAKAGELARAQEALSHTEQSKSELSSRLDTLSAEKDALSGAVRQREADLLAAQSLVRETEAALSREQQRSSQEQGELQGRLAERESQEQGLRQRLLDEQFAVLRGAAAEAAGILQDAVSKLDDPLHLRCTSSPDYLVSRAQEALDAVSTLEEGHAQYLTSLADASALVAALTRFSHLAADTIINGGATSHLAPTDPADRLIDTCRECGARALELMGQLQDQQALRHMQASLVRTPLQGILQLGQELKPKSLDVRQEELGAVVDKEMAATSAAIEDAVRRIEDMMNQARHASSGVKLEVNERILNSCTDLMKAIRLLVTTSTSLQKEIVESGRGAATQQEFYAKNSRWTEGLISASKAVGWGATQLVEAADKVVLHTGKYEELIVCSHEIAASTAQLVAASKVKANKHSPHLSRLQECSRTVNERAANVVASTKSGQEQIEDRDTMDFSGLSLIKLKKQEMETQVRVLELEKTLEAERMRLGELRKQHYVLAGASGSPGEEVAIRPSTAPRSVTTKKPPLAQKPSVAPRQDHQLDKKDGIYPAQLVNY

SEQ ID NO: 760374 - protein, 639 aa, Homo sapiens
MALREEAERKASATEARYNKLKEKHSELVHVHAELLRKNADTAKQLTVTQQSQEEVARVKEQLAFQVEQVKRESELKLEEKSDQLEKLKRELEAKAGELARAQEALSHTEQSKSELSSRLDTLSAEKDALSGAVRQREADLLAAQSLVRETEAALSREQQRSSQEQGELQGRLAERESQEQGLRQRLLDEQFAVLRGAAAEAAGILQDAVSKLDDPLHLRCTSSPDYLVSRAQEALDAVSTLEEGHAQYLTSLADASALVAALTRFSHLAADTIINGGATSHLAPTDPADRLIDTCRECGARALELMGQLQDQQALRHMQASLVRTPLQGILQLGQELKPKSLDVRQEELGAVVDKEMAATSAAIEDAVRRIEDMMNQARHASSGVKLEVNERILNSCTDLMKAIRLLVTTSTSLQKEIVESGRGAATQQEFYAKNSRWTEGLISASKAVGWGATQLVEAADKVVLHTGKYEELIVCSHEIAASTAQLVAASKVKANKHSPHLSRLQECSRTVNERAANVVASTKSGQEQIEDRDTMDFSGLSLIKLKKQEMETQVRVLELEKTLEAERMRLGELRKQHYVLAGASGSPGEEVAIRPSTAPRSVTTKKPPLAQKPSVAPRQDHQLDKKDGIYPAQLVNY

SEQ ID NO: 760375 - protein, 1143 aa, Homo sapiens
MNSIKNVPARVLSRRPGHSLEAEREQFDKTQAISISKAINTQEAPVKEKHARRIILGTHHEKGAFTFWSYAIGLPLPSSSILSWKFCHVLHKVLRDGHPNVLHDCQRYRSNIREIGDLWGHLHDRYGQLVNVYTKLLLTKISFHLKHPQFPAGLEVTDEVLEKAAGTDVNNIFQLTVEMFDYMDCELKLSESVFRQLNTAIAVSQMSSGQCRLAPLIQVIQDCSHLYHYTVKLLFKLHSCLPADTLQGHRDRFHEQFHSLRNFFRRASDMLYFKRLIQIPRLPEGPPNFLRASALAEHIKPVVVIPEEAPEDEEPENLIEISTGPPAGEPVVVADLFDQTFGPPNGSVKDDRDLQIESLKREVEMLRSELEKIKLEAQRYIAQLKSQVNALEGELEEQRKQKQKALVDNEQLRHELAQLRAAQLEGERSQGLREEAERKASATEARYNKLKEKHSELVHVHAELLRKNADTAKQLTVTQQSQEEVARVKEQLAFQVEQVKRESELKLEEKSDQLEKLKRELEAKAGELARAQEALSHTEQSKSELSSRLDTLSAEKDALSGAVRQREADLLAAQSLVRETEAALSREQQRSSQEQGELQGRLAERESQEQGLRQRLLDEQFAVLRGAAAEAAGILQDAVSKLDDPLHLRCTSSPDYLVSRAQEALDAVSTLEEGHAQYLTSLADASALVAALTRFSHLAADTIINGGATSHLAPTDPADRLIDTCRECGARALELMGQLQDQQALRHMQASLVRTPLQGILQLGQELKPKSLDVRQEELGAVVDKEMAATSAAIEDAVRRIEDMMNQARHASSGVKLEVNERILNSCTDLMKVRAVTRGGLHLEGHQSLLSWSRQAIRLLVTTSTSLQKEIVESGRGAATQQEFYAKNSRWTEGLISASKAVGWGATQLVEVALGGGGQGAASCQLEQFGVQQGAGSRGGVELVPAVRGVRDPGPDWPLTRREAADKVVLHTGKYEELIVCSHEIAASTAQLVAASKVKANKHSPHLSRLQECSRTVNERAANVVASTKSGQEQIEDRDTMDFSGLSLIKLKKQEMETQVRVLELEKTLEAERMRLGELRKQHYVLAGASGSPGEEVAIRPSTAPRSVTTKKPPLAQKPSVAPRQDHQLDKKDGIYPAQLVNY

SEQ ID NO: 760376 - protein, 250 aa, Homo sapiens
VNERILNSCTDLMKAIRLLVTTSTSLQKEIVESGRGAATQQEFYAKNSRWTEGLISASKAVGWGATQLVEAADKVVLHTGKYEELIVCSHEIAASTAQLVAASKVKANKHSPHLSRLQECSRTVNERAANVVASTKSGQEQIEDRDTMDFSGLSLIKLKKQEMETQVRVLELEKTLEAERMRLGELRKQHYVLAGASGSPGEEVAIRPSTAPRSVTTKKPPLAQKPSVAPRQDHQLDKKDGIYPAQLVNY

SEQ ID NO: 760377 - protein, 196 aa, Homo sapiens
RTRGSTHAFGATQLVEAADKVVLHTGKYEELIVCSHEIAASTAQLVAASKVKANKHSPHLSRLQECSRTVNERAANVVASTKSGQEQIEDRDTMDFSGLSLIKLKKQEMETQVRVLELEKTLEAERMRLGELRKQHYVLAGASGSPGEEVAIRPSTAPRSVTTKKPPLAQKPSVAPRQDHQLDKKDGIYPAQLVNY

SEQ ID NO: 760378 - protein, 880 aa, Homo sapiens
MNSIKNVPARVLSRRPGHSLEAEREQFDKTQAISISKAINTQEAPVKEKHARRIILGTHHEKGAFTFWSYAIGLPLPSSSILSWKFCHVLHKVLRDGHPNVLHDCQRYRSNIREIGDLWGHLHDRYGQLVNVYTKLLLTKISFHLKHPQFPAGLEVTDEVLEKAAGTDVNNIFQLTVEMFDYMDCELKLSESVFRQLNTAIAVSQMSSGQCRLAPLIQVIQDCSHLYHYTVKLLFKLHSCLPADTLQGHRDRFHEQFHSLRNFFRRASDMLYFKRLIQIPRLPEGPPNFLRASALAEHIKPVVVIPEEAPEDEEPENLIEISTGPPAGEPVVVADLFDQTFGPPNGSVKDDRDLQIESLKREVEMLRSELEKIKLEAQRYIAQLKSQVNALEGELEEQRKQKQKALVDNEQLRHELAQLRAAQLEGERSQGLREEAERKASATEARYNKLKEKHSELVHVHAELLRKNADTAKQLTVTQQSQEEVARVKEQLAFQVEQVKRESELKLEEKSDQLEKLKRELEAKAGELARAQEALSHTEQSKSELSSRLDTLSAEKDALSGAVRQREADLLAAQSLVRETEAALSREQQRSSQEQGELQGRLAERESQEQGLRQRLLDEQFAVLRGAAAEAAGILQDAVSKLDDPLHLRCTSSPDYLVSRAQEALDAVSTLEEGHAQYLTSLADASALVAALTRFSHLAADTIINGGATSHLAPTDPADRLIDTCRECGARALELMGQLQDQQALRHMQASLVRTPLQGILQLGQELKPKSLDVRQEELGAVVDKEMAATSAAIEDAVRRIEDMMNQARHASSGVKLEVNERILNSCTDLMKAIRLLVTTSTSLQKEIVESGRGAATQQEFYAKNSRWTEGQPSPEGQPS

SEQ ID NO: 760379 - protein, 195 aa, Homo sapiens
MNSIKNVPARVLSRRPGHSLEAEREQFDKTQAISISKAINTQEAPVKEKHARRIILGTHHEKGAFTFWSYAIGLPLPSSSILSWKFCHVLHKVLRDGHPNVLHDCQRYRSNIREIGDLWGHLHDRYGQLVNVYTKLLLTKISFHLKHPQFPAGLEVTDEVLEKAAGTDVNNIFQLTVEMFDYMDCELKLSESGEP

SEQ ID NO: 760380 - protein, 221 aa, Homo sapiens
MNSIKNVPARVLSRRPGHSLEAEREQFDKTQAISISKAINTQEAPVKEKHARRIILGTHHEKGAFTFWSYAIGLPLPSSSILSWKFCHVLHKVLRDGHPNVLHDCQRYRSNIREIGDLWGHLHDRYGQLVNVYTKLLLTKISFHLKHPQFPAGLEVTDEVLEKAAGTDVNNIFQLTVEMFDYMDCELKLSESGSLLSLQRFASGPITGKAGAGPEGPGHRS

SEQ ID NO: 760381 - protein, 915 aa, Homo sapiens
QGAHWCVGAGLGPCFTVGPPWTGCPAPKGSRSSSCPFCTVFRQLNTAIAVSQMSSGQCRLAPLIQVIQDCSHLYHYTVKLLFKLHSCLPADTLQGHRDRFHEQFHSLRNFFRRASDMLYFKRLIQIPRLPEGPPNFLRASALAEHIKPVVVIPEEAPEDEEPENLIEISTGPPAGEPVVVADLFDQTFGPPNGSVKDDRDLQIESLKREVEMLRSELEKIKLEAQRYIAQLKSQVNALEGELEEQRKQKQKALVDNEQLRHELAQLRAAQLEGERSQGLREEAERKASATEARYNKLKEKHSELVHVHAELLRKNADTAKQLTVTQQSQEEVARVKEQLAFQVEQVKRESELKLEEKSDQLEKLKRELEAKAGELARAQEALSHTEQSKSELSSRLDTLSAEKDALSGAVRQREADLLAAQSLVRETEAALSREQQRSSQEQGELQGRLAERESQEQGLRQRLLDEQFAVLRGAAAEAAGILQDAVSKLDDPLHLRCTSSPDYLVSRAQEALDAVSTLEEGHAQYLTSLADASALVAALTRFSHLAADTIINGGATSHLAPTDPADRLIDTCRECGARALELMGQLQDQQALRHMQASLVRTPLQGILQLGQELKPKSLDVRQEELGAVVDKEMAATSAAIEDAVRRIEDMMNQARHASSGVKLEVNERILNSCTDLMKAIRLLVTTSTSLQKEIVESGRGAATQQEFYAKNSRWTEGLISASKAVGWGATQLVEAADKVVLHTGKYEELIVCSHEIAASTAQLVAASKVKANKHSPHLSRLQECSRTVNERAANVVASTKSGQEQIEDRDTMDFSGLSLIKLKKQEMETQVRVLELEKTLEAERMRLGELRKQHYVLAGASGSPGEEVAIRPSTAPRSVTTKKPPLAQKPSVAPRQDHQLDKKDGIYPAQLVNY

SEQ ID NO: 760382 - protein, 1091 aa, Homo sapiens
MNSIKNVPARVLSRRPGHSLEAEREQFDKTQAISISKAINTQEAPVKEKHARRIILGTHHEKGAFTFWSYAIGLPLPSSSILSWKFCHVLHKVLRDGHPNVLHDCQRYRSNIREIGDLWGHLHDRYGQLVNVYTKLLLTKISFHLKHPQFPAGLEVTDEVLEKAAGTDVNNIFQLTVEMFDYMDCELKLSESVFRQLNTAIAVSQMSSGQCRLAPLIQVIQDCSHLYHYTVKLLFKLHSCLPADTLQGHRDRFHEQFHSLRNFFRRASDMLYFKRLIQIPRLPEGPPNFLRASALAEHIKPVVVIPEEAPEDEEPENLIEISTGPPAGEPVVVADLFDQTFGPPNGSVKDDRDLQIESLKREVEMLRSELEKIKLEAQRYIAQLKSQVNALEGELEEQRKQKQKALVDNEQLRHELAQLRAAQLEGERSQGLREEAERKASATEARYNKLKEKHSELVHVHAELLRKNADTAKQLTVTQQSQEEVARVKEQLAFQVEQVKRESELKLEEKSDQLEKLKRELEAKAGELARAQEALSHTEQSKSELSSRLDTLSAEKDALSGAVRQREADLLAAQSLVRETEAALSREQQRSSQEQGELQGRLAERESQEQGLRQRLLDEQFAVLRGAAAEAAGILQDAVSKLDDPLHLRCTSSPDYLVSRAQEALDAVSTLEEGHAQYLTSLADASALVAALTRFSHLAADTIINGGATSHLAPTDPADRLIDTCRECGARALELMGQLQDQQALRHMQASLVRTPLQGILQLGQELKPKSLDVRQEELGAVVDKEMAATSAAIEDAVRRIEDMMNQARHASSGVKLEVNERILNSCTDLMKVRAVTRGGLHLEGHQSLLSWSRQAIRLLVTTSTSLQKEIVESGRGAATQQEFYAKNSRWTEGLISASKAVGWGATQLVEAADKVVLHTGKYEELIVCSHEIAASTAQLVAASKVKANKHSPHLSRLQECSRTVNERAANVVASTKSGQEQIEDRDTMDFSGLSLIKLKKQEMETQVRVLELEKTLEAERMRLGELRKQHYVLAGASGSPGEEVAIRPSTAPRSVTTKKPPLAQKPSVAPRQDHQLDKKDGIYPAQLVNY

SEQ ID NO: 760383 - protein, 1068 aa, Homo sapiens; identical to SEQ ID NO: 760371

SEQ ID NO: 760384 - protein, 1068 aa, Homo sapiens; identical to SEQ ID NO: 760371

SEQ ID NO: 760385 - protein, 615 aa, Homo sapiens
MNSIKNVPARVLSRRPGHSLEAEREQFDKTQAISISKAINTQEAPVKEKHARRIILGTHHEKGAFTFWSYAIGLPLPSSSILSWKFCHVLHKVLRDGHPNVLHDCQRYRSNIREIGDLWGHLHDRYGQLVNVYTKLLLTKISFHLKHPQFPAGLEVTDEVLEKAAGTDVNNIFQLTVEMFDYMDCELKLSESVFRQLNTAIAVSQMSSGQCRLAPLIQVIQDCSHLYHYTVKLLFKLHSCLPADTLQGHRDRFHEQFHSLRNFFRRASDMLYFKRLIQIPRLPEGPPNFLRASALAEHIKPVVVIPEEAPEDEEPENLIEISTGPPAGEPVVVADLFDQTFGPPNGSVKDDRDLQIESLKREVEMLRSELEKIKLEAQRYIAQLKSQVNALEGELEEQRKQKQKALVDNEQLRHELAQLRAAQLEGERSQGLREEAERKASATEARYNKLKEKHSELVHVHAELLRKNADTAKQLTVTQQSQEEVARVKEQLAFQVEQVKRESELKLEEKSDQLEKLKRELEAKAGELARAQEALSHTEQSKSELSSRLDTLSAEKDALSGAVRQREADLLAAQSLVRETEAALSREQQRSSQEQGELQGRLAERVWPPQMQQHH

SEQ ID NO: 760386 - protein, 110 aa, Homo sapiens
MGRGSGILSVAFWGTDSTRPSSCVVSADQALCGLEECRPLLLRPGPRASVMGAPQEGSDAGRGRFLGSEVRHSGPGAAFTPGVSISSWNLQPPPFPVFHSPVLAAPHCPP

SEQ ID NO: 760387 - protein, 80 aa, Homo sapiens
VLSADQATAAGGRERGWPESLAPLSFSIFVSVGFYGVRFLICSTTLCLLLSSGPSLWEIQVPIPTLSPKQSAGDVLGPQG

SEQ ID NO: 760388 - protein, 132 aa, Homo sapiens
MAVSAGSARTSPSSDKVQKDKAELISGPRQDSRIGKLLGFEWTDLSSWRRLVTLLNRPTDPASLAVFRFLFGFLMVLDIPQERGLSSLDRKYLDGLDVCRFPLLDALRPLPLDWMYLVYTIMFLGEGNCGKY

SEQ ID NO: 760389 - protein, 758 aa, Homo sapiens
MAVSAGSARTSPSSDKVQKDKAELISGPRQDSRIGKLLGFEWTDLSSWRRLVTLLNRPTDPASLAVFRFLFGFLMVLDIPQERGLSSLDRKYLDGLDVCRFPLLDALRPLPLDWMYLVYTIMFLGALGMMLGLCYRISCVLFLLPYWYVFLLDKTSWNNHSYLYGLLAFQLTFMDANHYWSVDGLLNAHRRNAHVPLWNYAVLRGQIFIVYFIAGVKKLDADWVEGYSMEYLSRHWLFSPFKLLLSEELTSLLVVHWGGLLLDLSAGFLLFFDVSRSIGLFFVSYFHCMNSQLFSIGMFSYVMLASSPLFCSPEWPRKLVSYCPRRLQQLLPLKAAPQPSVSCVYKRSRGKSGQKPGLRHQLGAAFTLLYLLEQLFLPYSHFLTQGYNNWTNGLYGYSWDMMVHSRSHQHVKITYRDGRTGELGYLNPGVFTQSRRWKDHADMLKQYATCLSRLLPKYNVTEPQIYFDIWVSINDRFQQRIFDPRVDIVQAAWSPFQRTSWVQPLLMDLSPWRAKLQEIKSSLDNHTEVVFIADFPGLHLENFVSEDLGNTSIQLLQGEVTVELVAEQKNQTLREGEKMQLPAGEYHKVYTTSPSPSCYMYVYVNTTELALEQDLAYLQELKEKVENGSETGPLPPELQPLLEGEVKGGPEPTPLVQTFLRRQQRLQEIERRRNTPFHERFFRFLLRKLYVFRRSFLMTCISLRNLILGRPSLEQLAQEVTYANLRPFEAVGELNPSNTDSSHSNPPESNPDPVHSEF

SEQ ID NO: 760390 - protein, 758 aa, Homo sapiens; identical to SEQ ID NO: 760389

SEQ ID NO: 760391 - protein, 241 aa, Homo sapiens
SDLEELLLHGGQVFMADFPGLHLENFVSEDLGNTSIQLLQGEVTVELVAEQKNQTLREGEKMQLPAGEYHKVYTTSPSPSCYMYVYVNTTELALEQDLAYLQELKEKVENGSETGPLPPELQPLLEGEVKGGPEPTPLVQTFLRRQQRLQEIERRRNTPFHERFFRFLLRKLYVFRRSFLMTCISLRNLILGRPSLEQLAQEVTYANLRPFEAVGELNPSNTDSSHSNPPESNPDPVHSEF

SEQ ID NO: 760392 - protein, 232 aa, Homo sapiens
LIFAALHIALCCAFINFLFNGFGSTSIQLLQGEVTVELVAEQKNQTLREGEKMQLPAGEYHKVYTTSPSPSCYMYVYVNTTELALEQDLAYLQELKEKVENGSETGPLPPELQPLLEGEVKGGPEPTPLVQTFLRRQQRLQEIERRRNTPFHERFFRFLLRKLYVFRRSFLMTCISLRNLILGRPSLEQLAQEVTYANLRPFEAVGELNPSNTDSSHSNPPESNPDPVHSEF

SEQ ID NO: 760393 - protein, 712 aa, Homo sapiens
IRLVRGWVVRAMAVSAGSARTSPSSGFLMVLDIPQERGLSSLDRKYLDGLDVCRFPLLDALRPLPLDWMYLVYTIMFLGALGMMLGLCYRISCVLFLLPYWYVFLLDKTSWNNHSYLYGLLAFQLTFMDANHYWSVDGLLNAHRRNAHVPLWNYAVLRGQIFIVYFIAGVKKLDADWVEGYSMEYLSRHWLFSPFKLLLSEELTSLLVVHWGGLLLDLSAGFLLFFDVSRSIGLFFVSYFHCMNSQLFSIGMFSYVMLASSPLFCSPEWPRKLVSYCPRRLQQLLPLKAAPQPSVSCVYKRSRGKSGQKPGLRHQLGAAFTLLYLLEQLFLPYSHFLTQGYNNWTNGLYGYSWDMMVHSRSHQHVKITYRDGRTGELGYLNPGVFTQSRRWKDHADMLKQYATCLSRLLPKYNVTEPQIYFDIWVSINDRFQQRIFDPRVDIVQAAWSPFQRTSWVQPLLMDLSPWRAKLQEIKSSLDNHTEVVFIADFPGLHLENFVSEDLGNTSIQLLQGEVTVELVAEQKNQTLREGEKMQLPAGEYHKVYTTSPSPSCYMYVYVNTTELALEQDLAYLQELKEKVENGSETGPLPPELQPLLEGEVKGGPEPTPLVQTFLRRQQRLQEIERRRNTPFHERFFRFLLRKLYVFRRSFLMTCISLRNLILGRPSLEQLAQEVTYANLRPFEAVGELNPSNTDSSHSNPPESNPDPVHSEF

SEQ ID NO: 760394 - protein, 702 aa, Homo sapiens
VSSRGFRARNPRAQLRFLMVLDIPQERGLSSLDRKYLDGLDVCRFPLLDALRPLPLDWMYLVYTIMFLGALGMMLGLCYRISCVLFLLPYWYVFLLDKTSWNNHSYLYGLLAFQLTFMDANHYWSVDGLLNAHRRNAHVPLWNYAVLRGQIFIVYFIAGVKKLDADWVEGYSMEYLSRHWLFSPFKLLLSEELTSLLVVHWGGLLLDLSAGFLLFFDVSRSIGLFFVSYFHCMNSQLFSIGMFSYVMLASSPLFCSPEWPRKLVSYCPRRLQQLLPLKAAPQPSVSCVYKRSRGKSGQKPGLRHQLGAAFTLLYLLEQLFLPYSHFLTQGYNNWTNGLYGYSWDMMVHSRSHQHVKITYRDGRTGELGYLNPGVFTQSRRWKDHADMLKQYATCLSRLLPKYNVTEPQIYFDIWVSINDRFQQRIFDPRVDIVQAAWSPFQRTSWVQPLLMDLSPWRAKLQEIKSSLDNHTEVVFIADFPGLHLENFVSEDLGNTSIQLLQGEVTVELVAEQKNQTLREGEKMQLPAGEYHKVYTTSPSPSCYMYVYVNTTELALEQDLAYLQELKEKVENGSETGPLPPELQPLLEGEVKGGPEPTPLVQTFLRRQQRLQEIERRRNTPFHERFFRFLLRKLYVFRRSFLMTCISLRNLILGRPSLEQLAQEVTYANLRPFEAVGELNPSNTDSSHSNPPESNPDPVHSEF

SEQ ID NO: 760395 - protein, 592 aa, Homo sapiens
SGLMDGPHGCNHYWSVDGLLNAHRRNAHVPLWNYAVLRGQIFIVYFIAGVKKLDADWVEGYSMEYLSRHWLFSPFKLLLSEELTSLLVVHWGGLLLDLSAGFLLFFDVSRSIGLFFVSYFHCMNSQLFSIGMFSYVMLASSPLFCSPEWPRKLVSYCPRRLQQLLPLKAAPQPSVSCVYKRSRGKSGQKPGLRHQLGAAFTLLYLLEQLFLPYSHFLTQGYNNWTNGLYGYSWDMMVHSRSHQHVKITYRDGRTGELGYLNPGVFTQSRRWKDHADMLKQYATCLSRLLPKYNVTEPQIYFDIWVSINDRFQQRIFDPRVDIVQAAWSPFQRTSWVQPLLMDLSPWRAKLQEIKSSLDNHTEVVFIADFPGLHLENFVSEDLGNTSIQLLQGEVTVELVAEQKNQTLREGEKMQLPAGEYHKVYTTSPSPSCYMYVYVNTTELALEQDLAYLQELKEKVENGSETGPLPPELQPLLEGEVKGGPEPTPLVQTFLRRQQRLQEIERRRNTPFHERFFRFLLRKLYVFRRSFLMTCISLRNLILGRPSLEQLAQEVTYANLRPFEAVGELNPSNTDSSHSNPPESNPDPVHSEF

SEQ ID NO: 760396 - protein, 316 aa, Homo sapiens [sequence omitted]

SEQ ID NO: 760397 - protein, 490 aa, Homo sapiens
MAVSAGSARTSPSSDKVQKDKAELISGPRQDSRIGKLLGFEWTDLSSWRRLVTLLNRPTDPASLAVFRFLFGFLMVLDIPQERGLSSLDRKYLDGLDVCRFPLLDALRPLPLDWMYLVYTIMFLGALGMMLGLCYRISCVLFLLPYWYVFLLDKTSWNNHSYLYGLLAFQLTFMDANHYWSVDGLLNAHRRNAHVPLWNYAVLRGQIFIVYFIAGVKKLDADWVEGYSMEYLSRHWLFSPFKLLLSEELTSLLVVHWGGLLLDLSAGFLLFFDVSRSIGLFFVSYFHCMNSQLFSIGMFSYVMLASSPLFCSPEWPRKLVSYCPRRLQQLLPLKAAPQPSVSCVYKRSRGKSGQKPGLRHQLGAAFTLLYLLEQLFLPYSHFLTQGYNNWTNGLYGYSWDMMVHSRSHQHVKITYRDGRTGELGYLNPGVFTQSRRWKDHADMLKQYATCLSRLLPKYNVTEPQIYFDIWVSINDRFQQRWARGAESGKK

SEQ ID NO: 760398 - protein, 465 aa, Homo sapiens
MAVSAGSARTSPSSDKVQKDKAELISGPRQDSRIGKLLGFEWTDLSSWRRLVTLLNRPTDPASLAVFRFLFGFLMVLDIPQERGLSSLDRKYLDGLDVCRFPLLDALRPLPLDWMYLVYTIMFLGALGMMLGLCYRISCVLFLLPYWYVFLLDKTSWNNHSYLYGLLAFQLTFMDANHYWSVDGLLNAHRRNAHVPLWNYAVLRGQIFIVYFIAGVKKLDADWVEGYSMEYLSRHWLFSPFKLLLSEELTSLLVVHWGGLLLDLSAGFLLFFDVSRSIGLFFVSYFHCMNSQLFSIGMFSYVMLASSPLFCSPEWPRKLVSYCPRRLQQLLPLKAAPQPSVSCVYKRSRGKSGQKPGLRHQLGAAFTLLYLLEQLFLPYSHFLTQGYNNWTNGLYGYSWDMMVHSRSHQHVKITYRDGRTGELGYLNPGVFTQSRRWKDHADMLKQYATCLSRLLPKYQSRSGAQ

SEQ ID NO: 760399 - protein, 456 aa, Homo sapiens
MAVSAGSARTSPSSDKVQKDKAELISGPRQDSRIGKLLGFEWTDLSSWRRLVTLLNRPTDPASLAVFRFLFGFLMVLDIPQERGLSSLDRKYLDGLDVCRFPLLDALRPLPLDWMYLVYTIMFLGALGMMLGLCYRISCVLFLLPYWYVFLLDKTSWNNHSYLYGLLAFQLTFMDANHYWSVDGLLNAHRRNAHVPLWNYAVLRGQIFIVYFIAGVKKLDADWVEGYSMEYLSRHWLFSPFKLLLSEELTSLLVVHWGGLLLDLSAGFLLFFDVSRSIGLFFVSYFHCMNSQLFSIGMFSYVMLASSPLFCSPEWPRKLVSYCPRRLQQLLPLKAAPQPSVSCVYKRSRGKSGQKPGLRHQLGAAFTLLYLLEQLFLPYSHFLTQGYNNWTNGLYGYSWDMMVHSRSHQHVKITYRDGRTGELGYLNPGVRCLMLTIYCSSEPPCALGSGFVLHTP

SEQ ID NO: 760400 - protein, 117 aa, Homo sapiens
LRYSRKLIHSQVKPYEIMFLAPFSSFLTSSRIQQFQDCNTSSVCLRVGEVENSGRRRIDRRGKGSTSLLYPLDKHNIEIWSNHKKSINQPHEKFSFSNSVGGICQITLERTEIVYHS

SEQ ID NO: 760401 - protein, 423 aa, Homo sapiens
GKGNQVLKLTSRAPLPPCTMPYNFCLPSLSCRTSCSSRPCVPPSCHGYTLPGACNIPANVSNCNWFCEGSFNGSEKETMQFLNDRLASYLEKVRQLERDNAELENLIRERSQQQEPLLCPSYQSYFKTIEELQQKILCSKSENARLVVQIDNAKLAADDFRTKYQTEQSLRQLVESDINSLRRILDELTLCRSDLEAQMESLKEELLSLKQNHEQEVNTLRCQLGDRLNVEVDAAPAVDLNQVLNETRNQYEALVETNRREVEQWFATQTEELNKQVVSSSEQLQSYQAEIIELRRTVNALEIELQAQHNLRYSLENTLTESEARYSSQLSQVQSLITNVESQLAEIRSDLERQNQEYQVLLDVRARLECEINTYRSLLESEDCKLPSNPCATTNACEKPIGSCVTNPCGPRSRCGPCNTFGY

SEQ ID NO: 760402 - protein, 124 aa, Homo sapiens
RGFCIEGGDRRKERKTRPFASYGLRGRVAMECRLVLGLAAWPTPGSGLSRGRSRHCDKEEKTSQGKGLTLLHPFFRLSTARLLASETVIRNCLSSLQGGHTRAESPWDISLEHQYYYSIWKTQI

SEQ ID NO: 760403 - protein, 101 aa, Homo sapiens
SRSSLSSSLSDMRSAAVPRGGLTAADLAVLRLLQGRSPLARVSISRQPTKVHLPLMACAGGLPWSAAWSSGSQRGPHLGRASHGDAPATVIKRRKRHRGRA

SEQ ID NO: 760404 - protein, 323 aa, Homo sapiens
MEAKEKQHLLDARPAIRSYTGSLWQEGAGWIPLPRPGLDLQAIELAAQSNHHCHAQKGPDSHCDPKKGKAQRQLYVASAICLLFMIGEVVEILGALVSVLSIWVVTGVLVYLAVERLISGDYEIDGGTMLITSGCAVAVNIIMGLTLHQSGHGHSHGTTNQQEENPSVRAAFIHVIGDFMQSMGVLVAAYILYFKPEYKYVDPICTFVFSILVLGTTLTILRDVILVLMEGTPKGVDFTAVRDLLLSVEGVEALHSLHIWALTVAQPVLSVHIAIAQNTDAQAVLKTASSRLQGKFHFHTVTIQIEDYSEDMKDCQACQGPSD

SEQ ID NO: 760405 - protein, 323 aa, Homo sapiens; identical to SEQ ID NO: 760404

SEQ ID NO: 760406 - protein, 163 aa, Homo sapiens
MEAKEKQHLLDARPAIRSYTGSLWQEGAGWIPLPRPGLDLQAIELAAQSNHHCHAQKGPDSHCDPKKGKAQRQLYVASAICLLFMIGEVVEILGALVSVLSIWVVTGVLVYLAVERLISGDYEIDGGTMLITSGCAVAVNIIIGVDPSYVVCHSVLPHKHPLD

SEQ ID NO: 760407 - protein, 879 aa, Homo sapiens
MHISVLLSPVLWGLIFGVSSNSIQIGGLFPRGADQEYSAFRVGMVQFSTSEFRLTPHIDNLEVANSFAVTNAFCSQFSRGVYAIFGFYDKKSVNTITSFCGTLHVSFITPSFPTDGTHPFVIQMRPDLKGALLSLIEYYQWDKFAYLYDSDRGLSTLQAVLDSAAEKKWQVTAINVGNINNDKKDEMYRSLFQDLELKKERRVILDCERDKVNDIVDQVITIGKHVKGYHYIIANLGFTDGDLLKIQFGGANVSGFQIVDYDDSLVSKFIERWSTLEEKEYPGAHTTTIKYTSALTYDAVQVMTEAFRNLRKQRIEISRRGNAGDCLANPAVPWGQGVEIERALKQVQVEGLSGNIKFDQNGKRINYTINIMELKTNGPRKIGYWSEVDKMVVTLTELPSGNDTSGLENKTVVVTTILESPYVMMKKNHEMLEGNERYEGYCVDLAAEIAKHCGFKYKLTIVGDGKYGARDADTKIWNGMVGELVYGKADIAIAPLTITLVREEVIDFSKPFMSLGISIMIKKPQKSKPGVFSFLDPLAYEIWMCIVFAYIGVSVVLFLVSRFSPYEWHTEEFEDGRETQSSESTNEFGIFNSLWFSLGAFMRQGCDISPRSLSGRIVGGVWWFFTLIIISSYTANLAAFLTVERMVSPIESAEDLSKQTEIAYGTLDSGSTKEFFRRSKIAVFDKMWTYMRSAEPSVFVRTTAEGVARVRKSKGKYAYLLESTMNEYIEQRKPCDTMKVGGNLDSKGYGIATPKGSSLGTPVNLAVLKLSEQGVLDKLKNKWWYDKGECGAKDSGSKEKTSALSLSNVAGVFYILVGGLGLAMLVALIEFCYKSRAEAKRMKVAKNAQNINPSSSQNSQNFATYKEGYNVYGIESVKI

SEQ ID NO: 760408 - protein, 234 aa, Homo sapiens
MVSPIESAEDLSKQTEIAYGTLDSGSTKEFFRRSKIAVFDKMWTYMRSAEPSVFVRTTAEGVARVRKSKGKYAYLLESTMNEYIEQRKPCDTMKVGGNLDSKGYGIATPKGSSLGTPVNLAVLKLSEQGVLDKLKNKWWYDKGECGAKDSGSKEKTSALSLSNVAGVFYILVGGLGLAMLVALIEFCYKSRAEAKRMKVAKNAQNINPSSSQNSQNFATYKEGYNVYGIESVKI

SEQ ID NO: 760409 - protein, 137 aa, Homo sapiens
MSLGISIMIKKPQKSKPGVFSFLDPLAYEIWMCIVFAYIGVSVVLFLVSRFSPYEWHTEEFEDGRETQSSESTNEFGIFNSLWFSLGAFMRQGCDISPRLVTHLLQLCAFQVSSGHSWCLWIHPKEVTSCRLPVQAV

SEQ ID NO: 760410 - protein, 649 aa, Homo sapiens
MHISVLLSPVLWGLIFGVSSNSIQIGGLFPRGADQEYSAFRVGMVQFSTSEFRLTPHIDNLEVANSFAVTNAFCSQFSRGVYAIFGFYDKKSVNTITSFCGTLHVSFITPSFPTDGTHPFVIQMRPDLKGALLSLIEYYQWDKFAYLYDSDRGLSTLQAVLDSAAEKKWQVTAINVGNINNDKKDEMYRSLFQDLELKKERRVILDCERDKVNDIVDQVITIGKHVKGYHYIIANLGFTDGDLLKIQFGGANVSGFQIVDYDDSLVSKFIERWSTLEEKEYPGAHTTTIKYTSALTYDAVQVMTEAFRNLRKQRIEISRRGNAGDCLANPAVPWGQGVEIERALKQVQVEGLSGNIKFDQNGKRINYTINIMELKTNGPRKIGYWSEVDKMVVTLTELPSGNDTSGLENKTVVVTTILESPYVMMKKNHEMLEGNERYEGYCVDLAAEIAKHCGFKYKLTIVGDGKYGARDADTKIWNGMVGELVYGKADIAIAPLTITLVREEVIDFSKPFMSLGISIMIKKPQKSKPGVFSFLDPLAYEIWMCIVFAYIGVSVVLFLVSRFSPYEWHTEEFEDGRETQSSESTNEFGIFNSLWFSLGAFMRQGCDISPRLVTHLLQLCAFQVSSGHSWCLWIHPKEVTSCRLPVQAV

SEQ ID NO: 760411 - protein, 73 aa, Homo sapiens
QPDYNQWFENISYEHFNNGGCIILDEVNEKPYNWWRIAIYFDLSFQRLCSMANELRRTSSKLRDYKYFFAISH

SEQ ID NO: 760412 - protein, 106 aa, Homo sapiens
PCLFLLCPCSVPPILILHRDQQEAVASFWVSLPTPCAHLCGTHSQRVPVSTRAVTSLCSELSCRSVSCGPTRPHHLSVLTPPGDLRAFARAGPSARSSLPSVCTGL

SEQ ID NO: 760413 - protein, 32 aa, Homo sapiens
RTFEQRVEDVRLIREQHPTKIPVIIERYKGEK

SEQ ID NO: 760414 - protein, 626 aa, Homo sapiens
MNVEVVKVMPQDLVTFKDVAIDFSQEEWQWMNPAQKRLYRSMMLENYQSLVSLGLCISKPYVISLLEQGREPWEMTSEMTRSPFSDWESIYVTQELPLKQFMYDDACMEGITSYGLECSTFEENWKWEDLFEKQMGSHEMFSKKEIITHKETITKETEFKYTKFGKCIHLENIEESIYNHTSDKKSFSKNSMVIKHKKVYVGKKLFKCNECDKTFTHSSSLTVHFRIHTGEKPYACEECGKAFKQRQHLAQHHRTHTGEKLFECKECRKAFKQSEHLIQHQRIHTGEKPYKCKECRKAFRQPAHLAQHQRIHTGEKPYECKECGKAFSDGSSFARHQRCHTGKRPYECIECGKAFRYNTSFIRHWRSYHTGEKPFNCIDCGKAFSVHIGLILHRRIHTGEKPYKCGVCGKTFSSGSSRTVHQRIHTGEKPYECDICGKDFSHHASLTQHQRVHSGEKPYECKECGKAFRQNVHLVSHLRIHTGEKPYECKECGKAFRISSQLATHQRIHTGEKPYECIECGNAFKQRSHLAQHQKTHTGEKPYECNECGKAFSQTSNLTQHQRIHTGEKPYKCTECGKAFSDSSSCAQHQRLHTGQRPYQCFECGKAFRRKLSLICHQRSHTGEEP

SEQ ID NO: 760415 - protein, 626 aa, Homo sapiens; identical to SEQ ID NO: 760414

SEQ ID NO: 760416 - protein, 422 aa, Homo sapiens
MVAKHLVMFYYFAQHLWPEQNIRDSFQKVTLRRYRKCGYENLQLRKGCKSVVECKQHKGDYSGLNQCLKTTLSKIFQCNKYVEVFHKISNSNRHKMRHTENKHFKCKECRKTFCMLSHLTQHKRIQTRVNFYKCEAYGRAFNWSSTLNKHKRIHTGEKPYKCKECGKAFNQTSHLIRHKRIHTEEKPYKCEECGKAFNQSSTLTTHNIIHTGEIPYKCEKCVRAFNQASKLTEHKLIHTGEKRYECEECGKAFNRSSKLTEHKYIHTGEKLYKCEECGKAFNQSSTLTTHKRIHSGEKPYKCEECGKAFKQFSNLTDHKKIHTGEKPYKCEECGKAFNQLSNLTRHKVIHTGEKPYKCGECGKAFNQSSALNTHKIIHTGENPHKCRESGKVFHLSSKLSTCKKIHTGEKLYKCEECGKAFN

SEQ ID NO: 760417 - protein, 77 aa, Homo sapiens
SLAAAGASGVVFTALCLLLLEAQLLWPRYHAGIGRSTAKTPGPTGSLDNGTIDIYGCGHRILFGGVAMPGHCTAEFI

SEQ ID NO: 760418 - protein, 378 aa, Homo sapiens
MVAKHLVMFYYFAQHLWPEQNIRDSFQKVTLRRYRKCGYENLQLRKGCKSVVECKQHKGDYSGLNQCLKTTLSKIFQCNKYVEVFHKISNSNRHKMRHTENKHFKCKECRKTFCMLSHLTQHKRIQTRVNFYKCEAYGRAFNWSSTLNKHKRIHTGEKPYKCKECGKAFNQTSHLIRHKRIHTEEKPYKCEECGKAFNQSSTLTTHNIIHTGEIPYKCEKCVRAFNQASKLTEHKLIHTGEKRYECEECGKAFNRSSKLTEHKYIHTGEKLYKCEECDKAFNLSSTLTKHKVIHTGEKLYKCKECGKAFKQFSHLAIHNIIHTGEKLYKCEECGKAFNSSSNLTAHKKNRTGEKPYKCEECGKANLSSTLTPHKTIHI

SEQ ID NO: 760419 - protein, 378 aa, Homo sapiens; identical to SEQ ID NO: 760418

SEQ ID NO: 760420 - protein, 378 aa, Homo sapiens; identical to SEQ ID NO: 760418

SEQ ID NO: 760421 - protein, 177 aa, Homo sapiens
KLTTHKKIHTGEKPYKCEKCAKAFSQSSTLSTYKIIHTGEKCYKCEECGKVFNRSSNLTDHKKIHTGEKSYKCEECDKAFNLSSTLTKHKVIHTGEKLYKCKECGKAFKQFSHLAIHNIIHTGEKLYKCEECGKAFNSSSNLTAHKKNRTGEKPYKCEECGKANLSSTLTPHKTIHI

SEQ ID NO: 760422 - protein, 285 aa, Homo sapiens
LATRKRSVVRRCLKMAAEEPQQQKQEPLGSDSEGVNCLAYDEAIMAQQDRIQQEIAVQNPLVSERLELSVLYKEYAEDDNIYQQKIKDLHKKYSYIRKTRPDGNCFYRAFGFSHLEALLDDSKELQRFKAVSAKSKEDLVSQGFTEFTIEDFHNTFMDLIEQVEKQTSVADLLASFNDQSTSDYLVVYLRLLTSGYLQRESKFFEHFIEGGRTVKEFCQQEVEPMCKESDHIHIIALAQALSVSIQVEYMDRGEGGTTNPHIFPEGSEPKVYLLYRPGHYDILYK

SEQ ID NO: 760423 - protein, 271 aa, Homo sapiens
MAAEEPQQQKQEPLGSDSEGVNCLAYDEAIMAQQDRIQQEIAVQNPLVSERLELSVLYKEYAEDDNIYQQKIKDLHKKYSYIRKTRPDGNCFYRAFGFSHLEALLDDSKELQRFKAVSAKSKEDLVSQGFTEFTIEDFHNTFMDLIEQVEKQTSVADLLASFNDQSTSDYLVVYLRLLTSGYLQRESKFFEHFIEGGRTVKEFCQQEVEPMCKESDHIHIIALAQALSVSIQVEYMDRGEGGTTNPHIFPEGSEPKVYLLYRPGHYDILYK

SEQ ID NO: 760424 - protein, 285 aa, Homo sapiens; identical to SEQ ID NO: 760422

SEQ ID NO: 760425 - protein, 285 aa, Homo sapiens; identical to SEQ ID NO: 760422

SEQ ID NO: 760426 - protein, 285 aa, Homo sapiens; identical to SEQ ID NO: 760422

SEQ ID NO: 760427 - protein, 320 aa, Homo sapiens
LATRKRSVVRRCLKMAAEEPQQQKQEPLGSDSEGVNCLAYDEAIMAQQDRIQQEIAVQNPLVSERLELSVLYKEYAEDDNIYQQKIKDLHKKYSYIRKTRPDGNCFYRAFGFSHLEALLDDSKELQRFKAVSAKSKEDLVSQGFTEFTIEDFHNTFMDLIEQVEKQTSVADLLASFNDQSTSDYLVVYLRLLTSGYLQRESKFFEHFIEGGRTVKEFCQQVPSPSPLLSAGGVQWAHRAWGGVRRPGPDRHLCQQEVEPMCKESDHIHIIALAQALSVSIQVEYMDRGEGGTTNPHIFPEGSEPKVYLLYRPGHYDILYK

SEQ ID NO: 760428 - protein, 271 aa, Homo sapiens
RPWDVRGLRDLSLRPATFSGVNCLAYDEAIMAQQDRIQQEIAVQNPLVSERLELSVLYKEYAEDDNIYQQKIKDLHKKYSYIRKTRPDGNCFYRAFGFSHLEALLDDSKELQRFKAVSAKSKEDLVSQGFTEFTIEDFHNTFMDLIEQVEKQTSVADLLASFNDQSTSDYLVVYLRLLTSGYLQRESKFFEHFIEGGRTVKEFCQQEVEPMCKESDHIHIIALAQALSVSIQVEYMDRGEGGTTNPHIFPEGSEPKVYLLYRPGHYDILYK

SEQ ID NO: 760429 - protein, 307 aa, Homo sapiens
  misc_feature (14)..(14): Xaa can be any naturally occurring amino acid
QQRHGQRMRRPPVXVVKDRTRVRRCLKMAAEEPQQQKQEPLGSDSEGVNCLAYDEAIMAQQDRIQQEDMTDPCLLQIAVQNPLVSERLELSVLYKEYAEDDNIYQQKIKDLHKKYSYIRKTRPDGNCFYRAFGFSHLEALLDDSKELQRFKAVSAKSKEDLVSQGFTEFTIEDFHNTFMDLIEQVEKQTSVADLLASFNDQSTSDYLVVYLRLLTSGYLQRESKFFEHFIEGGRTVKEFCQQEVEPMCKESDHIHIIALAQALSVSIQVEYMDRGEGGTTNPHIFPEGSEPKVYLLYRPGHYDILYK

SEQ ID NO: 760430 - protein, 350 aa, Homo sapiens
MKPSWLSRTEFSKRLLCRTLWCQSGWSSRSYTRSMLKMTTSINRRSRTSTKSTRTSARPGLTATVSIGLSDSPTWRHCWMTARSCSGEKGGHWAPRQVGVYLLPGRVGCVSSRVSPSFPGDGLDSGLARRGSAVSALASGLVEEPMLGPPFHPTPRFKAVSAKSKEDLVSQGFTEFTIEDFHNTVSPGACLGLGHGGGVHLVRTTHLLPVILPFLPPWLQFMDLIEQVEKQTSVADLLASFNDQSTSDYLVVYLRLLTSGYLQRESKFFEHFIEGGRTVKEFCQQEVEPMCKESDHIHIIALAQALSVSIQVEYMDRGEGGTTNPHIFPEGSEPKVYLLYRPGHYDILYK

SEQ ID NO: 760431 - protein, 297 aa, Homo sapiens
MKPSWLSRTEFSKRLLCRTLWCQSGWSSRSYTRSMLKMTTSINRRSSVSIGLSDSPTWRHCWMTARSCSGEKGGHWAPRQVGVYLLPGRVGCVSSRVSPSFPGDGLDSGLARRGSAVSALASGLVEEPMLGPPFHPTPRFKAVSAKSKEDLVSQGFTEFTIEDFHNTFMDLIEQVEKQTSVADLLASFNDQSTSDYLVVYLRLLTSGYLQRESKFFEHFIEGGRTVKEFCQQEVEPMCKESDHIHIIALAQALSVSIQVEYMDRGEGGTTNPHIFPEGSEPKVYLLYRPGHYDILYK

SEQ ID NO: 760432 - protein, 320 aa, Homo sapiens; identical to SEQ ID NO: 760427

SEQ ID NO: 760433 - protein, 227 aa, Homo sapiens
EVTREAEVMVSLDHTIALQPGQEERNSISTKTKTKQNKTKQNKTKQNTTLERPKQVEDYEVQEIKIILANMVKPRLWSERTGPLGPIRTSSLRAPSPRSTFSTGLDTTISSTNRAGSSPLLPCCPPLPGARHVQRFFCGCKWSYFTPFFLSHDPPPCFIKGGAGGEPCVRVPALLPAWLLCLLPPPPRWVPLLFTYLLLSFPNRSRFEGPGLLEAPPASLGSASFPS

SEQ ID NO: 760434 - protein, 285 aa, Homo sapiens; identical to SEQ ID NO: 760422

SEQ ID NO: 760435 - protein, 298 aa, Homo sapiens
  misc_feature (14)..(14): Xaa can be any naturally occurring amino acid
QQRHGQRMRRPPVXVVKDRTRVRRCLKMAAEEPQQQKQEPLGSDSEGVNCLAYDEAIMAQQDRIQQEIAVQNPLVSERLELSVLYKEYAEDDNIYQQKIKDLHKKYSYIRKTRPDGNCFYRAFGFSHLEALLDDSKELQRFKAVSAKSKEDLVSQGFTEFTIEDFHNTFMDLIEQVEKQTSVADLLASFNDQSTSDYLVVYLRLLTSGYLQRESKFFEHFIEGGRTVKEFCQQEVEPMCKESDHIHIIALAQALSVSIQVEYMDRGEGGTTNPHIFPEGSEPKVYLLYRPGHYDILYK

SEQ ID NO: 760436 - protein, 285 aa, Homo sapiens; identical to SEQ ID NO: 760422

SEQ ID NO: 760437 - protein, 279 aa, Homo sapiens
AVVPVRVVGIAEEPQQQKQEPLGSDSEGVNCLAYDEAIMAQQDRIQQEIAVQNPLVSERLELSVLYKEYAEDDNIYQQKIKDLHKKYSYIRKTRPDGNCFYRAFGFSHLEALLDDSKELQRFKAVSAKSKEDLVSQGFTEFTIEDFHNTFMDLIEQVEKQTSVADLLASFNDQSTSDYLVVYLRLLTSGYLQRESKFFEHFIEGGRTVKEFCQQEVEPMCKESDHIHIIALAQALSVSIQVEYMDRGEGGTTNPHIFPEGSEPKVYLLYRPGHYDILYK

SEQ ID NO: 760438 - protein, 279 aa, Homo sapiens
RLYSPGSNGIAEEPQQQKQEPLGSDSEGVNCLAYDEAIMAQQDRIQQEIAVQNPLVSERLELSVLYKEYAEDDNIYQQKIKDLHKKYSYIRKTRPDGNCFYRAFGFSHLEALLDDSKELQRFKAVSAKSKEDLVSQGFTEFTIEDFHNTFMDLIEQVEKQTSVADLLASFNDQSTSDYLVVYLRLLTSGYLQRESKFFEHFIEGGRTVKEFCQQEVEPMCKESDHIHIIALAQALSVSIQVEYMDRGEGGTTNPHIFPEGSEPKVYLLYRPGHYDILYK

SEQ ID NO: 760439 - protein, 314 aa, Homo sapiens
MKPSWLSRTEFSKRLLCRTLWCQSGWSSRSYTRSMLKMTTSINRRSRTSTKSTRTSARPGLTATVSIGLSDSPTWRHCWMTARSCSGEKGGHWAPRQVGVYLLPGRVGCVSSRVSPSFPGDGLDSGLARRGSAVSALASGLVEEPMLGPPFHPTPRFKAVSAKSKEDLVSQGFTEFTIEDFHNTFMDLIEQVEKQTSVADLLASFNDQSTSDYLVVYLRLLTSGYLQRESKFFEHFIEGGRTVKEFCQQEVEPMCKESDHIHIIALAQALSVSIQVEYMDRGEGGTTNPHIFPEGSEPKVYLLYRPGHYDILYK

SEQ ID NO: 760440 - protein, 321 aa, Homo sapiens
LATRKRSVVRRCLKMAAEEPQQQKQEPLGSDSEGVNCLAYDEAIMAQQDRIQQEIAVQNPLVSERLELSVLYKEYAEDDNIYQQKIKDLHKKYSYIRKTRPDGNCFYRAFGFSHLEALLDDSKELQRFKAVSAKSKEDLVSQGFTEFTIEDFHNTVSPGACLGLGHGGGVHLVRTTHLLPVILPFLPPWLQFMDLIEQVEKQTSVADLLASFNDQSTSDYLVVYLRLLTSGYLQRESKFFEHFIEGGRTVKEFCQQEVEPMCKESDHIHIIALAQALSVSIQVEYMDRGEGGTTNPHIFPEGSEPKVYLLYRPGHYDILYK

SEQ ID NO: 760441 - protein, 281 aa, Homo sapiens
  misc_feature (14)..(14): Xaa can be any naturally occurring amino acid
QQRHGQRMRRPPVXVVKDRTRVRRCLKMAAEEPQQQKQEPLGSDSEGVNCLAYDEAIMAQQDRIQQEIAVQNPLVSERLELSVLYKEYAEDDNIYQQKIKCFYRAFGFSHLEALLDDSKELQRFKAVSAKSKEDLVSQGFTEFTIEDFHNTFMDLIEQVEKQTSVADLLASFNDQSTSDYLVVYLRLLTSGYLQRESKFFEHFIEGGRTVKEFCQQEVEPMCKESDHIHIIALAQALSVSIQVEYMDRGEGGTTNPHIFPEGSEPKVYLLYRPGHYDILYK

SEQ ID NO: 760442 - protein, 366 aa, Homo sapiens
CSQAERPTPGPSPPACSSGGPRREGLEFRWATEHKGVNCLAYDEAIMAQQDRIQQEIAVQNPLVSERLELSVLYKEYAEDDNIYQQKIKDLHKKYSYIRKTRPDGNCFYRAFGFSHLEALLDDSKELQRWRSRPLSPTCWPPSMTRAPPTTLWSTCGCSPRATCSARASSSSTSSRVDGLSRSSASRRWSPCARRATTSTSLRWPRPSACPSRWSTWTAARAAPPIRTSSLRAPSPRSTFSTGLDTTISSTNRAGSSPLLPCCPPLPGARHVQRFFCGCKWSYFTPFFLSHDPPPCFIKGGAGGEPCVRVPALLPAWLLCLLPPPPRWVPLLFTYLLLSFPNRSRFEGPGLLEAPPASLGSASFPS

SEQ ID NO: 760443 - protein, 140 aa, Homo sapiens
  misc_feature (14)..(14): Xaa can be any naturally occurring amino acid
QQRHGQRMRRPPVXVVKDRTRVRRCLKMAAEEPQQQKQEPLGSDSEGVNCLAYDEAIMAQQDRIQQEIAVQNPLVSERLELSVLYKEYAEDDNIYQQKIKDLHKKYSYIRKTRPDGNCFYRAFGFSHLEALLDDSKELQR

SEQ ID NO: 760444 - protein, 524 aa, Homo sapiens
ARRVASGEATLAMDQPAGLQVDYVFRGVEHAVRVMVSGQVLELEVEDRMTADQWRGEFDAGFIEDLTHKTGNFKQFNIFCHMLESALTQSSESVTLDLLTYTDLESLRNRKMGGRPGSLAPRSAQLNSKRYLILIYSVEFDRIHYPLPLPYQGKPDPVVLQGIIRSLKEELGRLQGLDGQNTRDTRENEIWHLREQVSRLASEKRELEAQLGRSREEALAGRAARQEAEALRGLVRGLELELRQERGLGHRVAGRRGQDCRRLAKELEEAKASERSLRARLKTLTSELALYKRGRRTPPVQPPPTREDRASSSRERSASRGRGAARSSSRESGRGSRGRGRPARPSPSPTGGRALRFDPTAFVKAKERKQREIQMKQQQRNRLGSGGSGDGPSVSWSRQTRPPAALTGRGDAPNRSRNRSSSVDSFRSRCSSASSCSDLEDFSESLSRGGHRRRGKPPSPTPWSGSNMKSPPVERSHHQKSLANSGGWVPIKEYSSEHQAADMAEIDARLKALQEYMNRLDMRS

SEQ ID NO: 760445 - protein, 438 aa, Homo sapiens
MLASSESVTLDLLTYTDLESLRNRKMGGRPGSLAPRSAQLNSKRYLILIYSVEFDRIHYPLPLPYQGKPDPVVLQGIIRSLKEELGRLQGLDGQNTRDTRENEIWHLREQVSRLASEKRELEAQLGRSREEALAGRAARQEAEALRGLVRGLELELRQERGLGHRVAGRRGQDCRRLAKELEEAKASERSLRARLKTLTSELALYKRGRRTPPVQPPPTREDRASSSRERSASRGRGAARSSSRESGRGSRGRGRPARPSPSPTGGRALRFDPTAFVKAKERKQREIQMKQQQRNRLGSGGSGDGPSVSWSRQTRPPAALTGRGDAPNRSRNRSSSVDSFRSRCSSASSCSDLEDFSESLSRGGHRRRGKPPSPTPWSGSNMKSPPVERSHHQKSLANSGGWVPIKEYSSEHQAADMAEIDARLKALQEYMNRLDMRS

SEQ ID NO: 760446 - protein, 524 aa, Homo sapiens; identical to SEQ ID NO: 760444

SEQ ID NO: 760447 - protein, 216 aa, Homo sapiens
ARRVASGEATLAMDQPAGLQVDYVFRGVEHAVRVMVSGQVLELEVEDRMTADQWRGEFDAGFIEDLTHKTGNFKQFNIFCHMLESALTQSSESVTLDLLTYTDLESLRNRKMGGRPGSLAPRSAQLNSKRYLILIYSVEFDRIHYPLPLPYQGKPDPVVLQGIIRSLKEELGRLQGLDGQNTRDTRENEIWHLREQVSRLASEKRELEAQLGRSPG

SEQ ID NO: 760448 - protein, 258 aa, Homo sapiens
ARRVASGEATLAMDQPAGLQVDYVFRGVEHAVRVMVSGQVLELEVEDRMTADQWRGEFDAGFIEDLTHKTGNFKQFNIFCHMLESALTQSSESVTLDLLTYTDLESLRNRKMGGRPGSLAPRSAQLNSKRYLILIYSVEFDRIHYPLPLPRPPSPLVDSFRSRCSSASSCSDLEDFSESLSRGGHRRRGKPPSPTPWSGSNMKSPPVERSHHQKSLANSGGWVPIKEYSSEHQAADMAEIDARLKALQEYMNRLDMRS

SEQ ID NO: 760449 - protein, 195 aa, Homo sapiens
ARRVASGEATLAMDQPAGLQVDYVFRGVEHAVRVMVSGQVLELEVEDRMTADQWRGEFDAGFIEDLTHKTGNFKQFNIFCHMLESALTQSSESVTLDLLTYTDLESLRNRKMGGRPGSLAPRSAQLNSKRYLILIYSVEFDRIHYPLPLPYQGKPDPVVLQGIIRSLKEELGRPAQSLPWPRPSCCPWGLRCVRP

SEQ ID NO: 760450 - protein, 98 aa, Homo sapiens
KALSMKVTGSISAFMMTFVYVFVGFYSDKHKTLHQVEPVLCDEAVEQKSSVAVCLFLLHIQLNANSDPFEMVNRLNPGIVSSLSIQTSSENHVVKLLD

SEQ ID NO: 760451 - protein, 433 aa, Homo sapiens
MCFSPILEINMQSESNITVRDDIDDINTNMYQPLSYPLSFQVSLTGFLMLEIVLGLGSNLTVLVLYCMKSNLINSVSNIITMNLHVLDVIICVGCIPLTIVILLLSLESNTALICCFHEACVSFASVSTAINVFAITLDRYDISVKPANRILTMGRAVMLMISIWIFSFFSFLIPFIEVNFFSLQSGNTWENKTLLCVSTNEYYTELGMYYHLLVQIPIFFFTVVVMLITYTKILQALNIRIGTRFSTGQKKKARKKKTISLTTQHEATDMSQSSGGRNVVFGVRTSVSVIIALRRAVKRHRERRERQKRVFRMSLLIISTFLLCWTPISVLNTTILCLGPSDLLVKLRLCFLVMAYGTTIFHPLLYAFTRQKFQKVLKSKMKKRVVSIVEADPLPNNAVIHNSWIDPKRNKKITFEDSEIREKCLVPQVVTD

SEQ ID NO: 760452 - protein, 162 aa, Homo sapiens
RRIPDICGSGLFISAVNYVDMGLADTVMHTELTDYSTKCYPWLSITRIHCACMTPKKTSRDTCARMHGLHHDRMQKNASTFEDVTQVSSAYQKTVPVEAVTSKTSNIRANFENLAKEKEQEDRRKAEAERAQRMAKERQEQEEARRKLEEQARARTINIAVP

SEQ ID NO: 760453 - protein, 550 aa, Homo sapiens
MWKASAGHAVSIAQDDAGADDWETDPDFVNDVSEKEQRWGAKTVQGSGHQEHINIHKLRENVFQEHQTLKEKELETGPKASHGYGGKFGVEQDRMDKSAVGHEYQSKLSKHCSQVDSVRGFGGKFGVQMDRVDQSAVGFEYQGKTEKHASQKDYSSGFGGKYGVQADRVDKSAVGFDYQGKTEKHESQRDYSKGFGGKYGIDKDKVDKSAVGFEYQGKTEKHESQKDYVKGFGGKFGVQTDRQDKCALGWDHQEKLQLHESQKDYKTGFGGKFGVQSERQDSAAVGFDYKEKLAKHESQQDYSKGFGGKYGVQKDRMDKNASTFEDVTQVSSAYQKTVPVEAVTSKTSNIRANFENLAKEKEQEDRRKAEAERAQRMAKERQEQEEARRKLEEQARAKTQTPPVSPAPQPTEERLPSSPVYEDAASFKAELSYRGPVSGTEPEPVYSMEAADYREASSQQGLAYATEAVYESAEAPGHYPAEDSTYDEYENDLGITAVALYDYQAAGDDEISFDPDDIITNIEMIDDGWWRGVCKGRYGLFPANYVELRQ

SEQ ID NO: 760454 - protein, 513 aa, Homo sapiens
MWKASAGHAVSIAQDDAGADDWETDPDFVNDVSEKEQRWGAKTVQGSGHQEHINIHKLRENVFQEHQTLKEKELETGPKASHGYGGKFGVEQDRMDKSAVGHEYQSKLSKHCSQVDSVRGFGGKFGVQMDRVDQSAVGFEYQGKTEKHASQKDYSSGFGGKYGVQADRVDKSAVGFDYQGKTEKHESQRDYSKGFGGKYGIDKDKVDKSAVGFEYQGKTEKHESQKDYVKGFGGKFGVQTDRQDKCALGWDHQEKLQLHESQKDYSKGFGGKYGVQKDRMDKNASTFEDVTQVSSAYQKTVPVEAVTSKTSNIRANFENLAKEKEQEDRRKAEAERAQRMAKERQEQEEARRKLEEQARAKTQTPPVSPAPQPTEERLPSSPVYEDAASFKAELSYRGPVSGTEPEPVYSMEAADYREASSQQGLAYATEAVYESAEAPGHYPAEDSTYDEYENDLGITAVALYDYQAAGDDEISFDPDDIITNIEMIDDGWWRGVCKGRYGLFPANYVELRQ

SEQ ID NO: 760455 - protein, 353 aa, Homo sapiens
MRLTVLKTYFPPVTCTTRYMWFWPFIVHVDYVKGFGGKFGVQTDRQDKCALGWDHQEKLQLHESQKDYKTGFGGKFGVQSERQDSAAVGFDYKEKLAKHESQQDYSKGFGGKYGVQKDRMDKNASTFEDVTQVSSAYQKTVPVEAVTSKTSNIRANFENLAKEKEQEDRRKAEAERAQRMAKERQEQEEARRKLEEQARAKTQTPPVSPAPQPTEERLPSSPVYEDAASFKAELSYRGPVSGTEPEPVYSMEAADYREASSQQGLAYATEAVYESAEAPGHYPAEDSTYDEYENDLGITAVALYDYQAAGDDEISFDPDDIITNIEMIDDGWWRGVCKGRYGLFPANYVELRQ

SEQ ID NO: 760456 - protein, 316 aa, Homo sapiens
MRLTVLKTYFPPVTCTTRYMWFWPFIVHVDYVKGFGGKFGVQTDRQDKCALGWDHQEKLQLHESQKDYSKGFGGKYGVQKDRMDKNASTFEDVTQVSSAYQKTVPVEAVTSKTSNIRANFENLAKEKEQEDRRKAEAERAQRMAKERQEQEEARRKLEEQARAKTQTPPVSPAPQPTEERLPSSPVYEDAASFKAELSYRGPVSGTEPEPVYSMEAADYREASSQQGLAYATEAVYESAEAPGHYPAEDSTYDEYENDLGITAVALYDYQAAGDDEISFDPDDIITNIEMIDDGWWRGVCKGRYGLFPANYVELRQ

SEQ ID NO: 760457 - protein, 415 aa, Homo sapiens
MCSSSSGPRANCCPVSPDYSSGFGGKYGVQADRVDKSAVGFDYQGKTEKHESQRDYSKGFGGKYGIDKDKVDKSAVGFEYQGKTEKHESQKDYVKGFGGKFGVQTDRQDKCALGWDHQEKLQLHESQKDYKTGFGGKFGVQSERQDSAAVGFDYKEKLAKHESQQDYSKGFGGKYGVQKDRMDKNASTFEDVTQVSSAYQKTVPVEAVTSKTSNIRANFENLAKEKEQEDRRKAEAERAQRMAKERQEQEEARRKLEEQARAKTQTPPVSPAPQPTEERLPSSPVYEDAASFKAELSYRGPVSGTEPEPVYSMEAADYREASSQQGLAYATEAVYESAEAPGHYPAEDSTYDEYENDLGITAVALYDYQAAGDDEISFDPDDIITNIEMIDDGWWRGVCKGRYGLFPANYVELRQ

SEQ ID NO: 760458 - protein, 417 aa, Homo sapiens
EDPPRSPYQGKTEKHASQKDYSSGFGGKYGVQADRVDKSAVGFDYQGKTEKHESQRDYSKGFGGKYGIDKDKVDKSAVGFEYQGKTEKHESQKDYVKGFGGKFGVQTDRQDKCALGWDHQEKLQLHESQKDYKTGFGGKFGVQSERQDSAAVGFDYKEKLAKHESQQDYSKGFGGKYGVQKDRMDKNASTFEDVTQVSSAYQKTVPVEAVTSKTSNIRANFENLAKEKEQEDRRKAEAERAQRMAKERQEQEEARRKLEEQARAKTQTPPVSPAPQPTEERLPSSPVYEDAASFKAELSYRGPVSGTEPEPVYSMEAADYREASSQQGLAYATEAVYESAEAPGHYPAEDSTYDEYENDLGITAVALYDYQAAGDDEISFDPDDIITNIEMIDDGWWRGVCKGRYGLFPANYVELRQ

SEQ ID NO: 760459 - protein, 353 aa, Homo sapiens; identical to SEQ ID NO: 760455

SEQ ID NO: 760460 - protein, 353 aa, Homo sapiens; identical to SEQ ID NO: 760455

SEQ ID NO: 760461 - protein, 259 aa, Homo sapiens
  misc_feature (3)..(3): Xaa can be any naturally occurring amino acid
VVXPGVLWIDYSKGFGGKYGVQKDRMDKNASTFEDVTQVSSAYQKTVPVEAVTSKTSNIRANFENLAKEKEQEDRRKAEAERAQRMAKERQEQEEARRKLEEQARAKTQTPPVSPAPQPTEERLPSSPVYEDAASFKAELSYRGPVSGTEPEPVYSMEAADYREASSQQGLAYATEAVYESAEAPGHYPAEDSTYDEYENDLGITAVALYDYQAAGDDEISFDPDDIITNIEMIDDGWWRGVCKGRYGLFPANYVELRQ

SEQ ID NO: 760462 - protein, 268 aa, Homo sapiens
MRALIHKVEAGQARVPARDYSKGFGGKYGVQKDRMDKNASTFEDVTQVSSAYQKTVPVEAVTSKTSNIRANFENLAKEKEQEDRRKAEAERAQRMAKERQEQEEARRKLEEQARAKTQTPPVSPAPQPTEERLPSSPVYEDAASFKAELSYRGPVSGTEPEPVYSMEAADYREASSQQGLAYATEAVYESAEAPGHYPAEDSTYDEYENDLGITAVALYDYQAAGDDEISFDPDDIITNIEMIDDGWWRGVCKGRYGLFPANYVELRQ

SEQ ID NO: 760463 - protein, 234 aa, Homo sapiens [sequence omitted]

SEQ ID NO: 760464 - protein, 401 aa, Homo sapiens
MWKASAGHAVSIAQDDAGADDWETDPDFVNDVSEKEQRWGAKTVQGSGHQEHINIHKLRENVFQEHQTLKEKELETGPKASHGYGGKFGVEQDRMDKSAVGHEYQSKLSKHCSQVDSVRGFGGKFGVQMDRVDQSAVGFEYQGKTEKHASQKDYSSGFGGKYGVQADRVDKSAVGFDYQGKTEKHESQRDYSKGFGGKYGIDKDKVDKSAVGFEYQGKTEKHESQKDYVKGFGGKFGVQTDRQDKCALGWDHQEKLQLHESQKDYKTGFGGKFGVQSERQDSAAVGFDYKEKLAKHESQQDYSKGFGGKYGVQKDRMDKNASTFEDVTQVSSAYQKTVPVEAVTSKTSNIRANFENLAKEKEQEDRRKAEAERAQRLPSCPSSAVGTSQDKHEASGRPCGG

SEQ ID NO: 760465 - protein, 90 aa, Homo sapiens
KRSRHDVEDPPMTKLIRDLPGQARGLRSALWRVGRKDCPRRGASSRVSLLGRRGLGLMEVNPELSHPEHRSCHVRWEICLCHTVTARRIR

SEQ ID NO: 760466 - protein, 550 aa, Homo sapiens; identical to SEQ ID NO: 760453

SEQ ID NO: 760467 - protein, 571 aa, Homo sapiens
MWKASAGHAVSIAQDDAGADDWETDPDFVNDVSEKEQRWGAKTVQGSGHQEHINIHKLRENVFQEHQTLKEKELETGPKASHGYGGKFGVEQDRMDKSAVGHEYQSKLSKHCSQVDSVRGFGGKFGVQMDRVDQSAVGFEYQGKTEKHASQKDYSSGFGGKYGVQADRVDKSAVGFDYQGKTEKHESQRDYSKGFGGKYGIDKDKVDKSAVGFEYQGKTEKHESQKDYVKGFGGKFGVQTDRQDKCALGWDHQEKLQLHESQKDYKTGFGGKFGVQSERQDSAAVGFDYKEKLAKHESQQDYSKGFGGKYGVQKDRMDKNASTFEDVTQVSSAYQKTVPVEAVTSKTSNIRANFENLAKEKEQEDRRKAEAERAQRMAKERQEQEEARRKLEEQARAKTQTPPVSPAPQPTEERLPSSPVYEDAASFKAELSYRGPVSGTEPEPVYSMEAADYREASSQQGLAYATEAVYESAEAPGHYPAEDSTYDEYENDLGITAVALYDYQAAGDDEISFDPDDIITNIEMIDDGWWRGVCKGRFRELAFSCVRVALVPIKCSRDLPGQARGRNSSPS

SEQ ID NO: 760468 - protein, 530 aa, Homo sapiens
MWKASAGHAVSIAQDDAGADDWETDPDFVNDVSEKEQRWGAKTVQGSGHQEHINIHKLRENVFQEHQTLKEKELETGPKASHGYGGKFGVEQDRMDKSAVGHEYQSKLSKHCSQVDSVRGFGGKFGVQMDRVDQSAVGFEYQGKTEKHASQKDYSSGFGGKYGVQADRVDKSAVGFDYQGKTEKHESQRDYSKGFGGKYGIDKDKVDKSAVGFEYQGKTEKHESQKDYVKGFGGKFGVQTDRQDKCALGWDHQEKLQLHESQKDYKTGFGGKFGVQSERQDSAAVGFDYKEKLAKHESQQDYSKGFGGKYGVQKDRMDKNASTFEDVTQVSSAYQKTVPVEAVTSKTSNIRANFENLAKEKEQEDRRKAEAERAQRMAKERQEQEEARRKLEEQARAKTQTPPVSPAPQPTEERLPSSPVYEDAASFKAELSYRGPVSGTEPEPVYSMEAADYREASSQQGLAYATEAVYESAEAPGHYPAEDSTYDEYENDLGITAVALYDYQAAGDDEISFDPDDIITNIEMIHELVA

SEQ ID NO: 760469 - protein, 366 aa, Homo sapiens
MWKASAGHAVSIAQDDAGADDWETDPDFVNDVSEKEQRWGAKTVQGSGHQEHINIHKLRENVFQEHQTLKEKELETGPKASHGYGGKFGVEQDRMDKSAVGHEYQSKLSKHCSQVDSVRGFGGKFGVQMDRVDQSAVGFEYQGKTEKHASQKDYSSGFGGKYGVQADRVDKSAVGFDYQGKTEKHESQRDYSKGFGGKYGIDKDKVDKSAVGFEYQGKTEKHESQKDYVKGFGGKFGVQTDRQDKCALGWDHQEKLQLHESQKDYKTGFGGKFGVQSERQDSAAVGFDYKEKLAKHESQQGTVATSLLPSPRPSCAATSSTDFRAHRQHLQHSPPVSPLVSCQAVRHFKPISSRATLILSGSLSSL

SEQ ID NO: 760470 - protein, 320 aa, Homo sapiens
MWKASAGHAVSIAQDDAGADDWETDPDFVNDVSEKEQRWGAKTVQGSGHQEHINIHKLRENVFQEHQTLKEKELETGPKASHGYGGKFGVEQDRMDKSAVGHEYQSKLSKHCSQVDSVRGFGGKFGVQMDRVDQSAVGFEYQGKTEKHASQKDYSSGFGGKYGVQADRVDKSAVGFDYQGKTEKHESQRDYSKGFGGKYGIDKDKVDKSAVGFEYQGKTEKHESQKDYVKGFGGKFGVQTDRQDKCALGWDHQEKLQLHESQKGTFTLPVCEMVLEVCFCSLRGQLVCVVSACACCTLFCLHCLKLSCVPPQSPSSLQLV

SEQ ID NO: 760471 - protein, 276 aa, Homo sapiens
MWKASAGHAVSIAQDDAGADDWETDPDFVNDVSEKEQRWGAKTVQGSGHQEHINIHKLRENVFQEHQTLKEKELETGPKASHGYGGKFGVEQDRMDKSAVGHEYQSKLSKHCSQVDSVRGFGGKFGVQMDRVDQSAVGFEYQGKTEKHASQKGRRERCRKSPLRGPRWGESQPPEAVSPRSGGPDGESHSHLKPFPERWLLPQGGLCPPLHVSGSSGYHMMDVFPVTHPPRSPGICCHCGASPPCSGSRLPFIWAALLLEKRAHRLIGRKLTSPQG

SEQ ID NO: 760472 - protein, 241 aa, Homo sapiens
MWKASAGHAVSIAQDDAGADDWETDPDFVNDVSEKEQRWGAKTVQGSGHQEHINIHKLRENVFQEHQTLKEKELETGPKASHGYGGKFGVEQDRMDKSAVGHEYQSKLSKHCSQVDSVRGFGGKFGVQMDRVDQSAVGFEYQGKTEKHASQKDYSSGFGGKYGVQADRVDKSAVGFDYQGKTEKHESQRDYSKGFGGKYGIDKDKVDKSAVGFEYQGKTEKHESQKGVFRFILPSSQQLVM

SEQ ID NO: 760473 - protein, 105 aa, Homo sapiens
VFCHVSDYSKGFGGKYGVQKDRMDKNASTFEDVTQVSSAYQKTVPVEAVTSKTSNIRANFENLAKEKEQEDRRKAEAERAQRMAKERQEQEEARRKLEVSGKEWA

SEQ ID NO: 760474 - protein, 550 aa, Homo sapiens; identical to SEQ ID NO: 760453

SEQ ID NO: 760475 - protein, 554 aa, Homo sapiens
MWKASAGHAVSIAQDDAGADDWETDPDFVNDVSEKEQRWGAKTVQGSGHQEHINIHKLRENVFQEHQTLKEKELETGPKASHGYGGKFGVEQDRMDKSAVGHEYQSKLSKHCSQVDSVRGFGGKFGVQMDRVDQSAVGFEYQGKTEKHASQKDYSSGFGGKYGVQADRVDKSAVGFDYQGKTEKHESQRDYSKGFGGKYGIDKDKVDKSAVGFEYQGKTEKHESQKDYVKGFGGKFGVQTDRQDKCALGWDHQEKLQLHESQKAREQLRLSLFLALSRAGAQEADENKPVLVRKTVLLKWLRCKDYSKGFGGKYGVQKDRMDKNASTFEDVTQVSSAYQKTVPVEAVTSKTSNIRANFENLAKEKEQEDRRKAEAERAQRMAKERQEQEEARRKLEEQARAKTQTPPVSPAPQPTEERLPSSPVYEDAASFKAELSYRGPVSGTEPEPVYSMEAADYREASSQQGLAYATEAVYESAEAPGHYPAEDSTYDEYENDLGITAVALYDYQAAGDDEISFDPDDIITNIEMIDDGWWRGVCKGRYGLFPANYVELRQ

SEQ ID NO: 760476 - protein, 482 aa, Homo sapiens
  misc_feature (43)..(43): Xaa can be any naturally occurring amino acid
MEEKKAFMGPLKKDRIQRKKELNAFFSSHGLEAGPCVLEFGRXCSQVDSVRGFGGKFGVQMDRVDQSAVGFEYQGKTEKHASQKDYSSGFGGKYGVQADRVDKSAVGFDYQGKTEKHESQRDYSKGFGGKYGIDKDKVDKSAVGFEYQGKTEKHESQKDYVKGFGGKFGVQTDRQDKCALGWDHQEKLQLHESQKDYKTGFGGKFGVQSERQDSAAVGFDYKEKLAKHESQQDYSKGFGGKYGVQKDRMDKNASTFEDVTQVSSAYQKTVPVEAVTSKTSNIRANFENLAKEKEQEDRRKAEAERAQRMAKERQEQEEARRKLEEQARAKTQTPPVSPAPQPTEERLPSSPVYEDAASFKAELSYRGPVSGTEPEPVYSMEAADYREASSQQGLAYATEAVYESAEAPGHYPAEDSTYDEYENDLGITAVALYDYQAAGDDEISFDPDDIITNIEMIDDGWWRGVCKGRYGLFPANYVELRQ

SEQ ID NO: 760477 - protein, 630 aa, Homo sapiens
MWKASAGHAVSIAQDDAGADDWETDPDFVNDVSEKEQRWGAKTVQGSGHQEHINIHKLRENVFQEHQTLKEKELETGPKASHGYGGKFGVEQDRMDKSAVGHEYQSKLSKHCSQVDSVRGFGGKFGVQMDRVDQSAVGFEYQGKTEKHASQKDYSSGFGGKYGVQADRVDKSAVGFDYQGKTEKHESQRDYSKGFGGKYGIDKDKVDKSAVGFEYQGKTEKHESQKDYVKGFGGKFGVQTDRQDKCALGWDHQEKLQLHESQKDYKTGFGGKFGVQSERQDSAAVGFDYKEKLAKHESQQDYSKGFGGKYGVQKDRMDKNASTFEDVTQVSSAYQKTVPVEAVTSKTSNIRANFENLAKEKEQEDRRKAEAERAQRMAKERQEQEEARRKLEEQARAKTQTPPVSPAPQPTEERLPSSPVYEDAASFKAELSYRGPVSGTEPEPVYSMEAADYREASSQQGLAYATEAVYESAEAPGHYPAEDSTYDEYENDLGITAVALYDYQAAGDDEISFDPDDIITNIEMIDDGWWRGVCKGRFRELAFSCVRVALVPIKCSRDLPGQARGLRSALWRVGRKDCPRRGASSRVSLLGRRGLGLMEVNPELSHPEHRSCHVRWEICLCHTVTARRIR

SEQ ID NO: 760478 - protein, 376 aa, Homo sapiens
LGLHSVTAEKHESQRDYSKGFGGKYGIDKDKVDKSAVGFEYQGKTEKHESQKDYVKGFGGKFGVQTDRQDKCALGWDHQEKLQLHESQKDYKTGFGGKFGVQSERQDSAAVGFDYKEKLAKHESQQDYSKGFGGKYGVQKDRMDKNASTFEDVTQVSSAYQKTVPVEAVTSKTSNIRANFENLAKEKEQEDRRKAEAERAQRMAKERQEQEEARRKLEEQARAKTQTPPVSPAPQPTEERLPSSPVYEDAASFKAELSYRGPVSGTEPEPVYSMEAADYREASSQQGLAYATEAVYESAEAPGHYPAEDSTYDEYENDLGITAVALYDYQAAGDDEISFDPDDIITNIEMIDDGWWRGVCKGRYGLFPANYVELRQ

SEQ ID NO: 760479 - protein, 353 aa, Homo sapiens; identical to SEQ ID NO: 760455

SEQ ID NO: 760480 - protein, 265 aa, Homo sapiens
CDQLERGLQVHHSQQDYSKGFGGKYGVQKDRMDKNASTFEDVTQVSSAYQKTVPVEAVTSKTSNIRANFENLAKEKEQEDRRKAEAERAQRMAKERQEQEEARRKLEEQARAKTQTPPVSPAPQPTEERLPSSPVYEDAASFKAELSYRGPVSGTEPEPVYSMEAADYREASSQQGLAYATEAVYESAEAPGHYPAEDSTYDEYENDLGITAVALYDYQAAGDDEISFDPDDIITNIEMIDDGWWRGVCKGRYGLFPANYVELRQ

SEQ ID NO: 760481 - protein, 252 aa, Homo sapiens
LPQGMEKREKCSPDAHVLSLQNASTFEDVTQVSSAYQKTVPVEAVTSKTSNIRANFENLAKEKEQEDRRKAEAERAQRMAKERQEQEEARRKLEEQARAKTQTPPVSPAPQPTEERLPSSPVYEDAASFKAELSYRGPVSGTEPEPVYSMEAADYREASSQQGLAYATEAVYESAEAPGHYPAEDSTYDEYENDLGITAVALYDYQAAGDDEISFDPDDIITNIEMIDDGWWRGVCKGRYGLFPANYVELRQ

SEQ ID NO: 760482 - protein, 550 aa, Homo sapiens; identical to SEQ ID NO: 760453

SEQ ID NO: 760483 - protein, 671 aa, Homo sapiens
MWKASAGHAVSIAQDDAGADDWETDPDFVNDVSEKEQRWGAKTVQGSGHQEHINIHKLRENVFQEHQTLKEKELETGPKASHGYGGKFGVEQDRMDKSAVGHEYQSKLSKHCSQVDSVRGFGGKFGVQMDRVDQSAVGFEYQGKTEKHASQKDYSSGFGGKYGVQADRVDKSAVGFDYQGKTEKHESQRDYSKGFGGKYGIDKDKVDKSAVGFEYQGKTEKHESQKDYVKGFGGKFGVQTDRQDKCALGWDHQEKLQLHESQKDYKTGFGGKFGVQSERQDSAAVGFDYKEKLAKHESQQDYSKGFGGKYGVQKDRMDKNASTFEDVTQVSSAYQKTVPVEAVTSKTSNIRANFENLAKEKEQEDRRKAEAERAQRMAKERQEQEEARRKLEEQARAKTQTPPVSPAPQPTEERLPSSPVYEDAASFKAELSYRGPVSGTEPEPVYSMEAADYREASSQQGLAYATEAVYESAEAPGHYPAEDSTYDEYENDLGITAVALYDYQAAGDDEISFDPDDIITNIEMIDDGWWRGVCKGRFRELAFSCVRVALVPIKCSRDLPGQARGLRSALWRVGRKDCPRRGASSRVSLLGRRGLGLMEVNPELSHPEHRSCHVRWEICLCHTVTARRIRKLISFLRSREAGPVPSCSQVGGVSFQKVTWKCLGTWVPECP

SEQ ID NO: 760484 - protein, 409 aa, Homo sapiens
MWKASAGHAVSIAQDDAGADDWETDPDFVNDVSEKEQRWGAKTVQGSGHQEHINIHKLRENVFQEHQTLKEKELETGPKASHGYGGKFGVEQDRMDKSAVGHEYQSKLSKHCSQVDSVRGFGGKFGVQMDRVDQSAVGFEYQGKTEKHASQKDYSSGFGGKYGVQADRVDKSAVGFDYQGKTEKHESQRDYSKGFGGKYGIDKDKVDKSAVGFEYQGKTEKHESQKDYVKGFGGKFGVQTDRQDKCALGWDHQEKLQLHESQKDYKTGFGGKFGVQSERQDSAAVGFDYKEKLAKHESQQDYSKGFGGKYGVQKDRMDKNASTFEDVTQVSSAYQKTVPVEAVTSKTSNIRANFENLAKEKEQEDRRKAEAERAQRMAKERQEQEEARRKLEEQARAQTTPLEWPKGSL

SEQ ID NO: 760485 - protein, 431 aa, Homo sapiens
MWKASAGHAVSIAQDDAGADDWETDPDFVNDVSEKEQRWGAKTVQGSGHQEHINIHKLRENVFQEHQTLKEKELETGPKASHGYGGKFGVEQDRMDKSAVGHEYQSKLSKHCSQVDSVRGFGGKFGVQMDRVDQSAVGFEYQGKTEKHASQKDYSSGFGGKYGVQADRVDKSAVGFDYQGKTEKHESQRDYSKGFGGKYGIDKDKVDKSAVGFEYQGKTEKHESQKDYVKGFGGKFGVQTDRQDKCALGWDHQEKLQLHESQKDYSKGFGGKYGVQKDRMDKNASTFEDVTQVSSAYQKTVPVEAVTSKTSNIRANFENLAKEKEQEDRRKAEAERAQRMAKERQEQEEARRKLEETRSISWSGGASGGDEEHLVERRSISWRGGASRGAEEHLARDEEYVWRRRGVVSGRDEEKCLAETQEYCLPYYHVA

SEQ ID NO: 760486 - protein, 241 aa, Homo sapiens; identical to SEQ ID NO: 760472

SEQ ID NO: 760487 - protein, 233 aa, Homo sapiens
MWKASAGHAVSIAQDDAGADDWETDPDFVNDVSEKEQRWGAKTVQGSGHQEHINIHKLRENVFQEHQTLKEKELETGPKASHGYGGKFGVEQDRMDKSAVGHEYQSKLSKHCSQVDSVRGFGGKFGVQMDRVDQSAVGFEYQGKTEKHASQKDYSSGFGGKYGVQADRVDKSAVGFDYQGKTEKHESQRDYSKGFGGKYGIDKDKVDKSAVGFEYQGKTEKHESQKDYVIVGL

SEQ ID NO: 760488 - protein, 506 aa, Homo sapiens
MLKPLWKAAVAPTWPCSMPPRRPWDREAGTLQVLGALAVLWLGSVALICLLWQVPRPPTWGQVQPKDVPRSWEHGSSPAWEPLEAEARQQRDSCQLVLVESIPQDLPSAAGSPSAQPLGQAWLQLLDTAQESVHVASYYWSLTGPDIGVNDSSSQLGEALLQKLQQLLGRNISLAVATSSPTLARTSTDLQVLAARGAHVRQVPMGRLTRGVLHSKFWVVDGRHIYMGSANMDWRSLTQVKELGAVIYNCSHLAQDLEKTFQTYWVLGVPKAVLPKTWPQNFSSHFNRFQPFHGLFDGVPTTAYFSASPPALCPQGRTRDLEALLAVMGSAQEFIYASVMEYFPTTRFSHPPRYWPVLDNALRAAAFGKGVRVRLLVGCGLNTDPTMFPYLRSLQALSNPAANVSVDVKVFIVPVGNHSNIPFSRVNHSKFMVTEKAAYIGTSNWSEDYFSSTAGVGLVVTQSPGAQPAGATVQEQLRQLFERDWSSRYAVGLDGQAPGQDCVWQG

SEQ ID NO: 760489 - protein, 516 aa, Homo sapiens
MPPRRPWDREAGTLQVLGALAVLWLGSVALICLLWQVPRPPTWGQVQPKDVPRSWEHGSSPAWEPLEAEARQQRDSCQLVLVESIPQDLPSAAGSPSAQPLGQAWLQLLDTAQESVHVASYYWSLTGPDIGVNDSSSQLGEALLQKLQQLLGRNISLAVATSSPTLARTSTDLQVLAARGAHVRQVPMGRLTRGVLHSKFWVVDGRHIYMGSANMDWRSLTQVKELGAVIYNCSHLAQDLEKTFQTYWVLGVPKAVLPKTWPQNFSSHFNRFQPFHGLFDGVPTTAYFSASPPALCPQGRTRDLEALLAVMGSAQEFIYASVMEYFPTTRFSHPPRYWPVLDNALRAAAFGKGVRVRLLVGCGLNTDPTMFPYLRSLQALSNPAANVSVDVVRACSRPGVGKAALLPPFLTRCLCSPKKVFIVPVGNHSNIPFSRVNHSKFMVTEKAAYIGTSNWSEDYFSSTAGVGLVVTQSPGAQPAGATVQEQLRQLFERDWSSRYAVGLDGQAPGQDCVWQG

SEQ ID NO: 760490 - protein, 194 aa, Homo sapiens
MLKPLWKAAVAPTWPCSMPPRRPWDREAGTLQVLGALAVLWLGSVALICLLWQVPRPPTWGQVQPKDVPRSWEHGSSPAWEPLEAEARQQRDSCQLVLVESIPQDLPSAAGSPSAQPLGQAWLQLLDTAQESVHVASYYWSLTGPDIGVNDSSSQLVRPALAPPHPGAGNTASQAAYLCRRLGHQARGLSLVVG

SEQ ID NO: 760491 - protein, 133 aa, Homo sapiens
  misc_feature (103)..(103): Xaa can be any naturally occurring amino acid
  misc_feature (123)..(123): Xaa can be any naturally occurring amino acid
PEAQEGLHREGGGDTEPVEEHCGPVCELADGVRDPPLLCQEHDGPLETFLCSGNKVLLKPAWNFFFFFFFQKGNFFFFLASMNMHFRNLQRTFFTFVFVPQHXSQEYKIGALQAAHEDGPGAXKPSRAAEQHL

SEQ ID NO: 760492 - protein, 150 aa, Homo sapiens
MYGKIIFVLLLSAIVSISASSTTGVAMHTSTSSSVTKSYISSQTNDTHKRDTYAATPRAHEVSEISVRTVYPPEEETGERVQLAHHFSEPEITLIIFGVMAGVIGTILLISYGIRRLIKKSPSDVKPLPSPDTDVPLSSVEIENPETSDQ

SEQ ID NO: 760493 - protein, 135 aa, Homo sapiens
  misc_feature (4)..(4): Xaa can be any naturally occurring amino acid
  misc_feature (9)..(9): Xaa can be any naturally occurring amino acid
SPGXAATAXYAGLKVARRQMRDAAGRRHFHASQCPRPTSPVSTDSNMSAAVMQKTRPAKKLKHQPGHLRRETYTDDLPPPPVPPPAIKSPTAQSKTQLEVRPVVVPKLPSMDARTDKWRNGTTCPSFHCTRYVNI

SEQ ID NO: 760494 - protein, 150 aa, Homo sapiens; identical to SEQ ID NO: 760492

SEQ ID NO: 760495 - protein, 91 aa, Homo sapiens
MYGKIIFVLLLSEIVSISALSTTEVAMHTSTSSSVTKSYISSQTNGETGQLVHRFTVPAPVVIILIILCVMAGIIGTILLISYTIRRLIKA

SEQ ID NO: 760496 - protein, 137 aa, Homo sapiens
MYGKIIFVLLLSAIVSISASSTTGVAMHTSTSSSVTKSYISSQTNDTHKRDTYAATPRAHEVSEISVRTVYPPEEETEITLIIFGVMAGVIGTILLISYGIRRLIKKSPSDVKPLPSPDTDVPLSSVEIENPETSDQ

SEQ ID NO: 760497 - protein, 115 aa, Homo sapiens
MYGKIIFVLLLSAIVSISASSTTGVAMHTSTSSSVTKSYISSQTNDTHKRDTYAATPRAHEVSEISVRTVYPPEEETGERVQLAHHFSEPEITLIIFGVMLVVVGMIILISYCIR

SEQ ID NO: 760498 - protein, 124 aa, Homo sapiens
MHTSTSSSVTKSYISSQTNDTHKRDTYAATPRAHEVSEISVRTVYPPEEETGERVQLAHHFSEPEITLIIFGVMAGVIGTILLISYGIRRLIKKSPSDVKPLPSPDTDVPLSSVEIENPETSDQ

SEQ ID NO: 760499 - protein, 117 aa, Homo sapiens
MYGKIIFVLLLSDTHKRDTYAATPRAHEVSEISVRTVYPPEEETGERVQLAHHFSEPEITLIIFGVMAGVIGTILLISYGIRRLIKKSPSDVKPLPSPDTDVPLSSVEIENPETSDQ

SEQ ID NO: 760500 - protein, 150 aa, Homo sapiens; identical to SEQ ID NO: 760492

SEQ ID NO: 760501 - protein, 150 aa, Homo sapiens; identical to SEQ ID NO: 760492

SEQ ID NO: 760502 - protein, 115 aa, Homo sapiens; identical to SEQ ID NO: 760497

SEQ ID NO: 760503 - protein, 108 aa, Homo sapiens
MYGKIIFVLLLSEIVSISALSTTEVAMHTSTSSSVTKSYISSQTNAPVVIILIILCVMAGIIGTILLISYSIRRLIKKSPSDVKPLPSPDTDVPLSSVEIENPETSDQ

SEQ ID NO: 760504 - protein, 78 aa, Homo sapiens
MYGKIIFVLLLSEIVSISASSTTGVAMHTSTSSSVTKSYISSQTNGITLINWWAMARVIFEVMLVVVGMIILISYCIR

SEQ ID NO: 760505 - protein, 142 aa, Homo sapiens
GLDPPPTVSPQPPALLALVTRAGSPERNQKDRKGIPGLPFHIRQERDPPPARSACPGAPRCLQLQEDVWEQTQKLSLPDKQDKETQTKSWPVWSRSGLRDDKKICSVQMAHLVPTKPWGPRKIRHPLLTSPSSRAPSSRAHL

SEQ ID NO: 760506 - protein, 126 aa, Homo sapiens
LIYSTRIKFVGSARIELLSVSSVHEGAAVYRVFKRWRAVNLHWDVLNYDKATDIEESSRGESSTSRTLWLPLTALRNRNLVHPTQLTSPRFQCGYVLLHLFNRMRPHEDLSEDNSSGEVVMRVTSV

SEQ ID NO: 760507 - protein, 324 aa, Homo sapiens
MSRPSSTGPSANKPCSKQPPPQPQHTPSPAAPPAAATISAAGPGSSAVPAAAAVISGPGGGGGAGPVSPQHHELTSLFECPVCFDYVLPPILQCQAGHLVCNQCRQKLSCCPTCRGALTPSIRNLAMEKVASAVLFPCKYATTGCSLTLHHTEKPEHEDICEYRPYSCPCPGASCKWQGSLEAVMSHLMHAHKSITTLQGEDIVFLATDINLPGAVDWVMMQSCFGHHFMLVLEKQEKYEGHQQFFAIVLLIGTRKQAENFAYRLELNGNRRRLTWEATPRSIHDGVAAAIMNSDCLVFDTAIAHLFADNGNLGINVTISTCCP

SEQ ID NO: 760508 - protein, 324 aa, Homo sapiens; identical to SEQ ID NO: 760507

SEQ ID NO: 760509 - protein, 324 aa, Homo sapiens; identical to SEQ ID NO: 760507

SEQ ID NO: 760510 - protein, 300 aa, Homo sapiens
MSRPSSTGPSANKPCSKQPPPQPQHTPSPAAPPAAATISAAGPGSSAVPAAAAVISGPGGGGGAGPVSPQHHELTSLFECPVCFDYVLPPILQCQAGHLVCNQCRQKLSCCPTCRGALTPSIRNLAMEKVASAVLFPCKYATTGCSLTLHHTEKPEHEDICEYRPYSCPCPGASCKWQGSLEAVMSHLMHAHKSITTLQGEDIVFLATDINLPGAVDWVMMQSCFGHHFMLVLEKQEKYEGHQQFFAIVLLIGTRKQAENFAYRLELNGNRRRLTWEATPRSIHDGVAAAIMNSDCCSNS

SEQ ID NO: 760511 - protein, 324 aa, Homo sapiens; identical to SEQ ID NO: 760507

SEQ ID NO: 760512 - protein, 198 aa, Homo sapiens
MEKVASAVLFPCKYATTGCSLTLHHTEKPEHEDICEYRPYSCPCPGASCKWQGSLEAVMSHLMHAHKSITTLQGEDIVFLATDINLPGAVDWVMMQSCFGHHFMLVLEKQEKYEGHQQFFAIVLLIGTRKQAENFAYRLELNGNRRRLTWEATPRSIHDGVAAAIMNSDCLVFDTAIAHLFADNGNLGINVTISTCCP

SEQ ID NO: 760513 - protein, 324 aa, Homo sapiens; identical to SEQ ID NO: 760507

SEQ ID NO: 760514 - protein, 161 aa, Homo sapiens
MNLAISIALLLTVLQVSRGQKVTSLTACLVDQSLRLDCRHENTSSSPIQYEFSLTRETKKHVLFGTVGVPEHTYRSRTNFTSKYNMKVLYLSAFTSKDEGTYTCALHHSGHSPPISSQNVTVLRDKLVKCEGISLLAQNTSWLLLLLLSLSLLQATDFMSL

SEQ ID NO: 760515 - protein, 161 aa, Homo sapiens; identical to SEQ ID NO: 760514

SEQ ID NO: 760516 - protein, 161 aa, Homo sapiens; identical to SEQ ID NO: 760514

SEQ ID NO: 760517 - protein, 161 aa, Homo sapiens; identical to SEQ ID NO: 760514

SEQ ID NO: 760518 - protein, 161 aa, Homo sapiens; identical to SEQ ID NO: 760514

SEQ ID NO: 760519 - protein, 161 aa, Homo sapiens; identical to SEQ ID NO: 760514

SEQ ID NO: 760520 - protein, 181 aa, Homo sapiens
CCVGTPEYGICDLAAAARLEEAAAAEDPSPDPGLRSQNHEPGHQHRSPANSQSLRLDCRHENTSSSPIQYEFSLTRETKKHVLFGTVGVPEHTYRSRTNFTSKYNMKVLYLSAFTSKDEGTYTCALHHSGHSPPISSQNVTVLRDKLVKCEGISLLAQNTSWLLLLLLSLSLLQATDFMSL

SEQ ID NO: 760521 - protein, 142 aa, Homo sapiens
MRVHHPSLPKEAKSMALLPLPASTHSGEGYKGGQDPLRLSQAPKSFQSSDPQPPSQVGWSPRAAQGLAQVSKGGTSSPRPSVPAPAGWCLSPSDSPLPRRPAFSGTSAGPEASHGVRPRSRTLLRKWLFPTPSPHPVVLPVL

SEQ ID NO: 760522 - protein, 163 aa, Homo sapiens
  misc_feature (125)..(125): Xaa can be any naturally occurring amino acid
  misc_feature (127)..(129): Xaa can be any naturally occurring amino acid
  misc_feature (131)..(131): Xaa can be any naturally occurring amino acid
  misc_feature (138)..(138): Xaa can be any naturally occurring amino acid
MNLAISIALLLTVLQVSRGQKVTSLTACLVDQSLRLDCRHENTSSSPIQYEFSLTRETKKHVLFGTVGVPEHTYRSRTNFTSKYNMKVLYLSAFTSKDEGTYTCALHHSGHSPPISSQNVTVLRXFXXXLXFFFFFFXSSNTSWLLLLLLSLSLLQATDFMSL

SEQ ID NO: 760523 - protein, 161 aa, Homo sapiens; identical to SEQ ID NO: 760514

SEQ ID NO: 760524 - protein, 142 aa, Homo sapiens; identical to SEQ ID NO: 760521

SEQ ID NO: 760525 - protein, 161 aa, Homo sapiens; identical to SEQ ID NO: 760514

SEQ ID NO: 760526 - protein, 74 aa, Homo sapiens
VDLDDFPLSPTPGTYTCALHHSGHSPPISSQNVTVLRDKLVKCEGISLLAQNTSWLLLLLLSLSLLQATDFMSL

SEQ ID NO: 760527 - protein, 161 aa, Homo sapiens; identical to SEQ ID NO: 760514

SEQ ID NO: 760528 - protein, 161 aa, Homo sapiens; identical to SEQ ID NO: 760514

SEQ ID NO: 760529 - protein, 161 aa, Homo sapiens; identical to SEQ ID NO: 760514

SEQ ID NO: 760530 - protein, 156 aa, Homo sapiens
SLDVRTTLLQVSRGQKVTSLTACLVDQSLRLDCRHENTSSSPIQYEFSLTRETKKHVLFGTVGVPEHTYRSRTNFTSKYNMKVLYLSAFTSKDEGTYTCALHHSGHSPPISSQNVTVLRDKLVKCEGISLLAQNTSWLLLLLLSLSLLQATDFMSL

SEQ ID NO: 760531 - protein, 151 aa, Homo sapiens
RTNFTSKYNMKVTSLTACLVDQSLRLDCRHENTSSSPIQYEFSLTRETKKHVLFGTVGVPEHTYRSRTNFTSKYNMKVLYLSAFTSKDEGTYTCALHHSGHSPPISSQNVTVLRDKLVKCEGISLLAQNTSWLLLLLLSLSLLQATDFMSL

SEQ ID NO: 760532 - protein, 185 aa, Homo sapiens
ATAAQDQTLAGSQNADCRGRAWLRRSHPSGRGVTSFMEDVGRNFYYLCLVLPSKSIKYLKINGKEEKKEQRPASYPSQDPSVLLLLKLEWGDPGGSRRCTKRAANSKYNMKVLYLSAFTSKDEGTYTCALHHSGHSPPISSQNVTVLRDKLVKCEGISLLAQNTSWLLLLLLSLSLLQATDFMSL

SEQ ID NO: 760533 - protein, 142 aa, Homo sapiens; identical to SEQ ID NO: 760521

SEQ ID NO: 760534 - protein, 142 aa, Homo sapiens; identical to SEQ ID NO: 760521

SEQ ID NO: 760535 - protein, 161 aa, Homo sapiens; identical to SEQ ID NO: 760514

SEQ ID NO: 760536 - protein, 161 aa, Homo sapiens; identical to SEQ ID NO: 760514

SEQ ID NO: 760537 - protein, 263 aa, Homo sapiens
MRLARRSRCLISVPGLALLLIARHSGLTEFSESPGGSPTEGGGSAAGGPEPPWREDEICVVGIFGKTALRLNSEKFSLVNTVCDRQVFPLFRHQDPGDPGPGIRTEAGAVGEAGGAEDPGAAAGGSVRGSGAVAEGNRTEAGSQDYSLLQAYYSQESKVLYLLLTSICDNSQLLRACRALQSGEAGGGLSLPHAEAHEFWKHQEKLQCLSLLYLFSVCHILLLVHPTCSFDITYDRVFRALDGLRQKVLPLLKTAIRCQWKME

SEQ ID NO: 760538 - protein, 991 aa, Homo sapiens
MAGPVSLRDLLMGASAWMGSESPGGSPTEGGGSAAGGPEPPWREDEICVVGIFGKTALRLNSEKFSLVNTVCDRQVFPLFRHQDPGDPGPGIRTEAGAVGEAGGAEDPGAAAGGSVRGSGAVAEGNRTEAGSQDYSLLQAYYSQESKVLYLLLTSICDNSQLLRACRALQSGEAGGGLSLPHAEAHEFWKHQEKLQCLSLLYLFSVCHILLLVHPTCSFDITYDRVFRALDGLRQKVLPLLKTAIKDCPVGKDWKLNCRPCPPRLLFLFQLNGALKVEPPRNQDPAHPDKPKKHSPKRRLQHALEDQIYRIFRKSRVLTNQSINCLFTVPANQAFVYIVPGSQEEDPVGMLLDQLRSHCTVKDPESLLVPAPLSGPRRYQVMRQHSRQQLSFHIDSSSSSSSGQLVDFTLREFLWQHVELVLSKKGFDDSVGRNPQPSHFELPTYQKWISAASKLYEVAIDGKEEDLGSPTGELTSKILSSIKVLEGFLDIDTKFSENRCQKALPMAHSAYQSNLPHNYTMTVHKNQLAQALRVYSQHARGPAFHKYAMQLHEDCYKFWSNGHQLCEERSLTDQHCVHKFHSLPKSGEKPEADRNPPVLYHNSRARSTGACNCGRKQAPRDDPFDIKAANYDFYQLLEEKCCGKLDHINFPVFEPSTPDPAPAKNESSPAPPDSDADKLKEKEPQTQGESTSLSLALSLGQSTDSLGTYPADPQAGGDNPEVHGQVEVKTEKRPNFVDRQASTVEYLPGMLHSNCPKGLLPKFSSWSLVKLGPAKSYNFHTGLDQQGFIPGTNYLMPWDIVIRTRAEDEGDLDTNSWPAPNKAIPGKRSAVVMGRGRRRDDIARAFVGFEYEDSRGRRFMCSGPDKVMKVMGSGPKESALKALNSDMPLYILSSSQGRGLKPHYAQLMRLFVVVPDAPLQIILMPQVQPGPPPCPVFYPEKQEITLPPDGLWVLRFPYAYVTERGPCFPPKENVQLMSYKVLRGVLKAVTQ

SEQ ID NO: 760539 - protein, 755 aa, Homo sapiens
MAGPVSLRDLLMGASAWMGSESPGGSPTEGGGSAAGGPEPPWREDEICVVGIFGKTALRLNSEKFSLVNTVCDRQVFPLFRHQDPGDPGPGIRTEAGAVGEAGGAEDPGAAAGGSVRGSGAVAEGNRTEAGSQDYSLLQAYYSQESKVLYLLLTSICDNSQLLRACRALQSGEAGGGLSLPHAEAHEFWKHQEKLQCLSLLYLFSVCHILLLVHPTCSFDITYDRVFRALDGLRQKVLPLLKTAIKDCPVGKDWKLNCRPCPPRLLFLFQLNGALKVEPPRNQDPAHPDKPKKHSPKRRLQHALEDQIYRIFRKSRVLTNQSINCLFTVPANQAFVYIVPGSQEEDPVGMLLDQLRSHCTVKDPESLLVPAPLSGPRRYQVMRQHSRQQLSFHIDSSSSSSSGQLVDFTLREFLWQHVELVLSKKGFDDSVGRNPQPSHFELPTYQKWISAASKLYEVAIDGKEEDLGSPTGELTSKILSSIKVLEGFLDIDTKFSENRCQKALPMAHSAYQSNLPHNYTMTVHKNQLAQALRVYSQHARGPAFHKYAMQLHEDCYKFWSNGHQLCEERSLTDQHCVHKFHSLPKSGEKPEADRNPPVLYHNSRARSTGACNCGRKQAPRDDPFDIKAANYDFYQLLEEKCCGKLDHINFPVFEPSTPDPAPAKNESSPAPPDSDADKKKQKKKKQTKNKQKKKQKKKKHTGRPSHSGGSKNKSEKSGRGRQRSHQSNSLENKGENGRAPQKGAKIYKTREPVIE

SEQ ID NO: 760540 - protein, 115 aa, Homo sapiens
LTSKILSSIKVLEGFLDIDTKFSENRCQKALPMAHSAYQSNLPHNYTMTVHKNQLAQALRVYSQHARGPAFHKYAMQLHEDCYKFWSNGHQLCEERSLTDQHCVHKFHSLPKSGS

SEQ ID NO: 760541 - protein, 991 aa, Homo sapiens; identical to SEQ ID NO: 760538

SEQ ID NO: 760542 - protein, 1002 aa, Homo sapiens
MRLARRSRCLISVPGLALLLIARHSGLTEFSESPGGSPTEGGGSAAGGPEPPWREDEICVVGIFGKTALRLNSEKFSLVNTVCDRQVFPLFRHQDPGDPGPGIRTEAGAVGEAGGAEDPGAAAGGSVRGSGAVAEGNRTEAGSQDYSLLQAYYSQESKVLYLLLTSICDNSQLLRACRALQSGEAGGGLSLPHAEAHEFWKHQEKLQCLSLLYLFSVCHILLLVHPTCSFDITYDRVFRALDGLRQKVLPLLKTAIKDCPVGKDWKLNCRPCPPRLLFLFQLNGALKVEPPRNQDPAHPDKPKKHSPKRRLQHALEDQIYRIFRKSRVLTNQSINCLFTVPANQAFVYIVPGSQEEDPVGMLLDQLRSHCTVKDPESLLVPAPLSGPRRYQVMRQHSRQQLSFHIDSSSSSSSGQLVDFTLREFLWQHVELVLSKKGFDDSVGRNPQPSHFELPTYQKWISAASKLYEVAIDGKEEDLGSPTGELTSKILSSIKVLEGFLDIDTKFSENRCQKALPMAHSAYQSNLPHNYTMTVHKNQLAQALRVYSQHARGPAFHKYAMQLHEDCYKFWSNGHQLCEERSLTDQHCVHKFHSLPKSGEKPEADRNPPVLYHNSRARSTGACNCGRKQAPRDDPFDIKAANYDFYQLLEEKCCGKLDHINFPVFEPSTPDPAPAKNESSPAPPDSDADKLKEKEPQTQGESTSLSLALSLGQSTDSLGTYPADPQAGGDNPEVHGQVEVKTEKRPNFVDRQASTVEYLPGMLHSNCPKGLLPKFSSWSLVKLGPAKSYNFHTGLDQQGFIPGTNYLMPWDIVIRTRAEDEGDLDTNSWPAPNKAIPGKRSAVVMGRGRRRDDIARAFVGFEYEDSRGRRFMCSGPDKVMKVMGSGPKESALKALNSDMPLYILSSSQGRGLKPHYAQLMRLFVVVPDAPLQIILMPQVQPGPPPCPVFYPEKQEITLPPDGLWVLRFPYAYVTERGPCFPPKENVQLMSYKVLRGVLKAVTQ

SEQ ID NO: 760543 - protein, 164 aa, Homo sapiens
ILRYIRTRGRRRDDIARAFVGFEYEDSRGRRFMCSGPDKVMKVMGSGPKESALKALNSDMPLYILSSSQGRGLKPHYAQLMRLFVVVPDAPLQIILMPQVQPGPPPCPVFYPEKQEITLPPDGLWVLRFPYAYVTERGPCFPPKENVQLMSYKVLRGVLKAVTQ

SEQ ID NO: 760544 - protein, 305 aa, Homo sapiens
MDGPMRPRSASLVDFQFGVVATETIEDALLHLAQQNEQAVREASGRLGRFREPQIVGFMVKQAENICRQATIQPRDNKRESQNWRALKQQLVNKFTLRLVSCVQLASKLSFRNKIISNITVLNFLQALGYLHTKEELLESELDVLKSLNFRINLPTPLAYVETLLEVLGYNGCLVPAMRLHATCLTLLDLVYLLHEPIYESLLRASIENSTPSQLQGEKFTSVKEDFMLLAVGIIAASAFIQNHECWSQVVGHLQSITGIALASIAEFSYAILTHGVGANTPGRQQSIPPHLAARALKTVASSNT

SEQ ID NO: 760545 - protein, 275 aa, Homo sapiens
MDGPMRPRSASLVDFQFGVVATETIEDALLHLAQQNEQAVREASGRLGRFREPQIVGFMVKQAENICRQATIQPRDNKRESQNWRALKQQLVNKFTLRLVSCVQLASKLSFRNKIISNITVLNFLQALGYLHTKEELLESELDVLKSLNFRINLPTPLAYVETLLEVLGYNGCLVPAMRLHATCLTLLDLVYLLHEPIYESLLRASIENSTPSQLQGEKFTSVKEDFMLLAVGIIAASAFIQNHECWSQVCTTEQDQHGCGAFAEHHWYCLGKHC

SEQ ID NO: 760546 - protein, 330 aa, Homo sapiens
MDGPMRPRSASLVDFQFGVVATETIEDALLHLAQQNEQAVREASGRLGRFREPQIVEFVFLLSEQWCLEKSVSYQAVEILERFMVKQAENICRQATIQPRDNKRESQNWRALKQQLVNKFTLRLVSCVQLASKLSFRNKIISNITVLNFLQALGYLHTKEELLESELDVLKSLNFRINLPTPLAYVETLLEVLGYNGCLVPAMRLHATCLTLLDLVYLLHEPIYESLLRASIENSTPSQLQGEKFTSVKEDFMLLAVGIIAASAFIQNHECWSQVVGHLQSITGIALASIAEFSYAILTHGVGANTPGRQQSIPPHLAARALKTVASSNT

SEQ ID NO: 760547 - protein, 137 aa, Homo sapiens
MGFGATLAVGLTIFVLSVVTIIICFTCSCCCLYKTCRRPRPVVTTTTSTTVVHAPYPQPPSVPPSYPGPSYQGYHTMPPQPGMPAAPYPMQYPPPYPAQPMGPPAYHETLAGGAAAPYPASQPPYNPAYMDAPKAAL

SEQ ID NO: 760548 - protein, 137 aa, Homo sapiens; identical to SEQ ID NO: 760547

SEQ ID NO: 760549 - protein, 137 aa, Homo sapiens; identical to SEQ ID NO: 760547

SEQ ID NO: 760550 - protein, 137 aa, Homo sapiens; identical to SEQ ID NO: 760547

SEQ ID NO: 760551 - protein, 137 aa, Homo sapiens; identical to SEQ ID NO: 760547

SEQ ID NO: 760552 - protein, 137 aa, Homo sapiens; identical to SEQ ID NO: 760547

SEQ ID NO: 760553 - protein, 137 aa, Homo sapiens; identical to SEQ ID NO: 760547

SEQ ID NO: 760554 - protein, 240 aa, Homo sapiens
MTAPVPAPRILLPLLLLLLLTPPPGARGEVCMASRGLSLFPESCPDFCCGTCDDQYCCSDVLKKFVWSEERCAVPEASVPASVEPVEQLGSALRFRPGYNDPMSGFGATLAVGLTIFVLSVVTIIICFTCSCCCLYKTCRRPRPVVTTTTSTTVVHAPYPQPPSVPPSYPGPSYQGYHTMPPQPGMPAAPYPMQYPPPYPAQPMGPPAYHETLAGGAAAPYPASQPPYNPAYMDAPKAAL

SEQ ID NO: 760555 - protein, 118 aa, Homo sapiens
MGFGATLAVGLTIFVLSVVTIIICFTCSCCCLYKTCRRPRPVVTTTTSTTVVHAPYPQPPSVPPSYPGPSYQGYHTMPPQPGMPAAPYPMQYPPPYPAQPMGPPAYHETLAGECPCQL

SEQ ID NO: 760556 - protein, 137 aa, Homo sapiens; identical to SEQ ID NO: 760547

SEQ ID NO: 760557 - protein, 200 aa, Homo sapiens
MGFGATLAVGLTIFVLSVVTIIICFTCSCCCLYKTCRRPRPSASKCAAQLPWTKLPGLPHHAASARDASSTLPNAVPTTLPSPAHGPTGLPRDPGWRSSRALPRQPASLQPGLHGCPEGGPLSIPWPLWLPLGYVVCVREWCAGAVPYAPCVLCVSRHGSLRPMCAVCVLPVYVASSDADKVGNNPCQSGLGPDFVLFLT

SEQ ID NO: 760558 - protein, 116 aa, Homo sapiens
LRTLTWGRCSQGETSAPPRPVVTTTTSTTVVHAPYPQPPSVPPSYPGPSYQGYHTMPPQPGMPAAPYPMQYPPPYPAQPMGPPAYHETLAGGAAAPYPASQPPYNPAYMDAPKAAL

SEQ ID NO: 760559 - protein, 227 aa, Homo sapiens
MTAPVPAPRILLPLLLLLLLTPPPGARGEVCMASRGLSLFPESCPDFCCGTCDDQYCCSDVLKKFVWSEERCAVPEASVPASVEPVEQLGSALRFRPGYNDPMSGFGATLAVGLTIFVLSVVTIIICFTCSCCCLYKTCRRPRPVVTTTTSTTVVHAPYPQPPSVPPSYPGPSYQGYHTMPPQPGMPAAPYPMQYPLTTRPTWMPRRRPSEHSLASLAATWLCCVCA

SEQ ID NO: 760560 - protein, 124 aa, Homo sapiens
MGFGATLAVGLTIFVLSVVTIIICFTCSCCCLYKTCRRPRPVVTTTTSTTVVHAPYPQPPSVPPSYPGPSYQGYHTMPPQPGMPAAPYPMQYPLTTRPTWMPRRRPSEHSLASLAATWLCCVCA

SEQ ID NO: 760561 - protein, 160 aa, Homo sapiens
MPLILSLQVCRPATLDQATRATTPCRLSQGCQQHPTQCSTHHLTQPSPWAHRPTTRPWLVSAPANSSPARLPESLPASLGHPSQTTSLNRPLPLSACLPLTRQPTMLTANQGPLCFQEEQPRPTPPASLLTTRPTWMPRRRPSEHSLASLAATWLCCVCA

SEQ ID NO: 760562 - protein, 140 aa, Homo sapiens
MARPRSWGYPLQSQGHDAGEAWDLAKLDFDPLGRCPIAPWSLSCLLGIRQPPDARTPQAEPYSAVPVCLDCPLSPHLPWDQLEGHMHTQPSCPQGALLPLLALPFPQVSRAPVHQHTQFSSLQCFHFILAKHFACFLFQT

SEQ ID NO: 760563 - protein, 140 aa, Homo sapiens; identical to SEQ ID NO: 760562

SEQ ID NO: 760564 - protein, 118 aa, Homo sapiens; identical to SEQ ID NO: 760555

SEQ ID NO: 760565 - protein, 137 aa, Homo sapiens; identical to SEQ ID NO: 760547

SEQ ID NO: 760566 - protein, 240 aa, Homo sapiens; identical to SEQ ID NO: 760554

SEQ ID NO: 760567 - protein, 112 aa, Homo sapiens
MGFGATLAVGLTIFVLSVVTIIICFTCSCCCLYKTCRRPRPVVTTTTSTTVVHAPYPQPPSVPPSYPGPSYQGYHTMPPQPGMPAAPYPMQYPPPYPAQPMGPPAYHETLAV

SEQ ID NO: 760568 - protein, 112 aa, Homo sapiens; identical to SEQ ID NO: 760567

SEQ ID NO: 760569 - protein, 94 aa, Homo sapiens
MGFGATLAVGLTIFVLSVVTIIICFTCSCCCLYKTCRRPRPVVTTTTSTTVVHAPYPQPPSVPPSYPGPSYQGYHTMPPQPGMPAASNTGDNLE

SEQ ID NO: 760570 - protein, 140 aa, Homo sapiens; identical to SEQ ID NO: 760562

SEQ ID NO: 760571 - protein, 124 aa, Homo sapiens
PLSPQTGTAELDFDPLGRCPIAPWSLSCLLGIRQPPDARTPQAEPYSAVPVCLDCPLSPHLPWDQLEGHMHTQPSCPQGALLPLLALPFPQVSRAPVHQHTQFSSLQCFHFILAKHFACFLFQT

SEQ ID NO: 760572 - protein, 137 aa, Homo sapiens; identical to SEQ ID NO: 760547

SEQ ID NO: 760573 - protein, 137 aa, Homo sapiens; identical to SEQ ID NO: 760547

SEQ ID NO: 760574 - protein, 124 aa, Homo sapiens; identical to SEQ ID NO: 760560

SEQ ID NO: 760575 - protein, 172 aa, Homo sapiens
MGFGATLAVGLTIFVLSVVTIIICFTCSCCCLYKTCRRPRPVVTTTTSTTVVHAPYPQPPSVPPSYPGPSYQGYHTMPPQPGMPAAPYPMQYPGRWRTFRLSVPTKSSRPSFKTRRGSCWEKLARRSSRGTTRTSVWGFKTPKEAIEGTYIDKKCPFTGNVSIRGRILSGVV

SEQ ID NO: 760576 - protein, 112 aa, Homo sapiens
MDNLATVSPCFPTPASWNMQQLLYPSPRCSGSRDTWANGPSGPKVGCGALDGSSGPDMNTSCSSSLYYCFTRAVLAQICCVSESRVCTLVYNKCNRLEAAAPFLPGLGCWNW

SEQ ID NO: 760577 - protein, 284 aa, Homo sapiens
GLLQAEGPWLVFWGGSVQGDYYGDLAARLGYFPSSIVREDQTLKPGKVDVKTEHFLFKFLVIGSAGTGKSCLLHQFIENKFKQDSNHTIGVEFGSRVVNVGGKTVKLQIWDTAGQERFRSVTRSYYRGAAGALLVYDITSRETYNSLAAWLTDARTLASPNIVVILCGNKKDLDPEREVTFLEASRFAQENELMFLETSALTGENVEEAFLKCGRTILNKIDSGELDPERMGSGIQYGDAFLRKLREPRECPGRGPSAVWLLSSVGARFTWFSRTKPAGAQAKV

SEQ ID NO: 760578 - protein, 236 aa, Homo sapiens
MAETYDFLFKFLVIGSAGTGKSCLLHQFIENKFKQDSNHTIGVEFGSRVVNVGGKTVKLQIWDTAGQERFRSVTRSYYRGAAGALLVYDITSRETYNSLAAWLTDARTLASPNIVVILCGNKKDLDPEREVTFLEASRFAQENELMFLETSALTGENVEEAFLKCGRTILNKIDSGELDPERMGSGIQYGDAFLRKLREPRECPGRGPSAVWLLSSVGARFTWFSRTKPAGAQAKV

SEQ ID NO: 760579 - protein, 1279 aa, Homo sapiens
MDLEAAKNGTAWRPTSAEGDFELGISSKQKRKKTKTVKMIGVLTLFRYSDWQDKLFMSLGTIMAIAHGSGLPLMMIVFGEMTDKFVDTAGNFSFPVNFSLSLLNPGKILEEEMTRYAYYYSGLGAGVLVAAYIQVSFWTLAAGRQIRKIRQKFFHAILRQEIGWFDINDTTELNTRLTDDISKISEGIGDKVGMFFQAVATFFAGFIVGFIRGWKLTLVIMAISPILGLSAAVWAKILSAFSDKELAAYAKAGAVAEEALGAIRTVIAFGGQNKELERYQKHLENAKEIGIKKAISANISMGIAFLLIYASYALAFWYGSTLVISKEYTIGNAMTVFFSILIGAFSVGQAAPCIDAFANARGAAYVIFDIIDNNPKIDSFSERGHKPDSIKGNLEFNDVHFSYPSRANVKILKGLNLKVQSGQTVALVGSSGCGKSTTVQLIQRLYDPDEGTINIDGQDIRNFNVNYLREIIGVVSQEPVLFSTTIAENICYGRGNVTMDEIKKAVKEANAYEFIMKLPQKFDTLVGERGAQLSGGQKQRIAIARALVRNPKILLLDEATSALDTESEAEVQAALDKAREGRTTIVIAHRLSTVRNADVIAGFEDGVIVEQGSHSELMKKEGVYFKLVNMQTSGSQIQSEEFELNDEKAATRMAPNGWKSRLFRHSTQKNLKNSQMCQKSLDVETDGLEANVPPVSFLKVLKLNKTEWPYFVVGTVCAIANGGLQPAFSVIFSEIIAIFGPGDDAVKQQKCNIFSLIFLFLGIISFFTFFLQGFTFGKAGEILTRRLRSMAFKAMLRQDMSWFDDHKNSTGALSTRLATDAAQVQGATGTRLALIAQNIANLGTGIIISFIYGWQLTLLLLAVVPIIAVSGIVEMKLLAGNAKRDKKELEAAGKIATEAIENIRTVVSLTQERKFESMYVEKLYGPYRNSVQKAHIYGITFSISQAFMYFSYAGCFRFGAYLIVNGHMRFRDVILVFSAIVFGAVALGHASSFAPDYAKAKLSAAHLFMLFERQPLIDSYSEEGLKPDKFEGNITFNEVVFNYPTRANVPVLQGLSLEVKKGQTLALVGSSGCGKSTVVQLLERFYDPLAGTVLLDGQEAKKLNVQWLRAQLGIVSQEPILFDCSIAENIAYGDNSRVVSQDEIVSAAKAANIHPFIETLPHKYETRVGDKGTQLSGGQKQRIAIARALIRQPQILLLDEATSALDTESEKVVQEALDKAREGRTCIVIAHRLSTIQNADLIVVFQNGRVKEHGTHQQLLAQKGIYFSMVSVQAGTQNL

SEQ ID NO: 760580 - protein, 1286 aa, Homo sapiens
MDLEAAKNGTAWRPTSAEGDFELGISSKQKRKKTKTVKMIGVLTLFRYSDWQDKLFMSLGTIMAIAHGSGLPLMMIVFGEMTDKFVDTAGNFSFPVNFSLSLLNPGKILEEEMTRYAYYYSGLGAGVLVAAYIQVSFWTLAAGRQIRKIRQKFFHAILRQEIGWFDINDTTELNTRLTDDISKISEGIGDKVGMFFQAVATFFAGFIVGFIRGWKLTLVIMAISPILGLSAAVWAKILSAFSDKELAAYAKAGAVAEEALGAIRTVIAFGGQNKELERYQKHLENAKEIGIKKAISANISMGIAFLLIYASYALAFWYGSTLVISKEYTIGNAMTVFFSILIGAFSVGQAAPCIDAFANARGAAYVIFDIIDNNPKIDSFSERGHKPDSIKGNLEFNDVHFSYPSRANVKILKGLNLKVQSGQTVALVGSSGCGKSTTVQLIQRLYDPDEGTINIDGQDIRNFNVNYLREIIGVVSQEPVLFSTTIAENICYGRGNVTMDEIKKAVKEANAYEFIMKLPQKFDTLVGERGAQLSGGQKQRIAIARALVRNPKILLLDEATSALDTESEAEVQAALDKAREGRTTIVIAHRLSTVRNADVIAGFEDGVIVEQGSHSELMKKEGVYFKLVNMQTSGSQIQSEEFELNDEKAATRMAPNGWKSRLFRHSTQKNLKNSQMCQKSLDVETDGLEANVPPVSFLKVLKLNKTEWPYFVVGTVCAIANGGLQPAFSVIFSEIIAIFGPGDDAVKQQKCNIFSLIFLFLGIISFFTFFLQGFTFGKAGEILTRRLRSMAFKAMLRQDMSWFDDHKNSTGALSTRLATDAAQVQGATGTRLALIAQNIANLGTGIIISFIYGWQLTLLLLAVVPIIAVSGIVEMKLLAGNAKRDKKELEAAGKIATEAIENIRTVVSLTQERKFESMYVEKLYGPYRNSVQKAHIYGITFSISQAFMYFSYAGCFRFGAYLIVNGHMRFRDVILVFSAIVFGAVALGHASSFAPDYAKAKLSAAHLFMLFERQPLIDSYSEEGLKPDKFEGNITFNEVVFNYPTRANVPVLQGLSLEVKKGQTLALVGSSGCGKSTVVQLLERFYDPLAGTVFVDFGFQLLDGQEAKKLNVQWLRAQLGIVSQEPILFDCSIAENIAYGDNSRVVSQDEIVSAAKAANIHPFIETLPHKYETRVGDKGTQLSGGQKQRIAIARALIRQPQILLLDEATSALDTESEKVVQEALDKAREGRTCIVIAHRLSTIQNADLIVVFQNGRVKEHGTHQQLLAQKGIYFSMVSVQAGTQNL

SEQ ID NO: 760581 - protein, 1232 aa, Homo sapiens
MDLEAAKNGTAWRPTSAEGDFELGISSKQKRKKTKTVKMIGVLTLFRYSDWQDKLFMSLGTIMAIAHGSGLPLMMIVFGEMTDKFVDTAGNFSFPVNFSLSLLNPGKILEEEMTRYAYYYSGLGAGVLVAAYIQVSFWTLAAGRQIRKIRQKFFHAILRQEIGWFDINDTTELNTRLTDDISKISEGIGDKVGMFFQAVATFFAGFIVGFIRGWKLTLVIMAISPILGLSAAVWAKILSAFSDKELAAYAKAGAVAEEALGAIRTVIAFGGQNKELERYQKHLENAKEIGIKKAISANISMGIAFLLIYASYALAFWYGSTLVISKEYTIGNAMTVFFSILIGAFSVGQAAPCIDAFANARGAAYVIFDIIDNNPKIDSFSERGHKPDSIKGNLEFNDVHFSYPSRANVKILKGLNLKVQSGQTVALVGSSGCGKSTTVQLIQRLYDPDEGTINIDGQDIRNFNVNYLREIIGVVSQEPVLFSTTIAENICYGRGNVTMDEIKKAVKEANAYEFIMKLPQKFDTLVGERGAQLSGGQKQRIAIARALVRNPKILLLDEATSALDTESEAEVQAALDKAREGRTTIVIAHRLSTVRNADVIAGFEDGVIVEQGSHSELMKKEGVYFKLVNMQTSGSQIQSEEFELNDEKAATRMAPNGWKSRLFRHSTQKNLKNSQMCQKSLDVETDGLEANVPPVSFLKVLKLNKTEWPYFVVGTVCAIANGGLQPAFSVIFSEIIAIFGPGDDAVKQQKCNIFSLIFLFLGIISFFTFFLQGFTFGKAGEILTRRLRSMAFKAMLRQDMSWFDDHKNSTGALSTRLATDAAQVQGATGTRLALIAQNIANLGTGIIISFIYGWQLTLLLLAVVPIIAVSGIVEMKLLAGNAKRDKKELEAAGKIATEAIENIRTVVSLTQERKFESMYVEKLYGPYRVFSAIVFGAVALGHASSFAPDYAKAKLSAAHLFMLFERQPLIDSYSEEGLKPDKFEGNITFNEVVFNYPTRANVPVLQGLSLEVKKGQTLALVGSSGCGKSTVVQLLERFYDPLAGTVLLDGQEAKKLNVQWLRAQLGIVSQEPILFDCSIAENIAYGDNSRVVSQDEIVSAAKAANIHPFIETLPHKYETRVGDKGTQLSGGQKQRIAIARALIRQPQILLLDEATSALDTESEKVVQEALDKAREGRTCIVIAHRLSTIQNADLIVVFQNGRVKEHGTHQQLLAQKGIYFSMVSVQAGTQNL

SEQ ID NO: 760582 - protein, 1318 aa, Homo sapiens
VGGGGGGGGEAAASKVQAPLLQRPRVQRPCQTRARFEAEMDLEAAKNGTAWRPTSAEGDFELGISSKQKRKKTKTVKMIGVLTLFRYSDWQDKLFMSLGTIMAIAHGSGLPLMMIVFGEMTDKFVDTAGNFSFPVNFSLSLLNPGKILEEEMTRYAYYYSGLGAGVLVAAYIQVSFWTLAAGRQIRKIRQKFFHAILRQEIGWFDINDTTELNTRLTDDISKISEGIGDKVGMFFQAVATFFAGFIVGFIRGWKLTLVIMAISPILGLSAAVWAKILSAFSDKELAAYAKAGAVAEEALGAIRTVIAFGGQNKELERYQKHLENAKEIGIKKAISANISMGIAFLLIYASYALAFWYGSTLVISKEYTIGNAMTVFFSILIGAFSVGQAAPCIDAFANARGAAYVIFDIIDNNPKIDSFSERGHKPDSIKGNLEFNDVHFSYPSRANVKILKGLNLKVQSGQTVALVGSSGCGKSTTVQLIQRLYDPDEGTINIDGQDIRNFNVNYLREIIGVVSQEPVLFSTTIAENICYGRGNVTMDEIKKAVKEANAYEFIMKLPQKFDTLVGERGAQLSGGQKQRIAIARALVRNPKILLLDEATSALDTESEAEVQAALDKAREGRTTIVIAHRLSTVRNADVIAGFEDGVIVEQGSHSELMKKEGVYFKLVNMQTSGSQIQSEEFELNDEKAATRMAPNGWKSRLFRHSTQKNLKNSQMCQKSLDVETDGLEANVPPVSFLKVLKLNKTEWPYFVVGTVCAIANGGLQPAFSVIFSEIIAIFGPGDDAVKQQKCNIFSLIFLFLGIISFFTFFLQGFTFGKAGEILTRRLRSMAFKAMLRQDMSWFDDHKNSTGALSTRLATDAAQVQGATGTRLALIAQNIANLGTGIIISFIYGWQLTLLLLAVVPIIAVSGIVEMKLLAGNAKRDKKELEAAGKIATEAIENIRTVVSLTQERKFESMYVEKLYGPYRNSVQKAHIYGITFSISQAFMYFSYAGCFRFGAYLIVNGHMRFRDVILVFSAIVFGAVALGHASSFAPDYAKAKLSAAHLFMLFERQPLIDSYSEEGLKPDKFEGNITFNEVVFNYPTRANVPVLQGLSLEVKKGQTLALVGSSGCGKSTVVQLLERFYDPLAGTVLLDGQEAKKLNVQWLRAQLGIVSQEPILFDCSIAENIAYGDNSRVVSQDEIVSAAKAANIHPFIETLPHKYETRVGDKGTQLSGGQKQRIAIARALIRQPQILLLDEATSALDTESEKVVQEALDKAREGRTCIVIAHRLSTIQNADLIVVFQNGRVKEHGTHQQLLAQKGIYFSMVSVQAGTQNL

SEQ ID NO: 760583 - protein, 1292 aa, Homo sapiens
MRKQAEMDLEAAKNGTAWRPTSAEGDFELGISSKQKRKKTKTVKMIGVLTLFRYSDWQDKLFMSLGTIMAIAHGSGLPLMMIVFGEMTDKFVDTAGNFSFPVNFSLSLLNPGKILEEEMTRYAYYYSGLGAGVLVAAYIQVSFWTLAAGRQIRKIRQKFFHAILRQEIGWFDINDTTELNTRLTDDISKISEGIGDKVGMFFQAVATFFAGFIVGFIRGWKLTLVIMAISPILGLSAAVWAKILSAFSDKELAAYAKAGAVAEEALGAIRTVIAFGGQNKELERYQKHLENAKEIGIKKAISANISMGIAFLLIYASYALAFWYGSTLVISKEYTIGNAMTVFFSILIGAFSVGQAAPCIDAFANARGAAYVIFDIIDNNPKIDSFSERGHKPDSIKGNLEFNDVHFSYPSRANVKILKGLNLKVQSGQTVALVGSSGCGKSTTVQLIQRLYDPDEGTINIDGQDIRNFNVNYLREIIGVVSQEPVLFSTTIAENICYGRGNVTMDEIKKAVKEANAYEFIMKLPQKFDTLVGERGAQLSGGQKQRIAIARALVRNPKILLLDEATSALDTESEAEVQAALDKAREGRTTIVIAHRLSTVRNADVIAGFEDGVIVEQGSHSELMKKEGVYFKLVNMQTSGSQIQSEEFELNDEKAATRMAPNGWKSRLFRHSTQKNLKNSQMCQKSLDVETDGLEANVPPVSFLKVLKLNKTEWPYFVVGTVCAIANGGLQPAFSVIFSEIIAIFGPGDDAVKQQKCNIFSLIFLFLGIISFFTFFLQGFTFGKAGEILTRRLRSMAFKAMLRQDMSWFDDHKNSTGALSTRLATDAAQVQGATGTRLALIAQNIANLGTGIIISFIYGWQLTLLLLAVVPIIAVSGIVEMKLLAGNAKRDKKELEAAGKIATEAIENIRTVVSLTQERKFESMYVEKLYGPYRNSVQKAHIYGITFSISQAFMYFSYAGCFRFGAYLIVNGHMRFRDVILVFSAIVFGAVALGHASSFAPDYAKAKLSAAHLFMLFERQPLIDSYSEEGLKPDKFEGNITFNEVVFNYPTRANVPVLQGLSLEVKKGQTLALVGSSGCGKSTVVQLLERFYDPLAGTVFVDFGFQLLDGQEAKKLNVQWLRAQLGIVSQEPILFDCSIAENIAYGDNSRVVSQDEIVSAAKAANIHPFIETLPHKYETRVGDKGTQLSGGQKQRIAIARALIRQPQILLLDEATSALDTESEKVVQEALDKAREGRTCIVIAHRLSTIQNADLIVVFQNGRVKEHGTHQQLLAQKGIYFSMVSVQAGTQNL

SEQ ID NO: 760584 - protein, 1293 aa, Homo sapiens
MRKQAEMDLEAAKNGTAWRPTSAEGDFELGISSKQKRKKTKTVKMIGVLTLFRYSDWQDKLFMSLGTIMAIAHGSGLPLMMIVFGEMTDKFVDTAGNFSFPVNFSLSLLNPGKILEEEMTRYAYYYSGLGAGVLVAAYIQVSFWTLAAGRQIRKIRQKFFHAILRQEIGWFDINDTTELNTRLTDDISKISEGIGDKVGMFFQAVATFFAGFIVGFIRGWKLTLVIMAISPILGLSAAVWAKILSAFSDKELAAYAKAGAVAEEALGAIRTVIAFGGQNKELERYQKHLENAKEIGIKKAISANISMGIAFLLIYASYALAFWYGSTLVISKEYTIGNAMTVFFSILIGAFSVGQAAPCIDAFANARGAAYVIFDIIDNNPKIDSFSERGHKPDSIKGNLEFNDVHFSYPSRANVKILKGLNLKVQSGQTVALVGSSGCGKSTTVQLIQRLYDPDEGTINIDGQDIRNFNVNYLREIIGVVSQEPVLFSTTIAENICYGRGNVTMDEIKKAVKEANAYEFIMKLPQKFDTLVGERGAQLSGGQKQRIAIARALVRNPKILLLDEATSALDTESEAEVQAALDKAREGRTTIVIAHRLSTVRNADVIAGFEDGVIVEQGSHSELMKKEGVYFKLVNMQTSGSQIQSEEFELNDEKAATRMAPNGWKSRLFRHSTQKNLKNSQMCQKSLDVETDGLEANVPPVSFLKVLKLNKTEWPYFVVGTVCAIANGGLQPAFSVIFSEIIAIFGPGDDAVKQQKCNIFSLIFLFLGIISFFTFFLQGFTFGKAGEILTRRLRSMAFKAMLRQDMSWFDDHKNSTGALSTRLATDAAQVQGATGTRLALIAQNIANLGTGIIISFIYGWQLTLLLLAVVPIIAVSGIVEMKLLAGNAKRDKKELEAAGKIATEAIENIRTVVSLTQERKFESMYVEKLYGPYRNSVQKAHIYGITFSISQAFMYFSYAGCFRFGAYLIVNGHMRFRDVILVFSAIVFGAVALGHASSFAPDYAKAKLSAAHLFMLFERQPLIDSYSEEGLKPDKFEGNITFNEVVFNYPTRANVPVLQGLSLEVKKGQTLALVGSSGCGKSTVVQLLERFYDPLAGTVLLDGQEAKKLNVQWLRAQLGIVSQEPILFDCSIAENIAYGDNSRVVSQDEIVSAAKAANIHPFIETLPHKYETRVGDKGTQLSGGQKQRIAIARALIRQPQILLLDEATSALDTESEKVVQEALDKAREGRTCIVIAHRLSTIQNADLIVVFQNGRVKEHGTHQQLLAQKGIYFSMINLEDPIWGLLRHLKFES

SEQ ID NO: 760585 - protein, 1052 aa, Homo sapiens
MRKQAEMDLEAAKNGTAWRPTSAEGDFELGISSKQKRKKTKTVKMIGVLTLFRYSDWQDKLFMSLGTIMAIAHGSGLPLMMIVFGEMTDKFVDTAGNFSFPVNFSLSLLNPGKILEEEMTRYAYYYSGLGAGVLVAAYIQVSFWTLAAGRQIRKIRQKFFHAILRQEIGWFDINDTTELNTRLTDDISKISEGIGDKVGMFFQAVATFFAGFIVGFIRGWKLTLVIMAISPILGLSAAVWAKILSAFSDKELAAYAKAGAVAEEALGAIRTVIAFGGQNKELERYQKHLENAKEIGIKKAISANISMGIAFLLIYASYALAFWYGSTLVISKEYTIGNAMTVFFSILIGAFSVGQAAPCIDAFANARGAAYVIFDIIDNNPKIDSFSERGHKPDSIKGNLEFNDVHFSYPSRANVKILKGLNLKVQSGQTVALVGSSGCGKSTTVQLIQRLYDPDEGTINIDGQDIRNFNVNYLREIIGVVSQEPVLFSTTIAENICYGRGNVTMDEIKKAVKEANAYEFIMKLPQKFDTLVGERGAQLSGGQKQRIAIARALVRNPKILLLDEATSALDTESEAEVQAALDKAREGRTTIVIAHRLSTVRNADVIAGFEDGVIVEQGSHSELMKKEGVYFKLVNMQTSGSQIQSEEFELNDEKAATRMAPNGWKSRLFRHSTQKNLKNSQMCQKSLDVETDGLEANVPPVSFLKVLKLNKTEWPYFVVGTVCAIANGGLQPAFSVIFSEIIAIFGPGDDAVKQQKCNIFSLIFLFLGIISFFTFFLQGFTFGKAGEILTRRLRSMAFKAMLRQDMSWFDDHKNSTGALSTRLATDAAQVQGATGTRLALIAQNIANLGTGIIISFIYGWQLTLLLLAVVPIIAVSGIVEMKLLAGNAKRDKKELEAAGKIATEAIENIRTVVSLTQERKFESMYVEKLYGPYRNSVQKAHIYGITFSISQAFMYFSYAGCFRFGAYLIVNGHMRFRDVILVFSAIVFGAVALGHASSFAPDYAKAKLSAAHLFMLFERQPLIDSYSEEGLKPDKFEGNIAFNVSSSKATDI

SEQ ID NO: 760586 - protein, 587 aa, Homo sapiens
MRKQAEMDLEAAKNGTAWRPTSAEGDFELGISSKQKRKKTKTVKMIGVLTLFRYSDWQDKLFMSLGTIMAIAHGSGLPLMMIVFGEMTDKFVDTAGNFSFPVNFSLSLLNPGKILEEEMTRYAYYYSGLGAGVLVAAYIQVSFWTLAAGRQIRKIRQKFFHAILRQEIGWFDINDTTELNTRLTDDISKISEGIGDKVGMFFQAVATFFAGFIVGFIRGWKLTLVIMAISPILGLSAAVWAKILSAFSDKELAAYAKAGAVAEEALGAIRTVIAFGGQNKELERYQKHLENAKEIGIKKAISANISMGIAFLLIYASYALAFWYGSTLVISKEYTIGNAMTVFFSILIGAFSVGQAAPCIDAFANARGAAYVIFDIIDNNPKIDSFSERGHKPDSIKGNLEFNDVHFSYPSRANVKILKGLNLKVQSGQTVALVGSSGCGKSTTVQLIQRLYDPDEGTINIDGQDIRNFNVNYLREIIGVVSQEPVLFSTTIAENICYGRGNVTMDEIKKAVKEANAYEFIMKLPQKFDTLVGERGAQLSGGQKQRIAIARALVRNPKILLLDEATSALDTESEAEVQAALDKVSRL

SEQ ID NO: 760587 - protein, 1177 aa, Homo sapiens
MRKQAEMDLEAAKNGTAWRPTSAEGDFELGISSKQKRKKTKTVKMIGVLTLFRYSDWQDKLFMSLGTIMAIAHGSGLPLMMIVFGEMTDKFVDTAGNFSFPVNFSLSLLNPGKILEEEMTRYAYYYSGLGAGVLVAAYIQVSFWTLAAGRQIRKIRQKFFHAILRQEIGWFDINDTTELNTRLTDDISKISEGIGDKVGMFFQAVATFFAGFIVGFIRGWKLTLVIMAISPILGLSAAVWAKILSAFSDKELAAYAKAGAVAEEALGAIRTVIAFGGQNKELERYQKHLENAKEIGIKKAISANISMGIAFLLIYASYALAFWYGSTLVISKEYTIGNAMTVFFSILIGAFSVGQAAPCIDAFANARGAAYVIFDIIDNNPKIDSFSERGHKPDSIKGNLEFNDVHFSYPSRANVKILKGLNLKVQSGQTVALVGSSGCGKSTTVQLIQRLYDPDEGTINIDGQDIRNFNVNYLREIIGVVSQEPVLFSTTIAENICYGRGNVTMDEIKKAVKEANAYEFIMKLPQKFDTLVGERGAQLSGGQKQRIAIARALVRNPKILLLDEATSALDTESEAEVQAALDKAREGRTTIVIAHRLSTVRNADVIAGFEDGVIVEQGSHSELMKKEGVYFKLVNMQTSGSQIQSEEFELNDEKAATRMAPNGWKSRLFRHSTQKNLKNSQMCQKSLDVETDGLEANVPPVSFLKVLKLNKTEWPYFVVGTVCAIANGGLQPAFSVIFSEIIAIFGPGDDAVKQQKCNIFSLIFLFLGIISFFTFFLQGFTFGKAGEILTRRLRSMAFKAMLRQDMSWFDDHKNSTGALSTRLATDAAQVQGATGTRLALIAQNIANLGTGIIISFIYGWQLTLLLLAVVPIIAVSGIVEMKLLAGNAKRDKKELEAAGKIATEAIENIRTVVSLTQERKFESMYVEKLYGPYRNSVQKAHIYGITFSISQAFMYFSYAGCFRFGAYLIVNGHMRFRDVILVFSAIVFGAVALGHASSFAPDYAKAKLSAAHLFMLFERQPLIDSYSEEGLKPDKFEGNITFNEVVFNYPTRANVPVLQGLSLEVKKGQTLALVGSSGCGKSTVVQLLERFYDPLAGTVFVDFGFQLLDGQEAKKLNVQWLRAQLGIVSQEPILFDCSIAENIAYGDNSRVVSQDEIVSAAKAANIHPFIETLPHVS

SEQ ID NO: 760588 - protein, 284 aa, Homo sapiens
MERLVIRMPFCHLSTYSLVWVMAAVVLCTAQVQVVTQDEREQLYTPASLKCSLQNAQEALIVTWQKKKAVSPENMVTFSENHGVVIQPAYKDKINITQLGLQNSTITFWNITLEDEGCYMCLFNTFGFGKISGTACLTVYVQPIVSLHYKFSEDHLNITCSATARPAPMVFWKVPRSGIENSTVTLSHPNGTTSVTSILHIKDPKNQVGKEVICQVLHLGTVTDFKQTVNKGYWFSVPLLLSIVSLVILLVLISILLYWETSPESGPRALNKSHSTLKVIPWST

SEQ ID NO: 760589 - protein, 210 aa, Homo sapiens
MVTFSENHGVVIQPAYKDKINITQLGLQNSTITFWNITLEDEGCYMCLFNTFGFGKISGTACLTVYVQPIVSLHYKFSEDHLNITCSATARPAPMVFWKVPRSGIENSTVTLSHPNGTTSVTSILHIKDPKNQVGKEVICQVLHLGTVTDFKQTVNKGYWFSVPLLLSIVSLVILLVLISILLYWETSPESGPRALNKSHSTLKVIPWST

SEQ ID NO: 760590 - protein, 309 aa, Homo sapiens
MERLTLTRTIGGPLLTATLLGKTTINDYQVIRMPFCHLSTYSLVWVMAAVVLCTAQVQVVTQDEREQLYTPASLKCSLQNAQEALIVTWQKKKAVSPENMVTFSENHGVVIQPAYKDKINITQLGLQNSTITFWNITLEDEGCYMCLFNTFGFGKISGTACLTVYVQPIVSLHYKFSEDHLNITCSATARPAPMVFWKVPRSGIENSTVTLSHPNGTTSVTSILHIKDPKNQVGKEVICQVLHLGTVTDFKQTVNKGYWFSVPLLLSIVSLVILLVLISILLYWETSPESGPRALNKSHSTLKVIPWST

SEQ ID NO: 760591 - protein, 218 aa, Homo sapiens
MVTFSENHGVVIQPAYKDKINITQLGLQNSTITFWNITLEDEGCYMCLFNTFGFGKISGTACLTVYDHNLFFVPVQPIVSLHYKFSEDHLNITCSATARPAPMVFWKVPRSGIENSTVTLSHPNGTTSVTSILHIKDPKNQVGKEVICQVLHLGTVTDFKQTVNKGYWFSVPLLLSIVSLVILLVLISILLYWETSPESGPRALNKSHSTLKVIPWST

SEQ ID NO: 760592 - protein, 284 aa, Homo sapiens; identical to SEQ ID NO: 760588

SEQ ID NO: 760593 - protein, 284 aa, Homo sapiens; identical to SEQ ID NO: 760588

SEQ ID NO: 760594 - protein, 284 aa, Homo sapiens; identical to SEQ ID NO: 760588

SEQ ID NO: 760595 - protein, 284 aa, Homo sapiens; identical to SEQ ID NO: 760588

SEQ ID NO: 760596 - protein, 164 aa, Homo sapiens
AQPLGARTDPLLQCRMSQGDSNPAAIPHAAEDIQGDDRWMSQHNRFVLDCKDKEPDVLFVGDSMVQLMQQYEIWRELFSPLHALNFGIGGDTTRHVLWRLKNGELENIKPKVIVVWVGTNNHENTAEEVAGGIEAIVQLINTRQPQAKIIVLVCSLWWVESSYL

SEQ ID NO: 760597 - protein, 171 aa, Homo sapiens
GRVGRPTRPDPASAEVEELLLVLGPEEGRAGAGPTGPSERPTRHPPTPQPLGARTDPLLQCRMSQGDSNPAAIPHAAEDIQGDDRWMSQRQDSCTVAHACNPSTLGGRGRRIAGVQEFETSLGNIVRAHLYKNKSKLAGHVWLTPVIPALWKAKVGRLLELRSSRPAWATW

SEQ ID NO: 760598 - protein, 291 aa, Homo sapiens
GRVGRPTRPDPASAEVEELLLVLGPEEGRAGAGPTGPSERPTRHPPTPQPLGARTDPLLQCRMSQGDSNPAAIPHAAEDIQGDDRWMSQHNRFVLDCKDKEPDVLFVGDSMVQLMQQYEIWRELFSPLHALNFGIGGDTTRHVLWRLKNGELENIKPKVIVVWVGTNNHENTAEEVAGGIEAIVQLINTRQPQAKIIVLGLLPRGEKPNPLRQKNAKVNQLLKVSLPKLANVQLLDTDGGFVHSDGAISCHDMFDFLHLTGGGYAKICKPLHELIMQLLEETPEEKQTTIA

SEQ ID NO: 760599 - protein, 291 aa, Homo sapiens; identical to SEQ ID NO: 760598

SEQ ID NO: 760600 - protein, 125 aa, Homo sapiens
GRVGRPTRPDPASAEVEELLLVLGPEEGRAGAGPTGPSERPTRHPPTPQPLGARTDPLLQCRMSQGDSNPAAIPHALLASLLTEDQISLCELALSSFAHVYKPQMLLHFISTRAIQAIVFEPLAF

SEQ ID NO: 760601 - protein, 399 aa, Homo sapiens
GAVALPLALRRRRRALRRLGRCSQWCGVRKGTDLGALPVPPPAMNAARTGYRVFSANSTAACTELAKRITERLGAELGKSVVYQETNGETRVEIKESVRGQDIFIIQTIPRDVNTAVMELLIMAYALKTACARNIIGVIPYFPYSKQSKMRKRGSIVCKLLASMLAKAGLTHIITMDLHQKEIQGFFSFPVDNLRASPFLLQYIQEEIPNYRNAVIVAKSPDAAKRAQSYAERLRLGLAVIHGEAQCTELDMDDGRHSPPMVKNATVHPGLELPLMMAKEKPPITVVGDVGGRIAIIVDDIIDDVESFVAAAEILKERGAYKIYVMATHGILSAEAPRLIEESSVDEVVVTNTVPHEVQKLQCPKIKTVDISLILSEAIRRIHNGESMAYLFRNITVDD

SEQ ID NO: 760602 - protein, 311 aa, Homo sapiens
MPKKLLLLPPPSASSAFRVPRARPVPPPAMNAARTGYRVFSANSTAACTELAKRITERLGAELGKSVVYQETNGETRVEIKESVRGQDIFIIQTIPRDVNTAVMELLIMAYALKTACARNIIGVIPYFPYSKQSKMRKRGSIVCKLLASMLAKAGLTHIITMDLHQKEIQGFFSFPVDNLRASPFLLQYIQEEIPNYRNAVIVAKSPDAAKRAQSYAERLRLGLAVIHGEAQCTELDMDDGRHSPPMVKNATVHPGLELPLMMAKEKPPITVVGDVGGRIAIIVVWLYVIHVQRWHSWLLVSRLSTLGLYF

SEQ ID NO: 760603 - protein, 282 aa, Homo sapiens
MELLIMAYALKTACARNIIGVIPYFPYSKQSKMRKRGSIVCKLLASMLAKAGLTHIITMDLHQKEIQGFFSFPVDNLRASPFLLQYIQEEIPNYRNAVIVAKSPDAAKRAQSYAERLRLGLAVIHGEAQCTELDMDDGRHSPPMVKNATVHPGLELPLMMAKEKPPITVVGDVGGRIAIIVDDIIDDVESFVAAAEILKERGAYKIYVMATHGILSAEAPRLIEESSVDEVVVTNTVPHEVQKLQCPKIKTVDISLILSEAIRRIHNGESMAYLFRNITVDD

SEQ ID NO: 760604 - protein, 282 aa, Homo sapiens; identical to SEQ ID NO: 760603

SEQ ID NO: 760605 - protein, 331 aa, Homo sapiens
TRGSTHASGGRSVVYQETNGETRVEIKESVRGQDIFIIQTIPRDVNTAVMELLIMAYALKTACARNIIGVIPYFPYSKQSKMRKRGSIVCKLLASMLAKAGLTHIITMDLHQKEIQGFFSFPVDNLRASPFLLQYIQEEIPNYRNAVIVAKSPDAAKRAQSYAERLRLGLAVIHGEAQCTELDMDDGRHSPPMVKNATVHPGLELPLMMAKEKPPITVVGDVGGRIAIIVDDIIDDVESFVAAAEILKERGAYKIYVMATHGILSAEAPRLIEESSVDEVVVTNTVPHEVQKLQCPKIKTVDISLILSEAIRRIHNGESMAYLFRNITVDD

SEQ ID NO: 760606 - protein, 368 aa, Homo sapiens
MPKKLLLLPPPSASSAFRVPRARPVPPPAMNAARTGYRVFSANSTAACTELAKRITERLGAELGKSVVYQETNGETKMFRDVNTAVMELLIMAYALKTACARNIIGVIPYFPYSKQSKMRKRGSIVCKLLASMLAKAGLTHIITMDLHQKEIQGFFSFPVDNLRASPFLLQYIQEEIPNYRNAVIVAKSPDAAKRAQSYAERLRLGLAVIHGEAQCTELDMDDGRHSPPMVKNATVHPGLELPLMMAKEKPPITVVGDVGGRIAIIVDDIIDDVESFVAAAEILKERGAYKIYVMATHGILSAEAPRLIEESSVDEVVVTNTVPHEVQKLQCPKIKTVDISLILSEAIRRIHNGESMAYLFRNITVDD

SEQ ID NO: 760607 - protein, 208 aa, Homo sapiens
MELLIMAYALKTACARNIIGVIPYFPYSKQSKMRKRGSIVCKLLASMLAKAGLTHIITMDLHQKEIQGFFSFPVDNLRASPFLLQYIQEEIPNYRNAVIVAKSPDAAKRAQSYAERLRLGLAVIHGEAQCTELDMDDGRHSPPMVKNATVHPGLELPLMMAKEKPPITVVGDVGGRIAIIVVWLYVIHVQRWHSWLLVSRLSTLGLYF

SEQ ID NO: 760608 - protein, 148 aa, Homo sapiens
MDDGRHSPPMVKNATVHPGLELPLMMAKEKPPITVVGDVGGRIAIIVDDIIDDVESFVAAAEILKERGAYKIYVMATHGILSAEAPRLIEESSVDEVVVTNTVPHEVQKLQCPKIKTVDISLILSEAIRRIHNGESMAYLFRNITVDD

SEQ ID NO: 760609 - protein, 385 aa, Homo sapiens
MPKKLLLLPPPSASSAFRVPRARPVPPPAMNAARTGYRVFSANSTAACTELAKRITERLGAELGKSVVYQETNGETRVEIKESVRGQDIFIIQTIPRDVNTAVMELLIMAYALKTACARNIIGVIPYFPYSKQSKMRKRGSIVCKLLASMLAKAGLTHIITMDLHQKEIQGFFSFPVDNLRASPFLLQYIQEEIPNYRNAVIVAKSPDAAKRAQSYAERLRLGLAVIHGEAQCTELDMDDGRHSPPMVKNATVHPGLELPLMMAKEKPPITVVGDVGGRIAIIVDDIIDDVESFVAAAEILKERGAYKIYVMATHGILSAEAPRLIEESSVDEVVVTNTVPHEVQKLQCPKIKTVDISLILSEAIRRIHNGESMAYLFRNITVDD

SEQ ID NO: 760610 - protein, 360 aa, Homo sapiens
MPKKLLLLPPPSASSAFRVPRARPVPPPAMNAARTGYRVFSANSTAACTELAKRITERLGAELGKSVVYQETNGETRVEIKESVRGQDIFIIQTIPRDVNTAVMELLIMAYALKTACARNIIGVIPYFPYSKQSKMRKRGSIVCKLLASMLAKAGLTHIITMDLHQKEIQGFFSFPVDNLRASPFLLQYIQEEIPNYRNAVIVAKSPDAAKRAQSYAERLRLGLAVIHGEAQCTELDMDDGRHSPPMVKNATVHPGLELPLMMAKEKPPITVVGDVGGRIAIIVDDIIDDVESFVAAAEILKERGAYKIYVMATHGILSAEAPRLIEESSVDEVRLLLNLEPRFTAVFSGNNKMIQSILK

SEQ ID NO: 760611 - protein, 83 aa, Homo sapiens
GAVALPLALRRRRRALRRLGRCSQWCGVRKGTDLGALPACAEFLSAFPTQTGVSQSEALRVQPRAGPVVTAPRAGRCPRSCCC

SEQ ID NO: 760612 - protein, 385 aa, Homo sapiens; identical to SEQ ID NO: 760609

SEQ ID NO: 760613 - protein, 385 aa, Homo sapiens; identical to SEQ ID NO: 760609

SEQ ID NO: 760614 - protein, 212 aa, Homo sapiens
MPKKLLLLPPPSASSAFRVPRARPVPPPAMNAARTGYRVFSANSTAACTELAKRITERLGAELGKSVVYQETNGETRVEIKESVRGQDIFIIQTIPRDVNTAVMELLIMAYALKTACARNIIGVIPYFPYSKQSKMRKRGSIVCKLLASMLAKAGLTHIITMDLHQKEIQGFFSFPVDNLRASPFLLQYIQEEIPNYRNAVIVAKSPDAAKR

SEQ ID NO: 760615 - protein, 367 aa, Homo sapiens
MPKKLLLLPPPSASSAFRVPRARPVPPPAMNAARTGYRVFSANSTAACTELAKRITERLGAELGKSVVYQETNGETRVEIKESVRGQDIFIIQTIPRDVNTAVMELLIMAYALKTACARNIIGVIPYFPYSKQSKMRKRGSIVCKLLASMLAKAGLTHIITMDLHPFLLQYIQEEIPNYRNAVIVAKSPDAAKRAQSYAERLRLGLAVIHGEAQCTELDMDDGRHSPPMVKNATVHPGLELPLMMAKEKPPITVVGDVGGRIAIIVDDIIDDVESFVAAAEILKERGAYKIYVMATHGILSAEAPRLIEESSVDEVVVTNTVPHEVQKLQCPKIKTVDISLILSEAIRRIHNGESMAYLFRNITVDD

SEQ ID NO: 760616 - protein, 385 aa, Homo sapiens; identical to SEQ ID NO: 760609

SEQ ID NO: 760617 - protein, 148 aa, Homo sapiens; identical to SEQ ID NO: 760608

SEQ ID NO: 760618 - protein, 385 aa, Homo sapiens; identical to SEQ ID NO: 760609

SEQ ID NO: 760619 - protein, 311 aa, Homo sapiens; identical to SEQ ID NO: 760602

SEQ ID NO: 760620 - protein, 77 aa, Homo sapiens
MDEGPSTMARATATSCHTAAKPGPPTITYPLPPRCPASTDAKELVPGLSQTHRGPAGLPQAACERQQGDVLVRGGRR

SEQ ID NO: 760621 - protein, 133 aa, Homo sapiens
TQPGSQAPPRQLSRFSHSFPTRLLSPMAHATLSAAPSNPRLLRVALLLLLLVAASRRAAGASVVTELRCQCLQTLQGIHLKNIQSVNVRSPGPHCAQTEVIATLKNGKKACLNPASPMVQKIIEKILNKGSTN

SEQ ID NO: 760622 - protein, 129 aa, Homo sapiens
TQPGSQAPPRQLSRFSHSFPTRLLSPMAHATLSAAPSNPRLLRVALLLLLLVAASRRAAGASVVTELRCQCLQTLQGIHLKNIQSVNVRSPGPHCAQTEVIATLKNGKKACLNPASPMVQKIIEKILNK

SEQ ID NO: 760623 - protein, 166 aa, Homo sapiens
TQPGSQAPPRQLSRFSHSFPTRLLSPMAHATLSAAPSNPRLLRVALLLLLLVAASRRAAGGSRRPGVPGPDAAGVGAPRRTAPLNQRVYSSLGASVVTELRCQCLQTLQGIHLKNIQSVNVRSPGPHCAQTEVIATLKNGKKACLNPASPMVQKIIEKILNKGSTN

SEQ ID NO: 760624 - protein, 211 aa, Homo sapiens
MADDFGFFSSSESGAPEAAEEDPAAAFLAQQESEIAGIENDEGFGAPAGSHAAPAQPGPTSGAGSEDMGTTVNGDVFQEANGPADGYAAIAQADRLTQEPESIRKWREEQRKRLQELDAASKVTEQEWREKAKKDLEEWNQRQSEQVEKNKINNRASEEAFVKESKEETPGTEWEKVAQLCDFNPKSSKQCKDVSRLRSVLMSLKQTPLSR

SEQ ID NO: 760625 - protein, 67 aa, Homo sapiens
CRNSARGSTFGASEEAFVKESKEETPGTEWEKVAQLCDFNPKSSKQCKDVSRLRSVLMSLKQTPLSR

SEQ ID NO: 760626 - protein, 229 aa, Homo sapiens
MADDFGFFSSSESGAPEAAEEDPAAAFLAQQESEIAGIENDEGFGAPAGSHAAPAQPGPTSGAGSEDMGTTVNGDVFQEANGPADGYAAIAQADRLTQEPESIRKWREEQRKRLQELDAASKVTEQEWREKAKKDLEEWNQRQSEQVEKNKINNRIADKAFYQQPDADIIGYVASEEAFVKESKEETPGTEWEKVAQLCDFNPKSSKQCKDVSRLRSVLMSLKQTPLSR

SEQ ID NO: 760627 - protein, 211 aa, Homo sapiens; identical to SEQ ID NO: 760624

SEQ ID NO: 760628 - protein, 71 aa, Homo sapiens
VYLCVSNQDQVGKAGASEEAFVKESKEETPGTEWEKVAQLCDFNPKSSKQCKDVSRLRSVLMSLKQTPLSR

SEQ ID NO: 760629 - protein, 134 aa, Homo sapiens
MADDFGFFSSSESGAPEAAEEDPAAAFLAQQESEIAGIENDEGFGAPAGSHAAPAQPGPTSGAGSEDMGTTVNGDVFQPVHHQRVQLQTQLPIQPKDEPAHNYSSSIWHSQGQGQKGPAGLRLPTSAQILSPFP

SEQ ID NO: 760630 - protein, 162 aa, Homo sapiens
  misc_feature (3)..(3): Xaa can be any naturally occurring amino acid
GAXQSERAVPHEWAGSEDMGTTVNGDVFQEANGPADGYAAIAQADRLTQEPESIRKWREEQRKRLQELDAASKVTEQEWREKAKKDLEEWNQRQSEQVEKNKINNRASEEAFVKESKEETPGTEWEKVAQLCDFNPKSSKQCKDVSRLRSVLMSLKQTPLSR

SEQ ID NO: 760631 - protein, 211 aa, Homo sapiens; identical to SEQ ID NO: 760624

SEQ ID NO: 760632 - protein, 229 aa, Homo sapiens; identical to SEQ ID NO: 760626

SEQ ID NO: 760633 - protein, 134 aa, Homo sapiens; identical to SEQ ID NO: 760629

SEQ ID NO: 760634 - protein, 124 aa, Homo sapiens
MADDFGFFSSSESGAPEAAEEDPAAAFLAQQESEIAGIENDEGFGAPAGSHAAPAQPGPTSGAGSEDMGTTVNGDVFQEANGPADGYAAIAQADRLTQEPESIRKWREEQRKRLQELGHPRRLS

SEQ ID NO: 760635 - protein, 160 aa, Homo sapiens
MADDFGFFSSSESGAPEAAEEDPAAAFLAQQESEIAGIENDEGFGAPAGSHAAPAQPGPTSGAGSEDMGTTVNGDVFQEANGPADGYAAIAQADRLTQEPESIRKWREEQRKRLQELDAASKVTEQEWREKAKKDLEEWNQRQSEQVEKNKINNRCDCPS

SEQ ID NO: 760636 - protein, 134 aa, Homo sapiens; identical to SEQ ID NO: 760629

SEQ ID NO: 760637 - protein, 98 aa, Homo sapiens
MADDFGFFSSSESGAPEAAEEDPAAAFLAQQESEIAGIENDEGFGAPAGSHAAPAQPGPTSGAGSEDMGTTVNGDVFQEANGPADGYAANCPAVGLGR

SEQ ID NO: 760638 - protein, 440 aa, Homo sapiens
LINQMNLHMRMTAFCKDHDSRSGKQPSQTLSPSDFLDKLMGRTSGYDARIRPNFKGPPVNVTCNIFINSFGSVTETTMDYRVNIFLRQQWNDSRLAYSEYPDDSLDLDPSMLDSIWKPDLFFANEKGANFHDVTTDNKLLRISKNGKVLYSIRLTLTLSCPMDLKNFPMDVQTCTMQLESFGYTMNDLIFEWLSDGPVQVAEGLTLPQFILKEEKELGYCTKHYNTGKFTCIEVKFHLERQMGYYLIQMYIPSLLIVILSWVSFWINMDAAPARVALGITTVLTMTTQSSGSRASLPKVSYVKAIDIWMAVCLLFVFAALLEYAAVNFVSRQHKEFLRLRRRQKRQNKEEDVTRESRFNFSGYGMGHCLQVKDGTAVKATPANPLPQPPKDGDAIKKKFVDRAKRIDTISRAAFPLAFLIFNIFYWITYKIIRHEDVHKK

SEQ ID NO: 760639 - protein, 452 aa, Homo sapiens [sequence omitted]

SEQ ID NO: 760640 - protein, 217 aa, Homo sapiens
LSEDLMDPRGTKRGAEKTEVAEPRNKLPRPAPSLPTDPALYSGPFPFYRRPSELGCFSLDAQRQYHGDARALRYYSPPPTNGPGPNFDLRDGYPDRYQPRDEEVQERLDHLLCWLLEHRGRLEGGPGWLAEAIVTWRGHLTKLLTTPYERQEGWQLAASRFQGTLYLSEVETPNARAQRLARPPLLRELMYMGYKFEQYMCAGELPLLHSPLPLPRG

SEQ ID NO: 760641 - protein, 501 aa, Homo sapiens
MTSSCCVTNNLQASLKSCPRPASVCSSGVNCRPELCLGYVCQPMACLPSVCLPTTFRPASCLSKTYLSSSCQAASGISGSMGPGSWYSEGAFNGNEKETMQFLNDRLASYLTRVRQLEQENAELESRIQEASHSQVLTMTPDYQSHFRTIEELQQKILCTKAENARMVVNIDNAKLAADDFRAKYEAELAMRQLVEADINGLRRILDDLTLCKADLEAQVESLKEELMCLKKNHEEEVGSLRCQLGDRLNIEVDAAPPVDLTRVLEEMRCQYEAMVEANRRDVEEWFNMQMEELNQQVATSSEQLQNYQSDIIDLRRTVNTLEIELQAQHSLRDSLENTLTESEARYSSQLAQMQCMITNVEAQLAEIRADLERQNQEYQVLLDVRARLEGEINTYRSLLESEDCKLPCNPCSTPSCTTCVPSPCVHPHRLCATHCWHALLTLPPGPLLKSLCASGSWRAWGWAAWYSVATRRAGPAPVSKEDPEQDRGSPATSSDTPGDT

SEQ ID NO: 760642 - protein, 112 aa, Homo sapiens
DKSSSCPGPMHSSVHAQFSVNVKDPSNCHMSDFRHEILPFHIAWHIQNGEFEFTKLQVLKKYISSSPRTSNSLNISQSSREEDLLQGWLQGCWILPLLLSSLHLGSSCFVSS

SEQ ID NO: 760643 - protein, 249 aa, Homo sapiens
MRQLVEADINGLRRILDDLTLCKADLEAQVESLKEELMCLKKNHEEEVGSLRCQLGDRLNIEVDAAPPVDLTRVLEEMRCQYEAMVEANRRDVEEWFNMQVGLSRWGWPPRIPKTGTLAFSFPQLQMEELNQQVATSSEQLQNYQSDIIDLRRTVNTLEIELQAQHSLRDSLENTLTESEARYSSQLAQMQCMITNVEAQLAEIRADLERQNQEYQVLLDVRARLEGEINTYRSLLESEDCKYAGPAEA

SEQ ID NO: 760644 - protein, 243 aa, Homo sapiens
MVQYAGGPLTVGMASSISLRLGTLAFSFPQLQMEELNQQVATSSEQLQNYQSDIIDLRRTVNTLEIELQAQHSLRDSLENTLTESEARYSSQLAQMQCMITNVEAQLAEIRADLERQNQEYQVLLDVRARLEGEINTYRSLLESEDCKLPCNPCSTPSCTTCVPSPCVHPHRLCATHCWHALLTLPPGPLLKSLCASGSWRAWGWAAWYSVATRRAGPAPVSKEDPEQDRGSPATSSDTPGDT

SEQ ID NO: 760645 - protein, 337 aa, Homo sapiens
MRQLVEADINGLRRILDDLTLCKADLEAQVESLKEELMCLKKNHEEEVGSLRCQLGDRLNIEVDAAPPVDLTRVLEEMRCQYEAMVEANRRDVEEWFNMQVGLSRWGWPPRIPKTGTLAFSFPQLQMEELNQQVATSSEQLQNYQSDIIDLRRTVNTLEIELQAQHSLRDSLENTLTESEARYSSQLAQMQCMITNVEAQLAEIRADLERQNQEYQVLLDVRARLEGEINTYRSLLESEDCKLPCNPCSTPSCTTCVPSPCVHPHRLCATHCWHALLTLPPGPLLKSLCASGSWRAWGWAAWYSVATRRAGPAPVSKEDPEQDRGSPATSSDTPGDT

SEQ ID NO: 760646 - protein, 337 aa, Homo sapiens
MRQLVEADINGLRRILDDLTLCKADLEAQVESLKEELMCLKKNHEEEVGSLRCQLGDRLNIEVDAAPPVDLTRVLEEMRCQYEAMVEANRRDVEEWFNMQVGLSRWGWPPDIPKTGTLAFSFPQLQMEELNQQVATSSEQLQNYQSDIIDLRRTVNTLEIELQAQHSLRDSLENTLTESEARYSSQLAQMQCMITNVEAQLAEIRADLERQNQEYQVLLDVRARLEGEINTYRSLLESEDCKLPCNPCSTPSCTTCVPSPCVHPHRLCATHCWHALLTLPPGPLLKSLCASGSWRAWGWAAWYSVATRRAGPAPVSKEDPEQDRGSPATSSDTPGDT

SEQ ID NO: 760647 - protein, 97 aa, Homo sapiens
DPDQKIEIETDEENEVPNPRWTLTAGQAPQCCSCVSEAENRYRASSDSGPGGGKRRGRRRNESPVCSWGLVRGPENSLQAFARALIKAAKRRTGLRA

SEQ ID NO: 760648 - protein, 116 aa, Homo sapiens
RPFQTPPSPGTSRRAHHGKRQAKRRPRIPNVTRPLELARRGRVEDENRRPIPLTLTAGKLPSVVVVFRRPRTAIGLPRTLALEGGNGEGEGETSLQCVLGAWCEAQRILCRPLPGH

SEQ ID NO: 760649 - protein, 155 aa, Homo sapiens
MGPCPLLQEPDGQASCPFLPPPSSWNSHPHCCLLWTPAPELKRAGALGPTKMWEKQSLELGAWNLDPPVPALPLPRHPGACHYWRGLQMTSQGPTSVLCEHKQRCRVPRAQRTRRGQDPACLVPCRLFPCCGHCCHLLHCLKASPHALCHSHSAL

SEQ ID NO: 760650 - protein, 61 aa, Homo sapiens
FSLEEWQCLDTAQQNLYRNVMLENYRNLVFLGIAVSNLDLITCLEQGKEPWNMKRHEMVAK

SEQ ID NO: 760651 - protein, 315 aa, Homo sapiens
METSSKGLLTQVTQFWNLLDDLAQSDPEGYEKFIQQQLKEGKQLCAAPEPQLCLQTRILKPKEKILFINLCQWTRIPAPQSTTHPVPLTVGKPEDTTEISDAYTVIDVAYNPDVLHAAEKDQVKKNQLIQMAMKCIEEKFQFTLSHSYHITKFRIKGSIQRMKQNLMGIQTDSIDLREKMRRELTLGQIRSSTMSNPDHFPQLLLPKDQVSGKAVCLIEEISSTEIQVEMKMPAYELKIVHDHSEKPLKIELKVELPGINSVSLCDLSVSEDDLLIEVSEKYRLHLNLPKLIDTEMTTAKFIKEKSTLIITMPLV

SEQ ID NO: 760652 - protein, 273 aa, Homo sapiens
METSSKGLLTQVTQFWNLLDDLAQSDPEGYEKFIQQQLKEGKQLCAAPEPQLCLQTRILKPKEKILFINLCQWTRIPAPQSTTHPVPLTVGKPEDTTEISDAYTVIDVAYNPDVLHAAEKDQVKKNQLIQMAMKCIEEKFQFTLSHSYHITKFRIKGSIQRMKQNLMGIQTDSIDLREKMRRELTLGQIRSSTMSNPDHFPQLLLPKDQVSGKAVCLIEEISSTEIQVEMKMPAYELKIVHDHSEKPLKIELKVELPGINSVSLCDLSVSEVS

SEQ ID NO: 760653 - protein, 137 aa, Homo sapiens
METSSKGLLTQVTQFWNLLDDLAQSDPEGYEKFIQQQLKEGKQLCAAPEPQLCLQTRILTESYFVTRLECNGVVLARCNLCLPGLSDSPASASQVAGITETKRKNTFYQPVSVDKDPSSPINHSSSTSNCWQTRRYN

SEQ ID NO: 760654 - protein, 315 aa, Homo sapiens; identical to SEQ ID NO: 760651

SEQ ID NO: 760655 - protein, 137 aa, Homo sapiens; identical to SEQ ID NO: 760653

SEQ ID NO: 760656 - protein, 255 aa, Homo sapiens
MAAPCVSYGGAVSYRLLLWGRGSLARKQGLWKTAAPELQTNVRSQILRLRHTAFVIPKKNVPTSKRETYTEDFIKKQIEEFNIGKRHLANMMGEDPETFTQEDIDRAIAYLFPSGLFEKRARPVMKHPEQIFPRQRAIQWGEDGRPFHYLFYTGKQSYYSLMHDVYGMLLNLEKHQSHLQAKSLLPEKTVTRDVIGSRWLIKEELEEMLVEKLSDLDYMQFIRLLEKLLTSQCGAAEEEFVQRFRRSVTLESKNR

SEQ ID NO: 760657 - protein, 183 aa, Homo sapiens
MAAPCVSYGGAVSYRLLLWGRGSLARKQGLWKTAAPELQTNVRSQILRLRHTAFVIPKKNVPTSKRETYTEDFIKKQIEEFNIGKRHLANMMGEDPETFTQEDIDRAIAYLFPSGLFEKRARPVMKHPEQIFPRQRAIQWGEDGRPFHYLFYTGKQSYYSLMHDVYGMVLNEKNNGLQAVCFR

SEQ ID NO: 760658 - protein, 137 aa, Homo sapiens
MAAPCVSYGGAVSYRLLLWGRGSLARKQGLWKTAAPELQTNVRSQILRLRHTAFVIPKKNVPTSKRETYTEDFIKKQIEEFNIGKRHLANMMGEDPETFTQEDIDRAIAYLFPSGLFEKRARPVMKHPEQIFPRQRA

SEQ ID NO: 760659 - protein, 240 aa, Homo sapiens
MAAPCVSYGGAVSYRLLLWGRGSLARKQGLWKTAAPELQTNVRSQILRLRHTAFVIPKKNVPTSKRETYTEDFIKKQIEEFNIGKRHLANMMGEDPETFTQEDIDRAIAYLFPSGLFEKRARPVMKHPEQIFPRQRAIQWGEDGRPFHYLFYTGKQSYYSLMITSFTSRITQDREQLMFPFHFVDRLGKHDVTCTVSGGGRSAQAGAIRLAMAKALCSFVTEDEVRVDEDKLDYLLLIHV

SEQ ID NO: 760660 - protein, 913 aa, Homo sapiens
MSEELAPQAQPAFPWAAVSQEPFWADLQPRVAFVERGGSLWLNCSTNCPRPERGGLETSLRRNGTQRGLRWLARQLVDIREPETQPVCFFRCARRTLQARGLIRTFQRPDRVELMPLPPWQPVGENFTLSCRVPGAGPRASLTLTLLRGAQELIRRSFAGEPPRARGAVLTATVLARREDHGANFSCRAELDLRPHGLGLFENSSAPRELRTFSLSPDAPRLAAPRLLEVGSERPVSCTLDGLFPASEARVYLALGDQNLSPDVTLEGDAFVATATATASAEQEGARQLICNVTLGGENRETRENVTIYSFPAPLLTLSEPSVSEGQMVTVTCAAGTQALVTLEGVPAAVPGQPAQLQLNATENDDRRSFFCDATLDVDGETLIKNRSAELRVLYAPRLDDSDCPRSWTWPEGPEQTLRCEARGNPEPSVHCARSDGGAVLALGLLGPVTRALSGTYRCKAANDQGEAVKDVTLTVEYAPALDSVGCPERITWLEGTEASLSCVAHGVPPPDVICVRSGELGAVIEGLLRVAREHAGTYRCEATNPRGSAAKNVAVTVEYGPRFEEPSCPSNWTWVEGSGRLFSCEVDGKPQPSVKCVGSGGATEGVLLPLAPPDPSPRAPRIPRVLAPGIYVCNATNRHGSVAKTVVVSAESPPEMDESTCPSHQTWLEGAEASALACAARGRPSPGVRCSREGIPWPEQQRVSREDAGTYHCVATNAHGTDSRTVTVGVEYRPVVAELAASPPGGVRPGGNFTLTCRAEAWPPAQISWRAPPGALNIGLSSNNSTLSVAGAMGSHGGEYECAATNAHGRHARRITVRVAGPWLWVAVGGAAGGAALLAAGAGLAFYVQSTACKKGEYNVQEAESSGEAVCLNGAGGGAGGAAGAEGGPEAAGGAAESPAEGEVFAIQLTSA

SEQ ID NO: 760661 - protein, 924 aa, Homo sapiens [sequence omitted]

SEQ ID NO: 760662 - protein, 129 aa, Homo sapiens
LHYSPSLPGPAPWVPGSSPSGPTFCSKSRCSKSCGLFPLAERPDRVELMPLPPWQPVGENFTLSCRVPGAGPRASLTLTLLRGAQELIRRSFAGEPPRARGAVLTATVLARREDHGANFSCRAELDLRP

SEQ ID NO: 760663 - protein, 210 aa, Homo sapiens
RSLLCCFCQHSSFPAIYTSCPFVPIILDANHPLSTTMGKITFYEDRDFQGRCYNCISDCPNLRVYFSRCNSIRVDSGCWMLYERPNYQGHQYFLRRGKYPDYQHWMGLSDSVQSCRIIPHTSSHKLRLYERDDYRGLMSELTDDCACVPELFRLPEIYSLHVLEGCWVLYEMPNYRGRQYLLRPGDYRRYHDWGGADAKVGSLRRVTDLY

SEQ ID NO: 760664 - protein, 142 aa, Homo sapiens
SAQGVGGGLPPGNVTLAGSPELKTAEIEPKADGSWREGDEVTLICSARGHPDPKLSWSQLGGSPAEPIPGRQGWVSSSLTLKVTSALSRDGISCEASNPHGNKRHVFHFGTVSPQTSQAGVAVMPWPSAWASCSSSLLSSTA

SEQ ID NO: 760665 - protein, 98 aa, Homo sapiens
LPLNSRAVVNCSVHGLPTPALRWTKDSTPLGDGPMLSLSSITFDSNGTYVCEASLPTVPVLSRTQNFTLLVQGSGGREGVGLDGDSVGCGTWTNRTSS

SEQ ID NO: 760666 - protein, 116 aa, Homo sapiens
WTSGKWVDSDRGSLTEGVKNGSKVSDLGEIMELLPVPLITPFSESCLLTHREGPLSCSYWVPIVFAAWPSLPFWEWTLPSWEASIAPSSLHGCCGGHCVNAQPLSRDAGPKMGQSE

SEQ ID NO: 760667 - protein, 470 aa, Homo sapiens
MSRLGALGGARAGLGLLLGTAAGLGFLCLLYSQRWKRTQRHGRSQSLPNSLDYTQTSDPGRHVMLLRAVPGGAGDASVLPSLPREGQEKVLDRLDFVLTSLVALRREVEELRSSLRGLAGEIVGEVRCHMEENQRVARRRRFPFVRERSDSTGSSSVYFTASSGATFTDAESEGGYTTANAESDNERDSDKESEDGEDEVSCETVKMGRKDSLDLEEEAASGASSALEAGGSSGLEDVLPLLQQADELHRGDEQGKREGFQLLLNNKLVYGSRQDFLWRLARAYSDMCELTEEVSEKKSYALDGKEEAEAALEKGDESADCHLWYAVLCGQLAEHESIQRRIQSGFSFKEHVDKAIALQPENPMAHFLLGRWCYQVSHLSWLEKKTATALLESPLSATVEDALQSFLKAEELQPGFSKAGRVYISKCYRELGKNSEARWWMKLALELPDVTKEDLAIQKDLEELEVILRD

SEQ ID NO: 760668 - protein, 470 aa, Homo sapiens; identical to SEQ ID NO: 760667

SEQ ID NO: 760669 - protein, 471 aa, Homo sapiens
MSRLGALGGARAGLGLLLGTAAGLGFLCLLYSQRWKRTQRHGRSQSLPNSLDYTQTSDPGRHVMLLRAVPGGAGDASVLPSLPREGQEKVLDRLDFVLTSLVALRREVEELRSSLRGLAGEIVGEVRCHMEENQRVARRRRFPFVRERSDSTGSSSVYFTASSGATFTDAESEGGYTTANAESDNERDSDKESEDGEDEVSCETVKMGRKDSLDLEEEAASGASSALEAGGSSGLEDVLPLLQQADELHRGDEQGKREGFQLLLNNKLVYGSRQDFLWRLARAYSDMCELTEEVSEKKSYALDGKEEAEAALEKGDESADCHLWYAVLCGQLAEHESIQRRIQSGFSFKEHVDKAIALQPENPMAHFLLGRWCYQVSCVSVLDIMVLNATRSSAFSGSGALGGSTQPRLTLFSIYPQRFKEKKPFKTSYTHLDLFVAVSHLSWLEKKTATALLESPLSATVEDALQSFLKV

SEQ ID NO: 760670 - protein, 375 aa, Homo sapiens
MSRLGALGGARAGLGLLLGTAAGLGFLCLLYSQRWKRTQRHGRSQSLPNSLDYTQTSDPGRHVMLLRAVPGGAGDASVLPSLPREGQEKVLDRLDFVLTSLVALRREVEELRSSLRGLAGEIVGEVRPLMRSSSKRHPMVSRKTSWMGPNGTLRDGACFPDATWKRTREWLGGEGFRLSGRGVTPLAPALSTSRPPREPRSQMLRVKGGKEEAEAALEKGDESADCHLWYAVLCGQLAEHESIQRRIQSGFSFKEHVDKAIALQPENPMAHFLLGRWCYQVSHLSWLEKKTATALLESPLSATVEDALQSFLKAEELQPGFSKAGRVYISKCYRELGKNSEARWWMKLALELPDVTKEDLAIQKDLEELEVILRD

SEQ ID NO: 760671 - protein, 178 aa, Homo sapiens
MVRWDTVGQKRVPRGERGTRNRGRWASSHPIKTARGGHPRVLETHPRRGSAAHTGALTPGGPAEPNIKYARPWKTTHRKEKRETARERGQNRQAEQGGHRITPSTKERSHTRQHDNREDRTDQTATHNKKKTKPKDRKQQSDTTNNTTRTLEPQSTETETTAHSANAKKSHRNKKRQT

SEQ ID NO: 760672 - protein, 493 aa, Homo sapiens
DVTVTDSVSPRRLLPWWLAAGCSMSRLGALGGARAGLGLLLGTAAGLGFLCLLYSQRWKRTQRHGRSQSLPNSLDYTQTSDPGRHVMLLRAVPGGAGDASVLPSLPREGQEKVLDRLDFVLTSLVALRREVEELRSSLRGLAGEIVGEVRCHMEENQRVARRRRFPFVRERSDSTGSSSVYFTASSGATFTDAESEGGYTTANAESDNERDSDKESEDGEDEVSCETVKMGRKDSLDLEEEAASGASSALEAGGSSGLEDVLPLLQQADELHRGDEQGKREGFQLLLNNKLVYGSRQDFLWRLARAYSDMCELTEEVSEKKSYALDGKEEAEAALEKGDESADCHLWYAVLCGQLAEHESIQRRIQSGFSFKEHVDKAIALQPENPMAHFLLGRWCYQVSHLSWLEKKTATALLESPLSATVEDALQSFLKAEELQPGFSKAGRVYISKCYRELGKNSEARWWMKLALELPDVTKEDLAIQKDLEELEVILRD

SEQ ID NO: 760673 - protein, 504 aa, Homo sapiens
MSRLGALGGARAGLGLLLGTAAGLGFLCLLYSQRWKRTQRHGRSQSLPNSLDYTQTSDPGRHVMLLRAVPGGAGDASVLPSLPREGQEKVLDRLDFVLTSLVALRREVEELRSSLRGLAGEIVGEVRPLMRSSSKRHPMVSRKTSWMGPNGTLRDGACFSRCHMEENQRVARRRRFPFVRERSDSTGSSSVYFTASSGATFTDAESEGGYTTANAESDNERDSDKESEDGEDEVSCETVKMGRKDSLDLEEEAASGASSALEAGGSSGLEDVLPLLQQADELHRGDEQGKREGFQLLLNNKLVYGSRQDFLWRLARAYSDMCELTEEVSEKKSYALDGKEEAEAALEKGDESADCHLWYAVLCGQLAEHESIQRRIQSGFSFKEHVDKAIALQPENPMAHFLLGRWCYQVSHLSWLEKKTATALLESPLSATVEDALQSFLKAEELQPGFSKAGRVYISKCYRELGKNSEARWWMKLALELPDVTKEDLAIQKDLEELEVILRD

SEQ ID NO: 760674 - protein, 264 aa, Homo sapiens
MGRKDSLDLEEEAASGASSALEAGGSSGLEDVLPLLQQADELHRGDEQGKREGFQLLLNNKLVYGSRQDFLWRLARAYSDMCELTEEVSEKKSYALDGKEEAEAALEKGDESADCHLWYAVLCGQLAEHESIQRRIQSGFSFKEHVDKAIALQPENPMAHFLLGRWCYQVSHLSWLEKKTATALLESPLSATVEDALQSFLKAEELQPGFSKAGRVYISKCYRELGKNSEARWWMKLALELPDVTKEDLAIQKDLEELEVILRD

SEQ ID NO: 760675 - protein, 327 aa, Homo sapiens
MSRLGALGGARAGLGLLLGTAAGLGFLCLLYSQRWKRTQRHGRSQSLPNSLDYTQTSDPGRHVMLLRAVPGGAGDASVLPSLPREGQEKVLDRLDFVLTSLVALRREVEELRSSLRGLAGEIVGEVRCHMEENQRVARRRRFPFVRERSDSTGSSSVYFTASSGATFTDAESEGGYTTANAESDNERDSDKESEDGEDEVSCETVKMGRKDSLDLEEEAASGASSALEAGGSSGLEDVLPLLQQADELHRGDEQGKREGFQLLLNNKLVYGSRQDFLWRLARAYSDMCELTEEVSEKKSYALDGKEEAEAALEKGDESADCHLWSLT

SEQ ID NO: 760676 - protein, 169 aa, Homo sapiens
MAHFLLGRWCYQVSCVSVLDIMVLNATRSSAFSGSGALGGSTQPRLTLFSIYPQRFKEKKPFKTSYTHLDLFVAVSHLSWLEKKTATALLESPLSATVEDALQSFLKAEELQPGFSKAGRVYISKCYRELGKNSEARWWMKLALELPDVTKEDLAIQKDLEELEVILRD

SEQ ID NO: 760677 - protein, 175 aa, Homo sapiens
MSRLGALGGARAGLGLLLGTAAGLGFLCLLYSQRWKRTQRHGRSQSLPNSLDYTQTSDPGRHVMLLRAVPGGAGDASVLPSLPREGQEKVLDRLDFVLTSLVALRREVEELRSSLRGLAGEIVGEVRCHMEENQRVARRRRFPFVRERSDSTGSSSVYFTASSGATFTDAESEGG

SEQ ID NO: 760678 - protein, 200 aa, Homo sapiens
KIAVFDKMWTYMRSAEPSVFVRTTAEGVARVRKSKGKYAYLLESTMNEYIEQRKPCDTMKVGGNLDSKGYGIATPKGSSLRNAVNLAVLKLNEQGLLDKLKNKWWYDKGECGSGGGDSKEKTSALSLSNVAGVFYILVGGLGLAMLVALIEFCYKSRAEAKRMKVAKNAQNINPSSSQNSQNFATYKEGYNVYGIESVKI

SEQ ID NO: 760679 - protein, 120 aa, Homo sapiens
KIAVFDKMWTYMRSAEPSVFVRTTAEGVARVRKSKGKYAYLLESTMNEYIEQRKPCDTMKVGGNLDSKGYGIATPKGSSLRNAVNLAVLKLNEQGLLDKLKNKWWYDKGECGSGGGDSKY

SEQ ID NO: 760680 - protein, 128 aa, Homo sapiens
KIAVFDKMWTYMRSAEPSVFVRTTAEGVARVRKSKGKYAYLLESTMNEYIEQRKPCDTMKVGGNLDSKGYGIATPKGSSLRNAVNLAVLKLNEQGLLDKLKNKWWYDKGECGSGGGDSKVSPSEKSNG

SEQ ID NO: 760681 - protein, 120 aa, Homo sapiens; identical to SEQ ID NO: 760679

SEQ ID NO: 760682 - protein, 122 aa, Homo sapiens
TLRTPVNLAVLKLSEQGVLDKLKNKWWYDKGECGAKDSGSKEKTSALSLSNVAGVFYILVGGLGLAMLVALIEFCYKSRAEAKRMKVAKNAQNINPSSSQNSQNFATYKEGYNVYGIESVKI

SEQ ID NO: 760683 - protein, 119 aa, Homo sapiens
RQSLTLSPRLEYSGTISVHCNLCLSDSSDSPASTSQVAGITGMCYHTRLIFVFLVETGFCQVGQSGLELVTSGDPPISASQSAGITGLSHGAGPLHDLLCLHQAYRYHHNKVKTGSSCY

SEQ ID NO: 760684 - protein, 865 aa, Homo sapiens [sequence omitted]

SEQ ID NO: 760685 - protein, 423 aa, Homo sapiens
MDRRMWGAHVFCVLSPLPTVLGHMHPECDFITQLREDESACLQAAEEMPNTTLGCPATWDGLLCWPTAGSGEWVTLPCPDFFSHFSSESGAVKRDCTITGWSEPFPPYPVACPVPLELLAEEESYFSTVKIIYTVGHSISIVALFVAITILVALRRLHCPRNYVHTQLFTTFILKAGAVFLKDAALFHSDDTDHCSFSTVLCKVSVAASHFATMTNFSWLLAEAVYLNCLLASTSPSSRRAFWWLVLAGWGLPVLFTGTWVSCKLAFEDIACWDLDDTSPYWWIIKGPIVLSVGVNFGLFLNIIRILVRKLEPAQGSLHTQSQYWRLSKSTLFLIPLFGIHYIIFNFLPDNAGLGIRLPLELGLGSFQGFIVAILYCFLNQEVRTEISRKWHGHDPELLPAWRTRAKWTTPSRSAAKVLTSMC

SEQ ID NO: 760686 - protein, 145 aa, Homo sapiens
MVPGTPSPLLGRGKELWLESLACLPGAVKRDCTITGWSEPFPPYPVACPVPLELLAEEESYFSTVKIIYTVGHSISIVALFVAITILVALRRLHCPRNYVHTQLFTTFILKAGAVFLKDAALFHSDDTDHCSFSTGCPCSSLARG

SEQ ID NO: 760687 - protein, 68 aa, Homo sapiens
MVPGTPSPLLGRGKELWLESLACLPGAVKRDCTITGWSEPFPPYPVACPVPLELLAEEGCPCSSLARG

SEQ ID NO: 760688 - protein, 359 aa, Homo sapiens
MVPGTPSPLLGRGKELWLESLACLPGAVKRDCTITGWSEPFPPYPVACPVPLELLAEEESYFSTVKIIYTVGHSISIVALFVAITILVALRRLHCPRNYVHTQLFTTFILKAGAVFLKDAALFHSDDTDHCSFSTVLCKVSVAASHFATMTNFSWLLAEAVYLNCLLASTSPSSRRAFWWLVLAGWGLPVLFTGTWVSCKLAFEDIACWDLDDTSPYWWIIKGPIVLSVGVNFGLFLNIIRILVRKLEPAQGSLHTQSQYWRLSKSTLFLIPLFGIHYIIFNFLPDNAGLGIRLPLELGLGSFQGFIVAILYCFLNQEVRTEISRKWHGHDPELLPAWRTRAKWTTPSRSAAKVLTSMC

SEQ ID NO: 760689 - protein, 151 aa, Homo sapiens
MLPFSTATTLTTAASPLAARALHWHVGELQTGLRGHRVLGPGRHLPLLVDHQRAHCPLGRGELWAFSQYYPHPGEETGASSGQPPYPVSVLASLQVDTFPDPTLWNSLHHLQLPARQCWPGHPPPPGAGTGFLPGLHCCHPLLLPQPRGED

SEQ ID NO: 760690 - protein, 178 aa, Homo sapiens
MVSVPTTWCSVALALLVALHEGKGQAAATLEQPASSSHAQGTHLRLRRCSCSSWLDKECVYFCHLDIIWVNTPEQTAPYGLGNPPRRRRRSLPRRCQCSSARDPACATFCLRRPWTEAGAVPSRKSPADVFQTGKTGATTGELLQRLRDISTVKSLFAKRQQEAMREPRSTHSRWRKR

SEQ ID NO: 760691 - protein, 101 aa, Homo sapiens
LSLIAGRWQQALPAPVQPARSTAAMVSVPTTWCSVALALLVALHEGKGQAAATLEQPASSSHAQGTHLRLRRCSCSSWLDKECVYFCHLDIIWVNTPEFRC

SEQ ID NO: 760692 - protein, 101 aa, Homo sapiens; identical to SEQ ID NO: 760691

SEQ ID NO: 760693 - protein, 137 aa, Homo sapiens
MVSVPTTWCSVALALLVALHEGKGQAAATLEQPASSSHAQGTHLRLRRCSCSSWLDKECVYFCHLDIIWVNTPETEAGAVPSRKSPADVFQTGKTGATTGELLQRLRDISTVKSLFAKRQQEAMREPRSTHSRWRKR

SEQ ID NO: 760694 - protein, 104 aa, Homo sapiens
MVSVPTTWCSVALALLVALHEGKGQAAATLEQPASSSHAQGTHLRLRRCSCSSWLDKECVYFCHLDIIWVNTPEDISTVKSLFAKRQQEAMREPRSTHSRWRKR

SEQ ID NO: 760695 - protein, 148 aa, Homo sapiens
MVSVPTTWCSVALALLVALHEAPGYDKECVYFCHLDIIWVNTPEQTAPYGLGNPPRRRRRSLPRRCQCSSARDPACATFCLRRPWTEAGAVPSRKSPADVFQTGKTGATTGELLQRLRDISTVKSLFAKRQQEAMREPRSTHSRWRKR

SEQ ID NO: 760696 - protein, 160 aa, Homo sapiens
MVSVPTTWCSVALALLVALHEGKGQAAATLEQPASSSHAQGTHLRLRRCSCSSWLDKECVYFCHLDIIWVNTPEQTAPYGLGNPPRRRRRSLPRRCQCSSARDPACATFCLRRPWTEAGAVPSRKSPADVFQTGKTGATTGELLQRLRPGSGLFRGFEGS

SEQ ID NO: 760697 - protein, 145 aa, Homo sapiens
MVSVPTTWCSVALALLVALHEGKGQAAATLEQPASSSHAQGTHLRLRRCSCSSWLDKECVYFCHLDIIWVNTPEQTAPYGLGNPPRRRRRSLPRRCQCSSARDPACATFCLRRPWDISTVKSLFAKRQQEAMREPRSTHSRWRKR

SEQ ID NO: 760698 - protein, 101 aa, Homo sapiens; identical to SEQ ID NO: 760691

SEQ ID NO: 760699 - protein, 233 aa, Homo sapiens
MATPPFRLIRKMFSFKVSRWMGLACFRSLAASSPSIRQKKLMHKLQEEKAFREEMKIFREKIEDFREEMWTFRGKIHAFRGQILGFWEEERPFWEEEKTFWKEEKSFWEMEKSFREEEKTFWKKYRTFWKEDKAFWKEDNALWERDRNLLQEDKALWEEEKALWVEERALLEGEKALWEDKTSLWEEENALWEEERAFWMENNGHIAGEQMLEDGPHNANRGQRLLAFSRGRA

SEQ ID NO: 760700 - protein, 173 aa, Homo sapiens
APPPPAPPPPATAAAAAAPAAPRRPRCSAKGSKMAGWQSYVDNLMCDGCCQEAAIVGYCDAKYVWAATAGGVFQSITPIEIDMIVGKDREGFFTNGLTLGAKKCSVIRDSLYVDGDCTMDIRTKSQGGEPTYNVAVGRAGRVLVFVMGKEGVHGGGLNKKAYSMAKYLRDSGF

SEQ ID NO: 760701 - protein, 140 aa, Homo sapiens
MAGWQSYVDNLMCDGCCQEAAIVGYCDAKYVWAATAGGVFQSITPIEIDMIVGKDREGFFTNGLTLGAKKCSVIRDSLYVDGDCTMDIRTKSQGGEPTYNVAVGRAGRVLVFVMGKEGVHGGGLNKKAYSMAKYLRDSGF

SEQ ID NO: 760702 - protein, 173 aa, Homo sapiens; identical to SEQ ID NO: 760700

SEQ ID NO: 760703 - protein, 119 aa, Homo sapiens
MAAARRPPLSATATPNTSGQPRPGASFRALRGKDREGFFTNGLTLGAKKCSVIRDSLYVDGDCTMDIRTKSQGGEPTYNVAVGRAGRALVIVMGKEGVHGGTLNKKAYELALYLRRSDV

SEQ ID NO: 760704 - protein, 83 aa, Homo sapiens
LIEPSSQLVPAAAPAAPRRPRCSAKGSKMAGWQSYVDNLMCDGCCQEAAIVGYCDAKYVWAATAGGVFQSITPIEIDMIVNAQ

SEQ ID NO: 760705 - protein, 173 aa, Homo sapiens; identical to SEQ ID NO: 760700

SEQ ID NO: 760706 - protein, 173 aa, Homo sapiens; identical to SEQ ID NO: 760700

SEQ ID NO: 760707 - protein, 188 aa, Homo sapiens
MAGWQSYVDNLMCDGCCQEAAIVGYCDAKYVWAATAGGVFQSITPIEIDMIVGKDREGFFTNGLTLGAKKCSVIRDSLYVDGDCTMDIRTKSQGGEPTYNVAVGRAGRALVIVMGKEGVHGGTLNKKAYELALYLRRYPNITIWSVSSLFFIGPIFICSLSFYMKLHYCGLGCLVMNFFHMYSVPYYC

SEQ ID NO: 760708 - protein, 173 aa, Homo sapiens
APPPPAPPPPATAAAAAAPAAPRRPRCSAKGSKMAGWQSYVDNLMCDGCCQEAAIVGYCDAKYVWAATAGGVFQSITPIEIDMIVGKDREGFFTNGLTLGAKKCSVIRDSLYVDGDCTMDIRTKSQGGEPTYNVAVGRAGRALVIVMGKEGVHGGTLNKKAYELALYLRRSDV

SEQ ID NO: 760709 - protein, 129 aa, Homo sapiens [sequence omitted]

SEQ ID NO: 760710 - protein, 119 aa, Homo sapiens
MAAARRPPLSATATPNTSGQPRPGASFRALRGKDREGFFTNGLTLGAKKCSVIRDSLYVDGDCTMDIRTKSQGGEPTYNVAVGRAGRVLVFVMGKEGVHGGGLNKKAYSMAKYLRDSGF

SEQ ID NO: 760711 - protein, 173 aa, Homo sapiens; identical to SEQ ID NO: 760708

SEQ ID NO: 760712 - protein, 591 aa, Homo sapiens
VAAAAAAVRRAWTGSPKLGWAAGEEEPQELQLCQLGPSLETPAWLVHASRRPWLSMELSPRSPPEMLEESDCPSPLELKSAPSKKMWIKLRSLLRYMVKQLENGEINIEELKKNLEYTASLLEAVYIDETRQILDTEDELQELRSDAVPSEVRDWLASTFTQQARAKGRRAEEKPKFRSIVHAVQAGIFVERMFRRTYTSVGPTYSTAVLNCLKNLDLWCFDVFSLNQAADDHALRTIVFELLTRHNLISRFKIPTVFLMSFLDALETGYGKYKNPYHNQIHAADVTQTVHCFLLRTGMVHCLSEIELLAIIFAAAIHDYEHTGTTNSFHIQTKSECAIVYNDRSVLENHHISSVFRLMQDDEMNIFINLTKDEFVELRALVIEMVLATDMSCHFQQVKTMKTALQQLERIDKPKALSLLLHAADISHPTKQWLVHSRWTKALMEEFFRQGDKEAELGLPFSPLCDRTSTLVAQSQIGFIDFIVEPTFSVLTDVAEKSVQPLADEDSKSKNQPSFQWRQPSLDVEVGDPNPDVVSFRSTWVKRIQENKQKWKERAASGITNQMSIDELSPCEEEAPPSPAEDEHNQNGNLD

SEQ ID NO: 760713 - protein, 609 aa, Homo sapiens
VAAAAAAVRRAWTGSPKLGWAAGEEEPQELQLCQLGPSLETPAWLVHASRRPWLSMELSPRSPPEMLEESDCPSPLELKSAPSKKMWIKLRSLLRYMVKQLENGEINIEELKKNLEYTASLLEAVYIDETRQILDTEDELQELRSDAVPSEVRDWLASTFTQQARAKGRRAEEKPKFRSIVHAVQAGIFVERMFRRTYTSVGPTYSTAVLNCLKNLDLWCFDVFSLNQAADDHALRTIVFELLTRHNLISRFKIPTVFLMSFLDALETGYGKYKNPYHNQIHAADVTQTVHCFLLRTGMVHCLSEIELLAIIFAAAIHDYEHTGTTNSFHIQTKSECAIVYNDRSVLENHHISSVFRLMQDDEMNIFINLTKDEFVELRALVIEMVLATDMSCHFQQVKTMKTALQQLERIDKPKALSLLLHAADISHPTKQWLVHSRWTKALMEEFFRQGDKEAELGLPFSPLCDRTSTLVAQSQIGFIDFIVEPTFSVLTDVAEKSVQPLADEDSKSKNQPSFQWRQPSLDVEVGDPNPDVVSFRSTWVKRIQENKQKWKERAASGITNQMSIDECLPVLWREPSQARCPFLSSGSSLPPPCPRKGQSPGDCPPSFL

SEQ ID NO: 760714 - protein, 549 aa, Homo sapiens
RKAGAKEEVVPSWGPWGSWGQDFDTLKQETLIPMANPVPVQRSHLQGPILRLRYMVKQLENGEINIEELKKNLEYTASLLEAVYIDETRQILDTEDELQELRSDAVPSEVRDWLASTFTQQARAKGRRAEEKPKFRSIVHAVQAGIFVERMFRRTYTSVGPTYSTAVLNCLKNLDLWCFDVFSLNQAADDHALRTIVFELLTRHNLISRFKIPTVFLMSFLDALETGYGKYKNPYHNQIHAADVTQTVHCFLLRTGMVHCLSEIELLAIIFAAAIHDYEHTGTTNSFHIQTKSECAIVYNDRSVLENHHISSVFRLMQDDEMNIFINLTKDEFVELRALVIEMVLATDMSCHFQQVKTMKTALQQLERIDKPKALSLLLHAADISHPTKQWLVHSRWTKALMEEFFRQGDKEAELGLPFSPLCDRTSTLVAQSQIGFIDFIVEPTFSVLTDVAEKSVQPLADEDSKSKNQPSFQWRQPSLDVEVGDPNPDVVSFRSTWVKRIQENKQKWKERAASGITNQMSIDELSPCEEEAPPSPAEDEHNQNGNLD

SEQ ID NO: 760715 - protein, 591 aa, Homo sapiens; identical to SEQ ID NO: 760712

SEQ ID NO: 760716 - protein, 389 aa, Homo sapiens [sequence omitted]

SEQ ID NO: 760717 - protein, 103 aa, Homo sapiens
RFLCLSSVVVLLSHVFLSPALFLFWFFVLPSAVVALSCSLSRLFVAFLLLLCLVRSSYSSLWSGAFCLVFPALGRALSSLPLFSCLVSSLFFSSPFLLFVFLF

SEQ ID NO: 760718 - protein, 127 aa, Homo sapiens
DRVLRPTLGKKGWGRIALPKTCAPIQASVCFQPPALGGPWGLWVCGGRPLSMSLVLVWQVWFQNRRAKEKRLKKDAGRHRWGQFYKSVKRSRGSSKQEKESSAEDCGVSDSELSFRGEQGWRGQPRP

SEQ ID NO: 760719 - protein, 293 aa, Homo sapiens
MQVSNGFSQELALFGQHKIEDAAITYVSENEEIKHEEKPGKSIHHSKSHVGRGRIYYAKFINTNARTYNEPFPYIDPKKGPEIQGDWWSHGKALEPVFLPPYDSKSTQRSDFQKPSCPLVLPVKHSKMQKPSCGIVPLASPGTSAELQNNFIEYISFIHQYDARKTPNEPLQGKRHGAFVQREIKPGSRPTVPKGAEVLLNTPGSRSSEQSKKTEKGNSAESRMISPGLCQQNSQELLEPKTHLSETDVRQAAKACPSTLESREKTSGATQTTVGDALFTTHKPLNPPIKKSE

SEQ ID NO: 760720 - protein, 235 aa, Homo sapiens
MQVSNGFSQELALFGQHKIEDAAITYGDWWSHGKALEPVFLPPYDSKSTQRSDFQKPSCPLVLPVKHSKMQKPSCGIVPLASPGTSAELQNNFIEYISFIHQYDARKTPNEPLQGKRHGAFVQREIKPGSRPTVPKGAEVLLNTPGSRSSEQSKKTEKGNSAESRMISPGLCQQNSQELLEPKTHLSETDVRQAAKACPSTLESREKTSGATQTTVGDALFTTHKPLNPPIKKSE

SEQ ID NO: 760721 - protein, 287 aa, Homo sapiens [sequence omitted]

SEQ ID NO: 760722 - protein, 334 aa, Homo sapiens
MKHFLRMLIQVCLYFYCKFLWRCLKFVMRKLTGRCELQRICYNTKPGASRTMKIETSLRDSKSKLLQTSVSVHPDAIEKTIEDIMELKKINPDVNPQLGISLQACLLQIVGYRNLIADVEKLRREAYDSDNPQHEEMLLKLWKFLKPNTPLESRISKQWCEIGFQGDDPKTDFRGMGLLGLYNLQYFAERDATAAQQVLSDSLHPKCRDITKEEISKFSKAEWEKKRMDKAIGYSFAIVGINITDLAYNLLVSGALKTHFYNIAPEAPTLSHFQQTFCYLMHEFHKFWIEEDPMDIMEFNRVREKFRKRIIKQLQNPDMALCPHFAASEGLINM

SEQ ID NO: 760723 - protein, 239 aa, Homo sapiens
MVYSVAAYLNCRYLNGCYLNGCYLNGCYLNGCFEDNPQHEEMLLKLWKFLKPNTPLESRISKQWCEIGFQGDDPKTDFRGMGLLGLYNLQYFAERDATAAQQVLSDSLHPKCRDITKEEISKFSKAEWEKKRMDKAIGYSFAIVGINITDLAYNLLVSGALKTHFYNIAPEAPTLSHFQQTFCYLMHEFHKFWIEEDPMDIMEFNRVREKFRKRIIKQLQNPDMALCPHFAASEGLINM

SEQ ID NO: 760724 - protein, 106 aa, Homo sapiens
MTDLDLLINFTFPIQMGKQPAKMLSSFLRIKYYWSQHWWSILYRNDFSCRSVTFLTYLPSTKVGQPKPHGVLLSEASTTLLLRVDMWSGKPGLTHISYISYWDGEN

SEQ ID NO: 760725 - protein, 769 aa, Homo sapiens
MRQTPITQIGSFALTHHPHTTGQATAELSTITSCTITACPTNVVNLTTLRSSKTSTTKPCPPMSTNLTTTARHGITAEPMAPQALVWLPLKAPSPPTVPTVRTTMMSSNVMAGGIMMGPNTVGSISRVTPITIGGLTMADPNISVRIYPTIPLACPTTVRLPTMVGPTSPMDPIPTVSPSTTARLPTLAGSNTMSPSITKSPTVAGPTITKSTTMAGPVIMKPTSMESLLITERPFPLIPLWGPTSVGYLTITASTTKVITTPVSTTMATIPTTHSTTTTRPTGTETTISTKTTTARIIPVTSMATTSRALPNSLSHTASRSLIHDAPGPAASRTGVFPYHVAHPRGSAHSMTRSSSTIRSRVTQMSKKVHTQDISTKHSEDWGKEEGQFQKRKTGRLQRTRKKGHSTNLFQWLWEKLTFLIQGFREMIRNLTQSLAFETFIFFVVCLNTVMLVAQTFAEVEIRGEWYFMALDSIFFCIYVVEALLKIIALGLSYFFDFWNNLDFFIMAMAVLDFLLMQTHSFAIYHQSLFRILKVFKSLRALRAIRVLRRLSFLTSVQEVTGTLGQSLPSIAAILILMFTCLFLFSAVLRALFRKSDPKRFQNIFTTIFTLFTLLTLDDWSLIYMDSRAQGAWYIIPILIIYIIIQYFIFLNLVITVLVDSFQTALFKGLEKAKQERAARIQEKLLEDSLTELRAAEPKEVASEGTMLKRLIEKKFGTMTEKQQELLFHYLQLVASVEQEQQKFRSQAAVIDEIVDTTFEAGEEDFRN

SEQ ID NO: 760726 - protein, 90 aa, Homo sapiens
GFRHEELLLVGGLLAGDGDCPGVVTMFLSAVFFAKSKSKNILVRMVSEAGTGFCFNTKRNRLREKLTLLHYDPVVKQRVLFVEKKKIRSL

SEQ ID NO: 760727 - protein, 69 aa, Homo sapiens
RVLGGREQQGPVMMRGRMCEQDGKLQLRTFPGLQDHSVRPCPAAPPCRTCGCLRRGLRCLDSIAVLTDR

SEQ ID NO: 760728 - protein, 79 aa, Homo sapiens
AAAYYYYIRGRVDLAGDGDCPGVVTMFLSAVFFAKSKSNETKSPLRGKEKNTLPLNGGLKMTLIYKEKTEGGDTDSEIL

SEQ ID NO: 760729 - protein, 90 aa, Homo sapiens; identical to SEQ ID NO: 760726

SEQ ID NO: 760730 - protein, 73 aa, Homo sapiens
MAHLDFFLTYKWRAPKSKSLDQLSPNFLLRGRSETKSPLRGKEKNTLPLNGGLKMTLIYKEKTEGGDTDSEIL

SEQ ID NO: 760731 - protein, 90 aa, Homo sapiens; identical to SEQ ID NO: 760726

SEQ ID NO: 760732 - protein, 90 aa, Homo sapiens; identical to SEQ ID NO: 760726

SEQ ID NO: 760733 - protein, 79 aa, Homo sapiens
GFRHEELLLVGGLLAGDGDCPGVVTMFLSAVFFAKSKSNETKSPLRGKEKNTLPLNGGLKMTLIYKEKTEGGDTDSEIL

SEQ ID NO: 760734 - protein, 79 aa, Homo sapiens; identical to SEQ ID NO: 760733

SEQ ID NO: 760735 - protein, 79 aa, Homo sapiens; identical to SEQ ID NO: 760733

SEQ ID NO: 760736 - protein, 105 aa, Homo sapiens
MMSITLTPINPIFFCSKNIWPSYPAVLCVAHTPRQAHPCILLGGKCQAGATWPCLGHTPASGCGGWSAQPQHMDCYVKDDVPQENQDGFTREARAADAHDRGCIL

SEQ ID NO: 760737 - protein, 574 aa, Homo sapiens
VIVRVRKVGVPSRGSAEKPRPPRPPETQSAPERPRVAGQHQGQRPGLHWGPAPGLPSVAGRGTAAPCAAGSRFSPPHPSLRNSDCSRLPCGSLFFRKASVLSLHFKSRGLAQSPPLKSFPPSSGSCGKPRVLDCSSGCQRWQSQSVRCSSPAHSPLSLPLALPPFLSSSLSSSTAPSLSCLLSFLHRESNCAKPWLPRTNPERDPGTGTATPPKLDEAAGPVCARAWRRSAWEGTSGALETPGPSSFSMEPAQSGPFSQDSPQVLCGCWERSLLCKVDVRWIYVSEGTKTQRRHRQGSLRRGRMQAACWYVLFLLQPTVYLVTCANLTNGGKSELLKSGSSKSTLKHIWTESSKDLSISRLLSQTFRGKENDTDLDLRYDTPEPYSEQDLWDWLRNSTDLQEPRPRAKRRPIVKTGKFKKMFGWGDFHSNIKTVKLNLLITGKIVDHGNGTFSVYFRHNSTGQGNVSVSLVPPTKIVEFDLAQQTVIDAKDSKSFNCRIEYEKVDKATKNTLCNYDPSKTCYQEQTQSHVSWLCSKPFKVICIYISFYSTDYKLVQKVCPDYNYHSDTPYFPSG

SEQ ID NO: 760738 - protein, 273 aa, Homo sapiens
  misc_feature (17)..(17): Xaa can be any naturally occurring amino acid
GSSRKSINKWDIHALHXRNLVTCANLTNGGKSELLKSGSSKSTLKHIWTESSKDLSISRLLSQTFRGKENDTDLDLRYDTPEPYSEQDLWDWLRNSTDLQEPRPRAKRRPIVKTGKFKKMFGWGDFHSNIKTVKLNLLITGKIVDHGNGTFSVYFRHNSTGQGNVSVSLVPPTKIVEFDLAQQTVIDAKDSKSFNCRIEYEKVDKATKNTLCNYDPSKTCYQEQTQSHVSWLCSKPFKVICIYISFYSTDYKLVQKVCPDYNYHSDTPYFPSG

SEQ ID NO: 760739 - protein, 117 aa, Homo sapiens
EGSAVSQSVQRSSGHRFDASEGTAIIIPGNIDCWLVELIAKFEECASDTKAGPFVKWGLEAAHCQKEPGLHPFPLRHSLAFGASSLGLLVKCVPVLGFSFWISVPLRLSGPYCDLHT

SEQ ID NO: 760740 - protein, 118 aa, Homo sapiens
MRSFTTSRSSGPGAARARLCASRRCAPTGRHLSQKVQPIALSRRSSSMASTSCSPGRPLASLEPVWQPAINYIDSKFEDYLNAESRVNRCQMPGNRVQCCLYFIAPSGHGLPPSGRIG

SEQ ID NO: 760741 - protein, 117 aa, Homo sapiens
MRSFTTSRSSGPGAARARLCASRRCAPTGRHLSQKVQPIALSRRSSSMASTSCSPGRPLASLEPVWQPAINYIDSKFEDYLNAESRVNRCQMPGNRVQCCLYFIAPSGHGARPKGSM

SEQ ID NO: 760742 - protein, 108 aa, Homo sapiens
QSKVLIKEGGVQLLLTIVDTPGFGDAVDNSNCWQPAINYIDSKFEDYLNAESRVNRCQMPGNRVQCCLYFIAPSGHGSVHGKGLGAATPQQQRAHLLPRTWFLKTILL

SEQ ID NO: 760743 - protein, 141 aa, Homo sapiens
MRSFTTSRSSGPGAARARLCASRRCAPTGRHLSQKVQPIALSRRSSSMASTSCSPGRPLASLEPVWQPAINYIDSKFEDYLNAESRVNRCQMPGNRVQCCLYFIAPSGHGSVHGKGLGAATPQQQRAHLLPRTWFLKTILL

SEQ ID NO: 760744 - protein, 977 aa, Homo sapiens
LADSSPSNLQIIIKELLSMHHQPDPALTKEFDYLPPVDSRSSSGFVGLRNGGATCYMNAVFQQLYMQPGLPESLLSVDDDTDNPDDSVFYQVQSLFGHLMESKLQYYVPENFWKIFKMWNKELYVREQQDAYEFFTSLIDQMDEYLKKMGRDQIFKNTFQGIYSDQKICKDCPHRYEREEAFMALNLGVTSCQSLEISLDQFVRGEVLEGSNAYYCEKCKEKRITVKRTCIKSLPSVLVIHLMRFGFDWESGRSIKYDEQIRFPWMLNMEPYTVSGMARQDSSSEVGENGRSVDQGGGGSPRKKVALTENYELVGVIVHSGQAHAGHYYSFIKDRRGCGKGKWYKFNDTVIEEFDLNDETLEYECFGGEYRPKVYDQTNPYTDVRRRYWNAYMLFYQRVSDQNSPVLPKKSRVSVVRQEAEDLSLSAPSSPEISPQSSPRPHRPNNDRLSILTKLVKKGEKKGLFVEKMPARIYQMVRDENLKFMKNRDVYSSDYFSFVLSLASLNATKLKHPYYPCMAKVSLQLAIQFLFQTYLRTKKKLRVDTEEWIATIEALLSKSFDACQWLVEYFISSEGRELIKIFLLECNVREVRVAVATILEKTLDSALFYQDKLKSLHQLLEVLLALLDKDVPENCKNCAQYFFLFNTFVQKQGIRAGDLLLRHSALRHMISFLLGASRQNNQIRRWSSAQAREFGNLHNTVALLVLHSDVSSQRNVAPGIFKQRPPISIAPSSPLLPLHEEVEALLFMSEGKPYLLEVMFALRELTGSLLALIEMVVYCCFCNEHFSFTMLHFIKNQLETAPPHELKNTFQLLHEILVIEDPIQAERVKFVFETENGLLALMHHSNHVDSSRCYQCVKFLVTLAQKCPAAKEYFKENSHHWSWAVQWLQKKMSEHYWTPQSNVSNETSTGKTFQRTISAQDTLAYATALLNEKEQSGSSNGSESSPANENGDRHLQQGSESPMMIGELRSDLDDVDP

SEQ ID NO: 760745 - protein, 977 aa, Homo sapiens; identical to SEQ ID NO: 760744

SEQ ID NO: 760746 - protein, 977 aa, Homo sapiens; identical to SEQ ID NO: 760744

SEQ ID NO: 760747 - protein, 114 aa, Homo sapiens
CDLTGNTGMDGDLLTEAGTGVSNREEWAGEVTNSLVKSRLLCSYNKDFLSAQACLLLLQLRYDDEVKRVVAEPVELAQEFRKFDLNSPWEAFPVYRQPPESLKLEAGDKKPDAK

SEQ ID NO: 760748 - protein, 165 aa, Homo sapiens
PQLGGTAPNSITRLNPLKSHSYTHPYYSHQEYQSPELTISLIENNRNQIIQALLITILLGLYFTLLQASEYFESPFTISDGIYGSTFFVPQASTDFSHYWLNFPLSGYVELRYDDEVKRVVAEPVELAQEFRKFDLNSPWEAFPVYRQPPESLKLEAGDKKPDAK

SEQ ID NO: 760749 - protein, 264 aa, Homo sapiens
MAAAAVARLWWRGILGASALTRGTGRPSVLLLPVRRESAGADTRPTVRPRNDVAHKQLSAFGEYVAEILPKYVQQVQVSCFNELEVCIHPDGVIPVLTFLRDHTNAQFKSLVDLTAVDVPTRQNRFEIVYNLLSLRFNSRIRVKTYTDELTPIESAVSVFKAANWYEREIWDMFGVFFANHPDLRRILTDYGFEGHPFRKDFPLSGYVELRYDDEVKRVVAEPVELAQEFRKFDLNSPWEAFPVYRQPPESLKLEAGDKKPDAK

SEQ ID NO: 760750 - protein, 264 aa, Homo sapiens; identical to SEQ ID NO: 760749

SEQ ID NO: 760751 - protein, 277 aa, Homo sapiens
MYEAGVLSLHLSNMAAAAVARLWWRGILGASALTRGTGRPSVLLLPVRRESAGADTRPTVRPRNDVAHKQLSAFGEYVAEILPKYVQQVQVSCFNELEVCIHPDGVIPVLTFLRDHTNAQFKSLVDLTAVDVPTRQNRFEIVYNLLSLRFNSRIRVKTYTDELTPIESAVSVFKAANWYEREIWDMFGVFFANHPDLRRILTDYGFEGHPFRKDFPLSGYVELRYDDEVKRVVAEPVELAQEFRKFDLNSPWEAFPVYRQPPESLKLEAGDKKPDAK

SEQ ID NO: 760752 - protein, 264 aa, Homo sapiens; identical to SEQ ID NO: 760749

SEQ ID NO: 760753 - protein, 264 aa, Homo sapiens; identical to SEQ ID NO: 760749

SEQ ID NO: 760754 - protein, 264 aa, Homo sapiens; identical to SEQ ID NO: 760749

SEQ ID NO: 760755 - protein, 264 aa, Homo sapiens; identical to SEQ ID NO: 760749

SEQ ID NO: 760756 - protein, 295 aa, Homo sapiens
GQAVVARDVLRRESSGFPASTVLGRNPALVPHPGRPPIASPPSPLHRTLGADQGTGRPSVLLLPVRRESAGADTRPTVRPRNDVAHKQLSAFGEYVAEILPKYVQQVQVSCFNELEVCIHPDGVIPVLTFLRDHTNAQFKSLVDLTAVDVPTRQNRFEIVYNLLSLRFNSRIRVKTYTDELTPIESAVSVFKAANWYEREIWDMFGVFFANHPDLRRILTDYGFEGHPFRKDFPLSGYVELRYDDEVKRVVAEPVELAQEFRKFDLNSPWEAFPVYRQPPESLKLEAGDKKPDAK

SEQ ID NO: 760757 - protein, 335 aa, Homo sapiens
MAAAAVARLWWRGILGASALTRGTGRPSVLLLPVRRESAGADTRPTVRPRNDVAHKQLSAFGEYVAEILPKYVQQVQVILTNVIWVWVKKEAMFAGHVGVGRLVSKKLQIPPSQAWTFLSALNQVTPAEVSCSLSSSLFPLPSLSCVQVSCFNELEVCIHPDGVIPVLTFLRDHTNAQFKSLVDLTAVDVPTRQNRFEIVYNLLSLRFNSRIRVKTYTDELTPIESAVSVFKAANWYEREIWDMFGVFFANHPDLRRILTDYGFEGHPFRKDFPLSGYVELRYDDEVKRVVAEPVELAQEFRKFDLNSPWEAFPVYRQPPESLKLEAGDKKPDAK

SEQ ID NO: 760758 - protein, 203 aa, Homo sapiens
CGRSNIRMDTDLYLIEAGHLNLLEVCIHPDGVIPVLTFLRDHTNAQFKSLVDLTAVDVPTRQNRFEIVYNLLSLRFNSRIRVKTYTDELTPIESAVSVFKAANWYEREIWDMFGVFFANHPDLRRILTDYGFEGHPFRKDFPLSGYVELRYDDEVKRVVAEPVELAQEFRKFDLNSPWEAFPVYRQPPESLKLEAGDKKPDAK

SEQ ID NO: 760759 - protein, 187 aa, Homo sapiens
MAAAAVARLWWRGILGASALTRGTGRPSVLLLPVRRESAGADTRPTVRPRNDVAHKQLSAFGEYVAEILPKYVQQVQVSCFNELEVCIHPDGVIPVLTFLRDHTNAQFKSLVDLTAVDVPTRQNRFEGVYRCHHSSGGETLTVRSILTNSISLGPQDMAFGKTVFLELLDKLVGSMFSSSVTAEGKV

SEQ ID NO: 760760 - protein, 103 aa, Homo sapiens
MGKYGPGVKSARRALGLRVLLSFRPLPSLHLSNMAAAAVARLWWRGILGASALTRGEHGQPAETGVRRSGVPSAESSSGLIPRVCAFYLPVQGLGDPPFCCCR

SEQ ID NO: 760761 - protein, 301 aa, Homo sapiens
MAAAAVARLWWRGILGASALTRGEHGQPAETGVRRSGVPSAESSSGLIPRVCAFYLPCAGTGRPSVLLLPVRRESAGADTRPTVRPRNDVAHKQLSAFGEYVAEILPKYVQQVQVSCFNELEVCIHPDGVIPVLTFLRDHTNAQFKSLVDLTAVDVPTRQNRFEIVYNLLSLRFNSRIRVKTYTDELTPIESAVSVFKAANWYEREIWDMFGVFFANHPDLRRILTDYGFEGHPFRKDFPLSGYVELRYDDEVKRVVAEPVELAQEFRKFDLNSPWEAFPVYRQPPESLKLEAGDKKPDAK

SEQ ID NO: 760762 - protein, 130 aa, Homo sapiens
MAAAAVARLWWRGILGASALTRGTGRPSVLLLPVRRESAGADTRPTVRPRNDVAHKQLSAFGEYVAEILPKYVQQVQVSCFNELEVCIHPDGVIPVLTFLRDHTNAQFKSLVDLTAVDVPTRQNRFEGSV

SEQ ID NO: 760763 - protein, 110 aa, Homo sapiens
MGKYGPGVKSARRALGLRVLLSFRPLPSLHLSNMAAAAVARLWWRGILGASALTRGTGRPSVLLLPVRRESAGADTRPTVRPRNDVAHKQLSAFGEYVAEILPKCPASMS

SEQ ID NO: 760764 - protein, 223 aa, Homo sapiens
MRGPGQADCAVAIGRPLGEVVTLRVLESSLNCSAGDMLLLWGRLTWRKMCRKLLDMTFSSKTNTLVVRQRCGRPGGGVLLRYGSQLAPETFYRECDMQLFGPWGEIVSPSLSPATSNAGGCRLFINVAPHARIAIHALATNMGAGTEGANASYILIRDTHSLRTTAFHGQQVLYWESESSQAEMEFSEGFLKAQASLRGQYWTLQSWVPEMQDPQSWKGKEGT

SEQ ID NO: 760765 - protein, 182 aa, Homo sapiens
MRGPGQADCAVAIGRPLGEVVTLRVLESSLNCSAGDMLLLWGRLTWRKMCRKLLDMTFSSKTNTLVVRQRCGRPGGGVLLRYGSQLAPETFYRGMARPSPPPLGAPVLAGRLGGCCWGWGQSQWGSGKIRRELTEMEGTGVGQCQSARAREGSQDECYIPPFWDRAARWTDVGHGPHPQSVP

SEQ ID NO: 760766 - protein, 1362 aa, Homo sapiens
METGLGEVAVPRFSVSCLQALEPQAVSSYLSPGAPLKGRPPSPGFQRQRQRQRRAAGGILHLELLVAVGPDVFQAHQEDTERYVLTNLNIGAELLRDPSLGAQFRVHLVKMVILTEPEGAPNITANLTSSLLSVCGWSQTINPEDDTDPGHADLVLYITRFDLELPDGNRQVRGVTQLGGACSPTWSCLITEDTGFDLGVTIAHEIGHSFGLEHDGAPGSGCGPSGHVMASDGAAPRAGLAWSPCSRRQLLSLLRPVPPSPLPLLATHLCAGRSLSLGPSQEPAPGGGRGPRTPVPTHKRPRFQTLPSSCPLLRPASSRCTPRDWPGLSRALSQRRTGALRVGPAAASTRVRGAPAGCAAWPLLQRQRAVPRGLRPQGCRLHLRQGAPGESAGGGLGLAVRSLRITQLTSPQTCMDMCQALSCHTDPLDQSSCSRLLVPLLDGTECGVEKWCSKGRCRSLVELTPIAAVHGRWSSWGPRSPCSRSCGGGVVTRRRQCNNPRPAFGGRACVGADLQAEMCNTQACEKTQLEFMSQQCARTDGQPLRSSPGGASFYHWGAAVPHSQGDALCRHMCRAIGESFIMKRGDSFLDGTRCMPSGPREDGTLSLCVSGSCRTFGCDGRMDSQQVWDRCQVCGGDNSTCSPRKGSFTAGRAREYVTFLTVTPNLTSVYIANHRPLFTHLAVRIGGRYVVAGKMSISPNTTYPSLLEDGRVEYRVALTEDRLPRLEEIRIWGPLQEDADIQVGGVRAQLMHITGGAGLALENETCVPGADGLEAPVTEGPGSVDEKLPAPEPCVGMSCPPGWGHLDATSAGEKAPSPWGSIRTGAQAAHVWTPAAGSCSVSCGRGLMELRFLCMDSALRVPVQEELCGLASKPGSRREVCQAVPCPARWQYKLAACSVSCGRGVVRRILYCARAHGEDDGEEILLDTQCQGLPRPEPQEACSLEPCPPRWKVMSLGPCSASCGLGTARRSVACVQLDQGQDVEVDEAACAALVRPEASVPCLIADCTYRWHVGTWMECSVSCGDGIQRRRDTCLGPQAQAPVPADFCQHLPKPVTVRGCWAGPCVGQGTPSLVPHEEAAAPGRTTATPAGASLEWSQARGLLFSPAPQPRRLLPGPQENSVQSSACGRQHLEPTGTIDMRGPGQADCAVAIGRPLGEVVTLRVLESSLNCSAGDMLLLWGRLTWRKMCRKLLDMTFSSKTNTLVVRQRCGRPGGGVLLRYGSQLAPETFYRECDMQLFGPWGEIVSPSLSPATSNAGGCRLFINVAPHARIAIHALATNMGAGTEGANASYILIRDTHSLRTTAFHGQQVLYWESESSQAEMEFSEGFLKAQASLRGQYWTLQSWVPEMQDPQSWKGKEGT

SEQ ID NO: 760767 - protein, 66 aa, Homo sapiens
MQEEVGRLPRGGGHDSDPQGTHWTRPEALCLQVYRRYGEEYGNLTRPDITFTYFQPKPRQAWVWAA

SEQ ID NO: 760768 - protein, 1427 aa, Homo sapiens
MHQRHPRARCPPLCVAGILACGFLLGCWGPSHFQQSCLQALEPQAVSSYLSPGAPLKGRPPSPGFQRQRQRQRRAAGGILHLELLVAVGPDVFQAHQEDTERYVLTNLNIGAELLRDPSLGAQFRVHLVKMVILTEPEGAPNITANLTSSLLSVCGWSQTINPEDDTDPGHADLVLYITRFDLELPDGNRQVRGVTQLGGACSPTWSCLITEDTGFDLGVTIAHEIGHSFGLEHDGAPGSGCGPSGHVMASDGAAPRAGLAWSPCSRRQLLSLLSAGRARCVWDPPRPQPGSAGHPPDAQPGLYYSANEQCRVAFGPKAVACTFAREHLDMCQALSCHTDPLDQSSCSRLLVPLLDGTECGVEKWCSKGRCRSLVELTPIAAVHGRWSSWGPRSPCSRSCGGGVVTRRRQCNNPRPAFGGRACVGADLQAEMCNTQACEKTQLEFMSQQCARTDGQPLRSSPGGASFYHWGAAVPHSQGDALCRHMCRAIGESFIMKRGDSFLDGTRCMPSGPREDGTLSLCVSGSCRTFGCDGRMDSQQVWDRCQVCGGDNSTCSPRKGSFTAGRAREYVTFLTVTPNLTSVYIANHRPLFTHLAVRIGGRYVVAGKMSISPNTTYPSLLEDGRVEYRVALTEDRLPRLEEIRIWGPLQEDADIQVYRRYGEEYGNLTRPDITFTYFQPKPRQAWVWAAVRGPCSVSCGAGLRWVNYSCLDQARKELVETVQCQGSQQPPAWPEACVLEPCPPYWAVGDFGPCSASCGGGLRERPVRCVEAQGSLLKTLPPARCRAGAQQPAVALETCNPQPCPARWEVSEPSSCTSAGGAGLALENETCVPGADGLEAPVTEGPGSVDEKLPAPEPCVGMSCPPGWGHLDATSAGEKAPSPWGSIRTGAQAAHVWTPAAGSCSVSCGRGLMELRFLCMDSALRVPVQEELCGLASKPGSRREVCQAVPCPARWQYKLAACSVSCGRGVVRRILYCARAHGEDDGEEILLDTQCQGLPRPEPQEACSLEPCPPRWKVMSLGPCSASCGLGTARRSVACVQLDQGQDVEVDEAACAALVRPEASVPCLIADCTYRWHVGTWMECSVSCGDGIQRRRDTCLGPQAQAPVPADFCQHLPKPVTVRGCWAGPCVGQGTPSLVPHEEAAAPGRTTATPAGASLEWSQARGLLFSPAPQPRRLLPGPQENSVQSSACGRQHLEPTGTIDMRGPGQADCAVAIGRPLGEVVTLRVLESSLNCSAGDMLLLWGRLTWRKMCRKLLDMTFSSKTNTLVVRQRCGRPGGGVLLRYGSQLAPETFYRECDMQLFGPWGEIVSPSLSPATSNAGGCRLFINVAPHARIAIHALATNMGAGTEGANASYILIRDTHSLRTTAFHGQQVLYWESESSQAEMEFSEGFLKAQASLRGQYWTLQSWVPEMQDPQSWKGKEGT

SEQ ID NO: 760769 - protein, 320 aa, Homo sapiens
MELLSPPLRDVDLTAPDGSLCSFATTDDFYDDPCFDSPDLRFFEDLDPRLMHVGALLKPEEHSHFPAAVHPAPGAREDEHVRAPSGHHQAGRCLLWACKACKRKTTNADRRKAATMRERRRLSKVNEAFETLKRCTSSNPNQRLPKVEILRNAIRYIEGLQALLRDQDAAPPGAAAAFYAPGPLPPGRGGEHYSGDSDASSPRSNCSDGMMDYSGPPSGARRRNCYEGAYYNEAPSEPRPGKSAAVSSLDCLSSIVERISTESPAAPALLLADVPSESPPRRQEAAAPSEGESSGDPTQSPDAAPQCPAGANPNPIYQVL

SEQ ID NO: 760770 - protein, 318 aa, Homo sapiens
PRHNPRLVRGWVCNRPRLCSFATTDDFYDDPCFDSPDLRFFEDLDPRLMHVGALLKPEEHSHFPAAVHPAPGAREDEHVRAPSGHHQAGRCLLWACKACKRKTTNADRRKAATMRERRRLSKVNEAFETLKRCTSSNPNQRLPKVEILRNAIRYIEGLQALLRDQDAAPPGAAAAFYAPGPLPPGRGGEHYSGDSDASSPRSNCSDGMMDYSGPPSGARRRNCYEGAYYNEAPSEPRPGKSAAVSSLDCLSSIVERISTESPAAPALLLADVPSESPPRRQEAAAPSEGESSGDPTQSPDAAPQCPAGANPNPIYQVL

SEQ ID NO: 760771 - protein, 346 aa, Homo sapiens
GVGREAKDAVAGAAAWAFGAYLVSHRLPGYESVTVARIVPLLRGISLSTISDRAFYDDPCFDSPDLRFFEDLDPRLMHVGALLKPEEHSHFPAAVHPAPGAREDEHVRAPSGHHQAGRCLLWACKACKRKTTNADRRKAATMRERRRLSKVNEAFETLKRCTSSNPNQRLPKVEILRNAIRYIEGLQALLRDQDAAPPGAAAAFYAPGPLPPGRGGEHYSGDSDASSPRSNCSDGMMDYSGPPSGARRRNCYEGAYYNEAPSEPRPGKSAAVSSLDCLSSIVERISTESPAAPALLLADVPSESPPRRQEAAAPSEGESSGDPTQSPDAAPQCPAGANPNPIYQVL

SEQ ID NO: 760772 - protein, 119 aa, Homo sapiens
  misc_feature (5)..(5): Xaa can be any naturally occurring amino acid
LVYRXGVRTRRALRGGVRCLGWWPPTRPRDGAPRVPRAQKIELKCPPPNSALKATSLEVGEAGELKFPPPPHRARTQRGFFHAAPFSETHCDGRSVFLGGPELNLEGLGSAFSRPPPWG

SEQ ID NO: 760773 - protein, 320 aa, Homo sapiens; identical to SEQ ID NO: 760769

SEQ ID NO: 760774 - protein, 325 aa, Homo sapiens
MELLSPPLRDVDLTAPDGSLCSFATTDDFYDDPCFDSPDLRFFEDLDPRLMHVGALLKPEEHSHFPAAVHPAPGAREDEHVRAPSGHHQAGRCLLWACKACKRKTTNADRRKAATMRERRRLSKVNEAFETLKRCTSSNPNQRLPKVEILRNAIRYIEGLQALLRDQDAAPPGAAAAFYAPGPLPPGRGGEHYSGDSDASSPRSNCSDGMMDYSGPPSGARRRNCYEGAYYNEAPSEPRPGKSAAVSSLDCLSSIVERISTESPAAPALLLADVPSESPPRRQEAAAPSEGESSGDPNPVHSGPKCSRCNRNPPPTRFPVQDHFL

SEQ ID NO: 760775 - protein, 282 aa, Homo sapiens
MELLSPPLRDVDLTAPDGSLCSFATTDDFYDDPCFDSPDLRFFEDLDPRLMHVGALLKPEEHSHFPAAVHPAPGAREDEHRRRLSKVNEAFETLKRCTSSNPNQRLPKVEILRNAIRYIEGLQALLRDQDAAPPGAAAAFYAPGPLPPGRGGEHYSGDSDASSPRSNCSDGMMDYSGPPSGARRRNCYEGAYYNEAPSEPRPGKSAAVSSLDCLSSIVERISTESPAAPALLLADVPSESPPRRQEAAAPSEGESSGDPTQSPDAAPQCPAGANPNPIYQVL

SEQ ID NO: 760776 - protein, 836 aa, Homo sapiens
MARLGNCSLTWAALIILLLPGSLEECGHISVSAPIVHLGDPITASCIIKQNCSHLDPEPQILWRLGAELQPGGRQQRLSDGTQESIITLPHLNHTQAFLSCCLNWGNSLQILDQVELRAGYPPAIPHNLSCLMNLTTSSLICQWEPGPETHLPTSFTLKSFKSRGNCQTQGDSILDCVPKDGQSHCCIPRKHLLLYQNMGIWVQAENALGTSMSPQLCLDPMDVVKLEPPMLRTMDPSPEAAPPQAGCLQLCWEPWQPGLHINQKCELRHKPQRGEASWALVGPLPLEALQYELCGLLPATAYTLQIRCIRWPLPGHWSDWSPSLELRTTERAPTVRLDTWWRQRQLDPRTVQLFWKPVPLEEDSGRIQGYVVSWRPSGQAGAILPLCNTTELSCTFHLPSEAQEVALVAYNSAGTSRPTPVVFSESRGPALTRLHAMARDPHSLWVGWEPPNPWPQGYVIEWGLGPPSASNSNKTWRMEQNGRATGFLLKENIRPFQLYEIIVTPLYQDTMGPSQHVYAYSQEMAPSHAPELHLKHIGKTWAQLEWVPEPPELGKSPLTHYTIFWTNAQNQSFSAILNASSRGFVLHGLEPASLYHIHLMAASQAGATNSTVLTLMTLTPEGSELHIILGLFGLLLLLTCLCGTAWLCCSPNRKNPLWPSVPDPAHSSLGSWVPTIMEEDAFQLPGLGTPPITKLTVLEEDEKKPVPWESHNSSETCGLPTLVQTYVLQGDPRAVSTQPQSQSGTSDQVLYGQLLGSPTSPGPGHYLRCDSTQPLLAGLTPSPKSYENLWFQASPLGTLVTPAPSQEDDCVFGPLLNFPLLQGIRVHGMEALGSF

SEQ ID NO: 760777 - protein, 863 aa, Homo sapiens
MARLGNCSLTWAALIILLLPGSLEECGHISVSAPIVHLGDPITASCIIKQNCSHLDPEPQILWRLGAELQPGGRQQRLSDGTQESIITLPHLNHTQAFLSCCLNWGNSLQILDQVELRAGYPPAIPHNLSCLMNLTTSSLICQWEPGPETHLPTSFTLKSFKSRGNCQTQGDSILDCVPKDGQSHCCIPRKHLLLYQNMGIWVQAENALGTSMSPQLCLDPMDVVKLEPPMLRTMDPSPEAAPPQAGCLQLCWEPWQPGLHINQKCELRHKPQRGEASWALVGPLPLEALQYELCGLLPATAYTLQIRCIRWPLPGHWSDWSPSLELRTTERAPTVRLDTWWRQRQLDPRTVQLFWKPVPLEEDSGRIQGYVVSWRPSGQAGAILPLCNTTELSCTFHLPSEAQEVALVAYNSAGTSRPTPVVFSESRGPALTRLHAMARDPHSLWVGWEPPNPWPQGYVIEWGLGPPSASNSNKTWRMEQNGRATGFLLKENIRPFQLYEIIVTPLYQDTMGPSQHVYAYSQEMAPSHAPELHLKHIGKTWAQLEWVPEPPELGKSPLTHYTIFWTNAQNQSFSAILNASSRGFVLHGLEPASLYHIHLMAASQAGATNSTVLTLMTLTPEGSELHIILGLFGLLLLLTCLCGTAWLCCSPNRKNPLWPSVPDPAHSSLGSWVPTIMEELPGPRQGQWLGQTSEMSRALTPHPCVQDAFQLPGLGTPPITKLTVLEEDEKKPVPWESHNSSETCGLPTLVQTYVLQGDPRAVSTQPQSQSGTSDQVLYGQLLGSPTSPGPGHYLRCDSTQPLLAGLTPSPKSYENLWFQASPLGTLVTPAPSQEDDCVFGPLLNFPLLQGIRVHGMEALGSF

SEQ ID NO: 760778 - protein, 769 aa, Homo sapiens
MARLGNCSLTWAALIILLLPGSLEECGHISVSAPIVHLGDPITASCIIKQNCSHLDPEPQILWRLGAELQPGGRQQRLSDGTQESIITLPHLNHTQAFLSCCLNWGNSLQILDQVELRAGYPPAIPHNLSCLMNLTTSSLICQWEPGPETHLPTSFTLKSFKSRGNCQTQGDSILDCVPKDGQSHCCIPRKHLLLYQNMGIWVQAENALGTSMSPQLCLDPMDVVKLEPPMLRTMDPSPEAAPPQAGCLQLCWEPWQPGLHINQKCELRHKPQRGEASWALVGPLPLEALQYELCGLLPATAYTLQIRCIRWPLPGHWSDWSPSLELRTTERAPTVRLDTWWRQRQLDPRTVQLFWKPVPLEEDSGRIQGYVVSWRPSGQAGAILPLCNTTELSCTFHLPSEAQEVALVAYNSAGTSRPTPVVFSESRGPALTRLHAMARDPHSLWVGWEPPNPWPQGYVIEWGLGPPSASNSNKTWRMEQNGRATGFLLKENIRPFQLYEIIVTPLYQDTMGPSQHVYAYSQEMAPSHAPELHLKHIGKTWAQLEWVPEPPELGKSPLTHYTIFWTNAQNQSFSAILNASSRGFVLHGLEPASLYHIHLMAASQAGATNSTVLTLMTLTPAGRIPSGQVSQTQLTAAWAPGCPQSWRRMPSSCPALARHPSPSSQCWRRMKRSRCPGSPITAQRPVASPLWSRPMCSRGTQEQFPPSPNPSLAPAIRSFMGSCWAAPQAQGQGTISAVTPLSPSWRASPPAPSPMRTSGSRPAPWGPW

SEQ ID NO: 760779 - protein, 783 aa, Homo sapiens
MARLGNCSLTWAALIILLLPGSLEECGHISVSAPIVHLGDPITASCIIKQNCSHLDPEPQILWRLGAELQPGGRQQRLSDGTQESIITLPHLNHTQAFLSCCLNWGNSLQILDQVELRAGYPPAIPHNLSCLMNLTTSSLICQWEPGPETHLPTSFTLKSFKSRGNCQTQGDSILDCVPKDGQSHCCIPRKHLLLYQNMGIWVQAENALGTSMSPQLCLDPMDVVKLEPPMLRTMDPSPEAAPPQAGCLQLCWEPWQPGLHINQKCELRHKPQRGEASWALVGPLPLEALQYELCGLLPATAYTLQIRCIRWPLPGHWSDWSPSLELRTTERAPTVRLDTWWRQRQLDPRTVQLFWKPVPLEEDSGRIQGYVVSWRPSGQAGAILPLCNTTELSCTFHLPSEAQEVALVAYNSAGTSRPTPVVFSESRGPALTRLHAMARDPHSLWVGWEPPNPWPQGYVIEWGLGPPSASNSNKTWRMEQNGRATGFLLKENIRPFQLYEIIVTPLYQDTMGPSQHVYAYSQEMAPSHAPELHLKHIGKTWAQLEWVPEPPELGKSPLTHYTIFWTNAQNQSFSAILNASSRGFVLHGLEPASLYHIHLMAASQAGATNSTVLTLMTLTPEGSELHIILGLFGLLLLLTCLCGTAWLCCSPNRKNPLWPSVPDPAHSSLGSWVPTIMEEDAFQLPGLGTPPITKLTVLEEDEKKPVPWESHNSSETCGLPTLVQTYVLQGDPRAVSTQPQSQSGTSDQAGPPRRSAYFKDQIMLHPAPPNGLLCLFPITSVL

SEQ ID NO: 760780 - protein, 161 aa, Homo sapiens
SWPELWDTGFLLKENIRPFQLYEIIVTPLYQDTMGPSQHVYAYSQEMAPSHAPELHLKHIGKTWAQLEWVPEPPELGKSPLTHYTIFWTNAQNQSFSAILNASSRGFVLHGLEPASLYHIHLMAASQAGATNSTVLTLMTLTPEGRSYTYPKQCTGILRVL

SEQ ID NO: 760781 - protein, 704 aa, Homo sapiens
MNLTTSSLICQWEPGPETHLPTSFTLKSFKSRGNCQTQGDSILDCVPKDGQSHCCIPRKHLLLYQNMGIWVQAENALGTSMSPQLCLDPMDVVKLEPPMLRTMDPSPEAAPPQAGCLQLCWEPWQPGLHINQKCELRHKPQRGEASWALVGPLPLEALQYELCGLLPATAYTLQIRCIRWPLPGHWSDWSPSLELRTTERAPTVRLDTWWRQRQLDPRTVQLFWKPVPLEEDSGRIQGYVVSWRPSGQAGAILPLCNTTELSCTFHLPSEAQEVALVAYNSAGTSRPTPVVFSESRGPALTRLHAMARDPHSLWVGWEPPNPWPQGYVIEWGLGPPSASNSNKTWRMEQNGRATGFLLKENIRPFQLYEIIVTPLYQDTMGPSQHVYAYSQEMAPSHAPELHLKHIGKTWAQLEWVPEPPELGKSPLTHYTIFWTNAQNQSFSAILNASSRGFVLHGLEPASLYHIHLMAASQAGATNSTVLTLMTLTPEGSELHIILGLFGLLLLLTCLCGTAWLCCSPNRKNPLWPSVPDPAHSSLGSWVPTIMEEDAFQLPGLGTPPITKLTVLEEDEKKPVPWESHNSSETCGLPTLVQTYVLQGDPRAVSTQPQSQSGTSDQVLYGQLLGSPTSPGPGHYLRCDSTQPLLAGLTPSPKSYENLWFQASPLGTLVTPAPSQEDDCVFGPLLNFPLLQGIRVHGMEALGSF

SEQ ID NO: 760782 - protein, 836 aa, Homo sapiens; identical to SEQ ID NO: 760776

SEQ ID NO: 760783 - protein, 836 aa, Homo sapiens; identical to SEQ ID NO: 760776

SEQ ID NO: 760784 - protein, 873 aa, Homo sapiens
MARLGNCSLTWAALIILLLPGSLEECGHISVSAPIVHLGDPITASCIIKQNCSHLDPEPQILWRLGAELQPGGRQQRLSDGTQESIITLPHLNHTQAFLSCCLNWGNSLQILDQVELRAGYPPAIPHNLSCLMNLTTSSLICQWEPGPETHLPTSFTLKSFKSRGNCQTQGDSILDCVPKDGQSHCCIPRKHLLLYQNMGIWVQAENALGTSMSPQLCLDPMDVVKLEPPMLRTMDPSPEAAPPQAGCLQLCWEPWQPGLHINQKCELRHKPQRGEASWALVGPLPLEALQYELCGLLPATAYTLQIRCIRWPLPGHWSDWSPSLELRTTERAPTVRLDTWWRQRQLDPRTVQLFWKPVPLEEDSGRIQGYVVSWRPSGQAGAILPLCNTTELSCTFHLPSEAQEVALVAYNSAGTSRPTPVVFSESRGPALTRLHAMARDPHSLWVGWEPPNPWPQGYVIEWGLGPPSASNSNKTWRMEQNGRATGFLLKENIRPFQLYEIIVTPLYQDTMGPSQHVYAYSQEMAPSHAPELHLKHIGKTWAQLEWVPEPPELGKSPLTHYTIFWTNAQNQSFCESILSSPTAPEGLEGGAQLPRRQFTIQAYADRTPLPAAILNASSRGFVLHGLEPASLYHIHLMAASQAGATNSTVLTLMTLTPEGSELHIILGLFGLLLLLTCLCGTAWLCCSPNRKNPLWPSVPDPAHSSLGSWVPTIMEEDAFQLPGLGTPPITKLTVLEEDEKKPVPWESHNSSETCGLPTLVQTYVLQGDPRAVSTQPQSQSGTSDQVLYGQLLGSPTSPGPGHYLRCDSTQPLLAGLTPSPKSYENLWFQASPLGTLVTPAPSQEDDCVFGPLLNFPLLQGIRVHGMEALGSF

SEQ ID NO: 760785 - protein, 399 aa, Homo sapiens [sequence omitted]

SEQ ID NO: 760786 - protein, 368 aa, Homo sapiens
STMEDVSTWRMEQNGRATGFLLKENIRPFQLYEIIVTPLYQDTMGPSQHVYAYSQEMAPSHAPELHLKHIGKTWAQLEWVPEPPELGKSPLTHYTIFWTNAQNQSFSAILNASSRGFVLHGLEPASLYHIHLMAASQAGATNSTVLTLMTLTPEGSELHIILGLFGLLLLLTCLCGTAWLCCSPNRKNPLWPSVPDPAHSSLGSWVPTIMEEDAFQLPGLGTPPITKLTVLEEDEKKPVPWESHNSSETCGLPTLVQTYVLQGDPRAVSTQPQSQSGTSDQVLYGQLLGSPTSPGPGHYLRCDSTQPLLAGLTPSPKSYENLWFQASPLGTLVTPAPSQEDDCVFGPLLNFPLLQGIRVHGMEALGSF

SEQ ID NO: 760787 - protein, 392 aa, Homo sapiens
RSDYAARSDYAARSDYAARSDYAARSDYAARSDYAARSDYAAQSDYAENIRPFQLYEIIVTPLYQDTMGPSQHVYAYSQEMAPSHAPELHLKHIGKTWAQLEWVPEPPELGKSPLTHYTIFWTNAQNQSFSAILNASSRGFVLHGLEPASLYHIHLMAASQAGATNSTVLTLMTLTPEGSELHIILGLFGLLLLLTCLCGTAWLCCSPNRKNPLWPSVPDPAHSSLGSWVPTIMEEDAFQLPGLGTPPITKLTVLEEDEKKPVPWESHNSSETCGLPTLVQTYVLQGDPRAVSTQPQSQSGTSDQVLYGQLLGSPTSPGPGHYLRCDSTQPLLAGLTPSPKSYENLWFQASPLGTLVTPAPSQEDDCVFGPLLNFPLLQGIRVHGMEALGSF

SEQ ID NO: 760788 - protein, 312 aa, Homo sapiens
MAPSHAPELHLKHIGKTWAQLEWVPEPPELGKSPLTHYTIFWTNAQNQSFSAILNASSRGFVLHGLEPASLYHIHLMAASQAGATNSTVLTLMTLTPEGSELHIILGLFGLLLLLTCLCGTAWLCCSPNRKNPLWPSVPDPAHSSLGSWVPTIMEEDAFQLPGLGTPPITKLTVLEEDEKKPVPWESHNSSETCGLPTLVQTYVLQGDPRAVSTQPQSQSGTSDQVLYGQLLGSPTSPGPGHYLRCDSTQPLLAGLTPSPKSYENLWFQASPLGTLVTPAPSQEDDCVFGPLLNFPLLQGIRVHGMEALGSF

SEQ ID NO: 760789 - protein, 593 aa, Homo sapiens
MARLGNCSLTWAALIILLLPGSLEECGHISVSAPIVHLGDPITASCIIKQNCSHLDPEPQILWRLGAELQPGGRQQRLSDGTQESIITLPHLNHTQAFLSCCLNWGNSLQILDQVELRAGYPPAIPHNLSCLMNLTTSSLICQWEPGPETHLPTSFTLKSFKSRGNCQTQGDSILDCVPKDGQSHCCIPRKHLLLYQNMGIWVQAENALGTSMSPQLCLDPMDVVKLEPPMLRTMDPSPEAAPPQAGCLQLCWEPWQPGLHINQKCELRHKPQRGEASWALVGPLPLEALQYELCGLLPATAYTLQIRCIRWPLPGHWSDWSPSLELRTTERAPTVRLDTWWRQRQLDPRTVQLFWKPVPLEEDSGRIQGYVVSWRPSGQAGAILPLCNTTELSCTFHLPSEAQEVALVAYNSAGTSRPTPVVFSESRGPALTRLHAMARDPHSLWVGWEPPNPWPQGYVIEWGLGPPSASNSNKTWRMEQNGRATGFLLKENIRPFQLYEIIVTPLYQDTMGPSQHVYAYSQEMAPSHAPELHLKHIGKTWAQLEWVPEPPELGKSPLTHYTIFWTNAQNQSFSLHSGVEREGPGHWPLAGK

SEQ ID NO: 760790 - protein, 586 aa, Homo sapiens
MARLGNCSLTWAALIILLLPGSLEECGHISVSAPIVHLGDPITASCIIKQNCSHLDPEPQILWRLGAELQPGGRQQRLSDGTQESIITLPHLNHTQAFLSCCLNWGNSLQILDQVELRAGYPPAIPHNLSCLMNLTTSSLICQWEPGPETHLPTSFTLKSFKSRGNCQTQGDSILDCVPKDGQSHCCIPRKHLLLYQNMGIWVQAENALGTSMSPQLCLDPMDVVKLEPPMLRTMDPSPEAAPPQAGCLQLCWEPWQPGLHINQKCELRHKPQRGEASWALVGPLPLEALQYELCGLLPATAYTLQIRCIRWPLPGHWSDWSPSLELRTTERAPTVRLDTWWRQRQLDPRTVQLFWKPVPLEEDSGRIQGYVVSWRPSGQAGAILPLCNTTELSCTFHLPSEAQEVALVAYNSAGTSRPTPVVFSESRGPALTRLHAMARDPHSLWVGWEPPNPWPQGYVIEWGLGPPSASNSNKTWRMEQNGRATGFLLKENIRPFQLYEIIVTPLYQDTMGPSQHVYAYSQEMAPSHAPELHLKHIGKTWAQLEWVPEPPELGKSPLTHYTIFWTNAQNQSFSLHSQALRVCPE

SEQ ID NO: 760791 - protein, 201 aa, Homo sapiens
NPTTGHCGTAWLCCSPYSRKNPLWPSVPDPAHSSLGSWVPTIMEEDAFQLPGLGTPPITKLTVLEEDEKKPVPWESHNSSETCGLPTLVQTYVLQGDPRAVSTQPQSQSGTSDQVLYGQLLGSPTSPGPGHYLRCDSTQPLLAGLTPSPKSYENLWFQASPLGTLVTPAPSQEDDCVFGPLLNFPLLQGIRVHGMEALGSF

SEQ ID NO: 760792 - protein, 333 aa, Homo sapiens
MARLGNCSLTWAALIILLLPGSLEECGHISVSAPIVHLGDPITASCIIKQNCSHLDPEPQILWRLGAELQPGGRQQRLSDGTQESIITLPHLNHTQAFLSCCLNWGNSLQILDQVELRAGYPPAIPHNLSCLMNLTTSSLICQWEPGPETHLPTSFTLKSFKSRGNCQTQGDSILDCVPKDGQSHCCIPRKHLLLYQNMGIWVQAENALGTSMSPQLCLDPMDVVKLEPPMLRTMDPSPEAAPPQAGCLQLCWEPWQPGLHINQKCELRHKPQRGEASWALVGPLPLEALQYELCGLLPATAYTLTAPNGMYPPPPQQQPPPPPPQMGSLRLL

SEQ ID NO: 760793 - protein, 118 aa, Homo sapiens [sequence omitted]

SEQ ID NO: 760794 - protein, 127 aa, Homo sapiens
ALEWPSDPRLRVLSTPHQVGPLPLEALQYELCGLLPATAYTLQIRCIRWPLPGHWSDWSPSLELRTTERGKEVMRGWEQPTVSSPGPRPLPNWHPLFLFHPQPPLSDWTHGGGRGSWTPGQCSCSGR

SEQ ID NO: 760795 - protein, 110 aa, Homo sapiens
VERERGVGENGRATGFLLKENIRPFQLYEIIVTPLYQDTMGPSQHVYAYSQEMAPSHAPELHLKHIGKTWAQLEWVPEPPELGKSPLTHYTIFWTNAQNQSFSANPSLGQ

SEQ ID NO: 760796 - protein, 773 aa, Homo sapiens
MARLGNCSLTWAALIILLLPGSLEECGHISVSAPIVHLGDPITASCIIKQNCSHLDPEPQILWRLGAELQPGGRQQRLSDGTQESIITLPHLNHTQAFLSCCLNWGNSLQILDQVELRAGYPPAIPHNLSCLMNLTTSSLICQWEPGPETHLPTSFTLKSFKSRGNCQTQGDSILDCVPKDGQSHCCIPRKHLLLYQNMGIWVQAENALGTSMSPQLCLDPMDVVKLEPPMLRTMDPSPEAAPPQAGCLQLCWEPWQPGLHINQKCELRHKPQRGEASWALVGPLPLEALQYELCGLLPATAYTLQIRCIRWPLPGHWSDILPLCNTTELSCTFHLPSEAQEVALVAYNSAGTSRPTPVVFSESRGPALTRLHAMARDPHSLWVGWEPPNPWPQGYVIEWGLGPPSASNSNKTWRMEQNGRATGFLLKENIRPFQLYEIIVTPLYQDTMGPSQHVYAYSQEMAPSHAPELHLKHIGKTWAQLEWVPEPPELGKSPLTHYTIFWTNAQNQSFSAILNASSRGFVLHGLEPASLYHIHLMAASQAGATNSTVLTLMTLTPEGSELHIILGLFGLLLLLTCLCGTAWLCCSPNRKNPLWPSVPDPAHSSLGSWVPTIMEEDAFQLPGLGTPPITKLTVLEEDEKKPVPWESHNSSETCGLPTLVQTYVLQGDPRAVSTQPQSQSGTSDQVLYGQLLGSPTSPGPGHYLRCDSTQPLLAGLTPSPKSYENLWFQASPLGTLVTPAPSQEDDCVFGPLLNFPLLQGIRVHGMEALGSF

SEQ ID NO: 760797 - protein, 723 aa, Homo sapiens
RAGAHSLGTQLGFCLELLLQLQFLCHELDCSVSIPETHLPTSFTLKSFKSRGNCQTQGDSILDCVPKDGQSHCCIPRKHLLLYQNMGIWVQAENALGTSMSPQLCLDPMDVVKLEPPMLRTMDPSPEAAPPQAGCLQLCWEPWQPGLHINQKCELRHKPQRGEASWALVGPLPLEALQYELCGLLPATAYTLQIRCIRWPLPGHWSDWSPSLELRTTERAPTVRLDTWWRQRQLDPRTVQLFWKPVPLEEDSGRIQGYVVSWRPSGQAGAILPLCNTTELSCTFHLPSEAQEVALVAYNSAGTSRPTPVVFSESRGPALTRLHAMARDPHSLWVGWEPPNPWPQGYVIEWGLGPPSASNSNKTWRMEQNGRATGFLLKENIRPFQLYEIIVTPLYQDTMGPSQHVYAYSQEMAPSHAPELHLKHIGKTWAQLEWVPEPPELGKSPLTHYTIFWTNAQNQSFSAILNASSRGFVLHGLEPASLYHIHLMAASQAGATNSTVLTLMTLTPEGSELHIILGLFGLLLLLTCLCGTAWLCCSPNRKNPLWPSVPDPAHSSLGSWVPTIMEEDAFQLPGLGTPPITKLTVLEEDEKKPVPWESHNSSETCGLPTLVQTYVLQGDPRAVSTQPQSQSGTSDQVLYGQLLGSPTSPGPGHYLRCDSTQPLLAGLTPSPKSYENLWFQASPLGTLVTPAPSQEDDCVFGPLLNFPLLQGIRVHGMEALGSF

SEQ ID NO: 760798 - protein, 892 aa, Homo sapiens
MARLGNCSLTWAALIILLLPGSLEECGHISVSAPIVHLGDPITASCIIKQNCSHLDPEPQILWRLGAELQPGGRQQRLSDGTQESIITLPHLNHTQAFLSCCLNWGNSLQILDQVELRAGYPPAIPHNLSCLMNLTTSSLICQWEPGPETHLPTSFTLKSFKSRGNCQTQGDSILDCVPKDGQSHCCIPRKHLLLYQNMGIWVQAENALGTSMSPQLCLDPMDVVKLEPPMLRTMDPSPEAAPPQAGCLQLCWEPWQPGLHINQKCELRHKPQRGEASWALVGPLPLEALQYELCGLLPATAYTLQIRCIRWPLPGHWSDWSPSLELRTTERAPTVRLDTWWRQRQLDPRTVQLFWKPVPLEEDSGRIQGYVVSWRPSGQAGAILPLCNTTELSCTFHLPSEAQEVALVAYNSAGTSRPTPVVFSESRGPALTRLHAMARDPHSLWVGWEPPNPWPQGYVIEWGLGPPSASNSNKTWRMEQNGRATGFLLKENIRPFQLYEIIVTPLYQDTMGPSQHVYAYSQEMAPSHAPELHLKHIGKTWAQLEWVPEPPELGKSPLTHYTIFWTNAQNQSFSAILNASSRGFVLHGLEPASLYHIHLMAASQAGATNSTVLTLMTLTPVRGDGGWAEMAVWRVPHPKDADFESSWGLTLNPLSEGGDPAFPTCILTSSGPALTAEGSELHIILGLFGLLLLLTCLCGTAWLCCSPNRKNPLWPSVPDPAHSSLGSWVPTIMEEDAFQLPGLGTPPITKLTVLEEDEKKPVPWESHNSSETCGLPTLVQTYVLQGDPRAVSTQPQSQSGTSDQVLYGQLLGSPTSPGPGHYLRCDSTQPLLAGLTPSPKSYENLWFQASPLGTLVTPAPSQEDDCVFGPLLNFPLLQGIRVHGMEALGSF

SEQ ID NO: 760799 - protein, 358 aa, Homo sapiens
SWPELWDTGFLLKENIRPFQLYEIIVTPLYQDTMGPSQHVYAYSQEMAPSHAPELHLKHIGKTWAQLEWVPEPPELGKSPLTHYTIFWTNAQNQSFSAILNASSRGFVLHGLEPASLYHIHLMAASQAGATNSTVLTLMTLTPEGSELHIILGLFGLLLLLTCLCGTAWLCCSPNRKNPLWPSVPDPAHSSLGSWVPTIMEEDAFQLPGLGTPPITKLTVLEEDEKKPVPWESHNSSETCGLPTLVQTYVLQGDPRAVSTQPQSQSGTSDQVLYGQLLGSPTSPGPGHYLRCDSTQPLLAGLTPSPKSYENLWFQASPLGTLVTPAPSQEDDCVFGPLLNFPLLQGIRVHGMEALGSF

SEQ ID NO: 760800 - protein, 364 aa, Homo sapiens
VERERGVGENGRATGFLLKENIRPFQLYEIIVTPLYQDTMGPSQHVYAYSQEMAPSHAPELHLKHIGKTWAQLEWVPEPPELGKSPLTHYTIFWTNAQNQSFSAILNASSRGFVLHGLEPASLYHIHLMAASQAGATNSTVLTLMTLTPEGSELHIILGLFGLLLLLTCLCGTAWLCCSPNRKNPLWPSVPDPAHSSLGSWVPTIMEEDAFQLPGLGTPPITKLTVLEEDEKKPVPWESHNSSETCGLPTLVQTYVLQGDPRAVSTQPQSQSGTSDQVLYGQLLGSPTSPGPGHYLRCDSTQPLLAGLTPSPKSYENLWFQASPLGTLVTPAPSQEDDCVFGPLLNFPLLQGIRVHGMEALGSF

SEQ ID NO: 760801 - protein, 626 aa, Homo sapiens
MARLGNCSLTWAALIILLLPGSLEECGHISVSAPIVHLGDPITASCIIKQNCSHLDPEPQILWRLGAELQPGGRQQRLSDGTQESIITLPHLNHTQAFLSCCLNWGNSLQILDQVELRAGYPPAIPHNLSCLMNLTTSSLICQWEPGPETHLPTSFTLKSFKSRGNCQTQGDSILDCVPKDGQSHCCIPRKHLLLYQNMGIWVQAENALGTSMSPQLCLDPMDVVKLEPPMLRTMDPSPEAAPPQAGCLQLCWEPWQPGLHINQKCELRHKPQRGEASWALVGPLPLEALQYELCGLLPATAYTLQIRCIRWPLPGHWSDWSPSLELRTTERAPTVRLDTWWRQRQLDPRTVQLFWKPVPLEEDSGRIQGYVVSWRPSGQAGAILPLCNTTELSCTFHLPSEAQEVALVAYNSAGTSRPTPVVFSESRGPALTRLHAMARDPHSLWVGWEPPNPWPQGYVIEWGLGPPSASNSNKTWRMEQNGRATGFLLKENIRPFQLYEIIVTPLYQDTMGPSQHVYAYSQEMAPSHAPELHLKHIGKTWAQLEWVPEPPELGKSPLTHYTIFWTNAQNQSFSAILNASSRGFVLHGLEPASLYHIHLMAASQAGATNSTVLCSWPGLWSWGVG

SEQ ID NO: 760802 - protein, 319 aa, Homo sapiens
VKLPPWQLSTPFQPFWVCGGTEDRLTEGLVLSVGPEDGVVGKGALPQLIRGDGGWAEMAVWRVPHPKDADFESSWGLTLNPLSEGGDPAFPTCILTSSGPALTAEGSELHIILGLFGLLLLLTCLCGTAWLCCSPNRKNPLWPSVPDPAHSSLGSWVPTIMEEDAFQLPGLGTPPITKLTVLEEDEKKPVPWESHNSSETCGLPTLVQTYVLQGDPRAVSTQPQSQSGTSDQVLYGQLLGSPTSPGPGHYLRCDSTQPLLAGLTPSPKSYENLWFQASPLGTLVTPAPSQEDDCVFGPLLNFPLLQGIRVHGMEALGSF

SEQ ID NO: 760803 - protein, 514 aa, Homo sapiens
MARLGNCSLTWAALIILLLPGSLEECGHISVSAPIVHLGDPITASCIIKQNCSHLDPEPQILWRLGAELQPGGRQQRLSDGTQESIITLPHLNHTQAFLSCCLNWGNSLQILDQVELRAGYPPAIPHNLSCLMNLTTSSLICQWEPGPETHLPTSFTLKSFKSRGNCQTQGDSILDCVPKDGQSHCCIPRKHLLLYQNMGIWVQAENALGTSMSPQLCLDPMDVVKLEPPMLRTMDPSPEAAPPQAGCLQLCWEPWQPGLHINQKCELRHKPQRGEASWALVGPLPLEALQYELCGLLPATAYTLQIRCIRWPLPGHWSDWSPSLELRTTERAPTVRLDTWWRQRQLDPRTVQLFWKPVPLEEDSGRIQGYVVSWRPSGQAGAILPLCNTTELSCTFHLPSEAQEVALVAYNSAGTSRPTPVVFSESRGPALTRLHAMARDPHSLWVGWEPPNPWPQGYVISRWVACVPPPKLPDAKIKAKPKGTPLGKGDLGNTNGHTCGGTEGPNTGWVYLH

SEQ ID NO: 760804 - protein, 226 aa, Homo sapiens [sequence omitted]

SEQ ID NO: 760805 - protein, 294 aa, Homo sapiens
QAAGGKEAMAEEREPELYLKWKHCETPGVKTLCNLKHCETPGVKTLCNLKKLLNRLQKDHREDVYLYISGHLNPNKLYQPPETILQHWPNAHRPKGERASEVGEPPAGKVARMKEALAHFTIHTALVPSEAQDTPLFRYLNPQASLSHTSEEDFLPVEAVREGKEEKKGGPPGRGPPGWRRREELRLPDLKVLCYQEAGSRGTRDRHHYVSSYLAGATSADRYRMFLRFQKEVLAKQDLLKNDFTGSKAAAGHERKLQQELQKNCCTLRPQSSQTGRLWHSSRQILGQSWNGEP

SEQ ID NO: 760806 - protein, 317 aa, Homo sapiens
MTTKLSASTFIKSEVLYFVSVTLKAGAINVILRMGVCGEVYLKWKHCETPGVKTLCNLKHCETPGVKTLCNLKKLLNRLQKDHREDVYLYISGHLNPNKLYQPPETILQHWPNAHRPKGERASEVGEPPAGKVARMKEALAHFTIHTALVPSEAQDTPLFRYLNPQASLSHTSEEDFLPVEAVREGKEEKKGGPPGRGPPGWRRREELRLPDLKVLCYQEAGSRGTRDRHHYVSSYLAGATSADRYRMFLRFQKEVLAKQDLLKNDFTGSKAAAGHERKLQQELQKNCCTLRPQSSQTGRLWHSSRQILGQSWNGEP

SEQ ID NO: 760807 - protein, 404 aa, Homo sapiens
MSVKPSWGPGPSEGVTAVPTSDLGEIHNWTELLDLFNHTLSECHVELSQSTKRVVLFALYLAMFVVGLVENLLVICVNWRGSGRAGLMNLYILNMAIADLGIVLSLPVWMLEVTLDYTWLWGSFSCRFTHYFYFVNMYSSIFFLVCLSVDRYVTLTSASPSWQRYQHRVRRAMCAGIWVLSAIIPLPEVVHIQLVEGPEPMCLFMAPFETYSTWALAVALSTTILGFLLPFPLITVFNVLTACRLRQPGQPKSRRHCLLLCAYVAVFVMCWLPYHVTLLLLTLHGTHISLHCHLVHLLYFFYDVIDCFSMLHCVINPILYNFLSPHFRGRLLNAVVHYLPKDQTKAGTCASSSSCSTQHSIIITKGDSQPAAAAPHPEPSLSFQAHHLLPNTSPISPTQPLTPS

SEQ ID NO: 760808 - protein, 404 aa, Homo sapiens; identical to SEQ ID NO: 760807

SEQ ID NO: 760809 - protein, 404 aa, Homo sapiens; identical to SEQ ID NO: 760807

SEQ ID NO: 760810 - protein, 114 aa, Homo sapiens
IQAKSALAMPLYCIATRSHIACKFAELKEKIDCRSGKKLEDGPKFLKSGDAAIVDMVPGKPMCVESFSDYPPLGRFAVRDMRQTVAVGVIKAVDKKAAGAGKVTKSAQKAQKAK

SEQ ID NO: 760811 - protein, 364 aa, Homo sapiens
LRLSGHLKEPWEDGDVAYGCSCLRKYPLAAGPAMLSSPLPGSPSFSDKMSYQKKQPTPQPPVDCVKTSGGGGGGGGGGGGGCGFFGGGGSGGGSSGSGCGYSGGGGYSGGGCGGGSSGGGGGGGIGGCGGGSGGSVKYSGGGGSSGGGSGCFSSGGGGSGCFSSGGGGSSGGGSGCFSSGGGGSSGGGSGCFSSGGGGFSGQAVQCQSYGGVSSGGSSGGGSGCFSSGGGGGSVCGYSGGGSGGGSGCGGGSSGGSGSGYVSSQQVTQTSCAPQPSYGGGSSGGGGSGGSGCFSSGGGGGSSGCGGGSSGIGSGCIISGGGSVCGGGSSGGGGGGSSVGGSGSGKGVPICHQTQQKQAPTWPSK

SEQ ID NO: 760812 - protein, 334 aa, Homo sapiens
LSSLTLPGALGSPSFSDKMSYQKKQPTPQPPVDCVKTSGGGGGGGGGGGGGCGFFGGGGSGGGSSGSGCGYSGGGGYSGGGCGGGSSGGGGGGGIGGCGGGSGGSVKYSGGGGSSGGGSGCFSSGGGGSGCFSSGGGGSSGGGSGCFSSGGGGSSGGGSGCFSSGGGGFSGQAVQCQSYGGVSSGGSSGGGSGCFSSGGGGGSVCGYSGGGSGGGSGCGGGSSGGSGSGYVSSQQVTQTSCAPQPSYGGGSSGGGGSGGSGCFSSGGGGGSSGCGGGSSGIGSGCIISGGGSVCGGGSSGGGGGGSSVGGSGSGKGVPICHQTQQKQAPTWPSK

SEQ ID NO: 760813 - protein, 547 aa, Homo sapiens
MEVGGDTAAPAPGGAEDLEDTQFPSEEAREGGGVHAVPPDPEDEGLEETGSKDKDQPPSPSPPPQSEALSSTSRLWSPAAPENSPTCSPESSSGGQGGDPSDEEWRSQRKHVFVLSEAGKPIYSRYGSVEALSATMGVMTALVSFVQSAGDAIRAIYAEDHKLVFLQQGPLLLVAMSRTSQSAAQLRGELLAVHAQIVSTLTRASVARIFAHKQNYDLRRLLAGSERTLDRLLDSMEQDPGALLLGAVRCVPLARPLRDALGALLRRCTAPGLALSVLAVGGRLITAAQERNVLAECRLDPADLQLLLDWVGAPAFAAGEAWAPVCLPRFNPDGFFYAYVARLDAMPVCLLLLGTQREAFHAMAACRRLVEDGMHALGAMRALGEAASFSNASSASAPAYSVQAVGAPGLRHFLYKPLDIPDHHRQLPQFTSPELEAPYSREEERQRLSDLYHRLHARLHSTSRPLRLIYHVAEKETLLAWVTSKFELYTCLSPLVTKAGAILVVTKLLRWVKKEEDRLFIRYPPKYSTPPATSTDQAAHNGLFTGL

SEQ ID NO: 760814 - protein, 547 aa, Homo sapiens; identical to SEQ ID NO: 760813

SEQ ID NO: 760815 - protein, 547 aa, Homo sapiens; identical to SEQ ID NO: 760813

SEQ ID NO: 760816 - protein, 281 aa, Homo sapiens
NVYVSCSPLSVLAVGGRLITAAQERNVLAECRLDPADLQLLLDWVGAPAFAAGEAWAPVCLPRFNPDGFFYAYVARLDAMPVCLLLLGTQREAFHAMAACRRLVEDGMHALGAMRALGEAASFSNASSASAPAYSVQAVGAPGLRHFLYKPLDIPDHHRQLPQFTSPELEAPYSREEERQRLSDLYHRLHARLHSTSRPLRLIYHVAEKETLLAWVTSKFELYTCLSPLVTKAGAILVVTKLLRWVKKEEDRLFIRYPPKYSTPPATSTDQAAHNGLFTGL

SEQ ID NO: 760817 - protein, 145 aa, Homo sapiens
MEVGGDTAAPAPGGAEDLEDTQFPSEEAREGGGVHAVPPDPEDEGLEETGSKDKDQPPSPSPPPQSEALSSTSRLWSPAAPENSPTCSPESSSGGQGGDPSDEEWRSHGSGCRTCTTACMLVSTAPPDPCASFTTWLRRRHYWPG

SEQ ID NO: 760818 - protein, 547 aa, Homo sapiens; identical to SEQ ID NO: 760813

SEQ ID NO: 760819 - protein, 547 aa, Homo sapiens; identical to SEQ ID NO: 760813

SEQ ID NO: 760820 - protein, 547 aa, Homo sapiens; identical to SEQ ID NO: 760813

SEQ ID NO: 760821 - protein, 547 aa, Homo sapiens; identical to SEQ ID NO: 760813

SEQ ID NO: 760822 - protein, 547 aa, Homo sapiens; identical to SEQ ID NO: 760813

SEQ ID NO: 760823 - protein, 547 aa, Homo sapiens; identical to SEQ ID NO: 760813

SEQ ID NO: 760824 - protein, 152 aa, Homo sapiens
SGDFHATESQTVLNVSKGEAKPTRADAHVNRVPEGKAKSLPVQGLSETVGILHKVKSQKCLMLHHILIFYAIVVCALIISTFYMRYRINTLEEQLGLLTSIVDTHNTEQAAPSGLRSQVQFNVEVLCQELTANIVKLEKIQNNLQKLLENGD

SEQ ID NO: 760825 - protein, 152 aa, Homo sapiens; identical to SEQ ID NO: 760824

SEQ ID NO: 760826 - protein, 152 aa, Homo sapiens; identical to SEQ ID NO: 760824

SEQ ID NO: 760827 - protein, 152 aa, Homo sapiens; identical to SEQ ID NO: 760824

SEQ ID NO: 760828 - protein, 152 aa, Homo sapiens; identical to SEQ ID NO: 760824

SEQ ID NO: 760829 - protein, 152 aa, Homo sapiens; identical to SEQ ID NO: 760824

SEQ ID NO: 760830 - protein, 152 aa, Homo sapiens; identical to SEQ ID NO: 760824

SEQ ID NO: 760831 - protein, 152 aa, Homo sapiens; identical to SEQ ID NO: 760824

SEQ ID NO: 760832 - protein, 152 aa, Homo sapiens; identical to SEQ ID NO: 760824

SEQ ID NO: 760833 - protein, 152 aa, Homo sapiens; identical to SEQ ID NO: 760824

SEQ ID NO: 760834 - protein, 294 aa, Homo sapiens
MRPRAPACAAAALGLCSLLLLLAPGHACPAGCACTDPHTVDCRDRGLPSVPDPFPLDVRKLLVAGNRIQRIPEDFFIFYGDLVYLDFRNNSLRSLEEGTFSGSAKLVFLDLSYNNLTQLGAGAFRSAGRLVKLSLANNNLVGVHEDAFETLESLQVLELNDNNLRSLSVAALAALPALRSLRLDGNPWLCDCDFAHLFSWIQENASKLPKGLDEIQCSLPMESRRISLRELSEASFSECRFSLSLTDLCIIIFSGVAVSIAAIISSFFLATVVQCLQRCAPNKDAEDEDEDKDD

SEQ ID NO: 760835 - protein, 45 aa, Homo sapiens
VPSARGSVLSAQQDRKSPGQETPGPRNTSARHSKDSAFMVTLQSQ

SEQ ID NO: 760836 - protein, 75 aa, Homo sapiens
ACSENRDDLQGIQLCNFKYKLSRTPFLIQMKNDSSPPQRRDIFIRRGNGLPRQVLPLQVLSVSSGLPEWLRAEWG

SEQ ID NO: 760837 - protein, 186 aa, Homo sapiens
MPSGCGESSAGNRYVEGMVGLFYNSDQAMKDDLELQAWCREMTETGLQRAQDQGFLISLESRAQLCHFVTMCIFTCTGQHASNHLGQLDWYSWIPNGPCTMQKPPPISKDVTEKDIVDLLPNLHQARMQKTFTKFLGRRQPVMHEEKYFSGPEPQAVLRQFQEELASMDKEIEVRNAVLDLPCEYL

SEQ ID NO: 760838 - protein, 171 aa, Homo sapiens [sequence omitted]

SEQ ID NO: 760839 - protein, 120 aa, Homo sapiens [sequence omitted]

SEQ ID NO: 760840 - protein, 621 aa, Homo sapiens
MGKYTVRVATGDLLLAGSPNLVQLWLVGEHGEADLGKQLPPVWGKEAEFEIDVPLHLGRLLMVKLRKHNVLLSLDWFCKWISVQGPGTQGEAFFPCYRWVQGHGIICLPEGTGGAPGKMGYILPIAGNRQPDLPRDERFLEDKDLDFNVSLAKGLKDLAIKGTLDFINCVKRLEDFKKIFPHGKTVLAERVYDSWKNDAFFGYQFLNGANPMLLRCSSRLPACLVLPPGMEDLKTQLEKELQAGSLFEVDFSLLDGVKPNVIIFKQQCVAAPLVMLKLQPDGGLLPMVIQLQPPCHGCPPPLLFLPSHPPMAWLLAKTWVRSSDFQLQQLQSHLLRGHLIAEVIAVATMRSLPSLHPIYKLLIPHFRYTMAINTLAQSSLVSEWGIFDLVVSTGSGSHVDILQRAMACLTYHSLCPPDDLADRGLLDVKSSFYGKMPSGCGESSAGNRYVEGMVGLFYNSDQAMKDDLELQAWCREMTETGLQRAQDQGFLISLESRAQLCHFVTMCIFTCTGQHASNHLGQLDWYSWIPNGPCTMQKPPPISKDVTEKDIVDLLPNLHQARMQKTFTKFLGRRQPVMHEEKYFSGPEPQAVLRQFQEELASMDKEIEVRNAVLDLPCEYL

SEQ ID NO: 760841 - protein, 193 aa, Homo sapiens
MAKMPSGCGESSAGNRYVEGMVGLFYNSDQAMKDDLELQAWCREMTETGLQRAQDQGFLISLESRAQLCHFVTMCIFTCTGQHASNHLGQLDWYSWIPNGPCTMQKPPPISKDVTEKDIVDLLPNLHQARMQKTFTKFLGRRQPVMHEEKYFSGPEPQAVLRQFQEELASMDKEIEVRNAVLDLPFFHQYIHP

SEQ ID NO: 760842 - protein, 476 aa, Homo sapiens
SGRTHAQRPEMQRGAALCLRLWLCLGLLDGLVSGYSMTPPTLNITEESHVIDTGDSLSISCRGQHPLEWAWPGAQEAPATGDKDSEDTGVVRDCEGTDARPYCKVLLLHEVHANDTGSYVCYYKYIKARIEGTTAASSYVFVRDFEQPFINKPDTLLVNRKDAMWVPCLVSIPGLNVTLRSQSSVLWPDGQEVVWDDRRGMLVSTPLLHDALYLQCETTWGDQDFLSNPFLVHITGNELYDIQLLPRKSLELLVGEKLVLNCTVWAEFNSGVTFDWDYPGKQAERGKWVPERRSQQTHTELSSILTIHNVSQHDLGSYVCKANNGIQRFRESTEVIVHENPFISVEWLKGPILEATAGDELVKLPVKLAAYPPPEFQWYKDGKALSGRHSPHALVLKEVTEASTGTYTLALWNSAAGLRRNISLELVVNVPPQIHEKEASSPSIYSRHSRQALTCTAYGVPPCDLVFSTPQNPPTI

SEQ ID NO: 760843 - protein, 1308 aa, Homo sapiens
SGRTHAQRPEMQRGAALCLRLWLCLGLLDGLVSGYSMTPPTLNITEESHVIDTGDSLSISCRGQHPLEWAWPGAQEAPATGDKDSEDTGVVRDCEGTDARPYCKVLLLHEVHANDTGSYVCYYKYIKARIEGTTAASSYVFVRDFEQPFINKPDTLLVNRKDAMWVPCLVSIPGLNVTLRSQSSVLWPDGQEVVWDDRRGMLVSTPLLHDALYLQCETTWGDQDFLSNPFLVHITGNELYDIQLLPRKSLELLVGEKLVLNCTVWAEFNSGVTFDWDYPGKQAERGKWVPERRSQQTHTELSSILTIHNVSQHDLGSYVCKANNGIQRFRESTEVIVHENPFISVEWLKGPILEATAGDELVKLPVKLAAYPPPEFQWYKDGKALSGRHSPHALVLKEVTEASTGTYTLALWNSAAGLRRNISLELVVNVPPQIHEKEASSPSIYSRHSRQALTCTAYGVPLPLSIQWHWRPWTPCKMFAQRSLRRRQQQDLMPQCRDWRAVTTQDAVNPIESLDTWTEFVEGKNKTVSKLVIQNANVSAMYKCVVSNKVGQDERLIYFYVTTIPDGFTIESKPSEELLEGQPVLLSCQADSYKYEHLRWYRLNLSTLHDAHGNPLLLDCKNVHLFATPLAASLEEVAPGARHATLSLSIPRVAPEHEGHYVCEVQDRRSHDKHCHKKYLSVQALEAPRLTQNLTDLLVNVSDSLEMQCLVAGAHAPSIVWYKDERLLEEKSGVDLADSNQKLSIQRVREEDAGRYLCSVCNAKGCVNSSASVAVEGSEDKGSMEIVILVGTGVIAVFFWVLLLLIFCNMRRPAHADIKTGYLSIIMDPGEVPLEEQCEYLSYDASQWEFPRERLHLGRVLGYGAFGKVVEASAFGIHKGSSCDTVAVKMLKEGATASEQRALMSELKILIHIGNHLNVVNLLGACTKPQGPLMVIVEFCKYGNLSNFLRAKRDAFSPCAEKSPEQRGRFRAMVELARLDRRRPGSSDRVLFARFSKTEGGARRASPDQEAEDLWLSPLTMEDLVCYSFQVARGMEFLASRKCIHRDLAARNILLSESDVVKICDFGLARDIYKDPDYVRKGSARLPLKWMAPESIFDKVYTTQSDVWSFGVLLWEIFSLGASPYPGVQINEEFCQRLRDGTRMRAPELATPAIRRIMLNCWSGDPKARPAFSELVEILGDLLQGRGLQEEEEVCMAPRSSQSSEEGSFSQVSTMALHIAQADAEDSPPSLQRHSLAARYYNWVSFPGCLARGAETRGSSRMKTFEEFPMTPTTYKGSVDNQTDSGMVLASEEFEQIESRHRQESGFR

SEQ ID NO: 760844 - protein, 1433 aa, Homo sapiens
SGRTHAQRPEMQRGAALCLRLWLCLGLLDGLVSGYSMTPPTLNITEESHVIDTGDSLSISCRGQHPLEWAWPGAQEAPATGDKDSEDTGVVRDCEGTDARPYCKVLLLHEVHANDTGSYVCYYKYIKARIEGTTAASSYVFVRDFEQPFINKPDTLLVNRKDAMWVPCLVSIPGLNVTLRSQSSVLWPDGQEVVWDDRRGMLVSTPLLHDALYLQCETTWGDQDFLSNPFLVHITGNELYDIQLLPRKSLELLVGEKLVLNCTVWAEFNSGVTFDWDYPGKQAERGKWVPERRSQQTHTELSSILTIHNVSQHDLGSYVCKANNGIQRFRESTEVIVHENPFISVEWLKGPILEATAGDELVKLPVKLAAYPPPEFQWYKDGKALSGRHSPHALVLKEVTEASTGTYTLALWNSAAGLRRNISLELVVNVPPQIHEKEASSPSIYSRHSRQALTCTAYGVPLPLSIQWHWRPWTPCKMFAQRSLRRRQQQDLMPQCRDWRAVTTQDAVNPIESLDTWTEFVEGKNKTVSKLVIQNANVSAMYKCVVSNKVGQDERLIYFYVTTIPDGFTIESKPSEELLEGQPVLLSCQADSYKYEHLRWYRLNLSTLHDAHGNPLLLDCKNVHLFATPLAASLEEVAPGARHATLSLSIPRVAPEHEGHYVCEVQDRRSHDKHCHKKYLSVQALEAPRLTQNLTDLLVNVSDSLEMQCLVAGAHAPSIVWYKDERLLEEKSGVDLADSNQKLSIQRVREEDAGRYLCSVCNAKGCVNSSASVAVEGSEDKGSMEIVILVGTGVIAVFFWVLLLLIFCNMRRPAHADIKTGYLSIIMDPGEVPLEEQCEYLSYDASQWEFPRERLHLGRVLGYGAFGKVVEASAFGIHKGSSCDTVAVKMLKEGATASEQRALMSELKILIHIGNHLNVVNLLGACTKPQGPLMVIVEFCKYGNLSNFLRAKRDAFSPCAEKSPEQRGRFRAMVELARLDRRRPGSSDRVLFARFSKTEGGARRASPDQEAEDLWLSPLTMEDLVCYSFQVARGMEFLASRKCIHRDLAARNILLSESDVVKICDFGLARDIYKDPDYVRKGSARLPLKWMAPESIFDKVYTTQSDVWSFGVLLWEIFSLGASPYPGVQINEEFCQRLRDGTRMRAPELATPAIRRIMLNCWSGDPKARPAFSELVEILGDLLQGRGLQEEEEVCMAPRSSQSSEEGSFSQVSTMALHIAQADAEDSPPSLQRHSLAARYYNWVSFPGCLARGAETRGSSRMKTFEEFPMTPTTYKGSVVLHMKGGGCALGSGLGPPQGRQRQEFVRQMAEPNDCPLKVQVQGEPWAHLGPPAMPRLTAAFCPMPSSPPHEASPPQQRRNPSGRTAPPRWQVRGSRAWSVSAGQRGPMGALGQTTGTWVPASRATWRCWGTLKRSQFPSRVIQNKNHTKPQSK

SEQ ID NO: 760845 - protein, 181 aa, Homo sapiens
MTFFTHLWDGDPVSQVAGSPTEIPFSSKQEDMSELLDEILVQEILDLNKTTPSEMPSTASTLSTPLHAGIDENYQAGGSENYHELLENLQFSPGIEDKISNDEANANANLHGDPSENYRGPQVSPGSEKSVSSKEKNSKNTQYENLSILDQILQNIGRSSGNIFHKEQQRTSAQRRSQGSQ

SEQ ID NO: 760846 - protein, 183 aa, Homo sapiens
MLWLLPTDRGRSGNGNEPQGSPTEIPFSSKQEDMSELLDEILVQEILDLNKTTPSEMPSTASTLSTPLHAGIDENYQAGGSENYHELLENLQFSPGIEDKISNDEANANANLHGDPSENYRGPQVSPGSEKSVSSKEKNSKNTQYENLSILDQILQNIGRSSGNIFHKEQQRTSAQRRSQGSQ

SEQ ID NO: 760847 - protein, 212 aa, Homo sapiens
MGNCQPSEHPSPSAGGSMAVSQGDGTLCFVLLLCCWQETELRPRTVIPGSPTEIPFSSKQEDMSELLDEILVQEILDLNKTTPSEMPSTASTLSTPLHAGIDENYQAGGSENYHELLENLQFSPGIEDKISNDEANANANLHGDPSENYRGPQVSPGSEKSVSSKEKNSKNTQYENLSILDQILQNIGRSSGNIFHKEQQRTSAQRRSQGSQ

SEQ ID NO: 760848 - protein, 164 aa, Homo sapiens [sequence omitted]

SEQ ID NO: 760849 - protein, 122 aa, Homo sapiens
KPRRNSQMSQKGKKKFSEKNFRGKSCAILKSFEGCKVPRFSHLLHTFFSDFFSMFNICEMTSFLYLKLDASGFVGEGLVVFTFSCERKFVPKGLLPGELFKPSQADLSGFTVLFATIFNMQK

SEQ ID NO: 760850 - protein, 708 aa, Homo sapiens
MKDMPLRIHVLLGLAITTLVQAVDKKVDCPRLCTCEIRPWFTPRSIYMEASTVDCNDLGLLTFPARLPANTQILLLQTNNIAKIEYSTDFPVNLTGLDLSQNNLSSVTNINVKKMPQLLSVYLEENKLTELPEKCLSELSNLQELYINHNLLSTISPGAFIGLHNLLRLHLNSNRLQMINSKWFDALPNLEILMIGENPIIRIKDMNFKPLINLRSLVIAGINLTEIPDNALVGLENLESISFYDNRLIKVPHVALQKVVNLKFLDLNKNPINRIRRGDFSNMLHLKELGINNMPELISIDSLAVDNLPDLRKIEATNNPRLSYIHPNAFFRLPKLESLMLNSNALSALYHGTIESLPNLKEISIHSNPIRCDCVIRWMNMNKTNIRFMEPDSLFCVDPPEFQGQNVRQVHFRDMMEICLPLIAPESFPSNLNVEAGSYVSFHCRATAEPQPEIYWITPSGQKLLPNTLTDKFYVHSEGTLDINGVTPKEGGLYTCIATNLVGADLKSVMIKVDGSFPQDNNGSLNIKIRDIQANSVLVSWKASSKILKSSVKWTAFVKTENSHAAQSARIPSDVKVYNLTHLNPSTEYKICIDIPTIYQKNRKKCVNVTTKGLHPDQKEYEKNNTTTLMACLGGLLGIIGVICLISCLSPEMNCDGGHSYVRNYLQKPTFALGELYPPLINLWEAGKEKSTSLKVKATVIGLPTNMS

SEQ ID NO: 760851 - protein, 708 aa, Homo sapiens; identical to SEQ ID NO: 760850

SEQ ID NO: 760852 - protein, 588 aa, Homo sapiens
MKDMPLRIHVLLGLAITTLVQAVDKKVDCPRLCTCEIRPWFTPRSIYMEASTVDCNDLGLLTFPARLPANTQILLLQTNNIAKIEYSTDFPVNLTGLDLSQNNLSSVTNINVKKMPQLLSVYLEENKLTELPEKCLSELSNLQELYINHNLLSTISPGAFIGLHNLLRLHLNSNRLQMINSKWFDALPNLEILMIGENPIIRIKDMNFKPLINLRSLVIAGINLTEIPDNALVGLENLESISFYDNRLIKVPHVALQKVVNLKFLDLNKNPINRIRRGDFSNMLHLKELGINNMPELISIDSLAVDNLPDLRKIEATNNPRLSYIHPNAFFRLPKLESLMLNSNALSALYHGTIESLPNLKEISIHSNPIRCDCVIRWMNMNKTNIRFMEPDSLFCVDPPEFQGQNVRQVHFRDMMEICLPLIAPESFPSNLNVEAGSYVSFHCRATAEPQPEIYWITPSGQKLLPNTLTDKFYVHSEGTLDINGVTPKEGGLYTCIATNLVGADLKSVMIKVDGSFPQDNNGSLNIKIRDIQANSVLVSWKASSKILKSSVKWTAFVKTENSHAAQSARIPSDVKVYNLTHLKPHTG

SEQ ID NO: 760853 - protein, 708 aa, Homo sapiens; identical to SEQ ID NO: 760850

SEQ ID NO: 760854 - protein, 199 aa, Homo sapiens
MANRGPSYGLSREVQEKIEQKYDADLENKLVDWIILQCAEDIEHPPPGRAHFQKWLMDGTVLCKLINSLYPPGQEPIPKISESKMAFKQMEQISQFLKAAETYGVRTTDIFQTVDLWEGKDMAAVQRTLMALGSVAVTKDDGCYRGEPSWFHRKAQQNRRGFSEEQLRQGQNVIGLQMGSNKGASQAGMTGYGMPRQIM

SEQ ID NO: 760855 - protein, 199 aa, Homo sapiens; identical to SEQ ID NO: 760854

SEQ ID NO: 760856 - protein, 199 aa, Homo sapiens; identical to SEQ ID NO: 760854

SEQ ID NO: 760857 - protein, 138 aa, Homo sapiens
MANRGPSYGLSREVQEKIEQKYDADLENKLVDWIILQCAEDIEHPPPGRAHFQKWLMDGTVLCKLINSLYPPGQEPIPKISESKMAFKQMEQISQFLKAAETYGVRTTDIFQTVDLWEGKDMASCAEDLMAVGYRVSS

SEQ ID NO: 760858 - protein, 199 aa, Homo sapiens; identical to SEQ ID NO: 760854

SEQ ID NO: 760859 - protein, 138 aa, Homo sapiens; identical to SEQ ID NO: 760857

SEQ ID NO: 760860 - protein, 199 aa, Homo sapiens; identical to SEQ ID NO: 760854

SEQ ID NO: 760861 - protein, 143 aa, Homo sapiens
MDGTVLCKLINSLYPPGQEPIPKISESKMAFKQMEQISQFLKAAETYGVRTTDIFQTVDLWEGKDMAAVQRTLMALGSVAVTKDDGCYRGEPSWFHRKAQQNRRGFSEEQLRQGQNVIGLQMGSNKGASQAGMTGYGMPRQIM

SEQ ID NO: 760862 - protein, 667 aa, Homo sapiens
TSLPFPKFTVNSNRLRKQSINETPLGSLSKDDGARGAHGKKLNFSESHLVIITKEEEQKADPKEVSNSKTKTIFPKVLGKSQSKHISRNRSEMSSSSLAPHRVPLSQTNHALTGGLEPAKINITAKAPSTEYNQSHIKALLPEDSGTHQVLRIDVTLSPRDPKAPGQFGRPVVVPHGKEKEAERRWKEGNFNVYLSDLIPVDRAIEDTRPAGCAEQLVHNNLPTTSVIMCFVDEVWSTLLRSVHSVINRSPPHLIKEILLVDDFSTKDYLKDNLDKYMSQFPKVRILRLKERHGLIRARLAGAQNATGDVLTFLDSHVECNVGWLEPLLERVYLSRKKVACPVIEVINDKDMSYMTVDNFQRGIFVWPMNFGWRTIPPDVIAKNRIKETDTIRCPVMAGGLFSIDKSYFFELGTYDPGLDVWGGENMELSFKVWMCGGEIEIIPCSRVGHIFRNDNPYSFPKDRMKTVERNLVRVAEVWLDEYKELFYGHGDHLIDQGLDVGNLTQQRELRKKLKCKSFKWYLENVFPDLRAPIVRASGVLINVALGKCISIENTTVILEDCDGSKELQQFNYTWLRLIKCGEWCIAPIPDKGAVRLHPCDNRNKGLKWLHKSTSVFHPELVNHIVFENNQQLLCLEGNFSQKILKVAACDPVKPYQKWKFEKYYEA

SEQ ID NO: 760863 - protein, 667 aa, Homo sapiens; identical to SEQ ID NO: 760862

SEQ ID NO: 760864 - protein, 593 aa, Homo sapiens
TSLPFPKFTVNSNRLRKQSINETPLGSLSKDDGARGAHGKKLNFSESHLVIITKEEEQKADPKEVSNSKTKTIFPKVLGKSQSKHISRNRSEMSSSSLAPHRVPLSQTNHALTGGLEPAKINITAKAPSTEYNQSHIKALLPEDSGTHQVLRIDVTLSPRDPKAPGQFGRPVVVPHGKEKEAERRWKEGNFNVYLSDLIPVDRAIEDTRPAGCAEQLVHNNLPTTSVIMCFVDEVWSTLLRSVHSVINRSPPHLIKEILLVDDFSTKDYLKDNLDKYMSQFPKVRILRLKERHGLIRARLAGAQNATGDVLTFLDSHVECNVGWLEPLLERVYLSRKKVACPVIEVINDKDMSYMTVDNFQRGIFVWPMNFGWRTIPPDVIAKNRIKETDTIRCPVMAGGLFSIDKSYFFELGTYDPGLDVWGGENMELSFKVWMCGGEIEIIPCSRVGHIFRNDNPYSFPKDRMKTVERNLVRVAEVWLDEYKELFYGHGDHLIDQGLDVGNLTQQRELRKKLKCKSFKWYLENVFPDLRAPIVRASGVLPFSSSKKFFKNVTISYPALLGQIFSVLLESGLYHAFCLENLLIAKTYYNIPP

SEQ ID NO: 760865 - protein, 470 aa, Homo sapiens [sequence omitted]

SEQ ID NO: 760866 - protein, 452 aa, Homo sapiens
MKFLLILLLQATASGALPLNSSTSLEKNNVLFGERYLEKFYGLEINKLPVTKMKYSGNLMKETSTLEMMHAPRCGVPDVHHFREMPGGPVWRKHYITYRINNYTPDMNREDVDYAIRKAFQVWSNVTPLKFSKINTGMADILVVFARGAHGDFHAFDGKGGILAHAFGPGSGIGGDAHFDEDEFWTTHSGGTNLFLTAVHEIGHSLGLGHSSDPKAVMFPTYKYVDINTFRLSADDIRGIQSLYGDPKENQRLPNPDNSEPALCDPNLSFDAVTTVGNKIFFFKDRFFWLKVSERPKTSVNLISSLWPTLPSGIEAAYEIEARNQVFLFKDDKYWLISSLRPEPNYPKSIHSFGFPNFVKKIDAAVFNPRFYRTYFFVDNQYWRYDERRQMMDPGYPKLITKNFQGIGPKIDAVFYSKNKYYYFFQGSNQFEYDFLLQRITKTLKSNSWFGC

SEQ ID NO: 760867 - protein, 448 aa, Homo sapiens
MSSRKLSGPKGRRLSIHVVTWNVASAAPPLDLSDLLQLNNRNLNLDIYVIGLQELNSGIISLLSDAAFNDSWSSFLMDVLSPLSFIKVSHVRMQGILLLVFAKYQHLPYIQILSTKSTPTGLFGYWGNKGGVNICLKLYGYYVSIINCHLPPHISNNYQRLEHFDRILEMQNCEGRDIPNILDHDLIIWFGDMNFRIEDFGLHFVRESIKNRCYGGLWEKDQLSIAKKHDPLLREFQEGRLLFPPTYKFDRNSNDYDTSEKKRKPAWTDRILWRLKRQPCAGPDTPIPPASHFSLSLRGYSSHMTYGISDHKPVSGTFDLELKPLVSAPLIVLMPEDLWTVENDMMVSYSSTSDFPSSPWDWIGLYKVGLRDVNDYVSYAWVGDSKVSCSDNLNQVYIDISNIPTTEDEFLLCYYSNSLRSVVGISRPFQIPPGSLREDPLGEAQPQI

SEQ ID NO: 760868 - protein, 448 aa, Homo sapiens; identical to SEQ ID NO: 760867

SEQ ID NO: 760869 - protein, 372 aa, Homo sapiens
MDVLSPLSFIKVSHVRMQGILLLVFAKYQHLPYIQILSTKSTPTGLFGYWGNKGGVNICLKLYGYYVSIINCHLPPHISNNYQRLEHFDRILEMQNCEGRDIPNILDHDLIIWFGDMNFRIEDFGLHFVRESIKNRCYGGLWEKDQLSIAKKHDPLLREFQEGRLLFPPTYKFDRNSNDYDTSEKKRKPAWTDRILWRLKRQPCAGPDTPIPPASHFSLSLRGYSSHMTYGISDHKPVSGTFDLELKPLVSAPLIVLMPEDLWTVENDMMVSYSSTSDFPSSPWDWIGLYKVGLRDVNDYVSYAWVGDSKVSCSDNLNQVYIDISNIPTTEDEFLLCYYSNSLRSVVGISRPFQIPPGSLREDPLGEAQPQI

SEQ ID NO: 760870 - protein, 356 aa, Homo sapiens
MQGILLLVFAKYQHLPYIQILSTKSTPTGLFGYWGNKGGVNICLKLYGYYVSIINCHLPPHISNNYQRLEHFDRILEMQNCEGRDIPNILDHDLIIWFGDMNFRIEDFGLHFVRESIKNRCYGGLWEKDQLSIAKKHDPLLREFQEGRLLFPPTYKFDRNSNDYDTSEKKRKPAWTDRILWRLKRQPCAGPDTPIPPASHFSLSLRGYSSHMTYGISDHKPVSGTFDLELKPLVSAPLIVLMPEDLWTVENDMMVSYSSTSDFPSSPWDWIGLYKVGLRDVNDYVSYAWVGDSKVSCSDNLNQVYIDISNIPTTEDEFLLCYYSNSLRSVVGISRPFQIPPGSLREDPLGEAQPQI

SEQ ID NO: 760871 - protein, 395 aa, Homo sapiens
MSSRKLSGPKGRRLSIHVVTWNVASAAPPLDLSDLLQLNNRNLNLDIYVIGLQELNSGIISLLSDAAFNDSWSSFLMDVLSPLSFIKVSHVRMQGILLLVFAKYQHLPYIQILSTKSTPTGLFGYWGNKGGVNICLKLYGYYVSIINCHLPPHISNNYQRLEHFDRILEMQNCEGRDIPNILDHDLIIWFGDMNFRIEDFGLHFVRESIKNRCYGGLWEKDQLSIAKKHDPLLREFQEGRLLFPPTYKFDRNSNDYDTSEKKRKPAWTDRILWRLKRQPCAGPDTPIPPASHFSLSLRGYSSHMTYGISDHKPVSGTFDLELKPLVSAPLIVLMPEDLWTVENDMMVSYSSTSDFPSSPWDWIGLYKVMWWQGRKSISDSPWFILPEGSWELGRC

SEQ ID NO: 760872 - protein, 448 aa, Homo sapiens; identical to SEQ ID NO: 760867

SEQ ID NO: 760873 - protein, 193 aa, Homo sapiens
VDPPGCWNSARWTDRILWRLKRQPCAGPDTPIPPASHFSLSLRGYSSHMTYGISDHKPVSGTFDLELKPLVSAPLIVLMPEDLWTVENDMMVSYSSTSDFPSSPWDWIGLYKVGLRDVNDYVSYAWVGDSKVSCSDNLNQVYIDISNIPTTEDEFLLCYYSNSLRSVVGISRPFQIPPGSLREDPLGEAQPQI

SEQ ID NO: 760874 - protein, 448 aa, Homo sapiens; identical to SEQ ID NO: 760867

SEQ ID NO: 760875 - protein, 448 aa, Homo sapiens; identical to SEQ ID NO: 760867

SEQ ID NO: 760876 - protein, 372 aa, Homo sapiens; identical to SEQ ID NO: 760869

SEQ ID NO: 760877 - protein, 356 aa, Homo sapiens; identical to SEQ ID NO: 760870

SEQ ID NO: 760878 - protein, 484 aa, Homo sapiens
MSSRKLSGPKGRRLSIHVVTWNVASAAPPLDLSDLLQLNNRNLNLDIYVIGLQELNSGIISLLSDAAFNDSWSSFLMDVLSPLSFIKVSHVRMQGILLLVFAKYQHLPYIQILSTKSTPTGLFGYWGNKGGVNICLKLYGYYVSIINCHLPPHISNNYQRLEHFDRILEMQNCEGRDIPNILDHDLIIWFGDMNFRIEDFGLHFVRESIKNRCYGGLWEKDQLSIAKKHDPLLREFQEGRLLFPPTYKFDRNSNDYDTRKKQACMDRSHPVEAEAAALCWPTYKFDRNSNDYDTSEKKRKPAWTDRILWRLKRQPCAGPDTPIPPASHFSLSLRGYSSHMTYGISDHKPVSGTFDLELKPLVSAPLIVLMPEDLWTVENDMMVSYSSTSDFPSSPWDWIGLYKVGLRDVNDYVSYAWVGDSKVSCSDNLNQVYIDISNIPTTEDEFLLCYYSNSLRSVVGISRPFQIPPGSLREDPLGEAQPQI

SEQ ID NO: 760879 - protein, 288 aa, Homo sapiens
SCVYDGLWELHPCESRVVQNILDHNLIIWFGDMNFRIEDFGLHFVRESIKNRCYGGLWEKDQLSIAKKHDPLLREFQEGRLLFPPTYKFDRNSNDYDTSEKKRKPAWTDRILWRLKRQPCAGPDTPIPPASHFSLSLRGYSSHMTYGISDHKPVSGTFDLELKPLVSAPLIVLMPEDLWTVENDMMVSYSSTSDFPSSPWDWIGLYKVGLRDVNDYVSYAWVGDSKVSCSDNLNQVYIDISNIPTTEDEFLLCYYSNSLRSVVGISRPFQIPPGSLREDPLGEAQPQI

SEQ ID NO: 760880 - protein, 103 aa, Homo sapiens
LPPPSTSLPSTSSPWDWIGLYKVGLRDVNDYVSYAWVGDSKVSCSDNLNQVYIDISNIPTTEDEFLLCYYSNSLRSVVGISRPFQIPPGSLREDPLGEAQPQI

SEQ ID NO: 760881 - protein, 145 aa, Homo sapiens
  misc_feature (31)..(31): Xaa can be any naturally occurring amino acid
APRDIPPTNPRVEGSLCFPPSQSLNQKNNAXFLFQDIDFVARETTCSKESNEELTESCETKKLGQSLDCNAEVYVVPWEKKIYPTVNCQPLGMISLMKRPPGFSPFRSSRIGEIKEETTSHLRSCEYKGRPPKAGAEPASEREVS

SEQ ID NO: 760882 - protein, 66 aa, Homo sapiens
MHSNRGEEEQYEILRGYPDLPDYSSRGPCGDSPVRLPRLCASYINAEPRFFTFPIITNRGNKRRNN

SEQ ID NO: 760883 - protein, 145 aa, Homo sapiens; identical to SEQ ID NO: 760881
  misc_feature (31)..(31): Xaa can be any naturally occurring amino acid

SEQ ID NO: 760884 - protein, 1244 aa, Homo sapiens
EFREPAEAAAAARTGVRVRGRPPRAQGGAGKFRRTGGAAVGERRAGGGGPGSGPGARSRPELVGRVPAGGAGLAGEGRLGVQEANWLPGVQEGQVVRAVRKPTCTGRSPRRERDPARAQDPEAPAEEEVVTGRPGPHGTSGAEGDAGCRGMGSRAQKSAGNAELWEPLPEGRPRPAGTSSAVSAWASLKLCLRGGSGRRQRLGGGRMQPEEGTGWLLELLSEVQLQQYFLRLRDDLNVTRLSHFEYVKNEDLEKIGMGRPGQRRLWEAVKRRKALCKRKSWMSKVFSGKRLEAEFPPHHSQSTFRKTSPAPGGPAGEGPLQSLTCLIGEKDLRLLEKLGDGSFGVVRRGEWDAPSGKTVSVAVKCLKPDVLSQPEAMDDFIREVNAMHSLDHRNLIRLYGVVLTPPMKMVTELAPLGSLLDRLRKHQGHFLLGTLSRYAVQVAEGMGYLESKRFIHRDLAARNLLLATRDLVKIGDFGLMRALPQNDDHYVMQEHRKVPFAWCAPESLKTRTFSHASDTWMFGVTLWEMFTYGQEPWIGLNGSQILHKIDKEGERLPRPEDCPQDIYNVMVQCWAHKPEDRPTFVALRDFLLEAQPTDMRALQDFEEPDKLHIQMNDVITVIEGRAENYWWRGQNTRTLCVGPFPRNVVTSVAGLSAQDISQPLQNSFIHTGHGDSDPRHCWGFPDRIDELYLGNPMDPPDLLSVELSTSRPPQHLGGVKKPTYDPVSEDQDPLSSDFKRLGLRKPGLPRGLWLAKPSARVPGTKASRGSGAEVTLIDFGEEPVVPALRPCAPSLAQLAMDACSLLDETPPQSPTRALPRPLHPTPVVDWDARPLPPPPAYDDVAQDEDDFEICSINSTLVGAGVPAGPSQGQTNYAFVPEQARPPPPLEDNLFLPPQGGGKPPSSAQTAEIFQALQQECMRQLQAPAGSPAPSPSPGGDDKPQVPPRVPIPPRPTRPHVQLSPAPPGEEETSQWPGPASPPRVPPREPLSPQGSRTPSPLVPPGSSPLPPRLSSSPGKTMPTTQSFASDPKYATPQVIQAPGPRAGPCILPIVRDGKKVSSTHYYLLPERPSYLERYQRFLREAQSPEEPTPLPVPLLLPPPSTPAPAAPTATVRPMPQAALDPKANFSTNNSNPGARPPPPRATARLPQRGCPGDGPEAGRPADKIQMAMVHGVTTEECQAALQCHGWSVQRAAQYLKVEQLFGLGLRPRGECHKVLEMFDWNLEQAGCHLLGSWGPAHHKR

SEQ ID NO: 760885 - protein, 455 aa, Homo sapiens
HEGERTWSRPAATFWAPGALPTTSAEMRLESQRACLKESPEPVRPPGVGRCPHPVLEDPLLLLLPGMEQGQGCGRLGALPCPSLPHQRCPCTSWQGHDSGSHCHAPPTTARRAFPIPFGSKSNMATLKDQLIYNLLKEEQTPQNKITVVGVGAVGMACAISILMKDLADELALVDVIEDKLKGEMMDLQHGSLFLRTPKIVSGKDYNVTANSKLVIITAGARQQEGESRLNLVQRNVNIFKFIIPNVVKYSPNCKLLIVSNPVDILTYVAWKISGFPKNRVIGSGCNLDSARFRYLMGERLGVHPLSCHGWVLGEHGDSSVPVWSGMNVAGVSLKTLHPDLGTDKDKEQWKEVHKQVVESAYEVIKLKGYTSWAIGLSVADLAESIMKNLRRVHPVSTMIKGLYGIKDDVFLSVPCILGQNGISDLVKVTLTSEEEARLKKSADTLWGIQKELQF

SEQ ID NO: 760886 - protein, 112 aa, Homo sapiens
MRVRAGVCGVAGAGREGGAGLGGDSDLGWAVPSLSTQLGVGPLSHRLHACRSLSGTLLEASIRLWVHVWGCALDGVWASSQAAPLTVWQNQDLSGSRSRGSPGGPSGVGLSD

SEQ ID NO: 760887 - protein, 1070 aa, Homo sapiens
MPAARRFPGLELSFPLLARLRRRLYTRLGGGRMQPEEGTGWLLELLSEVQLQQYFLRLRDDLNVTRLSHFEYVKNEDLEKIGMGRPGQRRLWEAVKRRKALCKRKSWMSKVFSGKRLEAEFPPHHSQSTFRKTSPAPGGPAGEGPLQSLTCLIGEKDLRLLEKLGDGSFGVVRRGEWDAPSGKTVSVAVKCLKPDVLSQPEAMDDFIREVNAMHSLDHRNLIRLYGVVLTPPMKMVTELAPLGSLLDRLRKHQGHFLLGTLSRYAVQVAEGMGYLESKRFIHRDLAARNLLLATRDLVKIGDFGLMRALPQNDDHYVMQEHRKVPFAWCAPESLKTRTFSHASDTWMFGVTLWEMFTYGQEPWIGLNGSQILHKIDKEGERLPRPEDCPQDIYNVMVQCWAHKPEDRPTFVALRDFLLEAQPTDMRALQDFEEPDKLHIQMNDVITVIEGRAENYWWRGQNTRTLCVGPFPRNVVTSVAGLSAQDISQPLQNSFIHTGHGDSDPRHCWGFPDRIDELYLGNPMDPPDLLSVELSTSRPPQHLGGVKKPTYDPVSEDQDPLSSDFKRLGLRKPGLPRGLWLAKPSARVPGTKASRGSGAEVTLIDFGEEPVVPALRPCAPSLAQLAMDACSLLDETPPQSPTRALPRPLHPTPVVDWDARPLPPPPAYDDVAQDEDDFEICSINSTLVGAGVPAGPSQGQTNYAFVPEQARPPPPLEDNLFLPPQGGGKPPSSAQTAEIFQALQQECMRQLQAPAGSPAPSPSPGGDDKPQVPPRVPIPPRPTRPHVQLSPAPPGEEETSQWPGPASPPRVPPREPLSPQGSRTPSPLVPPGSSPLPPRLSSSPGKTMPTTQSFASDPKYATPQVIQAPGPRAGPCILPIVRDGKKVSSTHYYLLPERPSYLERYQRFLREAQSPEEPTPLPVPLLLPPPSTPAPAAPTATVRPMPQAALDPKANFSTNNSNPGARPPPPRATARLPQRGCPGDGPEAGRPADKIQMAMVHGVTTEECQAALQCHGWSVQRAAQYLKVEQLFGLGLRPRGECHKVLEMFDWNLEQAGCHLLGSWGPAHHKR

SEQ ID NO: 760888 - protein, 1128 aa, Homo sapiens
MPAARRFPGLELSFPLLARLRRRLYTRLGGGRMQPEEGTGWLLELLSEVQLQQYFLRLRDDLNVTRLSHFEYVKNEDLEKIGMGRPGQRRLWEAVKRRKALCKRKSWMSKVFSGKRLEAEFPPHHSQSTFRKTSPAPGGPAGEGPLQSLTCLIGEKDLRLLEKLGDGSFGVVRRGEWDAPSGKTVSVAVKCLKPDVLSQPEAMDDFIREVNAMHSLDHRNLIRLYGVVLTPPMKMVTELAPLGSLLDRLRKHQGHFLLGTLSRYAVQVAEGMGYLESKRFIHRDLAARNLLLATRDLVKIGDFGLMRALPQNDDHYVMQEHRKVPFAWCAPESLKTRTFSHASDTWMFGVTLWEMFTYGQEPWIGLNGSQILHKIDKEGERLPRPEDCPQDIYNVMVQCWAHKPEDRPTFVALRDFLLEAQPTDMRALQDFEEPDKLHIQMNDVITVIEGRAENYWWRGQNTRTLCVGPFPRNVVTSVAGLSAQDISQPLQNSFIHTGHGDSDPRHCWGFPDRIDETPPSCDVRSGSVDWEAGGLCFRPKTTPGFLQDEGALMRFCHPSTRFPCSLDPALSSHRLYLGNPMDPPDLLSVELSTSRPPQHLGGVKKPTYDPVSEDQDPLSSDFKRLGLRKPGLPRGLWLAKPSARVPGTKASRGSGAEVTLIDFGEEPVVPALRPCAPSLAQLAMDACSLLDETPPQSPTRALPRPLHPTPVVDWDARPLPPPPAYDDVAQDEDDFEICSINSTLVGAGVPAGPSQGQTNYAFVPEQARPPPPLEDNLFLPPQGGGKPPSSAQTAEIFQALQQECMRQLQAPAGSPAPSPSPGGDDKPQVPPRVPIPPRPTRPHVQLSPAPPGEEETSQWPGPASPPRVPPREPLSPQGSRTPSPLVPPGSSPLPPRLSSSPGKTMPTTQSFASDPKYATPQVIQAPGPRAGPCILPIVRDGKKVSSTHYYLLPERPSYLERYQRFLREAQSPEEPTPLPVPLLLPPPSTPAPAAPTATVRPMPQAALDPKANFSTNNSNPGARPPPPRATARLPQRGCPGDGPEAGRPADKIQMAMVHGVTTEECQAALQCHGWSVQRAAQYLKVEQLFGLGLRPRGECHKVLEMFDWNLEQAGCHLLGSWGPAHHKR

SEQ ID NO: 760889 - protein, 1041 aa, Homo sapiens
MPAARRFPGLELSFPLLARLRRRLYTRLGGGRMQPEEGTGWLLELLSEVQLQQYFLRLRDDLNVTRLSHFEYVKNEDLEKIGMGRPGQRRLWEAVKRRKALCKRKSWMSKVFSGKRLEAEFPPHHSQSTFRKTSPAPGGPAGEGPLQSLTCLIGEKDLRLLEKLGDGSFGVVRRGEWDAPSGKTVSVAVKCLKPDVLSQPEAMDDFIREVNAMHSLDHRNLIRLYGVVLTPPMKMVTELAPLGSLLDRLRKHQGHFLLGTLSRYAVQVAEGMGYLESKRFIHRDLAARNLLLATRDLVKIGDFGLMRALPQNDDHYVMQEHRKVPFAWCAPESLKTRTFSHASDTWMFGVTLWEMFTYGQEPWIGLNGSQILHKIDKEGERLPRPEDCPQDIYNVMVQCWAHKPEDRPTFVALRDFLLEAQPTDMRALQDFEEPDKLHIQMNDVITVIEGRAENYWWRGQNTRTLCVGPFPRNVVTSVAGLSAQDISQPLQNSFIHTGHGDSDPRHCWGFPDRIDELYLGNPMDPPDLLSVELSTSRPPQHLGGVKKPTYDPVSEDQDPLSSDFKRLGLRKPGLPRGLWLAKPSARVPGTKASRGSGAEVTLIDFGEEPVVPALRPCAPSLAQLAMDACSLLDETPPQSPTRALPRPLHPTPVVDWDARPLPPPPAYDDVAQDEDDFEICSINSTLVGAGVPAGPSQGQTNYAFVPEQARPPPPLEDNLFLPPQGGGKPPSSAQTAEIFQALQQECMRQLQAPAGSPAPSPSPGGDDKPQVPPRVPIPPRPTRPHVQLSPAPPGEEETSQWPGPASPPRVPPREPLSPQGSRTPSPLVPPGSSPLPPRLSSSLVPASCPSSGMARRSAAPTITCCPSDHPTWSATSASCVRPRAPRSLPPLPVPLLLPPPSTPAPAAPTATVRPMPQAALDPKANFSTNNSNPGARPPPPRATARLPQRGCPGDGPEAGRPADKIQMAMVHGVTTEECQAALQCHGWSVQRAAQYLKVEQLFGLGLRPRGECHKVLEMFDWNLEQAGCHLLGSWGPAHHKR

SEQ ID NO: 760890 - protein, 761 aa, Homo sapiens
MPAARRFPGLELSFPLLARLRRRLYTRLGGGRMQPEEGTGWLLELLSEVQLQQYFLRLRDDLNVTRLSHFEYVKNEDLEKIGMGRPGQRRLWEAVKRRKALCKRKSWMSKVFSGKRLEAEFPPHHSQSTFRKTSPAPGGPAGEGPLQSLTCLIGEKDLRLLEKLGDGSFGVVRRGEWDAPSGKTVSVAVKCLKPDVLSQPEAMDDFIREVNAMHSLDHRNLIRLYGVVLTPPMKMVTELAPLGSLLDRLRKHQGHFLLGTLSRYAVQVAEGMGYLESKRFIHRDLAARNLLLATRDLVKIGDFGLMRALPQNDDHYVMQEHRKVPFAWCAPESLKTRTFSHASDTWMFGVTLWEMFTYGQEPWIGLNGSQILHKIDKEGERLPRPEDCPQDIYNVMVQCWAHKPEDRPTFVALRDFLLEAQPTDMRALQDFEEPDKLHIQMNDVITVIEGRAENYWWRGQNTRTLCVGPFPRNVVTSVAGLSAQDISQPLQNSFIHTGHGDSDPRHCWGFPDRIDELYLGNPMDPPDLLSVELSTSRPPQHLGGVKKPTYDPVSEDQDPLSSDFKRLGLRKPGLPRGLWLAKPSARVPGTKASRGSGAEVTLIDFGEEPVVPALRPCAPSLAQLAMDACSLLDETPPQSPTRALPRPLHPTPVVDWDARPLPPPPAYDDVAQDEDDFEICSINSTLVGAGVPAGPSQGQTNYAFVPEQARPPPPLEDNLFLPPQGGGKPPSSAQTAEIFQALQQECMRQLQAPAGSPAPSR

SEQ ID NO: 760891 - protein, 630 aa, Homo sapiens
MAFTVPSLSRRAENYWWRGQNTRTLCVGPFPRNVVTSVAGLSAQDISQPLQNSFIHTGHGDSDPRHCWGFPDRIDELYLGNPMDPPDLLSVELSTSRPPQHLGGVKKPTYDPVSEDQDPLSSDFKRLGLRKPGLPRGLWLAKPSARVPGTKASRGSGAEVTLIDFGEEPVVPALRPCAPSLAQLAMDACSLLDETPPQSPTRALPRPLHPTPVVDWDARPLPPPPAYDDVAQDEDDFEICSINSTLVGAGVPAGPSQGQTNYAFVPEQARPPPPLEDNLFLPPQGGGKPPSSAQTAEIFQALQQECMRQLQAPAGSPAPSPSPGGDDKPQVPPRVPIPPRPTRPHVQLSPAPPGEEETSQWPGPASPPRVPPREPLSPQGSRTPSPLVPPGSSPLPPRLSSSPGKTMPTTQSFASDPKYATPQVIQAPGPRAGPCILPIVRDGKKVSSTHYYLLPERPSYLERYQRFLREAQSPEEPTPLPVPLLLPPPSTPAPAAPTATVRPMPQAALDPKANFSTNNSNPGARPPPPRATARLPQRGCPGDGPEAGRPADKIQMAMVHGVTTEECQAALQCHGWSVQRAAQYLKVEQLFGLGLRPRGECHKVLEMFDWNLEQAGCHLLGSWGPAHHKR

SEQ ID NO: 760892 - protein, 1070 aa, Homo sapiens; identical to SEQ ID NO: 760887

SEQ ID NO: 760893 - protein, 548 aa, Homo sapiens
MDPPDLLSVELSTSRPPQHLGGVKKPTYDPVSEDQDPLSSDFKRLGLRKPGLPRGLWLAKPSARVPGTKASRGSGAEVTLIDFGEEPVVPALRPCAPSLAQLAMDACSLLDETPPQSPTRALPRPLHPTPVVDWDARPLPPPPAYDDVAQDEDDFEICSINSTLVGAGVPAGPSQGQTNYAFVPEQARPPPPLEDNLFLPPQGGGKPPSSAQTAEIFQALQQECMRQLQAPAGSPAPSPSPGGDDKPQVPPRVPIPPRPTRPHVQLSPAPPGEEETSQWPGPASPPRVPPREPLSPQGSRTPSPLVPPGSSPLPPRLSSSPGKTMPTTQSFASDPKYATPQVIQAPGPRAGPCILPIVRDGKKVSSTHYYLLPERPSYLERYQRFLREAQSPEEPTPLPVPLLLPPPSTPAPAAPTATVRPMPQAALDPKANFSTNNSNPGARPPPPRATARLPQRGCPGDGPEAGRPADKIQMAMVHGVTTEECQAALQCHGWSVQRAAQYLKVEQLFGLGLRPRGECHKVLEMFDWNLEQAGCHLLGSWGPAHHKR

SEQ ID NO: 760894 - protein, 817 aa, Homo sapiens
MPAARRFPGLELSFPLLARLRRRLYTRLGGGRMQPEEGTGWLLELLSEVQLQQYFLRLRDDLNVTRLSHFEYVKNEDLEKIGMGRPGQRRLWEAVKRRKALCKRKSWMSKVFSGKRLEAEFPPHHSQSTFRKTSPAPGGPAGEGPLQSLTCLIGEKDLRLLEKLGDGSFGVVRRGEWDAPSGKTVSVAVKCLKPDVLSQPEAMDDFIREVNAMHSLDHRNLIRLYGVVLTPPMKMVTELAPLGSLLDRLRKHQGHFLLGTLSRYAVQVAEGMGYLESKRFIHRDLAARNLLLATRDLVKIGDFGLMRALPQNDDHYVMQEHRKVPFAWCAPESLKTRTFSHASDTWMFGVTLWEMFTYGQEPWIGLNGSQILHKIDKEGERLPRPEDCPQDIYNVMVQCWAHKPEDRPTFVALRDFLLEAQPTDMRALQDFEEPDKLHIQMNDVITVIEGRAENYWWRGQNTRTLCVGPFPRNVVTSVAGLSAQDISQPLQNSFIHTGHGDSDPRHCWGFPDRIDELYLGNPMDPPDLLSVELSTSRPPQHLGGVKKPTYDPVSEDQDPLSSDFKRLGLRKPGLPRGLWLAKPSARVPGTKASRGSGAEVTLIDFGEEPVVPALRPCAPSLAQLAMDACSLLDETPPQSPTRALPRPLHPTPVVDWDARPLPPPPAYDDVAQDEDDFEICSINSTLVGAGVPAGPSQGQTNYAFVPEQARPPPPLEDNLFLPPQGGGKPPSSAQTAEIFQALQQECMRQLQAPAGSPAPSPSPGGDDKPQPGDPGPWPAGWSLHPAHRPGWQEGQQHPLLLAARATILPGALPALPA

SEQ ID NO: 760895 - protein, 328 aa, Homo sapiens
MPAARRFPGLELSFPLLARLRRRLYTRLGGGRMQPEEGTGWLLELLSEVQLQQYFLRLRDDLNVTRLSHFEYVKNEDLEKIGMGRPGQRRLWEAVKRRKALCKRKSWMSKVFSGKRLEAEFPPHHSQSTFRKTSPAPGGPAGEGPLQSLTCLIGEKDLRLLEKLGDGSFGVVRRGEWDAPSGKTVSVAVKCLKPDVLSQPEAMDDFIREVNAMHSLDHRNLIRLYGVVLTPPMKMVTELAPLGSLLDRLRKHQGHFLLGTLSRYAVQVAEGMGYLESKRFIHRDLAARNLLLATRDLVKIGDFGLMRALPQNDDHYVMQEHRKVPFAW

SEQ ID NO: 760896 - protein, 473 aa, Homo sapiens
EFREPAEAAAAARTGVRVRGRPPRAQGGAGKFRRTGGAAVGERRAGGGGPGSGPGARSRPELVGRVPAGGAGLAGEGRLGVQEANWLPGVQEGQVVRAVRKPTCTGRSPRRERDPARAQDPEAPAEEEVVTGRPGPHGTSGAEGDAGCRGMGSRAQKSAGNAELWEPLPEGRPRPAGTSSAVSAWASLKLCLRGGSGRRQRLGGGRMQPEEGTGWLLELLSEVQLQQYFLRLRDDLNVTRLSHFEYVKNEDLEKIGMGRPGQRRLWEAVKRRKALCKRKSWMSKVFSGKRLEAEFPPHHSQSTFRKTSPAPGGPAGEGPLQSLTCLIGEKDLRLLEKLGDGSFGVVRRGEWDAPSGKTVSVAVKCLKPDVLSQPEAMDDFIREVNAMHSLDHRNLIRLYGVVLTPPMKMVTELAPLGSLLDRLRKHQGHFLLGTLSRYAVQVAEGMGYLESKRFIHRDLAARNLLLATHGLLV

SEQ ID NO: 760897 - protein, 112 aa, Homo sapiens; identical to SEQ ID NO: 760886

SEQ ID NO: 760898 - protein, 1098 aa, Homo sapiens
MPAARRFPGLELSFPLLARLRRRLYTRLGGGRMQPEEGTGWLLELLSEVQLQQYFLRLRDDLNVTRLSHFEYVKNEDLEKIGMGRPGQRRLWEAVKRRKALCKRKSWMSKVFSGKRLEAEFPPHHSQSTFRKTSPAPGGPAGEGPLQSLTCLIGEKDLRLLEKLGDGSFGVVRRGEWDAPSGKTVSVAVKCLKPDVLSQPEAMDDFIREVNAMHSLDHRNLIRLYGVVLTPPMKMASVSQIASRERPEKLQDSYEVPRQQARKVTELAPLGSLLDRLRKHQGHFLLGTLSRYAVQVAEGMGYLESKRFIHRDLAARNLLLATRDLVKIGDFGLMRALPQNDDHYVMQEHRKVPFAWCAPESLKTRTFSHASDTWMFGVTLWEMFTYGQEPWIGLNGSQILHKIDKEGERLPRPEDCPQDIYNVMVQCWAHKPEDRPTFVALRDFLLEAQPTDMRALQDFEEPDKLHIQMNDVITVIEGRAENYWWRGQNTRTLCVGPFPRNVVTSVAGLSAQDISQPLQNSFIHTGHGDSDPRHCWGFPDRIDELYLGNPMDPPDLLSVELSTSRPPQHLGGVKKPTYDPVSEDQDPLSSDFKRLGLRKPGLPRGLWLAKPSARVPGTKASRGSGAEVTLIDFGEEPVVPALRPCAPSLAQLAMDACSLLDETPPQSPTRALPRPLHPTPVVDWDARPLPPPPAYDDVAQDEDDFEICSINSTLVGAGVPAGPSQGQTNYAFVPEQARPPPPLEDNLFLPPQGGGKPPSSAQTAEIFQALQQECMRQLQAPAGSPAPSPSPGGDDKPQVPPRVPIPPRPTRPHVQLSPAPPGEEETSQWPGPASPPRVPPREPLSPQGSRTPSPLVPPGSSPLPPRLSSSPGKTMPTTQSFASDPKYATPQVIQAPGPRAGPCILPIVRDGKKVSSTHYYLLPERPSYLERYQRFLREAQSPEEPTPLPVPLLLPPPSTPAPAAPTATVRPMPQAALDPKANFSTNNSNPGARPPPPRATARLPQRGCPGDGPEAGRPADKIQMAMVHGVTTEECQAALQCHGWSVQRAAQYLKVEQLFGLGLRPRGECHKVLEMFDWNLEQAGCHLLGSWGPAHHKR

SEQ ID NO: 760899 - protein, 1060 aa, Homo sapiens
FEQESGPSCHRSEVKERLGGGRMQPEEGTGWLLELLSEVQLQQYFLRLRDDLNVTRLSHFEYVKNEDLEKIGMGRPGQRRLWEAVKRRKALCKRKSWMSKVFSGKRLEAEFPPHHSQSTFRKTSPAPGGPAGEGPLQSLTCLIGEKDLRLLEKLGDGSFGVVRRGEWDAPSGKTVSVAVKCLKPDVLSQPEAMDDFIREVNAMHSLDHRNLIRLYGVVLTPPMKMVTELAPLGSLLDRLRKHQGHFLLGTLSRYAVQVAEGMGYLESKRFIHRDLAARNLLLATRDLVKIGDFGLMRALPQNDDHYVMQEHRKVPFAWCAPESLKTRTFSHASDTWMFGVTLWEMFTYGQEPWIGLNGSQILHKIDKEGERLPRPEDCPQDIYNVMVQCWAHKPEDRPTFVALRDFLLEAQPTDMRALQDFEEPDKLHIQMNDVITVIEGRAENYWWRGQNTRTLCVGPFPRNVVTSVAGLSAQDISQPLQNSFIHTGHGDSDPRHCWGFPDRIDELYLGNPMDPPDLLSVELSTSRPPQHLGGVKKPTYDPVSEDQDPLSSDFKRLGLRKPGLPRGLWLAKPSARVPGTKASRGSGAEVTLIDFGEEPVVPALRPCAPSLAQLAMDACSLLDETPPQSPTRALPRPLHPTPVVDWDARPLPPPPAYDDVAQDEDDFEICSINSTLVGAGVPAGPSQGQTNYAFVPEQARPPPPLEDNLFLPPQGGGKPPSSAQTAEIFQALQQECMRQLQAPAGSPAPSPSPGGDDKPQVPPRVPIPPRPTRPHVQLSPAPPGEEETSQWPGPASPPRVPPREPLSPQGSRTPSPLVPPGSSPLPPRLSSSPGKTMPTTQSFASDPKYATPQVIQAPGPRAGPCILPIVRDGKKVSSTHYYLLPERPSYLERYQRFLREAQSPEEPTPLPVPLLLPPPSTPAPAAPTATVRPMPQAALDPKANFSTNNSNPGARPPPPRATARLPQRGCPGDGPEAGRPADKIQMAMVHGVTTEECQAALQCHGWSVQRAAQYLKVEQLFGLGLRPRGECHKVLEMFDWNLEQAGCHLLGSWGPAHHKR

SEQ ID NO: 760900 - protein, 1025 aa, Homo sapiens
MPAARRFPGLELSFPLLARLRRRLYTRLGGGRMQPEEGTGWLLELLSEVQLQQYFLRLRDDLNVTRLSHFEYVKNEDLEKIGMGRPGQRRLWEAVKRRKALCKRKSWMSKVVSVAVKCLKPDVLSQPEAMDDFIREVNAMHSLDHRNLIRLYGVVLTPPMKMASVSQIASRERPEKLQDSYEVPRQQARKVTELAPLGSLLDRLRKHQGHFLLGTLSRYAVQVAEGMGYLESKRFIHRDLAARNLLLATRDLVKIGDFGLMRALPQNDDHYVMQEHRKVPFAWCAPESLKTRTFSHASDTWMFGVTLWEMFTYGQEPWIGLNGSQILHKIDKEGERLPRPEDCPQDIYNVMVQCWAHKPEDRPTFVALRDFLLEAQPTDMRALQDFEEPDKLHIQMNDVITVIEGRAENYWWRGQNTRTLCVGPFPRNVVTSVAGLSAQDISQPLQNSFIHTGHGDSDPRHCWGFPDRIDELYLGNPMDPPDLLSVELSTSRPPQHLGGVKKPTYDPVSEDQDPLSSDFKRLGLRKPGLPRGLWLAKPSARVPGTKASRGSGAEVTLIDFGEEPVVPALRPCAPSLAQLAMDACSLLDETPPQSPTRALPRPLHPTPVVDWDARPLPPPPAYDDVAQDEDDFEICSINSTLVGAGVPAGPSQGQTNYAFVPEQARPPPPLEDNLFLPPQGGGKPPSSAQTAEIFQALQQECMRQLQAPAGSPAPSPSPGGDDKPQVPPRVPIPPRPTRPHVQLSPAPPGEEETSQWPGPASPPRVPPREPLSPQGSRTPSPLVPPGSSPLPPRLSSSPGKTMPTTQSFASDPKYATPQVIQAPGPRAGPCILPIVRDGKKVSSTHYYLLPERPSYLERYQRFLREAQSPEEPTAPACASAAAPTQHPSPRRPTATVRPMPQAALDPKANFSTNNSNPGARPPPPRATARLPQRGCPGDGPEAGRPADKIQMAMVHGVTTEECQAALQCHGWSVQRAAQYLKVEQLFGLGLRPRGECHKVLEMFDWNLEQAGCHLLGSWGPAHHKR

SEQ ID NO: 760901 - protein, 719 aa, Homo sapiens
MPAARRFPGLELSFPLLARLRRRLYTRLGGGRMQPEEGTGWLLELLSEVQLQQYFLRLRDDLNVTRLSHFEYVKNEDLEKIGMGRPGQRRLWEAVKRRKALCKRKSWMSKVFSGKRLEAEFPPHHSQSTFRKTSPAPGGPAGEGPLQSLTCLIGEKDLRLLEKLGDGSFGVVRRGEWDAPSGKTVSPPQPAFFTQKPTYDPVSEDQDPLSSDFKRLGLRKPGLPRGLWLAKPSARVPGTKASRGSGAEVTLIDFGEEPVVPALRPCAPSLAQLAMDACSLLDETPPQSPTRALPRPLHPTPVVDWDARPLPPPPAYDDVAQDEDDFEICSINSTLVGAGVPAGPSQGQTNYAFVPEQARPPPPLEDNLFLPPQGGGKPPSSAQTAEIFQALQQECMRQLQAPAGSPAPSPSPGGDDKPQVPPRVPIPPRPTRPHVQLSPAPPGEEETSQWPGPASPPRVPPREPLSPQGSRTPSPLVPPGSSPLPPRLSSSPGKTMPTTQSFASDPKYATPQVIQAPGPRAGPCILPIVRDGKKVSSTHYYLLPERPSYLERYQRFLREAQSPEEPTPLPVPLLLPPPSTPAPAAPTATVRPMPQAALDPKANFSTNNSNPGARPPPPRATARLPQRGCPGDGPEAGRPADKIQMAMVHGVTTEECQAALQCHGWSVQRAAQYLKVEQLFGLGLRPRGECHKVLEMFDWNLEQAGCHLLGSWGPAHHKR

SEQ ID NO: 760902 - protein, 668 aa, Homo sapiens
MPAARRFPGLELSFPLLARLRRRLYTRLGGGRMQPEEGTGWLLELLSEVQLQQYFLRLRDDLNVTRLSHFEYVKNEDLEKIGMGRPGQRRLWEAVKRRKALCKRKSWMSKVFSGKRLEAEFPPHHSQSTFRKTSPAPGGPAGEGPLQSLTCLIGEKDLRLLEKLGDGSFGVVRRGEWDAPSGKTVSVAVKCLKPDVLSQPEAMDDFIREVNAMHSLDHRNLIRLYGVVLTPPMKMVTELAPLGSLLDRLRKHQGHFLLGTLSRYAVQVAEGMGYLESKRFIHRDLAARNLLLATRDLVKIGDFGLMRALPQNDDHYVMQEHRKVPFAWCAPESLKTRTFSHASDTWMFGVTLWEMFTYGQEPWIGLNGSQILHKIDKEGERLPRPEDCPQDIYNVMVQCWAHKPEDRPTFVALRDFLLEAQPTDMRALQDFEEPDKLHIQMNDVITVIEGRAENYWWRGQNTRTLCVGPFPRNVVTSVAGLSAQDISQPLQNSFIHTGHGDSDPRHCWGFPDRIDELYLGNPMDPPDLLSVELSTSRPPQHLGGVKKPTYDPVSEDQDPLSSDFKRLGLRKPGLPRGLWLAKPSARVPGTKASRGSGAEVTLIDFAPSWARGSLPGPARARPTTPLCLSRRGRPLPWRTTCSSRPRVGASRPAPHRPQRSSRRYSRSA

SEQ ID NO: 760903 - protein, 1070 aa, Homo sapiens; identical to SEQ ID NO: 760887

SEQ ID NO: 760904 - protein, 328 aa, Homo sapiens; identical to SEQ ID NO: 760895

SEQ ID NO: 760905 - protein, 255 aa, Homo sapiens
MPAARRFPGLELSFPLLARLRRRLYTRLGGGRMQPEEGTGWLLELLSEVQLQQYFLRLRDDLNVTRLSHFEYVKNEDLEKIGMGRPGQRRLWEAVKRRKALCKRKSWMSKVVSVAVKCLKPDVLSQPEAMDDFIREVNAMHSLDHRNLIRLYGVVLTPPMKMVTELAPLGSLLDRLRKHQGHFLLGTLSRYAVQVAEGMGYLESKRFIHRDLAARNLLLATRDLVKIGDFGLMRALPQNDDHYVMQEHRKVPFAW

SEQ ID NO: 760906 - protein, 1238 aa, Homo sapiens [sequence omitted]

SEQ ID NO: 760907 - protein, 199 aa, Homo sapiens
TAETARSPCRLRAPGRGLYVLTPHCVCSQQCGHRWGPLSQPQVSSGPRPLLGTARLAASWFPAPWLGDRAARISWARVRGPLVRSLAQPGRLEAQCAGGGHTAVSHLQLFPGPHLECPVSLTLYKLFSNCQAENNGVFSDSCYFCKVSVRGTRCMKGESKGCLRRHQIVAFVTRGCALFTESSFYSSLGFLCGSRPKCR

SEQ ID NO: 760908 - protein, 1265 aa, Homo sapiens
MRAQGRGRLPRRLLLLLALWVQAARPMGYFELQLSALRNVNGELLSGACCDGDGRTTRAGGCGHDECDTYVRVCLKEYQAKVTPTGPCSYGHGATPVLGGNSFYLPPAGAAGDRARARARAGGDQDPGLVVIPFQFAWPRSFTLIVEAWDWDNDTTPNEELLIERVSHAGMINPEDRWKSLHFSGHVAHLELQIRVRCDENYYSATCNKFCRPRNDFFGHYTCDQYGNKACMDGWMGKECKEAVCKQGCNLLHGGCTVPGECRCSYGWQGRFCDECVPYPGCVHGSCVEPWQCNCETNWGGLLCDKDLNYCGSHHPCTNGGTCINAEPDQYRCTCPDGYSGRNCEKAEHACTSNPCANGGSCHEVPSGFECHCPSGWSGPTCALDIDECASNPCAAGGTCVDQVDGFECICPEQWVGATCQLDANECEGKPCLNAFSCKNLIGGYYCDCIPGWKGINCHINVNDCRGQCQHGGTCKDLVNGYQCVCPRGFGGRHCELERDKCASSPCHSGGLCEDLADGFHCHCPQGFSGPLCEVDVDLCEPSPCRNGARCYNLEGDYYCACPDDFGGKNCSVPREPCPGGACRGAGLRHGVVGEVVGQGRACLLTVLPAIVIDGCGSDAGPGMPGTAASGVCGPHGRCVSQPGGNFSCICDSGFTGTYCHENIDDCLGQPCRNGGTCIDEVDAFRCFCPSGWEGELCDTNPNDCLPDPCHSRGRCYDLVNDFYCACDDGWKGKTCHSREFQCDAYTCSNGGTCYDSGDTFRCACPPGWKGSTCAVAKNSSCLPNPCVNGGTCVGSGASFSCICRDGWEGRTCTHNTNDCNPLPCYNGGICVDGVNWFRCECAPGFAGPDCRINIDECQSSPCAYGATCVDEINGYRCSCPPGRAGPRCQEVIGFGRSCWSRGTPFPHGSSWVEDCNSCRCLDGRRDCSKVWCGWKPCLLAGQPEALSAQCPLGQRCLEKAPGQCLRPPCEAWGECGAEEPPSTPCLPRSGHLDNNCARLTLHFNRDHVPQGTTVGAICSGIRSLPATRAVARDRLLVLLCDRASSGASAVEVAVSFSPARDLPDSSLIQGAAHAIVAAITQRGNSSLLLAVTEVKVETVVTGGSSTGLLVPVLCGAFSVLWLACVVLCVWWTRKRRKERERSRLPREESANNQWAPLNPIRNPIERPGGHKDVLYQCKNFTPPPRRADEALPGPAGHAAVREDEEDEDLGRGEEDSLEAEKFLSHKFTKDPGRSPGRPAHWASGPKVDNRAVRSINEARYAGKE

SEQ ID NO: 760909 - protein, 290 aa, Homo sapiens
MLGRGWGLILAEARSGHLDNNCARLTLHFNRDHVPQGTTVGAICSGIRSLPATRAVARDRLLVLLCDRASSGASAVEVAVSFSPARDLPDSSLIQGAAHAIVAAITQRGNSSLLLAVTEVKVETVVTGGSSTGLLVPVLCGAFSVLWLACVVLCVWWTRKRRKERERSRLPREESANNQWAPLNPIRNPIERPGGHKDVLYQCKNFTPPPRRADEALPGPAGHAAVREDEEDEDLGRGEEDSLEAEKFLSHKFTKDPGRSPGRPAHWASGPKVDNRAVRSINEARYAGKE

SEQ ID NO: 760910 - protein, 430 aa, Homo sapiens
LIRSGILGSGFAGPDCRINIDECQSSPCAYGATCVDEINGYRCSCPPGRAGPRCQEVIGFGRSCWSRGTPFPHGSSWVEDCNSCRCLDGRRDCSKVWCGWKPCLLAGQPEALSAQCPLGQRCLEKAPGQCLRPPCEAWGECGAEEPPSTPCLPRSGHLDNNCARLTLHFNRDHVPQGTTVGAICSGIRSLPATRAVARDRLLVLLCDRASSGASAVEVAVSFSPARDLPDSSLIQGAAHAIVAAITQRGNSSLLLAVTEVKVETVVTGGSSTGLLVPVLCGAFSVLWLACVVLCVWWTRKRRKERERSRLPREESANNQWAPLNPIRNPIERPGGHKDVLYQCKNFTPPPRRADEALPGPAGHAAVREDEEDEDLGRGEEDSLEAEKFLSHKFTKDPGRSPGRPAHWASGPKVDNRAVRSINEARYAGKE

SEQ ID NO: 760911 - protein, 1334 aa, Homo sapiens
HAYAGARVTNGRASCQSRSELVGCGAGSAGAQSPRPGPAAFTAAAVAAGWEPGRAAGARPPASRSCRRPCTPAAQARAPDAALDPARAAAAAASAAAAASAGARRAGGRWEAGAAAGSRARAAAAGPGGRVAGAMRAQGRGRLPRRLLLLLALWVQAARPMGYFELQLSALRNVNGELLSGACCDGDGRTTRAGGCGHDECDTYVRVCLKEYQAKVTPTGPCSYGHGATPVLGGNSFYLPPAGAAGDRARARARAGGDQDPGLVVIPFQFAWPRSFTLIVEAWDWDNDTTPNEELLIERVSHAGMINPEDRWKSLHFSGHVAHLELQIRVRCDENYYSATCNKFCRPRNDFFGHYTCDQYGNKACMDGWMGKECKEAVCKQGCNLLHGGCTVPGECRCSYGWQGRFCDECVPYPGCVHGSCVEPWQCNCETNWGGLLCDKDLNYCGSHHPCTNGGTCINAEPDQYRCTCPDGYSGRNCEKAEHACTSNPCANGGSCHEVPSGFECHCPSGWSGPTCALDIDECASNPCAAGGTCVDQVDGFECICPEQWVGATCQLDVNDCRGQCQHGGTCKDLVNGYQCVCPRGFGGRHCELERDKCASSPCHSGGLCEDLADGFHCHCPQGFSGPLCEVDVDLCEPSPCRNGARCYNLEGDYYCACPDDFGGKNCSVPREPCPGGACRVIDGCGSDAGPGMPGTAASGVCGPHGRCVSQPGGNFSCICDSGFTGTYCHENIDDCLGQPCRNGGTCIDEVDAFRCFCPSGWEGELCDTNPNDCLPDPCHSRGRCYDLVNDFYCACDDGWKGKTCHSREFQCDAYTCSNGGTCYDSGDTFRCACPPGWKGSTCAVAKNSSCLPNPCVNGGTCVGSGASFSCICRDGWEGRTCTHNTNDCNPLPCYNGGICVDGVNWFRCECAPGFAGPDCRINIDECQSSPCAYGATCVDEINGYRCSCPPGRAGPRCQEVIGFGRSCWSRGTPFPHGSSWVEDCNSCRCLDGRRDCSKVWCGWKPCLLAGQPEALSAQCPLGQRCLEKAPGQCLRPPCEAWGECGAEEPPSTPCLPRSGHLDNNCARLTLHFNRDHVPQGTTVGAICSGIRSLPATRAVARDRLLVLLCDRASSGASAVEVAVSFSPARDLPDSSLIQGAAHAIVAAITQRGNSSLLLAVTEVKVETVVTGGSSTGLLVPVLCGAFSVLWLACVVLCVWWTRKRRKERERSRLPREESANNQWAPLNPIRNPIERPGGHKDVLYQCKNFTPPPRRADEALPGPAGHAAVREDEEDEDLGRGEEDSLEAEKFLSHKFTKDPGRSPGRPAHWASGPKVDNRAVRSINEARYAGKE

SEQ ID NO: 760912 - protein, 1244 aa, Homo sapiens
MRAQGRGRLPRRLLLLLALWVQAARPMGYFELQLSALRNVNGELLSGACCDGDGRTTRAGGCGHDECDTYVRVCLKEYQAKVTPTGPCSYGHGATPVLGGNSFYLPPAGAAGDRARARARAGGDQDPGLVVIPFQFAWPRSFTLIVEAWDWDNDTTPNEELLIERVSHAGMINPEDRWKSLHFSGHVAHLELQIRVRCDENYYSATCNKFCRPRNDFFGHYTCDQYGNKACMDGWMGKECKEAVCKQGCNLLHGGCTVPGECRCSYGWQGRFCDECVPYPGCVHGSCVEPWQCNCETNWGGLLCDKDLNYCGSHHPCTNGGTCINAEPDQYRCTCPDGYSGRNCEKAEHACTSNPCANGGSCHEVPSGFECHCPSGWSGPTCALDIDECASNPCAAGGTCVDQVDGFECICPEQWVGATCQLDANECEGKPCLNAFSCKNLIGGYYCDCIPGWKGINCHINVNDCRGQCQHGGTCKDLVNGYQCVCPRGFGGRHCELERDKCASSPCHSGGLCEDLADGFHCHCPQGFSGPLCEAPPTLQVDVDLCEPSPCRNGARCYNLEGDYYCACPDDFGGKNCSVPREPCPGGACRVIDGCGSDAGPGMPGTAASGVCGPHGRCVSQPGGNFSCICDSGFTGTYCHENIDDCLGQPCRNGGTCIDEVDAFRCFCPSGWEGELCDTNPNDCLPDPCHSRGRCYDLVNDFYCACDDGWKGKTCHSREFQCDAYTCSNGGTCYDSGDTFRCACPPGWKGSTCAVAKNSSCLPNPCVNGGTCVGSGASFSCICRDGWEGRTCTHNTNDCNPLPCYNGGICVDGVNWFRCECAPGFAGPDCRINIDECQSSPCAYGATCVDEINGYRCSCPPGRAGPRCQEVIGFGRSCWSRGTPFPHGSSWVEDCNSCRCLDGRRDCSKVWCGWKPCLLAGQPEALSAQCPLGQRCLEKAPGQCLRPPCEAWGECGAEEPPSTPCLPRSGHLDNNCARLTLHFNRDHVPQGTTVGAICSGIRSLPATRAVARDRLLVLLCDRASSGASAVEVAVSFSPARDLPDSSLIQGAAHAIVAAITQRGNSSLLLAVTEVKVETVVTGGSSTGLLVPVLCGAFSVLWLACVVLCVWWTRKRRKERERSRLPREESANNQWAPLNPIRNPIERPGGHKDVLYQCKNFTPPPRRADEALPGPAGHAAVREDEEDEDLGRGEEDSLEAEKFLSHKFTKDPGRSPGRPAHWASGPKVDNRAVRSINEARYAGKE

SEQ ID NO: 760913 - protein, 884 aa, Homo sapiens
MRAQGRGRLPRRLLLLLALWVQAARPMGYFELQLSALRNVNGELLSGACCDGDGRTTRAGGCGHDECDTYVRVCLKEYQAKVTPTGPCSYGHGATPVLGGNSFYLPPAGAAGDRARARARAGGDQDPGLVVIPFQFAWPRSFTLIVEAWDWDNDTTPNEELLIERVSHAGMINPEDRWKSLHFSGHVAHLELQIRVRCDENYYSATCNKFCRPRNDFFGHYTCDQYGNKACMDGWMGKECKEAVCKQGCNLLHGGCTVPGECRCSYGWQGRFCDECVPYPGCVHGSCVEPWQCNCETNWGGLLCDKDLNYCGSHHPCTNGGTCINAEPDQYRCTCPDGYSGRNCEKAEHACTSNPCANGGSCHEVPSGFECHCPSGWSGPTCALDIDECASNPCAAGGTCVDQVDGFECICPEQWVGATCQLDANECEGKPCLNAFSCKNLIGGYYCDCIPGWKGINCHINVNDCRGQCQHGGTCKDLVNGYQCVCPRGFGGRHCELERDKCASSPCHSGGLCEDLADGFHCHCPQGFSGPLCEVDVDLCEPSPCRNGARCYNLEGDYYCACPDDFGGKNCSVPREPCPGGACRVIDGCGSDAGPGMPGTAASGVCGPHGRCVSQPGGNFSCICDSGFTGTYCHENIDDCLGQPCRNGGTCIDEVDAFRCFCPSGWEGELCDTNPNDCLPDPCHSRGRCYDLVNDFYCACDDGWKGKTCHSREFQCDAYTCSNGGTCYDSGDTFRCACPPGWKGSTCAVAKNSSCLPNPCVNGGTCVGSGASFSCICRDGWEGRTCTHNTNDCNPLPWWWHPGGHSRGGWDLAYNGGPPDAHPLLCSYNGGICVDGVNWFRCECAPGFAGPDCRISEWPDSPSPGSPSAQPRCQESGDINVHVP

SEQ ID NO: 760914 - protein, 345 aa, Homo sapiens
RLTLLCVPAQVWCGWKPCLLAGQPEALSAQCPLGQRCLEKAPGQCLRPPCEAWGECGAEEPPSTPCLPRSGHLDNNCARLTLHFNRDHVPQGTTVGAICSGIRSLPATRAVARDRLLVLLCDRASSGASAVEVAVSFSPARDLPDSSLIQGAAHAIVAAITQRGNSSLLLAVTEVKVETVVTGGSSTGLLVPVLCGAFSVLWLACVVLCVWWTRKRRKERERSRLPREESANNQWAPLNPIRNPIERPGGHKDVLYQCKNFTPPPRRADEALPGPAGHAAVREDEEDEDLGRGEEDSLEAEKFLSHKFTKDPGRSPGRPAHWASGPKVDNRAVRSINEARYAGKE

SEQ ID NO: 760915 - protein, 234 aa, Homo sapiens
VTLRIFGRSDQGSRHDSEQDNSDNNTIFVQGLGENVTIESVADYFKQIGIIKTNKKTGQPMINLYTDRETGKLKGEATVSFDDPPSAKAAIDWFDGKEFSGNPIKVSFATRPSGRSARTMQNLNDRLASYLDKVRALEEANADLEVKIRDWYQRQRPAEIKDYSPYFKTIEDLRNKILTATVDNANVLLQIDNARLAADDFRTKYETELNLRMSVEADINGLRRVLDELDLVRA

SEQ ID NO: 760916 - protein, 271 aa, Homo sapiens
LVRGWVCIGRGGYEPRGRGGGRGGRGGMGGSDRGGFNKFGGPRDQGSRHDSEQDNSDNNTIFVQGLGENVTIESVADYFKQIGIIKTNKKTGQPMINLYTDRETGKLKGEATVSFDDPPSAKAAIDWFDGKEFSGNPIKVSFATRRADFNRGGGNGRGGRGRGGPMGRGGYGGGGSGGGGRGGFPSGGGGGGGQQRAGDWKCPNPTCENMNFSWRNECNQCKAPKPDGPGGGPGGSHMGGYYADDRRGAEEDMTRRERGRGDGEPKAGGAQ

SEQ ID NO: 760917 - protein, 373 aa, Homo sapiens
MDYGAYPTQPGQGYSQQSSQPYGQQSYSGYSQSTDTSGYGQSSYSSYGQSQNTGYGTQSTPQGYGSTGGYGSSQSSQSSYGQQSSYPGYGQQPAPSSTSGSYGSSSQSSSYGQPQSGSYSQQPSYGGQQQSYGQQQSYNPPQGYGQQNQYNSSSGGGGGGGGGGNYGQDQSSMSSGGGSGGGYGNQDQSGGGGSGGYGQQDRGGRGRGGSGGGGGGGGGGYNRSSGGYEPRGRGGGRGGRGGMGGSDRGGFNKFGGPADPTDTYGHKRYRTKGQEGHSPIKAPQSSACHSGARGGAGPAAKPAGEGYAVPVIQRHEHSTAEQHQQQHSNTSTRPSATAKHTSIPSTDMDRDIKGQGAEQLPAVCPWGGQPKPP

SEQ ID NO: 760918 - protein, 97 aa, Homo sapiens
FIDATSMVAQAMGVGGSGGGGRGGFPSGGGGGGGQQRAGDWKCPNPTCENMNFSWRNECNQCKAPKPDGPGGGPGGSHMGGNYGDDRRASITPYDIR

SEQ ID NO: 760919 - protein, 561 aa, Homo sapiens
PPVPVRNSRLLSPPGVGAQRCWNFVACLPVRACADMASNDYTQQATQSYGAYPTQPGQGYSQQSSQPYGQQSYSGYSQSTDTSGYGQSSYSSYGQSQNTGYGTQSTPQGYGSTGGYGSSQSSQSSYGQQSSYPGYGQQPAPSSTSGSYGSSSQSSSYGQPQSGSYSQQPSYGGQQQSYGQQQSYNPPQGYGQQNQYNSSSGGGGGGGGGGNYGQDQSSMSSGGGSGGGYGNQDQSGGGGSGGYGQQDRGGRGRGGSGGGGGGGGGGYNRSSGGYEPRGRGGGRGGRGGMGGSDRGGFNKFGGPRDQGSRHDSEQDNSDNNTIFVQGLGENVTIESVADYFKQIGIIKTNKKTGQPMINLYTDRETGKLKGEATVSFDDPPSAKAAIDWFDGKEFSGNPIKVSFATRRADFNRGGGNGRGGRGRGGPMGRGGYGGGGSGGGGRGGFPSGGGGGGGQQRAGDWKCPNPTCENMNFSWRNECNQCKAPKPDGPGGGPGGSHMGGNYGDDRRGGRGGYDRGGYRGRGGDRGGFRGGRGGGDRGGFGPGKMDSRGEHRQDRRERPY

SEQ ID NO: 760920 - protein, 561 aa, Homo sapiens; identical to SEQ ID NO: 760919

SEQ ID NO: 760921 - protein, 561 aa, Homo sapiens; identical to SEQ ID NO: 760919

SEQ ID NO: 760922 - protein, 290 aa, Homo sapiens
PPVPVRNSRLLSPPGVGAQRCWNFVACLPVRACADMASNDYTQQATQSYGAYPTQPGQGYSQQSSQPYGQQSYSGYSQSTDTSGYGQSSYSSYGQSQNTGYGTQSTPQGYGSTGGYGSSQSSQSSYGQQSSYPGYGQQPAPSSTSGSYGSSSQSSSYGQPQSGSYSQQPSYGGQQQSYGQQQSYNPPQGYGQQNQYNSSSGGGGGGGGGGNYGQDQSSMSSGGGSGGGYGNQDQSGGGGSGGYGQQDRGGRGRGGSGGGGGGGGGGYNRSSGGYEPRGRGGGRGGRGGMG

SEQ ID NO: 760923 - protein, 290 aa, Homo sapiens; identical to SEQ ID NO: 760922

SEQ ID NO: 760924 - protein, 561 aa, Homo sapiens; identical to SEQ ID NO: 760919

SEQ ID NO: 760925 - protein, 561 aa, Homo sapiens; identical to SEQ ID NO: 760919

SEQ ID NO: 760926 - protein, 561 aa, Homo sapiens; identical to SEQ ID NO: 760919

SEQ ID NO: 760927 - protein, 290 aa, Homo sapiens; identical to SEQ ID NO: 760922

SEQ ID NO: 760928 - protein, 495 aa, Homo sapiens
PPVPVRNSRLLSPPGVGAQRCWNFVACLPVRACADMASNDYTQQATQSYGAYPTQPGQGYSQQSSQPYGQQSYSGYSQSTDTSGYGQSSYSSYGQSQNTGYGTQSTPQGYGSTGGYGSSQSSQSSYGQQSSYPGYGQQPAPSSTSGSYGSSSQSSSYGQPQSGSYSQQPSYGGQQQSYGQQQSYNPPQGYGQQNQYNSSSGGGGGGGGGGNYGQDQSSMSSGGGSGGGYGNQDQSGGGGSGGYGQQDRGGRGRGGSGGGGGGGGGGYNRSSGGYEPRGRGGGRGGRGGMGGSDRGGFNKFGGPRDQGSRHDSEQDNSDNNTIFVQGLGENVTIESVADYFKQIGIIKTNKKTGQPMINLYTDRETGKLKGEATVSFDDPPSAKAAIDWFDGKEFSGNPIKVSFATRRADFNRGGGNGRGGRGRGGPMGRGGYGGGGSGGGGRGGFPSGGGGGGGQQRAGDWKCPNPTCENMNFSWRNECNHRWPRRGTRWLSHGG

SEQ ID NO: 760929 - protein, 516 aa, Homo sapiens
PPVPVRNSRLLSPPGVGAQRCWNFVACLPVRACADMASNDYTQQATQSYGAYPTQPGQGYSQQSSQPYGQQSYSGYSQSTDTSGYGQSSYSSYGQSQNTGYGTQSTPQGYGSTGGYGSSQSSQSSYGQQSSYPGYGQQPAPSSTSGSYGSSSQSSSYGQPQSGSYSQQPSYGGQQQSYGQQQSYNPPQGYGQQNQYNSSSGGGGGGGGGGNYGQDQSSMSSGGGSGGGYGNQDQSGGGGSGGYGQQDRGGRGRGGSGGGGGGGGGGYNRSSGGYEPRGRGGGRGGRGGMGGSDRGGFNKFGGPRDQGSRHDSEQDNSDNNTIFVQGLGENVTIESVADYFKQIGIIKTNKKTGQPMINLYTDRETGKLKGEATVSFDDPPSAKAAIDWFDGKEFSGNPIKVSFATRRADFNRGGGNGRGGRGRGGPMGRGGYGGGGSGGGGRGGFPSGGGGGGGQQRAGDWKCPNPTCENMNFSWRNECNQCKAPKPDGPGGGPGGSHMGGNYGDDRPVAVWRVPG

SEQ ID NO: 760930 - protein, 524 aa, Homo sapiens
PPVPVRNSRLLSPPGVGAQRCWNFVACLPVRACADMASNDYTQQATQSYGAYPTQPGQGYSQQSSQPYGQQSYSGYSQSTDTSGYGQSSYSSYGQSQNTGYGTQSTPQGYGSTGGYGSSQSSQSSYGQQSSYPGYGQQPAPSSTSGSYGSSSQSSSYGQPQSGSYSQQPSYGGQQQSYGQQQSYNPPQGYGQQNQYNSSSGGGGGGGGGGNYGQDQSSMSSGGGSGGGYGNQDQSGGGGSGGYGQQDRGGRGRGGSGGGGGGGGGGYNRSSGGYEPRGRGGGRGGRGGMGGSDRGGFNKFGGPRDQGSRHDSEQDNSDNNTIFVQGLGENVTIESVADYFKQIGIIKTNKKTGQPMINLYTDRETGKLKGEATVSFDDPPSAKAAIDWFDGKEFSGNPIKVSFATRRADFNRGGGNGRGGRGRGGPMGRGGYGGGGSGGGGRGGFPSGGGGGGGQQRAGDWKCPNPTCENMNFSWRNECNQCKAPKPDGPGGGPGGSHMGGNYGDDRRGGSEHKVGENIRVGQT

SEQ ID NO: 760931 - protein, 290 aa, Homo sapiens; identical to SEQ ID NO: 760922

SEQ ID NO: 760932 - protein, 290 aa, Homo sapiens; identical to SEQ ID NO: 760922

SEQ ID NO: 760933 - protein, 290 aa, Homo sapiens; identical to SEQ ID NO: 760922

SEQ ID NO: 760934 - protein, 290 aa, Homo sapiens; identical to SEQ ID NO: 760922

SEQ ID NO: 760935 - protein, 419 aa, Homo sapiens
PPVPVRNSRLLSPPGVGAQRCWNFVACLPVRACADMASNDYTQQATQSYGAYPTQPGQGYSQQSSQPYGQQSYSGYSQSTDTSGYGQSSYSSYGQSQNTGYGTQSTPQGYGSTGGYGSSQSSQSSYGQQSSYPGYGQQPAPSSTSGSYGSSSQSSSYGQPQSGSYSQQPSYGGQQQSYGQQQSYNPPQGYGQQNQYNSSSGGGGGGGGGGNYGQDQSSMSSGGGSGGGYGNQDQSGGGGSGGYGQQDRGGRGRGGSGGGGGGGGGGYNRSSGGYEPRGRGGGRGGRGGMGGSDRGGFNKFGGPADPTDTYGHKRYRTKGQEGHCHIKAPQSSACHSGARGGAGPAAKPAGEGYAVPVIQRHEHSTAEQHQQQHSNTSTRPSATAKHTSIPSTDMDRDIKGQGAEQLPAVCPWGGQPKPP

SEQ ID NO: 760936 - protein, 405 aa, Homo sapiens
PPVPVRNSRLLSPPGVGAQRCWNFVACLPVRACADMASNDYTQQATQSYGAYPTQPGQGYSQQSSQPYGQQSYSGYSQSTDTSGYGQSSYSSYGQSQNTGYGTQSTPQGYGSTGGYGSSQSSQSSYGQQSSYPGYGQQPAPSSTSGSYGSSSQSSSYGQPQSGSYSQQPSYGGQQQSYGQQQSYNPPQGYGQQNQYNSSSGGGGGGGGGVFKKEVYLHTSPHLKADVLFQTDPTAEMAAESLPFSFGTLSSWELEAWYEDLQEVLSSDENGGTYVSPPGNEEEESKIFTTLDPASLAWLTEEEPEPAEVTSTSQSPHSPDSSQSSLAQEEEEEDQGRTRKRKQSGHSPARAGKQRMKEKEQENERKVAQLAEENERLKQEIERLTREVEATRRALIDRMVNLHQA

SEQ ID NO: 760937 - protein, 244 aa, Homo sapiens
PPVPVRNSRLLSPPGVGAQRCWNFVACLPVRACADMASNDYTQQATQSYGAYPTQPGQGYSQQSSQPYGQQSYSGYSQSTDTSGYGQSSYSSYGQSQNTGYGTQSTPQGYGSTGGYGSSQSSQSSYGQQSSYPGYGQQPAPSSTSGSYGSSSQSSSYGQPQSGSYSQQPSYGGQQQSYGQQQSYNPPQGYGQQNQYNSSSGGGGGGGGGGNYGQDQSSTPGPLSSFIPCLMLREAQNKLFVTLK

SEQ ID NO: 760938 - protein, 174 aa, Homo sapiens
PPVPVRNSRLLSPPGVGAQRCWNFVACLPVRACADMASNDYTQQATQSYGAYPTQPGQGYSQQSSQPYGQQSYSGYSQSTDTSGYGQSSYSSYGQSQNSESFSAGHLFLLFLNIAFLFLVFWRRSLVLLPRLECSGAVSAHCNISLPGSNDSPASATEEAEAGGSLEFRSLGLQ

SEQ ID NO: 760939 - protein, 216 aa, Homo sapiens
SLAPISVGHKRLRLQVPSQEANSVAFSSLMGEDCAHLASQQDNSDNNTIFVQGLGENVTIESVADYFKQIGIIKTNKKTGQPMINLYTDRETGKLKGEDAASLLPSVLCMAIIGVEVSLISHGGVVISRLLMRYWEVGINRGGDRMISTAAGRPRMVGAMNEANRFSFISVPDGRKMRLFVPSGPHESTSSVTVQSPQILSTWLSTSSSLLMGEDG

SEQ ID NO: 760940 - protein, 561 aa, Homo sapiens; identical to SEQ ID NO: 760919

SEQ ID NO: 760941 - protein, 343 aa, Homo sapiens
MSSGGGSGGGYGNQDQSGGGGSGGYGQQDRGGRGRGGSGGGGGGGGGGYNRSSGGYEPRGRGGGRGGRGGMGGSDRGGFNKFGGPRDQGSRHDSEQDNSDNNTIFVQGLGENVTIESVADYFKQIGIIKTNKKTGQPMINLYTDRETGKLKGEATVSFDDPPSAKAAIDWFDGKEFSGNPIKVSFATRRADFNRGGGNGRGGRGRGGPMGRGGYGGGGSGGGGRGGFPSGGGGGGGQQRAGDWKCPNPTCENMNFSWRNECNQCKAPKPDGPGGGPGGSHMGGNYGDDRRGGRGGYDRGGYRGRGGDRGGFRGGRGGGDRGGFGPGKMDSRGEHRQDRRERPY

SEQ ID NO: 760942 - protein, 549 aa, Homo sapiens
PPVPVRNSRLLSPPGVGAQRCWNFVACLPVRACADMASNDYTQQATQSYGAYPTQPGQGYSQQSSQPYGQQSYSGYSQSTDTSGYGQSSYSSYGQSQNTGYGTQSTPQGYGSTGGYGSSQSSQSSYGQQSSYPGYGQQPAPSSTSGSYGSSSQSSSYGQPQSGSYSQQPSYGGQQQSYGQQQSYNPPQGYGQQNQYNSSSGGGGGGGGGGNYGQDQSSMSSGGGSGGGYGNQDQSGGGGSGGYGQQDRGGRGRGGSGGGGGGGGGGYNRSSGGYEPRGRGGGRGGRGGMGGSDRGGFNKFGGPRDQGSRHDSEQDNSDNNTIFVQGLGENVTIESVADYFKQIGIIKTNKKTGQPMINLYTDRETGKLKGEATVSFDDPPSAKAAIDWFDGKEFSGNPIKVSFATRRADFNRGGGNGRGGRGRGGPMGRGGYGGGGSGGGGRGGFPSGGGGGGGQQRAGDWKCPNPTCENMNFSWRNECNQCKAPKPDGPGGGPGGSHMGGNYGDDRRGGRGGYDRGGYRGRGGDRGGFRGGRGGGDRGGFGPGKMDSR

SEQ ID NO: 760943 - protein, 321 aa, Homo sapiens
MAIKTRVVEVAAVAMDSRTVEAAAGVAVVAAAAAAVVVTTAAVVAMNPEVVEVAVEAEVAWGPRDQGSRHDSEQDNSDNNTIFVQGLGENVTIESVADYFKQIGIIKTNKKTGQPMINLYTDRETGKLKGEATVSFDDPPSAKAAIDWFDGKEFSGNPIKVSFATRRADFNRGGGNGRGGRGRGGPMGRGGYGGGGSGGGGRGGFPSGGGGGGGQQRAGDWKCPNPTCENMNFSWRNECNQCKAPKPDGPGGGPGGSHMGGNYGDDRRGGRGGYDRGGYRGRGGDRGGFRGGRGGGDRGGFGPGKMDSRGEHRQDRRERPY

SEQ ID NO: 760944 - protein, 526 aa, Homo sapiens
PPVPVRNSRLLSPPGVGAQRCWNFVACLPVRACADMASNDYTQQATQSYGAYPTQPGQGYSQQSSQPYGQQSYSGYSQSTDTSGYGQSSYSSYGQSQNTGYGTQSTPQGYGSTGGYGSSQSSQSSYGQQSSYPGYGQQPAPSSTSGSYGSSSQSSSYGQPQSGSYSQQPSYGGQQQSYGQQQSYNPPQGYGQQNQYNSSSGGGGGGGGGGNYGQDQSSMSSGGGSGGGYGNQDQSGGGGSGGYGQQDRGGRGRGGSGGGGGGGGGGYNRSSGGYEPRGRGGGRGGRGGMGGSDRGGFNKFGGPRDQGSRHDSEQDNSDNNTIFVQGLGENVTIESVADYFKQIGIIKTNKKTGQPMINLYTDRETGKLKGEATVSFDDPPSAKAAIDWFDGKEFSGNPIKVSFATRRADFNRGGGNGRGGRGRGGPMGRGGYGGGGSGGGGRGGFPSGGGGGGGQQRAGDWKCPNPTCENMNFSWRNECNQCKAPKPDGPGGGPGGSHMGGNYGDDRRGGWWGQRWLWPWQDGFQG

SEQ ID NO: 760945 - protein, 591 aa, Homo sapiens
  misc_feature (515)..(515): Xaa can be any naturally occurring amino acid
PPVPVRNSRLLSPPGVGAQRCWNFVACLPVRACADMASNDYTQQATQSYGAYPTQPGQGYSQQSSQPYGQQSYSGYSQSTDTSGYGQSSYSSYGQSQNTGYGTQSTPQGYGSTGGYGSSQSSQSSYGQQSSYPGYGQQPAPSSTSGSYGSSSQSSSYGQPQSGSYSQQPSYGGQQQSYGQQQSYNPPQGYGQQNQYNSSSGGGGGGGGGGNYGQDQSSMSSGGGSGGGYGNQDQSGGGGSGGYGQQDRGGRGRGGSGGGGGGGGGGYNRSSGGYEPRGRGGGRGGRGGMGGSDRGGFNKFGGPRDQGSRHDSEQDNSDNNTIFVQGLGENVTIESVADYFKQIGIIKTNKKTGQPMINLYTDRETGKLKGEATVSFDDPPSAKAAIDWFDGKEFSGNPIKVSFATRRADFNRGGGNGRGGRGRGGPMGRGGYGGGGSGGGGRGGFPSGGGGGGGQQRAGDWKCPNPTCENMNFSWRNECNQCKAPKPDGPGGGPGGSHMGGNYGDDRRGRGGMIXAVRGGGTRAPRGGGGTEGLAGRCSGEPTTGKGIKPARWEAGDQSRLTTARVGERKPPRGKKKQGTGNEIRRRVTNS

SEQ ID NO: 760946 - protein, 581 aa, Homo sapiens
RRYRFGIPGLLSPPGVGAQRCWNFVACLPVRACADMASNDYTQQATQSYGAYPTQPGQGYSQQSSQPYGQQSYSGYSQSTDTSGYGQSSYSSYGQSQNTGYGTQSTPQGYGSTGGYGSSQSSQSSYGQQSSYPGYGQQPAPSSTSGSYGSSSQSSSYGQPQSGSYSQQPSYGGQQQSYGQQQSYNPPQGYGQQNQYNSSSGGGGGGGGGGNYGQDQSSMSSGGGSGGGYGNQDQSGGGGSGGYGQQDRGGRGRGGSGGGGGGGGGGYNRSSGGYEPRGRGGGRGGRGGMGGSDRGGFNKFGGPRDQGSRHDSEQDNSDNNTIFVQGLGENVTIESVADYFKQIGIIKTNKKTGQPMINLYTDRETGKLKGEATVSFDDPPSAKAAIDWFDGKEFSGNPIKVSFATRRADFNRGGGNGRGGRGRGGPMGRGGYGGGGSGGGGRGGFPSGGGGGGGQQRAGDWKCPNPLLKYEILLGNECNQCKAPNPTCENMNFSWRNECNQCKAPKPDGPGGGPGGSHMGGNYGDDRRGGRGGYDRGGYRGRGGDRGGFRGGRGGGDRGGFGPGKMDSRGEHRQDRRERPY

SEQ ID NO: 760947 - protein, 290 aa, Homo sapiens; identical to SEQ ID NO: 760922

SEQ ID NO: 760948 - protein, 341 aa, Homo sapiens
PPVPVRNSRLLSPPGVGAQRCWNFVACLPVRACADMASNDYTQQATQSYGAYPTQPGQGYSQQSSQPYGQQSYSGYSQSTDTSGYGQSSYSSYGQSQNTGYGTQSTPQGYGSTGGYGSSQSSQSSYGQQSSYPGYGQQPAPSSTSGSYGSSSQSSSYGQPQSGSYSQQPSYGGQQQSYGQQQSYNPPQGYGQQNQYNSSSGGGGGGGGGGNYGQDQSSMSSGGGSGGGYGNQDQSGGGGSGGYGQQDRGGRGRGGSGGGGGGGGGGYNRSSGGYEPRGRGGGRGGRGGMGGSDRGGFNKFGAVARSSFGKFLLELLSDSSNSSCITWEGTNGEFKMTDPDE

SEQ ID NO: 760949 - protein, 497 aa, Homo sapiens
PPVPVRNSRLLSPPGVGAQRCWNFVACLPVRACADMASNDYTQQATQSYGAYPTQPGQGYSQQSSQPYGQQSYSGYSQSTDTSGYGQSSYSSYGQSQNTGYGTQSTPQGYGSTGGYGSSQSSQSSYGQQSSYPGYGQQPAPSSTSGSYGSSSQSSSYGQPQSGSYSQQPSYGGQQQSYGQQQSYNPPQGYGQQNQYNSSSGGGGGGGGGGNYGQDQSSMSSGGGSGGGYGNQDQSGGGGSGGYGQQDRGGRGRGGSGGGGGGGGGGYNRSSGGYEPRGRGGGRGGRGGMGGSDRGGFNKFGVFKKEVYLHTSPHLKADVLFQTDPTAEMAAESLPFSFGTLSSWELEAWYEDLQEVLSSDENGGTYVSPPGNEEEESKIFTTLDPASLAWLTEEEPEPAEVTSTSQSPHSPDSSQSSLAQEEEEEDQGRTRKRKQSGHSPARAGKQRMKEKEQENERKVAQLAEENERLKQEIERLTREVEATRRALIDRMVNLHQA

SEQ ID NO: 760950 - protein, 344 aa, Homo sapiens
PPVPVRNSRLLSPPGVGAQRCWNFVACLPVRACADMASNDYTQQATQSYGAYPTQPGQGYSQQSSQPYGQQSYSGYSQSTDTSGYGQSSYSSYGQSQNTGYGTQSTPQGYGSTGGYGSSQSSQSSYGQQSSYPGYGQQPAPSSTSGSYGSSSQSSSYGQPQSGSYSQQPSYGGQQQSYGQQQSYNPPQGYGQQNQYNSSSGGGGGGGGGVAIAPNGALQLASPGTDGVQGLQTLTMTNSGSTQQGTTILQYAQTSDGQQILVPSNQVVVQTASGDMQTYQIRTTPSATSLPQTVVMTSPVTLTSQTTKTDDPQLKREIRLMKNREAARECRRKKKEYVKCLENR

SEQ ID NO: 760951 - protein, 77 aa, Homo sapiens
TAGTGSEFPAAQSSRRRCSAVLELRCLLACARVRGHGLKRLYPTSNPKVSAIFGLPEFVEGKGGHAMFSDHAGFPFI

SEQ ID NO: 760952 - protein, 712 aa, Homo sapiens
MDTSSKENIQLFCKTSVQPVGRPSFKTEYPSSEEKQPCCGELKVFLCALSFVYFAKALAEGYLKSTITQIERRFDIPSSLVGVIDGSFEIGNLLVITFVSYFGAKLHRPKIIGAGCVIMGVGTLLIAMPQFFMEQYKYERYSPSSNSTLSISPCLLESSSQLPVSVMEKSKSKISNECEVDTSSSMWIYVFLGNLLRGIGETPIQPLGIAYLDDFASEDNAAFYIGCVQTVAIIGPIFGFLLGSLCAKLYVDIGFVNLDHITITPKDPQWVGAWWLGYLIAGIISLLAAVPFWYLPKSLPRSQSREDSNSSSEKSKFIIDDHTDYQTPQGENAKIMEMARDFLPSLKNLFGNPVYFLYLCTSTVQFNSLFGMVTYKPKYIEQQYGQSSSRANFVIGLINIPAVALGIFSGGIVMKKFRISVCGAAKLYLGSSVFGYLLFLSLFALGCENSDVAGLTVSYQGTKPVSYHERALFSDCNSRCKCSETKWEPMCGENGITYVSACLAGCQTSNRSGKNIIFYNCTCVGIAASKSGNSSGIVGRCQKDNGCPQMFLYFLVISVITSYTLSLGGIPGYILLLRCIKPQLKSFALGIYTLAIRVLAGIPAPVYFGVLIDTSCLKWGFKRCGSRGSCRLYDSNVFRHIYLGLTVILGTVSILLSIAVLFILKKNYVSKHRSFITKRERTMVSTRFQKENYTTSDHLLQPNYWPGKETQL

SEQ ID NO: 760953 - protein, 712 aa, Homo sapiens; identical to SEQ ID NO: 760952

SEQ ID NO: 760954 - protein, 712 aa, Homo sapiens
QDTGKPQKPSSPAMKQRFSALQLLKLLLLLQPPLPRALREALCPEPCNCVPDGALRCPGPTAGLTRLSLAYLPVKVIPSQAFRGLNEVIKIEISQIDSLERIEANAFDNLLNLSEILIQNTKNLRYIEPGAFINLPRLKYLSICNTGIRKFPDVTKVFSSESNFILEICDNLHITTIPGNAFQGMNNESVTLKLYGNGFEEVQSHAFNGTTLTSLELKENVHLEKMHNGAFRGATGPKTLDISSTKLQALPSYGLESIQRLIATSSYSLKKLPSRETFVNLLEATLTYPSHCCAFRNLPTKEQNFSHSISENFSKQCESTVRKVSNKTLYSSMLAESELSGWDYEYGFCLPKTPRCAPEPDAFNPCEDIMGYDFLRVLIWLINILAIMGNMTVLFVLLTSRYKLTVPRFLMCNLSFADFCMGLYLLLIASVDSQTKGQYYNHAIDWQTGSGCSTAGFFTVFASELSVYTLTVITLERWHTITYAIHLDQKLRLRHAILIMLGGWLFSSLIAMLPLVGVSNYMKVSICFPMDVETTLSQVYILTILILNVVAFFIICACYIKIYFAVRNPELMATNKDTKIAKKMAILIFTDFTCMAPISFFAISAAFKVPLITVTNSKVLLVLFYPINSCANPFLYAIFTKTFQRDFFLLLSKFGCCKRRAELYRRKDFSAYTSNCKNGFTGSNKPSQSTLKLSTLHCQGTALLDKTRYTEC

SEQ ID NO: 760955 - protein, 704 aa, Homo sapiens
QDTGKPQKPSSPAMKQRFSALQLLKLLLLLQPPLPRALREALCPEPCNCVPDGALRCPGPTAGLTRLSLAYLPVKVIPSQAFRGLNEVIKIEISQIDSLERIEANAFDNLLNLSEILIQNTKNLRYIEPGAFINLPRLKYLSICNTGIRKFPDVTKVFSSESNFILEICDNLHITTIPGNAFQGMNNESVTLKLYGNGFEEVQSHAFNGTTLTSLELKENVHLEKMHNGAFRGATGPKTLDISSTKLQALPSYGLESIQRLIATSSYSLKKLPSRETFVNLLEATLTYPSHCCAFRNLPTKEQNFSHSISENFSKQCESTVRKVVTKTSELSGWDYEYGFCLPKTPRCAPEPDAFNPCEDIMGYDFLRVLIWLINILAIMGNMTVLFVLLTSRYKLTVPRFLMCNLSFADFCMGLYLLLIASVDSQTKGQYYNHAIDWQTGSGCSTAGFFTVFASELSVYTLTVITLERWHTITYAIHLDQKLRLRHAILIMLGGWLFSSLIAMLPLVGVSNYMKVSICFPMDVETTLSQVYILTILILNVVAFFIICACYIKIYFAVRNPELMATNKDTKIAKKMAILIFTDFTCMAPISFFAISAAFKVPLITVTNSKVLLVLFYPINSCANPFLYAIFTKTFQRDFFLLLSKFGCCKRRAELYRRKDFSAYTSNCKNGFTGSNKPSQSTLKLSTLHCQGTALLDKTRYTEC

SEQ ID NO: 760956 - protein, 240 aa, Homo sapiens
QDTGKPQKPSSPAMKQRFSALQLLKLLLLLQPPLPRALREALCPEPCNCVPDGALRCPGPTAGLTRLSLAYLPVKVIPSQAFRGLNEVIKIEISQIDSLERIEANAFDNLLNLSEILIQNTKNLRYIEPGAFINLPRLKYLSICNTGIRKFPDVTKVFSSESNFILEICDNLHITTIPGNAFQGMNNESVTLKLYGNGFEEVQSHAFNGTTLTSLELKENVHLEKMHNGAFRGATGPKTL

SEQ ID NO: 760957 - protein, 997 aa, Homo sapiens
MEEMFHKKSEAVRRLVEAAEEAHLKHEFDADLQYEYFNAVLINERDKDGNFLELGKEFILAPNDHFNNLPVNISLSDVQVPTNMYNKDPAIVNGVYWSESLNKVFVDNFDRDPSLIWQYFGSAKGFFRQYPGIKWEPDENGVIAFDCRNRKWYIQAATSPKDVVILVDVSGSMKGLRLTIAKQTVSSILDTLGDDDFFNIIAYNEELHYVEPCLNGTLVQADRTNKEHFREHLDKLFAKGIGMLDIALNEAFNILSDFNHTGQGSICSQAIMLITDGAVDTYDTIFAKYNWPDRKVRIFTYLIGREAAFADNLKWMACANKGFFTQISTLADVQENVMEYLHVLSRPKVIDQEHDVVWTEAYIDSTLPQAQKLTDDQGPVLMTTVAMPVFSKQNETRSKGILLGVVGTDVPVKELLKTIPKYKLGIHGYAFAITNNGYILTHPELRLLYEEGKKRRKPNYSSVDLSEVEWEDRDDVLRNAMVNRKTGKFSMEVKKTVDKGKRVLVMTNDYYYTDIKGTPFSLGVALSRGHGKYFFRGNVTIEEGLHDLEHPDVSLADEWSYCNTDLHPEHRHLSQLEAIKLYLKGKEPLLQCDKELIQEVLFDAVVSAPIEAYWTSLALNKSENSDKGVEVAFLGTRTGLSRINLFVGAEQLTNQDFLKAGDKENIFNADHFPLWYRRAAEQIPGSFVYSIPFSTGPVNKSNVVTASTSIQLLDERKSPVVAAVGIQMKLEFFQRKFWTASRQCASLDGKCSISCDDETVNCYLIDNNGFILVSEDYTQTGDFFGEIEGAVMNKLLTMGSFKRITLYDYQAMCRANKESSDGAHGLLDPYNAFLSAVKWIMTELVLFLVEFNLCSWWHSDMTAKAQKLKQTLEPCDTEYPAFVSERTIKETTGNIACEDCSKSFVIQQIPSSNLFMVVVDSSCLCESVAPITMAPIEIRYNESLKCERLKAQKIRRRPESCHGFHPEENARECGGAPSLQAQTVLLLLPLLLMLFSR

SEQ ID NO: 760958 - protein, 976 aa, Homo sapiens
MEEMFHKKSEAVRRLVEAAEEAHLKHEFDADLQYEYFNAVLINERDKDGNFLELGKEFILAPNDHFNNLPVNISLSDVQVPTNMYNKDPAIVNGVYWSESLNKVFVDNFDRDPSLIWQYFGSAKGFFRQYPGIKWEPDENGVIAFDCRNRKWYIQAATSPKDVVILVDVSGSMKGLRLTIAKQTVSSILDTLGDDDFFNIIAYNEELHYVEPCLNGTLVQADRTNKEHFREHLDKLFAKGIGMLDIALNEAFNILSDFNHTGQGSICSQAIMLITDGAVDTYDTIFAKYNWPDRKVRIFTYLIGREAAFADNLKWMACANKGFFTQISTLADVQENVMEYLHVLSRPKVIDQEHDVVWTEAYIDSTLPQAQKLTDDQGPVLMTTVAMPVFSKQNETRSKGILLGVVGTDVPVKELLKTIPKYKLGIHGYAFAITNNGYILTHPELRLLYEEGKKRRKPNYSSVDLSEVEWEDRDDVLRNAMVNRKTGKFSMEVKKTVDKGFRCGAFQRSWEIFLPRECNHEEGLHDLEHPDVSLADEWSYCNTDLHPEHRHLSQLEAIKLYLKGKEPLLQCDKELIQEVLFDAVVSAPIEAYWTSLALNKSENSDKGVEVAFLGTRTGLSRINLFVGAEQLTNQDFLKAGDKENIFNADHFPLWYRRAAEQIPGSFVYSIPFSTGPVNKSNVVTASTSIQLLDERKSPVVAAVGIQMKLEFFQRKFWTASRQCASLDGKCSISCDDETVNCYLIDNNGFILVSEDYTQTGDFFGEIEGAVMNKLLTMGSFKRITLYDYQAMCRANKESSDGAHGLLDPYNAFLSAVKWIMTELVLFLVEFNLCSWWHSDMTAKAQKLKQTLEPCDTEYPAFVSERTIKETTGNIACEDCSKSFVIQQIPSSNLFMVVVDSSCLCESVAPITMAPIEIRYNESLKCERLKAQKIRRRPESCHGFHPEENARECGGAPSLQAQTVLLLLPLLLMLFSR

SEQ ID NO: 760959 - protein, 915 aa, Homo sapiens
MEEMFHKKSEAVRRLVEAAEEAHLKHEFDADLQYEYFNAVLINERDKDGNFLELGKEFILAPNDHFNNLPVNISLSDVQVPTNMYNKDPAIVNGVYWSESLNKVFVDNFDRDPSLIWQYFGSAKGFFRQYPGIKWEPDENGVIAFDCRNRKWYIQAATSPKDVVILVDVSGSMKGLRLTIAKQTVSSILDTLGDDDFFNIIAYNEELHYVEPCLNGTLVQADRTNKEHFREHLDKLFAKGIGMLDIALNEAFNILSDFNHTGQGSICSQAIMLITDGAVDTYDTIFAKYNWPDRKVRIFTYLIGREAAFADNLKWMACANKGFFTQISTLADVQENVMEYLHVLSRPKVIDQEHDVVWTEAYIDSTLPQAQKRSKGILLGVVGTDVPVKELLKTIPKYKLGIHGYAFAITNNGYILTHPELRLLYEEGKKRRKPNYSSVDLSEVEWEDRDDVLRNAMVNRKTGKFSMEVKKTVDKGKRVLVMTNDYYYTDIKGTPFSLGVALSRGHGKYFFRGNVTIEEGLHDLEHPDVSLADEWSYCNTDLHPEHRHLSQLEAIKLYLKGKEPLLQCDKELIQEVLFDAVVSAPIEAYWTSLALNKSENSDKGVEVAFLGTRTGLSRINLFVGAEQLTNQDFLKAGDKENIFNADHFPLWYRRAAEQIPGSFVYSIPFSTGPVNKSNVVTASTSIQLLDERKSPVVAAVGIQMKLEFFQRKFWTASRQCASLDGKCSISCDDETVNCYLIDNNGFILVSEDYTQTGDFFGEIEGAVMNKLLTMGSFKRITLYDYQAMCRANKESSDGAHGLLDPYNAFLSAVKWIMTELVLFLVEFNLCSWWHSDMTAKAQKLKQTLEPCDTEYPAFVSERTIKETTGNIACEDCSKSFVIQQIPSSNLFMVVVDSSCLCESVAPITMAPIEIR

SEQ ID NO: 760960 - protein, 495 aa, Homo sapiens
MEEMFHKKSEAVRRLVEAAEEAHLKHEFDADLQYEYFNAVLINERDKDGNFLELGKEFILAPNDHFNNLPVNISLSDVQVPTNMYNKDPAIVNGVYWSESLNKVFVDNFDRDPSLIWQYFGSAKGFFRQYPGIKWEPDENGVIAFDCRNRKWYIQAATSPKDVVILVDVSGSMKGLRLTIAKQTVSSILDTLGDDDFFNIIAYNEELHYVEPCLNGTLVQADRTNKEHFREHLDKLFAKGIGMLDIALNEAFNILSDFNHTGQGSICSQAIMLITDGAVDTYDTIFAKYNWPDRKVRIFTYLIGREAAFADNLKWMACANKGFFTQISTLADVQENVMEYLHVLSRPKVIDQEHDVVWTEAYIDSTLPQAQKRSKGILLGVVGTDVPVKELLKTIPKYKLGIHGYAFAITNNGYILTHPELRLLYEEGKKRRKPNYSSVDLSEVEWEDRDDVLRNAMVNRKTGKFSMEVKKTVDKGVHFSQTFLLLNLKQTTVKN

SEQ ID NO: 760961 - protein, 494 aa, Homo sapiens
MEEMFHKKSEAVRRLVEAAEEAHLKHEFDADLQYEYFNAVLINERDKDGNFLELGKEFILAPNDHFNNLPVNISLSDVQVPTNMYNKDPAIVNGVYWSESLNKVFVDNFDRDPSLIWQYFGSAKGFFRQYPGIKWEPDENGVIAFDCRNRKWYIQAATSPKDVVILVDVSGSMKGLRLTIAKQTVSSILDTLGDDDFFNIIAYNEELHYVEPCLNGTLVQADRTNKEHFREHLDKLFAKGIGMLDIALNEAFNILSDFNHTGQGSICSQAIMLITDGAVDTYDTIFAKYNWPDRKVRIFTYLIGREAAFADNLKWMACANKGFFTQISTLADVQENVMEYLHVLSRPKVIDQEHDVVWTEAYIDSTLPQAQKLTDDQGPVLMTTVAMPVFSKQNETRSKGILLGVVGTDVPVKELLKTIPKYKYEEGKKRRKPNYSSVDLSEVEWEDRDDVLRNAMVNRKTGKFSMEVKKTVDKGVHFSQTFLLLNLKQTTVKN

SEQ ID NO: 760962 - protein, 973 aa, Homo sapiens
MEEMFHKKSEAVRRLVEAAEEAHLKHEFDADLQYEYFNAVLINERDKDGNFLELGKEFILAPNDHFNNLPVNISLSDVQVPTNMYNKDPAIVNGVYWSESLNKVFVDNFDRDPSLIWQYFGSAKGFFRQYPGIKWEPDENGVIAFDCRNRKWYIQAATSPKDVVILVDVSGSMKGLRLTIAKQTVSSILDTLGDDDFFNIIAYNEELHYVEPCLNGTLVQADRTNKEHFREHLDKLFAKGIGMLDIALNEAFNILSDFNHTGQGSICSQAIMLITDGAVDTYDTIFAKYNWPDRKVRIFTYLIGREAAFADNLKWMACANKGFFTQISTLADVQENVMEYLHVLSRPKVIDQEHDVVWTEAYIDSTLPQAQKRSKGILLGVVGTDVPVKELLKTIPKYKLGIHGYAFAITNNGYILTHPELRLLYEEGKKRRKPNYSSVDLSEVEWEDRDDVLRNAMVNRKTGKFSMEVKKTVDKGKRVLVMTNDYYYTDIKGTPFSLGVALSRGHGKYFFRGNVTIEEGLHDLEHPDVSLADEWSYCNTDLHPEHRHLSQLEAIKLYLKGKEPLLQCDKELIQEVLFDAVVSAPIEAYWTSLALNKSENSDKGVEVAFLGTRTGLSRINLFVGAEQLTNQDFLKAGDKENIFNADHFPLWYRRAAEQIPGSFVYSIPFSTGPVNKSNVVTASTSIQLLDERKSPVVAAVGIQMKLEFFQRKFWTASRQCASLDGKCSISCDDETVNCYLIDNNGFILVSEDYTQTGDFFGEIEGAVMNKLLTMGSFKRITLYDYQAMCRANKESSDGAHGLLDPYNAFLSAVKWIMTELVLFLVEFNLCSWWHSDMTAKAQKLKQTLEPCDTEYPAFVSERTIKETTGNIACEDCSKSFVIQQIPSSNLFMVVVDSSCLCESVAPITMAPIEIRYNESLKCERLKAQKIRRRPESCHGFHPEENARECGGAPSLQAQTVLLLLPLLLMLFSR

SEQ ID NO: 760963 - protein, 794 aa, Homo sapiens
MEEMFHKKSEAVRRLVEAAEEAHLKHEFDADLQYEYFNAVLINERDKDGNFLELGKEFILAPNDHFNNLPVNISLSDVQVPTNMYNKDPAIVNGVYWSESLNKVFVDNFDRDPSLIWQYFGSAKGFFRQYPGIKWEPDENGVIAFDCRNRKWYIQAATSPKDVVILVDVSGSMKGLRLTIAKQTVSSILDTLGDDDFFNIIAYNEELHYVEPCLNGTLVQADRTNKEHFREHLDKLFAKGIGMLDIALNEAFNILSDFNHTGQGSICSQAIMLITDGAVDTYDTIFAKYNWPDRKVRIFTYLIGREAAFADNLKWMACANKGFFTQISTLADVQENVMEYLHVLSRPKVIDQEHDVVWTEAYIDSTLPQAQKRSKGILLGVVGTDVPVKELLKTIPKYKLGIHGYAFAITNNGYILTHPELRLLYEEGKKRRKPNYSSVDLSEVEWEDRDDVLRNAMVNRKTGKFSMEVKKTVDKGKRVLVMTNDYYYTDIKGTPFSLGVALSRGHGKYFFRGNVTIEEGLHDLEHPDVSLADEWSYCNTDLHPEHRHLSQLEAIKLYLKGKEPLLQCDKELIQEVLFDAVVSAPIEAYWTSLALNKSENSDKGVEVAFLGTRTGLSRINLFVGAEQLTNQDFLKAGDKENIFNADHFPLWYRRAAEQIPGSFVYSIPFSTGPVNKSNVVTASTSIQLLDERKSPVVAAVGIQMKLEFFQRKFWTASRQCASLDGKCSISCDDETVNCYLIDNNGFILVSEDYTQTGDFFGEIEGAVMNKLLTMGSFKRPRTTTFSSTFLQDGF

SEQ ID NO: 760964 - protein, 299 aa, Homo sapiens
MEEMFHKKSEAVRRLVEAAEEAHLKHEFDADLQYEYFNAVLINERDKDGNFLELGKEFILAPNDHFNNLPVNISLSDVQVPTNMYNKDPAIVNGVYWSESLNKVFVDNFDRDPSLIWQYFGSAKGFFRQYPGIKWEPDENGVIAFDCRNRKWYIQAATSPKDVVILVDVSGSMKGLRLTIAKQTVSSILDTLGDDDFFNIIAYNEELHYVEPCLNGTLVQADRTNKEHFREHLDKLFAKGIGMLDIALNEAFNILSDFNHTGQGSICSQAIMLITDGAVDTYDTIFAKYNWPDRKEPKA

SEQ ID NO: 760965 - protein, 233 aa, Homo sapiens
MNVHGDGEAGLQVRTSQSRNPGGRRPGRQSRARIPKMAAVKDSCGKGEMATGNGRRLHLGIPEAVFVEDVDSFMKQPGNETADTVLKKLDEQYQKYKFMELNLAQKKRRLKGQIPEIKQTLEILKYMQKKKESTNSMETRFLLADNLYCKASVPPTDKVCLWLGANVMLEYDIDEAQALLEKNLSTATKNLDSLEEDLDFLRDQFTTTEVNMARVYNWDVKRRNKDDSTKNKA

SEQ ID NO: 760966 - protein, 205 aa, Homo sapiens
WLGQACVIGRGVKDSCGKGEMATGNGRRLHLGIPEAVFVEDVDSFMKQPGNETADTVLKKLDEQYQKYKFMELNLAQKKRRLKGQIPEIKQTLEILKYMQKKKESTNSMETRFLLADNLYCKASVPPTDKVCLWLGANVMLEYDIDEAQALLEKNLSTATKNLDSLEEDLDFLRDQFTTTEVNMARVYNWDVKRRNKDDSTKNKA

SEQ ID NO: 760967 - protein, 160 aa, Homo sapiens
MKQPGNETADTVLKKLDEQYQKYKFMELNLAQKKRRLKGQIPEIKQTLEILKYMQKKKESTNSMETRFLLADNLYCKASVPPTDKVCLWLGANVMLEYDIDEAQALLEKNLSTATKNLDSLEEDLDFLRDQFTTTEVNMARVYNWDVKRRNKDDSTKNKA

SEQ ID NO: 760968 - protein, 233 aa, Homo sapiens; identical to SEQ ID NO: 760965

SEQ ID NO: 760969 - protein, 77 aa, Homo sapiens
ACHLRERSQSALEVGIFRPKENGDLWGRSCAPMNVHGDGEAGLQVRTSQSRNPGGRRPGRQSRARIPKMAAVKDKES

SEQ ID NO: 760970 - protein, 217 aa, Homo sapiens
MNVHGDGEAGLQVRTSQSRNPGGRRPGRQSRARIPKMAAVKDSCGKGEMATGNGRRLHLGIPEAVFVEDVDSFMKQPGNETADTVLKKLDEQYQKYKFMELNLAQKKRRLKGQIPEIKQTLEILKYMQKKKESTNSMETRFLLADNLYCKASVPPTDKVCLWLGANVMLEYDIDEAQALLEKNLSTATKNLDSLEEDLDFLRDQFTTTEVKHLEQEY

SEQ ID NO: 760971 - protein, 205 aa, Homo sapiens; identical to SEQ ID NO: 760966

SEQ ID NO: 760972 - protein, 107 aa, Homo sapiens
MQKKKESTNSMETRFLLADNLYCKASVPPTDKVCLWLGANVMLEYDIDEAQALLEKNLSTATKNLDSLEEDLDFLRDQFTTTEVNMARVYNWDVKRRNKDDSTKNKA

SEQ ID NO: 760973 - protein, 460 aa, Homo sapiens
MFTIKLLLFIVPLVISSRIDQDNSSFDSLSPEPKSRFAMLDDVKILANGLLQLGHGLKDFVHKTKGQINDIFQKLNIFDQSFYDLSLQTSEIKEEEKELRRTTYKLQVKNEEVKNMSLELNSKLESLLEEKILLQQKVKYLEEQLTNLIQNQPETPEHPEVTSLKTFVEKQDNSIKDLLQTVEDQYKQLNQQHSQIKEIENQLRRTSIQEPTEISLSSKPRAPRTTPFLQLNEIRNVKHDGIPAECTTIYNRGEHTSGMYAIRPSNSQVFHVYCDVISGSPWTLIQHRIDGSQNFNETWENYKYGFGRLDGEFWLGLEKIYSIVKQSNYVLRIELEDWKDNKHYIEYSFYLGNHETNYTLHLVAITGNVPNAIPENKDLVFSTWDHKAKGHFNCPEGYSGGWWWHDECGENNLNGKYNKPRAKSKPERRRGLSWKSQNGRLYSIKSTKMLIHPTDSESFE

SEQ ID NO: 760974 - protein, 403 aa, Homo sapiens
MFTIKLLLFIVPLVISSRIDQDNSSFDSLSPEPKSRFAMLDDVKILANGLLQLGHGLKDFVHKTKGQINDIFQKLNIFDQSFYDLSLQTSEIKEEEKELRRTTYKLQVKNEEVKNMSLELNSKLESLLEEKILLQQKVKYLEEQLTNLIQNQPETPEHPEVTSLKTFVEKQDNSIKDLLQTVEDQYKQLNQQHSQIKEIENQLRRTSIQEPTEISLSSKPRAPRTTPFLQLNEIRNVKHDGIPAECTTIYNRGEHTSGMYAIRPSNSQVFHVYCDVISGSPWTLIQHRIDGSQNFNETWENYKYGFGRLDGEFWLGLEKIYSIVKQSNYVLRIELEDWKDNKHYIEYSFYLGNHETNYTLHLVAITGNVPNAIPENKDLVFSTWDHKAKGHFNCPEGYSGIFF

SEQ ID NO: 760975 - protein, 446 aa, Homo sapiens
MFTIKLLLFIVPLVISSRIDQDNSSFDSLSPEPKSRFAMLDDVKILANGLLQLGHGLKDFVHKTKGQINDIFQKLNIFDQSFYDLSLQTSEIKEEEKELRRTTYKLQVKNEEVKNMSLELNSKLESLLEEKILLQQKVKYLEEQLTNLIQNQPETPEHPEVTSLKTFVEKQDNSIKDLLQTVEDQYKQLNQQHSQIKEIENQLRRTSIQEPTEISLSSKPRAPRTTPFLQLNEIRNVKHDDTSGMYAIRPSNSQVFHVYCDVISGSPWTLIQHRIDGSQNFNETWENYKYGFGRLDGEFWLGLEKIYSIVKQSNYVLRIELEDWKDNKHYIEYSFYLGNHETNYTLHLVAITGNVPNAIPENKDLVFSTWDHKAKGHFNCPEGYSGGWWWHDECGENNLNGKYNKPRAKSKPERRRGLSWKSQNGRLYSIKSTKMLIHPTDSESFE

SEQ ID NO: 760976 - protein, 195 aa, Homo sapiens
MFTIKLLLFIVPLVISSRIDQDNSSFDSLSPEPKSRFAMLDDVKILANGLLQLGHGLKDFVHKTKGQINDIFQKLNIFDQSFYDLSLQTSEIKEEEKELRRTTYKLQVKNEEVKNMSLELNSKLESLLEEKILLQQKVKYLEEQLTNLIQNQPETPEHPEVTSLKELSWKTGKTTNIILNILFTWEITKPTIRYI

SEQ ID NO: 760977 - protein, 185 aa, Homo sapiens
QKKTVPRCLKLKIKIKMFTIKLLLFIVPLVISSRIDQDNSSFDSLSPEPKSRFAMLDDVKILANGLLQLGHGLKDFVHKTKGQINDIFQKLNIFDQSFYDLSLQTSEIKEEEKELRRTTYKLQVKNEEVKNMSLELNSKLESLLEEKILLQQKVKYLEEQLTNLIQNQPETPEHPEVTSLKVSRK

SEQ ID NO: 760978 - protein, 226 aa, Homo sapiens
MFTIKLLLFIVPLVISSRIDQDNSSFDSLSPEPKSRFAMLDDVKILANGLLQLGHGLKDFVHKTKGQINDIFQKLNIFDQSFYDLSLQTSEIKEEEKELRRTTYKLQVKNEEVKNMSLELNSKLESLLEEKILLQQKVKYLEEQLTNLIQNQPETPEHPEVTSLKTFVEKQDNSIKDLLQTVEDQYKQLNQQHSQIKEIENQLRRTSIQEPTEISLSSGKHDGAFC

SEQ ID NO: 760979 - protein, 460 aa, Homo sapiens; identical to SEQ ID NO: 760973

SEQ ID NO: 760980 - protein, 442 aa, Homo sapiens
MFTIKLLLFIVPLVISSRIDQDNSSFDSLSPEPKSRFAMLDDVKILANGLLQLGHGLKDFVHKTKGQINDIFQKLNIFDQSFYDLSLQTSEIKEEEKELRRTTYKLQVKNEEVKNMSLELNSKLESLLEEKILLQQKVKYLEEQLTNLIQNQPETPEHPEVTSLKTFVEKQDNSIKDLLQTVEDQYKQLNQQHSQIKEIENQLRRTSIQEPTEISLSSKPRAPRTTPFLQLNEIRNVKHDGIPAECTTIYNRGEHTSGMYAIRPSNSQVFHVYCDVISGSPWTLIQHRIDGSREFWLGLEKIYSIVKQSNYVLRIELEDWKDNKHYIEYSFYLGNHETNYTLHLVAITGNVPNAIPENKDLVFSTWDHKAKGHFNCPEGYSGGWWWHDECGENNLNGKYNKPRAKSKPERRRGLSWKSQNGRLYSIKSTKMLIHPTDSESFE

SEQ ID NO: 760981 - protein, 170 aa, Homo sapiens
MFTIKLLLFIVPLVISSRIDQDNSSFDSLSPEPKSRFAMLDDVKILANGLLQLGHGLKDFVHKTKGQINDIFQKLNIFDQSFYDLSLQTSEIKEEEKELRRTTYKLQVKNEEVKNMSLELNSKLESLLEEKILLQQKVKYLEEQLTNLIQNQPETPEHPEVTSLKTNINN

SEQ ID NO: 760982 - protein, 132 aa, Homo sapiens
MTGELEVKNMDMKPGSTLKITGSIADGTDGFVINLGQGTDKLNLHFNPRFSESTIVCNSLDGSNWGQEQREDHLCFSPGSEVKFTVTFESDKFKVKLPDGHELTFPNRLGHSHLSYLSVRGGFNMSSFKLKE

SEQ ID NO: 760983 - protein, 132 aa, Homo sapiens; identical to SEQ ID NO: 760982

SEQ ID NO: 760984 - protein, 84 aa, Homo sapiens
QIQENYQKPLEELEVLKEAASHVLSKHNNELKAAEALVREAEAKMQESNHLLLMVNANLREFSDKKLHVQEEQNLTSELIVQGR

SEQ ID NO: 760985 - protein, 507 aa, Homo sapiens
KVKNAQLAGAKGVILYSDPADYFAPGVKSYPDGWNLPGGGVQRGNILNLNGAGDPLTPGYPANEYAYRRGIAEAVGLPSIPVHPIGYYDAQKLLEKMGGSAPPDSSWRGSLKVPYNVGPGFTGNFSTQKVKMHIHSTNEVTRIYNVIGTLRGAVEPDRYVILGGHRDSWVFGGIDPQSGAAVVHEIVRSFGTLKKEGWRPRRTILFASWDAEEFGLLGSTEWAEENSRLLQERGVAYINADSSIEGNYTLRVDCTPLMYSLVHNLTKELKSPDEGFEGKSLYESWTKKSPSPEFSGMPRISKLGSGNDFEVFFQRLGIASGRARYTKNWETNKFSGYPLYHSVYETYELVEKFYDPMFKYHLTVAQVRGGMVFELANSIVLPFDCRDYAVVLRKYADKIYSISMKHPQEMKTYSVSFDSLFSAVKNFTEIASKFSERLQDFDKSKHVIYAPSSHNKYAGESFPGIYDALFDIESKVDPSKAWGEVKRQIYVAAFTVQAAAETLSEVA

SEQ ID NO: 760986 - protein, 538 aa, Homo sapiens
KVKNAQLAGAKGVILYSDPADYFAPGVKSYPDGWNLPGGGVQRGNILNLNGAGDPLTPGYPANEYAYRRGIAEAVGLPSIPVHPIGYYDAQKLLEKMGGSAPPDSSWRGSLKVPYNVGPGFTGNFSTQKVKMHIHSTNEVTRIYNVIGTLRGAVEPDRYVILGGHRDSWVFGGIDPQSGAAVVHEIVRSFGTLKKEGWRPRRTILFASWDAEEFGLLGSTEWAEENSRLLQERGVAYINADSSIEGNYTLRVDCTPLMYSLVHNLTKELKSPDEGFEGKSLYESWTKKSPSPEFSGMPRISKLGSGNDFEVFFQRLGIASGRARYTKNWETNKFSGYPLYHSVYETYELVEKFYDPMFKYHLTVAQVRGGMVFELANSIVLPFDCRDYAVVLRKYADKIYSISMKHPQEMKTYSVSFDSLFSAVKNFTEIASKFSERLQDFDKSNPIVLRMMNDQLMFLERAFIDPLGLPDRPFYRHVIYAPSSHNKYAGESFPGIYDALFDIESKVDPSKAWGEVKRQIYVAAFTVQAAAETLSEVA

SEQ ID NO: 760987 - protein, 206 aa, Homo sapiens
MASQPPEDTAESQASDELECKICYNRYNLKQRKPKVLECCHRVCAKCLYKIIDFGDSPQGVIVCPFCRFETCLPDDEVSSLPDDNNILVNLTCGGKGKKCLPENPTELLLTPKRLASLVSPSHTSSNCLVITIMEVQRESSPSLSSTPVVEFYRPAKFRLCHHCVTQLDCVELHVPAVSDIHPGVSVVARFALLQLLTLRNLLTGV

SEQ ID NO: 760988 - protein, 206 aa, Homo sapiens; identical to SEQ ID NO: 760987

SEQ ID NO: 760989 - protein, 206 aa, Homo sapiens; identical to SEQ ID NO: 760987

SEQ ID NO: 760990 - protein, 207 aa, Homo sapiens
MFPGPISEGATMTLQCTKSAGPWKMVVWDEDGFQGRRHEFTAECPSVLELGFETVRSLKVLSGAWVGFEHAGFQGQQYILERGEYPSWDAWGGNTAYPAERLTSFRPAACANHRDSRLTIFEQENFLGKKGELSDDYPSLQAMGWEGNEVGSFHVHSGAWVCSQFPGYRGFQYVLECDHHSGDYKHFREWGSHAPTFQVQSIRRIQQ

SEQ ID NO: 760991 - protein, 179 aa, Homo sapiens
QHHLQKLEGRRLDFDKKKRQGKIPDEELRQALEKFEDSKEVAETSMHNLLETDIEQMSQLRALAEAQLNDHWQAMQILDELAEKLKRRMREASSRPKREYKPKFWEPFDLGEPEQSNGGFPCTTVPKIAASSPFQSSNKSICTPSRSMPPLDQPSCKVLYDFQPENHGELGFHEGDVFT

SEQ ID NO: 760992 - protein, 153 aa, Homo sapiens
MVATKTFALLLLSLFLAVGLGEKKEGHFSALPSLPVGSHAKVSSPQPRGPRYAEGTFISDYSIAMDKIHQQDFVNWLLAQKGKKNDWKHNITQREARALELASQANRKEEEAVEPQSSPAKNPSDEDLLRDLLIQELLACLLDQTNLCRLRSR

SEQ ID NO: 760993 - protein, 404 aa, Homo sapiens
MFVGLFSLLSFNVFRSGDGVAEPRRWQRGSPGAVGLYVDPMEPLVTWVVPLLFLFLLSRQGAACRTSECCFQDPPYPDADSGSASGPRDLRCYRISSDRYECSWQYEGPTAGVSHFLRCCLSSGRCCYFAAGSATRLQFSDQAGVSVLYTVTLWVESWARNQTEKSPEVTLQLYNSVKYEPPLGDIKVSKLAGQLRMEWETPDNQVGAEVQFRHRTPSSPWKLGDCGPQDDDTESCLCPLEMNVAQEFQLRRRQLGSQGSSWSKWSSPVCVPPENPPQPQVRFSVEQLGQDGRRRLTLKEQPTQLELPEGCQGLAPGTEVTYRLQLHMLSCPCKAKATRTLHLGKMPYLSGAAYNVAVISSNQFGPGLNQTWHIPADTHTDGMISAHCNLRLPDSRDSPAQPLE

SEQ ID NO: 760994 - protein, 702 aa, Homo sapiens
MFVGLFSLLSFNVFRSGDGVAEPRRWQRGSPGAVGLYVDPMEPLVTWVVPLLFLFLLSRQGAACRTSECCFQDPPYPDADSGSASGPRDLRCYRISSDRYECSWQYEGPTAGVSHFLRCCLSSGRCCYFAAGSATRLQFSDQAGVSVLYTVTLWVESWARNQTEKSPEVTLQLYNSVKYEPPLGDIKVSKLAGQLRMEWETPDNQVGAEVQFRHRTPSSPWKLGDCGPQDDDTESCLCPLEMNVAQEFQLRRRQLGSQGSSWSKWSSPVCVPPENPPQPQVRFSVEQLGQDGRRRLTLKEQPTQLELPEGCQGLAPGTEVTYRLQLHMLSCPCKAKATRTLHLGKMPYLSGAAYNVAVISSNQFGPGLNQTWHIPADTHTEPVALNISVGTNGTTMYWPARAQSMTYCIEWQPVGQDGGLATCSLTAPQDPDPAGMATYSWSRESGAMGQEKCYYITIFASAHPEKLTLWSTVLSTYHFGGNASAAGTPHHVSVKNHSLDSVSVDWAPSLLSTCPGVLKEYVVRCRDEDSKQVSEHPVQPTETQVTLSGLRAGVAYTVQVRADTAWLRGVWSQPQRFSIEVQVSDWLIFFASLGSFLSILLVGVLGYLGLNRAARHLCPPLPTPCASSAIEFPGGKETWQWINPVDFQEEASLQEALVVEMSWDKGERTEPLEKTELPEGAPELALDTELSLEDGDRCKAKM

SEQ ID NO: 760995 - protein, 97 aa, Homo sapiens
LVVEMSWDKGERTEPLEKTELPEGAPELALDTELSLEDGDRCKAKVLGPSGPDGQGCNPARGVGGLDIHRSWDIRAWRPEGETKTSTLSYRHEERLS

SEQ ID NO: 760996 - protein, 232 aa, Homo sapiens
MGLALIAQAGVQWCDFGSLQPPPPGFKRFSCLSLLSSCDYSLLLEHPSFLRLKNIPLSSWELPDLQEGKIQAISDSDGVNYPWYGNTTETCTIVGPTKRDSKFIISMNDNFYPSVTWAVPVSESNVAKLTNIYRDQSFTTWLVATNTSTNDMIILQTLHWRMQLSIEVNPNRPLGQRARLREPIAQDQPKILSKNEPIPPSALVKPNANDAQVLMWRPKYGQPLVVIPPKHR

SEQ ID NO: 760997 - protein, 191 aa, Homo sapiens
ACSHMEFYNQYGEQGMSSWELPDLQEGKIQAISDSDGVNYPWYGNTTETCTIVGPTKRDSKFIISMNDNFYPSVTWAVPVSESNVAKLTNIYRDQSFTTWLVATNTSTNDMIILQTLHWRMQLSIEVNPNRPLGQRARLREPIAQDQPKILSKNEPIPPSALVKPNANDAQVLMWRPKYGQPLVVIPPKHR

SEQ ID NO: 760998 - protein, 301 aa, Homo sapiens [sequence omitted]

SEQ ID NO: 760999 - protein, 144 aa, Homo sapiens
MYSEIQRERADIGGLMARPEYREWNPELIKPKKLLNPVKASRSHQELHRELLMNHRRGLGVDSKPELQRVLEHRRRNQLIKKKKEELEAKRLQCPFEQELLRRQQRLNQLEKPPEKEEDHAPEFIKVRENLRRIATLTSEEREL

SEQ ID NO: 761000 - protein, 79 aa, Homo sapiens
GVCSQSICCGRAPDPKHLQRSIINGAVQLKLTSARSPPRALHLSQPTASTVWPCRLSGAQQGEKAKSCPLGQAEVTRRA

SEQ ID NO: 761001 - protein, 233 aa, Homo sapiens
SGFPRRRLLARPSGRRRNLTLSGVWDLGPRHRRGGASAPDYAPAVRSRGQQCWLCSRRRGGMAQRLGEWARGPSDATGLYRAVLLRSAAMYSEIQRERADIGGLMARPEYREWNPELIKPKKLLNPVKASRSHQELHRELLMNHRRGLGVDSKPELQRVLEHRRRNQLIKKKKEELEAKRLQCPFEQELLRRQQRLNQLEKPPEKEEDHAPEFIKVRENLRRIATLTSEEREL

SEQ ID NO: 761002 - protein, 164 aa, Homo sapiens
MYSEIQRERADIGGLMARPEYREWNPELIKPKKLLNPVKASRSHHTQVKVFLQPWGGRPFGFPIGKAKPGKGGGPFCGLGVDSKPELQRVLEHRRRNQLIKKKKEELEAKRLQCPFEQELLRRQQRLNQLEKPPEKEEDHAPEFIKVRENLRRIATLTSEEREL

SEQ ID NO: 761003 - protein, 144 aa, Homo sapiens; identical to SEQ ID NO: 760999

SEQ ID NO: 761004 - protein, 144 aa, Homo sapiens; identical to SEQ ID NO: 760999

SEQ ID NO: 761005 - protein, 144 aa, Homo sapiens; identical to SEQ ID NO: 760999

SEQ ID NO: 761006 - protein, 149 aa, Homo sapiens
MGQALQQWCRQQCEGYRDVNIYNMATSFRDGLAFCAILHRHRPDLINFSALKKENIYENNKLAFRVAEEHLGIPALLDAEDMVALKVPDRLSILTYVSQYYNYFHGCHRRPWFTFQGSSQLCISSHSNCGGCKSRFSLFQSPLQLRMAM

SEQ ID NO: 761007 - protein, 79 aa, Homo sapiens; identical to SEQ ID NO: 761000

SEQ ID NO: 761008 - protein, 144 aa, Homo sapiens; identical to SEQ ID NO: 760999

SEQ ID NO: 761009 - protein, 67 aa, Homo sapiens
DGSLSPRLDLRTAMYSEIQRERADIGGLMARPEYREWNPELIKPKKLLNPVKASRSHHSQVRRRLLV

SEQ ID NO: 761010 - protein, 144 aa, Homo sapiens; identical to SEQ ID NO: 760999

SEQ ID NO: 761011 - protein, 144 aa, Homo sapiens; identical to SEQ ID NO: 760999

SEQ ID NO: 761012 - protein, 144 aa, Homo sapiens; identical to SEQ ID NO: 760999

SEQ ID NO: 761013 - protein, 135 aa, Homo sapiens
MYSEIQRERADIGGLMARPEYREWNPELIKPKKLLNPVKASRSHQELHRELLMNHRRGLGVDSKPELQRVLEHRRRNQLIKKKKEELEAKRLQCPFEQELLRRQQRLNQVGDGHPAGTTHPPGLSSREELCCGHS

SEQ ID NO: 761014 - protein, 119 aa, Homo sapiens
GSHRAESPPCAASPGPAAYVGRRRSPWRGGRGLPGESPVPASSPRILGPERPPTGTRRGFLERLGGPSPPGSFLPWRSFCPLRSSLTTTLRSQKTIQRGDEDWEARLSDAHLWLVTRAA

SEQ ID NO: 761015 - protein, 358 aa, Homo sapiens
MEQWDHFHNQQEDTDSCSESVKFDARSMTALLPPNPKNSPSLQEKLKSFKAALIALYLLVFAVLIPLIGIVAAQLLKWETKNCSVSSTNANDITQSLTGKGNDSEEEMRFQEVFMEHMSNMEKRIQHILDMEANLMDTEHFQNFSMTTDQRFNDILLQLSTLFSSVQGHGNAIDEISKSLISLNTTLLDLQLNIENLNGKIQENTFKQQEEISKLEERVYNVSAEIMAMKEEQVHLEQEIKGEVKVLNNITNDLRLKDWEHSQTLRNITLIQGPPGPPGEKGDRGPTGESGPRGFPGPIGPPGLKGDRGAIGFPGSRGLPGYAGRPGNSGPKGQKGEKGSGNTLRPVQLTDHIRAGPS

SEQ ID NO: 761016 - protein, 443 aa, Homo sapiens
  misc_feature (22)..(22): Xaa can be any naturally occurring amino acid
  misc_feature (50)..(50): Xaa can be any naturally occurring amino acid
ARAQGYRTAAFSYSPPGLCRTXPPFSRLECSGMIVTHCSLPLLGSSNPTXSGSQSMEQWDHFHNQQEDTDSCSESVKFDARSMTALLPPNPKNSPSLQEKLKSFKAALIALYLLVFAVLIPLIGIVAAQLLKWETKNCSVSSTNANDITQSLTGKGNDSEEEMRFQEVFMEHMSNMEKRIQHILDMEANLMDTEHFQNFSMTTDQRFNDILLQLSTLFSSVQGHGNAIDEISKSLISLNTTLLDLQLNIENLNGKIQENTFKQQEEISKLEERVYNVSAEIMAMKEEQVHLEQEIKGEVKVLNNITNDLRLKDWEHSQTLRNITLIQGPPGPPGEKGDRGPTGESGPRGFPGPIGPPGLKGDRGAIGFPGSRGLPGYAGRPGNSGPKGQKGEKGSGNTLSTGPIWLNEVFCFGRESSIEECKIRQWGTRACSHSEDAGVTCTL

SEQ ID NO: 761017 - protein, 451 aa, Homo sapiens
MEQWDHFHNQQEDTDSCSESVKFDARSMTALLPPNPKNSPSLQEKLKSFKAALIALYLLVFAVLIPLIGIVAAQLLKWETKNCSVSSTNANDITQSLTGKGNDSEEEMRFQEVFMEHMSNMEKRIQHILDMEANLMDTEHFQNFSMTTDQRFNDILLQLSTLFSSVQGHGNAIDEISKSLISLNTTLLDLQLNIENLNGKIQENTFKQQEEISKLEERVYNVSAEIMAMKEEQVHLEQEIKGEVKVLNNITNDLRLKDWEHSQTLRNITLIQGPPGPPGEKGDRGPTGESGPRGFPGPIGPPGLKGDRGAIGFPGSRGLPGYAGRPGNSGPKGQKGEKGSGNTLTPFTKVRLVGGSGPHEGRVEILHSGQWGTICDDRWEVRVGQVVCRSLGYPGVQAVHKAAHFGQGTGPIWLNEVFCFGRESSIEECKIRQWGTRACSHSEDAGVTCTL

SEQ ID NO: 761018 - protein, 358 aa, Homo sapiens; identical to SEQ ID NO: 761015

SEQ ID NO: 761019 - protein, 113 aa, Homo sapiens
MEQWDHFHNQQEDTDSCSESVKFDARSMTALLPPNPKNSPSLQEKLKSFKAALIALYLLVFAVLIPLIGIVAAQLLKWETKNCSVIRDQLANIVKPHLYKIKHLNPGGGGCRE

SEQ ID NO: 761020 - protein, 451 aa, Homo sapiens; identical to SEQ ID NO: 761017

SEQ ID NO: 761021 - protein, 451 aa, Homo sapiens; identical to SEQ ID NO: 761017

SEQ ID NO: 761022 - protein, 451 aa, Homo sapiens; identical to SEQ ID NO: 761017

SEQ ID NO: 761023 - protein, 136 aa, Homo sapiens
MDTQTHSLPITHTQLHSNSQPQSRTCTRHCQTFSQSCRQSHRGSRSQSSSQSPASHRNPTGAHSSSGHQSQSPNTSPPPKRHKKTMNSHHSPMRPTILHCRCPKNRKNLEGKLKKKKMAKRIQQVYKTKTRSSGTL

SEQ ID NO: 761024 - protein, 138 aa, Homo sapiens
MDTQTHSLPITHTQLHSNSQPQSRTCTRHCQTFSQSCRQSHRGSRSQSSSQSPASHRNPTGAHSSSGHQSQSPNTSPPPKRHKKTMNSHHSPMRPTILHCRCPKNRKNLEGKLKKKKMAKRIQQVYKTKTRSSGWKSN

SEQ ID NO: 761025 - protein, 156 aa, Homo sapiens [sequence omitted]

SEQ ID NO: 761026 - protein, 502 aa, Homo sapiens
MARRCGPVALLLGFGLLRLCSGVWGTDTEERLVEHLLDPSRYNKLIRPATNGSELVTVQLMVSLAQLISVHEREQIMTTNVWLTQEWEDYRLTWKPEEFDNMKKVRLPSKHIWLPDVVLYNNADGMYEVSFYSNAVVSYDGSIFWLPPAIYKSACKIEVKHFPFDQQNCTMKFRSWTYDRTEIDLVLKSEVASLDDFTPSGEWDIVALPGRRNENPDDSTYVDITYDFIIRRKPLFYTINLIIPCVLITSLAILVFYLPSDCGEKMTLCISVLLALTVFLLLISKIVPPTSLDVPLVGKYLMFTMVLVTFSIVTSVCVLNVHHRSPTTHTMAPWVKVVFLEKLPALLFMQQPRHHCARQRLRLRRRQREREGAGALFFREAPGADSCTCFVNRASVQGLAGAFGAEPAPVAGPGRSGEPCGCGLREAVDGVRFIADHMRSEDDDQSVSEDWKYVAMVIDRLFLWIFVFVCVFGTIGMFLQPLFQNYTTTTFLHSDHSAPSSK

SEQ ID NO: 761027 - protein, 252 aa, Homo sapiens
AGRLRDWGRGCWSRVMLGGSLGSRLLRGVGGSHGRFGARGVREGGAAMAAGESMAQRMVWVDLEMTGLDIEKDQIIEMACLITDSDLNILAEGPNLIIKQPDELLDSMSDWCKEHHGKSGLTKAVKKSTITLQQAEYEFLSFVRQQTPPGLCPLAGNSVHEDKKFLDKYMPQFMKHLHYRIIDVSTVKELCRRWYPEEYEFAPKKAASHRALDDISESIKELQFYRNNIFKKKIDEKKRKIIENGENEKTVS

SEQ ID NO: 761028 - protein, 262 aa, Homo sapiens
AGRLRDWGRGCWSRVMLGGSLGSRLLRGVGGSHGRFGARGVREGGAAMAAGESMAQRMVWVDLEMTGLDIEKDQIIEMACLITDSDLNILAEGPNLIIKQPDELLDSMSDWCKEHHGKSGLTKAVKKSTITLQQAEYEFLSFVRQQTPPGLCPLAGNSVHEDKKFLDKYMPQFMKHLHYRIIDVSTVKELCRRWYPEEYEFAPKKAASHSIKELQFYRNNIFKKKIDEKKRKIIENGENEKTVRLPLHRYLEATSGGFFFSR

SEQ ID NO: 761029 - protein, 263 aa, Homo sapiens
AGRLRDWGRGCWSRVMLGGSLGSRLLRGVGGSHGRFGARGVREGGAAMAAGESMAQRMVWVDLEMTGLDIEKDQIIEMACLITDSDLNILAEGPNLIIKQPDELLDSMSDWCKEHHGKSGLTKAVKKSTITLQQAEYEFLSFVRQQTPPGLCPLAGNSVHEDKKFLDKYMPQFMKHLHYRIIDVSTVKELCRRWYPEEYEFAPKKAASHRALDDISESIKELQFYRNNIFKKKIDEKKWVKNATLNINPSSPRGTLFLLGTFG

SEQ ID NO: 761030 - protein, 127 aa, Homo sapiens
GFFTRNTYFPPGTQFLPFFRIFIRLPIGRFGPSRAKNSARGDMCHHAWINFCKDQGFTILARLVSNSWPQVIHPPWPPTVLGLQVWATAPGLDWAILAGFGEAIEEAGIGNLSQGRARRLESSMFSR

SEQ ID NO: 761031 - protein, 211 aa, Homo sapiens
AGRLRDWGRGCWSRVMLGGSLGSRLLRGVGGSHGRFGARGVREGGAAMAAGESMAQRMVWVDLEMTGLDIEKDQIIEMACLITDSDLNILAEGPNLIIKQPDELLDSMSDWCKEHHGKSGLTKAVKKSTITLQQAEYEFLSFVRQQTPPGLCPLAGNSVHEDKKFLDKYMPQFMKHLHYRIIDVSTVKELCRRWYPEEYEFAPKKAASHRV

SEQ ID NO: 761032 - protein, 244 aa, Homo sapiens
LRAHASPPQAAAQLTLGAPPAADREGLKAPGSLPPALGNPWPCGDMNCVCRLVLVVLSLWPDTAVAPGPPPGPPRVSPDPRAELDSTVLLTRSLLADTRQLAAQLRDKFPADGDHNLDSLPTLAMSAGALGALQLPGVLTRLRADLLSYLRHVQWLRRAGGSSLKTLEPELGTLQARLDRLLRRLQLLMSRLALPQPPPDPPAPPLAPPSSAWGGIRAAHAILGGLHLTLDWAVRGLLLLKTRL

SEQ ID NO: 761033 - protein, 244 aa, Homo sapiens; identical to SEQ ID NO: 761032

SEQ ID NO: 761034 - protein, 244 aa, Homo sapiens; identical to SEQ ID NO: 761032

SEQ ID NO: 761035 - protein, 101 aa, Homo sapiens
MPSARIRSSSSSPWTSPFLCTSSNVGLACRASLGGSGGCSLQRTSLAPGAHLCSLLLTTHPRMYREKNYYALLDHVLRKDRKYLTRDNNKSDAGLCVCCGK

SEQ ID NO: 761036 - protein, 101 aa, Homo sapiens; identical to SEQ ID NO: 761035

SEQ ID NO: 761037 - protein, 558 aa, Homo sapiens
PSSCLCRSRQLAPGRPEDAEGPEPGGPEAEAHSTPSSYPVSPASLRTCCPWARRPLGSRRNSFTLRGRVPPLPTAACGRCRLHPDPEPPPPAMEVAPEQPRWMAHPAVLNAQHPDSHHPGLAHNYMEPAQLLPPDEVDVFFNHLDSQGNPYYANPAHARARVSYSPAHARLTGGQMCRPHLLHSPGLPWLDGGKAALSAAAAHHHNPWTVSPFSKTPLHPSAAGGPGGPLSVYPGAGGGSGGGSGSSVASLTPTAAHSGSHLFGFPPTPPKEVSPDPSTTGAASPASSSAGGSAARGEDKDGVKYQVSLTESMKMESGSPLRPGLATMGTQPATHHPIPTYPSYVPAAAHDYSSGLFHPGGFLGGPASSFTPKQRSKARSCSEGRECVNCGATATPLWRRDGTGHYLCNACGLYHKMNGQNRPLIKPKRRLTTTTTLWRRNANGDPVCNACGLYYKLHNVNRPLTMKKEGIQTRNRKMSNKSKKSKKGAECFEELSKCMQEKSSPFSAAALAGHMAPVGHLPPFSHSGHILPTPTPIHPSSSLSFGHPHPSSMVTAMG

SEQ ID NO: 761038 - protein, 87 aa, Homo sapiens
TVTLASSFTPKQRIKARSCSCSEGRECVNCGATATPLWRRDGTGHYLCNACGLYHKMNGQNRPLIKPKRRLFAPPEEPHILPISDAT

SEQ ID NO: 761039 - protein, 572 aa, Homo sapiens
PSSCLCRSRQLAPGRPEDAEGPEPGGPEAEAHSTPSSYPVSPASLRTCCPWARRPLGSRRNSFTLRGRVPPLPTAACGRCRLHPDPEPPPPAMEVAPEQPRWMAHPAVLNAQHPDSHHPGLAHNYMEPAQLLPPDEVDVFFNHLDSQGNPYYANPAHARARVSYSPAHARLTGGQMCRPHLLHSPGLPWLDGGKAALSAAAAHHHNPWTVSPFSKTPLHPSAAGGPGGPLSVYPGAGGGSGGGSGSSVASLTPTAAHSGSHLFGFPPTPPKEVSPDPSTTGAASPASSSAGGSAARGEDKDGVKYQVSLTESMKMESGSPLRPGLATMGTQPATHHPIPTYPSYVPAAAHDYSSGLFHPGGFLGGPASSFTPKQRSKARSCSEGRECVNCGATATPLWRRDGTGHYLCNACGLYHKMNGQNRPLIKPKRRLSAARRAGTCCANCQTTTTTLWRRNANGDPVCNACGLYYKLHNVNRPLTMKKEGIQTRNRKMSNKSKKSKKGAECFEELSKCMQEKSSPFSAAALAGHMAPVGHLPPFSHSGHILPTPTPIHPSSSLSFGHPHPSSMVTAMG

SEQ ID NO: 761040 - protein, 572 aa, Homo sapiens; identical to SEQ ID NO: 761039

SEQ ID NO: 761041 - protein, 480 aa, Homo sapiens
MEVAPEQPRWMAHPAVLNAQHPDSHHPGLAHNYMEPAQLLPPDEVDVFFNHLDSQGNPYYANPAHARARVSYSPAHARLTGGQMCRPHLLHSPGLPWLDGGKAALSAAAAHHHNPWTVSPFSKTPLHPSAAGGPGGPLSVYPGAGGGSGGGSGSSVASLTPTAAHSGSHLFGFPPTPPKEVSPDPSTTGAASPASSSAGGSAARGEDKDGVKYQVSLTESMKMESGSPLRPGLATMGTQPATHHPIPTYPSYVPAAAHDYSSGLFHPGGFLGGPASSFTPKQRSKARSCSEGRECVNCGATATPLWRRDGTGHYLCNACGLYHKMNGQNRPLIKPKRRLSAARRAGTCCANCQTTTTTLWRRNANGDPVCNACGLYYKLHNVNRPLTMKKEGIQTRNRKMSNKSKKSKKGAECFEELSKCMQEKSSPFSAAALAGHMAPVGHLPPFSHSGHILPTPTPIHPSSSLSFGHPHPSSMVTAMG

SEQ ID NO: 761042 - protein, 580 aa, Homo sapiens
PSSCLCRSRQLAPGRPEDAEGPEPGGPEAEAHSTPSSYPVSPASLRTCCPWARRPLGSRRNSFTLRGRVPPLPTAACGRCRLHPDPEPPPPAMEVAPEQPRWMAHPAVLNAQHPDSHHPGLAHNYMEPAQLLPPDEVDVFFNHLDSQGNPYYANPAHARARVSYSPAHARLTGGQMCRPHLLHSPGLPWLDGGKAALSAAAAHHHNPWTVSPFSKTPLHPSAAGGPGGPLSVYPGAGGGSGGGSGSSVASLTPTAAHSGSHLFGFPPTPPKEVSPDPSTTGAASPASSSAGGSAARGEDKDGVKYQVSLTESMKMESGSPLRPGLATMGTQPATHHPIPTYPSYVPAAAHDYSSGLFHPGGFLGGPASSFTPKQRSKARSCSEGRECVNCGATATPLWRRDGTGHYLCNACGLYHKMNGQNRPLIKPKRRLSAARRAGTCCANCQTTTTTLWRRNANGDPVCNACGLYYKLHNVNRPLTMKKEGIQTRNRKMSNKSKKSKKGAECFEELSKCMQEKSSPFSAAALAGHMAPVGHLPPFSHSGHILPTPTPIQAPPLLEGAQQPASSYCECSPPLRGCLRT

SEQ ID NO: 761043 - protein, 212 aa, Homo sapiens
MIGCCSLFTLSSFSKARSCSCSEGRECVNCGATATPLWRRDGTGHYLCNACGLYHKMNGQNRPLIKPKRRLSAARRAGTCCANCQTTTTTLWRRNANGDPVCNACGLYYKLHNVNRPLTMKKEGIQTRNRKMSNKSKKSKKGAECFEELSKCMQEKSSPFSAAALAGHMAPVGHLPPFSHSGHILPTPTPIHPSSSLSFGHPHPSSMVTAMG

SEQ ID NO: 761044 - protein, 292 aa, Homo sapiens
VERGSLFIGQLGALLLGVAFLSPRRVRFRQRMQQSRILRRTCNRGGGFGQAGSCLRVEEGNPKAWKDLAELLFPFFPLHRIAGKEAGSGLPRPLLKHSLTVLLSPSVRRFSELPSGGRCRLHPDPEPPPPAMEVAPEQPRWMAHPAVLNAQHPDSHHPGLAHNYMEPAQLLPPDEVDVFFNHLDSQGNPYYANPAHARARVSYSPAHARLTGGQMCRPHLLHSPGLPWLDGGKAALCVGPHKTWTEPFQKHGPWCEAGALLCPVGGAGARDQATKGLGTGAQPQGGQQGAAR

SEQ ID NO: 761045 - protein, 480 aa, Homo sapiens; identical to SEQ ID NO: 761041

SEQ ID NO: 761046 - protein, 480 aa, Homo sapiens; identical to SEQ ID NO: 761041

SEQ ID NO: 761047 - protein, 331 aa, Homo sapiens
MSAEGSVASLTPTAAHSGSHLFGFPPTPPKEVSPDPSTTGAASPASSSAGGSAARGEDKDGVKYQVSLTESMKMESGSPLRPGLATMGTQPATHHPIPTYPSYVPAAAHDYSSGLFHPGGFLGGPASSFTPKQRSKARSCSEGRECVNCGATATPLWRRDGTGHYLCNACGLYHKMNGQNRPLIKPKRRLSAARRAGTCCANCQTTTTTLWRRNANGDPVCNACGLYYKLHNVNRPLTMKKEGIQTRNRKMSNKSKKSKKGAECFEELSKCMQEKSSPFSAAALAGHMAPVGHLPPFSHSGHILPTPTPIHPSSSLSFGHPHPSSMVTAMG

SEQ ID NO: 761048 - protein, 572 aa, Homo sapiens; identical to SEQ ID NO: 761039

SEQ ID NO: 761049 - protein, 109 aa, Homo sapiens
LPPQDPEGIEKPSHSSLLGDIARGGGKGLIATPYKLPTQEYPGVLPRRRFSSGSSFALWPMWICAGSPRCHGRAIPLHLYSVSLLYLPVLTPIPYCLEYCNFIINFEVR

SEQ ID NO: 761050 - protein, 269 aa, Homo sapiens
MNQEDLDPDSTTDVGDVTNTEEELIRECEEMWKDMEECQNKLSLIGTETLTDSNAQLSLLIMQVKCLTAELSQWQKKTPETIPLTEDVLITLGKEEFQKLRQDLEMVLSTKESKNEKLKEDLEREQRWLDEQQQIMESLNVLHSELKNKVETFSESRIFNELKTKMLNIKEYKEKLLSTLGEFLEDHFPLPDRSVKKKKKNIQESSVNLITLHEMLEILINRLFDVPHDPYVKISDSFWPPYVELLLRNGIALRHPEDPTRIRLEAFHQ

SEQ ID NO: 761051 - protein, 269 aa, Homo sapiens; identical to SEQ ID NO: 761050

SEQ ID NO: 761052 - protein, 269 aa, Homo sapiens; identical to SEQ ID NO: 761050

SEQ ID NO: 761053 - protein, 269 aa, Homo sapiens; identical to SEQ ID NO: 761050

SEQ ID NO: 761054 - protein, 208 aa, Homo sapiens
MQVKCLTAELSQWQKKTPETIPLTEDVLITLGKEEFQKLRQDLEMVLSTKESKNEKLKEDLEREQRWLDEQQQIMESLNVLHSELKNKVETFSESRIFNELKTKMLNIKEYKEKLLSTLGEFLEDHFPLPDRSVKKKKKNIQESSVNLITLHEMLEILINRLFDVPHDPYVKISDSFWPPYVELLLRNGIALRHPEDPTRIRLEAFHQ

SEQ ID NO: 761055 - protein, 269 aa, Homo sapiens; identical to SEQ ID NO: 761050

SEQ ID NO: 761056 - protein, 106 aa, Homo sapiens
MNQEDLDPDSTTDVGDVTNTEEELIRECEEMWKDMEECQNKLSLIGTETLTDSNAQLSLLIMQVKCLTAELSQWQKKTPERSHRVVQAGVQWHNHGSLQPRSPGFK

SEQ ID NO: 761057 - protein, 237 aa, Homo sapiens
MTLFQCQNKLSLIGTETLTDSNAQLSLLIMQVKCLTAELSQWQKKTPETIPLTEDVLITLGKEEFQKLRQDLEMVLSTKESKNEKLKEDLEREQRWLDEQQQIMESLNVLHSELKNKVETFSESRIFNELKTKMLNIKEYKEKLLSTLGEFLEDHFPLPDRSVKKKKKNIQESSVNLITLHEMLEILINRLFDVPHDPYVKISDSFWPPYVELLLRNGIALRHPEDPTRIRLEAFHQ

SEQ ID NO: 761058 - protein, 218 aa, Homo sapiens
MTLFQLSLLIMQVKCLTAELSQWQKKTPETIPLTEDVLITLGKEEFQKLRQDLEMVLSTKESKNEKLKEDLEREQRWLDEQQQIMESLNVLHSELKNKVETFSESRIFNELKTKMLNIKEYKEKLLSTLGEFLEDHFPLPDRSVKKKKKNIQESSVNLITLHEMLEILINRLFDVPHDPYVKISDSFWPPYVELLLRNGIALRHPEDPTRIRLEAFHQ

SEQ ID NO: 761059 - protein, 296 aa, Homo sapiens
MNQEDLDPDSTTDVGDVTNTEEELIRECEEMWKDMEECQNKLSLIGTETLTDSNAQLSLLIMQVKCLTAELSQWQKKTPETIPLTEDVLITLGKEEILQMMILSYKPVGCPLNSLQFDIIYLEFQKLRQDLEMVLSTKESKNEKLKEDLEREQRWLDEQQQIMESLNVLHSELKNKVETFSESRIFNELKTKMLNIKEYKEKLLSTLGEFLEDHFPLPDRSVKKKKKNIQESSVNLITLHEMLEILINRLFDVPHDPYVKISDSFWPPYVELLLRNGIALRHPEDPTRIRLEAFHQ

SEQ ID NO: 761060 - protein, 236 aa, Homo sapiens
MNQEDLDPDSTTDVGDVTNTEEELIRECEEMWKDMEECQNKLSLIGTETLTDSNAQLSLLIMQVKCLTAELSQWQKKTPETIPLTEDVLITLGKEEFQKLRQDLEMVLSTKESKNEKLKEDLERIFNELKTKMLNIKEYKEKLLSTLGEFLEDHFPLPDRSVKKKKKNIQESSVNLITLHEMLEILINRLFDVPHDPYVKISDSFWPPYVELLLRNGIALRHPEDPTRIRLEAFHQ

SEQ ID NO: 761061 - protein, 131 aa, Homo sapiens
MVLSTKESKNEKLKEDLERIFNELKTKMLNIKEYKEKLLSTLGEFLEDHFPLPDRSVKKKKKNIQESSVNLITLHEMLEILINRLFDVPHDPYVKISDSFWPPYVELLLRNGIALRHPEDPTRIRLEAFHQ

SEQ ID NO: 761062 - protein, 224 aa, Homo sapiens
MTLFQCQNKLSLIGTETLTDSNAQLSLLIMQVKCLTAELSQWQKKTPETIPLTEDVLITLGKEEFQKLRQDLEMVLSTKESKNEKLKEDLEREQRWLDEQQQIMESLNVLHSELKNKVETFSESRIFNELKTKMLNIKEYKEKLLSTLGEFLEDHFPLPDRSVKKKKKNIQESSVNLITLHEMLEILINRLFDVPHDPYVKISDSFWPPYVTVGVRMAELRRQR

SEQ ID NO: 761063 - protein, 106 aa, Homo sapiens; identical to SEQ ID NO: 761056

SEQ ID NO: 761064 - protein, 269 aa, Homo sapiens; identical to SEQ ID NO: 761050

SEQ ID NO: 761065 - protein, 269 aa, Homo sapiens; identical to SEQ ID NO: 761050

SEQ ID NO: 761066 - protein, 269 aa, Homo sapiens; identical to SEQ ID NO: 761050

SEQ ID NO: 761067 - protein, 269 aa, Homo sapiens; identical to SEQ ID NO: 761050

SEQ ID NO: 761068 - protein, 271 aa, Homo sapiens
MTLFQEDLDPDSTTDVGDVTNTEEELIRECEEMWKDMEECQNKLSLIGTETLTDSNAQLSLLIMQVKCLTAELSQWQKKTPETIPLTEDVLITLGKEEFQKLRQDLEMVLSTKESKNEKLKEDLEREQRWLDEQQQIMESLNVLHSELKNKVETFSESRIFNELKTKMLNIKEYKEKLLSTLGEFLEDHFPLPDRSVKKKKKNIQESSVNLITLHEMLEILINRLFDVPHDPYVKISDSFWPPYVELLLRNGIALRHPEDPTRIRLEAFHQ

SEQ ID NO: 761069 - protein, 205 aa, Homo sapiens
MTLFQVTYSLHLASSSAIPLTEDVLITLGKEEFQKLRQDLEMVLSTKESKNEKLKEDLEREQRWLDEQQQIMESLNVLHSELKNKVETFSESRIFNELKTKMLNIKEYKEKLLSTLGEFLEDHFPLPDRSVKKKKKNIQESSVNLITLHEMLEILINRLFDVPHDPYVKISDSFWPPYVELLLRNGIALRHPEDPTRIRLEAFHQ

SEQ ID NO: 761070 - protein, 296 aa, Homo sapiens; identical to SEQ ID NO: 761059

SEQ ID NO: 761071 - protein, 167 aa, Homo sapiens
MNQEDLDPDSTTDVGDVTNTEEELIRECEEMWKDMEECQNKLSLIGTETLTDSNAQLSLLIMQVKCLTAELSQWQKKTPETIPLTEDVLITLGKEEFQKLRQDLEMVLSTKESKNEKLKEDLEREQRWLDEQQQIMESLNVLHSELKNKVETFSESRVLILCSRFLK

SEQ ID NO: 761072 - protein, 134 aa, Homo sapiens [sequence omitted]

SEQ ID NO: 761073 - protein, 251 aa, Homo sapiens
MNQEDLDPDSTTDVGDVTNTEEELIRECEEMWKDMEECQNKLSLIGTETLTDSNAQLSLLIMQVKCLTAELSQWQKKTPETIPLTEDVLITLGKEEILQMMILSYKPVGCPLNSLQFDIIYLEFQKLRQDLEMVLSTKESKNEKLKEDLEREQRWLDEQQQIMESLNVLHSELKNKVETFSESRIFNELKTKMLNIKEYKEKLLSTLGEFLEDHFPLPDRSVKKKKMESPCVTQAGMQWHDLVSLQPLPPG

SEQ ID NO: 761074 - protein, 82 aa, Homo sapiens
ENLGWCIPMHLDRPIPELCQVHLEFSKTDVNLKGSILSSCEEKYFKMCKTEESELKEDSDPILAKLERLILLLTLIATCYPT

SEQ ID NO: 761075 - protein, 82 aa, Homo sapiens
MEDALSEVDFQLKVDLHFTDSEQQLRDVAGAPMVSSRTLGLHFHPRNGLHHQVPVMFDYFHLSVISVTVHAALVALQQPLIR

SEQ ID NO: 761076 - protein, 662 aa, Homo sapiens
MGLYRIRVSTGASLYAGSNNQVQLWLVGQHGEAALGKRLWPARGKETELKVEVPEYLGPLLFVKLRKRHLLKDDAWFCNWISVQGPGAGDEVRFPCYRWVEGNGVLSLPEGTGRTVGEDPQGLFQKHREEELEERRKLYRWGNWKDGLILNMAGAKLYDLPVDERFLEDKRVDFEVSLAKGLADLAIKDSLNVLTCWKDLDDFNRIFWCGQSKLAERVRDSWKEDALFGYQFLNGANPVVLRRSAHLPARLVFPPGMEELQAQLEKELEGGTLFEADFSLLDGIKANVILCSQQHLAAPLVMLKLQPDGKLLPMVIQLQLPRTGSPPPPLFLPTDPPMAWLLAKCWVRSSDFQLHELQSHLLRGHLMAEVIVVATMRCLPSIHPIFKLIIPHLRYTLEINVRARTGLVSDMGIFDQIMSTGGGGHVQLLKQAGAFLTYSSFCPPDDLADRGLLGVKSSFYAQDALRLWEIIYRYVEGIVSLHYKTDVAVKDDPELQTWCREITEIGLQGAQDRGFPVSLQARDQVCHFVTMCIFTCTGQHASVHLGQLDWYSWVPNAPCTMRLPPPTTKDATLETVMATLPNFHQASLQMSITWQLGRRQPVMVAVGQHEEEYFSGPEPKAVLKKFREELAALDKEIEIRNAKLDMPYEYLRPSVVENSVAI

SEQ ID NO: 761077 - protein, 202 aa, Homo sapiens
MAYPCGDMNSFSQGLCLSCKKGRCNTLGYHVRQEPRSKSKRLFLVTRAQSPFKVYHYQLKIQFINQTETPIQTTFTMSLLGTKEKMQKIPITLGKGIASNKTYSFLITLDVDIGELIMIKFKWENSAVWANVWDTVQTIIPWSTGPRHSGLVLKTIRVKAGETQQRMTFCSENTDDLLLRPTQEKIFVKCEIKSKTSKRKIR

SEQ ID NO: 761078 - protein, 499 aa, Homo sapiens [sequence omitted]

SEQ ID NO: 761079 - protein, 105 aa, Homo sapiens
LPSPVGVSPSLQPPPPPSTGLSFSSGPQPRPPPTPTPLSPRQFWPFSHIYKCPAGTGGGRGVPGAYRRQCTVAVPSECACACVPCRGCVECIVQHIFMNKIVLNI

SEQ ID NO: 761080 - protein, 280 aa, Homo sapiens
MWFLTTLLLWVPVDGQVDTTKAVITLQPPWVSVFQEETVTLHCEVLHLPGSSSTQWFLNGTATQTSTPSYRITSASVNDSGEYRCQRGLSGRSDPIQLEIHRGWLLLQVSSRVFMEGEPLALRCHAWKDKLVYNVLYYRNGKAFKFFHWNSNLTILKTNISHNGTYHCSGMGKHRYTSAGISQYTVKGLQLPTPVWFHVLFYLAVGIMFLVNTVLWVTIRKELKRKKKWNLEISLDSGHEKKVISSLQEDRHLEEELKCQEQKEEQLQEGVHRKEPQGAT

SEQ ID NO: 761081 - protein, 166 aa, Homo sapiens
MEGEPLALRCHAWKDKLVYNVLYYRNGKAFKFFHWNSNLTILKTNISHNGTYHCSGMGKHRYTSAGISQYTVKGLQLPTPVWFHVLFYLAVGIMFLVNTVLWVTIRKELKRKKKWNLEISLDSGHEKKVISSLQEDRHLEEELKCQEQKEEQLQEGVHRKEPQGAT

SEQ ID NO: 761082 - protein, 224 aa, Homo sapiens
MWFLTTLLLWVPVDGQVDTTKAVITLQPPWVSVFQEETVTLHCEVLHLPGSSSTQWFLNGTATQTSTPSYRITSASVNDSGEYRCQRGLSGRSDPIQLEIHRGWLLLQVSSRVFMEGEPLALRCHAWKDKLVYNVLYYRNGKAFKFFHWNSNLTILKTNISHNGTYHCSGMGKHRYTSAGISQYTVKELFPAPVLNASVTSPLLEGNLVTLSCETKLLLQRPGL

SEQ ID NO: 761083 - protein, 264 aa, Homo sapiens
DLLQFQLMGKWPPWVSVFQEETVTLHCEVLHLPGSSSTQWFLNGTATQTSTPSYRITSASVNDSGEYRCQRGLSGRSDPIQLEIHRGWLLLQVSSRVFMEGEPLALRCHAWKDKLVYNVLYYRNGKAFKFFHWNSNLTILKTNISHNGTYHCSGMGKHRYTSAGISQYTVKGLQLPTPVWFHVLFYLAVGIMFLVNTVLWVTIRKELKRKKKWNLEISLDSGHEKKVISSLQEDRHLEEELKCQEQKEEQLQEGVHRKEPQGAT

SEQ ID NO: 761084 - protein, 375 aa, Homo sapiens
MWFLTTLLLWVPVDGQVDTTKAVITLQPPWVSVFQEETVTLHCEVLHLPGSSSTQWFLNGTATQTSTPSYRITSASVNDSGEYRCQRGLSGRSDPIQLEIHRGWLLLQVSSRVFMEGEPLALRCHAWKDKLVYNVLYYRNGKAFKFFHWNSNLTILKTNISHNGTYHCSGMGKHRYTSAGISQYTVKELFPAPVLNASVTSPLLEGNLVTLSCETKLLLQRPGLQLYFSFYMGSKTLRGRNTSSEYQILTARREDSGLYWCEAATEDGNVLKHSPELELQVLGLQLPTPVWFHVLFYLAVGIMFLVNTVLWVTIRKELKRKKKWNLEISLDSGHEKKVISSLQEDRHLEEELKCQEQKEEQLQEGVHRKEPQGAT

SEQ ID NO: 761085 - protein, 330 aa, Homo sapiens
MAAVDSFYLLYREIARSCNCYMEALALVGAWYTARKSITVICDFYSLIRLHFIPRLGSRADLIKQYGRWAVVSGATDGIGKAYAEELASRGLNIILISRNEEKLQVVAKDIADTYKVETDIIVADFSSGREIYLPIREALKDKDVGILVNNVGVFYPYPQYFTQLSEDKLWDIINVNIAAASLMVHVVLPGMVERKKGAIVTISSGSCCKPTPQLAAFSASKAYLDHFSRALQYEYASKGIFVQSLIPFYVATSMTAPSNFLHRCSWLVPSPKVYAHHAVSTLGISKRTTGYWSHSIQFLFAQYMPEWLWVWGANILNRSLRKEALSCTA

SEQ ID NO: 761086 - protein, 313 aa, Homo sapiens
MAAVDSFYLLYREIARSCNCYMEALALVGAWYTARKSITVICDFYSLIRLHFIPRLGSRADLIKQYGRWAVVSGLNIILISRNEEKLQVVAKDIADTYKVETDIIVADFSSGREIYLPIREALKDKDVGILVNNVGVFYPYPQYFTQLSEDKLWDIINVNIAAASLMVHVVLPGMVERKKGAIVTISSGSCCKPTPQLAAFSASKAYLDHFSRALQYEYASKGIFVQSLIPFYVATSMTAPSNFLHRCSWLVPSPKVYAHHAVSTLGISKRTTGYWSHSIQFLFAQYMPEWLWVWGANILNRSLRKEALSCTA

SEQ ID NO: 761087 - protein, 330 aa, Homo sapiens; identical to SEQ ID NO: 761085

SEQ ID NO: 761088 - protein, 330 aa, Homo sapiens; identical to SEQ ID NO: 761085

SEQ ID NO: 761089 - protein, 85 aa, Homo sapiens
RVRGSREGAARQQLRRPRRGRRPRGSGGTGLEDFAGLQIGLKRRTEPHTADGPELAERRLPWLLLTVSTSCTGKSPGLAIAIWKL

SEQ ID NO: 761090 - protein, 330 aa, Homo sapiens; identical to SEQ ID NO: 761085

SEQ ID NO: 761091 - protein, 330 aa, Homo sapiens; identical to SEQ ID NO: 761085

SEQ ID NO: 761092 - protein, 575 aa, Homo sapiens
MAKPFFRLQKFLRRTQFLLFFLTAAYLMTGSLLLLQRVRVALPQGPRAPGPLQTLPVAAVALGVGLLDSRALHDPRVSPELLLGVDMLQSPLTRPRPGPRWLRSRNSELRQLRRRWFHHFMSDSQGPPALGPEAARPAIHSRGTYIGCFSDDGHERTLKGAVFYDLRKMTVSHCQDACAERSYVYAGLEAGAECYCGNRLPAVSVGLEECNHECKGEKGSVCGAVDRLSVYRVDELQPGSRKRRTATYRGCFRLPENITHAFPSSLIQANVTVGTCSGFCSQKEFPLAILRGWECYCAYPTPRFNLRDAMDSSVCGQDPEAQRLAEYCEVYQTPVQDTRCTDRRFLPNKSKVFVALSSFPGAGNTWARHLIEHATGFYTGSYYFDGTLYNKGFKGEKDHWRSRRTICVKTHESGRREIEMFDSAILLIRNPYRSLVAEFNRKCAGHLGYAADRNWKSKEWPDFVNSYASWWSSHVLDWLKYGKRLLVVHYEELRRSLVPTLREMVAFLNVSVSEERLLCVENNKEGSFRRRGRRSHDPEPFTPEMKDLINGYIRTVDQALRDHNWTGLPREYVPR

SEQ ID NO: 761093 - protein, 575 aa, Homo sapiens; identical to SEQ ID NO: 761092

SEQ ID NO: 761094 - protein, 575 aa, Homo sapiens; identical to SEQ ID NO: 761092

SEQ ID NO: 761095 - protein, 575 aa, Homo sapiens; identical to SEQ ID NO: 761092

SEQ ID NO: 761096 - protein, 536 aa, Homo sapiens
MAKPFFRLQKFLRRTQFLLFFLTAAYLMTGSLLLLQRVRVALPQGPRAPGPLQTLPVAAVALGVGLLDSRALHDPRVSPELLLGVDMLQSPLTRPRPGPRWLRSRNSELRQLRRRWFHHFMSDSQGPPALGPEAARPAIHSRAYVYAGLEAGAECYCGNRLPAVSVGLEECNHECKGEKGSVCGAVDRLSVYRVDELQPGSRKRRTATYRGCFRLPENITHAFPSSLIQANVTVGTCSGFCSQKEFPLAILRGWECYCAYPTPRFNLRDAMDSSVCGQDPEAQRLAEYCEVYQTPVQDTRCTDRRFLPNKSKVFVALSSFPGAGNTWARHLIEHATGFYTGSYYFDGTLYNKGFKGEKDHWRSRRTICVKTHESGRREIEMFDSAILLIRNPYRSLVAEFNRKCAGHLGYAADRNWKSKEWPDFVNSYASWWSSHVLDWLKYGKRLLVVHYEELRRSLVPTLREMVAFLNVSVSEERLLCVENNKEGSFRRRGRRSHDPEPFTPEMKDLINGYIRTVDQALRDHNWTGLPREYVPR

SEQ ID NO: 761097 - protein, 575 aa, Homo sapiens; identical to SEQ ID NO: 761092

SEQ ID NO: 761098 - protein, 575 aa, Homo sapiens; identical to SEQ ID NO: 761092

SEQ ID NO: 761099 - protein, 572 aa, Homo sapiens
EAARPAIHSRGTYIGCFSDDGHERTLKGAVFYDYEKDDCLPQPGCKDDASGGPGLTPTWALGAIPGLQPGALLPRGMAKPFFRLQKFLRRTQFLLFFLTAAYLMTGSLLLLQRVRVALPQGPRAPGPLQTLPVAAVALGVGLLDSRALHDPRVSPELLLGVDMLQSPLTRPRPGPRWLRSRNSELRQLRRRWFHHFMSDSQGPPKKCNHECKGEKGSVCGAVDRLSVYRVDELQPGSRKRRTATYRGCFRLPENITHAFPSSLIQANVTVGTCSGFCSQKEFPLAILRGWECYCAYPTPRFNLRDAMDSSVCGQDPEAQRLAEYCEVYQTPVQDTRCTDRRFLPNKSKVFVALSSFPGAGNTWARHLIEHATGFYTGSYYFDGTLYNKGFKGEKDHWRSRRTICVKTHESGRREIEMFDSAILLIRNPYRSLVAEFNRKCAGHLGYAADRNWKSKEWPDFVNSYASWWSSHVLDWLKYGKRLLVVHYEELRRSLVPTLREMVAFLNVSVSEERLLCVENNKEGSFRRRGRRSHDPEPFTPEMKDLINGYIRTVDQALRDHNWTGLPREYVPR

SEQ ID NO: 761100 - protein, 124 aa, Homo sapiens
ARNWKTKEWPDFVNSYASWWSSHVLDWLKYGKRLLVVHYEELRRSLVPTLREMVAFLNVSVSEERLLCVENNKEGSFRRRGRRSHDPEPFTPEMKDLINGYIRTVDQALRDHNWTGLPREYVPR

SEQ ID NO: 761101 - protein, 406 aa, Homo sapiens
PARGLNFVERGANLAERAASFAESALQGYACGDTGRFGLFHPCGAHYPEPGAVQAPPGPTQGGSSLRSAETFSFAFAKGAPDPCCGATERDCASPSRPTAVGTMADDQGCIEEQGVEDSANEDSVDAKPDRSSFVPSLFSKKKKNVTMRSIKTTRDRVPTYQYNMNFEKLGKCIIINNKNFDKVTGMGVRNGTDKDAEALFKCFRSLGFDVIVYNDCSCAKMQDLLKKASEEDHTNAACFACILLSHGEENVIYGKDGVTPIKDLTAHFRGDRCKTLLEKPKLFFIQACRGTELDDGIQADSGPINDTDANPRYKIPVEADFLFAYSTVPGYYSWRSPGRGSWFVQALCSILEEHGKDLEIMQILTRVNDRVARHFESQSDDPHFHEKKQIPCVVSMLTKELYFSQ

SEQ ID NO: 761102 - protein, 336 aa, Homo sapiens
MDCVGWPPGRKWHLEKNTSCGGSSGICASYVTQMADDQGCIEEQGVEDSANEDSVDAKPDRSSFVPSLFSKKKKNVTMRSIKTTRDRVPTYQYNMNFEKLGKCIIINNKNFDKVTGMGVRNGTDKDAEALFKCFRSLGFDVIVYNDCSCAKMQDLLKKASEEDHTNAACFACILLSHGEENVIYGKDGVTPIKDLTAHFRGDRCKTLLEKPKLFFIQACRGTELDDGIQADSGPINDTDANPRYKIPVEADFLFAYSTVPGYYSWRSPGRGSWFVQALCSILEEHGKDLEIMQILTRVNDRVARHFESQSDDPHFHEKKQIPCVVSMLTKELYFSQ

SEQ ID NO: 761103 - protein, 303 aa, Homo sapiens
MADDQGCIEEQGVEDSANEDSVDAKPDRSSFVPSLFSKKKKNVTMRSIKTTRDRVPTYQYNMNFEKLGKCIIINNKNFDKVTGMGVRNGTDKDAEALFKCFRSLGFDVIVYNDCSCAKMQDLLKKASEEDHTNAACFACILLSHGEENVIYGKDGVTPIKDLTAHFRGDRCKTLLEKPKLFFIQACRGTELDDGIQADSGPINDTDANPRYKIPVEADFLFAYSTVPGYYSWRSPGRGSWFVQALCSILEEHGKDLEIMQILTRVNDRVARHFESQSDDPHFHEKKQIPCVVSMLTKELYFSQ

SEQ ID NO: 761104 - protein, 341 aa, Homo sapiens
STSKLGCWVGTSFKAEGASYAHARRRAPPAKQRLGDHSGCHSGPEADQPCGMADDQGCIEEQGVEDSANEDSVDAKPDRSSFVPSLFSKKKKNVTMRSIKTTRDRVPTYQYNMNFEKLGKCIIINNKNFDKVTGMGVRNGTDKDAEALFKCFRSLGFDVIVYNDCSCAKMQDLLKKASEEDHTNAACFACILLSHGEENILLCHPGWSAAASSRKTATSTSQACRGTELDDGIQADSGPINDTDANPRYKIPVEADFLFAYSTVPGYYSWRSPGRGSWFVQALCSILEEHGKDLEIMQILTRVNDRVARHFESQSDDPHFHEKKQIPCVVSMLTKELYFSQ

SEQ ID NO: 761105 - protein, 216 aa, Homo sapiens
PARGLNFVERGANLAERAASFAESALQGYACGDTGRFGLFHPCGAHYPEPGAVQAPPGPTQGGSSLRSAETFSFAFAKGAPDPCCGATERDCASPSRPTAVGTMADDQGCIEEQGVEDSANEDSVDAKPDRSSFVPSLFSKKKKNVTMRSIKTTRDRVPTYQYNMNFEKLGKCIIINNKNFDKVTGMGVRNGTDKDAEALFKCFRSLGFDVIVYND

SEQ ID NO: 761106 - protein, 354 aa, Homo sapiens
STSKLGCWVGTSFKAEGASYAHARRRAPPAKQRLGDHSGCHSGPEADQPCGMADDQGCIEEQGVEDSANEDSVDAKPDRSSFVPSLFSKKKKNVTMRSIKTTRDRVPTYQYNMNFEKLGKCIIINNKNFDKVTGMGVRNGTDKDAEALFKCFRSLGFDVIVYNDCSCAKMQDLLKKASEEDHTNAACFACILLSHGEENVIYGKDGVTPIKDLTAHFRGDRCKTLLEKPKLFFIQACRGTELDDGIQADSGPINDTDANPRYKIPVEADFLFAYSTVPGYYSWRSPGRGSWFVQALCSILEEHGKDLEIMQILTRVNDRVARHFESQSDDPHFHEKKQIPCVVSMLTKELYFSQ

SEQ ID NO: 761107 - protein, 406 aa, Homo sapiens; identical to SEQ ID NO: 761101

SEQ ID NO: 761108 - protein, 270 aa, Homo sapiens
MFVSKKKKNVTMRSIKTTRDRVPTYQYNMNFEKLGKCIIINNKNFDKVTGMGVRNGTDKDAEALFKCFRSLGFDVIVYNDCSCAKMQDLLKKASEEDHTNAACFACILLSHGEENVIYGKDGVTPIKDLTAHFRGDRCKTLLEKPKLFFIQACRGTELDDGIQADSGPINDTDANPRYKIPVEADFLFAYSTVPGYYSWRSPGRGSWFVQALCSILEEHGKDLEIMQILTRVNDRVARHFESQSDDPHFHEKKQIPCVVSMLTKELYFSQ

SEQ ID NO: 761109 - protein, 220 aa, Homo sapiens
MGVRNGTDKDAEALFKCFRSLGFDVIVYNDCSCAKMQDLLKKASEEDHTNAACFACILLSHGEENVIYGKDGVTPIKDLTAHFRGDRCKTLLEKPKLFFIQACRGTELDDGIQADSGPINDTDANPRYKIPVEADFLFAYSTVPGYYSWRSPGRGSWFVQALCSILEEHGKDLEIMQILTRVNDRVARHFESQSDDPHFHEKKQIPCVVSMLTKELYFSQ

SEQ ID NO: 761110 - protein, 406 aa, Homo sapiens; identical to SEQ ID NO: 761101

SEQ ID NO: 761111 - protein, 205 aa, Homo sapiens
MCKGLAGLPASCLRSAKDMKHRLGFLLQKSDSCEHNSSHNKKDKVVICQRVSQEEVKKWAESLENLISHECGLAAFKAFLKSEYSEENIDFWISCEEYKKIKSPSKLSPKAKKIYNEFISVQATKEVNLDSCTREETSRNMLEPTITCFDEAQKKIFNLMEKDSYRRFLKSRFYLDLVNPSSCGAEKQKGAKSSADCASLVPQCA

SEQ ID NO: 761112 - protein, 280 aa, Homo sapiens
EAEGDRGAGTAERSSDWLDGRSWAIKETPTGLAGRRSEDSDNIFTGEEAKYAQSRSHSSSCRISFLLANSKLLNKMCKGLAGLPASCLRSAKDMKHRLGFLLQKSDSCEHNSSHNKKDKVVICQRVSQEEVKKWAESLENLISHECGLAAFKAFLKSEYSEENIDFWISCEEYKKIKSPSKLSPKAKKIYNEFISVQATKEVNLDSCTREETSRNMLEPTITCFDEAQKKIFNLMEKDSYRRFLKSRFYLDLVNPSSCGAEKQKGAKSSADCASLVPQCA

SEQ ID NO: 761113 - protein, 280 aa, Homo sapiens; identical to SEQ ID NO: 761112

SEQ ID NO: 761114 - protein, 280 aa, Homo sapiens; identical to SEQ ID NO: 761112

SEQ ID NO: 761115 - protein, 259 aa, Homo sapiens
RNTLREMRRRISVPGKEVKLRLNRRTASTYLPVRIPDACLQIPKLFHIIIVHTGILLEIMAGLLALQVSAKDMKHRLGFLLQKSDSCEHNSSHNKKDKVVICQRVSQEEVKKWAESLENLISHECGLAAFKAFLKSEYSEENIDFWISCEEYKKIKSPSKLSPKAKKIYNEFISVQATKEVNLDSCTREETSRNMLEPTITCFDEAQKKIFNLMEKDSYRRFLKSRFYLDLVNPSSCGAEKQKGAKSSADCASLVPQCA

SEQ ID NO: 761116 - protein, 146 aa, Homo sapiens [sequence omitted]

SEQ ID NO: 761117 - protein, 50 aa, Homo sapiens
RQCIASETASLPMIVSIKEGGRTRPQVVSLPNMRVQKCSCASDGALVPRR

SEQ ID NO: 761118 - protein, 327 aa, Homo sapiens
RVWGRASSRPSAGPAARFPPLAPHSCSHFPPCLLPGLSGPGERGGPGQGPGQGPGRPGLPGSALKPERTAAGKRPSTWTSSRRACCRGWGLRPGPRASSEPRRDVGARVYWPGRCRKAGARNSSACGGHRCVQDFIDLTRETRPRTKDRSGLYVIDLTRAEGENRPIATLDLTLEPVTPSQKEPTSLQTCASLSGKAVMEGHVDRSSQPTARRIINSDPVDLDLVEENTFVGPPPATSISGGSVYPTEPNCSSATFTGNLSFLASLQLSSDVSSLSPTSNNSRSSSSSSNQKAPLPCPQQDVSRPPQALPCPLRPLPCPPRASPCPP

SEQ ID NO: 761119 - protein, 289 aa, Homo sapiens
MLKKHLTKCNSSSQFKLLSKLGKEENFLKGICENPTARIILNDGNLKFFLLSSRTSREGRARWLNRTLQHLSPKQEHQLEQLSTQESTFRRTKTQDFIDLTRETRPRTKDRSGLYVIDLTRAEGENRPIATLDLTLEPVTPSQKEPTSLQTCASLSGKAVMEGHVDRSSQPTARRIINSDPVDLDLVEENTFVGPPPATSISGGSVYPTEPNCSSATFTGNLSFLASLQLSSDVSSLSPTSNNSRSSSSSSNQKAPLPCPQQDVSRPPQALPCPLRPLPCPPRASPCPP

SEQ ID NO: 761120 - protein, 80 aa, Homo sapiens
LPWPLPRWSCCGAVLPACAPAPKRPPPLATHALKPESSRWVVVLVLHPRRDFLRLLFPQLFHKPGPQLYCRVARPPHSGP

SEQ ID NO: 761121 - protein, 249 aa, Homo sapiens
  misc_feature (113)..(113): Xaa can be any naturally occurring amino acid
MGKVKVGVNGFGRIGRLVTRAAFNSGKVDIVAINDPFIDLNYMVYMFQYDSTHGKFHGTVKAENGKLVINGNPITIFQERDPSKIKWGDAGAEYVMESTGVFTNPPIGAKKGXWGGGGGGSFEGGAKKGVPNFPNFIISAPSADAPMFVMGVNHEKYDNNLKIISNASCTTNCLAPLAKVIHDNFGIVEGLMTTVHAITATQKTVDGPSGKLWRDGHGALQNIIPASTGTAKAMGKVIPELNGKLTGMA

SEQ ID NO: 761122 - protein, 86 aa, Homo sapiens
SSFASPAEPHRSDTMGKVKVGVNGFGRIGRLVTRAAFNSGKVDIVAINDPFIDPQRHFVKLISWYDNEFGYSNRVVDLMAHMASKE

SEQ ID NO: 761123 - protein, 232 aa, Homo sapiens
MGKVKVGVNGFGRIGRLVTRAAFNSGKVDIVAINDPFIDLNYMVYMFQYDSTHGKFHGTVKAENGKLVINGNPITIFQERDPSKIKWGDAGAEYVMESTGVFTTMEKAGPHLQGGAKRVIISAPSADAPMFVMGVNHEKYDNNLKIISNASCTTNCLAPLAKVIHDNFGIVEGLMTTVHAITATQKTVDGPSGKLWRDGHGALQNIIPASTGTAKAMGKVIPELNGKLTGMA

SEQ ID NO: 761124 - protein, 246 aa, Homo sapiens
MGKVKVGVNGFGRIGRLVTRAAFNSGKVDIVAINDPFIDLNYMVYMFQYDSTHGKFHGTVKAENGKLVINGNPITIFQGSGKNPFQISMWAQVRGRVDIAVRRDAHMWMSYHTTRVDERLGGITLRGERRQEKIISAPSADAPMFVMGVNHEKYDNNLKIISNASCTTNCLAPLAKVIHDNFGIVEGLMTTVHAITATQKTVDGPSGKLWRDGHGALQNIIPASTGTAKAMGKVIPELNGKLTGMA

SEQ ID NO: 761125 - protein, 86 aa, Homo sapiens; identical to SEQ ID NO: 761122

SEQ ID NO: 761126 - protein, 732 aa, Homo sapiens
MEGGDQSEEEPRERSQAGGMGTLWSQESTPEERLPVEGSRPWAVARRVLTAILILGLLLCFSVLLFYNFQNCGPRPCETSVCLDLRDHYLASGNTSVAPCTDFFSFACGRAKETNNSFQELATKNKNRLRRILEVQNSWHPGSGEEKAFQFYNSCMDTLAIEAAGTGPLRQVIEELGGWRISGKWTSLNFNRTLRLLMSQYGHFPFFRAYLGPHPASPHTPVIQIDQPEFDVPLKQDQEQKIYAQIFREYLTYLNQLGTLLGGDPSKVQEHSSLSISITSRLFQFLRPLEQRRAQGKLFQMVTIDQLKEMAPAIDWLSCLQATFTPMSLSPSQSLVVHDVEYLKNMSQLVEEMLLKQRDFLQSHMILGLVVTLSPALDSQFQEARRKLSQKLRELTEQPPMPARPRWMKCVEETGTFFEPTLAALFVREAFGPSTRSAAMKLFTAIRDALITRLRNLPWMNEETQNMAQDKVAQLQVEMGASEWALKPELARQEYNDIQLGSSFLQSVLSCVRSLRARIVQSFLQPHPQHRWKVSPWDVNAYYSVSDHVVVFPAGLLQPPFFHPGYPRAVNFGAAGSIMAHELLHIFYQLLLPGGCLACDNHALQEAHLCLKRHYAAFPLPSRTSFNDSLTFLENAADVGGLAIALQAYSKRLLRHHGETVLPSLDLSPQQIFFRSYAQVMCRKPSPQDSHDTHSPPHLRVHGPLSSTPAFARYFRCARGALLNPSSRCQLW

SEQ ID NO: 761127 - protein, 233 aa, Homo sapiens
MEGGDQSEEEPRERSQAGGMGTLWSQESTPEERLPVEGSRPWAVARRVLTAILILGLLLCFSVLLFYNFQNCGPRPCETSVCLDLRDHYLASGNTSVAPCTDFFSFACGRAKETNNSFQELATKNKNRLRRILEVQNSWHPGSGEEKAFQFYNSCMDTLAIEAAGTGPLRQVIEELGGWRISGKWTSLNFNRTLRLLMSQYGHFPFFRAYLGPHPASPHTPVIQIDSKLCPNR

SEQ ID NO: 761128 - protein, 97 aa, Homo sapiens
  misc_feature (6)..(6): Xaa can be any naturally occurring amino acid
  misc_feature (9)..(9): Xaa can be any naturally occurring amino acid
KAPMLXLGXFESPWFPSLSAVPESPLVTGSALSCGPSPFNDLSQVMCRKPSPQDSHDTHSPPHLRVHGPLSSTPAFARYFRCARGALLNPSSRCQLW

SEQ ID NO: 761129 - protein, 530 aa, Homo sapiens
HPPCSLLLSSLSCAQIDQPEFDVPLKQDQEQKIYAQIFREYLTYLNQLGTLLGGDPSKVQEHSSLSISITSRLFQFLRPLEQRRAQGKLFQMVTIDQLKLCVPPLKEMAPAIDWLSCLQATFTPMSLSPSQSLVVHDVEYLKNMSQLVEEMLLKQRDFLQSHMILGLVVTLSPALDSQFQEARRKLSQKLRELTEQPPMPARPRWMKCVEETGTFFEPTLAALFVREAFGPSTRSAAMKLFTAIRDALITRLRNLPWMNEETQNMAQDKVAQLQVEMGASEWALKPELARQEYNDIQLGSSFLQSVLSCVRSLRARIVQSFLQPHPQHRWKVSPWDVNAYYSVSDHVVVFPAGLLQPPFFHPGYPRAVNFGAAGSIMAHELLHIFYQLLLPGGCLACDNHALQEAHLCLKRHYAAFPLPSRTSFNDSLTFLENAADVGGLAIALQAYSKRLLRHHGETVLPSLDLSPQQIFFRSYAQVMCRKPSPQDSHDTHSPPHLRVHGPLSSTPAFARYFRCARGALLNPSSRCQLW

SEQ ID NO: 761130 - protein, 423 aa, Homo sapiens
MAPAIDWLSCLQATFTPMSLSPSQSLVVHDVEYLKNMSQLVEEMLLKQRDFLQSHMILGLVVTLSPALDSQFQEARRKLSQKLRELTEQPPMPARPRWMKCVEETGTFFEPTLAALFVREAFGPSTRSAAMKLFTAIRDALITRLRNLPWMNEETQNMAQDKVAQLQVEMGASEWALKPELARQEYNDIQLGSSFLQSVLSCVRSLRARIVQSFLQPHPQHRWKVSPWDVNAYYSVSDHVVVFPAGLLQPPFFHPGYPRAVNFGAAGSIMAHELLHIFYQLLLPGGCLACDNHALQEAHLCLKRHYAAFPLPSRTSFNDSLTFLENAADVGGLAIALQAYSKRLLRHHGETVLPSLDLSPQQIFFRSYAQVMCRKPSPQDSHDTHSPPHLRVHGPLSSTPAFARYFRCARGALLNPSSRCQLW

SEQ ID NO: 761131 - protein, 293 aa, Homo sapiens
MKLFTAIRDALITRLRNLPWMNEETQNMAQDKVAQLQVEMGASEWALKPELARQEYNDIQLGSSFLQSVLSCVRSLRARIVQSFLQPHPQHRWKVSPWDVNAYYSVSDHVVVFPAGLLQPPFFHPGYPRAVNFGAAGSIMAHELLHIFYQLLLPGGCLACDNHALQEAHLCLKRHYAAFPLPSRTSFNDSLTFLENAADVGGLAIALQAYSKRLLRHHGETVLPSLDLSPQQIFFRSYAQVMCRKPSPQDSHDTHSPPHLRVHGPLSSTPAFARYFRCARGALLNPSSRCQLW

SEQ ID NO: 761132 - protein, 177 aa, Homo sapiens
MLLGADSVCGTTHILTKAAPTLCSLAVCSLVPFSTVLPGGCLACDNHALQEAHLCLKRHYAAFPLPSRTSFNDSLTFLENAADVGGLAIALQAYSKRLLRHHGETVLPSLDLSPQQIFFRSYAQVMCRKPSPQDSHDTHSPPHLRVHGPLSSTPAFARYFRCARGALLNPSSRCQLW

SEQ ID NO: 761133 - protein, 689 aa, Homo sapiens
MEGGDQSEEEPRERSQAGGMGTLWSQESTPEERLPVEGSRPWAVARRVLTAILILGLLLCFSVLLFYNFQNCGPRPCETSVCLDLRDHYLASGNTSVAPCTDFFSFACGRAKETNNSFQELATKNKNRLRRILEVQNSWHPGSGEEKAFQFYNSCMDTLAIEAAGTGPLRQVIEELGGWRISGKWTSLNFNRTLRLLMSQYGHFPFFRAYLGPHPASPHTPVIQIDQPEFDVPLKQDQEQKIYAQIFREYLTYLNQLGTLLGGDPSKVQEHSSLSISITSRLFQFLRPLEQRRAQGKLFQMVTIDQLKEMAPAIDWLSCLQATFTPMSLSPSQSLVVHDVEYLKNMSQLVEEMLLKQRDFLQSHMILGLVVTLSPALDSQFQEARRKLSQKLRELTEQPPMPARPRWMKCVEETGTFFEPTLAALFVREAFGPSTRSAAMKLFTAIRDALITRLRNLPWMNEETQNMAQDKVAQLQVEMGASEWALKPELARQEYNDIQLGSSFLQSVLSCVRSLRARIVQSFLQPHPQHRWKVSPWDVNAYYSVSDHVVVFPAGLLQPPFFHPGYPRTSFNDSLTFLENAADVGGLAIALQAYSKRLLRHHGETVLPSLDLSPQQIFFRSYAGRQRPPPATACFMSVERLITEAHGSPLFRHSVKYPKPSSADVLTVIFSLPSLPLGITPQMTTGSST

SEQ ID NO: 761134 - protein, 677 aa, Homo sapiens
MEGGDQSEEEPRERSQAGGMGTLWSQESTPEERLPVEGSRPWAVARRVLTAILILGLLLCFSVLLFYNFQNCGPRPCETSVCLDLRDHYLASGNTSVAPCTDFFSFACGRAKETNNSFQELATKNKNRLRRILEVQNSWHPGSGEEKAFQFYNSCMDTLAIEAAGTGPLRQVIEELGGWRISGKWTSLNFNRTLRLLMSQYGHFPFFRAYLGPHPASPHTPVIQIDQPEFDVPLKQDQEQKIYAQIFREYLTYLNQLGTLLGGDPSKVQEHSSLSISITSRLFQFLRPLEQRRAQGKLFQMVTIDQLKEMAPAIDWLSCLQATFTPMSLSPSQSLVVHDVEYLKNMSQLVEEMLLKQRDFLQSHMILGLVVTLSPALDSQFQEARRKLSQKLRELTEQPPMPARPRWMKCVEETGTFFEPTLAALFVREAFGPSTRSAAMKLFTAIRDALITRLRNLPWMNEETQNMAQDKVAQLQVEMGASEWALKPELARQEYNDIQLGSSFLQSVLSCVRSLRARIVQSFLQPHPQHRWKVSPWDVNAYYSVSDHVVVFPAGLLQPPFFHPGYPRTSFNDSLTFLENAADVGGLAIALQAYSKRLLRHHGETVLPSLDLSPQQIFFRSYAQVMCRKPSPQDSHDTHSPPHLRVHGPLSSTPAFARYFRCARGALLNPSSRCQLW

SEQ ID NO: 761135 - protein, 76 aa, Homo sapiens
WGICVGLFCLHRDFLQSHMILGLVVTLSPALDSQFQEARRKLSQKLRELTEQPPMVRRGAGVFAQILERSIYSFEG

SEQ ID NO: 761136 - protein, 31 aa, Homo sapiens
ETTKLILQFLATISGQHSWIEQQVLEANPIL

SEQ ID NO: 761137 - protein, 125 aa, Homo sapiens
MSGFRLGDHVWLEPPSTHKTSVAIGGIIKEAKPGKVLVEDDEGKEHWIRAEDFGVLSPMHPNSVQGVDDMIRLGDLNEAGMVHNLLIRYQQHKIYTYTGSILVAVNPFQVLPLYTLEQVQLYPHT

SEQ ID NO: 761138 - protein, 85 aa, Homo sapiens
KDMRLLGAEIKDFIIFSTAGSMNLTFLLIPFAPKCQEDDMKQSSAVNSYNSAYKLDFLIQKAGLIHPTQFPVLYLNVVDPDICLI

SEQ ID NO: 761139 - protein, 104 aa, Homo sapiens
MGYLGCQALSEMIQFYLEEVMPQAENQDPDIKAHVNSLGENLKTLRLRLRRCHRFLPCENKSKAVEQVKNAFNKLQEKGIYKAMSEFDIFINYIEAYMTMKIRN

SEQ ID NO: 761140 - protein, 198 aa, Homo sapiens
YTSGACSCKTKPQDRLAKEGMHSSALLCCLVLLTGVRASPGQGTQSENSCTHFPGNLPNMLRDLRDAFSRVKTFFQMKDQLDNLLLKESLLEDFKGYLGCQALSEMIQFYLEEVMPQAENQDPDIKAHVNSLGENLKTLRLRLRRCHRFLPCENKSKAVEQVKNAFNKLQEKGIYKAMSEFDIFINYIEAYMTMKIRN

SEQ ID NO: 761141 - protein, 134 aa, Homo sapiens
MVEGSLGDLTKEKMDRLLLPAPIRPGVGPEVIGAQRQPNQRHWCAWGSMVVHVGPWGGPRSQTLEAPPGSGPAAEWPAPVSHCSSLRPGPGGFIFTDMPSQSWSATPVSQRGERSRARGLFCSSHPPAPTPGQP

SEQ ID NO: 761142 - protein, 134 aa, Homo sapiens; identical to SEQ ID NO: 761141

SEQ ID NO: 761143 - protein, 134 aa, Homo sapiens; identical to SEQ ID NO: 761141

SEQ ID NO: 761144 - protein, 222 aa, Homo sapiens
MAEKPKLHYSNIRGRMESIRWLLAAAGVEFEEKFIKSAEDLDKLRNDGYLMFQQVPMVEIDGMKLVQTRAILNYIASKYNLYGKDIKEKALIDMYIEGIADLGEMILLLPFSQPEEQDAKLALIQEKTKNRYFPAFEKVLKSHGQDYLVGNKLSRADIHLVELLYYVEELDSSLISSFPLLKALKTRISNLPTVKKFLQPGSPRKPPMDEKSLEESRKIFRF

SEQ ID NO: 761145 - protein, 222 aa, Homo sapiens; identical to SEQ ID NO: 761144

SEQ ID NO: 761146 - protein, 172 aa, Homo sapiens
MFQQVPMVEIDGMKLVQTRAILNYIASKYNLYGKDIKEKALIDMYIEGIADLGEMILLLPFSQPEEQDAKLALIQEKTKNRYFPAFEKVLKSHGQDYLVGNKLSRADIHLVELLYYVEELDSSLISSFPLLKALKTRISNLPTVKKFLQPGSPRKPPMDEKSLEESRKIFRF

SEQ ID NO: 761147 - protein, 222 aa, Homo sapiens; identical to SEQ ID NO: 761144

SEQ ID NO: 761148 - protein, 222 aa, Homo sapiens; identical to SEQ ID NO: 761144

SEQ ID NO: 761149 - protein, 207 aa, Homo sapiens
MAEKPKLHYSNIRGRMESIRWLLAAAGVEFEEKFIKSAEDLDKLRNDGYLMFQQVPMVEIDGMKLVQTRAILNYIASKYNLYGKDIKEKALIDMYIEGIADLGEMILLLPFSQPEEQDAKLALIQEKTKNRYFPAFEKVLKSHGQDYLVGNKLSRADIHLVELLYYVEELDSSLISSFPLLKVTHFTVFREADPHLPSWDLVSGPWD

SEQ ID NO: 761150 - protein, 395 aa, Homo sapiens
CNGKSSVTKGGPQIAYERGFRWKLAHFRYLCQSNALPSHVKINVSRQTLFEDSFQQIMALKPYDLRRRLYVIFRGEEGLDYGGLAREWFFLLSHEVLNPMYCLFEYAGKNNYCLQINPASTINPDHLSYFCFIGRFIAMALFHGKFIDTGFSLPFYKRMLSKKLTIKDLESIDTEFYNSLIWIRDNNIEECGLEMYFSVDMEILGKVTSHDLKLGGSNILVTEENKDEYIGLMTEWRFSRGVQEQTKAFLDGFNEVVPLQWLQYFDEKELEVMLCGMQEVDLADWQRNTVYRHYTRNSKQIIWFWQFVKETDNEVRMRLLQFVTGTCRLPLGGFAELMGSNGPQKFCIEKVGKDTWLPRSHTCFNRLDLPPYKSYEQLKEKLLFAIEETEGFGQE

SEQ ID NO: 761151 - protein, 321 aa, Homo sapiens [sequence omitted]

SEQ ID NO: 761152 - protein, 337 aa, Homo sapiens
FVPGTIVSNALPSHVKINVSRQTLFEDSFQQIMALKPYDLRRRLYVIFRGEEGLDYGGLAREWFFLLSHEVLNPMYCLFEYAGKNNYCLQINPASTINPDHLSYFCFIGRFIAMALFHGKFIDTGFSLPFYKRMLSKKLTIKDLESIDTEFYNSLIWIRDNNIEECGLEMYFSVDMEILGKVTSHDLKLGGSNILVTEENKDEYIGLMTEWRFSRGVQEQTKAFLDGFNEVVPLQWLQYFDEKELEVMLCGMQEVDLADWQRNTVYRHYTRNSKQIIWFWQFVKETDNEVRMRLLQFVTGTCRLPLGGFAELMGSNGPQKFCIEKVGKDTWLPRSHT

SEQ ID NO: 761153 - protein, 370 aa, Homo sapiens
FVPGTIVSNALPSHVKINVSRQTLFEDSFQQIMALKPYDLRRRLYVIFRGEEGLDYGGLAREWFFLLSHEVLNPMYCLFEYAGKNNYCLQINPASTINPDHLSYFCFIGRFIAMALFHGKFIDTGFSLPFYKRMLSKKLTIKDLESIDTEFYNSLIWIRDNNIEECGLEMYFSVDMEILGKVTSHDLKLGGSNILVTEENKDEYIGLMTEWRFSRGVQEQTKAFLDGFNEVVPLQWLQYFDEKELEVMLCGMQEVDLADWQRNTVYRHYTRNSKQIIWFWQFVKETDNEVRMRLLQFVTGTCRLPLGGFAELMGSNGPQKFCIEKVGKDTWLPRSHTCFNRLDLPPYKSYEQLKEKLLFAIEETEGFGQE

SEQ ID NO: 761154 - protein, 370 aa, Homo sapiens; identical to SEQ ID NO: 761153

SEQ ID NO: 761155 - protein, 234 aa, Homo sapiens
FVPGTIVSNALPSHVKINVSRQTLFEDSFQQIMALKPYDLRRRLYVIFRGEEGLDYGGLAREWFFLLSHEVLNPMYCLFEYAGKNNYCLQINPASTINPDHLSYFCFIGRFIAMALFHGKFIDTGFSLPFYKRMLSKKLTIKDLESIDTEFYNSLIWIRDNNIEECGLEMYFSVDMEILGKVTSHDLKLGGSNILVTEENKDEYIGLMTEWRFSRGVQEQTKAFLDAGRRDPLN

SEQ ID NO: 761156 - protein, 417 aa, Homo sapiens
MAQKEGGRTVPCCSRPKVAALTAGTLLLLTAIGAASWAIVAVLLRSDQEPLYPVQVSSADARLMVFDKTEGTWRLLCSSRSNARVAGLSCEEMGFLRALTHSELDVRTAGANGTSGFFCVDEGRLPHTQRLLEVISVCDCPRGRFLAAICQDCGRRKLPVDRIVGGRDTSLGRWPWQVSLRYDGAHLCGGSLLSGDWVLTAAHCFPERNRVLSRWRVFAGAVAQASPHGLQLGVQAVVYHGGYLPFRDPNSEENSNDIALVHLSSPLPLTEYIQPVCLPAAGQALVDGKICTVTGWGNTQYYGQQAGVLQEARVPIISNDVCNGADFYGNQIKPKMFCAGYPEGGIDACQGDSGGPFVCEDSISRTPRWRLCGIVSWGTGCALAQKPGVYTKVSDFREWIFQAIKTHSEASGMVTQL

SEQ ID NO: 761157 - protein, 417 aa, Homo sapiens; identical to SEQ ID NO: 761156

SEQ ID NO: 761158 - protein, 417 aa, Homo sapiens; identical to SEQ ID NO: 761156

SEQ ID NO: 761159 - protein, 393 aa, Homo sapiens
MAQKEVQVSSADARLMVFDKTEGTWRLLCSSRSNARVAGLSCEEMGFLRYWGPSEGWEPGGAGEQAYTPAPPRALTHSELDVRTAGANGTSGFFCVDEGRLPHTQRLLEVISVCDCPRGRFLAAICQDCGRRKLPVDRIVGGRDTSLGRWPWQVSLRYDGAHLCGGSLLSGDWVLTAAHCFPERNRVLSRWRVFAGAVAQASPHGLQLGVQAVVYHGGYLPFRDPNSEENSNDIALVHLSSPLPLTEYIQPVCLPAAGQALVDGKICTVTGWGNTQYYGQQAGVLQEARVPIISNDVCNGADFYGNQIKPKMFCAGYPEGGIDACQGDSGGPFVCEDSISRTPRWRLCGIVSWGTGCALAQKPGVYTKVSDFREWIFQAIKTHSEASGMVTQL

SEQ ID NO: 761160 - protein, 429 aa, Homo sapiens
MAQKEGGRTVPCCSRPKVAALTAGTLLLLTAIGAASWAIVAVLLRSDQEPLYPVQVSSADARLMVFDKTEGTWRLLCSSRSNARVAGLSCEEMGFLRALTHSELDVRTAGANGTSGFFCVDEGRLPHTQRLLEVISVCDCPRGRFLAAICQDCGRRKLPVDRIVGGRDTSLGRWPWQVSLRYDGAHLCGGSLLSGDWVLTAAHCFPERNRVLSRWRVFAGAVAQASPHGLQLGVQAVVYHGGYLPFRDPNSEENSNDIALVHLSSPLPLTEYIQPVCLPAAGQALVDGKICTVTGWGNTQYYGQQAGVLQEARVPIISNDVCNGADFYGNQIKPKMFCAGYPEGGIDACQGDSGGPFVCEDSISRTPRWRLCGIVSWGTGCALAQKPGVYTKVSDFREWIFQAIKTSGAPSCLSPDSTHSEASGMVTQL

SEQ ID NO: 761161 - protein, 485 aa, Homo sapiens
MAQKEGGRTVPCCSRPKVAALTAGTLLLLTAIGAASWAIVAVLLRSDQEPLYPVQVSSADARLMVFDKTEGTWRLLCSSRSNARVAGLSCEEMGFLRYWGPSEGWEPGGAGEQAYTPAPPRALTHSELDVRTAGANGTSGFFCVDEGRLPHTQRLLEVISVWGGGQRAGGATPQTPKALPLPVFLPPVLTGLYFLSFCVSNPISPSDCPRGRFLAAICQDCGRRKLPVDRIVGGRDTSLGRWPWQVSLRYDGAHLCGGSLLSGDWVLTAAHCFPERNRVLSRWRVFAGAVAQASPHGLQLGVQAVVYHGGYLPFRDPNSEENSNDIALVHLSSPLPLTEYIQPVCLPAAGQALVDGKICTVTGWGNTQYYGQQAGVLQEARVPIISNDVCNGADFYGNQIKPKMFCAGYPEGGIDACQGDSGGPFVCEDSISRTPRWRLCGIVSWGTGCALAQKPGVYTKVSDFREWIFQAIKTHSEASGMVTQL

SEQ ID NO: 761162 - protein, 133 aa, Homo sapiens
MALMMGRQRSGETVGRRADCAQAGGHPPPLSLVGGTGSCPDGECLPVPWPRPLPTVCSWGCRLWSTTGAIFPFGTPTARRTATILPWSTSPVPCPSQVSLRAEPWGLRTRGQEDRGGDQGHKAINLWLRHPWQ

SEQ ID NO: 761163 - protein, 417 aa, Homo sapiens; identical to SEQ ID NO: 761156

SEQ ID NO: 761164 - protein, 371 aa, Homo sapiens
MTESYFMMQVSSADARLMVFDKTEGTWRLLCSSRSNARVAGLSCEEMGFLRALTHSELDVRTAGANGTSGFFCVDEGRLPHTQRLLEVISVCDCPRGRFLAAICQDCGRRKLPVDRIVGGRDTSLGRWPWQVSLRYDGAHLCGGSLLSGDWVLTAAHCFPERNRVLSRWRVFAGAVAQASPHGLQLGVQAVVYHGGYLPFRDPNSEENSNDIALVHLSSPLPLTEYIQPVCLPAAGQALVDGKICTVTGWGNTQYYGQQAGVLQEARVPIISNDVCNGADFYGNQIKPKMFCAGYPEGGIDACQGDSGGPFVCEDSISRTPRWRLCGIVSWGTGCALAQKPGVYTKVSDFREWIFQAIKTHSEASGMVTQL

SEQ ID NO: 761165 - protein, 421 aa, Homo sapiens
MAQKEGGRTVPCCSRPKVAALTAGTLLLLTAIGAASWAIVAVLLRSDQEPLYPVQVSSADARLMVFDKTEGTWRLLCSSRSNARVAGLSCEEMGFLRALTHSELDVRTAGANGTSGFFCVDEGRLPHTQRLLEVISVCDCPRGRFLAAICQDCGRRKLPVDRIVGGRDTSLGRWPWQVSLRYDGAHLCGGSLLSGDWVLTAAHCFPERNRVLSRWRVFAGAVAQASPHGLQLGVQAVVYHGGYLPFRDPNSEENSNDIALVHLSSPLPLTEYIQPVCLPAAGQALVDGKICTVTGWGNTQYYGQQAGVLQEARVPIISNDVCNGADFYGNQIKPKMFCAGYPEGGIDACQGDSGGPFVCEDSISRTPRWRLCGIVSWGTGCALAQKPGVYTKVSDFREWIFQAIKVKVGSRWEPGWGRLGV

SEQ ID NO: 761166 - protein, 112 aa, Homo sapiens
GPSMVSVAGGRTVPCCSRPKVAALTAGTLLLLTAIGAASWAIGESGSCASDLPWPLQPPACLPSPLPSLQWLFSSGVTRSRCTQVSGAGWDPLGEPWRTRVSGGSSTSVFVE

SEQ ID NO: 761167 - protein, 114 aa, Homo sapiens
KDIISVTFKPAVQRASPVRKLTGISNIWSAQVLHKEKRSLCQLKLEKIVLKSWKNKRNLKLESNIKSFSQLRKAFLCVDRSKSNSANELIIVKTLARPFHHVPGLSGFTQRTAA

SEQ ID NO: 761168 - protein, 427 aa, Homo sapiens
MHLIDYLLLLLVGLLALSHGQLHVEHDGESCSNSSHQQILETGEGSPSLKIAPANADFAFRFYYLIASETPGKNIFFSPLSISAAYAMLSLGACSHSRSQILEGLGFNLTELSESDVHRGFQHLLHTLNLPGHGLETRVGSALFLSHNLKFLAKFLNDTMAVYEAKLFHTNFYDTVGTIQLINDHVKKETRGKIVDLVSELKKDVLMVLVNYIYFKALWEKPFISSRTTPKDFYVDENTTVRVPMMLQDQEHHWYLHDRYLPCSVLRMDYKGDATVFFILPNQGKMREIEEVLTPEMLMRWNNLLRKRNFYKKLELHLPKFSISGSYVLDQILPRLGFTDLFSKWADLSGITKQQKLEASKSFHKATLDVDEAGTEAAAATSFAIKFFSAQTNRHILRFNRPFLVVIFSTSTQSVLFLGKVVDPTKP

SEQ ID NO: 761169 - protein, 101 aa, Homo sapiens
ILFPPIGLRVQRMHLIDYLLLLLVGLLALSHGQLHVEHDGESCSNSSHQQILETGEGSPSLKIAPANADFAFRFYYLIASETPGKNIFFSPLSISAAYAML

SEQ ID NO: 761170 - protein, 126 aa, Homo sapiens
SLKIAPANADFAFRFYYLIASETPGKNIFFSPLSISAAYAMLSLGACSHSRSQILEGLGFNLTELSESDVHRGFQHLLHTLNLPGHGLETRVGSALFLSHNLKFLAKFLNDTMAVYEAKLFHTNFY

SEQ ID NO: 761171 - protein, 409 aa, Homo sapiens
MHLIDYLLLLLVGLLALSHGQLHVEHDGESCSNSSHQQILETGEGSPSLKIAPANADFAFRFYYLIASETPGKNIFFSPLSISAAYAMLSLGACSHSRSQILEGLGFNLTELSESDVHRGFQHLLHTLNLPGHGLETRVGSALFLSHNLKFLAFYDTVGTIQLINDHVKKETRGKIVDLVSELKKDVLMVLVNYIYFKALWEKPFISSRTTPKDFYVDENTTVRVPMMLQDQEHHWYLHDRYLPCSVLRMDYKGDATVFFILPNQGKMREIEEVLTPEMLMRWNNLLRKRNFYKKLELHLPKFSISGSYVLDQILPRLGFTDLFSKWADLSGITKQQKLEASKSFHKATLDVDEAGTEAAAATSFAIKFFSAQTNRHILRFNRPFLVVIFSTSTQSVLFLGKVVDPTKP

SEQ ID NO: 761172 - protein, 126 aa, Homo sapiens
MFSPGLVLRGLQKASRSPSDWERLPRESGRHSCRSSKGLFIKTDLFISSRHSYTECGGWFISSWHVQWRVCLGKAWEGDTGAPRGKLPPPQPKEAFQAPSVMQSCTFPHQHKPRFLEEKREAGHGG

SEQ ID NO: 761173 - protein, 147 aa, Homo sapiens
AGAGAWAGRGPAAPSGASPGRVCGVETARPLGVQRRQSADEGPPGVAGLRHEPPTVWLGSVAHRGTWVCAHRARLSVTPGKWCLVHSSRASASSLLINVCLLGVARVPHELVLKRGMHEASSRWSVRELSGFSVETQPSAAAEAHPA

SEQ ID NO: 761174 - protein, 400 aa, Homo sapiens
AGAGAWAGRGPAAPSGASPGRVCGVETARPLGVQRRQSADEGPPGVAGLRHEPPTVWLGSVAHRGTWVCAHRWFGPAVTRAAQAATMVKLLVAKILCMVGVFFFMLLGSLLPVKIIETDFEKAHRSKKILSLCNTFGGGVFLATCFNALLPAVREKLQKVLSLGHISTDYPLAETILLLGFFMTVFLEQLILTFRKEKPSFIDLETFNAGSDVGSDSEYESPFMGGARGHALYVEPHGHGPSLSVQGLSRASPVRLLSLAFALSAHSVFEGLALGLQEEGEKVVSLFVGVAVHETLVAVALGISMARSAMPLRDAAKLAVTVSAMIPLGIGLGLGIESAQGVPGSVASVLLQGLAGGTFLFITFLEILAKELEEKSDRLLKVLFLVLGYTVLAGMVFLKW

SEQ ID NO: 761175 - protein, 388 aa, Homo sapiens
AGAGAWAGRGPAAPSGASPGRVCGVETARPLGVQRRQSADEGPPGVAGLRHEPPTVWLGSVAHRGTWVCAHRWFGPAVTRAAQAATMVKLLVAKILCMVGVFFFMLLGSLLPVKIIETDFEKAHRSKKILSLCNTFGGGVFLATCFNALLPAVREKLQKVLSLGHISTDYPLAETILLLGFFMTVFLEQLILTFRKEKPSFIDLETFNAGSDVGSDSEYESPFMGGARGHALYVEPHGHGPSLSVQGLSRASPVRLLSLAFALSAHSVFEGLALGLQEEGEKVVSLFVGVAVHETLVAVALGISMARSAMPLRDAAKLAVTVSAMIPLGIGLGLGIESAQGVPGRVPRPRVPQERALWPWATTCAQGASRDQAVPPILHPEPQSTATF

SEQ ID NO: 761176 - protein, 277 aa, Homo sapiens
AGAGAWAGRGPAAPSGASPGRVCGVETARPLGVQRRQSADEGPPGVAGLRHEPPTVWLGSVAHRGTWVCAHRWFGPAVTRAAQAATMVKLLVAKILCMVGVFFFMLLGSLLPVKIIETDFEKAHRSKKILSLCNTFGGGVFLATCFNALLPAVREKLQKVLSLGHISTDYPLAETILLLGFFMTVFLEQLILTFRKEKPSFIDLQLTRAAQAATMVKLLVAKILCMVGVFFFMLLGSLLPAGVGSSGKEAPRWVLSMDSWMASLDSLTWIRRQKGRK

SEQ ID NO: 761177 - protein, 191 aa, Homo sapiens
AGAGAWAGRGPAAPSGASPGRVCGVETARPLGVQRRQSADEGPPGVAGLRHEPPTVWLGSVAHRGTWVCAHRWFGPAVTRAAQAATMVKLLVAKILCMVGVFFFMLLGSLLPVKIIETDFEKAHRSKKILSLCNTFGGGVFLATCFNALLPAVREKVRAPWALAAALGTLWPRDSDAFSTLMPSSVKALML

SEQ ID NO: 761178 - protein, 389 aa, Homo sapiens
  misc_feature (9)..(9): Xaa can be any naturally occurring amino acid
  misc_feature (13)..(13): Xaa can be any naturally occurring amino acid
  misc_feature (23)..(23): Xaa can be any naturally occurring amino acid
  misc_feature (29)..(30): Xaa can be any naturally occurring amino acid
AVWWGRRHXCGRXWAFAAGAQIXAERMGXXPATFVAGLRHEPPTVWLGSVAHRGTWVCAHRWFGPAVTRAAQAATMVKLLVAKILCMVGVFFFMLLGSLLPVKIIETDFEKAHRSKKILSLCNTFGGGVFLATCFNALLPAVREKLQKVLSLGHISTDYPLAETILLLGFFMTVFLEQLILTFRKEKPSFIDLETFNAGSDVGSDSEYESPFMGGARGHALYVEPHGHGPSLSVQGLSRASPVRLLSLAFALSAHSVFEGLALGLQEEGEKVVSLFVGVAVHETLVAVALGISMARSAMPLRDAAKLAVTVSAMIPLGIGLGLGIESAQGVPGSVASVLLQGLAGGTFLFITFLEILAKELEEKSDRLLKVLFLVLGYTVLAGMVFLKW

SEQ ID NO: 761179 - protein, 191 aa, Homo sapiens; identical to SEQ ID NO: 761177

SEQ ID NO: 761180 - protein, 474 aa, Homo sapiens
MAQHDFVPAWLNFSTPQSAKSPTATFEKHGEHLPRGEGRFGVSRRRHNSSDGFFNNGPLRTAGDSWHQPSLFRHDSVDSGVSKGAYAGITGNPSGWHSSSRGHDGMSQRSGGGTGNHRHWNGSFHSRKGCAFQEKPPMEIREEKKEDKVEKLQFEEEDFPSLNPEAGKQHQPCRPIGTPSGVWENPPSAKQPSKMLVIKKVSKEDPAAAFSAAFTSPGSHHANGNKLSSVVPSVYKNLVPKPVPPPSKPNAWKANRMEHKSGSLSSSRESAFTSPISVTKPVVLASGAALSSPKESPSSTTPPIEISSSRLTKLTRRTTDRKSEFLKTLKDDRNGDFSENRDCDKLEDLEDNSTPEPKENGEEGCHQNGLALPVVEEGEVLSHSLEAEHRLLKAMGWQEYPENDENCLPLTEDELKEFHMKTEQLRRNGFGKNGFLQSRSSSLFSPWRSTCKAEFEDSDTETSSSETSDDDAWK

SEQ ID NO: 761181 - protein, 474 aa, Homo sapiens; identical to SEQ ID NO: 761180

SEQ ID NO: 761182 - protein, 474 aa, Homo sapiens; identical to SEQ ID NO: 761180

SEQ ID NO: 761183 - protein, 474 aa, Homo sapiens; identical to SEQ ID NO: 761180

SEQ ID NO: 761184 - protein, 474 aa, Homo sapiens; identical to SEQ ID NO: 761180

SEQ ID NO: 761185 - protein, 474 aa, Homo sapiens; identical to SEQ ID NO: 761180

SEQ ID NO: 761186 - protein, 474 aa, Homo sapiens; identical to SEQ ID NO: 761180

SEQ ID NO: 761187 - protein, 474 aa, Homo sapiens; identical to SEQ ID NO: 761180

SEQ ID NO: 761188 - protein, 280 aa, Homo sapiens [sequence omitted]

SEQ ID NO: 761189 - protein, 171 aa, Homo sapiens
MAQHDFVPAWLNFSTPQSAKSPTATFEKHGEHLPRGEGRFGVSRRRHNSSDGFFNNGPLRTAGENGLALPVVEEGEVLSHSLEAEHRLLKAMGWQEYPENDENCLPLTEDELKEFHMKTEQLRRNGFGKNGFLQSRSSSLFSPWRSTCKAEFEDSDTETSSSETSDDDAWK

SEQ ID NO: 761190 - protein, 206 aa, Homo sapiens
MAQHDFVPAWLNFSTPQSAKSPTATFEKHGEHLPRGEGRFGVSRRRHNSSDGFFNNGPLRTAGDSWHQPSLFRHDSVDSGVSKGAYAGITGNPSGWHSSSRGHDGMSQRSGGGTGNHRHWNGSFHSRKGCAFQEKPPMEIREEKKEDKVEKLQFEEEDFPSLNPEAGKQHQPCRPIGTPSGVWENPPSAKHPPDAVSFSENRARYL

SEQ ID NO: 761191 - protein, 89 aa, Homo sapiens
TGDGRAVLLVAPPPPPALPLLDLVGRAAILGRALLWLWTSRLCRVDKLGTRPQTQRLVPGHSSAAARWCLTFNSPYAGPNFACVCVDKM

SEQ ID NO: 761192 - protein, 474 aa, Homo sapiens; identical to SEQ ID NO: 761180

SEQ ID NO: 761193 - protein, 474 aa, Homo sapiens; identical to SEQ ID NO: 761180

SEQ ID NO: 761194 - protein, 474 aa, Homo sapiens; identical to SEQ ID NO: 761180

SEQ ID NO: 761195 - protein, 474 aa, Homo sapiens; identical to SEQ ID NO: 761180

SEQ ID NO: 761196 - protein, 474 aa, Homo sapiens; identical to SEQ ID NO: 761180

SEQ ID NO: 761197 - protein, 218 aa, Homo sapiens
MEHKSGSLSSSRESAFTSPISVTKPVVLASGAALSSPKESPSSTTPPIEISSSRLTKLTRRTTDRKSEFLKTLKDDRNGDFSENRDCDKLEDLEDNSTPEPKENGEEGCHQNGLALPVVEEGEVLSHSLEAEHRLLKAMGWQEYPENDENCLPLTEDELKEFHMKTEQLRRNGFGKNGFLQSRSSSLFSPWRSTCKAEFEDSDTETSSSETSDDDAWK

SEQ ID NO: 761198 - protein, 474 aa, Homo sapiens; identical to SEQ ID NO: 761180

SEQ ID NO: 761199 - protein, 441 aa, Homo sapiens
MAQHDFVPAWLNFSTPQSAKSPTATFEKHGEHLPRGEGRFGVSRRRHNSSDGFFNNGPLRTAGDSWHQPSLFRHDSVDSGVSKGAYAGITGNPSGWHSSSRGHDGMSQRSGGGTGNHRHWNGSFHSRKGCAFQEKPPMEIREEKKEDKVEKLQFEEEDFPSLNPEAGKQHQPCRPIGTPSGVWENPPSAKQPSKMLVIKKVSKEDPAAAFSAAFTSPGSHHANGNKLSSVVPSVYKNLVPKPVPPPSKPNAWKANRMEHKSGSLSSSRESAFTSPISVTKPVVLASGAALSSPKESPSSTTPPIEISSSRLTKLTRRTTDRKSEFLKTLKDDRNGDFSENRDCDKLEDLEDNSTPEPKENGEEGCHQNGLALPVVEEGEVLSHSLEAEHRLLKAMGWQEYPENDENCLPLTEDELKEFHMKTEQLRRNALERMRSRRPLLA

SEQ ID NO: 761200 - protein, 368 aa, Homo sapiens
LSACARGNRKRRLSAVPAGGGEAAVGSLGCVSPVMEPGPTAAQRRCSLPPWLPLGLLLWSGLALGALPFGSSPHRVFHDLLSEQQLLEVEDLSLSLLQGGGLGPLSLPPDLPDLDPECRELLLDFANSSAELTGCLVRSARPVRLCQTCYPLFQQVVSKMDNISRAAGNTSESQSCARSLLMADRMQIVVILSEFFNTTWQEANCANCLTNNSEELSNSTVYFLNLFNHTLTCFEHNLQGNAHSLLQTKNYSEVCKNCREAYKTLSSLYSEMQKMNELENKAEPGTHLCIDVEDAMNITRKLWSRTFNCSVPCSDTVPVIAVSVFILFLPVVFYLSSFLHSEQKKRKLILPKRLKSSTSFANIQENSN

SEQ ID NO: 761201 - protein, 368 aa, Homo sapiens; identical to SEQ ID NO: 761200

SEQ ID NO: 761202 - protein, 295 aa, Homo sapiens
LSACARGNRKRRLSAVPAGGGEAAVGSLGCVSPVMEPGPTAAQRRCSLPPWLPLGLLLWSGLALGALPFGSSPHRVFHDLLSEQQLLEVEDLSLSLLQGGGLGPLSLPPDLPDLDPECRELLLDFANSSAELTGCLVRSARPVRLCQTCYPLFQQVVSKMDNISRAAGNTSESQSCARSLLMADRMQIVVILSEFFNTTWQEANCANCLTNNSEELSNSTVYFLNLFNHTLTCFEHNLQGNAHSLLQTKNYSEVCKNCREAYKTLSSLYSEMQKMNELENKAEPGTHLCIDVEDA

SEQ ID NO: 761203 - protein, 368 aa, Homo sapiens; identical to SEQ ID NO: 761200

SEQ ID NO: 761204 - protein, 182 aa, Homo sapiens
LSACARGNRKRRLSAVPAGGGEAAVGSLGCVSPVMEPGPTAAQRRCSLPPWLPLGLLLWSGLALGALPFGSSPHRVFHDLLSEQQLLEVEDLSLSLLQGGGLGPLSLPPDLPDLDPECRELLLDFANSSAELTGCLVRSARPVRLCQTCYPLFQQVVSKMDNISRAAGNLSFLLYKVERTSA

SEQ ID NO: 761205 - protein, 368 aa, Homo sapiens; identical to SEQ ID NO: 761200

SEQ ID NO: 761206 - protein, 285 aa, Homo sapiens
MAGAGSEARFAGLSLVQLNELLEDEGQLTEMVQKMEETQNVQLNKEMTLASNRSLAEGNLLYQPQLDTLKARLTQKYQELQVLFEAYQIKKTKLDRQSSSASLETLLALLQAEGAKIEEDTENMAEKFLDGELPLDSFIDVYQSKRKLAHMRRVKIEKLQEMVLKGQRLPQALAPLPPRLPELAPTAPLPYPAPEASGPPAVAPRRIPPPPPPVPAGRLATPFTAAMSSGQAVPYPGLQCPPLPPRVGLPTQQGFSSQFVSPYPPPLPQRPPPRLPPHQPGFILQ

SEQ ID NO: 761207 - protein, 285 aa, Homo sapiens; identical to SEQ ID NO: 761206

SEQ ID NO: 761208 - protein, 285 aa, Homo sapiens; identical to SEQ ID NO: 761206

SEQ ID NO: 761209 - protein, 285 aa, Homo sapiens; identical to SEQ ID NO: 761206

SEQ ID NO: 761210 - protein, 312 aa, Homo sapiens
LGWVRGWVFNSAEGGRSGGGDDGRDVGMAGAGSEARFAGLSLVQLNELLEDEGQLTEMVQKMEETQNVQLNKEMTLASNRSLAEGNLLYQPQLDTLKARLTQKYQELQVLFEAYQIKKTKLDRQSSSASLETLLALLQAEGAKIEEDTENMAEKFLDGELPLDSFIDVYQSKRKLAHMRRVKIEKLQEMVLKGQRLPQALAPLPPRLPELAPTAPLPYPAPEASGPPAVAPRRIPPPPPPVPAGRLATPFTAAMSSGQAVPYPGLQCPPLPPRVGLPTQQGFSSQFVSPYPPPLPQRPPPRLPPHQPGFILQ

SEQ ID NO: 761211 - protein, 245 aa, Homo sapiens
MAGAGSEARFAGLSLVQLNELLEDEGQLTEMVQKMEETQNVQLNKEMTLASNRSLAEGNLLYQPQLDTLKARLTQKYQELQVLFEAYQIKKTKLDRQSSSASLETLLALLQAEGAKIEEDTENMAEKFLDGELPLDSFIDVYQSKRKLAHMRRVKIEKLQEMVLKGQRLPPPPVPAGRLATPFTAAMSSGQAVPYPGLQCPPLPPRVGLPTQQGFSSQFVSPYPPPLPQRPPPRLPPHQPGFILQ

SEQ ID NO: 761212 - protein, 285 aa, Homo sapiens; identical to SEQ ID NO: 761206

SEQ ID NO: 761213 - protein, 285 aa, Homo sapiens; identical to SEQ ID NO: 761206

SEQ ID NO: 761214 - protein, 290 aa, Homo sapiens
RETFILTARSSGGEVVMAAPEAEVLSSAAVPDLEWYEKSEETHASQIELLETSSTQEPLNASEAFCPRDCMVPVVFPGPVSQEGCCQFTCELLKHIMYQRQQLPLPYEQLKHFYRKPSPQAEEMLKKKPRATTEVSSRKCQQALAELESVLSHLEDFFARTLVPRVLILLGGNALSPKEFYELDLSLLAPYSVDQSLSTAACLRRLFRAIFMADAFSELQAPPLMGTVVMAQGHRNCGEDWFRPKLNYRVPSRGHKLTVTLSCGRPSIRTTAWEDYIWFQAPVTFKGFRE

SEQ ID NO: 761215 - protein, 306 aa, Homo sapiens
MARVPLGRSLTLSPRLEHNGMTSAHHNFRLPGSRDSPASASQVAEIIDLEWYEKSEETHASQIELLETSSTQEPLNASEAFCPRDCMVPVVFPGPVSQEGCCQFTCELLKHIMYQRQQLPLPYEQLKHFYRKPSPQAEEMLKKKPRATTEVSSRKCQQALAELESVLSHLEDFFARTLVPRVLILLGGNALSPKEFYELDLSLLAPYSVDQSLSTAACLRRLFRAIFMADAFSELQAPPLMGTVVMAQGHRNCGEDWFRPKLNYRVPSRGHKLTVTLSCGRPSIRTTAWEDYIWFQAPVTFKGFRE

SEQ ID NO: 761216 - protein, 355 aa, Homo sapiens
MDFIFHEKQEGFLCAQHCLNNLLQGEYFSPVELASIAHQLDEEERMRMAEGGVTSEEYLAFLQQPSENMDDTGFFSIQVISNALKFWGLEIIHFNNPEYQKLGIDPINERSFICNYKQHWFTIRKFGKHWFNLNSLLAGPELISDTCLANFLARLQQQAYSVFVVKGDLPDCEADQLLQIISVEEMDTPKLNGKKLVKQKEHRVYKTVLEKVSEESDESGTSDQDEEDFQRALELSRQETNREDEHLRSTIELSMQGSSGNTSQDLPKTSCVTPASEQPKKIKEDYFEKHQQEQKQQQQQSDLPGHSSYLHERPTTSSRAIESDLSDDISEGTVQAAVDTILEIMRKNLKIKGEK

SEQ ID NO: 761217 - protein, 342 aa, Homo sapiens
SSSVIAEMKEQMEKVEADLTRSKSLREKQSKEFLWQLEDIRQRYEQQIVELKLEHEQEKTHLLQQHNAEKDSLVRDHEREIENLEKQLRAANMEHENQIQEFKKRDAQVIADMEAQVHKLREELINVNSQRKQQLVELGLLREEEKQRATREHEIVVNKLKAESEKMKIELKKTHAAETEMTLEKANSKLKQIEKEYTQKLAKSSQIIAELQTTISSLKEENSQQQLAAERRLQDVRQKFEDEKKQLIRDNDQAIKVLQDELENRSNQVRCAEKKLQHKELESQEQITYIRQEYETKLKGLMPASLRQELEDTISSLKSQVNFLQKRASILQEELTTYQGRR

SEQ ID NO: 761218 - protein, 211 aa, Homo sapiens
MWASLSLDHPSAKENQALRLIEMREENGNVPKTEQAGSLKPLRDTGKSNLKEKKANSKLKQIEKEYTQKLAKSSQIIAELQTTISSLKEENSQQQLAAERRLQDVRQKFEDEKKQLIRDNDQAIKVLQDELENRSNQVRCAEKKLQHKELESQEQITYIRQEYETKLKGLMPASLRQELEDTISSLKSQVNFLQKRASILQEELTTYQGRR

SEQ ID NO: 761219 - protein, 170 aa, Homo sapiens
DSSEILRRQDTGKANSKLKQIEKEYTQKLAKSSQIIAELQTTISSLKEENSQQQLAAERRLQDVRQKFEDEKKQLIRDNDQAIKVLQDELENRSNQVRCAEKKLQHKELESQEQITYIRQEYETKLKGLMPASLRQELEDTISSLKSQVNFLQKRASILQEELTTYQGRR

SEQ ID NO: 761220 - protein, 342 aa, Homo sapiens; identical to SEQ ID NO: 761217

SEQ ID NO: 761221 - protein, 180 aa, Homo sapiens
GLIGLTWSKSLTQGFATGRGNLCPGQDWIMEVGSEEEKWEKLDAEFDHFVVDMKPFVLKLPHRTERQRCALWIRKLCEPSGTGAGIMGRKNRNLYAKLLLHMLKRGALEGPFTHRPEPGTLKILPSYMSIYFDEPNPARAKGSSPEGLPAWVLGELETSEHKLNESWKLSSGEDNTLVQS

SEQ ID NO: 761222 - protein, 72 aa, Homo sapiens
GLIGLTWSKSLTQGFATGRGNLCPGQDWIMEVGSEEEKWEKLDAEFDHFVVDMKPFVLKLPHRTDNLHTTRI

SEQ ID NO: 761223 - protein, 369 aa, Homo sapiens
SGSMATENAVFFYKVFVKMIFEFLLYCERRMEWGLAFSMEKVEADLTRSKSLREKQSKEFLWQLEDIRQRYEQQIVELKLEHEQEKTHLLQQHNAEKDSLVRDHEREIENLEKQLRAANMEHENQIQEFKKRDAQVIADMEAQVHKLREELINVNSQRKQQLVELGLLREEEKQRATREHEIVVNKLKAESEKMKIELKKTHAAETEMTLEKANSKLKQIEKEYTQKLAKSSQIIAELQTTISSLKEENSQQQLAAERRLQDVRQKFEDEKKQLIRDNDQAIKVLQDELENRSNQVRCAEKKLQHKELESQEQITYIRQEYETKLKGLMPASLRQELEDTISSLKSQVNFLQKRASILQEELTTYQGRR

SEQ ID NO: 761224 - protein, 153 aa, Homo sapiens
SGSMATENAVFFYKVFVKMIFEFLLYCERRMEWGLAFSMEKVEADLTRSKSLREKQSKEFLWQLEDIRQRYEQQVLEKCFEVLNGKITTGDSACFQPCFIYQLANHSCVSSLLLSLYHELRELQQAVVLAVDGWLERKRNKEAVYAGRPWYHL

SEQ ID NO: 761225 - protein, 146 aa, Homo sapiens
SWLEGAGQSRGEGDPTGSMDGAYRPRHKPGSAQGQVWAVWRQRLESSVLHEAPLFAVLAGRPGSMFCGSAWLQRLPGSESLKPRAEPGLSALVRERGYGPHHHLGQWMGHSEAGLAHTVLVGSLTPTLFPPPPRACFFKSNRFTEM

SEQ ID NO: 761226 - protein, 243 aa, Homo sapiens
MPMTLGYWDIRGLAHAIRLLLEYTDSSYVEKKYTLGDAPDYDRSQWLNEKFKLGLDFPNLPYLIDGAHKITQSNAILRYIARKHNLCGETEEEKIRVDILENQVMDNHMELVRLCYDPDFEKLKPKYLEELPEKLKLYSEFLGKRPWFAGDKITFVDFLAYDVLDMKRIFEPKCLDAFLNLKDFISRFEVMPPSSFLFDAPCSFLSFQMLSQSWSYTKNNSYVLSTGFMPGIMPSTLYLSCRI

SEQ ID NO: 761227 - protein, 218 aa, Homo sapiens
MPMTLGYWDIRGLAHAIRLLLEYTDSSYVEKKYTLGDAPDYDRSQWLNEKFKLGLDFPNLPYLIDGAHKITQSNAILRYIARKHNLCGETEEEKIRVDILENQVMDNHMELVRLCYDPDFEKLKPKYLEELPEKLKLYSEFLGKRPWFAGDKITFVDFLAYDVLDMKRIFEPKCLDAFLNLKDFISRFEGLKKISAYMKSSQFLRGLLFGKSATWNSK

SEQ ID NO: 761228 - protein, 218 aa, Homo sapiens; identical to SEQ ID NO: 761227

SEQ ID NO: 761229 - protein, 859 aa, Homo sapiens
MRELTCTSQPPIIPSIEEPVVSCDGWGATVAPEASGKGRNPPVALGPRGNSLLDAVPWHPQTPYVVISGPQVSQVASHTPPPMPSGKWRSCGNRPRSVADISRGTQAPRSLVGETRPHRGSTHPDSLAPRRYPNAFLIKASSLLRPGPATRSKTTDPSAPVLPSWAHGHPDIPEQARSSCICCLLCSPGWQTLLLLREALARGPLPTFSGAGPHPDGKLFCLALLPHCTERTRCGGRGGHRHSQPHLAQGRCMSTCQMTDGHFDLGLDVAGAPSQMWPQSQAWGLCGSGLPGRPQEDMGSWSSGLAERPDVLPMQAASVPWLPTHQRPAHAHQGLAWPDVQYGFGRGHPALARPMDCHSPPHPTSRTRSSSATPGGWFRKAGFSKLHTRGCTELKSGESQGSQGGPLPHTLRQTRRRHPRHPAASASAPAEGGAGVGCREYGPQAAAMGLPELSGFQQTRRPLRPAWTGCVPRIHMLKPSLQCDGVGEGAFGGDWVRRVEPSEEDQHPQGKRHGRWVPFSASCHVGTWEGIVCKPGSRPSQNRVCPLLDLDLWLPELLRNKFLLFEGTKSKLLCCSCPSETEPHATQTSGESQPPPHGRVGMGARQREPYSERASGGGQEGAQVSQFPGLDTPLFPGLTQEGAQVSPVPGSDTPLFPGLSREGAQVSPVPGSDTPLFPGLAREVAQVSPVPGSDTPLFPGLAREVAQVSPVPGSDTPLFPGLVREVAQVSPVPGSDTPLFPGFSQILPLVEFEESMMCPSLRLGRAGPILETSLLLNHTSWHPTYRDEIHLGQLLSPRGFVPKGASRESGDSFGRHSRGADGMASSGWRPGGWGGTKHPAGHRAAPTEHSVIQPQCQSC

SEQ ID NO: 761230 - protein, 771 aa, Homo sapiens [sequence omitted]

SEQ ID NO: 761231 - protein, 510 aa, Homo sapiens
FHPLPSTPLFRHLLTSVMTCGFNSIGCGFRPGNFSCVSACGPRPSRCCITAAPYRGISCYRGLTGGFGSHSVCGGFRAGSCGRSFGYRSGGVCGPSPPCITTVSVNESLLTPLNLEIDPNAQCVKQEEKEQIKSLNSRFAAFIDKVRFLEQQNKLLETKLQFYQNCECCQSNLEPLFAGYIETLRREAECVEADSGRLASELNHVQEVLEGYKKKYEEEVALRATAENEFVALKKDVDCAYLRKSDLEANVEALIQEIDFLRRLYEEEIRILQSHISDTSVVVKLDNSRDLNMDCIVAEIKAQYDDIATRSRAEAESWYRSKCEEMKATVIRHGETLRRTKEEINELNRMIQRLTAEVENAKCQNSKLEAAVAQSEQQGEAALSDARCKLAELEGALQKAKQDMACLIREYQEVMNSKLGLDIEIATYRRLLEGEEQRLCEGVEAVNVCVSSSRGGVVCGDLCVSGSRPVTGSVCSAPCNGNLVVSTGLCKPCGQLNTTCGGGSCGQGRY

SEQ ID NO: 761232 - protein, 711 aa, Homo sapiens
MAERESGGLGGGAASPPAASPFLGLHIASPPNFRLTHDISLEEFEDEDLSEITDECGISLQCKDTLSLRPPRAGLLSAGGGGAGSRLQAEMLQMDLIDATGDTPGAEDDEEDDDEERAARRPGAGPPKAESGQEPASRGQGQSQGQSQGPGSGDTYRPKRPTTLNLFPQVPRSQDTLNNNSLGKKHSWQDRVSRSSSPLKTGEQTPPHEHICLSDELPPQSGPAPTTDRGTSTDSPCRRSTATQMAPPGGPPAAPPGGRGHSHRDRIHYQADVRLEATEEIYLTPVQRPPDAAEPTSAFLPPTESRMSVSSDPDPAAYPSTAGRPHPSISEEEEGFDCLSSPERAEPPGGGWRGSLGEPPPPPRASLSSDTSALSYDSVKYTLVVDEHAQLELVSLRPCFGDYSDESDSATVYDNCASVSSPYESAIGEEYEEAPRPQPPACLSEDSTPDEPDVHFSKKFLNVFMSGRSRSSSAESFGLFSCIINGEEQEQTHRAIFRFVPRHEDELELEVDDPLLVELQAEDYWYEAYNMRTGARGVFPAYYAIEVTKEPEHMAALAKNSDWVDQFRVKFLGSVQVPYHKGNDVLCAAMQKIATTRRLTVHFNPPSSCVLEISVRGVKIGVKADDSQEAKGNKCSHFFQLKNISFCGYHPKNNKYFGFITKHPADHRFACHVFVSEDSTKALAESVGRAFQQFYKQFVEYTCPTEDIYLE

SEQ ID NO: 761233 - protein, 711 aa, Homo sapiens; identical to SEQ ID NO: 761232

SEQ ID NO: 761234 - protein, 701 aa, Homo sapiens
MQLVLKMDSSPDNDSWLEDQWERWLTHDISLEEFEDEDLSEITDECGISLQCKDTLSLRPPRAGLLSAGGGGAGSRLQAEMLQMDLIDATGDTPGAEDDEEDDDEERAARRPGAGPPKAESGQEPASRGQGQSQGQSQGPGSGDTYRPKRPTTLNLFPQVPRSQDTLNNNSLGKKHSWQDRVSRSSSPLKTGEQTPPHEHICLSDELPPQSGPAPTTDRGTSTDSPCRRSTATQMAPPGGPPAAPPGGRGHSHRDRIHYQADVRLEATEEIYLTPVQRPPDAAEPTSAFLPPTESRMSVSSDPDPAAYPSTAGRPHPSISEEEEGFDCLSSPERAEPPGGGWRGSLGEPPPPPRASLSSDTSALSYDSVKYTLVVDEHAQLELVSLRPCFGDYSDESDSATVYDNCASVSSPYESAIGEEYEEAPRPQPPACLSEDSTPDEPDVHFSKKFLNVFMSGRSRSSSAESFGLFSCIINGEEQEQTHRAIFRFVPRHEDELELEVDDPLLVELQAEDYWYEAYNMRTGARGVFPAYYAIEVTKEPEHMAALAKNSDWVDQFRVKFLGSVQVPYHKGNDVLCAAMQKIATTRRLTVHFNPPSSCVLEISVRGVKIGVKADDSQEAKGNKCSHFFQLKNISFCGYHPKNNKYFGFITKHPADHRFACHVFVSEDSTKALAESVGRAFQQFYKQFVEYTCPTEDIYLE

SEQ ID NO: 761235 - protein, 470 aa, Homo sapiens
AADEPDVHFSKKFLNPTSIFSKKFRIHYQADVRLEATEEIYLTPVQRPPDAAEPTSAFLPPTESRMSVSSDPDPAAYPSTAGRPHPSISEEEEGFDCLSSPERAEPPGGGWRGSLGEPPPPPRASLSSDTSALSYDSVKYTLVVDEHAQLELVSLRPCFGDYSDESDSATVYDNCASVSSPYESAIGEEYEEAPRPQPPACLSEDSTPDEPDVHFSKKFLNVFMSGRSRSSSAESFGLFSCIINGEEQEQTHRAIFRFVPRHEDELELEVDDPLLVELQAEDYWYEAYNMRTGARGVFPAYYAIEVTKEPEHMAALAKNSDWVDQFRVKFLGSVQVPYHKGNDVLCAAMQKIATTRRLTVHFNPPSSCVLEISVRGVKIGVKADDSQEAKGNKCSHFFQLKNISFCGYHPKNNKYFGFITKHPADHRFACHVFVSEDSTKALAESVGRAFQQFYKQFVEYTCPTEDIYLE

SEQ ID NO: 761236 - protein, 259 aa, Homo sapiens
PGGEFGTRGQGSGAMGRGKSSAESFGLFSCIINGEEQEQTHRAIFRFVPRHEDELELEVDDPLLVELQAEDYWYEAYNMRTGARGVFPAYYAIEVTKEPEHMAALAKNSDWVDQFRVKFLGSVQVPYHKGNDVLCAAMQKIATTRRLTVHFNPPSSCVLEISVRGVKIGVKADDSQEAKGNKCSHFFQLKNISFCGYHPKNNKYFGFITKHPADHRFACHVFVSEDSTKALAESVGRAFQQFYKQFVEYTCPTEDIYLE

SEQ ID NO: 761237 - protein, 37 aa, Homo sapiens
CSAPSCSFCPSSIHACFPALAKNSDWVDQFRVKFLGS

SEQ ID NO: 761238 - protein, 711 aa, Homo sapiens; identical to SEQ ID NO: 761232

SEQ ID NO: 761239 - protein, 711 aa, Homo sapiens; identical to SEQ ID NO: 761232

SEQ ID NO: 761240 - protein, 552 aa, Homo sapiens
TVDHFHHKSLLFPAQDTLNNNSLGKKHSWQDRVSRSSSPLKTGEQTPPHEHICLSDELPPQSGPAPTTDRGTSTDSPCRRSTATQMAPPGGPPAAPPGGRGHSHRDRIHYQADVRLEATEEIYLTPVQRPPDAAEPTSAFLPPTESRMSVSSDPDPAAYPSTAGRPHPSISEEEEGFDCLSSPERAEPPGGGWRGSLGEPPPPPRASLSSDTSALSYDSVKYTLVVDEHAQLELVSLRPCFGDYSDESDSATVYDNCASVSSPYESAIGEEYEEAPRPQPPACLSEDSTPDEPDVHFSKKFLNVFMSGRSRSSSAESFGLFSCIINGEEQEQTHRAIFRFVPRHEDELELEVDDPLLVELQAEDYWYEAYNMRTGARGVFPAYYAIEVTKEPEHMAALAKNSDWVDQFRVKFLGSVQVPYHKGNDVLCAAMQKIATTRRLTVHFNPPSSCVLEISVRGVKIGVKADDSQEAKGNKCSHFFQLKNISFCGYHPKNNKYFGFITKHPADHRFACHVFVSEDSTKALAESVGRAFQQFYKQFVEYTCPTEDIYLE

SEQ ID NO: 761241 - protein, 303 aa, Homo sapiens
MMVAEIGWEWQLWEPPCGRGLVPYKAPRPQPPACLSEDSTPDEPDVHFSKKFLNVFMSGRSRSSSAESFGLFSCIINGEEQEQTHRAIFRFVPRHEDELELEVDDPLLVELQAEDYWYEAYNMRTGARGVFPAYYAIEVTKEPEHMAALAKNSDWVDQFRVKFLGSVQVPYHKGNDVLCAAMQKIATTRRLTVHFNPPSSCVLEISVRGVKIGVKADDSQEAKGNKCSHFFQLKNISFCGYHPKNNKYFGFITKHPADHRFACHVFVSEDSTKALAESVGRAFQQFYKQFVEYTCPTEDIYLE

SEQ ID NO: 761242 - protein, 81 aa, Homo sapiens
MLLQMFTEITMLLWLPDPRVGLAGQALVPNFSPVLAGDRFVPRHEDELELEVDDPLLVELQAEDYWYEAYNMRTGARGVFP

SEQ ID NO: 761243 - protein, 159 aa, Homo sapiens
LSPHWEEEEEEGEAAGENIGEKSESREEKLGDSLQDLYRALEQASLSPLGEHRISTKMEYKLSFIKRCNDPVMNEKLHRLRILKSTLKAREGEVAIIDKVLDNPDLTSKEFQQWKQMYLDLFLDICQNTTSNDPLSISSEVDVITSSLAHTHSYIETHV

SEQ ID NO: 761244 - protein, 159 aa, Homo sapiens; identical to SEQ ID NO: 761243

SEQ ID NO: 761245 - protein, 95 aa, Homo sapiens
LSPHWEEEEEEGEAAGENIGEKSESREEKLGDSLQDLYRALEQASLSPLGEHRISTKMEYKLSFIKRCNDPVMNEKLHRLRILKSTLKVRQEMEG

SEQ ID NO: 761246 - protein, 159 aa, Homo sapiens; identical to SEQ ID NO: 761243

SEQ ID NO: 761247 - protein, 207 aa, Homo sapiens
KVQCYPSSTSPAASSGFPMALPFALMMALVVLSCKSSCSLGCNLSQTHSLNNRRTLMLMAQMRRISPFSCLKDRHDFEFPQEEFDGNQFQKAQAISVLHEMMQQTFNLFSTKNSSAAWDETLLEKFYIELFQQMNDLEACVIQEVGVEETPLMNEDSILAVKKYFQRITLYLMEKKYSPCAWEVVRAEIMRSFSFSTNLQKRLRRKD

SEQ ID NO: 761248 - protein, 272 aa, Homo sapiens
GSGPGPAPTLGLHSGMEACVSSLLVLALGALSVGSSFGTQIIGGREVIPHSRPYMASLQRNGSHLCGGVLVHPKWVLTAAHCLAQRMAQLRLVLGLHTLDSPGLTFHIKAAIQHPRYKPVPALENDLALLQLDGKVKPSRTIRPLALPSKRQVVAAGTRCSMAGWGLTHQGGRLSRVLRELDLQVLDTRMCNNSRFWNGSLSPSMVCLAADSKDQAPCKGDSGGPLVCGKGRVLAGVLSFSSRVCTDIFKPPVATAVAPYVSWIRKVTGRSA

SEQ ID NO: 761249 - protein, 187 aa, Homo sapiens
MNIFDRKINFDALLKFSHITPSTQQHLKKVYASFALCMFVAAAGAYVHMVTHFIQAGLLSALGSLILMIWLMATPHSHETEQKRLGLLAGFAFLTGVGLGPALEFCIAVNPSILPTAFMGTAMIFTCFTLSALYARRRSYLFLGGILMSALSLLLLSSLGNVFFGIHLAFPGKPVCGTGGHVWLRPF

SEQ ID NO: 761250 - protein, 217 aa, Homo sapiens
IRLGTRPGGALVGLERRVRKSGDCCTDSGTMNIFDRKINFDALLKFSHITPSTQQHLKKVYASFALCMFVAAAGAYVHMVTHFIQAGLLSALGSLILMIWLMATPHSHETEQKRLGLLAGFAFLTGVGLGPALEFCIAVNPSILPTAFMGTAMIFTCFTLSALYARRRSYLFLGGILMSALSLLLLSSLGNVFFGIHLAFPGKPVCGTGGHVWLRPF

SEQ ID NO: 761251 - protein, 187 aa, Homo sapiens; identical to SEQ ID NO: 761249

SEQ ID NO: 761252 - protein, 187 aa, Homo sapiens; identical to SEQ ID NO: 761249

SEQ ID NO: 761253 - protein, 187 aa, Homo sapiens; identical to SEQ ID NO: 761249

SEQ ID NO: 761254 - protein, 187 aa, Homo sapiens; identical to SEQ ID NO: 761249

SEQ ID NO: 761255 - protein, 240 aa, Homo sapiens
VTREAPQLLSQRQRREVRGVWGWGCLPGPRGGPALFGLVTFGQSGDCCTDSGTMNIFDRKINFDALLKFSHITPSTQQHLKKVYASFALCMFVAAAGAYVHMVTHFIQAGLLSALGSLILMIWLMATPHSHETEQKRLGLLAGFAFLTGVGLGPALEFCIAVNPSILPTAFMGTAMIFTCFTLSALYARRRSYLFLGGILMSALSLLLLSSLGNVFFGIHLAFPGKPVCGTGGHVWLRPF

SEQ ID NO: 761256 - protein, 187 aa, Homo sapiens; identical to SEQ ID NO: 761249

SEQ ID NO: 761257 - protein, 187 aa, Homo sapiens; identical to SEQ ID NO: 761249

SEQ ID NO: 761258 - protein, 209 aa, Homo sapiens
CGCSRGSQAEWKSGDCCTDSGTMNIFDRKINFDALLKFSHITPSTQQHLKKVYASFALCMFVAAAGAYVHMVTHFIQAGLLSALGSLILMIWLMATPHSHETEQKRLGLLAGFAFLTGVGLGPALEFCIAVNPSILPTAFMGTAMIFTCFTLSALYARRRSYLFLGGILMSALSLLLLSSLGNVFFGIHLAFPGKPVCGTGGHVWLRPF

SEQ ID NO: 761259 - protein, 200 aa, Homo sapiens
LTQVLIRVAGLWVMNIFDRKINFDALLKFSHITPSTQQHLKKVYASFALCMFVAAAGAYVHMVTHFIQAGLLSALGSLILMIWLMATPHSHETEQKRLGLLAGFAFLTGVGLGPALEFCIAVNPSILPTAFMGTAMIFTCFTLSALYARRRSYLFLGGILMSALSLLLLSSLGNVFFGIHLAFPGKPVCGTGGHVWLRPF

SEQ ID NO: 761260 - protein, 174 aa, Homo sapiens
MNIFDRKINFDALLKFSHITPSTQQHLKKVYASFALCMFVAAAGAYVHMVTHFIQAGLLSALGSLILMIWLMATPHSHETEQKRLGLLAGFAFLTGVGLGPALEFCIAVNPSILPTAFMGTAMIFTCFTLSALYARRRSYLFLGGILMSALSLLLLSSLGNVFFGIHLAFPGKT

SEQ ID NO: 761261 - protein, 187 aa, Homo sapiens; identical to SEQ ID NO: 761249

SEQ ID NO: 761262 - protein, 124 aa, Homo sapiens
MNIFDRKINFDALLKFSHITPSTQQHLKKVYASFALCMFVAAAGAYVHMVTHFIQAGLLSALGSLILMIWLMATPHSHETEQKRLGLLAGFAFLTVLFAHITGGVFCDNEKHQKSFCTLWFPLF

SEQ ID NO: 761263 - protein, 119 aa, Homo sapiens
MRSGTSQRAPTSGVRFPTRLHSPSGPELFGRATRPFLPHCCLVCAQFLWDWAVSFPLERSSVVPLLTQPQISTVRPYKENGEPLLVDALLPLSCPCWSGKHTFLLCLHKSNVFPFPPLA

SEQ ID NO: 761264 - protein, 209 aa, Homo sapiens; identical to SEQ ID NO: 761258

SEQ ID NO: 761265 - protein, 174 aa, Homo sapiens
  misc_feature (167)..(167): Xaa can be any naturally occurring amino acid
VTREAPQLLSQRQRREVRGVWGWGCLPGPRGGPALFGLVTFGQSGDCCTDSGTMNIFDRKINFDALLKFSHITPSTQQHLKKVYASFALCMFVAAAGAYVHMVTHFIQAGLLSALGSLILMIWLMATPHSHETEQKRLGLLAGFAFLTARGGWPPGGLFSEPRPSPXSGTEIFY

SEQ ID NO: 761266 - protein, 187 aa, Homo sapiens; identical to SEQ ID NO: 761249

SEQ ID NO: 761267 - protein, 187 aa, Homo sapiens; identical to SEQ ID NO: 761249

SEQ ID NO: 761268 - protein, 187 aa, Homo sapiens; identical to SEQ ID NO: 761249

SEQ ID NO: 761269 - protein, 187 aa, Homo sapiens; identical to SEQ ID NO: 761249

SEQ ID NO: 761270 - protein, 217 aa, Homo sapiens; identical to SEQ ID NO: 761250

SEQ ID NO: 761271 - protein, 187 aa, Homo sapiens; identical to SEQ ID NO: 761249

SEQ ID NO: 761272 - protein, 177 aa, Homo sapiens
IRLGTRPGGTPSTQQHLKKVYASFALCMFVAAAGAYVHMVTHFIQAGLLSALGSLILMIWLMATPHSHETEQKRLGLLAGFAFLTGVGLGPALEFCIAVNPSILPTAFMGTAMIFTCFTLSALYARRRSYLFLGGILMSALSLLLLSSLGNVFFGIHLAFPGKPVCGTGGHVWLRPF

SEQ ID NO: 761273 - protein, 131 aa, Homo sapiens
MNIFDRKINFDALLKFSHITPSTQQHLKKVYASFALCMFVAAAGAYVHMVTHFIQAGLLSALGSLILMIWLMATPHSHETEQKRLGLLAGFAFLTGVGLGPALEFCIAVNPSSPSVHSMPGAVATSFWEVS

SEQ ID NO: 761274 - protein, 109 aa, Homo sapiens
MNIFDRKINFDALLKFSHITPSTQQHLKKVYASFALCMFVAAAGAYVHMVTHFIQAGLLSALGSLILMIWLMATPHSHETEQELAWALPWSFVLLSTPASFPLLSWARQ

SEQ ID NO: 761275 - protein, 150 aa, Homo sapiens
MGPPCCRHRYFLPAPDGSLGLCFGAGQAGVTALRPSSLPPAPPALPEPPPLSFLPLEFLRTGLCPKWSPHAVLRETWALGKQVLGTKVDAERDGVKVPTTLAEYCVKTKAPAPDEGSDLFYDDYYEDGEVEEEADSCFGDDEDDSGTEES

SEQ ID NO: 761276 - protein, 87 aa, Homo sapiens
GARSVYFEKIRALGVPGRRRRRRGGGRRRPRWLPPGPPVPSGGELSPTSTGVPQLPDWPHPGGATGALLGTWAGGRFLTLPAWEAQV

SEQ ID NO: 761277 - protein, 163 aa, Homo sapiens
VGVLTKECGTTNSDETGDVCISILHPPVDDPQSGELPSERWNPTQNVRTILLSVISLLNEPNTFSPANVDASVMYRKWKESKGKDREYTDIIRKQVLGTKVDAERDGVKVPTTLAEYCVKTKAPAPDEGSDLFYDDYYEDGEVEEEADSCFGDDEDDSGTEES

SEQ ID NO: 761278 - protein, 136 aa, Homo sapiens
REEPEGWGAPGRPTPTHSPHRTILLSVISLLNEPNTFSPANVDASVMYRKWKESKGKDREYTDIIRKQVLGTKVDAERDGVKVPTTLAEYCVKTKAPAPDEGSDLFYDDYYEDGEVEEEADSCFGDDEDDSGTEES

SEQ ID NO: 761279 - protein, 158 aa, Homo sapiens
GGARGPGQGKRRWGGGARAAGALGVPGRRRRRRGGGRRRPRWLPPGRCAARPVSRTRGGRAAPRCSDPGPLRRRHGSAASAQLAEGAAAGAQGAAGRAGRGIPRDTGGRGRSIQLGGGHLRAPQHLLRGRLLQGAPQVPHRLPILSTSLSVPDQDVAP

SEQ ID NO: 761280 - protein, 310 aa, Homo sapiens
AGRAGPAKASAGGAAAPELLERSGSPGGGGGAEEEAGGGPGGSPPDGARPGPSRELAVVARPRAAPTPGPSAAAMARPLVPSSQKALLLELKGLQEEPVEGFRVTLVDEGDLYNWEVAIFGPPNTYYEGGYFKARLKFPIDYPYSPPAFRFLTKMWHPNIYETGDVCISILHPPVDDPQSGELPSERWNPTQNVRTILLSVISLLNEPNTFSPANVDASVMYRKWKESKGKDREYTDIIRKQVLGTKVDAERDGVKVPTTLAEYCVKTKAPAPDEGSDLFYDDYYEDGEVEEEADSCFGDDEDDSGTEES

SEQ ID NO: 761281 - protein, 295 aa, Homo sapiens
AGRAGPAKASAGGAAAPELLERSGSPGGGGGAEEEAGGGPGGSPPDGARPGPSRELAVVARPRAAPTPGPSAAAMARPLVPSSQKALLLELKGLQEEPVEGFRVTLVDEGDLYNWEVAIFGPPNTYYEGGYFKARLKFPIDYPYSPPAFRFLTKMWHPNIYETGDVCISILHPPVDDPQSGELPSERWNPTQNVRTILLSVISLLNEPNTFSPANVDASVMYRKWKESKGKDREYTDIIRTQEHPGHLPSCTRWYLVSWGHLGAASWCWAVSASLARFFPATSLRHHLLEIPAQK

SEQ ID NO: 761282 - protein, 250 aa, Homo sapiens
AGRAGPAKASAGGAAAPELLERSGSPGGGGGAEEEAGGGPGGSPPDGARPGPSRELAVVARPRAAPTPGPSAAAMARPLVPSSQKALLLELKGLQEEPVEGFRVTLVDEGDLYNWEVAIFGPPNTYYEGGYFKARLKFPIDYPYSPPAFRFLTKMWHPNIYETGDVCISILHPPVDDPQSGELPSERWNPTQNVRTILLSVISLLNEPNTFSPANVDASVMYRKWKETGALLGTWAGGRFLTLPAWEAQV

SEQ ID NO: 761283 - protein, 237 aa, Homo sapiens
AGRAGPAKASAGGAAAPELLERSGSPGGGGGAEEEAGGGPGGSPPDGARPGPSRELAVVARPRAAPTPGPSAAAMARPLVPSSQKALLLELKGLQEEPVEGFRVTLVDEGDLYNWEVAIFGPPNTYYEGGYFKARLKFPIDYPYSPPAFRFLTKMWHPNIYETGDVCISILHPPVDAERDGVKVPTTLAEYCVKTKAPAPDEGSDLFYDDYYEDGEVEEEADSCFGDDEDDSGTEES

SEQ ID NO: 761284 - protein, 310 aa, Homo sapiens; identical to SEQ ID NO: 761280

SEQ ID NO: 761285 - protein, 310 aa, Homo sapiens; identical to SEQ ID NO: 761280

SEQ ID NO: 761286 - protein, 178 aa, Homo sapiens
MGPPCCRHRYFLPAPDGSLGLCFGAGQAGVTALRPSSLHPHLLPSRAPSSVISPPGVPHAQGFVLSGRTRRFKRNLSVGVSVGPGGGGPGRGRVQARGWRPHPPCPPRKQVLGTKVDAERDGVKVPTTLAEYCVKTKAPAPDEGSDLFYDDYYEDGEVEEEADSCFGDDEDDSGTEES

SEQ ID NO: 761287 - protein, 310 aa, Homo sapiens; identical to SEQ ID NO: 761280

SEQ ID NO: 761288 - protein, 343 aa, Homo sapiens
AGRAGPAKASAGGAAAPELLERSGSPGGGGGAEEEAGGGPGGSPPDGARPGPSRELAVVARPRAAPTPGPSAAAMARPLVPSSQKALLLELKGLQEEPVEGFRVTLVDEGDLYNWEVAIFGPPNTYYEGGYFKARLKFPIDYPYSPPAFRFLTKMWHPNIYETGDVCISILHPPVDDPQSGELPSERWNPTQNVRTILLSVISLLNEPNTFSPANVDASVMYRKWKESKGKDREYTDIIRTQEHPGHLPSCTRWYLVSWGHLGAASWCWAVSALSSHGGRAPCGLLGSGLQAPAGLWRSQGSCPGRPSGADVLGGPGPVVSPGPGGWLLGPVLPGHLPEAPPP

SEQ ID NO: 761289 - protein, 195 aa, Homo sapiens
AGRAGPAKASAGGAAAPELLERSGSPGGGGGAEEEAGGGPGGSPPDGARPGPSRELAVVARPRAAPTPGPSAAAMARPLVPSSQKALLLELKGLQEEPVEGFRVTLVDEGDLYNWEVAIFGPPNTYYEGGYFKARLKFPIDYPYSPPAFRFLTKMWHPNIYETGDVCISILHPPVDDPQSGELPSERWNPTQNVR

SEQ ID NO: 761290 - protein, 164 aa, Homo sapiens
TAELREDLDQAKTQIGMTESLLKALSPSDSLEIFTKLEEIQQQILQQKHSMILLENQIGCLTPELSELKKQYESVSDLFNTKKSVLQDHFSKLLNDQCKNFNDWFSNIKVNLKECFESSETKKSVEQKLQKLSDFLTLEGRNSKIKQVDSVLKHVKKHLPKAHV

SEQ ID NO: 761291 - protein, 364 aa, Homo sapiens
SVTCPIMFRALPLRIIPRTSPRGLCSSRAREGQAVGGGWNETMSASSWPQNGMPPSSLYERLSQRMLDISGDRGVLKDVIREGAGDLVAPDASVLVKYSGYLEHMDRPFDSNYFRKTPRLMKLGEDITLWGMELGLLSMRRGELARFLFKPNYAYGTLGCPPLIPPNTTVLFEIELLDFLDCAESDKFCALSAEQQDQFPLQKVLKVAATEREFGNYLFRQNRFYDAKVRYKRALLLLRRRSAPPEEQHLVEAAKLPVLLNLSFTYLKLDRPTIALCYGEQALIIDQKNAKALFRCGQACLLLTEYQKARDFLVRAQKEQPFNHDINNELKKLASCYRDYVDKEKEMWHRMFAPCGDGSTAGES

SEQ ID NO: 761292 - protein, 364 aa, Homo sapiens; identical to SEQ ID NO: 761291

SEQ ID NO: 761293 - protein, 327 aa, Homo sapiens
MGGSALNQGVLEGDDAPGQSLYERLSQRMLDISGDRGVLKDVIREGAGDLVAPDASVLVKYSGYLEHMDRPFDSNYFRKTPRLMKLGEDITLWGMELGLLSMRRGELARFLFKPNYAYGTLGCPPLIPPNTTVLFEIELLDFLDCAESDKFCALSAEQQDQFPLQKVLKVAATEREFGNYLFRQNRFYDAKVRYKRALLLLRRRSAPPEEQHLVEAAKLPVLLNLSFTYLKLDRPTIALCYGEQALIIDQKNAKALFRCGQACLLLTEYQKARDFLVRAQKEQPFNHDINNELKKLASCYRDYVDKEKEMWHRMFAPCGDGSTAGES

SEQ ID NO: 761294 - protein, 324 aa, Homo sapiens
SVTCPIMFRALPLRIIPRTSPRGLCSSRAREGQAVGGGWNETMSASSWPQNGMPPSSLYERLSQRMLDISGDRGVLKDVIREGAGDLVAPDASVLVKYSGYLEHMDRPFDSNYFRKTPRLMKLGEDITLWGMELGLLSMRRGELARFLFKPNYAYGTLGCPPLIPPNTTVLFEIELLDFLDCAESDKFCALSAALLLLRRRSAPPEEQHLVEAAKLPVLLNLSFTYLKLDRPTIALCYGEQALIIDQKNAKALFRCGQACLLLTEYQKARDFLVRAQKEQPFNHDINNELKKLASCYRDYVDKEKEMWHRMFAPCGDGSTAGES

SEQ ID NO: 761295 - protein, 202 aa, Homo sapiens
MGTIPNAFIGSDVVDWLYHNVEGFTDRREARKYASNLLKAGFIRHTVNKITFSEQCYYIFGDLCGNMANLSLHDHDGSSGASDQDTLAPLPHPGAAPWPMAFPYQYPPPPHPYNPHPGFPELGYSYGGGSASSQHSEGSRSSGSNRSGSDRRKEKDPKAGDSKSGGSGSESDHTTRSSLRGPRERAPSERSASPNSHPPLPS

SEQ ID NO: 761296 - protein, 716 aa, Homo sapiens
MGETKIIYHLDGQETPYLVKLPLPAERVTLADFKGVLQRPSYKFFFKSMDDDFGVVKEEISDDNAKLPCFNGRVVSWLVSAEGSHPDPAPFCADNPSELPPPMERTGGIGDSRPPSFHPHAGGGSQENLDNDTETDSLVSAQRERPRRRDGPEHATRLNGTAKGERRREPGGYDSSSTLMSSELETTSFFDSDEDDSTSRFSSSTEQSSASRLMRRHKRRRRKQKVSRIERSSSFSSITDSTMSLNIITVTLNMEKYNFLGISIVGQSNERGDGGIYIGSIMKGGAVAADGRIEPGDMLLQVNEINFENMSNDDAVRVLREIVHKPGPITLTVAKCWDPSPRGCFTLPRSEPIRPIDPAAWVSHTAAMTGTFPAYGMSPSLSTITSTSSSITSSIPDTERLDDFHLSIHSDMAAIVKAMASPESGLEVRDRMWLKITIPNAFIGSDVVDWLYHNVEGFTDRREARKYASNLLKAGFIRHTVNKITFSEQCYYIFGDLCGNMANLSLHDHDGSSGASDQDTLAPLPHPGAAPWPMAFPYQYPPPPHPYNPHPGFPELGYSYGGGSASSQHSEGSRSSGSNRSGSDRRKEKDPKAGDSKSGGSGSESDHTTRSSLRGPRERAPSERSGPAASEHSHRSHHSLASSLRSHHTHPSYGPPGVPPLYGPPMLMMPPPPAAMGPPGAPPGRDLASVPPELTASRQSFRMAMGNPSEFFVDVM

SEQ ID NO: 761297 - protein, 748 aa, Homo sapiens
AESGERKPPPSGRLGPAARAGRARAAGPEARAMGETKIIYHLDGQETPYLVKLPLPAERVTLADFKGVLQRPSYKFFFKSMDDDFGVVKEEISDDNAKLPCFNGRVVSWLVSAEGSHPDPAPFCADNPSELPPPMERTGGIGDSRPPSFHPHAGGGSQENLDNDTETDSLVSAQRERPRRRDGPEHATRLNGTAKGERRREPGGYDSSSTLMSSELETTSFFDSDEDDSTSRFSSSTEQSSASRLMRRHKRRRRKQKVSRIERSSSFSSITDSTMSLNIITVTLNMEKYNFLGISIVGQSNERGDGGIYIGSIMKGGAVAADGRIEPGDMLLQVNEINFENMSNDDAVRVLREIVHKPGPITLTVAKCWDPSPRGCFTLPRSEPIRPIDPAAWVSHTAAMTGTFPAYGMSPSLSTITSTSSSITSSIPDTERLDDFHLSIHSDMAAIVKAMASPESGLEVRDRMWLKITIPNAFIGSDVVDWLYHNVEGFTDRREARKYASNLLKAGFIRHTVNKITFSEQCYYIFGDLCGNMANLSLHDHDGSSGASDQDTLAPLPHPGAAPWPMAFPYQYPPPPHPYNPHPGFPELGYSYGGGSASSQHSEGSRSSGSNRSGSDRRKEKDPKAGDSKSGGSGSESDHTTRSSLRGPRERAPSERSGPAASEHSHRSHHSLASSLRSHHTHPSYGPPGVPPLYGPPMLMMPPPPAAMGPPGAPPGRDLASVPPELTASRQSFRMAMGNPSEFFVDVM

SEQ ID NO: 761298 - protein, 777 aa, Homo sapiens
MGETKIIYHLDGQETPYLVKLPLPAERVTLADFKGVLQRPSYKFFFKSMDDDFGVVKEEISDDNAKLPCFNGRVVSWLVSAEGSHPDPAPFCADNPSELPPPMERTGGIGDSRPPSFHPHAGGGSQENLDNDTETDSLVSAQRERPRRRDGPEHATRLNGTAKGERRREPGGYDSSSTLMSSELETTSFFDSDEDDSTSRWGLSFMGIVEAGDPGGALNPEDAGPLERLMGFVLGTQALQCLPSWGQGWASLVGNDCGPHRFSSSTEQSSASRLMRRHKRRRRKQKVSRIERSSSFSSITDSTMSLNIITVTLNMEKYNFLGISIVGQSNERGDGGIYIGSIMKGGAVAADGRIEPGDMLLQVNEINFENMSNDDAVRVLREIVHKPGPITLTVAKCWDPSPRGCFTLPRSEPIRPIDPAAWVSHTAAMTGTFPAYGMSPSLSTITSTSSSITSSIPDTERLDDFHLSIHSDMAAIVKAMASPESGLEVRDRMWLKITIPNAFIGSDVVDWLYHNVEGFTDRREARKYASNLLKAGFIRHTVNKITFSEQCYYIFGDLCGNMANLSLHDHDGSSGASDQDTLAPLPHPGAAPWPMAFPYQYPPPPHPYNPHPGFPELGYSYGGGSASSQHSEGSRSSGSNRSGSDRRKEKDPKAGDSKSGGSGSESDHTTRSSLRGPRERAPSERSGPAASEHSHRSHHSLASSLRSHHTHPSYGPPGVPPLYGPPMLMMPPPPAAMGPPGAPPGRDLASVPPELTASRQSFRMAMGNPSEFFVDVM

SEQ ID NO: 761299 - protein, 537 aa, Homo sapiens [sequence omitted]

SEQ ID NO: 761300 - protein, 548 aa, Homo sapiens
MGFVLGTQALQCLPSWGQGWASLVGNDCGPHRFSSSTEQSSASRLMRRHKRRRRKQKVSRIERSSSFSSITDSTMSLNIITVTLNMEKYNFLGISIVGQSNERGDGGIYIGSIMKGGAVAADGRIEPGDMLLQVNEINFENMSNDDAVRVLREIVHKPGPITLTVAKCWDPSPRGCFTLPRSEPIRPIDPAAWVSHTAAMTGTFPAYGMSPSLSTITSTSSSITSSIPDTERLDDFHLSIHSDMAAIVKAMASPESGLEVRDRMWLKITIPNAFIGSDVVDWLYHNVEGFTDRREARKYASNLLKAGFIRHTVNKITFSEQCYYIFGDLCGNMANLSLHDHDGSSGASDQDTLAPLPHPGAAPWPMAFPYQYPPPPHPYNPHPGFPELGYSYGGGSASSQHSEGSRSSGSNRSGSDRRKEKDPKAGDSKSGGSGSESDHTTRSSLRGPRERAPSERSGPAASEHSHRSHHSLASSLRSHHTHPSYGPPGVPPLYGPPMLMMPPPPAAMGPPGAPPGRDLASVPPELTASRQSFRMAMGNPSEFFVDVM

SEQ ID NO: 761301 - protein, 678 aa, Homo sapiens
AESGERKPPPSGRLGPAARAGRARAAGPEARAMGETKIIYHLDGQETPYLVKLPLPAERVTLADFKGVLQRPSYKFFFKSMDDDFGVVKEEISDDNAKLPCFNGRVVSWLVSAEGSHPDPAPFCADNPSELPPPMERTGGIGDSRPPSFHPHAGGGSQENLDNDTETDSLVSAQRERPRRRDGPEHATRLNGTAKGERRREPGGYDSSSTLMSSELETTSFFDSDEDDSTSRFSSSTEQSSASRLMRRHKRRRRKQKVSRIERSSSFSSITDSTMSLNIITVTLNMEKYNFLGISIVGQSNERGDGGIYIGSIMKGGAVAADGRIEPGDMLLQVNEINFENMSNDDAVRVLREIVHKPGPITLTVAKCWDPSPRGCFTLPRSEPIRPIDPAAWVSHTAAMTGTFPAYGMSPSLSTITSTSSSITSSIPDTERLDDFHLSIHSDMAAIVKAMASPESGLEVRDRMWLKITIPNAFIGSDVVDWLYHNVEGFTDRREARKYASNLLKAGFIRHTVNKITFSEQCYYIFGDLCGNMANLSLHDHDGSSGASDQDTLAPLPHPGAAPWPMAFPYQYPPPPHPYNPHPGFPELGYSYGGGSASSQHSEGSRSSGSNRSGSDRRKEKDPKAGDSKSGGSGSESDHTTRSSHGAPRSPSGPRPGLSAPGTDRQQTVLPHGHGKPQ

SEQ ID NO: 761302 - protein, 349 aa, Homo sapiens
MTGTFPAYGMSPSLSTITSTSSSITSSIPDTERLDDFHLSIHSDMAAIVKAMASPESGLEVRDRMWLKITIPNAFIGSDVVDWLYHNVEGFTDRREARKYASNLLKAGFIRHTVNKITFSEQCYYIFGDLCGNMANLSLHDHDGSSGASDQDTLAPLPHPGAAPWPMAFPYQYPPPPHPYNPHPGFPELGYSYGGGSASSQHSEGSRSSGSNRSGSDRRKEKDPKAGDSKSGGSGSESDHTTRSSLRGPRERAPSERSGPAASEHSHRSHHSLASSLRSHHTHPSYGPPGVPPLYGPPMLMMPPPPAAMGPPGAPPGRDLASVPPELTASRQSFRMAMGNPSEFFVDVM

SEQ ID NO: 761303 - protein, 78 aa, Homo sapiens
HASRTRGAKSRCANCSQGAARVGCTYRLALQPPNLPLAPVRFLCPLIPAQDFPGPLLSLGPDLLVLPLTPLCNPHFGS

SEQ ID NO: 761304 - protein, 748 aa, Homo sapiens; identical to SEQ ID NO: 761297

SEQ ID NO: 761305 - protein, 529 aa, Homo sapiens
AESGERKPPPSGRLGPAARAGRARAAGPEARAMGETKIIYHLDGQETPYLVKLPLPAERVTLADFKGVLQRPSYKFFFKSMDDDFGVVKEEISDDNAKLPCFNGRVVSWLVSAEGSHPDPAPFCADNPSELPPPMERTGGIGDSRPPSFHPHAGGGSQENLDNDTETDSLVSAQRERPRRRDGPEHATRLNGTAKGERRREPGGYDSSSTLMSSELETTSFFDSDEDDSTSRFSSSTEQSSASRLMRRHKRRRRKQKVSRIERSSSFSSITDSTMSLNIITVTLNMEKYNFLGISIVGQSNERGDGGIYIGSIMKGGAVAADGRIEPGDMLLQVNEINFENMSNDDAVRVLREIVHKPGPITLTVAKCWDPSPRGCFTLPRSEPIRPIDPAAWVSHTAAMTGTFPAYGMSPSLSTITSTSSSITSSIPDTERLDDFHLSIHSDMAAIVKAMASPGWSPNPGVAGELAAKSQQEASEGSVCLQYPGTGPHLSAAIYVHCPCFPGALKGAMNVELNPSLMEPQRGSLDRHS

SEQ ID NO: 761306 - protein, 426 aa, Homo sapiens
AESGERKPPPSGRLGPAARAGRARAAGPEARAMGETKIIYHLDGQETPYLVKLPLPAERVTLADFKGVLQRPSYKFFFKSMDDDFGVVKEEISDDNAKLPCFNGRVVSWLVSAEGSHPDPAPFCADNPSELPPPMERTGGIGDSRPPSFHPHAGGGSQENLDNDTETDSLVSAQRERPRRRDGPEHATRLNGTAKGERRREPGGYDSSSTLMSSELETTSFFDSDEDDSTSRFSSSTEQSSASRLMRRHKRRRRKQKVSRIERSSSFSSITDSTMSLNIITVTLNMEKYNFLGISIVGQSNERGDGGIYIGSIMKGGAVAADGRIEPGDMLLQVNEINFENMSNDDAVRVLREIVHKPGPITLTVAKCWDPSPRGCFTLPRSEPIRPIDPAAWVSHTAAMTGTFPAYGMSPSLSTKRRPKARRSSR

SEQ ID NO: 761307 - protein, 423 aa, Homo sapiens
AESGERKPPPSGRLGPAARAGRARAAGPEARAMGETKIIYHLDGQETPYLVKLPLPAERVTLADFKGVLQRPSYKFFFKSMDDDFGVVKEEISDDNAKLPCFNGRVVSWLVSAEGSHPDPAPFCADNPSELPPPMERTGGIGDSRPPSFHPHAGGGSQENLDNDTETDSLVSAQRERPRRRDGPEHATRLNGTAKGERRREPGGYDSSSTLMSSELETTSFFDSDEDDSTSRFSSSTEQSSASRLMRRHKRRRRKQKVSRIERSSSFSSITDSTMSLNIITVTLNMEKYNFLGISIVGQSNERGDGGIYIGSIMKGGAVAADGRIEPGDMLLQVNEINFENMSNDDAVRVLREIVHKPGPITLTVAKCWDPSPRGCFTLPRSEPIRPNTVRWRWANAPCWPTHRVGPTHRGVGVKEADSVDER

SEQ ID NO: 761308 - protein, 393 aa, Homo sapiens
AESGERKPPPSGRLGPAARAGRARAAGPEARAMGETKIIYHLDGQETPYLVKLPLPAERVTLADFKGVLQRPSYKFFFKSMDDDFGVVKEEISDDNAKLPCFNGRVVSWLVSAEGSHPDPAPFCADNPSELPPPMERTGGIGDSRPPSFHPHAGGGSQENLDNDTETDSLVSAQRERPRRRDGPEHATRLNGTAKGERRREPGGYDSSSTLMSSELETTSFFDSDEDDSTSRFSSSTEQSSASRLMRRHKRRRRKQKVSRIERSSSFSSITDSTMSLNIITVTLNMEKYNFLGISIVGQSNERGDGGIYIGSIMKGGAVAADGRIEPGDMLLQVNEINFENMSNDDAVRVLREIVHKPGPITLTVAKCWDPSPRGCFTLPRSEPTRPQLRSLI

SEQ ID NO: 761309 - protein, 716 aa, Homo sapiens; identical to SEQ ID NO: 761296

SEQ ID NO: 761310 - protein, 716 aa, Homo sapiens; identical to SEQ ID NO: 761296

SEQ ID NO: 761311 - protein, 716 aa, Homo sapiens; identical to SEQ ID NO: 761296

SEQ ID NO: 761312 - protein, 548 aa, Homo sapiens; identical to SEQ ID NO: 761300

SEQ ID NO: 761313 - protein, 553 aa, Homo sapiens
QRIPWLIRGYDSSSTLMSSELETTSFFDSDEDDSTSRFSSSTEQSSASRLMRRHKRRRRKQKVSRIERSSSFSSITDSTMSLNIITVTLNMEKYNFLGISIVGQSNERGDGGIYIGSIMKGGAVAADGRIEPGDMLLQVNEINFENMSNDDAVRVLREIVHKPGPITLTVAKCWDPSPRGCFTLPRSEPIRPIDPAAWVSHTAAMTGTFPAYGMSPSLSTITSTSSSITSSIPDTERLDDFHLSIHSDMAAIVKAMASPESGLEVRDRMWLKITIPNAFIGSDVVDWLYHNVEGFTDRREARKYASNLLKAGFIRHTVNKITFSEQCYYIFGDLCGNMANLSLHDHDGSSGASDQDTLAPLPHPGAAPWPMAFPYQYPPPPHPYNPHPGFPELGYSYGGGSASSQHSEGSRSSGSNRSGSDRRKEKDPKAGDSKSGGSGSESDHTTRSSLRGPRERAPSERSGPAASEHSHRSHHSLASSLRSHHTHPSYGPPGVPPLYGPPMLMMPPPPAAMGPPGAPPGRDLASVPPELTASRQSFRMAMGNPSEFFVDVM

SEQ ID NO: 761314 - protein, 316 aa, Homo sapiens
LTGNHLPFHFQFSGESLKLKLLLFTDARIVVAVVSGTIPNAFIGSDVVDWLYHNVEGFTDRREARKYASNLLKAGFIRHTVNKITFSEQCYYIFGDLCGNMANLSLHDHDGSSGASDQDTLAPLPHPGAAPWPMAFPYQYPPPPHPYNPHPGFPELGYSYGGGSASSQHSEGSRSSGSNRSGSDRRKEKDPKAGDSKSGGSGSESDHTTRSSLRGPRERAPSERSGPAASEHSHRSHHSLASSLRSHHTHPSYGPPGVPPLYGPPMLMMPPPPAAMGPPGAPPGRDLASVPPELTASRQSFRMAMGNPSEFFVDVM

SEQ ID NO: 761315 - protein, 526 aa, Homo sapiens
AESGERKPPPSGRLGPAARAGRARAAGPEARAMGETKIIYHLDGQETPYLVKLPLPAERVTLADFKGVLQRPSYKFFFKSMDDDFGVVKEEISDDNAKLPCFNGRVVSWLVSAEGSHPDPAPFCADNPSELPPPMERTGGIGDSRPPSFHPHAGGGSQENLDNDTETDSLVSAQRERPRRRDGPEHATRLNGTAKGERRREPGGYDSSSTLMSSELETTSFFDSDEDDSTSRFSSSTEQSSASRLMRRHKRRRRKQKVSRIERSSSFSSITDSTMSLNIITVTLNMEKYNFLGISIVGQSNERGDGGIYIGSIMKGGAVAADGRIEPGDMLLQVNEINFENMSNDDAVRVLREIVHKPGPITLTVAKCWDPSPRGCFTLPRSEPIRPIDPAAWVSHTAAMTGTFPAYGMSPSLSTITSTSSSITSSIPDTEPGCVPLSIRPSFLLCLVPEREIKGTKSRCANCSQGAARVGCTYRLALQPPNLPLAPVRFLCPLIPAQDFPGPLLSLGPDLLVLPLTPLCNPHFGS

SEQ ID NO: 761316 - protein, 90 aa, Homo sapiens
KLRYAPRVGQLLPIIVALQAREFTSDCELEIAPRVAACGGGRGASLALFIFLSHSCMHTCTEMHTQVPMQVHLSLRAGPCPKGWTLLILS

SEQ ID NO: 761317 - protein, 422 aa, Homo sapiens
AESGERKPPPSGRLGPAARAGRARAAGPEARAMGETKIIYHLDGQETPYLVKLPLPAERVTLADFKGVLQRPSYKFFFKSMDDDFGVVKEEISDDNAKLPCFNGRVVSWLVSAEGSHPDPAPFCADNPSELPPPMERTGGIGDSRPPSFHPHAGGGSQENLDNDTETDSLVSAQRERPRRRDGPEHATRLNGTAKGERRREPGGYDSSSTLMSSELETTSFFDSDEDDSTSRFSSSTEQSSASRLMRRHKRRRRKQKVSRIERSSSFSSITDSTMSLNIITVTLNMEKYNFLGISIVGQSNERGDGGIYIGSIMKGGAVAADGRIEPGDMLLQVNEINFENMSNDDAVRVLREIVHKPGPITLTVAKCWDPSPRGCFTLPRSEPIRPIDPAAWVSHTAAMTGTFPAYGMSPSLSTIEPVSPS

SEQ ID NO: 761318 - protein, 417 aa, Homo sapiens
  misc_feature (403)..(403): Xaa can be any naturally occurring amino acid
AESGERKPPPSGRLGPAARAGRARAAGPEARAMGETKIIYHLDGQETPYLVKLPLPAERVTLADFKGVLQRPSYKFFFKSMDDDFGVVKEEISDDNAKLPCFNGRVVSWLVSAEGSHPDPAPFCADNPSELPPPMERTGGIGDSRPPSFHPHAGGGSQENLDNDTETDSLVSAQRERPRRRDGPEHATRLNGTAKGERRREPGGYDSSSTLMSSELETTSFFDSDEDDSTSRFSSSTEQSSASRLMRRHKRRRRKQKVSRIERSSSFSSITDSTMSLNIITVTLNMEKYNFLGISIVGQSNERGDGGIYIGSIMKGGAVAADGRIEPGDMLLQVNEINFENMSNDDAVRVLREIVHKPGPITLTVAKCWDPSPRGCFTLPRNRSPFPGHLTPWGPGGFPQLGXPVNREPFPLDYRDG

SEQ ID NO: 761319 - protein, 390 aa, Homo sapiens
AESGERKPPPSGRLGPAARAGRARAAGPEARAMGETKIIYHLDGQETPYLVKLPLPAERVTLADFKGVLQRPSYKFFFKSMDDDFGVVKEEISDDNAKLPCFNGRVVSWLVSAEGSHPDPAPFCADNPSELPPPMERTGGIGDSRPPSFHPHAGGGSQENLDNDTETDSLVSAQRERPRRRDGPEHATRLNGTAKGERRREPGGYDSSSTLMSSELETTSFFDSDEDDSTSRFSSSTEQSSASRLMRRHKRRRRKQKVSRIERSSSFSSITDSTMSLNIITVTLNMEKYNFLGISIVGQSNERGDGGIYIGSIMKGGAVAADGRIEPGDMLLQVNEINFENMSNDDAVRVLREIVHKPGYGWNGALGKGLGLAYTHPAFTRTPLFSGPSP

SEQ ID NO: 761320 - protein, 2266 aa, Homo sapiens
RLAASPSFSWAGAMRPGPALLLLGVGLSLSVGRLPLPPVPRGAQAAVSGAPGGLLRGAPGLGVRGGRALLSLRPSAVRAGGAVLSGRGSLCFPHGGTGRRWYCLDLRVLLSAQRLPWPAAPALALVDLQLSARGGRLSLTWSVRLPRSPGRLAWAFRLRLLGPGAARPASPAARVSPRSAAPGPRPQQGFVARTECPTDGPARVMLQAVNSSSHRAVESSVSCQINACVIQRVRINTDQKGAPVRLSMQAEATINASVQLDCPAARAIAQYWQVFSVPAVGQAPDWTQPLDLPQLEIRNSPLFIHIPNNSLQWGVYVFNFTVSITTGNPKMPEVKDSDAVYVWIVRSSLQAVMLGDANITANFTEQLILDGSTSSDPDADSPLQGLQFFWYCTTDPRNYGGDRIILGSKEVCHPEQANLKWPWASGPVLTLLPETLKGDHVYFFRMVIRKDSRTAFSDKRVHVLQGPKAIAHITCIENCERNFIVSDRFSLFLNCTNCASRDFYKWSILSSSGGEMLFDWMGETVTGRNGAYLSIKAFAFRHFLEAEFSISLYLACWSGVTSVFRHSFIINHGPQIGECKINPAKGIALITKFVVQCSNFRDKHVPLTYKIIVSDLHSVGEISSVKENTLGTILYLGPQSTVPPSFLPVGMLASQYGLKIYAQVYDSLGAFSQVTLHATAQAPTDKNSSKTVLNQLLSFTVGPSSLLSTLIQKKDFLPAGYLLYIVASVLNNMKTELPLRDDRVNLRKHLIDQSFLLPVSTLVEIGQVVMTITKLTQKPSEFTWDAQKRATMRVWQANQALQEYQQKDKRFRSEQIEIVSTGILMSLSNILKMTSPHQVVKDPFYVIESLSDTILANKVPGNKTTSMRTPNFNMYVKKVEKWGINQLFRNEKHCRNCFYPTLNVSSVPGLSANGPISTMFCDFTNDLFPWLNDQENTSVEVSGFRMTGVADNGSVLEITPDVAEVYLVRKNLTFAAFNLTVGPNSEVDGSLKKTTGGFSFQVDSTVLREVLVHIVTEVMVLFTVLVYTGSQITPTALVATFLVPHDIPPFASQSALFDPACTVKKARVVCLPVSLLQLIAQHSHSPHCTVSIVLQAPRFVMKLNDKLVRISIFSVQCLDMYGIQSEWREGYCILGEKTSWYEVHCICKNVVRARRQLGTIGLTGIHLHTHYVMAKVIVIPNPVDLRLNIIKSLHQNPVTLFTVLFIILLYVGLAFWALYRDEMDQHLRGHVIVLPDNDPYDNLCYLVTIFTGSRWGSGTRANVFVQLRGTVSTSDVHCLSHPHFTTLYRGSINTFLLTTKSDLGDIHSIRVWHNNEGRSPSWYLSRIKVENLFSRHIWLFICQKWLSVDTTLDRTFHVTHPDERLTRKDFFFIDVSSNLRKNHMWFSIFASVVAKTFNRLQRLSCCLAMLLSSLLCNIMFFNLNRQEQTESRERKYMRSMMIGIESVLITIPVQLLITFLFTCSQRKPQADLKEVSPQKHPLMSEASEHWEEYLRKWHAYETAKVHPREVAKPASKGKPRLPKASPKATSKPKHRHRKAQIKTPETLGPNTNSNNNIEDDQDVHSEQHPSQKDLQQLKKKPRIVLPWWCVYVAWFLVFATSSISSFFIVFYGLTYGYDKSIEWLFASFCSFCQSVLLVQPSKIILLSGFRTNKPKYCKNLSWSTKYKYTEIRLDGMRMHPEEMQRIHDQIVRIRGTRMYQPLTEDEIRIFKRKKRIKRRALLFLSYILTHFIFLALLLILIVLLRHTDCFYYNQFIRDRFSMDLATVTKLEDIYRWLNSVLLPLLHNDLNPTFLPESSSKILGLPLMRQVRAKSSEKMCLPAEKFVQNSIRREIHCHPKYGIDPEDTKNYSGFWNEVDKQAIDESTNGFTYKPQGTQWLYYSYGLLHTYGSGGYALYFFPEQQRFNSTLRLKELQESNWLDEKTWAVVLELTTFNPDINLFCSISVIFEVSQLGVVNTSISLHSFSLADFDRKASAEIYLYVAILIFFLAYVVDEGCIIMQERASYVRSVYNLLNFALKCIFTVLIVLFLRKHFLATGIIRFYLSNPEDFIPFHAVSQVDHIMRIILGFLLFLTILKTLRYSRFFYDVRLAQRAIQAALPGICHMAFVVSVYFFVYMAFGYLVFGQHEWNYSNLIHSTQTVFSYCVSAFQNTEFSNNRILGVLFLSSFMLVMICVLINLFQAVILSAYEEMKQPVYEEPSDEVEAMTYLCRKLRTMFSFLTSQSKAKDEPEFFIDMLYGQPEKNSHRYLGLKTRNINGKKMVYLVV

SEQ ID NO: 761321 - protein, 144 aa, Homo sapiens
TSLSVEETALEPMDTAYPREDTRAPTPSKAGAHTALTLGAPHPPPRDHLIWSVFSTLYLNLCCLGFLALAYSIKARDQKVVGDLEAARRFGSKAKCYNILAAMWTLVPPLLLLGLVVTGALHLARLAKDSAAFFSTKFDDADYD

SEQ ID NO: 761322 - protein, 115 aa, Homo sapiens
RNSVPRANSCLVQWGGAGIVQFSDLSSPGPTSSSFHSPRPPGSHLRVQSGSSLAPGPSLFSSSLAPVTLSLSLPLNLPKGTFPFSWHLVIDSQGKVSSADVYEGHSAEINCAEDE

SEQ ID NO: 761323 - protein, 104 aa, Homo sapiens
TDMVHSVVTFQEPVVGCPVSVGGKQVKHNLLFAFHPSVHHEIISRLSDCCPPGAGREGVLRELLVILHACGLGDHILFLSDGICWTRKKNHWELCSSNFGFRSL

SEQ ID NO: 761324 - protein, 110 aa, Homo sapiens
MTYPPHRAFSRSDVPYPLLSSPVQWPLSLVVGDTSTRWPQQPSALESDCPGPSHPCLAGLLGPMHPVDIPLSTALHSKHQRRLTQCVLMVQSPSKQRSLYLLNKKIPHDA

SEQ ID NO: 761325 - protein, 110 aa, Homo sapiens; identical to SEQ ID NO: 761324

SEQ ID NO: 761326 - protein, 486 aa, Homo sapiens
IQHHLQKLEGRRLDFDKKKRQGKIPDEELRQALEKFEDSKEVAETSMHNLLETNIEQVSQLRALAEAQLNYHWQAMQILDELAEKLKRRMREASSRPKREYKPKFWEPFDLGEPEQSNGGFPCTTVPKIAASSPFRSSDKSIWTPSRSMPPLDQPSCKVLYDFQPENHGELGFHEGDVFTLINQINENWYQGMLDSQLGFFLLSYMDVLMPLPSDSLVPPPRPSIHTGWHPRQVSCLPWAPAAKAVSKPAGATQARALEVLPQQGATLGWEAYLVSGWGRLFKLALTPNGDGSLPHSMAPASSLLPNSSPSWPRRGNTKVLSETLMFLQGSPHLRPDPWGPSPQPTLEFHGLNRLGSSVPVGWLRDRTLVLNPSTSLLLAMNPSPTPGPQYPSLTHALLLPKARAEGLTVSLACCQLATRRQRPAGICPTFPPILLPSTLRTENMASSRALPPKPYPQHTKYLFSFLTAPSQAHGSLCHSGTSCHH

SEQ ID NO: 761327 - protein, 155 aa, Homo sapiens
RVKVSSLPYSVDALVSDKKPPKEASPVPAKSASSGATLRLLLLPGHGAREAHSPGPLIKPFETASVKWENSLRRSGVDAGTLLIIRRRQDTLSPTTCTLRKHKTNPKPRTAFTTSQLLALEGKLLQKQYLSIAEGADFSSSPNLTETQVKILFQN

SEQ ID NO: 761328 - protein, 1457 aa, Homo sapiens
TESRDPGRAVNVWSLRFLCLRRASLARRRKSVWQPGYPLLPAPADAPAAAGRRPGSLALCAQLSCAAGCREFHLRASFSRQALGERTGSRVLGISPGSRCRMQSKVLLAVALWLCVETRAASVGLPSVSLDLPRLSIQKDILTIKANTTLQITCRGQRDLDWLWPNNQSGSEQRVEVTECSDGLFCKTLTIPKVIGNDTGAYKCFYRETDLASVIYVYVQDYRSPFIASVSDQHGVVYITENKNKTVVIPCLGSISNLNVSLCARYPEKRFVPDGNRISWDSKKGFTIPSYMISYAGMVFCEAKINDESYQSIMYIVVVVGYRIYDVVLSPSHGIELSVGEKLVLNCTARTELNVGIDFNWEYPSSKHQHKKLVNRDLKTQSGSEMKKFLSTLTIDGVTRSDQGLYTCAASSGLMTKKNSTFVRVHEKPFVAFGSGMESLVEATVGERVRIPAKYLGYPPPEIKWYKNGIPLESNHTIKAGHVLTIMEVSERDTGNYTVILTNPISKEKQSHVVSLVVYVPPQIGEKSLISPVDSYQYGTTQTLTCTVYAIPPPHHIHWYWQLEEECANEPSQAVSVTNPYPCEEWRSVEDFQGGNKIEVNKNQFALIEGKNKTVSTLVIQAANVSALYKCEAVNKVGRGERVISFHVTRGPEITLQPDMQPTEQESVSLWCTADRSTFENLTWYKLGPQPLPIHVGELPTPVCKNLDTLWKLNATMFSNSTNDILIMELKNASLQDQGDYVCLAQDRKTKKRHCVVRQLTVLERVAPTITGNLENQTTSIGESIEVSCTASGNPPPQIMWFKDNETLVEDSGIVLKDGNRNLTIRRVRKEDEGLYTCQACSVLGCAKVEAFFIIEGAQEKTNLEIIILVGTAVIAMFFWLLLVIILRTVKRANGGELKTGYLSIVMDPDELPLDEHCERLPYDASKWEFPRDRLKLGKPLGRGAFGQVIEADAFGIDKTATCRTVAVKMLKEGATHSEHRALMSELKILIHIGHHLNVVNLLGACTKPGGPLMVIVEFCKFGNLSTYLRSKRNEFVPYKTKGARFRQGKDYVGAIPVDLKRRLDSITSSQSSASSGFVEEKSLSDVEEEEAPEDLYKDFLTLEHLICYSFQVAKGMEFLASRKCIHRDLAARNILLSEKNVVKICDFGLARDIYKDPDYVRKGDARLPLKWMAPETIFDRVYTIQSDVWSFGVLLWEIFSLGASPYPGVKIDEEFCRRLKEGTRMRAPDYTTPEMYQTMLDCWHGEPSQRPTFSELVEHLGNLLQANAQQDGKDYIVLPISETLSMEEDSGLSLPTSPVSCMEEEEVCDPKFHYDNTAGISQYLQNSKRKSRPVSVKTFEDIPLEEPEVKVIPDDNQTDSGMVLASEELKTLEDRTKLSPSFGGMVPSKSRESVASEGSNQTSGYQSGYHSDDTDTTVYSSEEAELLKLIEIGVQTGSTAQILQPDSGTTLSSPPV

SEQ ID NO: 761329 - protein, 112 aa, Homo sapiens
YIRKVVVVQSDNQTDSGMVLASEELKTLEDRTKLSPSFGGMVPSKSRESVASEGSNQTSGYQSGYHSDDTDTTVYSSEEAELLKLIEIGVQTGSTAQILQPDSGTTLSSPPV

SEQ ID NO: 761330 - protein, 1457 aa, Homo sapiens; identical to SEQ ID NO: 761328

SEQ ID NO: 761331 - protein, 560 aa, Homo sapiens
MLRGTLLCAVLGLLRAQPFPCPPACKCVFRDAAQCSGGDVARISALGLPTNLTHILLFGMGRGVLQSQSFSGMTVLQRLMISDSHISAVAPGTFSDLIKLKTLRLSRNKITHLPGALLDKMVLLEQLFLDHNALRGIDQNMFQKLVNLQELALNQNQLDFLPASLFTNLENLKLLDLSGNNLTHLPKGLLGAQAKLERLLLHSNRLVSLDSGLLNSLGALTELQFHRNHIRSIAPGAFDRLPNLSSLTLSRNHLAFLPSALFLHSHNLTLLTLFENPLAELPGVLFGEMGGLQELWLNRTQLRTLPAAAFRNLSRLRYLGVTLSPRLSALPQGAFQGLGELQVLALHSNGLTALPDGLLRGLGKLRQVSLRRNRLRALPRALFRNLSSLESVQLDHNQLETLPGDVFGALPRLTEVLLGHNSWRCDCGLGPFLGWLRQHLGLVGGEEPPRCAGPGAHAGLPLWALPGGDAECPGPRGPPPRPAADSSSEAPVHPALAPNSSEPWVWAQPVTTGKGQDHSPFWGFYFLLLAVQAMITVIIVFAMIKIGQLFRKLIRERALG

SEQ ID NO: 761332 - protein, 584 aa, Homo sapiens
GSQGSVQARTLLCVDHTPTVAFSDMLRGTLLCAVLGLLRAQPFPCPPACKCVFRDAAQCSGGDVARISALGLPTNLTHILLFGMGRGVLQSQSFSGMTVLQRLMISDSHISAVAPGTFSDLIKLKTLRLSRNKITHLPGALLDKMVLLEQLFLDHNALRGIDQNMFQKLVNLQELALNQNQLDFLPASLFTNLENLKLLDLSGNNLTHLPKGLLGAQAKLERLLLHSNRLVSLDSGLLNSLGALTELQFHRNHIRSIAPGAFDRLPNLSSLTLSRNHLAFLPSALFLHSHNLTLLTLFENPLAELPGVLFGEMGGLQELWLNRTQLRTLPAAAFRNLSRLRYLGVTLSPRLSALPQGAFQGLGELQVLALHSNGLTALPDGLLRGLGKLRQVSLRRNRLRALPRALFRNLSSLESVQLDHNQLETLPGDVFGALPRLTEVLLGHNSWRCDCGLGPFLGWLRQHLGLVGGEEPPRCAGPGAHAGLPLWALPGGDAECPGPRGPPPRPAADSSSEAPVHPALAPNSSEPWVWAQPVTTGKGQDHSPFWGFYFLLLAVQAMITVIIVFAMIKIGQLFRKLIRERALG

SEQ ID NO: 761333 - protein, 110 aa, Homo sapiens
WSHSLMLRIAPPSPCGGQCGDPKSQWGKEFLIEKAVISPGFDVFAKKNQGILEFYGDDIALLKLAQKVKMSTHARPICLPCTMEANLALRRPQGSTCRDHGRLEWEQTEH

SEQ ID NO: 761334 - protein, 752 aa, Homo sapiens
MGPLMVLFCLLFLYPGLADSAPSCPQNVNISGGTFTLSHGWAPGSLLTYSCPQGLYPSPASRLCKSSGQWQTPGATRSLSKAVCKPVRCPAPVSFENGIYTPRLGSYPVGGNVSFECEDGFILRGSPVRQCRPNGMWDGETAVCDNGAGHCPNPGISLGAVRTGFRFGHGDKVRYRCSSNLVLTGSSERECQGNGVWSGTEPICRQPYSYDFPEDVAPALGTSFSHMLGATNPTQKTKESLGRKIQIQRSGHLNLYLLLDCSQSVSENDFLIFKESASLMVDRIFSFEINVSVAIITFASEPKVLMSVLNDNSRDMTEVISSLENANYKDHENGTGTNTYAALNSVYLMMNNQMRLLGMETMAWQEIRHAIILLTDGKSNMGGSPKTAVDHIREILNINQKRNDYLDIYAIGVGKLDVDWRELNELGSKKDGERHAFILQDTKALHQVFEHMLDVSKLTDTICGVGNMSANASDQERTPWHVTIKPKSQETCRGALISDQWVLTAAHCFRDGNDHSLWRVNVGDPKSQWGKEFLIEKAVISPGFDVFAKKNQGILEFYGDDIALLKLAQKVKMSTHARPICLPCTMEANLALRRPQGSTCRDHENELLNKQSVPAHFVALNGSKLNINLKMGVEWTSCAEVVSQEKTMFPNLTDVREVVTDQFLCSGTQEDESPCKGESGGAVFLERRFRFFQVGLVSWGLYNPCLGSADKNSRKRAPRSKVPPPRDFHINLFRMQPWLRQHLGDVLNFLPL

SEQ ID NO: 761335 - protein, 620 aa, Homo sapiens
MGPLMVLFCLLFLYPAGHCPNPGISLGAVRTGFRFGHGDKVRYRCSSNLVLTGSSERECQGNGVWSGTEPICRQPYSYDFPEDVAPALGTSFSHMLGATNPTQKTKESLGRKIQIQRSGHLNLYLLLDCSQSVSENDFLIFKESASLMVDRIFSFEINVSVAIITFASEPKVLMSVLNDNSRDMTEVISSLENANYKDHENGTGTNTYAALNSVYLMMNNQMRLLGMETMAWQEIRHAIILLTDGKSNMGGSPKTAVDHIREILNINQKRNDYLDIYAIGVGKLDVDWRELNELGSKKDGERHAFILQDTKALHQVFEHMLDVSKLTDTICGVGNMSANASDQERTPWHVTIKPKSQETCRGALISDQWVLTAAHCFRDGNDHSLWRVNVGDPKSQWGKEFLIEKAVISPGFDVFAKKNQGILEFYGDDIALLKLAQKVKMSTHARPICLPCTMEANLALRRPQGSTCRDHENELLNKQSVPAHFVALNGSKLNINLKMGVEWTSCAEVVSQEKTMFPNLTDVREVVTDQFLCSGTQEDESPCKGESGGAVFLERRFRFFQVGLVSWGLYNPCLGSADKNSRKRAPRSKVPPPRDFHINLFRMQPWLRQHLGDVLNFLPL

SEQ ID NO: 761336 - protein, 690 aa, Homo sapiens
MGPLMVLFCLLFLYPGLADSAPSCPQNVNISGGTFTLSHGWAPGSLLTYSCPQGLYPSPASRLCKSSGQWQTPGATRSLSKAVCKPGHCPNPGISLGAVRTGFRFGHGDKVRYRCSSNLVLTGSSERECQGNGVWSGTEPICRQPYSYDFPEDVAPALGTSFSHMLGATNPTQKTKESLGRKIQIQRSGHLNLYLLLDCSQSVSENDFLIFKESASLMVDRIFSFEINVSVAIITFASEPKVLMSVLNDNSRDMTEVISSLENANYKDHENGTGTNTYAALNSVYLMMNNQMRLLGMETMAWQEIRHAIILLTDGKSNMGGSPKTAVDHIREILNINQKRNDYLDIYAIGVGKLDVDWRELNELGSKKDGERHAFILQDTKALHQVFEHMLDVSKLTDTICGVGNMSANASDQERTPWHVTIKPKSQETCRGALISDQWVLTAAHCFRDGNDHSLWRVNVGDPKSQWGKEFLIEKAVISPGFDVFAKKNQGILEFYGDDIALLKLAQKVKMSTHARPICLPCTMEANLALRRPQGSTCRDHENELLNKQSVPAHFVALNGSKLNINLKMGVEWTSCAEVVSQEKTMFPNLTDVREVVTDQFLCSGTQEDESPCKGESGGAVFLERRFRFFQVGLVSWGLYNPCLGSADKNSRKRAPRSKVPPPRDFHINLFRMQPWLRQHLGDVLNFLPL

SEQ ID NO: 761337 - protein, 410 aa, Homo sapiens
MPTIKLMMNNQMRLLGMETMAWQEIRHAIILLTDGKSNMGGSPKTAVDHIREILNINQKRNDYLDIYAIGVGKLDVDWRELNELGSKKDGERHAFILQDTKALHQVFEHMLDVSKLTDTICGVGNMSANASDQERTPWHVTIKPKSQETCRGALISDQWVLTAAHCFRDGNDHSLWRVNVGDPKSQWGKEFLIEKAVISPGFDVFAKKNQGILEFYGDDIALLKLAQKVKMSTHARPICLPCTMEANLALRRPQGSTCRDHENELLNKQSVPAHFVALNGSKLNINLKMGVEWTSCAEVVSQEKTMFPNLTDVREVVTDQFLCSGTQEDESPCKGESGGAVFLERRFRFFQVGLVSWGLYNPCLGSADKNSRKRAPRSKVPPPRDFHINLFRMQPWLRQHLGDVLNFLPL

SEQ ID NO: 761338 - protein, 633 aa, Homo sapiens
LLMVLILKGNLKGSVFCCWFCGGQVTKQAGHCPNPGISLGAVRTGFRFGHGDKVRYRCSSNLVLTGSSERECQGNGVWSGTEPICRQPYSYDFPEDVAPALGTSFSHMLGATNPTQKTKESLGRKIQIQRSGHLNLYLLLDCSQSVSENDFLIFKESASLMVDRIFSFEINVSVAIITFASEPKVLMSVLNDNSRDMTEVISSLENANYKDHENGTGTNTYAALNSVYLMMNNQMRLLGMETMAWQEIRHAIILLTDGKSNMGGSPKTAVDHIREILNINQKRNDYLDIYAIGVGKLDVDWRELNELGSKKDGERHAFILQDTKALHQVFEHMLDVSKLTDTICGVGNMSANASDQERTPWHVTIKPKSQETCRGALISDQWVLTAAHCFRDGNDHSLWRVNVGDPKSQWGKEFLIEKAVISPGFDVFAKKNQGILEFYGDDIALLKLAQKVKMSTHARPICLPCTMEANLALRRPQGSTCRDHENELLNKQSVPAHFVALNGSKLNINLKMGVEWTSCAEVVSQEKTMFPNLTDVREVVTDQFLCSGTQEDESPCKGESGGAVFLERRFRFFQVGLVSWGLYNPCLGSADKNSRKRAPRSKVPPPRDFHINLFRMQPWLRQHLGDVLNFLPL

SEQ ID NO: 761339 - protein, 661 aa, Homo sapiens
MGPLMVLFCLLFLYPGLADSAPSCPQNVNISGGTFTLSHGWAPGSLLTYSCPQGLYPSPASRLCKSSGQWQTPGATRSLSKAVCKPVRCPAPVSFENGIYTPRLGSYPVGGNVSFECEDGFILRGSPVRQCRPNGMWDGETAVCDNGAGHCPNPGISLGAVRTGFRFGHGDKVRYRCSSNLVLTGSSERECQGNGVWSGTEPICRQPYSYDFPEDVAPALGTSFSHMLGATNPTQKTKDHENGTGTNTYAALNSVYLMMNNQMRLLGMETMAWQEIRHAIILLTDGKSNMGGSPKTAVDHIREILNINQKRNDYLDIYAIGVGKLDVDWRELNELGSKKDGERHAFILQDTKALHQVFEHMLDVSKLTDTICGVGNMSANASDQERTPWHVTIKPKSQETCRGALISDQWVLTAAHCFRDGNDHSLWRVNVGDPKSQWGKEFLIEKAVISPGFDVFAKKNQGILEFYGDDIALLKLAQKVKMSTHARPICLPCTMEANLALRRPQGSTCRDHENELLNKQSVPAHFVALNGSKLNINLKMGVEWTSCAEVVSQEKTMFPNLTDVREVVTDQFLCSGTQEDESPCKGESGGAVFLERRFRFFQVGLVSWGLYNPCLGSADKNSRKRAPRSKVPPPRDFHINLFRMQPWLRQHLGDVLNFLPL

SEQ ID NO: 761340 - protein, 531 aa, Homo sapiens
CLSLPRSWDYRHAPPCLAGHCPNPGISLGAVRTGFRFGHGDKVRYRCSSNLVLTGSSERECQGNGVWSGTEPICRQPYSYDFPEDVAPALGTSFSHMLGATNPTQKTKDHENGTGTNTYAALNSVYLMMNNQMRLLGMETMAWQEIRHAIILLTDGKSNMGGSPKTAVDHIREILNINQKRNDYLDIYAIGVGKLDVDWRELNELGSKKDGERHAFILQDTKALHQVFEHMLDVSKLTDTICGVGNMSANASDQERTPWHVTIKPKSQETCRGALISDQWVLTAAHCFRDGNDHSLWRVNVGDPKSQWGKEFLIEKAVISPGFDVFAKKNQGILEFYGDDIALLKLAQKVKMSTHARPICLPCTMEANLALRRPQGSTCRDHENELLNKQSVPAHFVALNGSKLNINLKMGVEWTSCAEVVSQEKTMFPNLTDVREVVTDQFLCSGTQEDESPCKGESGGAVFLERRFRFFQVGLVSWGLYNPCLGSADKNSRKRAPRSKVPPPRDFHINLFRMQPWLRQHLGDVLNFLPL

SEQ ID NO: 761341 - protein, 752 aa, Homo sapiens; identical to SEQ ID NO: 761334

SEQ ID NO: 761342 - protein, 538 aa, Homo sapiens
MGPLMVLFCLLFLYPGLADSAPSCPQNVNISGGTFTLSHGWAPGSLLTYSCPQGLYPSPASRLCKSSGQWQTPGATRSLSKAVCKPVRCPAPVSFENGIYTPRLGSYPVGGNVSFECEDGFILRGSPVRQCRPNGMWDGETAVCDNGAGHCPNPGISLGAVRTGFRFGHGDKVRYRCSSNLVLTGSSERECQGNGVWSGTEPICRQPYSYDFPEDVAPALGTSFSHMLGATNPTQKTKESLGRKIQIQRSGHLNLYLLLDCSQSVSENDFLIFKESASLMVDRIFSFEINVSVAIITFASEPKVLMSVLNDNSRDMTEVISSLENANYKDHENGTGTNTYAALNSVYLMMNNQMRLLGMETMAWQEIRHAIILLTDGKSNMGGSPKTAVDHIREILNINQKRNDYLDIYAIGVGKLDVDWRELNELGSKKDGERHAFILQDTKALHQVFEHMLDVSKLTDTICGVGNMSANASDQERTPWHVTIKPKSQETCRGALISDQWVLTAAHCSAMATTTPCGGSMWETPNPSGAKNSLLRRR

SEQ ID NO: 761343 - protein, 538 aa, Homo sapiens; identical to SEQ ID NO: 761342

SEQ ID NO: 761344 - protein, 424 aa, Homo sapiens
MGPLMVLFCLLFLYPGLADSAPSCPQNVNISGGTFTLSHGWAPGSLLTYSCPQGLYPSPASRLCKSSGQWQTPGATRSLSKAVCKPVRCPAPVSFENGIYTPRLGSYPVGGNVSFECEDGFILRGSPVRQCRPNGMWDGETAVCDNGAGHCPNPGISLGAVRTGFRFGHGDKVRYRCSSNLVLTGSSERECQGNGVWSGTEPICRQPYSYDFPEDVAPALGTSFSHMLGATNPTQKTKESLGRKIQIQRSGHLNLYLLLDCSQSVSENDFLIFKESASLMVDRIFSFEINVSVAIITFASEPKVLMSVLNDNSRDMTEVISSLENANYKDHENGTGTNTYAALNSVYLMMNNQMRLLGMETMAWQEIRHAIILLTDGKSNMGGSPKTAVDHIREILNINQKRNDYLDIYAIGGQAGGKSCWEKD

SEQ ID NO: 761345 - protein, 470 aa, Homo sapiens
MMLPPWTLGLLLLATVRGKEVCYGQLGCFSDEKPWAGTLQRPVKLLPWSPEDIDTRFLLYTNENPNNFQLITGTEPDTIEASNFQLDRKTRFIIHGFLDKAEDSWPSDMCKKMFEVEKVNCICVDWRHGSRAMYTQAVQNIRVVGAETAFLIQALSTQLGYSLEDVHVIGHSLGAHTAAEAGRRLGGRVGRITGLDPAGPCFQDEPEEVRLDPSDAVFVDVIHTDSSPIVPSLGFGMSQKVGHLDFFPNGGKEMPGCKKNVLSTITDIDGIWEGIGGFVSCNHLRSFEYYSSSVLNPDGFLGYPCASYDEFQESKCFPCPAEGCPKMGHYADQFKGKTSAVEQTFFLNTGESGNFTSWRYKVSVTLSGKEKVNGYIRIALYGSNENSKQYEIFKGSLKPDASHTCAIDVDFNVGKIQKVKFLWNKRGINLSEPKLGASQITVQSGEDGTEYNFCSSDTVEENVLQSLYPC

SEQ ID NO: 761346 - protein, 189 aa, Homo sapiens
MMLPPWTLGLLLLATVRGKEVCYGQLGCFSDEKPWAGTLQRPVKLLPWSPEDIDTRFLLYTNENPNNFQLITGTEPDTIEASNFQLDRKTRFIIHGFLDKAEDSWPSDMCKKMFEVEKVNCICVDWRHGSRAMYTQAVQNIRVVGAETAFLIQALSVKPCLGPVLWVGVREGQGGTTWHGEAAWGPVGM

SEQ ID NO: 761347 - protein, 129 aa, Homo sapiens
IIGGCTKDERFVAEVTCLDPLRRSRLEVAKLPLTEHELESENKKWVEFACVTLKNEVYISGGKETQHDVWKYNSSINKWIQIEYLNIGRWRHKMVVLGGKVYVIGGFDGLQRINNVETYDPFHNCWSEV

SEQ ID NO: 761348 - protein, 299 aa, Homo sapiens
IIGGCTKDERFVAEVTCLDPLRRSRLEVAKLPLTEHELESENKKWVEFACVTLKNEVYISGGKETQHDVWKYNSSINKWIQIEYLNIGRWRHKMVVLGGKVYVIGGFDGLQRINNVETYDPFHNCWSEAAPLLVHVSSFAATSHKKKLYVIGGGPNGKLATDKTQCYDPSTNKWSLKAAMPVEAKCINAVSFRDRIYVVGGAMRALYAYSPLEDSWCLVTQLSHERASCGIAPCNNRLYITGGRDEKNEVIATVLCWDPEAQKLTEECVLPRGVSHHGSVTIRKSYTHIRRIVPGAVSV

SEQ ID NO: 761349 - protein, 299 aa, Homo sapiens; identical to SEQ ID NO: 761348

SEQ ID NO: 761350 - protein, 299 aa, Homo sapiens; identical to SEQ ID NO: 761348

SEQ ID NO: 761351 - protein, 299 aa, Homo sapiens; identical to SEQ ID NO: 761348

SEQ ID NO: 761352 - protein, 312 aa, Homo sapiens
MPEETQTQDQPMEEEEVETFAFQAEIAQLMSLIINTFYSNKEIFLRELISNSSDALDKIWYESLTDPSKLDSGKELHINLIPNKQDQTLTIVDTGIGMTKADLINNLGTIAKSGTKAFMEALQAGADISMIGQFGVSFYSAYLVAEKVTVITKHNDDEQYAWESSAGGSFTVRTDTGERMGRGTKVILHLKEDQTEYLEEQRIKEIVKKHSQLIGYPITLFVEKECDKEVSDDETEEKEDKEEEKEKEEKESKDKPEIEDVGSDEEEEKKDGDKKKKKKTKEKYIDQEELNKTKPIWTRNPDDITNEEYGEF

SEQ ID NO: 761353 - protein, 1031 aa, Homo sapiens
MSRRKQAKPQHINSEEDQGEQQPQQQTPEFADAAPAAPAAGELGAPVNHPGNDEVASEDEATVKRLRREETHVCEKCCAEFFSISEFLEHKKNCTKNPPVLIMNDSEGPVPSEDFSGAVLSHQPTSPGSKDCHRENGGSSEDMKEKPDAESVVYLKTETALPPTPQDISYLAKGKVANTNVTLQALRGTKVAVNQRSADALPAPVPGANSIPWVLEQILCLQQQQLQQIQLTEQIRIQVNMWASHALHSSGAGADTLKTLGSHMSQQVSAAVALLSQKAGSQGLSLDALKQAKLPHANIPSATSSLSPGLAPFTLKPDGTRVLPNVMSRLPSALLPQAPGSVLFQSPFSTVALDTSKKGKGKPPNISAVDVKPKDEAALYKHKCKYCSKVFGTDSSLQIHLRSHTGERPFVCSVCGHRFTTKGNLKVHFHRHPQVKANPQLFAEFQDKVAAGNGIPYALSVPDPIDEPSLSLDSKPVLVTTSVGLPQNLSSGTNPKDLTGGSLPGDLQPGPSPESEGGPLSQGSETLKLQQLVENIDKATTDPNECLICHRVLSCQSSLKMHYRTHTGERPFQCKICGRAFSTKGNLKTHLGVHRTNTSIKTQHSCPICQKKFTNAVMLQQHIRMHMGGQIPNTPLPENPCDFTGSEPMTVGENGSTGAICHDDVIESIDVEEVSSQEAPSSSSKVPTPLPSIHSASPTLGFAMMASLDAPGKVGPAPFNLQRQGSRENGSVESDGLTNDSSSLMGDQEYQSRSPDILETTSFQALSPANSQAESIKSKSPDAGSKAESSENSRTEMEGRSSLPSTFIRAPPTYVKVEVPGTFVGPSTLSPGMTPLLAAQPRRQAKQHGCTRCGKNFSSASALQIHERTHTGEKPFVCNICGRAFTTKGNLKVHYMTHGANNNSARRGRKLAIENTMALLGTDGKRVSEIFPKEILAPSVNVDPVVWNQYTSMLNGGLAVKTNEISVIQSGGVPTLPVSLGATSVVNNATVSKMDGSQSGISADVEKPSATDGVPKHQFPHFLEENKIAVS

SEQ ID NO: 761354 - protein, 1053 aa, Homo sapiens
MSRRKQAKPQHINSEEDQGEQQPQQQTPEFADAAPAAPAAGELGAPVNHPGNDEVASEDEATVKRLRREETHVCEKCCAEFFSISEFLEHKKNCTKNPPVLIMNDSEGPVPSEDFSGAVLSHQPTSPGSKDCHRENGGSSEDMKEKPDAESVVYLKTETALPPTPQDISYLAKGKVANTNVTLQALRGTKVAVNQRSADALPAPVPGANSIPWVLEQILCLQQQQLQQIQLTEQIRIQVNMWASHALHSSGAGADTLKTLGSHMSQQVSAAVALLSQKAGSQGLSLDALKQAKLPHANIPSATSSLSPGLAPFTLKPDGTRVLPNVMSRLPSALLPQAPGSVLFQSPFSTVALDTSKKGKGKPPNISAVDVKPKDEAALYKHKCKYCSKVFGTDSSLQIHLRSHTGERPFVCSVCGHRFTTKGNLKVHFHRHPQVKANPQLFAEFQDKVAAGNGIPYALSVPDPIDEPSLSLDSKPVLVTTSVGLPQNLSSGTNPKDLTGGSLPGDLQPGPSPESEGGPTLPGVGPNYNSPRAGGFQGSGTPEPGSETLKLQQLVENIDKATTDPNECLICHRVLSCQSSLKMHYRTHTGERPFQCKICGRAFSTKGNLKTHLGVHRTNTSIKTQHSCPICQKKFTNAVMLQQHIRMHMGGQIPNTPLPENPCDFTGSEPMTVGENGSTGAICHDDVIESIDVEEVSSQEAPSSSSKVPTPLPSIHSASPTLGFAMMASLDAPGKVGPAPFNLQRQGSRENGSVESDGLTNDSSSLMGDQEYQSRSPDILETTSFQALSPANSQAESIKSKSPDAGSKAESSENSRTEMEGRSSLPSTFIRAPPTYVKVEVPGTFVGPSTLSPGMTPLLAAQPRRQAKQHGCTRCGKNFSSASALQIHERTHTGEKPFVCNICGRAFTTKGNLKVHYMTHGANNNSARRGRKLAIENTMALLGTDGKRVSEIFPKEILAPSVNVDPVVWNQYTSMLNGGLAVKTNEISVIQSGGVPTLPVSLGATSVVNNATVSKMDGSQSGISADVEKPSATDGVPKHQFPHFLEENKIAVS

SEQ ID NO: 761355 - protein, 512 aa, Homo sapiens
MERARKFSGSGLAMGLGSASASAWRRASQRWAWPLRSLRPGGDAREPRKIILHKGSTGLGFNIVGGEDGEGIFVSFILAGGPADLSGELRRGDRILSVNGVNLRNATHEQAAAALKRAGQSVTIVAQYRPEEYSRFESKIHDLREQMMNSSMSSGSGSLRTSEKRSLYVRALFDYDRTRDSCLPSQGLSFSYGDILHVINASDDEWWQARLVTPHGESEQIGVIPSKKRVEKKERARLKTVKFHARTGMIESNRSIKTKRKKSFRLSRKFPFYKSKENMAQESSIQEQGVTSNTSDSESSSKGQEDAILSYEPVTRQEIHYARPVIILGPMKDRVNDDLISEFPHKFGSCVPHTTRPRRDNEVDGQDYHFVVSREQMEKDIQDNKFIEAGQFNDNLYGTSIQSVRAVAERGKHCILDVSGNAIKRLQQAQLYPIAIFIKPKSIEALMEMNRRQTYEQANKIYDKAMKLEQEFGEYFTAIVQGDSLEEIYNKIKQIIEDQSGHYIWVPSPEKL

SEQ ID NO: 761356 - protein, 923 aa, Homo sapiens
HPFSASAPASSLPLGLGPEATTGDTEPPVLEGEPWVRGSVGAEAPGRPPGPRPRSARAPPRVPPPSWSEQCECAREPGGGGGGGGGGGGGVESGVGWGVRAAGGSAMHKHQHCCKCPECYEVTRLAALRRLEPPGYGDWQVPDPYGPGGGNGASAGYGGYSSQTLPSQAGATPTPRTKAKLIPTGRDVGPVPPKPVPGKSTPKLNGSGPSWWPECTCTNRDWYEQVNGSDGMFKYEEIVLERGNSGLGFSIAGGIDNPHVPDDPGIFITKIIPGGAAAMDGRLGVNDCVLRVNEVEVSEVVHSRAVEALKEAGPVVRLVVRRRQPPPETIMEVNLLKGPKGLGFSIAGGIGNQHIPGDNSIYITKIIEGGAAQKDGRLQIGDRLLAVNNTNLQDVRHEEAVASLKNTSDMVYLKVAKPGSLHLNDMYAPPDYASTFTALADNHISHNSSLGYLGAVESKVSYPAPPQVPPTRYSPIPRHMLAEEDFTREPRKIILHKGSTGLGFNIVGGEDGEGIFVSFILAGGPADLSGELRRGDRILSVNGVNLRNATHEQAAAALKRAGQSVTIVAQYRPEEYSRFESKIHDLREQMMNSSMSSGSGSLRTSEKRSLYVRALFDYDRTRDSCLPSQGLSFSYGDILHVINASDDEWWQARLVTPHGESEQIGVIPSKKRVEKKERARLKTVKFHARTGMIESNRDFPGLSDDYYGAKNLKGQEDAILSYEPVTRQEIHYARPVIILGPMKDRVNDDLISEFPHKFGSCVPHTTRPRRDNEVDGQDYHFVVSREQMEKDIQDNKFIEAGQFNDNLYGTSIQSVRAVAERGKHCILDVSGNAIKRLQQAQLYPIAIFIKPKSIEALMEMNRRQTYEQANKIYDKAMKLEQEFGEYFTAIVQGDSLEEIYNKIKQIIEDQSGHYIWVPSPEKL

SEQ ID NO: 761357 - protein, 923 aa, Homo sapiens; identical to SEQ ID NO: 761356

SEQ ID NO: 761358 - protein, 923 aa, Homo sapiens; identical to SEQ ID NO: 761356

SEQ ID NO: 761359 - protein, 402 aa, Homo sapiens
TEGLAGAGAFSALDLDSDPAPEYSRFESKIHDLREQMMNSSMSSGSGSLRTSEKRSLYVRALFDYDRTRDSCLPSQGLSFSYGDILHVINASDDEWWQARLVTPHGESEQIGVIPSKKRVEKKERARLKTVKFHARTGMIESNRSIKTKRKKSFRLSRKFPFYKSKENMAQESSIQEQGVTSNTSDSESSSKGQEDAILSYEPVTRQEIHYARPVIILGPMKDRVNDDLISEFPHKFGSCVPHTTRPRRDNEVDGQDYHFVVSREQMEKDIQDNKFIEAGQFNDNLYGTSIQSVRAVAERGKHCILDVSGNAIKRLQQAQLYPIAIFIKPKSIEALMEMNRRQTYEQANKIYDKAMKLEQEFGEYFTAIVQGDSLEEIYNKIKQIIEDQSGHYIWVPSPEKL

SEQ ID NO: 761360 - protein, 119 aa, Homo sapiens [sequence omitted]

SEQ ID NO: 761361 - protein, 923 aa, Homo sapiens; identical to SEQ ID NO: 761356

SEQ ID NO: 761362 - protein, 923 aa, Homo sapiens; identical to SEQ ID NO: 761356

SEQ ID NO: 761363 - protein, 968 aa, Homo sapiens
HPFSASAPASSLPLGLGPEATTGDTEPPVLEGEPWVRGSVGAEAPGRPPGPRPRSARAPPRVPPPSWSEQCECAREPGGGGGGGGGGGGGVESGVGWGVRAAGGSAMHKHQHCCKCPECYEVTRLAALRRLEPPGYGDWQVPDPYGPGGGNGASAGYGGYSSQTLPSQAGATPTPRTKAKLIPTGRDVGPVPPKPVPGKSTPKLNGSGPSWWPECTCTNRDWYEQVNGSDGMFKYEEIVLERGNSGLGFSIAGGIDNPHVPDDPGIFITKIIPGGAAAMDGRLGVNDCVLRVNEVEVSEVVHSRAVEALKEAGPVVRLVVRRRQPPPETIMEVNLLKGPKGLGFSIAGGIGNQHIPGDNSIYITKIIEGGAAQKDGRLQIGDRLLAVNNTNLQDVRHEEAVASLKNTSDMVYLKVAKPGSLHLNDMYAPPDYASTFTALADNHISHNSSLGYLGAVESKVSYPAPPQVPPTRYSPIPRHMLAEEDFTREPRKIILHKGSTGLGFNIVGGEDGEGIFVSFILAGGPADLSGELRRGDRILSVNGVNLRNATHEQAAAALKRAGQSVTIVAQYRPEEYSRFESKIHDLREQMMNSSMSSGSGSLRTSEKRSLYVRALFDYDRTRDSCLPSQGLSFSYGDILHVINASDDEWWQARLVTPHGESEQIGVIPSKKRVEKKERARLKTVKFHARTGMIESNRSIKTKRKKSFRLSRKFPFYKSKENMAQESSIQEQGVTSNTSDSESSSKGQEDAILSYEPVTRQEIHYARPVIILGPMKDRVNDDLISEFPHKFGSCVPHTTRPRRDNEVDGQDYHFVVSREQMEKDIQDNKFIEAGQFNDNLYGTSIQSVRAVAERGKHCILDVSGNAIKRLQQAQLYPIAIFIKPKSIEALMEMNRRQTYEQANKIYDKAMKLEQEFGEYFTAIVQGDSLEEIYNKIKQIIETAAFPGQYNGLKAKRDKVTADCDSGEEG

SEQ ID NO: 761364 - protein, 712 aa, Homo sapiens
HPFSASAPASSLPLGLGPEATTGDTEPPVLEGEPWVRGSVGAEAPGRPPGPRPRSARAPPRVPPPSWSEQCECAREPGGGGGGGGGGGGGVESGVGWGVRAAGGSAMHKHQHCCKCPECYEVTRLAALRRLEPPGYGDWQVPDPYGPGGGNGASAGYGGYSSQTLPSQAGATPTPRTKAKLIPTGRDVGPVPPKPVPGKSTPKLNGSGPSWWPECTCTNRDWYEQVNGSDGMFKYEEIVLERGNSGLGFSIAGGIDNPHVPDDPGIFITKIIPGGAAAMDGRLGVNDCVLRVNEVEVSEVVHSRAVEALKEAGPVVRLVVRRRQPPPETIMEVNLLKGPKGLGFSIAGGIGNQHIPGDNSIYITKIIEGGAAQKDGRLQIGDRLLAVNNTNLQDVRHEEAVASLKNTSDMVYLKVAKPGSLHLNDMYAPPDYASTFTALADNHISHNSSLGYLGAVESKVSYPAPPQVPPTRYSPIPRHMLAEEDFTREPRKIILHKGSTGLGFNIVGGEDGEGIFVSFILAGGPADLSGELRRGDRILSVNGVNLRNATHEQAAAALKRAGQSVTIVAQYRPEEYSRFESKIHDLREQMMNSSMSSGSGSLRTSEKRSLYVRALFDYDRTRDSCLPSQGLSFSYGDILHVINASDDEWWQARLVTPHGESEQIGVIPSKKRVEKKERARLKTVKFHARTGMIESNRVSGDPQGNQPVGKEG

SEQ ID NO: 761365 - protein, 493 aa, Homo sapiens
GDSPGPLHWESRMGALARALPSILLALLLTSTPEALGANPGLVARITDKGLQYAAQEGLLALQSELLRITLPDFTGDLRIPHVGRGRYEFHSLNIHSCELLHSALRPVPGQGLSLSISDSSIRVQGRWKVRKSFFKLQGSFDVSVKGISISVNLLLGSESSGRPTVTASSCSSDIADVEVDMSGDLGWLLNLFHNQIESKFQKVLESRICEMIQKSVSSDLQPYLQTLPVTTEIDSFADIDYSLVEAPRATAQMLEVMFKGEIFHRNHRSPVTLLAAVMSLPEEHNKMVYFAISDYVFNTASLVYHEEGYLNFSITDDMIPPDSNIRLTTKSFRPFVPRLARLYPNMNLELQGSVPSAPLLNFSPGNLSVDPYMEIDAFVLLPSSSKEPVFRLSVATNVSATLTFNTSKITGFLKPGKVKVELKESKVGLFNAELLEALLNYYILNTFYPKFNDKLAEGFPLPLLKRVQLYDLGLQIHKDFLFLGANVQYMRV

SEQ ID NO: 761366 - protein, 282 aa, Homo sapiens
MIQKSVSSDLQPYLQTLPVTTEIDSFADIDYSLVEAPRATAQMLEVMFKGEIFHRNHRSPVTLLAAVMSLPEEHNKMVYFAISDYVFNTASLVYHEEGYLNFSITDDMIPPDSNIRLTTKSFRPFVPRLARLYPNMNLELQGSVPSAPLLNFSPGNLSVDPYMEIDAFVLLPSSSKEPVFRLSVATNVSATLTFNTSKITGFLKPGKVKVELKESKVGLFNAELLEALLNYYILNTFYPKFNDKLAEGFPLPLLKRVQLYDLGLQIHKDFLFLGANVQYMRV

SEQ ID NO: 761367 - protein, 368 aa, Homo sapiens
GDSPGPLHWESRMGALARALPSILLALLLTSTPEALGANPGLVARITDKGLQYAAQEGLLALQSELLRITLPDFTGDLRIPHVGRGRYEFHSLNIHSCELLHSALRPVPGQGLSLSISDSSIRVQGRWKVRKSFFKLQGSFDVSVKGISISVNLLLGSESSGRPTVTASSCSSDIADVEVDMSGDLGWLLNLFHNQIESKFQKVLESRICEMIQKSVSSDLQPYLQTLPVTTEIDSFADIDYSLVEAPRATAQMLEVMFKGEIFHRNHRSPVTLLAAVMSLPEEHNKMVYFAISDYVFNTASLVYHEEGYLNFSITDDMIPPDSNIRLTTKSFRPFVPRVRSPLVPHECRPSLLDSRGFSLKPLHLSA

SEQ ID NO: 761368 - protein, 258 aa, Homo sapiens
LARDIFSKSEENQVYVELCRRQPLVSAFRFGVRERSALPAAVLNSGARVWPSASALGLAAPPKDAEDRARPASGLRGARVLSEGREPGASLRVQVRPGLDVAAPGVCSLSCPSPPRSSAHPGPRGPLFPALLAALARPHGAEVPGRRARARAGTGFRFFPGPDPRPRTRPPAHARGAHAHRGGSAWKRSPTSSPSCSEGNGESAGNDPNCQPAPLQPALALLKTSSSHQSLASPYPESPAQFNISSENLPVRKENIHK

SEQ ID NO: 761369 - protein, 258 aa, Homo sapiens; identical to SEQ ID NO: 761368

SEQ ID NO: 761370 - protein, 358 aa, Homo sapiens
MGNASNDSQSEDCETRQWLPPGESPAISSVMFSAGVLGNLIALALLARRWRGDVGCSAGRRSSLSLFHVLVTELVFTDLLGTCLISPVVLASYARNQTLVALAPESRACTYFAFAMTFFSLATMLMLFAMALERYLSIGHPYFYQRRVSRSGGLAVLPVIYAVSLLFCSLPLLDYGQYVQYCPGTWCFIRHGRTAYLQLYATLLLLLIVSVLACNFSVILNLIRMHRRSRRSRCGPSLGSGRGGPGARRRGERVSMAEETDHLILLAIMTITFAVCSLPFTIFAYMNETSSRKEKWDLQALRFLSINSIIDPWVFAILRPPVLRLMRSVLCCRISLRTQDATQTSCSTQSDASKQADL

SEQ ID NO: 761371 - protein, 358 aa, Homo sapiens; identical to SEQ ID NO: 761370

SEQ ID NO: 761372 - protein, 578 aa, Homo sapiens
RKEFEPLPQPDHLCWLLGQAPRQIQFETQTLGPRRRWWARRKVPLPVAMGSNSGQAGRHIYKSLADDGPFDSVEPPKRPTSRLIMHSMAMFGREFCYAVEAAYVTPVLLSVGLPSSLYSIVWFLSPILGFLLQPVVGSASDHCRSRWGRRRPYILTLGVMMLVGMALYLNGATVVAALIANPRRKLVWAISVTMIGVVLFDFAADFIDGPIKAYLFDVCSHQDKEKGLHYHALFTGFGGALGYLLGAIDWAHLELGRLLGTEFQVMFFFSALVLTLCFTVHLCSISEAPLTEVAKGIPPQQTPQDPPLSSDGMYEYGSIEKVKNGYVNPELAMQGAKNKNHAEQTRRAMTLKSLLRALVNMPPHYRYLCISHLIGWTAFLSNMLFFTDFMGQIVYRGDPYSAHNSTEFLIYERGVEVGCWGFCINSVFSSLYSYFQKVLVSYIGLKGLYFTGYLLFGLGTGFIGLFPNVYSTLVLCSLFGVMSSTLYTVPFNLITEYHREEEKERQQAPGGDPDNSVRGKGMDCATLTCMVQLAQILVGGGLGFLVNTAGTVVVVVITASAVALIGCCFVALFVRYVD

SEQ ID NO: 761373 - protein, 519 aa, Homo sapiens
RKEFEPLPQPDHLCWLLGQAPRQIQFETQTLGPRRRWWARRKVPLPVAMGSNSGQAGRHIYKSLADDGPFDSVEPPKRPTSRLIMHSMAMFGREFCYAVEAAYVTPVLLSVGLPSSLYSIVWFLSPILGFLLQPVVGSASDHCRSRWGRRRPYILTLGVMMLVGMALYLNGATVVAGFGGALGYLLGAIDWAHLELGRLLGTEFQVMFFFSALVLTLCFTVHLCSISEAPLTEVAKGIPPQQTPQDPPLSSDGMYEYGSIEKVKNGYVNPELAMQGAKNKNHAEQTRRAMTLKSLLRALVNMPPHYRYLCISHLIGWTAFLSNMLFFTDFMGQIVYRGDPYSAHNSTEFLIYERGVEVGCWGFCINSVFSSLYSYFQKVLVSYIGLKGLYFTGYLLFGLGTGFIGLFPNVYSTLVLCSLFGVMSSTLYTVPFNLITEYHREEEKERQQAPGGDPDNSVRGKGMDCATLTCMVQLAQILVGGGLGFLVNTAGTVVVVVITASAVALIGCCFVALFVRYVD

SEQ ID NO: 761374 - protein, 100 aa, Homo sapiens
VTPVLLSVGLPSSLYSIVWFLSPILGFLLQPVVGSASDHCRSRWGRRRPYILTLGVMMLVGMALYLNGATVVAGKWAAQGGQTGICVLVCTSAGGGCSCV

SEQ ID NO: 761375 - protein, 291 aa, Homo sapiens
RKEFEPLPQPDHLCWLLGQAPRQIQFETQTLGPRRRWWARRKVPLPVAMGSNSGQAGRHIYKSLADDGPFDSVEPPKRPTSRLIMHSMAMFGREFCYAVEAAYVTPVLLSVGLPSSLYSIVWFLSPILGFLLQPVVGSASDHCRSRWGRRRPYILTLGVMMLVGMALYLNGATVVAALIANPRRKLVWAISVTMIGVVLFDFAADFIDGPIKAYLFDVCSHQDKEKGLHYHALFTDSQGNDIKVTAESTGEHASSLPLPLHQPPHWMDGLPVQHAVLHRFHGPDCVPRGSL

SEQ ID NO: 761376 - protein, 127 aa, Homo sapiens
MSINIYWKANSAPHCPCFCTTAAELSSYDQGCIIHEAKGIYYLAGHRKILLTCALNDSSLRSNGGSVLPLQRQQAPGGDPDNSVRGKGMDCATLTCMVQLAQILVGGGLGFLVNTAGTVVVVVITAS

SEQ ID NO: 761377 - protein, 101 aa, Homo sapiens
ICHPLRYTIIMSHRACIILAMGTSFFGCIQATFLTTLTFQLPYCVPNEVDYYFCDIPVMLKLACADTSALEMVGFISVGLMPLSCFLLILTSYSGIVFSIL

SEQ ID NO: 761378 - protein, 100 aa, Homo sapiens
AEAPAVTCAAFFRWNQKVPEPEPGVQVFSVAFGICSPSQNSQDRRYRREMESRILKTYEKYGSDHLDRASHPPLEPRRLLGVAALPRVRMRRSATTGPLA

SEQ ID NO: 761379 - protein, 643 aa, Homo sapiens
PSRDCASPPRSGLPERAFGPRTPRAPRRRRRRLLLSPPPRPPPPLDREPRAPGPWLCPSRAGTAQDPARIRERRGRVAGGAAGPAMELRARGWWLLCAAAALVACARGDPASKSRSCGEVRQIYGAKGFSLSDVPQAEISGEHLRICPQGYTCCTSEMEENLANRSHAELETALRDSSRVLQAMLATQLRSFDDHFQHLLNDSERTLQATFPGAFGELYTQNARAFRDLYSELRLYYRGANLHLEETLAEFWARLLERLFKQLHPQLLLPDDYLDCLGKQAEALRPFGEAPRELRLRATRAFVAARSFVQGLGVASDVVRKVAQVPLGPECSRAVMKLVYCAHCLGVPGARPCPDYCRNVLKGCLANQADLDAEWRNLLDSMVLITDKFWGTSGVESVIGSVHTWLAEAINALQDNRDTLTAKVIQGCGNPKVNPQGPGPEEKRRRGKLAPRERPPSGTLEKLVSEAKAQLRDVQDFWISLPGTLCSEKMALSTASDDRCWNGMARGRYLPEVMGDGLANQINNPEVEVDITKPDMTIRQQIMQLKIMTNRLRSAYNGNDVDFQDASDDGSGSGSGDGCLDDLCGRKVSRKSSSSRTPLTHALPGLSEQEGQKTSAASCPQPPTFLLPLLLFLALTVARPRWR

SEQ ID NO: 761380 - protein, 643 aa, Homo sapiens; identical to SEQ ID NO: 761379

SEQ ID NO: 761381 - protein, 594 aa, Homo sapiens
AAAALPGVAAARVSRAPGGPQPALVPRWLFASCEPFRPAPLRRLSPARAPAPRARAPPGAAGAAAAKGVPRPPPRWKPGPSPSPSHWPFPTGEHLRICPQGYTCCTSEMEENLANRSHAELETALRDSSRVLQAMLATQLRSFDDHFQHLLNDSERTLQATFPGAFGELYTQNARAFRDLYSELRLYYRGANLHLEETLAEFWARLLERLFKQLHPQLLLPDDYLDCLGKQAEALRPFGEAPRELRLRATRAFVAARSFVQGLGVASDVVRKVAQVPLGPECSRAVMKLVYCAHCLGVPGARPCPDYCRNVLKGCLANQADLDAEWRNLLDSMVLITDKFWGTSGVESVIGSVHTWLAEAINALQDNRDTLTAKVIQGCGNPKVNPQGPGPEEKRRRGKLAPRERPPSGTLEKLVSEAKAQLRDVQDFWISLPGTLCSEKMALSTASDDRCWNGMARGRYLPEVMGDGLANQINNPEVEVDITKPDMTIRQQIMQLKIMTNRLRSAYNGNDVDFQDASDDGSGSGSGDGCLDDLCGRKVSRKSSSSRTPLTHALPGLSEQEGQKTSAASCPQPPTFLLPLLLFLALTVARPRWR

SEQ ID NO: 761382 - protein, 518 aa, Homo sapiens
CHLGSSAGTCHPLPHGEHLRICPQGYTCCTSEMEENLANRSHAELETALRDSSRVLQAMLATQLRSFDDHFQHLLNDSERTLQATFPGAFGELYTQNARAFRDLYSELRLYYRGANLHLEETLAEFWARLLERLFKQLHPQLLLPDDYLDCLGKQAEALRPFGEAPRELRLRATRAFVAARSFVQGLGVASDVVRKVAQVPLGPECSRAVMKLVYCAHCLGVPGARPCPDYCRNVLKGCLANQADLDAEWRNLLDSMVLITDKFWGTSGVESVIGSVHTWLAEAINALQDNRDTLTAKVIQGCGNPKVNPQGPGPEEKRRRGKLAPRERPPSGTLEKLVSEAKAQLRDVQDFWISLPGTLCSEKMALSTASDDRCWNGMARGRYLPEVMGDGLANQINNPEVEVDITKPDMTIRQQIMQLKIMTNRLRSAYNGNDVDFQDASDDGSGSGSGDGCLDDLCGRKVSRKSSSSRTPLTHALPGLSEQEGQKTSAASCPQPPTFLLPLLLFLALTVARPRWR

SEQ ID NO: 761383 - protein, 624 aa, Homo sapiens
PSRDCASPPRSGLPERAFGPRTPRAPGPWLCPSRAGTAQDPARIRERRGRVAGGAAGPAMELRARGWWLLCAAAALVACARGDPASKSRSCGEVRQIYGAKGFSLSDVPQAEISGEHLRICPQGYTCCTSEMEENLANRSHAELETALRDSSRVLQAMLATQLRSFDDHFQHLLNDSERTLQATFPGAFGELYTQNARAFRDLYSELRLYYRGANLHLEETLAEFWARLLERLFKQLHPQLLLPDDYLDCLGKQAEALRPFGEAPRELRLRATRAFVAARSFVQGLGVASDVVRKVAQVPLGPECSRAVMKLVYCAHCLGVPGARPCPDYCRNVLKGCLANQADLDAEWRNLLDSMVLITDKFWGTSGVESVIGSVHTWLAEAINALQDNRDTLTAKDPAVSLQVIQGCGNPKVNPQGPGPEEKRRRGKLAPRERPPSGTLEKLVSEAKAQLRDVQDFWISLPGTLCSEKMALSTASDDRCWNGMARGRYLPEVMGDGLANQINNPEVEVDITKPDMTIRQQIMQLKIMTNRLRSAYNGNDVDFQDASDDGSGSGSGDGCLDDLCGRKVSRKSSSSRTPLTHALPGLSEQEGQKTSAASCPQPPTFLLPLLLFLALTVARPRWR

SEQ ID NO: 761384 - protein, 310 aa, Homo sapiens
PSRDCASPPRSGLPERAFGPRTPRAPGPWLCPSRAGTAQDPARIRERRGRVAGGAAGPAMELRARGWWLLCAAAALVACARGDPASKSRSCGEVRQIYGAKGFSLSDVPQAEISGEHLRICPQGYTCCTSEMEENLANRDVQDFWISLPGTLCSEKMALSTASDDRCWNGMARGRYLPEVMGDGLANQINNPEVEVDITKPDMTIRQQIMQLKIMTNRLRSAYNGNDVDFQDASDDGSGSGSGDGCLDDLCGRKVSRKSSSSRTPLTHALPGLSEQEGQKTSAASCPQPPTFLLPLLLFLALTVARPRWR

SEQ ID NO: 761385 - protein, 592 aa, Homo sapiens
PSRDCASPPRSGLPERAFGPRTPRAPGPWLCPSRAGTAQDPARIRERRGRVAGGAAGPAMELRARGWWLLCAAAALVACARGDPASKSRSCGEVRQIYGAKGFSLSDVPQAEISGEHLRICPQGYTCCTSEMEENLANRSHAELETALRDSSRVLQAMLATQLRSFDDHFQHLLNDSERTLQATFPGAFGELYTQNARAFRDLYSELRLYYRGANLHLEETLAEFWARLLERLFKQLHPQLLLPDDYLDCLGKQAEALRPFGEAPRELRLRATRAFVAARSFVQGLGVASDVVRKVAQVPLGPECSRAVMKLVYCAHCLGVPGARPCPDYCRNVLKGCLANQADLDAEWRNLLDSMVLITDKFWGTSGVESVIGSVHTWLAEAINALQDNRDTLTAKVIQGCGNPKVNPQGPGPEEKRRRGKLAPRERPPSGTLEKLVSEAKAQLRDVQDFWISLPGTLCSEKMALSTASDDRCWNGMARGRYLPEVMGDGLANQINNPEVEVDITKPDMTIRQQIMQLKIMTNRLRSAYNGNDVDFQDASDDGSGSGSGDGCLDDLCGRKVSRKSSSSRTPLTHALPGLSEQEGQKTSELS

SEQ ID NO: 761386 - protein, 526 aa, Homo sapiens
PSRDCASPPRSGLPERAFGPRTPRAPGPWLCPSRAGTAQDPARIRERRGRVAGGAAGPAMELRARGWWLLCAAAALVACARGDPASKSRSCGEVRQIYGAKGFSLSDVPQAEISGEHLRICPQGYTCCTSEMEENLANRSHAELETALRDSSRVLQAMLATQLRSFDDHFQHLLNDSERTLQATFPGAFGELYTQNARAFRDLYSELRLYYRGANLHLEETLAEFWARLLERLFKQLHPQLLLPDDYLDCLGKQAEALRPFGEAPRELRLRATRAFVAARSFVQGLGVASDVVRKVAQVPLGPECSRAVMKLVYCAHCLGVPGARPCPDYCRNVLKGCLANQADLDAEWRNLLDSMVLITDKFWGTSGVESVIGSVHTWLAEAINALQDNRDTLTAKVIQGCGNPKVNPQGPGPEEKRRRGKLAPRERPPSGTLEKLVSEAKAQLRDVQDFWISLPGTLCSEKMALSTASDDRCWNGMARGRYLPEVMGDGLANQINNPEVEVDITKPDMTIRQSCPEPTDPEEAA

SEQ ID NO: 761387 - protein, 561 aa, Homo sapiens
PSRDCASPPRSGLPERAFGPRTPRAPGPWLCPSRAGTAQDPARIRERRGRVAGGAAGPAMELRARGWWLLCAAAALVACARGDPASKSRSCGEVRQIYGAKGFSLSDVPQAEISGEHLRICPQGYTCCTSEMEENLANRSHAELETALRDSSRVLQAMLATQLRSFDDHFQHLLNDSERTLQATFPGAFGELYTQNARAFRDLYSELRLYYRGANLHLEETLAEFWARLLERLFKQLHPQLLLPDDYLDCLGKQAEALRPFGEAPRELRLRATRAFVAARSFVQGLGVASDVVRKVAQVPLGPECSRAVMKLVYCAHCLGVPGARPCPDYCRNVLKGCLANQADLDAEWRNLLDSMVLITDKFWGTSGVESVIGSVHTWLAEAINALQDNRDTLTAKVIQGCGNPKVNPQGPGPEEKRRRGKLAPRERPPSGTLEKLVSEAKAQLRDVQDFWISLPGTLCSEKMALSTASDDRCWNGMARGRYLPEVMGDGLANQINNPEVEVDITKPDMTIRQQIMQLKIMTNRLRSAYNGNDVDFQDASEGRAWPGGQGARVGGGATGV

SEQ ID NO: 761388 - protein, 617 aa, Homo sapiens
PSRDCASPPRSGLPERAFGPRTPRAPGPWLCPSRAGTAQDPARIRERRGRVAGGAAGPAMELRARGWWLLCAAAALVACARGDPASKSRSCGEVRQIYGAKGFSLSDVPQAEISGEHLRICPQGYTCCTSEMEENLANRSHAELETALRDSSRVLQAMLATQLRSFDDHFQHLLNDSERTLQATFPGAFGELYTQNARAFRDLYSELRLYYRGANLHLEETLAEFWARLLERLFKQLHPQLLLPDDYLDCLGKQAEALRPFGEAPRELRLRATRAFVAARSFVQGLGVASDVVRKVAQVPLGPECSRAVMKLVYCAHCLGVPGARPCPDYCRNVLKGCLANQADLDAEWRNLLDSMVLITDKFWGTSGVESVIGSVHTWLAEAINALQDNRDTLTAKVIQGCGNPKVNPQGPGPEEKRRRGKLAPRERPPSGTLEKLVSEAKAQLRDVQDFWISLPGTLCSEKMALSTASDDRCWNGMARGRYLPEVMGDGLANQINNPEVEVDITKPDMTIRQQIMQLKIMTNRLRSAYNGNDVDFQDASDDGSGSGSGDGCLDDLCGRKVSRKSSSSRTPLTHALPGLSEQEGQKTSAASCPQPPTFLLPLLLFLALTVARPRWR

SEQ ID NO: 761389 - protein, 508 aa, Homo sapiens
MHDLKGEHLRICPQGYTCCTSEMEENLANRSHAELETALRDSSRVLQAMLATQLRSFDDHFQHLLNDSERTLQATFPGAFGELYTQNARAFRDLYSELRLYYRGANLHLEETLAEFWARLLERLFKQLHPQLLLPDDYLDCLGKQAEALRPFGEAPRELRLRATRAFVAARSFVQGLGVASDVVRKVAQVPLGPECSRAVMKLVYCAHCLGVPGARPCPDYCRNVLKGCLANQADLDAEWRNLLDSMVLITDKFWGTSGVESVIGSVHTWLAEAINALQDNRDTLTAKVIQGCGNPKVNPQGPGPEEKRRRGKLAPRERPPSGTLEKLVSEAKAQLRDVQDFWISLPGTLCSEKMALSTASDDRCWNGMARGRYLPEVMGDGLANQINNPEVEVDITKPDMTIRQQIMQLKIMTNRLRSAYNGNDVDFQDASDDGSGSGSGDGCLDDLCGRKVSRKSSSSRTPLTHALPGLSEQEGQKTSAASCPQPPTFLLPLLLFLALTVARPRWR

SEQ ID NO: 761390 - protein, 617 aa, Homo sapiens; identical to SEQ ID NO: 761388

SEQ ID NO: 761391 - protein, 617 aa, Homo sapiens; identical to SEQ ID NO: 761388

SEQ ID NO: 761392 - protein, 210 aa, Homo sapiens [sequence omitted]

SEQ ID NO: 761393 - protein, 617 aa, Homo sapiens; identical to SEQ ID NO: 761388

SEQ ID NO: 761394 - protein, 152 aa, Homo sapiens
MEEYERLASELLEWIRRTIPWLENRTPEKTMQAMQKKLEDFRDYRRKHKPPKVQEKCQLEINFNTLQTKLRISNRPAFMPSEGKMVSDIAGAWQRLEQAEKGYEEWLLNEIRRLERLEHLAEKFRQKASTHETWAYGKEQILLQKCAKCGPA

SEQ ID NO: 761395 - protein, 612 aa, Homo sapiens
MEEYERLASELLEWIRRTIPWLENRTPEKTMQAMQKKLEDFRDYRRKHKPPKVQEKCQLEINFNTLQTKLRISNRPAFMPSEGKMVSDIAGAWQRLEQAEKGYEEWLLNEIRRLERLEHLAEKFRQKASTHETWAYGKEQILLQKDYESASLTEVRALLRKHEAFESDLAAHQDRVEQIAAIAQELNELDYHDAVNVNDRCQKICDQWDRLGTLTQKRREALERMEKLLETIDQLHLEFAKRAAPFNNWMEGAMEDLQDMFIVHSIEEIQSLITAHEQFKATLPEADGERQSIMAIQNEVEKVIQSYNIRISSSNPYSTVTMDELRTKWDKVKQLVPIRDQSLQEELARQHANERLRRQFAAQANAIGPWIQNKMEEIARSSIQITGALEDQMNQLKQYEHNIINYKNNIDKLEGDHQLIQEALVFDNKHTNYTMEHIRVGWELLLTTIARTINEVETQILTRDAKGITQEQMNEFRASFNHFDRRKNGLMDHEDFRACLISMGYDLGEAEFARIMTLVDPNGQGTVTFQSFIDFMTRETADTDTAEQVIASFRILASDKPYILAEELRRELPPDQAQYCIKRMPAYSGPGSVPGALDYAAFSSALYGESDL

SEQ ID NO: 761396 - protein, 612 aa, Homo sapiens; identical to SEQ ID NO: 761395

SEQ ID NO: 761397 - protein, 172 aa, Homo sapiens
SCFPQGGPRILASCRHEAKILTRDAKGITQEQMNEFRASFNHFDRRKNGLMDHEDFRACLISMGYDLGEAEFARIMTLVDPNGQGTVTFQSFIDFMTRETADTDTAEQVIASFRILASDKPYILAEELRRELPPDQAQYCIKRMPAYSGPGSVPGALDYAAFSSALYGESDL

SEQ ID NO: 761398 - protein, 612 aa, Homo sapiens; identical to SEQ ID NO: 761395

SEQ ID NO: 761399 - protein, 612 aa, Homo sapiens; identical to SEQ ID NO: 761395

SEQ ID NO: 761400 - protein, 659 aa, Homo sapiens
NTPKPDERAIMTYVSCFYHAFAGAEQAETAANRICKVLAVNQENERLMEEYERLASELLEWIRRTIPWLENRTPEKTMQAMQKKLEDFRDYRRKHKPPKVQEKCQLEINFNTLQTKLRISNRPAFMPSEGKMVSDIAGAWQRLEQAEKGYEEWLLNEIRRLERLEHLAEKFRQKASTHETWAYGKEQILLQKDYESASLTEVRALLRKHEAFESDLAAHQDRVEQIAAIAQELNELDYHDAVNVNDRCQKICDQWDRLGTLTQKRREALERMEKLLETIDQLHLEFAKRAAPFNNWMEGAMEDLQDMFIVHSIEEIQSLITAHEQFKATLPEADGERQSIMAIQNEVEKVIQSYNIRISSSNPYSTVTMDELRTKWDKVKQLVPIRDQSLQEELARQHANERLRRQFAAQANAIGPWIQNKMEEIARSSIQITGALEDQMNQLKQYEHNIINYKNNIDKLEGDHQLIQEALVFDNKHTNYTMEHIRVGWELLLTTIARTINEVETQILTRDAKGITQEQMNEFRASFNHFDRRKNGLMDHEDFRACLISMGYDLGEAEFARIMTLVDPNGQGTVTFQSFIDFMTRETADTDTAEQVIASFRILASDKPYILAEELRRELPPDQAQYCIKRMPAYSGPGSVPGALDYAAFSSALYGESDL

SEQ ID NO: 761401 - protein, 296 aa, Homo sapiens
RPQLASNPCCPWALQVKQLVPIRDQSLQEELARQHANERLRRQFAAQANAIGPWIQNKMEEIARSSIQITGALEDQMNQLKQYEHNIINYKNNIDKLEGDHQLIQEALVFDNKHTNYTMEHIRVGWELLLTTIARTINEVETQILTRDAKGITQEQMNEFRASFNHFDRRKNGLMDHEDFRACLISMGYDLGEAEFARIMTLVDPNGQGTVTFQSFIDFMTRETADTDTAEQVIASFRILASDKPYILAEELRRELPPDQAQYCIKRMPAYSGPGSVPGALDYAAFSSALYGESDL

SEQ ID NO: 761402 - protein, 612 aa, Homo sapiens; identical to SEQ ID NO: 761395

SEQ ID NO: 761403 - protein, 225 aa, Homo sapiens
MEEYERLASELLEWIRRTIPWLENRTPEKTMQAMQKKLEDFRDYRRKHKPPKVQEKCQLEINFNTLQTKLRISNRPAFMPSEGKMVSDIAGAWQRLEQAEKGYEEWLLNEIRRLERLEHLAEKFRQKASTHETWAYGKEQILLQKDYESASLTEVRALLRKHEAFESDLAAHQDRVEQIAAIAQELNELDYHDAVNVNDRCQKICDQWDRLGTLTQKRREALEVA

SEQ ID NO: 761404 - protein, 200 aa, Homo sapiens
PGTSGGALQARGTPMAGYLKLVCVSFQRQGFHTVGSRCKNRTGAEHLWLTRHLRDPFVKAAKVESYRCRSAFKLLEVNERHQILRPGLRVLDCGAAPGAWSQVAVQKVNAAGTGGPLHCCWHLLAPLRLSGHGQAAFASGCGMVEPFFEGVCFRVGGLAMVMIKIGCCHFQNERQGRKVQCTWKSPRMRPPAGTSTSMVV

SEQ ID NO: 761405 - protein, 322 aa, Homo sapiens
QALPAARCRRGEHQWRGELGAAAARADSGSGWGSARSPSSVLASGLGAERWAPSPHSASATGARPGFRVAVPREEGALRYLKLVCVSFQRQGFHTVGSRCKNRTGAEHLWLTRHLRDPFVKAAKVESYRCRSAFKLLEVNERHQILRPGLRVLDCGAAPGAWSQVAVQKVNAAGTDPSSPVGFVLGVDLLHIFPLEGATFLCPADVTDPRTSQRILEVLPGRRADVILSDMAPNATGFRDLDHDRLISLCLTLLSVTPDILQPGGTFLCKTWAGSQSRRLQRRLTEEFQNVRIIKPEASRKESSEVYFLATQYHGRKGTVKQ

SEQ ID NO: 761406 - protein, 162 aa, Homo sapiens
MLAPWICTSASLLVCDPSSPVGFVLGVDLLHIFPLEGATFLCPADVTDPRTSQRILEVLPGRRADVILSDMAPNATGFRDLDHDRLISLCLTLLSVTPDILQPGGTFLCKTWAGSQSRRLQRRLTEEFQNVRIIKPEASRKESSEVYFLATQYHGRKGTVKQ

SEQ ID NO: 761407 - protein, 159 aa, Homo sapiens
ARHFRRRAAGAGNTNGGRQGFHTVGSRCKNRTGAEHLWLTRHLRDPFVKAAKVESYRCRSAFKLLEVNERHQILRPGLRVLDCGAAPGAWSQVAVQKVNAAGTDGVSLLPRLQCNGVISAHCNLCLPGSSDSPASASQVAGITGARHRTQLIFSFCFFK

SEQ ID NO: 761408 - protein, 250 aa, Homo sapiens
ARHFRRRAAGAGNTNGGRQGFHTVGSRCKNRTGAEHLWLTRHLRDPFVKAAKVESYRCRSAFKLLEVNERHQILRPGLRVLDCGAAPGAWSQVAVQKVNAAGTDPSSPVGFVLGVDLLHIFPLEGATFLCPADVTDPRTSQRILEVLPGRRADVILSDMAPNATGFRDLDHDRLISLCLTLLSVTPDILQPGGTFLCKTWAGSQSRRLQRRLTEEFQNVRIIKPEASRKESSEVYFLATQYHGRKGTVKQ

SEQ ID NO: 761409 - protein, 162 aa, Homo sapiens; identical to SEQ ID NO: 761406

SEQ ID NO: 761410 - protein, 162 aa, Homo sapiens; identical to SEQ ID NO: 761406

SEQ ID NO: 761411 - protein, 87 aa, Homo sapiens
PGTSGGALQARGTPMAGYLKLVCVSFQRQGFHTVGSRCKNRTGAEHLWLTRHLRDPFVKAAKVESYRCRSAFKLLEIPALLLASCLG

SEQ ID NO: 761412 - protein, 89 aa, Homo sapiens
PGTSGGALQARGTPMAGYLKLVCVSFQRQGFHTVGSRCKNRTGAEHLWLTRHLRDPFVKAAKVESYRCRSAFKLLEMESHSCPGCSAMV

SEQ ID NO: 761413 - protein, 262 aa, Homo sapiens
ADIEELRRTLGLYLQRGSGAAYTRCGMHSGDVSRSVNPQRGVKQTSGLDGDQSPETPSVVKAAKVESYRCRSAFKLLEVNERHQILRPGLRVLDCGAAPGAWSQVAVQKVNAAGTDPSSPVGFVLGVDLLHIFPLEGATFLCPADVTDPRTSQRILEVLPGRRADVILSDMAPNATGFRDLDHDRLISLCLTLLSVTPDILQPGGTFLCKTWAGSQSRRLQRRLTEEFQNVRIIKPEASRKESSEVYFLATQYHGRKGTVKQ

SEQ ID NO: 761414 - protein, 260 aa, Homo sapiens
PGTSGGALQARGTPMAGYLKLVCVSFQRQGFHTVGSRCKNRTGAEHLWLTRHLRDPFVKAAKVESYRCRSAFKLLEVNERHQILRPGLRVLDCGAAPGAWSQVAVQKVNAAGTDPSSPVGFVLGVDLLHIFPLEGATFLCPADVTDPRTSQRILEVLPGRRADVILSDMAPNATGFRDLDHDRLISLCLTLLSVTPDILQPGGTFLCKTWAGSQSRRLQRRLTEEFQNVRIIKPEASRKESSEVYFLATQYHGRKGTVKQ

SEQ ID NO: 761415 - protein, 260 aa, Homo sapiens; identical to SEQ ID NO: 761414

SEQ ID NO: 761416 - protein, 169 aa, Homo sapiens
PGTSGGALQARGTPMAGYLKLVCVSFQRQGFHTVGSRCKNRTGAEHLWLTRHLRDPFVKAAKVESYRCRSAFKLLEVNERHQILRPGLRVLDCGAAPGAWSQVAVQKVNAAGTDGVSLLPRLQCNGVISAHCNLCLPGSSDSPASASQVAGITGARHRTQLIFSFCFFK

SEQ ID NO: 761417 - protein, 432 aa, Homo sapiens
ARHFRRRAAGAGNTNGGVSWALLLRVQTAGVVGGPPGRLPRSWPRGWVPSAGHRPRTQRARQGRGQDSGSQFPGRRAPSGLQGQGRRGRGEAGAGGGVQVGGAAPGPRSKAPGASPGRDFASGPGSSIARASWAVEWALAPGTGLCHFPGRPLKRGEDSDSRSAVSASWLVSTLLVLQKLEALALEPGGYLKLVCVSFQRQGFHTVGSRCKNRTGAEHLWLTRHLRDPFVKAAKVESYRCRSAFKLLEVNERHQILRPGLRVLDCGAAPGAWSQVAVQKVNAAGTDPSSPVGFVLGVDLLHIFPLEGATFLCPADVTDPRTSQRILEVLPGRRADVILSDMAPNATGFRDLDHDRLISLCLTLLSVTPDILQPGGTFLCKTWAGSQSRRLQRRLTEEFQNVRIIKPEASRKESSEVYFLATQYHGRKGTVKQ

SEQ ID NO: 761418 - protein, 260 aa, Homo sapiens; identical to SEQ ID NO: 761414

SEQ ID NO: 761419 - protein, 312 aa, Homo sapiens
ARHFRRRAAGAGNTNGGVAGRCCCACRQREWLGVRPVAFLGPGLGAGCRALGTVPALSERDRGEARIPGRSSPGGGRPQRQGFHTVGSRCKNRTGAEHLWLTRHLRDPFVKAAKVESYRCRSAFKLLEVNERHQILRPGLRVLDCGAAPGAWSQVAVQKVNAAGTDPSSPVGFVLGVDLLHIFPLEGATFLCPADVTDPRTSQRILEVLPGRRADVILSDMAPNATGFRDLDHDRLISLCLTLLSVTPDILQPGGTFLCKTWAGSQSRRLQRRLTEEFQNVRIIKPEASRKESSEVYFLATQYHGRKGTVKQ

SEQ ID NO: 761420 - protein, 169 aa, Homo sapiens; identical to SEQ ID NO: 761416

SEQ ID NO: 761421 - protein, 211 aa, Homo sapiens
MEVHGKPKASPSCSSPTRDSSGVPVSKELLTAGSDGRGGIWDRLLINSQPKSRKTSTLQTVRIERSPLLDQVQTFLPQMARANEKLRKEMAAAPPGRFNIENIDGPHSKVIQMDVALFEMNQSDSKEVDSSEESSQDSSENSSESEDEDDSIPSEVTIDNIKLPNSEGGKVETGFHRVSQDGLNLLTSCSTLLDLPKCWDYRHEPPCPAGN

SEQ ID NO: 761422 - protein, 223 aa, Homo sapiens
MEVHGKPKASPSCSSPTRDSSGVPVSKELLTAGSDGRGGIWDRLLINSQPKSRKTSTLQTVRIERSPLLDQVQTFLPQMARANEKLRKEMAAAPPGRFNIENIDGPHSKVIQMDVALFEMNQSDSKEVDSSEESSQDSSENSSESEDEDDSIPSEVTIDNIKLPNSEGGKDAASLAPISTNPTSIANPTKTLTKTSTPDPHASGYSSIAIAVVYPKTTIIPPK

SEQ ID NO: 761423 - protein, 120 aa, Homo sapiens
MEVHGKPKASPSCSSPTRDSSGVPVSKELLTAGSDGRGGIWDRLLINSQPKSRKTSTLQTVRIERSPLLDQVQTFLPQMARANEKLRKEMAAAPPGRFNIENIDGPHSKVIQMELCFVFI

SEQ ID NO: 761424 - protein, 211 aa, Homo sapiens; identical to SEQ ID NO: 761421

SEQ ID NO: 761425 - protein, 131 aa, Homo sapiens [sequence omitted]

SEQ ID NO: 761426 - protein, 288 aa, Homo sapiens
MQKASHKNKKERGVSNKVKTSVHNLSKTQQTKLTVGSLGLGLIIIQHGPYLQITHLIRKGAAANDEETPARLYRKHGWGGLRKLTIMAEGEEEGGDVLISVGHANVLGYTLREFLQLLQHITIGTVLQIKVYRDFINIPEEWQEIYDLIPEAKFPVTSTPKKIELAKDESFTSSDDNENVDLDKRLQYYRYPWSTVHHPARRPISISRDWHGYKKKNHTISVGKDINCDVMIHRDDKKEVRAPSPYWIMVKQDNESSSSSTSSTSDAFWLEDCAQVEEGKAQLVSKVG

SEQ ID NO: 761427 - protein, 116 aa, Homo sapiens
RTVTLTVRVRGFILEVSETKNPPIPDPMAHCNFEFPGSVSSPCLSLLNSWDYRHTESCQATFLFFVERRSRCEAQFGLKQVDSRDLPTSASQSASFTNVSHHVWPRTLPMSFYKKK

SEQ ID NO: 761428 - protein, 132 aa, Homo sapiens
QQKIKEKLRIRTKAAVKIQAWWRGTLVRRTLLHAALRAWIIQCWWRMTLSRVLEKKRQAALIAYATRERAVIKLQSLVRMWRVRWRYCQVLNAIYIIQGHWQCHNCQTCALLQGHCVVTATHLQFHIEIINS

SEQ ID NO: 761429 - protein, 105 aa, Homo sapiens
RFFTSLPVYAIIVANFCRSWTFYLLLISQPAYFEEVFGFAISKVGLLSAVPHMVMTIVVPIGGQLADYLRSRQILTTTAVRKIMNCGGTVDFIDGLGSFCRIRVN

SEQ ID NO: 761430 - protein, 2347 aa, Homo sapiens
MDPEQSVKGTKKAEGSPRKRLTKGEAIQTSVSSSVPYPGSGTAPTQESPAQELLAPQPFPGPSSVLREGSQEKTGQQQKPPKRPPIEASVHISHVPQHPLTPAFMSPGKPEHLLEGSTWQLVSPMRLGPSGSLLAPGLHPQSQLLPSHASIIPPEDLPGVPKVFVPRPSQVSLKPTEEAHKKERKPQKPGKYICQYCSRPCAKPSVLQKHIRSHTGERPYPCGPCGFSFKTKSNLYKHRKSHAHRIKAGLASGMGGEMYPHGLEMERIPGEEFEEPTEGESTDSEEETSATSGHPAELSPRPKQPLLSSGLYSSGSHSSSHERCSLSQSSTAQSLEDPPPFVEPSSEHPLSHKPEDTHTIKQKLALRLSERKKVIDEQAFLSPGSKGSTESGYFSRSESAEQQVSPPNTNAKSYAEIIFGKCGRIGQRTAMLTATSTQPLLPLSTEDKPSLVPLSVPRTQVIEHITKLITINEAVVDTSEIDSVKPRRSSLSRRSSMESPKSSLYREPLSSHSEKTKPEQSLLSLQHPPSTAPPVPLLRSHSMPSAACTISTPHHPFRGSYSFDDHITDSEALSRSSHVFTSHPRMLKPQPAIELPLGGEYSSEEPGPSSKDTASKPSDEVEPKESELTKKTKKGLKTKGVIYECNICGARYKKRDNYEAHKKYYCSELQIAKPISAGTHTSPEAEKSQIEHEPWSQMMHYKLGTTLELTPLRKRRKEKSLGDEEEPPAFESTKSQFGSPGPSDAARNLPLESTKSPAEPSKSVPSLEGPTGFQPRTPKPGSGSESGKERRTTSKEISVIQHTSSFEKSDSLEQPSGLEGEDKPLAQFPSPPPAPHGRSAHSLQPKLVRQPNIQVPEILVTEEPDRPDTEPEPPPKEPEKTEEFQWPQRSQTLAQLPAEKLPPKKKRLRLAEMAQSSGESSFESSVPLSRSPSQESNVSLSGSSRSASFERDDHGKAEAPSPSSDMRPKPLGTHMLTVPSHHPHAREMRRSASEQSPNVSHSAHMTETRSKSFDYGSLSLTGPSAPAPVAPPAAGGPAREKKMLLGEKASLSRPPESELEVAPKGRQESEEPQPSSSKPSAKSSLSQISSAATSHGGPPGGKGPGQDRPPLGPTVPYTEALQVFHHPVAQTPLHEKPYLPPPVSLFSFQHLVQHEPGQSPEFFSTQAMSSLLSSPYSMPPLPPSLFQAPPLPLQPTVLHPGQLHLPQLMPHPANIPFRQPPSFLPMPYPTSSALSSGFFLPLQSQFALQLPGDVESHLPQIKTSLAPLATGSAGLSPSTEYSSDIRLPPVAPPASSSAPTSAPPLALPACPDTMVSLVVPVRVQTNMPSYGSAMYTTLSQILVTQSQGSSATVALPKFEEPPSKGTTVCGADVHEVGPGPSGLSEEQSRAFPTPYLRVPVTLPERKGTSLSSESILSLEGSSSTAGGSKRVLSPAGSLELTMETQQQKRVKEEEASKADEKLELVKPCSVVLTSTEDGKRPEKSHLGNQGQGRRELEMLSSLSSDPSDTKEIPPLPHPALSHGTAPGSEALKEYPQPSGKPHRRGLTPLSVKKEDSKEQPDLPSLAPPSSLPLSETSSRPAKSQEGTDSKKVLQFPSLHTTTNVSWCYLNYIKPNHIQHADRRSSVYAGWCISLYNPNLPGVSTKAALSLLRSKQKVSKETYTMATAPHPEAGRLVPSSSRKPRMTEVHLPSLVSPEGQKDLARVEKEEERRGEPEEDAPASQRGEPARIKIFKEGNLTKHMKSKAHSKKCQETGVLEELEAEEGTSDDLFQDSEGREGSEAVEEHQFSDLEDSDSDSDLDEDEDEDEEESQDELSRPSSEAPPPGPPHALRADSSPILGPQPPDAPASGTEATRGSSVSEAERLTASSCSMSSQSMPGLPWLGPAPLGSVEKDTGSALSYKPVSPRRPWSPSKEAGSRPPLARKHSLTKNDSSPQRCSPAREPQASAPSPPGLHVDPGRGMGPLPCGSPRLQLSPLTLCPLGRELAPRAHVLSKLEGTTDPGLPRYSPTRRWSPGQAESPPRSAPPGKWALAGPGSPSAGEHGPGLGLAPRVLFPPAPLPHKLLSRSPETCASPWQKAESRSPSCSPGPAHPLSSRPFSALHDFHGHILARTEENIFSHLPLHSQHLTRAPCPLIPIGGIQMVQARPGAHPTLLPGPTAAWVSGFSGGGSDLTGAREAQERGRWSPTESSSASVSPVAKVSKFTLSSELEGGDYPKERERTGGGPGRPPDWTPHGTGAPAEPTPTHSPCTPPDTLPRPPQGRRAAQSWSPRLESPRAPANPEPSATPPLDRSSSVGCLAEASARFPARTRNLSGEPRTRQDSPKPSGSGEPRAHPHQPEDRVPPNA

SEQ ID NO: 761431 - protein, 141 aa, Homo sapiens
HIRTHTDVRPYVCKHCHFAFKTKGKRESAGALPLPAAGSSPLGVPAQSSGAQTSLQGAWSSPISWVPTQLGAQWQSSWLQTGLWLPMAAPSHPPGTHTQPLHLWPPGPGLPSLVRHSCSPFMVLHLLSSPLPSACLLSRLS

SEQ ID NO: 761432 - protein, 2406 aa, Homo sapiens
MDPEQSVKGTKKAEGSPRKRLTKGEAIQTSVSSSVPYPGSGTAPTQESPAQELLAPQPFPGPSSVLREGSQEKTGQQQKPPKRPPIEASVHISHVPQHPLTPAFMSPGKPEHLLEGSTWQLVSPMRLGPSGSLLAPGLHPQSQLLPSHASIIPPEDLPGVPKVFVPRPSQVSLKPTEEAHKKERKPQKPGKYICQYCSRPCAKPSVLQKHIRSHTGERPYPCGPCGFSFKTKSNLYKHRKSHAHRIKAGLASGMGGEMYPHGLEMERIPGEEFEEPTEGESTDSEEETSATSGHPAELSPRPKQPLLSSGLYSSGSHSSSHERCSLSQSSTAQSLEDPPPFVEPSSEHPLSHKPEDTHTIKQKLALRLSERKKVIDEQAFLSPGSKGSTESGYFSRSESAEQQVSPPNTNAKSYAEIIFGKCGRIGQRTAMLTATSTQPLLPLSTEDKPSLVPLSVPRTQVIEHITKLITINEAVVDTSEIDSVKPRRSSLSRRSSMESPKSSLYREPLSSHSEKTKPEQSLLSLQHPPSTAPPVPLLRSHSMPSAACTISTPHHPFRGSYSFDDHITDSEALSRSSHVFTSHPRMLKPQPAIELPLGGEYSSEEPGPSSKDTASKPSDEVEPKESELTKKTKKGLKTKGVIYECNICGARYKKRDNYEAHKKYYCSELQIAKPISAGTHTSPEAEKSQIEHEPWSQMMHYKLGTTLELTPLRKRRKEKSLGDEEEPPAFESTKSQFGSPGPSDAARNLPLESTKSPAEPSKSVPSLEGPTGFQPRTPKPGSGSESGKERRTTSKEISVIQHTSSFEKSDSLEQPSGLEGEDKPLAQFPSPPPAPHGRSAHSLQPKLVRQPNIQVPEILVTEEPDRPDTEPEPPPKEPEKTEEFQWPQRSQTLAQLPAEKLPPKKKRLRLAEMAQSSGESSFESSVPLSRSPSQESNVSLSGSSRSASFERDDHGKAEAPSPSSDMRPKPLGTHMLTVPSHHPHAREMRRSASEQSPNVSHSAHMTETRSKSFDYGSLSLTGPSAPAPVAPPAAGGPAREKKMLLGEKASLSRPPESELEVAPKGRQESEEPQPSSSKPSAKSSLSQISSAATSHGGPPGGKGPGQDRPPLGPTVPYTEALQVFHHPVAQTPLHEKPYLPPPVSLFSFQHLVQHEPGQSPEFFSTQAMSSLLSSPYSMPPLPPSLFQAPPLPLQPTVLHPGQLHLPQLMPHPANIPFRQPPSFLPMPYPTSSALSSGFFLPLQSQFALQLPGDVESHLPQIKTSLAPLATGSAGLSPSTEYSSDIRLPPVAPPASSSAPTSAPPLALPACPDTMVSLVVPVRVQTNMPSYGSAMYTTLSQILVTQSQGSSATVALPKFEEPPSKGTTVCGADVHEVGPGPSGLSEEQSRAFPTPYLRVPVTLPERKGTSLSSESILSLEGSSSTAGGSKRVLSPAGSLELTMETQQQKRVKEEEASKADEKLELVKPCSVVLTSTEDGKRPEKSHLGNQGQGRRELEMLSSLSSDPSDTKEIPPLPHPALSHGTAPGSEALKEYPQPSGKPHRRGLTPLSVKKEDSKEQPDLPSLAPPSSLPLSETSSRPAKSQEGTDSKKVLQFPSLHTTTNVSWCYLNYIKPNHIQHADRRSSVYAGWCISLYNPNLPGVSTKAALSLLRSKQKVSKETYTMATAPHPEAGRLVPSSSRKPRMTEVHLPSLVSPEGQKDLARVEKEEERRGEPEEDAPASQRGEPARIKIFEGGYKSNEEYVYVRGRGRGKYVCEECGIRCKKPSMLKKHIRTHTDVRPYVCKHCHFAFKTKGNLTKHMKSKAHSKKCQETGVLEELEAEEGTSDDLFQDSEGREGSEAVEEHQFSDLEDSDSDSDLDEDEDEDEEESQDELSRPSSEAPPPGPPHALRADSSPILGPQPPDAPASGTEATRGSSVSEAERLTASSCSMSSQSMPGLPWLGPAPLGSVEKDTGSALSYKPVSPRRPWSPSKEAGSRPPLARKHSLTKNDSSPQRCSPAREPQASAPSPPGLHVDPGRGMGPLPCGSPRLQLSPLTLCPLGRELAPRAHVLSKLEGTTDPGLPRYSPTRRWSPGQAESPPRSAPPGKWALAGPGSPSAGEHGPGLGLAPRVLFPPAPLPHKLLSRSPETCASPWQKAESRSPSCSPGPAHPLSSRPFSALHDFHGHILARTEENIFSHLPLHSQHLTRAPCPLIPIGGIQMVQARPGAHPTLLPGPTAAWVSGFSGGGSDLTGAREAQERGRWSPTESSSASVSPVAKVSKFTLSSELEGGDYPKERERTGGGPGRPPDWTPHGTGAPAEPTPTHSPCTPPDTLPRPPQGRRAAQSWSPRLESPRAPANPEPSATPPLDRSSSVGCLAEASARFPARTRNLSGEPRTRQDSPKPSGSGEPRAHPHQPEDRVPPNA

SEQ ID NO: 761433 - protein, 699 aa, Homo sapiens
MRQDQQAGAGAESRQLVAVPGLLDPTFCWYKSNEEYVYVRGRGRGKYVCEECGIRCKKPSMLKKHIRTHTDVRPYVCKHCHFAFKTKGNLTKHMKSKAHSKKCQETGVLEELEAEEGTSDDLFQDSEGREGSEAVEEHQFSDLEDSDSDSDLDEDEDEDEEESQDELSRPSSEAPPPGPPHALRADSSPILGPQPPDAPASGTEATRGSSVSEAERLTASSCSMSSQSMPGLPWLGPAPLGSVEKDTGSALSYKPVSPRRPWSPSKEAGSRPPLARKHSLTKNDSSPQRCSPAREPQASAPSPPGLHVDPGRGMGPLPCGSPRLQLSPLTLCPLGRELAPRAHVLSKLEGTTDPGLPRYSPTRRWSPGQAESPPRSAPPGKWALAGPGSPSAGEHGPGLGLAPRVLFPPAPLPHKLLSRSPETCASPWQKAESRSPSCSPGPAHPLSSRPFSALHDFHGHILARTEENIFSHLPLHSQHLTRAPCPLIPIGGIQMVQARPGAHPTLLPGPTAAWVSGFSGGGSDLTGAREAQERGRWSPTESSSASVSPVAKVSKFTLSSELEGGDYPKERERTGGGPGRPPDWTPHGTGAPAEPTPTHSPCTPPDTLPRPPQGRRAAQSWSPRLESPRAPANPEPSATPPLDRSSSVGCLAEASARFPARTRNLSGEPRTRQDSPKPSGSGEPRAHPHQPEDRVPPNA

SEQ ID NO: 761434 - protein, 98 aa, Homo sapiens
  misc_feature (3)..(3): Xaa can be any naturally occurring amino acid
  misc_feature (11)..(12): Xaa can be any naturally occurring amino acid
PGXRNSARARXXGTDEIIHHDQLGFFLEIQKGFNLCKTINVLHHINRMEDRNHTIISVDAEKTFDQKILLTVLSFLNLRTCFSKTFPESLYESTKFSS

SEQ ID NO: 761435 - protein, 1020 aa, Homo sapiens
QSARDKDIGLRVAMGSGGDSLLGGRGSLPLLLLLIMGGMAQDSPPQILVHPQDQLFQGPGPARMSCQASGQPPPTIRWLLNGQPLSMVPPDPHHLLPDGTLLLLQPPARGHAHDGQALSTDLGVYTCEASNRLGTAVSRGARLSVAVLREDFQIQPRDMVAVVGEQFTLECGPPWGHPEPTVSWWKDGKPLALQPGRHTVSGGSLLMARAEKSDEGTYMCVATNSAGHRESRAARVSIQEPQDYTEPVELLAVRIQLENVTLLNPDPAEGPKPRPAVWLSWKVSGPAAPAQSYTALFRTQTAPGGQGAPWAEELLAGWQSAELGGLHWGQDYEFKVRPSSGRARGPDSNVLLLRLPEKVPSAPPQEVTLKPGNGTVFVSWVPPPAENHNGIIRGYQVWSLGNTSLPPANWTVVGEQTQLEIATHMPGSYCVQVAAVTGAGAGEPSRPVCLLLEQAMERATQEPSEHGPWTLEQLRATLKRPEVIATCGVALWLLLLGTAVCIHRRRRARVHLGPGLYRYTSEDAILKHRMDHSDSQWLADTWRSTSGSRDLSSSSSLSSRLGADARDPLDCRRSLLSWDSRSPGVPLLPDTSTFYGSLIAELPSSTPARPSPQVPAVRRLPPQLAQLSSPCSSSDSLCSRRGLSSPRLSLAPAEAWKAKKKQELQHANSSPLLRGSHSLELRACELGNRGSKNLSQSPGAVPQALVAWRALGPKLLSSSNELVTRHLPPAPLFPHETPPTQSQQTQPPVAPQAPSSILLPAAPIPILSPCSPPSPQASSLSGPSPASSRLSSSSLSSLGEDQDSVLTPEEVALCLELSEGEETPRNSVSPMPRAPSPPTTYGYISVPTASEFTDMGRTGGGVGPKGGVLLCPPRPCLTPTPSEGSLANGWGSASEDNAASARASLVSSSDGSFLADAHFARALAVAVDSFGFGLEPREADCVFIDASSPPSPRDEIFLTPNLSLPLWEWRPDWLEDMEVSHTQRLGRGMPPWPPDSQISSQRSQLHCRMPKAGASPVDYS

SEQ ID NO: 761436 - protein, 946 aa, Homo sapiens
QSARDKDIGLRVAMGSGGDSLLGGRGSLPLLLLLIMGGMAQDSPPQILVHPQDQLFQGPGPARMSCQASGQPPPTIRWLLNGQPLSMVPPDPHHLLPDGTLLLLQPPARGHAHDGQALSTDLGVYTCEASNRLGTAVSRGARLSVAVLREDFQIQPRDMVAVVGEQFTLECGPPWGHPEPTVSWWKDGKPLALQPGRHTVSGGSLLMARAEKSDEGTYMCVATNSAGHRESRAARVSIQEPQDYTEPVELLAVRIQLENVTLLNPDPAEGPKPRPAVWLSWKVSGPAAPAQSYTALFRTQTAPGGQGAPWAEELLAGWQSAELGGLHWGQDYEFKVRPSSGRARGPDSNVLLLRLPEKVPSAPPQEVTLKPGNGTVFVSWVPPPAENHNGIIRGYQVWSLGNTSLPPANWTVVGEQTQLEIATHMPGSYCVQVAAVTGAGAGEPSRPVCLLLEQAMERATQEPSEHGPWTLEQLRATLKRPEVIATCGVALWLLLLGTAVCIHRRRRARVHLGPGLYRYTSEDAILKHRMDHSDSQWLADTWRSTSGSRDLSSSSSLSSRLGADARDPLDCRRSLLSWDSRSPGVPLLPDTSTFYGSLIAELPSSTPARPSPQVPAVRRLPPQLAQLSSPCSSSDSLCSRRGLSSPRLSLAPAEAWKAKKKQELQHANSSPLLRGSHSLELRACELGNRGSKNLSQSPGAVPQALVAWRALGPKLLSSSNELVTRHLPPAPLFPHETPPTQSQQTQPPVAPQAPSSILLPAAPIPILSPCSPPSPQASSLSGPSPASSRLSSSSLSSLGEDQDSVLTPEEVALCLELSEGEETPRNSVSPMPRAPSPPTTYGYISVPTASEFTDMGRTGGGVGPKGGVLLCPPRPCLTPTPSEGSLANGWGSASEDNAASARASLVSSSDGSFLADAHFARALAVAVDSFGFGLEPREADCVFIGM

SEQ ID NO: 761437 - protein, 491 aa, Homo sapiens
MDHSDSQWLADTWRSTSGSRDLSSSSSLSSRLGADARDPLDCRRSLLSWDSRSPGVPLLPDTSTFYGSLIAELPSSTPARPSPQVPAVRRLPPQLAQLSSPCSSSDSLCSRRGLSSPRLSLAPAEAWKAKKKQELQHANSSPLLRGSHSLELRACELGNRGSKNLSQSPGAVPQALVAWRALGPKLLSSSNELVTRHLPPAPLFPHETPPTQSQQTQPPVAPQAPSSILLPAAPIPILSPCSPPSPQASSLSGPSPASSRLSSSSLSSLGEDQDSVLTPEEVALCLELSEGEETPRNSVSPMPRAPSPPTTYGYISVPTASEFTDMGRTGGGVGPKGGVLLCPPRPCLTPTPSEGSLANGWGSASEDNAASARASLVSSSDGSFLADAHFARALAVAVDSFGFGLEPREADCVFIDASSPPSPRDEIFLTPNLSLPLWEWRPDWLEDMEVSHTQRLGRGMPPWPPDSQISSQRSQLHCRMPKAGASPVDYS

SEQ ID NO: 761438 - protein, 798 aa, Homo sapiens
QSARDKDIGLRVAMGSGGDSLLGGRGSLPLLLLLIMGGMAQDSPPQILVHPQDQLFQGPGPARMSCQASGQPPPTIRWLLNGQPLSMVPPDPHHLLPDGTLLLLQPPARGHAHDGQALSTDLGVYTCEASNRLGTAVSRGARLSVAVLREDFQIQPRDMVAVVGEQFTLECGPPWGHPEPTVSWWKDGKPLALQPGRHTVSGGSLLMARAEKSDEGTYMCVATNSAGHRESRAARVSIQEPQDYTEPVELLAVRIQLENVTLLNPDPAEGPKPRPAVWLSWKVSGPAAPAQSYTALFRTQTAPGGQGAPWAEELLAGWQSAELGGLHWGQDYEFKVRPSSGRARGPDSNVLLLRLPEKVPSAPPQEVTLKPGNGTVFVSWVPPPAENHNGIIRGYQVWSLGNTSLPPANWTVVGEQTQLEIATHMPGSYCVQVAAVTGAGAGEPSRPVCLLLEQAMERATQEPSEHGPWTLEQLRATLKRPEVIATCGVALWLLLLGTAVCIHRRRRARVHLGPGLYRYTSEDAILKHRMDHSDSQWLADTWRSTSGSRDLSSSSSLSSRLGADARDPLDCRRSLLSWDSRSPGVPLLPDTSTFYGSLIAELPSSTPARPSPQVPAVRRLPPQLAQLSSPCSSSDSLCSRRGLSSPRLSLAPAEAWKAKKKQELQHANSSPLLRGSHSLELRACELGNRGSKNLSQSPGAVPQALVAWRALGPKLLSSSNELVTRHLPPAPLFPHETPPTQSQQTQPPVAPQAPSSILLPAAPIPILSPCSPPSPLTLRSLPREVSSTVVCPRLVLLL

SEQ ID NO: 761439 - protein, 825 aa, Homo sapiens
QSARDKDIGLRVAMGSGGDSLLGGRGSLPLLLLLIMGGMAQDSPPQILVHPQDQLFQGPGPARMSCQASGQPPPTIRWLLNGQPLSMVPPDPHHLLPDGTLLLLQPPARGHAHDGQALSTDLGVYTCEASNRLGTAVSRGARLSVAVLREDFQIQPRDMVAVVGEQFTLECGPPWGHPEPTVSWWKDGKPLALQPGRHTVSGGSLLMARAEKSDEGTYMCVATNSAGHRESRAARVSIQEPQDYTEPVELLAVRIQLENVTLLNPDPAEGPKPRPAVWLSWKVSGPAAPAQSYTALFRTQTAPGGQGAPWAEELLAGWQSAELGGLHWGQDYEFKVRPSSGRARGPDSNVLLLRLPEKVPSAPPQEVTLKPGNGTVFVSWVPPPAENHNGIIRGYQVWSLGNTSLPPANWTVVGEQTQLEIATHMPGSYCVQVAAVTGAGAGEPSRPVCLLLEQAMERATQEPSEHGPWTLEQLRATLKRPEVIATCGVALWLLLLGTAVCIHRRRRARVHLGPGLYRYTSEDAILKHRMDHSDSQWLADTWRSTSGSRDLSSSSSLSSRLGADARDPLDCRRSLLSWDSRSPGVPLLPDTSTFYGSLIAELPSSTPARPSPQVPAVRRLPPQLAQLSSPCSSSDSLCSRRGLSSPRLSLAPAEAWKAKKKQELQHANSSPLLRGSHSLELRACELGNRGSKNLSQSPGAVPQALVAWRALGPKLLSSSNELVTRHLPPAPLFPHETPPTQSQQTQPPVAPQAPSSILLPAAPIPILSPCSPPSPQASSLSGPSPASSRLSSSSLSSLGEDQDSVLTPEEVALCLELSEGEETPR

SEQ ID NO: 761440 - protein, 207 aa, Homo sapiens
KPLLSPLLPLPRNSVSPMPRAPSPPTTYGYISVPTASEFTDMGRTGGGVGPKGGVLLCPPRPCLTPTPSEGSLANGWGSASEDNAASARASLVSSSDGSFLADAHFARALAVAVDSFGFGLEPREADCVFIDASSPPSPRDEIFLTPNLSLPLWEWRPDWLEDMEVSHTQRLGRGMPPWPPDSQISSQRSQLHCRMPKAGASPVDYS

SEQ ID NO: 761441 - protein, 172 aa, Homo sapiens
QSARDKDIGLRVAMGSGGDSLLGGRGSLPLLLLLIMGGMAQDSPPQILVHPQDQLFQGPGPARMSCQASGQPPPTIRWLLNGQPLSMVPPDPHHLLPDGTLLLLQPPARGHAHDGQALSTDLGVYTCEASNRLGTAVSRGARLSVAGEAWEGSFRVGQTWVETSELNVQGNI

SEQ ID NO: 761442 - protein, 1020 aa, Homo sapiens; identical to SEQ ID NO: 761435

SEQ ID NO: 761443 - protein, 855 aa, Homo sapiens
QSARDKDIGLRVAMGSGGDSLLGGRGSLPLLLLLIMGGMAQDSPPQILVHPQDQLFQGPGPARMSCQASGQPPPTIRWLLNGQPLSMVPPDPHHLLPDGTLLLLQPPARGHAHDGQALSTDLGVYTCEASNRLGTAVSRGARLSVAVLREDFQIQPRDMVAVVGEQFTLECGPPWGHPEPTVSWWKDGKPLALQPGRHTVSGGSLLMARAEKSDEGTYMCVATNSAGHRESRAARVSIQEPQDYTEPVELLAVRIQLENVTLLNPDPAEGPKPRPAVWLSWKVSGPAAPAQSYTALFRTQTAPGGQGAPWAEELLAGWQSAELGGLHWGQDYEFKVRPSSGRARGPDSNVLLLRLPEKVPSAPPQEVTLKPGNGTVFVSWVPPPAENHNGIIRGYQVWSLGNTSLPPANWTVVGEQTQLEIATHMPGSYCVQVAAVTGAGAGEPSRPVCLLLEQAMERATQEPSEHGPWTLEQLRATLKRPEVIATCGVALWLLLLGTAVCIHRRRRARVHLGPGLYRYTSEDAILKHRMDHSDSQWLADTWRSTSGSRDLSSSSSLSSRLGADARDPLDCRRSLLSWDSRSPGVPLLPDTSTFYGSLIAELPSSTPARPSPQVPAVRRLPPQLAQLSSPCSSSDSLCSRRGLSSPRLSLAPAEAWKAKKKQELQHANSSPLLRGSHSLELRACELGNRGSKNLSQSPGAVPQALVAWRALGPKLLSSSNELVTRHLPPAPLFPHETPPTQSQQTQPPVAPQAPSSILLPAAPIPILSPCSPPSPQASSLSGPSPASSRLSSSSLSSLGEDQDSVLTPEEVALCLELSEGEETPRNSVSPMPRAPSPPTTYGYISVPTALPGPLL

SEQ ID NO: 761444 - protein, 752 aa, Homo sapiens
QSARDKDIGLRVAMGSGGDSLLGGRGSLPLLLLLIMGGMAQDSPPQILVHPQDQLFQGPGPARMSCQASGQPPPTIRWLLNGQPLSMVPPDPHHLLPDGTLLLLQPPARGHAHDGQALSTDLGVYTCEASNRLGTAVSRGARLSVAVLREDFQIQPRDMVAVVGEQFTLECGPPWGHPEPTVSWWKDGKPLALQPGRHTVSGGSLLMARAEKSDEGTYMCVATNSAGHRESRAARVSIQEPQDYTEPVELLAVRIQLENVTLLNPDPAEGPKPRPAVWLSWKVSGPAAPAQSYTALFRTQTAPGGQGAPWAEELLAGWQSAELGGLHWGQDYEFKVRPSSGRARGPDSNVLLLRLPEKVPSAPPQEVTLKPGNGTVFVSWVPPPAENHNGIIRGYQVWSLGNTSLPPANWTVVGEQTQLEIATHMPGSYCVQVAAVTGAGAGEPSRPVCLLLEQAMERATQEPSEHGPWTLEQLRATLKRPEVIATCGVALWLLLLGTAVCIHRRRRARVHLGPGLYRYTSEDAILKHRMDHSDSQWLADTWRSTSGSRDLSSSSSLSSRLGADARDPLDCRRSLLSWDSRSPGVPLLPDTSTFYGSLIAELPSSTPARPSPQVPAVRRLPPQLAQLSSPCSSSDSLCSRRGLSSPRLSLAPAEAWKAKKKQELQHANSSPLLRGSHSLELRACELGNRGSKNLSQSPGAVPQALVAWRALGPKLLSSSNELVTRHLPPAPLFPHETPPTQSQQTHAEGREV

SEQ ID NO: 761445 - protein, 166 aa, Homo sapiens
QSARDKDIGLRVAMGSGGDSLLGGRGSLPLLLLLIMGSASEDNAASARASLVSSSDGSFLADAHFARALAVAVDSFGFGLEPREADCVFIDASSPPSPRDEIFLTPNLSLPLWEWRPDWLEDMEVSHTQRLGRGMPPWPPDSQISSQRSQLHCRMPKAGASPVDYS

SEQ ID NO: 761446 - protein, 277 aa, Homo sapiens
MSFCPNQPGETTHPSSGDAGMQLQGYRYYDPKTCGFDFTGAVEDISKIPEQSVLLLHACAHNPTGVDPRPEQWKEIATVVKKRNLFAFFDMAYQGFASGDGDKDAWAVRHFIEQGINVCLCQSYAKNMGLYGERVGAFTMVCKDADEAKRVESQLKILIRPMYSNPPLNGARIAAAILNTPDLRKQWLQEVKGMADRIIGMRTQLVSNLKKEGSTHNWQHITDQIGMFCFTGLKPEQVERLIKEFSIYMTKDGRISVAGVTSSNVGYLAHAIHQVTK

SEQ ID NO: 761447 - protein, 277 aa, Homo sapiens; identical to SEQ ID NO: 761446

SEQ ID NO: 761448 - protein, 278 aa, Homo sapiens
MSFCPNQPGETTHPSSGDAGMQLQGYRYYDPKTCGFDFTGAVEDISKIPEQSVLLLHACAHNPTGVDPRPEQWKEIATVVKKRNLFAFFDMAYQGFASGDGDKDAWAVRHFIEQGINVCLCQSYAKNMGLYGERVGAFTMVCKDADEAKRVESQLKILIRPMYSNPPLNGARIAAAILNTPDLRKQWLQEVKGMADRIIGMRTQLVSNLKKEGSTHNWQHITDQIGMFCFTGLKPEQVERLIKEFSIYMTCPCHSPGHQVMSLVRGNRDNLSVFSLCY

SEQ ID NO: 761449 - protein, 277 aa, Homo sapiens; identical to SEQ ID NO: 761446

SEQ ID NO: 761450 - protein, 277 aa, Homo sapiens; identical to SEQ ID NO: 761446

SEQ ID NO: 761451 - protein, 277 aa, Homo sapiens; identical to SEQ ID NO: 761446

SEQ ID NO: 761452 - protein, 202 aa, Homo sapiens
MPIFALKRNLFAFFDMAYQGFASGDGDKDAWAVRHFIEQGINVCLCQSYAKNMGLYGERVGAFTMVCKDADEAKRVESQLKILIRPMYSNPPLNGARIAAAILNTPDLRKQWLQEVKGMADRIIGMRTQLVSNLKKEGSTHNWQHITDQIGMFCFTGLKPEQVERLIKEFSIYMTKDGRISVAGVTSSNVGYLAHAIHQVTK

SEQ ID NO: 761453 - protein, 277 aa, Homo sapiens; identical to SEQ ID NO: 761446

SEQ ID NO: 761454 - protein, 142 aa, Homo sapiens
SAAAACNRTRVPCVCVRSPSAPSCGCPLPSYGPPWPRIAAAILNTPDLRKQWLQEVKGMADRIIGMRTQLVSNLKKEGSTHNWQHITDQIGMFCFTGLKPEQVERLIKEFSIYMTKDGRISVAGVTSSNVGYLAHAIHQVTK

SEQ ID NO: 761455 - protein, 277 aa, Homo sapiens; identical to SEQ ID NO: 761446

SEQ ID NO: 761456 - protein, 277 aa, Homo sapiens; identical to SEQ ID NO: 761446

SEQ ID NO: 761457 - protein, 182 aa, Homo sapiens
MALLHSGRVLPGIAAAFHPGLAAAASARASSWWTHVEMGPPDPILGVTEAFKRDTNSKKMNLGVGAYRDDNGKPYVLPSVRKAEAQIAAKNLDKEYLPIGGLAEFCKASAELALGENSEVLKSGRFVTVQTISGTGALRIGASFLQRFFKFSRDVFLPKPTWGNHTPIFRGCWHAATRLSVL

SEQ ID NO: 761458 - protein, 193 aa, Homo sapiens
PGGESAEGSLCVCPLALCSVLRLPTALLRSTMALLHSGRVLPGIAAAFHPGLAAAASARASSWWTHVEMGPPDPILGVTEAFKRDTNSKKMNLGVGAYRDDNGKPYVLPSVRKAEAQIAAKNLDKEYLPIGGLAEFCKASAELALGENSEVLKSGRQRFFKFSRDVFLPKPTWGNHTPIFRGCWHAATRLSVL

SEQ ID NO: 761459 - protein, 277 aa, Homo sapiens; identical to SEQ ID NO: 761446

SEQ ID NO: 761460 - protein, 240 aa, Homo sapiens
MSFCPNQPGETTHPSSGDAGMQLQGYRYYDPKTCGFDFTGAVEDISKIPEQSVLLLHACAHNPTGVDPRPEQWKEIATVVKKRNLFAFFDMAYQGFASGDGDKDAWAVRHFIEQGINVCLCQSYAKNMGLYGERVGAFTMVCKDADEAKRVESQLKILIRPMYSNPPLNGARIAAAILNTPDLRKQWLQEVKGMADRIIGMRTQLVSNLKKEGSTHNWQHITDQIGMFCFTGLKPEQLCY

SEQ ID NO: 761461 - protein, 277 aa, Homo sapiens; identical to SEQ ID NO: 761446

SEQ ID NO: 761462 - protein, 277 aa, Homo sapiens; identical to SEQ ID NO: 761446

SEQ ID NO: 761463 - protein, 277 aa, Homo sapiens; identical to SEQ ID NO: 761446

SEQ ID NO: 761464 - protein, 135 aa, Homo sapiens
NPPLNGARIGIHGTDQDLQLYSNPPLNGARIAAAILNTPDLRKQWLQEVKGMADRIIGMRTQLVSNLKKEGSTHNWQHITDQIGMFCFTGLKPEQVERLIKEFSIYMTKDGRISVAGVTSSNVGYLAHAIHQVTK

SEQ ID NO: 761465 - protein, 277 aa, Homo sapiens; identical to SEQ ID NO: 761446

SEQ ID NO: 761466 - protein, 182 aa, Homo sapiens; identical to SEQ ID NO: 761457

SEQ ID NO: 761467 - protein, 128 aa, Homo sapiens
MALLHSGRVLPGIAAAFHPGLAAAASARASSWWTHVEMGPPDPILGVTEAFKRDTNSKKMNLGVGAYRDDNGKPYVLPSVRKAEAQIAAKNLDLLPLLNVVCSLSSHTVSPAAQGGTRKEDILGFACC

SEQ ID NO: 761468 - protein, 363 aa, Homo sapiens
SGVGGRQGIWLDWRAETHLAQPSLLNRSSSPADTATMKERRAPQPVVARCKLVLVGDVQCGKTAMLQVLAKDCYPEVSCPPARWPAFLPACPPWGRFPPAQETWLPQPQPILSRFLRLYHPQLLFGWRTALPELPLRPVPLLPPRWLLLTSSPRGPIRSPPPSCVPGVCSQTYVPTVFENYTACLETEEQRVELSLWDTSGSPYYDNVRPLCYSDSDAVLLCFDISRPETVDSALKKWRTEILDYCPSTRVLLIGCKTDLRTDLSTLMELSHQKQAPISYEQGCAIAKQLGAEIYLEGSAFTSEKSIHSIFRTASMLCLNKPSPLPQKSPVRSLSKRLLHLPSRSELISSTFKKEKAKSCSIM

SEQ ID NO: 761469 - protein, 86 aa, Homo sapiens
ALNEEKVAYDLQLGAEIYLEGSAFTSEKSIHSIFRTASMLCLNKPSPLPQKSPVRSLSKRLLHLPSRSELISSTFKKEKAKSCSIM

SEQ ID NO: 761470 - protein, 268 aa, Homo sapiens
SGVGGRQGIWLDWRAETHLAQPSLLNRSSSPADTATMKERRAPQPVVARCKLVLVGDVQCGKTAMLQVLAKDCYPETYVPTVFENYTACLETEEQRVELSLWDTSGSPYYDNVRPLCYSDSDAVLLCFDISRPETVDSALKKWRTEILDYCPSTRVLLIGCKTDLRTDLSTLMELSHQKQAPISYEQGCAIAKQLGAEIYLEGSAFTSEKSIHSIFRTASMLCLNKPSPLPQKSPVRSLSKRLLHLPSRSELISSTFKKEKAKSCSIM

SEQ ID NO: 761471 - protein, 197 aa, Homo sapiens
SSGIEDGIPRALGLRPIGEGKHHGITISSFWPTPGSPYYDNVRPLCYSDSDAVLLCFDISRPETVDSALKKWRTEILDYCPSTRVLLIGCKTDLRTDLSTLMELSHQKQAPISYEQGCAIAKQLGAEIYLEGSAFTSEKSIHSIFRTASMLCLNKPSPLPQKSPVRSLSKRLLHLPSRSELISSTFKKEKAKSCSIM

SEQ ID NO: 761472 - protein, 248 aa, Homo sapiens
MFRFMRDVEPEDPMFLMDPFAIHRQHMSRMLSGGFGYSPFLSITDGNMPGTRPASRRMQQAGAVSPFGMLGMSGGFMDMFGMMNDMIGNMEHMTAGGNCQTFSSSTVISYSNTGDGAPKVYQETSEMRSAPGGIRETRRTVRDSDSGLEQMSIGHHIRDRAHILQRSRNHRTGDQEERQDYINLDESEAAAFDDEWRRETSRFRQQRPLEFRRLESSGAGGRRAEGPPRLAIQGPEDSPSRQSRRYDW

SEQ ID NO: 761473 - protein, 248 aa, Homo sapiens; identical to SEQ ID NO: 761472

SEQ ID NO: 761474 - protein, 248 aa, Homo sapiens; identical to SEQ ID NO: 761472

SEQ ID NO: 761475 - protein, 248 aa, Homo sapiens; identical to SEQ ID NO: 761472

SEQ ID NO: 761476 - protein, 248 aa, Homo sapiens; identical to SEQ ID NO: 761472

SEQ ID NO: 761477 - protein, 248 aa, Homo sapiens; identical to SEQ ID NO: 761472

SEQ ID NO: 761478 - protein, 248 aa, Homo sapiens; identical to SEQ ID NO: 761472

SEQ ID NO: 761479 - protein, 248 aa, Homo sapiens; identical to SEQ ID NO: 761472

SEQ ID NO: 761480 - protein, 248 aa, Homo sapiens; identical to SEQ ID NO: 761472

SEQ ID NO: 761481 - protein, 248 aa, Homo sapiens; identical to SEQ ID NO: 761472

SEQ ID NO: 761482 - protein, 248 aa, Homo sapiens; identical to SEQ ID NO: 761472

SEQ ID NO: 761483 - protein, 248 aa, Homo sapiens; identical to SEQ ID NO: 761472

SEQ ID NO: 761484 - protein, 248 aa, Homo sapiens; identical to SEQ ID NO: 761472

SEQ ID NO: 761485 - protein, 259 aa, Homo sapiens
MFRFMRDVEPEDPMFLMDPFAIHRQHMSRMLSGGFGYSPFLSITDGNMPGTRPASRRMQQAGAVSPFGMLGMSGGFMDMFGMMNDMIGNMEHMTAGGNCQTFSSSTVISYSNTGDGAPKVYQETSEMRSAPGGVSWGALLSQEKIRETRRTVRDSDSGLEQMSIGHHIRDRAHILQRSRNHRTGDQEERQDYINLDESEAAAFDDEWRRETSRFRQQRPLEFRRLESSGAGGRRAEGPPRLAIQGPEDSPSRQSRRYDW

SEQ ID NO: 761486 - protein, 173 aa, Homo sapiens
IPVFMTFWLYYILIYEHMTAGGNCQTFSSSTVISYSNTGDGAPKVYQETSEMRSAPGGIRETRRTVRDSDSGLEQMSIGHHIRDRAHILQRSRNHRTGDQEERQDYINLDESEAAAFDDEWRRETSRFRQQRPLEFRRLESSGAGGRRAEGPPRLAIQGPEDSPSRQSRRYDW

SEQ ID NO: 761487 - protein, 172 aa, Homo sapiens [sequence omitted]

SEQ ID NO: 761488 - protein, 122 aa, Homo sapiens
MLTVSALFGRHELTVRHSNRAVEQMSIGHHIRDRAHILQRSRNHRTGDQEERQDYINLDESEAAAFDDEWRRETSRFRQQRPLEFRRLESSGAGGRRAEGPPRLAIQGPEDSPSRQSRRYDW

SEQ ID NO: 761489 - protein, 109 aa, Homo sapiens
MFRFMRDVEPEDPMFLMDPFAIHRQHMSRMLSGGFGYSPFLSITDGNMPGTRPASRRMQQAGAVSPFGMLGMSGGFMDMFGMMNDMIGNMEHMTAGGNCLYFLICATCN

SEQ ID NO: 761490 - protein, 135 aa, Homo sapiens
SSPQGSAPPRRPQSARLSPRGICPSSSSFPLRRERERAALRPQVQPPTRSLPKNGFLFSFSSPALWEPLPVHRTQIEVTNELPFFVPRGPLSASGSAPLSLAHGPGAPGTRPQPSHHPRQGAGLPRPGPGWAGLS

SEQ ID NO: 761491 - protein, 248 aa, Homo sapiens; identical to SEQ ID NO: 761472

SEQ ID NO: 761492 - protein, 172 aa, Homo sapiens [sequence omitted]

SEQ ID NO: 761493 - protein, 166 aa, Homo sapiens
MFRFMRDVEPEDPMFLMDPFAIHRQHMSRMLSGGFGYSPFLSITDGNMPGTRPASRRMQQAGAVSPFGMLGMSGGFMDMFGMMNDMIGNMEHMTAGGNCQTFSSSTVISYSNTGDGAPKVYQETSEMRSAPGGIRETRRTVRDSDSGLEQMSIGHHIRDRAHILQR

SEQ ID NO: 761494 - protein, 196 aa, Homo sapiens
MFRFMRDVEPEDPMFLMDPFAIHRQHMSRMLSGGFGYSPFLSITDGNMPGTRPASRRMQQAGAVSPFGMLGMSGGFMDMFGMMNDMIGNMEHMTAGGNCQTFSSSTVISYSNTGDGAPKVYQETSEMRSAPGGIRETRRTVRDSDSGLEQMSIGHHIRDRAHILQRSRNHRTGDQEERQDYINLDETAPFPYLFLL

SEQ ID NO: 761495 - protein, 155 aa, Homo sapiens
MFRFMRDVEPEDPMFLMDPFAIHRQHMSRMLSGGFGYSPFLSITDGNMPGTRPASRRMQQAGAVSPFGMLGMSGGFMDMFGMMNDMIGNMVRLAPYPSPALLSVMADNTLHPLRQEGNSMLVKGKVLDKVIEPESLGTLYLLSCLPEAAGSSSLT

SEQ ID NO: 761496 - protein, 135 aa, Homo sapiens; identical to SEQ ID NO: 761490

SEQ ID NO: 761497 - protein, 98 aa, Homo sapiens
ADESFAPITKVFLPGPPVSRLKSEFALTIKNVIALAALQFVTDVIANENVIVRTIPSVGKAVISVLSTLTSSGSASSSAKHALTNQGIHSDNLWAPIT

SEQ ID NO: 761498 - protein, 131 aa, Homo sapiens
MAMGPRLGPHACVVGTTVTVPRVGRGPVMAESWSGQALQALPATVLGALGSEFLREWEAQDMRVTLFKLLLLWLVLSLLGIQLAWGFYGNTVTGLYHRPGLGGQNGSTPDGSTHFPSWEMAANEPLKTHRE

SEQ ID NO: 761499 - protein, 103 aa, Homo sapiens
MAESWSGQALQALPATVLGALGSEFLREWEAQDMRVTLFKLLLLWLVLSLLGIQLAWGFYGNTVTGLYHRPGLGGQNGSTPDGSTHFPSWEMAANEPLKTHRE

SEQ ID NO: 761500 - protein, 103 aa, Homo sapiens; identical to SEQ ID NO: 761499

SEQ ID NO: 761501 - protein, 106 aa, Homo sapiens
MAESWSGQALQALPATVLGALGSEFLREWEAQDMRVTLFKLLLLWLVLSLLGIQLAWGFYGNTVTGLYHRPGEASYEPPWAGRPRPHPLPTVPLGSPLSCKRLIRT

SEQ ID NO: 761502 - protein, 103 aa, Homo sapiens; identical to SEQ ID NO: 761499

SEQ ID NO: 761503 - protein, 103 aa, Homo sapiens; identical to SEQ ID NO: 761499

SEQ ID NO: 761504 - protein, 103 aa, Homo sapiens; identical to SEQ ID NO: 761499

SEQ ID NO: 761505 - protein, 103 aa, Homo sapiens; identical to SEQ ID NO: 761499

SEQ ID NO: 761506 - protein, 244 aa, Homo sapiens
MAESWSGQALQALPATVLGALGSEFLREWEAQDMRVTLFKLLLLWLVLSLLGIQLAWGFYGNTVTGLYHRPGPSPDFTKQYQWSLTCPGLMPAQIPTPAFCSSGCVSASVWVVRMDPRLMAPRISLRGKWQQTNLSKPTENKGRQQRVSKGITGSAGFYTGFCYSPDLRDNCRGFRVGSREYPVPTGLGLFCLLSLLPHPGTGQVKSLPVLLSGCLKERDCVLPLSGVITQEASGLGRPSVLLS

SEQ ID NO: 761507 - protein, 179 aa, Homo sapiens [sequence omitted]

SEQ ID NO: 761508 - protein, 106 aa, Homo sapiens; identical to SEQ ID NO: 761501

SEQ ID NO: 761509 - protein, 465 aa, Homo sapiens
AGGGGALGSPRRTAAMEQAPPDPERQLQPAPLEPLGSPDAGLGAAVGKEAEGAGEESSGVDTMTHNNFWLKKIEISVSEAEKRTGRNAMNMQETYTAYLIETRSVEHTDGQSVLTDSLWRRYSEFELLRSYLLVYYPHIVVPPLPEKRAEFVWHKLSADNMDPDFVERRRIGLENFLLRIASHPILCRDKIFYLFLTQEGNWKETVNETGFQLKADSRLKALNATFRVKNPDKRFTDLKHYSDELQSVISHLLRVRARVADRLYGVYKVHGNYGRVFSEWSAIEKEMGDGLQSAGHHMDVYASSIDDILEDEEHYADQLKEYLFYAEALRAVCRKHELMQYDLEMAAQDLASKKQQCEELVTGTVRTFSLKGMTTKLFGQETPEQREARIKVLEEQINEGEQQLKSKNLEGREFVKNAWADIERFKEQKNRDLKEALISYAVMQISMCKKGIQVWTNAKECFSKM

SEQ ID NO: 761510 - protein, 177 aa, Homo sapiens
MGIWCTDHFITQYASSIDDILEDEEHYADQLKEYLFYAEALRAVCRKHELMQYDLEMAAQDLASKKQQCEELVTGTVRTFSLKGMTTKLFGQETPEQREARIKVLEEQINEGEQQLKSKNLEGREFVKNAWADIERFKEQKNRDLKEALISYAVMQISMCKKGIQVWTNAKECFSKM

SEQ ID NO: 761511 - protein, 403 aa, Homo sapiens [sequence omitted]

SEQ ID NO: 761512 - protein, 465 aa, Homo sapiens; identical to SEQ ID NO: 761509

SEQ ID NO: 761513 - protein, 176 aa, Homo sapiens
RAAEAHWVRRAELQPWSRHLRTPSGSSSRRPWSRWAPQTLGWGLRSARKRRGPEKRALGSTRSVEHTDGQSVLTDSLWRRYSEFELLRSYLLVYYPHIVVPPLPEKRAEFVWHKLSADNMDPDFVERRRIGLENFLLRIASHPILCRDKIFYLFLTQEGNWKETVNETGFQLKEIY

SEQ ID NO: 761514 - protein, 287 aa, Homo sapiens
MDPDFVERRRIGLENFLLRIASHPILCRDKIFYLFLTQEGNWKETVNETGFQLKADSRLKALNATFRVKNPDKRFTDLKHYSDELQSVISHLLRVRARVADRLYGVYKVHGNYGRVFSEWSAIEKEMGDGLQSAGHHMDVYASSIDDILEDEEHYADQLIMQYDLEMAAQDLASKKQQCEELVTGTVRTFSLKGMTTKLFGQETPEQREARIKVLEEQINEGEQQLKSKNLEGREFVKNAWADIERFKEQKNRDLKEALISYAVMQISMCKKGIQVWTNAKECFSKM

SEQ ID NO: 761515 - protein, 419 aa, Homo sapiens
AGGGGALGSPRRTAAMEQAPPDPERQLQPAPLEPLGSPDAGLGAAVGKEAEGAGEESSGVDTMTHNNFWLKKIEISVSEAEKRTGRNAMNMQETYTAYLIETRSVEHTDGQSVLTDSLWRRYSEFELLRSYLLVYYPHIVVPPLPEKRAEFVWHKLSADNMDPDFVERRRIGLENFLLRIASHPILCRDKIFYLFLTQEGNWKETVNETGFQLKADSRLKALNATFRVKNPDKRFTDLKHYSDELQSVISHLLRVRARVADRLYGVYKVHGNYGRVFSEWSAIEKEMGDGLQSAGHHMDVYASSIDDILEDEEHYADQLKEYLFYAEALRAVCRKHELMQYDLEMAAQDLASKKQQCEELVTGTVRTFSLKGMTTKLFGQETPEQREARIKVLEEQINEGEQQLKSKNLEGSVWDPLRP

SEQ ID NO: 761516 - protein, 465 aa, Homo sapiens; identical to SEQ ID NO: 761509

SEQ ID NO: 761517 - protein, 305 aa, Homo sapiens
MDPDFVERRRIGLENFLLRIASHPILCRDKIFYLFLTQEGNWKETVNETGFQLKADSRLKALNATFRVKNPDKRFTDLKHYSDELQSVISHLLRVRARVADRLYGVYKVHGNYGRVFSEWSAIEKEMGDGLQSAGHHMDVYASSIDDILEDEEHYADQLKEYLFYAEALRAVCRKHELMQYDLEMAAQDLASKKQQCEELVTGTVRTFSLKGMTTKLFGQETPEQREARIKVLEEQINEGEQQLKSKNLEGREFVKNAWADIERFKEQKNRDLKEALISYAVMQISMCKKGIQVWTNAKECFSKM

SEQ ID NO: 761518 - protein, 499 aa, Homo sapiens
AGGGGALGSPRRTAAMEQAPPDPERQLQPAPLEPLGSPDAGLGAAVGKEAEGAGEESSGVDTMTHNNFWLKKIEISVSEAEKRTGRNAMNMQETYTAYLIETRSVEHTDGQSVLTDSLWRRYSEFELLRSYLLVYYPHIVVPPLPEKRAEFVWHKLSADNMDPDFVERRRIGLENFLLRIASHPILCRDKIFYLFLTQEGNWKETVNETGFQLKADSRLKALNATFRVKNPDKRFTDLKHYSDELQSVISHLLRVRARVADRLYGVYKVHGNYGRVFSEWSAIEKEMGDGLQSAGHHMDVYASSIDDILEDEEHYADQLKEYLFYAEALRAVCRKHELMQYDLEMAAQDLASKKQQCEELVTGTVRTFSLKGMTTKLFGQETPEQREARIKVLEEQINEGEQQLKSKNLEGREFVKNAWADIERFKEQKNRDLKEALISYAVMQISMCKKSPHPCHPRLECNGMILSLTYNPPPSRVQAILPHPARVDGITGNSSLDQC

SEQ ID NO: 761519 - protein, 465 aa, Homo sapiens; identical to SEQ ID NO: 761509

SEQ ID NO: 761520 - protein, 1668 aa, Homo sapiens
MSQLRLATLSLDEGSDSGDSEDDVGHKKRKRTSFDDRLEDDDFDLIEENLGVKVKRGQKYRRVKKMSDDEDDDEEEYGKEEHEKEAIAEEIFQDGEGEEGQEAMEAPMAPPEEEEEDDEESDIDDFIVDDDGQPLKKPKWRKKLPGYTDAALQEAQEIFGVDFDYDEFEKYNEYDEELEEEYEYEDDEAEGEIRVRPKKTTKKRVSRRSIFEMYEPSELESSHLTDQDNEIRATDLPERFQLRSIPVKGAEDDELEEEADWIYRNAFATPTISLQESCDYLDRGQPASSFSRKGPSTIQKIKEALGFMRNQHFEVPFIAFYRKEYVEPELHINDLWRVWQWDEKWTQLRIRKENLTRLFEKMQAYQYEQISADPDKPLADGIRALDTTDMERLKDVQSMDELKDVYNHFLLYYGRDIPKMQNAAKASRKKLKRVREEGDEEGEGDEAEDEEQRGPELKQASRRDMYTICQSAGLDGLAKKFGLTPEQFGENLRDSYQRHETEQFPAEPLELAKDYVCSQFPTPEAVLEGARYMVALQIAREPLVRQVLRQTFQERAKLNITPTKKGRKDVDEAHYAYSFKYLKNKPVKELRDDQFLKICLAEDEGLLTTDISIDLKGVEGYGNDQTYFEEIKQFYYRDEFSHQVQEWNRQRTMAIERALQQFLYVQMAKELKNKLLAEAKEYVIKACSRKLYNWLRVAPYRPDQQVEEDDDFMDENQGKGIRVLGIAFSSARDHPVFCALVNGEGEVTDFLRLPHFTKRRTAWREEEREKKAQDIETLKKFLLNKKPHVVTVAGENRDAQMLIEDVKRIVHELDQGQQLSSIGVELVDNELAILYMNSKKSEAEFRDYPPVLRQAVSLARRIQDPLIEFAQVCSSDEDILCLKFHPLQEHVVKEELLNALYCEFINRVNEVGVDVNRAIAHPYSQALIQYVCGLGPRKGTHLLKILKQNNTRLESRTQLVTMCHMGPKVFMNCAGFLKIDTASLGDSTDSYIEVLDGSRVHPETYEWARKMAVDALEYDESAEDANPAGALEEILENPERLKDLDLDAFAEELERQGYGDKHITLYDIRAELSCRYKDLRTAYRSPNTEEIFNMLTKETPETFYIGKLIICNVTGIAHRRPQGESYDQAIRNDETGLWQCPFCQQDNFPELSEVWNHFDSGSCPGQAIGVKTRLDNGVTGFIPTKFLSDKVVKRPEERVKVGMTVHCRIMKIDIEKFSADLTCRTSDLMDRNNEWKLPKDTYYDFDAEAADHKQEEDMKRKQQRTTYIKRVIAHPSFHNINFKQAEKMMETMDQGDVIIRPSSKGENHLTVTWKVSDGIYQHVDVREEGKENAFSLGATLWINSEEFEDLDEIVARYVQPMASFARDLLNHKYYQDCSGGDRKKLEELLIKTKKEKPTFIPYFICACKELPGKFLLGYQPRGKPRIEYVTVTPEGFRYRGQIFPTVNGLFRWFKDHYQDPVPGITPSSSSRTRTPASINATPANINLADLTRAVNALPQNMTSQMFSAIAAVTGQGQNPNATPAQWASSQYGYGGSGGGSSAYHVFPTPAQQPVATPLMTPSYSYTTPSQPITTPQYHQLQASTTPQSAQAQPQPSSSSRQRQQQPKSNSHAAIDWGKMAEQWLQEKEAERRKQKQRLTPRPSPSPMIESTPMSIAGDATPLLDEMDR

SEQ ID NO: 761521 - protein, 124 aa, Homo sapiens
MLATTFPIQIHITFPHEKYHIKFDPQIEESYMVPTFSLPWDVGAPGCYLTRVPSTAGLGKGKENAFSLGATLWINSEEFEDLDEIVARYVQPMASFARDLLNHKYYYSWPSSPAQGILVETTAQ

SEQ ID NO: 761522 - protein, 1627 aa, Homo sapiens
LEDDDFLLNEVKVKRGQKYRRVKKMSDDEDDDEEEYGKEEHEKEAIAEEIFQDGEGEEGQEAMEAPMAPPEEEEEDDEESDIDDFIVDDDGQPLKKPKWRKKLPGYTDAALQEAQEIFGVDFDYDEFEKYNEYDEELEEEYEYEDDEAEGEIRVRPKKTTKKRVSRRSIFEMYEPSELESSHLTDQDNEIRATDLPERFQLRSIPVKGAEDDELEEEADWIYRNAFATPTISLQESCDYLDRGQPASSFSRKGPSTIQKIKEALGFMRNQHFEVPFIAFYRKEYVEPELHINDLWRVWQWDEKWTQLRIRKENLTRLFEKMQAYQYEQISADPDKPLADGIRALDTTDMERLKDVQSMDELKDVYNHFLLYYGRDIPKMQNAAKASRKKLKRVREEGDEEGEGDEAEDEEQRGPELKQASRRDMYTICQSAGLDGLAKKFGLTPEQFGENLRDSYQRHETEQFPAEPLELAKDYVCSQFPTPEAVLEGARYMVALQIAREPLVRQVLRQTFQERAKLNITPTKKGRKDVDEAHYAYSFKYLKNKPVKELRDDQFLKICLAEDEGLLTTDISIDLKGVEGYGNDQTYFEEIKQFYYRDEFSHQVQEWNRQRTMAIERALQQFLYVQMAKELKNKLLAEAKEYVIKACSRKLYNWLRVAPYRPDQQVEEDDDFMDENQGKGIRVLGIAFSSARDHPVFCALVNGEGEVTDFLRLPHFTKRRTAWREEEREKKAQDIETLKKFLLNKKPHVVTVAGENRDAQMLIEDVKRIVHELDQGQQLSSIGVELVDNELAILYMNSKKSEAEFRDYPPVLRQAVSLARRIQDPLIEFAQVCSSDEDILCLKFHPLQEHVVKEELLNALYCEFINRVNEVGVDVNRAIAHPYSQALIQYVCGLGPRKGTHLLKILKQNNTRLESRTQLVTMCHMGPKVFMNCAGFLKIDTASLGDSTDSYIEVLDGSRVHPETYEWARKMAVDALEYDESAEDANPAGALEEILENPERLKDLDLDAFAEELERQGYGDKHITLYDIRAELSCRYKDLRTAYRSPNTEEIFNMLTKETPETFYIGKLIICNVTGIAHRRPQGESYDQAIRNDETGLWQCPFCQQDNFPELSEVWNHFDSGSCPGQAIGVKTRLDNGVTGFIPTKFLSDKVVKRPEERVKVGMTVHCRIMKIDIEKFSADLTCRTSDLMDRNNEWKLPKDTYYDFDAEAADHKQEEDMKRKQQRTTYIKRVIAHPSFHNINFKQAEKMMETMDQGDVIIRPSSKGENHLTVTWKVSDGIYQHVDVREEGKENAFSLGATLWINSEEFEDLDEIVARYVQPMASFARDLLNHKYYQDCSGGDRKKLEELLIKTKKEKPTFIPYFICACKELPGKFLLGYQPRGKPRIEYVTVTPEGFRYRGQIFPTVNGLFRWFKDHYQDPVPGITPSSSSRTRTPASINATPANINLADLTRAVNALPQNMTSQMFSAIAAVTGQGQNPNATPAQWASSQYGYGGSGGGSSAYHVFPTPAQQPVATPLMTPSYSYTTPSQPITTPQYHQLQASTTPQSAQAQPQPSSSSRQRQQQPKSNSHAAIDWGKMAEQWLQEKEAERRKQKQRLTPRPSPSPMIESTPMSIAGDATPLLDEMDR

SEQ ID NO: 761523 - protein, 1726 aa, Homo sapiens
MSDFVESEAEESEEEYNDEGEVVPRVTKKFVEEEDDDEEEEEENLDDQDEQGNLKGFINDDDDEDEGEEDEGSDSGDSEDDVGHKKRKRTSFDDRLEDDDFDLIEENLGVKVKRGQKYRRVKKMSDDEDDDEEEYGKEEHEKEAIAEEIFQDGEGEEGQEAMEAPMAPPEEEEEDDEESDIDDFIVDDDGQPLKKPKWRKKLPGYTDAALQEAQEIFGVDFDYDEFEKYNEYDEELEEEYEYEDDEAEGEIRVRPKKTTKKRVSRRSIFEMYEPSELESSHLTDQDNEIRATDLPERFQLRSIPVKGAEDDELEEEADWIYRNAFATPTISLQESCDYLDRGQPASSFSRKGPSTIQKIKEALGFMRNQHFEVPFIAFYRKEYVEPELHINDLWRVWQWDEKWTQLRIRKENLTRLFEKMQAYQYEQISADPDKPLADGIRALDTTDMERLKDVQSMDELKDVYNHFLLYYGRDIPKMQNAAKASRKKLKRVREEGDEEGEGDEAEDEEQRGPELKQASRRDMYTICQSAGLDGLAKKFGLTPEQFGENLRDSYQRHETEQFPAEPLELAKDYVCSQFPTPEAVLEGARYMVALQIAREPLVRQVLRQTFQERAKLNITPTKKGRKDVDEAHYAYSFKYLKNKPVKELRDDQFLKICLAEDEGLLTTDISIDLKGVEGYGNDQTYFEEIKQFYYRDEFSHQVQEWNRQRTMAIERALQQFLYVQMAKELKNKLLAEAKEYVIKACSRKLYNWLRVAPYRPDQQVEEDDDFMDENQGKGIRVLGIAFSSARDHPVFCALVNGEGEVTDFLRLPHFTKRRTAWREEEREKKAQDIETLKKFLLNKKPHVVTVAGENRDAQMLIEDVKRIVHELDQGQQLSSIGVELVDNELAILYMNSKKSEAEFRDYPPVLRQAVSLARRIQDPLIEFAQVCSSDEDILCLKFHPLQEHVVKEELLNALYCEFINRVNEVGVDVNRAIAHPYSQALIQYVCGLGPRKGTHLLKILKQNNTRLESRTQLVTMCHMGPKVFMNCAGFLKIDTASLGDSTDSYIEVLDGSRVHPETYEWARKMAVDALEYDESAEDANPAGALEEILENPERLKDLDLDAFAEELERQGYGDKHITLYDIRAELSCRYKDLRTAYRSPNTEEIFNMLTKETPETFYIGKLIICNVTGIAHRRPQGESYDQAIRNDETGLWQCPFCQQDNFPELSEVWNHFDSGSCPGQAIGVKTRLDNGVTGFIPTKFLSDKVVKRPEERVKVGMTVHCRIMKIDIEKFSADLTCRTSDLMDRNNEWKLPKDTYYDFDAEAADHKQEEDMKRKQQRTTYIKRVIAHPSFHNINFKQAEKMMETMDQGDVIIRPSSKGENHLTVTWKVSDGIYQHVDVREEGKENAFSLGATLWINSEEFEDLDEIVARYVQPMASFARDLLNHKYYQDCSGGDRKKLEELLIKTKKEKPTFIPYFICACKELPGKFLLGYQPRGKPRIEYVTVTPEGFRYRGQIFPTVNGLFRWFKDHYQDPVPGITPSSSSRTRTPASINATPANINLADLTRAVNALPQNMTSQMFSAIAAVTGQGQNPNATPAQWASSQYGYGGSGGGSSAYHVFPTPAQQPVATPLMTPSYSYTTPSQPITTPQYHQLQASTTPQSAQAQPQPSSSSRQRQQQPKSNSHAAIDWGKMAEQWLQEKEAERRKQKQRLTPRPSPSPMIESTPMSIAGDATPLLDEMDR

SEQ ID NO: 761524 - protein, 979 aa, Homo sapiens
DRVLDLDAFAEELERQGYGDKHITLYDIRAELSCRYKDLRTAYRSPNTEEIFNGEGEVTDFLRLPHFTKRRTAWREEEREKKAQDIETLKKFLLNKKPHVVTVAGENRDAQMLIEDVKRIVHELDQGQQLSSIGVELVDNELAILYMNSKKSEAEFRDYPPVLRQAVSLARRIQDPLIEFAQVCSSDEDILCLKFHPLQEHVVKEELLNALYCEFINRVNEVGVDVNRAIAHPYSQALIQYVCGLGPRKGTHLLKILKQNNTRLESRTQLVTMCHMGPKVFMNCAGFLKIDTASLGDSTDSYIEVLDGSRVHPETYEWARKMAVDALEYDESAEDANPAGALEEILENPERLKDLDLDAFAEELERQGYGDKHITLYDIRAELSCRYKDLRTAYRSPNTEEIFNMLTKETPETFYIGKLIICNVTGIAHRRPQGESYDQAIRNDETGLWQCPFCQQDNFPELSEVWNHFDSGSCPGQAIGVKTRLDNGVTGFIPTKFLSDKVVKRPEERVKVGMTVHCRIMKIDIEKFSADLTCRTSDLMDRNNEWKLPKDTYYDFDAEAADHKQEEDMKRKQQRTTYIKRVIAHPSFHNINFKQAEKMMETMDQGDVIIRPSSKGENHLTVTWKVSDGIYQHVDVREEGKENAFSLGATLWINSEEFEDLDEIVARYVQPMASFARDLLNHKYYQDCSGGDRKKLEELLIKTKKEKPTFIPYFICACKELPGKFLLGYQPRGKPRIEYVTVTPEGFRYRGQIFPTVNGLFRWFKDHYQDPVPGITPSSSSRTRTPASINATPANINLADLTRAVNALPQNMTSQMFSAIAAVTGQGQNPNATPAQWASSQYGYGGSGGGSSAYHVFPTPAQQPVATPLMTPSYSYTTPSQPITTPQYHQLQASTTPQSAQAQPQPSSSSRQRQQQPKSNSHAAIDWGKMAEQWLQEKEAERRKQKQRLTPRPSPSPMIESTPMSIAGDATPLLDEMDR

SEQ ID NO: 761525 - protein, 658 aa, Homo sapiens
MAVDALEYDESAEDANPAGALEEILENPERLKDLDLDAFAEELERQGYGDKHITLYDIRAELSCRYKDLRTAYRSPNTEEIFNMLTKETPETFYIGKLIICNVTGIAHRRPQGESYDQAIRNDETGLWQCPFCQQDNFPELSEVWNHFDSGSCPGQAIGVKTRLDNGVTGFIPTKFLSDKVVKRPEERVKVGMTVHCRIMKIDIEKFSADLTCRTSDLMDRNNEWKLPKDTYYDFDAEAADHKQEEDMKRKQQRTTYIKRVIAHPSFHNINFKQAEKMMETMDQGDVIIRPSSKGENHLTVTWKVSDGIYQHVDVREEGKENAFSLGATLWINSEEFEDLDEIVARYVQPMASFARDLLNHKYYQDCSGGDRKKLEELLIKTKKEKPTFIPYFICACKELPGKFLLGYQPRGKPRIEYVTVTPEGFRYRGQIFPTVNGLFRWFKDHYQDPVPGITPSSSSRTRTPASINATPANINLADLTRAVNALPQNMTSQMFSAIAAVTGQGQNPNATPAQWASSQYGYGGSGGGSSAYHVFPTPAQQPVATPLMTPSYSYTTPSQPITTPQYHQLQASTTPQSAQAQPQPSSSSRQRQQQPKSNSHAAIDWGKMAEQWLQEKEAERRKQKQRLTPRPSPSPMIESTPMSIAGDATPLLDEMDR

SEQ ID NO: 761526 - protein, 633 aa, Homo sapiens
MARYEALVVNRPRLCRRAGEAGYGDKHITLYDIRAELSCRYKDLRTAYRSPNTEEIFNMLTKETPETFYIGKLIICNVTGIAHRRPQGESYDQAIRNDETGLWQCPFCQQDNFPELSEVWNHFDSGSCPGQAIGVKTRLDNGVTGFIPTKFLSDKVVKRPEERVKVGMTVHCRIMKIDIEKFSADLTCRTSDLMDRNNEWKLPKDTYYDFDAEAADHKQEEDMKRKQQRTTYIKRVIAHPSFHNINFKQAEKMMETMDQGDVIIRPSSKGENHLTVTWKVSDGIYQHVDVREEGKENAFSLGATLWINSEEFEDLDEIVARYVQPMASFARDLLNHKYYQDCSGGDRKKLEELLIKTKKEKPTFIPYFICACKELPGKFLLGYQPRGKPRIEYVTVTPEGFRYRGQIFPTVNGLFRWFKDHYQDPVPGITPSSSSRTRTPASINATPANINLADLTRAVNALPQNMTSQMFSAIAAVTGQGQNPNATPAQWASSQYGYGGSGGGSSAYHVFPTPAQQPVATPLMTPSYSYTTPSQPITTPQYHQLQASTTPQSAQAQPQPSSSSRQRQQQPKSNSHAAIDWGKMAEQWLQEKEAERRKQKQRLTPRPSPSPMIESTPMSIAGDATPLLDEMDR

SEQ ID NO: 761527 - protein, 606 aa, Homo sapiens
LEDPGLHKGSNPAGALEEILENPERLKDLDLDAFAEELERQGYGDKHITLYDIRAELSCRYKDLRTAYRSPNTEEIFNMLTKETPETFYIGKLIICNVTGIAHRRPQGESYDQAIRNDETGLWQCPFCQQDNFPELSEVGMTVHCRIMKIDIEKFSADLTCRTSDLMDRNNEWKLPKDTYYDFDAEAADHKQEEDMKRKQQRTTYIKRVIAHPSFHNINFKQAEKMMETMDQGDVIIRPSSKGENHLTVTWKVSDGIYQHVDVREEGKENAFSLGATLWINSEEFEDLDEIVARYVQPMASFARDLLNHKYYQDCSGGDRKKLEELLIKTKKEKPTFIPYFICACKELPGKFLLGYQPRGKPRIEYVTVTPEGFRYRGQIFPTVNGLFRWFKDHYQDPVPGITPSSSSRTRTPASINATPANINLADLTRAVNALPQNMTSQMFSAIAAVTGQGQNPNATPAQWASSQYGYGGSGGGSSAYHVFPTPAQQPVATPLMTPSYSYTTPSQPITTPQYHQLQASTTPQSAQAQPQPSSSSRQRQQQPKSNSHAAIDWGKMAEQWLQEKEAERRKQKQRLTPRPSPSPMIESTPMSIAGDATPLLDEMDR

SEQ ID NO: 761528 - protein, 1358 aa, Homo sapiens
LEDDDFLLNEVKVKRGQKYRRVKKMSDDEDDDEEEYGKEEHEKEAIAEEIFQDGEGEEGQEAMEAPMAPPEEEEEDDEESDIDDFIVDDDGQPLKKPKWRKKLPGYTDAALQEAQEIFGVDFDYDEFEKYNEYDEELEEEYEYEDDEAEGEIRVRPKKTTKKRVSRRSIFEMYEPSELESSHLTDQDNEIRATDLPERFQLRSIPVKGAEDDELEEEADWIYRNAFATPTISLQESCDYLDRGQPASSFSRKGPSTIQKIKEALGFMRNQHFEVPFIAFYRKEYVEPELHINDLWRVWQWDEKWTQLRIRKENLTRLFEKMQAYQYEQISADPDKPLADGIRALDTTDMERLKDVQSMDELKDVYNHFLLYYGRDIPKMQNAAKASRKKLKRVREEGDEEGEGDEAEDEEQRGPELKQASRRDMYTICQSAGLDGLAKKFGLTPEQFGENLRDSYQRHETEQFPAEPLELAKDYVCSQFPTPEAVLEGARYMVALQIAREPLVRQVLRQTFQERAKLNITPTKKGRKDVDEAHYAYSFKYLKNKPVKELRDDQFLKICLAEDEGLLTTDISIDLKGVEGYGNDQTYFEEIKQFYYRDEFSHQVQEWNRQRTMAIERALQQFLYVQMAKELKNKLLAEAKEYVIKACSRKLYNWLRVAPYRPDQQVEEDDDFMDENQGKGIRVLGIAFSSARDHPVFCALVNGEGEVTDFLRLPHFTKRRTAWREEEREKKAQDIETLKKFLLNKKPHVVTVAGENRDAQMLIEDVKRIVHELDQGQQLSSIGVELVDNELAILYMNSKKSEAEFRDYPPVLRQAVSLARRIQDPLIEFAQVCSSDEDILCLKFHPLQEHVVKEELLNALYCEFINRVNEVGVDVNRAIAHPYSQALIQYVCGLGPRKGTHLLKILKQNNTRLESRTQLVTMCHMGPKVFMNCAGFLKIDTASLGDSTDSYIEVLDGSRVHPETYEWARKMAVDALEYDESAEDANPAGALEEILENPERLKDLDLDAFAEELERQGYGDKHITLYDIRAELSCRYKDLRTAYRSPNTEEIFNMLTKETPETFYIGKLIICNVTGIAHRRPQGESYDQAIRNDETGLWQCPFCQQDNFPELSEVWNHFDSGSCPGQAIGVKTRLDNGVTGFIPTKFLSDKVVKRPEERVKVGMTVHCRIMKIDIEKFSADLTCRTSDLMDRNNEWKLPKDTYYDFDAEAADHKQEEDMKRKQQRTTYIKRVIAHPSFHNINFKQAEKMMETMDQGDVIIRPSSKGENHLTVTWKVSDGIYQHVDVREEGKENAFSLGATLWINSEEFEDLDEIVARYVQPMASFARDLLNHKYYDRICNGDSRGIPVPGPDLPNREWTV

SEQ ID NO: 761529 - protein, 429 aa, Homo sapiens
DGCDGAGEATVNHKQEEDMKRKQQRTTYIKRVIAHPSFHNINFKQAEKMMETMDQGDVIIRPSSKGENHLTVTWKVSDGIYQHVDVREEGKENAFSLGATLWINSEEFEDLDEIVARYVQPMASFARDLLNHKYYQDCSGGDRKKLEELLIKTKKEKPTFIPYFICACKELPGKFLLGYQPRGKPRIEYVTVTPEGFRYRGQIFPTVNGLFRWFKDHYQDPVPGITPSSSSRTRTPASINATPANINLADLTRAVNALPQNMTSQMFSAIAAVTGQGQNPNATPAQWASSQYGYGGSGGGSSAYHVFPTPAQQPVATPLMTPSYSYTTPSQPITTPQYHQLQASTTPQSAQAQPQPSSSSRQRQQQPKSNSHAAIDWGKMAEQWLQEKEAERRKQKQRLTPRPSPSPMIESTPMSIAGDATPLLDEMDR

SEQ ID NO: 761530 - protein, 1455 aa, Homo sapiens
LEDDDFLLNEVKVKRGQKYRRVKKMSDDEDDDEEEYGKEEHEKEAIAEEIFQDGEGEEGQEAMEAPMAPPEEEEEDDEESDIDDFIVDDDGQPLKKPKWRKKLPGYTDAALQEAQEIFGVDFDYDEFEKYNEYDEELEEEYEYEDDEAEGEIRVRPKKTTKKRVSRRSIFEMYEPSELESSHLTDQDNEIRATDLPERFQLRSIPVKGAEDDELEEEADWIYRNAFATPTISLQESCDYLDRGQPASSFSRKGPSTIQKIKEALGFMRNQHFEVPFIAFYRKEYVEPELHINDLWRVWQWDEKWTQLRIRKENLTRLFEKMQAYQYEQISADPDKPLADGIRALDTTDMERLKDVQSMDELKDVYNHFLLYYGRDIPKMQNAAKASRKKLKRVREEGDEEGEGDEAEDEEQRGPELKQASRRDMYTICQSAGLDGLAKKFGLTPEQFGENLRDSYQRHETEQFPAEPLELAKDYVCSQFPTPEAVLEGARYMVALQIAREPLVRQVLRQTFQERAKLNITPTKKGRKDVDEAHYAYSFKYLKNKPVKELRDDQFLKICLAEDEGLLTTDISIDLKGVEGYGNDQTYFEEIKQFYYRDEFSHQVQEWNRQRTMAIERALQQFLYVQMAKELKNKLLAEAKEYVIKACSRKLYNWLRVAPYRPDQQVEEDDDFMDENQGKGIRVLGIAFSSARDHPVFCALVNGEGEVTDFLRLPHFTKRRTAWREEEREKKAQDIETLKKFLLNKKPHVVTVAGENRDAQMLIEDVKRIVHELDQGQQLSSIGVELVDNELAILYMNSKKSEAEFRDYPPVLRQAVSLARRIQDPLIEFAQVCSSDEDILCLKFHPLQEHVVKEELLNALYCEFINRVNEVGVDVNRAIAHPYSQALIQYVCGLGPRKGTHLLKILKQNNTRLESRTQLVTMCHMGPKVFMNCAGFLKIDTASLGDSTDSYIEVLDGSRVHPETYEWARKMAVDALEYDESAEDANPAGALEEILENPERLKDLDLDAFAEELERQGYGDKHITLYDIRAELSCRYKDLRTAYRSPNTEEIFNMLTKETPETFYIGKLIICNVTGIAHRRPQGESYDQAIRNDETGLWQCPFCQQDNFPELSEVWNHFDSGSCPGQAIGVKTRLDNGVTGFIPTKFLSDKVVKRPEERVKVGMTVHCRIMKIDIEKFSADLTCRTSDLMDRNNEWKLPKDTYYDFDAEAADHKQEEDMKRKQQRTTYIKRVIAHPSFHNINFKQAEKMMETMDQGDVIIRPSSKGENHLTVTWKVSDGIYQHVDVREEGKENAFSLGATLWINSEEFEDLDEIVARYVQPMASFARDLLNHKYYQDCSGGDRKKLEELLIKTKKEKPTFIPYFICACKELPGKFLLGYQPRGKPRIEYVTVTPEGFRYRGQIFPTVNGLFRWFKDHYQDPVPGITPSSSSRTRTPASINATPANINLAARSRLDRA

SEQ ID NO: 761531 - protein, 373 aa, Homo sapiens
VGITGSTRMRQDEHGYISRCFTRKYTLPPGVDPTQVSSSLSPEGTLTVEAPMPKLATQSNEITIPVTFESRAQLEKQWWARSSGGDRKKLEELLIKTKKEKPTFIPYFICACKELPGKFLLGYQPRGKPRIEYVTVTPEGFRYRGQIFPTVNGLFRWFKDHYQDPVPGITPSSSSRTRTPASINATPANINLADLTRAVNALPQNMTSQMFSAIAAVTGQGQNPNATPAQWASSQYGYGGSGGGSSAYHVFPTPAQQPVATPLMTPSYSYTTPSQPITTPQYHQLQASTTPQSAQAQPQPSSSSRQRQQQPKSNSHAAIDWGKMAEQWLQEKEAERRKQKQRLTPRPSPSPMIESTPMSIAGDATPLLDEMDR

SEQ ID NO: 761532 - protein, 627 aa, Homo sapiens
LEDDDFLLNEVKVKRGQKYRRVKKMSDDEDDDEEEYGKEEHEKEAIAEEIFQDGEGEEGQEAMEAPMAPPEEEEEDDEESDIDDFIVDDDGQPLKKPKWRKKLPGYTDAALQEAQEIFGVDFDYDEFEKYNEYDEELEEEYEYEDDEAEGEIRVRPKKTTKKRVSRRSIFEMYEPSELESSHLTDQDNEIRATDLPERFQLRSIPVKGAEDDELEEEADWIYRNAFATPTISLQESCDYLDRGQPASSFSRKGPSTIQKIKEALGFMRNQHFEVPFIAFYRKEYVEPELHINDLWRVWQWDEKWTQLRIRKENLTRLFEKMQAYQYEQISADPDKPLADGIRALDTTDMERLKDVQSMDELKDVYNHFLLYYGRDIPKMQNAAKASRKKLKRVREEGDEEGEGDEAEDEEQRGPELKQASRRDMYTICQSAGLDGLAKKFGLTPEQFGENLRDSYQRHETEQFPAEPLELAKDYVCSQFPTPEAVLEGARYMVALQIAREPLVRQVLRQTFQERAKLMTPSYSYTTPSQPITTPQYHQLQASTTPQSAQAQPQPSSSSRQRQQQPKSNSHAAIDWGKMAEQWLQEKEAERRKQKQRLTPRPSPSPMIESTPMSIAGDATPLLDEMDR

SEQ ID NO: 761533 - protein, 1103 aa, Homo sapiens
LEDDDFLLNEVKVKRGQKYRRVKKMSDDEDDDEEEYGKEEHEKEAIAEEIFQDGEGEEGQEAMEAPMAPPEEEEEDDEESDIDDFIVDDDGQPLKKPKWRKKLPGYTDAALQEAQEIFGVDFDYDEFEKYNEYDEELEEEYEYEDDEAEGEIRVRPKKTTKKRVSRRSIFEMYEPSELESSHLTDQDNEIRATDLPERFQLRSIPVKGAEDDELEEEADWIYRNAFATPTISLQESCDYLDRGQPASSFSRKGPSTIQKIKEALGFMRNQHFEVPFIAFYRKEYVEPELHINDLWRVWQWDEKWTQLRIRKENLTRLFEKMQAYQYEQISADPDKPLADGIRALDTTDMERLKDVQSMDELKDVYNHFLLYYGRDIPKMQNAAKASRKKLKRVREEGDEEGEGDEAEDEEQRGPELKQASRRDMYTICQSAGLDGLAKKFGLTPEQFGENLRDSYQRHETEQFPAEPLELAKDYVCSQFPTPEAVLEGARYMVALQIAREPLVRQVLRQTFQERAKLNITPTKKGRKDVDEAHYAYSFKYLKNKPVKELRDDQFLKICLAEDEGLLTTDISIDLKGVEGYGNDQTYFEEIKQFYYRDEFSHQVQEWNRQRTMAIERALQQFLYVQMAKELKNKLLAEAKEYVIKACSRKLYNWLRVAPYRPDQQVEEDDDFMDENQGKGIRVLGIAFSSARDHPVFCALVNGEGEVTDFLRLPHFTKRRTAWREEEREKKAQDIETLKKFLLNKKPHVVTVAGENRDAQMLIEDVKRIVHELDQGQQLSSIGVELVDNELAILYMNSKKSEAEFRDYPPVLRQAVSLARRIQDPLIEFAQVCSSDEDILCLKFHPLQEHVVKEELLNALYCEFINRVNEVGVDVNRAIAHPYSQALIQYVCGLGPRKGTHLLKILKQNNTRLESRTQLVTMCHMGPKVFMNCAGFLKIDTASLGDSTDSYIEVLDGSRVHPETYEWARKMAVDALEYDESAEDANPAGALEEILENPERLKDLDLDAFAEELERQGYGDKHITLYDIRAELSCRYKDLRTAYRSPNTEEIFNMLTKETPETFYIGKLIICNVTGIAHRRPQGESYDQATVKNVTAPHRRCYTT

SEQ ID NO: 761534 - protein, 106 aa, Homo sapiens
LQEAQEIFGVDFDYDEFEKYNEYDEELEEEYEYEDDEAEGEIRVRPKKTTKKRVSRRSIFEMYEPSELESSHLTDQDNEIRATDLPERFQVKNHQPLLFYQSIITL

SEQ ID NO: 761535 - protein, 1726 aa, Homo sapiens; identical to SEQ ID NO: 761523

SEQ ID NO: 761536 - protein, 130 aa, Homo sapiens
VGITGSTRMRQDEHGYISRCFTRKYTLPPGVDPTQVSSSLSPEGTLTVEAPMPKLATQSNEITIPVTFESRAQLEKQWWARSSGGDRKKLEELLIKTKKEKPTFIPYFICACKELPGKFLLGYQPRGKPR

SEQ ID NO: 761537 - protein, 1703 aa, Homo sapiens
MKSSGSAQKLSHRDEEEEEENLDDQDEQGNLKGFINDDDDEDEGEEDEGSDSGDSEDDVGHKKRKRTSFDDRLEDDDFDLIEENLGVKVKRGQKYRRVKKMSDDEDDDEEEYGKEEHEKEAIAEEIFQDGEGEEGQEAMEAPMAPPEEEEEDDEESDIDDFIVDDDGQPLKKPKWRKKLPGYTDAALQEAQEIFGVDFDYDEFEKYNEYDEELEEEYEYEDDEAEGEIRVRPKKTTKKRVSRRSIFEMYEPSELESSHLTDQDNEIRATDLPERFQLRSIPVKGAEDDELEEEADWIYRNAFATPTISLQESCDYLDRGQPASSFSRKGPSTIQKIKEALGFMRNQHFEVPFIAFYRKEYVEPELHINDLWRVWQWDEKWTQLRIRKENLTRLFEKMQAYQYEQISADPDKPLADGIRALDTTDMERLKDVQSMDELKDVYNHFLLYYGRDIPKMQNAAKASRKKLKRVREEGDEEGEGDEAEDEEQRGPELKQASRRDMYTICQSAGLDGLAKKFGLTPEQFGENLRDSYQRHETEQFPAEPLELAKDYVCSQFPTPEAVLEGARYMVALQIAREPLVRQVLRQTFQERAKLNITPTKKGRKDVDEAHYAYSFKYLKNKPVKELRDDQFLKICLAEDEGLLTTDISIDLKGVEGYGNDQTYFEEIKQFYYRDEFSHQVQEWNRQRTMAIERALQQFLYVQMAKELKNKLLAEAKEYVIKACSRKLYNWLRVAPYRPDQQVEEDDDFMDENQGKGIRVLGIAFSSARDHPVFCALVNGEGEVTDFLRLPHFTKRRTAWREEEREKKAQDIETLKKFLLNKKPHVVTVAGENRDAQMLIEDVKRIVHELDQGQQLSSIGVELVDNELAILYMNSKKSEAEFRDYPPVLRQAVSLARRIQDPLIEFAQVCSSDEDILCLKFHPLQEHVVKEELLNALYCEFINRVNEVGVDVNRAIAHPYSQALIQYVCGLGPRKGTHLLKILKQNNTRLESRTQLVTMCHMGPKVFMNCAGFLKIDTASLGDSTDSYIEVLDGSRVHPETYEWARKMAVDALEYDESAEDANPAGALEEILENPERLKDLDLDAFAEELERQGYGDKHITLYDIRAELSCRYKDLRTAYRSPNTEEIFNMLTKETPETFYIGKLIICNVTGIAHRRPQGESYDQAIRNDETGLWQCPFCQQDNFPELSEVWNHFDSGSCPGQAIGVKTRLDNGVTGFIPTKFLSDKVVKRPEERVKVGMTVHCRIMKIDIEKFSADLTCRTSDLMDRNNEWKLPKDTYYDFDAEAADHKQEEDMKRKQQRTTYIKRVIAHPSFHNINFKQAEKMMETMDQGDVIIRPSSKGENHLTVTWKVSDGIYQHVDVREEGKENAFSLGATLWINSEEFEDLDEIVARYVQPMASFARDLLNHKYYQDCSGGDRKKLEELLIKTKKEKPTFIPYFICACKELPGKFLLGYQPRGKPRIEYVTVTPEGFRYRGQIFPTVNGLFRWFKDHYQDPVPGITPSSSSRTRTPASINATPANINLADLTRAVNALPQNMTSQMFSAIAAVTGQGQNPNATPAQWASSQYGYGGSGGGSSAYHVFPTPAQQPVATPLMTPSYSYTTPSQPITTPQYHQLQASTTPQSAQAQPQPSSSSRQRQQQPKSNSHAAIDWGKMAEQWLQEKEAERRKQKQRLTPRPSPSPMIESTPMSIAGDATPLLDEMDR

SEQ ID NO: 761538 - protein, 1714 aa, Homo sapiens
MIPPSNISFVVPRVTKKFVEEEDDDEEEEEENLDDQDEQGNLKGFINDDDDEDEGEEDEGSDSGDSEDDVGHKKRKRTSFDDRLEDDDFDLIEENLGVKVKRGQKYRRVKKMSDDEDDDEEEYGKEEHEKEAIAEEIFQDGEGEEGQEAMEAPMAPPEEEEEDDEESDIDDFIVDDDGQPLKKPKWRKKLPGYTDAALQEAQEIFGVDFDYDEFEKYNEYDEELEEEYEYEDDEAEGEIRVRPKKTTKKRVSRRSIFEMYEPSELESSHLTDQDNEIRATDLPERFQLRSIPVKGAEDDELEEEADWIYRNAFATPTISLQESCDYLDRGQPASSFSRKGPSTIQKIKEALGFMRNQHFEVPFIAFYRKEYVEPELHINDLWRVWQWDEKWTQLRIRKENLTRLFEKMQAYQYEQISADPDKPLADGIRALDTTDMERLKDVQSMDELKDVYNHFLLYYGRDIPKMQNAAKASRKKLKRVREEGDEEGEGDEAEDEEQRGPELKQASRRDMYTICQSAGLDGLAKKFGLTPEQFGENLRDSYQRHETEQFPAEPLELAKDYVCSQFPTPEAVLEGARYMVALQIAREPLVRQVLRQTFQERAKLNITPTKKGRKDVDEAHYAYSFKYLKNKPVKELRDDQFLKICLAEDEGLLTTDISIDLKGVEGYGNDQTYFEEIKQFYYRDEFSHQVQEWNRQRTMAIERALQQFLYVQMAKELKNKLLAEAKEYVIKACSRKLYNWLRVAPYRPDQQVEEDDDFMDENQGKGIRVLGIAFSSARDHPVFCALVNGEGEVTDFLRLPHFTKRRTAWREEEREKKAQDIETLKKFLLNKKPHVVTVAGENRDAQMLIEDVKRIVHELDQGQQLSSIGVELVDNELAILYMNSKKSEAEFRDYPPVLRQAVSLARRIQDPLIEFAQVCSSDEDILCLKFHPLQEHVVKEELLNALYCEFINRVNEVGVDVNRAIAHPYSQALIQYVCGLGPRKGTHLLKILKQNNTRLESRTQLVTMCHMGPKVFMNCAGFLKIDTASLGDSTDSYIEVLDGSRVHPETYEWARKMAVDALEYDESAEDANPAGALEEILENPERLKDLDLDAFAEELERQGYGDKHITLYDIRAELSCRYKDLRTAYRSPNTEEIFNMLTKETPETFYIGKLIICNVTGIAHRRPQGESYDQAIRNDETGLWQCPFCQQDNFPELSEVWNHFDSGSCPGQAIGVKTRLDNGVTGFIPTKFLSDKVVKRPEERVKVGMTVHCRIMKIDIEKFSADLTCRTSDLMDRNNEWKLPKDTYYDFDAEAADHKQEEDMKRKQQRTTYIKRVIAHPSFHNINFKQAEKMMETMDQGDVIIRPSSKGENHLTVTWKVSDGIYQHVDVREEGKENAFSLGATLWINSEEFEDLDEIVARYVQPMASFARDLLNHKYYQDCSGGDRKKLEELLIKTKKEKPTFIPYFICACKELPGKFLLGYQPRGKPRIEYVTVTPEGFRYRGQIFPTVNGLFRWFKDHYQDPVPGITPSSSSRTRTPASINATPANINLADLTRAVNALPQNMTSQMFSAIAAVTGQGQNPNATPAQWASSQYGYGGSGGGSSAYHVFPTPAQQPVATPLMTPSYSYTTPSQPITTPQYHQLQASTTPQSAQAQPQPSSSSRQRQQQPKSNSHAAIDWGKMAEQWLQEKEAERRKQKQRLTPRPSPSPMIESTPMSIAGDATPLLDEMDR

SEQ ID NO: 761539 - protein, 827 aa, Homo sapiens
MAEFRDYPPVLRQAVSLARRIQDPLIEFAQVCSSDEDILCLKFHPLQEHVVKEELLNALYCEFINRVNEVGVDVNRAIAHPYSQALIQYVCGLGPRKGTHLLKILKQNNTRLESRTQLVTMCHMGPKVFMNCAGFLKIDTASLGDSTDSYIEVLDGSRVHPETYEWARKMAVDALEYDESAEDANPAGALEEILENPERLKDLDLDAFAEELERQGYGDKHITLYDIRAELSCRYKDLRTAYRSPNTEEIFNMLTKETPETFYIGKLIICNVTGIAHRRPQGESYDQAIRNDETGLWQCPFCQQDNFPELSEVWNHFDSGSCPGQAIGVKTRLDNGVTGFIPTKFLSDKVVKRPEERVKVGMTVHCRIMKIDIEKFSADLTCRTSDLMDRNNEWKLPKDTYYDFDAEAADHKQEEDMKRKQQRTTYIKRVIAHPSFHNINFKQAEKMMETMDQGDVIIRPSSKGENHLTVTWKVSDGIYQHVDVREEGKENAFSLGATLWINSEEFEDLDEIVARYVQPMASFARDLLNHKYYQDCSGGDRKKLEELLIKTKKEKPTFIPYFICACKELPGKFLLGYQPRGKPRIEYVTVTPEGFRYRGQIFPTVNGLFRWFKDHYQDPVPGITPSSSSRTRTPASINATPANINLADLTRAVNALPQNMTSQMFSAIAAVTGQGQNPNATPAQWASSQYGYGGSGGGSSAYHVFPTPAQQPVATPLMTPSYSYTTPSQPITTPQYHQLQASTTPQSAQAQPQPSSSSRQRQQQPKSNSHAAIDWGKMAEQWLQEKEAERRKQKQRLTPRPSPSPMIESTPMSIAGDATPLLDEMDR

SEQ ID NO: 761540 - protein, 781 aa, Homo sapiens
MKSSGSAQKLSHRDEEEEEENLDDQDEQGNLKGFINDDDDEDEGEEDEGSDSGDSEDDVGHKKRKRTSFDDRLEDDDFDLIEENLGVKVKRGQKYRRVKKMSDDEDDDEEEYGKEEHEKEAIAEEIFQDGEGEEGQEAMEAPMAPPEEEEEDDEESDIDDFIVDDDGQPLKKPKWRKKLPGYTDAALQEAQEIFGVDFDYDEFIFNMLTKETPETFYIGKLIICNVTGIAHRRPQGESYDQAIRNDETGLWQCPFCQQDNFPELSEVWNHFDSGSCPGQAIGVKTRLDNGVTGFIPTKFLSDKVVKRPEERVKVGMTVHCRIMKIDIEKFSADLTCRTSDLMDRNNEWKLPKDTYYDFDAEAADHKQEEDMKRKQQRTTYIKRVIAHPSFHNINFKQAEKMMETMDQGDVIIRPSSKGENHLTVTWKVSDGIYQHVDVREEGKENAFSLGATLWINSEEFEDLDEIVARYVQPMASFARDLLNHKYYQDCSGGDRKKLEELLIKTKKEKPTFIPYFICACKELPGKFLLGYQPRGKPRIEYVTVTPEGFRYRGQIFPTVNGLFRWFKDHYQDPVPGITPSSSSRTRTPASINATPANINLADLTRAVNALPQNMTSQMFSAIAAVTGQGQNPNATPAQWASSQYGYGGSGGGSSAYHVFPTPAQQPVATPLMTPSYSYTTPSQPITTPQYHQLQASTTPQSAQAQPQPSSSSRQRQQQPKSNSHAAIDWGKMAEQWLQEKEAERRKQKQRLTPRPSPSPMIESTPMSIAGDATPLLDEMDR

SEQ ID NO: 761541 - protein, 607 aa, Homo sapiens
ATPLSSRVLTPMACPGHEPLSKWRHTSLSSGKFALLTEGALPQPRKLIICNVTGIAHRRPQGESYDQAIRNDETGLWQCPFCQQDNFPELSEVWNHFDSGSCPGQAIGVKTRLDNGVTGFIPTKFLSDKVVKRPEERVKVGMTVHCRIMKIDIEKFSADLTCRTSDLMDRNNEWKLPKDTYYDFDAEAADHKQEEDMKRKQQRTTYIKRVIAHPSFHNINFKQAEKMMETMDQGDVIIRPSSKGENHLTVTWKVSDGIYQHVDVREEGKENAFSLGATLWINSEEFEDLDEIVARYVQPMASFARDLLNHKYYQDCSGGDRKKLEELLIKTKKEKPTFIPYFICACKELPGKFLLGYQPRGKPRIEYVTVTPEGFRYRGQIFPTVNGLFRWFKDHYQDPVPGITPSSSSRTRTPASINATPANINLADLTRAVNALPQNMTSQMFSAIAAVTGQGQNPNATPAQWASSQYGYGGSGGGSSAYHVFPTPAQQPVATPLMTPSYSYTTPSQPITTPQYHQLQASTTPQSAQAQPQPSSSSRQRQQQPKSNSHAAIDWGKMAEQWLQEKEAERRKQKQRLTPRPSPSPMIESTPMSIAGDATPLLDEMDR

SEQ ID NO: 761542 - protein, 1627 aa, Homo sapiens; identical to SEQ ID NO: 761522

SEQ ID NO: 761543 - protein, 1638 aa, Homo sapiens
LEDDDFLLNEVKVKRGQKYRRVKKMSDDEDDDEEEYGKEEHEKEAIAEEIFQDGEGEEGQEAMEAPMAPPEEEEEDDEESDIDDFIVDDDGQPLKKPKWRKKLPGYTDAALQEAQEIFGVDFDYDEFEKYNEYDEELEEEYEYEDDEAEGEIRVRPKKTTKKRVSRRSIFEMYEPSELESSHLTDQDNEIRATDLPERFQLRSIPVKGAEDDELEEEADWIYRNAFATPTISLQESCDYLDRGQPASSFSRKGPSTIQKIKEALGFMRNQHFEVPFIAFYRKEYVEPELHINDLWRVWQWDEKWTQLRIRKENLTRLFEKMQAYQYEQISADPDKPLADGIRALDTTDMERLKDVQSMDELKDVYNHFLLYYGRDIPKMQNAAKASRKKLKRVREEGDEEGEGDEAEDEEQRGPELKQASRRDMYTICQSAGLDGLAKKFGLTPEQFGENLRDSYQRHETEQFPAEPLELAKDYVCSQFPTPEAVLEGARYMVALQIAREPLVRQVLRQTFQERAKLNITPTKKGRKDVDEAHYAYSFKYLKNKPVKELRDDQFLKICLAEDEGLLTTDISIDLKGVEGYGNDQTYFEEIKQFYYRDEFSHQVQEWNRQRTMAIERALQQFLYVQMAKELKNKLLAEAKEYVIKACSRKLYNWLRVAPYRPDQQVEEDDDFMDENQGKGIRVLGIAFSSARDHPVFCALVNGEGEVTDFLRLPHFTKRRTAWREEEREKKAQDIETLKKFLLNKKPHVVTVAGENRDAQMLIEDVKRIVHELDQGQQLSSIGVELVDNELAILYMNSKKSEAEFRDYPPVLRQAVSLARRIQDPLIEFAQVCSSDEDILCLKFHPLQEHVVKEELLNALYCEFINRVNEVGVDVNRAIAHPYSQALIQYVCGLGPRKGTHLLKILKQNNTRLESRTQLVTMCHMGPKVFMNCAGFLKIDTASLGDSTDSYIEVLDGSRVHPETYEWARKMAVDALEYDESAEDANPAGALEEILENPERLKDLDLDAFAEELERQGYGDKHITLYDIRAELSCRYKDLRTAYRSPNTEEIFNMLTKETPETFYIGKLIICNVTGIAHRRPQGESYDQAIRNDETGLWQCPFCQQDNFPELSEVWNHFDSGSCPGQAIGVKTRLDNGVTGFIPTKFLSDKVVKRPEERVKVGMTVHCRIMKIDIEKFSADLTCRTSDLMDRNNEWKLPKDTYYDFDAEAADHKQEEDMKRKQQRTTYIKRVIAHPSFHNINFKQAEKMMETMDQGDVIIRPSSKGENHLTVTWKVSDGIYQHVDVREEGKENAFSLGATLWINSEEFEDLDEIVARYVQPMASFARDLLNHKYYQDCSGGDRKKLEELLIKTKKEKPTFIPYFICACKELPGKFLLGYQPRGKPRIEYVTVTPEGFRYRGQIFPTVNGLFRWFKDHYQDPVPGITPSSSSRTRTPASINATPANINLADLTRAVNALPQNMTSQMFSAIAAVTGQGQNPNATPAQWASSQYGYGGSGGGSSAYHVFPTPAQQPVATPLMTPSYSYTTPSQPITTPQYHQLQALFQLPATAAAAKSNRHAASTGENADSGAGKARTGKRSGCNSGPPARRDPGWGSPPGREEAAQPEPGKGRGPACKGRTGTEGKGDPPPGGALLVAGTS

SEQ ID NO: 761544 - protein, 348 aa, Homo sapiens
SRKRHRGKGKENAFSLGATLWINSEEFEDLDEIVARYVQPMASFARDLLNHKYYQDCSGGDRKKLEELLIKTKKEKPTFIPYFICACKELPGKFLLGYQPRGKPRIEYVTVTPEGFRYRGQIFPTVNGLFRWFKDHYQDPVPGITPSSSSRTRTPASINATPANINLADLTRAVNALPQNMTSQMFSAIAAVTGQGQNPNATPAQWASSQYGYGGSGGGSSAYHVFPTPAQQPVATPLMTPSYSYTTPSQPITTPQYHQLQASTTPQSAQAQPQPSSSSRQRQQQPKSNSHAAIDWGKMAEQWLQEKEAERRKQKQRLTPRPSPSPMIESTPMSIAGDATPLLDEMDR

SEQ ID NO: 761545 - protein, 1214 aa, Homo sapiens
LEDDDFLLNEVKVKRGQKYRRVKKMSDDEDDDEEEYGKEEHEKEAIAEEIFQDGEGEEGQEAMEAPMAPPEEEEEDDEESDIDDFIVDDDGQPLKKPKWRKKLPGYTDAALQEAQEIFGVDFDYDEFEKYNEYDEELEEEYEYEDDEAEGEIRVRPKKTTKKRVSRRSIFEMYEPSELESSHLTDQDNEIRATDLPERFQLRSIPVKGAEDDELEEEADWIYRNAFATPTISLQESCDYLDRGQPASSFSRKGPSTIQKIKEALGFMRNQHFEVPFIAFYRKEYVEPELHINDLWRVWQWDEKWTQLRIRKENLTRLFEKMQAYQYEQISADPDKPLADGIRALDTTDMERLKDVQSMDELKDVYNHFLLYYGRDIPKMQNAAKASRKKLKRVREEGDEEGEGDEAEDEEQRGPELKQASRRDMYTICQSAGLDGLAKKFGLTPEQFGENLRDSYQRHETEQFPAEPLELAKDYVCSQFPTPEAVLEGARYMVALQIAREPLVRQVLRQTFQERAKLNITPTKKGRKDVDEAHYAYSFKYLKNKPVKELRDDQFLKICLAEDEGLLTTDISIDLKGVEGYGNDQTYFEEIKQFYYRDEFSHQVQEWNRQRTMAIERALQQFLYVQMAKELKNKLLAEAKEYVIKACSRKLYNWLRVAPYRPDQQVEEDDDFMDENQGKGIRVLGIAFSSARDHPVFCALVNGEGEVTDFLRLPHFTKRRTAWREEEREKKAQDIETLKKFLLNKKPHVVTVAGENRDAQMLIEDVKRIVHELDQGQQLSSIGVELVDNELAILYMNSKKSEAEFRDYPPVLRQAVSLARRIQDPLIEFAQVCSSDEDILCLKFHPLQEHVVKEELLNALYCEFINRVNEVGVDVNRAIAHPYSQALIQYVCGLGPRKGTHLLKILKQNNTRLESRTQLVTMCHMGPKVFMNCAGSSRSTRPPWGTALTHILKSLMVPVSTLRLMSGLGRWQWMPWNTMNQPRMPILQIFPTVNGLFRWFKDHYQDPVPGITPSSSSRTRTPASINATPANINLADLTRAVNALPQNMTSQMFSAIAAVTGQGQNPNATPAQWASSQYGYGGSGGGSSAYHVFPTPAQQPVATPLMTPSYSYTTPSQPITTPQYHQLQASTTPQSAQAQPQPSSSSRQRQQQPKSNSHAAIDWGKMAEQWLQEKEAERRKQKQRLTPRPSPSPMIESTPMSIAGDATPLLDEMDR

SEQ ID NO: 761546 - protein, 244 aa, Homo sapiens
MIEYVTVTPEGFRYRGQIFPTVNGLFRWFKDHYQDPVPGITPSSSSRTRTPASINATPANINLADLTRAVNALPQNMTSQMFSAIAAVTGQGQNPNATPAQWASSQYGYGGSGGGSSAYHVFPTPAQQPVATPLMTPSYSYTTPSQPITTPQYHQLQASTTPQSAQAQPQPSSSSRQRQQQPKSNSHAAIDWGKMAEQWLQEKEAERRKQKQRLTPRPSPSPMIESTPMSIAGDATPLLDEMDR

SEQ ID NO: 761547 - protein, 145 aa, Homo sapiens
GRSLVTRSCVRSSGGGSSAYHVFPTPAQQPVATPLMTPSYSYTTPSQPITTPQYHQLQASTTPQSAQAQPQPSSSSRQRQQQPKSNSHAAIDWGKMAEQWLQEKEAERRKQKQRLTPRPSPSPMIESTPMSIAGDATPLLDEMDR

SEQ ID NO: 761548 - protein, 290 aa, Homo sapiens
MSSYFVNPLYSKYKAAAAAAAAAGEAINPTYYDCHFAPEVGGRHAAAAAALQLYGNSAAGFPHAPPQAHAHPHPSPPPSGTGCGGREGRGQEYFHPGGGSPAAAYQAAPPPPPHPPPPPPPPPCGGIACHGEPAKFYGYDNLQRQPIFTTQQEAELVQYPDCKSSSGNIGEDPDHLNQSSSPSQMFPWMRPQAAPGRRRGRQTYSRFQTLELEKEFLFNPYLTRKRRIEVSHALALTERQVKIWFQNRRMKWKKENNKDKFPVSRQEVKDGETKKEAQELEEDRAEGLTN

SEQ ID NO: 761549 - protein, 126 aa, Homo sapiens
RQTYSRFLFVYQELLVVSSTETFEKERQAAPGRRRGRQTYSRFQTLELEKEFLFNPYLTRKRRIEVSHALALTERQVKIWFQNRRMKWKKENNKDKFPVSRQEVKDGETKKEAQELEEDRAEGLTN

SEQ ID NO: 761550 - protein, 171 aa, Homo sapiens
PSAGLLVPVTLTFRAVLWCENASPRQPIFTTQQEAELVQYPDCKSSSGNIGEDPDHLNQSSSPSQMFPWMRPQAAPGRRRGRQTYSRFQTLELEKEFLFNPYLTRKRRIEVSHALALTERQVKIWFQNRRMKWKKENNKDKFPVSRQEVKDGETKKEAQELEEDRAEGLTN

SEQ ID NO: 761551 - protein, 131 aa, Homo sapiens
LSLWMRVKHVQVVVGVLKHKKVAPSCVPVLKGAHAADSSRSKWPALMGTGRKSFGAFLFHHSFSWGWKLISISFGDLNPFPVRQIRNQRAYHLEKVRLELTELEAIREDFLHERDTSPDKGELVSDEEEDT

SEQ ID NO: 761552 - protein, 359 aa, Homo sapiens
TNKLEQPRGQEFWADLNAMNVYETTEFDQLRRLSTPPSSNVNSIYHTVWKFFCRDHFGWREYPESVIRLIEEANSRGLKEVRFMMWNNHYILHNSFFRREIKRRPLFRSCFILLPYLQTLGGVPTQAPPPLEATSSSQIICPDGVTSANFYPETWVYMHPSQDFIQVPVSAEDKSYRIIYNLFHKTVPEFKYRILQILRVQNQFLWEKYKRKKEYMNRKMFGRDRIINERHLFHGTSQDVVDGICKHNFDPRVCGKHATMFGQGSYFAKKASYSHNFSKKSSKGVHFMFLAKVLTGRYTMGSHGMRRPPPVNPGSVTSDLYDSCVDNFFEPQIFVIFNDDQSYPYFVIQYEEVSNTVSI

SEQ ID NO: 761553 - protein, 657 aa, Homo sapiens
MEMETTEPEPDCVVQPPSPPDDFSCQMRLSEKITPLKTCFKKKDQKRLGTGTLRSLRPILNTLLESGSLDGVFRSRNQSTDENSLHEPMMKKAMEINSSCPPAENNMSVLIPDRTNVGDQIPEAHPSTEAPERVVPIQDHSFPSETLSGTVADSTPAHFQTDLLHPVSSDVPTSPDCLDKVIDYVPGIFQENSFTIQYILDTSDKLSTELFQDKSEEASLDLVFELVNQLQYHTHQENGIEICMDFLQGTCIYGRDCLKHHTVLPYHWQIKRTTTQKWQSVFNDSQEHLERFYCNPENDRMRMKYGGQEFWADLNAMNVYETTEFDQLRRLSTPPSSNVNSIYHTVWKFFCRDHFGWREYPESVIRLIEEANSRGLKEVRFMMWNNHYILHNSFFRREIKRRPLFRSCFILLPYLQTLGGVPTQAPPPLEATSSSQIICPDGVTSANFYPETWVYMHPSQDFIQVPVSAEDKSYRIIYNLFHKTVPEFKYRILQILRVQNQFLWEKYKRKKEYMNRKMFGRDRIINERHLFHGTSQDVVDGICKHNFDPRVCGKHATMFGQGSYFAKKASYSHNFSKKSSKGVHFMFLAKVLTGRYTMGSHGMRRPPPVNPGSVTSDLYDSCVDNFFEPQIFVIFNDDQSYPYFVIQYEEVSNTVSI

SEQ ID NO: 761554 - protein, 681 aa, Homo sapiens
HHSFLTWHNLRFLDSEEQLELIHIMEMETTEPEPDCVVQPPSPPDDFSCQMRLSEKITPLKTCFKKKDQKRLGTGTLRSLRPILNTLLESGSLDGVFRSRNQSTDENSLHEPMMKKAMEINSSCPPAENNMSVLIPDRTNVGDQIPEAHPSTEAPERVVPIQDHSFPSETLSGTVADSTPAHFQTDLLHPVSSDVPTSPDCLDKVIDYVPGIFQENSFTIQYILDTSDKLSTELFQDKSEEASLDLVFELVNQLQYHTHQENGIEICMDFLQGTCIYGRDCLKHHTVLPYHWQIKRTTTQKWQSVFNDSQEHLERFYCNPENDRMRMKYGGQEFWADLNAMNVYETTEFDQLRRLSTPPSSNVNSIYHTVWKFFCRDHFGWREYPESVIRLIEEANSRGLKEVRFMMWNNHYILHNSFFRREIKRRPLFRSCFILLPYLQTLGGVPTQAPPPLEATSSSQIICPDGVTSANFYPETWVYMHPSQDFIQVPVSAEDKSYRIIYNLFHKTVPEFKYRILQILRVQNQFLWEKYKRKKEYMNRKMFGRDRIINERHLFHGTSQDVVDGICKHNFDPRVCGKHATMFGQGSYFAKKASYSHNFSKKSSKGVHFMFLAKVLTGRYTMGSHGMRRPPPVNPGSVTSDLYDSCVDNFFEPQIFVIFNDDQSYPYFVIQYEEVSNTVSI

SEQ ID NO: 761555 - protein, 657 aa, Homo sapiens; identical to SEQ ID NO: 761553

SEQ ID NO: 761556 - protein, 657 aa, Homo sapiens; identical to SEQ ID NO: 761553

SEQ ID NO: 761557 - protein, 422 aa, Homo sapiens
MEMETTEPEPDCVVQPPSPPDDFSCQMRLSEKITPLKTCFKKKDQKRLGTGTLRSLRPILNTLLESGSLDGVFRSRNQSTDENSLHEPMMKKAMEINSSCPPAENNMSVLIPDRTNVGDQIPEAHPSTEAPERVVPIQDHSFPSETLSGTVADSTPAHFQTDLLHPVSSDVPTSPDCLDKVIDYVPGIFQENSFTIQYILDTSDKLSTELFQDKSEEASLDLVFELVNQLQYHTHQENGIEICMDFLQGTCIYGRDCLKHHTVLPYHWQIKRTTTQKWQSVFNDSQEHLERFYCNPENDRMRMKYGGQEFWADLNAMNVYETTEFDQLRRLSTPPSSNVNSIYHTVWKFFCRDHFGWREYPESVIRLIEEANSRGLKEVRFMMWNNHYILHNSFFRREIKRRPLFRSCFILLPYLQVGFPQS

SEQ ID NO: 761558 - protein, 437 aa, Homo sapiens
MEMETTEPEPDCVVQPPSPPDDFSCQMRLSEKITPLKTCFKKKDQKRLGTGTLRSLRPILNTLLESGSLDGVFRSRNQSTDENSLHEPMMKKAMEINSSCPPAENNMSVLIPDRTNVGDQIPEAHPSTEAPERVVPIQDHSFPSETLSGTVADSTPAHFQTDLLHPVSSDVPTSPDCLDKVIDYVPGIFQENSFTIQYILDTSDKLSTELFQDKSEEASLDLVFELVNQLQYHTHQENGIEICMDFLQGTCIYGRDCLKHHTVLPYHWQIKRTTTQKWQSVFNDSQEHLERFYCNPENDRMRMKYGGQEFWADLNAMNVYETTEFDQLRRLSTPPSSNVNSIYHTVWKFFCRDHFGWREYPESVIRLIEEANSRGLKEVRFMMWNNHYILHNSFFRREIKRRPLFRSCFILLPYLQTLGGVPTQLLQPYSNSYHTCD

SEQ ID NO: 761559 - protein, 359 aa, Homo sapiens; identical to SEQ ID NO: 761552

SEQ ID NO: 761560 - protein, 657 aa, Homo sapiens; identical to SEQ ID NO: 761553

SEQ ID NO: 761561 - protein, 657 aa, Homo sapiens; identical to SEQ ID NO: 761553

SEQ ID NO: 761562 - protein, 633 aa, Homo sapiens
AAAPSAASAALPRSLSRLRECPGRSRIVLALGATQMALGCLIVAVSFAALALTTSARVRHSCPFWAGFSVLLSGLIGVVSWKRPLSLVITFFMLLSAVCVMLNLAGSILSCQNAQLVNSLEGCQLIKFDSVEVCVCCELQHQSSGCSNLGETLKLNPLQENCNAVRLTLKDLLFSVCALNVLSTIVCALATAMCCMQMVSSDVLQMFLPQRSHPANPTCVTPHGTVLHQTLDFDEFIPPLPPPPYYPPEYTCTPSTEAQRGLHLDFAPSPFGTLYDVAINSPGLLYPAELPPPYEAVVGQPPASQVTSIGQQVAESSSGDPNTSAGFSTPVPADSTSLLVSEGTATPGSSPSPDGPVGAPAPSEPALPPGHVSPEDPGMGSQVQPGPGRVSRSTSDPTLCTSSMAGDASSHRPSCSQDLEAGLSEAVPGSASMSRSATAACRAQLSPAGDPDTWKTDQRPTPEPFPATSKERPRSLVDSKAYADARVLVAKFLEHSHCALPTEAQHMVGAMRLAVTNEERLEEEAVFGAEFWTRYEGATFLTVDTNAWRHRCSWQKPSCLTKRPSGPAWRRINVGGTPRMIWGRCGQGTVTPSLEGSRAVSLWGLHFLPSPVIRKDDFHVHSELSGFIWRAAP

SEQ ID NO: 761563 - protein, 633 aa, Homo sapiens; identical to SEQ ID NO: 761562

SEQ ID NO: 761564 - protein, 633 aa, Homo sapiens; identical to SEQ ID NO: 761562

SEQ ID NO: 761565 - protein, 270 aa, Homo sapiens
MQYPHPGPAAGAVGVPLYAPTPLLQPAHPTPFYIEDILGRGPAAPTPAPTLPSPNSSFTSLVSPYRTPVYEPTPIHPAFSHHSAAALAAAYGPGGFGGPLYPFPRTVNDYTHALLRHDPLGKPLLWSPFLQRPLHKRKGGQVRFSNDQTIELEKKFETQKYLSPPERKRLAKMLQLSERQVKTWFQNRRAKWRRLKQENPQSNKKEELESLDSSCDQRQDLPSEQNKGASLDSSQCSPSPASQEDLESEISEDSDQEVDIEGDKSYFNAG

SEQ ID NO: 761566 - protein, 189 aa, Homo sapiens
MALTFYLMVALVVLSYKSFSSLGCDLPQTHSLGNRRALILLAQMRRISPFSCLKDRHDFEFPQEEFDDKQFQKAQAISVLHEMIQQTFNLFSTKDSSAALDETLLDEFYIELDQQLNDLEVLCDQEVGVIESPLMYEDSILAVRKYFQRITLYLTEKKYSSCAWEVVRAEIMRSFSLSINLQKRLKSKE

SEQ ID NO: 761567 - protein, 132 aa, Homo sapiens [sequence omitted]

SEQ ID NO: 761568 - protein, 393 aa, Homo sapiens [sequence omitted]

SEQ ID NO: 761569 - protein, 371 aa, Homo sapiens
MRLERTNLEALQKKLEELELDEQQRKRLEAFLTQKQKVGELKDDDFEKISELGAGNGGVVFKVSHKPSGLVMARKLIHLEIKPAIRNQIIRELQVLHECNSPYIVGFYGAFYSDGEISICMEHMDGGSLDQVLKKAGRIPEQILGKVSIAVIKGLTYLREKHKIMHRDVKPSNILVNSRGEIKLCDFGVSGQLIDSMANSFVGTRSYMSPERLQGTHYSVQSDIWSMGLSLVEMAVGRYPIPPPDAKELELMFGCQVEGDAAETPPRPRTPGRPLSSYGMDSRPPMAIFELLDYIVNEPPPKLPSGVFSLEFQDFVNKCLIKNPAERADLKQLMVHAFIKRSDAEEVDFAGWLCSTIGLNQPSTPTHAAGV

SEQ ID NO: 761570 - protein, 337 aa, Homo sapiens
SRVGVWKAPHPGWEARLPLPRPSPGLQSLPGPLRRAARSTAAAALSPAGLQVLHECNSPYIVGFYGAFYSDGEISICMEHMDGGSLDQVLKKAGRIPEHNFFRNNVQHLPVHYTQCPGQYSDGAEATRISAPADVKPSNILVNSRGEIKLCDFGVSGQLIDSMANSFVGTRSYMSPERLQGTHYSVQSDIWSMGLSLVEMAVGRYPIPPPDAKELELMFGCQVEGDAAETPPRPRTPGRPLSSYGMDSRPPMAIFELLDYIVNEPPPKLPSGVFSLEFQDFVNKCLIKNPAERADLKQLMVHAFIKRSDAEEVDFAGWLCSTIGLNQPSTPTHAAGV

SEQ ID NO: 761571 - protein, 360 aa, Homo sapiens
FPRDVSLQRTQSLFFKFFPKMSFPNSSPAANTFLVDSLISACRSDSFYSSSASMYMPPPSADMGTYGMQTCGLLPSLAKREVNHQNMGMNVHPYIPQVDSWTDPNRSCRIEQPVTQQVPTCSFTTNIKEESNCCMYSDKRNKLISAEVPSYQRLVPESCPVENPEVPVPGYFRLSQTYATGKTQEYNNSPEGSSTVMLQLNPRGAAKPQLSAAQLQMEKKMNEPVSGQEPTKVSQVESPEAKGGLPEERSCLAEVSVSSPEVQEKESKEEIKSDTPTSNWLTAKSGRKKRCPYTKHQTLELEKEFLFNMYLTRERRLEISKSVNLTDRQVKIWFQNRRMKLKKMSRENRIRELTANLTFS

SEQ ID NO: 761572 - protein, 475 aa, Homo sapiens
MESKALLVLTLAVWLQSLTASRGGVAAADQRRDFIDIESKFALRTPEDTAEDTCHLIPGVAESVATCHFNHSSKTFMVIHGWTVTGMYESWVPKLVAALYKREPDSNVIVVDWLSRAQEHYPVSAGYTKLVGQDVARFINWMEEEFNYPLDNVHLLGYSLGAHAAGIAGSLTNKKVNRITGLDPAGPNFEYAEAPSRLSPDDADFVDVLHTFTRGSPGRSIGIQKPVGHVDIYPNGGTFQPGCNIGEAIRVIAERGLGDVDQLVKCSHERSIHLFIDSLLNEENPSKAYRCSSKEAFEKGLCLSCRKNRCNNLGYEINKVRAKRSSKMYLKTRSQMPYKVFHYQVKIHFSGTESETHTNQAFEISLYGTVAESENIPFTLPEVSTNKTYSFLIYTEVDIGELLMLKLKWKSDSYFSWSDWWSSPGFAIQKIRVKAGETQKKVIFCSREKVSHLQKGKAPAVFVKCHDKSLNKKSG

SEQ ID NO: 761573 - protein, 475 aa, Homo sapiens; identical to SEQ ID NO: 761572

SEQ ID NO: 761574 - protein, 237 aa, Homo sapiens
MESKALLVLTLAVWLQSLTASRGGVAAADQRRDFIDIESKFALRTPEDTAEDTCHLIPGVAESVATCHFNHSSKTFMVIHGWTVTGMYESWVPKLVAALYKREPDSNVIVVDWLSRAQEHYPVSAGYTKLVGQDVARFINWMEEEFNYPLDNVHLLGYSLGAHAAGIAGSLTNKKVNRITGLDPAGPNFEYAEAPSRLSPDDADFVDVLHTFTRGSPGRSIGIQKPVGHVDIYPNGE

SEQ ID NO: 761575 - protein, 475 aa, Homo sapiens; identical to SEQ ID NO: 761572

SEQ ID NO: 761576 - protein, 399 aa, Homo sapiens [sequence omitted]

SEQ ID NO: 761577 - protein, 78 aa, Homo sapiens
GNSFRQVQPFMRNSPVVTFQFLDLLPPSELHAPSSDFLRMTQVIGGVKSRFPTQSPEEMEIPFMELEVPGDLGIQITS

SEQ ID NO: 761578 - protein, 188 aa, Homo sapiens
MDCRKMARFSYSVIWIMAISKVFELGLVAGLGHQEFARPSRGYLAFRDDSIWPQEEPAIRPRSSQRVPPMGIQHSKELNRTCCLNGGTCMLGSFCACPPSFYGRNCEHDVRKENCGSVPHDTWLPKKCSLCKCWHGQLRCFPQAFLPGCDGLVMDEHLVASRTPELPPSARTTTFMLVGICLSIQSYY

SEQ ID NO: 761579 - protein, 119 aa, Homo sapiens
MGIQHSKELNRTCCLNGGTCMLGSFCACPPSFYGRNCEHDVRKENCGSVPHDTWLPKKCSLCKCWHGQLRCFPQAFLPGCDGLVMDEHLVASRTPELPPSARTTTFMLVGICLSIQSYY

SEQ ID NO: 761580 - protein, 188 aa, Homo sapiens; identical to SEQ ID NO: 761578

SEQ ID NO: 761581 - protein, 172 aa, Homo sapiens
MAISKVFELGLVAGLGHQEFARPSRGYLAFRDDSIWPQEEPAIRPRSSQRVPPMGIQHSKELNRTCCLNGGTCMLGSFCACPPSFYGRNCEHDVRKENCGSVPHDTWLPKKCSLCKCWHGQLRCFPQAFLPGCDGLVMDEHLVASRTPELPPSARTTTFMLVGICLSIQSYY

SEQ ID NO: 761582 - protein, 300 aa, Homo sapiens
MLPLLAALLAAACPLPPVRGGAADAPGLLGVPSNASVNASSADEPIAPRLLASAAPGPPERPGPEETAAAAAPCNISVQRQMLSSLLVRWGRPRGFQCDLLLFSTNAHGRAFFAAAFHRVGPPLLIEHLGLAAGGAHRDLRLCVGCGWVRGRRTGRLRPAAAPSAAAATAGAPTALPAYPAAEPPGPLWLQGEPLHFCCLDFSLEELQGEPGWRLNRKPIESTLVACFMTLVIVVWSVAALIWPVPIIAGFLPNGMEQRRTTASTTAATPAAVPAGTTAAAAAAAAAAAAAAVTSGVATK

SEQ ID NO: 761583 - protein, 300 aa, Homo sapiens; identical to SEQ ID NO: 761582

SEQ ID NO: 761584 - protein, 274 aa, Homo sapiens
MATTVSTQRGPVYIGELPQDFLRITPTQQQRQVQLDAQAAQQLQYGGAVGTVGRLNITVVQAKLAKNYGMTRMDPYCRLRLGYAVYETPTAHNGAKNPRWNKVIHCTVPPGVDSFYLEIFDERAFSMDDRIAWTHITIPESLRQGKVEDKWYSLSGRQGDDKEGMINLVMSYALLPAAMVMPPQPVVLMPTVYQQGVGYVPITGMPAVCSPGMVPVALPPAAVNAQPRCSEEDLKAIQDMFPNMDQEVIRSVLEAQRGNKDAAINSLLQMGEEP

SEQ ID NO: 761585 - protein, 274 aa, Homo sapiens; identical to SEQ ID NO: 761584

SEQ ID NO: 761586 - protein, 246 aa, Homo sapiens
MATTVQLDAQAAQQLQYGGAVGTVGRLNITVVQAKLAKNYGMTRMDPYCRLRLGYAVYETPTAHNGAKNPRWNKVIHCTVPPGVDSFYLEIFDERAFSMDDRIAWTHITIPESLRQGKVEDKWYSLSGRQGDDKEGMINLVMSYALLPAAMVMPPQPVVLMPTVYQQGVGYVPITGMPAVCSPGMVPVALPPAAVNAQPRCSEEDLKAIQDMFPNMDQEVIRSVLEAQRGNKDAAINSLLQMGEEP

SEQ ID NO: 761587 - protein, 150 aa, Homo sapiens
CGVCTLDAVWLSLEVSPRPTAHNGAKNPRWNKVIHCTVPPGVDSFYLEIFDERAFSMDDRIAWTHITIPESLRQGKVEDKWYSLSGRQGDDKEGMINLVMSYALLPAAMVMPPQPVVLMPTVYQQGVGYVPITGMPAVCSPGMVPWSRSI

SEQ ID NO: 761588 - protein, 274 aa, Homo sapiens; identical to SEQ ID NO: 761584

SEQ ID NO: 761589 - protein, 274 aa, Homo sapiens; identical to SEQ ID NO: 761584

SEQ ID NO: 761590 - protein, 274 aa, Homo sapiens; identical to SEQ ID NO: 761584

SEQ ID NO: 761591 - protein, 351 aa, Homo sapiens
MQKAWVSTCKEYHVDPCEGYRGGPCEGYCVDPCEEYHGGPCEGYRAGPREEYRGVPCGPLPSAVRSRDVCGRLRCSHRGAVREASLVEVYIGELPQDFLRITPTQQQRQVQLDAQAAQQLQYGGAVGTVGRLNITVVQAKLAKNYGMTRMDPYCRLRLGYAVYETPTAHNGAKNPRWNKVIHCTVPPGVDSFYLEIFDERAFSMDDRIAWTHITIPESLRQGKVEDKWYSLSGRQGDDKEGMINLVMSYALLPAAMVMPPQPVVLMPTVYQQGVGYVPITGMPAVCSPGMVPVALPPAAVNAQPRCSEEDLKAIQDMFPNMDQEVIRSVLEAQRGNKDAAINSLLQMGEEP

SEQ ID NO: 761592 - protein, 224 aa, Homo sapiens
MATTVSTQRGPAKLAKNYGMTRMDPYCRLRLGYAVYETPTAHNGAKNPRWNKVIHCTVPPGVDSFYLEIFDERAFSMDDRIAWTHITIPESLRQGKVEDKWYSLSGRQGDDKEGMINLVMSYALLPAAMVMPPQPVVLMPTVYQQGVGYVPITGMPAVCSPGMVPVALPPAAVNAQPRCSEEDLKAIQDMFPNMDQEVIRSVLEAQRGNKDAAINSLLQMGEEP

SEQ ID NO: 761593 - protein, 146 aa, Homo sapiens
LEDTAEITYIPESLRQGKVEDKWYSLSGRQGDDKEGMINLVMSYALLPAAMVMPPQPVVLMPTVYQQGVGYVPITGMPAVCSPGMVPVALPPAAVNAQPRCSEEDLKAIQDMFPNMDQEVIRSVLEAQRGNKDAAINSLLQMGEEP

SEQ ID NO: 761594 - protein, 274 aa, Homo sapiens; identical to SEQ ID NO: 761584

SEQ ID NO: 761595 - protein, 268 aa, Homo sapiens
MATTVSTQRGPVYIGELPQDFLRITPTQQQRQVQLDAQAAQQLQYGGAVGTVGRLNITVVQGTEAKKSQEYTGKTRIEDPEQARRTPRDYTRKTRQPTGTRMGGRRNTPLGKRVQPQSTGAPQGVDYYFYSARILTKERGLAPRDQPQKPEKRHKHQRQKTQESRNQIDERQEGIEAEPGVQYGVRYGYWKGDAAAKSANRDLRTRSEPGRKEAEAASRMEGRKKTEAGENRGEGGRVRERREPVINAPLGRRILPIVKWAGETRMRA

SEQ ID NO: 761596 - protein, 274 aa, Homo sapiens; identical to SEQ ID NO: 761584

SEQ ID NO: 761597 - protein, 274 aa, Homo sapiens; identical to SEQ ID NO: 761584

SEQ ID NO: 761598 - protein, 246 aa, Homo sapiens; identical to SEQ ID NO: 761586

SEQ ID NO: 761599 - protein, 188 aa, Homo sapiens
RLVEARVNLAEATWNKVIHCTVPPGVDSFYLEIFDERAFSMDDRIAWTHITIPESLRQGKVEDKWYSLSGRQGDDKEGMINLVMSYALLPAAMVMPPQPVVLMPTVYQQGVGYVPITGMPAVCSPGMVPVALPPAAVNAQPRCSEEDLKAIQDMFPNMDQEVIRSVLEAQRGNKDAAINSLLQMGEEP

SEQ ID NO: 761600 - protein, 274 aa, Homo sapiens; identical to SEQ ID NO: 761584

SEQ ID NO: 761601 - protein, 74 aa, Homo sapiens
SSRVQAPPTGDVTALGRLGRFRVSLPWRPWAARASLQAESPASRIASEAWQPVTLPKGLNYSGASPVVLNAVLP

SEQ ID NO: 761602 - protein, 378 aa, Homo sapiens
MFNSVNLGNFCSPSRKERGADFGERGSCASNLYLPSCTYYMPEFSTVSSFLPQAPSRQISYPYSAQVPPVREVSYGLEPSGKWHHRNSYSSCYAAADELMHRECLPPSTVTEILMKNEGSYGGHHHPSAPHATPAGFYSSVNKNSVLPQAFDRFFDNAYCGGGDPPAEPPCSGKGEAKGEPEAPPASGLASRAEAGAEAEAEEENTNPSSSGSAHSVAKEPAKGAAPSRRPPHPQEALPLFEIPDPGTGARVFLQRVYQQREAAAAVPDAEPDGPTSENLVSEQKDERKETEQRPAAVFLGKSSAVTCRPGPFGGGGRGKLFYFIFIFYFLTRLLSAGGKLDCGQGWPPPLWPALHSGTSWTLYLTLAVGQGPGLERG

SEQ ID NO: 761603 - protein, 317 aa, Homo sapiens
KNSEADGMFAYVFHDEFVASMIKIPSDTFTIIPDFDIYYVYGFSSGNFVYFLTLQPEMVSPPGSTTKEQVYTSKLVRLCKEDTAFNSYVEVPIGCERSGVEYRLLQAAYLSKAGAVLGRTLGVHPDDDLLFTVFSKGQKRKMKSLDESALCIFILKQINDRIKERLQSCYRGEGTLDLAWLKVKDIPCSSALLTIDDNFCGLDMNAPLGVSDMVRGIPVFTEDRDRMTSVIAYVYKNHSLAFVGTKSGKLKKSFGTGPQGGITQEWIGVEGDPPGANIASQEQMLCVYLQCSSHKAISDQRVQPLLCCFLNVPGNSS

SEQ ID NO: 761604 - protein, 92 aa, Homo sapiens
MKPIQKLLAGLILLTSCVEGCSSQHWSYGLRPGGKRDAENLIDSFQEIVKEVGQLAETQRFECTTHQPRSPLRDLKGALESLIEEETGQKKI

SEQ ID NO: 761605 - protein, 92 aa, Homo sapiens
MKPIQKLLAGLILLTWCVEGCSSQHWSYGLRPGGKRDAENLIDSFQEIVKEVGQLAETQRFECTTHQPRSPLRDLKGALESLIEEETGQKKI

SEQ ID NO: 761606 - protein, 92 aa, Homo sapiens; identical to SEQ ID NO: 761604

SEQ ID NO: 761607 - protein, 101 aa, Homo sapiens
MVARLGTFLKNAWAREPVLVVSFIIGSLAVILPPLSPYTKYFIMIYETMPYNYPLPVRNDGNMTNVPGHPQDPQSSSLEWLKKLSTSTDRGGPSHRSQYEC

SEQ ID NO: 761608 - protein, 85 aa, Homo sapiens
EQPERQETPGCWVPRMARMGSREEHIALGHCAEPEPRTEMRTVVDSATWSHSYKTCSSFAGTGTLRVAGAAATWAGSVETHSGKL

SEQ ID NO: 761609 - protein, 81 aa, Homo sapiens
GTCWSQRRNSQGFSITCLGMGRSWRRTAVARDHMSTDLLALAAAVAAVAMGLCHAPVLGEHLQISGCLGIGHGKVKRSHGS

SEQ ID NO: 761610 - protein, 77 aa, Homo sapiens
VSAGGGLGPQAQTRPPTPISYKEELYRCLYYYCLRYFPACGVGRSKGLTLSEQALRTKRLSPGGHVQAEAPQWPQVR

SEQ ID NO: 761611 - protein, 126 aa, Homo sapiens
IHAQGHLKLLQKFRLGQHNLRAPVPWIGAKQSGHLTRDLQRCKDTLTSCVGEGVTQLAGTQWPRGSDNLALFPNPDRPLFQDRDPGHRSKNNNHKSIPHPGKGPDAYSADSGQERGWSVCLTGSAW

SEQ ID NO: 761612 - protein, 210 aa, Homo sapiens
MNILEKVVLKVLEDQQNIRLIRELLQTLYTSLCTLVQRVGKSVLVGNINMWVYRMETILHWQQQLNNIQITRPAFKGLTFTDLPLCLQLNIMQRLSDGRDLVSLGQAAPDLHVLSEDRLLWKKLCQYHFSERQIRKRLILSDKGQLDWKKMYFKLVRCYPRKEQYGDTLQLCKHCHILSWKGTDHPCTANNPESCSVSLSPQDFINLFKF

SEQ ID NO: 761613 - protein, 210 aa, Homo sapiens; identical to SEQ ID NO: 761612

SEQ ID NO: 761614 - protein, 210 aa, Homo sapiens; identical to SEQ ID NO: 761612

SEQ ID NO: 761615 - protein, 139 aa, Homo sapiens
MPFLGQDWRSPGQNWVKTADGWKRFLDEKSGSFVSDLSTVTCHTGRYSNNGRTLFRHSLHYDCLQPQKTEHERTMLETSNHRKHQGISTKNTTGIYVHKRNVLKSAMDIAPWGKLSTDWTSQLPFWIPEDLTTWSGPCH

SEQ ID NO: 761616 - protein, 210 aa, Homo sapiens; identical to SEQ ID NO: 761612

SEQ ID NO: 761617 - protein, 1434 aa, Homo sapiens
MEDHMFGVQQIQPNVISVRLFKRKVGGLGFLVKERVSKPPVIISDLIRGGAAEQSGLIQAGDIILAVNGRPLVDLSYDSALEVLRGIASETHVVLILRGPEGFTTHLETTFTGDGTPKTIRVTQPLGPPTKAVDLSHQPPAGKEQPLAVDGASGPGNGPQHAYDDGQEAGSLPHANGLAPRPPGQDPAKKATRVSLQGRGENNELLKEIEPVLSLLTSGSRGVKGGAPAKAEMKDMGIQVDRDLDGKSHKPLPLGVENDRVFNDLWGKGNVPVVLNNPYSEKEQPPTSGKQSPTKNGSPSKCPRFLKVKNWETEVVLTDTLHLKSTLETGCTEYICMGSIMHPSQHARRPEDVRTKGQLFPLAKEFIDQYYSSIKRFGSKAHMERLEEVNKEIDTTSTYQLKDTELIYGAKHAWRNASRCVGRIQWSKLQVFDARDCTTAHGMFNYICNHVKYATNKGNLRSAITIFPQRTDGKHDFRVWNSQLIRYAGYKQPDGSTLGDPANVQFTEICIQQGWKPPRGRFDVLPLLLQANGNDPELFQIPPELVLEVPIRHPKFEWFKDLGLKWYGLPAVSNMLLEIGGLEFSACPFSGWYMGTEIGVRDYCDNSRYNILEEVAKKMNLDMRKTSSLWKDQALVEINIAVLYSFQSDKVTIVDHHSATESFIKHMENEYRCRGGCPADWVWIVPPMSGSITPVFHQEMLNYRLTPSFEYQPDPWNTHVWKGTNGTPTKRRAIGFKKLAEAVKFSAKLMGQAMAKRVKATILYATETGKSQAYAKTLCEIFKHAFDAKVMSMEEYDIVHLEHETLVLVVTSTFGNGDPPENGEKFGCALMEMRHPNSVQEERKSYKVRFNSVSSYSDSQKSSGDGPDLRDNFESAGPLANVRFSVFGLGSRAYPHFCAFGHAVDTLLEELGGERILKMREGDELCGQEEAFRTWAKKVFKAACDVFCVGDDVNIEKANNSLISNDRSWKRNKFRLTFVAEAPELTQGLSNVHKKRVSAARLLSRQNLQSPKSSRSTIFVRLHTNGSQELQYQPGDHLGVFPGNHEDLVNALIERLEDAPPVNQMVKVELLEERNTALGVISNWTDELRLPPCTIFQAFKYYLDITTPPTPLQLQQFASLATSEKEKQRLLVLSKGLQEYEEWKWGKNPTIVEVLEEFPSIQMPATLLLTQLSLLQPRYYSISSSPDMYPDEVHLTVAIVSYRTRDGEGPIHHGVCSSWLNRIQADELVPCFVRGAPSFHLPRNPQVPCILVGPGTGIAPFRSFWQQRQFDIQHKGMNPCPMVLVFGCRQSKIDHIYREETLQAKNKGVFRELYTAYSREPDKPKKYVQDILQEQLAESVYRALKEQGGHIYVCGDVTMAADVLKAIQRIMTQQGKLSAEDAGVFISRMRDDNRYHEDIFGVTLRTYEVTNRLRSESIAFIEESKKDTDEVFSS

SEQ ID NO: 761618 - protein, 1468 aa, Homo sapiens
MEDHMFGVQQIQPNVISVRLFKRKVGGLGFLVKERVSKPPVIISDLIRGGAAEQSGLIQAGDIILAVNGRPLVDLSYDSALEVLRGIASETHVVLILRGPEGFTTHLETTFTGDGTPKTIRVTQPLGPPTKAVDLSHQPPAGKEQPLAVDGASGPGNGPQHAYDDGQEAGSLPHANGLAPRPPGQDPAKKATRVSLQGRGENNELLKEIEPVLSLLTSGSRGVKGGAPAKAEMKDMGIQVDRDLDGKSHKPLPLGVENDRVFNDLWGKGNVPVVLNNPYSEKEQPPTSGKQSPTKNGSPSKCPRFLKVKNWETEVVLTDTLHLKSTLETGCTEYICMGSIMHPSQHARRPEDVRTKGQLFPLAKEFIDQYYSSIKRFGSKAHMERLEEVNKEIDTTSTYQLKDTELIYGAKHAWRNASRCVGRIQWSKLQVFDARDCTTAHGMFNYICNHVKYATNKGNLRSAITIFPQRTDGKHDFRVWNSQLIRYAGYKQPDGSTLGDPANVQFTEICIQQGWKPPRGRFDVLPLLLQANGNDPELFQIPPELVLEVPIRHPKFEWFKDLGLKWYGLPAVSNMLLEIGGLEFSACPFSGWYMGTEIGVRDYCDNSRYNILEEVAKKMNLDMRKTSSLWKDQALVEINIAVLYSFQSDKVTIVDHHSATESFIKHMENEYRCRGGCPADWVWIVPPMSGSITPVFHQEMLNYRLTPSFEYQPDPWNTHVWKGTNGTPTKRRAIGFKKLAEAVKFSAKLMGQAMAKRVKATILYATETGKSQAYAKTLCEIFKHAFDAKVMSMEEYDIVHLEHETLVLVVTSTFGNGDPPENGEKFGCALMEMRHPNSVQEERKYPEPLRFFPRKGPPLPNGDTEVHGLAAARDSQHRSYKVRFNSVSSYSDSQKSSGDGPDLRDNFESAGPLANVRFSVFGLGSRAYPHFCAFGHAVDTLLEELGGERILKMREGDELCGQEEAFRTWAKKVFKAACDVFCVGDDVNIEKANNSLISNDRSWKRNKFRLTFVAEAPELTQGLSNVHKKRVSAARLLSRQNLQSPKSSRSTIFVRLHTNGSQELQYQPGDHLGVFPGNHEDLVNALIERLEDAPPVNQMVKVELLEERNTALGVISNWTDELRLPPCTIFQAFKYYLDITTPPTPLQLQQFASLATSEKEKQRLLVLSKGLQEYEEWKWGKNPTIVEVLEEFPSIQMPATLLLTQLSLLQPRYYSISSSPDMYPDEVHLTVAIVSYRTRDGEGPIHHGVCSSWLNRIQADELVPCFVRGAPSFHLPRNPQVPCILVGPGTGIAPFRSFWQQRQFDIQHKGMNPCPMVLVFGCRQSKIDHIYREETLQAKNKGVFRELYTAYSREPDKPKKYVQDILQEQLAESVYRALKEQGGHIYVCGDVTMAADVLKAIQRIMTQQGKLSAEDAGVFISRMRDDNRYHEDIFGVTLRTYEVTNRLRSESIAFIEESKKDTDEVFSS

SEQ ID NO: 761619 - protein, 1434 aa, Homo sapiens; identical to SEQ ID NO: 761617

SEQ ID NO: 761620 - protein, 103 aa, Homo sapiens
MSHCTCQLLLLFCLLPGPPQVLMGSMWQLGSSLSLSISLAQGLQEYEEWKWGKNPTIVEVLEEFPSIQMPATLLLTQLSLLQPRYYSISSSPDMYPDEVHLTV

SEQ ID NO: 761621 - protein, 104 aa, Homo sapiens
MRLRTERMPSKKWHFRIYTAPQHAAKRGHTTTTARSRAAGTRSLSSAPCVASSESRHLIHSLGLRLLRYCNCLDWSILGQHGGAHVTRSVPQSERRPRRGPRGG

SEQ ID NO: 761622 - protein, 104 aa, Homo sapiens; identical to SEQ ID NO: 761621

SEQ ID NO: 761623 - protein, 250 aa, Homo sapiens
TDAFLLSQLQEECLPLILILLSTDPLRVSGWGTVRSFPSHEAIFQTITWGETLDNTWLSKAEVPAAFRSFCVPGIEKVDDVVKRLLSLEMANKKEMLKIKQEQFMKKIVANPEDTRSLEARIIALSVKIRSYEEHLEKHRKDKAHKRYLLMSIDQRKKMLKNLRNTNYDVFEKICWGLGIEYTFPPLYYRRAHRRFVTKKALCIRVFQETQKLKKRRRALKAAAAAQKQAKRRNPDSPAKAIPKTLKDSQ

SEQ ID NO: 761624 - protein, 155 aa, Homo sapiens
MLKIKQEQFMKKIVANPEDTRSLEARIIALSVKIRSYEEHLEKHRKDKAHKRYLLMSIDQRKKMLKNLRNTNYDVFEKICWGLGIEYTFPPLYYRRAHRRFVTKKALCIRVFQETQKLKKRRRALKAAAAAQKQAKRRNPDSPAKAIPKTLKDSQ

SEQ ID NO: 761625 - protein, 169 aa, Homo sapiens
MLRVAWRTLSLIRTRAVTQVLVPGLPGGGSAKFPFNQWGLQPRSLLLQAARGYVVRKPAQSRLDDDPPPSTLLKDYQNVPGIEKVDDVVKRLLSLEMANKKEMLKIKQEQFMKKIVANPEDTRSLEARIIALSVKIRSYEEHLEKHRKDKAHKRYLLMSIDQRKKMLKN

SEQ ID NO: 761626 - protein, 181 aa, Homo sapiens
MLRVAWRTLSLIRTRAVTQVLVPGLPGGGSAKFPFNQWGLQPRSLLLQAARGYVVRKPAQSRLDDDPPPSTLLKDYQNVPGIEKVDDVVKRLLSLEMANKKEMLKIKQEQFMKKIVANPEDTRSLEARIIALSVKIRSYEEHLEKHRKDKAHKRYLLMSIDQRKKMLKNPPYTSYIKRDRL

SEQ ID NO: 761627 - protein, 104 aa, Homo sapiens; identical to SEQ ID NO: 761621

SEQ ID NO: 761628 - protein, 257 aa, Homo sapiens
MLRVAWRTLSLIRTRAVTQVLVPGLPGGGSAKFPFNQWGLQPRSLLLQAARGYVVRKPAQSRLDDDPPPSTLLKDYQNVPGIEKVDDVVKRLLSLEMANKKEMLKIKQEQFMKKIVANPEDTRSLEARIIALSVKIRSYEEHLEKHRKDKAHKRYLLMSIDQRKKMLKNLRNTNYDVFEKICWGLGIEYTFPPLYYRRAHRRFVTKKALCIRVFQETQKLKKRRRALKAAAAAQKQAKRRNPDSPAKAIPKTLKDSQ

SEQ ID NO: 761629 - protein, 226 aa, Homo sapiens
DAWVDPRVRQPRSLLLQAARGYVVRKPAQSRLDDDPPPSTLLKDYQNVPGIEKVDDVVKRLLSLEMANKKEMLKIKQEQFMKKIVANPEDTRSLEARIIALSVKIRSYEEHLEKHRKDKAHKRYLLMSIDQRKKMLKNLRNTNYDVFEKICWGLGIEYTFPPLYYRRAHRRFVTKKALCIRVFQETQKLKKRRRALKAAAAAQKQAKRRNPDSPAKAIPKTLKDSQ

SEQ ID NO: 761630 - protein, 251 aa, Homo sapiens
MLRVAWRTLSLIRTRAVTQVLVPGLPGGGSAKFPFNQWGLQPRSLLLQAARGYVVRKPAQSRLDDDPPPSTLLKDYQNVPGIEKVDDVVKRLLSLEMANKKEMLKIKQEQFMKKIVANPEDTRSLEARIIALSVKIRSYEEHLEKHRKDKAHKRYLLMSIDQRKKMLKNLRNTNYDVFEKICWGLGIEYTFPPLYYRRAHRRFVTKKALCIRVFQETQKLKKRRRALKAAAAAQKQAKRRNPDSPAKAIPI

SEQ ID NO: 761631 - protein, 224 aa, Homo sapiens
MVLSPLFSAVGLLLQAARGYVVRKPAQSRLDDDPPPSTLLKDYQNVPGIEKVDDVVKRLLSLEMANKKEMLKIKQEQFMKKIVANPEDTRSLEARIIALSVKIRSYEEHLEKHRKDKAHKRYLLMSIDQRKKMLKNLRNTNYDVFEKICWGLGIEYTFPPLYYRRAHRRFVTKKALCIRVFQETQKLKKRRRALKAAAAAQKQAKRRNPDSPAKAIPKTLKDSQ

SEQ ID NO: 761632 - protein, 104 aa, Homo sapiens; identical to SEQ ID NO: 761621

SEQ ID NO: 761633 - protein, 120 aa, Homo sapiens
MPLWTHSSNITALLERETSPPCASVSSSESEWRGLPCEKSELCPWAGWLRCSAPRITCPSNVPAPVSFLPTSFHHLGPGKGRAWSRAAENGLRCLAKELQGSNQRLMWHAGWGEGNTEDP

SEQ ID NO: 761634 - protein, 115 aa, Homo sapiens
MPFRTDLPINYRDEKSSGIRKRELIPWLAAIAPVHGATYMCDIRVRSHAIGPGPLAGLATIFLPSLVTSLMALLGPPHVCVAPALGHPCRPSFSPRGAHLNPHFWEACVPRDHPR

SEQ ID NO: 761635 - protein, 115 aa, Homo sapiens
MVCLKLPGGSCMAALTVTLMVLSSPLALAGDTQPRFLWQGKYKCHFFNGTERVQFLERLFYNQEEFVRFDSDVGEYRAVTELGRPVAESWNSQKDILEDRRGRGGHRVQTQLRGW

SEQ ID NO: 761636 - protein, 115 aa, Homo sapiens; identical to SEQ ID NO: 761635

SEQ ID NO: 761637 - protein, 115 aa, Homo sapiens; identical to SEQ ID NO: 761635

SEQ ID NO: 761638 - protein, 104 aa, Homo sapiens
MVKLTLEGKQTKRALALTGEARPRFLWQGKYKCHFFNGTERVQFLERLFYNQEEFVRFDSDVGEYRAVTELGRPVAESWNSQKDILEDRRGRGGHRVQTQLRGW

SEQ ID NO: 761639 - protein, 297 aa, Homo sapiens
MVCLKLPGGSCMAALTVTLMVLSSPLALAGDTQPRYLWQGKYKVSILFLTGDGAAVTVVTGTEELYLITPTGRGDSLAASEHDSSLLAVRYPRTDDSEVCGWPDDRVSGQQSAQDHPWQGRSAGSQVDNQSCDGTPTSRVVRSHERFTSATQRRVHPEVTVYPAKTQPLQHHNLLVCSVSGFYPGSIEVRWFRNGQEEKAGVVSTGLIQNGDWTFQTLVMLETVPRSGEVYTCQVEHPSVMSPLTVEWRARSESAQSKMLSGVGGFVLGLLFLGAGLFIYFRNQKGHSGLQPTGFLS

SEQ ID NO: 761640 - protein, 115 aa, Homo sapiens; identical to SEQ ID NO: 761635

SEQ ID NO: 761641 - protein, 115 aa, Homo sapiens; identical to SEQ ID NO: 761635

SEQ ID NO: 761642 - protein, 133 aa, Homo sapiens
MSLWAARGRGYGWDQLRFQCQHPAQGAPDGGVSVSVFPGGRPCDRILRVPTARFLWQGKYKCHFFNGTERVQFLERLFYNQEEFVRFDSDVGEYRAVTELGRPVAESWNSQKDILEDRRGRGGHRVQTQLRGW

SEQ ID NO: 761643 - protein, 126 aa, Homo sapiens
VPNSARAARASMVCLKLPGGSCMAALTVTLMVLSSPLALAGDTQPRFLWQGKYKCHFFNGTERVQFLERLFYNQEEFVRFDSDVGEYRAVTELGRPVAESWNSQKDILEDRRGRGGHRVQTQLRGW

SEQ ID NO: 761644 - protein, 585 aa, Homo sapiens
MGSLKEELLKAIWHAFTALDQDHSGKVSKSQLKVLSHNLCTVLKVPHDPVALEEHFRDDDEGPVSNQGYMPYLNRFILEKVQDNFDKIEFNRMCWTLCVKKNLTKNPLLITEEDAFKIWVIFNFLSEDKYPLIIVSEEIEYLLKKLTEAMGGGWQQEQFEHYKINFDDSKNGLSAWELIELIGNGQFSKGMDRQTVSMAINEVFNELILDVLKQGYMMKKGHRRKNWTERWFVLKPNIISYYVSEDLKDKKGDILLDENCCVESLPDKDGKKCLFLVKCFDKTFEISASDKKKKQEWIQAIHSTIHLLKLGSPPPHKEARQRRKELRKKQLAEQEELERQMKELQAANESKQQELEAVRKKLEEAASRAAEEEKKRLQTQVELQARFSTELEREKLIRQQMEEQVAQKSSELEQYLQRVRELEDMYLKLQEALEDERQARQDEETVRKLQARLLEEESSKRAELEKWHLEQQQAIQTTEAEKQELENQRVLKEQALQEAMEQLEELELERKQALEQYEEVKKKLEMATNKTKSWKDKVAHHEGLIRLIEPGSKNPHLITNWGPAAFTEAELEEREKNWKEKKTTE

SEQ ID NO: 761645 - protein, 490 aa, Homo sapiens
MGSLKEELLKAIWHAFTALDQDHSGKVSKSQLKVLSHNLCTVLKVPHDPVALEEHFRDDDEGPVSNQGYMPYLNRFILEKVQDNFDKIEFNRMCWTLCVKKNLTKNPLLITEEDAFKIWVIFNFLSEDKYPLIIVSEEIEYLLKKLTEAMGGGWQQEQFEHYKINFDDSKNGLSAWELIELIGNGQFSKGMDRQTVSMAINEVFNELILDVLKQGYMMKKGHRRKNWTERWFVLKPNIISYYVSEDLKDKKGDILLDENCCVESLPDKDGKKCLFLVKCFDKTFEISASDKKKKQEWIQAIHSTIHLLKLGSPPPHKEARQRRKELRKKQLAEQEELERQMKELQAANESKQQELEAVRKKLEEAASRAAEEEKKRLQTQVELQARFSTELEREKLIRQQMEEQVAQKSSELEQYLQRVRELEDMYLKLQEALEDERQARQDEETVRKLQARCQICLQTLPLCTLPGLIQFLGMTNTLVEREKCLCSGCD

SEQ ID NO: 761646 - protein, 585 aa, Homo sapiens; identical to SEQ ID NO: 761644

SEQ ID NO: 761647 - protein, 436 aa, Homo sapiens [sequence omitted]

SEQ ID NO: 761648 - protein, 392 aa, Homo sapiens
VFSCWSGAEFLLQNIERSGRKGYMMKKGHRRKNWTERWFVLKPNIISYYVSEDLKDKKGDILLDENCCVESLPDKDGKKCLFLVKCFDKTFEISASDKKKKQEWIQAIHSTIHLLKLGSPPPHKEARQRRKELRKKQLAEQEELERQMKELQAANESKQQELEAVRKKLEEAASRAAEEEKKRLQTQVELQARFSTELEREKLIRQQMEEQVAQKSSELEQYLQRVRELEDMYLKLQEALEDERQARQDEETVRKLQARLLEEESSKRAELEKWHLEQQQAIQTTEAEKQELENQRVLKEQALQEAMEQLEELELERKQALEQYEEVKKKLEMATNKTKSWKDKVAHHEGLIRLIEPGSKNPHLITNWGPAAFTEAELEEREKNWKEKKTTE

SEQ ID NO: 761649 - protein, 494 aa, Homo sapiens
MGSLKEELLKAIWHAFTALDQDHSGKVSKSQLKVLSHNLCTVLKVPHDPVALEEHFRDDDEGPVSNQGYMPYLNRFILEKVQDNFDKIEFNRMCWTLCVKKNLTKNPLLITEEDAFKIWVIFNFLSEDKYPLIIVSEEIEYLLKKLTEAMGGGWQQEQFEHYKINFDDSKNGLSAWELIELIGNGQFSKGMDRQTVSMAINEVFNELILDVLKQGYMMKKGHRRKNWTERWFVLKPNIISYYVSEDLKDKKGDILLDENCCVESLPDKDGKKCLFLVKCFDKTFEISASDKKKKQEWIQAIHSTIHLLKLGSPPPHKEARQRRKELRKKQLAEQEELERQMKELQAANESKQQELEAVRKKLEEAASRAAEEEKKRLQTQVELQARFSTELEREKLIRQQMEEQVAQKSSELEQYLQRVRELEDMYLKLQEALEDERQARQDEETVRRLQRAEIMPLYSSLGNRVRLHLKTKQNKTKQKNPALLLLTLLPSVPL

SEQ ID NO: 761650 - protein, 218 aa, Homo sapiens
ESSSVPPDCLQTQVELQARFSTELEREKLIRQQMEEQVAQKSSELEQYLQRVRELEDMYLKLQEALEDERQARQDEETVRKLQARLLEEESSKRAELEKWHLEQQQAIQTTEAEKQELENQRVLKEQALQEAMEQLEELELERKQALEQYEEVKKKLEMATNKTKSWKDKVAHHEGLIRLIEPGSKNPHLITNWGPAAFTEAELEEREKNWKEKKTTE

SEQ ID NO: 761651 - protein, 144 aa, Homo sapiens
VPATTLLLQARLLEEESSKRAELEKWHLEQQQAIQTTEAEKQELENQRVLKEQALQEAMEQLEELELERKQALEQYEEVKKKLEMATNKTKSWKDKVAHHEGLIRLIEPGSKNPHLITNWGPAAFTEAELEEREKNWKEKKTTE

SEQ ID NO: 761652 - protein, 585 aa, Homo sapiens; identical to SEQ ID NO: 761644

SEQ ID NO: 761653 - protein, 309 aa, Homo sapiens
MGSLKEELLKAIWHAFTALDQDHSGKVSKSQLKVLSHNLCTVLKVPHDPVALEEHFRDDDEGPVSNQGYMPYLNRFILEKIEYLLKKLTEAMGGGWQQEQFEHYKINFDDSKNGLSAWELIELIGNGQFSKGMDRQTVSMAINEVFNELILDVLKQGYMMKKGHRRKNWTERWFVLKPNIISYYVSEDLKDKKGDILLDENCCVESLDLTKMEETGFSRTLSDQTWTQASDKRRTGWFKPFILLSSVSGRLHTKEPHVEIGERGDKDGGRGRAETGAREGAARQETHRPHRRDTRGPRKGNTTAGVKHG

SEQ ID NO: 761654 - protein, 585 aa, Homo sapiens; identical to SEQ ID NO: 761644

SEQ ID NO: 761655 - protein, 527 aa, Homo sapiens [sequence omitted]

SEQ ID NO: 761656 - protein, 245 aa, Homo sapiens [sequence omitted]

SEQ ID NO: 761657 - protein, 194 aa, Homo sapiens
MSFSDSRCPEHGCLKAPLEFAYKFNCSYGSLEQVAVCCVSALEDERQARQDEETVRKLQARLLEEESSKRAELEKWHLEQQQAIQTTEAEKQELENQRVLKEQALQEAMEQLEELELERKQALEQYEEVKKKLEMATNKTKSWKDKVAHHEGLIRLIEPGSKNPHLITNWGPAAFTEAELEEREKNWKEKKTTE

SEQ ID NO: 761658 - protein, 122 aa, Homo sapiens
MEVAFCLQSNCMPTTEAEKQELENQRVLKEQALQEAMEQLEELELERKQALEQYEEVKKKLEMATNKTKSWKDKVAHHEGLIRLIEPGSKNPHLITNWGPAAFTEAELEEREKNWKEKKTTE

SEQ ID NO: 761659 - protein, 100 aa, Homo sapiens
VIKEDGTQSLIIVPATPSDSGEWTVVAQNRAGRSSISVILTVEAVEHQVKPMFVEKLKNVNIKEGSRLEMKVRATGNPNPDIVWLKNSDIIVPHKYPKIR

SEQ ID NO: 761660 - protein, 358 aa, Homo sapiens
ASGTQFASKTLPGSRYQLQTTAPDSSGIQLDFGKQSSSESQLSFGTQPSSGTQISSRIQASSGSQLSSGTQLISGAQPSSRTQTSSGNQLSSGTQTTARIQLSPGAHLSSRTQSSPETRLSSEAQSSSGTQFSSGIQFGSETQTGSRIQPDSGAQLSSRTQSSSETGLSSETQTGSRIQPSPGAHLSSGTQPVSGTQSSSRTHTSSRIWLSPGNGICPQTPGLDPRIQLEAPAPAQPQPPGPSPRDPTPAPSKDPQPLPQPHDQVCGIQASLGPIPGLPQASYLAPQSQVSSTPQKPAVSPKPRVGPQKSTPPTISVTPSPAPRAALLSSQLSESPALAPALCPTLGEPGARPYRGGP

SEQ ID NO: 761661 - protein, 141 aa, Homo sapiens
MSEHSRNSDQEELLDEEINEDEILANLSAEELKELQSEMEVMAPDPSLPVGMIQKDQTDKPPTGNFNHKSLVDYMYWEKASRRMLEEERVPVTFVKSEEKTQEEHEEIEKRNKNMAQYLKEKLNNEIVANKRESKGSSNIQ

SEQ ID NO: 761662 - protein, 105 aa, Homo sapiens
MSEHSRNSDQEELLDEEINEDEILANLSAEELKELQSEMEVMAPDPSLPVGMIQKDQTDKPPTGNFNHKSLVDYMYWEKASRRMLEEERVPVTFVKSEEKTQEDA

SEQ ID NO: 761663 - protein, 84 aa, Homo sapiens
HALHVFHCLFSSRLGTPVSPRLAMDPNCSCEAGGSCACAGSCKCKKCKCTSCKKSCCSCCPLGCAKCAQGCICKGASEKCSCCA

SEQ ID NO: 761664 - protein, 108 aa, Homo sapiens
HALHVFHCLFSSRLGTPVSPRLAMDPNCSCEAGGSCACAGSCKCKKCKCTSCKKSECGAISRNLGLWLRLGGNPRLALSACFLCPPRPSLPFQSSALSRAPVGLGSLS

SEQ ID NO: 761665 - protein, 319 aa, Homo sapiens
MEPGNDTQISEFLLLGFSQEPGLQPFLFGLFLSMYLVTVLGNLLIILATISDSHLHTPMYFFLSNLSFADICVTSTTIPKMLMNIQTQNKVITYIACLMQMYFFILFAGFENFLLSVMAYDRFVAICHPLHYMVIMNPHLCGLLVLASWTMSALYSLLQILMVVRLSFCTALEIPHFFCELNQVIQLACSDSFLNHMVIYFTVALLGGGPLTGILYSYSKIISSIHAISSAQGKYKAFSTCASHLSVVSLFYGAILGVYLSSAATRNSHSSATASVMYTVVTPMLNPFIYSLRNKDIKRALGIHLLWGTMKGQFFKKCP

SEQ ID NO: 761666 - protein, 109 aa, Homo sapiens
MSARGEGAGQPSTSAQGQPAAPAPQKRGRGRPRKQQQEPTGEPSPKRPRGRPKGSKNKSPSKAAQKKAEATGEKRPRGRPRKWPQQVVQKKPAQEETEETSSQESAEED

SEQ ID NO: 761667 - protein, 103 aa, Homo sapiens
MSARGEGAGQPSTSAQGQPAAPAPQKRGRGRPRKQQQEPTGEPSPKRPRGRPKGSKNKSPSKAAQKKAEATGEKRPRGRPRKWHSQSASEELIRIMQASSLSH

SEQ ID NO: 761668 - protein, 105 aa, Homo sapiens
MTDTFPSLNCTLFPCTQRWPERARHNKLFRRSLLRRKLKRHPHKSLPKRTRGRQRSISTSAAVGSFEGRRHCSDHLFCIAMVFPLSSGVGWGGVGEGGVGWGEIT

SEQ ID NO: 761669 - protein, 182 aa, Homo sapiens
MPRVVPDQRSKFENEEFFRKLSRECEIKYTGFRDRPHEERQARFQNACRDGRSEIAFVATGTNLSLQFFPASWQGEQRQTPSREYVDLEREAGKVYLKAPMILNGVCVIWKGWIDLQRLDGMGCLEFDEERAQQEDALAQQAFEEARRRTREFEDRDRSHREEMEVRVSQLLAVTGKKTTRP

SEQ ID NO: 761670 - protein, 135 aa, Homo sapiens
MPRVVPDQRSKFENEEFFRKLSRECEIKYTGFRDRPHEERQARFQNACRDGRSEIAFVATGTNLSLQFFPASWQGEQRQTPSREYVDLEREAGKVYLKAPMILNGVCVIWKGWIDLQRLDGMGCLEFDEERAQVG

SEQ ID NO: 761671 - protein, 187 aa, Homo sapiens
MPRVVPDQRSKFENEEFFRKLSRECEIKYTGFRDRPHEERQARFQNACRDGRSEIAFVATGTNLSLQFFPASWQGEQRQTPSREYVDLEREAGKVYLKAPMILNGVCVIWKGWIDLQRLDGMGCLEFDEERAQQEDALAQQAFEEARRRTREFEDRDRSHREEMEARRQQDPSPGSNLGGGDDLKLR

SEQ ID NO: 761672 - protein, 187 aa, Homo sapiens; identical to SEQ ID NO: 761671

SEQ ID NO: 761673 - protein, 182 aa, Homo sapiens; identical to SEQ ID NO: 761669

SEQ ID NO: 761674 - protein, 166 aa, Homo sapiens
MPRVVPDQRSKFENEEFFRKLSRECEIKYTGFRDRPHEERQARFQNACRDGRSEIAFVATGTNLSLQFFPASWQGEQRQTPSREYVDLEREAGKVYLKAPMILNGVCVIWKGWIDLQRLDGMGCLEFDEERAQQEDALAQQAFEEARRRTREFEDRDRSHREEMET

SEQ ID NO: 761675 - protein, 187 aa, Homo sapiens; identical to SEQ ID NO: 761671

SEQ ID NO: 761676 - protein, 187 aa, Homo sapiens; identical to SEQ ID NO: 761671

SEQ ID NO: 761677 - protein, 187 aa, Homo sapiens; identical to SEQ ID NO: 761671

SEQ ID NO: 761678 - protein, 201 aa, Homo sapiens
MPRVVPDQRSKFENEEFFRKLSRECEIKYTGFRDRPHEERQARFQNACRDGRSEIAFVATGTNLSLQFFPASWQGEQRQTPSREYVDLEREAGKVYLKAPMILNGVCVIWKGWIDLQRLDGMGCLEFDEERAQQEDALAQQAFEEARRRTREFEDRDRSHREEMENEVESVTGMLNEAEGKAIKLAKDVASLSSQLQDTQE

SEQ ID NO: 761679 - protein, 179 aa, Homo sapiens
MPRVVPDQRSKFENEEFFRKLSRECEIKYTGFRDRPHEERQARFQNACRDGRSEIAFVATGTNLSLQFFPASWQGEQRQTPSREYVDLEREAGKVYLKAPMILNGVCVIWKGWIDLQRLDGMGCLEFDEERAQQEDALAQQAFEEARRRTREFEDRDRSHREEMESCFKKKPGRSSTCL

SEQ ID NO: 761680 - protein, 94 aa, Homo sapiens
DGVASCIPGGSIDWHSHSQEYSSILWSNQSCTHHINPTLRHKAQKHSLTQVHTAMGEGDPCNAVCTELDSTQVSLTGGLDNKMWCWLTNKYDRI

SEQ ID NO: 761681 - protein, 645 aa, Homo sapiens
MLKFQEAAKCVSGSTAISTYPKTLIARRYVLQQKLGSGSFGTVYLVSDKKAKRGEELKVLKEISVGELNPNETVQANLEAQLLSKLDHPAIVKFHASFVEQDNFCIITEYCEGRDLDDKIQEYKQAGKIFPENQIIEWFIQLLLGVDYMHERRILHRDLKSKNVFLKNNLLKIGDFGVSRLLMGSCDLATTLTGTPHYMSPEALKHQGYDTKSDIWSLACILYEMCCMNHAFAGSNFLSIVLKIVEGDTPSLPERYPKELNAIMESMLNKNPSLRPSAIEILKIPYLDEQLQNLMCRYSEMTLEDKNLDCQKEAAHIINAMQKRIHLQTLRALSEVQKMTPRERMRLRKLQAADEKARKLKKIVEEKYEENSKRMQELRSRNFQQLSVDVLHEKTHLKGMEEKEEQPEGRLSCSPQDEDEERWQGREEESDEPTLENLPESQPIPSMDLHELESIVEDATSDLGYHEIPEDPLVAEEYYADAFDSYCEESDEEEEEIALERPEKEIRNEGSQPAYRTNQQDSDIEALARCLENVLGCTSLDTKTITTMAEDMSPGPPIFNSVMARTKMKRMRESAMQKLGTEVFEEVYNYLKRARHQNASEAEIRECLEKVVPQASDCFEVDQLLYFEEQLLITMGKEPTLQNHL

SEQ ID NO: 761682 - protein, 645 aa, Homo sapiens; identical to SEQ ID NO: 761681

SEQ ID NO: 761683 - protein, 645 aa, Homo sapiens; identical to SEQ ID NO: 761681

SEQ ID NO: 761684 - protein, 266 aa, Homo sapiens
MLKFQEAAKCVSGSTAISTYPKTLIARRYVLQQKLGSGSFGTVYLVSDKKAKRGEELKVLKEISVGELNPNETVQANLEAQLLSKLDHPAIVKFHASFVEQDNFCIITEYCEGRDLDDKIQEYKQAGKIFPENQIIEWFIQLLLGVDYMHERRILHRDLKSKNVFLKNNLLKIGDFGVSRLLMGSCDLATTLTGTPHYMSPEALKHQGYDTKSDIWSLACILYEMCCMNHAFAGSNFLSIVLKIVEGDTPSLPERYPKELNAIMER

SEQ ID NO: 761685 - protein, 645 aa, Homo sapiens; identical to SEQ ID NO: 761681

SEQ ID NO: 761686 - protein, 351 aa, Homo sapiens [sequence omitted]

SEQ ID NO: 761687 - protein, 112 aa, Homo sapiens
MLKFQEAAKCVSGSTAISTYPKTLIARRYVLQQKLGSGSFGTVYLVSDKKAKRGEELKVLKEISVGELNPNETVQANLEAQLLSKLDHPAIVKFHASFVEQDNFCIITEYCE

SEQ ID NO: 761688 - protein, 199 aa, Homo sapiens
TWLQGMQDAPLSCLSPTKWSSVSSADSTEKSASAAGTRNLPFQFCLRQALRMKAAGILTLIGCLVTGAESKIYTRCKLAKIFSRAGLDNYWGFSLGNWICMAYYESGYNTTAQTVLDDGSIDYGIFQINSFAWCRRGKLKENNHCHVACSALVTDDLTDAIICAKKIVKETQGMNYWQGWKKHCEGRDLSDWKKDCEVS

SEQ ID NO: 761689 - protein, 206 aa, Homo sapiens
TWLQGMQDAPLSCLSPTKWSSVSSADSTEKSASAAGTRNLPFQFCLRQALRMKAAGILTLIGCLVTGAESKIYTRCKLAKIFSRAGLDNYWGFSLGNWICMAYYESGYNTTAQTVLDDGSIDYGIFQINSFAWCRRGKLKENNHCHVACSALVTDDLTDAIICAKKIVKESKAGRNTVRGETCPTGKKTVRFPKLELDPGCFAATP

SEQ ID NO: 761690 - protein, 199 aa, Homo sapiens; identical to SEQ ID NO: 761688

SEQ ID NO: 761691 - protein, 175 aa, Homo sapiens
TWLQGMQDAPLSCLSPTKWSSVSSADSTEKSASAAGTRNLPFQFCLRQALRMKAAGILTLIGCLVTGAESKIYTRCKLAKIFSRAGLDNYWGFSLGNWICMAYYESGYNTTAQTVLDDGSIDYGIFQINSFAWCRRGKLKENNHCHVACSALVTDDLTDAIICAKKIVKENCEVS

SEQ ID NO: 761692 - protein, 129 aa, Homo sapiens
TWLQGMQDAPLSCLSPTKWSSVSSADSTEKSASAAGTRNLPFQFCLRQALRMKAAGILTLIGCLVTGAESKIYTRCKWNWTQDALQQRPRVCSECPNACVILSRFLPIFLLKLGEGKLSYTFKKINISI

SEQ ID NO: 761693 - protein, 1079 aa, Homo sapiens
MKSCAVSLTTAAVAFGDEAKKMAEGKASRESEEESVSLTVEEREALGGMDSRLFGFVRLHEDGARTKTLLGKAVRCYESLILKAEGKVESDFFCQLGHFNLLLEDYSKALSAYQRYYSLQADYWKNAAFLYGLGLVYFYYNAFHWAIKAFQDVLYVDPSFCRAKEIHLRLGLMFKVNTDYKSSLKHFQLALIDCNPCTLSNAEIQFHIAHLYETQRKYHSAKEAYEQLLQTENLPAQVKATVLQQLGWMHHNMDLVGDKATKESYAIQYLQKSLEADPNSGQSWYFLGRCYSSIGKVQDAFISYRQSIDKSEASADTWCSIGVLYQQQNQPMDALQAYICAVQLDHGHAAAWMDLGTLYESCNQPQDAIKCYLNAARSKRCSNTSTLAARIKFLQNGSDNWNGGQSLSHHPVQQVYSLCLTPQKLQHLEQLRANRDNLNPAQKHQLEQLESQFVLMQQMRHKEVAQVRTTGIHNGAITDSSLPTNSVSNRQPHGALTRVSSVSQPGVRPACVEKLLSSGAFSAGCIPCGTSKILGSTDTILLGSNCIAGSESNGNVPYLQQNTHTLPHNHTDLNSSTEEPWRKQLSNSAQGLHKSQSSCLSGPNEEQPLFSTGSAQYHQATSTGIKKANEHLTLPSNSVPQGDADSHLSCHTATSGGQQGIMFTKESKPSKNRSLVPETSRHTGDTSNGCADVKGLSNHVHQLIADAVSSPNHGDSPNLLIADNPQLSALLIGKANGNVGTGTCDKVNNIHPAVHTKTDHSVASSPSSAISTATPSPKSTEQRSINSVTSLNSPHSGLHTVNGEGLGKSQSSTKVDLPLASHRSTSQILPSMSVSICPSSTEVLKACRNPGKNGLSNSCILLDKCPPPRPPTSPYPPLPKDKLNPPTPSIYLENKRDAFFPPLHQFCTNPKNPVTVIRGLAGALKLDLGLFSTKTLVEANNEHMVEVRTQLLQPADENWDPTGTKKIWRCESNRSHTTIAKYAQYQASSFQESLRAGMQWCDLSSLQPPPPGFKRFSHLSLPNSWNYRHLPSCPTNFCIFVETGFHHVGQACLELLTSGGLLASASQSAGITGVSHHAR

SEQ ID NO: 761694 - protein, 1240 aa, Homo sapiens
MKSCAVSLTTAAVAFGDEAKKMAEGKASRESEEESVSLTVEEREALGGMDSRLFGFVRLHEDGARTKTLLGKAVRCYESLILKAEGKVESDFFCQLGHFNLLLEDYSKALSAYQRYYSLQADYWKNAAFLYGLGLVYFYYNAFHWAIKAFQDVLYVDPSFCRAKEIHLRLGLMFKVNTDYKSSLKHFQLALIDCNPCTLSNAEIQFHIAHLYETQRKYHSAKEAYEQLLQTENLPAQVKATVLQQLGWMHHNMDLVGDKATKESYAIQYLQKSLEADPNSGQSWYFLGRCYSSIGKVQDAFISYRQSIDKSEASADTWCSIGVLYQQQNQPMDALQAYICAVQLDHGHAAAWMDLGTLYESCNQPQDAIKCYLNAARSKRCSNTSTLAARIKFLQNGSDNWNGGQSLSHHPVQQVYSLCLTPQKLQHLEQLRANRDNLNPAQKHQLEQLESQFVLMQQMRHKEVAQVRTTGIHNGAITDSSLPTNSVSNRQPHGALTRVSSVSQPGVRPACVEKLLSSGAFSAGCIPCGTSKILGSTDTILLGSNCIAGSESNGNVPYLQQNTHTLPHNHTDLNSSTEEPWRKQLSNSAQGLHKSQSSCLSGPNEEQPLFSTGSAQYHQATSTGIKKANEHLTLPSNSVPQGDADSHLSCHTATSGGQQGIMFTKESKPSKNRSLVPETSRHTGDTSNGCADVKGLSNHVHQLIADAVSSPNHGDSPNLLIADNPQLSALLIGKANGNVGTGTCDKVNNIHPAVHTKTDHSVASSPSSAISTATPSPKSTEQRSINSVTSLNSPHSGLHTVNGEGLGKSQSSTKVDLPLASHRSTSQILPSMSVSICPSSTEVLKACRNPGKNGLSNSCILLDKCPPPRPPTSPYPPLPKDKLNPPTPSIYLENKRDAFFPPLHQFCTNPKNPVTVIRGLAGALKLDLGLFSTKTLVEANNEHMVEVRTQLLQPADENWDPTGTKKIWRCESNRSHTTIAKYAQYQASSFQESLREENEKRTQHKDHSDNESTSSENSGRRRKGPFKTIKFGTNIDLSDNKKWKLQLHELTKLPAFARVVSAGNLLTHVGHTILGMNTVQLYMKVPGSRTPGHQENNNFCSVNINIGPGDCEWFVVPEDYWGVLNDFCEKNNLNFLMSSWWPNLEDLYEANVPVYRFIQRPGDLVWINAGTVHWVQAVGWCNNIAWNVGPLTACQYKLAVERYEWNKLKSVKSPVPMVHLSWNMARNIKVSDPKLFEMIK

SEQ ID NO: 761695 - protein, 207 aa, Homo sapiens
MKSCAVSLTTAAVAFGDEAKKMAEGKASRESEEESVSLTVEEREALGGMDSRLFGFVRLHEDGARTKTLLGKAVRCYESLILKAEGKVESDFFCQLGHFNLLLEDYSKALSAYQRYYSLQADYWKNAAFLYGLGLVYFYYNAFHWAIKAFQDVLYVDPSFCRAKEIHLRLGLMFKVNTDYKSSLKHFQLALIDCNPCTLSNAESKYF

SEQ ID NO: 761696 - protein, 207 aa, Homo sapiens; identical to SEQ ID NO: 761695

SEQ ID NO: 761697 - protein, 1347 aa, Homo sapiens
MKSCAVSLTTAAVAFGDEAKKMAEGKASRESEEESVSLTVEEREALGGMDSRLFGFVRLHEDGARTKTLLGKAVRCYESLILKAEGKVESDFFCQLGHFNLLLEDYSKALSAYQRYYSLQADYWKNAAFLYGLGLVYFYYNAFHWAIKAFQDVLYVDPSFCRAKEIHLRLGLMFKVNTDYKSSLKHFQLALIDCNPCTLSNAEIQFHIAHLYETQRKYHSAKEAYEQLLQTENLPAQVKATVLQQLGWMHHNMDLVGDKATKESYAIQYLQKSLEADPNSGQSWYFLGRCYSSIGKVQDAFISYRQSIDKSEASADTWCSIGVLYQQQNQPMDALQAYICAVQLDHGHAAAWMDLGTLYESCNQPQDAIKCYLNAARSKRCSNTSTLAARIKFLQNGSDNWNGGQSLSHHPVQQVYSLCLTPQKLQHLEQLRANRDNLNPAQKHQLEQLESQFVLMQQMRHKEVAQVRTTGIHNGAITDSSLPTNSVSNRQPHGALTRVSSVSQPGVRPACVEKLLSSGAFSAGCIPCGTSKILGSTDTILLGSNCIAGSESNGNVPYLQQNTHTLPHNHTDLNSSTEEPWRKQLSNSAQGLHKSQSSCLSGPNEEQPLFSTGSAQYHQATSTGIKKANEHLTLPSNSVPQGDADSHLSCHTATSGGQQGIMFTKESKPSKNRSLVPETSRHTGDTSNGCADVKGLSNHVHQLIADAVSSPNHGDSPNLLIADNPQLSALLIGKANGNVGTGTCDKVNNIHPAVHTKTDHSVASSPSSAISTATPSPKSTEQRSINSVTSLNSPHSGLHTVNGEGLGKSQSSTKVDLPLASHRSTSQILPSMSVSICPSSTEVLKACRNPGKNGLSNSCILLDKCPPPRPPTSPYPPLPKDKLNPPTPSIYLENKRDAFFPPLHQFCTNPKNPVTVIRGLAGALKLDLGLFSTKTLVEANNEHMVEVRTQLLQPADENWDPTGTKKIWRCESNRSHTTIAKYAQYQASSFQESLREENEKRTQHKDHSDNESTSSENSGRRRKGPFKTIKFGTNIDLSDNKKWKLQLHELTKLPAFARVVSAGNLLTHVGHTILGMNTVQLYMKVPGSRTPGHQENNNFCSVNINIGPGDCEWFVVPEDYWGVLNDFCEKNNLNFLMSSWWPNLEDLYEANVPVYRFIQRPGDLVWINAGTVHWVQAVGWCNNIAWNVGPLTACQYKLAVERYEWNKLKSVKSPVPMVHLSWNMARNIKVSDPKLFEMIKYCLLKILKQYQTLREALVAAGKEVIWHGRTNDEPAHYCSICEVEVFNLLFVTNESNTQKTYIVHCHDCARKTSKSLENFVVLEQYKMEDLIQVYDQFTLALSLSSSS

SEQ ID NO: 761698 - protein, 56 aa, Homo sapiens
MAEGKASRESEEESVSLTVEEREALGGMDRYAPPSPAWLAGDTLREGLDADAPMVD

SEQ ID NO: 761699 - protein, 121 aa, Homo sapiens
KVGYRRGTWKFVVSMKSCAVSLTTAAVAFGDEAKKMAEGKASRESEEESVSLTVEEREALGGMDRYAPPSPAWLAGDTLREGLDADAPMVDDGVILSLALTNLSLSLLDSGRSKSLAFSDH

SEQ ID NO: 761700 - protein, 121 aa, Homo sapiens
MARRAGGARMFGSLLLFALLAAGVAPLSWDLPEPRSRASKIRVHSRGNLWATGHFMGKKSLEPSSPSPLGTAPHTSLRDQRLQLSHDLLGILLLKKALGVSLSRPAPQIQYRRLLVQILQK

SEQ ID NO: 761701 - protein, 121 aa, Homo sapiens; identical to SEQ ID NO: 761700

SEQ ID NO: 761702 - protein, 200 aa, Homo sapiens
MDSSTAHSPVFLVFPPEITASEYESTELSATTFSTQSPLQKLFARKMKILGTIQILFGIMTFSFGVIFLFTLLKPYPRFPFIFLSGYPFWGSVLFINSGAFLIAVKRKTTETLIILSRIMNFLSALGAIAGIILLTFGFILDQNYICGYSHQNSQCKAVTVLFLGILITLMTFSIIELFISLPFSILGCHSEDCDCEQCC

SEQ ID NO: 761703 - protein, 149 aa, Homo sapiens
MDSSTAHSPVFLVFPPEITASEYESTELSATTFSTQSPLQKLFARKMKILGTIQILFGIMTFSFGVIFLFTLLKPYPRFPFIFLSGYPFWGSVLFINSGAFLIAVKRKTTETLGILITLMTFSIIELFISLPFSILGCHSEDCDCEQCC

SEQ ID NO: 761704 - protein, 126 aa, Homo sapiens
DLKHVTYLRVSGRKESLKHGCGKHFRMSSHHYDYKKYGKGLRHMIGGFSLHQRIHSGLKGNKKDVCGKDFSLSSHHQRGQSLHTVGVSFKCSDCGRTFSHSSHLAYHQRLHTQEKAFKCRVCGKAF

SEQ ID NO: 761705 - protein, 560 aa, Homo sapiens
MEFRQEEFRKLAGRALGKLHRLLEKRQEGAETLELSADGRPVTTQTRDPPVVDCTCFGLPRRYIIAIMSGLGFCISFGIRCNLGVAIVSMVNNSTTHRGGHVVVQKAQFSWDPETVGLIHGSFFWGYIVTQIPGGFICQKFAANRVFGFAIVATSTLNMLIPSAARVHYGCVIFVRILQGLVEGVTYPACHGIWSKWAPPLERSRLATTAFCGSYAGAVVAMPLAGVLVQYSGWSSVFYVYGSFGIFWYLFWLLVSYESPALHPSISEEERKYIEDAIGESAKLMNPLTKFSTPWRRFFTSMPVYAIIVANFCRSWTFYLLLISQPAYFEEVFGFEISKVGLVSALPHLVMTIIVPIGGQIADFLRSRRIMSTTNVRKLMNCGGFGMEATLLLVVGYSHSKGVAISFLVLAVGFSGFAISGFNVNHLDIAPRYASILMGISNGVGTLSGMVCPIIVGAMTKHKTREEWQYVFLIASLVHYGGVIFYGVFASGEKQPWAEPEEMSEEKCGFVGHDQLAGSDDSEMEDEAEPPGAPPAPPPSYGATHSTFQPPRPPPPVRDY

SEQ ID NO: 761706 - protein, 560 aa, Homo sapiens; identical to SEQ ID NO: 761705

SEQ ID NO: 761707 - protein, 140 aa, Homo sapiens
  misc_feature (2)..(3): Xaa can be any naturally occurring amino acid
  misc_feature (9)..(9): Xaa can be any naturally occurring amino acid
  misc_feature (11)..(11): Xaa can be any naturally occurring amino acid
  misc_feature (54)..(54): Xaa can be any naturally occurring amino acid
GXXPSTRSXKXLPTLFCIFQIGLTNYSSPPFQGLILTSVSDGKWGFQVPDSVPXSLSLVPSAVKSSFLPNCLSGVVKLQTDSFKDTQIPLKVPSPPVLPQWFQISPFRALFEWTVRPLTLSCGFEAPTPPAFLYLQGLSG

SEQ ID NO: 761708 - protein, 560 aa, Homo sapiens; identical to SEQ ID NO: 761705

SEQ ID NO: 761709 - protein, 560 aa, Homo sapiens; identical to SEQ ID NO: 761705

SEQ ID NO: 761710 - protein, 560 aa, Homo sapiens; identical to SEQ ID NO: 761705

SEQ ID NO: 761711 - protein, 142 aa, Homo sapiens
MEFRQEEFRKLAGRALGKLHRLLEKRQEGAETLELSADGRPVTTQTRDPPVVDCTCFGLPRRYIIAIMSGLGFCISFGIRCNLGVAIVSMVNNSTTHRGGHVVVQKAQFSWDPETVGLIHGSFFWGYIVTQIPAELGFLHHH

SEQ ID NO: 761712 - protein, 323 aa, Homo sapiens
MLRPLPTPLSPPHPQLPSSQWGSLLRWWGAPREGAAGGLPVRHPWGACPFKHESYHQRSPSLLLALPAWCRVLETFLELIQQPSCKVVLGTALLLGGGGLMLWVQRKRRRKETSECPSDKDKSPESHKAKNESWIKSHFSRLSEEKLALDNNASASGNATQTESGSEEVSSTVHIETFTTRHGEVGSALHRESFTSRQKTSGPSVIQEIHQESGKAPSTDDATWAAVAACTKEIDTQGRHLAHSMLQRAIAYQHSGHLESKDINQEELRALEEVEMKLQKNFLTQRENTIAGANHTHTFYGHSHHSHHGHPSHQSHSLPNRRH

SEQ ID NO: 761713 - protein, 290 aa, Homo sapiens
MLTCKALYGQRDGACPFKHESYHQRSPSLLLALPAWCRVLETFLELIQQPSCKVVLGTALLLGGGGLMLWVQRKRRRKETSECPSDKDKSPESHKAKNESWIKSHFSRLSEEKLALDNNASASGNATQTESGSEEVSSTVHIETFTTRHGEVGSALHRESFTSRQKTSGPSVIQEIHQESGKAPSTDDATWAAVAACTKEIDTQGRHLAHSMLQRAIAYQHSGHLESKDINQEELRALEEVEMKLQKNFLTQRENTIAGANHTHTFYGHSHHSHHGHPSHQSHSLPNRRH

SEQ ID NO: 761714 - protein, 97 aa, Homo sapiens
AWADAWDAVTHTHTHILLHMFPCMCVHSDRASPTHLYPTPSTSLPPCTSPQQHTQPPAPPAPRPHQGPSLWPSVLVPELCVKFGPQSGPLGLPCAAV

SEQ ID NO: 761715 - protein, 679 aa, Homo sapiens
QITCAQEFDISLANMVDRVSYLLQEIYGIENKNNQETKPSDDENSDNSNECVVCLSDLRDTLILPCRHLCLCTSCADTLRYQANNCPICRLPFRALLQIRAVRKKPGALSPVSFSPVLAQSLEHDEHSCPFKKSKPHPASLASKKPKRETNSDSVPPGYEPISLLEALNGLRAVSPAIPSAPLYEEITYSGISDGLSQASCPLAAIDHILDSSRQKGRPQSKAPDSTLRSPSSPIHEEDEEKLSEDVDAPPPLGGAELALRESSSPESFITEEVDESSSPQQGTRAASIENVLQDSSPEHCGRGPPADIYLPALGPDSCSVGIDEYSRYVTFQTRFGGSDARPWREEPSPALWRGFLLVFGSSSASASSQGPWIPNPELSSGCCTFPQKVASWGVLTFGARGLSIWTRRPVRLFFQPGGALEQSQPRQGDRHSPGAPEPLSTAGGRSLRDEGSTVEGTPGRHGVSVPRGEAWAWPCSGWSHHEFASVLQQTRLDAQQVHSRVPVMALTIHGERMRPDWESPWITSSQAQSLSLGGSPSSRGPLVPRGEYLASCPEGVRSHSHLLPRSLLPLSAWPPWAWHHHGPGTQSLVGCLCAMSPLLPTHLSLPVLEPSGTPALKDRRPCEVGIPHPPPRGALYQGGPGECFTEGGSVQAVVRTYKPGTLGDRGDRSLEPRNSRSV

SEQ ID NO: 761716 - protein, 661 aa, Homo sapiens
GAAPRGGSGAPGRASPQPREPSDDENSDNSNECVVCLSDLRDTLILPCRHLCLCTSCADTLRYQANNCPICRLPFRALLQIRAVRKKPGALSPVSFSPVLAQSLEHDEHSCPFKKSKPHPASLASKKPKRETNSDSVPPGYEPISLLEALNGLRAVSPAIPSAPLYEEITYSGISDGLSQASCPLAAIDHILDSSRQKGRPQSKAPDSTLRSPSSPIHEEDEEKLSEDVDAPPPLGGAELALRESSSPESFITEEVDESSSPQQGTRAASIENVLQDSSPEHCGRGPPADIYLPALGPDSCSVGIDEYSRYVTFQTRFGGSDARPWREEPSPALWRGFLLVFGSSSASASSQGPWIPNPELSSGCCTFPQKVASWGVLTFGARGLSIWTRRPVRLFFQPSGALEQSQPRQGDRHSPGAPEPLSTAGGRSLRDEGSTVEGTPGRHGVSVPRGEAWAWPCSGWSHHEFASVLQQTRLDAQQVHSRVPVMALTIHGERMRPDWESPWITSSQAQSLSLGGSPSSRGPLVPRGEYLASCPEGVRSHSHLLPRSLLPLSAWPPWAWHHHGPGTQSLVGCLCAMSPLLPTHLSLPVLEPSGTPALKDRRPCEVGIPHPPPRGALYQGGPGECFTEGGSVQAVVRTYKPGTLGDRGDRSLEPRNSRSV

SEQ ID NO: 761717 - protein, 175 aa, Homo sapiens [sequence omitted]

SEQ ID NO: 761718 - protein, 611 aa, Homo sapiens
RASVRPGPGHVRVRTPPLSPLPFRPWPLCPAARRTMGSILSRRIAGVEDIDIQANSAYRYPPKSGNYFASHFFMGGEKFDTPHPEGYLFGENMDLNFLGSRPVQFPYVTPAPHEPVKTLRSLVNIRKDSLRLVRYKDDADSPTEDGDKPRVLYSLEFTFDADARVAITIYCQASEEFLNGRAVYSPKSPSLQSETVHYKRGVSQQFSLPSFKIDFSEWKDDELNFDLDRGVFPVVIQAVVDEGDVVEVTGHAHVLLAAFEKHMDGSFSVKPLKQKQIVDRVSYLLQEIYGIENKNNQETKPSDDENSDNSNECVVCLSDLRDTLILPCRHLCLCTSCADTLRYQANNCPICRLPFRALLQIRAVRKKPGALSPVSFSPVLAQSLEHDEHSCPFKKSKPHPASLASKKPKRETNSDSVPPGYEPISLLEALNGLRAVSPAIPSAPLYEEITYSGISDGLSQASCPLAAIDHILDSSRQKGRPQSKAPDSTLRSPSSPIHEEDEEKLSEDVDAPPPLGGAELALRESSSPESFITEEVDESSSPQQGTRAASIENVLQDSSPEHCGRGPPADIYLPGRPTSMETAHGLATTSPTWPPLGGPSPDPSAAELTPL

SEQ ID NO: 761719 - protein, 611 aa, Homo sapiens; identical to SEQ ID NO: 761718

SEQ ID NO: 761720 - protein, 611 aa, Homo sapiens; identical to SEQ ID NO: 761718

SEQ ID NO: 761721 - protein, 331 aa, Homo sapiens
GAAPRGGSGAPGRASPQPREPSDDENSDNSNECVVCLSDLRDTLILPCRHLCLCTSCADTLRYQANNCPICRLPFRALLQIRAVRKKPGALSPVSFSPVLAQSLEHDEHSCPFKKSKPHPASLASKKPKRETNSDSVPPGYEPISLLEALNGLRAVSPAIPSAPLYEEITYSGISDGLSQASCPLAAIDHILDSSRQKGRPQSKAPDSTLRSPSSPIHEEDEEKLSEDVDAPPPLGGAELALRESSSPESFITEEVDESSSPQQGTRAASIENVLQDSSPEHCGRGPPADIYLPGRPTSMETAHGLATTSPTWPPLGGPSPDPSAAELTPL

SEQ ID NO: 761722 - protein, 611 aa, Homo sapiens; identical to SEQ ID NO: 761718

SEQ ID NO: 761723 - protein, 256 aa, Homo sapiens
MKDSSFPSLVQSPRSPGSCGLSGWGWGCPRVASAGSACSCNSAVPARRTQEACRRELIGGRSTIFTDVQGQWGAPGTVNEGNSACPPTLRVTVAAWLSLLFVLCRVCAASVPSLVRLRWGPQCSGPWGAWAPPWAARVSQPGAGPGRGAEAQLLPAASIQWPCHQAPHLLLVLALVTSQGPSRCRGFCLAGPCQGGPGGLLILFCHWNVPLQFSSLFFFFGDGVSLLLPRLECSGSISGHCNLRLPGSSDRPALGS

SEQ ID NO: 761724 - protein, 199 aa, Homo sapiens [sequence omitted]

SEQ ID NO: 761725 - protein, 199 aa, Homo sapiens [sequence omitted]

SEQ ID NO: 761726 - protein, 141 aa, Homo sapiens
WVSRGSLRDCVAPGQHGPHTQLPAHPGQPPLPLVHRHADALTRTHTQMHAHLHMLTHTFTHAHSRSHMLSRIHTRTYSCTCSHACVCTRTEHLPRTSTPPQAPLSPHAPLPNNTHSPLHRPPPAPTKAPASGHQSWCQSFA

SEQ ID NO: 761727 - protein, 34 aa, Homo sapiens
MEEPSYGSWRGPSEPLSALQVDRVSYLLQEIYGI

SEQ ID NO: 761728 - protein, 941 aa, Homo sapiens
RASVRPGPGHVRVRTPPLSPLPFRPWPLCPAARRTMGSILSRRIAGVEDIDIQANSAYRYPPKSGNYFASHFFMGGEKFDTPHPEGYLFGENMDLNFLGSRPVQFPYVTPAPHEPVKTLRSLVNIRKDSLRLVRYKDDADSPTEDGDKPRVLYSLEFTFDADARVAITIYCQASEEFLNGRAVYSPKSPSLQSETVHYKRGVSQQFSLPSFKIDFSEWKDDELNFDLDRGVFPVVIQAVVDEGDVVEVTGHAHVLLAAFEKHMDGSFSVKPLKQKQIVDRVSYLLQEIYGIENKNNQETKPSDDENSDNSNECVVCLSDLRDTLILPCRHLCLCTSCADTLRYQANNCPICRLPFRALLQIRAVRKKPGALSPVSFSPVLAQSLEHDEHSCPFKKSKPHPASLASKKPKRETNSDSVPPGYEPISLLEALNGLRAVSPAIPSAPLYEEITYSGISDGLSQASCPLAAIDHILDSSRQKGRPQSKAPDSTLRSPSSPIHEEDEEKLSEDVDAPPPLGGAELALRESSSPESFITEEVDESSSPQQGTRAASIENVLQDSSPEHCGRGPPADIYLPALGPDSCSVGIDEYSRYVTFQTRFGGSDARPWREEPSPALWRGFLLVFGSSSASASSQGPWIPNPELSSGCCTFPQKVASWGVLTFGARGLSIWTRRPVRLFFQPSGALEQSQPRQGDRHSPGAPEPLSTAGGRSLRDEGSTVEGTPGRHGVSVPRGEAWAWPCSGWSHHEFASVLQQTRLDAQQVHSRVPVMALTIHGERMRPDWESPWITSSQAQSLSLGGSPSSRGPLVPRGEYLASCPEGVRSHSHLLPRSLLPLSAWPPWAWHHHGPGTQSLVGCLCAMSPLLPTHLSLPVLEPSGTPALKDRRPCEVGIPHPPPRGALYQGGPGECFTEGGSVQAVVRTYKPGTLGDRGDRSLEPRNSRSV

SEQ ID NO: 761729 - protein, 751 aa, Homo sapiens
  misc_feature (2)..(2): Xaa can be any naturally occurring amino acid
PXPSGRRCLVHSVLNGAQAGVQWRDLGSLQPPPPSRLPWPPKVPRVQPLPSRHPVVEVTGHAHVLLAAFEKHMDGSFSVKPLKQKQIVDRVSYLLQEIYGIENKNNQETKPSDDENSDNSNECVVCLSDLRDTLILPCRHLCLCTSCADTLRYQANNCPICRLPFRALLQIRAVRKKPGALSPVSFSPVLAQSLEHDEHSCPFKKSKPHPASLASKKPKRETNSDSVPPGYEPISLLEALNGLRAVSPAIPSAPLYEEITYSGISDGLSQASCPLAAIDHILDSSRQKGRPQSKAPDSTLRSPSSPIHEEDEEKLSEDVDAPPPLGGAELALRESSSPESFITEEVDESSSPQQGTRAASIENVLQDSSPEHCGRGPPADIYLPALGPDSCSVGIDEYSRYVTFQTRFGGSDARPWREEPSPALWRGFLLVFGSSSASASSQGPWIPNPELSSGCCTFPQKVASWGVLTFGARGLSIWTRRPVRLFFQPGGALEQSQPRQGDRHSPGAPEPLSTAGGRSLRDEGSTVEGTPGRHGVSVPRGEAWAWPCSGWSHHEFASVLQQTRLDAQQVHSRVPVMALTIHGERMRPDWESPWITSSQAQSLSLGGSPSSRGPLVPRGEYLASCPEGVRSHSHLLPRSLLPLSAWPPWAWHHHGPGTQSLVGCLCAMSPLLPTHLSLPVLEPSGTPALKDRRPCEVGIPHPPPRGALYQGGPGECFTEGGSVQAVVRTYKPGTLGDRGDRSLEPRNSRSV

SEQ ID NO: 761730 - protein, 585 aa, Homo sapiens
SWPRAWTGLKDTGDRAPGFFRPVLAQSLEHDEHSCPFKKSKPHPASLASKKPKRETNSDSVPPGYEPISLLEALNGLRAVSPAIPSAPLYEEITYSGISDGLSQASCPLAAIDHILDSSRQKGRPQSKAPDSTLRSPSSPIHEEDEEKLSEDVDAPPPLGGAELALRESSSPESFITEEVDESSSPQQGTRAASIENVLQDSSPEHCGRGPPADIYLPALGPDSCSVGIDEYSRYVTFQTRFGGSDARPWREEPSPALWRGFLLVFGSSSASASSQGPWIPNPELSSGCCTFPQKVASWGVLTFGARGLSIWTRRPVRLFFQPGGALEQSQPRQGDRHSPGAPEPLSTAGGRSLRDEGSTVEGTPGRHGVSVPRGEAWAWPCSGWSHHEFASVLQQTRLDAQQVHSRVPVMALTIHGERMRPDWESPWITSSQAQSLSLGGSPSSRGPLVPRGEYLASCPEGVRSHSHLLPRSLLPLSAWPPWAWHHHGPGTQSLVGCLCAMSPLLPTHLSLPVLEPSGTPALKDRRPCEVGIPHPPPRGALYQGGPGECFTEGGSVQAVVRTYKPGTLGDRGDRSLEPRNSRSV

SEQ ID NO: 761731 - protein, 623 aa, Homo sapiens
GILLLLIFFYILLCLCTSCADTLRYQANNCPICRLPFRALLQIRAVRKKPGALSPVSFSPVLAQSLEHDEHSCPFKKSKPHPASLASKKPKRETNSDSVPPGYEPISLLEALNGLRAVSPAIPSAPLYEEITYSGISDGLSQASCPLAAIDHILDSSRQKGRPQSKAPDSTLRSPSSPIHEEDEEKLSEDVDAPPPLGGAELALRESSSPESFITEEVDESSSPQQGTRAASIENVLQDSSPEHCGRGPPADIYLPALGPDSCSVGIDEYSRYVTFQTRFGGSDARPWREEPSPALWRGFLLVFGSSSASASSQGPWIPNPELSSGCCTFPQKVASWGVLTFGARGLSIWTRRPVRLFFQPGGALEQSQPRQGDRHSPGAPEPLSTAGGRSLRDEGSTVEGTPGRHGVSVPRGEAWAWPCSGWSHHEFASVLQQTRLDAQQVHSRVPVMALTIHGERMRPDWESPWITSSQAQSLSLGGSPSSRGPLVPRGEYLASCPEGVRSHSHLLPRSLLPLSAWPPWAWHHHGPGTQSLVGCLCAMSPLLPTHLSLPVLEPSGTPALKDRRPCEVGIPHPPPRGALYQGGPGECFTEGGSVQAVVRTYKPGTLGDRGDRSLEPRNSRSV

SEQ ID NO: 761732 - protein, 611 aa, Homo sapiens; identical to SEQ ID NO: 761718

SEQ ID NO: 761733 - protein, 256 aa, Homo sapiens; identical to SEQ ID NO: 761723

SEQ ID NO: 761734 - protein, 611 aa, Homo sapiens; identical to SEQ ID NO: 761718

SEQ ID NO: 761735 - protein, 336 aa, Homo sapiens
RASVRPGPGHVRVRTPPLSPLPFRPWPLCPAARRTMGSILSRRIAGVEDIDIQANSAYRYPPKSGNYFASHFFMGGEKFDTPHPEGYLFGENMDLNFLGSRPVQFPYVTPAPHEPVKTLRSLVNIRKDSLRLVRYKDDADSPTEDGDKPRVLYSLEFTFDADARVAITIYCQASEEFLNGRAVYSPKSPSLQSETVHYKRGVSQQFSLPSFKIDFSEWKDDELNFDLDRGVFPVVIQAVVDEGDVVEVTGHAHVLLAAFEKHMDGSFSVKPLKQKQIVSHQRKYDVLELKDTHIQSLTRILMHRHTLIHTHIYSYTLIHTHTHSLAHIYGHTYIPS

SEQ ID NO: 761736 - protein, 139 aa, Homo sapiens
DCPVDLIPALYSVGARQKRQGYSKKEWPISGGNWGLGAQSYPEIIITGHADGSVKFWDASAITLQVLYKLKTSKVFEKSRNKDDRPNTDIVDEDPYAIQIISWCPESRMLCIAGVSAHVIIYRFSKQEVITEVIPVITS

SEQ ID NO: 761737 - protein, 70 aa, Homo sapiens
AAYKQTKAQRARTMALYNPIPVRQNCFTVNRSLFIFGEDNIVRKYAKKLIDWPYPFLPTITPSPPLHFFG

SEQ ID NO: 761738 - protein, 1259 aa, Homo sapiens
MARFGEAVVARPGSGDGDSDQSRNRQGTPVPASGQAAAYKQTKAQRARTMALYNPIPVRQNCFTVNRSLFIFGEDNIVRKYAKKLIDWPPFEYMILATIIANCIVLALEQHLPEDDKTPMSRRLEKTEPYFIGIFCFEAGIKIVALGFIFHKGSYLRNGWNVMDFIVVLSGILATAGTHFNTHVDLRTLRAVRVLRPLKLVSGIPSLQIVLKSIMKAMVPLLQIGLLLFFAILMFAIIGLEFYSGKLHRACFMNNSGILEGFDPPHPCGVQGCPAGYECKDWIGPNDGITQFDNILFAVLTVFQCITMEGWTTVLYNTNDALGATWNWLYFIPLIIIGSFFVLNLVLGVLSGEFAKERERVENRRAFMKLRRQQQIERELNGYRAWIDKAEEVMLAEENKNAGTSALEVLRRATIKRSRTEAMTRDSSDEHCVDISSVGTPLARASIKSAKVDGVSYFRHKERLLRISIRHMVKSQVFYWIVLSLVALNTACVAIVHHNQPQWLTHLLYYAEFLFLGLFLLEMSLKMYGMGPRLYFHSSFNCFDFGVTVGSIFEVVWAIFRPGTSFGISVLRALRLLRIFKITKYWASLRNLVVSLMSSMKSIISLLFLLFLFIVVFALLGMQLFGGRFNFNDGTPSANFDTFPAAIMTVFQILTGEDWNEVMYNGIRSQGGVSSGMWSAIYFIVLTLFGNYTLLNVFLAIAVDNLANAQELTKDEQEEEEAFNQKHALQKAKEVSPMSAPNMPSIERERRRRHHMSVWEQRTSQLRKHMQMSSQEALNREEAPTMNPLNPLNPLSSLNPLNAHPSLYRRPRAIEGLALGLALEKFEEERISRGGSLKGDGGDRSSALDNQRTPLSLGQREPPWLARPCHGNCDPTQQEAGGGEAVVTFEDRARHRQSQRRSRHRRVRTEGKESSSASRSRSASQERSLDEAMPTEGEKDHELRGNHGAKEPTIQEERAQDLRRTNSLMVSRGSGLAGGLDEADTPLVLPHPELEVGKHVVLTEQEPEGSSEQALLGNVQLDMGRVISQSEPDLSCITANTDKATTESTSVTVAIPDVDPLVDSTVVHISNKTDGEASPLKEAEIREDEEEVEKKKQKKEKRETGKAMVPHSSMFIFSTTNPIRRACHYIVNLRYFEMCILLVIAASSIALAAEDPVLTNSERNKVLRYFDYVFTGVFTFEMVIKMIDQGLILQDGSYFRDLWNILDFVVVVGALVAFALANALGTNKGRDIKTIKSLRVLRVLRPLSPSQTMHPCTCT

SEQ ID NO: 761739 - protein, 503 aa, Homo sapiens
AVTAAVNPSLSDHGNGLGRGTRGSGCSGGSLVADWGGGAAAAAAVALALAPALSTMRRGSSESELAARWEAEAVAAAKAAAKAEAEATAETVAEQVRVDAGAAGEPECKAGEEQPKVLAPAPAQPSAAEEGNTQVLQRPPPTLPPSKPKPVQGLCPHGKPRDKGRSCKRSSGHGSGENGSQRPVTVDSSKARTSLDALKISIRQLKWKEFPFGRRLPCDIYWHGVSFHDNDIFSGQVNKFPGMTEMVRKITLSRAVRTMQNLFPEEYNFYPRSWILPDEFQLFVAQVQMVKDDDPSWKPTFIVKPDGGCQGDGIYLIKDPSDIRLAGTLQSRPAVVQEYICKPLLIDKLKFDIRLYVLLKSLDPLEIYIAKDGLSRFCTEPYQEPTPKNLHRIFMHLTNYSLNIHSGNFIHSDSASTGSKRTFSSILCRLSSKGVDIKKVWSDIISVVIKTVIALTPELKVFYQSDIPTGRPGPTCFQVTIASSQPAFPALTGLKRALWLRVG

SEQ ID NO: 761740 - protein, 537 aa, Homo sapiens
AVTAAVNPSLSDHGNGLGRGTRGSGCSGGSLVADWGGGAAAAAAVALALAPALSTMRRGSSESELAARWEAEAVAAAKAAAKAEAEATAETVAEQVRVDAGAAGEPECKAGEEQPKVLAPAPAQPSAAEEGNTQVLQRPPPTLPPSKPKPVQGLCPHGKPRDKGRSCKRSSGHGSGENGSQRPVTVDSSKARTSLDALKISIRQLKWKEFPFGRRLPCDIYWHGVSFHDNDIFSGQVNKFPGMTEMVRKITLSRAVRTMQNLFPEEYNFYPRSWILPDEFQLFVAQVQMVKDDDPSWKPTFIVKPDGGCQGDGIYLIKDPSDIRLAGTLQSRPAVVQEYICKPLLIDKLKFDIRLYVLLKSLDPLEIYIAKDGLSRFCTEPYQEPTPKNLHRIFMHLTNYSLNIHSGNFIHSDSASTGSKRTFSSILCRLSSKGVDIKKVWSDIISVVIKTVIALTPELKVFYQSDIPTGRPGPTCFQILGFDILLMKNLKPILLEVNANPSMRIEHEHELSPGVFENVPSLVDEEVKVAVIRDTLR

SEQ ID NO: 761741 - protein, 458 aa, Homo sapiens
AVTAAVNPSLSDHGNGLGRGTRGSGCSGGSLVADWGGGAAAAAAVALALAPALSTMRRGSSESELAARWEAEAVAAAKAAAKAEAEATAETVAEQVRVDAGAAGEPECKAGEEQPKVLAPAPAQPSAAEEGNTQVLQRPPPTLPPSKPKPVQGLCPHGKPRDKGRSCKRSSGHGSGENGSQRPVTVDSSKARTSLDALKISIRQLKWKEFPFGRRLPCDIYWHGVSFHDNDIFSGQVNKFQVQMVKDDDPSWKPTFIVKPDGGCQGDGIYLIKDPSDIRLAGTLQSRPAVVQEYICKPLLIDKLKFDIRLYVLLKSLDPLEIYIAKDGLSRFCTEPYQEPTPKNLHRIFMHLTNYSLNIHSGNFIHSDSASTGSKRTFSSILCRLSSKGVDIKKVWSDIISVVIKTVIALTPELKVFYQSDIPTGRPGPTCFQVTIASSQPAFPALTGLKRALWLRVG

SEQ ID NO: 761742 - protein, 127 aa, Homo sapiens
RPPPTLPPSKPKPVQGLCPHGKPRDKGRSCKRSSGHGSGENGSQRPVTVDSSKARTSLDALKISIRQLKWKEVRPGPTRPRGHSGVDRTTSEVSARPRSGRRARAELLRCTTLGPACQPQSAHPSRP

SEQ ID NO: 761743 - protein, 236 aa, Homo sapiens
MEYVPGCELFSYLRNRGLFYSAEIICAILHSKEIIYRDLKPENILLDRDGHIKLTDFGFAKKLVDRTWTLCGIPEYLAPEVIQSEGHGRAVDWWALSILIFEMLSGFPPFVCVCVCVCVCVCVCDNMFGIYQKILADKIDFPRHLDFHVKDLIKKLLVVDRTRWLGNMKNGANDVKRHRWFRSVDWEAVPQRKLKPPIVPKIAREGDTSNFGTYPENDWDTAATVPQKGLEIFKNF

SEQ ID NO: 761744 - protein, 309 aa, Homo sapiens
SLGVEGAGSRREDLRPGTMAALQEKKTCGQRMEEFQRYCWNPDTGQMLGRTLSRWVWISLYYVAFYVVMTGLFALCLYVLMQTVDPYTPDYQDQLRSPGVTLRPDVYGEKGLEIVYNVSDNRTWADLTQTLHAFLAGYSPAAQEDSINCTSEQYFFQESFRAPNHTKFSCKFTADMLQNCSGLADPNFGFEEGKPCFIIKMNRIVKFLPSNGSAPRVDCAFLDQPRELGQPLQVKYYPPNGTFSLHYFPYYGKKAQPHYSNPLVAAKLLNIPRNAEVAIVCKVMAEHVTFNNPHDPYEGKVEFKLKIEK

SEQ ID NO: 761745 - protein, 107 aa, Homo sapiens
QNQVIRERERERVPYRSCPFCDLALEARPHLFHNILVVTHQPNSAWGETSQGHEKRELGLMRAIVESGSHTSLLSIFISLSATQNFCPGLVWLPHPVLSNLPVHPLF

SEQ ID NO: 761746 - protein, 127 aa, Homo sapiens [sequence omitted]

SEQ ID NO: 761747 - protein, 109 aa, Homo sapiens [sequence omitted]

SEQ ID NO: 761748 - protein, 188 aa, Homo sapiens
EGRPGAADAGTLARSLPPSLRRYQMMLFGKISQQLCGVKKLPWSCDSRYFWGWLNAVFNKVDYDRIRDVGPDRAASEWLLRCGAMVRYHGQERWQKDYNHLPTGPLDKYKIQAIDATDSCIMSIGFDHMEGLEHVEKIRLCKCHYIEDDCLLRLSQLENLQKTILEMEIISCGNITDKGIIALRHLRA

SEQ ID NO: 761749 - protein, 215 aa, Homo sapiens [sequence omitted]

SEQ ID NO: 761750 - protein, 224 aa, Homo sapiens
EGRPGAADAGTLARSLPPSLRRYQMMLFGKISQQLCGVKKLPWSCDSRYFWGWLNAVFNKVDYDRIRDVGPDRAASEWLLRCGAMVRYHGQERWQKDYNHLPTGPLDKYKIQAIDATDSCIMSIGFDHMEGLEHVEKIRLCKCHYIEDDCLLRLSQLENLQKTILEMEIISCGNITDKGIIALRHLRNLKYLLLSDLPGVREKENLVQAFKTALPSLELKLQLK

SEQ ID NO: 761751 - protein, 136 aa, Homo sapiens
MCCAVSEQRLTCADQMMLFGKISQQLCGVKKLPWSCDSRYFWGWLNAVFNKVDYDRIRDVGPDRAASEWLLRCGAMVRYHGQERWQKDYNHLPTGPLDKYKIQAIDATDSCIMSIGFDHMGNYPIVLLIENADDLQ

SEQ ID NO: 761752 - protein, 136 aa, Homo sapiens; identical to SEQ ID NO: 761751

SEQ ID NO: 761753 - protein, 112 aa, Homo sapiens
MMLFGKISQQLCGVKKLPWSCDSRYFWGWLNAVFNKVDYDRIRDVGPDRAASEWLLRCGAMVRYHGQERWQKDYNHLPTGPLDKYKIQAIDATDSCIMSIGFDHMETSNICC

SEQ ID NO: 761754 - protein, 200 aa, Homo sapiens
MMLFGKISQQLCGVKKLPWSCDSRYFWGWLNAVFNKVDYDRIRDVGPDRAASEWLLRCGAMVRYHGQERWQKDYNHLPTGPLDKYKIQAIDATDSCIMSIGFDHMEGLEHVEKIRLCKCHYIEDDCLLRLSQLENLQKTILEMEIISCGNITDKGIIALRHLRNLKYLLLSDLPGVREKENLVQAFKTALPSLELKLQLK

SEQ ID NO: 761755 - protein, 136 aa, Homo sapiens; identical to SEQ ID NO: 761751

SEQ ID NO: 761756 - protein, 200 aa, Homo sapiens; identical to SEQ ID NO: 761754

SEQ ID NO: 761757 - protein, 188 aa, Homo sapiens [sequence omitted]

SEQ ID NO: 761758 - protein, 178 aa, Homo sapiens
MCCAVSEQRLTCADQMMLFGKISQQLCGVKKLPWSCDSRYFWGWLNAVFNKVDYDRIRDVGPDRAASEWLLRCGAMVRYHGQERWQKDYNHLPTGPLDKYKIQAIDATDSCIMSIGFDHMEGLEHVEKIRLCKCHYIEDDCLLRLSQLENLQKTILEMEIISCGNITDKGIIALRHLR

SEQ ID NO: 761759 - protein, 136 aa, Homo sapiens; identical to SEQ ID NO: 761751

SEQ ID NO: 761760 - protein, 106 aa, Homo sapiens
SDTTRSQASRHEEHVQNIRRFHESLHLQGEAPLPCDDKLTTSPLSSQTSILTSLSPQTQTAISQHQESCRDHLGPGASSLDPGSQCILEKSSNLVLQVSSLITGSY

SEQ ID NO: 761761 - protein, 521 aa, Homo sapiens
SDTTRSQASRHEEHVQNIRRFHESLHLQGEAPLPCDDKLTTSPLSSQTSILTSLRKNLSELDQIQRYFRQKLTKPFLPLSPQTQTAISQHQESCRDHLGPGASSLDPGSQCILEKSSNLVLQVSSLITDLQTITRDSQAALSSHRARSRSNKATTLPDAQDTEALQERCTMPDEPLVRAPDKGTDSPSPPPLEETSNGGRMLHESLRHAVPITRMQSSEDTEAGPAYSDEDYEEDIIEPRTLNEITTVTDKTSPWSSVISDTSEVISPQPDEVQREGPSCPSPGPFCREELMVKSSFLSSPERAVNPHLPRQGSPSQSLVACECEASKARVGGESASANPQPIPCPTLSGAQQSSTFVGWSSPQTDQNKEPKSEAPAENEAATSELGDSADSFKKLPLNLASQSRRENHKGPPIDSSDIRQRQVTTGSETSTKQSLLLPGPIVVPNFFLPPQQLEASLRMLSLSATLPPAATTDQDKSEATRGALSQRPCRPRPNSLPLNLPEEETLRIARIFSSQYSQKD

SEQ ID NO: 761762 - protein, 131 aa, Homo sapiens
SDTTRSQASRHEEHVQNIRRFHESLHLQGEAPLPCDDKLTTSPLSSQTSILTSLRKNLSELDQIQRYFRQKLTKPFLPLSPQTQTAISQHQESCRDHLGPGASSLDPGSQCILEKSSNLVLQVSSLITGSY

SEQ ID NO: 761763 - protein, 440 aa, Homo sapiens
SDTTRSQASRHEEHVQNIRRFHESLHLQGEAPLPCDDKLTTSPLSSQTSILTSLRKNLSELDQIQRYFRQKLTKPFLPLSPQTQTAISQHQESCRDHLGPGASSLDPGSQCILEKSSNLVLQVSSLITDLQTITRDSQAALSSHRARSRSNKATTLPDAQDTEALQERCTMPDEPLVRAPDKGTDSPSPPPLEETSNGGRMLHESLRHAVPITRMQSSEDTEAGPAYSDEDYEEDIIEPRTLNEITTVTDKTSPWSSVISDTSEVISPQPDEVQREGPSCPSPGPFCREELMVKSSFLSSPERAVNPHLPRQGSPSQSLVACECEASKARVGGESASANPQPIPCPTLSGAQQSSTFVGWSSPQTDQNKEPKSEAPAENEAATSELGDSADSFKKLPLNLAPEEGTLGAPALDREGDMSQSNTCPAWAFAPGPGLQHFTL

SEQ ID NO: 761764 - protein, 409 aa, Homo sapiens
MALRPEDPSSGFRHSNVVAFINEKMARHTKGPEFYLENISLSWEKVEDKLRAILEDSEVPSEVKEACTWGSLALGVRFAHRQAQLQRHRVRWLHGFAKLHKSAAQALASDLKKLREQQETERKEAASRLRMAQTSLVEVQKERDKELVSPHEWEQGAGWPGLATAGGVCTEGAAEEEEEAAVAAAGAAGGKGAEEEQRDVEVVAAPVEAMAPPVEAGAAPMETQFPHVEARAASMETTEKLERILLQLLGDADQEKYTYWGQKEGDLRSVETATSYFSGTTNPWSRASSEPLPVQLPASYSYSYSSPFSSFSDIPTISPPQATVTAPVPPQLPSDWEAFDTSLWSDGGPHRIDHQEHPRDRRYSEPHQQRPPVYRRPGDWDCPWCNAVNFSRRDTCFDCGKGIWLQKPH

SEQ ID NO: 761765 - protein, 437 aa, Homo sapiens
ERDLPLSSGVLRQRGWPVLPLALAEEAIMALRPEDPSSGFRHSNVVAFINEKMARHTKGPEFYLENISLSWEKVEDKLRAILEDSEVPSEVKEACTWGSLALGVRFAHRQAQLQRHRVRWLHGFAKLHKSAAQALASDLKKLREQQETERKEAASRLRMAQTSLVEVQKERDKELVSPHEWEQGAGWPGLATAGGVCTEGAAEEEEEAAVAAAGAAGGKGAEEEQRDVEVVAAPVEAMAPPVEAGAAPMETQFPHVEARAASMETTEKLERILLQLLGDADQEKYTYWGQKEGDLRSVETATSYFSGTTNPWSRASSEPLPVQLPASYSYSYSSPFSSFSDIPTISPPQATVTAPVPPQLPSDWEAFDTSLWSDGGPHRIDHQEHPRDRRYSEPHQQRPPVYRRPGDWDCPWCNAVNFSRRDTCFDCGKGIWLQKPH

SEQ ID NO: 761766 - protein, 149 aa, Homo sapiens
VCAAVVLLPDGQASVVPHASENLVSQVPQGHLQSMPTGNMRASQELHDLMAARRSKLVQEEPRNPNCQGSCKSQRPMFPPIHKSEKSRKPNLEKHEERLEGLRTPQLTPVRKTEDTHQDEGVQLLPSKKQPPSVSHFGENIKQFFQWIF

SEQ ID NO: 761767 - protein, 47 aa, Homo sapiens
MGHFRNPHFLVMLTQDSFRTTWYPSSGLPLHCTHVAPWHLSHHKVTD

SEQ ID NO: 761768 - protein, 115 aa, Homo sapiens
RVPVLGLVILGKSQAVPCPPSGYEPRMLIFFPWLLHDFVEFPEYVWGPPASHSPQPCGSRAGCQAQSAGPRAPEVGGCVPELPLWALPGAGRDHTGGRNSGSPGLGHTSLVLVIY

SEQ ID NO: 761769 - protein, 206 aa, Homo sapiens
MALPCTLGLGMLLALPGALGSGGSAEDSVGSSSVTVVLLLLLLLLLATGLALAWRRLSRDSGGYYHPARLGAALWGRTRRLLWASPPGRWLQARAELGSTDNDLERQEDEQDTDYDHVADGGLQADPGEGEQQCGEASSPEQVPVRAEEARDSDTEGDLVLGSPGPASAGGSAEALLSDLHAFAGSAAWDDSARAAGGQGLHVTAL

SEQ ID NO: 761770 - protein, 232 aa, Homo sapiens
QAGTGPGFYGVAELEVGARHGGACGPMALPCTLGLGMLLALPGALGSGGSAEDSVGSSSVTVVLLLLLLLLLATGLALAWRRLSRDSGGYYHPARLGAALWGRTRRLLWASPPGRWLQARAELGSTDNDLERQEDEQDTDYDHVADGGLQADPGEGEQQCGEASSPEQVPVRAEEARDSDTEGDLVLGSPGPASAGGSAEALLSDLHAFAGSAAWDDSARAAGGQGLHVTAL

SEQ ID NO: 761771 - protein, 206 aa, Homo sapiens; identical to SEQ ID NO: 761769

SEQ ID NO: 761772 - protein, 227 aa, Homo sapiens
SNSRGYVRGLGGSRAGGGCPARRGLRTNGLGMLLALPGALGSGGSAEDSVGSSSVTVVLLLLLLLLLATGLALAWRRLSRDSGGYYHPARLGAALWGRTRRLLWASPPGRWLQARAELGSTDNDLERQEDEQDTDYDHVADGGLQADPGEGEQQCGEASSPEQVPVRAEEARDSDTEGDLVLGSPGPASAGGSAEALLSDLHAFAGSAAWDDSARAAGGQGLHVTAL

SEQ ID NO: 761773 - protein, 206 aa, Homo sapiens; identical to SEQ ID NO: 761769

SEQ ID NO: 761774 - protein, 238 aa, Homo sapiens
  misc_feature (116)..(116): Xaa can be any naturally occurring amino acid
  misc_feature (132)..(132): Xaa can be any naturally occurring amino acid
  misc_feature (145)..(145): Xaa can be any naturally occurring amino acid
MALPCTLGLGMLLALPGALGSGGSAEDSVGSSSVTVVLLLLLLLLLATGLALAWRRLSRDSGGTSQSNPVTQSYVLPAAVLVGLHRWALCLWGQTPPGVRLVLQVSLKGRELVCVXQEQFDPVDGVSQGRDXMPGEHQDLIEPAXCEIVLDACRARPVGERGEQQCGEASSPEQVPVRAEEARDSDTEGDLVLGSPGPASAGGSAEALLSDLHAFAGSAAWDDSARAAGGQGLHVTAL

SEQ ID NO: 761775 - protein, 303 aa, Homo sapiens
  misc_feature (261)..(261): Xaa can be any naturally occurring amino acid
GAGDVCAAGPMALPCTLGLGMLLALPGALGSGGSAEDSVGSSSVTVVLLLLLLLLLATGLALAWRRLSRDSGGYYHPARLGAALWGRTRRPWLLGAPGPPPQGGSGLGFGKGAPPGSAVEGFGGGFPAKNTNLTPFERPNQGGGGVDDSEARGTFIRHNLSGGICVGTFANGRLNPLCGGNRGRKGQRGHNRFLFLGGGSSGEGGGAVFPPESAPPPKSVDVRPECGGFFPPPAVWFLRARGGGLLLGDGGELGPHGNRHXMCKTQPGTGGGDTLAFPPAAPPAMVNPRGGNGRQGWGAKGWL

SEQ ID NO: 761776 - protein, 206 aa, Homo sapiens; identical to SEQ ID NO: 761769

SEQ ID NO: 761777 - protein, 206 aa, Homo sapiens; identical to SEQ ID NO: 761769

SEQ ID NO: 761778 - protein, 206 aa, Homo sapiens; identical to SEQ ID NO: 761769

SEQ ID NO: 761779 - protein, 216 aa, Homo sapiens
GAGDVCAAGPMALPCTLGLGMLLALPGALGSGGSAEDSVGSSSVTVVLLLLLLLLLATGLALAWRRLSRDSGGYYHPARLGAALWGRTRRLLWASPPGRWLQARAELGSTDNDLERQEDEQDTDYDHVADGGLQADPGEGEQQCGEASSPEQVPVRAEEARDSDTEGDLVLGSPGPASAGGSAEALLSDLHAFAGSAAWDDSARAAGGQGLHVTAL

SEQ ID NO: 761780 - protein, 86 aa, Homo sapiens
SNSRGYVRGLGGSRAGGGCPARRGLRTNGSALHLRARDAAGPARGLGLGWQRGGQRGLQLCHRCPAAAAAPTAGHWPSTGLAPPQP

SEQ ID NO: 761781 - protein, 137 aa, Homo sapiens [sequence omitted]

SEQ ID NO: 761782 - protein, 954 aa, Homo sapiens
MSLPLTEEQRKKIEENRQKALARRAEKLLAEQHQRTSSGTSIAGNPFQAKQGPSQNFPRESCKPVSHGVIFKQQNLSSSSNADQRPHDSHSFQAKGIWKKPEEMPTACPGHSPRSQMALTGISPPLAQSPPEVPKQQLLSYELGQGHAQASPEIRFTPFANPTHKPLAKPKSSQETPAHSSGQPPRDAKLEAKTAKASPSGQNISYIHSSSESVTPRTEGRLQQKSGSSVQKGVNSQKGKCVRNGDRFQVLIGYNAELIAVFKTLPSKNYDPDTKTWNFSMNDYSALMKAAQSLPTVNLQPLEWAYGSSESPSTSSEGQAGLPSAPSLSFVKGRCMLISRAYFEADISYSQDLIALFKQMDSRRYDVKTRKWSFLLEEHSKLIAKVRCLPQVQLDPLPTTLTLAFASQLKKTSLSLTPDVPEADLSEVDPKLVSNLMPFQRAGVNFAIAKGGRLLLADDMGLGKTIQAICIAAFYRKEWPLLVVVPSSVRFTWEQAFLRWLPSLSPDCINVVVTGKDRLTAGLINIVSFDLLSKLEKQLKTPFKVVIIDESHFLKNSRTARCRAAMPVLKVAKRVILLSGTPAMSRPAELYTQIIAVKPTFFPQFHAFGLRYCDAKRMPWGWDYSGSSNLGELKLLLEEAVMLRRLKSDVLSQLPAKQRKIVVIAPGRINARTRAALDAAAKEMTTKDKTKQQQKDALILFFNRTAEAKIPSVIEYILDLLESGREKFLVFAHHKVVLDAITQELERKHVQHIRIDGSTSSAEREDLCQQFQLSERHAVAVLSITAANMGLTFSSADLVVFAELFWNPGVLIQAEDRVHRIGQTSSVGIHYLVAKGTADDYLWPLIQEKIKVLAEAGLSETNFSEMTESTDYLYKDPKQQKIYDLFQKSFEKEGSDMELLEAAESFDPGSASGTSGSSSQNMGDTLDESSLTASPQKKRRFEFFDNWDSFTSPL

SEQ ID NO: 761783 - protein, 937 aa, Homo sapiens [sequence omitted]

SEQ ID NO: 761784 - protein, 709 aa, Homo sapiens
MSLPLTEEQRKKIEENRQKALARRAEKLLAEQHQRTSSGTSIAGNPFQAKQGPSQNFPRESCKPVSHGVIFKQQNLSSSSNADQRPHDSHSFQAKGIWKKPEEMPTACPGHSPRSQMALTGISPPLAQSPPEVPKQQLLSYELGQGHAQASPEIRFTPFANPTHKPLAKPKSSQETPAHSSGQPPRDAKLEAKTAKASPSGQNISYIHSSSESVTPRTEGRLQQKSGSSVQKGVNSQKGKCVRNGDRFQVLIGYNAELIAVFKTLPSKNYDPDTKTWNFSMNDYSALMKAAQSLPTVNLQPLEWAYGSSESPSTSSEGQAGLPSAPSLSFVKGRCMLISRAYFEADISYSQDLIALFKQMDSRRYDVKTRKWSFLLEEHSKLIAKVRCLPQVQLDPLPTTLTLAFASQLKKTSLSLTPDVPEADLSEVDPKLVSNLMPFQRAGVNFAIAKGGRLLLADDMGLGKTIQAICIAAFYRKEWPLLVVVPSSVRFTWEQAFLRWLPSLSPDCINVVVTGKDRLTAGLINIVSFDLLSKLEKQLKTPFKVVIIDESHFLKNSRTARCRAAMPVLKVAKRVILLSGTPAMSRPAELYTQIIAVKPTFFPQFHAFGLRYCDAKRMPWGWDYSGSSNLGELKLLLEEAVMLRRLKSDVLSQLPAKQRKIVVIAPGRINARTRAALDAAAKEMTTKDKTVSPGLETDLEADMSRCSFP

SEQ ID NO: 761785 - protein, 954 aa, Homo sapiens; identical to SEQ ID NO: 761782

SEQ ID NO: 761786 - protein, 954 aa, Homo sapiens; identical to SEQ ID NO: 761782

SEQ ID NO: 761787 - protein, 752 aa, Homo sapiens [sequence omitted]

SEQ ID NO: 761788 - protein, 1375 aa, Homo sapiens
PEHKEINHLNDQWLDLCRQSNNLCLQREEDLQRTRDYHDCMNVVEVFLEKFTTEWDNLARSDAESTAVHLEALKKLALALQERKYAIEDLKDQKQKMIEHLNLDDKELVKEQTSHLEQRWFQLEDLIKRKIQVSVTNLEELNVVQSRFQELMEWAEEQQPNIAEALKQSPPPDMAQNLLMDHLAICSELEAKQMLLKSLIKDADRVMADLGLNERQVIQKALSDAQSHVNCLSDLVGQRRKYLNKALSEKTQFLMAVFQATSQIQQHERKIMFREHICLLPDDVSKQVKTCKSAQASLKTYQNEVTGLWAQGRELMKEVTEQEKSEVLGKLQELQSVYDSVLQKCSHRLQELEKNLVSRKHFKEDFDKACHWLKQADIVTFPEINLMNESSELHTQLAKYQNILEQSPEYENLLLTLQRTGQTILPSLNEVDHSYLSEKLNALPRQFNVIVALAKDKFYKVQEAILARKEYASLIELTTQSLSELEAQFLRMSKVPTDLAVEEALSLQDGCRAILDEVAGLGEAVDELNQKKEGFRSTGQPWQPDKMLHLVTLYHRLKRQTEQRVSLLEDTTSAYQEHEKMCQQLERQLKSVKEEQSKVNEETLPAEEKLKMYHSLAGSLQDSGIVLKRVTIHLEDLAPHLDPLAYEKARHQIQSWQGELKLLTSAIGETVTECESRMVQSIDFQTEMSRSLDWLRRVKAELSGPVYLDLNLQDIQEEIRKIQIHQEEVQSSLRIMNALSHKEKEKFTKAKELISADLEHSLAELSELDGDIQEALRTRQATLTEIYSQCQRYYQVFQAANDWLEDAQEMLQLAGNGLDVESAEENLKSHMEFFSTEDQFHSNLEELHSLVATLDPLIKPTGKEDLEQKVASLELRSQRMSRDSGAQVDLLQRCTAQWHDYQKAREEVIELMNDTEKKLSEFSLLKTSSSHEAEEKLSEHKALVSVVNSFHEKIVALEEKASQLEKTGNDASKATLSRSMTTVWQRWTRLRAVAQDQEKILEDAVDEWTGFNNKVKKATEMIDQLQDKLPGSSAEKASKAELLTLLEYHDTFVLELEQQQSALGMLRQQTLSMLQDGAAPTPGEEPPLMQEITAMQDRCLNMQEKVKTNGKLVKQELKDREMVETQINSVKCWVQETKEYLGNPTIEIDAQLEELQILLTEATNHRQNIEKMAEEQKEKYLGLYTILPSELSLQLAEVALDLKIRDQIQDKIKEVEQSKATSQELSRQIQKLAKDLTTILTKLKAKTDNVVQAKTDQKVLGEELDGCNSKLMELDAAVQKFLEQNGQLGKPLAKKIGKLTELHQQTIRQAENRLSKLNQAASHLEEYNEMLELILKWIEKAKVLAHGTIAWNSASQLREQYILHQVTLGKIIFKK

SEQ ID NO: 761789 - protein, 1042 aa, Homo sapiens
PEHKEINHLNDQWLDLCRQSNNLCLQREEDLQRTRDYHDCMNVVEVFLEKFTTEWDNLARSDAESTAVHLEALKKLALALQERKYAIEDLKDQKQKMIEHLNLDDKELVKEQTSHLEQRWFQLEDLIKRKIQVSVTNLEELNVVQSRFQELMEWAEEQQPNIAEALKQSPPPDMAQNLLMDHLAICSELEAKQMLLKSLIKDADRVMADLGLNERQVIQKALSDAQSHVNCLSDLVGQRRKYLNKALSEKTQFLMAVFQATSQIQQHERKIMFREHICLLPDDVSKQVKTCKSAQASLKTYQNEVTGLWAQGRELMKEVTEQEKSEVLGKLQELQSVYDSVLQKCSHRLQELEKNLVSRKHFKEDFDKACHWLKQADIVTFPEINLMNESSELHTQLAKYQNILEQSPEYENLLLTLQRTGQTILPSLNEVDHSYLSEKLNALPRQFNVIVALAKDKFYKVQEAILARKEYASLIELTTQSLSELEAQFLRMSKVPTDLAVEEALSLQDGCRAILDEVAGLGEAVDELNQKKEGFRSTGQPWQPDKMLHLVTLYHRLKRQTEQRVSLLEDTTSAYQEHEKMCQQLERQLKSVKEEQSKVNEETLPAEEKLKMYHSLAGSLQDSGIVLKRVTIHLEDLAPHLDPLAYEKARHQIQSWQGELKLLTSAIGETVTECESRMVQSIDFQTEMSRSLDWLRRVKAELSGPVYLDLNLQDIQEEIRKIQIHQEEVQSSLRIMNALSHKEKEKFTKAKELISADLEHSLAELSELDGDIQEALRTRQATLTEIYSQCQRYYQVFQAANDWLEDAQEMLQLAGNGLDVESAEENLKSHMEFFSTEDQFHSNLEELHSLVATLDPLIKPTGKEDLEQKVASLELRSQRMSRDSGAQVDLLQRCTAQWHDYQKAREEVIELMNDTEKKLSEFSLLKTSSSHEAEEKLSEHKALVSVVNSFHEKIVALEEKASQLEKTGNDASKATLSRSMTTVWQRWTRLRAVAQDQEKILEDAVDEWTGFNNKVKKATEIVLENQQQNTDKVHKYRLDILG

SEQ ID NO: 761790 - protein, 77 aa, Homo sapiens
FRISAPMLGMVWLHQHPCETLRDTRSLQARIRFCIFTGLSDSHLLEQEKQCPKKFRQFTHQNSRELLEVGNEHLGRG

SEQ ID NO: 761791 - protein, 81 aa, Homo sapiens
ASKTVRLQQHGDRVQKEVAEALEERHSVIQGHPDACAAVLSKSTGRCSFVSTPDKTHGDCCQCCVCYNTRDPHMAVLDSNQ

SEQ ID NO: 761792 - protein, 450 aa, Homo sapiens
MRECISIHVGQAGVQIGNACWELYCLEHGIQPDGQMPSDKTIGGGDDSFNTFFSETGAGKHVPRAVFVDLEPTVVDEVRTGTYRQLFHPEQLITGKEDAANNYARGHYTIGKEIVDLVLDRIRKLADLCTGLQGFLIFHSFGGGTGSGFASLLMERLSVDYGKKSKLEFAIYPAPQVSTAVVEPYNSILTTHTTLEHSDCAFMVDNEAIYDICRRNLDIERPTYTNLNRLIGQIVSSITASLRFDGALNVDLTEFQTNLVPYPRIHFPLATYAPVISAEKAYHEQLSVAEITNACFEPANQMVKCDPRHGKYMACCMLYRGDVVPKDVNAAIATIKTKRTIQFVDWCPTGFKVGINYQPPTVVPGGDLAKVQRAVCMLSNTTAIAEAWARLDHKFDLMYAKRAFVHWYVGEGMEEGEFSEAREDLAALEKDYEEVGVDSVEAEAEEGEEY

SEQ ID NO: 761793 - protein, 393 aa, Homo sapiens
CILLCWCTRVLTCILGIEDEVRTGTYRQLFHPEQLITGKEDAANNYARGHYTIGKEIVDLVLDRIRKLADLCTGLQGFLIFHSFGGGTGSGFASLLMERLSVDYGKKSKLEFAIYPAPQVSTAVVEPYNSILTTHTTLEHSDCAFMVDNEAIYDICRRNLDIERPTYTNLNRLIGQIVSSITASLRFDGALNVDLTEFQTNLVPYPRIHFPLATYAPVISAEKAYHEQLSVAEITNACFEPANQMVKCDPRHGKYMACCMLYRGDVVPKDVNAAIATIKTKRTIQFVDWCPTGFKVGINYQPPTVVPGGDLAKVQRAVCMLSNTTAIAEAWARLDHKFDLMYAKRAFVHWYVGEGMEEGEFSEAREDLAALEKDYEEVGVDSVEAEAEEGEEY

SEQ ID NO: 761794 - protein, 286 aa, Homo sapiens
MRECISIHVGQAGVQIGNACWELYCLEHGIQPDGQMPSDKTIGGGDDSFNTFFSETGAGKHVPRAVFVDLEPTVVDEVRTGTYRQLFHPEQLITGKEDAANNYARGHYTIGKEIVDLVLDRIRKLADLCTGLQGFLIFHSFGGGTGSGFASLLMERLSVDYGKKSKLEFAIYPAPQVSTAVVEPYNSILTTHTTLEHSDCAFMVDNEAIYDICRRNLDIERPTYTNLNRLIGQIVSSITASLRFDGALNVDLTEFQTNLVPYPLPPPGWLLPSCLQLKVLYKTKKT

SEQ ID NO: 761795 - protein, 290 aa, Homo sapiens
MRECISIHVGQAGVQIGNACWELYCLEHGIQPDGQMPSDKTIGGGDDSFNTFFSETGAGKHVPRAVFVDLEPTVVDEVRTGTYRQLFHPEQLITGKEDAANNYARGHYTIGKEIVDLVLDRIRKLADLCTGLQGFLIFHSFGGGTGSGFASLLMERLSVDYGKKSKLEFAIYPAPQVSTAVVEPYNSILTTHTTLEHSDCAFMVDNEAIYDICRRNLDIERPTYTNLNRLIGQIVSSITASLRFDGALNVDLTEFQTNLVPYPRIHFPLATYAPVISAEKAYHEHSREGL

SEQ ID NO: 761796 - protein, 467 aa, Homo sapiens
MSSPNIWSTGSSVYSTPVFSQKMTVWILLLLSLYPGFTSQKSDDDYEDYASNKTWVLTPKVPEGDVTVILNNLLEGYDNKLRPDIGVKPTLIHTDMYVNSIGPVNAINMEYTIDIFFAQTWYDRRLKFNSTIKVLRLNSNMVGKIWIPDTFFRNSKKADAHWITTPNRMLRIWNDGRVLYTLRLTIDAECQLQLHNFPMDEHSCPLEFSSYGYPREEIVYQWKRSSVEVGDTRSWRLYQFSFVGLRNTTEVVKTTSGDYVVMSVYFDLSRRMGYFTIQTYIPCTLIVVLSWVSFWINKDAVPARTSLGITTVLTMTTLSTIARKSLPKVSYVTAMDLFVSVCFIFVFSALVEYGTLHYFVSNRKPSKDKDKKKKNPAPTIDIRPRSATIQMNNATHLQERDEEYGYECLDGKDCASFFCCFEDCRTGAWRHGRIHIRIAKMDSYARIFFPTAFCLFNLVYWVSYLYL

SEQ ID NO: 761797 - protein, 327 aa, Homo sapiens
MVGKIWIPDTFFRNSKKADAHWITTPNRMLRIWNDGRVLYTLRLTIDAECQLQLHNFPMDEHSCPLEFSSYGYPREEIVYQWKRSSVEVGDTRSWRLYQFSFVGLRNTTEVVKTTSGDYVVMSVYFDLSRRMGYFTIQTYIPCTLIVVLSWVSFWINKDAVPARTSLGITTVLTMTTLSTIARKSLPKVSYVTAMDLFVSVCFIFVFSALVEYGTLHYFVSNRKPSKDKDKKKKNPAPTIDIRPRSATIQMNNATHLQERDEEYGYECLDGKDCASFFCCFEDCRTGAWRHGRIHIRIAKMDSYARIFFPTAFCLFNLVYWVSYLYL

SEQ ID NO: 761798 - protein, 467 aa, Homo sapiens; identical to SEQ ID NO: 761796

SEQ ID NO: 761799 - protein, 372 aa, Homo sapiens
MYVNSIGPVNAINMEYTIDIFFAQTWYDRRLKFNSTIKVLRLNSNMVGKIWIPDTFFRNSKKADAHWITTPNRMLRIWNDGRVLYTLRLTIDAECQLQLHNFPMDEHSCPLEFSSYGYPREEIVYQWKRSSVEVGDTRSWRLYQFSFVGLRNTTEVVKTTSGDYVVMSVYFDLSRRMGYFTIQTYIPCTLIVVLSWVSFWINKDAVPARTSLGITTVLTMTTLSTIARKSLPKVSYVTAMDLFVSVCFIFVFSALVEYGTLHYFVSNRKPSKDKDKKKKNPAPTIDIRPRSATIQMNNATHLQERDEEYGYECLDGKDCASFFCCFEDCRTGAWRHGRIHIRIAKMDSYARIFFPTAFCLFNLVYWVSYLYL

SEQ ID NO: 761800 - protein, 350 aa, Homo sapiens
MLGSVKMEAHDLAEWSYYPEAGEVYSPVTPVPTMAPLNSYMTLNPLSSPYPPGGLPASPLPSGPLAPPAPAAPLGPTFPGLGVSGGSSSSGYGAPGPGLVHGKEMPKGYRRPLAHAKPPYSYISLITMAIQQAPGKMLTLSEIYQWIMDLFPYYRENQQRWQNSIRHSLSFNDCFVKVARSPDKPGKGSYWALHPSSGNMFENGCYLRRQKRFKLEEKVKKGGSGAATTTRNGTGSAASTTTPAATVTSPPQPPPPAPEPEAQGGEDVGALDCGSPASSTPYFTGLELPGELKLDAPYNFNHPFSINNLMSEQTPAPPKLDVGFGGYGAEGGEPGVYYQGLYSRSLLNAS

SEQ ID NO: 761801 - protein, 350 aa, Homo sapiens; identical to SEQ ID NO: 761800

SEQ ID NO: 761802 - protein, 232 aa, Homo sapiens [sequence omitted]

SEQ ID NO: 761803 - protein, 496 aa, Homo sapiens
MFRSKRSGLVRRLWRSRVVPDREEGGSGGGGGGDEDGSLGSRAEPAPRAREGGGCGRSEVRPVAPRRPRDAVGQRGAQGAGRRRRAGGPPRPMSEPGAGAGSSLLDVAEPGGPGWLPESDCETVTCCLFSERDAAGAPRDASDPLAGAALEPAGGGRSREARSRLLLLEQELKTVTYSLLKRLKERSLDTLLEAVESRGGVPGGCVLVPRADLRLGGQPAPPQLLLGRLFRWPDLQHAVELKPLCGCHSFAAAADGPTVCCNPYHFSRLCGPESPPPPYSRLSPRDEYKPLDLSDSTLSYTETEATNSLITAPGEFSDASMSPDATKPSHWCSVAYWEHRTRVGRLYAVYDQAVSIFYDLPQGSGFCLGQLNLEQRSESVRRTRSKIGFGILLSKEPDGVWAYNRGEHPIFVNSPTLDAPGGRALVVRKVPPGYSIKVFDFERSGLQHAPEPDAADGPYDPNSVRISFAKGWGPCYSRQFITSCPCWLEILLNNPR

SEQ ID NO: 761804 - protein, 176 aa, Homo sapiens [sequence omitted]

SEQ ID NO: 761805 - protein, 496 aa, Homo sapiens; identical to SEQ ID NO: 761803

SEQ ID NO: 761806 - protein, 539 aa, Homo sapiens
MFRSKRSGLVRRLWRSRVVPDREEGGSGGGGGGDEDGSLGSRAEPAPRAREGGGCGRSEVRPVAPRRPRDAVGQRGAQGAGRRRRAGGPPRPMSEPGAGAGSSLLDVAEPGGPGWLPESDCETVTCCLFSERDAAGAPRDASDPLAGAALEPAGGGRSREARSRLLLLEQELKTVTYSLLKRLKERSLDTLLEAVESRGGVPGGCVLVPRADLRLGGQPAPPQLLLGRLFRWPDLQHAVELKPLCGCHSFAAAADGPTVCCNPYHFSRLCGPESPPPPYSRLSPRDEYKPLDLSDSTLSYTETEATNSLITAPGEFSADAGIGSRGNRGLESSVPCSEKLVIGTPTSGGIPESNFPGEMRDASMSPDATKPSHWCSVAYWEHRTRVGRLYAVYDQAVSIFYDLPQGSGFCLGQLNLEQRSESVRRTRSKIGFGILLSKEPDGVWAYNRGEHPIFVNSPTLDAPGGRALVVRKVPPGYSIKVFDFERSGLQHAPEPDAADGPYDPNSVRISFAKGWGPCYSRQFITSCPCWLEILLNNPR

SEQ ID NO: 761807 - protein, 93 aa, Homo sapiens
MSPDATKPSHWCSVAYWEHRTRVGRLYAVYDQAVSIFYDLPQGSGFCLGQLNLEQRSESVRRTRSKIGFGILLSKEPDGVWAYNRGEHPIFVN

SEQ ID NO: 761808 - protein, 680 aa, Homo sapiens
LPSPSAALAAAVRWLQEAAAPPLLLSGTQRGAPLAGRRHPLSLQPAVRCTAWGPGAPASAHEGAPRPPLLPARGGAALGGGGGGLPPLREAGGPGRLREGTMEVNAGGVIAYISSSSSASSPASCHSEGSENSFQSSSSSVPSSPNSSNSDTNGNPKNGDLANIEGILKNDRIDCSMKTSKSSAPGMTKSHSGVTKFSGMVLLCKVCGDVASGFHYGVHACEGCKGFFRRSIQQNIQYKKCLKNENCSIMRMNRNRCQQCRFKKCLSVGMSRDAVRFGRIPKREKQRMLIEMQSAMKTMMNSQFSGHLQNDTLVEHHEQTALPAQEQLRPKPQLEQENIKSSSPPSSDFAKEEVIGMVTRAHKDTFMYNQEQQENSAESMQPQRGERIPKNMEQYNLNHDHCGNGLSSHFPCSESQQHLNGQFKGRNIMHYPNGHAICIANGHCMNFSNAYTQRVCDRVPIDGFSQNENKNSYLCNTGGRMHLVCPMSKSPYVDPHKSGHEIWEEFSMSFTPAVKEVVEFAKRIPGFRDLSQHDQVNLLKAGTFEVLMVRFASLFDAKERTVTFLSGKKYSVDDLHSMGAGDLLNSMFEFSEKLNALQLSDEEMSLFTAVVLVSADRSGIENVNSVEALQETLIRALRTLIMKNHPNEASIFTKLLLKLPDLRSLNNMHSEELLAFKVHP

SEQ ID NO: 761809 - protein, 230 aa, Homo sapiens
MGGLIKPGGGALNRGGGTTTPVGHLWGRRGTPYTRGGGRNNGGATTTPESYVRRVRGINTQTSGVELVGGSPQARIFAKQKRSWATRAYRIDDLSFAGLRELLRRTKSQKRPRDNEASQDEHEGTTDGKTTRREGNKAKETHPQEASKPPHTEDKARNDELKESDKDRRRIDTKTRGHKAAHKAGEQHTTTRTTNNDDSTSRDPRQTRDQEQTAESTKARRRTHTVTEQA

SEQ ID NO: 761810 - protein, 680 aa, Homo sapiens; identical to SEQ ID NO: 761808

SEQ ID NO: 761811 - protein, 207 aa, Homo sapiens
SGVQSSSAVRLRLLWLPTLHWVERQTGATFRDRVETDSEEDRTHLHAFMSAAIPPPQASAKPFLGPWRQPCVLTARRGGAGTLCAFYTTAGTEVPRSPEPEPGVGRARRTGFLADSHGLTQPPGPMAAPALALVSFEDVVVTFTGEEWGHLDLAQRTLYQEVMLETCRLLVSLGHPVPKPELIYLLEHGQELWTVKRGLSQSTCAGW

SEQ ID NO: 761812 - protein, 133 aa, Homo sapiens
MGAPGPGPEDPVPGGDAGDLQAPGLTGASCSQTRADLSTGTWTGTVDSEERPLPKHLRSFLLTSVEELSSWPWLISPAESRLHFLPSQVYYHLLLICNNITTNPAAENITYLLSPTYGLGVQAQLSWVLSGVS

SEQ ID NO: 761813 - protein, 92 aa, Homo sapiens
SGVQSSSAVRLRLLWLPTLHWVERQTGATFRDRVETDSEEDRTHLHAFMSAAIPPPQASAKPFLGPWRQPCVLTARRGGAANLVCILHDGGD

SEQ ID NO: 761814 - protein, 114 aa, Homo sapiens
VCNPLRYNIIMNSSTFIWVIIVSWVLGFLSEIWPVYATFQLTFCKSSVLDHFYCDRGQLLKVSCEDTLFREFILFLMAVFIIIGSLIPTIVSYTYIISTNLKIPSASGWRKSFS

SEQ ID NO: 761815 - protein, 275 aa, Homo sapiens
NVQGLSAEEIRNGNLKAILGLFFSLSRYKQQQHHQQQYYQSLVELQQRVTHASPPSEASQAKTQQDMQSRLPGPSRVPAAGSSSKVQGASNLNRRSQSFNSIDKNKPPNYANGNEKDSSKGPQSSSGVNGNVQPPSTAGQPPASAIPSPSASKPWRSKSMNVKHSATSTMLTVKQSSTATSPTPSSDRLKPPVSEGVKTAPSGQKSMLEKFKLVNARTALRPPQPPSSGPSDGGKDDDAFSESGEMEGFNSGLNSGGSTNSSPKVSPKLAPPKAG

SEQ ID NO: 761816 - protein, 211 aa, Homo sapiens
NVQGLSAEEIRNGNLKAILGLFFSLSRYKQQQHHQQQYYQSLVELQQRVTHASPPSEASQAKTQQDMQSRLPGPSRVPAAGSSSKVQGASNLNRRSQSFNSIDKNKPPNYANGNEKDSSKGPQSSSGVNGNVQPPSTAGQPPASAIPSPSASKPWRSKSMNVKHSATSTMLTVKQSSTATSPTPSSDRLKPPVSEGCPDCFTPPAASQFRT

SEQ ID NO: 761817 - protein, 258 aa, Homo sapiens
NVQGLSAEEIRNGNLKAILGLFFSLSRYKQQQHHQQQYYQSLVELQQRVTHASPPSEASQAKTQQDMQSRLPGPSRVPAAGSSSKVQGASNLNRRSQSFNSIDKNKPPNYANGNEKAPSTAGQPPASAIPSPSASKPWRSKSMNVKHSATSTMLTVKQSSTATSPTPSSDRLKPPVSEGVKTAPSGQKSMLEKFKLVNARTALRPPQPPSSGPSDGGKDDDAFSESGEMEGFNSGLNSGGSTNSSPKVSPKLAPPKAG

SEQ ID NO: 761818 - protein, 37 aa, Homo sapiens
LASGYSEVLVQFWQPELFLLQGEIREYSSFQGERLTC

SEQ ID NO: 761819 - protein, 325 aa, Homo sapiens
MDGSNVTSFVVEEPTNISTGRNASVGNAHRQIPIVHWVIMSISPVGFVENGILLWFLCFRMRRNPFTVYITHLSIADISLLFCIFILSIDYALDYELSSGHYYTIVTLSVTFLFGYNTGLYLLTAISVERCLSVLYPIWYRCHRPKYQSALVCALLWALSCLVTTMEYVMCIDREEESHSRNDCRAVIIFIAILSFLVFTPLMLVSSTILVVKIRKNTWASHSSKLYIVIMVTIIIFLIFAMPMRLLYLLYYEYWSTFGNLHHISLLFSTINSSANPFIYFFVGSSKKKRFKESLKVVLTRAFKDEMQPRRQKDNCNTVTVETVV

SEQ ID NO: 761820 - protein, 1162 aa, Homo sapiens
MKPVKHLLTTSNKSANVPALTTKKGLHNLPLSPELKEKHNAKLIHDKIEPMVLRSPPTGESILRYALPIPSSKTKNLLPEDEMIGKIIKHLKMVVSTLEETYGHCDQNGEEPFVKHEHEELSLSVGDDMNSFLTYCSQFAAQLEEALKEEQNIWNLFLKWFQWQVNQMEEISKDQTLLQAEPPKPDKTVILNIAEIVRLVQRFEELKNRLKQRSKSSVKVMLSKTMDKENRPEAVKSCEALAQKIEEFLEAHSTDEFKDVSATEPQTAHSMTNRFNAMLKVFENQANMLERKLSLQIIEAKKAVKTVKKKDKGKSEDSEKKMSPEKEFKIKEDLDQVQKVARLEIENKVLQEQLKQALQEAEKAKHQLNYFLNQEKLLKSEGKTETTMQVGNSQTKVKGEDSKNIPLEKETRKSLVSDSGGQRTSDKIQEYPQLREETSSPAISDLSQILKSQDESAFLESSNEVSVAENQSYKSPSETHDKSLTTVSSSKEVQDSLSVGTLAQKNETVISPFILPPVLTESKKADVSEEQLQKMTEEQTYQAAEKSQAHNEVPNERLVVEHQESLSKTKLQVKKQETSTEQPLTTPDKEPNENLILRHQDSMSKSEMQVKEQRTLKGQRIITHDEEPGKNLVPEHQDSVSKLEMQIEKTKKLPREKRHSTHDEESGENPMLKHQDSVSKIQVQLEIQETSEGEGRSIPDKNSMFVHQDSVSKLQMQEKKKITPGRERRNTRIVVPNESVISVHQDSKSKLQMQEKKQINSGVERHKTFPLEIKKKDISLEHLLPEEKVLLSRSESQTKKLQAKVTSRKKTDIESLRGALGRRLLNDEFKTQSKSFPGPDIEQLTDAFGRDILKDEFKTRSKSLPETDERLHSTTERGTINDAIKTQLKRKSYPETVLKHLKGVNGKDIIKHLINIQSKSHAETDKNFFAYATGRGLMKESTTTQLKSHPETDKEFLADAIGRGIIIGPITTQLKSHRETDKELLKDAIGRDIIKGPISAQLKSHQETDVEPLTNAIGSSKTIGEIKTQLRTHYDVNLFKNKDMSVQRQEGIFTRSITPSKFPTKVINLSPFENKEETYEYSSPYVTAPSKAIYRTYRAGPSFSKDIHLPLLNQLPSGHSKVVTLSQKTIEFTLPTVTNTIGKPTYKVLHAAARKSVPHPYF

SEQ ID NO: 761821 - protein, 1162 aa, Homo sapiens
MKPVKHLLTTSNKSANVPALTTKKGLHNLPLSPELKEKHNAKLIHDKIEPMVLRSPPTGESILRYALPIPSSKTKNLLPEDEMIGKIIKHLKMVVSTLEETYGHCDQNGEEPFVKHEHEELSLSVGDDMNSFLTYCSQFAAQLEEALKEEQNIWNLFLKWFQWQVNQMEEISKDQTLLQAEPPKPDKTVILNIAEIVRLVQRFEELKNRLKQRSKSSVKVMLSKTMDKENRPEAVKSCEALAQKIEEFLEAHSTDEFKDVSATEPQTAHSMTNRFNAMLKVFENQANMLERKLSTTNNRTKKAVKTVKKKDKGKSEDSEKKMSPEKEFKIKEDLDQVQKVARLEIENKVLQEQLKQALQEAEKAKHQLNYFLNQEKLLKSEGKTETTMQVGNSQTKVKGEDSKNIPLEKETRKSLVSDSGGQRTSDKIQEYPQLREETIYPAISDLSQILKSQDESAFLESSNEVSVAENQSYKSPSETHDKSLTTVSSSKEVQDSLSVGTLAQKNETVISPFILPPVLTESKKADVSEEQLQKMTEEQTYQAAEKSQAHNEVPNERLVVEHQESLSKTKLQVKKQETSTEQPLTTPDKEPNENLILRHQDSMSKSEMQVKEQRTLKGQRIITHDEEPGKNLVPEHQDSVSKLEMQIEKTKKLPREKRHSTHDEESGENPMLKHQDSVSKIQVQLEIQETSEGEGRSIPDKNSMFVHQDSVSKLQMQEKKKITPGRERRNTRIVVPNESVISVHQDSKSKLQMQEKKQINSGVERHKTFPLEIKKKDISLEHLLPEEKVLLSRSESQTKKLQAKVTSRKKTDIESLRGALGRRLLNDEFKTQSKSFPGPDIEQLTDAFGRDILKDEFKTRSKSLPETDERLHSTTERGTINDAIKTQLKRKSYPETVLKHLKGVNGKDIIKHLINIQSKSHAETDKNFFAYATGRGLMKESTTTQLKSHPETDKEFLADAIGRGIIIGPITTQLKSHRETDKELLKDAIGRDIIKGPISAQLKSHQETDVEPLTNAIGSSKTIGEIKTQLRTHYDVNLFKNKDMSVQRQEGIFTRSITPSKFPTKVINLSPFENKEETYEYSSPYVTAPSKAIYRTYRAGPSFSKDIHLPLLNQLPSGHSKVVTLSQKTIEFTLPTVTNTIGKPTYKVLHAAARKSVPHPYF

SEQ ID NO: 761822 - protein, 310 aa, Homo sapiens
MKPVKHLLTTSNKSANVPALTTKKGLHNLPLSPELKEKHNAKLIHDKIEPMVLRSPPTGESILRYALPIPSSKTKNLLPEDEMIGKIIKHLKMVVSTLEETYGHCDQNGEEPFVKHEHEELSLSVGDDMNSFLTYCSQFAAQLEEALKEEQNIWNLFLKWFQWQVNQMEEISKDQTLLQAEPPKPDKTVILNIAEIVRLVQRFEELKNRLKQRSKSSVKVMLSKTMDKENRPEAVKSCEALAQKIEEFLEAHSTDEFKDVSATEPQTAHSMTNRFNAMLKVFENQANMLERNRHRGLQHLIHSTNGILKR

SEQ ID NO: 761823 - protein, 446 aa, Homo sapiens
MKPVKHLLTTSNKSANVPALTTKKGLHNLPLSPELKEKHNAKLIHDKIEPMVLRSPPTGESILRYALPIPSSKTKNLLPEDEMIGKIIKHLKMVVSTLEETYGHCDQNGEEPFVKHEHEELSLSVGDDMNSFLTYCSQFAAQLEEALKEEQNIWNLFLKWFQWQVNQMEEISKDQTLLQAEPPKPDKTVILNIAEIVRLVQRFEELKNRLKQRSKSSVKVMLSKTMDKENRPEAVKSCEALAQKIEEFLEAHSTDEFKDVSATEPQTAHSMTNRFNAMLKVFENQANMLERKLSLQIIEAKKAVKTVKKKDKGKSEDSEKKMSPEKEFKIKEDLDQVQKVARLEIENKVLQEQLKQALQEAEKAKHQLNYFLNQEKLLKSEGKTETTMQVGNSQTKVKGEDSKNIPLEKETRKSLVSDSGGQRTSDKIQEYPQITAQSGRLIEKRC

SEQ ID NO: 761824 - protein, 121 aa, Homo sapiens
MKPVKHLLTTSNKSANVPALTTKKGLHNLPLSPELKEKHNAKLIHDKIEPMVLRSPPTGESILRYALPIPSSKTKNLLPEDEMIGKIIKHLKMGLFPPLEGNLCGHWRFRMAEEPFGKHEP

SEQ ID NO: 761825 - protein, 1028 aa, Homo sapiens
QEEQNILESLFKWFQWQVNQMEEISGVQWQVNQMEEISKDQTLLQAEPPKPDKTVILNIAEIVRLVQRFEELKNRLKQRSKSSVKVMLSKTMDKENRPEAVKSCEALAQKIEEFLEAHSTDEFKDVSATEPQTAHSMTNRFNAMLKVFENQANMLERKLSTTNNRTKKAVKTVKKKDKGKSEDSEKKMSPEKEFKIKEDLDQVQKVARLEIENKVLQEQLKQALQEAEKAKHQLNYFLNQEKLLKSEGKTETTMQVGNSQTKVKGEDSKNIPLEKETRKSLVSDSGGQRTSDKIQEYPQLREETSSPAISDLSQILKSQDESAFLESSNEVSVAENQSYKSPSETHDKSLTTVSSSKEVQDSLSVGTLAQKNETVISPFILPPVLTESKKADVSEEQLQKMTEEQTYQAAEKSQAHNEVPNERLVVEHQESLSKTKLQVKKQETSTEQPLTTPDKEPNENLILRHQDSMSKSEMQVKEQRTLKGQRIITHDEEPGKNLVPEHQDSVSKLEMQIEKTKKLPREKRHSTHDEESGENPMLKHQDSVSKIQVQLEIQETSEGEGRSIPDKNSMFVHQDSVSKLQMQEKKKITPGRERRNTRIVVPNESVISVHQDSKSKLQMQEKKQINSGVERHKTFPLEIKKKDISLEHLLPEEKVLLSRSESQTKKLQAKVTSRKKTDIESLRGALGRRLLNDEFKTQSKSFPGPDIEQLTDAFGRDILKDEFKTRSKSLPETDERLHSTTERGTINDAIKTQLKRKSYPETVLKHLKGVNGKDIIKHLINIQSKSHAETDKNFFAYATGRGLMKESTTTQLKSHPETDKEFLADAIGRGIIIGPITTQLKSHRETDKELLKDAIGRDIIKGPISAQLKSHQETDVEPLTNAIGSSKTIGEIKTQLRTHYDVNLFKNKDMSVQRQEGIFTRSITPSKFPTKVINLSPFENKEETYEYSSPYVTAPSKAIYRTYRAGPSFSKDIHLPLLNQLPSGHSKVVTLSQKTIEFTLPTVTNTIGKPTYKVLHAAARKSVPHPYF

SEQ ID NO: 761826 - protein, 456 aa, Homo sapiens
MKPVKHLLTTSNKSANVPALTTKKGLHNLPLSPELKEKHNAKLIHDKIEPMVLRSPPTGESILRYALPIPSSKTKNLLPEDEMIGKIIKHLKMVVSTLEETYGHCDQNGEEPFVKHEHEELSLSVGDDMNSFLTYCSQFAAQLEEALKEEQNIWNLFLKWFQWQVNQMEEISKDQTLLQAEPPKPDKTVILNIAEIVRLVQRFEELKNRLKQRSKSSVKVMLSKTMDKENRPEAVKSCEALAQKIEEFLEAHSTDEFKDVSATEPQTAHSMTNRFNAMLKVFENQANMLERKLSLQIIEAKKAVKTVKKKDKGKSEDSEKKMSPEKEFKIKEDLDQVQKVARLEIENKVLQEQLKQALQEAEKAKHQLNYFLNQEKLLKSEGKTETTMQVGNSQTKVKGEDSKNIPLEKETRKSLVSDSGGQRTSDKIQEYPQMLIEFLKYFGKVSQTFREWMGAK

SEQ ID NO: 761827 - protein, 303 aa, Homo sapiens
MKPVKHLLTTSNKSANVPALTTKKGLHNLPLSPELKEKHNAKLIHDKIEPMVLRSPPTGESILRYALPIPSSKTKNLLPEDEMIGKIIKHLKMVVSTLEETYGHCDQNGEEPFVKHEHEELSLSVGDDMNSFLTYCSQFAAQLEEALKEEQNIWNLFLKWFQWQVNQMEEISKDQTLLQAEPPKPDKTVILNIAEIVRLVQRFEELKNRLKQRSKSSVKVMLSKTMDKENRPEAVKSCEALAQKIEEFLEAHSTDEFKDVSATEPQTAHSMTNRFNAMLKVFENQANMLERKLSLQIIEQRKL

SEQ ID NO: 761828 - protein, 47 aa, Homo sapiens
LQLAELEGEFLVNEFITRQRRRELSDRLNLSDQQVKIWFQNRRMKKK

SEQ ID NO: 761829 - protein, 73 aa, Homo sapiens
VFLGWIALFLENGNFFPSFWKKVRRENPEPESSPKGHRWRHQQDQQGPTLGTDPGTGAREPLSASSRETLTVE

SEQ ID NO: 761830 - protein, 111 aa, Homo sapiens
MPLSALPKDLCEARQKRLVRGPSELPVLFLLLLLTLYVSWLSKLTQLQMPLSHLKSMATISLAFSPPLASITFLEVISFTSVAFFVTSLQVLPELKRPCNCEEKNAAVSWN

SEQ ID NO: 761831 - protein, 118 aa, Homo sapiens [sequence omitted]

SEQ ID NO: 761832 - protein, 306 aa, Homo sapiens
LYSASVSLDTLDAPYEGIPYGISELRCFSPQKNLALGEDLSPGYGQDHDVGAFGTQATLFLEGGAGGRDLELASISQWSLHGTHHRTFFPRLFSLQAPVPPKIYLSMVYKLEGPTDVTVALELTTGDAGSCHIGGISVLNAETSSRHSLRPLRVPPTKLARWVGRCGRQLSGGWVQHCYEVSLRGCLLLDLLVCFSRPPGSREEENFTCRLGEIQVVDAASLLAPLPQVQAVTISHIRWQPSASEREGPPALLQLSCTLHWSFLLSQVRCFRIHCWGGMSDDSPGRELPRPEMPMFLGLAFATSTG

SEQ ID NO: 761833 - protein, 306 aa, Homo sapiens; identical to SEQ ID NO: 761832

SEQ ID NO: 761834 - protein, 355 aa, Homo sapiens
LYSASVSLDTLDAPYEGIPYGISELRCFSPQKNLALGEDLSPGYGQDHDVGAFGTQATLFLEGGAGGRDLELASISQWSLHGTHHRTFFPRLFSLQAPVPPKIYLSMVYKLEGPTDVTVALELTTGDAGSCHIGGISVLNAETSSRHSLRPLRVPPTKLARWVGRCGRQLSGGWVQHCYEVSLRGCLLLDLLVCFSRPPGSREEENFTCRLGEIQVMLPRGARAGLAVCPAGVGVEESGRGNVCVGAPSPRPGRPAVLSLLSCQVVDAASLLAPLPQVQAVTISHIRWQPSASEREGPPALLQLSCTLHWSFLLSQVRCFRIHCWGGMSDDSPGRELPRPEMPMFLGLAFATSTG

SEQ ID NO: 761835 - protein, 372 aa, Homo sapiens
LYSASVSLDTLDAPYEGIPYGISELRCFSPQKNLALGEDLSPGYGQDHDVGAFGTQATLFLEGGAGGRDLELASISQWSLHGTHHRTFFPRLFSLQAPVPPKIYLSMVYKLEGPTDVTVALELTTGDAGSCHIGGISVLNAETSSRHSLRPLRVPPTKLARWVGRCGRQLSGGWVQHCYEVSLRGCLLLDLLVCFSRPPGSREEENFTCRLGEIQVMLPRGARAGLAVCPAGVGVEAAPGRPLLGFSGELGWRSQGGEMCAWGHPLPAPGRPAVLSLLSCQVVDAASLLAPLPQVQAVTISHIRWQPSASEREGPPALLQLSCTLHWSFLLSQVRCFRIHCWGGMSDDSPGRELPRPEMPMFLGLAFATSTG

SEQ ID NO: 761836 - protein, 129 aa, Homo sapiens
METGNQAVGSQRWSLRGEWRAFCFCLVPPHGTWFPGENERRGEVENRTFHKGYFLIGCKMLMPRMMIFFPADETIRKGLRLWQVGFGAGAETFLSMRTSYSSSWGGAACGMAGEDALENRPPSVEGPFP

SEQ ID NO: 761837 - protein, 527 aa, Homo sapiens
SVMEAAAVTVTRSATRRRRRQLQGLAAPEAGTQEEQEDQEPRPRRRRPGRSIKDEEEETVFREVVSFSPDPLPVRYYDKDTTKPISFYLSSLEELLAWKPRLEDGFNVALEPLACRQPPLSSQRPRTLLCHDMMGGYLDDRFIQGSVVQTPYAFYHWQCIDVFVYFSHHTVTIPPVGWTNTAHRHGVCVLGTFITEWNEGGRLCEAFLAGDERSYQAVADRLVQITQFFRFDGWLINIENSLSLAAVGNMPPFLRYLTTQLHRQVPGGLVLWYDSVVQSGQLKWQDELNQHNRVFFDSCDGFFTNYNWREEHLERMLGQAGERRADVYVGVDVFARGNVVGGRFDTDKSLELIRKHGFSVALFAPGWVYECLEKKDFFQNQDKFWGRLERYLPTHSICSLPFVTSFCLGMGARRVCYGQEEAVGPWYHLSAQEIQPLFGEHRLGGDGRGWVRTHCCLEDAWHGGSSLLVRGVIPPEVGNVAVRWVSDGGRWAHQLLPSHVVAMELDRWGSGGQNKDRGQTQMGFLKL

SEQ ID NO: 761838 - protein, 35 aa, Homo sapiens
MRKIPAAVLMPGSVDAGWWKGWPSVGVTLELSLWG

SEQ ID NO: 761839 - protein, 379 aa, Homo sapiens
SVMEAAAVTVTRSATRRRRRQLQGLAAPEAGTQEEQEDQEPRPRRRRPGRSIKDEEEETVFREVVSFSPDPLPVRYYDKDTTKPISFYLSSLEELLAWKPRLEDGFNVALEPLACRQPPLSSQRPRTLLCHDMMGGYLDDRFIQGSVVQTPYAFYHWQCIDVFVYFSHHTVTIPPVGWTNTAHRHGVCVLGTFITEWNEGGRLCEAFLAGDERSYQAVADRLVQITQFFRFDGWLINIENSLSLAAVGNMPPFLRYLTTQLHRQVPGGLVLWYDSVVQSGQLKWQDELNQHNRVFFDSCDGFFTNYNWREEHLERMLGQAGERRADVYVGVDVFARGNVVGGRFDTDKSLELIRKHGFSVALFAPGCSVFPGVGNLLCC

SEQ ID NO: 761840 - protein, 131 aa, Homo sapiens
SNSQSSCEWRWSLMVVLIVDVSWLTLHKTNWREEHLERMLGQAGERRADVYVGVDVFARGNVVGGRFDTDKVGGGFRPRASGPVPPLGPHFLMDLPFPSAPQRNDSSCSSQSGDPVALRNRCPAPAKLCPH

SEQ ID NO: 761841 - protein, 484 aa, Homo sapiens
SVMEAAAVTVTRSATRRRRRQLQGLAAPEAGTQEEQEDQEPRPRRRRPGRSIKDEEEETVFREVVSFSPDPLPVRYYDKDTTKPISFYLSSLEELLAWKPRLEDGFNVALEPLACRQPPLSSQRPRTLLCHDMMGGYLDDRFIQGSVVQTPYAFYHWQCIDVFVYFSHHTVTIPPVGWTNTAHRHGVCVLGTFITEWNEGGRLCEAFLAGDERSYQAVADRLVQITQFFRFDGWLINIENSLSLAAVGNMPPFLRYLTTQLHRQVPGGLVLWYDSVVQSGQLKWQDELNQHNRVFFDSCDGFFTNYNWREEHLERMLGQAGERRADVYVGVDVFARGNVVGGRFDTDKSLELIRKHGFSVALFAPGWVYECLEKKDFFQNQDKFWGRLERYLPTHSICSLPFVTSFCLGMGARRVCYGQEEAVGPWYHLSAQEIQPLFGEHRLGGDGRGWVRTHCCLEDAWHPALVLPPLTSPLLPNPLLGRDE

SEQ ID NO: 761842 - protein, 306 aa, Homo sapiens; identical to SEQ ID NO: 761832

SEQ ID NO: 761843 - protein, 179 aa, Homo sapiens
TAQPQPVGAQPLPPCPCSSADRLSRALFWRACGTTGVMPSSLQSLELIRKHGFSVALFAPGWVYECLEKKDFFQNQDKFWGRLERYLPTHSICSLPFVTSFCLGMGARRVCYGQEEAVGPWYHLSAQEIQPLFGEHRLGGDGRGWVRTHCCLEDAWHPALVLPPLTSPLLPNPLLGRDE

SEQ ID NO: 761844 - protein, 306 aa, Homo sapiens; identical to SEQ ID NO: 761832

SEQ ID NO: 761845 - protein, 408 aa, Homo sapiens
SVMEAAAVTVTRSATRRRRRQLQGLAAPEAGTQEEQEDQEPRPRRRRPGRSIKDEEEETVFREVVSFSPDPLPVRYYDKDTTKPISFYLSSLEELLAWKPRLEDGFNVALEPLACRQPPLSSQRPRTLLCHDMMGGYLDDRFIQGSVVQTPYAFYHWQCIDVFVYFSHHTVTIPPVGWTNTAHRHGVCVLGTFITEWNEGGRLCEAFLAGDERSYQAVADRLVQITQFFRFDGWLINIENSLSLAAVGNMPPFLRYLTTQLHRQVPGGLVLWYDSVVQSGQLKWQDELNQHNRVFFDSCDGFFTNYNWREEHLERMLGQAGERRADVYVGVDVFARGNVVGGRFDTDKVGGGFRPRASGPVPPLGPHFLMDLPFPSAPQRNDSSCSSQSGDPVALRNRCPAPAKLCPH

SEQ ID NO: 761846 - protein, 193 aa, Homo sapiens
MPEEGSGCSVRRRPYGCVLRAALVPLVAGLVICLVVCIQRFAQAQQQLPLESLGWDVAELQLNHTGPQQDPRLYWQGGPALGRSFLHGPELDKGQLRIHRDGIYMVHIQVTLAICSSTTASRHHPTTLAVGICSPASRSISLLRLSFHQGCTIASQRLTPLARGDTLCTNLTGTLLPSRNTDETFFGVQWVRP

SEQ ID NO: 761847 - protein, 193 aa, Homo sapiens; identical to SEQ ID NO: 761846

SEQ ID NO: 761848 - protein, 104 aa, Homo sapiens
NPVPPGPQQDPRLYWQGGPALGRSFLHGPELDKGQLRIHRDGIYMVHIQVTLAICSSTTASRHHPTTLAVGICSPASRSISLLRLSFHQGCTIASHGCAPDHCC

SEQ ID NO: 761849 - protein, 589 aa, Homo sapiens
MSVSVHETRKSRSSTGSMNVTLFHKASHPDCVLAHLNTLRKHCMFTDVTLWAGDRAFPCHRAVLAASSRYFEAMFSHGLRESRDDTVNFQDNLHPEVLELLLDFAYSSRIAINEENAESLLEAGDMLQFHDVRDAAAEFLEKNLFPSNCLGMMLLSDAHQCRRLYEFSWRMCLVHFETVRQSEDFNSLSKDTLLDLISSDELETEDERVVFETILQWVKHDLEPRKVHLPELLRSVRLALLPSDCLQEAISSEALLMADERTKLIMDEALRCKTRILQNDGVVTSPCARPRKAGHTLLILGGQTFMCDKIYQVDHKAKEIIPKADLPSPRKEFSASAIGCKVYVTGGRGSENGVSKDVWVYDTVHEEWSKAAPMLIARFGHGSAELENCLYVVGGHTSLAGVFPASPSVSLKQVEKYDPGANKWMMVAPLRDGVSNAAVVSAKLKLFVFGGTSIHRDMVSKVQCYDPSENRWTIKAECPQPWRYTAAAVLGSQIFIMGGDTEFTAASAYRFDCETNQWTRIGDMTAKRMSCHALASGNKLYVVGGYFGTQRCKTLDCYDPTSDTWNCITTVPYSLIPTAFVSTWKHLPA

SEQ ID NO: 761850 - protein, 199 aa, Homo sapiens
GSLIKLIPLPSPFPASPSVSLKQVEKYDPGANKWMMVAPLRDGVSNAAVVSAKLKLFVFGGTSIHRDMVSKVQCYDPSENRWTIKAECPQPWRYTAAAVLGSQIFIMGGDTEFTAASAYRFDCETNQWTRIGDMTAKRMSCHALASGNKLYVVGGYFGTQRCKTLDCYDPTSDTWNCITTVPYSLIPTAFVSTWKHLPA

SEQ ID NO: 761851 - protein, 589 aa, Homo sapiens; identical to SEQ ID NO: 761849

SEQ ID NO: 761852 - protein, 589 aa, Homo sapiens; identical to SEQ ID NO: 761849

SEQ ID NO: 761853 - protein, 261 aa, Homo sapiens
LCIGGSLAASLASTCWVPVASLPHLWQPKMSSGEQHRSVENHRPRRAPCVEGTIGLPQKLLGEPLSSGILLSLWAGTVLRSSFDVYVLPPLVHLKTGFLKWKPDYDSAASEYGKAAVAFKNAKQFEQAKDACLREAVAHENNRALFHAAKAYEQAGMMLKEMQKLPEAVQLIEKASMMYLENGTPDTAAMALERAGKLIENVDPEKAVQLYQQTANVFENEERLRQAVELLGKASRLLVRGRRFDEAALSIQKEKNIYKEN

SEQ ID NO: 761854 - protein, 219 aa, Homo sapiens
RQYEALVELGGFLAPEEEAGSPSLHVRDLTVEMAAQKINEGLEHLAKAEKYLKTGFLKWKPDYDSAASEYGKAAVAFKNAKQFEQAKDACLREAVAHENNRALFHAAKAYEQAGMMLKEMQKLPEAVQLIEKASMMYLENGTPDTAAMALERAGKLIENVDPEKAVQLYQQTANVFENEERLRQAVELLGKASRLLVRGRRFDEAALSIQKEKNIYKEN

SEQ ID NO: 761855 - protein, 141 aa, Homo sapiens
  misc_feature (8)..(8): Xaa can be any naturally occurring amino acid
GLVRPAYXISSTTPSAAAARLLQLQGAPREVVDPSGGRATLLESIRQAGGIGKAKLRSMKERKLEKKKQKEQEQVRATSQGGHLMSDLFNKLVMRRKGISGKGPGAGEGPGGAFARVSDSIPPLPPPQQPQAEEDEDDWES

SEQ ID NO: 761856 - protein, 219 aa, Homo sapiens
VPSYLPDLPGIANDLMYIADLGPGIAPSAPGTIPELPTFHTEVAEPLKTYKMGYYTPPPPPPPPPPAPEVLASAPPLPPSTAAPVGQGARQDDSSSSASPSVQGAPREVVDPSGGRATLLESIRQAGGIGKAKLRSMKERKLEKKKQKEQEQVRATSQGGHLMSDLFNKLVMRRKGISGKGPGAGEGPGGAFARVSDSIPPLPPPQQPQAEEDEDDWES

SEQ ID NO: 761857 - protein, 219 aa, Homo sapiens; identical to SEQ ID NO: 761856

SEQ ID NO: 761858 - protein, 219 aa, Homo sapiens; identical to SEQ ID NO: 761856

SEQ ID NO: 761859 - protein, 219 aa, Homo sapiens; identical to SEQ ID NO: 761856

SEQ ID NO: 761860 - protein, 115 aa, Homo sapiens
PRCGAQPARKLSPVRSLQTLCFVLGEGVVFVFLVTALLRYNSRTVRFTPFNMYNSVVLTILTELCSHHHFLQNIFITPKINPIPISIHSPFSSPPAPDNLLASSWICLLWTFPIN

SEQ ID NO: 761861 - protein, 114 aa, Homo sapiens
ICHPLHYTVIMREELCVFLVAVSWILSCASSLSHTLLLTRLSFCAANTIPHVFCDLAALLKLSCSDIFLNELVMFTVGVVVITLPFMCILVSYGYIGATILRVPSTKGIHKALS

SEQ ID NO: 761862 - protein, 289 aa, Homo sapiens
MTGVFDRRVPSIRSGDFQAPFQTSAAMHHPSQESPTLPESSATDSDYYSPTGGAPHGYCSPTSASYGKALNPYQYQYHGVNGSAGSYPAKAYADYSYASSYHQYGGAYNRVPSATNQPEKEVTEPEVRMVNGKPKKVRKPRTIYSSFQLAALQRRFQKTQYLALPERAELAASLGLTQTQVKIWFQNKRSKIKKIMKNGEMPPEHSPSSSDPMACNSPQSPAVWEPQGSSRSLSHHPHAHPPTSNQSPASSYLENSASWYTSAASSINSHLPPPGSLQHPLALASGTLY

SEQ ID NO: 761863 - protein, 289 aa, Homo sapiens; identical to SEQ ID NO: 761862

SEQ ID NO: 761864 - protein, 188 aa, Homo sapiens
RARYPAKAQYPSATNQPEKEVTEPEVRMVNGKPKKVRKPRTIYSSFQLAALQRRFQKTQYLALPERAELAASLGLTQTQVKIWFQNKRSKIKKIMKNGEMPPEHSPSSSDPMACNSPQSPAVWEPQGSSRSLSHHPHAHPPTSNQSPASSYLENSASWYTSAASSINSHLPPPGSLQHPLALASGTLY

SEQ ID NO: 761865 - protein, 191 aa, Homo sapiens
MTGVFDRRVPSIRSGDFQAPFQTSAAMHHPSQESPTLPESSATDSDYYSPTGGAPHGYCSPTSASYGKALNPYQYQYHGVNGSAGSYPAKAYADYSYASSYHQYGGAYNRVPSATNQPEKEVTEPEVRMVNGKPKKVRKPRTIYSSFQLAALQRRFQKTQYLALPERAELAASLGLTQTQVNTALPCTRPA

SEQ ID NO: 761866 - protein, 289 aa, Homo sapiens; identical to SEQ ID NO: 761862

SEQ ID NO: 761867 - protein, 96 aa, Homo sapiens
MCCTKSLLLAALMSVLLLHLCGESEAASNFDCCLGYTDRILHPKFIVGFTRQLANEGCDINAIIFHTKKKLSVCANPKQTWVKYIVRLLSKKVKNM

SEQ ID NO: 761868 - protein, 121 aa, Homo sapiens
MCCTKSLLLAALMSVLLLHLCGESEAASNFDCCLGYTDRILHPKFIVGFTRQLANEGCDINAIIFHTKKKLSVCANPKQTWVKYIVRLLRTERTLLGLEVSLAHHGGFSAYLICASLDLSN

SEQ ID NO: 761869 - protein, 96 aa, Homo sapiens; identical to SEQ ID NO: 761867

SEQ ID NO: 761870 - protein, 2484 aa, Homo sapiens
AAAAAAAEEATEKIPALRPALLWALLALWLCCATPAHALQCRDGYEPCVNEGMCVTYHNGTGYCKCPEGFLGEYCQHRDPCEKNRCQNGGTCVAQAMLGKATCRCASGFTGEDCQYSTSHPCFVSRPCLNGGTCHMLSRDTYECTCQVGFTGKECQWTDACLSHPCANGSTCTTVANQFSCKCLTGFTGQKCETDVNECDIPGHCQHGGTCLNLPGSYQCQCLQGFTGQYCDSLYVPCAPSPCVNGGTCRQTGDFTFECNCLPGFEGSTCERNIDDCPNHRCQNGGVCVDGVNTYNCRCPPQWTGQFCTEDVDECLLQPNACQNGGTCANRNGGYGCVCVNGWSGDDCSENIDDCAFASCTPGSTCIDRVASFSCMCPEGKAGLLCHLDDACISNPCHKGALCDTNPLNGQYICTCPQGYKGADCTEDVDECAMANSNPCEHAGKCVNTDGAFHCECLKGYAGPRCEMDINECHSDPCQNDATCLDKIGGFTCLCMPGFKGVHCELEINECQSNPCVNNGQCVDKVNRFQCLCPPGFTGPVCQIDIDDCSSTPCLNGAKCIDHPNGYECQCATGFTGVLCEENIDNCDPDPCHHGQCQDGIDSYTCICNPGYMGAICSDQIDECYSSPCLNDGRCIDLVNGYQCNCQPGTSGVNCEINFDDCASNPCIHGICMDGINRYSCVCSPGFTGQRCNIDIDECASNPCRKGATCINGVNGFRCICPEGPHHPSCYSQVNECLSNPCIHGNCTGGLSGYKCLCDAGWVGINCEVDKNECLSNPCQNGGTCDNLVNGYRCTCKKGFKGYNCQVNIDECASNPCLNQGTCFDDISGYTCHCVLPYTGKNCQTVLAPCSPNPCENAAVCKESPNFESYTCLCAPGWQGQRCTIDIDECISKPCMNHGLCHNTQGSYMCECPPGFSGMDCEEDIDDCLANPCQNGGSCMDGVNTFSCLCLPGFTGDKCQTDMNECLSEPCKNGGTCSDYVNSYTCKCQAGFDGVHCENNINECTESSCFNGGTCVDGINSFSCLCPVGFTGSFCLHEINECSSHPCLNEGTCVDGLGTYRCSCPLGYTGKNCQTLVNLCSRSPCKNKGTCVQKKAESQCLCPSGWAGAYCDVPNVSCDIAASRRGVLVEHLCQHSGVCINAGNTHYCQCPLGYTGSYCEEQLDECASNPCQHGATCSDFIGGYRCECVPGYQGVNCEYEVDECQNQPCQNGGTCIDLVNHFKCSCPPGTRGLLCEENIDDCARGPHCLNGGQCMDRIGGYSCRCLPGFAGERCEGDINECLSNPCSSEGSLDCIQLTNDYLCVCRSAFTGRHCETFVDVCPQMPCLNGGTCAVASNMPDGFICRCPPGFSGARCQSSCGQVKCRKGEQCVHTASGPRCFCPSPRDCESGCASSPCQHGGSCHPQRQPPYYSCQCAPPFSGSRCELYTAPPSTPPATCLSQYCADKARDGVCDEACNSHACQWDGGDCSLTMENPWANCSSPLPCWDYINNQCDELCNTVECLFDNFECQGNSKTCKYDKYCADHFKDNHCDQGCNSEECGWDGLDCAADQPENLAEGTLVIVVLMPPEQLLQDARSFLRALGTLLHTNLRIKRDSQGELMVYPYYGEKSAAMKKQRMTRRSLPGEQEQEVAGSKVFLEIDNRQCVQDSDHCFKNTDAAAALLASHAIQGTLSYPLVSVVSESLTPERTQLLYLLAVAVVIILFIILLGVIMAKRKRKHGSLWLPEGFTLRRDASNHKRREPVGQDAVGLKNLSVQVSEANLIGTGTSEHWVDDEGPQPKKVKAEDEALLSEEDDPIDRRPWTQQHLEAADIRRTPSLALTPPQAEQEVDVLDVNVRGPDGCTPLMLASLRGGSSDLSDEDEDAEDSSANIITDLVYQGASLQAQTDRTGEMALHLAARYSRADAAKRLLDAGADANAQDNMGRCPLHAAVAADAQGVFQILIRNRVTDLDARMNDGTTPLILAARLAVEGMVAELINCQADVNAVDDHGKSALHWAAAVNNVEATLLLLKNGANRDMQDNKEETPLFLAAREGSYEAAKILLDHFANRDITDHMDRLPRDVARDHMHHDIVRLLDEYNVTPSPPGTVLTSALSPVICGPNRSFLSLKHTPMGKKSRRPSAKSTMPTSLPNLAKEAKDAKGSRRKKSLSEKVQLSESSVTLSPVDSLESPHTYVSDTTSSPMITSPGILQASPNPMLATAAPPAPVHAQHALSFSNLHEMQPLAHGASTVLPSVSQLLSHHHIVSPGSGSAGSLSRLHPVPVPADWMNRMEVNETQYNEMFGMVLAPAEGTHPGIAPQSRPPEGKHITTPREPLPPIVTFQLIPKGSIAQPAGAPQPQSTCPPAVAGPLPTMYQIPEMARLPSVAFPTAMMPQQDGQVAQTILPAYHPFPASVGKYPTPPSQHSYASSNAAERTPSHSGHLQGEHPYLTPSPESPDQWSSSSPHSASDWSDVTTSPTPGGAGGGQRGPGTHMSEPPHNNMQVYA

SEQ ID NO: 761871 - protein, 127 aa, Homo sapiens
TLLRMISLFSYNLSLYNYLEPCVNEGMCVTYHNGTGYCKCPEGFLGEYCQHRDPCEKNRCQNGGTCVAQAMLGKATCRCASGFTGEDCQYSTSHPCFVSRPCLNGGTCHMLSRDTYECTCQVGFTGN

SEQ ID NO: 761872 - protein, 288 aa, Homo sapiens
AAAAAAAEEATEKIPALRPALLWALLALWLCCATPAHALQCRDGYEPCVNEGMCVTYHNGTGYCKCPEGFLGEYCQHRDPCEKNRCQNGGTCVAQAMLGKATCRCASGFTGEDCQYSTSHPCFVSRPCLNGGTCHMLSRDTYECTCQVGFTGKECQWTDACLSHPCANGSTCTTVANQFSCKCLTGFTGQKCETDVNECDIPGHCQHGGTCLNLPGSYQCQCLQGFTGQYCDSLYVPCAPSPCVNGGTCRQTGDFTFECNCLPETVRRGTELWERDREVWNGKEHDEN

SEQ ID NO: 761873 - protein, 325 aa, Homo sapiens
AAAAAAAEEATEKIPALRPALLWALLALWLCCATPAHALQCRDGYEPCVNEGMCVTYHNGTGYCKCPEGFLGEYCQHRDPCEKNRCQNGGTCVAQAMLGKATCRCASGFTGEDCQYSTSHPCFVSRPCLNGGTCHMLSRDTYECTCQVGFTGKECQWTDACLSHPCANGSTCTTVANQFSCKCLTGFTGQKCETDVNECDIPGHCQHGGTCLNLPGSYQCQCLQGFTGQYCDSLYVPCAPSPCVNGGTCRQTGDFTFECNCLPGKELPSVPGLGDKPLAQEVVGVAQLLFLGSARKKGSENFVWGGLLVREEFYGPTVVHKLSRG

SEQ ID NO: 761874 - protein, 78 aa, Homo sapiens
EDPMPITSKDTYNMLKTKDEPQRETLKAIHYALNCCGLAGGWNRIQAAESDELLSHKDPVFIQISLVQKQKKENCRGE

SEQ ID NO: 761875 - protein, 288 aa, Homo sapiens; identical to SEQ ID NO: 761872

SEQ ID NO: 761876 - protein, 325 aa, Homo sapiens; identical to SEQ ID NO: 761873

SEQ ID NO: 761877 - protein, 217 aa, Homo sapiens
MAGRTVRAETRSRAKDDIKKVMATIEKVRRWEKRWVTVGDTSLRIFKWVPVVDPQEEERRRAGGGAERSRGRERRGRGASPRGGGPLILLDLNDENSNQSFHSEGSLQKGTEPSPGGTPQPSRPVSPAGPPEGVPEEAQPPRLGQERDPGGITAGSTDEPPMLTKEEPVPELLEAEAPEAYPVFEPVPPVPEAAQGDTEDSEGAPPLKRICPNAPDP

SEQ ID NO: 761878 - protein, 122 aa, Homo sapiens
MYEAGGAMPLAGMSGQGASPRGGGPLILLDLNDENSNQSFHFGPGPSPASMAGRTVRAETRSRAKDDIKKVMATIEKVRRWEKRWVTVGDTSLRIFKWVPVVDPQEEERRRAGGGAERSRDP

SEQ ID NO: 761879 - protein, 199 aa, Homo sapiens
  misc_feature (5)..(5): Xaa can be any naturally occurring amino acid
SEVGXAAEKVRRWEKRWVTVGDTSLRIFKWVPVVDPQEEERRRAGGGAERSRGRERRGRGASPRGGGPLILLDLNDENSNQSFHSEGSLQKGTEPSPGGTPQPSRPVSPAGPPEGVPEEAQPPRLGQERDPGGITAGSTDEPPMLTKEEPVPELLEAEAPEAYPVFEPVPPVPEAAQGDTEDSEGAPPLKRICPNAPDP

SEQ ID NO: 761880 - protein, 154 aa, Homo sapiens
MYCCIWLLSLKISSCDLSMLLCVAGHVNPVAVSMCMVVSRASFIFHSVDGLFPVWGCYERALNIPMHPLDAHTYTFLLGVDSLGVELLDHRGGICSASLENCQFSKMSLPIYTPPEIQERSSRSTFSPPHGAVFFTLAILVVETHSYSQRIPGA

SEQ ID NO: 761881 - protein, 217 aa, Homo sapiens
MAGRTVRAETRSRAKDDIKKVMATIEKVRRWEKRWVTVGDTSLRIFKWVPVVDPQEEERRRAGGGAERSRGRERRGRGASPRGGGPLILLDLNDENSNQSFHSEGSLQKGTEPSPGGTPQPSRPVSPAGPPEGVPEEAQPPRLGQERGRTRYLPGALSSKSCLLQSLTYQLIPIPAPRLVHPPQGAFRLLQNLPVATVSFLWSLRIYTDISLSEIFM

SEQ ID NO: 761882 - protein, 70 aa, Homo sapiens
GSPSGGALRVSVSPMLTKEEPVPELLEAEAPEAYPVFEPVPPVPEAAQGDTEDSEGAPPLKRICPNAPDP

SEQ ID NO: 761883 - protein, 338 aa, Homo sapiens
TREGAANSRWDGRPRARRPGLARSLSPPDGRRPRRGLGPGPSPASMAGRTVRAETRSRAKDDIKKVMATIEKVRRWEKRWVTVGDTSLRIFKWVPVVDPQEEERRRAGGGAERSRGRERRGRGASPRGGGPLILLDLNDENSNQSFHSEGSLQKGTEPSPGGTPQPSRPVSPAGPPEGVPEEAQPPRLGQERDPGGITAGSTDEPPMLTKEEPVPELLEAETMEMMLDKKQIQAIFLFELKMGHKAVETLRNINNTLGPGTANEHIVQWWFKKFCKEDKSLEDEKHSVWPSEVDNDQLKALIEADPVKTTQEVAQELNHRPFYGRLAFEANWKGEKAQ

SEQ ID NO: 761884 - protein, 132 aa, Homo sapiens
KRKQQNKETQHRVDIYRKRPSTKKGTEPSPGGTPQPSRPVSPAGPPEGVPEEAQPPRLGQERGRTRYLPGALSSKSCLLQSLTYQLIPIPAPRLVHPPQGAFRLLQNLPVATVSFLWSLRIYTDISLSEIFM

SEQ ID NO: 761885 - protein, 163 aa, Homo sapiens [sequence omitted]

SEQ ID NO: 761886 - protein, 207 aa, Homo sapiens
MAGRTVRAETRSRAKDDIKKVMATIEKVRRWEKRWVTVGDTSLRIFKWVPVVDPQEEERRRAGGGAERSRGRERRGRGASPRGGGPLILLDLNDENSNQSFHSEGSLQKGTEPSPGGTPQPSRPVSPAGPPEGVPEEAQPPRLGQERDPALILLSATEYPQCCPTRTLVQNCCTLRPWSLPCLCARPCSCVAHVATVHFILPPPPCA

SEQ ID NO: 761887 - protein, 216 aa, Homo sapiens
MGAVMGTFSSLQTKQRRPSKDKIEDELEMTMVCHRPEGLEQLEAQTNFTKRELQVLYRGFKNECPSGVVNEDTFKQIYAQFFPHGDASTYAHYLFNAFDTTQTGSVKFEDFVTALSILLRGTVHEKLRWTFNLYDINKDGYINKEEMMDIVKAIYDMMGKYTYPVLKEDTPRQHVDVFFQKMDKNKDGIVTLDEFLESCQEDDNIMRSLQLFQNVM

SEQ ID NO: 761888 - protein, 267 aa, Homo sapiens
GFRGASVTQGSFTQAGSKFLGCTRWALSLLGADSRAWLPSATMSGCSKRCKLGFVKFAQTIFKLITGTLSKDKIEDELEMTMVCHRPEGLEQLEAQTNFTKRELQVLYRGFKNECPSGVVNEDTFKQIYAQFFPHGDASTYAHYLFNAFDTTQTGSVKFEDFVTALSILLRGTVHEKLRWTFNLYDINKDGYINKEEMMDIVKAIYDMMGKYTYPVLKEDTPRQHVDVFFQKMDKNKDGIVTLDEFLESCQEDDNIMRSLQLFQNVM

SEQ ID NO: 761889 - protein, 201 aa, Homo sapiens
MSGRQRTLFQTWGSSISRSSGTPGCSSGTERPQSPGSSKAPLPAAAEAQLESDDDVLLVAAYEAERQLCLENGGFCTSAGALWIYPTNCPVRDYQLHISRAALFCNTLVCLPTGLGKTFIAAVVMYNFYRWFPSGKVVFMAPTKPLVTQQIEACYQVMGIPQSHMAEMTGSTQASTRKEIWCSKRVLFLTPQVMVNDLSRG

SEQ ID NO: 761890 - protein, 107 aa, Homo sapiens
GGGVIMATSELSCEVSEENCERREAFWAEWKDLTLSTRPEEGKEEREDTPIQLQELLALETALGGQCVDRQEVAEITKQLPPVVPVSKPGALRRSLSRSMSQEAQRG

SEQ ID NO: 761891 - protein, 172 aa, Homo sapiens
GGGVIMATSELSCEVSEENCERREAFWAEWKDLTLSTRPEEGCSLHEEDTQRHETYHQQGQCQVLVQRSPWLMMRMGILGRGLQEYQLPYQRVLPLPIFTPAKMGATKEEREDTPIQLQELLALETALGGQCVDRQEVAEITKQLPPVVPVSKPGALRRSLSRSMSQEAQRG

SEQ ID NO: 761892 - protein, 172 aa, Homo sapiens; identical to SEQ ID NO: 761891

SEQ ID NO: 761893 - protein, 227 aa, Homo sapiens
GGGVIMATSELSCEVSEENCERREAFWAEWKDLTLSTRPEEGCSLHEEDTQRHETYHQQGQCQVLVQRSPWLMMRMGILGRGLQEYQLPYQRVLPLPIFTPAKMGATEGEVKRAEARMVGPPAPSVSAAINAQSCARENKMTSPYDEKTLRWLGHARSTSEKAFVKTQFGGGRARPVRQQVNMGHNGPKKNGARKRRGSTQKNAGVTGVGQPKGEARQGSSRSKDDN

SEQ ID NO: 761894 - protein, 66 aa, Homo sapiens
  misc_feature (7)..(7): Xaa can be any naturally occurring amino acid
  misc_feature (13)..(13): Xaa can be any naturally occurring amino acid
PRWRPAXRKPEGXPPRACQEIRPRSISFTLFLSALSTKLTLCLLSYQRRYISLVHDLHILPTNERI

SEQ ID NO: 761895 - protein, 257 aa, Homo sapiens
MASAKLGNGDRWEDAWEPGGSRESRANSRRTQPAPAASTRTLPPIPRAARQDSLARTSMVGNPENRKWPREGEGRGGASATTSAADRGEMAATEGVGEAAQGGEPGQPAQPPPQPHPPPPQQQHKEEMAAEAGEAVASPMDDGFVSLDSPSYVLYRDRAEWADIDPVPQNDGPNPVVQIIYSDKFRDVYDYFRAVLQRDERSERAFKLTRDAIELNAANYTVWHFRRVLLKSLQKDLHEEMNYITAIIEEQPKNYQV

SEQ ID NO: 761896 - protein, 433 aa, Homo sapiens
MASAKLGNGDRWEDAWEPGGSRESRANSRRTQPAPAASTRTLPPIPRAARQDSLARTSMVGNPENRKWPREGEGRGGASATTSAADRGEMAATEGVGEAAQGGEPGQPAQPPPQPHPPPPQQQHKEEMAAEAGEAVASPMDDGFVSLDSPSYVLYSFRAVLQRDERSERAFKLTRDAIELNAANYTVWHFRRVLLKSLQKDLHEEMNYITAIIEEQPKNYQVWHHRRVLVEWLRDPSQELEFIADILNQDAKNYHAWQHRQWVIQEFKLWDNELQYVDQLLKEDVRNNSVWNQRYFVISNTTGYNDRAVLEREVQYTLEMIKLVPHNESAWNYLKGILQDRGLSKYPNLLNQLLDLQPSHSSPYLIAFLVDIYEDMLENQCDNKEDILNKALELCEILAKEKDTIRKEYWRYIGRSLQSKHSTENDSPTNVQQ

SEQ ID NO: 761897 - protein, 340 aa, Homo sapiens
MASAKLGNGDRWEDAWEPGGSRESRANSRRTQPAPAASTRTLPPIPRAARQDSLARTSMVGNPENRKWPREGEGRGGASATTSAADRGEMAATEGVGEAAQGGEPGQPAQPPPQPHPPPPQQQHKEEMAAEAGEAVASPMDDGFVSLDSPSYVLYRDRAEWADIDPVPQNDGPNPVVQIIYSDKFRDVYDYFRAVLQRDERSERAFKLTRDAIELNAANYTVWHFRRVLLKSLQKDLHEEMNYITAIIEEQPKNYQVWHHRRVLVEWLRDPSQELEFIADILNQDAKNYHAWQHRQWVIQEFKLWDNELQYVDQLLKEDGKKKLLLGTQKNLRIFLKPLG

SEQ ID NO: 761898 - protein, 455 aa, Homo sapiens
MASAKLGNGDRWEDAWEPGGSRESRANSRRTQPAPAASTRTLPPIPRAARQDSLARTSMVGNPENRKWPREGEGRGGASATTSAADRGEMAATEGVGEAAQGGEPGQPAQPPPQPHPPPPQQQHKEEMAAEAGEAVASPMDDGDRAEWADIDPVPQNDGPNPVVQIIYSDKFRDVYDYFRAVLQRDERSERAFKLTRDAIELNAANYTVWHFRRVLLKSLQKDLHEEMNYITAIIEEQPKNYQVWHHRRVLVEWLRDPSQELEFIADILNQDAKNYHAWQHRQWVIQEFKLWDNELQYVDQLLKEDVRNNSVWNQRYFVISNTTGYNDRAVLEREVQYTLEMIKLVPHNESAWNYLKGILQDRGLSKYPNLLNQLLDLQPSHSSPYLIAFLVDIYEDMLENQCDNKEDILNKALELCEILAKEKDTIRKEYWRYIGRSLQSKHSTENDSPTNVQQ

SEQ ID NO: 761899 - protein, 468 aa, Homo sapiens
MASAKLGNGDRWEDAWEPGGSRESRANSRRTQPAPAASTRTLPPIPRAARQDSLARTSMVGNPENRKWPREGEGRGGASATTSAADRGEMAATEGVGEAAQGGEPGQPAQPPPQPHPPPPQQQHKEEMAAEAGEAVASPMDDGFVSLDSPSYVLYRDRAEWADIDPVPQNDGPNPVVQIIYSDKFRDVYDYFRAVLQRDERSERAFKLTRDAIELNAANYTVWHFRRVLLKSLQKDLHEEMNYITAIIEEQPKNYQVWHHRRVLVEWLRDPSQELEFIADILNQDAKNYHAWQHRQWVIQEFKLWDNELQYVDQLLKEDVRNNSVWNQRYFVISNTTGYNDRAVLEREVQYTLEMIKLVPHNESAWNYLKGILQDRGLSKYPNLLNQLLDLQPSHSSPYLIAFLVDIYEDMLENQCDNKEDILNKALELCEILAKEKDTIRKEYWRYIGRSLQSKHSTENDSPTNVQQ

SEQ ID NO: 761900 - protein, 442 aa, Homo sapiens
MLRWTQRAECSVSPSHPQLQLPSKEGIALSLLGPLTALTRSEWHRQSSGTATDGKTRGSLGDLGRAAQTRGGGSQHPQPAPAHSHPYPGSPPRLSGPHLYGRKPRKQEVASRGGREGRGLRHHLSCGPRRDGGHRGGRGGCARGRARAAGATPAPAAPTAAPAAAQGRDGGRGWGSRGVPHGRRVCEPGLALLCPVQHFRRVLLKSLQKDLHEEMNYITAIIEEQPKNYQVWHHRRVLVEWLRDPSQELEFIADILNQDAKNYHAWQHRQWVIQEFKLWDNELQYVDQLLKEDVRNNSVWNQRYFVISNTTGYNDRAVLEREVQYTLEMIKLVPHNESAWNYLKGILQDRGLSKYPNLLNQLLDLQPSHSSPYLIAFLVDIYEDMLENQCDNKEDILNKALELCEILAKEKDTIRKEYWRYIGRSLQSKHSTENDSPTNVQQ

SEQ ID NO: 761901 - protein, 450 aa, Homo sapiens
MASAKLGNGDRWEDAWEPGGSRESRANSRRTQPAPAASTRTLPPIPRAARQDSLARTSMVGNPENRKWPREGEGRGGASATTSAADRGEMAATEGVGEAAQGGEPGQPAQPPPQPHPPPPQQQHKEEMAAEAGEAVASPMDDGFVSLDSPSYVLYRDRAEWADIDPVPQNDGPNPVVQIIYSDKFRDVYDYFRAVLQRDERSERAFKLTRDAIELNAANYTVWHFRRVLLKSLQKDLHEEMNYITAIIEEQPTSQELEFIADILNQDAKNYHAWQHRQWVIQEFKLWDNELQYVDQLLKEDVRNNSVWNQRYFVISNTTGYNDRAVLEREVQYTLEMIKLVPHNESAWNYLKGILQDRGLSKYPNLLNQLLDLQPSHSSPYLIAFLVDIYEDMLENQCDNKEDILNKALELCEILAKEKDTIRKEYWRYIGRSLQSKHSTENDSPTNVQQ

SEQ ID NO: 761902 - protein, 186 aa, Homo sapiens
MASAKLGNGDRWEDAWEPGGSRESRANSRRTQPAPAASTRTLPPIPRAARQDSLARTSMVGNPENRKWPREGEGRGGASATTSAADRGEMAATEGVGEAAQGGEPGQPAQPPPQPHPPPPQQQHKEEMAAEAGEAVASPMDDGFVSLDSPSYVLYRDRAEWADIDPVPQNDGPNPVVQIPIFLFRG

SEQ ID NO: 761903 - protein, 179 aa, Homo sapiens
MLELVFLADKDLRTKGFSLESCRSMVNLMDRDGNGKLGLVEFNILWNRIRNYLVVVPTHLSHAGAGRAGGKGRVTQPGPHPLPPPQSIFRKFDLDKSGSMSAYEMRMAIESAGFKLNKKLYELIITRYSEPDLAVDFDNFVCCLVRLETMFRFFKTLDTDLDGVVTFDLFKWLQLTMFA

SEQ ID NO: 761904 - protein, 105 aa, Homo sapiens
MCLSPGIDMSTSLARVGLLSPLLPATIVHLLRAELCGPCLCQPWARDGLPGPHPLPSQEGSFRLFLPRDSPGFPQHPDVSPLPTSEATHSAPPAWPCLQTINYNH

SEQ ID NO: 761905 - protein, 714 aa, Homo sapiens
MSEEIITPVYCTGVSAQVQKQRARELGLGRHENAIKYLGQDYEQLRVRCLQSGTLFRDEAFPPVPQSLGYKDLGPNSSKTYGIKWKRPTELLSNPQFIVDGATRTDICQGALGDCWLLAAIASLTLNDTLLHRVVPHGQSFQNGYAGIFHFQLWQFGEWVDVVVDDLLPIKDGKLVFVHSAEGNEFWSALLEKAYAKVNGSYEALSGGSTSEGFEDFTGGVTEWYELRKAPSDLYQIILKALERGSLLGCSIDISSVLDMEAITFKKLVKGHAYSVTGAKQVNYRGQVVSLIRMRNPWGEVEWTGAWSDSSSEWNNVDPYERDQLRVKMEDGEFWMSFRDFMREFTRLEICNLTPDALKSRTIRKWNTTLYEGTWRRGSTAGGCRNYPATFWVNPQFKIRLDETDDPDDYGDRESGCSFVLALMQKHRRRERRFGRDMETIGFAVYEVPPELVGQPAVHLKRDFFLANASRARSEQFINLREVSTRFRLPPGEYVVVPSTFEPNKEGDFVLRFFSEKSAGTVELDDQIQANLPDEQVLSEEEIDENFKALFRQLAGEDMEISVKELRTILNRIISKHKDLRTKGFSLESCRSMVNLMDRDGNGKLGLVEFNILWNRIRNYLSIFRKFDLDKSGSMSAYEMRMAIESAGFKLNKKLYELIITRYSEPDLAVDFDNFVCCLVRLETMFRFFKTLDTDLDGVVTFDLFKWLQLTMFA

SEQ ID NO: 761906 - protein, 714 aa, Homo sapiens; identical to SEQ ID NO: 761905

SEQ ID NO: 761907 - protein, 714 aa, Homo sapiens; identical to SEQ ID NO: 761905

SEQ ID NO: 761908 - protein, 714 aa, Homo sapiens; identical to SEQ ID NO: 761905

SEQ ID NO: 761909 - protein, 714 aa, Homo sapiens; identical to SEQ ID NO: 761905

SEQ ID NO: 761910 - protein, 714 aa, Homo sapiens; identical to SEQ ID NO: 761905

SEQ ID NO: 761911 - protein, 755 aa, Homo sapiens
MSEEIITPVYCTGVSAQVQKQRARELGLGRHENAIKYLGQDYEQLRVRCLQSGTLFRDEAFPPVPQSLGYKDLGPNSSKTYGIKWKRPTELLSNPQFIVDGATRTDICQGALGDCWLLAAIASLTLNDTLLHRVVPHGQSFQNGYAGIFHFQLWQFGEWVDVVVDDLLPIKDGKLVFVHSAEGNEFWSALLEKAYAKSEYAAEEGNSSFQLPLGVGAHDCLLRGSCLMPECCPGAAHRVNGSYEALSGGSTSEGFEDFTGGVTEWYELRKAPSDLYQIILKALERGSLLGCSIDISSVLDMEAITFKKLVKGHAYSVTGAKQVNYRGQVVSLIRMRNPWGEVEWTGAWSDSSSEWNNVDPYERDQLRVKMEDGEFWMSFRDFMREFTRLEICNLTPDALKSRTIRKWNTTLYEGTWRRGSTAGGCRNYPATFWVNPQFKIRLDETDDPDDYGDRESGCSFVLALMQKHRRRERRFGRDMETIGFAVYEVPPELVGQPAVHLKRDFFLANASRARSEQFINLREVSTRFRLPPGEYVVVPSTFEPNKEGDFVLRFFSEKSAGTVELDDQIQANLPDEQVLSEEEIDENFKALFRQLAGEDMEISVKELRTILNRIISKHKDLRTKGFSLESCRSMVNLMDRDGNGKLGLVEFNILWNRIRNYLSIFRKFDLDKSGSMSAYEMRMAIESAGFKLNKKLYELIITRYSEPDLAVDFDNFVCCLVRLETMFRFFKTLDTDLDGVVTFDLFKWLQLTMFA

SEQ ID NO: 761912 - protein, 755 aa, Homo sapiens; identical to SEQ ID NO: 761911

SEQ ID NO: 761913 - protein, 562 aa, Homo sapiens
SVGNRTLGLTPNSKGPGDKLRWFQMTTSAEGNEFWSALLEKAYAKVNGSYEALSGGSTSEGFEDFTGGVTEWYELRKAPSDLYQIILKALERGSLLGCSIDISSVLDMEAITFKKLVKGHAYSVTGAKQVNYRGQVVSLIRMRNPWGEVEWTGAWSDSSSEWNNVDPYERDQLRVKMEDGEFWMSFRDFMREFTRLEICNLTPDALKSRTIRKWNTTLYEGTWRRGSTAGGCRNYPATFWVNPQFKIRLDETDDPDDYGDRESGCSFVLALMQKHRRRERRFGRDMETIGFAVYEVPPELVGQPAVHLKRDFFLANASRARSEQFINLREVSTRFRLPPGEYVVVPSTFEPNKEGDFVLRFFSEKSAGTVELDDQIQANLPDEQVLSEEEIDENFKALFRQLAGEDMEISVKELRTILNRIISKHKDLRTKGFSLESCRSMVNLMDRDGNGKLGLVEFNILWNRIRNYLSIFRKFDLDKSGSMSAYEMRMAIESAGFKLNKKLYELIITRYSEPDLAVDFDNFVCCLVRLETMFRFFKTLDTDLDGVVTFDLFKWLQLTMFA

SEQ ID NO: 761914 - protein, 581 aa, Homo sapiens
MELRSGDSKAGTHRAPPPQLWQFGEWVDVVVDDLLPIKDGKLVFVHSAEGNEFWSALLEKAYAKVNGSYEALSGGSTSEGFEDFTGGVTEWYELRKAPSDLYQIILKALERGSLLGCSIDISSVLDMEAITFKKLVKGHAYSVTGAKQVNYRGQVVSLIRMRNPWGEVEWTGAWSDSSSEWNNVDPYERDQLRVKMEDGEFWMSFRDFMREFTRLEICNLTPDALKSRTIRKWNTTLYEGTWRRGSTAGGCRNYPATFWVNPQFKIRLDETDDPDDYGDRESGCSFVLALMQKHRRRERRFGRDMETIGFAVYEVPPELVGQPAVHLKRDFFLANASRARSEQFINLREVSTRFRLPPGEYVVVPSTFEPNKEGDFVLRFFSEKSAGTVELDDQIQANLPDEQVLSEEEIDENFKALFRQLAGEDMEISVKELRTILNRIISKHKDLRTKGFSLESCRSMVNLMDRDGNGKLGLVEFNILWNRIRNYLSIFRKFDLDKSGSMSAYEMRMAIESAGFKLNKKLYELIITRYSEPDLAVDFDNFVCCLVRLETMFRFFKTLDTDLDGVVTFDLFKWLQLTMFA

SEQ ID NO: 761915 - protein, 421 aa, Homo sapiens [sequence omitted]

SEQ ID NO: 761916 - protein, 386 aa, Homo sapiens
MEDGEFWMSFRDFMREFTRLEICNLTPDALKSRTIRKWNTTLYEGTWRRGSTAGGCRNYPATFWVNPQFKIRLDETDDPDDYGDRESGCSFVLALMQKHRRRERRFGRDMETIGFAVYEVPPELVGQPAVHLKRDFFLANASRARSEQFINLREVSTRFRLPPGEYVVVPSTFEPNKEGDFVLRFFSEKSAGTVELDDQIQANLPDEQVLSEEEIDENFKALFRQLAGEDMEISVKELRTILNRIISKHKDLRTKGFSLESCRSMVNLMDRDGNGKLGLVEFNILWNRIRNYLSIFRKFDLDKSGSMSAYEMRMAIESAGFKLNKKLYELIITRYSEPDLAVDFDNFVCCLVRLETMFRFFKTLDTDLDGVVTFDLFKWLQLTMFA

SEQ ID NO: 761917 - protein, 635 aa, Homo sapiens
MSEEIITPVYCTGVSAQVQKQRARELGLGRHENAIKYLGQDYEQLRVRCLQSGTLFRDEAFPPVPQSLGYKDLGPNSSKTYGIKWKRPTELLSNPQFIVDGATRTDICQGALGDCWLLAAIASLTLNDTLLHRVVPHGQSFQNGYAGIFHFQLWQFGEWVDVVVDDLLPIKDGKLVFVHSAEGNEFWSALLEKAYAKVNGSYEALSGGSTSEGFEDFTGGVTEWYELRKAPSDLYQIILKALERGSLLGCSIDISSVLDMEAITFKKLVKGHAYSVTGAKQVNYRGQVVSLIRMRNPWGEVEWTGAWSDSSSEWNNVDPYERDQLRVKMEDGEFWMSFRDFMREFTRLEICNLTPDALKSRTIRKWNTTLYEGTWRRGSTAGGCRNYPATFWVNPQFKIRLDETDDPDDYGDRESGCSFVLALMQKHRRRERRFGRDMETIGFAVYEVPPELVGQPAVHLKRDFFLANASRARSEQFINLREVSTRFRLPPGEYVVVPSTFEPNKEGDFVLRFFSEKSAGTVELDDQIQANLPDEQVLSEEEIDENFKALFRQLAGEDMEISVKELRTILNRIISKHKDLRTKGFSLESCQARKAAFACSCLGTAPGFPSILMCPLSPLQRPPTQHHRPGLACRL

SEQ ID NO: 761918 - protein, 255 aa, Homo sapiens [sequence omitted]

SEQ ID NO: 761919 - protein, 147 aa, Homo sapiens
GVLEDPNQFNKDLRTKGFSLESCRSMVNLMDRDGNGKLGLVEFNILWNRIRNYLSIFRKFDLDKSGSMSAYEMRMAIESAGFKLNKKLYELIITRYSEPDLAVDFDNFVCCLVRLETMFRFFKTLDTDLDGVVTFDLFKWLQLTMFA

SEQ ID NO: 761920 - protein, 121 aa, Homo sapiens
MKHIDRDGNGKLGLVEFNILWNRIRNYLSIFRKFDLDKSGSMSAYEMRMAIESAGFKLNKKLYELIITRYSEPDLAVDFDNFVCCLVRLETMFRFFKTLDTDLDGVVTFDLFKWLQLTMFA

SEQ ID NO: 761921 - protein, 117 aa, Homo sapiens
LADSRGSLIRIRFYILWNRIRNYLSIFRKFDLDKSGSMSAYEMRMAIESAGFKLNKKLYELIITRYSEPDLAVDFDNFVCCLVRLETMFRFFKTLDTDLDGVVTFDLFKWLQLTMFA

SEQ ID NO: 761922 - protein, 83 aa, Homo sapiens
SRSGERDVMRMAIESAGFKLNKKLYELIITRYSEPDLAVDFDNFVCCLVRLETMFRFFKTLDTDLDGVVTFDLFKWLQLTMFA

SEQ ID NO: 761923 - protein, 332 aa, Homo sapiens
MSEEIITPVYCTGVSAQVQKQRARELGLGRHENAIKYLGQDYEQLRVRCLQSGTLFRDEAFPPVPQSLGYKDLGPNSSKTYGIKWKRPTELLSNPQFIVDGATRTDICQGALGDCWLLAAIASLTLNDTLLHRVVPHGQSFQNGYAGIFHFQLWQFGEWVDVVVDDLLPIKDGKLVFVHSAEGNEFWSALLEKAYAKVNGSYEALSGGSTSEGFEDFTGGVTEWYELRKAPSDLYQIILKALERGSLLGCSIDISSVLDMEAITFKKLVKGHAYSVTGAKQVNYRGQVVSLIRMRNPWGEVEWTGAWSDSSSEWNNVDPYASVCDVFLPSLL

SEQ ID NO: 761924 - protein, 305 aa, Homo sapiens [sequence omitted]

SEQ ID NO: 761925 - protein, 141 aa, Homo sapiens
MSEEIITPVYCTGVSAQVQKQRARELGLGRHENAIKYLGQDYEQLRVRCLQSGTLFRDEAFPPVPQSLGYKDLGPNSSKTYGIKWKRPTELLSNPQFIVDGATRTDICQGALGDCWLLAAIASLTSAPPAWPCLQTINYNH

SEQ ID NO: 761926 - protein, 199 aa, Homo sapiens
MSEEIITPVYCTGVSAQVQKQRARELGLGRHENAIKYLGQDYEQLRVRCLQSGTLFRDEAFPPVPQSLGYKDLGPNSSKTYGIKWKRPTELLSNPQFIVDGATRTDICQGALGDCWLLAAIASLTLNDTLLHRVVPHGQSFQNGYAGIFHFQLWQFGEWVDVVVDDLLPIKDGKLVFVHSAEGNEFWSALLEKAYAKSE

SEQ ID NO: 761927 - protein, 146 aa, Homo sapiens [sequence omitted]

SEQ ID NO: 761928 - protein, 132 aa, Homo sapiens
TDALSGGRAQHGELKDRDGNGKLGLVEFNILWNRIRNYLSIFRKFDLDKSGSMSAYEMRMAIESAGFKLNKKLYELIITRYSEPDLAVDFDNFVCCLVRLETMFRFFKTLDTDLDGVVTFDLFKWLQLTMFA

SEQ ID NO: 761929 - protein, 232 aa, Homo sapiens
  misc_feature (209)..(209): Xaa can be any naturally occurring amino acid
  misc_feature (217)..(217): Xaa can be any naturally occurring amino acid
MSEEIITPVYCTGVSAQVQKQRARELGLGRHENAIKYLGQDYEQLRVRCLQSGTLFRDEAFPPVPQSLGYKDLGPNSSKTYGIKWKRPTELLSNPQFIVDGATRTDICQGALGDCWLLAAIASLTLNDTLLHRVVPHGQSFQNGYAGIFHFQLWQFGEWVDVVVDDLLPIKDGKLVFVHSAEGNEFWSALLEKAYAKGENGKLTKALFXGGQPPPKXGFLKGTSPRAGGLPE

SEQ ID NO: 761930 - protein, 231 aa, Homo sapiens
MSEEIITPVYCTGVSAQVQKQRARELGLGRHENAIKYLGQDYEQLRVRCLQSGTLFRDEAFPPVPQSLGYKDLGPNSSKTYGIKWKRPTELLSNPQFIVDGATRTDICQGALGDCWLLAAIASLTLNDTLLHRVVPHGQSFQNGYAGIFHFQLWQFGEWVDVVVDDLLPIKDGKLVFVHSAEGNEFWSALLEKAYAKEGGDGRQEPAVPQCSLAVSVRVAPSTINWCGRGS

SEQ ID NO: 761931 - protein, 117 aa, Homo sapiens; identical to SEQ ID NO: 761921

SEQ ID NO: 761932 - protein, 146 aa, Homo sapiens [sequence omitted]

SEQ ID NO: 761933 - protein, 146 aa, Homo sapiens [sequence omitted]

SEQ ID NO: 761934 - protein, 127 aa, Homo sapiens
MRQGLGPPCRAPLPPRLPSLASYHTTPGHPSCKCLPWSREAASSSCPLSSQPPSFICSGQNCVAPACASHGLGMDSLGPTHCQARKAAFACSCLGTAPGFPSILMCPLSPLQRPPTQHHRPGLACRL

SEQ ID NO: 761935 - protein, 127 aa, Homo sapiens; identical to SEQ ID NO: 761934

SEQ ID NO: 761936 - protein, 127 aa, Homo sapiens; identical to SEQ ID NO: 761934

SEQ ID NO: 761937 - protein, 714 aa, Homo sapiens; identical to SEQ ID NO: 761905

SEQ ID NO: 761938 - protein, 714 aa, Homo sapiens; identical to SEQ ID NO: 761905

SEQ ID NO: 761939 - protein, 714 aa, Homo sapiens; identical to SEQ ID NO: 761905

SEQ ID NO: 761940 - protein, 714 aa, Homo sapiens; identical to SEQ ID NO: 761905

SEQ ID NO: 761941 - protein, 714 aa, Homo sapiens; identical to SEQ ID NO: 761905

SEQ ID NO: 761942 - protein, 714 aa, Homo sapiens; identical to SEQ ID NO: 761905

SEQ ID NO: 761943 - protein, 455 aa, Homo sapiens [sequence omitted]

SEQ ID NO: 761944 - protein, 421 aa, Homo sapiens [sequence omitted]

SEQ ID NO: 761945 - protein, 581 aa, Homo sapiens
MSEEIITPVYCTGVSAQVQKQRARELGLGRHENAIKYLGQDYEQLRVRCLQSGTLFRDEAFPPVPQSLGYKDLGPNSSKTYGIKWKRPTELLSNPQFIVDGATRTDICQGALGDCWLLAAIASLTLNDTLLHRVVPHGQSFQNGYAGIFHFQLWQFGEWVDVVVDDLLPIKDGKLVFVHSAEGNEFWSALLEKAYAKVNGSYEALSGGSTSEGFEDFTGGVTEWYELRKAPSDLYQIILKALERGSLLGCSIDISSVLDMEAITFKKLVKGHAYSVTGAKQVNYRGQVVSLIRMRNPWGEVEWTGAWSDSSSEWNNVDPYERDQLRVKMEDGEFWMSFRDFMREFTRLEICNLTPDALKSRTIRKWNTTLYEGTWRRGSTAGGCRNYPATFWVNPQFKIRLDETDDPDDYGDRESGCSFVLALMQKHRRRERRFGRDMETIGFAVYEVPPELVGQPAVHLKRDFFLANASRARSEQFINLREVSTRFRLPPGEYVVVPSTFEPNKEGDFVLRFFSEKSAGTVELDDQIQANLPDEQVLSEEEIDENFKGTAPGFPSILMCPLSPLQRPPTQHHRPGLACRL

SEQ ID NO: 761946 - protein, 146 aa, Homo sapiens [sequence omitted]

SEQ ID NO: 761947 - protein, 581 aa, Homo sapiens; identical to SEQ ID NO: 761945

SEQ ID NO: 761948 - protein, 562 aa, Homo sapiens
MSEEIITPVYCTGVSAQVQKQRARELGLGRHENAIKYLGQDYEQLRVRCLQSGTLFRDEAFPPVPQSLGYKDLGPNSSKTYGIKWKRPTELLSNPQFIVDGATRTDICQGALGDCWLLAAIASLTLNDTLLHRVVPHGQSFQNGYAGIFHFQLWQFGEWVDVVVDDLLPIKDGKLVFVHSAEGNEFWSALLEKAYAKVNGSYEALSGGSTSEGFEDFTGGVTEWYELRKAPSDLYQIILKALERGSLLGCSIDISSVLDMEAITFKKLVKGHAYSVTGAKQVNYRGQVVSLIRMRNPWGEVEWTGAWSDSSSEWNNVDPYERDQLRVKMEDGEFWMSFRDFMREFTRLEICNLTPDALKSRTIRKWNTTLYEGTWRRGSTAGGCRNYPATFWVNPQFKIRLDETDDPDDYGDRESGCSFVLALMQKHRRRERRFGRDMETIGFAVYEVPPEAWWASRPYTLKRDFFPLGQIAVLRGRASRAKFHSTLATKAQNPISACKPGARLSCGARTLTSFQAPTQEEGASTSGTIDALLSSSSKDDARGTCETLEMTQHHRAKLPPMY

SEQ ID NO: 761949 - protein, 305 aa, Homo sapiens [sequence omitted]

SEQ ID NO: 761950 - protein, 146 aa, Homo sapiens [sequence omitted]

SEQ ID NO: 761951 - protein, 162 aa, Homo sapiens
MASGVLTLPAHRRGATILNRIISKHKDLRTKGFSLESCRSMVNLMDRDGNGKLGLVEFNILWNRIRNYLSIFRKFDLDKSGSMSAYEMRMAIESAGFKLNKKLYELIITRYSEPDLAVDFDNFVCCLVRLETMFRFFKTLDTDLDGVVTFDLFKWLQLTMFA

SEQ ID NO: 761952 - protein, 165 aa, Homo sapiens
MAGPIVREDMEISVKELRTILNRIISKHKDLRTKGFSLESCRSMVNLMDRDGNGKLGLVEFNILWNRIRNYLSIFRKFDLDKSGSMSAYEMRMAIESAGFKLNKKLYELIITRYSEPDLAVDFDNFVCCLVRLETMFRFFKTLDTDLDGVVTFDLFKWLQLTMFA

SEQ ID NO: 761953 - protein, 146 aa, Homo sapiens [sequence omitted]

SEQ ID NO: 761954 - protein, 146 aa, Homo sapiens [sequence omitted]

SEQ ID NO: 761955 - protein, 177 aa, Homo sapiens
MSEEIITPVYCTGVSAQVQKQRARELGLGRHENAIKYLGQDYEQLRVRCLQSGTLFRDEAFPPVPQSLGYKDLGPNSSKTYGIKWKRPTELLSNPQFIVDGATRTDICQGALGDCWLLAAIASLTLNDTLLHRVVPHGQSFQNGYAGIFHFQVRAPLGRRGSRHWGRCGRMTHNTCS

SEQ ID NO: 761956 - protein, 83 aa, Homo sapiens; identical to SEQ ID NO: 761922

SEQ ID NO: 761957 - protein, 127 aa, Homo sapiens; identical to SEQ ID NO: 761934

SEQ ID NO: 761958 - protein, 99 aa, Homo sapiens
PCLAPAPSWGPNPSPILLGRGCASLTFTHSPGPGFKLNKKLYELIITRYSEPDLAVDFDNFVCCLVRLETMFRECPQLPPTLQLRPKRVPQELGGMTDG

SEQ ID NO: 761959 - protein, 152 aa, Homo sapiens
MHLAHSTLKPAAHLIGDPSKQNSLLWRANTDRAFLQDGFSLSNNSLLVPTSGIYFVYSQVVFSGKAYSPKATSSPLYLAHEVQLFSSQYPFHVPLLSSQKMVYPGLQEPWLHSMYHGAAFQLTQGDQLSTHTDGIPHLVLSPSTVFFGAFAL

SEQ ID NO: 761960 - protein, 205 aa, Homo sapiens
MTPPERLFLPRVCGTTLHLLLLGLLLVLLPGAQGLPGVGLTPSAAQTARQHPKMHLAHSTLKPAAHLIGDPSKQNSLLWRANTDRAFLQDGFSLSNNSLLVPTSGIYFVYSQVVFSGKAYSPKATSSPLYLAHEVQLFSSQYPFHVPLLSSQKMVYPGLQEPWLHSMYHGAAFQLTQGDQLSTHTDGIPHLVLSPSTVFFGAFAL

SEQ ID NO: 761961 - protein, 152 aa, Homo sapiens; identical to SEQ ID NO: 761959

SEQ ID NO: 761962 - protein, 475 aa, Homo sapiens [sequence omitted]

SEQ ID NO: 761963 - protein, 426 aa, Homo sapiens
MNGVAGDGMINIDMTGEKRSLDLPYPSSFAPVSAPRNQTFTYMGKFSIDPQYPGASCYPEGIINIVSAGILQGVTSPASTTASSSVTSASPNPLATGPLGVCTMSQTQPDLDHLYSPPPPPPPYSGCAGDLYQDPSAFLSAATTSTSSSLAYPPPPSYPSPKPATDPGLFPMIPDYPGFFPSQCQRDLHGTAGPDRKPFPCPLDTLRVPPPLTPLSTIRNFTLGGPSAGVTGPGASGGSEGPRLPGSSSAAAAAAAAAAYNPHHLPLRPILRPRKYPNRPSKTPVHERPYPCPAEGCDRRFSRSDELTRHIRIHTGHKPFQCRICMRNFSRSDHLTTHIRTHTGEKPFACDYCGRKFARSDERKRHTKIHLRQKERKSSAPSASVPAPSTASCSGGVQPGGTLCSSNSSSLGGGPLAPCSSRTRTP

SEQ ID NO: 761964 - protein, 29 aa, Homo sapiens
MGRQVMKGINQGYVLGVTPLLSLDVCEKA

SEQ ID NO: 761965 - protein, 390 aa, Homo sapiens
MAEIHNGGELCDFMENGEIFSEHSCLNAHMGTENTGDTYDCDEYGENFPMLHNSAPAGETLSVLNQCRKAFSLPPNVHQRTWIGDKSFEYSDCEEAFVDQSHLQANRITHNGETLYEQKQCGRAFTYSTSHAVSVKMHTVEKPYECKECGKFFRYSSYLNSHMRTHTGEKPYECKECGKCFTVSSHLVEHVRIHTGEKPYQCKECGRAFAGRSGLTKHVRIHTGEKPYECNECGKAYNRFYLLTEHFKTHTEEKPFECKVCGKSFRSSSCLKNHFRIHTGIKPYKCKECGKAFTVSSSLHNHVKIHTGEKPYECKDCGKAFATSSQLIEHIRTHTGEKPYICKECGKTFRASSHLQKHVRIHTGEKPYICNECGKAYNRFYLLTKHLKTH

SEQ ID NO: 761966 - protein, 499 aa, Homo sapiens
MAEIHNGGELCDFMENGEIFSEHSCLNAHMGTENTGDTYDCDEYGENFPMLHNSAPAGETLSVLNQCRKAFSLPPNVHQRTWIGDKSFEYSDCEEAFVDQSHLQANRITHNGETLYEQKQCGRAFTYSTSHAVSVKMHTVEKPYECKECGKFFRYSSYLNSHMRTHTGEKPYECKECGKCFTVSSHLVEHVRIHTGEKPYQCKECGRAFAGRSGLTKHVRIHTGEKPYECNECGKAYNRFYLLTEHFKTHTEEKPFECKVCGKSFRSSSCLKNHFRIHTGIKPYKCKECGKAFTVSSSLHNHVKIHTGEKPYECKDCGKAFATSSQLIEHIRTHTGEKPYICKECGKTFRASSHLQKHVRIHTGEKPCPWAKNLNEKDYELLCLDGTRKPVEEYANCHLARAPNHAVVTRKDKEACVHKILRQQQHLFGSNVTDCSGNFCLFRSETKDLLFRDDTVCLAKLHDRNTYEKYLGEEYVKAVGNLRKCSTSSLLEACTFRRP

SEQ ID NO: 761967 - protein, 194 aa, Homo sapiens
MASVQASRRQWCYLCDLPKMPWAMVWDFSEAVCRGCVNFEGADRIELLIDAARQLKRSTCSPRAARPGPRPLTTQHRLVARNGEAEVSPTAGAEAVSGGGSGTGATPGAPLCCTLCRERLEDTHFVQCPSVPGHKFCFPCSREFIKAQGPAGEVYCPSGDKCPLVGSSVPWAFMQGEIATILAGDIKVKKERDP

SEQ ID NO: 761968 - protein, 169 aa, Homo sapiens
MASVQASRRQWCYLCDLPKMPWAMVWDFSEAVCRGCVNFEGADRIELLIDAARQLKRSHVLPEGRSPGPPALKHPATKDLAAAAAQGPQLPPPQAQPQPSGTGGGVSGQDRYDRATSSGRLPLPSPALEYTLGSRLANGLGREEAVAVGLVGAVGYSDCRLVGEILKHQ

SEQ ID NO: 761969 - protein, 584 aa, Homo sapiens
MASVQASRRQWCYLCDLPKMPWAMVWDFSEAVCRGCVNFEGADRIELLIDAARQLKRSHVLPEGRSPGPPALKHPATKDLAAAAAQGPQLPPPQAQPQPSGTGGGVSGQDRYDRATSSGRLPLPSPALEYTLGSRLANGLGREEAVAEGARRALLGSMPGLMPPGLLAAAVSGLGSRGLTLAPGLSPARPLFGSDFEKEKQQRNADCLAELNEAMRGRAEEWHGRPKAVREQLLALSACAPFNVRFKKDHGLVGRVFAFDATARPPGYEFELKLFTEYPCGSGNVYAGVLAVARQMFHDALREPGKALASSGFKYLEYERRHGSGEWRQLGELLTDGVRSFREPAPAEALPQQYPEPAPAALCGPPPRAPSRNLAPTPRRRKASPEPEGEAAGKMTTEEQQQRHWVAPGGPYSAETPGVPSPIAALKNVAEALGHSPKDPGGGGGPVRAGGASPAASSTAQPPTQHRLVARNGEAEVSPTAGAEAVSGGGSGTGATPGAPLCCTLCRERLEDTHFVQCPSVPGHKFCFPCSREFIKAQGPAGEVYCPSGDKCPLVGSSVPWAFMQGEIATILAGDIKVKKERDP

SEQ ID NO: 761970 - protein, 498 aa, Homo sapiens
MASVQASAASGATCATGGGVSGQDRYDRATSSGRLPLPSPALEYTLGSRLANGLGREEAVAEGARRALLGSMPGLMPPGLLAAAVSGLGSRGLTLAPGLSPARPLFGSDFEKEKQQRNADCLAELNEAMRGRAEEWHGRPKAVREQLLALSACAPFNVRFKKDHGLVGRVFAFDATARPPGYEFELKLFTEYPCGSGNVYAGVLAVARQMFHDALREPGKALASSGFKYLEYERRHGSGEWRQLGELLTDGVRSFREPAPAEALPQQYPEPAPAALCGPPPRAPSRNLAPTPRRRKASPEPEGEAAGKMTTEEQQQRHWVAPGGPYSAETPGVPSPIAALKNVAEALGHSPKDPGGGGGPVRAGGASPAASSTAQPPTQHRLVARNGEAEVSPTAGAEAVSGGGSGTGATPGAPLCCTLCRERLEDTHFVQCPSVPGHKFCFPCSREFIKAQGPAGEVYCPSGDKCPLVGSSVPWAFMQGEIATILAGDIKVKKERDP

SEQ ID NO: 761971 - protein, 130 aa, Homo sapiens
PTVPREGYMAAPGCGAGGQGTNEGPRVPGQGLRLPPGDNGKENLMARFVPLVRSPRGNLEGPLSSYSPSDPPRGSASPHPGLPPQALGGQASPPLLCCSFSQRTASALSTSRPCMCPHLSTPLAQLGPLF

SEQ ID NO: 761972 - protein, 61 aa, Homo sapiens
GLVVVEPSPGLPKPCLLSLLSTPRDLRASVSAFPKAVLAPSAILQPRQHPSKMLLLLPEAG

SEQ ID NO: 761973 - protein, 104 aa, Homo sapiens [sequence omitted]

SEQ ID NO: 761974 - protein, 250 aa, Homo sapiens
MKTGHFEIVTMLLATMILVDIFQVKAEVLDMADNAFDDEYLKCTDRMEIKYVPQLLKEEKASHQQLDTVWENAKAKWAARKTQIFLPMNFKDNHGIALMAYISEAQEQTPFYHLFSEAVKMAGQSREDYIYGFQFKAFHFYLTRALQLLRKPCEASSKTVVYRTSQGTSFTFGGLNQARFGHFTLAYSAKPQAANDQLTVLSIYLLGAWNLVEGRFILMGSGRGGDFQKNALGFGHRVAIPSGNRGRPGS

SEQ ID NO: 761975 - protein, 367 aa, Homo sapiens
MKTGHFEIVTMLLATMILVDIFQVKAEVLDMADNAFDDEYLKCTDRMEIKYVPQLLKEEKASHQQLDTVWENAKAKWAARKTQIFLPMNFKDNHGIALMAYISEAQEQTPFYHLFSEAVKMAGQSREDYIYGFQFKAFHFYLTRALQLLRKPCEASSKTVVYRTSQGTSFTFGGLNQARFGHFTLAYSAKPQAANDQLTVLSIYTCLGVDIENFLDKESERITLIPLNEVFQVSQEGAGNNLILQSINKTCSHYECAFLGGLKTENCIENLEYFQPIYVYNPGEKNQKLEDHSEKNWKLEDHGEKNQKLEDHGVKILEPTQIPAPGPVPVPGPKSHPSASSGKLLLPQFGMVIILISVSAINLFVAL

SEQ ID NO: 761976 - protein, 450 aa, Homo sapiens
FSEEVIPGGLDARSCCSCCRWVRLLPVLIQPEAKRSTLGAKESSDGMLTIVDGNCVGKLGDPIWLVKVCQKEKRKPIFEEKRKMKTGHFEIVTMLLATMILVDIFQVKAEVLDMADNAFDDEYLKCTDRMEIKYVPQLLKEEKASHQQLDTVWENAKAKWAARKTQIFLPMNFKDNHGIALMAYISEAQEQTPFYHLFSEAVKMAGQSREDYIYGFQFKAFHFYLTRALQLLRKPCEASSKTVVYRTSQGTSFTFGGLNQARFGHFTLAYSAKPQAANDQLTVLSIYTCLGVDIENFLDKESERITLIPLNEVFQVSQEGAGNNLILQSINKTCSHYECAFLGGLKTENCIENLEYFQPIYVYNPGEKNQKLEDHSEKNWKLEDHGEKNQKLEDHGVKILEPTQIPAPGPVPVPGPKSHPSASSGKLLLPQFGMVIILISVSAINLFVAL

SEQ ID NO: 761977 - protein, 261 aa, Homo sapiens
MKTGHFEIVTMLLATMILVDIFQVKAEVLDMADNAFDDEYLKCTDRMEIKYVPQLLKEEKASHQQLDTVWENAKAKWAARKTQIFLPMNFKDNHGIALMAYISEAQEQTPFYHLFSEAVKMAGQSREDYIYGFQFKAFHFYLTRALQLLRKPCEASSKTVVYRTSQGTSFTFGGLNQARFGHFTLAYSAKPQAANDQLTVLSIYTCLGVDIENFLDKESERITLIPLNEVFQVSQEGAGNNLILQSINKTCSHYECAFLGD

SEQ ID NO: 761978 - protein, 367 aa, Homo sapiens; identical to SEQ ID NO: 761975

SEQ ID NO: 761979 - protein, 82 aa, Homo sapiens
WKLEDHGEKNQKLEDHGMKIPEPFPLPEDKSQGNINNPTPGPVPVPGPKSHPSASSGKLLLPQFGMVIILISVSAINLFVAL

SEQ ID NO: 761980 - protein, 261 aa, Homo sapiens; identical to SEQ ID NO: 761977

SEQ ID NO: 761981 - protein, 367 aa, Homo sapiens; identical to SEQ ID NO: 761975

SEQ ID NO: 761982 - protein, 367 aa, Homo sapiens; identical to SEQ ID NO: 761975

SEQ ID NO: 761983 - protein, 205 aa, Homo sapiens
MTCFISPSSDSTNEYMDMKPGVSYVVPTKADKRRSVRIGSYIERDVTPAIMEDDELALDLEDLLSFSYQVAKGMAFLASKNCIHRDLAARNILLTHGRITKICDFGLARDIKNDSNYVVKGNARLPVKWMAPESIFNCVYTFESDVWSYGIFLWELFSLGSSPYPGMPVDSKFYKMIKEGFRMLSPEHAPAEMYDIMKTCWDADP

SEQ ID NO: 761984 - protein, 288 aa, Homo sapiens
ASEAEFLFDVTSSPKNWAQRSGGPGKDMNMVKLLGACTIGGPTLVITEYCCYGDLLNFLRRKRDSFICSKQEDHAEAALYKNLLHSKESSCSDSTNEYMDMKPGVSYVVPTKADKRRSVRIGSYIERDVTPAIMEDDELALDLEDLLSFSYQVAKGMAFLASKNCIHRDLAARNILLTHGRITKICDFGLARDIKNDSNYVVKGNARLPVKWMAPESIFNCVYTFESDVWSYGIFLWELFSLGSSPYPGMPVDSKFYKMIKEGFRMLSPEHAPAEMYDIMKTCWDADP

SEQ ID NO: 761985 - protein, 540 aa, Homo sapiens
FLGRGPAAARAAGASGGADPQPEPAGPGGVPALAAAVLGACEPRCAAPCPLPALSRCRGAGSRGSRGGRGAAGSGDAAAAAEWIRKGSFIHKPAHGWLHPDARVLGPGVSYVVRYMGCIEVLRSMRSLDFNTRTQVTREAINRLHEAVPGVRGSWKKKAPNKALASVLGKSNLRFAGMSISIHISTDGLSLSVPATRQVIANHHMPSISFASGGDTDMTDYVAYVAKDPINQRACHILECCEGLAQSIISTVGQAFELRFKQYLHSPPKVALPPERLAGPEESAWGDEEDSLEHNYYNSIPGKEPPLGGLVDSRLALTQPCALTALDQGPSPSLRDACSLPWDVGSTGTAPPGDGYVQADARGPPDHEEHLYVNTQGLDAPEPEDSPKKDLFDMRPFEDALKLHECSVAAGVTAAPLPLEDQWPSPPTRRAPVAPTEEQLRQEPWYHGRMSRRAAERMLRADGDFLVRDSVTNPGQYVLTGMHAGQPKHLLLVDPEGVVRTKDVLFESISHLIDHHLQNGQPIVAAESELHLRGVVSREP

SEQ ID NO: 761986 - protein, 126 aa, Homo sapiens
GGFCEVCKKLVGYLDRNLDFNTRRRWEAINRLHEAVPGVRGSWKKKAPNKALASVLGKSNLRFAGMSISIHISTDGLSLSVPATRQVIANHHMPSISFASGGDTVRPGMGVDLQPCRPPPAARPSH

SEQ ID NO: 761987 - protein, 179 aa, Homo sapiens [sequence omitted]

SEQ ID NO: 761988 - protein, 100 aa, Homo sapiens
TLCPHPLPHLSALLGWAAGNPGGGPRQVQLAPPRPQDMTDYVAYVAKDPINQRACHILECCEGLAQSIISTVGQAFELRFKQYLHSPPKVALPPERIGED

SEQ ID NO: 761989 - protein, 626 aa, Homo sapiens
FLGRGPAAARAAGASGGADPQPEPAGPGGVPALAAAVLGACEPRCAAPCPLPALSRCRGAGSRGSRGGRGAAGSGDAAAAAEWIRKGSFIHKPAHGWLHPDARVLGPGVSYVVRYMGCIEVLRSMRSLDFNTRTQVTSSCHHSGCRQDLDTDPASGSGLLLAAPTPTSDAEPSLWAEARDTLVPGKEGGRGARAGGRASAGCKDARGVGWCPSCTCPVGHSSPREAINRLHEAVPGVRGSWKKKAPNKALASVLGKSNLRFAGMSISIHISTDGLSLSVPATRQVIANHHMPSISFASGGDTDMTDYVAYVAKDPINQRACHILECCEGLAQSIISTVGQAFELRFKQYLHSPPKVALPPERLAGPEESAWGDEEDSLEHNYYNSIPGKEPPLGGLVDSRLALTQPCALTALDQGPSPSLRDACSLPWDVGSTGTAPPGDGYVQADARGPPDHEEHLYVNTQGLDAPEPEDSPKKDLFDMRPFEDALKLHECSVAAGVTAAPLPLEDQWPSPPTRRAPVAPTEEQLRQEPWYHGRMSRRAAERMLRADGDFLVRDSVTNPGQYVLTGMHAGQPKHLLLVDPEGVVRTKDVLFESISHLIDHHLQNGQPIVAAESELHLRGVVSREP

SEQ ID NO: 761990 - protein, 540 aa, Homo sapiens; identical to SEQ ID NO: 761985

SEQ ID NO: 761991 - protein, 238 aa, Homo sapiens
MEPGLWLLFGLTVTSAAGFVPCSQSGDAGRRGVSQAPTAARSEGDCEETVAGPGEETVAGPGEGTVAPTALQGPSPGSPGQEQAAEGAPEHHRSRRCTCFTYKDKECVYYCHLDIIWINTPEQTVPYGLSNYRGSFRGKRSAGPLPGNLQLSHRPHLRCACVGRYDKACLHFCTQTLDVSSNSRTAEKTDKEEEGKVEVKDQQSKQALDLHHPKLMPGSGLALAPSTCPRCLFQEGAP

SEQ ID NO: 761992 - protein, 219 aa, Homo sapiens
MEPGLWLLFGLTVTSAAGFVPCSQSGDAGRRGVSQAPTAARSEGDCEETVAGPGEETVAGPGEGTVAPTALQGPSPGSPGQEQAAEGAPEHHRSRRCTCFTYKDKECVYYCHLDIIWINTPEQTVPYGLSNYRGSFRGKRSAGPLPGNLQLSHRPHLRCACVGRYDKACLHFCTQTLDVSSNSRTAEKTDKEEEGKVRGANRGLCQRRLKSRTNKASRL

SEQ ID NO: 761993 - protein, 238 aa, Homo sapiens; identical to SEQ ID NO: 761991

SEQ ID NO: 761994 - protein, 192 aa, Homo sapiens
MEPGLWLLFGLTVTSAAGFVPCSQSGDAGRRGVSQAPTAARSEGDCEETVAGPGEETVAGPGEGTVAPTALQGPSPGSPGQEQAAEGAPEHHRSRRCTCFTYKDKECVYYCHLDIIWINTPEQTVPYGLSNYRGSFRGKRSAGPLPGNLQLSHRPHLRCACVGRYDKACLHFCTQTLDVSRLKSRTNKASRL

SEQ ID NO: 761995 - protein, 284 aa, Homo sapiens
MCNTPTYCDLGKAAKDVFNKGYGFGMVKIDLKTKSCSGVMEFSTSGHAYTDTGKASGNLETKYKVCNYGLTFTQKWNTDNTLGTEISWENKLAEGLKLTLDTIFVPNTGKKSGKLKASYKRDCFSVGSNVDIDFSGPTIYGWAVLAFEGWLAGYQMSFDTAKSKLSQNNFALGYKAADFQLHTHVNDGTEFGGSIYQKVNEKIETSINLAWTAGSNNTRFGIAAKYMLDCRTSLSAKVNNASLIGLGYTQTLRPGVKLTLSALIDGKNFSAGGHKVGLGFELEA

SEQ ID NO: 761996 - protein, 283 aa, Homo sapiens
MCNTPTYCDLGKAAKDVFNKGYGFGMVKIDLKTKSCSGVMEFSTSGHAYTDTGKASGNLETKYKVCNYGLTFTQKWNTDNTLGTEISWENKLAEGLKLTLDTIFVPNTGKKSGKLKASYKRDCFSVGSNVDIDFSGPTIYGWAVLAFEGWLAGYQMSFDTAKSKLSQNNFALGYKAADFQLHTHVKQMPIMVTHQVINKENFHSYHTTQETSKAPHNTKHHRHHATTRRRNSKSENNREREKKKRETRDARPTLARAQQLSNNREKQSAPNGGGKKTKPDRHP

SEQ ID NO: 761997 - protein, 284 aa, Homo sapiens; identical to SEQ ID NO: 761995

SEQ ID NO: 761998 - protein, 250 aa, Homo sapiens
MFLAYQEFSTSGHAYTDTGKASGNLETKYKVCNYGLTFTQKWNTDNTLGTEISWENKLAEGLKLTLDTIFVPNTGKKSGKLKASYKRDCFSVGSNVDIDFSGPTIYGWAVLAFEGWLAGYQMSFDTAKSKLSQNNFALGYKAADFQLHTHVNDGTEFGGSIYQKVNEKIETSINLAWTAGSNNTRFGIAAKYMLDCRTSLSAKVNNASLIGLGYTQTLRPGVKLTLSALIDGKNFSAGGHKVGLGFELEA

SEQ ID NO: 761999 - protein, 284 aa, Homo sapiens; identical to SEQ ID NO: 761995

SEQ ID NO: 762000 - protein, 228 aa, Homo sapiens
CRVRWRQPRRKASSIHPYSFPGKPGSKPISYISLCRCQCMLWLLAKSWFGLHRKKSGKLKASYKRDCFSVGSNVDIDFSGPTIYGWAVLAFEGWLAGYQMSFDTAKSKLSQNNFALGYKAADFQLHTHVNDGTEFGGSIYQKVNEKIETSINLAWTAGSNNTRFGIAAKYMLDCRTSLSAKVNNASLIGLGYTQTLRPGVKLTLSALIDGKNFSAGGHKVGLGFELEA

SEQ ID NO: 762001 - protein, 284 aa, Homo sapiens; identical to SEQ ID NO: 761995

SEQ ID NO: 762002 - protein, 256 aa, Homo sapiens
MCNTPTYCDLGKAAKDVFNKGYGFGMVKIDLKTKSCSGVMEFSTSGHAYTDTGKASGNLETKYKVCNYGLTFTQKWNTDNTLGTEISWENKLAEGLKLTLDTIFVPNTGKKSGKLKASYKRDCFSVGSNVDIDFSGPTIYGWAVLAFEGWLAGYQMSFDTAKSKLSQNNFALGYKAADFQLHTHVNDGTEFGGSIYQKVNEKIETSINLAWTAGSNNTRFGIAAKYMLDCRTSLSAKVNNASLIGLGYTQTLRPGK

SEQ ID NO: 762003 - protein, 258 aa, Homo sapiens
MCNTPTYCDLGKAAKDVFNKGYGFGMVKIDLKTKSCSGVMEFSTSGHAYTDTGKASGNLETKYKVCNYGLTFTQKWNTDNTLGTEISWENKLAEGLKLTLDTIFVPNTGKKSGKLKASYKRDCFSVGSNVDIDFSGPTIYGWAVLAFEGWLAGYQMSFDTAKSKLSQNNFALGYKAADFQLHTHVNDGTEFGGSIYQKVNEKIETSINLAWTAGSNNTRFGIAAKYMLDCRTSLSVRMCCQIGSALMFVSKFSENVVI

SEQ ID NO: 762004 - protein, 134 aa, Homo sapiens
MCNTPTYCDLGKAAKDVFNKGYGFGMVKIDLKTKSCSGVMEFSTSGHAYTDTGKASGNLETKYKVCNYGLTFTQKWNTDNTLGTEISWENKLAEGLKLTLDTIFVPNTGKKSGKLKASYKRKSRVRKSRVRKSR

SEQ ID NO: 762005 - protein, 124 aa, Homo sapiens
MCNTPTYCDLGKAAKDVFNKGYGFGMVKIDLKTKSCSGVMEFSTSGHAYTDTGKASGNLETKYKVCNYGLTFTQKWNTDNTLGTEISWENKLAEGLKLTLDTIFVPNTGKQEWKGTCRRGREFS

SEQ ID NO: 762006 - protein, 268 aa, Homo sapiens
CVCVCIGFGMVKIDLKTKSCSGVMEFSTSGHAYTDTGKASGNLETKYKVCNYGLTFTQKWNTDNTLGTEISWENKLAEGLKLTLDTIFVPNTGKKSGKLKASYKRDCFSVGSNVDIDFSGPTIYGWAVLAFEGWLAGYQMSFDTAKSKLSQNNFALGYKAADFQLHTHVNDGTEFGGSIYQKVNEKIETSINLAWTAGSNNTRFGIAAKYMLDCRTSLSAKVNNASLIGLGYTQTLRPGVKLTLSALIDGKNFSAGGHKVGLGFELEA

SEQ ID NO: 762007 - protein, 266 aa, Homo sapiens
MCNTPTYCDLGKAAKDVFNKGYGFGMVKIDLTDTGKASGNLETKYKVCNYGLTFTQKWNTDNTLGTEISWENKLAEGLKLTLDTIFVPNTGKKSGKLKASYKRDCFSVGSNVDIDFSGPTIYGWAVLAFEGWLAGYQMSFDTAKSKLSQNNFALGYKAADFQLHTHVNDGTEFGGSIYQKVNEKIETSINLAWTAGSNNTRFGIAAKYMLDCRTSLSAKVNNASLIGLGYTQTLRPGVKLTLSALIDGKNFSAGGHKVGLGFELEA

SEQ ID NO: 762008 - protein, 256 aa, Homo sapiens; identical to SEQ ID NO: 762002

SEQ ID NO: 762009 - protein, 167 aa, Homo sapiens
KQQRRCESAEGNVDIDFSGPTIYGWAVLAFEGWLAGYQMSFDTAKSKLSQNNFALGYKAADFQLHTHVNDGTEFGGSIYQKVNEKIETSINLAWTAGSNNTRFGIAAKYMLDCRTSLSAKVNNASLIGLGYTQTLRPGVKLTLSALIDGKNFSAGGHKVGLGFELEA

SEQ ID NO: 762010 - protein, 284 aa, Homo sapiens; identical to SEQ ID NO: 761995

SEQ ID NO: 762011 - protein, 185 aa, Homo sapiens
MCNTPTYCDLGKAAKDVFNKGYGFGMVKIDLKTKSCSGVMEFSTSGHAYTDTGKASGNLETKYKVCNYGLTFTQKWNTDNTLGTEISWENKLAEGLKLTLDTIFVPNTGKKSGKLKASYKRDCFSVGSNVDIDFSGPTIYGWAVLAFEGWLAGYQMSFDTAKSKLSQNNFALGYKAADFQLHTHV

SEQ ID NO: 762012 - protein, 1998 aa, Homo sapiens
MSTNLMKRTRLCNLLKSLVVQNRIPQCFSGYKKKQVMLLGVLNPFGSISCCFGTIINICYKKYHLYTHSDAEQELGPPPSVDEAANTLMTRLGFLLGEKVTEVQPGDQYSMEVQDENQTSAITQRISPCSTLTSSTASPPASSPCSTLPPISTNATAKDCSYGAVTSPTSTLESRDSGIIATLTSYSENVERTKYAGESSKELGSGGNIKPWQSQKSSMDSCLYRVDENMTASTYSLNKIPERNLETVLSQSVQSIPLYLMPRPNSVAATSSAHLEDLAYLDEQRHTPLRTSLRMPRQSMGGARTQQDLRVRFAPYRPPDISLKPLLFEVPSITTESVFVGRDWVFHEIDAQLQSSNASVNQGVVIVGNIGFGKTAIISRLVALSCHGTRMRQIASDSPHASPKHVDANRELPLTQPPSAHSSITSGSCPGTPEMRRRQEEAMRRLASQVVAYHYCQADNAYTCLVPEFVHNVAALLCRSPQLTAYREQLLREPHLQSMLSLRSCVQDPMASFRRGVLEPLENLHKERKIPDEDFIILIDGLNEAEFHKPDYGDTIVSFLSKMIGKFPSWLKLIVTVRTSLQEITKLLPFHRIFLDRLEENEAIDQDLQAYILHRIHSSSEIQNNISLNGKMDNTTFGKLSSHLKTLSQGSYLYLKLTFDLIEKGYLVLKSSSYKVVPVSLSEVYLLQCNMKFPTQSSFDRVMPLLNVAVASLHPLTDEHIFQAINAGSIEGTLEWEDFQQRMENLSMFLIKRRDMTRMFVHPSFREWLIWREEGEKTKFLCDPRSGHTLLAFWFSRQEGKLNRQQTIELGHHILKAHIFKGLSKKVGVSSSILQGLWISYSTEGLSMALASLRNLYTPNIKVSRLLILGGANINYRTEVLNNAPILCVQSHLGYTEMVALLLEFGANVDASSESGLTPLGYAAAAGYLSIVVLLCKKRAKVDHLDKNGQCALVHAALRGHLEVVKFLIQCDWTMAGQQQGVFKKSHAIQQALIAAASMGYTEIVSYLLDLPEKDEEEVERAQINSFDSLWGETALTAAAGRGKLEVCRLLLEQGAAVAQPNRRGAVPLFSTVRQGHWQIVDLLLTHGADVNMADKQGRTPLMMAASEGHLGTVDFLLAQGASIALMDKEGLTALSWACLKGHLSVVRSLVDNGAATDHADKNGRTPLDLAAFYGDAEVVQFLVDHGAMIEHVDYSGMRPLDRAVGCRNTSVVVTLLKKGAKIGCQTLPSRPRGPATWAMATSKPDIMIILLSKLMEEGDMFYKKGKVKEAAQRYQYALKKFPREGFGEDLKTFRELKVSLLLNLSRCRRKMNDFGMAEEFATKALELKPKSYEAYYARARAKRSSRQFAAALEDLNEAIKLCPNNREIQRLLLRVEEECRQMQQPQQPPPPPQPQQQLPEEAEPEPQHEDIYSVQDIFEEEYLEQDVENVSIGLQTEARPSQGLPVIQSPPSSPPHRDSAYISSSPLGSHQVFDFRSSSSVGSPTRQTYQSTSPALSPTHQNSHYRPSPPHTSPAHQGGSYRFSPPPVGGQGKEYPSPPPSPLRRGPQYRASPPAESMSVYRSQSGSPVRYQQETSVSQLPGRPKSPLSKMAQRPYQMPQLPVAVPQQGLRLQPAKAQIVRSNQPSPAVHSSTVIPTGAYGQVAHSMASKYQSSQGDIGVSQSRLVYQGSIGGIVGDGRPVQHVQASLSAGAICQHGGLTKEDLPQRPSSAYRGGVRYSQTPQIGRSQSASYYPVCHSKLDLERSSSQLGSPDVSHLIRRPISVNPNEIKPHPPTPRPLLHSQSVGLRFSPSSNSISSTSNLTPTFRPSSSIQQMEIPLKPAYERSCDELSPVSPTQGGYPSEPTRSRTTPFMGIIDKTARTQQYPHLHQQNRTWAVSSVDTVLSPTSPGNLPQPESFSPPSSISNIAFYNKTNNAQNGHLLEDDYYSPHGMLANGSRGDLLERVSQASSYPDVKVARTLPVAQAYQDNLYRQLSRDSRQGQTSPIKPKRPFVESNV

SEQ ID NO: 762013 - protein, 1076 aa, Homo sapiens
MSTNLMKRTRLCNLLKSLVVQNRIPQCFSGYKKKQVMLLGVLNPFGSISCCFGTIINICYKKYHLYTHSDAEQELGPPPSVDEAANTLMTRLGFLLGEKVTEVQPGDQYSMEVQDENQTSAITQRISPCSTLTSSTASPPASSPCSTLPPISTNATAKDCSYGAVTSPTSTLESRDSGIIATLTSYSENVERTKYAGESSKELGSGGNIKPWQSQKSSMDSCLYRVDENMTASTYSLNKIPERNLETVLSQSVQSIPLYLMPRPNSVAATSSAHLEDLAYLDEQRHTPLRTSLRMPRQSMGGARTQQDLRVRFAPYRPPDISLKPLLFEVPSITTESVFVGRDWVFHEIDAQLQSSNASVNQGVVIVGNIGFGKTAIISRLVALSCHGTRMRQIASDSPHASPKHVDANRELPLTQPPSAHSSITSGSCPGTPEMRRRQEEAMRRLASQVVAYHYCQADNAYTCLVPEFVHNVAALLCRSPQLTAYREQLLREPHLQSMLSLRSCVQDPMASFRRGVLEPLENLHKERKIPDEDFIILIDGLNEAEFHKPDYGDTIVSFLSKMIGKFPSWLKLIVTVRTSLQEITKLLPFHRIFLDRLEENEAIDQDLQAYILHRIHSSSEIQNNISLNGKMDNTTFGKLSSHLKTLSQGSYLYLKLTFDLIEKGYLVLKSSSYKVVPVSLSEVYLLQCNMKFPTQSSFDRVMPLLNVAVASLHPLTDEHIFQAINAGSIEGTLEWEDFQQRMENLSMFLIKRRDMTRMFVHPSFREWLIWREEGEKTKFLCDPRSGHTLLAFWFSRQEGKLNRQQTIELGHHILKAHIFKGLSKKVGVSSSILQGLWISYSTEGLSMALASLRNLYTPNIKVSRLLILGGANINYRTEVLNNAPILCVQSHLGYTEMVALLLEFGANVDASSESGLTPLGYAAAAGYLSIVVLLCKKRAKVDHLDKNGQCALVHAALRGHLEVVKFLIQCDWTMAGQQQGVFKKSHAIQQALIAAASMGYTEIVSYLLDLPEKDEEEVERAQINSFDSLWGETGTSHGRCPQECVVFVWTLESHPLIFSLAYIWQSSVSGFCNAD

SEQ ID NO: 762014 - protein, 1094 aa, Homo sapiens
MSTNLMKRTRLCNLLKSLVVQNRIPQCFSGYKKKQVMLLGVLNPFGSISCCFGTIINICYKKYHLYTHSDAEQELGPPPSVDEAANTLMTRLGFLLGEKVTEVQPGDQYSMEVQDENQTSAITQRISPCSTLTSSTASPPASSPCSTLPPISTNATAKDCSYGAVTSPTSTLESRDSGIIATLTSYSENVERTKYAGESSKELGSGGNIKPWQSQKSSMDSCLYRVDENMTASTYSLNKIPERNLETVLSQSVQSIPLYLMPRPNSVAATSSAHLEDLAYLDEQRHTPLRTSLRMPRQSMGGARTQQDLRVRFAPYRPPDISLKPLLFEVPSITTESVFVGRDWVFHEIDAQLQSSNASVNQGVVIVGNIGFGKTAIISRLVALSCHGTRMRQIASDSPHASPKHVDANRELPLTQPPSAHSSITSGSCPGTPEMRRRQEEAMRRLASQVVAYHYCQADNAYTCLVPEFVHNVAALLCRSPQLTAYREQLLREPHLQSMLSLRSCVQDPMASFRRGVLEPLENLHKERKIPDEDFIILIDGLNEAEFHKPDYGDTIVSFLSKMIGKFPSWLKLIVTVRTSLQEITKLLPFHRIFLDRLEENEAIDQDLQAYILHRIHSSSEIQNNISLNGKMDNTTFGKLSSHLKTLSQGSYLYLKLTFDLIEKGYLVLKSSSYKVVPVSLSEVYLLQCNMKFPTQSSFDRVMPLLNVAVASLHPLTDEHIFQAINAGSIEGTLEWEDFQQRMENLSMFLIKRRDMTRMFVHPSFREWLIWREEGEKTKFLCDPRSGHTLLAFWFSRQEGKLNRQQTIELGHHILKAHIFKGLSKKVGVSSSILQGLWISYSTEGLSMALASLRNLYTPNIKVSRLLILGGANINYRTEVLNNAPILCVQSHLGYTEMVALLLEFGANVDASSESGLTPLGYAAAAGYLSIVVLLCKKRAKVDHLDKNGQCALVHAALRGHLEVVKFLIQCDWTMAGQQQGVFKKSHAIQQALIAAASMGYTEIVSYLLDLPEKDEEEVERAQINSFDSLWGETALTAAAGRGKLEVCRLLLEQGAAVAQPNRRGAVPLFSTVRQGHWQVSRATTSSPSGRTEF

SEQ ID NO: 762015 - protein, 1008 aa, Homo sapiens
MSTNLMKRTRLCNLLKSLVVQNRIPQCFSGYKKKQVMLLGVLNPFGSISCCFGTIINICYKKYHLYTHSDAEQELGPPPSVDEAANTLMTRLGFLLGEKVTEVQPGDQYSMEVQDENQTSAITQRISPCSTLTSSTASPPASSPCSTLPPISTNATAKDCSYGAVTSPTSTLESRDSGIIATLTSYSENVERTKYAGESSKELGSGGNIKPWQSQKSSMDSCLYRVDENMTASTYSLNKIPERNLETVLSQSVQSIPLYLMPRPNSVAATSSAHLEDLAYLDEQRHTPLRTSLRMPRQSMGGARTQQDLRVRFAPYRPPDISLKPLLFEVPSITTESVFVGRDWVFHEIDAQLQSSNASVNQGVVIVGNIGFGKTAIISRLVALSCHGTRMRQIASDSPHASPKHVDANRELPLTQPPSAHSSITSGSCPGTPEMRRRQEEAMRRLASQVVAYHYCQADNAYTCLVPEFVHNVAALLCRSPQLTAYREQLLREPHLQSMLSLRSCVQDPMASFRRGVLEPLENLHKERKIPDEDFIILIDGLNEAEFHKPDYGDTIVSFLSKMIGKFPSWLKLIVTVRTSLQEITKLLPFHRIFLDRLEENEAIDQDLQAYILHRIHSSSEIQNNISLNGKMDNTTFGKLSSHLKTLSQGSYLYLKLTFDLIEKGYLVLKSSSYKVVPVSLSEVYLLQCNMKFPTQSSFDRVMPLLNVAVASLHPLTDEHIFQAINAGSIEGTLEWEDFQQRMENLSMFLIKRRDMTRMFVHPSFREWLIWREEGEKTKFLCDPRSGHTLLAFWFSRQEGKLNRQQTIELGHHILKAHIFKGLSKKVGVSSSILQGLWISYSTEGLSMALASLRNLYTPNIKVSRLLILGGANINYRTEVLNNAPILCVQSHLGYTEMVALLLEFGANVDASSESGLTPLGYAAAAGYLSIVVLLCKKRAKVDHLDKNGQCALVHAALRGHLEVVKFLIQCDWTMAGQQQGVFKKSHAIQQALIAAASMGYTEVRSRQ

SEQ ID NO: 762016 - protein, 969 aa, Homo sapiens
MSTNLMKRTRLCNLLKSLVVQNRIPQCFSGYKKKQVMLLGVLNPFGSISCCFGTIINICYKKYHLYTHSDAEQELGPPPSVDEAANTLMTRLGFLLGEKVTEVQPGDQYSMEVQDENQTSAITQRISPCSTLTSSTASPPASSPCSTLPPISTNATAKDCSYGAVTSPTSTLESRDSGIIATLTSYSENVERTKYAGESSKELGSGGNIKPWQSQKSSMDSCLYRVDENMTASTYSLNKIPERNLETVLSQSVQSIPLYLMPRPNSVAATSSAHLEDLAYLDEQRHTPLRTSLRMPRQSMGGARTQQDLRVRFAPYRPPDISLKPLLFEVPSITTESVFVGRDWVFHEIDAQLQSSNASVNQGVVIVGNIGFGKTAIISRLVALSCHGTRMRQIASDSPHASPKHVDANRELPLTQPPSAHSSITSGSCPGTPEMRRRQEEAMRRLASQVVAYHYCQADNAYTCLVPEFVHNVAALLCRSPQLTAYREQLLREPHLQSMLSLRSCVQDPMASFRRGVLEPLENLHKERKIPDEDFIILIDGLNEAEFHKPDYGDTIVSFLSKMIGKFPSWLKLIVTVRTSLQEITKLLPFHRIFLDRLEENEAIDQDLQAYILHRIHSSSEIQNNISLNGKMDNTTFGKLSSHLKTLSQGSYLYLKLTFDLIEKGYLVLKSSSYKVVPVSLSEVYLLQCNMKFPTQSSFDRVMPLLNVAVASLHPLTDEHIFQAINAGSIEGTLEWEDFQQRMENLSMFLIKRRDMTRMFVHPSFREWLIWREEGEKTKFLCDPRSGHTLLAFWFSRQEGKLNRQQTIELGHHILKAHIFKGLSKKVGVSSSILQGLWISYSTEGLSMALASLRNLYTPNIKVSRLLILGGANINYRTEVLNNAPILCVQSHLGYTEMVALLLEFGANVDASSESGLTPLGYAAAAGYLSIVVLLCKKRAKVLAAQLCCFSSLFLYFRCILFLISSVTS

SEQ ID NO: 762017 - protein, 1496 aa, Homo sapiens
  misc_feature (1413)..(1413): Xaa can be any naturally occurring amino acid
  misc_feature (1421)..(1421): Xaa can be any naturally occurring amino acid
  misc_feature (1447)..(1447): Xaa can be any naturally occurring amino acid
  misc_feature (1494)..(1494): Xaa can be any naturally occurring amino acid
MSTNLMKRTRLCNLLKSLVVQNRIPQCFSGYKKKQVMLLGVLNPFGSISCCFGTIINICYKKYHLYTHSDAEQELGPPPSVDEAANTLMTRLGFLLGEKVTEVQPGDQYSMEVQDENQTSAITQRISPCSTLTSSTASPPASSPCSTLPPISTNATAKDCSYGAVTSPTSTLESRDSGIIATLTSYSENVERTKYAGESSKELGSGGNIKPWQSQKSSMDSCLYRVDENMTASTYSLNKIPERNLETVLSQSVQSIPLYLMPRPNSVAATSSAHLEDLAYLDEQRHTPLRTSLRMPRQSMGGARTQQDLRVRFAPYRPPDISLKPLLFEVPSITTESVFVGRDWVFHEIDAQLQSSNASVNQGVVIVGNIGFGKTAIISRLVALSCHGTRMRQIASDSPHASPKHVDANRELPLTQPPSAHSSITSGSCPGTPEMRRRQEEAMRRLASQVVAYHYCQADNAYTCLVPEFVHNVAALLCRSPQLTAYREQLLREPHLQSMLSLRSCVQDPMASFRRGVLEPLENLHKERKIPDEDFIILIDGLNEAEFHKPDYGDTIVSFLSKMIGKFPSWLKLIVTVRTSLQEITKLLPFHRIFLDRLEENEAIDQDLQAYILHRIHSSSEIQNNISLNGKMDNTTFGKLSSHLKTLSQGSYLYLKLTFDLIEKGYLVLKSSSYKVVPVSLSEVYLLQCNMKFPTQSSFDRVMPLLNVAVASLHPLTDEHIFQAINAGSIEGTLEWEDFQQRMENLSMFLIKRRDMTRMFVHPSFREWLIWREEGEKTKFLCDPRSGHTLLAFWFSRQEGKLNRQQTIELGHHILKAHIFKGLSKKVGVSSSILQGLWISYSTEGLSMALASLRNLYTPNIKVSRLLILGGANINYRTEVLNNAPILCVQSHLGYTEMVALLLEFGANVDASSESGLTPLGYAAAAGYLSIVVLLCKKRAKVDHLDKNGQCALVHAALRGHLEVVKFLIQCDWTMAGQQQGVFKKSHAIQQALIAAASMGYTEIVSYLLDLPEKDEEEVERAQINSFDSLWGETALTAAAGRGKLEVCRLLLEQGAAVAQPNRRGAVPLFSTVRQGHWQIVDLLLTHGADVNMADKQGRTPLMMAASEGHLGTVDFLLAQGASIALMDKEGLTALSWACLKGHLSVVRSLVDNGAATDHADKNGRTPLDLAAFYGDAEVVQFLVDHGAMIEHVDYSGMRPLDRAVGCRNTSVVVTLLKKGAKIGCQTLPSRPRGPATWAMATSKPDIMIILLSKLMEEGDMFYKKGKVKEAAQRYQYALKKFPREGFGEDLKTFRELKVSLLLNLSRCRRKMNDFGMAEEFATKALELKPKSYEAYYARARAKRSSRQFAAALEDLNEAIKLCPNNREIQRLLLRVEEECRQMQQPQQPPPPPQPAQEVVVCMRRDTALETAXNAKAYKRXTPTSLARGPHHLRSWRSSRRSSRSAXQAGKHQEYLNSILQHAKDFKEYHRSVTGKIQKLTKAVATYHANTERXRK

SEQ ID NO: 762018 - protein, 1101 aa, Homo sapiens
  misc_feature (332)..(332): Xaa can be any naturally occurring amino acid
MVALLLEFGANVDASSESGLTPLGYAAAAGYLSIVVLLCKKRAKVDHLDKNGQCALVHAALRGHLEVVKFLIQCDWTMAGQQQGVFKKSHAIQQALIAAASMGYTEIVSYLLDLPEKDEEEVERAQINSFDSLWGETALTAAAGRGKLEVCRLLLEQGAAVAQPNRRGAVPLFSTVRQGHWQIVDLLLTHGADVNMADKQGRTPLMMAASEGHLGTVDFLLAQGASIALMDKEGLTALSWACLKGHLSVVRSLVDNGAATDHADKNGRTPLDLAAFYGDAEVVQFLVDHGAMIEHVDYSGMRPLDRAVGCPNTSVVVTLLKKRSQDRLSDVXSRPRGPATWAMAPSKPDIMIILLSKLMKEGDMFYKKGKVKEAAQRYQYALKKFPREGFGEDLKPFRELKVSLLLNLSRCRRKMNDFGMAEEFATKALELKPKSYEAYYARARAKRSSRQFAAALEDLNEAIKLCPNNREIQRLLLRVEEECRQMQQPQQPPPPPQPQQQLPEEAEPEPQHEDIYSVQDIFEEEYLEQDVENVSIGLQTEARPSQGLPVIQSPPSSPPHRDSAYISSSPLGSHQVFDFRSSSSVGSPTRQTYQSTSPALSPTHQNSHYRPSPPHTSPAHQGGSYRFSPPPVGGQGKEYPSPPPSPLRRGPQYRASPPAESMSVYRSQSGSPVRYQQETSVSQLPGRPKSPLSKMAQRPYQMPQLPVAVPQQGLRLQPAKAQIVRSNQPSPAVHSSTVIPTGAYGQVAHSMASKYQSSQGDIGVSQSRLVYQGSIGGIVGDGRPVQHVQASLSAGAICQHGGLTKEDLPQRPSSAYRGGVRYSQTPQIGRSQSASYYPVCHSKLDLERSSSQLGSPDVSHLIRRPISVNPNEIKPHPPTPRPLLHSQSVGLRFSPSSNSISSTSNLTPTFRPSSSIQQMEIPLKPAYERSCDELSPVSPTQGGYPSEPTRSRTTPFMGIIDKTARTQQYPHLHQQNRTWAVSSVDTVLSPTSPGNLPQPESFSPPSSISNIAFYNKTNNAQNGHLLEDDYYSPHGMLANGSRGDLLERVSQASSYPDVKVARTLPVAQAYQDNLYRQLSRDSRQGQTSPIKPKRPFVESNV

SEQ ID NO: 762019 - protein, 106 aa, Homo sapiens
EIFFFNNKKNNKEQTDQQNKCRTNLALSHGSTTNKHSSLNLVESQDLVVIGLLEDQMRAFIKPFFIKVLPIAFKTAAIIMENNNYFQKGYSPFYPFLCLCKALYRI

SEQ ID NO: 762020 - protein, 438 aa, Homo sapiens
MSLTVVSMACVGFFLLQGAWPLMGGQDKPFLSARPSTVVPRGGHVALQCHYRRGFNNFMLYKEDRSHVPIFHGRIFQESFIMGPVTPAHAGTYRCRGSRPHSLTGWSAPSNPLVIMVTGNHRKPSLLAHPGPLLKSGETVILQCWSDVMFEHFFLHREGISEDPSRLVGQIHDGVSKANFSIGPLMPVLAGTYRCYGSVPHSPYQLSAPSDPLDIVITGLYEKPSLSAQPGPTVQAGENVTLSCSSWSSYDIYHLSREGEAHERRLRAVPKVNRTFQADFPLGPATHGGTYRCFGSFRALPCVWSNSSDPLLVSVTGICRHLHVLIGTSVVIFLFILLLFFLLYRWCSNKKNAAVMDQEPAGDRTVNRQDSDEQDPQEVTYAQLDHCVFIQRKISRPSQRPKTPLTDTSVYTELPNAEPRSKVVSCPRAPQSGLEGVF

SEQ ID NO: 762021 - protein, 426 aa, Homo sapiens
MSLTVVSMACVGFFLLQGAWPLMGGQDKPFLSARPSTVVPRGGHVALQCHYRRGFNNFMLYKEDRSHVPIFHGRIFQESFIMGPVTPAHAGTYRCRGSRPHSLTGWSAPSNPLVIMVTGNHRKPSLLAHPGPLLKSGETVILQCWSDVMFEHFFLHREGISEDPSRLVGQIHDGVSKANFSIGPLMPVLAGTYRCYGSVPHSPTVQAGENVTLSCSSWSSYDIYHLSREGEAHERRLRAVPKVNRTFQADFPLGPATHGGTYRCFGSFRALPCVWSNSSDPLLVSVTGNPSSSWPSPTEPSSKSGICRHLHVLIGTSVVIFLFILLLFFLLYRWCSNKKNAAVMDQEPAGDRTVNRQDSDEQDPQEVTYAQLDHCVFIQRKISRPSQRPKTPLTDTSVYTELPNAEPRSKVVSCPRAPQSGLEGVF

SEQ ID NO: 762022 - protein, 466 aa, Homo sapiens
GARPPVCTGSTMSLTVVSMACVGFFLLQGAWPLMGGQDKPFLSARPSTVVPRGGHVALQCHYRRGFNNFMLYKEDRSHVPIFHGRIFQESFIMGPVTPAHAGTYRCRGSRPHSLTGWSAPSNPLVIMVTGNHRKPSLLAHPGPLLKSGETVILQCWSDVMFEHFFLHREGISEDPSRLVGQIHDGVSKANFSIGPLMPVLAGTYRCYGSVPHSPYQLSAPSDPLDIVITGLYEKPSLSAQPGPTVQAGENVTLSCSSWSSYDIYHLSREGEAHERRLRAVPKVNRTFQADFPLGPATHGGTYRCFGSFRALPCVWSNSSDPLLVSVTGNPSSSWPSPTEPSSKSGICRHLHVLIGTSVVIFLFILLLFFLLYRWCSNKKNAAVMDQEPAGDRTVNRQDSDEQDPQEVTYAQLDHCVFIQRKISRPSQRPKTPLTDTSVYTELPNAEPRSKVVSCPRAPQSGLEGVF

SEQ ID NO: 762023 - protein, 73 aa, Homo sapiens
VLCNSKLPCEVGALFSIIPIGNGGPGQFHNKAMWPGSLCGLHPDSILPAKSVGVSPLLLPALFTGGPHCPGVL

SEQ ID NO: 762024 - protein, 222 aa, Homo sapiens
PLHLPGLPGPSLAPSFLWRELWLGGEWGPLNIPARKGDRRCSDGLVREVVPQSPLSSLAPQIVYFTATFPYVVLVVLLVLGVLLPGALDSIIYYLKPDWSKLGSPQPLGSYNRFNNNCYNGTSFFAGFVVFSILGFMAAEQGMHISKVAESEEISVALCCALRFVIDLSMVTDGGMYVFQLFDYYSASGTTLLWQAFWECVVVAWVYGADRFTDDIACMIGY

SEQ ID NO: 762025 - protein, 97 aa, Homo sapiens
PLHLPGLPGPSLAPSFLWRELWLGGEWGPLNIPARKGDRRCSEWACEGGGAAVPAEQPGPPDRVLHCYIPLRGPGRAACAWSAAAWRPGQHHLLSQA

SEQ ID NO: 762026 - protein, 230 aa, Homo sapiens
MKLIVGIGGMTNGGKTTLTNSLLRALPNCCVIHQDDFFKPQDQIAVGEDGFKQWDVLESLDMEAMLDTVQAWLSSPQKFARAHGVSVQPEASDTHILLLEGFLLYSYKPLVDLYSRRYFLTVPYEECKWRRSTRNYTVPDPPGLFDGHVWPMYQKYRQEMEANGVEVVYLDGMKSREELFREVLEDIQNSLLNRSQESAPSPARPARTQGPGRGCGHRTARPAASQQDSM

SEQ ID NO: 762027 - protein, 173 aa, Homo sapiens
  misc_feature (172)..(172): Xaa can be any naturally occurring amino acid
MKLIVGIGGMTNGGKTTLTNSLLRALPNCCVIHQDDFFKPQDQIAVGEDGFKQWDVLESLDMEAMLDTVQAWLSSPQKFARAHGVSVQPEASDTHILLLEGFLLYSYKPLVDLYSRRYFLTVPYEECKWRRSTRNYTVPDPPGLFDGHVWPMYQKYRQEMEANGVEVVYLEXH

SEQ ID NO: 762028 - protein, 186 aa, Homo sapiens
MKLIVGIGGMTNGGKTTLTNSLLRALPNCCVIHQDDFFKPQDQIAVGEDGFKQWDVLESLDMEAMLDTVQAWLSSPQKFARAHGVSVQPEASDTHILLLEGFLLYSYKYQKYRQEMEANGVEVVYLDGMKSREELFREVLEDIQNSLLNRSQESAPSPARPARTQGPGRGCGHRTARPAASQQDSM

SEQ ID NO: 762029 - protein, 532 aa, Homo sapiens
MPQLYIYIRLLGAYLFIISRVQGQNLDSMLHGTGMKSDSDQKKSENGVTLAPEDTLPFLKCYCSGHCPDDAINNTCITNGHCFAIIEEDDQGETTLASGCMKYEGSDFQCKDSPKAQLRRTIECCRTNLCNQYLQPTLPPVVIGPFFDGSIRWLVLLISMAVCIIAMIIFSSCFCYKHYCKSISSRRRYNRDLEQDEAFIPVGESLKDLIDQSQSSGSGSGLPLLVQRTIAKQIQMVRQVGKGRYGEVWMGKWRGEKVAVKVFFTTEEASWFRETEIYQTVLMRHENILGFIAADIKGTGSWTQLYLITDYHENGSLYDFLKCATLDTRALLKLAYSAACGLCHLHTEIYGTQGKPAIAHRDLKSKNILIKKNGSCCIADLGLAVKFNSDTNEVDVPLNTRVGTKRYMAPEVLDESLNKNHFQPYIMADIYSFGLIIWEMARRCITGGIVEEYQLPYYNMVPSDPSYEDMREVVCVKRLRPIVSNRWNSDECLRAVLKLMSECWAHNPASRLTALRIKKTLAKMVESQDVKI

SEQ ID NO: 762030 - protein, 255 aa, Homo sapiens
MITEPFKLINWTGFIAADIKGTGSWTQLYLITDYHENGSLYDFLKCATLDTRALLKLAYSAACGLCHLHTEIYGTQGKPAIAHRDLKSKNILIKKNGSCCIADLGLAVKFNSDTNEVDVPLNTRVGTKRYMAPEVLDESLNKNHFQPYIMADIYSFGLIIWEMARRCITGGIVEEYQLPYYNMVPSDPSYEDMREVVCVKRLRPIVSNRWNSDECLRAVLKLMSECWAHNPASRLTALRIKKTLAKMVESQDVKI

SEQ ID NO: 762031 - protein, 532 aa, Homo sapiens; identical to SEQ ID NO: 762029

SEQ ID NO: 762032 - protein, 97 aa, Homo sapiens
TIFVPMFSHSLIGIVEEYQLPYYNMVPSDPSYEDMREVVCVKRLRPIVSNRWNSDECLRAVLKLMSECWAHNPASRLTALRIKKTLAKMVESQDVKI

SEQ ID NO: 762033 - protein, 532 aa, Homo sapiens; identical to SEQ ID NO: 762029

SEQ ID NO: 762034 - protein, 532 aa, Homo sapiens; identical to SEQ ID NO: 762029

SEQ ID NO: 762035 - protein, 532 aa, Homo sapiens; identical to SEQ ID NO: 762029

SEQ ID NO: 762036 - protein, 82 aa, Homo sapiens
MEPPSPSPTHLSCIFFLLITVSPLEASSTRARVFPCLPLYAECPEQSLAQGKEKSHPGGGGERPGLAGQGEPDHPAGARDGR

SEQ ID NO: 762037 - protein, 396 aa, Homo sapiens
MGERKGVNKYYPPDFNPEKHGSLNRYHNSHPLRERARKLSQGILIIRFEMPYNIWCDGCKNHIGMGVRYNAEKKKVGNYYTTPIYRFRMKCHLCVNYIEMQTDPANCDYVIVSGAQRKEERWDMADNEQVLTTEHEKKQKLETDAMFRLEHGEADRSTLKKALPTLSHIQEAQSAWKDDFALNSMLRRRFREKKKAIQEEEERDQALQAKASLTIPLVPETEDDRKLAALLKFHTLDSYEDKQKLKRTEIISRSWFPSAPGSASSSKVSGVLKKLAQSRRTALATSPITVGDLGIVRRRSRDVPESPQHAADTPKSGEPRVPEEAAQDRPMSPGDCPPETTETPKCSSPRGQEGSRQDKPLSPAGSSQEAADTPDTRHPCSLGSSLVADYSDSESE

SEQ ID NO: 762038 - protein, 426 aa, Homo sapiens
MGERKGVNKYYPPDFNPEKHGSLNRYHNSHPLRERARKLSQGILIIRFEMPYNIWCDGCKNHIGMGVRYNAEKKKVGNYYTTPIYRFRMKCHLCVNYIEMQTDPANCDYVIVSGAQRKEERWDMADNEQVLTTGERHPLTCLGALALSLRWGPQSPAELLIVAEHEKKQKLETDAMFRLEHGEADRSTLKKALPTLSHIQEAQSAWKDDFALNSMLRRRFREKKKAIQEEEERDQALQAKASLTIPLVPETEDDRKLAALLKFHTLDSYEDKQKLKRTEIISRSWFPSAPGSASSSKVSGVLKKLAQSRRTALATSPITVGDLGIVRRRSRDVPESPQHAADTPKSGEPRVPEEAAQDRPMSPGDCPPETTETPKCSSPRGQEGSRQDKPLSPAGSSQEAADTPDTRHPCSLGSSLVADYSDSESE

SEQ ID NO: 762039 - protein, 396 aa, Homo sapiens; identical to SEQ ID NO: 762037

SEQ ID NO: 762040 - protein, 396 aa, Homo sapiens; identical to SEQ ID NO: 762037

SEQ ID NO: 762041 - protein, 396 aa, Homo sapiens; identical to SEQ ID NO: 762037

SEQ ID NO: 762042 - protein, 396 aa, Homo sapiens; identical to SEQ ID NO: 762037

SEQ ID NO: 762043 - protein, 159 aa, Homo sapiens
MGERKGVNKYYPPDFNPEKHGSLNRYHNSHPLRERARKLSQGILIIRFEMPYNIWCDGCKNHIGMGVRYNAEKKKVGNYYTTPIYRFRMKCHLCVNYIEMQTDPANCDYVIVSGAQRKEERWDMADNEQVLTTGERHPLTCLGALALSLRWGPQSPAEL

SEQ ID NO: 762044 - protein, 479 aa, Homo sapiens
TPASQNAWRIVLQPISVELLPRPASRRRPGGAERAPRFTALSARTSGHGQGVTSGGGQGERKGVNKYYPPDFNPEKHGSLNRYHNSHPLRERARKLSQGILIIRFEMPYNIWCDGCKNHIGMGVRYNAEKKKVGNYYTTPIYRFRMKCHLCVNYIEMQTDPANCDYVIVSGAQRKEERWDMADNEQVLTTEHEKKQKLETDAMFRLEHGEADRSTLKKALPTLSHIQEAQSAWKDDFALNSMLRRRFRRPAPPGQGFFPACHCMPSVQNKAKHKEKKKAIQEEEERDQALQAKASLTIPLVPETEDDRKLAALLKFHTLDSYEDKQKLKRTEIISRSWFPSAPGSASSSKVSGVLKKLAQSRRTALATSPITVGDLGIVRRRSRDVPESPQHAADTPKSGEPRVPEEAAQDRPMSPGDCPPETTETPKCSSPRGQEGSRQDKPLSPAGSSQEAADTPDTRHPCSLGSSLVADYSDSESE

SEQ ID NO: 762045 - protein, 66 aa, Homo sapiens
RLGAGFNQRRLNPLPGSSPSWELGSEGAKRDKKTSLGAHVVLSALGRALEKTIAFQGSSLPQREGN

SEQ ID NO: 762046 - protein, 447 aa, Homo sapiens
MGERKGVNKYYPPDFNPEKHGSLNRYHNSHPLRERARKLSQGILIIRFEMPYNIWCDGCKNHIGMGVRYNAEKKKVGNYYTTPIYRFRMKCHLCVNYIEMQTDPANCDYVIVSGAQRKEERWDMADNEQVLTTEHEKKQKLETDAMFRLEHGEADRSTLKKALPTLSHIQEAQSAWKDDFALNSMLRRRFREKKKAIQEEEERDQALQAKASLTIPLVPETEDDRKLAALLKFHTLDCAEEARGKRGQGGSELPGDGGSSAMSGLWSTRGQFWTPSPAAPEMSSPLLYAYEDKQKLKRTEIISRSWFPSAPGSASSSKVSGVLKKLAQSRRTALATSPITVGDLGIVRRRSRDVPESPQHAADTPKSGEPRVPEEAAQDRPMSPGDCPPETTETPKCSSPRGQEGSRQDKPLSPAGSSQEAADTPDTRHPCSLGSSLVADYSDSESE

SEQ ID NO: 762047 - protein, 396 aa, Homo sapiens; identical to SEQ ID NO: 762037

SEQ ID NO: 762048 - protein, 396 aa, Homo sapiens; identical to SEQ ID NO: 762037

SEQ ID NO: 762049 - protein, 453 aa, Homo sapiens
TPASQNAWRIVLQPISVELLPRPASRRRPGGAERAPRFTALSARTSGHGQGVTSGGGQGERKGVNKYYPPDFNPEKHGSLNRYHNSHPLRERARKLSQGILIIRFEMPYNIWCDGCKNHIGMGVRYNAEKKKVGNYYTTPIYRFRMKCHLCVNYIEMQTDPANCDYVIVSGAQRKEERWDMADNEQVLTTEHEKKQKLETDAMFRLEHGEADRSTLKKALPTLSHIQEAQSAWKDDFALNSMLRRRFREKKKAIQEEEERDQALQAKASLTIPLVPETEDDRKLAALLKFHTLDSYEDKQKLKRTEIISRSWFPSAPGSASSSKVSGVLKKLAQSRRTALATSPITVGDLGIVRRRSRDVPESPQHAADTPKSGEPRVPEEAAQDRPMSPGDCPPETTETPKCSSPRGQEGSRQDKPLSPAGSSQEAADTPDTRHPCSLGSSLVADYSDSESE

SEQ ID NO: 762050 - protein, 186 aa, Homo sapiens
MSGLWSTRGQFWTPSPAAPEMSSPLLYAYEDKQKLKRTEIISRSWFPSAPGSASSSKVSGVLKKLAQSRRTALATSPITVGDLGIVRRRSRDVPESPQHAADTPKSGEPRVPEEAAQDRPMSPGDCPPETTETPKCSSPRGQEGSRQDKPLSPAGSSQEAADTPDTRHPCSLGSSLVADYSDSESE

SEQ ID NO: 762051 - protein, 537 aa, Homo sapiens
FALGARVAGAPESGAMSGFNFGGTGAPTGGFTFGTAKTATTTPATGFSFSTSGTGGFNFGAPFQPATSTPSTGLFSLATQTPATQTTGFTFGTATLASGGTGFSLGIGASKLNLSNTAATPAMANPSGFGLGSSNLTNAISSTVTSSQGTAPTGFVFGPSTTSVAPATTSGGFSFTGGSTAQPSGFNIGSAGNSAQPTAPATLPFTPATPAATTAGATQPAAPTPTATITSTGPSLFASIATAPTSSATTGLSLCTPVTTAGAPTAGTQGFSLKAPGAASGTSTTTSTVATATATTTSSSSTTGFALNLKPLAPAGIPSNTAAAVTAPPGPGTTAGAAASSAMTYAHVESLINKWSLELEDQERHFLQQATQVNAWDRTLIENGEKITSLHREVKKVKLDQKRLDQELDFILSQQKELEDLLSPLEELVKEQSVTIYLQHADEEREKTYKLAENIDAQLKRMAQDLKDIIEHLNTSGAPADTSDPLQQICKILNAHMDSLQWIDQNSALLQRKVEEVTKVCEGRRKEQERSFRITFD

SEQ ID NO: 762052 - protein, 330 aa, Homo sapiens
FALGARVAGAPESGAMSGFNFGGTGAPTGGFTFGTAKTATTTPATGFSFSTSGTGGFNFGAPFQPATSTPSTGLFSLATQTPATQTTGFTFGTATLASGGTGFSLGIGASKLNLSNTAATPAMANPSGFGLGSSNLTNAISSTVTSSQGTAPTGFVFGPSTTSVAPATTSGGFSFTGGSTAQPSGFNIGSAGNSAQPTAPATLPFTPATPAATTAGATQPAAPTPTATIYLQHADEEREKTYKLAENIDAQLKRMAQDLKDIIEHLNTSGAPADTSDPLQQICKILNAHMDSLQWIDQNSALLQRKVEEVTKVCEGRRKEQERSFRITFD

SEQ ID NO: 762053 - protein, 186 aa, Homo sapiens
AIFSFIIIFLRSMKVHIARSPQGIEQCGSLFLFPRGSCCMVSVCCLPLCCIFTSGRPAVCSPLGTRGHHSLLEQKSQFWHQQYHSVAGSRQRGHGPGGFIPGCKMPKCRAAGEAHAERAGSAHSPPLQGVYWISCQSTKMPGGLMMPGEPPWHSRGKGLTPRGDLERDIPYPTPSARSSPSLPQEG

SEQ ID NO: 762054 - protein, 128 aa, Homo sapiens
MAFTGKFEMESEKNYDEFMKLLGISSDVIEKARNFKIVTEVQQDGQDFTWSQHYSGGHTMTNKFTVGKESNIQTMGGKTFKATVQMEGGKLVVNFPNYHQTSEIVGDKLVEVSTIGGVTYERVSKRLA

SEQ ID NO: 762055 - protein, 128 aa, Homo sapiens; identical to SEQ ID NO: 762054

SEQ ID NO: 762056 - protein, 128 aa, Homo sapiens; identical to SEQ ID NO: 762054

SEQ ID NO: 762057 - protein, 177 aa, Homo sapiens
MKTVTMMMVVEMQALTQVLRAVLSACTWVSRKGDLQRMKQTHKGKPPSSMAFTGKFEMESEKNYDEFMKLLGISSDVIEKARNFKIVTEVQQDGQDFTWSQHYSGGHTMTNKFTVGKESNIQTMGGKTFKATVQMEGGKLVVNFPNYHQTSEIVGDKLVEVSTIGGVTYERVSKRLA

SEQ ID NO: 762058 - protein, 128 aa, Homo sapiens; identical to SEQ ID NO: 762054

SEQ ID NO: 762059 - protein, 128 aa, Homo sapiens; identical to SEQ ID NO: 762054

SEQ ID NO: 762060 - protein, 128 aa, Homo sapiens; identical to SEQ ID NO: 762054

SEQ ID NO: 762061 - protein, 126 aa, Homo sapiens
SQTTGLKAALIWLLCLSPGPGISSDVIEKARNFKIVTEVQQDGQDFTWSQHYSGGHTMTNKFTVGKESNIQTMGGKTFKATVQMEGGKLVVNFPNYHQTSEIVGDKLVEVSTIGGVTYERVSKRLA

SEQ ID NO: 762062 - protein, 384 aa, Homo sapiens
MGLGPVFLLLAGIFPFAPPGAAAEPHSLRYNLTVLSWDGSVQSGFLAEVHLDGQPFLRYDRQKCRAKPQGQWAEDVLGNKTWDRETRDLTGNGKDLRMTLAHIKDQKEGLHSLQEIRVCEIHEDNSTRSSQHFYYDGELFLSQNLETEEWTVPQSSRAQTLAMNVRNFLKEDAMKTKTHYHAMHADCLQELRRYLESGVVLRRTVPPMVNVTRSEASEGNITVTCRASSFYPRNITLTWRQDGVSLSHDTQQWGDVLPDGNGTYQTWVATRICRGEEQRFTCYMEHSGNHSTHPVPSGKVLVLQSHWQTFHVSAVAAAAAIFVIIIFYVRCCKKKTSAAEGPELVSLQVLDQHPVGTSDHRDATQLGFQPLMSALGSTGSTEGT

SEQ ID NO: 762063 - protein, 476 aa, Homo sapiens
MGLGPVFLLLAGIFPFAPPGAAAEPHSLRYNLTVLSWDGSVQSGFLAEVHLDGQPFLRYDRQKCRAKPQGQWAEDVLGNKTWDRETRDLTGNGKDLRMTLAHIKDQKEGESRQGQELTGEAFSRKVRGREQGPVSSHWIWLRLGVRNGGQWNSAGRRAGTQPTQGGMEEGQGGIPPGLSSSLGWKGDGFGNGEVTAVVGAGLHSLQEIRVCEIHEDNSTRSSQHFYYDGELFLSQNLETEEWTVPQSSRAQTLAMNVRNFLKEDAMKTKTHYHAMHADCLQELRRYLESGVVLRRTVPPMVNVTRSEASEGNITVTCRASSFYPRNITLTWRQDGVSLSHDTQQWGDVLPDGNGTYQTWVATRICRGEEQRFTCYMEHSGNHSTHPVPSGKVLVLQSHWQTFHVSAVAAAAAIFVIIIFYVRCCKKKTSAAEGPELVSLQVLDQHPVGTSDHRDATQLGFQPLMSALGSTGSTEGT

SEQ ID NO: 762064 - protein, 222 aa, Homo sapiens
MNVRNFLKEDAMKTKTHYHAMHADCLQELRRYLESGVVLRRTVPPMVNVTRSEASEGNITVTCRASSFYPRNITLTWRQDGVSLSHDTQQWGDVLPDGNGTYQTWVATRICRGEEQRFTCYMEHSGNHSTHPVPSGKVLVLQSHWQTFHVSAVAAAAAIFVIIIFYVRCCKKKTSAAEGPELVSLQVLDQHPVGTSDHRDATQLGFQPLMSALGSTGSTEGT

SEQ ID NO: 762065 - protein, 288 aa, Homo sapiens
MGLGPVFLLLAGIFPFAPPGAAAEPHSLRYNLTVLSWDGSVQSGFLAEVHLDGQPFLRYDRQKCRAKPQGQWAEDVLGNKTWDRETRDLTGNGKDLRMTLAHIKDQKEVPPMVNVTRSEASEGNITVTCRASSFYPRNITLTWRQDGVSLSHDTQQWGDVLPDGNGTYQTWVATRICRGEEQRFTCYMEHSGNHSTHPVPSGKVLVLQSHWQTFHVSAVAAAAAIFVIIIFYVRCCKKKTSAAEGPELVSLQVLDQHPVGTSDHRDATQLGFQPLMSALGSTGSTEGT

SEQ ID NO: 762066 - protein, 287 aa, Homo sapiens
MTLAHIKDQKEGLHSLQEIRVCEIHEDNSTRSSQHFYYDGELFLSQNLETEEWTVPQSSRAQTLAMNVRNFLKEDAMKTKTHYHAMHADCLQELRRYLESGVVLRRTVPPMVNVTRSEASEGNITVTCRASSFYPRNITLTWRQDGVSLSHDTQQWGDVLPDGNGTYQTWVATRICRGEEQRFTCYMEHSGNHSTHPVPSGKVLVLQSHWQTFHVSAVAAAAAIFVIIIFYVRCCKKKTSAAEGPELVSLQVLDQHPVGTSDHRDATQLGFQPLMSALGSTGSTEGT

SEQ ID NO: 762067 - protein, 287 aa, Homo sapiens; identical to SEQ ID NO: 762066

SEQ ID NO: 762068 - protein, 240 aa, Homo sapiens
MGLGPVFLLLAGIFPFAPPGAAAEPHSLRYNLTVLSWDGSVQSGFLAEVHLDGQPFLRYDRQKCRAKPQGQWAEDVLGNKTWDRETRDLTGNGKDLRMTLAHIKDQKEGLHSLQEIRVCEIHEDNSTRSSQHFYYDGELFLSQNLETEEWTVPQSSRAQTLAMNVRNFLKEDAMKTKTHYHAMHADCLQELRRYPQRGLRGQHHRDMQGFQLLSPEYHTDLASGWGIFEPRHPAVGGCPA

SEQ ID NO: 762069 - protein, 86 aa, Homo sapiens
EDPPRIEVSEEITREAKKARKVGGLTGSSSDDSGSESDASDNEESDYESSKNMSSGDDDDFNPFLDESNEDDENGKFSILNIHESI

SEQ ID NO: 762070 - protein, 1392 aa, Homo sapiens
MVEPGQDLLLAALRESGISPNDLFDIDGGDAGLATPMPTPSVQQSVPLSALELGLETEAAVPVKQEPETVPTPALLNVRQPPSTTTFVLNQINHLPPLGSTIVMTKTPPVTTNRQTITLTKFIQTTASTRPSVSAPTVRNAMTSAPSKDQVQLKDLLKNNSLNELMKLKPPANIAQPVATAATDVSNGTVKKESSNKEGARMWINDMKMRSFSPTMKVPVVKEDDEPEEEDEEEMGHAETYAEYMPIKLKIGLRHPDAVVETSSLSSVTPPDVWYKTSISEETIDNGWLSALQLEAITYAAQQHETFLPNGDRAGFLIGDGAGVGKGRTIAGIIYENYLLSRKRALWFSVSNDLKYDAERDLRDIGAKNILVHSLNKFKYGKISSKHNGSVKKGVIFATYSSLIGESQSGGKYKTRLKQLLHWCGDDFDGVIVFDECHKAKNLCPVGSSKPTKTGLAVLELQNKLPKARVVYASATGASEPRNMAYMNRLGIWGEGTPFREFSDFIQAVERRGVGAMEIVAMDMKLRGMYIARQLSFTGVTFKIEEVLLSQSYVKMYNKAVKLWVIARERFQQAADLIDAEQRMKKSMWGQFWSAHQRFFKYLCIASKVKRVVQLAREEIKNGKCVVIGLQSTGEARTLEALEEGGGELNDFVSTAKGVLQSLIEKHFPAPDRKKLYSLLGIDLTAPSNNSSPRDSPCKENKIKKRKGEEITREAKKARKVGGLTGSSSDDSGSESDASDNEESDYESSKNMSSGDDDDFNPFLDESNEDDENDPWLIRKDHKKNKEKKKKKSIDPDSIQSALLASGLGSKRPSFSSTPVISPAPNSTPANSNTNSNSSLITSQDAVERAQQMKKDLLDKLEKLAEDLPPNTLDELIDELGGPENVAEMTGRKGRVVSNDDGSISYESRSELDVPVEILNITEKQRFMDGDKNIAIISEAASSGISLQADRRAKNQRRRVHMTLELPWSADRAIQQFGRTHRSNQVTAPEYVFLISELAGEQRFASIVAKRLESLGALTHGDRRATESRDLSRFNFDNKYGRNALEIVMKSIVNLDSPMVSPPPDYPGEFFKDVRQGLIGVGLINVEDRSGILTLDKDYNNIGKFLNRILGMEVHQQNALFQYFADTLTAVVQNAKKNGRYDMGILDLGSGDEKVRKSDVKKFLTPGYSTSGHVELYTISVERGMSWEEATKIWAELTGPDDGFYLSLQIRNNKKTAILVKEVNPKKKLFLVYRPNTGKQLKLEIYADLKKKYKKVVSDDALMHWLDQYNSSADTCTHAYWRGNCKKASLGLVCEIGLRCRTYYVLCGSVLSVWTKVEGVLASVSGTNVKMQIVRLRTEDGQRIVGLIIPANCVSPLVNLLSTSDQSQQLAVQQKQLWQQHHPQSITNLSNA

SEQ ID NO: 762071 - protein, 1392 aa, Homo sapiens; identical to SEQ ID NO: 762070

SEQ ID NO: 762072 - protein, 717 aa, Homo sapiens
SIQSALLASGLGSKRPEFFIYTSYLTCSYQYGGEEITREAKKARKVGGLTGSSSDDSGSESDASDNEESDYESSKNMSSGDDDDFNPFLDESNEDDENDPWLIRKDHKKNKEKKKKKSIDPDSIQSALLASGLGSKRPSFSSTPVISPAPNSTPANSNTNSNSSLITSQDAVERAQQMKKDLLDKLEKLAEDLPPNTLDELIDELGGPENVAEMTGRKGRVVSNDDGSISYESRSELDVPVEILNITEKQRFMDGDKNIAIISEAASSGISLQADRRAKNQRRRVHMTLELPWSADRAIQQFGRTHRSNQVTAPEYVFLISELAGEQRFASIVAKRLESLGALTHGDRRATESRDLSRFNFDNKYGRNALEIVMKSIVNLDSPMVSPPPDYPGEFFKDVRQGLIGVGLINVEDRSGILTLDKDYNNIGKFLNRILGMEVHQQNALFQYFADTLTAVVQNAKKNGRYDMGILDLGSGDEKVRKSDVKKFLTPGYSTSGHVELYTISVERGMSWEEATKIWAELTGPDDGFYLSLQIRNNKKTAILVKEVNPKKKLFLVYRPNTGKQLKLEIYADLKKKYKKVVSDDALMHWLDQYNSSADTCTHAYWRGNCKKASLGLVCEIGLRCRTYYVLCGSVLSVWTKVEGVLASVSGTNVKMQIVRLRTEDGQRIVGLIIPANCVSPLVNLLSTSDQSQQLAVQQKQLWQQHHPQSITNLSNA

SEQ ID NO: 762073 - protein, 1392 aa, Homo sapiens; identical to SEQ ID NO: 762070

SEQ ID NO: 762074 - protein, 641 aa, Homo sapiens [sequence omitted]

SEQ ID NO: 762075 - protein, 398 aa, Homo sapiens [sequence omitted]

SEQ ID NO: 762076 - protein, 631 aa, Homo sapiens
MQHIFAFFCTGFLGAVVGANFPNNIQIGGLFPNQQSQEHAAFRFALSQLTEPPKLLPQIDIVNISDSFEMTYRFCSQFSKGVYAIFGFYERRTVNMLTSFCGALHVCFITPSFPVDTSNQFVLQLRPELQDALISIIDHYKWQKFVYIYDADRGLSVLQKVLDTAAEKNWQVTAVNILTTTEEGYRMLFQDLEKKKERLVVVDCESERLNAILGQIIKLEKNGIGYHYILANLGFMDIDLNKFKESGANVTGFQLVNYTDTIPAKIMQQWKNSDARDHTRVDWKRPKYTSALTYDGVKVMAEAFQSLRRQRIDISRRGNAGDCLANPAVPWGQGIDIQRALQQVRFEGLTGNVQFNEKGRRTNYTLHVIEMKHDGIRKIGYWNEDDKFVPAATDAQAGGDNSSVQNRTYIVTTILEDPYVMLKKNANQFEGNDRYEGYCVELAAEIAKHVGYSYRLEIVSDGKYGARDPDTKAWNGMVGELVYGRADVAVAPLTITLVREEVIDFSKPFMSLGISIMIKKPQKSKPGVFSFLDPLAYEIWMCIVFAYIGVSVVLFLVSRFSPYEWHSEEFEEGRDQTTSDQSNEFGIFNSLWFSLGAFMQQGCDISPRSVSSSQSLCLMLWFCLFVCLFVF

SEQ ID NO: 762077 - protein, 906 aa, Homo sapiens
MQHIFAFFCTGFLGAVVGANFPNNIQIGGLFPNQQSQEHAAFRFALSQLTEPPKLLPQIDIVNISDSFEMTYRFCSQFSKGVYAIFGFYERRTVNMLTSFCGALHVCFITPSFPVDTSNQFVLQLRPELQDALISIIDHYKWQKFVYIYDADRGLSVLQKVLDTAAEKNWQVTAVNILTTTEEGYRMLFQDLEKKKERLVVVDCESERLNAILGQIIKLEKNGIGYHYILANLGFMDIDLNKFKESGANVTGFQLVNYTDTIPAKIMQQWKNSDARDHTRVDWKRPKYTSALTYDGVKVMAEAFQSLRRQRIDISRRGNAGDCLANPAVPWGQGIDIQRALQQVRFEGLTGNVQFNEKGRRTNYTLHVIEMKHDGIRKIGYWNEDDKFVPAATDAQAGGDNSSVQNRTYIVTTILEDPYVMLKKNANQFEGNDRYEGYCVELAAEIAKHVGYSYRLEIVSDGKYGARDPDTKAWNGMVGELVYGRADVAVAPLTITLVREEVIDFSKPFMSLGISIMIKKPQKSKPGVFSFLDPLAYEIWMCIVFAYIGVSVVLFLVSRFSPYEWHSEEFEEGRDQTTSDQSNEFGIFNSLWFSLGAFMQQGCDISPRSLSGRIVGGVWWFFTLIIISSYTANLAAFLTVERMVSPIESAEDLAKQTEIAYGTLEAGSTKEFFRRSKIAVFEKMWTYMKSAEPSVFVRTTEEGMIRVRKSKGKYAYLLESTMNEYIEQRKPCDTMKVGGNLDSKGYGIATPKGSALRNPVNLAVLKLNEQGLLDKLKNKWWYDKGECGSGGGDSKDKTSALSLSNVAGVFYILIGGLGLAMLVALIEFCYKSRSESKRMKGFCLIPQQSINEAIRTSTLPRNSGAGASSGGSGENGRVVSHDFPKSMQSIPCMSHSSGMPLGATGL

SEQ ID NO: 762078 - protein, 178 aa, Homo sapiens [sequence omitted]

SEQ ID NO: 762079 - protein, 178 aa, Homo sapiens [sequence omitted]

SEQ ID NO: 762080 - protein, 178 aa, Homo sapiens [sequence omitted]

SEQ ID NO: 762081 - protein, 139 aa, Homo sapiens
MQAMDPAAADLYEEDGKDLDFYDFEPLPTLPEDEENVSLADILSLRDRGLSEQEAWAVCLECSLSMRSVAHAAIFQSLCITPDTLAFNTSGNVCFMEQLSDDPEGAFVPPEFDVTGNTFEPSAATMNPASRHSSPHLGS

SEQ ID NO: 762082 - protein, 124 aa, Homo sapiens
MQAMDPAAADLYEEDGKDLDFYDFEPLPTLPEDEENVSLADILSLRDRGLSEQEAWAVCLECSLSMRSVAHAAIFQSLCITPDTLAFNTSGNVCFMEQLSDDPEGAFVPPEFDVTGNTFESPGQ

SEQ ID NO: 762083 - protein, 71 aa, Homo sapiens
FDLWSSSAPRELSSPPEYDVTGNTLSLHPMRLPSPPRCPEHQWAPVARPGRLRPLPHRWPVCLAFIHDMQA

SEQ ID NO: 762084 - protein, 1504 aa, Homo sapiens
FRGSDVQGTAGRLLKQNETWSKALSLTHALKRCHESSFPQGIVSVGVPGPGWGSCRAHGQGRSWQENVSLADILSLRDRGLSEQEAWAVCLECSLSMRSVAHAAIFQSLCITPDTLAFNTSGNVCFMEQLSDDPEGAFVPPEFDVTGNTFEAHIYSLGATLKAALEYVAEPTLEPRLSQDLEALLSRMQAEDPGDRPDLESIIALCEEKLQLTSSCRVCRSLSAVGRRVLSIESFGALQDVSESSWRERPAPGNAGPRRPPGDPSTDPEVLPTPEGPESETSRGPRASPTKALLSTPVRNGESHSREGLAGLVLDAERTLGELDRDALRRSRLRKVQTFPRLLSDSPEATLCLPLTRGKSQLPISELFSPDPRKAFLDRKNGLSSFQAQPKCRLWPEQEPEHQLGRVPCAGRSTDRGPGVPGSPGQPETSHPSQGPAEAPADPRDASGEAQTPRDDERIPEGARQLESAAAEQWVSLQDLLSQLGRPFREYELWALCLACLRALQTRPEHPAYLCLDSVLVAEDGAVLFQPPPANGSYDSFFLAPELAEERLVTEKASVYCVAAVLWTAAKFSVPRNHKLALPRRLKTLLLDMARRSAPERPSAAEAIKVCGSYLLQRGMDSRKILAHLRASICQVYQEEETISLQNAFSVVELKPSVAPAPEPSPGFLPVNSDTGLVAVPGPVPGQHPCGEEATQLPAAFTSEATHFKPIVLAQNASVARDQPALAQEESEERGGQREGEGEEKLSPEAHAGSPSLKTPDGPVPGPGPQGAAPEPLGASVQRDSAQGRPCPPPQAPANQPEGASSAAPGSPVPAPPTKASALPVEQGPAEPIPPGVASGGLRPDALGPTTAHHGPRHPPKPPRSKATERPGQEPEGPGATPAGERDDQSPDSVPERPRPADRRLCLPCVDASPLPGRTACPSLQEATRLIQEEFAFDGYLDNGLEALIMGEYIFALKDLTFATFCGAISEKFCDLYWDEKLLQNLFKVVNGQASPSPSTAEEAGSQLEGSQSPRSPSSKRPSLHRLGKEKPAMARTSSRAPCSPTSVSDVDSDALSRGNFEVGFRPQRSVKAERAQQPEAGEDRRPAGGASDVEAVTRLARSKGVGPALSPGPAGFQSCSPGWCSAFYEADCFGADVHNYVKDLGRQQADGALPDAQSPELEQQLMMEKRNYRKTLKFYQKLLQKEKRNKGSDVKTMLSKLKGQLEEMKSRVQFLSLVKKYLQASGLRAPLCPVRQQLQTGLPLLDAVNLSVCSYKRGPDLRVQCQEALGRGAERPSARVPLRQVMYAERWGLEPCTLPVIVNIAAAPCDTLDFSPLDESSSLIFYNVNKHPGGRQKARILQAGTPLGLMAYLYSSDAFLEGYVQQFLYTFRYFCTPHDFLHFLLDRINSTLTRAHQDPTSTFTKIYRRSLCVLQAWVEDCYAVDFPRNSGLLGKLEDFISSKILPLDGSAKHLLGLLEVGMDRRAEGNPRGTDLENPREAEEDARPFNALCKRLSEDGISRK

SEQ ID NO: 762085 - protein, 128 aa, Homo sapiens
TGLRWSLLSDLPHGSPRHALLGMENVSLADILSLRDRGLSEQEAWAVCLECSLSMRSVAHAAIFQSLCITPDTLAFNTSGNVCFMEQLSDDPEGAFVPPEFDVTGNTFEPSAATMNPASRHSSPHLGS

SEQ ID NO: 762086 - protein, 119 aa, Homo sapiens
MEGRRFRAQPTLPSAHLLAMHIQQLETGGFTMTNGAHRWSKLRNIAKVVSQVHAFQENPYTFSPDPKLQSYLKQRIARFSGADISTLAADSRANFHQVSSEKHSRKIQDKLRRMKATFQ

SEQ ID NO: 762087 - protein, 133 aa, Homo sapiens
MQAMDPAAADLYEEDGKDLDFYDFEPLPTLPEDEENVSLADILSLRDRGLSEQEAWAVCLECSLSMRSVAHAAIFQSLCITPDTLAFNTSGNVCFMEQLSDDPEGAFVPPEFDVTGNTFEPPPHEAPLSTPLP

SEQ ID NO: 762088 - protein, 1468 aa, Homo sapiens
FRGSDVQGTAGRLLKQNETWSKALSLTHALKRCHESSFPQGIVSVGVPGPGWGSCRAHGQGRSWQENVSLADILSLRDRGLSEQEAWAVCLECSLSMRSVAHAAIFQSLCITPDTLAFNTSGNVCFMEQLSDDPEGAFVPPEFDVTGNTFEAHIYSLGATLKAALEYVAEPTLEPRLSQDLEALLSRMQAEDPGDRPDLESIIALCEEKLQLTSSCRVCRSLSAVGRRVLSIESFGALQDVSESSWRERPAPGNAGPRRPPGDPSTDPEVLPTPEGPESETSRGPRASPTKALLSTPVRNGESHSREGLAGLVLDAERTLGELDRDALRRSRLRKVQTFPRLLSDSPEATLCLPLTRGKSQLPISELFSPDPRKAFLDRKNGLSSFQAQPKCRLWPEQEPEHQLGRVPCAGRSTDRGPGVPGSPGQPETSHPSQGPAEAPADPRDASGEAQTPRDDERIPEGARQLESAAAEQWVSLQDLLSQLGRPFREYELWALCLACLRALQTRPEHPAYLCLDSVLVAEDGAVLFQPPPANGSYDSFFLAPELAEERLVTEKASVYCVAAVLWTAAKFSVPRNHKLALPRRLKTLLLDMARRSAPERPSAAEAIKVCGSYLLQRGMDSRKILAHLRASICQVYQEEETISLQNAFSVVELKPSVAPAPEPSPGFLPVNSDTGLVAVPGPVPGQHPCGEEATQLPAAFTSEATHFKPIVLAQNASVARDQPALAQEESEERGGQREGEGEEKLSPEAHAGSPSLKTPDGPVPGPGPQGAAPEPLGASVQRDSAQGRPCPPPQAPANQPEGASSAAPGSPVPAPPTKASALPVEQGPAEPIPPGVASGGLRPDALGPTTAHHGPRHPPKPPRSKATERPGQEPEGPGATPAGERDDQSPDSVPERPRPADRRLCLPCVDASPLPGRTACPSLQEATRLIQEEFAFDGYLDNGLEALIMGEYIFALKDLTFATFCGAISEKFCDLYWDEKLLQNLFKVVNGQASPSPSTAEEAGSQLEGSQSPRSPSSKRPSLHRLGKEKPAMARTSSRAPCSPTSVSDVDSDALSRGNFEVGFRPQRSVKAERAQQPEAGEDRRPAGGASDVEAVTRLARSKGVGPALSPGPAGFQSCSPGWCSAFYEADCFGADVHNYVKDLGRQQADGALPDAQSPELEQQLMMEKRNYRKTLKFYQKLLQKEKRNKGSDVKTMLSKLKGQLEEMKSRVQFLSLVKKYLQASGLRAPLCPVRQQLQTGLPLLDAVNLSVCSYKRGPDLRVQCQEALGRGAERPSARVPLRQVMYAERWGLEPCTLPVIVNIAAAPCDTLDFSPLDESSSLIFYNVNKHPGGRQKARILQAGTPLGLMAYLYSSDAFLEGYVQQFLYTFRYFCTPHDFLHFLLDRINSTLTRAHQDPTSTFTKNPYTFSPDPKLQSYLKQRIARFSGADISTLAADSRANFHQVSSEKHSRKIQDKLRRMKATFQ

SEQ ID NO: 762089 - protein, 1376 aa, Homo sapiens
MQAMDPAAADLYEEDGKDLDFYDFEPLPTLPEDEENVSLADILSLRDRGLSEQEAWAVCLECSLSMRSVAHAAIFQSLCITPDTLAFNTSGNVCFMEQLSDDPEGAFVPPEFDVTGNTFEAHIYSLGATLKAALEYVAEPTLEPRLSQDLEALLSRMQAEDPGDRPDLESIIALCEEKLQLTSSCRVCRSLSAVGRRVLSIESFGALQDVSESSWRERPAPGNAGPRRPPGDPSTDPEVLPTPEGPESETSRGPRASPTKALLSTPVRNGESHSREGLAGLVLDAERTLGELDRDALRRSRLRKVQTFPRLLSDSPEATLCLPLTRGKSQLPISELFSPDPRKAFLDRKNGLSSFQAQPKCRLWPEQEPEHQLGRVPCAGRSTDRGPGVPGSPGQPETSHPSQGPAEAPADPRDASGEAQTPRDDERIPEGARQLESAAAEQWVSLQDLLSQLGRPFREYELWALCLACLRALQTRPEHPAYLCLDSVLVAEDGAVLFQPPPANGSYDSFFLAPELAEERLVTEKASVYCVAAVLWTAAKFSVPRNHKLALPRRLKTLLLDMARRSAPERPSAAEAIKVCGSYLLQRGMDSRKILAHLRASICQVYQEEETISLQNAFSVVELKPSVAPAPEPSPGFLPVNSDTGLVAVPGPVPGQHPCGEEATQLPAAFTSEATHFKPIVLAQNASVARDQPALAQEESEERGGQREGEGEEKLSPEAHAGSPSLKTPDGPVPGPGPQGAAPEPLGASVQRDSAQGRPCPPPQAPANQPEGASSAAPGSPVPAPPTKASALPVEQGPAEPIPPGVASGGLRPDALGPTTAHHGPRHPPKPPRSKATERPGQEPEGPGATPAGERDDQSPDSVPERPRPADRRLCLPCVDASPLPGRTACPSLQEATRLIQEEFAFDGYLDNGLEALIMGEYIFALKDLTFATFCGAISEKFCDLYWDEKLLQNLFKVVNGQASPSPSTAEEAGSQLEGSQSPRSPSSKRPSLHRLGKEKPAMARTSSRAPCSPTSVSDVDSDALSRGNFEVGFRPQRSVKAERAQQPEAGEDRRPAGGASDVEAVTRLARSKGVGPALSPGPAGFQSCSPGWCSAFYEADCFGADVHNYVKDLGRQQADGALPDAQSPELEQQLMMEKRNYRKTLKFYQKLLQKEKRNKGSDVKTMLSKLKGQLEEMKSRVQFLSLVKKYLQVMYAERWGLEPCTLPVIVNIAAAPCDTLDFSPLDESSSLIFYNVNKHPGGRQKARILQAGTPLGLMAYLYSSDAFLEGYVQQFLYTFRYFCTPHDFLHFLLDRINSTLTRAHQDPTSTFTKNPYTFSPDPKLQSYLKQRIARFSGADISTLAADSRANFHQVSSEKHSRKIQDKLRRMKATFQ

SEQ ID NO: 762090 - protein, 831 aa, Homo sapiens
CVWWGWREAQRGEGGPGGGAPGGPGLGLGSLGEERFPVVNTAYGRVRGVRRELNNEILGPVVQFLGVPYATPPLGARRFQPPEAPASWPGVRNATTLPPACPQNLHGALPAIMLPVWFTDNLEAAATYVQNQSEDCLYLNLYVPTEDGPLTKKRDEATLNPPDTDIRDPGKKPVMLFLHGGSYMEGTGNMFDGSVLAAYGNVIVATLNYRLGVLGFLSTGDQAAKGNYGLLDQIQALRWLSENIAHFGGDPERITIFGSGAGASCVNLLILSHHSEGLFQKAIAQSGTAISSWSVNYQPLKYTRLLAAKVGCDREDSAEAVECLRRKPSRELVDQDVQPARYHIAFGPVVDGDVVPDDPEILMQQGEFLNYDMLIGVNQGEGLKFVEDSAESEDGVSASAFDFTVSNFVDNLYGYPEGKDVLRETIKFMYTDWADRDNGEMRRKTLLALFTDHQWVAPAVATAKLHADYQSPVYFYTFYHHCQAEGRPEWADAAHGDELPYVFGVPMVGATDLFPCNFSKNDVMLSAVVMTYWTNFAKTGDPNQPVPQDTKFIHTKPNRFEEVVWSKFNSKEKQYLHIGLKPRVRDNYRANKVAFWLELVPHLHNLHTELFTTTTRLPPYATRWPPRPPRGAPGTTPPPPPATLPPEPEPEPPPRAYDRFPGDSRDYSTELSVTVAVGASLLFLNILAFAALYYKRDRRQELRCRRLSPPGGSGSGVPGGGPLLPAAGRELPPEEELVSLQLKRGGGVGADPAEALRPACPPDYHPGPAPGTGRCASSLPRGPGPCCPSGLGPPPPPPPPSPSIFGPFPPPPPTATSHNNTLPHPHSTTRV

SEQ ID NO: 762091 - protein, 814 aa, Homo sapiens
MCLVGLAEAQRGEGGPGGGAPGGPGLGLGSLGEERFPVVNTAYGRVRGVRRELNNEILGPVVQFLGVPYATPPLGARRFQPPEAPASWPGVRNATTLPPACPQNLHGALPAIMLPVWFTDNLEAAATYVQNQSEDCLYLNLYVPTEDDIRDPGKKPVMLFLHGGSYMEGTGNMFDGSVLAAYGNVIVATLNYRLGVLGFLSTGDQAAKGNYGLLDQIQALRWLSENIAHFGGDPERITIFGSGAGASCVNLLILSHHSEGLFQKAIAQSGTAISSWSVNYQPLKYTRLLAAKVGCDREDSAEAVECLRRKPSRELVDQDVQPARYHIAFGPVVDGDVVPDDPEILMQQGEFLNYDMLIGVNQGEGLKFVEDSAESEDGVSASAFDFTVSNFVDNLYGYPEGKDVLRETIKFMYTDWADRDNGEMRRKTLLALFTDHQWVAPAVATAKLHADYQSPVYFYTFYHHCQAEGRPEWADAAHGDELPYVFGVPMVGATDLFPCNFSKNDVMLSAVVMTYWTNFAKTGDPNQPVPQDTKFIHTKPNRFEEVVWSKFNSKEKQYLHIGLKPRVRDNYRANKVAFWLELVPHLHNLHTELFTTTTRLPPYATRWPPRPPRGAPGTTPPPPPATLPPEPEPEPPPRAYDRFPGDSRDYSTELSVTVAVGASLLFLNILAFAALYYKRDRRQELRCRRLSPPGGSGSGVPGGGPLLPAAGRELPPEEELVSLQLKRGGGVGADPAEALRPACPPDYHPGPAPGTGRCASSLPRGPGPCCPSGLGPPPPPPPPSPSIFGPFPPPPPTATSHNNTLPHPHSTTRV

SEQ ID NO: 762092 - protein, 834 aa, Homo sapiens
VSGGAGGKLNAGKGSRRRPPGGPGLGLGSLGEERFPVVNTAYGRVRGVRRELNNEILGPVVQFLGVPYATPPLGARRFQPPEAPASWPGVRNATTLPPACPQNLHGALPAIMLPVWFTDNLEAAATYVQNQSEDCLYLNLYVPTEDGPLTKKRDEATLNPPDTDIRDPGKKPVMLFLHGGSYMEGTGNMFDGSVLAAYGNVIVATLNYRLGVLGFLSTGDQAAKGNYGLLDQIQALRWLSENIAHFGGDPERITIFGSGAGASCVNLLILSHHSEGLFQKAIAQSGTAISSWSVNYQPLKYTRLLAAKVGCDREDSAESCWMAVECLRRKPSRELVDQDVQPARYHIAFGPVVDGDVVPDDPEILMQQGEFLNYDMLIGVNQGEGLKFVEDSAESEDGVSASAFDFTVSNFVDNLYGYPEGKDVLRETIKFMYTDWADRDNGEMRRKTLLALFTDHQWVAPAVATAKLHADYQSPVYFYTFYHHCQAEGRPEWADAAHGDELPYVFGVPMVGATDLFPCNFSKNDVMLSAVVMTYWTNFAKTGDPNQPVPQDTKFIHTKPNRFEEVVWSKFNSKEKQYLHIGLKPRVRDNYRANKVAFWLELVPHLHNLHTELFTTTTRLPPYATRWPPRPPRGAPGTTPPPPPATLPPEPEPEPPPRAYDRFPGDSRDYSTELSVTVAVGASLLFLNILAFAALYYKRDRRQELRCRRLSPPGGSGSGVPGGGPLLPAAGRELPPEEELVSLQLKRGGGVGADPAEALRPACPPDYHPGPAPGTGRCASSLPRGPGPCCPSGLGPPPPPPPPSPSIFGPFPPPPPTATSHNNTLPHPHSTTRV

SEQ ID NO: 762093 - protein, 1111 aa, Homo sapiens
  misc_feature (554)..(554): Xaa can be any naturally occurring amino acid
MCLVGLAEAQRGEGGPGGGAPGGPGLGLGSLGEERFPVVNTAYGRVRGVRRELNNEILGPVVQFLGVPYATPPLGARRFQPPEAPASWPGVRNATTLPPACPQNLHGALPAIMLPVWFTDNLEAAATYVQNQSEDCLYLNLYVPTEDGPLTKKRDEATLNPPDTDIRDPGKKPVMLFLHGGSYMEGTGNMFDGSVLAAYGNVIVATLNYRLGVLGFLSTGDQAAKGNYGLLDQIQALRWLSENIAHFGGDPERITIFGSGAGASCVNLLILSHHSEGLFQKAIAQSGTAISSWSVNYQPLKYTRLLAAKVGCDREDSAESCWMAVECLRRKPSRELVDQDVQPARYHIAFGPVVDGDVVPDDPEILMQQGEFLNYDMLIGVNQGEGLKFVEDSAESEDGVSASAFDFTVSNFVDNLYGYPEGKDVLRETIKFMYTDWADRDNGEMRRKTLLALFTDHQWVAPAVATAKLHADYQSPVYFYTFYHHCQAEGRPEWADAAHGDELPYVFGVPMVGATDLFPCNFSKNDVMLSAVVMTYWTNFAKTGLRARGAGRGXGGALPPSHGRRSSVKALTLACPLARVKPTQTPSVPGTELSVGDSAVSDREAAVLSGELGAHSVALAWRLSLPPPCLIPPARPPRALHLWLTAQVCVSECVEEFVCLYFCLCLSENPLTALHLPLLLSFVCLLFAFSGCRLISAWLVVSVSGCPSRVFEPCLCFIQAQLLLLPGYLCVCPCPSARISGCLCQSVFHPYLPICLKRQAVSLSLHIHLCLSASVTFSLAFLAVPLSLCISVCLPAHCHPPSFRALPSLLLSLPSCAHRDPNQPVPQDTKFIHTKPNRFEEVVWSKFNSKEKQYLHIGLKPRVRDNYRANKVAFWLELVPHLHNLHTELFTTTTRLPPYATRWPPRPPRGAPGTTPPPPPATLPPEPEPEPPPRAYDRFPGDSRDYSTELSVTVAVGASLLFLNILAFAALYYKRDRRQELRCRRLSPPGGSGSGVPGGGPPAAPPRAVELPPEEELVSLQLKRGGGVGADPAEALRPACPPDYHPGPAPGTGRCASSLPRGPGPCCPSGLGPPPPPPPPSPSIFGPFPPPPPTATSHNNTLPHPHSTTRV

SEQ ID NO: 762094 - protein, 834 aa, Homo sapiens; identical to SEQ ID NO: 762092

SEQ ID NO: 762095 - protein, 834 aa, Homo sapiens; identical to SEQ ID NO: 762092

SEQ ID NO: 762096 - protein, 834 aa, Homo sapiens; identical to SEQ ID NO: 762092

SEQ ID NO: 762097 - protein, 834 aa, Homo sapiens; identical to SEQ ID NO: 762092

SEQ ID NO: 762098 - protein, 834 aa, Homo sapiens; identical to SEQ ID NO: 762092

SEQ ID NO: 762099 - protein, 449 aa, Homo sapiens
MYSFNTLRLYLSGAIVFFSLAASKEAEAARSATKPMSPSDFLDKLMGRTSGYDARIRPNFKGPPVNVSCNIFINSFGSIAETTMDYRVNIFLRQQWNDPRLAYNEYPDDSLDLDPSMLDSIWKPDLFFANEKGAHFHEITTDNKLLRISRNGNVLYSIRITLTLACPMDLKNFPMDVQTCIMQLESFGYTMNDLIFEWQEQGAVQVADGLTLPQFILKEEKDLRYCTKHYNTGKFTCIEARFHLERQMGYYLIQMYIPSLLIVILSWISFWINMDAAPARVGLGITTVLTMTTQSSGSRASLPKVSYVKAIDIWMAVCLLFVFSALLEYAAVNFVSRQHKELLRFRRKRRHHKEDEAGEGRFNFSAYGMGPACLQAKDGISVKGANNSNTTNPPPAPSKSPEEMRKLFIQRAKKIDKISRIGFPMAFLIFNMFYWIIYKIVRREDVHNQ

SEQ ID NO: 762100 - protein, 484 aa, Homo sapiens
MYDDSYVPGFEDSEAGSADSYTSRPSLDSDVSLEEDRESARREVESQAQQQLERAKHKPVAFAVRTNVSYCGVLDEECPVQGSGVNFEAKDFLHIKEKYSNDWWIGRLVKEGGDIAFIPSPQRLESIRLKQEQKARRSGNPSSLSDIGNRRSPPPSLAKQKQKQAEHVPPYDVVPSMRPVVLVGPSLKGYEVTDMMQKALFDFLKHRFDGRISITRVTADLSLAKRSVLNNPGKRTIIERSSARSSIAEVQSEIERIFELAKSLQLVVLDADTINHPAQLAKTSLAPIIVFVKVSSPKVLQRLIRSRGKSQMKHLTVQMMAYDKLVQCPPESFDVILDENQLEDACEHLAEYLEVYWRATHHPAPGPGLLGPPSAIPGLQNQQLLGERGEEHSPLERDSLMPSDEASESSRQAWTGSSQRSSRHLEEDYADAYQDLYQPHRQHTSGLPSANGHDPQDRLLAQDSEHNHSDRNWQRNRPWPKDSY

SEQ ID NO: 762101 - protein, 484 aa, Homo sapiens; identical to SEQ ID NO: 762100

SEQ ID NO: 762102 - protein, 484 aa, Homo sapiens; identical to SEQ ID NO: 762100

SEQ ID NO: 762103 - protein, 621 aa, Homo sapiens
MYDDSYVPGFEDSEAGSADSYTSRPSLDSDVSLEEDRESARREVESQAQQQLERAKHKPVAFAVRTNVSYCGVLDEECPVQGSGVNFEAKDFLHIKEKYSNDWWIGRLVKEGGDIAFIPSPQRLESIRLKQEQKARRSGNPSSLSDIGNRRSPPPSLGSLPPTHPFWVGVVAKTQGKRGSCPSELCGKGLWRDWKGWGEASISPGDGDTMPPGTFPPSPTLILYFLFQKAKQKQKQVSQGRDLGWGDHGLWLWGQCSQAVIVGGQNREGREPRTSGSALTPTRHETGTRAMVSTDLMSILQAEHVPPYDVVPSMRPVVLVGPSLKGYEVTDMMQKALFDFLKHRFDGRISITRVTADLSLAKRSVLNNPGKRTIIERSSARSSIAEVQSEIERIFELAKSLQLVVLDADTINHPAQLAKTSLAPIIVFVKVSSPKVLQRLIRSRGKSQMKHLTVQMMAYDKLVQCPPESFDVILDENQLEDACEHLAEYLEVYWRATHHPAPGPGLLGPPSAIPGLQNQQLLGERGEEHSPLERDSLMPSDEASESSRQAWTGSSQRSSRHLEEDYADAYQDLYQPHRQHTSGLPSANGHDPQDRLLAQDSEHNHSDRNWQRNRPWPKDSY

SEQ ID NO: 762104 - protein, 650 aa, Homo sapiens
AGAACRAAAGFCSRLGAPGPGEGERPLAWSMSFSDSSATFLLNEGSADSYTSRPSLDSDVSLEEDRESARREVESQAQQQLERAKHKPVAFAVRTNVSYCGVLDEECPVQGSGVNFEAKDFLHIKEKYSNDWWIGRLVKEGGDIAFIPSPQRLESIRLKQEQKARRSGNPSSLSDIGNRRSPPPSLGSLPPTHPFWVGGVAKTQGKRGSCPSELCGKGLWRDWKGWGEASISPGDGDTMPPGTFPPSPTLILYFLFQKAKQKQKQVSQGRDLGWGDHGLWLWGQCSRQSLLEEQNREGREPRTSGSALTPTRHETGTRAMVSTDLMSILQAEHVPPYDVVPSMRPVVLVGPSLKGYEVTDMMQKALFDFLKHRFDGRISITRVTADLSLAKRSVLNNPGKRTIIERSSARSSIAEVQSEIERIFELAKSLQLVVLDADTINHPAQLAKTSLAPIIVFVKVSSPKVLQRLIRSRGKSQMKHLTVQMMAYDKLVQCPPESFDVILDENQLEDACEHLAEYLEVYWRATHHPAPGPGLLGPPSAIPGLQNQQLLGERGEEHSPLERDSLMPSDEASESSRQAWTGSSQRSSRHLEEDYADAYQDLYQPHRQHTSGLPSANGHDPQDRLLAQDSEHNHSDRNWQRNRPWPKDSY

SEQ ID NO: 762105 - protein, 447 aa, Homo sapiens
MYDDSYVPGFEDSEAGSADSYTSRPSLDSDVSLEEDRESARREVESQAQQQLERAKHKPVAFAVRTNVSYCGVLDEECPVQGSGVNFEAKDFLHIKEKYSNDWWIGRLVKEGGDIAFIPSPQRLESIRLKQEQKARRSGNPSSLSDIGNRRSPPPSLAKQKQKQAEHVPPYDVVPSMRPVVLVGPSLKGYEVTDMMQKALFDFLKHRFDGRISITRVTADLSLAKRSVLNNPGKRTIIERSSARSSIAEVQSEIERIFELAKSLQLVVLDADTINHPAQLAKTSLAPIIVFVKVSSPKVLQRLIRSRGKSQMKHLTVQMMAYDKLVQCPPESFDVILDENQLEDACEHLAEYLEVYWRATHHPAPGPGLLGPPSAIPGLQNQQLLGERGEEHSPLERDSLMPSDEASESSRQAWTGSSQRSSRHLEEDYADAYQDLYQPHRQLLSLL

SEQ ID NO: 762106 - protein, 162 aa, Homo sapiens
AGAACRAAAGFCSRLGAPGPGEGERPLAWSMSFSDSSATFLLNEGSADSYTSRPSLDSDVSLEEDRESARREVESQAQQQLERAKHKPVAFAVRTNVSYCGVLDEECPVQGSGVNFEAKDFLHIKENLGGPPCLSHSFALHPVISVLVPHTSLENRAPDFVP

SEQ ID NO: 762107 - protein, 145 aa, Homo sapiens
TSHRRFKQEQKARRSGNPSSLSDIGNRRSPPPSLAKQKQKQAEHVPPYDVVPSMRPVVLVGPSLKGYEVTDMMQKALFDFLKHRFDGRISITRVTADLSLAKRSVLNNPGKRTIIERSSARSSIGKCRVRSSAYLNLRCGVGDPL

SEQ ID NO: 762108 - protein, 484 aa, Homo sapiens; identical to SEQ ID NO: 762100

SEQ ID NO: 762109 - protein, 308 aa, Homo sapiens
MRPVVLVGPSLKGYEVTDMMQKALFDFLKHRFDGRISITRVTADLSLAKRSVLNNPGKRTIIERSSARSSIAEVQSEIERIFELAKSLQLVVLDADTINHPAQLAKTSLAPIIVFVKVSSPKVLQRLIRSRGKSQMKHLTVQMMAYDKLVQCPPESFDVILDENQLEDACEHLAEYLEVYWRATHHPAPGPGLLGPPSAIPGLQNQQLLGERGEEHSPLERDSLMPSDEASESSRQAWTGSSQRSSRHLEEDYADAYQDLYQPHRQHTSGLPSANGHDPQDRLLAQDSEHNHSDRNWQRNRPWPKDSY

SEQ ID NO: 762110 - protein, 473 aa, Homo sapiens
MRNWGSADSYTSRPSLDSDVSLEEDRESARREVESQAQQQLERAKHKPVAFAVRTNVSYCGVLDEECPVQGSGVNFEAKDFLHIKEKYSNDWWIGRLVKEGGDIAFIPSPQRLESIRLKQEQKARRSGNPSSLSDIGNRRSPPPSLAKQKQKQAEHVPPYDVVPSMRPVVLVGPSLKGYEVTDMMQKALFDFLKHRFDGRISITRVTADLSLAKRSVLNNPGKRTIIERSSARSSIAEVQSEIERIFELAKSLQLVVLDADTINHPAQLAKTSLAPIIVFVKVSSPKVLQRLIRSRGKSQMKHLTVQMMAYDKLVQCPPESFDVILDENQLEDACEHLAEYLEVYWRATHHPAPGPGLLGPPSAIPGLQNQQLLGERGEEHSPLERDSLMPSDEASESSRQAWTGSSQRSSRHLEEDYADAYQDLYQPHRQHTSGLPSANGHDPQDRLLAQDSEHNHSDRNWQRNRPWPKDSY

SEQ ID NO: 762111 - protein, 348 aa, Homo sapiens
MRPVVLVGPSLKGYEVTDMMQKALFDFLKHRFDGRISITRVTADLSLAKRSVLNNPGKRTIIERSSARSSIGFDECPFPPIPSCPPFGSPQSCWSEQWAELLVSTAAASLIAEVQSEIERIFELAKSLQLVVLDADTINHPAQLAKTSLAPIIVFVKVSSPKVLQRLIRSRGKSQMKHLTVQMMAYDKLVQCPPESFDVILDENQLEDACEHLAEYLEVYWRATHHPAPGPGLLGPPSAIPGLQNQQLLGERGEEHSPLERDSLMPSDEASESSRQAWTGSSQRSSRHLEEDYADAYQDLYQPHRQHTSGLPSANGHDPQDRLLAQDSEHNHSDRNWQRNRPWPKDSY

SEQ ID NO: 762112 - protein, 327 aa, Homo sapiens
GAPRRPAPCPVRPPSTRRCLARAVRPSCPAGWSPRPSRPAGTPNKAEMTSKEDGKAAPGEERRRSPLDHLPPPANSNKPDAVQHRGHPQQAVCAEKLLAAWGGAPAGRRGQARAGRLALAGRALLSKTSPLCALEELASKTFKGLEVSVLQAAEGRDGMTIFGQRQTPKKRRKSRTAFTNHQIYELEKRFLYQKYLSPADRDQIAQQLGLTNAQVITWFQNRRAKLKRELEEMKADVESPKKLGPSGQMDIVALAELEQNSEATAGGGGGCGRAKSRPGSPVLPPGAPKAPGRCALQLSPASPLTDQPASSQDCSEDEEDEEIDVDD

SEQ ID NO: 762113 - protein, 124 aa, Homo sapiens
MLQQNLTCTINLFCQILDRYVYVDLFPFEERGKKLVLIKGYSRIKNILGHEIVTCISPTSQDSMFNIFISLCLQKQMNVPLYFLKNEKMNVSFFASSMEAKNLNTINILMLDNGSVFKMQNVLF

SEQ ID NO: 762114 - protein, 46 aa, Homo sapiens
EGGLHVTDEGATLDGLLVPRHQPARPRNCRGGRARNCGEAEESNLL

SEQ ID NO: 762115 - protein, 610 aa, Homo sapiens
MDSVAFEDVAVNFTQEEWALLGPSQKSLYRNVMQETIRNLDCIEMKWEDQNIGDQCQNAKRNLRSHTCEIKDDSQCGETFGQIPDSIVNKNTPRVNPCDSGECGEVVLGHSSLNCNIRVDTGHKSCEHQEYGEKPYTHKQRGKAISHQHSFQTHERPPTGKKPFDCKECAKTFSSLGNLRRHMAAHHGDGPYKCKLCGKAFVWPSLFHLHERTHTGEKPYECKQCSKAFPFYSSYLRHERIHTGEKAYECKQCSKAFPDYSTYLRHERTHTGEKPYKCTQCGKAFSCYYYTRLHERTHTGEQPYACKQCGKTFYHHTSFRRHMIRHTGDGPHKCKICGKGFDCPSSVRNHETTHTGEKPYECKQCGKVLSHSSSFRSHMITHTGDGPQKCKICGKAFGCPSLFQRHERTHTGEKPYQCKQCGKAFSLAGSLRRHEATHTGVKPYKCQCGKAFSDLSSFQNHETTHTGEKPYECKECGKAFSCFKYLSQHKRTHTVEKPYECKTCRKAFSHFSNLKVHERIHSGEKPYECKECGKAFSWLTCLLRHERIHTGEKPYECLQCGKAFTRSRFLRGHEKTHTGEKLYECKECGKALSSLRSLHRHKRTHWKDTL

SEQ ID NO: 762116 - protein, 105 aa, Homo sapiens
MERSHIHINNVGKPSVISTPSRHMKGPPPERNPSIVKNVQKPLVLLETSEDTWRHTMEMDLINVSCVGKPLFGPVYFICTKEHTLERNRMNVSSVLKPFLFTVPI

SEQ ID NO: 762117 - protein, 257 aa, Homo sapiens
MDSVAFEDVAVNFTQEEWALLGPSQKSLYRNVMQETIRNLDCIEMKWEDQNIGDQCQNAKRNLRSHTCEIKDDSQCGETFGQIPDSIVNKNTPRVNPCDSGECGEVVLGHSSLNCNIRVDTGHKSCEHQEYGEKPYTHKQRGKAISHQHSFQTHERPPTGKKPFDCKECAKTFSSLGNLRRHMAAHHGDGPYKCKLCGKAFVWPSLFHLHERTHTGEKPYECKQCSKAFPFYSSYLRHERIHTGEKACMNVRNVGKH

SEQ ID NO: 762118 - protein, 391 aa, Homo sapiens
  misc_feature (364)..(364): Xaa can be any naturally occurring amino acid
  misc_feature (370)..(370): Xaa can be any naturally occurring amino acid
  misc_feature (375)..(375): Xaa can be any naturally occurring amino acid
  misc_feature (379)..(380): Xaa can be any naturally occurring amino acid
EFSCDPGYTLEQGSIIIECVDPHDPQWNETEPACRAVCSGEITDSAGVVLSPNWPEPYGRGQDCIWGVHVEEDKRIMLDIRVLRIGPGDVLTFYDGDDLTARVLGQYSGPRSHFKLFTSMADVTIQFQSDPGTSVLGYQQGFVIHFFEVPRNDTCPELPEIPNGWKSPSQPELVHGTVVTYQCYPGYQVVGSSVLMCQWDLTWSEDLPSCQRVTSCHDPGDVEHSRRLISSPKFPVGATVQYICDQGFVLMGSSILTCHDRQAGSPKWSDRAPKCLLEQLKPCHGLSAPENGARSPEKQLHPAGATIHFSCAPGYVLKGQASIKCVPGHPSHWSDPPPICRAASLDGFYNSRSLDVCQGTLLPXSNPGDXLPTFXRLPXXFWPFGWGLGFC

SEQ ID NO: 762119 - protein, 211 aa, Homo sapiens
RPDTQGPSLPHVSGFSQTCFLWPQMTPPGRLRQTSPNQWPSSRPHPAHIHSVTRSLFAAYLLSCHFPRRPAYGDVTVTSLHPGGSARFHCATGYQLKGARHLTCLNATQPFWDSKEPVCIAACGGVIRNATTGRIVSPGFPGNYSNNLTCHWLLEAPEGQRLHLHFEKVSLAEDDDRLIIRNGDNVEAPPVYDSYEVEYPAPAPAPTTALP

SEQ ID NO: 762120 - protein, 394 aa, Homo sapiens
  misc_feature (8)..(9): Xaa can be any naturally occurring amino acid
SGDDEETXXHLPPPIITTTITTVQTPGPCSWNFSGPEGSLDSPTDLSSPTDVGLDCFFYISVYPGYGVEIKVQNISLREGETVTVEGLGGPDPLPLANQSFLLRGQVIRSPTHQAALRFQSLPPPAGPGTFHFHYQAYLLSCHFPRRPAYGDVTVTSLHPGGSARFHCATGYQLKGARHLTCLNATQPFWDSKEPVCIAACGGVIRNATTGRIVSPGFPGNYSNNLTCHWLLEAPEGQRLHLHFEKVSLAEDDDRLIIRNGDNVEAPPVYDSYEVEYCPLRACSALANTSLLSSVLTAAGQLQAWPCAMRVSLLGPHWGWRVHGDGLGPRVFLPHPTPLCLHAVTPSKSAPAHSVLRPPFPAPLFGSGIPTTALQETSAWTQALWSKGINSPDF

SEQ ID NO: 762121 - protein, 438 aa, Homo sapiens
EFSCDPGYTLEQGSIIIECVDPHDPQWNETEPACRAVCSGEITDSAGVVLSPNWPEPYGRGQDCIWGVHVEEDKRIMLDIRVLRIGPGDVLTFYDGDDLTARVLGQYSGPRSHFKLFTSMADVTIQFQSDPGTSVLGYQQGFVIHFFEVPRNDTCPELPEIPNGWKSPSQPELVHGTVVTYQCYPGYQVVGSSVLMCQWDLTWSEDLPSCQRVTSCHDPGDVEHSRRLISSPKFPVGATVQYICDQGFVLMGSSILTCHDRQAGSPKWSDRAPKCLLEQLKPCHGLSAPENGARSPEKQLHPAGATIHFSCAPGYVLKGQASIKCVPGHPSHWSDPPPICRAASLDGFYNSRSLDVAKAPAASSTLDAAHIAAAIFLPLVAMVLLVGGVYFYFSRLQGKSSLQLPRPRPRPYNRITIESAFDNPTYETGETREYEVSI

SEQ ID NO: 762122 - protein, 293 aa, Homo sapiens
  misc_feature (8)..(9): Xaa can be any naturally occurring amino acid
SGDDEETXXHLPPPIITTTITTVQTPGPCSWNFSGPEGSLDSPTDLSSPTDVGLDCFFYISVYPGYGVEIKVQNISLREGETVTVEGLGGPDPLPLANQSFLLRGQVIRSPTHQAALRFQSLPPPAGPGTFHFHYQAYLLSCHFPRRPAYGDVTVTSLHPGGSARFHCATGYQLKGARHLTCLNATQPFWDSKEPVCIAACGGVIRNATTGRIVSPGFPGNYSNNLTCHWLLEAPEGQRLHLHFEKVSLAEDDDRLIIRNGDNVEAPPVYDSYEVEYPPPPPPLQPHYHRVSV

SEQ ID NO: 762123 - protein, 160 aa, Homo sapiens
PGSHGSQVMGFPRREGRERERFGPSRLKSSFPTPSQLEGAGSQMPLGRGERIWAPGDRDLCSSHTLCVFSCQGTCCLQHPGCCPHCSCHLLATGGDGVVGRRCILLLLQVSLASLSALHTCIPHSYPVLLTCRLLCPTGSREKAPCSCPAPAPAPTTALP

SEQ ID NO: 762124 - protein, 451 aa, Homo sapiens
GTRPGASLGASQGPPTPGMTAASRANPYSIVSSEEDGLHLVTMSGANGFGNGKVHTRRRCRNRFVKKNGQCNIEFANMDEKSQRYLADMFTTCVDIRWRYMLLIFSLAFLASWLLFGIIFWVIAVAHGDLEPAEGRGRTPCVMQVHGFMAAFLFSIETQTTIGYGLRCVTEECPVAVFMVVAQSIVGCIIDSFMIGAIMAKMARPKKRAQTLLFSHNAVVALRDGKLCLMWRVGNLRKSHIVEAHVRAQLIKPRVTEEGEYIPLDQIDIDVGFDKGLDRIFLVSPITILHEIDEASPLFGISRQDLETDDFEIVVILEGMVEATAMTTQARSSYLANEILWGHRFEPVLFEEKNQYKIDYSHFHKTYEVPSTPRCSAKDLVENKFLLPSANSFCYENELAFLSRDEEDEADGDQDGRSRDGLSPQARHDFDRLQAGGGVLEQRPYRRESEI

SEQ ID NO: 762125 - protein, 179 aa, Homo sapiens
MIKRSNSTAATNEVPEVTVFSKSPVTLGQPNILICLVDNIFPPVVNITWLSNGHSVTEGVSETSFLSKSDHSFFKISYLTLLPSAEESYDCKVEHWGLDKPLLKHWEPEIPAPMSELTETVVCALGLSVGLVGIVVGTVFHHPRPAFSWCFQTPRALVNPILEGKVHRHLQEQKSGLAT

SEQ ID NO: 762126 - protein, 148 aa, Homo sapiens
MIKRSNSTAATNEVPEVTVFSKSPVTLGQPNILICLVDNIFPPVVNITWLSNGHSVTEGVSETSFLSKSDHSFFKISYLTLLPSAEESYDCKVEHWGLDKPLLKHWGKDEFHHFLMLSCLSSSELPAFYSYIPKLVFHTSWVSFFLLK

SEQ ID NO: 762127 - protein, 166 aa, Homo sapiens
MIKRSNSTAATNEVPEVTVFSKSPVTLGQPNILICLVDNIFPPVVNITWLSNGHSVTEGVSETSFLSKSDHSFFKISYLTLLPSAEESYDCKVEHWGLDKPLLKHWEPEIPAPMSELTETVVCALGLSVGLVGIVVGTVFHHPRPAFSWCFQTPRALVNPILEGKG

SEQ ID NO: 762128 - protein, 179 aa, Homo sapiens
MIKRSNSTAATNEVPEVTVFSKSPVTLGQPNILICLVDNIFPPVVNITWLSNGHSVTEGVSETSFLSKSDHSFFKISYLTLLPSAEESYDCKVEHWGLDKPLLKHWEPEIPAPMSELTETVVCALGLSVGLVGIVVGTVFHHPRPAFSWCFQTPRALVNPILEGKVHHHLQEKKNGLAK

SEQ ID NO: 762129 - protein, 210 aa, Homo sapiens
RLWAVAPVLVLRTMLCSPRKLYQASLLRSMEEDAHSNSTAATNEVPEVTVFSKSPVTLGQPNILICLVDNIFPPVVNITWLSNGHSVTEGVSETSFLSKSDHSFFKISYLTLLPSAEESYDCKVEHWGLDKPLLKHWEPEIPAPMSELTETVVCALGLSVGLVGIVVGTVFHHPRPAFSWCFQTPRALVNPILEGKVHRHLQEQKSGLAT

SEQ ID NO: 762130 - protein, 130 aa, Homo sapiens [sequence omitted]

SEQ ID NO: 762131 - protein, 194 aa, Homo sapiens
MILNKALMLGALALTTVMSPCGGEDIVEVPEVTVFSKSPVTLGQPNILICLVDNIFPPVVNITWLSNGHSVTEGVSETSFLSKSDHSFFKISYLTLLPSAEESYDCKVEHWGLDKPLLKHWEPEIPAPMSELTETVVCALGLSVGLVGIVVGTVFHHPRPAFSWCFQTPRALVNPILEGKVHRHLQEQKSGLAT

SEQ ID NO: 762132 - protein, 172 aa, Homo sapiens
MIKRSNSTAATNEVPEVTVFSKSPVTLGQPNILICLVDNIFPPVVNITWLSNGHSVTEGVSETSFLSKSDHSFFKISYLTLLPSAEESYDCKVEHWGLDKPLLKHWEPEIPAPMSELTETLVCALGLSVGLMGIVVGTVFIIQGLRSVGASRHRHVYHLKEGACMIRAEMTA

SEQ ID NO: 762133 - protein, 75 aa, Homo sapiens
SLCRVEFRLLQRPGSRDTPWDMSASASLASLVCNVQSLHGFCKTHWHAYAKFINSQKPGGEPLRTPRSRGHLIAT

SEQ ID NO: 762134 - protein, 488 aa, Homo sapiens
LTPAQWKLASLPLWVQSCKKHQARPLQKPQPRPSPPSQGHSAEACTPAKSLRLLAAAVSMAQAPADPGREGHLEQRILQVLTEAGSPVKLAQLVKECQAPKRELNQVLYRMKKELKVSLTSPATWCLGGTDPEGEGPAELALSSPAERPQQHAATIPETPGPQFSQQREEDIYRFLKDNGPQRALVIAQALGMRTAKDVNRDLYRMKSRHLLDMDEQSKAWTIYRPEDSGRRAKSASIIYQHNPINMICQNGPNSWISIANSEAIQIGHGNIITRQTVSREDGSAGPRHLPSMAPGDSSTWGTLVDPWGPQDIHMERSILRRVQLGHSNEMRLHGVPSEGPAHIPPGSPPVSATAAGPEASFEARIPSPGTHPEGEAAQRIHMKSCFLEDATIGNSNKMSISPGVAGPGGVAGSGEGEPGEDAGRRPADTQSRSHFPRDIGQPITPSHSKLTPKLETMTLGNRSHKAAEGSHYVDEASHEGSWWGGGI

SEQ ID NO: 762135 - protein, 503 aa, Homo sapiens
LTPAQWKLASLPLWVQSCKKHQARPLQKPQPRPSPPSQGHSAEACTPAKSLRLLAAAVSMAQAPADPGREGHLEQRILQVLTEAGSPVKLAQLVKECQAPKRELNQVLYRMKKELKVSLTSPATWCLGGTDPEGEGPAELALSSPAERPQQHAATIPETPGPQFSQQREEDIYRFLKDNGPQRALVIAQALGMRTAKDVNRDLYRMKSRHLLDMDEQSKAWTIYRPEDSGRRAKSASIIYQHNPINMICQNGPNSWISIANSEAIQIGHGNIITRQTVSREDGSAGPRHLPSMAPGDSSTWGTLVDPWGPQDIHMERSILRRVQLGHSNEMRLHGVPSEGPAHIPPGSPPVSATAAGPEASFEARIPSPGTHPEGEAAQRIHMKSCFLEDATIGNSNKMSISPGVAGPGGVAGSGEGEPGEDAVAAFTEVLNPSKSFMKFGINFFQTPVNVDSLTSSHESQMFLTACRLVIFSRRFSTYFAQIHLRNHSVLHLCPHKIYLLKN

SEQ ID NO: 762136 - protein, 208 aa, Homo sapiens
LTPAQWKLASLPLWVQSCKKHQARPLQKPQPRPSPPSQGHSAEACTPAKSLRLLAAAVSMAQAPADPGREGHLEQRILQVLTEAGSPVKLAQLVKECQAPKRELNQVLYRMKKELKVSLTSPATWCLGGTDPEGEGPAELALSSPGNCHPGEAGLTLQGASWQWTSTDLSLGSNLNSATWELTGFLSLCLGFFFWLMELTAGLLGRGC

SEQ ID NO: 762137 - protein, 307 aa, Homo sapiens
LTPAQWKLASLPLWVQSCKKHQARPLQKPQPRPSPPSQGHSAEACTPAKSLRLLAAAVSMAQAPADPGREGHLEQRILQVLTEAGSPVKLAQLVKECQAPKRELNQVLYRMKKELKVSLTSPATWCLGGTDPEGEGPAELALSSPAERPQQHAATIPETPGPQFSQQREEDIYRFLKDNGPQRALVIAQALGMRTAKDVNRDLYRMKSRHLLDMDEQSKAWTIYRPEDSGRRAKSASIIYQHNPINMICQNGPNSWISIANSEAIQIGHGNIITRQTVSREDGKSPKRAQGGDLGGEPPDPLGGGKG

SEQ ID NO: 762138 - protein, 142 aa, Homo sapiens
MSRGAGRLQGTLWALVFLGILVGMVVPSPAGTRANNTLLDSRGWGTLLSRSRAGLAGEIAGVNWESGYLVGIKRQRRLYCNVGIGFHLQVLPDGRISGTHEENPYSLLEISTVERGVVSLFGVRSALFVAMNSKGRLYATVK

SEQ ID NO: 762139 - protein, 208 aa, Homo sapiens
MALGQKLFITMSRGAGRLQGTLWALVFLGILVGMVVPSPAGTRANNTLLDSRGWGTLLSRSRAGLAGEIAGVNWESGYLVGIKRQRRLYCNVGIGFHLQVLPDGRISGTHEENPYSLLEISTVERGVVSLFGVRSALFVAMNSKGRLYATPSFQEECKFRETLLPNNYNAYESDLYQGTYIALSKYGRVKRGSKVSPIMTVTHFLPRI

SEQ ID NO: 762140 - protein, 153 aa, Homo sapiens
MSRGAGRLQGTLWALVFLGILVGMVVPSPAGTRANNTLLDSRGWGTLLSRSRAGLAGEIAGVNWESGYLVGIKRQRRLYCNVGIGFHLQVLPDGRISGTHEENPYSLLEISTVERGVVSLFGVRSALFVAMNSKGRLYATAAEGFTSMISQHP

SEQ ID NO: 762141 - protein, 178 aa, Homo sapiens
GRVGRPTRRYSQLWSRSHPFCCSRGPLAMAGILFEDIFDVKDIDPEGKKFDRVSRLHCESESFKMDLILDVNIQIYPVDLGDKFRLVIASTLYEDGTLDDGEYNPTDDRPSRADQFEYVMYGKVYRIEGDETSTEAATRLSAYVSYGGLLMRLQGDANNLHGFEVDSRVYLLMKKLAF

SEQ ID NO: 762142 - protein, 150 aa, Homo sapiens
MAGILFEDIFDVKDIDPEGKKFDRVSRLHCESESFKMDLILDVNIQIYPVDLGDKFRLVIASTLYEDGTLDDGEYNPTDDRPSRADQFEYVMYGKVYRIEGDETSTEAATRLSAYVSYGGLLMRLQGDANNLHGFEVDSRVYLLMKKLAF

SEQ ID NO: 762143 - protein, 150 aa, Homo sapiens; identical to SEQ ID NO: 762142

SEQ ID NO: 762144 - protein, 150 aa, Homo sapiens; identical to SEQ ID NO: 762142

SEQ ID NO: 762145 - protein, 145 aa, Homo sapiens
RVRPRVRKDIDPEGKKFDRVSRLHCESESFKMDLILDVNIQIYPVDLGDKFRLVIASTLYEDGTLDDGEYNPTDDRPSRADQFEYVMYGKVYRIEGDETSTEAATRLSAYVSYGGLLMRLQGDANNLHGFEVDSRVYLLMKKLAF

SEQ ID NO: 762146 - protein, 150 aa, Homo sapiens; identical to SEQ ID NO: 762142

SEQ ID NO: 762147 - protein, 150 aa, Homo sapiens; identical to SEQ ID NO: 762142

SEQ ID NO: 762148 - protein, 122 aa, Homo sapiens
MAGILFEDIFDVKDIDPEGKKFDRVSRLHCESESFKMDLILDVNIQIYPVDLGDKFRLVIASTLYEDGTLDDGEYNPTDDRPSSSAYVSYGGLLMRLQGDANNLHGFEVDSRVYLLMKKLAF

SEQ ID NO: 762149 - protein, 132 aa, Homo sapiens
MAGILFEDIFDVKDIDPEGKKFDRVSRLHCESESFKMDLILDVNIQIYPVDLGDKFRLVIASTLYEDGTLDDGEYNPTDDRPSRADQFEYVMYGSAYVSYGGLLMRLQGDANNLHGFEVDSRVYLLMKKLAF

SEQ ID NO: 762150 - protein, 150 aa, Homo sapiens; identical to SEQ ID NO: 762142

SEQ ID NO: 762151 - protein, 150 aa, Homo sapiens; identical to SEQ ID NO: 762142

SEQ ID NO: 762152 - protein, 150 aa, Homo sapiens; identical to SEQ ID NO: 762142

SEQ ID NO: 762153 - protein, 185 aa, Homo sapiens
YSPRALLASEAPTRRTYSQLWSRSHPFCCSRGPLAMAGILFEDIFDVKDIDPEGKKFDRVSRLHCESESFKMDLILDVNIQIYPVDLGDKFRLVIASTLYEDGTLDDGEYNPTDDRPSRADQFEYVMYGKVYRIEGDETSTEAATRLSAYVSYGGLLMRLQGDANNLHGFEVDSRVYLLMKKLAF

SEQ ID NO: 762154 - protein, 148 aa, Homo sapiens
  misc_feature (11)..(11): Xaa can be any naturally occurring amino acid
MQSHTVVSPLXIPLSLFSCFSPVSRLHCESESFKMDLILDVNIQIYPVDLGDKFRLVIASTLYEDGTLDDGEYNPTDDRPSRADQFEYVMYGKVYRIEGDETSTEAATRLSAYVSYGGLLMRLQGDANNLHGFEVDSRVYLLMKKLAF

SEQ ID NO: 762155 - protein, 175 aa, Homo sapiens
MAGILFEDIFDVKDIDPEGKKFDRVSRLHCESESFKMDLILDVNIQIYPVDLGDKFRLVIASTLYEDGTLDDGEYNPTDDRPSRADQFEYVMYGKVYRIEGDETSTEAATRLLRLRAAEWQCSRITGWGLLFQLCVRVLWGPAHEAAGGCQQPAWIRGGLQSLSPDEEASLLNLA

SEQ ID NO: 762156 - protein, 175 aa, Homo sapiens; identical to SEQ ID NO: 762155

SEQ ID NO: 762157 - protein, 136 aa, Homo sapiens
EHCSLNENITVPDTKVNFYAWKRMEVGQQAVEVWQGLALLSEAVLRGQALLVNSSQPWEPLQLHVDKAVSGLRSLTTLLRALGAQKEAISPPDAASAAPLRTITADTFRKLFRVYSNFLRGKLKLYTGEACRTGDR

SEQ ID NO: 762158 - protein, 136 aa, Homo sapiens; identical to SEQ ID NO: 762157

SEQ ID NO: 762159 - protein, 113 aa, Homo sapiens
GSLTERLKPNQRSIKCFPCHVIIKGLFIKLFFPSTSCPSIKTKLTVHTKKQKTQLKEKEQALEPDPDMAVRFELLDRKFKTTIIKMLRALIDRVESMQEKMDKKKKRNNRWTV

SEQ ID NO: 762160 - protein, 833 aa, Homo sapiens
MHQLFRLVLGQKDLSRAGDLFSLDDSEIEDSLTEALEQIKIISSSSDYQTNNNDQAVVEICITRITTAIRETESIEKHAKALVGLWDSCLEHNLRPFGKDEDTPHAKIASDIMSCILQNYNRPPVMALAIPIAVKFLHRGNKELCRNMSNYLSLAAITKADLLADHTEVIVKSILQGNTMLLRVLPAVYEKQPQPINRHLTELLALMSQLEQPEQYHLLRLLHVAAKKKQLEVVQKCIPFLIGHLKDSTHNDIILNILIEIAVYEPVALNSFLPMLKEIGERFPYLTGQMARIYGAVGHVDEERARSCLTYLVSQLANMEHSFHHILLLEIKSITDTFSSILGPQSRDIFRMSNSFTAIAKLLTRQLENTKAGSGRRKISTEIEFPEKLEETKLIVTENEDHEKLQVKIQAFEDKINAGSNTPGSIRRYSLGQVSKEERKNIRFNRSKSLAFHTMLTKGVGSDDGEDENRGDIPASISLSEIDPLGQGNDKLPFKTDTERSQLGESSVSYPNIIHIDSENLSETVKENSQEETPETTASPIEYQDKLYLHLKKNLSKVKAYAMEIGKKIPVPDQCTIEDTVRSCVAKLFFTCSLKGHYCLYSKSSFILISQEPQPWIQIMFLFQQSLFPEPLSIQSHSVQFLRALWEKTQAGGAHSFETAMMESTFPQQKDLDQVQLHLEEVRFFDVFGFSETAGAWQCFMCNNPEKATVVNQDGQPLIEGKLKEKQVRWKFIKRWKTRYFTLAGNQLLFQKGKSKDDPDDCPIELSKVQSVKAVAKKRRDRSLPRAFEIFTDNKTYVFKAKDEKNAEEWLQCINVAVAQAKERESREVTTYL

SEQ ID NO: 762161 - protein, 881 aa, Homo sapiens
MHQLFRLVLGQKDLSRAGDLFSLDDSEIEDSLTEALEQIKIISSSSDYQTNNNDQAVVEICITRITTAIRETESIEKHAKALVGLWDSCLEHNLRPFGKDEDTPHAKIASDIMSCILQNYNRPPVMALAIPIAVKFLHRGNKELCRNMSNYLSLAAITKADLLADHTEVIVKSILQGNTMLLRVLPAVYEKQPQPINRHLTELLALMSQLEQPEQYHLLRLLHVAAKKKQLELANRKDSISICELSELMDKYKEKGVNRSVGFLGIGINQDMMIAWKQLLVVQKCIPFLIGHLKDSTHNDIILNILIEIAVYEPVALNSFLPMLKEIGERFPYLTGQMARIYGAVGHVDEERARSCLTYLVSQLANMEHSFHHILLLEIKSITDTFSSILGPQSRDIFRMSNSFTAIAKLLTRQLENTKAGSGRRKISTEIEFPEKLEETKLIVTENEDHEKLQVKIQAFEDKINAGSNTPGSIRRYSLGQVSKEERKNIRFNRSKSLAFHTMLTKGVGSDDGEDENRGDIPASISLSEIDPLGQGNDKLPFKTDTERSQLGESSVSYPNIIHIDSENLSETVKENSQEETPETTASPIEYQDKLYLHLKKNLSKVKAYAMEIGKKIPVPDQCTIEDTVRSCVAKLFFTCSLKGHYCLYSKSSFILISQEPQPWIQIMFLFQQSLFPEPLSIQSHSVQFLRALWEKTQAGGAHSFETAMMESTFPQQKDLDQVQLHLEEVRFFDVFGFSETAGAWQCFMCNNPEKATVVNQDGQPLIEGKLKEKQVRWKFIKRWKTRYFTLAGNQLLFQKGKSKDDPDDCPIELSKVQSVKAVAKKRRDRSLPRAFEIFTDNKTYVFKAKDEKNAEEWLQCINVAVAQAKERESREVTTYL

SEQ ID NO: 762162 - protein, 821 aa, Homo sapiens
MQLLRRRVKEKRREPETKQGGIHHLEVLAGKEDKDYQTNNNDQAVVEICITRITTAIRETESIEKHAKALVGLWDSCLEHNLRPFGKDEDTPHAKIASDIMSCILQNYNRPPVMALAIPIAVKFLHRGNKELCRNMSNYLSLAAITKADLLADHTEVIVKSILQGNTMLLRVLPAVYEKQPQPINRHLTELLALMSQLEQPEQYHLLRLLHVAAKKKQLEVVQKCIPFLIGHLKDSTHNDIILNILIEIAVYEPVALNSFLPMLKEIGERFPYLTGQMARIYGAVGHVDEERARSCLTYLVSQLANMEHSFHHILLLEIKSITDTFSSILGPQSRDIFRMSNSFTAIAKLLTRQLENTKAGSGRRKISTEIEFPEKLEETKLIVTENEDHEKLQVKIQAFEDKINAGSNTPGSIRRYSLGQVSKEERKNIRFNRSKSLAFHTMLTKGVGSDDGEDENRGDIPASISLSEIDPLGQGNDKLPFKTDTERSQLGESSVSYPNIIHIDSENLSETVKENSQEETPETTASPIEYQDKLYLHLKKNLSKVKAYAMEIGKKIPVPDQCTIEDTVRSCVAKLFFTCSLKGHYCLYSKSSFILISQEPQPWIQIMFLFQQSLFPEPLSIQSHSVQFLRALWEKTQAGGAHSFETAMMESTFPQQKDLDQVQLHLEEVRFFDVFGFSETAGAWQCFMCNNPEKATVVNQDGQPLIEGKLKEKQVRWKFIKRWKTRYFTLAGNQLLFQKGKSKDDPDDCPIELSKVQSVKAVAKKRRDRSLPRAFEIFTDNKTYVFKAKDEKNAEEWLQCINVAVAQAKERESREVTTYL

SEQ ID NO: 762163 - protein, 807 aa, Homo sapiens
TSIFHRPSTPSQPKMGFGYKDYQTNNNDQAVVEICITRITTAIRETESIEKHAKALVGLWDSCLEHNLRPFGKDEDTPHAKIASDIMSCILQNYNRPPVMALAIPIAVKFLHRGNKELCRNMSNYLSLAAITKADLLADHTEVIVKSILQGNTMLLRVLPAVYEKQPQPINRHLTELLALMSQLEQPEQYHLLRLLHVAAKKKQLEVVQKCIPFLIGHLKDSTHNDIILNILIEIAVYEPVALNSFLPMLKEIGERFPYLTGQMARIYGAVGHVDEERARSCLTYLVSQLANMEHSFHHILLLEIKSITDTFSSILGPQSRDIFRMSNSFTAIAKLLTRQLENTKAGSGRRKISTEIEFPEKLEETKLIVTENEDHEKLQVKIQAFEDKINAGSNTPGSIRRYSLGQVSKEERKNIRFNRSKSLAFHTMLTKGVGSDDGEDENRGDIPASISLSEIDPLGQGNDKLPFKTDTERSQLGESSVSYPNIIHIDSENLSETVKENSQEETPETTASPIEYQDKLYLHLKKNLSKVKAYAMEIGKKIPVPDQCTIEDTVRSCVAKLFFTCSLKGHYCLYSKSSFILISQEPQPWIQIMFLFQQSLFPEPLSIQSHSVQFLRALWEKTQAGGAHSFETAMMESTFPQQKDLDQVQLHLEEVRFFDVFGFSETAGAWQCFMCNNPEKATVVNQDGQPLIEGKLKEKQVRWKFIKRWKTRYFTLAGNQLLFQKGKSKDDPDDCPIELSKVQSVKAVAKKRRDRSLPRAFEIFTDNKTYVFKAKDEKNAEEWLQCINVAVAQAKERESREVTTYL

SEQ ID NO: 762164 - protein, 177 aa, Homo sapiens
MHQLFRLVLGQKDLSRAGDLFSLDDSEIEDSLTEALEQIKIISSSSDYQTNNNDQAVVEICITRITTAIRETESIEKHAKALVGLWDSCLEHNLRPFGKDEDTPHAKIASDIMSCILQNYNRPPVMALAIPIAVKFLHRGNKELCRNMSNYLSLAAITKADLLADHTEVIVKSILQV

SEQ ID NO: 762165 - protein, 177 aa, Homo sapiens; identical to SEQ ID NO: 762164

SEQ ID NO: 762166 - protein, 833 aa, Homo sapiens; identical to SEQ ID NO: 762160

SEQ ID NO: 762167 - protein, 833 aa, Homo sapiens; identical to SEQ ID NO: 762160

SEQ ID NO: 762168 - protein, 793 aa, Homo sapiens
MEQLVVDYQTNNNDQAVVEICITRITTAIRETESIEKHAKALVGLWDSCLEHNLRPFGKDEDTPHAKIASDIMSCILQNYNRPPVMALAIPIAVKFLHRGNKELCRNMSNYLSLAAITKADLLADHTEVIVKSILQGNTMLLRVLPAVYEKQPQPINRHLTELLALMSQLEQPEQYHLLRLLHVAAKKKQLEVVQKCIPFLIGHLKDSTHNDIILNILIEIAVYEPVALNSFLPMLKEIGERFPYLTGQMARIYGAVGHVDEERARSCLTYLVSQLANMEHSFHHILLLEIKSITDTFSSILGPQSRDIFRMSNSFTAIAKLLTRQLENTKAGSGRRKISTEIEFPEKLEETKLIVTENEDHEKLQVKIQAFEDKINAGSNTPGSIRRYSLGQVSKEERKNIRFNRSKSLAFHTMLTKGVGSDDGEDENRGDIPASISLSEIDPLGQGNDKLPFKTDTERSQLGESSVSYPNIIHIDSENLSETVKENSQEETPETTASPIEYQDKLYLHLKKNLSKVKAYAMEIGKKIPVPDQCTIEDTVRSCVAKLFFTCSLKGHYCLYSKSSFILISQEPQPWIQIMFLFQQSLFPEPLSIQSHSVQFLRALWEKTQAGGAHSFETAMMESTFPQQKDLDQVQLHLEEVRFFDVFGFSETAGAWQCFMCNNPEKATVVNQDGQPLIEGKLKEKQVRWKFIKRWKTRYFTLAGNQLLFQKGKSKDDPDDCPIELSKVQSVKAVAKKRRDRSLPRAFEIFTDNKTYVFKAKDEKNAEEWLQCINVAVAQAKERESREVTTYL

SEQ ID NO: 762169 - protein, 206 aa, Homo sapiens
MHQLFRLVLGQKDLSRAGDLFSLDDSEIEDSLTEALEQIKIISSSSDYQTNNNDQAVVEICITRITTAIRETESIEKHAKALVGLWDSCLEHNLRPFGKDEDTPHAKIASDIMSCILQNYNRPPVMALAIPIAVKFLHRGNKELCRNMSNYLSLAAITKADLLADHTEVIVKSILQDGAKVELGDMFWEIFKSIFIKHLWFVGSKT

SEQ ID NO: 762170 - protein, 809 aa, Homo sapiens
MHQLFRLVLGQKDLSRAGDLFSLDDSEIEDSLTEALEQIKIISSSSDYQTNNNDQAVVEICITRITTAIRETESIEKHAKALVGLWDSCLEHNLRPFGKDEDTPHAKIASDIMSCILQNYNRPPVMALAIPIAVKFLHRGNKELCRNMSNYLSLAAITKADLLADHTEVIVKSILQGNTMLLRVLPAVYEKQPQPINRHLTELLALMSQLEQPEQYHLLRLLHVAAKKKQLEVVQKCIPFLIGHLKDSTHNDIILNILIEIAVYEPVALNSFLPMLKEIGERFPYLTGQMARIYGAVGHVDEERARSCLTYLVSQLANMEHSFHHILLLEIKSITDTFSSILGPQSRDIFRMSNSFTAIAKLLTRQLENTKAGSGRRKISTEIEFPEKLEETKLIVTENEDHEKLQVKIQAFEDKINAGSNTPGSIRRYSLGQVSKEERKNIRFNRSKSLAFHTMLTKGVGSDDGEDENRGDIPASISLSEIDPLGQGNDKLPFKTDTERSQLGESSVSYPNIIHIDSENLSETVKENSQEETPETTASPIEYQDKLYLHLKKNLSKVKAYAMEIGKKIPVPDQCTIEDTVRSCVAKLFFTCSLKGHYCLYSKSSFILISQEPQPWIQIMFLFQQSLFPEPLSIQSHSVQFLRALWEKTQAGGAHSFETAMMESTFPQQKDLDQVQLHLEEVRFFDVFGFSETAGAWQCFMCNNPEKATVVNQDGQPLIEGKLKEKQVRWKFIKRWKTRYFTLAGNQLLFQKGKSKDDPDDCPIELSKVQSVKAVAKKRRDRSLPRAFEIFTEGKTRFARAPPLALVTR

SEQ ID NO: 762171 - protein, 580 aa, Homo sapiens
MPSWALFMVTSCLLLAPQNLAQVSSQDVSLLASDSEPLKCFSRTFEDLTCFWDEEEAAPSGTYQLLYAYPREKPRACPLSSQSMPHFGTRYVCQFPDQEEVRLFFPLHLWVKNVFLNQTRTQRVLFVDSVGLPAPPSIIKAMGGSQPGELQISWEEPAPEISDFLRYELRYGPRDPKNSTGPTVIQLIATETCCPALQRPHSASALDQSPCAQPTMPWQDGPKQTSPSREASALTAEGGSCLISGLQPGNSYWLQLRSEPDGISLGGSWGSWSLPVTVDLPGDAVALGLQCFTLDLKNVTCQWQQQDHASSQGFFYHSRARCCPRDRYPIWENCEEEEKTNPGLQTPQFSRCHFKSRNDSIIHILVEVTTAPGTVHSYLGSPFWIHQAVRLPTPNLHWREISSGHLELEWQHPSSWAAQETCYQLRYTGEGHQDWKVLEPPLGARGGTLELRPRSRYRLQLRARLNGPTYQGPWSSWSDPTRVETATETAWISLVTALHLVLGLSAVLGLLLLRWQFPAHYRYRPRQAGDWRWTRWSRTCKQAFLVRSVTPDLRPPPVRTYGFATSCTSPLGLAAAPYTL

SEQ ID NO: 762172 - protein, 635 aa, Homo sapiens
MPSWALFMVTSCLLLAPQNLAQVSSQDVSLLASDSEPLKCFSRTFEDLTCFWDEEEAAPSGTYQLLYAYPREKPRACPLSSQSMPHFGTRYVCQFPDQEEVRLFFPLHLWVKNVFLNQTRTQRVLFVDSVGLPAPPSIIKAMGGSQPGELQISWEEPAPEISDFLRYELRYGPRDPKNSTGPTVIQLIATETCCPALQRPHSASALDQSPCAQPTMPWQDGPKQTSPSREASALTAEGGSCLISGLQPGNSYWLQLRSEPDGISLGGSWGSWSLPVTVDLPGDAVALGLQCFTLDLKNVTCQWQQQDHASSQGFFYHSRARCCPRDRYPIWENCEEEEKTNPGLQTPQFSRCHFKSRNDSIIHILVEVTTAPGTVHSYLGSPFWIHQAVRLPTPNLHWREISSGHLELEWQHPSSWAAQETCYQLRYTGEGHQDWKVLEPPLGARGGTLELRPRSRYRLQLRARLNGPTYQGPWSSWSDPTRVETATETAWISLVTALHLVLGLSAVLGLLLLRWQFPAHYRRLRHALWPSLPDLHRVLGQYLRDTAALSPPKATVSDTCEEVEPSLLEILPKSSERTPLPLCSSQAQMDYRRLQPSCLGTMPLSVCPPMAESGSCCTTHIANHSYLPLSYWQQP

SEQ ID NO: 762173 - protein, 934 aa, Homo sapiens
RPPAGSCVRPSAGQSVHARKARRGGRGAWEGTGAEAGPRLPPTPGGAQEAAVLEREPEPEPETKRGGREHEWGGACHGPPPPSSPSSPSPAPEPQSRRAARGSTPHPSPVRSAATQAFQDTVEREQGGRDAPFGRSVGEGGPDRREARSPTEAGRRVWDAVGSAKGWLRAAGAAGCGPGLLGDRPCLAGNRDQETTQKRLDLEQGRLPHSLPEPAEGAKDFRAVSSGIRETLAFQGSTLYRRRLYREGVFAAWMAIPHSFNGGLYGLRENPELERRPDGPCCPPGERGSCRLLPGPGGAGPAIVGDLAPEAVAAMSRPGHGGLMPVNGLGFPPQNVARVVVWEWLNEHSRWRPYTATVCHHIENVLKEDARGSVVLGQVDAQLVPYIIDLQSMHQFRQDTGTMRPVRRNFYDPSSAPGKGIVWEWENDGGAWTAYDMDICITIQNAYEKQHPWLDLSSLGFCYLIYFNSMSQMNRQTRRRRRLRRRLDLAYPLTVGSIPKSQSWPVGASSGQPCSCQQCLLVNSTRAASNAILASQRRKAPPAPPLPPPPPPGGPPGALAVRPSATFTGAALWAAPAAGPAEPAPPPGAPPRSPGAPGGARTPGQNNLNRPGPQRTTSVSARASIPPGVPALPVKNLNGTGPVHPALAGMTGILLCAAGLPVCLTRAPKPILHPPPVSKSDVKPVPGVPGVCRKTKKKHLKKSKNPEDVVRRYMQKVKNPPDEDCTICMERLVTASGYEGVLRHKGVRPELVGRLGRCGHMYHLLCLVAMYSNGNKDGSLQCPTCKAIYGEKTGTQPPGKMEFHLIPHSLPGFPDTQTIRIVYDIPTGIQGPEHPNPGKKFTARGFPRHCYLPNNEKGRKVLRLLITAWERRLIFTIGTSNTTGESDTVVWNEIHHKTEFGSNLTGHGYPDASYLDNVLAELTAQGVSEAAAKA

SEQ ID NO: 762174 - protein, 241 aa, Homo sapiens
HGPSAGSSPALNLGYQVRRYMQKVKNPPDEDCTICMERLVTASGYEGVLRHKGVRPELVGRLGRCGHMYHLLCLVAMYSNGNKDGSLQCPTCKAIYGEKTGTQPPGKMEFHLIPHSLPGFPDTQTIRIVYDIPTGIQGPEHPNPGKKFTARGFPRHCYLPNNEKGRKVLRLLITAWERRLIFTIGTSNTTGESDTVVWNEIHHKTEFGSNLTGHGYPDASYLDNVLAELTAQGVSEAAAKA

SEQ ID NO: 762175 - protein, 865 aa, Homo sapiens
RPPAGSCVRPSAGQSVHARKARRGGRGAWEGTGAEAGPRLPPTPGGAQEAAVLEREPEPEPETKRGGREHEWGGACHGPPPPSSPSSPSPAPEPQSRRAARGSTPHPSPVRSAATQAFQDTVEREQGGRDAPFGRSVGEGGPDRREARSPTEAGRRVWDAVGSAKGWLRAAGAAGCGPGLLGDRPCLAGNRDQETTQKRLDLEQGRLPHSLPEPAEGAKDFRAVSSGIRETLAFQGSTLYRRRLYREGVFAAWMAIPHSFNGGLYGLRENPELERRPDGPCCPPGERGSCRLLPGPGGAGPAIVGDLAPEAVAAMSRPGHGGLMPVNGLGFPPQNVARVVVWEWLNEHSRWRPYTATVCHHIENVLKEDARGSVVLGQVDAQLVPYIIDLQSMHQFRQDTGTMRPVRRNFYDPSSAPGKGIVWEWENDGGAWTAYDMDICITIQNAYEKQHPWLDLSSLGFCYLIYFNSMSQMNRQTRRRRRLRRRLDLAYPLTVGSIPKSQSWPVGASSGQPCSCQQCLLVNSTRAASNAILASQRRKAPPAPPLPPPPPPGGPPGALAVRPSATFTGAALWAAPAAGPAEPAPPPGAPPRSPGAPGGARTPGQNNLNRPGPQRTTSVSARASIPPGVPALPVKNLNGTGPVHPALAGMTGILLCAAGLPVCLTRAPKPILHPPPVSKSDVKPVPGVPGVCRKTKKKHLKKSKNPEDVVRRYMQKVKNPPDEDCTICMERLVTASGYEGVLRHKGVRPELVGRLGRCGHMYHLLCLVAMYSNGNKDGSLQCPTCKAIYGEKTGTQPPGKMEFHLIPHSLPGFPDTQTIRIVYDIPTGIQGPEHPNPGKKFTARGFPRHCYLPNNEKGRKVGAQP

SEQ ID NO: 762176 - protein, 934 aa, Homo sapiens; identical to SEQ ID NO: 762173

SEQ ID NO: 762177 - protein, 285 aa, Homo sapiens
MTGILLCAAGLPVCLTRAPKPILHPPPVSKSDVKPVPGVPGVCRKTKKKHLKKSKNPEDVVRRYMQKVKNPPDEDCTICMERLVTASGYEGVLRHKGVRPELVGRLGRCGHMYHLLCLVAMYSNGNKDGSLQCPTCKAIYGEKTGTQPPGKMEFHLIPHSLPGFPDTQTIRIVYDIPTGIQGPEHPNPGKKFTARGFPRHCYLPNNEKGRKVLRLLITAWERRLIFTIGTSNTTGESDTVVWNEIHHKTEFGSNLTGHGYPDASYLDNVLAELTAQGVSEAAAKA

SEQ ID NO: 762178 - protein, 82 aa, Homo sapiens
DLRTPQARAITPLGVLQLLASPSFGALLHPPHPDASIQGERWSQHAQASRRLSTEPWQVQNPSQWHKLSAASQAEWVEQAQQ

SEQ ID NO: 762179 - protein, 158 aa, Homo sapiens
DIFIISPIKTLAIFRRSGNNHTLPSILNVEELERGTADPKNDGKGCEGDTLIANREMPDVKSIIVCPIRKYIVSSDPKRRARRLNVTFAEALQAGGGHSRSGGRRVGAGAGSWPGNRRGALRPLLGAHSRSTSDLSAVAQPGSCAGGGPGGALSGPPL

SEQ ID NO: 762180 - protein, 140 aa, Homo sapiens
EVWEPLPRFQRMYGNSWMSRQRCAADAQPSWRTSDGGVEKGNLRLEPLHRVCTGAWPSGVVKKGLPSFRSQTGRSIDSLHHMPGKAANTQCQPVKAARKRAVPCKTTGLELPQALGAHSCISVLGCEIWSRRRSFWNFKV

SEQ ID NO: 762181 - protein, 142 aa, Homo sapiens
MGAPTLPPAWQPFLKDHRISTFKNWPFLEGCACTPERMAEAGFIHCPTENEPDLAQCFFCFKELEGWEPDDDPIEEHKKHSSGCAFLSVKKQFEELTLGEFLKLDRERAKNKIAKETNNKKKEFEETAKKVRRAIEQLAAMD

SEQ ID NO: 762182 - protein, 137 aa, Homo sapiens
RLYSQKAAGGGPPKRACAPDMPRGAPLTARFESRDPLAEVAAAAWVPRRCPLPGSPFSRTTASLHSRTGPSWRAAPAPRSGWPRLASSTAPLRTSQTWPSVSSASRSWKAGSQMTTPCKSSLASLDGLCFELSCQKI

SEQ ID NO: 762183 - protein, 142 aa, Homo sapiens; identical to SEQ ID NO: 762181

SEQ ID NO: 762184 - protein, 142 aa, Homo sapiens; identical to SEQ ID NO: 762181

SEQ ID NO: 762185 - protein, 142 aa, Homo sapiens; identical to SEQ ID NO: 762181

SEQ ID NO: 762186 - protein, 165 aa, Homo sapiens
MGAPTLPPAWQPFLKDHRISTFKNWPFLEGCACTPERMAEAGFIHCPTENEPDLAQCFFCFKELEGWEPDDDPIGPGTVAYACNTSTLGGRGGRITREEHKKHSSGCAFLSVKKQFEELTLGEFLKLDRERAKNKIAKETNNKKKEFEETAKKVRRAIEQLAAMD

SEQ ID NO: 762187 - protein, 137 aa, Homo sapiens
MGAPTLPPAWQPFLKDHRISTFKNWPFLEGCACTPERMAEAGFIHCPTENEPDLAQCFFCFKELEGWEPDDDPMQRKPTIRRKNLRKLRRKCAVPSSSWLPWIEASGRSCLVPEWLHHFQGLFPGATSLPVGPLAMS

SEQ ID NO: 762188 - protein, 137 aa, Homo sapiens; identical to SEQ ID NO: 762187

SEQ ID NO: 762189 - protein, 142 aa, Homo sapiens; identical to SEQ ID NO: 762181

SEQ ID NO: 762190 - protein, 142 aa, Homo sapiens; identical to SEQ ID NO: 762181

SEQ ID NO: 762191 - protein, 142 aa, Homo sapiens; identical to SEQ ID NO: 762181

SEQ ID NO: 762192 - protein, 177 aa, Homo sapiens
RLYSQKAAGGGPPKRACAPDMPRGAPLTARFESRDPLAEVAAAAWVPRRCPLPGSPFSRTTASLHSRTGPSWRAAPAPRSGWPRLASSTAPCFFCFKELEGWEPDDDPIEEHKKHSSGCAFLSVKKQFEELTLGEFLKLDRERAKNKIAKETNNKKKEFEETAKKVRRAIEQLAAMD

SEQ ID NO: 762193 - protein, 313 aa, Homo sapiens
MYVSYLLDKDVSMYPSSVRHSGGLNLAPQNFVSPPQYPDYGGYHVAAAAAAAANLDSAQSPGPSWPAAYGAPLREDWNGYAPGGAAAAANAVAHGLNGGSPAAAMGYSSPADYHPHHHPHHHPHHPAAAPSCASGLLQTLNPGPPGPAATAAAEQLSPGGQRRNLCEWMRKPAQQSLGSQVKTRTKDKYRVVYTDHQRLELEKEFHYSRYITIRRKAELAATLGLSERQVKIWFQNRRAKERKINKKKLQQQQQQQPPQPPPPPPQPPQPQPGPLRSVPEPLSPVSSLQASVSGSVPGVLGPTGGVLNPTVTQ

SEQ ID NO: 762194 - protein, 313 aa, Homo sapiens; identical to SEQ ID NO: 762193

SEQ ID NO: 762195 - protein, 168 aa, Homo sapiens
AAAANAVAHGLNGGSPAAAMGYSSPADYHPHHHPHHHPHHPAAAPSCASGLLQTLNPGPPGPAATAAAEQLSPGGQRRNLCEWMRKPAQQSLGSQGKQRLRPFGGCLGRRGSSQWLLRVARPVRTGASRAVWELGARRGTARRQIRGPLARRGFSDLLSLGVNILSLN

SEQ ID NO: 762196 - protein, 313 aa, Homo sapiens; identical to SEQ ID NO: 762193

SEQ ID NO: 762197 - protein, 313 aa, Homo sapiens; identical to SEQ ID NO: 762193

SEQ ID NO: 762198 - protein, 107 aa, Homo sapiens
MTQQAQCPLCKLQRGKQSPRPAGKRCSCLPPSRVGGLAGSMAGTRSLAAQNSSDWSPQGLWGQGPRDQLSPGVPLLLGWDLGHSHGSKLRELKVLAPPWGTLSSQQE

SEQ ID NO: 762199 - protein, 107 aa, Homo sapiens; identical to SEQ ID NO: 762198

SEQ ID NO: 762200 - protein, 107 aa, Homo sapiens; identical to SEQ ID NO: 762198

SEQ ID NO: 762201 - protein, 92 aa, Homo sapiens
MAPPETNSVPPARSGKLSGCGAGQRSLGRTAKRDAVASSSGRRLCLCPVPAVVWKATNLWSLFRENKNLWCIVPSNKGQPRLRSHNLLFIPE

SEQ ID NO: 762202 - protein, 99 aa, Homo sapiens
FCVTVREEVTTHPSWRREHDWLTSAPSPLFQISKALLGPQQDLSRCRDGVNVEWLVGDRVKLLESDGDLLISWVCASQQSPCVQEPGVSPCEGLGLVGQ

SEQ ID NO: 762203 - protein, 234 aa, Homo sapiens
EVRGGGEVLREAPGTMAQALGEDLVQPPELQDDSSSLGSDSELSGPGPYRQADRYGFIGGSSAEPGPGHPPADLIRQREMKWVEMTSHWEKTMSRRYKKVKMQCRKGIPSALRARCWPLLCGAHVCQKNSPGTYQELAEAPGDPQWMETIGRDLHRQFPLHEMFVSPQGHGQQGLLQVLKAYTLYRPEQGYCQAQGPVAAVLLMHLPPEEAFWCLVQICEVYLPGYYGPHMVRG

SEQ ID NO: 762204 - protein, 489 aa, Homo sapiens
SWYGLEFGLPPLTPQPGPRLAGSGPSHWFSPLSLPVASKAPGTMAQALGEDLVQPPELQDDSSSLGSDSELSGPGPYRQADRYGFIGGSSAEPGPGHPPADLIRQREMKWVEMTSHWEKTMSRRYKKVKMQCRKGIPSALRARCWPLLCGAHVCQKNSPGTYQELAEAPGDPQWMETIGRDLHRQFPLHEMFVSPQGHGQQGLLQVLKAYTLYRPEQGYCQAQGPVAAVLLMHLPPEEAFWCLVQICEVYLPGYYGPHMEAVRLDAEVFMALLRRLLPHVHKHLQQVGVGPLLYLPEWFLCLFARSLPFPTVLRVWDAFLSEGARVLFRVGLTLVRLALGTAEQRGACPGLLETLGALRAIPPAQLQEEAFMSQVHSVVLSERDLQREIKAQLAQLPDSAPGPPPRPQVRLAGAQAIFEAQQLAGVRRGAKPEVPRIVVQPPEEPRPPRRKPQTRGKTFHGLLTRARGPPIEGPPRPQRGSTSFLDTRF

SEQ ID NO: 762205 - protein, 383 aa, Homo sapiens
MAQALGEDLVQPPELQDDSSSLGSDSELSGPGPYRQADRYGFIGGSSAEPGPGHPPADLIRQREMKWVEMTSHWEKTMSRRYKKVKMQCRKGIPSALRARCWPLLCGAHVCQKNSPGTYQELAEAPGDPQWMETIGRDLHRQFPLHEMFVSPQGHGQQGLLQVLKAYTLYRPEQGYCQAQGPVAAVLLMHLPPEEAFWCLVQICEVYLPGYYGPHMVPEYCFRVGLTLVRLALGTAEQRGACPGLLETLGALRAIPPAQLQEEAFMSQVHSVVLSERDLQREIKAQLAQLPDSAPGPPPRPQVRLAGAQAIFEAQQLAGVRRGAKPEVPRIVVQPPEEPRPPRRKPQTRGKTFHGLLTRARGPPIEGPPRPQRGSTSFLDTRF

SEQ ID NO: 762206 - protein, 446 aa, Homo sapiens
MAQALGEDLVQPPELQDDSSSLGSDSELSGPGPYRQADRYGFIGGSSAEPGPGHPPADLIRQREMKWVEMTSHWEKTMSRRYKKVKMQCRKGIPSALRARCWPLLCGAHVCQKNSPGTYQELAEAPGDPQWMETIGRDLHRQFPLHEMFVSPQGHGQQGLLQVLKAYTLYRPEQGYCQAQGPVAAVLLMHLPPEEAFWCLVQICEVYLPGYYGPHMEAVRLDAEVFMALLRRLLPHVHKHLQQVGVGPLLYLPEWFLCLFARSLPFPTVLRVWDAFLSEGARVLFRVGLTLVRLALGTAEQRGACPGLLETLGALRAIPPAQLQEEAFMSQVHSVVLSERDLQREIKAQLAQLPDSAPGPPPRPQVRLAGAQAIFEAQQLAGVRRGAKPEVPRIVVQPPEEPRPPRRKPQTRGKTFHGLLTRARGPPIEGPPRPQRGSTSFLDTRF

SEQ ID NO: 762207 - protein, 462 aa, Homo sapiens
MAQALGEDLVQPPELQDDSSSLGSDSELSGPGPYRQADRYGFIGGSSAEPGPGHPPADLIRQREMKWVEMTSHWEKTMSRRYKKVKMQCRKGIPSALRARCWPLLCGAHVCQKNSPGTYQELAEAPGDPQWMETIGRDLHRQFPLHEMFVSPQGHGYEAGDAQGPPAPQAPGQQGLLQVLKAYTLYRPEQGYCQAQGPVAAVLLMHLPPEEAFWCLVQICEVYLPGYYGPHMEAVRLDAEVFMALLRRLLPHVHKHLQQVGVGPLLYLPEWFLCLFARSLPFPTVLRVWDAFLSEGARVLFRVGLTLVRLALGTAEQRGACPGLLETLGALRAIPPAQLQEEAFMSQVHSVVLSERDLQREIKAQLAQLPDSAPGPPPRPQVRLAGAQAIFEAQQLAGVRRGAKPEVPRIVVQPPEEPRPPRRKPQTRGKTFHGLLTRARGPPIEGPPRPQRGSTSFLDTRF

SEQ ID NO: 762208 - protein, 133 aa, Homo sapiens
GGQSCRRVGGIWLRAGLGAELWRGRAGLPVNKPPACRCQSTVPCGADTGAPGAGHCRAARGLPWPPGDTGSPSSHPPRAAAGGGLHVTGAQRGAVRAGPAAGDQGPGSGEGGGPPWYILGQALAWRRVTEWGT

SEQ ID NO: 762209 - protein, 446 aa, Homo sapiens; identical to SEQ ID NO: 762206

SEQ ID NO: 762210 - protein, 446 aa, Homo sapiens; identical to SEQ ID NO: 762206

SEQ ID NO: 762211 - protein, 461 aa, Homo sapiens
EVRGGGEVLREAPGTMAQALGEDLVQPPELQDDSSSLGSDSELSGPGPYRQADRYGFIGGSSAEPGPGHPPADLIRQREMKWVEMTSHWEKTMSRRYKKVKMQCRKGIPSALRARCWPLLCGAHVCQKNSPGTYQELAEAPGDPQWMETIGRDLHRQFPLHEMFVSPQGHGQQGLLQVLKAYTLYRPEQGYCQAQGPVAAVLLMHLPPEEAFWCLVQICEVYLPGYYGPHMEAVRLDAEVFMALLRRLLPHVHKHLQQVGVGPLLYLPEWFLCLFARSLPFPTVLRVWDAFLSEGARVLFRVGLTLVRLALGTAEQRGACPGLLETLGALRAIPPAQLQEEAFMSQVHSVVLSERDLQREIKAQLAQLPDSAPGPPPRPQVRLAGAQAIFEAQQLAGVRRGAKPEVPRIVVQPPEEPRPPRRKPQTRGKTFHGLLTRARGPPIEGPPRPQRGSTSFLDTRF

SEQ ID NO: 762212 - protein, 383 aa, Homo sapiens; identical to SEQ ID NO: 762205

SEQ ID NO: 762213 - protein, 208 aa, Homo sapiens
MKLLPSVVLKLFLAAVLSALVTGESLERLRRGLAAGTSNPDPPTVSTDQLLPLGGGRDRKVRDLQEADLDLLRVTLSSKPQALATPNKEEHGKRKKKGKGLGKKRDPCLRKYKDFCIHGECKYVKELRAPSCICHPGYHGERCHGLSLPVENRLYTYDHTTILAVVAVVLSSVCLLVIVGLLMFRYHRRGGYDVENEEKVKLGMTNSH

SEQ ID NO: 762214 - protein, 108 aa, Homo sapiens
SQSLTLVAQAGVQWCNLGSLQPPPPRFKRFPCLSFSSSWDYRRASPCPDKFVFLVETGFLHVGQVGLELLTSSDPSASASQSAGITGVSHCTLPILHYLTKKDQLVRK

SEQ ID NO: 762215 - protein, 275 aa, Homo sapiens
STHASGPLDTSVTMWFLVLCLALSLGGTGAAPPIQSRIVGGWECEQHSQPWQAALYHFSTFQCGGILVHRQWVLTAAHCISDNYQLWLGRHNLFDDENTAQFVHVSESFPHPGFNMSLLENHTRQADEDYSHDLMLLRLTEPADTITDAVKVVELPTQEPEVGSTCLASGWGSIEPENFSFPDDLQCVDLKILPNDECKKAHVQKVTDFMLCVGHLEGGKDTCVGDSGGPLMCDGVLQGVTSWGYVPCGTPNKPSVAVRVLSYVKWIEDTIAENS

SEQ ID NO: 762216 - protein, 216 aa, Homo sapiens [sequence omitted]

SEQ ID NO: 762217 - protein, 123 aa, Homo sapiens
CPIPFSPSRLLIPPFPSFPSNYQLWLGRHNLFDDENTAQFVHVSESFPHPGFNMSLLENHTRQADEDYSHDLMLLRLTEPADTITDAVKVVELPTQEPEVGSTCLASGWGSIEPENCMWGQTV

SEQ ID NO: 762218 - protein, 275 aa, Homo sapiens; identical to SEQ ID NO: 762215

SEQ ID NO: 762219 - protein, 211 aa, Homo sapiens
MLPCPIPFSPSRLLIPPFPSFPSNYQLWLGRHNLFDDENTAQFVHVSESFPHPGFNMSLLENHTRQADEDYSHDLMLLRLTEPADTITDAVKVVELPTQEPEVGSTCLASGWGSIEPENFSFFETRAWIPQPRRMFMSSSDLYCLGTIGENKVESYLFKKYVSKNVLGHSGNLERQVFRALLFRNLPEDMAQSKAQDGFCCGPSKIKCASK

SEQ ID NO: 762220 - protein, 1288 aa, Homo sapiens
MAAAGARLSPGPGSGLRGRPRLCFHPGPPPLLPLLLLFLLLLPPPPLLAGATAAASREPDSPCRLKTVTVSTLPALRESDIGWSGARAGAGAGTGAGAAAAAASPGSPGSAGTAAESRLLLFVRNELPGRIAVQDDLDNTELPFFTLEMSGTAADISLVHWRQQWLENGTLYFHVSMSSSGQLAQATAPTLQEPSEIVEEQMHILHISVMGGLIALLLLLLVFTVALYAQRRWQKRRRIPQKSASTEATHEIHYIPSVLLGPQARESFRSSRLQTHNSVIGVPIRETPILDDYDCEEDEEPPRRANHVSREDEFGSQVTHTLDSLGHPGEEKVDFEKKGGISFGRAKGTSGSEADDETQLTFYTEQYRSRRRSKGLLKSPVNKTALTLIAVSSCILAMVCGSQMSCPLTVKVTLHVPEHFIADGSSFVVSEGSYLDISDWLNPAKLSLYYQINATSPWVRDLCGQRTTDACEQLCDPETGECSCHEGYAPDPVHRHLCVRSDWGQSEGPWPYTTLERGYDLVTGEQAPEKILRSTFSLGQGLWLPVSKSFVVPPVELSINPLASCKTDVLVTEDPADVREEAMLSTYFETINDLLSSFGPVRDCSRNNGGCTRNFKCVSDRQVDSSGCVCPEELKPMKDGSGCYDHSKGIDCSDGFNGGCEQLCLQQTLPLPYDATSSTIFMFCGCVEEYKLAPDGKSCLMLSDVCEGPKCLKPDSKFNDTLFGEMLHGYNNRTQHVNQGQVFQMTFRENNFIKDFPQLADGLLVIPLPVEEQCRGVLSEPLPDLQLLTGDIRYDEAMGYPMVQQWRVRSNLYRVKLSTITLAAGFTNVLKILTKESSREELLSFIQHYGSHYIAEALYGSELTCIIHFPSKKVQQQLWLQYQKETTELGSKKELKSMPFITYLSGLLTAQMLSDDQLISGVEIRCEEKGRCPSTCHLCRRPGKEQLSPTPVLLEINRVVPLYTLIQDNGTKEAFKSALMSSYWCSGKGDVIDDWCRCDLSAFDANGLPNCSPLLQPVLRLSPTVEPSSTVVSLEWVDVQPAIGTKVSDYILQHKKVDEYTDTDLYTGEFLSFADDLLSGLGTSCVAAGRSHGEVPEVSIYSVIFKCLEPDGLYKFTLYAVDTRGRHSELSTVTLRTACPLVDDNKAEEIADKIYNLYNGYTSGKEQQMAYNTLMEVSASMLFRVQHHYNSHYEKFGDFVWRSEDELGPRKAHLILRRLERVSSHCSSLLRSAYIQSRVETVPYLFCRSEEVRPAGMVWYSILKDTKITCEEKMVSMARNTYGESKGR

SEQ ID NO: 762221 - protein, 194 aa, Homo sapiens
MPFITYLSGLLTAQMLSDDQLISGVEIRCEEKGRCPSTCHLCRRPGKEQLSPTPVLLEINRVVPLYTLIQDNGTKEAFKSALMSSYWCSGKGDVIDDWCRCDLSAFDANGLPNCSPLLQPVLRLSPTVEPSSTVVSLEWVDVQPAIGTKVSDYILQHKKVDEYTDTDLYTVYCWITFIDLRILNQPCIPGMKPT

SEQ ID NO: 762222 - protein, 432 aa, Homo sapiens
MFCLLSWEADSRGRLGEYTLQPLSLQTEETTELGSKKELKSMPFITYLSGLLTAQMLSDDQLISGVEIRCEEKGRCPSTCHLCRRPGKEQLSPTPVLLEINRVVPLYTLIQDNGTKEAFKSALMSSYWCSGKGDVIDDWCRCDLSAFDANGLPNCSPLLQPVLRLSPTVEPSSTVVSLEWVDVQPAIGTKVSDYILQHKKVDEYTDTDLYTGEFLSFADDLLSGLGTSCVAAGRSHGEVPEVSIYSVIFKCLEPDGLYKFTLYAVDTRGRHSELSTVTLRTACPLVDDNKAEEIADKIYNLYNGYTSGKEQQMAYNTLMEVSASMLFRVQHHYNSHYEKFGDFVWRSEDELGPRKAHLILRRLERVSSHCSSLLRSAYIQSRVETVPYLFCRSEEVRPAGMVWYSILKDTKITCEEKMVSMARNTYGESKGR

SEQ ID NO: 762223 - protein, 395 aa, Homo sapiens
MPFITYLSGLLTAQMLSDDQLISGVEIRCEEKGRCPSTCHLCRRPGKEQLSPTPVLLEINRVVPLYTLIQDNGTKEAFKSALMSSYWCSGKGDVIDDWCRCDLSAFDANGLPNCSPLLQPVLRLSPTVEPSSTVVSLEWVDVQPAIGTKVSDYILQHKKVDEYTDTDLYTGEFLSFADDLLSGLGTSCVAAGRSHGEVPEVSIYSVIFKCLEPDGLYKFTLYAVDTRGRHSELSTVTLRTACPLVDDNKAEEIADKIYNLYNGYTSGKEQQMAYNTLMEVSASMLFRVQHHYNSHYEKFGDFVWRSEDELGPRKAHLILRRLERVSSHCSSLLRSAYIQSRVETVPYLFCRSEEVRPAGMVWYSILKDTKITCEEKMVSMARNTYYLTLSKVSPF

SEQ ID NO: 762224 - protein, 391 aa, Homo sapiens
MPFITYLSGLLTAQMLSDDQLISGVEIRCEEKGRCPSTCHLCRRPGKEQLSPTPVLLEINRVVPLYTLIQDNGTKEAFKSALMSSYWCSGKGDVIDDWCRCDLSAFDANGLPNCSPLLQPVLRLSPTVEPSSTVVSLEWVDVQPAIGTKVSDYILQHKKVDEYTDTDLYTGEFLSFADDLLSGLGTSCVAAGRSHGEVPEVSIYSVIFKCLEPDGLYKFTLYAVDTRGRHSELSTVTLRTACPLVDDNKAEEIADKIYNLYNGYTSGKEQQMAYNTLMEVSASMLFRVQHHYNSHYEKFGDFVWRSEDELGPRKAHLILRRLERVSSHCSSLLRSAYIQSRVETVPYLFCRSEEVRPAGMVWYSILKDTKITCEEKMVSMARNTYGESKGR

SEQ ID NO: 762225 - protein, 1265 aa, Homo sapiens
MAAAGARLSPGPGSGLRGRPRLCFHPGPPPLLPLLLLFLLLLPPPPLLAGATAAASREPDSPCRLKTVTVSTLPALRESDIGWSGARAGAGAGTGAGAAAAAASPGSPGSAGTAAESRLLLFVRNELPGRIAVQDDLDNTELPFFTLEMSGTAADISLVHWRQQWLENGTLYFHVSMSSSGQLAQATAPTLQEPSEIVEEQMHILHISVMGGLIALLLLLLVFTVALYAQRRWQKRRRIPQKSASTEATHEIHYIPSVLLGPQARESFRSSRLQTHNSVIGVPIRETPILDDYDCEEDEEPPRRANHVSREDEFGSQVTHTLDSLGHPGEEKVDFEKKGGISFGRAKGTSGSEADDETQLTFYTEQYRSRRRSKGLLKSPVNKTALTLIAVSSCILAMVCGSQMSCPLTVKVTLHVPEHFIADGSSFVVSEGSYLDISDWLNPAKLSLYYQINATSPWVRDLCGQRTTDACEQLCDPETGECSCHEGYAPDPVHRHLCVRSDWGQSEGPWPYTTLERGYDLVTGEQAPEKILRSTFSLGQGLWLPVSKSFVVPPVELSINPLASCKTDVLVTEDPADVREEAMLSTYFETINDLLSSFGPVRDCSRNNGGCTRNFKCVSDRQVDSSGCVCPEELKPMKDGSGCYDHSKGIDCSDGFNGGCEQLCLQQTLPLPYDATSSTIFMFCGCVEEYKLAPDGKSCLMLSDVCEGPKCLKPDSKFNDTLFGEMLHGYNNRTQHVNQGQVFQMTFRENNFIKDFPQLADGLLVIPLPVEEQCRGVLSEPLPDLQLLTGDIRYDEAMGYPMVQQWRVRSNLYRVKLSTITLAAGFTNVLKILTKESSREELLSFIQHYGSHYIAEALYGSELTCIIHFPSKKVQQQLWLQYQKETTELGSKKELKSMPFITYLSGLLTAQMLSDDQLISGVEIRCEEKGRCPSTCHLCRRPGKEQLSPTPVLLEINRVVPLYTLIQDNGTKEAFKSALMSSYWCSGKGDVIDDWCRCDLSAFDANGLPNCSPLLQPVLRLSPTVEPSSTVVSLEWVDVQPAIGTKVSDYILQHKKVDEYTDTDLYTGEFLSFADDLLSGLGTSCVAAGRSHGEVPEVSIYSVIFKCLEPDGLYKFTLYAVDTRGRHSELSTVTLRTACPLVDDNKAEEIADKIYNLYNGYTSGKEQQMAYNTLMEVSASMLFRVQHHYNSHYEKFGDFVWRSEDELGPSLLESFMSLQDINLLERPPGRPQRPGNPLSNVSWRISEIAPTSHTDMSAGIKETAS

SEQ ID NO: 762226 - protein, 3406 aa, Homo sapiens
RTIGAAGSHVGAAGGGSSVGDAVVGAEKARAARRRGSGRGVDGAQRAAGVRRDRRRGGGPGRRQGPGRGPERRGQPKARTGAGGGGGRAGRREMMARRPPWRGLGERSTPILLLLLLSLFPLSQEELGGGGHQGWDPGLAATTGPRAHIGGGALALCPESSGVREDGGPGLGVREPIFVGLRGRRQSARNSRGPPEQPNEELGIEHGVQPLGSRERETGQGPGSVLYWRPEVSSCGRTGPLQRGSLSPGALSSGVPGSGNSSPLPSDFLIRHHGPKPVSSQRNAGTGSRKRVGTARCCGELWATGSKGQGERATTSGAERTAPRRNCLPGASGSGPELDSAPRTARTAPASGSAPRESRTAPEPAPKRMRSRGLFRCRFLPQRPGPRPPGLPARPEARKVTSANRARFRRAANRHPQFPQYNYQTLVPENEAAGTAVLRVVAQDPDAGEAGRLVYSLAALMNSRSLELFSIDPQSGLIRTAAALDRESMERHYLRVTAQDHGSPRLSATTMVAVTVADRNDHSPVFEQAQYRETLRENVEEGYPILQLRATDGDAPPNANLRYRFVGPPAARAAAAAAFEIDPRSGLISTSGRVDREHMESYELVVEASDQGQEPGPRSATVRVHITVLDENDNAPQFSEKRYVAQVREDVRPHTVVLRVTATDRDKDANGLVHYNIISGNSRGHFAIDSLTGEIQVVAPLDFEAEREYALRIRAQDAGRPPLSNNTGLASIQVVDINDHIPIFVSTPFQVSVLENAPLGHSVIHIQAVDADHGENARLEYSLTGVAPDTPFVINSATGWVSVSGPLDRESVEHYFFGVEARDHGSPPLSASASVTVTVLDVNDNRPEFTMKEYHLRLNEDAAVGTSVVSVTAVDRDANSAISYQITGGNTRNRFAISTQGGVGLVTLALPLDYKQERYFKLVLTASDRALHDHCYVHINITDANTHRPVFQSAHYSVSVNEDRPMGSTIVVISASDDDVGENARITYLLEDNLPQFRIDADSGAITLQAPLDYEDQVTYTLAITARDNGIPQKADTTYVEVMVNDVNDNAPQFVASHYTGLVSEDAPPFTSVLQISATDRDAHANGRVQYTFQNGEDGDGDFTIEPTSGIVRTVRRLDREAVSVYELTAYAVDRGVPPLRTPVSIQVMVQDVNDNAPVFPAEEFEVRVKENSIVGSVVAQITAVDPDEGPNAHIMYQIVEGNIPELFQMDIFSGELTALIDLDYEARQEYVIVVQATSAPLVSRATVHVRLVDQNDNSPVLNNFQILFNNYVSNRSDTFPSGIIGRIPAYDPDVSDHLFYSFERGNELQLLVVNQTSGELRLSRKLDNNRPLVASMLVTVTDGLHSVTAQCVLRVVIITEELLANSLTVRLENMWQERFLSPLLGRFLEGVAAVLATPAEDVFIFNIQNDTDVGGTVLNVSFSALAPRGAGAGAAGPWFSSEELQEQLYVRRAALAARSLLDVLPFDDNVCLREPCENYMKCVSVLRFDSSAPFLASASTLFRPIQPIAGLRCRCPPGFTGDFCETELDLCYSNPCRNGGACARREGGYTCVCRPRFTGEDCELDTEAGRCVPGVCRNGGTCTDAPNGGFRCQCPAGGAFEGPRCEVAARSFPPSSFVMFRGLRQRFHLTLSLSFATVQQSGLLFYNGRLNEKHDFLALELVAGQVRLTYSTGESNTVVSPTVPGGLSDGQWHTVHLRYYNKPRTDALGGAQGPSKDKVAVLSVDDCDVAVALQFGAEIGNYSCAAAGVQTSSKKSLDLTGPLLLGGVPNLPENFPVSHKDFIGCMRDLHIDGRRVDMAAFVANNGTMAGCQAKLHFCDSGPCKNSGFCSERWGSFSCDCPVGFGGKDCQLTMAHPHHFRGNGTLSWNFGSDMAVSVPWYLGLAFRTRATQGVLMQVQAGPHSTLLCQLDRGLLSVTVTRGSGRASHLLLDQVTVSDGRWHDLRLELQEEPGGRRGHHVLMVSLDFSLFQDTMAVGSELQGLKVKQLHVGGLPPGSAEEAPQGLVGCIQGVWLGSTPSGSPALLPPSHRVNAEPGCVVTNACASGPCPPHADCRDLWQTFSCTCQPGYYGPGCVDACLLNPCQNQGSCRHLPGAPHGYTCDCVGGYFGHHCEHRMDQQCPRGWWGSPTCGPCNCDVHKGFDPNCNKTNGQCHCKEFHYRPRGSDSCLPCDCYPVGSTSRSCAPHSGQCPCRPGALGRQCNSCDSPFAEVTASGCRVLYDACPKSLRSGVWWPQTKFGVLATVPCPRGALGGAAVRLCDEAQGWLEPDLFNCTSPAFRELSLLLDGLELNKTALDTMEAKKLAQRLREVTGHTDHYFSQDVRVTARLLAHLLAFESHQQGFGLTATQDAHFNENLLWAGSALLAPETGDLWAALGQRAPGGSPGSAGLVRHLEEYAATLARNMELTYLNPMGLVTPNIMLSIDRMEHPSSPRGARRYPRYHSNLFRGQDAWDPHTHVLLPSQSPRPSPSEVLPTSSSIENSTTSSVVPPPAPPEPEPGISIIILLVYRTLGGLLPAQFQAERRGARLPQNPVMNSPVVSVAVFHGRNFLRGILESPISLEFRLLQTANRSKAICVQWDPPGLAEQHGVWTARDCELVHRNGSHARCRCSRTGTFGVLMDASPRERLEGDLELLAVFTHVVVAVSVAALVLTAAILLSLRSLKSNVRGIHANVAAALGVAELLFLLGIHRTHNQLVCTAVAILLHYFFLSTFAWLFVQGLHLYRMQVEPRNVDRGAMRFYHALGWGVPAVLLGLAVGLDPEGYGNPDFCWISVHEPLIWSFAGPVVLVIVMNGTMFLLAARTSCSTGQREAKKTSALTLRSSFLLLLLVSASWLFGLLAVNHSILAFHYLHAGLCGLQGLAVLLLFCVLNADARAAWMPACLGRKAAPEEARPAPGLGPGAYNNTALFEESGLIRITLGASTVSSVSSARSGRTQDQDSQRGRSYLRDNVLVRHGSAADHTDHSLQAHAGPTDLDVAMFHRDAGADSDSDSDLSLEEERSLSIPSSESEDNGRTRGRFQRPLCRAAQSERLLTHPKDVDGNDLLSYWPALGECEAAPCALQTWGSERRLGLDTSKDAANNNQPDPALTSGDETSLGRAQRQRKGILKNRLQYPLVPQTRGAPELSWCRAATLGHRAVPAASYGRIYAGGGTGSLSQPASRYSSREQLDLLLRRQLSRERLEEAPAPVLRPLSRPGSQECMDAAPGRLEPKDRGSTLPRRQPPRDYPGAMAGRFGSRDALDLGAPREWLSTLPPPRRTRDLDPQPPPLPLSPQRQLSRDPLLPSRPLDSLSRSSNSREQLDQVPSRHPSREALGPLPQLLRAREDSVSGPSHGPSTEQLDILSSILASFNSSALSSVQSSSTPLGPHTTATPSATASVLGPSTPRSATSHSISELSPDSEVPRSEGHS

SEQ ID NO: 762227 - protein, 385 aa, Homo sapiens
WLVEPGVIGEGGWMNVDGNDLLSYWPALGECEAAPCALQTWGSERRLGLDTSKDAANNNQPDPALTSGDETSLGRAQRQRKGILKNRLQYPLVPQTRGAPELSWCRAATLGHRAVPAASYGRIYAGGGTGSLSQPASRYSSREQLDLLLRRQLSRERLEEAPAPVLRPLSRPGSQECMDAAPGRLEPKDRGSTLPRRQPPRDYPGAMAGRFGSRDALDLGAPREWLSTLPPPRRTRDLDPQPPPLPLSPQRQLSRDPLLPSRPLDSLSRSSNSREQLDQVPSRHPSREALGPLPQLLRAREDSVSGPSHGPSTEQLDILSSILASFNSSALSSVQSSSTPLGPHTTATPSATASVLGPSTPRSATSHSISELSPDSEVPRSEGHS

SEQ ID NO: 762228 - protein, 100 aa, Homo sapiens
IPRSLDLTGPLLLGGVPNLPENFPVSHKDFIGCMRDLHIDGRRVDMAAFVANNGTMAGRPEASTSLAHGPVPIIGRKWRTPYLTSSQSPLVASTMLQPRF

SEQ ID NO: 762229 - protein, 112 aa, Homo sapiens
TLAPVPPMTQTLIPRSLDLTGPLLLGGVPNLPENFPVSHKDFIGCMRDLHIDGRRVDMAAFVANNGTMAGRPEASTSLAHGPVPIIGRKWRTPYLTSSQSPLVASTMLQPRF

SEQ ID NO: 762230 - protein, 351 aa, Homo sapiens
QLLTSTKAPCSSHEVDTSKDAANNNQPDPALTSGDETSLGRAQRQRKGILKNRLQYPLVPQTRGAPELSWCRAATLGHRAVPAASYGRIYAGGGTGSLSQPASRYSSREQLDLLLRRQLSRERLEEAPAPVLRPLSRPGSQECMDAAPGRLEPKDRGSTLPRRQPPRDYPGAMAGRFGSRDALDLGAPREWLSTLPPPRRTRDLDPQPPPLPLSPQRQLSRDPLLPSRPLDSLSRSSNSREQLDQVPSRHPSREALGPLPQLLRAREDSVSGPSHGPSTEQLDILSSILASFNSSALSSVQSSSTPLGPHTTATPSATASVLGPSTPRSATSHSISELSPDSEVPRSEGHS

SEQ ID NO: 762231 - protein, 3406 aa, Homo sapiens; identical to SEQ ID NO: 762226

SEQ ID NO: 762232 - protein, 3013 aa, Homo sapiens
RTIGAAGSHVGAAGGGSSVGDAVVGAEKARAARRRGSGRGVDGAQRAAGVRRDRRRGGGPGRRQGPGRGPERRGQPKARTGAGGGGGRAGRREMMARRPPWRGLGERSTPILLLLLLSLFPLSQEELGGGGHQGWDPGLAATTGPRAHIGGGALALCPESSGVREDGGPGLGVREPIFVGLRGRRQSARNSRGPPEQPNEELGIEHGVQPLGSRERETGQGPGSVLYWRPEVSSCGRTGPLQRGSLSPGALSSGVPGSGNSSPLPSDFLIRHHGPKPVSSQRNAGTGSRKRVGTARCCGELWATGSKGQGERATTSGAERTAPRRNCLPGASGSGPELDSAPRTARTAPASGSAPRESRTAPEPAPKRMRSRGLFRCRFLPQRPGPRPPGLPARPEARKVTSANRARFRRAANRHPQFPQYNYQTLVPENEAAGTAVLRVVAQDPDAGEAGRLVYSLAALMNSRSLELFSIDPQSGLIRTAAALDRESMERHYLRVTAQDHGSPRLSATTMVAVTVADRNDHSPVFEQAQYRETLRENVEEGYPILQLRATDGDAPPNANLRYRFVGPPAARAAAAAAFEIDPRSGLISTSGRVDREHMESYELVVEASDQGQEPGPRSATVRVHITVLDENDNAPQFSEKRYVAQVREDVRPHTVVLRVTATDRDKDANGLVHYNIISGNSRGHFAIDSLTGEIQVVAPLDFEAEREYALRIRAQDAGRPPLSNNTGLASIQVVDINDHIPIFVSTPFQVSVLENAPLGHSVIHIQAVDADHGENARLEYSLTGVAPDTPFVINSATGWVSVSGPLDRESVEHYFFGVEARDHGSPPLSASASVTVTVLDVNDNRPEFTMKEYHLRLNEDAAVGTSVVSVTAVDRDANSAISYQITGGNTRNRFAISTQGGVGLVTLALPLDYKQERYFKLVLTASDRALHDHCYVHINITDANTHRPVFQSAHYSVSVNEDRPMGSTIVVISASDDDVGENARITYLLEDNLPQFRIDADSGAITLQAPLDYEDQVTYTLAITARDNGIPQKADTTYVEVMVNDVNDNAPQFVASHYTGLVSEDAPPFTSVLQISATDRDAHANGRVQYTFQNGEDGDGDFTIEPTSGIVRTVRRLDREAVSVYELTAYAVDRGVPPLRTPVSIQVMVQDVNDNAPVFPAEEFEVRVKENSIVGSVVAQITAVDPDEGPNAHIMYQIVEGNIPELFQMDIFSGELTALIDLDYEARQEYVIVVQATSAPLVSRATVHVRLVDQNDNSPVLNNFQILFNNYVSNRSDTFPSGIIGRIPAYDPDVSDHLFYSFERGNELQLLVVNQTSGELRLSRKLDNNRPLVASMLVTVTDGLHSVTAQCVLRVVIITEELLANSLTVRLENMWQERFLSPLLGRFLEGVAAVLATPAEDVFIFNIQNDTDVGGTVLNVSFSALAPRGAGAGAAGPWFSSEELQEQLYVRRAALAARSLLDVLPFDDNVCLREPCENYMKCVSVLRFDSSAPFLASASTLFRPIQPIAGLRCRCPPGFTGDFCETELDLCYSNPCRNGGACARREGGYTCVCRPRFTGEDCELDTEAGRCVPGVCRNGGTCTDAPNGGFRCQCPAGGAFEGPRCEVAARSFPPSSFVMFRGLRQRFHLTLSLSFATVQQSGLLFYNGRLNEKHDFLALELVAGQVRLTYSTGESNTVVSPTVPGGLSDGQWHTVHLRYYNKPRTDALGGAQGPSKDKVAVLSVDDCDVAVALQFGAEIGNYSCAAAGVQTSSKKSLDLTGPLLLGGVPNLPENFPVSHKDFIGCMRDLHIDGRRVDMAAFVANNGTMAGCQAKLHFCDSGPCKNSGFCSERWGSFSCDCPVGFGGKDCQLTMAHPHHFRGNGTLSWNFGSDMAVSVPWYLGLAFRTRATQGVLMQVQAGPHSTLLCQLDRGLLSVTVTRGSGRASHLLLDQVTVSDGRWHDLRLELQEEPGGRRGHHVLMVSLDFSLFQDTMAVGSELQGLKVKQLHVGGLPPGSAEEAPQGLVGCIQGVWLGSTPSGSPALLPPSHRVNAEPGCVVTNACASGPCPPHADCRDLWQTFSCTCQPGYYGPGCVDACLLNPCQNQGSCRHLPGAPHGYTCDCVGGYFGHHCEHRMDQQCPRGWWGSPTCGPCNCDVHKGFDPNCNKTNGQCHCKEFHYRPRGSDSCLPCDCYPVGSTSRSCAPHSGQCPCRPGALGRQCNSCDSPFAEVTASGCRVLYDACPKSLRSGVWWPQTKFGVLATVPCPRGALGGAAVRLCDEAQGWLEPDLFNCTSPAFRELSLLLDGLELNKTALDTMEAKKLAQRLREVTGHTDHYFSQDVRVTARLLAHLLAFESHQQGFGLTATQDAHFNENLLWAGSALLAPETGDLWAALGQRAPGGSPGSAGLVRHLEEYAATLARNMELTYLNPMGLVTPNIMLSIDRMEHPSSPRGARRYPRYHSNLFRGQDAWDPHTHVLLPSQSPRPSPSEVLPTSSSIENSTTSSVVPPPAPPEPEPGISIIILLVYRTLGGLLPAQFQAERRGARLPQNPVMNSPVVSVAVFHGRNFLRGILESPISLEFRLLQTANRSKAICVQWDPPGLAEQHGVWTARDCELVHRNGSHARCRCSRTGTFGVLMDASPRERLEGDLELLAVFTHVVVAVSVAALVLTAAILLSLRSLKSNVRGIHANVAAALGVAELLFLLGIHRTHNQLVCTAVAILLHYFFLSTFAWLFVQGLHLYRMQVEPRNVDRGAMRFYHALGWGVPAVLLGLAVGLDPEGYGNPDFCWISVHEPLIWSFAGPVVLVIVMNGTMFLLAARTSCSTGQREAKKTSALTLRSSFLLLLLVSASWLFGLLAVNHSILAFHYLHAGLCGLQGLAVLLLFCVLNADARAAWMPACLGRKAAPEEARPAPGLGPGAYNNTALFEESGLIRITLGASTVSSVSSARSGRTQDQDSQRGRSYLRDNVLVRHGSAADHTDHSLQAHAGPTDLDVAMFHRDAGGVGAWGREEGGRGSLPIPFSSTPYWEQWLT

SEQ ID NO: 762233 - protein, 4366 aa, Homo sapiens
MGDAEGEDEVQFLRTDDEVVLQCSATVLKEQLKLCLAAEGFGNRLCFLEPTSNAQNVPPDLAICCFVLEQSLSVRALQEMLANTVEAGVESSQGGGHRTLLYGHAILLRHAHSRMYLSCLTTSRSMTDKLAFDVGLQEDATGEACWWTMHPASKQRSEGEKVRVGDDIILVSVSSERYLHLSTASGELQVDASFMQTLWNMNPICSRCEEGFVTGGHVLRLFHGHMDECLTISPADSDDQRRLVYYEGGAVCTHARSLWRLEPLRISWSGSHLRWGQPLRVRHVTTGQYLALTEDQGLVVVDASKAHTKATSFCFRISKEKLDVAPKRDVEGMGPPEIKYGESLCFVQHVASGLWLTYAAPDPKALRLGVLKKKAMLHQEGHMDDALSLTRCQQEESQAARMIHSTNGLYNQFIKSLDSFSGKPRGSGPPAGTALPIEGVILSLQDLIIYFEPPSEDLQHEEKQSKLRSLRNRQSLFQEEGMLSMVLNCIDRLNVYTTAAHFAEFAGEEAAESWKEIVNLLYELLASLIRGNRSNCALFSTNLDWLVSKLDRLEASSGILEVLYCVLIESPEVLNIIQENHIKSIISLLDKHGRNHKVLDVLCSLCVCNGVAVRSNQDLITENLLPGRELLLQTNLINYVTSIRPNIFVGRAEGTTQYSKWYFEVMVDEVTPFLTAQATHLRVGWALTEGYTPYPGAGEGWGGNGVGDDLYSYGFDGLHLWTGHVARPVTSPGQHLLAPEDVISCCLDLSVPSISFRINGCPVQGVFESFNLDGLFFPVVSFSAGVKVRFLLGGRHGEFKFLPPPGYAPCHEAVLPRERLHLEPIKEYRREGPRGPHLVGPSRCLSHTDFVPCPVDTVQIVLPPHLERIREKLAENIHELWALTRIEQGWTYGPVRDDNKRLHPCLVDFHSLPEPERNYNLQMSGETLKTLLALGCHVGMADEKAEDNLKKTKLPKTYMMSNGYKPAPLDLSHVRLTPAQTTLVDRLAENGHNVWARDRVGQGWSYSAVQDIPARRNPRLVPYRLLDEATKRSNRDSLCQAVRTLLGYGYNIEPPDQEPSQVENQSRCDRVRIFRAEKSYTVQSGRWYFEFEAVTTGEMRVGWARPELRPDVELGADELAYVFNGHRGQRWHLGSEPFGRPWQPGDVVGCMIDLTENTIIFTLNGEVLMSDSGSETAFREIEIGDGFLPVCSLGPGQVGHLNLGQDVSSLRFFAICGLQEGFEPFAINMQRPVTTWFSKGLPQFEPVPLEHPHYEVSRVDGTVDTPPCLRLTHRTWGSQNSLVEMLFLRLSLPVQFHQHFRCTAGATPLAPPGLQPPAEDEARAAEPDPDYENLRRSAGGWSEAENGKEGTAKEGAPGGTPQAGGEAQPARAENEKDATTEKNKKRGFLFKAKKVAMMTQPPATPTLPRLPHDVVPADNRDDPEIILNTTTYYYSVRVFAGQEPSCVWAGWVTPDYHQHDMSFDLSKVRVVTVTMGDEQGNVHSSLKCSNCYMVWGGDFVSPGQQGRISHTDLVIGCLVDLATGLMTFTANGKESNTFFQVEPNTKLFPAVFVLPTHQNVIQFELGKQKNIMPLSAAMFQSERKNPAPQCPPRLEMQMLMPVSWSRMPNHFLQVETRRAGERLGWAVQCQEPLTMMALHIPEENRCMDILELSERLDLQRFHSHTLRLYRAVCALGNNRVAHALCSHVDQAQLLHALEDAHLPGPLRAGYYDLLISIHLESACRSRRSMLSEYIVPLTPETRAITLFPPGRSTENGHPRHGLPGVGVTTSLRPPHHFSPPCFVAALPAAGAAEAPARLSPAIPLEALRDKALRMLGEAVRDGGQHARDPVGASVEFQFVPVLKLVSTLLVMGIFGDEDVKQILKMIEPEVFTEEEEEEDEEEEGEEEDEEEKEEDEEETAQEKEDEEKEEEEAAEGEKEEGLEEGLLQMKLPESVKLQMCHLLEYFCDQELQHRVESLAAFAERYVDKLQANQRSRYGLLIKAFSMTAAETARRTREFRSPPQEQINMLLQFKDGTDEEDCPLPEEIRQDLLDFHQDLLAHCGIQLDGEEEEPEEETTLGSRLMSLLEKVRLVKKKEEKPEEERSAEESKPRSLQELVSHMVVRWAQEDFVQSPELVRAMFSLLHRQYDGLGELLRALPRAYTISPSSVEDTMSLLECLGQIRSLLIVQMGPQEENLMIQSIGNIMNNKVFYQHPNLMRALGMHETVMEVMVNVLGGGESKEIRFPKMVTSCCRFLCYFCRISRQNQRSMFDHLSYLLENSGIGLGMQGSTPLDVAAASVIDNNELALALQEQDLEKVVSYLAGCGLQSCPMLVAKGYPDIGWNPCGGERYLDFLRFAVFVNGESVEENANVVVRLLIRKPECFGPALRGEGGSGLLAAIEEAIRISEDPARDGPGIRRDRRREHFGEEPPEENRVHLGHAIMSFYAALIDLLGRCAPEMHLIQAGKGEALRIRAILRSLVPLEDLVGIISLPLQIPTLGKDGALVQPKMSASFVPDHKASMVLFLDRVYGIENQDFLLHVLDVGFLPDMRAAASLDTATFSTTEMALAVNRYLCLAVLPLITKCAPLFAGTEHRAIMVDSMLHTVYRLSRGRSLTKAQRDVIEDCLMSLCRYIRPSMLQHLLRRLVFDVPILNEFAKMPLKLLTNHYERCWKYYCLPTGWANFGVTSEEELHLTRKLFWGIFDSLAHKKYDPELYRMAMPCLCAIAGALPPDYVDASYSSKAEKKATVDAEGNFDPRPVETLNVIIPEKLDSFINKFAEYTHEKWAFDKIQNNWSYGENIDEELKTHPMLRPYKTFSEKDKEIYRWPIKESLKAMIAWEWTIEKAREGEEEKTEKKKTRKISQSAQTYDPREGYNPQPPDLSAVTLSRELQAMAEQLAENYHNTWGRKKKQELEAKGGGTHPLLVPYDTLTAKEKARDREKAQELLKFLQMNGYAVTRGLKDMELDSSSIEKRFAFGFLQQLLRWMDISQEFIAHLEAVVSSGRVEKSPHEQEIKFFAKILLPLINQYFTNHCLYFLSTPAKVLGSGGHASNKEKEMITSLFCKLAALVRHRVSLFGTDAPAVVNCLHILARSLDARTVMKSGPEIVKAGLRSFFESASEDIEKMVENLRLGKVSQARTQVKGVGQNLTYTTVALLPVLTTLFQHIAQHQFGDDVILDDVQVSCYRTLCSIYSLGTTKNTYVEKLRPALGECLARLAAAMPVAFLEPQLNEYNACSVYTTKSPRERAILGLPNSVEEMCPDIPVLERLMADIGGLAESGARYTEMPHVIEITLPMLCSYLPRWWERGPEAPPSALPAGAPPPCTAVTSDHLNSLLGNILRIIVNNLGIDEASWMKRLAVFAQPIVSRARPELLQSHFIPTIGRLRKRAGKVVSEEEQLRLEAKAEAQEGELLVRDEFSVLCRDLYALYPLLIRYVDNNRAQWLTEPNPSAEELFRMVGEIFIYWSKSHNFKREEQNFVVQNEINNMSFLTADNKSKMAKVGESGGSDQERTKKKRRGDRYSVQTSLIVATLKKMLPIGLNMCAPTDQDLITLAKTRYALKDTDEEVREFLHNNLHLQGKVEGSPSLRWQMALYRGVPGREEDADDPEKIVRRVQEVSAVLYYLDQTEHPYKSKKAVWHKLLSKQRRRAVVACFRMTPLYNLPTHRACNMFLESYKAAWILTEDHSFEDRMIDDLSKAGEQEEEEEEVEEKKPDPLHQLVLHFSRTALTEKSKLDEDYLYMAYADIMAKSCHLEEGGENGEAEEEVEVSFEEKQMEKQRLLYQQARLHTRGAAEMVLQMISACKGETGAMVSSTLKLGISILNGGNAEVQQKMLDYLKDKKEVGFFQSIQALMQTCSVLDLNAFERQNKAEGLGMVNEDGTVINRQNGEKVMADDEFTQDLFRFLQLLCEGHNNDFQNYLRTQTGNTTTINIIICTVDYLLRLQESISDFYWYYSGKDVIEEQGKRNFSKAMSVAKQVFNSLTEYIQGPCTGNQQSLAHSRLWDAVVGFLHVFAHMMMKLAQDSSQIELLKELLDLQKDMVVMLLSLLEGNVVNGMIARQMVDMLVESSSNVEMILKFFDMFLKLKDIVGSEAFQDYVTDPRGLISKKDFQKAMDSQKQFSGPEIQFLLSCSEADENEMINCEEFANRFQEPARDIGFNVAVLLTNLSEHVPHDPRLHNFLELAESILEYFRPYLGRIEIMGASRRIERIYFEISETNRAQWEMPQVKESKRQFIFDVVNEGGEAEKMELFVSFCEDTIFEMQIAAQISEPEGEPETDEDEGAGAAEAGAEGAEEGAAGLEGTAATAAAGATARVVAAAGRALRGLSYRSLRRRVRRLRRLTAREAATAVAALLWAAVTRAGAAGAGAAAGALGLLWGSLFGGGLV

SEQ ID NO: 762234 - protein, 4366 aa, Homo sapiens; identical to SEQ ID NO: 762233

SEQ ID NO: 762235 - protein, 2181 aa, Homo sapiens
  misc_feature (7)..(7): Xaa can be any naturally occurring amino acid
RRRKGNXIAVNKKRKISQSAQTYDPREGYNPQPPDLSAVTLSRELQAMAEQLAENYHNTWGRKKKQELEAKGGGTHPLLVPYDTLTAKEKARDREKAQELLKFLQMNGYAVTRGLKDMELDSSSIEKRFAFGFLQQLLRWMDISQEFIAHLEAVVSSGRVEKSPHEQEIKFFAKILLPLINQYFTNHCLYFLSTPAKVLGSGGHASNKEKEMITSLFCKLAALVRHRVSLFGTDAPAVVNCLHILARSLDARTVMKSGPEIVKAGLRSFFESASEDIEKMVENLRLGKVSQARTQVKGVGQNLTYTTVALLPVLTTLFQHIAQHQFGDDVILDDVQVSCYRTLCSIYSLGTTKNTYVEKLRPALGECLARLAAAMPVAFLEPQLNEYNACSVYTTKSPRERAILGLPNSVEEMCPDIPVLERLMADIGGLAESGARYTEMPHVIEITLPMLCSYLPRWWERGPEAPPSALPAGAPPPCTAVTSDHLNSLLGNILRIIVNNLGIDEASWMKRLAVFAQPIVSRARPELLQSHFIPTIGRLRKRAGKVVSEEEQLRLEAKAEAQEGELLVRDEFSVLCRDLYALYPLLIRYVDNNRAQWLTEPNPSAEELFRMVGEIFIYWSKSHNFKREEQNFVVQNEINNMSFLTADNKSKMAKVGESGGSDQERTKKKRRGDRYSVQTSLIVATLKKMLPIGLNMCAPTDQDLITLAKTRYALKDTDEEVREFLHNNLHLQGKVEGSPSLRWQMALYRGVPGREEDADDPEKIVRRVQEVSAVLYYLDQTEHPYKSKKAVWHKLLSKQRRRAVVACFRMTPLYNLPTHRACNMFLESYKAAWILTEDHSFEDRMIDDLSKAGEQEEEEEEVEEKKPDPLHQLVLHFSRTALTEKSKLDEDYLYMAYADIMAKSCHLEEGGENGEAEEEVEVSFEEKQMEKQRLLYQQARLHTRGAAEMVLQMISACKGETGAMVSSTLKLGISILNGGNAEVQQKMLDYLKDKKEVGFFQSIQALMQTCSVLDLNAFERQNKAEGLGMVNEDGTVINRQNGEKVMADDEFTQDLFRFLQLLCEGHNNDFQNYLRTQTGNTTTINIIICTVDYLLRLQESISDFYWYYSGKDVIEEQGKRNFSKAMSVAKQVFNSLTEYIQGPCTGNQQSLAHSRLWDAVVGFLHVFAHMMMKLAQDSSQIELLKELLDLQKDMVVMLLSLLEGNVVNGMIARQMVDMLVESSSNVEMILKFFDMFLKLKDIVGSEAFQDYVTDPRGLISKKDFQKAMDSQKQFSGPEIQFLLSCSEADENEMINCEEFANRFQEPARDIGFNVAVLLTNLSEHVPHDPRLHNFLELAESILEYFRPYLGRIEIMGASRRIERIYFEISETNRAQWEMPQVKESKRQFIFDVVNEGGEAEKMELFVSFCEDTIFEMQIAAQISEPEGEPETDEDEGAGAAEAGAEGAEEGAAGLEGTAATAAAGATARVVAAAGRALRGLSYRSLRRRVRRLRRLTAREAATAVAALLWAAVTRAGAAGAGAAAGALGLLWGSLFGGGLVEGAKKVTVTELLAGMPDPTSDEVHGEQPAGPGGDADGEGASEGAGDAAEGAGDEEEAVHEAGPGGADGAVAVTDGGPFRPEGAGGLGDMGDTTPAEPPTPEGSPILKRKLGVDGVEEELPPEPEPEPEPELEPEKADAENGEKEEVPEPTPEPPKKQAPPSPPPKKEEAGGEFWGELEVQRVKFLVSDSPPGEDDMEGSAAGDVSGAGSGGSSGWGLGAGEEAEGDEDENMVYYFLEESTGYMEPALRCLSLLHTLVAFLCIIGYNCLKVPLVIFKREKELARKLEFDGLYITEQPEDDDVKGQWDRLVLNTPSFPSNYWDKFVKRKVLDKHGDIYGRERIAELLGMDLATLEITAHNERKPNPPPGLLTWLMSIDVKYQIWKFGVIFTDNSFLYLGWYMVMSLLGHYNNFFFAAHLLDIAMGVKTLRTILSSVTHNGKQLVMTVGLLAVVVYLYTVVAFNFFRKFYNKSEDEDEPDMKCDDMMTCYLFHMYVGVRAGGGIGDEIEDPAGDEYELYRVVFDITFFFFVIVILLAIIQGLIIDAFGELRDQQEQVKEDMETKCFICGIGSDYFDTTPHGFETHTLEEHNLANYMFFLMYLINKDETEHTGQESYVWKMYQERCWDFFPAGDCFRKQYEDQLS

SEQ ID NO: 762236 - protein, 2952 aa, Homo sapiens
LPRGCLWCLQRSPTPARPQPSRPARSPLPLFPDLRPWASDLDIMGDAEGEDEVQFLRTDDEVVLQCSATVLKEQLKLCLAAEGFGNRLCFLEPTSNAQNVPPDLAICCFVLEQSLSVRALQEMLANTVEAGVESSQGGGHRTLLYGHAILLRHAHSRMYLSCLTTSRSMTDKLAFDVGLQEDATGEACWWTMHPASKQRSEGEKVRVGDDIILVSVSSERYLHLSTASGELQVDASFMQTLWNMNPICSRCEEGFVTGGHVLRLFHGHMDECLTISPADSDDQRRLVYYEGGAVCTHARSLWRLEPLRISWSGSHLRWGQPLRVRHVTTGQYLALTEDQGLVVVDASKAHTKATSFCFRISKEKLDVAPKRDVEGMGPPEIKYGESLCFVQHVASGLWLTYAAPDPKALRLGVLKKKAMLHQEGHMDDALSLTRCQQEESQAARMIHSTNGLYNQFIKSLDSFSGKPRGSGPPAGTALPIEGVILSLQDLIIYFEPPSEDLQHEEKQSKLRSLRNRQSLFQEEGMLSMVLNCIDRLNVYTTAAHFAEFAGEEAAESWKEIVNLLYELLASLIRGNRSNCALFSTNLDWLVSKLDRLEASSGILEVLYCVLIESPEVLNIIQENHIKSIISLLDKHGRNHKVLDVLCSLCVCNGVAVRSNQDLITENLLPGRELLLQTNLINYVTSIRPNIFVGRAEGTTQYSKWYFEVMVDEVTPFLTAQATHLRVGWALTEGYTPYPGAGEGWGGNGVGDDLYSYGFDGLHLWTGHVARPVTSPGQHLLAPEDVISCCLDLSVPSISFRINGCPVQGVFESFNLDGLFFPVVSFSAGVKVRFLLGGRHGEFKFLPPPGYAPCHEAVLPRERLHLEPIKEYRREGPRGPHLVGPSRCLSHTDFVPCPVDTVQIVLPPHLERIREKLAENIHELWALTRIEQGWTYGPVRDDNKRLHPCLVDFHSLPEPERNYNLQMSGETLKTLLALGCHVGMADEKAEDNLKKTKLPKTYMMSNGYKPAPLDLSHVRLTPAQTTLVDRLAENGHNVWARDRVGQGWSYSAVQDIPARRNPRLVPYRLLDEATKRSNRDSLCQAVRTLLGYGYNIEPPDQEPSQVENQSRCDRVRIFRAEKSYTVQSGRWYFEFEAVTTGEMRVGWARPELRPDVELGADELAYVFNGHRGQRWHLGSEPFGRPWQPGDVVGCMIDLTENTIIFTLNGEVLMSDSGSETAFREIEIGDGFLPVCSLGPGQVGHLNLGQDVSSLRFFAICGLQEGFEPFAINMQRPVTTWFSKGLPQFEPVPLEHPHYEVSRVDGTVDTPPCLRLTHRTWGSQNSLVEMLFLRLSLPVQFHQHFRCTAGATPLAPPGLQPPAEDEARAAEPDPDYENLRRSAGGWSEAENGKEGTAKEGAPGGTPQAGGEAQPARAENEKDATTEKNKKRGFLFKAKKVAMMTQPPATPTLPRLPHDVVPADNRDDPEIILNTTTYYYSVRVFAGQEPSCVWAGWVTPDYHQHDMSFDLSKVRVVTVTMGDEQGNVHSSLKCSNCYMVWGGDFVSPGQQGRISHTDLVIGCLVDLATGLMTFTANGKESNTFFQVEPNTKLFPAVFVLPTHQNVIQFELGKQKNIMPLSAAMFQSERKNPAPQCPPRLEMQMLMPVSWSRMPNHFLQVETRRAGERLGWAVQCQEPLTMMALHIPEENRCMDILELSERLDLQRFHSHTLRLYRAVCALGNNRVAHALCSHVDQAQLLHALEDAHLPGPLRAGYYDLLISIHLESACRSRRSMLSEYIVPLTPETRAITLFPPGRSTENGHPRHGLPGVGVTTSLRPPHHFSPPCFVAALPAAGAAEAPARLSPAIPLEALRDKALRMLGEAVRDGGQHARDPVGASVEFQFVPVLKLVSTLLVMGIFGDEDVKQILKMIEPEVFTEEEEEEDEEEEGEEEDEEEKEEDEEETAQEKEDEEKEEEEAAEGEKEEGLEEGLLQMKLPESVKLQMCHLLEYFCDQELQHRVESLAAFAERYVDKLQANQRSRYGLLIKAFSMTAAETARRTREFRSPPQEQINMLLQFKDGTDEEDCPLPEEIRQDLLDFHQDLLAHCGIQLDGEEEEPEEETTLGSRLMSLLEKVRLVKKKEEKPEEERSAEESKPRSLQELVSHMVVRWAQEDFVQSPELVRAMFSLLHRQYDGLGELLRALPRAYTISPSSVEDTMSLLECLGQIRSLLIVQMGPQEENLMIQSIGNIMNNKVFYQHPNLMRALGMHETVMEVMVNVLGGGESKEIRFPKMVTSCCRFLCYFCRISRQNQRSMFDHLSYLLENSGIGLGMQGSTPLDVAAASVIDNNELALALQEQDLEKVVSYLAGCGLQSCPMLVAKGYPDIGWNPCGGERYLDFLRFAVFVNGESVEENANVVVRLLIRKPECFGPALRGEGGSGLLAAIEEAIRISEDPARDGPGIRRDRRREHFGEEPPEENRVHLGHAIMSFYAALIDLLGRCAPEMHLIQAGKGEALRIRAILRSLVPLEDLVGIISLPLQIPTLGKDGALVQPKMSASFVPDHKASMVLFLDRVYGIENQDFLLHVLDVGFLPDMRAAASLDTATFSTTEMALAVNRYLCLAVLPLITKCAPLFAGTEHRAIMVDSMLHTVYRLSRGRSLTKAQRDVIEDCLMSLCRYIRPSMLQHLLRRLVFDVPILNEFAKMPLKLLTNHYERCWKYYCLPTGWANFGVTSEEELHLTRKLFWGIFDSLAHKKYDPELYRMAMPCLCAIAGALPPDYVDASYSSKAEKKATVDAEGNFDPRPVETLNVIIPEKLDSFINKFAEYTHEKWAFDKIQNNWSYGENIDEELKTHPMLRPYKTFSEKDKEIYRWPIKESLKAMIAWEWTIEKAREGEEEKTEKKKTRKISQSAQTYDPREGYNPQPPDLSAVTLSRELQAMAEQLAENDQILCICFIYLITVLNESFSKKNTKQKD

SEQ ID NO: 762237 - protein, 1194 aa, Homo sapiens
LPRGCLWCLQRSPTPARPQPSRPARSPLPLFPDLRPWASDLDIMGDAEGEDEVQFLRTDDEVVLQCSATVLKEQLKLCLAAEGFGNRLCFLEPTSNAQNVPPDLAICCFVLEQSLSVRALQEMLANTVEAGVESSQGGGHRTLLYGHAILLRHAHSRMYLSCLTTSRSMTDKLAFDVGLQEDATGEACWWTMHPASKQRSEGEKVRVGDDIILVSVSSERYLHLSTASGELQVDASFMQTLWNMNPICSRCEEGFVTGGHVLRLFHGHMDECLTISPADSDDQRRLVYYEGGAVCTHARSLWRLEPLRISWSGSHLRWGQPLRVRHVTTGQYLALTEDQGLVVVDASKAHTKATSFCFRISKEKLDVAPKRDVEGMGPPEIKYGESLCFVQHVASGLWLTYAAPDPKALRLGVLKKKAMLHQEGHMDDALSLTRCQQEESQAARMIHSTNGLYNQFIKSLDSFSGKPRGSGPPAGTALPIEGVILSLQDLIIYFEPPSEDLQHEEKQSKLRSLRNRQSLFQEEGMLSMVLNCIDRLNVYTTAAHFAEFAGEEAAESWKEIVNLLYELLASLIRGNRSNCALFSTNLDWLVSKLDRLEASSGILEVLYCVLIESPEVLNIIQENHIKSIISLLDKHGRNHKVLDVLCSLCVCNGVAVRSNQDLITENLLPGRELLLQTNLINYVTSIRPNIFVGRAEGTTQYSKWYFEVMVDEVTPFLTAQATHLRVGWALTEGYTPYPGAGEGWGGNGVGDDLYSYGFDGLHLWTGHVARPVTSPGQHLLAPEDVISCCLDLSVPSISFRINGCPVQGVFESFNLDGLFFPVVSFSAGVKVRFLLGGRHGEFKFLPPPGYAPCHEAVLPRERLHLEPIKEYRREGPRGPHLVGPSRCLSHTDFVPCPVDTVQIVLPPHLERIREKLAENIHELWALTRIEQGWTYGPVRDDNKRLHPCLVDFHSLPEPERNYNLQMSGETLKTLLALGCHVGMADEKAEDNLKKTKLPKTYMMSNGYKPAPLDLSHVRLTPAQTTLVDRLAENGHNVWARDRVGQGWSYSAVQDIPARRNPRLVPYRLLDEATKRSNRDSLCQAVRTLLGYGYNIEPPDQEPSQVENQSRCDRVRIFRAEKSYTVQSGRWYFEFEAVTTGEMRVGWARPELRPDVELGADELAYVFNGHRVGTSLGTILPGPVVSPTACLLWPC

SEQ ID NO: 762238 - protein, 628 aa, Homo sapiens
LPRGCLWCLQRSPTPARPQPSRPARSPLPLFPDLRPWASDLDIMGDAEGEDEVQFLRTDDEVVLQCSATVLKEQLKLCLAAEGFGNRLCFLEPTSNAQNVPPDLAICCFVLEQSLSVRALQEMLANTVEAGVESSQGGGHRTLLYGHAILLRHAHSRMYLSCLTTSRSMTDKLAFDVGLQEDATGEACWWTMHPASKQRSEGEKVRVGDDIILVSVSSERYLHLSTASGELQVDASFMQTLWNMNPICSRCEEGFVTGGHVLRLFHGHMDECLTISPADSDDQRRLVYYEGGAVCTHARSLWRLEPLRISWSGSHLRWGQPLRVRHVTTGQYLALTEDQGLVVVDASKAHTKATSFCFRISKEKLDVAPKRDVEGMGPPEIKYGESLCFVQHVASGLWLTYAAPDPKALRLGVLKKKAMLHQEGHMDDALSLTRCQQEESQAARMIHSTNGLYNQFIKSLDSFSGKPRGSGPPAGTALPIEGVILSLQDLIIYFEPPSEDLQHEEKQSKLRSLRNRQSLFQEEGMLSMVLNCIDRLNVYTTAAHFAEFAGEEAAESWKEIVNLLYELLASLIRGNRSNCALFSTNLDWLVSKLDRLEASSGILEVLYCVLIESPEVLNIIQENHIKSI

SEQ ID NO: 762239 - protein, 63 aa, Homo sapiens
MEIPPKQTLNVALQAYPNGALEPQTSNLDLQIMALTLRSPADPKSRPPELRTPPNPELNIRLP

SEQ ID NO: 762240 - protein, 4112 aa, Homo sapiens
MIDLTENTIIFTLNGEVLMSDSGSETAFREIEIGDGFLPVCSLGPGQVGHLNLGQDVSSLRFFAICGLQEGFEPFAIHVRLTPAQTTLVDRLAENGHNVWARDRVGQGWSYSAVQDIPARRNPRLVPYRLLDEATKRSNRDSLCQAVRTLLGYGYNIEPPDQEPSQVENQSRCDRVRIFRAEKSYTVQSGRWYFEFEAVTTGEMRVGWARPELRPDVELGADELAYVFNGHRGQRWHLGSEPFGRPWQPGDVVGCMIDLTENTIIFTLNGEVLMSDSGSETAFREIEIGDGFLPVCSLGPGQVGHLNLGQDVSSLRFFAICGLQEGFEPFAINMQRPVTTWFSKGLPQFEPVPLEHPHYEVSRVDGTVDTPPCLRLTHRTWGSQNSLVEMLFLRLSLPVQFHQHFRCTAGATPLAPPGLQPPAEDEARAAEPDPDYENLRRSAGGWSEAENGKEGTAKEGAPGGTPQAGGEAQPARAENEKDATTEKNKKRGFLFKAKKVAMMTQPPATPTLPRLPHDVVPADNRDDPEIILNTTTYYYSVRVFAGQEPSCVWAGWVTPDYHQHDMSFDLSKVRVVTVTMGDEQGNVHSSLKCSNCYMVWGGDFVSPGQQGRISHTDLVIGCLVDLATGLMTFTANGKESNTFFQVEPNTKLFPAVFVLPTHQNVIQFELGKQKNIMPLSAAMFQSERKNPAPQCPPRLEMQMLMPVSWSRMPNHFLQVETRRAGERLGWAVQCQEPLTMMALHIPEENRCMDILELSERLDLQRFHSHTLRLYRAVCALGNNRVAHALCSHVDQAQLLHALEDAHLPGPLRAGYYDLLISIHLESACRSRRSMLSEYIVPLTPETRAITLFPPGRSTENGHPRHGLPGVGVTTSLRPPHHFSPPCFVAALPAAGAAEAPARLSPAIPLEALRDKALRMLGEAVRDGGQHARDPVGASVEFQFVPVLKLVSTLLVMGIFGDEDVKQILKMIEPEVFTEEEEEEDEEEEGEEEDEEEKEEDEEETAQEKEDEEKEEEEAAEGEKEEGLEEGLLQMKLPESVKLQMCHLLEYFCDQELQHRVESLAAFAERYVDKLQANQRSRYGLLIKAFSMTAAETARRTREFRSPPQEQINMLLQFKDGTDEEDCPLPEEIRQDLLDFHQDLLAHCGIQLDGEEEEPEEETTLGSRLMSLLEKVRLVKKKEEKPEEERSAEESKPRSLQELVSHMVVRWAQEDFVQSPELVRAMFSLLHRQYDGLGELLRALPRAYTISPSSVEDTMSLLECLGQIRSLLIVQMGPQEENLMIQSIGNIMNNKVFYQHPNLMRALGMHETVMEVMVNVLGGGESKEIRFPKMVTSCCRFLCYFCRISRQNQRSMFDHLSYLLENSGIGLGMQGSTPLDVAAASVIDNNELALALQEQDLEKVVSYLAGCGLQSCPMLVAKGYPDIGWNPCGGERYLDFLRFAVFVNGESVEENANVVVRLLIRKPECFGPALRGEGGSGLLAAIEEAIRISEDPARDGPGIRRDRRREHFGEEPPEENRVHLGHAIMSFYAALIDLLGRCAPEMHLIQAGKGEALRIRAILRSLVPLEDLVGIISLPLQIPTLGKDGALVQPKMSASFVPDHKASMVLFLDRVYGIENQDFLLHVLDVGFLPDMRAAASLDTATFSTTEMALAVNRYLCLAVLPLITKCAPLFAGTEHRAIMVDSMLHTVYRLSRGRSLTKAQRDVIEDCLMSLCRYIRPSMLQHLLRRLVFDVPILNEFAKMPLKLLTNHYERCWKYYCLPTGWANFGVTSEEELHLTRKLFWGIFDSLAHKKYDPELYRMAMPCLCAIAGALPPDYVDASYSSKAEKKATVDAEGNFDPRPVETLNVIIPEKLDSFINKFAEYTHEKWAFDKIQNNWSYGENIDEELKTHPMLRPYKTFSEKDKEIYRWPIKESLKAMIAWEWTIEKAREGEEEKTEKKKTRKISQSAQTYDPREGYNPQPPDLSAVTLSRELQAMAEQLAENYHNTWGRKKKQELEAKGGGTHPLLVPYDTLTAKEKARDREKAQELLKFLQMNGYAVTRGLKDMELDSSSIEKRFAFGFLQQLLRWMDISQEFIAHLEAVVSSGRVEKSPHEQEIKFFAKILLPLINQYFTNHCLYFLSTPAKVLGSGGHASNKEKEMITSLFCKLAALVRHRVSLFGTDAPAVVNCLHILARSLDARTVMKSGPEIVKAGLRSFFESASEDIEKMVENLRLGKVSQARTQVKGVGQNLTYTTVALLPVLTTLFQHIAQHQFGDDVILDDVQVSCYRTLCSIYSLGTTKNTYVEKLRPALGECLARLAAAMPVAFLEPQLNEYNACSVYTTKSPRERAILGLPNSVEEMCPDIPVLERLMADIGGLAESGARYTEMPHVIEITLPMLCSYLPRWWERGPEAPPSALPAGAPPPCTAVTSDHLNSLLGNILRIIVNNLGIDEASWMKRLAVFAQPIVSRARPELLQSHFIPTIGRLRKRAGKVVSEEEQLRLEAKAEAQEGELLVRDEFSVLCRDLYALYPLLIRYVDNNRAQWLTEPNPSAEELFRMVGEIFIYWSKSHNFKREEQNFVVQNEINNMSFLTADNKSKMAKVGESGGSDQERTKKKRRGDRYSVQTSLIVATLKKMLPIGLNMCAPTDQDLITLAKTRYALKDTDEEVREFLHNNLHLQGKVEGSPSLRWQMALYRGVPGREEDADDPEKIVRRVQEVSAVLYYLDQTEHPYKSKKAVWHKLLSKQRRRAVVACFRMTPLYNLPTHRACNMFLESYKAAWILTEDHSFEDRMIDDLSKAGEQEEEEEEVEEKKPDPLHQLVLHFSRTALTEKSKLDEDYLYMAYADIMAKSCHLEEGGENGEAEEEVEVSFEEKQMEKQRLLYQQARLHTRGAAEMVLQMISACKGETGAMVSSTLKLGISILNGGNAEVQQKMLDYLKDKKEVGFFQSIQALMQTCSVLDLNAFERQNKAEGLGMVNEDGTVINRQNGEKVMADDEFTQDLFRFLQLLCEGHNNDFQNYLRTQTGNTTTINIIICTVDYLLRLQESISDFYWYYSGKDVIEEQGKRNFSKAMSVAKQVFNSLTEYIQGPCTGNQQSLAHSRLWDAVVGFLHVFAHMMMKLAQDSSQIELLKELLDLQKDMVVMLLSLLEGNVVNGMIARQMVDMLVESSSNVEMILKFFDMFLKLKDIVGSEAFQDYVTDPRGLISKKDFQKAMDSQKQFSGPEIQFLLSCSEADENEMINCEEFANRFQEPARDIGFNVAVLLTNLSEHVPHDPRLHNFLELAESILEYFRPYLGRIEIMGASRRIERIYFEISETNRAQWEMPQVKESKRQFIFDVVNEGGEAEKMELFVSFCEDTIFEMQIAAQISEPEGEPETDEDEGAGAAEAGAEGAEEGAAGLEGTAATAAAGATARVVAAAGRALRGLSYRSLRRRVRRLRRLTAREAATAVAALLWAAVTRAGAAGAGAAAGALGLLWGSLFGGGLVEGAKKVTVTELLAGMPDPTSDEVHGEQPAGPGGDADGEGASEGAGDAAEGAGDEEEAVHEAGPGGADGAVAVTDGGPFRPEGAGGLGDMGDTTPAEPPTPEGSPILKRKLGVDGVEEELPPEPEPEPEPELEPEKADAENGEKEEVPEPTPEPPKKQAPPSPPPKKEEAGGEFWGELEVQRVKFLVSDSPPGEDDMEGSAAGDVSGAGSGGSSGWGLGAGEEAEGDEDENMVYYFLEESTGYMEPALRCLSLLHTLVAFLCIIGYNCLKVPLVIFKREKELARKLEFDGLYITEQPEDDDVKGQWDRLVLNTPSFPSNYWDKFVKRKVLDKHGDIYGRERIAELLGMDLATLEITAHNERKPNPPPGLLTWLMSIDVKYQIWKFGVIFTDNSFLYLGWYMVMSLLGHYNNFFFAAHLLDIAMGVKTLRTILSSVTHNGKQLVMTVGLLAVVVYLYTVVAFNFFRKFYNKSEDEDEPDMKCDDMMTCYLFHMYVGVRAGGGIGDEIEDPAGDEYELYRVVFDITFFFFVIVILLAIIQGLIIDAFGELRDQQEQVKEDMETKCFICGIGSDYFDTTPHGFETHTLEEHNLANYMFFLMYLINKDETEHTGQESYVWKMYQERCWDFFPAGDCFRKQYEDQLS

SEQ ID NO: 762241 - protein, 3616 aa, Homo sapiens
LPRGCLWCLQRSPTPARPQPSRPARSPLPLFPDLRPWASDLDIMGDAEGEDEVQFLRTDDEVVLQCSATVLKEQLKLCLAAEGFGNRLCFLEPTSNAQNVPPDLAICCFVLEQSLSVRALQEMLANTVEAGVESSQGGGHRTLLYGHAILLRHAHSRMYLSCLTTSRSMTDKLAFDVGLQEDATGEACWWTMHPASKQRSEGEKVRVGDDIILVSVSSERYLHLSTASGELQVDASFMQTLWNMNPICSRCEEGFVTGGHVLRLFHGHMDECLTISPADSDDQRRLVYYEGGAVCTHARSLWRLEPLRISWSGSHLRWGQPLRVRHVTTGQYLALTEDQGLVVVDASKAHTKATSFCFRISKEKLDVAPKRDVEGMGPPEIKYGESLCFVQHVASGLWLTYAAPDPKALRLGVLKKKAMLHQEGHMDDALSLTRCQQEESQAARMIHSTNGLYNQFIKSLDSFSGKPRGSGPPAGTALPIEGVILSLQDLIIYFEPPSEDLQHEEKQSKLRSLRNRQSLFQEEGMLSMVLNCIDRLNVYTTAAHFAEFAGEEAAESWKEIVNLLYELLASLIRGNRSNCALFSTNLDWLVSKLDRLEASSGILEVLYCVLIESPEVLNIIQENHIKSIISLLDKHGRNHKVLDVLCSLCVCNGVAVRSNQDLITENLLPGRELLLQTNLINYVTSIRPNIFVGRAEGTTQYSKWYFEVMVDEVTPFLTAQATHLRVGWALTEGYTPYPGAGEGWGGNGVGDDLYSYGFDGLHLWTGHVARPVTSPGQHLLAPEDVISCCLDLSVPSISFRINGCPVQGVFESFNLDGLFFPVVSFSAGVKVRFLLGGRHGEFKFLPPPGYAPCHEAVLPRERLHLEPIKEYRREGPRGPHLVGPSRCLSHTDFVPCPVDTVQIVLPPHLERIREKLAENIHELWALTRIEQGWTYGPVRDDNKRLHPCLVDFHSLPEPERNYNLQMSGETLKTLLALGCHVGMADEKAEDNLKKTKLPKTYMMSNGYKPAPLDLSHVRLTPAQTTLVDRLAENGHNVWARDRVGQGWSYSAVQDIPARRNPRLVPYRLLDEATKRSNRDSLCQAVRTLLGYGYNIEPPDQEPSQVENQSRCDRVRIFRAEKSYTVQSGRWYFEFEAVTTGEMRVGWARPELRPDVELGADELAYVFNGHRGQRWHLGSEPFGRPWQPGDVVGCMIDLTENTIIFTLNGEVLMSDSGSETAFREIEIGDGFLPVCSLGPGQVGHLNLGQDVSSLRFFAICGLQEGFEPFAINMQRPVTTWFSKGLPQFEPVPLEHPHYEVSRVDGTVDTPPCLRLTHRTWGSQNSLVEMLFLRLSLPVQFHQHFRCTAGATPLAPPGLQPPAEDEARAAEPDPDYENLRRSAGGWSEAENGKEGTAKEGAPGGTPQAGGEAQPARAENEKDATTEKNKKRGFLFKAKKVAMMTQPPATPTLPRLPHDVVPADNRDDPEIILNTTTYYYSVRVFAGQEPSCVWAGWVTPDYHQHDMSFDLSKVRVVTVTMGDEQGNVHSSLKCSNCYMVWGGDFVSPGQQGRISHTDLVIGCLVDLATGLMTFTANGKESNTFFQVEPNTKLFPAVFVLPTHQNVIQFELGKQKNIMPLSAAMFQSERKNPAPQCPPRLEMQMLMPVSWSRMPNHFLQVETRRAGERLGWAVQCQEPLTMMALHIPEENRCMDILELSERLDLQRFHSHTLRLYRAVCALGNNRVAHALCSHVDQAQLLHALEDAHLPGPLRAGYYDLLISIHLESACRSRRSMLSEYIVPLTPETRAITLFPPGRSTENGHPRHGLPGVGVTTSLRPPHHFSPPCFVAALPAAGAAEAPARLSPAIPLEALRDKALRMLGEAVRDGGQHARDPVGASVEFQFVPVLKLVSTLLVMGIFGDEDVKQILKMIEPEVFTEEEEEEDEEEEGEEEDEEEKEEDEEETAQEKEDEEKEEEEAAEGEKEEGLEEGLLQMKLPESVKLQMCHLLEYFCDQELQHRVESLAAFAERYVDKLQANQRSRYGLLIKAFSMTAAETARRTREFRSPPQEQINMLLQFKDGTDEEDCPLPEEIRQDLLDFHQDLLAHCGIQLDGEEEEPEEETTLGSRLMSLLEKVRLVKKKEEKPEEERSAEESKPRSLQELVSHMVVRWAQEDFVQSPELVRAMFSLLHRQYDGLGELLRALPRAYTISPSSVEDTMSLLECLGQIRSLLIVQMGPQEENLMIQSIGNIMNNKVFYQHPNLMRALGMHETVMEVMVNVLGGGESKEIRFPKMVTSCCRFLCYFCRISRQNQRSMFDHLSYLLENSGIGLGMQGSTPLDVAAASVIDNNELALALQEQDLEKVVSYLAGCGLQSCPMLVAKGYPDIGWNPCGGERYLDFLRFAVFVNGESVEENANVVVRLLIRKPECFGPALRGEGGSGLLAAIEEAIRISEDPARDGPGIRRDRRREHFGEEPPEENRVHLGHAIMSFYAALIDLLGRCAPEMHLIQAGKGEALRIRAILRSLVPLEDLVGIISLPLQIPTLGKDGALVQPKMSASFVPDHKASMVLFLDRVYGIENQDFLLHVLDVGFLPDMRAAASLDTATFSTTEMALAVNRYLCLAVLPLITKCAPLFAGTEHRAIMVDSMLHTVYRLSRGRSLTKAQRDVIEDCLMSLCRYIRPSMLQHLLRRLVFDVPILNEFAKMPLKLLTNHYERCWKYYCLPTGWANFGVTSEEELHLTRKLFWGIFDSLAHKKYDPELYRMAMPCLCAIAGALPPDYVDASYSSKAEKKATVDAEGNFDPRPVETLNVIIPEKLDSFINKFAEYTHEKWAFDKIQNNWSYGENIDEELKTHPMLRPYKTFSEKDKEIYRWPIKESLKAMIAWEWTIEKAREGEEEKTEKKKTRKISQSAQTYDPREGYNPQPPDLSAVTLSRELQAMAEQLAENYHNTWGRKKKQELEAKGGGTHPLLVPYDTLTAKEKARDREKAQELLKFLQMNGYAVTRGLKDMELDSSSIEKRFAFGFLQQLLRWMDISQEFIAHLEAVVSSGRVEKSPHEQEIKFFAKILLPLINQYFTNHCLYFLSTPAKVLGSGGHASNKEKEMITSLFCKLAALVRHRVSLFGTDAPAVVNCLHILARSLDARTVMKSGPEIVKAGLRSFFESASEDIEKMVENLRLGKVSQARTQVKGVGQNLTYTTVALLPVLTTLFQHIAQHQFGDDVILDDVQVSCYRTLCSIYSLGTTKNTYVEKLRPALGECLARLAAAMPVAFLEPQLNEYNACSVYTTKSPRERAILGLPNSVEEMCPDIPVLERLMADIGGLAESGARYTEMPHVIEITLPMLCSYLPRWWERGPEAPPSALPAGAPPPCTAVTSDHLNSLLGNILRIIVNNLGIDEASWMKRLAVFAQPIVSRARPELLQSHFIPTIGRLRKRAGKVVSEEEQLRLEAKAEAQEGELLVRDEFSVLCRDLYALYPLLIRYVDNNRAQWLTEPNPSAEELFRMVGEIFIYWSKSHNFKREEQNFVVQNEINNMSFLTADNKSKMAKVGAWFWEEHLAERAGAPSRTSYLACPHPASPSWAQSLQSSEQPLLPPLPLPSSPAPSSSCIFSLLPSPSSSPSPSSLISVSFLLLYLLPPPIS

SEQ ID NO: 762242 - protein, 1939 aa, Homo sapiens
LPRGCLWCLQRSPTPARPQPSRPARSPLPLFPDLRPWASDLDIMGDAEGEDEVQFLRTDDEVVLQCSATVLKEQLKLCLAAEGFGNRLCFLEPTSNAQNVPPDLAICCFVLEQSLSVRALQEMLANTVEAGVESSQGGGHRTLLYGHAILLRHAHSRMYLSCLTTSRSMTDKLAFDVGLQEDATGEACWWTMHPASKQRSEGEKVRVGDDIILVSVSSERYLHLSTASGELQVDASFMQTLWNMNPICSRCEEGFVTGGHVLRLFHGHMDECLTISPADSDDQRRLVYYEGGAVCTHARSLWRLEPLRISWSGSHLRWGQPLRVRHVTTGQYLALTEDQGLVVVDASKAHTKATSFCFRISKEKLDVAPKRDVEGMGPPEIKYGESLCFVQHVASGLWLTYAAPDPKALRLGVLKKKAMLHQEGHMDDALSLTRCQQEESQAARMIHSTNGLYNQFIKSLDSFSGKPRGSGPPAGTALPIEGVILSLQDLIIYFEPPSEDLQHEEKQSKLRSLRNRQSLFQEEGMLSMVLNCIDRLNVYTTAAHFAEFAGEEAAESWKEIVNLLYELLASLIRGNRSNCALFSTNLDWLVSKLDRLEASSGILEVLYCVLIESPEVLNIIQENHIKSIISLLDKHGRNHKVLDVLCSLCVCNGVAVRSNQDLITENLLPGRELLLQTNLINYVTSIRPNIFVGRAEGTTQYSKWYFEVMVDEVTPFLTAQATHLRVGWALTEGYTPYPGAGEGWGGNGVGDDLYSYGFDGLHLWTGHVARPVTSPGQHLLAPEDVISCCLDLSVPSISFRINGCPVQGVFESFNLDGLFFPVVSFSAGVKVRFLLGGRHGEFKFLPPPGYAPCHEAVLPRERLHLEPIKEYRREGPRGPHLVGPSRCLSHTDFVPCPVDTVQIVLPPHLERIREKLAENIHELWALTRIEQGWTYGPVRDDNKRLHPCLVDFHSLPEPERNYNLQMSGETLKTLLALGCHVGMADEKAEDNLKKTKLPKTYMMSNGYKPAPLDLSHVRLTPAQTTLVDRLAENGHNVWARDRVGQGWSYSAVQDIPARRNPRLVPYRLLDEATKRSNRDSLCQAVRTLLGYGYNIEPPDQEPSQVENQSRCDRVRIFRAEKSYTVQSGRWYFEFEAVTTGEMRVGWARPELRPDVELGADELAYVFNGHRGQRWHLGSEPFGRPWQPGDVVGCMIDLTENTIIFTLNGEVLMSDSGSETAFREIEIGDGFLPVCSLGPGQVGHLNLGQDVSSLRFFAICGLQEGFEPFAINMQRPVTTWFSKGLPQFEPVPLEHPHYEVSRVDGTVDTPPCLRLTHRTWGSQNSLVEMLFLRLSLPVQFHQHFRCTAGATPLAPPGLQPPAEDEARAAEPDPDYENLRRSAGGWSEAENGKEGTAKEGAPGGTPQAGGEAQPARAENEKDATTEKNKKRGFLFKAKKVAMMTQPPATPTLPRLPHDVVPADNRDDPEIILNTTTYYYSVRVFAGQEPSCVWAGWVTPDYHQHDMSFDLSKVRVVTVTMGDEQGNVHSSLKCSNCYMVWGGDFVSPGQQGRISHTDLVIGCLVDLATGLMTFTANGKESNTFFQVEPNTKLFPAVFVLPTHQNVIQFELGKQKNIMPLSAAMFQSERKNPAPQCPPRLEMQMLMPVSWSRMPNHFLQVETRRAGERLGWAVQCQEPLTMMALHIPEENRCMDILELSERLDLQRFHSHTLRLYRAVCALGNNRVAHALCSHVDQAQLLHALEDAHLPGPLRAGYYDLLISIHLESACRSRRSMLSEYIVPLTPETRAITLFPPGRSTENGHPRHGLPGVGVTTSLRPPHHFSPPCFVAALPAAGAAEAPARLSPAIPLEALRDKALRMLGEAVRDGGQHARDPVGASVEFQFVPVLKLVSTLLVMGIFGDEDVKQILKMIEPEVFTEEEEEEDEEEEGEEEDEEEKEESL

SEQ ID NO: 762243 - protein, 556 aa, Homo sapiens
LPRGCLWCLQRSPTPARPQPSRPARSPLPLFPDLRPWASDLDIMGDAEGEDEVQFLRTDDEVVLQCSATVLKEQLKLCLAAEGFGNRLCFLEPTSNAQNVPPDLAICCFVLEQSLSVRALQEMLANTVEAGVESSQGGGHRTLLYGHAILLRHAHSRMYLSCLTTSRSMTDKLAFDVGLQEDATGEACWWTMHPASKQRSEGEKVRVGDDIILVSVSSERYLHLSTASGELQVDASFMQTLWNMNPICSRCEEGFVTGGHVLRLFHGHMDECLTISPADSDDQRRLVYYEGGAVCTHARSLWRLEPLRISWSGSHLRWGQPLRVRHVTTGQYLALTEDQGLVVVDASKAHTKATSFCFRISKEKLDVAPKRDVEGMGPPEIKYGESLCFVQHVASGLWLTYAAPDPKALRLGVLKKKAMLHQEGHMDDALSLTRCQQEESQAARMIHSTNGLYNQFIKSLDSYPPNHHSVCHTPTTAATPSESCREGSAPALAHTGTHSLPLLTCVCVCIHTTHTHMHKYVEQPSKAYATDSSCPSQNSAISRSPSVQSFYHKVAG

SEQ ID NO: 762244 - protein, 67 aa, Homo sapiens
MCHLLEYFCDQELQHRVESLAAFAERYVDKLQANQRSRYGLLIKAFSMTAAETARRTREFRSPPQEQ

SEQ ID NO: 762245 - protein, 183 aa, Homo sapiens
MERVQPLEENVGNAARPRFERNKLLLVASVIQGLGLLLCFTYICLHFSALQVSHRYPRIQSIKVQFTEYKKEKGFILTSQKEDEIMKVQNNSVIINCDGFYLISLKGYFSQEVNISLHYQKDEEPLFQLKKVRSVNSLMVASLTYKDKVYLNVTTDNTSLDDFHVNGGELILIHQNPGEFCVL

SEQ ID NO: 762246 - protein, 224 aa, Homo sapiens
SCSVTQAGVQWRDVCLLQPTPPSSSDSPASAFQVAGIQIVKMERVQPLEENVGNAARPRFERNKLLLVASVIQGLGLLLCFTYICLHFSALQVSHRYPRIQSIKVQFTEYKKEKGFILTSQKEDEIMKVQNNSVIINCDGFYLISLKGYFSQEVNISLHYQKDEEPLFQLKKVRSVNSLMVASLTYKDKVYLNVTTDNTSLDDFHVNGGELILIHQNPGEFCVL

SEQ ID NO: 762247 - protein, 270 aa, Homo sapiens
STGCPRHQPELGSFEKKTKRVTKYRTAECIHQSGSPESAFSNNHSVTYFLTPWDDKTQDTWLHSRLTDVHNGSEQERAKGEPQLYSLLVVGVTLDYQYPGDVEKKRGSFPTSHPATLGQKESCGKKSRVLVSRTLNLMVSHRYPRIQSIKVQFTEYKKEKGFILTSQKEDEIMKVQNNSVIINCDGFYLISLKGYFSQEVNISLHYQKDEEPLFQLKKVRSVNSLMVASLTYKDKVYLNVTTDNTSLDDFHVNGGELILIHQNPGEFCVL

SEQ ID NO: 762248 - protein, 338 aa, Homo sapiens
ARSGASALRRRRVQVWVLSRPPPGGGDSFRTRRPQRGPGPWGSQAMDAPHSKAALDSINELPENILLELFTHVPARQLLLNCRLVCSLWRDLIDLMTLWKRKCLREGFITKDWDQPVADWKIFYFLRSLHRNLLRNPCAEEDMFAWQIDFNGGDRWKVESLPGAHGTDFPDPKVKKYFVTSYEMCLKSQLVDLVAEGYWEELLDTFRPDIVVKDWFAARADCGCTYQLKVQLASADYFVLASFEPPPVTIQQWNNATWTEVSYTFSDYPRGVRYILFQHGGRDTQYWAGWYGPRVTNSSIVVSPKMTRNQASSEAQPGQKHGQEEAAQSPYRAVVQIF

SEQ ID NO: 762249 - protein, 378 aa, Homo sapiens
AFTEPAGAGPGGQGWGARAAGPGLRLGAWPRGHPGGGSAAASTPATSRGRRRVRRTVKGPPGPHTPARSGACLAPATVSVSEKPAMDAPHSKAALDSINELPENILLELFTHVPARQLLLNCRLVCSLWRDLIDLMTLWKRKCLREGFITKDWDQPVADWKIFYFLRSLHRNLLRNPCAEEDMFAWQIDFNGGDRWKVESLPGAHGTDFPDPKVKKYFVTSYEMCLKSQLVDLVAEGYWEELLDTFRPDIVVKDWFAARADCGCTYQLKVQLASADYFVLASFEPPPVTIQQWNNATWTEVSYTFSDYPRGVRYILFQHGGRDTQYWAGWYGPRVTNSSIVVSPKMTRNQASSEAQPGQKHGQEEAAQSPYRAVVQIF

SEQ ID NO: 762250 - protein, 84 aa, Homo sapiens
PRWPGSPRRRPQRRSSQRRPQRNQTQRNRPQKNRPHREATAPEEVTKSQPEKWDEEAQDAAGEEEKEQEKEKDAENKVKNSKGT

SEQ ID NO: 762251 - protein, 367 aa, Homo sapiens
AEELGSVALSRLRQRRGTMASKKVCIVGSGNWGSAIAKIVGGNAAQLAQFDPRVTMWVFEEDIGGKKLTEIINTQHENVKYLPGHKLPPNVVAVPDVVQAAEDADILIFVVPHQFIGKICDQLKGHLKANATGISLIKGVDEGPNGLKLISEVIGERLGIPMSVLMGANIASEVADEKFCETTIGCKDPAQGQLLKELMQTPNFRITVVQEVDTVEICGALKNVVAVGAGFCDGLGFGDNTKAAVIRLGLMEMIAFAKLFCSGPVSSATFLESCGVADLITTCYGGRNRKVAEAFARTGKSIEQLEKELLNGQKLQGPETARELYSILQHKGLVDKFPLFMAVYKVCYEGQPVGEFIHCLQNHPEHM

SEQ ID NO: 762252 - protein, 367 aa, Homo sapiens; identical to SEQ ID NO: 762251

SEQ ID NO: 762253 - protein, 336 aa, Homo sapiens
AEELGSVALSRLRQRRGTMASKKVCIVGSGNWGSAIAKIVGGNAAQLAQFDPRVTMWVFEEDIGGKKLTEIINTQHENVKYLPGHKLPPNVVAVPDVVQAAEDADILIFVVPHQFIGKICDQLKGHLKANATGISLIKGVDEGPNGLKLISEVIGERLGIPMSVLMGANIASEVADEKFCETTIGCKDPAQGQLLKELMQTPNFRITVVQEVDTVEICGALKNVVAVGAGFCDGLGFGDNTKAAVIRLGLMEMIAFAKLFCSGPVSSATFLESCGVADLITTCYGGRNRKVAEAFARTGKSIEQLEKELLNGQKLQGPETARELYSILQHKGLVDK

SEQ ID NO: 762254 - protein, 367 aa, Homo sapiens; identical to SEQ ID NO: 762251

SEQ ID NO: 762255 - protein, 271 aa, Homo sapiens
MASKKVCIVGSGNWGSAIAKIVGGNAAQLAQFDPRVTMWVFEEDIGGKKLTEIINTQHENVKYLPGHKLPPNVVAVPDVVQAAEDADILIFVVPHQFIGKICDQLKGHLKANATGISLIKGVDEGPNGLKLISEVIGERLGIPMSVLMGANIASEVADEKFCETTIGCKDPAQGQLLKELMQTPNFRITVVQEVDTVEICGALKSIEQLEKELLNGQKLQGPETARELYSILQHKGLVDKFPLFMAVYKVCYEGQPVGEFIHCLQNHPEHM

SEQ ID NO: 762256 - protein, 116 aa, Homo sapiens
TEAKYNLFHAGGQKGARESSHLLLIWAIFLADLKMRPWWEAGLGPREEACQHCQPMSPGEKAGPSLCPIPVPHLSVPLSLLSLALPDSLSPWAPASPPTPGGRGLAAPTCGGVKCS

SEQ ID NO: 762257 - protein, 1269 aa, Homo sapiens
MDDPFSPCRRLNSTQGEIRVGPSHQAKLPDLQPFPSPDGDTVTQHEELVWMPGVNDCDLLMYLRAARSMAAFAGMCDGGSTEDGCVAASRDDTTLNALNTLHESGYDAGKALQRLVKKPVPKLIEKCWTEDEVKRFVKGLRQYGKNFFRIRKELLPNKETGELITFYYYWKKTPEAASSRAHRRHRRQAVFRRIKTRTASTPVNTPSRPPSSEFLDLSSASEDDFDSEDSEQELKGYACRHCFTTTSKDWHHGGRENILLCTDCRIHFKKYGELPPIEKPVDPPPFMFKPVKEEDDGLSGKHSMRTRRSRGSMSTLRSGRKKQPASPDGRTSPINEDIRSSGRNSPSAASTSSNDSKAETVKKSAKKVKEEASSPLKSNKRQREKVASDTEEADRTSSKKTKTQEISRPNSPSEGEGESSDSRSVNDEGSSDPKDIDQDNRSTSPSIPSPQDNESDSDSSAQQQMLQAQPPALQAPTGVTPAPSSAPPGTPQLPTPGPTPSATAVPPQGSPTASQAPNQPQAPTAPVPHTHIQQAPALHPQRPPSPHPPPHPSPHPPLQPLTGSAGQPSAPSHAQPPLHGQGPPGPHSLQAGPLLQHPGPPQPFGLPPQASQGQAPLGTSPAAAYPHTSLQLPASQSALQSQQPPREQPLPPAPLAMPHIKPPPTTPIPQLPAPQAHKHPPHLSGPSPFSMNANLPPPPALKPLSSLSTHHPPSAHPPPLPPTPLQASTRWPPNPRLLSTPLSLEALLPSPLRPAPPPLPHRRDLAPRPSHPALVRRLQEAAYAGGSSCPLPTVQIKEEALDDAEEPESPPPPPRSPSPEPTVVDTPSHASQSARFYKHLDRGYNSCARTDLYFMPLAGSKLAKKREEAIEKAKREAEQKAREEREREKEKEKEREREREREREAERAAKASSSAHEGRLSDPQLSGPGHMRPSFEPPPTTIAAVPPYIGPDTPALRTLSEYARPHVMSPTNRNHPFYMPLNPTDPLLAYHMPGLYNVDPTIRERELREREIREREIRERELRERMKPGFEVKPPELDPLHPAANPMEHFARHSALTIPPTAGPHPFASFHPGLNPLERERLALAGPQLRPEMSYPDRLAAERIHAERMASLTSDPLARLQMFNVTPHHHQHSHIHSHLHLHQQDPLHQGSAGPVHPLVDPLTAGPHLARFPYPPGTLPNPLLGQPPHEHEMLRHPVFGTPYPRDLPGAIPPPMSAAHQLQAMHAQSAELQRLAMEQQWLHGHPHMHGGHLPSQEDYYSRLKKEGDKQL

SEQ ID NO: 762258 - protein, 1200 aa, Homo sapiens
SRSPVTGDGLLPPRTPGAYLWLLGSAARDQAGSPEKRFVKGLRQYGKNFFRIRKELLPNKETGELITFYYYWKKTPEAASSRAHRRHRRQAVFRRIKTRTASTPVNTPSRPPSSEFLDLSSASEDDFDSEDSEQELKGYACRHCFTTTSKDWHHGGRENILLCTDCRIHFKKYGELPPIEKPVDPPPFMFKPVKEEDDGLSGKHSMRTRRSRGSMSTLRSGRKKQPASPDGRTSPINEDIRSSGRNSPSAASTSSNDSKAETVKKSAKKVKEEASSPLKSNKRQREKVASDTEEADRTSSKKTKTQEISRPNSPSEGEGESSDSRSVNDEGSSDPKDIDQDNRSTSPSIPSPQDNESDSDSSAQQQMLQAQPPALQAPTGVTPAPSSAPPGTPQLPTPGPTPSATAVPPQGSPTASQAPNQPQAPTAPVPHTHIQQAPALHPQRPPSPHPPPHPSPHPPLQPLTGSAGQPSAPSHAQPPLHGQGPPGPHSLQAGPLLQHPGPPQPFGLPPQASQGQAPLGTSPAAAYPHTSLQLPASQSALQSQQPPREQPLPPAPLAMPHIKPPPTTPIPQLPAPQAHKHPPHLSGPSPFSMNANLPPPPALKPLSSLSTHHPPSAHPPPLQLMPQSQPLPSSPAQPPGLTQSQNLPPPPASHPPTGLHQVAPQPPFAQHPFVPGGPPPITPPTCPSTSTPPAGPGTSAQPPCSGAAASGGSIAGGSSCPLPTVQIKEEALDDAEEPESPPPPPRSPSPEPTVVDTPSHASQSARFYKHLDRGYNSCARTDLYFMPLAGSKLAKKREEAIEKAKREAEQKAREEREREKEKEKEREREREREREAERAAKASSSAHEGRLSDPQLSGPGHMRPSFEPPPTTIAAVPPYIGPDTPALRTLSEYARPHVMSPTNRNHPFYMPLNPTDPLLAYHMPGLYNVDPTIRERELREREIREREIRERELRERMKPGFEVKPPELDPLHPAANPMEHFARHSALTIPPTAGPHPFASFHPGLNPLERERLALAGPQLRPEMSYPDRLAAERIHAERMASLTSDPLARLQMFNVTPHHHQHSHIHSHLHLHQQDPLHQGSAGPVHPLVDPLTAGPHLARFPYPPGTLPNPLLGQPPHEHEMLRHPVFGTPYPRDLPGAIPPPMSAAHQLQAMHAQSAELQRLAMEQQWLHGHPHMHGGHLPSQEDYYSRLKKEGDKQL

SEQ ID NO: 762259 - protein, 1524 aa, Homo sapiens
MTADKDKDKDKEKDRDRDRDREREKRDKARESENSRPRRSCTLEGGAKNYAESDHSEDEDNDNNSATAEESTKKNKKKPPKKKSRYERTDTGEITSYITEDDVVYRPGDCVYIESRRPNTPYFICSIQDFKLSKRDHLLMNVKWYYRQSEVPDSVYQHLVQDRHNENDSGRELVITDPVIKNRELFISDYVDTYHAAALRGKCNISHFSDIFAAREFKARVDSFFYILGYNPETRRLNSTQGEIRVGPSHQAKLPDLQPFPSPDGDTVTQHEELVWMPGVNDCDLLMYLRAARSMAAFAGMCDGGSTEDGCVAASRDDTTLNALNTLHESGYDAGKALQRLVKKPVPKLIEKCWTEDEVKRFVKGLRQYGKNFFRIRKELLPNKETGELITFYYYWKKTPEAASSRAHRRHRRQAVFRRIKTRTASTPVNTPSRPPSSEFLDLSSASEDDFDSEDSEQELKGYACRHCFTTTSKDWHHGGRENILLCTDCRIHFKKYGELPPIEKPVDPPPFMFKPVKEEDDGLSGKHSMRTRRSRGSMSTLRSGRKKQPASPDGRTSPINEDIRSSGRNSPSAASTSSNDSKAETVKKSAKKVKEEASSPLKSNKRQREKVASDTEEADRTSSKKTKTQEISRPNSPSEGEGESSDSRSVNDEGSSDPKDIDQDNRSTSPSIPSPQDNESDSDSSAQQQMLQAQPPALQAPTGVTPAPSSAPPGTPQLPTPGPTPSATAVPPQGSPTASQAPNQPQAPTAPVPHTHIQQAPALHPQRPPSPHPPPHPSPHPPLQPLTGSAGQPSAPSHAQPPLHGQGPPGPHSLQAGPLLQHPGPPQPFGLPPQASQGQAPLGTSPAAAYPHTSLQLPASQSALQSQQPPREQPLPPAPLAMPHIKPPPTTPIPQLPAPQAHKHPPHLSGPSPFSMNANLPPPPALKPLSSLSTHHPPSAHPPPLQLMPQSQPLPSSPAQPPGLTQSQNLPPPPASHPPTGLHQVAPQPPFAQHPFVPGGPPPITPPTCPSTSTPPAGPGTSAQPPCSGAAASGGSIAGGSSCPLPTVQIKEEALDDAEEPESPPPPPRSPSPEPTVVDTPSHASQSARFYKHLDRGYNSCARTDLYFMPLAGSKLAKKREEAIEKAKREAEQKAREEREREKEKEKEREREREREREAERAAKASSSAHEGRLSDPQLSGPGHMRPSFEPPPTTIAAVPPYIGPDTPALRTLSEYARPHVMSPTNRNHPFYMPLNPTDPLLAYHMPGLYNVDPTIRERELREREIREREIRERELRERMKPGFEVKPPELDPLHPAANPMEHFARHSALTIPPTAGPHPFASFHPGLNPLERERLALAGPQLRPEMSYPDRLAAERIHAERMASLTSDPLARLQMFNVTPHHHQHSHIHSHLHLHQQDPLHQGSAGPVHPLVDPLTAGPHLARFPYPPGTLPNPLLGQPPHEHEMLRHPVFGTPYPRDLPGAIPPPMSAAHQLQAMHAQSAELQRLAMEQQWLHGHPHMHGGHLPSQEDYYSRLKKEGDKQL

SEQ ID NO: 762260 - protein, 1566 aa, Homo sapiens
MTADKDKDKDKEKDRDRDRDREREKRDKARESENSRPRRSCTLEGGAKNYAESDHSEDEDNDNNSATAEESTKKNKKKPPKKKSRYERTDTGEITSYITEDDVVYRPGDCVYIESRRPNTPYFICSIQDFKLVHNSQACCRSPTPALCDPPACSLPVASQPPQHLSEAGRGPVGSKRDHLLMNVKWYYRQSEVPDSVYQHLVQDRHNENDSGRELVITDPVIKNRELFISDYVDTYHAAALRGKCNISHFSDIFAAREFKARVDSFFYILGYNPETRRLNSTQGEIRVGPSHQAKLPDLQPFPSPDGDTVTQHEELVWMPGVNDCDLLMYLRAARSMAAFAGMCDGGSTEDGCVAASRDDTTLNALNTLHESGYDAGKALQRLVKKPVPKLIEKCWTEDEVKRFVKGLRQYGKNFFRIRKELLPNKETGELITFYYYWKKTPEAASSRAHRRHRRQAVFRRIKTRTASTPVNTPSRPPSSEFLDLSSASEDDFDSEDSEQELKGYACRHCFTTTSKDWHHGGRENILLCTDCRIHFKKYGELPPIEKPVDPPPFMFKPVKEEDDGLSGKHSMRTRRSRGSMSTLRSGRKKQPASPDGRTSPINEDIRSSGRNSPSAASTSSNDSKAETVKKSAKKVKEEASSPLKSNKRQREKVASDTEEADRTSSKKTKTQEISRPNSPSEGEGESSDSRSVNDEGSSDPKDIDQDNRSTSPSIPSPQDNESDSDSSAQQQMLQAQPPALQAPTGVTPAPSSAPPGTPQLPTPGPTPSATAVPPQGSPTASQAPNQPQAPTAPVPHTHIQQAPALHPQRPPSPHPPPHPSPHPPLQPLTGSAGQPSAPSHAQPPLHGQGPPGPHSLQAGPLLQHPGPPQPFGLPPQASQGQAPLGTSPAAAYPHTSLQLPASQSALQSQQPPREQPLPPAPLAMPHIKPPPTTPIPQLPAPQAHKHPPHLSGPSPFSMNANLPPPPALKPLSSLSTHHPPSAHPPPLQLMPQSQPLPSSPAQPPGLTQSQNLPPPPASHPPTGLHQVAPQPPFAQHPFVPGGPPPITPPTCPSTSTPPAGPGTSAQPPCSGAAASGGSIAGGSSCPLPTVQIKEEALDDAEEPESPPPPPRSPSPEPTVVDTPSHASQSARFYKHLDRGYNSCARTDLYFMPLAGSKLAKKREEAIEKAKREAEQKAREEREREKEKEKEREREREREREAERAAKASSSAHEGRLSDPQLSGPGHMRPSFEPPPTTIAAVPPYIGPDTPALRTLSEYARPHVMSPTNRNHPFYMPLNPTDPLLAYHMPGLYNVDPTIRERELREREIREREIRERELRERMKPGFEVKPPELDPLHPAANPMEHFARHSALTIPPTAGPHPFASFHPGLNPLERERLALAGPQLRPEMSYPDRLAAERIHAERMASLTSDPLARLQMFNVTPHHHQHSHIHSHLHLHQQDPLHQGSAGPVHPLVDPLTAGPHLARFPYPPGTLPNPLLGQPPHEHEMLRHPVFGTPYPRDLPGAIPPPMSAAHQLQAMHAQSAELQRLAMEQQWLHGHPHMHGGHLPSQEDYYSRLKKEGDKQL

SEQ ID NO: 762261 - protein, 1248 aa, Homo sapiens [sequence omitted]

SEQ ID NO: 762262 - protein, 1227 aa, Homo sapiens
GPLAFVFPVGFCDTGAFRCLLEILWIKESGLLTPYGSLLEKSHRVWFCFPFLLDTSGKLGSQKRFVKGLRQYGKNFFRIRKELLPNKETGELITFYYYWKKTPEAASSRAHRRHRRQAVFRRIKTRTASTPVNTPSRPPSSEFLDLSSASEDDFDSEDSEQELKGYACRHCFTTTSKDWHHGGRENILLCTDCRIHFKKYGELPPIEKPVDPPPFMFKPVKEEDDGLSGKHSMRTRRSRGSMSTLRSGRKKQPASPDGRTSPINEDIRSSGRNSPSAASTSSNDSKAETVKKSAKKVKEEASSPLKSNKRQREKVASDTEEADRTSSKKTKTQEISRPNSPSEGEGESSDSRSVNDEGSSDPKDIDQDNRSTSPSIPSPQDNESDSDSSAQQQMLQAQPPALQAPTGVTPAPSSAPPGTPQLPTPGPTPSATAVPPQGSPTASQAPNQPQAPTAPVPHTHIQQAPALHPQRPPSPHPPPHPSPHPPLQPLTGSAGQPSAPSHAQPPLHGQGPPGPHSLQAGPLLQHPGPPQPFGLPPQASQGQAPLGTSPAAAYPHTSLQLPASQSALQSQQPPREQPLPPAPLAMPHIKPPPTTPIPQLPAPQAHKHPPHLSGPSPFSMNANLPPPPALKPLSSLSTHHPPSAHPPPLQLMPQSQPLPSSPAQPPGLTQSQNLPPPPASHPPTGLHQVAPQPPFAQHPFVPGGPPPITPPTCPSTSTPPAGPGTSAQPPCSGAAASGGSIAGGSSCPLPTVQIKEEALDDAEEPESPPPPPRSPSPEPTVVDTPSHASQSARFYKHLDRGYNSCARTDLYFMPLAGSKLAKKREEAIEKAKREAEQKAREEREREKEKEKEREREREREREAERAAKASSSAHEGRLSDPQLSGPGHMRPSFEPPPTTIAAVPPYIGPDTPALRTLSEYARPHVMSPTNRNHPFYMPLNPTDPLLAYHMPGLYNVDPTIRERELREREIREREIRERELRERMKPGFEVKPPELDPLHPAANPMEHFARHSALTIPPTAGPHPFASFHPGLNPLERERLALAGPQLRPEMSYPDRLAAERIHAERMASLTSDPLARLQMFNVTPHHHQHSHIHSHLHLHQQDPLHQGSAGPVHPLVDPLTAGPHLARFPYPPGTLPNPLLGQPPHEHEMLRHPVFGTPYPRDLPGAIPPPMSAAHQLQAMHAQSAELQRLAMEQQWLHGHPHMHGGHLPSQEDYYSRLKKEGDKQL

SEQ ID NO: 762263 - protein, 1275 aa, Homo sapiens
SNTGSGRDPLPGGQVIYWLGSFRGDLVVKRRPGKCRLMPGPPGRGRPQSRAGRDRGGRRGQPPVSQLRRGWGGGRAAGAQPTSSIRNVGWRPSSLEGPQPCGRPLPTLAAKRFVKGLRQYGKNFFRIRKELLPNKETGELITFYYYWKKTPEAASSRAHRRHRRQAVFRRIKTRTASTPVNTPSRPPSSEFLDLSSASEDDFDSEDSEQELKGYACRHCFTTTSKDWHHGGRENILLCTDCRIHFKKYGELPPIEKPVDPPPFMFKPVKEEDDGLSGKHSMRTRRSRGSMSTLRSGRKKQPASPDGRTSPINEDIRSSGRNSPSAASTSSNDSKAETVKKSAKKVKEEASSPLKSNKRQREKVASDTEEADRTSSKKTKTQEISRPNSPSEGEGESSDSRSVNDEGSSDPKDIDQDNRSTSPSIPSPQDNESDSDSSAQQQMLQAQPPALQAPTGVTPAPSSAPPGTPQLPTPGPTPSATAVPPQGSPTASQAPNQPQAPTAPVPHTHIQQAPALHPQRPPSPHPPPHPSPHPPLQPLTGSAGQPSAPSHAQPPLHGQGPPGPHSLQAGPLLQHPGPPQPFGLPPQASQGQAPLGTSPAAAYPHTSLQLPASQSALQSQQPPREQPLPPAPLAMPHIKPPPTTPIPQLPAPQAHKHPPHLSGPSPFSMNANLPPPPALKPLSSLSTHHPPSAHPPPLQLMPQSQPLPSSPAQPPGLTQSQNLPPPPASHPPTGLHQVAPQPPFAQHPFVPGGPPPITPPTCPSTSTPPAGPGTSAQPPCSGAAASGGSIAGGSSCPLPTVQIKEEALDDAEEPESPPPPPRSPSPEPTVVDTPSHASQSARFYKHLDRGYNSCARTDLYFMPLAGSKLAKKREEAIEKAKREAEQKAREEREREKEKEKEREREREREREAERAAKASSSAHEGRLSDPQLSGPGHMRPSFEPPPTTIAAVPPYIGPDTPALRTLSEYARPHVMSPTNRNHPFYMPLNPTDPLLAYHMPGLYNVDPTIRERELREREIREREIRERELRERMKPGFEVKPPELDPLHPAANPMEHFARHSALTIPPTAGPHPFASFHPGLNPLERERLALAGPQLRPEMSYPDRLAAERIHAERMASLTSDPLARLQMFNVTPHHHQHSHIHSHLHLHQQDPLHQGSAGPVHPLVDPLTAGPHLARFPYPPGTLPNPLLGQPPHEHEMLRHPVFGTPYPRDLPGAIPPPMSAAHQLQAMHAQSAELQRLAMEQQWLHGHPHMHGGHLPSQEDYYSRLKKEGDKQL

SEQ ID NO: 762264 - protein, 1200 aa, Homo sapiens; identical to SEQ ID NO: 762258

SEQ ID NO: 762265 - protein, 1200 aa, Homo sapiens; identical to SEQ ID NO: 762258

SEQ ID NO: 762266 - protein, 1200 aa, Homo sapiens; identical to SEQ ID NO: 762258

SEQ ID NO: 762267 - protein, 1566 aa, Homo sapiens; identical to SEQ ID NO: 762260

SEQ ID NO: 762268 - protein, 103 aa, Homo sapiens
MDRGLDRGLVTAASIQGLQGRCYRLCFLPGVSLVSAPSLCSASSTDICSIRPLPFCTGSAGGECSLSVLQCHCSVSTGWKAHGPVSIVDFLLDFCVHTLDCSG

SEQ ID NO: 762269 - protein, 650 aa, Homo sapiens
MTADKDKDKDKEKDRDRDRDREREKRDKARESENSRPRRSCTLEGGAKNYAESDHSEDEDNDNNSATAEESTKKNKKKPPKKKSRYERTDTGEITSYITEDDVVYRPGDCVYIESRRPNTPYFICSIQDFKLVHNSQACCRSPTPALCDPPACSLPVASQPPQHLSEAGRGPVGSKRDHLLMNVKWYYRQSEVPDSVYQHLVQDRHNENDSGRELVITDPVIKNRELFISDYVDTYHAAALRGKCNISHFSDIFAAREFKARVDSFFYILGYNPETRRLNSTQGEIRVGPSHQAKLPDLQPFPSPDGDTVTQHEELVWMPGVNDCDLLMYLRAARSMAAFAGMCDGGSTEDGCVAASRDDTTLNALNTLHESGYDAGKALQRLVKKPVPKLIEKCWTEDEVKRFVKGLRQYGKNFFRIRKELLPNKETGELITFYYYWKKTPEAASSRAHRRHRRQAVFRRIKTRTASTPVNTPSRPPSSEFLDLSSASEDDFDSEDSEQELKGYACRHCFTTTSKDWHHGGRENILLCTDCRIHFKKYGELPPIEKPVDPPPFMFKPVKEEDDGLSGKHSMRTRRSRGSMSTLRSGRKKQPASPDGRTSPINEDIRSSGRNSPSAASTSSNDSKAETVKKSAKVRCWGDSRAYSVPPSH

SEQ ID NO: 762270 - protein, 521 aa, Homo sapiens
MTADKDKDKDKEKDRDRDRDREREKRDKARESENSRPRRSCTLEGGAKNYAESDHSEDEDNDNNSATAEESTKKNKKKPPKKKSRYERTDTGEITSYITEDDVVYRPGDCVYIESRRPNTPYFICSIQDFKLVHNSQACCRSPTPALCDPPACSLPVASQPPQHLSEAGRGPVGSKRDHLLMNVKWYYRQSEVPDSVYQHLVQDRHNENDSGRELVITDPVIKNRELFISDYVDTYHAAALRGKCNISHFSDIFAAREFKARVDSFFYILGYNPETRRLNSTQGEIRVGPSHQAKLPDLQPFPSPDGDTVTQHEELVWMPGVNDCDLLMYLRAARSMAAFAGMCDGGSTEDGCVAASRDDTTLNALNTLHESGYDAGKALQRLVKKPVPKLIEKCWTEDEVKRFVKGLRQYGKNFFRIRKELLPNKETGELITFYYYWKKTPEAASSRAHRRHRRQAVFRRIKTRTASTPVNTPSRPPSSEFLDLSSASEDDFDSEDSEQELKGYACRHCFTTSKWPRHAP

SEQ ID NO: 762271 - protein, 216 aa, Homo sapiens
MTADKDKDKDKEKDRDRDRDREREKRDKARESENSRPRRSCTLEGGAKNYAESDHSEDEDNDNNSATAEESTKKNKKKPPKKKSRYERTDTGEITSYITEDDVVYRPGDCVYIESRRPNTPYFICSIQDFKLVHNSQACCRSPTPALCDPPACSLPVASQPPQHLSEAGRGPVGVRRIPFLKAISILYPIGYKIGILPPSPEPLLKCAVLYVFLKE

SEQ ID NO: 762272 - protein, 1566 aa, Homo sapiens; identical to SEQ ID NO: 762260

SEQ ID NO: 762273 - protein, 173 aa, Homo sapiens
SNTGSGRDPLPGGQVIYWLGSFRGDLVVKRRPGKCRLMPGPPGRGRPQSRAGRDRGGRRGQPPVSQLRRGWGGGRAAGAQPTSSIRNVGWRPSSLGRAPALWAPSPHACCGREEVSVLYRLDVLLSGRRTQIPAPGALEAPASGWGSGRGRGRGRGAGPRLADRRAAAIQAAF

SEQ ID NO: 762274 - protein, 1566 aa, Homo sapiens; identical to SEQ ID NO: 762260

SEQ ID NO: 762275 - protein, 1385 aa, Homo sapiens [sequence omitted]

SEQ ID NO: 762276 - protein, 1227 aa, Homo sapiens
SRSPVTGDGLLPPRTPGAYLWLLGSAARDQAGSPEGSLLEKSHRVWFCFPFLLDTSGKLGSQKRFVKGLRQYGKNFFRIRKELLPNKETGELITFYYYWKKTPEAASSRAHRRHRRQAVFRRIKTRTASTPVNTPSRPPSSEFLDLSSASEDDFDSEDSEQELKGYACRHCFTTTSKDWHHGGRENILLCTDCRIHFKKYGELPPIEKPVDPPPFMFKPVKEEDDGLSGKHSMRTRRSRGSMSTLRSGRKKQPASPDGRTSPINEDIRSSGRNSPSAASTSSNDSKAETVKKSAKKVKEEASSPLKSNKRQREKVASDTEEADRTSSKKTKTQEISRPNSPSEGEGESSDSRSVNDEGSSDPKDIDQDNRSTSPSIPSPQDNESDSDSSAQQQMLQAQPPALQAPTGVTPAPSSAPPGTPQLPTPGPTPSATAVPPQGSPTASQAPNQPQAPTAPVPHTHIQQAPALHPQRPPSPHPPPHPSPHPPLQPLTGSAGQPSAPSHAQPPLHGQGPPGPHSLQAGPLLQHPGPPQPFGLPPQASQGQAPLGTSPAAAYPHTSLQLPASQSALQSQQPPREQPLPPAPLAMPHIKPPPTTPIPQLPAPQAHKHPPHLSGPSPFSMNANLPPPPALKPLSSLSTHHPPSAHPPPLQLMPQSQPLPSSPAQPPGLTQSQNLPPPPASHPPTGLHQVAPQPPFAQHPFVPGGPPPITPPTCPSTSTPPAGPGTSAQPPCSGAAASGGSIAGGSSCPLPTVQIKEEALDDAEEPESPPPPPRSPSPEPTVVDTPSHASQSARFYKHLDRGYNSCARTDLYFMPLAGSKLAKKREEAIEKAKREAEQKAREEREREKEKEKEREREREREREAERAAKASSSAHEGRLSDPQLSGPGHMRPSFEPPPTTIAAVPPYIGPDTPALRTLSEYARPHVMSPTNRNHPFYMPLNPTDPLLAYHMPGLYNVDPTIRERELREREIREREIRERELRERMKPGFEVKPPELDPLHPAANPMEHFARHSALTIPPTAGPHPFASFHPGLNPLERERLALAGPQLRPEMSYPDRLAAERIHAERMASLTSDPLARLQMFNVTPHHHQHSHIHSHLHLHQQDPLHQGSAGPVHPLVDPLTAGPHLARFPYPPGTLPNPLLGQPPHEHEMLRHPVFGTPYPRDLPGAIPPPMSAAHQLQAMHAQSAELQRLAMEQQWLHGHPHMHGGHLPSQEDYYSRLKKEGDKQL

SEQ ID NO: 762277 - protein, 1200 aa, Homo sapiens; identical to SEQ ID NO: 762258

SEQ ID NO: 762278 - protein, 1657 aa, Homo sapiens
MTADKDKDKDKEKDRDRDRDREREKRDKARESENSRPRRSCTLEGGAKNYAESDHSEDEDNDNNSATAEESTKKNKKKPPKKKSRYERTDTGEITSYITEDDVVYRPGDCVYIESRRPNTPYFICSIQDFKLVHNSQACCRSPTPALCDPPACSLPVASQPPQHLSEAGRGPVGSKRDHLLMNVKWYYRQSEVPDSVYQHLVQDRHNENDSGRELVITDPVIKNRELFISDYVDTYHAAALRGKCNISHFSDIFAAREFKARVDSFFYILGYNPETRRLNSTQGEIRVGPSHQAKLPDLQPFPSPDGDTVTQHEELVWMPGVNDCDLLMYLRAARSMAAFAGMCDGGSTEDGCVAASRDDTTLNALNTLHESGYDAGKALQRLVKKPVPKLIEKCWTEDEVKRFVKGLRQYGKNFFRIRKELLPNKETGELITFYYYWKKTPEAASSRAHRRHRRQAVFRRIKTRTASTPVNTPSRPPSSEFLDLSSASEDDFDSEDSEQELKGYACRHCFTTTSKDWHHGGRENILLCTDCRIHFKKYGELPPIEKPVDPPPFMFKPVKEEDDGLSGKHSMRTRRSRGSMSTLRSGRKKQPASPDGRTSPINEDIRSSGRNSPSAASTSSNDSKAETVKKSAKKVKEEASSPLKSNKRQREKVASDTEEADRTSSKKTKTQVRFAAEPCCVKLMLLQKPPAGVLPSWWPCPVSYGGAGVAFDTGWVRARPVVPEPSLLLHLHKHYCVSGTGGAEQTGLCPPGTSILPFSGLQEISRPNSPSEGEGESSDSRSVNDEGSSDPKDIDQDNRSTSPSIPSPQDNESDSDSSAQQQMLQAQPPALQAPTGVTPAPSSAPPGTPQLPTPGPTPSATAVPPQGSPTASQAPNQPQAPTAPVPHTHIQQAPALHPQRPPSPHPPPHPSPHPPLQPLTGSAGQPSAPSHAQPPLHGQGPPGPHSLQAGPLLQHPGPPQPFGLPPQASQGQAPLGTSPAAAYPHTSLQLPASQSALQSQQPPREQPLPPAPLAMPHIKPPPTTPIPQLPAPQAHKHPPHLSGPSPFSMNANLPPPPALKPLSSLSTHHPPSAHPPPLQLMPQSQPLPSSPAQPPGLTQSQNLPPPPASHPPTGLHQVAPQPPFAQHPFVPGGPPPITPPTCPSTSTPPAGPGTSAQPPCSGAAASGGSIAGGSSCPLPTVQIKEEALDDAEEPESPPPPPRSPSPEPTVVDTPSHASQSARFYKHLDRGYNSCARTDLYFMPLAGSKLAKKREEAIEKAKREAEQKAREEREREKEKEKEREREREREREAERAAKASSSAHEGRLSDPQLSGPGHMRPSFEPPPTTIAAVPPYIGPDTPALRTLSEYARPHVMSPTNRNHPFYMPLNPTDPLLAYHMPGLYNVDPTIRERELREREIREREIRERELRERMKPGFEVKPPELDPLHPAANPMEHFARHSALTIPPTAGPHPFASFHPGLNPLERERLALAGPQLRPEMSYPDRLAAERIHAERMASLTSDPLARLQMFNVTPHHHQHSHIHSHLHLHQQDPLHQGSAGPVHPLVDPLTAGPHLARFPYPPGTLPNPLLGQPPHEHEMLRHPVFGTPYPRDLPGAIPPPMSAAHQLQAMHAQSAELQRLAMEQQWLHGHPHMHGGHLPSQEDYYSRLKKEGDKQL

SEQ ID NO: 762279 - protein, 834 aa, Homo sapiens
MLQAQPPALQAPTGVTPAPSSAPPGTPQLPTPGPTPSATAVPPQGSPTASQAPNQPQAPTAPVPHTHIQQAPALHPQRPPSPHPPPHPSPHPPLQPLTGSAGQPSAPSHAQPPLHGQGPPGPHSLQAGPLLQHPGPPQPFGLPPQASQGQAPLGTSPAAAYPHTSLQLPASQSALQSQQPPREQPLPPAPLAMPHIKPPPTTPIPQLPAPQAHKHPPHLSGPSPFSMNANLPPPPALKPLSSLSTHHPPSAHPPPLQLMPQSQPLPSSPAQPPGLTQSQNLPPPPASHPPTGLHQVAPQPPFAQHPFVPGGPPPITPPTCPSTSTPPAGPGTSAQPPCSGAAASGGSIAGGSSCPLPTVQIKEEALDDAEEPESPPPPPRSPSPEPTVVDTPSHASQSARFYKHLDRGYNSCARTDLYFMPLAGSKLAKKREEAIEKAKREAEQKAREEREREKEKEKEREREREREREAERAAKASSSAHEGRLSDPQLSGPGHMRPSFEPPPTTIAAVPPYIGPDTPALRTLSEYARPHVMSPTNRNHPFYMPLNPTDPLLAYHMPGLYNVDPTIRERELREREIREREIRERELRERMKPGFEVKPPELDPLHPAANPMEHFARHSALTIPPTAGPHPFASFHPGLNPLERERLALAGPQLRPEMSYPDRLAAERIHAERMASLTSDPLARLQMFNVTPHHHQHSHIHSHLHLHQQDPLHQGSAGPVHPLVDPLTAGPHLARFPYPPGTLPNPLLGQPPHEHEMLRHPVFGTPYPRDLPGAIPPPMSAAHQLQAMHAQSAELQRLAMEQQWLHGHPHMHGGHLPSQEDYYSRLKKEGDKQL

SEQ ID NO: 762280 - protein, 1200 aa, Homo sapiens; identical to SEQ ID NO: 762258

SEQ ID NO: 762281 - protein, 1566 aa, Homo sapiens; identical to SEQ ID NO: 762260

SEQ ID NO: 762282 - protein, 697 aa, Homo sapiens
MTADKDKDKDKEKDRDRDRDREREKRDKARESENSRPRRSCTLEGGAKNYAESDHSEDEDNDNNSATAEESTKKNKKKPPKKKSRYERTDTGEITSYITEDDVVYRPGDCVYIESRRPNTPYFICSIQDFKLVHNSQACCRSPTPALCDPPACSLPVASQPPQHLSEAGRGPVGSKRDHLLMNVKWYYRQSEVPDSVYQHLVQDRHNENDSGRELVITDPVIKNRELFISDYVDTYHAAALRGKCNISHFSDIFAAREFKARVDSFFYILGYNPETRRLNSTQGEIRVGPSHQAKLPDLQPFPSPDGDTVTQHEELVWMPGVNDCDLLMYLRAARSMAAFAGMCDGGSTEDGCVAASRDDTTLNALNTLHESGYDAGKALQRLVKKPVPKLIEKCWTEDEVKRFVKGLRQYGKNFFRIRKELLPNKETGELITFYYYWKKTPEAASSRAHRRHRRQAVFRRIKTRTASTPVNTPSRPPSSEFLDLSSASEDDFDSEDSEQELKGYACRHCFTTTSKDWHHGGRENILLCTDCRIHFKKYGELPPIEKPVDPPPFMFKPVKEEDDGLSGKHSMRTRRSRGSVSPLGPWGSWQLLQFPGMCGGLSLPGGGSESLVYQTKSWRGAALPEAVACLWAGKSSLFSPSRGPRVASCSGFCSKLLASGSVQALQGPSCSPRLLLVVSLPLYQISAILNLQALLC

SEQ ID NO: 762283 - protein, 230 aa, Homo sapiens
MCSSVAAKLWFLTDRRIREDYPQKEILRALKAKCCEEELDFRAVVMDEVVLTIEQGNLGLRINGELITAYPQVVVVRVPTPWVQSDSDITVLRHLEKMGCRLMNRPQAILNCVNKFWTFQELAGHGVPLPDTFSYGGHENFAKMIDEAEVLEFPMVVKNTRGHRGKAVFLARDKHHLADLSHLIRHEAPYLFQKYVKESHGRDVRVIVVGGRVVGTMLRCSTDGRMQSNC

SEQ ID NO: 762284 - protein, 162 aa, Homo sapiens
AGSRARGRRVRERGAAGCECVGVRVCGSGVREKLTGREAVRNWASVRGRPASLREPQSAEEKGGGSRYPDPLPLLSFPHFQPPGGPRFLEGPSPAQSAESEGGAPRPRGAGVCLSGRGAVCDSENRAKKGNSKFSHRQSSTRSRATFLFLPCPPAGGKELSV

SEQ ID NO: 762285 - protein, 244 aa, Homo sapiens
YPIEHGIVTNWDDMEKIWHHTFYNELRVAPEEHPVLLAARPLSLKAKCCEEELDFRAVVMDEVVLTIEQGNLGLRINGELITAYPQVVVVRVPTPWVQSDSDITVLRHLEKMGCRLMNRPQAILNCVNKFWTFQELAGHGVPLPDTFSYGGHENFAKMIDEAEVLEFPMVVKNTRGHRGKAVFLARDKHHLADLSHLIRHEAPYLFQKYVKESHGRDVRVIVVGGRVVGTMLRCSTDGRMQSNC

SEQ ID NO: 762286 - protein, 230 aa, Homo sapiens; identical to SEQ ID NO: 762283

SEQ ID NO: 762287 - protein, 70 aa, Homo sapiens
DPGEDVALPSVSFEDTEATLGVPPSCTCHLELSMHLEAPQLFISQLFQEEDVSLITFLKYATCSPTRCST

SEQ ID NO: 762288 - protein, 70 aa, Homo sapiens; identical to SEQ ID NO: 762287

SEQ ID NO: 762289 - protein, 327 aa, Homo sapiens
DPGEDVALPSVSFEDTEATQVSPKLYLSPRIEHALGGSSALHIPAFPGGGCLIDYVPQVCHLLTNKVQYVIQGYHKRREYIAAFLSHFGTGVVEYDAEGFTKLTLLLMWKDFCFLVHIDLPLFFPRDQPTLTFQSVYHFTNSGQLYSQAQKNYPYSPRWDGNEMAKRAKGMPREQRCLQPVGASPGLCSCKNWLQAAPAPEELAKLQRASLEGLRGRENCSVILITLGLFQNLCPSVPGGSICQWKALGNTSLERWPARLPVHMRVSTYSRFLEAAWNVFTAAFCSHSSFCTPQAAPTAEIQLELAGGPWILEPFTSGYSLFLASIS

SEQ ID NO: 762290 - protein, 180 aa, Homo sapiens
DPGEDVALPSVSFEDTEATQVSPKLYLSPRIEHALGGSSALHIPAFPGGGCLIDYVPQVCHLLTNKVQYVIQGYHKRREYIAAFLSHFGTGVVEYDAEGFTKLTLLLMWKDFCFLVHIDLPLFFPRDQPTLTFQSVYHFTNSGQLYSQAQKNYPYSPRWDGNEMAKRAKFQEAAFANGKL

SEQ ID NO: 762291 - protein, 173 aa, Homo sapiens
  misc_feature (6)..(7): Xaa can be any naturally occurring amino acid
HSPPPXXSPPLCLGCTPRAAVSCLQPVGASPGLCSCKNWLQAAPAPEELAKLQRASLEGLRGRENCSVILITLGLFQNLCPSVPGGSICQWKALGNTSLERWPARLPVHMRVSTYSRFLEAAWNVFTAAFCSHSSFCTPQAAPTAEIQLELAGGPWILEPFTSGYSLFLASIS

SEQ ID NO: 762292 - protein, 70 aa, Homo sapiens; identical to SEQ ID NO: 762287

SEQ ID NO: 762293 - protein, 70 aa, Homo sapiens; identical to SEQ ID NO: 762287

SEQ ID NO: 762294 - protein, 342 aa, Homo sapiens
DPGEDVALPSVSFEDTEATQVSPKLYLSPRIEHALGGSSALHIPAFPGGGCLIDYVPQVCHLLTNKVQYVIQGYHKRREYIAAFLSHFGTGVVEYDAEGFTKLTLLLMWKDFCFLVHIDLPLFFPRDQPTLTFQSVYHFTNSGQLYSQAQKNYPYSPRWDGNEMAKRAKPAGPPFSSSFHLLHQGMPREQRCLQPVGASPGLCSCKNWLQAAPAPEELAKLQRASLEGLRGRENCSVILITLGLFQNLCPSVPGGSICQWKALGNTSLERWPARLPVHMRVSTYSRFLEAAWNVFTAAFCSHSSFCTPQAAPTAEIQLELAGGPWILEPFTSGYSLFLASIS

SEQ ID NO: 762295 - protein, 70 aa, Homo sapiens; identical to SEQ ID NO: 762287

SEQ ID NO: 762296 - protein, 70 aa, Homo sapiens; identical to SEQ ID NO: 762287

SEQ ID NO: 762297 - protein, 104 aa, Homo sapiens
MWSFASPWEKIWPSFRWTYLMPFRAQTQDTKLSLDLSVRPKDCLEKFEGSVYLDWHMHPLSLNIRRESREISSFLSRKKVSTNRSGGKRPIGEGIRVRGEKEKR

SEQ ID NO: 762298 - protein, 120 aa, Homo sapiens
MEGSRPSPVSLRGGAHRPACRGGPAPSLPAGDPRRPRPPAHAVLHLGASTNAGGCAALQPLRPRPLGPADHQAALLGPRLLRASHLLLASVGSDCGAHGAWGHGFLLGPQMPFLEWLSLS

SEQ ID NO: 762299 - protein, 87 aa, Homo sapiens
RSLLPSESDIITEEDKSKKKGQEEKQPKKQPKKDEEGQKEEDKPRKEPDKKEGKKEVESKRKNLAKTGVTSTSDSDGSKMAQSNKTT

SEQ ID NO: 762300 - protein, 622 aa, Homo sapiens
RRQRRRGCDSEPLRRLCGSWWRRWLAWTRVEATGQQPQRRRPRPRQARRDAPRHPPPPAGPVAGPASAARIPAPPHLLAASRASDPRSRPRNMTRDFKPGDLIFAKMKGYPHWPARVDEVPDGAVKPPTNKLPIFFFGTHETAFLGPKDIFPYSENKEKYGKPNKRKGFNEGLWEIDNNPKVKFSSQQAATKQSNASSDVEVEEKETSVSKEDTDHEEKASNEDVTKAVDITTPKAARRGRKRKAEKQVETEEAGVVTTATASVNLKVSPKRGRPAATEVKIPKPRGRPKMVKQPCPSESDIITEEDKSKKKGQEEKQPKKQPKKDEEGQKEEDKPRKEPDKKEGKKEVESKRKNLAKTGVTSTSDSEEEGDDQEGEKKRKGGRNFQTAHRRNMLKGQHEKEAADRKRKQEEQMETEQQNKDEGKKPEVKKVEKKRETSMDSRLQRIHAEIKNSLKIDNLDVNRCIEALDELASLQVTMQQAQKHTEMITTLKKIRRFKVSQVIMEKSTMLYNKFKNMFLVGEGDSVITQVLNKSLAEQRQHEEANKTKDQGKKGPNKKLEKEQTGSKTLNGGSDAQDGNQPQHNGESNEDSKDNHEASTKKKPSSEERETEISLKDSTLDN

SEQ ID NO: 762301 - protein, 612 aa, Homo sapiens
RRQRRRGCDSEPLRRLCGSWWRRWLAWTRVEATGQQPQRRRPRPRQARRDAPRHPPPPAGPVAGPASAARIPAPPHLLAASRASDPRSRPRNMTRDFKPGDLIFAKMKGYPHWPARVDEVPDGAVKPPTNKLPIFFFGTHETAFLGPKDIFPYSENKEKYGKPNKRKGFNEGLWEIDNNPKVKFSSQQAATKQSNASSDVEVEEKETSVSKEDTDHEEKASNEDVTKAVDITTPKAARRGRKRKAEKQVETEEAGVVTTATASVNLKVSPKRGRPAATEVKIPKPRGRPKMVKQPCPSESDIITEEDKSKKKGQEEKQPKKQPKKDEEGQKEEDKPRKEPDKKEGKKEVESKRKNLAKTGVTSTSDSEEEGDDQEGENAHRRNMLKGQHEKEAADRKRKQEEQMETEQQNKDEGKKPEVKKVEKKRETSMDSRLQRIHAEIKNSLKIDNLDVNRCIEALDELASLQVTMQQAQKHTEMITTLKKIRRFKVSQVIMEKSTMLYNKFKNMFLVGEGDSVITQVLNKSLAEQRQHEEANKTKDQGKKGPNKKLEKEQTGSKTLNGGSDAQDGNQPQHNGESNEDSKDNHEASTKKKPSSEERETEISLKDSTLDN

SEQ ID NO: 762302 - protein, 622 aa, Homo sapiens; identical to SEQ ID NO: 762300

SEQ ID NO: 762303 - protein, 622 aa, Homo sapiens; identical to SEQ ID NO: 762300

SEQ ID NO: 762304 - protein, 229 aa, Homo sapiens
MLKGQHEKEAADRKRKQEEQMETEQQNKDEGKKPEVKKVEKKRETSMDSRLQRIHAEIKNSLKIDNLDVNRCIEALDELASLQVTMQQAQKHTEMITTLKKIRRFKVSQVIMEKSTMLYNKFKNMFLVGEGDSVITQVLNKSLAEQRQHEEANKTKDQGKKGPNKKLEKEQTGSKTLNGGSDAQDGNQPQHNGESNEDSKDNHEASTKKKPSSEERETEISLKDSTLDN

SEQ ID NO: 762305 - protein, 622 aa, Homo sapiens; identical to SEQ ID NO: 762300

SEQ ID NO: 762306 - protein, 622 aa, Homo sapiens; identical to SEQ ID NO: 762300

SEQ ID NO: 762307 - protein, 622 aa, Homo sapiens; identical to SEQ ID NO: 762300

SEQ ID NO: 762308 - protein, 622 aa, Homo sapiens; identical to SEQ ID NO: 762300

SEQ ID NO: 762309 - protein, 603 aa, Homo sapiens
RRQRRRGCDSEPLRRLCGSWWRRWLAWTRVEATGQQPQRRRPRPRQARRDAPRHPPPPAGPVAGPASAARIPAPPHLLAASRASDPRSRPRNMTRDFKPGDLIFAKMKGYPHWPARVDEVPDGAVKPPTNKLPIFFFGTHETAFLGPKDIFPYSENKEKYGKPNKRKGFNEGLWEIDNNPKVKFSSQQAATKQSNASSDVEVEEKETSVSKEDTDHEEKASNEDVTKAVDITTPKAARRGRKRKAEKQVETEEAGVVTTATASVNLKVSPKRGRPAATEVKIPKPRGRPKMVKQPCPSESDIITEEDKSKKKGQEEKQPKKQPKKDEEGQKEEDKPRKEPDKKEGKKEVESKRKNLAKTGVTSTSDSEEEGDDQEGEKKRKGGRNFQTAHRRNMLKGQHEKEAADRKRKQEEQMETEQQNKDEGKKPEVKKVEKKRETSMDSRLQRIHAEIKNSLKIDNLDVNRCIEALDELASLQVTMQQAQKHTEMITTLKKIRRFKVSQVIMEKSTMLYNKFKNMFLVGEGDSVITQVLNKSLAEQRQHEEANKTKDQGKKGPNKKLEKEQTGSKTLNGGSDAQDGNQPQHNGESNEDSKDNHEASTKKK

SEQ ID NO: 762310 - protein, 622 aa, Homo sapiens; identical to SEQ ID NO: 762300

SEQ ID NO: 762311 - protein, 622 aa, Homo sapiens; identical to SEQ ID NO: 762300

SEQ ID NO: 762312 - protein, 609 aa, Homo sapiens
RRQRRRGCDSEPLRRLCGSWWRRWLAWTRVEATGQQPQRRRPRPRQARRDAPRHPPPPAGPVAGPASAARIPAPPHLLAASRASDPRSRPRNMTRDFKPGDLIFAKMKGYPHWPARVDEVPDGAVKPPTNKLPIFFFGTHETAFLGPKDIFPYSENKEKYGKPNKRKGFNEGLWEIDNNPKVKFSSQQAATKQSNASSDVEVEEKETSVSKEDTDHEEKASNEDVTKAVDITTPKAARRGRKRKAEKQVETEEAGVVTTATASVNLKVSPKRGRPAATEVKIPKPRGRPKMVKQPCPSESDIITEEDKSKKKGQEEKQPKKQPKKDEEGQKEEDKPRKEPDKKEGKKEVESKRKNLAKTGVTSTSDSEEEGDDQEGEKKRKGGRNFQTAHRRNMLKGQHEKEAADRKRKQEEQMETEQQNKDEGKKPEVKKVEKKRETSMDSRLQRIHAEIKNSLKIDNLDVNRCIEALDELASLQVTMQQAQKHTEMITTLKKIRRFKVSQVIMEKSTMLYNKFKNMFLVGEGDSVITQVLNKSLAEQRQHEEANKTKDQGKKGPNKKLEKEQTGSKTLNGGSDAQDGNQPQHNGESNEDSKDNHEASTKKNTSEEKS

SEQ ID NO: 762313 - protein, 68 aa, Homo sapiens
MRTSYLLLFTLCLLLSEMASGGNFLTGLGHRSDHYNCVSSGGQCLYSACPIFTKIQGTCYRGKAKCCK

SEQ ID NO: 762314 - protein, 68 aa, Homo sapiens; identical to SEQ ID NO: 762313

SEQ ID NO: 762315 - protein, 68 aa, Homo sapiens
KRTFAEKAANEFRLHSSQNLMFCNDDISVAAEGPSPESLRSARRFERRDNGRSVRPRPLQAICIPRSA

SEQ ID NO: 762316 - protein, 554 aa, Homo sapiens
MGPLTFRDVKIEFSLEEWQCLDTAQRNLYRDVMLENYRNLVFLVMCSHFAQDVWPEHSIKDSFQKVILRTYGKYGHENLQLRKDHKSVDACKVYKGGYNGLNQCLTTTDSKIFQCDKYVKVFHKFPNVNRNKIRHTGKKPFKCKNRGKSFCMLSQLTQHKKIHTREYSYKCEECGKAFNWSSTLTKHKIIHTGEKPYKCEECGKAFNRSSNLTKHKIIHTGEKPYKCEECGKAFNRSSTLTKHKRIHTEEKPYKCEECGKAFNQFSILNKHKRIHMEDKPYKCEECGKAFRVFSILKKHKIIHTGEKPYKCEECGKAFNQFSNLTKHKIIHTGEKPYKCDECGKAFNQSSTLTKHKRIHTGEKPYKCEECGKAFKQSSTLTEHKIIHTGEKPYKCEKCGKAFSWSSAFTKHKRNHMEDKPYKCEECGKAFSVFSTLTKHKIIHTREKPYKCEECGKAFNQSSIFTKHKIIHTEGKSYKCEKCGNAFNQSSNLTARKIIYTGEKPYKYEECDKAFNKFSTLITHQIIYTGEKPCKHECGRAFNKSSNYTKEKLQT

SEQ ID NO: 762317 - protein, 586 aa, Homo sapiens
MGPLTFRDVKIEFSLEEWQCLDTAQRNLYRDVMLENYRNLVFLGIAVSKPDLITWLEQGKEPWNLKRHEMVDKTPVMCSHFAQDVWPEHSIKDSFQKVILRTYGKYGHENLQLRKDHKSVDACKVYKGGYNGLNQCLTTTDSKIFQCDKYVKVFHKFPNVNRNKIRHTGKKPFKCKNRGKSFCMLSQLTQHKKIHTREYSYKCEECGKAFNWSSTLTKHKIIHTGEKPYKCEECGKAFNRSSNLTKHKIIHTGEKPYKCEECGKAFNRSSTLTKHKRIHTEEKPYKCEECGKAFNQFSILNKHKRIHMEDKPYKCEECGKAFRVFSILKKHKIIHTGEKPYKCEECGKAFNQFSNLTKHKIIHTGEKPYKCDECGKAFNQSSTLTKHKRIHTGEKPYKCEECGKAFKQSSTLTEHKIIHTGEKPYKCEKCGKAFSWSSAFTKHKRNHMEDKPYKCEECGKAFSVFSTLTKHKIIHTREKPYKCEECGKAFNQSSIFTKHKIIHTEGKSYKCEKCGNAFNQSSNLTARKIIYTGEKPYKYEECDKAFNKFSTLITHQIIYTGEKPCKHECGRAFNKSSNYTKEKLQT

SEQ ID NO: 762318 - protein, 517 aa, Homo sapiens
MVDKTPVMCSHFAQDVWPEHSIKDSFQKVILRTYGKYGHENLQLRKDHKSVDACKVYKGGYNGLNQCLTTTDSKIFQCDKYVKVFHKFPNVNRNKIRHTGKKPFKCKNRGKSFCMLSQLTQHKKIHTREYSYKCEECGKAFNWSSTLTKHKIIHTGEKPYKCEECGKAFNRSSNLTKHKIIHTGEKPYKCEECGKAFNRSSTLTKHKRIHTEEKPYKCEECGKAFNQFSILNKHKRIHMEDKPYKCEECGKAFRVFSILKKHKIIHTGEKPYKCEECGKAFNQFSNLTKHKIIHTGEKPYKCDECGKAFNQSSTLTKHKRIHTGEKPYKCEECGKAFKQSSTLTEHKIIHTGEKPYKCEKCGKAFSWSSAFTKHKRNHMEDKPYKCEECGKAFSVFSTLTKHKIIHTREKPYKCEECGKAFNQSSIFTKHKIIHTEGKSYKCEKCGNAFNQSSNLTARKIIYTGEKPYKYEECDKAFNKFSTLITHQIIYTGEKPCKHECGRAFNKSSNYTKEKLQT

SEQ ID NO: 762319 - protein, 281 aa, Homo sapiens
MGPLTFRDVKIEFSLEEWQCLDTAQRNLYRDVMLENYRNLVFLVMCSHFAQDVWPEHSIKDSFQKVILRTYGKYGHENLQLRKDHKSVDACKVYKGGYNGLNQCLTTTDSKIFQCDKYVKVFHKFPNVNRNKIRHTGKKPFKCKNRGKSFCMLSQLTQHKKIHTREYSYKCEECGKAFNQSSIFTKHKIIHTEGKSYKCEKCGNAFNQSSNLTARKIIYTEENPKALVAQTLFDIREFVLEKNPANVINMEKHFFKNYSLENIREFILKYIFADAVNMKNI

SEQ ID NO: 762320 - protein, 510 aa, Homo sapiens
MCSHFAQDVWPEHSIKDSFQKVILRTYGKYGHENLQLRKDHKSVDACKVYKGGYNGLNQCLTTTDSKIFQCDKYVKVFHKFPNVNRNKIRHTGKKPFKCKNRGKSFCMLSQLTQHKKIHTREYSYKCEECGKAFNWSSTLTKHKIIHTGEKPYKCEECGKAFNRSSNLTKHKIIHTGEKPYKCEECGKAFNRSSTLTKHKRIHTEEKPYKCEECGKAFNQFSILNKHKRIHMEDKPYKCEECGKAFRVFSILKKHKIIHTGEKPYKCEECGKAFNQFSNLTKHKIIHTGEKPYKCDECGKAFNQSSTLTKHKRIHTGEKPYKCEECGKAFKQSSTLTEHKIIHTGEKPYKCEKCGKAFSWSSAFTKHKRNHMEDKPYKCEECGKAFSVFSTLTKHKIIHTREKPYKCEECGKAFNQSSIFTKHKIIHTEGKSYKCEKCGNAFNQSSNLTARKIIYTGEKPYKYEECDKAFNKFSTLITHQIIYTGEKPCKHECGRAFNKSSNYTKEKLQT

SEQ ID NO: 762321 - protein, 230 aa, Homo sapiens
MCSHFAQDVWPEHSIKDSFQKVILRTYGKYGHENLQLRKDHKSVDACKVYKGGYNGLNQCLTTTDSKIFQCDKYVKVFHKFPNVNRNKIRHTGKKPFKCKNRGKSFCMLSQLTQHKKIHTREYSYKCEECGKAFNQSSIFTKHKIIHTEGKSYKCEKCGNAFNQSSNLTARKIIYTGEKPYKYEECDKAFNKFSTLITHQIIYTGEKPCKHECGRAFNKSSNYTKEKLQT

SEQ ID NO: 762322 - protein, 269 aa, Homo sapiens
MVHPYKGDRAEYCKAANKRVMDVINSARTRQQMLHAQTFHSNSLLTQEDAAAAGDRRPAPDTWIYPLIQMKPFEIQIDEIVTETLLTEAERGAKVYLTTGYFNLTQAYMDLVLGTRAEYQILLASPEVNGFFGAKGVAGAIPAAYVHIERQFFSEVCSLGQQERVQLQEYWRRGWTFHAKGLWLYLAGSSLPCLTLIGSPNFGYRSVHRDLEAQIAIVTENQALQQQLHQEQEQLYLRSGVVSSATFEQPSRQVKLWVKMVTPLIKNFF

SEQ ID NO: 762323 - protein, 535 aa, Homo sapiens
KRRVSMAVAAAAAAGPVFWRRLLGLLPGRPGLAALLGRLSDRLGRNRDRQRRRSPWLLLAPLLSPAVPQVTSPPCCLCPEGVHRFQWIRNLVPEFGVSSSHVRVLSSPAEFFELMKVDCLESTLEKSLQAKFPSNLKVSILLDFTRGSRGRKNSRTMLLPLLRRFPEQVRVSLFHTPHLRGLLRLLIPERFNETIGLQHIKVYLFDNSVILSGANLSDSYFTNRQDRYVFLQDCAEIADFFTELVDAVGDVSLQLQGDDTVQVVDGMVHPYKGDRAEYCKAANKRVMDVINSARTRQQMLHAQTFHSNSLLTQEDAAAAGDRRPAPDTWIYPLIQMKPFEIQIDEIVTETLLTEAERGAKVYLTTGYFNLTQAYMDLVLGTRAEYQILLASPEVNGFFGAKGVAGAIPAAYVHIERQFFSEVCSLGQQERVQLQEYWRRGWTFHAKGLWLYLAGSSLPCLTLIGSPNFGYRSVHRDLEAQIAIVTENQALQQQLHQEQEQLYLRSGVVSSATFEQPSRQVKLWVKMVTPLIKNFF

SEQ ID NO: 762324 - protein, 213 aa, Homo sapiens
AVVSTQSAHYGREMKPFEIQIDEIVTETLLTEAERGAKVYLTTGYFNLTQAYMDLVLGTRAEYQILLASPEVNGFFGAKGVAGAIPAAYVHIERQFFSEVCSLGQQERVQLQEYWRRGWTFHAKGLWLYLAGSSLPCLTLIGSPNFGYRSVHRDLEAQIAIVTENQALQQQLHQEQEQLYLRSGVVSSATFEQPSRQVKLWVKMVTPLIKNFF

SEQ ID NO: 762325 - protein, 561 aa, Homo sapiens
KRRVSMAVAAAAAAGPVFWRRLLGLLPGRPGLAALLGRLSDRLGRNRDRQRRRSPWLLLAPLLSPAVPQVTSPPCCLCPEGVHRFQWIRNLVPEFGVSSSHVRVLSSPAEFFELMKGQIRVAKRRVVMASLYLGTGPLEQELVDCLESTLEKSLQAKFPSNLKVSILLDFTRGSRGRKNSRTMLLPLLRRFPEQVRVSLFHTPHLRGLLRLLIPERFNETIGLQHIKVYLFDNSVILSGANLSDSYFTNRQDRYVFLQDCAEIADFFTELVDAVGDVSLQLQGDDTVQVVDGMVHPYKGDRAEYCKAANKRVMDVINSARTRQQMLHAQTFHSNSLLTQEDAAAAGDRRPAPDTWIYPLIQMKPFEIQIDEIVTETLLTEAERGAKVYLTTGYFNLTQAYMDLVLGTRAEYQILLASPEVNGFFGAKGVAGAIPAAYVHIERQFFSEVCSLGQQERVQLQEYWRRGWTFHAKGLWLYLAGSSLPCLTLIGSPNFGYRSVHRDLEAQIAIVTENQALQQQLHQEQEQLYLRSGVVSSATFEQPSRQVKLWVKMVTPLIKNFF

SEQ ID NO: 762326 - protein, 561 aa, Homo sapiens; identical to SEQ ID NO: 762325

SEQ ID NO: 762327 - protein, 446 aa, Homo sapiens
GRLLLLNSRRVVMASLYLGTGPLEQELVDCLESTLEKSLQAKFPSNLKVSILLDFTRGSRGRKNSRTMLLPLLRRFPEQVRVSLFHTPHLRGLLRLLIPERFNETIGLQHIKVYLFDNSVILSGANLSDSYFTNRQDRYVFLQDCAEIADFFTELVDAVGDVSLQLQGDDTVQVVDGMVHPYKGDRAEYCKAANKRVMDVINSARTRQQMLHAQTFHSNSLLTQEDAAAAGDRRPAPDTWIYPLIQMKPFEIQIDEIVTETLLTEAERGAKVYLTTGYFNLTQAYMDLVLGTRAEYQILLASPEVNGFFGAKGVAGAIPAAYVHIERQFFSEVCSLGQQERVQLQEYWRRGWTFHAKGLWLYLAGSSLPCLTLIGSPNFGYRSVHRDLEAQIAIVTENQALQQQLHQEQEQLYLRSGVVSSATFEQPSRQVKLWVKMVTPLIKNFF

SEQ ID NO: 762328 - protein, 561 aa, Homo sapiens; identical to SEQ ID NO: 762325

SEQ ID NO: 762329 - protein, 1141 aa, Homo sapiens
MAVPGDAARVRNKPVHSGVSQAPTAGRDCHHRADPASPRDSGCRGCWGDLVLQPLRSSRKLSSALCAGSLSFLLALLVRLVRGEVGCDLEQCKEAAAAEEEEAAPGAEGGVFPGPRGGAPGGGARLSPWLQPSALLFSLLCAFFWMGLYLLRAGVRLPLAVALLAACCGGEALVQIGLGVGEDHLLSLPAAGVVLSCLAAATWLVLRLRLGVLMIALTSAVRTVSLISLERFKVAWRPYLAYLAGVLGILLARYVEQILPQSAEAAPREHLGSQLIAGTKEDIPVFKRRRRSSSVVSAEMSGCSSKSHRRTSLPCIPREQLMGHSEWDHKRGPRGSQSSGTSITVDIAVMGEATASLPTSWQTLLFHQTCATSLRAVSNLLSTQLTFQAIHKPRVNPVTSLSENYTCSDSEESSEKDKLAIPKRLRRSLPPGLLRRVSSTWTTTTSATGLPTLEPAPVRRDRSTSIKLQEAPSSSPDSWNNPVMMTLTKSRSFTSSYAISAANHVKAKKQSRPGALAKISPLSSPCSSPLQGTPASSLVSKISAVQFPESADTTAKQSLGSHRALTYTQSAPDLSPQILTPPVICSSCGRPYSQGNPADEPLERSGVATRTPSRTDDTAQVTSDYETNNNSDSSDIVQNEDETECLREPLRKASACSTYAPETMMFLDKPILAPEPLVMDNLDSIMEQLNTWNFPIFDLVENIGRKCGRILSQVSYRLFEDMGLFEAFKIPIREFMNYFHALEIGYRDIPYHNRIHATDVLHAVWYLTTQPIPGLSTVINDHGSTSDSDSDSGFTHGHMGYVFSKTYNVTDDKYGCLSGNIPALELMALYVAAAMHDYDHPGRTNAFLVATSAPQAVLYNDRSVLENHHAAAAWNLFMSRPEYNFLINLDHVEFKHFRFLVIEAILATDLKKHFDFVAKFNGKVNDDVGIDWTNENDRLLVCQMCIKLADINGPAKCKELHLQWTDGIVNEFYEQGDEEASLGLPISPFMDRSAPQLANLQESFISHIVGPLCNSYDSAGLMPGKWVEDSDESGDTDDPEEEEEEAPAPNEEETCENNESPKKKTFKRRKIYCQITQHLLQNHKMWKKVIEEEQRLAGIENQSLDQTPQSHSSEQIQAIKEEEEEKGKPRGEEIPTQKPDQ

SEQ ID NO: 762330 - protein, 1141 aa, Homo sapiens; identical to SEQ ID NO: 762329

SEQ ID NO: 762331 - protein, 237 aa, Homo sapiens
MGNRHSQSYTLSEGSQQLPKGDSQPSTVVQPLSHPSRNGEPEAPQPAKASSPQGFDVDRDAKKLNKACKGMGTNEAAIIEILSGRTSDERQQIKQKYKATYGKELEEVLKSELSGNFEKTALALLDRPSEYAARQLQKAMKGLGTDESVLIEVLCTRTNKEIIAIKEAYQRLFDRSLESDVKGDTSGNLKKILVSLLQANRMKGCRGQDQPGRCPICLIREGRGQINSVRVGQGPGR

SEQ ID NO: 762332 - protein, 316 aa, Homo sapiens
MGNRHAKASSPQGFDVDRDAKKLNKACKGMGTNEAAIIEILSGRTSDERQQIKQKYKATYGKELEEVLKSELSGNFEKTALALLDRPSEYAARQLQKAMKGLGTDESVLIEVLCTRTNKEIIAIKEAYQRLFDRSLESDVKGDTSGNLKKILVSLLQANRNEGDDVDKDLAGQDAKDLYDAGEGRWGTDELAFNEVLAKRSYKQLRATFQAYQILIGKDIEEAIEEETSGDLQKAYLTLVRCAQDCEDYFAERLYKSMKGAGTDEETLIRIVVTRAEVDLQGIKAKFQEKYQKSLSDMVRSDTSGDFRKLLVALLH

SEQ ID NO: 762333 - protein, 357 aa, Homo sapiens
MGNRHSQSYTLSEGSQQLPKGDSQPSTVVQPLSHPSRNGEPEAPQPAKASSPQGFDVDRDAKKLNKACKGMGTNEAAIIEILSGRTSDERQQIKQKYKATYGKELEEVLKSELSGNFEKTALALLDRPSEYAARQLQKAMKGLGTDESVLIEVLCTRTNKEIIAIKEAYQRLFDRSLESDVKGDTSGNLKKILVSLLQANRNEGDDVDKDLAGQDAKDLYDAGEGRWGTDELAFNEVLAKRSYKQLRATFQAYQILIGKDIEEAIEEETSGDLQKAYLTLVRCAQDCEDYFAERLYKSMKGAGTDEETLIRIVVTRAEVDLQGIKAKFQEKYQKSLSDMVRSDTSGDFRKLLVALLH

SEQ ID NO: 762334 - protein, 229 aa, Homo sapiens
MIDSQNSKETKSHKALSDLELVAQSIIIIFAAYDTTSTTLPFIMYELATHPDVQQKLQEEIDAVLPNKAPVTYDALVQMEYLDMVVNETLRLFPVVSRVTRVCKKDIEINGVFIPKGLAVMVPIYALHHDPKYWTEPEKFCPERFSKKNKDSIDLYRYIPFGAGPRNCIGMRFALTNIKLAVIRALQNFSFKPCKETQIPLKLDNLPILQPEKPIVLKVHLRDGITSGP

SEQ ID NO: 762335 - protein, 420 aa, Homo sapiens
MDLIPNFAMETWVLVATSLVLLYIYGTHSHKLFKKLGIPGPTPLPFLGTILFYLRGLWNFDRECNEKYGEMWGLYEGQQPMLVIMDPDMIKTVLVKECYSVFTNQMPLGPMGFLKSALSFAEDEEWKRIRTLLSPAFTSVKFKEMVPIISQCGDMLVRSLRQEAENSKSINLKDFFGAYTMDVITGTLFGVNLDSLNNPQDPFLKNMKKLLKLDFLDPFLLLISLFPFLTPVFEALNIGLFPKDVTHFLKNSIERMKESRLKDKQKHRVDFFQQMIDSQNSKETKSHKALSDLELVAQSIIIIFAAYDTTSTTLPFIMYELATHPDVQQKLQEEIDAVLPNKAPVTYDALVQMEYLDMVVNETLRLFPVVSRVTRVCKKDIEINGVFIPKGLAVMVPIYALHHDPKYWTEPEKFCPERSH

SEQ ID NO: 762336 - protein, 229 aa, Homo sapiens; identical to SEQ ID NO: 762334

SEQ ID NO: 762337 - protein, 503 aa, Homo sapiens
MDLIPNFAMETWVLVATSLVLLYIYGTHSHKLFKKLGIPGPTPLPFLGTILFYLRGLWNFDRECNEKYGEMWGLYEGQQPMLVIMDPDMIKTVLVKECYSVFTNQMPLGPMGFLKSALSFAEDEEWKRIRTLLSPAFTSVKFKEMVPIISQCGDMLVRSLRQEAENSKSINLKDFFGAYTMDVITGTLFGVNLDSLNNPQDPFLKNMKKLLKLDFLDPFLLLISLFPFLTPVFEALNIGLFPKDVTHFLKNSIERMKESRLKDKQKHRVDFFQQMIDSQNSKETKSHKALSDLELVAQSIIIIFAAYDTTSTTLPFIMYELATHPDVQQKLQEEIDAVLPNKAPVTYDALVQMEYLDMVVNETLRLFPVVSRVTRVCKKDIEINGVFIPKGLAVMVPIYALHHDPKYWTEPEKFCPERFSKKNKDSIDLYRYIPFGAGPRNCIGMRFALTNIKLAVIRALQNFSFKPCKETQIPLKLDNLPILQPEKPIVLKVHLRDGITSGP

SEQ ID NO: 762338 - protein, 544 aa, Homo sapiens
MDLIPNFAMETWVLVATSLVLLYIYGTHSHKLFKKLGIPGPTPLPFLGTILFYLRGLWNFDRECNEKYGEMWGLYEGQQPMLVIMDPDMIKTVLVKECYSVFTNQMPLGPMGFLKSALSFAEDEEWKRIRTLLSPAFTSVKFKEMVPIISQCGDMLVRSLRQEAENSKSINLKDFFGAYTMDVITGTLFGVNLDSLNNPQDPFLKNMKKLLKLDFLDPFLLLIYRVSLVLPRPECMVRSGLTETSTSWVRVILLPQPPEELGITALFPFLTPVFEALNIGLFPKDVTHFLKNSIERMKESRLKDKQKHRVDFFQQMIDSQNSKETKSHKALSDLELVAQSIIIIFAAYDTTSTTLPFIMYELATHPDVQQKLQEEIDAVLPNKAPVTYDALVQMEYLDMVVNETLRLFPVVSRVTRVCKKDIEINGVFIPKGLAVMVPIYALHHDPKYWTEPEKFCPERFSKKNKDSIDLYRYIPFGAGPRNCIGMRFALTNIKLAVIRALQNFSFKPCKETQIPLKLDNLPILQPEKPIVLKVHLRDGITSGP

SEQ ID NO: 762339 - protein, 402 aa, Homo sapiens
MDLIPNFAMETWVLVATSLVLLYIYGTHSHKLFKKLGIPGPTPLPFLGTILFYLRGLWNFDRECNEKYGEMWGFFGAYTMDVITGTLFGVNLDSLNNPQDPFLKNMKKLLKLDFLDPFLLLISLFPFLTPVFEALNIGLFPKDVTHFLKNSIERMKESRLKDKQKHRVDFFQQMIDSQNSKETKSHKALSDLELVAQSIIIIFAAYDTTSTTLPFIMYELATHPDVQQKLQEEIDAVLPNKAPVTYDALVQMEYLDMVVNETLRLFPVVSRVTRVCKKDIEINGVFIPKGLAVMVPIYALHHDPKYWTEPEKFCPERFSKKNKDSIDLYRYIPFGAGPRNCIGMRFALTNIKLAVIRALQNFSFKPCKETQIPLKLDNLPILQPEKPIVLKVHLRDGITSGP

SEQ ID NO: 762340 - protein, 104 aa, Homo sapiens
MVQKRPALQPLCQLWKRKAERISRPDSRSPEGQLLQQTHQCSTSGQTQQPTMCSPPASHFCLTRALTLGILSLFCRHRNGCYSAGKERTPDLTPDVLAPNPLCL

SEQ ID NO: 762341 - protein, 882 aa, Homo sapiens
MAADKGPAAGPRSRAAMAQWRKKKGLRKRRGAASQARGSDSEDGEFEIQAEDDARARKLGPGRPLPTFPTSECTSDVEPDTREMVRAQNKKKKKSGGFQSMGLSYPVFKGIMKKGYKVPTPIQRKTIPVILDGKDVVAMARTGSGKTACFLLPMFERLKTHSAQTGARALILSPTRELALQTLKFTKELGKFTGLKTALILGGDRMEDQFAALHENPDIIIATPGRLVHVAVEMSLKLQSVEYVVFDEADRLFEMGFAEQLQEIIARLPGGHQTVLFSATLPKLLVEFARAGLTEPVLIRLDVDTKLNEQLKTSFFLVREDTKAAVLLHLLHNVVRPQDQTVVFVATKHHAEYLTELLTTQRVSCAHIYSALDPTARKINLAKFTLGKCSTLIVTDLAARGLDIPLLDNVINYSFPAKGKLFLHRVGRVARAGRSGTAYSLVAPDEIPYLLDLHLFLGRSLTLARPLKEPSGVAGVDGMLGRVPQSVVDEEDSGLQSTLEASLELRGLARVADNAQQQYVRSRPAPSPESIKRAKEMDLVGLGLHPLFSSRFEEEELQRLRLVDSIKNYRSRATIFEINASSRDLCSQVMRAKRQKDRKAIARFQQGQQGRQEQQEGPVGPAPSRPALQEKQPEKEEEEEAGESVEDIFSEVVGRKRQRSGPNRGAKRRREEARQRDQEFYIPYRPKDFDSERGLSISGEGGAFEQQAAGAVLDLMGDEAQNLTRGRQQLKWDRKKKRFVGQSGQEDKKKIKTESGRYISSSYKRDLYQKWKQKQKIDDRDSDEEGASDRRGPERRGGKRDRGQAGASRPHAPGTPAGRVRPELKTKQQILKQRRRAQKLHFLQRGGLKQLSARNRRRVQELQQGAFGRGARSKKGKMRKRM

SEQ ID NO: 762342 - protein, 823 aa, Homo sapiens
GWYGPGFEDQRAARMAADKGPAAGPRSRAAMAQWRKKKGLRKRRGAASQARGSDSEDGEFEIQAEDDARARKLGPGRPLPTFPTSECTSDVEPDTREMVRAQNKKKKKSGGFQSMGLSYPVFKGIMKKGYKVPTPIQRKTIPVILDGKDVVAMARTGSGKTACFLLPMFERLKTHSAQTGARALILSPTRELALQTLKFTKELGKFTGLKTALILGGDRMEDQFAALHENPDIIIATPGRLVHVAVEMSLKLQSVEYVVFDEADRLFEMGFAEQLQEIIARLPGGHQTVLFSATLPKLLVEFARAGLTEPVLIRLDVDTKLNEQLKTSFFLVREDTKAAVLLHLLHNVVRPQDQTVVFVATKHHAEYLTELLTTQRVSCAHIYSALDPTARKINLAKFTLGKCSTLIVTDLAARGLDIPLLDNVINYSFPAKGKLFLHRVGRVARAGRSGTAYSLVAPDEIPYLLDLHLFLGRSLTLARPLKEPSGVAGVDGMLGRVPQSVVDEEDSGLQSTLEASLELRGLARVADNAQQQYVRSRPAPSPESIKRAKEMDLVGLGLHPLFSSRFEEEELQRLRLVDSIKNYRSRADIFSEVVGRKRQRSGPNRGAKRRREEARQRDQEFYIPYRPKDFDSERGLSISGEGGAFEQQAAGAVLDLMGDEAQNLTRGRQQLKWDRKKKRFVGQSGQEDKKKIKTESGRYISSSYKRDLYQKWKQKQKIDDRDSDEEGASDRRGPERRGGKRDRGQAGASRPHAPGTPAGRVRPELKTKQQILKQRRRAQKLHFLQRGGLKQLSARNRRRVQELQQGAFGRGARSKKGKMRKRM

SEQ ID NO: 762343 - protein, 882 aa, Homo sapiens; identical to SEQ ID NO: 762341

SEQ ID NO: 762344 - protein, 691 aa, Homo sapiens
GWYGPGFEDQRAARMAADKGPAAGPRSRAAMAQWRKKKGLRKRRGAASQARGSDSEDGEFEIQAEDDARARKLGPGRPLPTFPTSECTSDVEPDTREMVRAQNKKKKKSGGFQSMGLSYPVFKGIMKKGYKVPTPIQRKTIPVILDGKDVVAMARTGSGKTACFLLPMFERLKTHSAQTGARALILSPTRELALQTLKFTKELGKFTGLKTALILGGDRMEDQFAALHENPDIIIATPGRLVHVAVEMSLKLQSVEYVVFDEADRLFEMGFAEQLQEIIARLPGGHQTVLFSATLPKLLVEFARAGLTEPVLIRLDVDTKLNEQLKTSFFLVREDTKAAVLLHLLHNVVRPQDQTVVFVATKHHAEYLTELLTTQRVSCAHIYSALDPTARKINLAKFTLGKCSTLIVTDLAARGLDIPLLDNVINYSFPAPSRPALQEKQPEKEEEEEAGESVEDIFSEVVGRKRQRSGPNRGAKRRREEARQRDQEFYIPYRPKDFDSERGLSISGEGGAFEQQAAGAVLDLMGDEAQNLTRGRQQLKWDRKKKRFVGQSGQEDKKKIKTESGRYISSSYKRDLYQKWKQKQKIDDRDSDEEGASDRRGPERRGGKRDRGQAGASRPHAPGTPAGRVRPELKTKQQILKQRRRAQKLHFLQRGGLKQLSARNRRRVQELQQGAFGRGARSKKGKMRKRM

SEQ ID NO: 762345 - protein, 935 aa, Homo sapiens
GWYGPGFEDQRAARMAADKGPAAGPRSRAAMAQWRKKKGLRKRRGAASQARGSDSEDGEFEIQAEDDARARKLGPGRPLPTFPTSECTSDVEPDTREMVRAQNKKKKKSGGFQSMGLSYPVFKGIMKKGYKVPTPIQRKTIPVILDGKDVVAMARTGSGKTACFLLPMFERLKTHSAQTGARALILSPTRELALQTLKFTKEVCLSLARGWRQGLTWDRTQRPRVCCHLTPGPLSITFSSQLGKFTGLKTALILGGDRMEDQFAALHENPDIIIATPGRLVHVAVEMSLKLQSVEYVVFDEADRLFEMGFAEQLQEIIARLPGGHQTVLFSATLPKLLVEFARAGLTEPVLIRLDVDTKLNEQLKTSFFLVREDTKAAVLLHLLHNVVRPQDQTVVFVATKHHAEYLTELLTTQRVSCAHIYSALDPTARKINLAKFTLGKCSTLIVTDLAARGLDIPLLDNVINYSFPAKGKLFLHRVGRVARAGRSGTAYSLVAPDEIPYLLDLHLFLGRSLTLARPLKEPSGVAGVDGMLGRVPQSVVDEEDSGLQSTLEASLELRGLARVADNAQQQYVRSRPAPSPESIKRAKEMDLVGLGLHPLFSSRFEEEELQRLRLVDSIKNYRSRATIFEINASSRDLCSQVMRAKRQKDRKAIARFQQGQQGRQEQQEGPVGPAPSRPALQEKQPEKEEEEEAGESVEDIFSEVVGRKRQRSGPNRGAKRRREEARQRDQEFYIPYRPKDFDSERGLSISGEGGAFEQQAAGAVLDLMGDEAQNLTRGRQQLKWDRKKKRFVGQSGQEDKKKIKTESGRYISSSYKRDLYQKWKQKQKIDDRDSDEEGASDRRGPERRGGKRDRGQAGASRPHAPGTPAGRVRPELKTKQQILKQRRRAQKLHFLQRGGLKQLSARNRRRVQELQQGAFGRGARSKKGKMRKRM

SEQ ID NO: 762346 - protein, 413 aa, Homo sapiens
GWYGPGFEDQRAARMAADKGPAAGPRSRAAMAQWRKKKGLRKRRGAASQARGSDSEDGEFEIQAEDDARARKLGPGRPLPTFPTSECTSDVEPDTREMVRAQNKKKKKSGGFQSMGLSYPVFKGIMKKGYKVPTPIQRKTIPVILDGKDVVAMARTGSGKTACFLLPMFERLKTHSAQTGARALILSPTRELALQTLKFTKELGKFTGLKTALILGGDRMEDQFAALHENPDIIIATPGRLVHVAVEMSLKLQSVEYVVFDEADRLFEMGFAEQLQEIIARLPGGHQTVLFSATLPKLLVEFARAGLTEPVLIRLDVDTKLNEQLKTSFFLVREDTKAAVLLHLLHNVVRPQDQTVVFVATKHHAEYLTELLTTQRVSCAHIYSALDPTARKINLARNSTSPTGPRTLTASGA

SEQ ID NO: 762347 - protein, 417 aa, Homo sapiens
GWYGPGFEDQRAARMAADKGPAAGPRSRAAMAQWRKKKGLRKRRGAASQARGSDSEDGEFEIQAEDDARARKLGPGRPLPTFPTSECTSDVEPDTREMVRAQNKKKKKSGGFQSMGLSYPVFKGIMKKGYKVPTPIQRKTIPVILDGKDVVAMARTGSGKTACFLLPMFERLKTHSAQTGARALILSPTRELALQTLKFTKELGKFTGLKTALILGGDRMEDQFAALHENPDIIIATPGRLVHVAVEMSLKLQSVEYVVFDEADRLFEMGFAEQLQEIIARLPGGHQTVLFSATLPKLLVEFARAGLTEPVLIRLDVDTKLNEQLKTSFFLVREDTKAAVLLHLLHNVVRPQDQTVVFVATKHHAEYLTELLTTQRVSCAHIYSALDPTARKINLAKFTLGKCSTLIVTDCPGLDGG

SEQ ID NO: 762348 - protein, 914 aa, Homo sapiens
MAADKGPAAGPRSRAAMAQWRKKKGLRKRRGAASQARGSDSEDGEFEIQAEDDARARKLGPGRPLPTFPTSECTSDVEPDTREMVRAQNKKKKKSGGFQSMGLSYPVFKGIMKKGYKVPTPIQRKTIPVILDGKDVVAMARTGSGKTACFLLPMFERLKTHSAQTGARALILSPTRELALQTLKFTKELGKFTGLKTALILGGDRMEDQFAALHENPDIIIATPGRLVHVAVEMSLKLQSVEYVVFDEADRLFEMGFAEQLQEIIARLPGGHQTVLFSATLPKLLVEFARAGLTEPVLIRLDVDTKLNEQLKTSFFLVREDTKAAVLLHLLHNVVRPQDQTVVFVATKHHAEYLTELLTTQRVSCAHIYSALDPTARKINLAKFTLGKCSTLIVTDLAARGLDIPLLDNVINYSFPAKGKLFLHRVGRVARAGRSGTAYSLVAPDEIPYLLDLHLFLGRSLTLARPLKEPSGVAGVDGMLGRVPQSVVDEEDSGLQSTLEASLELRGLARVADNAQQQYVRSRPAPSPESIKRAKEMDLVGLGLHPLFSSRFEEEELQRLRLVDSIKNYRSRATIFEINASSRDLCSQVMRAKRQKDRKAIARFQQGQQGRQEQQEGPVGPAPSRPALQEKQPEKEEEEEAGESVEDIFSEVVGRKRQRSGPNRGAKRRREEARQRDQEFYIPYRPKDFDSERGLSISGEGGAFEQQAAGAVLDLMGDEAQNLTRGRQQLKWDRKKKRFVGQSGQEDKKKIKTESGRYISSSYKRDLYQKWKQKQKIDDRDSDEEGASDRRGPERRGGKRDRGQAGASRPHAPGTPAGRVRPELKTKQQILKQRRRAQKLHFLQRAIICEKEHCMATEGQQLRQPKTETFEQGLEGCAGVRQQSQAGQDLSWQLSCCCFHVFWVQRSWLHRSEP

SEQ ID NO: 762349 - protein, 809 aa, Homo sapiens
GWYGPGFEDQRAARMAADKGPAAGPRSRAAMAQWRKKKGLRKRRGAASQARGSDSEDGEFEIQAEDDARARKLGPGRPLPTFPTSECTSDVEPDTREMVRAQNKKKKKSGGFQSMGLSYPVFKGIMKKGYKVPTPIQRKTIPVILDGKDVVAMARTGSGKTACFLLPMFERLKTHSAQTGARALILSPTRELALQTLKFTKELGKFTGLKTALILGGDRMEDQFAALHENPDIIIATPGRLVHVAVEMSLKLQSVEYVVFDEADRLFEMGFAEQLQEIIARLPGGHQTVLFSATLPKLLVEFARAGLTEPVLIRLDVDTKLNEQLKTSFFLVREDTKAAVLLHLLHNVVRPQDQTVVFVATKHHAEYLTELLTTQRVSCAHIYSALDPTARKINLAKFTLGKCSTLIVTDLAARGLDIPLLDNVINYSFPAKGKLFLHRVGRVARAGRSGTAYSLVAPDEIPYLLDLHLFLGRSLTLARPLKEPSGVAGVDGMLGRVPQSVVDEEDSGLQSTLEASLELRGLARVADNAQQQYVRSRPAPSPESIKRAKEMDLVGLGLHPLFSSRFEEEELQRLRLVDSIKNYRSRATIFEINASSRDLCSQVMRAKRQKDRKAIARFQQGQQGRQEQQEGPVGPAPSRPALQEKQPEKEEEEEAGESVEDIFSEVVGRKRQRSGPNRGAKRRREEARQRDQEFYIPYRPKDFDSERGLSISGEGGAFEQQAAGAVLDLMGDEAQNLTRGRQQLKWDRKKKRFVGQSGQEDKKKIKTESGRYISSSYKRDLYQKWKQKQKIDDRDGQSPECLRVWQWNF

SEQ ID NO: 762350 - protein, 224 aa, Homo sapiens
MHLGCGAGHPGDGACPEQEEEEVWRLPVHGPELPGVQRHHEEGGAFEQQAAGAVLDLMGDEAQNLTRGRQQLKWDRKKKRFVGQSGQEDKKKIKTESGRYISSSYKRDLYQKWKQKQKIDDRDSDEEGASDRRGPERRGGKRDRGQAGASRPHAPGTPAGRVRPELKTKQQILKQRRRAQKLHFLQRGGLKQLSARNRRRVQELQQGAFGRGARSKKGKMRKRM

SEQ ID NO: 762351 - protein, 196 aa, Homo sapiens
MDFDSERGLSISGEGGAFEQQAAGAVLDLMGDEAQNLTRGRQQLKWDRKKKRFVGQSGQEDKKKIKTESGRYISSSYKRDLYQKWKQKQKIDDRDSDEEGASDRRGPERRGGKRDRGQAGASRPHAPGTPAGRVRPELKTKQQILKQRRRAQKLHFLQRGGLKQLSARNRRRVQELQQGAFGRGARSKKGKMRKRM

SEQ ID NO: 762352 - protein, 182 aa, Homo sapiens
TLGRGSVDRPSVLDLMGDEAQNLTRGRQQLKWDRKKKRFVGQSGQEDKKKIKTESGRYISSSYKRDLYQKWKQKQKIDDRDSDEEGASDRRGPERRGGKRDRGQAGASRPHAPGTPAGRVRPELKTKQQILKQRRRAQKLHFLQRGGLKQLSARNRRRVQELQQGAFGRGARSKKGKMRKRM

SEQ ID NO: 762353 - protein, 377 aa, Homo sapiens
GWYGPGFEDQRAARMAADKGPAAGPRSRAAMAQWRKKKGLRKRRGAASQARGSDSEDGEFEIQAEDDARARKLGPGRPLPTFPTSECTSDVEPDTREMVRAQNKKKKKSGGFQSMGLSYPVFKGIMKKGYKVPTPIQRKTIPVILDGKDVVAMARTGSGKTACFLLPMFERLKTHSAQTGARALILSPTRELALQTLKFTKELGKFTGLKTALILGGDRMEDQFAALHENPDIIIATPGRLVHVAVEMSLKLQSVEYVVFDEADRLFEMGFAEQLQEIIARLPGGHQTVLFSATLPKLLVEFARAGLTEPVLIRLDVDTKLNEQLKTSFFLVREDTKAAVLLHLLHNVVRPQDQTVVFVATKHHAEYLTECPGLDGG

SEQ ID NO: 762354 - protein, 150 aa, Homo sapiens
FSCGWDNGTLSAGAGGEEPSPIPGLHAASLTRFPSYQKWKQKQKIDDRDSDEEGASDRRGPERRGGKRDRGQAGASRPHAPGTPAGRVRPELKTKQQILKQRRRAQKLHFLQRGGLKQLSARNRRRVQELQQGAFGRGARSKKGKMRKRM

SEQ ID NO: 762355 - protein, 882 aa, Homo sapiens; identical to SEQ ID NO: 762341

SEQ ID NO: 762356 - protein, 894 aa, Homo sapiens
MAADKGPAAGPRSRAAMAQWRKKKGLRKRRGAASQARGSDSEDGEFEIQAEDDARARKLGPGRPLPTFPTSECTSDVEPDTREMVRAQNKKKKKSGGFQSMGLSYPVFKGIMKKGYKVPTPIQRKTIPVILDGKDVVAMARTGSGKTACFLLPMFERLKTHSAQTGARALILSPTRELALQTLKFTKELGKFTGLKTALILGGDRMEDQFAALHENPDIIIATPGRLVHVAVEMSLKLQSVEYVVFDEADRLFEMGFAEQLQEIIARLPGGHQTVLFSATLPKLLVEFARAGLTEPVLIRLDVDTKLNEQLKTSFFLVREDTKAAVLLHLLHNVVRPQDQTVVFVATKHHAEYLTELLTTQRVSCAHIYSALDPTARKINLAKFTLGKCSTLIVTDLAARGLDIPLLDNVINYSFPAKGKLFLHRVGRVARAGRSGTAYSLVAPDEIPYLLDLHLFLGRSLTLARPLKEPSGVAGVDGMLGRVPQSVVDEEDSGLQSTLEASLELRGLARVADNAQQQYVRSRPAPSPESIKRAKEMDLVGLGLHPLFSSRFEEEELQRLRLVDSIKNYRSRATIFEINASSRDLCSQVMRAKRQKDRKAIARFQQGQQGRQEQQEGPVGPAPSRPALQEKQPEKEEEEEAGESVEDIFSEVVGRKRQRSGPNRGAKRRREEARQRDQEFYIPYRPKDFDSERGLSISGEGGAFEQQAAGAVLDLMGDEAQNLTRGRQQLKWLSDRVSRPSMLGDRKKKRFVGQSGQEDKKKIKTESGRYISSSYKRDLYQKWKQKQKIDDRDSDEEGASDRRGPERRGGKRDRGQAGASRPHAPGTPAGRVRPELKTKQQILKQRRRAQKLHFLQRGGLKQLSARNRRRVQELQQGAFGRGARSKKGKMRKRM

SEQ ID NO: 762357 - protein, 697 aa, Homo sapiens
MGRETKETCSIKLTPSLLSRMEDQFAALHENPDIIIATPGRLVHVAVEMSLKLQSVEYVVFDEADRLFEMGFAEQLQEIIARLPGGHQTVLFSATLPKLLVEFARAGLTEPVLIRLDVDTKLNEQLKTSFFLVREDTKAAVLLHLLHNVVRPQDQTVVFVATKHHAEYLTELLTTQRVSCAHIYSALDPTARKINLAKFTLGKCSTLIVTDLAARGLDIPLLDNVINYSFPAKGKLFLHRVGRVARAGRSGTAYSLVAPDEIPYLLDLHLFLGRSLTLARPLKEPSGVAGVDGMLGRVPQSVVDEEDSGLQSTLEASLELRGLARVADNAQQQYVRSRPAPSPESIKRAKEMDLVGLGLHPLFSSRFEEEELQRLRLVDSIKNYRSRATIFEINASSRDLCSQVMRAKRQKDRKAIARFQQGQQGRQEQQEGPVGPAPSRPALQEKQPEKEEEEEAGESVEDIFSEVVGRKRQRSGPNRGAKRRREEARQRDQEFYIPYRPKDFDSERGLSISGEGGAFEQQAAGAVLDLMGDEAQNLTRGRQQLKWDRKKKRFVGQSGQEDKKKIKTESGRYISSSYKRDLYQKWKQKQKIDDRDSDEEGASDRRGPERRGGKRDRGQAGASRPHAPGTPAGRVRPELKTKQQILKQRRRAQKLHFLQRGGLKQLSARNRRRVQELQQGAFGRGARSKKGKMRKRM

SEQ ID NO: 762358 - protein, 358 aa, Homo sapiens
MAADKGPAAGPRSRAAMAQWRKKKGLRKRRGAASQARGSDSEDGEFEIQAEDDARARKLGPGRPLPTFPTSECTSDVEPDTREMVRAQNKKKKKSGGFQSMGLSYPVFKGIMKKGYKVPTPIQRKTIPVILDGKDVVAMARTGSGKTACFLLPMFERLKTHSAQTGARALILSPTRELALQTLKFTKELGKFTGLKTALILGGDRMEDQFAALHENPDIIIATPGRLVHVAVEMSLKLQSVEYVVFDEADRLFEMGFAEQLQEIIARLPGGHQTVLFSATLPKLLVEFARAGLTEPVLIRLDVDTKLNEQLKTSFFLVREDTKAAVLLHLLHNVVRPQDQTVVFVATKHHAEYLTEGP

SEQ ID NO: 762359 - protein, 801 aa, Homo sapiens
GWYGPGFEDQRAARMAADKGPAAGPRSRAAMAQWRKKKGLRKRRGAASQARGSDSEDGEFEIQAEDDARARKLGPGRPLPTFPTSECTSDVEPDTREMVRAQNKKKKKSGGFQSMGLSYPVFKGIMKKGYKVPTPIQRKTIPVILDGKDVVAMARTGSGKTACFLLPMFERLKTHSAQTGARALILSPTRELALQTLKFTKELGKFTGLKTALILGGDRMEDQFAALHENPDIIIATPGRLVHVAVEMSLKLQSVEYVVFDEADRLFEMGFAEQLQEIIARLPGGHQTVLFSATLPKLLVEFARAGLTEPVLIRLDVDTKLNEQLKTSFFLVREDTKAAVLLHLLHNVVRPQDQTVVFVATKHHAEYLTELLTTQRVSCAHIYSALDPTARKINLAKFTLGKCSTLIVTDLAARGLDIPLLDNVINYSFPAKGKLFLHRVGRVARAGRSGTAYSLVAPDEIPYLLDLHLFLGRSLTLARPLKEPSGVAGVDGMLGRVPQSVVDEEDSGLQSTLEASLELRGLARVADNAQQQYVRSRPAPSPESIKRAKEMDLVGLGLHPLFSSRFEEEELQRLRLVDSIKNYRSRATIFEINASSRDLCSQVMRAKRQKDRKAIARFQQGQQGRQEQQEGPVGPAPSRPALQEKQPEKEEEEEAGESVEDIFSEVVGRKRQRSGPNRGAKRRREEARQRDQEFYIPYRPKDFDSERGLSISGEGGAFEQQAAGAVLDLMGDEAQNLTRGRQQLKWDRKKKRFVGQSGQEDKKKIKTESGRYISSSYKRDLYQKWKQKQKIDDRDSDEEGA

SEQ ID NO: 762360 - protein, 382 aa, Homo sapiens
VPYQSSNACAGRSAAVFRAAKYETFKLLKLGLHPLFSSRFEEEELQRLRLVDSIKNYRSRATIFEINASSRDLCSQVMRAKRQKDRKAIARFQQGQQGRQEQQEGPVGPAPSRPALQEKQPEKEEEEEAGESVEDIFSEVVGRKRQRSGPNRGAKRRREEARQRDQEFYIPYRPKDFDSERGLSISGEGGAFEQQAAGAVLDLMGDEAQNLTRGRQQLKWLSDRVSRPPCSGDRKKKRFVGQSGQEDKKKIKTESGRYISSSYKRDLYQKWKQKQKIDDRDSDEEGASDRRGPERRGGKRDRGQAGASRPHAPGTPAGRVRPELKTKQQILKQRRRAQKLHFLQRGGLKQLSARNRRRVQELQQGAFGRGARSKKGKMRKRM

SEQ ID NO: 762361 - protein, 204 aa, Homo sapiens
GWYGPGFEDQRAARMAADKGPAAGPRSRAAMAQWRKKKGLRKRRGAASQARGSDSEDGEFEIQAEDDARARKLGPGRPLPTFPTSECTSDVEPDTREMVRAQNKKKKKSGGFQSMGLSYPVFKGIMKKGYKVPTPIQRKTIPVILDGKDVVAMARTGSGKTACFLLPMFERLKTHSAQTGARALILSPTRELALQTLKFTKEGP

SEQ ID NO: 762362 - protein, 198 aa, Homo sapiens
MPDMAALLSFNAANNLTRGSGEETGPKRQPALQGFPSTAAVPTPSPAGDRKKKRFVGQSGQEDKKKIKTESGRYISSSYKRDLYQKWKQKQKIDDRDSDEEGASDRRGPERRGGKRDRGQAGASRPHAPGTPAGRVRPELKTKQQILKQRRRAQKLHFLQRGGLKQLSARNRRRVQELQQGAFGRGARSKKGKMRKRM

SEQ ID NO: 762363 - protein, 135 aa, Homo sapiens [sequence omitted]

SEQ ID NO: 762364 - protein, 242 aa, Homo sapiens
REAIPGQRVVGRRARASARTEPRDPGRTGEGPLRAAARGQRGAAGTWHRAGPAAATMIALFNKLLDWFKALFWKEEMELTLVGLQYSGKTTFVNVIASGQFNEDMIPTVGFNMRKITKGNVTIKLWDIGGQPRFRSMWERYCRGVSAIVYMVDAADQEKIEASKNELHNLLDKPQLQGIPVLVLGNKRDLPGALDEKELIEKMNLSAIQDREICCYSISCKEKDNIDITLQWLIQHSKSRRS

SEQ ID NO: 762365 - protein, 234 aa, Homo sapiens
TRLASGIPGIRTEPRDPGRTGEGPLRAAARGQRGAAGTWHRAGPAAATMIALFNKLLDWFKALFWKEEMELTLVGLQYSGKTTFVNVIASGQFNEDMIPTVGFNMRKITKGNVTIKLWDIGGQPRFRSMWERYCRGVSAIVYMVDAADQEKIEASKNELHNLLDKPQLQGIPVLVLGNKRDLPGALDEKELIEKMNLSAIQDREICCYSISCKEKDNIDITLQWLIQHSKSRRS

SEQ ID NO: 762366 - protein, 206 aa, Homo sapiens
REAIPGQRVVGRRARASARTEPRDPGRTGEGPLRAAARGQRGAAGTWHRAGPAAATMIALFNKLLDWFKALFWKEEMELTLVGLQYSGKTTFVNVIASGQFNEDMIPTVGFNMRKITKGNVTIKLWDIGGQPRFRSMWERYCRGVSAIVYMVDAADQEKIEASKNELHNLLDKPQLQGIPVSRPEGAGWGGSSAGKSLGAGKSQAW

SEQ ID NO: 762367 - protein, 203 aa, Homo sapiens
REAIPGQRVVGRRARASARTEPRDPGRTGEGPLRAAARGQRGAAGTWHRAGPAAATMIALFNKLLDWFKALFWKEEMELTLVGLQYSGKTTFVNVIASGQFNEDMIPTVGFNMRKITKGNVTIKLWDIGGQPRFRSMWERYCRGVSAIVYMVDAADQEKIEASKNELHNLLDKPQLQGIPESVCHPGPRDLLLLHLLQRKGQH

SEQ ID NO: 762368 - protein, 242 aa, Homo sapiens; identical to SEQ ID NO: 762364

SEQ ID NO: 762369 - protein, 242 aa, Homo sapiens; identical to SEQ ID NO: 762364

SEQ ID NO: 762370 - protein, 242 aa, Homo sapiens; identical to SEQ ID NO: 762364

SEQ ID NO: 762371 - protein, 242 aa, Homo sapiens; identical to SEQ ID NO: 762364

SEQ ID NO: 762372 - protein, 242 aa, Homo sapiens; identical to SEQ ID NO: 762364

SEQ ID NO: 762373 - protein, 242 aa, Homo sapiens; identical to SEQ ID NO: 762364

SEQ ID NO: 762374 - protein, 242 aa, Homo sapiens; identical to SEQ ID NO: 762364

SEQ ID NO: 762375 - protein, 242 aa, Homo sapiens; identical to SEQ ID NO: 762364

SEQ ID NO: 762376 - protein, 242 aa, Homo sapiens; identical to SEQ ID NO: 762364

SEQ ID NO: 762377 - protein, 160 aa, Homo sapiens
SGQLKKRPRDWESLVRMTRHGKNCTAGAVYTYHEKKKDTAASGYGTQNIRLSRDAVKDFDCCCLSLQPCHDPVVTPDGYLYEREAILEYILHQKKEIARQMKVMGMGRRRHTEAGAFESELTGRATQSPLISVPSAWYTIPLPCFRPNPSHRFQPRCCLL

SEQ ID NO: 762378 - protein, 74 aa, Homo sapiens
PRVRGVVSEDDAAWQELHRRGRLHLPREEEGHSGLGLWDPEHSTEPGCREGLRLLLSLPAALPRSCCHPRWLPV

SEQ ID NO: 762379 - protein, 69 aa, Homo sapiens
CRLVLVARCYDPQSCHCPFLPRMTRHGKNCTAGAVYTYHEKKKDTGLRLLLSLPAALPRSCCHPRWLPV

SEQ ID NO: 762380 - protein, 81 aa, Homo sapiens
CRLVLVARCYDPQSCHCPFLPRMTRHGKNCTAGAVYTYHEKKKDTAASGYGTQNIRLSRDAVKDFDCCCLSLQPCHDPVVT

SEQ ID NO: 762381 - protein, 312 aa, Homo sapiens
SGQLKKRPRDWESLVRMTRHGKNCTAGAVYTYHEKKKDTAASGYGTQNIRLSRDAVKDFDCCCLSLQPCHDPVVTPDGYLYEREAILEYILHQKKEIARQMKAYEKQRGTRREEQKELQRAASQDHVRGFLEKESAIVSRPLNPFTAKALSGTSPDDVQPGPSVGPPSKDKDKVLPSFWIPSLTPEAKATKLEKPSRTVTCPMSGKPLRMSDLTPVHFTPLDSSVDRVGLITRSERYVCAVTRDSLSNATPCAVLRPSGAVVTLECVEKLIRKDMVDPVTGDKLTDRDIIVLQRGVPASRLTEEAHKRMTAE

SEQ ID NO: 762382 - protein, 153 aa, Homo sapiens
SGQLKKRPRDWESLVRMTRHGKNCTAGAVYTYHEKKKDTAASGYGTQNIRLSRDAVKDFDCCCLSLQPCHDPVVTPDGYLYEREAILEYILHQKKEIARQMKAYEKQRGTRREEQKELQRAASQDHMMSNLGPVWVLQVRTRTKCCPASGSRR

SEQ ID NO: 762383 - protein, 80 aa, Homo sapiens
RTVEEATEGLGVVSEDDAAWQELHRRGRLHLPREEEGHSGLGLWDPEHSTEPGCREGLRLLLSLPAALPRSCCHPRWLPV

SEQ ID NO: 762384 - protein, 249 aa, Homo sapiens
SGQLKKRPRDWESLVRMTRHGKNCTAGAVYTYHEKKKDTAASGYGTQNIRLSRDAVKDFDCCCLSLQPCHDPVVTPDGYLYEREAILEYILHQKKEIARQMKAYEKQRGTRREEQKELQRAASQDHVRGFLEKESAIVSRPLNPFTAKALSGTSPDDVQPGPSVGPPKLRGPRGAHHPQRALRVCRDPRQPEQRHPLRCAAALWGCGHPRMRGEADSEGHGGPCDWRQTHRPRHHRAAAGRYRRSRAPE

SEQ ID NO: 762385 - protein, 98 aa, Homo sapiens
CRLVLVARCYDPQSCHCPFLPRMTRHGKNCTAGAVYTYHEKKKDTGCRAGVGRGGTWLCLGVTLSPRAPGFASSVPVSLPPPIYTDGHDHVNNSWVIP

SEQ ID NO: 762386 - protein, 80 aa, Homo sapiens; identical to SEQ ID NO: 762383

SEQ ID NO: 762387 - protein, 98 aa, Homo sapiens; identical to SEQ ID NO: 762385

SEQ ID NO: 762388 - protein, 98 aa, Homo sapiens; identical to SEQ ID NO: 762385

SEQ ID NO: 762389 - protein, 110 aa, Homo sapiens
SGQLKKRPRDWESLVRMTRHGKNCTAGAVYTYHEKKKDTAASGYGTQNIRLSRDAVKDFDCCCLSLQPCHDPVVTPTRSSGAPGARSRRSFSGRPRRTMCGASWRRSRLS

SEQ ID NO: 762390 - protein, 281 aa, Homo sapiens
SGQLKKRPRDWESLVRMTRHGKNCTAGAVYTYHEKKKDTAASGYGTQNIRLSRDAVKDFDCCCLSLQPCHDPVVTPDGYLYEREAILEYILHQKKEIARQMKAYEKQRGTRREEQKELQRAASQDHVRGFLEKESAIVSRPLNPFTAKALSGTSPDDVQPGPSVGPPSKDKDKVLPSFWIPSLTPEAKATKLEKPSRTVTCPMSGKPLRMSDLTPVHFTPLDSSVDRVGLITRSERYVCAVTRDSLTDSEGHGGPCDWRQTHRPRHHRAAAGRYRRSRAPE

SEQ ID NO: 762391 - protein, 241 aa, Homo sapiens
SGQLKKRPRDWESLVRMTRHGKNCTAGAVYTYHEKKKDTAASGYGTQNIRLSRDAVKDFDCCCLSLQPCHDPVVTPDGYLYEREAILEYILHQKKEIARQMKAYEKQRGTRREEQKELQRAASQDHVRGFLEKESAIVSRPLNPFTAKALSGTSPDDVQPGPSVGPPSKDKDKVLPSFWIPSLTPEAKATKLEKPWGCGHPRMRGEADSEGHGGPCDWRQTHRPRHHRAAAGRYRRSRAPE

SEQ ID NO: 762392 - protein, 301 aa, Homo sapiens
MTRHGKNCTAGAVYTYHEKKKDTAASGYGTQNIRLSRDAVKDFDCCCLSLQPCHDPVVTPDGYLYEREAILEYILHQKKEIARQMKAYEKQRGTRREEQKELQRAASQDHVRGFLEKESAIVSRPLNPFTAKALSGTSPDDVQPGPSVGPPSKDKDKVLPSFWIPSLTPEAKATKLEKPSRTVTCPMSGKPLRMSDLTPVHFTPLDSSVDRVGLITRSERYVCAVTRDSLSNATPCAVLRPSGAVVTLECVEKLIRKDMVDPVTGDKLTDRDIIVLQRGGTGFAGSGVKLQAEKSRPVMQA

SEQ ID NO: 762393 - protein, 112 aa, Homo sapiens
CFSWYKVLMILIFKKKVKIITYLIQILTYAKNNKCISFKLRSNSDVFLQENYFHFSVISLLSNPRAKFILRMTFKRKAKRAFIHYITTLLTSLKHSLCLIIFRLIIHYQIKE

SEQ ID NO: 762394 - protein, 130 aa, Homo sapiens
MSGRGKQGGKARAKAKSRSSRAGLQFPVGRVHRLLRKGNYSERVGAGAPVYLAAVLEYLTAEILELAGNAARDNKKTRIIPRHLQLAIRNDEELNKLLGRVTIAQGGVLPNIQAVLLPKKTESHHKAKGK

SEQ ID NO: 762395 - protein, 135 aa, Homo sapiens
MSGRGKQGGKARAKAKSRSSRAGLQFPVGRVHRLLRKGNYSERVGAGAPVYLAAVLEYLTAEILELAGNAARDNKKTRIIPRHLQLAIRNDEELNKLLGRVTIAQGGVLPNIQAVLLPKKTESHHKAKGLITLGS

SEQ ID NO: 762396 - protein, 130 aa, Homo sapiens; identical to SEQ ID NO: 762394

SEQ ID NO: 762397 - protein, 130 aa, Homo sapiens; identical to SEQ ID NO: 762394

SEQ ID NO: 762398 - protein, 790 aa, Homo sapiens
STVCCGQCYCGDRQSSLRAMEEPGATPQPYLGLVLEELRRVVAALPESMTADSNPYGFPWELVVCAAVVGFFVVLLFLWRSFRSVRSRLYVGREKKLGETLSGLIEEKCKLLEKFSLIQKEYEGYEVESSLEDASFEKAVAEARSLEATCEKLNRSNSELEDETLCLEKELRKSKHSQQDELMADISKRIQSLEDESKSLKSQIAEAKIICKIFQATEERWAIAIKDALNKNSQLHESQKQLLQEAEVWKEQVSELNKQKITFEDSKVHAEQVLNDKIIIKTLTGHLPMMNDQAAVLEEDTTDDDNLELEVNSQSENGAYLDDPPKGALKKLIHAAKLNVSLKTLEGERNHIIIQLSEVDKTKEELTEHIKNLQTQQASLQSENIYFESENQKLQQKLKIMTELYQENEMTLHRKLTIEENYWIEEEEKLSKVEEKISHATEELETYRKLAKDLEEELERTVHFYQKQVISYEKKGHDNWLAARTAERNLNDLRKENAHNKQKLTETEFKFEVLEKDPNALDVSNTASGREHSPYGPSPLGRPSSETRTSLSSNFVGGSTQTLTCASSGRRKKPKGRENPLDHQITNERGEPSCDRLTDPHRAPSDTGSLSSPWEQDHRMMFPPPGQSYPDSALPPQREDRFYSNSDRLPGPSELRSFNMPSLDKMDGSMPSEMESTRHDAKDDPGSLNVPDSSLPAENEATGPGFIPPPLAPISGPLFPVDTRCPFMRRGPLFPQPPPGTMFGASQGYFPPRDFPGPPHVPFAMRNICPLRGLPPYFHPRPGFYPNPTF

SEQ ID NO: 762399 - protein, 381 aa, Homo sapiens
IFSNLSLDERCLSASLVCKYWRDLCLDFQFWKQLDLSSRQQVTDELLEKIASRSQNIIEINISDCRSMSDNGVCVLAFKCPGLLRYTAYRCKQLSDTSIIAVASHCPLLQKVHVGNQDKLTDEGLKQLGSKCRELKDIHFGQCYKISDEGMIVIAKGCLKLQRIYMQENKLVTDQSVKAFAEHCPELQYVGFMGCSVTSKGVIHLTKLRNLSSLDLRHITELDNETVMEIVKRCKNLSSLNLCLNWIINDRCVEVIAKEGQNLKELYLVSCKITDYALIAIGRYSMTIETVDVGWCKEITDQGATLIAQSSKSLRYLGLMRCDKVRVDYQVVCFLHISIVNSLMSYPLSFSISTPVYYILYIHFICIYAIIAMHCLPAFVN

SEQ ID NO: 762400 - protein, 373 aa, Homo sapiens
IFSNLSLDERCLSASLVCKYWRDLCLDFQFWKQLDLSSRQQVTDELLEKIASRSQNIIEINISDCRSMSDNGVCVLAFKCPGLLRYTAYRCKQLSDTSIIAVASHCPLLQKVHVGNQDKLTDEGLKQLGSKCRELKDIHFGQCYKISDEGMIVIAKGCLKLQRIYMQENKLVTDQSVKAFAEHCPELQYVGFMGCSVTSKGVIHLTKLRNLSSLDLRHITELDNETVMEIVKRCKNLSSLNLCLNWIINDRCVEVIAKEGQNLKELYLVSCKITDYALIAIGRYSMTIETVDVGWCKEITDQGATLIAQSSKSLRYLGLMRCDKVNEVTVEQLVQQYPHITFSTVLQDCKKDLWSSSPISMGLDPTNMSAASS

SEQ ID NO: 762401 - protein, 358 aa, Homo sapiens
GARSPTPREGARGASPALGVGRAPGRSEGPGGGRRSPDAGCANTVMATQVMGQSSGGGGLFTSSGNIGMALPNDMYDLHDLSKAELAAPQLIMLANVALTGEVNGSCCDYLVGEERQMAELMPVGDNNFSDSEEGEGLEESADIKGEPHGLENMELRSLELSVVEPQPVFEASGAPDIYSSNKDLPPETPGAEDKGKSSKTKPFRCKPCQYEAESEEQFVHHIRVHSAKKFFVEESAEKQAKARESGSSTAEEGDFSKGPIRCDRCGYNTNRYDHYTAHLKHHTRAGDNERVYKCIICTYTTVSEYHWRKHLRNHFPRKVYTCGKCNYFSDRKNNYVQHVRTHTGKRSFLVHKFSSLF

SEQ ID NO: 762402 - protein, 212 aa, Homo sapiens
VRGSSAAPLQKVGAEEADESLPGLAANINESTHISSSGQNLNTPEGETLNGKHQTDSIVCEMKMDTDQNTRENLTGINSTVEEPVSPMLPPSAVEEREAVSKTALASPPATMAANESQEIDEDEGIHSHEGSDLSDNMSEGSDDSGLHGARPVPQESSRKNAKEALAVKAAKGDFVCIFCDRSFRKGKDYSKHLNRHLVNVYYLEEAAQGQE

SEQ ID NO: 762403 - protein, 1142 aa, Homo sapiens
GARSPTPREGARGASPALGVGRAPGRSEGPGGGRRSPDAGCANTVMATQVMGQSSGGGGLFTSSGNIGMALPNDMYDLHDLSKAELAAPQLIMLANVALTGEVNGSCCDYLVGEERQMAELMPVGDNNFSDSEEGEGLEESADIKGEPHGLENMELRSLELSVVEPQPVFEASGAPDIYSSNKDLPPETPGAEDKGKSSKTKPFRCKPCQYEAESEEQFVHHIRVHSAKKFFVEESAEKQAKARESGSSTAEEGDFSKGPIRCDRCGYNTNRYDHYTAHLKHHTRAGDNERVYKCIICTYTTVSEYHWRKHLRNHFPRKVYTCGKCNYFSDRKNNYVQHVRTHTGERPYKCELCPYSSSQKTHLTRHMRTHSGEKPFKCDQCSYVASNQHEVTRHARQVHNGPKPLNCPHCDYKTADRSNFKKHVELHVNPRQFNCPVCDYAASKKCNLQYHFKSKHPTCPNKTMDVSKVKLKKTKKREADLPDNITNEKTEIEQTKIKGDVAGKKNEKSVKAEKRDVSKEKKPSNNVSVIQVTTRTRKSVTEVKEMDVHTGSNSEKFSKTKKSKRKLEVDSHSLHGPVNDEESSTKKKKKVESKSKNNSQEVPKGDSKVEENKKQNTCMKKSTKKKTLKNKSSKKSSKPPQKEPVEKGSAQMDPPQMGPAPTEAVQKGPVQVEPPPPMEHAQMEGAQIRPAPDEPVQMEVVQEGPAQKELLPPVEPAQMVGAQIVLAHMELPPPMETAQTEVAQMGPAPMEPAQMEVAQVESAPMQVVQKEPVQMELSPPMEVVQKEPVQIELSPPMEVVQKEPVKIELSPPIEVVQKEPVQMELSPPMGVVQKEPAQREPPPPREPPLHMEPISKKPPLRKDKKEKSNMQSERARKEQVLIEVGLVPVKDSWLLKESVSTEDLSPPSPPLPKENLREEASGDQKLLNTGEGNKEAPLQKVGAEEADESLPGLAANINESTHISSSGQNLNTPEGETLNGKHQTDSIVCEMKMDTDQNTRENLTGINSTVEEPVSPMLPPSAVEEREAVSKTALASPPATMAANESQEIDEDEGIHSHEGSDLSDNMSEGSDDSGLHGARPVPQESSRKNAKEALAVKAAKGDFVCIFCDRSFRKGKDYSKHLNRHLVNVYYLEEAAQGQE

SEQ ID NO: 762404 - protein, 1183 aa, Homo sapiens
SVLCWNVRLPRARGAAAERAPPRPGAPDPGGGCGSRDGRARPGGLSTLCSPTPGPSWSTTAPAPNFTTLPHLSPETPATKKSSRRRSGDSGSPAPPHRGRPNTVMATQVMGQSSGGGGLFTSSGNIGMALPNDMYDLHDLSKAELAAPQLIMLANVALTGEVNGSCCDYLVGEERQMAELMPVGDNNFSDSEEGEGLEESADIKGEPHGLVEASGAPDIYSSNKDLPPETPGAEDKGKSSKTKPFRCKPCQYEAESEEQFVHHIRVHSAKKFFVEESAEKQAKARESGSSTAEEGDFSKGPIRCDRCGYNTNRYDHYTAHLKHHTRAGDNERVYKCIICTYTTVSEYHWRKHLRNHFPRKVYTCGKCNYFSDRKNNYVQHVRTHTGERPYKCELCPYSSSQKTHLTRHMRTHSGEKPFKCDQCSYVASNQHEVTRHARQVHNGPKPLNCPHCDYKTADRSNFKKHVELHVNPRQFNCPVCDYAASKKCNLQYHFKSKHPTCPNKTMDVSKVKLKKTKKREADLPDNITNEKTEIEQTKIKGDVAGKKNEKSVKAEKRDVSKEKKPSNNVSVIQVTTRTRKSVTEVKEMDVHTGSNSEKFSKTKKSKRKLEVDSHSLHGPVNDEESSTKKKKKVESKSKNNSQEVPKGDSKVEENKKQNTCMKKSTKKKTLKNKSSKKSSKPPQKEPVEKGSAQMDPPQMGPAPTEAVQKGPVQVEPPPPMEHAQMEGAQIRPAPDEPVQMEVVQEGPAQKELLPPVEPAQMVGAQIVLAHMELPPPMETAQTEVAQMGPAPMEPAQMEVAQVESAPMQVVQKEPVQMELSPPMEVVQKEPVQIELSPPMEVVQKEPVKIELSPPIEVVQKEPVQMELSPPMGVVQKEPAQREPPPPREPPLHMEPISKKPPLRKDKKEKSNMQSERARKEQVLIEVGLVPVKDSWLLKESVSTEDLSPPSPPLPKENLREEASGDQKLLNTGEGNKEAPLQKVGAEEADESLPGLAANINESTHISSSGQNLNTPEGETLNGKHQTDSIVCEMKMDTDQNTRENLTGINSTVEEPVSPMLPPSAVEEREAVSKTALASPPATMAANESQEIDEDEGIHSHEGSDLSDNMSEGSDDSGLHGARPVPQESSRKNAKEALAVKAAKGDFVCIFCDRSFRKGKDYSKHLNRHLVNVYYLEEAAQGQE

SEQ ID NO: 762405 - protein, 1113 aa, Homo sapiens
LNTLPIHISITWPNTVMATQVMGQSSGGGGLFTSSGNIGMALPNDMYDLHDLSKAELAAPQLIMLANVALTGEVNGSCCDYLVGEERQMAELMPVGDNNFSDSEEGEGLEESADIKGEPHGLENMELRSLELSVVEPQPVFEASGAPDIYSSNKDLPPETPGAEDKGKSSKTKPFRCKPCQYEAESEEQFVHHIRVHSAKKFFVEESAEKQAKARESGSSTAEEGDFSKGPIRCDRCGYNTNRYDHYTAHLKHHTRAGDNERVYKCIICTYTTVSEYHWRKHLRNHFPRKVYTCGKCNYFSDRKNNYVQHVRTHTGERPYKCELCPYSSSQKTHLTRHMRTHSGEKPFKCDQCSYVASNQHEVTRHARQVHNGPKPLNCPHCDYKTADRSNFKKHVELHVNPRQFNCPVCDYAASKKCNLQYHFKSKHPTCPNKTMDVSKVKLKKTKKREADLPDNITNEKTEIEQTKIKGDVAGKKNEKSVKAEKRDVSKEKKPSNNVSVIQVTTRTRKSVTEVKEMDVHTGSNSEKFSKTKKSKRKLEVDSHSLHGPVNDEESSTKKKKKVESKSKNNSQEVPKGDSKVEENKKQNTCMKKSTKKKTLKNKSSKKSSKPPQKEPVEKGSAQMDPPQMGPAPTEAVQKGPVQVEPPPPMEHAQMEGAQIRPAPDEPVQMEVVQEGPAQKELLPPVEPAQMVGAQIVLAHMELPPPMETAQTEVAQMGPAPMEPAQMEVAQVESAPMQVVQKEPVQMELSPPMEVVQKEPVQIELSPPMEVVQKEPVKIELSPPIEVVQKEPVQMELSPPMGVVQKEPAQREPPPPREPPLHMEPISKKPPLRKDKKEKSNMQSERARKEQVLIEVGLVPVKDSWLLKESVSTEDLSPPSPPLPKENLREEASGDQKLLNTGEGNKEAPLQKVGAEEADESLPGLAANINESTHISSSGQNLNTPEGETLNGKHQTDSIVCEMKMDTDQNTRENLTGINSTVEEPVSPMLPPSAVEEREAVSKTALASPPATMAANESQEIDEDEGIHSHEGSDLSDNMSEGSDDSGLHGARPVPQESSRKNAKEALAVKAAKGDFVCIFCDRSFRKGKDYSKHLNRHLVNVYYLEEAAQGQE

SEQ ID NO: 762406 - protein, 1201 aa, Homo sapiens
SVLCWNVRLPRARGAAAERAPPRPGAPDPGGGCGSRDGRARPGGLSTLCSPTPGPSWSTTAPAPNFTTLPHLSPETPATKKSSRRRSGDSGSPAPPHRGRPNTVMATQVMGQSSGGGGLFTSSGNIGMALPNDMYDLHDLSKAELAAPQLIMLANVALTGEVNGSCCDYLVGEERQMAELMPVGDNNFSDSEEGEGLEESADIKGEPHGLENMELRSLELSVVEPQPVFEASGAPDIYSSNKDLPPETPGAEDKGKSSKTKPFRCKPCQYEAESEEQFVHHIRVHSAKKFFVEESAEKQAKARESGSSTAEEGDFSKGPIRCDRCGYNTNRYDHYTAHLKHHTRAGDNERVYKCIICTYTTVSEYHWRKHLRNHFPRKVYTCGKCNYFSDRKNNYVQHVRTHTGERPYKCELCPYSSSQKTHLTRHMRTHSGEKPFKCDQCSYVASNQHEVTRHARQVHNGPKPLNCPHCDYKTADRSNFKKHVELHVNPRQFNCPVCDYAASKKCNLQYHFKSKHPTCPNKTMDVSKVKLKKTKKREADLPDNITNEKTEIEQTKIKGDVAGKKNEKSVKAEKRDVSKEKKPSNNVSVIQVTTRTRKSVTEVKEMDVHTGSNSEKFSKTKKSKRKLEVDSHSLHGPVNDEESSTKKKKKVESKSKNNSQEVPKGDSKVEENKKQNTCMKKSTKKKTLKNKSSKKSSKPPQKEPVEKGSAQMDPPQMGPAPTEAVQKGPVQVEPPPPMEHAQMEGAQIRPAPDEPVQMEVVQEGPAQKELLPPVEPAQMVGAQIVLAHMELPPPMETAQTEVAQMGPAPMEPAQMEVAQVESAPMQVVQKEPVQMELSPPMEVVQKEPVQIELSPPMEVVQKEPVKIELSPPIEVVQKEPVQMELSPPMGVVQKEPAQREPPPPREPPLHMEPISKKPPLRKDKKEKSNMQSERARKEQVLIEVGLVPVKDSWLLKESVSTEDLSPPSPPLPKENLREEASGDQKLLNTGEGNKEAPLQKVGAEEADESLPGLAANINESTHISSSGQNLNTPEGETLNGKHQTDSIVCEMKMDTDQNTRENLTGINSTVEEPVSPMLPPSAVEEREAVSKTALASPPATMAANESQEIDEDEGIHSHEGSDLSDNMSEGSDDSGLHGARPVPQESSRKNAKEALAVKAAKGDFVCIFCDRSFRKGKDYSKHLNRHLVNVYYLEEAAQGQE

SEQ ID NO: 762407 - protein, 1159 aa, Homo sapiens
GARSPTPREGARGASPALGVGRAPGRSEGPGGGRRSPDAGCANTVMATQVMGQSSGGGGLFTSSGNIGMALPNDMYDLHDLSKAELAAPQLIMLANVALTGEVNGSCCDYLVGEERQMAELMPVGDNNFSDSEEGEGLEESADIKGEPHGLENMELRSLELSVVEPQPVFEASGAPDIYSSNKDLPPETPGAEDKGKSSKTKPFRCKPCQYEAESEEQFVHHIRVHSAKKFFVEESAEKQAKARESGSSTAEEGDFSKGPIRCDRCGYNTNRYDHYTAHLKHHTRAGDNERVYKCIICTYTTVSEYHWRKHLRNHFPRKVYTCGKCNYFSDRKNNYVQHVRTHTGERPYKCELCPYSSSQKTHLTRHMRTHSVGYGYHLVIFTESVIQMGEKPFKCDQCSYVASNQHEVTRHARQVHNGPKPLNCPHCDYKTADRSNFKKHVELHVNPRQFNCPVCDYAASKKCNLQYHFKSKHPTCPNKTMDVSKVKLKKTKKREADLPDNITNEKTEIEQTKIKGDVAGKKNEKSVKAEKRDVSKEKKPSNNVSVIQVTTRTRKSVTEVKEMDVHTGSNSEKFSKTKKSKRKLEVDSHSLHGPVNDEESSTKKKKKVESKSKNNSQEVPKGDSKVEENKKQNTCMKKSTKKKTLKNKSSKKSSKPPQKEPVEKGSAQMDPPQMGPAPTEAVQKGPVQVEPPPPMEHAQMEGAQIRPAPDEPVQMEVVQEGPAQKELLPPVEPAQMVGAQIVLAHMELPPPMETAQTEVAQMGPAPMEPAQMEVAQVESAPMQVVQKEPVQMELSPPMEVVQKEPVQIELSPPMEVVQKEPVKIELSPPIEVVQKEPVQMELSPPMGVVQKEPAQREPPPPREPPLHMEPISKKPPLRKDKKEKSNMQSERARKEQVLIEVGLVPVKDSWLLKESVSTEDLSPPSPPLPKENLREEASGDQKLLNTGEGNKEAPLQKVGAEEADESLPGLAANINESTHISSSGQNLNTPEGETLNGKHQTDSIVCEMKMDTDQNTRENLTGINSTVEEPVSPMLPPSAVEEREAVSKTALASPPATMAANESQEIDEDEGIHSHEGSDLSDNMSEGSDDSGLHGARPVPQESSRKNAKEALAVKAAKGDFVCIFCDRSFRKGKDYSKHLNRHLVNVYYLEEAAQGQE

SEQ ID NO: 762408 - protein, 130 aa, Homo sapiens
KRTTVTPGYSPMSPRTPPWTGGEAPSWPRDWPRGGPLDPRPALCSPAPSEGSRCTSQNVSEGDKERDLCLRRCVCVVRFSSRKGDKSKARLWIVGLSEGVQIYPRRSELGCSRWAVGKKPAWKKEGRKLW

SEQ ID NO: 762409 - protein, 130 aa, Homo sapiens; identical to SEQ ID NO: 762408

SEQ ID NO: 762410 - protein, 396 aa, Homo sapiens [sequence omitted]

SEQ ID NO: 762411 - protein, 396 aa, Homo sapiens [sequence omitted]

SEQ ID NO: 762412 - protein, 333 aa, Homo sapiens
MIIVAHVLLILLGATEILQADLLPDEKISLLPPVNFTIKVTGLAQVLLQWKPNPDQEQRNVNLEYQVKINAPKEDDYETRITESKCVTILHKGFSASVRTILQNDHSLLASSWASAELHAPPGSPGTSIVNLTCTTNTTEDNYSRLRSYQVSLHCTWLVGTDAPEDTQYFLYYRYGSWTEECQEYSKDTLGRNIACWFPRTFILSKGRDWLAVLVNGSSKHSAIRPFDQLFALHAIDQINPPLNVTAEIEGTRLSIQWEKPVSAFPIHCFDYEVKIHNTRNGYLQIEKLMTNAFISIIDDLSKYDVQVRAAVSSMCREAGLWSEWSQPIYVGK

SEQ ID NO: 762413 - protein, 333 aa, Homo sapiens; identical to SEQ ID NO: 762412

SEQ ID NO: 762414 - protein, 420 aa, Homo sapiens
MIIVAHVLLILLGATEILQADLLPDEKISLLPPVNFTIKVTGLAQVLLQWKPNPDQEQRNVNLEYQVKINAPKEDDYETRITESKCVTILHKGFSASVRTILQNDHSLLASSWASAELHAPPGSPGTSIVNLTCTTNTTEDNYSRLRSYQVSLHCTWLVGTDAPEDTQYFLYYRYGSWTEECQEYSKDTLGRNIACWFPRTFILSKGRDWLAVLVNGSSKHSAIRPFDQLFALHAIDQINPPLNVTAEIEGTRLSIQWEKPVSAFPIHCFDYEVKIHNTRNGYLQIEKLMTNAFISIIDDLSKYDVQVRAAVSSMCREAGLWSEWSQPIYVGNDEHKPLREWFVIVIMATICFILLILSLICKICHLWIKLFPPIPAPKSNIKDLFVTTNYEKAGSSETEIEVICYIEKPGVETLEDSVF

SEQ ID NO: 762415 - protein, 420 aa, Homo sapiens; identical to SEQ ID NO: 762414

SEQ ID NO: 762416 - protein, 335 aa, Homo sapiens
MIIVAHVLLILLGATEILQADLLPDEKISLLPPVNFTIKVTGLAQVLLQWKPNPDQEQRNVNLEYQVKINAPKEDDYETRITESKCVTILHKGFSASVRTILQNDHSLLASSWASAELHAPPGSPGTSIVNLTCTTNTTEDNYSRLRSYQVSLHCTWLVGTDAPEDTQYFLYYRYGSWTEECQEYSKDTLGRNIACWFPRTFILSKGRDWLAVLVNGSSKHSAIRPFDQLFALHAIDQINPPLNVTAEIEGTRLSIQWEKPVSAFPIHCFDYEVKIHNTRNGYLQIEKLMTNAFISIIDDLSKYDVQVRAAVSSMCREAGLWSEWSQPIYVGFSR

SEQ ID NO: 762417 - protein, 439 aa, Homo sapiens
MIIVAHVLLILLGATEILQADLLPDEKISLLPPVNFTIKVTGLAQVLLQWKPNPDQEQRNVNLEYQVKINAPKEDDYETRITESKCVTILHKGFSASVRTILQNDHSLLASSWASAELHAPPGSPGTSIVNLTCTTNTTEDNYSRLRSYQVSLHCTWLVGTDAPEDTQYFLYYRYGSWTEECQEYSKDTLGRNIACWFPRTFILSKGRDWLAVLVNGSSKHSAIRPFDQLFALHAIDQINPPLNVTAEIEGTRLSIQWEKPVSAFPIHCFDYEVKIHNTRNGYLQIEKLMTNAFISIIDDLSKYDVQVRAAVSSMCREAGLWSEWSQPIYVGNDEHKPLREWFVIVIMATICFILLILSLICKICHLWIKLFPPIPAPKSNIKDLFVTTNYEVLCIFIYILDSADNFLQKKKAGSSETEIEVICYIEKPGVETLEDSVF

SEQ ID NO: 762418 - protein, 143 aa, Homo sapiens
MPPKPRGLPRCPPCQSVWPLPGPGWLQVVGLPFPLPFPGLSQAQSPCFSFPVWGDRRVATEPGSALGAAGLQTWLWSCSPGEGGGPGEDELPNTCYGSFQSQAARTQSQRSIRWGWGHVGWPWLSQVGSCQAKSYAKWGPPWP

SEQ ID NO: 762419 - protein, 143 aa, Homo sapiens; identical to SEQ ID NO: 762418

SEQ ID NO: 762420 - protein, 515 aa, Homo sapiens
MLLWASLLAFAPVCGQSAAAHKPVISVHPPWTTFFKGERVTLTCNGFQFYATEKTTWYHRHYWGEKLTLTPGNTLEVRESGLYRCQARGSPRSNPVRLLFSSDSLILQAPYSVFEGDTLVLRCHRRRKEKLTAVKYTWNGNILSISNKSWDLLIPQASSNNNGNYRCIGYGDENDVFRSNFKIIKIQELFPHPELKATDSQPTEGNSVNLSCETQLPPERSDTPLHFNFFRDGEVILSDWSTYPELQLPTVWRENSGSYWCGAETVRGNIHKHSPSLQIHVQRIPVSGVLLETQPSGGQAVEGEMLVLVCSVAEGTGDTTFSWHREDMQESLGRKTQRSLRAELELPAIRQSHAGGYYCTADNSYGPVQSMVLNVTVRETPGNRDGLVAAGATGGLLSALLLAVALLFHCWRRRKSGVGFLGDETRLPPAPGPGESSHSICPAQVELQSLYVDVHPKKGDLVYSEIQTTQLGEEEEANTSRTLLEDKDVSVVYSEVKTQHPDNSAGKISSKDEES

SEQ ID NO: 762421 - protein, 515 aa, Homo sapiens; identical to SEQ ID NO: 762420

SEQ ID NO: 762422 - protein, 86 aa, Homo sapiens
TGRADGVMWRGQEQGVGASPKLLNNQISRELTKQELTYHRGDGARPFMTDLSPRSSHLPPDPTSNVGIPFPHEIWRGQTSKPYHRH

SEQ ID NO: 762423 - protein, 110 aa, Homo sapiens
MSHAVSPFRKCKRLGRKCQRTSCVEKVSLVVKPLSVCVCVSPDLCTYWATGKMHFVGQNIWRNTFLLSLTGSVFSVSKLLCTLRGRVETLQQVLSVCSLQISPQDKSSCS

SEQ ID NO: 762424 - protein, 47 aa, Homo sapiens
CLPDEEMAVLRSHWSRSRRWHVTARVQNVLTKSNAPHPRPGTSRYRL

SEQ ID NO: 762425 - protein, 4366 aa, Homo sapiens
MLTPPLLLLLPLLSALVAAAIDAPKTCSPKQFACRDQITCISKGWRCDGERDCPDGSDEAPEICPQSKAQRCQPNEHNCLGTELCVPMSRLCNGVQDCMDGSDEGPHCRELQGNCSRLGCQHHCVPTLDGPTCYCNSSFQLQADGKTCKDFDECSVYGTCSQLCTNTDGSFICGCVEGYLLQPDNRSCKAKNEPVDRPPVLLIANSQNILATYLSGAQVSTITPTSTRQTTAMDFSYANETVCWVHVGDSAAQTQLKCARMPGLKGFVDEHTINISLSLHHVEQMAIDWLTGNFYFVDDIDDRIFVCNRNGDTCVTLLDLELYNPKGIALDPAMGKVFFTDYGQIPKVERCDMDGQNRTKLVDSKIVFPHGITLDLVSRLVYWADAYLDYIEVVDYEGKGRQTIIQGILIEHLYGLTVFENYLYATNSDNANAQQKTSVIRVNRFNSTEYQVVTRVDKGGALHIYHQRRQPRVRSHACENDQYGKPGGCSDICLLANSHKARTCRCRSGFSLGSDGKSCKKPEHELFLVYGKGRPGIIRGMDMGAKVPDEHMIPIENLMNPRALDFHAETGFIYFADTTSYLIGRQKIDGTERETILKDGIHNVEGVAVDWMGDNLYWTDDGPKKTISVARLEKAAQTRKTLIEGKMTHPRAIVVDPLNGWMYWTDWEEDPKDSRRGRLERAWMDGSHRDIFVTSKTVLWPNGLSLDIPAGRLYWVDAFYDRIETILLNGTDRKIVYEGPELNHAFGLCHHGNYLFWTEYRSGSVYRLERGVGGAPPTVTLLRSERPPIFEIRMYDAQQQQVGTNKCRVNNGGCSSLCLATPGSRQCACAEDQVLDADGVTCLANPSYVPPPQCQPGEFACANSRCIQERWKCDGDNDCLDNSDEAPALCHQHTCPSDRFKCENNRCIPNRWLCDGDNDCGNSEDESNATCSARTCPPNQFSCASGRCIPISWTCDLDDDCGDRSDESASCAYPTCFPLTQFTCNNGRCININWRCDNDNDCGDNSDEAGCSHSCSSTQFKCNSGRCIPEHWTCDGDNDCGDYSDETHANCTNQATRPPGGCHTDEFQCRLDGLCIPLRWRCDGDTDCMDSSDEKSCEGVTHVCDPSVKFGCKDSARCISKAWVCDGDNDCEDNSDEENCESLACRPPSHPCANNTSVCLPPDKLCDGNDDCGDGSDEGELCDQCSLNNGGCSHNCSVAPGEGIVCSCPLGMELGPDNHTCQIQSYCAKHLKCSQKCDQNKFSVKCSCYEGWVLEPDGESCRSLDPFKPFIIFSNRHEIRRIDLHKGDYSVLVPGLRNTIALDFHLSQSALYWTDVVEDKIYRGKLLDNGALTSFEVVIQYGLATPEGLAVDWIAGNIYWVESNLDQIEVAKLDGTLRTTLLAGDIEHPRAIALDPRDGILFWTDWDASLPRIEAASMSGAGRRTVHRETGSGGWPNGLTVDYLEKRILWIDARSDAIYSARYDGSGHMEVLRGHEFLSHPFAVTLYGGEVYWTDWRTNTLAKANKWTGHNVTVVQRTNTQPFDLQVYHPSRQPMAPNPCEANGGQGPCSHLCLINYNRTVSCACPHLMKLHKDNTTCYEFKKFLLYARQMEIRGVDLDAPYYNYIISFTVPDIDNVTVLDYDAREQRVYWSDVRTQAIKRAFINGTGVETVVSADLPNAHGLAVDWVSRNLFWTSYDTNKKQINVARLDGSFKNAVVQGLEQPHGLVVHPLRGKLYWTDGDNISMANMDGSNRTLLFSGQKGPVGLAIDFPESKLYWISSGNHTINRCNLDGSGLEVIDAMRSQLGKATALAIMGDKLWWADQVSEKMGTCSKADGSGSVVLRNSTTLVMHMKVYDESIQLDHKGTNPCSVNNGDCSQLCLPTSETTRSCMCTAGYSLRSGQQACEGVGSFLLYSVHEGIRGIPLDPNDKSDALVPVSGTSLAVGIDFHAENDTIYWVDMGLSTISRAKRDQTWREDVVTNGIGRVEGIAVDWIAGNIYWTDQGFDVIEVARLNGSFRYVVISQGLDKPRAITVHPEKGYLFWTEWGQYPRIERSRLDGTERVVLVNVSISWPNGISVDYQDGKLYWCDARTDKIERIDLETGENREVVLSSNNMDMFSVSVFEDFIYWSDRTHANGSIKRGSKDNATDSVPLRTGIGVQLKDIKVFNRDRQKGTNVCAVANGGCQQLCLYRGRGQRACACAHGMLAEDGASCREYAGYLLYSERTILKSIHLSDERNLNAPVQPFEDPEHMKNVIALAFDYRAGTSPGTPNRIFFSDIHFGNIQQINDDGSRRITIVENVGSVEGLAYHRGWDTLYWTSYTTSTITRHTVDQTRPGAFERETVITMSGDDHPRAFVLDECQNLMFWTNWNEQHPSIMRAALSGANVLTLIEKDIRTPNGLAIDHRAEKLYFSDATLDKIERCEYDGSHRYVILKSEPVHPFGLAVYGEHIFWTDWVRRAVQRANKHVGSNMKLLRVDIPQQPMGIIAVANDTNSCELSPCRINNGGCQDLCLLTHQGHVNCSCRGGRILQDDLTCRAVNSSCRAQDEFECANGECINFSLTCDGVPHCKDKSDEKPSYCNSRRCKKTFRQCSNGRCVSNMLWCNGADDCGDGSDEIPCNKTACGVGEFRCRDGTCIGNSSRCNQFVDCEDASDEMNCSATDCSSYFRLGVKGVLFQPCERTSLCYAPSWVCDGANDCGDYSDERDCPGVKRPRCPLNYFACPSGRCIPMSWTCDKEDDCEHGEDETHCNKFCSEAQFECQNHRCISKQWLCDGSDDCGDGSDEAAHCEGKTCGPSSFSCPGTHVCVPERWLCDGDKDCADGADESIAAGCLYNSTCDDREFMCQNRQCIPKHFVCDHDRDCADGSDESPECEYPTCGPSEFRCANGRCLSSRQWECDGENDCHDQSDEAPKNPHCTSPEHKCNASSQFLCSSGRCVAEALLCNGQDDCGDSSDERGCHINECLSRKLSGCSQDCEDLKIGFKCRCRPGFRLKDDGRTCADVDECSTTFPCSQRCINTHGSYKCLCVEGYAPRGGDPHSCKAVTDEEPFLIFANRYYLRKLNLDGSNYTLLKQGLNNAVALDFDYREQMIYWTDVTTQGSMIRRMHLNGSNVQVLHRTGLSNPDGLAVDWVGGNLYWCDKGRDTIEVSKLNGAYRTVLVSSGLREPRALVVDVQNGYLYWTDWGDHSLIGRIGMDGSSRSVIVDTKITWPNGLTLDYVTERIYWADAREDYIEFASLDGSNRHVVLSQDIPHIFALTLFEDYVYWTDWETKSINRAHKTTGTNKTLLISTLHRPMDLHVFHALRQPDVPNHPCKVNNGGCSNLCLLSPGGGHKCACPTNFYLGSDGRTCVSNCTASQFVCKNDKCIPFWWKCDTEDDCGDHSDEPPDCPEFKCRPGQFQCSTGICTNPAFICDGDNDCQDNSDEANCDIHVCLPSQFKCTNTNRCIPGIFRCNGQDNCGDGEDERDCPEVTCAPNQFQCSITKRCIPRVWVCDRDNDCVDGSDEPANCTQMTCGVDEFRCKDSGRCIPARWKCDGEDDCGDGSDEPKEECDERTCEPYQFRCKNNRCVPGRWQCDYDNDCGDNSDEESCTPRPCSESEFSCANGRCIAGRWKCDGDHDCADGSDEKDCTPRCDMDQFQCKSGHCIPLRWRCDADADCMDGSDEEACGTGVRTCPLDEFQCNNTLCKPLAWKCDGEDDCGDNSDENPEECARFVCPPNRPFRCKNDRVCLWIGRQCDGTDNCGDGTDEEDCEPPTAHTTHCKDKKEFLCRNQRCLSSSLRCNMFDDCGDGSDEEDCSIDPKLTSCATNASICGDEARCVRTEKAAYCACRSGFHTVPGQPGCQDINECLRFGTCSQLCNNTKGGHLCSCARNFMKTHNTCKAEGSEYQVLYIADDNEIRSLFPGHPHSAYEQAFQGDESVRIDAMDVHVKAGRVYWTNWHTGTISYRSLPPAAPPTTSNRHRRQIDRGVTHLNISGLKMPRGIAIDWVAGNVYWTDSGRDVIEVAQMKGENRKTLISGMIDEPHAIVVDPLRGTMYWSDWGNHPKIETAAMDGTLRETLVQDNIQWPTGLAVDYHNERLYWADAKLSVIGSIRLNGTDPIVAADSKRGLSHPFSIDVFEDYIYGVTYINNRVFKIHKFGHSPLVNLTGGLSHASDVVLYHQHKQPEVTNPCDRKKCEWLCLLSPSGPVCTCPNGKRLDNGTCVPVPSPTPPPDAPRPGTCNLQCFNGGSCFLNARRQPKCRCQPRYTGDKCELDQCWEHCRNGGTCAASPSGMPTCRCPTGFTGPKCTQQVCAGYCANNSTCTVNQGNQPQCRCLPGFLGDRCQYRQCSGYCENFGTCQMAADGSRQCRCTAYFEGSRCEVNKCSRCLEGACVVNKQSGDVTCNCT

SEQ ID NO: 762426 - protein, 400 aa, Homo sapiens
MLDPPGTLLLLLPLLSALVAAAIDAPKTCSPKQFACRDQITCISKGWRCDGERDCPDGSDEAPEICPQSKAQRCQPNEHNCLGTELCVPMSRLCNGVQDCMDGSDEGPHCRELQGNCSRLGCQHHCVPTLDGPTCYCNSSFQLQADGKTCKDFDECSVYGTCSQLCTNTDGSFICGCVEGYLLQPDNRSCKAKNEPVDRPPVLLIANSQNILATYLSGAQVSTITPTSTRQTTAMDFSYANETVCWVHVGDSAAQTQLKCARMPGLKGFVDEHTINISLSLHHVEQMAIDWLTGNFYFVDDIDDRIFVCNRNGDTCVTLLDLELYNPKGIALDPAMGKVFIIINTLTTTIFLGTAYDALSPELYTTYFVTKTLLLTSLFFMNSNSIPPIPLYDLGILKET

SEQ ID NO: 762427 - protein, 398 aa, Homo sapiens
MLTPPLLLLLPLLSALVAAAIDAPKTCSPKQFACRDQITCISKGWRCDGERDCPDGSDEAPEICPQSKAQRCQPNEHNCLGTELCVPMSRLCNGVQDCMDGSDEGPHCRELQGNCSRLGCQHHCVPTLDGPTCYCNSSFQLQADGKTCKDFDECSVYGTCSQLCTNTDGSFICGCVEGYLLQPDNRSCKAKNEPVDRPPVLLIANSQNILATYLSGAQVSTITPTSTRQTTAMDFSYANETVCWVHVGDSAAQTQLKCARMPGLKGFVDEHTINISLSLHHVEQMAIDWLTGNFYFVDDIDDRIFVCNRNGDTCVTLLDLELYNPKGIALDPAMGKVFIIINTLTTTIFLGTAYDALSPELYTTYFVTKTLLLTSLFLMNSNSIPPIPLYDLGILKET

SEQ ID NO: 762428 - protein, 519 aa, Homo sapiens
MGGFLPKAEGPGSQLQKLLPSFLVREQDWDQHLDKLHMLQQKRILESPLLRASKENDLSVLRQLLLDCTCDVRQRGALGETALHIAALYDNLEAALVLMEAAPELVFEPTTCEAFAGQTALHIAVVNQNVNLVRALLTRRASVSARATGTAFRRSPRNLIYFGEHPLSFAACVNSEEIVRLLIEHGADIRAQDSLGNTVLHILILQPNKTFACQMYNLLLSYDRHGDHLQPLDLVPNHQGLTPFKLAGVEGNTVMFQHLMQKRRHIQWTYGPLTSILYDLTEIDSWGEELSFLELVVSSDKREARQILEQTPVKELVSFKWNKYGRPYFCILAALYLLYMICFTTCCVYRPLKFRGGNRTHSRDITILQQKLLQEAYETREDIIRLVGELVSIVGAVIILLLEIPDIFRVGASRYFGKTILGGPFHVIIITYASLVLVTMVMRLTNTNGEVVPMSFALVLGWCSVMYFTRGFQMLGPFTIMIQKMIFGDLMRFCWLMAVVILGFASGKAPYTPLLDQQI

SEQ ID NO: 762429 - protein, 729 aa, Homo sapiens
MGGFLPKAEGPGSQLQKLLPSFLVREQDWDQHLDKLHMLQQKRILESPLLRASKENDLSVLRQLLLDCTCDVRQRGALGETALHIAALYDNLEAALVLMEAAPELVFEPTTCEAFAGQTALHIAVVNQNVNLVRALLTRRASVSARATGTAFRRSPRNLIYFGEHPLSFAACVNSEEIVRLLIEHGADIRAQDSLGNTVLHILILQPNKTFACQMYNLLLSYDRHGDHLQPLDLVPNHQGLTPFKLAGVEGNTVMFQHLMQKRRHIQWTYGPLTSILYDLTEIDSWGEELSFLELVVSSDKREARQILEQTPVKELVSFKWNKYGRPYFCILAALYLLYMICFTTCCVYRPLKFRGGNRTHSRDITILQQKLLQEAYETREDIIRLVGELVSIVGAVIILLLEIPDIFRVGASRYFGKTILGGPFHVIIITYASLVLVTMVMRLTNTNGEVVPMSFALVLGWCSVMYFTRGFQMLGPFTIMIQKMIFGDLMRFCWLMAVVILGFASAFYIIFQTEDPTSLGQFYDYPMALFTTFELFLTVIDAPANYDVDLPFMFSITYAAFAIIATLLMLNLFIAMMGDTHWRVAQERDELWRAQVVATTVMLERKLPRCLWPRSGICGCEFGLGDRWFLRVENHNDQNPLRVLRYVEVFKNSDKEDDQEHPSEKQPSGAESGTLARASLALPTSSLSRTASQSSSHRGWEILRQNTLGHLNLGLNLSEGDGEEVYHF

SEQ ID NO: 762430 - protein, 89 aa, Homo sapiens
PKLPPPQAQDLHRQRDGGRMELVELWGPLDLLALAAQKQWKRNHPTLSSFCFLQMIFGDLMRFCWLMAVVILGFASGKAPYTPLLDQQI

SEQ ID NO: 762431 - protein, 540 aa, Homo sapiens
MDETAEQNSSLAVGLNDQLHDLSRSRSPAARSSASNIRERRARIARGRWDRVPDVATRRGLLRPAVSGKVRGRRRPSNVGFGNCSSAKALVSLKEGSLSNTWNEKYSSLQKTPVWKGRNTSSAVEMPFRNSKRSRLFSDEDDRQINTRSPKRNQRVAMVPQKFTATMSTPDKKASQKIGFRLRNLLKLPKAHKWCIYEWFYSNIDKPLFEGDNDFCVCLKESFPNLKTRKLTRVEWGKIRRLMGKPRRCSSAFFEEERSALKQKRQKIRLLQQRKVADVSQFKDLPDEIPLPLVIGTKVTARLRGVHDGLFTGQIDAVDTLNATYRVTFDRTGLGTHTIPDYEVLSNEPHETMPIAAFGQKQRPSRFFMTPPRLHYTPPLQSPIIDNDPLLGQSPWRSKISGSDTETLGGFPVEFLIQVTRLSKILMITKEHIKNIRDMNTEAETLAIILHASQHWIHAEICDNRSRGLEQVNTGPKHSLGNGHRIAMRLSQHGGPAEEISEGINPCVAAKHPAQCPRDILSGEPVFTGALGDSNSDRDW

SEQ ID NO: 762432 - protein, 483 aa, Homo sapiens
MHRGGQPLKKRRGSFKMAELDQLPDESSSAKALVSLKEGSLSNTWNEKYSSLQKTPVWKGRNTSSAVEMPFRNSKRSRLFSDEDDRQINTRSPKRNQRVAMVPQKFTATMSTPDKKASQKIGFRLRNLLKLPKAHKWCIYEWFYSNIDKPLFEGDNDFCVCLKESFPNLKTRKLTRVEWGKIRRLMGKPRRCSSAFFEEERSALKQKRQKIRLLQQRKVADVSQFKDLPDEIPLPLVIGTKVTARLRGVHDGLFTGQIDAVDTLNATYRVTFDRTGLGTHTIPDYEVLSNEPHETMPIAAFGQKQRPSRFFMTPPRLHYTPPLQSPIIDNDPLLGQSPWRSKISGSDTETLGGFPVEFLIQVTRLSKILMITKEHIKNIRDMNTEAETLAIILHASQHWIHAEICDNRSRGLEQVNTGPKHSLGNGHRIAMRLSQHGGPADEISEGINPCVAAKHPAQCPRDILSGEPVFTGALGDSNSDRDW

SEQ ID NO: 762433 - protein, 574 aa, Homo sapiens
PACCLPSGCTGRDGRPCPPLGRWADCQPHCGPLVLPLRCCRRVAAFVMVSVCWFLGLCERQGRKPRARESSLCQAEAVAAPLAPLRPPAEVEGRAAPGRGGCPRRLHHSPGAERRRRGSSAKALVSLKEGSLSNTWNEKYSSLQKTPVWKGRNTSSAVEMPFRNSKRSRLFSDEDDRQINTRSPKRNQRVAMVPQKFTATMSTPDKKASQKIGFRLRNLLKLPKAHKWCIYEWFYSNIDKPLFEGDNDFCVCLKESFPNLKTRKLTRVEWGKIRRLMGKPRRCSSAFFEEERSALKQKRQKIRLLQQRKVADVSQFKDLPDEIPLPLVIGTKVTARLRGVHDGLFTGQIDAVDTLNATYRVTFDRTGLGTHTIPDYEVLSNEPHETMPIAAFGQKQRPSRFFMTPPRLHYTPPLQSPIIDNDPLLGQSPWRSKISGSDTETLGGFPVEFLIQVTRLSKILMITKEHIKNIRDMNTEAETLAIILHASQHWIHAEICDNRSRGLEQVNTGPKHSLGNGHRIAMRLSQHGGPAEEISEGINPCVAAKHPAQCPRDILSGEPVFTGALGDSNSDRDW

SEQ ID NO: 762434 - protein, 448 aa, Homo sapiens
MHRGGQPLKKRRGSFKMAELDQLPDESSSAKALVSLKEGSLSNTWNEKYSSLQKTPVWKGRNTSSAVEMKFTATMSTPDKKASQKIGFRLRNLLKLPKAHKWCIYEWFYSNIDKPLFEGDNDFCVCLKESFPNLKTRKLTRVEWGKIRRLMGKPRRCSSAFFEEERSALKQKRQKIRLLQQRKVADVSQFKDLPDEIPLPLVIGTKVTARLRGVHDGLFTGQIDAVDTLNATYRVTFDRTGLGTHTIPDYEVLSNEPHETMPIAAFGQKQRPSRFFMTPPRLHYTPPLQSPIIDNDPLLGQSPWRSKISGSDTETLGGFPVEFLIQVTRLSKILMITKEHIKNIRDMNTEAETLAIILHASQHWIHAEICDNRSRGLEQVNTGPKHSLGNGHRIAMRLSQHGGPAEEISEGINPCVAAKHPAQCPRDILSGEPVFTGALGDSNSDRDW

SEQ ID NO: 762435 - protein, 242 aa, Homo sapiens
FLTEFYELILKRLTILLSHFFPFSRMGSGWVPWVVALLVNLTRLDSSMTQGTDSPEDFVIQAKADCYFTNGTEKVQFVVRFIFNLEEYVRFDSDVGMFVALTKLGQPDAEQWNSRLDLLERSRQAVDGVCRHNYRLGAPFTVGRKVQPEVTVYPERTPLLHQHNLLHCSVTGFYPGDIKIKWFLNGQEERAGVMSTGPIRNGDWTFQTVVMLEMTPELGHVYTCLVDHSSLLSPVSVEWSEN

SEQ ID NO: 762436 - protein, 273 aa, Homo sapiens
MGSGWVPWVVALLVNLTRLDSSMTQGTDSPEDFVIQAKADCYFTNGTEKVQFVVRFIFNLEEYVRFDSDVGMFVALTKLGQPDAEQWNSRLDLLERSRQAVDGVCRHNYRLGAPFTVGRKVQPEVTVYPERTPLLHQHNLLHCSVTGFYPGDIKIKWFLNGQEERAGVMSTGPIRNGDWTFQTVVMLEMTPELGHVYTCLVDHSSLLSPVSVEWRAQSEYSWRKMLSGIAAFLLGLIFLLVGIVIQLRAQKGYVRTQMSGNEVSRAVLLPQSC

SEQ ID NO: 762437 - protein, 122 aa, Homo sapiens
MTPHQHSRTSEKYPNADLIMNYCRNPDPVEGPWCYTMDPKVRWEYCNLTRCSDTEGTAVVPLTVIPVPSLEDPSKPAPTEPRPWEQQCYHGNGQSYRGTYFTTVTGRTCQAWSSMTPHQHMA

SEQ ID NO: 762438 - protein, 119 aa, Homo sapiens
MNYCRNPDPVEGPWCYTMDPKVRWEYCNLTRCSDTEGTAVVPLTVIPVPSLEDPSKPGKKSVARHLHTWTLGRKAFETPIVAEAFSATHVLTCWLMVCHVGRILRALWGGARRVIFGAT

SEQ ID NO: 762439 - protein, 122 aa, Homo sapiens; identical to SEQ ID NO: 762437

SEQ ID NO: 762440 - protein, 122 aa, Homo sapiens; identical to SEQ ID NO: 762437

SEQ ID NO: 762441 - protein, 617 aa, Homo sapiens [sequence omitted]

SEQ ID NO: 762442 - protein, 817 aa, Homo sapiens
GRQGWCCTGRCFPSPFLASFLTRRRPQFWRVCHSLPVVGDQRPGVLGSGERCSAQDRKGVRARVPQIPGNPRHPPAPAHPRPRCQSPLALTGSRRSGPGAGLMQSARYLGRRLHYQPGPRQARPEPVSPRPAGRPAPPALPRAPPERHTAEPSPSPRPRACQGAAASGAGRAQGTRDPLAAGHSLGVPPGPVKFLSPAASMLLARMNPQVQPENNGADTGPEQPLRARKTAELLVVKERNGVQCLLAPRDGDAQPRETWGKKIDFLLSVVGFAVDLANVWRFPYLCYKNGGGAFLIPYTLFLIIAGMPLFYMELALGQYNREGAATVWKICPFFKGVGYAVILIALYVGFYYNVIIAWSLYYLFSSFTLNLPWTDCGHTWNSPNCTDPKLLNGSVLGNHTKYSKYKFTPAAEFYERGVLHLHESSGIHDIGLPQWQLLLCLMVVVIVLYFSLWKGVKTSGKVVWITATLPYFVLFVLLVHGVTLPGASNGINAYLHIDFYRLKEATVWIDAATQIFFSLGAGFGVLIAFASYNKFDNNCYRDALLTSSINCITSFVSGFAIFSILGYMAHEHKVNIEDVATEGAGLVFILYPEAISTLSGSTFWAVVFFVMLLALGLDSSMGGMEAVITGLADDFQVLKRHRKLFTFGVTFSTFLLALFCITKGGIYVLTLLDTFAAGTSILFAVLMEAIGVSWFYGVDRFSNDIQQMMGFRPGLYWRLCWKFVSPAFLLFVVVVSIINFKPLTYDDYIFPPWANWVGWGIALSSMVLVPIYVIYKFLSTQGSLWERLAYGITPENEHHLVAQRDIRQFQLQHWLAI

SEQ ID NO: 762443 - protein, 772 aa, Homo sapiens
GRQGWCCTGRCFPSPFLASFLTRRRPQFWRVCHSLPVVGDQRPGVLGSGERCSAQDRKGVRARVPQIPGNPRHPPAPAHPRPRCQSPLALTGSRRSGPGAGLMQSARYLGRRLHYQPGPRQARPEPVSPRPAGRPAPPALPRAPPERHTAEPSPSPRPRACQGAAASGAGRAQGTRDPLAAGHSLGVPPGPVKFLSPAASMLLARMNPQVQPENNGADTGPEQPLRARKTAELLVVKERNGVQCLLAPRDGDAQPRETWGKKIDFLLSVVGFAVDLANVWRFPYLCYKNGGGAFLIPYTLFLIIAGMPLFYMELALGQYNREGAATVWKICPFFKGVGYAVILIALYVGFYYNVIIAWSLYYLFSSFTLNLPWTDCGHTWNSPNCTDPKLLNGSVLGNHTKYSKYKFTPAAEFYERGVLHLHESSGIHDIGLPQWQLLLCLMVVVIVLYFSLWKGVKTSGKVWIDAATQIFFSLGAGFGVLIAFASYNKFDNNCYRDALLTSSINCITSFVSGFAIFSILGYMAHEHKVNIEDVATEGAGLVFILYPEAISTLSGSTFWAVVFFVMLLALGLDSSMGGMEAVITGLADDFQVLKRHRKLFTFGVTFSTFLLALFCITKGGIYVLTLLDTFAAGTSILFAVLMEAIGVSWFYGVDRFSNDIQQMMGFRPGLYWRLCWKFVSPAFLLFVVVVSIINFKPLTYDDYIFPPWANWVGWGIALSSMVLVPIYVIYKFLSTQGSLWERLAYGITPENEHHLVAQRDIRQFQLQHWLAI

SEQ ID NO: 762444 - protein, 459 aa, Homo sapiens
MDEAGVNRTSLNLPWTDCGHTWNSPNCTDPKLLNGSVLGNHTKYSKYKFTPAAEFYERGVLHLHESSGIHDIGLPQWQLLLCLMVVVIVLYFSLWKGVKTSGKVVWITATLPYFVLFVLLVHGVTLPGASNGINAYLHIDFYRLKEATVWIDAATQIFFSLGAGFGVLIAFASYNKFDNNCYRDALLTSSINCITSFVSGFAIFSILGYMAHEHKVNIEDVATEGAGLVFILYPEAISTLSGSTFWAVVFFVMLLALGLDSSMGGMEAVITGLADDFQVLKRHRKLFTFGVTFSTFLLALFCITKGGIYVLTLLDTFAAGTSILFAVLMEAIGVSWFYGVDRFSNDIQQMMGFRPGLYWRLCWKFVSPAFLLFVVVVSIINFKPLTYDDYIFPPWANWVGWGIALSSMVLVPIYVIYKFLSTQGSLWERLAYGITPENEHHLVAQRDIRQFQLQHWLAI

SEQ ID NO: 762445 - protein, 488 aa, Homo sapiens
MLLARMNPQVQPENNGADTGPEQPLRARKTAELLVVKERNGVQCLLAPRDGDAQPRETWGKKIDFLLSVVGFAVDLANVWRFPYLCYKNGGGAFLIPYTLFLIIAGMPLFYMELALGQYNREGAATVWKICPFFKGVGYAVILIALYVGFYYNVIIAWSLYYLFSSFTLNLPWTDCGHTWNSPNCTDPKLLNGSVLGNHTKYSKYKFTPAAEFYEYGLMPQLRYFFPWGLDLEYVIAFASYNKFDNNCYRDALLTSSINCITSFVSGFAIFSILGYMAHEHKVNIEDVATEDGRHGGCHHGLADDFQVLKRHRKLFTFGVTFSTFLLALFCITKGGIYVLTLLDTFAAGTSILFAVLMEAIGVSWFYGVDRFSNDIQQMMGFRPGLYWRLCWKFVSPAFLLFVVVVSIINFKPLTYDDYIFPPWANWVGWGIALSSMVLVPIYVIYKFLSTQGSLWERLAYGITPENEHHLVAQRDIRQFQLQHWLAI

SEQ ID NO: 762446 - protein, 617 aa, Homo sapiens [sequence omitted]

SEQ ID NO: 762447 - protein, 512 aa, Homo sapiens
MGVQWWSHTQGEVAVGLGLGDSYLTPCPCPGVGYAVILIALYVGFYYNVIIAWSLYYLFSSFTLNLPWTDCGHTWNSPNCTDPKLLNGSVLGNHTKYSKYKFTPAAEFYERGVLHLHESSGIHDIGLPQWQLLLCLMVVVIVLYFSLWKGVKTSGKVVWITATLPYFVLFVLLVHGVTLPGASNGINAYLHIDFYRLKEATVWIDAATQIFFSLGAGFGVLIAFASYNKFDNNCYRDALLTSSINCITSFVSGFAIFSILGYMAHEHKVNIEDVATEGAGLVFILYPEAISTLSGSTFWAVVFFVMLLALGLDSSMGGMEAVITGLADDFQVLKRHRKLFTFGVTFSTFLLALFCITKGGIYVLTLLDTFAAGTSILFAVLMEAIGVSWFYGVDRFSNDIQQMMGFRPGLYWRLCWKFVSPAFLLFVVVVSIINFKPLTYDDYIFPPWANWVGWGIALSSMVLVPIYVIYKFLSTQGSLWERLAYGITPENEHHLVAQRDIRQFQLQHWLAI

SEQ ID NO: 762448 - protein, 696 aa, Homo sapiens
MAFPRKLFIKETGAKDVRALLQRALIEVKALREVKLGILCETEGTTHSRTEKAPQMSPLQSALRTLSLGIWVGLTSTRGSQKGEGRGLRQATLAHVQASEGSEAQAEVKVRIPNESKRTTHLRSMPRAFSPKKPDPCSQSWEALNRVDRMRCVLTSASEGLGEVRVLVKVREPRAAEGEGANPSSSQGEEGYGGESHQALVCSSLSARTWMSSICELSFSYLMIPGAEVLGLEWAGDRGAKVSKGRSTMPFRESTAEACVISEGPLISEEYRSTKPAPAIKLRKPWARLTSSRGSQRCEGLGLREEYSSQQRKAAKVQPGIKVSALHEDWRNPCSTGTLGCLCTDYMTCTHFLLWYGGVFGNDGEGFCLKYDGLRSAVGGFPGITRNKGEDMVSEGNTKFIPYSQPWKTTVQVRWYPYLTRESQENLVGIEKPWAMPRDKGRVGRTTHHWIDNKASVPHPCTQYLKDQGRTIRLRLLPTSLYIENLRQMKSLVYDCSHQSAKGKSSRNYLEIRWIPRMRTEDPSISGQRDLHIAPSWVPSDRDGGLRSSFTLSSGVSGRCWLWFEVSTSEQQKGGEPGPANNGYDDYDYELRPPHSITENPHYQPLPPSQYTYGRVGRLQPKTHSNFIHRVLSGEADQENRSSMGFLKQCSWKPVAVAFVKAMVVSPCCWCSHHLILPPSGAHIASHPVHTFSYSA

SEQ ID NO: 762449 - protein, 106 aa, Homo sapiens
KYCGPWVFWGALYPSPTPTPTHLWWGSWSPVMSQCLQMVEKVSKGGPGAILHTTPTGEGGSCLPSLEKTPGEAPIAWLRSQFILEPITAARGICALSTWVSDPPLS

SEQ ID NO: 762450 - protein, 743 aa, Homo sapiens
PDSDSDHRLNEMPWHKIPALDPEKLNVFRTVREITGYLNIQSWPPHMHNFSVFSNLTTIGGRSLYNRGFSLLIMKNLNVTSLGFRSLKEISAGRIYISANRQLCYHHSLNWTKVLRGPTEERLDIKHNRPRRDCVAEGKVCDPLCSSGGCWGPGPGQCLSCRNYSRGGVCVTHCNFLNGEPREFAHEAECFSCHPECQPMEGTATCNGSGSDTCAQCAHFRDGPHCVSSCPHGVLGAKGPIYKYPDVQNECRPCHENCTQGCKGPELQDCLGQTLVLIGKTHLTMALTVIAGLVVIFMMLGGTFLYWRGRRIQNKRAMRRYLERGESIEPLDPSEKANKVLARIFKETELRKLKVLGSGVFGTVHKGVWIPEGESIKIPVCIKVIEDKSGRQSFQAVTDHMLAIGSLDHAHIVRLLGLCPGSSLQLVTQYLPLGSLLDHVRQHRGALGPQLLLNWGVQIAKGMYYLEEHGMVHRNLAARNVLLKSPSQVQVADFGVADLLPPDDKQLLYSEAKTPIKWMALESIHFGKYTHQSDVWSYGVTVWELMTFGAEPYAGLRLAEVPDLLEKGERLAQPQICTIDVYMVMVKCWMIDENIRPTFKELANEFTRMARDPPRYLVIKRESGPGIAPGPEPHGLTNKKLEEVELEPELDLDLDLEAEEDNLATTTLGSALSLPVGTLNRPRGSQSLLSPSSGYMPMNQGNLGESCQESAVSGSSERCPRPVSLHPMPRGCLASESSEGACN

SEQ ID NO: 762451 - protein, 814 aa, Homo sapiens
PDSDSDHRLNEMPWHKIPALDPEKLNVFRTVREITGYLNIQSWPPHMHNFSVFSNLTTIGGRSLYNRGFSLLIMKNLNVTSLGFRSLKEISAGRIYISANRQLCYHHSLNWTKVLRGPTEERLDIKHNRPRRDCVAEGKVCDPLCSSGGCWGPGPGQCLSCRNYSRGGVCVTHCNFLNGEPREFAHEAECFSCHPECQPMEGTATCNGSDILVAPGSPRETEKGQYLEHLGNDMAKDSTERPDNAEGLQIEDPECLGWSLLGGMELTLGSVLPDLLSSTQGSDTCAQCAHFRDGPHCVSSCPHGVLGAKGPIYKYPDVQNECRPCHENCTQGCKGPELQDCLGQTLVLIGKTHLTMALTVIAGLVVIFMMLGGTFLYWRGRRIQNKRAMRRYLERGESIEPLDPSEKANKVLARIFKETELRKLKVLGSGVFGTVHKGVWIPEGESIKIPVCIKVIEDKSGRQSFQAVTDHMLAIGSLDHAHIVRLLGLCPGSSLQLVTQYLPLGSLLDHVRQHRGALGPQLLLNWGVQIAKGMYYLEEHGMVHRNLAARNVLLKSPSQVQVADFGVADLLPPDDKQLLYSEAKTPIKWMALESIHFGKYTHQSDVWSYGVTVWELMTFGAEPYAGLRLAEVPDLLEKGERLAQPQICTIDVYMVMVKCWMIDENIRPTFKELANEFTRMARDPPRYLVIKRESGPGIAPGPEPHGLTNKKLEEVELEPELDLDLDLEAEEDNLATTTLGSALSLPVGTLNRPRGSQSLLSPSSGYMPMNQGNLGESCQESAVSGSSERCPRPVSLHPMPRGCLASESSEGACN

SEQ ID NO: 762452 - protein, 726 aa, Homo sapiens
PDSDSDHRLNEMPWHKIPALDPEKLNVFRTVREITGYLNIQSWPPHMHNFSVFSNLTTIGGRSLYNRGFSLLIMKNLNVTSLGFRSLKEISAGRIYISANRQLCYHHSLNWTKVLRGPTEERLDIKHNRPRRDCVAEGKVCDPLCSSGGCWGPGPGQCLSCRNYSRGGVCVTHCNFLNGEPREFAHEAECFSCHPECQPMEGTATCNGSGSDTCAQCAHFRDGPHCVSSCPHGVLGAKGPIYKYPDVQNECRPCHENCTQGCKGPELQDCLGQTLVLIGKTHLTMALTVIAGLVVIFMMLGGTFLYWRGRRIQNKRAMRRYLERGESIEPLDPSEKANKVLARIFKETELRKLKVLGSGVFGTVHKGVWIPEGESIKIPVCIKVIEDKSGRQSFQAVTDHMLAIGSLDHAHIVRLLGLCPGSSLQLVTQYLPLGSLLDHVRQHRGALGPQLLLNWGVQIAKGMYYLEEHGMVHRNLAARNVLLKSPSQVQVADFGVADLLPPDDKQLLYSEAKTPIKWMALESIHFGKYTHQSDVWSYGVTVWELMTFGAEPYAGLRLAEVPDLLEKGERLAQPQICTIDVYMVMVKCWMIDENIRPTFKELANEFTRMARDPPRYLVIKRESGPGIAPGPEPHGLTNKKLEEVELEPELDLDLDLEAEEDNLATTTLGSALSLPVGTLNRPRGSQSLLSPSSGYMPMNQGNLGESCQVSSVAERLGFRIRLIRVV

SEQ ID NO: 762453 - protein, 343 aa, Homo sapiens
MLAIGSLDHAHIVRLLGLCPGSSLQLVTQYLPLGSLLDHVRQHRGALGPQLLLNWGVQIAKGMYYLEEHGMVHRNLAARNVLLKSPSQVQVADFGVADLLPPDDKQLLYSEAKTPIKWMALESIHFGKYTHQSDVWSYGVTVWELMTFGAEPYAGLRLAEVPDLLEKGERLAQPQICTIDVYMVMVKCWMIDENIRPTFKELANEFTRMARDPPRYLVIKRESGPGIAPGPEPHGLTNKKLEEVELEPELDLDLDLEAEEDNLATTTLGSALSLPVGTLNRPRGSQSLLSPSSGYMPMNQGNLGESCQESAVSGSSERCPRPVSLHPMPRGCLASESSEGACN

SEQ ID NO: 762454 - protein, 289 aa, Homo sapiens
ITLDWVQGFDEGGGVIETCRNLAARNVLLKSPSQVQVADFGVADLLPPDDKQLLYSEAKTPIKWMALESIHFGKYTHQSDVWSYGVTVWELMTFGAEPYAGLRLAEVPDLLEKGERLAQPQICTIDVYMVMVKCWMIDENIRPTFKELANEFTRMARDPPRYLVIKRESGPGIAPGPEPHGLTNKKLEEVELEPELDLDLDLEAEEDNLATTTLGSALSLPVGTLNRPRGSQSLLSPSSGYMPMNQGNLGESCQESAVSGSSERCPRPVSLHPMPRGCLASESSEGACN

SEQ ID NO: 762455 - protein, 349 aa, Homo sapiens
PASASGVAGITGARHTWITVTLLVEMGFHHVGQAGLKLLTSGDPPASASQSAGITGVSHHARPDCSHFLTSLCTPLMALFLFFLWSLALLPILECSSVTLAHRDLHVPGLSSSVSASQIAGTLGVHHHAQLIFFCLFSRDGVSLCWPGWSQSPDLRCSTRLGLPKCWDYRCEPPRPAMECILFYVSTSYILSPGWMIDENIRPTFKELANEFTRMARDPPRYLVIKRESGPGIAPGPEPHGLTNKKLEEVELEPELDLDLDLEAEEDNLATTTLGSALSLPVGTLNRPRGSQSLLSPSSGYMPMNQGNLGESCQESAVSGSSERCPRPVSLHPMPRGCLASESSEGACN

SEQ ID NO: 762456 - protein, 203 aa, Homo sapiens
PDSDSDHRLNEMPWHKIPALDPEKLNVFRTVREITGYLNIQSWPPHMHNFSVFSNLTTIGGRSLYNRGFSLLIMKNLNVTSLGFRSLKEISAGRIYISANRQLCYHHSLNWTKVLRGPTEERLDIKHNRPRRDCVAEGKVCDPLCSSGGCWGPGPGQCLSCRNYSRGGVCVTHCNFLNGYSKGSQSRMGGGGALQWNCSGGIQ

SEQ ID NO: 762457 - protein, 102 aa, Homo sapiens [sequence omitted]

SEQ ID NO: 762458 - protein, 459 aa, Homo sapiens
MALTVIAGLVVIFMMLGGTFLYWRGRRIQNKRAMRRYLERGESIEPLDPSEKANKVLARIFKETELRKLKVLGSGVFGTVHKGVWIPEGESIKIPVCIKVIEDKSGRQSFQAVTDHMLAIGSLDHAHIVRLLGLCPGSSLQLVTQYLPLGSLLDHVRQHRGALGPQLLLNWGVQIAKGMYYLEEHGMVHRNLAARNVLLKSPSQVQVADFGVADLLPPDDKQLLYSEAKTPIKWMALESIHFGKYTHQSDVWSYGVTVWELMTFGAEPYAGLRLAEVPDLLEKGERLAQPQICTIDVYMVMVKCWMIDENIRPTFKELANEFTRMARDPPRYLVIKRESGPGIAPGPEPHGLTNKKLEEVELEPELDLDLDLEAEEDNLATTTLGSALSLPVGTLNRPRGSQSLLSPSSGYMPMNQGNLGESCQESAVSGSSERCPRPVSLHPMPRGCLASESSEGACN

SEQ ID NO: 762459 - protein, 175 aa, Homo sapiens
PDSDSDHRLNEMPWHKIPALDPEKLNVFRTVREITGYLNIQSWPPHMHNFSVFSNLTTIGGRSLYNRGFSLLIMKNLNVTSLGFRSLKEISAGRIYISANRQLCYHHSLNWTKVLRGPTEERLDIKHNRPRRDCGEGKGLLGGENRESGRRGLKGLFCPRRGSRVEGWNQGEGGC

SEQ ID NO: 762460 - protein, 203 aa, Homo sapiens
PDSDSDHRLNEMPWHKIPALDPEKLNVFRTVREITGYLNIQSWPPHMHNFSVFSNLTTIGGRSLYNRGFSLLIMKNLNVTSLGFRSLKEISAGRIYISANRQLCYHHSLNWTKVLRGPTEERLDIKHNRPRRDCVAEGKVCDPLCSSGGCWGPGPGQCLSCRNYSRGGVCVTHCNFLNGYSKGSQSRMGGGGALQWNCSGGIH

SEQ ID NO: 762461 - protein, 211 aa, Homo sapiens
PDSDSDHRLNEMPWHKIPALDPEKLNVFRTVREITGYLNIQSWPPHMHNFSVFSNLTTIGGRSLYNRGFSLLIMKNLNVTSLGFRSLKEISAGRIYISANRQLCYHHSLNWTKVLRGPTEERLDIKHNRPRRDCVAEGKVCDPLCSSGGCWGPGPGQCLSCRNYSRGGVCVTHCNFLNGEPREFAHEAECFSCHPECQPMEGTATCNGSVY

SEQ ID NO: 762462 - protein, 127 aa, Homo sapiens
METAVRGMPLECPPRPERLNAYEREVMVNMLNSLSRNQQLPRITPRCGCVDPLPGRLPFHGYESACSGRHYCLRGMDYYASGAPCTDRRLRPWCREQPTMCTSLRAPARNAVCCYNSPAVILPISEP

SEQ ID NO: 762463 - protein, 161 aa, Homo sapiens
MFLFSRKTRTPISTYSDSYRAPTSIKEVYKDPPLCAWEANKFLTPGLTHTMERHVDPEALQKMAKCAVQDYTYRGSISGHPYLPEKYWLSQEEADKCSPNYLGSDWYNTWRMEPYNSSCCNKYTTYLPRLPKVSVAPSTDVWGLGHAYPTTSQTTVTDISP

SEQ ID NO: 762464 - protein, 112 aa, Homo sapiens
METAVRGMPLECPPRPERLNAYEREVMVNMLNSLSRNQQLPRITPRCGCVDPLPGRLPFHGYESACSGRHYCLRGMDYYASGAPCTDRRLRPWCREQPTKVRRAPPASAGLH

SEQ ID NO: 762465 - protein, 77 aa, Homo sapiens
RPNPSMLAASSFSRCVPPYEHRPGMQCAVTTPPPSYYPYPNLRWDTSHFKKSGGPQRNNYVIHPEFVSETYPDYRCW

SEQ ID NO: 762466 - protein, 127 aa, Homo sapiens; identical to SEQ ID NO: 762462

SEQ ID NO: 762467 - protein, 262 aa, Homo sapiens
MFLFSRKTRTPISTYSDSYRAPTSIKEVYKDPPLCAWEANKFLTPGLTHTMERHVDPEALQKMAKCAVQDYTYRGSISGHPYLPEKYWLSQEEADKCSPNYLGSDWYNTWRMEPYNSSCCNKYTTYLPRLPKEARMETAVRGMPLECPPRPERLNAYEREVMVNMLNSLSRNQQLPRITPRCGCVDPLPGRLPFHGYESACSGRHYCLRGMDYYASGAPCTDRRLRPWCREQPTMCTSLRAPARNAVCCYNSPAVILPISEP

SEQ ID NO: 762468 - protein, 111 aa, Homo sapiens
METAVRGMPLECPPRPERLNAYEREVMVNMLNSLSRNQQLPRITPRCGCVPPYEHRPGMQCAVTTPPPSYYPYPNLRWDTSHFKKSGGPQRNNYVIHPEFVSETYPDYRCW

SEQ ID NO: 762469 - protein, 109 aa, Homo sapiens
TRPAPRQDGGLNAAGSGGKLRSAFPQLLAASAPISAEDSGAPGTGRNYSAYLERRRDSDLPQSNPRAGAVAKGSGGAVGCGEPRANSRTAEQRELPTNRRRRRSRHLPE

SEQ ID NO: 762470 - protein, 281 aa, Homo sapiens
MTSAAPAKKPYRKAPPEHRELRLEIPGSRLEQEEPLTDAERMKLLQEENEELRRRLASATRRTEALERELEIGQDCLELELGQSREELDKFKDKFRRLQNSYTASQRTNQELEDKLHTLIKKAEMDRKTLDWEIVELTNKLLDAKNTINKLEELNERYRLDCNLAVQLLKCNKSHFRNHKFADVSRTHPLPAHIDHSGHCRTPLTPVSAPLSVLLFPLCPPLASMSPLKPVNSATGWCPVYCPGPITSSGGPALLVSVTETEREDPGQEGEGSQSYLPKEY

SEQ ID NO: 762471 - protein, 281 aa, Homo sapiens; identical to SEQ ID NO: 762470

SEQ ID NO: 762472 - protein, 291 aa, Homo sapiens
MTSAAPAKKPYRKAPPEHRELRLEIPGSRLEQEEPLTDAERMKLLQEENEELRRRLASATRRTEALERELEIGQDCLELELGQSREELDKFKDKFRRLQNSYTASQRTNQELEDKLHTLASLSHSWIFAIKKAEMDRKTLDWEIVELTNKLLDAKNTINKLEELNERYRLDCNLAVQLLKCNKSHFRNHKFADVSRTHPLPAHIDHSGHCRTPLTPVSAPLSVLLFPLCPPLASMSPLKPVNSATGWCPVYCPGPITSSGGPALLVSVTETEREDPGQEGEGSQSYLPKEY

SEQ ID NO: 762473 - protein, 557 aa, Homo sapiens
MTSAAPAKKPYRKAPPEHRELRLEIPGSRLEQEEPLTDAERMKLLQEENEELRRRLASATRRTEALERELEIGQDCLELELGQSREELDKFKDKFRRLQNSYTASQRTNQELEDKLHTLASLSHSWIFAIKKAEMDRKTLDWEIVELTNKLLDAKNTINKLEELNERYRLDCNLAVQLLKCNKSHFRNHKFADLPCELQDMVRKHLHSGQEAASPGPAPSLAPGAVVPTSVIARVLEKPESLLLNSAQSGSAGRPLAEDVFVHVDMSEGVPGDPASPPAPGSPTPQPNGECHSLGTARGSPEEELPLPAFEKLNPYPTPSPPHPLYPGRRVIEFSEDKVRIPRNSPLPNCTYATRQAISLSLVEEGSERARPSPVPSTPASAQASPHHQPSPAPLTLSAPASSASSEEDLLVSWQRAFVDRTPPPAAVAQRTAFGRDALPELQRHFAHSPADRDEVVQAPSARPEESELLLPTEPDSGFPREEEELNLPISPEEERQSLLPINRGTEEGPGTSHTEGRAWPLPSSSRPQRSPKRMGVHHLHRKDSLTQAQEQGNLLN

SEQ ID NO: 762474 - protein, 281 aa, Homo sapiens; identical to SEQ ID NO: 762470

SEQ ID NO: 762475 - protein, 281 aa, Homo sapiens; identical to SEQ ID NO: 762470

SEQ ID NO: 762476 - protein, 112 aa, Homo sapiens
GWVNLKSVLQIKKAEMDRKTLDWEIVELTNKLLDAKNTINKLEELNVCALHYSGLPHLGLALSWLGPASLERAGLGSETGLCLEERYRLDCNLAVQLLKCNKSHFRNHKFAD

SEQ ID NO: 762477 - protein, 547 aa, Homo sapiens
MTSAAPAKKPYRKAPPEHRELRLEIPGSRLEQEEPLTDAERMKLLQEENEELRRRLASATRRTEALERELEIGQDCLELELGQSREELDKFKDKFRRLQNSYTASQRTNQELEDKLHTLIKKAEMDRKTLDWEIVELTNKLLDAKNTINKLEELNERYRLDCNLAVQLLKCNKSHFRNHKFADLPCELQDMVRKHLHSGQEAASPGPAPSLAPGAVVPTSVIARVLEKPESLLLNSAQSGSAGRPLAEDVFVHVDMSEGVPGDPASPPAPGSPTPQPNGECHSLGTARGSPEEELPLPAFEKLNPYPTPSPPHPLYPGRRVIEFSEDKVRIPRNSPLPNCTYATRQAISLSLVEEGSERARPSPVPSTPASAQASPHHQPSPAPLTLSAPASSASSEEDLLVSWQRAFVDRTPPPAAVAQRTAFGRDALPELQRHFAHSPADRDEVVQAPSARPEESELLLPTEPDSGFPREEEELNLPISPEEERQSLLPINRGTEEGPGTSHTEGRAWPLPSSSRPQRSPKRMGVHHLHRKDSLTQAQEQGNLLN

SEQ ID NO: 762478 - protein, 240 aa, Homo sapiens
MKLLQEENEELRRRLASATRRTEALERELEIGQDCLELELGQSREELDKFKDKFRRLQNSYTASQRTNQELEDKLHTLIKKAEMDRKTLDWEIVELTNKLLDAKNTINKLEELNERYRLDCNLAVQLLKCNKSHFRNHKFADVSRTHPLPAHIDHSGHCRTPLTPVSAPLSVLLFPLCPPLASMSPLKPVNSATGWCPVYCPGPITSSGGPALLVSVTETEREDPGQEGEGSQSYLPKEY

SEQ ID NO: 762479 - protein, 374 aa, Homo sapiens [sequence omitted]

SEQ ID NO: 762480 - protein, 506 aa, Homo sapiens
MKLLQEENEELRRRLASATRRTEALERELEIGQDCLELELGQSREELDKFKDKFRRLQNSYTASQRTNQELEDKLHTLIKKAEMDRKTLDWEIVELTNKLLDAKNTINKLEELNERYRLDCNLAVQLLKCNKSHFRNHKFADLPCELQDMVRKHLHSGQEAASPGPAPSLAPGAVVPTSVIARVLEKPESLLLNSAQSGSAGRPLAEDVFVHVDMSEGVPGDPASPPAPGSPTPQPNGECHSLGTARGSPEEELPLPAFEKLNPYPTPSPPHPLYPGRRVIEFSEDKVRIPRNSPLPNCTYATRQAISLSLVEEGSERARPSPVPSTPASAQASPHHQPSPAPLTLSAPASSASSEEDLLVSWQRAFVDRTPPPAAVAQRTAFGRDALPELQRHFAHSPADRDEVVQAPSARPEESELLLPTEPDSGFPREEEELNLPISPEEERQSLLPINRGTEEGPGTSHTEGRAWPLPSSSRPQRSPKRMGVHHLHRKDSLTQAQEQGNLLN

SEQ ID NO: 762481 - protein, 281 aa, Homo sapiens; identical to SEQ ID NO: 762470

SEQ ID NO: 762482 - protein, 77 aa, Homo sapiens
AAAYYYYYCSEFKLLTMYGDMSCCPPGAWHSWPWGRGRGLIQGPLSCLLPPSGKEGGAQGPQAGLCVRPGPHSQPWL

SEQ ID NO: 762483 - protein, 445 aa, Homo sapiens
MAELKYISGFGNECSSEDPRCPGSLPEGQNNPQVCPYNLYAEQLSGSAFTCPRSTNKRSWLYRILPSVSHKPFESIDEGHVTHNWDEVDPDPNQLRWKPFEIPKASQKKVDFVSGLHTLCGAGDIKSNNGLAIHIFLCNTSMENRCFYNSDGDFLIVPQKGNLLIYTEFGKMLVQPNEICVIQRGMRFSIDVFEETRGYILEVYGVHFELPDLGPIGANGLANPRDFLIPIAWYEDRQVPGGYTVINKYQGKLFAAKQDVSPFNVVAWHGNYTPYKYNLKNFMVINSVAFDHADPSIFTVLTAKSVRPGVAIADFVIFPPRWGVADKTFRPPYYHRNCMSEFMGLIRGHYEAKQGGFLPGGGSLHSTMTPHGPDADCFEKASKVKLAPERIADGTMAFMFESSLSLAVTKWGLKASRCLDENYHKCWEPLKSHFTPNSRNPAEPN

SEQ ID NO: 762484 - protein, 71 aa, Homo sapiens
KPFSSCNHGHLSYVLEVSKRLLGYCFLGANGLANPRDFLIPIAWYEDRQVPGGYTVINKYQGKLFAAKQVK

SEQ ID NO: 762485 - protein, 338 aa, Homo sapiens
MAELKYISGFGNECSSEDPRCPGSLPEGQNNPQVCPYNLYAEQLSGSAFTCPRSTNKRSWLYRILPSVSHKPFESIDEGHVTHNWDEVDPDPNQLRWKPFEIPKASQKKVDFVSGLHTLCGAGDIKSNNGLAIHIFLCNTSMENRCFYNSDGDFLIVPQKGNLLIYTEFGKMLVQPNEICVIQRGMRFSIDVFEETRGYILEVYGVHFELPDLGPIGANGLANPRDFLIPIAWYEDRQVPGGYTVINKYQGKLFAAKQDVSPFNVVAWHGNYTPYKYNLKNFMVINSVAFDHADPSIFTVLTAKSVRPGVAIADFVIFPPRWGVADKTFRPPYYHNLA

SEQ ID NO: 762486 - protein, 338 aa, Homo sapiens; identical to SEQ ID NO: 762485

SEQ ID NO: 762487 - protein, 304 aa, Homo sapiens
MENRCFYNSDGDFLIVPQKGNLLIYTEFGKMLVQPNEICVIQRGMRFSIDVFEETRGYILEVYGVHFELPDLGPIGANGLANPRDFLIPIAWYEDRQVPGGYTVINKYQGKLFAAKQDVSPFNVVAWHGNYTPYKYNLKNFMVINSVAFDHADPSIFTVLTAKSVRPGVAIADFVIFPPRWGVADKTFRPPYYHRNCMSEFMGLIRGHYEAKQGGFLPGGGSLHSTMTPHGPDADCFEKASKVKLAPERIADGTMAFMFESSLSLAVTKWGLKASRCLDENYHKCWEPLKSHFTPNSRNPAEPN

SEQ ID NO: 762488 - protein, 425 aa, Homo sapiens
MAELKYISGFGNECSSEDPRCPGSLPEGQNNPQVCPYNLYAEQLSGSAFTCPRSTNKRSWLYRILPSVSHKPFESIDEGHVTHNWDEVDPDPNQVTWSCELTGDIKSNNGLAIHIFLCNTSMENRCFYNSDGDFLIVPQKGNLLIYTEFGKMLVQPNEICVIQRGMRFSIDVFEETRGYILEVYGVHFELPDLGPIGANGLANPRDFLIPIAWYEDRQVPGGYTVINKYQGKLFAAKQDVSPFNVVAWHGNYTPYKYNLKNFMVINSVAFDHADPSIFTVLTAKSVRPGVAIADFVIFPPRWGVADKTFRPPYYHRNCMSEFMGLIRGHYEAKQGGFLPGGGSLHSTMTPHGPDADCFEKASKVKLAPERIADGTMAFMFESSLSLAVTKWGLKASRCLDENYHKCWEPLKSHFTPNSRNPAEPN

SEQ ID NO: 762489 - protein, 244 aa, Homo sapiens
MAELKYISGFGNECSSEDPRCPGSLPEGQNNPQVCPYNLYAEQLSGSAFTCPRSTNKRSWLYRILPSVSHKPFESIDEGHVTHNWDEVDPDPNQLRWKPFEIPKASQKKVDFVSGLHTLCGAGDIKSNNGLAIHIFLCNTSMENRCFYNSDGDFLIVPQKGNLLIYTEFGKMLVQPNEICVIQRGMRFSIDVFEETRGYILEVYGVHFELPDLGPIDSLGLPKRMSPRSMLWPGTGIIHPTSTT

SEQ ID NO: 762490 - protein, 274 aa, Homo sapiens
MLVQPNEICVIQRGMRFSIDVFEETRGYILEVYGVHFELPDLGPIGANGLANPRDFLIPIAWYEDRQVPGGYTVINKYQGKLFAAKQDVSPFNVVAWHGNYTPYKYNLKNFMVINSVAFDHADPSIFTVLTAKSVRPGVAIADFVIFPPRWGVADKTFRPPYYHRNCMSEFMGLIRGHYEAKQGGFLPGGGSLHSTMTPHGPDADCFEKASKVKLAPERIADGTMAFMFESSLSLAVTKWGLKASRCLDENYHKCWEPLKSHFTPNSRNPAEPN

SEQ ID NO: 762491 - protein, 213 aa, Homo sapiens
MSLRRPGATSWRSMVSTLSYLTLDQLDVSPFNVVAWHGNYTPYKYNLKNFMVINSVAFDHADPSIFTVLTAKSVRPGVAIADFVIFPPRWGVADKTFRPPYYHRNCMSEFMGLIRGHYEAKQGGFLPGGGSLHSTMTPHGPDADCFEKASKVKLAPERIADGTMAFMFESSLSLAVTKWGLKASRCLDENYHKCWEPLKSHFTPNSRNPAEPN

SEQ ID NO: 762492 - protein, 109 aa, Homo sapiens
MAELKYISGFGNECSSEDPRCPGSLPEGQNNPQVCPYNLYAEQLSGSAFTCPRSTNKRSWLYRILPSVSHKPFESIDEGHVTHNWDEVDPDPNQVTWSCELKLIIYPKP

SEQ ID NO: 762493 - protein, 445 aa, Homo sapiens; identical to SEQ ID NO: 762483

SEQ ID NO: 762494 - protein, 338 aa, Homo sapiens; identical to SEQ ID NO: 762485

SEQ ID NO: 762495 - protein, 248 aa, Homo sapiens
MAELKYISGFGNECSSEDPRCPGSLPEGQNNPQVCPYNLYAEQLSGSAFTCPRSTNKRSWLYRILPSVSHKPFESIDEGHVTHNWDEVDPDPNQLRWKPFEIPKASQKKVDFVSGLHTLCGAGDIKSNNGLAIHIFLCNTSMENRCFYNSDGDFLIVPQKGNLLIYTEFGKMLVQPNEICVIQRGMRFSIDVFEETRGYILEVYGVHFELPDLGPIGCLPVQCCGLARELYTLQVQPEEFHGYQLSGL

SEQ ID NO: 762496 - protein, 260 aa, Homo sapiens [sequence omitted]

SEQ ID NO: 762497 - protein, 163 aa, Homo sapiens
MVINSVAFDHADPSIFTVLTAKSVRPGVAIADFVIFPPRWGVADKTFRPPYYHRNCMSEFMGLIRGHYEAKQGGFLPGGGSLHSTMTPHGPDADCFEKASKVKLAPERIADGTMAFMFESSLSLAVTKWGLKASRCLDENYHKCWEPLKSHFTPNSRNPAEPN

SEQ ID NO: 762498 - protein, 267 aa, Homo sapiens
MAELKYISGFGNECSSEDPRCPGSLPEGQNNPQVCPYNLYAEQLSGSAFTCPRSTNKRSWLYRILPSVSHKPFESIDEGHVTHNWDEVDPDPNQLRWKPFEIPKASQKKVDFVSGLHTLCGAGDIKSNNGLAIHIFLCNTSMENRCFYNSDGDFLIVPQKGNLLIYTEFGKMLVQPNEICVIQDVSPFNVVAWHGNYTPYKYNLKNFMVINSVAFDHAAFMFESSLSLAVTKWGLKASRCLDENYHKCWEPLKSHFTPNSRNPAEPN

SEQ ID NO: 762499 - protein, 678 aa, Homo sapiens
ILSSAPAAARLAAEAEGPRAPERKGFRGTTCPSRAKAGGAGRARLPGPERKPAATRGPVRTGTRPSRGPVSRAHVGCLLLDSAMGPFWARKDDTGCPSSQSVSPVKTPSDAGNSPIGFCPGSDEGFTRKKCTIGMVGEGSIQSSRYKKESKSGLVKPGSEADFSSSSSTGSISAPEVHMSTAGSKRSSSSRNRGPHGRSNGASSHKPGSSPSSPREKDLLSMLCRNQLSPVNIHPSYAPSSPSSSNSGSYKGSDCSPIMRRSGRYMSCGENHGVRPPNPEQYLTPLQQKEVTVRHLKTKLKESERRLHERESEIVELKSQLARMREDWIEEECHRVEAQLALKEARKEIKQLKQVIETMRSSLADKDKGIQKYFVDINIQNKKLESLLQSMEMAHSGSLRDELCLDFPCDSPEKSLTLNPPLDTMADGLSLEEQVTGEGADRELLVGDSIANSTDLFDEIVTATTTESGDLELVHSTPGANVLELLPIVMGQEEGSVVVERAVQTDVVPYSPAISELIQSVLQKLQDPCPSSLASPDESEPDSMESFPESLSALVVDLTPRNPNSAILLSPVETPYANVDAEVHANRLMRELDFAACVEERLDGVIPLARGGVVRQYWSSSFLVDLLAVAAPVVPTVLWAFSTQRGGTDPVYNIGALLRGCCVVALHSLRRTAFRIKT

SEQ ID NO: 762500 - protein, 709 aa, Homo sapiens
GGALEPHQEPPPAARAGSAQSPRSVLAGASSWTAAAAARGAGGQRRDGAPPREQEEHRVQHHDKEISRSRIPRLILRPHMPQQQHKVSPASESPFSEEESREFNPSSSGRSARTVSSNSFCSDDTGCPSSQSVSPVKTPSDAGNSPIGFCPGSDEGFTRKKCTIGMVGEGSIQSSRYKKESKSGLVKPGSEADFSSSSSTGSISAPEVHMSTAGSKRSSSSRNRGPHGRSNGASSHKPGSSPSSPREKDLLSMLCRNQLSPVNIHPSYAPSSPSSSNSGSYKGSDCSPIMRRSGRYMSCGENHGVRPPNPEQYLTPLQQKEVTVRHLKTKLKESERRLHERESEIVELKSQLARMREDWIEEECHRVEAQLALKEARKEIKQLKQVIETMRSSLADKDKGIQKYFVDINIQNKKLESLLQSMEMAHSGSLRDELCLDFPCDSPEKSLTLNPPLDTMADGLSLEEQVTGEGADRELLVGDSIANSTDLFDEIVTATTTESGDLELVHSTPGANVLELLPIVMGQEEGSVVVERAVQTDVVPYSPAISELIQSVLQKLQDPCPSSLASPDESEPDSMESFPESLSALVVDLTPRNPNSAILLSPVETPYANVDAEVHANRLMRELDFAACVEERLDGVIPLARGGVVRQYWSSSFLVDLLAVAAPVVPTVLWAFSTQRGGTDPVYNIGALLRGCCVVALHSLRRTAFRIKT

SEQ ID NO: 762501 - protein, 759 aa, Homo sapiens
TLGHRERQQLLLTQLIGLGDGALSALIEPKKTPCIHRHQQILTGSSGPDLAALWKVLFNQLDRAVCFPHLTLTAILEVPPPGRRQRRREEPAGSGAMGPLRESKKEHRVQHHDKEISRSRIPRLILRPHMPQQQHKVSPASESPFSEEESREFNPSSSGRSARTVSSNSFCSDDTGCPSSQSVSPVKTPSDAGNSPIGFCPGSDEGFTRKKCTIGMVGEGSIQSSRYKKESKSGLVKPGSEADFSSSSSTGSISAPEVHMSTAGSKRSSSSRNRGPHGRSNGASSHKPGSSPSSPREKDLLSMLCRNQLSPVNIHPSYAPSSPSSSNSGSYKGSDCSPIMRRSGRYMSCGENHGVRPPNPEQYLTPLQQKEVTVRHLKTKLKESERRLHERESEIVELKSQLARMREDWIEEECHRVEAQLALKEARKEIKQLKQVIETMRSSLADKDKGIQKYFVDINIQNKKLESLLQSMEMAHSGSLRDELCLDFPCDSPEKSLTLNPPLDTMADGLSLEEQVTGEGADRELLVGDSIANSTDLFDEIVTATTTESGDLELVHSTPGANVLELLPIVMGQEEGSVVVERAVQTDVVPYSPAISELIQSVLQKLQDPCPSSLASPDESEPDSMESFPESLSALVVDLTPRNPNSAILLSPVETPYANVDAEVHANRLMRELDFAACVEERLDGVIPLARGGVVRQYWSSSFLVDLLAVAAPVVPTVLWAFSTQRGGTDPVYNIGALLRGCCVVALHSLRRTAFRIKT

SEQ ID NO: 762502 - protein, 533 aa, Homo sapiens
MFAMKVYGAYLLSSEADFSSSSSTGSISAPEVHMSTAGSKRSSSSRNRGPHGRSNGASSHKPGSSPSSPREKDLLSMLCRNQLSPVNIHPSYAPSSPSSSNSGSYKGSDCSPIMRRSGRYMSCGENHGVRPPNPEQYLTPLQQKEVTVRHLKTKLKESERRLHERESEIVELKSQLARMREDWIEEECHRVEAQLALKEARKEIKQLKQVIETMRSSLADKDKGIQKYFVDINIQNKKLESLLQSMEMAHSGSLRDELCLDFPCDSPEKSLTLNPPLDTMADGLSLEEQVTGEGADRELLVGDSIANSTDLFDEIVTATTTESGDLELVHSTPGANVLELLPIVMGQEEGSVVVERAVQTDVVPYSPAISELIQSVLQKLQDPCPSSLASPDESEPDSMESFPESLSALVVDLTPRNPNSAILLSPVETPYANVDAEVHANRLMRELDFAACVEERLDGVIPLARGGVVRQYWSSSFLVDLLAVAAPVVPTVLWAFSTQRGGTDPVYNIGALLRGCCVVALHSLRRTAFRIKT

SEQ ID NO: 762503 - protein, 641 aa, Homo sapiens
GGALEPHQEPPPAARAGSAQSPRSVLAGASSWTAAAAARGAGGQRRDGAPPREQDDTGCPSSQSVSPVKTPSDAGNSPIGFCPGSDEGFTRKKCTIGMVGEGSIQSSRYKKESKSGLVKPGSEADFSSSSSTGSISAPEVHMSTAGSKRSSSSRNRGPHGRSNGASSHKPGSSPSSPREKDLLSMLCRNQLSPVNIHPSYAPSSPSSSNSGSYKGSDCSPIMRRSGRYMSCGENHGVRPPNPEQYLTPLQQKEVTVRHLKTKLKESERRLHERESEIVELKSQLARMREDWIEEECHRVEAQLALKEARKEIKQLKQVIETMRSSLADKDKGIQKYFVDINIQNKKLESLLQSMEMAHSGSLRDELCLDFPCDSPEKSLTLNPPLDTMADGLSLEEQVTGEGADRELLVGDSIANSTDLFDEIVTATTTESGDLELVHSTPGANVLELLPIVMGQEEGSVVVERAVQTDVVPYSPAISELIQSVLQKLQDPCPSSLASPDESEPDSMESFPESLSALVVDLTPRNPNSAILLSPVETPYANVDAEVHANRLMRELDFAACVEERLDGVIPLARGGVVRQYWSSSFLVDLLAVAAPVVPTVLWAFSTQRGGTDPVYNIGALLRGCCVVALHSLRRTAFRIKT

SEQ ID NO: 762504 - protein, 773 aa, Homo sapiens
ILSSAPAAARLAAEAEGPRAPERKGFRGTTCPSRAKAGGAGRARLPGPERKPAATRGPVRTGTRPSRGPVSRAHVGCLLLDSAMGPFWARKGASSWTAAAAARGAGGQRRDGAPPREQEEHRVQHHDKEISRSRIPRLILRPHMPQQQHKVSPASESPFSEEESREFNPSSSGRSARTVSSNSFCSDDTGCPSSQSVSPVKTPSDAGNSPIGFCPGSDEGFTRKKCTIGMVGEGSIQSSRYKKESKSGLVKPGSEADFSSSSSTGSISAPEVHMSTAGSKRSSSSRNRGPHGRSNGASSHKPGSSPSSPREKDLLSMLCRNQLSPVNIHPSYAPSSPSSSNSGSYKGSDCSPIMRRSGRYMSCGENHGVRPPNPEQYLTPLQQKEVTVRHLKTKLKESERRLHERESEIVELKSQLARMREDWIEEECHRVEAQLALKEARKEIKQLKQVIETMRSSLADKDKGIQKYFVDINIQNKKLESLLQSMEMAHSGSLRDELCLDFPCDSPEKSLTLNPPLDTMADGLSLEEQVTGEGADRELLVGDSIANSTDLFDEIVTATTTESGDLELVHSTPGANVLELLPIVMGQEEGSVVVERAVQTDVVPYSPAISELIQSVLQKLQDPCPSSLASPDESEPDSMESFPESLSALVVDLTPRNPNSAILLSPVETPYANVDAEVHANRLMRELDFAACVEERLDGVIPLARGGVVRQYWSSSFLVDLLAVAAPVVPTVLWAFSTQRGGTDPVYNIGALLRGCCVVALHSLRRTAFRIKT

SEQ ID NO: 762505 - protein, 709 aa, Homo sapiens; identical to SEQ ID NO: 762500

SEQ ID NO: 762506 - protein, 557 aa, Homo sapiens
MSVLFFYIMRYKQSDPENPDNDRFVLAKRLSFVDVATGWLGQGLGVACGMAYTGKYFDRASYRVFCLMSDGESSEGSVWEAMAFASYYSLDNLVAIFDVNRLGHSGALPAEHCINIYQRRCEAFGWNTYVVDGRDVEALCQVFWQASQVKHKPTAVVAKTFKGRGTPSIEDAESWHAKPMPRERADAIIKLIESQIQTSRNLDPQPPIEDSPEVNITDVRMTSPPDYRVGDKIATRKACGLALAKLGYANNRVVVLDGDTRYSTFSEIFNKEYPERFIECFMAEQNMVSVALGCASRGRTIAFASTFAAFLTRAFDHIRIGGLAESNINIIGSHCGVSVGDDGASQMALEDIAMFRTIPKCTIFYPTDAVSTEHAVALAANAKGMCFIRTTRPETMVIYTPQERFEIGQAKGVSMLQDSWSSVISYQKVLRHCVSDKVTVIGAGITVYEALAAADELSKQDIFIRVIDLFTIKPLDVATIVSSAKATEGRIITVEDHYPQGGIGEAVCAAVSMDPDIQVHSLAVSGVPQSGKSEELLDMYGISARHIIVAVKCMLLN

SEQ ID NO: 762507 - protein, 540 aa, Homo sapiens
MSVLFFYIMRYKQSDPENPDNDRFVLAKRLSFVDVATGWLGQGLGVACGMAYTGKYFDRASYRVFCLMSDGESSEGSVWEAMAFASYYSLDNLVAIFDVNRLGHSGALPAEHCINIYQRRCEAFGWNTYVVDGRDVEALCQVFWQASQVKHKPTAVVAKTFKGRGTPSIEDAESWHAKPMPRERADAIIKLIESQIQTSRNLDPQPPIEDSPEVNITDVRMTSPPDYRVGDKIATRKACGLALAKLGYANNRVVVLDGDTRYSTFSEIFNKEYPERFIECFMAEQNMVSVALGCASRGRTIAFASTFAAFLTRAFDHIRIGGLAESNINIIGSHCGVSVGDDGASQMALEDIAMFRTIPKCTIFYPTDAVSTEHAVALAANAKGMCFIRTTRPETMVIYTPQERFEIGQAKVLRHCVSDKVTVIGAGITVYEALAAADELSKQDIFIRVIDLFTIKPLDVATIVSSAKATEGRIITVEDHYPQGGIGEAVCAAVSMDPDIQVHSLAVSGVPQSGKSEELLDMYGISARHIIVAVKCMLLN

SEQ ID NO: 762508 - protein, 613 aa, Homo sapiens
MADAEARAEFPEEARPDRGTLQVLQDMASRLRIHSIRATCSTSSGHPTSCSSSSEIMSVLFFYIMRYKQSDPENPDNDRFVLAKRLSFVDVATGWLGQGLGVACGMAYTGKYFDRASYRVFCLMSDGESSEGSVWEAMAFASYYSLDNLVAIFDVNRLGHSGALPAEHCINIYQRRCEAFGWNTYVVDGRDVEALCQVFWQASQVKHKPTAVVAKTFKGRGTPSIEDAESWHAKPMPRERADAIIKLIESQIQTSRNLDPQPPIEDSPEVNITDVRMTSPPDYRVGDKIATRKACGLALAKLGYANNRVVVLDGDTRYSTFSEIFNKEYPERFIECFMAEQNMVSVALGCASRGRTIAFASTFAAFLTRAFDHIRIGGLAESNINIIGSHCGVSVGDDGASQMALEDIAMFRTIPKCTIFYPTDAVSTEHAVALAANAKGMCFIRTTRPETMVIYTPQERFEIGQAKGVSMLQDSWSSVISYQKVLRHCVSDKVTVIGAGITVYEALAAADELSKQDIFIRVIDLFTIKPLDVATIVSSAKATEGRIITVEDHYPQGGIGEAVCAAVSMDPDIQVHSLAVSGVPQSGKSEELLDMYGISARHIIVAVKCMLLN

SEQ ID NO: 762509 - protein, 528 aa, Homo sapiens
RDIAGQALAFVQDLVTALLNFHTYTEQRIQIFPVDSAIDTISPLNQKFSQYLHENASYVRPLEEGMLHLFESITEDTVTVLETTVKLKTFSEHLTSYICFLRKILPYQLKSLEEECESSLCTSALRARNLELSQDMKKMTAVFEKLQTYIALLALPSTEPDGLLRTNYSSVLTNVGAALHGFHDVMKDISKHYSQKAAIEHELPTATQKLITTNDCILSSVVALTNGAGKIASFFSNNLDYFIASLSYGPKAASGFISPLSAECMLQYKKKAAAYMKSLRKPLLESVPYEEALANRRILLSSTESREGLAQQVQQSLEKISKLEQEKEHWMLEAQLAKIKLEKENQRIADKLKNTGSAQLVGLAQENAAVSNTAGQDEATAKAVLEPIQSTSLIGTLTRTSDSEVPDVESREDLIKNHYMARIVELTSQLQLADSKSVHFYAECRALSKRLALAEKSKEALTEEMKLASQNISRLQDELTTTKRSYEDQLSMMSDHLCSMNETLSKQREEIDTLKMSSKGNSKKNKSR

SEQ ID NO: 762510 - protein, 343 aa, Homo sapiens [sequence omitted]

SEQ ID NO: 762511 - protein, 198 aa, Homo sapiens
MLEAQLAKIKLEKENQRIADKLKNTGSAQLVGLAQENAAVSNTAGQDEATAKAVLEPIQSTSLIGTLTRTSDSEVPDVESREDLIKNHYMARIVELTSQLQLADSKSVHFYAECRALSKRLALAEKSKEALTEEMKLASQNISRLQDELTTTKRSYEDQLSMMSDHLCSMNETLSKQREEIDTLKMSSKGNSKKNKSR

SEQ ID NO: 762512 - protein, 517 aa, Homo sapiens
RDIAGQALAFVQDLVTALLNFHTYTEQRIQIFPVDSAIDTISPLNQKFSQYLHENASYVRPLEEGMLHLFESITEDTVTVLETTVKLKTFSEHLTSYICFLRKILPYQLKSLEEECESSLCTSALRARNLELSQDMKKMTAVFEKLQTYIALLALPSTEPDGLLRTNYSSVLTNVGAALHGFHDVMKDISKHYSQKAAIEHELPTATQKLITTNDCILSSVVALTNGAGKIASFFSNNLDYFIASLSYGPKAASGFISPLSAECMLQYKKKAAAYMKSLRKPLLESVPYEEALANRRILLSSTESREGLAQQVQQSLEKISKLEQEKEHWMLEAQLAKIKLEKENQRIADKLKNTGSAQLVGLAQENAAVSNTAGQDEATAKAVLEPIQSTSLVPDVESREDLIKNHYMARIVELTSQLQLADSKSVHFYAECRALSKRLALAEKSKEALTEEMKLASQNISRLQDELTTTKRSYEDQLSMMSDHLCSMNETLSKQREEIDTLKMSSKGNSKKNKSR

SEQ ID NO: 762513 - protein, 109 aa, Homo sapiens [sequence omitted]

SEQ ID NO: 762514 - protein, 524 aa, Homo sapiens
RDIAGQALAFVQDLVTALLNFHTYTEQRIQIFPVDSAIDTISPLNQKFSQYLHENASYVRPLEEGMLHLFESITEDTVTVLETTVKLKTFSEHLTSYICFLRKILPYQLKSLEEECESSLCTSALRARNLELSQDMKKMTAVFEKLQTYIALLALPSTEPDGLLRTNYSSVLTNVGAALHGFHDVMKDISKHYSQKAAIEHELPTATQKLITTNDCILSSVVALTNGAGKIASFFSNNLDYFIASLSYGPKAASGFISPLSAECMLQYKKKAAAYMKSLRKPLLESVPYEEALANRRILLSSTESREGLAQQVQQSLEKISKLEQEKEHWMLEAQLAKIKLEKENQRIADKLKNTGSAQLVGLAQENAAVSNTAGQDEATAKAVLEPIQSTSLIGTLTRTSDSEVPDVESREDLIKNHYMARIVELTSQLQLADSKSVHFYAECRALSKRLALAEKSKEALTEEMKLASQNISRLQDELTTTKRSYEDQLSMMSDHLCSMNETLSKQREEIDTLKMSSKVCEVR

SEQ ID NO: 762515 - protein, 190 aa, Homo sapiens
RDIAGQALAFVQDLVTALLNFHTYTEQRIQIFPVDSAIDTISPLNQKFSQYLHENASYVRPLEEGMLHLFESITEDTVTVLETTVKLKTFSEHLTSYICFLRKILPYQLKSLEEECESSLCTSALRARNLELSQDMKKMTAVFEKLQTYIALLALPSTEPDGLLRTNYSSVLTNVGAALHGFHDVMKGRP

SEQ ID NO: 762516 - protein, 349 aa, Homo sapiens
MPVERMRMRPWLEEQINSNTIPGLKWLNKEKKIFQIPWMHAARHGWDVEKDAPLFRNWAIHTGKHQPGVDKPDPKTWKANFRCAMNSLPDIEEVKDKSIKKGNNAFRVYRMLPLSERPSKKGKKPKTEKEDKVKHIKQEPVESSLGLSNGVSDLSPEYAVLTSTIKNEVDSTVNIIVVGQSHLDSNIENQEIVTNPPDICQVVEVTTESDEQPVSMSELYPLQISPVSSYAESETTDSVPSDEESAEGRPHWRKRNIEGKQYLSNMGTRGSYLLPGMASFVTSNKPDLQVTIKEESNPVPYNSSWPPFQDLPLSSSMTPASSSSRPDRETRASVIKKTSDITQARVKSC

SEQ ID NO: 762517 - protein, 36 aa, Homo sapiens
MPVERMRMRPWLEEQINSNTIPGLKWLNKTRSPSVT

SEQ ID NO: 762518 - protein, 349 aa, Homo sapiens; identical to SEQ ID NO: 762516

SEQ ID NO: 762519 - protein, 349 aa, Homo sapiens; identical to SEQ ID NO: 762516

SEQ ID NO: 762520 - protein, 166 aa, Homo sapiens
DRYRVIAVPEYPQYYICQVVEVTTESDEQPVSMSELYPLQISPVSSYAESETTDSVPSDEESAEGRPHWRKRNIEGKQYLSNMGTRGSYLLPGMASFVTSNKPDLQVTIKEESNPVPYNSSWPPFQDLPLSSSMTPASSSSRPDRETRASVIKKTSDITQARVKSC

SEQ ID NO: 762521 - protein, 349 aa, Homo sapiens; identical to SEQ ID NO: 762516

SEQ ID NO: 762522 - protein, 117 aa, Homo sapiens
KFAAARPYNSSCSPFKDLPLSSSMTPASSSSRPDRETRLLEVTKDAMRHAVSFTDLQVTIKEESNPVPYNSSWPPFQDLPLSSSMTPASSSSRPDRETRASVIKKTSDITQARVKSC

SEQ ID NO: 762523 - protein, 290 aa, Homo sapiens
MPVERMRMRPWLEEQINSNTIPGLKWLNKEKKIFQIPWMHAARHGWDVEKDAPLFRNWAIHTGKHQPGVDKPDPKTWKANFRCAMNSLPDIEEVKDKSIKKGNNAFRVYRMLPLSERPSKKVVGQSHLDSNIENQEIVTNPPDICQVVEVTTESDEQPVSMSELYPLQISPVSSYAESETTDSVPSDEESAEGRPHWRKSGNPWAQLREDFCLSSSALIGLLVIAVAIATVIVISLVMLRKRQYGTISHGIVEVDPMLTPEERHLYKMQNHGYENPYLHTWSYFAGDPLG

SEQ ID NO: 762524 - protein, 349 aa, Homo sapiens; identical to SEQ ID NO: 762516

SEQ ID NO: 762525 - protein, 349 aa, Homo sapiens; identical to SEQ ID NO: 762516

SEQ ID NO: 762526 - protein, 230 aa, Homo sapiens [sequence omitted]

SEQ ID NO: 762527 - protein, 349 aa, Homo sapiens; identical to SEQ ID NO: 762516

SEQ ID NO: 762528 - protein, 276 aa, Homo sapiens
MPVERMRMRPWLEEQINSNTIPGLKWLNKEKKIFQIPWMHAARHGWDVEKDAPLFRNWAIHTGKHQPGVDKPDPKTWKANFRCAMNSLPDIEEVKDKSIKKGNNAFRVYRMLPLSERPSKKGKKPKTEKEDKVKHIKQEPVESSLGLSNGVSDLSPEYAVLTSTIKNEVDSTVNIIVVGQSHLDSNIENQEIVTNPPDICQVVEVTTESDEQPDLQVTIKEESNPVPYNSSWPPFQDLPLSSSMTPASSSSRPDRETRASVIKKTSDITQARVKSC

SEQ ID NO: 762529 - protein, 345 aa, Homo sapiens
MPVERMRMRPWLEEQINSNTIPGLKWLNKEKKIFQIPWMHAARHGWDVEKDAPLFRNWAIHTGKHQPGVDKPDPKTWKANFRCAMNSLPDIEEVKDKSIKKGNNAFRVYRMLPLSERPSKKGKKPKTEKEDKVKHIKQEPVESSLGLSNGVSDLSPEYAVLTSTIKNEVDSTVNIIVVGQSHLDSNIENQEIVTNPPDICQVVEVTTESDEQPVSMSELYPLQISPVSSYAESETTDSVPSDEESAEGRPHWRKSGNPWAQLREDFCLSSSALIGLLVIAVAIATVIVISLVMLRKRQYGTISHGIVEVDPMLTPEERHLYKMQNHGYENPYLHTWSYFAGDPLG

SEQ ID NO: 762530 - protein, 699 aa, Homo sapiens
MRPLTCNSFTESLPEQYYSLTWFLSPILGLIFTPLIGSASDRCTLSWGRRRPFILALCVGVLFGVALFLNGSAIGLALGDVPNRQPIGIVLTVLGVVVLDFSADATEGPIRAYLLDVVDSEEQDMALNIHAFSAGLGGAIGYVLGGLDWTQTFLGSWFRTQNQVLFFFAAIIFTVSVALHLFSIDEEQYSPQQERSAEEPGALDGGEPHGVPAFPDEVQSEHELALDYPDVDIMRSKSDSALHVPDTALDLEPELLFLHDIEPSIFHDASYPATPRSTSQELAKTKLPRLATFLKEAAKEDETLLDNHLNEAKVPNGSGSPTKDALGGYTRVDTKPSATSSSMRRRRHAFRRQASSTFSYYGKLGSHCYRYRRANAVVLIKPSRSMSDLYDMQKRQRQHRHRNQSGATTSSGDTESEEGEGETTVRLLWLSMLKMPRELMRLCLCHLLTWFSVIAEAVFYTDFMGQVIFEGDPKAPSNSTAWQAYNAGVKMGCWGLVIYAATGAICSALLQKYLDNYDLSVRVIYVLGTLGFSVGTAVMAMFPNVYVAMVTISTMGIVSMSISYCPYALLGQYHDIKQYIHHSPGNSKRGFGIDCAILSCQVYISQILVASALGGVVDAVGTVRVIPMVASVGSFLGFLTATFLVIYPDVSEEAKEEQKGLSSPLAGEGRAGGNSEKPTVLKLTRKEGLQGPVETESVV

SEQ ID NO: 762531 - protein, 582 aa, Homo sapiens
MRPLTCNSFTESLPEQYYSLTWFLSPILGLIFTPLIGSASDRCTLSWGRRRPFILALCVGVLFGVALFLNGSAIGLALGDVPNRQPIGIVLTVLGVVVLDFSADATEGPIRAYLLDVVDSEEQDMALNIHAFSAGLGGAIGYVLGGLDWTQTFLGSWFRTQNQVLFFFAAIIFTVSVALHLFSIDEEQYSPQQERSAEEPGALDGGEPHGVPAFPDEVQSEHELALDYPDVDIMRSKSDSALHVPDTALDLEPELLFLHDIEPSIFHDASYPATPRSTSQELAKTKLPRLATFLKEAAKEDETLLDNHLNEAKVPNGSGSPTKDALGGYTRVDTKPSATSSSMRRRRHAFRRQASSTFSYYGKLGSHCYRYRRANAVVLIKPSRSMSDLYDMQKRQRQHRHRNQSGATTSSGDTESEEGEGETTVRLLWLSMLKMPRELMRLCLCHLLTWFSVIAEAVFYTDFMGQVIFEGDPKAPSNSTAWQAYNAGVKMGCWGLVIYAATGAICSALLQKYLDNYDLSVRVIYVLGTLGFSVGTAVMAMFPNVYVAMVTISTMGIVSMSISYCPYALLGQYHDIKQVRPP

SEQ ID NO: 762532 - protein, 699 aa, Homo sapiens; identical to SEQ ID NO: 762530

SEQ ID NO: 762533 - protein, 209 aa, Homo sapiens
MGRRGLVIYAGTGAICSALLQKYLDNYDLSVRVIYVLGTLGFSVGTAVMAMFPNVYVAMVTISTMGIVSMSISYCPYALLGQYHDIKQYIHHSPGNSKRGFGIDCAILSCQVYISQILVASALGGVVDAVGTVRVIPMVASVGSFLGFLTATFLVIYPDVSEEAKEEQKGLSSPLAGEGRAGGNSEKPTVLKLTRKEGLQGPVETESVV

SEQ ID NO: 762534 - protein, 757 aa, Homo sapiens
QLSRPGPAQALRPRRRGDGHLPPSGEAGGLQSPDPGKSHHWSAGRPVRTRRPLKGPGGSGGDLGGRRGGESGAARWGIEMGFHHVGQIGLGFLTSSDPKCWDYRHEPLCLANSVDFSSENCILDSDTATKTNCCCPDEYTVARLTQADRKQSEGYQKGADLNTSFSGVDEHAPISYEDFVNFPDIHHSNEEYFKKVEELKAAHIETMAKLEKMYQDKLHLKEVQPVVIREDSLSDSSRSVSEKNSYHPVSLMTSFSEPDLGQSSSLYVSSSEEELPNLEKEYPRKNRMMTYAKELINNMWTDFCVEDYIRCKDTGFHAAEKRRKKRKEWVPTITVPEPFQMMIREQKKKEESMKSKSDIEMVHKALKKQEEDPEYKKKFRANPVPASVFLPLYHDLVKQKEERRRSLKEKSKEALLASQKPFKFIAREEQKRAAREKQLRDFLKYKKKTNRFKARPIPRSTYGSTTNDKLKEEELYRNLRTQLRAQEHLQNSSPLPCRSACGCRNPRCPEQAVKLKCKHKVRCPTPDFEDLPERYQKHLSEHKSPKLLTVCKPFDLHASPHASIKREKILADIEADEENLKETRWPYLSPRRKSPVRCAGVNPVPCNCNPPVPTVSSRGREQAVRKSEKERMREYQRELEEREEKLKKRPLLFERVAQKNARMAAEKHYSNTLKALGISDEFVSKKGQSGKVLEYFNNQETKSVTEDKESFNEEEKIEERENGEENYFIDTNSQDSYKEKDEANEESEEEKSVEESH

SEQ ID NO: 762535 - protein, 659 aa, Homo sapiens
TSFPVPGQRRRSGLGGGAMATSHRVAKLVASSLQTPVNPITGARVAQYEREDPLKALAAAEAILEDEEEEKVAQPAGASADLNTSFSGVDEHAPISYEDFVNFPDIHHSNEEYFKKVEELKAAHIETMAKLEKMYQDKLHLKEVQPVVIREDSLSDSSRACLGQSSSLYVSSSEEELPNLEKEYPRKNRMMTYAKELINNMWTDFCVEDYIRCKDTGFHAAEKRRKKRKEWVPTITVPEPFQMMIREQKKKEESMKSKSDIEMVHKALKKQEEDPEYKKKFRANPVPASVFLPLYHDLVKQKEERRRSLKEKSKEALLASQKPFKFIAREEQKRAAREKQLRDFLKYKKKTNRFKARPIPRSTYGSTTNDKLKEEELYRNLRTQLRAQEHLQNSSPLPCRSACGCRNPRCPEQAVKLKCKHKVRCPTPDFEDLPERYQKHLSEHKSPKLLTVCKPFDLHASPHASIKREKILADIEADEENLKETRWPYLSPRRKSPVRCAGVNPVPCNCNPPVPTVSSRGREQAVRKSEKERMREYQRELEEREEKLKKRPLLFERVAQKNARMAAEKHYSNTLKALGISDEFVSKKGQSGKVLEYFNNQETKSVTEDKESFNEEEKIEERENGEENYFIDTNSQDSYKEKDEANEESEEEKSVEESH

SEQ ID NO: 762536 - protein, 506 aa, Homo sapiens [sequence omitted]

SEQ ID NO: 762537 - protein, 126 aa, Homo sapiens [sequence omitted]

SEQ ID NO: 762538 - protein, 551 aa, Homo sapiens
MAKLEKMYQDKLHLKEVQPVVIREDSLSDSSRSVSEKNSYHPVSLMTSFSEPDLGQSSSLYVSSSEEELPNLEKEYPRKNRMMTYAKELINNMWTDFCVEDYIRCKDTGFHAAEKRRKKRKEWVPTITVPEPFQMMIREQKKKEESMKSKSDIEMVHKALKKQEEDPEYKKKFRANPVPASVFLPLYHDLVKQKEERRRSLKEKSKEALLASQKPFKFIAREEQKRAAREKQLRDFLKYKKKTNRFKARPIPRSTYGSTTNDKLKEEELYRNLRTQLRAQEHLQNSSPLPCRSACGCRNPRCPEQAVKLKCKHKVRCPTPDFEDLPERYQKHLSEHKSPKLLTVCKPFDLHASPHASIKREKILADIEADEENLKETRWPYLSPRRKSPVRCAGVNPVPCNCNPPVPTVSSRGREQAVRKSEKERMREYQRELEEREEKLKKRPLLFERVAQKNARMAAEKHYSNTLKALGISDEFVSKKGQSGKVLEYFNNQETKSVTEDKESFNEEEKIEERENGEENYFIDTNSQDSYKEKDEANEESEEEKSVEESH

SEQ ID NO: 762539 - protein, 277 aa, Homo sapiens
MASYYEILDVPRSASADDIKKAYRRKALQWHPDKNPDNKEFAEKKFKEVAEAYEVLSDKHKREIYDRYGREGLTGTGTGPSRAEAGSGGPGFTFTFRSPEEVFREFFGSGDPFAELFDDLGPFSELQNRGSRHSGPFFTFSSSFPGHSDFSSSSFSFSPGAGAFRSVSTSTTFVQGRRITTRRIMENGQERVEVEEDGQLKSVTINGVPDDLALGLELSRREQQPSVTSRSGGTQVQQTPASCPLDSDLSEDEDLQLAMAYSLSEMEAAGKKPADVF

SEQ ID NO: 762540 - protein, 324 aa, Homo sapiens
MASYYEILDVPRSASADDIKKAYRRKALQWHPDKNPDNKEFAEKKFKEVAEAYEVLSDKHKREIYDRYGREGLTGTGTGPSRAEAGSGGPGFTFTFRSPEEVFREFFGSGDPFAELFDDLGPFSELQNRGSRHSGPFFTFSSSFPGHSDFSSSSFSFSPGAGAFRSVSTSTTFVQGRRITTRRIMENGQERVEVEEDGQLKSVTINGVPDDLALGLELSRREQQPSVTSRSGGTQVQQTPASCPLDSDLSEDEDLQLAMAYSLSEMEAAGKKPAGGREAQHRRQGRPKAQHQDPGLGGTQEGARGEATKRSPSPEEKASRCLIL

SEQ ID NO: 762541 - protein, 277 aa, Homo sapiens; identical to SEQ ID NO: 762539

SEQ ID NO: 762542 - protein, 277 aa, Homo sapiens; identical to SEQ ID NO: 762539

SEQ ID NO: 762543 - protein, 183 aa, Homo sapiens
WVDRGLWVDRGLWVDRGLWTELTNDLGPFSELQNRGSRHSGPFFTFSSSFPGHSDFSSSSFSFSPGAGAFRSVSTSTTFVQGRRITTRRIMENGQERVEVEEDGQLKSVTINGVPDDLALGLELSRREQQPSVTSRSGGTQVQQTPASCPLDSDLSEDEDLQLAMAYSLSEMEAAGKKPADVF

SEQ ID NO: 762544 - protein, 105 aa, Homo sapiens
PQRSLSLPHAGIMENGQERVEVEEDGQLKSVTINGVPDDLALGLELSRREQQPSVTSRSGGTQVQQTPASCPLDSDLSEDEDLQLAMAYSLSEMEAAGKKPADVF

SEQ ID NO: 762545 - protein, 71 aa, Homo sapiens
YGLSSIQALGRLSRREQQPSVTSRSGGTQVQQTPASCPLDSDLSEDEDLQLAMAYSLSEMEAAGKKPADVF

SEQ ID NO: 762546 - protein, 111 aa, Homo sapiens
WYGPEVRLDTVPGGGQGRGAAGGRDSWRRRCGRGPGSGWGPWIGLLELGGPDRAPGPGRRDSSWPRPAGADKAAGGSLVTGRKQSPLCSASNWERLPPPGEGDCCSHRVGL

SEQ ID NO: 762547 - protein, 324 aa, Homo sapiens; identical to SEQ ID NO: 762540

SEQ ID NO: 762548 - protein, 78 aa, Homo sapiens
EPAFSPSLVVSAPLTHACAHSWAGRVLRSSREPGCGCQTVPGGGQGRGAAGGRDSWRRSPKEARLTTDQLPWHPTTRS

SEQ ID NO: 762549 - protein, 153 aa, Homo sapiens
MASYYEILDVPRSASADDIKKAYRRKALQWHPDKNPDNKEFAEKKFKEVAEAYEVLSDKHKREIYDRYGREGLTGTGTGPSRAEAGSGGPGFTFTFRSPEEVFREFFGSGDPFAELFDEKTEAQLIAQSHITHGRAGLLAVSACHRVMMICLY

SEQ ID NO: 762550 - protein, 54 aa, Homo sapiens
DLGPFSELQNRGSRHSGPFFTFSSSFPGHSGKFCPFPRLQAPIPGTPGLSLLLF

SEQ ID NO: 762551 - protein, 324 aa, Homo sapiens; identical to SEQ ID NO: 762540

SEQ ID NO: 762552 - protein, 324 aa, Homo sapiens; identical to SEQ ID NO: 762540

SEQ ID NO: 762553 - protein, 324 aa, Homo sapiens; identical to SEQ ID NO: 762540

SEQ ID NO: 762554 - protein, 256 aa, Homo sapiens
MYRRKALQWHPDKNPDNKEFAEKKFKEVAEAYEVLSDKHKREIYDRYGREGLTGTGTGPSRAEAGSGGPGFTFTFRSPEEVFREFFGSGDPFAELFDDLGPFSELQNRGSRHSGPFFTFSSSFPGHSDFSSSSFSFSPGAGAFRSVSTSTTFVQGRRITTRRIMENGQERVEVEEDGQLKSVTINGVPDDLALGLELSRREQQPSVTSRSGGTQVQQTPASCPLDSDLSEDEDLQLAMAYSLSEMEAAGKKPADVF

SEQ ID NO: 762555 - protein, 259 aa, Homo sapiens
MASYYEILDVPRSASADDIKKAYRRKALQWHPDKNPDNKEFAEKKFKEVAEAYEVLSDRTGPSRAEAGSGGPGFTFTFRSPEEVFREFFGSGDPFAELFDDLGPFSELQNRGSRHSGPFFTFSSSFPGHSDFSSSSFSFSPGAGAFRSVSTSTTFVQGRRITTRRIMENGQERVEVEEDGQLKSVTINGVPDDLALGLELSRREQQPSVTSRSGGTQVQQTPASCPLDSDLSEDEDLQLAMAYSLSEMEAAGKKPADVF

SEQ ID NO: 762556 - protein, 385 aa, Homo sapiens
MASYYEILDVPRSASADDIKKAYRRKALQWHPDKNPDNKEFAEKKFKEVAEAYEVLSDKHKREIYDRYGREGLTGTGTGPSRAEAGSGGPGFTFTFRSPEEVFREFFGSGDPFAELFDDLGPFSELQNRGSRHSGPFFTFSSSFPGHSDFSSSSFSFSPGAGAFRSVSTSTTFVQGRRITTRSESSFWGHRGVRGLLGSCVQIESWLLEGRAQSALSTAGGQNWDQRLQDSVTARCLNCAVSHRIMENGQERVEVEEDGQLKSVTINGVPDDLALGLELSRREQQPSVTSRSGGTQVQQTPASCPLDSDLSEDEDLQLAMAYSLSEMEAAGKKPAGGREAQHRRQGRPKAQHQDPGLGGTQEGARGEATKRSPSPEEKASRCLIL

SEQ ID NO: 762557 - protein, 179 aa, Homo sapiens
KDLRCSSHLAYRTIAWVDMNPRHTGCAGLEETCEGAWSGKQFYNSGYSLFSSTVSHDPPVNGVPDDLALGLELSRREQQPSVTSRSGGTQVQQTPASCPLDSDLSEDEDLQLAMAYSLSEMEAAGKKPAGGREAQHRRQGRPKAQHQDPGLGGTQEGARGEATKRSPSPEEKASRCLIL

SEQ ID NO: 762558 - protein, 277 aa, Homo sapiens; identical to SEQ ID NO: 762539

SEQ ID NO: 762559 - protein, 147 aa, Homo sapiens
MYPGTVYQKYEPIFFQSIGNPFIFRCLDGVLIDGNDKGISKVVYRSCNGRDRLGPLKMSDSTWLTSEIHNPLAVGQYVNNCSNDRAANVCYQEFDVPAVFPIELKQYLPNIAYSYDKQSPLRCVVLVALRDINQGEELFSNYYTIVS

SEQ ID NO: 762560 - protein, 50 aa, Homo sapiens
MVGFGLGTLRYVPEESKDKVISDEDVLGTLLKVFQALFLNDFNKQSEILK

SEQ ID NO: 762561 - protein, 146 aa, Homo sapiens
VEFTIPLRENWALPFFAIQIAAITYFLRPNLQPLSERLTLLAIFISTFLFSLTWQFNQFMMLMQALVLFTLDSLDMLPAVKATWLYGIQITSLLLVCILQFFNSMILGSLLISFNLSVFIARKLQKNLKTGSFLNRLGKLLLHLFM

SEQ ID NO: 762562 - protein, 222 aa, Homo sapiens
MESPGESGAGSPGAPSPSSFTTGHLAREKPAQDPLYDVPNASGGQAGGPQRPGRVVSLRERLLLTRPVWLQLQANAAAALHMLRTEPPGTFLVRKSNTRQCQALCMRLPEASGPSFVSSHYILESPGGVSLEGSELMFPDLVQLICAYCHTRDILLLPLQLPRAIHHAATHKELEAISHLGIGKGFLPPIAQMNKLRPRGRQGSQHTARSPCLALVGKLPLT

SEQ ID NO: 762563 - protein, 783 aa, Homo sapiens
MESPGESGAGSPGAPSPSSFTTGHLAREKPAQDPLYDVPNASGGQAGGPQRPGRVVSLRERLLLTRPVWLQLQANAAAALHMLRTEPPGTFLVRKSNTRQCQALCMRLPEASGPSFVSSHYILESPGGVSLEGSELMFPDLVQLICAYCHTRDILLLPLQLPRAIHHAATHKELEAISHLGIEFWSSSLNIKAQRGPAGGPVLPQLKARSPQELDQGTGAALCFFNPLFPGDLGPTKREKFKRSFKVRVSTETSSPLSPPAVPPPPVPVLPGAVPSQTERLPPCQLLRRESSVGYRVPAGSGPSLPPMPSLQEVDCGSPSSSEEEGVPGSRGSPATSPHLGRRRPLLRSMSAAFCSLLAPERQVGRAAAALMQDRHTAAGQLVQDLLTQVRAGPEPQELQGIRQALSRARAMLSAELGPEKLLSPKRLEHVLEKSLHCSVLKPLRPILAARLRRRLAADGSLGRLAEGLRLARAQGPGAFGSHLSLPSPVELEQVRQKLLQLLRTYSPSAQVKRLLQACKLLYMALRTQEGEGAGADEFLPLLSLVLAHCDLPELLLEAEYMSELLEPSLLTGEGGYYLTSLSASLALLSGLGQAHTLPLSPVQELRRSLSLWEQRRLPATHCFQHLLRVAYQDPSSGCTSKTLAVPPEASIATLNQLCATKFRVTQPNTFGLFLYKEQGYHRLPPGALAHRLPTTGYLVYRRAEWPETQGAVTEEEGSGQSEARSRGEEQGCQGDGDAGVKASPRDIREQSETTAEGGQGQAQEGPAQPGEPEAEGSRAAEE

SEQ ID NO: 762564 - protein, 685 aa, Homo sapiens [sequence omitted]

SEQ ID NO: 762565 - protein, 386 aa, Homo sapiens
MCSSVAAKLWFLTDRRIREDYPQKEILRALKAKCCEEELDFRAVVMDEVVLTIEQGNLGLRINGELITAYPQVVVVRVPTPWVQSDSDITVLRHLEKMGCRLMNRPQAILNCVNKFWTFQELAGHGVPLPDTFSYGGHENFAKMIDEAEVLEFPMVVKNTRGHRGKAVFLARDKHHLADLSHLIRHEAPYLFQKYVKESHGRDVRVIVVGGRVVGTMLRCSTDGRMQSNCSLGGVGMMCSLSEQGKQLAIQVSNILGMDVCGIDLLMKDDGSFCVCEANANVGFIAFDKACNLDVAGIIADYAASLLPSGRLTRRMSLLSVVSTASETSEPELGPPASTAVDNMSASSSSVDSDPESTERELLTKLPGGLFNMNQLLANEIKLLVD

SEQ ID NO: 762566 - protein, 307 aa, Homo sapiens
MCSSVAAKLWFLTDRRIREDYPQKEILRALKAKCCEEELDFRAVVMDEVVLTIEQGNLGLRINGELITAYPQVVVVRVPTPWVQSDSDITVLRHLEKMGCRLMNRPQAILNCVNKFWTFQELAGHGVPLPDTFSYGGHENFAKMIDEAEVLEFPMVVKNTRGHRGKAVFLARDKHHLADLSHLIRHEAPYLFQKYVKESHGRDVRVIVVGGRVVGTMLRCSTDGRMQSNCSLGGVGMMCSLSEQGKQLAIQVSNILGMDVCGIDLLMKDDGSFCVCEANANPFQEPKKQIQTNKKIPREKTFLLPPS

SEQ ID NO: 762567 - protein, 386 aa, Homo sapiens; identical to SEQ ID NO: 762565

SEQ ID NO: 762568 - protein, 386 aa, Homo sapiens; identical to SEQ ID NO: 762565

SEQ ID NO: 762569 - protein, 386 aa, Homo sapiens; identical to SEQ ID NO: 762565

SEQ ID NO: 762570 - protein, 386 aa, Homo sapiens; identical to SEQ ID NO: 762565

SEQ ID NO: 762571 - protein, 386 aa, Homo sapiens; identical to SEQ ID NO: 762565

SEQ ID NO: 762572 - protein, 386 aa, Homo sapiens; identical to SEQ ID NO: 762565

SEQ ID NO: 762573 - protein, 386 aa, Homo sapiens; identical to SEQ ID NO: 762565

SEQ ID NO: 762574 - protein, 386 aa, Homo sapiens; identical to SEQ ID NO: 762565

SEQ ID NO: 762575 - protein, 386 aa, Homo sapiens; identical to SEQ ID NO: 762565

SEQ ID NO: 762576 - protein, 636 aa, Homo sapiens
MFWRKLPKALFIGLTLAIAVNLLLVFSSKGTLQNLFTGGLHRELPLHLNKRYGAVIKRLSHLEVELQDLKESMKLALRQQENVNSTLKRAKDEVRPLLKAMETKVNETKKHKTQMKLFPHSQLFRQWGEDLSEAQQKAAQDLFRKFGYNAYLSNQLPLNRTIPDTRDYRCLRKTYPSQLPSLSVILIFVNEALSIIQRAITSIINRTPSRLLKEIILVDDFSSNGELKVHLDEKIKLYNQKYPGLLKIIRHPERKGLAQARNTGWEAATADVVAILDAHIEVNVGWAEPILARIQEDRTVIVSPVFDNIRFDTFKLDKYELAVDGFNWELWCRYDALPQAWIDLHDVTAPVKSPSIMGILAANRHFLGEIGSLDGGMLIYGGENVELSLRVWQCGGKVEILPCSRIAHLERHHKPYALDLTAALKRNALRVAEIWMDEHKHMVYLAWNIPLQNSGIDFGDVSSRMALREKLKCKTFDWYLKNVYPLLKPLHTIVGYGRMKNLLDENVCLDQGPVPGNTPIMYYCHEFSSQNVYYHLTGELYVGQLIAEASASDRCLTDPGKAEKPTLEPCSKAAKNRLHIYWDFKPGGAVINRDTKRCLEMKKDLLGSHVLVLQTCSTQVWEIQHTVRDWGQTNSQ

SEQ ID NO: 762577 - protein, 591 aa, Homo sapiens
MFWRKLPKALFIGLTLAIAVNLLLVFSSKGTLQNLFTGGLHRELPLHLNKRYGAVIKRLSHLEVELQDLKESMKLALRQQENVNSTLKRAKDEVRPLLKAMETKVNETKKHKTQMKLFPHSQLFRQWGEDLSEAQQKAAQDLFRKFGYNAYLSNQLPLNRTIPDTRDYRCLRKTYPSQLPSLSVILIFVNEALSIIQRAITSIINRTPSRLLKEIILVDDFSSNGELKVHLDEKIKLYNQKYPGLLKIIRHPERKGLAQARNTGWEAATADVVAILDAHIEVNVGWAEPILARIQEDRTVIVSPVFDNIRFDTFKLDKYELAVDGFNWELWCRYDALPQAWIDLHDVTAPVKSPSIMGILAANRHFLGEIGSLDGGMLIYGGENVELSLRVWQCGGKVEILPCSRIAHLERHHKPYALDLTAALKRNALRVAEIWMDEHKHMVYLAWNIPLQNSGIDFGDVSSRMALREKLKCKTFDWYLKNVYPLLKPLHTIVGYGRMKNLLDENVCLDQGPVPGNTPIMYYCHEFSSQNVYYHLTGELYVGQLIAEASASDRCLTDPGKAEKPTLEPCSKAAKNRLHIYWDFKPPTITK

SEQ ID NO: 762578 - protein, 600 aa, Homo sapiens
MFWRKLPKALFIGLTLAIAVNLLLVFSSKGTLQNLFTGGLHRELPLHLNKRYGAVIKRLSHLEVELQDLKESMKLALRQQENVNSTLKRAKDEVRPLLKAMETKVNETKKHKTQMKLFPHSQLFRQWGEDLSEAQQKAAQDLFRKFGYNAYLSNQLPLNRTIPDTRDYRCLRKTYPSQLPSLSVILIFVNEALSIIQRAITSIINRTPSRLLKEIILVDDFSSNGELKVHLDEKIKLYNQKYPGLLKIIRHPERKGLAQARNTGWEAATADVVAILDAHIEVNVGWAEPILARIQEDRTVIVSPVFDNIRFDTFKLDKYELAVDGFNWELWCRYDALPQAWIDLHDVTAPVKSPSIMGILAANRHFLGEIGSLDGGMLIYGGENVELSLRVWQCGGKVEILPCSRIAHLERHHKPYALDLTAALKRNALRVAEIWMDEHKHMVYLAWNIPLQNSGIDFGDVSSRMALREKLKCKTFDWYLKNVYPLLKPLHTIVGYGRMKNLLDENVCLDQGPVPGNTPIMYYCHEFSSQNVYYHLTGELYVGQLIAEASASDRCLTDPGKAEKPTLEPCSKAAKNRLHIYWDFKPEKMLAGGASKDIYA

SEQ ID NO: 762579 - protein, 366 aa, Homo sapiens
MVLHLLLFLLLTPQGGHSCQGLELARELVLAKVRALFLDALGPPAVTREGGDPGVRRLPRRHALGGFTHRGSEPEEEEDVSQAILFPATDASCEDKSAARGLAQEAEEGLFRYMFRPSQHTRSRQVTSAQLWFHTGLDRQGTAASNSSEPLLGLLALSPGGPVAVPMSLGHAPPHWAVLHLATSALSLLTHPVLVLLLRCPLCTCSARPEATPFLVAHTRTRPPSGGERARRSTPLMSWPWSPSALRLLQRPPEEPAAHANCHRVALNISFQELGWERWIVYPPSFIFHYCHGGCGLHIPPNLSLPVPGAPPTPAQPYSLLPGAQPCCAALPGTMRPLHVRTTSDGGYSFKYETVPNLLTQHCACI

SEQ ID NO: 762580 - protein, 366 aa, Homo sapiens; identical to SEQ ID NO: 762579

SEQ ID NO: 762581 - protein, 366 aa, Homo sapiens; identical to SEQ ID NO: 762579

SEQ ID NO: 762582 - protein, 749 aa, Homo sapiens
MSFIDPYQHIIVEHQYSHKFTVVVLRATKVTKGAFGDMLDTPDPYVELFISTTPDSRKRTRHFNNDINPVWNETFEFILDPNQENVLEITLMDANYVMDETLGTATFTVSSMKVGEKKEVPFIFNQVTEMVLEMSLEVCSCPDLRFSMALCDQEKTFRQQRKEHIRESMKKLLGPKNSEGLHSARDVPVVAILGSGGGFRAMVGFSGVMKALYESGILDCATYVAGLSGSTWYMSTLYSHPDFPEKGPEEINEELMKNVSHNPLLLLTPQKVKRYVESLWKKKSSGQPVTFTDIFGMLIGETLIHNRMNTTLSSLKEKVNTAQCPLPLFTCLHVKPDVSELMFADWVEFSPYEIGMAKYGTFMAPDLFGSKFFMGTVVKKYEENPLHFLMGVWGSAFSILFNRVLGVSGSQSRGSTMEEELENITTKHIVSNDSSDSDDESHEPKGTENEDAGSDYQSDNQASWIHRMIMALVSDSALFNTREGRAGKVHNFMLGLNLNTSYPLSPLSDFATQDSFDDDELDAAVADPDEFERIYEPLDVKSKKIHVVDSGLTFNLPYPLILRPQRGVDLIISFDFSARPSDSSPPFKELLLAEKWAKMNKLPFPKIDPYVFDREGLKECYVFKPKNPDMEKDCPTIIHFVLANINFRKYKAPGVPRETEEEKEIADFDIFDDPESPFSTFNFQYPNQAFKRLHDLMHFNTLNNIDVIKEAMVESIEYRRQNPSRCSVSLSNVEARRFFNKEFLSKPKA

SEQ ID NO: 762583 - protein, 749 aa, Homo sapiens; identical to SEQ ID NO: 762582

SEQ ID NO: 762584 - protein, 262 aa, Homo sapiens
MLALEAAQLDGPHFSCLYPDGVFYDLDSCKHSSYPDSEGAPDSLWDWTVAPPVPATPYEAFDPAAAAFSHPQAAQLCYEPPTYSPAGNLELAPSLEAPGPGLPAYPTENFASQTLVPPAYAPYPSPVLSEEEDLPLDSPALEVSDSESDEALVAGPEGKGSEAGTRKKLRLYQFLLGLLTRGDMRECVWWVEPGAGVFQFSSKHKELLARRWGQQKGNRKRMTYQKLARALRNYAKTGEIRKVKRKLTYQFDSALLPAVRRA

SEQ ID NO: 762585 - protein, 198 aa, Homo sapiens
ETARPAPPCSPWRLHSSTGHTSAVCTQMASSMTWTAASIPATLIQRGLLTLVPPAYAPYPSPVLSEEEDLPLDSPALEVSDSESDEALVAGPEGKGSEAGTRKKLRLYQFLLGLLTRGDMRECVWWVEPGAGVFQFSSKHKELLARRWGQQKGNRKRMTYQKLARALRNYAKTGEIRKVKRKLTYQFDSALLPAVRRA

SEQ ID NO: 762586 - protein, 287 aa, Homo sapiens
KQPARHHHARPGGCTIQVAGGSLSMPLCLSPSRLDGPHFSCLYPDGVFYDLDSCKHSSYPDSEGAPDSLWDWTVAPPVPATPYEAFDPAAAAFSHPQAAQLCYEPPTYSPAGNLELAPSLEAPGPGLPAYPTENFASQTLVPPAYAPYPSPVLSEEEDLPLDSPALEVSDSESDEALVAGPEGKGSEAGTRKKLRLYQFLLGLLTRGDMRECVWWVEPGAGVFQFSSKHKELLARRWGQQKGNRKRMTYQKLARALRNYAKTGEIRKVKRKLTYQFDSALLPAVRRA

SEQ ID NO: 762587 - protein, 167 aa, Homo sapiens
MASPRTVTIVALSVALGLFFVFMGTIKLTPRLSKDAYSEMKRAYKSYVRALPLLKKMGINSILLRKSIGALEVACGIVMTLVPGRPKDVANFFLLLLVLAVLFFHQLVGDPLKRYAHALVFGILLTCRLLIARKPEDRSSEKKPLPGNAEEQPSLYEKAPQGKVKVS

SEQ ID NO: 762588 - protein, 144 aa, Homo sapiens
MDKLKQNKFNDISKARKKRAYKSYVRALPLLKKMGINSILLRKSIGALEVACGIVMTLVPGRPKDVANFFLLLLVLAVLFFHQLVGDPLKRYAHALVFGILLTCRLLIARKPEDRSSEKKPLPGNAEEQPSLYEKAPQGKVKVS

SEQ ID NO: 762589 - protein, 237 aa, Homo sapiens
MLEEDMEVAIKMVVVGNGAVGKSSMIQRYCKGIFTKDYKKTIGVDFLERQIQVNDEDVRLMLWDTAGQEEFDAITKAYYRGAQACVLVFSTTDRESFEAVSSWREKVVAEVGDIPTVLVQNKIDLLDDSCIKNEEAEALAKRLKLRFYRTSVKEDLNVNEVFKYLAEKYLQKLKQQIAEDPELTHSSSNKIGVFNTSGGSHSGQNSGTLNGGDVINLRPNKQRTKKNRNPFSSCSIP

SEQ ID NO: 762590 - protein, 237 aa, Homo sapiens; identical to SEQ ID NO: 762589

SEQ ID NO: 762591 - protein, 197 aa, Homo sapiens
MLEEDMEVAIKMVVVGNGAVGKSSMIQRYCKGIFTKDYKKTIGVDFLERQIQVNDEDVRLMLWDTAGQEEFDAITKAYYRGAQACVLVFSTTDRESFEAVSSWREKVVAEVGDIPTVLVQNKIDLLDDSCIKNEEAEALAKRLKLRFYRTSVKEDLNVNEVFKYLAEKYLQKLKQQIAEDPELTHSSSNKIDLRGKI

SEQ ID NO: 762592 - protein, 237 aa, Homo sapiens; identical to SEQ ID NO: 762589

SEQ ID NO: 762593 - protein, 237 aa, Homo sapiens; identical to SEQ ID NO: 762589

SEQ ID NO: 762594 - protein, 101 aa, Homo sapiens
LSMIQNIHRCFRDPHHLPKEKALLLPGNSQKKRKRQPLRADFLKTELFWAWCTPPGWVTRHSLGQAGPSGTTVSWPPNLCALRQITEPCLQDANNSEDLYS

SEQ ID NO: 762595 - protein, 184 aa, Homo sapiens
EEIYKHQEVKMQAPAFRDKKQGVSAKNQGAHDPDYENITLAFKNQDHAKGGHSRPTSQVPAQCRPPSDSTQVPCWLYRAILSLYILLALAFVLCIILSAFIMVKNAEMSKELLGFKRELWNVSNSVQACEERQKRGWDSVQQSITMVRSKIDRLETTLAGIKNIDTKVQKILEVLQKMPQSSPQ

SEQ ID NO: 762596 - protein, 184 aa, Homo sapiens; identical to SEQ ID NO: 762595

SEQ ID NO: 762597 - protein, 202 aa, Homo sapiens
EEIYKHQEVKMQAPAFRDKKQGVSAKNQGAHDPDYENITLAFKNQDHAKGGHSRPTSQVPAQCRPPSDSTQVPCWLYRAILSLYILLALAFVLCIILSAFIMVKNAEMSKELLGFKRELWNVSNSVQACEERQKRGWDSVQQSITMVRSKIDRLETTLAGIKNIDTKVQKILEVLQKMPPQLGRWGCTCQRRREMTPPPSLV

SEQ ID NO: 762598 - protein, 170 aa, Homo sapiens
MTSCMTTAADGFERSEVSMVFRDSEDGLSGGAGPSRSLCCLFAPVPAQCRPPSDSTQVPCWLYRAILSLYILLALAFVLCIILSAFIMVKNAEMSKELLGFKRELWNVSNSVQACEERQKRGWDSVQQSITMVRSKIDRLETTLAGIKNIDTKVQKILEVLQKMPQSSPQ

SEQ ID NO: 762599 - protein, 117 aa, Homo sapiens
PRVADAWVDPRVGARPEPAVLQAPSILLDAPRTDGGDMGRAMVARLGLGLLLLALLLPTQIYSSETTTGTSSNSSQSTSNSGLAPNPTNATTKAAGGALQSTASLFVVSLSLLHLYS

SEQ ID NO: 762600 - protein, 104 aa, Homo sapiens
RSLALSPRLECSGPVWGHCNLRLLGSSDSLAQASREAGTTGVSTHAQIYSSETTTGTSSNSSQSTSNSGLAPNPTNATTKAAGGALQSTASLFVVSLSLLHLYS

SEQ ID NO: 762601 - protein, 194 aa, Homo sapiens
PRTPPPIRCRAICGTICPTPTPHTHQAGSSTRVHLGGSGLTAPRTTCHSYARKTPSPNDAPHILLRLSFHAISWAQTAIALLLLLPPNASYRLRSCRLGLQSIPPASAELLNRPSSTVLEGGLLASAVRSSWGIYGFIFSVTTICAPSSNSSQSTSNSGLAPNPTNATTKAAGGALQSTASLFVVSLSLLHLYS

SEQ ID NO: 762602 - protein, 94 aa, Homo sapiens
VGACMLALPYHPISFHSVSCDTNTLRFVSLLIYPLYLSHRPMYVDRATLVCRSLKRPPRWVMHLAGRSSAYSFVGDQDEASRAPVELLVRCARY

SEQ ID NO: 762603 - protein, 227 aa, Homo sapiens
SLQRQAAGLRPASGSPAPGKMRTRDAPVSSLRLADTRRSQNKARAGGWRGRGAERADRSGPGHRLRGAPTSREGFALGGARVPSARVSVRPASAPRPPRSPFLCGGPRDNPARGVPAPAPHAVALEFAAPLGSPGRILQSEWQCTCSRTGGYPAAAEARTFLLGGLAGSPRSPPCLRPPGASGSPSTQHPARRAAHRRRGHGQSNGGQARAGAAAAGTAPTHADLFQ

SEQ ID NO: 762604 - protein, 117 aa, Homo sapiens; identical to SEQ ID NO: 762599

SEQ ID NO: 762605 - protein, 227 aa, Homo sapiens; identical to SEQ ID NO: 762603

SEQ ID NO: 762606 - protein, 227 aa, Homo sapiens; identical to SEQ ID NO: 762603

SEQ ID NO: 762607 - protein, 92 aa, Homo sapiens
NAQDLLERGTSSDGRAMVARLGLGLLLLALLLPTQIYSSETTTGTSSNSSQSTSNSGLAPNPTNATTKAAGGALQSTASLFVVSLSLLHLYS

SEQ ID NO: 762608 - protein, 92 aa, Homo sapiens
PPEALNGHHGGDMGRAMVARLGLGLLLLALLLPTQIYSSETTTGTSSNSSQSTSNSGLAPNPTNATTKAAGGALQSTASLFVVSLSLLHLYS

SEQ ID NO: 762609 - protein, 84 aa, Homo sapiens
  misc_feature (5)..(5): Xaa can be any naturally occurring amino acid
  misc_feature (7)..(7): Xaa can be any naturally occurring amino acid
CHCPXKXSRVLLLLPRLLLLALLLPTQIYSSETTTGTSSNSSQSTSNSGLAPNPTNATTKAAGGALQSTASLFVVSLSLLHLYS

SEQ ID NO: 762610 - protein, 227 aa, Homo sapiens; identical to SEQ ID NO: 762603

SEQ ID NO: 762611 - protein, 230 aa, Homo sapiens
SLQRQAAGLRPASGSPAPGKMRTRDAPVSSLRLADTRRSQNKARAGGWRGRGAERADRSGPGHRLRGAPTSREGFALGGARVPSARVSVRPASAPRPPRSPFLCGGPRDNPARGVPAPAPHAVALEFAAPLGSPGRILQSEWQCTCSRTGGYPAAAEARTFLLGFIPVKQQLELQVTPPRVLPTLGWPQIQLMPPPRRLVVPCSQQPVSSWSHSLFCISTLKRLRPRNVF

SEQ ID NO: 762612 - protein, 77 aa, Homo sapiens
DEVKVRGRVYISDEVRLPTLIYSSETTTGTSSNSSQSTSNSGLAPNPTNATTKAAGGALQSTASLFVVSLSLLHLYS

SEQ ID NO: 762613 - protein, 104 aa, Homo sapiens; identical to SEQ ID NO: 762600

SEQ ID NO: 762614 - protein, 227 aa, Homo sapiens; identical to SEQ ID NO: 762603

SEQ ID NO: 762615 - protein, 227 aa, Homo sapiens; identical to SEQ ID NO: 762603

SEQ ID NO: 762616 - protein, 227 aa, Homo sapiens; identical to SEQ ID NO: 762603

SEQ ID NO: 762617 - protein, 227 aa, Homo sapiens; identical to SEQ ID NO: 762603

SEQ ID NO: 762618 - protein, 227 aa, Homo sapiens; identical to SEQ ID NO: 762603

SEQ ID NO: 762619 - protein, 267 aa, Homo sapiens
VFSFATTHAGMKESEAAGLNSIFWGTFAACRGLAIFFATCLQPGTMIVLSNIGSLTSSLFLVLFDKNPICLWIATSVYGASMATTFPSGVSWIEQYTTIHGKSAAFFVIGASLGEMAIPAVIGILQGKYPDLPVVLYTSLGASIATGILFPVLYKLATSPLDRQRKEDRKSEDQKALLSSSGLNEYEEENEEEDAEKWNEMDFEMIETNDTMRHSIIETSRSSLTEPTAEVYNQYPSNALVFESSPFNTGSAHVKHLPETRTKGTNV

SEQ ID NO: 762620 - protein, 188 aa, Homo sapiens
  misc_feature (53)..(53): Xaa can be any naturally occurring amino acid
FTPRFSSMCVLGSPPAVPAGVTVPQGQTAVCTAIASSSDSAVRHRDISSPGGXPTPLLCPVHQATLPPVFTPGFKQGSTSYTLLKRVSPPPRGPLSLKGKNSRCHAGPQRSRKATPVSEPFQAVHEQKGSQIYSSETTTGTSSNSSQSTSNSGLAPNPTNATTKAAGGALQSTASLFVVSLSLLHLYS

SEQ ID NO: 762621 - protein, 75 aa, Homo sapiens
GSGTEAGVESAEVSYPRQIYSSETTTGTSSNSSQSTSNSGLAPNPTNATTKAAGGALQSTASLFVVSLSLLHLYS

SEQ ID NO: 762622 - protein, 186 aa, Homo sapiens
  misc_feature (23)..(23): Xaa can be any naturally occurring amino acid
MTCRAESFIDTYRNRRNLYQVTXSNEDNASIHKREEAVLHSSRILRDSLRRPRGTVLSMIYCGKAQRFNTMYIRGIRTRLSFSTRGQFRHKWASQAQMSNITRCTARHKSRARVPGVGHFNCPRERESRLIQGITRLALSSNSSQSTSNSGLAPNPTNATTKAAGGALQSTASLFVVSLSLLHLYS

SEQ ID NO: 762623 - protein, 202 aa, Homo sapiens
SLQRQAAGLRPASGSPAPGKMRTRDAPVSSLRLADTRRSQNKARAGGWRGRGAERADRSGPGHRLRGAPTSREGFALGGARVPSARVSPARRAPHLACARPEPAVLQAPSILLDAPRTDGGDMGRAMVARLGLGLLLLALLLPTQIYSSETTTGTSSNSSQSTSNSGLAPNPTNATTKAAGGALQSTASLFVVSLSLLHLYS

SEQ ID NO: 762624 - protein, 111 aa, Homo sapiens
RPRVRLRARPEPAVLQAPSILLDAPRTDGGDMGRAMVARLGLGLLLLALLLPTQIYSSETTTGTSSNSSQSTSNSGLAPNPTNATTKAAGGALQSTASLFVVSLSLLHLYS

SEQ ID NO: 762625 - protein, 227 aa, Homo sapiens; identical to SEQ ID NO: 762603

SEQ ID NO: 762626 - protein, 227 aa, Homo sapiens; identical to SEQ ID NO: 762603

SEQ ID NO: 762627 - protein, 227 aa, Homo sapiens; identical to SEQ ID NO: 762603

SEQ ID NO: 762628 - protein, 227 aa, Homo sapiens; identical to SEQ ID NO: 762603

SEQ ID NO: 762629 - protein, 227 aa, Homo sapiens; identical to SEQ ID NO: 762603

SEQ ID NO: 762630 - protein, 82 aa, Homo sapiens
IIRVNDYRDEYRSGLLLLALLLPTQIYSSETTTGTSSNSSQSTSNSGLAPNPTNATTKAAGGALQSTASLFVVSLSLLHLYS

SEQ ID NO: 762631 - protein, 75 aa, Homo sapiens; identical to SEQ ID NO: 762621

SEQ ID NO: 762632 - protein, 129 aa, Homo sapiens
MVGRFCPESPPGFVRVAATSAVSLDPPSGEPRPGCGYPGPRSAASRVYGCTAPARETGGWAWETLAGAGAKKIYSSETTTGTSSNSSQSTSNSGLAPNPTNATTKAAGGALQSTASLFVVSLSLLHLYS

SEQ ID NO: 762633 - protein, 188 aa, Homo sapiens; identical to SEQ ID NO: 762620
  misc_feature (53)..(53): Xaa can be any naturally occurring amino acid

SEQ ID NO: 762634 - protein, 227 aa, Homo sapiens; identical to SEQ ID NO: 762603

SEQ ID NO: 762635 - protein, 227 aa, Homo sapiens; identical to SEQ ID NO: 762603

SEQ ID NO: 762636 - protein, 227 aa, Homo sapiens; identical to SEQ ID NO: 762603

SEQ ID NO: 762637 - protein, 227 aa, Homo sapiens; identical to SEQ ID NO: 762603

SEQ ID NO: 762638 - protein, 227 aa, Homo sapiens; identical to SEQ ID NO: 762603

SEQ ID NO: 762639 - protein, 227 aa, Homo sapiens; identical to SEQ ID NO: 762603

SEQ ID NO: 762640 - protein, 203 aa, Homo sapiens
  misc_feature (28)..(28): Xaa can be any naturally occurring amino acid
  misc_feature (30)..(31): Xaa can be any naturally occurring amino acid
  misc_feature (43)..(43): Xaa can be any naturally occurring amino acid
  misc_feature (45)..(47): Xaa can be any naturally occurring amino acid
  misc_feature (49)..(50): Xaa can be any naturally occurring amino acid
  misc_feature (52)..(53): Xaa can be any naturally occurring amino acid
  misc_feature (55)..(55): Xaa can be any naturally occurring amino acid
  misc_feature (63)..(64): Xaa can be any naturally occurring amino acid
  misc_feature (68)..(68): Xaa can be any naturally occurring amino acid
  misc_feature (70)..(70): Xaa can be any naturally occurring amino acid
  misc_feature (78)..(80): Xaa can be any naturally occurring amino acid
  misc_feature (82)..(83): Xaa can be any naturally occurring amino acid
  misc_feature (85)..(85): Xaa can be any naturally occurring amino acid
  misc_feature (90)..(91): Xaa can be any naturally occurring amino acid
  misc_feature (93)..(93): Xaa can be any naturally occurring amino acid
  misc_feature (96)..(96): Xaa can be any naturally occurring amino acid
  misc_feature (98)..(99): Xaa can be any naturally occurring amino acid
  misc_feature (116)..(116): Xaa can be any naturally occurring amino acid
  misc_feature (118)..(118): Xaa can be any naturally occurring amino acid
  misc_feature (128)..(128): Xaa can be any naturally occurring amino acid
  misc_feature (132)..(132): Xaa can be any naturally occurring amino acid
  misc_feature (134)..(134): Xaa can be any naturally occurring amino acid
  misc_feature (136)..(136): Xaa can be any naturally occurring amino acid
  misc_feature (141)..(141): Xaa can be any naturally occurring amino acid
  misc_feature (147)..(147): Xaa can be any naturally occurring amino acid
  misc_feature (150)..(151): Xaa can be any naturally occurring amino acid
  misc_feature (155)..(155): Xaa can be any naturally occurring amino acid
  misc_feature (160)..(163): Xaa can be any naturally occurring amino acid
  misc_feature (165)..(167): Xaa can be any naturally occurring amino acid
  misc_feature (169)..(170): Xaa can be any naturally occurring amino acid
FPPLLCFAGPLAPLALPPAPLSRRPPSXSXXWAVPPGRSFAFXSXXXLXXLXXPXFSFPPPSXXASPXFXPFLFSVPXXXSXXPXPPPPXXPXPPXPXXPPPPPPPPPPPLPPPPXPXAPPPPPPPAXALPXPXLXPPSPXSPPPPXPPXXPPPXPPPPXXXXPXXXAXXPLFCFIPECCTSILDCILCLCIYALIHSNFLWN

SEQ ID NO: 762641 - protein, 130 aa, Homo sapiens
MSVVRSSVHARWIVGKVIGTKMQKTAKVRVTRLVLDPYLLKYFNKRKTYFAHDALQQCTVGDIVLLRALPVPRAKHVKHELAEIVFKVGKVIDPVTGKPCAGTTYLESPLSSETTQLSKNLEELNISSAQ

SEQ ID NO: 762642 - protein, 225 aa, Homo sapiens
MEEEEMNDGSQMVRSQESLTFQDVAVDFTREEWDQLYPAQKNLYRDVMLENYRNLVALGYQLCKPEVIAQLELEEEWVIERDSLLDTHPGDQSHVMSVVRSSVHARWIVGKVIGTKMQKTAKVRVTRLVLDPYLLKYFNKRKTYFAHDALQQCTVGDIVLLRALPVPRAKHVKHELAEIVFKVGKVIDPVTGKPCAGTTYLESPLSSETTQLSKNLEELNISSAQ

SEQ ID NO: 762643 - protein, 130 aa, Homo sapiens; identical to SEQ ID NO: 762641

SEQ ID NO: 762644 - protein, 87 aa, Homo sapiens
RRSVLRRHCGEAVLRAGLARRWLDRPQEPSHRASLAQAAGPSAPSPSRVHRGGGGGGGGGGGGVRGRSLPKRPLSAEVNIPGLRRQD

SEQ ID NO: 762645 - protein, 75 aa, Homo sapiens
SISRSSRPLKLLPKRTSSSNTRTGQALDHLFPDGEWLRKQPTTTSASQVQVILLQPPEVARITGMCHHAQLILYF

SEQ ID NO: 762646 - protein, 130 aa, Homo sapiens; identical to SEQ ID NO: 762641

SEQ ID NO: 762647 - protein, 238 aa, Homo sapiens
MPSQNAVFSQEGNMEEEEMNDGSQMVRSQESLTFQDVAVDFTREEWDQLYPAQKNLYRDVMLENYRNLVALGYQLCKPEVIAQLELEEEWVIERDSLLDTHPGDQSHVMSVVRSSVHARWIVGKVIGTKMQKTAKVRVTRLVLDPYLLKYFNKRKTYFAHDALQQCTVGDIVLLRALPVPRAKHVKHELAEIVFKVGKVIDPVTGKPCAGTTYLESPLSSETTQLSKNLEELNISSAQ

SEQ ID NO: 762648 - protein, 130 aa, Homo sapiens; identical to SEQ ID NO: 762641

SEQ ID NO: 762649 - protein, 97 aa, Homo sapiens
LGLWRPLGAAAPGTLALYPQPHPRNRVPGGEQAEGRSGPGITCPAMTCAPPPGLLELSPVERGVVSIFGVASRFFVAMSSKGKLYGSVSTAGVWLGT

SEQ ID NO: 762650 - protein, 206 aa, Homo sapiens
MSGPGTAAVALLPAVLLALLAPWAGRGGAAAPTAPNGTLEAELERRWESLVALSLARLPVAAQPKEAAVQSGAGDYLLGIKRLRRLYCNVGIGFHLQALPDGRIGGAHADTRDSLLELSPVERGVVSIFGVASRFFVAMSSKGKLYGSPFFTDECTFKEILLPNNYNAYESYKYPGMFIALSKNGKTKKGNRVSPTMKVTHFLPRL

SEQ ID NO: 762651 - protein, 605 aa, Homo sapiens
GPLERKPESCRAPAGRGRRSQASEPGLRWGPPPGPRVPRPLLPAHPSPRDPLARGGAGPRRLREGASPPRMGIVEPGCGDMLTGTEPMPGSDEGRAPGADPQHRYFYPEPGAQDADERRGGGSLGSPYPGGALVPAPPSRFLGAYAYPPRPQAAGFPGAGESFPPPADAEGYQPGEGYAAPDPRAGLYPGPREDYALPAGLEVSGKLRVALNNHLLWSKFNQHQTEMIITKQGRRMFPFLSFTVAGLEPTSHYRMFVDVVLVDQHHWRYQSGKWVQCGKAEGSMPGNRLYVHPDSPNTGAHWMRQEVSFGKLKLTNNKGASNNVTQMIVLQSLHKYQPRLHIVEVNDGEPEAACNASNTHIFTFQETQFIAVTAYQNAEITQLKIDNNPFAKGFRENFESMYTSVDTSIPSPPGPNCQFLGGDHYSPLLPNQYPVPSRFYPDLPGQAKDVVPQAYWLGAPRDHSYEAEFRAVSMKPAFLPSAPGPTMSYYRGQEVLAPGAGWPVAPQYPPKMGPASWFRPMRTLPMEPGPGGSEGRGPEDQGPPLVWTEIAPIRPESSDSGLGEGDSKRRRVSPYPSSGDSSSPAGAPSPFDKEAEGQFYNYFPN

SEQ ID NO: 762652 - protein, 153 aa, Homo sapiens [sequence omitted]

SEQ ID NO: 762653 - protein, 153 aa, Homo sapiens [sequence omitted]

SEQ ID NO: 762654 - protein, 153 aa, Homo sapiens [sequence omitted]

SEQ ID NO: 762655 - protein, 515 aa, Homo sapiens
LSLGRAARGRQSPLDKEPLTALICLLSQQTGWKGGRKCPPKPPCQTSWQVSLWEPGSLLVSPLNTVVLRTQNSQMSRRSQFVQGSPGCGWTMAATPMAWVGPASASSAPPGDDVRQYLRQYLMGPRGPPGPPGASGDGSLLSLDYAELSSRILSYMSSSGISIGLPGPPGPPGLPGTSYEELLSLLRGSEFRGIVGPPGPPGPPGIPGNVWSSISVEDLSSYLHTAGLSFIPGPPGPPGPPGPRGPPGVSGALATYAAENSDSFRSELISYLTSPDVRSFIVGPPGPPGPQGPPGDSRLLSTDASHSRGSSSSSHSSSVRRGSSYSSSMSTGGGGAGSLGAGGAFGEAAGDRGPYGTDIGPGGGYGAAAEGGMYAGNGGLLGADFAGDLDYNELAVRVSESMQRQGLLQGMAYTVQGPPGQPGPQGPPGISKVFSAYSNVTADLMDFFQTYGAIQGPPGQKGEMGTPGPKGDRGPAGPPGHPGPPGPRGHKGEKGDKGDQVYAGRRRRRSIAVKP

SEQ ID NO: 762656 - protein, 575 aa, Homo sapiens
PGPRGHQGEQGLPGFSTSGSSSFGLNLQGPPGPPGPQGPKGDKGDPGVPGALGIPSGPSEGGSSSTMYVSGPPGPPGPPGPPGSISSSGQEIQQYISEYMQSDSIRSYLSGVQGPPGPPGPPGPVTTITGETFDYSELASHVVSYLRTSGYGVSLFSSSISSEDILAVLQRDDVRQYLRQYLMGPRGPPGPPGASGDGSLLSLDYAELSSRILSYMSSSGISIGLPGPPGPPGLPGTSYEELLSLLRGSEFRGIVGPPGPPGPPGIPGNVWSSISVEDLSSYLHTAGLSFIPGPPGPPGPPGPRGPPGVSGALATYAAENSDSFRSELISYLTSPDVRSFIVGPPGPPGPQGPPGDSRLLSTDASHSRGSSSSSHSSSVRRGSSYSSSMSTGGGGAGSLGAGGAFGEAAGDRGPYGTDIGPGGGYGAAAEGGMYAGNGGLLGADFAGDLDYNELAVRVSESMQRQGLLQGMAYTVQGPPGQPGPQGPPGISKVFSAYSNVTADLMDFFQTYGAIQGPPGQKGEMGTPGPKGDRGPAGPPGHPGPPGPRGHKGEKGDKGDQVYAGRRRRRSIAVKP

SEQ ID NO: 762657 - protein, 575 aa, Homo sapiens; identical to SEQ ID NO: 762656

SEQ ID NO: 762658 - protein, 38 aa, Homo sapiens
YAGNGGLLGADFAGDLDYNELAVRVSESMQRKWGHLGL

SEQ ID NO: 762659 - protein, 575 aa, Homo sapiens; identical to SEQ ID NO: 762656

SEQ ID NO: 762660 - protein, 186 aa, Homo sapiens
PGPRGHQGEQGLPGFSTSGSSSFGLNLQGPPGPPGPQGPKGDKGDPGVPGALGIPSGPSEGGSSSTMYVSGPPGPPGPPGPPGSISSSGQEIQQYISEYMQSDSIRSYLSGVQGPPGPPGPPGPVTTITGETFDYSELASHVVSYLRSKPFPMPCTWHLPPVGLLLLPEPHLLVCCLLCPSLEHEF

SEQ ID NO: 762661 - protein, 198 aa, Homo sapiens
MSSKRSHYDSALKRKVIVYAEKHGNRAAGRTFDISEANIRRWRNDRNSIFSCKATTKCFTGPKKGRYPQVDEAVLRFVSETRAKGLPITRQAMQLKAGEVAKTLGIDETKFKATRGWCDRFMRRAGLSLRHQTSFCPKLPTAIKQKTVLEHSFKKCCITSTLDNTGRDVLWKNADINDCGLKSDSEELDSEYEVIIIT

SEQ ID NO: 762662 - protein, 103 aa, Homo sapiens
MPPRADCPSAPKMWHSVGLTLLVFVATLLIVLLLMVCGWYFVWHLFLSKFKFLRELVGDTGSQEGDHEPSGSETEEDTSSSPHRIRSARQRRAPADEGHRPLT

SEQ ID NO: 762663 - protein, 229 aa, Homo sapiens
MLGRIKAQAFGFDQTFQSYRKDDFVMAFFKDPNVIPNLKLLSDSSGQWIILGTEVKKIEAINVPCTQLSMSFFHRLYDEDIVRDSGHIVKCLDSFCDPFLISDELRRVLLVEDSEKYEIFSQPDREEFLFCLFKHLCLGGALCQYEDVISPYLETTKLIYKDLVSVRKNPQTKKIQITSSVFKVSAYDSAGMCYPSAKNHEQTFSYFIVDPIRRHLHVLYHCYGVGDMS

SEQ ID NO: 762664 - protein, 113 aa, Homo sapiens
LHGNGPGIHPAESTMATGELGDLGGYYFRFLPQKTFQSLSSKEITSRLRQWSMLGRIKAQAFGFDQTFQSYRKDDFVMAFFKDPNVIPNLKLLSDSSGQWIILGFASGRLRKI

SEQ ID NO: 762665 - protein, 217 aa, Homo sapiens
LHGNGPGIHPAESTMATGELGDLGGYYFRFLPQKTFQSLSSKEITSRLRQWSMLGRIKAQAFGFDQTFQSYRKDDFVMAFFKDPNVIPNLKLLSDSSGQWIILGTEVKKIEAINVPCTQLSMSFFHRLYDEDIVRDSGHIVKCLDSFCDPFLISDELRRVLLVEDSEKYEIFSQPDREEFLFCLFKHLCLGGALCQYEDVISPYLETTKLIYKDLVR

SEQ ID NO: 762666 - protein, 281 aa, Homo sapiens
LHGNGPGIHPAESTMATGELGDLGGYYFRFLPQKTFQSLSSKEITSRLRQWSMLGRIKAQAFGFDQTFQSYRKDDFVMAFFKDPNVIPNLKLLSDSSGQWIILGTEVKKIEAINVPCTQLSMSFFHRLYDEDIVRDSGHIVKCLDSFCDPFLISDELRRVLLVEDSEKYEIFSQPDREEFLFCLFKHLCLGGALCQYEDVISPYLETTKLIYKDLVSVRKNPQTKKIQITSSVFKVSAYDSAGMCYPSAKNHEQTFSYFIVDPIRRHLHVLYHCYGVGDMS

SEQ ID NO: 762667 - protein, 255 aa, Homo sapiens
LHGNGPGIHPAESTMATGELGDLGGYYFRFLPQKTFQSLSSKEITSRLRQWSMLGRIKAQAFGFDQTFQSYRKDDFVMAFFKDPNVIPNLKLLSDSSGQWIILGTEVKKIEAINVPCTQLSMSFFHRLYDEDIVRDSGHIVKCLDSFCDPFLISDELRRVLLVEDSEKYEIFSQPDREEFLFCLFKHLCLGGALCQYEDVISPYLETTKLIYKDLVSVRKNPQTKKIQITSSVFKVSAYVSVRELLQPKNLITFY

SEQ ID NO: 762668 - protein, 542 aa, Homo sapiens
RRGGCGALGLLLLLLGAACLIPRSAQVRRLARCPATCSCTKESIICVGSSWVPRIVPGDISSLSLVNGTFSEIKDRMFSHLPSLQLLLLNSNSFTIIRDDAFAGLFHLEYLFIEGNKIETISRNAFRGLRDLTHLSLANNHIKALPRDVFSDLDSLIELDLRGNKFECDCKAKWLYLWLKMTNSTVSDVLCIGPPEYQEKKLNDVTSFDYECTTTDFVVHQTLPYQSVSVDTFNSKNDVYVAIAQPSMENCMVLEWDHIEMNFRSYDNITGQSIVGCKAILIDDQVFVVVAQLFGGSHIYKYDESWTKFVKFQDIEVSRISKPNDIELFQIDDETFFVIADSSKAGLSTVYKWNSKGFYSYQSLHEWFRDTDAEFVDIDGKSHLILSSRSQVPIILQWNKSSKKFVPHGDIPNMEDVLAVKSFRMQNTLYLSLTRFIGDSRVMRWNSKQFVEIQALPSRGAMTLQPFSFKDNHYLALGSDYTFSQIYQWDKEKQLFKKFKEIYVQAPRSFTAVSTDRRDFFFASSFKGKTKIFEHIIVDLSL

SEQ ID NO: 762669 - protein, 542 aa, Homo sapiens; identical to SEQ ID NO: 762668

SEQ ID NO: 762670 - protein, 310 aa, Homo sapiens
RRGGCGALGLLLLLLGAACLIPRSAQVRRLARCPATCSCTKESIICVGSSWVPRIVPGDISSLSLVNGTFSEIKDRMFSHLPSLQLLLLNSNSFTIIRDDAFAGLFHLEYLFIEGNKIETISRNAFRGLRDLTHLSLANNHIKALPRDVFSDLDSLIELDLRGNKFECDCKAKWLYLWLKMTNSTVSDVLCIGPPEYQEKKLNDVTSFDYECTTTDKQEEICEGKIQNLNARVVMNCSRPSSAFRKHTGNGRVAFFLPHGVRVCVFLGKKSAWDARGLAVRSAHDGNFSGLGYNEGEMKICRRGVYLHAT

SEQ ID NO: 762671 - protein, 115 aa, Homo sapiens
MRYVASYLLAALGGNSSPSAKDIKKILDSVGIEADDDRLNKVISELNGKNIEDVIAQGIGKLASVPAGGAVAVSAAPGSAAPAAGSAPAAAEEKKDEKKEESEESDDDMGFGLFD

SEQ ID NO: 762672 - protein, 115 aa, Homo sapiens; identical to SEQ ID NO: 762671

SEQ ID NO: 762673 - protein, 115 aa, Homo sapiens; identical to SEQ ID NO: 762671

SEQ ID NO: 762674 - protein, 115 aa, Homo sapiens; identical to SEQ ID NO: 762671

SEQ ID NO: 762675 - protein, 115 aa, Homo sapiens; identical to SEQ ID NO: 762671

SEQ ID NO: 762676 - protein, 115 aa, Homo sapiens; identical to SEQ ID NO: 762671

SEQ ID NO: 762677 - protein, 174 aa, Homo sapiens
MCKKALFAGEQEFNQKGQIPCHHLTLQTPPSSHLSSPLLQQGQNQQQGLRAWGSRDGYSPTSRYTGKLANTLGNSSPSAKDIKKILDSVGIEADDDRLNKVISELNGKNIEDVIAQGIGKLASVPAGGAVAVSAAPGSAAPAAGSAPAAAEEKKDEKKEESEESDDDMGFGLFD

SEQ ID NO: 762678 - protein, 115 aa, Homo sapiens; identical to SEQ ID NO: 762671

SEQ ID NO: 762679 - protein, 162 aa, Homo sapiens
MRGGRRGIFGTEAYGPSHALASPGGPGMGRQEAAGVTPPRVLSARLRMRYVASYLLAALGGNSSPSAKDIKKILDSVGIEADDDRLNKVISELNGKNIEDVIAQGIGKLASVPAGGAVAVSAAPGSAAPAAGSAPAAAEEKKDEKKEESEESDDDMGFGLFD

SEQ ID NO: 762680 - protein, 115 aa, Homo sapiens; identical to SEQ ID NO: 762671

SEQ ID NO: 762681 - protein, 115 aa, Homo sapiens; identical to SEQ ID NO: 762671

SEQ ID NO: 762682 - protein, 115 aa, Homo sapiens; identical to SEQ ID NO: 762671

SEQ ID NO: 762683 - protein, 177 aa, Homo sapiens
PPSSPFPPVPGSPFAPSLRPPAWMDAPRLPVRPGVLLPKLVLLFVYADDCLAQCGKDCKSYCCDGTTPYCCSYYAYIGNILSGTAIAGIVFGIVFIMGVIAGIAICICMCMKNHRATRVGILRTTHINTVSSYPGPPPYGHDHEMEYCADLPPPYSPTPQGPAQRSPPPPYPGNARK

SEQ ID NO: 762684 - protein, 177 aa, Homo sapiens; identical to SEQ ID NO: 762683

SEQ ID NO: 762685 - protein, 177 aa, Homo sapiens; identical to SEQ ID NO: 762683

SEQ ID NO: 762686 - protein, 441 aa, Homo sapiens
MKLALLLPWACCCLCGSALATGFLYPFSAAALQQHGYPEPGAGSPGSGYASRRHWCHHTVTRTVSCQVQNGSETVVQRVYQSCRWPGPCANLVSYRTLIRPTYRVSYRTVTVLEWRCCPGFTGSNCDEECMNCTRLSDMSERLTTLEAKVLLLEAAERPSSPDNDLPAPESTPPTWNEDFLPDAIPLAHPVPRQRRPTGPAGPPGQTGPPGPAGPPGSKGDRGQTGEKGPAGPPGLLGPPGPRGLPGEMGRPGPPGPPGPAGNPGPSPNSPQGALYSLQPPTDKDNGDSRLASAIVDTVLAGVPGPRGPPGPPGPPGPRGPPGPPGTPGSQGLAGERGTVGPSGEPGVKGEEGEKAATAEGEGVQQLREALKILAERVLILEHMIGIHDPLASPEGGSGQDAALRANLKMKRGGAQPDGVLAALLGPDPGQKSVDQASSRK

SEQ ID NO: 762687 - protein, 282 aa, Homo sapiens
MNSSTSTMSEEPDALSVVNQLRDLAADPLNRRAIVQDQGCLPGLILFMDHPNPPVVHSALLALRYLAECRANREKMKGELGMMLSLQNVIQKTTTPGETKLLASEIYDILQSSNMADGDSFNEMNSRRRKAQFFLGTTNKRAKTVVLHIDGLDDTSRRNLCEEALLKIKGVISFTFQMAVQRCVVRIRSDLKAEALASAIASTKVMKAQQVVKSESGEEMLVPFQDTPVEVEQNTELPDYLPEDESPTKEQDKAVSRVGSHPEGGASWLSTAANFLSRSFYW

SEQ ID NO: 762688 - protein, 105 aa, Homo sapiens
MLYRSKYNRQCLIYLYTYLYYHCSLNLPSSSYSPTSSSQVAGTTDMCHYTWLIFKLFCRDMVSLCCLGCCPGIKQSFCLSLPKCWNYRHEPSHPAQIVVFFFKWN

SEQ ID NO: 762689 - protein, 282 aa, Homo sapiens; identical to SEQ ID NO: 762687

SEQ ID NO: 762690 - protein, 240 aa, Homo sapiens
MNKQRGTFSEVSLAQDPKPQQRKPKGNKSSISGTEQEIFQVELNLQNASLNHQGIDKIYDCQGLLPPPEKLTAEVLGIICIVLMATVLKTIVLIPFLEQNNSSPNTRTQKARPCGHCPEEWITYSNSCYYIGKERRTWEESLQACASKNSSSLLSIDNEEEMKFLASILPSSWIGVFRNSSHHPWVTINGLAFKHEIKDSDHAERNCAMLHVRGLISDQCGSSRIIRRGFIMLTRLVLNS

SEQ ID NO: 762691 - protein, 226 aa, Homo sapiens
MNKQRGTFSEVSLAQDPKPQQRKPKGNKSSISGTEQEIFQVELNLQNASLNHQGIDKIYDCQGLLPPPEKLTAEVLGIICIVLMATVLKTIVLIPFLEQNNSSPNTRTQKARPCGHCPEEWITYSNSCYYIGKERRTWEESLQACASKNSSSLLSIDNEEEMKFLASILPSSWIGVFRNSSHHPWVTINGLAFKHEIKDSDHAERNCAMLHVRGLISDQCGSSRII

SEQ ID NO: 762692 - protein, 257 aa, Homo sapiens
MNKQRGTFSEVSLAQDPKPQQRKPKGNKSSISGTEQEIFQVELNLQNASLNHQGIDKIYDCQGLLPPPEKLTAEVLGIICIVLMATVLKTIVLIPFLEQNNSSPNTRTQKARPCGHCPEEWITYSNSCYYIGKERRTWEESLQACASKNSSSLLSIDNEEEMKFLASILPSSWIGVFRNSSHHPWVTINGLAFKHEIKDSDHAERNCAMLHVRGLISDQCGSSRIIVSISFRIKALELAVHQIKFYICSNRNDIMIA

SEQ ID NO: 762693 - protein, 69 aa, Homo sapiens
KHAEVTGTPDLRTCPGGGGDIHCNRQWDSKVGLLRNQREASTAGNGAGEWTERFHPFFQGGAAQEPVRG

SEQ ID NO: 762694 - protein, 616 aa, Homo sapiens
MLYIFNTSLFEPPPPGYENVSDIVPSFSAFSPQGMPEGDLVHVNYARTEDFFKLERDMKINCSGKIVIARYRKVFRGNKVKNAQLAGAKGVILYSDPADYFAPGVKSYPDGWNLPGGGVQRGNILNLNGAGDPLTPGYPANEYAYRHGIAEAVGLPSIPVHPVGYYDAQKLLEKMGGSAPPDSSWRGSLKVSYNVGPGFTGNFSTQKVKMHIHSTNEVTRIYNVIGTLRGAVEPDRYVILGGHRDSWVFGGIDPQSGAAVVHETVRSFGTLKKEGWRPRRTILFASWDAEEFGLLGSTEWAEDNSRLLQERGVAYINADSSIEGNYTLRVDCTPLMYSLVYNLTKELKSPDEGFEGKSLYESWTKKSPSPEFSGMPRISKLGSGNDFEVFFQRLGIASGRARYTKNWETNKFSGYPLYHSVYETYELVEKFYDPMFKYHLTVAQVRGGMVFELANSIVLPFDCRDYAVVLRKYADKIYNISMKHPQEMKTYSLSFDSLFSAVKNFTEIASKFSERLQDFDKSNPILLRMMNDQLMFLERAFIDPLGLPDRPFYRHVIYAPSSHNKYAGESFPGIYDALFDIESKVDPSKAWGDVKRQISVAAFTVQAAAETLSEVA

SEQ ID NO: 762695 - protein, 538 aa, Homo sapiens
MVKNAQLAGAKGVILYSDPADYFAPGVKSYPDGWNLPGGGVQRGNILNLNGAGDPLTPGYPANEYAYRHGIAEAVGLPSIPVHPVGYYDAQKLLEKMGGSAPPDSSWRGSLKVSYNVGPGFTGNFSTQKVKMHIHSTNEVTRIYNVIGTLRGAVEPDRYVILGGHRDSWVFGGIDPQSGAAVVHETVRSFGTLKKEGWRPRRTILFASWDAEEFGLLGSTEWAEDNSRLLQERGVAYINADSSIEGNYTLRVDCTPLMYSLVYNLTKELKSPDEGFEGKSLYESWTKKSPSPEFSGMPRISKLGSGNDFEVFFQRLGIASGRARYTKNWETNKFSGYPLYHSVYETYELVEKFYDPMFKYHLTVAQVRGGMVFELANSIVLPFDCRDYAVVLRKYADKIYNISMKHPQEMKTYSLSFDSLFSAVKNFTEIASKFSERLQDFDKSNPILLRMMNDQLMFLERAFIDPLGLPDRPFYRHVIYAPSSHNKYAGESFPGIYDALFDIESKVDPSKAWGDVKRQISVAAFTVQAAAETLSEVA

SEQ ID NO: 762696 - protein, 376 aa, Homo sapiens
SGAAGGRALPNDLPRGRWAGDGGVWMEAFALGPARRGRRRTRAAGSLLSRAAILLFISAFLVRVPSSVGHLVRLPRAFRLTKDSVKIVGSTSFPVKAYVMLHQKSPHVLCVTQQLRNAELIDPSFQWYGPKGKVVSVENRTAQITSTGSLVFQNFEESMSGIYTCFLEYKPTVEEIVKRLQLKYAIYAYREPHYYYQFTARYHAAPCNSIYNISFEKKLLQILSKLLLDLSCEISLLKSECHRVKMQRAGLQNELFFAFSVSSLDTEKGPKRCTDHNCEPYKRLFKAKNLIERFFNQQVEILGRRAEQLPQIYYIEGTLQMVWINRCFPGYGMNVQQHPKCPECCVICSPGSYNPRDGIHCLQCNSSLVYGAKTCL

SEQ ID NO: 762697 - protein, 145 aa, Homo sapiens
SGAAGGRALPNDLPRGRWAGDGGVWMEAFALGPARRGRRRTRAAGSLLSRAAILLFISAFLVRVPSSVGHLVRLPRAFRLTKDSVKIVGSTSFPVKAYVMLHQKSPHVLCVTQQLRNAELIDPSFQWYGPKGKVVSERTGRGLMS

SEQ ID NO: 762698 - protein, 312 aa, Homo sapiens
MFLVGHLVRLPRAFRLTKDSVKIVGSTSFPVKAYVMLHQKSPHVLCVTQQLRNAELIDPSFQWYGPKGKVVSVENRTAQITSTGSLVFQNFEESMSGIYTCFLEYKPTVEEIVKRLQLKYAIYAYREPHYYYQFTARYHAAPCNSIYNISFEKKLLQILSKLLLDLSCEISLLKSECHRVKMQRAGLQNELFFAFSVSSLDTEKGPKRCTDHNCEPYKRLFKAKNLIERFFNQQVEILGRRAEQLPQIYYIEGTLQMVWINRCFPGYGMNVQQHPKCPECCVICSPGSYNPRDGIHCLQCNSSLVYGAKTCL

SEQ ID NO: 762699 - protein, 398 aa, Homo sapiens
  misc_feature (372)..(372): Xaa can be any naturally occurring amino acid
SGAAGGRALPNDLPRGRWAGDGGVWMEAFALGPARRGRRRTRAAGSLLSRAAILLFISAFLVRVPSSVGHLVRLPRAFRLTKDSVKIVGSTSFPVKAYVMLHQKSPHVLCVTQQLRNAELIDPSFQWYGPKGKVVSVENRTAQITSTGSLVFQNFEESMSGIYTCFLEYKPTVEEIVKRLQLKYAIYAYREPHYYYQFTARYHAAPCNSIYNISFEKKLLQILSKLLLDLSCEISLLKSECHRVKMQRAGLQNELFFAFSVSSLDTEKGPKRCTDHNCEPYKRLFKAKNLIERFFNQQVEILGRRAEQLPQIYYIEGTLQMVWINRCFPGYGMNVQQHPKCPECCVICSPGSYNPRDGIHCLQCKNFFFFWXKKGGGAPPPKGGPPFSSLVYGAKTCL

SEQ ID NO: 762700 - protein, 105 aa, Homo sapiens
MDQEEGLKALDNIVTQFNAYEDFLDSQITTVDLYYLEDETLARQLVELGYRGTGERVKREDFEARKAAIEIARLAERAQQKSDSQLIFPRSGQRKASKKTCFHQC

SEQ ID NO: 762701 - protein, 135 aa, Homo sapiens
CPPASVARDASAEDTAMDQEEGLKALDNIVTQFNAYEDFLDSQITTVDLYYLEDETLARQLVELGYRGTGERVKREDFEARKAAIEIARLAERAQQKTLTSAGKDLQDNFLTALAMREEDNRSGKLSVSTFHPTA

SEQ ID NO: 762702 - protein, 171 aa, Homo sapiens
MDQEEGLKALDNIVTQFNAYEDFLDSQITTVDLYYLEDETLARQLVELGYRGTGERVKREDFEARKAAIEIARLAERAQQKTLTSAGKDLQDNFLTALAMREEDNRSGKLSSVIFIRDRNSHGQEISGYIDYAHRLKTEDFEVYFTGKKRLLPRPTDIRRSQVTTLLESLS

SEQ ID NO: 762703 - protein, 249 aa, Homo sapiens
CPPASVARDASAEDTAMDQEEGLKALDNIVTQFNAYEDFLDSQITTVDLYYLEDETLARQLVELGYRGTGERVKREDFEARKAAIEIARLAERAQQKTLTSAGKDLQDNFLTALAMREEDNRSGKLSSVIFIRDRNSHGQEISGYIDYAHRLKTEDFEVYFTGKKRLLPRPTDISFYNWDADIAVSNSSPNYQVIADNPEGLLFRYKRDRKILNVDPKAQPGDNSTRITILTELYIQAVIFDHISRRKT

SEQ ID NO: 762704 - protein, 134 aa, Homo sapiens
MDQEEGLKALDNIVTQFNAYEDFLDSQITTVDLYYLEDETLARQLVELGYRGTGERVKREDFEARKAAIEIARLAERAQQKTLTSAGKDLQDNFLTALAMREEDNRSGKLSILEPILNHAMDRKSVTSPPKFIR

SEQ ID NO: 762705 - protein, 270 aa, Homo sapiens
NPKAFSTAGLSGLGESHVAAAPPDICSRTVWPDETMGPFGPQDQRFQLPGNIGFDCHLNGTASQKKSLVHKTLPDVLAEPLSSERHEFVMAQYVNEFQGNDAPVEQEINSAETYFESARVECAIQTCPELLRKDFESLFPEVANGKLMILTVTQKTKNDMTVWSEEVEIEREVLLEKFINGAKEICYALRAEGYWADFIDPSSGLAFFGPYTNNTLFETDERYRHLGFSVDDLGCCKVIRHSLWGTHVVVGSIFTNATPDSHIMKKLSGN

SEQ ID NO: 762706 - protein, 270 aa, Homo sapiens; identical to SEQ ID NO: 762705

SEQ ID NO: 762707 - protein, 112 aa, Homo sapiens
MFPKADIAWNVPVSLITWPLFRLFRGWRTPTTRVRWCHRSIPTVRSLGHGFWGLALAPNKGPRVLWPGLQTDLKGQGMLRPRGASRGPGLWLLSSDFYFLKTVKCLSFLFFK

SEQ ID NO: 762708 - protein, 402 aa, Homo sapiens [sequence omitted]

SEQ ID NO: 762709 - protein, 284 aa, Homo sapiens [sequence omitted]

SEQ ID NO: 762710 - protein, 296 aa, Homo sapiens
MVTGGWGGPGGDTNGVDKAGGYPRAAEDDSASPPGAASDAEPGDEERPGLQVDCVVCGDKSSGKHYGVFTCEGCKSFFKRSIRRNLSYTCRSNRDCQIDQHHRNQCQYCRLKKCFRVGMRKEAVQRGRIPHSLPGAVAASSGSPPGSALAAVASGGDLFPGQPVSELIAQLLRAEPYPAAAGRFGAGGGAAGAVLGIDNVCELAARLLFSTVEWARHAPFFPEAAPAHGAATGRRRPPRRAYGRRARRGFHGPGARLPGAGGQAGPPAGRLGRVWLPQGHRALHARRLWPLRPGPR

SEQ ID NO: 762711 - protein, 95 aa, Homo sapiens
DASALASQSAGTVAVSHHARPPVLTHSGEWCPLVTPVGSVFSSCLPPVCLAFVPLDACGLSDPAHVESLQEKAQVALTEYVRAQYPSQPQRFGRL

SEQ ID NO: 762712 - protein, 402 aa, Homo sapiens [sequence omitted]

SEQ ID NO: 762713 - protein, 76 aa, Homo sapiens
GRSAPGEGCAGGDGCSPCRRGRAGVSCGGRAGAGSCGRQLRLLPPPSLRHDAGDRQAAHRGDAGGQPADKVFTRCI

SEQ ID NO: 762714 - protein, 760 aa, Homo sapiens
TAARRLEKAVRAGTAAALAGEGGPGSAAAGGPARGAVGGSCVSCHRPPSATMPGIDKLPIEETLEDSPQTRSLLGVFEEDATAISNYMNQLYQAMHRIYDAQNELSAATHLTSKLLKEYEKQRFPLGGDDEVMSSTLQQFSKVIDELSSCHAVLSTQLADAMMFPITQFKERDLKEILTLKEVFQIASNDHDAAINRYSRLSKKRENDKVKYEVTEDVYTSRKKQHQTMMHYFCALNTLQYKKKIALLEPLLGYMQAQISFFKMGSENLNEQLEEFLANIGTSVQNVRREMDSDIETMQQTIEDLEVASDPLYVPDPDPTKFPVNRNLTRKAGYLNARNKTGLVSSTWDRQFYFTQGGNLMSQARGDVAGGLAMDIDNCSVMAVDCEDRRYCFQITSFDGKKSSILQAESKKDHEEWICTINNISKQIYLSENPEETAARVNQSALEAVTPSPSFQQRHESLRPAAGQSRPPTARTSSSGSLGSESTNLAALSLDSLVAPDTPIQFDIISPVCEDQPGQAKAFGQGGRRTNPFGESGGSTKSETEDSILHQLFIVRFLGSMEVKSDDHPDVVYETMRQILAARAIHNIFRMTESHLLVTCDCLKLIDPQTQVTRLTFPLPCVVLYATHQENKRLFGFVLRTSSGRSESNLSSVCYIFESNNEGEKICDSVGLAKQIALHAELDRRASEKQKEIERVKEKQQKELNKQKQIEKDLEEQSRLIAASSRPNQASSEGQFVVLSSSQSEESDLGEGGKKRESEA

SEQ ID NO: 762715 - protein, 80 aa, Homo sapiens
TAARRLEKAVRAGTAAALAGEGGPGSAAAGGPARGAVGGSCVSCHRPPSATMPGIDKLPIEETLEDSPQNRVQEAEQQRI

SEQ ID NO: 762716 - protein, 144 aa, Homo sapiens
MPPGGPHSAPRFFVKGAPKRGSRDNKSTEAQRARRRFKQQRAGKRGNTAVRSVWGISLCREREPLYFRWGRGRTIMAAEPSSLSQRDFTGARRAKLITLLHGGFYVVFKHQAAHILLRPALKKLRLNGTIVFSSKHLFPPGALW

SEQ ID NO: 762717 - protein, 760 aa, Homo sapiens; identical to SEQ ID NO: 762714

SEQ ID NO: 762718 - protein, 760 aa, Homo sapiens; identical to SEQ ID NO: 762714

SEQ ID NO: 762719 - protein, 360 aa, Homo sapiens
YYYKIRGRVDKKDHEEWICTINNISKQIYLSENPEETAARVNQSALEAVTPSPSFQQRHESLRPAAGQSRPPTARTSSSGSLGSESTNLAALSLDSLVAPDTPIQFDIISPVCEDQPGQAKAFGQGGRRTNPFGESGGSTKSETEDSILHQLFIVRFLGSMEVKSDDHPDVVYETMRQILAARAIHNIFRMTESHLLVTCDCLKLIDPQTQVTRLTFPLPCVVLYATHQENKRLFGFVLRTSSGRSESNLSSVCYIFESNNEGEKICDSVGLAKQIALHAELDRRASEKQKEIERVKEKQQKELNKQKQIEKDLEEQSRLIAASSRPNQASSEGQFVVLSSSQSEESDLGEGGKKRESEA

SEQ ID NO: 762720 - protein, 250 aa, Homo sapiens [sequence omitted]

SEQ ID NO: 762721 - protein, 725 aa, Homo sapiens
TAARRLEKAVRAGTAAALAGEGGPGSAAAGGPARGAVGGSCVSCHRPPSATMPGIDKLPIEETLEDSPQTRSLLGVFEEDATAISNYMNQLYQAMHRIYDAQNELSAATHLTSKLLKEYEKQRFPLGGDDEVMSSTLQQFSKVIDELSSCHAVLSTQLADAMMFPITQFKERDLKEILTLKEVFQIASNDHDAAINRYSRLSKKRENDKVKYEVTEDVYTSRKKQHQTMMHYFCALNTLQYKKKIALLEPLLGYMQAQISFFKMGSENLNEQLEEFLANIGTSVQNVRREMDSDIETMQQTIEDLEVASDPLYVPDPDPTKFPVNRNLTRKAGYLNARNKTGLVSSTWDRQFYFTQGGNLMSQARGDVAGGLAMDIDNCSVMAVDCEDRRYCFQITSFDGKKSSILQAESKKDHEEWICTINNISKQIYLSENPEETAARVNQSALEAVTPSPSFQQRHESLRPAAGQSRPPTARTSSSGSLGSESTNLAALSLDSLVAPDTPIQFDIISPVCEDQPGQAKAFGQGGRRTNPFGESGGSTKSETEDSILHQLFIVRFLGSMEVKSDDHPDVVYETMRQILAARAIHNIFRMTESHLLVTCDCLKLIDPQTQVTRLTFPLPCVVLYATHQENKRLFGFVLRTSSGRSESNLSSVCYIFESNNEGEKICDSVGLAKQIALHAELDRRASEKQKEIERVKEKQQKELNKQKQIEKVYSPNVWIFMCCL

SEQ ID NO: 762722 - protein, 620 aa, Homo sapiens
TAARRLEKAVRAGTAAALAGEGGPGSAAAGGPARGAVGGSCVSCHRPPSATMPGIDKLPIEETLEDSPQTRSLLGVFEEDATAISNYMNQLYQAMHRIYDAQNELSAATHLTSKLLKEYEKQRFPLGGDDEVMSSTLQQFSKVIDELSSCHAVLSTQLADAMMFPITQFKERDLKEILTLKEVFQIASNDHDAAINRYSRLSKKRENDKVKYEVTEDVYTSRKKQHQTMMHYFCALNTLQYKKKIALLEPLLGYMQAQISFFKMGSENLNEQLEEFLANIGTSVQNVRREMDSDIETMQQTIEDLEVASDPLYVPDPDPTKFPVNRNLTRKAGYLNARNKTGLVSSTWDRQFYFTQGGNLMSQARGDVAGGLAMDIDNCSVMAVDCEDRRYCFQITSFDGKKSSILQAESKKDHEEWICTINNISKQIYLSENPEETAARVNQSALEAVTPSPSFQQRHESLRPAAGQSRPPTARTSSSGSLGSESTNLAALSLDSLVAPDTPIQFDIISPVCEDQPGQAKAFGQGGRRTNPFGESGGSTKSETEDSILHQLFIVRFLGSMEVKSDDHPDVVYETMRQILAARAIHNIFRMTESHLLVTCDCLKLIDPQTQVTRLTVSST

SEQ ID NO: 762723 - protein, 350 aa, Homo sapiens
TAARRLEKAVRAGTAAALAGEGGPGSAAAGGPARGAVGGSCVSCHRPPSATMPGIDKLPIEETLEDSPQTRSLLGVFEEDATAISNYMNQLYQAMHRIYDAQNELSAATHLTSKLLKEYEKQRFPLGGDDEVMSSTLQQFSKVIDELSSCHAVLSTQLADAMMFPITQFKERDLKEILTLKEVFQIASNDHDAAINRYSRLSKKRENDKVKYEVTEDVYTSRKKQHQTMMHYFCALNTLQYKKKIALLEPLLGYMQAQISFFKMGSENLNEQLEEFLANIGTSVQNVRREMDSDIETMQQTIEDLEVASDPLYVPDPDPTKFPVNRNLTRKAGYLNARKSDARLIDIAVY

SEQ ID NO: 762724 - protein, 148 aa, Homo sapiens
GRDFPHGRSAPGEGCAGGDGCSPCRRGRAGVSCGGRAGAGSCGRQLRLLPPPSLRHDAGDRQAAHRGDAGGQPAGEARELVGDEGEPSWPTPGLAPPRLPQVPAPAQVGAAAALGHRPSQAAPGVVEAGPAAQGPRGPARLGRGPQAE

SEQ ID NO: 762725 - protein, 66 aa, Homo sapiens
LFFVDIAIDRHLAIHRHLSIHRHQCSVQFKIMQCFTLELDLKNSTLCDHGIGIHVGWRTYFFILSQ

SEQ ID NO: 762726 - protein, 135 aa, Homo sapiens
ARRRPAGCRRRCLEEAVQPHQQVADLTMGRSALDRTTAQPEASGTPAAAQSPPGPWRPSGTGRCLLCSNPSGAPCPLSLPRRALPCEDYTRCFSSLPEDTASLGPLPCAKTPMTSVPNAVPSAVLWGAALSDFPG

SEQ ID NO: 762727 - protein, 83 aa, Homo sapiens
VVWRVYVNMRAPCAAGSGSAPILPHRAAQVWPQMSGARGFPAELRALFRPCGVTIADSVKSHALYEAERGFDAALFSSMQTSP

SEQ ID NO: 762728 - protein, 883 aa, Homo sapiens
PRPRRTSPPDAVISASHVLHRIHLLCCPCSRSSGQGYGTFPAHHNPDSQKPSRYLSHPSLSHHVKTFWGASASESPAEVRLGAHPGALLTHDSLLEVCDDYSLDDNEYFFDRHPGAFTSILNFYRTGRLHMMEEMCALSFSQELDYWGIDEIYLESCCQARYHQKKEQMNEELKREAETLREREGEEFDNTCCAEKRKKLWDLLEKPNSSVAAKILAIISIMFIVLSTIALSLNTLPELQSLDEFGQSTDNPQLAHVEAVCIAWFTMEYLLRFLSSPKKWKFFKGPLNAIDLLAILPYYVTIFLTESNKSVLQFQNVRRVVQIFRIMRILRILKLARHSTGLQSLGFTLRRSYNELGLLILFLAMGIMIFSSLVFFAEKDEDDTKFKSIPASFWWATITMTTVGYGDIYPKTLLGKIVGGLCCIAGVLVIALPIPIIVNNFSEFYKEQKRQEKAIKRREALERAKRNGSIVSMNMKDAFARSIEMMDIVVEKNGENMGKKDKVQDNHLSPNKWKWTKRTLSETSSSKSFETKEQGSPEKARSSSSPQHLNVQQLEDMYNKMAKTQSQPILNTKESAAQSKPKEELEMESIPSPVAPLPTRTEGVIDMRSMSSIDSFISCATDFPEATRFSHSPLTSLPSKTGGSTAPEVGWRGALGASGGRFVEANPSPDASQHSSFFIESPKSSMKTNNPLKLRALKVNFMEGDPSPLLPVLGMYHDPLRNRGSAAAAVAGLECATLLDKAVLSPESSIYTTASAKTPPRSPEKHTAIAFNFEAGVHQYIDADTDDEGQLLYSVDSSPPKSLPGSTSPKFSTGTRSEKNHFESSPLPTSPKFLRQNCIYSTEALTGKGPSGQEKCKLENHISPDVRVLPGGGAHGSTRDQSI

SEQ ID NO: 762729 - protein, 131 aa, Homo sapiens
RHPGAFTSILNFYRTGRLHMMEEMCALSFSQELDYWGIDEIYLESCCQARYHQKKEQMNEELKREAETLREREGEEFDNTCCAEKRKKLWDLLEKPNSSVAAKVSLGSGGCWSGGICLHPHIEDHCWRTLA

SEQ ID NO: 762730 - protein, 854 aa, Homo sapiens
MTKHGSRSTSSLPPEPMEIVRSKACSRRVRLNVGGLAHEVLWRTLDRLPRTRLGKLRDCNTHDSLLEVCDDYSLDDNEYFFDRHPGAFTSILNFYRTGRLHMMEEMCALSFSQELDYWGIDEIYLESCCQARYHQKKEQMNEELKREAETLREREGEEFDNTCCAEKRKKLWDLLEKPNSSVAAKILAIISIMFIVLSTIALSLNTLPELQSLDEFGQSTDNPQLAHVEAVCIAWFTMEYLLRFLSSPKKWKFFKGPLNAIDLLAILPYYVTIFLTESNKSVLQFQNVRRVVQIFRIMRILRILKLARHSTGLQSLGFTLRRSYNELGLLILFLAMGIMIFSSLVFFAEKDEDDTKFKSIPASFWWATITMTTVGYGDIYPKTLLGKIVGGLCCIAGVLVIALPIPIIVNNFSEFYKEQKRQEKAIKRREALERAKRNGSIVSMNMKDAFARSIEMMDIVVEKNGENMGKKDKVQDNHLSPNKWKWTKRTLSETSSSKSFETKEQGSPEKARSSSSPQHLNVQQLEDMYNKMAKTQSQPILNTKESAAQSKPKEELEMESIPSPVAPLPTRTEGVIDMRSMSSIDSFISCATDFPEATRFSHSPLTSLPSKTGGSTAPEVGWRGALGASGGRFVEANPSPDASQHSSFFIESPKSSMKTNNPLKLRALKVNFMEGDPSPLLPVLGMYHDPLRNRGSAAAAVAGLECATLLDKAVLSPESSIYTTASAKTPPRSPEKHTAIAFNFEAGVHQYIDADTDDEGQLLYSVDSSPPKSLPGSTSPKFSTGTRSEKNHFESSPLPTSPKFLRQNCIYSTEALTGKGPSGQEKCKLENHISPDVRVLPGGGAHGSTRDQSI

SEQ ID NO: 762731 - protein, 446 aa, Homo sapiens
PRPRRTSPPDAVISASHVLHRIHLLCCPCSRSSGQGYGTFPAHHNPDSQKPSRYLSHPSLSHHVKTFWGASASESPAEVRLGAHPGALLTHDSLLEVCDDYSLDDNEYFFDRHPGAFTSILNFYRTGRLHMMEEMCALSFSQELDYWGIDEIYLESCCQARYHQKKEQMNEELKREAETLREREGEEFDNTCCAEKRKKLWDLLEKPNSSVAAKILAIISIMFIVLSTIALSLNTLPELQSLDEFGQSTDNPQLAHVEAVCIAWFTMEYLLRFLSSPKKWKFFKGPLNAIDLLAILPYYVTIFLTESNKSVLQFQNVRRVVQIFRIMRILRILKLARHSTGLQSLGFTLRRSYNELGLLILFLAMGIMIFSSLVFFAEKDEDDTKFKSIPASFWWATITMTTVGYGDIYPKTLLGKIVGGLCCIAGVLVIALPIPIKTIICCVKRR

SEQ ID NO: 762732 - protein, 501 aa, Homo sapiens
MLQMLWHFLASFFPRAGCHGSREGDDREVRGTPAPAWRDQMASFLGKQDGRAEATEKRPTILLVVGPAEQFPKKIVQAGDKDLDGQLDFEEFVHYLQDHEKKLRLVFKSLDKKNDGRIDAQEIMQSLRDLGVKISEQQAEKILKRIRTGHFWGPVTYMDKNGTMTIDWNEWRDYHLLHPVENIPEIILYWKHSTIFDVGENLTVPDEFTVEERQTGMWWRHLVAGGGAGAVSRTCTAPLDRLKVLMQVHASRSNNMGIVGGFTQMIREGGARSLWRGNGINVLKIAPESAIKFMAYEQIKRLVGSDQETLRIHERLVAGSLAGAIAQSSIYPMEVLKTRMALRKTGQYSGMLDCARRILAREGVAAFYKGYVPNMLGIIPYAGIDLAVYETLKNAWLQHYAVNSADPGVFVLLACGTMSSTCGQLASYPLALVRTRMQAQASIEGAPEVTMSSLFKHILRTEGAFGLYRGLAPNFMKVIPAVSISYVVYENLKITLGVQSR

SEQ ID NO: 762733 - protein, 96 aa, Homo sapiens
LSNQEHQWLFSRLQDVRDVSATFLSDLEENFENNIVVLQTLKNAWLQHYAVNSADPGVFVLLACGTMSSTCGQLASYPLALVRTRMQAQGKAGPGQ

SEQ ID NO: 762734 - protein, 469 aa, Homo sapiens
MLCLCLYVPVIGEAQTEFQYFESKGLPAELKSIFKLSVFIPSQEFSTYRQWKQKIVQAGDKDLDGQLDFEEFVHYLQDHEKKLRLVFKSLDKKNDGRIDAQEIMQSLRDLGVKISEQQAEKILKSMDKNGTMTIDWNEWRDYHLLHPVENIPEIILYWKHSTIFDVGENLTVPDEFTVEERQTGMWWRHLVAGGGAGAVSRTCTAPLDRLKVLMQVHASRSNNMGIVGGFTQMIREGGARSLWRGNGINVLKIAPESAIKFMAYEQIKRLVGSDQETLRIHERLVAGSLAGAIAQSSIYPMEVLKTRMALRKTGQYSGMLDCARRILAREGVAAFYKGYVPNMLGIIPYAGIDLAVYETLKNAWLQHYAVNSADPGVFVLLACGTMSSTCGQLASYPLALVRTRMQAQASIEGAPEVTMSSLFKHILRTEGAFGLYRGLAPNFMKVIPAVSISYVVYENLKITLGVQSR

SEQ ID NO: 762735 - protein, 104 aa, Homo sapiens
MMKGEVTWPPRPDFPTYSIDANLAVKEEERIWPCGHWHLSPADGWGSRACLGVQGARAAWPGCTEGKCWGSWCSELAWTLSGWAPPQNQTHCPHCGMRAVEHHV

SEQ ID NO: 762736 - protein, 542 aa, Homo sapiens
PASPSPRSQLQSAWLASRAVTAGPPPPLPPAPGAPASRPMVSSVLCRCVASPPPDAAATAASSSASSPASVGDPCGGAICGGPDHRLRLWRLFQTLDVNRDGGLCVNDLAVGLRRLGLHRTEGELQKIVQAGDKDLDGQLDFEEFVHYLQDHEKKLRLVFKSLDKKNDGRIDAQEIMQSLRDLGVKISEQQAEKILKSMDKNGTMTIDWNEWRDYHLLHPVENIPEIILYWKHSTIFDVGENLTVPDEFTVEERQTGMWWRHLVAGGGAGAVSRTCTAPLDRLKVLMQVHASRSNNMGIVGGFTQMIREGGARSLWRGNGINVLKIAPESAIKFMAYEQIKRLVGSDQETLRIHERLVAGSLAGAIAQSSIYPMEVLKTRMALRKTGQYSGMLDCARRILAREGVAAFYKGYVPNMLGIIPYAGIDLAVYETLKNAWLQHYAVNSADPGVFVLLACGTMSSTCGQLASYPLALVRTRMQAQASIEGAPEVTMSSLFKHILRTEGAFGLYRGLAPNFMKVIPAVSISYVVYENLKITLGVQSR

SEQ ID NO: 762737 - protein, 542 aa, Homo sapiens; identical to SEQ ID NO: 762736

SEQ ID NO: 762738 - protein, 387 aa, Homo sapiens
PASPSPRSQLQSAWLASRAVTAGPPPPLPPAPGAPASRPMVSSVLCRCVASPPPDAAATAASSSASSPASVGDPCGGAICGGPDHRLRLWRLFQTLDVNRDGGLCVNDLAVGLRRLGLHRTEGELQKIVQAGDKDLDGQLDFEEFVHYLQDHEKKLRLVFKSLDKKNDGRIDAQEIMQSLRDLGVKISEQQAEKILKSMDKNGTMTIDWNEWRDYHLLHPVENIPEIILYWKHSTIFDVGENLTVPDEFTVEERQTGMWWRHLVAGGGAGAVSRTCTAPLDRLKVLMQVHASRSNNMGIVGGFTQMIREGGARSLWRGNGINVLKIAPESAIKFMAYEQIKRLVGSDQETLRIHERLVAGSLAGAIAQSSIYPMEFLNVKAVRCLSL

SEQ ID NO: 762739 - protein, 315 aa, Homo sapiens
CAIWHEAQIFDVGENLTVPDEFTVEERQTGMWWRHLVAGGGAGAVSRTCTAPLDRLKVLMQVHASRSNNMGIVGGFTQMIREGGARSLWRGNGINVLKIAPESAIKFMAYEQIKRLVGSDQETLRIHERLVAGSLAGAIAQSSIYPMEVLKTRMALRKTGQYSGMLDCARRILAREGVAAFYKGYVPNMLGIIPYAGIDLAVYETLKNAWLQHYAVNSADPGVFVLLACGTMSSTCGQLASYPLALVRTRMQAQASIEGAPEVTMSSLFKHILRTEGAFGLYRGLAPNFMKVIPAVSISYVVYENLKITLGVQSR

SEQ ID NO: 762740 - protein, 542 aa, Homo sapiens; identical to SEQ ID NO: 762736

SEQ ID NO: 762741 - protein, 104 aa, Homo sapiens; identical to SEQ ID NO: 762735

SEQ ID NO: 762742 - protein, 542 aa, Homo sapiens; identical to SEQ ID NO: 762736

SEQ ID NO: 762743 - protein, 542 aa, Homo sapiens; identical to SEQ ID NO: 762736

SEQ ID NO: 762744 - protein, 117 aa, Homo sapiens
SGGGVGRRAGPTSSRETGAGRAGDPAGEICAQSVRGRPGRPARGPGAFSEPSHSARPELGLVGGVIGPTSGPSRGPGRLPHGRGASPSTSGCRLCRGESASSQRGILSASQARLIRG

SEQ ID NO: 762745 - protein, 101 aa, Homo sapiens
AGAGSGAGRDPRPLARLGLAALGTPLEKFAPFSEPSHSARPELGLVGGVIGPTSGPSRGPGRLPHGRGASPSTSGCRLCRGESASSQRGILSASQARLIRG

SEQ ID NO: 762746 - protein, 565 aa, Homo sapiens
LFPCLPFGHLRKAPSSVRMATMVPSVLWPRACWTLLVCCLLTPGVQGQEFLLRVEPQNPVLSAGGSLFVNCSTDCPSSEKIALETSLSKELVASGMGWAAFNLSNVTGNSRILCSVYCNGSQITGSSNITVYRLPERVELAPLPPWQPVGQNFTLRCQVEDGSPRTSLTVVLLRWEEELSRQPAVEEPAEVTATVLASRDDHGAPFSCRTELDMQPQGLGLFVNTSAPRQLRTFVLPVTPPRLVAPRFLEVETSWPVDCTLDGLFPASEAQVYLALGDQMLNATVMNHGDTLTATATATARADQEGAREIVCNVTLGGERREARENLTVFSFLGPIVNLSEPTAHEGSTVTVSCMAGARVQVTLDGVPAAAPGQPAQLQLNATESDDGRSFFCSATLEVDGEFLHRNSSVQLRVLYGPKIDRATCPQHLKWKDKTRHVLQCQARGNPYPELRCLKEGSSREVPVGIPFFVNVTHNGTYQCQASSSRGKYTLVVVMDIEAGSSHFVPVFVAVLLTLGVVTIVLALMYVFREHQRSGSYHVREESTYLPLTSMQPTEAMGEEPSRAE

SEQ ID NO: 762747 - protein, 89 aa, Homo sapiens
FLLSYPPGPFSLRENRSLGAIQVESLWESDIVPISRSLCCHSLVEDEFLNSACPPPARSLELASFQPSARNQHSMKINSGPAHQQDLST

SEQ ID NO: 762748 - protein, 884 aa, Homo sapiens
MLGRRAPICPSRLCSRQKQWGKNRPELSDAGIRDQSWRGLGCALRFRTNKAFKLPNLWFDSTRAASLSHPGAHPLSSVAATEGGGACGAQTQLELLRGGLGLSQRGKGGGKEVGFLPANRRARPRCRSMPLRPGSLVPEGAGFPKMAADVSVTHRPPLSPKSGAEVEAGDAAERRAPEEELPPLDPEEIRKRLEHTERQFRNRRKILIRGLPGDVTNQEVHDLLSDYELKYCFVDKYKGTAFVTLLNGEQAEAAINAFHQSRLRERELSVQLQPTDALLCVANLPPSLTQQQFEELVRPFGSLERCFLVYSERTGQSKGYGFAEYMKKDSAARAKSDLLGKPLGPRTLYVHWTDAGQLTPALLHSRCLCVDRLPPGFNDVDALCRALSAVHSPTFCQLACGQDGQLKGFAVLEYETAEMAEEAQQQADGLSLGGSHLRVSFCAPGPPGRSMLAALIAAQATALNRGKGLLPEPNILQLLNNLGPSASLQLLLNPLLHGSAGGKQGLLGAPPAMPLLNGPALSTALLQLALQTQGQKKPGILGDSPLGALQPGAQPANPLLGELPAGGGLPPELPPRRGKPPPLLPSVLGPAGGDREALGLGPPAAQLTPPPAPVGLRGSGLRGLQKDSGPLPTPPGVSLLGEPPKDYRIPLNPYLNLHSLLPASNLAGKEARGWGGAGRSRRPAEGPPTNPPAPGGGSSSSKAFQLKSRLLSPLSSARLPPEPGLSDSYSFDYPSDMGPRRLFSHPREPALGPHGPSRHKMSPPPSGFGERSSGGSGGGPLSHFYSGSPTSYFTSGLQAGLKQSHLSKAIGSSPLGSGEGLLGLSPGPNGHSHLLKTPLGGQKRSFAHLLPSPEPSPEGSYVGQHSQGLGGHYADSYLKRKRIF

SEQ ID NO: 762749 - protein, 884 aa, Homo sapiens; identical to SEQ ID NO: 762748

SEQ ID NO: 762750 - protein, 884 aa, Homo sapiens; identical to SEQ ID NO: 762748

SEQ ID NO: 762751 - protein, 884 aa, Homo sapiens; identical to SEQ ID NO: 762748

SEQ ID NO: 762752 - protein, 691 aa, Homo sapiens
  misc_feature (2)..(2): Xaa can be any naturally occurring amino acid
EXGYRRPRLASRYVSPGPPGGREGQEVHDLLSDYELKYCFVDKYKGTAFVTLLNGEQAEAAINAFHQSRLRERELSVQLQPTDALLCVANLPPSLTQQQFEELVRPFGSLERCFLVYSERTGQSKGYGFAEYMKKDSAARAKSDLLGKPLGPRTLYVHWTDAGQLTPALLHSRCLCVDRLPPGFNDVDALCRALSAVHSPTFCQLACGQDGQLKGFAVLEYETAEMAEEAQQQADGLSLGGSHLRVSFCAPGPPGRSMLAALIAAQATALNRGKGLLPEPNILQLLNNLGPSASLQLLLNPLLHGSAGGKQGLLGAPPAMPLLNGPALSTALLQLALQTQGQKKPGILGDSPLGALQPGAQPANPLLGELPAGGGLPPELPPRRGKPPPLLPSVLGPAGGDREALGLGPPAAQLTPPPAPVGLRGSGLRGLQKDSGPLPTPPGVSLLGEPPKDYRIPLNPYLNLHSLLPASNLAGKEARGWGGAGRSRRPAEGPPTNPPAPGGGSSSSKAFQLKSRLLSPLSSARLPPEPGLSDSYSFDYPSDMGPRRLFSHPREPALGPHGPSRHKMSPPPSGFGERSSGGSGGGPLSHFYSGSPTSYFTSGLQAGLKQSHLSKAIGSSPLGSGEGLLGLSPGPNGHSHLLKTPLGGQKRSFAHLLPSPEPSPEGSYVGQHSQGLGGHYADSYLKRKRIF

SEQ ID NO: 762753 - protein, 204 aa, Homo sapiens
SSRSRSKNYNPPAPGGGSSSSKAFQLKSRLLSPLSSARLPPEPGLSDSYSFDYPSDMGPRRLFSHPREPALGPHGPSRHKMSPPPSGFGERSSGGSGGGPLSHFYSGSPTSYFTSGLQAGLKQSHLSKAIGSSPLGSGEGLLGLSPGPNGHSHLLKTPLGGQKRSFAHLLPSPEPSPEGSYVGQHSQGLGGHYADSYLKRKRIF

SEQ ID NO: 762754 - protein, 698 aa, Homo sapiens
MLGRRAPICPSRLCSRQKQWGKNRPELSDAGIRDQSWRGLGCALRFRTNKAFKLPNLWFDSTRAASLSHPGAHPLSSVAATEGGGACGAQTQLELLRGGLGLSQRGKGGGKEVGFLPANRRARPRCRSMPLRPGSLVPEGAGFPKMAADVSVTHRPPLSPKSGAEVEAGDAAERRAPEEELPPLDPEEIRKRLEHTERQFRNRRKILIRGLPGDVTNQEVHDLLSDYELKYCFVDKYKGTAFVTLLNGEQAEAAINAFHQSRLRERELSVQLQPTDALLCVANLPPSLTQQQFEELVRPFGSLERCFLVYSERTGQSKGYGFAEYMKKDSAARAKSDLLGKPLGPRTLYVHWTDAGQLTPALLHSRCLCVDRLPPGFNDVDALCRALSAVHSPTFCQLACGQDGQLKGFAVLEYETAEMAEEAQQQADGLSLGGSHLRVSFCAPGPPGRSMLAALIAAQATALNRGKGLLPEPNILQLLNNLGPSASLQLLLNPLLHGSAGGKQGLLGAPPAMPLLNGPALSTALLQLALQTQGQKKPGILGDSPLGALQPGAQPANPLLGELPAGGGLPPELPPRRGKPPPLLPSVLGPAGGDREALGLGPPAAQLTPPPAPVGLRGSGLRGLQKDSGPLPTPPGVSLLGEPPKDYRIPLNPYLNLHSLLPASNLAGKEARGWGGAGRSRASDWPNNPALSVAEPSS

SEQ ID NO: 762755 - protein, 542 aa, Homo sapiens
LFPCLPFGHLRKAPSSVRMATMVPSVLWPRACWTLLVCCLLTPGVQGQEFLLRVEPQNPVLSAGGSLFVNCSTDCPSSEKIALETSLSKELVASGMGWAAFNLSNVTGNSRILCSVYCNGSQITGSSNITVYRLPERVELAPLPPWQPVGQNFTLRCQVEDGSPRTSLTVVLLRWEEELSRQPAVEEPAEVTATVLASRDDHGAPFSCRTELDMQPQGLGLFVNTSAPRQLRTFVLPVTPPRLVAPRFLEVETSWPVDCTLDGLFPASEAQVYLALGDQMLNATVMNHGDTLTATATATARADQEGAREIVCNVTLGGERREARENLTVFSFLGPIVNLSEPTAHEGSTVTVSCMAGARVQVTLDGVPAAAPGQPAQLQLNATESDDGRSFFCSATLEVDGEFLHRNSSVQLRVLYGPKIDRATCPQHLKWKDKTRHVLQCQARGNPYPELRCLKEGSSREVPVGIPFFVNVTHNAGSSHFVPVFVAVLLTLGVVTIVLALMYVFREHQRSGSYHVREESTYLPLTSMQPTEAMGEEPSRAE

SEQ ID NO: 762756 - protein, 186 aa, Homo sapiens
MVPQAFLREIGGFGVFLGPDGFYVYTDDSSVQLRVLYGPKIDRATCPQHLKWKDKTRHVLQCQARGNPYPELRCLKEGSSREVPVGIPFFVNVTHNGTYQCQASSSRGKYTLVVVMDIEAGSSHFVPVFVAVLLTLGVVTIVLALMYVFREHQRSGSYHVREESTYLPLTSMQPTEAMGEEPSRAE

SEQ ID NO: 762757 - protein, 884 aa, Homo sapiens; identical to SEQ ID NO: 762748

SEQ ID NO: 762758 - protein, 884 aa, Homo sapiens; identical to SEQ ID NO: 762748

SEQ ID NO: 762759 - protein, 884 aa, Homo sapiens; identical to SEQ ID NO: 762748

SEQ ID NO: 762760 - protein, 884 aa, Homo sapiens; identical to SEQ ID NO: 762748

SEQ ID NO: 762761 - protein, 297 aa, Homo sapiens
MLGRRAPICPSRLCSRQKQWGKNRPELSDAGIRDQSWRGLGCALRFRTNKAFKLPNLWFDSTRAASLSHPGAHPLSSVAATEGGGACGAQTQLELLRGGLGLSQRGKGGGKEVGFLPANRRARPRCRSMPLRPGSLVPEGAGFPKMAADVSVTHRPPLSPKSGAEVEAGDAAERRAPEEELPPLDPEEIRKRLEHTERQFRNRRKILIRGLPGDVTNQEVHDLLSDYELKYCFVDKYKGTARPALPPSPHLLLRCARLSGALLPHCSCNFGLSSALEVSLTSREDTETVSFFFNFDN

SEQ ID NO: 762762 - protein, 196 aa, Homo sapiens
EFPGQTTRPESSSKAFQLKSRLLSPLSSARLPPEPGLSDSYSFDYPSDMGPRRLFSHPREPALGPHGPSRHKMSPPPSGFGERSSGGSGGGPLSHFYSGSPTSYFTSGLQAGLKQSHLSKAIGSSPLGSGEGLLGLSPGPNGHSHLLKTPLGGQKRSFAHLLPSPEPSPEGSYVGQHSQGLGGHYADSYLKRKRIF

SEQ ID NO: 762763 - protein, 565 aa, Homo sapiens; identical to SEQ ID NO: 762746

SEQ ID NO: 762764 - protein, 168 aa, Homo sapiens
RGRAAAASAAAPGGWEPRRRARWRRECCAPAERPGPAASCSGRPPAASCPGSGEQRRPCPVGAGKGPPRGGGRGFPGAGLRPGPVPSAGGCPASGQWGRSWGGAGAGAGSGRPRAQGHGGDGPLCGSTLAREGPRGLARRPHPPRGAGPACRALTGATRGQGQGQRAP

SEQ ID NO: 762765 - protein, 286 aa, Homo sapiens
MAARVLRARGAAWAGGLLQRAAPCSLLPRLRTWTSSSNRSREDSWLKSLFVRKVDPRKDAHSNLLAKKETSNLYKLQFHNVKPECLEAYNKICQEVLPKIHEDKHYPCTLVGTWNTWYGEQDQAVHLWRYEGGYPALTEVMNKLRENKEFLEFRKARSDMLLSRKNQLLLEFSFWNEPVPRSGPNIYELRSYQLRPGTMIEWGNYWARAIRFRQDGNEAVGGFFSQIGQLYMVHHLWAYRDLQTREDIRNAAWHKHGWEELVYYTVPLIQEMESRIMIPLKTSPLQ

SEQ ID NO: 762766 - protein, 298 aa, Homo sapiens
MEGGWGPRAGRRLQRREGGRRGAAWAGGLLQRAAPCSLLPRLRTWTSSSNRSREDSWLKSLFVRKVDPRKDAHSNLLAKKETSNLYKLQFHNVKPECLEAYNKICQEVLPKIHEDKHYPCTLVGTWNTWYGEQDQAVHLWRYEGGYPALTEVMNKLRENKEFLEFRKARSDMLLSRKNQLLLEFSFWNEPVPRSGPNIYELRSYQLRPGTMIEWGNYWARAIRFRQDGNEAVGGFFSQIGQLYMVHHLWAYRDLQTREDIRNAAWHKHGWEELVYYTVPLIQEMESRIMIPLKTSPLQ

SEQ ID NO: 762767 - protein, 260 aa, Homo sapiens
REKMTESGRGYFGEGEDSWLKSLFVRKVDPRKDAHSNLLAKKETSNLYKLQFHNVKPECLEAYNKICQEVLPKIHEDKHYPCTLVGTWNTWYGEQDQAVHLWRYEGGYPALTEVMNKLRENKEFLEFRKARSDMLLSRKNQLLLEFSFWNEPVPRSGPNIYELRSYQLRPGTMIEWGNYWARAIRFRQDGNEAVGGFFSQIGQLYMVHHLWAYRDLQTREDIRNAAWHKHGWEELVYYTVPLIQEMESRIMIPLKTSPLQ

SEQ ID NO: 762768 - protein, 211 aa, Homo sapiens
CWGDYRGSPARDAYNKICQEVLPKIHEDKHYPCTLVGTWNTWYGEQDQAVHLWRYEGGYPALTEVMNKLRENKEFLEFRKARSDMLLSRKNQLLLEFSFWNEPVPRSGPNIYELRSYQLRPGTMIEWGNYWARAIRFRQDGNEAVGGFFSQIGQLYMVHHLWAYRDLQTREDIRNAAWHKHGWEELVYYTVPLIQEMESRIMIPLKTSPLQ

SEQ ID NO: 762769 - protein, 158 aa, Homo sapiens
GTRCQEVLPKIHEDKLRENKEFLEFRKARSDMLLSRKNQLLLEFSFWNEPVPRSGPNIYELRSYQLRPGTMIEWGNYWARAIRFRQDGNEAVGGFFSQIGQLYMVHHLWAYRDLQTREDIRNAAWHKHGWEELVYYTVPLIQEMESRIMIPLKTSPLQ

SEQ ID NO: 762770 - protein, 286 aa, Homo sapiens; identical to SEQ ID NO: 762765

SEQ ID NO: 762771 - protein, 286 aa, Homo sapiens; identical to SEQ ID NO: 762765

SEQ ID NO: 762772 - protein, 146 aa, Homo sapiens
MNKLRENKEFLEFRKARSDMLLSRKNQLLLEFSFWNEPVPRSGPNIYELRSYQLRPGTMIEWGNYWARAIRFRQDGNEAVGGFFSQIGQLYMVHHLWAYRDLQTREDIRNAAWHKHGWEELVYYTVPLIQEMESRIMIPLKTSPLQ

SEQ ID NO: 762773 - protein, 160 aa, Homo sapiens
MAARVLRARGAAWAGGLLQRAAPCSLLPRLRTWTSSSNRSREDSWLKSLFVRKVDPRKDAHSNLLAKKETSNLYKLQFHNVKPECLEAYNKICQEVLPKIHEDKHYPCTLVGTWNTWYGEQDQAVHLWRYEGGYPALTEVMNKLRENKEESAPVGVQFLE

SEQ ID NO: 762774 - protein, 157 aa, Homo sapiens
EGSRGGGVSGGARGVGAEAPSKMAARVLRARGAAWAGGLLQRAAPCSLLPRLRTWTSSSNRSREDSWLKSLFVRKVDPRKDAHSNLLAKKETSNLYKLQFHNVKPECLEAYNKICQEVLPKIHEDKHYPCTLVGTWNTWYGEQDQAVHLWICSGAES

SEQ ID NO: 762775 - protein, 64 aa, Homo sapiens
MVAPARPRVVRFPDGQQHGVLLSLALWAPCLSEAPPPAALSLAPSGPAAGSACGDRGEHWPGRP

SEQ ID NO: 762776 - protein, 1243 aa, Homo sapiens
MSEAPRFFVGPEDTEINPGNYRHFFHHADEDDEEEDDSPPERQIVVGICSMAKKSKSKPMKEILERISLFKYITVVVFEEEVILNEPVENWPLCDCLISFHSKGFPLDKAVAYAKLRNPFVINDLNMQYLIQDRREVYSILQAEGILLPRYAILNRDPNNPKECNLIEGEDHVEVNGEVFQKPFVEKPVSAEDHNVYIYYPTSAGGGSQRLFRKIGSRSSVYSPESNVRKTGSYIYEEFMPTDGTDVKVYTVGPDYAHAEARKSPALDGKVERDSEGKEVRYPVILNAREKLIAWKVCLAFKQTVCGFDLLRANGQSYVCDVNGFSFVKNSMKYYDDCAKILGNIVMRELAPQFHIPWSIPLEAEDIPIVPTTSGTMMELRCVIAVIRHGDRTPKQKMKMEVRHQKFFDLFEKCDGYKSGKLKLKKPKQLQEVLDIARQLLMELGQNNDSEIEENKPKLEQLKTVLEMYGHFSGINRKVQLTYLPHGCPKTSSEEEDSRREEPSLLLVLKWGGELTPAGRVQAEELGRAFRCMYPGGQGDYAGFPGCGLLRLHSTYRHDLKIYASDEGRVQMTAAAFAKGLLALEGELTPILVQMVKSANMNGLLDSDSDSLSSCQQRVKARLHEILQKDRDFTAEDYEKLTPSGSISLIKSMHLIKNPVKTCDKVYSLIQSLTSQIRHRMEDPKSSDIQLYHSETLELMLRRWSKLEKDFKTKNGRYDISKIPDIYDCIKYDVQHNGSLKLENTMELYRLSKALADIVIPQEYGITKAEKLEIAKGYCTPLVRKIRSDLQRTQDDDTVNKLHPVYSRGVLSPERHVRTRLYFTSESHVHSLLSILRYGALCNESKDEQWKRAMDYLNVVNELNYMTQIVIMLYEDPNKDLSSEERFHVELHFSPGAKGCEEDKNLPSGYGYRPASRENEGRRPFKIDNDDEPHTSKRDEVDRAVILFKPMVSEPIHIHRKSPLPRSRKTATNDEESPLSVSSPEGTGTWLHYTSGVGTGRRRRRSGEQITSSPVSPKSLAFTSSIFGSWQQVVSENANYLRTPRTLVEQKQNPTVGSHCAGLFSTSVLGGSSSAPNLQDYARTHRKKLTSSGCIDDATRGSAVKRFSISFARHPTNGFELYSMVPSICPLETLHNALSLKQVDEFLASIASPSSDVPRKTAEISSTALRSSPIMRKKVSLNTYTPAKILPTPPATLKSTKASSKPATSGPSSAVVPNTSSRKKNITSKTETHEHKKNTGKKK

SEQ ID NO: 762777 - protein, 1124 aa, Homo sapiens
MSEAPRFFVGPEDTEINPGNYRHFFHHADEDDEEEDDSPPERQIVVGICSMAKKSKSKPMKEILERISLFKYITVVVFEEEVILNEPVENWPLCDCLISFHSKGFPLDKAVAYAKLRNPFVINDLNMQYLIQDRREVYSILQAEGILLPRYAILNRDPNNPKECNLIEGEDHVEVNGEVFQKPFVEKPVSAEDHNVYIYYPTSAGGGSQRLFRKIGSRSSVYSPESNVRKTGSYIYEEFMPTDGTDVKVYTVGPDYAHAEARKSPALDGKVERDSEGKEVRYPVILNAREKLIAWKVCLAFKQTVCGFDLLRANGQSYVCDVNGFSFVKNSMKYYDDCAKILGNIVMRELAPQFHIPWSIPLEAEDIPIVPTTSGTMMELRCVIAVIRHGDRTPKQKMKMEVRHQKFFDLFEKCDGYKSGKLKLKKPKQLQEVLDIARQLLMELGQNNDSEIEENKPKLEQLKTVLEMYGHFSGINRKVQLTYLPHGCPKTSSEEEDSRREEPSLLLVLKWGGELTPAGRVQAEELGRAFRCMYPGGQGDYAGFPGCGLLRLHSTYRHDLKIYASDEGRVQMTAAAFAKGLLALEGELTPILVQMVKSANMNGLLDSDSDSLSSCQQRVKARLHEILQKDRDFTAEDYEKLTPSGSISLIKSMHLIKNPVKTCDKVYSLIQSLTSQIRHRMEDPKSSDIQLYHSETLELMLRRWSKLEKDFKTKNGRYDISKIPDIYDCIKYDVQHNGSLKLENTMELYRLSKALADIVIPQEYGITKAEKLEIAKGYCTPLVRKIRSDLQRTQDDDTVNKLHPVYSRGVLSPERHVRTRLYFTSESHVHSLLSILRYGALCNESKDEQWKRAMDYLNVVNELNYMTQIVIMLYEDPNKDLSSEERFHVELHFSPGAKGCEEDKNLPSGYGYRPASRENEGRRPFKIDNDDEPHTSKRDEVDRAVILFKPMVSEPIHIHRKSPLPRSRKTATNDVVSENANYLRTPRTLVEQKQNPTVGFELYSMVPSICPLETLHNALSLKQVDEFLASIASPSSDVPRKTAEISSTALRSSPIMRKKVSLNTYTPAKILPTPPATLKSTKASSKPATSGPSSAVVPNTSSRKKNITSKTETHEHKKNTGKKK

SEQ ID NO: 762778 - protein, 1185 aa, Homo sapiens
MSEAPRFFVGPEDTEINPGNYRHFFHHADEDDEEEDDSPPERQIVVGICSMAKKSKSKPMKEILERISLFKYITVVVFEEEVILNEPVENWPLCDCLISFHSKGFPLDKAVAYAKLRNPFVINDLNMQYLIQDRREVYSILQAEGILLPRYAILNRDPNNPKECNLIEGEDHVEVNGEVFQKPFVEKPVSAEDHNVYIYYPTSAGGGSQRLFRKIGSRSSVYSPESNVRKTGSYIYEEFMPTDGTDVKVYTVGPDYAHAEARKSPALDGKVERDSEGKEVRYPVILNAREKLIAWKVCLAFKQTVCGFDLLRANGQSYVCDVNGFSFVKNSMKYYDDCAKILGNIVMRELAPQFHIPWSIPLEAEDIPIVPTTSGTMMELRCVIAVIRHGDRTPKQKMKMEVRHQKFFDLFEKCDGYKSGKLKLKKPKQLQEVLDIARQLLMELGQNNDSEIEENKPKLEQLKTVLEMYGHFSGINRKVQLTYLPHGCPKTSSEEEDSRREEPSLLLVLKWGGELTPAGRVQAEELGRAFRCMYPGGQGDYAGFPGCGLLRLHSTYRHDLKIYASDEGRVQMTAAAFAKGLLALEGELTPILVQMVKSANMNGLLDSDSDSLSSCQQRVKARLHEILQKDRDFTAEDYEKLTPSGSISLIKSMHLIKNPVKTCDKVYSLIQSLTSQIRHRMEDPKSSDIQLYHSETLELMLRRWSKLEKDFKTKNGRYDISKIPDIYDCIKYDVQHNGSLKLENTMELYRLSKALADIVIPQEYGITKAEKLEIAKGYCTPLVRKIRSDLQRTQDDDTVNKLHPVYSRGVLSPERHVRTRLYFTSESHVHSLLSILRYGALCNESKDEQWKRAMDYLNVVNELNYMTQIVIMLYEDPNKDLSSEERFHVELHFSPGAKGCEEDKNLPSGYGYRPASRENEGRRPFKIDNDDEPHTSKRDEVDRAVILFKPMVSEPIHIHRKSPLPRSRKTATNDVVSENANYLRTPRTLVEQKQNPTVGSHCAGLFSTSVLGGSSSAPNLQDYARTHRKKLTSSGCIDDATRGSAVKRFSISFARHPTNGFELYSMVPSICPLETLHNALSLKQVDEFLASIASPSSDVPRKTAEISSTALRSSPIMRKKVSLNTYTPAKILPTPPATLKSTKASSKPATSGPSSAVVPNTSSRKKNITSKTETHEHKKNTGKKK

SEQ ID NO: 762779 - protein, 1200 aa, Homo sapiens
MSEAPRFFVGPEDTEINPGNYRHFFHHADEDDEEEDDSPPERQIVVGICSMAKKSKSKPMKEILERISLFKYITVVVFEEEVILNEPVENWPLCDCLISFHSKGFPLDKAVAYAKLRNPFVINDLNMQYLIQDRREVYSILQAEGILLPRYAILNRDPNNPKECNLIEGEDHVEVNGEVFQKPFVEKPVSAEDHNVYIYYPTSAGGGSQRLFRKIGSRSSVYSPESNVRKTGSYIYEEFMPTDGTDVKVYTVGPDYAHAEARKSPALDGKVERDSEGKEVRYPVILNAREKLIAWKVCLAFKQTVCGFDLLRANGQSYVCDVNGFSFVKNSMKYYDDCAKILGNIVMRELAPQFHIPWSIPLEAEDIPIVPTTSGTMMELRCVIAVIRHGDRTPKQKMKMEVRHQKFFDLFEKCDGYKSGKLKLKKPKQLQEVLDIARQLLMELGQNNDSEIEENKPKLEQLKTVLEMYGHFSGINRKVQLTYLPHGCPKTSSEEEDSRREEPSLLLVLKWGGELTPAGRVQAEELGRAFRCMYPGGQGDYAGFPGCGLLRLHSTYRHDLKIYASDEGRVQMTAAAFAKGLLALEGELTPILVQMVKSANMNGLLDSDSDSLSSCQQRVKARLHEILQKDRDFTAEDYEKLTPSGSISLIKSMHLIKNPVKTCDKVYSLIQSLTSQIRHRMEDPKSSDIQLYHSETLELMLRRWSKLEKDFKTKNGRYDISKIPDIYDCIKYDVQHNGSLKLENTMELYRLSKALADIVIPQEYGITKAEKLEIAKGYCTPLVRKIRSDLQRTQDDDTVNKLHPVYSRGVLSPERHVRTRLYFTSESHVHSLLSILRYGALCNTNDSQNEDGGMVKEMESKDEQWKRAMDYLNVVNELNYMTQIVIMLYEDPNKDLSSEERFHVELHFSPGAKGCEEDKNLPSGYGYRPASRENEGRRPFKIDNDDEPHTSKRDEVDRAVILFKPMVSEPIHIHRKSPLPRSRKTATNDVVSENANYLRTPRTLVEQKQNPTVGSHCAGLFSTSVLGGSSSAPNLQDYARTHRKKLTSSGCIDDATRGSAVKRFSISFARHPTNGFELYSMVPSICPLETLHNALSLKQVDEFLASIASPSSDVPRKTAEISSTALRSSPIMRKKVSLNTYTPAKILPTPPATLKSTKASSKPATSGPSSAVVPNTSSRKKNITSKTETHEHKKNTGKKK

SEQ ID NO: 762780 - protein, 74 aa, Homo sapiens
MRNLIMPGLRRLLGFCFVSCALQTLNTCSTEGLVLERMTAWAWSDSTALRVLSRLDFSSCSPMASLFHFLGSRR

SEQ ID NO: 762781 - protein, 128 aa, Homo sapiens
MSEAPRFFVGPEDTEINPGNYRHFFHHADEDDEEEDDSPPERQIVVGICSMAKKSKSKPMKEILERISLFKYITVVVFEEEVILNEPVENWPLCDCLISFHSKGIKGSGGETPLSSLFIKLIHINCRL

SEQ ID NO: 762782 - protein, 1222 aa, Homo sapiens
MSEAPRFFVGPEDTEINPGNYRHFFHHADEDDEEEDDSPPERQIVVGICSMAKKSKSKPMKEILERISLFKYITVVVFEEEVILNEPVENWPLCDCLISFHSKGFPLDKAVAYAKLRNPFVINDLNMQYLIQDRREVYSILQAEGILLPRYAILNRDPNNPKECNLIEGEDHVEVNGEVFQKPFVEKPVSAEDHNVYIYYPTSAGGGSQRLFRKIGSRSSVYSPESNVRKTGSYIYEEFMPTDGTDVKVYTVGPDYAHAEARKSPALDGKVERDSEGKEVRYPVILNAREKLIAWKVCLAFKQTVCGFDLLRANGQSYVCDVNGFSFVKNSMKYYDDCAKILGNIVMRELAPQFHIPWSIPLEAEDIPIVPTTSGTMMELRCVIAVIRHGDRTPKQKMKMEVRHQKFFDLFEKCDGYKSGKLKLKKPKQLQEVLDIARQLLMELGQNNDSEIEENKPKLEQLKTVLEMYGHFSGINRKVQLTYLPHGCPKTSSEEEDSRREEPSLLLVLKWGGELTPAGRVQAEELGRAFRCMYPGGQGDYAGFPGCGLLRLHSTYRHDLKIYASDEGRVQMTAAAFAKGLLALEGELTPILVQMVKSANMNGLLDSDSDSLSSCQQRVKARLHEILQKDRDFTAEDYEKLTPSGSISLIKSMHLIKNPVKTCDKVYSLIQSLTSQIRHRMEDPKSSDIQLYHSETLELMLRRWSKLEKDFKTKNGRYDISKIPDIYDCIKYDVQHNGSLKLENTMELYRLSKALADIVIPQEYGITKAEKLEIAKGYCTPLVRKIRSDLQRTQDDDTVNKLHPVYSRGVLSPERHVRTRLYFTSESHVHSLLSILRYGALCNESKDEQWKRAMDYLNVVNELNYMTQIVIMLYEDPNKDLSSEERFHVELHFSPGAKGCEEDKNLPSGYGYRPASRENEGRRPFKIDNDDEPHTSKRDEVDRAVILFKPMVSEPIHIHRKSPLPRSRKTATNDEESPLSVSSPEGTGTWLHYTSGVGTGRRRRRSGEQITSSPVSPKSLAFTSSIFGSWQQVVSENANYLRTPRTLVEQKQNPTVGSHCAGLFSTSVLGGSSSAPNLQDYARTHRKKLTSSGCIDGFELYSMVPSICPLETLHNALSLKQVDEFLASIASPSSDVPRKTAEISSTALRSSPIMRKKVSLNTYTPAKILPTPPATLKSTKASSKPATSGPSSAVVPNTSSRKKNITSKTETHEHKKNTGKKK

SEQ ID NO: 762783 - protein, 255 aa, Homo sapiens
CPLSHFQEESPLSVSSPEGTGTWLHYTSGVGTGRRRRRSGEQITSSPVSPKSLAFTSSIFGSWQQVVSENANYLRTPRTLVEQKQNPTVGSHCAGLFSTSVLGGSSSAPNLQDYARTHRKKLTSSGCIDGFELYSMVPSICPLETLHNALSLKQVDEFLASIASPSSDVPRKTAEISSTALRSSPIMRKKVSLNTYTPAKILPTPPATLKSTKASSKPATSGPSSAVVPNTSSRKKNITSKTETHEHKKNTGKKK

SEQ ID NO: 762784 - protein, 216 aa, Homo sapiens
RGDSAYHSQRHSLLTPVTPLSPPGLEEEDVNGYVMPDTHLKGTPSSREGTLSSVGLSSVLGTEEEDEDEEYEYMNRRRRHSPPHPPRPSSLEELGYEYMDVGSDLSASLGSTQSCPLHPVPIMPTAGTTPDEDYEYMNRQRDGGGPGGDYAAMGACPASEQGYEEMRAFQGPGHQAPHVHYARLKTLRSLEATDSAFDNPDYWHSRLFPKANAQRT

SEQ ID NO: 762785 - protein, 216 aa, Homo sapiens; identical to SEQ ID NO: 762784

SEQ ID NO: 762786 - protein, 216 aa, Homo sapiens; identical to SEQ ID NO: 762784

SEQ ID NO: 762787 - protein, 216 aa, Homo sapiens; identical to SEQ ID NO: 762784

SEQ ID NO: 762788 - protein, 216 aa, Homo sapiens; identical to SEQ ID NO: 762784

SEQ ID NO: 762789 - protein, 216 aa, Homo sapiens; identical to SEQ ID NO: 762784

SEQ ID NO: 762790 - protein, 216 aa, Homo sapiens; identical to SEQ ID NO: 762784

SEQ ID NO: 762791 - protein, 182 aa, Homo sapiens
LTLDNMKELTMERNHMNVIYVEKPSLIVLTLDNMSEVTMERNHMDVIYVGKHSLNLLCLNDMREFTLERNHMSAMYVGKPSLNLLTSDDMRELTLEKNHMNAIYAEKPSITLLSLDDMRELTLERNHMNAIYVVKPSIEVTTLDFIEEFTLERNHMYVLYVGKPLVNFLTLDNMRELTLKKQ

SEQ ID NO: 762792 - protein, 163 aa, Homo sapiens
LTLDNMKELTMERNHMNVIYVEKPSLIVLTLDNMSEVTMERNHMDVIYVGKHSLNLLCLNDMREFTLERNHMSAMYVGKPSLNLLTSDDMRELTLEKNHMNAIYAEKPSITLLSLDDMRELTLERNHMNAIYVVKPSIEVTTLDFIEEFTLERNQHRQHSLKV

SEQ ID NO: 762793 - protein, 120 aa, Homo sapiens [sequence omitted]

SEQ ID NO: 762794 - protein, 114 aa, Homo sapiens
YYYYIRGRVDGVPGVCTQGDPGVRGRTCGKNHWSLLPREGLKKPNVVGDGGSQALADVTAALSTFRTRTPRSSSGTPLSALTLVPSSAEGLLGYGLKSEVTLKRNLYLSVLLHC

SEQ ID NO: 762795 - protein, 198 aa, Homo sapiens
MAALTTLFKYIDENQDRYIKKLAKWVAIQSVSAWPEKRGEIRRMMEVAAADVKQLGGSVELVDIGKQKLPDGSEIPLPPILLGRLGSDPQKKTVCIYGHLDVQPAALEDGWDSEPFTLVERDGKLYGRGSTDDKGPVAGWINALEAYQKTGQEIPVNVRFCLEGMEESGSEGLDELIFARKDTFFKDVGHPVWHYVSK

SEQ ID NO: 762796 - protein, 160 aa, Homo sapiens
YRAGYQFRRRLSHTASPVLVERDGKLYGRGSTDDKGPVAGWINALEAYQKTGQEIPVNVRFCLEGMEESGSEGLDELIFARKDTFFKDVDYVCISDNYCQLLFLPRTFEICGLGSGRKMAALTTLFKYIDENQDRYIKKLAKWVAIQSVSAWPEKRVSVE

SEQ ID NO: 762797 - protein, 475 aa, Homo sapiens
MAALTTLFKYIDENQDRYIKKLAKWVAIQSVSAWPEKRGEIRRMMEVAAADVKQLGGSVELVDIGKQKLPDGSEIPLPPILLGRLGSDPQKKTVCIYGHLDVQPAALEDGWDSEPFTLVERDGKLYGRGSTDDKGPVAGWINALEAYQKTGQEIPVNVRFCLEGMEESGSEGLDELIFARKDTFFKDVDYVCISDNYWLGKKKPCITYGLRGICYFFIEVECSNKDLHSGVYGGSVHEAMTDLILLMGSLVDKRGNILIPGINEAVAAVTEEEHKLYDDIDFDIEEFAKDVGAQILLHSHKKDILMHRWRYPSLSLHGIEGAFSGSGAKTVIPRKVVGKFSIRLVPNMTPEVVGEQVTSYLTKKFAELRSPNEFKVYMGHGGKPWVSDFSHPHYLAGRRAMKTVFGVEPDLTREGGSIPVTLTFQEATGKNVMLLPVGSADDGAHSQNEKLNRYNYIEGTKMLAAYLYEVSQLKD

SEQ ID NO: 762798 - protein, 475 aa, Homo sapiens; identical to SEQ ID NO: 762797

SEQ ID NO: 762799 - protein, 475 aa, Homo sapiens; identical to SEQ ID NO: 762797

SEQ ID NO: 762800 - protein, 400 aa, Homo sapiens [sequence omitted]

SEQ ID NO: 762801 - protein, 430 aa, Homo sapiens [sequence omitted]

SEQ ID NO: 762802 - protein, 466 aa, Homo sapiens
MTSPDRYVQSVDIYGGFIHEVVSAWPEKRGEIRRMMEVAAADVKQLGGSVELVDIGKQKLPDGSEIPLPPILLGRLGSDPQKKTVCIYGHLDVQPAALEDGWDSEPFTLVERDGKLYGRGSTDDKGPVAGWINALEAYQKTGQEIPVNVRFCLEGMEESGSEGLDELIFARKDTFFKDVDYVCISDNYWLGKKKPCITYGLRGICYFFIEVECSNKDLHSGVYGGSVHEAMTDLILLMGSLVDKRGNILIPGINEAVAAVTEEEHKLYDDIDFDIEEFAKDVGAQILLHSHKKDILMHRWRYPSLSLHGIEGAFSGSGAKTVIPRKVVGKFSIRLVPNMTPEVVGEQVTSYLTKKFAELRSPNEFKVYMGHGGKPWVSDFSHPHYLAGRRAMKTVFGVEPDLTREGGSIPVTLTFQEATGKNVMLLPVGSADDGAHSQNEKLNRYNYIEGTKMLAAYLYEVSQLKD

SEQ ID NO: 762803 - protein, 440 aa, Homo sapiens
MVMMIFILNLLLNVTICCQLKLPRELVDIGKQKLPDGSEIPLPPILLGRLGSDPQKKTVCIYGHLDVQPAALEDGWDSEPFTLVERDGKLYGRGSTDDKGPVAGWINALEAYQKTGQEIPVNVRFCLEGMEESGSEGLDELIFARKDTFFKDVDYVCISDNYWLGKKKPCITYGLRGICYFFIEVECSNKDLHSGVYGGSVHEAMTDLILLMGSLVDKRGNILIPGINEAVAAVTEEEHKLYDDIDFDIEEFAKDVGAQILLHSHKKDILMHRWRYPSLSLHGIEGAFSGSGAKTVIPRKVVGKFSIRLVPNMTPEVVGEQVTSYLTKKFAELRSPNEFKVYMGHGGKPWVSDFSHPHYLAGRRAMKTVFGVEPDLTREGGSIPVTLTFQEATGKNVMLLPVGSADDGAHSQNEKLNRYNYIEGTKMLAAYLYEVSQLKD

SEQ ID NO: 762804 - protein, 475 aa, Homo sapiens; identical to SEQ ID NO: 762797

SEQ ID NO: 762805 - protein, 475 aa, Homo sapiens; identical to SEQ ID NO: 762797

SEQ ID NO: 762806 - protein, 475 aa, Homo sapiens; identical to SEQ ID NO: 762797

SEQ ID NO: 762807 - protein, 318 aa, Homo sapiens
VPPTAGCMEESGSEGLDELIFARKDTFFKDVDYVCISDNYWLGKKKPCITYGLRGICYFFIEVECSNKDLHSGVYGGSVHEAMTDLILLMGSLVDKRGNILIPGINEAVAAVTEEEHKLYDDIDFDIEEFAKDVGAQILLHSHKKDILMHRWRYPSLSLHGIEGAFSGSGAKTVIPRKVVGKFSIRLVPNMTPEVVGEQVTSYLTKKFAELRSPNEFKVYMGHGGKPWVSDFSHPHYLAGRRAMKTVFGVEPDLTREGGSIPVTLTFQEATGKNVMLLPVGSADDGAHSQNEKLNRYNYIEGTKMLAAYLYEVSQLKD

SEQ ID NO: 762808 - protein, 475 aa, Homo sapiens; identical to SEQ ID NO: 762797

SEQ ID NO: 762809 - protein, 484 aa, Homo sapiens
MAALTTLFKYIDENQDRYIKKLAKWVAIQSVSAWPEKRGEIRRMMEVAAADVKQLGGSVELVDIGKQKLPDGSEIPLPPILLGRLGSDPQKKTVCIYGHLDVQPAALEDGWDSEPFTLVERDGKLYGRGSTDDKGPVAGWINALEAYQKTGQEIPVNVRFCLEGMEESGSEGLDELIFARKDTFFKDVDYVCISDNYWLGKKKPCITYGLRGICYFFIEVECSNKDLHSGVYGGSVHEAMTDLILLMGSLVDKRGNILIPGINEAVAAVTEEEHKLYDDIDFDIEEFAKDVGAQILLHSHKKDILMHRWRYPSLSLHGIEGAFSGSGAKTVIPRKVVGKFSIRLVPNMTPEVVGEQVTSYLTKKFAELRSPNEFKVYMGHGGKPWVSDFSHPHYLAGRRAMKTVFGVEPDLTREGGSIPVTLTFQEATGKNVMLLPVGSADDGAHSQNEKLNRYNYIEGTKMLAAYLYEAEAGGSLETKSLSLR

SEQ ID NO: 762810 - protein, 160 aa, Homo sapiens
SLFIYLIYFYCSAKTVIPRKVVGKFSIRLVPNMTPEVVGEQVTSYLTKKFAELRSPNEFKVYMGHGGKPWVSDFSHPHYLAGRRAMKTVFGVEPDLTREGGSIPVTLTFQEATGKNVMLLPVGSADDGAHSQNEKLNRYNYIEGTKMLAAYLYEVSQLKD

SEQ ID NO: 762811 - protein, 287 aa, Homo sapiens
MAALTTLFKYIDENQDRYIKKLAKWVAIQSVSAWPEKRGEIRRMMEVAAADVKQLGGSVELVDIGKQKLPDGSEIPLPPILLGRLGSDPQKKTVCIYGHLDVQPAALEDGWDSEPFTLVERDGKLYGRGSTDDKGPVAGWINALEAYQKTGQEIPVNVRFCLEGMEESGSEGLDELIFARKDTFFKDVDYVCISDNYWLGKKKPCITYGLRGICYFFIEVECSNKDLHSGVYGGSVHEAMTDLSLSAGPVLFSRPSPLLVFSCLLFSMIPQNLTNWKDDFVSVCTPK

SEQ ID NO: 762812 - protein, 157 aa, Homo sapiens
MAALTTLFKYIDENQDRYIKKLAKWVAIQSVSAWPEKRGEIRRMMEVAAADVKQLGGSVELVDIGKQKLPDGSEIPLPPILLGRLGSDPQKKTVCIYGHLDVQPAALEDGWDSEPFTLVERDGKLYGRGSTDDKGPVAGWINALEAYQKTGQVCPPR

SEQ ID NO: 762813 - protein, 223 aa, Homo sapiens
PRVRGRVGGINEAVAAVTEEEHKLYDDIDFDIEEFAKDVGAQILLHSHKKDILMHRWRYPSLSLHGIEGAFSGSGAKTVIPRKVVGKFSIRLVPNMTPEVVGEQVTSYLTKKFAELRSPNEFKVYMGHGGKPWVSDFSHPHYLAGRRAMKTVFGVEPDLTREGGSIPVTLTFQEATGKNVMLLPVGSADDGAHSQNEKLNRYNYIEGTKMLAAYLYEVSQLKD

SEQ ID NO: 762814 - protein, 71 aa, Homo sapiens
YVCISDNYWLGKKKPCITYGLRGICYFFIEGTVPSCTGHFFLTPESPGSPKRKVDKDPEVRCTGRRSTGLT

SEQ ID NO: 762815 - protein, 475 aa, Homo sapiens; identical to SEQ ID NO: 762797

SEQ ID NO: 762816 - protein, 475 aa, Homo sapiens; identical to SEQ ID NO: 762797

SEQ ID NO: 762817 - protein, 475 aa, Homo sapiens; identical to SEQ ID NO: 762797

SEQ ID NO: 762818 - protein, 475 aa, Homo sapiens; identical to SEQ ID NO: 762797

SEQ ID NO: 762819 - protein, 475 aa, Homo sapiens; identical to SEQ ID NO: 762797

SEQ ID NO: 762820 - protein, 514 aa, Homo sapiens
MAALTTLFKYIDENQDRYIKPVQLQQPQRVSLERGNVTGASSPSRTPFQNPSLLLVHKQKLAKWVAIQSVSAWPEKRGEIRRMMEVAAADVKQLGGSVELVDIGKQKLPDGSEIPLPPILLGRLGSDPQKKTVCIYGHLDVQPAALEDGWDSEPFTLVERDGKLYGRGSTDDKGPVAGWINALEAYQKTGQEIPVNVRFCLEGMEESGSEGLDELIFARKDTFFKDVDYVCISDNYWLGKKKPCITYGLRGICYFFIEVECSNKDLHSGVYGGSVHEAMTDLILLMGSLVDKRGNILIPGINEAVAAVTEEEHKLYDDIDFDIEEFAKDVGAQILLHSHKKDILMHRWRYPSLSLHGIEGAFSGSGAKTVIPRKVVGKFSIRLVPNMTPEVVGEQVTSYLTKKFAELRSPNEFKVYMGHGGKPWVSDFSHPHYLAGRRAMKTVFGVEPDLTREGGSIPVTLTFQEATGKNVMLLPVGSADDGAHSQNEKLNRYNYIEGTKMLAAYLYEVSQLKD

SEQ ID NO: 762821 - protein, 475 aa, Homo sapiens; identical to SEQ ID NO: 762797

SEQ ID NO: 762822 - protein, 376 aa, Homo sapiens
YRAGYQFRRRLSHTASPVLVERDGKLYGRGSTDDKGPVAGWINALEAYQKTGQEIPVNVRFCLEGMEESGSEGLDELIFARKDTFFKDVDYVCISDNYWLGKKKPCITYGLRGICYFFIEVECSNKDLHSGVYGGSVHEAMTDLILLMGSLVDKRGNILIPGINEAVAAVTEEEHKLYDDIDFDIEEFAKDVGAQILLHSHKKDILMHRWRYPSLSLHGIEGAFSGSGAKTVIPRKVVGKFSIRLVPNMTPEVVGEQVTSYLTKKFAELRSPNEFKVYMGHGGKPWVSDFSHPHYLAGRRAMKTVFGVEPDLTREGGSIPVTLTFQEATGKNVMLLPVGSADDGAHSQNEKLNRYNYIEGTKMLAAYLYEVSQLKD

SEQ ID NO: 762823 - protein, 548 aa, Homo sapiens
MAALTTLFKYIDENQDRYIKKLAKWVAIQSVSAWPEKRGEIRRMMEVAAADVKQLGGSVELVDIGKQKLPDGSEIPLPPILLGRLGSDPQKKTVCIYGHLDVQPAALEDGWDSEPFTLVERDGKLYGRGSTDDKGPVAGWINALEAYQKTGQEIPVNVRFCLEGMEESGSEGLDELIFARKDTFFKDVDYVCISDNYWLGKKKPCITYGLRGICYFFIEGTVPSCTGHFFLTPESPGSPKRKVDKDPEVRCTGRRSTGLTCAPIPSFHKPPSYTRVDSNTSSDQKLIHSSIKVECSNKDLHSGVYGGSVHEAMTDLILLMGSLVDKRGNILIPGINEAVAAVTEEEHKLYDDIDFDIEEFAKDVGAQILLHSHKKDILMHRWRYPSLSLHGIEGAFSGSGAKTVIPRKVVGKFSIRLVPNMTPEVVGEQVTSYLTKKFAELRSPNEFKVYMGHGGKPWVSDFSHPHYLAGRRAMKTVFGVEPDLTREGGSIPVTLTFQEATGKNVMLLPVGSADDGAHSQNEKLNRYNYIEGTKMLAAYLYEVSQLKD

SEQ ID NO: 762824 - protein, 475 aa, Homo sapiens; identical to SEQ ID NO: 762797

SEQ ID NO: 762825 - protein, 90 aa, Homo sapiens
IRGRVDRQKGAGRRAMKTVFGVEPDLTREGGSIPVTLTFQEATGKNVMLLPVGSADDGAHSQNEKLNRYNYIEGTKMLAAYLYEVSQLKD

SEQ ID NO: 762826 - protein, 298 aa, Homo sapiens
MAALTTLFKYIDENQDRYIKKLAKWVAIQSVSAWPEKRGEIRRMMEVAAADVKQLGGSVELVDIGKQKLPDGSEIPLPPILLGRLGSDPQKKTVCIYGHLDVQPAALEDGWDSEPFTLVERDGKLYGRGSTDDKGPVAGWINALEAYQKTGQEIPVNVRFCLEGMEESGSEGLDELIFARKDTFFKDVDYVCISDNYWLGKKKPCITYGLRGICYFFIEVECSNKDLHSGVYGGSVHEAMTDLILLMGSWVAEGDLCPGYEPGASERPSVATPCYGCPLGGPRAKTPAGALPEAPGPL

SEQ ID NO: 762827 - protein, 163 aa, Homo sapiens
MAALTTLFKYIDENQDRYIKKLAKWVAIQSVSAWPEKRGEIRRMMEVAAADVKQLGGSVELVDIGKQKLPDGSEIPLPPILLGRLGSDPQKKTVCIYGHLDVQPAALEDGWDSEPFTLVERDGKLYGRGSTDDKGPVAGWINALEAYQKTGQLLKGHNIGDSA

SEQ ID NO: 762828 - protein, 72 aa, Homo sapiens
GGVVARATAGRASAGGRGQDTWYGTGAALAAGNRALPSGPSFPGRPSVSTRDRTDQLLFLPRTFEICGLGSG

SEQ ID NO: 762829 - protein, 66 aa, Homo sapiens
APKLGWGMLPRKKAECVWAREESPHTWVLAHDTSQHNDVFLSTRYNYIEGTKMLAAYLYEVSQLKD

SEQ ID NO: 762830 - protein, 614 aa, Homo sapiens
LPRTCQRGWSHGLPLPPPPPAAQVAPIVSPGNARPWPQGAHGEGSLAPSQAKARPDDSCKPKSVYENFRLWQHYKPLARRHLPQSPDTEALSCFLIPVLRSLARRKPTMTLEEGLWQAMREWQHTSNFDRMIFYEMAEKFLEFEAEEEMQIQKSQWMKGPQSLPPPAPPRLEPRGPPAPEVVKQPVYLPSKDGPKAPTACLPPPRPQRPAETKAHLPPPRPQRPAETNAHLPPPRPQRPAETKVPEEIPPEVVQEYVDIMEELLGSHPGDTGEPEGQREKGKVEQPQEEDGITSDPGLLSYIDKLCSQEDFVTKVEAVIHPRFLEELLSPDPQMDFLALSQELEQEEGLTLAQLVEKRLLSLKEKGCGRAAPRHGTARLDSSPSEFAAGQEAAREVPDPQQRVSVETSPPQTAAQDPQGQGRVRTGMARSEDPAVLLGCQDSPRLKAVRPTSPPQDHRPTCPGLGTKDALGLPGESPVKESHGLAKGSSEETELPGMVYVVGSHHRLRPWRLSQSPVPSSGLLSPGGRGPQGALQSPSAQKRGLSPSPSPASKSKKRPLFGSPSPAEKTPHPGPGLRVSGEQSLAWGLGGPSQSQKRKGDPLASRRKKKRHCSQ

SEQ ID NO: 762831 - protein, 188 aa, Homo sapiens
MNGDDAFARRPRDDAQISEKLRKAFDDIAKYFSKKEWEKMKSSEKIVYVYMKLNYEVMTKLGFKVTLPPFMRSKRAADFHGNDFGNDRNHRNQVERPQMTFGSLQRIFPKIMPKKPAEEENGLKEVPEASGPQNDGKQLCPPGNPSTLEKINKTSGPKRGKHAWTHRLRERKQLVVYEEISDPEEDDE

SEQ ID NO: 762832 - protein, 128 aa, Homo sapiens
LTTSAAECPHATEVSLEFGNLYQQRKILMYSLSVERPQMTFGSLQRIFPKIMPKKPAEEENGLKEVPEASGPQNDGKQLCPPGNPSTLEKINKTSGPKRGKHAWTHRLRERKQLVVYEEISDPEEDDE

SEQ ID NO: 762833 - protein, 485 aa, Homo sapiens
PSADSRPSPNWAAGFQLEGLLSLSLRAALTIGGQDGGGALGRRPPPGVKVSDCRQTRRQRSSRRPWLLCLPPQAPASFRMTLDVGPEDELPDWAAAKEFYQKYDPKDVIGRGVSSVVRRCVHRATGHEFAVKIMEVTAERLSPEQLEEVREATRRETHILRQVAGHPHIITLIDSYESSSFMFLVFDLMRKGELFDYLTEKVALSEKETRSIMRSLLEAVSFLHANNIVHRDLKPENILLDDNMQIRLSDFGFSCHLEPGEKLRELCGTPGYLAPEILKCSMDETHPGYGKEVDLWACGVILFTLLAGSPPFWHRRQILMLRMIMEGQYQFSSPEWDDRSSTVKDLISRLLQVDPEARLTAEQALQHPFFERCEGSQPWNLTPRQRFRVAVWTVLAAGRVALSTHRVRPLTKNALLRDPYALRSVRHLIDNCAFRLYGHWVKKGEQQNRAALFQHRPPGPFPIMGPEEEGDSAAITEDEAVLVLG

SEQ ID NO: 762834 - protein, 298 aa, Homo sapiens
EKVVAGCVLNRTSRQTRRQRSSRRPWLLCLPPQAPASFRMTLDVGPEDELPDWAAAKEFYQKYDPKDVIGRGVSSVVRRCVHRATGHEFAVKIMEVTAERLSPEQLEEVREATRRETHILRQVAGHPHIITLIDSYESSSFMFLVFDLMRKGELFDYLTEKVALSEKETRSIMRSLLEAVSFLHANNIVHRDLKPENILLDDNMQIRLSDFGFSCHLEPGEKLRELCGTPGYLAPEILKCSMDETHPGYGKEVDLWWPVRGDLWFHNFWPWPPPTPSGPPRAGQAIPSDSVDPPLDHW

SEQ ID NO: 762835 - protein, 434 aa, Homo sapiens
MIRQTRRQRSSRRPWLLCLPPQAPASFRMTLDVGPEDELPDWAAAKEFYQKYDPKDVIGRGVSSVVRRCVHRATGHEFAVKIMEVTAERLSPEQLEEVREATRRETHILRQVAGHPHIITLIDSYESSSFMFLVFDLMRKGELFDYLTEKVALSEKETRSIMRSLLEAVSFLHANNIVHRDLKPENILLDDNMQIRLSDFGFSCHLEPGEKLRELCGTPGYLAPEILKCSMDETHPGYGKEVDLWACGVILFTLLAGSPPFWHRRQILMLRMIMEGQYQFSSPEWDDRSSTVKDLISRLLQVDPEARLTAEQALQHPFFERCEGSQPWNLTPRQRFRVAVWTVLAAGRVALSTHRVRPLTKNALLRDPYALRSVRHLIDNCAFRLYGHWVKKGEQQNRAALFQHRPPGPFPIMGPEEEGDSAAITEDEAVLVLG

SEQ ID NO: 762836 - protein, 485 aa, Homo sapiens; identical to SEQ ID NO: 762833

SEQ ID NO: 762837 - protein, 508 aa, Homo sapiens
PSADSRPSPNWAAGFQLEGLLSLSLRAALTIGGQDGGGALGRRPPPGVKVSDCRQTRRQRSSRRPWLLCLPPQAPASFRMTLDVGPEDELPDWAAAKEFYQKYDPKDVIGRGVSSVVRRCVHRATGHEFAVKIMEVTAERLSPEQLEEVREATRRETHILRQVAGHPHIITLIDSYESSSFMFLVFDLMRKGELFDYLTEKVALSEKETRSIMRSLLEAVSFLHANNIVHRDLKPENILLDDNMQIRLSDFGFSCHLEPGEKLRELCGTPGYLAPEILKCSMDETHPGYGKEVDLWACGVILFTLLAGSPPFWHRRQILMLRMIMEGQYQFSSPEWDDRSSTVKDLVAGAERTVGEAQELPLMLWVSPEISRLLQVDPEARLTAEQALQHPFFERCEGSQPWNLTPRQRFRVAVWTVLAAGRVALSTHRVRPLTKNALLRDPYALRSVRHLIDNCAFRLYGHWVKKGEQQNRAALFQHRPPGPFPIMGPEEEGDSAAITEDEAVLVLG

SEQ ID NO: 762838 - protein, 304 aa, Homo sapiens [sequence omitted]

SEQ ID NO: 762839 - protein, 297 aa, Homo sapiens
MRKGELFDYLTEKVALSEKETRSIMRSLLEAVSFLHANNIVHRDLKPENILLDDNMQIRLSDFGFSCHLEPGEKLRELCGTPGYLAPEILKCSMDETHPGYGKEVDLWACGVILFTLLAGSPPFWHRRQILMLRMIMEGQYQFSSPEWDDRSSTVKDLISRLLQVDPEARLTAEQALQHPFFERCEGSQPWNLTPRQRFRVAVWTVLAAGRVALSTHRVRPLTKNALLRDPYALRSVRHLIDNCAFRLYGHWVKKGEQQNRAALFQHRPPGPFPIMGPEEEGDSAAITEDEAVLVLG

SEQ ID NO: 762840 - protein, 171 aa, Homo sapiens
RLLRGSPLDSGWGQYQFSSPEWDDRSSTVKDLISRLLQVDPEARLTAEQALQHPFFERCEGSQPWNLTPRQRFRVAVWTVLAAGRVALSTHRVRPLTKNALLRDPYALRSVRHLIDNCAFRLYGHWVKKGEQQNRAALFQHRPPGPFPIMGPEEEGDSAAITEDEAVLVLG

SEQ ID NO: 762841 - protein, 338 aa, Homo sapiens
PSADSRPSPNWAAGFQLEGLLSLSLRAALTIGGQDGGGALGRRPPPGVKVSDCRQTRRQRSSRRPWLLCLPPQAPASFRMTLDVGPEDELPDWAAAKEFYQKYDPKDVIGRGVSSVVRRCVHRATGHEFAVKIMEVTAERLSPEQLEEVREATRRETHILRQVAGHPHIITLIDSYESSSFMFLVFDLMRKGELFDYLTEKVALSEKETRSIMRSLLEAVSFLHANNIVHRDLKPENILLDDNMQIRLSDFGFSCHLEPGEKLRELCGTPGYLAPEILKCSMDETHPGYGKEVDLWWPVRGDLWFHNFWPWPPPTPSGPPRAGQAIPSDSVDPPLDHW

SEQ ID NO: 762842 - protein, 190 aa, Homo sapiens
PSADSRPSPNWAAGFQLEGLLSLSLRAALTIGGQDGGGALGRRPPPGVKVSDCRQTRRQRSSRRPWLLCLPPQAPASFRMTLDVGPEDELPDWAAAKEFYQKYDPKDVIGRGVSSVVRRCVHRATGHEFAVKIMEVTAERLSPEQLEEVREATRRETHILRQVAGHPHISEAVFLAPVSRRPPTSCWPCP

SEQ ID NO: 762843 - protein, 441 aa, Homo sapiens
AGTPRIVRDRQTRRQRSSRRPWLLCLPPQAPASFRMTLDVGPEDELPDWAAAKEFYQKYDPKDVIGRGVSSVVRRCVHRATGHEFAVKIMEVTAERLSPEQLEEVREATRRETHILRQVAGHPHIITLIDSYESSSFMFLVFDLMRKGELFDYLTEKVALSEKETRSIMRSLLEAVSFLHANNIVHRDLKPENILLDDNMQIRLSDFGFSCHLEPGEKLRELCGTPGYLAPEILKCSMDETHPGYGKEVDLWACGVILFTLLAGSPPFWHRRQILMLRMIMEGQYQFSSPEWDDRSSTVKDLISRLLQVDPEARLTAEQALQHPFFERCEGSQPWNLTPRQRFRVAVWTVLAAGRVALSTHRVRPLTKNALLRDPYALRSVRHLIDNCAFRLYGHWVKKGEQQNRAALFQHRPPGPFPIMGPEEEGDSAAITEDEAVLVLG

SEQ ID NO: 762844 - protein, 304 aa, Homo sapiens [sequence omitted]

SEQ ID NO: 762845 - protein, 406 aa, Homo sapiens
MTLDVGPEDELPDWAAAKEFYQKYDPKDVIGRGVSSVVRRCVHRATGHEFAVKIMEVTAERLSPEQLEEVREATRRETHILRQVAGHPHIITLIDSYESSSFMFLVFDLMRKGELFDYLTEKVALSEKETRSIMRSLLEAVSFLHANNIVHRDLKPENILLDDNMQIRLSDFGFSCHLEPGEKLRELCGTPGYLAPEILKCSMDETHPGYGKEVDLWACGVILFTLLAGSPPFWHRRQILMLRMIMEGQYQFSSPEWDDRSSTVKDLISRLLQVDPEARLTAEQALQHPFFERCEGSQPWNLTPRQRFRVAVWTVLAAGRVALSTHRVRPLTKNALLRDPYALRSVRHLIDNCAFRLYGHWVKKGEQQNRAALFQHRPPGPFPIMGPEEEGDSAAITEDEAVLVLG

SEQ ID NO: 762846 - protein, 451 aa, Homo sapiens
HPPGPWRPSCKGCAPGSRHAGRLRACGPPCPHCPPASAQAPASFRMTLDVGPEDELPDWAAAKEFYQKYDPKDVIGRGVSSVVRRCVHRATGHEFAVKIMEVTAERLSPEQLEEVREATRRETHILRQVAGHPHIITLIDSYESSSFMFLVFDLMRKGELFDYLTEKVALSEKETRSIMRSLLEAVSFLHANNIVHRDLKPENILLDDNMQIRLSDFGFSCHLEPGEKLRELCGTPGYLAPEILKCSMDETHPGYGKEVDLWACGVILFTLLAGSPPFWHRRQILMLRMIMEGQYQFSSPEWDDRSSTVKDLISRLLQVDPEARLTAEQALQHPFFERCEGSQPWNLTPRQRFRVAVWTVLAAGRVALSTHRVRPLTKNALLRDPYALRSVRHLIDNCAFRLYGHWVKKGEQQNRAALFQHRPPGPFPIMGPEEEGDSAAITEDEAVLVLG

SEQ ID NO: 762847 - protein, 297 aa, Homo sapiens; identical to SEQ ID NO: 762839

SEQ ID NO: 762848 - protein, 321 aa, Homo sapiens
MSTGLSSQPPLWDAAASYAPPSLRMRKGELFDYLTEKVALSEKETRSIMRSLLEAVSFLHANNIVHRDLKPENILLDDNMQIRLSDFGFSCHLEPGEKLRELCGTPGYLAPEILKCSMDETHPGYGKEVDLWACGVILFTLLAGSPPFWHRRQILMLRMIMEGQYQFSSPEWDDRSSTVKDLISRLLQVDPEARLTAEQALQHPFFERCEGSQPWNLTPRQRFRVAVWTVLAAGRVALSTHRVRPLTKNALLRDPYALRSVRHLIDNCAFRLYGHWVKKGEQQNRAALFQHRPPGPFPIMGPEEEGDSAAITEDEAVLVLG

SEQ ID NO: 762849 - protein, 204 aa, Homo sapiens [sequence omitted]

SEQ ID NO: 762850 - protein, 190 aa, Homo sapiens; identical to SEQ ID NO: 762842

SEQ ID NO: 762851 - protein, 122 aa, Homo sapiens
LRSDPSDRKSHVRYLPSEDLNVLLGHLKPTVLQTERQQVQSPKDYKGMLLTIILVTKAAKLFLYLGTVFPDKPENSDKATSLGIRTEKARVMEISPALSQEKVSALQTAPTEVAALPAACRC

SEQ ID NO: 762852 - protein, 117 aa, Homo sapiens
MGVLRAKGGKRGSLSVPVSVRGASSPAMRVQRARGGKGEVRSPRLAGIASPTAIVVPRARRGRGVGSESPPRGGLPPPTAMGVPRARGEEGMDLSHHKMGGLYIQVLPKNQLICFLY

SEQ ID NO: 762853 - protein, 115 aa, Homo sapiens [sequence omitted]

SEQ ID NO: 762854 - protein, 81 aa, Homo sapiens
NGSSRESTRNLNLDSGFQCGLRLPPPRPSACLAARCDLHAKESSSDGCTLPTGVAPGGLGGASRLRALSAAFLLQMILEGR

SEQ ID NO: 762855 - protein, 81 aa, Homo sapiens; identical to SEQ ID NO: 762854

SEQ ID NO: 762856 - protein, 100 aa, Homo sapiens
QTNKQTNKHHGSHWKVFPLEDAPICHRGPISDFCFIFNPFMVQMRKPDQEGSDFPQITAPVPSLSDLYSGLCLAPVRSFFPHSCKGQRSKIQGSAGPCSL

SEQ ID NO: 762857 - protein, 664 aa, Homo sapiens
MAAVGPPQQQVRMAHQQVWAALEVALRVPCLYIIDAIFNSYPDSSQSRFCIVLQIFLRLFGVFASSIVLILSQRSLFKFYTYSSAFLLAATSVLVNYYASLHIDFYGAYNTSAFGIELLPRKGPSLWMALIVLQLTFGIGYVTLLQIHSIYSQLIILDLLVPVIGLITELPLHIRETLLFTSSLILTLNTVFVLAVKLKWFYYSTRYVYLLVRHMYRIYGLQLLMEDTWKRIRFPDILRVFWLTRVTAQATVLMYILRMANETDSFFISWDDFWDLICNLIISGCDSTLTVLGMSAVISSVAHYLGLGILAFIGSTEEDDRRLGFVAPVLFFILALQTGLSGLRPEERLIRLSRNMCLLLTAVLHFIHGMTDPVLMSLSASHVSSFRRHFPVLFVSACLFILPVLLSYVLWHHYALNTWLFAVTAFCVELCLKVIVSLTVYTLFMIDGYYNVLWEKLDDYVYYVRSTGSIIEFIFGVVMFGNGAYTMMFESGSKIRAFMMCLHAYFNIYLQAKNGWKTFMNRRTAVKKINSLPEIKGSRLQEINDVCAICYHEFTTSARITPCNHYFHALCLRKWLYIQDTCPMCHQKVYIEDDIKDNSNVSNNNGFIPPNETPEEAVREAAAESDRELNEDDSTDCDDDVQRERNGVIQHTGAAAEEFNDDTD

SEQ ID NO: 762858 - protein, 624 aa, Homo sapiens
WIVKCVYCNNMQCLDYLLKYGVFASSIVLILSQRSLFKFYTYSSAFLLAATSVLVNYYASLHIDFYGAYNTSAFGIELLPRKGPSLWMALIVLQLTFGIGYVTLLQIHSIYSQLIILDLLVPVIGLITELPLHIRETLLFTSSLILTLNTVFVLAVKLKWFYYSTRYVYLLVRHMYRIYGLQLLMEDTWKRIRFPDILRVFWLTRVTAQATVLMYILRMANETDSFFISWDDFWDLICNLIISGCDSTLTVLGMSAVISSVAHYLGLGILAFIGSTEEDDRRLGFVAPVLFFILALQTGLSGLRPEERLIRLSRNMCLLLTAVLHFIHGMTDPVLMSLSASHVSSFRRHFPVLFVSACLFILPVLLSYVLWHHYALNTWLFAVTAFCVELCLKVIVSLTVYTLFMIDGYYNVLWEKLDDYVYYVRSTGSIIEFIFGVVMFGNGAYTMMFESGSKIRAFMMCLHAYFNIYLQAKNGWKTFMNRRTAVKKINSLPEIKGSRLQEINDVCAICYHEFTTSARITPCNHYFHALCLRKWLYIQDTCPMCHQKVYIEDDIKDNSNVSNNNGFIPPNETPEEAVREAAAESDRELNEDDSTDCDDDVQRERNGVIQHTGAAAEEFNDDTD

SEQ ID NO: 762859 - protein, 664 aa, Homo sapiens; identical to SEQ ID NO: 762857

SEQ ID NO: 762860 - protein, 180 aa, Homo sapiens
MAAVGPPQQQVRMAHQQVWAALEVALRVPCLYIIDAIFNSYPDSSQSRFCIVLQIFLRLFGVFASSIVLILSQRSLFKFYTYSSAFLLAATSVLVNYYASLHIDFYGAYNTSAFGIELLPRKGPSLWMALIVLQLTFGIGYVTLLQIHSIYSQLIILDLLVPVIGLITELPLHIRENLFA

SEQ ID NO: 762861 - protein, 372 aa, Homo sapiens
FERPPGQVRAHYLGLGILAFIGSTEEDDRRLGFVAPVLFFILALQTGLSGLRPEERLIRLSRNMCLLLTAVLHFIHGMTDPVLMSLSASHVSSFRRHFPVLFVSACLFILPVLLSYVLWHHYALNTWLFAVTAFCVELCLKVIVSLTVYTLFMIDGYYNVLWEKLDDYVYYVRSTGSIIEFIFGVVMFGNGAYTMMFESGSKIRAFMMCLHAYFNIYLQAKNGWKTFMNRRTAVKKINSLPEIKGSRLQEINDVCAICYHEFTTSARITPCNHYFHALCLRKWLYIQDTCPMCHQKVYIEDDIKDNSNVSNNNGFIPPNETPEEAVREAAAESDRELNEDDSTDCDDDVQRERNGVIQHTGAAAEEFNDDTD

SEQ ID NO: 762862 - protein, 664 aa, Homo sapiens; identical to SEQ ID NO: 762857

SEQ ID NO: 762863 - protein, 664 aa, Homo sapiens; identical to SEQ ID NO: 762857

SEQ ID NO: 762864 - protein, 399 aa, Homo sapiens
IHTGENPYECHECGKAFSRKYQLISHQRTHAGEKPYECTDCGKAFGLKSQLIIHQRTHTGEKPFECSECQKAFNTKSNLIVHQRTHTGEKPYGCNECGKAFTFKSQLIVHQRVHAGVKPYGCSQCEKTFNLKSQLIVHQRSHTGVKPYGCSECGKAFRSKSYLIIHMRTHTGEKPHECRECGKSFSFNSQLIVHQRIHTGENPYECSECGKAFNRKDQLISHQRTHAGEKPYGCSECGKAFSSKSYLIIHMRTHSGEKPYECNECGKAFIWKSLLIVHERTHAGVNPYKCSQCEKSFSGKLRLLVHQRMHTTEKPYECSECGKAFIRNSQLIVHQRTHSGEKPYGCNECGKTFSQKSILSAHQRTHTGEKPCKCTECGKAFCWKSQLIMHQRTHVDDKH

SEQ ID NO: 762865 - protein, 108 aa, Homo sapiens
MWPSQLSHAFQPRRPGEPRSFQAVLPPELWIHLAVVACGNRLEETLVMLKSAVLFSHRKIQFHIFTEDSLKPEFDKQLRQWPDSYTKKFEHRIYPITFSVGNPQEWKK

SEQ ID NO: 762866 - protein, 72 aa, Homo sapiens
GFTLGTPGPMSTLRARLLPQMAGVRGGGGRQLAPGLPAASSPGPKQPWLHGQGEEEGVLPVSPGPRFPQEGK

SEQ ID NO: 762867 - protein, 407 aa, Homo sapiens
MDGLPGRALGAACLLLLAAGWLGPEAWGSPTPPPTPAAPPPPPPPGAPGGSQDTCTSCGGFRRPEELGRVDGDFLEAVKRHILSRLQMRGRPNITHAVPKAAMVTALRKLHAGKVREDGRVEIPHLDGHASPGADGQERVSEIISFAETDGLASSRVRLYFFISNEGNQNLFVVQASLWLYLKLLPYVLEKGSRRKVRVKVYFQEQGHGDRWNMVEKRVDLKRSGWHTFPLTEAIQALFERGERRLNLDVQCDSCQELAVVPVFVDPGEESHRPFVVVQARLGDSRHRIRKRGLECDGRTNLCCRQQFFIDFRLIGWNDWIIAPTGYYGNYCEGSCPAYLAGVPGSASSFHTAVVNQYRMRGLNPGTVNSCCIPTKLSTMSMLYFDDEYNIVKRDVPNMIVEECGCA

SEQ ID NO: 762868 - protein, 101 aa, Homo sapiens
IYKELKQLYKKTNNTIKNWAKGMNRHFSKEDIHATNKLMKNSSTSLIIREMQFKTTMRYHLMPVTMVIIKMSGNDRCWRGCGKIGILLHCWWECKLVQQLW

SEQ ID NO: 762869 - protein, 176 aa, Homo sapiens
MSLKPFTYPFPETRFLHAGPNVYKFKIRYGKSIRGEEIENKEVITQELEVPVEKKAVGAVMRKRKHMDEPSSPSRPGLDRAKIGTSSQGPSKKKPPVETRRNRERKTQQGLQETLASDITDVQKQDSEWGHSLPGRIVPPLQHNSPPPKERAATGFFGFLSSLFPFRYFFRKSSHS

SEQ ID NO: 762870 - protein, 182 aa, Homo sapiens
MSLKPFTYPFPETRFLHAGPNVYKFKIRYGKSIRGEEIENKEVITQELEVPVEKKAVGAVMRKRKHMDEPSSPSRPGLDRAKIGTSSQGPSKKKPPVETRRNRERKTQQGLQETLASDITDVQKQDSEWGHSLPGRIVPPLQHNSPPPKERAATGFFGFLRSHHLSHARGCPSRVGEQGLNC

SEQ ID NO: 762871 - protein, 86 aa, Homo sapiens
NIQPYLKILQDQFQTTAMKSILQQSAQKSWSSFPCFHPHNWRVHGALQGMTVVPCRAAFLSKCEFMSVIETAVSHRKACVQQVANR

SEQ ID NO: 762872 - protein, 338 aa, Homo sapiens
MYHPAYWVVFSATTALLFIPGVPVRSGDATFPKAMDNVTVRQGESATLRCTIDDRVTRVAWLNRSTILYAGNDKWSIDPRVIILVNTPTQYSIMIQNVDVYDEGPYTCSVQTDNHPKTSRVHLIVQVPPQIMNISSDITVNEGSSVTLLCLAIGRPEPTVTWRHLSVKEGQGFVSEDEYLEISDIKRDQSGEYECSALNDVAAPDVRKVKITVNYPPYISKAKNTGVSVGQKGILSCEASAVPMAEFQWFKEETRLATGLDGMRIENKGRMSTLTFFNVSEKDYGNYTCVATNKLGNTNASITLYGPGAVIDGVNSASRALACLWLSGTLLAHFFIKF

SEQ ID NO: 762873 - protein, 361 aa, Homo sapiens
PGLCGCRSPGKLWLSRMGVCGYLFLPWKCLVVVSLRLLFLVPTGVPVRSGDATFPKAMDNVTVRQGESATLRCTIDDRVTRVAWLNRSTILYAGNDKWSIDPRVIILVNTPTQYSIMIQNVDVYDEGPYTCSVQTDNHPKTSRVHLIVQVPPQIMNISSDITVNEGSSVTLLCLAIGRPEPTVTWRHLSVKEGQGFVSEDEYLEISDIKRDQSGEYECSALNDVAAPDVRKVKITVNYPPYISKAKNTGVSVGQKGILSCEASAVPMAEFQWFKEETRLATGLDGMRIENKGRMSTLTFFNVSEKDYGNYTCVATNKLGNTNASITLYGPGAVIDGVNSASRALACLWLSGTLLAHFFIKF

SEQ ID NO: 762874 - protein, 202 aa, Homo sapiens
MKVLAAGVVPLLLVLHWKHGAGSPLPITPVNATCAIRHPCHNNLMNQIRSQLAQLNGSANALFILYYTAQGEPFPNNLDKLCGPNVTDFPPFHANGTEKAKLVELYRIVVYLGTSLGNITRDQKILNPSALSLHSKLNATADILRGLLSNVLCRLCSKYHVGHVDVTYGPDTSGKDVFQKKKLGCQLLGKYKQIIAVLAQAF

SEQ ID NO: 762875 - protein, 202 aa, Homo sapiens; identical to SEQ ID NO: 762874

SEQ ID NO: 762876 - protein, 124 aa, Homo sapiens
  misc_feature (4)..(5): Xaa can be any naturally occurring amino acid
  misc_feature (34)..(34): Xaa can be any naturally occurring amino acid
KANXXGTRETKSGTIGPFGLVLTAGYNNYGKRTXDNIKSQGSGVLTGPGWVQTHTGIPECVPQQDTPALKEWTEEELTWDYDPNSAGPPLPAPGLWSENVAAGENNAAKHSRGTGNAHLLTGYF

SEQ ID NO: 762877 - protein, 1049 aa, Homo sapiens
MVFPMWTLKRQILILFNIILISKLLGARWFPKTLPCDVTLDVPKNHVIVDCTDKHLTEIPGGIPTNTTNLTLTINHIPDISPASFHRLDHLVEIDFRCNCVPIPLGSKNNMCIKRLQIKPRSFSGLTYLKSLYLDGNQLLEIPQGLPPSLQLLSLEANNIFSIRKENLTELANIEILYLGQNCYYRNPCYVSYSIEKDAFLNLTKLKVLSLKDNNVTAVPTVLPSTLTELYLYNNMIAKIQEDDFNNLNQLQILDLSGNCPRCYNAPFPCAPCKNNSPLQIPVNAFDALTELKVLRLHSNSLQHVPPRWFKNINKLQELDLSQNFLAKEIGDAKFLHFLPSLIQLDLSFNFELQVYRASMNLSQAFSSLKSLKILRIRGYVFKELKSFNLSPLHNLQNLEVLDLGTNFIKIANLSMFKQFKRLKVIDLSVNKISPSGDSSEVGFCSNARTSVESYEPQVLEQLHYFRYDKYARSCRFKNKEASFMSVNESCYKYGQTLDLSKNSIFFVKSSDFQHLSFLKCLNLSGNLISQTLNGSEFQPLAELRYLDFSNNRLDLLHSTAFEELHKLEVLDISSNSHYFQSEGITHMLNFTKNLKVLQKLMMNDNDISSSTSRTMESESLRTLEFRGNHLDVLWREGDNRYLQLFKNLLKLEELDISKNSLSFLPSGVFDGMPPNLKNLSLAKNGLKSFSWKKLQCLKNLETLDLSHNQLTTVPERLSNCSRSLKNLILKNNQIRSLTKYFLQDAFQLRYLDLSSNKIQMIQKTSFPENVLNNLKMLLLHHNRFLCTCDAVWFVWWVNHTEVTIPYLATDVTCVGPGAHKGQSVISLDLYTCELDLTNLILFSLSISVSLFLMVMMTASHLYFWDVWYIYHFCKAKIKGYQRLISPDCCYDAFIVYDTKDPAVTEWVLAELVAKLEDPREKHFNLCLEERDWLPGQPVLENLSQSIQLSKKTVFVMTDKYAKTENFKIAFYLSHQRLMDEKVDVIILIFLEKPFQKSKFLQLRKRLCGSSVLEWPTNPQAHPYFWQCLKNALATDNHVAYSQVFKETV

SEQ ID NO: 762878 - protein, 1049 aa, Homo sapiens; identical to SEQ ID NO: 762877

SEQ ID NO: 762879 - protein, 125 aa, Homo sapiens
MAAATAAAALAAADPPPAMPQAAGAGGPTTRRDFYWLRSFLAGGIAGCCAKTTVAPLDRVKVLLQDSISKKKKKKKDTSVRLSVKGDCKYLLNKNLHSICYRIQRILKINFIHVLTISFFQLFTY

SEQ ID NO: 762880 - protein, 332 aa, Homo sapiens
MAAATAAAALAAADPPPAMPQAAGAGGPTTRRDFYWLRSFLAGGIAGCCAKTTVAPLDRVKVLLQAHNHHYKHLGVFSALRAVPQKEGFLGLYKGNGAMMIRIFPYGAIQFMAFEHYKTLITTKLGISGHVHRLMAGSMAGMTAVICTYPLDMVRVRLAFQVKGEHSYTGIIHAFKTIYAKEGGFFGFYRGLMPTILGMAPYAGVSFFTFGTLKSVGLSHAPTLLGRPSSDNPNVLVLKTHVNLLCGGVAGAIAQTISYPFDVTRRRMQLGTVLPEFEKCLTMRDTMKYVYGHHGIRKGLYRGLSLNYIRCIPSQAVAFTTYELMKQFFHLN

SEQ ID NO: 762881 - protein, 332 aa, Homo sapiens; identical to SEQ ID NO: 762880

SEQ ID NO: 762882 - protein, 234 aa, Homo sapiens
MMIRIFPYGAIQFMAFEHYKTLITTKLGISGHVHRLMAGSMAGMTAVICTYPLDMVRVRLAFQVKGEHSYTGIIHAFKTIYAKEGGFFGFYRGLMPTILGMAPYAGVSFFTFGTLKSVGLSHAPTLLGRPSSDNPNVLVLKTHVNLLCGGVAGAIAQTISYPFDVTRRRMQLGTVLPEFEKCLTMRDTMKYVYGHHGIRKGLYRGLSLNYIRCIPSQAVAFTTYELMKQFFHLN

SEQ ID NO: 762883 - protein, 281 aa, Homo sapiens
MAAATAAAALAAADPPPAMPQAAGAGGPTTRRDFYWLRSFLAGGIAGCCAKTTVAPLDRVKVLLQAHNHHYKHLGVFSALRAVPQKEGFLGLYKGNGAMMIRIFPYGAIQFMAFEHYKTLITTKLGISGHVHRLMAGSMAGMTAVICTYPLDMVRVRLAFQVKGEHSYTGIIHAFKTIYAKEGGFFGFYRGLMPTILGMAPYAGVSFFTFGTLKSVGLSHAPTLLGRPSSDNPNVLVLKTHVNLLCGGVAGAIAQTISYPFDVTRRRMQLGTVLPEFEKCL

SEQ ID NO: 762884 - protein, 125 aa, Homo sapiens [sequence omitted]

SEQ ID NO: 762885 - protein, 234 aa, Homo sapiens; identical to SEQ ID NO: 762882

SEQ ID NO: 762886 - protein, 234 aa, Homo sapiens; identical to SEQ ID NO: 762882

SEQ ID NO: 762887 - protein, 180 aa, Homo sapiens
MVRVRLAFQVKGEHSYTGIIHAFKTIYAKEGGFFGFYRGLMPTILGMAPYAGVSFFTFGTLKSVGLSHAPTLLGRPSSDNPNVLVLKTHVNLLCGGVAGAIAQTISYPFDVTRRRMQLGTVLPEFEKCLTMRDTMKYVYGHHGIRKGLYRGLSLNYIRCIPSQAVAFTTYELMKQFFHLN

SEQ ID NO: 762888 - protein, 214 aa, Homo sapiens
MAAATAAAALAAADPPPAMPQAAGAGGPTTRRDFYWLRSFLAGGIAGCCAKTTVAPLDRVKVLLQAHNHHYKHLGVFSALRAVPQKEGFLGLYKGNGAMMIRIFPYGAIQFMAFEHYKTLITTKLGISGHVHRLMAGSMAGMTAVICTYPLDMVRVRLAFQVKGEHSYTGIIHAFKTIYAKEGGFFGFYRGLMPTILGMAPYAGVSFFTFCTNH

SEQ ID NO: 762889 - protein, 603 aa, Homo sapiens
MYPWAYFISSIHASVVTGAGAYVTEIAADGPPGQNVTMDEGGTPLLPDSLVYQIFLSLGPADVLAAGLVCRQWQAVSRDEFLWREQFYRYYQVARDVPRHPAAMSWYEEFQRLYDTVPCVEVQTLREHTDQVLHLSFSHSGYQFASCSKDCTVKIWSNDLTISLLHSADMRPYNWSYTQFSQFNKDDSLLLASGVFLGPHNSSSGEIAVISLDSFALLSRVRNKPYDVFGCWLTETSLISGNLHRIGDITSCSVLWLNNAFQDVESENVNVVKRLFKIQNLNASTVRTVMVADCSRFDSPDLLLEAGDPATSPCRIFDLGSDNEEVVAGPAPAHAKEGLRHFLDRVLEGRAQPQLSERMLETKVAELLAQGHTKPPERSATGAKSKYLIFTTGCLTYSPHQIGIKQILPHQMTTAGPVLGEGRGSDAFFDALDHVIDIHGHIIGMGLSPDNRYLYVNSRAWPNGAVVADPMQPPPIAEEIDLLVFDLKTMREVRRALRAHRAYTPNDECFFIFLDVSRDFVASGAEDRHGYIWDRHYNICLARLRHEDVVNSVVFSPQEQELLLTASDDATIKAWRSPRTMRVLQAPRPRPRTFFSWLASQRR

SEQ ID NO: 762890 - protein, 566 aa, Homo sapiens
MDEGGTPLLPDSLVYQIFLSLGPADVLAAGLVCRQWQAVSRDEFLWREQFYRYYQVARDVPRHPAAMSWYEEFQRLYDTVPCVEVQTLREHTDQVLHLSFSHSGYQFASCSKDCTVKIWSNDLTISLLHSADMRPYNWSYTQFSQFNKDDSLLLASGVFLGPHNSSSGEIAVISLDSFALLSRVRNKPYDVFGCWLTETSLISGNLHRIGDITSCSVLWLNNAFQDVESENVNVVKRLFKIQNLNASTVRTVMVADCSRFDSPDLLLEAGDPATSPCRIFDLGSDNEEVVAGPAPAHAKEGLRHFLDRVLEGRAQPQLSERMLETKVAELLAQGHTKPPERSATGAKSKYLIFTTGCLTYSPHQIGIKQILPHQMTTAGPVLGEGRGSDAFFDALDHVIDIHGHIIGMGLSPDNRYLYVNSRAWPNGAVVADPMQPPPIAEEIDLLVFDLKTMREVRRALRAHRAYTPNDECFFIFLDVSRDFVASGAEDRHGYIWDRHYNICLARLRHEDVVNSVVFSPQEQELLLTASDDATIKAWRSPRTMRVLQAPRPRPRTFFSWLASQRR

SEQ ID NO: 762891 - protein, 434 aa, Homo sapiens
MRPYNWSYTQFSQFNKDDSLLLASGVFLGPHNSSSGEIAVISLDSFALLSRVRNKPYDVFGCWLTETSLISGNLHRIGDITSCSVLWLNNAFQDVESENVNVVKRLFKIQNLNASTVRTVMVADCSRFDSPDLLLEAGDPATSPCRIFDLGSDNEEVVAGPAPAHAKEGLRHFLDRVLEGRAQPQLSERMLETKVAELLAQGHTKPPERSATGAKSKYLIFTTGCLTYSPHQIGIKQILPHQMTTAGPVLGEGRGSDAFFDALDHVIDIHGHIIGMGLSPDNRYLYVNSRAWPNGAVVADPMQPPPIAEEIDLLVFDLKTMREVRRALRAHRAYTPNDECFFIFLDVSRDFVASGAEDRHGYIWDRHYNICLARLRHEDVVNSVVFSPQEQELLLTASDDATIKAWRSPRTMRVLQAPRPRPRTFFSWLASQRR

SEQ ID NO: 762892 - protein, 603 aa, Homo sapiens; identical to SEQ ID NO: 762889

SEQ ID NO: 762893 - protein, 702 aa, Homo sapiens
MYPWAYFISSIHASVVTGAGAYVTEIAADGPPGQNVTMDEGGTPLLPDSLVYQIFLSLGPADVLAAGLVCRQWQAVSRDEFLWREQFYRYYQVARDVPRHPAAMSWYEEFQRLYDTVPCVEVQTLREHTDQVLHLSFSHSGYQFASCSKDCTVKIWSNDLTISLLHSADMRPYNWSYTQFSQFNKDDSLLLASGVFLGPHNSSSGEIAVISLDSFALLSRVRNKPYDVFGCWLTETSLISGNLHRIGDITSCSVLWLNNAFQDVESENVNVVKRLFKIQNLNASTVRTVMVADCSRFDSPDLLLEAGDPATSPCRIFDLGSDNEEVVAGPAPAHAKEGLRHFLDRVLEGRAQPQLSERMLETKVAELLAQGHTKPPERSATGAKSKYLIFTTGCLTYSPHQIVWYTPAAMLPASVLGAWGRPGRGPEGQTASKSTGKAGIVHSPLGSQAQTWGLWDEQLKTNAGRAAGQQATDGPDSGLGPPEQAVPTDLCGAHSPRDTTEGIKQILPHQMTTAGPVLGEGRGSDAFFDALDHVIDIHGHIIGMGLSPDNRYLYVNSRAWPNGAVVADPMQPPPIAEEIDLLVFDLKTMREVRRALRAHRAYTPNDECFFIFLDVSRDFVASGAEDRHGYIWDRHYNICLARLRHEDVVNSVVFSPQEQELLLTASDDATIKAWRSPRTMRVLQAPRPRPRTFFSWLASQRR

SEQ ID NO: 762894 - protein, 386 aa, Homo sapiens
MYPWAYFISSIHASVVTGAGAYVTEIAADGPPGQNVTMDEGGTPLLPDSLVYQIFLSLGPADVLAAGLVCRQWQAVSRDEFLWREQFYRYYQVARDVPRHPAAMSWYEEFQRLYDTVPCVEVQTLREHTDQVLHLSFSHSGYQFASCSKDCTVKIWSNDLTISLLHSADMRPYNWSYTQFSQFNKDDSLLLASGVFLGPHNSSSGEIAVISLDSFALLSRVRNKPYDVFGCWLTETSLISGNLHRIGDITSCSVLWLNNAFQDVESENVNVVKRLFKIQNLNASTVRTVMVADCSRFDSPDLLLEAGDPATSPCRIFDLGSDNEEVVAGPAPAHAKEGLRHFLDRVLEGRAQPQLSERMLETKVAELLAQGHTKPPERSATGAKSK

SEQ ID NO: 762895 - protein, 725 aa, Homo sapiens
MYPWAYFISSIHASVVTGAGAYVTEIAADGPPGQNVTMDEGGTPLLPDSLVYQIFLSLGPADVLAAGLVCRQWQAVSRDEFLWREQFYRYYQVARDVPRHPAAMSWYEEFQRLYDTVPCVEVQTLREHTDQVLHLSFSHSGYQFASCSKDCTVKIWSNDLTISLLHSADMRPYNWSYTQFSQFNKDDSLLLASGVFLGPHNSSSGEIAVISLDSFALLSRVRNKPYDVFGCWLTETSLISGNLHRIGDITSCSVLWLNNAFQDVESENVNVVKRLFKIQNLNASTVRTVMVADCSRFDSPDLLLEAGDPATSPCRIFDLGSDNEEVVAGPAPAHAKEGLRHFLDRVLEGRAQPQLSERMLETKVAELLAQGHTKPPERSATGAKSKYLIFTTGCLTYSPHQIVWYTPAAMLPASVLGAWGRPGRGPEGQTASKSTGKAGIVHSPLGSQAQTWGLWDEQLKTNAGRAAGQQATDGPDSGLGPPEQAVPTDLCGAHSPRDTTEVGSCPGVMSLGHWTGTLTVALPAGIKQILPHQMTTAGPVLGEGRGSDAFFDALDHVIDIHGHIIGMGLSPDNRYLYVNSRAWPNGAVVADPMQPPPIAEEIDLLVFDLKTMREVRRALRAHRAYTPNDECFFIFLDVSRDFVASGAEDRHGYIWDRHYNICLARLRHEDVVNSVVFSPQEQELLLTASDDATIKAWRSPRTMRVLQAPRPRPRTFFSWLASQRR

SEQ ID NO: 762896 - protein, 603 aa, Homo sapiens; identical to SEQ ID NO: 762889

SEQ ID NO: 762897 - protein, 603 aa, Homo sapiens; identical to SEQ ID NO: 762889

SEQ ID NO: 762898 - protein, 316 aa, Homo sapiens
SSGINAECPLRPGHRLPAAGDPATSPCRIFDLGSDNEEVVAGPAPAHAKEGLRHFLDRVLEGRAQPQLSERMLETKVAELLAQGHTKPPERSATGAKSKYLIFTTGCLTYSPHQIGIKQILPHQMTTAGPVLGEGRGSDAFFDALDHVIDIHGHIIGMGLSPDNRYLYVNSRAWPNGAVVADPMQPPPIAEEIDLLVFDLKTMREVRRALRAHRAYTPNDECFFIFLDVSRDFVASGAEDRHGYIWDRHYNICLARLRHEDVVNSVVFSPQEQELLLTASDDATIKAWRSPRTMRVLQAPRPRPRTFFSWLASQRR

SEQ ID NO: 762899 - protein, 752 aa, Homo sapiens
MYPWAYFISSIHASVVTGAGAYVTEIAADGPPGQNVTMDEGGTPLLPDSLVYQIFLSLGPADVLAAGLVCRQWQAVSRDEFLWREQFYRYYQVARDVPRHPAAMSWYEEFQRLYDTVPCVEVQTLREHTDQVLHLSFSHSGYQFASCSKDCTVKIWSNDLTISLLHSADMRPYNWSYTQFSQFNKDDSLLLASGVFLGPHNSSSGEIAVISLDSFALLSRVRNKPYDVFGCWLTETSLISGNLHRIGDITSCSVLWLNNAFQVRAGLGAGLPSWGLAPGAHLARAPAAQDVESENVNVVKRLFKIQNLNASTVRTVMVADCSRFDSPDLLLEAGDPATSPCRIFDLGSDNEEVVAGPAPAHAKEGLRHFLDRVLEGRAQPQLSERMLETKVAELLAQGHTKPPERSATGAKSKYLIFTTGCLTYSPHQIVWYTPAAMLPASVLGAWGRPGRGPEGQTASKSTGKAGIVHSPLGSQAQTWGLWDEQLKTNAGRAAGQQATDGPDSGLGPPEQAVPTDLCGAHSPRDTTEVGSCPGVMSLGHWTGTLTVALPAGIKQILPHQMTTAGPVLGEGRGSDAFFDALDHVIDIHGHIIGMGLSPDNRYLYVNSRAWPNGAVVADPMQPPPIAEEIDLLVFDLKTMREVRRALRAHRAYTPNDECFFIFLDVSRDFVASGAEDRHGYIWDRHYNICLARLRHEDVVNSVVFSPQEQELLLTASDDATIKAWRSPRTMRVLQAPRPRPRTFFSWLASQRR

SEQ ID NO: 762900 - protein, 613 aa, Homo sapiens
MYPWAYFISSIHASVVTGAGAYVTEIAADGPPGQNVTMDEGGTPLLPDSLVYQIFLSLGPADVLAAGLVCRQWQAVSRDEFLWREQFYRYYQVARDVPRHPAAMSWYEEFQRLYDTVPCVEVQTLREHTDQVLHLSFSHSGYQFASCSKDCTVKAITTAAPAEQIWSNDLTISLLHSADMRPYNWSYTQFSQFNKDDSLLLASGVFLGPHNSSSGEIAVISLDSFALLSRVRNKPYDVFGCWLTETSLISGNLHRIGDITSCSVLWLNNAFQDVESENVNVVKRLFKIQNLNASTVRTVMVADCSRFDSPDLLLEAGDPATSPCRIFDLGSDNEEVVAGPAPAHAKEGLRHFLDRVLEGRAQPQLSERMLETKVAELLAQGHTKPPERSATGAKSKYLIFHQMAASPKPKQDGIKQILPHQMTTAGPVLGEGRGSDAFFDALDHVIDIHGHIIGMGLSPDNRYLYVNSRAWPNGAVVADPMQPPPIAEEIDLLVFDLKTMREVRRALRAHRAYTPNDECFFIFLDVSRDFVASGAEDRHGYIWDRHYNICLARLRHEDVVNSVVFSPQEQELLLTASDDATIKAWRSPRTMRVLQAPRPRPRTFFSWLASQRR

SEQ ID NO: 762901 - protein, 521 aa, Homo sapiens
MYPWAYFISSIHASVVTGAGAYVTEIAADGPPGQNVTMDEGGTPLLPDSLVYQIFLSLGPADVLAAGLVCRQWQAVSRDEFLWREQFYRYYQVARDVPRHPAAMSWYEEFQRLYDTVPCVEVQTLREHTDQVLHLSFSHSGYQFASCSKDCTVKIWSNDLTISLLHSADMRPYNWSYTQFSQFNKDDSLLLASGVFLGPHNSSSGEIAVISLGEHGRRVDPAPAPRRQPVQPRPPHTPSRCCPACGTSPMTCLAVGSPRPASSRGTCTASEISPPARCCGSTMPSSQQGRLATAGLGGVPGAAQLLIFTTGCLTYSPHQIGIKQILPHQMTTAGPVLGEGRGSDAFFDALDHVIDIHGHIIGMGLSPDNRYLYVNSRAWPNGAVVADPMQPPPIAEEIDLLVFDLKTMREVRRALRAHRAYTPNDECFFIFLDVSRDFVASGAEDRHGYIWDRHYNICLARLRHEDVVNSVVFSPQEQELLLTASDDATIKAWRSPRTMRVLQAPRPRPRTFFSWLASQRR

SEQ ID NO: 762902 - protein, 465 aa, Homo sapiens
MYPWAYFISSIHASVVTGAGAYVTEIAADGPPGQNVTMDEGGTPLLPDSLVYQIFLSLGPADVLAAGLVCRQWQAVSRDEFLWREQFYRYYQVARDVPRHPAAMSWYEEFQRLYDTVPCVEVQTLREHTDQVLHLSFSHSGYQFASCSKDCTVKIWSNDLTISLLHSADMRPYNWSYTQFSQFNKDDSLLLASGVFLGPHNSSSGEIAVISLDSFALLSRVRNKPYDVFGCWLTETSLISGNLHRIGDITSCSVLWLNNAFQDVESENVNVVKRLFKIQNLNASTVRTVMVADCSRFDSPDLLLEAGDPATSPCRIFDLGSDNEEVVAGPAPAHAKEGLRHFLDRVLEGRAQPQLSERMLETKVAELLAQGHTKPPERSATGAKSKYLIFTTGCLTYSPHQIGIKQILPHQMTTAGPVLGEGRGSDAFFDALDHVIDIHGHIIGMGLSPDNRAVAWTAGRPKAGG

SEQ ID NO: 762903 - protein, 113 aa, Homo sapiens
WTGTLTVALPAGIKQILPHQMTTAGPVLGEGRGSDAFFDALDHVIDIHGHIIGMGLSPDNRWASCQCPRRGARRRPTPSTVPLAQVPVREQPRLAQRCGGGRPHAAATNRGGD

SEQ ID NO: 762904 - protein, 238 aa, Homo sapiens
AVLWVLAAAGLDVLAVWPPGQNVTMDEGGTPLLPDSLVYQIFLSLGPADVLAAGLVCRQWQAVSRDEFLWREQFYRYYQVARDVPRHPAAMSWYEEFQRLYDTVPCVEVQTLREHTDQVLHLSFSHSGYQFASCSKDCTVKIWSNDLTISLLHSADMRPYNWSYTQFSQFNKDDSLLLASGVFLGPHNSSSGEIAVISLDSFALQSRRSEQAYEVLAVEHGTAHMGTCTHLEINPAGA

SEQ ID NO: 762905 - protein, 613 aa, Homo sapiens
MYPWAYFISSIHASVVTGAGAYVTEIAADGPPGQNVTMDEGGTPLLPDSLVYQIFLSLGPADVLAAGLVCRQWQAVSRDEFLWREQFYRYYQVARDVPRHPAAMSWYEEFQRLYDTVPCVEVQTLREHTDQVLHLSFSHSGYQFASCSKDCTVKAITTAAPAEQIWSNDLTISLLHSADMRPYNWSYTQFSQFNKDDSLLLASGVFLGPHNSSSGEIAVISLDSFALLSRVRNKPYDVFGCWLTETSLISGNLHRIGDITSCSVLWLNNAFQDVESENVNVVKRLFKIQNLNASTVRTVMVADCSRFDSPDLLLEAGDPATSPCRIFDLGSDNEEVVAGPAPAHAKEGLRHFLDRVLEGRAQPQLSERMLETKVAELLAQGHTKPPERSATGAKSKYLIFTTGCLTYSPHQIGIKQILPHQMTTAGPVLGEGRGSDAFFDALDHVIDIHGHIIGMGLSPDNRYLYVNSRAWPNGAVVADPMQPPPIAEEIDLLVFDLKTMREVRRALRAHRAYTPNDECFFIFLDVSRDFVASGAEDRHGYIWDRHYNICLARLRHEDVVNSVVFSPQEQELLLTASDDATIKAWRSPRTMRVLQAPRPRPRTFFSWLASQRR

SEQ ID NO: 762906 - protein, 627 aa, Homo sapiens
MYPWAYFISSIHASVVTGAGAYVTEIAADGPPGQNVTMDEGGTPLLPDSLVYQIFLSLGPADVLAAGLVCRQWQAVSRDEFLWREQFYRYYQVARDVPRHPAAMSWYEEFQRLYDTVPCVEVQTLREHTDQVLHLSFSHSGYQFASCSKDCTVKIWSNDLTISLLHSADMRPYNWSYTQFSQFNKDDSLLLASGVFLGPHNSSSGEIAVISLGEHGRRVDPAPAPRTTACPAPASPHSFALLSRVRNKPYDVFGCWLTETSLISGNLHRIGDITSCSVLWLNNAFQDVESENVNVVKRLFKIQNLNASTVRTVMVADCSRFDSPDLLLEAGDPATSPCRIFDLGSDNEEVVAGPAPAHAKEGLRHFLDRVLEGRAQPQLSERMLETKVAELLAQGHTKPPERSATGAKSKYLIFTTGCLTYSPHQIGIKQILPHQMTTAGPVLGEGRGSDAFFDALDHVIDIHGHIIGMGLSPDNRYLYVNSRAWPNGAVVADPMQPPPIAEEIDLLVFDLKTMREVRRALRAHRAYTPNDECFFIFLDVSRDFVASGAEDRHGYIWDRHYNICLARLRHEDVVNSVVFSPQEQELLLTASDDATIKAWRSPRTMRVLQAPRPRPRTFFSWLASQRR

SEQ ID NO: 762907 - protein, 583 aa, Homo sapiens
MYPWAYFISSIHASVVTGAGAYVTEIAADGPPGQNVTMDEGGTPLLPDSLVYQIFLSLGPADVLAAGLVCRQWQAVSRDEFLWREQFYRYYQVARDVPRHPAAMSWYEEFQRLYDTVPCVEVQTLREHTDQVLHLSFSHSGYQFASCSKDCTVKIWSNDLTISLLHSADMRPYNWSYTQFSQFNKDDSLLLASGVFLGPHNSSSGEIAVISLDSFALLSRVRNKPYDVFGCWLTETSLISGNLHRIGDITSCSVLWLNNAFQDVESENVNVVKRLFKIQNLNASTVRTVMVADCSRFDSPDLLLEAGDPATSPCRIFDLGSDNEEVVAGPAPAHAKEGLRHFLDRVLEGRAQPQLSERMLETKVAELLAQGHTKPPERSATGAKSKYLIFTTGCLTYSPHQIGIKQILPHQMTTAGPVLGEGRGSDAFFDALDHVIDIHGHIIGMGLSPDNRYLYVNSRAWPNGAVVADPMQPPPIAEEIDLLVFDLKTMREVRRALRAHRAYTPNDECFFIFLDVSRDFVARLRHEDVVNSVVFSPQEQELLLTASDDATIKAWRSPRTMRVLQAPRPRPRTFFSWLASQRR

SEQ ID NO: 762908 - protein, 592 aa, Homo sapiens
MYPWAYFISSIHASVVTGAGAYVTEIAADGPPGQNVTMDEGGTPLLPDSLVYQIFLSLGPADVLAAGLVCRQWQAVSRDEFLWREQFYRYYQVARDVPRHPAAMSWYEEFQRLYDTVPCVEVQTLREHTDQVLHLSFSHSGYQFASCSKDCTVKIWSNDLTISLLHSADMRPYNWSYTQFSQFNKDDSLLLASGVFLGPHNSSSGEIAVISLDSFALLSRVRNKPYDVFGCWLTETSLISGNLHRIGDITSCSVLWLNNAFQDVESENVNVVKRLFKIQNLNASTVRTVMVADCSRFDSPDLLLEAGDPATSPCRIFDLGSDNEEVVAGPAPAHAKEGLRHFLDRVLEGRAQPQLSERMLETKPPERSATGAKSKYLIFTTGCLTYSPHQIGIKQILPHQMTTAGPVLGEGRGSDAFFDALDHVIDIHGHIIGMGLSPDNRYLYVNSRAWPNGAVVADPMQPPPIAEEIDLLVFDLKTMREVRRALRAHRAYTPNDECFFIFLDVSRDFVASGAEDRHGYIWDRHYNICLARLRHEDVVNSVVFSPQEQELLLTASDDATIKAWRSPRTMRVLQAPRPRPRTFFSWLASQRR

SEQ ID NO: 762909 - protein, 367 aa, Homo sapiens [sequence omitted]

SEQ ID NO: 762910 - protein, 527 aa, Homo sapiens
MTAELREAMALAPWGPVKVKKEEEEEENFPGQASSQQVHSENIKVWAPVQGLQTGLDGSEEEEKGQNISWDMAVVLKATQEAPAASTLGSYSLPGTLAKSEILETHGTMNFLGAETKNLQLLVPKTEICEEAEKPLIISERIQKADPQGPELGEACEKGNMLKRQRIKREKKDFRQVIVNDCHLPESFKEEENQKCKKSGGKYSLNSGAVKNPKTQLGQKPFTCSVCGKGFSQSANLVVHQRIHTGEKPFECHECGKAFIQSANLVVHQRIHTGQKPYVCSKCGKAFTQSSNLTVHQKIHSLEKTFKCNECEKAFSYSSQLARHQKVHITEKCYECNECGKTFTRSSNLIVHQRIHTGEKPFACNDCGKAFTQSANLIVHQRSHTGEKPYECKECGKAFSCFSHLIVHQRIHTAEKPYDCSECGKAFSQLSCLIVHQRIHSGDLPYVCNECGKAFTCSSYLLIHQRIHNGEKPYTCNECGKAFRQRSSLTVHQRTHTGEKPYECEKCGAAFISNSHLMRHHRTHLVE

SEQ ID NO: 762911 - protein, 499 aa, Homo sapiens
MTAELREAMALAPWGPVKVKKEEEEEENFPGQASSQQVHSENIKVWAPVQGLQTGLDGSEEEEKGQNISWDMAVVLKATQEAPAASTLGSYSLPGTLAKSEILETHGTMNFLGAETKNLQLLVPKTEICEEAEKPLIISERIQKADPQGPELGEACEKGNMLKRQRIKREKKDFRQVIVNDCHLPESFKEEENQKCKKSGGKYSLNSGAVKNPKTQLGQKPFTCSVCGKGFSQSANLVVHQRIHTGEKPFECHECGKAFIQSANLVVHQRIHTGQKPYVCSKCGKAFTQSSNLTVHQKIHSLEKTFKCNECEKAFSYSSQLARHQKVHITEKCYECNECGKTFTRSSNLIVHQRIHTGEKPFACNDCGKAFTQSANLIVHQRSHTGEKPYECKECGKAFSCFSHLIVHQRIHSGDLPYVCNECGKAFTCSSYLLIHQRIHNGEKPYTCNECGKAFRQRSSLTVHQRTHTGEKPYECEKCGAAFISNSHLMRHHRTHLVE

SEQ ID NO: 762912 - protein, 106 aa, Homo sapiens
IFHVVFPGADEGCSAEREPPGKPLAYSSSNIGDLRPSCLFCVCVASDLQLLGRAALWVADGPCCHSHRPWCALEDLHAVKRAGCASHQSLGEVQEAAFSCFFQKLA

SEQ ID NO: 762913 - protein, 38 aa, Homo sapiens
LSSNYPWANCALFRWSLACWCLLVLVSVFFHSSRSPAA

SEQ ID NO: 762914 - protein, 90 aa, Homo sapiens
AASLGTARVRSGRAECTAKLAGDGHARLASAFLHRRAALPPPLGTCRPRLGEGGSAPALGPSPRRGRRVSEGLRDSLPPLGSLTLGKSPK

SEQ ID NO: 762915 - protein, 152 aa, Homo sapiens
MVLLAGPAALEGKRRRPKQGHSRCPAGTGPGPGRGPRPLPVPFPFAFFQPLLRSPQLSFANPRELKTSRPLFWGGWGVGEREWVEAGGIKNRNSFTSELRLTLWFQRALCSVLKSGTHYLITKKLHEISPPPPQHPLGKGTSKHPSKKETYT

SEQ ID NO: 762916 - protein, 252 aa, Homo sapiens
MAPWLQLLSLLGLLPGAVAAPAQPRAASFQAWGPPSPELLAPTRFALEMFNRGRAAGTRAVLGLVRGRVRRAGQGSLYSLEATLEEPPCNDPMVCRLPVSKKTLLCSFQVLDELGRHVLLRKDCGPVDTKVPGAGEPKSAFTQGSAMISSLSQNHPDNRNETFSSVISLLNEDPLSQDLPVKMASIFKNFVITYNRTYESKEEARWRLSVFVNNMVRAQKIQALDRGTAQYGAIHSVHSGGARSPTDWVPSS

SEQ ID NO: 762917 - protein, 291 aa, Homo sapiens
MAPWLQLLSLLGLLPGAVAAPAQPRAASFQAWGPPSPELLAPTRFALEMFNRGRAAGTRAVLGLVRGRVRRAGQGSLYSLEATLEEPPCNDPMVCRLPVSKKTLLCSFQVLDELGRHVLLRKDCGPVDTKVPGAGEPKSAFTQGSAMISSLSQNHPDNRNETFSSVISLLNEDPLSQDLPVKMASIFKNFVITYNRTYESKEEARWRLSVFVNNMVRAQKIQALDRGTAQYGVTKFSDLTEEEFRTIYLNTLLRKEPGNKMKQAKSVGDLAPPEWDWRSKGAVTKVKDQGM

SEQ ID NO: 762918 - protein, 142 aa, Homo sapiens
RRPPRGRPVPAPVSAAAPCWSSRAAQASAPSTRPRSPGPRAPTGRASCEGPGADSSAACRATGPSLGRPAPRSSGPGRLRVPVLGAVPSLSPRPAAPGLMPAGSVCSAGDVGELWGEEQRGGSEARTSPPRRLRYPLGGPGL

SEQ ID NO: 762919 - protein, 75 aa, Homo sapiens
RVRPRVRFRVPFHKLVSGGTRGLAACTVAVHLGGGVDLSRGSVTNQAPNYARPLPGGHPTLWTGPMEATGRAAGV

SEQ ID NO: 762920 - protein, 142 aa, Homo sapiens; identical to SEQ ID NO: 762918

SEQ ID NO: 762921 - protein, 78 aa, Homo sapiens
MTSALGFSSPCGTGASERAKGKVGLGGSGNLSSSPVWPGSAVSVPPGPQQLSCSCQQEGLALIKSGQTEKTYSLTLQK

SEQ ID NO: 762922 - protein, 98 aa, Homo sapiens
PGPEGSEVGEADGEAEAAAEEREEAAVAAPTPSGKVDPAPERRFLELGNGLGEGEAPPPTLGVLGNDLGPGFLLSLRDRSLRKGQGQGGLGGLWESQL

SEQ ID NO: 762923 - protein, 143 aa, Homo sapiens
VTFPTRSGVGFRGARRTGCSAPSVRLRLSSRTKQVVSLQFPTWQGGLIDMDKKSTHRNPEDARAGKYEGKHKRKKRRKQNQNQHRSRHRSVTSFSSDDPMFPSSSSSSSGSQTDSSIEDAAKGKIKKKRREKTNKWEKRKDKI

SEQ ID NO: 762924 - protein, 124 aa, Homo sapiens
MDKKSTHRNPEDARAGKYEGKHKRKKRRKQNQNQHRSRHRSVTSFSSDDPMFPSSSSSSSGSQTDSSIEDAAKGKIKKKRREKTNKWEKRKSLVLLLRLECNDATSAHCNLCLPDSSNSPATAS

SEQ ID NO: 762925 - protein, 142 aa, Homo sapiens
VTFPTRSGVGFRGARRTGCSAPSVRLRLSSRTKQVVSLQFPTWQGGLIDMDKKSTHRNPEDARAGKYEGKHKRKKRRKQNQNQHRSRHRSVTSFSSDDPMFPSSSSSSSGSQTDSSIEDAAKGKIKKKRREKTNKWEKRKVR

SEQ ID NO: 762926 - protein, 143 aa, Homo sapiens; identical to SEQ ID NO: 762923

SEQ ID NO: 762927 - protein, 106 aa, Homo sapiens
MDKKSTHRNPEDARAGKYEGKHKRKKRRKQNQNQHRSRHRSVTSFSSDDPMFPSSSSSSSGSQTDSSIEDAAKGKIKKKRREKTNKWEKRKSLVLLLRLECNVAVS

SEQ ID NO: 762928 - protein, 143 aa, Homo sapiens; identical to SEQ ID NO: 762923

SEQ ID NO: 762929 - protein, 131 aa, Homo sapiens
EGSMRSAHIIQFKVIRLHFFPKKLLKTEEEGRMQGTRKKNCQSFKCQRIINTQEQIIPAASLGFVFFSPVFRISAGAPLCHIQFLFPDLRVLSLQMFLFISKKLCHFSLPPPRWYPPYCRRNVIFEALLAS

SEQ ID NO: 762930 - protein, 108 aa, Homo sapiens
LGPVPRGIISNTLDKMYKARVGSSKVTAVVRWKVSLRERTNEFVQLKLFKYIYSCHLSSQQLFPGDMAKGPGKCTGLSQGLSILLPKIFSPLVLGICFFSGSLLLLSW

SEQ ID NO: 762931 - protein, 104 aa, Homo sapiens
PEFHPRLPELEIPEVGTGNMHFKCPQQILRHNQARQLFNNLSVFPLQLYIPEDSILLVEKEITKVQYLAFTRTSINTCSLNPFLKELWTSGARRHQRSLSSPLK

SEQ ID NO: 762932 - protein, 112 aa, Homo sapiens
MVGRWSIDSSLIWYIFRSMCYGIDRYLVSVSLPLSLSFFFLSLTLKNRAVFGEEEKPGESSQVILKNAKLNQASKFCTRDLFRALTLLRSIMGRARWLTPIIPALWEAEAGG

SEQ ID NO: 762933 - protein, 182 aa, Homo sapiens
MSGRSVPHAHPATAEYEFANPSRLGEQRFGEGLLPEEILTPTLYHGYYVRPRAAPAGEGSRAGASELRLSEGKFQAFLDVSHFTPDEVTVRTVDNLLEVSARHPQRLDRHGFVSREFCRTYVLPADVDPWRVRAALSHDGILNLEAPRGGRHLDTEVNEVYISLLPAPPDPEEEEEAAIVEP

SEQ ID NO: 762934 - protein, 182 aa, Homo sapiens; identical to SEQ ID NO: 762933

SEQ ID NO: 762935 - protein, 536 aa, Homo sapiens
MESERDMYRQFQDWCLRTYGDSGKTKTVTRKKYERIVQLLNGSESSSTDNAKFKFWVKSKGFQLGQPDEVRGGGGGAKQVLYVPVKTTDGVGVDEKLSLRRVAVVEDFFDIIYSMHVETGPNGEQIRKHAGQKRTYKAISESYAFLPREAVTRFLMSCSECQKRMHLNPDGTDHKDNGKPPTLVTSMIDYNMPITMAYMKHMKLQLLNSQQDEDESSIESDEFDMSDSTRMSAVNSDLSSNLEERMQSPQNLHGQQDDDSAAESFNGNETLGHSSIASGGTHSREMGDSNSDGKTGLEQDEQPLNLSDSPLSAQLTSEYRIDDHNSNGKNKYKNLLISDLKMEREARENGSKSPAHSYSSYDSGKNESVDRGAEDLSLNRGDEDEDDHEDHDDSEKVNETDGVEAERLKAFNDESAPADKQCKPEATQATYSTSAVPGSQDVLYINGNGTYSYHSYRGLGGGLLNLNDASSSGPTDLSMKRQLATSSGSSSSSNSRPQLSPTEINAVRQLVAGYRESAAFLLRSADELENLILQQN

SEQ ID NO: 762936 - protein, 390 aa, Homo sapiens
FDGDSLQQDDDSAAESFNGNETLGHSSIASGGTHSREMGDSNSDGKTGLEQDEQPLNLSDSPLSAQLTSEYRIDDHNSNGKNKYKNLLISDLKMEREARENGSKSPAHSYSSYDSGKNESVDRGAEDLSLNRGDEDEDDHEDHDDSEKVNETDGVEAERLKAFNMFVRLFVDENLDRMVPISKQPKEKIQAIIDSCRRQFPEYQERARKRIRTYLKSCRRMKRSGFEMSRPIPSHLTSAVAESILASACESESRNAAKRMRLERQQDESAPADKQCKPEATQATYSTSAVPGSQDVLYINGNGTYSYHSYRGLGGGLLNLNDASSSGPTDLSMKRQLATSSGSSSSSNSRPQLSPTEINAVRQLVAGYRESAAFLLRSADELENLILQQN

SEQ ID NO: 762937 - protein, 353 aa, Homo sapiens
MGDSNSDGKTGLEQDEQPLNLSDSPLSAQLTSEYRIDDHNSNGKNKYKNLLISDLKMEREARENGSKSPAHSYSSYDSGKNESVDRGAEDLSLNRGDEDEDDHEDHDDSEKVNETDGVEAERLKAFNMFVRLFVDENLDRMVPISKQPKEKIQAIIDSCRRQFPEYQERARKRIRTYLKSCRRMKRSGFEMSRPIPSHLTSAVAESILASACESESRNAAKRMRLERQQDESAPADKQCKPEATQATYSTSAVPGSQDVLYINGNGTYSYHSYRGLGGGLLNLNDASSSGPTDLSMKRQLATSSGSSSSSNSRPQLSPTEINAVRQLVAGYRESAAFLLRSADELENLILQQN

SEQ ID NO: 762938 - protein, 631 aa, Homo sapiens
MESERDMYRQFQDWCLRTYGDSGKTKTVTRKKYERIVQLLNGSESSSTDNAKFKFWVKSKGFQLGQPDEVRGGGGGAKQVLYVPVKTTDGVGVDEKLSLRRVAVVEDFFDIIYSMHVETGPNGEQIRKHAGQKRTYKAISESYAFLPREAVTRFLMSCSECQKRMHLNPDGTDHKDNGKPPTLVTSMIDYNMPITMAYMKHMKLQLLNSQQDEDESSIESDEFDMSDSTRMSAVNSDLSSNLEERMQSPQNLHGQQDDDSAAESFNGNETLGHSSIASGGTHSREMGDSNSDGKTGLEQDEQPLNLSDSPLSAQLTSEYRIDDHNSNGKNKYKNLLISDLKMEREARENGSKSPAHSYSSYDSGKNESVDRGAEDLSLNRGDEDEDDHEDHDDSEKVNETDGVEAERLKAFNMFVRLFVDENLDRMVPISKQPKEKIQAIIDSCRRQFPEYQERARKRIRTYLKSCRRMKRSGFEMSRPIPSHLTSAVAESILASACESESRNAAKRMRLERQQDESAPADKQCKPEATQATYSTSAVPGSQDVLYINGNGTYSYHSYRGLGGGLLNLNDASSSGPTDLSMKRQLATSSGSSSSSNSRPQLSPTEINAVRQLVAGYRESAAFLLRSADELV

SEQ ID NO: 762939 - protein, 638 aa, Homo sapiens
MESERDMYRQFQDWCLRTYGDSGKTKTVTRKKYERIVQLLNGSESSSTDNAKFKFWVKSKGFQLGQPDEVRGGGGGAKQVLYVPVKTTDGVGVDEKLSLRRVAVVEDFFDIIYSMHVETGPNGEQIRKHAGQKRTYKAISESYAFLPREAVTRFLMSCSECQKRMHLNPDGTDHKDNGKPPTLVTSMIDYNMPITMAYMKHMKLQLLNSQQDEDESSIESDEFDMSDSTRMSAVNSDLSSNLEERMQSPQNLHGQQDDDSAAESFNGNETLGHSSIASGGTHSREMGDSNSDGKTGLEQDEQPLNLSDSPLSAQLTSEYRIDDHNSNGKNKYKNLLISDLKMEREARENGSKSPAHSYSSYDSGKNESVDRGAEDLSLNRGDEDEDDHEDHDDSEKVNETDGVEAERLKAFNMFVRLFVDENLDRMVPISKQPKEKIQAIIDSCRRQFPEYQERARKRIRTYLKSCRRMKRSGFEMSRPIPSHLTSAVAESILASACESESRNAAKRMRLERQQDESAPADKQCKPEATQATYSTSAVPGSQDVLYINGNGTYSYHSYRGLGGGLLNLNDASSSGPTDLSMKRQLATSSGSSSSSNSRPQLSPTEINAVRQLVAGYRESAAFLLRSADELENLILQQN

SEQ ID NO: 762940 - protein, 574 aa, Homo sapiens
MESERDMYRQFQDWCLRTYGDSGKTKTVTRKKYERIVQLLNGSESSSTDNAKFKFWVKSKGFQLGQPDEVRGGGGGAKQVLYVPVKTTDGVGVDEKLSLRRVAVVEDFFDIIYSMHVETGPNGEQIRKHAGQKRTYKAISESYAFLPREAVTRFLMSCSECQKRMHLNPDGTDHKDNGKPPTLVTSMIDYNMPITMAYMKHMKLQLLNSQQDEDESSIESDEFDMSDSTRMSAVNSDLSSNLEERMQSPQNLHGQQDDDSAAESFNGNETLGHSSIASGGTHSREMGDSNSDGKTGLEQDEQPLNLSDSPLSAQLTSEYRIDDHNSNGKNKYKNLLISDLKMEREARENGSKSPAHSYSSYDSGKNESVDRGAEDLSLNRGDEDEDDHEDHDDSEKVNETDGVEAERLKAFNSRPIPSHLTSAVAESILASACESESRNAAKRMRLERQQDESAPADKQCKPEATQATYSTSAVPGSQDVLYINGNGTYSYHSYRGLGGGLLNLNDASSSGPTDLSMKRQLATSSGSSSSSNSRPQLSPTEINAVRQLVAGYRESAAFLLRSADELENLILQQN

SEQ ID NO: 762941 - protein, 323 aa, Homo sapiens
MDQTMLDDSAAESFNGNETLGHSSIASGGTHSREMGDSNSDGKTGLEQDEQPLNLSDSPLSAQLTSEYRIDDHNSNGKNKYKNLLISDLKMEREARENGSKSPAHSYSSYDSGKNESVDRGAEDLSLNRGDEDEDDHEDHDDSEKVNETDGVEAERLKAFNSRPIPSHLTSAVAESILASACESESRNAAKRMRLERQQDESAPADKQCKPEATQATYSTSAVPGSQDVLYINGNGTYSYHSYRGLGGGLLNLNDASSSGPTDLSMKRQLATSSGSSSSSNSRPQLSPTEINAVRQLVAGYRESAAFLLRSADELENLILQQN

SEQ ID NO: 762942 - protein, 124 aa, Homo sapiens
MTRDRTETFSTSTLGGRKFTFLSKNTKPEAEISGSDREDSLFPLGLWTGCNNGMRPWGRNECLLCVGKRGKQIFGDLKRRPWQNLISCSTILFSFSPGHTAMHFPAILVVRCPVTVLRMEYGQM

SEQ ID NO: 762943 - protein, 1745 aa, Homo sapiens
QSGVSLLWAAPGQAMRKVCCYEDSMRRPVRSAFPCAWLIAKTEEQIAAEEAWNETEKVWLVHRDGFSLASQLKSEELNLPEGKVRVKLDHDGAILDVDEDDVEKANAPSCDRLEDLASLVYLNESSVLHTLRQRYGASLLHTYAGPSLLVLGPRGAPAVYSEKVMHMFKGCRREDMAPHIYAVAQTAYRAMLMSRQDQSIILLGSSGSGKTTSCQHLVQYLATIAGISGNKVFSVEKWQALYTLLEAFGNSPTIINGNATRFSQILSLDFDQAGQVASASIQTMLLEKLRVARRPASEATFNVFYYLLACGDGTLRTELHLNHLAENNVFGIVPLAKPEEKQKAAQQFSKLQAAMKVLGISPDEQKACWFILAAIYHLGAAGATKEAAEAGRKQFARHEWAQKAAYLLGCSLEELSSAIFKHQHKGGTLQRSTSFRQGPEESGLGDGTGPKLSALECLEGMAAGLYSELFTLLVSLVNRALKSSQHSLCSMMIVDTPGFQNPEQGGSARGASFEELCHNYTQDRLQRLFHERTFVQELERYKEENIELAFDDLEPPTDDSVAAVDQASHQSLVRSLARTDEARGLLWLLEEEALVPGASEDTLLERLFSYYGPQEGDKKGQSPLLHSSKPHHFLLGHSHGTNWVEYNVTGWLNYTKQNPATQNAPRLLQDSQKKIISNLFLGRAGSATVLSGSIAGLEGGSQLALRRATSMRKTFTTGMAAVKKKSLCIQMKLQVDALIDTIKKSKLHFVHCFLPVAEGWAGEPRSASSRRVSSSSELDLPSGDHCEAGLLQLDVPLLRTQLRGSRLLDAMRMYRQGYPDHMVFSEFRRRFDVLAPHLTKKHGRNYIVVDERRAVEELLECLDLEKSSCCMGLSRVFFRAGTLARLEEQRDEQTSRNLTLFQAACRGYLARQHFKKRKIQDLAIRCVQKNIKKNKGVKDWPWWKLFTTVRPLIEVQLSEEQIRNKDEEIQQLRSKLEKAEKERNELRLNSDRLESRISELTSELTDERNTGESASQLLDAETAERLRAEKEMKELQTQYDALKKQMEVMEMEVMEARLIRAAEINGEVDDDDAGGEWRLKYERAVREVDFTKKRLQQEFEDKLEVEQQNKRQLERRLGDLQADSEESQRALQQLKKKCQRLTAELQDTKLHLEGQQVRNHELEKKQRRFDSELSQAHEEAQREKLQREKLQREKDMLLAEAFSLKQQLEEKDMDIAGFTQKVVSLEAELQDISSQESKDEASLAKVKKQLRDLEAKVKDQEEELDEQAGTIQMLEQAKLRLEMEMERMRQTHSKEMESRDEEVEEARQSCQKKLKQMEVQLEEEYEDKQKVLREKRELEGKLATLSDQVNRRDFESEKRLRKDLKRTKALLADAQLMLDHLKNSAPSKREIAQLKNQLEESEFTCAAAVKARKAMEVEIEDLHLQIDDIAKAKTALEEQLSRLQREKNEIQNRLEEDQEDMNELMKKHKAAVAQASRDLAQINDLQAQLEEANKEKQELQEKLQALQSQVEFLEQSMVDKSLVSRQEAKIRELETRLEFERTQVKRLESLASRLKENMEKLTEERDQRIAAENREKEQNKRLQRQLRDTKEEMGELARKEAEASRKKHELEMDLESLEAANQSLQADLKLAFKRIGDLQAAIEDEMESDENEDLINSEGDSDVDSELEDRVDGVKSWLSKNKGPSKAASDDGSLKSSSPTSYWKSLAPDRSDDEHDPLDNTSRPRYSHSYLSDSDTEAKLTETNA

SEQ ID NO: 762944 - protein, 1716 aa, Homo sapiens
MYSASSLQGQAKTEEQIAAEEAWNETEKVWLVHRDGFSLASQLKSEELNLPEGKVRVKLDHDGAILDVDEDDVEKANAPSCDRLEDLASLVYLNESSVLHTLRQRYGASLLHTYAGPSLLVLGPRGAPAVYSEKVMHMFKGCRREDMAPHIYAVAQTAYRAMLMSRQDQSIILLGSSGSGKTTSCQHLVQYLATIAGISGNKVFSVEKWQALYTLLEAFGNSPTIINGNATRFSQILSLDFDQAGQVASASIQTMLLEKLRVARRPASEATFNVFYYLLACGDGTLRTELHLNHLAENNVFGIVPLAKPEEKQKAAQQFSKLQAAMKVLGISPDEQKACWFILAAIYHLGAAGATKEAAEAGRKQFARHEWAQKAAYLLGCSLEELSSAIFKHQHKGGTLQRSTSFRQGPEESGLGDGTGPKLSALECLEGMAAGLYSELFTLLVSLVNRALKSSQHSLCSMMIVDTPGFQNPEQGGSARGASFEELCHNYTQDRLQRLFHERTFVQELERYKEENIELAFDDLEPPTDDSVAAVDQASHQSLVRSLARTDEARGLLWLLEEEALVPGASEDTLLERLFSYYGPQEGDKKGQSPLLHSSKPHHFLLGHSHGTNWVEYNVTGWLNYTKQNPATQNAPRLLQDSQKKIISNLFLGRAGSATVLSGSIAGLEGGSQLALRRATSMRKTFTTGMAAVKKKSLCIQMKLQVDALIDTIKKSKLHFVHCFLPVAEGWAGEPRSASSRRVSSSSELDLPSGDHCEAGLLQLDVPLLRTQLRGSRLLDAMRMYRQGYPDHMVFSEFRRRFDVLAPHLTKKHGRNYIVVDERRAVEELLECLDLEKSSCCMGLSRVFFRAGTLARLEEQRDEQTSRNLTLFQAACRGYLARQHFKKRKIQDLAIRCVQKNIKKNKGVKDWPWWKLFTTVRPLIEVQLSEEQIRNKDEEIQQLRSKLEKAEKERNELRLNSDRLESRISELTSELTDERNTGESASQLLDAETAERLRAEKEMKELQTQYDALKKQMEVMEMEVMEARLIRAAEINGEVDDDDAGGEWRLKYERAVREVDFTKKRLQQEFEDKLEVEQQNKRQLERRLGDLQADSEESQRALQQLKKKCQRLTAELQDTKLHLEGQQVRNHELEKKQRRFDSELSQAHEEAQREKLQREKLQREKDMLLAEAFSLKQQLEEKDMDIAGFTQKVVSLEAELQDISSQESKDEASLAKVKKQLRDLEAKVKDQEEELDEQAGTIQMLEQAKLRLEMEMERMRQTHSKEMESRDEEVEEARQSCQKKLKQMEVQLEEEYEDKQKVLREKRELEGKLATLSDQVNRRDFESEKRLRKDLKRTKALLADAQLMLDHLKNSAPSKREIAQLKNQLEESEFTCAAAVKARKAMEVEIEDLHLQIDDIAKAKTALEEQLSRLQREKNEIQNRLEEDQEDMNELMKKHKAAVAQASRDLAQINDLQAQLEEANKEKQELQEKLQALQSQVEFLEQSMVDKSLVSRQEAKIRELETRLEFERTQVKRLESLASRLKENMEKLTEERDQRIAAENREKEQNKRLQRQLRDTKEEMGELARKEAEASRKKHELEMDLESLEAANQSLQADLKLAFKRIGDLQAAIEDEMESDENEDLINSEGDSDVDSELEDRVDGVKSWLSKNKGPSKAASDDGSLKSSSPTSYWKSLAPDRSDDEHDPLDNTSRPRYSHSYLSDSDTEAKLTETNA

SEQ ID NO: 762945 - protein, 1753 aa, Homo sapiens
PAKPEAPKKQRSPAPPEELVTPGSTGPKSDLTGEQQSKSPVPGVKQEAKTEEQIAAEEAWNETEKVWLVHRDGFSLASQLKSEELNLPEGKVRVKLDHDGAILDVDEDDVEKANAPSCDRLEDLASLVYLNESSVLHTLRQRYGASLLHTYAGPSLLVLGPRGAPAVYSEKVMHMFKGCRREDMAPHIYAVAQTAYRAMLMSRQDQSIILLGSSGSGKTTSCQHLVQYLATIAGISGNKVFSVEKWQALYTLLEAFGNSPTIINGNATRFSQILSLDFDQAGQVASASIQTMLLEKLRVARRPASEATFNVFYYLLACGDGTLRTELHLNHLAENNVFGIVPLAKPEEKQKAAQQFSKLQAAMKVLGISPDEQKACWFILAAIYHLGAAGATKGSCRAGRKQFARHEWAQKAAYLLGCSLEELSSAIFKHQHKGGTLQRSTSFRQGPEESGLGDGTGPKLSALECLEGMAAGLYSELFTLLVSLVNRALKSSQHSLCSMMIVDTPGFQNPEQGGSARGASFEELCHNYTQDRLQRLFHERTFVQELERYKEENIELAFDDLEPPTDDSVAAVDQASHQSLVRSLARTDEARGLLWLLEEEALVPGASEDTLLERLFSYYGPQEGDKKGQSPLLHSSKPHHFLLGHSHGTNWVEYNVTGWLNYTKQNPATQNAPRLLQDSQKKIISNLFLGRAGSATVLSGSIAGLEGGSQLALRRATSMRKTFTTGMAAVKKKSLCIQMKLQVDALIDTIKKSKLHFVHCFLPVAEGWAGEPRSASSRRVSSSSELDLPSGDHCEAGLLQLDVPLLRTQLRGSRLLDAMRMYRQGYPDHMVFSEFRRRFDVLAPHLTKKHGRNYIVVDERRAVEELLECLDLEKSSCCMGLSRVFFRAGTLARLEEQRDEQTSRNLTLFQAACRGYLARQHFKKRKIQDLAIRCVQKNIKKNKGVKDWPWWKLFTTVRPLIEVQLSEEQIRNKDEEIQQLRSKLEKAEKERNELRLNSDRLESRISELTSELTDERNTGESASQLLDAETAERLRAEKEMKELQTQYDALKKQMEVMEMEVMEARLIRAAEINGEVDDDDAGGEWRLKYERAVREVDFTKKRLQQEFEDKLEVEQQNKRQLERRLGDLQADSEESQRALQQLKKKCQRLTAELQDTKLHLEGQQVRNHELEKKQRRFDSELSQAHEEAQREKLQREKLQREKDMLLAEAFSLKQQLEEKDMDIAGFTQKVVSLEAELQDISSQESKDEASLAKVKKQLRDLEAKVKDQEEELDEQAGTIQMLEQAKLRLEMEMERMRQTHSKEMESRDEEVEEARQSCQKKLKQMEVQLEEEYEDKQKVLREKRELEGKLATLSDQVNRRDFESEKRLRKDLKRTKALLADAQLMLDHLKNSAPSKREIAQLKNQLEESEFTCAAAVKARKAMEVEIEDLHLQIDDIAKAKTALEEQLSRLQREKNEIQNRLEEDQEDMNELMKKHKAAVAQASRDLAQINDLQAQLEEANKEKQELQEKLQALQSQVEFLEQSMVDKSLVSRQEAKIRELETRLEFERTQVKRLESLASRLKENMEKLTEERDQRIAAENREKEQNKRLQRQLRDTKEEMGELARKEAEASRKKHELEMDLESLEAANQSLQADLKLAFKRIGDLQAAIEDEMESDENEDLINSEGDSDVDSELEDRVDGVKSWLSKNKGPSKAASDDGSLKSSSPTSYWKSLAPDRSDDEHDPLDNTSRPRYSHSYLSDSDTEAKLTETNA

SEQ ID NO: 762946 - protein, 1367 aa, Homo sapiens
EAPRSKRKLLKAGRKQFARHEWAQKAAYLLGCSLEELSSAIFKHQHKGGTLQRSTSFRQGPEESGLGDGTGPKLSALECLEGMAAGLYSELFTLLVSLVNRALKSSQHSLCSMMIVDTPGFQNPEQGGSARGASFEELCHNYTQDRLQRLFHERTFVQELERYKEENIELAFDDLEPPTDDSVAAVDQASHQSLVRSLARTDEARGLLWLLEEEALVPGASEDTLLERLFSYYGPQEGDKKGQSPLLHSSKPHHFLLGHSHGTNWVEYNVTGWLNYTKQNPATQNAPRLLQDSQKKIISNLFLGRAGSATVLSGSIAGLEGGSQLALRRATSMRKTFTTGMAAVKKKSLCIQMKLQVDALIDTIKKSKLHFVHCFLPVAEGWAGEPRSASSRRVSSSSELDLPSGDHCEAGLLQLDVPLLRTQLRGSRLLDAMRMYRQGYPDHMVFSEFRRRFDVLAPHLTKKHGRNYIVVDERRAVEELLECLDLEKSSCCMGLSRVFFRAGTLARLEEQRDEQTSRNLTLFQAACRGYLARQHFKKRKIQDLAIRCVQKNIKKNKGVKDWPWWKLFTTVRPLIEVQLSEEQIRNKDEEIQQLRSKLEKAEKERNELRLNSDRLESRISELTSELTDERNTGESASQLLDAETAERLRAEKEMKELQTQYDALKKQMEVMEMEVMEARLIRAAEINGEVDDDDAGGEWRLKYERAVREVDFTKKRLQQEFEDKLEVEQQNKRQLERRLGDLQADSEESQRALQQLKKKCQRLTAELQDTKLHLEGQQVRNHELEKKQRRFDSELSQAHEEAQREKLQREKLQREKDMLLAEAFSLKQQLEEKDMDIAGFTQKVVSLEAELQDISSQESKDEASLAKVKKQLRDLEAKVKDQEEELDEQAGTIQMLEQAKLRLEMEMERMRQTHSKEMESRDEEVEEARQSCQKKLKQMEVQLEEEYEDKQKVLREKRELEGKLATLSDQVNRRDFESEKRLRKDLKRTKALLADAQLMLDHLKNSAPSKREIAQLKNQLEESEFTCAAAVKARKAMEVEIEDLHLQIDDIAKAKTALEEQLSRLQREKNEIQNRLEEDQEDMNELMKKHKAAVAQASRDLAQINDLQAQLEEANKEKQELQEKLQALQSQVEFLEQSMVDKSLVSRQEAKIRELETRLEFERTQVKRLESLASRLKENMEKLTEERDQRIAAENREKEQNKRLQRQLRDTKEEMGELARKEAEASRKKHELEMDLESLEAANQSLQADLKLAFKRIGDLQAAIEDEMESDENEDLINSEGDSDVDSELEDRVDGVKSWLSKNKGPSKAASDDGSLKSSSPTSYWKSLAPDRSDDEHDPLDNTSRPRYSHSYLSDSDTEAKLTETNA

SEQ ID NO: 762947 - protein, 1439 aa, Homo sapiens
LQALYLPGSTTELHLNHLAENNVFGIVPLAKPEEKQKAAQQFSKLQAAMKVLGISPDEQKACWFILAAIYHLGAAGATKEAAEAGRKQFARHEWAQKAAYLLGCSLEELSSAIFKHQHKGGTLQRSTSFRQGPEESGLGDGTGPKLSALECLEGMAAGLYSELFTLLVSLVNRALKSSQHSLCSMMIVDTPGFQNPEQGGSARGASFEELCHNYTQDRLQRLFHERTFVQELERYKEENIELAFDDLEPPTDDSVAAVDQASHQSLVRSLARTDEARGLLWLLEEEALVPGASEDTLLERLFSYYGPQEGDKKGQSPLLHSSKPHHFLLGHSHGTNWVEYNVTGWLNYTKQNPATQNAPRLLQDSQKKIISNLFLGRAGSATVLSGSIAGLEGGSQLALRRATSMRKTFTTGMAAVKKKSLCIQMKLQVDALIDTIKKSKLHFVHCFLPVAEGWAGEPRSASSRRVSSSSELDLPSGDHCEAGLLQLDVPLLRTQLRGSRLLDAMRMYRQGYPDHMVFSEFRRRFDVLAPHLTKKHGRNYIVVDERRAVEELLECLDLEKSSCCMGLSRVFFRAGTLARLEEQRDEQTSRNLTLFQAACRGYLARQHFKKRKIQDLAIRCVQKNIKKNKGVKDWPWWKLFTTVRPLIEVQLSEEQIRNKDEEIQQLRSKLEKAEKERNELRLNSDRLESRISELTSELTDERNTGESASQLLDAETAERLRAEKEMKELQTQYDALKKQMEVMEMEVMEARLIRAAEINGEVDDDDAGGEWRLKYERAVREVDFTKKRLQQEFEDKLEVEQQNKRQLERRLGDLQADSEESQRALQQLKKKCQRLTAELQDTKLHLEGQQVRNHELEKKQRRFDSELSQAHEEAQREKLQREKLQREKDMLLAEAFSLKQQLEEKDMDIAGFTQKVVSLEAELQDISSQESKDEASLAKVKKQLRDLEAKVKDQEEELDEQAGTIQMLEQAKLRLEMEMERMRQTHSKEMESRDEEVEEARQSCQKKLKQMEVQLEEEYEDKQKVLREKRELEGKLATLSDQVNRRDFESEKRLRKDLKRTKALLADAQLMLDHLKNSAPSKREIAQLKNQLEESEFTCAAAVKARKAMEVEIEDLHLQIDDIAKAKTALEEQLSRLQREKNEIQNRLEEDQEDMNELMKKHKAAVAQASRDLAQINDLQAQLEEANKEKQELQEKLQALQSQVEFLEQSMVDKSLVSRQEAKIRELETRLEFERTQVKRLESLASRLKENMEKLTEERDQRIAAENREKEQNKRLQRQLRDTKEEMGELARKEAEASRKKHELEMDLESLEAANQSLQADLKLAFKRIGDLQAAIEDEMESDENEDLINSEGDSDVDSELEDRVDGVKSWLSKNKGPSKAASDDGSLKSSSPTSYWKSLAPDRSDDEHDPLDNTSRPRYSHSYLSDSDTEAKLTETNA

SEQ ID NO: 762948 - protein, 1578 aa, Homo sapiens
SLSWLSSSRRLRGLTHPAQRFWKPGVSTIIMEQSELLAGLESPIHQADEKGEELAVEAGRHALKALLVEKWQALYTLLEAFGNSPTIINGNATRFSQILSLDFDQAGQVASASIQTMLLEKLRVARRPASEATFNVFYYLLACGDGTLRTELHLNHLAENNVFGIVPLAKPEEKQKAAQQFSKLQAAMKVLGISPDEQKACWFILAAIYHLGAAGATKEAAEAGRKQFARHEWAQKAAYLLGCSLEELSSAIFKHQHKGGTLQRSTSFRQGPEESGLGDGTGPKLSALECLEGMAAGLYSELFTLLVSLVNRALKSSQHSLCSMMIVDTPGFQNPEQGGSARGASFEELCHNYTQDRLQRLFHERTFVQELERYKEENIELAFDDLEPPTDDSVAAVDQASHQSLVRSLARTDEARGLLWLLEEEALVPGASEDTLLERLFSYYGPQEGDKKGQSPLLHSSKPHHFLLGHSHGTNWVEYNVTGWLNYTKQNPATQNAPRLLQDSQKKIISNLFLGRAGSATVLSGSIAGLEGGSQLALRRATSMRKTFTTGMAAVKKKSLCIQMKLQVDALIDTIKKSKLHFVHCFLPVAEGWAGEPRSASSRRVSSSSELDLPSGDHCEAGLLQLDVPLLRTQLRGSRLLDAMRMYRQGYPDHMVFSEFRRRFDVLAPHLTKKHGRNYIVVDERRAVEELLECLDLEKSSCCMGLSRVFFRAGTLARLEEQRDEQTSRNLTLFQAACRGYLARQHFKKRKIQDLAIRCVQKNIKKNKGVKDWPWWKLFTTVRPLIEVQLSEEQIRNKDEEIQQLRSKLEKAEKERNELRLNSDRLESRISELTSELTDERNTGESASQLLDAETAERLRAEKEMKELQTQYDALKKQMEVMEMEVMEARLIRAAEINGEVDDDDAGGEWRLKYERAVREVDFTKKRLQQEFEDKLEVEQQNKRQLERRLGDLQADSEESQRALQQLKKKCQRLTAELQDTKLHLEGQQVRNHELEKKQRRFDSELSQAHEEAQREKLQREKLQREKDMLLAEAFSLKQQLEEKDMDIAGFTQKVVSLEAELQDISSQESKDEASLAKVKKQLRDLEAKVKDQEEELDEQAGTIQMLEQAKLRLEMEMERMRQTHSKEMESRDEEVEEARQSCQKKLKQMEVQLEEEYEDKQKVLREKRELEGKLATLSDQVNRRDFESEKRLRKDLKRTKALLADAQLMLDHLKNSAPSKREIAQLKNQLEESEFTCAAAVKARKAMEVEIEDLHLQIDDIAKAKTALEEQLSRLQREKNEIQNRLEEDQEDMNELMKKHKAAVAQASRDLAQINDLQAQLEEANKEKQELQEKLQALQSQVEFLEQSMVDKSLVSRQEAKIRELETRLEFERTQVKRLESLASRLKENMEKLTEERDQRIAAENREKEQNKRLQRQLRDTKEEMGELARKEAEASRKKHELEMDLESLEAANQSLQADLKLAFKRIGDLQAAIEDEMESDENEDLINSEGDSDVDSELEDRVDGVKSWLSKNKGPSKAASDDGSLKSSSPTSYWKSLAPDRSDDEHDPLDNTSRPRYSHSYLSDSDTEAKLTETNA

SEQ ID NO: 762949 - protein, 1819 aa, Homo sapiens
MYSASSLQGQAKTEEQIAAEEAWNETEKVWLVHRDGFSLASQLKSEELNLPEGKVRVKLDHDGAILDVDEDDVEKANAPSCDRLEDLASLVYLNESSVLHTLRQRYGASLLHTYAGPSLLVLGPRGAPAVYSEKVMHMFKGCRREDMAPHIYAVAQTAYRAMLMSRQDQSIILLGSSGSGKTTSCQHLVQYLATIAGISGNKVFSVEKWQALYTLLEAFGNSPTIINGNATRFSQILSLDFDQAGQVASASIQTMLLEKLRVARRPASEATFNVFYYLLACGDGTLRTELHLNHLAENNVFGIVPLAKPEEKQKAAQQFSKLQAAMKVLGISPDEQKACWFILAAIYHLGAAGATKEAAEAGRKQFARHEWAQKAAYLLGCSLEELSSAIFKHQHKGGTLQRSTSFRQGPEESGLGDGTGPKLSALECLEGMAAGLYSELFTLLVSLVNRALKSSQHSLCSMMIVDTPGFQNPEQGGSARGASFEELCHNYTQDRLQRLFHERTFVQELERYKEENIELAFDDLEPPTDDSVAAVDQASHQSLVRSLARTDEARGLLWLLEEEALVPGASEDTLLERLFSYYGPQEGDKKGQSPLLHSSKPHHFLLGHSHGTNWVEYNVTGWLNYTKQNPATQNAPRLLQDSQKKIISNLFLGRAGSATVLSGSIAGLEGGSQLALRRATSMRKTFTTGMAAVKKKSLCIQMKLQVDALIDTIKKSKLHFVHCFLPVAEGWAGEPRSASSRRVSSSSELDLPSGDHCEAGLLQLDVPLLRTQLRGSRLLDAMRMYRQGYPDHMVFSEFRRRFDVLAPHLTKKHGRNYIVVDERRAVEELLECLDLEKSSCCMGLSRVFFRAGTLARLEEQRDEQTSRNLTLFQAACRGYLARQHFKKRKIQDLAIRCVQKNIKKNKGVKDWPWWKLFTTVRPLIEVQLSEEQIRNKDEEIQQLRSKLEKAEKERNELRLNSDRLESRISELTSELTDERNTGESASQLLDAETAERLRAEKEMKELQTQYDALKKQMEVMEMEVMEARLIRAAEINGEVDDDDAGGEWRLKYERAVREVDFTKKRLQQEFEDKLEVEQQNKRQLERRVRLEEELRPVPGRARRGLVPCVGPVNAGGRQAWLEWIGEAGMLASWCRGNQEQAIIRASSVPWETRLPPASLGLPLTHPLPSPHLLHLCFWVSLYMHPILAPELGDLQADSEESQRALQQLKKKCQRLTAELQDTKLHLEGQQVRNHELEKKQRRFDSELSQAHEEAQREKLQREKLQREKDMLLAEAFSLKQQLEEKDMDIAGFTQKVVSLEAELQDISSQESKDEASLAKVKKQLRDLEAKVKDQEEELDEQAGTIQMLEQAKLRLEMEMERMRQTHSKEMESRDEEVEEARQSCQKKLKQMEVQLEEEYEDKQKVLREKRELEGKLATLSDQVNRRDFESEKRLRKDLKRTKALLADAQLMLDHLKNSAPSKREIAQLKNQLEESEFTCAAAVKARKAMEVEIEDLHLQIDDIAKAKTALEEQLSRLQREKNEIQNRLEEDQEDMNELMKKHKAAVAQASRDLAQINDLQAQLEEANKEKQELQEKLQALQSQVEFLEQSMVDKSLVSRQEAKIRELETRLEFERTQVKRLESLASRLKENMEKLTEERDQRIAAENREKEQNKRLQRQLRDTKEEMGELARKEAEASRKKHELEMDLESLEAANQSLQADLKLAFKRIGDLQAAIEDEMESDENEDLINSEGDSDVDSELEDRVDGVKSWLSKNKGPSKAASDDGSLKSSSPTSYWKSLAPDRSDDEHDPLDNTSRPRYSHSYLSDSDTEAKLTETNA

SEQ ID NO: 762950 - protein, 777 aa, Homo sapiens
REFVLVLREFLLVLGFVLVLNSDRLESRISELTSELTDERNTGESASQLLDAETAERLRAEKEMKELQTQYDALKKQMEVMEMEVMEARLIRAAEINGEVDDDDAGGEWRLKYERAVREVDFTKKRLQQEFEDKLEVEQQNKRQLERRLGDLQADSEESQRALQQLKKKCQRLTAELQDTKLHLEGQQVRNHELEKKQRRFDSELSQAHEEAQREKLQREKLQREKDMLLAEAFSLKQQLEEKDMDIAGFTQKVVSLEAELQDISSQESKDEASLAKVKKQLRDLEAKVKDQEEELDEQAGTIQMLEQAKLRLEMEMERMRQTHSKEMESRDEEVEEARQSCQKKLKQMEVQLEEEYEDKQKVLREKRELEGKLATLSDQVNRRDFESEKRLRKDLKRTKALLADAQLMLDHLKNSAPSKREIAQLKNQLEESEFTCAAAVKARKAMEVEIEDLHLQIDDIAKAKTALEEQLSRLQREKNEIQNRLEEDQEDMNELMKKHKAAVAQASRDLAQINDLQAQLEEANKEKQELQEKLQALQSQVEFLEQSMVDKSLVSRQEAKIRELETRLEFERTQVKRLESLASRLKENMEKLTEERDQRIAAENREKEQNKRLQRQLRDTKEEMGELARKEAEASRKKHELEMDLESLEAANQSLQADLKLAFKRIGDLQAAIEDEMESDENEDLINSEGDSDVDSELEDRVDGVKSWLSKNKGPSKAASDDGSLKSSSPTSYWKSLAPDRSDDEHDPLDNTSRPRYSHSYLSDSDTEAKLTETNA

SEQ ID NO: 762951 - protein, 1731 aa, Homo sapiens
MYSASSLQGQAKTEEQIAAEEAWNETEKVWLVHRDGFSLASQLKSEELNLPEGKVRVKLDHDGAILDVDEDDVEKANAPSCDRLEDLASLVYLNESSVLHTLRQRYGASLLHTYAGPSLLVLGPRGAPAVYSEKVMHMFKGCRREDMAPHIYAVAQTAYRAMLMSRQDQSIILLGSSGSGKTTSCQHLVQYLATIAGISGNKVFSVEKWQALYTLLEAFGNSPTIINGNATRFSQILSLDFDQAGQVASASIQTMLLEKLRVARRPASEATFNVFYYLLACGDGTLRTELHLNHLAENNVFGIVPLAKPEEKQKAAQQFSKLQAAMKVLGISPDEQKACWFILAAIYHLGAAGATKEAAEAGRKQFARHEWAQKAAYLLGCSLEELSSAIFKHQHKGGTLQRSTSFRQGPEESGLGDGTGPKLSALECLEGMAAGLYSELFTLLVSLVNRALKSSQHSLCSMMIVDTPGFQNPEQGGSARGASFEELCHNYTQDRLQRLFHERTFVQELERYKEENIELAFDDLEPPTDDSVAAVDQASHQSLVRSLARTDEARGLLWLLEEEALVPGASEDTLLERLFSYYGPQEGDKKGQSPLLHSSKPHHFLLGHSHGTNWVEYNVTGWLNYTKQNPATQNAPRLLQDSQKKIISNLFLGRAGSATVLSGSIAGLEGGSQLALRRATSMRKTFTTGMAAVKKKSLCIQMKLQVDALIDTIKKSKLHFVHCFLPVAEGWAGEPRSASSRRVSSSSELDLPSGDHCEAGLLQLDVPLLRTQLRGSRLLDAMRMYRQGYPDHMVFSEFRRRFDVLAPHLTKKHGRNYIVVDERRAVEELLECLDLEKSSCCMGLSRVFFRAGTLARLEEQRDEQTSRNLTLFQAACRGYLARQHFKKRKIQDLAIRCVQKNIKKNKGVKDWPWWKLFTTVRPLIEVQLSEEQIRNKDEEIQQLRSKLEKAEKERNELRLNSDRLESRISELTSELTDERNTGESASQLLDAETAERLRAEKEMKELQTQYDALKKQMEVMEMEVMEARLIRAAEINGEVDDDDAGGEWRLKYERAVREVDFTKKRLQQEFEDKLEVEQQNKRQLERRLGDLQADSEESQRALQQLKKKCQRLTAELQDTKLHLEGQQVRNHELEKKQRRFDSELSQAHEEAQREKLQREKLQREKDMLLAEAFSLKQQLEEKDMDIAGFTQKVVSLEAELQDISSQESKDEASLAKVKKQLRDLEAKVKDQEEELDEQAGTIQMLEQAKLRLEMEMERMRQTHSKEMESRDEEVEEARQSCQKKLKQMEVQLEEEYEDKQKVLREKRELEGKLATLSDQVNRRDFESEKRLRKDLKRTKALLADAQLMLDHLKNSAPSKREIAQLKNQLEESEFTCAAAVKARKAMEVEIEDLHLQIDDIAKAKTALEEQLSRLQREKNEIQNRLEEDQEDMNELMKKHKAAVAQASRDLAQINDLQAQLEEANKEKQELQEKLQALQSQVEFLEQSMVDKSLVSRQEAKIRELETRLEFERTQVKRLESLASRLKENMEKLTEERDQRIAAENREKEQNKRLQRQLRDTKEEMGELARKEAEASRKKHELEMDLESLEAANQSLQADLKLAFKRIGDLQAAIEDEMESDENEDLINSLQDMVTKYQKRKNKLEGDSDVDSELEDRVDGVKSWLSKNKGPSKAASDDGSLKSSSPTSYWKSLAPDRSDDEHDPLDNTSRPRYSHSYLSDSDTEAKLTETNA

SEQ ID NO: 762952 - protein, 1731 aa, Homo sapiens; identical to SEQ ID NO: 762951

SEQ ID NO: 762953 - protein, 1731 aa, Homo sapiens; identical to SEQ ID NO: 762951

SEQ ID NO: 762954 - protein, 182 aa, Homo sapiens
VTLEILLVIGREKEQNKRLQRQLRDTKEEMGELARKEAEASRKKHELEMDLESLEAANQSLQADLKLAFKRIGDLQAAIEDEMESDENEDLINSEGDSDVDSELEDRVDGVKSWLSKNKGPSKAASDDGSLKSSSPTSYWKSLAPDRSDDEHDPLDNTSRPRYSHSYLSDSDTEAKLTETNA

SEQ ID NO: 762955 - protein, 1731 aa, Homo sapiens; identical to SEQ ID NO: 762951

SEQ ID NO: 762956 - protein, 102 aa, Homo sapiens
SSSSSSGSEASSEHKRRKKGRSRKSKKSKSRRKRTETESESSSSSSSGSTVSSHSCSSVKKGPAAESEETGQTHRPSRKEEKKRKKEVDSLMMRYLYRPESD

SEQ ID NO: 762957 - protein, 1731 aa, Homo sapiens; identical to SEQ ID NO: 762951

SEQ ID NO: 762958 - protein, 1526 aa, Homo sapiens
MYSASSLQGQAKTEEQIAAEEAWNETEKVWLVHRDGFSLASQLKSEELNLPEGKVRVKLDHDGAILDVDEDDVEKANAPSCDRLEDLASLVYLNESSVLHTLRQRYGASLLHTYAGPSLLVLGPRGAPAVYSEKVMHMFKGCRREDMAPHIYAVAQTAYRAMLMSRQDQSIILLGSSGSGKTTSCQHLVQYLATIAGISGNKVFSVEKWQALYTLLEAFGNSPTIINGNATRFSQILSLDFDQAGQVASASIQTMLLEKLRVARRPASEATFNVFYYLLACGDGTLRTELHLNHLAENNVFGIVPLAKPEEKQKAAQQFSKLQAAMKVLGISPDEQKACWFILAAIYHLGAAGATKEAAEAGRKQFARHEWAQKAAYLLGCSLEELSSAIFKHQHKGGTLQRSTSFRQGPEESGLGDGTGPKLSALECLEGMAAGLYSELFTLLVSLVNRALKSSQHSLCSMMIVDTPGFQNPEQGGSARGASFEELCHNYTQDRLQRLFHERTFVQELERYKEENIELAFDDLEPPTDDSVAAVDQASHQSLVRSLARTDEARGLLWLLEEEALVPGASEDTLLERLFSYYGPQEGDKKGQSPLLHSSKPHHFLLGHSHGTNWVEYNVTGWLNYTKQNPATQNAPRLLQDSQKKIISNLFLGRAGSATVLSGSIAGLEGGSQLALRRATSMRKTFTTGMAAVKKKSLCIQMKLQVDALIDTIKKSKLHFVHCFLPVAEGWAGEPRSASSRRVSSSSELDLPSGDHCEAGLLQLDVPLLRTQLRGSRLLDAMRMYRQGYPDHMVFSEFRRRFDVLAPHLTKKHGRNYIVVDERRAVEELLECLDLEKSSCCMGLSRVFFRAGTLARLEEQRDEQTSRNLTLFQAACRGYLARQHFKKRKIQDLAIRCVQKNIKKNKGVKDWPWWKLFTTVRPLIEVQLSEEQIRNKDEEIQQLRSKLEKAEKERNELRLNSDRLESRISELTSELTDERNTGESASQLLDAETAERLRAEKEMKELQTQYDALKKQMEVMEMEVMEARLIRAAEINGEVDDDDAGGEWRLKYERAVREVDFTKKRLQQEFEDKLEVEQQNKRQLERRLGDLQADSEESQRALQQLKKKCQRLTAELQDTKLHLEGQQVRNHELEKKQRRFDSELSQAHEEAQREKLQREKLQREKDMLLAEAFSLKQQLEEKDMDIAGFTQKVVSLEAELQDISSQESKDEASLAKVKKQLRDLEAKVKDQEEELDEQAGTIQMLEQAKLRLEMEMERMRQTHSKEMESRDEEVEEARQSCQKKLKQMEVQLEEEYEDKQKVLREKRELEGKLATLSDQVNRRDFESEKRLRKDLKRTKALLADAQLMLDHLKNSAPSKREIAQLKNQLEESEFTCAAAVKARKAMEVEIEDLHLQIDDIAKAKTALEEQLSRLQREKNEIQNRLEEDQEDMNELMKKHKAAVAQASRDLAQINDLQAQLEEANKEKQELQEKLQALQSQVEFLEQSMVDKSLVSRQEAKIRELETRLEFERTQVKRLEVGSHFSR

SEQ ID NO: 762959 - protein, 1404 aa, Homo sapiens
MYSASSLQGQAKTEEQIAAEEAWNETEKVWLVHRDGFSLASQLKSEELNLPEGKVRVKLDHDGAILDVDEDDVEKANAPSCDRLEDLASLVYLNESSVLHTLRQRYGASLLHTYAGPSLLVLGPRGAPAVYSEKVMHMFKGCRREDMAPHIYAVAQTAYRAMLMSRQDQSIILLGSSGSGKTTSCQHLVQYLATIAGISGNKVFSVEKWQALYTLLEAFGNSPTIINGNATRFSQILSLDFDQAGQVASASIQTMLLEKLRVARRPASEATFNVFYYLLACGDGTLRTELHLNHLAENNVFGIVPLAKPEEKQKAAQQFSKLQAAMKVLGISPDEQKACWFILAAIYHLGAAGATKEAAEAGRKQFARHEWAQKAAYLLGCSLEELSSAIFKHQHKGGTLQRSTSFRQGPEESGLGDGTGPKLSALECLEGMAAGLYSELFTLLVSLVNRALKSSQHSLCSMMIVDTPGFQNPEQGGSARGASFEELCHNYTQDRLQRLFHERTFVQELERYKEENIELAFDDLEPPTDDSVAAVDQASHQSLVRSLARTDEARGLLWLLEEEALVPGASEDTLLERLFSYYGPQEGDKKGQSPLLHSSKPHHFLLGHSHGTNWVEYNVTGWLNYTKQNPATQNAPRLLQDSQKKIISNLFLGRAGSATVLSGSIAGLEGGSQLALRRATSMRKTFTTGMAAVKKKSLCIQMKLQVDALIDTIKKSKLHFVHCFLPVAEGWAGEPRSASSRRVSSSSELDLPSGDHCEAGLLQLDVPLLRTQLRGSRLLDAMRMYRQGYPDHMVFSEFRRRFDVLAPHLTKKHGRNYIVVDERRAVEELLECLDLEKSSCCMGLSRVFFRAGTLARLEEQRDEQTSRNLTLFQAACRGYLARQHFKKRKIQDLAIRCVQKNIKKNKGVKDWPWWKLFTTVRPLIEVQLSEEQIRNKDEEIQQLRSKLEKAEKERNELRLNSDRLESRISELTSELTDERNTGESASQLLDAETAERLRAEKEMKELQTQYDALKKQMEVMEMEVMEARLIRAAEINGEVDDDDAGGEWRLKYERAVREVDFTKKRLQQEFEDKLEVEQQNKRQLERRLGDLQADSEESQRALQQLKKKCQRLTAELQDTKLHLEGQQVRNHELEKKQRRFDSELSQAHEEAQREKLQREKLQREKDMLLAEAFSLKQQLEEKDMDIAGFTQKVVSLEAELQDISSQESKDEASLAKVKKQLRDLEAKVKDQEEELDEQAGTIQMLEQAKLRLEMEMERMRQTHSKEMESRDEEVEEARQSCQKKLKQMEVQLEEEYEDKQKVLREKRELEGKLATLSDQVNRRDFESEKRLRKDLKRTKALLADAQLMLDHLKNSAPSKREIAQLKNQVSTESTRLIQAQQSLPFHSLSLSRSSQWFLSPWEGK

SEQ ID NO: 762960 - protein, 1400 aa, Homo sapiens
MYSASSLQGQAKTEEQIAAEEAWNETEKVWLVHRDGFSLASQLKSEELNLPEGKVRVKLDHDGAILDVDEDDVEKANAPSCDRLEDLASLVYLNESSVLHTLRQRYGASLLHTYAGPSLLVLGPRGAPAVYSEKVMHMFKGCRREDMAPHIYAVAQTAYRAMLMSRQDQSIILLGSSGSGKTTSCQHLVQYLATIAGISGNKVFSVEKWQALYTLLEAFGNSPTIINGNATRFSQILSLDFDQAGQVASASIQTMLLEKLRVARRPASEATFNVFYYLLACGDGTLRTELHLNHLAENNVFGIVPLAKPEEKQKAAQQFSKLQAAMKVLGISPDEQKACWFILAAIYHLGAAGATKEAAEAGRKQFARHEWAQKAAYLLGCSLEELSSAIFKHQHKGGTLQRSTSFRQGPEESGLGDGTGPKLSALECLEGMAAGLYSELFTLLVSLVNRALKSSQHSLCSMMIVDTPGFQNPEQGGSARGASFEELCHNYTQDRLQRLFHERTFVQELERYKEENIELAFDDLEPPTDDSVAAVDQASHQSLVRSLARTDEARGLLWLLEEEALVPGASEDTLLERLFSYYGPQEGDKKGQSPLLHSSKPHHFLLGHSHGTNWVEYNVTGWLNYTKQNPATQNAPRLLQDSQKKIISNLFLGRAGSATVLSGSIAGLEGGSQLALRRATSMRKTFTTGMAAVKKKSLCIQMKLQVDALIDTIKKSKLHFVHCFLPVAEGWAGEPRSASSRRVSSSSELDLPSGDHCEAGLLQLDVPLLRTQLRGSRLLDAMRMYRQGYPDHMVFSEFRRRFDVLAPHLTKKHGRNYIVVDERRAVEELLECLDLEKSSCCMGLSRVFFRAGTLARLEEQRDEQTSRNLTLFQAACRGYLARQHFKKRKIQDLAIRCVQKNIKKNKGVKDWPWWKLFTTVRPLIEVQLSEEQIRNKDEEIQQLRSKLEKAEKERNELRLNSDRLESRISELTSELTDERNTGESASQLLDAETAERLRAEKEMKELQTQYDALKKQMEVMEMEVMEARLIRAAEINGEVDDDDAGGEWRLKYERAVREVDFTKKRLQQEFEDKLEVEQQNKRQLERRLGDLQADSEESQRALQQLKKKCQRLTAELQDTKLHLEGQQVRNHELEKKQRRFDSELSQAHEEAQREKLQREKLQREKDMLLAEAFSLKQQLEEKDMDIAGFTQKVVSLEAELQDISSQESKDEASLAKVKKQLRDLEAKVKDQEEELDEQAGTIQMLEQAKLPSETAMERMPPPSKETGERDDEGAEGRQRVRKRSTRGAPHSPAYGTQTARPHTHLRQPPPQTQGPPAWAQKRPTPYSPPRKCRPGARLTPTTTEAPPPSAPTHTSHPRHSGQPPQTNQPTTRHHTPPATTQHLGTSPPPNTQRPARREQQ

SEQ ID NO: 762961 - protein, 102 aa, Homo sapiens; identical to SEQ ID NO: 762956

SEQ ID NO: 762962 - protein, 1734 aa, Homo sapiens
QSGVSLLWAAPGQAMRLDSEAASHAHSQAKTEEQIAAEEAWNETEKVWLVHRDGFSLASQLKSEELNLPEGKVRVKLDHDGAILDVDEDDVEKANAPSCDRLEDLASLVYLNESSVLHTLRQRYGASLLHTYAGPSLLVLGPRGAPAVYSEKVMHMFKGCRREDMAPHIYAVAQTAYRAMLMSRQDQSIILLGSSGSGKTTSCQHLVQYLATIAGISGNKVFSVEKWQALYTLLEAFGNSPTIINGNATRFSQILSLDFDQAGQVASASIQTMLLEKLRVARRPASEATFNVFYYLLACGDGTLRTELHLNHLAENNVFGIVPLAKPEEKQKAAQQFSKLQAAMKVLGISPDEQKACWFILAAIYHLGAAGATKEAAEAGRKQFARHEWAQKAAYLLGCSLEELSSAIFKHQHKGGTLQRSTSFRQGPEESGLGDGTGPKLSALECLEGMAAGLYSELFTLLVSLVNRALKSSQHSLCSMMIVDTPGFQNPEQGGSARGASFEELCHNYTQDRLQRLFHERTFVQELERYKEENIELAFDDLEPPTDDSVAAVDQASHQSLVRSLARTDEARGLLWLLEEEALVPGASEDTLLERLFSYYGPQEGDKKGQSPLLHSSKPHHFLLGHSHGTNWVEYNVTGWLNYTKQNPATQNAPRLLQDSQKKIISNLFLGRAGSATVLSGSIAGLEGGSQLALRRATSMRKTFTTGMAAVKKKSLCIQMKLQVDALIDTIKKSKLHFVHCFLPVAEGWAGEPRSASSRRVSSSSELDLPSGDHCEAGLLQLDVPLLRTQLRGSRLLDAMRMYRQGYPDHMVFSEFRRRFDVLAPHLTKKHGRNYIVVDERRAVEELLECLDLEKSSCCMGLSRVFFRAGTLARLEEQRDEQTSRNLTLFQAACRGYLARQHFKKRKIQDLAIRCVQKNIKKNKGVKDWPWWKLFTTVRPLIEVQLSEEQIRNKDEEIQQLRSKLEKAEKERNELRLNSDRLESRISELTSELTDERNTGESASQLLDAETAERLRAEKEMKELQTQYDALKKQMEVMEMEVMEARLIRAAEINGEVDDDDAGGEWRLKYERAVREVDFTKKRLQQEFEDKLEVEQQNKRQLERRLGDLQADSEESQRALQQLKKKCQRLTAELQDTKLHLEGQQVRNHELEKKQRRFDSELSQAHEEAQREKLQREKLQREKDMLLAEAFSLKQQLEEKDMDIAGFTQKVVSLEAELQDISSQESKDEASLAKVKKQLRDLEAKVKDQEEELDEQAGTIQMLEQAKLRLEMEMERMRQTHSKEMESRDEEVEEARQSCQKKLKQMEVQLEEEYEDKQKVLREKRELEGKLATLSDQVNRRDFESEKRLRKDLKRTKALLADAQLMLDHLKNSAPSKREIAQLKNQLEESEFTCAAAVKARKAMEVEIEDLHLQIDDIAKAKTALEEQLSRLQREKNEIQNRLEEDQEDMNELMKKHKAAVAQASRDLAQINDLQAQLEEANKEKQELQEKLQALQSQVEFLEQSMVDKSLVSRQEAKIRELETRLEFERTQVKRLESLASRLKENMEKLTEERDQRIAAENREKEQNKRLQRQLRDTKEEMGELARKEAEASRKKHELEMDLESLEAANQSLQADLKLAFKRIGDLQAAIEDEMESDENEDLINSEGDSDVDSELEDRVDGVKSWLSKNKGPSKAASDDGSLKSSSPTSYWKSLAPDRSDDEHDPLDNTSRPRYSHSYLSDSDTEAKLTETNA

SEQ ID NO: 762963 - protein, 1641 aa, Homo sapiens
MYSASSLQGQAKTEEQIAAEEAWNETEKVWLVHRDGFSLASQLKSEELNLPEGKVRVKLDHDGAILDVDEDDVEKANAPSCDRLEDLASLVYLNESSVLHTLRQRYGASLLHTYAGPSLLVLGPRGAPAVYSEKVMHMFKGCRREDMAPHIYAVAQTAYRAMLMSRQDQSIILLGSSGSGKTTSCQHLVQYLATIAGISGNKVFSVEKWQALYTLLEAFGNSPTIINGNATRFSQILSLDFDQAGQVASASIQTMLLEKLRVARRPASEATFNVFYYLLACGDGTLRTELHLNHLAENNVFGIVPLAKPEEKQKAAQQFSKLQAAMKVLGISPDEQKACWFILAAIYHLGAAGATKEAAEAGRKQFARHEWAQKAAYLLGCSLEELSSAIFKHQHKGGTLQRSTSFRQGPEESGLGDGTGPKLSALECLEGMAAGLYSELFTLLVSLVNRALKSSQHSLCSMMIVDTPGFQNPEQGGSARGASFEELCHNYTQDRLQRLFHERTFVQELERYKEENIELAFDDLEPPTDDSVAAVDQASHQSLVRSLARTDEARGLLWLLEEEALVPGASEDTLLERLFSYYGPQEGDKKGQSPLLHSSKPHHFLLGHSHGTNWVEYNVTGWLNYTKQNPATQNAPRLLQDSQKKIISNLFLGRAGSATVLSGSIAGLEGGSQLALRRATSMRKTFTTGMAAVKKKSLCIQMKLQVDALIDTIKKSKLHFVHCFLPVAEGWAGEPRSASSRRVSSSSELDLPSGDHCEAGLLQLDVPLLRTQLRGSRLLDAMRMYRQGYPDHMVFSEFRRRFDVLAPHLTKKHGIQDLAIRCVQKNIKKNKGVKDWPWWKLFTTVRPLIEVQLSEEQIRNKDEEIQQLRSKLEKAEKERNELRLNSDRLESRISELTSELTDERNTGESASQLLDAETAERLRAEKEMKELQTQYDALKKQMEVMEMEVMEARLIRAAEINGEVDDDDAGGEWRLKYERAVREVDFTKKRLQQEFEDKLEVEQQNKRQLERRLGDLQADSEESQRALQQLKKKCQRLTAELQDTKLHLEGQQVRNHELEKKQRRFDSELSQAHEEAQREKLQREKLQREKDMLLAEAFSLKQQLEEKDMDIAGFTQKVVSLEAELQDISSQESKDEASLAKVKKQLRDLEAKVKDQEEELDEQAGTIQMLEQAKLRLEMEMERMRQTHSKEMESRDEEVEEARQSCQKKLKQMEVQLEEEYEDKQKVLREKRELEGKLATLSDQVNRRDFESEKRLRKDLKRTKALLADAQLMLDHLKNSAPSKREIAQLKNQLEESEFTCAAAVKARKAMEVEIEDLHLQIDDIAKAKTALEEQLSRLQREKNEIQNRLEEDQEDMNELMKKHKAAVAQASRDLAQINDLQAQLEEANKEKQELQEKLQALQSQVEFLEQSMVDKSLVSRQEAKIRELETRLEFERTQVKRLESLASRLKENMEKLTEERDQRIAAENREKEQNKRLQRQLRDTKEEMGELARKEAEASRKKHELEMDLESLEAANQSLQADLKLAFKRIGDLQAAIEDEMESDENEDLINSEGDSDVDSELEDRVDGVKSWLSKNKGPSKAASDDGSLKSSSPTSYWKSLAPDRSDDEHDPLDNTSRPRYSHSYLSDSDTEAKLTETNA

SEQ ID NO: 762964 - protein, 1259 aa, Homo sapiens
NTVCFLGSCFIWDDGGSSCTAQKEVGLADLRAPSQPTHKAVPHNVTPMLTTAGLLSQENIELAFDDLEPPTDDSVAAVDQASHQSLVRSLARTDEARGLLWLLEEEALVPGASEDTLLERLFSYYGPQEGDKKGQSPLLHSSKPHHFLLGHSHGTNWVEYNVTGWLNYTKQNPATQNAPRLLQDSQKKIISNLFLGRAGSATVLSGSIAGLEGGSQLALRRATSMRKTFTTGMAAVKKKSLCIQMKLQVDALIDTIKKSKLHFVHCFLPVAEGWAGEPRSASSRRVSSSSELDLPSGDHCEAGLLQLDVPLLRTQLRGSRLLDAMRMYRQGYPDHMVFSEFRRRFDVLAPHLTKKHGRNYIVVDERRAVEELLECLDLEKSSCCMGLSRVFFRAGTLARLEEQRDEQTSRNLTLFQAACRGYLARQHFKKRKIQDLAIRCVQKNIKKNKGVKDWPWWKLFTTVRPLIEVQLSEEQIRNKDEEIQQLRSKLEKAEKERNELRLNSDRLESRISELTSELTDERNTGESASQLLDAETAERLRAEKEMKELQTQYDALKKQMEVMEMEVMEARLIRAAEINGEVDDDDAGGEWRLKYERAVREVDFTKKRLQQEFEDKLEVEQQNKRQLERRLGDLQADSEESQRALQQLKKKCQRLTAELQDTKLHLEGQQVRNHELEKKQRRFDSELSQAHEEAQREKLQREKLQREKDMLLAEAFSLKQQLEEKDMDIAGFTQKVVSLEAELQDISSQESKDEASLAKVKKQLRDLEAKVKDQEEELDEQAGTIQMLEQAKLRLEMEMERMRQTHSKEMESRDEEVEEARQSCQKKLKQMEVQLEEEYEDKQKVLREKRELEGKLATLSDQVNRRDFESEKRLRKDLKRTKALLADAQLMLDHLKNSAPSKREIAQLKNQLEESEFTCAAAVKARKAMEVEIEDLHLQIDDIAKAKTALEEQLSRLQREKNEIQNRLEEDQEDMNELMKKHKAAVAQASRDLAQINDLQAQLEEANKEKQELQEKLQALQSQVEFLEQSMVDKSLVSRQEAKIRELETRLEFERTQVKRLESLASRLKENMEKLTEERDQRIAAENREKEQNKRLQRQLRDTKEEMGELARKEAEASRKKHELEMDLESLEAANQSLQADLKLAFKRIGDLQAAIEDEMESDENEDLINSEGDSDVDSELEDRVDGVKSWLSKNKGPSKAASDDGSLKSSSPTSYWKSLAPDRSDDEHDPLDNTSRPRYSHSYLSDSDTEAKLTETNA

SEQ ID NO: 762965 - protein, 591 aa, Homo sapiens
MVRNHELVEEAEERFDSELSQAHEEAQREKLQREKLQREKDMLLAEAFSLKQQLEEKDMDIAGFTQKVVSLEAELQDISSQESKDEASLAKVKKQLRDLEAKVKDQEEELDEQAGTIQMLEQAKLRLEMEMERMRQTHSKEMESRDEEVEEARQSCQKKLKQMEVQLEEEYEDKQKVLREKRELEGKLATLSDQVNRRDFESEKRLRKDLKRTKALLADAQLMLDHLKNSAPSKREIAQLKNQLEESEFTCAAAVKARKAMEVEIEDLHLQIDDIAKAKTALEEQLSRLQREKNEIQNRLEEDQEDMNELMKKHKAAVAQASRDLAQINDLQAQLEEANKEKQELQEKLQALQSQVEFLEQSMVDKSLVSRQEAKIRELETRLEFERTQVKRLESLASRLKENMEKLTEERDQRIAAENREKEQNKRLQRQLRDTKEEMGELARKEAEASRKKHELEMDLESLEAANQSLQADLKLAFKRIGDLQAAIEDEMESDENEDLINSEGDSDVDSELEDRVDGVKSWLSKNKGPSKAASDDGSLKSSSPTSYWKSLAPDRSDDEHDPLDNTSRPRYSHSYLSDSDTEAKLTETNA

SEQ ID NO: 762966 - protein, 337 aa, Homo sapiens
MVEHCRFQDRKPWTCRIDDYLPQAKTALEEQLSRLQREKNEIQNRLEEDQEDMNELMKKHKAAVAQASRDLAQINDLQAQLEEANKEKQELQEKLQALQSQVEFLEQSMVDKSLVSRQEAKIRELETRLEFERTQVKRLESLASRLKENMEKLTEERDQRIAAENREKEQNKRLQRQLRDTKEEMGELARKEAEASRKKHELEMDLESLEAANQSLQADLKLAFKRIGDLQAAIEDEMESDENEDLINSEGDSDVDSELEDRVDGVKSWLSKNKGPSKAASDDGSLKSSSPTSYWKSLAPDRSDDEHDPLDNTSRPRYSHSYLSDSDTEAKLTETNA

SEQ ID NO: 762967 - protein, 1731 aa, Homo sapiens; identical to SEQ ID NO: 762951

SEQ ID NO: 762968 - protein, 115 aa, Homo sapiens
MSSPSSPFREQSFLCAAGDAGEESRVQVLKNEVRRGSPVLLGWVEQAYADKCVCGPSAPPAPTPPSLSQRVMCNDLFKVNPFQLQQFRADPSTASLLLCPGGLDHKLNLRGKAWG

SEQ ID NO: 762969 - protein, 115 aa, Homo sapiens; identical to SEQ ID NO: 762968

SEQ ID NO: 762970 - protein, 1731 aa, Homo sapiens; identical to SEQ ID NO: 762951

SEQ ID NO: 762971 - protein, 1287 aa, Homo sapiens
MYSASSLQGQAKTEEQIAAEEAWNETEKVWLVHRDGFSLASQLKSEELNLPEGKVRVKLDHDGAILDVDEDDVEKANAPSCDRLEDLASLVYLNESSVLHTLRQRYGASLLHTYAGPSLLVLGPRGAPAVYSEKVMHMFKGCRREDMAPHIYAVAQTAYRAMLMSRQDQSIILLGSSGSGKTTSCQHLVQYLATIAGISGNKVFSVEKWQALYTLLEAFGNSPTIINGNATRFSQILSLDFDQAGQVASASIQTMLLEKLRVARRPASEATFNVFYYLLACGDGTLRTELHLNHLAENNVFGIVPLAKPEEKQKAAQQFSKLQAAMKVLGISPDEQKACWFILAAIYHLGAAGATKEAAEAGRKQFARHEWAQKAAYLLGCSLEELSSAIFKHQHKGGTLQRSTSFRQGPEESGLGDGTGPKLSALECLEGMAAGLYSELFTLLVSLVNRALKSSQHSLCSMMIVDTPGFQNPEQGGSARGASFEELCHNYTQDRLQRLFHERTFVQELERYKEENIELAFDDLEPPTDDSVAAVDQASHQSLVRSLARTDEARGLLWLLEEEALVPGASEDTLLERLFSYYGPQEGDKKGQSPLLHSSKPHHFLLGHSHGTNWVEYNVTGWLNYTKQNPATQNAPRLLQDSQKKIISNLFLGRAGSATVLSGSIAGLEGGSQLALRRATSMRKTFTTGMAAVKKKSLCIQMKLQVDALIDTIKKSKLHFVHCFLPVAEGWAGEPRSASSRRVSSSSELDLPSGDHCEAGLLQLDVPLLRTQLRGSRLLDAMRMYRQGYPDHMVFSEFRRRFDVLAPHLTKKHGRNYIVVDERRAVEELLECLDLEKSSCCMGLSRVFFRAGTLARLEEQRDEQTSRNLTLFQAACRGYLARQHFKKRKIQDLAIRCVQKNIKKNKGVKDWPWWKLFTTVRPLIEVQLSEEQIRNKDEEIQQLRSKLEKAEKERNELRLNSDRLESRISELTSELTDERNTGESASQLLDAETAERLRAEKEMKELQTQYDALKKQMEVMEMEVMEARLIRAAEINGEVDDDDAGGEWRLKYERAVREVDFTKKRLQQEFEDKLEVEQQNKRQLERRLGDLQADSEESQRALQQLKKKCQRLTAELQDTKLHLEGQQVRNHELEKKQRRFDSELSQAHEEAQREKLQREKLQREKDMLLAEAFSLKQQLEEKDMDIAGFTQKVVSLEAELQDISSQESKDEASLAKVKKQLRDLEAKVKDQEEELDEQAGTIQMLEQAKLRLEMEMERMRQTHSKEMESRDEEVEEARQSCQKKLKT

SEQ ID NO: 762972 - protein, 1019 aa, Homo sapiens
MYSASSLQGQAKTEEQIAAEEAWNETEKVWLVHRDGFSLASQLKSEELNLPEGKVRVKLDHDGAILDVDEDDVEKANAPSCDRLEDLASLVYLNESSVLHTLRQRYGASLLHTYAGPSLLVLGPRGAPAVYSEKVMHMFKGCRREDMAPHIYAVAQTAYRAMLMSRQDQSIILLGSSGSGKTTSCQHLVQYLATIAGISGNKVFSVEKWQALYTLLEAFGNSPTIINGNATRFSQILSLDFDQAGQVASASIQTMLLEKLRVARRPASEATFNVFYYLLACGDGTLRTELHLNHLAENNVFGIVPLAKPEEKQKAAQQFSKLQAAMKVLGISPDEQKACWFILAAIYHLGAAGATKEAAEAGRKQFARHEWAQKAAYLLGCSLEELSSAIFKHQHKGGTLQRSTSFRQGPEESGLGDGTGPKLSALECLEGMAAGLYSELFTLLVSLVNRALKSSQHSLCSMMIVDTPGFQNPEQGGSARGASFEELCHNYTQDRLQRLFHERTFVQELERYKEENIELAFDDLEPPTDDSVAAVDQASHQSLVRSLARTDEARGLLWLLEEEALVPGASEDTLLERLFSYYGPQEGDKKGQSPLLHSSKPHHFLLGHSHGTNWVEYNVTGWLNYTKQNPATQNAPRLLQDSQKKIISNLFLGRAGSATVLSGSIAGLEGGSQLALRRATSMRKTFTTGMAAVKKKSLCIQMKLQVDALIDTIKKSKLHFVHCFLPVAEGWAGEPRSASSRRVSSSSELDLPSGDHCEAGLLQLDVPLLRTQLRGSRLLDAMRMYRQGYPDHMVFSEFRRRFDVLAPHLTKKHGRNYIVVDERRAVEELLECLDLEKSSCCMGLSRVFFRAGTLARLEEQRDEQTSRNLTLFQAACRGYLARQHFKKRKIQDLAIRCVQKNIKKNKGVKDWPWWKLFTTVRPLIEVQLSEEQIRNKDEEIQQLRSKLEKAEKERNELRLNSDRLESRISELTSELTDERNTGESASQLLDAETAERLRAEKEMKELQTQYDALKKQCGA

SEQ ID NO: 762973 - protein, 393 aa, Homo sapiens
RREASHSDCITMEPRAGVSKQDIREQIWGYMESQNLADFPRPVHHRIPNFKGSYLACQNIKDLDVFARTQEVKVDPDKPLEGVRLLVLQSKKTLLVPTPRLRTGLFNKITPPPGATKDILRKCATSQGVRNYSVPIGLDSRVLVDLVVVGSVAVSEKGWRIGKGEGYADLEYAMMVSMGAVSKETPVVTIVHDCQVVDIPEELVEEHDITVDYILTPTRVIATGCKRPKPMGITWFKISLEMMEKIPILRSLRAREQQAGKDVTLQGEHQHLPEPGCQQTVPLSVGRRPPDTPGPETNSMEAAPGSPPGEGAPLAADVYVGNLPRDARVSDLKRALRELGSVPLRLTWQGPRRRAFLHYPDSAAAQQAVSCLQGLRLGTDTLRVALARQQRDK

SEQ ID NO: 762974 - protein, 220 aa, Homo sapiens [sequence omitted]

SEQ ID NO: 762975 - protein, 419 aa, Homo sapiens
RREASHSDCITMEPRAGVSKQDIREQIWGYMESQNLADFPRPVHHRIPNFKGASHAAEQLPRLQAFKTARTIKVNPDAPQKSARFFVLESKKTLLVPTPRLRTGLFNKITPPPGATKDILRKCATSQVPPERLGRQDRISKTCSIGNCLTSSQGVRNYSVPIGLDSRVLVDLVVVGSVAVSEKGWRIGKGEGYADLEYAMMVSMGAVSKETPVVTIVHDCQVVDIPEELVEEHDITVDYILTPTRVIATGCKRPKPMGITWFKISLEMMEKIPILRSLRAREQQAGKDVTLQGEHQHLPEPGCQQTVPLSVGRRPPDTPGPETNSMEAAPGSPPGEGAPLAADVYVGNLPRDARVSDLKRALRELGSVPLRLTWQGPRRRAFLHYPDSAAAQQAVSCLQGLRLGTDTLRVALARQQRDK

SEQ ID NO: 762976 - protein, 286 aa, Homo sapiens
WAFGGHFCENFYRLARDIGFKFLLPLDLMENPLLSDAPDRTAILILGCLLGWRIGKGEGYADLEYAMMVSMGAVSKETPVVTIVHDCQVVDIPEELVEEHDITVDYILTPTRVIATGCKRPKPMGITWFKISLEMMEKIPILRSLRAREQQAGKDVTLQGEHQHLPEPGCQQTVPLSVGRRPPDTPGPETNSMEAAPGSPPGEGAPLAADVYVGNLPRDARVSDLKRALRELGSVPLRLTWQGPRRRAFLHYPDSAAAQQAVSCLQGLRLGTDTLRVALARQQRDK

SEQ ID NO: 762977 - protein, 180 aa, Homo sapiens
MHSSSSRPRLSLHTAQQAEGAGLGQSRKGLPQCSCGMKGSSSTARVGAKAEEAPRGTEGCQQLSPFKGSYLACQNIKDLDVFARTQEVKVDPDKPLEGVRLLVLQSKKTLLVPTPRLRTGLFNKITPPPGATKDILRKCATSQVPPERLGRQDRISKTCSIGNCLTSSNWSVPAPVDPAR

SEQ ID NO: 762978 - protein, 239 aa, Homo sapiens
RREASHSDCITMEPRAGVSKQDIREQIWGYMESQNLADFPRPVHHRIPNFKGSYLACQNIKDLDVFARTQEVKVDPDKPLEGVRLLVLQSKKTLLVPTPRLRTGLFNKITPPPGATKDILRKCATSQGVRNYSVPIGLDSRVLVDLVVVGSVAVSEKGWRIGKGEGYADLEYAMMVSMGAVSKETPVVTIVHDCQVVDIPEELVEEHDITVDYILTPTRVIATGCKRPKPMGITWFKIR

SEQ ID NO: 762979 - protein, 393 aa, Homo sapiens
RREASHSDCITMEPRAGVSKQDIREQIWGYMESQNLADFPRPVHHRIPNFKGASHAAEQLPRLQAFKTARTIKVNPDAPQKSARFFVLESKKTLLVPTPRLRTGLFNKITPPPGATKDILRKCATSQGVRNYSVPIGLDSRVLVDLVVVGSVAVSEKGWRIGKGEGYADLEYAMMVSMGAVSKETPVVTIVHDCQVVDIPEELVEEHDITVDYILTPTRVIATGCKRPKPMGITWFKISLEMMEKIPILRSLRAREQQAGKDVTLQGEHQHLPEPGCQQTVPLSVGRRPPDTPGPETNSMEAAPGSPPGEGAPLAADVYVGNLPRDARVSDLKRALRELGSVPLRLTWQGPRRRAFLHYPDSAAAQQAVSCLQGLRLGTDTLRVALARQQRDK

SEQ ID NO: 762980 - protein, 321 aa, Homo sapiens
CAGKRRTATASPWSRGQSKKTLLVPTPRLRTGLFNKITPPPGATKDILRKCATSQGVRNYSVPIGLDSRVLVDLVVVGSVAVSEKGWRIGKGEGYADLEYAMMVSMGAVSKETPVVTIVHDCQVVDIPEELVEEHDITVDYILTPTRVIATGCKRPKPMGITWFKISLEMMEKIPILRSLRAREQQAGKDVTLQGEHQHLPEPGCQQTVPLSVGRRPPDTPGPETNSMEAAPGSPPGEGAPLAADVYVGNLPRDARVSDLKRALRELGSVPLRLTWQGPRRRAFLHYPDSAAAQQAVSCLQGLRLGTDTLRVALARQQRDK

SEQ ID NO: 762981 - protein, 393 aa, Homo sapiens; identical to SEQ ID NO: 762973

SEQ ID NO: 762982 - protein, 464 aa, Homo sapiens [sequence omitted]

SEQ ID NO: 762983 - protein, 707 aa, Homo sapiens
MAAEVYFGDLELFEPFDHPEESIPKPVHTRFKDDDGDEEDENGVGDAELRERLRQCEETIEQLRAENQELKRKLNILTRPSGILVNDTKLDGPILQILFMNNAISKQYHQEIEEFVSNLVKRFEEQQKNDVEKTSFNLLPQPSSIVLEEDHKVEESCAIKNNKEAFSVVGSVLYFTNFCLDKLGQPLLNENPQLSEGWEIPSTIKIFSHIVSLEGQEIQVKAKRPKPHCFNCGSEEHQMKDCPMPRNAARISEKRKEYMDACGEANNQNFQQRYHAEEVEERFGRFKPGVISEELQDALGVTDKSLPPFIYRMRQLGYPPGWLKEAELENSGLALYDGKDGTDGETEVGEIQQNKSVTYDLSKLVNYPGFNISTPRGIPDEWRIFGSIPMQACQQKDVFANYLTSNFQAPGVKSGNKRSSSHSSPGSPKKQKNESNSAGSPADMELDSDMEVPHGSQSSESFQFQPPLPPDTPPLPRGTPPPVFTPPLPKGTPPLTPSDSPQTRTASGAVDEDALTLEELEEQQRRIWAALEQAESVNSDSDVPVDTPLTGNSVASSPCPNELDLPVPEGKTSEKQTLDEPEVPEIFTKKSEAGHASSPDSEVTSLCQKEKAELAPVNTEGALLDNGSVVPNCDISNGGSQKLFPADTSPSTATKIHSPIPDMSKFATGITPFEFENMAESTGMYLRIRSLLKNSPRNQQKNKKASE

SEQ ID NO: 762984 - protein, 707 aa, Homo sapiens; identical to SEQ ID NO: 762983

SEQ ID NO: 762985 - protein, 481 aa, Homo sapiens
MAAEVYFGDLELFEPFDHPEESIPKPVHTRFKDDDGDEEDENGVGDAELRERLRQCEETIEQLRAENQELKRKLNILTRPSGILVNDTKLDGPILQILFMNNAISKQYHQEIEEFVSNLVKRFEEQQKNDVEKTSFNLLPQPSSIVLEEDHKVEESCAIKNNKEAFSVVGSVLYFTNFCLDKLGQPLLNENPQLSEGWEIPSTIKIFSHIVSLEGQEIQVKAKRPKPHCFNCGSEEHQMKDCPMPRNAARISEKRKEYMDACGEANNQNFQQRYHAEEVEERFGRFKPGVISEELQDALGVTDKSLPPFIYRMRQLGYPPGWLKEAELENSGLALYDGKDGTDGETEVGEIQQNKSVTYDLSKLVNYPGFNISTPRGIPDEWRIFGSIPMQACQQKDVFANYLTSNFQAPGVKSGNKRSSSHSSPGSPKKQKNESNSAGSPADMELDSDMEVPHGSQSSESFQFQPPLPPDTLHSQRAPRR

SEQ ID NO: 762986 - protein, 482 aa, Homo sapiens
MAAEVYFGDLELFEPFDHPEESIPKPVHTRFKDDDGDEEDENGVGDAELRERLRQCEETIEQLRAENQELKRKLNILTRPSGILVNDTKLDGPILQILFMNNAISKQYHQEIEEFVSNLVKRFEEQQKNDVEKTSFNLLPQPSSIVLEEDHKVEESCAIKNNKEAFSVVGSVLYFTNFCLDKLGQPLLNENPQLSEGWEIPSTIKIFSHIVSLEGQEIQVKAKRPKPHCFNCGSEEHQMKDCPMPRNAARISEKRKEYMDACGEANNQNFQQRYHAEEVEERFGRFKPGVISEELQDALGVTDKSLPPFIYRMRQLGYPPGWLKEAELENSGLALYDGKDGTDGETEVGEIQQNKSVTYDLSKLVNYPGFNISTPRGIPDEWRIFGSIPMQACQQKDVFANYLTSNFQAPGVKSGNKRSSSHSSPGSPKKQKNESNSAGSPADMELDSDMEVPHGSQSSESFQFQPPLPPDIMNRAPCRREI

SEQ ID NO: 762987 - protein, 464 aa, Homo sapiens [sequence omitted]

SEQ ID NO: 762988 - protein, 318 aa, Homo sapiens [sequence omitted]

SEQ ID NO: 762989 - protein, 211 aa, Homo sapiens
MAAEVYFGDLELFEPFDHPEESIPKPVHTRFKDDDGDEEDENGVGDAELRERLRQCEETIEQLRAENQELKRKLNILTRPSGILVNDTKLDGPILQILFMNNAISKQYHQEIEEFVSNLVKRFEEQQKNDVEKTSFNLLPQPSSIVLEEDHKVEESCAIKNNKEAFSVVGSVLYFTNFCLDKLGQPLLNENPQLSEGWEIPSTIKSSHMVL

SEQ ID NO: 762990 - protein, 707 aa, Homo sapiens; identical to SEQ ID NO: 762983

SEQ ID NO: 762991 - protein, 650 aa, Homo sapiens
MAAEVYFGDLELFEPFDHPEESIPKPVHTRFKDDDGDEEDENGVGDAELRERLRQCEETIEQLRAENQELKRKLNILTRPSGILVNDTKLDGPILQILFMNNAISKQYHQEIEEFVSNLVKRFEEQQKNDVEKTSFNLLPQPSSIVLEEDHKVEESCAIKNNKEAFSAKASLFQLWFEEHQMKDCPMPRNAARISEKRKEYMDACGEANNQNFQQRYHAEEVEERFGRFKPGVISEELQDALGVTDKSLPPFIYRMRQLGYPPGWLKEAELENSGLALYDGKDGTDGETEVGEIQQNKSVTYDLSKLVNYPGFNISTPRGIPDEWRIFGSIPMQACQQKDVFANYLTSNFQAPGVKSGNKRSSSHSSPGSPKKQKNESNSAGSPADMELDSDMEVPHGSQSSESFQFQPPLPPDTPPLPRGTPPPVFTPPLPKGTPPLTPSDSPQTRTASGAVDEDALTLEELEEQQRRIWAALEQAESVNSDSDVPVDTPLTGNSVASSPCPNELDLPVPEGKTSEKQTLDEPEVPEIFTKKSEAGHASSPDSEVTSLCQKEKAELAPVNTEGALLDNGSVVPNCDISNGGSQKLFPADTSPSTATKIHSPIPDMSKFATGITPFEFENMAESTGMYLRIRSLLKNSPRNQQKNKKASE

SEQ ID NO: 762992 - protein, 500 aa, Homo sapiens
MAAEVYFGDLELFEPFDHPEESIPKPVHTRFKDDDGDEEDENGVGDAELRERLRQCEETIEQLRAENQELKRKLNILTRPSGILVNDTKLDGPILQILFMNNAISKQYHQEIEEFVSNLVKRFEEQQKNDVEKTSFNLLPQPSSIVLEEDHKVEESCAIKNNKEAFSVVGSVLYFTNFCLDKLGQPLLNENPQLSEGWEIPSTIKIFSHIVSLEGQEIQVKAKRPKPHCFNCGSEEHQMKDCPMPRNAARISEKRKEYMDACGEANNQNFQQRYHAEEVEERFGRFKPGVISEELQDALGVTDKSLPPFIYRMRQLGYPPGWLKEAELENSGLALYDGKDGTDGETEVGEIQQNKSVTYDLSKLVNYPGFNISTPRGIPDEWRIFGSIPMQACQQKDVFANYLTSNFQAPGVKSGNKRSSSHSSPGSPKKQKNESNSAGSPADMELDSDMEVPHGSQSSESFQFQPPLPPDTPPLPRGTPPPVFTPPCAPGATNKNPTEN

SEQ ID NO: 762993 - protein, 212 aa, Homo sapiens
MAAEVYFGDLELFEPFDHPEESIPKPVHTRFKDDDGDEEDENGVGDAELRERLRQCEETIEQLRAENQELKRKLNILTRPSGILVNDTKLDGPILQILFMNNAISKQYHQEIEEFVSNLVKRFEEQQKNDVEKTSFNLLPQPSSIVLEEDHKVEESCAIKNNKEAFSVVGSVLYFTNFCLDKLGQPLLNENPQLSEGWEIPSTIKSSATLFL

SEQ ID NO: 762994 - protein, 129 aa, Homo sapiens
  misc_feature (1)..(1): Xaa can be any naturally occurring amino acid
XRAEEFGTSEDKAHMNVDIACAVADGENAFQGLEPKLEPQELSPLSATVFPKVEHSPGPPATVDKQCQEGLSENSAYRWTVVKTEEGRQALEPLPQGIQESLNNSSPGDLEEVVKMEPEDATEEISGFL

SEQ ID NO: 762995 - protein, 76 aa, Homo sapiens
TICLPVDKQCKTVTEDSVYLGAAVCCKRGGGGIGRQALEPLPQGIQESLNNSSPGDLEEVVKMEPEDATEEISGFL

SEQ ID NO: 762996 - protein, 751 aa, Homo sapiens
MEDLFETFQDEMGFSNMEDDGPEEEERVAEPQANFNTPQALRFEELLANLLNEQHQIAKELFEQLKMKKPSAKQQKEVEKVKPQCKEVHQTLILDPAQRKRLQQQMQQHVQLLTQIHLLATCNPNLNPEASSTRICLKELGTFAQSSIALHHQYNPKFQTLFQPCNLMGAMQLIEDFSTHVSIDCSPHKTVKKTANEFPCLPKQVAWILATSKVFMYPELLPVCSLKAKNPQDKILFTKAEDNLLALGLKHFEGTEFLNPLISKYLLTCKTARQLTVRIKNLNMNRAPDNIIKFYKKTKQLPVLGKCCEEIQPHQWKPPIEREEHRLPFWLKASLPSIQEELRHMADGAREVGNMTGTTEINSDQGLEKDNSELGSETRYPLLLPKGVVLKLKPVADRFPKKAWRQKRSSVLKPLLIQPSPSLQPSFNPGKTPAQSTHSEAPPSKMVLRIPHPIQPATVLQTVPGVPPLGVSGGESFESPAALPAMPPEARTSFPLSESQTLLSSAPVPKVMMPSPASSMFRKPYVRRRPSKRRGARAFRCIKPAPVIHPASVIFTVPATTVKIVSLGGGCNMIQPVNAAVAQSPQTIPIATLLVNPTSFPCPLNQPLVASSVSPLIVSGNSVNLPIPSTPEDKAHMNVDIACAVADGENAFQGLEPKLEPQELSPLSATVFPKVEHSPGPPATVDKQCQEGLSENSAYRWTVVKTEEGRQALEPLPQGIQESLNNSSPGDLEEVVKMEPEDATEEISGFL

SEQ ID NO: 762997 - protein, 823 aa, Homo sapiens
  misc_feature (7)..(7): Xaa can be any naturally occurring amino acid
MYTPRVXRGVVATRGLAREVVDRLTRWPPPDKREGSAVDPGKRRSLAATPSSSLPCTLIALGLRHEKEANELMEDLFETFQDEMGFSNMEDDGPEEEERVAEPQANFNTPQALRFEELLANLLNEQHQIAKELFEQLKMKKPSAKQQKEVEKVKPQCKEVHQTLILDPAQRKRLQQQMQQHVQLLTQIHLLATCNPNLNPEASSTRICLKELGTFAQSSIALHHQYNPKFQTLFQPCNLMGAMQLIEDFSTHVSIDCSPHKTVKKTANEFPCLPKQVAWILATSKVFMYPELLPVCSLKAKNPQDKILFTKAEDNLLALGLKHFEGTEFLNPLISKYLLTCKTARQLTVRIKNLNMNRAPDNIIKFYKKTKQLPVLGKCCEEIQPHQWKPPIEREEHRLPFWLKASLPSIQEELRHMADGAREVGNMTGTTEINSDQGLEKDNSELGSETRYPLLLPKGVVLKLKPVADRFPKKAWRQKRSSVLKPLLIQPSPSLQPSFNPGKTPAQSTHSEAPPSKMVLRIPHPIQPATVLQTVPGVPPLGVSGGESFESPAALPAMPPEARTSFPLSESQTLLSSAPVPKVMMPSPASSMFRKPYVRRRPSKRRGARAFRCIKPAPVIHPASVIFTVPATTVKIVSLGGGCNMIQPVNAAVAQSPQTIPIATLLVNPTSFPCPLNQPLVASSVSPLIVSGNSVNLPIPSTPEDKAHMNVDIACAVADGENAFQGLEPKLEPQELSPLSATVFPKVEHSPGPPATVDKQCQEGLSENSAYRWTVVKTEEGRQALEPLPQGIQESLNNSSPGDLEEVVKMEPEDATEEISGFL

SEQ ID NO: 762998 - protein, 754 aa, Homo sapiens
MVEAGVNRPRFQDEMGFSNMEDDGPEEEERVAEPQANFNTPQALRFEELLANLLNEQHQIAKELFEQLKMKKPSAKQQKEVEKVKPQCKEVHQTLILDPAQRKRLQQQMQQHVQLLTQIHLLATCNPNLNPEASSTRICLKELGTFAQSSIALHHQYNPKFQTLFQPCNLMGAMQLIEDFSTHVSIDCSPHKTVKKTANEFPCLPKQVAWILATSKVFMYPELLPVCSLKAKNPQDKILFTKAEDNLLALGLKHFEGTEFLNPLISKYLLTCKTARQLTVRIKNLNMNRAPDNIIKFYKKTKQLPVLGKCCEEIQPHQWKPPIEREEHRLPFWLKASLPSIQEELRHMADGAREVGNMTGTTEINSDQGLEKDNSELGSETRYPLLLPKGVVLKLKPVADRFPKKAWRQKRSSVLKPLLIQPSPSLQPSFNPGKTPAQSTHSEAPPSKMVLRIPHPIQPATVLQTVPGVPPLGVSGGESFESPAALPAMPPEARTSFPLSESQTLLSSAPVPKVMMPSPASSMFRKPYVRRRPSKRRGARAFRCIKPAPVIHPASVIFTVPATTVKIVSLGGGCNMIQPVNAAVAQSPQTIPIATLLVNPTSFPCPLNQPLVASSVSPLIVSGNSVNLPIPSTPEDKAHMNVDIACAVADGENAFQGLEPKLEPQELSPLSATVFPKVEHSPGPPATVDKQCQEGLSENSAYRWTVVKTEEGRQALEPLPQGIQESLNNSSPGDLEEVVKMEPEDATEEISGFL

SEQ ID NO: 762999 - protein, 468 aa, Homo sapiens
MNRAPDNIIKFYKKTKQLPVLGKCCEEIQPHQWKPPIEREEHRLPFWLKASLPSIQEELRHMADGAREVGNMTGTTEINSDQGLEKDNSELGSETRYPLLLPKGVVLKLKPVADRFPKKAWRQKRSSVLKPLLIQPSPSLQPSFNPGKTPAQSTHSEAPPSKMVLRIPHPIQPATVLQTVPGVPPLGVSGGESFESPAALPAMPPEARTSFPLSESQTLLSSAPVPKVMMPSPASSMFRKPYVRRRPSKRRGARAFRCIKPAPVIHPASVIFTVPATTVKIVSLGGGCNMIQPVNAAVAQSPQTIPIATLLVNPTSFPCPLNQPLVASSVSPLIVSGNSVNLPIPSTPEDKAHMNVDIACAVADGENAFQGLEPKLEPQELSPLSATVFPKVEHSPGPPATVDKQCQEGLSENSAYRWTVVKTEEGRQALEPLPQGIQESLNNSSPGDLEEVVKMEPEDATEEISGFL

SEQ ID NO: 763000 - protein, 765 aa, Homo sapiens
MEDLFETFQDEMGFSNMEDDGPEEEERVAEPQANFNTPQALRFEELLANLLNEQHQIAKELFEQLKMKKPSAKQQKEVEKVKPQCKEVHQTLILDPAQRKRLQQQMQQHVQLLTQIHLLATCNPNLNPEASSTRICLKELGTFAQSSIALHHQYNPKFQTLFQPCNLMGAMQLIEDFSTHVSIDCSPHKTVKKTGVGDRCVSFEVFTCANEFPCLPKQVAWILATSKVFMYPELLPVCSLKAKNPQDKILFTKAEDNLLALGLKHFEGTEFLNPLISKYLLTCKTARQLTVRIKNLNMNRAPDNIIKFYKKTKQLPVLGKCCEEIQPHQWKPPIEREEHRLPFWLKASLPSIQEELRHMADGAREVGNMTGTTEINSDQGLEKDNSELGSETRYPLLLPKGVVLKLKPVADRFPKKAWRQKRSSVLKPLLIQPSPSLQPSFNPGKTPAQSTHSEAPPSKMVLRIPHPIQPATVLQTVPGVPPLGVSGGESFESPAALPAMPPEARTSFPLSESQTLLSSAPVPKVMMPSPASSMFRKPYVRRRPSKRRGARAFRCIKPAPVIHPASVIFTVPATTVKIVSLGGGCNMIQPVNAAVAQSPQTIPIATLLVNPTSFPCPLNQPLVASSVSPLIVSGNSVNLPIPSTPEDKAHMNVDIACAVADGENAFQGLEPKLEPQELSPLSATVFPKVEHSPGPPATVDKQCQEGLSENSAYRWTVVKTEEGRQALEPLPQGIQESLNNSSPGDLEEVVKMEPEDATEEISGFL

SEQ ID NO: 763001 - protein, 460 aa, Homo sapiens
EANIRLGTRLGVAGKCCEEIQPHQWKPPIEREEHRLPFWLKASLPSIQEELRHMADGAREVGNMTGTTEINSDQGLEKDNSELGSETRYPLLLPKGVVLKLKPVADRFPKKAWRQKRSSVLKPLLIQPSPSLQPSFNPGKTPAQSTHSEAPPSKMVLRIPHPIQPATVLQTVPGVPPLGVSGGESFESPAALPAMPPEARTSFPLSESQTLLSSAPVPKVMMPSPASSMFRKPYVRRRPSKRRGARAFRCIKPAPVIHPASVIFTVPATTVKIVSLGGGCNMIQPVNAAVAQSPQTIPIATLLVNPTSFPCPLNQPLVASSVSPLIVSGNSVNLPIPSTPEDKAHMNVDIACAVADGENAFQGLEPKLEPQELSPLSATVFPKVEHSPGPPATVDKQCQEGLSENSAYRWTVVKTEEGRQALEPLPQGIQESLNNSSPGDLEEVVKMEPEDATEEISGFL

SEQ ID NO: 763002 - protein, 751 aa, Homo sapiens; identical to SEQ ID NO: 762996

SEQ ID NO: 763003 - protein, 387 aa, Homo sapiens
SWTWQCAALERNCLTPALLPGSFLPFSGEHLADRFPKKAWRQKRSSVLKPLLIQPSPSLQPSFNPGKTPAQSTHSEAPPSKMVLRIPHPIQPATVLQTVPGVPPLGVSGGESFESPAALPAMPPEARTSFPLSESQTLLSSAPVPKVMMPSPASSMFRKPYVRRRPSKRRGARAFRCIKPAPVIHPASVIFTVPATTVKIVSLGGGCNMIQPVNAAVAQSPQTIPIATLLVNPTSFPCPLNQPLVASSVSPLIVSGNSVNLPIPSTPEDKAHMNVDIACAVADGENAFQGLEPKLEPQELSPLSATVFPKVEHSPGPPATVDKQCQEGLSENSAYRWTVVKTEEGRQALEPLPQGIQESLNNSSPGDLEEVVKMEPEDATEEISGFL

SEQ ID NO: 763004 - protein, 306 aa, Homo sapiens
MVLRIPHPIQPATVLQTVPGVPPLGVSGGESFESPAALPAMPPEARTSFPLSESQTLLSSAPVPKVMMPSPASSMFRKPYVRRRPSKRRGARAFRCIKPAPVIHPASVIFTVPATTVKIVSLGGGCNMIQPVNAAVAQSPQTIPIATLLVNPTSFPCPLNQPLVASSVSPLIVSGNSVNLPIPSTPEDKAHMNVDIACAVADGENAFQGLEPKLEPQELSPLSATVFPKVEHSPGPPATVDKQCQEGLSENSAYRWTVVKTEEGRQALEPLPQGIQESLNNSSPGDLEEVVKMEPEDATEEISGFL

SEQ ID NO: 763005 - protein, 226 aa, Homo sapiens
APYPDTWRRGARAFRCIKPAPVIHPASVIFTVPATTVKIVSLGGGCNMIQPVNAAVAQSPQTIPIATLLVNPTSFPCPLNQPLVASSVSPLIVSGNSVNLPIPSTPEDKAHMNVDIACAVADGENAFQGLEPKLEPQELSPLSATVFPKVEHSPGPPATVDKQCQEGLSENSAYRWTVVKTEEGRQALEPLPQGIQESLNNSSPGDLEEVVKMEPEDATEEISGFL

SEQ ID NO: 763006 - protein, 103 aa, Homo sapiens
  misc_feature (9)..(9): Xaa can be any naturally occurring amino acid
SAFVPLVPXKLEPQELSPLSATVFPKVEHSPGPPATVDKQCQEGLSENSAYRWTVVKTEEGRQALEPLPQGIQESLNNSSPGDLEEVVKMEPEDATEEISGFL

SEQ ID NO: 763007 - protein, 727 aa, Homo sapiens
MEDLFETFQDEMGFSNMEDDGPEEEERVAEPQANFNTPQALRFEELLANLLNEQHQIAKELFEQLKMKKPSAKQQKEVEKVKPQCKEVHQTLILDPAQRKRLQQQMQQHVQLLTQIHLLATCNPNLNPEASSTRICLKELGTFAQSSIALHHQYNPKFQTLFQPCNLMGAMQLIEDFSTHVSIDCSPHKTVKKTANEFPCLPKQVAWILATSKVFMYPELLPVCSLKAKNPQDKILFTKAEDNLLALGLKHFEGTEFLNPLISKYLLTCKTARQLTVRIKNLNMNRAPDNIIKFYKKTKQLPVLGKCCEEIQPHQWKPPIEREEHRLPFWLKASLPSIQEELRHMADGAREVGNMTGTTEINSDQGLEKDNSELGSETRYPLLLPKGVVLKLKPVADRFPKKAWRQKRSSVLKPLLIQPSPSLQPSFNPGKTPAQSTHSEAPPSKMVLRIPHPIQPATVLQTVPGVPPLGVSGGESFESPAALPAMPPEARTSFPLSESQTLLSSAPVPKVMMPSPASSMFRKPYVRRRPSKRRGARAFRCIKPAPVIHPASVIFTVPATTVKIVSLGGGCNMIQPVNAAVAQSPQTIPIATLLVNPTSFPCPLNQPLVASSVSPLIVSGNSVNLPIPSTPEDKAHMNVDIACAVADGENAFQGLEPKLEPQELSPLSATVFPKVEHSPGPPATVDKQCQEGLSENSAYRWTVVKTEEGVSKQLFPWGFRGSCQDGT

SEQ ID NO: 763008 - protein, 519 aa, Homo sapiens
MEDLFETFQDEMGFSNMEDDGPEEEERVAEPQANFNTPQALRFEELLANLLNEQHQIAKELFEQLKMKKPSAKQQKEVEKVKPQCKEVHQTLILDPAQRKRLQQQMQQHVQLLTQIHLLATCNPNLNPEASSTRICLKELGTFAQSSIALHHQYNPKFQTLFQPCNLMGAMQLIEDFSTHVSIDCSPHKTVKKTANEFPCLPKQVAWILATSKVFMYPELLPVCSLKAKNPQDKILFTKAEDNLLALGLKHFEGTEFLNPLISKYLLTCKTARQLTVRIKNLNMNRAPDNIIKFYKKTKQLPVLGKCCEEIQPHQWKPPIEREEHRLPFWLKASLPSIQEELRHMADGAREVGNMTGTTEINSDQGLEKDNSELGSETRYPLLLPKGVVLKLKPVADRFPKKAWRQKRSSVLKPLLIQPSPSLQPSFNPGKTPAQSTHSEAPPSKMVLRIPHPIQPATVLQTVPGVPPLGVSGGESFESPAALPAMPPEARTSFPLSESQTLLSSAPVPKVMMPSHGSQ

SEQ ID NO: 763009 - protein, 271 aa, Homo sapiens
MEDLFETFQDEMGFSNMEDDGPEEEERVAEPQANFNTPQALRFEELLANLLNEQHQIAKELFEQLKMKKPSAKQQKEVEKVKPQCKEVHQTLILDPAQRKRLQQQMQQHVQLLTQIHLLATCNPNLNPEASSTRICLKELGTFAQSSIALHHQYNPKFQTLFQPCNLMGAMQLIEDFSTHVSIDCSPHKTVKKTANEFPCLPKQVAWILATSKVFMYPELLPVCSLKAKNPQDKILFTKAEDNLLALGLKHFEGTEFLNPLISKNQRGVRA

SEQ ID NO: 763010 - protein, 245 aa, Homo sapiens
MEDLFETFQDEMGFSNMEDDGPEEEERVAEPQANFNTPQALRFEELLANLLNEQHQIAKELFEQLKMKKPSAKQQKEVEKVKPQCKEVHQTLILDPAQRKRLQQQMQQHVQLLTQIHLLATCNPNLNPEASSTRICLKELGTFAQSSIALHHQYNPKFQTLFQPCNLMGAMQLIEDFSTHVSIDCSPHKTVKKTANEFPCLPKQVAWILATSKVFMYPELLPVCSLKAKNPQDKILFTKAEDNTF

SEQ ID NO: 763011 - protein, 133 aa, Homo sapiens
MAGVGRSGGPWGRTRGGRSGRLGVSLGALSSLPLEELPRPLCCRRCRRHFGFALRGETIPVSVAGSASSQFAPLALHLSLLLSRISASRLTRWPPPDKREGSAVDPGKRRSLAATPSSSLPCTLIALGLRHGE

SEQ ID NO: 763012 - protein, 751 aa, Homo sapiens; identical to SEQ ID NO: 762996

SEQ ID NO: 763013 - protein, 819 aa, Homo sapiens
GYCRGWVAPQVLGLGPLSRLTRWPPPDKREGSAVDPGKRRSLAATPSSSLPCTLIALGLRHEKEANELMEDLFETFQDEMGFSNMEDDGPEEEERVAEPQANFNTPQALRFEELLANLLNEQHQIAKELFEQLKMKKPSAKQQKEVEKVKPQCKEVHQTLILDPAQRKRLQQQMQQHVQLLTQIHLLATCNPNLNPEASSTRICLKELGTFAQSSIALHHQYNPKFQTLFQPCNLMGAMQLIEDFSTHVSIDCSPHKTVKKTANEFPCLPKQVAWILATSKVFMYPELLPVCSLKAKNPQDKILFTKAEDNLLALGLKHFEGTEFLNPLISKYLLTCKTARQLTVRIKNLNMNRAPDNIIKFYKKTKQLPVLGKCCEEIQPHQWKPPIEREEHRLPFWLKASLPSIQEELRHMADGAREVGNMTGTTEINSDQGLEKDNSELGSETRYPLLLPKGVVLKLKPVADRFPKKAWRQKRSSVLKPLLIQPSPSLQPSFNPGKTPAQSTHSEAPPSKMVLRIPHPIQPATVLQTVPGVPPLGVSGGESFESPAALPAMPPEARTSFPLSESQTLLSSAPVPKVMMPSPASSMFRKPYVRRRPSKRRGARAFRCIKPAPVIHPASVIFTVPATTVKIVSLGGGCNMIQPVNAAVAQSPQTIPIATLLVNPTSFPCPLNQPLVASSVSPLIVSGNSVNLPIPSTPEDKAHMNVDIACAVADGENAFQGLEPKLEPQELSPLSATVFPKVEHSPGPPATVDKQCQEGLSENSAYRWTVVKTEEGRQALEPLPQGIQESLNNSSPGDLEEVVKMEPEDATEEISGFL

SEQ ID NO: 763014 - protein, 357 aa, Homo sapiens
MEDLFETFQDEMGFSNMEDDGPEEEERVAEPQANFNTPQALRFEELLANLLNEQHQIAKELFEQLKMKKPSAKQQKEVEKVKPQCKEVHQTLILDPAQRKRLQQQMQQHVQLLTQIHLLATCNPNLNPEASSTRICLKELGTFAQSSIALHHQYNPKFQTLFQPCNLMGAMQLIEDFSTHVSIDCSPHKTVKKTANEFPCLPKQVAWILATSKVFMYPELLPVCSLKAKNPQDKILFTKAEDNLLALGLKHFEGTEFLNPLISKYLLTCKTARQLTVRIKNLNMNRAPDNIIKFYKKTKQLPVLGKCCEEIQPHQWKPPIEREEHRLPFWLKVQPSSSKSVGGRRSLKVLREYQGLP

SEQ ID NO: 763015 - protein, 760 aa, Homo sapiens
MEDLFETFQDEMGFSNMEDDGPEEEERVAEPQANFNTPQALRFEELLANLLNEQHQIAKELFEQLKMKKPSAKQQKEVEKVKPQCKEVHQTLILDPAQRKRLQQQMQQHVQLLTQIHLLATCNPNLNPEASSTRICLIFLVFVFSQKELGTFAQSSIALHHQYNPKFQTLFQPCNLMGAMQLIEDFSTHVSIDCSPHKTVKKTANEFPCLPKQVAWILATSKVFMYPELLPVCSLKAKNPQDKILFTKAEDNLLALGLKHFEGTEFLNPLISKYLLTCKTARQLTVRIKNLNMNRAPDNIIKFYKKTKQLPVLGKCCEEIQPHQWKPPIEREEHRLPFWLKASLPSIQEELRHMADGAREVGNMTGTTEINSDQGLEKDNSELGSETRYPLLLPKGVVLKLKPVADRFPKKAWRQKRSSVLKPLLIQPSPSLQPSFNPGKTPAQSTHSEAPPSKMVLRIPHPIQPATVLQTVPGVPPLGVSGGESFESPAALPAMPPEARTSFPLSESQTLLSSAPVPKVMMPSPASSMFRKPYVRRRPSKRRGARAFRCIKPAPVIHPASVIFTVPATTVKIVSLGGGCNMIQPVNAAVAQSPQTIPIATLLVNPTSFPCPLNQPLVASSVSPLIVSGNSVNLPIPSTPEDKAHMNVDIACAVADGENAFQGLEPKLEPQELSPLSATVFPKVEHSPGPPATVDKQCQEGLSENSAYRWTVVKTEEGRQALEPLPQGIQESLNNSSPGDLEEVVKMEPEDATEEISGFL

SEQ ID NO: 763016 - protein, 654 aa, Homo sapiens
ANVVIPAADEQHVQLLTQIHLLATCNPNLNPEASSTRICLKELGTFAQSSIALHHQYNPKFQTLFQPCNLMGAMQLIEDFSTHVSIDCSPHKTVKKTANEFPCLPKQVAWILATSKVFMYPELLPVCSLKAKNPQDKILFTKAEDNLLALGLKHFEGTEFLNPLISKYLLTCKTARQLTVRIKNLNMNRAPDNIIKFYKKTKQLPVLGKCCEEIQPHQWKPPIEREEHRLPFWLKASLPSIQEELRHMADGAREVGNMTGTTEINSDQGLEKDNSELGSETRYPLLLPKGVVLKLKPVADRFPKKAWRQKRSSVLKPLLIQPSPSLQPSFNPGKTPAQSTHSEAPPSKMVLRIPHPIQPATVLQTVPGVPPLGVSGGESFESPAALPAMPPEARTSFPLSESQTLLSSAPVPKVMMPSPASSMFRKPYVRRRPSKRRGARAFRCIKPAPVIHPASVIFTVPATTVKIVSLGGGCNMIQPVNAAVAQSPQTIPIATLLVNPTSFPCPLNQPLVASSVSPLIVSGNSVNLPIPSTPEDKAHMNVDIACAVADGENAFQGLEPKLEPQELSPLSATVFPKVEHSPGPPATVDKQCQEGLSENSAYRWTVVKTEEGRQALEPLPQGIQESLNNSSPGDLEEVVKMEPEDATEEISGFL

SEQ ID NO: 763017 - protein, 598 aa, Homo sapiens
GSKHTARYEAGCRLMGAMQLIEDFSTHVSIDCSPHKTVKKTANEFPCLPKQVAWILATSKVFMYPELLPVCSLKAKNPQDKILFTKAEDNLLALGLKHFEGTEFLNPLISKYLLTCKTARQLTVRIKNLNMNRAPDNIIKFYKKTKQLPVLGKCCEEIQPHQWKPPIEREEHRLPFWLKASLPSIQEELRHMADGAREVGNMTGTTEINSDQGLEKDNSELGSETRYPLLLPKGVVLKLKPVADRFPKKAWRQKRSSVLKPLLIQPSPSLQPSFNPGKTPAQSTHSEAPPSKMVLRIPHPIQPATVLQTVPGVPPLGVSGGESFESPAALPAMPPEARTSFPLSESQTLLSSAPVPKVMMPSPASSMFRKPYVRRRPSKRRGARAFRCIKPAPVIHPASVIFTVPATTVKIVSLGGGCNMIQPVNAAVAQSPQTIPIATLLVNPTSFPCPLNQPLVASSVSPLIVSGNSVNLPIPSTPEDKAHMNVDIACAVADGENAFQGLEPKLEPQELSPLSATVFPKVEHSPGPPATVDKQCQEGLSENSAYRWTVVKTEEGRQALEPLPQGIQESLNNSSPGDLEEVVKMEPEDATEEISGFL

SEQ ID NO: 763018 - protein, 751 aa, Homo sapiens; identical to SEQ ID NO: 762996

SEQ ID NO: 763019 - protein, 399 aa, Homo sapiens
LFCAESCTAAYSLLGSPHNSELGSETRYPLLLPKGVVLKLKPVADRFPKKAWRQKRSSVLKPLLIQPSPSLQPSFNPGKTPAQSTHSEAPPSKMVLRIPHPIQPATVLQTVPGVPPLGVSGGESFESPAALPAMPPEARTSFPLSESQTLLSSAPVPKVMMPSPASSMFRKPYVRRRPSKRRGARAFRCIKPAPVIHPASVIFTVPATTVKIVSLGGGCNMIQPVNAAVAQSPQTIPIATLLVNPTSFPCPLNQPLVASSVSPLIVSGNSVNLPIPSTPEDKAHMNVDIACAVADGENAFQGLEPKLEPQELSPLSATVFPKVEHSPGPPATVDKQCQEGLSENSAYRWTVVKTEEGRQALEPLPQGIQESLNNSSPGDLEEVVKMEPEDATEEISGFL

SEQ ID NO: 763020 - protein, 307 aa, Homo sapiens
ECVPGVYFIPRPATVLQTVPGVPPLGVSGGESFESPAALPAMPPEARTSFPLSESQTLLSSAPVPKVMMPSPASSMFRKPYVRRRPSKRRGARAFRCIKPAPVIHPASVIFTVPATTVKIVSLGGGCNMIQPVNAAVAQSPQTIPIATLLVNPTSFPCPLNQPLVASSVSPLIVSGNSVNLPIPSTPEDKAHMNVDIACAVADGENAFQGLEPKLEPQELSPLSATVFPKVEHSPGPPATVDKQCQEGLSENSAYRWTVVKTEEGRQALEPLPQGIQESLNNSSPGDLEEVVKMEPEDATEEISGFL

SEQ ID NO: 763021 - protein, 213 aa, Homo sapiens
FRHRLAHELQYPASVIFTVPATTVKIVSLGGGCNMIQPVNAAVAQSPQTIPIATLLVNPTSFPCPLNQPLVASSVSPLIVSGNSVNLPIPSTPEDKAHMNVDIACAVADGENAFQGLEPKLEPQELSPLSATVFPKVEHSPGPPATVDKQCQEGLSENSAYRWTVVKTEEGRQALEPLPQGIQESLNNSSPGDLEEVVKMEPEDATEEISGFL

SEQ ID NO: 763022 - protein, 91 aa, Homo sapiens
VHKHCMAMQGQTASRIPSLSSLPRVDKQCQEGLSENSAYRWTVVKTEEGRQALEPLPQGIQESLNNSSPGDLEEVVKMEPEDATEEISGFL

SEQ ID NO: 763023 - protein, 750 aa, Homo sapiens
MEDLFETFQDEMGFSNMEDDGPEEEERVAEPQANFNTPQALRFEELLANLLNEQHQIAKELFEQLKMKKPSAKQQKEVEKVKPQCKEVHQTLILDPAQRKRLQQQMQQHVQLLTQIHLLATCNPNLNPEASSTRICLKELGTFAQSSIALHHQYNPKFQTLFQPCNLMGAMQLIEDFSTHVSIDCSPHKTVKKTANEFPCLPKQVAWILATSKVFMYPELLPVCSLKAKNPQDKILFTKAEDNLLALGLKHFEGTEFLNPLISKYLLTCKTARQLTVRIKNLNMNRAPDNIIKFYKKTKQLPVLGKCCEEIQPHQWKPPIEREEHRLPFWLKASLPSIQEELRHMADGAREVGNMTGTTEINSDQGLEKDNSELGSETRYPLLLPKGVVLKLKPVADRFPKKAWRQKRSSVLKPLLIQPSPSLQPSFNPGKTPAQSTHSEAPPSKMVLRIPHPIQPATVLQTVPGVPPLGVSGGESFESPAALPAMPPEARTSFPLSESQTLLSSAPVPKVMMPSPASSMFRKPYVRRRPSKRRGARAFRCIKPAPVIHPASVIFTVPATTVKIVSLGGGCNMIQPVNAAVAQSPQTIPIATLLVNPTSFPCPLNQPLVASSVSPLIVSGNSVNLPIPSTPEDKAHMNVDIACAVADGENAFQGLEPKLEPQELSPLSATVFPKVEHSPGPPATVDKQCQEGLSENSAYRWTVVKTEEATRPQIIRMVISRSSAYSRSHNYCASPAEDADTRDDRHCYYD

SEQ ID NO: 763024 - protein, 452 aa, Homo sapiens
MEDLFETFQDEMGFSNMEDDGPEEEERVAEPQANFNTPQALRFEELLANLLNEQHQIAKELFEQLKMKKPSAKQQKEVEKVKPQCKEVHQTLILDPAQRKRLQQQMQQHVQLLTQIHLLATCNPNLNPEASSTRICLKELGTFAQSSIALHHQYNPKFQTLFQPCNLMGAMQLIEDFSTHVSIDCSPHKTVKKTANEFPCLPKQVAWILATSKVFMYPELLPVCSLKAKNPQDKILFTKAEDNLLALGLKHFEGTEFLNPLISKYLLTCKTARQLTVRIKNLNMNRAPDNIIKFYKKTKQLPVLGKCCEEIQPHQWKPPIEREEHRLPFWLKASLPSIQEELRHMADGAREVGNMTGTTEINSDQGLEKDNSELGSETRYPLLLPKGVVLKLKPVADRFPKKAWRQKRSSVLKPLLIQPSPSLQPSFNPGKTPAQSTHSEAPPSYPTQPLSP

SEQ ID NO: 763025 - protein, 195 aa, Homo sapiens
MEDLFETFQDEMGFSNMEDDGPEEEERVAEPQANFNTPQALRFEELLANLLNEQHQIAKELFEQLKMKKPSAKQQKEVEKVKPQCKEVHQTLILDPAQRKRLQQQMQQHVQLLTQIHLLATCNPNLNPEASSTRICLKELGTFAQSSIALHHQYNPKFQTLFQPCNLMGAMQLIEDFSTHVSIDCSPHKTVKKTG

SEQ ID NO: 763026 - protein, 136 aa, Homo sapiens
MYEARVVNRPRKPLPSTAAASSPGSAAAATAALCPPARLSTPSMSGLRVYSTSVTGSREIKSQQSEVTRILDGKRIQYQLVDISQDNALRDEMRALAGNPKATPPQIVNGDQYCGDYELFVEAVEQNTLQEFLKLA

SEQ ID NO: 763027 - protein, 88 aa, Homo sapiens
PRVADAWVDPRVAAPPSSLNVVPSPPSKGNIPYPLVSEIVLSNSPKCWLPPAKHWGRHPAWHWLMGTSVGSISQSSAKGPAVPLPGGP

SEQ ID NO: 763028 - protein, 83 aa, Homo sapiens
MQATSPPSSLNVVPSPPSKGNIPYPLVSEIVLSNSPKCWLPPAKHWGRHPAWHWLMGTSVGSISQSSAKASGGIRLPEVKAPG

SEQ ID NO: 763029 - protein, 136 aa, Homo sapiens; identical to SEQ ID NO: 763026

SEQ ID NO: 763030 - protein, 136 aa, Homo sapiens; identical to SEQ ID NO: 763026

SEQ ID NO: 763031 - protein, 209 aa, Homo sapiens
CQTLSRACPATQAPPQSHTELQIREGPKRTIRAAAEGAPCVGRVRCAPGNRGGREGASGVRGGVAQVPPRLPAPPIGPERDDLAGGAGRKPLPSTAAASSPGSAAAATAALCPPARLSTPSMSGLRVYSTSVTGSREIKSQQSEVTRILDGKRIQYQLVDISQDNALRDEMRALAGNPKATPPQIVNGDQYCGVWAGGRGGGGSVGRGL

SEQ ID NO: 763032 - protein, 210 aa, Homo sapiens
CQTLSRACPATQAPPQSHTELQIREGPKRTIRAAAEGAPCVGRVRCAPGNRGGREGASGVRGGVAQVPPRLPAPPIGPERDDLAGGAGRKPLPSTAAASSPGSAAAATAALCPPARLSTPSMSGLRVYSTSVTGSREIKSQQSEVTRILDGKRIQYQLVDISQDNALRDEMRALAGNPKATPPQIVNGDQYCGVWAGGRGGGGSSVGRGL

SEQ ID NO: 763033 - protein, 214 aa, Homo sapiens
CQTLSRACPATQAPPQSHTELQIREGPKRTIRAAAEGAPCVGRVRCAPGNRGGREGASGVRGGVAQVPPRLPAPPIGPERDDLAGGAGRKPLPSTAAASSPGSAAAATAALCPPARLSTPSMSGLRVYSTSVTGSREIKSQQSEVTRILDGKRIQYQLVDISQDNALRDEMRALAGNPKATPPQIVNGDQYCGDYELFVEAVEQNTLQEFLKLA

SEQ ID NO: 763034 - protein, 214 aa, Homo sapiens; identical to SEQ ID NO: 763033

SEQ ID NO: 763035 - protein, 136 aa, Homo sapiens; identical to SEQ ID NO: 763026

SEQ ID NO: 763036 - protein, 133 aa, Homo sapiens
AAATAALCPPARLSTPSMSGLRVYSTSVTGSREVSARPDWRWGKAQGCIPVLWTLAPGTHPQDGGGVGGVRRRGAGHGLPDPVPRPHPECLHRASWVLCSRGMNFPCPSPINPTPILCTPTTGLTLTTTAACP

SEQ ID NO: 763037 - protein, 111 aa, Homo sapiens
PDFNGSTRLGLPMCWDYRRESPCLAQRLLINKGRSHSLRLKSPLFPRQPDIFRMGSLTNLPNVELYVTTQHGPHSSRLTTWHPVNLNPGNDSLRSHGKWPQRGLSSISEAG

SEQ ID NO: 763038 - protein, 638 aa, Homo sapiens
MILFKQATYFISLFATVSCGCLTQLYENAFFRGGDVASMYTPNAQYCQMRCTFHPRCLLFSFLPASSINDMEKRFGCFLKDSVTGTLPKVHRTGAVSGHSLKQCGHQISACHRDIYKGVDMRGVNFNVSKVSSVEECQKRCTNNIRCQFFSYATQTFHKAEYRNNCLLKYSPGGTPTAIKVLSNVESGFSLKPCALSEIGCHMNIFQHLAFSDVDVARVLTPDAFVCRTICTYHPNCLFFTFYTNVWKIESQRNVCLLKTSESGTPSSSTPQENTISGYSLLTCKRTLPEPCHSKIYPGVDFGGEELNVTFVKGVNVCQETCTKMIRCQFFTYSLLPEDCKEEKCKCFLRLSMDGSPTRIAYGTQGSSGYSLRLCNTGDNSVCTTKTSTRIVGGTNSSWGEWPWQVSLQVKLTAQRHLCGGSLIGHQWVLTAAHCFDGLPLQDVWRIYSGILNLSDITKDTPFSQIKEIIIHQNYKVSEGNHDIALIKLQAPLNYTEFQKPICLPSKGDTSTIYTNCWVTGWGFSKEKGEIQNILQKVNIPLVTNEECQKRYQDYKITQRMVCAGYKEGGKDACKGDSGGPLVCKHNGMWRLVGITSWGEGCARREQPGVYTKVAEYMDWILEKTQSSDGKAQMQSPA

SEQ ID NO: 763039 - protein, 314 aa, Homo sapiens
MIRCQFFTYSLLPEDCKEEKCKCFLRLSMDGSPTRIAYGTQGSSGYSLRLCNTGDNSVCTTKTSTRIVGGTNSSWGEWPWQVSLQVKLTAQRHLCGGSLIGHQWVLTAAHCFDGLPLQDVWRIYSGILNLSDITKDTPFSQIKEIIIHQNYKVSEGNHDIALIKLQAPLNYTEFQKPICLPSKGDTSTIYTNCWVTGWGFSKEKGEIQNILQKVNIPLVTNEECQKRYQDYKITQRMVCAGYKEGGKDACKGDSGGPLVCKHNGMWRLVGITSWGEGCARREQPGVYTKVAEYMDWILEKTQSSDGKAQMQSPA

SEQ ID NO: 763040 - protein, 273 aa, Homo sapiens
MILFKQATYFISLFATVSCGCLTQLYENAFFRGGDVASMYTPNAQYCQMRCTFHPRCLLFSFLPASSINDMEKRFGCFLKDSVTGTLPKACHRDIYKGVDMRGVNFNVSKVSSVEECQKRCTNNIRCQFFSYATQTFHKAEYRNNCLLKYSPGGTPTAIKVLSNVESGFSLKPCALSEIGCHMNIFQHLAFSDVDVARVLTPDAFVCRTICTYHPNCLFFTFYTNVWKIESQRNVCLLKTSESGTPSSSTPQENTISGYSLLTCKRTLPGNVI

SEQ ID NO: 763041 - protein, 383 aa, Homo sapiens
PSPACIPGTDPREEASGGGCGPRRGGGWSSAVGSFARASGPRAHTGRRLGARPLSSLSPPLPGFCVGASELQGGCAGGGGGGPGVRGTPFTRARAHGAGARTHGRTHTHARTHTRTELARLERTNVDVLFVWSPQGGLGPRFGPGEMAQPILGHGSLQPASAAGLASLELDSSLDQYVQIRIFKIIVIGDSNVGKTCLTFRFCGGTFPDKTEATIGVDFREKTVEIEGEKIKVQVWDTAGQERFRKSMVEHYYRNVHAVVFVYDVTKMTSFTNLKMWIQECNGHAVPPLVPKVLVGNKCDLREQIQVPSNLALKFADAHNMLLFETSAKDPKESQNVESIFMCLACRLKAQKSLLYRDAERQQGKVQKLEFPQEANSKTSCPC

SEQ ID NO: 763042 - protein, 383 aa, Homo sapiens; identical to SEQ ID NO: 763041

SEQ ID NO: 763043 - protein, 145 aa, Homo sapiens
HFIFIVLQNHVFSSLFMFPFLTPPLGFCIFQVQVWDTAGQERFRKSMVEHYYRNVHAVVFVYDVTKMTSFTNLKMWIQECNGHAVPPLVPKVLVGNKCDLREQIQVPSNLALKFADAHNMLLFETSAKDPKESQNVESIFMCLAC

SEQ ID NO: 763044 - protein, 161 aa, Homo sapiens
MMPTQEALLAVQVWDTAGQERFRKSMVEHYYRNVHAVVFVYDVTKMTSFTNLKMWIQECNGHAVPPLVPKVLVGNKCDLREQIQVPSNLALKFADAHNMLLFETSAKDPKESQNVESIFMCLACRLKAQKSLLYRDAERQQGKVQKLEFPQEANSKTSCPC

SEQ ID NO: 763045 - protein, 284 aa, Homo sapiens
VASIFRCSNVRLYFLCVGCRVIGGGLRAHVLRILRGENERIPHSLGHRDPDYALRHRDLVRLVGCPCKSRSSFYLEQYVQIRIFKIIVIGDSNVGKTCLTFRFCGGTFPDKTEATIGVDFREKTVEIEGEKIKVQVWDTAGQERFRKSMVEHYYRNVHAVVFVYDVTKMTSFTNLKMWIQECNGHAVPPLVPKVLVGNKCDLREQIQVPSNLALKFADAHNMLLFETSAKDPKESQNVESIFMCLACRLKAQKSLLYRDAERQQGKVQKLEFPQEANSKTSCPC

SEQ ID NO: 763046 - protein, 98 aa, Homo sapiens
VPPLVPKVLVGNKCDLREQIQVPSNLALKFADAHNMLLFETSAKDPKESQNVESIFMCLACRLKAQKSLLYRDAERQQGKVQKLEFPQEANSKTSCPC

SEQ ID NO: 763047 - protein, 72 aa, Homo sapiens
HLFVQVSTLPLLPARWSLTHCSDDKIDRSQEGTRLIPGGSMMLYEDSPNSPSLSSSRRAKAESWSKHSTGSS

SEQ ID NO: 763048 - protein, 127 aa, Homo sapiens
MPEVSSKGATISKKGFKKAVVKTQKKEGKKRKRTRKESYSIYIYKVLKQVHPDTGISSKAMSIMNSFVTDIFERIASEASRLAHYSKRSTISSREIQTAVRLLLPGELAKHAVSEGTKAVTKYTSSK

SEQ ID NO: 763049 - protein, 88 aa, Homo sapiens
RYSFREVLQFPVGGVNGLLSKGNDAERVGGCTLAYLPAVLEYLASDTLELAGNAVRNKKKTRIIPRHLQLAIRNDKELDKLLARVTMA

SEQ ID NO: 763050 - protein, 88 aa, Homo sapiens; identical to SEQ ID NO: 763049

SEQ ID NO: 763051 - protein, 194 aa, Homo sapiens
MFLTAVNPQPLSTPSWQIETKYSTKVLTGNWMEERRKFTRDTDKTPQSIYRKEYIPFPDHRPDQISRWYGKRKVEGLPYKHLITHHQEPPHRYLISTYDDHYNRHGYNPGLPPLRTWNGQKLLWLPEKSDFPLLAPPTNYGLYEQLKQRQLTPKAGLKQSTYTSSYPRPPLCAMSWREHAVPVPPHRLHPFPHF

SEQ ID NO: 763052 - protein, 325 aa, Homo sapiens
MSMSPTVIILACLGFFLDQSVWAHVGGQDKPFCSAWPSAVVPQGGHVTLRCHYRRGFNIFTLYKKDGVPVPELYNRIFWNSFLISPLTPAHAGTYRCRGFHPHSPTEWSAPSNPLVIMVTGLYEKPSLTARPGPTVRAGENVTLSCSSQSSFDIYHLSREGEAHELRLPAVPSINGTFQADFPLGPATHGETYRCFGSFHGSPYEWSDPSDPLPVSVTDAAVMNQEPAGHRTVNREDSDEQDPQEVTYAQLDHCIFTQRKITGPSQRSKRPSTDTSVCIELPNAEPRALSPAHEHHSQALMGSSRETTALSQTQLASSHVPAAGI

SEQ ID NO: 763053 - protein, 377 aa, Homo sapiens [sequence omitted]

SEQ ID NO: 763054 - protein, 220 aa, Homo sapiens
MSMSPTVIILACLGFFLDQSVWAHVGGQDKPFCSAWPSAVVPQGGHVTLRCHYRRGFNIFTLYKKDGVPVPELYNRIFWNSFLISPLTPAHAGTYRCRGFHPHSPTEWSAPSNPLVIMVTGLYEKPSLTARPGPTVRAGENVTLSCSSQSSFDIYHLSREGEAHELRLPAVPSINGTFQADFPLGPATHGETYRCFGSFHGSPYEWSDPSDPLPVSVTGL

SEQ ID NO: 763055 - protein, 230 aa, Homo sapiens
MSMSPTVIILACLGFFLDQSVWAHVGLYEKPSLTARPGPTVRAGENVTLSCSSQSSFDIYHLSREGEAHELRLPAVPSINGTFQADFPLGPATHGETYRCFGSFHGSPYEWSDPSDPLPVSVTDAAVMNQEPAGHRTVNREDSDEQDPQEVTYAQLDHCIFTQRKITGPSQRSKRPSTDTSVCIELPNAEPRALSPAHEHHSQALMGSSRETTALSQTQLASSHVPAAGI

SEQ ID NO: 763056 - protein, 342 aa, Homo sapiens
MSMSPTVIILACLGFFLDQSVWAHVGGQDKPFCSAWPSAVVPQGGHVTLRCHYRRGFNIFTLYKKDGVPVPELYNRIFWNSFLISPLTPAHAGTYRCRGFHPHSPTEWSAPSNPLVIMVTGLYEKPSLTARPGPTVRAGENVTLSCSSQSSFDIYHLSREGEAHELRLPAVPSINGTFQADFPLGPATHGETYRCFGSFHGSPYEWSDPSDPLPVSVTGNPSSSWPSPTEPSFKTDAAVMNQEPAGHRTVNREDSDEQDPQEVTYAQLDHCIFTQRKITGPSQRSKRPSTDTSVCIELPNAEPRALSPAHEHHSQALMGSSRETTALSQTQLASSHVPAAGI

SEQ ID NO: 763057 - protein, 247 aa, Homo sapiens
MSMSPTVIILACLGFFLDQSVWAHVGLYEKPSLTARPGPTVRAGENVTLSCSSQSSFDIYHLSREGEAHELRLPAVPSINGTFQADFPLGPATHGETYRCFGSFHGSPYEWSDPSDPLPVSVTGNPSSSWPSPTEPSFKTDAAVMNQEPAGHRTVNREDSDEQDPQEVTYAQLDHCIFTQRKITGPSQRSKRPSTDTSVCIELPNAEPRALSPAHEHHSQALMGSSRETTALSQTQLASSHVPAAGI

SEQ ID NO: 763058 - protein, 468 aa, Homo sapiens
MLAVGCALLAALLAAPGAALAPRRCPAQEVARGVLTSLPGDSVTLTCPGVEPEDNATVHWVLRKPAAGSHPSRWAGMGRRLLLRSVQLHDSGNYSCYRAGRPAGTVHLLVDVPPEEPQLSCFRKSPLSNVVCEWGPRSTPSLTTKAVLLVRKFQNSPAEDFQEPCQYSQESQKFSCQLAVPEGDSSFYIVSMCVASSVGSKFSKTQTFQGCGILQPDPPANITVTAVARNPRWLSVTWQDPHSWNSSFYRLRFELRYRAERSKTFTTWMVKDLQHHCVIHDAWSGLRHVVQLRAQEEFGQGEWSEWSPEAMGTPWTESRSPPAENEVSTPMQALTTNKDDDNILFRDSANATSLPVQDSSSVPLPTFLVAGGSLAFGTLLCIAIVLRFKKTWKLRALKEGKTSMHPPYSLGQLVPERPRPTPVLVPLISPPVSPSSLGSDNTSSHNRPDARDPRSPYDISNTDYFFPR

SEQ ID NO: 763059 - protein, 365 aa, Homo sapiens [sequence omitted]

SEQ ID NO: 763060 - protein, 173 aa, Homo sapiens
MPLQPSCCPRPKPKLVPVITALPSWQGQLRVMLVEMPDAACPVRTAGGAVGGVVGWRGCGKGAADHGERGHFHWVLVVRVLGTRGHRADSCPLSAGHSAGRGDRFRALTWGTGTPSQGMSGQLCASEAFALALRVSSCPKHFRRLQGSIPNIPNNWNCLHMTYILDGLSINMC

SEQ ID NO: 763061 - protein, 364 aa, Homo sapiens
MAQQWSLQRLAGRHPQDSYEDSTQSSIFTYTNSNSTRGPFEGPNYHIAPRWVYHLTSVWMIFVVTASVFTNGLVLAATMKFKKLRHPLNWILVNLAVADLAETVIASTISIVNQVSGYFVLGHPMCVLEGYTVSLCGITGLWSLAIISWERWLVVCKPFGNVRFDAKLAIVGIAFSWIWSAVWTAPPIFGWSRYWPHGLKTSCGPDVFSGSSYPGVQSYMIVLMVTCCIIPLAIIMLCYLQVWLAIRAVAKQQKESESTQKAEKEVTRMVVVMIFAYCVCWGPYTFFACFAAANPGYAFHPLMAALPAYFAKSATIYNPVIYVFMNRQFRNCILQLFGKKVDDGSELSSASKTEVSSVSSVSPA

SEQ ID NO: 763062 - protein, 123 aa, Homo sapiens
DGSFSISLICIFPTHQVVIGTGGREILGRRGWVPSNHPTLKPGTVAHCESMHSCFPARMFPFPKPPMACPTAPSCAHRNPRFHTAEKRREEKRREEKRRGEAVRCQRLWLDIEEKQLDFRGIA

SEQ ID NO: 763063 - protein, 106 aa, Homo sapiens
SVRFVLWSVSERLVETAEASRPRLSSAFIIVMLLASLNSCCNPWIYMLFTGHLFHELVQRFLCCSASYLKGRRLGETSASKKSNSSSFVLSHRSSSQRSCSQPSTA

SEQ ID NO: 763064 - protein, 389 aa, Homo sapiens [sequence omitted]

SEQ ID NO: 763065 - protein, 34 aa, Homo sapiens
MLLASLNSCCNPWIYMLFTGHLFHELVQRFLCCS

SEQ ID NO: 763066 - protein, 365 aa, Homo sapiens
ASRTGGRAFPQFPCPQHTPCALRPLVLGHWGHLDAARACGGGRSPGGLFPGVGLGATGARPRAWHCNLRVSALRVCGRSRGPWLSAGPRVQVGPRQQSRVWQMQGGPLLRRSLESVSSGRTFDGILMCLLCLIFSKTLTPTQASVIAADQKPEHFGSRQLRRGMRLRDRTRFCLGILKIKSFEKSNSWSWKLSPYEEMSGVRPPIMNGPLHPRPLVALLDGRDCTVEMPILKDVATVAFCDAQSTQEIHEKVPPRGRLGLAEPHVGGSWRDGSTAGPGHSRSGCHWGRSSLCPSRPAPSGGGHGVFPGHHQEVDIGFALSPIRRWTRGFPCAPSGGGHHVCPEPHQEVDIRFALCPIRRWTRGFP

SEQ ID NO: 763067 - protein, 109 aa, Homo sapiens
PSENHPHDCILPSASLLTWLLSLLVSSSRFKAAALASVGQVPVGAEAGHQLHAGHWPSPAWYPGRSAQGRSGHVPEPCALCCFVLPAAPFLAQNRLLPCYPCTSTEDKP

SEQ ID NO: 763068 - protein, 273 aa, Homo sapiens
GLRLGADGGGSRELGSGEAGSAGLSRGAAAAAAPGMAAAPLLLLLLLVPVPLLPLLAQGPGGALGNRHAVYWNSSNQHLRREGYTVQVNVNDYLDIYCPHYNSSGVGPGAGPGPGGGAEQYVLYMVSRNGYRTCNASQGFKRWECNRPHAPHSPIKFSEKFQRYSAFSLGYEFHAGHEYYYISTPTHNLHWKCLRMKVFVCCASTSHSGEKPVPTLPQFTMGPNVKINVLEDFEGENPQVPKLEKSISGTSPKREHLPLAVGIAFFLMTFLAS

SEQ ID NO: 763069 - protein, 133 aa, Homo sapiens
RLRPGRRRGHGTPEGFSSDEVVGPREEFGDSPKFGLLENRCFSTPTHNLHWKCLRMKVFVCCASTSHSGEKPVPTLPQFTMGPNVKINVLEDFEGENPQVPKLEKSISGTSPKREHLPLAVGIAFFLMTFLAS

SEQ ID NO: 763070 - protein, 187 aa, Homo sapiens
GGRDRAEPRGSSEEKSEGYADPGEGLRSGQMESGFALGFLLSEPLPLPHSLRREGYTVQVNVNDYLDIYCPHYNSSGVGPGAGPGPGGGAEQYVLYMVSRNGYRTCNPHQVLGEVPALQRLLSGLRVPRRPRVLLHLHAHSQPALEVSEDEGVRLLRLHIALRGEAGPHSPPVHHGPQCEDQRAGRL

SEQ ID NO: 763071 - protein, 273 aa, Homo sapiens; identical to SEQ ID NO: 763068

SEQ ID NO: 763072 - protein, 245 aa, Homo sapiens
GGRDRAEPRGSSEEKSEGYADPGEGLRSGQMESGFALGFLLSEPLPLPHSLRREGYTVQVNVNDYLDIYCPHYNSSGVGPGAGPGPGGGAEQYVLYMVSRNGYRTCNASQGFKRWECNRPHAPHSPIKFSEKFQRYSAFSLGYEFHAGHEYYYISTPTHNLHWKCLRMKVFVCCASTSHSGEKPVPTLPQFTMGPNVKINVLEDFEGENPQVPKLEKSISGTSPKREHLPLAVGIAFFLMTFLAS

SEQ ID NO: 763073 - protein, 70 aa, Homo sapiens
SALIAIDVEYQGVDKNPFPSLEFSRIRRIPQSLYDIIAQHLVYQRHTRVNLGVISRDCFKEQSYIQGRKL

SEQ ID NO: 763074 - protein, 264 aa, Homo sapiens
YCEEPAQGGRGGVSRVPLAAGVCRSPSPQERGLLRSHLPVFTRQRARRPPRTPGSAQERPLRLAKETEPLTMVATGSLSSKNPASISELLDCGYHPESLLSDFDYWDYVVPEPNLNEVIFEESTCQNLVKMLENCLSKSKQTKLGCSKVLVPEKLTQRIAQDVLRLSSTEPCGLRGCVMHVNLEIENVCKKLDRIVCDSSVVPTFELTLVFKQENCSWTSFRDFFFSRGRFSSGFRRTLILSSGFRLVKKKLYSLIGTTVIEGS

SEQ ID NO: 763075 - protein, 193 aa, Homo sapiens
MVATGSLSSKNPASISELLDCGYHPESLLSDFDYWDYVVPEPNLNEVIFEESTCQNLVKMLENCLSKSKQTKLGCSKVLVPEKLTQRIAQDVLRLSSTEPCGLRGCVMHVNLEIENVCKKLDRIVCDSSVVPTFELTLVFKQENCSWTSFRDFFFSRGRFSSGFRRTLILSSGFRLVKKKLYSLIGTTVIEGS

SEQ ID NO: 763076 - protein, 160 aa, Homo sapiens
TRVTSGGSRDAVPGAEPPKMAVCIAVIAKENYPLYIRSTPTENELKFHYMVHTSLDVVDEKISAMGKALVDQRELYLGLLYPTEDYKVYGYVTNSKVKFVMVVDSSNTALRDNEIRSMFRKLHNSYTDVMCNPFYNPGDRIQSSSRAFDNMVTSMMIQVC

SEQ ID NO: 763077 - protein, 160 aa, Homo sapiens; identical to SEQ ID NO: 763076

SEQ ID NO: 763078 - protein, 160 aa, Homo sapiens; identical to SEQ ID NO: 763076

SEQ ID NO: 763079 - protein, 160 aa, Homo sapiens; identical to SEQ ID NO: 763076

SEQ ID NO: 763080 - protein, 160 aa, Homo sapiens; identical to SEQ ID NO: 763076

SEQ ID NO: 763081 - protein, 160 aa, Homo sapiens; identical to SEQ ID NO: 763076

SEQ ID NO: 763082 - protein, 110 aa, Homo sapiens
MGISCDSRLPHFSKVRAHRGPSTGSPCVTSAFPNQLCRYGYVTNSKVKFVMVVDSSNTALRDNEIRSMFRKLHNSYTDVMCNPFYNPGDRIQSSSRAFDNMVTSMMIQVC

SEQ ID NO: 763083 - protein, 158 aa, Homo sapiens
TRVTSGGSRDAVPGAEPPKMAVCIAVIAKENYPLYIRSTPTENELKFHYMVHTSLDVVDEKISAMGKALVDQRELYLGLLYPTEDYKVYGYVTNSKVKFVMVVDSSNTALRDNEIRSMFRKLHNSYTDVMCNPFYNPGDRIQSSSGSVSLSTGPLITW

SEQ ID NO: 763084 - protein, 141 aa, Homo sapiens
MVHTSLDVVDEKISAMGKALVDQRELYLGLLYPTEDYKVLPHFSKVRAHRGPSTGSPCVTSAFPNQLCRYGYVTNSKVKFVMVVDSSNTALRDNEIRSMFRKLHNSYTDVMCNPFYNPGDRIQSSSRAFDNMVTSMMIQVC

SEQ ID NO: 763085 - protein, 84 aa, Homo sapiens
NIRVHPTEDYKVYGYVTNSKVKFVMVVDSSNTALRDNEIRSMFRKLHNSYTDVMCNPFYNPGDRIQSSSRAFDNMVTSMMIQVC

SEQ ID NO: 763086 - protein, 88 aa, Homo sapiens
TRVTSGGSRDAVPGAEPPKMAVCIAVIAKENYPLYIRSTPTENELKFHYMVHTSLDVVDEKISAMGKALVDQRELYLGLLYPTEDYKV

SEQ ID NO: 763087 - protein, 110 aa, Homo sapiens; identical to SEQ ID NO: 763082

SEQ ID NO: 763088 - protein, 160 aa, Homo sapiens; identical to SEQ ID NO: 763076

SEQ ID NO: 763089 - protein, 99 aa, Homo sapiens
TRVTSGGSRDAVPGAEPPKMAVCIAVIAKENYPLYIRSTPTENELKFHYMVHTSLDVVDEKISAMGKALVDQRELYLGLLYPTEDYKVCSGSYTTPTQT

SEQ ID NO: 763090 - protein, 160 aa, Homo sapiens; identical to SEQ ID NO: 763076

SEQ ID NO: 763091 - protein, 111 aa, Homo sapiens
MVHTSLDVVDEKISAMGKALVDQRELYLGLLYPTEDYKVYGYVTNSKVKFVMVVDSSNTALRDNEIRSMFRKLHNSYTDVMCNPFYNPGDRIQSSSRAFDNMVTSMMIQVC

SEQ ID NO: 763092 - protein, 88 aa, Homo sapiens; identical to SEQ ID NO: 763086

SEQ ID NO: 763093 - protein, 110 aa, Homo sapiens; identical to SEQ ID NO: 763082

SEQ ID NO: 763094 - protein, 108 aa, Homo sapiens
TRVTSGGSRDAVPGAEPPKMAVCIAVIAKENYPLYIRSTPTENELKFHYMVHTSLDVVDEKISAMGKALVDQRELYLGLLYPTEDYKVVSFRAGCVSGRTYSCKMYFR

SEQ ID NO: 763095 - protein, 738 aa, Homo sapiens
TAGVHVYVWHVGQEALQQAMWMGFYQLTPEELVSDHWRNLQRFLSHKLDIKRANIHLASLQPAEAVAGVDVLLVFEGHSGTFYEFQELASIITHSAKEMEHSVGVQMRSAMPMVPCQGPTCQGQICHNTVHLDPKVGPTYSTARLSILTPRHHLQRSCSCNGTATRFSGQSYVRYRAPAARNWHIHFYLKTLQPQAILLFTNETASVSLKLASGVPQLEYHCLGGFYGNLSSQRHVNDHEWHSILVEEMDASIRLMVDSMGNTSLVVPENCRGLRPERHLLLGGLILLHSSSNVSQGFEGCLDAVVVNEEALDLLAPGKTVAGLLETQALTQCCLHSDYCSQNTCLNGGKCSWTHGAGYVCKCPPQFSGKHCEQGRENCTFAPCLEGGTCILSPKGASCNCPHPYTGDRCEMEARGCSEGHCLVTPEIQRGDWGQQELLIITVAVAFIIISTVGLLFYCRRCKSHKPVAMEDPDLLARSVGVDTQAMPAIELNPLSASSCNNLNQPEPSKASVPNELVTFGPNSKQRPVVCSVPPRLPPAAVPSHSDNEPVIKRTWSSEEMVYPGGAMVWPPTYSRNERWEYPHSEVTQGPLPPSAHRHSTPVVMPEPNGLYGGFPFPLEMENKRAPLPPRYSNQNLEDLMPSRPPSPRERLVAPCLNEYTAISYYHSQFRQGGGGPCLADGGYKGVGMRLSRAGPSYAVCEVEGAPLAGQGQPRVPPNYEGSDMVESDYGSCEEVMF

SEQ ID NO: 763096 - protein, 490 aa, Homo sapiens
MDASIRLMVDSMGNTSLVVPENCRGLRPERHLLLGGLILLHSSSNVSQGFEGCLDAVVVNEEALDLLAPGKTVAGLLETQALTQCCLHSDYCSQNTCLNGGKCSWTHGAGYVCKCPPQFSGKHCEQGRENCTFAPCLEGGTCILSPKGASCNCPHPYTGDRCEMEARGCSEGHCLVTPEIQRGDWGQQELLIITVAVAFIIISTVGLLFYCRRCKSHKPVAMEDPDLLARSVGVDTQAMPAIELNPLSASSCNNLNQPEPSKASVPNELVTFGPNSKQRPVVCSVPPRLPPAAVPSHSDNEPVIKRTWSSEEMVYPGGAMVWPPTYSRNERWEYPHSEVTQGPLPPSAHRHSTPVVMPEPNGLYGGFPFPLEMENKRAPLPPRYSNQNLEDLMPSRPPSPRERLVAPCLNEYTAISYYHSQFRQGGGGPCLADGGYKGVGMRLSRAGPSYAVCEVEGAPLAGQGQPRVPPNYEGSDMVESDYGSCEEVMF

SEQ ID NO: 763097 - protein, 490 aa, Homo sapiens; identical to SEQ ID NO: 763096

SEQ ID NO: 763098 - protein, 490 aa, Homo sapiens; identical to SEQ ID NO: 763096

SEQ ID NO: 763099 - protein, 106 aa, Homo sapiens
MLVEAWVNRQRVVQSGTVLCTGEKMVMEGNKDSEEHHQASGPRGPTPQPTRRGTGPPQSHTTGCQSGPARSLHSSEPSLLKNSDLMELWVLHPKFPRHFWPKEGRN

SEQ ID NO: 763100 - protein, 270 aa, Homo sapiens
MDASIRLMVDSMGNTSLVVPENCRGLRPERHLLLGGLILLHSSSNVSQGFEGCLDAVVVNEEALDLLAPGKTVAGLLETQALTQCCLHSDYCSQNTCLNGGKCSWTHGAGYVCKCPPQFSGKHCEQGRENCTFAPCLEGGTCILSPKGASCNCPHPYTGDRCEMEARGCSEGHCLVTPEIQRGDWGQQELLIITVAVAFIIISTVGLLFYCRRCKSHKPVAMEDPDLLARSVGVDTQAMPAIELNPLSASSCNNLNQPEPSKDPKRAKTP

SEQ ID NO: 763101 - protein, 150 aa, Homo sapiens
MEARGCSEGHCLVTPEIQRGDWGQQELLIITVAVAFIIISTVGLLFYCRRCKSHKPVAMEDPDLLARSVGVDTQAMPAIELNPLSASSCNNLNQPEPSKASVPNELVTFGPNSKQRPVVCSVPPRLPPAAVPSHSDNEPVIKRTWSSEEM

SEQ ID NO: 763102 - protein, 148 aa, Homo sapiens
MVWPPTYSRNERWEYPHSEVTQGPLPPSAHRHSTPVVMPEPNGLYGGFPFPLEMENKRAPLPPRYSNQNLEDLMPSRPPSPRERLVAPCLNEYTAISYYHSQFRQGGGGPCLADGGYKGVGMRLSRAGPSYAVCEVEGAPLAGQGQPR

SEQ ID NO: 763103 - protein, 122 aa, Homo sapiens
PLPLPALRQSRSKMAVVGVSSVSRLLGRSRPQLGRPMSSGAHGEEGSARMWKTLTFFVALPGVAVSMLNVYLKSHHGEHERPEFIAYPHLRIRTKPFPWGDGNHTLFHNPHVNPLPTGYEDE

SEQ ID NO: 763104 - protein, 117 aa, Homo sapiens
MARVRGLGCRVVGVSSVSRLLGRSRPQLGRPMSSGAHGEEGSARMWKTLTFFVALPGVAVSMLNVYLKSHHGEHERPEFIAYPHLRIRTKPFPWGDGNHTLFHNPHVNPLPTGYEDE

SEQ ID NO: 763105 - protein, 114 aa, Homo sapiens
RLECSGMISAHCNFPARGKRFLCLSHPGSWDYRCAPPCPARMWKTLTFFVALPGVAVSMLNVYLKSHHGEHERPEFIAYPHLRIRTKPFPWGDGNHTLFHNPHVNPLPTGYEDE

SEQ ID NO: 763106 - protein, 122 aa, Homo sapiens; identical to SEQ ID NO: 763103

SEQ ID NO: 763107 - protein, 122 aa, Homo sapiens; identical to SEQ ID NO: 763103

SEQ ID NO: 763108 - protein, 122 aa, Homo sapiens; identical to SEQ ID NO: 763103

SEQ ID NO: 763109 - protein, 355 aa, Homo sapiens
MAEVHRRQHARVKGEAPAKSSTLRDEEELGMASAETLTVFLKLLAAGFYGVSSFLIVVVNKSVLTNYRFPSSLCVGLGQMVATVAVLWVGKALRVVKFPDLDRNVPRKTFPLPLLYFGNQITGLFSTKKLNLPMFTVLRRFSILFTMFAEGVLLKKTFSWGIKMTVFAMIIGAFVAASSDLAFDLEGYAFILINDVLTAANGAYVKQKLDSKELGKYGLLYYNALFMILPTLAIAYFTGDAQKAVEFEGWADTLFLLQFTLSCVMGFILMYATVLCTQYNSALTTTIVGCIKNILITYIGMVFGGDYIFTWTNFIGLNISIAGSLVYSYITFTEEQLSKQSEANNKLDIKGKGAV

SEQ ID NO: 763110 - protein, 355 aa, Homo sapiens; identical to SEQ ID NO: 763109

SEQ ID NO: 763111 - protein, 355 aa, Homo sapiens; identical to SEQ ID NO: 763109

SEQ ID NO: 763112 - protein, 284 aa, Homo sapiens
MAEVHRRQHARVKGEAPAKSSTLRDEEELGMASAETLTVFLKLLAAGFYGVSSFLIVVVNKSVLTNYRFPSSLCVGLGQMVATVAVLWVGKALRVVKFPDLDRNVPRKTFPLPLLYFGNQITGLFSTKKLNLPMFTVLRRFSILFTMFAEGVLLKKTFSWGIKMTVFAMIIGAFVAASSDLAFDLEGYAFILINDVLTAANGAYVKQKLDSKELGKYGLLYYNALFMILPTLAIAYFTGDAQKAVEFEGWADTLFLLQFTLSCVMGFILMYATVLCTQYNSALT

SEQ ID NO: 763113 - protein, 355 aa, Homo sapiens; identical to SEQ ID NO: 763109

SEQ ID NO: 763114 - protein, 304 aa, Homo sapiens
MAEVHRRQHARVKGEAPAKSSTLRDEEELGMASAETLTVFLKLLAAGFYGVSSFLIVVVNKSVLTNYRFPSSLCVGLGQMVATVAVLWVGKALRVVKFPDLDRNVPRKTFPLPLLYFGNQITGLFSTKKLNLPMFTVLRRFSILFTMFAEGVLLKKTFSWGIKMTVFAMIIGAFVAASSDLAFDLEGYAFILINDVLTAANGAYVKQKLDSKELGKYGLLYYNALFMILPTLAIAYFTGDAQKAVEFEGWADTLFLLQFTLSCVMGFILMYATVLCTQYNSALTTTIVGCIKIPQGERGLEPGW

SEQ ID NO: 763115 - protein, 132 aa, Homo sapiens
MPHARTETSVGTYESHSTSELEDLTEPEQRELKTKLTKLEAEIVTLRHVLAAKERRCGELKRKLGLTALVGLRQNLSKSWLDVQVSNTYVKQKTSAALSTMGTLICRKLGGVKKSATLRSFEGNPKGEGSRI

SEQ ID NO: 763116 - protein, 140 aa, Homo sapiens
MPHARTETSVGTYESHSTSELEDLTEPEQRELKTKLTKLEAEIVTLRHVLAAKERRCGELKRKLGLTALVGLRQNLSKSWLDVQVSNTYVKQKTSAALSTMGTLICRKLGGVKKSATLRSFEGLMGTIKSKVSGGKRAWP

SEQ ID NO: 763117 - protein, 136 aa, Homo sapiens
MPHARTETSVGTYESHSTSELEDLTEPEQRELKTKLTKLEAEIVTLRHVLAAKERRCGELKRKLGLTALVGLRQNLSKSWLDVQVSNTYVKQKTSAALSTMGTLICRKLGGVKKSATLRSFEGLIFNKYTLNQGRN

SEQ ID NO: 763118 - protein, 138 aa, Homo sapiens
CRRCLEFTLPRIELMPRATLTPSTCSFLSSFSGIRAPNFPNQNGGSYARFHFLTNPNSYRIPLGPFPEYLSCSFRGVCHCCGLRLLTESWISEASGRFPLPAVSFQCTLHNAPTAIIQIQPHHCPHHLRTWAWSFWWG

SEQ ID NO: 763119 - protein, 323 aa, Homo sapiens
PGLMLRRLRKGNLPIRSIIPNHADKERFATRCKAATVLLYDEATAEWQPEPGAPASVLGLLLQKLRDDGCQAYYLQGGFNKFQTEYSEHCETNVDSSSSPSSSPPTSVLGLGGLRISSDCSDGESDRELPSSATESDGSPVPSSQPAFPVQILPYLYLGCAKDSTNLDVLGKYGIKYILNVTPNLPNAFEHGGEFTYKQIPISDHWSQNLSQFFPEAISFIDEARSKKCGVLVHCLAGISRSVTVTVAYLMQKMNLSLNDAYDFVKRKKSNISPNFNFMGQLLDFERTLGLSSPCDNHASSEQLYFSTPTNHNLFPLNTLEST

SEQ ID NO: 763120 - protein, 172 aa, Homo sapiens
MRKQTRVSSALGLKCADPLHSSAVDLYSKLLPYPHWAWPGPSGVGQDQPATMLPSVPQPHLPTHVGRLLEGGTSLTHANVFQDEARSKKCGVLVHCLAGISRSVTVTVAYLMQKMNLSLNDAYDFVKRKKSNISPNFNFMGQLLDFERTLGLSSPCDNHASSEQLYFSTPTN

SEQ ID NO: 763121 - protein, 212 aa, Homo sapiens
MAQAHRTPQPRAAPSQPRVFKLVLLGSGSVGKSSLALRYVKNDFKSILPTVGCAFFTKVVDVGATSLKLEIWDTAGQEKYHSVCHLYFRGANAALLVYDITRKDSFLKAQQWLKDLEEELHPGEVLVMLVGNKTDLSQEREVTFQEGKEFADSQKLLFMETSAKLNHQVSEVFNTVAQELLQRSDEEGQALRGDAAVALNKGPARQAKCCAH

SEQ ID NO: 763122 - protein, 212 aa, Homo sapiens; identical to SEQ ID NO: 763121

SEQ ID NO: 763123 - protein, 215 aa, Homo sapiens
MAQAHRTPQPRAAPSQPRVFKLVLLGSGSVGKSSLALRYVKNDFKSILPTVGCAFFTKVVDVGATSLKLEIWDTAGQEKYHSVCHLYFRGANAALLVYDITRKDSFLKAQQWLKDLEEELHPGEVLVMLVGNKTDLSQEREVTFQEGKEFADSQKLLFMETSAKLNHQVSEVFNTVGESRPRGPDKGEVLVPDQLPWVPVAGDVVSHRMSLGTGW

SEQ ID NO: 763124 - protein, 158 aa, Homo sapiens
MAQAHRTPQPRAAPSQPRVFKLVLLGSGSVGAFFTKVVDVGATSLKLEIWDTAGQEKYHSVCHLYFRGANAALLVYDITRKDSFLKAQQWLKDLEEELHPGEVLVMLVGNKTDLSQEREVTFQDEDRVNSCRQVADGETPHTLEAGAGEDPTQGLDRR

SEQ ID NO: 763125 - protein, 212 aa, Homo sapiens; identical to SEQ ID NO: 763121

SEQ ID NO: 763126 - protein, 190 aa, Homo sapiens
MAQAHRTPQPRAAPSQPRVFKLVLLGSGSVGAFFTKVVDVGATSLKLEIWDTAGQEKYHSVCHLYFRGANAALLVYDITRKDSFLKAQQWLKDLEEELHPGEVLVMLVGNKTDLSQEREVTFQEGKEFADSQKLLFMETSAKLNHQVSEVFNTVAQELLQRSDEEGQALRGDAAVALNKGPARQAKCCAH

SEQ ID NO: 763127 - protein, 142 aa, Homo sapiens
RHLLEARGGQAPRGDAAVCSEQGAREAGQMLCPLGAATPGGCGEDTPCLGHGQLKVDSDSLSMLGCSRALDVPMEEGKEFADSQKLLFMETSAKLNHQVSEVFNTVAQELLQRSDEEGQALRGDAAVALNKGPARQAKCCAH

SEQ ID NO: 763128 - protein, 212 aa, Homo sapiens; identical to SEQ ID NO: 763121

SEQ ID NO: 763129 - protein, 202 aa, Homo sapiens
GSPEEGPRWVPSRGLPLPHVSWVLSWFFAQHQSPQVPTGMMGGEPGGGDLAFQALQEEEGRTPPARGRASSREHTPPLPGPGLLRSAKKHNLDTKRGGVRAPRLQLSRILLLEVNQVSLGNSLINSAGFCGCFLQEGKEFADSQKLLFMETSAKLNHQVSEVFNTVAQELLQRSDEEGQALRGDAAVALNKGPARQAKCCAH

SEQ ID NO: 763130 - protein, 504 aa, Homo sapiens
EAGRGRAAAQAPPRGRLQPGAPSRSSPRRAAGWWAQRRRRHWEMTLPGGPTGMARPGGARPCSPGLERAPRRSVGELRLLFEARCAAVAAAAAAGEPRARGAKRRGGQVPNGLPRAPPAPVIPQLTVTAEEPDVPPTSPGPPERERDCLPAAGSSHLQQPRRLSTSSVSSTGSSSLLEDSEDDLLSDSESRSRGNVQLEAGEDVGQKNHWQKIRTMVNLPVISPFKKRYAWVQLAGHTGSFKAAGTSGLILKRCSEPERYCLARLMADALRGCVPAFHGVVERDGESYLQLQDLLDGFDGPCVLDCKMGVRTYLEEELTKARERPKLRKDMYKKMLAVDPEAPTEEEHAQRAVTKPRYMQWREGISSSTTLGFRIEGIKKADGSCSTDFKTTRSREQVLRVFEEFVQGDEEVLRRYLNRLQQIRDTLEVSEFFRRHEVIGSSLLFVHDHCHRAGVWLIDFGKTTPLPDGQILDHRRPWEEGNREDGYLLGLDNLIGILASLAER

SEQ ID NO: 763131 - protein, 356 aa, Homo sapiens [sequence omitted]

SEQ ID NO: 763132 - protein, 194 aa, Homo sapiens
SLWLQSSEPPTAAAMLCLLLTLGVALVCGVPAMDIPQTKQDLELPKLAGTWHSMAMATNNISLMATLKAPLRVHITSLLPTPEDNLEIVLHRWENNSCVEKKVLGEKTENPKKFKINYTVANEATLLDTDYDNFLFLCLQDTTTPIQSMMCQYLARVLVEDDEIMQGFIRAFRPLPRHLWYLLDLKQMEEPCRF

SEQ ID NO: 763133 - protein, 194 aa, Homo sapiens; identical to SEQ ID NO: 763132

SEQ ID NO: 763134 - protein, 270 aa, Homo sapiens
SLWLQSSEPPTAAAMLCLLLTLGVALVCGVPAMDIPQTKQDLELPKLAGTWHSMAMATNNISLMATLKAPLRVHITSLLPTPEDNLEIVLHRWENNSCVEKKVLGEKTENPKKFKINYTVANEATLLDTDYDNFLFLCLQDTTTPIQSMMCQYLARVLVEDDEIMQGFIRAFRPLPRHLWYLLDLKQMEEPCRFYGVSLCHQAGVQWHNLSSLQPRPPGFKRFSCLNPPSCWNHRRVPPCPANFCIFNRNGVSPCWPRWSQSLDLMIPPL

SEQ ID NO: 763135 - protein, 143 aa, Homo sapiens
MLCLLLTLGVALVCGVPAMDIPQTKQDLELPKLAGTWHSMAMATNNISLMATLKAPLRVHITSLLPTPEDNLEIVLHRWENNSCVEKKVLGEKTENPKKFKINSRVLVEDDEIMQGFIRAFRPLPRHLWYLLDLKQMEEPCRF

SEQ ID NO: 763136 - protein, 194 aa, Homo sapiens; identical to SEQ ID NO: 763132

SEQ ID NO: 763137 - protein, 194 aa, Homo sapiens; identical to SEQ ID NO: 763132

SEQ ID NO: 763138 - protein, 270 aa, Homo sapiens; identical to SEQ ID NO: 763134

SEQ ID NO: 763139 - protein, 482 aa, Homo sapiens
MKGWGPHQRGLVSAMSLSGQNMLRLSLHPHLHKGPSPVLPGISKVFCFPSVLMASSAKSAEMPTISKTLNPTPDPHQEYLDPRITIALFEIGSHSPSSWGSLPFLKNSSHQVTEQQTAQKFNNLLKEIKDILKNMAGFEEKITEAKELFEETNITEDVSAHKENIRGLDKINEMLSTNLPVSLAPEKEDNEKKQEMILETNITEDVSAHKENIRGLDKINEMLSTNLPVSLAPEKEDNEKKQQMIMENQNSENTAQVFARDLVNRLEEKKVLNETQQSQEKAKNRLNVQEETMKIRNNMEQLLQEAEHWSKQHTELSKLIKSYQKSQKDISETLGNNGVGFQTQPNNEVSAKHELEEQVKKLSHDTYSLQLMAALLENECQILQQRVEILKELHHQKQGTLQEKPIQINYKQDKKNQKPSEAKKVEMYKQNKQAMKGTFWKKDRSCRSLDVCLNKKACNTQFNIHVARKALRGKMRSASSLR

SEQ ID NO: 763140 - protein, 430 aa, Homo sapiens
MASSAKSAEMPTISKTLNPTPDPHQEYLDPRITIALFEIGSHSPSSWGSLPFLKNSSHQVTEQQTAQKFNNLLKEIKDILKNMAGFEEKITEAKELFEETNITEDVSAHKENIRGLDKINEMLSTNLPVSLAPEKEDNEKKQEMILETNITEDVSAHKENIRGLDKINEMLSTNLPVSLAPEKEDNEKKQQMIMENQNSENTAQVFARDLVNRLEEKKVLNETQQSQEKAKNRLNVQEETMKIRNNMEQLLQEAEHWSKQHTELSKLIKSYQKSQKDISETLGNNGVGFQTQPNNEVSAKHELEEQVKKLSHDTYSLQLMAALLENECQILQQRVEILKELHHQKQGTLQEKPIQINYKQDKKNQKPSEAKKVEMYKQNKQAMKGTFWKKDRSCRSLDVCLNKKACNTQFNIHVARKALRGKMRSASSLR

SEQ ID NO: 763141 - protein, 418 aa, Homo sapiens [sequence omitted]

SEQ ID NO: 763142 - protein, 400 aa, Homo sapiens
MASEKPLAAVTCTAPVNIAVIKYWGKRDEELVLPINSSLSVTLHQDQLKTTTTAVISKDFTEDRIWLNGREEDVGQPRLQACLREIRCLARKRRNSRDGDPLPSSLSCKVHVASVNNFPTAAGLASSAAGYACLAYTLARVYGVESDLSEVARRGSGSACRSLYGGFVEWQMGEQADGKDSIARQVAPESHWPELRVLILVVSAEKKLTGSTVGMRASVETSPLLRFRAESVVPARMAEMARCIRERDFPSFAQLTMKDSNQFHATCLDTFPPISYLNAISWRIIHLVHRFNAHHGDTKVAYTFDAGPNAVIFTLDDTVAEFVAAVWHGFPPGSNGDTFLKGLQVRPAPLSAELQAALAMEPTPGGVKYIIVTQVGPGPQILDDPCAHLLGPDGLPKPAA

SEQ ID NO: 763143 - protein, 229 aa, Homo sapiens [sequence omitted]

SEQ ID NO: 763144 - protein, 229 aa, Homo sapiens [sequence omitted]

SEQ ID NO: 763145 - protein, 379 aa, Homo sapiens
MNRGKRDEELVLPINSSLSVTLHQDQLKTTTTAVISKDFTEDRIWLNGREEDVGQPRLQACLREIRCLARKRRNSRDGDPLPSSLSCKVHVASVNNFPTAAGLASSAAGYACLAYTLARVYGVESDLSEVARRGSGSACRSLYGGFVEWQMGEQADGKDSIARQVAPESHWPELRVLILVVSAEKKLTGSTVGMRASVETSPLLRFRAESVVPARMAEMARCIRERDFPSFAQLTMKDSNQFHATCLDTFPPISYLNAISWRIIHLVHRFNAHHGDTKVAYTFDAGPNAVIFTLDDTVAEFVAAVWHGFPPGSNGDTFLKGLQVRPAPLSAELQAALAMEPTPGGVKYIIVTQVGPGPQILDDPCAHLLGPDGLPKPAA

SEQ ID NO: 763146 - protein, 283 aa, Homo sapiens
MGEKHCRPGVQDQPGQHTYTLARVYGVESDLSEVARRGSGSACRSLYGGFVEWQMGEQADGKDSIARQVAPESHWPELRVLILVVSAEKKLTGSTVGMRASVETSPLLRFRAESVVPARMAEMARCIRERDFPSFAQLTMKDSNQFHATCLDTFPPISYLNAISWRIIHLVHRFNAHHGDTKVAYTFDAGPNAVIFTLDDTVAEFVAAVWHGFPPGSNGDTFLKGLQVRPAPLSAELQAALAMEPTPGGVKYIIVTQVGPGPQILDDPCAHLLGPDGLPKPAA

SEQ ID NO: 763147 - protein, 434 aa, Homo sapiens
MASEKPLAAVTCTAPVNIAVIKYWGKRDEELVLPINSSLSVTLHQDQLKTTTTAVISKDFTEDRIWLNGREEDVGQPRLQACLREIRCLARKRRNSRDGDPLPSSLSCKVHVASVNNFPTAAGLASSAAGYACLVAAGVGLSPVIPVLKRLMGEKHCRPGVQDQPGQHTYTLARVYGVESDLSEVARRGSGSACRSLYGGFVEWQMGEQADGKDSIARQVAPESHWPELRVLILVVSAEKKLTGSTVGMRASVETSPLLRFRAESVVPARMAEMARCIRERDFPSFAQLTMKDSNQFHATCLDTFPPISYLNAISWRIIHLVHRFNAHHGDTKVAYTFDAGPNAVIFTLDDTVAEFVAAVWHGFPPGSNGDTFLKGLQVRPAPLSAELQAALAMEPTPGGVKYIIVTQVGPGPQILDDPCAHLLGPDGLPKPAA

SEQ ID NO: 763148 - protein, 460 aa, Homo sapiens
MASEKPLAAVTCTAPVNIAVIKYWGKRDEELVLPINSSLSVTLHQDQLKTTTTAVISKDFTEDRIWLNGREEDVGQPRLQACLRESELGSPSAHPSLLSAGSEHPESASASVPLLRQQAGWLGTRHARWAASSRAVAHLNDQLGLVRCLARKRRNSRDGDPLPSSLSCKVHVASVNNFPTAAGLASSAAGYACLAYTLARVYGVESDLSEVARRGSGSACRSLYGGFVEWQMGEQADGKDSIARQVAPESHWPELRVLILVVSAEKKLTGSTVGMRASVETSPLLRFRAESVVPARMAEMARCIRERDFPSFAQLTMKDSNQFHATCLDTFPPISYLNAISWRIIHLVHRFNAHHGDTKVAYTFDAGPNAVIFTLDDTVAEFVAAVWHGFPPGSNGDTFLKGLQVRPAPLSAELQAALAMEPTPGGVKYIIVTQVGPGPQILDDPCAHLLGPDGLPKPAA

SEQ ID NO: 763149 - protein, 283 aa, Homo sapiens
LGEAGVNRQRVKTAWAHTYTLARVYGVESDLSEVARRGSGSACRSLYGGFVEWQMGEQADGKDSIARQVAPESHWPELRVLILVVSAEKKLTGSTVGMRASVETSPLLRFRAESVVPARMAEMARCIRERDFPSFAQLTMKDSNQFHATCLDTFPPISYLNAISWRIIHLVHRFNAHHGDTKVAYTFDAGPNAVIFTLDDTVAEFVAAVWHGFPPGSNGDTFLKGLQVRPAPLSAELQAALAMEPTPGGVKYIIVTQVGPGPQILDDPCAHLLGPDGLPKPAA

SEQ ID NO: 763150 - protein, 351 aa, Homo sapiens
MASEKPLAAVTCTAPVNIAVIKYWGKRDEELVLPINSSLSVTLHQDQLKTTTTAVISKDFTEDRIWLNGREEDVGQPRLQACLREIRCLARKRRNSRDGDPLPSSLSCKVHVASVNNFPTAAGLASSAAGYACLAYTLARVYGVESDLSEVARRGSGSACRSLYGGFVEWQMGEQADGKDSIARQVAPESHWPELRVLILVVSAEKKLTGSTVGMRASVETSPLLRFRAESVVPARMAEMARCIRERDFPSFAQLTMKDSNQFHATCLDTFPPISYLNAISWRIIHLVHRFNAHHGDTKVAYTFDAGPNAVIFTLDDTVAEFVAAVWHGFPPGSNGDTFLKGLQNMEVTDA

SEQ ID NO: 763151 - protein, 207 aa, Homo sapiens
MELGSVGLVGAPTSLTGSTVGMRASVETSPLLRFRAESVVPARMAEMARCIRERDFPSFAQLTMKDSNQFHATCLDTFPPISYLNAISWRIIHLVHRFNAHHGDTKVAYTFDAGPNAVIFTLDDTVAEFVAAVWHGFPPGSNGDTFLKGLQVRPAPLSAELQAALAMEPTPGGVKYIIVTQVGPGPQILDDPCAHLLGPDGLPKPAA

SEQ ID NO: 763152 - protein, 217 aa, Homo sapiens
MASEKPLAAVTCTAPVNIAVIKYWGKRDEELVLPINSSLSVTLHQDQLKTTTTAVISKDFTEDRIWLNGREEDVGQPRLQACLREIRCLARKRRNSRDGDPLPSSLSCKVHVASVNNFPTAAGLASSAAGYACLAYTLARVYGVESDLSEVARRGSGSACRSLYGGFVEWQMGEQADGKDSIARQVAPESHWPELRVLILVVSGVGRVEQQPGGLCP

SEQ ID NO: 763153 - protein, 102 aa, Homo sapiens
MTPAPTSWVLTACRSQLPDCLSRDRMPLGEGVASPELGSGCGGLAGLLGHVGGGLTPGPWAACCGAVQGVLRPPRCQERSPPSASAALSCTSALPRWDGEGV

SEQ ID NO: 763154 - protein, 290 aa, Homo sapiens
MASEKPLAAVTCTAPVNIAVIKYWGKRDEELVLPINSSLSVTLHQDQLKTTTTAVISKDFTEDRIWLNGREEDVGQPRLQACLREIRCLARKRRNSRDGDPLPSSLSCKVHVASVNNFPTAAGLASSAAGYACLAYTLARVYGVESDLSEVARRGSGSACRSLYGGFVEWQMGEQADGKDSIARQVAPESHWPELRVLILVVSAEKKLTGSTVGMRASVETSPLLRFRAESVVPARMAEMARCIRERDFPSFAQLTLRPGPVMHCFELPAFLFMLSGLFPGRSPHGPRGS

SEQ ID NO: 763155 - protein, 439 aa, Homo sapiens
MASEKPLAAVTCTAPVNIAVIKYYCHCDTQAGVQWRDLGSLQPPLPGFNRFSCLSLSSSWDYRGKRDEELVLPINSSLSVTLHQDQLKTTTTAVISKDFTEDRIWLNGREEDVGQPRLQACLREIRCLARKRRNSRDGDPLPSSLSCKVHVASVNNFPTAAGLASSAAGYACLAYTLARVYGVESDLSEVARRGSGSACRSLYGGFVEWQMGEQADGKDSIARQVAPESHWPELRVLILVVSAEKKLTGSTVGMRASVETSPLLRFRAESVVPARMAEMARCIRERDFPSFAQLTMKDSNQFHATCLDTFPPISYLNAISWRIIHLVHRFNAHHGDTKVAYTFDAGPNAVIFTLDDTVAEFVAAVWHGFPPGSNGDTFLKGLQVRPAPLSAELQAALAMEPTPGGVKYIIVTQVGPGPQILDDPCAHLLGPDGLPKPAA

SEQ ID NO: 763156 - protein, 229 aa, Homo sapiens [sequence omitted]

SEQ ID NO: 763157 - protein, 229 aa, Homo sapiens [sequence omitted]

SEQ ID NO: 763158 - protein, 486 aa, Homo sapiens
MASEKPLAAVTCTAPVNIAVIKYWGKRDEELVLPINSSLSVTLHQDQLKTTTTAVISKDFTEDRIWLNGREEDVGQPRLQACLREIRCLARKRRNSRDGDPLPSSLSCKVHVASVNNFPTAAGLASSAAGYACLGTFCCPCRGPQALQAVNRECPRVELAEVGDRRLGRRMLASKADGPEALSSGNPHLPWGVGRSWGGELSGSTAQAALRTLPEIRMPAAYTLARVYGVESDLSEVARRGSGSACRSLYGGFVEWQMGEQADGKDSIARQVAPESHWPELRVLILVVSAEKKLTGSTVGMRASVETSPLLRFRAESVVPARMAEMARCIRERDFPSFAQLTMKDSNQFHATCLDTFPPISYLNAISWRIIHLVHRFNAHHGDTKVAYTFDAGPNAVIFTLDDTVAEFVAAVWHGFPPGSNGDTFLKGLQVRPAPLSAELQAALAMEPTPGGVKYIIVTQVGPGPQILDDPCAHLLGPDGLPKPAA

SEQ ID NO: 763159 - protein, 451 aa, Homo sapiens
MASEKPLAAVTCTAPVNIAVIKYWGKRDEELVLPINSSLSVTLHQDQLKTTTTAVISKDFTEDRIWLNGREEDVGQPRLQACLREIRCLARKRRNSRDGDPLPSSLSCKVHVASVNNFPTAAGLASSAAGYACLAYTLARVYGVESDLSEVARRGSGSACRSLYGGFVEWQMGEQADGKDSIARQVAPESHWPELRVLILVVSAEKKLTGSTVGMRASVETSPLLRFRAESVVPARMAEMARCIRERDFPSFAQLTMKDSNQFHATCLDTFPPISYLNAISWRIIHLVHRFNAHHGDTKVAYTFDAGPNAVIFTLDDTVAEFVAAVWHGFPPGSNGDTFLKGLQVRPAPLSAELQAALAMEPTPGGVKYIIVTQVGPGPQGLNLGDLGPPGPELEAVLMLKDDAWEGGPGWGCGCGRTLVVRLVLGGSVRNRSALSALRGTRLRSVFVCYG

SEQ ID NO: 763160 - protein, 284 aa, Homo sapiens
MASEKPLAAVTCTAPVNIAVIKYWGKRDEELVLPINSSLSVTLHQDQLKTTTTAVISKDFTEDRIWLNGREEDVGQPRLQACLREIRCLARKRRNSRDGDPLPSSLSCKVHVASVNNFPTAAGLASSAAGYACLAYTLARVYGVESDLSEVARRGSGSACRSLYGGFVEWQMGEQADGKDSIARQVAPESHWPELRVLILVVSAEKKLTGSTVGMRASVETSPLLRFRAESVVPARMAEMARCIRERDFPSFAQLTMKDSNQFHATCLRKPPSASDGGCPRRFC

SEQ ID NO: 763161 - protein, 102 aa, Homo sapiens; identical to SEQ ID NO: 763153

SEQ ID NO: 763162 - protein, 104 aa, Homo sapiens
MASEKPLAAVTCTAPVNIAVIKYWPRQTGKLRLREGRGGGRAGPRAPSRDKLGATRSPATAAAPAGSPGACPLAITELSKSSIIDSHESSRHHDWLIFLCFPYQ

SEQ ID NO: 763163 - protein, 186 aa, Homo sapiens
MRALDPPRERTGPPRERGLSHARGRMTVPDLGAQDQRSTPTNQKGSIIPNNIRHKFGSNVVDQLVSEEQAQKAIDEVFEGQKRASSWPSRTQNPVEISSVFSDYYDLGYNMRSNLFRGAAEETKSLMKASYTPEVIEKSVRDLEHWHGRKTDDLGRWHQKNAMNLNLQKALEEKYGENSKSKSSKY

SEQ ID NO: 763164 - protein, 122 aa, Homo sapiens
PVVLQWGSALLGFSTHQCGSRVSCCYERDWRGEAETYEGPGFFQDMGFHLPSPHSELLVSEDCLDWTYLPALFDQSLLGSLSLGQKLEVSPHFHCSPSRLLWTGSALGRTELPWARQVGGWG

SEQ ID NO: 763165 - protein, 328 aa, Homo sapiens
HWSSPVVLQWGSALLGFSTHQCGSRVSCCYERDWRGLSLELPVPQQEAMELGHGAGTTTFTRAHLNDKEGQQDLDPWKAAYSSLDTSKFKNQGLSSPQPLPLGSSTQGSSLGQCHLKEIPPPPPTAASRDSLGMDPQSRSLKNAGSRSSSRENRATSGEGAQPCQGTDDGPSLGAQDQRSTPTNQKGSIIPNNIRHKFGSNVVDQLVSEEQAQKAIDEVFEGQKRASSWPSRTQNPVEISSVFSDYYDLGYNMRSNLFRGAAEETKSLMKASYTPEVIEKSVRDLEHWHGRKTDDLGRWHQKNAMNLNLQKALEEKYGENSKSKSSKY

SEQ ID NO: 763166 - protein, 144 aa, Homo sapiens
MTRRANRTWTPGKRPTVPWTPPSSRTRAQKAIDEVFEGQKRASSWPSRTQNPVEISSVFSDYYDLGYNMRSNLFRGAAEETKSLMKASYTPEVIEKSVRDLEHWHGRKTDDLGRWHQKNAMNLNLQKALEEKYGENSKSKSSKY

SEQ ID NO: 763167 - protein, 132 aa, Homo sapiens
MGAATAPGSRGAAPSGPAILEGLFCRFFPLRKCRSRRWPMSCDFCLFPFLLGLSQTRKGPVRNVLHNLSGKAANVALLRLPCSLPLGRPPCFLNTKWRHVVSIRRQREIGVGPKALECTPLPPRGLPPPRVL

SEQ ID NO: 763168 - protein, 132 aa, Homo sapiens; identical to SEQ ID NO: 763167

SEQ ID NO: 763169 - protein, 132 aa, Homo sapiens; identical to SEQ ID NO: 763167

SEQ ID NO: 763170 - protein, 132 aa, Homo sapiens; identical to SEQ ID NO: 763167

SEQ ID NO: 763171 - protein, 132 aa, Homo sapiens; identical to SEQ ID NO: 763167

SEQ ID NO: 763172 - protein, 79 aa, Homo sapiens
SGGEGRRGEACGAGARGRARGALSSPASGRPAWIPHPSSCSPAAAEEDKHKDEVLNSRSHNVGDGPPDFLTDLHYLVDT

SEQ ID NO: 763173 - protein, 132 aa, Homo sapiens; identical to SEQ ID NO: 763167

SEQ ID NO: 763174 - protein, 132 aa, Homo sapiens; identical to SEQ ID NO: 763167

SEQ ID NO: 763175 - protein, 124 aa, Homo sapiens
SAQGEAAERKTNIKMKCLIQGHTMSGMDLQISLLKTSSGLPLIVHYETESCYVAQAGLELLTSSDPPVLASQVSGLRACAITPNLIHCLYKFFFLYSKNQKKQNWIHVQNMQVRRGLVTQWLRM

SEQ ID NO: 763176 - protein, 132 aa, Homo sapiens; identical to SEQ ID NO: 763167

SEQ ID NO: 763177 - protein, 132 aa, Homo sapiens; identical to SEQ ID NO: 763167

SEQ ID NO: 763178 - protein, 132 aa, Homo sapiens; identical to SEQ ID NO: 763167

SEQ ID NO: 763179 - protein, 138 aa, Homo sapiens
MGAATAPGSRGAAPSGPAILEGLFCRFFPLRKCRSRRWPMSCDFCLFPFLLGLSQTRKGPVRNVLHNLSGKAANVALLRLPCSLPLGRPPCFLNTKWRHVRKTNIKMKCLIQGHTMSGMDLQISLLVRRGLVTQWLRM

SEQ ID NO: 763180 - protein, 132 aa, Homo sapiens; identical to SEQ ID NO: 763167

SEQ ID NO: 763181 - protein, 132 aa, Homo sapiens; identical to SEQ ID NO: 763167

SEQ ID NO: 763182 - protein, 132 aa, Homo sapiens; identical to SEQ ID NO: 763167

SEQ ID NO: 763183 - protein, 115 aa, Homo sapiens
SGGEGRRGEACGAGARGRARGALSSPASGRPAWIPHPSSCSPAAAGGQKDRNPLTAACRIAALLFVGRARNVVLKRMASIYIMLCLRFASFFRLKPQKPHLLPLCRFHRGTLFRH

SEQ ID NO: 763184 - protein, 424 aa, Homo sapiens
CDKCRKAFIHRSSLTKHEKTHKGEGAFPNGTDQGIYPGKKHHECTDCGKTFLWKTQLTEHQRIHTGEKPFECNVCGKAFRHSSSLGQHENAHTGEKPYQCSLCGKAFQRSSSLVQHQRIHTGEKPYRCNLCGRSFRHGTSLTQHEVTHSGEKPFQCKECGKAFSRCSSLVQHERTHTGEKPFECSICGRAFGQSPSLYKHMRIHKRGKPYQSSNYSIDFKHSTSLTQDESTLTEVKSYHCNDCGEDFSHITDFTDHQRIHTAENPYDCEQAFSQQAISHPGEKPYQCNVCGKAFKRSTSFIEHHRIHTGEKPYECNECGEAFSRRSSLTQHERTHTGEKPYECIDCGKAFSQSSSLIQHERTHTGEKPYECNECGRAFRKKTNLHDHQRIHTGEKPYSCKECGKNFSRSSALTKHQRIHTRNKL

SEQ ID NO: 763185 - protein, 424 aa, Homo sapiens; identical to SEQ ID NO: 763184

SEQ ID NO: 763186 - protein, 424 aa, Homo sapiens; identical to SEQ ID NO: 763184

SEQ ID NO: 763187 - protein, 737 aa, Homo sapiens
MPGKLLWGDIMELEAPLEESESQKKERQKSDRRKSRHHYDSDEKSETRENGVTDDLDAPKAKKSKMKEKLNGDTEEGFNRLSDEFSKSHKSRRKDLPNGDIDEYEKKSKRVSSLDTSTHKSSDNKLEETLTREQKEGAFSNFPISEETIKLLKGRGVTYLFPIQVKTFGPVYEGKDLIAQARTGTGKTFSFAIPLIERLQRNQETIKKSRSPKVLVLAPTRELANQVAKDFKDITRKLSVACFYGGTSYQSQINHIRNGIDILVGTPGRIKDHLQSGRLDLSKLRHVVLDEVDQMLDLGFAEQVEDIIHESYKTDSEDNPQTLLFSATCPQWVYKVAKKYMKSRYEQVDLVGKMTQKAATTVEHLAIQCHWSQRPAVIGDVLQVYSGSEGRAIIFCETKKNVTEMAMNPHIKQNAQCLHGDIAQSQREITLKGFREGSFKVLVATNVAARGLDIPEVDLVIQSSPPQDVESYIHRSGRTGRAGRTGICICFYQPRERGQLRYVEQKAGITFKRVGVPSTMDLVKSKSMDAIRSLASVSYAAVDFFRPSAQRLIEEKGAVDALAAALAHISGASSFEPRSLITSDKGFVTMTLESLEEIQDVSCAWKELNRKLSSNAVSQITRMCLLKGNMGVCFDVPTTESERLQAEWHDSDWILSVPAKLPEIEEYYDGNTSSNSRQRSGWSSGRSGRSGRSGGRSGGRSGRQSRQGSRSGSRQDGRRRSGNRNRSRSGGHKRSFD

SEQ ID NO: 763188 - protein, 672 aa, Homo sapiens
MKEKLNGDTEEGFNRLSDEFSKSHKSRRKDLPNGDIDEYEKKSKRVSSLDTSTHKSSDNKLEETLTREQKEGAFSNFPISEETIKLLKGRGVTYLFPIQVKTFGPVYEGKDLIAQARTGTGKTFSFAIPLIERLQRNQETIKKSRSPKVLVLAPTRELANQVAKDFKDITRKLSVACFYGGTSYQSQINHIRNGIDILVGTPGRIKDHLQSGRLDLSKLRHVVLDEVDQMLDLGFAEQVEDIIHESYKTDSEDNPQTLLFSATCPQWVYKVAKKYMKSRYEQVDLVGKMTQKAATTVEHLAIQCHWSQRPAVIGDVLQVYSGSEGRAIIFCETKKNVTEMAMNPHIKQNAQCLHGDIAQSQREITLKGFREGSFKVLVATNVAARGLDIPEVDLVIQSSPPQDVESYIHRSGRTGRAGRTGICICFYQPRERGQLRYVEQKAGITFKRVGVPSTMDLVKSKSMDAIRSLASVSYAAVDFFRPSAQRLIEEKGAVDALAAALAHISGASSFEPRSLITSDKGFVTMTLESLEEIQDVSCAWKELNRKLSSNAVSQITRMCLLKGNMGVCFDVPTTESERLQAEWHDSDWILSVPAKLPEIEEYYDGNTSSNSRQRSGWSSGRSGRSGRSGGRSGGRSGRQSRQGSRSGSRQDGRRRSGNRNRSRSGGHKRSFD

SEQ ID NO: 763189 - protein, 672 aa, Homo sapiens; identical to SEQ ID NO: 763188

SEQ ID NO: 763190 - protein, 650 aa, Homo sapiens
MPGKLLWGDIMELEAPLEESESQKKERQKSDRRKSRHHYDSDEKSETRENGVTDDLDAPKAKKSKMKEKLNGDTEEGFNRLSDEFSKSHKSRRKDLPNGDIDEYEKKSKRVSSLDTSTHKSSDNKLEETLTREQKEGAFSNFPISEETIKLLKGRGVTYLFPIQVKTFGPVYEGKDLIAQARTGTGKTFSFAIPLIERLQRNQETIKKSRSPKVLVLAPTRELANQVAKDFKDITRKLSVACFYGGTSYQSQINHIRNGIDILVGTPGRIKDHLQSGRLDLSKLRHVVLDEVDQMLDLGFAEQVEDIIHESYKTDSEDNPQTLLFSATCPQWVYKVAKKYMKSRYEQVDLVGKMTQKAATTVEHLAIQCHWSQRPAVIGDVLQVYSGSEGRAIIFCETKKNVTEMAMNPHIKQNAQCLHGDIAQSQREITLKGFREGSFKVLVATNVAARGLDIPEVDLVIQSSPPQDVESYIHRSGRTGRAGRTGICICFYQPRERGQLRYVEQKAGITFKRVGVPSTMDLVKSKSMDAIRSLASVSYAAVDFFRPSAQRLIEEKGAAEWHDSDWILSVPAKLPEIEEYYDGNTSSNSRQRSGWSSGRSGRSGRSGGRSGGRSGRQSRQGSRSGSRQDGRRRSGNRNRSRSGGHKRSFD

SEQ ID NO: 763191 - protein, 586 aa, Homo sapiens
MPGKLLWGDIMELEAPLEESESQKKERQKSDRRKSRHHYDSDEKSETRENGVTDDLDAPKAKKSKMKEKLNGDTEEGFNRLSDEFSKSHKSRRKDLPNGDIDEYEKKSKRVSSLDTSTHKSSDNKLEETLTREQKEGAFSNFPISEETIKLLKGRGVTYLFPIQVKTFGPVYEGKDLIAQARTGTGKTFSFAIPLIERLQRNQETIKKSRSPKVLVLAPTRELANQVAKDFKDITRKLSVACFYGGTSYQSQINHIRNGIDILVGTPGRIKDHLQSGRLDLSKLRHVVLDEVDQMLDLGFAEQVEDIIHESYKTDSEDNPQTLLFSATCPQWVYKVAKKYMKSRYEQVDLVGKMTQKAATTVEHLAIQCHWSQRPAVIGDVLQVYSGSEGRAIIFCETKKNVTEMAMNPHIKQNAQCLHGDIAQSQREITLKGFREGSFKVLVATNVAARGLDIPEVDLVIQSSPPQDVESYIHRSGRTGRAGRTGICICFYQPRERGQLRYVEQKAGITFKRVGVPSTMDLVKSKSMDAIRSLASVSYAAVDFFRPSAQRLIEEKGAVDALAAALAHISGASSFEPRSLITSDKL

SEQ ID NO: 763192 - protein, 130 aa, Homo sapiens
ISHIGRMCLLKGNMVFALMFLQLSQKGYRQSGMIPTGYSQCQPNYLKLKNIMMETHLLIPDRGVAGQVVDQAGQAGQVVDLAAGQVDRVDKEVAQEVDKMVEDEVGIEIDQEVGATNGVLTEYLIVNLPV

SEQ ID NO: 763193 - protein, 154 aa, Homo sapiens
MLISACFLYGDWPGFYSSNQSLQNKGGPVDISHTHWLRGCGAMEGLKPRVSGIIFPRRAVRVPEVTHGQGRAAALPPLPFTLSLPVGGCGHCARREAAVASNAWETPLGGHYGAGSTLGGVREPEEGEAKGALSMGRASFWAAPAWAGRGTVCP

SEQ ID NO: 763194 - protein, 643 aa, Homo sapiens
MPGKLLWGDIMELEAPLEESESQKKERQKSDRRKSRHHYDSDEKSETRENGVTDDLDAPKAKKSKMKEKLNGDTEEGFNRLSDEFSKSHKSRRKDLPNGDIDEYEKKSKRVSSLDTSTHKSSDNKLEETLTREQKEGAFSNFPISEETIKLLKGRGVTYLFPIQVKTFGPVYEGKDLIAQARTGTGKTFSFAIPLIERLQRNQETIKKSRSPKVLVLAPTRELANQVAKDFKDITRKLSVACFYGGTSYQSQINHIRNGIDILVGTPGRIKDHLQSGRLDLSKLRHVVLDEVDQMLDLGFAEQVEDIIHESYKTDSEDNPQTLLFSATCPQWVYKVAKKYMKSRYEQVDLVGKMTQKAATTVEHLAIQCHWSQRPAVIGDVLQVYSGSEGRAIIFCETKKNVTEMAMNPHIKQGITFKRVGVPSTMDLVKSKSMDAIRSLASVSYAAVDFFRPSAQRLIEEKGAVDALAAALAHISGASSFEPRSLITSDKGFVTMTLESLEEIQDVSCAWKELNRKLSSNAVSQITRMCLLKGNMGVCFDVPTTESERLQAEWHDSDWILSVPAKLPEIEEYYDGNTSSNSRQRSGWSSGRSGRSGRSGGRSGGRSGRQSRQGSRSGSRQDGRRRSGNRNRSRSGGHKRSFD

SEQ ID NO: 763195 - protein, 723 aa, Homo sapiens
MPGKLLWGDIMELEAPLEESESQKKERQKSDRRKSRHHYDSDEKSETRENGVTDDLDAPKAKKSKMKEKLNGDTEEGFNRLSDEFSKSHKSRRKDLPNGDIDEYEKKSKRVSSLDTSTHKSSDNKLEETLTREQKEGAFSNFPISEETIKLLKGRGVTYLFPIQVKTFGPVYEGKDLIAQARTGTGKTFSFAIPLIERLQRNQETIKKSRSPKVLVLAPTRELANQVAKDFKDITRKLSVACFYGGTSYQSQINHIRNGIDILVGTPGRIKDHLQSGRLDLSKLRHVVLDEVDQMLDLGFAEQVEDIIHESYKTDSEDNPQTLLFSATCPQWVYKVAKKYMKSRYEQVDLVGKMTQKAATTVEHLAIQCHWSQRPAVIGDVLQVYSGSEGRAIIFCETKKNVTEMAMNPHIKQNAQCLHGDIAQSQREITLKGFREGSFKVLVATNVAARGLDIPEVDLVIQSSPPQDVESYIHRSGRTGRAGRTGICICFYQPRERGQLRYVEQKAGITFKRVGVPSTMDLVKSKSMDAIRSLASVSYAAVDFFRPSAQRLIEEKGAVDALAAALAHISGASSFEPRSLITSDKGFVTMTLESLEEIQDVSCAWKELNRKLSSNAVSQITRMCLLKGNMGVCFDVPTTESERLQAEWHDSDWILSVPAKLPEIEEYYDGNTSSNSRQRSGWSSGRSGRQSRQGSRSGSRQDGRRRSGNRNRSRSGGHKRSFD

SEQ ID NO: 763196 - protein, 504 aa, Homo sapiens
MPGKLLWGDIMELEAPLEESESQKKERQKSDRRKSRHHYDSDEKSETRENGVTDDLDAPKAKKSKMKEKLNGDTEEGFNRLSDEFSKSHKSRRKDLPNGDIDEYEKKSKRVSSLDTSTHKSSDNKLEETLTREQKEGAFSNFPISEETIKLLKGRGVTYLFPIQVKTFGPVYEGKDLIAQARTGTGKTFSFAIPLIERLQRNQETIKKSRSPKVLVLAPTRELANQVAKDFKDITRKLSVACFYGGTSYQSQINHIRNGIDILVGTPGRIKDHLQSGRLDLSKLRHVVLDEVDQMLDLGFAEQVEDIIHESYKTDSEDNPQTLLFSATCPQWVYKVAKKYMKSRYEQVDLVGKMTQKAATTVEHLAIQCHWSQRPAVIGDVLQVYSGSEGRAIIFCETKKNVTEMAMNPHIKQNAQCLHGDIAQSQREITLKGFREGSFKVLVATNVAARGLDIPEVDLVIQSSPPQDVESYIHRSGRTGRAGRTGICICFYSLRGVAGPLEPH

SEQ ID NO: 763197 - protein, 92 aa, Homo sapiens
SSPLEVLESAACEKLPTPTPQVVKEGDSFPDTLAKNGQEIAPAQISKSLMVDNYTKDGVPGQERPKGPSAVVPSTSTGGVALPITTAIETVN

SEQ ID NO: 763198 - protein, 151 aa, Homo sapiens
EEALQQAKEDLARLLRDYQELMNVKLALDVEIATYRKLLEGEECRMSGDLSSNVTVSVTSSTISSNVASKAAFGGSGGRGSSSGGGYSSGSSSYGSGGRQSGSRGGSGGGGSISGGGYGSGGGSGGRYGSGGGSKGGSISGGGYGSGGGKH

SEQ ID NO: 763199 - protein, 125 aa, Homo sapiens
MHTEPKCSTTTCFFSLPYRMSGDLSSNVTVSVTSSTISSNVASKAAFGGSGGRGSSSGGGYSSGSSSYGSGGRQSGSRGGSGGGGSISGGGYGSGGGSGGRYGSGGGSKGGSISGGGYGSGGGKH

SEQ ID NO: 763200 - protein, 113 aa, Homo sapiens
MPPMPSLMSGDLSSNVTVSVTSSTISSNVASKAAFGGSGGRGSSSGGGYSSGSSSYGSGGRQSGSRGGSGGGGSISGGGYGSGGGSGGRYGSGGGSKGGSISGGGYGSGGGKH

SEQ ID NO: 763201 - protein, 952 aa, Homo sapiens
LSDRCVLATVGRVAAVCALAISFSERGESNSHLQLSKELFLRALQRGSFSFRSAVSAQVRTMAPKQKKKTSRGKKRLKPVLAASEDMEPVNMESMGHPEIYPLVLTTKTQEIFNCRIDEDVTDEQPYKLINKEDIFEDLRNRAAVSDFHPVKKIVQEYPGNELLLVYDKDFKYGLNFYLIATEEGKENYLNPPEVPEEQEEYKEHIPEDVYIYKPPVSKPWVSLGSEKEIEEESVTESTKQITYMISRKRSEFGAPIKFSDQNASSVKDAYIECTAYPDKNFTLKQLEKDVGMQVIPQIKDISTQTKWTYPKNATTQYYPREFSEEEKETLKQSKPLVDFLNNASISVEIALQQNEIMNTFIDDWKYLAEEEGTFGDKTDTHLKEYQSFTDLHSPTEKMITCVSWHPTIYGLIAVSVAVRLSFEDRVHFSGKLLLQPSLILFWSFSDPIHPQLMLESPDDIFCFKFCPSDPNIIAGGCINGQIVMWDITAHADRIENIKAGGSRSKRATLKPMFLLEPESNKEAMYIRHCAVSSIENGHKKVITDIHWLSDTFEINRMGSVFENRSGICCQLVTCSADCTICFWDIRPQKPLTPQTTEKKKEESIEIPFDVPSTFLHLDLSWKPLTKVRLSKGETSLDHCPTKISLNEDHLLCKTQDKMLAQSKTEKAEEMNPYHNLESGMANLLKPIDDFCTKFFVGTEEGEVIYTDWKMEKDPETGRLMSKKPVSHHTIHDGTVHTIQRSPFYNDIILTVGGWNVAIWKEGVMTGPLLQSCCAPKRYTSGHWSLTRPGVFYIGREDGYIDIWDLLEKTHEPAQSQNICITMITYIKPWIFSSKQQFIATADYYGTLHILEIPWTLSRPSTNEMASVNHYFEREVKHLEYVEQRKKIREQEKKEMELEMAKKKVKTYQKSKEQMQAELKMDYESYLELEKTVLINLGLIKVTEKGSYMEVM

SEQ ID NO: 763202 - protein, 931 aa, Homo sapiens
LSDRCVLATVGRVAAVCALAISFSERGESNSHLQLSKELFLRALQRGSFSFRSAVSAQVRTMAPKQKKKTSRGKKRLKPVLAASEDMEPVNMESMGHPEIYPLVLTTKTQEIFNCRIDEDVTDEQPYKLINKEDIFEDLRNRAAVSDFHPVKKIVQEYPGNELLLVYDKDFKYGLNFYLIATEEGKENYLNPPEVPEEQEEYKEHIPEDVYIYKPPVSKPWVSLGSEKEIEEESVTESTKQITYMISRKRSEFGAPIKFSDQNASSVKDAYIECTAYPDKNFTLKQLEKDVGMQVIPQIKDISTQTKWTYPKNATTQYYPREFSEEEKETLKQSKPLVDFLNNASISVEIALQQNEIMNTFIDDWKYLAEEEGTFGDKTDTHLKEYQSFTDLHSPTEKMITCVSWHPTIYGLIAVSVAVRLSFEDRVHFSGKLLLQPSLILFWSFSDPIHPQLMLESPDDIFCFKFCPSDPNIIAGGCINGQIVMWDITAHADRIENIKAGGSRSKRATLKPMFLLEPESNKEAMYIRHCAVSSIENGHKKVITDIHWLSDTFEINRMGSVFENRSGICCQLVTCSADCTICFWDIRPQKPLTPQTTEKKKEESIEIPFDVPSTFLHLDLSWKPLTKVRLSKGETSLDHCPTKISLNEDHLLCKTQDKMLAQSKTEKAEEMNPYHNLESGMANLLKPIDDFCTKFFVGTEEGEVIYTDWKMEKDPETGRLMSKKPVSHHTIHDGTVHTIQRSPFYNDIILTVGGWNVAIWKEGVMTGPLLQSCCAPKRYTSGHWSLTRPGVFYIGREDGYIDIWDLLEKTHEPAQSQNICITMITYIKPWIFSSKQQFIATADYYGTLHILEIPWTLSRPSTNEMASVNPSLYCSLLFSVFQSQPLTDYFQPLHMLIPSTKNAFPLILITTHPTCHFLRKALTEPPSEGPG

SEQ ID NO: 763203 - protein, 907 aa, Homo sapiens
LSDRCVLATVGRVAAVCALAISFSERGESNSHLQLSKELFLRALQRGSFSFRSAVSAQVRTMAPKQKKKTSRGKKRLKPVLAASEDMEPVNMESMGHPEIYPLVLTTKTQEIFNCRIDEDVTDEQPYKLINKEDIFEDLRNRAAVSDFHPVKKIVQEYPGNELLLVYDKDFKYGLNFYLIATEEGKENYLNPPEVPEEQEEYKEHIPEDVYIYKPPVSKPWVSLGSEKEIEEESVTESTKQITYMISRKRSEFGAPIKFSDQNASSVKDAYIECTAYPDKNFTLKQLEKDVGMQVIPQIKDISTQTKWTYPKNATTQYYPREFSEEEKETLKQSKPLVDFLNNASISVEIALQQNEIMNTFIDDWKYLAEEEGTFGDKTDTHLKEYQSFTDLHSPTEKMITCVSWHPTIYGLIAVSVAVRLSFEDRVHFSGKLLLQPSLILFWSFSDPIHPQLMLESPDDIFCFKFCPSDPNIIAGGCINGQIVMWDITAHADRIENIKAGGSRSKRATLKPMFLLEPESNKEAMYIRHCAVSSIENGHKKVITDIHWLSDTFEINRMGSVFENRSGICCQLVTCSADCTICFWDIRPQKPLTPQTTEKKKEESIEIPFDVPSTFLHLDLSWKPLTKVRLSKGETSLDHCPTKISLNEDHLLCKTQDKMLAQSKTEKAEEMNPYHNLESGMANLLKPIDDFCTKFFVGTEEGEVIYTDWKMEKDPETGRLMSKKPVSHHTIHDGTVHTIQRSPFYNDIILTVGGWNVAIWKEGVMTGPLLQSCCAPKRYTSGHWSLTRPGVFYIGREDGYIDIWDLLEKTHEPAQSQNICITMITYIKPWIFSSKQQFIATADYYGTLHILEIPWTLSRPSTNEMASVNHYFEREVKHLEYVEQRKKIREQEKKEMELEMAKKKVVS

SEQ ID NO: 763204 - protein, 73 aa, Homo sapiens
CRIRRARHEESRVEEGYKSLKIQHSKGPVLPRVPNCGKWTKMADGPFKNIHFLQRQGFTLKKDWLKALVSRKG

SEQ ID NO: 763205 - protein, 113 aa, Homo sapiens
LGQFSMAKVTSEPQKPNEDVDEQTPSTSSTKGRKKGKTPRQRRSRSGVKGLKTTRKAKRPLRGSSSQKAGETNTPAGKPKKARGPILRGRYHRLKEKMKKEEADKEQSETSVL

SEQ ID NO: 763206 - protein, 843 aa, Homo sapiens
MRPQCTPAHRPGAILLTAQPRAPTVASCGYCSCKLRPTRRSPTGKAVVRPPPPGAPQQPGVHSSSLPHRPSLFSSSPEVEFERRHGGGAALLPLLCLPMDMHCKADPFSAMHPGHGGVNQLGGVFVNGRPLPDVVRQRIVELAHQGVRPCDISRQLRVSHGCVSKILGRYYETGSIKPGVIGGSKPKVATPKVVDKIAEYKRQNPTMFAWEIRDRLLAEGICDNDTVPSVSSINRIIRTKVQQPFHPTPDGAGTGVTAPGHTIVPSTASPPVSSASNDPVGSYSINGILGIPRSNGEKRKRDEDVSEGSVPNGDSQSGVDSLRKHLRADTFTQQQLEALDRVFERPSYPDVFQASEHIKSEQGNEYSLPALTPGLDEVKSSLSASTNPELGSNVSGTQTYPVVTGRDMASTTLPGYPPHVPPTGQGSYPTSTLAGMVPGSEFSGNPYSHPQYTAYNEAWRFSNPALLSSPYYYSAAPRSAPAARAAAYDRHWLPRGPHQASGRQLRPPHRPRLTPPRRREDRRDACLPATAPASPHPTTPATLHITPLEGRTGRVEPRGGTLRPGPTAPSPACRPSPPAWTARRREGDSAQLVPASTKPAPKPASHPAVLGRDLLVRAGCFCDTQSARTAARPSPGHPPRTLGRQELRWRGWAKEIKKKTTFCRRKSPLPNPWEKFFSPSASRTALAFRVCPVPEDGMGVWGSGSRNGLWGRQVFPRLGPKDRGAQQPAPIEPDSRLFTAPPGLPSSPGPGTSCCETRLSALPCPYLSVSSTCWPPSFPSCQSFACPLTPCILLPDSQPHRTLSRDRRRTSFHRLRTGVFLQQLLDAPSPDTDSQSAGGKNRF

SEQ ID NO: 763207 - protein, 871 aa, Homo sapiens
MRPQCTPAHRPGAILLTAQPRAPTVASCGYCSCKLRPTRRSPTGKAVVRPPPPGAPQQPGVHSSSLPHRPSLFSSSPEVEFERRHGGGAALLPLLCLPMDMHCKADPFSAMHPGHGGVNQLGGVFVNGRPLPDVVRQRIVELAHQGVRPCDISRQLRVSHGCVSKILGRYYETGSIKPGVIGGSKPKVATPKVVDKIAEYKRQNPTMFAWEIRDRLLAEGICDNDTVPSVSSINRIIRTKVQQPFHPTPDGAGTGVTAPGHTIVPSTASPPVSSASNDPVGSYSINGILGIPRSNGEKRKRDEDVSEGSVPNGDSQSGVDSLRKHLRADTFTQQQLEALDRVFERPSYPDVFQASEHIKSEQGNEYSLPALTPGLDEVKSSLSASTNPELGSNVSGTQTYPVVTGRDMASTTLPGYPPHVPPTGQGSYPTSTLAGMVPEAAVGPSSSLMSKPGRKLAEVPPCVQTHWSEFSGNPYSHPQYTAYNEAWRFSNPALLSSPYYYSAAPRSAPAARAAAYDRHWLPRGPHQASGRQLRPPHRPRLTPPRRREDRRDACLPATAPASPHPTTPATLHITPLEGRTGRVEPRGGTLRPGPTAPSPACRPSPPAWTARRREGDSAQLVPASTKPAPKPASHPAVLGRDLLVRAGCFCDTQSARTAARPSPGHPPRTLGRQELRWRGWAKEIKKKTTFCRRKSPLPNPWEKFFSPSASRTALAFRVCPVPEDGMGVWGSGSRNGLWGRQVFPRLGPKDRGAQQPAPIEPDSRLFTAPPGLPSSPGPGTSCCETRLSALPCPYLSVSSTCWPPSFPSCQSFACPLTPCILLPDSQPHRTLSRDRRRTSFHRLRTGVFLQQLLDAPSPDTDSQSAGGKNRF

SEQ ID NO: 763208 - protein, 866 aa, Homo sapiens
MRPQCTPAHRPGAILLTAQPRAPTVASCGYCSCKLRPTRRSPTGKAVVRPPPPGAPQQPGVHSSSLPHRPSLFSSSPEVEFERRHGGGAALLPLLCLPMDMHCKADPFSAMHPGHGGVNQLGGVFVNGRPLPDVVRQRIVELAHQGVRPCDISRQLRVSHGCVSKILGRYYETGSIKPGVIGGSKPKVATPKVVDKIAEYKRQNPTMFAWEIRDRLLAEGICDNDTVPSVSSINRIIRTKVQQPFHPTPDGAGTGVTAPGHTIVPSTASPPVSSASNDPVGSYSINGILGIPRSNGEKRKRDEVEVYTDPAHIRGGGGLHLVWTLRDVSEGSVPNGDSQSGVDSLRKHLRADTFTQQQLEALDRVFERPSYPDVFQASEHIKSEQGNEYSLPALTPGLDEVKSSLSASTNPELGSNVSGTQTYPVVTGRDMASTTLPGYPPHVPPTGQGSYPTSTLAGMVPGSEFSGNPYSHPQYTAYNEAWRFSNPALLSSPYYYSAAPRSAPAARAAAYDRHWLPRGPHQASGRQLRPPHRPRLTPPRRREDRRDACLPATAPASPHPTTPATLHITPLEGRTGRVEPRGGTLRPGPTAPSPACRPSPPAWTARRREGDSAQLVPASTKPAPKPASHPAVLGRDLLVRAGCFCDTQSARTAARPSPGHPPRTLGRQELRWRGWAKEIKKKTTFCRRKSPLPNPWEKFFSPSASRTALAFRVCPVPEDGMGVWGSGSRNGLWGRQVFPRLGPKDRGAQQPAPIEPDSRLFTAPPGLPSSPGPGTSCCETRLSALPCPYLSVSSTCWPPSFPSCQSFACPLTPCILLPDSQPHRTLSRDRRRTSFHRLRTGVFLQQLLDAPSPDTDSQSAGGKNRF

SEQ ID NO: 763209 - protein, 491 aa, Homo sapiens
MRPQCTPAHRPGAILLTAQPRAPTVASCGYCSCKLRPTRRSPTGKAVVRPPPPGAPQQPGVHSSSLPHRPSLFSSSPEVEFERRHGGGAALLPLLCLPMDMHCKADPFSAMHPGHGGVNQLGGVFVNGRPLPDVVRQRIVELAHQGVRPCDISRQLRVSHGCVSKILGRYYETGSIKPGVIGGSKPKVATPKVVDKIAEYKRQNPTMFAWEIRDRLLAEGICDNDTVPSVSSINRIIRTKVQQPFHPTPDGAGTGVTAPGHTIVPSTASPPVSSASNDPVGSYSINGILGIPRSNGEKRKRDEDVSEGSVPNGDSQSGVDSLRKHLRADTFTQQQLEALDRVFERPSYPDVFQASEHIKSEQGNEYSLPALTPGLDEVKSSLSASTNPELGSNVSGTQTYPVVTGRDMASTTLPGYPPHVPPTGQGSYPTSTLAGMVPGSEFSGNPYSHPQYTAYNEAWRFSNPALLSSPYYYSAAPRSAPAARAAAYDRH

SEQ ID NO: 763210 - protein, 837 aa, Homo sapiens
MRPQCTPAHRPGAILLTAQPRAPTVASCGYCSCKLRPTRRSPTGKAVVRPPPPGAPQQPGVHSSSLPHRPSLFSSSPEVEFERRHGGGAALLPLLCLPMDMHCKADPFSAMHPGHGGVNQLGGVFVNGRPLPDVVRQRIVELAHQGVRPCDISRQLRVSHGCVSKILGRYYETGSIKPGVIGGSKPKVATPKVVDKIAEYKRQNPTMFAWEIRDRLLAEGICDNDTVPSVSSINRIIRTKVQQPFHPTPDGAGTGVTAPGHTIVPSTASPPVSSASNDPVGSYSINGILGIPRSNGEKRKRDEDVSEGSVPNGDSQSGVDSLRKHLRADTFTQQQLEALDRVFERPSYPDVFQASEHIKSEQGNEYSLPALTPGLDEVKSSLSASTNPELGSNVSGTQTYPVVTGRDMASTTLPGYPPHVPPTGQGSYPTSTLAGMVPGSEFSGNPYSHPQYTAYNEAWRFSNPALLMPPPGPPLPLVPLPMTATSYRGDHIKLQADSFGLHIVPVLTPPRRREDRRDACLPATAPASPHPTTPATLHITPLEGRTGRVEPRGGTLRPGPTAPSPACRPSPPAWTARRREGDSAQLVPASTKPAPKPASHPAVLGRDLLVRAGCFCDTQSARTAARPSPGHPPRTLGRQELRWRGWAKEIKKKTTFCRRKSPLPNPWEKFFSPSASRTALAFRVCPVPEDGMGVWGSGSRNGLWGRQVFPRLGPKDRGAQQPAPIEPDSRLFTAPPGLPSSPGPGTSCCETRLSALPCPYLSVSSTCWPPSFPSCQSFACPLTPCILLPDSQPHRTLSRDRRRTSFHRLRTGVFLQQLLDAPSPDTDSQSAGGKNRF

SEQ ID NO: 763211 - protein, 860 aa, Homo sapiens
MRPQCTPAHRPGAILLTAQPRAPTVASCGYCSCKLRPTRRSPTGKAVVRPPPPGAPQQPGVHSSSLPHRPSLFSSSPEVEFERRHGGGAALLPLLCLPMDMHCKADPFSAMHPGHGGVNQLGGVFVNGRPLPDVVRQRIVELAHQGVRPCDISRQLRVSHGCVSKILGRYYETGSIKPGVIGGSKPKVATPKVVDKIAEYKRQNPTMFAWEIRDRLLAEGICDNDTVPSVSSINRIIRTKVQQPFHPTPDGAGTGVTAPGHTIVPSTASPPVSSASNDPVGSYSINGILGIPRSNGEKRKRDEVEVYTDPAHIRGGGGLHLVWTLRDVSEGSVPNGDSQSGVDSLRKHLRADTFTQQQLEALDRVFERPSYPDVFQASEHIKSEQGNEYSLPALTPGLDEVKSSLSASTNPELGSNVSGTQTYPVVTGRDMASTTLPGYPPHVPPTGQGSYPTSTLAGMVPGSEFSGNPYSHPQYTAYNEAWRFSNPALLMPPPGPPLPLVPLPMTATSYRGDHIKLQADSFGLHIVPVLTPPRRREDRRDACLPATAPASPHPTTPATLHITPLEGRTGRVEPRGGTLRPGPTAPSPACRPSPPAWTARRREGDSAQLVPASTKPAPKPASHPAVLGRDLLVRAGCFCDTQSARTAARPSPGHPPRTLGRQELRWRGWAKEIKKKTTFCRRKSPLPNPWEKFFSPSASRTALAFRVCPVPEDGMGVWGSGSRNGLWGRQVFPRLGPKDRGAQQPAPIEPDSRLFTAPPGLPSSPGPGTSCCETRLSALPCPYLSVSSTCWPPSFPSCQSFACPLTPCILLPDSQPHRTLSRDRRRTSFHRLRTGVFLQQLLDAPSPDTDSQSAGGKNRF

SEQ ID NO: 763212 - protein, 33 aa, Homo sapiens
MLAELAGNPPSGIYWKSIFLGPKESCLWEVSCW

SEQ ID NO: 763213 - protein, 219 aa, Homo sapiens
RPVTCRGRQHRALEMKTLFLGVTLGLAAALSFTLEEEDITGTWYVKAMVVDKDFPEDRRPRKVSPVKVTALGGGKLEATFTFMREDRCIQKKILMRKTEEPGKYSACLSAVEMDQITPALWEALAIDTLRKLRIGTRRPRIDGGRKLMYLQELPRRDHYIFYCKDQHHGGLLHMGKLVGRNSDTNREALEEFKKLVQRKGLSEEDIFTPLQTGSCVPEH

SEQ ID NO: 763214 - protein, 102 aa, Homo sapiens
MREDRCIQKKILMRKTEEPGKYSAYGGRKLMYLQELPRRDHYIFYCKDQHHGGLLHMGKLVGRNSDTNREALEEFKKLVQRKGLSEEDIFTPLQTGSCVPEH

SEQ ID NO: 763215 - protein, 184 aa, Homo sapiens
RPVTCRGRQHRALEMKTLFLGVTLGLAAALSFTLEEEDITGTWYVKAMVVDKDFPEDRRPRKVSPVKVTALGGGKLEATFTFMREDRCIQKKILMRKTEEPGKYSAYGGRKLMYLQELPRRDHYIFYCKDQHHGGLLHMGKLVGRNSDTNREALEEFKKLVQRKGLSEEDIFTPLQTGSCVPEH

SEQ ID NO: 763216 - protein, 146 aa, Homo sapiens [sequence omitted]

SEQ ID NO: 763217 - protein, 171 aa, Homo sapiens
  misc_feature (12)..(12): Xaa can be any naturally occurring amino acid
PKRDVTLFLNLXHQEYDWRNYQPSQMSESELQMLASLRWQQNEELEDAGTSHGLSASQVDNCNVSISTSSDDTTTWNSCLPPPVNQGRHYQKEMNPPSPSNPRDWLNMLSPPIVPPSQQPAEQRPDSCESLSVQGEEDLSVEEDEEVLTLLYDPCLNCYFDPQTGKYYELV

SEQ ID NO: 763218 - protein, 152 aa, Homo sapiens
  misc_feature (12)..(12): Xaa can be any naturally occurring amino acid
PKRDVTLFLNQXHQEYDWRNYQPSQMSESELQMLASLRWQQNEELEDAGTSHGLSASQVDNCNVSISTSSDDTTTWNSCLPPPVNQGRHYQKEMNPPSPSNPRDWLNMLSPPIVPPSQQPAEQRPDSCESLSVQGGTMKNDMHKKIKIIYYK

SEQ ID NO: 763219 - protein, 147 aa, Homo sapiens
  misc_feature (12)..(12): Xaa can be any naturally occurring amino acid
PKRDVTLFLNLXHQEYDWRNYQPSQMSESELQMLASLRWQQNEELEDAGTSHGLSASQVDNCNVSISTSSDDTTTWNSCLPPPVNQGRHYQKEMNPPSPSNPRDWLNMLSPPIVPPSQQPAEQRPDSCESLSVQEEMSGSATAILQL

SEQ ID NO: 763220 - protein, 104 aa, Homo sapiens
  misc_feature (12)..(12): Xaa can be any naturally occurring amino acid
PKRDVTLFLNLXHQEYDWRNYQPSQMSESELQMLASLRWQQNEELEDAGTSHGLSASQVDNCNVSISTSSDDTTTWNSCLPPPVNQGRHYQKEMNPPSPSNPRL

SEQ ID NO: 763221 - protein, 134 aa, Homo sapiens
GPRERKYSPNKADCTYSCSQSTYYASASPTIQSFMNLSGKRLHFHFHKALRFSIPLLCECGRQTRVVSAMLLVLCDGLLSIGKPAIHLHRPTLRNISTLQPCYNLVCRHLDHLFLPQDVTLLHYIDDITLIVSS

SEQ ID NO: 763222 - protein, 146 aa, Homo sapiens [sequence omitted]

SEQ ID NO: 763223 - protein, 135 aa, Homo sapiens
  misc_feature (12)..(12): Xaa can be any naturally occurring amino acid
PKRDVTLFLNLXHQEYDWRNYQPSQMSESELQMLASLRWQQNEELEDAGTSHGLSASQVDNCNVSISTSSDDTTTWNSCLPPPVNQGRHYQKEMNPPSPSNPRDWLNMLSPPIVPPSQQPAEQRPDSCESLSVQG

SEQ ID NO: 763224 - protein, 146 aa, Homo sapiens
  misc_feature (12)..(12): Xaa can be any naturally occurring amino acid
PKRDVTLFLNLXHQEYDWRNYQPSQMSESELQMLASLRWQQNEELEDAGTSHGLSASQVDNCNVSISTSSDDTTTWNSCLPPPVNQGRHYQKEMNPPSPSNPRDWLNMLSPPIVPPSQQPAEQRPDSCESLSVQDISHTPDQAVTR

SEQ ID NO: 763225 - protein, 86 aa, Homo sapiens
  misc_feature (11)..(11): Xaa can be any naturally occurring amino acid
  misc_feature (43)..(44): Xaa can be any naturally occurring amino acid
  misc_feature (46)..(46): Xaa can be any naturally occurring amino acid
  misc_feature (48)..(48): Xaa can be any naturally occurring amino acid
  misc_feature (50)..(53): Xaa can be any naturally occurring amino acid
  misc_feature (58)..(58): Xaa can be any naturally occurring amino acid
  misc_feature (65)..(65): Xaa can be any naturally occurring amino acid
  misc_feature (76)..(76): Xaa can be any naturally occurring amino acid
  misc_feature (78)..(78): Xaa can be any naturally occurring amino acid
  misc_feature (80)..(80): Xaa can be any naturally occurring amino acid
  misc_feature (82)..(83): Xaa can be any naturally occurring amino acid
  misc_feature (85)..(86): Xaa can be any naturally occurring amino acid
PHNPKPNQQTXPHPPPPTHPTPQTPHPNPTPTNPTPTNTPPPXXPXAXKXXXXRNPAXPTNQKEXRLEGKEKGGKXNXPXGXXPXX

SEQ ID NO: 763226 - protein, 105 aa, Homo sapiens
WAPLGGACPSLLGPEPVQGTGRVQVPLWVAACLECPHWCCLWHSHCCTFLVVFKKLDEEGCHSGLGVVANFSPEREPPLATTSVSVSPPSALLQAKAWPGFCLPI

SEQ ID NO: 763227 - protein, 124 aa, Homo sapiens
MLCPLKKPMTLNKRPFQVSPTKAMTTWMIWMMKMMMTMWTARTPCDSNDSDDVDDTDDSHQSDESHHSDESDELVTDFPTDLPATEVFTPVVSPTVRHILMAEGDRCGLWTWRSNNLKKVSAET

SEQ ID NO: 763228 - protein, 124 aa, Homo sapiens; identical to SEQ ID NO: 763227

SEQ ID NO: 763229 - protein, 124 aa, Homo sapiens; identical to SEQ ID NO: 763227

SEQ ID NO: 763230 - protein, 124 aa, Homo sapiens; identical to SEQ ID NO: 763227

SEQ ID NO: 763231 - protein, 124 aa, Homo sapiens; identical to SEQ ID NO: 763227

SEQ ID NO: 763232 - protein, 124 aa, Homo sapiens; identical to SEQ ID NO: 763227

SEQ ID NO: 763233 - protein, 124 aa, Homo sapiens; identical to SEQ ID NO: 763227

SEQ ID NO: 763234 - protein, 124 aa, Homo sapiens; identical to SEQ ID NO: 763227

SEQ ID NO: 763235 - protein, 124 aa, Homo sapiens; identical to SEQ ID NO: 763227

SEQ ID NO: 763236 - protein, 124 aa, Homo sapiens; identical to SEQ ID NO: 763227

SEQ ID NO: 763237 - protein, 124 aa, Homo sapiens; identical to SEQ ID NO: 763227

SEQ ID NO: 763238 - protein, 124 aa, Homo sapiens; identical to SEQ ID NO: 763227

SEQ ID NO: 763239 - protein, 124 aa, Homo sapiens; identical to SEQ ID NO: 763227

SEQ ID NO: 763240 - protein, 201 aa, Homo sapiens
  misc_feature (4)..(5): Xaa can be any naturally occurring amino acid
STRXXGILGLLVQQEEAEHSIVGTRLVSGQLQPSQPNADQGKLTTMRIAVICFCLLGITCAIPVKQADSGKVLRKSRMLCPLKKPMTLNKRPFQVSPTKAMTTWMIWMMKMMMTMWTARTPCDSNDSDDVDDTDDSHQSDESHHSDESDELVTDFPTDLPATEVFTPVVSPTGRHILMAEGDRCGLWTWRSNNLKKVSAET

SEQ ID NO: 763241 - protein, 187 aa, Homo sapiens
  misc_feature (4)..(5): Xaa can be any naturally occurring amino acid
STRXXGILGLLVQQEEAEHSIVGTRLVSGQLQPSQPNADQGKLTTMRIAVICFCLLGITCAIPVKQADSGKVLRKSRPFQVSPTKAMTTWMIWMMKMMMTMWTARTPCDSNDSDDVDDTDDSHQSDESHHSDESDELVTDFPTDLPATEVFTPVVSPTVRHILMAEGDRCGLWTWRSNNLKKVSAET

SEQ ID NO: 763242 - protein, 222 aa, Homo sapiens
MTTWMIWMMKMMMTMWTARTPCDSNDSDDVDDTDDSHQSDESHHSDESDELVTDFPTDLPATEVFTPVVSPTVRHILMAEGDRCGLWTWRSRDITFTHGKRGKLNWWHYKGPSPLAQDLNAPSDWDSRGKDSYETSQLDDQSAETHSHKQSRLYKRKANDESNEHSDVIDSQELSKVSREFHSHEFHSHEDMLVVDPKSKEEDKHLKFRISHELDSASSEVN

SEQ ID NO: 763243 - protein, 124 aa, Homo sapiens; identical to SEQ ID NO: 763227

SEQ ID NO: 763244 - protein, 89 aa, Homo sapiens
  misc_feature (4)..(5): Xaa can be any naturally occurring amino acid
STRXXGILGLLVQQEEAEHSIVGTRLVSGQLQPSQPNADQGKLTTMRIAVICFCLLGITCAIPVKQADSGKVLRKSSFTTNTQMLWPHG

SEQ ID NO: 763245 - protein, 89 aa, Homo sapiens; identical to SEQ ID NO: 763244
  misc_feature (4)..(5): Xaa can be any naturally occurring amino acid

SEQ ID NO: 763246 - protein, 89 aa, Homo sapiens; identical to SEQ ID NO: 763244
  misc_feature (4)..(5): Xaa can be any naturally occurring amino acid

SEQ ID NO: 763247 - protein, 218 aa, Homo sapiens
EQQDEVQYSICRDQTRLRPKLRGLLSHNGRNQGKLTTMRIAVICFAVLDSHPCVLIDHAKRLGRWLAGNVILEEQRRILHSNNSAMMRGGPPLAKTSVHPVSEAESPSPTEMLCPLKKPMTLNKRPFQVSPTKAMTTWMIWMMKMMMTMWTARTPCDSNDSDDVDDTDDSHQSDESHHSDESDELVTDFPTDLPATEVFTPVVSPKVDTRDKVEPKTR

SEQ ID NO: 763248 - protein, 124 aa, Homo sapiens; identical to SEQ ID NO: 763227

SEQ ID NO: 763249 - protein, 124 aa, Homo sapiens; identical to SEQ ID NO: 763227

SEQ ID NO: 763250 - protein, 124 aa, Homo sapiens; identical to SEQ ID NO: 763227

SEQ ID NO: 763251 - protein, 124 aa, Homo sapiens; identical to SEQ ID NO: 763227

SEQ ID NO: 763252 - protein, 124 aa, Homo sapiens; identical to SEQ ID NO: 763227

SEQ ID NO: 763253 - protein, 124 aa, Homo sapiens; identical to SEQ ID NO: 763227

SEQ ID NO: 763254 - protein, 89 aa, Homo sapiens; identical to SEQ ID NO: 763244
  misc_feature (4)..(5): Xaa can be any naturally occurring amino acid

SEQ ID NO: 763255 - protein, 89 aa, Homo sapiens; identical to SEQ ID NO: 763244
  misc_feature (4)..(5): Xaa can be any naturally occurring amino acid

SEQ ID NO: 763256 - protein, 209 aa, Homo sapiens
  misc_feature (4)..(5): Xaa can be any naturally occurring amino acid
STRXXGILGLLVQQEEAEHSIVGTRLVSGQLQPSQPNADQGKLTTMRIAVICFCLLGITCAIPINRLILEDLRTHLRGRISKPHRMLCPLKKPMTLNKRPFQVSPTKAMTTWMIWMMKMMMTMWTARTPCDSNDSDDVDDTDDSHQSDESHHSDESDELVTDFPTDLPATEVFTPVVSPTVRHILMAEGDRCGLWTWRSNNLKKVSAET

SEQ ID NO: 763257 - protein, 151 aa, Homo sapiens
HASPTRPLTCHPVPWDATDRRDITFTHGKRGKLNWWHYKGPSPLAQDLNAPSDWDSRGKDSYETSQLDDQSAETHSHKQSRLYKRKANDESNEHSDVIDSQELSKVSREFHSHEFHSHEDMLVVDPKSKEEDKHLKFRISHELDSASSEVN

SEQ ID NO: 763258 - protein, 131 aa, Homo sapiens
MLCPLKKPMTLNKRPFQVSPTKAMTTWMIWMMKMMMTMWTARTPCDSNDSDDVDDTDDSHQSDESHHSDESDELVTDFPTDLPATEVFTPVVSPTVRHILMAEGDRCGLWTWRSGHNLHIESQEVDCAYKA

SEQ ID NO: 763259 - protein, 89 aa, Homo sapiens; identical to SEQ ID NO: 763244
  misc_feature (4)..(5): Xaa can be any naturally occurring amino acid

SEQ ID NO: 763260 - protein, 89 aa, Homo sapiens; identical to SEQ ID NO: 763244
  misc_feature (4)..(5): Xaa can be any naturally occurring amino acid

SEQ ID NO: 763261 - protein, 205 aa, Homo sapiens
MSRGLQLLLLSCAYSLAPATPEVKVACSEDVDLPCTAPWDPQVPYTVSWVKLLEGGEERMETPQEDHLRGQHYHQKGQNGSFDAPNERPYSLKIRNTTSCNSGTYRCTLQDPDGQRNLSGKVILRVTGCPAQRKEETFKKYRAEIVLLLALVIFYLTLIIFTCKFARLQSIFPDFSKAGMERAFLPVTSPNKHLGLVTPHKTELV

SEQ ID NO: 763262 - protein, 205 aa, Homo sapiens; identical to SEQ ID NO: 763261

SEQ ID NO: 763263 - protein, 207 aa, Homo sapiens
PVGRLLTTRSLFLVAYSLAPATPEVKVACSEDVDLPCTAPWDPQVPYTVSWVKLLEGGEERMETPQEDHLRGQHYHQKGQNGSFDAPNERPYSLKIRNTTSCNSGTYRCTLQDPDGQRNLSGKVILRVTGCPAQRKEETFKKYRAEIVLLLALVIFYLTLIIFTCKFARLQSIFPDFSKAGMERAFLPVTSPNKHLGLVTPHKTELV

SEQ ID NO: 763264 - protein, 205 aa, Homo sapiens; identical to SEQ ID NO: 763261

SEQ ID NO: 763265 - protein, 205 aa, Homo sapiens; identical to SEQ ID NO: 763261

SEQ ID NO: 763266 - protein, 187 aa, Homo sapiens
MSRGLQLLLLSCAYSLAPATPEVKVACSEDVDLPCTAPWDPQVPYTVSWVKLLEGGEERMETPQEDHLRGQHYHQKGQTTSCNSGTYRCTLQDPDGQRNLSGKVILRVTGCPAQRKEETFKKYRAEIVLLLALVIFYLTLIIFTCKFARLQSIFPDFSKAGMERAFLPVTSPNKHLGLVTPHKTELV

SEQ ID NO: 763267 - protein, 861 aa, Homo sapiens
MAQCLTSGNFHSHTYVLGHQHMCEYKKYDRYCNKELFTVNLFYRILNLNYFHPISKKKYCITLKDSQFEIIIQTAVASLVKYCFVSIRIVQTIVRQLHYYSCKSYCLEISEKKRKFYGEMNKMTSKLFSSATEVLWISTAQSSSVCPQLLMPQDVTPFQSLFAKVSNYVSFKSTFYTHIFQILWCTQRQDGKGLPFIDASCSMDQALPMHPCWFFYPHISHSPEALTAIAQMRKLKVSENMQSTQSHAACVCKGWNENPICVSPKSPSTIMVSISFCNQIGWDMSALKDSKKEYLSLYLNLTSMGLLFVFGGVKHYNNNLILFVQWILYYSVKRFMTSQSKLDDSNEDFFKETSMSNKVANKLNFYGVATSELKLVEIEVDIQKYCYNLHLNNTNIYYFYIFIYLWNIDVILKQYFQIILKYIKNIIHYHPIEFFKELSVSLKCEIQSTYFTIEYSVYVSIIYISKLESSKFIFVLNKMKLKFYMNFNFHFRFRRVPLQVYYMGVLCDAEIWGMNESVSACFELAPRAISPDQQRVNKLELHLNFLVEQVTKGKIVVQRQKCSVVYNEPAISLRVQVFTEIYFRKTSNPCLKINVSWVWRHTSIIPATQEAEAGGSLEFRSLRPPGQHRKIPSQFFKMRKKIDKLKHIKILKSLFKQTEIHGSGSSKLKVVGGSTGGVCKEGFYRVNIEVKYEKLFDWQKCGQLHYLNYPGGRSLITQLILSRPPVGGLSLFHFVYAGTLAMGAISAYCSPITKFYTFFLYQGKWGSSPGGFLPPCFPQQNETVPFASVGNLLNKAFLIFLSHLILSYPLLCTLFTCFWNTCVSCTHLLHYLGNPNRRPLGWIGRELLAYVSPLSLYLELS

SEQ ID NO: 763268 - protein, 72 aa, Homo sapiens
APEEAGCACGTVVRGRKITYLKRRSIPENRGRPVFCVPGCGVPGHGVEGAERRDLRASSSGDGALCDCTESA

SEQ ID NO: 763269 - protein, 384 aa, Homo sapiens
ASELGQTTCTFPREDLWSRHKSRAGACHKKRRQLGSQLEMLRPAGLWRLCRRPWAARVPAENLGRREVTSGVSPRGSTSPRTLNIFDRDLKRKQKNWAARQPEPTKFDYLKEEVGSRIADRVYDIPRNFPLALDLGCGRGYIAQYLNKETIGKFFQADIAENALKNSSETEIPTVSVLADEEFLPFKENTFDLVVSSLSLHWVNDLPRALEQIHYILKPDGVFIGAMFGGDTLYELRCSLQLAETEREGGFSPHISPFTAVNDLGHLLGRAGFNTLTVDTDEIQVNYPGMFELMEDLQGMGESNCAWNRKALLHRDTMLAAAAVYREMYRNEDGSVPATYQIYYMIGWKYHESQARPAERGSATVSFGELGKINNLMPPGKKSQ

SEQ ID NO: 763270 - protein, 306 aa, Homo sapiens
ASELGQTTCTFPREDLWSRHKSRAGACHKKRRQLGSQLEMLRPAGLWRLCRRPWAARVPAENLGRREVTSGVSPRGSTSPRTLNIFDRDLKRKQKNWAARQPEPTKFDYLKEEVGSRIADRVYDIPRNFPLALDLGCGRGYIAQYLNKETIGKFFQADIAENALKNSSETEIPTVSVLADEEFLPFKENTFDLVVSSLSLHWVNDLPRALEQIHYILKPDGVFIGAMFGGDTLYELRCSLQLAETEREGGFSPHISPFTAVNDLGHLLGRAGFNTLTVDTDEIQVNYPGMFELMEDLQEQKSRMLT

SEQ ID NO: 763271 - protein, 306 aa, Homo sapiens; identical to SEQ ID NO: 763270

SEQ ID NO: 763272 - protein, 286 aa, Homo sapiens
ASELGQTTCTFPREDLWSRHKSRAGACHKKRRQLGSQLEMLRPAGLWRLCRRPWAARVPAENLGRREVTSGVSPRGSTSPRTLNIFDRDLKRKQKNWAARQPEPTKFDYLKEEVGSRIADRVYDIPRNFPLALDLGCGRGYIAQYLNKETIGKFFQADIAENALKNSSETEIPTVSVLADEEFLPFKENTFDLVVSSLSLHWVNDLPRALEQIHYILKPDGVFIGAMFGGDTLYELRCSLQLAETEREGGFSPHISPFTAVNDLGHLLGRAGFNTLTVGKALIDNV

SEQ ID NO: 763273 - protein, 302 aa, Homo sapiens
ASELGQTTCTFPREDLWSRHKSRAGACHKKRRQLGSQLEMLRPAGLWRLCRRPWAARVPAENLGRREVTSGVSPRGSTSPRTLNIFDRDLKRKQKNWAARQPEPTKFDYLKEEVGSRIADRVYDIPRNFPLALDLGCGRGYIAQYLNKETIGKFFQADIAENALKNSSETEIPTVSVLADEEFLPFKENTFDLVVSSLSLHWVNDLPRALEQIHYILKPDGVFIGAMFGGDTLYELRCSLQLAETEREGGFSPHISPFTAVNDLGHLLGRAGFNTLTVDTDEIQVNYPGMFELMEDLQGKAL

SEQ ID NO: 763274 - protein, 169 aa, Homo sapiens
ASELGQTTCTFPREDLWSRHKSRAGACHKKRRQLGSQLEMLRPAGLWRLCRRPWAARVPAENLGRREVTSGVSPRGSTSPRTLNIFDRDLKRKQKNWAARQPEPTKFDYLKEEVGSRIADRVYDIPRNFPLALDLGCGRGYIAQYLNKETIGKFFQADIAENALFALGE

SEQ ID NO: 763275 - protein, 234 aa, Homo sapiens
ASELGQTTCTFPREDLWSRHKSRAGACHKKRRQLGSQLEMLRPAGLWRLCRRPWAARVPAENLGRREVTSGVSPRGSTSPRTLNIFDRDLKRKQKNWAARQPEPTKFDYLKEEVGSRIADRVYDIPRNFPLALDLGCGRGYIAQYLNKETIGKFFQADIAENALKNSSETEIPTVSVLADEEFLPFKENTFDLVVSSLSLHWVNDLPRALEQMECLSVQCLEATHSMNFGVPYS

SEQ ID NO: 763276 - protein, 286 aa, Homo sapiens; identical to SEQ ID NO: 763272

SEQ ID NO: 763277 - protein, 158 aa, Homo sapiens
MFGGDTLYELRCSLQLAETEREGGFSPHISPFTAVNDLGHLLGRAGFNTLTVDTDEIQVNYPGMFELMEDLQGMGESNCAWNRKALLHRDTMLAAAAVYREMYRNEDGSVPATYQIYYMIGWKYHESQARPAERGSATVSFGELGKINNLMPPGKKSQ

SEQ ID NO: 763278 - protein, 1161 aa, Homo sapiens
QLGRLGPERRGGRALTVCVEASMKLKKQVTVCGAAIFCVAVFSLYLMLDRVQHDPTRHQNGGNFPRSQISVLQNRIEQLEQLLEENHEIISHIKDSVLELTANAEGPPAMLPYYTVNGSWVVPPEPRPSFFSISPQDCQFALGGRGQKPELQMLTVSEELPFDNVDGGVWRQGFDISYDPHDWDAEDLQVFVVPHSHNDPGWIKTFDKYYTEQTQHILNSMVSKLQEDPRRRFLWAEVSFFAKWWDNINVQKRAAVRRLVGNGQLEIATGGWVMPDEANSHYFALIDQLIEGHQWLERNLGATPRSGWAVDPFGYSSTMPYLLRRANLTSMLIQRVHYAIKKHFAATHSLEFMWRQTWDSDSSTDIFCHMMPFYSYDVPHTCGPDPKICCQFDFKRLPGGRINCPWKVPPRAITEANVAERAALLLDQYRKKSQLFRSNVLLVPLGDDFRYDKPQEWDAQFFNYQRLFDFFNSRPNLHVQAQFGTLSDYFDALYKRTGVEPGARPPGFPVLSGDFFSYADREDHYWTGYYTSRPFYKSLDRVLEAHLRGAEVLYSLAAAHARRSGLAGRYPLSDFTLLTEARRTLGLFQHHDAITGTAKEAVVVDYGVRLLRSLVNLKQVIIHAAHYLVLGDKETYHFDPEAPFLQVDDTRLSHDALPERTVIQLDSSPRFVVLFNPLEQERFSMVSLLVNSPRVRVLSEEGQPLAVQISAHWSSATEAVPDVYQVSVPVRLPALGLGVLQLQLGLDGHRTLPSSVRIYLHGRQLSVSRHEAFPLRVIDSGTSDFALSNRYMQVWFSGLTGLLKSIRRVDEEHEQQVDMQVLVYGTRTSKDKSGAYLFLPDGEASPTSPRSPPCCVSLKALSSQRWLRTMSTFTRRSGFTICQGWRGCLWTYHPWWTSGTTSTRSWPCTSIQTSTARVQPRRYLKKLPLQANFYPMPVMAYIQDAQKRLTLHTAQALGVSSLKDGQLEVILDRRLMQDDNRGLGQGLKDNKRTCNRFRLLLERRTVGSEVQDSHSTSYPSLLSHLTSMYLNAPALALPVARMQLPGPGLRSFHPLASSLPCDFHLLNLRTLQAEEDTLPSAETALILHRKGFDCGLEAKNLGFNCTTSQGKVALGSLFHGLDVVFLQPTSLTLLYPLASPSNSTDVYLEPMEIATFRLRLG

SEQ ID NO: 763279 - protein, 119 aa, Homo sapiens
MELFNDGHTKDPLASSLPCDFHLLNLRTLQAEEDTLPSAETALILHRKGFDCGLEAKNLGFNCTTSQGKVALGSLFHGLDVVFLQPTSLTLLYPLASPSNSTDVYLEPMEIATFRLRLG

SEQ ID NO: 763280 - protein, 1169 aa, Homo sapiens
QLGRLGPERRGGRALTVCVEASMKLKKQVTVCGAAIFCVAVFSLYLMLDRVQHDPTRHQNGGNFPRSQISVLQNRIEQLEQLLEENHEIISHIKDSVLELTANAEGPPAMLPYYTVNGSWVVPPEPRPSFFSISPQDCQFALGGRGQKPELQMLTVSEELPFDNVDGGVWRQGFDISYDPHDWDAEDLQVFVVPHSHNDPGWIKTFDKYYTEQTQHILNSMVSKLQEDPRRRFLWAEVSFFAKWWDNINVQKRAAVRRLVGNGQLEIATGGWVMPDEANSHYFALIDQLIEGHQWLERNLGATPRSGWAVDPFGYSSTMPYLLRRANLTSMLIQRVHYAIKKHFAATHSLEFMWRQTWDSDSSTDIFCHMMPFYSYDVPHTCGPDPKICCQFDFKRLPGGRINCPWKVPPRAITEANVAERAALLLDQYRKKSQLFRSNVLLVPLGDDFRYDKPQEWDAQFFNYQRLFDFFNSRPNLHVQAQFGTLSDYFDALYKRTGVEPGARPPGFPVLSGDFFSYADREDHYWTGYYTSRPFYKSLDRVLEAHLRGAEVLYSLAAAHARRSGLAGRYPLSDFTLLTEARRTLGLFQHHDAITGTAKEAVVVDYGVRLLRSLVNLKQVIIHAAHYLVLGDKETYHFDPEAPFLQVDDTRLSHDALPERTVIQLDSSPRFVVLFNPLEQERFSMVSLLVNSPRVRVLSEEGQPLAVQISAHWSSATEAVPDVYQVSVPVRLPALGLGVLQLQLGLDGHRTLPSSVRIYLHGRQLSVSRHEAFPLRVIDSGTSDFALSNRYMQVWFSGLTGLLKGQGCVFWQSIRRVDEEHEQQVDMQVLVYGTRTSKDKSGAYLFLPDGEASPTSPRSPPCCVSLKALSSQRWLRTMSTFTRRSGFTICQGWRGCLWTYHPWWTSGTTSTRSWPCTSIQTSTARVQPRRYLKKLPLQANFYPMPVMAYIQDAQKRLTLHTAQALGVSSLKDGQLEVILDRRLMQDDNRGLGQGLKDNKRTCNRFRLLLERRTVGSEVQDSHSTSYPSLLSHLTSMYLNAPALALPVARMQLPGPGLRSFHPLASSLPCDFHLLNLRTLQAEEDTLPSAETALILHRKGFDCGLEAKNLGFNCTTSQGKVALGSLFHGLDVVFLQPTSLTLLYPLASPSNSTDVYLEPMEIATFRLRLG

SEQ ID NO: 763281 - protein, 1109 aa, Homo sapiens
QLGRLGPERRGGRALTVCVEASMKLKKQVTVCGAAIFCVAVFSLYLMLDRVQHDPTRHQNGGNFPRSQISVLQNRIEQLEQLLEENHEIISHIKDSVLELTANAEGPPAMLPYYTVNGSWVVPPEPRPSFFSISPQDCQFALGGRGQKPELQMLTVSEELPFDNVDGGVWRQGFDISYDPHDWDAEDLQVFVVPHSHNDPGWIKTFDKYYTEQTQHILNSMVSKLQEDPRRRFLWAEVSFFAKWWDNINVQKRAAVRRLVGNGQLEIATGGWVMPDEANSHYFALIDQLIEGHQWLERNLGATPRSGWAVDPFGYSSTMPYLLRRANLTSMLIQRVHYAIKKHFAATHSLEFMWRQTWDSDSSTDIFCHMMPFYSYDVPHTCGPDPKICCQFDFKRLPGGRINCPWKVPPRAITEANVAERAALLLDQYRKKSQLFRSNVLLVPLGDDFRYDKPQEWDAQFFNYQRLFDFFNSRPNLHVQAQFGTLSDYFDALYKRTGVEPGARPPGFPVLSGDFFSYADREDHYWTGYYTSRPFYKSLDRVLEAHLRGAEVLYSLAAAHARRSGLAGRYPLSDFTLLTEARRTLGLFQHHDAITGTAKEAVVVDYGVRLLRSLVNLKQVIIHAAHYLVLGDKETYHFDPEAPFLQVDDTRLSHDALPERTVIQLDSSPRFVVLFNPLEQERFSMVSLLVNSPRVRVLSEEGQPLAVQISAHWSSATEAVPDVYQVSVPVRLPALGLGVLQLQLGLDGHRTLPSSVRIYLHGRQLSVSRHEAFPLRVIDSGTSDFALSNRYMQVWFSGLTGLLKGQGCVFWQSIRRVDEEHEQQVDMQVLVYGTRTSKDKSGAYLFLPDGEASPTSPRSPPCCVSLKALSSQRWLRTMSTFTRRSGFTICQGWRGCLWTYHPWWTSGTTSTRSWPCTSIQTSTASGIFFTDLNGFQVQPRRYLKKLPLQANFYPMPVMAYIQAHSYPSLLSHLTSMYLNAPALALPVARMQLPGPGLRSFHPLASSLPCDFHLLNLRTLQAEEDTLPSAETALILHRKGFDCGLEAKNLGFNCTTSQGKVALGSLFHGLDVVFLQPTSLTLLYPLASPSNSTDVYLEPMEIATFRLRLG

SEQ ID NO: 763282 - protein, 1109 aa, Homo sapiens; identical to SEQ ID NO: 763281

SEQ ID NO: 763283 - protein, 183 aa, Homo sapiens
HAEKGLETVARRGGSLGRIPRQPNGCTLFMTFLPMKALKDPLACLHVGSALPSVLPNIFLSEGKNKKKSWQERKGKDRETGRERGPNFLSLVVAELALVKAEREGLTYVPLPGEGKGGRHDIDLNVGDLKGPYVPTLCFASNRQPGTFEVGLAQWGAGFCGDKMLTGAGEGGQGAAETLLGML

SEQ ID NO: 763284 - protein, 756 aa, Homo sapiens
MLGICRGRRKFLAASLSLLCIPAITWIYLFSGSFEDGKPVSLSPLESQAHSPRYTASSQRERESLEVRMREVEEENRALRRQLSLAQGRAPSHRRGNHSKTYSMEEGTGDSENLRAGIVAGNSSECGQQPVVEKCETIHVAIVCAGYNASRDVVTLVKSVLFHRRNPLHFHLIADSIAEQILATLFQTWMVPAVRVDFYNADELKSEVSWIPNKHYSGIYGLMKLVLTKTLPANLERVIVLDTDITFATDIAELWAVFHKFKGQQVLGLVENQSDWYLGNLWKNHRPWPALGRGYNTGVILLLLDKLRKMKWEQMWRLTAERELMGMLSTSLADQDIFNAVIKQNPFLVYQLPCFWNVQLSDHTRSEQCYRDVSDLKVIHWNSPKKLRVKNKHVEFFRNLYLTFLEYDGNLLRRELFGCPSEADVNSENLQKQLSELDEDDLCYEFRRERFTVHRTHLYFLHYEYEPAADSTDVTLVAQLSMDRLQMLEAICKHWEGPISLALYLSDAEAQQFLRYAQGSEVLMSRHNVGYHIVYKEGQFYPVNLLRNVAMKHISTPYMFLSDIDFLPMYGLYEYLRKSVIQLDLANTKKAMIVPAFETLRYRLSFPKSKAELLSMLDMGTLFTFRYHVWTKGHAPTNFAKWRTATTPYRVEWEADFEPYVVVRRDCPEYDRRFVGFGWNKVAHIMELDVQEYEFIVLPNAYMIHMPHAPSFDITKFRSNKQYRICLKTLKEEFQQDMSRRYGFAALKYLTAENNS

SEQ ID NO: 763285 - protein, 214 aa, Homo sapiens
MLGICRGRRKFLAASLSLLCIPAITWIYLFSGSFEDGKPVSLSPLESQAHSPRYTASSQRERESLEVRMREVEEENRALRRQLSLAQGRAPSHRRGNHSKTYSMEEGTGDSENLRAGIVAGNSSECGQQPVVEKCETIHVAIVCAGYNASRDVVTLVKSVLFHRRNPLHFHLIADSIAEQILATLFQTWMVPAVRVDFYNADELKVWAGGEALP

SEQ ID NO: 763286 - protein, 111 aa, Homo sapiens
GRARLAGLFAGRPCPEGTNRLGAREVESAPAVAPWTQPEADPGPCPCGAPLARKSPPGREQLQAAAPEEEEEGTVLSLGDPDPRRGIWSRGQSRTLCLAPPLRVGQRLPGP

SEQ ID NO: 763287 - protein, 756 aa, Homo sapiens; identical to SEQ ID NO: 763284

SEQ ID NO: 763288 - protein, 270 aa, Homo sapiens
MLGICRGRRKFLAASLSLLCIPAITWIYLFSGSFEDGKPVSLSPLESQAHSPRYTASSQRERESLEVRMREVEEENRALRRQLSLAQGRAPSHRRGNHSKTYSMEEGTGDSENLRAGIVAGNSSECGQQPVVEKCETIHVAIVCAGYNASRDVVTLVKSVLFHRRNPLHFHLIADSIAEQILATLFQTWMVPAVRVDFYNADELKSEVSWIPNKHYSGIYGLMKLVLTKTLPANLERVIVLDTDITFATDIAELWAVFHKFKDENGGRMY

SEQ ID NO: 763289 - protein, 258 aa, Homo sapiens
MTTSIRQFTSSSSIKGSSGLGGGSSRTSCRLSGGLGAGSCRLGSAGGLGSTLGGSSYSSCYSFGSGGGYGSSFGGVDGLLAGGEKATMQNLNDRLASYLDKVRALEEANTELEVKIRDWYQRQAPGPARDYSQYYRTIEELQNKILTATVDNANILLQIDNARLAADDFRTKFETEQALRLSVEADINGLRRVLDELTLARADLEMQIENLKEELAYLKKNHEGGDERPAKARWVVRSMWRWTACPRRGPEPHPQRDA

SEQ ID NO: 763290 - protein, 140 aa, Homo sapiens
MACFWALGCGKLVRRHTLSTVRFGRRPDLGEGSRLTPPCPVSCLQTEELNREVATNSELVQSGKSEISELRRTMQALEIELQSQLSMKASLEGNLAETENRLLRAAVPDPGADWQRGGAAVPSFAARWSSRTRNTKSCWM

SEQ ID NO: 763291 - protein, 100 aa, Homo sapiens
  misc_feature (1)..(1): Xaa can be any naturally occurring amino acid
  misc_feature (13)..(13): Xaa can be any naturally occurring amino acid
XAGNWDEAPYLLXAGGRGCPPDSVQERTGDHPSGAYHCGRGPGWQGHLLPRAGPPDHPLRTQLPRPATQEAGRQPPHLPHSLRPLQPQPPASVPSPCFLA

SEQ ID NO: 763292 - protein, 162 aa, Homo sapiens
  misc_feature (1)..(1): Xaa can be any naturally occurring amino acid
  misc_feature (5)..(5): Xaa can be any naturally occurring amino acid
XSNSXSVPQRMSNTELEVKIRDWYQRQAPGPARDYSQYYRTIEELQNKILTATVDNANILLQIDNARLAADDFRTKFETEQALRLSVEADINGLRRVLDELTLARADLEMQIENLKEELAYLKKNHEGGDERPAKARWVVRSMWRWTACPRRGPEPHPQRDA

SEQ ID NO: 763293 - protein, 344 aa, Homo sapiens
  misc_feature (8)..(8): Xaa can be any naturally occurring amino acid
GKGWDTRXPPRCLDIVDPGVALLSSPSPVCLPPAAATMTTSIRQFTSSSSIKGSSGLGGGSSRTSCRLSGGLGAGSCRLGSAGGLGSTLGGSSYSSCYSFGSGGGYGSSFGGVDGLLAGGEKATMQNLNDRLASYLDKVRALEEANTELEVKIRDWYQRQAPGPARDYSQYYRTIEELQNKILTATVDNANILLQIDNARLAADDFRTKFETEQALRLSVEADINGLRRVLDELTLARADLEMQIENLKEELAYLKKNHEGGDERPAKARWVVRSMWRWTACPRRGPEPHPQRDAWRKPRCPDGSPKTGTNAGAPLGGAGKGNWPATGWRRPQNGTGRPLAPQR

SEQ ID NO: 763294 - protein, 258 aa, Homo sapiens; identical to SEQ ID NO: 763289

SEQ ID NO: 763295 - protein, 324 aa, Homo sapiens
SHLGAGRWPVVMKAQGMETEEQACCNRYAHLVAYKGSGRTPAALHNFGAPLLSSPSPVCLPPAAATMTTSIRQFTSSSSIKGSSGLGGGSSRTSCRLSGGLGAGSCRLGSAGGLGSTLGGSSYSSCYSFGSGGGYGSSFGGVDGLLAGGEKATMQNLNDRLASYLDKVRALEEANTELEVKIRDWYQRQAPGPARDYSQYYRTIEELQNKILTATVDNANILLQIDNARLAADDFRTKFETEQALRLSVEADINGLRRVLDELTLARADLEMQIENLKEELAYLKKNHEGGDERPAKARWVVRSMWRWTACPRRGPEPHPQRDA

SEQ ID NO: 763296 - protein, 258 aa, Homo sapiens; identical to SEQ ID NO: 763289

SEQ ID NO: 763297 - protein, 258 aa, Homo sapiens; identical to SEQ ID NO: 763289

SEQ ID NO: 763298 - protein, 258 aa, Homo sapiens; identical to SEQ ID NO: 763289

SEQ ID NO: 763299 - protein, 258 aa, Homo sapiens; identical to SEQ ID NO: 763289

SEQ ID NO: 763300 - protein, 258 aa, Homo sapiens; identical to SEQ ID NO: 763289

SEQ ID NO: 763301 - protein, 258 aa, Homo sapiens; identical to SEQ ID NO: 763289

SEQ ID NO: 763302 - protein, 258 aa, Homo sapiens; identical to SEQ ID NO: 763289

SEQ ID NO: 763303 - protein, 258 aa, Homo sapiens; identical to SEQ ID NO: 763289

SEQ ID NO: 763304 - protein, 245 aa, Homo sapiens
MTTSIRQFTSSSSIKGSSGLGGGSSRTSCRLSGGLGAGSCRLGSAGGLGSTLGGSSYSSCYSFGSGGGYGSSFGGVDGLLAGGEKATMQNLNDRPNTELEVKIRDWYQRQAPGPARDYSQYYRTIEELQNKILTATVDNANILLQIDNARLAADDFRTKFETEQALRLSVEADINGLRRVLDELTLARADLEMQIENLKEELAYLKKNHEGGDERPAKARWVVRSMWRWTACPRRGPEPHPQRDA

SEQ ID NO: 763305 - protein, 258 aa, Homo sapiens; identical to SEQ ID NO: 763289

SEQ ID NO: 763306 - protein, 258 aa, Homo sapiens; identical to SEQ ID NO: 763289

SEQ ID NO: 763307 - protein, 225 aa, Homo sapiens
MTTSIRQFTSSSSIKGSSGLGGGSSRTSCRLSGGLGAGSCRLGSAGGLGSTLGGSSYSSCYSFGSGGGYGSSFGGVDGLLAGGEKATMQNLNDRLASYLDKVRALEEANTELEVKIRDWYQRQAPGPARDYSQYYRTIEELQNKILTATVDNANILLQIDNARLAADDFRTKFETEQALRLSVEADINGLRRVLDELTLARADLEMQIENLKEELAYLKKNHEGG

SEQ ID NO: 763308 - protein, 362 aa, Homo sapiens
MTTSIRQFTSSSSIKGSSGLGGGSSRTSCRLSGGLGAGSCRLGSAGGLGSTLGGSSYSSCYSFGSGGGYGSSFGGVDGLLAGGEKATMQNLNDRLASYLDKVRALEEANTELEVKIRDWYQRQAPGPARDYSQYYRTIEELQNKILTATVDNANILLQIDNARLAADDFRTKFETEQALRLSVEADINGLRRVLDELTLARADLEMQIENLKEELAYLKKNHEGDQCGDGPLAPGVDLSRILNEMRDQYEKMAEKNRKDAEDWFFSKTEELNREVATNSELVQSGKSEISELRRTMQALEIELQSQLSMKASLEGNLAETENRLLRAAVPDPGADWQRGGAAVPSFAARWSSRTRNTKSCWM

SEQ ID NO: 763309 - protein, 173 aa, Homo sapiens
MTTSIRQFTSSSSIKGSSGLGGGSSRTSCRLSGGLGAGSCRLGSAGGLGSTLGGSSYSSCYSFGSGGGYGSSFGGVDGLLAGGEKATMQNLNDRRLSVEADINGLRRVLDELTLARADLEMQIENLKEELAYLKKNHEGGDERPAKARWVVRSMWRWTACPRRGPEPHPQRDA

SEQ ID NO: 763310 - protein, 258 aa, Homo sapiens; identical to SEQ ID NO: 763289

SEQ ID NO: 763311 - protein, 274 aa, Homo sapiens
MTTSIRQFTSSSSIKGSSGLGGGSSRTSCRLSGGLGAGSCRLGSAGGLGSTLGGSSYSSCYSFGSGGGYGSSFGGVDGLLAGGEKATMQNLNDRLASYLDKVRALEEANTELEVKIRDWYQRQAPGPARDYSQYYRTIEELQNKILTATVDNANILLQIDNARLAADDFRTKFETEQALRLSVEADINGLRRVLDELTLARADLEMQIENLKEELAYLKKNHEGGDERPAKARWVVRSMWRWTACPRRGPEPHPQRDAWRLPPTAACWRERMPT

SEQ ID NO: 763312 - protein, 274 aa, Homo sapiens; identical to SEQ ID NO: 763311

SEQ ID NO: 763313 - protein, 281 aa, Homo sapiens
MTTSIRQFTSSSSIKGSSGLGGGSSRTSCRLSGGLGAGSCRLGSAGGLGSTLGGSSYSSCYSFGSGGGYGSSFGGVDGLLAGGEKATMQNLNDRLASYLDKVRALEEANTELEVKIRDWYQRQAPGPARDYSQYYRTIEELQNKILTATVDNANILLQIDNARLAADDFRTKFETEQALRLSVEADINGLRRVLDELTLARADLEMQIENLKEELAYLKKNHEGGDERPAKARWVVRSMWRWTACPRRGPEPHPQRDACRLEMGNRGAGGSEREDGGPGWG

SEQ ID NO: 763314 - protein, 94 aa, Homo sapiens
KPPGTPELEGGSLTPTQLRCEMEQQNQEYKILLDVKTRLEQEIATYRRLLEGEDAHLTQYKKEPVTTRQVRTIVEEVQDGKVISSREQVHQTTR

SEQ ID NO: 763315 - protein, 290 aa, Homo sapiens
MTTSIRQFTSSSSIKGSSGLGGGSSRTSCRLSGGLGAGSCRLGSAGGLGSTLGGSSYSSCYSFGSGGGYGSSFGGVDGLLAGGEKATMQNLNDRLASYLDKVRALEEANTELEVKIRDWYQRQAPGPARDYSQYYRTIEELQNKILTATVDNANILLQIDNARLAADDFRTKFETEQALRLSVEADINGLRRVLDELTLARADLEMQIGDERPAKARWVVRSMWRWTACPRRGPEPHPQRDAWVPAPAGWDLLAAWAAPSGVAATPAATALALVVAMAAALGVLMGCGWR

SEQ ID NO: 763316 - protein, 83 aa, Homo sapiens
KIRLGTRLVLIGRGSLQPFSCVPASCRRHHDHLHPPVHLLQLHQGLLRPGGRLVPHLLPAVWRPGCRLLQAGICWRPGQHPRG

SEQ ID NO: 763317 - protein, 41 aa, Homo sapiens
MEQQNQEYKILLDVKTRLEQEIATYRRLLEGEDAQVSGGAW

SEQ ID NO: 763318 - protein, 208 aa, Homo sapiens
PGGEFGTRPNDRLASYLDKVRALEEANTELEVKIRDWYQRQAPGPARDYSQYYRTIEELQNKILTATVDNANILLQIDNARLAADDFRTKFETEQALRLSVEADINGLRRVLDELTLARADLEMQIGDERPAKARWVVRSMWRWTACPRRGPEPHPQRDAWVPAPAGWDLLAAWAAPSGVAATPAATALALVVAMAAALGVLMGCGWR

SEQ ID NO: 763319 - protein, 258 aa, Homo sapiens; identical to SEQ ID NO: 763289

SEQ ID NO: 763320 - protein, 140 aa, Homo sapiens; identical to SEQ ID NO: 763290

SEQ ID NO: 763321 - protein, 245 aa, Homo sapiens
EDSSMEKDPRKGLLTSFTSSSSIKGSSGLGGGSSRTSCRLSGGLGAGSCRLGSAGGLGSTLGGSSYSSCYSFGSGGGYGSSFGGVDGLLAGGEKATMQNLNDRLASYLDKVRALEEANTELEVKIRDWYQRQAPGPARDYSQYYRTIEELQNKILTATVDNANILLQIDNARLAADDFRTKFETEQALRLSVEADINGLRRVLDELTLARADLEMQIENLKEELAYLKKNHEGAETTRGITPGID

SEQ ID NO: 763322 - protein, 236 aa, Homo sapiens
PGGEFGTRPNDRLASYLDKVRALEEANTELEVKIRDWYQRQAPGPARDYSQYYRTIEELQNKILTATVDNANILLQIDNARLAADDFRTKFETEQALRLSVEADINGLRRVLDELTLARADLEMQIGDERPAKARWVVRSMWRWTACPRRGPEPHPQRDAWVPAPAGWDLLAAWAAPSGVAATPAATALALVVAMAAALGVLMGCWLEVRRPGLSSLSPLLQSLPHASLPDDNKAC

SEQ ID NO: 763323 - protein, 258 aa, Homo sapiens; identical to SEQ ID NO: 763289

SEQ ID NO: 763324 - protein, 258 aa, Homo sapiens; identical to SEQ ID NO: 763289

SEQ ID NO: 763325 - protein, 258 aa, Homo sapiens; identical to SEQ ID NO: 763289

SEQ ID NO: 763326 - protein, 428 aa, Homo sapiens
SHLGAGRWPVVMKAQGMETEEQACCNRYAHLVAYKGSGRTPAALHNFGAPLLSSPSPVCLPPAAATMTTSIRQFTSSSSIKGSSGLGGGSSRTSCRLSGGLGAGSCRLGSAGGLGSTLGGSSYSSCYSFGSGGGYGSSFGGVDGLLAGGEKATMQNLNDRLASYLDKVRALEEANTELEVKIRDWYQRQAPGPARDYSQYYRTIEELQNKILTATVDNANILLQIDNARLAADDFRTKFETEQALRLSVEADINGLRRVLDELTLARADLEMQIENLKEELAYLKKNHEGDQCGDGPLAPGVDLSRILNEMRDQYEKMAEKNRKDAEDWFFSKTEELNREVATNSELVQSGKSEISELRRTMQALEIELQSQLSMKASLEGNLAETENRLLRAAVPDPGADWQRGGAAVPSFAARWSSRTRNTKSCWM

SEQ ID NO: 763327 - protein, 238 aa, Homo sapiens
MTTSIRQFTSSSSIKGSSGLGGGSSRTSCRLSGGLGAGSCRLGSAGGLGSTLGGSSYSSCYSFGSGGGYGSSFGGVDGLLAGGEKATMQNLNDRLASYLDKVRALEEANTELEVKIRDWYQRQAPGPARDYSQYYRTIEELQNKILTATVDNANILLQIDNARLAADDFRTKVLDELTLARADLEMQIENLKEELAYLKKNHEGGDERPAKARWVVRSMWRWTACPRRGPEPHPQRDA

SEQ ID NO: 763328 - protein, 242 aa, Homo sapiens
MTTSIRQFTSSSSIKGSSGLGGGSSRTSCRLSGGLGAGSCRLGSAGGLGSTLGGSSYSSCYSFGSGGGYGSSFGGVDGLLAGGEKATMQNLNDRLASYLDKVRALEEANTELEVKIRDWYQRQAPGHQYEKMAEKNRKDAEDWFFSKTEELNREVATNSELVQSGKSEISELRRTMQALEIELQSQLSMKASLEGNLAETENRLLRAAVPDPGADWQRGGAAVPSFAARWSSRTRNTKSCWM

SEQ ID NO: 763329 - protein, 109 aa, Homo sapiens
MAEKNADARMVFSKTEELNREVATNSELVQSGKSEISELRRTMQALEIELQSQLSMKASLEGNLAETENRLLRAAVPDPGADWQRGGAAVPSFAARWSSRTRNTKSCWM

SEQ ID NO: 763330 - protein, 307 aa, Homo sapiens
MTTSIRQFTSSSSIKGSSGLGGGSSRTSCRLSGGLGAGSCRLGSAGGLGSTLGGSSYSSCYSFGSGGGYGSSFGGVDGLLAGGEKATMQNLNDRLASYLDKVRALEEANTELEVKIRDWYQRQAPGPARDYSQYYRTIEELQNKILTATVDNANILLQIDNARLAADDFRTKFETEQALRLSVEADINGLRRVLDELTLARADLEMQIENLKEELAYLKKNHEGGDERPAKARWVVRSMWRWTACPRRGPEPHPQRDAWRKPRCPDGSPKTGTNAGAPLGGAGKGNWPATGWRRPQNGTGRPLAPQR

SEQ ID NO: 763331 - protein, 236 aa, Homo sapiens
MTTSIRQFTSSSSIKGSSGLGGGSSRTSCRLSGGLGAGSCRLGSAGGLGSTLGGSSYSSCYSFGSGGGYGSSFGGVDGLLAGGEKATMQNLNDRLASYLDKVRALEEANTELEVKIRDWYQRQAPGPARDYSQYYRTIEELQNKILTATVDNANILLQIDNARLAADDFRTKFETEQALRLSVEADINGLRRVLDELTLARADLEMQIENLKEELAYLKKNHEGAETTRGITPGID

SEQ ID NO: 763332 - protein, 96 aa, Homo sapiens
KLVRRHTLSTVRFGRRPDLGEGSRLTPPCPVSCLQTEELNREVATNSELVQSGKSEISELRRTMQALEIELQSQLSMVGTVLCMGEGPEEGIDHPH

SEQ ID NO: 763333 - protein, 215 aa, Homo sapiens
MAALRVLLSCARGPLRPPVRCPAWRPFASGANFEYIIAEKRGKNNTVGLIQLNRPKALNALCDGLIDELNQALKIFEEDPAVGAIVLTGGDKAFAAGADIKEMQNLSFQDCYSSKFLKHWDHLTQVKKPVIAAVNGYAFGGGCELAMMCDIIYAGEKAQFAQPEILIGTIPGAGGTQRLTRAVGKSLAMEMVLTGDRISAPGRQASRSCQQDLSC

SEQ ID NO: 763334 - protein, 215 aa, Homo sapiens; identical to SEQ ID NO: 763333

SEQ ID NO: 763335 - protein, 215 aa, Homo sapiens; identical to SEQ ID NO: 763333

SEQ ID NO: 763336 - protein, 200 aa, Homo sapiens
GWYRPGGTDRPFASGANFEYIIAEKRGKNNTVGLIQLNRPKALNALCDGLIDELNQALKIFEEDPAVGAIVLTGGDKAFAAGADIKEMQNLSFQDCYSSKFLKHWDHLTQVKKPVIAAVNGYAFGGGCELAMMCDIIYAGEKAQFAQPEILIGTIPGAGGTQRLTRAVGKSLAMEMVLTGDRISAPGRQASRSCQQDLSC

SEQ ID NO: 763337 - protein, 113 aa, Homo sapiens
MQNLSFQDCYSSKFLKHWDHLTQVKKPVIAAVNGYAFGGGCELAMMCDIIYAGEKAQFAQPEILIGTIPGAGGTQRLTRAVGKSLAMEMVLTGDRISAPGRQASRSCQQDLSC

SEQ ID NO: 763338 - protein, 215 aa, Homo sapiens; identical to SEQ ID NO: 763333

SEQ ID NO: 763339 - protein, 215 aa, Homo sapiens; identical to SEQ ID NO: 763333

SEQ ID NO: 763340 - protein, 297 aa, Homo sapiens
  misc_feature (156)..(156): Xaa can be any naturally occurring amino acid
MAALRVLLSCARGPLRPPVRCPAWRPFASGANFEYIIAEKRGKNNTVGLIQLNRPKALNALCDGLIDELNQALKIFEEDPAVGAIVLTGGDKAFAAGADIKEMQNLSFQDCYSSKFLKHWDHLTQVKKPVIAAVNGYAFGGGCEHAMMYVEDRRRXQMIEYPNVTQAKENEMEPFRKNINTQKDTQIREKVSKQQKDDRCAEPNAQPKHQIKQSLVSKICPVETLVEEAIQCAEKIASNSKIVVAMAKESVNAAFEMTLTEGSKLEKKLFYSTFATDDRKEGMTAFVEKRKANFKDQ

SEQ ID NO: 763341 - protein, 92 aa, Homo sapiens
GLQEFGRAGLVSKICPVETLVEEAIQCAEKIASNSKIVVAMAKESVNAAFEMTLTEGSKLEKKLFYSTFATDDRKEGMTAFVEKRKANFKDQ

SEQ ID NO: 763342 - protein, 215 aa, Homo sapiens; identical to SEQ ID NO: 763333

SEQ ID NO: 763343 - protein, 113 aa, Homo sapiens
CLAASAVGAVASLAHMSESTVTAVPRSLSTQEGARAALPVWKPPLLSVQRLGCSSHAAPQRPLTREGIDKCCFCTSLTDFLVFQVLSARFVLLRHWWKKPSSVQKKLPAILKL

SEQ ID NO: 763344 - protein, 137 aa, Homo sapiens
IFRAWLSSSIRPSQSALRALGGSVGSPVLLGSRWRWRWSSPVTGSQPQDAKQAGLVSKICPVETLVEEAIQCAEKIASNSKIVVAMAKESVNAAFEMTLTEGSKLEKKLFYSTFATDDRKEGMTAFVEKRKANFKDQ

SEQ ID NO: 763345 - protein, 225 aa, Homo sapiens
MSTRPSVQRAMAALRVLLSCARGPLRPPVRCPAWRPFASGANFEYIIAEKRGKNNTVGLIQLNRPKALNALCDGLIDELNQALKIFEEDPAVGAIVLTGGDKAFAAGADIKEMQNLSFQDCYSSKFLKHWDHLTQVKKPVIAAVNGYAFGGGCELAMMCDIIYAGEKAQFAQPEILIGTIPGAGGTQRLTRAVGKSLAMEMVLTGDRISAPGRQASRSCQQDLSC

SEQ ID NO: 763346 - protein, 215 aa, Homo sapiens; identical to SEQ ID NO: 763333

SEQ ID NO: 763347 - protein, 215 aa, Homo sapiens; identical to SEQ ID NO: 763333

SEQ ID NO: 763348 - protein, 215 aa, Homo sapiens; identical to SEQ ID NO: 763333

SEQ ID NO: 763349 - protein, 215 aa, Homo sapiens; identical to SEQ ID NO: 763333

SEQ ID NO: 763350 - protein, 209 aa, Homo sapiens
MVIGRNAVCALRGAEAFAVAASVGANFEYIIAEKRGKNNTVGLIQLNRPKALNALCDGLIDELNQALKIFEEDPAVGAIVLTGGDKAFAAGADIKEMQNLSFQDCYSSKFLKHWDHLTQVKKPVIAAVNGYAFGGGCELAMMCDIIYAGEKAQFAQPEILIGTIPGAGGTQRLTRAVGKSLAMEMVLTGDRISAPGRQASRSCQQDLSC

SEQ ID NO: 763351 - protein, 215 aa, Homo sapiens; identical to SEQ ID NO: 763333

SEQ ID NO: 763352 - protein, 126 aa, Homo sapiens
SFPLLLAGADIKEMQNLSFQDCYSSKFLKHWDHLTQVKKPVIAAVNGYAFGGGCELAMMCDIIYAGEKAQFAQPEILIGTIPGAGGTQRLTRAVGKSLAMEMVLTGDRISAPGRQASRSCQQDLSC

SEQ ID NO: 763353 - protein, 218 aa, Homo sapiens
VTEDVRRETQRQRRGRQPPSLGGALSSPAPAPTLSGGLLKPSAPTPGSPWKPAVPQEEQEEVEVGLNAHGAPGDPCSPIHAPSARALDGHRAGIGPLHAGADIKEMQNLSFQDCYSSKFLKHWDHLTQVKKPVIAAVNGYAFGGGCELAMMCDIIYAGEKAQFAQPEILIGTIPGAGGTQRLTRAVGKSLAMEMVLTGDRISAPGRQASRSCQQDLSC

SEQ ID NO: 763354 - protein, 173 aa, Homo sapiens
LPLMFPGSCAAWPLTPGPSLRAYLKPLGICWLHSCDVFLGSLITVPAMTSPSLQVRAAPRDSPVLLGSRWRWRWSSPVTGSQPQDAKQAGLVSKICPVETLVEEAIQCAEKIASNSKIVVAMAKESVNAAFEMTLTEGSKLEKKLFYSTFATDDRKEGMTAFVEKRKANFKDQ

SEQ ID NO: 763355 - protein, 270 aa, Homo sapiens
  misc_feature (129)..(129): Xaa can be any naturally occurring amino acid
MAALRVLLSCARGPLRPPVRCPAWRPFASALNALCDGLIDELNQALKIFEEDPAVGAIVLTGGDKAFAAGADIKEMQNLSFQDCYSSKFLKHWDHLTQVKKPVIAAVNGYAFGGGCEHAMMYVEDRRRXQMIEYPNVTQAKENEMEPFRKNINTQKDTQIREKVSKQQKDDRCAEPNAQPKHQIKQSLVSKICPVETLVEEAIQCAEKIASNSKIVVAMAKESVNAAFEMTLTEGSKLEKKLFYSTFATDDRKEGMTAFVEKRKANFKDQ

SEQ ID NO: 763356 - protein, 215 aa, Homo sapiens; identical to SEQ ID NO: 763333

SEQ ID NO: 763357 - protein, 174 aa, Homo sapiens
MAALRVLLSCARGPLRPPVRCPAWRPFASGANFEYIIAEKRGKNNTVGLIQLNRPKALNALCDGLIDELNQALKIFEEDPAVGAIVLTGGDKAFAAGADIKEMQNLSFQDCYSSKFLKHWDHLTQVKKPVIAAVNGYAFGGGCELAMMCDIIYAGEKAQFAQPEMERTSAACQF

SEQ ID NO: 763358 - protein, 175 aa, Homo sapiens
DVFLGSLITVPAMTSPSLQVRAAPRDSPVLLGSRWRWRWSSPVTGSQPQDAKQAGMGWGCPQEPPGNPGWEPHRNPGRHPGVPLGGAPQKPGAASRCPPHGCPTETLSCIQLSPSWEPHRNPELHPGVPHGGAPQKPRAASRCPPRGSPTETPGSIQVPPRWLHELLGPEDLGED

SEQ ID NO: 763359 - protein, 98 aa, Homo sapiens
MDCCASRGCSVPTGPATTICSSDKSCRCGVCLPSTCPHTVWLLEPTCCDNCPPPCHIPQPCVPTCFLLNSCQPTPGLETLNLTTFTQPCCEPCLPRGC

SEQ ID NO: 763360 - protein, 181 aa, Homo sapiens
MTGVSCFCHYTSHPLHHLLCSYKDPKKWNHRIADLRKQTEELSERKYDMNIMNSTGEDLQLDKSTLSARAVKAKGPVMIPYPFFQSHVEDFYVEGLPKGIFFFFFFLRWSFHSYRPGWGAMAQPCWSLQPLPPGFKKFSCLSLPSHWDYRCPPPYQANFCIFSGDAVSPCWPGQSRTPDVK

SEQ ID NO: 763361 - protein, 68 aa, Homo sapiens
MVFQDSQEGAHIRRETVSKSVCAEPWRHQRARDPAPTNFPLKCQKQRGASTSSGQHGDRVNLVFFIGE

SEQ ID NO: 763362 - protein, 75 aa, Homo sapiens
VPAMAPCCLRHQVWMYGSSPWATPDLTLPSHRPIMASCSPHAPIHQEDALHGHPMLPVAISLHPCTEPLLQGEQP

SEQ ID NO: 763363 - protein, 166 aa, Homo sapiens
MAQTSSYFMLISCLMFLSQSQGQEAQTELPQARISCPEGTNAYRSYCYYFNEDRETWVDADLYCQNMNSGNLVSVLTQAEGAFVASLIKESGTDDFNVWIGLHDPKKNRRWHWSSGSLVSYKSWGIGAPSSVNPGYCVSLTSSTGFQKWKDVPCEDKFSFVCKFKN

SEQ ID NO: 763364 - protein, 166 aa, Homo sapiens; identical to SEQ ID NO: 763363

SEQ ID NO: 763365 - protein, 166 aa, Homo sapiens; identical to SEQ ID NO: 763363

SEQ ID NO: 763366 - protein, 166 aa, Homo sapiens; identical to SEQ ID NO: 763363

SEQ ID NO: 763367 - protein, 118 aa, Homo sapiens
  misc_feature (28)..(28): Xaa can be any naturally occurring amino acid
KFSGGPKTFGVVSWWAFKTPRGRGGGAXLVGPSTGIKGEEWQLDGLSMSGIGLPGTPKRNRRWHWSSGSLVSYKSWGIGAPSSVNPGYCVSLTSSTGFQKWKDVPCEDKFSFVCKFKN

SEQ ID NO: 763368 - protein, 169 aa, Homo sapiens
MAQTSSYFMLISCLMFLSQSQGQEAQTELPQARISCPEGTNAYRSYCYYFNEDRETWVDADLYCQNMNSGNLVSVLTQAEGAFVASLIKESGTDDFNVWIGLHDPKKNRRWHWSSGSLVSYKSWGIGAPSSVNPGYCVSLTSSTGERQRIHPPVSVLSCLAPGMELGLG

SEQ ID NO: 763369 - protein, 150 aa, Homo sapiens
FRFLGVAKMRFFVPLFLVGILFPAILAKQFTKCELSQLLKDIDGYGGIALPELICTMFHTSGYDTQAIVENNESTEYGLFQISNKLWCKSSQVPQSRNICDISCDKFLDDDITDDIMCAKKILDIKGIDYWLAHKALCTEKLEQWLCEKL

SEQ ID NO: 763370 - protein, 285 aa, Homo sapiens
MNKFQGPVTLKDVIVEFTKEEWKLLTPAQRTLYKDVMLENYSHLVSVGYHVNKPNAVFKLKQGKEPWILEVEFPHRGFPEDLWSIHDLEARYQESQAGNSRNGELTKHQKTHTTEKACECKECGKFFCQKSALIVHQHTHSKGKSYDCDKCGKSFSKNEDLIRHQKIHTRDKTYECKECKKIFYHLSSLSRHLRTHAGEKPYECNQCEKSFYQKPHLTEHQKTHTGEKPFECTECGKFFYVKAYLMVHQKTHTGEKPYECKECGKAFSQKSHLTVHQRMHTGEKP

SEQ ID NO: 763371 - protein, 249 aa, Homo sapiens
MLENYSHLVSVGYHVNKPNAVFKLKQGKEPWILEVEFPHRGFPEDLWSIHDLEARYQESQAGNSRNGELTKHQKTHTTEKACECKECGKFFCQKSALIVHQHTHSKGKSYDCDKCGKSFSKNEDLIRHQKIHTRDKTYECKECKKIFYHLSSLSRHLRTHAGEKPYECNQCEKSFYQKPHLTEHQKTHTGEKPFECTECGKFFYVKAYLMVHQKTHTGEKPYECKECGKAFSQKSHLTVHQRMHTGEKP

SEQ ID NO: 763372 - protein, 333 aa, Homo sapiens
MLLLPFQLLAVLFPGGNSEHAFQGPTSFHVIQTSSFTNSTWAQTQGSGWLDDLQIHGWDSDSGTAIFLKPWSKGNFSDKEVAELEEIFRVYIFGFAREVQDFAGDFQMKYPFEIQGIAGCELHSGGAIVSFLRGALGGLDFLSVKNASCVPSPEGGSRAQKFCALIIQYQGIMETVRILLYETCPRYLLGVLNAGKADLQRQVKPEAWLSSGPSPGPGRLQLVCHVSGFYPKPVWVMWMRGEQEQQGTQLGDILPNANWTWYLRATLDVADGEAAGLSCRVKHSSLEGQDIILYWRNPTSIGSIVLAIIVPSLLLLLCLALWYMRRRSYQNIP

SEQ ID NO: 763373 - protein, 278 aa, Homo sapiens
MLLLPFQLLAVLFPGGNSEHAFQGPTSFHVIQTSSFTNSTWAQTQGSGWLDDLQIHGWDSDSGTAIFLKPWSKGNFSDKEVAELEEIFRVYIFGFAREVQDFAGDFQMKYPFEIQGIAGCELHSGGAIVSFLRGALGGLDFLSVKNASCVPSPEGGSRAQKFCALIIQYQGIMETVRILLYETCPRYLLGVLNAGKADLQRQVKPEAWLSSGPSPGPGRLQLVCHVSGFYPKPVWVMWMRGNPTSIGSIVLAIIVPSLLLLLCLALWYMRRRSYQNIP

SEQ ID NO: 763374 - protein, 79 aa, Homo sapiens
MKCSPGTEQVGFLSGRTSIGYVLVGQYQPRSPTDAGVGRGFAVLFAQLVLDSRSIASSRLECSGAILAHCKLRLPGSRH

SEQ ID NO: 763375 - protein, 247 aa, Homo sapiens
ETYCIDNEALYDICFRTLKLTTPTYGDLNHLVSATMSGVTTCLRFPGQLNADLRKLAVNMVPFPRLHFFMPGFAPLTSRGSQQYRALTVPELTQQMFDAKNMMAACDPRHGRYLTVAAIFRGRMPMREVDEQMFNIQDKNSSYFADWFPNNVKTAVCDIPLRGLKMSATFIGNNTAIQELFTCVSEQFTAMFRRKAFLHWYTGEGMDEMEFTEAESNMNDLVSEYQQYQDATAEEEEDEEYAEEEVA

SEQ ID NO: 763376 - protein, 114 aa, Homo sapiens
MRGQLLLRGMKEELYLLYILSFIYKDIREHLRMFQGHQKLSENAFLQRRFPEIEDNSGSLEEVNLGRQDSFSPPVALQEAIPSPLGKVDPPSPDEKSSLCLLFPLPDDPEALQL

SEQ ID NO: 763377 - protein, 402 aa, Homo sapiens
VGMAGCVPLLQGLVLVLALHRVEPSVFLPASKANDVLVRWKRAGSYLLEELFEGNLEKECYEEICVYEEAREVFENEVVTDEFWRRYKGGSPCISQPCLHNGSCQDSIWGYTCTCSPGYEGSNCELAKNECHPERTDGCQHFCLPGQESYTCSCAQGYRLGEDHKQCVPHDQCACGVLTSEKRAPDLQDLPWQVKLTNSEGKDFCGGVIIRENFVLTTAKCSLLHRNITVKTYFNRTSQDPLMIKITHVHVHMRYDADAGENDLSLLELEWPIQCPGAGLPVCTPEKDFAEHLLIPRTRGLLSGWARNGTDLGNSLTTRPVTLVEGEECGQVLNVTVTTRTYCERSSVAAMHWMDGSVVTREHRGSWFLTGVLGSQPVGGQAHMVLVTKVSRYSLWFKQIMN

SEQ ID NO: 763378 - protein, 437 aa, Homo sapiens
MAGCVPLLQGLVLVLALHRVEPSVFLPASKANDVLVRWKRAGSYLLEELFEGNLEKECYEEICVYEEAREVFENEVVTDEFWRRYKGGSPCISQPCLHNGSCQDSIWGYTCTCSPGYEGSNCELAKNECHPERTDGCQHFCLPGQESYTCSCAQGYRLGEDHKQCVPHDQCACGVLTSEKRAPDLQDLPWQASNTIISCLSEVQPSCPQCSVPECGCRVDGTASGAPLVKLTNSEGKDFCGGVIIRENFVLTTAKCSLLHRNITVKTYFNRTSQDPLMIKITHVHVHMRYDADAGENDLSLLELEWPIQCPGAGLPVCTPEKDFAEHLLIPRTRGLLSGWARNGTDLGNSLTTRPVTLVEGEECGQVLNVTVTTRTYCERSSVAAMHWMDGSVVTREHRGSWFLTGVLGSQPVGGQAHMVLVTKVSRYSLWFKQIMN

SEQ ID NO: 763379 - protein, 424 aa, Homo sapiens
VGMAGCVPLLQGLVLVLALHRVEPSATSLKERHGLHSDSACTGVQESLFLPASKANDVLVRWKRAGSYLLEELFEGNLEKECYEEICVYEEAREVFENEVVTDEFWRRYKGGSPCISQPCLHNGSCQDSIWGYTCTCSPGYEGSNCELAKNECHPERTDGCQHFCLPGQESYTCSCAQGYRLGEDHKQCVPHDQCACGVLTSEKRAPDLQDLPWQVKLTNSEGKDFCGGVIIRENFVLTTAKCSLLHRNITVKTYFNRTSQDPLMIKITHVHVHMRYDADAGENDLSLLELEWPIQCPGAGLPVCTPEKDFAEHLLIPRTRGLLSGWARNGTDLGNSLTTRPVTLVEGEECGQVLNVTVTTRTYCERSSVAAMHWMDGSVVTREHRGSWFLTGVLGSQPVGGQAHMVLVTKVSRYSLWFKQIMN

SEQ ID NO: 763380 - protein, 203 aa, Homo sapiens
VGMAGCVPLLQGLVLVLALHRVEPSVFLPASKANDVLVRWKRAGSYLLEELFEGNLEKECYEEICVYEEAREVFENEVVTDEFWRRYKGGSPCISQPCLHNGSCQDSIWGYTCTCSPGYEGSNCELAKNECHPERTDGCQHFCLPGQESYTCSCAQGYRLGEDHKQCVPHDQCACGVLTSEKRAPDLQDLPWQASNTIISCLS

SEQ ID NO: 763381 - protein, 91 aa, Homo sapiens
MKPYTFFSSLSPECICTLLTQNRHLINISKFLLFFLATKQQSLFFSMMYMPFYHLALNYLSNLISSHSPICFPCCGCTELLRALSTLHAIL

SEQ ID NO: 763382 - protein, 73 aa, Homo sapiens
GQESFKKQEKTRKTPKGPSSVEDIKSKMQASIEKGGSLPKVEAKFINYVKNCFRTTDQETIQDPGSGGSLFRK

SEQ ID NO: 763383 - protein, 933 aa, Homo sapiens
MPGKHQHFQEPEVGCCGKYFLFGFNIVFWVLGALFLAIGLWAWGEKGVLSNISALTDLGGLDPVWLFVVVGGVMSVLGFAGCIGALRENTFLLKFFSVFLGLIFFLELATGILAFVFKDWIRDQLNLFINNNVKAYRDDIDLQNLIDFAQEYVSPVSSLGTCRRRLPGRRMREQVPCDGTISLPTWASGPQERDPGVSSSEESQPLLILMGPHLPSAIGPRPWETEGTGSTLQLPGQGLRHTGEWRKCDIKYRFLLLLNLGPTVLAAAMLLLPLHWYRGSLFAIVPNTLYFIISVSPYLSFILCLASVYIRVETPDGRSALKLANLTPVKSSQRRVPETLSASHLHHLAHSPLTTNTQSHTVTHSHTHTYVTHSQAHLITPTPTHGPTVTHESHPITPTHGDRPLAPFTTKSQLWIQRCSRAGACFKQLSTQGRGRHSQAVMMQFIHSFSTGLLRAYHMPDPEPGPEDSAGKKAGTCPLRAGSREETDGEQAEQTNVCMYIRVYAKLYIVVRVKMKGGEWEGLCVESLKPPKGGEGREGRVFCSRSSWAEQVPGGRWRLSPALGPAHAGHVAGLTPPALWLGHGACLCLLPSLSSPSPVGCSPAPALLLSEGCVHPCAPQDHGSWQIPNSPLLLPRGQLRVFWVGVMGCGMMPAGMEEMGWHGYGGGRIPLLSLHCREEGFENLWGKCGRPAADMGPSGLCCHRAWPSACLSGSLEEATVIEPVSLSHSLPFSSLSWVGEGGAQCPLPCTPLPPPAWRLGPGLWGWGGGHPLGCPSPVPDSPVFLQPGLVPKQGEAPGVGLAHLGLSPAPKWSCCGARGPNDWNLNIYFNCTDLNPSRERCGVPFSCCVRDPAEDVLNTQCGYDVRLKLELEQQGFIHTKGCVGQFEKWLQDNLIVVAGVFMGIALLQIFGICLAQNLVSDIKAVKANWEQME

SEQ ID NO: 763384 - protein, 263 aa, Homo sapiens; identical to SEQ ID NO: 754360

SEQ ID NO: 763385 - protein, 230 aa, Homo sapiens
MPGKHQHFQEPEVGCCGKYFLFGFNIVFWFSVFLGLIFFLELATGILAFVFKDWIRDQLNLFINNNVKAYRDDIDLQNLIDFAQEYEDVLNTQCGYDVRLKLELEQQGFIHTKGCVGQFEKWLQDNLIVVAGVFMGIALLQVPLWPHVPLPLPGPPSLSPHLSSVLQIFGICLAQNLVSDIKAVKANWLRPPEAMATCLAYAGLWGAPQDPPTILLTGKAAGDVPAGTEP

SEQ ID NO: 763386 - protein, 230 aa, Homo sapiens; identical to SEQ ID NO: 763385

SEQ ID NO: 763387 - protein, 230 aa, Homo sapiens; identical to SEQ ID NO: 763385

SEQ ID NO: 763388 - protein, 230 aa, Homo sapiens; identical to SEQ ID NO: 763385

SEQ ID NO: 763389 - protein, 230 aa, Homo sapiens; identical to SEQ ID NO: 763385

SEQ ID NO: 763390 - protein, 230 aa, Homo sapiens; identical to SEQ ID NO: 763385

SEQ ID NO: 763391 - protein, 50 aa, Homo sapiens
MSQCQPRFKIEEIDYTSTWKKIQGHIAKEWKELTAAIFEKVHHTHRFRFL

SEQ ID NO: 763392 - protein, 141 aa, Homo sapiens
MNKVFIPVSCLNSPEHVFSPAFSLNSMQVKSQPFFFFSFFTDSHSVSQAGVQWRDLSSLQPPPPRFKQFSCISLWSSWDHRCTPPRLDEVIGFVSCTRSLPVHPATVRGHCLDPGGDPCSLQLCHPLCIPTCSSLIWPLSK

SEQ ID NO: 763393 - protein, 150 aa, Homo sapiens
MGHLDKEGLCTQGSSFSWLLRVLNDGISLGLTPCLWDMYLLEGEQMLMLITSIAFKVQRSLYEETNKETWGPATPRALKGTGRARPICESLHSSLQALTASESSRGPSLLQTPPRVPGQQALSRGDKGISVSLSLPSLPSRRGRCGRIIG

SEQ ID NO: 763394 - protein, 157 aa, Homo sapiens
CPFPFVNTTEFSNTMNTMVSSILYADGSQICIYTHLPPTEHLNLGFSWTPDPSLLFLLLVKSIIIHSGSKARIVCLYIISQNEINHKKQPHKAKHQSGYHEALSLREKGRDGRSAAIPTPPPYHNLALGTVHCNLPSPHWTKQLSCCSTQLLLSTLK

SEQ ID NO: 763395 - protein, 133 aa, Homo sapiens
MMLNSDTMELDLPPTHSETESGFSDCGGGAGPDGAGPGGPGGGQARGPEPGEPGRKDLQHLSREERRRRRRATAKYRTAHATRERIRVEAFNLAFAELRKLLPTLPPDKKLSKIEILRLAICYISYLNHVLDV

SEQ ID NO: 763396 - protein, 278 aa, Homo sapiens
GIVLTTCGDRRAHRAGVSAAPILRAGELVWSREQVPAPPASRTVPGPGTSAGSSQPLPHSLDVVAWASSRWRAGSCWKFLLGFLGSNMPTSKTPSSRLPLFWRWSVQGVGPACVGVRMGAVDTKGRVCDQVCVHMCRVQTHGCHPLRSVTVRPDPSPAAPPPHPGPPRQLSQGAQACLAPQPSGNPARRPLQVGSGPQVAKQRQQQPRLTPCPSLWRPGTPAISTTWVRLSLSGSPARVPPGVLGHLRGSLMGQAGQSELRALSGWCPNLSTPHSFPP

SEQ ID NO: 763397 - protein, 472 aa, Homo sapiens
MKSILDGLADTTFRTITTDLLYVGSNDIQYEDIKGDMASKLGYFPQKFPLTSFRGSPFQEKMTAGDNPQLVPADQVNITEFYNKSLSSFKENEENIQCGENFMDIECFMVLNPSQQLAIAVLSLTLGTFTVLENLLVLCVILHSRSLRCRPSYHFIGSLAVADLLGSVIFVYSFIDFHVFHRKDSRNVFLFKLGGVTASFTASVGSLFLTAIDRYISIHRPLAYKRIVTRPKAVVAFCLMWTIAIVIAVLPLLGWNCEKLQSVCSDIFPHIDETYLMFWIGVTSVLLLFIVYAYMYILWKAHSHAVRMIQRGTQKSIIIHTSEDGKVQVTRPDQARMDIRLAKTLVLILVVLIICWGPLLAIMVYDVFGKMNKLIKTVFAFCSMLCLLNSTVNPIIYALRSKDLRHAFRSMFPSCEGTAQPLDNSMGDSDCLHKHANNAASVHRAAESCIKSTVKIAKVTMSVSTDTSAEAL

SEQ ID NO: 763398 - protein, 411 aa, Homo sapiens
MALQIPPSAPSPLTSCTWAQMTFSTKTSKENEENIQCGENFMDIECFMVLNPSQQLAIAVLSLTLGTFTVLENLLVLCVILHSRSLRCRPSYHFIGSLAVADLLGSVIFVYSFIDFHVFHRKDSRNVFLFKLGGVTASFTASVGSLFLTAIDRYISIHRPLAYKRIVTRPKAVVAFCLMWTIAIVIAVLPLLGWNCEKLQSVCSDIFPHIDETYLMFWIGVTSVLLLFIVYAYMYILWKAHSHAVRMIQRGTQKSIIIHTSEDGKVQVTRPDQARMDIRLAKTLVLILVVLIICWGPLLAIMVYDVFGKMNKLIKTVFAFCSMLCLLNSTVNPIIYALRSKDLRHAFRSMFPSCEGTAQPLDNSMGDSDCLHKHANNAASVHRAAESCIKSTVKIAKVTMSVSTDTSAEAL

SEQ ID NO: 763399 - protein, 472 aa, Homo sapiens; identical to SEQ ID NO: 763397

SEQ ID NO: 763400 - protein, 248 aa, Homo sapiens
MAPKAAKGAKPEPAPAPPPPGAKPEEDKKDGKEPSDKPQKAVQDHKEPSDKPQKAVQPKHEVGTRRGCRRYRWELKDSNKEFWLLGHAEIKIRSLGCLIAAMILLSSLTVHPILRLIITMETSFFSFFILLYSFAIHRYIPFILWPISDLFNDLIACAFLVGAVVFAVRSRRSMNLHYLLAVILIGAAGVFAFIDVCLQRNHFRGKKAKKHMLVPPPGKEKGPQQGKGPEPAKPPEPGKPPGPAKGKK

SEQ ID NO: 763401 - protein, 216 aa, Homo sapiens [sequence omitted]

SEQ ID NO: 763402 - protein, 146 aa, Homo sapiens
MQAGKPILYSYFRSSCSWRVRIALALKGIDYETVPINLIKDGGQQFSKDFQALNPMKQVPTLKIDGITIHQSLAIIEYLEETRPTPRLLPQDPKKRASVRMISDLIAGGIQPLQNLSVLKQVGEEMQLTWAQNAITCGFNGESSPL

SEQ ID NO: 763403 - protein, 169 aa, Homo sapiens
RRRACRDREGRPARGGGDWAGGVGLRELQLPAAPRYGAWLGELGRARGDRKDLSSPAPRFTRTKDTGLIRRVSLSLSRRQVPGAKFLGLEEGVARSARCRRGSPSSIPISGTPCGKKFAPRPWLPTISAPQSAAIPGSELCQDEAVALSISSLGLPRNPPRGSEDLVHR

SEQ ID NO: 763404 - protein, 161 aa, Homo sapiens
MKQVPTLKIDGITIHQSLAIIEYLEETRPTPRLLPQDPKKRASVRMISDLIAGGIQPLQNLSVLKQVGEEMQLTWAQNAITCGFNALEQILQSTAGIYCVGDEVTMADLCLVPQVANAERFKVDLTPYPTISSINKRLLVLEAFQVSHPCRQPDTPTELRA

SEQ ID NO: 763405 - protein, 177 aa, Homo sapiens [sequence omitted]

SEQ ID NO: 763406 - protein, 119 aa, Homo sapiens
MKQVPTLKIDGITIHQSNLSVLKQVGEEMQLTWAQNAITCGFNALEQILQSTAGIYCVGDEVTMADLCLVPQVANAERFKVDLTPYPTISSINKRLLVLEAFQVSHPCRQPDTPTELRA

SEQ ID NO: 763407 - protein, 78 aa, Homo sapiens
SPATDSGVCTLMGTHRDLFQVTMADLCLVPQVANAERFKVDLTPYPTISSINKRLLVLEAFQVSHPCRQPDTPTELRA

SEQ ID NO: 763408 - protein, 216 aa, Homo sapiens [sequence omitted]

SEQ ID NO: 763409 - protein, 216 aa, Homo sapiens [sequence omitted]

SEQ ID NO: 763410 - protein, 174 aa, Homo sapiens
MQAGKPILYSYFRSSCSWRVRIALALKGIDYETVPINLIKDGGQQFSKDFQALNPMKQVPTLKIDGITIHQSNLSVLKQVGEEMQLTWAQNAITCGFNALEQILQSTAGIYCVGDEVTMADLCLVPQVANAERFKVDLTPYPTISSINKRLLVLEAFQVSHPCRQPDTPTELRA

SEQ ID NO: 763411 - protein, 117 aa, Homo sapiens
SSLETWLPHSHQQPCPVCHSVGRPFHNYGGQGPESFVSPPCAQNKMFMWPPHSPGADPTEHSGHILCRRRGKLSPDLPRPSHSGCLPHADLPQAQSFLRRRLQGDLCAMGHSSAHSH

SEQ ID NO: 763412 - protein, 161 aa, Homo sapiens; identical to SEQ ID NO: 763404

SEQ ID NO: 763413 - protein, 187 aa, Homo sapiens
MQAGKPILYSYFRSSCSWRVRIALALKGIDYETVPINLIKDGGQQFSKDFQALNPMKQVPTLKIDGITIHQSLAIIEYLEETRPTPRLLPQDPKKRASVRMISDLIAGGIQPLQNLSVLKQVGEEMQLTWAQNAITCGFNALEQILQSTAGIYCVGDEVTMADLCLVPQVANAERVCSGIFQRLYDM

SEQ ID NO: 763414 - protein, 74 aa, Homo sapiens
IYGSVGLTNVNFPFLTLITAAAATICAPYHVPSTVLSAFYGMPLSVLSTMPCSVHYYYPCFTDEKTEDKRLNNW

SEQ ID NO: 763415 - protein, 103 aa, Homo sapiens
MPLSCSGDVGDSHRLSSLPARGRLPAGPLSPVQPHVLPLSNGVSTPASLKHQHPLLSCLAAFVHDISHQRPTSSNLSTFARAGRSHFWKLSVTIPTRSTVSLP

SEQ ID NO: 763416 - protein, 266 aa, Homo sapiens
RKARYEAWVESAEAALEGEDGAQTLTMTPHRLLPPLLLLLALLLAASPGGALARCPGCGQGVQAGCPGGCVEEEDGGSPAEGCAEAEGCLRREGQECGVYTPNCAPGLQCHPPKDDEAPLRALLLGRGRCLPARAPAVAEENPKESKPQAGTARPQDVNRRDQQRNPGTSTTPSQPNSAGVQDTEMGPCRRHLDSVLQQLQTEVYRGAQTLYVPNCDHRGFYRKRQCRSSQGQRRGPCWCVDRMGKSLPGSPDGNGSSSCPTGSSG

SEQ ID NO: 763417 - protein, 240 aa, Homo sapiens
MTPHRLLPPLLLLLALLLAASPGGALARCPGCGQGVQAGCPGGCVEEEDGGSPAEGCAEAEGCLRREGQECGVYTPNCAPGLQCHPPKDDEAPLRALLLGRGRCLPARAPAVAEENPKESKPQAGTARPQDVNRRDQQRNPGTSTTPSQPNSAGVQDTEMGPCRRHLDSVLQQLQTEVYRGAQTLYVPNCDHRGFYRKRQCRSSQGQRRGPCWCVDRMGKSLPGSPDGNGSSSCPTGSSG

SEQ ID NO: 763418 - protein, 240 aa, Homo sapiens; identical to SEQ ID NO: 763417

SEQ ID NO: 763419 - protein, 240 aa, Homo sapiens; identical to SEQ ID NO: 763417

SEQ ID NO: 763420 - protein, 240 aa, Homo sapiens; identical to SEQ ID NO: 763417

SEQ ID NO: 763421 - protein, 240 aa, Homo sapiens; identical to SEQ ID NO: 763417

SEQ ID NO: 763422 - protein, 180 aa, Homo sapiens
MGCLRREGQECGVYTPNCAPGLQCHPPKDDEAPLRALLLGRGRCLPARAPAVAEENPKESKPQAGTARPQDVNRRDQQRNPGTSTTPSQPNSAGVQDTEMGPCRRHLDSVLQQLQTEVYRGAQTLYVPNCDHRGFYRKRQCRSSQGQRRGPCWCVDRMGKSLPGSPDGNGSSSCPTGSSG

SEQ ID NO: 763423 - protein, 240 aa, Homo sapiens; identical to SEQ ID NO: 763417

SEQ ID NO: 763424 - protein, 85 aa, Homo sapiens
GTTPMLSWLNIRVSIKEPSKEDHNEHHRQYFRVGVDPDQDPPPNNDSFQVLQGDSPDSARGNWTKQESTWIFRRWYSFDHNYLKP

SEQ ID NO: 763425 - protein, 168 aa, Homo sapiens
MAADSREEKDGELNVLDDILTEVPEQDDELYNPESEQDKNEKKGSKRKSDRMESTDTKRQKPSVHSRQLVSKPLSSSVSNNKRIVSTKGKSATEYKNEEYQRSERNKRLDADRKIRLSSSASREPYKNQPEPRPRLKTNALSGLGPGGWHGRAAYTTSQPTPPEPALH

SEQ ID NO: 763426 - protein, 123 aa, Homo sapiens
MAADSREEKDGELNVLDDILTEVPEQDDELYNPESEQDKNEKKGSKRKSDRMESTDTKRQKPSVHSRQLVSKPLSSSVSNNKRIVSTKGKSATEYKNEEYQRSERNKRLDADRIVYKYDSENF

SEQ ID NO: 763427 - protein, 484 aa, Homo sapiens
EVDEDGEEEEEEEEEEEEEEEEEEEEYEQDERDQKEEGNDYDTRSEASDSGSESVSFTDGSVRSGSGTDGSDEKKKERKRARGISPIVFDRSGSSASESYAGSEKKHEKLSSSVRAVRKDQTSKLKYVLQDARFFLIKSNNHENVSLAKAKGVWSTLPVNEKKLNLAFRSARSVILIFSVRESGKFQGFARLSSESHHGGSPIHWVLPAGMSAKMLGGVFKIDWICRRELPFTKSAHLTNPWNEHKPVKIGRDGQEIELECGTQLCLLFPPDESIDLYQVIHSRREPVRDVGRRRPEDYDIHNSRKKPRIDYPPEFHQRPEGIERFTIQEVTDILGGREKCFKWSYNDYVREFHNMGPPPPWQGMPPYPGMEQPPHHPYYQHHAPPPQAHPPYSGHHPVPHEARYRDKRVHDYDMRVDDFLRRTQAVVSGRRSRPRERDRERERDRPRDNRRDRERDRGRDRERERERLCDRDRDRGERGRYRR

SEQ ID NO: 763428 - protein, 170 aa, Homo sapiens
HASRTRGSTHASARKWTRFSGVRRDVFLNGSYNDYVREFHNMGPPPPWQGMPPYPGMEQPPHHPYYQHHAPPPQAHPPYSGHHPVPHEARYRDKRVHDYDMRVDDFLRRTQAVVSGRRSRPRERDRERERDRPRDNRRDRERDRGRDRERERERLCDRDRDRGERGRYRR

SEQ ID NO: 763429 - protein, 504 aa, Homo sapiens
EVDEDGEEEEEEEEEEEEEEEEEEEEYEQDERDQKEEGNDYDTRSEASDSGSESVSFTDGSVRSGSGTDGSDEKKKERKRARGISPIVFDRSGSSASESYAGSEKKHEKLSSSVRAVRKDQTSKLKYVLQDARFFLIKSNNHENVSLAKAKGVWSTLPVNEKKLNLAFRSARSVILIFSVRESGKFQGFARLSSESHHGGSPIHWVLPAGMSAKMLGGVFKIDWICRRELPFTKSAHLTNPWNEHKPVKIGRDGQEIELECGTQLCLLFPPDESIDLYQVIHKMRHKRRMHSQPRSRGRPSRREPVRDVGRRRPEDYDIHNSRKKPRIDYPPEFHQRPGYLKDPRYQEVDRRFSGVRRDVFLNGSYNDYVREFHNMGPPPPWQGMPPYPGMEQPPHHPYYQHHAPPPQAHPPYSGHHPVPHEARYRDKRVHDYDMRVDDFLRRTQAVVSGRRSRPRERDRERERDRPRDNRRDRERDRGRDRERERERLCDRDRDRGERGRYRR

SEQ ID NO: 763430 - protein, 504 aa, Homo sapiens; identical to SEQ ID NO: 763429

SEQ ID NO: 763431 - protein, 504 aa, Homo sapiens; identical to SEQ ID NO: 763429

SEQ ID NO: 763432 - protein, 221 aa, Homo sapiens
MAADSREEKDGELNVLDDILTEVPEQDDELYNPESEQDKNEKKGSKRKSDRMESTDTKRQKPSVHSRQLVSKPLSSSVSNNKRIVSTKGKSATEYKNEEYQRSERNKRLDADRKIRLSSSASREPYKNQPEKTCVRKRDPERRAKSPTPDGSERIGLEVDRRASRSSQSSKEEVNSEEYGSDHETGSSGSSDEQGNNTENEEEGVEEDVEEDEEVEEDAEE

SEQ ID NO: 763433 - protein, 221 aa, Homo sapiens; identical to SEQ ID NO: 763432

SEQ ID NO: 763434 - protein, 111 aa, Homo sapiens
MAADSREEKDGELNVLDDILTEVPEQDDELYNPESEQDKNEKKGSKRKSDRMESTDTKRQKPSVHSRQLVSKPLSSSVSNNKRIVSTKGKSATEYWDIKIEETALMLSKSL

SEQ ID NO: 763435 - protein, 237 aa, Homo sapiens
RPPTTTKLAACRPEETHGADSREEKDGELNVLDDILTEVPEQDDELYNPESEQDKNEKKGSKRKSDRMESTDTKRQKPSVHSRQLVSKPLSSSVSNNKRIVSTKGKSATEYKNEEYQRSERNKRLDADRKIRLSSSASREPYKNQPEKTCVRKRDPERRAKSPTPDGSERIGLEVDRRASRSSQSSKEEVNSEEYGSDHETGSSGSSDEQGNNTENEEEGVEEDVEEDEEVEEDAEE

SEQ ID NO: 763436 - protein, 171 aa, Homo sapiens
MAADSREEKDGELNVLDDILTEVPEQDDELYNPESEQDKNEKKGSKRKSDRMESTDTKRQKPSVHSRQLVSKPLSSSVSNNKRIVSTKGKSATEYKNEEYQRSERNKRLDADRTRISMLKNYRYLNTCGRSEGHSANVAWYAQPPTPWKTNVLSGLRTAGCTTREGPPHTP

SEQ ID NO: 763437 - protein, 504 aa, Homo sapiens; identical to SEQ ID NO: 763429

SEQ ID NO: 763438 - protein, 129 aa, Homo sapiens [sequence omitted]

SEQ ID NO: 763439 - protein, 114 aa, Homo sapiens
MEQPPHHPYYQHHAPPPQAHPPYSGHHPVPHEARYRDKRVHDYDMRVDDFLRRTQAVVSGRRSRPRERDRERERDRPRDNRRDRERDRGRDRERERERLCDRDRDRGERGRYRR

SEQ ID NO: 763440 - protein, 504 aa, Homo sapiens; identical to SEQ ID NO: 763429

SEQ ID NO: 763441 - protein, 504 aa, Homo sapiens; identical to SEQ ID NO: 763429

SEQ ID NO: 763442 - protein, 396 aa, Homo sapiens
EVDEDGEEEEEEEEEEEEEEEEEEEEYEQDERDQKEEGNDYDTRSEASDSGSESVSFTDGSVRSGSGTDGSDEKKKERKRARGISPIVFDRSGSSASESYAGSEKKHEKLSSSVRAVRKDQTSKLKYVLQDARFFLIKSNNHENVSLAKAKGVWSTLPVNEKKLNLAFRSARSVILIFSVRESGKFQGFARLSSESHHGGSPIHWVLPAGMSAKMLGGVFKIDWICRRELPFTKSAHLTNPWNEHKPVKIGRDGQEIELECGTQLCLLFPPDESIDLYQVIHKMRHKRRMHSQPRSRGRPSRREPVRDVGRRRPEDYDIHNSRKKPRIDYPPEFHQRPGYLKDPRYQEVDRRFSGVRRDVFLNGSYNDYVREFHNMGPPPPWQGMPPYPGWCGGCS

SEQ ID NO: 763443 - protein, 73 aa, Homo sapiens
MAADSREEKDGELNVLDDILTEVPEQDDELYNPESEQDKNEKKDQSYSSEQLSCFRYLPYTSLTKYFIYLFIY

SEQ ID NO: 763444 - protein, 231 aa, Homo sapiens
MESTDTKRQKPSVHSRQLVSKPLSSSVSNNKRIVSTKGKSATEYKNEEYQRSERNKRLDADRKIRLSSSASREPYKNQPEKTCVRKRDPERRAKSPTPDGSEVVNIIADIKQKAILFEALELFIHPDLVFYMTADSFFFKHQRIGLEVDRRASRSSQSSKEEVNSEEYGSDHETGSSGSSDEQGNNTENEEEGVEEDVEEDEEVEEDAEEDEEVDEDGEEEEEEEEEEEEE

SEQ ID NO: 763445 - protein, 178 aa, Homo sapiens
MAEAAPAPTSEWDSECLTSLQPLPLPTPPAANEAHLQTAAISLWTVVAAVQAIERKVEIHSRRLLHLEGRTGTAEKKLASCEKTVTELGNQLEGKWAVLGTLLQEYGLLQRRLENLENLLRNRNFWILRLPPGIKGDIPKVPVAFDDVSIYFSTPEWEKLEEWQKECVASRDLNFGKK

SEQ ID NO: 763446 - protein, 642 aa, Homo sapiens
MAEAAPAPTSEWDSECLTSLQPLPLPTPPAANEAHLQTAAISLWTVVAAVQAIERKVEIHSRRLLHLEGRTGTAEKKLASCEKTVTELGNQLEGKWAVLGTLLQEYGLLQRRLENLENLLRNRNFWILRLPPGIKGDIPKVPVAFDDVSIYFSTPEWEKLEEWQKELYKNIMKGNYESLISMDYAINQPDVLSQIQPEGEHNTEDQAGPEESEIPTDPSEEPGISTSDILSWIKQEEEPQVGAPPESKESDVYKSTYADEELVIKAEGLARSSLCPEVPVPFSSPPAAAKDAFSDVAFKSQQSTSMTPFGRPATDLPEASEGQVTFTQLGSYPLPPPVGEQVFSCHHCGKNLSQDMLLTHQCSHATEHPLPCAQCPKHFTPQADLSSTSQDHASETPPTCPHCARTFTHPSRLTYHLRVHNSTERPFPCPDCPKRFADQARLTSHRRAHASERPFRCAQCGRSFSLKISLLLHQRGHAQERPFSCPQCGIDFNGHSALIRHQMIHTGERPYPCTDCSKSFMRKEHLLNHRRLHTGERPFSCPHCGKSFIRKHHLMKHQRIHTGERPYPCSYCGRSFRYKQTLKDHLRSGHNGGCGGDSDPSGQPPNPPGPLITGLETSGLGVNTEGLETNQWYGEGSGGGVL

SEQ ID NO: 763447 - protein, 642 aa, Homo sapiens; identical to SEQ ID NO: 763446

SEQ ID NO: 763448 - protein, 642 aa, Homo sapiens; identical to SEQ ID NO: 763446

SEQ ID NO: 763449 - protein, 149 aa, Homo sapiens
MAEAAPAPTSEWDSECLTSLQPLPLPTPPAANEAHLQTAAISLWTVVAAVQAIERKVEIHSRRLLHLEGRTGTAEKKLASCEKTVTELGNQLEGKWAVLGTLLQEYGLLQRRLENLENLLRNRNFWILRLPPGIKGDIPKLGNCLFTAG

SEQ ID NO: 763450 - protein, 401 aa, Homo sapiens
AAEVVAQLGLVRSGHGGAEVGKMAWRGWAQRGWGCGQAWGASVGGRSCEELTAVLTPPQLLGRRFNFFIQQKCGFRKAPRKVEPRRSDPGTSGEAYKRSALIPPVEETVFYPSPYPIRSLIKPLFFTVGFTGCAFGSAAIWQYESLKSRVQSYFDGIKADWLDSIRPQKEGDFRKEINKWWNNLSDGQRTVTGIIAANVLVFCLWRVPSLQRTMIRYFTSNPASKVLCSPMLLSTFSHFSLFHMAANMYVLWSFSSSIVNILGQEQFMAVYLSAGVISNFVSYVGKVATGRYGPSLGASGAIMTVLAAVCTKIPEGRLAIIFLPMFTFTAGNALKAIIAMDTAGMILGWKFFDHAAHLGGALFGIWYVTYGHELIWKNREPLVKIWHEIRTNGPKKGGGSK

SEQ ID NO: 763451 - protein, 179 aa, Homo sapiens
DHASDPRVRLLSTFSHFSLFHMAANMYVLWSFSSSIVNILGQEQFMAVYLSAGVISNFVSYVGKVATGRYGPSLGASGAIMTVLAAVCTKIPEGRLAIIFLPMFTFTAGNALKAIIAMDTAGMILGWKFFDHAAHLGGALFGIWYVTYGHELIWKNREPLVKIWHEIRTNGPKKGGGSK

SEQ ID NO: 763452 - protein, 401 aa, Homo sapiens; identical to SEQ ID NO: 763450

SEQ ID NO: 763453 - protein, 401 aa, Homo sapiens; identical to SEQ ID NO: 763450

SEQ ID NO: 763454 - protein, 333 aa, Homo sapiens
AAEVVAQLGLVRSGHGGAEVGKMAWRGWAQRGWGCGQAWGASVGGRSCEELTAVLTPPQLLGRRFNFFIQQKCGFRKAPRKVEPRRSDPGTSGEAYKRSALIPPVEETVFYPSPYPIRSLIKPLFFTVGFTGCAFGSAAIWQYESLKSRVQSYFDGIKADWLDSIRPQKEGDFRKEINKWWNNLSDGQRTVTGIIAANVLVFCLWRVPSLQRTMIRYFTSNPASKVLCSPMLLSTFSHFSLFHMAANMYVLWSFSSSIVNILGQEQFMAVYLSAGVISNFVSYVGKVATGRYGPSLGASGAIMTVLAAVCTKIPEGRLAIIFLPMFTFTAGNP

SEQ ID NO: 763455 - protein, 195 aa, Homo sapiens
AAEVVAQLGLVRSGHGGAEVGKMAWRGWAQRGWGCGQAWGASVGGRSCEELTAVLTPPQLLGRRFNFFIQQKCGFRKAPRKVEPRRSDPGTSGEAYKRSALIPPVEETVFYPSPYPIRSLIKPLFFTVGFTGCAFGSAAIWQYESLKSRVQSYFDGIKADWLDSIRPQKEGDFRKEINKWWNNLSDGQRTVTGLC

SEQ ID NO: 763456 - protein, 286 aa, Homo sapiens
LGEAAVITLFFTLGFTGCAFGSAAIWQYESLKSRVQSYFDGIKADWLDSIRPQKEGDFRKEINKWWNNLSDGQRTVTGIIAANVLVFCLWRVPSLQRTMIRYFTSNPASKVLCSPMLLSTFSHFSLFHMAANMYVLWSFSSSIVNILGQEQFMAVYLSAGVISNFVSYVGKVATGRYGPSLGASGAIMTVLAAVCTKIPEGRLAIIFLPMFTFTAGNALKAIIAMDTAGMILGWKFFDHAAHLGGALFGIWYVTYGHELIWKNREPLVKIWHEIRTNGPKKGGGSK

SEQ ID NO: 763457 - protein, 188 aa, Homo sapiens
MIRYFTSNPASKVLCSPMLLSTFSHFSLFHMAANMYVLWSFSSSIVNILGQEQFMAVYLSAGVISNFVSYVGKVATGRYGPSLGASGAIMTVLAAVCTKIPEGRLAIIFLPMFTFTAGNALKAIIAMDTAGMILGWKFFDHAAHLGGALFGIWYVTYGHELIWKNREPLVKIWHEIRTNGPKKGGGSK

SEQ ID NO: 763458 - protein, 304 aa, Homo sapiens
AAEVVAQLGLVRSGHGGAEVGKMAWRGWAQRGWGCGQAWGASVGGRSCEELTAVLTPPQLLGRRFNFFIQQKCGFRKAPRKVEPRRSDPGTSGEAYKRSALIPPVEETVFYPSPYPIRSLIKPLFFTVGINKWWNNLSDGQRTVTGIIAANVLVFCLWRVPSLQRTMIRYFTSNPASSVISNFVSYVGKVATGRYGPSLGASGAIMTVLAAVCTKIPEGRLAIIFLPMFTFTAGNALKAIIAMDTAGMILGWKFFDHAAHLGGALFGIWYVTYGHELIWKNREPLVKIWHEIRTNGPKKGGGSK

SEQ ID NO: 763459 - protein, 351 aa, Homo sapiens
AAEVVAQLGLVRSGHGGAEVGKMAWRGWAQRGWGCGQAWGASVGGRSCEELTAVLTPPQLLGRRFNFFIQQKCGFRKAPRKVEPRRSDPGTSGEAYKRSALIPPVEETVFYPSPYPIRSLIKPLFFTVGFTGCAFGSAAIWQYESLKSRVQSYFDGIKADWLDSIRPQKEGDFRKEINKWWNNLSDGQRTVTGIIAANVLVFCLWRVPSLQRTMIRYFTSNPASSVISNFVSYVGKVATGRYGPSLGASGAIMTVLAAVCTKIPEGRLAIIFLPMFTFTAGNALKAIIAMDTAGMILGWKFFDHAAHLGGALFGIWYVTYGHELIWKNREPLVKIWHEIRTNGPKKGGGSK

SEQ ID NO: 763460 - protein, 118 aa, Homo sapiens
  misc_feature (110)..(110): Xaa can be any naturally occurring amino acid
AAEVVAQLGLVRSGHGGAEVGKMAWRGWAQRGWGCGQAWGASVGGRSCEELTAVLTPPQLLGRRYYSCKCPCILFMESTFSAADNDQIFHIESSLKGPNNTKKHTSKQYXSTKKHRIN

SEQ ID NO: 763461 - protein, 401 aa, Homo sapiens; identical to SEQ ID NO: 763450

SEQ ID NO: 763462 - protein, 367 aa, Homo sapiens
AAEVVAQLGLVRSGHGGAEVGKMAWRGWAQRGWGCGQAWGASVGGRSCEELTAVLTPPQLLGRRFNFFIQQKCGFRKAPRKVEPRRSDPGTSGEAYKRSALIPPVEETVFYPSPYPIRSLIKPLFFTVGFTGCAFGSAAIWQYESLKSRVQSYFDGIKADWLDSIRPQKEGDFRKEINKWWNNLSDGQRTVTGIIAANVLVFCLWRVPSLQRTMIRYFTSNPASKVLCSPMLLSTFSHFSLFHMAANMYVLWSFSSSIVNILGQEQFMAVYLSAGVISNFVSYVGKVATGRYGPSLGAALKAIIAMDTAGMILGWKFFDHAAHLGGALFGIWYVTYGHELIWKNREPLVKIWHEIRTNGPKKGGGSK

SEQ ID NO: 763463 - protein, 384 aa, Homo sapiens
AAEVVAQLGLVRSGHGGAEVGKMAWRGWAHCEELTAVLTPPQLLGRRFNFFIQQKCGFRKAPRKVEPRRSDPGTSGEAYKRSALIPPVEETVFYPSPYPIRSLIKPLFFTVGFTGCAFGSAAIWQYESLKSRVQSYFDGIKADWLDSIRPQKEGDFRKEINKWWNNLSDGQRTVTGIIAANVLVFCLWRVPSLQRTMIRYFTSNPASKVLCSPMLLSTFSHFSLFHMAANMYVLWSFSSSIVNILGQEQFMAVYLSAGVISNFVSYVGKVATGRYGPSLGASGAIMTVLAAVCTKIPEGRLAIIFLPMFTFTAGNALKAIIAMDTAGMILGWKFFDHAAHLGGALFGIWYVTYGHELIWKNREPLVKIWHEIRTNGPKKGGGSK

SEQ ID NO: 763464 - protein, 317 aa, Homo sapiens
AAEVVAQLGLVRSGHGGAEVGKMAWRGWAQRGWGCGQAWGASVGGRSCEELTAVLTPPQLLGRRFNFFIQQKCGFRKAPRKVEPRRSDPGTSGEAYKRSALIPPVEETVFYPSPYPIRSLIKPLFFTVGFTGCAFGSAAIWQYESLKSRVQSYFDGIKADWLDSIRPQKEGDFRKEINKWWNNLSDGQRTVTGIIAANVLVFCLWRVPSLQRTMIRYFTSNPASSVISNFVSYVGKVATGRYGPSLGAALKAIIAMDTAGMILGWKFFDHAAHLGGALFGIWYVTYGHELIWKNREPLVKIWHEIRTNGPKKGGGSK

SEQ ID NO: 763465 - protein, 351 aa, Homo sapiens; identical to SEQ ID NO: 763459

SEQ ID NO: 763466 - protein, 174 aa, Homo sapiens
AAEVVAQLGLVRSGHGGAEVGKMAWRGWAQRGWGCGQAWGASVGGRSCEELTAVLTPPQLLGRRFNFFIQQKCGFRKAPRKVEPRRSDPGTSGEAYKRSALIPPVEETVFYPSPYPIRSLIKPLFFTVGRSTWVRSTWPGRPNPDIIVDSGRPMQSHRTKSSSCDRLIPIMALE

SEQ ID NO: 763467 - protein, 68 aa, Homo sapiens
  misc_feature (16)..(16): Xaa can be any naturally occurring amino acid
RRPRTMDPPGFRTGRXDYGFEKTTEGALGLSAIFLGKPLRHESQVEEEANAQAEAQKKKDEAEVQVNR

SEQ ID NO: 763468 - protein, 73 aa, Homo sapiens
  misc_feature (15)..(15): Xaa can be any naturally occurring amino acid
AAENYGSPGLQDRPXRLRLRERPQKGLSALAPFFWKPLRHESQGERFLVVSLGGRSWRVVARRRSGGRSECAG

SEQ ID NO: 763469 - protein, 67 aa, Homo sapiens
MTGGGKKRGVEEEKAPRGPKKGCFHVNTKLFVAHKGGEKLGEGHPNIKRRRKKFEKNTGTPLDLHNN

SEQ ID NO: 763470 - protein, 73 aa, Homo sapiens; identical to SEQ ID NO: 763468
  misc_feature (15)..(15): Xaa can be any naturally occurring amino acid

SEQ ID NO: 763471 - protein, 68 aa, Homo sapiens; identical to SEQ ID NO: 763467
  misc_feature (16)..(16): Xaa can be any naturally occurring amino acid

SEQ ID NO: 763472 - protein, 68 aa, Homo sapiens; identical to SEQ ID NO: 763467
  misc_feature (16)..(16): Xaa can be any naturally occurring amino acid

SEQ ID NO: 763473 - protein, 311 aa, Homo sapiens
TGRLYSRSSTQPGWAARDRTEAAADSTSMSYSVTLTGPGPWGFRLQGGKDFNMPLTISRITPGSKAAQSQLSQGDLVVAIDGVNTDTMTHLEAQNKIKSASYNLSLTLQKSKRPIPISTTAPPVQTPLPVIPHQKVVVNSPANADYQERFNPSALKDSALSTHKPIEVKGLGGKATIIHAQYNTPISMYSQDAIMDAIAGQAQAQGSDFSGSLPIKDLAVDSASPVYQAVIKSQNKPEDEADEWARRSSNLQSRSFRILAQMTGTEFMQDPDEEALRRSRERFETERNSPRFAKLRNWHHGLSAQILNVKS

SEQ ID NO: 763474 - protein, 309 aa, Homo sapiens
QAECLSALSLNPLYPLSAEAAADSTSMSYSVTLTGPGPWGFRLQGGKDFNMPLTISRITPGSKAAQSQLSQGDLVVAIDGVNTDTMTHLEAQNKIKSASYNLSLTLQKSKRPIPISTTAPPVQTPLPVIPHQKVVVNSPANADYQERFNPSALKDSALSTHKPIEVKGLGGKATIIHAQYNTPISMYSQDAIMDAIAGQAQAQGSDFSGSLPIKDLAVDSASPVYQAVIKSQNKPEDEADEWARRSSNLQSRSFRILAQMTGTEFMQDPDEEALRRSRERFETERNSPRFAKLRNWHHGLSAQILNVKS

SEQ ID NO: 763475 - protein, 645 aa, Homo sapiens
TGRLYSRSSTQPGWAARDRTEAAADSTSMSYSVTLTGPGPWGFRLQGGKDFNMPLTISRITPGSKAAQSQLSQGDLVVAIDGVNTDTMTHLEAQNKIKSASYNLSLTLQKSKRPIPISTTAPPVQTPLPVIPHQKVVVNSPANADYQERFNPSALKDSALSTHKPIEVKGLGGKATIIHAQYNTPISMYSQDAIMDAIAGQAQAQGSDFSGSLPIKDLAVDSASPVYQAVIKSQNKPEDEADEWARRSSNLQSRSFRILAQMTGTEFMQDPDEEALRRSRPQASSYSPAVAASSAPATHTSYSEGPAAPAPKPRVVTTASIRPSVYQPVPASTYSPSPGANYSPTPYTPSPAPAYTPSPAPAYTPSPVPTYTPSPAPAYTPSPAPNYNPAPSVAYSGGPAEPASRPPWVTDDSFSQKFAPGKSTTSISKQTLPRGGPAYTPAGPQVPPLARGTVQRAERFPASSRTPLCGHCNNVIRGPFLVAMGRSWHPEEFTCAYCKTSLADVCFVEEQNNVYCERCYEQFFAPLCAKCNTKIMGEVMHALRQTWHTTCFVCAACKKPFGNSLFHMEDGEPYCEKDYINLFSTKCHGCDFPVEAGDKFIEALGHTWHDTCFICAVCHVNLEGQPFYSKKDRPLCKKHAHTINL

SEQ ID NO: 763476 - protein, 275 aa, Homo sapiens
STGVFTTMEKAGAHLQGGAHRQVITPGSKAAQSQLSQGDLVVAIDGVNTDTMTHLEAQNKIKSASYNLSLTLQKSKRPIPISTTAPPVQTPLPVIPHQKVVVNSPANADYQERFNPSALKDSALSTHKPIEVKGLGGKATIIHAQYNTPISMYSQDAIMDAIAGQAQAQGSDFSGSLPIKDLAVDSASPVYQAVIKSQNKPEDEADEWARRSSNLQSRSFRILAQMTGTEFMQDPDEEALRRSRERFETERNSPRFAKLRNWHHGLSAQILNVKS

SEQ ID NO: 763477 - protein, 682 aa, Homo sapiens
TGRLYSRSSTQPGWAARDRTEAAADSTSMSYSVTLTGPGPWGFRLQGGKDFNMPLTISRITPGSKAAQSQLSQGDLVVAIDGVNTDTMTHLEAQNKIKSASYNLSLTLQKSKRPIPISTTAPPVQTPLPVIPHQKVVVNSPANADYQERFNPSALKDSALSTHKPIEVKGLGGKATIIHAQYNTPISMYSQDAIMDAIAGQAQAQGSDFSGSLPIKDLAVDSASPVYQAVIKSQNKPEDEADEWARRSSNLQSRSFRILAQMTGTEFMQDPDEEALRRSSTPIEHAPVCTSQATTPLLPASAQPPAAASPSAASPPLATAAAHTAIASASTTAPASSPADSPRPQASSYSPAVAASSAPATHTSYSEGPAAPAPKPRVVTTASIRPSVYQPVPASTYSPSPGANYSPTPYTPSPAPAYTPSPAPAYTPSPVPTYTPSPAPAYTPSPAPNYNPAPSVAYSGGPAEPASRPPWVTDDSFSQKFAPGKSTTSISKQTLPRGGPAYTPAGPQVPPLARGTVQRAERFPASSRTPLCGHCNNVIRGPFLVAMGRSWHPEEFTCAYCKTSLADVCFVEEQNNVYCERCYEQFFAPLCAKCNTKIMGEVMHALRQTWHTTCFVCAACKKPFGNSLFHMEDGEPYCEKDYINLFSTKCHGCDFPVEAGDKFIEALGHTWHDTCFICAVCL

SEQ ID NO: 763478 - protein, 764 aa, Homo sapiens
TGRLYSRSSTQPGWAARDRTEAAADSTSMSYSVTLTGPGPWGFRLQGGKDFNMPLTISRITPGSKAAQSQLSQGDLVVAIDGVNTDTMTHLEAQNKIKSASYNLSLTLQKSKRPIPISTTAPPVQTPLPVIPHQKVVVNSPANADYQERFNPSALKDSALSTHKPIEVKGLGGKATIIHAQYNTPISMYSQDAIMDAIAGQAQAQGSDFSGSLPIKDLAVDSASPVYQAVIKSQNKPEDEADEWARRSSNLQSRSFRILAQMTGTEFMQDPDEEALRRSSTPIEHAPVCTSQATTPLLPASAQPPAAASPSAASPPLATAAAHTAIASASTTAPASSPADSPRPQASSYSPAVAASSAPATHTSYSEGPAAPAPKPRVVTTASIRPSVYQPVPASTYSPSPGANYSPTPYTPSPAPAYTPSPAPAYTPSPVPTYTPSPAPAYTPSPAPNYNPAPSVAYSGGPAEPASRPPWVTDDSFSQKFAPGKSTTSISKQTLPRGGPAYTPAGPQVPPLARGTVQRAERFPASSRTPLCGHCNNVIRGPFLVAMGRSWHPEEFTCAYCKTSLADVCFVEEQNNVYCERCYEQFFAPLCAKCNTKIMGEVMHALRQTWHTTCFVCAACKKPFGNSLFHMEDGEPYCEKDYINLFSTKCHGCDFPVEAGDKFIEALGHTWHDTCFICAVCHVNLEGQPFYSKKDRPLCKKHAHTHTHTHTHTQIIKKCMLFKKKSKISQRTVSPPSFIESIFLHFRASVDSEGLLFAKKTKLA

SEQ ID NO: 763479 - protein, 89 aa, Homo sapiens
PAVAASSAPATHTSYSEGPAAPAPKPRVVTTASIRPSVYQPGKRQSRRGGCRKPWAGSRSHKSQEVALGAHPQKNGKQGLANDAPPSVP

SEQ ID NO: 763480 - protein, 759 aa, Homo sapiens
TGRLYSRSSTQPGWAARDRTEAAADSTSMSYSVTLTGPGPWGFRLQGGKDFNMPLTISRITPGSKAAQSQLSQGDLVVAIDGVNTDTMTHLEAQNKIKSASYNLSLTLQKSKRPIPISTTAPPVQTPLPVIPHQKVVVRPRSGHERQPGGTQPPALRRGPAQAPQAPRSSGPPLALPSPGPPPSPHSAEASDPGPPRASLRAKTSPEGARDLLGPKALPGSSQPRQYNNPIGLYSAETLREMAQMYQMSLRGKASGVGLPGGSLPIKDLAVDSASPVYQAVIKSQNKPEDEADEWARRSSNLQSRSFRILAQMTGTEFMQDPDEEALRRSSTPIEHAPVCTSQATTPLLPASAQPPAAASPSAASPPLATAAAHTAIASASTTAPASSPADSPRPQASSYSPAVAASSAPATHTSYSEGPAAPAPKPRVVTTASIRPSVYQPVPASTYSPSPGANYSPTPYTPSPAPAYTPSPAPAYTPSPVPTYTPSPAPAYTPSPAPNYNPAPSVAYSGGPAEPASRPPWVTDDSFSQKFAPGKSTTSISKQTLPRGGPAYTPAGPQVPPLARGTVQRAERFPASSRTPLCGHCNNVIRGPFLVAMGRSWHPEEFTCAYCKTSLADVCFVEEQNNVYCERCYEQFFAPLCAKCNTKIMGEVMHALRQTWHTTCFVCAACKKPFGNSLFHMEDGEPYCEKDYINLFSTKCHGCDFPVEAGDKFIEALGHTWHDTCFICAVCHVNLEGQPFYSKKDRPLCKKHAHTINL

SEQ ID NO: 763481 - protein, 497 aa, Homo sapiens
TGRLYSRSSTQPGWAARDRTEAAADSTSMSYSVTLTGPGPWGFRLQGGKDFNMPLTISRITPGSKAAQSQLSQGDLVVAIDGVNTDTMTHLEAQNKIKSASYNLSLTLQKSKRPIPISTTAPPVQTPLPVIPHQKVVVTPQWPPLQHLPPTPATVRAPPPLHPSPGLSPLPASGLLSTSQCLHLPTARPQGPITVPLPTPPPLPLPTPPPLPLPTPPHLSPPTLHPQHQPIPPHLPPTINPAPSVAYSGGPAEPASRPPWVTDDSFSQKFAPGKSTTSISKQTLPRGGPAYTPAGPQVPPLARGTVQRAERFPASSRTPLCGHCNNVIRGPFLVAMGRSWHPEEFTCAYCKTSLADVCFVEEQNNVYCERCYEQFFAPLCAKCNTKIMGEVMHALRQTWHTTCFVCAACKKPFGNSLFHMEDGEPYCEKDYINLFSTKCHGCDFPVEAGDKFIEALGHTWHDTCFICAVCHVNLEGQPFYSKKDRPLCKKHAHTINL

SEQ ID NO: 763482 - protein, 147 aa, Homo sapiens
TGRLYSRSSTQPGWAARDRTEAAADSTSMSYSVTLTGPGPWGFRLQGGKDFNMPLTISRITPGSKAAQSQLSQGDLVVAIDGVNTDTMTHLEAQNKIKSASYNLSLTLQKSKRPIPISTTAPPVQTPLPVIPHQKVVVRASLLRTLP

SEQ ID NO: 763483 - protein, 708 aa, Homo sapiens
TGRLYSRSSTQPGWAARDRTEAAADSTSMSYSVTLTGPGPWGFRLQGGKDFNMPLTISRITPGSKAAQSQLSQGDLVVAIDGVNTDTMTHLEAQNKIKSASYNLSLTLQKSKRPIPISTTAPPVQTPLPVIPHQKVVVNSPANADYQERFNPSALKDSALSTHKPIEVKGLGGKATIIHAQYNTPISMYSQDAIMDAIAGQAQAQGSDFSGSLPIKDLAVDSASPVYQAVIKSQNKPEDEADEWARRSSNLQSRSFRILAQMTGTEFMQDPDEEALRRSSTPIEHAPVCTSQATTPLLPASAQPPAAASPSAASPPLATAAAHTAIASASTTAPASSPADSPRPQASSYSPAVAASSAPATHTSYSEGPAAPAPKPRVVTTASIRPSVYQPVPASTYSPSPGANYSPTPYTPSPAPAYTPSPAPAYTPSPVPTYTPSPAPAYTPSPAPNYNPAPSVAYSGGPAEPASRPPWVTDDSFSQKFAPGKSTTSISKQTLPRGGPAYTPAGPQVPPLARGTVQRAERFPASSRTPLCGHCNNVIRGPFLVAMGRSWHPEEFTCAYCKTSLADVCFVEEQNNVYCERCYEQFFAPLCAKCNTKIMGEVMHALRQTWHTTCFVCAACKKPFGNSLFHMEDGEPYCEKDYINLFSTKCHGCDFPVEAGDKFIEALGHTWHDTCFICAVCHVNLEGQPFYSKKDRPLCKKHAHTINL

SEQ ID NO: 763484 - protein, 433 aa, Homo sapiens
MEAVYLVVNGLGLVLDVLTLVLDLNFLLVSSLLASLAWLLAFVYNLPHTVLTSLLHLGRGVLLSLLALIEAVVRFTCGGLQALCTLLYSCCSGLESLKLLGHLASHGALRSREILHRGVLNVVSSGHALLRQACDICAIAMSLVAYVINSLVNICLIGTQNLFSLVLALWDAVTGPLWRMTDVVAAFLAHISSSAVAMAILLWTPCQLALELLASAARLLASFVLVNLTGLVLLACVLAVTVTVLHPDFTLRLATQALSQLHARPSYHRLREDVMRLSRLALGSEAWRRVWSRSLQLASWPNRGGAPGAPQGDPMRVFSVRTRRQDTLPEAGRRSEAEEEEARTIRVTPVRGRERLNEEEPPGGQDPWKLLKEQEERKKCVICQDQSKTVLLLPCRHLCLCQACTEILMRHPVYHRNCPLCRRGILQTLNVYL

SEQ ID NO: 763485 - protein, 433 aa, Homo sapiens; identical to SEQ ID NO: 763484

SEQ ID NO: 763486 - protein, 433 aa, Homo sapiens; identical to SEQ ID NO: 763484

SEQ ID NO: 763487 - protein, 433 aa, Homo sapiens; identical to SEQ ID NO: 763484

SEQ ID NO: 763488 - protein, 433 aa, Homo sapiens; identical to SEQ ID NO: 763484

SEQ ID NO: 763489 - protein, 433 aa, Homo sapiens; identical to SEQ ID NO: 763484

SEQ ID NO: 763490 - protein, 433 aa, Homo sapiens; identical to SEQ ID NO: 763484

SEQ ID NO: 763491 - protein, 296 aa, Homo sapiens
MLAVVNQARGITSLVNICLIGTQNLFSLVLALWDAVTGPLWRMTDVVAAFLAHISSSAVAMAILLWTPCQLALELLASAARLLASFVLVNLTGLVLLACVLAVTVTVLHPDFTLRLATQALSQLHARPSYHRLREDVMRLSRLALGSEAWRRVWSRSLQLASWPNRGGAPGAPQGDPMRVFSVRTRRQDTLPEAGRRSEAEEEEARTIRVTPVRGRERLNEEEPPGGQDPWKLLKEQEERKKCVICQDQSKTVLLLPCRHLCLCQACTEILMRHPVYHRNCPLCRRGILQTLNVYL

SEQ ID NO: 763492 - protein, 167 aa, Homo sapiens
MALPPHHPPWGPPVPQHGSHPSVWTLALPPGEPGSCPGGHVSVHVCELCMCVHVARRGKKRVLLCGDRHHSVEGFKLSQDEARVTPSAKNKCLLWYQVCSLLKSEEQREAQFQSAVFTPVRGCRPIQRWPAPSRGGSVLACHSAHLDKGMASLGIGCGTEALNRFKK

SEQ ID NO: 763493 - protein, 116 aa, Homo sapiens
LLVWGRRSHKALKITAHLTSIWMAVIKRTESNAGENVGKLEPLCIAGGNVKRCSYYRKWLRVLKKLNAELPYNPAIPLLGVYPPNVESRDSKRHVYTHVHSIGIHTLYWFCFSSES

SEQ ID NO: 763494 - protein, 60 aa, Homo sapiens
GSPGPRIETADGKEGPAEFPELWLGHGIGTHTGSSSYTGLGWQGKGGWCRSMQQFREQVR

SEQ ID NO: 763495 - protein, 260 aa, Homo sapiens
MKKMAPAMESPTLLCVALLFFAPDGVLAVPQKPKVSLNPPWNRIFKGENVTLTCNGNNFFEVSSTKWFHNGSLSEETNSSLNIVNAKFEDSGEYKCQHQQVNESEPVYLEVFSDWLLLQASAEVVMEGQPLFLRCHGWRNWDVYKVIYYKDGEALKYWYENHNISITNATVEDSGTYYCTGKVWQLDYESEPLNITVIKAPREKYWLQFFIPLLVVILFAVDTGLFISTQQQVTFLLKIKRTRKGFRLLNPHPKPNPKNN

SEQ ID NO: 763496 - protein, 227 aa, Homo sapiens
MKKMAPAMESPTLLCVALLFFAPDGVLAVSSTKWFHNGSLSEETNSSLNIVNAKFEDSGEYKCQHQQVNESEPVYLEVFSDWLLLQASAEVVMEGQPLFLRCHGWRNWDVYKVIYYKDGEALKYWYENHNISITNATVEDSGTYYCTGKVWQLDYESEPLNITVIKAPREKYWLQFFIPLLVVILFAVDTGLFISTQQQVTFLLKIKRTRKGFRLLNPHPKPNPKNN

SEQ ID NO: 763497 - protein, 260 aa, Homo sapiens; identical to SEQ ID NO: 763495

SEQ ID NO: 763498 - protein, 234 aa, Homo sapiens
RGGPSAPRHVCVWERAPPPSRSPRVPRSRRQVLPGTAPPATPSGFEEGPPSSQYPWAIVWGPTVSREDGGDPNSANPGFLDYGFAAPHGLATPHPNSDSMRGDGDGLILGEAPATLRPFLFGGRGEGVDPQLYVTITISIIIVLVATGIIFKFCWDRSQKRRRPSGQQGALRQEESQQPLTDLSPAGVTVLGAFGDSPTPTPDHEEPRGGPRPGMPHPKGAPAFQLNRIPLVNL

SEQ ID NO: 763499 - protein, 90 aa, Homo sapiens
PAELEDDASGHENNDCWDRSQKRRRPSGQQGALRQEESQQPLTDLSPAGVTVLGAFGDSPTPTPDHEEPRGGPRPGMPHPKGAPAFQLNR

SEQ ID NO: 763500 - protein, 565 aa, Homo sapiens
MASTWAIQAHMDQDEPLEVKIEEEKYTTRQDWDLRKNNTHSREVFRQYFRQFCYQETSGPREALSRLRELCHQWLRPETHTKEQILELLVLEQFLTILPEELQAWVQEQHPESGEEVVTVLEDLERELDEPGEQVSVHTGEQEMFLQETVRLRKEGEPSMSLQSMKAQPKYESPELESQQEQVLDVETGNEYGNLKQEVSEEMEPHGKTSSKFENDMSKSARCGETREPEEITEEPSACSREDKQPTCDENGVSLTENSDHTEHQRICPGEESYGCDDCGKAFSQHSHLIEHQRIHTGDRPYKCEECGKAFRGRTVLIRHKIIHTGEKPYKCNECGKAFGRWSALNQHQRLHTGEKHYHCNDCGKAFSQKAGLFHHIKIHTRDKPYQCTQCNKSFSRRSILTQHQGVHTGAKPYECNECGKAFVYNSSLVSHQEIHHKEKCYQCKECGKSFSQSGLIQHQRIHTGEKPYKCDVCEKAFIQRTSLTEHQRIHTGERPYKCDKCGKAFTQRSVLTEHQRIHTGERPYKCDECGNAFRGITSLIQHQRIHTGEKPYQCDECGKAFRQR

SEQ ID NO: 763501 - protein, 565 aa, Homo sapiens; identical to SEQ ID NO: 763500

SEQ ID NO: 763502 - protein, 565 aa, Homo sapiens; identical to SEQ ID NO: 763500

SEQ ID NO: 763503 - protein, 604 aa, Homo sapiens
MASTWAIQAHMDQDEPLEVKIEEEKYTTRQDWDLRKNNTHSREVFRQYFRQFCYQETSGPREALSRLRELCHQWLRPETHTKEQILELLVLEQFLTILPEELQAWVQEQHPESGEEVVTVLEDLERELDEPGEQVSVHTGEQEMFLQETVRLRKEGEPSMSLQSMKAQPKYESPELESQQEQVLDVETGNEYGNLKQEVSEEMEPHGKTSSKFENDMSKSARCGETREPEEITEEPSACSREDKQPTCDENGVSLTENSDHTEHQRICPGEESYGCDDCGKAFSQHSHLIEHQRIHTGDRPYKCEECGKAFRGRTVLIRHKIIHTGEKPYKCNECGKAFGRWSALNQHQRLHTGEKHYHCNDCGKAFSQKAGLFHHIKIHTRDKPYQCTQCNKSFSRRSILTQHQGVHTGAKPYECNECGKAFVYNSSLVSHQEIHHKEKCYQCKECGKSFSQSGLIQHQRIHTGEKPYKCDVCEKAFIQRTSLTEHQRIHTGERPYKCDKCGKAFTQRSVLTEHQRIHTGERPYKCDECGNAFRGITSLIQHQRIHTGEKPYQCDECGKAFRQRKKTSYKEILLKNHSEPQAGVNLLLSSLIPEWQSCFRRDL

SEQ ID NO: 763504 - protein, 565 aa, Homo sapiens; identical to SEQ ID NO: 763500

SEQ ID NO: 763505 - protein, 132 aa, Homo sapiens
MSNYSVSLVGPAPWGFRLQGGKDFNMPLTISSLKDGGKAAQANVRIGDVVLSIDGINAQGMTHLEAQNKIKGCTGSLNMTLQRASAAPKPEPVPVQKPTVTSVCSETSQELAEGQRRGSQGDSKQQNGMMFV

SEQ ID NO: 763506 - protein, 206 aa, Homo sapiens
SPTPSSGRSRDPRLSKLGRPNQGVPSTGRISNSATYSGSVAPANSALGQTQPSDQDTLVQRAEHIPAGKRTPMCAHCNQVIRGPFLVALGKSWHPEEFNCAHCKNTMAYIGFVEEKGALYCELCYEKFFAPECGRCQRKILGEVINALKQTWHVSCFVCVACGKPIRNNVFHLEDGEPYCETDYYALFGTICHGCEFPSCSAVPRS

SEQ ID NO: 763507 - protein, 109 aa, Homo sapiens
MSNYSVSLVGPAPWGFRLQGGKDFNMPLTISSLKDGGKAAQANVRIGDVVLSIDGINAQGMTHLEAQNKIKGCTGSLNMTLQSSGGKSQIKVLAEITFPLGESFFASSI

SEQ ID NO: 763508 - protein, 596 aa, Homo sapiens
MSNYSVSLVGPAPWGFRLQGGKDFNMPLTISSLKDGGKAAQANVRIGDVVLSIDGINAQGMTHLEAQNKIKGCTGSLNMTLQRASAAPKPEPVPVQKGEPKEVVKPVPITSPAVSKVTSTNNMAYNKAPRPFGSVSSPKVTSIPSPSSAFTPAHATTSSHASPSPVAAVTPPLFAASGLHANANLSADQSPSALSAGKTAVNVPRQPTVTSVCSETSQELAEGQRRGSQGDSKQQNGPPRKHIVERYTEFYHVPTHSDASKKRLIEDTEDWRPRTGTTQSRSFRILAQITGTEHLKESEADNTKKANNSQEPSPQLASSVASTRSMPESLDSPTSGRPGVTSLTTAAAFKPVGSTGVIKSPSWQRPNQGVPSTGRISNSATYSGSVAPANSALGQTQPSDQDTLVQRAEHIPAGKRTPMCAHCNQVIRGPFLVALGKSWHPEEFNCAHCKNTMAYIGFVEEKGALYCELCYEKFFAPECGRCQRKILGEVINALKQTWHVSCFVCVACGKPIRNNVFHLEDGEPYCETDYYALFGTICHGCEFPIEAGDMFLEALGYTWHDTCFVCSVCCESLEGQTFFSKKDKPLCKKHAHSVNF

SEQ ID NO: 763509 - protein, 579 aa, Homo sapiens
MSNYSVSLVGPAPWGFRLQGGKDFNMPLTISSLKDGGKAAQANVRIGDVVLSIDGINAQGMTHLEAQNKIKGCTGSLNMTLQRASAAPKPEPVPVQKGEPKEVVKPVPITSPAVSKVTSTNNMAYNKAPRPFGSVSSPKVTSIPSPSSAFTPAHATTSSHASPSPVAAVTPPLFAASGLHANANLSADQSPSALSAGKTAVNVPRQPTVTSVCSETSQELAEGQRRGSQGDSKQQNGPPRKHIVERYTEFYHVPTHSDASKKRLIEDTEDWRPRTGTMKESEADNTKKANNSQEPSPQLASSVASTRSMPESLDSPTSGRPGVTSLTTAAAFKPVGSTGVIKSPSWQRPNQGVPSTGRISNSATYSGSVAPANSALGQTQPSDQDTLVQRAEHIPAGKRTPMCAHCNQVIRGPFLVALGKSWHPEEFNCAHCKNTMAYIGFVEEKGALYCELCYEKFFAPECGRCQRKILGEVINALKQTWHVSCFVCVACGKPIRNNVFHLEDGEPYCETDYYALFGTICHGCEFPIEAGDMFLEALGYTWHDTCFVCSVCCESLEGQTFFSKKDKPLCKKHAHSVNF

SEQ ID NO: 763510 - protein, 473 aa, Homo sapiens
MSNYSVSLVGPAPWGFRLQGGKDFNMPLTISSLKDGGKAAQANVRIGDVVLSIDGINAQGMTHLEAQNKIKGCTGSLNMTLQRASAAPKPEPVPVQKKTQVTNNPGTVKIPPKRPPRKHIVERYTEFYHVPTHSDASKKRLIEDTEDWRPRTGTTQSRSFRILAQITGTEHLKESEADNTKKANNSQEPSPQLASSVASTRSMPESLDSPTSGRPGVTSLTTAAAFKPVGSTGVIKSPSWQRPNQGVPSTGRISNSATYSGSVAPANSALGQTQPSDQDTLVQRAEHIPAGKRTPMCAHCNQVIRGPFLVALGKSWHPEEFNCAHCKNTMAYIGFVEEKGALYCELCYEKFFAPECGRCQRKILGEVINALKQTWHVSCFVCVACGKPIRNNVFHLEDGEPYCETDYYALFGTICHGCEFPIEAGDMFLEALGYTWHDTCFVCSVCCESLEGQTFFSKKDKPLCKKHAHSVNF

SEQ ID NO: 763511 - protein, 487 aa, Homo sapiens
MSNYSVSLVGPAPWGFRLQGGKDFNMPLTISSLKDGGKAAQANVRIGDVVLSIDGINAQGMTHLEAQNKIKGCTGSLNMTLQRASAAPKPEPVPVQKPTVTSVCSETSQELAEGQRRGSQGDSKQQNGPPRKHIVERYTEFYHVPTHSDASKKRLIEDTEDWRPRTGTTQSRSFRILAQITGTEHLKESEADNTKKANNSQEPSPQLASSVASTRSMPESLDSPTSGRPGVTSLTTAAAFKPVGSTGVIKSPSWQRPNQGVPSTGRISNSATYSGSVAPANSALGQTQPSDQDTLVQRAEHIPAGKRTPMCAHCNQVIRGPFLVALGKSWHPEEFNCAHCKNTMAYIGFVEEKGALYCELCYEKFFAPECGRCQRKILGEVINALKQTWHVSCFVCVACGKPIRNNVFHLEDGEPYCETDYYALFGTICHGCEFPIEAGDMFLEALGYTWHDTCFVCSVCCESLEGQTFFSKKDKPLCKKHAHSVNF

SEQ ID NO: 763512 - protein, 474 aa, Homo sapiens
MAYNKAPRPFGSVSSPKVTSIPSPSSAFTPAHATTSSHASPSPVAAVTPPLFAASGLHANANLSADQSPSALSAGKTAVNVPRQPTVTSVCSETSQELAEGQRRGSQGDSKQQNGPPRKHIVERYTEFYHVPTHSDASKKRLIEDTEDWRPRTGTTQSRSFRILAQITGTEHLKESEADNTKKANNSQEPSPQLASSVASTRSMPESLDSPTSGRPGVTSLTTAAAFKPVGSTGVIKSPSWQRPNQGVPSTGRISNSATYSGSVAPANSALGQTQPSDQDTLVQRAEHIPAGKRTPMCAHCNQVIRGPFLVALGKSWHPEEFNCAHCKNTMAYIGFVEEKGALYCELCYEKFFAPECGRCQRKILGEVINALKQTWHVSCFVCVACGKPIRNNVFHLEDGEPYCETDYYALFGTICHGCEFPIEAGDMFLEALGYTWHDTCFVCSVCCESLEGQTFFSKKDKPLCKKHAHSVNF

SEQ ID NO: 763513 - protein, 442 aa, Homo sapiens
MSNYSVSLVGPAPWGFRLQGGKDFNMPLTISSLKDGGKAAQANVRIGDVVLSIDGINAQGMTHLEAQNKIKGCTGSLNMTLQSPPRKHIVERYTEFYHVPTHSDASKKRLIEDTEDWRPRTGTTQSRSFRILAQITGTEHLKESEADNTKKANNSQEPSPQLASSVASTRSMPESLDSPTSGRPGVTSLTTAAAFKPVGSTGVIKSPSWQRPNQGVPSTGRISNSATYSGSVAPANSALGQTQPSDQDTLVQRAEHIPAGKRTPMCAHCNQVIRGPFLVALGKSWHPEEFNCAHCKNTMAYIGFVEEKGALYCELCYEKFFAPECGRCQRKILGEVINALKQTWHVSCFVCVACGKPIRNNVFHLEDGEPYCETDYYALFGTICHGCEFPIEAGDMFLEALGYTWHDTCFVCSVCCESLEGQTFFSKKDKPLCKKHAHSVNF

SEQ ID NO: 763514 - protein, 144 aa, Homo sapiens
MAYIGFVEEKGALYCELCYEKFFAPECGRCQRKILGEVINALKQTWHVSCFVCVACGKPIRNNVFHLEDGEPYCETDYYALFGTICHGCEFPIEAGDMFLEALGYTWHDTCFVCSVCCESLEGQTFFSKKDKPLCKKHAHSVNF

SEQ ID NO: 763515 - protein, 596 aa, Homo sapiens; identical to SEQ ID NO: 763508

SEQ ID NO: 763516 - protein, 343 aa, Homo sapiens
MSNYSVSLVGPAPWGFRLQGGKDFNMPLTISSLKDGGKAAQANVRIGDVVLSIDGINAQGMTHLEAQNKIKGCTGSLNMTLQRASAAPKPEPVPVQKGEPKEVVKPVPITSPAVSKVTSTNNMAYNKAPRPFGSVSSPKVTSIPSPSSAFTPAHATTSSHASPSPVAAVTPPLFAASGLHANANLSADQSPSALSAGKTAVNVPRQPTVTSVCSETSQELAEGQRRGSQGDSKQQNGKIPPKRPPRKHIVERYTEFYHVPTHSDASKKRLIEDTEDWRPRTGTTQSRSFRILAQITGTEHLKESEADNTKKAKEKIPLHVFSPKYTKLRDWHHEVSARALNVQ

SEQ ID NO: 763517 - protein, 596 aa, Homo sapiens; identical to SEQ ID NO: 763508

SEQ ID NO: 763518 - protein, 234 aa, Homo sapiens
MSNYSVSLVGPAPWGFRLQGGKDFNMPLTISSLKDGGKAAQANVRIGDVVLSIDGINAQGMTHLEAQNKIKGCTGSLNMTLQRASAAPKPEPVPVQKPTVTSVCSETSQELAEGQRRGSQGDSKQQNGKIPPKRPPRKHIVERYTEFYHVPTHSDASKKRLIEDTEDWRPRTGTTQSRSFRILAQITGTEHLKESEADNTKKAKEKIPLHVFSPKYTKLRDWHHEVSARALNVQ

SEQ ID NO: 763519 - protein, 214 aa, Homo sapiens
MSNYSVSLVGPAPWGFRLQGGKDFNMPLTISSLKDGGKAAQANVRIGDVVLSIDGINAQGMTHLEAQNKIKGCTGSLNMTLQRASAAPKPEPVPVQKKTQVTNNPGTVKIPPKRPPRKHIVERYTEFYHVPTHSDASKKRLIEDTEDWRPRTGTTQSRSFRILAQITGTEHLKESEADNTKKAKEKIPLHVFSPKYTKLRDWHHEVSARALNVQ

SEQ ID NO: 763520 - protein, 102 aa, Homo sapiens
MSNYSVSLVGPAPWGFRLQGGKDFNMPLTISSLKDGGKAAQANVRIGDVVLSIDGINAQGMTHLEAQNKIKGCTGSLNMTLQRGTILCTQSLSRFLFKRKHK

SEQ ID NO: 763521 - protein, 209 aa, Homo sapiens
MSNYSVSLVGPAPWGFRLQGGKDFNMPLTISSLKDGGKAAQANVRIGDVVLSIDGINAQGMTHLEAQNKIKGCTGSLNMTLQRASAAPKPEPVPVQKKTQVTKKIPPKRPPRKHIVERYTEFYHVPTHSDASKKRLIEDTEDWRPRTGTTQSRSFRILAQITGTEHLKESEADNTKKAKEKIPLHVFSPKYTKLRDWHHEVSARALNVQ

SEQ ID NO: 763522 - protein, 343 aa, Homo sapiens; identical to SEQ ID NO: 763516

SEQ ID NO: 763523 - protein, 534 aa, Homo sapiens
MSNYSVSLVGPAPWGFRLQGGKDFNMPLTISSLKDGGKAAQANVRIGDVVLSIDGINAQGMTHLEAQNKIKGCTGSLNMTLQRASAAPKPEPVPVQKGEPKEVVKPVPITSPAVSKVTSTNNMAYNKAPRPFGSVSSPKVTSIPSPSSAFTPAHATTSSHASPSPVAAVTPPLFAASGLHANANLSADQSPSALSAGKTAVNVPRQPTVTSVCSETSQELAEGQRRGSQGDSKQQNGPPRKHIVERYTEFYHVPTHSDASKKRLIEDTEDWRPRTGTTQSRSFRILAQITGTEHLKESEADNTKKANNSQEPSPQLASSVASTRSMPESLDSPTSGRPGVTSLTTAAAFKPVGSTGVIKSPSWQRPNQGVPSTGRISNSATYSGSVAPANSALGQTQPSDQDTLVQRAEHIPAGKRTPMCAHCNQVIRGPFLVALGKSWHPEEFNCAHCKNTMAYIGFVEEKGALYCELCYEKFFAPECGRCQRKILGEVINALKQTWHVSCFVCVACGKPIRNNVFHLEDGEPYCETDYMPWM

SEQ ID NO: 763524 - protein, 209 aa, Homo sapiens; identical to SEQ ID NO: 763521

SEQ ID NO: 763525 - protein, 488 aa, Homo sapiens
MSNYSVSLVGPAPWGFRLQGGKDFNMPLTISSLKDGGKAAQANVRIGDVVLSIDGINAQGMTHLEAQNKIKGCTGSLNMTLQRASAAPKPEPVPVQKGEPKEVVKPVPITSPAVSKVTSTNNMAYNKAPRPFGSVSSPKVTSIPSPSSAFTPAHATTSSHASPSPVAAVTPPLFAASGLHANANLSADQSPSALSAGKTAVNVPRQPTVTSVCSETSQELAEGQRRGSQGDSKQQNGPPRKHIVERYTEFYHVPTHSDASKKRLIEDTEDWRPRTGTTQSRSFRILAQITGTEHLKESEADNTKKANNSQEPSPQLASSVASTRSMPESLDSPTSGRPGVTSLTTAAAFKPVGSTGVIKSPSWQRPNQGVPSTGRISNSATYSGSVAPANSALGQTQPSDQDTLVQRAEHIPAGKRTPMCAHCNQVIRGPFLVALGKSWHPEEFNCAHCKNTMAYIGFVEEKGALYCELCYEKFFAPECGRCQRKILG

SEQ ID NO: 763526 - protein, 337 aa, Homo sapiens
MSNYSVSLVGPAPWGFRLQGGKDFNMPLTISSLKDGGKAAQANVRIGDVVLSIDGINAQGMTHLEAQNKIKGCTGSLNMTLQRASAAPKPEPVPVQKGEPKEVVKPVPITSPAVSKVTSTNNMAYNKAPRPFGSVSSPKVTSIPSPSSAFTPAHATTSSHASPSPVAAVTPPLFAASGLHANANLSADQSPSALSAGKTAVNVPRQPTVTSVCSETSQELAEGQRRGSQGDSKQQNGPPRKHIVERYTEFYHVPTHSDASKKRLIEDTEDWRPRTGTTQSRSFRILAQITGTEHLKESEADNTKKAKEKIPLHVFSPKYTKLRDWHHEVSARALNVQ

SEQ ID NO: 763527 - protein, 237 aa, Homo sapiens
MSNYSVSLVGPAPWGFRLQGGKDFNMPLTISSLKDGGKAAQANVRIGDVVLSIDGINAQGMTHLEAQNKIKGCTGSLNMTLQRASAAPKPEPVPVQKGEPKEVVKPVPITSPAVSKVTSTNNMAYNKAPRPFGSVSSPKVTSIPSPSSAFTPAHATTSSHASPSPVAAVTPPLFAASGLHANANLSADQSPSALSAGKTAVNVPRQPTVTSVCSETSQELAEGQRRGSQGDSKQQNG

SEQ ID NO: 763528 - protein, 129 aa, Homo sapiens
APTPRRRGNGCETLEAWELTPREQPLDNLSVKIRSRVTREQWLTTVLCEPGCLLWTQRFRLPGFGVYQDSQGNSVQAFSVGAGMDDKGDPIIQRRQRKRYPFTSLVPNTQNYVTGTMKFQHVLLTYSDL

SEQ ID NO: 763529 - protein, 214 aa, Homo sapiens; identical to SEQ ID NO: 763519

SEQ ID NO: 763530 - protein, 153 aa, Homo sapiens
QFKQVIRGPFLVALGKSWHPEEFNCAHCKNTMAYIGFVEEKGALYCELCYEKFFAPECGRCQRKILGEVINALKQTWHVSCFVCVACGKPIRNNVFHLEDGEPYCETVYIMPVVPFLSTLTHKTFAPQGQESVLLLSICLKWCQAHRRHPNLY

SEQ ID NO: 763531 - protein, 596 aa, Homo sapiens; identical to SEQ ID NO: 763508

SEQ ID NO: 763532 - protein, 493 aa, Homo sapiens [sequence omitted]

SEQ ID NO: 763533 - protein, 271 aa, Homo sapiens
MPESLDSPTSGRPGVTSLTTAAAFKPVGSTGVIKSPSWQRPNQGVPSTGRISNSATYSGSVAPANSALGQTQPSDQDTLVQRAEHIPAGKRTPMCAHCNQVIRGPFLVALGKSWHPEEFNCAHCKNTMAYIGFVEEKGALYCELCYEKFFAPECGRCQRKILGEVINALKQTWHVSCFVCVACGKPIRNNVFHLEDGEPYCETDYYALFGTICHGCEFPIEAGDMFLEALGYTWHDTCFVCSVCCESLEGQTFFSKKDKPLCKKHAHSVNF

SEQ ID NO: 763534 - protein, 468 aa, Homo sapiens
PRVADAWLKDGGKAAQANVRIGDVVLSIDGINAQGMTHLEAQNKIKGCTGSLNMTLQRASAAPKPEPVPVQKPTVTSVCSETSQELAEGQRRGSQGDSKQQNGKIPPKRPPRKHIVERYTEFYHVPTHSDASKKRLIEDTEDWRPRTGTTQSRSFRILAQITGTEHLKESEADNTKKANNSQEPSPQLASSVASTRSMPESLDSPTSGRPGVTSLTTAAAFKPVGSTGVIKSPSWQRPNQGVPSTGRISNSATYSGSVAPANSALGQTQPSDQDTLVQRAEHIPAGKRTPMCAHCNQVIRGPFLVALGKSWHPEEFNCAHCKNTMAYIGFVEEKGALYCELCYEKFFAPECGRCQRKILGEVINALKQTWHVSCFVCVACGKPIRNNVFHLEDGEPYCETDYYALFGTICHGCEFPIEAGDMFLEALGYTWHDTCFVCSVCCESLEGQTFFSKKDKPLCKKHAHSVNF

SEQ ID NO: 763535 - protein, 596 aa, Homo sapiens; identical to SEQ ID NO: 763508

SEQ ID NO: 763536 - protein, 111 aa, Homo sapiens
  misc_feature (4)..(5): Xaa can be any naturally occurring amino acid
  misc_feature (12)..(12): Xaa can be any naturally occurring amino acid
HEKXXKHFCFHXWHVSCFVCVACGKPIRNNVFHLEDGEPYCETDYYALFGTICHGCEFPIEAGDMFLEALGYTWHDTCFVCSVCCESLEGQTFFSKKDKPLCKKHAHSVNF

SEQ ID NO: 763537 - protein, 596 aa, Homo sapiens; identical to SEQ ID NO: 763508

SEQ ID NO: 763538 - protein, 596 aa, Homo sapiens; identical to SEQ ID NO: 763508

SEQ ID NO: 763539 - protein, 343 aa, Homo sapiens; identical to SEQ ID NO: 763516

SEQ ID NO: 763540 - protein, 341 aa, Homo sapiens
MSNYSVSLVGPAPWGFRLQGGKDFNMPLTISSLKDGGKAAQANVRIGDVVLSIDGINAQGMTHLEAQNKIKGCTGSLNMTLQRASAAPKPEPVPVQKGEPKEVVKPVPITSPAVSKVTSTNNMAYNKAPRPFGSVSSPKVTSIPSPSSAFTPAHATTSSHASPSPVAAVTPPLFAASGLHANANLSADQSPSALSAGKTAVNVPRQPTVTSVCSETSQELAEGQRRGSQGDSKQQNGPPRKHIVERYTEFYHVPTHSDASKKRLIEDTEDWRPRTGTTQSRSFRILAQITGTEHLKESEADNTKKAKASAAPKPEPVPVQKGEPKEVVKPVPITSPAVVCC

SEQ ID NO: 763541 - protein, 132 aa, Homo sapiens
MSNYSVSLVGPAPWGFRLQGGKDFNMPLTISSLKDGGKAAQANVRIGDVVLSIDGINAQGMTHLEAQNKIKGCTGSLNMTLQSSYSGVTQLLRRLRQENRLNPGGGGCSELRSRLGDRTRLRLKKKKCLCSV

SEQ ID NO: 763542 - protein, 118 aa, Homo sapiens
MWSERLDIQRDNGMTICTNGTMAHNLQQPAQEANPSPAAARMDAGLPSESERLSCPTVWAPPPSCLLWEIRRVKVKLDLAQRCPQGRPELHKLPPSCLWDQLCIAPKPSSVSAFCCNN

SEQ ID NO: 763543 - protein, 403 aa, Homo sapiens
MSGSDGGLEEEPELSITLTLRMLMHGKEVGSIIGKKGETVKRIREQSSARITISEGSCPERITTITGSTAAVFHAVSMIAFKLDEDLCAAPANGGNVSRPPVTLRLVIPASQCGSLIGKAGTKIKEIRETTGAQVQVAGDLLPNSTERAVTVSGVPDAIILCVRQICAVILESPPKGATIPYHPSLSLGTVLLSANQGFSVQGQYGAVTPAEVTKLQQLSSHAVPFATPSVVPGLDPGTQTSSQEFLVPNDLIGCVIGRQGSKISEIRQMSGAHIKIGNQAEGAGERHVTITGSPVSIALAQYLITACLETAKSTSGGTPSSAPADLPAPFSPPLTALPTAPPGLLGTPYAISLSNFIGLKPMPFLALPPASPGPPPGLAAYTAKMAAANGSKKAERQKFSPY

SEQ ID NO: 763544 - protein, 369 aa, Homo sapiens
MPRCPALILYLQSSARITISEGSCPERITTITGSTAAVFHAVSMIAFKLDEDLCAAPANGGNVSRPPVTLRLVIPASQCGSLIGKAGTKIKEIRETTGAQVQVAGDLLPNSTERAVTVSGVPDAIILCVRQICAVILESPPKGATIPYHPSLSLGTVLLSANQGFSVQGQYGAVTPAEVTKLQQLSSHAVPFATPSVVPGLDPGTQTSSQEFLVPNDLIGCVIGRQGSKISEIRQMSGAHIKIGNQAEGAGERHVTITGSPVSIALAQYLITACLETAKSTSGGTPSSAPADLPAPFSPPLTALPTAPPGLLGTPYAISLSNFIGLKPMPFLALPPASPGPPPGLAAYTAKMAAANGSKKAERQKFSPY

SEQ ID NO: 763545 - protein, 403 aa, Homo sapiens; identical to SEQ ID NO: 763543

SEQ ID NO: 763546 - protein, 550 aa, Homo sapiens
MSGSDGGLEEEPELSITLTLRMLMHGKEVGSIIGKKGETVKRIREQSSARITISEGSCPERITTITGSTAAVFHAVSMIAFKLDEDLCAAPANGGNVSRPPVTLRLVIPASQCGSLIGKAGTKIKEIRETTGAQVQVAGDLLPNSTERAVTVSGVPDAIILCVRQICAVILESPPKGATIPYHPSLSLGTVLLSANQGFSVQGQYGAVTPAEVTKLQQLSSHAVPFATPSVVPGLDPGTQTSSQEFLVPNDLIGCVIGRQGSKISEIRQMSGAHIKIGNQAEGAGERHVTITGSPVSIALAQYLITAWVSAGLGGSGGAGHGSHVPKKGRGGERKLASSLCLGPTSASPNPTPIPHGLCLITLCCPISPLYIHLSFSIAVSFPWVSGHPISPCTSCYICLSFLPFLFHLSHLPLIVLCSLPLSCLSSNLMPISALIAPLSLPLSPLSPLYIPLSSLETAKSTSGGTPSSAPADLPAPFSPPLTALPTAPPGLLGTPYAISLSNFIGLKPMPFLALPPASPGPPPGLAAYTAKMAAANGSKKAERQKFSPY

SEQ ID NO: 763547 - protein, 323 aa, Homo sapiens
MSGSDGGLEEEPELSITLTLRMLMHGKEVGSIIGKKGETVKRIREQSSARITISEGSCPERITTITGSTAAVFHAVSMIAFKLDEDLCAAPANGGNVSRPPVTLRLVIPASQCGSLIGKAGTKIKEIRETTGAQVQVAGDLLPNSTERAVTVSGVPDAIILCVRQICAVILESPPKGATIPYHPSLSLGTVLLSANQGFSVQGQYGAVTPAEVTKLQQLSSHAVPFATPSVVPGLDPGTQTSSQEFLVPNDLIGCVIGRQGSKISEIRQMSGAHIKIGNQAEGAGERHVTITGSPVSIALAQYLITAWAAAGLGGLHCQDGSS

SEQ ID NO: 763548 - protein, 403 aa, Homo sapiens; identical to SEQ ID NO: 763543

SEQ ID NO: 763549 - protein, 403 aa, Homo sapiens; identical to SEQ ID NO: 763543

SEQ ID NO: 763550 - protein, 352 aa, Homo sapiens
MSENSCPELINILTGSNYHALHIIIADCFKSWITSFCLGLAILDSFSWSLTILVLDIPASQCGSLIGKAGTKIKEIRETTGAQVQVAGDLLPNSTERAVTVSGVPDAIILCVRQICAVILESPPKGATIPYHPSLSLGTVLLSANQGFSVQGQYGAVTPAEVTKLQQLSSHAVPFATPSVVPGLDPGTQTSSQEFLVPNDLIGCVIGRQGSKISEIRQMSGAHIKIGNQAEGAGERHVTITGSPVSIALAQYLITACLETAKSTSGGTPSSAPADLPAPFSPPLTALPTAPPGLLGTPYAISLSNFIGLKPMPFLALPPASPGPPPGLAAYTAKMAAANGSKKAERQKFSPY

SEQ ID NO: 763551 - protein, 360 aa, Homo sapiens
MSGSDGGLEEEPELSITLTLRMLMHGKEVGSIIGKKGETVKRIREQSSARITISEGSCPERITTITGSTAAVFHAVSMIAFKLDEDLCAAPANGGNVSRPPVTLRLVIPASQCGSLIGKAGTKIKEIRESPPKGATIPYHPSLSLGTVLLSANQGFSVQGQYGAVTPAEVTKLQQLSSHAVPFATPSVVPGLDPGTQTSSQEFLVPNDLIGCVIGRQGSKISEIRQMSGAHIKIGNQAEGAGERHVTITGSPVSIALAQYLITACLETAKSTSGGTPSSAPADLPAPFSPPLTALPTAPPGLLGTPYAISLSNFIGLKPMPFLALPPASPGPPPGLAAYTAKMAAANGSKKAERQKFSPY

SEQ ID NO: 763552 - protein, 323 aa, Homo sapiens; identical to SEQ ID NO: 763547

SEQ ID NO: 763553 - protein, 507 aa, Homo sapiens
MSGSDGGLEEEPELSITLTLRMLMHGKEVGSIIGKKGETVKRIREQSSARITISEGSCPERITTITGSTAAVFHAVSMIAFKLDEDLCAAPANGGNVSRPPVTLRLVIPASQCGSLIGKAGTKIKEIRESPPKGATIPYHPSLSLGTVLLSANQGFSVQGQYGAVTPAEVTKLQQLSSHAVPFATPSVVPGLDPGTQTSSQEFLVPNDLIGCVIGRQGSKISEIRQMSGAHIKIGNQAEGAGERHVTITGSPVSIALAQYLITAWVSRGLGGSGGAGHGSHVPKKGRGGERKLASSLCLGPTSASPNPTPIPHGLCLITLCCPISPLYIHLSFSIAVSFPWVSGHPISPCTSCYICLSFLPFLFHLSHLPLIVLCSLPLSCLSSNLMPISALIAPLSLPLSPLSPLYIPLSSLETAKSTSGGTPSSAPADLPAPFSPPLTALPTAPPGLLGTPYAISLSNFIGLKPMPFLALPPASPGPPPGLAAYTAKMAAANGSKKAERQKFSPY

SEQ ID NO: 763554 - protein, 134 aa, Homo sapiens
MSGAHIKIGNQAEGAGERHVTITGSPVSIALAQYLITACLETAKSTSGGTPSSAPADLPAPFSPPLTALPTAPPGLLGTPYAISLSNFIGLKPMPFLALPPASPGPPPGLAAYTAKMAAANGSKKAERQKFSPY

SEQ ID NO: 763555 - protein, 213 aa, Homo sapiens
MSGSDGGLEEEPELSITLTLRMLMHGKEVGSIIGKKGETVKRIREQSSARITISEGSCPERITTITGSTAAVFHAVSMIAFKLDEDLCAAPANGGNVSRPPVTLRLVIPASQCGSLIGKAGTKIKEIRETTGAQVQVAGDLLPNSTERAVTVSGVPDAIILCVRQICAVILESPPKGATIPYHPSLSLGTVLLSANQICLYPDPHPLAFRDPL

SEQ ID NO: 763556 - protein, 425 aa, Homo sapiens
MPRCPALILYLQSSARITISEGSCPERITTITGSTAAVFHAVSMIAFKLDEDLCAAPANGGNVSRPPVTLRLVIPASQCGSLIGKAGTKIKEIREEVRGEIYHPQGIRGKGAVVRGVLGLWRPPHLESSEPGQPFSGLWEQPEVAPVLCLQTTGAQVQVAGDLLPNSTERAVTVSGVPDAIILCVRQICAVILESPPKGATIPYHPSLSLGTVLLSANQGFSVQGQYGAVTPAEVTKLQQLSSHAVPFATPSVVPGLDPGTQTSSQEFLVPNDLIGCVIGRQGSKISEIRQMSGAHIKIGNQAEGAGERHVTITGSPVSIALAQYLITACLETAKSTSGGTPSSAPADLPAPFSPPLTALPTAPPGLLGTPYAISLSNFIGLKPMPFLALPPASPGPPPGLAAYTAKMAAANGSKKAERQKFSPY

SEQ ID NO: 763557 - protein, 343 aa, Homo sapiens
MEAGQVAARTHSQVAVAPASPDRMSGSDGGLEEEPELSITLTLRMLMHGKEVGSIIGKKGETVKRIREQSSARITISEGSCPERITTITGSTAAVFHAVSMIAFKLDEDLCAAPANGGNVSRPPVTLRLVIPASQCGSLIGKAGTKIKEIREVTKLQQLSSHAVPFATPSVVPGLDPGTQTSSQEFLVPNDLIGCVIGRQGSKISEIRQMSGAHIKIGNQAEGAGERHVTITGSPVSIALAQYLITACLETAKSTSGGTPSSAPADLPAPFSPPLTALPTAPPGLLGTPYAISLSNFIGLKPMPFLALPPASPGPPPGLAAYTAKMAAANGSKKAERQKFSPY

SEQ ID NO: 763558 - protein, 403 aa, Homo sapiens; identical to SEQ ID NO: 763543

SEQ ID NO: 763559 - protein, 403 aa, Homo sapiens; identical to SEQ ID NO: 763543

SEQ ID NO: 763560 - protein, 403 aa, Homo sapiens; identical to SEQ ID NO: 763543

SEQ ID NO: 763561 - protein, 426 aa, Homo sapiens
MEAGQVAARTHSQVAVAPASPDRMSGSDGGLEEEPELSITLTLRMLMHGKEVGSIIGKKGETVKRIREQSSARITISEGSCPERITTITGSTAAVFHAVSMIAFKLDEDLCAAPANGGNVSRPPVTLRLVIPASQCGSLIGKAGTKIKEIRETTGAQVQVAGDLLPNSTERAVTVSGVPDAIILCVRQICAVILESPPKGATIPYHPSLSLGTVLLSANQGFSVQGQYGAVTPAEVTKLQQLSSHAVPFATPSVVPGLDPGTQTSSQEFLVPNDLIGCVIGRQGSKISEIRQMSGAHIKIGNQAEGAGERHVTITGSPVSIALAQYLITACLETAKSTSGGTPSSAPADLPAPFSPPLTALPTAPPGLLGTPYAISLSNFIGLKPMPFLALPPASPGPPPGLAAYTAKMAAANGSKKAERQKFSPY

SEQ ID NO: 763562 - protein, 77 aa, Homo sapiens
SRAPGRPGSAPVITPHCSQLMSLAVVSGRLSRGQCGTERPSRRAAAAAAAGQPQREPARLQRGHTRRSLWPQPRLTE

SEQ ID NO: 763563 - protein, 77 aa, Homo sapiens; identical to SEQ ID NO: 763562

SEQ ID NO: 763564 - protein, 369 aa, Homo sapiens; identical to SEQ ID NO: 763544

SEQ ID NO: 763565 - protein, 377 aa, Homo sapiens
MSGSDGGLEEEPELSITLTLRMLMHGKEVGSIIGKKGETVKRIREQSSARITISEGSCPERITTITGSTAAVFHAVSMIAFKLDEDLCAAPANGGNVSRPPVTLRLVIPASQCGSLIGKAGTKIKEIRETTGAQVQVAGDLLPNSTERAVTVSGVPDAIILCVRQICAVILESPPKGATIPYHPSLSLGTVLLSANQGFSVQGQYGAVTPAEVTKLQQLSSHAVPFATPSVVPGLDPGTQTSSQEFLVPNDLIGCVIGRQGSKISEIRQMSGAHIKIGNQAEGAGERHVTITGSPVSIALAQYLITACLETAKSTSGGTPSSAPADLPAPFSPPLTALPTAPPGLLGTPYAISLSNFIGLKPMPFLAHHLQISCCFH

SEQ ID NO: 763566 - protein, 296 aa, Homo sapiens
IAHARPPVVNRPRLHQDQEIRETTGAQVQVAGDLLPNSTERAVTVSGVPDAIILCVRQICAVILESPPKGATIPYHPSLSLGTVLLSANQGFSVQGQYGAVTPAEVTKLQQLSSHAVPFATPSVVPGLDPGTQTSSQEFLVPNDLIGCVIGRQGSKISEIRQMSGAHIKIGNQAEGAGERHVTITGSPVSIALAQYLITACLETAKSTSGGTPSSAPADLPAPFSPPLTALPTAPPGLLGTPYAISLSNFIGLKPMPFLALPPASPGPPPGLAAYTAKMAAANGSKKAERQKFSPY

SEQ ID NO: 763567 - protein, 360 aa, Homo sapiens; identical to SEQ ID NO: 763551

SEQ ID NO: 763568 - protein, 432 aa, Homo sapiens
MSGSDGGLEEEPELSITLTLRMLMHGKEVGSIIGKKGETVKRIREQSSARITISEGSCPERITTITGSTAAVFHAVSMIAFKLDEDLCAAPANGGNVSRPPVTLRLVIPASQCGSLIGKAGTKIKEIRETTGAQVQVAGDLLPNSTERAVTVSGVPDAIILCVRQICAVILESPPKGATIPYHPSLSLGTVLLSANQGFSVQGQYGAVTPAEVTKLQQLSSHAVPFATPSVVPGLDPGTQTSSQEFLVPNDLIGCVIGRQGSKISEIRQMSGAHIKIGNQAEGAGERHVTITGSPVSIALAQYLITACCCLETASPNSGGTPKFGSRSTDCPQFTAPMKGLRQRKPLTRWEHLCHPLQRNSAKTCPLVSTAPQAAAGTEAQGQKGRTEKDRRGRNPTATAEGGLSNIGLDTERTTVNATDEDQQTQKTGRQS

SEQ ID NO: 763569 - protein, 210 aa, Homo sapiens
  misc_feature (7)..(7): Xaa can be any naturally occurring amino acid
VPFFLAXFLSTNPIPHGLCLITLCCPISPLYIHLSFSIAVSFPWVSGHPISPCTSCYICLSFLPFLFHLSHLPLIVLCSLPLSCLSSNLMPISALIAPLSLPLSPLSPLYIPLSSLETAKSTSGGTPSSAPADLPAPFSPPLTALPTAPPGLLGTPYAISLSNFIGLKPMPFLALPPASPGPPPGLAAYTAKMAAANGSKKAERQKFSPY

SEQ ID NO: 763570 - protein, 158 aa, Homo sapiens
  misc_feature (157)..(157): Xaa can be any naturally occurring amino acid
MPRCPALILYLQSSARITISEGSCPERITTITGSTAAVFHAVSMIAFKLDEDLCAAPANGGNVSRPPVTLRLVIPASQCGSLIGKAGTKIKEIREATLSGSFRALIVQVPGHLCPDSPDRDVPETGPLQAMILCGGQMGLAIGQSPPKEVSVRDHFXQ

SEQ ID NO: 763571 - protein, 116 aa, Homo sapiens
MNSVFSKRHAKLELDEKRRKRWDIQRIREQRILQRLQLRMYKKKGIQESEPEVTSFFPEPDDVESLMITPFLPVVAFGRPLPKLTPQNFELPWLDERSRCRLEIQKKQTPHRTCRK

SEQ ID NO: 763572 - protein, 116 aa, Homo sapiens; identical to SEQ ID NO: 763571

SEQ ID NO: 763573 - protein, 116 aa, Homo sapiens; identical to SEQ ID NO: 763571

SEQ ID NO: 763574 - protein, 116 aa, Homo sapiens; identical to SEQ ID NO: 763571

SEQ ID NO: 763575 - protein, 116 aa, Homo sapiens; identical to SEQ ID NO: 763571

SEQ ID NO: 763576 - protein, 116 aa, Homo sapiens; identical to SEQ ID NO: 763571

SEQ ID NO: 763577 - protein, 116 aa, Homo sapiens; identical to SEQ ID NO: 763571

SEQ ID NO: 763578 - protein, 116 aa, Homo sapiens; identical to SEQ ID NO: 763571

SEQ ID NO: 763579 - protein, 127 aa, Homo sapiens
MKDPSRSSTSPSIINEDVIINGHSHEDDNPFAEYMWMENEEEFNRQIEEELWEEEFIERCFQEMLEEEEEHEWFIPARDLPQTMDQIQDQFNDLVISDGSSLEDLVVKSNLNPNAKEFVPGVKYGNI

SEQ ID NO: 763580 - protein, 127 aa, Homo sapiens; identical to SEQ ID NO: 763579

SEQ ID NO: 763581 - protein, 114 aa, Homo sapiens
MKDPSRSSTSPSIINEDVIINGHSHEDDNPFAEYMWMENEEEFNRQIEEELWEEEFIERCFQEMLEEEEEHEWFIPARDLPQTMDQIQDQFNDLVISDGSSLEDLVVKSYFSSF

SEQ ID NO: 763582 - protein, 167 aa, Homo sapiens
SEDGRVWEQWYAPIPAFQRERATAFLLHPAAGRRGALERLLRVHTCAALETDFGVARSRARSLVASEGRADRTRGRGWRRRRVKSLPGWGVCLDWRREAAGEAHVERGSGAACGDPRRPTGFVGCRPRCCALGMEVREWRFPLMIQGCARCSLGTQIEVKNDNQHQP

SEQ ID NO: 763583 - protein, 127 aa, Homo sapiens; identical to SEQ ID NO: 763579

SEQ ID NO: 763584 - protein, 127 aa, Homo sapiens; identical to SEQ ID NO: 763579

SEQ ID NO: 763585 - protein, 127 aa, Homo sapiens; identical to SEQ ID NO: 763579

SEQ ID NO: 763586 - protein, 127 aa, Homo sapiens; identical to SEQ ID NO: 763579

SEQ ID NO: 763587 - protein, 100 aa, Homo sapiens
ILRRTRGPPKMKIERINRQIEEELWEEEFIERCFQEMLEEEEEHEWFIPARDLPQTMDQIQDQFNDLVISDGSSLEDLVVKSNLNPNAKEFVPGVKYGNI

SEQ ID NO: 763588 - protein, 102 aa, Homo sapiens
MKDPSRSSTSPSIINEDVIINGHSHEDDNPFAEYMWMENEEEFNRQNLLNAVSKKCWKRKKSMNGLFQLEISHKLWTKSKTSLMTLLSVMALLWKILWSRAI

SEQ ID NO: 763589 - protein, 356 aa, Homo sapiens
SEDGRVWEQWYAPIPAFQRERATAFLLHPAAGRRGALERLLRVHTCAALETDFGVARSRARSLVASEGRADRTRGRGWRRRRVKSLPGWGVCLDWRREAAGEAHVERGSGAACGDPRRPTGFVGCRPRCCALGEGSSRAEWRQGCGGRGTASRRRQRGLKGSLGGWPPSPLRPPLFIASFHQVCGMSLGRLRLCLLRDMAVAFFSLSLLMIWISQLSIRVLSGARVAGIALSPVPHSPGPLSLRRVPFPLPPSHRLGNKAYCFYPLYACASPRAAPTCCACAPQPRLGFGERGAEGLAGSWRLGGTLQPSTGLIRRSSFSRFFAIATPYFWLYCSSCPGKKNLWGTGNPYPRRALS

SEQ ID NO: 763590 - protein, 127 aa, Homo sapiens; identical to SEQ ID NO: 763579

SEQ ID NO: 763591 - protein, 356 aa, Homo sapiens; identical to SEQ ID NO: 763589

SEQ ID NO: 763592 - protein, 127 aa, Homo sapiens; identical to SEQ ID NO: 763579

SEQ ID NO: 763593 - protein, 127 aa, Homo sapiens; identical to SEQ ID NO: 763579

SEQ ID NO: 763594 - protein, 127 aa, Homo sapiens; identical to SEQ ID NO: 763579

SEQ ID NO: 763595 - protein, 127 aa, Homo sapiens; identical to SEQ ID NO: 763579

SEQ ID NO: 763596 - protein, 131 aa, Homo sapiens
MKDPSRSSTSPSIINEDVIINGHSHEDDNPFAEYMWMENEEEFNRQIEEELWEEEFIERCFQEMLEEEEEHEWFIPARDLPQTMDQIQDQFNDLVISDGSSLEDLVVKSNLNPNAKEFVPGVKRRRMKPRR

SEQ ID NO: 763597 - protein, 133 aa, Homo sapiens
SEDGRVWEQWYAPIPAFQRERATAFLLHPAAGRRGALERLLRVHTCAALETDFGVARSRARSLVASEGRADRTRGRGWRRRRVKSLPGWGVCLDWRREAAGEAHVERGSGAACGDPRRPTGFVGCRPRCCALG

SEQ ID NO: 763598 - protein, 111 aa, Homo sapiens
DPSASASKSAEITDVSHHAWPKENDITPHIPGGVYPPVIWFRISGRKDRDITSHIARGVTWFVISHGGEGNITLRIVKGIHSPVIQFIIFRGVEEDIMLHIAGGISPLWFG

SEQ ID NO: 763599 - protein, 39 aa, Homo sapiens
MVTKYVALLIFNGRAPQCYYLSNKKVESQSYLLLLILES

SEQ ID NO: 763600 - protein, 276 aa, Homo sapiens
WGRGVGWVQYPGRSLPVTGADWGRYLGLCCLWSGWGAGLMGHYLVLQHPWQGWVVDTIECPPRVVWGCYQGNTACSSLWVCCGHNLGAKLVVRGGRLGVVWGEAALLLPAAGCGGGHDSGGLRGRGPSPLPGLKVLEGEQLLLVLERRGCTEFSRQSSDHCRAFAPTMVTRPLPSCSVLWRPSGSPRHGVVGTTGAQGPVGGGVRNGNWYLGGEDWLGLSFCYSCSPGSPGHCGVSSPHPRSGGQLGLGGEAGLWRVGVRAFAKTGPSHPVASMTR

SEQ ID NO: 763601 - protein, 364 aa, Homo sapiens
AAAAAADSGSHCHAPPTTARRAFPIPFGSKSNMATLKDQLIYNLLKEEQTPQNKITVVGVGAVGMACAISILMKDLADELALVDVIEDKLKGEMMDLQHGSLFLRTPKIVSGKDYNVTANSKLVIITAGARQQEGESRLNLVQRNVNIFKFIIPNVVKYSPNCKLLIVSNPVDILTYVAWKISGFPKNRVIGSGCNLDSARFRYLMGERLGVHPLSCHGWVLGEHGDSSVPVWSGMNVAGVSLKTLHPDLGTDKDKEQWKEVHKQVVESAYEVIKLKGYTSWAIGLSVADLAESIMKNLRRVHPVSTMIKGLYGIKDDVFLSVPCILGQNGISDLVKVTLTSEEEARLKKSADTLWGIQKELQF

SEQ ID NO: 763602 - protein, 66 aa, Homo sapiens
GDHAQARCTVRGHHGGFSTLAVDAGSMDHGCWADGERLWSVALEVVRWEAAVGRPWRMPDKGMSDT

SEQ ID NO: 763603 - protein, 66 aa, Homo sapiens; identical to SEQ ID NO: 763602

SEQ ID NO: 763604 - protein, 66 aa, Homo sapiens; identical to SEQ ID NO: 763602

SEQ ID NO: 763605 - protein, 120 aa, Homo sapiens
HASARQEHLRSHALSVHRSNRPIICKGCRRTFTSHLSQGLRRFGLCDSCTCVTDTPDDDDDLMPINLSLVEASSESQEKSDTDNDWPIYVESGEENDPAGDDSDDKPQIQPNLSDRETLT

SEQ ID NO: 763606 - protein, 114 aa, Homo sapiens
MVSPHSPSSPHLCLKPPWLPRVWIKLRSLNAPQVLGVVSPSHPSLILSHKSCLLFLQLCLVTQTLCCSNALTPSSACSQATSLQNPPCLPGGHRDPRHTVCLWQCPPAWGVFQS

SEQ ID NO: 763607 - protein, 103 aa, Homo sapiens
MVSIGLQNKGLYPMPVPKAHLSASHLDLVPSRILTSRLCLPRTLLSSAQATCFPPHTELTRYPAQGSAPPLSFRLFLCEAVVRPAPVYQATHPQIRSAFPPKL

SEQ ID NO: 763608 - protein, 194 aa, Homo sapiens
MFLTAVNPQPLSTPSWQIETKYSTKVLTGNWMEERRKFTRDTDKTPQSIYRKEYIPFPDHRPDQISRWYGKRKVEGLPYKHLITHHQEPPHRYLISTYDDHYNRHGYNPGLPPLRTWNGQKLLWLPEKSDFPLLAPPTNYGLYEQLKQRQLTPKAGLKQSTYTSSYPRPPLCAMSWREHAVPVPPHRLHPLPHF

SEQ ID NO: 763609 - protein, 194 aa, Homo sapiens; identical to SEQ ID NO: 763608

SEQ ID NO: 763610 - protein, 113 aa, Homo sapiens
NQLGFRIRVRGWASSWANRSSPAVSSWTPFSSSISSTMSKGSPRSPHSDKDQAFHVRLIASQLLAWDLQPHRGSKWTPTAPAPLVAPAPALAPANAKSANAPPARRAAAPAAP

SEQ ID NO: 763611 - protein, 102 aa, Homo sapiens
MKENMLRAAREKGRVTHKGKPIRLTADLSAEILQARREWGPIFNILKEKNFQPRISYPAKLSFISEGEIKYFTDKQMLRDFVTTRPALKVLLKEVPNMERNN

SEQ ID NO: 763612 - protein, 98 aa, Homo sapiens
DTRSPGPKSFVSQLDPLRPPPCLEVYASGDLESYLLYPGGSQILTLKEATTPPSDTHSCEYGNTAQEPHCREYSPGYTLNMPQGCRIVPAAWETEKGG

SEQ ID NO: 763613 - protein, 560 aa, Homo sapiens
CGPGRVTRCVLCPQEMLQDKGLSESEEAFRAPGPALGEASAANAPEPALAAPGLSGAALGSPPGPGADVVAAAAAEQTIENIKVGLHEKELWKKFHEAGTEMIITKAGRRMFPSYKVKVTGMNPKTKYILLIDIVPADDHRYKFCDNKWMVAGKAEPAMPGRLYVHPDSPATGAHWMRQLVSFQKLKLTNNHLDPFGHIILNSMHKYQPRLHIVKADENNAFGSKNTAFCTHVFPETSFISVTSYQNHKITQLKIENNPFAKGFRGSDDSDLRVARLQSKEYPVISKSIMRQRLISPQLSATPDVGPLLGTHQALQHYQHENGAHSQLAEPQDLPLSTFPTQRDSSLFYHCLKRRDGTRHLDLPCKRSYLEAPSSVGEDHYFRSPPPYDQQMLSPSYCSEVTPREACMYSGSGPEIAGVSGVDDLPPPPLSCNMWTSVSPYTSYSVQTMETVPYQPFPTHFTATTMMPRLPTLSAQSSQPPGNAHFSVYNQLSQSQVRERGPSASFPRERGLPQGCERKPPSPHLNAANEFLYSQTFSLSRESSLQYHSGMGTVENWTDG

SEQ ID NO: 763614 - protein, 415 aa, Homo sapiens
QRSPLRSAREPTRGSSGTHRPETQVPAFSVSAPVPGGADMSESQDEVPDEVENQFILRLPLEHACTVRNLARSQSVKMKDKLKIDLLPDGRHAVVEVEDVPLAAKLVDLPCVIESLRTLDKKTFYKTADISQMLVCTADGDIHLSPEEPAASTDPNIVRKKERGREEKCVWKHGITPPLKNVRKKRFRKTQKKVPDVKEMEKSSFTEYIESPDVENEVKRLLRSDAEAVSTRWEVIAEDGTKEIESQGSIPGFLISSGMSSHKQGHTSSEYDMLREMFSDSRSNNDDDEDEDDEDEDEDEDEDEDEDKEEEEEDCSEEYLERQLQAEFIESGQYRANEGTSSIVMEIQKQIEKKEKKLHKIQNKAQRQKDLIMKVENLTLKNHFQSVLEQLELQEKQKNEKLISLQEQLQRFLKK

SEQ ID NO: 763615 - protein, 302 aa, Homo sapiens
MSESQDEVPDEVENQFILRLPLEHACTVRNLARSQSVKMKDKLKIDLLPDGRHAVVEVEDVPLAAKLVDLPCVIESLRTLDKKTFYKTADISQMLVCTADGDIHLSPEEPAASTDPNIVRKKERGREEKCVWKHGITPPLKNVRKKRFRKTQKKVPDVKEMEKSSFTEYIESPDVENEVKRLLRSDAEAVSTRWEVIAEDGTKEIESQGSIPGFLISSGMSSHKQGHTSSVMEIQKQIEKKEKKLHKIQNKAQRQKDLIMKVENLTLKNHFQSVLEQLELQEKQKNEKLISLQEQLQRFLKK

SEQ ID NO: 763616 - protein, 300 aa, Homo sapiens
QRSPLRSAREPTRGSSGTHRPETQVPAFSVSAPVPGGADMSESQDEVPDEVENQFILRLPLEHACTVRNLARSQSVKMKDKLKIDLLPDGRHAVVEVEDVPLAAKLVDLPCVIESLRTLDKKTFYKTADISQMLVCTADGDIHLSPEEPAASTDPNIVRKKERGREEKCVWKHGITPPLKNVRKKRFRKTQKKVPDVKEMEKSSFTEYIESPDVENEVKRLLRSDAEAVSTRWEVIAEDGTKEIESQGSIPGFLISSGMSSHKQGHTSSGTLVKAKQEFQIGQVLTGYQIIFHKFIGQSK

SEQ ID NO: 763617 - protein, 424 aa, Homo sapiens
HPGPPASPAMMEKNTSEGPACSPEETASESAKVPTAEPPGEVAVSESTREEQVPKPQAPAPQAPTASTATKPAPPSEDVPSAPLLLTLDDVSSSSVTVSWEPPERLGRLGLQGYVLELCREGASEWVPVSARPMMVTQQTVRNLALGDKFLLRVSAVSSAGAGPPAMLDQPIHIRENIEAPKIRVPRHLRQTYIRQVGETVNLQIPFQGKPKPQATWTHNGHALDSQRVSMRTGDQDSILFIRSAQRSDSGRYELTVRVEDLEAKAVIDILVIEKPGPPSSIRLLDVWGCNAALQWTPPQDTGNTELLGYMVQKADKKTGQWFTVLERYHPTTCTISDLIIGNSYSFRVFSENLCGLSTSATVTKELAHIQKADIAAKPKGFIERDFSEAPSFTQPLADHTSTPGYSTQLFCSVELHPSPRSSG

SEQ ID NO: 763618 - protein, 210 aa, Homo sapiens
HPGPPASPAMMEKNTSEGPACSPEETASESAKVPTAEPPGEVAVSESTREEQVPKPQAPAPQAPTASTATKPAPPSEDVPSAPLLLTLDDVSSSSVTVSWEPPERLGRLGLQGYVLELCREGASEWVPVSARPMMVTQQTVRNPKIIWMKNKMEIQGNPKYRALSEQGVCTLEIRKPSPFDSGVYTCKAINVLGEASVDCRLEVKASAAH

SEQ ID NO: 763619 - protein, 72 aa, Homo sapiens
WALHLREGGLVRKRMLLPLPTLHLSGLQPSSAHTRGSGSMSSSRCCRPEGPGPPGLQSNSRDAQDPRFHSDG

SEQ ID NO: 763620 - protein, 424 aa, Homo sapiens; identical to SEQ ID NO: 763617

SEQ ID NO: 763621 - protein, 169 aa, Homo sapiens
MTAGRRMEMLCAGRVPALLLCLGFHLLQAVLSTTVIPSCIPGESSDNCTALVQTEDNPRVAQVSITKCSSDMNGYCLHGQCIYLVDMSQNYCRCEVGYTGVRCEHFFLTVHQPLSKEYVALTVILIILFLITVVGSTYYFCRWYRNRKSKEPKKEYERVTSGDPELPQV

SEQ ID NO: 763622 - protein, 144 aa, Homo sapiens
MPHLPGRRSPLLLCLAVRSIIMNGSNMANTSPSVKSKEDQGLSGHDEKENPFAEYMWMENEEDFNRQVEEELQEQDFLDRCFQEMLDEEDQDWFIPSRDLPQAMGQLQQQLNGLSVSEGHDSEDILSKSNLNPDAKEFIPGEKY

SEQ ID NO: 763623 - protein, 778 aa, Homo sapiens
MYFYTVANLAGPNVSLLVIDLYIIGIIYSTLKFQDENNLSLSFQGKKPKWMHFQFLQAFELQQKIQGYSLGLGKCSPGSLGQFLTIIVEFWESHKGETRNDPKERLDLCYTPLVSKVTAAGVPLFFFFSFFLRHSLTLSPRLECSGMTIAHCSIKFLGSSNPPILASRVAGTTGTHHHGQLIIFIIFIFCRDWILLYFPSYSVNCCAQVILPSQPPKVLGLKAGCGEPPQPGVSLIKVIMLTMAKILSNIFQIVYYYCFDFGEAGKYGGEVNTLIINTCERGKLCEEAAKVNSTNESSCTEGCCKPQVDKMTAQAPEPSGTQESTQTVRRGQAFVNKGPTITGYIIFLSLGDIEVLKLLEIMTDLTKIWRRPHNWEGLSVPSHSPLGYTRTSLVCEVGGENRRIDSNLVCSGGLDVLLPLSTFPHVTHCTLHCSQGSLVLPVDRAPLQPLLCCLVNFLHRLGLVTIWKQFFWVFFLCFNLLTMKLLLVTGTGEQEANPGKHASFLHTTYVTCPHWPTPYCCSQSVWFLEARGNRIAGYTNLYKVSGRRFTFPSPRGQERNLKGTDAPSLFQKKKLPQIVLLGVSFVTFTELSPQSYLPIGYFLNKNKHFEANMTKMKIKSSKTCTSVQLLKCAYYKTVKYSLCKSSLSSYSVLLIMSLQKCLMLEGWFGRQGILFLKQLNEAYVTYHKTPISSVHFSDFSNFPQWCSCNYYSVLEHFYPPNKILHALLQLILFLPPATTNLLSLEICPFWTVQINGIIQYVVPWVWLFYLANVFEVCP

SEQ ID NO: 763624 - protein, 815 aa, Homo sapiens
MVRLVFIRGNFDVEFKPLLCLNFFKLATRSLRICIEMEHVFLTVANLAGPNVSLLVIDAVIIGIIYSTLKFQDENNLSLSFQGKKPKGMHFQFLQAFELQQKIQGYSLGLGKCSPGSLGQFLTIIVEFWESHKGETRNDPKERLTFVNTFSFQSHSSWGPSFFFSFSFFLRHSLTLSPRLECSGMTIAHCSIKFLGSSNPPILASRVAGTTGTHHHGQLIIFIIFIFCRDWILLYFPSYSVNCCAQVILPSQPPKVLGLYAGCGEPPQPGVSLIKVIMLTMAKILSNIFQIVYYYCFDFGEAGKKGGEVNTLIINTCERGKLCEEAAKVNSTNESSCTGLLQTPGRQMTAQAPEPSGTQEIYPTVRRGQAFVNKGPTITGYIIFLSLGDIEVIETVRNLTDLTKIWRRPHNWEGLSVPEPLSSGITRTSLVCEVGGENRRIDSNLVCSGGLDVLLPLSTFPHVTHCTLHCSQGSLVLPVDRAPLQPLLCCLVNFLHRLGYVTIWKQFFWVFFLCFNLLTMKLLLVTGTGEQEANPGKHASFRTPLSHLPSLANPLLLFPVSLVFRGIVAIEELDTLISTRCQAGDSPSPVPGDRREICKGTDAPSLFQKKKLPQIVLLGVSFVTFTELSPQSYLPIGYFLNKNKHFEAEYDKNEDKILKTCTSVQLLKCAYYKTVKYSLCKSSLSSYSVLLIMSLQKCLMLEGWFGRQGILFLKQLNEAYVTYHKTPISSVHFSDFSNFPQWCSCNYYSVLEHFYPPNKILHALLQLILFLPPATTNLLSLEICPFWTVQINGIIQYVVPWVWLFYLANVFEVCP

SEQ ID NO: 763625 - protein, 815 aa, Homo sapiens; identical to SEQ ID NO: 763624

SEQ ID NO: 763626 - protein, 815 aa, Homo sapiens; identical to SEQ ID NO: 763624

SEQ ID NO: 763627 - protein, 722 aa, Homo sapiens
MHFQFLQAFELQQKIQGYSLGLGKCSPGSLGQFLTIIVEFWESHKGETRNDPKERLDLCYTPLVSKVTAAGVPLFFFFSFFLRHSLTLSPRLECSGMTIAHCSIKFLGSSNPPILASRVAGTTGTHHHGQLIIFIIFIFCRDWILLYFPSYSVNCCAQVILPSQPPKVLGLKAGCGEPPQPGVSLIKVIMLTMAKILSNIFQIVYYYCFDFGEAGKKGGEVNTLIINTCLRGKLCEEAAKVNSTNESSCTGLLQTPGRQMTAQAPEPSGTQEIYPTVRRGQAFVNKGPTITGYIIFLSLGDIEVIETVRNLTDLTKIWRRPHNWEGLSVPEPLSSGITRTSLVCEVGGENRRIDSNLVCSGGLDVLLPLSTFPHVTHCTLHCSQGSLVLPVDRAPLQPLLCCLVNFLHRLGYVTIWKQFFWVFFLCFNLLTMKLLLVTGTGEQEANPGKHASFRTPLSHLPSLANPLLLFPVSLVFRGIVAIEELDTLISTRCQAGDSPSPVPGDRREICKGTDAPSLFQKKKLPQIVLLGVSFVTFTELSPQSYLPIGYFLNKNKHFEAEYDKNEIKSSKTLYYVYSYYKCAYYKTVKYSLCKSSLSSYSVLLIMSLQKCLMLEGWFEEAGNPFLKTTLMRHMLHIIKHPFQVYISVILVTSLSGVAVTITQFENIFIPPNKILHALLQLILFLPPATTESTFSINLPFLDSSNQWNHTICGPLGLAFLLS

SEQ ID NO: 763628 - protein, 815 aa, Homo sapiens; identical to SEQ ID NO: 763624

SEQ ID NO: 763629 - protein, 198 aa, Homo sapiens
KLRLSTRLVLIRPRLIFASTGARAVAHSPQPTAMGWDLTVKMLAGNEFQVSLSSSMSVSELKAQITQKIGVHAFQQRLAVHPSGVALQDRVPLASQGLGPGSTVLLVVDKCDEPLSILVRNNKGRSSTYEVRLTQTVAHLKQQVSGLEGVQDDLFWLTFEGKPLEDQLPLGEYGLKPLSTVFMNLRLRGGGTEPGGRS

SEQ ID NO: 763630 - protein, 214 aa, Homo sapiens
AGSRTPPDVCPQAYNRAGAACGSRRLRGSELIFASTGARAVAHSPQPTAMGWDLTVKMLAGNEFQVSLSSSMSVSELKAQITQKIGVHAFQQRLAVHPSGVALQDRVPLASQGLGPGSTVLLVVDKCDEPLSILVRNNKGRSSTYEVRLTQTVAHLKQQVSGLEGVQDDLFWLTFEGKPLEDQLPLGEYGLKPLSTVFMNLRLRGGGTEPGGRS

SEQ ID NO: 763631 - protein, 232 aa, Homo sapiens
ASVQRRLPEPPGEPGLGPGVETLPGFQSGQEADGRLSSHESLNSESLVRRHGENLGSSTDDGDSGEGKGWDLTVKMLAGNEFQVSLSSSMSVSELKAQITQKIGVHAFQQRLAVHPSGVALQDRVPLASQGLGPGSTVLLVVDKCDEPLSILVRNNKGRSSTYEVRLTQTVAHLKQQVSGLEGVQDDLFWLTFEGKPLEDQLPLGEYGLKPLSTVFMNLRLRGGGTEPGGRS

SEQ ID NO: 763632 - protein, 95 aa, Homo sapiens
MLAGNEFQVSLSSSMSVSELKAQITQKIGVHAFQQRLAVHPSGVALQDRVPLASQGLGPGSTVLLVVDKCDEPLSILVRNNKGRSSTYEVRLTQT

SEQ ID NO: 763633 - protein, 109 aa, Homo sapiens
RVPLASQGLGPGSTVLLVVDKCDEPLSILVRNNKGRSSTYEVRLTQTVAHLKQQVSGLEGVQDDLFWLTFEGKPLEDQLPLGEYGLKPLSTVFMNLRLRGGGTEPGGRS

SEQ ID NO: 763634 - protein, 214 aa, Homo sapiens; identical to SEQ ID NO: 763630

SEQ ID NO: 763635 - protein, 81 aa, Homo sapiens
AAAPTSEWCSTYEVRLTQTVAHLKQQVSGLEGVQDDLFWLTFEGKPLEDQLPLGEYGLKPLSTVFMNLRLRGGGTEPGGRS

SEQ ID NO: 763636 - protein, 367 aa, Homo sapiens [sequence omitted]

SEQ ID NO: 763637 - protein, 234 aa, Homo sapiens
MDPGLQQALNGMAPPGDTAMHVPAGSVASHLGTTSRSYFYLTTATLALCLVFTVATIMVLVVQRTDSIPNSPDNVPLKGGNCSEDLLCILKRAPFKKSWAYLQVAKHLNKTKLSWNKDGILHGVRYQDGNLVIQFPGLYFIICQLQFLVQCPNNSVDLKLELLINKHIKKQALVTVCESGMQTKHVYQNLSQFLLDYLQVNTTISVNVDTFQYIDTSTFPLENVLSIFLYSNSD

SEQ ID NO: 763638 - protein, 164 aa, Homo sapiens
MDPGLQQALNGMAPPGDTAMHVPAGSVASHLGTTSRSYFYLTTATLALCLVFTVATIMVLVVQRTDSIPNSPDNVPLKGGNCSEDLLCILKRAPFKKSWAYLQVAKHLNKTKLSWNKDGILHGVRYQDGNLVIQFPDYCGMILHHSHSTLDSGKGHCCLETLQP

SEQ ID NO: 763639 - protein, 115 aa, Homo sapiens
KIQNLQKPAADIEEPIYTMDKQSSAGGVKRSVPCESNEVNETMPETPTGDSDPQPAPKKMKTSESSTILVVRYRRNVKRTSPEELLNDHARENRINPLQMEEEEFMEIMVEIPAK

SEQ ID NO: 763640 - protein, 268 aa, Homo sapiens
EALEAASSDMPLLLLLPLLWAGALAMDPNFWLQVQESVTVQEGLCVLVPCTFFHPIPYYDKNSPVHGYWFREGAIISRDSPVATNKLDQEVQEETQGRFRLLGDPSRNNCSLSIVDARRRDNGSYFFRMERGSTKYSYKSPQLSVHVTDLTHRPKILIPGTLEPGHSKNLTCSVSWACEQGTPPIFSWLSAAPTSLGPRTTHSSVLIITPRPQDHGTNLTCQVKFAGAGVTTERTIQLNVTYVPQNPTTGIFPGDGSGRKEPPRLGLL

SEQ ID NO: 763641 - protein, 243 aa, Homo sapiens
MDPNFWLQVQESVTVQEGLCVLVPCTFFHPIPYYDKNSPVHGYWFREGAIISRDSPVATNKLDQEVQEETQGRFRLLGDPSRNNCSLSIVDARRRDNGSYFFRMERGSTKYSYKSPQLSVHVTDLTHRPKILIPGTLEPGHSKNLTCSVSWACEQGTPPIFSWLSAAPTSLGPRTTHSSVLIITPRPQDHGTNLTCQVKFAGAGVTTERTIQLNVTYVPQNPTTGIFPGDGSGRKEPPRLGLL

SEQ ID NO: 763642 - protein, 157 aa, Homo sapiens
ATPKKLDSTQTTHSSSLIAGHTGPVPKKPQDLAHTGISSGLIAGSSIQNPKVSLEPLPARLLQQGLQRSSQIHTSSSSQTHVSSSSQAQIAASSHALGTSEAQDASSLTQVTKVHQHSAVQQNYVSPLQATISTIVKRRPVDASIASSKISRRYTGP

SEQ ID NO: 763643 - protein, 532 aa, Homo sapiens
ATPKKLDSTQTTHSSSLIAGHTGPVPKKPQDLAHTGISSGLIAGSSIQNPKVSLEPLPARLLQQGLQRSSQIHTSSSSQTHVSSSSQAQIAASSHALGTSEAQDASSLTQVTKVHQHSAVQQNYVSPLQATISKSQTNPVVKLSNNPQLSCSSSLIKTSDKPLMYRLPLSTPSPGNGSQGSHPLVSRTVPSTTTSSNYLAKAMVSQISTQGFKSPFSMAASPKLAASPKPATSPKPLPSPKPSASPKPSLSAKPSVSTKLISKSNPTPKPTVSPSSSSPNALVAQGSHSSTNSPVHKQPSGMNISRQSPTLNLLPSSRTSGLPPTKNLQAPSKLTNSSSTGTVGKNSLSGIAMNVPASRGSNLNSSGANRTSLSGGTGSGTQGATKPLSTPHRPSTASGSSVVTASVQSTAGASLLANASPLTLMTSPLSVTNQNVTPFGMLGGLVPVTMPFQFPLEIFGFGTDTAGVTTTSGSTSAAFHHSLTQNLLKGLQPGGAQHAATLSHSPLPAHLQQAFHDGGQSKGDTKLPRKSQ

SEQ ID NO: 763644 - protein, 1076 aa, Homo sapiens
MEEKTQIKTFLGSKLPKYGTKSVRSTLQPMPNGTPVNLLGTSKNSNVKSYIKNNGSDCPSSHSFNWRKANKYQLCAQGVEEPNNTQNSHDKIIDPEKRVPTQGMFDKNGIKGGLKSVSLFTSKLAKPSTMFVSSTEELNQKSFSGPSNLGKFTKGTLLGRTSYSSINTPKSQLNGFYGNRSAGSMQRPRANSCATRSSSGESLAQSPDSSKSINCEKMVRSQSFSHSIQNSFLPPSSITRSHSFNRAVDLTKPYQNQQLSIRVPLRSSMLTRNSRQPEVLNGNEHLGYGFNRPYAAGGKKLALPNGPGVTSTLGYRMVHPSLLKSSRSPFSGTMTVDGNKNSPADTCVEEDATVLAKDRAANKDQELIENESYRTKNNQTMKHDAKMRYLSDDVDDISLSSLSSSDKNDLSEDFSDDFIDIEDSNRTRITPEEMSLKEEKHENGPPQDMFDSPKENEKAFSKTDEWIDISVSDRSECTKHTSGNNLVSPDTDYRAGSSFELSPSDSSDGTYMWDEEGLEPIGNVHPVGSYESSEMNSIDILNNLESCDLEDDDLMLDVDLPEDAPLENVECDNMNRFDRPDRNVRQPQEGFWKRPPQRWSGQEHYHLSHPDHYHHHGKSDLSRGSPYRESPLGHFESYGGMPFFQAQKMFVDVPENTVILDEMTLRHMVQDCTAVKTQLLKLKRLLHQHDGSGSLHDIQLSLPSSPEPEDGDKVYKNEDLLNEIKQLKDEIKKKDEKIQLLELQLATQHICHQKCKEEKCTYADKYTQTPWRRIPGWVFCSLLLSLAGLLPGDPTELFHRTADRPQVLQPSSSLPRPTDHTQGKLIKPQRIEARSECSIQDMHQGGAHPEESFTHVLHQESNYGLEEQPFSSGPQLTMDVAKSTPSEANLNITVNAQEPYHLANNQISDMQFIPTSLQTPPESSTVDQAKRVGRNQSPPVGYMSQPKSLQLLKPSILSSLVPPPVSESSPSRTPTCKKSPIITTCNSAKLQPTSSQTNLANNQNLKASKLRPPSGSFKQKQTNSPQLEPQSFQAKTSIPRPLTQRKEIMQNPNGNLHSGDCLASNRYSRLPKPKIH

SEQ ID NO: 763645 - protein, 1047 aa, Homo sapiens
MEEKTQIKTFLGSKLPKYGTKSVRSTLQPMPNGTPVNLLGTSKNSNVKSYIKNNGSDCPSSHSFNWRKANKYQLCAQGVEEPNNTQNSHDKIIDPEKRVPTQGMFDKNGIKGGLKSVSLFTSKLAKPSTMFVSSTEELNQKSFSGPSNLGKFTKGTLLGRTSYSSINTPKSQLNGFYGNRSAGSMQRPRANSCATRSSSGESLAQSPDSSKSINCEKMVRSQSFSHSIQNSFLPPSSITRSHSFNRAVDLTKPYQNQQLSIRVPLRSSMLTRNSRQPEVLNGNEHLGYGFNRPYAAGGKKLALPNGPGVTSTLGYRMVHPSLLKSSRSPFSGTMTVDGNKNSPADTCVEEDATVLAKDRAANKDQELIENESYRTKNNQTMKHDAKMRYLSDDVDDISLSSLSSSDKNDLSEDFSDDFIDIEDSNRTRITPEEMSLKEEKHENGPPQDMFDSPKENEKAFSKTDEWIDISVSDRSECTKHTSGNNLVSPDTDYRAGSSFELSPSDSSDGTYMWDEEGLEPIGNVHPVGSYESSEMNSIDILNNLESCDLEDDDLMLDVDLPEDAPLENVECDNMNRFDRPDRNVRQPQEGFWKRPPQRWSGQEHYHLSHPDHYHHHGKSDLSRGSPYRESPLGHFESYGGMPFFQAQKMFVDVPENTVILDEMTLRHMVQDCTAVKTQLLKLKRLLHQHDGSGSLHDIQLSLPSSPEPEDGDKVYKNEDLLNEIKQLKDEIKKKDEKIQLLELQLATQHICHQKCKEEKCTYADKYTQTPWRRIPPQVLQPSSSLPRPTDHTQGKLIKPQRIEARSECSIQDMHQGGAHPEESFTHVLHQESNYGLEEQPFSSGPQLTMDVAKSTPSEANLNITVNAQEPYHLANNQISDMQFIPTSLQTPPESSTVDQAKRVGRNQSPPVGYMSQPKSLQLLKPSILSSLVPPPVSESSPSRTPTCKKSPIITTCNSAKLQPTSSQTNLANNQNLKASKLRPPSGSFKQKQTNSPQLEPQSFQAKTSIPRPLTQRKEIMQNPNGNLHSGDCLASNRYSRLPKPKIH

SEQ ID NO: 763646 - protein, 493 aa, Homo sapiens
MLDVDLPEDAPLENVECDNMNRFDRPDRNVRQPQEGFWKRPPQRWSGQEHYHLSHPDHYHHHGKSDLSRGSPYRESPLGHFESYGGMPFFQAQKMFVDVPENTVILDEMTLRHMVQDCTAVKTQLLKLKRLLHQHDGSGSLHDIQLSLPSSPEPEDGDKVYKNEDLLNEIKQLKDEIKKKDEKIQLLELQLATQHICHQKCKEEKCTYADKYTQTPWRRIPPQVLQPSSSLPRPTDHTQGKLIKPQRIEARSECSIQDMHQGGAHPEESFTHVLHQESNYGLEEQPFSSGPQLTMDVAKSTPSEANLNITVNAQEPYHLANNQISDMQFIPTSLQTPPESSTVDQAKRVGRNQSPPVGYMSQPKSLQLLKPSILSSLVPPPVSESSPSRTPTCKKSPIITTCNSAKLQPTSSQTNLANNQNLKASKLRPPSGSFKQKQTNSPQLEPQSFQAKTSIPRPLTQRKEIMQNPNGNLHSGDCLASNRYSRLPKPKIH

SEQ ID NO: 763647 - protein, 493 aa, Homo sapiens; identical to SEQ ID NO: 763646

SEQ ID NO: 763648 - protein, 643 aa, Homo sapiens
MEEKTQIKTFLGSKLPKYGTKSVRSTLQPMPNGTPVNLLGTSKNSNVKSYIKNNGSDCPSSHSFNWRKANKYQLCAQGVEEPNNTQNSHDKIIDPEKRVPTQGMFDKNGIKGGLKSVSLFTSKLAKPSTMFVSSTEELNQKSFSGPSNLGKFTKGTLLGRTSYSSINTPKSQLNGFYGNRSAGSMQRPRANSCATRSSSGESLAQSPDSSKSINCEKMVRSQSFSHSIQNSFLPPSSITRSHSFNRAVDLTKPYQNQQLSIRVPLRSSMLTRNSRQPEVLNGNEHLGYGFNRPYAAGGKKLALPNGPGVTSTLGYRMVHPSLLKSSRSPFSGTMTVDGNKNSPADTCVEEDATVLAKDRAANKDQELIENESYRTKNNQTMKHDAKMRYLSDDVDDISLSSLSSSDKNDLSEDFSDDFIDIEDSNRTRITPEEMSLKEEKHENGPPQDMFDSPKENEKAFSKTDEWIDISVSDRSECTKHTSGNNLVSPDTDYRAGSSFELSPSDSSDGTYMWDEEGLEPIGNVHPVGSYESSEMNSIDILNNLESCDLEDDDLMLDVDLPEDAPLENVECDNMNRFDRPDRNVRQPQEGFWKRPPQRWSGQEHYHLSHPDHYHHHGKSDLSSLKYYSLPAAFPDPQITPREN

SEQ ID NO: 763649 - protein, 235 aa, Homo sapiens [sequence omitted]

SEQ ID NO: 763650 - protein, 1047 aa, Homo sapiens; identical to SEQ ID NO: 763645

SEQ ID NO: 763651 - protein, 1047 aa, Homo sapiens; identical to SEQ ID NO: 763645

SEQ ID NO: 763652 - protein, 567 aa, Homo sapiens
MEEKTQIKTFLGSKLPKYGTKSVRSTLQPMPNGTPVNLLGTSKNSNVKSYIKNNGSDCPSSHSFNWRKANKYQLCAQGVEEPNNTQNSHDKIIDPEKRVPTQGMFDKNGIKGGLKSVSLFTSKLAKPSTMFVSSTEELNQKSFSGPSNLGKFTKGTLLGRTSYSSINTPKSQLNGFYGNRSAGSMQRPRANSCATRSSSGESLAQSPDSSKSINCEKMVRSQSFSHSIQNSFLPPSSITRSHSFNRAVDLTKPYQNQQLSIRVPLRSSMLTRNSRQPEVLNGNEHLGYGFNRPYAAGGKKLALPNGPGVTSTLGYRMVHPSLLKSSRSPFSGTMTVDGNKNSPADTCVEEDATVLAKDRAANKDQELIENESYRTKNNQTMKHDAKMRYLSDDVDDISLSSLSSSDKNDLSEDFSDDFIDIEDSNRTRITPEEMSLKEEKHENGPPQDMFDSPKENEKAFSKTDEWIDISVSDRSECTKHTSGNNLVSPDTDYRAGSSFELSPSDSSDGTYMWDEEGLEPIGNVHPVGSYESSEMNSIVCMDLYTLGIFCLPYYRETCDMIDFVKNL

SEQ ID NO: 763653 - protein, 190 aa, Homo sapiens
MLDVDLPEDAPLENVECDNMNRFDRPDRNVRQPQEGFWKRPPQRWSGQEHYHLSHPDHYHHHGKSDLSRGSPYRESPLGHFESYGGMPFFQAQKMFVDVPENTVILDEMTLRHMVQDCTAVKTQLLKLKRLLHQHDGSGSLHDIQLSLPSSPEPEDGDKVYKNEAFIQMKIKTDAAEAALIIVEHYNPAL

SEQ ID NO: 763654 - protein, 474 aa, Homo sapiens
MNRFDRPDRNVRQPQEGFWKRPPQRWSGQEHYHLSHPDHYHHHGKSDLSRGSPYRESPLGHFESYGGMPFFQAQKMFVDVPENTVILDEMTLRHMVQDCTAVKTQLLKLKRLLHQHDGSGSLHDIQLSLPSSPEPEDGDKVYKNEDLLNEIKQLKDEIKKKDEKIQLLELQLATQHICHQKCKEEKCTYADKYTQTPWRRIPPQVLQPSSSLPRPTDHTQGKLIKPQRIEARSECSIQDMHQGGAHPEESFTHVLHQESNYGLEEQPFSSGPQLTMDVAKSTPSEANLNITVNAQEPYHLANNQISDMQFIPTSLQTPPESSTVDQAKRVGRNQSPPVGYMSQPKSLQLLKPSILSSLVPPPVSESSPSRTPTCKKSPIITTCNSAKLQPTSSQTNLANNQNLKASKLRPPSGSFKQKQTNSPQLEPQSFQAKTSIPRPLTQRKEIMQNPNGNLHSGDCLASNRYSRLPKPKIH

SEQ ID NO: 763655 - protein, 390 aa, Homo sapiens
AESFQVSMSIAAALELTGRSQFLQTHGRITWHDGSGSLHDIQLSLPSSPEPEDGDKVYKNEDLLNEIKQLKDEIKKKDEKIQLLELQLATQHICHQKCKEEKCTYADKYTQTPWRRIPPQVLQPSSSLPRPTDHTQGKLIKPQRIEARSECSIQDMHQGGAHPEESFTHVLHQESNYGLEEQPFSSGPQLTMDVAKSTPSEANLNITVNAQEPYHLANNQISDMQFIPTSLQTPPESSTVDQAKRVGRNQSPPVGYMSQPKSLQLLKPSILSSLVPPPVSESSPSRTPTCKKSPIITTCNSAKLQPTSSQTNLANNQNLKASKLRPPSGSFKQKQTNSPQLEPQSFQAKTSIPRPLTQRKEIMQNPNGNLHSGDCLASNRYSRLPKPKIH

SEQ ID NO: 763656 - protein, 235 aa, Homo sapiens [sequence omitted]

SEQ ID NO: 763657 - protein, 317 aa, Homo sapiens
VSSQVHNNKKTQTQTRWVGILLPPSLLGRAPSRGSHGLFHRTADRPQVLQPSSSLPRPTDHTQGKLIKPQRIEARSECSIQDMHQGGAHPEESFTHVLHQESNYGLEEQPFSSGPQLTMDVAKSTPSEANLNITVNAQEPYHLANNQISDMQFIPTSLQTPPESSTVDQAKRVGRNQSPPVGYMSQPKSLQLLKPSILSSLVPPPVSESSPSRTPTCKKSPIITTCNSAKLQPTSSQTNLANNQNLKASKLRPPSGSFKQKQTNSPQLEPQSFQAKTSIPRPLTQRKEIMQNPNGNLHSGDCLASNRYSRLPKPKIH

SEQ ID NO: 763658 - protein, 1047 aa, Homo sapiens; identical to SEQ ID NO: 763645

SEQ ID NO: 763659 - protein, 744 aa, Homo sapiens
MEEKTQIKTFLGSKLPKYGTKSVRSTLQPMPNGTPVNLLGTSKNSNVKSYIKNNGSDCPSSHSFNWRKANKYQLCAQGVEEPNNTQNSHDKIIDPEKRVPTQGMFDKNGIKGGLKSVSLFTSKLAKPSTMFVSSTEELNQKSFSGPSNLGKFTKGTLLGRTSYSSINTPKSQLNGFYGNRSAGSMQRPRANSCATRSSSGESLAQSPDSSKSINCEKMVRSQSFSHSIQNSFLPPSSITRSHSFNRAVDLTKPYQNQQLSIRVPLRSSMLTRNSRQPEVLNGNEHLGYGFNRPYAAGGKKLALPNGPGVTSTLGYRMVHPSLLKSSRSPFSGTMTVDGNKNSPADTCVEEDATVLAKDRAANKDQELIENESYRTKNNQTMKHDAKMRYLSDDVDDISLSSLSSSDKNDLSEDFSDDFIDIEDSNRTRITPEEMSLKEEKHENGPPQDMFDSPKENEKAFSKTDEWIDISVSDRSECTKHTSGNNLVSPDTDYRAGSSFELSPSDSSDGTYMWDEEGLEPIGNVHPVGSYESSEMNSIDILNNLESCDLEDDDLMLDVDLPEDAPLENVECDNMNRFDRPDRNVRQPQEGFWKRPPQRWSGQEHYHLSHPDHYHHHGKSDLSRGSPYRESPLGHFESYGGMPFFQAQKMFVDVPENTVILDEMTLRHMVQDCTAVKTQLLKLKRLLHQHDGSGSLHDIQLSLPSSPEPEDGDKVYKNEAFIQMKIKTDAAEAALIIVEHYNPAL

SEQ ID NO: 763660 - protein, 189 aa, Homo sapiens
MALSFSLLMAVLVLSYKSICSLGCDLPQTHSLGNRRALILLAQMGRISPFSCLKDRHDFGLPQEEFDGNQFQKTQAISVLHEMIQQTFNLFSTEDSSAAWEQSLLEKFSTELYQQLNNLEACVIQEVGMEETPLMNEDSILAVRKYFQRITLYLTEKKYSPCAWEVVRAEIMRSLSFSTNLQKILRRKD

SEQ ID NO: 763661 - protein, 109 aa, Homo sapiens
GRSQTRQETETRGPHTRRKNPVQRVPAGSHRGREGAPGRVGGCVLRLSRGSWPRDRMCAGVEQEVPGMMGKREQVTGGRSKYWGLHWDSRGLGQARSACRLPSLAPSLG

SEQ ID NO: 763662 - protein, 187 aa, Homo sapiens
MIFCPTATAVPGVVPPPRGVFVVICVGDISLLPSLFLLSPRGLFLFWGPRLFVPTSVQCGRFVGPPRRRNTMLFYRKRFFEGPLTAPAPRLFLFCFFFFFFAFPTLFRKTNPGPSAPCTLPDPSHNLNNLETELEGGDRRGWGHGGRRKRAHYSRRSAPFLSSFSWPPASYRARQHASWPWDLDLFF

SEQ ID NO: 763663 - protein, 275 aa, Homo sapiens
MIFCPTATAVPGVVPPPRGVFVVICVGDISLLPSLFLLSPRGLFLFWGPRLFVPTSVQCGRFVGPPRRRNTMLFYRKRFFEGPLTAPAPRLFLFCFFFFFFAFPTLFRKTNPGPSAPCTLPDPSHNLNNLETELEGGDRRGWGHGGRRKRAHYSRRSAPFLSSFSWPPASYRARQHASWPWDPQPLPGPLGPQGRWRKLQCHWPGPARLRPCRWGSFSTLEFMAAAGRGRVPPAPFLRSSVRRPGRGPNCCRCGPGEAPAAPLRSPLPLTSAAHS

SEQ ID NO: 763664 - protein, 173 aa, Homo sapiens
MIFCPTATAVPGVVPPPRGVFVVICVGDISLLPSLFLLSPRGLFLFWGPRLFVPTSVQCGRFVGPPRRRNTMLFYRKRFFEGPLTAPAPRLFLFCFFFFFFAFPTLFRKTNPGPSAPCTLPDPSHNLNNLETELEGGDRRGWGHGGRRKRAHYSRRSAPFLSRRRIEVVVGGR

SEQ ID NO: 763665 - protein, 213 aa, Homo sapiens
MPDENIFLFVPNLIGYARIVFAIISFYFMPCCPLTASSFYLLSGLLDAFDGHAARALNQGTRFGAMLDMLTDRCSTMCLLVNLALLYPGATLFFQISMSLDVASHWLHLHSSVVRGSESHKMIDLSGNPVLRIYYTSRPALFTLCAGNELFYCLLYLFHFSEGPLVGSVGLFRMGLWVTAPIALLKSLISVIHLITAARNMAALDAADRAKKK

SEQ ID NO: 763666 - protein, 213 aa, Homo sapiens; identical to SEQ ID NO: 763665

SEQ ID NO: 763667 - protein, 247 aa, Homo sapiens
MPDENIFLFVPNLIGYARIVFAIISFYFMPCCPLTASSFYLLSGLLDAFDGHAARALNQGTRFGAMLDMLTDRCSTMCLLVNLALLYPGATLFFQISMSLDVASHWLHLHSSVVRGSESHKMIDLSGNPVLRIYYTSRPALFTLCAGNELFYCLLYLFHFSEGPLGRRRGAGQEDGRGIWPAQGDGGPLLRAPNSLCFCIGSVGLFRMGLWVTAPIALLKSLISVIHLITAARNMAALDAADRAKKK

SEQ ID NO: 763668 - protein, 213 aa, Homo sapiens; identical to SEQ ID NO: 763665

SEQ ID NO: 763669 - protein, 213 aa, Homo sapiens; identical to SEQ ID NO: 763665

SEQ ID NO: 763670 - protein, 213 aa, Homo sapiens; identical to SEQ ID NO: 763665

SEQ ID NO: 763671 - protein, 168 aa, Homo sapiens
MPDENIFLFVPNLIGTRFGAMLDMLTDRCSTMCLLVNLALLYPGATLFFQISMSLDVASHWLHLHSSVVRGSESHKMIDLSGNPVLRIYYTSRPALFTLCAGNELFYCLLYLFHFSEGPLVGSVGLFRMGLWVTAPIALLKSLISVIHLITAARNMAALDAADRAKKK

SEQ ID NO: 763672 - protein, 184 aa, Homo sapiens
MPDENIFLFVPNLIGLLDAFDGHAARALNQGTRFGAMLDMLTDRCSTMCLLVNLALLYPGATLFFQISMSLDVASHWLHLHSSVVRGSESHKMIDLSGNPVLRIYYTSRPALFTLCAGNELFYCLLYLFHFSEGPLVGSVGLFRMGLWVTAPIALLKSLISVIHLITAARNMAALDAADRAKKK

SEQ ID NO: 763673 - protein, 362 aa, Homo sapiens
GGGRKRERKPTGLKGAATIFLSHFFLSPILQRRARRRRFPEATRSWSSGDRSWRPGAPAGLDMSAEGSVCSAYVKRRRNLTRLPHWRSLLLLLCVGLCPTRLPVSSMTDAFRQSLRAPMRFGAQVWVLRMWTATRCVAEPALSCLCAWYGLMAACCERAWDEPLASPEQARGSKGGAAMPDENIFLFVPNLIGLLDAFDGHAARALNQGTRFGAMLDMLTDRCSTMCLLVNLALLYPGATLFFQISMSLDVASHWLHLHSSVVRGSESHKMIDLSGNPVLRIYYTSRPALFTLCAGNELFYCLLYLFHFSEGPLVGSVGLFRMGLWVTAPIALLKSLISVIHLITAARNMAALDAADRAKKK

SEQ ID NO: 763674 - protein, 272 aa, Homo sapiens
  misc_feature (85)..(85): Xaa can be any naturally occurring amino acid
MLSRTEFIGACAVRSMLLVRGLSARWDLVIKMVSSDAVRCLEGSSCRMSETDSIFLFRAPNVVVLCSGIVFRTVYFVFVHVYASXLSSCYGASILSYLVLGHSLLDAFDGHAARALNQGTRFGAMLDMLTDRCSTMCLLVNLALLYPGATLFFQISMSLDVASHWLHLHSSVVRGSESHKMIDLSGNPVLRIYYTSRPALFTLCAGNELFYCLLYLFHFSEGPLVGSVGLFRMGLWVTAPIALLKSLISVIHLITAARNMAALDAADRAKKK

SEQ ID NO: 763675 - protein, 112 aa, Homo sapiens
MPGLSSPSFLSTSCPAAPSRPPPSTCSAACWTLSMDTPALFTLCAGNELFYCLLYLFHFSEGPLVGSVGLFRMGLWVTAPIALLKSLISVIHLITAARNMAALDAADRAKKK

SEQ ID NO: 763676 - protein, 110 aa, Homo sapiens
PRLRGERDVRWSPGSWLPTCPGSLAVPHSSPPPARRSQSHAFLMCCSTCWDGGQPLFGDVTFSGILRTRASNQGGYAGGPLHPGGAPGVPGPGSVTPCLLSPGVRDARDA

SEQ ID NO: 763677 - protein, 187 aa, Homo sapiens
MPDENIFLFVPNLIGYARIVFAIISFYFMPCCPLTASSFYLLSGLLDAFDGHAARALNQGTRFGAMLDMLTDRCSTMCLLVNLALLYPGATLFFQISMSLDVASHWLHLHSSVVRGSESHKMIDLSGNPVLRIYYTSRPALFTLCAGNELFPSCHPCSCGVPTAHLFDVTDCLHVFIFLIFSTLTRM

SEQ ID NO: 763678 - protein, 106 aa, Homo sapiens
MRERDPVCKKEKKIREVICRDCAFISAGGAGGGTRLPLANVACLLCVQPALFTLCAGNELFPSFGPQTPSALHPIALLKSLISVIHLITAARNMAALDAADRAKKK

SEQ ID NO: 763679 - protein, 139 aa, Homo sapiens
MPDENIFLFVPNLIGYARIVFAIISFYFMPCCPLTASSFYLLSGLLDAFDGHAARALNQGTRFGAMLDMLTDRCSTMCLLVNLALLYPGATLFFQISMSLDVASHWLHLHSSVVRGSESHKMIDLSGNPVLRIYYTSRL

SEQ ID NO: 763680 - protein, 252 aa, Homo sapiens
MPDENIFLFVPNLIGYARIVFAIISFYFMPCCPLTASSFYLLSGLLDAFDGHAARALNQGTRFGAMLDMLTDRCSTMCLLVNLALLYPGATLFFQISMSLDVASHWLHLHSSVVRGSESHKMIDLSGNPVLRIYYTSRPALFTLCAGNELFYCLLYLFHFSEGPLVGSVGLFRMGLWVTAPIALLKSLISVIHLITPLFGDVTFSGILRTRASNQGGYAGGPLHPGGAPGVPGPGSVTPCLLSPGVRDARDA

SEQ ID NO: 763681 - protein, 213 aa, Homo sapiens; identical to SEQ ID NO: 763665

SEQ ID NO: 763682 - protein, 157 aa, Homo sapiens
MPDENIFLFVPNLIGYARIVFAIISFYFMPCCPLTASSFYLLSGLLDAFDGHAARALNQGTRFGAMLDMLTDRCSTMCLLVNLALLYPGATLFFQISMSLDVASHWLHLHSSVVRGSESHKMIDLSGNPVLRIYYTSRLALWDCSGWASGSLPPSPC

SEQ ID NO: 763683 - protein, 185 aa, Homo sapiens
MPCCPLTASSFYLLSGLLDAFDGHAARALNQGTRFGAMLDMLTDRCSTMCLLVNLALLYPGATLFFQISMSLDVASHWLHLHSSVVRGSESHKMIDLSGNPVLRIYYTSRPALFTLCAGNELFYCLLYLFHFSEGPLVGSVGLFRMGLWVTAPIALLKSLISVIHLITAARNMAALDAADRAKKK

SEQ ID NO: 763684 - protein, 122 aa, Homo sapiens
MRIGCMVVVMPLGSPVFSPSSVVRGSESHKMIDLSGNPVLRIYYTSRPALFTLCAGNELFYCLLYLFHFSEGPLVGSVGLFRMGLWVTAPIALLKSLISVIHLITAARNMAALDAADRAKKK

SEQ ID NO: 763685 - protein, 123 aa, Homo sapiens
KHRIPGQVDHLVASHWLHLHSSVVRGSESHKMIDLSGNPVLRIYYTSRPALFTLCAGNELFYCLLYLFHFSEGPLVGSVGLFRMGLWVTAPIALLKSLISVIHLITAARNMAALDAADRAKKK

SEQ ID NO: 763686 - protein, 103 aa, Homo sapiens
SATEVKGGSHKMIDLSGNPVLRIYYTSRPALFTLCAGNELFYCLLYLFHFSEGPLVGSVGLFRMGLWVTAPIALLKSLISVIHLITAARNMAALDAADRAKKK

SEQ ID NO: 763687 - protein, 131 aa, Homo sapiens
INFHRRKERRKGGRKENREPRERREKIRKKKEREKGRTWILFVACAEDYISLLQLSSTLKNKEDRGKASGPHHPLQADCFLLQALEHLPESFLGQWEPGLAQSQAGEKYEEMEKALSKEQSSTFTPQVRQL

SEQ ID NO: 763688 - protein, 180 aa, Homo sapiens
INFHRRKERRKGGRKENREPRERREKIRKKKEREKGRTWILFVACAEDYISLLQLSSTLKNKEDRGKASGPHHPLQADCFLLQALEHLPESFLGQWEPGLAQSQAGEKYEEMEKALSKEQSSTFTPQTESHSVSQAGVQWCDLGSPQSPPLGFTPFSCLNLQSSWDYRFLPPRPANSLYF

SEQ ID NO: 763689 - protein, 77 aa, Homo sapiens
EARYEAGCVQLPAALSSAGWHSARGKAEQVCEAKCLRGAPRGENPEEKETARIGPAGKRRDGAAYAEWRGRPPFGRR

SEQ ID NO: 763690 - protein, 111 aa, Homo sapiens
MANIHQENEEMEQPMQNGEEDRPLGGGEGHQPAGNRRGQARRLAPNFRWAIPNRQINDGMGGDGDDMEIFMEEMREIRRKLRELQLRNCLRILMGELSNHHDHHDEFCLMP

SEQ ID NO: 763691 - protein, 77 aa, Homo sapiens; identical to SEQ ID NO: 763689

SEQ ID NO: 763692 - protein, 141 aa, Homo sapiens
DRLCALGHLMQTGVGRLFFARAYGGGGWGGRGRSCCTGRPSWGASSVVTRGPHVTQSCRATQPSVQSSLASGYQLPAALSSAGWHSARGKAEQVCEAKCLRGAPRGENPEEKETARIGPAGKRRDGAAYAEWRGRPPFGRR

SEQ ID NO: 763693 - protein, 88 aa, Homo sapiens
SLPPLIHLQPSVQSSLASGYQLPAALSSAGWHSARGKAEQVCEAKCLRGAPRGENPEEKETARIGPAGKRRDGAAYAEWRGRPPFGRR

SEQ ID NO: 763694 - protein, 111 aa, Homo sapiens; identical to SEQ ID NO: 763690

SEQ ID NO: 763695 - protein, 111 aa, Homo sapiens; identical to SEQ ID NO: 763690

SEQ ID NO: 763696 - protein, 179 aa, Homo sapiens
KRAHRRHGKVTGVTTASQSPVVIGEAAAFGAVVTRVWLPAPRCPELGGLAFGPGKSGAEKQPEKKNLIMANIHQENEEMEQPMQNGEEDRPLGGGEGHQPAGNRRGQARRLAPNFRWAIPNRQINDGMGGDGDDMEIFMEEMREIRRKLRELQLRNCLRILMGELSNHHDHHDEFCLMP

SEQ ID NO: 763697 - protein, 141 aa, Homo sapiens; identical to SEQ ID NO: 763692

SEQ ID NO: 763698 - protein, 141 aa, Homo sapiens; identical to SEQ ID NO: 763692

SEQ ID NO: 763699 - protein, 141 aa, Homo sapiens; identical to SEQ ID NO: 763692

SEQ ID NO: 763700 - protein, 141 aa, Homo sapiens; identical to SEQ ID NO: 763692

SEQ ID NO: 763701 - protein, 111 aa, Homo sapiens; identical to SEQ ID NO: 763690

SEQ ID NO: 763702 - protein, 80 aa, Homo sapiens
PPPPPPDSRLGYQLPAALSSAGWHSARGKAEQVCEAKCLRGAPRGENPEEKETARIGPAGKRRDGAAYAEWRGRPPFGRR

SEQ ID NO: 763703 - protein, 80 aa, Homo sapiens; identical to SEQ ID NO: 763702

SEQ ID NO: 763704 - protein, 106 aa, Homo sapiens
KRAHRRHGKVTGVTTASRAPWLSARRQPSVQSSLASGYQLPAALSSAGWHSARGKAEQVCEAKCLRGAPRGENPEEKETARIGPAGKRRDGAAYAEWRGRPPFGRR

SEQ ID NO: 763705 - protein, 141 aa, Homo sapiens; identical to SEQ ID NO: 763692

SEQ ID NO: 763706 - protein, 111 aa, Homo sapiens; identical to SEQ ID NO: 763690

SEQ ID NO: 763707 - protein, 2871 aa, Homo sapiens
MSCNGGSHPRINTLGRMIRAESGPDLRYEVTSGGGGTSRMYYSRRGVITDQNSDGYCQTGTMSRHQNQNTIQELLQNCSDCLMRAELIVQPELKYGDGIQLTRSRELDECFAQANDQMEILDSLIREMRQMGQPCDAYQKRLLQLQEQMRALYKAISVPRVRRASSKGGGGYTCQSGSGWDEFTKHVTSECLGWMRQQRAEMDMVAWGVDLASVEQHINSHRGIHNSIGDYRWQLDKIKADLREKSAIYQLEEEYENLLKASFERMDHLRQLQNIIQATSREIMWINDCEEEELLYDWSDKNTNIAQKQEAFSIRMSQLEVKEKELNKLKQESDQLVLNQHPASDKIEAYMDTLQTQWSWILQITKCIDVHLKENAAYFQFFEEAQSTEAYLKGLQDSIRKKYPCDKNMPLQHLLEQIKELEKEREKILEYKRQVQNLVNKSKKIVQLKPRNPDYRSNKPIILRALCDYKQDQKIVHKGDECILKDNNERSKWYVTGPGGVDMLVPSVGLIIPPPNPLAVDLSCKIEQYYEAILALWNQLYINMKSLVSWHYCMIDIEKIRAMTIAKLKTMRQEDYMKTIADLELHYQEFIRNSQGSEMFGDDDKRKIQSQFTDAQKHYQTLVIQLPGYPQHQTVTTTEITHHGTCQDVNHNKVIETNRENDKQETWMLMELQKIRRQIEHCEGRMTLKNLPLADQGSSHHITVKINELKSVQNDSQAIAEVLNQLKDMLANFRGSEKYCYLQNEVFGLFQKLENINGVTDGYLNSLCTVRALLQAILQTEDMLKVYEARLTEEETVCLDLDKVEAYRCGLKKIKNDLNLKKSLLATMKTELQKAQQIHSQTSQQYPLYDLDLGKFGEKVTQLTDRWQRIDKQIDFRLWDLEKQIKQLRNYRDNYQAFCKWLYDRKRRQDSLESMKFGDSNTVMRFLNEQKNLHSEISGKRDKSEEVQKIAELCANSIKDYELQLASYTSGLETLLNIPIKRTMIQSPSGVILQEAADVHARYIELLTRSGDYYRFLSEMLKSLEDLKLKNTKIEVLEEELRLARDANSENCNKNKFLDQNLQKYQAECSQFKAKLASLEELKRQAELDGKSAKQNLDKCYGQIKELNEKITRLTYEIEDEKRRRKSVEDRFDQQKNDYDQLQKARQCEKENLGWQKLESEKAIKEKEYEIERLRVLLQEEGTRKREYENELAKVRNHYNEEMSNLRNKYETEINITKTTIKEISMQKEDDSKNLRNQLDRLSRENRDLKDEIVRLNDSILQATEQRRRAEENALQQKACGSEIMQKKQHLEIELKQVMQQRSEDNARHKQSLEEAAKTIQDKNKEIERLKAEFQEEAKRRWEYENELSKVRNNYDEEIISLKNQFETEINITKTTIHQLTMQKEEDTSGYRAQIDNLTRENRSLSEEIKRLKNTLTQTTENLRRVEEDIQQQKATGSEVSQRKQQLEVELRQVTQMRTEESVRYKQSLDDAAKTIQDKNKEIERLKQLIDKETNDRKCLEDENARLQRVQYDLQKANSSATETINKLKVQEQELTRLRIDYERVSQERTVKDQDITRFQNSLKELQLQKQKVEEELNRLKRTASEDSCKRKKLEEELEGMRRSLKEQAIKITNLTQQLEQASIVKKRSEDDLRQQRDVLDGHLREKQRTQEELRRLSSEVEALRRQLLQEQESVKQAHLRNEHFQKAIEDKSRSLNESKIEIERLQSLTENLTKEHLMLEEELRNLRLEYDDLRRGRSEADSDKNATILELRSQLQISNNRTLELQGLINDLQRERENLRQEIEKFQKQALEASNRIQESKNQCTQVVQERESLLVKIKVLEQDKARLQRLEDELNRAKSTLEAETRVKQRLECEKQQIQNDLNQWKTQYSRKEEAIRKIESEREKSEREKNSLRSEIERLQAEIKRIEERCRRKLEDSTRETQSQLETERSRYQREIDKLRQRPYGSHRETQTECEWTVDTSKLVFDGLRKKVTAMQLYECQLIDKTTLDKLLKGKKSVEEVASEIQPFLRGAGSIAGASASPKEKYSLVEAKRKKLISPESTVMLLEAQAATGGIIDPHRNEKLTVDSAIARDLIDFDDRQQIYAAEKAITGFDDPFSGKTVSVSEAIKKNLIDRETGMRLLEAQIASGGVVDPVNSVFLPKDVALARGLIDRDLYRSLNDPRDSQKNFVDPVTKKKVSYVQLKERCRIEPHTGLLLLSVQKRSMSFQGIRQPVTVTELVDSGILRPSTVNELESGQISYDEVGERIKDFLQGSSCIAGIYNETTKQKLGIYEAMKIGLVRPGTALELLEAQAATGFIVDPVSNLRLPVEEAYKRGLVGIEFKEKLLSAERAVTGYNDPETGNIISLFQAMNKELIEKGHGIRLLEAQIATGGIIDPKESHRLPVDIAYKRGYFNEELSEILSDPSDDTKGFFDPNTEENLTYLQLKERCIKDEETGLCLLPLKEKKKQVQTSQKNTLRKRRVVIVDPETNKEMSVQEAYKKGLIDYETFKELCEQECEWEEITITGSDGSTRVVLVDRKTGSQYDIQDAIDKGLVDRKFFDQYRSGSLSLTQFADMISLKNGVGTSSSMGSGVSDDVFSSSRHESVSKISTISSVRNLTIRSSSFSDTLEESSPIAAIFDTENLEKISITEGIERGIVDSITGQRLLEAQACTGGIIHPTTGQKLSLQDAVSQGVIDQDMATRLKPAQKAFIGFEGVKGKKKMSAAEAVKEKWLPYEAGQRFLEFQYLTGGLVDPEVHGRISTEEAIRKGFIDGRAAQRLQDTSSYAKILTCPKTKLKISYKDAINRSMVEDITGLRLLEAASVSSKGLPSPYNMSSAPGSRSGSRSGSRSGSRSGSRSGSRRGSFDATGNSSYSYSYSFSSSSIGH

SEQ ID NO: 763708 - protein, 2723 aa, Homo sapiens
MRALYKAISVPRVRRASSKGGGGYTCQSGSGWDEFTKHVTSECLGWMRQQRAEMDMVAWGVDLASVEQHINSHRGIHNSIGDYRWQLDKIKADLREKSAIYQLEEEYENLLKASFERMDHLRQLQNIIQATSREIMWINDCEEEELLYDWSDKNTNIAQKQEAFSIRMSQLEVKEKELNKLKQESDQLVLNQHPASDKIEAYMDTLQTQWSWILQITKCIDVHLKENAAYFQFFEEAQSTEAYLKGLQDSIRKKYPCDKNMPLQHLLEQIKELEKEREKILEYKRQVQNLVNKSKKIVQLKPRNPDYRSNKPIILRALCDYKQDQKIVHKGDECILKDNNERSKWYVTGPGGVDMLVPSVGLIIPPPNPLAVDLSCKIEQYYEAILALWNQLYINMKSLVSWHYCMIDIEKIRAMTIAKLKTMRQEDYMKTIADLELHYQEFIRNSQGSEMFGDDDKRKIQSQFTDAQKHYQTLVIQLPGYPQHQTVTTTEITHHGTCQDVNHNKVIETNRENDKQETWMLMELQKIRRQIEHCEGRMTLKNLPLADQGSSHHITVKINELKSVQNDSQAIAEVLNQLKDMLANFRGSEKYCYLQNEVFGLFQKLENINGVTDGYLNSLCTVRALLQAILQTEDMLKVYEARLTEEETVCLDLDKVEAYRCGLKKIKNDLNLKKSLLATMKTELQKAQQIHSQTSQQYPLYDLDLGKFGEKVTQLTDRWQRIDKQIDFRLWDLEKQIKQLRNYRDNYQAFCKWLYDRKRRQDSLESMKFGDSNTVMRFLNEQKNLHSEISGKRDKSEEVQKIAELCANSIKDYELQLASYTSGLETLLNIPIKRTMIQSPSGVILQEAADVHARYIELLTRSGDYYRFLSEMLKSLEDLKLKNTKIEVLEEELRLARDANSENCNKNKFLDQNLQKYQAECSQFKAKLASLEELKRQAELDGKSAKQNLDKCYGQIKELNEKITRLTYEIEDEKRRRKSVEDRFDQQKNDYDQLQKARQCEKENLGWQKLESEKAIKEKEYEIERLRVLLQEEGTRKREYENELAKVRNHYNEEMSNLRNKYETEINITKTTIKEISMQKEDDSKNLRNQLDRLSRENRDLKDEIVRLNDSILQATEQRRRAEENALQQKACGSEIMQKKQHLEIELKQVMQQRSEDNARHKQSLEEAAKTIQDKNKEIERLKAEFQEEAKRRWEYENELSKVRNNYDEEIISLKNQFETEINITKTTIHQLTMQKEEDTSGYRAQIDNLTRENRSLSEEIKRLKNTLTQTTENLRRVEEDIQQQKATGSEVSQRKQQLEVELRQVTQMRTEESVRYKQSLDDAAKTIQDKNKEIERLKQLIDKETNDRKCLEDENARLQRVQYDLQKANSSATETINKLKVQEQELTRLRIDYERVSQERTVKDQDITRFQNSLKELQLQKQKVEEELNRLKRTASEDSCKRKKLEEELEGMRRSLKEQAIKITNLTQQLEQASIVKKRSEDDLRQQRDVLDGHLREKQRTQEELRRLSSEVEALRRQLLQEQESVKQAHLRNEHFQKAIEDKSRSLNESKIEIERLQSLTENLTKEHLMLEEELRNLRLEYDDLRRGRSEADSDKNATILELRSQLQISNNRTLELQGLINDLQRERENLRQEIEKFQKQALEASNRIQESKNQCTQVVQERESLLVKIKVLEQDKARLQRLEDELNRAKSTLEAETRVKQRLECEKQQIQNDLNQWKTQYSRKEEAIRKIESEREKSEREKNSLRSEIERLQAEIKRIEERCRRKLEDSTRETQSQLETERSRYQREIDKLRQRPYGSHRETQTECEWTVDTSKLVFDGLRKKVTAMQLYECQLIDKTTLDKLLKGKKSVEEVASEIQPFLRGAGSIAGASASPKEKYSLVEAKRKKLISPESTVMLLEAQAATGGIIDPHRNEKLTVDSAIARDLIDFDDRQQIYAAEKAITGFDDPFSGKTVSVSEAIKKNLIDRETGMRLLEAQIASGGVVDPVNSVFLPKDVALARGLIDRDLYRSLNDPRDSQKNFVDPVTKKKVSYVQLKERCRIEPHTGLLLLSVQKRSMSFQGIRQPVTVTELVDSGILRPSTVNELESGQISYDEVGERIKDFLQGSSCIAGIYNETTKQKLGIYEAMKIGLVRPGTALELLEAQAATGFIVDPVSNLRLPVEEAYKRGLVGIEFKEKLLSAERAVTGYNDPETGNIISLFQAMNKELIEKGHGIRLLEAQIATGGIIDPKESHRLPVDIAYKRGYFNEELSEILSDPSDDTKGFFDPNTEENLTYLQLKERCIKDEETGLCLLPLKEKKKQVQTSQKNTLRKRRVVIVDPETNKEMSVQEAYKKGLIDYETFKELCEQECEWEEITITGSDGSTRVVLVDRKTGSQYDIQDAIDKGLVDRKFFDQYRSGSLSLTQFADMISLKNGVGTSSSMGSGVSDDVFSSSRHESVSKISTISSVRNLTIRSSSFSDTLEESSPIAAIFDTENLEKISITEGIERGIVDSITGQRLLEAQACTGGIIHPTTGQKLSLQDAVSQGVIDQDMATRLKPAQKAFIGFEGVKGKKKMSAAEAVKEKWLPYEAGQRFLEFQYLTGGLVDPEVHGRISTEEAIRKGFIDGRAAQRLQDTSSYAKILTCPKTKLKISYKDAINRSMVEDITGLRLLEAASVSSKGLPSPYNMSSAPGSRSGSRSGSRSGSRSGSRSGSRRGSFDATGNSSYSYSYSFSSSSIGH

SEQ ID NO: 763709 - protein, 2694 aa, Homo sapiens
RSRGSRGVVVISEGLGWMRQQRAEMDMVAWGVDLASVEQHINSHRGIHNSIGDYRWQLDKIKADLREKSAIYQLEEEYENLLKASFERMDHLRQLQNIIQATSREIMWINDCEEEELLYDWSDKNTNIAQKQEAFSIRMSQLEVKEKELNKLKQESDQLVLNQHPASDKIEAYMDTLQTQWSWILQITKCIDVHLKENAAYFQFFEEAQSTEAYLKGLQDSIRKKYPCDKNMPLQHLLEQIKELEKEREKILEYKRQVQNLVNKSKKIVQLKPRNPDYRSNKPIILRALCDYKQDQKIVHKGDECILKDNNERSKWYVTGPGGVDMLVPSVGLIIPPPNPLAVDLSCKIEQYYEAILALWNQLYINMKSLVSWHYCMIDIEKIRAMTIAKLKTMRQEDYMKTIADLELHYQEFIRNSQGSEMFGDDDKRKIQSQFTDAQKHYQTLVIQLPGYPQHQTVTTTEITHHGTCQDVNHNKVIETNRENDKQETWMLMELQKIRRQIEHCEGRMTLKNLPLADQGSSHHITVKINELKSVQNDSQAIAEVLNQLKDMLANFRGSEKYCYLQNEVFGLFQKLENINGVTDGYLNSLCTVRALLQAILQTEDMLKVYEARLTEEETVCLDLDKVEAYRCGLKKIKNDLNLKKSLLATMKTELQKAQQIHSQTSQQYPLYDLDLGKFGEKVTQLTDRWQRIDKQIDFRLWDLEKQIKQLRNYRDNYQAFCKWLYDRKRRQDSLESMKFGDSNTVMRFLNEQKNLHSEISGKRDKSEEVQKIAELCANSIKDYELQLASYTSGLETLLNIPIKRTMIQSPSGVILQEAADVHARYIELLTRSGDYYRFLSEMLKSLEDLKLKNTKIEVLEEELRLARDANSENCNKNKFLDQNLQKYQAECSQFKAKLASLEELKRQAELDGKSAKQNLDKCYGQIKELNEKITRLTYEIEDEKRRRKSVEDRFDQQKNDYDQLQKARQCEKENLGWQKLESEKAIKEKEYEIERLRVLLQEEGTRKREYENELAKVRNHYNEEMSNLRNKYETEINITKTTIKEISMQKEDDSKNLRNQLDRLSRENRDLKDEIVRLNDSILQATEQRRRAEENALQQKACGSEIMQKKQHLEIELKQVMQQRSEDNARHKQSLEEAAKTIQDKNKEIERLKAEFQEEAKRRWEYENELSKVRNNYDEEIISLKNQFETEINITKTTIHQLTMQKEEDTSGYRAQIDNLTRENRSLSEEIKRLKNTLTQTTENLRRVEEDIQQQKATGSEVSQRKQQLEVELRQVTQMRTEESVRYKQSLDDAAKTIQDKNKEIERLKQLIDKETNDRKCLEDENARLQRVQYDLQKANSSATETINKLKVQEQELTRLRIDYERVSQERTVKDQDITRFQNSLKELQLQKQKVEEELNRLKRTASEDSCKRKKLEEELEGMRRSLKEQAIKITNLTQQLEQASIVKKRSEDDLRQQRDVLDGHLREKQRTQEELRRLSSEVEALRRQLLQEQESVKQAHLRNEHFQKAIEDKSRSLNESKIEIERLQSLTENLTKEHLMLEEELRNLRLEYDDLRRGRSEADSDKNATILELRSQLQISNNRTLELQGLINDLQRERENLRQEIEKFQKQALEASNRIQESKNQCTQVVQERESLLVKIKVLEQDKARLQRLEDELNRAKSTLEAETRVKQRLECEKQQIQNDLNQWKTQYSRKEEAIRKIESEREKSEREKNSLRSEIERLQAEIKRIEERCRRKLEDSTRETQSQLETERSRYQREIDKLRQRPYGSHRETQTECEWTVDTSKLVFDGLRKKVTAMQLYECQLIDKTTLDKLLKGKKSVEEVASEIQPFLRGAGSIAGASASPKEKYSLVEAKRKKLISPESTVMLLEAQAATGGIIDPHRNEKLTVDSAIARDLIDFDDRQQIYAAEKAITGFDDPFSGKTVSVSEAIKKNLIDRETGMRLLEAQIASGGVVDPVNSVFLPKDVALARGLIDRDLYRSLNDPRDSQKNFVDPVTKKKVSYVQLKERCRIEPHTGLLLLSVQKRSMSFQGIRQPVTVTELVDSGILRPSTVNELESGQISYDEVGERIKDFLQGSSCIAGIYNETTKQKLGIYEAMKIGLVRPGTALELLEAQAATGFIVDPVSNLRLPVEEAYKRGLVGIEFKEKLLSAERAVTGYNDPETGNIISLFQAMNKELIEKGHGIRLLEAQIATGGIIDPKESHRLPVDIAYKRGYFNEELSEILSDPSDDTKGFFDPNTEENLTYLQLKERCIKDEETGLCLLPLKEKKKQVQTSQKNTLRKRRVVIVDPETNKEMSVQEAYKKGLIDYETFKELCEQECEWEEITITGSDGSTRVVLVDRKTGSQYDIQDAIDKGLVDRKFFDQYRSGSLSLTQFADMISLKNGVGTSSSMGSGVSDDVFSSSRHESVSKISTISSVRNLTIRSSSFSDTLEESSPIAAIFDTENLEKISITEGIERGIVDSITGQRLLEAQACTGGIIHPTTGQKLSLQDAVSQGVIDQDMATRLKPAQKAFIGFEGVKGKKKMSAAEAVKEKWLPYEAGQRFLEFQYLTGGLVDPEVHGRISTEEAIRKGFIDGRAAQRLQDTSSYAKILTCPKTKLKISYKDAINRSMVEDITGLRLLEAASVSSKGLPSPYNMSSAPGSRSGSRSGSRSGSRSGSRSGSRRGSFDATGNSSYSYSYSFSSSSIGH

SEQ ID NO: 763710 - protein, 1142 aa, Homo sapiens
PPVLPVRARSEADSDKNATILELRSQLQISNNRTLELQGLINDLQRERENLRQEIEKFQKQALEASNRIQESKNQCTQVVQERESLLVKIKVLEQDKARLQRLEDELNRAKSTLEAETRVKQRLECEKQQIQNDLNQWKTQYSRKEEAIRKIESEREKSEREKNSLRSEIERLQAEIKRIEERCRRKLEDSTRETQSQLETERSRYQREIDKLRQRPYGSHRETQTECEWTVDTSKLVFDGLRKKVTAMQLYECQLIDKTTLDKLLKGKKSVEEVASEIQPFLRGAGSIAGASASPKEKYSLVEAKRKKLISPESTVMLLEAQAATGGIIDPHRNEKLTVDSAIARDLIDFDDRQQIYAAEKAITGFDDPFSGKTVSVSEAIKKNLIDRETGMRLLEAQIASGGVVDPVNSVFLPKDVALARGLIDRDLYRSLNDPRDSQKNFVDPVTKKKVSYVQLKERCRIEPHTGLLLLSVQKRSMSFQGIRQPVTVTELVDSGILRPSTVNELESGQISYDEVGERIKDFLQGSSCIAGIYNETTKQKLGIYEAMKIGLVRPGTALELLEAQAATGFIVDPVSNLRLPVEEAYKRGLVGIEFKEKLLSAERAVTGYNDPETGNIISLFQAMNKELIEKGHGIRLLEAQIATGGIIDPKESHRLPVDIAYKRGYFNEELSEILSDPSDDTKGFFDPNTEENLTYLQLKERCIKDEETGLCLLPLKEKKKQVQTSQKNTLRKRRVVIVDPETNKEMSVQEAYKKGLIDYETFKELCEQECEWEEITITGSDGSTRVVLVDRKTGSQYDIQDAIDKGLVDRKFFDQYRSGSLSLTQFADMISLKNGVGTSSSMGSGVSDDVFSSSRHESVSKISTISSVRNLTIRSSSFSDTLEESSPIAAIFDTENLEKISITEGIERGIVDSITGQRLLEAQACTGGIIHPTTGQKLSLQDAVSQGVIDQDMATRLKPAQKAFIGFEGVKGKKKMSAAEAVKEKWLPYEAGQRFLEFQYLTGGLVDPEVHGRISTEEAIRKGFIDGRAAQRLQDTSSYAKILTCPKTKLKISYKDAINRSMVEDITGLRLLEAASVSSKGLPSPYNMSSAPGSRSGSRSGSRSGSRSGSRSGSRRGSFDATGNSSYSYSYSFSSSSIGH

SEQ ID NO: 763711 - protein, 2089 aa, Homo sapiens
MLKVYEARLTEEETVCLDLDKVEAYRCGLKKIKNDLNLKKSLLATMKTELQKAQQIHSQTSQQYPLYDLDLGKFGEKVTQLTDRWQRIDKQIDFRLWDLEKQIKQLRNYRDNYQAFCKWLYDRKRRQDSLESMKFGDSNTVMRFLNEQKNLHSEISGKRDKSEEVQKIAELCANSIKDYELQLASYTSGLETLLNIPIKRTMIQSPSGVILQEAADVHARYIELLTRSGDYYRFLSEMLKSLEDLKLKNTKIEVLEEELRLARDANSENCNKNKFLDQNLQKYQAECSQFKAKLASLEELKRQAELDGKSAKQNLDKCYGQIKELNEKITRLTYEIEDEKRRRKSVEDRFDQQKNDYDQLQKARQCEKENLGWQKLESEKAIKEKEYEIERLRVLLQEEGTRKREYENELAKVRNHYNEEMSNLRNKYETEINITKTTIKEISMQKEDDSKNLRNQLDRLSRENRDLKDEIVRLNDSILQATEQRRRAEENALQQKACGSEIMQKKQHLEIELKQVMQQRSEDNARHKQSLEEAAKTIQDKNKEIERLKAEFQEEAKRRWEYENELSKVRNNYDEEIISLKNQFETEINITKTTIHQLTMQKEEDTSGYRAQIDNLTRENRSLSEEIKRLKNTLTQTTENLRRVEEDIQQQKATGSEVSQRKQQLEVELRQVTQMRTEESVRYKQSLDDAAKTIQDKNKEIERLKQLIDKETNDRKCLEDENARLQRVQYDLQKANSSATETINKLKVQEQELTRLRIDYERVSQERTVKDQDITRFQNSLKELQLQKQKVEEELNRLKRTASEDSCKRKKLEEELEGMRRSLKEQAIKITNLTQQLEQASIVKKRSEDDLRQQRDVLDGHLREKQRTQEELRRLSSEVEALRRQLLQEQESVKQAHLRNEHFQKAIEDKSRSLNESKIEIERLQSLTENLTKEHLMLEEELRNLRLEYDDLRRGRSEADSDKNATILELRSQLQISNNRTLELQGLINDLQRERENLRQEIEKFQKQALEASNRIQESKNQCTQVVQERESLLVKIKVLEQDKARLQRLEDELNRAKSTLEAETRVKQRLECEKQQIQNDLNQWKTQYSRKEEAIRKIESEREKSEREKNSLRSEIERLQAEIKRIEERCRRKLEDSTRETQSQLETERSRYQREIDKLRQRPYGSHRETQTECEWTVDTSKLVFDGLRKKVTAMQLYECQLIDKTTLDKLLKGKKSVEEVASEIQPFLRGAGSIAGASASPKEKYSLVEAKRKKLISPESTVMLLEAQAATGGIIDPHRNEKLTVDSAIARDLIDFDDRQQIYAAEKAITGFDDPFSGKTVSVSEAIKKNLIDRETGMRLLEAQIASGGVVDPVNSVFLPKDVALARGLIDRDLYRSLNDPRDSQKNFVDPVTKKKVSYVQLKERCRIEPHTGLLLLSVQKRSMSFQGIRQPVTVTELVDSGILRPSTVNELESGQISYDEVGERIKDFLQGSSCIAGIYNETTKQKLGIYEAMKIGLVRPGTALELLEAQAATGFIVDPVSNLRLPVEEAYKRGLVGIEFKEKLLSAERAVTGYNDPETGNIISLFQAMNKELIEKGHGIRLLEAQIATGGIIDPKESHRLPVDIAYKRGYFNEELSEILSDPSDDTKGFFDPNTEENLTYLQLKERCIKDEETGLCLLPLKEKKKQVQTSQKNTLRKRRVVIVDPETNKEMSVQEAYKKGLIDYETFKELCEQECEWEEITITGSDGSTRVVLVDRKTGSQYDIQDAIDKGLVDRKFFDQYRSGSLSLTQFADMISLKNGVGTSSSMGSGVSDDVFSSSRHESVSKISTISSVRNLTIRSSSFSDTLEESSPIAAIFDTENLEKISITEGIERGIVDSITGQRLLEAQACTGGIIHPTTGQKLSLQDAVSQGVIDQDMATRLKPAQKAFIGFEGVKGKKKMSAAEAVKEKWLPYEAGQRFLEFQYLTGGLVDPEVHGRISTEEAIRKGFIDGRAAQRLQDTSSYAKILTCPKTKLKISYKDAINRSMVEDITGLRLLEAASVSSKGLPSPYNMSSAPGSRSGSRSGSRSGSRSGSRSGSRRGSFDATGNSSYSYSYSFSSSSIGH

SEQ ID NO: 763712 - protein, 86 aa, Homo sapiens
  misc_feature (16)..(16): Xaa can be any naturally occurring amino acid
  misc_feature (23)..(24): Xaa can be any naturally occurring amino acid
TPLRQRPPRRWGQRGXWSLAPAXXRGPRGRRCPSCSPCALSLTSPGSCLLKTPVFTPYKASSEQTGRPLVEPAHPVPSAWRPGPRA

SEQ ID NO: 763713 - protein, 248 aa, Homo sapiens
HEGDAPSSRCPSAAAAAHRAPHGPSRPERAPPLTARAPGRKNTRSRPYLRVSSDPWRSHCGSRAIAMEFVMKQALGGATKDMGKMLGGDEEKDRRLPHPARGARPQDPPSPPRAPLPAGGWSPIAWDAPFSCCLPPTQQRPRPGLDRRRGRPPAKAPPVATRFSELWLGPTLVGDHVCLQGRSTSLHMTTTAVGVLAVWPRGRWRPGGGRLGGPLPSLRNRGGLPGGVAGVLGSRTIERYLRRSRHRP

SEQ ID NO: 763714 - protein, 302 aa, Homo sapiens
SRKMGASPSLLPPMSAPGPHSPWGLPIPPGTPRVRHQEEGGARGRGPGRHGGQLRGELDAAQEGHPAGLRGRGGGGGREHPGHRHQVPARAAAGHAQEVAPRGTAAPRSPRPSPYRSSAEAPEGRAERSPHADISHSPRPALPAPAASLTRQGARAPRTPPVRPVLLCPRVAGAPSPGTPLSLAVYRPPSSARGQGRRRAAPRPPLCARSRRWAPVGPALRSTAIADGGVRAGRGRRGLGPPPARGLRGSDRSAVSICVRTRPLSAPRPGPLAPLSIRLCPRPFLSSLEGFASYERHGRVHF

SEQ ID NO: 763715 - protein, 193 aa, Homo sapiens
HEGDAPSSRCPSAAAAAHRAPHGPSRPERAPPLTARAPGRKNTRSRPYLRVSSDPWRSHCGSRAIAMEFVMKQALGGATKDMGKMLGGDEEKDPDAAKKEEERQEALRQAEEERKAKYAKMEAEREAVRQGIRDKYGIKKKEEREAEAQAAMEANSEGSLTRPKKAIPPGCGDEVEEEDESILDTVIKYLPGS

SEQ ID NO: 763716 - protein, 200 aa, Homo sapiens
HEGDAPSSRCPSAAAAAHRAPHGPSRPERAPPLTARAPGRKNTRSRPYLRVSSDPWRSHCGSRAIAMEFVMKQALGGATKDMGKMLGGDEEKDPDAAKKEEERQEALRQAEEERKAKYAKMEAEREAVRQGIRDKYGIKKKEEREAEAQAAMEANSEGSLTRPKKAIPPGCGDEVEEEDESILDTVIKYLPGPLQDMLKK

SEQ ID NO: 763717 - protein, 200 aa, Homo sapiens; identical to SEQ ID NO: 763716

SEQ ID NO: 763718 - protein, 145 aa, Homo sapiens
SRLTTARAVSGTLQALPEPPQGATKDMGKMLGGDEEKDPDAAKKEEERQEALRQAEEERKAKYAKMEAEREAVRQGIRDKYGIKKKEEREAEAQAAMEANSEGSLTRPKKAIPPGCGDEVEEEDESILDTVIKYLPGPLQDMLKK

SEQ ID NO: 763719 - protein, 200 aa, Homo sapiens; identical to SEQ ID NO: 763716

SEQ ID NO: 763720 - protein, 114 aa, Homo sapiens
MHQVSTCFGPGRGLALTFMTLHSFREAITLDCNTNDRRPSGQRPPRPSAPQRRGPRGRRCPSCSPCALSLTSPGSCLLKTPVFTPYKASSEQTGRPLVEPAHPVPSAWRPGPRA

SEQ ID NO: 763721 - protein, 200 aa, Homo sapiens; identical to SEQ ID NO: 763716

SEQ ID NO: 763722 - protein, 147 aa, Homo sapiens
RRGRGSSSRLHRAGGERVHREPAAVVPQPGDVRHQWFFQRGLSSPKQEAVFLLCVQPRPLEGLRVGAESSWGQGPPTRPPMSPRGPPSQCEDHSPMKTDPVGSPLSEFRRCPFLEQEQAKKYSCNMMAFLADEYCNYCRDILRNVRN

SEQ ID NO: 763723 - protein, 139 aa, Homo sapiens
MSPKPRASGPPAKATEAGKRKSSSQPSPSDPKKKTTKVAKKGKAVRRGRRGKKGAATKMAAVTAPEAESAPAAPGPSDQPSQELPQHELPPEEPVSEGTQHDPLSQEAELEEPLSQESEVEEPLTVWMASFSPVSESSD

SEQ ID NO: 763724 - protein, 511 aa, Homo sapiens
GVKGSGGHRGGGEMAFSGSQAPYLSPAVPFSGTIQGGLQDGLQITVNGTVLSSSGTRFAVNFQTGFSGNDIAFHFNPRFEDGGYVVCNTRQNGSWGPEERKTHMPFQKGMPFDLCFLVQSSDFKVMVNGILFVQYFHRVPFHRVDTISVNGSVQLSYISFQPPGVWPANPAPITQTVIHTVQSAPGQMFSTPAIPPMMYPHPAYPMPFITTILGGLYPSKSILLSGTVLPSAQRFHINLCSGNHIAFHLNPRFDENAVVRNTQIDNSWGSEERSLPRKMPFVRGQSFSVWILCEAHCLKVAVDGQHLFEYYHRLRNLPTINRLEVGGDIQLTHVQTEAASWPWGRGLGCGAVWVLSSSPLPRPSLSNPAWDLGFNAEAMSLSGPASGYSHPGTEKAADGDCLPQPQQHLGLQLLESYHPRRQAQPGRGEEWAVKMKPHAQSPPIPHAAPPQSQATSCLLLVGGGLLSPSSLTFNLTLTLHRAPTLHPSWKAGLMASHWPPPPDQSVLFRGL

SEQ ID NO: 763725 - protein, 110 aa, Homo sapiens
CFFAVGTPYYMSPERIHENGYNFKSDIWSLGCLLYEMAALQSPFYGDKMNLYSLCKKIEQCDYPPLPSDHYSEELRQLVNMCINPDPEKRPDVTYVYDVAKRMHACTASS

SEQ ID NO: 763726 - protein, 110 aa, Homo sapiens; identical to SEQ ID NO: 763725

SEQ ID NO: 763727 - protein, 110 aa, Homo sapiens; identical to SEQ ID NO: 763725

SEQ ID NO: 763728 - protein, 110 aa, Homo sapiens; identical to SEQ ID NO: 763725

SEQ ID NO: 763729 - protein, 110 aa, Homo sapiens; identical to SEQ ID NO: 763725

SEQ ID NO: 763730 - protein, 110 aa, Homo sapiens; identical to SEQ ID NO: 763725

SEQ ID NO: 763731 - protein, 110 aa, Homo sapiens; identical to SEQ ID NO: 763725

SEQ ID NO: 763732 - protein, 117 aa, Homo sapiens
RYPSALPCLSALPCLSALPCLPYIPVLIFLSSKGLMADSDKVEPSSALPCLPAIVLDMRRPLVMEGRGSGSPPMPVCAWFQHHSPYFLKQLNPTIPPSQPISILELFLLLNRAVSVN

SEQ ID NO: 763733 - protein, 131 aa, Homo sapiens
PQSRGKQRWEIPTANLTFPTPGWQPTASIIPGFAQFPSTPCSSVSAGPNMSGSPLPGTPGLPDKHLLLLAGSPFLWVTLLSLPKRPDTIPPPTAFTTSGGSSLHSSLTACVSWENTSSSRAEAVLHSSPQP

SEQ ID NO: 763734 - protein, 138 aa, Homo sapiens
MPAAFPCVFPPQSLQVFPQMIVKVWEKQSLPLPGLRGSPVERLYLPRNELDNPHKQKAWKIYPPEFAVEILFGMVSVDSLLFVLSSPHWWLHLAQGSFWMSEGGFSLCHPGWSVVAQSLLTSTSAFCVRAILLPQPPE

SEQ ID NO: 763735 - protein, 114 aa, Homo sapiens
MPAAFPCVFPPQSLQVFPQMIVKVWEKQSLPLPGLRGSPVERKNRNYGLCLPYCLQNIFNCRGFIYQEMNWIIHINKKLGKFIHQNLPWRYFLEPGLPVYHPSVDTLGTGHACG

SEQ ID NO: 763736 - protein, 87 aa, Homo sapiens
SSVPMPEPVPPPSECVSWKPCRQSQCSHSFRTTSQHCVHHVRALRVVPFRPVVPCTRLACNKESPVPFKQESVRHHHAVVTDKEGVK

SEQ ID NO: 763737 - protein, 228 aa, Homo sapiens
  misc_feature (119)..(119): Xaa can be any naturally occurring amino acid
  misc_feature (169)..(169): Xaa can be any naturally occurring amino acid
  misc_feature (202)..(202): Xaa can be any naturally occurring amino acid
MASLPPFGGPLADATPLTEAESTHPPIHSLAFITPRAPHRAPHDTPPSTPRYSGLSPTKHSPCTGMPDPPPPRPAPVPPPPLLSPTAPLPTIPPPTQFHPRARVMSPPGRFPRPHRHSXHPSTAPPPPSRHHSHSLCPPPSIDGHATHQTPNRQGYDIGQSKPSASIVXPETCPDTLPHTLPPRAKYALHQFLSFVRTPPPXPSPQAFIPRTIAIPSTKSPAAPSPID

SEQ ID NO: 763738 - protein, 154 aa, Homo sapiens
MVYGSIHPSRHCIPTAQSLLFTSGWLDFSFIDTFATTSPVTRLNELSFHADNSSNSLTSVPCSLHSIYIYLLLNMTSSTDSHSQTPDQNSPLLKCHALVTLTCPSSFVMTTQLFIFPRGASPFSTPSLSFSPLYLSSLSQSKQDYVAFQLRHSC

SEQ ID NO: 763739 - protein, 622 aa, Homo sapiens
MVDVVGLERETGPRGSPWPGLPLPSLVGPAPLLTCLCPQCLSVEDALGLGEPEGSGLPPGPVLEARYVARLSAAAVLYLSNPEGTCEDTRAGLWASHADHLLALLESPKALTPGLSWLLQRMQARAAGQTPKTACVDIPQLLEEAVGAGAPGSAGGVLAALLDHVRSGSCFHALPSPQYFVDFVFQQHSSEVPMTLAELSALMQRLGVGREAHSDHSHRHRGASSRDPVPLISSSNSSSVWDTVCLSARDVMAAYGLSEQAGVTPEAWAQLSPALLQQQLSGACTSQSRPPVQDQLSQSERYLYGSLATLLICLCAVFGLLLLTCTGCRGVTHYILQTFLSLAVGALTGDAVLHLTPKVLGLHTHSEEGLSPQPTWRLLAMLAGLYAFFLFENLFNLLLPRDPEDLEDGPCGHSSHSHGGHSHGVSLQLAPSELRQPKPPHEGSRADLVAEESPELLNPEPRRLSPELRLLPYMITLGDAVHNFADGLAVGAAFASSWKTGLATSLAVFCHELPHELGDFAALLHAGLSVRQALLLNLASALTAFAGLYVALAVGVSEESEAWILAVATGLFLYVALCDMLPAMLKVRDPRPWLLFLLHNVGLLGGWTVLLLLSLYEDDITF

SEQ ID NO: 763740 - protein, 647 aa, Homo sapiens [sequence omitted]

SEQ ID NO: 763741 - protein, 178 aa, Homo sapiens
RAGLTQGSSQVAEESPELLNPEPRRLSPELRLLPYMITLGDAVHNFADGLAVGAAFASSWKTGLATSLAVFCHELPHELGDFAALLHAGLSVRQALLLNLASALTAFAGLYVALAVGVSEESEAWILAVATGLFLYVALCDMLPAMLKVRDPRPWLLFLLHNVGLLGGWTVLLLLSLS

SEQ ID NO: 763742 - protein, 578 aa, Homo sapiens
ALPAGSKGPWANSRRRRRLVAVPGHPDPPHRPEPTLLLMGAPGSAGGVLAALLDHVRSGSCFHALPSPQYFVDFVFQQHSSEVPMTLAGEAWAGLWRGAPPIPQPPRPWGAGPEPTQTRGANFFSLPELSALMQRLGVGREAHSDHSHRHRGASSRDPVPLISSSNSSSVWDTVSCALGEDGASPGSAWAPEPVLPPPKVCLSARDVMAAYGLSEQAGVTPEAWAQLSPALLQQQLSGACTSQSRPPVQDQLSQSERYLYGSLATLLICLCAVFGLLLLTCTGCRGVTHYILQTFLSLAVGALTGDAVLHLTPKVLGLHTHSEEGLSPQPTWRLLAMLAGLYAFFLFENLFNLLLPRDPEDLEDGPCGHSSHSHGGHSHGVSLQLAPSELRQPKPPHEGSRADLVAEESPELLNPEPRRLSPELRLLPYMITLGDAVHNFADGLAVGAAFASSWKTGLATSLAVFCHELPHELGDFAALLHAGLSVRQALLLNLASALTAFAGLYVALAVGVSEESEAWILAVATGLFLYVALCDMLPAMLKVRDPRPWLLFLLHNVGLLGGWTVLLLLSLYEDDITF

SEQ ID NO: 763743 - protein, 180 aa, Homo sapiens
TEEVASTAEESPELLNPEPRRLSPELRLLPYMITLGDAVHNFADGLAVGAAFASSWKTGLATSLAVFCHELPHELGDFAALLHAGLSVRQALLLNLASALTAFAGLYVALAVGVSEESEAWILAVATGLFLYVALCDMLPAMLKVRDPRPWLLFLLHNVGLLGGWTVLLLLSLYEDDITF

SEQ ID NO: 763744 - protein, 647 aa, Homo sapiens [sequence omitted]

SEQ ID NO: 763745 - protein, 627 aa, Homo sapiens
MASLVSLELGLLLAVLVVTATASPPAGLLSLLTSGQGALDQEALGGLLNTLADRVHCTNGPCGKCLSVEDALGLGEPEGSGLPPGPVLEARYVARLSAAAVLYLSNPEGTCEDTRAGLWASHADHLLALLESPKALTPGLSWLLQRMQARAAGQTPKTACVDIPQLLEEAVGAGAPGSAGGVLAALLDHVRSGSCFHALPSPQYFVDFVFQQHSSEVPMTLAELSALMQRLGVGREAHSDHSHRHRGASSRDPVPLISSSNSSSVWDTVCLSARDVMAAYGLSEQAGVTPEAWAQLSPALLQQQLSGACTSQSRPPVQDQLSQSERYLYGSLATLLICLCAVFGLLLLTCTGCRGVTHYILQTFLSLAVGALTGDAVLHLTPKVLGLHTHSEEGLSPQPTWRLLAMLAGLYAFFLFENLFNLLLPRDPEDLEDGPCGHSSHSHGGHSHGVSLQLAPSELRQPKPPHEGSRADLVAEESPELLNPEPRRLSPELRLLPYMITLGDAVHNFADGLAVGAAFASSWKTGLATSLAVFCHELPHELGDFAALLHAGLSVRQALLLNLASALTAFAGLYVALAVGVSEESEAWILAVATGLFLYVALCDMVRMARGGAALGRELSRGAEQGR

SEQ ID NO: 763746 - protein, 625 aa, Homo sapiens
MASLVSLELGLLLAVLVVTATASPPAGLLSLLTSGQGALDQEALGGLLNTLADRVHCTNGPCGKCLSVEDALGLGEPEGSGLPPGPVLEARYVARLSAAAVLYLSNPEGTCEDTRAGLWASHADHLLALLESPKALTPGLSWLLQRMQARAAGQTPKTACVDIPQLLEEAVGAGAPGSAGGVLAALLDHVRSGSCFHALPSPQYFVDFVFQQHSSEVPMTLAELSALMQRLGVGREAHSDHSHRHRGASSRDPVPLISSSNSSSVWDTVCLSARDVMAAYGLSEQAGVTPEAWAQLSPALLQQQLSGACTSQSRPPVQDQLSQSERYLYGSLATLLICLCAVFGLLLLTCTGCRGVTHYILQTFLSLAVGALTGDAVLHLTPKVLGLHTHSEEGLSPQPTWRLLAMLAGLYAFFLFENLFNLLLPRDPEDLEDGPCGHSSHSHGGHSHGVSLQLAPSELRQPKPPHEGSRADLVAEESPELLNPEPRRLSPELRLLPYMITLGDAVHNFADGLAVGAAFASSWKTGLATSLAVFCHELPHELGDFAALLHAGLSVRQALLLNLASALTAFAGLYVALAVGVSEESEAWILAVATGLFLFLLHNVGLLGGWTVLLLLSLYEDDITF

SEQ ID NO: 763747 - protein, 641 aa, Homo sapiens
MASLVSLELGLLLAVLVVTATASPPAGLLSLLTSGQGALDQEALGGLLNTLADRVHCTNGPCGKCLSVEDALGLGEPEGSGLPPGPVLEARYVARLSAAAVLYLSNPEGTCEDTRAGLWASHADHLLALLESPKALTPGLSWLLQRMQARAAGQTPKTACVDIPQLLEEAVGAGAPGSAGGVLAALLDHVRSGSCFHALPSPQYFVDFVFQQHSSEVPMTLAELSALMQRLGVGREAHSDHSHRHRGASSRDPVPLISSSNSSSVWDTVCLSARDVMAAYGLSEQAGVTPEAWAQLSPALLQQQLSGACTSQSRPPVQDQLSQSERYLYGSLATLLICLCAVFGLLLLTCTGCRGVTHYILQTFLSLAVGALTGDAVLHLTPKVLGLHTHSEEGLSPQPTWRLLAMLAGLYAFFLFENLFNLLLPRDPEDLEDGPCGHSSHSHGGHSHGVSLQLAPSELRQPKPPHEGSRADLVAEESPELLNPEPRRLSPELRLLPYMITLGDAVHNFADGLAVGAAFASSWKTGLATSLAVFCHELPHELGDFAALLHAGLSVRQALLLNLASALTAFAGLYVALAVGVSEESEAWILAVATGLFLYVALCDMLPAMLKVRDPRPWLLFLLHNVGLLGGWTVLLLLSLS

SEQ ID NO: 763748 - protein, 72 aa, Homo sapiens
PSVRPRVRGRVAWILAVATGLFLYVALCDMLPAMLKVRDPRPWLLFLLHNVGLLGGWTVLLLLSLYEDDITF

SEQ ID NO: 763749 - protein, 647 aa, Homo sapiens [sequence omitted]

SEQ ID NO: 763750 - protein, 184 aa, Homo sapiens
RAGLTQGSSQVAEESPELLNPEPRRLSPELRLLPYMITLGDAVHNFADGLAVGAAFASSWKTGLATSLAVFCHELPHELGDFAALLHAGLSVRQALLLNLASALTAFAGLYVALAVGVSEESEAWILAVATGLFLYVALCDMLPAMLKVRDPRPWLLFLLHNVGLLGGWTVLLLLSLYEDDITF

SEQ ID NO: 763751 - protein, 149 aa, Homo sapiens
MITLGDAVHNFADGLAVGAAFASSWKTGLATSLAVFCHELPHELGDFAALLHAGLSVRQALLLNLASALTAFAGLYVALAVGVSEESEAWILAVATGLFLYVALCDMLPAMLKVRDPRPWLLFLLHNVGLLGGWTVLLLLSLYEDDITF

SEQ ID NO: 763752 - protein, 601 aa, Homo sapiens
MASLVSLELGLLLAVLVVTATASPPAGLLSLLTSGQGALDQEALGGLLNTLADRVHCTNGPCGKCLSVEDALGLGEPEGSGLPPGPVLEARYVARLSAAAVLYLSNPEGTCEDTRAGLWASHADHLLALLESPKALTPGLSWLLQRMQARAAGQTPKTACVDIPQLLEEAVGAGAPGSAGGVLAALLDHVRSGSCFHALPSPQYFVDFVFQQHSSEVPMTLAELSALMQRLGVGREAHSDHSHRHRGASSRDPVPLISSSNSSSVWDTVSCALGKMGPHRGLLGPLSLSCHPQVCLSARDVMAAYGLSEQAGVTPEAWAQLSPALLQQQLSGACTSQSRPPVQDQLSQSERYLYGSLATLLICLCAVFGLLLLTCTGCRGVTHYILQTFLSLAVGALTGDAVLHLTPKVLGLHTHSEEGLSPQPTWRLLAMLAGLYAFFLFENLFNLLLPRDPEDLEDGPCGHSSHSHGGHSHGVSLQLAPSELRQPKPPHEGSRADLVAEESPELLNPEPRRLSPGDFAALLHAGLSVRQALLLNLASALTAFAGLYVALAVGVSEESEAWILAVATGLFLYVALCDMVRMARGGAALGRELSRGAEQGR

SEQ ID NO: 763753 - protein, 647 aa, Homo sapiens [sequence omitted]

SEQ ID NO: 763754 - protein, 376 aa, Homo sapiens
IPRALLAYCKVIGNCDAKDFPIKYKERHPLEYLRQYPHFRCRTNVLGSILRIRSEATAAIHSFFKDSGFVHIHTPIITSNDSEGAGELFQLEPSGKLKVPEENFFNVPAFLTVSGQLHLEVMSGAFTQVFTFGPTFRAENSQSRRHLAEFYMIEAEISFVDSLQDLMQVIEELFKATTMMVLSKCPEDVELCHKFIAPGQKDRLEHMLKNNFLIISYTEAVEILKQASQNFTFTPEWGADLRTEHEKYLVKHCGNIPVFVINYPLTLKPFYMRDNEDGPQHTVAAVDLLVPGVGELFGGGLREERYHFLEERLASRDLQKSTNGIWTFVDLDLCHMEVLGWDLNATCSASWVLTISKMLSLSQGFLIHAFYSWKIG

SEQ ID NO: 763755 - protein, 482 aa, Homo sapiens
MLGVRCLLRSVRFCSSAPFPKHKPSAKLSVRDALGAQNASGERIKIQGWIRSVRSQKEVLFLHVNDGSSLESLQVVADSGLDSRELTFGSSVEVQGQLIKSPSKRQNVELKAEKIKVIGNCDAKDFPIKYKERHPLEYLRQYPHFRCRTNVLGSILRIRSEATAAIHSFFKDSGFVHIHTPIITSNDSEGAGELFQLEPSGKLKVPEENFFNVPAFLTVSGQLHLEVMSGAFTQVFTFGPTFRAENSQSRRHLAEFYMIEAEISFVDSLQDLMQVIEELFKATTMMVLSKCPEDVELCHKFIAPGQKDRLEHMLKNNFLIISYTEAVEILKQASQNFTFTPEWGADLRTEHEKYLVKHCGNIPVFVINYPLTLKPFYMRDNEDGPQHTVAAVDLLVPGVGELFGGGLREERYHFLEERLASRDLQKSTNGIWTFVDLDLCHMEVLGWDLNATCSASWVLTISKMLSLSQGFLIHAFYSWKIG

SEQ ID NO: 763756 - protein, 333 aa, Homo sapiens
MLGVRCLLRSVRFCSSAPFPKHKPSAKLSVRDALGAQNASGERIKIQGWIRSVRSQKEVLFLHVNDGSSLESLQVVADSGLDSRELTFGSSVEVQGQLIKSPSKRQNVELKAEKIKVIGNCDAKDFPIKYKERHPLEYLRQYPHFRCRTNVLGSILRIRSEATAAIHSFFKDSGFVHIHTPIITSNDSEGAGELFQLEWGADLRTEHEKYLVKHCGNIPVFVINYPLTLKPFYMRDNEDGPQHTVAAVDLLVPGVGELFGGGLREERYHFLEERLARSGLTEVYQWYLDLRRFGSVPHGGFGMGFERYLQCILGVDNIKDVIPFPRFPHSCLL

SEQ ID NO: 763757 - protein, 477 aa, Homo sapiens
MLGVRCLLRSVRFCSSAPFPKHKPSAKLSVRDALGAQNASGERIKIQGWIRSVRSQKEVLFLHVNDGSSLESLQVVADSGLDSRELTFGSSVEVQGQLIKSPSKRQNVELKAEKIKVIGNCDAKDFPIKYKERHPLEYLRQYPHFRCRTNVLGSILRIRSEATAAIHSFFKDSGFVHIHTPIITSNDSEGAGELFQLEPSGKLKVPEENFFNVPAFLTVSGQLHLEVMSGAFTQVFTFGPTFRAENSQSRRHLAEFYMIEAEISFVDSLQDLMQVIEELFKATTMMVLSKCPEDVELCHKFIAPGQKDRLEHMLKNNFLIISYTEAVEILKQASQNFTFTPEWGADLRTEHEKYLVKHCGNIPVFVINYPLTLKPFYMRDNEDGPQHTVAAVDLLVPGVGELFGGGLREERYHFLEERLARSGLTEVYQWYLDLRRFGSVPHGGFGMGFERYLQCILGVDNIKDVIPFPRFPHSCLL

SEQ ID NO: 763758 - protein, 213 aa, Homo sapiens
MLGVRCLLRSVRFCSSAPFPKHKPSAKLSVRDALGAQNASGERIKIQGWIRSVRSQKEVLFLHVNDGSSLESLQVVADSGLDSRELTFGSSVEVQGQLIKSPSKRQNVELKAEKRHPLEYLRQYPHFRCRTNVLGSILRIRSEATAAIHSFFKDSGFVHIHTPIITSNDSEGAGELFQLEPSGKLKVPEENFFNVPAFLTVSGQLHLEVMSGL

SEQ ID NO: 763759 - protein, 151 aa, Homo sapiens
SSLPFPFRSIYITGSSWGADLRTEHEKYLVKHCGNIPVFVINYPLTLKPFYMRDNEDGPQHTVAAVDLLVPGVGELFGGGLREERYHFLEERLARSGLTEVYQWYLDLRRFGSVPHGGFGMGFERYLQCILGVDNIKDVIPFPRFPHSCLL

SEQ ID NO: 763760 - protein, 156 aa, Homo sapiens
LKLSRPQFLRNSKSTFWGADLRTEHEKYLVKHCGNIPVFVINYPLTLKPFYMRDNEDGPQHTVAAVDLLVPGVGELFGGGLREERYHFLEERLASRDLQKSTNGIWTFVDLDLCHMEVLGWDLNATCSASWVLTISKMLSLSQGFLIHAFYSWKIG

SEQ ID NO: 763761 - protein, 477 aa, Homo sapiens; identical to SEQ ID NO: 763757

SEQ ID NO: 763762 - protein, 445 aa, Homo sapiens
LLPRSVRRKRRWRGEGWIRSVRSQKEVLFLHVNDGSSLESLQVVADSGLDSRELTFGSSVEVQGQLIKSPSKRQNVELKAEKIKVIGNCDAKDFPIKYKERHPLEYLRQYPHFRCRTNVLGSILRIRSEATAAIHSFFKDSGFVHIHTPIITSNDSEGAGELFQLEPSGKLKVPEENFFNVPAFLTVSGQLHLEVMSGAFTQVFTFGPTFRAENSQSRRHLAEFYMIEAEISFVDSLQDLMQVIEELFKATTMMVLSKCPEDVELCHKFIAPGQKDRLEHMLKNNFLIISYTEAVEILKQASQNFTFTPEWGADLRTEHEKYLVKHCGNIPVFVINYPLTLKPFYMRDNEDGPQHTVAAVDLLVPGVGELFGGGLREERYHFLEERLARSGLTEVYQWYLDLRRFGSVPHGGFGMGFERYLQCILGVDNIKDVIPFPRFPHSCLL

SEQ ID NO: 763763 - protein, 482 aa, Homo sapiens; identical to SEQ ID NO: 763755

SEQ ID NO: 763764 - protein, 150 aa, Homo sapiens
MPDLHGLPQRWGADLRTEHEKYLVKHCGNIPVFVINYPLTLKPFYMRDNEDGPQHTVAAVDLLVPGVGELFGGGLREERYHFLEERLASRDLQKSTNGIWTFVDLDLCHMEVLGWDLNATCSASWVLTISKMLSLSQGFLIHAFYSWKIG

SEQ ID NO: 763765 - protein, 187 aa, Homo sapiens
SLYLLFLLPGILLPRYFYGSFPYSVISYTEAVEILKQASQNFTFTPEWGADLRTEHEKYLVKHCGNIPVFVINYPLTLKPFYMRDNEDGPQHTVAAVDLLVPGVGELFGGGLREERYHFLEERLASRDLQKSTNGIWTFVDLDLCHMEVLGWDLNATCSASWVLTISKMLSLSQGFLIHAFYSWKIG

SEQ ID NO: 763766 - protein, 148 aa, Homo sapiens
ICHGTPEGLCTCSRPQETQGHDLASVPTPMAIGLTYTIPGYHSFSSKEGESTQNEHQDVSSHHGDAQAETRRRCSQAWGRGWRRSSGTSSALRFCDSAFVLCSPFCDSAFGSHIVSSCKALGKKCYPTVCCHTKTFITQCFANIRLCG

SEQ ID NO: 763767 - protein, 248 aa, Homo sapiens
NSTRKSSQEEGLILGSRKYQHSQRKTIKTYLQELCNSNRKEKQWCVPMWDIKSRGSGGSTPAPPSHLLLYLLHPQSTRTMGCCGCSGGCGSSCGGCDSSCGSCGSGCRGCGPSCCAPVYCCKPVCCCVPACSCSSCGKRGCGSCGGSKGGCGSCGCSQCSCCKPCCCSSGCGSSCCQCSCCKPYCSQCSCCKPCCSSSGRGSSCCQSSCCKPCCSSSGCGSSCCQSSCCKPCCSQSRCCVPVCYQCKI

SEQ ID NO: 763768 - protein, 122 aa, Homo sapiens [sequence omitted]

SEQ ID NO: 763769 - protein, 251 aa, Homo sapiens
GGWVTPQESAPGRGRAAPPRPTPLGVGTSRESPAEARRSSARRGGRSEPGRAAGGGAAEDTRRRAGDMDRGEQGLLRTDPVPEEGEDVAATISATETLSEEEQEELRRELAKVEEEIQTLSQVLAAKEKHLAEIKRKLGINSLQELKQNIAKGWQDVTATSAYKKTSETLSQAGQKASAAFSSVGSVITKKLEDVKNSPTFKSFEEKVENLKSKVGGTKPAGGDFGEVLNSAANASATTTEPLPEKTQESL

SEQ ID NO: 763770 - protein, 111 aa, Homo sapiens
FTTFPLPRHWCLQKLVVVHLVQLQPCTEPVPVAAHPAAAAGVPGWAQWLEPALTCSRTPHQPMPGSPLAGVGSGPAAQDEHSLLGRVGRMSPAGMSKTPAEALQAMEVSSW

SEQ ID NO: 763771 - protein, 251 aa, Homo sapiens; identical to SEQ ID NO: 763769

SEQ ID NO: 763772 - protein, 224 aa, Homo sapiens
MDCREMDLYEDYQSPFDFDAGVNKSYLYLSPSGNSSPPGSPTLQKFGLLRTDPVPEEGEDVAATISATETLSEEEQEELRRELAKVEEEIQTLSQVLAAKEKHLAEIKRKLGINSLQELKQNIAKGWQDVTATSAYKKTSETLSQAGQKASAAFSSVGSVITKKLEDVKNSPTFKSFEEKVENLKSKVGGTKPAGGDFGEVLNSAANASATTTEPLPEKTQESL

SEQ ID NO: 763773 - protein, 128 aa, Homo sapiens
GGWVTPQESAPGRGRAAPPRPTPLGVGTSRESPAEARRSSARRGGRSEPGRAAGGGAAEDTRRRAGDMDRGEQGRRRNPDSVSSVSSKREASSRDQAETWNQFSTGTKTEHCQRVARRDSNICLQEDI

SEQ ID NO: 763774 - protein, 185 aa, Homo sapiens
MALNPQPGLLRTDPVPEEGEDVAATISATETLSEEEQEELRRELAKVEEEIQTLSQVLAAKEKHLAEIKRKLGINSLQELKQNIAKGWQDVTATSAYKKTSETLSQAGQKASAAFSSVGSVITKKLEDVKNSPTFKSFEEKVENLKSKVGGTKPAGGDFGEVLNSAANASATTTEPLPEKTQESL

SEQ ID NO: 763775 - protein, 178 aa, Homo sapiens
GGWVTPQESAPGRGRAAPPRPTPLGVGTSRESPAEARRSSARRGGRSEPGRAAGGGAAEDTRRRAGDMDRGEQGLLRTDPVPEEGEDVAATISATETLSEEEQEELRRELAKVEEEIQTLSQVLAAKEKHLAEIKRKLGINSLQELKQNIAKGWQDVTATSARSKLLAAETELLCLLY

SEQ ID NO: 763776 - protein, 251 aa, Homo sapiens; identical to SEQ ID NO: 763769

SEQ ID NO: 763777 - protein, 251 aa, Homo sapiens; identical to SEQ ID NO: 763769

SEQ ID NO: 763778 - protein, 274 aa, Homo sapiens
GGWVTPQESAPGRGRAAPPRPTPLGVGTSRESPAEARRSSARRGGRSEPGRAAGGGAAEDTRRRAGDMDRGEQGLLRTDPVPEEGEDVAATISATETLSEEEQEELRRELAKVEEEIQTLSQVLAAKEKHLAEIKRKLGINSLQELKQNIAKGWQDVTATSAYKKTSETLSQAGQKASAAFSSVGSVITKKLEDVKLQAFSHSFSIRSIQHSISMPAMRNSPTFKSFEEKVENLKSKVGGTKPAGGDFGEVLNSAANASATTTEPLPEKTQESL

SEQ ID NO: 763779 - protein, 237 aa, Homo sapiens
GGWVTPQESAPGRGRAAPPRPTPLGVGTSRESPAEARRSSARRGGRSEPGRAAGGGAAEDTRRRAGDMDRGEQGLLRTDPVPEEGEDVAATISATETLSEEEQEELRRELAKVEEEIQTLSQVLAAKEKHLAEIKRKLGINSLQELKQNIAKGWQDVTATSAYKKTSETLSQAGQKASAAFSSVGSVITKKLEDVKNSPTFKSFEEKVENLKAHPWQVWDLGQQHKMSTAYWAEWAE

SEQ ID NO: 763780 - protein, 251 aa, Homo sapiens; identical to SEQ ID NO: 763769

SEQ ID NO: 763781 - protein, 251 aa, Homo sapiens; identical to SEQ ID NO: 763769

SEQ ID NO: 763782 - protein, 251 aa, Homo sapiens; identical to SEQ ID NO: 763769

SEQ ID NO: 763783 - protein, 274 aa, Homo sapiens; identical to SEQ ID NO: 763778

SEQ ID NO: 763784 - protein, 178 aa, Homo sapiens; identical to SEQ ID NO: 763775

SEQ ID NO: 763785 - protein, 251 aa, Homo sapiens; identical to SEQ ID NO: 763769

SEQ ID NO: 763786 - protein, 251 aa, Homo sapiens; identical to SEQ ID NO: 763769

SEQ ID NO: 763787 - protein, 280 aa, Homo sapiens
GGWVTPQESAPGRGRAAPPRPTPLGVGTSRESPAEARRSSARRGGRSEPGRAAGGGAAEDTRRRAGDMDRGEQGLLRTDPVPEEGEDVAATISATETLSEEEQEELRRELAKVEEEIQTLSQVLAAKEKHLAEIKRKLGINSLQELKQNIAKGWQDVTATSAYKKTSETLSQAGQKASAAFSSVGSVITKKLEDVKLQAFSHSFSIRSIQHSISMPAMRNSPTFKSFEEKVENLKSKVGGTKPAGGDFGEVLNSAANASATTTEPLPEKTQESLPTLPPF

SEQ ID NO: 763788 - protein, 207 aa, Homo sapiens
GGWVTPQESAPGRGRAAPPRPTPLGVGTSRESPAEARRSSARRGGRSEPGRAAGGGAAEDTRRRAGDMDRGEQGLLRTDPVPEEGEDVAATISATETLSEEEQEELRRELAKVEEEIQTLSQVLAAKEKHLAEIKRKLGINSLQELKQNIAKGWQDVTATSAYKKTSETLSQAGQKASAAFSSVGSVITKKLEDVKYVLIFPCSLSS

SEQ ID NO: 763789 - protein, 443 aa, Homo sapiens
MEEDIDTRKINNSFLRDHSYATEADIISTVEFNHTGELLATGDKGGRVVIFQREQESKNQVHRRGEYNVYSTFQSHEPEFDYLKSLEIEEKINKIRWLPQQNAAYFLLSTNDKTVKLWKVSERDKRPEGYNLKDEEGRLRDPATITTLRVPVLRPMDLMVEATPRRVFANAHTYHINSISVNSDYETYMSADDLRINLWNFEITNQSFNIVDIKPANMEELTEVITAAEFHPHHCNTFVYSSSKGTIRLCDMRASALCDRHTKFFEEPEDPSNRSFFSEIISSISDVKFSHSGRYIMTRDYLTVKVWDLNMENRPIETYQVHDYLRSKLCSLYENDCIFDKFECVWNGSDSVIMTGSYNNFFRMFDRNTKRDVTLEASRENSKPRAILKPRKVCVGGKRRKDEISVDSLDFSKKILHTAWHPSENIIAVAATNNLYIFQDKVN

SEQ ID NO: 763790 - protein, 501 aa, Homo sapiens
MVLQPSERHYRDWNHRRLGPWCSPTGSPAPLSCETGCGEGSWILVCRLLVPTQVSLLSMEEDIDTRKINNSFLRDHSYATEADIISTVEFNHTGELLATGDKGGRVVIFQREQESKNQVHRRGEYNVYSTFQSHEPEFDYLKSLEIEEKINKIRWLPQQNAAYFLLSTNDKTVKLWKVSERDKRPEGYNLKDEEGRLRDPATITTLRVPVLRPMDLMVEATPRRVFANAHTYHINSISVNSDYETYMSADDLRINLWNFEITNQSFNIVDIKPANMEELTEVITAAEFHPHHCNTFVYSSSKGTIRLCDMRASALCDRHTKFFEEPEDPSNRSFFSEIISSISDVKFSHSGRYIMTRDYLTVKVWDLNMENRPIETYQVHDYLRSKLCSLYENDCIFDKFECVWNGSDSVIMTGSYNNFFRMFDRNTKRDVTLEASRENSKPRAILKPRKVCVGGKRRKDEISVDSLDFSKKILHTAWHPSENIIAVAATNNLYIFQDKVN

SEQ ID NO: 763791 - protein, 509 aa, Homo sapiens
MLLSLPALHLQTSEHHPFFQLPHRRLGPWCSPTGSPAPLSCETGCGEGSWILVCRLLVPTQVSLLSMEEDIDTRKINNSFLRDHSYATEADIISTVEFNHTGELLATGDKGGRVVIFQREQESKNQVHRRGEYNVYSTFQSHEPEFDYLKSLEIEEKINKIRWLPQQNAAYFLLSTNDKTVKLWKVSERDKRPEGYNLKDEEGRLRDPATITTLRVPVLRPMDLMVEATPRRVFANAHTYHINSISVNSDYETYMSADDLRINLWNFEITNQSFNIVDIKPANMEELTEVITAAEFHPHHCNTFVYSSSKGTIRLCDMRASALCDRHTKFFEEPEDPSNRSFFSEIISSISDVKFSHSGRYIMTRDYLTVKVWDLNMENRPIETYQVHDYLRSKLCSLYENDCIFDKFECVWNGSDSVIMTGSYNNFFRMFDRNTKRDVTLEASRENSKPRAILKPRKVCVGGKRRKDEISVDSLDFSKKILHTAWHPSENIIAVAATNNLYIFQDKVN

SEQ ID NO: 763792 - protein, 432 aa, Homo sapiens
MNYPDENTYGNKADIISTVEFNHTGELLATGDKGGRVVIFQREQESKNQVHRRGEYNVYSTFQSHEPEFDYLKSLEIEEKINKIRWLPQQNAAYFLLSTNDKTVKLWKVSERDKRPEGYNLKDEEGRLRDPATITTLRVPVLRPMDLMVEATPRRVFANAHTYHINSISVNSDYETYMSADDLRINLWNFEITNQSFNIVDIKPANMEELTEVITAAEFHPHHCNTFVYSSSKGTIRLCDMRASALCDRHTKFFEEPEDPSNRSFFSEIISSISDVKFSHSGRYIMTRDYLTVKVWDLNMENRPIETYQVHDYLRSKLCSLYENDCIFDKFECVWNGSDSVIMTGSYNNFFRMFDRNTKRDVTLEASRENSKPRAILKPRKVCVGGKRRKDEISVDSLDFSKKILHTAWHPSENIIAVAATNNLYIFQDKVN

SEQ ID NO: 763793 - protein, 432 aa, Homo sapiens; identical to SEQ ID NO: 763792

SEQ ID NO: 763794 - protein, 103 aa, Homo sapiens
RCRSRPPVGPAPSFRPASLNPVPAISPLQLGSRKAPFCRGCPLSQGEEGSFLHFGAAAKEGNLLGISPDPLVSASGAGGRDQTPRGTAYLASFRKYYSSGGYK

SEQ ID NO: 763795 - protein, 443 aa, Homo sapiens; identical to SEQ ID NO: 763789

SEQ ID NO: 763796 - protein, 500 aa, Homo sapiens
LPEPPSRGTSTLIPARLGPWCSPTGSPAPLSCETGCGEGSWILVCRLLVPTQVSLLSMEEDIDTRKINNSFLRDHSYATEADIISTVEFNHTGELLATGDKGGRVVIFQREQESKNQVHRRGEYNVYSTFQSHEPEFDYLKSLEIEEKINKIRWLPQQNAAYFLLSTNDKTVKLWKVSERDKRPEGYNLKDEEGRLRDPATITTLRVPVLRPMDLMVEATPRRVFANAHTYHINSISVNSDYETYMSADDLRINLWNFEITNQSFNIVDIKPANMEELTEVITAAEFHPHHCNTFVYSSSKGTIRLCDMRASALCDRHTKFFEEPEDPSNRSFFSEIISSISDVKFSHSGRYIMTRDYLTVKVWDLNMENRPIETYQVHDYLRSKLCSLYENDCIFDKFECVWNGSDSVIMTGSYNNFFRMFDRNTKRDVTLEASRENSKPRAILKPRKVCVGGKRRKDEISVDSLDFSKKILHTAWHPSENIIAVAATNNLYIFQDKVN

SEQ ID NO: 763797 - protein, 446 aa, Homo sapiens
MKCFSRYLPYIFRPPNTILSSSCHTEADIISTVEFNHTGELLATGDKGGRVVIFQREQESKNQVHRRGEYNVYSTFQSHEPEFDYLKSLEIEEKINKIRWLPQQNAAYFLLSTNDKTVKLWKVSERDKRPEGYNLKDEEGRLRDPATITTLRVPVLRPMDLMVEATPRRVFANAHTYHINSISVNSDYETYMSADDLRINLWNFEITNQSFNIVDIKPANMEELTEVITAAEFHPHHCNTFVYSSSKGTIRLCDMRASALCDRHTKFFEEPEDPSNRSFFSEIISSISDVKFSHSGRYIMTRDYLTVKVWDLNMENRPIETYQVHDYLRSKLCSLYENDCIFDKFECVWNGSDSVIMTGSYNNFFRMFDRNTKRDVTLEASRENSKPRAILKPRKVCVGGKRRKDEISVDSLDFSKKILHTAWHPSENIIAVAATNNLYIFQDKVN

SEQ ID NO: 763798 - protein, 423 aa, Homo sapiens
MQNSDIISTVEFNHTGELLATGDKGGRVVIFQREQESKNQVHRRGEYNVYSTFQSHEPEFDYLKSLEIEEKINKIRWLPQQNAAYFLLSTNDKTVKLWKVSERDKRPEGYNLKDEEGRLRDPATITTLRVPVLRPMDLMVEATPRRVFANAHTYHINSISVNSDYETYMSADDLRINLWNFEITNQSFNIVDIKPANMEELTEVITAAEFHPHHCNTFVYSSSKGTIRLCDMRASALCDRHTKFFEEPEDPSNRSFFSEIISSISDVKFSHSGRYIMTRDYLTVKVWDLNMENRPIETYQVHDYLRSKLCSLYENDCIFDKFECVWNGSDSVIMTGSYNNFFRMFDRNTKRDVTLEASRENSKPRAILKPRKVCVGGKRRKDEISVDSLDFSKKILHTAWHPSENIIAVAATNNLYIFQDKVN

SEQ ID NO: 763799 - protein, 149 aa, Homo sapiens
MGSHVAVFDDVIKVFSDMKVCKSSTLEKVKKRKKLLLFCLSEYKKYIILAEAKKILVSNVDQTIDDPYATFVKMLTVKDCRYAPYDATKDSKKKDLVFIFWASESASIKSKMIYASSKDVIKKQLGVSTVVFLEGKLCDPLQRPSWRIY

SEQ ID NO: 763800 - protein, 599 aa, Homo sapiens
AECGPQQPQLGGGACLAASPRRSRSPIFVRPPRFVLGARALASLASRRAAPTPRWRRPRLPRRRPPRAGRALPPMVSRPEPEGEAMDAELAVAPPGCSHLGSFKVDNWKQNLRAIYQCFVWSGTAEARKRKAKSCICHVCGVHLNRLHSCLYCVFFGCFTKKHIHEHAKAKRHNLAIDLMYGGIYCFLCQDYIYDKDMEIIAKEEQRKAWKMQGVGEKFSTWEPTKRELELLKHNPKRRKITSNCTIGLRGLINLGNTCFMNCIVQALTHTPLLRDFFLSDRHRCEMQSPSSCLVCEMSSLFQEFYSGHRSPHIPYKLLHLVWTHARHLAGYEQQDAHEFLIAALDVLHRHCKGDDNGKKANNPNHCNCIIDQIFTGGLQSDVTCQVCHGVSTTIDPFWDISLDLPGSSTPFWPLSPGSEGNVVNGESHVSGTTTLTDCLRRFTRPEHLGSSAKIKCSGCHSYQESTKQLTMKKLPIVACFHLKRFEHSAKLRRKITTYVSFPLELDMTPFMASSKESRMNGQYQQPTDSLNNDNKYSLFAVVNHQGTLESGHYTSFIRQHKDQWFKCDDAIITKASIKDVLDSEGYLLFYHKQFLEYE

SEQ ID NO: 763801 - protein, 107 aa, Homo sapiens
MLLPALCAWLLWVPWCLLVAGSGRSGGELCCSSYGVSVISVWSKCSVCRCLMGSVPRIFFAFYPIAWLPLPGSQGCWSRSWSGLWWSLHLVSSASALHLVYFRAWWQ

SEQ ID NO: 763802 - protein, 73 aa, Homo sapiens
RTQKTEDCIAVNTDTMADNPNHCNCIIDQIFTGGLQSDVTCQVCQEVRGCVLGNIKPSGAVLTSSQSPELCVL

SEQ ID NO: 763803 - protein, 488 aa, Homo sapiens
CPAAWGAWDFGGRSRAFLREAKSCICHVCGVHLNRLHSCLYCVFFGCFTKKHIHEHAKAKRHNLAIDLMYGGIYCFLCQDYIYDKDMEIIAKEEQRKAWKMQGVGEKFSTWEPTKRELELLKHNPKRRKITSNCTIGLRGLINLGNTCFMNCIVQALTHTPLLRDFFLSDRHRCEMQSPSSCLVCEMSSLFQEFYSGHRSPHIPYKLLHLVWTHARHLAGYEQQDAHEFLIAALDVLHRHCKGDDNGKKANNPNHCNCIIDQIFTGGLQSDVTCQVCHGVSTTIDPFWDISLDLPGSSTPFWPLSPGSEGNVVNGESHVSGTTTLTDCLRRFTRPEHLGSSAKIKCSGCHSYQESTKQLTMKKLPIVACFHLKRFEHSAKLRRKITTYVSFPLELDMTPFMASSKESRMNGQYQQPTDSLNNDNKYSLFAVVNHQGTLESGHYTSFIRQHKDQWFKCDDAIITKASIKDVLDSEGYLLFYHKQFLEYE

SEQ ID NO: 763804 - protein, 451 aa, Homo sapiens
  misc_feature (6)..(6): Xaa can be any naturally occurring amino acid
  misc_feature (8)..(8): Xaa can be any naturally occurring amino acid
SSGYPXGXGYRRPGLARACERRSGSTCAIDLMYGGIYCFLCQDYIYDKDMEIIAKEEQRKAWKMQGVGEKFSTWEPTKRELELLKHNPKRRKITSNCTIGLRGLINLGNTCFMNCIVQALTHTPLLRDFFLSDRHRCEMQSPSSCLVCEMSSLFQEFYSGHRSPHIPYKLLHLVWTHARHLAGYEQQDAHEFLIAALDVLHRHCKGDDNGKKANNPNHCNCIIDQIFTGGLQSDVTCQVCHGVSTTIDPFWDISLDLPGSSTPFWPLSPGSEGNVVNGESHVSGTTTLTDCLRRFTRPEHLGSSAKIKCSGCHSYQESTKQLTMKKLPIVACFHLKRFEHSAKLRRKITTYVSFPLELDMTPFMASSKESRMNGQYQQPTDSLNNDNKYSLFAVVNHQGTLESGHYTSFIRQHKDQWFKCDDAIITKASIKDVLDSEGYLLFYHKQFLEYE

SEQ ID NO: 763805 - protein, 440 aa, Homo sapiens
VYRRYLRVRRRSGTILAIDLMYGGIYCFLCQDYIYDKDMEIIAKEEQRKAWKMQGVGEKFSTWEPTKRELELLKHNPKRRKITSNCTIGLRGLINLGNTCFMNCIVQALTHTPLLRDFFLSDRHRCEMQSPSSCLVCEMSSLFQEFYSGHRSPHIPYKLLHLVWTHARHLAGYEQQDAHEFLIAALDVLHRHCKGDDNGKKANNPNHCNCIIDQIFTGGLQSDVTCQVCHGVSTTIDPFWDISLDLPGSSTPFWPLSPGSEGNVVNGESHVSGTTTLTDCLRRFTRPEHLGSSAKIKCSGCHSYQESTKQLTMKKLPIVACFHLKRFEHSAKLRRKITTYVSFPLELDMTPFMASSKESRMNGQYQQPTDSLNNDNKYSLFAVVNHQGTLESGHYTSFIRQHKDQWFKCDDAIITKASIKDVLDSEGYLLFYHKQFLEYE

SEQ ID NO: 763806 - protein, 339 aa, Homo sapiens [sequence omitted]

SEQ ID NO: 763807 - protein, 276 aa, Homo sapiens
MFVYSAIRVRPRGRTRIWGDTNPRAVVLSPGDDNGKKANNPNHCNCIIDQIFTGGLQSDVTCQVCHGVSTTIDPFWDISLDLPGSSTPFWPLSPGSEGNVVNGESHVSGTTTLTDCLRRFTRPEHLGSSAKIKCSGCHSYQESTKQLTMKKLPIVACFHLKRFEHSAKLRRKITTYVSFPLELDMTPFMASSKESRMNGQYQQPTDSLNNDNKYSLFAVVNHQGTLESGHYTSFIRQHKDQWFKCDDAIITKASIKDVLDSEGYLLFYHKQFLEYE

SEQ ID NO: 763808 - protein, 375 aa, Homo sapiens
MCGPQQPQLGGGACLAASPRRSRSPIFVRPPRFVLGARALASLASRRAAPTPRWRRPRLPRRRPPRAGRALPPMVSRPEPEGEAMDAELAVAPPGCSHLGSFKVDNWKQNLRAIYQCFVWSGTAEARKRKAKSCICHVCGVHLNRLHSCLYCVFFGCFTKKHIHEHAKAKRHNLAIDLMYGGIYCFLCQDYIYDKDMEIIAKEEQRKAWKMQGVGEKFSTWEPTKRELELLKHNPKRRKITSNCTIGLRGLINLGNTCFMNCIVQALTHTPLLRDFFLSDRHRCEMQSPSSCLVCEMSSLFQEWSLHHHRPLLGHQLGSPRLFHPILAPEPRERGQRGKRGKPRVGNHHAHGLPATIHQTRALGQQRQDQVQRLP

SEQ ID NO: 763809 - protein, 599 aa, Homo sapiens; identical to SEQ ID NO: 763800

SEQ ID NO: 763810 - protein, 599 aa, Homo sapiens; identical to SEQ ID NO: 763800

SEQ ID NO: 763811 - protein, 182 aa, Homo sapiens
WYNDVYVVDHYAVVLLIKLTDCLRRFTRPEHLGSSAKIKCSGCHSYQESTKQLTMKKLPIVACFHLKRFEHSAKLRRKITTYVSFPLELDMTPFMASSKESRMNGQYQQPTDSLNNDNKYSLFAVVNHQGTLESGHYTSFIRQHKDQWFKCDDAIITKASIKDVLDSEGYLLFYHKQFLEYE

SEQ ID NO: 763812 - protein, 76 aa, Homo sapiens
VADLEDPSDHDNKYSLFAVVNHQGTLESGHYTSFIRQHKDQWFKCDDAIITKASIKDVLDSEGYLLFYHKQFLEYE

SEQ ID NO: 763813 - protein, 134 aa, Homo sapiens
RRVCTRRTILRAYDNSRRPSPVSAMSVASTSTGCIPASTVSSSAVSQRSIFTSMRRRSGTTWHTDGEAPGAALKMDEMRGVLWVGGAAYTRHQNISCVMTWGCNGGLTAQSDRCLAFPSTRCGKAPTCCKIMGP

SEQ ID NO: 763814 - protein, 107 aa, Homo sapiens; identical to SEQ ID NO: 763801

SEQ ID NO: 763815 - protein, 107 aa, Homo sapiens; identical to SEQ ID NO: 763801

SEQ ID NO: 763816 - protein, 599 aa, Homo sapiens; identical to SEQ ID NO: 763800

SEQ ID NO: 763817 - protein, 599 aa, Homo sapiens; identical to SEQ ID NO: 763800

SEQ ID NO: 763818 - protein, 599 aa, Homo sapiens; identical to SEQ ID NO: 763800

SEQ ID NO: 763819 - protein, 407 aa, Homo sapiens
AECGPQQPQLGGGACLAASPRRSRSPIFVRPPRFVLGARALASLASRRAAPTPRWRRPRLPRRRPPRAGRALPPMVSRPEPEGEAMDAELAVAPPGCSHLGSFKVDNWKQNLRAIYQCFVWSGTAEARKRKAKSCICHVCGVHLNRLHSCLYCVFFGCFTKKHIHEHAKAKRHNLAIDLMYGGIYCFLCQDYIYDKDMEIIAKEEQRKAWKMQGVGEKFSTWEPTKRELELLKHNPKRRKITSNCTIGLRGLINLGNTCFMNCIVQALTHTPLLRDFFLSDRHRCEMQSPSSCLVCEMSSLFQEFYSGHRSPHIPYKLLHLVWTHARHLAGYEQQDAHEFLIAALDVLHRHCKGDDNGKKANNLHLLGSSSSRAAASQVAGTTGMHHHARLIFVFLVEMGFHHVSNS

SEQ ID NO: 763820 - protein, 599 aa, Homo sapiens; identical to SEQ ID NO: 763800

SEQ ID NO: 763821 - protein, 599 aa, Homo sapiens; identical to SEQ ID NO: 763800

SEQ ID NO: 763822 - protein, 599 aa, Homo sapiens
AECGPQQPQLGGGACLAASPRRSRSPIFVRPPRFVLGARALASLASRRAAPTPRWRRPRLPRRRPPRAGRALPPMVSRPEPEGEAMDAELAVAPPGCSHLGSFKVDNWKQNLRAIYQCFVWSGTAEARKRKAKSCICHVCGVHLNRLHSCLYCVFFGCFTKKHIHEHAKAKRHNLAIDLMYGGIYCFLCQDYIYDKDMEIIAKEEQRKAWKMQGVGEKFSTWEPTKRELELLKHNPKRRKITSNCTIGLRGLINLGNTCFMNCIVQALTHTPLLRDFFLSDRHRCEMQSPSSCLVCEMSSLFQEFYSGHRSPHIPYKLLHLVWTHARHLAGYEQQDAHEFLIAALDVLHRHCKGDDNGKKANNPNHCNCIIDQIFTGGLQSDVTCQVCHGVSTTIDPFWDISLDLPGSSTPFWPLSPGSEGNVVNGESHVSGTTTLTDCLRRFTRPEHLGSSAKIKCSGCHSYQESTKQLTMKKLPIVACFHLKRFEHSAKLRRKITTYVSFPLELDMTPFMASSKESRMNGQYQQPTDSLNNDNKYSLFAVVNHQGTLESGHYTSFIRQHKDQWFKCDDAIITKASIKDVLDSEGQLRVPRSTSASRA

SEQ ID NO: 763823 - protein, 594 aa, Homo sapiens
AECGPQQPQLGGGACLAASPRRSRSPIFVRPPRFVLGARALASLASRRAAPTPRWRRPRLPRRRPPRAGRALPPMVSRPEPEGEAMDAELAVAPPGCSHLGSFKVDNWKQNLRAIYQCFVWSGTAEARKRKAKSCICHVCGVHLNRLHSCLYCVFFGCFTKKHIHEHAKAKRHNLAIDLMYGGIYCFLCQDYIYDKDMEIIAKEEQRKAWKMQGVGEKFSTWEPTKRELELLKHNPKRRKITSNCTIGLRGLINLGNTCFMNCIVQALTHTPLLRDFFLSDRHRCEMQSPSSCLVCEMSSLFQEFYSGHRSPHIPYKLLHLVWTHARHLAGYEQQDAHEFLIAALDVLHRHCKGDDNGKKANNPNHCNCIIDQIFTGGLQSDVTCQVCHGVSTTIDPFWDISLDLPGSSTPFWPLSPGSEGNVVNGESHVSGTTTLTDCLRRFTRPEHLGSSAKIKCSGCHSYQESTKQLTMKKLPIVACFHLKRFEHSAKLRRKITTYVSFPLELDMTPFMASSKESRMNGQYQQPTDSLNNDNKYSLFAVVNHQGTLESGHYTSFIRQHKDQWFKCDDAIITKASIKDVLDSEGHTRRRFPP

SEQ ID NO: 763824 - protein, 557 aa, Homo sapiens
AECGPQQPQLGGGACLAASPRRSRSPIFVRPPRFVLGARALASLASRRAAPTPRWRRPRLPRRRPPRAGRALPPMVSRPEPEGEAMDAELAVAPPGCSHLGSFKVDNWKQNLRAIYQCFVWSGTAEARKRKAKSCICHVCGVHLNRLHSCLYCVFFGCFTKKHIHEHAKAKRHNLAIDLMYGGIYCFLCQDYIYDKDMEIIAKEEQRKAWKMQGVGEKFSTWEPTKRELELLKHNPKRRKITSNCTIGLRGLINLGNTCFMNCIVQALTHTPLLRDFFLSDRHRCEMQSPSSCLVCEMSSLFQEFYSGHRSPHIPYKLLHLVWTHARHLAGYEQQDAHEFLIAALDVLHRHCKGDDNGKKANNPNHCNCIIDQIFTGGLQSDVTCQVCHGVSTTIDPFWDISLDLPGSSTPFWPLSPGSEGNVVNGESHVSGTTTLTDCLRRFTRPEHLGSSAKIKCSGCHSYQESTKQLTMKKLPIVACFHLKRFEHSAKLRRKITTYVSFPLELDMTPFMASSKESRMNGQYQQPTDSLNNDNKYSLFVGSTLFVEVALLFVEVA

SEQ ID NO: 763825 - protein, 498 aa, Homo sapiens
AECGPQQPQLGGGACLAASPRRSRSPIFVRPPRFVLGARALASLASRRAAPTPRWRRPRLPRRRPPRAGRALPPMVSRPEPEGEAMDAELAVAPPGCSHLGSFKVDNWKQNLRAIYQCFVWSGTAEARKRKAKSCICHVCGVHLNRLHSCLYCVFFGCFTKKHIHEHAKAKRHNLAIDLMYGGIYCFLCQDYIYDKDMEIIAKEEQRKAWKMQGVGEKFSTWEPTKRELELLKHNPKRRKITSNCTIGLRGLINLGNTCFMNCIVQALTHTPLLRDFFLSDRHRCEMQSPSSCLVCEMSSLFQEFYSGHRSPHIPYKLLHLVWTHARHLAGYEQQDAHEFLIAALDVLHRHCKGDDNGKKANNPNHCNCIIDQIFTGGLQSDVTCQVCHGVSTTIDPFWDISLDLPGSSTPFWPLSPGSEGNVVNGESHVSGTTTLTDCLRRFTRPEHLGSSAKIKCSGCHSYQESTKQLTMKKLPIVACFHLKRFEHSAKLRRKITT

SEQ ID NO: 763826 - protein, 389 aa, Homo sapiens
AECGPQQPQLGGGACLAASPRRSRSPIFVRPPRFVLGARALASLASRRAAPTPRWRRPRLPRRRPPRAGRALPPMVSRPEPEGEAMDAELAVAPPGCSHLGSFKVDNWKQNLRAIYQCFVWSGTAEARKRKAKSCICHVCGVHLNRLHSCLYCVFFGCFTKKHIHEHAKAKRHNLAIDLMYGGIYCFLCQDYIYDKDMEIIAKEEQRKAWKMQGVGEKFSTWEPTKRELELLKHNPKRRKITSNCTIGLRGLINLGNTCFMNCIVQALTHTPLLRDFFLSDRHRCEMQSPSSCLVCEMSSLFQEFYSGHRSPHIPYKLLHLVWTHARHLAGYEQQDAHEFLIAALDVLHRHCKGDDNGKKANNPNHCNCIIDQIFTGGLQSDVTCQVCQ

SEQ ID NO: 763827 - protein, 374 aa, Homo sapiens
AECGPQQPQLGGGACLAASPRRSRSPIFVRPPRFVLGARALASLASRRAAPTPRWRRPRLPRRRPPRAGRALPPMVSRPEPEGEAMDAELAVAPPGCSHLGSFKVDNWKQNLRAIYQCFVWSGTAEARKRKAKSCICHVCGVHLNRLHSCLYCVFFGCFTKKHIHEHAKAKRHNLAIDLMYGGIYCFLCQDYIYDKDMEIIAKEEQRKAWKMQGVGEKFSTWEPTKRELELLKHNPKRRKITSNCTIGLRGLINLGNTCFMNCIVQALTHTPLLRDFFLSDRHRCEMQSPSSCLVCEMSSLFQEFYSGHRSPHIPYKLLHLVWTHARHLAGYEQQDAHEFLIAALDVLHRHCKGDDNGRSTTTPTTSPRAVQRS

SEQ ID NO: 763828 - protein, 213 aa, Homo sapiens
AECGPQQPQLGGGACLAASPRRSRSPIFVRPPRFVLGARALASLASRRAAPTPRWRRPRLPRRRPPRAGRALPPMVSRPEPEGEAMDAELAVAPPGCSHLGSFKVDNWKQNLRAIYQCFVWSGTAEARKRKAKSCICHVCGVHLNRLHSCLYCVFFGCFTKKHIHEHAKAKRHNLGEASFWDGGIVVAPKLLLFDFLICSSTLPKVHFVVCLK

SEQ ID NO: 763829 - protein, 237 aa, Homo sapiens
QHRLDEPRGIGRGTGGLQSDVTCQVCHGVSTTIDPFWDISLDLPGSSTPFWPLSPGSEGNVVNGESHVSGTTTLTDCLRRFTRPEHLGSSAKIKCSGCHSYQESTKQLTMKKLPIVACFHLKRFEHSAKLRRKITTYVSFPLELDMTPFMASSKESRMNGQYQQPTDSLNNDNKYSLFAVVNHQGTLESGHYTSFIRQHKDQWFKCDDAIITKASIKDVLDSEGYLLFYHKQFLEYE

SEQ ID NO: 763830 - protein, 101 aa, Homo sapiens
QAWGLVYVAQAGLEPMGSSNPPSLASQVAGTTGMGHRAWLCSLLQLKFKNPGHDPPKLFQNPKWTVTSKLHKTSKYRERPVLPVSRGPFSIRSIDRLGPCL

SEQ ID NO: 763831 - protein, 367 aa, Homo sapiens
VYRRYLRVRRRSGTILAIDLMYGGIYCFLCQDYIYDKDMEIIAKEEQRKAWKMQGVGEKFSTWEPTKRELELLKHNPKRRKITSNCTIGLRGLINLGNTCFMNCIVQALTHTPLLRDFFLSDRHRCEMQSPSSCLVCEMSSLFQEFYSGHRSPHIPYKLLHLVWTHARHLAGYEQQDAHEFLIAALDVLHRHCKGDDNGKKANNPNHCNCIIDQIFTGGLQSDVTCQVCHGVSNNHSNLSGTSSLDLPGSFTQFWPLTKNKAHVQQGKAHVGIHEHRKPRRIQNQTVGQQGPETCRAVTKYSEPNSSIVRRSTDRYHTKKNPSIGGKQQCNPRRYTEHTKSRANNSRTDVDSTARSSDMCVDKYTLQ

SEQ ID NO: 763832 - protein, 478 aa, Homo sapiens
NQGRGEVVGLDRESVSGCCAVHLNRLHSCLYCVFFGCFTKKHIHEHAKAKRHNLAIDLMYGGIYCFLCQDYIYDKDMEIIAKEEQRKAWKMQGVGEKFSTWEPTKRELELLKHNPKRRKITSNCTIGLRGLINLGNTCFMNCIVQALTHTPLLRDFFLSDRHRCEMQSPSSCLVCEMSSLFQEFYSGHRSPHIPYKLLHLVWTHARHLAGYEQQDAHEFLIAALDVLHRHCKGDDNGKKANNPNHCNCIIDQIFTGGLQSDVTCQVCHGVSTTIDPFWDISLDLPGSSTPFWPLSPGSEGNVVNGESHVSGTTTLTDCLRRFTRPEHLGSSAKIKCSGCHSYQESTKQLTMKKLPIVACFHLKRFEHSAKLRRKITTYVSFPLELDMTPFMASSKESRMNGQYQQPTDSLNNDNKYSLFAVVNHQGTLESGHYTSFIRQHKDQWFKCDDAIITKASIKDVLDSEGYLLFYHKQFLEYE

SEQ ID NO: 763833 - protein, 185 aa, Homo sapiens
EDPPLYFNVVNGESHVSGTTTLTDCLRRFTRPEHLGSSAKIKCSGCHSYQESTKQLTMKKLPIVACFHLKRFEHSAKLRRKITTYVSFPLELDMTPFMASSKESRMNGQYQQPTDSLNNDNKYSLFAVVNHQGTLESGHYTSFIRQHKDQWFKCDDAIITKASIKDVLDSEGYLLFYHKQFLEYE

SEQ ID NO: 763834 - protein, 128 aa, Homo sapiens
MKKLPIVACFHLKRFEHSAKLRRKITTYVSFPLELDMTPFMASSKESRMNGQYQQPTDSLNNDNKYSLFAVVNHQGTLESGHYTSFIRQHKDQWFKCDDAIITKASIKDVLDSEGYLLFYHKQFLEYE

SEQ ID NO: 763835 - protein, 237 aa, Homo sapiens; identical to SEQ ID NO: 763829

SEQ ID NO: 763836 - protein, 128 aa, Homo sapiens; identical to SEQ ID NO: 763834

SEQ ID NO: 763837 - protein, 107 aa, Homo sapiens; identical to SEQ ID NO: 763801

SEQ ID NO: 763838 - protein, 107 aa, Homo sapiens; identical to SEQ ID NO: 763801

SEQ ID NO: 763839 - protein, 72 aa, Homo sapiens
SVSTALWDCRELILPPLVFSLPSIPLPGYRCLAAKGVGREAGVASGGACILSRLPLLYIWCTFGRGGSKMTP

SEQ ID NO: 763840 - protein, 599 aa, Homo sapiens; identical to SEQ ID NO: 763800

SEQ ID NO: 763841 - protein, 599 aa, Homo sapiens; identical to SEQ ID NO: 763800

SEQ ID NO: 763842 - protein, 599 aa, Homo sapiens; identical to SEQ ID NO: 763800

SEQ ID NO: 763843 - protein, 599 aa, Homo sapiens; identical to SEQ ID NO: 763800

SEQ ID NO: 763844 - protein, 599 aa, Homo sapiens; identical to SEQ ID NO: 763800

SEQ ID NO: 763845 - protein, 519 aa, Homo sapiens
AECGPQQPQLGGGACLAASPRRSRSPIFVRPPRFVLGARALASLASRRAAPTPRWRRPRLPRRRPPRAGRALPPMVSRPEPEGEAMDAELAVAPPGCSHLGSFKVDNWKQNLRAIYQCFVWSGTAEARKRKAKSCICHVCGVHLNRLHSCLYCVFFGCFTKKHIHEHAKAKRHNLAIDLMYGGIYCFLCQDYIYDKDMEIIAKEEQRKAWKMQGVGEKFSTWEPTKRELELLKHNPKRRKITSNCTIGLRGLINLGNTCFMNCIVQALTHTPLLRDFFLSDRHRCEMQSPSSCLVCEMSSLFQEFYSGHRSPHIPYKLLHLVWTHARHLAGYEQQDAHEFLIAALDVLHRHCKGDDNGKKANNPNHCNCIIDQIFTGGLQSDVTCQVCHGVSTTIDPFWDISLDLPGSSTPFWPLSPGSEGNVVNGESHVSGTTTLTDCLRRFTRPEHLGSSAKIKCSGCHSYQESTKQLTMKKLPIVACFHLKRFEHSAKLRRKITTYVSFPLELDMTPFMASRYVGL

SEQ ID NO: 763846 - protein, 590 aa, Homo sapiens
AECGPQQPQLGGGACLAASPRRSRSPIFVRPPRFVLGARALASLASRRAAPTPRWRRPRLPRRRPPRAGRALPPMVSRPEPEGEAMDAELAVAPPGCSHLGSFKVDNWKQNLRAIYQCFVWSGTAEARKRKAKSCICHVCGVHLNRLHSCLYCVFFGCFTKKHIHEHAKAKRHNLAIDLMYGGIYCFLCQDYIYDKDMEIIAKEEQRKAWKMQGVGEKFSTWEPTKRELELLKHNPKRRKITSNCTIGLRGLINLGNTCFMNCIVQALTHTPLLRDFFLSDRHRCEMQSPSSCLVCEMSSLFQEFYSGHRSPHIPYKLLHLVWTHARHLAGYEQQDAHEFLIAALDVLHRHCKGDDNGKKANNPNHCNCIIDQIFTGGLQSDVTCQVCHGVSTTIDPFWDISLDLPGSSTPFWPLSPGSEGNVVNGESHVSGTTTLTDCLRRFTRPEHLGSSAKIKCSGCHSYQESTKQLTMKKLPIVACFHLKRFEHSAKLRRKITTYVSFPLELDMTPFMASSRESRMSGPVTSSPRNSLSMTQYFLFAVVNHPGLGGVAYPGFPGPRPGQCAVPLPGGRGLRGCGLNVGRPLGARSC

SEQ ID NO: 763847 - protein, 487 aa, Homo sapiens
AECGPQQPQLGGGACLAASPRRSRSPIFVRPPRFVLGARALASLASRRAAPTPRWRRPRLPRRRPPRAGRALPPMVSRPEPEGEAMDAELAVAPPGCSHLGSFKVDNWKQNLRAIYQCFVWSGTAEARKRKAKSCICHVCGVHLNRLHSCLYCVFFGCFTKKHIHEHAKAKRHNLAIDLMYGGIYCFLCQDYIYDKDMEIIAKEEQRKAWKMQGVGEKFSTWEPTKRELELLKHNPKRRKITSNCTIGLRGLINLGNTCFMNCIVQALTHTPLLRDFFLSDRHRCEMQSPSSCLVCEMSSLFQEFYSGHRSPHIPYKLLHLVWTHARHLAGYEQQDAHEFLIAALDVLHRHCKGDDNGKKANNPNHCNCIIDQIFTGGLQSDVTCQVCHGVSTTIDPFWDISLDLPGSSTPFWPLSPGSEGNVVNGESHVSGTTTLTDCLRRFTRPEHLGSSAKIKCSGCHSYQESTKQLTMKKLPIVACFHLKRRY

SEQ ID NO: 763848 - protein, 263 aa, Homo sapiens
AECGPQQPQLGGGACLAASPRRSRSPIFVRPPRFVLGARALASLASRRAAPTPRWRRPRLPRRRPPRAGRALPPMVSRPEPEGEAMDAELAVAPPGCSHLGSFKVDNWKQNLRAIYQCFVWSGTAEARKRKAKSCICHVCGVHLNRLHSCLYCVFFGCFTKKHIHEHAKAKRHNLAIDLMYGGIYCFLCQDYIYDKDMEIIAKEEQRKAWKMQGVGEKFSTWEPTKRELELLKHNPKRRKITSNCTIGGWSVSSLSARLLSRV

SEQ ID NO: 763849 - protein, 46 aa, Homo sapiens
MYGGIYCFLCQDYIYDKDMEIIAKEEQRKAWKMQGLVPPQFTCLIL

SEQ ID NO: 763850 - protein, 147 aa, Homo sapiens
MPPPQKIPSVRPFKQRKSLAIRQEEVAGIRAKFPNKIPVVVERYPRETFLPPLDKTKFLVPQELTMTQFLSIIRSRMVLRATEAFYLLVNNKSLVSMSATMAEIYRDYKDEDGFVYMTYASQETFGCLESAAPRDGSSLEDRPCNPL

SEQ ID NO: 763851 - protein, 115 aa, Homo sapiens
MPPPQKIPSVRPFKQRKSLAIRQEEVAGIRAKFPNKIPVVVERYPRETFLPPLDKTKFLVPQELTMTQFLSIIRSRMVLRATEAFYLLVNNKSLVSMSATMAEIYRDASSHITVF

SEQ ID NO: 763852 - protein, 417 aa, Homo sapiens
QNVLCGCGETLRRGLRCVVGTHKTDVKMMLSRAKPAVGRGVQHTDKRKKKGRKIPKLEELLSKRDFTGAITLLEFKRHVGEEEEDTNLWIGYCAFHLGDYKRALEEYENATKEENCNSEVWVNLACTYFFLGMYKQAEAAGFKASKSRLQNRLLFHLAHKFNDEKKLMSFHQNLQDVTEDQLSLASIHYMRSHYQEAIDIYKRILLDNREYLALNVYVALCYYKLDYYDVSQEVLAVYLQQIPDSTIALNLKACNHFRLYNGRAAEAELKSLMDNASSSFEFAKELIRHNLVVFRGGEGALQVLPPLVDVIPEARLNLVIYYLRQDDVQEAYNLIKDLEPTTPQEYILKGVVNAALGQEMGSVSMKSLIIYRLQSYKCMEENKMTIKVQAAIGSPVAPFISPYPPIQTPLRKECYVI

SEQ ID NO: 763853 - protein, 414 aa, Homo sapiens
MSFHQNLQDVTEDQLSLASIHYMRSHYQEAIDIYKRILLDNREYLALNVYVALCYYKLDYYDVSQEVLAVYLQQIPDSTIALNLKACNHFRLYNGRAAEAELKSLMDNASSSFEFAKELIRHNLVVFRGGEGALQVLPPLVDVIPEARLNLVIYYLRQDDVQEAYNLIKDLEPTTPQEYILKGVVNAALGQEMGSRDHMKIAQQFFQLVGGSASECDTIPGRQCMASCFFLLKQFDDVLIYLNSFKSYFYNDDIFNFNYAQAKAATGNTSEGEEAFLLIQSEKMKNDYIYLSWLARCYIMNKKPRLAWELYLKMETSGESFSLLQLIANDCYKMGQFYYSAKAFDVLERLDPNPEYWEGKRGACVGIFQMIIAGREPKETLREVLHLLRSTGNTQVEYMIRIMKKWAKENRVSI

SEQ ID NO: 763854 - protein, 245 aa, Homo sapiens
LIQSALYPQEYILKGSGQQPWPGNGSRDHMKIAQQFFQLVGGSASECDTIPGRQCMASCFFLLKQFDDVLIYLNSFKSYFYNDDIFNFNYAQAKAATGNTSEGEEAFLLIQSEKMKNDYIYLSWLARCYIMNKKPRLAWELYLKMETSGESFSLLQLIANDCYKMGQFYYSAKAFDVLERLDPNPEYWEGKRGACVGIFQMIIAGREPKETLREVLHLLRSTGNTQVEYMIRIMKKWAKENRVSI

SEQ ID NO: 763855 - protein, 581 aa, Homo sapiens
QNVLCGCGETLRRGLRCVVGTHKTDVKMMLSRAKPAVGRGVQHTDKRKKKGRKIPKLEELLSKRDFTGAITLLEFKRHVGEEEEDTNLWIGYCAFHLGDYKRALEEYENATKEENCNSEVWVNLACTYFFLGMYKQAEAAGFKASKSRLQNRLLFHLAHKFNDEKKLMSFHQNLQDVTEDQLSLASIHYMRSHYQEAIDIYKRILLDNREYLALNVYVALCYYKLDYYDVSQEVLAVYLQQIPDSTIALNLKACNHFRLYNGRAAEAELKSLMDNASSSFEFAKELIRHNLVVFRGGEGALQVLPPLVDVIPEARLNLVIYYLRQDDVQEAYNLIKDLEPTTPQEYILKGVVNAALGQEMGSRDHMKIAQQFFQLVGGSASECDTIPGRQCMASCFFLLKQFDDVLIYLNSFKSYFYNDDIFNFNYAQAKAATGNTSEGEEAFLLIQSEKMKNDYIYLSWLARCYIMNKKPRLAWELYLKMETSGESFSLLQLIANDCYKMGQFYYSAKAFDVLERLDPNPEYWEGKRGACVGIFQMIIAGREPKETLREVLHLLRSTGNTQVEYMIRIMKKWAKENRVSI

SEQ ID NO: 763856 - protein, 298 aa, Homo sapiens
QNVLCGCGETLRRGLRCVVGTHKTDVKMMLSRAKPAVGRGVQHTDKRKKKGRKIPKLEELLSKRDFTGAITLLEFKRHVGEEEEDTNLWIGYCAFHLGDYKRALEEYENATKEENCNSEVWVNLACTYFFLGMYKQAEAAGFKASKSRLQNRLLFHLAHKFNDEKKLMSFHQNLQDVTEDQLSLASIHYMRSHYQEAIDIYKRILLDNREYLALNVYVALCYYKLDYYDVSQEVLAVYLQQIPDSTIALNLKACNHFRLYNGRAAEAELKSLMDNASSSFEFAKELIRHNLVNNDFPS

SEQ ID NO: 763857 - protein, 190 aa, Homo sapiens
QNVLCGCGETLRRGLRCVVGTHKTDVKMMLSRAKPAVGRGVQHTDKRKKKGRKIPKLEELLSKRDFTGAITLLEFKRHVGEEEEDTNLWIGYCAFHLGDYKRALERIQKCYSREKELMGYTGGANEARSKMDVAQTKLDIYLSRHNTAVSQLTKAKEALIAASETLKERKAAIRDIEGKLPQTEQELKEK

SEQ ID NO: 763858 - protein, 392 aa, Homo sapiens
PWKLLPQTCRCCYCCPCCGQVSGCGERGVGLGRADPRFPTGALAMDPNFWLQVQESVTVQEGLCVLVPCTFFHPIPYYDKNSPVHGYWFREGAIISGDSPVATNKLDQEVQEETQGRFRLLGDPSRNNCSLSIVDARRRDNGSYFFRMERGSTKYSYKSPQLSVHVTDLTHRPKILIPGTLEPGHSKNLTCSVSWACEQGTPPIFSWLSAAPTSLGPRTTHSSVLIITPRPQDHGTNLTCQVKFAGAGVTTERTIQLNVTYVPQNPTTGIFPGDGSGKQETRAGVVHGAIGGAGVTALLALCLCLIFFIVKTHRRKAARTAVGRNDTHPTTGSASPKHQKNSKLHGPTETSSCSGAAPTVEMDEELHYASLNFHGMNPSKDTSTEYSEVRTQ

SEQ ID NO: 763859 - protein, 371 aa, Homo sapiens
LEAASSDMPLLLLLPLLWAGALAMDPNFWLQVQESVTVQEGLCVLVPCTFFHPIPYYDKNSPVHGYWFREGAIISGDSPVATNKLDQEVQEETQGRFRLLGDPSRNNCSLSIVDARRRDNGSYFFRMERGSTKYSYKSPQLSVHVTDLTHRPKILIPGTLEPGHSKNLTCSVSWACEQGTPPIFSWLSAAPTSLGPRTTHSSVLIITPRPQDHGTNLTCQVKFAGAGVTTERTIQLNVTYVPQNPTTGIFPGDGSGKQETRAGVVHGAIGGAGVTALLALCLCLIFFIVKTHRRKAARTAVGRNDTHPTTGSASPKHQKNSKLHGPTETSSCSGAAPTVEMDEELHYASLNFHGMNPSKDTSTEYSEVRTQ

SEQ ID NO: 763860 - protein, 237 aa, Homo sapiens
MPLLLLLPLLWADLTHRPKILIPGTLEPGHSKNLTCSVSWACEQGTPPIFSWLSAAPTSLGPRTTHSSVLIITPRPQDHGTNLTCQVKFAGAGVTTERTIQLNVTYVPQNPTTGIFPGDGSGKQETRAGVVHGAIGGAGVTALLALCLCLIFFIVKTHRRKAARTAVGRNDTHPTTGSASPKHQKNSKLHGPTETSSCSGAAPTVEMDEELHYASLNFHGMNPSKDTSTEYSEVRTQ

SEQ ID NO: 763861 - protein, 292 aa, Homo sapiens
MSHLSQQKIYSGENPFACKVCGKVFSHKSNLTEHEHFHTREKPFECNECGKAFSQKQYVIKHQNTHTGEKLFECNECGKSFSQKENLLTHQKIHTGEKPFECKDCGKAFIQKSNLIRHQRTHTGEKPFVCKECGKTFSGKSNLTEHEKIHIGEKPFKCSECGTAFGQKKYLIKHQNIHTGEKPYECNECGKAFSQRTSLIVHVRIHSGDKPYECNVCGKAFSQSSSLTVHVRSHTGEKPYGCNECGKAFSQFSTLALHLRIHTGKKPYQCSECGKAFSQKSHHIRHQKIHTH

SEQ ID NO: 763862 - protein, 292 aa, Homo sapiens; identical to SEQ ID NO: 763861

SEQ ID NO: 763863 - protein, 292 aa, Homo sapiens; identical to SEQ ID NO: 763861

SEQ ID NO: 763864 - protein, 292 aa, Homo sapiens; identical to SEQ ID NO: 763861

SEQ ID NO: 763865 - protein, 292 aa, Homo sapiens; identical to SEQ ID NO: 763861

SEQ ID NO: 763866 - protein, 292 aa, Homo sapiens; identical to SEQ ID NO: 763861

SEQ ID NO: 763867 - protein, 104 aa, Homo sapiens
MTLPVIIFVCFIILLVSPDSRGARRPSCCCSDVSLPASSVPPLWWLFSFIHIPFPVLTHCPLYFVKPYILSDIQVPFCYYLLSSFLVAECLRIIFYTCSHTSRC

SEQ ID NO: 763868 - protein, 69 aa, Homo sapiens
ECASAAHRVDILVFVRGSVRPLGPRGAKVGGRHRPRSQTSCVNSFLCHFLPWGPQRWGLAMLPRLVLNF

SEQ ID NO: 763869 - protein, 292 aa, Homo sapiens; identical to SEQ ID NO: 763861

SEQ ID NO: 763870 - protein, 292 aa, Homo sapiens; identical to SEQ ID NO: 763861

SEQ ID NO: 763871 - protein, 292 aa, Homo sapiens; identical to SEQ ID NO: 763861

SEQ ID NO: 763872 - protein, 292 aa, Homo sapiens; identical to SEQ ID NO: 763861

SEQ ID NO: 763873 - protein, 1076 aa, Homo sapiens
MKPDRDTLDEYFEYDAEEFLVSLALLITEGRTPECSVKGRTESFHCPPAQSCYPVTTKHECSDKLAQCRQARRTRSEVTLLWKNNLPIMVEMMLLPDCCYSDDGPTTEGIDLNDPAIKQDALLLERWILEPVPRQNGDRFIEEKTLLLAVRSFVFFSQLSAWLSVSHGAIPRNILYRISAADVDLQWNFSQTPIEHVFPVPNVSHNVALKVSVQSLPRQSNYPVLTCSIHTNIGLYEKRIQQHKLKTHQHHNPNEAEQCGTNSSQRLCSKQTWTMAPESVLHAKSGPSPEYTAAVKNIKLYPGTGSKSDHGTSQANILGFSGIGDIKSQETSVRTLKSFSMVDSSISNRQSFWQSAGETNPLIGSLIQERQEIIARIAQHLIHCDPSTSHVSGRPFNTQESSSLHSKLFRVSQENENVGKGKEAFSMTFGSPEFSSPEDTNEGKIRLKPETPRSETCISNDFYSHMPVGETNPLIGSLLQERQDVIARIAQHLEHIDPTASHIPRQSFNMHDSSSVASKVFRSSYEDKNLLKKNKDESSVSISHTKCSLLGDISDGKNLIPNKCFTSFKNNSKEKCSLKHQTRNQCQNNPSEIIQSTYQETQNKSSSLSTSSILSQHKENNLDLTSRFKEQEMSNGIDKQYSNCTTIDKQICTNKYKEKIINENYNPKFFGNLQSDDSKKNDSKIKVTVLEMSEYLNKYESMSSNKDSKRPKTCEQNTQLNSIENYLNKDNEGFKCKKSDQLKNEQDKQEDPTNEKSQNYSQRRSIKDCLSTCEQPKNTEVLRTTLKHSNVWRKHNFHSLDGTSTRAFHPQTGLPLLSSPVPQRKTQSGCFDLDSSLLHLKSFSSRSPRPCLNIEDDPDIHEKPFLSSSAPPITSLSLLGNFEESVLNYRFDPLGIVDGFTAEVGASGAFCPTHLTLPVEVSFYSVSDDNAPSPYMGVITLESLGKRGYRVPPSGTIQVTLFNPNKTVVKMFVVIYDLRDMPANHQTFLRQRTFSVPVKQEVKRSVNKENIRHTEERLLRYLIHLRFQSSKSGKIYLHRDVRLLFSRKSMEVDSGAAYELKSYTESPTNPQFSPRC

SEQ ID NO: 763874 - protein, 1076 aa, Homo sapiens; identical to SEQ ID NO: 763873

SEQ ID NO: 763875 - protein, 947 aa, Homo sapiens
  misc_feature (940)..(940): Xaa can be any naturally occurring amino acid
  misc_feature (944)..(944): Xaa can be any naturally occurring amino acid
MKPDRDTLDEYFEYDAEEFLVSLALLITEGRTPECSVKGRTESFHCPPAQSCYPVTTKHECSDKLAQCRQARRTRSEVTLLWKNNLPIMVEMMLLPDCCYSDDGPTTEGIDLNDPAIKQDALLLERWILEPVPRQNGDRFIEEKTLLLAVRSFVFFSQLSAWLSVSHGAIPRNILYRISAADVDLQWNFSQTPIEHVFPVPNVSHNVALKVSVQSLPRQSNYPVLTCSIHTNIGLYEKRIQQHKLKTHQHHNPNEAEQCGTNSSQRLCSKQTWTMAPESVLHAKSGPSPEYTAAVKNIKLYPGTGSKSDHGTSQANILGFSGIGDIKSQETSVRTLKSFSMVDSSISNRQSFWQSAGETNPLIGSLIQERQEIIARIAQHLIHCDPSTSHVSGRPFNTQESSSLHSKLFRVSQENENVGKGKEAFSMTFGSPEFSSPEDTNEGKIRLKPETPRSETCISNDFYSHMPVGETNPLIGSLLQERQDVIARIAQHLEHIDPTASHIPRQSFNMHDSSSVASKVFRSSYEDKNLLKKNKDESSVSISHTKCSLLGDISDGKNLIPNKCFTSFKNNSKEKCSLKHQTRNQCQNNPSEIIQSTYQETQNKSSSLSTSSILSQHKENNLDLTSRFKEQEMSNGIDKQYSNCTTIDKQICTNKYKEKIINENYNPKFFGNLQSDDSKKNDSKIKVTVLEMSEYLNKYESMSSNKDSKRPKTCEQNTQLNSIENYLNKDNEGFKCKKSDQLKNEQDKQEDPTNEKSQNYSQRRSIKDCLSTCEQPKNTEVLRTTLKHSNVWRKHNFHSLDGTSTRAFHPQTGLPLLSSPVPQRKTQSGCFDLDSSLLHLKSFSSRSPRPCLNIEDDPDIHEKPFLSSSAPPITSLSLLGNFEESVLNYRFDPLGIVDGFTAEVGASGAFCPTHLTLPVEVSFYSVSDDNAPSPYMGVGXNFKXSPW

SEQ ID NO: 763876 - protein, 786 aa, Homo sapiens [sequence omitted]

SEQ ID NO: 763877 - protein, 1076 aa, Homo sapiens; identical to SEQ ID NO: 763873

SEQ ID NO: 763878 - protein, 963 aa, Homo sapiens [sequence omitted]

SEQ ID NO: 763879 - protein, 850 aa, Homo sapiens
MKPDRDTLDEYFEYDAEEFLVSLALLITEGRTPECSVKGRTESFHCPPAQSCYPVTTKHECSDKLAQCRQARRTRSEVTLLWKNNLPIMVEMMLLPDCCYSDDGPTTEGIDLNDPAIKQDALLLERWILEPVPRQNGDRFIEEKTLLLAVRSFVFFSQLSAWLSVSHGAIPRNILYRISAADVDLQWNFSQTPIEHVFPVPNVSHNVALKVSVQSLPRQSNYPVLTCSIHTNIGLYEKRIQQHKLKTHQHHNPNEAEQCGTNSSQRLCSKQTWTMAPESVLHAKSGPSPEYTAAVKNIKLYPGTGSKSDHGTSQANILGFSGIGDIKSQETSVRTLKSFSMVDSSISNRQSFWQSAGETNPLIGSLIQERQEIIARIAQHLIHCDPSTSHVSGRPFNTQESSSLHSKLFRVSQENENVGKGKEAFSMTFGSPEFSSPEDTNEGKIRLKPETPRSETCISNDFYSHMPVGETNPLIGSLLQERQDVIARIAQHLEHIDPTASHIPRQSFNMHDSSSVASKVFRSSYEDKNLLKKNKDESSVSISHTKCSLLGDISDGKNLIPNKCFTSFKNNSKEKCSLKHQTRNQCQNNPSEIIQSTYQETQNKSSSLSTSSILSQHKENNLDLTSRFKEQEMSNGIDKQYSNCTTIDKQICTNKYKEKIINENYNPKFFGNLQSDDSKKNDSKIKVTVLEMSEYLNKYESMSSNKDSKRPKTCEQNTQLNSIENYLNKDNEGFKCKKSDQLKNEQDKQEDPTNEKSQNYSQRRSIKDCLSTCEQPKNTEVLRTTLKHSNVWRKHNFHSLDGTSTRAFHPQTGLPLLSSPVPQRKTQSGCFDLDSSLLHLKSFSSRRNLS

SEQ ID NO: 763880 - protein, 963 aa, Homo sapiens [sequence omitted]

SEQ ID NO: 763881 - protein, 965 aa, Homo sapiens
MKPDRDTLDEYFEYDAEEFLVSLALLITEGRTPECSVKGRTESFHCPPAQSCYPVTTKHECSDKLAQCRQARRTRSEVTLLWKNNLPIMVEMMLLPDCCYSDDGPTTEGIDLNDPAIKQDALLLERWILEPVPRQNGDRFIEEKTLLLAVRSFVFFSQLSAWLSVSHGAIPRNILYRISAADVDLQWNFSQTPIEHVFPVPNVSHNVALKVSVQSLPRQSNYPVLTCSIHTNIGLYEKRIQQHKLKTHQHHNPNEAEQCGTNSSQRLCSKQTWTMAPESVLHAKSGPSPEYTAAVKNIKLYPGTGSKSDHGTSQANILGFSGIGDIKSQETSVRTLKSFSMVDSSISNRQSFWQSAGETNPLIGSLIQERQEIIARIAQHLIHCDPSTSHVSGRPFNTQESSSLHSKLFRVSQENENVGKGKEAFSMTFGSPEFSSPEDTNEGKIRLKPETPRSETCISNDFYSHMPVGETNPLIGSLLQERQDVIARIAQHLEHIDPTASHIPRQSFNMHDSSSVASKVFRSSYEDKNLLKKNKDESSVSISHTKCSLLGDISDGKNLIPNKCFTSFKNNSKEKCSLKHQTRNQCQNNPSEIIQSTYQETQNKSSSLSTSSILSQHKENNLDLTSRFKEQEMSNGIDKQYSNCTTIDKQICTNKYKEKIINENYNPKFFGNLQSDDSKKNDSKIKVTVLEMSEYLNKYESMSSNKDSKRPKTCEQNTQLNSIENYLNKDNEGFKCKKSDQLKNEQDKQEDPTNEKSQNYSQRRSIKDCLSTCEQPKNTEVLRTTLKHSNVWRKHNFHSLDGTSTRAFHPQTGLPLLSSPVPQRKTQSGCFDLDSSLLHLKSFSSRSPRPCLNIEDDPDIHEKPFLSSSAPPITSLSLLGNFEESVLNYRFDPLGIVDGFTAEVGASGAFCPTHLTLPVEVSFYSVSDDNAPSPYMASIFYIVCFPAKSTNLMTNLSALMQYLKI

SEQ ID NO: 763882 - protein, 585 aa, Homo sapiens
GRAGGRDGAPRGRAWPGCARLGSGRVAGAGVAGERVAAPRVTAPPPPMLLPLACLHGRVAQCLTSLLLLAEPLPRPRRGARARGAASTGAEAAPAAPPAKMAAELYAPASAAAADLANSNAGAAVGRKAGPRSPPSAPAPAPPPPAPAPPTLGNNHQESPGWRCCRPTLRERNALMFNNELMADVHFVVGPPGATRTVPAHKYVLAVGSSVFYAMFYGDLAEVKSEIHIPDVEPAAFLILLKYMYSDEIDLEADTVLATLYAAKKYIVPALAKACVNFLETSLEAKNACVLLSQSRLFEEPELTQRCWEVIDAQAEMALRSEGFCEIDRQTLEIIVTREALNTKEAVVFEAVLNWAEAECKRQGLPITPRNKRHVLGRALYLVRIPTMTLEEFANGAAQSDILTLEETHSIFLWYTATNKPRLDFPLTKRKGLAPQRCHRFQSSAYRSNQWRYRGRCDSIQFAVDRRVFIAGLGLYGSSSGKAEYSVKIELKRLGVVLAQNLTKFMSDGSSNTFPVWFEHPVQVEQDTFYTASAVLDGSELSYFGQEGMTEVQCGKVAFQFQCSSDSTNGTGVQGGQIPELIFYA

SEQ ID NO: 763883 - protein, 464 aa, Homo sapiens
MFNNELMADVHFVVGPPGATRTVPAHKYVLAVGSSVFYAMFYGDLAEVKSEIHIPDVEPAAFLILLKYSPLYWGGTGGSVLGGLRRLLKGSTQELMDSSPRPSPAMGAWEPAPDAGPASPRYMYSDEIDLEADTVLATLYAAKKYIVPALAKACVNFLETSLEAKNACVLLSQSRLFEEPELTQRCWEVIDAQAEMALRSEGFCEIDRQTLEIIVTREALNTKEAVVFEAVLNWAEAECKRQGLPITPRNKRHVLGRALYLVRIPTMTLEEFANGAAQSDILTLEETHSIFLWYTATNKPRLDFPLTKRKGLAPQRCHRFQSSAYRSNQWRYRGRCDSIQFAVDRRVFIAGLGLYGSSSGKAEYSVKIELKRLGVVLAQNLTKFMSDGSSNTFPVWFEHPVQVEQDTFYTASAVLDGSELSYFGQEGMTEVQCGKVAFQFQCSSDSTNGTGVQGGQIPELIFYA

SEQ ID NO: 763884 - protein, 410 aa, Homo sapiens
MFNNELMADVHFVVGPPGATRTVPAHKYVLAVGSSVFYAMFYGDLAEVKSEIHIPDVEPAAFLILLKYMYSDEIDLEADTVLATLYAAKKYIVPALAKACVNFLETSLEAKNACVLLSQSRLFEEPELTQRCWEVIDAQAEMALRSEGFCEIDRQTLEIIVTREALNTKEAVVFEAVLNWAEAECKRQGLPITPRNKRHVLGRALYLVRIPTMTLEEFANGAAQSDILTLEETHSIFLWYTATNKPRLDFPLTKRKGLAPQRCHRFQSSAYRSNQWRYRGRCDSIQFAVDRRVFIAGLGLYGSSSGKAEYSVKIELKRLGVVLAQNLTKFMSDGSSNTFPVWFEHPVQVEQDTFYTASAVLDGSELSYFGQEGMTEVQCGKVAFQFQCSSDSTNGTGVQGGQIPELIFYA

SEQ ID NO: 763885 - protein, 585 aa, Homo sapiens; identical to SEQ ID NO: 763882

SEQ ID NO: 763886 - protein, 237 aa, Homo sapiens
ACTIAKFVQTAGWYRSEFRDKDLLSIQGNTGPSWINKTERAFFRGRDSREERLQLVQLSKENPQLLDAGITGYFFFQEKEKELGKAKLMGFFDFFKYKYQVNVDGTVAAYRYPYLMLGDSLVLKQDSPYYEHFYMALEPWKHYVPIKRNLSDLLEKVKWAKENDEEAKKIAKEGQLMARDLLQPHRLYCYYYQVLQKYAERQSSKPEVRDGMELVPQPEDSTAICQCHRKKPSREEL

SEQ ID NO: 763887 - protein, 237 aa, Homo sapiens; identical to SEQ ID NO: 763886

SEQ ID NO: 763888 - protein, 237 aa, Homo sapiens; identical to SEQ ID NO: 763886

SEQ ID NO: 763889 - protein, 302 aa, Homo sapiens
KSLRKMTHIKMCSAKYSASCDKRVLLPDLEFYVNLGDWPLEHRKVNGTPSPIPIISWCGSLDSRDVVLPTYDITHSMLEAMRGVTNDLLSIQGNTGPSWINKTERAFFRGRDSREERLQLVQLSKENPQLLDAGITGYFFFQEKEKELGKAKLMGFFDFFKYKYQVNVDGTVAAYRYPYLMLGDSLVLKQDSPYYEHFYMALEPWKHYVPIKRNLSDLLEKVKWAKENDEEAKKIAKEGQLMARDLLQPHRLYCYYYQVLQKYAERQSSKPEVRDGMELVPQPEDSTAICQCHRKKPSREEL

SEQ ID NO: 763890 - protein, 87 aa, Homo sapiens
KISQASVLGLQENDEEAKKIAKEGQLMARDLLQPHRLYCYYYQVLQKYAERQSSKPEVRDGMELVPQPEDSTAICQCHRKKPSREEL

SEQ ID NO: 763891 - protein, 237 aa, Homo sapiens; identical to SEQ ID NO: 763886

SEQ ID NO: 763892 - protein, 206 aa, Homo sapiens
MEVDINGESRSTLTTLPFPGAEANSPGKAEAEKPRCSSTPCSPMRRTVSGYQILHMDSNYLVGFTTGEELLKLAQKCTGGEESKAEAMPSLRSKQLDAGLARSSRLYKTRSRYYQPYEIPAVNGRRRRRMPSSGDKCTKSLPYEPYKALHGPLPLCLLKGKRAHSKSLDYLNLDKMIKEPADTEVLQYQLQHLTLRGDRVFARNNT

SEQ ID NO: 763893 - protein, 206 aa, Homo sapiens; identical to SEQ ID NO: 763892

SEQ ID NO: 763894 - protein, 206 aa, Homo sapiens; identical to SEQ ID NO: 763892

SEQ ID NO: 763895 - protein, 206 aa, Homo sapiens; identical to SEQ ID NO: 763892

SEQ ID NO: 763896 - protein, 206 aa, Homo sapiens; identical to SEQ ID NO: 763892

SEQ ID NO: 763897 - protein, 206 aa, Homo sapiens; identical to SEQ ID NO: 763892

SEQ ID NO: 763898 - protein, 206 aa, Homo sapiens; identical to SEQ ID NO: 763892

SEQ ID NO: 763899 - protein, 206 aa, Homo sapiens; identical to SEQ ID NO: 763892

SEQ ID NO: 763900 - protein, 122 aa, Homo sapiens
GVDEDHCGTWACLCSLPPSHSLEHGWAWDPALTLQVRTMLQAQVEVSQLLTFGAGRFFVVGGSPVHCKTFSSIHVLHSLDTSITAQVMTPKVSPDVAKHTLVGKFTLAENRWPRGRQRNEDS

SEQ ID NO: 763901 - protein, 104 aa, Homo sapiens [sequence omitted]

SEQ ID NO: 763902 - protein, 187 aa, Homo sapiens
MTNKCLLQIALLLCFSTTALSMSYNLLGFLQRSSNFQCQKLLWQLNGRLEYCLKDRMNFDIPEEIKQLQQFQKEDAALTIYEMLQNIFAIFRQDSSSTGWNETIVENLLANVYHQINHLKTVLEEKLEKEDFTRGKLMSSLHLKRYYGRILHYLKAKEYSHCAWTIVRVEILRNFYFINRLTGYLRN

SEQ ID NO: 763903 - protein, 88 aa, Homo sapiens
EVALSRWGSQKGDGFPLELGHSTARALLPLPPPNSASSHSHRDSAGVCPVGVLFSCHAPLNILSPSRCLCLLSLMCSSLASTACVFLR

SEQ ID NO: 763904 - protein, 115 aa, Homo sapiens
APGLPLSPRGQSGPKHRCPRSPARQKLGSKPAKCAPAGACAAGPEDSRGRAASAARRKRFMTASDSLQQEYRLQPLSRRTLNTSFHHLVFAVALGKSAESAITLQGELSVLSASF

SEQ ID NO: 763905 - protein, 81 aa, Homo sapiens
LPWSLMTTVHDSVRFSAAGVQVAATLPPNIEYVFPPSCLCCGSGKISRVSHHSPRGAVSSICQLLSVQFDFYLFNLEFECL

SEQ ID NO: 763906 - protein, 613 aa, Homo sapiens
MEIALVPLENGGAMTVRGGDEARAGCGQATGGELQCPPTAGLSDGPKEPAPKGRGAQRDADSGVRPLPPLPDPGVRPLPPLPEELPRPRRPPPEDEEEEGDPGLGTVEDQALGTASLHHQRVHINISGLRFETQLGTLAQFPNTLLGDPAKRLRYFDPLRNEYFFDRNRPSFDGILYYYQSGGRLRRPVNVSLDVFADEIRFYQLGDEAMERFREDEGFIKEEEKPLPRNEFQRQVWLIFEYPESSGSARAIAIVSVLVILISIITFCLETLPEFRDERELLRHPPAPHQPPAPAPGANGSGVMAPPSGPTVAPLLPRTLADPFFIVETTCVIWFTFELLVRFFACPSKAGFSRNIMNIIDVVAIFPYFITLGTELAEQQPGGGGGGQNGQQAMSLAILRVIRLVRVFRIFKLSRHSKGLQILGKTLQASMRELGLLIFFLFIGVILFSSAVYFAEADNQGTHFSSIPDAFWWAVVTMTTVGYGDMRPITVGGKIVGSLCAIAGVLTIALPVPVIVSNFNYFYHRETDHEEPAVLKEEQGTQSQGPGLDRGVQRKVSGSRGSFCKAGGTLENADSARRGSCPLEKCNVKAKSNVDLRRSLYALCLDTSRETDL

SEQ ID NO: 763907 - protein, 613 aa, Homo sapiens; identical to SEQ ID NO: 763906

SEQ ID NO: 763908 - protein, 172 aa, Homo sapiens
SCLSLPSSWDYRQSGSSQPEAHPSARASQASTEAPGQQCTQVPGDPTMWSGWWLWPLVAVCTADFFRDEAERIMRDSPVIDGHNDLPWQLLDMFNNRLQDERANLTTLAGTHTNIPKLRAGFVGGQVPPALPCACPVWGHPVSYLRPGYSGTIPVVFLQGPSVPRPREGFPA

SEQ ID NO: 763909 - protein, 411 aa, Homo sapiens
MWSGWWLWPLVAVCTADFFRDEAERIMRDSPVIDGHNDLPWQLLDMFNNRLQDERANLTTLAGTHTNIPKLRAGFVGGQFWSVYTPCDTQNKDAVRRTLEQMDVVHRMCRMYPETFLYVTSSAGIRQAFREGKVASLIGVEGGHSIDSSLGVLRALYQLGMRYLTLTHSCNTPWADNWLVDTGDSEPQSQGLSPFGQRVVKELNRLGVLIDLAHVSVATMKATLQLSRAPVIFSHSSAYSVCASRRNVPDDVLRLVKQTDSLVMVNFYNNYISCTNKANLSQVADHLDHIKEVAGARAVGFGGDFDGVPRVPEGLEDVSKYPDLIAELLRRNWTEAEVKGALADNLLRVFEAVEQASNLTQAPEEEPIPLDQLGGSCRTHYGYSSGASSLHRHWGLLLASLAPLVLCLSLL

SEQ ID NO: 763910 - protein, 373 aa, Homo sapiens
SGASPGRQSGSSQPEAHPSARASQASTEAPGQQCTQVPGDPTMWSGWWLWPLVAVCTADFFRDEAERIMRDSPVIDGHNDLPWQLLDMFNNRLQDERANLTTLAGTHTNIPKLRAGFVGGQFWSVYTPCDTQNKDAVRRTLEQMDVVHRMCRMYPETFLYVTSSAGIRQAFREGKVASLIGVEGGHSIDSSLGVLRALYQLGMRYLTLTHSCNTPWADNWLVDTGDSEPQSQGLSPFGQRVVKELNRLGVLIDLAHVSVATMKATLQLSRAPVIFSHSSAYSVCASRRNVPDDVLRLVKQTDSLVMVNFYNNYISCTNKANLSQVAGRWGVSGQGGRRGRASLGTHTCCSLDRPSGSHQGGGRSQSRGFWWGL

SEQ ID NO: 763911 - protein, 453 aa, Homo sapiens
SGASPGRQSGSSQPEAHPSARASQASTEAPGQQCTQVPGDPTMWSGWWLWPLVAVCTADFFRDEAERIMRDSPVIDGHNDLPWQLLDMFNNRLQDERANLTTLAGTHTNIPKLRAGFVGGQFWSVYTPCDTQNKDAVRRTLEQMDVVHRMCRMYPETFLYVTSSAGIRQAFREGKVASLIGVEGGHSIDSSLGVLRALYQLGMRYLTLTHSCNTPWADNWLVDTGDSEPQSQGLSPFGQRVVKELNRLGVLIDLAHVSVATMKATLQLSRAPVIFSHSSAYSVCASRRNVPDDVLRLVKQTDSLVMVNFYNNYISCTNKANLSQVADHLDHIKEVAGARAVGFGGDFDGVPRVPEGLEDVSKYPDLIAELLRRNWTEAEVKGALADNLLRVFEAVEQASNLTQAPEEEPIPLDQLGGSCRTHYGYSSGASSLHRHWGLLLASLAPLVLCLSLL

SEQ ID NO: 763912 - protein, 320 aa, Homo sapiens
SGASPGRQSGSSQPEAHPSARASQASTEAPGQQCTQVPGDPTMWSGWWLWPLVAVCTADFFRDEAERIMRDSPVIDGHNDLPWQLLDMFNNRLQDERANLTTLAGTHTNIPKLRAGFVGGQFWSVYTPCDTQNKDAVRRTLEQMDVVHRMCRMYPETFLYVTSSAGIRQAFREGKVASLIGVEGGHSIDSSLGVLRALYQLGMRYLTLTHSCNTPWADNWLVDTGDSEPQSQGLSPFGQRVVKELNRLGVLIDLAHVSVATMKATLQLSRAPVIFSHSSAYSVCASRRNVPDDVLRLVKQTDSLVMVNFYNNYISCTNIS

SEQ ID NO: 763913 - protein, 411 aa, Homo sapiens; identical to SEQ ID NO: 763909

SEQ ID NO: 763914 - protein, 453 aa, Homo sapiens; identical to SEQ ID NO: 763911

SEQ ID NO: 763915 - protein, 453 aa, Homo sapiens; identical to SEQ ID NO: 763911

SEQ ID NO: 763916 - protein, 453 aa, Homo sapiens; identical to SEQ ID NO: 763911

SEQ ID NO: 763917 - protein, 514 aa, Homo sapiens
DPQFIAQLMEQLDVFISIKPKPKQPSKSVIVKSVERNALNMYEARKCLLGLESSGVTIATSPSPASCPAGLACPSLDILASAGLGLTGLGLLGPTTLSLNTSTTPNSLLNALNSSVSPLQSPSSGTPSPTLWAPPLANTSSATGFSAIPHLMIPSTAQATLTNILLSGVPTYGHTAPSPPPGLTPVDVHINSMQTEGKKISAALNGHAQSPDIKYGAISTSSLGEKVLSANHGDPSIQTSGSEQTSPKSSPTEGCNDAFVEVGMPRSPSHSGNAGDLKQMMCPSKVSCAKRQTVELLQGTKNSHLHSTDRLLSDPELSATESPLADKKAPGSERAAERAAAAQQNSERAHLAPRSSYVNMQAFDYEQKKLLATKAMLKKPVVTEVRTPTNTWSGLGFSKSMPAETIKELRRANHVSYKPTMTTTYEGSSMSLSRSNSREHLGGGSESDNWRDRNGIGPGSHSEFAASIGSPKRKQNKSSELCVLCTLLGIPRLECVYLGWSITDCGLSDFKCLV

SEQ ID NO: 763918 - protein, 514 aa, Homo sapiens; identical to SEQ ID NO: 763917

SEQ ID NO: 763919 - protein, 460 aa, Homo sapiens
MDSELMHSIVGSYHKPPERVFVPSFTQNEPSQNCHPANLEVTSPKILHSPNSQALILALKTLQEKIHRLELERTQAEDNLNILSREAAQYKKALENETNERNLAHQELIKQKKDISIQLSSAQSRCTLLEKQLEYTKRMVLNVEREKNMILEQQAQLQREKEQDQMKLYAKLEKLDVLEKECFRLTTTQKTAEDKIKHLEEKLKEEEHQRKLFQDKASELQTGLEISKIIMSSVSNLKHSKEKKKSSKKTKCIKRRPPWQICSKFGALPFVAEKMRQHRDPHILQKPFNVTETRCLPKPSRTTSWCKAIPPDSEKSISICDNLSELLMAMQDELDQMSMEHQELLKQMKETESHSVCDDIECELECLLKKMEIKGEQISKLKKHQDSVCKLQQKVQNSKMSEASGIQQEDSYPKGSKNIKNSPRKCLTDTNLFQKNSSFHPIRVHNLQMKLRRDDIMWEQ

SEQ ID NO: 763920 - protein, 460 aa, Homo sapiens; identical to SEQ ID NO: 763919

SEQ ID NO: 763921 - protein, 460 aa, Homo sapiens; identical to SEQ ID NO: 763919

SEQ ID NO: 763922 - protein, 460 aa, Homo sapiens; identical to SEQ ID NO: 763919

SEQ ID NO: 763923 - protein, 460 aa, Homo sapiens; identical to SEQ ID NO: 763919

SEQ ID NO: 763924 - protein, 322 aa, Homo sapiens
MVLNVEREKNMILEQQAQLQREKEQDQMKLYAKLEKLDVLEKECFRLTTTQKTAEDKIKHLEEKLKEEEHQRKLFQDKASELQTGLEISKIIMSSVSNLKHSKEKKKSSKKTKCIKRRPPWQICSKFGALPFVAEKMRQHRDPHILQKPFNVTETRCLPKPSRTTSWCKAIPPDSEKSISICDNLSELLMAMQDELDQMSMEHQELLKQMKETESHSVCDDIECELECLLKKMEIKGEQISKLKKHQDSVCKLQQKVQNSKMSEASGIQQEDSYPKGSKNIKNSPRKCLTDTNLFQKNSSFHPIRVHNLQMKLRRDDIMWEQ

SEQ ID NO: 763925 - protein, 251 aa, Homo sapiens
MDSELMHSIVGSYHKPPERVFVPSFTQNEPSQNCHPANLEVTSPKILHSPNSQALILALKTLQEKIHRLELERTQAEDNLNILSREAAQYKKALENETNERNLAHQELIKQKKDISIQLSSAQSRCTLLEKQLEYTKRMVLNVEREKNMILEQQAQLQREKEQDQMKLYAKLEKLDVLEKECFRLTTTQKTAEDKIKHLEEKLKEEEHQRKLFQDKASELQTGLEISKIIMSSVSNLKHSKEKKKSSKVCI

SEQ ID NO: 763926 - protein, 110 aa, Homo sapiens
AASAAAVLLSSIHAARLKRTGPSQDNKSPNVKKHQDSVCKLQQKVQNSKMSEASGIQQEDSYPKGSKNIKNSPRKCLTDTNLFQKNSSFHPIRVHNLQMKLRRDDIMWEQ

SEQ ID NO: 763927 - protein, 127 aa, Homo sapiens
AAVVSAGGGEKKRPPAPPIRHPREDATSPIPEPSPTTAEPEGTGRPWQSSSARLGRGAGGAAGPEAQSPPFAQPHRWGSAQRAGAGSGDGVLTPSPSPFSARHKPGAAPAPAPSSPPRQTRPAEAKP

SEQ ID NO: 763928 - protein, 127 aa, Homo sapiens; identical to SEQ ID NO: 763927

SEQ ID NO: 763929 - protein, 673 aa, Homo sapiens
AAVVSAGGGEKKRPPAPPIRHPREDATSPIPEPSPTTAEPEGTGRPWQSSSARLGRGAGGAAGPEAQSPPFAQPHRWGSAQRAGAGSGDGVLTPSPSPFSARHKPGAAPAPAPSSPPRQTRPAEAKPSGKSPALWQATLRTPSAPRAAASHCRLLRMRDCELGQAPPEALSLRPEAVSVPGRLDSVLEKGKEKMGLSSCKNKLRDPTDSTLPIMDSELMHSIVGSYHKPPERVFVPSFTQNEPSQNCHPANLEVTSPKILHSPNSQALILALKTLQEKIHRLELERTQAEDNLNILSREAAQYKKALENETNERNLAHQELIKQKKDISIQLSSAQSRCTLLEKQLEYTKRMVLNVEREKNMILEQQAQLQREKEQDQMKLYAKLEKLDVLEKECFRLTTTQKTAEDKIKHLEEKLKEEEHQRKLFQDKASELQTGLEISKIIMSSVSNLKHSKEKKKSSKKTKCIKRRPPWQICSKFGALPFVAEKMRQHRDPHILQKPFNVTETRCLPKPSRTTSWCKAIPPDSEKSISICDNLSELLMAMQDELDQMSMEHQELLKQMKETESHSVCDDIECELECLLKKMEIKGEQISKLKKHQDSVCKLQQKVQNSKMSEASGIQQEDSYPKGSKNIKNSPRKCLTDTNLFQKNSSFHPIRVHNLQMKLRRDDIMWEQ

SEQ ID NO: 763930 - protein, 460 aa, Homo sapiens; identical to SEQ ID NO: 763919

SEQ ID NO: 763931 - protein, 322 aa, Homo sapiens; identical to SEQ ID NO: 763924

SEQ ID NO: 763932 - protein, 322 aa, Homo sapiens; identical to SEQ ID NO: 763924

SEQ ID NO: 763933 - protein, 386 aa, Homo sapiens [sequence omitted]

SEQ ID NO: 763934 - protein, 957 aa, Homo sapiens
MADPAECSIKVMCRFRPLNEAEILRGDKFIPKFKGDETVVIGQGKPYVFDRVLPPNTTQEQVYNACAKQIVKDVLEGYNGTIFAYGQTSSGKTHTMEGKLHDPQLMGIIPRIAHDIFDHIYSMDENLEFHIKVSYFEIYLDKIRDLLDVSKTNLAVHEDKNRVPYVKGCTERFVSSPEEVMDVIDEGKANRHVAVTNMNEHSSRSHSIFLINIKQENVETEKKLSGKLYLVDLAGSEKVSKTGAEGAVLDEAKNINKSLSALGNVISALAEGTKTHVPYRDSKMTRILQDSLGGNCRTTIVICCSPSVFNEAETKSTLMFGQRAKTIKNTVSVNLELTAEEWKKKYEKEKEKNKTLKNVIQHLEMELNRWRNGEAVPEDEQISAKDQKNLEPCDNTPIIDNIAPVVAGISTEEKEKYDEEISSLYRQLDDKDDEINQQSQLAEKLKQQMLDQDELLASTRRDYEKIQEELTRLQIENEAAKDEVKEVLQALEELAVNYDQKSQEVEDKTRANEQLTDELAQKTTTLTTTQRELSQLQELSNHQKKRATEILNLLLKDLGEIGGIIGTNDVKTLADVNGVIEEEFTMARLYISKMKSEVKSLVNRSKQLESAQMDSNRKMNASERELAACQLLISQHEAKIKSLTDYMQNMEQKRRQLEESQDSLSEELAKLRAQEKMHEVSFQDKEKEHLTRLQDAEEMKKALEQQMESHREAHQKQLSRLRDEIEEKQKIIDEIRDLNQKLQLEQEKLSSDYNKLKIEDQEREMKLEKLLLLNDKREQAREDLKGLEETVSRELQTLHNLRKLFVQDLTTRVKKSVELDNDDGGGSAAQKQKISFLENNLEQLTKVHKQLVRDNADLRCELPKLEKRLRATAERVKALESALKEAKENAMRDRKRYQQEVDRIKEAVRAKNMARRAHSAQIAKPIRPGHYPASSPTAVHAIRGGGGSSSNSTHYQK

SEQ ID NO: 763935 - protein, 957 aa, Homo sapiens; identical to SEQ ID NO: 763934

SEQ ID NO: 763936 - protein, 957 aa, Homo sapiens; identical to SEQ ID NO: 763934

SEQ ID NO: 763937 - protein, 644 aa, Homo sapiens
EVREGGGKEEEAGSGRCVGCGLAPKGRPRRRADPVASAIMDPAEAVLQEKALKFMCSMPRSLWLGCSSLADSMPSLRCLYNPGTGALTAFQNSSEREDCNNGEPPRKIIPEKNSLRQTYNSCARLCLNQETVCLASTAMKTENCVAKTKLANGTSSMIVPKQRKLSASYEKEKELCVKYFEQWSESDQVEFVEHLISQMCHYQHGHINSYLKPMLQRDFITALPARGLDHIAENILSYLDAKSLCAAELVCKEWYRVTSDGMLWKKLIERMVRTDSLWRGLAERRGWGQYLFKNKPPDGNAPPNSFYRALYPKIIQDIETIESNWRCGRHSLQRIHCRSETSKGVYCLQYDDQKIVSGLRDNTIKIWDKNTLECKRILTGHTGSVLCLQYDERVIITGSSDSTVRVWDVNTGEMLNTLIHHCEAVLHLRFNNGMMVTCSKDRSIAVWDMASPTDITLRRVLVGHRAAVNVVDFDDKYIVSASGDRTIKVWNTSTCEFVRTLNGHKRGIACLQYRDRLVVSGSSDNTIRLWDIECGACLRVLEGHEELVRCIRFDNKRIVSGAYDGKIKVWDLVAALDPRAPAGTLCLRTLVEHSGRVFRLQFDEFQIVSSSHDDTILIWDFLNDPAAQAEPPRSPSRTYTYISR

SEQ ID NO: 763938 - protein, 504 aa, Homo sapiens
EVREGGGKEEEAGSGRCVGCGLAPKGRPRRRADPVASAIMDPAEAVLQEKALKFMCSMPRSLWLGCSSLADSMPSLRCLYNPGTGALTAFQNSSEREDCNNGEPPRKIIPEKNSLRQTYNSCARLCLNQETVCLASTAMKTENCVAKTKLANGTSSMIVPKQRKLSASYEKEKELCVKYFEQWSESDQVEFVEHLISQMCHYQHGHINSYLKPMLQRDFITALPARGLDHIAENILSYLDAKSLCAAELVCKEWYRVTSDGMLWKKLIERMVRTDSLWRGLAERRGWGQYLFKNKPPDGNAPPNSFYRALYPKIIQDIETIESNWRCGRHSLQRIHCRSETSKGVYCLQYDDQKIVSGLRDNTIKIWDKNTLECKRILTGHTGSVLCLQYDERVIITGSSDSTVRVWDVNTGEMLNTLIHHCEAVLHLRFNNGMMVTCSKDRSIAVWDMASPTDITLRRVLVGHRAAVNVVDFGCRSWSGSGLNFCLDPVLGDWGPYGQGLRCA

SEQ ID NO: 763939 - protein, 467 aa, Homo sapiens
PALGDPGLLSHEDVGGGMSGADNVNDSWSSSMYSVDTLDQGIIHILGRTELPGKNSSEREDCNNGEPPRKIIPEKNSLRQTYNSCARLCLNQETVCLASTAMKTENCVAKTKLANGTSSMIVPKQRKLSASYEKEKELCVKYFEQWSESDQVEFVEHLISQMCHYQHGHINSYLKPMLQRDFITALPARGLDHIAENILSYLDAKSLCAAELVCKEWYRVTSDGMLWKKLIERMVRTDSLWRGLAERRGWGQYLFKNKPPDGNAPPNSFYRALYPKIIQDIETIESNWRCGRHSLQRIHCRSETSKGVYCLQYDDQKIVSGLRDNTIKIWDKNTLECKRILTGHTGSVLCLQYDERVIITGSSDSTVRVWDVNTGEMLNTLIHHCEAVLHLRFNNGMMVTCSKDRSIAVWDMASPTDITLRRVLVGHRAAVNVVDFGCRSWSGSGLNFCLDPVLGDWGPYGQGLRCA

SEQ ID NO: 763940 - protein, 447 aa, Homo sapiens
MPRSLWLGCSSLADSMPSLRCLYNPGTGALTAFQNSSEREDCNNGEPPRKIIPEKNSLRQTYNSCARLCLNQETVCLASTAMKTENCVAKTKLANGTSSMIVPKQRKLSASYEKEKELCVKYFEQWSESDQVEFVEHLISQMCHYQHGHINSYLKPMLQRDFITALPARGLDHIAENILSYLDAKSLCAAELVCKEWYRVTSDGMLWKKLIERMVRTDSLWRGLAERRGWGQYLFKNKPPDGNAPPNSFYRALYPKIIQDIETIESNWRCGRHSLQRIHCRSETSKGVYCLQYDDQKIVSGLRDNTIKIWDKNTLECKRILTGHTGSVLCLQYDERVIITGSSDSTVRVWDVNTGEMLNTLIHHCEAVLHLRFNNGMMVTCSKDRSIAVWDMASPTDITLRRVLVGHRAAVNVVDFGCRTWSGLGLNFCLDPVLGDWGPYGQGLRCA

SEQ ID NO: 763941 - protein, 326 aa, Homo sapiens [sequence omitted]

SEQ ID NO: 763942 - protein, 608 aa, Homo sapiens
EVREGGGKEEEAGSGRCVGCGLAPKGRPRRRADPVASAIMDPAEAVLQEKALKFMNSSEREDCNNGEPPRKIIPEKNSLRQTYNSCARLCLNQETVCLASTAMKTENCVAKTKLANGTSSMIVPKQRKLSASYEKEKELCVKYFEQWSESDQVEFVEHLISQMCHYQHGHINSYLKPMLQRDFITALPARGLDHIAENILSYLDAKSLCAAELVCKEWYRVTSDGMLWKKLIERMVRTDSLWRGLAERRGWGQYLFKNKPPDGNAPPNSFYRALYPKIIQDIETIESNWRCGRHSLQRIHCRSETSKGVYCLQYDDQKIVSGLRDNTIKIWDKNTLECKRILTGHTGSVLCLQYDERVIITGSSDSTVRVWDVNTGEMLNTLIHHCEAVLHLRFNNGMMVTCSKDRSIAVWDMASPTDITLRRVLVGHRAAVNVVDFDDKYIVSASGDRTIKVWNTSTCEFVRTLNGHKRGIACLQYRDRLVVSGSSDNTIRLWDIECGACLRVLEGHEELVRCIRFDNKRIVSGAYDGKIKVWDLVAALDPRAPAGTLCLRTLVEHSGRVFRLQFDEFQIVSSSHDDTILIWDFLNDPAAQAEPPRSPSRTYTYISR

SEQ ID NO: 763943 - protein, 316 aa, Homo sapiens
MEFVEHLISQMCHYQHGHINSYLKPMLQRDFITALPARGLDHIAENILSYLDAKSLCAAELVCKEWYRVTSDGMLWKKLIERMVRTDSLWRGLAERRGWGQYLFKNKPPDGNAPPNSFYRALYPKIIQDIETIESNWRCGRHSLQRIHCRSETSKGVYCLQYDDQKIVSGLRDNTIKIWDKNTLECKRILTGHTGSVLCLQYDERVIITGSSDSTVRVWDVNTGEMLNTLIHHCEAVLHLRFNNGMMVTCSKDRSIAVWDMASPTDITLRRVLVGHRAAVNVVDFGCRSWSGSGLNFCLDPVLGDWGPYGQGLRCA

SEQ ID NO: 763944 - protein, 487 aa, Homo sapiens
RGKRGRGEGRGGGIRALRWLRPGTKGAAPAESGPSGLGDYGPGRGGAAREGTQVYGSGSVAPSNLEQDAYSKIINSSEREDCNNGEPPRKIIPEKNSLRQTYNSCARLCLNQETVCLASTAMKTENCVAKTKLANGTSSMIVPKQRKLSASYEKEKELCVKYFEQWSESDQVEFVEHLISQMCHYQHGHINSYLKPMLQRDFITALPARGLDHIAENILSYLDAKSLCAAELVCKEWYRVTSDGMLWKKLIERMVRTDSLWRGLAERRGWGQYLFKNKPPDGNAPPNSFYRALYPKIIQDIETIESNWRCGRHSLQRIHCRSETSKGVYCLQYDDQKIVSGLRDNTIKIWDKNTLECKRILTGHTGSVLCLQYDERVIITGSSDSTVRVWDVNTGEMLNTLIHHCEAVLHLRFNNGMMVTCSKDRSIAVWDMASPTDITLRRVLVGHRAAVNVVDFGCRSWSGSGLNFCLDPVLGDWGPYGQGLRCA

SEQ ID NO: 763945 - protein, 494 aa, Homo sapiens
VFDRGLITPSPIKLKLTSVVAGVKWRDLGSLQTPPLASSDSRGLQCSMPRSLWLGCSSLADSMPSLRCLYNPGTGALTAFQNSSEREDCNNGEPPRKIIPEKNSLRQTYNSCARLCLNQETVCLASTAMKTENCVAKTKLANGTSSMIVPKQRKLSASYEKEKELCVKYFEQWSESDQVEFVEHLISQMCHYQHGHINSYLKPMLQRDFITALPARGLDHIAENILSYLDAKSLCAAELVCKEWYRVTSDGMLWKKLIERMVRTDSLWRGLAERRGWGQYLFKNKPPDGNAPPNSFYRALYPKIIQDIETIESNWRCGRHSLQRIHCRSETSKGVYCLQYDDQKIVSGLRDNTIKIWDKNTLECKRILTGHTGSVLCLQYDERVIITGSSDSTVRVWDVNTGEMLNTLIHHCEAVLHLRFNNGMMVTCSKDRSIAVWDMASPTDITLRRVLVGHRAAVNVVDFGCRSWSGSGLNFCLDPVLGDWGPYGQGLRCA

SEQ ID NO: 763946 - protein, 501 aa, Homo sapiens
MSALRRKFGDDYQVVTTSSSGSGLQPQGPGQDPQQQLVPKKKRQRFVDKNGRCNVQHGNLGSETSRYLSDLFTTLVDLKWRWNLFIFILTYTVAWLFMASMWWVIAYTRGDLNKAHVGNYTPCVANVYNFPSAFLFFIETEATIGYGYRYITDKCPEGIILFLFQSILGSIVDAFLIGCMFIKMSQPKKRAETLMFSEHAVISMRDGKLTLMFRVGNLRNSHMVSAQIRCKLLKSRQTPEGEFLPLDQLELDVGFSTGADQLFLVSPLTICHVIDAKSPFYDLSQRSMQTEQFEIVVILEGIVETTGMTCQARTSYTEDEVLWGHRFFPVISLEEGFFKVDYSQFHATFEVPTPPYSVKEQEEMLLMSSPLIAPAITNSKERHNSVECLDGLDDITTKLPSKLQKITGREDFPKKLLRMSSTTSEKAYSLGDLPMKLQRISSVPGNSEEKLVSKTTKMLSDPMSQSVADLPPKLQKMAGGAARMEGNLPAKLRKMNSDRFT

SEQ ID NO: 763947 - protein, 217 aa, Homo sapiens
MSALRRKFGDDYQVVTTSSSGSGLQPQGPGQDPQQQLVPKKKRQRFVDKNGRCNVQHGNLGSETSRYLSDLFTTLVDLKWRWNLFIFILTYTVAWLFMASMWWVIAYTRGDLNKAHVGNYTPCVANVYNFPSAFLFFIETEATIGYGYRYITDKCPEGIILFLFQSILGSIVDAFLIGCMFIKMSQPKKRAETLMFSEHAVISMRDGAQIRCKLLKG

SEQ ID NO: 763948 - protein, 501 aa, Homo sapiens; identical to SEQ ID NO: 763946

SEQ ID NO: 763949 - protein, 280 aa, Homo sapiens
PNPARAGSISRPQRAPGSVSAVAMTAAVFFGCAFIAFGPALALYVFTIATEPLRIIFLIAGAFFWLVSLLISSLVWFMARVIIDNKDGPTQKYLLIFGAFVSVYIQEMFRFAYYKLLKKASEGLKSINPGETAPSMRLLAYVSGLGFGIMSGVFSFVNTLSDSLGPGTVGIHGDSPQFFLYSAFMTLVIILLHVFWGIVFFDGCEKKKWGILLIVLLTHLLVSAQTFISSYYGINLASAFIILVLMGTWAFLAAGGSCRSLKLCLLCQDKNFLLYNQRSR

SEQ ID NO: 763950 - protein, 107 aa, Homo sapiens
LFSPFSLLCCILPFISFPLPASLSDSSFSQAHASPEPAVHCFRKNISTLSPPTHFVLTSPWKFDLKSWQLPKPETLPALPRQELSSLQPALQITSGNQHFPNRRLHL

SEQ ID NO: 763951 - protein, 280 aa, Homo sapiens; identical to SEQ ID NO: 763949

SEQ ID NO: 763952 - protein, 280 aa, Homo sapiens; identical to SEQ ID NO: 763949

SEQ ID NO: 763953 - protein, 239 aa, Homo sapiens
PNPARAGSISRPQRAPGSVSAVAMTAAVFFGCAFIAFGPALALYVFTIATEPLRIIFLIAGAFFWLVSLLISSLVWFMARVIIDNKDGPTQKYLLIFGAFVSVYIQEMFRFAYYKLLKKASEGLKSINPGETAPSMRLLAYAFMTLVIILLHVFWGIVFFDGCEKKKWGILLIVLLTHLLVSAQTFISSYYGINLASAFIILVLMGTWAFLAAGGSCRSLKLCLLCQDKNFLLYNQRSR

SEQ ID NO: 763954 - protein, 267 aa, Homo sapiens
SPANSLNQATAISCLRCTEDLQSGSSFSISLQSRSITLNCCLDPSFDRAFFWLVSLLISSLVWFMARVIIDNKDGPTQKYLLIFGAFVSVYIQEMFRFAYYKLLKKASEGLKSINPGETAPSMRLLAYVSGLGFGIMSGVFSFVNTLSDSLGPGTVGIHGDSPQFFLYSAFMTLVIILLHVFWGIVFFDGCEKKKWGILLIVLLTHLLVSAQTFISSYYGINLASAFIILVLMGTWAFLAAGGSCRSLKLCLLCQDKNFLLYNQRSR

SEQ ID NO: 763955 - protein, 696 aa, Homo sapiens
MDADMDYERPNVETIKCVVVGDNAVGKTRLICARACNTTLTQYQLLATHVPTVWAIDQYRVCQEVLERSRDVVDEVSVSLRLWDTFGDHHKDRRFAYGRSDVVVLCFSIANPNSLNHVKSMWYPEIKHFCPRTPVILVGCQLDLRYADLEAVNRARRPLARPIKRGDILPPEKGREVAKELGLPYYETSVFDQFGIKDVFDNAIRAALISRRHLQFWKSHLKKVQKPLLQAPFLPPKAPPPVIKIPECPSMGTNEAACLLDNPLCADVLFILQDQEHIFAHRIYLATSSSKFYDLFLMECEESPNGSEGACEKEKQSRDFQGRILSVDPEEEREEGPPRIPQADQWKSSNKSLVEALGLEAEGAVPETQTLTGWSKGFIGMHREMQVNPISKRMGPMTVVRMDASVQPGPFRTLLQFLYTGQLDEKEKDLVGLAQIAEVLEMFDLRMMVENIMNKEAFMNQEITKAFHVRKANRIKECLSKGTFSDVTFKLDDGAISAHKPLLICSCEWMAAMFGGSFVESANSEVYLPNINKISMQAVLDYLYTKQLSPNLDLDPLELIALANRFCLPHLVALAEQHAVQELTKAATSGVGIDGEVLSYLELAQFHNAHQLAAWCLHHICTNYNSVCSKFRKEIKSKSADNQEYFERHRWPPVWYLKEEDHYQRVKREREKEDIALNKHRSRRKWCFWNSSPAVA

SEQ ID NO: 763956 - protein, 696 aa, Homo sapiens; identical to SEQ ID NO: 763955

SEQ ID NO: 763957 - protein, 576 aa, Homo sapiens
MWYPEIKHFCPRTPVILVGCQLDLRYADLEAVNRARRPLARPIKRGDILPPEKGREVAKELGLPYYETSVFDQFGIKDVFDNAIRAALISRRHLQFWKSHLKKVQKPLLQAPFLPPKAPPPVIKIPECPSMGTNEAACLLDNPLCADVLFILQDQEHIFAHRIYLATSSSKFYDLFLMECEESPNGSEGACEKEKQSRDFQGRILSVDPEEEREEGPPRIPQADQWKSSNKSLVEALGLEAEGAVPETQTLTGWSKGFIGMHREMQVNPISKRMGPMTVVRMDASVQPGPFRTLLQFLYTGQLDEKEKDLVGLAQIAEVLEMFDLRMMVENIMNKEAFMNQEITKAFHVRKANRIKECLSKGTFSDVTFKLDDGAISAHKPLLICSCEWMAAMFGGSFVESANSEVYLPNINKISMQAVLDYLYTKQLSPNLDLDPLELIALANRFCLPHLVALAEQHAVQELTKAATSGVGIDGEVLSYLELAQFHNAHQLAAWCLHHICTNYNSVCSKFRKEIKSKSADNQEYFERHRWPPVWYLKEEDHYQRVKREREKEDIALNKHRSRRKWCFWNSSPAVA

SEQ ID NO: 763958 - protein, 644 aa, Homo sapiens [sequence omitted]

SEQ ID NO: 763959 - protein, 696 aa, Homo sapiens; identical to SEQ ID NO: 763955

SEQ ID NO: 763960 - protein, 696 aa, Homo sapiens; identical to SEQ ID NO: 763955

SEQ ID NO: 763961 - protein, 644 aa, Homo sapiens [sequence omitted]

SEQ ID NO: 763962 - protein, 510 aa, Homo sapiens
MDADMDYERPNVETIKCVVVGDNAVGKTRLICARACNTTLTQYQLLATHVPTVWAIDQYRVCQEVLERSRDVVDEVSVSLRLWDTFGDHHKDRRFAYGRSDVVVLCFSIANPNSLNHVKSMWYPEIKHFCPRTPVILVGCQLDLRYADLEAVNRARRPLARPIKRGDILPPEKGREVAKELGLPYYETSVFDQFGIKDVFDNAIRAALISRRHLQFWKSHLKKVQKPLLQAPFLPPKAPPPVIKIPECPSMGTNEAACLLDNPLCADVLFILQDQEHIFAHRIYLATSSSKFYDLFLMECEESPNGSEGACEKEKQSRDFQGRILSVDPEEEREEGPPRIPQADQWKSSNKSLVEALGLEAEGAVPETQTLTGWSKGFIGMHREMQVNPISKRMGPMTVVRMDASVQPGPFRTLLQFLYTGQLDEKEKDLVGLAQIAEVLEMFDLRMMVENIMNKEAFMNQEITKAFHVRKANRIKECLSKGTFSGVSPEHKQDINASSIGLSLYQAVVS

SEQ ID NO: 763963 - protein, 696 aa, Homo sapiens; identical to SEQ ID NO: 763955

SEQ ID NO: 763964 - protein, 696 aa, Homo sapiens; identical to SEQ ID NO: 763955

SEQ ID NO: 763965 - protein, 268 aa, Homo sapiens
EPDRCYRCTIVLEMFDLRMMVENIMNKEAFMNQEITKAFHVRKANRIKECLSKGTFSDVTFKLDDGAISAHKPLLICSCEWMAAMFGGSFVESANSEVYLPNINKISMQAVLDYLYTKQLSPNLDLDPLELIALANRFCLPHLVALAEQHAVQELTKAATSGVGIDGEVLSYLELAQFHNAHQLAAWCLHHICTNYNSVCSKFRKEIKSKSADNQEYFERHRWPPVWYLKEEDHYQRVKREREKEDIALNKHRSRRKWCFWNSSPAVA

SEQ ID NO: 763966 - protein, 696 aa, Homo sapiens; identical to SEQ ID NO: 763955

SEQ ID NO: 763967 - protein, 511 aa, Homo sapiens
MDADMDYERPNVETIKCVVVGDNAVGKTRLICARACNTTLTQYQLLATHVPTVWAIDQYRVCQEVLERSRDVVDEVSVSLRLWDTFGDHHKDRRFAYGRSDVVVLCFSIANPNSLNHVKSMWYPEIKHFCPRTPVILVGCQLDLRYADLEAVNRARRPLARPIKRGDILPPEKGREVAKELGLPYYETSVFDQFGIKDVFDNAIRAALISRRHLQFWKSHLKKVQKPLLQAPFLPPKAPPPVIKIPECPSMGTNEAACLLDNPLCADVLFILQDQEHIFAHRIYLATSSSKFYDLFLMECEESPNGSEGACEKEKQSRDFQGRILSVDPEEEREEGPPRIPQADQWKSSNKSLVEALGLEAEGAVPETQTLTGWSKGFIGMHREMQVNPISKRMGPMTVVRMDASVQPGPFRTLLQFLYTGQLDEKEKDLVGLAQIAEVLEMFDLRMMVENIMNKEAFMNQEITKAFHVRKANRIKECLSKGTFSDVTFKLDDGHLSPLTLLVCCSKSLVF

SEQ ID NO: 763968 - protein, 119 aa, Homo sapiens
MKQPQVNQRLPFLELLKSKGYFQVGQNLPCTPHPTLPKCQGQKLWRGAGTTSFTLSVWPHRYITQEGHKLETGAPRPPATVTNAVSWRSEGIKYRKNEVFLDVIESVNLLVGLFSFLLL

SEQ ID NO: 763969 - protein, 423 aa, Homo sapiens
MSASAVYVLDLKGKVLICRNYRGDVDMSEVEHFMPILMEKEEEGMLSPILAHGGVRFMWIKHNNLYLVATSKKNACVSLVFSFLYKVVQVFSEYFKELEEESIRDNFVIIYELLDELMDFGYPQTTDSKILQEYITQEGHKLETGAPRPPATVTNAVSWRSEGIKYRKNEVFLDVIESVNLLVSANGNVLRSEIVGSIKMRVFLSGMPELRLGLNDKVLFDNTGRGKSKSVELEDVKFHQCVRLSRFENDRTISFIPPDGEFELMSYRLNTHVKPLIWIESVIEKHSHSRIEYMIKAKSQFKRRSTANNVEIHIPVPNDADSPKFKTTVGSVKWVPENSEIVWSIKSFPGGKEYLMRAHFGLPSVEAEDKEGKPPISVKFEIPYFTTSGIQVRYLKIIEKSGYQALPWVRYITQNGDYQLRTQ

SEQ ID NO: 763970 - protein, 351 aa, Homo sapiens
MKQPQVNQRLPFLELLKSKGYFQVGQNLPCTPHPTLPKCQGQKLWRGAGTTSFTLSVWPHRYITQEGHKLETGAPRPPATVTNAVSWRSEGIKYRKNEVFLDVIESVNLLVSANGNVLRSEIVGSIKMRVFLSGMPELRLGLNDKVLFDNTGRGKSKSVELEDVKFHQCVRLSRFENDRTISFIPPDGEFELMSYRLNTHVKPLIWIESVIEKHSHSRIEYMIKAKSQFKRRSTANNVEIHIPVPNDADSPKFKTTVGSVKWVPENSEIVWSIKSFPGGKEYLMRAHFGLPSVEAEDKEGKPPISVKFEIPYFTTSGIQVRYLKIIEKSGYQALPWVRYITQNGDYQLRTQ

SEQ ID NO: 763971 - protein, 179 aa, Homo sapiens
ALELAFGLDHVSMRLWECFSITDSIHIKGLSVGVETVGHELELAVGWDEGDGAVILETSLSTANNVEIHIPVPNDADSPKFKTTVGSVKWVPENSEIVWSIKSFPGGKEYLMRAHFGLPSVEAEDKEGKPPISVKFEIPYFTTSGIQVRYLKIIEKSGYQALPWVRYITQNGDYQLRTQ

SEQ ID NO: 763972 - protein, 142 aa, Homo sapiens
PANQKLQLTSHGAHRYGQWFHNASTANNVEIHIPVPNDADSPKFKTTVGSVKWVPENSEIVWSIKSFPGGKEYLMRAHFGLPSVEAEDKEGKPPISVKFEIPYFTTSGIQVRYLKIIEKSGYQALPWVRYITQNGDYQLRTQ

SEQ ID NO: 763973 - protein, 106 aa, Homo sapiens
MISDRVESRCCLGALYHASMMRLPAPDPVRGCRSQHPGLGAPGGSTRGHTCQTHQMEGPSLVSGHPPSLCPGTPAFPRPSALPSTLVSEAPFPEEAGLQEVSFLCP

SEQ ID NO: 763974 - protein, 117 aa, Homo sapiens
MSASAVYVLDLKGKVLICRNYRGDVDMSEVEHFMPILMEKEEEGMLSPILAHGGVRFMWIKHNNLYLVATSKKNACVSLVFSFLYKVVQVSLARRGRGLGWRLSWLCLWTSPYLATL

SEQ ID NO: 763975 - protein, 423 aa, Homo sapiens; identical to SEQ ID NO: 763969

SEQ ID NO: 763976 - protein, 423 aa, Homo sapiens; identical to SEQ ID NO: 763969

SEQ ID NO: 763977 - protein, 423 aa, Homo sapiens; identical to SEQ ID NO: 763969

SEQ ID NO: 763978 - protein, 183 aa, Homo sapiens
RLGEAGVIDRGHISFIPPDGEFELMSYRLNTHVKPLIWIESVIEKHSHSRIEYMIKAKSQFKRRSTANNVEIHIPVPNDADSPKFKTTVGSVKWVPENSEIVWSIKSFPGGKEYLMRAHFGLPSVEAEDKEGKPPISVKFEIPYFTTSGIQVRYLKIIEKSGYQALPWVRYITQNGDYQLRTQ

SEQ ID NO: 763979 - protein, 397 aa, Homo sapiens
MSASAVYVLDLKGKVLICRNYRGDVDMSEVEHFMPILMEKEEEGMLSPILAHGGVRFMWIKHNNLYLVATSKKNACVSLVFSFLYKVVQVFSEYFKELEEESIRDNFVIIYELLDELMDFGYPQTTDSKILQEYITQEGHKLETGAPRPPATVTNAVSWRSEGIKYRKNEVFLDVIESVNLLVSANGNVLRSEIVGSIKMRVFLSGMPELRLGLNDKVLFDNTGRGKSKSVELEDVKFHQCVRLSRFENDRTISFIPPDGEFELMSYRLNTHVKPLIWIESVIEKHSHSRIEYMIKAKSQFKRRSTANNVEIHIPVPNDADSPKFKTTVGSVKWVPENSEIVWSIKSFPGGKEYLMRAHFGLPSVEAEDKEGKPPISVKFEIPYFTTSGIQTQPDQY

SEQ ID NO: 763980 - protein, 191 aa, Homo sapiens
MSASAVYVLDLKGKVLICRNYRGDVDMSEVEHFMPILMEKEEEGMLSPILAHGGVRFMWIKHNNLYLVATSKKNACVSLVFSFLYKVVQVFSEYFKELEEESIRDNFVIIYELLDELMDFGYPQTTDSKILQEYITQEGHKLETGAPRPPATVTNAVSWRSEGIKYRKNEVFLDVIESVNLLVGLFSFLLL

SEQ ID NO: 763981 - protein, 150 aa, Homo sapiens
CRTENASIFSLPSPPQVLICRNYRGDVDMSEVEHFMPILMEKEEEGMLSPILAHGGVRFMWIKHNNLYRIPLLGVLPGDSCVGVGVCAYPHACKQGWFVHSASIGHSHALLELPAACGDRQTMHDDMCDGCGERSRCDLNLFSPGAQEGK

SEQ ID NO: 763982 - protein, 83 aa, Homo sapiens
SLLREMRRPVGLRVYRVGQSLAKFPASGAARVGTHGKLNSLVGVLEAPKPGSRRGRLQPLWRPPRLRPRLRPPQVERWPGGES

SEQ ID NO: 763983 - protein, 74 aa, Homo sapiens
MEATAATAAAEASPGGAVAWRGILILGQPPVKRRRSVMPLEDWMNILQEPDEGVSNRDVRRLVGVDQSTKEKQL

SEQ ID NO: 763984 - protein, 155 aa, Homo sapiens [sequence omitted]

SEQ ID NO: 763985 - protein, 83 aa, Homo sapiens
ATSFILSDLQAYLMSSPKRWWVRENFAKGCQSINRSYDYVAEKWDLKEERDLQSGGLLPFFEWWLKIFPQTVPIWSGCPTAFY

SEQ ID NO: 763986 - protein, 933 aa, Homo sapiens
MTELKAKGPRAPHVAGGPPSPEVGSPLLCRPAAGPFPGSQTSDTLPEVSAIPISLDGLLFPRPCQGQDPSDEKTQDQQSLSDVEGAYSRAEATRGAGGSSSSPPEKDSGLLDSVLDTLLAPSGPGQSQPSPPACEVTSSWCLFGPELPEDPPAAPATQRVLSPLMSRSGCKVGDSSGTAAAHKVLPRGLSPARQLLLPASESPHWSGAPVKPSPQAAAVEVEEEDGSESEESAGPLLKGKPRALGGAAAGGGAAAVPPGAAAGGVALVPKEDSRFSAPRVALVEQDAPMAPGRSPLATTVMDFIHVPILPLNHALLAARTRQLLEDESYDGGAGAASAFAPPRSSPCASSTPVAVGDFPDCAYPPDAEPKDDAYPLYSDFQPPALKIKEEEEGAEASARSPRSYLVAGANPAAFPDFPLGPPPPLPPRATPSRPGEAAVTAAPASASVSSASSSGSTLECILYKAEGAPPQQGPFAPPPCKAPGASGCLLPRDGLPSTSASAAAAGAAPALYPALGLNGLPQLGYQAAVLKEGLPQVYPPYLNYLRPDSEASQSPQYSFESLPQKICLICGDEASGCHYGVLTCGSCKVFFKRAMEGQHNYLCAGRNDCIVDKIRRKNCPACRLRKCCQAGMVLGGRKFKKFNKVRVVRALDAVALPQPVGVPNESQALSQRFTFSPGQDIQLIPPLINLLMSIEPDVIYAGHDNTKPDTSSSLLTSLNQLGERQLLSVVKWSKSLPGFRNLHIDDQITLIQYSWMSLMVFGLGWRSYKHVSGQMLYFAPDLILNEQRMKESSFYSLCLTMWQIPQEFVKLQVSQEEFLCMKVLLLLNTIPLEGLRSQTQFEEMRSSYIRELIKAIGLRQKGVVSSSQRFYQLTKLLDNLHDLVKQLHLYCLNTFIQSRALSVEFPEMMSEVIAAQLPKILAGMVKPLLFHKK

SEQ ID NO: 763987 - protein, 174 aa, Homo sapiens
AYPLYSDFQPPALKIKEEEEGAEASARSPRSYLVAGANPAAFPDFPLGPPPPLPPRATPSRPGEAAVTAAPASASVSSASSSGSTLECILYKAEGAPPQQGPFAPPPCKAPGASGCLLPRDGLPSTSASAAAAGAAPALYPALGLNGLPQLGYQAAVLKEGLPQVYPPYLNYLR

SEQ ID NO: 763988 - protein, 242 aa, Homo sapiens
MSIEPDVIYAGHDNTKPDTSSSLLTSLNQLGERQLLSVVKWSKSLPGFRNLHIDDQITLIQYSWMSLMVFGLGWRSYKHVSGQMLYFAPDLILNEQRMKESSFYSLCLTMWQIPQEFVKLQVSQEEFLCMKVLLLLNTIPLEGLRSQTQFEEMRSSYIRELIKAIGLRQKGVVSSSQRFYQLTKLLDNLHDLVKQLHLYCLNTFIQSRALSVEFPEMMSEVIAAQLPKILAGMVKPLLFHKK

SEQ ID NO: 763989 - protein, 49 aa, Homo sapiens
MVSLTQELCPVAMRVAEGHNKMLSNVAERVTVPRNFIRGALLEQAGQDI

SEQ ID NO: 763990 - protein, 355 aa, Homo sapiens
RPRALPDARARGHDVRFAEFLAYLLDPRTRREEPFNEHWERAHALCHPCRLRYDVVGKFETLAEDAAFVLGLAGASDLSFPGPPRPRGAAASRDLAARLFRDISPFYQRRLFDLYKMDFLLFNYSAPSYLRLLKRSWRSCGHAGQVPFRQDPRGMQVLPAPGPLFKSHCVHSPGRRASGRRAHLARLGGSPSQVALHACACLGLSPEACFLHLLQLTGTSPGPVDGQGLDNQGFRLLKAILGVSPAPEPVHGASEHNADTGVSVARACVLPTSPTLARTAAAKDESPPLAGLTMGPSREPGGSCLPLPSGLLSSPTRLALPRRHLRSQSGKTLGLQAPCQQSPWCNAVTGFMGLW

SEQ ID NO: 763991 - protein, 95 aa, Homo sapiens
SELITHHRIHTGEKPYECSDCGKSFTKKSQLQVHQRIHTGEKPYVCAECGKAFTDRSNLNKHQTTHTGDKPYKCGICGKGFVQKSVFSVHQSSHA

SEQ ID NO: 763992 - protein, 414 aa, Homo sapiens
KPYECSNCGKSFISKSQLQVHQRVHTRVKPYICTEYGKVFSNNSNLVTHKKVQSREKSSICTECGKAFTYRSELIIHQRIHTGEKPYECSDCGKAFTQKSALTVHQRIHTGEKSYICMKCGLAFIQKAHLIAHQIIHTGEKPHKCGHCGKLFTSKSQLHVHKRIHTGEKPYMCNKCGKAFTNRSNLITHQKTHTGEKSYICSKCGKAFTQRSDLITHQRIHTGEKPYECNTCGKAFTQKSHLNIHQKIHTGERQYECHECGKAFNQKSILIVHQKIHTGEKPYVCTECGRAFIRKSNFITHQRIHTGEKPYECSDCGKSFTSKSQLLVHQPVHTGEKPYVCAECGKAFSGRSNLSKHQKTHTGKGHDAWPFFLFYLTLMCVTLHQFRKQFLEISSLPLLQSPHSSMVSVTSSHL

SEQ ID NO: 763993 - protein, 71 aa, Homo sapiens
GVSDGSLWSVTEPVGSVMVIGFWVSLGSPWARFSSRLQPISSEQLCLSSQMTAKLQTPYRKRVETQCGHAS

SEQ ID NO: 763994 - protein, 153 aa, Homo sapiens
MPANWTSPQKSSALAPEDHGSSYEGSVSFRDVAIDFSREEWRHLDPSQRNLYRDVMLETYSHLLSVGYQVPEAEVVMLEQGKEPWALQGERPRQSCPAPCLVNSHHLQESFREVKVRSSVVNEDKSTERFLSTSMVTLCGKLVRSEEARVTMG

SEQ ID NO: 763995 - protein, 132 aa, Homo sapiens
MPANWTSPQKSSALAPEDHGSSYEGSVSFRDVAIDFSREEWRHLDPSQRNLYRDVMLETYSHLLSVGYQVPEAEVVMLEQGKEPWALQGERPRQSCPVTHRLPLPSTMTKSFLDLTRSQADTSAMLVQPPEA

SEQ ID NO: 763996 - protein, 211 aa, Homo sapiens
EPRAQGSESPISASPEVSAISTMASPFALLMVLVVLSCKSSCSLGCDLPETHSLDNRRTLMLLAQMSRISPSSCLMDRHDFGFPQEEFDGNQFQKAPAISVLHELIQQIFNLFTTKDSSAAWDEDLLDKFCTELYQQLNDLEACVMQEERVGETPLMNADSILAVKKYFRRITLYLTEKKYSPCAWEVVRAEIMRSLSLSTNLQERLRRKE

SEQ ID NO: 763997 - protein, 577 aa, Homo sapiens
MQWLMRFRTLWGIHKSFHNIHPAPSQLRCRSLSEFGAPRWNDYEVPEEFNFASYVLDYWAQKEKEGKRGPNPAFWWVNGQGDEVKWSFREMGDLTRRVANVFTQTCGLQQGDHLALMLPRVPEWWLVAVGCMRTGIIFIPATILLKAKDILYRLQLSKAKGIVTIDALASEVDSIASQCPSLKTKLLVSDHSREGWLDFRSLVKSASPEHTCVKSKTLDPMVIFFTSGTTGFPKMAKHSHGLALQPSFPGSRKLRSLKTSDVSWCLSDSGWIVATIWTLVEPWTAGCTVFIHHLPQFDTKVIIQTLLKYPINHFWGVSSIYRMILQQDFTSIRFPALEHCYTGGEVVLPKDQEEWKRRTGLLLYENYGQSETGLICATYWGMKIKPGFMGKATPPYDVQVIDDKGSILPPNTEGNIGIRIKPVRPVSLFMCYEGDPEKTAKVECGDFYNTGDRGKMDEEGYICFLGRSDDIINASGYRIGPAEVESALVEHPAVAESAVVGSPDPIRGEVVKAFIVLTPQFLSHDKDQLTKELQQHVKSVTAPYKYPRKVEFVSELPKTITGKIERKELRKKETGQM

SEQ ID NO: 763998 - protein, 148 aa, Homo sapiens
MCYEGDPEKTAKVECGDFYNTGDRGKMDEEGYICFLGRSDDIINASGYRIGPAEVESALVEHPAVAESAVVGSPDPIRGEVVKAFIVLTPQFLSHDKDQLTKELQQHVKSVTAPYKYPRKVEFVSELPKTITGKIERKELRKKETGQM

SEQ ID NO: 763999 - protein, 115 aa, Homo sapiens
MPRRRRRRGSSGAGGRGRTCSRTVRAELSFSVSQVERSLREGHYAQRLSRTAPVYLAAVIEYLTAKVLELAGNEAQNSGERNITPLLLDMVVHNDRLLSTLFNTTTISQVAPGED

SEQ ID NO: 764000 - protein, 244 aa, Homo sapiens
MGALGLEGRGGRLQGRGSLLLAVAGATSLVTLLLAVPITVLAVLALVPQDQGGLVTETADPGAQAQQGLGFQKLPEEEPETDLSPGLPAAHLIGAPLKGQGLGWETTKEQAFLTSGTQFSDAEGLALPQDGLYYLYCLVGYRGRAPPGGGDPQGRSVTLRSSLYRAGGAYGPGTPELLLEGAETVTPVLDPARRQGYGPLWYTSVGFGGLVQLRRGERVYVNISHPDMVDFARGKTFFGAVMVG

SEQ ID NO: 764001 - protein, 308 aa, Homo sapiens
MSKDPFGSTLRACLPNLNFFPSSENPGIQLPHPSSGKTGSWVRGAGVCGKSQPGVQVYREGVGPSLRYESPLLWLWFSLNGGTGAGGQGWEAPGEGFPPASCGRSHFSGDLVAGGAYHCPGCAGLSAPGSGRTGFQKLPEEEPETDLSPGLPAAHLIGAPLKGQGLGWETTKEQAFLTSGTQFSDAEGLALPQDGLYYLYCLVGYRGRAPPGGGDPQGRSVTLRSSLYRAGGAYGPGTPELLLEGAETVTPVLDPARRQGYGPLWYTSVGFGGLVQLRRGERVYVNISHPDMVDFARGKTFFGAVMVG

SEQ ID NO: 764002 - protein, 190 aa, Homo sapiens
MGGCLPPIVDSLPLPGFQKLPEEEPETDLSPGLPAAHLIGAPLKGQGLGWETTKEQAFLTSGTQFSDAEGLALPQDGLYYLYCLVGYRGRAPPGGGDPQGRSVTLRSSLYRAGGAYGPGTPELLLEGAETVTPVLDPARRQGYGPLWYTSVGFGGLVQLRRGERVYVNISHPDMVDFARGKTFFGAVMVG

SEQ ID NO: 764003 - protein, 311 aa, Homo sapiens
MKKRVEDAYILTCNVSLEYEKTEVNSGFFYKSAEEREKLVKAERKFIEDRVKKIIELKRKVCGDSDKGFVVINQKGIDPFSLDALSKEGIVALRRAKRRNMERLTLACGGVALNSFDDLSPDCLGHAGLVYEYTLGEEKFTFIEKCNNPRSVTLLIKGPNKHTLTQIKDAVRDGLRAVKNAIDDGCVVPGAGAVEVAMAEALIKHKPSVKGRAQLGVQAFADALLIIPKVLAQNSGFDLQETLVKIQAEHSESGQLVGVDLNTGEPMVAAEVGVWDNYCVKKQLLHSCTVIATNILLVDEIMRAGMSSLKG

SEQ ID NO: 764004 - protein, 311 aa, Homo sapiens; identical to SEQ ID NO: 764003

SEQ ID NO: 764005 - protein, 46 aa, Homo sapiens
MRGEFALSNSGAHSKRSERNKKRTSKGRKCKGGTERKKLLGTTYYA

SEQ ID NO: 764006 - protein, 201 aa, Homo sapiens
MKKRVEDAYILTCNVSLEYEKTEVNSGFFYKSAEEREKLVKAERKFIEDRVKKIIELKRKVCGDSDKGFVVINQKGIDPFSLDALSKEGIVALRRAKRRNMERLTLACGGVALNSFDDLSPDCLGHAGLVYEYTLGEEKFTFIEKCNNPRSVTLLIKGPNKHTLTQIKDAVRDGLRGAMAWAGGGPGGRGRRGTLKTRWGR

SEQ ID NO: 764007 - protein, 311 aa, Homo sapiens; identical to SEQ ID NO: 764003

SEQ ID NO: 764008 - protein, 311 aa, Homo sapiens; identical to SEQ ID NO: 764003

SEQ ID NO: 764009 - protein, 311 aa, Homo sapiens; identical to SEQ ID NO: 764003

SEQ ID NO: 764010 - protein, 155 aa, Homo sapiens
MKMLVSGAGDIKLTKDGNVLLHEMQIQHPTASLIAKVATAQDDITGDGTTSNVLIIGELLKQADLYISEGLHPRIITEGFEAAKEKALQFLEEVKVSREMDRETLIDVARTSLRTKVHAELADVLTEAVVDSILAIKKQDEPIDLFMIEIMEMKP

SEQ ID NO: 764011 - protein, 311 aa, Homo sapiens; identical to SEQ ID NO: 764003

SEQ ID NO: 764012 - protein, 155 aa, Homo sapiens; identical to SEQ ID NO: 764010

SEQ ID NO: 764013 - protein, 335 aa, Homo sapiens
MKKRVEDAYILTCNVSLEYEKTEVNSGFFYKSAEEREKLVKAERKFIEDRVKKIIELKRKVCGDSDKGFVVINQKGIDPFSLDALSKEGIVALRRAKRRNMERLTLACGGVALNSFDDLSPDCLGHAGLVYEYTLGEEKFTFIEKCNNPRSVTLLIKGPNKHTLTQIKDAVRDGLRAVKNAIDDGCVVPGAGAVEVAMAEALIKHKPSVKGRAQLGVQAFADALLIIPKVLAQNSGFDLQETLVKIQAEHSESGQLVGVDLNTGEPMVAAEVGVWDNYCVKKQLLHSCTCELATNILLVAEITPLGDRGRLLLEKPQTLSFPAYNLITVEICRKY

SEQ ID NO: 764014 - protein, 155 aa, Homo sapiens; identical to SEQ ID NO: 764010

SEQ ID NO: 764015 - protein, 250 aa, Homo sapiens
MKKRVEDAYILTCNVSLEYEKTEVNSGFFYKSAEEREKLVKAERKFIEDRVKKIIELKRKVCGDSDKGFVVINQKGIDPFSLDALSKEGIVALRRAKRRNMERLTLACGGVALNSFDDLSPDCLGHAGLVYEYTLGEEKFTFIEKCNNPRSVTLLIKGPNKHTLTQIKDAVRDGLRAVKNAIDDGCVVPGAGAVEVAMAEALIKHKPSVKGRAQLGVQAFADALLIIPKVCMLLTVNLPKDSADQTFLIM

SEQ ID NO: 764016 - protein, 311 aa, Homo sapiens; identical to SEQ ID NO: 764003

SEQ ID NO: 764017 - protein, 311 aa, Homo sapiens; identical to SEQ ID NO: 764003

SEQ ID NO: 764018 - protein, 155 aa, Homo sapiens; identical to SEQ ID NO: 764010

SEQ ID NO: 764019 - protein, 155 aa, Homo sapiens; identical to SEQ ID NO: 764010

SEQ ID NO: 764020 - protein, 145 aa, Homo sapiens
MKSAWEKCVGGIENTGVYRCVVPGAGAVEVAMAEALIKHKPSVKGRAQLGVQAFADALLIIPKVLAQNSGFDLQETLVKIQAEHSESGQLVGVDLNTGEPMVAAEVGVWDNYCVKKQLLHSCTVIATNILLVDEIMRAGMSSLKG

SEQ ID NO: 764021 - protein, 71 aa, Homo sapiens
GLAGIRHERHSESGQLVGVDLNTGEPMVAAEVGVWDNYCVKKQLLHSCTVIATNILLVDEIMRAGMSSLKG

SEQ ID NO: 764022 - protein, 155 aa, Homo sapiens; identical to SEQ ID NO: 764010

SEQ ID NO: 764023 - protein, 155 aa, Homo sapiens; identical to SEQ ID NO: 764010

SEQ ID NO: 764024 - protein, 311 aa, Homo sapiens; identical to SEQ ID NO: 764003

SEQ ID NO: 764025 - protein, 311 aa, Homo sapiens; identical to SEQ ID NO: 764003

SEQ ID NO: 764026 - protein, 311 aa, Homo sapiens; identical to SEQ ID NO: 764003

SEQ ID NO: 764027 - protein, 311 aa, Homo sapiens; identical to SEQ ID NO: 764003

SEQ ID NO: 764028 - protein, 270 aa, Homo sapiens
MKKRVEDAYILTCNVSLEYEKTEVNSGFFYKSAEEREKLVKAERKFIEDRVKKIIELKRKVCGDSDKGFVVINQKGIDPFSLDALSKEGIVALRRAKRRNMERLTLACGGVALNSFDDLSPDCLGHAGLVYEYTLGEEKFTFIEKCNNPRSVTLLIKGPNKHTLTQIKDAVRDGLRAVKNAIDDGCVVPGAGAVEVAMAEALIKHKPSVKGRAQLGVQAFADALLIIPKVLAQNSGFDLQETLVKIQAEHSESGQLVGVDLNTGKRMQLL

SEQ ID NO: 764029 - protein, 270 aa, Homo sapiens; identical to SEQ ID NO: 764028

SEQ ID NO: 764030 - protein, 155 aa, Homo sapiens; identical to SEQ ID NO: 764010

SEQ ID NO: 764031 - protein, 270 aa, Homo sapiens; identical to SEQ ID NO: 764028

SEQ ID NO: 764032 - protein, 270 aa, Homo sapiens; identical to SEQ ID NO: 764028

SEQ ID NO: 764033 - protein, 311 aa, Homo sapiens; identical to SEQ ID NO: 764003

SEQ ID NO: 764034 - protein, 311 aa, Homo sapiens; identical to SEQ ID NO: 764003

SEQ ID NO: 764035 - protein, 114 aa, Homo sapiens [sequence omitted]

SEQ ID NO: 764036 - protein, 155 aa, Homo sapiens; identical to SEQ ID NO: 764010

SEQ ID NO: 764037 - protein, 260 aa, Homo sapiens
MKMLVSGAGDIKLTKDGNVLLHEMQIQHPTASLIAKVATAQDDITKEREQQQIDQNKRKQQKQTKHNKTKKPTTKKKTQKKKNSTEEKKPNMDDNKYQIDGRIEISIETAEGRYAKNRLTAERKGSETRNQIDKTGTIKADEEELPRSEAQIKESKKKTLKKRLGDIKRGGRLKKKIRKNKRTEEERSLEGQVRESEDDVGTLRRVGEGGDRKKKDVQHTGVRDGVKSRGTRYRYRRMKLRRFRGRLRTNGKRSEKDAIQ

SEQ ID NO: 764038 - protein, 106 aa, Homo sapiens
GCSSGGCSQQHLLCSCQADLPILCTAQVRLESNPYLTWGYLAPKPSGAPGNRLRECPGRGTPSALSVGVFLGLLTVVWKQETPLFPTRHTTAPQPLGSVPDPTLRI

SEQ ID NO: 764039 - protein, 112 aa, Homo sapiens
TQEKIVAGYASRFIVIADFRKDSKNLGDQWHKGIPIEVIPMAYVPVSRAVSQKFGGVVELRMAVNKAGPVVTDNGNFILDWKFDRVHKWSEVNTAIKMIPGCGGHRPIHQHG

SEQ ID NO: 764040 - protein, 280 aa, Homo sapiens [sequence omitted]

SEQ ID NO: 764041 - protein, 280 aa, Homo sapiens [sequence omitted]

SEQ ID NO: 764042 - protein, 213 aa, Homo sapiens
  misc_feature (194)..(194): Xaa can be any naturally occurring amino acid
  misc_feature (197)..(197): Xaa can be any naturally occurring amino acid
  misc_feature (203)..(203): Xaa can be any naturally occurring amino acid
  misc_feature (212)..(212): Xaa can be any naturally occurring amino acid
MPQDLSEALKEATKEVHTQAENAEFMRNFQKGQVTRDGFKLVMASLYHIYVALEEEIERNKESPVFAPVYFPEELHRKAALEQDLAFWYGPRWQEVIPYTPAMQRYVKRLHEVGRTEPELLVAHAYTRYLGDLSGGQVLKKIAQKALDLPSSGEGLAFFTFPNIASATKFKQLYRSRMNSPGKNELPANSRAKXVDXKKRPQXIAFPWLPTXP

SEQ ID NO: 764043 - protein, 160 aa, Homo sapiens
RDAWGQTHASGFCPRGDSQREAPTQHPLPGSASPMGPYTQLSGGDSCCRALCHVNAGMLAPRAMNFVRWKAFFLEREFSWLASLPWALKAFRASSPLTVSLSLERRKEPMASSPTKSTSRQWPKLQRGRRDQPCPSASSVPAAEPGRHPNVAAVSNLQKP

SEQ ID NO: 764044 - protein, 248 aa, Homo sapiens
YTKIGTIQRRLAWPLRKDDTQIREAFHIFESPVFAPVYFPEELHRKAALEQDLAFWYGPRWQEVIPYTPAMQRYVKRLHEVGRTEPELLVAHAYTRYLGDLSGGQVLKKIAQKALDLPSSGEGLAFFTFPNIASATKFKQLYRSRMNSLEMTPAVRQRVIEEAKTAFLLNIQLFEELQELLTHDTKDQSPSRAPGLRQRASNKVQDSAPVETPRGKPPLNTRSQAPLLRWVLTLSFLVATVAVGLYAM

SEQ ID NO: 764045 - protein, 102 aa, Homo sapiens
ADRPVLCLGLDFKTHVMKKSVYKPNFVVFVFISINGRNKKIRNAQLAQYNFILVVGEKEKISGTVNIRTRDNKVHGERTISETIERLQQLKEFRSKQAEEEF

SEQ ID NO: 764046 - protein, 723 aa, Homo sapiens
MFEEKASSPSGKMGGEEKPIGAGEEKQKEGGKKKNKEGSGDGGRAELNPWPEYIYTRLEMYNILKAEHDSILAEKAEKDSKPIKVTLPDGKQVDAESWKTTPYQIACGISQGLADNTVIAKVNNVVWDLDRPLEEDCTLELLKFEDEEAQAVYWHSSAHIMGEAMERVYGGCLCYGPPIENGFYYDMYLEEGGVSSNDFSSLEALCKKIIKEKQAFERLEVKKETLLAMFKYNKFKCRILNEKVNTPTTTVYRCGPLIDLCRGPHVRHTGKIKALKIHKNSSTYWEGKADMETLQRIYGISFPDPKMLKEWEKFQEEAKNRDHRKIGRDQELYFFHELSPGSCFFLPKGAYIYNALIEFIRSEYRKRGFQEVVTPNIFNSRLWMTSGHWQHYSENMFSFEVEKELFALKPMNCPGHCLMFDHRPRSWRELPLRLADFGVLHRNELSGALTGLTRVRRFQQDDAHIFCAMEQIEDEIKGCLDFLRTVYSVFGFSFKLNLSTRPEKFLGDIEVWDQAEKQLENSLNEFGEKWELNSGDGAFYGPKIDIQIKDAIGRYHQCATIQLDFQLPIRFNLTYVSHDGDDKKRPVIVHRAILGSVERMIAILTENYGGKWPFWLSPRQVMVVPVGPTCDEYAQKVRQQFHDAKFMADIDLDPGCTLNKKIRNAQLAQYNFILVVGEKEKISGTVNIRTRDNKVHGERTISETIERLQQLKEFRSKQAEEEF

SEQ ID NO: 764047 - protein, 723 aa, Homo sapiens; identical to SEQ ID NO: 764046

SEQ ID NO: 764048 - protein, 425 aa, Homo sapiens [sequence omitted]

SEQ ID NO: 764049 - protein, 300 aa, Homo sapiens
MYNILKAEHDSILAEKAEKDSKPIKVTLPDGKQVDAESWKTTPYQIACGISQGLADNTVIAKVNNVVWDLDRPLEEDCTLELLKFEDEEAQAVYWHSSAHIMGEAMERVYGGCLCYGPPIENGFYYDMYLEEGGVSSNDFSSLEALCKKIIKEKQAFERLEVKKETLLAMFKYNQVQMPGYLNDKGEYSNYQVYRCGPFDKSLPGPHVRHTGNNYTALKLRHKNPQVREGKRRNEETQKNKDIIPEPNVTAGANSTRSKRNLDKRDRNTAEPAEVMIRDNKAESAKKGRTNKKNTEHTRK

SEQ ID NO: 764050 - protein, 723 aa, Homo sapiens; identical to SEQ ID NO: 764046

SEQ ID NO: 764051 - protein, 664 aa, Homo sapiens
MYNILKAEHDSILAEKAEKDSKPIKVTLPDGKQVDAESWKTTPYQIACGISQGLADNTVIAKVNNVVWDLDRPLEEDCTLELLKFEDEEAQAVYWHSSAHIMGEAMERVYGGCLCYGPPIENGFYYDMYLEEGGVSSNDFSSLEALCKKIIKEKQAFERLEVKKETLLAMFKYNKFKCRILNEKVNTPTTTVYRCGPLIDLCRGPHVRHTGKIKALKIHKNSSTYWEGKADMETLQRIYGISFPDPKMLKEWEKFQEEAKNRDHRKIGRDQELYFFHELSPGSCFFLPKGAYIYNALIEFIRSEYRKRGFQEVVTPNIFNSRLWMTSGHWQHYSENMFSFEVEKELFALKPMNCPGHCLMFDHRPRSWRELPLRLADFGVLHRNELSGALTGLTRVRRFQQDDAHIFCAMEQIEDEIKGCLDFLRTVYSVFGFSFKLNLSTRPEKFLGDIEVWDQAEKQLENSLNEFGEKWELNSGDGAFYGPKIDIQIKDAIGRYHQCATIQLDFQLPIRFNLTYVSHDGDDKKRPVIVHRAILGSVERMIAILTENYGGKWPFWLSPRQVMVVPVGPTCDEYAQKVRQQFHDAKFMADIDLDPGCTLNKKIRNAQLAQYNFILVVGEKEKISGTVNIRTRDNKVHGERTISETIERLQQLKEFRSKQAEEEF

SEQ ID NO: 764052 - protein, 682 aa, Homo sapiens
MFEEKASSPSGKMGGEEKPIGAGEEKQKEGGKKKNKEGSGDGGRAELNPWPEYIYTRLEMYNILKAEHDSILAEKAEKDSKPIKVTLPDGKQVDAESWKTTPYQIACGISQGLADNTVIAKVNNVVWDLDRPLEEDCTLELLKFEDEEAQAVYWHSSAHIMGEAMERVYGGCLCYGPPIENGFYYDMYLEEGGVSSNDFSSLEALCKKIIKEKQAFERLEVKKETLLAMFKYNKFKCRILNEKVNTPTTTVYRCGPLIDLCRGPHVRHTGKIKALKIHKNSSTYWEGKADMETLQRIYGISFPDPKMLKEWEKFQEEAKNRDHRKIGRDQELYFFHELSPGSCFFLPKGAYIYNALIEFIRSEYRKRGFQEVVTPNIFNSRLWMTSGHWQHYSENMFSFEVEKELFALKPMNCPGHCLMFDHRPRSWRELPLRLADFGVLHRNELSGALTGLTRVRRFQQDDAHIFCAMEQIEDEIKGCLDFLRTVYSVFGFSFKLNLSTRPEKFLGDIEVWDQAEKQLENSLNEFGEKWELNSGDGAFYGPKIDIQIKDAIGRYHQCATIQLDFQLPIRFNLTYVSHDGDDKKRPVIVHRAILGSVERMIAILTENYGGKWPFWLSPRQVMVVPVGPTCDEYAQKVRQQFHDAKFMADIDLDPGCTLNEKITQIGSMEKEEQRFRKIDFVL

SEQ ID NO: 764053 - protein, 105 aa, Homo sapiens
LPLNSSHILSFPPPLISIPFSTASPLPILAHIDLDPGCTLNKKIRNAQLAQYNFILVVGEKEKISGTVNIRTRDNKVHGERTISETIERLQQLKEFRSKQAEEEF

SEQ ID NO: 764054 - protein, 315 aa, Homo sapiens
MACAEFSFHVPSLEELAGVMQKGLKDNFADVQVSVVDCPDLTKEPFTFPVKGICGKTRIAEVGGVPYLLPLVNQKKVYDLNKIAKEIKLPGAFILGAGAGPFQTLGFNSEFMPVIQTESEHKPPVNGSYFAHVNPADGGCLLEKYSEKCHDFQCALLANLFASEGQPGKVIEVKAKRRTGPLNFVTCMRETLEKHYGNKPIGMGGTFIIQKGKVKSHIMPAEFSSCPLNSDEEVNKWLHFYEMKAPLVCLPVFVSRDPGFDLRLEHTHFFSRHGEGGHYHYDTTPDIVEYLGYFLPAEFLYRIDQPKETHSIGRD

SEQ ID NO: 764055 - protein, 296 aa, Homo sapiens
MQKGLKDNFADVQVSVVDCPDLTKEPFTFPVKGICGKTRIAEVGGVPYLLPLVNQKKVYDLNKIAKEIKLPGAFILGAGAGPFQTLGFNSEFMPVIQTESEHKPPVNGSYFAHVNPADGGCLLEKYSEKCHDFQCALLANLFASEGQPGKVIEVKAKRRTGPLNFVTCMRETLEKHYGNKPIGMGGTFIIQKGKVKSHIMPAEFSSCPLNSDEEVNKWLHFYEMKAPLVCLPVFVSRDPGFDLRLEHTHFFSRHGEGGHYHYDTTPDIVEYLGYFLPAEFLYRIDQPKETHSIGRD

SEQ ID NO: 764056 - protein, 315 aa, Homo sapiens; identical to SEQ ID NO: 764054

SEQ ID NO: 764057 - protein, 315 aa, Homo sapiens; identical to SEQ ID NO: 764054

SEQ ID NO: 764058 - protein, 265 aa, Homo sapiens
MACAEFSFHVPSLEELAGVMQKGLKDNFADVQVSVVDCPDLTKEPFTFPVKGICGKTRIAEVGGVPYLLPLVNQKKVYDLNKIAKEIKLPGAFILGAGAGPFQTLGFNSEFMPVIQTESEHKPPVNGSYFAHVNPADGGCLLEKYSEKCHDFQCALLANLFASEGQPGKPAEFSSCPLNSDEEVNKWLHFYEMKAPLVCLPVFVSRDPGFDLRLEHTHFFSRHGEGGHYHYDTTPDIVEYLGYFLPAEFLYRIDQPKETHSIGRD

SEQ ID NO: 764059 - protein, 315 aa, Homo sapiens; identical to SEQ ID NO: 764054

SEQ ID NO: 764060 - protein, 296 aa, Homo sapiens; identical to SEQ ID NO: 764055

SEQ ID NO: 764061 - protein, 321 aa, Homo sapiens
MACAEFSFHVPSLEELAGVMQKGLKDNFADVQVSVVDCPDLTKEPFTFPVKGICGKTRIAEVGGVPYLLPLVNQKKVYDLNKIAKEIKLPGAFILGAGAGPFQTLGFNSEFMPVIQTESEHKPPVNGSYFAHVNPADGGCLLEKYSEKCHDFQCALLANLFASEGQPGKVIEVKAKRRTGPLNFVTCMRETLEKHYGNKPIGMGGTFIIQKGKVKSHIMPAEFSSCPLNSDEEVNKWLHFYEMKAPLVCLPVFVSRDPGFDLRLEHTHFFSRHGEGGHYHYDTTPDIVEYLGYFLPAEFLYRIDQPKETPPLRLWRFDRAI

SEQ ID NO: 764062 - protein, 373 aa, Homo sapiens
MSPCPPQQSRNRVIQLSTSELGEMELTWQEIMSITELQGLNAPSEPSFEPQAPAPYLGPPPPTTYCPCSIHPDSGFPLPPPPYELPASTSHVPDPPYSYGNMAIPVSKPLSLSGLLSEPLQDPLALLDIGLPAGPPKPQEDPESDSGLSLNYSDAESLELEGTEAGRRRSEYVEMYPVEYPYSLMPNSLAHSNYTLPAAETPLALEPSSGPVRAKPTARGEAGSRDERRALAMKIPFPTDKIVNLPVDDFNELLARYPLTESQLALVRDIRRRGKNKVAAQNCRKRKLETIVQLERELERLTNERERLLRARGEADRTLEVMRQQLTELYRDIFQHLRDESGNSYSPEEYALQQAADGTIFLVPRGTKMEATD

SEQ ID NO: 764063 - protein, 373 aa, Homo sapiens; identical to SEQ ID NO: 764062

SEQ ID NO: 764064 - protein, 373 aa, Homo sapiens; identical to SEQ ID NO: 764062

SEQ ID NO: 764065 - protein, 106 aa, Homo sapiens
MSPCPPQQSRNRVIQLSTSELGEMELTWQEIMSITELQGLNAPSEPSFEPQAPAPYLGPPPPTTYCPCSIHPDSGFPLPPPPASWLSRLSKRAGVTWGNDGWGHFP

SEQ ID NO: 764066 - protein, 511 aa, Homo sapiens
MKLFWLLFTIGFCWAQYSSNTQQGRTSIVHLFEWRWVDIALECERYLAPKGFGGVQVSPPNENVAIHNPFRPWWERYQPVSYKLCTRSGNEDEFRNMVTRCNNVGVRIYVDAVINHMCGNAVSAGTSSTCGSYFNPGSRDFPAVPYSGWDFNDGKCKTGSGDIENYNDATQVRDCRLSGLLDLALGKDYVRSKIAEYMNHLIDIGVAGFRIDASKHMWPGDIKAILDKLHNLNSNWFPEGSKPFIYQEVIDLGGEPIKSSDYFGNGRVTEFKYGAKLGTVIRKWNGEKMSYLKNWEKGWGFMPSDRALVFVDNHDNQRGHGAGGASILTFWDARLYKMAVGFMLAHPYGFTRVMSSYRWPRYFENGKDVNDWVGPPNDNGVTKEVTINPDTTCGNDWVCEHRWRQIRNMVNFRNVVDGQPFTNWYDNGSNQVAFGRGNRGFIVFNNDDWTFSLTLQTGLPAGTYCDVISGDKINGNCTGIKIYVSDDGKAHFSISNSAEDPFIAIHAESKL

SEQ ID NO: 764067 - protein, 511 aa, Homo sapiens; identical to SEQ ID NO: 764066

SEQ ID NO: 764068 - protein, 415 aa, Homo sapiens
MVTRCNNVGVRIYVDAVINHMCGNAVSAGTSSTCGSYFNPGSRDFPAVPYSGWDFNDGKCKTGSGDIENYNDATQVRDCRLSGLLDLALGKDYVRSKIAEYMNHLIDIGVAGFRIDASKHMWPGDIKAILDKLHNLNSNWFPEGSKPFIYQEVIDLGGEPIKSSDYFGNGRVTEFKYGAKLGTVIRKWNGEKMSYLKNWEKGWGFMPSDRALVFVDNHDNQRGHGAGGASILTFWDARLYKMAVGFMLAHPYGFTRVMSSYRWPRYFENGKDVNDWVGPPNDNGVTKEVTINPDTTCGNDWVCEHRWRQIRNMVNFRNVVDGQPFTNWYDNGSNQVAFGRGNRGFIVFNNDDWTFSLTLQTGLPAGTYCDVISGDKINGNCTGIKIYVSDDGKAHFSISNSAEDPFIAIHAESKL

SEQ ID NO: 764069 - protein, 138 aa, Homo sapiens
VFTGHHEPHCPNFFSPVNSGQPPNYEMLKEEHEVAVLGAPHNPAPPTSTVIHIRSETSVPDHVVWSLFNTLFMNPCCLGFIAFAYSVKSRDRKMVGDVTGAQAYASTAKCLNIWALILGILMTILLIVIPVLIFQAYG

SEQ ID NO: 764070 - protein, 267 aa, Homo sapiens
MTLGRRLACLFLACVLPALLLGGTALASEIVGGRRARPHAWPFMVSLQLRGGHFCGATLIAPNFVMSAAHCVANVNVRAVRVVLGAHNLSRREPTRQVFAVQRIFENGYDPVNLLNDIVILQLNGSATINANVQVAQLPAQGRRLGNGVQCLAMGWGLLGRNRGIASVLQELNVTVVTSLCRRSNVCTLVRGRQAGVCFGDSGSPLVCNGLIHGIASFVRGGCASGLYPDAFAPVAQFVNWIDSIIQRSEDNPCPHPRDPDPASRTH

SEQ ID NO: 764071 - protein, 615 aa, Homo sapiens
RVTSRSGPAPARRNSVTTGYGGVRALCGWTPSSGATPRNRLLLQLLGSPGRRYYSLPPHQKVPLPSLSPTMQAGTIARWKKKEGDKINEGDLIAEVETDKATVGFESLEECYMAKILVAEGTRDVPIGAIICITVGKPEDIEAFKNYTLDSSAAPTPQAAPAPTPAATASPPTPSAQAPGSSYPPHMQVLLPALSPTMTMGTVQRWEKKVGEKLSEGDLLAEIETDKATIGFEVQEEGYLAKILVPEGTRDVPLGTPLCIIVEKEADISAFADYRPTEVTDLKPQAPPPTPAPVAAVPPTPQPLAPTPSAPCPATPAGPKGRVFVSPLAKKLAVEKGIDLTQVKGTGPDGRITKKDIDSFVPSKVAPAPAAVVPPTGPGMAPVPTGVFTDIPISNIRRVIAQRLMQSKQTIPHYYLSIDVNMGEVLLVRKELNKILEGRSKISVNDFIIKASALACLKVPEANSSWMDTVIRQNHVVDVSVAVSTPAGLITPIVFNAHIKGVETIANDVVSLATKAREGKLQPHEFQGGTFTISNLGMFGIKNFSAIINPPQACILAIGASEDKLVPADNEKGFDVASMMSVTLSCDHRVVDGAVGAQWLAEFRKYLEKPITMLL

SEQ ID NO: 764072 - protein, 615 aa, Homo sapiens; identical to SEQ ID NO: 764071

SEQ ID NO: 764073 - protein, 189 aa, Homo sapiens
MARSFSLLMAVLVLSYKSICSLGCDLPQTHSLRNRRALILLAQMGRISPFSCLKDRHEFRFPEEEFDGHQFQKTQAISVLHEMIQQTFNLFSTEDSSAAWEQSLLEKFSTELYQQLNDLEACVIQEVGVEETPLMNEDFILAVRKYFQRITLYLTEKKYSPCAWEVVRAEIMRSFSFSTNLKKGLRRKD

SEQ ID NO: 764074 - protein, 698 aa, Homo sapiens
MFTIIKTQGNEILMLIFMFCQYKFPELELLYAHFKAFDNFSSSLLFLSTDLINFGHIPGITVEINYVDTNLTFQGYFPSLESAPSQLSTVAHVCNPSTLGGQGRRIMRSRDQDHPGQHGETPSLLKIQKLAGCGGMHLESQLLRRLRQENSLNLGGGNCSEAKIVPLHSSLATEQDSVKKRKKERKKVLLNISFIDKSCSFNDSIIFEFLLLAKCLISTGDTAVRFLNRGTTLIELAYRLMKNINKETRIAISSVSQCIVRDVAPKMYGITHEVIPNLISTFKKKYGTPVKKLNDSKLVSESFPSIKKEKEKYEPVLSITEKEYFSTIFDVIKKLKYIRGTPRSALGPKDCVSEEVISETIYEKYKMSRSWLKMSMRGKERGLSTAFWAESTANRNAESEKYHTIKNECNLEAVGLLHLKVFWLGRNEDKKVNGDDNMKEFINNFLDLLKNFGNLLIGINKEWHNQIRILQRSLGYSVESGLEQGPVRNREVNCNEATRDESSMLYSDAGRTEGQGLVFLVMKLTKLCDFQDGECRMGNSKGRALEIWFEQLGKQMHSPRKTFAEKPVERGGPETLKLNKLPGDSCEVNNGELEQAVEPESLEKKWVDIEMGCWNYYYYYYYCFFEMESCCVTQAGVQWCDLGSLQPPPAGLKRFSCLSLPSSWDYRRPPSCPAEFLYFLVETGFHHFGQAGLELLTS

SEQ ID NO: 764075 - protein, 353 aa, Homo sapiens
SGDALSSRVPGPASFKMYTIYEILCKLSLEGHHSTPSGAYGSVKAYTNFDAEGDALNIERTIRTKGVGKFTIVNILTNSRNARREDVAFAYAEKDHKGTYISTEVSLTGHLETVILGLLKTPAQYDASELKASMKGLGTEEDSLVEIICSTTNQELQEINRVYKEMYKTDLEKDIISDTYGDFCKLMFALANVRRPEDGSVVDYELIDQDARDFCDAGVKRKRTDVPKWISMMTEESMSHLQKVFDRYKSYSPSRESIKKEVKGDLENAFLNLVQCIQNKPLYFADWLYYSMKGQGARDKVLIRIIVSRSEVDMLKIRSEFKRKYGMSPYYYIQQDTKNDYQKALLYLCGGDD

SEQ ID NO: 764076 - protein, 502 aa, Homo sapiens
LFRGHRQRSVSDSKSGCRPAHSPRVTLSPRLRAPSRPPTGVGNMDEKSNKLLLALVMLFLFAVIVLQYVCPGTECQLLRLQAFSSPVPDPYRSEDESSARFVPRYNFTRGDLLRKVDFDIKGDDLIVFLHIQKTGGTTFGRHLVRNIQLEQPCECRVGQKKCTCHRPGKRETWLFSRFSTGWSCGLHADWTELTSCVPSVVDGKRDARLRPSRNFHYITILRDPVSRYLSEWRHVQRGATWKASLHVCDGRPPTSEELPSCYTGDDWSGCPLKEFMDCPYNLANNRQVRMLSDLTLVGCYNLSVMPEKQRNKVLLESAKSNLKHMAFFGLTEFQRKTQYLFEKTFNMNFISPFTQYNTTRASSVEINEEIQKRIEGLNFLDMELYSYAKDLFLQRYQFMRQKEHQEARRKRQEQRKFLKGRLLQTHFQSQGQGQSQNPNQNQSQNPNPNANQNLTQNLMQNLTQSLSQKENRESPKQNSGKEQNDNTSNGTNDYIGSVEKWR

SEQ ID NO: 764077 - protein, 513 aa, Homo sapiens
LFRGHRQRSVSDSKSGCRPAHSPRVTLSPRLRAPSRPPTGVGNMDEKSNKLLLALVMLFLFAVIVLQYVCPGTECQLLRLQAFSSPVPDPYRSEDESSARFVPRYNFTRGDLLRKVDFDIKGDDLIVFLHIQKTGGTTFGRHLVRNIQLEQPCECRVGQKKCTCHRPGKRETWLFSRFSTGWSCGLHADWTELTSCVPSVVDGKRDARLRPSRWRIFQILDAARNFHYITILRDPVSRYLSEWRHVQRGATWKASLHVCDGRPPTSEELPSCYTGDDWSGCPLKEFMDCPYNLANNRQVRMLSDLTLVGCYNLSVMPEKQRNKVLLESAKSNLKHMAFFGLTEFQRKTQYLFEKTFNMNFISPFTQYNTTRASSVEINEEIQKRIEGLNFLDMELYSYAKDLFLQRYQFMRQKEHQEARRKRQEQRKFLKGRLLQTHFQSQGQGQSQNPNQNQSQNPNPNANQNLTQNLMQNLTQSLSQKENRESPKQNSGKEQNDNTSNGTNDYIGSVEKWR

SEQ ID NO: 764078 - protein, 513 aa, Homo sapiens; identical to SEQ ID NO: 764077

SEQ ID NO: 764079 - protein, 542 aa, Homo sapiens
LFRGHRQRSVSDSKSGCRPAHSPRVTLSPRLRAPSRPPTGVGNMDEKSNKLLLALVMLFLFAVIVLQYVCPGTECQLLRLQAFSSPVPDPYRSEDESSARFVPRYNFTRGDLLRKVDFDIKGDDLIVFLHIQKTGGTTFGRHLVRNIQLEQPCECRVGQKKCTCHRPGKRETWLFSRFSTGWSCGLHADWTELTSCVPSVVDGKRDARLRPSRWRIFQILDAASKDKRGSPNTNAGANSPSSTKTRNTSKSGKNFHYITILRDPVSRYLSEWRHVQRGATWKASLHVCDGRPPTSEELPSCYTGDDWSGCPLKEFMDCPYNLANNRQVRMLSDLTLVGCYNLSVMPEKQRNKVLLESAKSNLKHMAFFGLTEFQRKTQYLFEKTFNMNFISPFTQYNTTRASSVEINEEIQKRIEGLNFLDMELYSYAKDLFLQRYQFMRQKEHQEARRKRQEQRKFLKGRLLQTHFQSQGQGQSQNPNQNQSQNPNPNANQNLTQNLMQNLTQSLSQKENRESPKQNSGKEQNDNTSNGTNDYIGSVEKWR

SEQ ID NO: 764080 - protein, 484 aa, Homo sapiens
LFRGHRQRSVSDSKSGCRPAHSPRVTLSPRLRAPSRPPTGVGNMDEKSNKLLLALVMLFLFAVIVLQYVCPGTECQLLRLQAFSSPVPDPYRSEDESSARFVPRYNFTRGDLLRKVDFDIKGDDLIVFLHIQKTGGTTFGRHLVRNIQLEQPCECRVGQKKCTCHRPGKRETWLFSRFSTGWSCGLHADWTELTSCVPSVVDGKRDARLRPSRNFHYITILRDPVSRYLSEWRHVQRGATWKASLHVCDGRPPTSEELPSCYTGDDWSGCPLKEFMDCPYNLANNRQVRMLSDLTLVGCYNLSVMPEKQRNKVLLESAKSNLKHMAFFGLTEFQRKTQYLFEKTFNMNFISPFTQYNTTRASSVEINEEIQNLFLQRYQFMRQKEHQEARRKRQEQRKFLKGRLLQTHFQSQGQGQSQNPNQNQSQNPNPNANQNLTQNLMQNLTQSLSQKENRESPKQNSGKEQNDNTSNGTNDYIGSVEKWR

SEQ ID NO: 764081 - protein, 977 aa, Homo sapiens
MAMALELQAQASPQPEPEELLIVKLELLVLEQFLTILPREVQTWVQARHPESGEEAVALVEDWHRETRTAGQSGLELHTEETRPLKTGEEAQSFQLQPVDPWPEGQSQKKGVKNTCPDLPNHLNAEVAPQPLKESAVLTPRVPTLPKMGSVGDWEVTAESQEALGPGKHAEKELCKDPPGDDCGNSVCLGVPVSKPSNTSEKEQGPEFWGLSLINSGKRSTADYSLDNEPAQALTWRDSRAWEEQYQWDVEDMKVSGVHWGYEETKTFLAILSESPFSEKLRTCHQNRQVYRAIAEQLRARGFLRTLEQCRYRVKNLLRNYRKAKSSHPPGTCPFYEELEALVRARTAIRATDGPGEAVALPRLGDSDAEMDEQEEGGWDPEEMAEDCNGAGLVNVESTQGPRIAGAPALFQSRIAGVHWGYEETKAFLAILSESPFSEKLRTCHQNSQVYRAIAERLCALGFLRTLEQCRYRFKNLLRSYRKAKSSHPPGTCPFYEELDSLMRARAAVRAMGTVREAAGLPRCGQSSAETDAQEAWGEVANEDAVKPSTLCPKAPDMGFEMRHEDEDQISEQDIFEGLPGALSKCPTEAVCQPLDWGEDSENENEDEGQWGNPSQEQWQESSSEEDLEKLIDHQGLYLAEKPYKCDTCMKSFSRSSHFIAHQRIHTGEKPYKCLECGKNFSDRSNLNTHQRIHTGEKPYKCLECGKSFSDHSNLITHQRIHTGEKPYKCGECWKSFNQSSNLLKHQRIHLGGNPDQCSEPGGNFAQSPSFSAHWRNSTEETAPEQPQSISKDLNSPGPHSTNSGEKLYECSECGRSFSKSSALISHQRIHTGEKPYECAECGKSFSKSSTLANHQRTHTGEKPYKCVDCGKCFSERSKLITHQRVHTGEKPYKCLECGKFFRDRSNLITHQRIHTGEKPYKCRECGKCFNQSSSLIIHQRIHTGEKPYKCTECGKDFNNSSHFSAHRRTHAGGKAS

SEQ ID NO: 764082 - protein, 433 aa, Homo sapiens [sequence omitted]

SEQ ID NO: 764083 - protein, 154 aa, Homo sapiens
MDWLMEHEDDPDVDEPLETPLGHILGREPTSSEQGGLEGSGSAAGEGKPALSEEERQEQTKRMLELVAQKQREREEREEREALERERQRRRQGQELSAARQRLQEDEMRRAAEERRREKAEELAARQRVRAKDRWDHLPVWRQSEEEASINLKA

SEQ ID NO: 764084 - protein, 262 aa, Homo sapiens [sequence omitted]

SEQ ID NO: 764085 - protein, 262 aa, Homo sapiens [sequence omitted]

SEQ ID NO: 764086 - protein, 262 aa, Homo sapiens [sequence omitted]

SEQ ID NO: 764087 - protein, 277 aa, Homo sapiens
MDWLMEHEDDPDVDEPLETPLGHILGREPTSSEQGGLEGSGSAAGEGKPALSEEERQEQTKRMLELVAQKQREREEREEREALERERQRRRQGQELSAARQRLQEDEMRRAAEERRREKAEELAARQRVREKIERDKAERAKKYGGSVGSQPPPVAPEPGPVPSSPSQEPPTKREYDQCRIQVRLPDGTSLTQTFRAREQLAAVRLYVELHRGEELGGGQDPVQLLSGFPRRAFSEADMERPLQELGMAARLETRTRNWGSREACLGKGGMQREGAL

SEQ ID NO: 764088 - protein, 264 aa, Homo sapiens
MDWLMEHEDDPDVDEPLETPLGHILGREPTSSEQGGLEGSGSAAGEGKPALSEEERQEQTKRMLELVAQKQREREEREEREALERERQRRRQGQELSAARQRLQEDEMRRAAEERRREKAEELAARQRVREKIERDKAERAKKYGGSVGSQPPPVAPEPGPVPSSPSQEPPTKREYDQCRIQVRLPDGTSLTQTFRAREQLAAVRLYVELHRGEELGGGQDPVQLLSGFPRRAFSEADMERPLQELGLVPSAVLIVPLLMQCLF

SEQ ID NO: 764089 - protein, 348 aa, Homo sapiens
MDRYVSPLARCRMALFPERCSSTDTPSPCPDLAYWSGSRPVWVLMEPSDRLVQHVSPPLSKRCVAAPVSHGEGSGPHREPGGIEAAMDWLMEHEDDPDVDEPLETPLGHILGREPTSSEQGGLEGSGSAAGEGKPALSEEERQEQTKRMLELVAQKQREREEREEREALERERQRRRQGQELSAARQRLQEDEMRRAAEERRREKAEELAARQRVREKIERDKAERAKKYGGSVGSQPPPVAPEPGPVPSSPSQEPPTKREYDQCRIQVRLPDGTSLTQTFRAREQLAAVRLYVELHRGEELGGGQDPVQLLSGFPRRAFSEADMERPLQELGLVPSAVLIVAKKCPS

SEQ ID NO: 764090 - protein, 146 aa, Homo sapiens [sequence omitted]

SEQ ID NO: 764091 - protein, 294 aa, Homo sapiens
MDWLMEHEDDPDVDEPLETPLGHILGREPTSSEQGGLEGSGSAAGEGKPALSEEERQEQTKRMLELVAQKQREREEREEREALERERQRRRQGQELSAARQRLQEDEMRRAAEERRREKAEELAARSGQEEMMDEQMRKKSRFALLMSDLISSCLHFRQRVREKIERDKAERAKKYGGSVGSQPPPVAPEPGPVPSSPSQEPPTKREYDQCRIQVRLPDGTSLTQTFRAREQLAAVRLYVELHRGEELGGGQDPVQLLSGFPRRAFSEADMERPLQELGLVPSAVLIVAKKCPS

SEQ ID NO: 764092 - protein, 173 aa, Homo sapiens
MDWLMEHEDDPDVDEPLETPLGHILGREPTSSEQGGLEGSGSAAGEGKPALSEEERQEQTKRMLELVAQKQREREEREEREALERERQRRRQGQELSAARQRLQEDEMRRAAEERRREKAEELAASMVAVWALSHPQWHQSQVLFPLLPARSLPPSGSMTSVAYRSGCQMGPH

SEQ ID NO: 764093 - protein, 172 aa, Homo sapiens
MDWLMEHEDDPDVDEPLETPLGHILGREPTSSEQGGLEGSGSAAGEGKPALSEEERQEQTKRMLELVAQKQREREEREEREALERERQRRRQGQELSAARQRLQEDEMRRAAEERRREKAEELAASMVAVWALSHPQWHQSQVLFPLLPARSLPPSGSMTSVAYRCCHSNSY

SEQ ID NO: 764094 - protein, 154 aa, Homo sapiens; identical to SEQ ID NO: 764083

SEQ ID NO: 764095 - protein, 150 aa, Homo sapiens
LLNSAAARQELAARQRVREKIERDKAERAKKYGGSVGSQPPPVAPEPGPVPSSPSQEPPTKREYDQCRIQVRLPDGTSLTQTFRAREQLAAVRLYVELHRGEELGGGQDPVQLLSGFPRRAFSEADMERPLQELGLVPSAVLIVAKKCPS

SEQ ID NO: 764096 - protein, 116 aa, Homo sapiens
MDWLMEHEDDPDVDEPLETPLGHILGREPTSSEQGGLEGSGSAAGEGKPALSEEERQEQTKRMLELVAQKQREREEREWNGKMIFPYSLAIQQLISSLTTPSRIPLNIQTFLLFSL

SEQ ID NO: 764097 - protein, 262 aa, Homo sapiens [sequence omitted]

SEQ ID NO: 764098 - protein, 262 aa, Homo sapiens [sequence omitted]

SEQ ID NO: 764099 - protein, 262 aa, Homo sapiens [sequence omitted]

SEQ ID NO: 764100 - protein, 262 aa, Homo sapiens [sequence omitted]

SEQ ID NO: 764101 - protein, 262 aa, Homo sapiens [sequence omitted]

SEQ ID NO: 764102 - protein, 203 aa, Homo sapiens
MDWMLELVAQKQREREEREEREALERERQRRRQGQELSAARQRLQEDEMRRAAEERRREKAEELAARQRVREKIERDKAERAKKYGGSVGSQPPPVAPEPGPVPSSPSQEPPTKREYDQCRIQVRLPDGTSLTQTFRAREQLAAVRLYVELHRGEELGGGQDPVQLLSGFPRRAFSEADMERPLQELGLVPSAVLIVAKKCPS

SEQ ID NO: 764103 - protein, 131 aa, Homo sapiens
MDWLMEHEDDPDVDEPLETPLGHILGREPTSSEQGGLEGSGSAAGEGKPALSEEERQEQTKRMLELVAQKQREREEREEREALERERQRRRQGQELSAARQRLQEDEMRRAAEERRREKAEELAARSGQGK

SEQ ID NO: 764104 - protein, 230 aa, Homo sapiens
MDWLMEHEDDPDVDEPLETPLGHILGREPTSSEQGGLEGSGSAAGEGKPALSEEERQEQTKRMLELVAQKQREREEREEREALEREKAEELAARQRVREKIERDKAERAKKYGGSVGSQPPPVAPEPGPVPSSPSQEPPTKREYDQCRIQVRLPDGTSLTQTFRAREQLAAVRLYVELHRGEELGGGQDPVQLLSGFPRRAFSEADMERPLQELGLVPSAVLIVAKKCPS

SEQ ID NO: 764105 - protein, 175 aa, Homo sapiens
MARGRYSWCFCPQGEGSGPHREPGGIEAAMDWLMEHEDDPDVDEPLETPLGHILGREPTSSEQGGLEGSGSAAGEGKPALSEEERQEQTKRMLELVAQKQREREEREEREALERERQRRRQGQELSAARQRLQEDEMRRAAEERRREKAEELAARQRVREKIERDKAERAKKVGD

SEQ ID NO: 764106 - protein, 149 aa, Homo sapiens
MDWLMEHEDDPDVDEPLETPLGHILGREPTSSEQGGLEGSGSAAGEGKPALSEEERQEQTKRMLELVAQKQREREEREEREALERERQRRRQGQELSGASHLPVAAVVLLTTLALLSPLPVLSPPREWREKDEEGGGKGGGGRLTLYHD

SEQ ID NO: 764107 - protein, 138 aa, Homo sapiens
MDWLMEHEDDPDVDEPLETPLGHILGREPTSSEQGGLEGSGSAAGEGKPALSEEERQEQTKRCVELLALTRRPPSPSVSLPSPIPSPSLSPNEKAGPRPLDAGVTGREKGKKREESRSLSVNQAKCVAREGQQVYALD

SEQ ID NO: 764108 - protein, 87 aa, Homo sapiens
GSSQLKSTLLEQPLQRLLQEHSGIFGFSVSHTTRNPRPGEENGKDYYFVTREVMQRDIAAGDFIEHAEFSGNLYGTSKVAVQAVQAI

SEQ ID NO: 764109 - protein, 115 aa, Homo sapiens
MLRRPLAGLAAAALGRAPPDGMSGPRPVVLSGPSGAGKSTLLKRLLQEHSGIFGFSVSHTTRNPRPGEENGKDYYFVTREVMQRDIAAGDFIEHAEFSGNLYGTSKVAVQAVQAI

SEQ ID NO: 764110 - protein, 115 aa, Homo sapiens; identical to SEQ ID NO: 764109

SEQ ID NO: 764111 - protein, 160 aa, Homo sapiens
MAGSQKEEIMPPQQGVPFQESGCWGSMGAQSRERSGRDHSGTWICAGGSQETFHLGAPVETTCLAGMSGPRPVVLSGPSGAGKSTLLKRLLQEHSGIFGFSVSHTTRNPRPGEENGKDYYFVTREVMQRDIAAGDFIEHAEFSGNLYGTSKVAVQAVQAI

SEQ ID NO: 764112 - protein, 160 aa, Homo sapiens; identical to SEQ ID NO: 764111

SEQ ID NO: 764113 - protein, 191 aa, Homo sapiens
RVGSCAFPVVCFTGCLHPGAQVLSGLQGKRWVGHWAPSSPRWVTGLSARYHEEPEARRGERQREVMQRDIAAGDFIEHAEFSGNLYGTSKVAVQAVQAMNRICVLDVDLQGVRNIKATDLRPIYISVQPPSLHVLEQRLRQRNTETEESLVKRLAAAQADMESSKEPGLFDVVIINDSLGPGLRRAEGGAL

SEQ ID NO: 764114 - protein, 160 aa, Homo sapiens; identical to SEQ ID NO: 764111

SEQ ID NO: 764115 - protein, 191 aa, Homo sapiens; identical to SEQ ID NO: 764113

SEQ ID NO: 764116 - protein, 154 aa, Homo sapiens
MGLLPCKGPGPGPLGIYSWLRRVGPEAGVVGIRDLSTPSSQSSRQTHPRLTTEAAPQQTGMSGPRPVVLSGPSGAGKSTLLKRLLQEHSGIFGFSVSHTTRNPRPGEENGKDYYFVTREVMQRDIAAGDFIEHAEFSGNLYGTSKVAVQAVQAI

SEQ ID NO: 764117 - protein, 247 aa, Homo sapiens
MHGSKWLDSWVGWGSQSRLPEGLEVTPPGGDGSSQVGCHQSRQHCLLGTPGEADRVSGFQLGGSPAENPVKPAFHSSPVCPEPGLRAALCMPALPTWQSSGGRTPRLSGDSQANVSIPGSALSCHEFRKAEAAQQMGTRGRTAIQQPLFSPPGMSGPRPVVLSGPSGAGKSTLLKRLLQEHSGIFGFSVSHTTRNPRPGEENGKDYYFVTREVMQRDIAAGDFIEHAEFSGNLYGTSKVAVQAVQAI

SEQ ID NO: 764118 - protein, 149 aa, Homo sapiens
MTSVSRAGGGGPVRRCHVGSVGGRGGPGCCGARWPGWLRPPWAGPHRTPLFSPPGMSGPRPVVLSGPSGAGKSTLLKRLLQEHSGIFGFSVSHTTRNPRPGEENGKDYYFVTREVMQRDIAAGDFIEHAEFSGNLYGTSKVAVQAVQAI

SEQ ID NO: 764119 - protein, 231 aa, Homo sapiens
GFTLLLSCVLCLPSLGLLSTDYWATVFLSGRTLALEADRVSGFQLGGSPAENPVKPAFHSSPVCPEPGLRAALCMPALPTWQSSGGRTPRLSGDSQANVSIPGSALSCHEFRKAEAAQQMGTRGRTAIQQPLFSPPGMSGPRPVVLSGPSGAGKSTLLKRLLQEHSGIFGFSVSHTTRNPRPGEENGKDYYFVTREVMQRDIAAGDFIEHAEFSGNLYGTSKVAVQAVQAI

SEQ ID NO: 764120 - protein, 115 aa, Homo sapiens; identical to SEQ ID NO: 764109

SEQ ID NO: 764121 - protein, 137 aa, Homo sapiens
MAGSQKEEIMPPQQGVPFQESGCWGSMGAQSRERSGRDHSGTWICAGGSQETFHLGAPVETTCLAGMSGPRPVVLSGPSGAGKSTLLKRLLQEHSGIFGFSVSRESRALVEGYHEEPEARRGERQRLLLCNQGGDAA

SEQ ID NO: 764122 - protein, 120 aa, Homo sapiens
MAGSQKEEIMPPQQGVPFQESGCWGSMGAQSRERSGRDHSGTWICAGGSQETFHLGAPVETTCLAGMSGPRPVVLSGPSGAGKSTLLKRLLQEHSGIFGFSVSRESRALVEGCVDLKAAE

SEQ ID NO: 764123 - protein, 207 aa, Homo sapiens
MHGSKWLDSWVGWGSQSRLPEGLEVTPPGGDGSSQVGCHQSRQHCLLGTPGEADRVSGFQLGGSPAENPVKPAFHSSPVCPEPGLRAALCMPALPTWQSSGGRTPRLSGDSQANVSIPGSALSCHEFRKAEAAQQMGTRGRTAIQQPLFSPPGMSGPRPVVLSGPSGAGKSTLLKRLLQEHSGIFGFSVSRESRALVEGCVDLKAAE

SEQ ID NO: 764124 - protein, 140 aa, Homo sapiens
  misc_feature (3)..(3): Xaa can be any naturally occurring amino acid
  misc_feature (5)..(5): Xaa can be any naturally occurring amino acid
  misc_feature (11)..(11): Xaa can be any naturally occurring amino acid
ARXRXNSARGXLHRACRVLGEPVWHEQGGGAGRAGHLNRICVLDVDLQGVRNIKATDLRPIYISVQPPSLHVLEQRLRQRNTETEESLVKRLAAAQADMESSKEPGLFDVVIINDSLDQAYAELKEALSEEIKKAQRTGA

SEQ ID NO: 764125 - protein, 115 aa, Homo sapiens; identical to SEQ ID NO: 764109

SEQ ID NO: 764126 - protein, 110 aa, Homo sapiens
LPPAAPLYRICVLDVDLQGVRNIKATDLRPIYISVQPPSLHVLEQRLRQRNTETEESLVKRLAAAQADMESSKEPGLFDVVIINDSLDQAYAELKEALSEEIKKAQRTGA

SEQ ID NO: 764127 - protein, 163 aa, Homo sapiens
MESSKEPGLFDVVIINDSLDQAYAELKEALSEVGPSLCLPGQGPRGGLGARPLLSMRPLRLDGTVLPKHWHETPRSTVEGEQEAQPFLDTSPPNSLSSSLAGNQESSKDRRLRLAVCSRHPGPIQDQGSSIEPPPWQAIRQLCALGQHVEWRRCCPCGWNILG

SEQ ID NO: 764128 - protein, 120 aa, Homo sapiens
MLRRPLAGLAAAALGRAPPDGMSGPRPVVLSGPSGAGKSTLLKRLLQEHSGIFGFSVSHTTRNPRPGEENGKDYYFVTREVMQRDIAAGDFIEHAEFSGNLYGTRSSGCGSATLKPRRAW

SEQ ID NO: 764129 - protein, 78 aa, Homo sapiens
MPGSDCHPLFEEQRLRQRNTETEESLVKRLAAAQADMESSKEPGLFDVVIINDSLDQAYAELKEALSEEIKKAQRTGA

SEQ ID NO: 764130 - protein, 115 aa, Homo sapiens; identical to SEQ ID NO: 764109

SEQ ID NO: 764131 - protein, 137 aa, Homo sapiens; identical to SEQ ID NO: 764121

SEQ ID NO: 764132 - protein, 149 aa, Homo sapiens; identical to SEQ ID NO: 764118

SEQ ID NO: 764133 - protein, 120 aa, Homo sapiens; identical to SEQ ID NO: 764122

SEQ ID NO: 764134 - protein, 115 aa, Homo sapiens; identical to SEQ ID NO: 764109

SEQ ID NO: 764135 - protein, 115 aa, Homo sapiens; identical to SEQ ID NO: 764109

SEQ ID NO: 764136 - protein, 115 aa, Homo sapiens; identical to SEQ ID NO: 764109

SEQ ID NO: 764137 - protein, 62 aa, Homo sapiens
MAPPLPQINYYFVTREVMQRDIAAGDFIEHAEFSGNLYGTRWAMRGCGWAPRVAVGNRDPGS

SEQ ID NO: 764138 - protein, 197 aa, Homo sapiens
MSGPRPVVLSGPSGAGKSTLLKRLLQEHSGIFGFSVSHTTRNPRPGEENGKDYYFVTREVMQRDIAAGDFIEHAEFSGNLYGTSKVAVQAVQAMNRICVLDVDLQGVRNIKATDLRPIYISVQPPSLHVLEQRLRQRNTETEESLVKRLAAAQADMESSKEPGLFDVVIINDSLDQAYAELKEALSEEIKKAQRTGA

SEQ ID NO: 764139 - protein, 804 aa, Homo sapiens
QFTWQMLTVSEELPFDNVDGGVWRQGFDISYDPHDWDAEDLQVFVVPHSHNDPGWIKTFDKYYTEQTQHILNSMVSKLQEDPRRRFLWAEVSFFAKWWDNINVQKRAAVRRLVGNGQLEIATGGWVMPDEANSHYFALIDQLIEGHQWLERNLGATPRSGWAVDPFGYSSTMPYLLRRANLTSMLIQRVHYAIKKHFAATHSLEFMWRQTWALGPVTASRSIRAAFSLNRSLPPWRPEAACWWGPRGVSPADSDSSTDIFCHMMPFYSYDVPHTCGPDPKICCQFDFKRLPGGRINCPWKVPPRAITEANVAERAALLLDQYRKKSRLFRSNVLLVPLGDDFRYDKPQEWDAQFFNYQRLFDFFNSRPNLHVQAQFGTLSDYFDALYKRTGVEPGARPPGFPVLSGDFFSYADREDHYWTGYYTSRPFYKSLDRVLEAHLRGAEVLYSLAAAHARRSGLAGRYPLSDFTLLTEARRTLGLFQHHDAITGTAKEAVVVDYGVRLLRSLVNLKQVIIHAAHYLVLGDKETYHFDPEAPFLQVDDTRLSHDALPERTVIQLDSSPRFVVLFNPLEQERFSMVSLLVNSPRVRVLSEEGQPLAVQISAHWSSATEAVPDVYQVSVPVRLPALGLGVLQLQLGLDGHRTLPSSVRIYLHGRQLSVSRHEAFPLRVIDSGTSDFALSNRYMQVWFSGLTGLLKSIRRVDEEHEQQVDMQVLVYGTRTSKDKSGAYLFLPDGEAKPYVPKEPPVLRVTEGPFFSEVVAYYEHIHQAVRLYNLPGVEGLSLDISSLVDIRDYVNKDLHFSFN

SEQ ID NO: 764140 - protein, 764 aa, Homo sapiens
QFTWQMLTVSEELPFDNVDGGVWRQGFDISYDPHDWDAEDLQVFVVPHSHNDPGWIKTFDKYYTEQTQHILNSMVSKLQEDPRRRFLWAEVSFFAKWWDNINVQKRAAVRRLVGNGQLEIATGGWVMPDEANSHYFALIDQLIEGHQWLERNLGATPRSGWAVDPFGYSSTMPYLLRRANLTSMLIQRVHYAIKKHFAATHSLEFMWRQTWDSDSSTDIFCHMMPFYSYDVPHTCGPDPKICCQFDFKRLPGGRINCPWKVPPRAITEANVAERAALLLDQYRKKSRLFRSNVLLVPLGDDFRYDKPQEWDAQFFNYQRLFDFFNSRPNLHVQAQFGTLSDYFDALYKRTGVEPGARPPGFPVLSGDFFSYADREDHYWTGYYTSRPFYKSLDRVLEAHLRGAEVLYSLAAAHARRSGLAGRYPLSDFTLLTEARRTLGLFQHHDAITGTAKEAVVVDYGVRLLRSLVNLKQVIIHAAHYLVLGDKETYHFDPEAPFLQVDDTRLSHDALPERTVIQLDSSPRFVVLFNPLEQERFSMVSLLVNSPRVRVLSEEGQPLAVQISAHWSSATEAVPDVYQVSVPVRLPALGLGVLQLQLGLDGHRTLPSSVRIYLHGRQLSVSRHEAFPLRVIDSGTSDFALSNRYMQVWFSGLTGLLKSIRRVDEEHEQQVDMQVLVYGTRTSKDKSGAYLFLPDGEAKPYVPKEPPVLRVTEGPFFSEVVAYYEHIHQAVRLYNLPGVEGLSLDISSLVDIRDYVNKDLHFSFN

SEQ ID NO: 764141 - protein, 1065 aa, Homo sapiens
QFTWQMLTVSEELPFDNVDGGVWRQGFDISYDPHDWDAEDLQVFVVPHSHNDPGWIKTFDKYYTEQTQHILNSMVSKLQEDPRRRFLWAEVSFFAKWWDNINVQKRAAVRRLVGNGQLEIATGGWVMPDEANSHYFALIDQLIEGHQWLERNLGATPRSGWAVDPFGYSSTMPYLLRRANLTSMLIQRVHYAIKKHFAATHSLEFMWRQTWALGPVTASRSIRAAFSLNRSLPPWRPEAACWWGPRGVSPADSDSSTDIFCHMMPFYSYDVPHTCGPDPKICCQFDFKRLPGGRINCPWKVPPRAITEANVAERAALLLDQYRKKSRLFRSNVLLVPLGDDFRYDKPQEWDAQFFNYQRLFDFFNSRPNLHVQAQFGTLSDYFDALYKRTGVEPGARPPGFPVLSGDFFSYADREDHYWTGYYTSRPFYKSLDRVLEAHLRGAEVLYSLAAAHARRSGLAGRYPLSDFTLLTEARRTLGLFQHHDAITGTAKEAVVVDYGVRLLRSLVNLKQVIIHAAHYLVLGDKETYHFDPEAPFLQVDDTRLSHDALPERTVIQLDSSPRFVVLFNPLEQERFSMVSLLVNSPRVRVLSEEGQPLAVQISAHWSSATEAVPDVYQVSVPVRLPALGLGVLQLQLGLDGHRTLPSSVRIYLHGRQLSVSRHEAFPLRVIDSGTSDFALSNRYMQVWFSGLTGLLKSIRRVDEEHEQQVDMQVLVYGTRTSKDKSGAYLFLPDGEAKPYVPKEPPVLRVTEGPFFSEVVAYYEHIHQAVRLYNLPGVEGLSLDISSLVDIRDYVNKELALHIHTDIDSQGIFFTDLNGFQVQPRRYLKKLPLQANFYPMPVMAYIQDAQKRLTLHTAQALGVSSLKDGQLEVILDRRLMQDDNRGLGQGLKDNKRTCNRFRLLLERRTVGSEVQDSHSTSYPSLLSHLTSMYLNAPALALPVARMQLPGPGLRSFHPLASSLPCDFHLLNLRTLQAEEDTLPSAETALILHRKGFDCGLEAKNLGFNCTTSQGKVALGSLFHGLDVVFLQPTSLTLLYPLASPSNSTDVYLEPMEIATFRLRLG

SEQ ID NO: 764142 - protein, 1175 aa, Homo sapiens
QFTWQMLTVSEELPFDNVDGGVWRQGFDISYDPHDWDAEDLQVFVVPHSHNDPGWIKTFDKYYTEQTQHILNSMVSKLQEDPRRRFLWAEVSFFAKWWDNINVQKRAAVRRLVGNGQLEIATGGWVMPDEANSHYFALIDQLIEGHQWLERNLGATPRSGWAVDPFGYSSTMPYLLRRANLTSMLIQRVHYAIKKHFAATHSLEFMWRQTWALGPVTASRSIRAAFSLNRSLPPWRPEAACWWGPRGVSPADSDSSTDIFCHMMPFYSYDVPHTCGPDPKICCQFDFKRLPGGRINCPWKVPPRAITEANVAERAALLLDQYRKKSRLFRSNVLLVPLGDDFRYDKPQEWDAQFFNYQRLFDFFNSRPNLHVQAQFGTLSDYFDALYKRTGVEPGARPPGFPVLSGDFFSYADREDHYWTGYYTSRPFYKSLDRVLEAHLRGAEVLYSLAAAHARRSGLAGRYPLSDFTLLTEARRTLGLFQHHDAITGTAKEAVVVDYGVRLLRSLVNLKQVIIHAAHYLVLGDKETYHFDPEAPFLQVDDTRLSHDALPERTVIQLDSSPRFVVLFNPLEQERFSMVSLLVNSPRVRVLSEEGQPLAVQISAHWSSATEAVPDVYQVSVPVRLPALGLGVLQLQLGLDGHRTLPSSVRIYLHGRQLSVSRHEAFPLRVIDSGTSDFALSNRYMQVWFSGLTGLLKSIRRVDEEHEQQVDMQVLVYGTRTSKDKSGAYLFLPDGEAKPYVPKEPPVLRVTEGPFFSEVVAYYEHIHQAVRLYNLPGVEGLSLDISSLVDIRDYVNKELALHIHTDIDSQGIFFTDLNGFQVQPRRYLKKLPLQANFYPMPVMAYIQDAQKRLTLHTAQALGVSSLKDGQLEVILDRRLMQDDNRGLGQGLKDNKRTCNRFRLLLERRTVGSEPDFFSKLAAMFRGLIFHSSRSGNREVQDSHSTSYPSLLSHLTSMYLNAPALALPVARMQLPGPGLRSFHPLASSLPCDFHLLNLRTLQAEVSVPQRDMLRAEFYGVPPCSAPSLASRMRSRPLSRYSAPNLQDQVLAFPYPHASLCQHCLWAEALLHLRSLKALRPLPWALSVIQEDTLPSAETALILHRKGFDCGLEAKNLGFNCTTSQGKVALGSLFHGLDVVFLQPTSLTLLYPLASPSNSTDVYLEPMEIATFRLRLG

SEQ ID NO: 764143 - protein, 1071 aa, Homo sapiens
QFTWQMLTVSEELPFDNVDGGVWRQGFDISYDPHDWDAEDLQVFVVPHSHNDPGWIKTFDKYYTEQTQHILNSMVSKLQEDPRRRFLWAEVSFFAKWWDNINVQKRAAVRRLVGNGQLEIATGGWVMPDEANSHYFALIDQLIEGHQWLERNLGATPRSGWAVDPFGYSSTMPYLLRRANLTSMLIQRVHYAIKKHFAATHSLEFMWRQTWALGPVTASRSIRAAFSLNRSLPPWRPEAACWWGPRGVSPADSDSSTDIFCHMMPFYSYDVPHTCGPDPKICCQFDFKRLPGGRINCPWKVPPRAITEANVAERAALLLDQYRKKSRLFRSNVLLVPLGDDFRYDKPQEWDAQFFNYQRLFDFFNSRPNLHVQAQFGTLSDYFDALYKRTGVEPGARPPGFPVLSGDFFSYADREDHYWTGYYTSRPFYKSLDRVLEAHLRGAEVLYSLAAAHARRSGLAGRYPLSDFTLLTEARRTLGLFQHHDAITGTAKEAVVVDYGVRLLRSLVNLKQVIIHAAHYLVLGDKETYHFDPEAPFLQVDDTRLSHDALPERTVIQLDSSPSPPSTHRFVVLFNPLEQERFSMVSLLVNSPRVRVLSEEGQPLAVQISAHWSSATEAVPDVYQVSVPVRLPALGLGVLQLQLGLDGHRTLPSSVRIYLHGRQLSVSRHEAFPLRVIDSGTSDFALSNRYMQVWFSGLTGLLKSIRRVDEEHEQQVDMQVLVYGTRTSKDKSGAYLFLPDGEAKPYVPKEPPVLRVTEGPFFSEVVAYYEHIHQAVRLYNLPGVEGLSLDISSLVDIRDYVNKELALHIHTDIDSQGIFFTDLNGFQVQPRRYLKKLPLQANFYPMPVMAYIQDAQKRLTLHTAQALGVSSLKDGQLEVILDRRLMQDDNRGLGQGLKDNKRTCNRFRLLLERRTVGSEVQDSHSTSYPSLLSHLTSMYLNAPALALPVARMQLPGPGLRSFHPLASSLPCDFHLLNLRTLQAEEDTLPSAETALILHRKGFDCGLEAKNLGFNCTTSQGKVALGSLFHGLDVVFLQPTSLTLLYPLASPSNSTDVYLEPMEIATFRLRLG

SEQ ID NO: 764144 - protein, 347 aa, Homo sapiens
  misc_feature (15)..(15): Xaa can be any naturally occurring amino acid
RGEGPNPAIPSSRSXGCRAKPYVPKEPPVLRVTEGPFFSEVVAYYEHIHQAVRLYNLPGVEGLSLDISSLVDIRDYVNKELALHIHTDIDSQGIFFTDLNGFQVQPRRYLKKLPLQANFYPMPVMAYIQDAQKRLTLHTAQALGVSSLKDGQLEVILDRRLMQDDNRGLGQGLKDNKRTCNRFRLLLERRTVGSEVQDSHSTSYPSLLSHLTSMYLNAPALALPVARMQLPGPGLRSFHPLASSLPCDFHLLNLRTLQAEEDTLPSAETALILHRKGFDCGLEAKNLGFNCTTSQGKVALGSLFHGLDVVFLQPTSLTLLYPLASPSNSTDVYLEPMEIATFRLRLG

SEQ ID NO: 764145 - protein, 518 aa, Homo sapiens
QFTWQMLTVSEELPFDNVDGGVWRQGFDISYDPHDWDAEDLQVFVVPHSHNDPGWIKTFDKYYTEQTQHILNSMVSKLQEDPRRRFLWAEVSFFAKWWDNINVQKRAAVRRLVGNGQLEIATGGWVMPDEANSHYFALIDQLIEGHQWLERNLGATPRSGWAVDPFGYSSTMPYLLRRANLTSMLIQRVHYAIKKHFAATHSLEFMWRQTWALGPVTASRSIRAAFSLNRSLPPWRPEAACWWGPRGVSPADSDSSTDIFCHMMPFYSYDVPHTCGPDPKICCQFDFKRLPGGRINCPWKVPPRAITEANVAERAALLLDQYRKKSRLFRSNVLLVPLGDDFRYDKPQEWDAQFFNYQRLFDFFNSRPNLHVQAQFGTLSDYFDALYKRTGVEPGARPPGFPVLSGDFFSYADREDHYWTGYYTSRPFYKSLDRVLEAHLRGAEVLYSLAAAHARRSGLAGRYPLSDFTLLTEARRTLGLFQHHDAITGTAKEAVVVDYGVRLLRSLVNLSRGDLSKP

SEQ ID NO: 764146 - protein, 134 aa, Homo sapiens [sequence omitted]

SEQ ID NO: 764147 - protein, 68 aa, Homo sapiens
PLGPTWCPGALDLLALPPQVQPRRYLKKLPLQANFYPMPVMAYIQDAQKRLTLHTAQALGVSSLKDGE

SEQ ID NO: 764148 - protein, 92 aa, Homo sapiens
ADSFPMVIFSPSLSCATHRLLRSLVNLKQVIIHAAHYLVLGDKETYHFDPEAPFLQVVSPSWVCMGTLWCVQVPSQELLDGGAASLFPSPSG

SEQ ID NO: 764149 - protein, 1065 aa, Homo sapiens; identical to SEQ ID NO: 764141

SEQ ID NO: 764150 - protein, 541 aa, Homo sapiens
MPFYSYDVPHTCGPDPKICCQFDFKRLPGGRINCPWKVPPRAITEANVAERAALLLDQYRKKSRLFRSNVLLVPLGDDFRYDKPQEWDAQFFNYQRLFDFFNSRPNLHVQAQFGTLSDYFDALYKRTGVEPGARPPGFPVLSGDFFSYADREDHYWTGYYTSRPFYKSLDRVLEAHLRGAEVLYSLAAAHARRSGLAGRYPLSDFTLLTEARRTLGLFQHHDAITGTAKEAVVVDYGVRLLRSLVNLKQVIIHAAHYLVLGDKETYHFDPEAPFLQVDDTRLSHDALPERTVIQLDSSPRFVVLFNPLEQERFSMVSLLVNSPRVRVLSEEGQPLAVQISAHWSSATEAVPDVYQVSVPVRLPALGLGVLQLQLGLDGHRTLPSSVRIYLHGRQLSVSRHEAFPLRVIDSGTSDFALSNRYMQVWFSGLTGLLKSIRRVDEEHEQQVDMQVLVYGTRTSKDKSGAYLFLPDGEAKPYVPKEPPVLRVTEGPFFSEVVAYYEHIHQAVRLYNLPGVEGLSLDISSLVDIRDYVNKDLHFSFN

SEQ ID NO: 764151 - protein, 328 aa, Homo sapiens
RLTRGPIRRVLRVTEGPFFSEVVAYYEHIHQAVRLYNLPGVEGLSLDISSLVDIRDYVNKELALHIHTDIDSQGIFFTDLNGFQVQPRRYLKKLPLQANFYPMPVMAYIQDAQKRLTLHTAQALGVSSLKDGQLEVILDRRLMQDDNRGLGQGLKDNKRTCNRFRLLLERRTVGSEVQDSHSTSYPSLLSHLTSMYLNAPALALPVARMQLPGPGLRSFHPLASSLPCDFHLLNLRTLQAEEDTLPSAETALILHRKGFDCGLEAKNLGFNCTTSQGKVALGSLFHGLDVVFLQPTSLTLLYPLASPSNSTDVYLEPMEIATFRLRLG

SEQ ID NO: 764152 - protein, 292 aa, Homo sapiens
AGQHSLFASPGQLEVILDRRLMQDDNRGLGQGLKDNKRTCNRFRLLLERRTVGSEVQDSHSTSYPSLLSHLTSMYLNAPALALPVARMQLPGPGLRSFHPLASSLPCDFHLLNLRTLQAEVSVPQRDMLEQSSDGVPPCSAPSLASRMRSRPLSRYSAPNLQDQVLAFPYPHASLCQHCLWAEALLHLRSLKALRPLPWALSVIQEDTLPSAETALILHRKGFDCGLEAKNLGFNCTTSQGKVALGSLFHGLDVVFLQPTSLTLLYPLASPSNSTDVYLEPMEIATFRLRLG

SEQ ID NO: 764153 - protein, 281 aa, Homo sapiens
QFTWQMLTVSEELPFDNVDGGVWRQGFDISYDPHDWDAEDLQVFVVPHSHNDPGWIKTFDKYYTEQTQHILNSMVSKLQEDPRRRFLWAEVSFFAKWWDNINVQKRAAVRRLVGNGQLEIATGGWVMPDEANSHYFALIDQLIEGHQWLERNLGATPRSGWAVDPFGYSSTMPYLLRRANLTSMLIQRVHYAIKKHFAATHSLEFMWRQTWDSDSSTDIFCHMMPFYSYDVPHTCGPDPKICCQFDFKRLPGGRINCPWKVPPRAITEANVAERYLLPALS

SEQ ID NO: 764154 - protein, 64 aa, Homo sapiens
MSGREGGKKKPLKQPKKQAKEMDEEDKAFKQKQKEEQKKLEELKAKAAGKGPLATGGIKKSGKK

SEQ ID NO: 764155 - protein, 91 aa, Homo sapiens
RPPTRREKTTEGGEGGKKKPLKQPKKQAKEMDEEDKAFKQKQKEEQKKLEELKAKAAGKGPLATKVELRNLAKSKLFLVPEEMVTLYFICI

SEQ ID NO: 764156 - protein, 100 aa, Homo sapiens
WGRSSFPVAGSGEAAAGAMSGREGGKKKPLKQPKKQAKEMDEEDKAFKQKQKEEQKKLEELKAKAAGKGPLATKVELRNLAKSKLFLVPEEMVTLYFICI

SEQ ID NO: 764157 - protein, 100 aa, Homo sapiens; identical to SEQ ID NO: 764156

SEQ ID NO: 764158 - protein, 112 aa, Homo sapiens
MSGREGKCSGTVRTAGTAGWGPGGRGRPNVLVSPTGGKKKPLKQPKKQAKEMDEEDKAFKQKQKEEQKKLEELKAKAAGKGPLATKVELRNLAKSKLFLVPEEMVTLYFICI

SEQ ID NO: 764159 - protein, 100 aa, Homo sapiens; identical to SEQ ID NO: 764156

SEQ ID NO: 764160 - protein, 100 aa, Homo sapiens; identical to SEQ ID NO: 764156

SEQ ID NO: 764161 - protein, 71 aa, Homo sapiens
GSPTTQLSKEMDEEDKAFKQKQKEEQKKLEELKAKAAGKGPLATKVELRNLAKSKLFLVPEEMVTLYFICI

SEQ ID NO: 764162 - protein, 112 aa, Homo sapiens
FRILIRPSPIGEIFAPRGPKNSGHRRAAGAMSGREGGKKKPLKQPKKQAKEMDEEDKAFKQKQKEEQKKLEELKAKAAGKGPLATKVELRNLAKSKLFLVPEEMVTLYFICI

SEQ ID NO: 764163 - protein, 72 aa, Homo sapiens
  misc_feature (9)..(9): Xaa can be any naturally occurring amino acid
  misc_feature (39)..(39): Xaa can be any naturally occurring amino acid
  misc_feature (42)..(42): Xaa can be any naturally occurring amino acid
KRRPNRSIXGDWLPAPPRVDVSIKLISIPAPSIRLQKTXRGXGGRRHVRPRRWQEEATETAQEAGQGDGRGR

SEQ ID NO: 764164 - protein, 64 aa, Homo sapiens; identical to SEQ ID NO: 764154

SEQ ID NO: 764165 - protein, 210 aa, Homo sapiens
ILQNHPWETVGAVRERYSNVCSDLVKEFNKYDTDGSKWINQYTGINAIFKKEFSIDVGMRDFGTEIFFHPEFANPDFTQPISEVVDEVIQNCPIDVRRPLYKNIVLSGGSTMFRDFGRRLQRDLKRTEMSGREGGKKKPLKQPKKQAKEMDEEDKAFKQKQKEEQKKLEELKAKAAGKGPLATKVELRNLAKSKLFLVPEEMVTLYFICI

SEQ ID NO: 764166 - protein, 64 aa, Homo sapiens; identical to SEQ ID NO: 764154

SEQ ID NO: 764167 - protein, 64 aa, Homo sapiens; identical to SEQ ID NO: 764154

SEQ ID NO: 764168 - protein, 71 aa, Homo sapiens; identical to SEQ ID NO: 764161

SEQ ID NO: 764169 - protein, 90 aa, Homo sapiens
FGTGRQVTMSGREGGKKKPLKQPKKQAKEMDEEDKAFKQKQKEEQKKLEELKAKAAGKGPLATKVELRNLAKSKLFLVPEEMVTLYFICI

SEQ ID NO: 764170 - protein, 100 aa, Homo sapiens; identical to SEQ ID NO: 764156

SEQ ID NO: 764171 - protein, 90 aa, Homo sapiens; identical to SEQ ID NO: 764169

SEQ ID NO: 764172 - protein, 112 aa, Homo sapiens; identical to SEQ ID NO: 764162

SEQ ID NO: 764173 - protein, 100 aa, Homo sapiens; identical to SEQ ID NO: 764156

SEQ ID NO: 764174 - protein, 100 aa, Homo sapiens; identical to SEQ ID NO: 764156

SEQ ID NO: 764175 - protein, 210 aa, Homo sapiens; identical to SEQ ID NO: 764165

SEQ ID NO: 764176 - protein, 96 aa, Homo sapiens
PSCQHSLGEAAAGAMSGREGGKKKPLKQPKKQAKEMDEEDKAFKQKQKEEQKKLEELKAKAAGKGPLATKVELRNLAKSKLFLVPEEMVTLYFICI

SEQ ID NO: 764177 - protein, 112 aa, Homo sapiens; identical to SEQ ID NO: 764158

SEQ ID NO: 764178 - protein, 101 aa, Homo sapiens
WGRSSFPVAGSGEAAAGAMSGREGKCSGTVRTAGTAGWGPGGRGRPNVLVSPTGGKKKPLKQPKKQAKEMDEVRAGAEALAGAGALGDRPELNTLCLSPGR

SEQ ID NO: 764179 - protein, 67 aa, Homo sapiens
EDPISGQDEEDKAFKQKQKEEQKKLEELKAKAAGKGPLATKVELRNLAKSKLFLVPEEMVTLYFICI

SEQ ID NO: 764180 - protein, 85 aa, Homo sapiens
WGRSSFPVAGSGEAAAGAMSGREGGKKKPLKQPKKQAKEMDEEDKAFKQKQKEEQKKLEELKAKAAGKGPLGKWGPNGAQAGQTL

SEQ ID NO: 764181 - protein, 64 aa, Homo sapiens; identical to SEQ ID NO: 764154

SEQ ID NO: 764182 - protein, 64 aa, Homo sapiens; identical to SEQ ID NO: 764154

SEQ ID NO: 764183 - protein, 665 aa, Homo sapiens
MAHEMIGTQIVTERLVALLESGTEKVLLIDSRPFVEYNTSHILEAININCSKLMKRRLQQDKVLITELIQHSAKHKVDIDCSQKVVVYDQSSQDVASLSSDCFLTVLLGKLEKSFNSVHLLAGGFAEFSRCFPGLCEGKSTLVPTCISQPCLPVANIGPTRILPNLYLGCQRDVLNKELMQQNGIGYVLNASNTCPKPDFIPESHFLRVPVNDSFCEKILPWLDKSVDFIEKAKASNGCVLVHCLAGISRSATIAIAYIMKRMDMSLDEAYRFVKEKRPTISPNFNFLGQLLDYEKKIKNQTGASGPKSKLKLLHLEKPNEPVPAVSEGGQKSETPLSPPCADSATSEAAGQRPVHPASVPSVPSVQPSLLEDSPLVQALSGLHLSADRLEDSNKLKRSFSLDIKSVSYSASMAASLHGFSSSEDALEYYKPSTTLDGTNKLCQFSPVQELSEQTPETSPDKEEASIPKKLQTARPSDSQSKRLHSVRTSSSGTAQRSLLSPLHRSGSVEDNYHTSFLFGLSTSQQHLTKSAGLGLKGWHSDILAPQTSTPSLTSSWYFATESSHFYSASAIYGGSASYSAYSCSQLPTCGDQVYSVRRRQKPSDRADSRRSWHEESPFEKQFKRRSCQMEFGESIMSENRSREELGKVGSQSSFSGSMEIIEVS

SEQ ID NO: 764184 - protein, 647 aa, Homo sapiens
MAHEMIGTQIVTERLVALLESGTEKVLLIDSRPFVEYNTSHILEAININCSKLMKRRLQQDKVLITELIQHSAKHKVDIDCSQKVVVYDQSSQDVASLSSDCFLTVLLGKLEKSFNSVHLLAGGFAEFSRCFPGLCEGKSTLVPTCISQPCLPVANIGPTRILPNLYLGCQRDVLNKELMQQNGIGYVLNASNTCPKPDFIPESHFLRVPVNDSFCEKILPWLDKSVDFIEKAKASNGCVLVHCLAGISRSATIAIAYIMKRMDMSLDEAYRFVKEKRPTISPNFNFLGQLLDYEKKIKNQTGASGPKSKLKLLHLEKPNEPVPAVSEGGQTGQRPVHPASVPSVPSVQPSLLEDSPLVQALSGLHLSADRLEDSNKLKRSFSLDIKSVSYSASMAASLHGFSSSEDALEYYKPSTTLDGTNKLCQFSPVQELSEQTPETSPDKEEASIPKKLQTARPSDSQSKRLHSVRTSSSGTAQRSLLSPLHRSGSVEDNYHTSFLFGLSTSQQHLTKSAGLGLKGWHSDILAPQTSTPSLTSSWYFATESSHFYSASAIYGGSASYSAYSCSQLPTCGDQVYSVRRRQKPSDRADSRRSWHEESPFEKQFKRRSCQMEFGESIMSENRSREELGKVGSQSSFSGSMEIIEVS

SEQ ID NO: 764185 - protein, 517 aa, Homo sapiens
MLPLSLQTVFSLYFWVNWRRASTLFTCLQELMQQNGIGYVLNASNTCPKPDFIPESHFLRVPVNDSFCEKILPWLDKSVDFIEKAKASNGCVLVHCLAGISRSATIAIAYIMKRMDMSLDEAYRFVKEKRPTISPNFNFLGQLLDYEKKIKNQTGASGPKSKLKLLHLEKPNEPVPAVSEGGQKSETPLSPPCADSATSEAAGQRPVHPASVPSVPSVQPSLLEDSPLVQALSGLHLSADRLEDSNKLKRSFSLDIKSVSYSASMAASLHGFSSSEDALEYYKPSTTLDGTNKLCQFSPVQELSEQTPETSPDKEEASIPKKLQTARPSDSQSKRLHSVRTSSSGTAQRSLLSPLHRSGSVEDNYHTSFLFGLSTSQQHLTKSAGLGLKGWHSDILAPQTSTPSLTSSWYFATESSHFYSASAIYGGSASYSAYSCSQLPTCGDQVYSVRRRQKPSDRADSRRSWHEESPFEKQFKRRSCQMEFGESIMSENRSREELGKVGSQSSFSGSMEIIEVS

SEQ ID NO: 764186 - protein, 517 aa, Homo sapiens; identical to SEQ ID NO: 764185

SEQ ID NO: 764187 - protein, 122 aa, Homo sapiens
MAHEMIGTQIVTERLVALLESGTEKVLLIDSRPFVEYNTSHILEAININCSKLMKRRLQQDKVLITELIQHSAKHKVDIDCSQKVVVYDQSSQDVACSLQHVIGETLASTRGDTDGDFKEQN

SEQ ID NO: 764188 - protein, 665 aa, Homo sapiens; identical to SEQ ID NO: 764183

SEQ ID NO: 764189 - protein, 517 aa, Homo sapiens; identical to SEQ ID NO: 764185

SEQ ID NO: 764190 - protein, 517 aa, Homo sapiens; identical to SEQ ID NO: 764185

SEQ ID NO: 764191 - protein, 145 aa, Homo sapiens
MEFPDLGKHCSEKTCKQLDFLPVKCDACKQDFCKDHFPYAAHKCPFAFQKDVHVPVCPLCNTPIPVKKGQIPDVVVGDHIDRDCDSHPGKKKEKIFTYRCSKEGCKKKEMLQMVCAQCHGNFCIQHRHPLDHSCRHGSRPTIKAG

SEQ ID NO: 764192 - protein, 408 aa, Homo sapiens
MNTTDNGVNCLCAICGDRATGKHYGASSCDGCKGFFRRSIRKSHIYSCRFSRQCVVDKDKRNQCRYCRLRKCFRAGMKKEAVQNERDRISTRRSTFDGSNIPSINTLAQAEVRSRQISVSSPGSSTDINVKKIASIGDVCESMKQQLLVLVEWAKYIPAFCELPLDDQVALLRAHAGEHLLLGATKRSMMYKDILLLGNNYVIHRNSCEVEISRVANRVLDELVRPFQEIQIDDNEYACLKAIVFFDPDAKGLSDPVKIKNMRFQVQIGLEDYINDRQYDSRGRFGELLLLLPTLQSITWQMIEQIQFVKLFGMVKIDNLLQEMLLGGASNDGSHLHHPMHPHLSQDPLTGQTILLGPMSTLVHADQISTPETPLPSPPQGSGQEQYKIAANQASVISHQHLSKQKQL

SEQ ID NO: 764193 - protein, 332 aa, Homo sapiens [sequence omitted]

SEQ ID NO: 764194 - protein, 100 aa, Homo sapiens
PESPLCGHEAAAVTAWLPRGGPGEPLRSREASAWLPRGGPGEPLRSREAGLWDLLARPPVALGPWEQGNARAEAVAASLLSVFIESAGYCLTSPPTFQFV

SEQ ID NO: 764195 - protein, 390 aa, Homo sapiens
MNTTDNGVNCLCAICGDRATGKHYGASSCDGCKGFFRRSIRKSHIYSCRFSRQCVVDKDKRNQCRYCRLRKCFRAGMKKEAVQNERDRISTRRSTFDGSNIPSINTLAQAEVRSRQISVSSPGSSTDINVKLVEWAKYIPAFCELPLDDQVALLRAHAGEHLLLGATKRSMMYKDILLLGNNYVIHRNSCEVEISRVANRVLDELVRPFQEIQIDDNEYACLKAIVFFDPDAKGLSDPVKIKNMRFQVQIGLEDYINDRQYDSRGRFGELLLLLPTLQSITWQMIEQIQFVKLFGMVKIDNLLQEMLLGGASNDGSHLHHPMHPHLSQDPLTGQTILLGPMSTLVHADQISTPETPLPSPPQGSGQEQYKIAANQASVISHQHLSKQKQL

SEQ ID NO: 764196 - protein, 409 aa, Homo sapiens
MCAPAAGSSGPFSASLSLSQLPGVCQSDQSTTLGASHPPCFNRSTYAQGTTVAPSAAPATRPAGDQQSVSKAPNVGSRTIAAWPHSDAREGTAPSTTNSVAGHSNSSVFPRAASTTRTQHRGEHAPELVLEPDISAASTPLASKLLGPFPTSWDRSISSPQPGQRTHATPQAPNPSLSEGEIPVLLLDDYSEEEEGRKEEVGTPHQDVPCDYHPCKHLQTPCAELQRRWRCRCPGLSGEDTIPDPPRLQGVTETTDTSALVHWCAPNSVVHGYQIRYSAEGWAGNQSVVGVIYATARQHPLYGLSPGTTYRVCVLAANRAGLSQPRSSGWRSPCAAFTTKPSFALLLSGLCAASGLLLASTVVLSACLCRRGQTLGLQRCDTHLVAYKKPGFDDYPLGAPDRQLAQLLG

SEQ ID NO: 764197 - protein, 409 aa, Homo sapiens; identical to SEQ ID NO: 764196

SEQ ID NO: 764198 - protein, 318 aa, Homo sapiens
MACAEFSFHVPSLEELAGVMQKGLKDNFADVQVSVVDCPDLTKEPFTFPVKGICGKTRIAEVGGVPYLLPLVNQKKVYDLNKIAKEIKLPGAFILGAGAGPFQTLGFNSEFMPVIQTESEHKPPVNGSYFAHVNPADGGCLLEKYSEKCHDFQCALLANLFASEGQPGKVIEVKAKRRTGPLNFVTCMRETLEKHYGNKPIGMGGTFIIQKGKVKSHIMPAEFSSCPLNSDEEVNKWLHFYEMKAPLVCLPVFVSRDPGFDLRLEHTHFFSRHGEGGHYHYDTTPDIVEYLGYFLPAEFLYRIDQPKRRIQLGEIKSA

SEQ ID NO: 764199 - protein, 318 aa, Homo sapiens; identical to SEQ ID NO: 764198

SEQ ID NO: 764200 - protein, 318 aa, Homo sapiens; identical to SEQ ID NO: 764198

SEQ ID NO: 764201 - protein, 259 aa, Homo sapiens
MACAEFSFHVPSLEELAGVMQKGLKDNFADVQVSVVDCPDLTKEPFTFPVKGICGKTRIAEVGGVPYLLPLVNQKKVYDLNKIAKEIKLPGAFILGAGAGPFQTLGFNSEVIEVKAKRRTGPLNFVTCMRETLEKHYGNKPIGMGGTFIIQKGKVKSHIMPAEFSSCPLNSDEEVNKWLHFYEMKAPLVCLPVFVSRDPGFDLRLEHTHFFSRHGEGGHYHYDTTPDIVEYLGYFLPAEFLYRIDQPKRRIQLGEIKSA

SEQ ID NO: 764202 - protein, 299 aa, Homo sapiens
MQKGLKDNFADVQVSVVDCPDLTKEPFTFPVKGICGKTRIAEVGGVPYLLPLVNQKKVYDLNKIAKEIKLPGAFILGAGAGPFQTLGFNSEFMPVIQTESEHKPPVNGSYFAHVNPADGGCLLEKYSEKCHDFQCALLANLFASEGQPGKVIEVKAKRRTGPLNFVTCMRETLEKHYGNKPIGMGGTFIIQKGKVKSHIMPAEFSSCPLNSDEEVNKWLHFYEMKAPLVCLPVFVSRDPGFDLRLEHTHFFSRHGEGGHYHYDTTPDIVEYLGYFLPAEFLYRIDQPKRRIQLGEIKSA

SEQ ID NO: 764203 - protein, 208 aa, Homo sapiens
MACAEFSFHVPSLEELAGVMQKGLKDNFADVQVSVVDCPDLTKEPFTFPVKGICGKTRIAEVGGVPYLLPLVNQKKVYDLNKIAKEIKLPGAFILGAGAGPFQTLGFNSEFMPVIQTESEHKPPVNGSYFAHVNPADGGCLLEKYSEKCHDFQCALLANLFASEGQPGKVIEVKAKRRTGPLNFVTCMRETLAISESHMNGGVFSYLR

SEQ ID NO: 764204 - protein, 268 aa, Homo sapiens
MACAEFSFHVPSLEELAGVMQKGLKDNFADVQVSVVDCPDLTKEPFTFPVKGICGKTRIAEVGGVPYLLPLVNQKKVYDLNKIAKEIKLPGAFILGAGAGPFQTLGFNSEFMPVIQTESEHKPPVNGSYFAHVNPADGGCLLEKYSEKCHDFQCALLANLFASEGQPGKPAEFSSCPLNSDEEVNKWLHFYEMKAPLVCLPVFVSRDPGFDLRLEHTHFFSRHGEGGHYHYDTTPDIVEYLGYFLPAEFLYRIDQPKRRIQLGEIKSA

SEQ ID NO: 764205 - protein, 259 aa, Homo sapiens; identical to SEQ ID NO: 764201

SEQ ID NO: 764206 - protein, 108 aa, Homo sapiens
MALRSVMFSDVSIDFSPEEWEYLDLEQKDLYRDVMLENYSNLVSLAGCFISKPDVISSLEQGKEPWKVVRKGRRQYPDLETKYETKKLSLENDIYEINLSQWKIMERI

SEQ ID NO: 764207 - protein, 465 aa, Homo sapiens
MATLPAAETWIDGGGGVGADAVNLTASLAAGAATGAVETGWLQLLDQAGNLSSSPSALGLPVASPAPSQPWANLTNQFVQPSWRIALWSLAYGVVVAVAVLGNLIVIWIILAHKRMRTVTNYFLVNLAFSDASMAAFNTLVNFIYALHSEWYFGANYCRFQNFFPITAVFASIYSMTAIAVDRYMAIIDPLKPRLSATATKIVIGSIWILAFLLAFPQCLYSKTKVMPGRTLCFVQWPEGPKQHFTYHIIVIILVYCFPLLIMGITYTIVGITLWGGEIPGDTCDKYHEQLKAKRKVVKMMIIVVMTFAICWLPYHIYFILTAIYQQLNRWKYIQQVYLASFWLAMSSTMYNPIIYCCLNKRFRAGFKRAFRWCPFIKVSSYDELELKTTRFHPNRQSSMYTVTRMESMTVVFDPNDADTTRSSRKKRATPRDPSFNGCSRRNSKSASATSSFISSPYTSVDEYS

SEQ ID NO: 764208 - protein, 86 aa, Homo sapiens
PKVTMMQEMGSHDLGQLHSCGFAGYRLPPGCFHVAGGPSDLPSGKSRGWPASQWRRRPRCVRGSGTLKSGHGDGKVICWNPFAFPR

SEQ ID NO: 764209 - protein, 79 aa, Homo sapiens
MNGILLGYEIRYWKAGDKEAAADRVRTAGLDTSARVSGLHPNTKYHVTVRAYNRAGTGPASPSANATTMKPPPRRPPGN

SEQ ID NO: 764210 - protein, 170 aa, Homo sapiens
AKEEARSPADKFPEKAKSPVKEEVKSPEKAKSPLKEDAKAPEKEIPKKEEVKSPFPGSLRLYFNSGPPAALYPKLRRLHSEIPPPSRKKQVSSTGKKWCRILVCKRWRLLALLSSKASPPMLPCSLLHPARNSIPLTPTRLLPTTCSVLNVPTLNLPRGGGSGPFRILSS

SEQ ID NO: 764211 - protein, 736 aa, Homo sapiens
MKEMSANTVLDSQRQQKHYGITSPISLASPKEIDHIYTQKLIDAMKPFGVFEDEEELNHRLVVLGKLNNLVKEWISDVSESKNLPPSVVATVGGKIFTFGSYRLGVHTKGADIDALCVAPRHVERSDFFQSFFEKLKHQDGIRNLRAVEDAFVPVIKFEFDGIEIDLVFARLAIQTISDNLDLRDDSRLRSLDIRCIRSLNGCRVTDEILHLVPNKETFRLTLRAVKLWAKRRGIYSNMLGFLGGVSWAMLVARTCQLYPNAAASTLVHKFFLVFSKWEWPNPVLLKQPEESNLNLPVWDPRVNPSDRYHLMPIITPAYPQQNSTYNVSTSTRTVMVEEFKQGLAVTDEILQGKSDWSKLLEPPNFFQKYRHYIVLTASASTEENHLEWVGLVESKIRVLVGNLERNEFITLAHVNPQSFPGNKEHHKDNNYVSMWFLGIIFRRVENAESVNIDLTYDIQSFTDTVYRQANNINMLKEGMKIEATHVKKKQLHHYLPAEILQKKKKQSLSDVNRSSGGLQSKRLSLDSSCLDSSRDTDNGTPFNSPASKSDSPSVGETERNSAEPAAVIVEKPLSVPPAQGLSIPVIGAKVDSTVKTVSPPTVCTIPTVVGRNVIPRITTPHNPAQGQPHLNGMSNITKTVTPKRSHSPSIDGTPKRLKDVEKFIRLESTFKDPRTAEERKRKSVDAIGGESMPIPTIDTSRKKRLPSKELPDSSSPVPANNIRVIKNSIRLTLNR

SEQ ID NO: 764212 - protein, 692 aa, Homo sapiens
MKPFGVFEDEEELNHRLVVLGKLNNLVKEWISDVSESKNLPPSVVATVGGKIFTFGSYRLGVHTKGADIDALCVAPRHVERSDFFQSFFEKLKHQDGIRNLRAVEDAFVPVIKFEFDGIEIDLVFARLAIQTISDNLDLRDDSRLRSLDIRCIRSLNGCRVTDEILHLVPNKETFRLTLRAVKLWAKRRGIYSNMLGFLGGVSWAMLVARTCQLYPNAAASTLVHKFFLVFSKWEWPNPVLLKQPEESNLNLPVWDPRVNPSDRYHLMPIITPAYPQQNSTYNVSTSTRTVMVEEFKQGLAVTDEILQGKSDWSKLLEPPNFFQKYRHYIVLTASASTEENHLEWVGLVESKIRVLVGNLERNEFITLAHVNPQSFPGNKEHHKDNNYVSMWFLGIIFRRVENAESVNIDLTYDIQSFTDTVYRQANNINMLKEGMKIEATHVKKKQLHHYLPAEILQKKKKQSLSDVNRSSGGLQSKRLSLDSSCLDSSRDTDNGTPFNSPASKSDSPSVGETERNSAEPAAVIVEKPLSVPPAQGLSIPVIGAKVDSTVKTVSPPTVCTIPTVVGRNVIPRITTPHNPAQGQPHLNGMSNITKTVTPKRSHSPSIDGTPKRLKDVEKFIRLESTFKDPRTAEERKRKSVDAIGGESMPIPTIDTSRKKRLPSKELPDSSSPVPANNIRVIKNSIRLTLNR

SEQ ID NO: 764213 - protein, 692 aa, Homo sapiens; identical to SEQ ID NO: 764212

SEQ ID NO: 764214 - protein, 262 aa, Homo sapiens [sequence omitted]

SEQ ID NO: 764215 - protein, 736 aa, Homo sapiens; identical to SEQ ID NO: 764211

SEQ ID NO: 764216 - protein, 498 aa, Homo sapiens
MLGFLGGVSWAMLVARTCQLYPNAAASTLVHKFFLVFSKWEWPNPVLLKQPEESNLNLPVWDPRVNPSDRYHLMPIITPAYPQQNSTYNVSTSTRTVMVEEFKQGLAVTDEILQGKSDWSKLLEPPNFFQKYRHYIVLTASASTEENHLEWVGLVESKIRVLVGNLERNEFITLAHVNPQSFPGNKEHHKDNNYVSMWFLGIIFRRVENAESVNIDLTYDIQSFTDTVYRQANNINMLKEGMKIEATHVKKKQLHHYLPAEILQKKKKQSLSDVNRSSGGLQSKRLSLDSSCLDSSRDTDNGTPFNSPASKSDSPSVGETERNSAEPAAVIVEKPLSVPPAQGLSIPVIGAKVDSTVKTVSPPTVCTIPTVVGRNVIPRITTPHNPAQGQPHLNGMSNITKTVTPKRSHSPSIDGTPKRLKDVEKFIRLESTFKDPRTAEERKRKSVDAIGGESMPIPTIDTSRKKRLPSKELPDSSSPVPANNIRVIKNSIRLTLNR

SEQ ID NO: 764217 - protein, 736 aa, Homo sapiens; identical to SEQ ID NO: 764211

SEQ ID NO: 764218 - protein, 862 aa, Homo sapiens
MGLPRGPLASLLLLQVCWLQCAASEPCRAVFREAEVTLEAGGAEQEPGQALGKVFMGCPGQEPALFSTDNDDFTVRNGETVQERRSLKERNPLKIFPSKRILRRHKRDWVVAPISVPENGKGPFPQRLNQLKSNKDRDTKIFYSITGPGADSPPEGVFAVEKETGWLLLNKPLDREEIAKYELFGHAVSENGASVEDPMNISIIVTDQNDHKPKFTQDTFRGSVLEGVLPGTSVMQVTATDEDDAIYTYNGVVAYSIHSQEPKDPHDLMFTIHRSTGTISVISSGLDREKVPEYTLTIQATDMDGDGSTTTAVAVVEILDANDNAPMFDPQKYEAHVPENAVGHEVQRLTVTDLDAPNSPAWRATYLIMGGDDGDHFTITTHPESNQGILTTRKGLDFEAKNQHTLYVEVTNEAPFVLKLPTSTATIVVHVEDVNEAPVFVPPSKVVEVQEGIPTGEPVCVYTAEDPDKENQKISYRILRDPAGWLAMDPDSGQVTAVGTLDREDEQFVRNNIYEVMVLAMDNGSPPTTGTGTLLLTLIDVNDHGPVPEPRQITICNQSPVRQVLNITDKDLSPHTSPFQAQLTDDSDIYWTAEVNEEGDTVVLSLKKFLKQDTYDVHLSLSDHGNKEQLTVIRATVCDCHGHVETCPGPWKGGFILPVLGAVLALLFLLLVLLLLVRKKRKIKEPLLLPEDDTRDNVFYYGEEGGGEEDQDYDITQLHRGLEARPEVVLRNDVAPTIIPTPMYRPRPANPDEIGNFIIEGRGERGSQRGNGGLQLAKRQDPPLLTTCSLLPQNLKAANTDPTAPPYDTLLVFDYEGSGSDAASLSSLTSSASDQDQDYDYLNEWGSRFKKLADMYGGGEDD

SEQ ID NO: 764219 - protein, 595 aa, Homo sapiens
MQVTATDEDDAIYTYNGVVAYSIHSQEPKDPHDLMFTIHRSTGTISVISSGLDREKVPEYTLTIQATDMDGDGSTTTAVAVVEILDANDNAPMFDPQKYEAHVPENAVGHEVQRLTVTDLDAPNSPAWRATYLIMGGDDGDHFTITTHPESNQGILTTRKGLDFEAKNQHTLYVEVTNEAPFVLKLPTSTATIVVHVEDVNEAPVFVPPSKVVEVQEGIPTGEPVCVYTAEDPDKENQKISYRILRDPAGWLAMDPDSGQVTAVGTLDREDEQFVRNNIYEVMVLAMDNGSPPTTGTGTLLLTLIDVNDHGPVPEPRQITICNQSPVRQVLNITDKDLSPHTSPFQAQLTDDSDIYWTAEVNEEGDTVVLSLKKFLKQDTYDVHLSLSDHGNKEQLTVIRATVCDCHGHVETCPGPWKGGFILPVLGAVLALLFLLLVLLLLVRKKRKIKEPLLLPEDDTRDNVFYYGEEGGGEEDQDYDITQLHRGLEARPEVVLRNDVAPTIIPTPMYRPRPANPDEIGNFIIENLKAANTDPTAPPYDTLLVFDYEGSGSDAASLSSLTSSASDQDQDYDYLNEWGSRFKKLADMYGGGEDD

SEQ ID NO: 764220 - protein, 263 aa, Homo sapiens
AVDLEDPTTPSPFQAQLTDDSDIYWTAEVNEEGDTVVLSLKKFLKQDTYDVHLSLSDHGNKEQLTVIRATVCDCHGHVETCPGPWKGGFILPVLGAVLALLFLLLVLLLLVRKKRKIKEPLLLPEDDTRDNVFYYGEEGGGEEDQDYDITQLHRGLEARPEVVLRNDVAPTIIPTPMYRPRPANPDEIGNFIIENLKAANTDPTAPPYDTLLVFDYEGSGSDAASLSSLTSSASDQDQDYDYLNEWGSRFKKLADMYGGGEDD

SEQ ID NO: 764221 - protein, 835 aa, Homo sapiens
MGLPRGPLASLLLLQVCWLQCAASEPCRAVFREAEVTLEAGGAEQEPGQALGKVFMGCPGQEPALFSTDNDDFTVRNGETVQERRSLKERNPLKIFPSKRILRRHKRDWVVAPISVPENGKGPFPQRLNQLKSNKDRDTKIFYSITGPGADSPPEGVFAVEKETGWLLLNKPLDREEIAKYELFGHAVSENGASVEDPMNISIIVTDQNDHKPKFTQDTFRGSVLEGVLPGTSVMQVTATDEDDAIYTYNGVVAYSIHSQEPKDPHDLMFTIHRSTGTISVISSGLDREKVPEYTLTIQATDMDGDGSTTTAVAVVEILDANDNAPMFDPQKYEAHVPENAVGHEVQRLTVTDLDAPNSPAWRATYLIMGGDDGDHFTITTHPESNQGILTTRKGLDFEAKNQHTLYVEVTNEAPFVLKLPTSTATIVVHVEDVNEAPVFVPPSKVVEVQEGIPTGEPVCVYTAEDPDKENQKISYRILRDPAGWLAMDPDSGQVTAVGTLDREDEQFVRNNIYEVMVLAMDNGSPPTTGTGTLLLTLIDVNDHGPVPEPRQITICNQSPVRQVLNITDKDLSPHTSPFQAQLTDDSDIYWTAEVNEEGDTVVLSLKKFLKQDTYDVHLSLSDHGNKEQLTVIRATVCDCHGHVETCPGPWKGGFILPVLGAVLALLFLLLVLLLLVRKKRKIKEPLLLPEDDTRDNVFYYGEEGGGEEDQDYDITQLHRGLEARPEVVLRNDVAPTIIPTPMYRPRPANPDEIGNFIIENLKAANTDPTAPPYDTLLVFDYEGSGSDAASLSSLTSSASDQDQDYDYLNEWGLAAVGLWARELLCLLVQLNFFF

SEQ ID NO: 764222 - protein, 712 aa, Homo sapiens
MGLPRGPLASLLLLQVCWLQCAASEPCRAVFREAEVTLEAGGAEQEPGQALGKVFMGCPGQEPALFSTDNDDFTVRNGETVQERRSLKERNPLKIFPSKRILRRHKRDWVVAPISVPENGKGPFPQRLNQLKSNKDRDTKIFYSITGPGADSPPEGVFAVEKETGWLLLNKPLDREEIAKYELFGHAVSENGASVEDPMNISIIVTDQNDHKPKFTQDTFRGSVLEGVLPGTSVMQVTATDEDDAIYTYNGVVAYSIHSQEPKDPHDLMFTIHRSTGTISVISSGLDREKVPEYTLTIQATDMDGDGSTTTAVAVVEILDANDNAPMFDPQKYEAHVPENAVGHEVQRLTVTDLDAPNSPAWRATYLIMGGDDGDHFTITTHPESNQGILTTRKGLDFEAKNQHTLYVEVTNEAPFVLKLPTSTATIVVHVEDVNEAPVFVPPSKVVEVQEGIPTGEPVCVYTAEDPDKENQKISYRILRDPAGWLAMDPDSGQVTAVGTLDREDEQFVRNNIYEVMVLAMDNGSPPTTGTGTLLLTLIDVNDHGPVPEPRQITICNQSPVRQVLNITDKDLSPHTSPFQAQLTDDSDIYWTAEVNEEGDTVVLSLKKFLKQDTYDVHLSLSDHGNKEQLTVIRATVCDCHGHVETCPGPWKGGFILPVLGAVLALLFLLLVLLLLVRKKRKIKEPLLLPEDDTRDNVFYYGEEGGGEEDQT

SEQ ID NO: 764223 - protein, 489 aa, Homo sapiens
MGLPRGPLASLLLLQVCWLQCAASEPCRAVFREAEVTLEAGGAEQEPGQALGKVFMGCPGQEPALFSTDNDDFTVRNGETVQERRSLKERNPLKIFPSKRILRRHKRDWVVAPISVPENGKGPFPQRLNQLKSNKDRDTKIFYSITGPGADSPPEGVFAVEKETGWLLLNKPLDREEIAKYELFGHAVSENGASVEDPMNISIIVTDQNDHKPKFTQDTFRGSVLEGVLPGTSVMQVTATDEDDAIYTYNGVVAYSIHSQEPKDPHDLMFTIHRSTGTISVISSGLDREKVPEYTLTIQATDMDGDGSTTTAVAVVEILDANDNAPMFDPQKYEAHVPENAVGHEVQRLTVTDLDAPNSPAWRATYLIMGGDDGDHFTITTHPESNQGILTTRKGLDFEAKNQHTLYVEVTNEAPFVLKLPTSTATIVVHVEDVNEAPVFVPPSKVVEVQEGIPTGEPVCVYTAEDPDKENQKIRVASEAKFPEASYLP

SEQ ID NO: 764224 - protein, 446 aa, Homo sapiens
MGLPRGPLASLLLLQVCWLQCAASEPCRAVFREAEVTLEAGGAEQEPGQALGKVFMGCPGQEPALFSTDNDDFTVRNGETVQERRSLKERNPLKIFPSKRILRRHKRDWVVAPISVPENGKGPFPQRLNQLKSNKDRDTKIFYSITGPGADSPPEGVFAVEKETGWLLLNKPLDREEIAKYELFGHAVSENGASVEDPMNISIIVTDQNDHKPKFTQDTFRGSVLEGVLPGTSVMQVTATDEDDAIYTYNGVVAYSIHSQEPKDPHDLMFTIHRSTGTISVISSGLDREKVPEYTLTIQATDMDGDGSTTTAVAVVEILDANDNAPMFDPQKYEAHVPENAVGHEVQRLTVTDLDAPNSPAWRATYLIMGGDDGDHFTITTHPESNQGILTTRKGLDFEAKNQHTLYVEVTNEAPFVLKLPTSTATIVVHVEDVNEAPVFAWACCD

SEQ ID NO: 764225 - protein, 829 aa, Homo sapiens
MGLPRGPLASLLLLQVCWLQCAASEPCRAVFREAEVTLEAGGAEQEPGQALGKVFMGCPGQEPALFSTDNDDFTVRNGETVQERRSLKERNPLKIFPSKRILRRHKRDWVVAPISVPENGKGPFPQRLNQLKSNKDRDTKIFYSITGPGADSPPEGVFAVEKETGWLLLNKPLDREEIAKYELFGHAVSENGASVEDPMNISIIVTDQNDHKPKFTQDTFRGSVLEGVLPGTSVMQVTATDEDDAIYTYNGVVAYSIHSQEPKDPHDLMFTIHRSTGTISVISSGLDREKVPEYTLTIQATDMDGDGSTTTAVAVVEILDANDNAPMFDPQKYEAHVPENAVGHEVQRLTVTDLDAPNSPAWRATYLIMGGDDGDHFTITTHPESNQGILTTRKGLDFEAKNQHTLYVEVTNEAPFVLKLPTSTATIVVHVEDVNEAPVFVPPSKVVEVQEGIPTGEPVCVYTAEDPDKENQKISYRILRDPAGWLAMDPDSGQVTAVGTLDREDEQFVRNNIYEVMVLAMDNGSPPTTGTGTLLLTLIDVNDHGPVPEPRQITICNQSPVRQVLNITDKDLSPHTSPFQAQLTDDSDIYWTAEVNEEGDTVVLSLKKFLKQDTYDVHLSLSDHGNKEQLTVIRATVCDCHGHVETCPGPWKGGFILPVLGAVLALLFLLLVLLLLVRKKRKIKEPLLLPEDDTRDNVFYYGEEGGGEEDQDYDITQLHRGLEARPEVVLRNDVAPTIIPTPMYRPRPANPDEIGNFIIENLKAANTDPTAPPYDTLLVFDYEGSGSDAASLSSLTSSASDQDQDYDYLNEWGSRFKKLADMYGGGEDD

SEQ ID NO: 764226 - protein, 829 aa, Homo sapiens; identical to SEQ ID NO: 764225

SEQ ID NO: 764227 - protein, 116 aa, Homo sapiens
MNNAFFHFYLQKPLGEGREGLTERKWRLAAGKRQDPPLLTTCSLLPQNLKAANTDPTAPPYDTLLVFDYEGSGSDAASLSSLTSSASDQDQDYDYLNEWGSRFKKLADMYGGGEDD

SEQ ID NO: 764228 - protein, 808 aa, Homo sapiens
MGLPRGPLASLLLLQVCWLQCAASEPCRAVFREAEVTLEAGGAEQEPGQALGKVFMGCPGQEPALFSTDNDDFTVRNGETVQERRSLKERNPLKIFPSKRILRRHKRDWVVAPISVPENGKGPFPQRLNQLKSNKDRDTKIFYSITGPGADSPPEGVFAVEKETGWLLLNKPLDREEIAKYELFGHAVSENGASVEDPMNISIIVTDQNDHKPKFTQDTFRGSVLEGVLPGTSVMQVTATDEDDAIYTYNGVVAYSIHSQEPKDPHDLMFTIHRSTGTISVISSGLDREKVPEYTLTIQATDMDGDGSTTTAVAVVEILDANDNAPMFDPQKYEAHVPENAVGHEVQRLTVTDLDAPNSPAWRATYLIMGGDDGDHFTITTHPESNQGILTTRKGLDFEAKNQHTLYVEVTNEAPFVLKLPTSTATIVVHVEDVNEAPVFVPPSKVVEVQEGIPTGEPVCVYTAEDPDKENQKISYRILRDPAGWLAMDPDSGQVTAVGTLDREDEQFVRNNIYEVMVLAMDNGSPPTTGTGTLLLTLIDVNDHGPVPEPRQITICNQSPVRQVLNITDKDLSPHTSPFQAQLTDDSDIYWTAEVNEEGDTVVLSLKKFLKQDTYDVHLSLSDHGNKEQLTVIRATVCDCHGHVETCPGPWKGGFILPVLGAVLALLFLLLVLLLLVRKKRKIKEPLLLPEDDTRDNVFYYGEEGGGEEDQDYDITQLHRGLEARPEVVLRNDVAPTIIPTPMYRPRPANPDEIGNFIIEVLLLCRSPPWQEALATGYSLDPAWPVPPFPPTTPGKTKTQPFHKYMSP

SEQ ID NO: 764229 - protein, 540 aa, Homo sapiens
MGLPRGPLASLLLLQVCWLQCAASEPCRAVFREAEVTLEAGGAEQEPGQALGKVFMGCPGQEPALFSTDNDDFTVRNGETVQERRSLKERNPLKIFPSKRILRRHKRDWVVAPISVPENGKGPFPQRLNQLKSNKDRDTKIFYSITGPGADSPPEGVFAVEKETGWLLLNKPLDREEIAKYELFGHAVSENGASVEDPMNISIIVTDQNDHKPKFTQDTFRGSVLEGVLPGTSVMQVTATDEDDAIYTYNGVVAYSIHSQEPKDPHDLMFTIHRSTGTISVISSGLDREKVPEYTLTIQATDMDGDGSTTTAVAVVEILDANDNAPMFDPQKYEAHVPENAVGHEVQRLTVTDLDAPNSPAWRATYLIMGGDDGDHFTITTHPESNQGILTTRKGLDFEAKNQHTLYVEVTNEAPFVLKLPTSTATIVVHVEDVNEAPVFVPPSKVVEVQEGIPTGEPVCVYTAEDPDKENQKISYRILRDPAGWLAMDPDSGQVTAVGTLDREDEQFVRNNIYEVMVLAMDNGSPPTTGTGTLAWACCD

SEQ ID NO: 764230 - protein, 68 aa, Homo sapiens
APVVPTGPCVVSRAEMAGVGRPDLVGLGEPGPIGEWTAPRRRLPTCLPGPSCSGWLSRLSAGGGCGPA

SEQ ID NO: 764231 - protein, 248 aa, Homo sapiens
TPRVGGATEGLWARSWNLRLSVRLQFLTPTLRAARTMAAPPQLRALLVVVNALLRKRRYHAALAVLKGFRNGAVYGAKIRAPHALVMTFLFRNGSLQEKLWAILQATYIHSWNLARFVFTYKGLRALQSYIQGKTYPAHAFLAAFLGGILVFGENNNINSQINMYLLSRVLFALSRLAVEKGYIPEPRWDPFPLLTAVVWGLVLWLFEYHRSTLQPSLQSSMTYLYEDSNVWHDISDFLVYNKSRPSN

SEQ ID NO: 764232 - protein, 107 aa, Homo sapiens
TPRVGGATEGLWARSWNLRLSVRLQFLTPTLRAARTMAAPPQLRALLVVVNALLRKRRYHAALAVLKGFRNGAVYGAKIRAPHALVMTFLFRNGRSTCTCCHASCLP

SEQ ID NO: 764233 - protein, 248 aa, Homo sapiens; identical to SEQ ID NO: 764231

SEQ ID NO: 764234 - protein, 291 aa, Homo sapiens
TPRVGGATEGLWARSWNLRLSVRLQFLTPTLRAARTMAAPPQLRALLVVVNALLRKRRYHAALAVLKGFRNGAVEWGRRAGLGLRDVLPGVRGASSKSDAAVLFALEQSSCVSKSRSYGAKIRAPHALVMTFLFRNGSLQEKLWAILQATYIHSWNLARFVFTYKGLRALQSYIQGKTYPAHAFLAAFLGGILVFGENNNINSQINMYLLSRVLFALSRLAVEKGYIPEPRWDPFPLLTAVVWGLVLWLFEYHRSTLQPSLQSSMTYLYEDSNVWHDISDFLVYNKSRPSN

SEQ ID NO: 764235 - protein, 210 aa, Homo sapiens
TAGPAEAAMREAEAGPPQVGLSRPTCSLPASSPGPALPPGCVSRPDSGLPTTSLDSAPAQLPVALVGPQLPEAKLPRPRSGLTVASPGSAPALRWHLQVPNGLRSVGSSRPSLGLPAASAGPNRPEVGLSRPSSSLPAASAGLSCPQVGLEVGLEELQVGLPGPSSVLLASPGAKLPRVSLSRPSSSCLPVASFGPAQLMALSSLPRPRF

SEQ ID NO: 764236 - protein, 263 aa, Homo sapiens
SWACRGRHAGGRGRASSSRPLQTHLQPPGVLSGPSSSSRLRLQARLLPPNNLFGLSACDLLAALVGPQLPQAKLPRPRSGLTVASPGSALPPGCVSRPDSGLPTTSLDSAPAQLPVALVGPQLPEAKLPRPRSGLTVASPGSAPALRWHLQVPNGLRSVGSSRPSLGLPAASAGPNRPEVGLSRPSSSLPAASAGLSCPQVGLEVGLEELQVGLPGPSSVLLASPGAKLPRVSLSRPSSSCLPVASFGPAQLMALSSLPRPRF

SEQ ID NO: 764237 - protein, 1682 aa, Homo sapiens
MLASPEPKGLVPFTKESFELIKQHIAKTHNEDHEEEDLKPNPDLEVGKKLPFIYGNLSQGMVSEPLEDVDPYYYKKKNTFIVLNKNRTIFRFNAASILCTLSPFNCIRRTTIKVLVHPFFQLFILISVLIDCVFMSLTNLPKWRPVLENTLLGIYTFEILVKLFARGVWAGSFSFLGDPWNWLDFSVTVFEVIIRYSPLDFIPTLQTARTLRILKIIPLNQGLKSLVGVLIHCLKQLIGVIILTLFFLSIFSLIGMGLFMGNLKHKCFRWPQENENETLHNRTGNPYYIRETENFYYLEGERYALLCGNRTDAGQCPEGYVCVKAGINPDQGFTNFDSFGWALFALFRLMAQDYPEVLYHLILYASGKVYMIFFVVVSFLFSFYMASLFLGILAMAYEEEKQRVGEISKKIEPKFQQTGKELQEGNETDEAKTIQIEMKKRSPISTDTSLDVLEDATLRHKEELEKSKKICPLYWYKFAKTFLIWNCSPCWLKLKEFVHRIIMAPFTDLFLIICIILNVCFLTLEHYPMSKQTNTLLNIGNLVFIGIFTAEMIFKIIAMHPYGYFQVGWNIFDSMIVFHGLIELCLANVAGMALLRLFRMLRIFKLGKYWPTFQILMWSLSNSWVALKDLVLLLFTFIFFSAAFGMKLFGKNYEEFVCHIDKDCQLPRWHMHDFFHSFLNVFRILCGEWVETLWDCMEVAGQSWCIPFYLMVILIGNLLVLYLFLALVSSFSSCKDVTAEENNEAKNLQLAVARIKKGINYVLLKILCKTQNVPKDTMDHVNEVYVKEDISDHTLSELSNTQDFLKDKEKSSGTEKNATENESQSLIPSPSVSETVPIASGESDIENLDNKEIQSKSGDGGSKEKIKQSSSSECSTVDIAISEEEEMFYGGERSKHLKNGCRRGSSLGQISGASKKGKIWQNIRKTCCKIVENNWFKCFIGLVTLLSTGTLAFEDIYIDQRKTIKILLEYADMIFTYIFILEMLLKWMAYGFKAYFSNGWYRLDFVVVIVFCLSLIGKTREELKPLISMKFLRPLRVLSQFERMKVVVRALIKTTLPTLNVFLVCLMIWLIFSIMGVDLFAGRFYECIDPTSGERFPSSEVMNKSRCESLLFNESMLWENAKMNFDNVGNGFLSLLQVATFNGWITIMNSAIDSVAVNIQPHFEVNIYMYCYFINFIIFGVFLPLSMLITVIIDNFNKHKIKLGGSNIFITVKQRKQYRRLKKLMYEDSQRPVPRPLNKLQGFIFDVVTSQAFNVIVMVLICFQAIAMMIDTDVQSLQMSIALYWINSIFVMLYTMECILKLIAFRCFYFTIAWNIFDFMVVIFSITGLCLPMTVGSYLVPPSLVQLILLSRIIHMLRLGKGPKVFHNLMLPLMLSLPALLNIILLIFLVMFIYAVFGMYNFAYVKKEAGINDVSNFETFGNSMLCLFQVAIFAGWDGMLDAIFNSKWSDCDPDKINPGTQVRGDCGNPSVGIFYFVSYILISWLIIVNMYIVVVMEFLNIASKKKNKTLSEDDFRKFFQVWKRFDPDRTQYIDSSKLSDFAAALDPPLFMAKPNKGQLIALDLPMAVGDRIHCLDILLAFTKRVMGQDVRMEKVVSEIESGFLLANPFKITCEPITTTLKRKQEAVSATIIQRAYKNYRLRRNDKNTSDIHMIDGDRDVHATKEGAYFDKAKEKSPIQSQI

SEQ ID NO: 764238 - protein, 44 aa, Homo sapiens
MPGCNNQFLERHVNQSKPKICNPLTLLETVRKRRYGLDLNSRKY

SEQ ID NO: 764239 - protein, 84 aa, Homo sapiens
FKDINFRRLEANMLEPPFCPDPHAVYCKDVLDIEQFSAVKGIYLDTADEDFYARFATGCVSIPWQNEGCLTMVPSEKEVEPKQC

SEQ ID NO: 764240 - protein, 70 aa, Homo sapiens
GLGCLIYEMIQGHSPFKKYKEKVKWEEVDQRIKNDTEEYSEKFSEDAKSICRMGCLTMVPSEKEVEPKQC

SEQ ID NO: 764241 - protein, 256 aa, Homo sapiens
MAHRPPSPALASVLLALLLSGAARAAEIVGGHEAQPHSRPYMASLQMRGNPGSHFCGGTLIHPSFVLTAAHCLRDIPQRLVNVVLGAHNVRTQEPTQQHFSVAQVFLNNYDAENKLNDVLLIQLSSPANLSASVATVQLPQQDQPVPHGTQCLAMGWGRVGAHDPPAQVLQELNVTVVTFFCRPHNICTFVPRRKAGICFGDSGGPLICDGIIQGIDSFVIWGCATRLFPDFFTRVALYVDWIRSTLRRVEAKGRP

SEQ ID NO: 764242 - protein, 2896 aa, Homo sapiens
MWPTRRLVTIKRSGVDGPHFPLSLSTCLFGRGIECDIRIQLPVVSKQHCKIEIHEQEAILHNFSSTNPTQVNGSVIDEPVRLKHGDVITIIDRSFRYENESLQNGRKSTEFPRKIREQEPARRVSRSSFSSDPDESEGIPLKRRRVSFGGHLRPELFDENLPPNTPLKRGEAPTKRKSLVMHTPPVLKKIIKEQPQPSGKQESGSEIHVEVKAQSLVISPPAPSPRKTPVASDQRRRSCKTAPASSSKSQTEVPKRGGERVATCLQKRVSISRSQHDILQMICSKRRSGASEANLIVAKSWADVVKLGAKQTQTKVIKHGPQRSMNKRQRRPATPKKPVGEVHSQFSTGHANSPCTIIIGKAHTEKVHVPARPYRVLNNFISNQKMDFKEDLSGIAEMFKTPVKEQPQLTSTCHIAISNSENLLGKQFQGTDSGEEPLLPTSESFGGNVFFSAQNAAKQPSDKCSASPPLRRQCIRENGNVAKTPRNTYKMTSLETKTSDTETEPSKTVSTVNRSGRSTEFRNIQKLPVESKSEETNTEIVECILKRGQKATLLQQRREGEMKEIERPFETYKENIELKENDEKMKAMKRSRTWGQKCAPMSDLTDLKSLPDTELMKDTARGQNLLQTQDHAKAPKSEKGKITKMPCQSLQPEPINTPTHTKQQLKASLGKVGVKEELLAVGKFTRTSGETTHTHREPAGDGKSIRTFKESPKQILDPAARVTGMKKWPRTPKEEAQSLEDLAGFKELFQTPGPSEESMTDEKTTKIACKSPPPESVDTPTSTKQWPKRSLRKADVEEEFLALRKLTPSAGKAMLTPKPAGGDEKDIKAFMGTPVQKLDLAGTLPGSKRQLQTPKEKAQALEDLAGFKELFQTPGHTEELVAAGKTTKIPCDSPQSDPVDTPTSTKQRPKRSIRKADVEGELLACRNLMPSAGKAMHTPKPSVGEEKDIIIFVGTPVQKLDLTENLTGSKRRPQTPKEEAQALEDLTGFKELFQTPGHTEEAVAAGKTTKMPCESSPPESADTPTSTRRQPKTPLEKRDVQKELSALKKLTQTSGETTHTDKVPGGEDKSINAFRETAKQKLDPAASVTGSKRHPKTKEKAQPLEDLAGLKELFQTPVCTDKPTTHEKTTKIACRSQPDPVDTPTSSKPQSKRSLRKVDVEEEFFALRKRTPSAGKAMHTPKPAVSGEKNIYAFMGTPVQKLDLTENLTGSKRRLQTPKEKAQALEDLAGFKELFQTRGHTEESMTNDKTAKVACKSSQPDPDKNPASSKRRLKTSLGKVGVKEELLAVGKLTQTSGETTHTHTEPTGDGKSMKAFMESPKQILDSAASLTGSKRQLRTPKGKSEVPEDLAGFIELFQTPSHTKESMTNEKTTKVSYRASQPDLVDTPTSSKPQPKRSLRKADTEEEFLAFRKQTPSAGKAMHTPKPAVGEEKDINTFLGTPVQKLDQPGNLPGSNRRLQTRKEKAQALEELTGFRELFQTPCTDNPTTDEKTTKKILCKSPQSDPADTPTNTKQRPKRSLKKADVEEEFLAFRKLTPSAGKAMHTPKAAVGEEKDINTFVGTPVEKLDLLGNLPGSKRRPQTPKEKAKALEDLAGFKELFQTPGHTEESMTDDKITEVSCKSPQPDPVKTPTSSKQRLKISLGKVGVKEEVLPVGKLTQTSGKTTQTHRETAGDGKSIKAFKESAKQMLDPANYGTGMERWPRTPKEEAQSLEDLAGFKELFQTPDHTEESTTDDKTTKIACKSPPPESMDTPTSTRRRPKTPLGKRDIVEELSALKQLTQTTHTDKVPGDEDKGINVFRETAKQKLDPAASVTGSKRQPRTPKGKAQPLEDLAGLKELFQTPICTDKPTTHEKTTKIACRSPQPDPVGTPTIFKPQSKRSLRKADVEEESLALRKRTPSVGKAMDTPKPAGGDEKDMKAFMGTPVQKLDLPGNLPGSKRWPQTPKEKAQALEDLAGFKELFQTPGTDKPTTDEKTTKIACKSPQPDPVDTPASTKQRPKRNLRKADVEEEFLALRKRTPSAGKAMDTPKPAVSDEKNINTFVETPVQKLDLLGNLPGSKRQPQTPKEKAEALEDLVGFKELFQTPGHTEESMTDDKITEVSCKSPQPESFKTSRSSKQRLKIPLVKVDMKEEPLAVSKLTRTSGETTQTHTEPTGDSKSIKAFKESPKQILDPAASVTGSRRQLRTRKEKARALEDLVDFKELFSAPGHTEESMTIDKNTKIPCKSPPPELTDTATSTKRCPKTRPRKEVKEELSAVERLTQTSGQSTHTHKEPASGDEGIKVLKQRAKKKPNPVEEEPSRRRPRAPKEKAQPLEDLAGFTELSETSGHTQESLTAGKATKIPCESPPLEVVDTTASTKRHLRTRVQKVQVKEEPSAVKFTQTSGETTDADKEPAGEDKGIKALKESAKQTPAPAASVTGSRRRPRAPRESAQAIEDLAGFKDPAAGHTEESMTDDKTTKIPCKSSPELEDTATSSKRRPRTRAQKVEVKEELLAVGKLTQTSGETTHTDKEPVGEGKGTKAFKQPAKRKLDAEDVIGSRRQPRAPKEKAQPLEDLASFQELSQTPGHTEELANGAADSFTSAPKQTPDSGKPLKISRRVLRAPKVEPVGDVVSTRDPVKSQSKSNTSLPPLPFKRGGGKDGSVTGTKRLRCMPAPEEIVEELPASKKQRVAPRARGKSSEPVVIMKRSLRTSAKRIEPAEELNSNDMKTNKEEHKLQDSVPENKGISLRSRRQNKTEAEQQITEVFVLAERIEINRNEKKPMKTSPEMDIQNPDDGARKPIPRDKVTENKRCLRSARQNESSQPKVAEESGGQKSAKVLMQNQKGKGEAGNSDSMCLRSRKTKSQPAASTLESKSVQRVTRSVKRCAENPKKAEDNVCVKKIRTRSHRDSEDI

SEQ ID NO: 764243 - protein, 2172 aa, Homo sapiens
RGFPKVHSSISAQSLEDLAGFKELFQTPGPSEESMTDEKTTKIACKSPPPESVDTPTSTKQWPKRSLRKADVEEEFLALRKLTPSAGKAMLTPKPAGGDEKDIKAFMGTPVQKLDLAGTLPGSKRQLQTPKEKAQALEDLAGFKELFQTPGHTEELVAAGKTTKIPCDSPQSDPVDTPTSTKQRPKRSIRKADVEGELLACRNLMPSAGKAMHTPKPSVGEEKDIIIFVGTPVQKLDLTENLTGSKRRPQTPKEEAQALEDLTGFKELFQTPGHTEEAVAAGKTTKMPCESSPPESADTPTSTRRQPKTPLEKRDVQKELSALKKLTQTSGETTHTDKVPGGEDKSINAFRETAKQKLDPAASVTGSKRHPKTKEKAQPLEDLAGLKELFQTPVCTDKPTTHEKTTKIACRSQPDPVDTPTSSKPQSKRSLRKVDVEEEFFALRKRTPSAGKAMHTPKPAVSGEKNIYAFMGTPVQKLDLTENLTGSKRRLQTPKEKAQALEDLAGFKELFQTRGHTEESMTNDKTAKVACKSSQPDPDKNPASSKRRLKTSLGKVGVKEELLAVGKLTQTSGETTHTHTEPTGDGKSMKAFMESPKQILDSAASLTGSKRQLRTPKGKSEVPEDLAGFIELFQTPSHTKESMTNEKTTKVSYRASQPDLVDTPTSSKPQPKRSLRKADTEEEFLAFRKQTPSAGKAMHTPKPAVGEEKDINTFLGTPVQKLDQPGNLPGSNRRLQTRKEKAQALEELTGFRELFQTPCTDNPTTDEKTTKKILCKSPQSDPADTPTNTKQRPKRSLKKADVEEEFLAFRKLTPSAGKAMHTPKAAVGEEKDINTFVGTPVEKLDLLGNLPGSKRRPQTPKEKAKALEDLAGFKELFQTPGHTEESMTDDKITEVSCKSPQPDPVKTPTSSKQRLKISLGKVGVKEEVLPVGKLTQTSGKTTQTHRETAGDGKSIKAFKESAKQMLDPANYGTGMERWPRTPKEEAQSLEDLAGFKELFQTPDHTEESTTDDKTTKIACKSPPPESMDTPTSTRRRPKTPLGKRDIVEELSALKQLTQTTHTDKVPGDEDKGINVFRETAKQKLDPAASVTGSKRQPRTPKGKAQPLEDLAGLKELFQTPICTDKPTTHEKTTKIACRSPQPDPVGTPTIFKPQSKRSLRKADVEEESLALRKRTPSVGKAMDTPKPAGGDEKDMKAFMGTPVQKLDLPGNLPGSKRWPQTPKEKAQALEDLAGFKELFQTPGTDKPTTDEKTTKIACKSPQPDPVDTPASTKQRPKRNLRKADVEEEFLALRKRTPSAGKAMDTPKPAVSDEKNINTFVETPVQKLDLLGNLPGSKRQPQTPKEKAEALEDLVGFKELFQTPGHTEESMTDDKITEVSCKSPQPESFKTSRSSKQRLKIPLVKVDMKEEPLAVSKLTRTSGETTQTHTEPTGDSKSIKAFKESPKQILDPAASVTGSRRQLRTRKEKARALEDLVDFKELFSAPGHTEESMTIDKNTKIPCKSPPPELTDTATSTKRCPKTRPRKEVKEELSAVERLTQTSGQSTHTHKEPASGDEGIKVLKQRAKKKPNPVEEEPSRRRPRAPKEKAQPLEDLAGFTELSETSGHTQESLTAGKATKIPCESPPLEVVDTTASTKRHLRTRVQKVQVKEEPSAVKFTQTSGETTDADKEPAGEDKGIKALKESAKQTPAPAASVTGSRRRPRAPRESAQAIEDLAGFKDPAAGHTEESMTDDKTTKIPCKSSPELEDTATSSKRRPRTRAQKVEVKEELLAVGKLTQTSGETTHTDKEPVGEGKGTKAFKQPAKRKLDAEDVIGSRRQPRAPKEKAQPLEDLASFQELSQTPGHTEELANGAADSFTSAPKQTPDSGKPLKISRRVLRAPKVEPVGDVVSTRDPVKSQSKSNTSLPPLPFKRGGGKDGSVTGTKRLRCMPAPEEIVEELPASKKQRVAPRARGKSSEPVVIMKRSLRTSAKRIEPAEELNSNDMKTNKEEHKLQDSVPENKGISLRSRRQNKTEAEQQITEVFVLAERIEINRNEKKPMKTSPEMDIQNPDDGARKPIPRDKVTENKRCLRSARQNESSQPKVAEESGGQKSAKVLMQNQKGKGEAGNSDSMCLRSRKTKSQPAASTLESKSVQRVTRSVKRCAENPKKAEDNVCVKKIRTRSHRDSEDI

SEQ ID NO: 764244 - protein, 3256 aa, Homo sapiens
MWPTRRLVTIKRSGVDGPHFPLSLSTCLFGRGIECDIRIQLPVVSKQHCKIEIHEQEAILHNFSSTNPTQVNGSVIDEPVRLKHGDVITIIDRSFRYENESLQNGRKSTEFPRKIREQEPARRVSRSSFSSDPDEKAQDSKAYSKITEGKVSGNPQVHIKNVKEDSTADDSKDSVAQGTTNVHSSEHAGRNGRNAADPISGDFKEISSVKLVSRYGELKSVPTTQCLDNSKKNESPFWKLYESVKKELDVKSQKENVLQYCRKSGLQTDYATEKESADGLQGETQLLVSRKSRPKSGGSGHAVAEPASPEQELDQNKGKGRDVESVQTPSKAVGASFPLYEPAKMKTPVQYSQQQNSPQKHKNKDLYTTGRRESVNLGKSEGFKAGDKTLTPRKLSTRNRTPAKVEDAADSATKPENLSSKTRGSIPTDVEVLPTETEIHNEPFLTLWLTQVERKIQKDSLSKPEKLGTTAGQMCSGLPGLSSVDINNFGDSINESEGIPLKRRRVSFGGHLRPELFDENLPPNTPLKRGEAPTKRKSLVMHTPPVLKKIIKEQPQPSGKQESGSEIHVEVKAQSLVISPPAPSPRKTPVASDQRRRSCKTAPASSSKSQTEVPKRGGERVATCLQKRVSISRSQHDILQMICSKRRSGASEANLIVAKSWADVVKLGAKQTQTKVIKHGPQRSMNKRQRRPATPKKPVGEVHSQFSTGHANSPCTIIIGKAHTEKVHVPARPYRVLNNFISNQKMDFKEDLSGIAEMFKTPVKEQPQLTSTCHIAISNSENLLGKQFQGTDSGEEPLLPTSESFGGNVFFSAQNAAKQPSDKCSASPPLRRQCIRENGNVAKTPRNTYKMTSLETKTSDTETEPSKTVSTVNRSGRSTEFRNIQKLPVESKSEETNTEIVECILKRGQKATLLQQRREGEMKEIERPFETYKENIELKENDEKMKAMKRSRTWGQKCAPMSDLTDLKSLPDTELMKDTARGQNLLQTQDHAKAPKSEKGKITKMPCQSLQPEPINTPTHTKQQLKASLGKVGVKEELLAVGKFTRTSGETTHTHREPAGDGKSIRTFKESPKQILDPAARVTGMKKWPRTPKEEAQSLEDLAGFKELFQTPGPSEESMTDEKTTKIACKSPPPESVDTPTSTKQWPKRSLRKADVEEEFLALRKLTPSAGKAMLTPKPAGGDEKDIKAFMGTPVQKLDLAGTLPGSKRQLQTPKEKAQALEDLAGFKELFQTPGHTEELVAAGKTTKIPCDSPQSDPVDTPTSTKQRPKRSIRKADVEGELLACRNLMPSAGKAMHTPKPSVGEEKDIIIFVGTPVQKLDLTENLTGSKRRPQTPKEEAQALEDLTGFKELFQTPGHTEEAVAAGKTTKMPCESSPPESADTPTSTRRQPKTPLEKRDVQKELSALKKLTQTSGETTHTDKVPGGEDKSINAFRETAKQKLDPAASVTGSKRHPKTKEKAQPLEDLAGLKELFQTPVCTDKPTTHEKTTKIACRSQPDPVDTPTSSKPQSKRSLRKVDVEEEFFALRKRTPSAGKAMHTPKPAVSGEKNIYAFMGTPVQKLDLTENLTGSKRRLQTPKEKAQALEDLAGFKELFQTRGHTEESMTNDKTAKVACKSSQPDPDKNPASSKRRLKTSLGKVGVKEELLAVGKLTQTSGETTHTHTEPTGDGKSMKAFMESPKQILDSAASLTGSKRQLRTPKGKSEVPEDLAGFIELFQTPSHTKESMTNEKTTKVSYRASQPDLVDTPTSSKPQPKRSLRKADTEEEFLAFRKQTPSAGKAMHTPKPAVGEEKDINTFLGTPVQKLDQPGNLPGSNRRLQTRKEKAQALEELTGFRELFQTPCTDNPTTDEKTTKKILCKSPQSDPADTPTNTKQRPKRSLKKADVEEEFLAFRKLTPSAGKAMHTPKAAVGEEKDINTFVGTPVEKLDLLGNLPGSKRRPQTPKEKAKALEDLAGFKELFQTPGHTEESMTDDKITEVSCKSPQPDPVKTPTSSKQRLKISLGKVGVKEEVLPVGKLTQTSGKTTQTHRETAGDGKSIKAFKESAKQMLDPANYGTGMERWPRTPKEEAQSLEDLAGFKELFQTPDHTEESTTDDKTTKIACKSPPPESMDTPTSTRRRPKTPLGKRDIVEELSALKQLTQTTHTDKVPGDEDKGINVFRETAKQKLDPAASVTGSKRQPRTPKGKAQPLEDLAGLKELFQTPICTDKPTTHEKTTKIACRSPQPDPVGTPTIFKPQSKRSLRKADVEEESLALRKRTPSVGKAMDTPKPAGGDEKDMKAFMGTPVQKLDLPGNLPGSKRWPQTPKEKAQALEDLAGFKELFQTPGTDKPTTDEKTTKIACKSPQPDPVDTPASTKQRPKRNLRKADVEEEFLALRKRTPSAGKAMDTPKPAVSDEKNINTFVETPVQKLDLLGNLPGSKRQPQTPKEKAEALEDLVGFKELFQTPGHTEESMTDDKITEVSCKSPQPESFKTSRSSKQRLKIPLVKVDMKEEPLAVSKLTRTSGETTQTHTEPTGDSKSIKAFKESPKQILDPAASVTGSRRQLRTRKEKARALEDLVDFKELFSAPGHTEESMTIDKNTKIPCKSPPPELTDTATSTKRCPKTRPRKEVKEELSAVERLTQTSGQSTHTHKEPASGDEGIKVLKQRAKKKPNPVEEEPSRRRPRAPKEKAQPLEDLAGFTELSETSGHTQESLTAGKATKIPCESPPLEVVDTTASTKRHLRTRVQKVQVKEEPSAVKFTQTSGETTDADKEPAGEDKGIKALKESAKQTPAPAASVTGSRRRPRAPRESAQAIEDLAGFKDPAAGHTEESMTDDKTTKIPCKSSPELEDTATSSKRRPRTRAQKVEVKEELLAVGKLTQTSGETTHTDKEPVGEGKGTKAFKQPAKRKLDAEDVIGSRRQPRAPKEKAQPLEDLASFQELSQTPGHTEELANGAADSFTSAPKQTPDSGKPLKISRRVLRAPKVEPVGDVVSTRDPVKSQSKSNTSLPPLPFKRGGGKDGSVTGTKRLRCMPAPEEIVEELPASKKQRVAPRARGKSSEPVVIMKRSLRTSAKRIEPAEELNSNDMKTNKEEHKLQDSVPENKGISLRSRRQNKTEAEQQITEVFVLAERIEINRNEKKPMKTSPEMDIQNPDDGARKPIPRDKVTENKRCLRSARQNESSQPKVAEESGGQKSAKVLMQNQKGKGEAGNSDSMCLRSRKTKSQPAASTLESKSVQRVTRSVKRCAENPKKAEDNVCVKKIRTRSHRDSEDI

SEQ ID NO: 764245 - protein, 3256 aa, Homo sapiens; identical to SEQ ID NO: 764244

SEQ ID NO: 764246 - protein, 3256 aa, Homo sapiens; identical to SEQ ID NO: 764244

SEQ ID NO: 764247 - protein, 1158 aa, Homo sapiens
SPPATLSVCVVSPDVCVSFFRAESTFCTSLFSKGVLGCLLVLVGVSADSGGEDSQGILVVLPAATAKQKLDPAASVTGSKRQPRTPKGKAQPLEDLAGLKELFQTPICTDKPTTHEKTTKIACRSPQPDPVGTPTIFKPQSKRSLRKADVEEESLALRKRTPSVGKAMDTPKPAGGDEKDMKAFMGTPVQKLDLPGNLPGSKRWPQTPKEKAQALEDLAGFKELFQTPGTDKPTTDEKTTKIACKSPQPDPVDTPASTKQRPKRNLRKADVEEEFLALRKRTPSAGKAMDTPKPAVSDEKNINTFVETPVQKLDLLGNLPGSKRQPQTPKEKAEALEDLVGFKELFQTPGHTEESMTDDKITEVSCKSPQPESFKTSRSSKQRLKIPLVKVDMKEEPLAVSKLTRTSGETTQTHTEPTGDSKSIKAFKESPKQILDPAASVTGSRRQLRTRKEKARALEDLVDFKELFSAPGHTEESMTIDKNTKIPCKSPPPELTDTATSTKRCPKTRPRKEVKEELSAVERLTQTSGQSTHTHKEPASGDEGIKVLKQRAKKKPNPVEEEPSRRRPRAPKEKAQPLEDLAGFTELSETSGHTQESLTAGKATKIPCESPPLEVVDTTASTKRHLRTRVQKVQVKEEPSAVKFTQTSGETTDADKEPAGEDKGIKALKESAKQTPAPAASVTGSRRRPRAPRESAQAIEDLAGFKDPAAGHTEESMTDDKTTKIPCKSSPELEDTATSSKRRPRTRAQKVEVKEELLAVGKLTQTSGETTHTDKEPVGEGKGTKAFKQPAKRKLDAEDVIGSRRQPRAPKEKAQPLEDLASFQELSQTPGHTEELANGAADSFTSAPKQTPDSGKPLKISRRVLRAPKVEPVGDVVSTRDPVKSQSKSNTSLPPLPFKRGGGKDGSVTGTKRLRCMPAPEEIVEELPASKKQRVAPRARGKSSEPVVIMKRSLRTSAKRIEPAEELNSNDMKTNKEEHKLQDSVPENKGISLRSRRQNKTEAEQQITEVFVLAERIEINRNEKKPMKTSPEMDIQNPDDGARKPIPRDKVTENKRCLRSARQNESSQPKVAEESGGQKSAKVLMQNQKGKGEAGNSDSMCLRSRKTKSQPAASTLESKSVQRVTRSVKRCAENPKKAEDNVCVKKIRTRSHRDSEDI

SEQ ID NO: 764248 - protein, 639 aa, Homo sapiens
PEVFQKCTLLYLTHTHKEPASGDEGIKVLKQRAKKKPNPVEEEPSRRRPRAPKEKAQPLEDLAGFTELSETSGHTQESLTAGKATKIPCESPPLEVVDTTASTKRHLRTRVQKVQVKEEPSAVKFTQTSGETTDADKEPAGEDKGIKALKESAKQTPAPAASVTGSRRRPRAPRESAQAIEDLAGFKDPAAGHTEESMTDDKTTKIPCKSSPELEDTATSSKRRPRTRAQKVEVKEELLAVGKLTQTSGETTHTDKEPVGEGKGTKAFKQPAKRKLDAEDVIGSRRQPRAPKEKAQPLEDLASFQELSQTPGHTEELANGAADSFTSAPKQTPDSGKPLKISRRVLRAPKVEPVGDVVSTRDPVKSQSKSNTSLPPLPFKRGGGKDGSVTGTKRLRCMPAPEEIVEELPASKKQRVAPRARGKSSEPVVIMKRSLRTSAKRIEPAEELNSNDMKTNKEEHKLQDSVPENKGISLRSRRQNKTEAEQQITEVFVLAERIEINRNEKKPMKTSPEMDIQNPDDGARKPIPRDKVTENKRCLRSARQNESSQPKVAEESGGQKSAKVLMQNQKGKGEAGNSDSMCLRSRKTKSQPAASTLESKSVQRVTRSVKRCAENPKKAEDNVCVKKIRTRSHRDSEDI

SEQ ID NO: 764249 - protein, 3256 aa, Homo sapiens; identical to SEQ ID NO: 764244

SEQ ID NO: 764250 - protein, 2257 aa, Homo sapiens
MWPTRRLVTIKRSGVDGPHFPLSLSTCLFGRGIECDIRIQLPVVSKQHCKIEIHEQEAILHNFSSTNPTQVNGSVIDEPVRLKHGDVITIIDRSFRYENESLQNGRKSTEFPRKIREQEPARRVSRSSFSSDPDEKAQDSKAYSKITEGKVSGNPQVHIKNVKEDSTADDSKDSVAQGTTNVHSSEHAGRNGRNAADPISGDFKEISSVKLVSRYGELKSVPTTQCLDNSKKNESPFWKLYESVKKELDVKSQKENVLQYCRKSGLQTDYATEKESADGLQGETQLLVSRKSRPKSGGSGHAVAEPASPEQELDQNKGKGRDVESVQTPSKAVGASFPLYEPAKMKTPVQYSQQQNSPQKHKNKDLYTTGRRESVNLGKSEGFKAGDKTLTPRKLSTRNRTPAKVEDAADSATKPENLSSKTRGSIPTDVEVLPTETEIHNEPFLTLWLTQVERKIQKDSLSKPEKLGTTAGQMCSGLPGLSSVDINNFGDSINESEGIPLKRRRVSFGGHLRPELFDENLPPNTPLKRGEAPTKRKSLVMHTPPVLKKIIKEQPQPSGKQESGSEIHVEVKAQSLVISPPAPSPRKTPVASDQRRRSCKTAPASSSKSQTEVPKRGGERVATCLQKRVSISRSQHDILQMICSKRRSGASEANLIVAKSWADVVKLGAKQTQTKVIKHGPQRSMNKRQRRPATPKKPVGEVHSQFSTGHANSPCTIIIGKAHTEKVHVPARPYRVLNNFISNQKMDFKEDLSGIAEMFKTPVKEQPQLTSTCHIAISNSENLLGKQFQGTDSGEEPLLPTSESFGGNVFFSAQNAAKQPSDKCSASPPLRRQCIRENGNVAKTPRNTYKMTSLETKTSDTETEPSKTVSTVNRSGRSTEFRNIQKLPVESKSEETNTEIVECILKRGQKATLLQQRREGEMKEIERPFETYKENIELKENDEKMKAMKRSRTWGQKCAPMSDLTDLKSLPDTELMKDTARGQNLLQTQDHAKAPKSEKGKITKMPCQSLQPEPINTPTHTKQQLKASLGKVGVKEELLAVGKFTRTSGETTHTHREPAGDGKSIRTFKESPKQILDPAARVTGMKKWPRTPKEEAQSLEDLAGFKELFQTPGPSEESMTDEKTTKIACKSPPPESVDTPTSTKQWPKRSLRKADVEEEFLALRKLTPSAGKAMLTPKPAGGDEKDIKAFMGTPVQKLDLAGTLPGSKRQLQTPKEKAQALEDLAGFKELFQTPGHTEELVAAGKTTKIPCDSPQSDPVDTPTSTKQRPKRSIRKADVEGELLACRNLMPSAGKAMHTPKPSVGEEKDIIIFVGTPVQKLDLTENLTGSKRRPQTPKEEAQALEDLTGFKELFQTPGHTEEAVAAGKTTKMPCESSPPESADTPTSTRRQPKTPLEKRDVQKELSALKKLTQTSGETTHTDKVPGGEDKSINAFRETAKQKLDPAASVTGSKRHPKTKEKAQPLEDLAGLKELFQTPVCTDKPTTHEKTTKIACRSQPDPVDTPTSSKPQSKRSLRKVDVEEEFFALRKRTPSAGKAMHTPKPAVSGEKNIYAFMGTPVQKLDLTENLTGSKRRLQTPKEKAQALEDLAGFKELFQTRGHTEESMTNDKTAKVACKSSQPDPDKNPASSKRRLKTSLGKVGVKEELLAVGKLTQTSGETTHTHTEPTGDGKSMKAFMESPKQILDSAASLTGSKRQLRTPKGKSEVPEDLAGFIELFQTPSHTKESMTNEKTTKVSYRASQPDLVDTPTSSKPQPKRSLRKADTEEEFLAFRKQTPSAGKAMHTPKPAVGEEKDINTFLGTPVQKLDQPGNLPGSNRRLQTRKEKAQALEELTGFRELFQTPCTDNPTTDEKTTKKILCKSPQSDPADTPTNTKQRPKRSLKKADVEEEFLAFRKLTPSAGKAMHTPKAAVGEEKDINTFVGTPVEKLDLLGNLPGSKRRPQTPKEKAKALEDLAGFKELFQTPGHTEESMTDDKITEVSCKSPQPDPVKTPTSSKQRLKISLGKVGVKEEVLPVGKLTQTSGKTTQTHRETAGDGKSIKAFKESAKQMLDPANYGTGMERWPRTPKEEAQSLEDLAGFKELFQTPDHTEESTTDDKTTKIACKSPPPESMDTPTSTRRRPKTPLGKRDIVEELSALKQLTQTTHTDKVPGDEDKGINVFRETAKQKLDPAASVTGSKRQPRTPKGKAQPLEDLAGLKELFQTPICTDKPTTHEKTTKIACRSPQPDPVGTPTIFKPQSKRSLRKADVEEESLALRR

SEQ ID NO: 764251 - protein, 2256 aa, Homo sapiens
MWPTRRLVTIKRSGVDGPHFPLSLSTCLFGRGIECDIRIQLPVVSKQHCKIEIHEQEAILHNFSSTNPTQVNGSVIDEPVRLKHGDVITIIDRSFRYENESLQNGRKSTEFPRKIREQEPARRVSRSSFSSDPDEKAQDSKAYSKITEGKVSGNPQVHIKNVKEDSTADDSKDSVAQGTTNVHSSEHAGRNGRNAADPISGDFKEISSVKLVSRYGELKSVPTTQCLDNSKKNESPFWKLYESVKKELDVKSQKENVLQYCRKSGLQTDYATEKESADGLQGETQLLVSRKSRPKSGGSGHAVAEPASPEQELDQNKGKGRDVESVQTPSKAVGASFPLYEPAKMKTPVQYSQQQNSPQKHKNKDLYTTGRRESVNLGKSEGFKAGDKTLTPRKLSTRNRTPAKVEDAADSATKPENLSSKTRGSIPTDVEVLPTETEIHNEPFLTLWLTQVERKIQKDSLSKPEKLGTTAGQMCSGLPGLSSVDINNFGDSINESEGIPLKRRRVSFGGHLRPELFDENLPPNTPLKRGEAPTKRKSLVMHTPPVLKKIIKEQPQPSGKQESGSEIHVEVKAQSLVISPPAPSPRKTPVASDQRRRSCKTAPASSSKSQTEVPKRGGERVATCLQKRVSISRSQHDILQMICSKRRSGASEANLIVAKSWADVVKLGAKQTQTKVIKHGPQRSMNKRQRRPATPKKPVGEVHSQFSTGHANSPCTIIIGKAHTEKVHVPARPYRVLNNFISNQKMDFKEDLSGIAEMFKTPVKEQPQLTSTCHIAISNSENLLGKQFQGTDSGEEPLLPTSESFGGNVFFSAQNAAKQPSDKCSASPPLRRQCIRENGNVAKTPRNTYKMTSLETKTSDTETEPSKTVSTVNRSGRSTEFRNIQKLPVESKSEETNTEIVECILKRGQKATLLQQRREGEMKEIERPFETYKENIELKENDEKMKAMKRSRTWGQKCAPMSDLTDLKSLPDTELMKDTARGQNLLQTQDHAKAPKSEKGKITKMPCQSLQPEPINTPTHTKQQLKASLGKVGVKEELLAVGKFTRTSGETTHTHREPAGDGKSIRTFKESPKQILDPAARVTGMKKWPRTPKEEAQSLEDLAGFKELFQTPGPSEESMTDEKTTKIACKSPPPESVDTPTSTKQWPKRSLRKADVEEEFLALRKLTPSAGKAMLTPKPAGGDEKDIKAFMGTPVQKLDLAGTLPGSKRQLQTPKEKAQALEDLAGFKELFQTPGHTEELVAAGKTTKIPCDSPQSDPVDTPTSTKQRPKRSIRKADVEGELLACRNLMPSAGKAMHTPKPSVGEEKDIIIFVGTPVQKLDLTENLTGSKRRPQTPKEEAQALEDLTGFKELFQTPGHTEEAVAAGKTTKMPCESSPPESADTPTSTRRQPKTPLEKRDVQKELSALKKLTQTSGETTHTDKVPGGEDKSINAFRETAKQKLDPAASVTGSKRHPKTKEKAQPLEDLAGLKELFQTPVCTDKPTTHEKTTKIACRSQPDPVDTPTSSKPQSKRSLRKVDVEEEFFALRKRTPSAGKAMHTPKPAVSGEKNIYAFMGTPVQKLDLTENLTGSKRRLQTPKEKAQALEDLAGFKELFQTRGHTEESMTNDKTAKVACKSSQPDPDKNPASSKRRLKTSLGKVGVKEELLAVGKLTQTSGETTHTHTEPTGDGKSMKAFMESPKQILDSAASLTGSKRQLRTPKGKSEVPEDLAGFIELFQTPSHTKESMTNEKTTKVSYRASQPDLVDTPTSSKPQPKRSLRKADTEEEFLAFRKQTPSAGKAMHTPKPAVGEEKDINTFLGTPVQKLDQPGNLPGSNRRLQTRKEKAQALEELTGFRELFQTPCTDNPTTDEKTTKKILCKSPQSDPADTPTNTKQRPKRSLKKADVEEEFLAFRKLTPSAGKAMHTPKAAVGEEKDINTFVGTPVEKLDLLGNLPGSKRRPQTPKEKAKALEDLAGFKELFQTPGHTEESMTDDKITEVSCKSPQPDPVKTPTSSKQRLKISLGKVGVKEEVLPVGKLTQTSGKTTQTHRETAGDGKSIKAFKESAKQMLDPANYGTGMERWPRTPKEEAQSLEDLAGFKELFQTPDHTEESTTDDKTTKIACKSPPPESMDTPTSTRRRPKTPLGKRDIVEELSALKQLTQTTHTDKVPGDEDKGINVFRETAKQKLDPAASVTGSKRQPRTPKGKAQPLEDLAGLKELFQTPICTDKPTTHEKTTGLDLQCVCLYTPLGVVRCPRVRKNSSTDQGSDEEGSLQK

SEQ ID NO: 764252 - protein, 1960 aa, Homo sapiens
MWPTRRLVTIKRSGVDGPHFPLSLSTCLFGRGIECDIRIQLPVVSKQHCKIEIHEQEAILHNFSSTNPTQVNGSVIDEPVRLKHGDVITIIDRSFRYENESLQNGRKSTEFPRKIREQEPARRVSRSSFSSDPDEKAQDSKAYSKITEGKVSGNPQVHIKNVKEDSTADDSKDSVAQGTTNVHSSEHAGRNGRNAADPISGDFKEISSVKLVSRYGELKSVPTTQCLDNSKKNESPFWKLYESVKKELDVKSQKENVLQYCRKSGLQTDYATEKESADGLQGETQLLVSRKSRPKSGGSGHAVAEPASPEQELDQNKGKGRDVESVQTPSKAVGASFPLYEPAKMKTPVQYSQQQNSPQKHKNKDLYTTGRRESVNLGKSEGFKAGDKTLTPRKLSTRNRTPAKVEDAADSATKPENLSSKTRGSIPTDVEVLPTETEIHNEPFLTLWLTQVERKIQKDSLSKPEKLGTTAGQMCSGLPGLSSVDINNFGDSINESEGIPLKRRRVSFGGHLRPELFDENLPPNTPLKRGEAPTKRKSLVMHTPPVLKKIIKEQPQPSGKQESGSEIHVEVKAQSLVISPPAPSPRKTPVASDQRRRSCKTAPASSSKSQTEVPKRGGERVATCLQKRVSISRSQHDILQMICSKRRSGASEANLIVAKSWADVVKLGAKQTQTKVIKHGPQRSMNKRQRRPATPKKPVGEVHSQFSTGHANSPCTIIIGKAHTEKVHVPARPYRVLNNFISNQKMDFKEDLSGIAEMFKTPVKEQPQLTSTCHIAISNSENLLGKQFQGTDSGEEPLLPTSESFGGNVFFSAQNAAKQPSDKCSASPPLRRQCIRENGNVAKTPRNTYKMTSLETKTSDTETEPSKTVSTVNRSGRSTEFRNIQKLPVESKSEETNTEIVECILKRGQKATLLQQRREGEMKEIERPFETYKENIELKENDEKMKAMKRSRTWGQKCAPMSDLTDLKSLPDTELMKDTARGQNLLQTQDHAKAPKSEKGKITKMPCQSLQPEPINTPTHTKQQLKASLGKVGVKEELLAVGKFTRTSGETTHTHREPAGDGKSIRTFKESPKQILDPAARVTGMKKWPRTPKEEAQSLEDLAGFKELFQTPGPSEESMTDEKTTKIACKSPPPESVDTPTSTKQWPKRSLRKADVEEEFLALRKLTPSAGKAMLTPKPAGGDEKDIKAFMGTPVQKLDLAGTLPGSKRQLQTPKEKAQALEDLAGFKELFQTPGHTEELVAAGKTTKIPCDSPQSDPVDTPTSTKQRPKRSIRKADVEGELLACRNLMPSAGKAMHTPKPSVGEEKDIIIFVGTPVQKLDLTENLTGSKRRPQTPKEEAQALEDLTGFKELFQTPGHTEEAVAAGKTTKMPCESSPPESADTPTSTRRQPKTPLEKRDVQKELSALKKLTQTSGETTHTDKVPGGEDKSINAFRETAKQKLDPAASVTGSKRHPKTKEKAQPLEDLAGLKELFQTPVCTDKPTTHEKTTKIACRSQPDPVDTPTSSKPQSKRSLRKVDVEEEFFALRKRTPSAGKAMHTPKPAVSGEKNIYAFMGTPVQKLDLTENLTGSKRRLQTPKEKAQALEDLAGFKELFQTRGHTEESMTNDKTAKVACKSSQPDPDKNPASSKRRLKTSLGKVGVKEELLAVGKLTQTSGETTHTHTEPTGDGKSMKAFMESPKQILDSAASLTGSKRQLRTPKGKSEVPEDLAGFIELFQTPSHTKESMTNEKTTKVSYRASQPDLVDTPTSSKPQPKRSLRKADTEEEFLAFRKQTPSAGKAMHTPKPAVGEEKDINTFLGTPVQKLDQPGNLPGSNRRLQTRKEKAQALEELTGFRELFQTPCTDNPTTDEKTTKKILCKSPQSDPADTPTNTKQRPKRSLKKADVEEEFLAFRKLTPSAGKAMHTPKAAVGEEKDINTFVGTPVEKLDLLGNLPGSKRRPQTPKFRARPNFRASPKFRS

SEQ ID NO: 764253 - protein, 689 aa, Homo sapiens
MWPTRRLVTIKRSGVDGPHFPLSLSTCLFGRGIECDIRIQLPVVSKQHCKIEIHEQEAILHNFSSTNPTQVNGSVIDEPVRLKHGDVITIIDRSFRYENESLQNGRKSTEFPRKIREQEPARRVSRSSFSSDPDEKAQDSKAYSKITEGKVSGNPQVHIKNVKEDSTADDSKDSVAQGTTNVHSSEHAGRNGRNAADPISGDFKEISSVKLVSRYGELKSVPTTQCLDNSKKNESPFWKLYESVKKELDVKSQKENVLQYCRKSGLQTDYATEKESADGLQGETQLLVSRKSRPKSGGSGHAVAEPASPEQELDQNKGKGRDVESVQTPSKAVGASFPLYEPAKMKTPVQYSQQQNSPQKHKNKDLYTTGRRESVNLGKSEGFKAGDKTLTPRKLSTRNRTPAKVEDAADSATKPENLSSKTRGSIPTDVEVLPTETEIHNEPFLTLWLTQVERKIQKDSLSKPEKLGTTAGQMCSGLPGLSSVDINNFGDSINESEGIPLKRRRVSFGGHLRPELFDENLPPNTPLKRGEAPTKRKSLVMHTPPVLKKIIKEQPQPSGKQESGSEIHVEVKAQSLVISPPAPSPRKTPVASDQRRRSCKTAPASSSKSQTEVPKRGGERVATCLQKRVSISRSQHDILQMICSKRRSGASEANLIVAKSWADVVKLGAKQTQTKVIKNKISSSDASAN

SEQ ID NO: 764254 - protein, 3256 aa, Homo sapiens; identical to SEQ ID NO: 764244

SEQ ID NO: 764255 - protein, 3089 aa, Homo sapiens
MWPTRRLVTIKRSGVDGPHFPLSLSTCLFGRGIECDIRIQLPVVSKQHCKIEIHEQEAILHNFSSTNPTQVNGSVIDEPVRLKHGDVITIIDRSFRYENESLQNGRKSTEFPRKIREQEPARRVSRSSFSSDPDEKAQDSKAYSKITEGKVSGNPQVHIKNVKEDSTADDSKDSVAQGTTNVHSSEHAGRNGRNAADPISGDFKEISSVKLVSRYGELKSVPTTQCLDNSKKNESPFWKLYESVKKELDVKSQKENVLQYCRKSGLQTDYATEKESADGLQGETQLLVSRKSRPKSGGSGHAVAEPASPEQELDQNKGKGRDVESVQTPSKAVGASFPLYEPAKMKTPVQYSQQQNSPQKHKNKDLYTTGRRESVNLGKSEGFKAGDKTLTPRKLSTRNRTPAKVEDAADSATKPENLSSKTRGSIPTDVEVLPTETEIHNEPFLTLWLTQVERKIQKDSLSKPEKLGTTAGQMCSGLPGLSSVDINNFGDSINESEGIPLKRRRVSFGGHLRPELFDENLPPNTPLKRGEAPTKRKSLVMHTPPVLKKIIKEQPQPSGKQESGSEIHVEVKAQSLVISPPAPSPRKTPVASDQRRRSCKTAPASSSKSQTEVPKRGGERVATCLQKRVSISRSQHDILQMICSKRRSGASEANLIVAKSWADVVKLGAKQTQTKVIKHGPQRSMNKRQRRPATPKKPVGEVHSQFSTGHANSPCTIIIGKAHTEKVHVPARPYRVLNNFISNQKMDFKEDLSGIAEMFKTPVKEQPQLTSTCHIAISNSENLLGKQFQGTDSGEEPLLPTSESFGGNVFFSAQNAAKQPSDKCSASPPLRRQCIRENGNVAKTPRNTYKMTSLETKTSDTETEPSKTVSTVNRSGRSTEFRNIQKLPVESKSEETNTEIVECILKRGQKATLLQQRREGEMKEIERPFETYKENIELKENDEKMKAMKRSRTWGQKCAPMSDLTDLKSLPDTELMKDTARGQNLLQTQDHAKAPKSEKGKITKMPCQSLQPEPINTPTHTKQQLKASLGKVGVKEELLAVGKFTRTSGETTHTHREPAGDGKSIRTFKESPKQILDPAARVTGMKKWPRTPKEEAQSLEDLAGFKELFQTPGPSEESMTDEKTTKIACKSPPPESVDTPTSTKQWPKRSLRKADVEEEFLALRKLTPSAGKAMLTPKPAGGDEKDIKAFMGTPVQKLDLAGTLPGSKRQLQTPKEKAQALEDLAGFKELFQTPGHTEELVAAGKTTKIPCDSPQSDPVDTPTSTKQRPKRSIRKADVEGELLACRNLMPSAGKAMHTPKPSVGEEKDIIIFVGTPVQKLDLTENLTGSKRRPQTPKEEAQALEDLTGFKELFQTPGHTEEAVAAGKTTKMPCESSPPESADTPTSTRRQPKTPLEKRDVQKELSALKKLTQTSGETTHTDKVPGGEDKSINAFRETAKQKLDPAASVTGSKRHPKTKEKAQPLEDLAGLKELFQTPVCTDKPTTHEKTTKIACRSQPDPVDTPTSSKPQSKRSLRKVDVEEEFFALRKRTPSAGKAMHTPKPAVSGEKNIYAFMGTPVQKLDLTENLTGSKRRLQTPKEKAQALEDLAGFKELFQTRGHTEESMTNDKTAKVACKSSQPDPDKNPASSKRRLKTSLGKVGVKEELLAVGKLTQTSGETTHTHTEPTGDGKSMKAFMESPKQILDSAASLTGSKRQLRTPKGKSEVPEDLAGFIELFQTPSHTKESMTNEKTTKVSYRASQPDLVDTPTSSKPQPKRSLRKADTEEEFLAFRKQTPSAGKAMHTPKPAVGEEKDINTFLGTPVQKLDQPGNLPGSNRRLQTRKEKAQALEELTGFRELFQTPCTDNPTTDEKTTKKILCKSPQSDPADTPTNTKQRPKRSLKKADVEEEFLAFRKLTPSAGKAMHTPKAAVGEEKDINTFVGTPVEKLDLLGNLPGSKRRPQTPKEKAKALEDLAGFKELFQTPGHTEESMTDDKITEVSCKSPQPDPVKTPTSSKQRLKISLGKVGVKEEVLPVGKLTQTSGKTTQTHRETAGDGKSIKAFKESAKQMLDPANYGTGMERWPRTPKEEAQSLEDLAGFKELFQTPDHTEESTTDDKTTKIACKSPPPESMDTPTSTRRRPKTPLGKRDIVEELSALKQLTQTTHTDKVPGDEDKGINVFRETAKQKLDPAASVTGSKRQPRTPKGKAQPLEDLAGLKELFQTPICTDKPTTHEKTTKIACRSPQPDPVGTPTIFKPQSKRSLRKADVEEESLALRKRTPSVGKAMDTPKPAGGDEKDMKAFMGTPVQKLDLPGNLPGSKRWPQTPKEKAQALEDLAGFKELFQTPGTDKPTTDEKTTKIACKSPQPDPVDTPASTKQRPKRNLRKADVEEEFLALRKRTPSAGKAMDTPKPAVSDEKNINTFVETPVQKLDLLGNLPGSKRQPQTPKEKAEALEDLVGFKELFQTPGHTEESMTDDKITEVSCKSPQPESFKTSRSSKQRLKIPLVKVDMKEEPLAVSKLTRTSGETTQTHTEPTGDSKSIKAFKESPKQILDPAASVTGSRRQLRTRKEKARALEDLVDFKELFSAPGHTEESMTIDKNTKIPCKSPPPELTDTATSTKRCPKTRPRKEVKEELSAVERLTQTSGQSTHTHKEPASGDEGIKVLKQRAKKKPNPVEEEPSRRRPRAPKEKAQPLEDLAGFTELSETSGHTQESLTAGKATKIPCESPPLEVVDTTASTKRHLRTRVQKVQVKEEPSAVKFTQTSGETTDADKEPAGEDKGIKALKESAKQTPAPAASVTGSRRRPRAPRESAQAIEDLAGFKDPAAGHTEESMTDDKTTKIPCKSSPELEDTATSSKRRPRTRAQKVEVKEELLAVGKLTQTSGETTHTDKEPVGEGKGTKAFKQPAKRKLDAEDVIGSRRQPRAPKEKAQPLEDLASFQELSQTPGHTEELANGAADSFTSAPKQTPDSGKPLKISRRVLRAPKVEPVGDVVSTRDPVKSQSKSNTSLPPLPFKRGGGKDGSVTGTKRLRCMPAPEEIVEELPASKKQRVAPRARGKSSEPVVIMKRSLRTSAKRIEPAEELNSNDMKTNKEEHKLQDSVPENKKE

SEQ ID NO: 764256 - protein, 2407 aa, Homo sapiens
MWPTRRLVTIKRSGVDGPHFPLSLSTCLFGRGIECDIRIQLPVVSKQHCKIEIHEQEAILHNFSSTNPTQVNGSVIDEPVRLKHGDVITIIDRSFRYENESLQNGRKSTEFPRKIREQEPARRVSRSSFSSDPDEKAQDSKAYSKITEGKVSGNPQVHIKNVKEDSTADDSKDSVAQGTTNVHSSEHAGRNGRNAADPISGDFKEISSVKLVSRYGELKSVPTTQCLDNSKKNESPFWKLYESVKKELDVKSQKENVLQYCRKSGLQTDYATEKESADGLQGETQLLVSRKSRPKSGGSGHAVAEPASPEQELDQNKGKGRDVESVQTPSKAVGASFPLYEPAKMKTPVQYSQQQNSPQKHKNKDLYTTGRRESVNLGKSEGFKAGDKTLTPRKLSTRNRTPAKVEDAADSATKPENLSSKTRGSIPTDVEVLPTETEIHNEPFLTLWLTQVERKIQKDSLSKPEKLGTTAGQMCSGLPGLSSVDINNFGDSINESEGIPLKRRRVSFGGHLRPELFDENLPPNTPLKRGEAPTKRKSLVMHTPPVLKKIIKEQPQPSGKQESGSEIHVEVKAQSLVISPPAPSPRKTPVASDQRRRSCKTAPASSSKSQTEVPKRGGERVATCLQKRVSISRSQHDILQMICSKRRSGASEANLIVAKSWADVVKLGAKQTQTKVIKHGPQRSMNKRQRRPATPKKPVGEVHSQFSTGHANSPCTIIIGKAHTEKVHVPARPYRVLNNFISNQKMDFKEDLSGIAEMFKTPVKEQPQLTSTCHIAISNSENLLGKQFQGTDSGEEPLLPTSESFGGNVFFSAQNAAKQPSDKCSASPPLRRQCIRENGNVAKTPRNTYKMTSLETKTSDTETEPSKTVSTVNRSGRSTEFRNIQKLPVESKSEETNTEIVECILKRGQKATLLQQRREGEMKEIERPFETYKENIELKENDEKMKAMKRSRTWGQKCAPMSDLTDLKSLPDTELMKDTARGQNLLQTQDHAKAPKSEKGKITKMPCQSLQPEPINTPTHTKQQLKASLGKVGVKEELLAVGKFTRTSGETTHTHREPAGDGKSIRTFKESPKQILDPAARVTGMKKWPRTPKEEAQSLEDLAGFKELFQTPGPSEESMTDEKTTKIACKSPPPESVDTPTSTKQWPKRSLRKADVEEEFLALRKLTPSAGKAMLTPKPAGGDEKDIKAFMGTPVQKLDLAGTLPGSKRQLQTPKEKAQALEDLAGFKELFQTPGHTEELVAAGKTTKIPCDSPQSDPVDTPTSTKQRPKRSIRKADVEGELLACRNLMPSAGKAMHTPKPSVGEEKDIIIFVGTPVQKLDLTENLTGSKRRPQTPKEEAQALEDLTGFKELFQTPGHTEEAVAAGKTTKMPCESSPPESADTPTSTRRQPKTPLEKRDVQKELSALKKLTQTSGETTHTDKVPGGEDKSINAFRETAKQKLDPAASVTGSKRHPKTKEKAQPLEDLAGLKELFQTPVCTDKPTTHEKTTKIACRSQPDPVDTPTSSKPQSKRSLRKVDVEEEFFALRKRTPSAGKAMHTPKPAVSGEKNIYAFMGTPVQKLDLTENLTGSKRRLQTPKEKAQALEDLAGFKELFQTRGHTEESMTNDKTAKVACKSSQPDPDKNPASSKRRLKTSLGKVGVKEELLAVGKLTQTSGENTQTHTEPTGDSKSIKAFKESPKQILDPAASVTGSRRQLRTRKEKARALEDLVDFKELFSAPGHTEESMTIDKNTKIPCKSPPPELTDTATSTKRCPKTRPRKEVKEELSAVERLTQTSGQSTHTHKEPASGDEGIKVLKQRAKKKPNPVEEEPSRRRPRAPKEKAQPLEDLAGFTELSETSGHTQESLTAGKATKIPCESPPLEVVDTTASTKRHLRTRVQKVQVKEEPSAVKFTQTSGETTDADKEPAGEDKGIKALKESAKQTPAPAASVTGSRRRPRAPRESAQAIEDLAGFKDPAAGHTEESMTDDKTTKIPCKSSPELEDTATSSKRRPRTRAQKVEVKEELLAVGKLTQTSGETTHTDKEPVGEGKGTKAFKQPAKRKLDAEDVIGSRRQPRAPKEKAQPLEDLASFQELSQTPGHTEELANGAADSFTSAPKQTPDSGKPLKISRRVLRAPKVEPVGDVVSTRDPVKSQSKSNTSLPPLPFKRGGGKDGSVTGTKRLRCMPAPEEIVEELPASKKQRVAPRARGKSSEPVVIMKRSLRTSAKRIEPAEELNSNDMKTNKEEHKLQDSVPENKGISLRSRRQNKTEAEQQITEVFVLAERIEINRNEKKPMKTSPEMDIQNPDDGARKPIPRDKVTENKRCLRSARQNESSQPKVAEESGGQKSAKVLMQNQKGKGEAGNSDSMCLRSRKTKSQPAASTLESKSVQRVTRSVKRCAENPKKAEDNVCVKKIRTRSHRDSEDI

SEQ ID NO: 764257 - protein, 1530 aa, Homo sapiens
  misc_feature (24)..(24): Xaa can be any naturally occurring amino acid
SEMKLPEEGSGSNICCSAIFAVPXIFAVPQPLLVIPWKTGSGVELQQTPMDLQLRDLTVRRKANKEKDINTFLGTPVQKLDQPGNLPGSNRRLQTRKEKAQALEELTGFRELFQTPCTDNPTTDEKTTKKILCKSPQSDPADTPTNTKQRPKRSLKKADVEEEFLAFRKLTPSAGKAMHTPKAAVGEEKDINTFVGTPVEKLDLLGNLPGSKRRPQTPKEKAKALEDLAGFKELFQTPGHTEESMTDDKITEVSCKSPQPDPVKTPTSSKQRLKISLGKVGVKEEVLPVGKLTQTSGKTTQTHRETAGDGKSIKAFKESAKQMLDPANYGTGMERWPRTPKEEAQSLEDLAGFKELFQTPDHTEESTTDDKTTKIACKSPPPESMDTPTSTRRRPKTPLGKRDIVEELSALKQLTQTTHTDKVPGDEDKGINVFRETAKQKLDPAASVTGSKRQPRTPKGKAQPLEDLAGLKELFQTPICTDKPTTHEKTTKIACRSPQPDPVGTPTIFKPQSKRSLRKADVEEESLALRKRTPSVGKAMDTPKPAGGDEKDMKAFMGTPVQKLDLPGNLPGSKRWPQTPKEKAQALEDLAGFKELFQTPGTDKPTTDEKTTKIACKSPQPDPVDTPASTKQRPKRNLRKADVEEEFLALRKRTPSAGKAMDTPKPAVSDEKNINTFVETPVQKLDLLGNLPGSKRQPQTPKEKAEALEDLVGFKELFQTPGHTEESMTDDKITEVSCKSPQPESFKTSRSSKQRLKIPLVKVDMKEEPLAVSKLTRTSGETTQTHTEPTGDSKSIKAFKESPKQILDPAASVTGSRRQLRTRKEKARALEDLVDFKELFSAPGHTEESMTIDKNTKIPCKSPPPELTDTATSTKRCPKTRPRKEVKEELSAVERLTQTSGQSTHTHKEPASGDEGIKVLKQRAKKKPNPVEEEPSRRRPRAPKEKAQPLEDLAGFTELSETSGHTQESLTAGKATKIPCESPPLEVVDTTASTKRHLRTRVQKVQVKEEPSAVKFTQTSGETTDADKEPAGEDKGIKALKESAKQTPAPAASVTGSRRRPRAPRESAQAIEDLAGFKDPAAGHTEESMTDDKTTKIPCKSSPELEDTATSSKRRPRTRAQKVEVKEELLAVGKLTQTSGETTHTDKEPVGEGKGTKAFKQPAKRKLDAEDVIGSRRQPRAPKEKAQPLEDLASFQELSQTPGHTEELANGAADSFTSAPKQTPDSGKPLKISRRVLRAPKVEPVGDVVSTRDPVKSQSKSNTSLPPLPFKRGGGKDGSVTGTKRLRCMPAPEEIVEELPASKKQRVAPRARGKSSEPVVIMKRSLRTSAKRIEPAEELNSNDMKTNKEEHKLQDSVPENKGISLRSRRQNKTEAEQQITEVFVLAERIEINRNEKKPMKTSPEMDIQNPDDGARKPIPRDKVTENKRCLRSARQNESSQPKVAEESGGQKSAKVLMQNQKGKGEAGNSDSMCLRSRKTKSQPAASTLESKSVQRVTRSVKRCAENPKKAEDNVCVKKIRTRSHRDSEDI

SEQ ID NO: 764258 - protein, 3256 aa, Homo sapiens; identical to SEQ ID NO: 764244

SEQ ID NO: 764259 - protein, 1144 aa, Homo sapiens
LRIPDVSLVGRCCACWGCPRGLGGGDWQAIWVVFSSVVGWSVPGVWKSSLKPARSSRAWAFSLGVGGHLWLPGKFPGRSNFCTGVPIKAFRSFSSPPAGWGVSIAFPTDGVRFLDPVGTPTIFKPQSKRSLRKADVEEESLALRKRTPSVGKAMDTPKPAGGDEKDMKAFMGTPVQKLDLPGNLPGSKRWPQTPKEKAQALEDLAGFKELFQTPGTDKPTTDEKTTKIACKSPQPDPVDTPASTKQRPKRNLRKADVEEEFLALRKRTPSAGKAMDTPKPAVSDEKNINTFVETPVQKLDLLGNLPGSKRQPQTPKEKAEALEDLVGFKELFQTPGHTEESMTDDKITEVSCKSPQPESFKTSRSSKQRLKIPLVKVDMKEEPLAVSKLTRTSGETTQTHTEPTGDSKSIKAFKESPKQILDPAASVTGSRRQLRTRKEKARALEDLVDFKELFSAPGHTEESMTIDKNTKIPCKSPPPELTDTATSTKRCPKTRPRKEVKEELSAVERLTQTSGQSTHTHKEPASGDEGIKVLKQRAKKKPNPVEEEPSRRRPRAPKEKAQPLEDLAGFTELSETSGHTQESLTAGKATKIPCESPPLEVVDTTASTKRHLRTRVQKVQVKEEPSAVKFTQTSGETTDADKEPAGEDKGIKALKESAKQTPAPAASVTGSRRRPRAPRESAQAIEDLAGFKDPAAGHTEESMTDDKTTKIPCKSSPELEDTATSSKRRPRTRAQKVEVKEELLAVGKLTQTSGETTHTDKEPVGEGKGTKAFKQPAKRKLDAEDVIGSRRQPRAPKEKAQPLEDLASFQELSQTPGHTEELANGAADSFTSAPKQTPDSGKPLKISRRVLRAPKVEPVGDVVSTRDPVKSQSKSNTSLPPLPFKRGGGKDGSVTGTKRLRCMPAPEEIVEELPASKKQRVAPRARGKSSEPVVIMKRSLRTSAKRIEPAEELNSNDMKTNKEEHKLQDSVPENKGISLRSRRQNKTEAEQQITEVFVLAERIEINRNEKKPMKTSPEMDIQNPDDGARKPIPRDKVTENKRCLRSARQNESSQPKVAEESGGQKSAKVLMQNQKGKGEAGNSDSMCLRSRKTKSQPAASTLESKSVQRVTRSVKRCAENPKKAEDNVCVKKIRTRSHRDSEDI

SEQ ID NO: 764260 - protein, 574 aa, Homo sapiens
SPWGVIQGHTQESLTAGKATKIPCESPPLEVVDTTASTKRHLRTRVQKVQVKEEPSAVKFTQTSGETTDADKEPAGEDKGIKALKESAKQTPAPAASVTGSRRRPRAPRESAQAIEDLAGFKDPAAGHTEESMTDDKTTKIPCKSSPELEDTATSSKRRPRTRAQKVEVKEELLAVGKLTQTSGETTHTDKEPVGEGKGTKAFKQPAKRKLDAEDVIGSRRQPRAPKEKAQPLEDLASFQELSQTPGHTEELANGAADSFTSAPKQTPDSGKPLKISRRVLRAPKVEPVGDVVSTRDPVKSQSKSNTSLPPLPFKRGGGKDGSVTGTKRLRCMPAPEEIVEELPASKKQRVAPRARGKSSEPVVIMKRSLRTSAKRIEPAEELNSNDMKTNKEEHKLQDSVPENKGISLRSRRQNKTEAEQQITEVFVLAERIEINRNEKKPMKTSPEMDIQNPDDGARKPIPRDKVTENKRCLRSARQNESSQPKVAEESGGQKSAKVLMQNQKGKGEAGNSDSMCLRSRKTKSQPAASTLESKSVQRVTRSVKRCAENPKKAEDNVCVKKIRTRSHRDSEDI

SEQ ID NO: 764261 - protein, 2936 aa, Homo sapiens
MWPTRRLVTIKRSGVDGPHFPLSLSTCLFGRGIECDIRIQLPVVSKQHCKIEIHEQEAILHNFSSTNPTQVNGSVIDEPVRLKHGDVITIIDRSFRYENESLQNGRKSTEFPRKIREQEPARRVSRSSFSSDPDEKAQDSKAYSKITEGKVSGNPQVHIKNVKEDSTADDSKDSVAQGTTNVHSSEHAGRNGRNAADPISGDFKEISSVKLVSRYGELKSVPTTQCLDNSKKNESPFWKLYESVKKELDVKSQKENVLQYCRKSGLQTDYATEKESADGLQGETQLLVSRKSRPKSGGSGHAVAEPASPEQELDQNKGKGRDVESVQTPSKAVGASFPLYEPAKMKTPVQYSQQQNSPQKHKNKDLYTTGRRESVNLGKSEGFKAGDKTLTPRKLSTRNRTPAKVEDAADSATKPENLSSKTRGSIPTDVEVLPTETEIHNEPFLTLWLTQVERKIQKDSLSKPEKLGTTAGQMCSGLPGLSSVDINNFGDSINESEGIPLKRRRVSFGGHLRPELFDENLPPNTPLKRGEAPTKRKSLVMHTPPVLKKIIKEQPQPSGKQESGSEIHVEVKAQSLVISPPAPSPRKTPVASDQRRRSCKTAPASSSKSQTEVPKRGGERVATCLQKRVSISRSQHDILQMICSKRRSGASEANLIVAKSWADVVKLGAKQTQTKVIKHGPQRSMNKRQRRPATPKKPVGEVHSQFSTGHANSPCTIIIGKAHTEKVHVPARPYRVLNNFISNQKMDFKEDLSGIAEMFKTPVKEQPQLTSTCHIAISNSENLLGKQFQGTDSGEEPLLPTSESFGGNVFFSAQNAAKQPSDKCSASPPLRRQCIRENGNVAKTPRNTYKMTSLETKTSDTETEPSKTVSTVNRSGRSTEFRNIQKLPVESKSEETNTEIVECILKRGQKATLLQQRREGEMKEIERPFETYKENIELKENDEKMKAMKRSRTWGQKCAPMSDLTDLKSLPDTELMKDTARGQNLLQTQDHAKAPKSEKGKITKMPCQSLQPEPINTPTHTKQQLKASLGKVGVKEELLAVGKFTRTSGETTHTHREPAGDGKSIRTFKESPKQILDPAARVTGMKKWPRTPKEEAQSLEDLAGFKELFQTPGPSEESMTDEKTTKIACKSPPPESVDTPTSTKQWPKRSLRKADVEEEFLALRKLTPSAGKAMLTPKPAGGDEKDIKAFMGTPVQKLDLAGTLPGSKRQLQTPKEKAQALEDLAGFKELFQTPGHTEELVAAGKTTKIPCDSPQSDPVDTPTSTKQRPKRSIRKADVEGELLACRNLMPSAGKAMHTPKPSVGEEKDIIIFVGTPVQKLDLTENLTGSKRRPQTPKEEAQALEDLTGFKELFQTPGHTEEAVAAGKTTKMPCESSPPESADTPTSTRRQPKTPLEKRDVQKELSALKKLTQTSGETTHTDKVPGGEDKSINAFRETAKQKLDPAASVTGSKRHPKTKEKAQPLEDLAGLKELFQTPVCTDKPTTHEKTTKIACRSQPDPVDTPTSSKPQSKRSLRKVDVEEEFFALRKRTPSAGKAMHTPKPAVSGEKNIYAFMGTPVQKLDLTENLTGSKRRLQTPKEKAQALEDLAGFKELFQTRGHTEESMTNDKTAKVACKSSQPDPDKNPASSKRRLKTSLGKVGVKEELLAVGKLTQTSGETTHTHTEPTGDGKSMKAFMESPKQILDSAASLTGSKRQLRTPKGKSEVPEDLAGFIELFQTPSHTKESMTNEKTTKVSYRASQPDLVDTPTSSKPQPKRSLRKADTEEEFLAFRKQTPSAGKAMHTPKPAVGEEKDINTFLGTPVQKLDQPGNLPGSNRRLQTRKEKAQALEELTGFRELFQTPCTDNPTTDEKTTKKILCKSPQSDPADTPTNTKQRPKRSLKKADVEEEFLAFRKLTPSAGKAMHTPKAAVGEEKDINTFVGTPVEKLDLLGNLPGSKRRPQTPKEKAKALEDLAGFKELFQTPGHTEESMTDDKITEVSCKSPQPDPVKTPTSSKQRLKISLGKVGVKEEVLPVGKLTQTSGKTTQTHRETAGDGKSIKAFKESAKQMLDPANYGTGMERWPRTPKEEAQSLEDLAGFKELFQTPDHTEESTTDDKTTKIACKSPPPESMDTPTSTRRRPKTPLGKRDIVEELSALKQLTQTTHTDKVPGDEDKGINVFRETAKQKLDPAASVTGSKRQPRTPKGKAQPLEDLAGLKELFQTPICTDKPTTHEKTTKIACRSPQPDPVGTPTIFKPQSKRSLRKADVEEESLALRKRTPSVGKAMDTPKPAGGDEKDMKAFMGTPVQKLDLPGNLPGSKRWPQTPKEKAQALEDLAGFKELFQTPGTDKPTTDEKTTKIACKSPQPDPVDTPASTKQRPKRNLRKADVEEEFLALRKRTPSAGKAMDTPKPAVSDEKNINTFVETPVQKLDLLGNLPGSKRQPQTPKEKAEALEDLVGFKELFQTPGHTEESMTDDKITEVSCKSPQPESFKTSRSSKQRLKIPLVKVDMKEEPLAVSKLTRTSGETTQTHTEPTGDSKSIKAFKESPKQILDPAASVTGSRRQLRTRKEKARALEDLVDFKELFSAPGHTEESMTIDKNTKIPCKSPPPELTDTATSTKRCPKTRPRKEVKEELSAVERLTQTSGQSTHTHKEPASGDEGIKVLKQRAKKKPNPVEEEPSRRRPRAPKEKAQPLEDLAGFTELSETSGHTQESLTAGKATKIPCESPPLEVVDTTASTKRHLRTRVQKVQVKEEPSAVKFTQTSGETTDADKEPAGEDKGIKALKESAKQTPAPAASVTGSRRRPRAPRESAQAIEDLAGFKDPAAGHTEESMTDDKTTKIPCKSSPELEDTATSSKRRPRTRAQKVEVKEELLAVGKLTQTSGETTHTDKEPVGEGKGTKAFKQPAKRKLDAEDVIGSRRQPRAPKEKAQPLEDLASFQELSQTPVAYSTSPN

SEQ ID NO: 764262 - protein, 795 aa, Homo sapiens
MWPTRRLVTIKRSGVDGPHFPLSLSTCLFGRGIECDIRIQLPVVSKQHCKIEIHEQEAILHNFSSTNPTQVNGSVIDEPVRLKHGDVITIIDRSFRYENESLQNGRKSTEFPRKIREQEPARRVSRSSFSSDPDEKAQDSKAYSKITEGKVSGNPQVHIKNVKEDSTADDSKDSVAQGTTNVHSSEHAGRNGRNAADPISGDFKEISSVKLVSRYGELKSVPTTQCLDNSKKNESPFWKLYESVKKELDVKSQKENVLQYCRKSGLQTDYATEKESADGLQGETQLLVSRKSRPKSGGSGHAVAEPASPEQELDQNKGKGRDVESVQTPSKAVGASFPLYEPAKMKTPVQYSQQQNSPQKHKNKDLYTTGRRESVNLGKSEGFKAGDKTLTPRKLSTRNRTPAKVEDAADSATKPENLSSKTRGSIPTDVEVLPTETEIHNEPFLTLWLTQVERKIQKDSLSKPEKLGTTAGQMCSGLPGLSSVDINNFGDSINESEGIPLKRRRVSFGGHLRPELFDENLPPNTPLKRGEAPTKRKSLVMHTPPVLKKIIKEQPQPSGKQESGSEIHVEVKAQSLVISPPAPSPRKTPVASDQRRRSCKTAPASSSKSQTEVPKRGGERVATCLQKRVSISRSQHDILQMICSKRRSGASEANLIVAKSWADVVKLGAKQTQTKVIKHGPQRSMNKRQRRPATPKKPVGEVHSQFSTGHANSPCTIIIGKAHTEKVHVPARPYRVLNNFISNQKMDFKEDLSGKNVVLDLINLLTLLFFTVLMFVLLTLFICCERDYKINDSIT

SEQ ID NO: 764263 - protein, 124 aa, Homo sapiens
RLYLAAPSGKWEAPLPGRPVWEVRSTSARPPPRLGSGEHLYLAAPSGKWEAPLPGRPVWEVRSASAQLPPRLGCEERLCLAAPSGKWGAPLPGCPIWEMGSTSARPPHLGSEERLCPADTPSGM

SEQ ID NO: 764264 - protein, 145 aa, Homo sapiens
EAGDILREYKLSDGNVIHIGDQLYQVPEVLFAPDQLGIHSPGLSIMASSNIMNCDTDIQKKVFAEIVLSGGTTLFSGPEERLMKELEQLASKGNNRRNWLFYGGFDWNGVLSFKESNLTYGSNKSPLRKLDSYLSTQSLNRVPDL

SEQ ID NO: 764265 - protein, 112 aa, Homo sapiens
MSQQRHLHADSQWECTPRNTCKNVHSCITHNSPKLDLATCKFPSRRNESILVHPHKGILYSNAKGELPFCIPTQMNLGHHAELKQPNTKECLQIFTYSESGKLINNARSQER

SEQ ID NO: 764266 - protein, 141 aa, Homo sapiens
MQGRAKSRGPEVTPGPGAYSPEKVPPVRHRTPPAFTLGCRLPLKPLDTSAPAPNAYTMPPLWGSQIFTKPSSPSYTVVAAPPPPAPRRILLRYQARASTTARTQTPTASACLPSPCWGGPGPRDPWRRPPALAPTAQSRSP

SEQ ID NO: 764267 - protein, 181 aa, Homo sapiens
MGGFFSSIFSSLFGTREMRILILGLDGAGKTTILYRLQVGEVVTTIPTIGFNVETVTYKNLKFQVWDLGGQTSIRPYWRCYYSNTDAVIYVVDSCDRDRIGISKSELVAMLEEEELRKAILVVFANKQDMEQAMTSSEMANSLGLPALKDRKWQIFKTSATKGTGLDEAMEWLVETLKSRQ

SEQ ID NO: 764268 - protein, 181 aa, Homo sapiens; identical to SEQ ID NO: 764267

SEQ ID NO: 764269 - protein, 243 aa, Homo sapiens
SRVLLRPLSVPLDSCGVQGPGQLGDVRRAWVRVLYPYHEVFPHPQLHLLGRVVLAEAGNASVAGGFFSSIFSSLFGTREMRILILGLDGAGKTTILYRLQVGEVVTTIPTIGFNVETVTYKNLKFQVWDLGGQTSIRPYWRCYYSNTDAVIYVVDSCDRDRIGISKSELVAMLEEEELRKAILVVFANKQDMEQAMTSSEMANSLGLPALKDRKWQIFKTSATKGTGLDEAMEWLVETLKSRQ

SEQ ID NO: 764270 - protein, 164 aa, Homo sapiens
MRILILGLDGAGKTTILYRLQVGEVVTTIPTIGFNVETVTYKNLKFQVWDLGGQTSIRPYWRCYYSNTDAVIYVVDSCDRDRIGISKSELVAMLEEEELRKAILVVFANKQDMEQAMTSSEMANSLGLPALKDRKWQIFKTSATKGTGLDEAMEWLVETLKSRQ

SEQ ID NO: 764271 - protein, 181 aa, Homo sapiens; identical to SEQ ID NO: 764267

SEQ ID NO: 764272 - protein, 181 aa, Homo sapiens; identical to SEQ ID NO: 764267

SEQ ID NO: 764273 - protein, 196 aa, Homo sapiens
MGGFFSSIFSSLFGTREMRILILGLDGAGKTTILYRLQVGEVVTTIPTIGFNVETVTYKNLKFQVWDLGGQTSIRPYWRCYYSNTDAVIYVVDSCDRDRIGISKSELVAMLEEEELRKAILVVFANKQDMEQAMTSSEMANSLGLPALKDRKWQIFKTSATKGTGLDEAMEWLVVNIIKAYARYYGRTADEFLHTD

SEQ ID NO: 764274 - protein, 181 aa, Homo sapiens; identical to SEQ ID NO: 764267

SEQ ID NO: 764275 - protein, 181 aa, Homo sapiens; identical to SEQ ID NO: 764267

SEQ ID NO: 764276 - protein, 181 aa, Homo sapiens; identical to SEQ ID NO: 764267

SEQ ID NO: 764277 - protein, 156 aa, Homo sapiens
SQLTLAPAPAWSPTWKLLADWACEETASELQPKAKESLKIGEGGQGVHHGPYWRCYYSNTDAVIYVVDSCDRDRIGISKSELVAMLEEEELRKAILVVFANKQDMEQAMTSSEMANSLGLPALKDRKWQIFKTSATKGTGLDEAMEWLVETLKSRQ

SEQ ID NO: 764278 - protein, 194 aa, Homo sapiens
MGGFFSSIFSSLFGTREMRILILGLDGAGKTTILYRLQVGEVVTTIPTIGFNVETVTYKNLKFQVWDLGGQTSIRPYWRCYYSNTDAVIYVVDSCDRDRIGISKSELVAMLEEEELRKAILVVFANKQDMEQAMTSSEMANSLGLPALKDRKWQIFKTSATKGTGLDEAMEWQVSCFQKPSVHLCVLAAMHVHV

SEQ ID NO: 764279 - protein, 233 aa, Homo sapiens
RRGRRAWSWRVGSGRAGRPKVSLPASASEWEPGAASRAVGPARPAQQLWKKRDGNTPGNTGKKKKSQVRPRRRGQVCGSRGLCDGLGYDLSPLASHDVPLAATAFPRLLPVPCPRSSGPGVTMGQASDSLISRPQVPLVRHLRGASQYRLRRVLSYLMEASTGMSDGAAGGLAFVPGPPVRGNVQVPEYVAHRRDRAFVLQSTVTAYAQPRGSPSGRDYAGTGPAGDSAGPGW

SEQ ID NO: 764280 - protein, 450 aa, Homo sapiens
AQWDPRPAVVSGTGGHLQRRALDYATEGPLPRLSPGLRHRRIPALPRPAVSWTVHCRTPTLPHPGLWLPRTLAPARPELLLPLSALDCGSRGPGPGATCATAWTPGPQSFHALDQGTGEPLTRRPRPRAPEDPHLAVPRTTARKDPRSAGHWAPAQRDPRHGGLDYPCPTAPWTTARQDPRLNTPYTLAMGEPGPAEPWTLALEDSSARFWTPAPEDSCPATPWTPALENPAPSPPRLWHGRTPATDFGTVRPLTRLALDSSTGGPPATALSGLPLRHRVLHYSTAGPPPTAHWTEAQQHPGLVVGGLQDEVTPRPAARWTMAQEDHHSRMPWTTAGQVPHSAAAWNMALQDPRPAAPRTPPLKTLAPLHPGQRHGRTRLHRPVGYHIGKPPAHPHRARDSDKREPLPPAPRTTARQEPPSSRILTMATVEPRPGTPWTKSPKDPDPTTP

SEQ ID NO: 764281 - protein, 864 aa, Homo sapiens
MGCWGQLLVWFGAAGAILCSSPGSQETFLRSSPLPLASPSPRDPKVSAPPSILEPASPLNSPGTEGSWLFSTCGASGRHGPTQTQCDGAYAGTSVVVTVGAAGQLRGVQLWRVPGPGQYLISAYGAAGGKGAKNHLSRAHGVFVSAIFSLGLGESLYILVGQQGEDACPGGSPESQLVCLGESRAVEEHAAMDGSEGVPGSRRWAGGGGGGGGATYVFRVRAGELEPLLVAAGGGGRAYLRPRDRGRTQASPEKLENRSEAPGSGGRGGAAGGGGGWTSRAPSPQAGRSLQEGAEGGQGCSEAWATLGWAAAGGFGGGGGACTAGGGGGGYRGGDASETDNLWADGEDGVSFIHPSSELFLQPLAVTENHGEVEIRRHLNCSHCPLRDCQWQAELQLAECLCPEGMELAVDNVTCMDLHKPPGPLVLMVAVVATSTLSLLMVCGVLILVKQKKWQGLQEMRLPSPELELSKLRTSAIRTAPNPYYCQVGLGPAQSWPLPPGVTEVSPANVTLLRALGHGAFGEVYEGLVIGLPGDSSPLQVAIKTLPELCSPQDELDFLMEALIISKFRHQNIVRCVGLSLRATPRLILLELMSGGDMKSFLRHSRPHLGQPSPLVMRDLLQLAQDIAQGCHYLEENHFIHRDIAARNCLLSCAGPSRVAKIGDFGMARDIYRASYYRRGDRALLPVKWMPPEAFLEGIFTSKTDSWSFGVLLWEIFSLGYMPYPGRTNQEVLDFVVGGGRMDPPRGCPGPVYRIMTQCWQHEPELRPSFASILERLQYCTQDPDVLNSLLPMELGPTPEEEGTSGLGNRSLECLRPPQPQELSPEKLKSWGGSPLGPWLSSGLKPLKSRGLQPQNLWNPTYRS

SEQ ID NO: 764282 - protein, 819 aa, Homo sapiens
MGCWGQLLVWFGAAGAILCSSPGSQETFLRSSPLPLASPSPRDPKVSAPPSILEPASPLNSPGTEGSWLFSTCGASGRHGPTQTQCDGAYAGTSVVVTVGAAGQLRGVQLWRVPGPGQYLISAYGAAGGKGAKNHLSRAHGVFVSAIFSLGLGESLYILVGQQGEDACPGGSPESQLVCLGESRAVEEHAAMDGSEGVPGSRRWAGGGGGGGGATYVFRVRAGELEPLLVAAGGGGRAYLRPRDRGRTQASPEKLENRSEAPGSGGRGGAAGGDASETDNLWADGEDGVSFIHPSSELFLQPLAVTENHGEVEIRRHLNCSHCPLRDCQWQAELQLAECLCPEGMELAVDNVTCMDLHKPPGPLVLMVAVVATSTLSLLMVCGVLILGTKRLAGTVDSRLLLSMKQKKWQGLQEMRLPSPELELSKLRTSAIRTAPNPYYCQVGLGPAQSWPLPPGVTEVSPANVTLLRALGHGAFGEVYEGLVIGLPGDSSPLQVAIKTLPELCSPQDELDFLMEALIISKFRHQNIVRCVGLSLRATPRLILLELMSGGDMKSFLRHSRPHLGQPSPLVMRDLLQLAQDIAQGCHYLEENHFIHRDIAARNCLLSCAGPSRVAKIGDFGMARDIYRASYYRRGDRALLPVKWMPPEAFLEGIFTSKTDSWSFGVLLWEIFSLGYMPYPGRTNQEVLDFVVGGGRMDPPRGCPGPVYRIMTQCWQHEPELRPSFASILERLQYCTQDPDVLNSLLPMELGPTPEEEGTSGLGNRSLECLRPPQPQELSPEKLKSWGGSPLGPWLSSGLKPLKSRGLQPQNLWNPTYRS

SEQ ID NO: 764283 - protein, 803 aa, Homo sapiens
MGCWGQLLVWFGAAGAILCSSPGSQETFLRSSPLPLASPSPRDPKVSAPPSILEPASPLNSPGTEGSWLFSTCGASGRHGPTQTQCDGAYAGTSVVVTVGAAGQLRGVQLWRVPGPGQYLISAYGAAGGKGAKNHLSRAHGVFVSAIFSLGLGESLYILVGQQGEDACPGGSPESQLVCLGESRAVEEHAAMDGSEGVPGSRRWAGGGGGGGGATYVFRVRAGELEPLLVAAGGGGRAYLRPRDRGRTQASPEKLENRSEAPGSGGRGGAAGGDASETDNLWADGEDGVSFIHPSSELFLQPLAVTENHGEVEIRRHLNCSHCPLRDCQWQAELQLAECLCPEGMELAVDNVTCMDLHKPPGPLVLMVAVVATSTLSLLMVCGVLILVKQKKWQGLQEMRLPSPELELSKLRTSAIRTAPNPYYCQVGLGPAQSWPLPPGVTEVSPANVTLLRALGHGAFGEVYEGLVIGLPGDSSPLQVAIKTLPELCSPQDELDFLMEALIISKFRHQNIVRCVGLSLRATPRLILLELMSGGDMKSFLRHSRPHLGQPSPLVMRDLLQLAQDIAQGCHYLEENHFIHRDIAARNCLLSCAGPSRVAKIGDFGMARDIYRASYYRRGDRALLPVKWMPPEAFLEGIFTSKTDSWSFGVLLWEIFSLGYMPYPGRTNQEVLDFVVGGGRMDPPRGCPGPVYRIMTQCWQHEPELRPSFASILERLQYCTQDPDVLNSLLPMELGPTPEEEGTSGLGNRSLECLRPPQPQELSPEKLKSWGGSPLGPWLSSGLKPLKSRGLQPQNLWNPTYRS

SEQ ID NO: 764284 - protein, 89 aa, Homo sapiens
MDHVSLGINLTSSFHPAYLQQISPVLSPSSTCMDLHKPPGPLVLMVAVVATSTLSLLMVCGVLILGTKRLAGTVDSRLLLSSELGWVSA

SEQ ID NO: 764285 - protein, 734 aa, Homo sapiens
MGCWGQLLVWFGAAGAILCSSPGSQETFLRSSPLPLASPSPRDPKVSAPPSILEPASPLNSPGTEGSWLFSTCGASGRHGPTQTQCDGAYAGTSVVVTVGAAGQLRGVQLWRVPGPGQYLISAYGAAGGKGAKNHLSRAHGVFVSAIFSLGLGESLYILVGQQGEDACPGGSPESQLVCLGESRAVEEHAAMDGSEGVPGSRRWAGGGGGGGGATYVFRVRAGELEPLLVAAGGGGRAYLRPRDRGRTQASPEKLENRSEAPGSGGRGGAAGGDASETDNLWADGEDGVSFIHPSSELFLQPLAVTENHGEVEIRRHLNCSHCPLRDCQWQAELQLAECLCPEGMELAVDNVTCMDLHKPPGPLVLMVAVVATSTLSLLMVCGVLILGGAWPGPVLASATRCHRGFPSQCYSAQTLPELCSPQDELDFLMEALIISKFRHQNIVRCVGLSLRATPRLILLELMSGGDMKSFLRHSRPHLGQPSPLVMRDLLQLAQDIAQGCHYLEENHFIHRDIAARNCLLSCAGPSRVAKIGDFGMARDIYRASYYRRGDRALLPVKWMPPEAFLEGIFTSKTDSWSFGVLLWEIFSLGYMPYPGRTNQEVLDFVVGGGRMDPPRGCPGPVYRIMTQCWQHEPELRPSFASILERLQYCTQDPDVLNSLLPMELGPTPEEEGTSGLGNRSLECLRPPQPQELSPEKLKSWGGSPLGPWLSSGLKPLKSRGLQPQNLWNPTYRS

SEQ ID NO: 764286 - protein, 109 aa, Homo sapiens [sequence omitted]

SEQ ID NO: 764287 - protein, 105 aa, Homo sapiens
DGVSLCHPGWSAVVRSRLTGTSTSQVQAILCYFPILRGLRGFREARRDFWRGAESLEAALTHNAEVPRRRAQEAEEAGAALRTARAGYRGRALDYALQVPAPICL

SEQ ID NO: 764288 - protein, 768 aa, Homo sapiens
MTVKLDFEECLKDSPRFRASIELVEAEVSELETRLEKLLKLGTGLLESGRHYLAASRAFVVGICDLARLGPPEPMMAECLEKFTVSLNHKLDSHAELLDATQHTLQQQIQTLVKEGLRGFREARRDFWRGAESLEAALTHNAEVPRRRAQEAEEAGAALRTARAGYRGRALDYALQINVIEDKRKFDIMEFVLRLVEAQATHFQQGHEELSRLSQYRKELGAQLHQLVLNSAREKRDMEQRHVLLKQKELGGEEPEPSLREGPGGLVMEGHLFKRASNAFKTWSRRWFTIQSNQLVYQKKYKDPVTVVVDDLRLCTVKLCPDSERRFCFEVVSTSKSCLLQADSERLLQLWVSAVQSSMLLPSSQARLDDSPRGPGQGSGHLAIGSAATLGSGGMARGREPGGVGHVVAQVQSVDGNAQCCDCREPAPEWASINLGVTLCIQCSGIHRSLGVHFSKVRSLTLDSWEPELVKLMCELGNVIINQIYEARVEAMAVKKPGPSCSRGAWGLASQGNGGPLEQKREDCVLLPSHRQEKEAWIHAKYVEKKFLTKLPEIRGRRGGRGRPRGQPPVPPKPSIRPRPGSLRSKPEPPSEDLGSLHPGALLFRASGHPPSLPTMADALAHGADVNWVNGGQDNATPLIQATAANSLLACEFLLQNGANVNQADSAGRGPLHHATILGHTGLACLFLKRGADLGARDSEGRDPLTIAMETANADIVTLLRLAKMREAEAAQGQAGDETYLDIFRDFSLMASDDPEKLSRRSHDLHTL

SEQ ID NO: 764289 - protein, 733 aa, Homo sapiens
MTVKLDFEECLKDSPRFRASIELVEAEVSELETRLEKLLKLGTGLLESGRHYLAASRAFVVGICDLARLGPPEPMMAECLEKFTVSLNHKLDSHAELLDATQHTLQQQIQTLVKEGLRGFREARRDFWRGAESLEAALTHNAEVPRRRAQEAEEAGAALRTARAGYRGRALDYALQINVIEDKRKFDIMEFVLRLVEAQATHFQQGHEELSRLSQYRKELGAQLHQLVLNSAREKRDMEQRHVLLKQKELGGEEPEPSLREGPGGLVMEGHLFKRASNAFKTWSRRWFTIQSNQLVYQKKYKDPVTVVVDDLRLCTVKLCPDSERRFCFEVVSTSKSCLLQADSERLLQLWVSAVQSSMLLPSSQARLDDSPRGPGQGSGHLAIGSAATLGSGGMARGREPGGVGHVVAQVQSVDGNAQCCDCREPAPEWASINLGVTLCIQCSGIHRSLGVHFSKVRSLTLDSWEPELVKLMCELGNVIINQIYEARVEAMAVKKPGPSCSRQEKEAWIHAKYVEKKFLTKLPEIRGRRGGRGRPRGQPPVPPKPSIRPRPGSLRSKPEPPSEDLGSLHPGALLFRASGHPPSLPTMADALAHGADVNWVNGGQDNATPLIQATAANSLLACEFLLQNGANVNQADSAGRGPLHHATILGHTGLACLFLKRGADLGARDSEGRDPLTIAMETANADIVTLLRLAKMREAEAAQGQAGKEYTHPTPQAQHLNSGLLVHGDLSP

SEQ ID NO: 764290 - protein, 503 aa, Homo sapiens
MTVKLDFEECLKDSPRFRASIELVEAEVSELETRLEKLLKLGTGLLESGRHYLAASRAFVVGICDLARLGPPEPMMAECLEKFTVSLNHKLDSHAELLDATQHTLQQQIQTLVKEGLRGFREARRDFWRGAESLEAALTHNAEVPRRRAQEAEEAGAALRTARAGYRGRALDYALQINVIEDKRKFDIMEFVLRLVEAQATHFQQGHEELSRLSQYRKELGAQLHQLVLNSAREKRDMEQRHVLLKQKELGGEEPEPSLREGPGGLVMEGHLFKRASNAFKTWSRRWFTIQSNQLVYQKKYKDPVTVVVDDLRLCTVKLCPDSERRFCFEVVSTSKSCLLQADSERLLQLWVSAVQSSMLLPSSQARLDDSPRGPGQGSGHLAIGSAATLGSGGMARGREPGGVGHVVAQVQSVDGNAQCCDCREPAPEWASINLGVTLCIQCSGIHRSLGVHFSKVRSLTLDSWEPELVKLMCELGNVIINQIYEARVEAMAVKKPGPSCSR

SEQ ID NO: 764291 - protein, 153 aa, Homo sapiens [sequence omitted]

SEQ ID NO: 764292 - protein, 152 aa, Homo sapiens [sequence omitted]

SEQ ID NO: 764293 - protein, 115 aa, Homo sapiens
MTVKLDFEECLKDSPRFRASIELVEAEVSELETRLEKLLKLGTGLLESGRHYLAASRAFVVGICDLARLGPPEPMMAECLEKFTVSLNHKLDSHAELLDATQHTLQQQIQTLVKE

SEQ ID NO: 764294 - protein, 740 aa, Homo sapiens
MTVKLDFEECLKDSPRFRASIELVEAEVSELETRLEKLLKLGTGLLESGRHYLAASRAFVVGICDLARLGPPEPMMAECLEKFTVSLNHKLDSHAELLDATQHTLQQQIQTLVKEGLRGFREARRDFWRGAESLEAALTHNAEVPRRRAQEAEEAGAALRTARAGYRGRALDYALQINVIEDKRKFDIMEFVLRLVEAQATHFQQGHEELSRLSQYRKELGAQLHQLVLNSAREKRDMEQRHVLLKQKELGGEEPEPSLREGPGGLVMEGHLFKRASNAFKTWSRRWFTIQSNQLVYQKKYKDPVTVVVDDLRLCTVKLCPDSERRFCFEVVSTSKSCLLQADSERLLQLWVSAVQSSMLLPSSQARLDDSPRGPGQGSGHLAIGSAATLGSGGMARGREPGGVGHVVAQVQSVDGNAQCCDCREPAPEWASINLGVTLCIQCSGIHRSLGVHFSKVRSLTLDSWEPELVKLMCELGNVIINQIYEARVEAMAVKKPGPSCSRQEKEAWIHAKYVEKKFLTKLPEIRGRRGGRGRPRGQPPVPPKPSIRPRPGSLRSKPEPPSEDLGSLHPGALLFRASGHPPSLPTMADALAHGADVNWVNGGQDNATPLIQATAANSLLACEFLLQNGANVNQADSAGRGPLHHATILGHTGLACLFLKRGADLGARDSEGRDPLTIAMETANADIVTLLRLAKMREAEAAQGQAGDETYLDIFRDFSLMASDDPEKLSRRSHDLHTL

SEQ ID NO: 764295 - protein, 756 aa, Homo sapiens
MTVKLDFEECLKDSPRFRQPDGPKLSSHDPLFPRASIELVEAEVSELETRLEKLLKLGTGLLESGRHYLAASRAFVVGICDLARLGPPEPMMAECLEKFTVSLNHKLDSHAELLDATQHTLQQQIQTLVKEGLRGFREARRDFWRGAESLEAALTHNAEVPRRRAQEAEEAGAALRTARAGYRGRALDYALQINVIEDKRKFDIMEFVLRLVEAQATHFQQGHEELSRLSQYRKELGAQLHQLVLNSAREKRDMEQRHVLLKQKELGGEEPEPSLREGPGGLVMEGHLFKRASNAFKTWSRRWFTIQSNQLVYQKKYKDPVTVVVDDLRLCTVKLCPDSERRFCFEVVSTSKSCLLQADSERLLQLWVSAVQSSIASAFSQARLDDSPRGPGQGSGHLAIGSAATLGSGGMARGREPGGVGHVVAQVQSVDGNAQCCDCREPAPEWASINLGVTLCIQCSGIHRSLGVHFSKVRSLTLDSWEPELVKLMCELGNVIINQIYEARVEAMAVKKPGPSCSRQEKEAWIHAKYVEKKFLTKLPEIRGRRGGRGRPRGQPPVPPKPSIRPRPGSLRSKPEPPSEDLGSLHPGALLFRASGHPPSLPTMADALAHGADVNWVNGGQDNATPLIQATAANSLLACEFLLQNGANVNQADSAGRGPLHHATILGHTGLACLFLKRGADLGARDSEGRDPLTIAMETANADIVTLLRLAKMREAEAAQGQAGDETYLDIFRDFSLMASDDPEKLSRRSHDLHTL

SEQ ID NO: 764296 - protein, 368 aa, Homo sapiens
MTVKLDFEECLKDSPRFRASIELVEAEVSELETRLEKLLKLGTGLLESGRHYLAASRAFVVGICDLARLGPPEPMMAECLEKFTVSLNHKLDSHAELLDATQHTLQQQIQTLVKEGLRGFREARRDFWRGAESLEAALTHNAEVPRRRAQEAEEAGAALRTARAGYRGRALDYALQINVIEDKRKFDIMEFVLRLVEAQATHFQQGHEELSRLSQYRKELGAQLHQLVLNSAREKRDMEQRHVLLKQKELGGEEPEPSLREGPGGLVMEGHLFKRASNAFKTWSRRWFTIQSNQLVYQKKYKDPVTVVVDDLRLCTVKLCPDSERRFCFEVVSTSKSCLLQADSERLLQLWVSAVQSSIASAFKSGSP

SEQ ID NO: 764297 - protein, 136 aa, Homo sapiens
MPPSTPLLDFSMQNSLLACEFLLQNGANVNQADSAGRGPLHHATILGHTGLACLFLKRGADLGARDSEGRDPLTIAMETANADIVTLLRLAKMREAEAAQGQAGDETYLDIFRDFSLMASDDPEKLSRRSHDLHTL

SEQ ID NO: 764298 - protein, 196 aa, Homo sapiens
WRWGTLYPRPLGHPFFPSLPQGSGHLAIGSAATLGSGGMARGREPGGVGHVVAQVQSVDGNAQCCDCREPAPEWASINLGVTLCIQCSGIHRLLHKAHAGAPLLRATVRLQYRAHHTGPSSFPVLASSLSFWLCHWVPGLGPSLWGASWTQAGLAPLCPSLARIGGYPEFVGLVGRSVGSRLLRVGEPVKTRQRNG

SEQ ID NO: 764299 - protein, 431 aa, Homo sapiens
MCQPRGWWRDPALGTTGANKTFHGSQVSSEPPASIRPKTDDTSSQSPAPSEKDKPSSWLRTLAGSSNKSLGCVHPRQRLSAFRPWSPAVSASEKELSPHLPALIRDSFYSYKSFETAVAPNVALAPPAQQKVVSSPPCAAAVSRAPEPLATCTQPRKRKLTVDTPGAPETLAPVAAPEEDKDSEAEVEVESREEFTSSLSSLSSPSFTSSSSAKDLGSPGARALPSAVPDAAAPADAPSGLEAELEHLRQALEGGLDTKEAKEKFLHEVVKMRVKQEEKLSAALQAKRSLHQELEFLRVAKKEKLREATEAKRNLRKEIERLRAENEKKMKEANESRLRLKRELEQARQARVCDKGCEAGRLRAKYSAQIEDLQVKLQHAEADREQLRADLLREREAREHLEKVVKELQEQLWPRARPEAAGSEGAAELEP

SEQ ID NO: 764300 - protein, 434 aa, Homo sapiens
  misc_feature (4)..(4): Xaa can be any naturally occurring amino acid
  misc_feature (10)..(10): Xaa can be any naturally occurring amino acid
FGTXGGAVGXGLGRVVSALVHLVPHGEAVVSSEPPASIRPKTDDTSSQSPAPSEKDKPSSWLRTLAGSSNKSLGCVHPRQRLSAFRPWSPAVSASEKELSPHLPALIRDSFYSYKSFETAVAPNVALAPPAQQKVVSSPPCAAAVSRAPEPLATCTQPRKRKLTVDTPGAPETLAPVAAPEEDKDSEAEVEVESREEFTSSLSSLSSPSFTSSSSAKDLGSPGARALPSAVPDAAAPADAPSGLEAELEHLRQALEGGLDTKEAKEKFLHEVVKMRVKQEEKLSAALQAKRSLHQELEFLRVAKKEKLREATEAKRNLRKEIERLRAENEKKMKEANESRLRLKRELEQARQARVCDKGCEAGRLRAKYSAQIEDLQVKLQHAEADREQLRADLLREREAREHLEKVVKELQEQLWPRARPEAAGSEGAAELEP

SEQ ID NO: 764301 - protein, 752 aa, Homo sapiens
RGGGGGRGGPGARERERPGEPERTMEAAAGGRGCFQPHPGLQKTLEQFHLSSMSSLGGPAAFSARWAQEAYKKESAKEAGAAAVPAPVPAATEPPPVLHLPAIQPPPPVLPGPFFMPSDRSTERCETVLEGETISCFVVGGEKRLCLPQILNSVLRDFSLQQINAVCDELHIYCSRCTADQLEILKVMGILPFSAPSCGLITKTDAERLCNALLYGGAYPPPCKKELAASLALGLELSERSVRVYHECFGKCKGLLVPELYSSPSAACIQCLDCRLMYPPHKFVVHSHKALENRTCHWGFDSANWRAYILLSQDYTGKEEQARLGRCLDDVKEKFDYGNKYKRRVPRVSSEPPASIRPKTDDTSSQSPAPSEKDKPSSWLRTLAGSSNKSLGCVHPRQRLSAFRPWSPAVSASEKELSPHLPALIRDSFYSYKSFETAVAPNVALAPPAQQKVVSSPPCAAAVSRAPEPLATCTQPRKRKLTVDTPGAPETLAPVAAPEEDKDSEAEVEVESREEFTSSLSSLSSPSFTSSSSAKDLGSPGARALPSAVPDAAAPADAPSGLEAELEHLRQALEGGLDTKEAKEKFLHEVVKMRVKQEEKLSAALQAKRSLHQELEFLRVAKKEKLREATEAKRNLRKEIERLRAENEKKMKEANESRLRLKRELEQARQARVCDKGCEAGRLRAKYSAQIEDLQVKLQHAEADREQLRADLLREREAREHLEKVVKELQEQLWPRARPEAAGSEGAAELEP

SEQ ID NO: 764302 - protein, 162 aa, Homo sapiens [sequence omitted]

SEQ ID NO: 764303 - protein, 752 aa, Homo sapiens; identical to SEQ ID NO: 764301

SEQ ID NO: 764304 - protein, 752 aa, Homo sapiens; identical to SEQ ID NO: 764301

SEQ ID NO: 764305 - protein, 752 aa, Homo sapiens; identical to SEQ ID NO: 764301

SEQ ID NO: 764306 - protein, 140 aa, Homo sapiens
  misc_feature (34)..(34): Xaa can be any naturally occurring amino acid
SSASPFPASQALPSYPHSFPPPTSLSVSNQPPSXLAFSPIPGCVEPGSPPPCGSEPRPPHPSLSPPGSREMFVLALSQESQMTFFFSIKEKAPSLPLTSPRPPPLPVPHAAANDSMMLTLLLGNYFYVINVCFLVYKCLI

SEQ ID NO: 764307 - protein, 752 aa, Homo sapiens; identical to SEQ ID NO: 764301

SEQ ID NO: 764308 - protein, 799 aa, Homo sapiens
MSRPPTTRRSAAGPPEALDQTSECRRARRRRIWGKRRRRADRPGPEEKREEGDTEPLLKQEGPVEAAQPPVERKEAAALEQGRKVEELRWQEVDERQTMPRPYTFQVSSGGKQILFPKVNLSPVTPAKDTGLTAAPQEPKAPKASPVQHALPSSLSVPHTAILVTGAQLCGPAVNLSQIKDTACKSLLGLEEKKHAEAPAGENPPRGPGDARAGSGKAKPPQESPSSASALAEWASIRSRILKNAESDPRSSERDQLRPGDESTPRGRCDSRGNQRKTPPVNAKFSIMPAWQKFSDGGTETSKQSTEAESIRKRPMLGPSEETAPQPPPAGVRELGKGPEKSEMHREPADTTEGCKFAKDLPSFLVPSLPYPPQKVVAHTEFTTSSDSETANGIAKPDPVMPGGEEKASPFGIKLRRTNYSLRFNCDQQAEQKKKKRHSSTGDSADAGPPAAGSARGEKEMEGVALKHGPSLPQERKQAPSTRRDSAEPSSSRSVPVAHPGPPPASSQTPAPEHDKAANKMPLAQKPALAPKPTSQTPPASPLSKLSRPYLVELLSRRAGRPDPEPSEPSKEDQESSDRRPPSPPGPEERKGQKRDEEEEATERKPASPPLPATQQEKPSQTPEAGRKEKPMLQSRHSLDGSKLTEKVETAQPLWITLALQKQKGFREQQATREERKQAREAKQAEKLSKENVSVSVQPGSSSVSRAGSLHKSTALPEEKRPETAVSRLERREQLKKANTLPTSVTVEISDSAPPAPLVKEVTKRFSTPDAAPVSTEPAWLALAKRKAKAWSDCPQIIK

SEQ ID NO: 764309 - protein, 865 aa, Homo sapiens
MSRPPTTRRSAAGPPEALDQTSECRQGAEEEDLGEEEEEGQAHLEDWRGQLSELLNDFEERLEDQERLKPEGQREHSEEPGICEEQNPERERRREQQGRSGDFQGADRPGPEEKREEGDTEPLLKQEGPVEAAQPPVERKEAAALEQGRKVEELRWQEVDERQTMPRPYTFQVSSGGKQILFPKVNLSPVTPAKDTGLTAAPQEPKAPKASPVQHALPSSLSVPHTAILVTGAQLCGPAVNLSQIKDTACKSLLGLEEKKHAEAPAGENPPRGPGDARAGSGKAKPPQESPSSASALAEWASIRSRILKNAESDPRSSERDQLRPGDESTPRGRCDSRGNQRKTPPVNAKFSIMPAWQKFSDGGTETSKQSTEAESIRKRPMLGPSEETAPQPPPAGVRELGKGPEKSEMHREPADTTEGCKFAKDLPSFLVPSLPYPPQKVVAHTEFTTSSDSETANGIAKPDPVMPGGEEKASPFGIKLRRTNYSLRFNCDQQAEQKKKKRHSSTGDSADAGPPAAGSARGEKEMEGVALKHGPSLPQERKQAPSTRRDSAEPSSSRSVPVAHPGPPPASSQTPAPEHDKAANKMPLAQKPALAPKPTSQTPPASPLSKLSRPYLVELLSRRAGRPDPEPSEPSKEDQESSDRRPPSPPGPEERKGQKRDEEEEATERKPASPPLPATQQEKPSQTPEAGRKEKPMLQSRHSLDGSKLTEKVETAQPLWITLALQKQKGFREQQATREERKQAREAKQAEKLSKENVSVSVQPGSSSVSRAGSLHKSTALPEEKRPETAVSRLERREQLKKANTLPTSVTVEISDSAPPAPLVKEVTKRFSTPDAAPVSTEPAWLALAKRKAKAWSDCPQIIK

SEQ ID NO: 764310 - protein, 650 aa, Homo sapiens
LRLGTRLGVHTAILVTGAQLCGPAVNLSQIKDTACKSLLGLEEKKHAEAPAGENPPRGPGDARAGSGKAKPPQESPSSASALAEWASIRSRILKNAESDPRSSERDQLRPGDESTPRGRCDSRGNQRKTPPVNAKFSIMPAWQKFSDGGTETSKQSTEAESIRKRPMLGPSEETAPQPPPAGVRELGKGPEKSEMHREPADTTEGCKFAKDLPSFLVPSLPYPPQKVVAHTEFTTSSDSETANGIAKPDPVMPGGEEKASPFGIKLRRTNYSLRFNCDQQAEQKKKKRHSSTGDSADAGPPAAGSARGEKEMEGVALKHGPSLPQERKQAPSTRRDSAEPSSSRSVPVAHPGPPPASSQTPAPEHDKAANKMPLAQKPALAPKPTSQTPPASPLSKLSRPYLVELLSRRAGRPDPEPSEPSKEDQESSDRRPPSPPGPEERKGQKRDEEEEATERKPASPPLPATQQEKPSQTPEAGRKEKPMLQSRHSLDGSKLTEKVETAQPLWITLALQKQKGFREQQATREERKQAREAKQAEKLSKENVSVSVQPGSSSVSRAGSLHKSTALPEEKRPETAVSRLERREQLKKANTLPTSVTVEISDSAPPAPLVKEVTKRFSTPDAAPVSTEPAWLALAKRKAKAWSDCPQIIK

SEQ ID NO: 764311 - protein, 650 aa, Homo sapiens; identical to SEQ ID NO: 764310

SEQ ID NO: 764312 - protein, 555 aa, Homo sapiens
LRLGTRLGVHTAILVTGAQLCGPAVNLSQIKDTACKSLLGLEEKKHAEAPAGENPPRGPGDARAGSGKAKPPQESPSSASALAEWASIRSRILKNAESDPRSSERDQLRPGDESTPRGRCDSRGNQRKTPPVNAKFSIMPAWQKFSDGGTETSKQSTEAESIRKRPMLGPSEETAPQPPPAGVRELGKGPEKSEMHREPADTTEGCKFAKDLPSFLVPSLPYPPQKVVAHTEFTTSSDSETANGIAKPDPVMPGGEEKASPFGIKLRRTNYSLRFNCDQQAEQKKKKRHSSTGDSADAGPPAAGSARGEKEMEGVALKHGPSLPQERKQAPSTRRDSAEPSSSRSVPVAHPGPPPASSQTPAPEHDKAANKMPLAQKPALAPKPTSQTPPASPLSKLSRPYLVELLSRRAGRPDPEPSEPSKEDQESSDRRPPSPPGPEERKGQKRDEEEEATERKPASPPLPATQQEKPSQTPEAGRKEKPMLQSRHSLDGSKLTEKVETAQPLWITLALQKQKGFREQQATREERKQAREAKQAEKLSKENWRSPTRLPQRRW

SEQ ID NO: 764313 - protein, 500 aa, Homo sapiens
MPSSGRALLDSPLDSGSLTSLDSSVFCSEGEGEPLALGDCFTVNVGGSRFVLSQQALSCFPHTRLGKLAVVVASYRRPGALAAVPSPLELCDDANPVDNEYFFDRSSQAFRYVLHYYRTGRLHVMEQLCALSFLQEIQYWGIDELSIDSCCRDRYFRRKELSETLDFKKDTEDQESQHESEQDFSQGPCPTVRQKLWNILEKPGSSTAARIFGVISIIFVVVSIINMALMSAELSWLDLQLLEILEYVCISWFTGEFVLRFLCVRDRCRFLRKVPNIIDLLAILPFYITLLVESLSGSQTTQELENVGRIVQVLRLLRALRMLKLGRHSTGLRSLGMTITQCYEEVGLLLLFLSVGISIFSTVEYFAEQSIPDTTFTSVPCAWWWATTSMTTVGYGDIRPDTTTGKIVAFMCILSGILVLALPIAIINDRFSACYFTLKLKEAAVRQREALKKLTKNIATDSYISVNLRDVYARSIMEMLRLKGRERASTRSSGGDDFWF

SEQ ID NO: 764314 - protein, 500 aa, Homo sapiens; identical to SEQ ID NO: 764313

SEQ ID NO: 764315 - protein, 443 aa, Homo sapiens
MPSSGRALLDSPLDSGSLTSLDSSVFCSEGEGEPLALGDCFTVNVGGSRFVLSQQALSCFPHTRLGKLAVVVASYRRPGALAAVPSPLELCDDANPVDNEYFFDRSSQAFRYVLHYYRTGRLHVMEQLCALSFLQEIQYWGIDELSIDSCCRDRYFRRKELSETLDFKKDTEDQESQHESEQDFSQGPCPTVRQKLWNILEKPGSSTAARIFGVISIIFVVVSIINMALMSAELSWLDLQLLEILEYVCISWFTGEFVLRFLCVRDRCRFLRKDYSSLGMTITQCYEEVGLLLLFLSVGISIFSTVEYFAEQSIPDTTFTSVPCAWWWATTSMTTVGYGDIRPDTTTGKIVAFMCILSGILVLALPIAIINDRFSACYFTLKLKEAAVRQREALKKLTKNIATDSYISVNLRDVYARSIMEMLRLKGRERASTRSSGGDDFWF

SEQ ID NO: 764316 - protein, 144 aa, Homo sapiens
EKASTYRFSEGGHNSVLSTTTGYLIIYFKIKGKTARRGGHQSRLCDIKSGLFSNSKMKKILSTVTMEMIYALVPSPTKSAISELGNGEVWNEQKAETCLLEPHHDHPVSGKPWVELEAADELAALINQDEEKTSPAVRGGAYGG

SEQ ID NO: 764317 - protein, 708 aa, Homo sapiens
MWGAYIKFRNRHDYFKMLEVRILFSKHVFLKICCTFWDSNSFVFGKNSLVPTYPAILLILHTSYLDGVYSNCCCFNLGLVLHRCHHWNINYLVLICLDASTSCVPSVYLADRKVRCGSVINIWCSAYFGIRTMVFLFCFVFFMYTSYINSQIFNLCIGLPEDVALTRGNGSVFIDGSLIKWKFKTYICGSHETVSLSQSWWLTHVIPALWEGETGRSPEVRSLRPAGQHGETLSLLKIQKNYLAWWYVPVIPATQEAEAGESLEPQEAEVVVSWVAPLHSSLVDRVRLCLKKKSFPALICCFILRNLRNDYFKYYSVYKCVISELCKRKPRKNNFLNFLFGEGGVSDPNLLFYKMGKHCQSFLKFEMQNLKFLTALRSRERKPFYTRKVLFKKFDDPEKLIISLVTIMPVSFLPFDLTDIDMSLCECCSFSVFIFYFIGCNLVSDDFLIGCNFLHSIWVLLSLINDLSNLLEALYAKDILIFSKVLRKIIGYVVISPWIYFSNCHCFTFSQVYCSAEGYFHLGYIAQTLGYNYNQYVSMVIIIISMYYNQYVSNHLLSTSSFLFLIANIFVSCYTTVLGFFLKFLLHINYLIYHLALRYILFISILQMRIESRRSLNTCLFLTVRNAETRLKLSSSGCRTCTLKYYFMLHHIMVHDLFLVSVIVMMLENFIVYPFNLLNMDVSLCCQVCLLCHVNFVIVSSLFFTQIL

SEQ ID NO: 764318 - protein, 1159 aa, Homo sapiens
MLDFLAENNLCGQAILRIVSCGNAIIAELLRLSEFIPAVFRLKDRADQQKYGDIIFDFSYFKGPELWESKLDAKPELQDLDEEFRENNIEIVTRFYLAFQSVHKYIVDLNRYLDDLNEGVYIQQTLETVLLNEDGKQLLCEALYLYGVMLLVIDQKIEGEVRERMLVSYYRYSAARSSADSNMDDICKLLRSTGYSSQPGAKRPSNYPESYFQRVPINESFISMVIGRLRSDDIYNQVSAYPLPEHRSTALANQAAMLYVILYFEPSILHTHQAKMREIVDKYFPDNWVISIYMGITVNLVDAWEPYKAAKTALNNTLDLSNVREQASRYATVSERVHAQVQQFLKEGYLREEMVLDNIPKLLNCLRDCNVAIRWLMLHTADSACDPNNKRLRQIKDQILTDSRYNPRILFQLLLDTAQFEFILKEMFKQMLSEKQTKWEHYKKEGSERMTELADVFSGVKPLTRVEKNENLQAWFREISKQILSLNYDDSTAAGRKTVQLIQALEEVQEFHQLESNLQVCQFLADTRKFLHQMIRTINIKEEVLITMQIVGDLSFAWQLIDSFTSIMQESIRVNPSMVTKLRATFLKLASALDLPLLRINQANSPDLLSVSQYYSGELVSYVRKVLQIIPESMFTSLLKIIKLQTHDIIEVPTRLDKDKLRDYAQLGPRYEVAKLTHAISIFTEGILMMKTTLVGIIKVDPKQLLEDGIRKELVKRVAFALHRGLIFNPRAKPSELMPKLKELGATMDGFHRSFEYIQDYVNIYGLKIWQEEVSRIINYNVEQECNNFLRTKIQDWQSMYQSTHIPIPKFTPVDESVTFIGRLCREILRITDPKMTCHIDQLNTWYDMKTHQEVTSSRLFSEIQTTLGTFGLNGLDRLLCFMIVKELQNFLSMFQKIILRDRTVQDTLKTLMNAVSPLKSIVANSNKIYFSAIAKTQKIWTAYLEAIMKVGQMQILRQQIANELNYSCRFDSKHLAAALENLNKALLADIEAHYQDPSLPYPKEDNTLLYEITAYLEAAGIHNPLNKIYITTKRLPYFPIVNFLFLIAQLPKLQYNKNLGMVCRKPTDPVDWPPLVLGLLTLLKQFHSRYTEQFLALIGQFICSTVEQCTSQKIPEIPADVVGALLFLEDYVRYTKLPRRVAEAHVPNFIFDEFRTVL

SEQ ID NO: 764319 - protein, 505 aa, Homo sapiens
VTGVEMSEETMLSRPRYEVAKLTHAISIFTEGILMMKTTLVGIIKVDPKQLLEDGIRKELVKRVAFALHRGLIFNPRAKPSELMPKLKELGATMDGFHRSFEYIQDYVNIYGLKIWQEEVSRIINYNVEQECNNFLRTKIQDWQSMYQSTHIPIPKFTPVDESVTFIGRLCREILRITDPKMTCHIDQLNTWYDMKTHQEVTSSRLFSEIQTTLGTFGLNGLDRLLCFMIVKELQNFLSMFQKIILRDRTVQDTLKTLMNAVSPLKSIVANSNKIYFSAIAKTQKIWTAYLEAIMKVGQMQILRQQIANELNYSCRFDSKHLAAALENLNKALLADIEAHYQDPSLPYPKEDNTLLYEITAYLEAAGIHNPLNKIYITTKRLPYFPIVNFLFLIAQLPKLQYNKNLGMVCRKPTDPVDWPPLVLGLLTLLKQFHSRYTEQFLALIGQFICSTVEQCTSQKIPEIPADVVGALLFLEDYVRYTKLPRRVAEAHVPNFIFDEFRTVL

SEQ ID NO: 764320 - protein, 1144 aa, Homo sapiens
MLDFLAENNLCGQAILRIVSCGNAIIAELLRLSEFIPAVFRLKDRADQQKYGDIIFDFSYFKGPELWESKLDAKPELQDLDEEFRENNIEIVTRFYLAFQSVHKYIVDLNRYLDDLNEGVYIQQTLETVLLNEDGKQLLCEALYLYGVMLLVIDQKIEGEVRERMLVSYYRYSAARSSADSNMDDICKLLRSTGYSSQPGAKRPSNYPESYFQRVPINESFISMVIGRLRSDDIYNQVSAYPLPEHRSTALANQAAMLYVILYFEPSILHTHQAKMREIVDKYFPDNWVISIYMGITVNLVDAWEPYKAAKTALNNTLDLSNVREQASRYATVSERVHAQVQQFLKEGYLREEMVLDNIPKLLNCLRDCNVAIRWLMLHTADSACDPNNKRLRQIKDQILTDSRYNPRILFQLLLDTAQFEFILKEMFKQMLSEKQTKWEHYKKEGSERMTELADVFSGVKPLTRVEKNENLQAWFREISKQILSLNYDDSTAAGRKTVQLIQALEEVQEFHQLESNLQVCQFLADTRKFLHQMIRTINIKEEVLITMQIVGDLSFAWQLIDSFTSIMQESIRVNPSMVTKLRATFLKLASALDLPLLRINQANSPDLLSVSQYYSGELVSYVRKVLQIIPESMFTSLLKIIKLQTHDIIEVPTRLDKDKLRDYAQLGPRYEVAKLTHAISIFTEGILMMKTTLVGIIKVDPKQLLEDGIRKELVKRVAFALHRGLIFNPRAKPSELMPKLKELGATMDGFHRSFEYIQDYVNIYGLKIWQEEVSRIINYNVEQECNNFLRTKIQDWQSMYQSTHIPIPKFTPVDESVTFIGRLCREILRITDPKMTCHIDQLNTWYDMKTHQEVTSSRLFSEIQTTLGTFGLNGLDRLLCFMIVKELQNFLSMFQKIILRDRTVQDTLKTLMNAVSPLKSIVANSNKIYFSAIAVGQMQILRQQIANELNYSCRFDSKHLAAALENLNKALLADIEAHYQDPSLPYPKEDNTLLYEITAYLEAAGIHNPLNKIYITTKRLPYFPIVNFLFLIAQLPKLQYNKNLGMVCRKPTDPVDWPPLVLGLLTLLKQFHSRYTEQFLALIGQFICSTVEQCTSQKIPEIPADVVGALLFLEDYVRYTKLPRRVAEAHVPNFIFDEFRTVL

SEQ ID NO: 764321 - protein, 116 aa, Homo sapiens [sequence omitted]

SEQ ID NO: 764322 - protein, 1159 aa, Homo sapiens; identical to SEQ ID NO: 764318

SEQ ID NO: 764323 - protein, 1126 aa, Homo sapiens
MLDFLAENNLCGQAILRIVSCGNAIIAELLRLSEFIPAVFRLKDRADQQKYGDIIFDFSYFKGPELWESKLDAKPELQDLDEEFRENNIEIVTRFYLAFQSVHKYIVDLNRYLDDLNEGVYIQQTLETVLLNEDGKQLLCEALYLYGVMLLVIDQKIEGEVRERMLVSYYRYSAARSSADSNMDDICKLLRSTGYSSQPGAKRPSNYPESYFQRVPINESFISMVIGRLRSDDIYNQVSAYPLPEHRSTALANQAAMLYVILYFEPSILHTHQAKMREIVDKYFPDNWVISIYMGITVNLVDAWEPYKAAKTALNNTLDLSNVREQASRYATVSERVHAQVQQFLKEGYLREEMVLDNIPKLLNCLRDCNVAIRWLMLHTADSACDPNNKRLRQIKDQILTDSRYNPRILFQLLLDTAQFEFILKEMFKQMLSEKQTKWEHYKKEGSERMTELADVFSGVKPLTRVEKNENLQAWFREISKQILSLNYDDSTAAGRKTVQLIQALEEVQEFHQLESNLQVCQFLADTRKFLHQMIRTINIKEEVLITMQIVGDLSFAWQLIDSFTSIMQESIRVNPSMVTKLRATFLKLASALDLPLLRINQANSPDLLSVSQYYSGELVSYVRKVLQIIPESMFTSLLKIIKLQTHDIIEVPTRLDKDKLRDYAQLGPRYEVAKLTHAISIFTEGILMMKTTLVGIIKVDPKQLLEDGIRKELVKRVAFALHRGLIFNPRAKPSELMPKLKELGATMDGFHRSFEYIQDYVNIYGLKIWQEEVSRIINYNVEQECNNFLRTKIQDWQSMYQSTHIPIPKFTPVDESVTFIGRLCREILRITDPKMTCHIDQLNTWYDMKTHQEVTSSRLFSEIQTTLGTFGLNGLDRLLCFMIVKELQNFLSMFQKIILRDRTVQDTLKTLMNAVSPLKSIVANSNKIYFSAIAKTQKIWTAYLEAIMKVGQMQILRQQIANELNYSCRFDSKHLAAALENLNKALLADIEAHYQDPSLPYPKEDNTLLYEITAYLEAAGIHNPLNKIYITTKRLPYFPIVNFLFLIAQLPKLQYNKNLGMVCRKPTDPVDWPPLVLGLLTLLKQFHSRYTEQFLALIGQFICSTVEQCTSQKIILLSFQGFFCK

SEQ ID NO: 764324 - protein, 1127 aa, Homo sapiens
MLDFLAENNLCGQAILRIVSCGNAIIAELLRLSEFIPAVFRLKDRADQQKYGDIIFDFSYFKGPELWESKLDAKPELQDLDEEFRENNIEIVTRFYLAFQSVHKYIVDLNRYLDDLNEGVYIQQTLETVLLNEDGKQLLCEALYLYGVMLLVIDQKIEGEVRERMLVSYYRYSAARSSADSNMDDICKLLRSTGYSSQPGAKRPSNYPESYFQRVPINESFISMVIGRLRSDDIYNQVSAYPLPEHRSTALANQAAMLYVILYFEPSILHTHQAKMREIVDKYFPDNWVISIYMGITVNLVDAWEPYKAAKTALNNTLDLSNVREQASRYATVSERVHAQVQQFLKEGYLREEMVLDNIPKLLNCLRDCNVAIRWLMLHTADSACDPNNKRLRQIKDQILTDSRYNPRILFQLLLDTAQFEFILKEMFKQMLSEKQTKWEHYKKEGSERMTELADVFSGVKPLTRVEKNENLQAWFREISKQILSLNYDDSTAAGRKTVQLIQALEEVQEFHQLESNLQVCQFLADTRKFLHQMIRTINIKEEVLITMQIVGDLSFAWQLIDSFTSIMQESIRVNPSMVTKLRATFLKLASALDLPLLRINQANSPDLLSVSQYYSGELVSYVRKVLQIIPESMFTSLLKIIKLQTHDIIEVPTRLDKDKLRDYAQLGPRYEVAKLTHAISIFTEGILMMKTTLVGIIKVDPKQLLEDGIRKELVKRVAFALHRGLIFNPRAKPSELMPKLKELGATMDGFHRSFEYIQDYVNIYGLKIWQEEVSRIINYNVEQECNNFLRTKIQDWQSMYQSTHIPIPKFTPVDESVTFIGRLCREILRITDPKMTCHIDQLNTWYDMKTHQEVTSSRLFSEIQTTLGTFGLNGLDRLLCFMIVKELQNFLSMFQKIILRDRTVQDTLKTLMNAVSPLKSIVANSNKIYFSAIAKTQKIWTAYLEAIMKVGQMQILRQQIANELNYSCRFDSKHLAAALENLNKALLADIEAHYQDPSLPYPKEDNTLLYEITAYLEAAGIHNPLNKIYITTKRLPYFPIVNFLFLIAQLPKLQYNKNLGMVCRKPTDPVDWPPLVLGLLTLLKQFHSRYTEQFLALIGQFICSTVEQCTSQKIPEIPADVVGASV

SEQ ID NO: 764325 - protein, 1057 aa, Homo sapiens
MLDFLAENNLCGQAILRIVSCGNAIIAELLRLSEFIPAVFRLKDRADQQKYGDIIFDFSYFKGPELWESKLDAKPELQDLDEEFRENNIEIVTRFYLAFQSVHKYIVDLNRYLDDLNEGVYIQQTLETVLLNEDGKQLLCEALYLYGVMLLVIDQKIEGEVRERMLVSYYRYSAARSSADSNMDDICKLLRSTGYSSQPGAKRPSNYPESYFQRVPINESFISMVIGRLRSDDIYNQVSAYPLPEHRSTALANQAAMLYVILYFEPSILHTHQAKMREIVDKYFPDNWVISIYMGITVNLVDAWEPYKAAKTALNNTLDLSNVREQASRYATVSERVHAQVQQFLKEGYLREEMVLDNIPKLLNCLRDCNVAIRWLMLHTADSACDPNNKRLRQIKDQILTDSRYNPRILFQLLLDTAQFEFILKEMFKQMLSEKQTKWEHYKKEGSERMTELADVFSGVKPLTRVEKNENLQAWFREISKQILSLNYDDSTAAGRKTVQLIQALEEVQEFHQLESNLQVCQFLADTRKFLHQMIRTINIKEEVLITMQIVGDLSFAWQLIDSFTSIMQESIRVNPSMVTKLRATFLKLASALDLPLLRINQANSPDLLSVSQYYSGELVSYVRKVLQIIPESMFTSLLKIIKLQTHDIIEVPTRLDKDKLRDYAQLGPRYEVAKLTHAISIFTEGILMMKTTLVGIIKVDPKQLLEDGIRKELVKRVAFALHRGLIFNPRAKPSELMPKLKELGATMDGFHRSFEYIQDYVNIYGLKIWQEEVSRIINYNVEQECNNFLRTKIQDWQSMYQSTHIPIPKFTPVDESVTFIGRLCREILRITDPKMTCHIDQLNTWYDMKTHQEVTSSRLFSEIQTTLGTFGLNGLDRLLCFMIVKELQNFLSMFQKIILRDRTVQDTLKTLMNAVSPLKSIVANSNKIYFSAIAKTQKIWTAYLEAIMKVGQMQILRQQIANELNYSCRFDSKHLAAALENLNKALLADIEAHYQDPSLPYPKEDNTLLYEITAYLEAAGIHNPLNKIYITTKRLPYFPIVNFLFLIAQLPKHERL

SEQ ID NO: 764326 - protein, 905 aa, Homo sapiens
MLDFLAENNLCGQAILRIVSCGNAIIAELLRLSEFIPAVFRLKDRADQQKYGDIIFDFSYFKGPELWESKLDAKPELQDLDEEFRENNIEIVTRFYLAFQSVHKYIVDLNRYLDDLNEGVYIQQTLETVLLNEDGKQLLCEALYLYGVMLLVIDQKIEGEVRERMLVSYYRYSAARSSADSNMDDICKLLRSTGYSSQPGAKRPSNYPESYFQRVPINESFISMVIGRLRSDDIYNQVSAYPLPEHRSTALANQAAMLYVILYFEPSILHTHQAKMREIVDKYFPDNWVISIYMGITVNLVDAWEPYKAAKTALNNTLDLSNVREQASRYATVSERVHAQVQQFLKEGYLREEMVLDNIPKLLNCLRDCNVAIRWLMLHTADSACDPNNKRLRQIKDQILTDSRYNPRILFQLLLDTAQFEFILKEMFKQMLSEKQTKWEHYKKEGSERMTELADVFSGVKPLTRVEKNENLQAWFREISKQILSLNYDDSTAAGRKTVQLIQALEEVQEFHQLESNLQVCQFLADTRKFLHQMIRTINIKEEVLITMQIVGDLSFAWQLIDSFTSIMQESIRVNPSMVTKLRATFLKLASALDLPLLRINQANSPDLLSVSQYYSGELVSYVRKVLQIIPESMFTSLLKIIKLQTHDIIEVPTRLDKDKLRDYAQLGPRYEVAKLTHAISIFTEGILMMKTTLVGIIKVDPKQLLEDGIRKELVKRVAFALHRGLIFNPRAKPSELMPKLKELGATMDGFHRSFEYIQDYVNIYGLKIWQEEVSRIINYNVEQECNNFLRTKIQDWQSMYQSTHIPIPKFTPVDESVTFIGRLCREILRITDPKMTCHIDQLNTWYDMKTHQEVTSSRLFSEIQTTLGTFGLNGLDRLLCFMIVKELQVSLLTFMPVFCHPGGE

SEQ ID NO: 764327 - protein, 56 aa, Homo sapiens
YKCKECGEAFSQSSTLTKHIKVYTGEKPYTCKDCRKAFSQSSSLTQHQRVHTGKKP

SEQ ID NO: 764328 - protein, 73 aa, Homo sapiens
KTLLFGVWTLLALILCPDPGPSGIETFLKKTQVGKGPQWKEFLLEDVTENSILQCFFSCAGIQKDTSLGITVY

SEQ ID NO: 764329 - protein, 919 aa, Homo sapiens
MTAEETVNVKEVEIIKLILDFLNSKKLHISMLALEKESGVINGLFSDDMLFLRQLILDGQWDEVLQFIQPLECMEKFDKKRFRYIILKQKFLEALCVNNAMSAEDEPQHLEFTMQEAVQCLHALEEYCPSKDDYSKLCLLLTLPRLTNHAEFKDWNPSTARVHCFEEACVMVAEFIPADRKLSEAGFKASNNRLFQLVMKGLLYECCVEFCQSKATGEEITESEVLLGIDLLCGNGCDDLDLSLLSWLQNLPSSVFSCAFEQKMLNIHVDKLLKPTKAAYADLLTPLISKLSPYPSSPMRRPQSADAYMTRSLNPALDGLTCGLTSHDKRISDLGNKTSPMSHSFANFHYPGVQNLSRSLMLENTECHSIYEESPERDTPVDAQRPIGSEILGQSSVSEKEPANGAQNPGPAKQEKNELRDSTEQFQEYYRQRLRYQQHLEQKEQQRQIYQQMLLEGGVNQEDGPDQQQNLTEQFLNRSIQKLGELNIGMDGLGNEVSALNQQCNGSKGNGSNGSSVTSFTTPPQDSSQRLTHDASNIHTSTPRNPGSTNHIPFLEESPCGSQISSEHSVIKPPLGDSPGSLSRSKGEEDDKSKKQFVCINILEDTQAVRAVAFHPAGGLYAVGSNSKTLRVCAYPDVIDPSAHETPKQPVVRFKRNKHHKGSIYCVAWSPCGQLLATGSNDKYVKVLPFNAETCNATGPDLEFSMHDGTIRDLAFMEGPESGGAILISAGAGDCNIYTTDCQRGQGLHALSGHTGHILALYTWSGWMIASGSQDKTVRFWDLRVPSCVRVVGTTFHGTGSAVASVAVDPSGRLLATGQEDSSCMLYDIRGGRMVQSYHPHSSDVRSVRFSPGAHYLLTGSYDMKIKVTDLQGDLTKQLPIMVVGEHKDKVIQCRWHTQDLSFLSSSADRTVTLWTYNG

SEQ ID NO: 764330 - protein, 846 aa, Homo sapiens
MEKFDKKRFRYIILKQKFLEALCVNNAMSAEDEPQHLEFTMQEAVQCLHALEEYCPSKDDYSKLCLLLTLPRLTNHAEFKDWNPSTARVHCFEEACVMVAEFIPADRKLSEAGFKASNNRLFQLVMKGLLYECCVEFCQSKATGEEITESEVLLGIDLLCGNGCDDLDLSLLSWLQNLPSSVFSCAFEQKMLNIHVDKLLKPTKAAYADLLTPLISKLSPYPSSPMRRPQSADAYMTRSLNPALDGLTCGLTSHDKRISDLGNKTSPMSHSFANFHYPGVQNLSRSLMLENTECHSIYEESPERDTPVDAQRPIGSEILGQSSVSEKEPANGAQNPGPAKQEKNELRDSTEQFQEYYRQRLRYQQHLEQKEQQRQIYQQMLLEGGVNQEDGPDQQQNLTEQFLNRSIQKLGELNIGMDGLGNEVSALNQQCNGSKGNGSNGSSVTSFTTPPQDSSQRLTHDASNIHTSTPRNPGSTNHIPFLEESPCGSQISSEHSVIKPPLGDSPGSLSRSKGEEDDKSKKQFVCINILEDTQAVRAVAFHPAGGLYAVGSNSKTLRVCAYPDVIDPSAHETPKQPVVRFKRNKHHKGSIYCVAWSPCGQLLATGSNDKYVKVLPFNAETCNATGPDLEFSMHDGTIRDLAFMEGPESGGAILISAGAGDCNIYTTDCQRGQGLHALSGHTGHILALYTWSGWMIASGSQDKTVRFWDLRVPSCVRVVGTTFHGTGSAVASVAVDPSGRLLATGQEDSSCMLYDIRGGRMVQSYHPHSSDVRSVRFSPGAHYLLTGSYDMKIKVTDLQGDLTKQLPIMVVGEHKDKVIQCRWHTQDLSFLSSSADRTVTLWTYNG

SEQ ID NO: 764331 - protein, 534 aa, Homo sapiens
  misc_feature (30)..(30): Xaa can be any naturally occurring amino acid
MPRNNVLPSIWVSVNPVKLQHRIQDQLNKXKNELRDSTEQFQEYYRQRLRYQQHLEQKEQQRQIYQQMLLEGGVNQEDGPDQQQNLTEQFLNRSIQKLGELNIGMDGLGNEVSALNQQCNGSKGNGSNGSSVTSFTTPPQDSSQRLTHDASNIHTSTPRNPGSTNHIPFLEESPCGSQISSEHSVIKPPLGDSPGSLSRSKGEEDDKSKKQFVCINILEDTQAVRAVAFHPAGGLYAVGSNSKTLRVCAYPDVIDPSAHETPKQPVVRFKRNKHHKGSIYCVAWSPCGQLLATGSNDKYVKVLPFNAETCNATGPDLEFSMHDGTIRDLAFMEGPESGGAILISAGAGDCNIYTTDCQRGQGLHALSGHTGHILALYTWSGWMIASGSQDKTVRFWDLRVPSCVRVVGTTFHGTGSAVASVAVDPSGRLLATGQEDSSCMLYDIRGGRMVQSYHPHSSDVRSVRFSPGAHYLLTGSYDMKIKVTDLQGDLTKQLPIMVVGEHKDKVIQCRWHTQDLSFLSSSADRTVTLWTYNG

SEQ ID NO: 764332 - protein, 919 aa, Homo sapiens; identical to SEQ ID NO: 764329

SEQ ID NO: 764333 - protein, 891 aa, Homo sapiens
MTAEETVNVKEVEIIKLILDFLNSKKLHISMLALEKESGVINGLFSDDMLFLRFRYIILKQKFLEALCVNNAMSAEDEPQHLEFTMQEAVQCLHALEEYCPSKDDYSKLCLLLTLPRLTNHAEFKDWNPSTARVHCFEEACVMVAEFIPADRKLSEAGFKASNNRLFQLVMKGLLYECCVEFCQSKATGEEITESEVLLGIDLLCGNGCDDLDLSLLSWLQNLPSSVFSCAFEQKMLNIHVDKLLKPTKAAYADLLTPLISKLSPYPSSPMRRPQSADAYMTRSLNPALDGLTCGLTSHDKRISDLGNKTSPMSHSFANFHYPGVQNLSRSLMLENTECHSIYEESPERDTPVDAQRPIGSEILGQSSVSEKEPANGAQNPGPAKQEKNELRDSTEQFQEYYRQRLRYQQHLEQKEQQRQIYQQMLLEGGVNQEDGPDQQQNLTEQFLNRSIQKLGELNIGMDGLGNEVSALNQQCNGSKGNGSNGSSVTSFTTPPQDSSQRLTHDASNIHTSTPRNPGSTNHIPFLEESPCGSQISSEHSVIKPPLGDSPGSLSRSKGEEDDKSKKQFVCINILEDTQAVRAVAFHPAGGLYAVGSNSKTLRVCAYPDVIDPSAHETPKQPVVRFKRNKHHKGSIYCVAWSPCGQLLATGSNDKYVKVLPFNAETCNATGPDLEFSMHDGTIRDLAFMEGPESGGAILISAGAGDCNIYTTDCQRGQGLHALSGHTGHILALYTWSGWMIASGSQDKTVRFWDLRVPSCVRVVGTTFHGTGSAVASVAVDPSGRLLATGQEDSSCMLYDIRGGRMVQSYHPHSSDVRSVRFSPGAHYLLTGSYDMKIKVTDLQGDLTKQLPIMVVGEHKDKVIQCRWHTQDLSFLSSSADRTVTLWTYNG

SEQ ID NO: 764334 - protein, 974 aa, Homo sapiens
TLEEPLTLLYFSASSSISLTRALIASSSGASMAPSPVSPSSAAPPGLPWSPQAINMTAEETVNVKEVEIIKLILDFLNSKKLHISMLALEKESGVINGLFSDDMLFLRQLILDGQWDEVLQFIQPLECMEKFDKKRFRYIILKQKFLEALCVNNAMSAEDEPQHLEFTMQEAVQCLHALEEYCPSKDDYSKLCLLLTLPRLTNHAEFKDWNPSTARVHCFEEACVMVAEFIPADRKLSEAGFKASNNRLFQLVMKGLLYECCVEFCQSKATGEEITESEVLLGIDLLCGNGCDDLDLSLLSWLQNLPSSVFSCAFEQKMLNIHVDKLLKPTKAAYADLLTPLISKLSPYPSSPMRRPQSADAYMTRSLNPALDGLTCGLTSHDKRISDLGNKTSPMSHSFANFHYPGVQNLSRSLMLENTECHSIYEESPERDTPVDAQRPIGSEILGQSSVSEKEPANGAQNPGPAKQEKNELRDSTEQFQEYYRQRLRYQQHLEQKEQQRQIYQQMLLEGGVNQEDGPDQQQNLTEQFLNRSIQKLGELNIGMDGLGNEVSALNQQCNGSKGNGSNGSSVTSFTTPPQDSSQRLTHDASNIHTSTPRNPGSTNHIPFLEESPCGSQISSEHSVIKPPLGDSPGSLSRSKGEEDDKSKKQFVCINILEDTQAVRAVAFHPAGGLYAVGSNSKTLRVCAYPDVIDPSAHETPKQPVVRFKRNKHHKGSIYCVAWSPCGQLLATGSNDKYVKVLPFNAETCNATGPDLEFSMHDGTIRDLAFMEGPESGGAILISAGAGDCNIYTTDCQRGQGLHALSGHTGHILALYTWSGWMIASGSQDKTVRFWDLRVPSCVRVVGTTFHGTGSAVASVAVDPSGRLLATGQEDSSCMLYDIRGGRMVQSYHPHSSDVRSVRFSPGAHYLLTGSYDMKIKVTDLQGDLTKQLPIMVVGEHKDKVIQCRWHTQDLSFLSSSADRTVTLWTYNG

SEQ ID NO: 764335 - protein, 294 aa, Homo sapiens
  misc_feature (5)..(5): Xaa can be any naturally occurring amino acid
LVQVXPVALYPDVIDPSAHETPKQPVVRFKRNKHHKGSIYCVAWSPCGQLLATGSNDKYVKVLPFNAETCNATGPDLEFSMHDGTIRDLAFMEGPESGGAILISAGAGDCNIYTTDCQRGQGLHALSGHTGHILALYTWSGWMIASGSQDKTVRFWDLRVPSCVRVVGTTFHGTGSAVASVAVDPSGRLLATGQEDSSCMLYDIRGGRMVQSYHPHSSDVRSVRFSPGAHYLLTGSYDMKIKVTDLQGDLTKQLPIMVVGEHKDKVIQCRWHTQDLSFLSSSADRTVTLWTYNG

SEQ ID NO: 764336 - protein, 589 aa, Homo sapiens
MTGLLKRKFDQLDEDNSSVSSSSSSSGCQSRSCSPSSSVSRAWDSEEEGPWDQMPLPDRDFCGPRSFTPLSILKRARRERPGRVAFDGITVFYFPRCQGFTSVPSRGGCTLGMALRHSACRRFSLAEFAQEQARARHEKLRQRLKEEKLEMLQWKLSAAGVPQAEAGLPPVVDAIDDASVEEDLAVAVAGGRLEEVSFLQPYPARRRRALLRASGVRRIDREEKRELQALRQSREDCGCHCDRICDPETCSCSLAGIKCQMDHTAFPCGCCREGCENPMGRVEFNQARVQTHFIHTLTRLQLEQEAESFRELEAPAQGSPPSPGEEALVPTFPLAKPPMNNELGDNSCSSDMTDSSTASSSASGTSEAPDCPTHPGLPGPGFQPGVDDDSLARILSFSDSDFGGEEEEEEEGSVGNLDNLSCFHPADIFGTSDPGGLASWTHSYSGCSFTSGILDENANLDASCFLNGGLEGSREGSLPGTSVPPSMDAGRSSSVDLSLSSCDSFELLQALPDYSLGPHYTSQKVSDSLDNIEAPHFPLPGLSPPGDASSCFLESLMGFSEPAAEALDPFIDSQFEDTVPASLMEPVPV

SEQ ID NO: 764337 - protein, 576 aa, Homo sapiens
MTGLLKRKFDQLDEDNSSVSSSSSSSGCQSRSCSPSSSVSRAWDSEEEGPWDQMPLPDRDFCGPRSFTPLSILKRARRERPGRVAFDGITVFYFPRCQGFTSVPSRGGCTLGMALRHSACRRFSLAEFAQEQARARHEKLRQRLKEEKLEMLQWKLSAAGVPQAEAGLPPVVDAIDDASVEEDLAVAVAGGRLEEVSFLQPYPARRRRALLRASGVRRIDREEKRELQALRQSREDCGCHCDRICDPETCSCSLAGIKCQMDHTAFPCGCCREGCENPMGRVEFNQARVQTHFIHTLTRLQLEQEAESFRELEAPAQGSPPSPGEEALVPTFPLAKPPMNNELGDNSCSSDMTDSSTASSSASGTSEAPDCPTHPGLPGPGFQPGVDDDSLARILSFSDSDFGGEEEEEEEGSVGNLDNLSCFHPADIFGTSDPGGLASWTHSYSGCSFTSGILDENANLDASCFLNGGLEGSREGSLPGTSVPPSMDAGRSSSVDLSLSSCDSFELLQALPDYSLGPHYTSQKVSDSLSPPGDASSCFLESLMGFSEPAAEALDPFIDSQFEDTVPASLMEPVPV

SEQ ID NO: 764338 - protein, 589 aa, Homo sapiens; identical to SEQ ID NO: 764336

SEQ ID NO: 764339 - protein, 589 aa, Homo sapiens; identical to SEQ ID NO: 764336

SEQ ID NO: 764340 - protein, 576 aa, Homo sapiens; identical to SEQ ID NO: 764337

SEQ ID NO: 764341 - protein, 190 aa, Homo sapiens
WRPGVRQRSEPRSFPLTRRAERRAGLGAGSLPPPPPLPDAQSEGRLDRRLPGRAHRVAAQGASPAGTRVASLSSASVRIAGERRGASGPAGRDFGEGAFSASGTAAPASCRSLPGTLSGRGGWSCPALTACRGRSRGPGARPAGVAGFLLPSPARRGNPERSHGSPSSARVGTEPGLRASGEATGACVRG

SEQ ID NO: 764342 - protein, 259 aa, Homo sapiens
AGPGPGGVWDRRRCRTRRARGGWTDGCRAERTESRRRGRPRPGRGSRRCPPRASGLQAVCPQTPEHVRHHHDWAVEEEEEEGSVGNLDNLSCFHPADIFGTSDPGGLASWTHSYSGCSFTSGILDENANLDASCFLNGGLEGSREGSLPGTSVPPSMDAGRSSSVDLSLSSCDSFELLQALPDYSLGPHYTSQKVSDSLDNIEAPHFPLPGLSPPGDASSCFLESLMGFSEPAAEALDPFIDSQFEDTVPASLMEPVPV

SEQ ID NO: 764343 - protein, 589 aa, Homo sapiens; identical to SEQ ID NO: 764336

SEQ ID NO: 764344 - protein, 574 aa, Homo sapiens
MTGLLKRKFDQLDEDNSSVSSSSSSSGCQSRSCSPSSSVSRAWDSEEEGPWDQMPLPDRDFCGPRSFTPLSILKRARRERPGRVAFDGITVFYFPRCQGFTSVPSRGGCTLGMALRHSACRRFSLAEFAQEQARARHEKLRQRLKEEKLEMLQWKLSAAGVPQAEAGLPPVVDAIDDASVEEDLAVAVAGGRLEEVSFLQPYPARRRRALLRASGVRRIDREEKRELQALRQSREDCGCHCDRICDPETCSCSLAGIKCQMDHTAFPCGCCREGCENPMGRVEFNQARVQTHFIHTLTRLQLEQEAESFRELEAPAQGSPPSPGEEALVPTFPLAKPPMNNELGDNSCSSDMTDSSTASSSASGTSEAPDCPTHPGLPGPGFQPGVDDDSLARILSFSDSDFGGEEEEEEEGSVGNLDNLSCFHPADIFGTSDPGGLASWTHSYSGCSFTSGILDENANLDASCFLNGGLEGSREGSLPGTSVPPSMDAGRSSSVDLSLSSCDSFELLQALPDYSLGPHYTSQKVSDSLDNIEAPHFPLPGLSPPFRKQLASRLAFSSRTPDVKLQPEELWVQL

SEQ ID NO: 764345 - protein, 421 aa, Homo sapiens
MRGLLVLSVLLGAVFGKEDFVGHQVLRISVADEAQVQKVKELEDLEHLQLDFWRGPAHPGSPIDVRVPFPSIQAVKIFLESHGISYETMIEDVQSLLDEEQEQMFAFRSRARSTDTFNYATYHTLEEIYDFLDLLVAENPHLVSKIQIGNTYEGRPIYVLKFSTGGSKRPAIWIDTGIHSREWVTQASGVWFAKKITQDYGQDAAFTAILDTLDIFLEIVTNPDGFAFTHSTNRMWRKTRSHTAGSLCIGVDPNRNWDAGFGLSGASSNPCSETYHGKFANSEVEVKSIVDFVKDHGNIKAFISIHSYSQLLMYPYGYKTEPVPDQDELDQLSKAAVTALASLYGTKFNYGSIIKAIYQASGSTIDWTYSQGIKYSFTFELRDTGRYGFLLPASQIIPTAKETWRGASDHHGAHPESPLLS

SEQ ID NO: 764346 - protein, 421 aa, Homo sapiens; identical to SEQ ID NO: 764345

SEQ ID NO: 764347 - protein, 100 aa, Homo sapiens
HSALHKAQSFGQGWIVNPTRVNIPKVIDPFSPILLLPQIKPVEALLTGPTARASSTPSPSSSGTLGAMASCCQPPRSSPQPRRRGVALLTIMEHTLNHPY

SEQ ID NO: 764348 - protein, 421 aa, Homo sapiens; identical to SEQ ID NO: 764345

SEQ ID NO: 764349 - protein, 227 aa, Homo sapiens
EDVQGVENGGESCILPVVLVIFLEIVTNPDGFAFTHSTNRMWRKTRSHTAGSLCIGVDPNRNWDAGFGLSGASSNPCSETYHGKFANSEVEVKSIVDFVKDHGNIKAFISIHSYSQLLMYPYGYKTEPVPDQDELDQLSKAAVTALASLYGTKFNYGSIIKAIYQASGSTIDWTYSQGIKYSFTFELRDTGRYGFLLPASQIIPTAKETWRGASDHHGAHPESPLLS

SEQ ID NO: 764350 - protein, 133 aa, Homo sapiens
HDFGFPQEEFDGNQFQKAQAISVLHEMIQQTFNLFSTKDSSATWDETLLDKFYTELYQQLNDLEACMMQEVGVEDTPLMNVDSILTVRKYFQRITLYLTEKKYSPCAWEVVRAEIMRSFSLSANLQERLRRKE

SEQ ID NO: 764351 - protein, 141 aa, Homo sapiens
MSLLANDRSGSGGPCPGTEASPGSVPSSSQSWCAQRHRASDSCRPQLWERAGGAAGGACAFLGMSRHERCTCSCSPGRRLSTVRCGVRVHLTICRSPADPRVACRAGVAVRVGKGLKVWVQGAVLGPAGWGVRCEWGAFVV

SEQ ID NO: 764352 - protein, 675 aa, Homo sapiens
MAVLYFSESLVPTARKALCDPLEEVREAAAKTFEQLHSTIGHQALEDILPFLLKQLDDEEVSEFALDGLKQVMAIKSRVVLPYLVPKLTTPPVNTRVLAFLSSVAGDALTRHLGVILPAVMLALKEKLGTPDEQLEMANCQAVILSVEDDTGHRIIIEDLLEATRSPEVGMRQAAAIILNIYCSRSKADYTSHLRSLVSGLIRLFNDSSPVVLEESWDALNAITKKLDAGNQLALIEELHKEIRLIGNESKGEHVPGFCLPKKGVTSILPVLREGVLTGSPEQKEEAAKALGLVIRLTSADALRPSVVSITGPLIRILGDRFSWNVKAALLETLSLLLAKVGIALKPFLPQLQTTFTKALQDSNRGVRLKAADALGKLISIHIKVDPLFTELLNGIRAMEDPGVRDTMLQALRFVIQGAGAKVDAVIRKNIVSLLLSMLGHDEDNTRISSAGCLGELCAFLTEEELSAVLQQCLLADVSGIDWMVRHGRSLALSVAVNVAPGRLCAGRYSSDVQEMILSSATADRIPIAVSGVRGMGFLMRHHIETGGGQLPAKLSSLFVKCLQNPSSDIRLVAEKMIWWANKDPLPPLDPQAIKPILKALLDNTKDKNTVVRAYSDQAIVNLLKMRQGEEVFQSLSKILDVASLEVLNEVNRRSLKKLASQADSTEQVDDTILT

SEQ ID NO: 764353 - protein, 2412 aa, Homo sapiens
DLILPTIQKSLLRSPENVIETISSLLASVTLDLSQYAMDIVKGLAGHLKSNSPRLMDEAVLALRNLARQCSDSSAMESLTKHLFAILGGSEGKLTVVAQKMSVLSGIGSVSHHVVSGPSSQVLNGIVAELFIPFLQQEVHEGTLVHAVSVLALWCNRFTMEVPKKLTEWFKKAFSLKTSTSAVRHAYLQCMLASYRGDTLLQALDLLPLLIQTVEKAASQSTQVPTITEGVAAALLLLKLSVADSQAEAKLSSFWQLIVDEKKQVFTSEKFLVMASEDALCTVLHLTERLFLDHPHRLTGNKVQQYHRALVAVLLSRTWHVRRQAQQTVRKLLSSLGGFKLAHGLLEELKTVLSSHKVLPLEALVTDAGEVTEAGKAYVPPRVLQEALCVISGVPGLKGDVTDTEQLAQEMLIISHHPSLVAVQSGLWPALLARMKIDPEAFITRHLDQIIPRMTTQSPLNQSSMNAMGSLSVLSPDRVLPQLISTITASVQNPALRLVTREEFAIMQTPAGELYDKSIIQSAQQDSIKKANMKRENKAYSFKEQIIELELKEEIKKKKGIKEEVQLTSKQKEMLQAQLDREAQVRRRLQELDGELEAALGLLDIILAKNPSGLTQYIPVLVDSFLPLLKSPLAAPRIKNPFLSLAACVMPSRLKALGTLVSHVTLRLLKPECVLDKSWCQEELSVAVKRAVMLLHTHTITSRVGKGEPGAAPLSAPAFSLVFPFLKMVLTEMPHHSEEEEEWMAQILQILTVQAQLRASPNTPPGRVDENGPELLPRVAMLRLLTWVIGTGSPRLQVLASDTLTTLCASSSGDDGCAFAEQEEVDVLLCALQSPCASVRETVLRGLMELHMVLPAPDTDEKNGLNLLRRLWVVKFDKEEEIRKLAERLWSMMGLDLQPDLCSLLIDDVIYHEAAVRQAGAEALSQAVARYQRQAAEVMGRLMEIYQEKLYRPPPVLDALGRVISESPPDQWEARCGLALALNKLSQYLDSSQVKPLFQFFVPDALNDRHPDVRKCMLDAALATLNTHGKENVNSLLPVFEEFLKNAPNDASYDAVRQSVVVLMGSLAKHLDKSDPKVKPIVAKLIAALSTPSQQVQESVASCLPPLVPAIKEDAGGMIQRLMQQLLESDKYAERKGAAYGLAGLVKGLGILSLKQQEMMAALTDAIQDKKNFRRREGALFAFEMLCTMLGKLFEPYVVHVLPHLLLCFGDGNQYVREAADDCAKAVMSNLSAHGVKLVLPSLLAALEEESWRTKAGSVELLGAMAYCAPKQLSSCLPNIVPKLTEVLTDSHVKVQKAGQQALRQIGSVIRNPEILAIAPVLLDALTDPSRKTQKCLQTLLDTKFVHFIDAPSLALIMPIVQRAFQDRSTDTRKMAAQIIGNMYSLTDQKDLAPYLPSVTPGLKASLLDPVPEVRTVSAKALGAMVKGMGESCFEDLLPWLMETLTYEQSSVDRSGAAQGLAEVMAGLGVEKLEKLMPEIVATASKVDIAPHVRDGYIMMFNYLPITFGDKFTPYVGPIIPCILKALADENEFVRDTALRAGQRVISMYAETAIALLLPQLEQGLFDDLWRIRFSSVQLLGDLLFHISGVTGKMTTETASEDDNFGTAQSNKAIITALGVERRNRVLAGLYMGRSDTQLVVRQASLHVWKIVVSNTPRTLREILPTLFGLLLGFLASTCADKRTIAARTLGDLVRKLGEKILPEIIPILEEGLRSQKSDERQGVCIGLSEIMKSTSRDAVLYFSESLVPTARKALCDPLEEVREAAAKTFEQLHSTIGHQALEDILPFLLKQLDDEEVSEFALDGLKQVMAIKSRVVLPYLVPKLTTPPVNTRVLAFLSSVAGDALTRHLGVILPAVMLALKEKLGTPDEQLEMANCQAVILSVEDDTGHRIIIEDLLEATRSPEVGMRQAAAIILNIYCSRSKADYTSHLRSLVSGLIRLFNDSSPVVLEESWDALNAITKKLDAGNQLALIEELHKEIRLIGNESKGEHVPGFCLPKKGVTSILPVLREGVLTGSPEQKEEAAKALGLVIRLTSADALRPSVVSITGPLIRILGDRFSWNVKAALLETLSLLLAKVGIALKPFLPQLQTTFTKALQDSNRGVRLKAADALGKLISIHIKVDPLFTELLNGIRAMEDPGVRDTMLQALRFVIQGAGAKVDAVIRKNIVSLLLSMLGHDEDNTRISSAGCLGELCAFLTEEELSAVLQQCLLADVSGIDWMVRHGRSLALSVAVNVAPGRLCAGRYSSDVQEMILSSATADRIPIAVSGVRGMGFLMRHHIETGGGQLPAKLSSLFVKCLQNPSSDIRLVAEKMIWWANKDPLPPLDPQAIKPILKALLDNTKDKNTVVRAYSDQAIVNLLKMRQGEEVFQSLSKILDVASLEVLNEVNRRSLKKLASQADSTEQVDDTILT

SEQ ID NO: 764354 - protein, 308 aa, Homo sapiens
MAVLYFSESLVPTARKALCDPLEEVREAAAKTFEQLHSTIGHQALEDILPFLLKQLDDEEVSEFALDGLKQVMAIKSRVVLPYLVPKLTTPPVNTRVLAFLSSVAGDALTRHLGVILPAVMLALKEKLGTPDEQLEMANCQAVILSVEDDTGHRIIIEDLLEATRSPEVGMRQATPHRDRRRAVAAKLSSLFVKCLQNPSSDIRLVAEKMIWWANKDPLPPLDPQAIKPILKALLDNTKDKNTVVRAYSDQAIVNLLKMRQGEEVFQSLSKILDVASLEVLNEVNRRSLKKLASQADSTEQVDDTILT

SEQ ID NO: 764355 - protein, 356 aa, Homo sapiens
SCRLAAGRLAQWLLRASRSGMLRAGWLRGAAALALLLAARVVAAFEPITVGLAIGAASAITGYLSYNDIYCRFAECCREERPLNASALKLDLEEKLFGQHLATEVIFKALTGFRNNKNPKKPLTLSLHGWAGTGKNFVSQIVAENLHPKGLKSNFVHLFVSTLHFPHEQKIKLYQDQLQKWIRGNVSACANSVFIFDEMDKLHPGIIDAIKPFLDYYEQVDGVSYRKAIFIFLSNAGGDLITKTALDFWRAGRKREDIQLKDLEPVLSVGVFNNKHSGLWHSGLIDKNLIDYFIPFLPLEYRHVKMCVRAEMRARGSAIDEDIVTRVAEEMTFFPRDEKIYSDKGCKTVQSRLDFH

SEQ ID NO: 764356 - protein, 158 aa, Homo sapiens [sequence omitted]

SEQ ID NO: 764357 - protein, 158 aa, Homo sapiens [sequence omitted]

SEQ ID NO: 764358 - protein, 356 aa, Homo sapiens; identical to SEQ ID NO: 764355

SEQ ID NO: 764359 - protein, 192 aa, Homo sapiens
SCRLAAGRLAQWLLRASRSGMLRAGWLRGAAALALLLAARVVAAFEPITVGLAIGAASAITGYLSYNDIYCRFAECCREERPLNASALKLDLEEKLFGQHLATEVIFKALTGFRNNKNPKKPLTLSLHGWAGTGKNFVSQIVAENLHPKGLKSNFVHLFVSTLHFPHEQKIKLYQAREPAIISSAGQSDWSG

SEQ ID NO: 764360 - protein, 236 aa, Homo sapiens
SCRLAAGRLAQWLLRASRSGMLRAGWLRGAAALALLLAARVVAAFEPITVGLAIGAASAITGYLSYNDIYCRFAECCREERPLNASALKLDLEEKLFGQHLATEVIFKALTGFRNNKNPKKPLTLSLHGWAGTGKNFVSQIVAENLHPKGLKSNFVHLFVSTLHFPHEQKIKLYQDQLQKWIRGNVSACANSVFIFDEMDKLHPGIIDAIKPFLDYYEQVDGVSYRKAIFIFLRVH

SEQ ID NO: 764361 - protein, 356 aa, Homo sapiens; identical to SEQ ID NO: 764355

SEQ ID NO: 764362 - protein, 192 aa, Homo sapiens; identical to SEQ ID NO: 764359

SEQ ID NO: 764363 - protein, 192 aa, Homo sapiens; identical to SEQ ID NO: 764359

SEQ ID NO: 764364 - protein, 158 aa, Homo sapiens [sequence omitted]

SEQ ID NO: 764365 - protein, 356 aa, Homo sapiens; identical to SEQ ID NO: 764355

SEQ ID NO: 764366 - protein, 179 aa, Homo sapiens
SCRLAAGRLAQWLLRASRSGMLRAGWLRGAAALALLLAARVVAAFEPITVGLAIGAASAITGYLSYNDIYCRFAECCREERPLNASALKLDLEEKLFGQHLATEVIFKALTGFRNNKNPKKPLTLSLHGWAGTGKNFVSQIVAENLHPKGLKSNFVHLFVSTLHFPHEQKIKLYQSSLT

SEQ ID NO: 764367 - protein, 356 aa, Homo sapiens; identical to SEQ ID NO: 764355

SEQ ID NO: 764368 - protein, 356 aa, Homo sapiens; identical to SEQ ID NO: 764355

SEQ ID NO: 764369 - protein, 356 aa, Homo sapiens; identical to SEQ ID NO: 764355

SEQ ID NO: 764370 - protein, 142 aa, Homo sapiens
RKGLASQSHSAFIVLKQFQWNGGVGMKPVGKSCCKGENLSFIITLPGPLPHEGTLCASASLPTGGLMCCVLNLQTSPLQALAHHLLPSPSGQARDESLAYEQTNIEENEGVLSHLFIQVAESHSSQSQNSRSFIVRKKEDDI

SEQ ID NO: 764371 - protein, 827 aa, Homo sapiens
HKSNATPVPEVASKSTSLASIPGEEIQQSKEPEDSTSNQQTPDSIDKDGPEEPCAESKAMPKSEIPSPQSQLLEDAEANLVGREAAKQQRKELAGGDFTSPDASASSCGKEVPEDSNNFDGSHVYMHSDYNVYRVRSRYNSDWGETGTEQDEEEDSDENSYYQPDMEYSEIVGLPEEEEIPANRKIKFSSAPIKVFNTYSNEDYDRRNDEVDPVAASAEYELEKRVEKLELFPVELEKDEDGLGISIIGMGVGADAGLEKLGIFVKTVTEGGAAQRDGRIQVNDQIVEVDGISLVGVTQNFAATVLRNTKGNVRFVIGREKPGQVSEVAQLISQTLEQERRQRELLEQHYAQYDADDDETGEYATDEEEDEVGPVLPGSDMAIEVFELPENEDMFSPSELDTSKLSHKFKELQIKHAVTEAEIQKLKTKLQAAENEKVRWELEKTQLQQNIEENKERMLKLESYWIEAQTLCHTVNEHLKETQSQYQALEKKYNKAKKLIKDFQQKELDFIKRQEAERKKIEDLEKAHLVEVQGLQVRIRDLEAEVFRLLKQNGTQVNNNNNIFERRTSLGEVSKGDTMENLDGKQTSCQDGLSQDLNEAVPETERLDSKALKTRAQLSVKNRRQRPSRTRLYDSVSSTDGEDSLERKNFTFNDDFSPSSTSSADLSGLGAEPKTPGLSQSLALSSDESLDMIDDEILDDGQSPKHSQCQNRAVQEWSVQQVSHWLMSLNLEQYVSEFSAQNITGEQLLQLDGNKLKALGMTASQDRAVVKKKLKEMKMSLEKARKAQEKMEKQREKLRRKEQEQMQRKSKKTEKMTSTTAEGAGEQ

SEQ ID NO: 764372 - protein, 1043 aa, Homo sapiens
HKSNATPVPEVASKSTSLASIPGEEIQQSKEPEDSTSNQQTPDSIDKDGPEEPCAESKAMPKSEIPSPQSQLLEDAEANLVGREAAKQQRKELAGGDFTSPDASASSCGKEVPEDSNNFDGSHVYMHSDYNVYRVRSRYNSDWGETGTEQDEEEDSDENSYYQPDMEYSEIVGLPEEEEIPANRKIKFSSAPIKVFNTYSNEDYDRRNDEVDPVAASAEYELEKRVEKLELFPVELEKDEDGLGISIIGMGVGADAGLEKLGIFVKTVTEGGAAQRDGRIQVNDQIVEVDGISLVGVTQNFAATVLRNTKGNVRFVIGREKPGQVSEVAQLISQTLEQERRQRELLEQHYAQYDADDDETGEYATDEEEDEVGPVLPGSDMAIEVFELPENEDMFSPSELDTSKLSHKFKELQIKHAVTEAEIQKLKTKLQAAENEKVRWELEKTQLQQNIEENKERMLKLESYWIEAQTLCHTVNEHLKETQSQYQALEKKYNKAKKLIKDFQQKELDFIKRQEAERKKIEDLEKAHLVEVQGLQVRIRDLEAEVFRLLKQNGTQVNNNNNIFERRTSLGEVSKGDTMENLDGKQTSCQDGLSQDLNEAVPETERLDSKALKTRAQLSVKNRRQRPSRTRLYDSVSSTDGEDSLERKPSNSFYNHMHITKLLPPKGLRTSSPESDSGVPPLTPVDSNVPFSSDHIAEFQEEPLDPEMGPLSSMWGDTSLFSTSKSDHDVEESPCHHQTTNKKILREKDDAKDPKSLRASSSLAVQGGKIKRKFVDLGAPLRRNSSKGKKWKEKEKEASRFSAGSRIFRGRLENWTPKPCSTAQTSTRSPCMPFSWFNDSRKGSYSFRNLPAPTSSLQPSPETLISDKKGSKNFTFNDDFSPSSTSSADLSGLGAEPKTPGLSQSLALSSDEILDDGQSPKHSQCQNRAVQEWSVQQVSHWLMSLNLEQYVSEFSAQNITGEQLLQLDGNKLKALGMTASQDRAVVKKKLKEMKMSLEKARKAQEKMEKQREKLRRKEQEQMQRKSKKTEKMTSTTAEGAGEQ

SEQ ID NO: 764373 - protein, 1081 aa, Homo sapiens
HKSNATPVPEVASKSTSLASIPGEEIQQSKEPEDSTSNQQTPDSIDKDGPEEPCAESKAMPKSEIPSPQSQLLEDAEANLVGREAAKQQRKELAGGDFTSPDASASSCGKEVPEDSNNFDGSHVYMHSDYNVYRVRSRYNSDWGETGTEQDEEEDSDENSYYQPDMEYSEIVGLPEEEEIPANRKIKFSSAPIKVFNTYSNEDYDRRNDEVDPVAASAEYELEKRVEKLELFPVELEKDEDGLGISIIGMGVGADAGLEKLGIFVKTVTEGGAAQRDGRIQVNDQIVEVDGISLVGVTQNFAATVLRNTKGNVRFVIGREKPGQVSEVAQLISQTLEQERRQRELLEQHYAQYDADDDETGEYATDEEEDEVGPVLPGSDMAIEVFELPENEDMFSPSELDTSKLSHKFKELQIKHAVTEAEIQKLKTKLQAAENEKVRWELEKTQLQQNIEENKERMLKLESYWIEAQTLCHTVNEHLKETQSQYQALEKKYNKAKKLIKDFQQKELDFIKRQEAERKKIEDLEKAHLVEVQGLQVRIRDLEAEVFRLLKQNGTQVNNNNNIFERRTSLGEVSKGDTMENLDGKQTSCQDGLSQDLNEAVPETERLDSKALKTRAQLSVKNRRQRPSRTRLYDSVSSTDGEDSLERKPSNSFYNHMHITKLLPPKGLRTSSPESDSGVPPLTPVDSNVPFSSDHIAEFQEEPLDPEMGPLSSMWGDTSLFSTSKSDHDVEESPCHHQTTNKKILREKDDAKDPKSLRASSSLAVQGGKIKRKFVDLGAPLRRNSSKGKKWKEKEKEASRFSAGSRIFRGRLENWTPKPCSTAQTSTRSPCMPFSWFNDSRKGSYSFRNLPAPTSSLQPSPETLISDKKGSKVENTWITKANKRNPNPSSSSIFGRHSQLMSVVWIQETNNFTFNDDFSPSSTSSADLSGLGAEPKTPGLSQSLALSSDEILDDGQSPKHSQCQNRAVQEWSVQQVSHWLMSLNLEQYVSEFSAQNITGEQLLQLDGNKLKALGMTASQDRAVVKKKLKEMKMSLEKARKAQEKMEKQREKLRRKEQEQMQRKSKKTEKMTSTTAEGAGEQ

SEQ ID NO: 764374 - protein, 1081 aa, Homo sapiens; identical to SEQ ID NO: 764373

SEQ ID NO: 764375 - protein, 109 aa, Homo sapiens
IFRGRLENWTPKPCSTAQTSTRSPCMPFSWFNDSRKGSYSFRNLPAPTSSLQPSPETLISDKKGSKVENTWITKANKRNPNPSSSSIFGRHSQLMSVVWIQETNVITLQ

SEQ ID NO: 764376 - protein, 432 aa, Homo sapiens
MLFEQGQQALELPECTMQKAAYYENPGLFGGYGYSKTTDTYGYSTPHQPYPPPAAASSLDTDYPGSACSIQSSAPLRAPAHKGAELNGSCMRPGTGNSQGGGGGSQPPGLNSEQQPPQPPPPPPTLPPSSPTNPGGGVPAKKPKGGPNASSSSATISKQIFPWMKESRQNSKQKNSCATAGESCEDKSPPGPASKRVRTAYTSAQLVELEKEFHFNRYLCRPRRVEMANLLNLTERQIKIWFQNRRMKYKKDQKAKGILHSPASQSPERSPPLGGAAGHVAYSGQLPPVPGLAYDAPSPPAFAKSQPNMYGLAAYTAPLSSCLPQQKRYAAPEFEPHPMASNGGGFASANLQGSPVYVGGNFVESMAPASGPVFNLGHLSHPSSASVDYSCAAQIPGNHHHGPCDPHPTYTDLSAHHSSQGRLPEAPKLTHL

SEQ ID NO: 764377 - protein, 432 aa, Homo sapiens; identical to SEQ ID NO: 764376

SEQ ID NO: 764378 - protein, 140 aa, Homo sapiens
CGHPIGIAHYSPELLGSSHPPASASRVAGITGARHRARLVFSLLPCNATYSWVPRIEIGCLWEPLLGPSHLSMLKSPRIKETALLERAIVNQELQESGLRGTAWGPQGMAAMRGVGPESDDSFGGLGRKEAERSENHSEE

SEQ ID NO: 764379 - protein, 50 aa, Homo sapiens
MSLGTITRPITSEYVEVTEDQGDSTAGEGDSEPGTTRVRTERNGLGPTGN

SEQ ID NO: 764380 - protein, 293 aa, Homo sapiens
MATNESVSIFSSASLAVEYVDSLLPENPLQEPFKNAWNYMLNNYTKFQIATWGSLIVHEALYFLFCLPGFLFQFIPYMKKYKIQKDKPETWENQWKCFKVLLFNHFCIQLPLICGTYYFTEYFNIPYDWERMPRWYFLLARCFGCAVIEDTWHYFLHRLLHHKRIYKYIHKVHHEFQAPFGMEAEYAHPLETLILGTGFFIGIVLLCDHVILLWAWVTIRLLETIDVHSGYDIPLNPLNLIPFYAGSRHHDFHHMNFIGNYASTFTWWDRIFGTDSQYNAYNEKRKKFEKKTE

SEQ ID NO: 764381 - protein, 293 aa, Homo sapiens; identical to SEQ ID NO: 764380

SEQ ID NO: 764382 - protein, 293 aa, Homo sapiens; identical to SEQ ID NO: 764380

SEQ ID NO: 764383 - protein, 183 aa, Homo sapiens
MATNESVSIFSSASLAVEYVDSLLPENPLQEPFKNAWNYMLNNYTKFQIATWGSLIVHEALYFLFCLPGFLFQFIPYMKKYKIQKDKPETWENQWKCFKVLLFNHFCIQLPLICGTYYFTEYFNIPYDWERMPRWYFLLARCFGCAVIEDTWHYFLHRLLHHKRIYKYIHKVHHEFQVCESYI

SEQ ID NO: 764384 - protein, 293 aa, Homo sapiens; identical to SEQ ID NO: 764380

SEQ ID NO: 764385 - protein, 293 aa, Homo sapiens; identical to SEQ ID NO: 764380

SEQ ID NO: 764386 - protein, 240 aa, Homo sapiens
GSTPKPGEAGSEVGTPGESSVSVAGSHLAAVQDKPETWENQWKCFKVLLFNHFCIQLPLICGTYYFTEYFNIPYDWERMPRWYFLLARCFGCAVIEDTWHYFLHRLLHHKRIYKYIHKVHHEFQAPFGMEAEYAHPLETLILGTGFFIGIVLLCDHVILLWAWVTIRLLETIDVHSGYDIPLNPLNLIPFYAGSRHHDFHHMNFIGNYASTFTWWDRIFGTDSQYNAYNEKRKKFEKKTE

SEQ ID NO: 764387 - protein, 293 aa, Homo sapiens; identical to SEQ ID NO: 764380

SEQ ID NO: 764388 - protein, 112 aa, Homo sapiens [sequence omitted]

SEQ ID NO: 764389 - protein, 674 aa, Homo sapiens
VKWSGRAEGAKVRVLVPRSRREPRLRRATPSLALGAQHPADKRRDARTRRARSLVEEEDQHMKLSLGGSEMGLSSHLQSSKAGPTRIFTSNTHSSVVLQGFDQLRLEGLLCDVTLMPGDTDDAFPVHRVMMASASDYFKAMFTGGMKEQDLMCIKLHGVSKVGLRKIIDFIYTAKLSLNMDNLQDTLEAASFLQILPVLDFCKVFLISGVTLDNCVEVGRIANTYNLTEVDKYVNSFVLKNFPALLSTGEFLKLPFERLAFVLSSNSLKHCTELELFKATCRWLRLEEPRMDFAAKLMKNIRFPLMTPQELINYVQTVDFMRTDNTCVNLLLEASNYQMMPYMQPVMQSDRTAIRSDTTHLVTLGGVLRQQLVVSKELRMYDEKAHEWKSLAPMDAPRYQHGIAVIGNFLYVVGGQSNYDTKGKTAVDTVFRFDPRYNKWMQVASLNEKRTFFHLSALKGYLYAVGGRNAAGELPTVECYNPRTNEWTYVAKMSEPHYGHAGTVYGGVMYISGGITHDTFQKELMCFDPDTDKWIQKAPMTTVRGLHCMCTVGERLYVIGGNHFRGTSDYDDVLSCEYYSPILDQWTPIAAMLRGQSDVGVAVFENKIYVVGGYSWNNRCMVEIVQKYDPDKDEWHKVFDLPESLGGIRACTLTVFPPEETTPSPSRESPLSAP

SEQ ID NO: 764390 - protein, 655 aa, Homo sapiens
MPLKWKTSSPAIWKFPVPVLKTSRSTPLSPAYISLVEEEDQHMKLSLGGSEMGLSSHLQSSKAGPTRIFTSNTHSSVVLQGFDQLRLEGLLCDVTLMPGDTDDAFPVHRVMMASASDYFKAMFTGGMKEQDLMCIKLHGVSKVGLRKIIDFIYTAKLSLNMDNLQDTLEAASFLQILPVLDFCKVFLISGVTLDNCVEVGRIANTYNLTEVDKYVNSFVLKNFPALLSTGEFLKLPFERLAFVLSSNSLKHCTELELFKATCRWLRLEEPRMDFAAKLMKNIRFPLMTPQELINYVQTVDFMRTDNTCVNLLLEASNYQMMPYMQPVMQSDRTAIRSDTTHLVTLGGVLRQQLVVSKELRMYDEKAHEWKSLAPMDAPRYQHGIAVIGNFLYVVGGQSNYDTKGKTAVDTVFRFDPRYNKWMQVASLNEKRTFFHLSALKGYLYAVGGRNAAGELPTVECYNPRTNEWTYVAKMSEPHYGHAGTVYGGVMYISGGITHDTFQKELMCFDPDTDKWIQKAPMTTVRGLHCMCTVGERLYVIGGNHFRGTSDYDDVLSCEYYSPILDQWTPIAAMLRGQSDVGVAVFENKIYVVGGYSWNNRCMVEIVQKYDPDKDEWHKVFDLPESLGGIRACTLTVFPPEETTPSPSRESPLSAP

SEQ ID NO: 764391 - protein, 668 aa, Homo sapiens
IIQLLEVMDHLHRGELVAAILRNRRRRQLSLKQADFKDIFKKSTSGSLVEEEDQHMKLSLGGSEMGLSSHLQSSKAGPTRIFTSNTHSSVVLQGFDQLRLEGLLCDVTLMPGDTDDAFPVHRVMMASASDYFKAMFTGGMKEQDLMCIKLHGVSKVGLRKIIDFIYTAKLSLNMDNLQDTLEAASFLQILPVLDFCKVFLISGVTLDNCVEVGRIANTYNLTEVDKYVNSFVLKNFPALLSTGEFLKLPFERLAFVLSSNSLKHCTELELFKATCRWLRLEEPRMDFAAKLMKNIRFPLMTPQELINYVQTVDFMRTDNTCVNLLLEASNYQMMPYMQPVMQSDRTAIRSDTTHLVTLGGVLRQQLVVSKELRMYDEKAHEWKSLAPMDAPRYQHGIAVIGNFLYVVGGQSNYDTKGKTAVDTVFRFDPRYNKWMQVASLNEKRTFFHLSALKGYLYAVGGRNAAGELPTVECYNPRTNEWTYVAKMSEPHYGHAGTVYGGVMYISGGITHDTFQKELMCFDPDTDKWIQKAPMTTVRGLHCMCTVGERLYVIGGNHFRGTSDYDDVLSCEYYSPILDQWTPIAAMLRGQSDVGVAVFENKIYVVGGYSWNNRCMVEIVQKYDPDKDEWHKVFDLPESLGGIRACTLTVFPPEETTPSPSRESPLSAP

SEQ ID NO: 764392 - protein, 604 aa, Homo sapiens
MGLSSHLQSSKAGPTRIFTSNTHSSVVLQGFDQLRLEGLLCDVTLMPGDTDDAFPVHRVMMASASDYFKAMFTGGMKEQDLMCIKLHGVSKVGLRKIIDFIYTAKLSLNMDNLQDTLEAASFLQILPVLDFCKVFLISGVTLDNCVEVGRIANTYNLTEVDKYVNSFVLKNFPALLSTGEFLKLPFERLAFVLSSNSLKHCTELELFKATCRWLRLEEPRMDFAAKLMKNIRFPLMTPQELINYVQTVDFMRTDNTCVNLLLEASNYQMMPYMQPVMQSDRTAIRSDTTHLVTLGGVLRQQLVVSKELRMYDEKAHEWKSLAPMDAPRYQHGIAVIGNFLYVVGGQSNYDTKGKTAVDTVFRFDPRYNKWMQVASLNEKRTFFHLSALKGYLYAVGGRNAAGELPTVECYNPRTNEWTYVAKMSEPHYGHAGTVYGGVMYISGGITHDTFQKELMCFDPDTDKWIQKAPMTTVRGLHCMCTVGERLYVIGGNHFRGTSDYDDVLSCEYYSPILDQWTPIAAMLRGQSDVGVAVFENKIYVVGGYSWNNRCMVEIVQKYDPDKDEWHKVFDLPESLGGIRACTLTVFPPEETTPSPSRESPLSAP

SEQ ID NO: 764393 - protein, 184 aa, Homo sapiens
MKTFGRSSSWYSAQDGGVMYISGGITHDTFQKELMCFDPDTDKWIQKAPMTTVRGLHCMCTVGERLYVIGGNHFRGTSDYDDVLSCEYYSPILDQWTPIAAMLRGQSDVGVAVFENKIYVVGGYSWNNRCMVEIVQKYDPDKDEWHKVFDLPESLGGIRACTLTVFPPEETTPSPSRESPLSAP

SEQ ID NO: 764394 - protein, 1178 aa, Homo sapiens
MLKFRTVHGGLRLLGIRRTSTAPAASPNVRRLEYKPIKKVMVANRGEIAIRVFRACTELGIRTVAIYSEQDTGQMHRQKADEAYLIGRGLAPVQAYLHIPDIIKVAKENNVDAVHPGYGFLSERADFAQACQDAGVRFIGPSPEVVRKMGDKVEARAIAIAAGVPVVPGTDAPITSLHEAHEFSNTYGFPIIFKAAYGGGGRGMRVVHSYEELEENYTRAYSEALAAFGNGALFVEKFIEKPRHIEVQILGDQYGNILHLYERDCSIQRRHQKVVEIAPAAHLDPQLRTRLTSDSVKLAKQVGYENAGTVEFLVDRHGKHYFIEVNSRLQVEHTVTEEITDVDLVHAQIHVAEGRSLPDLGLRQENIRINGCAIQCRVTTEDPARSFQPDTGRIEVFRSGEGMGIRLDNASAFQGAVISPHYDSLLVKVIAHGKDHPTAATKMSRALAEFRVRGVKTNIAFLQNVLNNQQFLAGTVDTQFIDENPELFQLRPAQNRAQKLLHYLGHVMVNGPTTPIPVKASPSPTDPVVPAVPIGPPPAGFRDILLREGPEGFARAVRNHPGLLLMDTTFRDAHQSLLATRVRTHDLKKIAPYVAHNFSKLFSMENWGGATFDVAMRFLYECPWRRLQELRELIPNIPFQMLLRGANAVGYTNYPDNVVFKFCEVAKENGMDVFRVFDSLNYLPNMLLGMEAAGSAGGVVEAAISYTGDVADPSRTKYSLQYYMGLAEELVRAGTHILCIKDMAGLLKPTACTMLVSSLRDRFPDLPLHIHTHDTSGAGVAAMLACAQAGADVVDVAADSMSGMTSQPSMGALVACTRGTPLDTEVPMERVFDYSEYWEGARGLYAAFDCTATMKSGNSDVYENEIPGGQYTNLHFQAHSMGLGSKFKEVKKAYVEANQMLGDLIKVTPSSKIVGDLAQFMVQNGLSRAEAEAQAEELSFPRSVVEFLQGYIGVPHGGFPEPFRSKVLKDLPRVEGRPGASLPPLDLQALEKELVDRHGEEVTPEDVLSAAMYPDVFAHFKDFTATFGPLDSLNTRLFLQGPKIAEEFEVELERGKTLHIKALAVSDLNRAGQRQVFFELNGQLRSILVKDTQAMKEMHFHPKALKDVKGQIGAPMPGKVIDIKVVAGAKVAKGQPLCVLSAMKMETVVTSPMEGTVRKVHVTKDMTLEGDDLILEIE

SEQ ID NO: 764395 - protein, 1190 aa, Homo sapiens
VLTHLKFDQTLRMLKFRTVHGGLRLLGIRRTSTAPAASPNVRRLEYKPIKKVMVANRGEIAIRVFRACTELGIRTVAIYSEQDTGQMHRQKADEAYLIGRGLAPVQAYLHIPDIIKVAKENNVDAVHPGYGFLSERADFAQACQDAGVRFIGPSPEVVRKMGDKVEARAIAIAAGVPVVPGTDAPITSLHEAHEFSNTYGFPIIFKAAYGGGGRGMRVVHSYEELEENYTRAYSEALAAFGNGALFVEKFIEKPRHIEVQILGDQYGNILHLYERDCSIQRRHQKVVEIAPAAHLDPQLRTRLTSDSVKLAKQVGYENAGTVEFLVDRHGKHYFIEVNSRLQVEHTVTEEITDVDLVHAQIHVAEGRSLPDLGLRQENIRINGCAIQCRVTTEDPARSFQPDTGRIEVFRSGEGMGIRLDNASAFQGAVISPHYDSLLVKVIAHGKDHPTAATKMSRALAEFRVRGVKTNIAFLQNVLNNQQFLAGTVDTQFIDENPELFQLRPAQNRAQKLLHYLGHVMVNGPTTPIPVKASPSPTDPVVPAVPIGPPPAGFRDILLREGPEGFARAVRNHPGLLLMDTTFRDAHQSLLATRVRTHDLKKIAPYVAHNFSKLFSMENWGGATFDVAMRFLYECPWRRLQELRELIPNIPFQMLLRGANAVGYTNYPDNVVFKFCEVAKENGMDVFRVFDSLNYLPNMLLGMEAAGSAGGVVEAAISYTGDVADPSRTKYSLQYYMGLAEELVRAGTHILCIKDMAGLLKPTACTMLVSSLRDRFPDLPLHIHTHDTSGAGVAAMLACAQAGADVVDVAADSMSGMTSQPSMGALVACTRGTPLDTEVPMERVFDYSEYWEGARGLYAAFDCTATMKSGNSDVYENEIPGGQYTNLHFQAHSMGLGSKFKEVKKAYVEANQMLGDLIKVTPSSKIVGDLAQFMVQNGLSRAEAEAQAEELSFPRSVVEFLQGYIGVPHGGFPEPFRSKVLKDLPRVEGRPGASLPPLDLQALEKELVDRHGEEVTPEDVLSAAMYPDVFAHFKDFTATFGPLDSLNTRLFLQGPKIAEEFEVELERGKTLHIKALAVSDLNRAGQRQVFFELNGQLRSILVKDTQAMKEMHFHPKALKDVKGQIGAPMPGKVIDIKVVAGAKVAKGQPLCVLSAMKMETVVTSPMEGTVRKVHVTKDMTLEGDDLILEIE

SEQ ID NO: 764396 - protein, 1178 aa, Homo sapiens; identical to SEQ ID NO: 764394

SEQ ID NO: 764397 - protein, 1178 aa, Homo sapiens; identical to SEQ ID NO: 764394

SEQ ID NO: 764398 - protein, 1190 aa, Homo sapiens
SCSLSVEAAAVEAAARTGDGEEIVSAFWRADQTLRMLKFRTVHGGLRLLGIRRTSTAPAASPNVRRLEYKPIKKVMVANRGEIAIRVFRACTELGIRTVAIYSEQDTGQMHRQKADEAYLIGRGLAPVQAYLHIPDIIKVAKENNVDAVHPGYGFLSERADFAQACQDAGVRFIGPSPEVVRKMGDKVEARAIAIAAGVPVVPGTDAPITSLHEAHEFSNTYGFPIIFKAAYGGGGRGMRVVHSYEELEENYTRAYSEALAAFGNGALFVEKFIEKPRHIEVQILGDQYGNILHLYERDCSIQRRHQKVVEIAPAAHLDPQLRTRLTSDSVKLAKQVGYENAGTVEFLVDRHGKHYFIEVNSRLQVEHTVTEEITDVDLVHAQIHVAEGRSLPDLGLRQENIRINGCAIQCRVTTEDPARSFQPDTGRIEVFRSGEGMGIRLDNASAFQGAVISPHYDSLLVKVIAHGKDHPTAATKMSRALAEFRVRGVKTNIAFLQNVLNNQQFLAGTVDTQFIDENPELFQLRPAQNRAQKLLHYLGHVMVNGPTTPIPVKASPSPTDPVVPAVPIGPPPAGFRDILLREGPEGFARAVRNHPGLLLMDTTFRDAHQSLLATRVRTHDLKKIAPYVAHNFSKLFSMENWGGATFDVAMRFLYECPWRRLQELRELIPNIPFQMLLRGANAVGYTNYPDNVVFKFCEVAKENGMDVFRVFDSLNYLPNMLLGMEAAGSAGGVVEAAISYTGDVADPSRTKYSLQYYMGLAEELVRAGTHILCIKDMAGLLKPTACTMLVSSLRDRFPDLPLHIHTHDTSGAGVAAMLACAQAGADVVDVAADSMSGMTSQPSMGALVACTRGTPLDTEVPMERVFDYSEYWEGARGLYAAFDCTATMKSGNSDVYENEIPGGQYTNLHFQAHSMGLGSKFKEVKKAYVEANQMLGDLIKVTPSSKIVGDLAQFMVQNGLSRAEAEAQAEELSFPRSVLKDLPRVEGRPGASLPPLDLQALEKELVDRHGEEVTPEDVLSAAMYPDVFAHFKDFTATFGPLDSLNTRLFLQGPKIAEEFEVELERGKTLHIKALAVSDLNRAGQRQVFFELNGQLRSILVKDTQAMKEMHFHPKALKDVKGQIGAPMPGKVIDIKVVAGAKVAKGQPLCVLSAMKMETVVTSPMEGTVRKVHVTKDMTLEGDDLILEIE

SEQ ID NO: 764399 - protein, 1213 aa, Homo sapiens
SCSLSVEAAAVEAAARTGDGEEIVSAFWRADQTLRMLKFRTVHGGLRLLGIRRTSTAPAASPNVRRLEYKPIKKVMVANRGEIAIRVFRACTELGIRTVAIYSEQDTGQMHRQKADEAYLIGRGLAPVQAYLHIPDIIKVAKENNVDAVHPGYGFLSERADFAQACQDAGVRFIGPSPEVVRKMGDKVEARAIAIAAGVPVVPGTDAPITSLHEAHEFSNTYGFPIIFKAAYGGGGRGMRVVHSYEELEENYTRAYSEALAAFGNGALFVEKFIEKPRHIEVQILGDQYGNILHLYERDCSIQRRHQKVVEIAPAAHLDPQLRTRLTSDSVKLAKQVGYENAGTVEFLVDRHGKHYFIEVNSRLQVEHTVTEEITDVDLVHAQIHVAEGRSLPDLGLRQENIRINGCAIQCRVTTEDPARSFQPDTGRIEVFRSGEGMGIRLDNASAFQGAVISPHYDSLLVKVIAHGKDHPTAATKMSRALAEFRVRGVKTNIAFLQNVLNNQQFLAGTVDTQFIDENPELFQLRPAQNRAQKLLHYLGHVMVNGPTTPIPVKASPSPTDPVVPAVPIGPPPAGFRDILLREGPEGFARAVRNHPGLLLMDTTFRDAHQSLLATRVRTHDLKKIAPYVAHNFSKLFSMENWGGATFDVAMRFLYECPWRRLQELRELIPNIPFQMLLRGANAVGYTNYPDNVVFKFCEVAKENGMDVFRVFDSLNYLPNMLLGMEAAGSAGGVVEAAISYTGDVADPSRTKYSLQYYMGLAEELVRAGTHILCIKDMAGLLKPTACTMLVSSLRDRFPDLPLHIHTHDTSGAGVAAMLACAQAGADVVDVAADSMSGMTSQPSMGALVACTRGTPLDTEVPMERVFDYSEYWEGARGLYAAFDCTATMKSGNSDVYENEIPGGQYTNLHFQAHSMGLGSKFKEVKKAYVEANQMLGDLIKVTPSSKIVGDLAQFMVQNGLSRAEAEAQAEELSFPRSVVEFLQGYIGVPHGGFPEPFRSKVLKDLPRVEGRPGASLPPLDLQALEKELVDRHGEEVTPEDVLSAAMYPDVFAHFKDFTATFGPLDSLNTRLFLQGPKIAEEFEVELERGKTLHIKALAVSDLNRAGQRQVFFELNGQLRSILVKDTQAMKEMHFHPKALKDVKGQIGAPMPGKVIDIKVVAGAKVAKGQPLCVLSAMKMETVVTSPMEGTVRKVHVTKDMTLEGDDLILEIE

SEQ ID NO: 764400 - protein, 1240 aa, Homo sapiens
SCSLSVEAAAVEAAARTGDGEEIVSAFWRADQTLRMLKFRTVHGGLRLLGIRRTSTAPAASPNVRRLEYKPIKKVMVANRGEIAIRVFRACTELGIRTVAIYSEQDTGQMHRQKADEAYLIGRGLAPVQAYLHIPDIIKVAKENNVDAVHPGYGFLSERADFAQACQDAGVRFIGPSPEVVRKMGDKVEARAIAIAAGVPVVPGTDAPITSLHEAHEFSNTYGFPIIFKAAYGGGGRGMRVVHSYEELEENYTRAYSEALAAFGNGALFVEKFIEKPRHIEVQILGDQYGNILHLYERDCSIQRRHQKVVEIAPAAHLDPQLRTRLTSDSVKLAKQVGYENAGTVEFLVDRHGKHYFIEVNSRLQVEHTVTEEITDVDLVHAQIHVAEGRSLPDLGLRQENIRINGCAIQCRVTTEDPARSFQPDTGRIEVFRSGEGMGIRLDNASAFQGAVISPHYDSLLVKVIAHGKDHPTAATKMSRALAEFRVRGVKTNIAFLQNVLNNQQFLAGTVDTQFIDENPELFQLRPAQNRAQKLLHYLGHVMVNGPTTPIPVKASPSPTDPVVPAVPIGPPPAGFRDILLREGPEGFARAVRNHPGLLLMDTTFRDAHQSLLATRVRTHDLKKIAPYVAHNFSKLFSMENWGGATFDVAMRFLYECPWRRLQELRELIPNIPFQMLLRGANAVGYTNYPDNVVFKFCEVAKENGMDVFRVFDSLNYLPNMLLGMEAAGSAGGVVEAAISYTGDVADPSRTKYSLQYYMGLAEELVRAGTHILCIKDMAGLLKPTACTMLVSSLRDRFPDLPLHIHTHDTSGAGVAAMLACAQAGADVVDVAADSMSGMTSQPSMGALVACTRGTPLDTEVPMERVFDYSEYWEGARGLYAAFDCTATMKSGNSDVYENEIPGGQYTNLHFQAHSMGLGSKFKEVKKAYVEANQMLGDLIKVTPSSKIVGDLAQFMVQNGLSRAEAEAQAEELSFPRSVVEFLQGYIGVPHGGFPEPFRSKVLKDLPRVEGRPGASLPPLDLQALEKELVDRHGEEVTPEDVLSAAMYPDVFAHFKDFTATFGPLDSLNTRLFLQGPKIAEEFEVELERGKTLHIKALAVSDLNRAGQRQVFFELNGQLRSILVKDTQAMKVLSPPGPARRWGLAGPRMYVPSALCLQEMHFHPKALKDVKGQIGAPMPGKVIDIKVVAGAKVAKGQPLCVLSAMKMETVVTSPMEGTVRKVHVTKDMTLEGDDLILEIE

SEQ ID NO: 764401 - protein, 267 aa, Homo sapiens
GVPGVRDSSTGVNGLSRAEAEAQAEELSFPRSVVEFLQGYIGVPHGGFPEPFRSKVLKDLPRVEGRPGASLPPLDLQALEKELVDRHGEEVTPEDVLSAAMYPDVFAHFKDFTATFGPLDSLNTRLFLQGPKIAEEFEVELERGKTLHIKALAVSDLNRAGQRQVFFELNGQLRSILVKDTQAMKEMHFHPKALKDVKGQIGAPMPGKVIDIKVVAGAKVAKGQPLCVLSAMKMETVVTSPMEGTVRKVHVTKDMTLEGDDLILEIE

SEQ ID NO: 764402 - protein, 168 aa, Homo sapiens
MGGSPNPFALRDFTATFGPLDSLNTRLFLQGPKIAEEFEVELERGKTLHIKALAVSDLNRAGQRQVFFELNGQLRSILVKDTQAMKEMHFHPKALKDVKGQIGAPMPGKVIDIKVVAGAKVAKGQPLCVLSAMKMETVVTSPMEGTVRKVHVTKDMTLEGDDLILEIE

SEQ ID NO: 764403 - protein, 1085 aa, Homo sapiens
SCSLSVEAAAVEAAARTGDGEEIVSAFWRADQTLRMLKFRTVHGGLRLLGIRRTSTAPAASPNVRRLEYKPIKKVMVANRGEIAIRVFRACTELGIRTVAIYSEQDTGQMHRQKADEAYLIGRGLAPVQAYLHIPDIIKVAKENNVDAVHPGYGFLSERADFAQACQDAGVRFIGPSPEVVRKMGDKVEARAIAIAAGVPVVPGTDAPITSLHEAHEFSNTYGFPIIFKAAYGGGGRGMRVVHSYEELEENYTRAYSEALAAFGNGALFVEKFIEKPRHIEVQILGDQYGNILHLYERDCSIQRRHQKVVEIAPAAHLDPQLRTRLTSDSVKLAKQVGYENAGTVEFLVDRHGKHYFIEVNSRLQVEHTVTEEITDVDLVHAQIHVAEGRSLPDLGLRQENIRINGCAIQCRVTTEDPARSFQPDTGRIEVFRSGEGMGIRLDNASAFQGAVISPHYDSLLVKVIAHGKDHPTAATKMSRALAEFRVRGVKTNIAFLQNVLNNQQFLAGTVDTQFIDENPELFQLRPAQNRAQKLLHYLGHVMVNGPTTPIPVKASPSPTDPVVPAVPIGPPPAGFRDILLREGPEGFARAVRNHPGLLLMDTTFRDAHQSLLATRVRTHDLKKIAPYVAHNFSKLFSMENWGGATFDVAMRFLYECPWRRLQELRELIPNIPFQMLLRGANAVGYTNYPDNVVFKFCEVAKENGMDVFRVFDSLNYLPNMLLGMEAAGSAGGVVEAAISYTGDVADPSRTKYSLQYYMGLAEELVRAGTHILCIKDMAGLLKPTACTMLVSSLRDRFPDLPLHIHTHDTSGAGVAAMLACAQAGADVVDVAADSMSGMTSQPSMGALVACTRGTPLDTEVPMERVFDYSEYWEGARGLYAAFDCTATMKSGNSDVYENEIPGGQYTNLHFQAHSMGLGSKFKEVKKAYVEANQMLGDLIKVTPSSKIVGDLAQFMVQNGLSRAEAEAQAEELSFPRSVVEFLQGYIGVPHGGFPEPFRSKVLKDLPRVEGRPGASLPPLDLQALEKELVDRHGEEVTPEDVLSAAMYPDVFAHFKLLCDLGSLQEEASIQAIQGAKDGSEVLEV

SEQ ID NO: 764404 - protein, 1213 aa, Homo sapiens; identical to SEQ ID NO: 764399

SEQ ID NO: 764405 - protein, 1213 aa, Homo sapiens; identical to SEQ ID NO: 764399

SEQ ID NO: 764406 - protein, 189 aa, Homo sapiens
MALSFSLLMAVLVLSYKSICSLGCDLPQTHSLGNRRALILLAQMGRISHFSCLKDRHDFGFPEEEFDGHQFQKAQAISVLHEMIQQTFNLFSTEDSSAAWEQSLLEKFSTELYQQLNDLEACVIQEVGVEETPLMNEDSILAVRKYFQRITLYLTEKKYSPCAWEVVRAEIMRSLSFSTNLQKRLRRKD

SEQ ID NO: 764407 - protein, 108 aa, Homo sapiens
MFPFLSLLSDWTSGRRQLLALLQWFKNVRIAVTTILLAFLSWSPNDCWSFSHHISDQGSWIQAVIQTLGSPTQGLLLLSHWSSLSERKAVKYSIINKHVAGSNNIESC

SEQ ID NO: 764408 - protein, 82 aa, Homo sapiens
KTDIQCGRLQSLLLHSWQTWIIDHCTLPAEPTQGLRDLFHPELQAVPTYGLPLRGNIIVVGNWEPLHVLEQENGCQNRFCVP

SEQ ID NO: 764409 - protein, 207 aa, Homo sapiens
MVSHSSWEAGPWAPWQPGSALRSQLRCQCLGLPRRYCSGVGWAPPFTSSWSLGAGPPVEPGSWQTSSMSDVETRPSWIRVGPGPVTGDRLRERGGGSEMHRSGTSHEDRPETGVCGHAPEAPEPPGAGGGCAGSSPEPLEGACPGHLNVGLLAAELRGNTSLAVVNHPGCGNLLWPPCDASIPPSLMSGAKAGRVKYLGLKALGFLR

SEQ ID NO: 764410 - protein, 71 aa, Homo sapiens
QGRHLPSVWVRAAGLQAPFPPLPRWVRAKCRPLVSTILLCQASVWTQNAFLCCLPQVPPCFQPHLSRSVST

SEQ ID NO: 764411 - protein, 97 aa, Homo sapiens
MLGNKRLGLSGLTLALSLLVCLGALAEAYPSKPDNPGEDAPAEDMARYYSALRHYINLITRQRYGKRSSPETLISDLLMRESTENVPRTRLEDPAMW

SEQ ID NO: 764412 - protein, 97 aa, Homo sapiens; identical to SEQ ID NO: 764411

SEQ ID NO: 764413 - protein, 104 aa, Homo sapiens
PVNSLSDFSSQMPFQGRQLQNPNGSLGRGHTLSSRTTSDSLLLPSPSWTQAPREPSEDWFTCSAAPLPATPQGWRLAPLHVALALQDSDDPQVTVMTLPGPRTS

SEQ ID NO: 764414 - protein, 128 aa, Homo sapiens
MRHLLEPFGVTLSGPSATVSTPGSWVLSSPSQDIFRPGLSELLLLLIIETGCQSIAKTGVQWCDPGLLSLPGSGDPPSSASCVAGTTGRHHHAWLNIFVFFVETSSRYVVQVGLKLLPQPPKVLGLQA

SEQ ID NO: 764415 - protein, 105 aa, Homo sapiens
MKDEVLNLNSQLLYAIWKKVKLECSGPILAHCNLCLLGSRHPSTSASQVAGTTGEKTMRSARMMDCHHWGTGKGLSKSMYVFQSLQNVSDSLKYIFSKCQVSMQC

SEQ ID NO: 764416 - protein, 126 aa, Homo sapiens [sequence omitted]

SEQ ID NO: 764417 - protein, 862 aa, Homo sapiens
MATLNSASTTGTTPSPGHNAPSLPSDTFSSSTPSDPVTKDPPAASSTSENMRSSEPGGQLLESGCGLVPPKEIGEPQEGPDCGHFPPNDPGVEKDKEQEEEEEGLPPMDLSNHLFFTAGGEAYLVAKLSLPGGSELLLPKGFPWGEAGIKEEPSLPFLAYPPPSHLTALHIQHGFDPIQGFSSSDQILSHDTSAPSPAACEERHGAFWSYQLAPNPPGDPKDGPMGNSGGNHVAVFWLCLLCRLGFSKPQAFMDHTQSHGVKLTPAQYQGLSGSPAVLQEGDEGCKALISFLEPKLPARPSSDIPLDNSSTVNMEANVAQTEDGPPEAEVQALILLDEEVMALSPPSPPTATWDPSPTQAKESPVAAGEAGPDWFPEGQEEDGGLCPPLNQSSPTSKEGGTLPAPVGSPEDPSDPPQPYRLADDYTPAPAAFQGLSLSSHMSLLHSRNSCKTLKCPKCNWHYKYQQTLDVHMQEKHPESNSHCSYCSAGGAHPRLARGESYNCGYKPYRCDVCNYSTTTKGNLSIHMQSDKHLANLQGFQAGPGGQGSPTEASLPPSAGDKEPKTKSSWQCKVCSYETNISRNLRIHMTSEKHMQNVLMLHQGLPLGLPPGLMGPGPPPPPGATPTSPPELFQYFGPQALGQPQTPLAGPGLRPDKPLEAQLLLNGFHHVGAPARKFPTSAPGSLSPDAHLPPSQLLGSSSDSLPTSPPPDDSLSLKVFRCLVCQAFSTDSLELLLYHCSIGRSLPEAEWKEVAGDTHRCKLCCYGTQLKANFQLHLKTDKHAQKYQLAAHLREGGGAMGTPSPASLGDGAPYGSVSPLHLRCNICDFESNSKEKMQLHARGAAHEENSQIYKRTGTGLLIK

SEQ ID NO: 764418 - protein, 436 aa, Homo sapiens
MSLMVVSMACVGLFLVQRAGPHMGGQDKPLLSAWPSLVVLLEDMSFFGVTLILGLTTSVCKRKVGCTVPELHNRIFWNSLFMGPVTPAHTGTYRCRGSHTHSPSGWSAPSNPLVIVVIGVHRKPSLLAHPGPLVKSEETVILQCWSDVRFQHFLLHREGKFKDTLHLIGEHHDGVSKANFSIGPMMQDLAGTYRCYGSVTHSPYQLSAPSDPLDIVITGLYEKPSLSAQPGPTVLAGESVTLSCSSRSSYDMYHLSREGEAHERRFSAGPKVNGTFQADFPLGPATHGGTYRCFGSFRDSPYEWSNSSDPLLVSVTGNPSNSWPSPTEPSSETGNPRHLHVLIGTSVVIILFILLLFFLLHRWCCNKKNAVVMDQEPAGNRTVNREDSDEQDPQEVTYAQLNHCVFTQRKITRPSQRPKTPPTDIIVYTELPNAEP

SEQ ID NO: 764419 - protein, 320 aa, Homo sapiens
MSLMVVSMVCVGFFLLQGAWPHEGVHRKPSLLAHPGPLVKSEETVILQCWSDVRFQHFLLHREGKFKDTLHLIGEHHDGVSKANFSIGPMMQDLAGTYRCYGSVTHSPYQLSAPSDPLDIVITGLYEKPSLSAQPGPTVLAGESVTLSCSSRSSYDMYHLSREGEAHERRFSAGPKVNGTFQADFPLGPATHGGTYRCFGSFRDSPYEWSNSSDPLLVSVTGNPSNSWPSPTEPSSETGNPRHLHVLIGTSVVIILFILLLFFLLHRWCCNKKMLLELTKTLGERTVDREASDEPDPQEGDYARGFLVFPKKFSLLGREP

SEQ ID NO: 764420 - protein, 341 aa, Homo sapiens
MSLMVVSMVCVGFFLLQGAWPHEGVHRKPSLLAHPGPLVKSEETVILQCWSDVRFQHFLLHREGKFKDTLHLIGEHHDGVSKANFSIGPMMQDLAGTYRCYGSVTHSPYQLSAPSDPLDIVITGLYEKPSLSAQPGPTVLAGESVTLSCSSRSSYDMYHLSREGEAHERRFSAGPKVNGTFQADFPLGPATHGGTYRCFGSFRDSPYEWSNSSDPLLVSVTGNPSNSWPSPTEPSSETGNPRHLHVLIGTSVVIILFILLLFFLLHRWCCNKKNAVVMDQEPAGNRTVNREDSDEQDPQEVTYAQLNHCVFTQRKITRPSQRPKTPPTDIIVYTELPNAEP

SEQ ID NO: 764421 - protein, 243 aa, Homo sapiens
MSLMVVSMVCVGFFLLQGAWPHEGVHRKPSLLAHPGPLVKSEETVILQCWSDVRFQHFLLHREGKFKDTLHLIGEHHDGVSKANFSIGPMMQDLAGTYRCYGSVTHSPYQLSAPSDPLDIVITGNPSNSWPSPTEPSSETGNPRHLHVLIGTSVVIILFILLLFFLLHRWCCNKKNAVVMDQEPAGNRTVNREDSDEQDPQEVTYAQLNHCVFTQRKITRPSQRPKTPPTDIIVYTELPNAEP

SEQ ID NO: 764422 - protein, 306 aa, Homo sapiens
SLAGRGRASPSAESILTRSVPRASYGDDLREHAGSGRTLKPRRAMETYAEVGKEGKPSCASVDLQGDSSLQVEISDAVSERDKVKFTVQTKSCLPHFAQTEFSVVRQHEEFIWLHDAYVENEEYAGLIIPPAPPRPDFEASREKLQKLGEGDSSVTREEFAKMKQELEAEYLAIFKKTVAMHEVFLQRLAAHPTLRRDHNFFVFLEYGQDLSVRGKNRKELLGGFLRNIVKSADEALITGMSGLKEVDDFFEHERTFLLEYHTRIRECLPAGRPVMRAHKCLADDYIPISAALSSLGTQEVNQLRT

SEQ ID NO: 764423 - protein, 321 aa, Homo sapiens
SLAGRGRASPSAESILTRSVPRASYGDDLREHAGSGRTLKPRRAMETYAEVGKEGKPSCASVDLQGDSSLQVEISDAVSERDKVKFTVQTKSCLPHFAQTEFSVVRQHEEFIWLHDAYVENEEYAGLIIPPAPPRPDFEASREKLQKLGEGDSSVTREEFAKMKQELEAEYLAIFKKTVAMHEVFLQRLAAHPTLRRDHNFFVFLEYGQDLSVRGKNRKELLGGFLRNIVKSADEALITGMSGLKEVDDFFEHERTFLLEYHTRIRECLPAGRPVMRAHKCTQGPRGPGSPCPSPQRFNSLGERREQGVPCCLSVATSTKA

SEQ ID NO: 764424 - protein, 361 aa, Homo sapiens
SLAGRGRASPSAESILTRSVPRASYGDDLREHAGSGRTLKPRRAMETYAEVGKEGKPSCASVDLQGDSSLQVEISDAVSERDKVKFTVQTKSCLPHFAQTEFSVVRQHEEFIWLHDAYVENEEYAGLIVRRGWAGAGRDRQSTWVRTKGCDGRLGSERPPSSVPAFEQIPPAPPRPDFEASREKLQKLGEGDSSVTREEFAKMKQELEAEYLAIFKKTVAMHEVFLQRLAAHPTLRRDHNFFVFLEYGQDLSVRGKNRKELLGGFLRNIVKSADEALITGMSGLKEVDDFFEHERTFLLEYHTRIRECLPAGRPVMRAHKCTQGPRGPGSPCPSPQRFNSLGERREQGVPCCLSVATSTKA

SEQ ID NO: 764425 - protein, 414 aa, Homo sapiens
SLAGRGRASPSAESILTRSVPRASYGDDLREHAGSGRTLKPRRAMETYAEVGKEGKPSCASVDLQGDSSLQVEISDAVSERDKVKFTVQTKSCLPHFAQTEFSVVRQHEEFIWLHDAYVENEEYAGLIVRRGWAGAGRDRQSTWVRTKGCDGRLGSERPPSSVPAFEQIPPAPPRPDFEASREKLQKLGEGDSSVTREEFAKMKQELEAECPLLSLPSPESRCLPQLSPHECLATLTSDPRKGAGRMMGAEEGLVSCCHSRREYLAIFKKTVAMHEVFLQRLAAHPTLRRDHNFFVFLEYGQDLSVRGKNRKELLGGFLRNIVKSADEALITGMSGLKEVDDFFEHERTFLLEYHTRIRECLPAGRPVMRAHKCTQGPRGPGSPCPSPQRFNSLGERREQGVPCCLSVATSTKA

SEQ ID NO: 764426 - protein, 141 aa, Homo sapiens
MHEVFLQRLAAHPTLRRDHNFFVFLEYGQDLSVRGKNRKELLGGFLRNIVKSADEALITGMSGLKEVDDFFEHERTFLLEYHTRIRECLPAGRPVMRAHKCTQGPRGPGSPCPSPQRFNSLGERREQGVPCCLSVATSTKA

SEQ ID NO: 764427 - protein, 113 aa, Homo sapiens
MRWSASVCFCVCLCVYSLHVSVSLCVCVYVDVPAYVCVCVYLCMSVFVSLCVCVSVCVSVCVCVFVCLCVSVCVSVCLRVSVCVCMACVCLCVCTYASMWVFVRACLCLSLCV

SEQ ID NO: 764428 - protein, 69 aa, Homo sapiens
SLCRRWGFRAESDTAPVLKEPTLRLKPRRPCLSSFAPYLLSSLKAGVLAEGGDAQPILPQGPSPRLPHF

SEQ ID NO: 764429 - protein, 390 aa, Homo sapiens
QKRKIYNVCPRKGKKIFIHMHEIIQIDGHIYQCLECKQNFCENLALIMCERTHTGEKPYKSDMCEKTFVQSSDLTSHQRIHNYEKPYKCSKCEKSFWHHLALSGHQRTHAGKKFYTCDICGKNFGQSSDLLVHQRSHTGEKPYLCSECDKCFSRSTNLIRHRRTHTGEKPFKCLECEKAFSGKSDLISHQRTHTGERPYKCNKCEKSYRHRSAFIVHKRVHTGEKPYKCGACEKCFGQKSDLIVHQRVHTGEKPYKCLECMRSFTRSANLIRHQATHTHTFKCLEYEKSFNCSSDLIVHQRIHMEEKPHQWSACESGFLLGMDFVAQQKMRTQTEELHYKYTVCDKSFHQSSALLQHQTVHIGEKPFVCNVSEKGLELSPPHASEASQMS

SEQ ID NO: 764430 - protein, 390 aa, Homo sapiens; identical to SEQ ID NO: 764429

SEQ ID NO: 764431 - protein, 299 aa, Homo sapiens
LDSGTGAALNSLFSFPAVLQPSRSIMSFSADQIAEFKEAFLLFDRTGDSKITLSQVGDVLRALGTNPTNAEVRKVLGNPSNEELNAKKIEFEQFLPMMQAISNNKDQATYEDFVEGLRVFDKEGNGTVMGAELRHVLATLGEHTMTHEERSGSPDGRSRRLQWLHQLRSFCQAHHVYLNGALKNKHCLGKTGWKTYFNHTHDKLSRSVYHHSRKTKAIWDGSRLSNLPEFYTSSVFSELIHTTQTSVCALDEKINLAFSIQPFFFPVPLLHIYTWRQKKKSGAPNKGAEISQKVNPGYQ

SEQ ID NO: 764432 - protein, 237 aa, Homo sapiens
LDSGTGAALNSLFSFPAVLQPSRSIMSFSADQIAEFKEAFLLFDRTGDSKITLSQVGDVLRALGTNPTNAEVRKVLGNPSNEELNAKKIEFEQFLPMMQAISNNKDQATYEDFVEGLRVFDKEGNGTVMGAELRHVLATLGEHTMTHEERSGSPDGRSRRLQWLHQLRSFCQAHHVYLNGALKNKHCLGKTGWKTYFNHTHDKLSRSVYHHSRKTKAIWDGSRLSNSLNFYTSSVFL

SEQ ID NO: 764433 - protein, 237 aa, Homo sapiens; identical to SEQ ID NO: 764432

SEQ ID NO: 764434 - protein, 236 aa, Homo sapiens
LDSGTGAALNSLFSFPAVLQPSRSIMSFSADQIAEFKEAFLLFDRTGDSKITLSQVGDVLRALGTNPTNAEVRKVLGNPSNEELNAKKIEFEQFLPMMQAISNNKDQATYEDFVEGLRVFDKEGNGTVMGAELRHVLATLGEHTMTHEERSGSPDGRSRRLQWLHQLRSFCQAHHVYLNGALKNKHCLGKTGWKTYFNHTHDKLSRSVYHHSRKTKAIWDGSRLSNSLNFIHLQFL

SEQ ID NO: 764435 - protein, 256 aa, Homo sapiens
MAPKKDVKKPVAAAAAAPAPAPAPAPAPAPAKPKEEKIDLSAIKIEFSKEQQDEFKEAFLLFDRTGDSKITLSQVGDVLRALGTNPTNAEVRKVLGNPSNEELNAKKIEFEQFLPMMQAISNNKDQATYEDFVEGLRVFDKEGNGTVMGAELRHVLATLGEHTMTHEERSGSPDGRSRRLQWLHQLRSFCQAHHVYLNGALKNKHCLGKTGWKTYFNHTHDKLSRSVYHHSRKTKAIWDGSRLSNSLNFYTSSVFL

SEQ ID NO: 764436 - protein, 247 aa, Homo sapiens
DSTQGPEQPSTHSSASLLCCSPAAPSCPSVLTRLLIEFSKEQQDEFKEAFLLFDRTGDSKITLSQVGDVLRALGTNPTNAEVRKVLGNPSNEELNAKKIEFEQFLPMMQAISNNKDQATYEDFVEGLRVFDKEGNGTVMGAELRHVLATLGEHTMTHEERSGSPDGRSRRLQWLHQLRSFCQAHHVYLNGALKNKHCLGKTGWKTYFNHTHDKLSRSVYHHSRKTKAIWDGSRLSNTLNFYTSSVFL

SEQ ID NO: 764437 - protein, 181 aa, Homo sapiens
MQAISNNKDQATYEDFVEGLRVFDKEGNGTVMGAELRHVLATLGEHTMTHEERSGSPDGRSRRLQWLHQLRSFCQAHHVYLNGALKNKHCLGKTGWKTYFNHTHDKLSRSVYHHSRKTKAIWDGSRLSNLPEFYTSSVFSELIHTTQTSVCALDEKINLAFSIQPFLYYMIKNLNIIITLV

SEQ ID NO: 764438 - protein, 253 aa, Homo sapiens
LDSGTGAALNSLFSFPAVLQPSRSIMSFSADQIAEFKEAFLLFDRTGDSKITLSQVGDVLRALGTNPTNAEVRKVLGNPSNEELNAKKIEFEQFLPMMQAISNNKDQATYEDFVEGLRVFDKEGNGTVMGAELRHVLATLGEKMKEEADPDGFEFLETLKAVAQIALKTQILASSGLTLMTSPCVVPYWEKTCDIDLSGPQIGVVMWLVRMRLVATGRWEDCFCWELRLAEVSGGGHRGGRVCAVWAFRRVGA

SEQ ID NO: 764439 - protein, 123 aa, Homo sapiens
LDSGTGAALNSLFSFPAVLQPSRSIMSFSADQIAEFKEAFLLFDRTGDSKITLSQVGDVLRALGTNPTNAEVRKVLGNPSNEEVKKTPMAASTTKLLSSTSCLSEWSSQEQALFRKDWLENLF

SEQ ID NO: 764440 - protein, 90 aa, Homo sapiens
  misc_feature (4)..(4): Xaa can be any naturally occurring amino acid
  misc_feature (14)..(14): Xaa can be any naturally occurring amino acid
  misc_feature (17)..(17): Xaa can be any naturally occurring amino acid
RRVXPTRENGRRSXLQXAKGPISLSSTSCLSEWSSQNKHCLGKTGWKTYFNHTHDKLSRSVYHHSRKTKAIWDGSRLSNSLNFYTSSVFL

SEQ ID NO: 764441 - protein, 140 aa, Homo sapiens
MQAISNNKDQATYEDFVEGLRVFDKEGNGTVMGAELRHVLATLGEHTMTHEERSGSPDGRSRRLQWLHQLRSFCQAHHVYLNGALKNKHCLGKTGWKTYFNHTHDKLSRSVYHHSRKTKAIWDGSRLSNSLNFYTSSVFL

SEQ ID NO: 764442 - protein, 150 aa, Homo sapiens
CLDGSLAGAMMQAISNNKDQATYEDFVEGLRVFDKEGNGTVMGAELRHVLATLGEHTMTHEERSGSPDGRSRRLQWLHQLRSFCQAHHVYLNGALKNKHCLGKTGWKTYFNHTHDKLSRSVYHHSRKTKAIWDGSRLSNSLNFYTSSVFL

SEQ ID NO: 764443 - protein, 256 aa, Homo sapiens; identical to SEQ ID NO: 764435

SEQ ID NO: 764444 - protein, 237 aa, Homo sapiens; identical to SEQ ID NO: 764432

SEQ ID NO: 764445 - protein, 237 aa, Homo sapiens
LDSGTGAALNSLFSFPAVLQPSRSIMSFSADQIAEFKEAFLLFDRTGDSKITLSQVGDVLRALGTNPTNAEVRKVLGNPSNEELNAKKIEFEQFLPMMQAISNNKDQATYEDFVEGLRVFDKEGNGTVMGAELRHVLATLGEHTMTHEERSGSPDGRSRRLQWLHQLRSFCQAHHVYLNGALKNKHCLGKTGWKTYFNHTHDKLSRSVYHHSRKTKAIWDGSRLSNTLNFYTSSVFL

SEQ ID NO: 764446 - protein, 161 aa, Homo sapiens
LDSGTGAALNSLFSFPAVLQPSRSIMSFSADQIAEFKEAFLLFDRTGDSKITLSQVGDVLRALGTNPTNAEVRKVLGNPSNEELNAKKIEFEQFLPMMQAISNNKDQATYEDFVEGLRVFDKEGNDKLSRSVYHHSRKTKAIWDGSRLSNSLNFYTSSVFL

SEQ ID NO: 764447 - protein, 117 aa, Homo sapiens
LDSGTGAALNSLFSFPAVLQPSRSIMSFSADQIAEFKEAFLLFDRTGDSKITLSQVGDVLRALGTNPTNAEVRKVLGNPSNEELNAKKIEFEQLNLHLTKVPCKKCPFKQSFSGYII

SEQ ID NO: 764448 - protein, 256 aa, Homo sapiens; identical to SEQ ID NO: 764435

SEQ ID NO: 764449 - protein, 237 aa, Homo sapiens; identical to SEQ ID NO: 764432

SEQ ID NO: 764450 - protein, 133 aa, Homo sapiens
DSTQGPEQPSTHSSASLLCCSPAAPSCPSVLTRLLIEFSKEQQDEFKEAFLLFDRTGDSKITLSQVGDVLRALGTNPTNAEVRKVLGNPSNEELNAKKIEFEQFLPMKTLLRVCVSLTRKAMAQSWVLNSAMF

SEQ ID NO: 764451 - protein, 237 aa, Homo sapiens; identical to SEQ ID NO: 764445

SEQ ID NO: 764452 - protein, 177 aa, Homo sapiens
LDSGTGAALNSLFSFPAVLQPSRSIMSFSADQIAEFKEAFLLFDRTGDSKITLSQVGDVLRALGTNPTNAEVRKVLGNPSNEELNAKKIEFEQFLPMMQAISNNKDQATYEDFVEGLRVFDKEGNGTVMGAELRHVLATLGEHTMTHEERSGSPDGRSRRLQWLHQLRSFVKHIMSI

SEQ ID NO: 764453 - protein, 157 aa, Homo sapiens
DSTQGPEQPSTHSSASLLCCSPAAPSCFCQAHHVYLNGALKNKHCLGKTGWKTYFNHTHDKLSRSVYHHSRKTKAIWDGSRLSNLPEFYTSSVFSELIHTTQTSVCALDEKINLAFSIQPFFFPVPLLHIYTWRQKKKSGAPNKGAEISQKVNPGYQ

SEQ ID NO: 764454 - protein, 559 aa, Homo sapiens
AALLNLLQTPVPRPHRFSSREPYKDIGKMSLPSGHTTGHTDQVVQRRARCWDIYQRRFSSRSEPVNPGMHSSSHQQQDGDAAMHGAHMDSPVRYTPYTISPYNRKGSFRKQDQTHVNMEREQKPPERRMEGNMPDGTLGSWFKITVPFGIKYNEKWLLNLIQNECSVPFVPVEFHYENMHASFFVENASIAYALKNVSGKIWDEDNEKISIFVNPAGIPHFVHRELKSEKVEQIKLAMNQQCDVSQEALDIQRLPFYPDMVNRDTKMASNPRKCMAASLDVHEENIPTVMSAGEMDKWKGIEPGEKCADRSPVCTTFSDTSSNINSILELFPKLLCLDGQQSPRATLCGTEAHKRLPTCKGSFFGSEMLKNLVLQFLQQYYLIYDSGDRQGLLSAYHDEACFSLSIPFNPEDSAPSSFCKFFKDSRNIKILKDPYLRGELLKHTKLDIVDSLSALPKTQHDLSSFLVDMWYQTEWMLCFSVNGVFKEVEGQSQGSVLAFTRTFIATPGSSSSLCIVNDKLFVRDTSHQGTQSALFTLVPTAFSSSVPAFSQEQQKMLPS

SEQ ID NO: 764455 - protein, 559 aa, Homo sapiens; identical to SEQ ID NO: 764454

SEQ ID NO: 764456 - protein, 566 aa, Homo sapiens
AALLNLLQTPVPRPHRFSSREPYKDIGKMSLPSGHTTGHTDQVVQRRARCWDIYQRRFSSRSEPVNPGMHSSSHQQQDGDAAMHGAHMDSPVRYTPYTISPYNRKGSFRKQDQTHVNMEREQKPPERRMEGNMPDGTLGSWFKITVPFGIKYNEKWLLNLIQNECSVPFVPVEFHYENMHASFFVENASIAYALKNVSGKIWDEDNEKISIFVNPAGIPHFVHRELKSEKVEQIKLAMNQQCDVSQEALDIQRLPFYPDMVNRDTKMASNPRKCMAASLDVHEENIPTVMSAGEMDKWKGIEPGEKCADRSPVCTTFSDTSSNINSILELFPKLLCLDGQQSPRATLCGTEAHKRLPTCKGSFFGSEMLKNLVLQFLQQYYLIYDSGDRQGLLSAYHDEACFSLSIPFNPEDSAPSSFCKFFKDSRNIKILKDPYLRGELLKHTKLDIVDSLSALPKTQHDLSSFLVDMWYQTEWMLCFSVNGVFKEVEGQSQGSVLAFTRTFIATPGSSSSLCIVNDKLFVRDTSHQGTQSALFTLVPTAFSSSVPAFSQEQQKMVQVFSAQSGG

SEQ ID NO: 764457 - protein, 698 aa, Homo sapiens
AALLNLLQTPVPRPHRFSSREPYKDIGKMSLPSGHTTGHTDQVVQRRARCWDIYQRRFSSRSEPVNPGMHSSSHQQQDGDAAMHGAHMDSPVRYTPYTISPYNRKGSFRKQDQTHVNMEREQKPPERRMEGNMPDGTLGSWFKITVPFGIKYNEKWLLNLIQNECSVPFVPVEFHYENMHASFFVENASIAYALKNVSGKIWDEDNEKISIFVNPAGIPHFVHRELKSEKVEQIKLAMNQQCDVSQEALDIQRLPFYPDMVNRDTKMASNPRKCMAASLDVHEENIPTVMSAGEMDKWKGIEPGEKCADRSPVCTTFSDTSSNIKSVVPSVTTWDPDLCLIAPFLQEEAALVFWEDHRPSPSPSPHSSLCVTHSSVLRHLLSFLLTWSPFHPLWDVFPTCLHPASSSVPSDVGVIAAHEEDSSTVSLTVVHFVLIFGSSILELFPKLLCLDGQQSPRATLCGTEAHKRLPTCKVRREDPAGWCMRKGGTICGPGDSLFQGSFFGSEMLKNLVLQFLQQYYLIYDSGDRQGLLSAYHDEACFSLSIPFNPEDSAPSSFCKFFKDSRNIKILKDPYLRGELLKHTKLDIVDSLSALPKTQHDLSSFLVDMWYQTEWMLCFSVNGVFKEVEGQSQGSVLAFTRTFIATPGSSSSLCIVNDKLFVRDTSHQGTQSALFTLVPTAFSSSVPAFSQEQQKMLPS

SEQ ID NO: 764458 - protein, 672 aa, Homo sapiens
AALLNLLQTPVPRPHRFSSREPYKDIGKMSLPSGHTTGHTDQVVQRRARCWDIYQRRFSSRSEPVNPGMHSSSHQQQDGDAAMHGAHMDSPVRYTPYTISPYNRKGSFRKQDQTHVNMEREQKPPERRMEGNMPDGTLGSWFKITVPFGIKYNEKWLLNLIQNECSVPFVPVEFHYENMHASFFVENASIAYALKNVSGKIWDEDNEKISIFVNPAGIPHFVHRELKSEKVEQIKLAMNQQCDVSQEALDIQRLPFYPDMVNRDTKMASNPRKCMAASLDVHEENIPTVMSAGEMDKWKGIEPGEKCADRSPVCTTFSDTSSNIKSVVPSVTTWDPDLCLIAPFLQEEAALVFWEDHRPSPSPSPHSSLCVTHSSVLRHLLSFLLTWSPFHPLWDVFPTCLHPASSSVPSDVGVIAAHEEDSSTVSLTVVHFVLIFGSSILELFPKLLCLDGQQSPRATLCGTEAHKRLPTCKGSFFGSEMLKNLVLQFLQQYYLIYDSGDRQGLLSAYHDEACFSLSIPFNPEDSAPSSFCKFFKDSRNIKILKDPYLRGELLKHTKLDIVDSLSALPKTQHDLSSFLVDMWYQTEWMLCFSVNGVFKEVEGQSQGSVLAFTRTFIATPGSSSSLCIVNDKLFVRDTSHQGTQSALFTLVPTAFSSSVPAFSQEQQKMLPS

SEQ ID NO: 764459 - protein, 192 aa, Homo sapiens [sequence omitted]

SEQ ID NO: 764460 - protein, 350 aa, Homo sapiens
AALLNLLQTPVPRPHRFSSREPYKDIGKMSLPSGHTTGHTDQVVQRRARCWDIYQRRFSSRSEPVNPGMHSSSHQQQDGDAAMHGAHMDSPVRYTPYTISPYNRKGSFRKQDQTHVNMEREQKPPERRMEGNMPDGTLGSWFKITVPFGIKYNEKWLLNLIQNECSVPFVPVEFHYENMHASFFVENASIAYALKNVSGKIWDEDNEKISIFVNPAGIPHFVHRELKSEKVEQIKLAMNQQCDVSQEALDIQRLPFYPDMVNRDTKMASNPRKCMAASLDVHEENIPTVMSAGEMDKWKGIEPGEKCADRSPVCTTFSDTSSNIKSVVPSVTTWDPDLCLIAPFCRRRQH

SEQ ID NO: 764461 - protein, 176 aa, Homo sapiens
VQGHVTPLQKDTSSWRCLHWQTTHSCSSFSSRSSFCKFFKDSRNIKILKDPYLRGELLKHTKLDIVDSLSALPKTQHDLSSFLVDMWYQTEWMLCFSVNGVFKEVEGQSQGSVLAFTRTFIATPGSSSSLCIVNDKLFVRDTSHQGTQSALFTLVPTAFSSSVPAFSQEQQKMLPS

SEQ ID NO: 764462 - protein, 161 aa, Homo sapiens
LKVFSSLSFLVQHQSIHTEEKPFECQKCRKSFNQLESLNMHLRNHIRLKPYECSICGKAFSHRSSLLQHHRIHTGEKPYECIKCGKTFSCSSNLTVHQRIHTGEKPYKCNECGKAFSKGSNLTAHQRVHNGEKPNSVVSVEKPLDYMNHYTCEKSYRRETV

SEQ ID NO: 764463 - protein, 370 aa, Homo sapiens
GNVCSLEISNIQKGEGGEYMCHAVNIIGEAKSFANVDIMPQEERVVALPPPVTHQHVMEFDLEHTTSSRTPSPQEIVLEVELSEKDVKEFEKQVKIVTVPEFTPDHKSMIVSLDVLPFNFVDPNMDSREGEDKELKIDLEVFEMPPRFIMPICDFKIPENSDAVFKCSVIGIPTPEVKWYKEYMCIEPDNIKYVISEEKGSHTLKIRNVCLSDSATYRCRAVNCVGEAICRGFLTMGDSEIFAVIAKKSKVTLSSLMEELVLKSNYTDSFFEFQVVEGPPRFIKGISDCYAPIGTAAYFQCLVRGSPRPTVYWYKDGKLVQGRRFTVEESGTGFHNLFITSLVKSDEGEYRCVATNKSGMAESFAALTLT

SEQ ID NO: 764464 - protein, 244 aa, Homo sapiens
GNVCSLEISNIQKGEGGEYMCHAVNIIGEAKSFANVDIMPQEERVVALPPPVTHQHVMEFDLEHTTSSRTPSPQEIVLEVELSEKDVKEFEKQVKIVTVPEFTPDHKSMIVSLDVLPFNFVDPNMDSREGEDKELKIDLEVFEMPPRFIMPICDFKIPENSDAVFKCSVIGIPTPEVKWYKEYMCIEPDNIKYVISEEKGSHTLKIRNVCLSDSATYRCRAVNCVGEAICRGFLTMGDSEIFNR

SEQ ID NO: 764465 - protein, 77 aa, Homo sapiens
GSSGQALGQRRHSRSSSAFRKVFLAGALRVRASVLEALSKPPLHQRHPSGVRKEGAFPLSPSLWTVTKQAIRSPNTY

SEQ ID NO: 764466 - protein, 165 aa, Homo sapiens
MGKRRCVPPLEPKLAAGCCGVKKPKLSGSGTHSHGNQSTTVPGSSSGPLQNHQHVDSSSGRENVSDLTLGPGNSPITRMNPASGALSPLPRPNGTANTTKNLVVTAEMCCYCFDVLYCHLYGFPQPRLPRFTNDPYPDLCDVEGQGGDKTRYEDWEMGRTNHKER

SEQ ID NO: 764467 - protein, 165 aa, Homo sapiens; identical to SEQ ID NO: 764466

SEQ ID NO: 764468 - protein, 165 aa, Homo sapiens; identical to SEQ ID NO: 764466

SEQ ID NO: 764469 - protein, 264 aa, Homo sapiens
YILEPGEYPTSEAWGTSDPSVGSLKPMRLGCPSVEKPGEPRAVVYEAPGFQGRSWEVSRDIYNLQQPEDSQSPHLASVGSLRVLGGCWVGYEKEGFRGHQYLLEEGEYPDWSHWGGYDELLTSLRVIRTDFGDPAVVLFEAMDFEGHGVEVSKALPDVELVQHGPSTQAIHVLSGVWVAYQEVGFSGEQYVLEKGVYRNCEDWGAGNSTLASLQPVLQVRAGRGGRGLPGGGTWSSGAPRPHAEVAGWRTCLGAWGGALEGGGA

SEQ ID NO: 764470 - protein, 1059 aa, Homo sapiens
MVAMRPPRSVVHSEELELYISYKGKLWKGLAGEKYDLINNFKADFGYLVEIECWWKVNLRIEAGRGNCPGKMLEIWSRAVVLNLSCGCLRSFLIVFSFFFFFFCKRLGSQYVAKFVLNSESLKDSSASTSQIARTAGTIPPCLTKNLNAYSFTPGHLNRTFLRLAQEEDLLKFHRQFQCAVKTEDCWCRGMAGELCGVINLKYILQVQQTGVANTLNFSGKWGEKGLSFLAFINELIVSFTKTGKLNIEKENQEFCFEYVEFEMPISHSSGEGLHSSGESSYDVSLELREEIPVRDENVSGWHKVGLKVKNRLSSCWESINKEKEPLAEAGGTPGEDYDKGEKNLKKRLQTASEVGYCGVPEAKGEVVSLEEKLQLAGLKMTAVKYSEVQRGIEFSKINAVDDLDNLKWWRKKSEWSKLRKRMTEKTFKRKSKWEMRKIYIANFFEIVGVLFVVNVAGKKMELIGRRQGRTKNMWVIFVCFGFVFEAIDENISVERLGTVEVLEKVKGDEDSYHKWGGFEESRNSSILETMYVGADRFGEKMKRRKKEPESWSEQMDKNDVRINSEAILLTIYDSALIWFISDFDSFSSLFLIDFRCSLFWRGYPKYHRYFFSFSEYLKDCVRRTIFRWNSAYWFIQHCLINRYWTLGIQRGGRHSLCLKGSPSLMEKLCPNETLTCFAFLFRLKDSKISANKAFLRKLMRNLVINEQKLSMRWGGVKHVLSGELRITNSCMPRSWPVFLFKHNKTSHQIRYELEPTFYESFASTSPPLLVYWWKEDYQKYPEDHLNFYLVTFLLNDFEDLKQYFNLSIMYTAKKPCLITYLISTLGQVDLLHYWDFALDQVSLDIVVPISLSCVSAGNMLLALWRVEQNQLSDIITLVAKCSLEIQEKFGIYHTREGQDLQLKKVVPPKRVIQLGKGEPTIKTSKDEMINWEKMFAIHIDKGRIALLGKEHLEIKKTIVLLREKLDKGHEEIVYRQGNACLLTRKKMINIHNKKNANWKYTDYLSYLIDRQNFRCWTMYSLVSLRNELFLTVSEQRYKVIWQSLFIFIVYCIFYVNKN

SEQ ID NO: 764471 - protein, 206 aa, Homo sapiens
MRLLVLLWGCLLLPGYEALEGPEEISGFEGDTVSLQCTYREELRDHRKYWCRKGGILFSRCSGTIYAEEEGQETMKGRVSIRDSRQELSLIVTLWNLTLQDAGEYWCGVEKRGPDESLLISLFVFPASPGLYPAATTAKQGKTGAEAPPLPGTSQYGHERTSQYTGTSPHPATSPPAGSSRPPMQLDSTSAEDTSPALSSGSSKPR

SEQ ID NO: 764472 - protein, 240 aa, Homo sapiens
MRLLVLLWGCLLLPGYEALEGPEEISGFEGDTVSLQCTYREELRDHRKYWCRKGGILFSRCSGTIYAEEEGQETMKGRVSIRDSRQELSLIVTLWNLTLQDAGEYWCGVEKRGPDESLLISLFVFPGPCCPPSPSPTFQPLATTRLQPKAKAQQTQPPGLTSPGLYPAATTAKQGKTGAEAPPLPGTSQYGHERTSQYTGTSPHPATSPPAGSSRPPMQLDSTSAEDTSPALSSGSSKPR

SEQ ID NO: 764473 - protein, 77 aa, Homo sapiens
PGMVLFSAARRALGISFPKHKNTGTQEEQLEDNSVGTETGTAQSADLTGSAGPPWCFTTCILLLRMPLQLSFLGFYD

SEQ ID NO: 764474 - protein, 131 aa, Homo sapiens
MARSLVCLGVIILLSAFSGPGVRGGPMPKLADRKLCADQECSHPISMAVALQDYMAPDCRFLTIHRGQVVYVFSKLKGRGRLFWGGSVQGDYYGDLAARLGYFPSSIVREDQTLKPGKVDVKTDKWDFYCQ

SEQ ID NO: 764475 - protein, 131 aa, Homo sapiens; identical to SEQ ID NO: 764474

SEQ ID NO: 764476 - protein, 131 aa, Homo sapiens; identical to SEQ ID NO: 764474

SEQ ID NO: 764477 - protein, 113 aa, Homo sapiens
LGSVIVEEGAVTGKVSTMARSLVCLGVIILLSAFSGPGVRGGPMPKLADRKLCADQECSHPISMAVALQDYMAPDCRFLTIHRGQVVFREITMEIWLLAWAISPVALSERTRP

SEQ ID NO: 764478 - protein, 77 aa, Homo sapiens
LGSVIVEEGAVTGKVSTMARSLVCLGVIILLSAFSGPGVRGGPMPKLADRKLCADQECSRSGRLLWRSGCSPGLFPQ

SEQ ID NO: 764479 - protein, 228 aa, Homo sapiens
VLCGCSKAKSVGRLCVPGPVLFWVILVLVVVVGSSAFLLCHRRACRKRIRQKLHLCYPVQTSQPKLELVDSRPRRSSTQLRSGASVTEPVAEERGLMSQPLMETCHSVGAAYLESLPLQDASPAGGPSSPRDLPEPRVSTEHTNNKIEKIYIMKADTVIVGTVKAELPEGRGLAGPAEPELEEELEADHTPHYPEQETEPPLGSCSDVMLSVEEEGKEDPLPTAASGK

SEQ ID NO: 764480 - protein, 595 aa, Homo sapiens
MRVLLAALGLLFLGALRAFPQDRPFEDTCHGNPSHYYDKAVRRCCYRCPMGLFPTQQCPQRPTDCRKQCEPDYYLDEADRCTACVTCSRDDLVEKTPCAWNSSRVCECRPGMFCSTSAVNSCARCFFHSVCPAGMIVKFPGTAQKNTVCEPASPGVSPACASPENCKEPSSGTIPQAKPTPVSPATSSASTMPVRGGTRLAQEAASKLTRAPDSPSSVGRPSSDPGLSPTQPCPEGSGDCRKQCEPDYYLDEAGRCTACVSCSRDDLVEKTPCAWNSSRTCECRPGMICATSATNSCARCVPYPICAAETVTKPQDMAEKDTTFEAPPLGTQPDCNPTPENGEAPASTSPTQSLLVDSQASKTLPIPTSAPVALSSTGKPVLDAGPVLFWVILVLVVVVGSSAFLLCHRRACRKRIRQKLHLCYPVQTSQPKLELVDSRPRRSSTQLRSGASVTEPVAEERGLMSQPLMETCHSVGAAYLESLPLQDASPAGGPSSPRDLPEPRVSTEHTNNKIEKIYIMKADTVIVGTVKAELPEGRGLAGPAEPELEEELEADHTPHYPEQETEPPLGSCSDVMLSVEEEGKEDPLPTAASGK

SEQ ID NO: 764481 - protein, 450 aa, Homo sapiens
MRVLLAALGLLFLGALRAFPQDRPFEDTCHGNPSHYYDKAVRRCCYRCPMGLFPTQQCPQRPTDCRKQCEPDYYLDEADRCTACVTCSRDDLVEKTPCAWNSSRVCECRPGMFCSTSAVNSCARCFFHSVCPAGMIVKFPGTAQKNTVCEPASPGVSPACASPENCKEPSSGTIPQAKPTPVSPATSSASTMPVRGGTRLAQEAASKLTRAPDSPSSVGRPSSDPGLSPTQPCPEGSGDCRKQCEPDYYLDEAGRCTACVSCSRDDLVEKTPCAWNSSRTCECRPGMICATSATNSCARCVPYPICAAETVTKPQDMAEKDTTFEAPPLGTQPDCNPTPENGEAPASTSPTQSLLVDSQASKTLPIPTSAPVALSSTGKPVLDAGPVLFWVILVLVVVVGSSAFLLCHRRACRKRIRQKLHLCYPVQTSQPKLELVDSRPRRSSTRKSTS

SEQ ID NO: 764482 - protein, 712 aa, Homo sapiens
MENLGVGEGAEACSRLSRSRGRHSMTRAPKHLWRQPRRPIRIQQRFYSDPDKSAGCRERDLSPRPELRKSRLSWPVSSCRRFDLENGLSCGRRALDPQSSPGLGRIMQAPVPHSQRRESFLYRSDSDYELSPKAMSRNSSVASDLHGEDMIVTPFAQVLASLRTVRSNVAALARQQCLGAAKQGPVGNPSSSNQLPPAEDTGQKLALETLDELDWCLDQLETLQTRHSVGEMASNKFKRILNRELTHLSETSRSGNQVSEYISRTFLDQQTEVELPKVTAEEAPQPMSRISGLHGLCHSASLSSATVPRFGVQTDQEEQLAKELEDTNKWGLDVFKVAELSGNRPLTAIIFSIFQERDLLKTFQIPADTLATYLLMLEGHYHANVAYHNSLHAADVAQSTHVLLATPALEAVFTDLEILAALFASAIHDVDHPGVSNQFLINTNSELALMYNDASVLENHHLAVGFKLLQAENCDIFQNLSAKQRLSLRRMVIDMVLATDMSKHMNLLADLKTMVETKKVTSLGVLLLDNYSDRIQVLQNLVHCADLSNPTKPLPLYRQWTDRIMAEFFQQGDRERESGLDISPMCDKHTASVEKSQVGFIDYIAHPLWETWADLVHPDAQDLLDTLEDNREWYQSKIPRSPSDLTNPERDGPDRFQFELTLEEAEEEDEEEEEEGEETALAKEALELPDTELLSPEAGPDPGDLPLDNQRT

SEQ ID NO: 764483 - protein, 717 aa, Homo sapiens
RRDQTQLRPGHTWTECCQIPHLYPDLSLRGVPTQLVDGDTVTFDPKVLAGTSRTLALGRELRVSGGPGCLPVGAASACPSGKPTPSFDLENGLSCGRRALDPQSSPGLGRIMQAPVPHSQRRESFLYRSDSDYELSPKAMSRNSSVASDLHGEDMIVTPFAQVLASLRTVRSNVAALARQQCLGAAKQGPVGNPSSSNQLPPAEDTGQKLALETLDELDWCLDQLETLQTRHSVGEMASNKFKRILNRELTHLSETSRSGNQVSEYISRTFLDQQTEVELPKVTAEEAPQPMSRISGLHGLCHSASLSSATVPRFGVQTDQEEQLAKELEDTNKWGLDVFKVAELSGNRPLTAIIFSIFQERDLLKTFQIPADTLATYLLMLEGHYHANVAYHNSLHAADVAQSTHVLLATPALEAVFTDLEILAALFASAIHDVDHPGVSNQFLINTNSELALMYNDASVLENHHLAVGFKLLQAENCDIFQNLSAKQRLSLRRMVIDMVLATDMSKHMNLLADLKTMVETKKVTSLGVLLLDNYSDRIQVLQNLVHCADLSNPTKPLPLYRQWTDRIMAEFFQQGDRERESGLDISPMCDKHTASVEKSQVGFIDYIAHPLWETWADLVHPDAQDLLDTLEDNREWYQSKIPRSPSDLTNPERDGPDRFQFELTLEEAEEEDEEEEEEGEETALAKEALELPDTELLSPEAGPDPGDLPLDNQRT

SEQ ID NO: 764484 - protein, 518 aa, Homo sapiens
PLRIRPLLPTAYHLLPTGPGQSADRSEQRGGPCPPAMPRSSQFKRILNRELTHLSETSRSGNQVSEYISRTFLDQQTEVELPKVTAEEAPQPMSRISGLHGLCHSASLSSATVPRFGVQTDQEEQLAKELEDTNKWGLDVFKVAELSGNRPLTAIIFSIFQERDLLKTFQIPADTLATYLLMLEGHYHANVAYHNSLHAADVAQSTHVLLATPALEAVFTDLEILAALFASAIHDVDHPGVSNQFLINTNSELALMYNDASVLENHHLAVGFKLLQAENCDIFQNLSAKQRLSLRRMVIDMVLATDMSKHMNLLADLKTMVETKKVTSLGVLLLDNYSDRIQVLQNLVHCADLSNPTKPLPLYRQWTDRIMAEFFQQGDRERESGLDISPMCDKHTASVEKSQVGFIDYIAHPLWETWADLVHPDAQDLLDTLEDNREWYQSKIPRSPSDLTNPERDGPDRFQFELTLEEAEEEDEEEEEEGEETALAKEALELPDTELLSPEAGPDPGDLPLDNQRT

SEQ ID NO: 764485 - protein, 712 aa, Homo sapiens
MQRYRGRQTVFGAGVLGGVSSAPSFNTPSPRSSPLFYPSAPSGHRQLLGVGPTLSPSSTFYRFSTSGADSSSLSPPLPALGRTREQTLLGARSRGRVLLPAIPDPFLWRMENLGVGEGAEACSRLSRSRGRHSMTRAPKHLWRQPRRPIRIQQRFYSDPDKSAGCRERDLSPRPELRKSRLSWPVSSCRRFDLENGLSCGRRALDPQSSPGLGRIMQAPVPHSQRRESFLYRSDSDYELSPKAMSRNSSVASDLHGEDMIVTPFAQVLASLRTVRSNVAALARQQCLGAAKFKRILNRELTHLSETSRSGNQVSEYISRTFLDQQTEVELPKVTAEEAPQPMSRISGLHGLCHSASLSSATVPRFGVQTDQEEQLAKELEDTNKWGLDVFKVAELSGNRPLTAIIFSIFQAVFTDLEILAALFASAIHDVDHPGVSNQFLINTNSELALMYNDASVLENHHLAVGFKLLQAENCDIFQNLSAKQRLSLRRMVIDMVLATDMSKHMNLLADLKTMVETKKVTSLGVLLLDNYSDRIQVLQNLVHCADLSNPTKPLPLYRQWTDRIMAEFFQQGDRERESGLDISPMCDKHTASVEKSQVGFIDYIAHPLWETWADLVHPDAQDLLDTLEDNREWYQSKIPRSPSDLTNPERDGPDRFQFELTLEEAEEEDEEEEEEGEETALAKEALELPDTELLSPEAGPDPGDLPLDNQRT

SEQ ID NO: 764486 - protein, 463 aa, Homo sapiens
PLRIRPLLPTAYHLLPTGPGQSADRSEQRGGPCPPAMPRSSQFKRILNRELTHLSETSRSGNQVSEYISRTFLDQQTEVELPKVTAEEAPQPMSRISGLHGLCHSASLSSATVPRFGVQTDQEEQLAKELEDTNKWGLDVFKVAELSGNRPLTAIIFSIFQAVFTDLEILAALFASAIHDVDHPGVSNQFLINTNSELALMYNDASVLENHHLAVGFKLLQAENCDIFQNLSAKQRLSLRRMVIDMVLATDMSKHMNLLADLKTMVETKKVTSLGVLLLDNYSDRIQVLQNLVHCADLSNPTKPLPLYRQWTDRIMAEFFQQGDRERESGLDISPMCDKHTASVEKSQVGFIDYIAHPLWETWADLVHPDAQDLLDTLEDNREWYQSKIPRSPSDLTNPERDGPDRFQFELTLEEAEEEDEEEEEEGEETALAKEALELPDTELLSPEAGPDPGDLPLDNQRT

SEQ ID NO: 764487 - protein, 791 aa, Homo sapiens
GTQAGLRSGAPSGHRQLLGVGPTLSPSSTFYRFSTSGADSSSLSPPLPALGRTREQTLLGARSRGRVLLPAIPDPFLWRMENLGVGEGAEACSRLSRSRGRHSMTRAPKHLWRQPRRPIRIQQRFYSDPDKSAGCRERDLSPRPELRKSRLSWPVSSCRRFDLENGLSCGRRALDPQSSPGLGRIMQAPVPHSQRRESFLYRSDSDYELSPKAMSRNSSVASDLHGEDMIVTPFAQVLASLRTVRSNVAALARQQCLGAAKQGPVGNPSSSNQLPPAEDTGQKLALETLDELDWCLDQLETLQTRHSVGEMASNKFKRILNRELTHLSETSRSGNQVSEYISRTFLDQQTEVELPKVTAEEAPQPMSRISGLHGLCHSASLSSATVPRFGVQTDQEEQLAKELEDTNKWGLDVFKVAELSGNRPLTAIIFSIFQERDLLKTFQIPADTLATYLLMLEGHYHANVAYHNSLHAADVAQSTHVLLATPALEAVFTDLEILAALFASAIHDVDHPGVSNQFLINTNSELALMYNDASVLENHHLAVGFKLLQAENCDIFQNLSAKQRLSLRRMVIDMVLATDMSKHMNLLADLKTMVETKKVTSLGVLLLDNYSDRIQVLQNLVHCADLSNPTKPLPLYRQWTDRIMAEFFQQGDRERESGLDISPMCDKHTASVEKSQVGFIDYIAHPLWETWADLVHPDAQDLLDTLEDNREWYQSKIPRSPSDLTNPERDGPDRFQFELTLEEAEEEDEEEEEEGEETALAKEALELPDTELLSPEAGPDPGDLPLDNQRT

SEQ ID NO: 764488 - protein, 700 aa, Homo sapiens
AVQKRSRAAGARSSLHAVLAMQGPPAPAPVPGPGSPRGSPRGSPGLFRKLLVNQSIRLQRRFTVAHPLCFDLENGLSCGRRALDPQSSPGLGRIMQAPVPHSQRRESFLYRSDSDYELSPKAMSRNSSVASDLHGEDMIVTPFAQVLASLRTVRSNVAALARQQCLGAAKQGPVGNPSSSNQLPPAEDTGQKLALETLDELDWCLDQLETLQTRHSVGEMASNKFKRILNRELTHLSETSRSGNQVSEYISRTFLDQQTEVELPKVTAEEAPQPMSRISGLHGLCHSASLSSATVPRFGVQTDQEEQLAKELEDTNKWGLDVFKVAELSGNRPLTAIIFSIFQERDLLKTFQIPADTLATYLLMLEGHYHANVAYHNSLHAADVAQSTHVLLATPALEAVFTDLEILAALFASAIHDVDHPGVSNQFLINTNSELALMYNDASVLENHHLAVGFKLLQAENCDIFQNLSAKQRLSLRRMVIDMVLATDMSKHMNLLADLKTMVETKKVTSLGVLLLDNYSDRIQVLQNLVHCADLSNPTKPLPLYRQWTDRIMAEFFQQGDRERESGLDISPMCDKHTASVEKSQVGFIDYIAHPLWETWADLVHPDAQDLLDTLEDNREWYQSKIPRSPSDLTNPERDGPDRFQFELTLEEAEEEDEEEEEEGEETALAKEALELPDTELLSPEAGPDPGDLPLDNQRT

SEQ ID NO: 764489 - protein, 1088 aa, Homo sapiens
MQRYRGRQTVFGAGVLGGVSSAPSFNTPSPRSSPLFYPSAPSGHRQLLGVGPTLSPSSTFYRFSTSGADSSSLSPPLPALGRTREQTLLGARSRGRVLLPAIPDPFLWRMENLGVGEGAEACSRLSRSRGRHSMTRAPKHLWRQPRRPIRIQQRFYSDPDKSAGCRERDLSPRPELRKSRLSWPVSSCRRFDLENGLSCGRRALDPQSSPGLGRIMQAPVPHSQRRESFLYRSDSDYELSPKAMSRNSSVASDLHGEDMIVTPFAQVLASLRTVRSNVAALARQQCLGAAKYVEGGAGRGRGRQRQGGRKAGCKLRLGLRRLQVGLRGGAWWTWGRGEMGGAATPEAAVTAGRDPSETLHPAISSLLQVKYLFLPSPAEDSWELPFHSDLPSPGAPYTGANCSPAPAKTITPSGMDPTTLILQMRRLRPRDLMVTQALGEQIWNLGPGVLGGPRGNSFRVQMKRRSRERRGVPERGGWAGPWLPRLPEDTGQKLALETLDELDWCLDQLETLQTRHSVGEMASNKFKRILNRELTHLSETSRSGNQVSEYISRTFLVAMGFHRIAQTGLELLTSSDLPTSTSQSTGITGVSHCVRPTGSLLRTYFGSCRKGNRLILGFGKIQVLRPGPSSEIGFSELHPGPSADQQTEVELPKVTAEEAPQPMSRISGLHGLCHSASLSSATVPRFGVQTDQEEQLAKELEDTNKWGLDVFKVAELSGNRPLTAIIFSIFQERDLLKTFQIPADTLATYLLMLEGHYHANVAYHNSLHAADVAQSTHVLLATPALEAVFTDLEILAALFASAIHDVDHPGVSNQFLINTNSELALMYNDASVLENHHLAVGFKLLQAENCDIFQNLSAKQRLSLRRMVIDMVLATDMSKHMNLLADLKTMVETKKVTSLGVLLLDNYSDRIQVLQNLVHCADLSNPTKPLPLYRQWTDRIMAEFFQQGDRERESGLDISPMCDKHTASVEKSQVGFIDYIAHPLWETWADLVHPDAQDLLDTLEDNREWYQSKIPRSPSDLTNPERDGPDRFQFELTLEEAEEEDEEEEEEGEETALAKEALELPDTELLSPEAGPDPGDLPLDNQRT

SEQ ID NO: 764490 - protein, 183 aa, Homo sapiens
MKLLSLVAVVGCLLVPPAEANKSSEDIRCKCICPPYRNISGHIYNQNVSQKDCNCLHVVEPMPVPGHDVEAYCLLCECRYEERSTTTIKVIIVIYLSVVGALLLYMAFLMLVDPLIRKPDAYTEQLHNEEENEDARSMAAAAASLGGPRANTVLERVEGAQQRWKLQVQEQRKTVFDRHKMLS

SEQ ID NO: 764491 - protein, 183 aa, Homo sapiens; identical to SEQ ID NO: 764490

SEQ ID NO: 764492 - protein, 183 aa, Homo sapiens; identical to SEQ ID NO: 764490

SEQ ID NO: 764493 - protein, 183 aa, Homo sapiens; identical to SEQ ID NO: 764490

SEQ ID NO: 764494 - protein, 183 aa, Homo sapiens; identical to SEQ ID NO: 764490

SEQ ID NO: 764495 - protein, 218 aa, Homo sapiens
HWGRGRGSRGYWGSQSGLRPLGVVSGFAGPASLISMKLLSLVAVVGCLLVPPAEANKSSEDIRCKCICPPYRNISGHIYNQNVSQKDCNCLHVVEPMPVPGHDVEAYCLLCECRYEERSTTTIKVIIVIYLSVVGALLLYMAFLMLVDPLIRKPDAYTEQLHNEEENEDARSMAAAAASLGGPRANTVLERVEGAQQRWKLQVQEQRKTVFDRHKMLS

SEQ ID NO: 764496 - protein, 183 aa, Homo sapiens; identical to SEQ ID NO: 764490

SEQ ID NO: 764497 - protein, 183 aa, Homo sapiens; identical to SEQ ID NO: 764490

SEQ ID NO: 764498 - protein, 183 aa, Homo sapiens; identical to SEQ ID NO: 764490

SEQ ID NO: 764499 - protein, 231 aa, Homo sapiens
MPCKAGYNSTEFWGEKLPEIPRKTWFLHGKCEPERVDADINSSRSGKVVSIEPLKKSHEPDLADQLRCPWSSEDIRCKCICPPYRNISGHIYNQNVSQKDCNCLHVVEPMPVPGHDVEAYCLLCECRYEERSTTTIKVIIVIYLSVVGALLLYMAFLMLVDPLIRKPDAYTEQLHNEEENEDARSMAAAAASLGGPRANTVLERVEGAQQRWKLQVQEQRKTVFDRHKMLS

SEQ ID NO: 764500 - protein, 183 aa, Homo sapiens; identical to SEQ ID NO: 764490

SEQ ID NO: 764501 - protein, 121 aa, Homo sapiens
HRWPKTSNGFLALAPDNGSLARRSLPQVIIVIYLSVVGALLLYMAFLMLVDPLIRKPDAYTEQLHNEEENEDARSMAAAAASLGGPRANTVLERVEGAQQRWKLQVQEQRKTVFDRHKMLS

SEQ ID NO: 764502 - protein, 151 aa, Homo sapiens
MKLLSLVAVVGCLLVPPAEANKSSEDIRCKCICPPYRNISGHIYNQNVSQKDCNCLHVVEPMPVPGHDVEAYCLLCECRYEERSTTTIKVHHLLIYHVPWWVALDAPNIGLSLELLGRTPSGSRKSPGCITTWKPNLGTKCTGRRTKLHGD

SEQ ID NO: 764503 - protein, 183 aa, Homo sapiens; identical to SEQ ID NO: 764490

SEQ ID NO: 764504 - protein, 183 aa, Homo sapiens; identical to SEQ ID NO: 764490

SEQ ID NO: 764505 - protein, 208 aa, Homo sapiens
MKLLSLVAVVGCLLVPPAEANKVREVSLQHLVTTTVHGHPVYRADSESSEDIRCKCICPPYRNISGHIYNQNVSQKDCNCLHVVEPMPVPGHDVEAYCLLCECRYEERSTTTIKVIIVIYLSVVGALLLYMAFLMLVDPLIRKPDAYTEQLHNEEENEDARSMAAAAASLGGPRANTVLERVEGAQQRWKLQVQEQRKTVFDRHKMLS

SEQ ID NO: 764506 - protein, 190 aa, Homo sapiens
MKLLSLVAVVGCLLVPPAEANKSSEDIRCKCICPPYRNISGHIYNQNVSQKDCPVSLCCSNCLHVVEPMPVPGHDVEAYCLLCECRYEERSTTTIKVIIVIYLSVVGALLLYMAFLMLVDPLIRKPDAYTEQLHNEEENEDARSMAAAAASLGGPRANTVLERVEGAQQRWKLQVQEQRKTVFDRHKMLS

SEQ ID NO: 764507 - protein, 195 aa, Homo sapiens
MHRIMGENVDFYTVLAHFKGQWVTKFDSRKTSLEDFYLDEERTVRVPMMSDPKAVLRYGLDSDLSCKIAQLPLTGSMSIIFFLPLKVTQNLTLIEESLTSEFIHDIDRELKTVQAVLTVPKLKLSYEGEVTKSLQEMKLQSLFDSPDFSKITGKPIKLTQVEHRAGFEWNEDGAGTTPQPRAAACPPHLPAGLSP

SEQ ID NO: 764508 - protein, 291 aa, Homo sapiens
MTSLIGFYTLTRTTHHAYPDPGQTIIATHTGLDMNVRTTWRIMSIKCLGVLYSLEGTFYEKSYGTRPRVLTGNPRLDLQEINNWVQAQMKGKLARSTKEIPDEISILLLGVAHFKGQWVTKFDSRKTSLEDFYLDEERTVRVPMMSDPKAVLRYGLDSDLSCKIAQLPLTGSMSIIFFLPLKVTQNLTLIEESLTSEFIHDIDRELKTVQAVLTVPKLKLSYEGEVTKSLQEMKLQSLFDSPDFSKITGKPIKLTQVEHRAGFEWNEDGAGTTPQPRAAACPPHLPAGLSP

SEQ ID NO: 764509 - protein, 145 aa, Homo sapiens
  misc_feature (9)..(9): Xaa can be any naturally occurring amino acid
LLLLNSRPXDTSDLSCKIAQLPLTGSMSIIFFLPLKVTQNLTLIEESLTSEFIHDIDRELKTVQAVLTVPKLKLSYEGEVTKSLQEMKLQSLFDSPDFSKITGKPIKLTQVEHRAGFEWNEDGAGTTPQPRAAACPPHLPAGLSP

SEQ ID NO: 764510 - protein, 90 aa, Homo sapiens
MKGKLARSTKEIPDEISILLLGVAHFKGQWVTKFDSRKTSLEDFYLDEERTVRVPMMSDPKAVLRYGLDSDLSCKIAQLALDPACFSFFL

SEQ ID NO: 764511 - protein, 390 aa, Homo sapiens
MQALVLLLCIGALLGHSSCQNPASPPEEGSPDPDSTGALVEEEDPFFKVPVNKLAAAVSNFGYDLYRVRSSMSPTTNVLLSPLSVATALSALSLGAEQRTESIIHRALYYDLISSPDIHGTYKELLDTVTAPQKNLKSASRIVFEKKLRIKSSFVAPLEKSYGTRPRVLTGNPRLDLQEINNWVQAQMKGKLARSTKEIPDEISILLLGVAHFKGQWVTKFDSRKTSLEDFYLDEERTVRVPMMSDPKAVLRYGLDSDLSCKIAQLPLTGSMSIIFFLPLKVTQNLTLIEESLTSEFIHDIDRELKTVQAVLTVPKLKLSYEGEVTKSLQEMKLQSLFDSPDFSKITGKPIKLTQVEHRAGFEWNEDGAGTTPQPRAAACPPHLPAGLSP

SEQ ID NO: 764512 - protein, 390 aa, Homo sapiens; identical to SEQ ID NO: 764511

SEQ ID NO: 764513 - protein, 455 aa, Homo sapiens
MQALVLLLCIGALLGHSSCQNPASPPEEGSPDPDSTGALVEEEDPFFKVPVNKLAAAVSNFGYDLYRVRSSMSPTTNVLLSPLSVATALSALSLGLMPLTYFRKISKDENSLATKIVLKISLLGLSADKKDEYSVCVLGGGLIWGPGVQLSTSTSLSLAGAEQRTESIIHRALYYDLISSPDIHGTYKELLDTVTAPQKNLKSASRIVFEKKLRIKSSFVAPLEKSYGTRPRVLTGNPRLDLQEINNWVQAQMKGKLARSTKEIPDEISILLLGVAHFKGQWVTKFDSRKTSLEDFYLDEERTVRVPMMSDPKAVLRYGLDSDLSCKIAQLPLTGSMSIIFFLPLKVTQNLTLIEESLTSEFIHDIDRELKTVQAVLTVPKLKLSYEGEVTKSLQEMKLQSLFDSPDFSKITGKPIKLTQVEHRAGFEWNEDGAGTTPQPRAAACPPHLPAGLSP

SEQ ID NO: 764514 - protein, 463 aa, Homo sapiens
LSSLQPLPPWFKEFSCLSLQSSWDYRHLPSCPANFCIFSRDGVSPCCLGWSQTPGLKRSTRLGLPKCWDYRREPPRLARIILRAMMGEVQGLVPLTPSLPPPGLMPLTYFRKISKDENSLATKIVLKISLLGLSADKKDEYSVCVLGGGLIWGPGVQLSTSTSLSLAGAEQRTESIIHRALYYDLISSPDIHGTYKELLDTVTAPQKNLKSASRIVFEKKLRIKSSFVAPLEKSYGTRPRVLTGNPRLDLQEINNWVQAQMKGKLARSTKEIPDEISILLLGVAHFKGQWVTKFDSRKTSLEDFYLDEERTVRVPMMSDPKAVLRYGLDSDLSCKIAQLPLTGSMSIIFFLPLKVTQNLTLIEESLTSEFIHDIDRELKTVQAVLTVPKLKLSYEGEVTKSLQEMKLQSLFDSPDFSKITGKPIKLTQVEHRAGFEWNEDGAGTTPQPRAAACPPHLPAGLSP

SEQ ID NO: 764515 - protein, 374 aa, Homo sapiens
MQALVLLLCIGALLGHSSCQNPASPPEEGSPDPDSTGALVEEEDPFFKVPVNKLAAAVSNFGYDLYRVRSSMSPTTNVLLSPLSVATALSALSLGAEQRTESIIHRALYYDLISSPDIHGTYKELLDTVTAPQKNLKSASRIVFEKKLRIKSSFVAPLEKSYGTRPRVLTGNPRLDLQEINNWVQAQMKGKLARSTKEIPDEISILLLGVAHFKGQWVTKFDSRKTSLEDFYLDEERTVRVPMMSDPKAVLRYGLDSDLSCKIAQLPLTGSMSIIFFLPLKVTQNLTLIEESLTSEFIHDIDRELKTVQAVLTVPKLKLSYEGEVTKSLQEMSMSEDPFALGGWMGWGRVFGPSTVLSRTQGLHRLVGGPWMSP

SEQ ID NO: 764516 - protein, 148 aa, Homo sapiens
MQALVLLLCIGALLGHSSCQNPASPPEEGSPDPDSTGALVEEEDPFFKVPVNKLAAAVSNFGYDLYRVRSSMSPTTNVLLSPLSVATALSALSLGAEQRTESIIHRALYYDLISSPDIHGTYKELLDTVTAPQKNLKSASRIVFEKKS

SEQ ID NO: 764517 - protein, 274 aa, Homo sapiens
GSAHRLLYGVLVLTPRGVPPCLPPKAAGITELRIKSSFVAPLEKSYGTRPRVLTGNPRLDLQEINNWVQAQMKGKLARSTKEIPDEISILLLGVAHFKGQWVTKFDSRKTSLEDFYLDEERTVRVPMMSDPKAVLRYGLDSDLSCKIAQLPLTGSMSIIFFLPLKVTQNLTLIEESLTSEFIHDIDRELKTVQAVLTVPKLKLSYEGEVTKSLQEMKLQSLFDSPDFSKITGKPIKLTQVEHRAGFEWNEDGAGTTPQPRAAACPPHLPAGLSP

SEQ ID NO: 764518 - protein, 358 aa, Homo sapiens
MQALVLLLCIGALLGHSSCQNPASPPEEGSPDPDSTGALVEEEDPFFKVPVNKLAAAVSNFGYDLYRVRSSMSPTTNVLLSPLSVATALSALSLGAEQRTESIIHRALYYDLISSPDIHGTYKELLDTVTAPQKNLKSASRIVFEKKLRIKSSFVAPLEKSYGTRPRVLTGNPRLDLQEINNWVQAQMKGKLARSTKEIPDEISILLLGVAHFKGQWVTKFDSRKTSLEDFYLDEERTVRVPMMSDPKAVLRYGLDSDLSCKIAQLPLTGSMSIIFFLPLKVTQNLTLIEESLTSEFIHDIDRELKTVQAVLTVPKLKLSYEGEVTKSLQEMKLQSLFDSPDFSKITASGVVWSDVPV

SEQ ID NO: 764519 - protein, 274 aa, Homo sapiens
MQALVLLLCIGALLGHSSCQNPASPPEEGSPDPDSTGALVEEEDPFFKVPVNKLAAAVSNFGYDLYRVRSSMSPTTNVLLSPLSVATALSALSLGAEQRTESIIHRALYYDLISSPDIHGTYKELLDTVTAPQKNLKSASRIVFEKKLRIKSSFVAPLEKSYGTRPRVLTGNPRLDLQEINNWVQAQMKGKLARSTKEIPDEISILLLGVAHFKGQWVTKFDSRKTSLEDFYLDEERTVRVPMMSDPKAVLRYGLDSDLSCKINQLPLPEYRGV

SEQ ID NO: 764520 - protein, 35 aa, Homo sapiens
MKGKLARSTKEIPDEISILLLGVAHFKGERVSNSF

SEQ ID NO: 764521 - protein, 145 aa, Homo sapiens; identical to SEQ ID NO: 764509
  misc_feature (9)..(9): Xaa can be any naturally occurring amino acid

SEQ ID NO: 764522 - protein, 390 aa, Homo sapiens; identical to SEQ ID NO: 764511

SEQ ID NO: 764523 - protein, 234 aa, Homo sapiens
MQALVLLLCIGALLGHSSCQNPASPPEEGSPDPDSTGALVEEEDPFFKVPVNKLAAAVSNFGYDLYRVRSSMSPTTNVLLSPLSVATALSALSLGAEQRTESIIHRALYYDLISSPDIHGTYKELLDTVTAPQKNLKSASRIVFEKKLRIKSSFVAPLEKSYGTRPRVLTGNPRLDLQEINNWVQAQMKGKLARSTKEIPDEISILLLGVAHFKGQWVTKFDSRKTSLEDFYLD

SEQ ID NO: 764524 - protein, 69 aa, Homo sapiens
HRLVKVIVQREGEVGRLQPWAGGGSRPILVPLKAFPLDYHLNQPFIFVLRDTDTGALLFIGKILDPRGP

SEQ ID NO: 764525 - protein, 390 aa, Homo sapiens; identical to SEQ ID NO: 764511

SEQ ID NO: 764526 - protein, 390 aa, Homo sapiens; identical to SEQ ID NO: 764511

SEQ ID NO: 764527 - protein, 326 aa, Homo sapiens
LADPLIGSHPTTNVLLSPLSVATALSALSLGAEQRTESIIHRALYYDLISSPDIHGTYKELLDTVTAPQKNLKSASRIVFEKKLRIKSSFVAPLEKSYGTRPRVLTGNPRLDLQEINNWVQAQMKGKLARSTKEIPDEISILLLGVAHFKGQWVTKFDSRKTSLEDFYLDEERTVRVPMMSDPKAVLRYGLDSDLSCKIAQLPLTGSMSIIFFLPLKVTQNLTLIEESLTSEFIHDIDRELKTVQAVLTVPKLKLSYEGEVTKSLQEMKLQSLFDSPDFSKITGKPIKLTQVEHRAGFEWNEDGAGTTPQPRAAACPPHLPAGLSP

SEQ ID NO: 764528 - protein, 183 aa, Homo sapiens
MQALVLLLCIGALLGHSSCQNPASPPEEGSPDPDSTGALVEEEDPFFKVPVNKLAAAVSNFGYDLYRVRSSMSPTTNVLLSPLSVATALSALSLGAEQRTESIIHRALYYDLISSPDIHGTYKELLDTVTAPQKNLKSASRIVFEKKLRIKSSFVAPLAARDQQLGAGADEREARQVHKGNSR

SEQ ID NO: 764529 - protein, 347 aa, Homo sapiens
SSRILFDGVCNMETGETCISANPLNVPRKHWWTDSSAEKKHVWFGESMDGGFQFSYGNPELPEDVLDVQLAFLRLLSSRASQNTVEASTGVLPASTSQSAGITELRIKSSFVAPLEKSYGTRPRVLTGNPRLDLQEINNWVQAQMKGKLARSTKEIPDEISILLLGVAHFKGQWVTKFDSRKTSLEDFYLDEERTVRVPMMSDPKAVLRYGLDSDLSCKIAQLPLTGSMSIIFFLPLKVTQNLTLIEESLTSEFIHDIDRELKTVQAVLTVPKLKLSYEGEVTKSLQEMKLQSLFDSPDFSKITGKPIKLTQVEHRAGFEWNEDGAGTTPQPRAAACPPHLPAGLSP

SEQ ID NO: 764530 - protein, 271 aa, Homo sapiens
  misc_feature (2)..(2): Xaa can be any naturally occurring amino acid
MXDPKAVLRYGLDSDLSCKIAQLPFDRKLRIKSSFVAPLEKSYGTRPRVLTGNPRLDLQEINNWVQAQMKGKLARSTKEIPDEISILLLGVAHFKGQWVTKFDSRKTSLEDFYLDEERTVRVPMMSDPKAVLRYGLDSDLSCKIAQLPLTGSMSIIFFLPLKVTQNLTLIEESLTSEFIHDIDRELKTVQAVLTVPKLKLSYEGEVTKSLQEMKLQSLFDSPDFSKITGKPIKLTQVEHRAGFEWNEDGAGTTPQPRAAACPPHLPAGLSP

SEQ ID NO: 764531 - protein, 114 aa, Homo sapiens [sequence omitted]

SEQ ID NO: 764532 - protein, 398 aa, Homo sapiens
MAAYREPPCNQYTGTTTALQKLEGFASRLFHRHSKGTAHDQKTALENDSLHFSEHTALWDRSMKEFLAKAKEDFLKKWENPTQNNAGLEDFERKKTLGTGSFGRVMLVKHKATEQYYAMKILDKQKVVKLKQIEHTLNEKRILQAVNFPFLVRLEYAFKDNSNLYMVMEYVPGGEMFSHLRRIGRFSEPHARFYAAQIVLTFEYLHSLDLIYRDLKPENLLIDHQGYIQVTDFGFAKRVKGRTWTLCGTPEYLAPEIILSKGYNKAVDWWALGVLIYEMAAGYPPFFADQPIQIYEKIVSGKVRFPSHFSSDLKDLLRNLLQVDLTKRFGNLKNGVSDIKTHKWFATTDWIAIYQRKVEAPFIPKFRGSGDTSNFDDYEEEDIRVSITEKCAKEFGEF

SEQ ID NO: 764533 - protein, 339 aa, Homo sapiens
MGLLKEFLAKAKEDFLKKWENPTQNNAGLEDFERKKTLGTGSFGRVMLVKHKATEQYYAMKILDKQKVVKLKQIEHTLNEKRILQAVNFPFLVRLEYAFKDNSNLYMVMEYVPGGEMFSHLRRIGRFSEPHARFYAAQIVLTFEYLHSLDLIYRDLKPENLLIDHQGYIQVTDFGFAKRVKGRTWTLCGTPEYLAPEIILSKGYNKAVDWWALGVLIYEMAAGYPPFFADQPIQIYEKIVSGKVRFPSHFSSDLKDLLRNLLQVDLTKRFGNLKNGVSDIKTHKWFATTDWIAIYQRKVEAPFIPKFRGSGDTSNFDDYEEEDIRVSITEKCAKEFGEF

SEQ ID NO: 764534 - protein, 356 aa, Homo sapiens
AGVLLARFNMGLSCSSSEISVKEFLAKAKEDFLKKWENPTQNNAGLEDFERKKTLGTGSFGRVMLVKHKATEQYYAMKILDKQKVVKLKQIEHTLNEKRILQAVNFPFLVRLEYAFKDNSNLYMVMEYVPGGEMFSHLRRIGRFSEPHARFYAAQIVLTFEYLHSLDLIYRDLKPENLLIDHQGYIQVTDFGFAKRVKGRTWTLCGTPEYLAPEIILSKGYNKAVDWWALGVLIYEMAAGYPPFFADQPIQIYEKIVSGKVRFPSHFSSDLKDLLRNLLQVDLTKRFGNLKNGVSDIKTHKWFATTDWIAIYQRKVEAPFIPKFRGSGDTSNFDDYEEEDIRVSITEKCAKEFGEF

SEQ ID NO: 764535 - protein, 355 aa, Homo sapiens
MGLSRKSSDASACSSSEISVKEFLAKAKEDFLKKWENPTQNNAGLEDFERKKTLGTGSFGRVMLVKHKATEQYYAMKILDKQKVVKLKQIEHTLNEKRILQAVNFPFLVRLEYAFKDNSNLYMVMEYVPGGEMFSHLRRIGRFSEPHARFYAAQIVLTFEYLHSLDLIYRDLKPENLLIDHQGYIQVTDFGFAKRVKGRTWTLCGTPEYLAPEIILSKGYNKAVDWWALGVLIYEMAAGYPPFFADQPIQIYEKIVSGKVRFPSHFSSDLKDLLRNLLQVDLTKRFGNLKNGVSDIKTHKWFATTDWIAIYQRKVEAPFIPKFRGSGDTSNFDDYEEEDIRVSITEKCAKEFGEF

SEQ ID NO: 764536 - protein, 293 aa, Homo sapiens
MLVKHKATEQYYAMKILDKQKVVKLKQIEHTLNEKRILQAVNFPFLVRLEYAFKDNSNLYMVMEYVPGGEMFSHLRRIGRFSEPHARFYAAQIVLTFEYLHSLDLIYRDLKPENLLIDHQGYIQVTDFGFAKRVKGRTWTLCGTPEYLAPEIILSKGYNKAVDWWALGVLIYEMAAGYPPFFADQPIQIYEKIVSGKVRFPSHFSSDLKDLLRNLLQVDLTKRFGNLKNGVSDIKTHKWFATTDWIAIYQRKVEAPFIPKFRGSGDTSNFDDYEEEDIRVSITEKCAKEFGEF

SEQ ID NO: 764537 - protein, 338 aa, Homo sapiens
MSVKEFLAKAKEDFLKKWENPTQNNAGLEDFERKKTLGTGSFGRVMLVKHKATEQYYAMKILDKQKVVKLKQIEHTLNEKRILQAVNFPFLVRLEYAFKDNSNLYMVMEYVPGGEMFSHLRRIGRFSEPHARFYAAQIVLTFEYLHSLDLIYRDLKPENLLIDHQGYIQVTDFGFAKRVKGRTWTLCGTPEYLAPEIILSKGYNKAVDWWALGVLIYEMAAGYPPFFADQPIQIYEKIVSGKVRFPSHFSSDLKDLLRNLLQVDLTKRFGNLKNGVSDIKTHKWFATTDWIAIYQRKVEAPFIPKFRGSGDTSNFDDYEEEDIRVSITEKCAKEFGEF

SEQ ID NO: 764538 - protein, 351 aa, Homo sapiens
MGNAATAKKGSEVESVKEFLAKAKEDFLKKWENPTQNNAGLEDFERKKTLGTGSFGRVMLVKHKATEQYYAMKILDKQKVVKLKQIEHTLNEKRILQAVNFPFLVRLEYAFKDNSNLYMVMEYVPGGEMFSHLRRIGRFSEPHARFYAAQIVLTFEYLHSLDLIYRDLKPENLLIDHQGYIQVTDFGFAKRVKGRTWTLCGTPEYLAPEIILSKGYNKAVDWWALGVLIYEMAAGYPPFFADQPIQIYEKIVSGKVRFPSHFSSDLKDLLRNLLQVDLTKRFGNLKNGVSDIKTHKWFATTDWIAIYQRKVEAPFIPKFRGSGDTSNFDDYEEEDIRVSITEKCAKEFGEF

SEQ ID NO: 764539 - protein, 182 aa, Homo sapiens
STSSTRAIDAPSFVPELLRIHRVPETIASTVPTQAETLGPLSSISEPPWPDPGQGNDPFRRQPEHLSVEFFADQPIQIYEKIVSGKVRFPSHFSSDLKDLLRNLLQVDLTKRFGNLKNGVSDIKTHKWFATTDWIAIYQRKVEAPFIPKFRGSGDTSNFDDYEEEDIRVSITEKCAKEFGEF

SEQ ID NO: 764540 - protein, 253 aa, Homo sapiens
MGLLKEFLAKAKEDFLKKWENPTQNNAGLEDFERKKTLGTGSFGRVMLVKHKATEQYYAMKILDKQKVVKLKQIEHTLNEKRILQAVNFPFLVRLEYAFKDNSNLYMVMEYVPGGEMFSHLRRIGRFSEPHARFYAAQIVLTFEYLHSLDLIYRDLKPENLLIDHQGYIQVTDFGFAKRVKGRTWTLCGTPEYLAPEIILSKGYNKAVDWWALGVLIYEMAAGYPPFFADQPIQIYEKIVSGKRTFDMNKTKL

SEQ ID NO: 764541 - protein, 351 aa, Homo sapiens; identical to SEQ ID NO: 764538

SEQ ID NO: 764542 - protein, 354 aa, Homo sapiens
MSARKSSDASACSSSEISVKEFLAKAKEDFLKKWENPTQNNAGLEDFERKKTLGTGSFGRVMLVKHKATEQYYAMKILDKQKVVKLKQIEHTLNEKRILQAVNFPFLVRLEYAFKDNSNLYMVMEYVPGGEMFSHLRRIGRFSEPHARFYAAQIVLTFEYLHSLDLIYRDLKPENLLIDHQGYIQVTDFGFAKRVKGRTWTLCGTPEYLAPEIILSKGYNKAVDWWALGVLIYEMAAGYPPFFADQPIQIYEKIVSGKVRFPSHFSSDLKDLLRNLLQVDLTKRFGNLKNGVSDIKTHKWFATTDWIAIYQRKVEAPFIPKFRGSGDTSNFDDYEEEDIRVSITEKCAKEFGEF

SEQ ID NO: 764543 - protein, 354 aa, Homo sapiens; identical to SEQ ID NO: 764542

SEQ ID NO: 764544 - protein, 346 aa, Homo sapiens
MSACSSSEISVKEFLAKAKEDFLKKWENPTQNNAGLEDFERKKTLGTGSFGRVMLVKHKATEQYYAMKILDKQKVVKLKQIEHTLNEKRILQAVNFPFLVRLEYAFKDNSNLYMVMEYVPGGEMFSHLRRIGRFSEPHARFYAAQIVLTFEYLHSLDLIYRDLKPENLLIDHQGYIQVTDFGFAKRVKGRTWTLCGTPEYLAPEIILSKGYNKAVDWWALGVLIYEMAAGYPPFFADQPIQIYEKIVSGKVRFPSHFSSDLKDLLRNLLQVDLTKRFGNLKNGVSDIKTHKWFATTDWIAIYQRKVEAPFIPKFRGSGDTSNFDDYEEEDIRVSITEKCAKEFGEF

SEQ ID NO: 764545 - protein, 233 aa, Homo sapiens [sequence omitted]

SEQ ID NO: 764546 - protein, 312 aa, Homo sapiens
MAAYREPPCNQYTGTTTALQKLEGFASRLFHRHSKGTAHDQKTALENDSLHFSEHTALWDRSMKEFLAKAKEDFLKKWENPTQNNAGLEDFERKKTLGTGSFGRVMLVKHKATEQYYAMKILDKQKVVKLKQIEHTLNEKRILQAVNFPFLVRLEYAFKDNSNLYMVMEYVPGGEMFSHLRRIGRFSEPHARFYAAQIVLTFEYLHSLDLIYRDLKPENLLIDHQGYIQVTDFGFAKRVKGRTWTLCGTPEYLAPEIILSKGYNKAVDWWALGVLIYEMAAGYPPFFADQPIQIYEKIVSGKRTFDMNKTKL

SEQ ID NO: 764547 - protein, 312 aa, Homo sapiens; identical to SEQ ID NO: 764546

SEQ ID NO: 764548 - protein, 142 aa, Homo sapiens
MRLSWFRVLTVLSICLSAVATATGAEGKRKLQIGVKKRVDHCPIKSRKGDVLHMHYTGKLEDGTEFDSSLPQNQPFVFSLGTGQVIKGWDQGLLGMCEGEKRKLVIPSELGYGERGAPPKIPGGATLVFEVELLKIERRTEL

SEQ ID NO: 764549 - protein, 171 aa, Homo sapiens
LGGAGVQEGRLDQAGQKRTGLRVSTRARDMRLSWFRVLTVLSICLSAVATATGAEGKRKLQIGVKKRVDHCPIKSRKGDVLHMHYTGKLEDGTEFDSSLPQNQPFVFSLGTGQVIKGWDQGLLGMCEGEKRKLVIPSELGYGERGAPPKIPGGATLVFEVELLKIERRTEL

SEQ ID NO: 764550 - protein, 188 aa, Homo sapiens
MRLSWFRVLTVLSICLSAVATATGAEGKRKLQIGVKKRVDHCPIKSRKGDVLHMHYTGKLEDGTEFDSSLPQNQPFVFSLGTGQVIKGWDQGLLGWSWGNGLGSGGVHGHRPGGKLWEASPRDTRQGPWVLPWAEHVSSCRMCEGEKRKLVIPSELGYGERGAPPKIPGGATLVFEVELLKIERRTEL

SEQ ID NO: 764551 - protein, 423 aa, Homo sapiens
WGEPGCKRAGWIRPGRSGPGSECQRELGDEEIGGGGRSCPEMPQGEGSHAARGGVLGLGAGRGTGTGGTSELVPVEGGARRRGAELGGSGDGAWLLKEELEEVKGGASGSEAEGDGAEALGAGLQPVSGVATAPEKGSSSVEGGAAGPGAVPRPPKGGAKEPSEEPGPSNGPGRPRGGGLRGGRAWGRRRPRTPPGEVVWVERARRPADTGPVWVPRRPPRAQSWGGAPGGSTGPGWGVSPEDPGSSEPPSGDVWVPRGRPPGSGRRGVGVLDRGQLGVADMRLSWFRVLTVLSICLSAVATATGAEGKRKLQIGVKKRVDHCPIKSRKGDVLHMHYTGKLEDGTEFDSSLPQNQPFVFSLGTGQVIKGWDQGLLGMCEGEKRKLVIPSELGYGERGAPPKIPGGATLVFEVELLKIERRTEL

SEQ ID NO: 764552 - protein, 129 aa, Homo sapiens [sequence omitted]

SEQ ID NO: 764553 - protein, 130 aa, Homo sapiens
MRLSWFRVLTVLSICLSAVATATGAEGKRKLQIGVKKRVDHCPIKSRKGDVLHMHYTGKLEDGTEFDSSLPQNQPFVFSLGTGQVIKGWDQGLLGMCEGEKRKLVIPSELGGATLVFEVELLKIERRTEL

SEQ ID NO: 764554 - protein, 109 aa, Homo sapiens
VSVAPEPGGEGGDPGQRGSPGARKIQWRWNPPVTYPCSILSLPSPTFSRSVGVCAHRDMRLSWFRVLTVLSICLSAVATATGAEGKRKLQIGVKKRVDHCPIKSRKGDV

SEQ ID NO: 764555 - protein, 98 aa, Homo sapiens
TRECLGVWFSISQGKLEDGTEFDSSLPQNQPFVFSLGTGQVIKGWDQGLLGMCEGEKRKLVIPSELGYGERGAPPKIPGGATLVFEVELLKIERRTEL

SEQ ID NO: 764556 - protein, 142 aa, Homo sapiens; identical to SEQ ID NO: 764548

SEQ ID NO: 764557 - protein, 122 aa, Homo sapiens
MRLSWFRVLTVLSICLSAVATATGAEGKRKWPSHVPQGKLEDGTEFDSSLPQNQPFVFSLGTGQVIKGWDQGLLGMCEGEKRKLVIPSELGYGERGAPPKIPGGATLVFEVELLKIERRTEL

SEQ ID NO: 764558 - protein, 306 aa, Homo sapiens
WGEPGCKRAGWIRPGRSGPGSECQRELGDEEIGGGGRSCPEMPQGEGSHAARGGVLGLGAGRGTGTGGTSELVPVEGGARRRGAELGGSGDGAWLLKEELEEVKGGASGSEAEGDGAEALGAGLQPVSGVATAPEKGSSSVEGGAAGPGAVPRPPKGGAKEPSEEPGPSNGPGRPRGGGLRGGRAWGRRRPRTPPGEVVWVERARRPADTGPVWVPRRPPRAQSWGGAPGGSTGPGWGVSPEDPGSSEPPSGDVWVPRGRPPAAAAEVLVCWTGGSWVWREWGRPVGATAVQPDRVWTLRKGTGGN

SEQ ID NO: 764559 - protein, 193 aa, Homo sapiens
SFLPSFSSSYSSPRFFSSSPLSPLLFLLLLLFSFPPPLLHLFISSSFFCSRFSSSPFSSSSPLPCPLLLLVHLLYSSFSSSSFSSFPPFLFFSSSPPPLVLFSFPHSFLLLLLLFSPYFLLASLFSSPLLVLLSPSPFFLHFLSSYYLLLIFSSSSSLSSSFSSLLLLLFLHSSTPTPSLTVPLAMPNSTQHK

SEQ ID NO: 764560 - protein, 1140 aa, Homo sapiens [sequence omitted]

SEQ ID NO: 764561 - protein, 130 aa, Homo sapiens
HSNFAVFPAVPEPFGGAIIIGQESITYHNGDKYLAIAPPIIKQSTIVCHNRVDPNGSRYLLGDMEGRLFMLLLEKEEQMDGTVTLKDLRVELLGEVELVLPVPLQCSFRFLKTPNVWSHTSTLGIMLLNT

SEQ ID NO: 764562 - protein, 1140 aa, Homo sapiens [sequence omitted]

SEQ ID NO: 764563 - protein, 1140 aa, Homo sapiens [sequence omitted]

SEQ ID NO: 764564 - protein, 1146 aa, Homo sapiens
MSYNYVVTAQKPTAVNGCVTGHFTSAEDLNLLIAKNTRLEIYVVTAEGLRPVKEVGMYGKIAVMELFRPKGESKDLLFILTAKYNACILEYKQSGESIDIITRAHGNVQDRIGRPSETGIIGIIDPECRMIGLRLYDGLFKVIPLDRDNKELKAFNIRLEELHVIDVKFLYGCQAPTICFVYQDPQGRHVKTYEVSLREKEFNKGPWKQENVEAEASMVIAVPEPFGGAIIIGQESITYHNGDKYLAIAPPIIKQSTIVCHNRVDPNGSRYLLGDMEGRLFMLLLEKEEQMDGTVTLKDLRVELLGETSIAECLTYLDNGVVFVGSRLGDSQLVKLNVDSNEQGSYVVAMETFTNLGPIVDMCVVDLERQGQGQLVTCSGAFKEGSLRIIRNGIGIHEHASIDLPGIKGLWPLRSDPNRETDDTLVLSFVGQTRVLMLNGEEVEETELMGFVDDQQTFFCGNVAHQQLIQSSAVIQITSASVRLVSQEPKALVSEWKEPQAKNISVASCNSSQVVVAVGRALYYLQIHPQELRQISHTEMEHEVACLDITPLGDSNGLSPLCAIGLWTDISARILKLPSFELLHKEMLGGEIIPRSILMTTFESSHYLLCALGDGALFYFGLNIETGLLSDRKKVTLGTQPTVLRTFRSLSTTNVFACSDRPTVIYSSNHKLVFSNVNLKEVNYMCPLNSDGYPDSLALANNSTLTIGTIDEIQKLHIRTVPLYESPRKICYQEVSQCFGVLSSRIEVQDTSGGTTALRPSASTQALSSSVSSSKLFSSSTAPHETSFGEEVEVHNLLIIDQHTFEVLHAHQFLQNEYALSLVSCKLGKDPNTYFIVGTAMVYPEEAEPKQGRIVVFQYSDGKLQTVAEKEVKGAVYSMVEFNGKLLASINSTVRLYEWTTEKELRTECNHYNNIMALYLKTKGDFILVGDLMRSVLLLAYKPMEGNFEEIARDFNPNWMSAVEILDDDNFLGAENAFNLFVCQKDSAATTDEERQHLQEVGLFHLGEFVNVFCHGSLVMQNLGETSTPTQGSVLFGTVNGMIGLVTSLSESWYNLLLDMQNRLNKVIKSVGKIEHSFWRSFHTERKTEPATGFIDGDLIESFLDISRPKMQEVVANLQYDDGSGMKREATADDLIKVVEELTRIH

SEQ ID NO: 764565 - protein, 923 aa, Homo sapiens
MVIAVPEPFGGAIIIGQESITYHNGDKYLAIAPPIIKQSTIVCHNRVDPNGSRYLLGDMEGRLFMLLLEKEEQMDGTVTLKDLRVELLGETSIAECLTYLDNGVVFVGSRLGDSQLVKLNVDSNEQGSYVVAMETFTNLGPIVDMCVVDLERQGQGQLVTCSGAFKEGSLRIIRNGIGIHEHASIDLPGIKGLWPLRSDPNRETDDTLVLSFVGQTRVLMLNGEEVEETELMGFVDDQQTFFCGNVAHQQLIQITSASVRLVSQEPKALVSEWKEPQAKNISVASCNSSQVVVAVGRALYYLQIHPQELRQISHTEMEHEVACLDITPLGDSNGLSPLCAIGLWTDISARILKLPSFELLHKEMLGGEIIPRSILMTTFESSHYLLCALGDGALFYFGLNIETGLLSDRKKVTLGTQPTVLRTFRSLSTTNVFACSDRPTVIYSSNHKLVFSNVNLKEVNYMCPLNSDGYPDSLALANNSTLTIGTIDEIQKLHIRTVPLYESPRKICYQEVSQCFGVLSSRIEVQDTSGGTTALRPSASTQALSSSVSSSKLFSSSTAPHETSFGEEVEVHNLLIIDQHTFEVLHAHQFLQNEYALSLVSCKLGKDPNTYFIVGTAMVYPEEAEPKQGRIVVFQYSDGKLQTVAEKEVKGAVYSMVEFNGKLLASINSTVRLYEWTTEKELRTECNHYNNIMALYLKTKGDFILVGDLMRSVLLLAYKPMEGNFEEIARDFNPNWMSAVEILDDDNFLGAENAFNLFVCQKDSAATTDEERQHLQEVGLFHLGEFVNVFCHGSLVMQNLGETSTPTQGSVLFGTVNGMIGLVTSLSESWYNLLLDMQNRLNKVIKSVGKIEHSFWRSFHTERKTEPATGFIDGDLIESFLDISRPKMQEVVANLQYDDGSGMKREATADDLIKVVEELTRIH

SEQ ID NO: 764566 - protein, 970 aa, Homo sapiens
AYGSIFAYLLCLQDPQGRHVKTYEVSLREKEFNKGPWKQENVEAEASMVIAVPEPFGGAIIIGQESITYHNGDKYLAIAPPIIKQSTIVCHNRVDPNGSRYLLGDMEGRLFMLLLEKEEQMDGTVTLKDLRVELLGETSIAECLTYLDNGVVFVGSRLGDSQLVKLNVDSNEQGSYVVAMETFTNLGPIVDMCVVDLERQGQGQLVTCSGAFKEGSLRIIRNGIGIHEHASIDLPGIKGLWPLRSDPNRETDDTLVLSFVGQTRVLMLNGEEVEETELMGFVDDQQTFFCGNVAHQQLIQITSASVRLVSQEPKALVSEWKEPQAKNISVASCNSSQVVVAVGRALYYLQIHPQELRQISHTEMEHEVACLDITPLGDSNGLSPLCAIGLWTDISARILKLPSFELLHKEMLGGEIIPRSILMTTFESSHYLLCALGDGALFYFGLNIETGLLSDRKKVTLGTQPTVLRTFRSLSTTNVFACSDRPTVIYSSNHKLVFSNVNLKEVNYMCPLNSDGYPDSLALANNSTLTIGTIDEIQKLHIRTVPLYESPRKICYQEVSQCFGVLSSRIEVQDTSGGTTALRPSASTQALSSSVSSSKLFSSSTAPHETSFGEEVEVHNLLIIDQHTFEVLHAHQFLQNEYALSLVSCKLGKDPNTYFIVGTAMVYPEEAEPKQGRIVVFQYSDGKLQTVAEKEVKGAVYSMVEFNGKLLASINSTVRLYEWTTEKELRTECNHYNNIMALYLKTKGDFILVGDLMRSVLLLAYKPMEGNFEEIARDFNPNWMSAVEILDDDNFLGAENAFNLFVCQKDSAATTDEERQHLQEVGLFHLGEFVNVFCHGSLVMQNLGETSTPTQGSVLFGTVNGMIGLVTSLSESWYNLLLDMQNRLNKVIKSVGKIEHSFWRSFHTERKTEPATGFIDGDLIESFLDISRPKMQEVVANLQYDDGSGMKREATADDLIKVVEELTRIH

SEQ ID NO: 764567 - protein, 773 aa, Homo sapiens
FGHRRGRLVTCSGAFKEGSLRIIRNGIGIHEHASIDLPGIKGLWPLRSDPNRETDDTLVLSFVGQTRVLMLNGEEVEETELMGFVDDQQTFFCGNVAHQQLIQITSASVRLVSQEPKALVSEWKEPQAKNISVASCNSSQVVVAVGRALYYLQIHPQELRQISHTEMEHEVACLDITPLGDSNGLSPLCAIGLWTDISARILKLPSFELLHKEMLGGEIIPRSILMTTFESSHYLLCALGDGALFYFGLNIETGLLSDRKKVTLGTQPTVLRTFRSLSTTNVFACSDRPTVIYSSNHKLVFSNVNLKEVNYMCPLNSDGYPDSLALANNSTLTIGTIDEIQKLHIRTVPLYESPRKICYQEVSQCFGVLSSRIEVQDTSGGTTALRPSASTQALSSSVSSSKLFSSSTAPHETSFGEEVEVHNLLIIDQHTFEVLHAHQFLQNEYALSLVSCKLGKDPNTYFIVGTAMVYPEEAEPKQGRIVVFQYSDGKLQTVAEKEVKGAVYSMVEFNGKLLASINSTVRLYEWTTEKELRTECNHYNNIMALYLKTKGDFILVGDLMRSVLLLAYKPMEGNFEEIARDFNPNWMSAVEILDDDNFLGAENAFNLFVCQKDSAATTDEERQHLQEVGLFHLGEFVNVFCHGSLVMQNLGETSTPTQGSVLFGTVNGMIGLVTSLSESWYNLLLDMQNRLNKVIKSVGKIEHSFWRSFHTERKTEPATGFIDGDLIESFLDISRPKMQEVVANLQYDDGSGMKREATADDLIKVVEELTRIH

SEQ ID NO: 764568 - protein, 700 aa, Homo sapiens
MARGSWMISRLSSVATWLISSLSSHQQLIQITSASVRLVSQEPKALVSEWKEPQAKNISVASCNSSQVVVAVGRALYYLQIHPQELRQISHTEMEHEVACLDITPLGDSNGLSPLCAIGLWTDISARILKLPSFELLHKEMLGGEIIPRSILMTTFESSHYLLCALGDGALFYFGLNIETGLLSDRKKVTLGTQPTVLRTFRSLSTTNVFACSDRPTVIYSSNHKLVFSNVNLKEVNYMCPLNSDGYPDSLALANNSTLTIGTIDEIQKLHIRTVPLYESPRKICYQEVSQCFGVLSSRIEVQDTSGGTTALRPSASTQALSSSVSSSKLFSSSTAPHETSFGEEVEVHNLLIIDQHTFEVLHAHQFLQNEYALSLVSCKLGKDPNTYFIVGTAMVYPEEAEPKQGRIVVFQYSDGKLQTVAEKEVKGAVYSMVEFNGKLLASINSTVRLYEWTTEKELRTECNHYNNIMALYLKTKGDFILVGDLMRSVLLLAYKPMEGNFEEIARDFNPNWMSAVEILDDDNFLGAENAFNLFVCQKDSAATTDEERQHLQEVGLFHLGEFVNVFCHGSLVMQNLGETSTPTQGSVLFGTVNGMIGLVTSLSESWYNLLLDMQNRLNKVIKSVGKIEHSFWRSFHTERKTEPATGFIDGDLIESFLDISRPKMQEVVANLQYDDGSGMKREATADDLIKVVEELTRIH

SEQ ID NO: 764569 - protein, 1140 aa, Homo sapiens [sequence omitted]

SEQ ID NO: 764570 - protein, 1140 aa, Homo sapiens [sequence omitted]

SEQ ID NO: 764571 - protein, 812 aa, Homo sapiens
MSYNYVVTAQKPTAVNGCVTGHFTSAEDLNLLIAKNTRLEIYVVTAEGLRPVKEVGMYGKIAVMELFRPKGESKDLLFILTAKYNACILEYKQSGESIDIITRAHGNVQDRIGRPSETGIIGIIDPECRMIGLRLYDGLFKVIPLDRDNKELKAFNIRLEELHVIDVKFLYGCQAPTICFVYQDPQGRHVKTYEVSLREKEFNKGPWKQENVEAEASMVIAVPEPFGGAIIIGQESITYHNGDKYLAIAPPIIKQSTIVCHNRVDPNGSRYLLGDMEGRLFMLLLEKEEQMDGTVTLKDLRVELLGETSIAECLTYLDNGVVFVGSRLGDSQLVKLNVDSNEQGSYVVAMETFTNLGPIVDMCVVDLERQGQGQLVTCSGAFKEGSLRIIRNGIGIHEHASIDLPGIKGLWPLRSDPNRETDDTLVLSFVGQTRVLMLNGEEVEETELMGFVDDQQTFFCGNVAHQQLIQITSASVRLVSQEPKALVSEWKEPQAKNISVASCNSSQVVVAVGRALYYLQIHPQELRQISHTEMEHEVACLDITPLGDSNGLSPLCAIGLWTDISARILKLPSFELLHKEMLGGEIIPRSILMTTFESSHYLLCALGDGALFYFGLNIETGLLSDRKKVTLGTQPTVLRTFRSLSTTNVFACSDRPTVIYSSNHKLVFSNVNLKEVNYMCPLNSDGYPDSLALANNSTLTIGTIDEIQKLHIRTVPLYESPRKICYQEVSQCFGVLSSRIEVQDTSGGTTALRPSASTQALSSSVSSSKLFSSSTAPHETSFGEEVEVHNLLIIDQHTFEDLLHCGHSNGVS

SEQ ID NO: 764572 - protein, 1140 aa, Homo sapiens [sequence omitted]

SEQ ID NO: 764573 - protein, 1100 aa, Homo sapiens
MSYNYVVTAQKPTAVNGCVTGHFTSAEDLNLLIAKNTRLEIYVVTAEGLRPVKEVGMYGKIAVMELFRPKGESKDLLFILTAKYNACILEYKQSGESIDIITRAHGNVQDRIGRPSETGIIGIIDPECRMIGLRLYDGLFKVIPLDRDNKELKAFNIRLEELHVIDVKFLYGCQAPTICFVYQDPQGRHVKTYEVSLREKEFNKGPWKQENVEAEASMVIAVPEPFGGAIIIGQESITYHNGDKYLAIAPPIIKQSTIVCHNRVDPNGSRYLLGDMEGRLFMLLLEKEEQMDGTVTLKDLRVELLGETSIAECLTYLDNGVVFVGSRLGDSQLVKLNVDSNEQGSYVVAMETFTNLGPIVDMCVVDLERQGQGQLVTCSGAFKEGSLRIIRNGIGIHEHASIDLPGIKGLWPLRSDPNRETDDTLVLSFVGQTRVLMLNGEEVEETELMGFVDDQQTFFCGNVAHQQLIQITSASVRLVSQEPKALVSEWKEPQAKNISVASCNSSQVVVAVGRALYYLQIHPQELRQISHTEMEHEVACLDITPLGDSNGLSPLCAIGLWTDISARILKLPSFELLHKEMLGGEIIPRSILMTTFESSHYLLCALGDGALFYFGLNIETGLLSDRKKVTLGTQPTVLRTFRSLSTTNVFACSDRPTVIYSSNHKLVFSNVNLKEVNYMCPLNSDGYPDSLALANNSTLTIGTIDEIQKLHIRTVPLYESPRKICYQEVSQCFGVLSSRIEVQDTSGGTTALRPSASTQALSSSVSSSKLFSSSTAPHETSFGEEVEVHNLLIIDQHTFEVLHAHQFLQNEYALSLVSCKLGKDPNTYFIVGTAMVYPEEAEPKQGRIVVFQYSDGKLQTVAEKEVKGAVYSMVEFNGKLLASINSTVRLYEWTTEKELRTECNHYNNIMALYLKTKGDFILVGDLMRSVLLLAYKPMEGNFEEIARDFNPNWMSAVEILDDDNFLGAENAFNLFVCQKDSAATTDEERQHLQEVGLFHLGEFVNVFCHGSLVMQNRLNKVIKSVGKIEHSFWRSFHTERKTEPATGFIDGDLIESFLDISRPKMQEVVANLQYDDGSGMKREATADDLIKVVEELTRIH

SEQ ID NO: 764574 - protein, 1140 aa, Homo sapiens [sequence omitted]

SEQ ID NO: 764575 - protein, 614 aa, Homo sapiens
RVHLDSVVVSELACLDITPLGDSNGLSPLCAIGLWTDISARILKLPSFELLHKEMLGGEIIPRSILMTTFESSHYLLCALGDGALFYFGLNIETGLLSDRKKVTLGTQPTVLRTFRSLSTTNVFACSDRPTVIYSSNHKLVFSNVNLKEVNYMCPLNSDGYPDSLALANNSTLTIGTIDEIQKLHIRTVPLYESPRKICYQEVSQCFGVLSSRIEVQDTSGGTTALRPSASTQALSSSVSSSKLFSSSTAPHETSFGEEVEVHNLLIIDQHTFEVLHAHQFLQNEYALSLVSCKLGKDPNTYFIVGTAMVYPEEAEPKQGRIVVFQYSDGKLQTVAEKEVKGAVYSMVEFNGKLLASINSTVRLYEWTTEKELRTECNHYNNIMALYLKTKGDFILVGDLMRSVLLLAYKPMEGNFEEIARDFNPNWMSAVEILDDDNFLGAENAFNLFVCQKDSAATTDEERQHLQEVGLFHLGEFVNVFCHGSLVMQNLGETSTPTQGSVLFGTVNGMIGLVTSLSESWYNLLLDMQNRLNKVIKSVGKIEHSFWRSFHTERKTEPATGFIDGDLIESFLDISRPKMQEVVANLQYDDGSGMKREATADDLIKVVEELTRIH

SEQ ID NO: 764576 - protein, 987 aa, Homo sapiens
MSYNYVVTAQKPTAVNGCVTGHFTSAEDLNLLIAKNTRLEIYVVTAEGLRPVKEVGMYGKIAVMELFRPKGESKDLLFILTAKYNACILEYKQSGESIDIITRAHGNVQDRIGRPSETGIIGIIDPECRMIGLRLYDGLFKVIPLDRDNKELKAFNIRLEELHVIDVKFLYGCQAPTICFVYQDPQGRHVKTYEVSLREKEFNKGPWKQENVEAEASMVIAVPEPFGGAIIIGQESITYHNGDKYLAIAPPIIKQSTIVCHNRVDPNGSRYLLGDMEGRLFMLLLEKEEQMDGTVTLKDLRVELLGETSIAECLTYLDNGVVFVGSRLGDSQLVKLNVDSNEQGSYVVAMETFTNLGPIVDMCVVDLERQGQGQLVTCSGAFKEGSLRIIRNGIGIHEHASIDLPGIKGLWPLRSDPNRETDDTLVLSFVGQTRVLMLNGEEVEETELMGFVDDQQTFFCGNVAHQQLIQITSASVRLVSQEPKALVSEWKEPQAKNISVASCNSSQVVVAVGRALYYLQIHPQELRQISHTEMEHEVACLDITPLGDSNGLSPLCAIGLWTDISARILKLPSFELLHKEMLGGEIIPRSILMTTFESSHYLLCALGDGALFYFGLNIETGLLSDRKKVTLGTQPTVLRTFRSLSTTNVFACSDRPTVIYSSNHKLVFSNVNLKEVNYMCPLNSDGYPDSLALANNSTLTIGTIDEIQKLHIRTVPLYESPRKICYQEVSQCFGVLSSRIEVQDTSGGTTALRPSASTQALSSSVSSSKLFSSSTAPHETSFGEEVEVHNLLIIDQHTFEVLHAHQFLQNEYALSLVSCKLGKDPNTYFIVGTAMVYPEEAEPKQGRIVVFQYSDGKLQTVAEKEVKGAVYSMVEFNGKLLASINSTVRLYEWTTEKELRTECNHYNNIMALYLKTKGDFILVGDLMRSVLLLAYKPMEGNFEEIARDFNPNWMSAVEILDDDNFLGAENAFNLFVCQKDSMTMAAV

SEQ ID NO: 764577 - protein, 1140 aa, Homo sapiens [sequence omitted]

SEQ ID NO: 764578 - protein, 1041 aa, Homo sapiens
MSYNYVVTAQKPTAVNGCVTGHFTSAEDLNLLIAKNTRLEIYVVTAEGLRPVKEVGMYGKIAVMELFRPKGESKDLLFILTAKYNACILEYKQSGESIDIITRAHGNVQDRIGRPSETGIIGIIDPECRMIGLRLYDGLFKVIPLDRDNKELKAFNIRLEELHVIDVKFLYGCQAPTICFVYQDPQGRHVKTYEVSLREKEFNKGPWKQENVEAEASMVIAVPEPFGGAIIIGQESITYHNGDKYLAIAPPIIKQSTIVCHNRVDPNGSRYLLGDMEGRLFMLLLEKEEQMDGTVTLKDLRVELLGETSIAECLTYLDNGVVFVGSRLGDSQLVKLNVDSNEQGSYVVAMETFTNLGPIVDMCVVDLERQGQGQLVTCSGAFKEGSLRIIRNGIGIHEHASIDLPGIKGLWPLRSDPNRETDDTLVLSFVGQTRVLMLNGEEVEETELMGFVDDQQTFFCGNVAHQQLIQITSASVRLVSQEPKALVSEWKEPQAKNISVASCNSSQVVVAVGRALYYLQIHPQELRQISHTEMEHEVACLDITPLGDSNGLSPLCAIGLWTDISARILKLPSFELLHKEMLGGEIIPRSILMTTFESSHYLLCALGDGALFYFGLNIETGLLSDRKKVTLGTQPTVLRTFRSLSTTNVFACSDRPTVIYSSNHKLVFSNVNLKEVNYMCPLNSDGYPDSLALANNSTLTIGTIDEIQKLHIRTVPLYESPRKICYQEVSQCFGVLSSRIEVQDTSGGTTALRPSDSTLTIGTIDEIQKLHIRTVPLYESPRKICYQEVSQCFGEGWEFLGLWWMQALGSVSGSGAPVYRDRTFLVREEKVTEIHLFETGSPTVEYVSSPGKLSTVTTARGPVSGPVVETGGSESDFLTAFSAATTDEERQHLQEVGLFHLGEFVNVFCHGSLVMQNLGETSTPTQGSVLFGTVNGMIGLVTSLSESWYNLLLDMQNRLNKVIKSVGKIEHSFWRSFHTERKTEPATGFIDGDLIESFLDISRPKMQEVVANLQYDDGSGMKREATADDLIKVVEELTRIH

SEQ ID NO: 764579 - protein, 365 aa, Homo sapiens
ALSLQKLVGMKHFKGVLVNDKYGCALLHAHQFLQNEYALSLVSCKLGKDPNTYFIVGTAMVYPEEAEPKQGRIVVFQYSDGKLQTVAEKEVKGAVYSMVEFNGKLLASINSTVRLYEWTTEKELRTECNHYNNIMALYLKTKGDFILVGDLMRSVLLLAYKPMEGNFEEIARDFNPNWMSAVEILDDDNFLGAENAFNLFVCQKDSAATTDEERQHLQEVGLFHLGEFVNVFCHGSLVMQNLGETSTPTQGSVLFGTVNGMIGLVTSLSESWYNLLLDMQNRLNKVIKSVGKIEHSFWRSFHTERKTEPATGFIDGDLIESFLDISRPKMQEVVANLQYDDGSGMKREATADDLIKVVEELTRIH

SEQ ID NO: 764580 - protein, 352 aa, Homo sapiens
ASCRIGTRHTFEVLHAHQFLQNEYALSLVSCKLGKDPNTYFIVGTAMVYPEEAEPKQGRIVVFQYSDGKLQTVAEKEVKGAVYSMVEFNGKLLASINSTVRLYEWTTEKELRTECNHYNNIMALYLKTKGDFILVGDLMRSVLLLAYKPMEGNFEEIARDFNPNWMSAVEILDDDNFLGAENAFNLFVCQKDSAATTDEERQHLQEVGLFHLGEFVNVFCHGSLVMQNLGETSTPTQGSVLFGTVNGMIGLVTSLSESWYNLLLDMQNRLNKVIKSVGKIEHSFWRSFHTERKTEPATGFIDGDLIESFLDISRPKMQEVVANLQYDDGSGMKREATADDLIKVVEELTRIH

SEQ ID NO: 764581 - protein, 681 aa, Homo sapiens
MSYNYVVTAQKPTAVNGCVTGHFTSAEDLNLLIAKNTRLEIYVVTAEGLRPVKEVGMYGKIAVMELFRPKGESKDLLFILTAKYNACILEYKQSGESIDIITRAHGNVQDRIGRPSETGIIGIIDPECRMIGLRLYDGLFKVIPLDRDNKELKAFNIRLEELHVIDVKFLYGCQAPTICFVYQDPQGRHVKTYEVSLREKEFNKGPWKQENVEAEASMVIAVPEPFGGAIIIGQESITYHNGDKYLAIAPPIIKQSTIVCHNRVDPNGSRYLLGDMEGRLFMLLLEKEEQMDGTVTLKDLRVELLGETSIAECLTYLDNGVVFVGSRLGDSQLVKLNVDSNEQGSYVVAMETFTNLGPIVDMCVVDLERQGQGQLVTCSGAFKEGSLRIIRNGIGIHEHASIDLPGIKGLWPLRSDPNRETDDTLVLSFVGQTRVLMLNGEEVEETELMGFVDDQQTFFCGNVAHQQLIQITSASVRLVSQEPKALVSEWKEPQAKNISVASCNSSQVVVAVGRALYYLQIHPQELRQISHTEMEHEVACLDITPLGDSNGLSPLCAIGLWTDISARILKLPSFELLHKEMLGGEIIPRSILMTTFESSHYLLCALGDGALFYFGLNIETGLLSDRKKVTLGTQPTVLRTFRSLSTTNVFACSDRPTVIYSSNLVFSTWASLSMSFATALW

SEQ ID NO: 764582 - protein, 1082 aa, Homo sapiens
MSYNYVVTAQKPTAVNGCVTGHFTSAEDLNLLIAKNTRLEIYVVTAEGLRPVKEVGMYGKIAVMELFRPKGESKDLLFILTAKYNACILEYKQSGESIDIITRAHGNVQDRIGRPSETGIIGIIDPECRMIGLRLYDGLFKVIPLDRDNKELKAFNIRLEELHVIDVKFLYGCQAPTICFVYQDPQGRHVKTYEVSLREKEFNKGPWKQENVEAEASMVIAVPEPFGGAIIIGQESITYHNGDKYLAIAPPIIKQSTIVCHNRVDPNGSRYLLGDMEGRLFMLLLEKEEQMDGTVTLKDLRVELLGETSIAECLTYLDNGVVFVGSRLGDSQLVKLNVDSNEQGSYVVAMETFTNLGPIVDMCVVDLERQGQGQLVTCSGAFKEGSLRIIRNGIGIHEHASIDLPGIKGLWPLRSDPNRETDDTLVLSFVGQTRVLMLNGEEVEETELMGFVDDQQTFFCGNVAHQQLIQITSASVRLVSQEPKALVSEWKEPQAKNISVASCNSSQVVVAVGRALYYLQIHPQELRQISHTEMEHEVACLDITPLGDSNGLSPLCAIGLWTDISARILKLPSFELLHKEMLGGEIIPRSILMTTFESSHYLLCALGDGALFYFGLNIETGLLSDRKKVTLGTQPTVLRTFRSLSTTNVFACSDRPTVIYSSNHKLVFSNVNLKEVNYMCPLNSDGYPDSLALANNSTLTIGTIDEIQKLHIRTVPLYESPRKICYQEVSQCFGVLSSRIEVQDTSGGTTALRPSASTQALSSSVSSSKLFSSSTAPHETSFGEEVEVHNLLIIDQHTFEVLHAHQFLQNEYALSLVSCKLGKDPNTYFIVGTAMVYPEEAEPKQGRIVVFQYSDGKLQTVAEKEVKGAVYSMVEFNGKLLASINSTVRLYEWTTEKELRTECNHYNNIMALYLKTKGDFILVGDLMRSVLLLAYKPMEGNFEEIARDFNPNWMSAVEILDDDNFLGAENAFNLFVCQKDSAATTDEERQHLQEVGLFHLGEFVNVFCHGSLVMQNLGETSTPTQGSVLFGTVNGMIGLVTSLSESWYNLLLDMQNRLNKVIKSVGKIEHSFWRSFHTERKT

SEQ ID NO: 764583 - protein, 224 aa, Homo sapiens
IEISTVDGDKHGALYEWTTEKELRTECNHYNNIMALYLKTKGDFILVGDLMRSVLLLAYKPMEGNFEEIARDFNPNWMSAVEILDDDNFLGAENAFNLFVCQKDSAATTDEERQHLQEVGLFHLGEFVNVFCHGSLVMQNRLNKVIKSVGKIEHSFWRSFHTERKTEPATGFIDGDLIESFLDISRPKMQEVVANLQYDDGSGMKREATADDLIKVVEELTRIH

SEQ ID NO: 764584 - protein, 702 aa, Homo sapiens
MSYNYVVTAQKPTAVNGCVTGHFTSAEDLNLLIAKNTRLEIYVVTAEGLRPVKEVGMYGKIAVMELFRPKGESKDLLFILTAKYNACILEYKQSGESIDIITRAHGNVQDRIGRPSETGIIGIIDPECRMIGLRLYDGLFKVIPLDRDNKELKAFNIRLEELHVIDVKFLYGCQAPTICFVYQDPQGRHVKTYEVSLREKEFNKGPWKQENVEAEASMVIAVPEPFGGAIIIGQESITYHNGDKYLAIAPPIIKQSTIVCHNRVDPNGSRYLLGDMEGRLFMLLLEKEEQMDGTVTLKDLRVELLGETSIAECLTYLDNGVVFVGSRLGDSQLVKLNVDSNEQGSYVVAMETFTNLGPIVDMCVVDLERQGQGQLVTCSGAFKEGSLRIIRNGIGIHEHASIDLPGIKGLWPLRSDPNRETDDTLVLSFVGQTRVLMLNGEEVEETELMGFVDDQQTFFCGNVAHQQLIQITSASVRLVSQEPKALVSEWKEPQAKNISVASCNSSQVVVAVGRALYYLQIHPQELRQISHTEMEHEVACLDITPLGDSNGLSPLCAIGLWTDISARILKLPSFELLHKEMLGGEIIPRSILMTTFESSHYLLCALGDGALFYFGLNIETGLLSDRKKVTLGTQPTVLRTFRSLSTTNVFACSDRPTVIYSSNHKLVFSNVNLTIGTIDEIKKLTLPPLDRTGESTVIPNRQ

SEQ ID NO: 764585 - protein, 671 aa, Homo sapiens
MSYNYVVTAQKPTAVNGCVTGHFTSAEDLNLLIAKNTRLEIYVVTAEGLRPVKEVGMYGKIAVMELFRPKGESKDLLFILTAKYNACILEYKQSGESIDIITRAHGNVQDRIGRPSETGIIGIIDPECRMIGLRLYDGLFKVIPLDRDNKELKAFNIRLEELHVIDVKFLYGCQAPTICFVYQDPQGRHVKTYEVSLREKEFNKGPWKQENVEAEASMVIAVPEPFGGAIIIGQESITYHNGDKYLAIAPPIIKQSTIVCHNRVDPNGSRYLLGDMEGRLFMLLLEKEEQMDGTVTLKDLRVELLGETSIAECLTYLDNGVVFVGSRLGDSQLVKLNVDSNEQGSYVVAMETFTNLGPIVDMCVVDLERQGQGQLVTCSGAFKEGSLRIIRNGIGIHEHASIDLPGIKGLWPLRSDPNRETDDTLVLSFVGQTRVLMLNGEEVEETELMGFVDDQQTFFCGNVAHQQLIQITSASVRLVSQEPKALVSEWKEPQAKNISVASCNSSQVVVAVGRALYYLQIHPQELRQISHTEMEHEVACLDITPLGDSNGLSPLCAIGLWTDISARILKLPSFELLHKEMLGGEIIPRSILMTTFESSHYLLCALGDGALFYFGLNIETGLLSDRKKVTLGTQPTVLRTFRSLSTTNVFACSDRPTVIYSSNSALKGTSS

SEQ ID NO: 764586 - protein, 557 aa, Homo sapiens
MSYNYVVTAQKPTAVNGCVTGHFTSAEDLNLLIAKNTRLEIYVVTAEGLRPVKEVGMYGKIAVMELFRPKGESKDLLFILTAKYNACILEYKQSGESIDIITRAHGNVQDRIGRPSETGIIGIIDPECRMIGLRLYDGLFKVIPLDRDNKELKAFNIRLEELHVIDVKFLYGCQAPTICFVYQDPQGRHVKTYEVSLREKEFNKGPWKQENVEAEASMVIAVPEPFGGAIIIGQESITYHNGDKYLAIAPPIIKQSTIVCHNRVDPNGSRYLLGDMEGRLFMLLLEKEEQMDGTVTLKDLRVELLGETSIAECLTYLDNGVVFVGSRLGDSQLVKLNVDSNEQGSYVVAMETFTNLGPIVDMCVVDLERQGQGQLVTCSGAFKEGSLRIIRNGIGIHEHASIDLPGIKGLWPLRSDPNRETDDTLVLSFVGQTRVLMLNGEEVEETELMGFVDDQQTFFCGNVAHQQLIQITSASVRLVSQEPKALVSEWKEPQAKNISVASCNSSQVVVAVGRALYYLQIHPQELRQISHTEMEQALVSTSRLVTTSLLEGTVTNF

SEQ ID NO: 764587 - protein, 342 aa, Homo sapiens
MSYNYVVTAQKPTAVNGCVTGHFTSAEDLNLLIAKNTRLEIYVVTAEGLRPVKEVGMYGKIAVMELFRPKGESKDLLFILTAKYNACILEYKQSGESIDIITRAHGNVQDRIGRPSETGIIGIIDPECRMIGLRLYDGLFKVIPLDRDNKELKAFNIRLEELHVIDVKFLYGCQAPTICFVYQDPQGRHVKTYEVSLREKEFNKGPWKQENVEAEASMVIAVPEPFGGAIIIGQESITYHNGDKYLAIAPPIIKQSTIVCHNRVDPNGSRYLLGDMEGRLFMLLLEKEEQMDGTVTLKDLRVELLGEVELVLPVPLQCSFRFLKTPNVWSHTSTLGIMLLNT

SEQ ID NO: 764588 - protein, 300 aa, Homo sapiens
MSYNYVVTAQKPTAVNGCVTGHFTSAEDLNLLIAKNTRLEIYVVTAEGLRPVKEVGMYGKIAVMELFRPKGESKDLLFILTAKYNACILEYKQSGESIDIITRAHGNVQDRIGRPSETGIIGIIDPECRMIGLRLYDGLFKVIPLDRDNKELKAFNIRLEELHVIDVKFLYGCQAPTICFVYQDPQGRHVKTYEVSLREKEFNKGPWKQENVEAEASMVIAVPEPFGGAIIIGQESITYHNGDKYLAIAPPIIKQSTIVCHNRVDPNGSRYLLGDMEASASTFSCFQGPLLNSFSRRDTS

SEQ ID NO: 764589 - protein, 39 aa, Homo sapiens
PPVGEHPLGPHSPAHLLIAYDDGSGMKREATADDLIKVV

SEQ ID NO: 764590 - protein, 257 aa, Homo sapiens
MSLQAMVYPEEAEPKQGRIVVFQYSDGKLQTVAEKEVKGAVYSMVEFNGKLLASINSTVRLYEWTTEKELRTECNHYNNIMALYLKTKGDFILVGDLMRSVLLLAYKPMEGNFEEIARDFNPNWMSAVEILDDDNFLGAENAFNLFVCQKDSAATTDEERQHLQEVGLFHLGEFVNVFCHGSLVMQNLGETSTPTQGSVLFGTVNGMIGLVTSLSESWYNLLLDMQNRLNKVIKSVGKIEHSFLADPFTPCLSHPVP

SEQ ID NO: 764591 - protein, 77 aa, Homo sapiens
MQNRLNKVIKSVGKIEHSFWRSFHTERKTEPATGFIDGDLIESFLDISRPKMQEVVANLQYDGVRGALFILKSELMT

SEQ ID NO: 764592 - protein, 1140 aa, Homo sapiens [sequence omitted]

SEQ ID NO: 764593 - protein, 1140 aa, Homo sapiens [sequence omitted]

SEQ ID NO: 764594 - protein, 1140 aa, Homo sapiens [sequence omitted]

SEQ ID NO: 764595 - protein, 694 aa, Homo sapiens
MISRLSSVATWLISSLSSHQQLIQITSASVRLVSQEPKALVSEWKEPQAKNISVASCNSSQVVVAVGRALYYLQIHPQELRQISHTEMEHEVACLDITPLGDSNGLSPLCAIGLWTDISARILKLPSFELLHKEMLGGEIIPRSILMTTFESSHYLLCALGDGALFYFGLNIETGLLSDRKKVTLGTQPTVLRTFRSLSTTNVFACSDRPTVIYSSNHKLVFSNVNLKEVNYMCPLNSDGYPDSLALANNSTLTIGTIDEIQKLHIRTVPLYESPRKICYQEVSQCFGVLSSRIEVQDTSGGTTALRPSASTQALSSSVSSSKLFSSSTAPHETSFGEEVEVHNLLIIDQHTFEVLHAHQFLQNEYALSLVSCKLGKDPNTYFIVGTAMVYPEEAEPKQGRIVVFQYSDGKLQTVAEKEVKGAVYSMVEFNGKLLASINSTVRLYEWTTEKELRTECNHYNNIMALYLKTKGDFILVGDLMRSVLLLAYKPMEGNFEEIARDFNPNWMSAVEILDDDNFLGAENAFNLFVCQKDSAATTDEERQHLQEVGLFHLGEFVNVFCHGSLVMQNLGETSTPTQGSVLFGTVNGMIGLVTSLSESWYNLLLDMQNRLNKVIKSVGKIEHSFWRSFHTERKTEPATGFIDGDLIESFLDISRPKMQEVVANLQYDDGSGMKREATADDLIKVVEELTRIH

SEQ ID NO: 764596 - protein, 682 aa, Homo sapiens
RLGRGRGVIGRGITSASVRLVSQEPKALVSEWKEPQAKNISVASCNSSQVVVAVGRALYYLQIHPQELRQISHTEMEHEVACLDITPLGDSNGLSPLCAIGLWTDISARILKLPSFELLHKEMLGGEIIPRSILMTTFESSHYLLCALGDGALFYFGLNIETGLLSDRKKVTLGTQPTVLRTFRSLSTTNVFACSDRPTVIYSSNHKLVFSNVNLKEVNYMCPLNSDGYPDSLALANNSTLTIGTIDEIQKLHIRTVPLYESPRKICYQEVSQCFGVLSSRIEVQDTSGGTTALRPSASTQALSSSVSSSKLFSSSTAPHETSFGEEVEVHNLLIIDQHTFEVLHAHQFLQNEYALSLVSCKLGKDPNTYFIVGTAMVYPEEAEPKQGRIVVFQYSDGKLQTVAEKEVKGAVYSMVEFNGKLLASINSTVRLYEWTTEKELRTECNHYNNIMALYLKTKGDFILVGDLMRSVLLLAYKPMEGNFEEIARDFNPNWMSAVEILDDDNFLGAENAFNLFVCQKDSAATTDEERQHLQEVGLFHLGEFVNVFCHGSLVMQNLGETSTPTQGSVLFGTVNGMIGLVTSLSESWYNLLLDMQNRLNKVIKSVGKIEHSFWRSFHTERKTEPATGFIDGDLIESFLDISRPKMQEVVANLQYDDGSGMKREATADDLIKVVEELTRIH

SEQ ID NO: 764597 - protein, 1140 aa, Homo sapiens [sequence omitted]

SEQ ID NO: 764598 - protein, 669 aa, Homo sapiens
RLGRGRGESAEAKALVSEWKEPQAKNISVASCNSSQVVVAVGRALYYLQIHPQELRQISHTEMEHEVACLDITPLGDSNGLSPLCAIGLWTDISARILKLPSFELLHKEMLGGEIIPRSILMTTFESSHYLLCALGDGALFYFGLNIETGLLSDRKKVTLGTQPTVLRTFRSLSTTNVFACSDRPTVIYSSNHKLVFSNVNLKEVNYMCPLNSDGYPDSLALANNSTLTIGTIDEIQKLHIRTVPLYESPRKICYQEVSQCFGVLSSRIEVQDTSGGTTALRPSASTQALSSSVSSSKLFSSSTAPHETSFGEEVEVHNLLIIDQHTFEVLHAHQFLQNEYALSLVSCKLGKDPNTYFIVGTAMVYPEEAEPKQGRIVVFQYSDGKLQTVAEKEVKGAVYSMVEFNGKLLASINSTVRLYEWTTEKELRTECNHYNNIMALYLKTKGDFILVGDLMRSVLLLAYKPMEGNFEEIARDFNPNWMSAVEILDDDNFLGAENAFNLFVCQKDSAATTDEERQHLQEVGLFHLGEFVNVFCHGSLVMQNLGETSTPTQGSVLFGTVNGMIGLVTSLSESWYNLLLDMQNRLNKVIKSVGKIEHSFWRSFHTERKTEPATGFIDGDLIESFLDISRPKMQEVVANLQYDDGSGMKREATADDLIKVVEELTRIH

SEQ ID NO: 764599 - protein, 1140 aa, Homo sapiens [sequence omitted]

SEQ ID NO: 764600 - protein, 1140 aa, Homo sapiens [sequence omitted]

SEQ ID NO: 764601 - protein, 434 aa, Homo sapiens
TRLGTRLGGSLYESPRKICYQEVSQCFGVLSSRIEVQDTSGGTTALRPSASTQALSSSVSSSKLFSSSTAPHETSFGEEVEVHNLLIIDQHTFEVLHAHQFLQNEYALSLVSCKLGKDPNTYFIVGTAMVYPEEAEPKQGRIVVFQYSDGKLQTVAEKEVKGAVYSMVEFNGKLLASINSTVRLYEWTTEKELRTECNHYNNIMALYLKTKGDFILVGDLMRSVLLLAYKPMEGNFEEIARDFNPNWMSAVEILDDDNFLGAENAFNLFVCQKDSAATTDEERQHLQEVGLFHLGEFVNVFCHGSLVMQNLGETSTPTQGSVLFGTVNGMIGLVTSLSESWYNLLLDMQNRLNKVIKSVGKIEHSFWRSFHTERKTEPATGFIDGDLIESFLDISRPKMQEVVANLQYDDGSGMKREATADDLIKVVEELTRIH

SEQ ID NO: 764602 - protein, 1140 aa, Homo sapiens [sequence omitted]

SEQ ID NO: 764603 - protein, 531 aa, Homo sapiens
MIDLSWYLNIVSLNSDGYPDSLALANNSTLTIGTIDEIQKLHIRTVPLYESPRKICYQEVSQCFGVLSSRIEVQDTSGGTTALRPSDSTLTIGTIDEIQKLHIRTVPLYESPRKICYQEVSQCFGVLSSRIEVQDTSGGTTALRPSASTQALSSSVSSSKLFSSSTAPHETSFGEEVEVHNLLIIDQHTFEVLHAHQFLQNEYALSLVSCKLGKDPNTYFIVGTAMVYPEEAEPKQGRIVVFQYSDGKLQTVAEKEVKGAVYSMVEFNGKLLASINSTVRLYEWTTEKELRTECNHYNNIMALYLKTKGDFILVGDLMRSVLLLAYKPMEGNFEEIARDFNPNWMSAVEILDDDNFLGAENAFNLFVCQKDSAATTDEERQHLQEVGLFHLGEFVNVFCHGSLVMQNLGETSTPTQGSVLFGTVNGMIGLVTSLSESWYNLLLDMQNRLNKVIKSVGKIEHSFWRSFHTERKTEPATGFIDGDLIESFLDISRPKMQEVVANLQYDDGSGMKREATADDLIKVVEELTRIH

SEQ ID NO: 764604 - protein, 356 aa, Homo sapiens
GSYPVHYTAVANTAFEVLHAHQFLQNEYALSLVSCKLGKDPNTYFIVGTAMVYPEEAEPKQGRIVVFQYSDGKLQTVAEKEVKGAVYSMVEFNGKLLASINSTVRLYEWTTEKELRTECNHYNNIMALYLKTKGDFILVGDLMRSVLLLAYKPMEGNFEEIARDFNPNWMSAVEILDDDNFLGAENAFNLFVCQKDSAATTDEERQHLQEVGLFHLGEFVNVFCHGSLVMQNLGETSTPTQGSVLFGTVNGMIGLVTSLSESWYNLLLDMQNRLNKVIKSVGKIEHSFWRSFHTERKTEPATGFIDGDLIESFLDISRPKMQEVVANLQYDDGSGMKREATADDLIKVVEELTRIH

SEQ ID NO: 764605 - protein, 1086 aa, Homo sapiens
MSYNYVVTAQKPTAVNGCVTGHFTSAEDLNLLIAKNTRLEIYVVTAEGLRPVKEVGMYGKIAVMELFRPKGESKDLLFILTAKYNACILEYKQSGESIDIITRAHGNVQDRIGRPSETGIIGIIDPECRMIGLRLYDGLFKVIPLDRDNKELKAFNIRLEELHVIDVKFLYGCQAPTICFVYQDPQGRHVKTYEVSLREKEFNKGPWKQENVEAEASMVIAVPEPFGGAIIIGQESITYHNGDKYLAIAPPIIKQSTIVCHNRVDPNGSRYLLGDMEGRLFMLLLEKEEQMDGTVTLKDLRVELLGETSIAECLTYLDNGVVFVGSRLGDSQLVKLNVDSNEQGSYVVAMETFTNLGPIVDMCVVDLERQGQGQLVTCSGAFKEGSLRIIRNGIGIHEHASIDLPGIKGLWPLRSDPNRETDDTLVLSFVGQTRVLMLNGEEVEETELMGFVDDQQTFFCGNVAHQQLIQITSASVRLVSQEPKALVSEWKEPQAKNISVASCNSSQVVVAVGRALYYLQIHPQELRQISHTEMEHEVACLDITPLGDSNGLSPLCAIGLWTDISARILKLPSFELLHKEMLGGEIIPRSILMTTFESSHYLLCALGDGALFYFGLNIETGLLSDRKKVTLGTQPTVLRTFRSLSTTNVFACSDRPTVIYSSNHKLVFSNVNLKEVNYMCPLNSDGYPDSLALANNSTLTIGTIDEIQKLHIRTVPLYESPRKICYQEVSQCFGVLSSRIEVQDTSGGTTALRPSASTQALSSSVSSSKLFSSSTAPHETSFGEEVEVHNLLIIDQHTFEVLHAHQFLQNEYALSLVSCKLGKDPNTYFIVGTAMVYPEEAEPKQGRIVVFQYSDGKLQTVAEKEVKGAVYSMVEFNGKLLASINSTVRLYEWTTEKELRTECNHYNNIMALYLKTKGDFILVGDLMRSVLLLAYKPMEGNFEEIARDFNPNWMSAVEILDDDNFLGAENAFNLFVCQKDSAATTDEERQHLQEVGLFHLGEFVNVFCHGSLVMQNLGETSTPTQGSVLFGTVNGMIGLVTSLSESWYNLLLDMQNRLNKVIKSVGKIEHSFLADPFTPCLSHPVP

SEQ ID NO: 764606 - protein, 738 aa, Homo sapiens
MSYNYVVTAQKPTAVNGCVTGHFTSAEDLNLLIAKNTRLEIYVVTAEGLRPVKEVGMYGKIAVMELFRPKGESKDLLFILTAKYNACILEYKQSGESIDIITRAHGNVQDRIGRPSETGIIGIIDPECRMIGLRLYDGLFKVIPLDRDNKELKAFNIRLEELHVIDVKFLYGCQAPTICFVYQDPQGRHVKTYEVSLREKEFNKGPWKQENVEAEASMVIAVPEPFGGAIIIGQESITYHNGDKYLAIAPPIIKQSTIVCHNRVDPNGSRYLLGDMEGRLFMLLLEKEEQMDGTVTLKDLRVELLGETSIAECLTYLDNGVVFVGSRLGDSQLVKLNVDSNEQGSYVVAMETFTNLGPIVDMCVVDLERQGQGQLVTCSGAFKEGSLRIIRNGIGIHEHASIDLPGIKGLWPLRSDPNRETDDTLVLSFVGQTRVLMLNGEEVEETELMGFVDDQQTFFCGNVAHQQLIQITSASVRLVSQEPKALVSEWKEPQAKNISVASCNSSQVVVAVGRALYYLQIHPQELRQISHTEMEHEVACLDITPLGDSNGLSPLCAIGLWTDISARILKLPSFELLHKEMLGGEIIPRSILMTTFESSHYLLCALGDGALFYFGLNIETGLLSDRKKVTLGTQPTVLRTFRSLSTTNVFACSDRPTVIYSSNHKLVFSNVNLKEVNYMCPLNSDGYPDSLALANNSTLTIGTIDEIQKLHIRTVPLYESPSSPSSPPSSSWPWEAFP

SEQ ID NO: 764607 - protein, 249 aa, Homo sapiens
ALPMCEKPVNCDRSLNCNRPLYLKTKGDFILVGDLMRSVLLLAYKPMEGNFEEIARDFNPNWMSAVEILDDDNFLGAENAFNLFVCQKDSAATTDEERQHLQEVGLFHLGEFVNVFCHGSLVMQNLGETSTPTQGSVLFGTVNGMIGLVTSLSESWYNLLLDMQNRLNKVIKSVGKIEHSFWRSFHTERKTEPATGFIDGDLIESFLDISRPKMQEVVANLQYDDGSGMKREATADDLIKVVEELTRIH

SEQ ID NO: 764608 - protein, 673 aa, Homo sapiens
MSYNYVVTAQKPTAVNGCVTGHFTSAEDLNLLIAKNTRLEIYVVTAEGLRPVKEVGMYGKIAVMELFRPKGESKDLLFILTAKYNACILEYKQSGESIDIITRAHGNVQDRIGRPSETGIIGIIDPECRMIGLRLYDGLFKVIPLDRDNKELKAFNIRLEELHVIDVKFLYGCQAPTICFVYQDPQGRHVKTYEVSLREKEFNKGPWKQENVEAEASMVIAVPEPFGGAIIIGQESITYHNGDKYLAIAPPIIKQSTIVCHNRVDPNGSRYLLGDMEGRLFMLLLEKEEQMDGTVTLKDLRVELLGETSIAECLTYLDNGVVFVGSRLGDSQLVKLNVDSNEQGSYVVAMETFTNLGPIVDMCVVDLERQGQGQLVTCSGAFKEGSLRIIRNGIGIHEHASIDLPGIKGLWPLRSDPNRETDDTLVLSFVGQTRVLMLNGEEVEETELMGFVDDQQTFFCGNVAHQQLIQITSASVRLVSQEPKALVSEWKEPQAKNISVASCNSSQVVVAVGRALYYLQIHPQELRQISHTEMEHEVACLDITPLGDSNGLSPLCAIGLWTDISARILKLPSFELLHKEMLGGEIIPRSILMTTFESSHYLLCALGDGALFYFGLNIETGLLSDRKKVTLGTQPTVLRTFRSLSTTNVFACSDRPTVIYSSNQKRNKYSINL

SEQ ID NO: 764609 - protein, 601 aa, Homo sapiens
MSYNYVVTAQKPTAVNGCVTGHFTSAEDLNLLIAKNTRLEIYVVTAEGLRPVKEVGMYGKIAVMELFRPKGESKDLLFILTAKYNACILEYKQSGESIDIITRAHGNVQDRIGRPSETGIIGIIDPECRMIGLRLYDGLFKVIPLDRDNKELKAFNIRLEELHVIDVKFLYGCQAPTICFVYQDPQGRHVKTYEVSLREKEFNKGPWKQENVEAEASMVIAVPEPFGGAIIIGQESITYHNGDKYLAIAPPIIKQSTIVCHNRVDPNGSRYLLGDMEGRLFMLLLEKEEQMDGTVTLKDLRVELLGETSIAECLTYLDNGVVFVGSRLGDSQLVKLNVDSNEQGSYVVAMETFTNLGPIVDMCVVDLERQGQGQLVTCSGAFKEGSLRIIRNGIGIHEHASIDLPGIKGLWPLRSDPNRETDDTLVLSFVGQTRVLMLNGEEVEETELMGFVDDQQTFFCGNVAHQQLIQITSASVRLVSQEPKALVSEWKEPQAKNISVASCNSSQVVVAVGRALYYLQIHPQELRQISHTEMEHEVACLDITPLGDSNGLSPLCAIGLWTDISARILKLPSFELFIYRPGTVAMPVIPEFGRPRQHTGT

SEQ ID NO: 764610 - protein, 417 aa, Homo sapiens
MSYNYVVTAQKPTAVNGCVTGHFTSAEDLNLLIAKNTRLEIYVVTAEGLRPVKEVGMYGKIAVMELFRPKGESKDLLFILTAKYNACILEYKQSGESIDIITRAHGNVQDRIGRPSETGIIGIIDPECRMIGLRLYDGLFKVIPLDRDNKELKAFNIRLEELHVIDVKFLYGCQAPTICFVYQDPQGRHVKTYEVSLREKEFNKGPWKQENVEAEASMVIAVPEPFGGAIIIGQESITYHNGDKYLAIAPPIIKQSTIVCHNRVDPNGSRYLLGDMEGRLFMLLLEKEEQMDGTVTLKDLRVELLGETSIAECLTYLDNGVVFVGSRLGDSQLVKLNVDSNEQGSYVVAMETFTNLGPIVDMCVVDLERQGQGQLVTCSGAFKEGSLRIIRNGIGIHEHASIDLPGIKGSFFGGHRM

SEQ ID NO: 764611 - protein, 269 aa, Homo sapiens
  misc_feature (256)..(256): Xaa can be any naturally occurring amino acid
  misc_feature (258)..(258): Xaa can be any naturally occurring amino acid
  misc_feature (266)..(266): Xaa can be any naturally occurring amino acid
MSYNYVVTAQKPTAVNGCVTGHFTSAEDLNLLIAKNTRLEIYVVTAEGLRPVKEVGMYGKIAVMELFRPKGESKDLLFILTAKYNACILEYKQSGESIDIITRAHGNVQDRIGRPSETGIIGIIDPECRMIGLRLYDGLFKVIPLDRDNKELKAFNIRLEELHVIDVKFLYGCQAPTICFVYQDPQGRHVKTYEVSLREKEFNKGPWKQENVEAEASMVIAVPEPFGGAIIIGQESITYHNGDKYLAIAPPIIKNXMXAQSMDLWXEPW

SEQ ID NO: 764612 - protein, 348 aa, Homo sapiens
MSLLVVSMACVGFFLLQGAWPHEGVHRKPSLLAHPGRLVKSEETVILQCWSDVMFEHFLLHREGMFNDTLRLIGEHHDGVSKANFSISRMTQDLAGTYRCYGSVTHSPYQVSAPSDPLDIVIIGLYEKPSLSAQLGPTVLAGENVTLSCSSRSSYDMYHLSREGEAHERRLPAGPKVNGTFQADFPLGPATHGGTYRCFGSFHDSPYEWSKSSDPLLVSVTGNPSNSWPSPTEPSSKTGNPRHLHILIGTSVVIILFILLFFLLHRWCSNKKNAAVMDQESAGNRTANSEDSDEQDPQEVTYTQLNHCVFTQRKITRPSQRPKTPPTDIIVYTELPNAESRSKVVSCP

SEQ ID NO: 764613 - protein, 69 aa, Homo sapiens
VKAVDGPEFPGAAVAAAVVPASPPPPPRLIPWLAALAGRGTVVVDARPCLREDTTLNEQRLNFVYRYLL

SEQ ID NO: 764614 - protein, 259 aa, Homo sapiens
MKHSKKTYDSFQDELEDYIKVQKARGLEPKTCFRKMKGDYLETCGYKGEVNSRPTYRMFDQRLPSETIQTYPRSCNIPQTVENRLPQWLPAHDSRLRLDSLSYCQFTRDCFSEKPVPLNFNQQEYICGSHGVEHRVYKHFSSDNSTSTHQASHKQIHQKRKRHPEEGREKSEEERSKHKRKKSCEEIDLDKHKSIQRKKTEVEIETVHVSTEKLKNRKEKKSRDVVSKKEERKRTKKKKEQGQERTEEEMLWDQSILGF

SEQ ID NO: 764615 - protein, 259 aa, Homo sapiens; identical to SEQ ID NO: 764614

SEQ ID NO: 764616 - protein, 259 aa, Homo sapiens; identical to SEQ ID NO: 764614

SEQ ID NO: 764617 - protein, 259 aa, Homo sapiens; identical to SEQ ID NO: 764614

SEQ ID NO: 764618 - protein, 259 aa, Homo sapiens; identical to SEQ ID NO: 764614

SEQ ID NO: 764619 - protein, 199 aa, Homo sapiens
LYGSPVLHHTYPRSCNIPQTVENRLPQWLPAHDSRLRLDSLSYCQFTRDCFSEKPVPLNFNQQEYICGSHGVEHRVYKHFSSDNSTSTHQASHKQIHQKRKRHPEEGREKSEEERSKHKRKKSCEEIDLDKHKSIQRKKTEVEIETVHVSTEKLKNRKEKKSRDVVSKKEERKRTKKKKEQGQERTEEEMLWDQSILGF

SEQ ID NO: 764620 - protein, 259 aa, Homo sapiens; identical to SEQ ID NO: 764614

SEQ ID NO: 764621 - protein, 109 aa, Homo sapiens
MMGHRPVLVLSQNTKRESGRKVQSGNINAAKTIADIIRTCLGPKSMMKMLLDPMGGIVMTNDGNAILREIQVQHPAAKSMIEISRTQDERGWRWDHISNYSCRGNAVCS

SEQ ID NO: 764622 - protein, 209 aa, Homo sapiens
  misc_feature (3)..(3): Xaa can be any naturally occurring amino acid
  misc_feature (144)..(145): Xaa can be any naturally occurring amino acid
  misc_feature (160)..(160): Xaa can be any naturally occurring amino acid
  misc_feature (167)..(167): Xaa can be any naturally occurring amino acid
  misc_feature (177)..(177): Xaa can be any naturally occurring amino acid
  misc_feature (180)..(180): Xaa can be any naturally occurring amino acid
  misc_feature (184)..(184): Xaa can be any naturally occurring amino acid
  misc_feature (189)..(189): Xaa can be any naturally occurring amino acid
  misc_feature (194)..(194): Xaa can be any naturally occurring amino acid
  misc_feature (208)..(208): Xaa can be any naturally occurring amino acid
VVXSGIPGMFCPGSLSPEGSAGSPSSGYPALHRVAMMGHRPVLVLSQNTKRESGRKVQSGNINAAKTIADIIRTCLGPKSMMKMLLDPMGGIVMTNDGNAILREIQVQHPAAKSMIEISRTQDERGWRWDHISNYSCWALLFVXXNFLEQTMPPPVVIRXYRPVIGXSAPPPPAPPXTRXHFVXSTLMXPLIPXSTSYNTALRRRSYXD

SEQ ID NO: 764623 - protein, 109 aa, Homo sapiens; identical to SEQ ID NO: 764621

SEQ ID NO: 764624 - protein, 165 aa, Homo sapiens
MNEVGDGTTSVIILAGEMLSVAEHFLEQQMHPTVVISAYRKALDDMISTLKKISIPVDISDSDMMLNIINSSITTKAISRWSSLACKHLPWMLSKHGTSLTDEWSATRRLTITHNTLCNEWDTKDTGGSLRTRVCGGSVNGVCPSRFGVFRPPGGGSLGEQGGPG

SEQ ID NO: 764625 - protein, 206 aa, Homo sapiens
MEEEYIQQLCEDIIQLKPDVVITEKGISDLAQHYLMRANITAIRRVRKTDNNRIARACGARIVSRPEELREDDVGTGAGLLEIKKIGDEYFTFITDCKDPKACTILLRGASKEILSEVERNLQDAMQVCRNVLLDPQLVPGGGASEMAVAHALTEKSKAMTGVEQWPYRAVAQALEVIPRTLIQNCGASTIRLLTSLRAKHTQEEL

SEQ ID NO: 764626 - protein, 206 aa, Homo sapiens; identical to SEQ ID NO: 764625

SEQ ID NO: 764627 - protein, 206 aa, Homo sapiens; identical to SEQ ID NO: 764625

SEQ ID NO: 764628 - protein, 206 aa, Homo sapiens; identical to SEQ ID NO: 764625

SEQ ID NO: 764629 - protein, 188 aa, Homo sapiens
MEEEYIQQLCEDIIQLKPDVVITEKGISDLAQHYLMRANITAIRRVRKTDNNRIARACGARIVSRPEELREDDVGTGAGLLEIKKIGDEYFTFITDCKDPKACTILLRGASKEILSEVERNLQDAMQVCRNVLLDPQLVPGGGASEMAVAHALTEALEVIPRTLIQNCGASTIRLLTSLRAKHTQEEL

SEQ ID NO: 764630 - protein, 206 aa, Homo sapiens; identical to SEQ ID NO: 764625

SEQ ID NO: 764631 - protein, 206 aa, Homo sapiens; identical to SEQ ID NO: 764625

SEQ ID NO: 764632 - protein, 282 aa, Homo sapiens
MEEEYIQQLCEDIIQLKPDVVITEKGISDLAQHYLMRANITAIRRVRKTDNNRIARACGARIVSRPEELREDDVGTGAGLLEIKKIGDEYFTFITDCKDPKACTILLRGASKEILSEVERNLQDAMQVCRNVLLDPQLVPGGGASEMAVAHALTEKSKAMTGVEQWPYRAVAQALEVIPRTLIQNCGASTIRLLTSSGKTPGDCETGVDWWDGSSGLRTGLGARGSCDLDGEGAGKGWDLLPKGPKAGVGHEEGRVKRALERKGEKGAPQKCVAKKSRRLRP

SEQ ID NO: 764633 - protein, 109 aa, Homo sapiens; identical to SEQ ID NO: 764621

SEQ ID NO: 764634 - protein, 206 aa, Homo sapiens; identical to SEQ ID NO: 764625

SEQ ID NO: 764635 - protein, 206 aa, Homo sapiens; identical to SEQ ID NO: 764625

SEQ ID NO: 764636 - protein, 109 aa, Homo sapiens; identical to SEQ ID NO: 764621

SEQ ID NO: 764637 - protein, 109 aa, Homo sapiens; identical to SEQ ID NO: 764621

SEQ ID NO: 764638 - protein, 109 aa, Homo sapiens; identical to SEQ ID NO: 764621

SEQ ID NO: 764639 - protein, 109 aa, Homo sapiens; identical to SEQ ID NO: 764621

SEQ ID NO: 764640 - protein, 109 aa, Homo sapiens; identical to SEQ ID NO: 764621

SEQ ID NO: 764641 - protein, 165 aa, Homo sapiens; identical to SEQ ID NO: 764624

SEQ ID NO: 764642 - protein, 109 aa, Homo sapiens; identical to SEQ ID NO: 764621

SEQ ID NO: 764643 - protein, 136 aa, Homo sapiens
  misc_feature (3)..(3): Xaa can be any naturally occurring amino acid
VVXSGIPGMFCPGSLSPEGSAGSPSSGYPALHRVAMMGHRPVLVLSQNTKRESGRKVQSGNINAAKTIADIIRTCLGPKSMMKMLLDPMGGIVMTNDGNAILREIQVQHPAAKSMIEISRTQDERGWRWDHISNYS

SEQ ID NO: 764644 - protein, 114 aa, Homo sapiens
MMGHRPVLVLSEFWGCQEMDPLFALFCPYFSVLPQLRPPLTGPLSLPIIVFILEAQCPAFLSSLNLFASLHKLKLALFSPSLFPGRVLVLGSSFPLRVLSLSPHASPAPAPFLA

SEQ ID NO: 764645 - protein, 109 aa, Homo sapiens; identical to SEQ ID NO: 764621

SEQ ID NO: 764646 - protein, 170 aa, Homo sapiens
MNEVGDGTTSVIILAGEMLSVAEHFLEQQMHPTVVISAYRKALDDMISTLKKISIPVDISDSDMMLNIINSSITTKAISRWSSLACKHLPWMLSKHGTSLTDEWSATRRLTITHNTLCNEWDTQFAEWEDPGAHEDPVCGAVNGWPSRWGLLRTRGGVFRVHEGSGVVRG

SEQ ID NO: 764647 - protein, 282 aa, Homo sapiens; identical to SEQ ID NO: 764632

SEQ ID NO: 764648 - protein, 109 aa, Homo sapiens; identical to SEQ ID NO: 764621

SEQ ID NO: 764649 - protein, 125 aa, Homo sapiens
MLSVAEHFLEQQMHPTVVISAYRKALDDMISTLKKISIPVDISDSDMMLNIINSSITTKAISRWSSLACKHLPWMLSKHGTSLTDEWSATRRLTITHNTLCNEWDTKIPGRHHLEELLCLGRWES

SEQ ID NO: 764650 - protein, 109 aa, Homo sapiens; identical to SEQ ID NO: 764621

SEQ ID NO: 764651 - protein, 206 aa, Homo sapiens; identical to SEQ ID NO: 764625

SEQ ID NO: 764652 - protein, 206 aa, Homo sapiens; identical to SEQ ID NO: 764625

SEQ ID NO: 764653 - protein, 206 aa, Homo sapiens; identical to SEQ ID NO: 764625

SEQ ID NO: 764654 - protein, 206 aa, Homo sapiens; identical to SEQ ID NO: 764625

SEQ ID NO: 764655 - protein, 206 aa, Homo sapiens; identical to SEQ ID NO: 764625

SEQ ID NO: 764656 - protein, 206 aa, Homo sapiens; identical to SEQ ID NO: 764625

SEQ ID NO: 764657 - protein, 109 aa, Homo sapiens; identical to SEQ ID NO: 764621

SEQ ID NO: 764658 - protein, 206 aa, Homo sapiens; identical to SEQ ID NO: 764625

SEQ ID NO: 764659 - protein, 206 aa, Homo sapiens; identical to SEQ ID NO: 764625

SEQ ID NO: 764660 - protein, 206 aa, Homo sapiens; identical to SEQ ID NO: 764625

SEQ ID NO: 764661 - protein, 116 aa, Homo sapiens
KLVRAGVNRQRACTILLRGASKEILSEVERNLQDAMQVCRNVLLDPQLVPGGGASEMAVAHALTEKSKAMTGVEQWPYRAVAQALEVIPRTLIQNCGASTIRLLTSLRAKHTQEEL

SEQ ID NO: 764662 - protein, 109 aa, Homo sapiens; identical to SEQ ID NO: 764621

SEQ ID NO: 764663 - protein, 114 aa, Homo sapiens
MMGHRPVLVLTRTQSVNLEYKKEKATDIEITREEDFTRILQMEEEYIQQLCEDIIQLKPDVVITEKGISDLAQHYLMRANITAIRRVRKTDNNRIARALGPRLVTDPGTLESLC

SEQ ID NO: 764664 - protein, 88 aa, Homo sapiens
RSGDGANAGGLVAAIAPKGSEKAAKASRSVAGSKKEKENSSSKSKKGEAKEWGLVQKRILGSSSQFPRSWLLAWMDTYRTSNSGIVRD

SEQ ID NO: 764665 - protein, 1287 aa, Homo sapiens
RSGDGANAGGLVAAIAPKGSEKAAKASRSVAGSKKEKENSSSKARGRSEGVGTCSEKDPGVLQPVPLGGRGGQYDGSAGVDTGAVEPLGSIAIEPGAALNPLGTKPEPEEGENECRLLKKVKSEKMESPVSTPAVLPIHLLVPVVNNDISSPCEQIMVRTRSVGVNTCDVALATEPECLGPCEPGTSVNLEGIVWQETEDGMLVVNVTWRNKTYVGTLLDCTRHDWAPPRFCDSPTSDLEMRNGRGRGKRMRPNSNTPVNETATASDSKGTSNSSKTRAGANSKGRRGSQNSSEHRPPASSTSEDVKASPSSANKRKNKPLSDMELNSSSEDSKGSKRVRTNSMGSATGPLPGTKVEPTVLDRNCPSPVLIDCPHPNCNKKYKHINGLKYHQAHAHTDDDSKPEADGDSEYGEEPILHADLGSCNGASVSQKGSLSPARSATPKVRLVEPHSPSPSSKFSTKGLCKKKLSGEGDTDLGALSNDGSDDGPSVMDETSNDAFDSLERKCMEKEKCKKPSSLKPEKIPSKSLKSARPIAPAIPPQQIYTFQTATFTAASPGSSSGLTATVAQAMPNSPQLKPIQPKPTVMGEPFTVNPALTPAKDKKKKDKKKKESSKELESPLTPGKVCRAEEGKSPFRESSGDGMKMEGLLNGSSDPHQSRLASIKAEADKIYSFTDNAPSPSIGGSSRLENTTPTQPLTPLHVVTQNGAEASSVKTNSPAYSDISDAGEDGEGKVDSVKSKDAEQLVKEGAKKTLFPPQPQSKDSPYYQGFESYYSPSYAQSSPGALNPSSQAGVESQALKTKRDEEPESIEGKVKNDICEEKKPELSSSSQQPSVIQQRPNMYMQSLYYNQYAYVPPYGYSDQSYHTHLLSTNTAYRQQYEEQQKRQSLEQQQRGVDKKAEMGLKEREAALKEEWKQKPSIPPTLTKAPSLTDLVKSGPGKAKEPGADPAKSVIIPKLDDSSKLPGQAPEGLKVKLSDASHLSKEASEAKTGAECGRQAEMDPILWYRQEAEPRMWTYVYPAKYSDIKSEDERWKEERDRKLKEERSRSKDSVPKEDGKESTSSDCKLPTSEESRLGSKEPRPSVHVPVSSPLTQHQSYIPYMHGYSYSQSYDPNHPSYRSMPAVMMQNYPGSYLPSSYSFSPYGSKVSGGEDADKARASPSVTCKSSSESKALDILQQHASHYKSKSPTISDKTSQERDRGGCGVVGGGGSCSSVGGASGGERSVDRPRTSPSQRLMSTHHHHHHLGYSLLPAQYNLPYAAGLSSTAIVASQQGSTPSLYPPPRR

SEQ ID NO: 764666 - protein, 1309 aa, Homo sapiens
RSGDGANAGGLVAAIAPKGSEKAAKASRSVAGSKKEKENSSSKARGRSEGVGTCSEKDPGVLQPVPLGGRGGQYDGSAGVDTGAVEPLGSIAIEPGAALNPLGTKPEPEEGENECRLLKKVKSEKMESPVSTPAVLPIHLLVPVVNNDISSPCEQIMVRTRSVGVNTCDVALATEPECLGPCEPGTSVNLERVSDVEAHAGHSRARRNLRAIWFLRLGAINLVIAAVDAHSKTICSVHSFVLYIDMIGHPPGFCDSPTSDLEMRNGRGRGKRMRPNSNTPVNETATASDSKGTSNSSKTRAGANSKGRRGSQNSSEHRPPASSTSEDVKASPSSANKRKNKPLSDMELNSSSEDSKGSKRVRTNSMGSATGPLPGTKVEPTVLDRNCPSPVLIDCPHPNCNKKYKHINGLKYHQAHAHTDDDSKPEADGDSEYGEEPILHADLGSCNGASVSQKGSLSPARSATPKVRLVEPHSPSPSSKFSTKGLCKKKLSGEGDTDLGALSNDGSDDGPSVMDETSNDAFDSLERKCMEKEKCKKPSSLKPEKIPSKSLKSARPIAPAIPPQQIYTFQTATFTAASPGSSSGLTATVAQAMPNSPQLKPIQPKPTVMGEPFTVNPALTPAKDKKKKDKKKKESSKELESPLTPGKVCRAEEGKSPFRESSGDGMKMEGLLNGSSDPHQSRLASIKAEADKIYSFTDNAPSPSIGGSSRLENTTPTQPLTPLHVVTQNGAEASSVKTNSPAYSDISDAGEDGEGKVDSVKSKDAEQLVKEGAKKTLFPPQPQSKDSPYYQGFESYYSPSYAQSSPGALNPSSQAGVESQALKTKRDEEPESIEGKVKNDICEEKKPELSSSSQQPSVIQQRPNMYMQSLYYNQYAYVPPYGYSDQSYHTHLLSTNTAYRQQYEEQQKRQSLEQQQRGVDKKAEMGLKEREAALKEEWKQKPSIPPTLTKAPSLTDLVKSGPGKAKEPGADPAKSVIIPKLDDSSKLPGQAPEGLKVKLSDASHLSKEASEAKTGAECGRQAEMDPILWYRQEAEPRMWTYVYPAKYSDIKSEDERWKEERDRKLKEERSRSKDSVPKEDGKESTSSDCKLPTSEESRLGSKEPRPSVHVPVSSPLTQHQSYIPYMHGYSYSQSYDPNHPSYRSMPAVMMQNYPGSYLPSSYSFSPYGSKVSGGEDADKARASPSVTCKSSSESKALDILQQHASHYKSKSPTISDKTSQERDRGGCGVVGGGGSCSSVGGASGGERSVDRPRTSPSQRLMSTHHHHHHLGYSLLPAQYNLPYAAGLSSTAIVASQQGSTPSLYPPPRR

SEQ ID NO: 764667 - protein, 1086 aa, Homo sapiens
MLVVNVTWRNKTYVGTLLDCTRHDWAPPRFCDSPTSDLEMRNGRGRGKRMRPNSNTPVNETATASDSKGTSNSSKTRAGANSKGRRGSQNSSEHRPPASSTSEDVKASPSSANKRKNKPLSDMELNSSSEDSKGSKRVRTNSMGSATGPLPGTKVEPTVLDRNCPSPVLIDCPHPNCNKKYKHINGLKYHQAHAHTDDDSKPEADGDSEYGEEPILHADLGSCNGASVSQKGSLSPARSATPKVRLVEPHSPSPSSKFSTKGLCKKKLSGEGDTDLGALSNDGSDDGPSVMDETSNDAFDSLERKCMEKEKCKKPSSLKPEKIPSKSLKSARPIAPAIPPQQIYTFQTATFTAASPGSSSGLTATVAQAMPNSPQLKPIQPKPTVMGEPFTVNPALTPAKDKKKKDKKKKESSKELESPLTPGKVCRAEEGKSPFRESSGDGMKMEGLLNGSSDPHQSRLASIKAEADKIYSFTDNAPSPSIGGSSRLENTTPTQPLTPLHVVTQNGAEASSVKTNSPAYSDISDAGEDGEGKVDSVKSKDAEQLVKEGAKKTLFPPQPQSKDSPYYQGFESYYSPSYAQSSPGALNPSSQAGVESQALKTKRDEEPESIEGKVKNDICEEKKPELSSSSQQPSVIQQRPNMYMQSLYYNQYAYVPPYGYSDQSYHTHLLSTNTAYRQQYEEQQKRQSLEQQQRGVDKKAEMGLKEREAALKEEWKQKPSIPPTLTKAPSLTDLVKSGPGKAKEPGADPAKSVIIPKLDDSSKLPGQAPEGLKVKLSDASHLSKEASEAKTGAECGRQAEMDPILWYRQEAEPRMWTYVYPAKYSDIKSEDERWKEERDRKLKEERSRSKDSVPKEDGKESTSSDCKLPTSEESRLGSKEPRPSVHVPVSSPLTQHQSYIPYMHGYSYSQSYDPNHPSYRSMPAVMMQNYPGSYLPSSYSFSPYGSKVSGGEDADKARASPSVTCKSSSESKALDILQQHASHYKSKSPTISDKTSQERDRGGCGVVGGGGSCSSVGGASGGERSVDRPRTSPSQRLMSTHHHHHHLGYSLLPAQYNLPYAAGLSSTAIVASQQGSTPSLYPPPRR

SEQ ID NO: 764668 - protein, 1048 aa, Homo sapiens
RSGDGANAGGLVAAIAPKGSEKAAKASRSVAGSKKEKENSSSKARGRSEGVGTCSEKDPGVLQPVPLGGRGGQYDGSAGVDTGAVEPLGSIAIEPGAALNPLGTKPEPEEGENECRLLKKVKSEKMESPVSTPAVLPIHLLVPVVNNDISSPCEQIMVRTRSVGVNTCDVALATEPECLGPCEPGTSVNLEGIVWQETEDGMLVVNVTWRNKTYVGTLLDCTRHDWAPPRFCDSPTSDLEMRNGRGRGKRMRPNSNTPVNETATASDSKGTSNSSKTRAGANSKGRRGSQNSSEHRPPASSTSEDVKASPSSANKRKNKPLSDMELNSSSEDSKGSKRVRTNSMGSATGPLPGTKVEPTVLDRNCPSPVLIDCPHPNCNKKYKHINGLKYHQAHAHTDDDSKPEADGDSEYGEEPILHADLGSCNGASVSQKGSLSPARSATPKVRLVEPHSPSPSSKFSTKGLCKKKLSGEGDTDLGALSNDGSDDGPSVMDETSNDAFDSLERKCMEKEKCKKPSSLKPEKIPSKSLKSARPIAPAIPPQQIYTFQTATFTAASPGSSSGLTATVAQAMPNSPQLKPIQPKPTVMGEPFTVNPALTPAKDKKKKDKKKKESSKELESPLTPGKVCRAEEGKSPFRESSGDGMKMEGLLNGSSDPHQSRLASIKAEADKIYSFTDNAPSPSIGGSSRLENTTPTQPLTPLHVVTQNGAEASSVKTNSPAYSDISDAGEDGEGKVDSVKSKDAEQLVKEGAKKTLFPPQPQSKDSPYYQGFESYYSPSYAQSSPGALNPSSQAGVESQALKTKRDEERSRSKDSVPKEDGKESTSSDCKLPTSEESRLGSKEPRPSVHVPVSSPLTQHQSYIPYMHGYSYSQSYDPNHPSYRSMPAVMMQNYPGSYLPSSYSFSPYGSKVSGGEDADKARASPSVTCKSSSESKALDILQQHASHYKSKSPTISDKTSQERDRGGCGVVGGGGSCSSVGGASGGERSVDRPRTSPSQRLMSTHHHHHHLGYSLLPAQYNLPYAAGLSSTAIVASQQGSTPSLYPPPRR

SEQ ID NO: 764669 - protein, 1287 aa, Homo sapiens; identical to SEQ ID NO: 764665

SEQ ID NO: 764670 - protein, 1287 aa, Homo sapiens; identical to SEQ ID NO: 764665

SEQ ID NO: 764671 - protein, 817 aa, Homo sapiens
RSGDGANAGGLVAAIAPKGSEKAAKASRSVAGSKKEKENSSSKARGRSEGVGTCSEKDPGVLQPVPLGGRGGQYDGSAGVDTGAVEPLGSIAIEPGAALNPLGTKPEPEEGENECRLLKKVKSEKMESPVSTPAVLPIHLLVPVVNNDISSPCEQIMVRTRSVGVNTCDVALATEPECLGPCEPGTSVNLEGIVWQETEDGMLVVNVTWRNKTYVGTLLDCTRHDWAPPRFCDSPTSDLEMRNGRGRGKRMRPNSNTPVNETATASDSKGTSNSSKTRAGANSKGRRGSQNSSEHRPPASSTSEDVKASPSSANKRKNKPLSDMELNSSSEDSKGSKRVRTNSMGSATGPLPGTKVEPTVLDRNCPSPVLIDCPHPNCNKKYKHINGLKYHQAHAHTDDDSKPEADGDSEYGEEPILHADLGSCNGASVSQKGSLSPARSATPKVRLVEPHSPSPSSKFSTKGLCKKKLSGEGDTDLGALSNDGSDDGPSVMDETSNDAFDSLERKCMEKEKCKKPSSLKPEKIPSKSLKSARPIAPAIPPQQIYTFQTATFTAASPGSSSGLTATVAQAMPNSPQLKPIQPKPTVMGEPFTVNPALTPAKDKKKKDKKKKESSKELESPLTPGKVCRAEEGKSPFRESSGDGMKMEGLLNGSSDPHQSRLASIKAEADKIYSFTDNAPSPSIGGSSRLENTTPTQPLTPLHVVTQNGAEASSVKTNSPAYSDISDAGEDGEGKVDSVKSKDAEQLVKEGAKKTLFPPQPQSKDSPYYQGFESYYSPSYAQSSPGALNPIQPKPTVMGEPFTVNPALTPAKDKKKKD

SEQ ID NO: 764672 - protein, 701 aa, Homo sapiens
MGEPFTVNPALTPAKDKKKKDKKKKESSKELESPLTPGKVCRAEEGKSPFRESSGDGMKMEGLLNGSSDPHQSRLASIKAEADKIYSFTDNAPSPSIGGSSRLENTTPTQPLTPLHVVTQNGAEASSVKTNSPAYSDISDAGEDGEGKVDSVKSKDAEQLVKEGAKKTLFPPQPQSKDSPYYQGFESYYSPSYAQSSPGALNPSSQAGVESQALKTKRDEEPESIEGKVKNDICEEKKPELSSSSQQPSVIQQRPNMYMQSLYYNQYAYVPPYGYSDQSYHTHLLSTNTAYRQQYEEQQKRQSLEQQQRGVDKKAEMGLKEREAALKEEWKQKPSIPPTLTKAPSLTDLVKSGPGKAKEPGADPAKSVIIPKLDDSSKLPGQAPEGLKVKLSDASHLSKEASEAKTGAECGRQAEMDPILWYRQEAEPRMWTYVYPAKYSDIKSEDERWKEERDRKLKEERSRSKDSVPKEDGKESTSSDCKLPTSEESRLGSKEPRPSVHVPVSSPLTQHQSYIPYMHGYSYSQSYDPNHPSYRSMPAVMMQNYPGSYLPSSYSFSPYGSKVSGGEDADKARASPSVTCKSSSESKALDILQQHASHYKSKSPTISDKTSQERDRGGCGVVGGGGSCSSVGGASGGERSVDRPRTSPSQRLMSTHHHHHHLGYSLLPAQYNLPYAAGLSSTAIVASQQGSTPSLYPPPRR

SEQ ID NO: 764673 - protein, 838 aa, Homo sapiens
AVLGDVLSSSHLISSSFEATDDIQPNSSVYKYMILYSSVYNLHVGQYKLCFLVTHILFEGPLAMGGYLFLRPWNNTSKPLLIQSPIAPAIPPQQIYTFQTATFTAASPGSSSGLTATVAQAMPNSPQLKPIQPKPTVMGEPFTVNPALTPAKDKKKKDKKKKESSKELESPLTPGKVCRAEEGKSPFRESSGDGMKMEGLLNGSSDPHQSRLASIKAEADKIYSFTDNAPSPSIGGSSRLENTTPTQPLTPLHVVTQNGAEASSVKTNSPAYSDISDAGEDGEGKVDSVKSKDAEQLVKEGAKKTLFPPQPQSKDSPYYQGFESYYSPSYAQSSPGALNPSSQAGVESQALKTKRDEEPESIEGKVKNDICEEKKPELSSSSQQPSVIQQRPNMYMQSLYYNQYAYVPPYGYSDQSYHTHLLSTNTAYRQQYEEQQKRQSLEQQQRGVDKKAEMGLKEREAALKEEWKQKPSIPPTLTKAPSLTDLVKSGPGKAKEPGADPAKSVIIPKLDDSSKLPGQAPEGLKVKLSDASHLSKEASEAKTGAECGRQAEMDPILWYRQEAEPRMWTYVYPAKYSDIKSEDERWKEERDRKLKEERSRSKDSVPKEDGKESTSSDCKLPTSEESRLGSKEPRPSVHVPVSSPLTQHQSYIPYMHGYSYSQSYDPNHPSYRSMPAVMMQNYPGSYLPSSYSFSPYGSKVSGGEDADKARASPSVTCKSSSESKALDILQQHASHYKSKSPTISDKTSQERDRGGCGVVGGGGSCSSVGGASGGERSVDRPRTSPSQRLMSTHHHHHHLGYSLLPAQYNLPYAAGLSSTAIVASQQGSTPSLYPPPRR

SEQ ID NO: 764674 - protein, 298 aa, Homo sapiens
RSGDGANAGGLVAAIAPKGSEKAAKASRSVAGSKKEKENSSSKARGRSEGVGTCSEKDPGVLQPVPLGGRGGQYDGSAGVDTGAVEPLGSIAIEPGAALNPLGTKPEPEEGENECRLLKKVKSEKMESPVSTPAVLPIHLLVPVVNNDISSPCEQIMVRTRSVGVNTCDVALATEPECLGPCEPGTSVNLEGIVWQETEDGMLVVNVTWRNKTYVGTLLDCTRHDWAPPRFCDSPTSDLEMRNGRGRGKRMRPNSNTPVNETATASDSKGTSNSSKTRAGANSKGRRGSQTTNIGVRS

SEQ ID NO: 764675 - protein, 143 aa, Homo sapiens [sequence omitted]

SEQ ID NO: 764676 - protein, 1354 aa, Homo sapiens
MSTGDSFETRFEKMDNLLRDPKSEVNSDCLLDGLDALVYDLDFPALRKNKNIDNFLSRYKDTINKIRDLRMKAEDYEVVKVIGRGAFGEVQLVRHKSTRKVYAMKLLSKFEMIKRSDSAFFWEERDIMAFANSPWVVQLFYAFQDDRYLYMVMEYMPGGDLVNLMSNYDVPEKWARFYTAEVVLALDAIHSMGFIHRDVKPDNMLLDKSGHLKLADFGTCMKMNKEGMVRCDTAVGTPDYISPEVLKSQGGDGYYGRECDWWSVGVFLYEMLVGDTPFYADSLVGTYSKIMNHKNSLTFPDDNDISKEAKNLICAFLTDREVRLGRNGVEEIKRHLFFKNDQWAWETLRDTVAPVVPDLSSDIDTSNFDDLEEDKGEEETFPIPKAFVGNQLPFVGFTYYSNRRYLSSANPNDNRTSSNADKSLQESLQKTIYKLEEQLHNEMQLKDEMEQKCRTSNIKLDKIMKELDEEGNQRRNLESTVSQIEKEKMLLQHRINEYQRKAEQENEKRRNVENEVSTLKDQLEDLKKVSQNSQLANEKLSQLQKQLEEANDLLRTESDTAVRLRKSHTEMSKSISQLESLNRELQERNRILENSKSQTDKDYYQLQAILEAERRDRGHDSEMIGDLQARITSLQEEVKHLKHNLEKVEGERKEAQDMLNHSEKEKNNLEIDLNYKLKSLQQRLEQEVNEHKVTKARLTDKHQSIEEAKSVAMCEMEKKLKEEREAREKAENRVVQIEKQCSMLDVDLKQSQQKLEHLTGNKERMEDEVKNLTLQLEQESNKRLLLQNELKTQAFEADNLKGLEKQMKQEINTLLEAKRLLEFELAQLTKQYRGNEGQMRELQDQLEAEQYFSTLYKTQVKELKEEIEEKNRENLKKIQELQNEKETLATQLDLAETKAESEQLARGLLEEQYFELTQESKKAASRNRQEITDKDHTVSRLEEANSMLTKDIEILRRENEELTEKMKKAEEEYKLEKEEEISNLKAAFEKNINTERTLKTQAVNKLAEIMNRKDFKIDRKKANTQDLRKKEKENRKLQLELNQEREKFNQMVVKHQKELNDMQAQLVEECAHRNELQMQLASKESDIEQLRAKLLDLSDSTSVASFPSADETDGNLPESRIEGWLSVPNRGNIKRYGWKKQYVVVSSKKILFYNDEQDKEQSNPSMVLDIDKLFHVRPVTQGDVYRAETEEIPKIFQILYANEGECRKDVEMEPVQQAEKTNFQNHKGHEFIPTLYHFPANCDACAKPLWHVFKPPPALECRRCHVKCHRDHLDKKEDLICPCKVSYDVTSARDMLLLACSQDEQKKWVTHLVKKIPKNPPSGFVRASPRTLSTRSTANQSFRKVVKNTSGKTS

SEQ ID NO: 764677 - protein, 1354 aa, Homo sapiens; identical to SEQ ID NO: 764676

SEQ ID NO: 764678 - protein, 1354 aa, Homo sapiens; identical to SEQ ID NO: 764676

SEQ ID NO: 764679 - protein, 1379 aa, Homo sapiens
MSTGDSFETRFEKMDNLLRDPKSEVNSDCLLDGLDALVYDLDFPALRKNKNIDNFLSRYKDTINKIRDLRMKAEDYEVVKVIGRGAFGEVQLVRHKSTRKVYAMKLLSKFEMIKRSDSAFFWEERDIMAFANSPWVVQLFYAFQDDRYLYMVMEYMPGGDLVNLMSNYDVPEKWARFYTAEVVLALDAIHSMGFIHRDVKPDNMLLDKSGHLKLADFGTCMKMNKEGMVRCDTAVGTPDYISPEVLKSQGGDGYYGRECDWWSVGVFLYEMLVGDTPFYADSLVGTYSKIMNHKNSLTFPDDNDISKEAKNLICAFLTDREVRLGRNGVEEIKRHLFFKNDQWAWETLRDTVAPVVPDLSSDIDTSNFDDLEEDKGEEETFPIPKAFVGNQLPFVGFTYYSNRRYLSSANPNDNRTSSNADKSLQESLQKTIYKLEEQLHNEMQLKDEMEQKCRTSNIKLDKIMKELDEEGNQRRNLESTVSQIEKEKMLLQHRINEYQRKAEQENEKRRNVENEVSTLKDQLEDLKKVSQNSQLANEKLSQLQKQLEEANDLLRTESDTAVRLRKSHTEMSKSISQLESLNRELQERNRILENSKSQTDKDYYQLQAILEAERRDRGHDSEMIGDLQARITSLQEEVKHLKHNLEKVEGERKEAQDMLNHSEKEKNNLEIDLNYKLKSLQQRLEQEVNEHKVTKARLTDKHQSIEEAKSVAMCEMEKKLKEEREAREKAENRVVQIEKQCSMLDVDLKQSQQKLEHLTGNKERMEDEVKNLTLQLEQESNKRLLLQNELKTQAFEADNLKGLEKQMKQEINTLLEAKRLLEFELAQLTKQYRGNEGQMRELQDQLEAEQYFSTLYKTQVKELKEEIEEKNRENLKKIQELQNEKETLATQLDLAETKAESEQLARGLLEEQYFELTQESKKAASRNRQEITDKDHTVSRLEEANSMLTKDIEILRRENEELTEKMKKAEEEYKLEKEEEISNLKAAFEKNINTERTLKTQAVNKLAEIMNRKDFKIDRKKANTQDLRKKEKENRKLQLELNQEREKFNQMVVKHQKELNDMQAQLVEECAHRNELQMQLASKESDIEQLRAKLLDLSDSTSVASFPSADETDGNLPESRIEGWLSVPNRGNIKRYGWKKQYVVVSSKKILFYNDEQDKEQSNPSMVLDIDKLFHVRPVTQGDVYRAETEEIPKIFQILYANEGECRKDVEMEPVQQAEKTNFQNHKGHEFIPTLYHFPANCDACAKPLWHVFKPPPALECRRCHVKCHRDHLDKKEDLICPCKVSYDVTSARDMLLLACSQDEQKKWVTHLVKKIPKNPPSGFVRASPRTLSTRSTANQSFRKVVKNTSGKTSHVRYPVAWQVCTARRWHLEPPFPFS

SEQ ID NO: 764680 - protein, 1284 aa, Homo sapiens [sequence omitted]

SEQ ID NO: 764681 - protein, 1240 aa, Homo sapiens
MSTGDSFETRFEKMDNLLRDPKSEVNSDCLLDGLDALVYDLDFPALRKNKNIDNFLSRYKDTINKIRDLRMKAEDYEVVKVIGRGAFGEVQLVRHKSTRKVYAMKLLSKFEMIKRSDSAFFWEERDIMAFANSPWVVQLFYAFQDDRYLYMVMEYMPGGDLVNLMSNYDVPEKWARFYTAEVVLALDAIHSMGFIHRDVKPDNMLLDKSGHLKLADFGTCMKMNKEGMVRCDTAVGTPDYISPEVLKSQGGDGYYGRECDWWSVGVFLYEMLVGDTPFYADSLVGTYSKIMNHKNSLTFPDDNDISKEAKNLICAFLTDREVRLGRNGVEEIKRHLFFKNDQWAWETLRDTVAPVVPDLSSDIDTSNFDDLEEDKGEEETFPIPKAFVGNQLPFVGFTYYSNRRYLSSANPNDNRTSSNADKSLQESLQKTIYKLEEQLHNEMQLKDEMEQKCRTSNIKLDKIMKELDEEGNQRRNLESTVSQIEKEKMLLQHRINEYQRKAEQENEKRRNVENEVSTLKDQLEDLKKVSQNSQLANEKLSQLQKQLEEANDLLRTESDTAVRLRKSHTEMSKSISQLESLNRELQERNRILENSKSQTDKDYYQLQAILEAERRDRGHDSEMIGDLQARITSLQEEVKHLKHNLEKVEGERKEAQDMLNHSEKEKNNLEIDLNYKLKSLQQRLEQEVNEHKVTKARLTDKHQSIEEAKSVAMCEMEKKLKEEREAREKAENRVVQIEKQCSMLDVDLKQSQQKLEHLTGNKERMEDEVKNLTLQLEQESNKRLLLQNELKTQAFEADNLKGLEKQMKQEINTLLEAKRLLEFELAQLTKQYRGNEGQMRELQDQLEAEQYFSTLYKTQVKELKEEIEEKNRENLKKIQELQNEKETLATQLDLAETKAESEQLARGLLEEQYFELTQESKKAASRNRQEITDKDHTVSRLEEANSMLTKDIEILRRENEELTEKMKKAEEEYKLEKEEEISNLKAAFEKNINTERTLKTQAVNKLAEIMNRKDFKIDRKKANTQDLRKKEKENRKLQLELNQEREKFNQMVVKHQKELNDMQAQLVEECAHRNELQMQLASKESDIEQLRAKLLDLSDSTSVASFPSADETDGNLPESRIEGWLSVPNRGNIKRYGWKKQYVVVSSKKILFYNDEQDKEQSNPSMVLDIDKLFHVRPVTQGDVYRAETEEIPKIFQILYANEGECRKDVEMEPVQQAEKTNFVMPVPNLSGMFLSHPLP

SEQ ID NO: 764682 - protein, 912 aa, Homo sapiens [sequence omitted]

SEQ ID NO: 764683 - protein, 891 aa, Homo sapiens
MKELDEEGNQRRNLESTVSQIEKEKMLLQHRINEYQRKAEQENEKRRNVENEVSTLKDQLEDLKKVSQNSQLANEKLSQLQKQLEEANDLLRTESDTAVRLRKSHTEMSKSISQLESLNRELQERNRILENSKSQTDKDYYQLQAILEAERRDRGHDSEMIGDLQARITSLQEEVKHLKHNLEKVEGERKEAQDMLNHSEKEKNNLEIDLNYKLKSLQQRLEQEVNEHKVTKARLTDKHQSIEEAKSVAMCEMEKKLKEEREAREKAENRVVQIEKQCSMLDVDLKQSQQKLEHLTGNKERMEDEVKNLTLQLEQESNKRLLLQNELKTQAFEADNLKGLEKQMKQEINTLLEAKRLLEFELAQLTKQYRGNEGQMRELQDQLEAEQYFSTLYKTQVKELKEEIEEKNRENLKKIQELQNEKETLATQLDLAETKAESEQLARGLLEEQYFELTQESKKAASRNRQEITDKDHTVSRLEEANSMLTKDIEILRRENEELTEKMKKAEEEYKLEKEEEISNLKAAFEKNINTERTLKTQAVNKLAEIMNRKDFKIDRKKANTQDLRKKEKENRKLQLELNQEREKFNQMVVKHQKELNDMQAQLVEECAHRNELQMQLASKESDIEQLRAKLLDLSDSTSVASFPSADETDGNLPESRIEGWLSVPNRGNIKRYGWKKQYVVVSSKKILFYNDEQDKEQSNPSMVLDIDKLFHVRPVTQGDVYRAETEEIPKIFQILYANEGECRKDVEMEPVQQAEKTNFQNHKGHEFIPTLYHFPANCDACAKPLWHVFKPPPALECRRCHVKCHRDHLDKKEDLICPCKVSYDVTSARDMLLLACSQDEQKKWVTHLVKKIPKNPPSGFVRASPRTLSTRSTANQSFRKVVKNTSGKTS

SEQ ID NO: 764684 - protein, 784 aa, Homo sapiens
MSKSISQLESLNRELQERNRILENSKSQTDKDYYQLQAILEAERRDRGHDSEMIGDLQARITSLQEEVKHLKHNLEKVEGERKEAQDMLNHSEKEKNNLEIDLNYKLKSLQQRLEQEVNEHKVTKARLTDKHQSIEEAKSVAMCEMEKKLKEEREAREKAENRVVQIEKQCSMLDVDLKQSQQKLEHLTGNKERMEDEVKNLTLQLEQESNKRLLLQNELKTQAFEADNLKGLEKQMKQEINTLLEAKRLLEFELAQLTKQYRGNEGQMRELQDQLEAEQYFSTLYKTQVKELKEEIEEKNRENLKKIQELQNEKETLATQLDLAETKAESEQLARGLLEEQYFELTQESKKAASRNRQEITDKDHTVSRLEEANSMLTKDIEILRRENEELTEKMKKAEEEYKLEKEEEISNLKAAFEKNINTERTLKTQAVNKLAEIMNRKDFKIDRKKANTQDLRKKEKENRKLQLELNQEREKFNQMVVKHQKELNDMQAQLVEECAHRNELQMQLASKESDIEQLRAKLLDLSDSTSVASFPSADETDGNLPESRIEGWLSVPNRGNIKRYGWKKQYVVVSSKKILFYNDEQDKEQSNPSMVLDIDKLFHVRPVTQGDVYRAETEEIPKIFQILYANEGECRKDVEMEPVQQAEKTNFQNHKGHEFIPTLYHFPANCDACAKPLWHVFKPPPALECRRCHVKCHRDHLDKKEDLICPCKVSYDVTSARDMLLLACSQDEQKKWVTHLVKKIPKNPPSGFVRASPRTLSTRSTANQSFRKVVKNTSGKTS

SEQ ID NO: 764685 - protein, 408 aa, Homo sapiens [sequence omitted]

SEQ ID NO: 764686 - protein, 143 aa, Homo sapiens [sequence omitted]

SEQ ID NO: 764687 - protein, 197 aa, Homo sapiens [sequence omitted]

SEQ ID NO: 764688 - protein, 143 aa, Homo sapiens [sequence omitted]

SEQ ID NO: 764689 - protein, 143 aa, Homo sapiens [sequence omitted]

SEQ ID NO: 764690 - protein, 171 aa, Homo sapiens [sequence omitted]

SEQ ID NO: 764691 - protein, 185 aa, Homo sapiens
IKKSFIFAERHFQPESGAPSGSLNLRDGGRLPCPTPSLPSLVDWSLSPANLVAGWGFRANNPPFSFLLDPAPLKSFVPTERFLFEPRRVEERLGLSAEVGKAPAPTEGGTQEASQDLICLQCQIDGLALASDYLQLRWMFTGTQPEFASLHFIPERTCFPHFTFGEDTSNCGHTQKRLPAPFDVS

SEQ ID NO: 764692 - protein, 193 aa, Homo sapiens
LSATRRATRRPQPWVLGLRGRGGCARTCGAGRERRLPGPALDTEPRWDPHRLCEALRAPGRRHEGAGQPRATSGGPASPPGRSRDPWGHISGCGDPPGAFRGSGRNCQGHLEPGPASVGLQGTPGWLRCALAGRPGAAAAEFAGIAGPPPLPPAACSAPGSRPTWTHWAPWSPTCRRRCCPLCSTWACSSSMC

SEQ ID NO: 764693 - protein, 125 aa, Homo sapiens
MRGGSEWLHPAPLKSFVPTERFLFEPRRVEERLGLSAEVGKAPAPTEGGTQEASQDLICLQCQIDGLALASDYLQLRWMFTGTQPEFASLHFIPERTCFPHFTFGEDTSNCGHTQKRLPAPFDVS

SEQ ID NO: 764694 - protein, 103 aa, Homo sapiens
MPPQLVGGTIWTGMVPQEETLPCLRGLPAPLKSFVPTERFLFEPRRVEERLGLSAEVGKAPAPTEGGTQEASQDLICLQCQIDGLALASDYLQLRFTSDGPVC

SEQ ID NO: 764695 - protein, 1042 aa, Homo sapiens
PTQLYNWAAPEVILQKAATVKSDIYSFSMIMQEILTDDIPWKGLDGSVVKKAVVSGNYLEADVRLPKPYYDIVKSGIHVKQKDRTMNLQDIRYILKNDLKDFTGAQRTQPTESPRVQRYGLHPDVNVYLGLTSEHPRETPDMEIIELKEMGSQPHSPRVHSLFTEGTLDPQAPDPCLMARETQNQDAPCPAPFMAEEASSPSTGQPSLCSFEINEIYSGCLILEDDIEEPPGAASSLEADGPNQVDELKSMEEELDKMEREACCFGSEDESSSKAETEYSFDDWDWQNGSLSSLSLPESTREAKSNLNNMSTTEEYLISKCVLDLKIMQTIMHENDDRLRNIEQILDEVEMKQKEQEERMSLWATSREFTNAYKLPLAVGPPSLNYIPPVLQLSGGQKPDTSGNYPTLPRFPRMLPTLCDPGKQNTDEQFQCTQGAKDSLETSRIQNTSSQGRPRESTAQAKATQFNSALFTLSSHRQGPSASPSCHWDSTRMSVEPVSSEIYNAESRNKDDGKVHLKWKMEVKEMAKKAATGQLTVPPWHPQSSLTLESEAENEPDALLQPPIRSPENTDWQRVIEYHRENDEPRGNGKFDKTGNNDCDSDQHGRQPRLGSFTSIRHPSPRQKEQPEHSEAFQASSDTLVAVEKSYSTSSPIEEDFEGIQGAFAQPQVSGEEKFQMRKILGKNAEILPRSQFQPVRSTEDEQEETSKESPKELKEKDISLTDIQDLSSISYEPDSSFKEASCKTPKINHAPTSVSTPLSPGSVSSAASQYKDCLESITFQVKTEFASCWNSQEFIQTLSDDFISVRERAKKLDSLLTSSETPPSRLTGLKRLSSFIGAGSPSLVKACDSSPPHATQRRSLPKVEAFSQHHIDELPPPSQELLDDIELLKQQQGSSTVLHENTASDGGGTANDQRHLEEQETDSKKEDSSMLLSKETEDLGEDTERAHSTLDEDLERWLQPPEESVELQDLPKGSERETNIKDQKVGEEKRKREDSITPERRKSEGVLGTSEEDELKSCFWKRLGWSESSRIIVLDQSDLSD

SEQ ID NO: 764696 - protein, 112 aa, Homo sapiens
MGSSSPAFRKAQPGTELCLALGQRGPGGIRCRPSPRLHLTISPHLQRMSVNPGALHRAAGLQGTAANPRIKAEAILLTIHSCFSPKSIHNRTVKLMFPLLLQTIVKMIGICP

SEQ ID NO: 764697 - protein, 111 aa, Homo sapiens
PPLFFSYSKAMQQKAQEIKKEKIDIGLHQNEKLLCFKGNGKKVKKQLREWKKIFSNHHLTKVVLVCSGCCNKISFQVTRWLKQQIQLALRIHGFQAFDFNQPQIKNIFKTQ

SEQ ID NO: 764698 - protein, 171 aa, Homo sapiens
MGPTAGCRSSTMRLPSSSSWFTLCSWLSSSCCLKCWGRVGWGAAVRTRMALVAPAWPQPLPADLVFPPHARRVGHEVAPVLLQDAALLLRQGAQLPRAALQCVYRLPRLCPRHDAALCAQDPPPAAGWGERKWGAKGAIGRRSGTLAPGRVRAATQAHLQPPCPTLPPAHQ

SEQ ID NO: 764699 - protein, 515 aa, Homo sapiens
MVLSQEEPDSARGTSEAQPLGPAPTGAAPPPGPGPSDSPEAAVEKVEVELAGPATAEPHEPPEPPEGGWGWLVMLAAMWCNGSVFGIQNACGVLFVSMLETFGSKDDDKMVFKTAWVGSLSMGMIFFCCPIVSVFTDLFGCRKTAVVGAAVGFVGLMSSSFVSSIEPLYLTYGIIFACGCSFAYQPSLVILGHYFKKRLGLVNGIVTAGSSVFTILLPLLLRVLIDSVGLFYTLRVLCIFMFVLFLAGFTYRPLATSTKDKESGGSGSSLFSRKKFSPPKKIFNFAIFKVTAYAVWAVGIPLALFGYFVPYVHLMKHVNERFQDEKNKEVVLMCIGVTSGVGRLLFGRIADYVPGVKKVYLQVLSFFFIGLMSMMIPLCSIFGALIAVCLIMGLFDGCFISIMAPIAFELVGAQDVSQAIGFLLGFMSIPMTVGPPIAGLLRDKLGSYDVAFYLAGVPPLIGGAVLCFIPWIHSKKQREISKTTGKEKMEKMLENQNSLLSSSSGMFKKESDSII

SEQ ID NO: 764700 - protein, 325 aa, Homo sapiens
MVLSQEEPDSARGTSEAQPLGPAPTGAAPPPGPGPSDSPEAAVEKVEVELAGPATAEPHEPPEPPEGGWGWLVMLAAMWCNGSVFGIQNACGVLFVSMLETFGSKDDDKMVFKTAWVGSLSMGMIFFCCPIVSVFTDLFGCRKTAVVGAAVGFVGLMSSSFVSSIEPLYLTYGIIFACGCSFAYQPSLVILGHYFKKRLGLVNGIVTAGSSVFTILLPLLLRVLIDSVGLFYTLRVLCIFMFVLFLAGFTYRPLATSTKDKESGGSGSSLFSRKKFSPPKKIFNFAIFKVTAYAVWAVGIPLALFGYFVPYVHLAKFSFVILKYE

SEQ ID NO: 764701 - protein, 180 aa, Homo sapiens
MVLSQEEPDSARGTSEAQPLGPAPTGAAPPPGPGPSDSPEAAVEKVEVELAGPATAEPHEPPEPPEGGWGWLVMLAAMWCNGSVFGIQNACGVLFVSMLETFGSKDDDKMVFKTAWVGSLSMGMIFFCCPIVSVFTDLFGCRKTAVVGAAVGFVGLMSSSFVRIRIPNPCATDWYGSMAC

SEQ ID NO: 764702 - protein, 526 aa, Homo sapiens
MVLSQEEPDSARGTSEAQPLGPAPTGAAPPPGPGPSDSPEAAVEKVEVELAGPATAEPHEPPEPPEGGWGWLVMLAAMWCNGSVFGIQNACGVLFVSMLETFGSKDDDKMVFKTAWVGSLSMGMIFFCCPIVSVFTDLFGCRKTAVVGAAVGFVGLMSSSFVSSIEPLYLTYGIIFACGCSFAYQPSLVILGHYFKKRLGLVNGIVTAGSSVFTILLPLLLRVLIDSVGLFYTLRVLCIFMFVLFLAGFTYRPLATSTKDKESGGSGSSLFSRKKFSPPKKIFNFAIFKVTAYAVWAVGIPLALFGYFVPYVHLIINICCNLTVQMKHVNERFQDEKNKEVVLMCIGVTSGVGRLLFGRIADYVPGVKKVYLQVLSFFFIGLMSMMIPLCSIFGALIAVCLIMGLFDGCFISIMAPIAFELVGAQDVSQAIGFLLGFMSIPMTVGPPIAGLLRDKLGSYDVAFYLAGVPPLIGGAVLCFIPWIHSKKQREISKTTGKEKMEKMLENQNSLLSSSSGMFKKESDSII

SEQ ID NO: 764703 - protein, 320 aa, Homo sapiens
MVLSQEEPDSARGTSEAQPLGPAPTGAAPPPGPGPSDSPEAAVEKVEVELAGPATAEPHEPPEPPEGGWGWLVMLAAMWCNGSVFGIQNACGVLFVSMLETFGSKDDDKMVFKTAWVGSLSMGMIFFCCPIVSVFTDLFGCRKTAVVGAAVGFVGLMSSSFVSSIEPLYLTYGIIFACGCSFAYQPSLVILGHYFKKRLGLVNGIVTAGSSVFTILLPLLLRVLIDSVGLFYTLRVLCIFMFVLFLAGFTYRPLATSTKDKESGGSGSSLFSRKKFSPPKKIFNFAIFKVTAYAVWAVGIPLALFGYFVPYVHLVSMLLH

SEQ ID NO: 764704 - protein, 1465 aa, Homo sapiens
MSLVTVPFYQKRHRHFDQSYRNIQTRYLLDEYASKKRASTQASSQKSLSQRSSSQRASSQTSLGGTICRVCAKRVSTQEDEEQENRSRYQSLVAAYGEAKRQRFLSELAHLEEDVHLARSQARDKLDKYAIQQMMEDKLAWERHTFEERISRAPEILVRLRSHTVWERMSVKLCFTVQGFPTPVVQWYKDGSLICQAAEPGKYRIESNYGVHTLEINRADFDDTATYSAVATNAHGQVSTNAAVVVRRFRGDEEPFRSVGLPIGLPLSSMIPYTHFDVQFLEKFGVTFRREGETVTLKCTMLVTPDLKRVQPRAEWYRDDLLLKESKWTKMFFGEGQASLSFSHLHKDDEGLYTLRIVSRGGVTDHSAFLFVRDADPLVTGAPGAPMDLQCHDANRDYVIVTWKPPNTTTESPVMGYFVDRCEVGTNNWVQCNDAPVKICKYPVTGLFEGRSYIFRVRAVNSAGISRPSRVSDAVAALDPLDLRRLQAVHLEGEKEIAIYQDDLEGDAQVPGPPTGVHASEISRNYVVLSWEPPTPRGKDPLMYFIEKSVVGSGTWQRVNAQTAVRSPRYAVFDLMEGKSYVFRVLSANRHGLSEPSEITSPIQAQDVTVVPSAPGRVLASRNTKTSVVVQWDRPKHEEDLLGYYVDCCVAGTNLWEPCNHKPIGYNRFVVHGLTTGEQYIFRVKAVNAVGMSENSQESDVIKVQAALTVPSHPYGITLLNCDGHSMTLGWKVPKFSGGSPILGYYLDKREVHHKNWHEVNSSPSKPTILTVDGLTEGSLYEFKIAAVNLAGIGEPSDPSEHFKCEAWTMPEPGPAYDLTFCEVRDTSLVMLWKAPVYSGSSPVSGYFVDFREEDAGEWITVDQTTTASRYLKVSDLQQGKTYVFRVRAVNANGVGKPSDTSEPVLVEARPGTKEISAGVDEQGNIYLGFDCQEMTDASQFTWCKSYEEISDDERFKIETVGDHSKLYLKNPDKEDLGTYSVSVSDTDGVSSSFVLDPEELERLMALSNEIKNPTIPLKSELAYEIFDKGRVRFWLQAEHLSPDASYRFIINDREVSDSEIHRIKCDKATGIIEMVMDRFSIENEGTYTVQIHDGKAKSQSSLVLIGDAFKTVLEEAEFQRKEFLRKQGPHFAEYLHWDVTEECEVRLVCKVANTKKETVFKWLKDDALYETETLPNLERGICELLIPKLSKKDHGEYKATLKDDRGQDVSILEIAGKVYDDMILAMSRVCGKSASPLKVLCTPEGIRLQCFMKYFTDEMKVNWCHKDAKISSSEHMRIGGSEEMAWLQICEPTEKDKGKYTFEIFDGKDNHQRSLDLSGQAFDEAFAEFQQFKAAAFAEKNRGRLIGGLPDVVTIMEGKTLNLTCTVFGNPDPEVIWFKNDQDIQLSEHFSVKVEQAKYVSMTIKGVTSEDSGKYSINIKNKYGGEKIDVTVSVYKHGEKIPDMAPPQQAKPKLIPASASAAGQ

SEQ ID NO: 764705 - protein, 333 aa, Homo sapiens
MGKSSGACGFMRYRVWIHEVANTKKETVFKWLKDDALYETETLPNLERGICELLIPKLSKKDHGEYKATLKDDRGQDVSILEIAGKVYDDMILAMSRVCGKSASPLKVLCTPEGIRLQCFMKYFTDEMKVNWCHKDAKISSSEHMRIGGSEEMAWLQICEPTEKDKGKYTFEIFDGKDNHQRSLDLSGQAFDEAFAEFQQFKAAAFAEKNRGRLIGGLPDVVTIMEGKTLNLTCTVFGNPDPEVIWFKNDQDIQLSEHFSVKVEQAKYVSMTIKGVTSEDSGKYSINIKNKYGGEKIDVTVSVYKHGEKIPDMAPPQQAKPKLIPASASAAGQ

SEQ ID NO: 764706 - protein, 1368 aa, Homo sapiens
MSLVTVPFYQKRHRHFDQSYRNIQTRYLLDEYASKKRASTQASSQKSLSQRSSSQRASSQTSLGGTICRVCAKRVSTQEDEEQENRSRYQSLVAAYGEAKRQRFLSELAHLEEDVHLARSQARDKLDKYAIQQMMEDKLAWERHTFEERISRAPEILVRLRSHTVWERMSVKLCFTVQGFPTPVVQWYKDGSLICQAAEPGKYRIESNYGVHTLEINRADFDDTATYSAVATNAHGQVSTNAAVVVRRFRGDEEPFRSVGLPIGLPLSSMIPYTHFDVQFLEKFGVTFRREGETVTLKCTMLVTPDLKRVQPRAEWYRDDLLLKESKWTKMFFGEGQASLSFSHLHKDDEGLYTLRIVSRGGVTDHSAFLFVRDADPLVTGAPGAPMDLQCHDANRDYVIVTWKPPNTTTESPVMGYFVDRCEVGTNNWVQCNDAPVKICKYPVTGLFEGRSYIFRVRAVNSAGISRPSRVSDAVAALDPLDLRRLQAVHLEGEKEIAIYQDDLEGDAQVPGPPTGVHASEISRNYVVLSWEPPTPRGKDPLMYFIEKSVVGSGTWQRVNAQTAVRSPRYAVFDLMEGKSYVFRVLSANRHGLSEPSEITSPIQAQDVTVVPSAPGRVLASRNTKTSVVVQWDRPKHEEDLLGYYVDCCVAGTNLWEPCNHKPIGYNRFVVHGLTTGEQYIFRVKAVNAVGMSENSQESDVIKVQAALTVPSHPYGITLLNCDGHSMTLGWKVPKFSGGSPILGYYLDKREVHHKNWHEVNSSPSKPTILTVDGLTEGSLYEFKIAAVNLAGIGEPSDPSEHFKCEAWTMPEPGPAYDLTFCEVRDTSLVMLWKAPVYSGSSPVSGYFVDFREEDAGEWITVDQTTTASRYLKVSDLQQGKTYVFRVRAVNANGVGKPSDTSEPVLVEARPGTKEISAGVDEQGNIYLGFDCQEMTDASQFTWCKSYEEISDDERFKIETVGDHSKLYLKNPDKEDLGTYSVSVSDTDGVSSSFVLDPEELERLMALSNEIKNPTIPLKSELAYEIFDKGRVRFWLQAEHLSPDASYRFIINDREVSDSEIHRIKCDKATGIIEMVMDRFSIENEGTYTVQIHDGKAKSQSSLVLIGDAFKTVLEEAEFQRKEFLRKQGPHFAEYLHWDVTEECEVRLVCKVANTKKETVFKWLKDDALYETETLPNLERGICELLIPKLSKKDHGEYKATLKDDRGQDVSILEIAGKVYDDMILAMSRVCGKSASPLKVLCTPEGIRLQCFMKYFTDEMKVNWCHKDAKISSSEHMRIGGSEEMAWLQICEPTEKDKGKYTFEIFDGKDNHQRSLDLSGQAFDEAFAEFQQFKAAAFAEKNRGRLIGGLPDVVTIMEGKFSSFILFV

SEQ ID NO: 764707 - protein, 109 aa, Homo sapiens [sequence omitted]

SEQ ID NO: 764708 - protein, 206 aa, Homo sapiens [sequence omitted]

SEQ ID NO: 764709 - protein, 513 aa, Homo sapiens
MKRLLLLFLFFITFSSAFPLVRMMENEENVQLAQAYLNQFYSLEIEGNHLVQSKNRSLIDDKIREMQAFFGLTVTGKLDSNTLEIMKTPRCGVPDVGQYGYTLPGWRKYNLTYRIINYTPDMARAAVDEAIQEGLEVWSKVTPLKFTKISKGIADIMIAFRTRVHGRCPRYFDGPLGVLGHAFPPGPGLGGDTHFDEDENWTKDGAGFNLFLVAAHEFGHALGLSHSNDQTALMFPNYVSLDPRKYPLSQDDINGIQSIYGGLPKEPAKPKEPTIPHACDPDLTFDAITTFRREVMFFKGRHLWRIYYDITDVEFELIASFWPSLPADLQAAYENPRDKILVFKDENFWMIRGYAVLPDYPKSIHTLGFPGRVKKIDAAVCDKTTRKTYFFVGIWCWRFDEMTQTMDKGFPQRVVKHFPGISIRVDAAFQYKGFFFFSRGSKQFEYDIKTKNITRIMRTNTWFQCKEPKNSSFGFDINKEKAHSGGIKILYHKSLSLFIFGIVHLLKNTSIYQ

SEQ ID NO: 764710 - protein, 513 aa, Homo sapiens; identical to SEQ ID NO: 764709

SEQ ID NO: 764711 - protein, 106 aa, Homo sapiens
RTIKRAAGFWARPRFSSVPLRVFLLIGNSCFSLPRNGPQLLLLACWLLCLCRLLQMQRVQMHLLQEELLLLLPCGLCQVCPGLHLQRDVRQVQLLCLMPGQLCSQM

SEQ ID NO: 764712 - protein, 105 aa, Homo sapiens
  misc_feature (3)..(3): Xaa can be any naturally occurring amino acid
  misc_feature (8)..(8): Xaa can be any naturally occurring amino acid
  misc_feature (12)..(13): Xaa can be any naturally occurring amino acid
AGXHTTTXFAAXXTSSVPLRVFLLIGNSCFSLPRNGPQLLLLACWLLCLCRLLQMQRVQMHLLQEELLLLLPCGLCQVCPGLHLQRDVRQVQLLCLMPGQLCSQM

SEQ ID NO: 764713 - protein, 105 aa, Homo sapiens
SSRINAECPLRPGTSSVPLRVFLLIGNSCFSLPRNGPQLLLLACWLLCLCRLLQMQRVQMHLLQEELLLLLPCGLCQVCPGLHLQRDVRQVQLLCLMPGQLCSQM

SEQ ID NO: 764714 - protein, 106 aa, Homo sapiens; identical to SEQ ID NO: 764711

SEQ ID NO: 764715 - protein, 106 aa, Homo sapiens; identical to SEQ ID NO: 764711

SEQ ID NO: 764716 - protein, 106 aa, Homo sapiens; identical to SEQ ID NO: 764711

SEQ ID NO: 764717 - protein, 115 aa, Homo sapiens
KQSYQRRVSITAGDFICPAACFPLDRELLLLLASKWTPTAPARLLAPVPVPAPANAKSANAPPARRVSAGPSLRIWGMGQVRAGNPELCRQGQANDQLPQTPPSTPDSESDLKLP

SEQ ID NO: 764718 - protein, 106 aa, Homo sapiens; identical to SEQ ID NO: 764711

SEQ ID NO: 764719 - protein, 105 aa, Homo sapiens; identical to SEQ ID NO: 764713

SEQ ID NO: 764720 - protein, 106 aa, Homo sapiens; identical to SEQ ID NO: 764711

SEQ ID NO: 764721 - protein, 106 aa, Homo sapiens; identical to SEQ ID NO: 764711

SEQ ID NO: 764722 - protein, 115 aa, Homo sapiens; identical to SEQ ID NO: 764717

SEQ ID NO: 764723 - protein, 115 aa, Homo sapiens; identical to SEQ ID NO: 764717

SEQ ID NO: 764724 - protein, 138 aa, Homo sapiens [sequence omitted]

SEQ ID NO: 764725 - protein, 314 aa, Homo sapiens
MPLEQRSQHCKPEEGLEARGEALGLVGAQAPATEEQQTASSSSTLVEVTLGEVPAADSPSPPHSPQGASSFSTTINYTLWRQSDEGSSNQEEEGPRMFPDLESEFQAAISRKMVELVHFLLLKYRAREPVTKAEMLESVLRNCQDFFPVIFSKASEYLQLVFGIEVVEVVPISHLYILVTCLGLSYDGLLGDNQVMPKTGLLIIVLAIIAIEGDCAPEEKIWEELSMLEVFEGREDSVFAHPRKLLMQDLVQENYLEYRQVPGSDPACYEFLWGPRALIETSYVKVLHHTLKIGGEPHISYPPLHERALREGEE

SEQ ID NO: 764726 - protein, 314 aa, Homo sapiens; identical to SEQ ID NO: 764725

SEQ ID NO: 764727 - protein, 314 aa, Homo sapiens; identical to SEQ ID NO: 764725

SEQ ID NO: 764728 - protein, 314 aa, Homo sapiens; identical to SEQ ID NO: 764725

SEQ ID NO: 764729 - protein, 925 aa, Homo sapiens
MNRFRVSKFRHTEARPPRRESWISDIRAGTAPSCRNHIKSSCSLIAFNSDRPGVLGIVPLQGQGEDKRRVAHLGCHSDLVTDLDFSPFDDFLLATGSADRTVKLWRLPGPGQALPSAPGVVLGPEDLPVEVLQFHPTSDGILVSAAGTTVKVWDAAKQQPLTELAAHGDLVQSAVWSRDGALVGTACKDKQLQIFDPRTKPRASQSTQAHENSRDSRLAWMGTWEHLVSTGFNQMREREVKLWDTRFFSSALASLTLDTSLGCLVPLLDPDSGLLVLAGKGERQLYCYEVVPQQPALSPVTQCVLESVLRGAALVPRQALAVMSCEVLRVLQLSDTAIVPIGYHVPRKAVEFHEDLFPDTAGCVPATDPHGWWAGDNQQVQKVSLNPACRPHPSFTSCLVPPAEPLPDTAQPAVMETPVGDADASEGFSSPPSSLTSPSTPSSLGPSLSSTSGIGTSPSLRSLQSLLGPSSKFRHAQGTVLHRDSHITNLKGLNLTTPGESDGFCANKLRVAVPLLSSGGQVAVLELRKPGRLPDTALPTLQNGAAVTDLAWDPFDPHRLAVAGEDARIRLWRVPAEGLEEVLTTPETVLTGHTEKICSLRFHPLAANVLASSSYDLTVRIWDLQAGADRLKLQGHQDQIFSLAWSPDGQQLATVCKDGRVRVYRPRSGPEPLQEGPGPKGGRGARIVWVCDGRCLLVSGFDSQSERQLLLYEAEALAGGPLAVLGLDVAPSTLLPSYDPDTGLVLLTGKGDTRVFLYELLPESPFFLECNSFTSPDPHKGLVLLPKTECDVREVELMRCLRLRQSSLEPVAFRLPRVRKEFFQDDVFPDTAVIWEPVLSAEAWLQGANGQPWLLSLQPPDMSPVSQAPREAPARRAPSSAQYLEEKSDQQKKEELLNAMVAKLGNREDPLPQDSFEGVDEDEWD

SEQ ID NO: 764730 - protein, 872 aa, Homo sapiens
MNRFRVSKFRHTEARPPRRESWISDIRAGTAPSCRNHIKSSCSLIAFNSDRPGVLGIVPLQGQGEDKRRVAHLGCHSDLVTDLDFSPFDDFLLATGSADRTVKLWRLPGPGQALPSAPGVVLGPEDLPVEVLQFHPTSDGILVSAAGTTVKVWDAAKQQPLTELAAHGDLVQSAVWSRDGALVGTACKDKQLQIFDPRTKPRASQSTQAHENSRDSRLAWMGTWEHLVSTGFNQMREREVKLWDTRFFSSALASLTLDTSLGCLVPLLDPDSGLLVLAGKGERQLYCYEVVPQQPALSPVTQCVLESVLRGAALVPRQALAVMSCEVLRVLQLSDTAIVPIGYHVPRKAVEFHEDLFPDTAGCVPATDPHGWWAGDNQQVQKVSLNPACRPHPSFTSCLVPPAEPLPDTAQPAVMETPVGDADASEGFSSPPSSLTSPSTPSSLGPSLSSTSGIGTSPSLRSLQSLLGPSSKFRHAQGTVLHRDSHITNLKGLNLTTPGESDGFCANKLRVAVPLLSSGGQVAVLELRKPGRLPDTALPTLQNGAAVTDLAWDPFDPHRLAVAGEDARIRLWRVPAEGLEEVLTTPETVLTGHTEKICSLRFHPLAANVLASSSYDLTVRIWDLQAGADRLKLQGHQDQIFSLAWSPDGQQLATVCKDGRVRVYRPRSGPEPLQEGPGPKGGRGARIVWVCDGRCLLVSGFDSQSERQLLLYEAEALAGGPLAVLGLDVAPSTLLPSYDPDTGLVLLTGKGDTRVFLYELLPESPFFLECNSFTSPDPHKGLVLLPKTECDVREVELMRCLRLRQSSLEPVAFRLPRVRKEFFQDDVFPDTAVIWEPVLSAEAWLQGANGQPWLLSLQPPDMSPGPTPPGLL

SEQ ID NO: 764731 - protein, 912 aa, Homo sapiens
MNRFRVSKFRHTEARPPRRESWISDIRAGTAPSCRNHIKSSCSLIAFNSDRPGVLGIVPLQGQGEDKRRVAHLGCHSDLVTDLDFSPFDDFLLATGSADRTVKLWRLPGPGQALPSAPGVVLGPEDLPVEVLQFHPTSDGILVSAAGTTVKVWDAAKQQPLTELAAHGDLVQSAVWSRDGALVGTACKDKQLQIFDPRTKPRASQSTQAHENSRDSRLAWMGTWEHLVSTGFNQMREREVKLWDTRFFSSALASLTLDTSLGCLVPLLDPDSGLLVLAGKGERQLYCYEVVPQQPALSPVTQCVLESVLRGAALVPRQALAVMSCEVLRVLQLSDTAIVPIGYHVPRKAVEFHEDLFPDTAGCVPATDPHGWWAGDNQQVQKVSLNPACRPHPSFTSCLVPPAEPLPDTAQPAVMETPVGDADASEGFSSPPSSLTSPSTPSSLGPSLSSTSGIGTSPSLRSLQSLLGPSSKFRHAQGTVLHRDSHITNLKGLNLTTPGESDGFCANKLRVAVPLLSSGGQVAVLELRKPGRLPDTALPTLQNGAAVTDLAWDPFDPHRLAVAGEDARIRLWRVPAEGLEEVLTTPETVLTGHTEKICSLRFHPLAANVLASSSYDLTVRIWDLQAGADRLKLQGHQDQIFSLAWSPDGQQLATVCKDGRVRVYRPRSGPEPLQEGPGPKGGRGARIVWVCDGRCLLVSGFDSQSERQLLLYEAEALAGGPLAVLGLDVAPSTLLPSYDPDTGLVLLTGKGDTRVFLYELLPESPFFLECNSFTSPDPHKGLVLLPKTECDVREVELMRCLRLRQSSLEPVAFRLPRVRKEFFQDDVFPDTAVIWEPVLSAEAWLQGANGQPWLLSLQPPDMSPGAPRDWVWGGSGMGVGERDRRPRLKFHSCWHAESSGLWEGGVAVSISL

SEQ ID NO: 764732 - protein, 826 aa, Homo sapiens
MNRFRVSKFRHTEARPPRRESWISDIRAGTAPSCRNHIKSSCSLIAFNSDRPGVLGIVPLQGQGEDKRRVAHLGCHSDLVTDLDFSPFDDFLLATGSADRTVKLWRLPGPGQALPSAPGVVLGPEDLPVEVLQFHPTSDGILVSAAGTTVKVWDAAKQQPLTELAAHGDLVQSAVWSRDGALVGTACKDKQLQIFDPRTKPRASQSTQAHENSRDSRLAWMGTWEHLVSTGFNQMREREVKLWDTRFFSSALASLTLDTSLGCLVPLLDPDSGLLVLAGKGERQLYCYEVVPQQPALSPVTQCVLESVLRGAALVPRQALAVMSCEVLRVLQLSDTAIVPIGYHVPRKAVEFHEDLFPDTAGCVPATDPHGWWAGDNQQVQKVSLNPACRPHPSFTSCLVPPAEPLPDTAQPAVMETPVGDADASEGFSSPPSSLTSPSTPSSLGPSLSSTSGIGTSPSLRSLQSLLGPSSKFRHAQGTVLHRDSHITNLKGLNLTTPGESDGFCANKLRVAVPLLSSGGQVAVLELRKPGRLPDTALPTLQNGAAVTDLAWDPFDPHRLAVAGEDARIRLWRVPAEGLEEVLTTPETVLTGHTEKICSLRFHPLAANVLASSSYDLTVRIWDLQAGADRLKLQGHQDQIFSLAWSPDGQQLATVCKDGRVRVYRPRSGPEPLQEGPGPKGGRGARIVWVCDGRCLLVSGFDSQSERQLLLYEAEALAGGPLAVLGLDVAPSTLLPSYDPDTGLVLLTGKGDTRVFLYELLPESPFFLECNSFTSPDPHKVRPPWRLVPDGTTRLPCPLVAMWASTGACGSGVRVLGWGWAWGCAQ

SEQ ID NO: 764733 - protein, 262 aa, Homo sapiens [sequence omitted]

SEQ ID NO: 764734 - protein, 80 aa, Homo sapiens
PSSKFRHAQGTVLHRDSHITNLKGLNLTTPGESDGFCANKLRVAVPLLSSGGQVAVLEVRAPPHQGCPSVPCLWQRRGGP

SEQ ID NO: 764735 - protein, 981 aa, Homo sapiens
MNRFRVSKFRHTEARPPRRESWISDIRAGTAPSCRNHIKSSCSLIAFNSDRPGVLGIVPLQGQGEDKRRVAHLGCHSDLVTDLDFSPFDDFLLATGSADRTVKLWRLPGPGQALPSAPGVVLGPEDLPVEVLQFHPTSDGILVSAAGTTVKVWDAAKQQPLTELAAHGDLVQSAVWSRDGALVGTACKDKQLQIFDPRTKPRASQSTQAHENSRDSRLAWMGTWEHLVSTGFNQMREREVKLWDTRFFSSALASLTLDTSLGCLVPLLDPDSGLLVLAGKGERQLYCYEVVPQQPALSPVTQCVLESVLRGAALVPRQALAVMSCEVLRVLQLSDTAIVPIGYHVPRKAVEFHEDLFPDTAGCVPATDPHGWWAGDNQQVQKVSLNPACRPHPSFTSCLVPPAEPLPDTAQPAVMETPVGDADASEGFSSPPSSLTSPSTPSSLGPSLSSTSGIGTSPSLRSLQSLLGPSSKFRHAQGTVLHRDSHITNLKGLNLTTPGESDGFCANKLRVAVPLLSSGGQVAVLELRKPGRLPDTALPTLQNGAAVTDLAWDPFDPHRLAVAGEDARIRLWRVPAEGLEEVLTTPETVLTGHTEKICSLRFHPLAANVLASSSYDLTVRIWDLQAGADRLKLQGHQDQIFSLAWSPDGQQLATVCKDGRVRVYRPRSGPEPLQEGPGPKGGRGARIVWVCDGRCLLVSGFDSQSERQLLLYEAEALAGGPLAVLGLDVAPSTLLPSYDPDTGLVLLTGKGDTRVFLYELLPESPFFLECNSFTSPDPHKGLVLLPKTECDVREVELMRCLRLRQSSLEPVAFRLPRVRKEFFQDDVFPDTAVIWEPVLSAEAWLQGANGQPWLLSLQPPDMSPVSQAPREAPARRAPSSAQYLEEKSDQQKKEELLNAMVAKLGNREDPLPQDSFEGVDEDEWVSSEWPHFPAGSAVPRTCHGACLLPSQALLTPSHLLVFRPRTSLRPRHLHLTCAATS

SEQ ID NO: 764736 - protein, 925 aa, Homo sapiens; identical to SEQ ID NO: 764729

SEQ ID NO: 764737 - protein, 925 aa, Homo sapiens; identical to SEQ ID NO: 764729

SEQ ID NO: 764738 - protein, 132 aa, Homo sapiens
MSPLHSCLPVGTSTSSGPLAVPRDCFHLCCLWGQLLLISCPLACGQGCRVAGGQQHVPGQALGTLSPLVSLLTWAGPSLDWPHPGSLVTPRCPILPAVPVLVKGLGGWPPTRPSRAAPVSGPWDQLPYFPGL

SEQ ID NO: 764739 - protein, 154 aa, Homo sapiens
MGSLSGLRLAAGSCFRLCERDVSSSLRLTRSSDLKRINGFCTKPQESPGAPSRTYNRVPLHKPTDWQKKILIWSGRFKKEDEIPETVSLEMLDAAKNKMRVKISYLMIALTVVGCIFMVIEGKKAAQRHETLTSLNLEKKARLKEEAAMKAKTE

SEQ ID NO: 764740 - protein, 154 aa, Homo sapiens; identical to SEQ ID NO: 764739

SEQ ID NO: 764741 - protein, 144 aa, Homo sapiens
MRSCFRLCERDVSSSLRLTRSSDLKRINGFCTKPQESPGAPSRTYNRVPLHKPTDWQKKILIWSGRFKKEDEIPETVSLEMLDAAKNKMRVKISYLMIALTVVGCIFMVIEGKKAAQRHETLTSLNLEKKARLKEEAAMKAKTE

SEQ ID NO: 764742 - protein, 154 aa, Homo sapiens; identical to SEQ ID NO: 764739

SEQ ID NO: 764743 - protein, 154 aa, Homo sapiens; identical to SEQ ID NO: 764739

SEQ ID NO: 764744 - protein, 134 aa, Homo sapiens
MGSLSGLRLAAGSCFRLCERDVSSSLRLTRSSDLKRINGFCTKPQESPGAPSRTYNRVPLHKPTDWQKKILIWSGRFKKEDEIPETVSLEMLDAAKNKMRVKISYLMIALTVVGCIFMVIEGKKLAQSTRTLQG

SEQ ID NO: 764745 - protein, 120 aa, Homo sapiens
MGGSCFRLCERDVSSSLRLTRSSDLKRINGFCTKPQESPGAPSRTYNRVPLHKPTDWQKKILIWSGRFKKEDEIPETVSLEMLDAAKNKMRVKISYLMIALTVVGCIFMVIEGKKVRRGF

SEQ ID NO: 764746 - protein, 144 aa, Homo sapiens; identical to SEQ ID NO: 764741

SEQ ID NO: 764747 - protein, 111 aa, Homo sapiens
  misc_feature (14)..(14): Xaa can be any naturally occurring amino acid
PSYGSHSVNGPPVXVVFHKPTDWQKKILIWSGRFKKEDEIPETVSLEMLDAAKNKMRVKISYLMIALTVVGCIFMVIEGKKAAQRHETLTSLNLEKKARLKEEAAMKAKTE

SEQ ID NO: 764748 - protein, 154 aa, Homo sapiens; identical to SEQ ID NO: 764739

SEQ ID NO: 764749 - protein, 153 aa, Homo sapiens
MGSLSGLRLAAGSCFRLCERDVSSSLRLTRSSDLKRINGFCTKPQESPGAPSRTYNRVPLHKPTDWQKKILIWSGRFKKEDEIPETVSLEMLDAAKNKMRVKISYLMIALTVVGCIFMVIEGKKAAQRHETLTSLNLEKKARLKEEENPGIML

SEQ ID NO: 764750 - protein, 136 aa, Homo sapiens
MGSLSGLRLAAGSCFRLCERDVSSSLRLTRSSDLKRINGFCTKPQESPGAPSRTYNRVPLHKPTDWQKKILIWSGRFKNKMRVKISYLMIALTVVGCIFMVIEGKKAAQRHETLTSLNLEKKARLKEEAAMKAKTE

SEQ ID NO: 764751 - protein, 69 aa, Homo sapiens
HEIHLSSLICPIPSNKEICYLMIALTVVGCIFMVIEGKKAAQRHETLTSLNLEKKARLKEEAAMKAKTE

SEQ ID NO: 764752 - protein, 306 aa, Homo sapiens
RDRVAMWWAGFLTMAAGEVANFGAYAFAPATVVTPLGALSVLISAILSSYFLRESLNLLGKLGCVICVAGSTVMVIHAPEEEKVTTIMEMASKMKDTGFIVFAVLLLVSCLILIFVIAPRYGQRNILIYIIICSVIGAFSVAAVKGLGITIKNFFQGLPVVRHPLPYILSLILALSLSTQVNFLNRALDIFNTSLVFPIYYVFFTTVVVTSSIILFKEWYSMSAVDIASTPLGLVTIILGVFMLHAFKDLDISCASLPHMHKNPPPSPAPEPTVIRLEDKNVLVDNIELASTSSPEEKPKVFIIHS

SEQ ID NO: 764753 - protein, 439 aa, Homo sapiens
FSRASHAGDKSRPPAPELGSPGAVRPRVGSCAPGPMELRVSNTSCENGSLLHLYCSSQEVLCQIVNDLSPEVPSNATFHSWQERIRQNYGFYIGLGLAFLSSFLIGSSVILKKKGLLRLVATGATRAVDGGFGYLKDAMWWAGFLTNGCWRSCQLWSLRICTCNIVTPLGALSVLISAILSSYFLRESLNLLGKLGCVICVAGSTVMVIHAPEEEKVTTIMEMASKMKDTGFIVFAVLLLVSCLILIFVIAPRYGQRNILIYIIICSVIGAFSVAAVKGLGITIKNFFQGLPVVRHPLPYILSLILALSLSTQVNFLNRALDIFNTSLVFPIYYVFFTTVVVTSSIILFKEWYSMSAVDIASTPLGLVTIILGVFMLHAFKDLDISCASLPHMHKNPPPSPAPEPTVIRLEDKNVLVDNIELASTSSPEEKPKVFIIHS

SEQ ID NO: 764754 - protein, 306 aa, Homo sapiens; identical to SEQ ID NO: 764752

SEQ ID NO: 764755 - protein, 420 aa, Homo sapiens
MASSPELPTEDEQGSWGIDDLHISLQAEQEDTQKKAFTCWINSQLARHTSPSVISDLFTDIKKGHVLLDLLEVLSGQQLPRDKGSNTFQCRINIEHALTFLRNRSIKLINIHVTDIIDGNPSIILGLIWTIILHFHIEKLAQTLSCNYNQPSLDDVSVVDSSPASSPPAKKCSKVQARWQMSARKALLLWAQEQCATYESVNVTDFKSSWRNGMAFLAIIHALRPDLIDMKSVKHRSNKDNLREAFRIAEQELKIPRLLEPEDVDVVDPDEKSIMTYVAQFLQYSKDAPGTGEEAQGKVKDAMGWLTLQKEKLQKLLKDSENDTYFKKYNSLLSFMESFNEEKKSFLDVLSIKRDLDELDKDHLQLREAWDGLDHQINAWKIKLNYALPPPLHQTEAWLQEVEELMDEDLSASQDHSQAV

SEQ ID NO: 764756 - protein, 248 aa, Homo sapiens
EGQPEQKTHTTFKCLSCVKVLKNVKFMNHVKHHLEFEKQRNDSWENHTTCQHCHRQFPTPFQLQCHIENVHTAQEPSTVCKICELSFETDQVLLQHMKDHHKPGEMPYVCQVCHYRSSVFADVETHFRTCHENTKNLLCPFCLKIFKTATPYMCHYRGHWGKSAHQCSKCRLQFLTFKEKMEHKTQCHQMFKKPKQLEGLPPETKVTIQVSLEPLQPGSVDVASITVSTSDSEPSLPRSKSKISKKSH

SEQ ID NO: 764757 - protein, 393 aa, Homo sapiens [sequence omitted]

SEQ ID NO: 764758 - protein, 236 aa, Homo sapiens
MEEPQSDPSVEPPLSQETFSDLWKLLPENNVLSPLPSQAMDDLMLSPDDIEQWFTEDPGPDEAPRMPEAAPPVAPAPAAPTPAAPAPAPSWPLSSSVPSQKTYQGSYGFRLGFLHSGTAKSVTCTYSPALNKMFCQLAKTCPVQLWVDSTPPPGTRVRAMAIYKQSQHMTEVVRRCPHHERCSDSDGLAPPQHLIRVEGNLRVEYLDDRNTFRHSVVVPYEPPEVWFATGVSGRRG

SEQ ID NO: 764759 - protein, 236 aa, Homo sapiens; identical to SEQ ID NO: 764758

SEQ ID NO: 764760 - protein, 66 aa, Homo sapiens
MGQVGPDFLTASCFSFPILSSGNLLGRNSFEVRVCACPGRDRRTEEENLRKKGEPHHELPPGSTKR

SEQ ID NO: 764761 - protein, 112 aa, Homo sapiens
MPRTSLQGIKDQDTTPSSHTHLRPGRGLCVPHCPIGCSGLCLRELGFGEMSISEVLEWPVWQWPLRVGWVLRPIPDTSPAEPSGCSPHQGVTEGYTGLDFWCEEGASTSPVV

SEQ ID NO: 764762 - protein, 112 aa, Homo sapiens; identical to SEQ ID NO: 764761

SEQ ID NO: 764763 - protein, 112 aa, Homo sapiens; identical to SEQ ID NO: 764761

SEQ ID NO: 764764 - protein, 112 aa, Homo sapiens; identical to SEQ ID NO: 764761

SEQ ID NO: 764765 - protein, 187 aa, Homo sapiens
QHLLCLGSALVVIGHLVEVFIVPFFTLGLTLLQQRLQAFLSRPALVVVADQQDDVVPAVDTHHLKPHAGLVGERTVLEVPTPWSRIMKGEHTSTQMCHALAWGLCVHRQGTRCVCADPRVPGHVKRTCVCIVCVCTLCVHCVCMWPNRCDLPEHSTPPPLPELRQPSSPLSCVCVSVATCVTPGGLS

SEQ ID NO: 764766 - protein, 112 aa, Homo sapiens; identical to SEQ ID NO: 764761

SEQ ID NO: 764767 - protein, 702 aa, Homo sapiens
MFIFAVFPNSSDFASNDIFVSPAFLKQHKEIENRMALLDFSLMSCDPCPKLPISVYPHRVLILSKKLAHNSYVTLPSSLNFNTLRFKKIKSHSVDTRMRDARQGRLSQALQTKPARPLSNLLLMRAVLMLPQYLEVSLSVLYIFLMYENDLGNILTHRFLGAPQPGIQIYLFCSEVVHIEFNKLQPHSEILMHVDSDPPFEKHFSKIMVLSPTCTLESPEELLKNRDTWVLKTLTLNSNSLDTAWKLGILKGLQVILKSIRSNAILLAIPAISSLQLCRKHENEDNAKASPISKPGYNEPKPVPTPQSSARHYFTMEFWILICPAAMDSTGDSYQDEKSSELSACHSIIYNQKPAQERRLLWEQNETPLKTGLKGWVLQRRSDHEDSPLMNEVKEWINELMGYHKKGNWWLHNKMRDLTSNICLLSLIAMDAMSCATSGLCRESPPARRLSPDIAPRPWISQPPERLYRLILKPPTLQFLQFSSTYLIMHHKRKQKFSLIVKPLQQNQANDRKPHDQQTESHSLMLNEMTDILSLCRSLNTDHRILRSDIVCLLSDSVVLYFPRFSCESQVQSHTISFLKFIMTSKWSLGKRTSSSTVYCNCNTVMSEEGNMFNVKSLQNDDAEEKNIKQKKHKYKNGERDVIKRQLEGRLHAAICFSAVFSIVGQILLFVTSTFAFSHLQRGKQSAFESLVKHHLEAAAKA

SEQ ID NO: 764768 - protein, 310 aa, Homo sapiens
VCTGSTMSLTVVSMACVGFFLLQGAWPHEGVHRKPSLLAHPGRLVKSEETVILQCWSDVMFEHFLLHREGMFNDTLRLIGEHHDGVSKANFSISRMKQDLAGTYRCYGSVTHSPYQLSAPSDPLDIVIIGLYEKPSLSAQPGPTVLAGENVTLSCSSRSSYDMYHLSREGEAHERRLPAGTKVNGTFQANFPLGPATHGGTYRCFGSFRDSPYEWSKSSDPLLVSVTGNPSNSWPSPTEPSSETGNPRHLHVLIGTSVVKIPFTILLFFLLHRWCSDKKNAAVMDQEPAGNRTVNSEDSDEQDHQEVSYA

SEQ ID NO: 764769 - protein, 312 aa, Homo sapiens
MVGLKPSDVPPTMAVKFLGAGTAACFADLVTFPLDTAKVRLQIQGENQAVQTARLVQYRGVLGTILTMVRTEGPCSPYNGLVAGLQRQMSFASIRIGLYDSVKQVYTPKGADNSSLTTRILAGCTTGAMAVTCAQPTDVVKVRFQASIHLGPSRSDRKYSGTMDAYRTIAREEGVRGLWKGTLPNIMRNAIVNCAEVVTYDILKEKLLDYHLLTDNFPCHFVSAFGAGFCATVVASPVDVVKTRYMNSPPGQYFSPLDCMIKMVAQEGPTAFYKGFTPSFLRLGSWNVVMFVTYEQLKRALMKVQMLRESPF

SEQ ID NO: 764770 - protein, 210 aa, Homo sapiens
MVGLKPSDVPPTMAVKFLGAGTAACFADLVTFPLDTAKVRLQIQGENQAVQTARLVQYRGVLGTILTMVRTEGPCSPYNGLVAGLQRQMSFASIRIGLYDSVKQVYTPKGADNNFPCHFVSAFGAGFCATVVASPVDVVKTRYMNSPPGQYFSPLDCMIKMVAQEGPTAFYKGFTPSFLRLGSWNVVMFVTYEQLKRALMKVQMLRESPF

SEQ ID NO: 764771 - protein, 312 aa, Homo sapiens; identical to SEQ ID NO: 764769

SEQ ID NO: 764772 - protein, 275 aa, Homo sapiens
MVGLKPSDVPPTMAVKFLGAGTAACFADLVTFPLDTAKVRLQIQGENQAVQTARLVQYRGVLGTILTMVRTEGPCSPYNGLVAGLQRQMSFASIRIGLYDSVKQVYTPKGADNSSLTTRILAGCTTGAMAVTCAQPTDVVKVRFQASIHLGPSRSDRKYSGTMDAYRTIAREEGVRGLWKGTLPNIMRNAIVNCAEVVTYDILKEKLLDYHLLTDNFPCHFVSAFGAGFCATVVASPVDVVKTRYMNSPPGQYFSPLDCMIKMVAQEGPTAFYKG

SEQ ID NO: 764773 - protein, 696 aa, Homo sapiens
MQLISEYFGFLTKKEPKQEQHLFKVKECFLTKNIVIAYFRIAIMLLKRTMRVINVNYQRLESAGKEKDKKSLQNYTHQKKTITVRNLRVMLSRYFFFFFLTFHIFFFYFLYFILCFGWGCRYMRVYLSEHKYVFSYKVMMMMMMITGSLSLLLRLEFRGAVIAHRSLKLLGWSDSSCLSLLSSWDHRCVTPNLVDFYIFCRDEVSLCFPGWSQTPGFKGFSCRGFPKYWDYRHEPPCPAYTEYYFVSIILKRLNSFMFLVGEQVAECYKREYPRISDQRNPFVVNDIYGEILRLRSVVMLRMGRRTLEVAGIPVDKAFGWKESLAHSCICKNQGAEAHRKLERQDEKVGRDQIIQASSRPCLFNLMYCDCLSVVNILKAVDFGVKSLATGVKYIHCVNLDKLINVTLVLISKSLKGDDCRQCLKETIGEKKSDYTYKTMKRLAPLLISFMVEFIQHSLMENQGLGQERLFSRSYNGASKSRAVKLVLLLLTTFGIMSPGAPLTSVLMQAKCYYCLFKFLRAEPWLFLLVLTQHHTLTQDFFLFFFSLRQSLTLLSRLECSGVFSAHCNLCLPGSSDSPASASQVAGITSTHHQAQLIFVFLVEVGFHHVGQAGLELVASGDLPTSASQSAGITGMSHRSQPALLKKRWLVNPRGMSDEITKATVNHSLFFPEGRSHFYSSADFMYIEKLKHTLKDV

SEQ ID NO: 764774 - protein, 103 aa, Homo sapiens [sequence omitted]

SEQ ID NO: 764775 - protein, 103 aa, Homo sapiens [sequence omitted]

SEQ ID NO: 764776 - protein, 291 aa, Homo sapiens
MRCVVPQTTVILNNDRQNAIVAKMEDPLSNRAPDSLENVISNAVPGRRQNTIVVKVPGQEDSHHEDGESGSEASDSVSSCGQAGSQSIGSNVTLITLNSEEDYPNGTWLGDENNPEMRVRCAIIPSDMLHISTNCRTAEKMALTLLDYLFHREVQAVSNLSGQGKHGKKQLDPLTIYGIRCHLFYKFGITESDWYRIKQSIDSKCRTAWRRKQRGQSLAVKSFSRRMPNSSSYWPSEPMMKQPHLLPEKLLQPQLQPQALHYALANVQQVQIHQNRRRRTGASSTYPLHLA

SEQ ID NO: 764777 - protein, 265 aa, Homo sapiens
RCPGWHDCSQPWALETLAERGVPPRSRPLVGGIQVSTFPQGRTCWGRGDSGSLPLVQLQGQKRLFGKLLSFQAGEDYPNGTWLGDENNPEMRVRCAIIPSDMLHISTNCRTAEKMALTLLDYLFHREVQAVSNLSGQGKHGKKQLDPLTIYGIRCHLFYKFGITESDWYRIKQSIDSKCRTAWRRKQRGQSLAVKSFSRRMPNSSSYWPSEPMMKQPHLLPEKLLQPQLQPQALHYALANVQQVQIHQNRRRRTGASSTYPLHLA

SEQ ID NO: 764778 - protein, 175 aa, Homo sapiens
MRVRCAIIPSDMLHISTNCRTAEKMALTLLDYLFHREVQAVSNLSGQGKHGKKQLDPLTIYGIRCHLFYKFGITESDWYRIKQSIDSKCRTAWRRKQRGQSLAVKSFSRRMPNSSSYWPSEPMMKQPHLLPEKLLQPQLQPQALHYALANVQQVQIHQNRRRRTGASSTYPLHLA

SEQ ID NO: 764779 - protein, 138 aa, Homo sapiens
FLSAEEYQQKIIPVVVKMFSSTDRAMRIRLLQQMEQFIQYLDEPTVNTQIFPHVVHGFLDTNPAIREQTVKSMLLLAPKLNRGHNLYSMNDCAQKILPVLCGLTVDPEKSVRDQAFKAIRSFLSKLESVSEDPTQLEE

SEQ ID NO: 764780 - protein, 1023 aa, Homo sapiens
MNLQAQPKAQNKRKRCLFGGQEPAPKEQPPPLQPPQQSIRVKEEQYLGHEGPGGAVSTSQPVELPPPSSLALLNSVVYGPERTSAAMLSQQVASVKWPNSVMAPGRGPERGGGGGVSDSSWQQQPGQPPPHSTWNCHSLSLYSATKGSPHPGVGVPTYYNHPEALKREKAGGPQLDRYVRPMMPQKVQLEVGRPQAPLNSFHAAKKPPNQSLPLQPFQLAFGHQVNRQVFRQGPPPPNPVAAFPPQKQQQQQQPQQQQQQQQAALPQMPLFENFYSMPQQPSQQPQDFGLQPAGPLGQSHLAHHSMAPYPFPPNPDMNPELRKALLQDSAPQPALPQVQIPFPRRSRRLSKEGILPPSALDGAGTQPGQEATGNLFLHHWPLQQPPPGSLGQPHPEALGFPLELRESQLLPDGERLAPNGREREAPAMGSEEGMRAVSTGDCGQVLRGGVIQSTRRRRRASQEANLLTLAQKAVELASLQNAKDGSGSEEKRKSVLASTTKCGVEFSEPSLATKRAREDSGMVPLIIPVSVPVRTVDPTEAAQAGGLDEDGKGPEQNPAEHKPSVIVTRRRSTRIPGTDAQAQAEDMNVKLEGEPSVRKPKQRPRPEPLIIPTKAGTFIAPPVYSNITPYQSHLRSPVRLADHPSERSFELPPYTPPPILSPVREGSGLYFNAIISTSTIPAPPPITPKSAHRTLLRTNSAEVTPPVLSVMGEATPVSIEPRINVGSRFQAEIPLMRDRALAAADPHKADLVWQPWEDLESSREKQRQVEDLLTAACSSIFPGAGTNQELALHCLHESRGDILETLNKLLLKKPLRPHNHPLATYHYTGSDQWKMAERKLFNKGIAIYKKDFFLVQKLIQTKTVAQCVEFYYTYKKQVKIGRNGTLTFGDVDTSDEKSAQEEVEVDIKTSQKFPRVPLPRRESPSEERLEPKREVKEPRKEGEEEVPEIQEKEEQEEGRERSRRAAAVKATQTLQANESASDILILRSHESNAPGSAGGQASEKPREGTGKSRRALPFSEKKK

SEQ ID NO: 764781 - protein, 1060 aa, Homo sapiens
MNLQAQPKAQNKRKRCLFGGQEPAPKEQPPPLQPPQQSIRVKEEQYLGHEGPGGAVSTSQPVELPPPSSLALLNSVVYGPERTSAAMLSQQVASVKWPNSVMAPGRGPERGGGGGVSDSSWQQQPGQPPPHSTWNCHSLSLYSATKGSPHPGVGVPTYYNHPEALKREKAGGPQLDRYVRPMMPQKVQLEVGRPQAPLNSFHAAKKPPNQSLPLQPFQLAFGHQVNRQVFRQGPPPPNPVAAFPPQKQQQQQQPQQQQQQQQAALPQMPLFENFYSMPQQPSQQPQDFGLQPAGPLGQSHLAHHSMAPYPFPPNPDMNPELRKALLQDSAPQPALPQVQIPFPRRSRRLSKEGILPPSALDGAGTQPGQEATGNLFLHHWPLQQPPPGSLGQPHPEALGFPLELRESQLLPDGERLAPNGREREAPAMGSEEGMRAVSTGDCGQVLRGGVIQSTRRRRRASQEANLLTLAQKAVELASLQNAKDGSGSEEKRKSVLASTTKCGVEFSEPSLATKRAREDSGMVPLIIPVSVPVRTVDPTEAAQAGGLDEDGKGPEQNPAEHKPSVIVTRRRSTRIPGTDAQAQKKFADFCPRGDDKKGFWTCSFFQACLGGCGRQTKFQKAEDMNVKLEGEPSVRKPKQRPRPEPLIIPTKAGTFIAPPVYSNITPYQSHLRSPVRLADHPSERSFELPPYTPPPILSPVREGSGLYFNAIISTSTIPAPPPITPKSAHRTLLRTNSAEVTPPVLSVMGEATPVSIEPRINVGSRFQAEIPLMRDRALAAADPHKADLVWQPWEDLESSREKQRQVEDLLTAACSSIFPGAGTNQELALHCLHESRGDILETLNKLLLKKPLRPHNHPLATYHYTGSDQWKMAERKLFNKGIAIYKKDFFLVQKLIQTKTVAQCVEFYYTYKKQVKIGRNGTLTFGDVDTSDEKSAQEEVEVDIKTSQKFPRVPLPRRESPSEERLEPKREVKEPRKEGEEEVPEIQEKEEQEEGRERSRRAAAVKATQTLQANESASDILILRSHESNAPGSAGGQASEKPREGTGKSRRALPFSEKKK

SEQ ID NO: 764782 - protein, 867 aa, Homo sapiens
MNLQAQPKAQNKRKRCLFGGQEPAPKEQPPPLQPPQQSIRVKEEQYLGHEGPGGAVSTSQPVELPPPSSLALLNSVVYGPERTSAAMLSQQVASVKWPNSVMAPGRGPERGGGGGVSDSSWQQQPGQPPPHSTWNCHSLSLYSATKGSPHPGVGVPTYYNHPEALKREKAGGPQLDRYVRPMMPQKVQLEVGRPQAPLNSFHAAKKPPNQSLPLQPFQLAFGHQVNRQVFRQGPPPPNPVAAFPPQKQQQQQQPQQQQQQQQAALPQMPLFENFYSMPQQPSQQPQDFGLQPAGPLGQSHLAHHSMAPYPFPPNPDMNPELRKALLQDSAPQPALPQVQIPFPRRSRRLSKEGILPPSALDGAGTQPGQEATGNLFLHHWPLQQPPPGSLGQPHPEALGFPLELRESQLLPDGERLAPNGREREAPAMGSEEGMRAVSTGDCGQVLRGGVIQSTRRRRRASQEANLLTLAQKAVELASLQNAKDGSGSEEKRKSVLASTTKCGVEFSEPSLATKRAREDSGMVPLIIPVSVPVRTVDPTEAAQAGGLDEDGKGPEQNPAEHKPSVIVTRRRSTRIPGTDAQAQAEDMNVKLEGEPSVRKPKQRPRPEPLIIPTKAGTFIAPPVYSNITPYQSHLRSPVRLADHPSERSFELPPYTPPPILSPVREGSGLYFNAIISTSTIPAPPPITPKSAHRTLLRTNSAEVTPPVLSVMGEATPVSIEPRINVGSRFQAEIPLMRDRALAAADPHKADLVWQPWEDLESSREKQRQVEDLLTAACSSIFPGAGTNQELALHCLHESRGDILETLNKLLLKKPLRPHNHPLATYHYTGSDQWKMAERKLFNKGIAIYKKDFFLVQKLVSWALFQGK

SEQ ID NO: 764783 - protein, 36 aa, Homo sapiens
MRGAPSKHLQRVSAQGAQDPMGKGEHGNVGRYQGTC

SEQ ID NO: 764784 - protein, 1023 aa, Homo sapiens; identical to SEQ ID NO: 764780

SEQ ID NO: 764785 - protein, 993 aa, Homo sapiens
EFSDPSLATKRAREDSGMVPLIIPVSVPVRPVELPPPSSLALLNSVVYGPERTSAAMLSQQVASVKWPNSVMAPGRGPERGGGGGVSDSSWQQQPGQPPPHSTWNCHSLSLYSATKGSPHPGVGVPTYYNHPEALKREKAGGPQLDRYVRPMMPQKVQLEVGRPQAPLNSFHAAKKPPNQSLPLQPFQLAFGHQVNRQVFRQGPPPPNPVAAFPPQKQQQQQQPQQQQQQQQAALPQMPLFENFYSMPQQPSQQPQDFGLQPAGPLGQSHLAHHSMAPYPFPPNPDMNPELRKALLQDSAPQPALPQVQIPFPRRSRRLSKEGILPPSALDGAGTQPGQEATGNLFLHHWPLQQPPPGSLGQPHPEALGFPLELRESQLLPDGERLAPNGREREAPAMGSEEGMRAVSTGDCGQVLRGGVIQSTRRRRRASQEANLLTLAQKAVELASLQNAKDGSGSEEKRKSVLASTTKCGVEFSEPSLATKRAREDSGMVPLIIPVSVPVRTVDPTEAAQAGGLDEDGKGPEQNPAEHKPSVIVTRRRSTRIPGTDAQAQAEDMNVKLEGEPSVRKPKQRPRPEPLIIPTKAGTFIAPPVYSNITPYQSHLRSPVRLADHPSERSFELPPYTPPPILSPVREGSGLYFNAIISTSTIPAPPPITPKSAHRTLLRTNSAEVTPPVLSVMGEATPVSIEPRINVGSRFQAEIPLMRDRALAAADPHKADLVWQPWEDLESSREKQRQVEDLLTAACSSIFPGAGTNQELALHCLHESRGDILETLNKLLLKKPLRPHNHPLATYHYTGSDQWKMAERKLFNKGIAIYKKDFFLVQKLIQTKTVAQCVEFYYTYKKQVKIGRNGTLTFGDVDTSDEKSAQEEVEVDIKTSQKFPRVPLPRRESPSEERLEPKREVKEPRKEGEEEVPEIQEKEEQEEGRERSRRAAAVKATQTLQANESASDILILRSHESNAPGSAGGQASEKPREGTGKSRRALPFSEKKK

SEQ ID NO: 764786 - protein, 917 aa, Homo sapiens
MNLQAQPKAQNKRKRCLFGGQEPAPKEQPPPLQPPQQSIRVKEEQYLGHEGPGGAVSTSQPVELPPPSSLALLNSVVYGPERTSAAMLSQQVASVKWPNSVMAPGRGPERGGGGGVSDSSWQQQPGQPPPHSTWNCHSLSLYSATKGSPHPGVGVPTYYNHPEALKREKAGGPQLDRYVRPMMPQKVQLEVGRPQAPLNSFHAAKKPPNQSLPLQPFQLAFGHQVNRQVFRQGPPPPNPVAAFPPQKQQQQQQPQQQQQQQQAALPQMPLFENFYSMPQQPSQQPQDFGLQPAGPLGQSHLAHHSMAPYPFPPNPDMNPELRKALLQDSAPQPALPQVQIPFPRRSRRLSKEGILPPSALDGAGTQPGQEATGNLFLHHWPLQQPPPGSLGQPHPEALGFPLELRESQLLPDGERLAPNGREREAPAMGSEEGMRAVSTGDCGQVLRGGVIQSTRRRRRASQEANLLTLAQKAVELASLQNAKDGSGSEEKRKSVLASTTKCGVEFSEPSLATKRAREDSGMVPLIIPVSVPVRTVDPTEAAQAGGLDEDGKGPEQNPAEHKPSVIVTRRRSTRIPGTDAQAQAEDMNVKLEGEPSVRKPKQRPRPEPLIIPTKAGTFIAPPVYSNITPYQSHLRSPVRLADHPSERSFELPPYTPPPILSPVREGSGLYFNAIISTSTIPAPPPITPKSAHRTLLRTNSAEVTPPVLSVMGEATPVSIEPRINVGSRFQAEIPLMRDRALAAADPHKADLVWQPWEDLESSREKQRQVEDLLTAACSSIFPGAGTNQELALHCLHESRGDILETLNKLLLKKPLRPHNHPLATYHYTGSDQWKMAERKLFNKGIAIYKKDFFLVQKLIQTKTVAQCVEFYYTYKKQVKIGRNGTLTFGDVDTSDEKSAQEEVEVDIKVTPFPTSAA

SEQ ID NO: 764787 - protein, 74 aa, Homo sapiens
HVIPHEAEVAVSRDSATVLQPGQQSETPSQKTKKFQVQYKEIPSQFESKLPIYPMTAPPPPILQWVFPMNNDIL

SEQ ID NO: 764788 - protein, 50 aa, Homo sapiens
MTANGSSRMTTRAANIWFSVVSPSPPQASLSNAGSSQMKWSSRRGAHSGR

SEQ ID NO: 764789 - protein, 76 aa, Homo sapiens
EKLLEGEQSLCNLEDIHMSLEKDVTAMTNSLFIDRQKCMAHRTCYPTILQLAGYQLSSGTVLPPNPPNKQCISFLH

SEQ ID NO: 764790 - protein, 168 aa, Homo sapiens
PRRLRAGGKQTRTHRSSSSSSRSSSSSLRSPSRDMDPQTAPSRALLLLLFLHLAFLGGRSHPLGSPGSASDLETSGLQEQRNHLQGKLSELQVEQTSLEPLQESPRPTGVWKSREVATEGIRGHRKMVLYTLRAPRSPKMVQGSGCFGRKMDRISSSSGLGCKVLRRH

SEQ ID NO: 764791 - protein, 78 aa, Homo sapiens
PQAEGRWEANPDASQQQQQQQKQQQQPPQSIRGHRKMVLYTLRAPRSPKMVQGSGCFGRKMDRISSSSGLGCKVLRRH

SEQ ID NO: 764792 - protein, 45 aa, Homo sapiens
VLYTLRAPRSPKMVQGSGCFGRKMDRISSSSGLGCKGKHPLPPRP

SEQ ID NO: 764793 - protein, 170 aa, Homo sapiens
PRRLRAGGKQTRTHRSSSSSSRSSSSSLRSPSRDMDPQTAPSRALLLLLFLHLAFLGGRSHPLGSPGSASDLETSGLQEQRNHLQGKLSELQVEQTSLEPLQESPRPTGVWKSREVATEGIRGHRKMVLYTLRAPRSPDVRSALGEMTILPCLVNLGIKSLVTPFIQGFH

SEQ ID NO: 764794 - protein, 205 aa, Homo sapiens
RNCDKLKSFHLSPRGPPTSEPPPVPANKPKFLKIAEEDPPREAAMPGLFVPPVAPRPPALKLPVPEAMARPAVLPRPEKPQLPHLQRSPPDGQSFRSFSFEKPRQPSQADTGGDDSDEDYEKVPLPNSVFVNTTESCEVERLFKATSPRGEPQDGLYCIRNSSTKSGKVLVVWDETSNKVRNYRIFEKDSKFYLEGEVLFVSVGS

SEQ ID NO: 764795 - protein, 639 aa, Homo sapiens
MLSYGERLGSPAVSPLPVRGGHVMRGTAFAYVPSPQVLHRIPGTSAYAFPSLGPVALAEHTCPCGEVLERHEPLPAKLALEEEQKPESRLVPKLRQAGAMLLKVPLMLTFLYLFVCSLDMLSSAFQLAGGKVAGDIFKDNAILSNPVAGLVVGILVTVLVQSSSTSTSIIVSMVSSGLLEVSSAIPIIMGSNIGTSVTNTIVALMQAGDRTDFRRAFAGATVHDCFNWLSVLVLLPLEAATGYLHHITRLVVASFNIHGGRDAPDLLKIITEPFTKLIIQLDESVITSIATGDESLRNHSLIQIWCHPDSLQAPTSMSRAEANSSQTLGNATMEKCNHIFVDTGLPDLAVGLILLAGSLVLLCTCLILLVKMLNSLLKGQVAKVIQKVINTDFPAPFTWVTGYFAMVVGASMTFVVQSSSVFTSAITPLIGLGVISIERAYPLTLGSNIGTTTTAILAALASPREKLSSAFQIALCHFFFNISGILLWYPVPCTRLPIRMAKALGKRTAKYRWFAVLYLLVCFLLLPSLVFGISMAGWQVMVGVGTPFGALLAFVVLINVLQSRSPGHLPKWLQTWDFLPRWMHSLKPLDHLITRATLCCARPEPRSPPLPPRVFLEELPPATPSPRLALPAHHNATRL

SEQ ID NO: 764796 - protein, 503 aa, Homo sapiens
MLSYGERLGSPAVSPLPVRGGHVMRGTAFAYVPSPQVLHRIPGTSAYAFPSLGPVALAEHTCPCGEVLERHEPLPAKLALEEEQKPESRLVPKLRQAGAMLLKVPLMLTFLYLFVCSLDMLSSAFQLAGGKVAGDIFKDNAILSNPVAGLVVGILVTVLVQSSSTSTSIIVSMVSSGLLEVSSAIPIIMGSNIGTSVTNTIVALMQAGDRTDFRRAFAGATVHDCFNWLSVLVLLPLEAATGYLHHITRLVVASFNIHGGRDAPDLLKIITEPFTKLIIQLDESVITSIATGDESLRNHSLIQIWCHPDSLQAPTSMSRAEANSSQTLGNATMEKCNHIFVDTGLPDLAVGLILLAGSLVLLCTCLILLVKMLNSLLKGQVAKVIQKVINTDFPAPFTWVTGYFAMVVGASMTFVVQSSSVFTSAITPLIGLGVISIERAYPLTLGSNIGTTTTAILAALASPREKLSSAFQVRWECSLAWGRMELPLGCGASQRCDNMEQIF

SEQ ID NO: 764797 - protein, 521 aa, Homo sapiens
HVLQFMYYGTIELSMNTVHEILQAAMYVQLIEVVKFCCSFLLAKICLENCAEIMRLLDDFGVNIEGVREKLDTFLLDNFVPLMSRPDFLSYLSFEKLMSYLDNDHLSRFPEIELYEAVQSWLRHDRRRWRHTDTIIQNIRFCLMTPTSVFEKVKTSEFYRYSRQLRYEVDQALNYFQNVHQQPLLDMKSSRIRSAKPQTTVFRGMIGHSMVNSKILLLKKPRVWWELEGPQVPLRPDCLAIVNNFVFLLGGEELGPDGEFHASSKVFRYDPRQNSWLQMADMSVPRSEFAVGVIGKFIYAVAGRTRDETFYSTERYDITNDKWEFVDPYPVNKYGHEGTVLNNKLFITGGITSSSTSKQVCVFDPSKEGTIEQRTRRTQVVTNCWENKSKMNYARCFHKMISYNGKLYVFGGVCVILRASFESQGCPSTEVYNPETDQWTILASMPIGRSGHGVTVLDKQIMVLGGLCYNGHYSDSILTFDPDENKWKEDEYPRMPCKLDGLQVCNLHFPDYVLDEVRRCN

SEQ ID NO: 764798 - protein, 521 aa, Homo sapiens; identical to SEQ ID NO: 764797

SEQ ID NO: 764799 - protein, 521 aa, Homo sapiens; identical to SEQ ID NO: 764797

SEQ ID NO: 764800 - protein, 521 aa, Homo sapiens; identical to SEQ ID NO: 764797

SEQ ID NO: 764801 - protein, 83 aa, Homo sapiens
DGQTPGSRKMDSVAFEDVAVNFTQEEWALLDPWQKKLYRDVMLETYRNLASVGDDDNIPSLREQVAHQRYFKTWHVEREYFSK

SEQ ID NO: 764802 - protein, 149 aa, Homo sapiens
MTVNVEKIVREWNQYKKVKKIISKNHQRRMKVILQSNTLLPVVDAVPDLSGCIRQPGLECEEGSKCHKALEKNEREHGRTQWGIQRKSCGRCPGGTQEGTREPENQGRERPEEGSKEASEGKWQNRKTRREQKNEEEKEATRGCALCVG

SEQ ID NO: 764803 - protein, 1108 aa, Homo sapiens
MFLGLGRFSRLVLWFAAFRKLLGHHGLASAKFLWCLCLLSVMSLPQQVWTLPYKIGVVGPWACDSLFSKALPEVAARLAIERINRDPSFDLSYSFEYVILNEDCQTSRALSSFISHHQMASGFIGPTNPGYCEAASLLGNSWDKGIFSWACVNYELDNKISYPTFSRTLPSPIRVLVTVMKYFQWAHAGVISSDEDIWVHTANRVASALRSHGLPVGVVLTTGQDSQSMRKALQRIHQADRIRIIIMCMHSALIGGETQMHLLECAHDLKMTDGTYVFVPYDALLYSLPYKHTPYQVLRNNPKLREAYDAVLTITVESQEKTFYQAFTEAAARGEIPEKLEFDQVSPLFGTIYNSIYFIAQAMNNAMKENGQAGAASLVQHSRNMQFHGFNQLMRTDSNGNGISEYVILDTNLKEWELHSTYTVDMEMELLRFGGTPIHFPGGRPPRADAKCWFAEGKICHGGIDPAFAMMVCLTLLIALLSINGFAYFIRRRINKIQLIKGPNRILLTLEDVTFINPHFGSKRGSRASVSFQITSEVQSGRSPRLSFSSGSLTPATYENSNIAIYEGDWVWLKKFSLGDFGDLKSIKSRASDVFEMMKDLRHENINPLLGFFYDSGMFAIVTEFCSRGSLEDILTNQDVKLDWMFKSSLLLDLIKGMKYLHHREFVHGRLKSRNCVVDGRFVLKVTDYGFNDILEMLRLSEEESSMEELLWTAPELLRAPRGSRLGSFAGDVYSFAIIMQEVMVRGTPFCMMDLPAQEIINRLKKPPPVYRPVVPPEHAPPECLQLMKQCWAEAAEQRPTFDEIFNQFKTFNKGKKTNIIDSMLRMLEQYSSNLEDLIRERTEELEIEKQKTEKLLTQMLPPSVAESLKKGCTVEPEGFDLVTLYFSDIVGFTTISAMSEPIEVVDLLNDLYTLFDAIIGSHDVYKVETIGDAYMVASGLPKRNGSRHAAEIANMSLDILSSVGTFKMRHMPEVPVRIRIGLHSGPVVAGVVGLTMPRYCLFGDTVNTASRMESTGLPYRIHVSLSTVTILQNLSEGYEVELRGRTELKGKGTEETFWLIGKKGFMKPLPVPPPVDKDGQVGHGLQPVEIAAFQRRKAERQLVRNKP

SEQ ID NO: 764804 - protein, 179 aa, Homo sapiens
MARTVYCTDVGADLLSMCQRNIALNSHLAATGGGIVRVKELDWLKDDLCTDPKVPFSWSQEEISDLYDHTTILFAAEVFYDDDLTDAVFKTLSRLAHRLKNACTAILSVEKRLNFTLRHLDVTCEAYDHFRSCLHALEQLTDGKLRFVVEPVEASFPQLLVYERLQQLELWKIIAEPVT

SEQ ID NO: 764805 - protein, 111 aa, Homo sapiens
CLLLFHRDVGADLLSMCQRNIALNSHLAATGGGIVRVKELDWLKDDLCTDPKVPFSWSQEEISDLYDHTTILFAAEVFYDDDLTDAVFKTLSRLAHRLKNACTAILSVEKR

SEQ ID NO: 764806 - protein, 114 aa, Homo sapiens
DRRSVKARPGDMRSVRDRKARWVETAKPFPLMMAVCASGWLVCRLNFTLRHLDVTCEAYDHFRSCLHALEQLTDGKLRFVVEPVEASFPQLLVYERLQQLVGPGPEAGPLVALL

SEQ ID NO: 764807 - protein, 179 aa, Homo sapiens; identical to SEQ ID NO: 764804

SEQ ID NO: 764808 - protein, 348 aa, Homo sapiens [sequence omitted]

SEQ ID NO: 764809 - protein, 205 aa, Homo sapiens
MVQLAPAAAMDEVTFRSDTVLSDVHLYTPNHRHLMVRLNSVGQPVFLSQFKLLWSQDSWTDSGAKGGSHRDVHTKEPPSAETGSTGSPPGSGHGNEGFSLQAGTDTTGQEVAEAQLDEDGDLDVVRRPRAASDSNPAGPLRDKVHPMILAQEEDDVLGEEAQGSPHDIIRIGVAGRPAPGRLHPVPTGPLPRMYSAGARGRHGAR

SEQ ID NO: 764810 - protein, 199 aa, Homo sapiens [sequence omitted]

SEQ ID NO: 764811 - protein, 199 aa, Homo sapiens [sequence omitted]

SEQ ID NO: 764812 - protein, 179 aa, Homo sapiens; identical to SEQ ID NO: 764804

SEQ ID NO: 764813 - protein, 260 aa, Homo sapiens
MVQLAPAAAMDEVTFRSDTVLSDVHLYTPNHRHLMVRLNSVGQPVFLSQFKLLWSQDSWTDSGAKGGSHRDVHTKEPPSAETGSTGSPPGSGHGNEGFSLQAGTDTTGQEVAEAQLDEDGDLDVVRRPRAASDSNPAGPLRDKVHPMILAQEEDDVLGEEAQGSPHDIIRIGGIVRVKELDWLKDDLCTDPKVPFSWSQEEISDLYDHTTILFAAEVFYDDDLTDAVFKTLSRLAHRLKNACTAILSVEKRSSGRSSQNQ

SEQ ID NO: 764814 - protein, 173 aa, Homo sapiens [sequence omitted]

SEQ ID NO: 764815 - protein, 140 aa, Homo sapiens
MGTKCAFVLSSDPKVPFSWSQEEISDLYDHTTILFAAEVFYDDDLTDAVFKTLSRLAHRLKNACTAILSVEKRLNFTLRHLDVTCEAYDHFRSCLHALEQLTDGKLRFVVEPVEASFPQLLVYERLQQLELWKIIAEPVT

SEQ ID NO: 764816 - protein, 160 aa, Homo sapiens
MSCEEVVLCPFYPKVPFSWSQEEISDLYDHTTILFAAEVFYDDDLTDAVFKTLSRLAHRLKNACTAILSVEKRLNFTLRHLDVTCEAYDHFRSCLHALEQLTDGKLRFVVEPVEASFPQLLVYERLQQLPLCHSKTEQPRATKKGGSRSSAPAPARLLRG

SEQ ID NO: 764817 - protein, 264 aa, Homo sapiens
MVQLAPAAAMDEVTFRSDTVLSDVHLYTPNHRHLMVRLNSVGQPVFLSQFKLLWSQDSWTDSGAKGGSHRDVHTKEPPSAETGSTGSPPGSGHGNEGFSLQAGTDTTGQEVAEAQLDEDGDLDVVRRPRAASDSNPAGPLRDKVHPMILAQEEDDVLGEEAQGSPHDIIRIEHTMAPPWRMLAAGVAGACPGTTPVRQTLEVSALDSGPRSCYRAQGGRCPVGRSGRAGIAHPVRGFAPRGGRPPGGARAAWPPRGDRFCCDVL

SEQ ID NO: 764818 - protein, 111 aa, Homo sapiens
DRRSVKARPGDMRSVRDRKARWVETAKPFPLMMAVCASGWLVCRLNFTLRHLDVTCEAYDHFRSCLHALEQLTDGKLRFVVEPVEASFPQLLVYERLQQLELWKIIAEPVT

SEQ ID NO: 764819 - protein, 433 aa, Homo sapiens
MVQLAPAAAMDEVTFRSDTVLSDVHLYTPNHRHLMVRLNSVGQPVFLSQFKLLWSQDSWTDSGAKGGSHRDVHTKEPPSAETGSTGSPPGSGHGNEGFSLQAGTDTTGQEVAEAQLDEDGDLDVVRRPRAASDSNPAGPLRDKVHPMILAQEEDDVLGEEAQGSPHDIIRIEHTMATPLEDVGKQVGRSCPLPVALMGPCRASRCLSLLSSSLQVWRGALLLADYILFRQDLFRGCTALELGAGTGLASIIAATMARTVYCTDVGADLLSMCQRNIALNSHLAATGGGIVRVKELDWLKDDLCTDPKVPFSWSQEEISDLYDHTTILFAAEVFYDDDLTDAVFKTLSRLAHRLKNACTAILSVEKRLNFTLRHLDVTCEAYDHFRSCLHALEQLTDGKLRFVVEPVEASFPQLLVYERLQQLELWKIIAEPVT

SEQ ID NO: 764820 - protein, 179 aa, Homo sapiens; identical to SEQ ID NO: 764804

SEQ ID NO: 764821 - protein, 182 aa, Homo sapiens [sequence omitted]

SEQ ID NO: 764822 - protein, 199 aa, Homo sapiens [sequence omitted]

SEQ ID NO: 764823 - protein, 179 aa, Homo sapiens; identical to SEQ ID NO: 764804

SEQ ID NO: 764824 - protein, 205 aa, Homo sapiens; identical to SEQ ID NO: 764809

SEQ ID NO: 764825 - protein, 140 aa, Homo sapiens
MSCEEVVLCPFYPKVPFSWSQEEISDLYDHTTILFAAEVFYDDDLTDAVFKTLSRLAHRLKNACTAILSVEKRLNFTLRHLDVTCEAYDHFRSCLHALEQLTDGKLRFVVEPVEASFPQLLVYERLQQLELWKIIAEPVT

SEQ ID NO: 764826 - protein, 1557 aa, Homo sapiens
MQRMIQQFAAEYTSKNSSTQDPSQPNSTKNQSLPKASPVTTSPTAATTQNPVLSKLLMADQDSPLDLTVRKSQSEPSEQDGVLDLSTKKSPCAGSTSLSHSPGCSSTQGNGENSTEAKAVDSNNQSKSPLEKFMVKLCTHHQKQFIRVLNDLYTESQPGTEDLQPSDSGAMDVSTCNAGCAQLSTKHKEKDALCLDMKSSASVDLFVDSSDSHSPLHLTEQTPKKPPPEINPVDGRENALTVVQKDSSELPTTKSNSINSSSVDSFTPGYLTASNCSSVNFHHIPKILEGQTTGQEQDTNVNICEDGKDHMQSSALVESLITVKMAAENSEEGNTCIIPQRNLFKALSEEAWNSGFMGNSSRTADKENTLQCPKTPLRQDLEANEQDARPKQENHLHSLGRNKVGYHLHPSDKGQFDHSKDGWLGPGPMPAVHKAANGHSRTKMISTSIKTARKSKRASGLRINDYDNQCDVVYISQPITECHFENQKSILSSRKTARKSTRGYFFNGDCCELPTVRTLARNLHSQEKASCSALASEAVFTPKQTLTIPAPRHTVDVQLPREDNPEEPSKEITSHEEGGGDVSPRKEPQEPEVCPTKIKPNLSSSPRSEETTASSLVWPLPAHLPEEDLPEGGSTVSAPTASGMSSPEHNQPPVALLDTEEMSVPQDCHLLPSTESFSGGVSEDVISRPHSPPEIVSREESPQCSENQSSPMGLEPPMSLGKAEDNQSISAEVESGDTQELNVDPLLKESSTFTDENPSETEESEAAGGIGKLEGEDGDVKCLSEKDTYDTSIDSLEENLDKKKKGKKFPEASDRCLRSQLSDSSSADRCLRNQSSDSSSACLEIKVPKNPSAKRSKKEGHPGGTTPKGLLPDSFHTETLEDTEKPSVNERPSEKDAEQEGEGGGIITRQTLKNMLDKEVKELRGEIFPSRDPITTAGQPLPGERLEIYVQSKMDEKNAHIPSESIACKRDPEQAKEEPGHIPTQHVEEAVNEVDNENTQQKDDESDAPCSSLGLSSSGSGDAARAPKSVPRPKRLTSSTYNLRHAHSLGSLDASKVTSEKEAAQVNPIMPKENGASESGDPLDEDDVDTVVDEQPKFMEWCAEEENQELIANFNAQYMKVQKGWIQLEKEGQPTPRARNKSDKLKEIWKSKKRSRKCRSSLESQKCSPVQMLFMTNFKLSNVCKWFLETTETRSLVIVKKLNTRLPGDVPPVKHPLQKYAPSSLYPSSLQAERLKKHLKKFPGATPAKNNWKMQKLWAKFRENPDQVEPEDGSDVSPGPNSEDSIEEVKEDRNSHPPANLPTPASTRILRKYSNIRGKLRAQQRLIKNEKMECPDALAVESKPSRKSVCINPLMSPKLALQVDADGFPVKPKSTEGMKGRKGKQVSEILPKAEVQSKRKRTEGSSPPDSKNKGPTVKASKEKHADGATKTPAAKRPAARDRSSQPPKKTSLKENKVKIPKKSAGKSCPPSRKEKENTNKRPSQSIASETLTKPAKQKGAGESSSRPQKATNRKQSSGKTRARPSTKTPESSAAQRKRKLKAKLDCSHSKRRRLDAK

SEQ ID NO: 764827 - protein, 1557 aa, Homo sapiens; identical to SEQ ID NO: 764826

SEQ ID NO: 764828 - protein, 112 aa, Homo sapiens
MQRMIQQFAAEYTSKNSSTQDPSQPNSTKNQSLPKASPVTTSPTAATTQNPVLSKLLMADQDSPLDLTVRKSQSEPSEQDGVLDLSTKKSPCAGSTSLSHSPGCSSTQGNGG

SEQ ID NO: 764829 - protein, 433 aa, Homo sapiens
MQRMIQQFAAEYTSKNSSTQDPSQPNSTKNQSLPKASPVTTSPTAATTQNPVLSKLLMADQDSPLDLTVRKSQSEPSEQDGVLDLSTKKSPCAGSTSLSHSPGCSSTQGNGRPGRPSQYRPDGLRSGDGVPPRSLQDGTREGFGHSTSLKVPLARSLQISEELLSRNQLSTAASLGPSGLQNHGQHLILSREASWAKPHYEFNLSRMKFRGNGALSNISDLPFLAENSAFPKMALQAKQDGKKDVSHSSPVDLKIPQVRGMDLSWESRTGDQYSYSSLVMGSQTESALSKKLRAILPKQSRKSMLDAGPDSWGSDAEQSTSGQPYPTSDQEGDPGSKQPRKKRGRYRQYNSEILEEAISVVMSGKMSVSKAQSIYGIPHSTLEYKVKERLGTLKNPPKKKMKLMRSEGPDVSVKIELDPQGEAAQSANESKNE

SEQ ID NO: 764830 - protein, 1511 aa, Homo sapiens
MQRMIQQFAAEYTSKNSSTQDPSQPNSTKNQSLPKASPVTTSPTAATTQNPVLSKLLMADQDSPLDLTVRKSQSEPSEQDGVLDLSTKKSPCAGSTSLSHSPGCSSTQGNGENSTEAKAVDSNNQSKSPLEKFMVKLCTHHQKQFIRVLNDLYTESQPGTEDLQPSDSGAMDVSTCNAGCAQLSTKHKEKDALCLDMKSSASVDLFVDSSDSHSPLHLTEQTPKKPPPEINPVDGRENALTVVQKDSSELPTTKSNSINSSSVDSFTPGYLTASNCSSVNFHHIPKILEGQTTGQEQDTNVNICEDGKDHMQSSALVESLITVKMAAENSEEGNTCIIPQRNLFKALSEEAWNSGFMGNSSRTADKENTLQCPKTPLRQDLEANEQDARPKQENHLHSLGRNKVGYHLHPSDKGQFDHSKDGWLGPGPMPAVHKAANGHSRTKMISTSIKTARKSKRASGLRINDYDNQCDVVYISQPITECHFENQKSILSSRKTARKSTRGYFFNGDCCELPTVRTLARNLHSQEKASCSALASEAVFTPKQTLTIPAPRHTVDVQLPREDNPEEPSKEITSHEEGGGDVSPRKEPQEPEVCPTKIKPNLSSSPRSEETTASSLVWPLPAHLPEEDLPEGGSTVSAPTASGMSSPEIVSREESPQCSENQSSPMGLEPPMSLGKAEDNQSISAEVESGDTQELNVDPLLKESSTFTDENPSETEESEAAGGIGKLEGEDGDVKCLSEKDTYDTSIDSLEENLDKKKKGKKFPEASDRCLRSQLSDSSSADRCLRNQSSDSSSACLEIKVPKNPSAKRSKKEGHPGGTTPKGLLPDSFHTETLEDTEKPSVNERPSEKDAEQEGEGGGIITRQTLKNMLDKEVKELRGEIFPSRDPITTAGQPLPGERLEIYVQSKMDEKNAHIPSESIACKRDPEQAKEEPGHIPTQHVEEAVNEVDNENTQQKDDESDAPCSSLGLSSSGSGDAARAPKSVPRPKRLTSSTYNLRHAHSLGSLDASKVTSEKEAAQVNPIMPKENGASESGDPLDEDDVDTVVDEQPKFMEWCAEEENQELIANFNAQYMKVQKGWIQLEKEGQPTPRARNKSDKLKEIWKSKKRSRKCRSSLESQKCSPVQMLFMTNFKLSNVCKWFLETTETRSLVIVKKLNTRLPGDVPPVKHPLQKYAPSSLYPSSLQAERLKKHLKKFPGATPAKNNWKMQKLWAKFRENPDQVEPEDGSDVSPGPNSEDSIEEVKEDRNSHPPANLPTPASTRILRKYSNIRGKLRAQQRLIKNEKMECPDALAVESKPSRKSVCINPLMSPKLALQVDADGFPVKPKSTEGMKGRKGKQVSEILPKAEVQSKRKRTEGSSPPDSKNKGPTVKASKEKHADGATKTPAAKRPAARDRSSQPPKKTSLKENKVKIPKKSAGKSCPPSRKEKENTNKRPSQSIASETLTKPAKQKGAGESSSRPQKATNRKQSSGKTRARPSTKTPESSAAQRKRKLKAKLDCSHSKRRRLDAK

SEQ ID NO: 764831 - protein, 83 aa, Homo sapiens
GAQRGDVTGLEGQNPELRLGAPPPPLSLASEAAQIQQDQGQWRQDFTQGRDQDGLVLQCPGTPWATEGSTLRTGLLSERLLVT

SEQ ID NO: 764832 - protein, 133 aa, Homo sapiens
MRGCHMGPWLGLLPETSPCGFSLWAGLLHSVSLGCTGEHLKSERGRHRSQVHHFDHILFIHLPGSREGEKSSTCKWGSTRGTRNIAASSMGKCFCNTVESCQYYLHFAINLPRFREFSTCLDWQFSTFSFSQI

SEQ ID NO: 764833 - protein, 107 aa, Homo sapiens [sequence omitted]

SEQ ID NO: 764834 - protein, 107 aa, Homo sapiens [sequence omitted]

SEQ ID NO: 764835 - protein, 75 aa, Homo sapiens
NLGFIKNIQQVFGDKKKFWLIPIGSSPGDGHSFPMRSMNESQNPLLANEETWEDNEDDNQDYPEGSSSLAVETET

SEQ ID NO: 764836 - protein, 485 aa, Homo sapiens
RLGPPVACAPARGAEGTGSDSEMAASMFYGRLVAVATLRNHRPRTAQRAAAQVLGSSGLFNNHGLQVQQQQQRNLSLHEYMSMELLQEAGVSVPKGYVAKSPDEAYAIAKKLGSKDVVIKAQVLAGGRGKGTFESGLKGGVKIVFSPEEAKAVSSQMIGKKLFTKQTGEKGRICNQVLVCERKYPRREYYFAITMERSFQGPVLIGSSHGGVNIEDVAAETPEAIIKEPIDIEEGIKKEQALQLAQKMGFPPNIVESAAENMVKLYSLFLKYDATMIEINPMVEDSDGAVLCMDAKINFDSNSAYRQKKIFDLQDWTQEDERDKDAAKANLNYIGLDGNIGCLVNGAGLAMATMDIIKLHGGTPANFLDVGGGATVHQVTEAFKLITSDKKVLAILVNIFGGIMRCDVIAQGIVMAVKDLEIKIPVVVRLQGTRVDDAKALIADSGLKILACDDLDEAARMVVKLSEIVTLAKQAHVDVKFQLPI

SEQ ID NO: 764837 - protein, 485 aa, Homo sapiens; identical to SEQ ID NO: 764836

SEQ ID NO: 764838 - protein, 446 aa, Homo sapiens
NQSESSRPLQLSAVLGSSGLFNNHGLQVQQQQQRNLSLHEYMSMELLQEAGVSVPKGYVAKSPDEAYAIAKKLGSKDVVIKAQVLAGGRGKGTFESGLKGGVKIVFSPEEAKAVSSQMIGKKLFTKQTGEKGRICNQVLVCERKYPRREYYFAITMERSFQGPVLIGSSHGGVNIEDVAAETPEAIIKEPIDIEEGIKKEQALQLAQKMGFPPNIVESAAENMVKLYSLFLKYDATMIEINPMVEDSDGAVLCMDAKINFDSNSAYRQKKIFDLQDWTQEDERDKDAAKANLNYIGLDGNIGCLVNGAGLAMATMDIIKLHGGTPANFLDVGGGATVHQVTEAFKLITSDKKVLAILVNIFGGIMRCDVIAQGIVMAVKDLEIKIPVVVRLQGTRVDDAKALIADSGLKILACDDLDEAARMVVKLSEIVTLAKQAHVDVKFQLPI

SEQ ID NO: 764839 - protein, 517 aa, Homo sapiens
RLGPPVACAPARGAEGTGSDSEMAASMFYGRLVAVATLRNHRPRTAQRAAAQVLGSSGLFNNHGLQVQQQQQRNLSLHEYMSMELLQEAGVSVPKGYVAKSPDEAYAIAKKLGTEERNNMCRINCNYEYFWQVLWDQNSQVIRSSSKDVVIKAQVLAGGRGKGTFESGLKGGVKIVFSPEEAKAVSSQMIGKKLFTKQTGEKGRICNQVLVCERKYPRREYYFAITMERSFQGPVLIGSSHGGVNIEDVAAETPEAIIKEPIDIEEGIKKEQALQLAQKMGFPPNIVESAAENMVKLYSLFLKYDATMIEINPMVEDSDGAVLCMDAKINFDSNSAYRQKKIFDLQDWTQEDERDKDAAKANLNYIGLDGNIGCLVNGAGLAMATMDIIKLHGGTPANFLDVGGGATVHQVTEAFKLITSDKKVLAILVNIFGGIMRCDVIAQGIVMAVKDLEIKIPVVVRLQGTRVDDAKALIADSGLKILACDDLDEAARMVVKLSEIVTLAKQAHVDVKFQLPI

SEQ ID NO: 764840 - protein, 337 aa, Homo sapiens
RLGPPVACAPARGAEGTGSDSEMAASMFYGRLVAVATLRNHRPRTAQRAAAQGPVLIGSSHGGVNIEDVAAETPEAIIKEPIDIEEGIKKEQALQLAQKMGFPPNIVESAAENMVKLYSLFLKYDATMIEINPMVEDSDGAVLCMDAKINFDSNSAYRQKKIFDLQDWTQEDERDKDAAKANLNYIGLDGNIGCLVNGAGLAMATMDIIKLHGGTPANFLDVGGGATVHQVTEAFKLITSDKKVLAILVNIFGGIMRCDVIAQGIVMAVKDLEIKIPVVVRLQGTRVDDAKALIADSGLKILACDDLDEAARMVVKLSEIVTLAKQAHVDVKFQLPI

SEQ ID NO: 764841 - protein, 463 aa, Homo sapiens
APWAACRLCACARRRGDGVRLRNGGLHVLRQASGRGHPSEPPASDGPAGCCSGSKDVVIKAQVLAGGRGKGTFESGLKGGVKIVFSPEEAKAVSSQMIGKKLFTKQTGEKGRICNQVLVCERKYPRREYYFAITMERSFQGPVLIGSSHGGVNIEDVAAETPEAIIKEPIDIEEGIKKEQALQLAQKMGFPPNIVESAAENMVKLYSLFLKYDATMIEINPMVEDSDGAVLCMDAKINFDSNSAYRQKKIFDLQDWTQEDERDKDAAKANLNYIGLDGNIGCLGTMCFYVRIGFTKFNLDLLSLIYFLCVCCLYNIIFPYIVNGAGLAMATMDIIKLHGGTPANFLDVGGGATVHQVTEAFKLITSDKKVLAILVNIFGGIMRCDVIAQGIVMAVKDLEIKIPVVVRLQGTRVDDAKALIADSGLKILACDDLDEAARMVVKLSEIVTLAKQAHVDVKFQLPI

SEQ ID NO: 764842 - protein, 213 aa, Homo sapiens
RLGPPVACAPARGAEGTGSDSEMAASMFYGRLVAVATLRNHRPRTAQRAAAQVLGSSGLFNNHGLQVQQQQQRNLSLHEYMSMELLQEAGVSVPKGYVAKSPDEAYAIAKKLGSKDVVIKAQVLAGGRGKGTFESGLKGGVKIVFSPEEAKAVSSQMIGKKLFTKQTGEKGRICNQVLVCERKYPRREYYFAITMERSFQVSNCRHDTYGINL

SEQ ID NO: 764843 - protein, 463 aa, Homo sapiens
APWAACRLCACARRRGDGVRLRNGGLHVLRQASGRGHPSEPPASDGPQQQRNLSLHEYMSMELLQEAGVSVPKGYVAKSPDEAYAIAKKLGSKDVVIKAQVLAGGRGKGTFESGLKGGVKIVFSPEEAKAVSSQMIGKKLFTKQTGEKGRICNQVLVCERKYPRREYYFAITMERSFQGPVLIGSSHGGVNIEDVAAETPEAIIKEPIDIEEGIKKEQALQLAQKMGFPPNIVESAAENMVKLYSLFLKYDATMIEINPMVEDSDGAVLCMDAKINFDSNSAYRQKKIFDLQDWTQEDERDKDAAKANLNYIGLDGNIGCLVNGAGLAMATMDIIKLHGGTPANFLDVGGGATVHQVTEAFKLITSDKKVLAILVNIFGGIMRCDVIAQGIVMAVKDLEIKIPVVVRLQGTRVDDAKALIADSGLKILACDDLDEAARMVVKLSEIVTLAKQAHVDVKFQLPI

SEQ ID NO: 764844 - protein, 523 aa, Homo sapiens
RLGPPVACAPARGAEGTGSDSEMAASMFYGRLVAVATLRNHRPRTAQRAAAQVLGSSGLFNNHGLQVQQQQQRNLSLHEYMSMELLQEAGVSVPKGYVAKSPDEAYAIAKKLGSKDVVIKAQVLAGGRGKGTFESGLKGGVKIVFSPEEAKAVSSQMIGKKLFTKQTGEKGRICNQVLVCERKYPRREYYFAITMERSFQGPVLIGSSHGGVNIEDVAAETPEAIIKEPIDIEEGIKKEQALQLAQKMGFPPNIVESAAENMVKLYSLFLKYDATMIEINPMVEDSDGAVLCMDAKINFDSNSAYRQKKIFDLQDWTQEDERDKDAAKANLNYIGLDGNIGCLGTMCFYVRIGFTKFNLDLLSLIYFLCVCCLYNIIFPYIVNGAGLAMATMDIIKLHGGTPANFLDVGGGATVHQVTEAFKLITSDKKVLAILVNIFGGIMRCDVIAQGIVMAVKDLEIKIPVVVRLQGTRVDDAKALIADSGLKILACDDLDEAARMVVKLSEIVTLAKQAHVDVKFQLPI

SEQ ID NO: 764845 - protein, 467 aa, Homo sapiens
RLGPPVACAPARGAEGTGSDSEMAASMFYGRLVAVATLRNHRPRTAQRAAAQVLGSSGLFNNHGLQVQQQQQRNLSLHEYMSMELLQEAGVSVPKGYVAKSPDEAYAIAKKLGSKDVVIKAQVLAGGRGKGTFESGLKGGVKIVFSPEEAKAVSSQMIGKKLFTKQTGEKGRICNQVLVCERGPVLIGSSHGGVNIEDVAAETPEAIIKEPIDIEEGIKKEQALQLAQKMGFPPNIVESAAENMVKLYSLFLKYDATMIEINPMVEDSDGAVLCMDAKINFDSNSAYRQKKIFDLQDWTQEDERDKDAAKANLNYIGLDGNIGCLVNGAGLAMATMDIIKLHGGTPANFLDVGGGATVHQVTEAFKLITSDKKVLAILVNIFGGIMRCDVIAQGIVMAVKDLEIKIPVVVRLQGTRVDDAKALIADSGLKILACDDLDEAARMVVKLSEIVTLAKQAHVDVKFQLPI

SEQ ID NO: 764846 - protein, 473 aa, Homo sapiens
RLGPPVACAPARGAEGTGSDSEMAASMFYGRLVAVATLRNHRPRTAQRAAAQVLGSSGLFNNHGLQVQQQQQRNLSLHEYMSMELLQEAGVSVPKGYVAKSPDEAYAIAKKLGSKDVVIKAQVLAGGRGKGTFESGLKGGVKIVFSPEEAKAVSSQMIGKKLFTKQTGEKGRICNQVLVCERKYPRREYYFAITMERSFQGPVLIGSSHGGVNIEDVAAETPEAIIKEPIDIEEGIKKEQALQLAQKMGFPPNIVESAAENMVKLYSLFLKYDATMIEINPMVEDSDGAVLCMDAKINFDSNSAYRQKKIFDLQDWTQEDERDKDAAKANLNYIGLDGNIGCLVNGAGLAMATMDIIKLHGGTPANFLDVGGGATVHQVTEAFKLITSDKKVLAILVNIFGGIMRCDVIAQGIVMAVKDLEIKIPVVVRLQGTRVDDAKALIADSGLKILACDDLDEAARMVFWDSVLEAVCL

SEQ ID NO: 764847 - protein, 381 aa, Homo sapiens
RLGPPVACAPARGAEGTGSDSEMAASMFYGRLVAVATLRNHRPRTAQRAAAQVLGSSGLFNNHGLQVQQQQQRNLSLHEYMSMELLQEAGVSVPKGYVAKSPDEAYAIAKKLGSKDVVIKAQVLAGGRGKGTFESGLKGGVKIVFSPEEAKAVSSQMIGKKLFTKQTGEKGRICNQVLVCERKYPRREYYFAITMERSFQGPVLIGSSHGGVNIEDVAAETPEAIIKEPIDIEEGIKKEQALQLAQKMGFPPNIVESAAENMVKLYSLFLKYDATMIEINPMVEDSDGAVLCMDAKINFDSNSAYRQKKIFDLQDWTQEDERDKDAAKANLNYIGLDGNIGCLVNGAGLAMATMDIIKLHGGTPANFLDVGGGATVHQYKH

SEQ ID NO: 764848 - protein, 1366 aa, Homo sapiens
MLAVGPAMDRDYPQHEPPPAGSLLYSPPPLQSAMLHCPYWNTFSLPPYPAFSSDSRPFMSSASFLGSQPCPDTSYAPVATASSLPPKTCDFAQDSSYFEDFSNISIFSSSVDSLSDIVDTPDFLPADSLNQVSTIWDDNPAPSTHDKLFQLSRPFAGFEDFLPSHSTPLLVSYQEQSVQSQPEEEDEAEEEEAEELGHTETYADYVPSKSKIGKQHPDRVVETSTLSSVPPPDITYTLALPSDSGALSALQLEAITYACQQHEVLLPSGQRAGFLIGDGAGVGKGRTVAGVILENHLRGRKKALWFSVSNDLKYDAERDLRDIEATGIAVHALSKIKYGDTTTSEGVLFATYSALIGESQAGGQHRTRLRQILDWCGEAFEGVIVFDECHKAKNAGSTKMGKAVLDLQNKLPLARVVYASATGASEPRNMIYMSRLGIWGEGTPFRNFEEFLHAIEKRGVGAMEIVAMDMKVSGMYIARQLSFSGVTFRIEEIPLAPAFECVYNRAALLWAEALNVFQQAADWIGLESRKSLWGQFWSAHQRFFKYLCIAAKVRRLVELAREELARDKCVVIGLQSTGEARTREVLGENDGHLNCFVSAAEGVFLSLIQKHFPSTKRKRDRGAGSKRKRRPRGRGAKAPRLACETAGVIRISDDSSTESDPGLDSDFNSSPESLVDDDVVIVDAVGLPSDDRGPLCLLQRDPHGPGVLERVERLKQDLLDKVRRLGRELPVNTLDELIDQLGGPQRVAEMTGRKGRVVSRPDGTVAFESRAEQGLSIDHVNLREKQRFMSGEKLVAIISEASSSGVSLQADRRVQNQRRRVHMTLELPWSADRAIQQFGRTHRSNQVSAPEYVFLISELAGERRFASIVAKRLESLGALTHGDRRATESRDLSKYNFENKYGTRALHCVLTTILSQTENKVPVPQGYPGGVPTFFRDMKQGLLSVGIGGRESRNGCLDVEKDCSITKFLNRILGLEVHKQNALFQYFSDTFDHLIEMDKREGKYDMGILDLAPGIEEIYEESQQVFLAPGHPQDGQVVFYKISVDRGLKWEDAFAKSLALTGPYDGFYLSYKVRGNKPSCLLAEQNRGQFFTVYKPNIGRQSQLEALDSLRRKFHRVTAEEAKEPWESGYALSLTHCSHSAWNRHCRLAQEGKDCLQGLRLRHHYMLCGALLRVWGRIAAVMADVSSSSYLQIVRLKTKDRKKQVGIKIPEGCVRRVLQELRLMDADVKRRQAPALGCPAPPAPRPLALPCGPGEVLDLTYSPPAEAFPPPPHFSFPAPLSLDAGPGVVPLGTPDAQADPAALAHQGCDINFKEVLEDMLRSLHAGPPSEGALGEGAGAGGAAGGGPERQSVIQFSPPFPGAQAPL

SEQ ID NO: 764849 - protein, 1312 aa, Homo sapiens
AAVMREPLPGSASWGTPGPPSAGTMSQLQLWLQFEALNKDSSYFEDFSNISIFSSSVDSLSDIVDTPDFLPADSLNQVSTIWDDNPAPSTHDKLFQLSRPFAGFEDFLPSHSTPLLVSYQEQSVQSQPEEEDEAEEEEAEELGHTETYADYVPSKSKIGKQHPDRVVETSTLSSVPPPDITYTLALPSDSGALSALQLEAITYACQQHEVLLPSGQRAGFLIGDGAGVGKGRTVAGVILENHLRGRKKALWFSVSNDLKYDAERDLRDIEATGIAVHALSKIKYGDTTTSEGVLFATYSALIGESQAGGQHRTRLRQILDWCGEAFEGVIVFDECHKAKNAGSTKMGKAVLDLQNKLPLARVVYASATGASEPRNMIYMSRLGIWGEGTPFRNFEEFLHAIEKRGVGAMEIVAMDMKVSGMYIARQLSFSGVTFRIEEIPLAPAFECVYNRAALLWAEALNVFQQAADWIGLESRKSLWGQFWSAHQRFFKYLCIAAKVRRLVELAREELARDKCVVIGLQSTGEARTREVLGENDGHLNCFVSAAEGVFLSLIQKHFPSTKRKRDRGAGSKRKRRPRGRGAKAPRLACETAGVIRISDDSSTESDPGLDSDFNSSPESLVDDDVVIVDAVGLPSDDRGPLCLLQRDPHGPGVLERVERLKQDLLDKVRRLGRELPVNTLDELIDQLGGPQRVAEMTGRKGRVVSRPDGTVAFESRAEQGLSIDHVNLREKQRFMSGEKLVAIISEASSSGVSLQADRRVQNQRRRVHMTLELPWSADRAIQQFGRTHRSNQVSAPEYVFLISELAGERRFASIVAKRLESLGALTHGDRRATESRDLSKYNFENKYGTRALHCVLTTILSQTENKVPVPQGYPGGVPTFFRDMKQGLLSVGIGGRESRNGCLDVEKDCSITKFLNRILGLEVHKQNALFQYFSDTFDHLIEMDKREGKYDMGILDLAPGIEEIYEESQQVFLAPGHPQDGQVVFYKISVDRGLKWEDAFAKSLALTGPYDGFYLSYKVRGNKPSCLLAEQNRGQFFTVYKPNIGRQSQLEALDSLRRKFHRVTAEEAKEPWESGYALSLTHCSHSAWNRHCRLAQEGKDCLQGLRLRHHYMLCGALLRVWGRIAAVMADVSSSSYLQIVRLKTKDRKKQVGIKIPEGCVRRVLQELRLMDADVKRRQAPALGCPAPPAPRPLALPCGPGEVLDLTYSPPAEAFPPPPHFSFPAPLSLDAGPGVVPLGTPDAQADPAALAHQGCDINFKEVLEDMLRSLHAGPPSEGALGEGAGAGGAAGGGPERQSVIQFSPPFPGAQAPL

SEQ ID NO: 764850 - protein, 504 aa, Homo sapiens
THAVADGVGRPTRPGALTHGDRRATESRDLSKYNFENKYGTRALHCVLTTILSQTENKVPVPQGYPGGVPTFFRDMKQGLLSVGIGGRESRNGCLDVEKDCSITKFLNRILGLEVHKQNALFQYFSDTFDHLIEMDKREGKYDMGILDLAPGIEEIYEESQQVFLAPGHPQDGQVVFYKISVDRGLKWEDAFAKSLALTGPYDGFYLSYKVRGNKPSCLLAEQNRGQFFTVYKPNIGRQSQLEALDSLRRKFHRVTAEEAKEPWESGYALSLTHCSHSAWNRHCRLAQEGKDCLQGLRLRHHYMLCGALLRVWGRIAAVMADVSSSSYLQIVRLKTKDRKKQVGIKIPEGCVRRVLQELRLMDADVKRRQAPALGCPAPPAPRPLALPCGPGEVLDLTYSPPAEAFPPPPHFSFPAPLSLDAGPGVVPLGTPDAQADPAALAHQGCDINFKEVLEDMLRSLHAGPPSEGALGEGAGAGGAAGGGPERQSVIQFSPPFPGAQAPL

SEQ ID NO: 764851 - protein, 423 aa, Homo sapiens
GLVANSARGRNGCLDVEKDCSITKFLNRILGLEVHKQNALFQYFSDTFDHLIEMDKREGKYDMGILDLAPGIEEIYEESQQVFLAPGHPQDGQVVFYKISVDRGLKWEDAFAKSLALTGPYDGFYLSYKVRGNKPSCLLAEQNRGQFFTVYKPNIGRQSQLEALDSLRRKFHRVTAEEAKEPWESGYALSLTHCSHSAWNRHCRLAQEGKDCLQGLRLRHHYMLCGALLRVWGRIAAVMADVSSSSYLQIVRLKTKDRKKQVGIKIPEGCVRRVLQELRLMDADVKRRQAPALGCPAPPAPRPLALPCGPGEVLDLTYSPPAEAFPPPPHFSFPAPLSLDAGPGVVPLGTPDAQADPAALAHQGCDINFKEVLEDMLRSLHAGPPSEGALGEGAGAGGAAGGGPERQSVIQFSPPFPGAQAPL

SEQ ID NO: 764852 - protein, 1312 aa, Homo sapiens; identical to SEQ ID NO: 764849

SEQ ID NO: 764853 - protein, 1064 aa, Homo sapiens
AAVMREPLPGSASWGTPGPPSAGTMSQLQLWLQFEALNKDSSYFEDFSNISIFSSSVDSLSDIVDTPDFLPADSLNQVSTIWDDNPAPSTHDKLFQLSRPFAGFEDFLPSHSTPLLVSYQEQSVQSQPEEEDEAEEEEAEELGHTETYADYVPSKSKIGKQHPDRVVETSTLSSVPPPDITYTLALPSDSGALSALQLEAITYACQQHEVLLPSGQRAGFLIGDGAGVGKGRTVAGVILENHLRGRKKALWFSVSNDLKYDAERDLRDIEATGIAVHALSKIKYGDTTTSEGVLFATYSALIGESQAGGQHRTRLRQILDWCGEAFEGVIVFDECHKAKNAGSTKMGKAVLDLQNKLPLARVVYASATGASEPRNMIYMSRLGIWGEGTPFRNFEEFLHAIEKRGVGAMEIVAMDMKVSGMYIARQLSFSGVTFRIEEIPLAPAFECVYNRAALLWAEALNVFQQAADWIGLESRKSLWGQFWSAHQRFFKYLCIAAKVRRLVELAREELARDKCVVIGLQSTGEARTREVLGENDGHLNCFVSAAEGVFLSLIQKHFPSTKRKRDRGAGSKRKRRPRGRGAKAPRLACETAGVIRISDDSSTESDPGLDSDFNSSPESLVDDDVVIVDAVGLPSDDRGPLCLLQRDPHGPGVLERVERLKQDLLDKVRRLGRELPVNTLDELIDQLGGPQRVAEMTGRKGRVVSRPDGTVAFESRAEQGLSIDHVNLREKQRFMSGEKLVAIISEASSSGVSLQADRRVQNQRRRVHMTLELPWSADRAIQQFGRTHRSNQVSAPEYVFLISELAGERRFASIVAKRLESLGALTHGDRRATESRDLSKYNFENKYGTRALHCVLTTILSQTENKVPVPQGYPGGVPTFFRDMKQGLLSVGIGGRESRNGCLDVEKDCSITKFLNRILGLEVHKQNALFQYFSDTFDHLIEMDKREGKYDMGILDLAPGIEEIYEESQQVFLAPGHPQDGQVVFYKISVDRGLKWEDKKNIILEEGKEILVGDVGQTVDDPYATFVKMLPDKDCRYALYDATYETKESKKEDLVFIFWAPESA

SEQ ID NO: 764854 - protein, 560 aa, Homo sapiens
AAVMREPLPGSASWGTPGPPSAGTMSQLQLWLQFEALNKDSSYFEDFSNISIFSSSVDSLSDIVDTPDFLPADSLNQVSTIWDDNPAPSTHDKLFQLSRPFAGFEDFLPSHSTPLLVSYQEQSVQSQPEEEDEAEEEEAEELGHTETYADYVPSKSKIGKQHPDRVVETSTLSSVPPPDITYTLALPSDSGALSALQLEAITYACQQHEVLLPSGQRAGFLIGDGAGVGKGRTVAGVILENHLRGRKKALWFSVSNDLKYDAERDLRDIEATGIAVHALSKIKYGDTTTSEGVLFATYSALIGESQAGGQHRTRLRQILDWCGEAFEGVIVFDECHKAKNAGSTKMGKAVLDLQNKLPLARVVYASATGASEPRNMIYMSRLGIWGEGTPFRNFEEFLHAIEKRGVGAMEIVAMDMKVSGMYIARQLSFSGVTFRIEEIPLAPAFECVYNRAALLWAEALNVFQQAADWIGLESRKSLWGQFWSAHQRFFKYLCIAAKVRRLVELAREELARDKVSGCGLREAVANAKHPFFPLKQVKKAGPGSCKNWFPAVTFPTAVLG

SEQ ID NO: 764855 - protein, 295 aa, Homo sapiens
MLAVGPAMDRDYPQHEPPPAGSLLYSPPPLQSAMLHCPYWNTFSLPPYPAFSSDSRPFMSSASFLGSQPCPDTSYAPVATASSLPPKTCDFAQDSSYFEDFSNISIFSSSVDSLSDIVDTPDFLPADSLNQVSTIWDDNPAPSTHDKLFQLSRPFAGFEDFLPSHSTPLLVSYQVSWAQPRAPSPALLMGPKERAQHRHLHCGERLAGLEAGSAHFIAEEMEALGEHLAAGADRAVSHPWVTQLPMVSLAPAPGGAQCPRRWMQSAALDAVSGVGCSQRRWMQSAALDAVSGVGC

SEQ ID NO: 764856 - protein, 38 aa, Homo sapiens
MDRDYPQHEPPPAGSLLYSPPPLQKRMLTAYWKLSVRI

SEQ ID NO: 764857 - protein, 1339 aa, Homo sapiens
AAVMREPLPGSASWGTPGPPSAGTMSQLQLWLQFEALNKDSSYFEDFSNISIFSSSVDSLSDIVDTPDFLPADSLNQVSTIWDDNPAPSTHDKLFQLSRPFAGFEDFLPSHSTPLLVSYQEQSVQSQPEEEDEAEEEEAEELGHTETYADYVPSKSKIGKQHPDRVVETSTLSSVPPPDITYTLALPSDSGALSALQLEAITYACQQHEVLLPSGQRAGFLIGDGAGVGKGRTVAGVILENHLRGRKKALWFSVSNDLKYDAERDLRDIEATGIAVHALSKIKYGDTTTSEGVLFATYSALIGESQAGGQHRTRLRQILDWCGEAFEGVIVFDECHKAKNAGSTKMGKAVLDLQNKLPLARVVYASATGASEPRNMIYMSRLGIWGEGTPFRNFEEFLHAIEKRGVGAMEIVAMDMKVSGMYIARQLSFSGVTFRIEEIPLAPAFECVYNRAALLWAEALNVFQQAADWIGLESRKSLWGQFWSAHQRFFKYLCIAAKVRRLVELAREELARDKCVVIGLQSTGEARTREVLGENDGHLNCFVSAAEGVFLSLIQKHFPSTKRKRDRGAGSKRKRRPRGRGAKAPRLACETAGVIRISDDSSTESDPGLDSDFNSSPESLVDDDVVIVDAVGLPSDDRGPLCLLQRDPHGPGVLERVERLKQDLLDKVRRLGRELPVNTLDELIDQLGGPQRVAEMTGRKGRVVSRPDGTVAFESRAEQGLSIDHVNLREKQRFMSGEKLVAIISEASSSGVSLQADRRVQNQRRRVHMTLELPWSADRAIQQFGRTHRSNQVSAPEYVFLISELAGERRFASIVAKRLESLGALTHGDRRATESRDLSKYNFENKYGTRALHCVLTTILSQTENKVPVPQGYPGGVPTFFRDMKQGLLSVGIGGRESRNGCLDVEKDCSITKFLNRILGLEVHKQNALFQYFSDTFDHLIEMDKREGKYDMGILDLAPGIEEIYEESQQVFLAPGHPQDGQVVFYKISVDRGLKWEDAFAKSLALTGPYDGFYLSYKVGSGGVTPPEEGPRGADRARPQRPPPQVRGNKPSCLLAEQNRGQFFTVYKPNIGRQSQLEALDSLRRKFHRVTAEEAKEPWESGYALSLTHCSHSAWNRHCRLAQEGKDCLQGLRLRHHYMLCGALLRVWGRIAAVMADVSSSSYLQIVRLKTKDRKKQVGIKIPEGCVRRVLQELRLMDADVKRRQAPALGCPAPPAPRPLALPCGPGEVLDLTYSPPAEAFPPPPHFSFPAPLSLDAGPGVVPLGTPDAQADPAALAHQGCDINFKEVLEDMLRSLHAGPPSEGALGEGAGAGGAAGGGPERQSVIQFSPPFPGAQAPL

SEQ ID NO: 764858 - protein, 487 aa, Homo sapiens
GVQGKPASSLGLLPESPSPPEYGTRALHCVLTTILSQTENKVPVPQGYPGGVPTFFRDMKQGLLSVGIGGRESRNGCLDVEKDCSITKFLNRILGLEVHKQNALFQYFSDTFDHLIEMDKREGKYDMGILDLAPGIEEIYEESQQVFLAPGHPQDGQVVFYKISVDRGLKWEDAFAKSLALTGPYDGFYLSYKVRGNKPSCLLAEQNRGQFFTVYKPNIGRQSQLEALDSLRRKFHRVTAEEAKEPWESGYALSLTHCSHSAWNRHCRLAQEGKDCLQGLRLRHHYMLCGALLRVWGRIAAVMADVSSSSYLQIVRLKTKDRKKQVGIKIPEGCVRRVLQELRLMDADVKRRQAPALGCPAPPAPRPLALPCGPGEVLDLTYSPPAEAFPPPPHFSFPAPLSLDAGPGVVPLGTPDAQADPAALAHQGCDINFKEVLEDMLRSLHAGPPSEGALGEGAGAGGAAGGGPERQSVIQFSPPFPGAQAPL

SEQ ID NO: 764859 - protein, 275 aa, Homo sapiens
GRRAQLSLGLPALTPPRLMRPCVPEVTAEEAKEPWESGYALSLTHCSHSAWNRHCRLAQEGKDCLQGLRLRHHYMLCGALLRVWGRIAAVMADVSSSSYLQIVRLKTKDRKKQVGIKIPEGCVRRVLQELRLMDADVKRRQAPALGCPAPPAPRPLALPCGPGEVLDLTYSPPAEAFPPPPHFSFPAPLSLDAGPGVVPLGTPDAQADPAALAHQGCDINFKEVLEDMLRSLHAGPPSEGALGEGAGAGGAAGGGPERQSVIQFSPPFPGAQAPL

SEQ ID NO: 764860 - protein, 674 aa, Homo sapiens
AAVMREPLPGSASWGTPGPPSAGTMSQLQLWLQFEALNKDSSYFEDFSNISIFSSSVDSLSDIVDTPDFLPADSLNQVSTIWDDNPAPSTHDKLFQLSRPFAGFEDFLPSHSTPLLVSYQEQSVQSQPEEEDEAEEEEAEELGHTETYADYVPSKSKIGKQHPDRVVETSTLSSVPPPDITYTLALPSDSGALSALQLEAITYACQQHEVLLPSGQRAGFLIGDGAGVGKGRTVAGVILENHLRGRKKALWFSVSNDLKYDAERDLRDIEATGIAVHALSKIKYGDTTTSEGVLFATYSALIGESQAGGQHRTRLRQILDWCGEAFEGVIVFDECHKAKNAGSTKMGKAVLDLQNKLPLARVVYASATGASEPRNMIYMSRLGIWGEGTPFRNFEEFLHAIEKRGVGAMEIVAMDMKVSGMYIARQLSFSGVTFRIEEIPLAPAFECVYNRAALLWAEALNVFQQAADWIGLESRKSLWGQFWSAHQRFFKYLCIAAKVRRLVELAREELARDKCVVIGLQSTGEARTREVLGENDGHLNCFVSAAEGVFLSLIQKHFPSTKRKRDRGAGSKRKRRPRGRGAKAPRLACETAGVIRISDDSSTESDPGLDSDFNSSPESLVDDDVVIVDAVGLPSDDRGPLCLLQRDPHGPRPRSWQGGACGFYVFIASSDVHM

SEQ ID NO: 764861 - protein, 886 aa, Homo sapiens
MRGFNLLLFWGCCVMHSWEGHIRPTRKPNTKGNNCRDSTLCPAYATCTNTVDSYYCTCKQGFLSSNGQNHFKDPGVRCKDIDECSQSPQPCGPNSSCKNLSGRYKCSCLDGFSSPTGNDWVPGKPGNFSCTDINECLTSRVCPEHSDCVNSMGSYSCSCQVGFISRNSTCEDVNECADPRACPEHATCNNTVGNYSCFCNPGFESSSGHLSFQGLKASCEDIDECTEMCPINSTCTNTPGSYFCTCHPGFAPSSGQLNFTDQGVECRDIDECRQDPSTCGPNSICTNALGSYSCGCIVGFHPNPEGSQKDGNFSCQRVLFKCKEDVIPDNKQIQQCQEGTAVKPAYVSFCAQINNIFSVLDKVCENKTTVVSLKNTTESFVPVLKQISMWTKFTKEETSSLATVFLESVESMTLASFWKPSANVTPAVRAEYLDIESKVINKECSEENVTLDLVAKGDKMKIGCSTIEESESTETTGVAFVSFVGMESVLNERFFQDHQAPLTTSEIKLKMNSRVVGGIMTGEKKDGFSDPIIYTLENVQPKQKFERPICVSWSTDVKGGRWTSFGCVILEASETYTICSCNQMANLAVIMASGELTMDFSLYIISHVGIIISLVCLVLAIATFLLCRSIRNHNTYLHLHLCVCLLLAKTLFLAGIHKTDNKTGCAIIAGFLHYLFLACFFWMLVEAVILFLMVRNLKVVNYFSSRNIKMLHICAFGYGLPMLVVVISASVQPQGYGMHNRCWLNTETGFIWSFLGPVCTVIVINSLLLTWTLWILRQRLSSVNAEVSTLKDTRLLTFKAFAQLFILGCSWVLGIFQIGPVAGVMAYLFTIINSLQGAFIFLIHCLLNGQVREEYKRWITGKTKPSSQSQTSRILLSSMPSASKTG

SEQ ID NO: 764862 - protein, 886 aa, Homo sapiens; identical to SEQ ID NO: 764861

SEQ ID NO: 764863 - protein, 148 aa, Homo sapiens
DGEPTSSEQGGLEGSGSAAGEGKPALSEEERQEQTKRMLELVAQKQREREEREEREALERERQRRRQGQELSAARQRLQEDEMRRAAEERRREKAEELAARQRVREKIERDKAERAKKYGGSVGSQPPPVAPEPGPVPSSPSQEPPPK

SEQ ID NO: 764864 - protein, 157 aa, Homo sapiens
MAELTALESLIEMGFPRGRGGEGSGSAAGEGKPALSEEERQEQTKRMLELVAQKQREREEREEREALERERQRRRQGQELSAARQRLQEDEMRRAAEERRREKAEELAARQRVREKIERDKAERAKKYGGSVGSQPPPVAPEPGPVPSSPSQEPPPK

SEQ ID NO: 764865 - protein, 77 aa, Homo sapiens
LSVRCGQPAQRAMELMTSEQNRRLGAAGYEAPGVTPPLDGAAGARAGKLVPGGVAGLMTQAAADHPGIRSRGRFLGS

SEQ ID NO: 764866 - protein, 390 aa, Homo sapiens
NEGSQLATGILTRVTQKSVTVAFDESHDFQLSLDRENSYRLLKLANDVTYRRLKKALIALKKYHSGPASSLIEVLFGRSAPSPASEIHPLTFFNTCLDTSQKEAVSFALSQKELAIIHGPPGTGKTTTVVEIILQAVKQGLKVLCCAPSNIAVDNLVERLALCKQRILRLGHPARLLESIQQHSLDAVLARSDSAQIVADIRKDIDQVFVKNKKTQDKREKSNFRNEIKLLRKELKEREEAAMLESLTSANVVLATNTGASADGPLKLLPESYFDVVVIDECAQALEASCWIPLLKARKCILAGDHKQLPPTTVSHKAALAGLSLSLMERLAEEYGARVVRTLTVQYRMHQAIMRWASDTMYLGQLTAHSSVARHLLRDLPGVAATEETG

SEQ ID NO: 764867 - protein, 317 aa, Homo sapiens
NEGSQLATGILTRVTQKSVTVAFDESHDFQLSLDRENSYRLLKLANDVTYRRLKKALIALKKYHSGPASSLIEVLFGRSAPSPASEIHPLTFFNTCLDTSQKEAVSFALSQKELAIIHGPPGTGKTTTVVEIILQAVKQGLKVLCCAPSNIAVDNLVERLALCKQRILRLGHPARLLESIQQHSLDAVLARSDSAQIVADIRKDIDQVFVKNKKTQDKREKSNFRNEIKLLRKELKEREEAAMLESLTSANVVLATNTGASADGPLKLLPESYFDVVVIDECAQALEASCWIPLLKARKCILAGDHKQLPPTTVSHK

SEQ ID NO: 764868 - protein, 1068 aa, Homo sapiens [sequence omitted]

SEQ ID NO: 764869 - protein, 204 aa, Homo sapiens
MKSYRNQPQANSHVYRSVLLKSIPREVVAYNKNINDDFEMIDCDLEDATKTPDCSSGPVKEERSDLIKFYNTIYVGRVKSFALKYDLANQDHMMDAPPLSPFPHIKQQPGSPRRISQQHSIYISPHKNGSGLTPRSALLYKFNGSPSKSLKDINNMIRQGEQRTKKRVIAIDSDAESPAKRVCQENDDVLLKRLQDVVSERANH

SEQ ID NO: 764870 - protein, 917 aa, Homo sapiens
MFEDKPHAEGAAVVAAAGEALQALCQELNLDEGSAAEALDDFTAIRGNYSLEGEVTHWLACSLYVACRKSIIPTVGKGIMEGNCVSLTRILRSAKLSLIQFFSKMKKWMDMSNLPQEFRERIERLERNFEVSTVIFKKYEPIFLDIFQNPYEEPPKLPRSRKQRRIPCSVKDLFNFCWTLFVYTKGNFRMIGDDLVNSYHLLLCCLDLIFANAIMCPNRQDLLNPSFKGLPSDFHTADFTASEEPPCIIAVLCELHDGLLVEAKGIKEHYFKPYISKLFDRKILKGECLLDLSSFTDNSKAVNKEYEEYVLTVGDFDERIFLGADAEEEIGTPRKFTRDTPLGKLTAQANVEYNLQQHFEKKRSFAPSTPLTGRRYLREKEAVITPVASATQSVSRLQSIVAGLKNAPSDQLINIFESCVRNPVENIMKILKGIGETFCQHYTQSTDEQPGSHIDFAVNRLKLAEILYYKILETVMVQETRRLHGMDMSVLLEQDIFHRSLMACCLEIVLFAYSSPRTFPWIIEVLNLQPFYFYKVIEVVIRSEEGLSRDMVKHLNSIEEQILESLAWSHDSALWEALQVSANKVPTCEEVIFPNNFETGNGGNVQGHLPLMPMSPLMHPRVKEVRTDSGSLRRDMQPLSPISVHERYSSPTAGSAKRRLFGEDPPKEMLMDKIITEGTKLKIAPSSSITAENVSILPGQTLLTMATAPVTGTTGHKVTIPLHGVANDAGEITLIPLSMNTNQESKVKSPVSLTAHSLIGASPKQTNLTKAQEVHSTGINRPKRTGSLALFYRKVYHLASVRLRDLCLKLDVSNELRRKIWTCFEFTLVHCPDLMKDRHLDQLLLCAFYIMAKVTKEERTFQEIMKSYRNQPQANSHVYRSVLLKSIPREVVAYNKNINDDFEMIDCGKLSNLTYYM

SEQ ID NO: 764871 - protein, 323 aa, Homo sapiens
EFPRLVSRGLSLRAGVQMGVQPPRFPATPGRSARAVGARSCGRASPATRSPPETPPATPFQRANSRATCPGWGGTYANSVAFGRHIVIQELEGGSGADLGEHSCRPASQPRFPRPAEARSHPATRRPASGPAMGKTNSKLAPEVLEDLVQNTEFSEQELKQWYKGFLKDCPSGILNLEEFQQLYIKFFPYGDASKFAQHAFRTFDKNGDGTIDFREFICALSVTSRGSFEQKLNWAFEMYDLDGDGRITRLEMLEIIEAIYKMVGTVIMMRMNQDGLTPQQRVDKIFKKMDQDKDDQITLEEFKEAAKSDPSIVLLLQCDMQK

SEQ ID NO: 764872 - protein, 323 aa, Homo sapiens; identical to SEQ ID NO: 764871

SEQ ID NO: 764873 - protein, 323 aa, Homo sapiens; identical to SEQ ID NO: 764871

SEQ ID NO: 764874 - protein, 323 aa, Homo sapiens; identical to SEQ ID NO: 764871

SEQ ID NO: 764875 - protein, 323 aa, Homo sapiens; identical to SEQ ID NO: 764871

SEQ ID NO: 764876 - protein, 146 aa, Homo sapiens
MKASVVLSLLGYLVVPSGAYILGRCTVAKKLHDGGLDYFEGYSLENWVCLAYFESKFNPMAIYENTREGYTGFGLFQMRGSDWCGDHGRNRCHMSCSALLNPNLEKTIKCAKTIVKGKEGMGAWPTWSRYCQYSDTLARWLDGCKL

SEQ ID NO: 764877 - protein, 180 aa, Homo sapiens
  misc_feature (17)..(17): Xaa can be any naturally occurring amino acid
IKLIFSYEIMRRSSSMXLLLSTATENRRSRGGEGAEFQVSQICSDTKQRIRMGRSVMASPVAKKLHDGGLDYFEGYSLENWVCLAYFESKFNPMAIYENTREGYTGFGLFQMRGSDWCGDHGRNRCHMSCSALLNPNLEKTIKCAKTIVKGKEGMGAWPTWSRYCQYSDTLARWLDGCKL

SEQ ID NO: 764878 - protein, 146 aa, Homo sapiens; identical to SEQ ID NO: 764876

SEQ ID NO: 764879 - protein, 178 aa, Homo sapiens
MSVLLGPCHTGVPTPRLAEGGLNDHRLRISERQLEMTLRNRWAITAALATWLYILLAPSRPTVAFPPVDGGPRDRARTEDSSPLHSCLWQIHQLGGPPFLPPASVRVRALHVDSHRFLLQQPLPLNRTGIKPQQLVHPTQSTVKAAAQTSPRLSQGLYSFRLSGSQLAEVKMAWAPLL

SEQ ID NO: 764880 - protein, 155 aa, Homo sapiens
GKGYKYNPMYSAYNNVKACLRNHQGPLPPVPLHLRNAPTVAFPPVDGGPRDRARTEDSSPLHSCLWQIHQLGGPPFLPPASVRVRALHVDSHRFLLQQPLPLNRTGIKPQQLVHPTQSTVKAAAQTSPRLSQGLYSFRLSGSQLAEVKMAWAPLL

SEQ ID NO: 764881 - protein, 69 aa, Homo sapiens
LFYWRRKWGTEKFSYWSEVTQRVSREGRGSWNLNLAVWLPSGEEQWMRAKPTRAQTHLRCAAFEPHKSK

SEQ ID NO: 764882 - protein, 69 aa, Homo sapiens; identical to SEQ ID NO: 764881

SEQ ID NO: 764883 - protein, 72 aa, Homo sapiens
SSSVPTGYSITTSTSARRLSRYNDQASSSRIIERIFSGAVTRGKTIQKEGRMSYADFVWFLISEEDKRNPTS

SEQ ID NO: 764884 - protein, 529 aa, Homo sapiens
MMIKETSLRRDPDLRGELAFLARGCDFVLPSRFKKRLKSFQQTQIQNKPEKKPGTPLPPPATSPSSPRPLSPVPHVNNVVNAPLSINIPRFYFPEGLPDTCSNHEQTLSRIETAFMDIEEQKADIYEMGKIAKVCGCPLYWKAPMFRAAGGEKTGFVTAQSFIAMWRKLLNNHHDDASKFICLLAKPNCSSLEQEDFIPLLQDVVDTHPGLTFLKDAPEFHSRYITTVIQRIFYTVNRSWSGKITSTEIRKSNFLQTLALLEEEEDINQITDYFSYEHFYVIYCKFWELDTDHDLYISQADLSRYNDQASSSRIIERIFSGAVTRGKTIQKEGRMSYADFVWFLISEEDKRNPTSIEYWFRCMDVDGDGVLSMYELEYFYEEQCERMEAMGIEPLPFHDLLCQMLDLVKPAVDGKITLRDLKRCRMAHIFYDTFFNLEKYLDHEQRDPFAVQKDVENDGPEPSDWDRFAAEEYETLVAEESAQAQFQEGFEDYETDEPASPSEFGNKSNKILSASLPEKCGKLQSVDEE

SEQ ID NO: 764885 - protein, 233 aa, Homo sapiens
IAATTLLTSTATASSSRIIERIFSGAVTRGKTIQKEGRMSYADFVWFLISEEDKRNPTSIEYWFRCMDVDGDGVLSMYELEYFYEEQCERMEAMGIEPLPFHDLLCQMLDLVKPAVDGKITLRDLKRCRMAHIFYDTFFNLEKYLDHEQRDPFAVQKDVENDGPEPSDWDRFAAEEYETLVAEESAQAQFQEGFEDYETDEPASPSEFGNKSNKILSASLPEKCGKLQSVDEE

SEQ ID NO: 764886 - protein, 881 aa, Homo sapiens
MAATYRLVVSTVNHYSSVVIDRRFEQAIHYCTGTCHTFTHGIDCIVVHHSVCADLLHIPVSQFKDADLNSMFLPHENGLSSAEGDYPQQAFTGIPRVKRGSTFQNTYNLKDIAGEAISFASGKIKEFSFEKLKNSNHAAYRKGRKVKSDSFNRRSVDLDLLCGHYNNDGNAPSFGLLRSSSVEEKPLSHRNSLDTNLTSMFLQNFSEEDLVTQILEKHKIDNFSSGTDIKMCLDILLKCSEDLKKCTDIIKQCIKKKSGSSISEGSGNDTISSSETVYMNVMTRLASYLKKLPFEFMQSGNNEALDLTELISNMPSLQLTPFSPVFGTEQPPKYEDVVQLSASDSGRFQTIELQNDKPNSRKMDTVQSIPNNSTNSLYNLEVNDPRTLKAVQVQSQSLTMNPLENVSSDDLMETLYIEEESDGKKALDKGQKTENGPSHELLKVNEHRAEFPEHATHLKKCPTPMQNEIGKIFEKSFVNLPKEDCKSKVSKFEEGDQRDFTNSSSQEEIDKLLMDLESFSQKMETSLREPLAKGKNSNFLNSHSQLTGQTLVDLEPKSKVSSPIEKVSPSCLTRIIETNGHKIEEEDRALLLRILESIEDFAQELVECKSSRGSLSQEKEMMQILQETLTTSSQANLSVCRSPVGDKAKDTTSAVLIQQTPEVIKIQNKPEKKPGTPLPPPATSPSSPRPLSPVPHVNNVVNAPLSINIPRFYFPEGLPDTCSNHEQTLSRIETAFMDIEEQKADIYEMGKIAKVCGCPLYWKAPMFRAAGGEKTGFVTAQSFIAMWRKLLNNHHDDASKFICLLAKPNCSSLEQEDFIPLLQDVVDTHPGLTFLKDAPEFHSRYITTVIQRIFYTVNRSWSGKITSTEIRKSNFLQKRRI

SEQ ID NO: 764887 - protein, 196 aa, Homo sapiens
MAATYRLVVSTVNHYSSVVIDRRFEQAIHYCTGTCHTFTHGIDCIVVHHSVCADLLHIPVSQFKDADLNSMFLPHENGLSSAEGDYPQQAFTGIPRVKRGSTFQNTYNLKDIAGEAISFASGKIKEFSFEKLKNSNHAAYRKGRKVKSDSFNRRSVDLDLLCGHYNNDGNAPSFGLLRSSSVEKNLCLIETHWIRT

SEQ ID NO: 764888 - protein, 1150 aa, Homo sapiens
MAATYRLVVSTVNHYSSVVIDRRFEQAIHYCTGTCHTFTHGIDCIVVHHSVCADLLHIPVSQFKDADLNSMFLPHENGLSSAEGDYPQQAFTGIPRVKRGSTFQNTYNLKDIAGEAISFASGKIKEFSFEKLKNSNHAAYRKGRKVKSDSFNRRSVDLDLLCGHYNNDGNAPSFGLLRSSSVEEKPLSHRNSLDTNLTSMFLQNFSEEDLVTQILEKHKIDNFSSGTDIKMCLDILLKCSEDLKKCTDIIKQCIKKKSGSSISEGSGNDTISSSETVYMNVMTRLASYLKKLPFEFMQSGNNEALDLTELISNMPSLQLTPFSPVFGTEQPPKYEDVVQLSASDSGRFQTIELQNDKPNSRKMDTVQSIPNNSTNSLYNLEVNDPRTLKAVQVQSQSLTMNPLENVSSDDLMETLYIEEESDGKKALDKGQKTENGPSHELLKVNEHRAEFPEHATHLKKCPTPMQNEIGKIFEKSFVNLPKEDCKSKVSKFEEGDQRDFTNSSSQEEIDKLLMDLESFSQKMETSLREPLAKGKNSNFLNSHSQLTGQTLVDLEPKSKVSSPIEKVSPSCLTRIIETNGHKIEEEDRALLLRILESIEDFAQELVECKSSRGSLSQEKEMMQILQETLTTSSQANLSVCRSPVGDKAKDTTSAVLIQQTPEVIKIQNKPEKKPGTPLPPPATSPSSPRPLSPVPHVNNVVNAPLSINIPRFYFPEGLPDTCSNHEQTLSRIETAFMDIEEQKADIYEMGKIAKVCGCPLYWKAPMFRAAGGEKTGFVTAQSFIAMWRKLLNNHHDDASKFICLLAKPNCSSLEQEDFIPLLQDVVDTHPGLTFLKDAPEFHSRYITTVIQRIFYTVNRSWSGKITSTEIRKSNFLQTLALLEEEEDINQITDYFSYEHFYVIYCKFWELDTDHDLYISQADLSRYNDQASSSRIIERIFSGAVTRGKTIQKEGRMSYADFVWFLISEEDKRNPTSIEYWFRCMDVDGDGVLSMYELEYFYEEQCERMEAMGIEPLPFHDLLCQMLDLVKPAVDGKITLRDLKRCRMAHIFYDTFFNLEKYLDHEQRDPFAVQKDVENDGPEPSDWDRFAAEEYETLVAEESAQAQFQEGFEDYETDEPASPSEFGNKSNKILSASLPEKCGKLQSVDEE

SEQ ID NO: 764889 - protein, 414 aa, Homo sapiens
MDIEEQKADIYEMGKIAKVCGCPLYWKAPMFRAAGGEKTGFVTAQSFIAMWRKLLNNHHDDASKFICLLAKPNCSSLEQEDFIPLLQDVVDTHPGLTFLKDAPEFHSRYITTVIQRIFYTVNRSWSGKITSTEIRKSNFLQTLALLEEEEDINQITDYFSYEHFYVIYCKFWELDTDHDLYISQADLSRYNDQASSSRIIERIFSGAVTRGKTIQKEGRMSYADFVWFLISEEDKRNPTSIEYWFRCMDVDGDGVLSMYELEYFYEEQCERMEAMGIEPLPFHDLLCQMLDLVKPAVDGKITLRDLKRCRMAHIFYDTFFNLEKYLDHEQRDPFAVQKDVENDGPEPSDWDRFAAEEYETLVAEESAQAQFQEGFEDYETDEPASPSEFGNKSNKILSASLPEKCGKLQSVDEE

SEQ ID NO: 764890 - protein, 1150 aa, Homo sapiens; identical to SEQ ID NO: 764888

SEQ ID NO: 764891 - protein, 214 aa, Homo sapiens
KCPTPMQNEIGKIFEKSFVNLPKEDCKSKVSKFEEGDQRDFTNSSSQEEIDKLLMDLESFSQKMETSLREPLAKGKNSNFLNSHSQLTGQTLVDLEPKSKVSSPIEKVSPSCLTRIIETNGHKIEEEDRALLLRILESIEDFAQELVECKSSRGSLSQEKEMMQILQETLTTSSQANLSVCRSPVGDKAKDTTSAVLIQQTPEVIKVRPNNFES

SEQ ID NO: 764892 - protein, 744 aa, Homo sapiens
AGGRGRATRKVRRPSRLPRWDPGLAVPRWPPAQATAARMGRKVTVATCALNQWALDFEGNLQRILKSIEIAKNRGARYRLGPELEICGYGCWDHYYESDTLLHSFQVLAALLESPVTQDIICDVGMPVMHRNVRYNCRVIFLNRKILLIRPKMALANEGNYRELRWFTPWSRSRHTEEYFLPRMIQDLTKQETVPFGDAVLVTWDTCIGSEICEELWTPHSPHIDMGLDGVEIITNASGSHHVLRKANTRVDLVTMVTSKNGGIYLLANQKGCDGDRLYYDGCAMIAMNGSVFAQGSQFSLDDVEVLTATLDLEDVRSYRAEISSRNLAASRASPYPRVKVDFALSCHEDLLAPISEPIEWKYHSPEEEISLGPACWLWDFLRRSQQAGFLLPLSGGVDSAATACLIYSMCCQVCEAVRSGNEEVLADVRTIVNQISYTPQDPRDLCGRILTTCYMASKNSSQETCTRARELAQQIGSHHISLNIDPAVKAVMGIFSLVTGKSPLFAAHGGSSRENLALQNVQARIRMVLAYLFAQLSLWSRGVHGGLLVLGSANVDESLLGYLTKYDCSSADINPIGGISKTDLRAFVQFCIQRFQLPALQSILLAPATAELEPLADGQVSQTDEEDMGMTYAELSVYGKLRKVAKMGPYSMFCKLLGMWRHICTPRQVADKVKRFFSKYSMNRHKMTTLTPAYHAENYSPEDNRFDLRPFLYNTSWPWQFRCIENQVLQLERAEPQSLDGVD

SEQ ID NO: 764893 - protein, 159 aa, Homo sapiens
ISEKLCSQRKRRGIWCSRVNELQEVGPGFIEAILPFSDGGGICMSRVDELICQVIDRVHALLPNVPGVSGKAPGMWRHICTPRQVADKVKRFFSKYSMNRHKMTTLTPAYHAENYSPEDNRFDLRPFLYNTSWPWQFRCIENQVLQLERAEPQSLDGVD

SEQ ID NO: 764894 - protein, 108 aa, Homo sapiens
AGGRGRATRKVRRPSRLPRWDPGLAVPRWPPAQATAARMGRKVTVATCALNQWALDFEGNLQRILKSIEIAKNRGARYRLGPELEICGYDVGIIYESWQERDPLETCS

SEQ ID NO: 764895 - protein, 744 aa, Homo sapiens; identical to SEQ ID NO: 764892

SEQ ID NO: 764896 - protein, 418 aa, Homo sapiens
AGGRGRATRKVRRPSRLPRWDPGLAVPRWPPAQATAARMGRKVTVATCALNQWALDFEGNLQRILKSIEIAKNRGARYRLGPELEICGYGCWDHYYESDTLLHSFQVLAALLESPVTQDIICDVGMPVMHRNVRYNCRVIFLNRKILLIRPKMALANEGNYRELRWFTPWSRSRHTEEYFLPRMIQDLTKQETVPFGDAVLVTWDTCIGSEICEELWTPHSPHIDMGLDGVEIITNASGSHHVLRKANTRVDLVTMVTSKNGGIYLLANQKGCDGDRLYYDGCAMIAMNGSVFAQGSQFSLDDVEVLTATLDLEDVRSYRAEISSRNLAASRASPYPRVKVDFALSCHEDLLAPISEPIEWKYHSPEEEIRCVAPDPWEGPGVCVATPLGWGLLEVTQWVFRTCLGGDLQKATVPPLG

SEQ ID NO: 764897 - protein, 688 aa, Homo sapiens
SGTLHKNINMSIEIAKNRGARYRLGPELEICGYGCWDHYYESDTLLHSFQVLAALLESPVTQDIICDVGMPVMHRNVRYNCRVIFLNRKILLIRPKMALANEGNYRELRWFTPWSRSRHTEEYFLPRMIQDLTKQETVPFGDAVLVTWDTCIGSEICEELWTPHSPHIDMGLDGVEIITNASGSHHVLRKANTRVDLVTMVTSKNGGIYLLANQKGCDGDRLYYDGCAMIAMNGSVFAQGSQFSLDDVEVLTATLDLEDVRSYRAEISSRNLAASRASPYPRVKVDFALSCHEDLLAPISEPIEWKYHSPEEEISLGPACWLWDFLRRSQQAGFLLPLSGGVDSAATACLIYSMCCQVCEAVRSGNEEVLADVRTIVNQISYTPQDPRDLCGRILTTCYMASKNSSQETCTRARELAQQIGSHHISLNIDPAVKAVMGIFSLVTGKSPLFAAHGGSSRENLALQNVQARIRMVLAYLFAQLSLWSRGVHGGLLVLGSANVDESLLGYLTKYDCSSADINPIGGISKTDLRAFVQFCIQRFQLPALQSILLAPATAELEPLADGQVSQTDEEDMGMTYAELSVYGKLRKVAKMGPYSMFCKLLGMWRHICTPRQVADKVKRFFSKYSMNRHKMTTLTPAYHAENYSPEDNRFDLRPFLYNTSWPWQFRCIENQVLQLERAEPQSLDGVD

SEQ ID NO: 764898 - protein, 744 aa, Homo sapiens; identical to SEQ ID NO: 764892

SEQ ID NO: 764899 - protein, 744 aa, Homo sapiens; identical to SEQ ID NO: 764892

SEQ ID NO: 764900 - protein, 745 aa, Homo sapiens
AGGRGRATRKVRRPSRLPRWDPGLAVPRWPPAQATAARMGRKVTVATCALNQWALDFEGNLQRILKSIEIAKNRGARYRLGPELEICGYGCWDHYYESDTLLHSFQVLAALLESPVTQDIICDVGMPVMHRNVRYNCRVIFLNRKILLIRPKMALANEGNYRELRWFTPWSRSRHTEEYFLPRMIQDLTKQETVPFGDAVLVTWDTCIGSEICEELWTPHSPHIDMGLDGVEIITNASGSHHVLRKANTRVDLVTMVTSKNGGIYLLANQKGCDGDRLYYDGCAMIAMNGSVFAQGSQFSLDDVEVLTATLDLEDVRSYRAEISSRNLAASRASPYPRVKVDFALSCHEDLLAPISEPIEWKYHSPEEEISLGPACWLWDFLRRSQQAGFLLPLSGGVDSAATACLIYSMCCQVCEAVRSGNEEVLADVRTIVNQISYTPQDPRDLCGRILTTCYMASKNSSQETCTRARELAQQIGSHHISLNIDPAVKAVMGIFSLVTGKSPLFAAHGGSSRENLALQNVQARIRMVLAYLFAQLSLWSRGVHGGLLVLGSANVDESLLGYLTKYDCSSADINPIGGISKTDLRAFVQFCIQRFQLPALQSILLAPATAELEPLADGQVSQTDEEDMGMTYAELSVYGKLRKVAKMGPYSMFCKLLGMWRHICTPRQVADKVKRFFSKYSMNRHKMTTLTPAYHAENYSPEDNRFDLRPFLYNTSWPWQFRCIENQVLQLEWAAHRSPVVHCL

SEQ ID NO: 764901 - protein, 446 aa, Homo sapiens
MGISGQEVLTATLDLEDVRSYRAEISSRNLAASRASPYPRVKVDFALSCHEDLLAPISEPIEWKYHSPEEEISLGPACWLWDFLRRSQQAGFLLPLSGGVDSAATACLIYSMCCQVCEAVRSGNEEVLADVRTIVNQISYTPQDPRDLCGRILTTCYMASKNSSQETCTRARELAQQIGSHHISLNIDPAVKAVMGIFSLVTGKSPLFAAHGGSSRENLALQNVQARIRMVLAYLFAQLSLWSRGVHGGLLVLGSANVDESLLGYLTKYDCSSADINPIGGISKTDLRAFVQFCIQRFQLPALQSILLAPATAELEPLADGQVSQTDEEDMGMTYAELSVYGKLRKVAKMGPYSMFCKLLGMWRHICTPRQVADKVKRFFSKYSMNRHKMTTLTPAYHAENYSPEDNRFDLRPFLYNTSWPWQFRCIENQVLQLERAEPQSLDGVD

SEQ ID NO: 764902 - protein, 386 aa, Homo sapiens
AGGRGRATRKVRRPSRLPRWDPGLAVPRWPPAQATAARMGRKVTVATCALNQWALDFEGNLQRILKSIEIAKNRGARYRLGPELEICGYGCWDHYYESDTLLHSFQVLAALLESPVTQDIICDVGMPVMHRNVRYNCRVIFLNRKILLIRPKMALANEGNYRELRWFTPWSRSRHTEEYFLPRMIQDLTKQETVPFGDAVLVTWDTCIGSEICEELWTPHSPHIDMGLDGVEIITNASGSHHVLRKANTRVDLVTMVTSKNGGIYLLANQKGCDGDRLYYDGCAMIAMNGSVFAQGSQFSLDDVHCLTRLWTRRPSTLLFLGMGIKAADSPRQAVAPEASSAAGFAGAGRACVLASPTLRGCLSSSLLCSRCVPILMILSGAFCTA

SEQ ID NO: 764903 - protein, 249 aa, Homo sapiens
AGGRGRATRKVRRPSRLPRWDPGLAVPRWPPAQATAARMGRKVTVATCALNQWALDFEGNLQRILKSIEIAKNRGARYRLGPELEICGYGCWDHYYESDTLLHSFQVLAALLESPVTQDIICDVGMYSASVSVEGQTWDKGKLKGMTHPTGLHPGCGTSMCPGIRKALCLKSGFCSYLSPVSHLISPARRELLKAGCVSSSRKSCAHISRLCTKGNAAFTPPRAESLTHITGSPGAHSMSTCCHTVPMS

SEQ ID NO: 764904 - protein, 103 aa, Homo sapiens
MPNRTAKRFEEQGHLAVVLVAAPSAAAISPAAAPQAVGHPAASPAAVSPAAASPAAVSPAAVPQAVGHPAASPVAAIPAAPSLAAVSPCAASVRSEALDSGLM

SEQ ID NO: 764905 - protein, 80 aa, Homo sapiens
PFQTQHSTHKGLHRDCCAGVCAVPCIASPCGGLCVSVLVSVRSLHSRPYGGLCMSCAVPCIAGPYGGLCVRCAGVCAVPA

SEQ ID NO: 764906 - protein, 1076 aa, Homo sapiens
AGGRGRATRKVRRPSRLPRWDPGLAVPRWPPAQATAARMGRKVTVATCALNQWALDFEGNLQRILKSIEIAKNRGARYRLGPELEICGYGCWDHYYESDTLLHSFQVLAALLESPVTQDIICDVGMPVMHRNVRYNCRVIFLNRKILLIRPKMALANEGNYRELRWFTPWSRSRHTEEYFLPRMIQDLTKQETVPFGDAVLVTWDTCIGSEICEELWTPHSPHIDMGLDGVEIITNASGSHHVLRKANTRVDLVTMVTSKNGGIYLLANQKGCDGDRLYYDGCAMIAMNGSVFAQGSQFSLDDVEVLTATLDLEDVRSYRAEISSRNLAASRASPYPRVKVDFALSCHEDLLAPISEPIEWKYHSPEEEIRCVAPDPWEGPGVCVATPLGWGLLEVTQWVFRTCLGGDLQKATVPPLGVRAWMLEPEPLGVTPSLLLPRAVTLGPKVLSVHSVVQCPHFKMRTMIIPTSWGCLQNHMCPFSRGAYSRDGRPESPALTLALQPPGACLGGLLGAVGRGHRLRAPCSELPCSLGPACWLWDFLRRSQQVRLPVSSEPTLLVLLVGLVLFWGRVGIFFFFFSANNKKHFIISASMGSLVCASQRQGGHSGWWVSSTFGGSAEPSPSAFRVTLTIIASIVIMRICSSSVESASDTPRSEVSFFPLKNPFILPRAGICPDPMESATPTCISVDASLRSMGGAWLIHGHAASPRLCSRCLIGPFQAGFLLPLSGGVDSAATACLIYSMCCQVCEAVRSGNEEVLADVRTIVNQISYTPQDPRDLCGRILTTCYMASKNSSQETCTRARELAQQIGSHHISLNIDPAVKAVMGIFSLVTGKSPLFAAHGGSSRENLALQNVQARIRMVLAYLFAQLSLWSRGVHGGLLVLGSANVDESLLGYLTKYDCSSADINPIGGISKTDLRAFVQFCIQRFQLPALQSILLAPATAELEPLADGQVSQTDEEDMGMTYAELSVYGKLRKVAKMGPYSMFCKLLGMWRHICTPRQVADKVKRFFSKYSMNRHKMTTLTPAYHAENYSPEDNRFDLRPFLYNTSWPWQFRCIENQVLQLERAEPQSLDGVD

SEQ ID NO: 764907 - protein, 705 aa, Homo sapiens
AGGRGRATRKVRRPSRLPRWDPGLAVPRWPPAQATAARMGRKVTVATCALNQWALDFEGNLQRILKSIEIAKNRGARYRLGPELEIWPVMHRNVRYNCRVIFLNRKILLIRPKMALANEGNYRELRWFTPWSRSRHTEEYFLPRMIQDLTKQETVPFGDAVLVTWDTCIGSEICEELWTPHSPHIDMGLDGVEIITNASGSHHVLRKANTRVDLVTMVTSKNGGIYLLANQKGCDGDRLYYDGCAMIAMNGSVFAQGSQFSLDDVEVLTATLDLEDVRSYRAEISSRNLAASRASPYPRVKVDFALSCHEDLLAPISEPIEWKYHSPEEEISLGPACWLWDFLRRSQQAGFLLPLSGGVDSAATACLIYSMCCQVCEAVRSGNEEVLADVRTIVNQISYTPQDPRDLCGRILTTCYMASKNSSQETCTRARELAQQIGSHHISLNIDPAVKAVMGIFSLVTGKSPLFAAHGGSSRENLALQNVQARIRMVLAYLFAQLSLWSRGVHGGLLVLGSANVDESLLGYLTKYDCSSADINPIGGISKTDLRAFVQFCIQRFQLPALQSILLAPATAELEPLADGQVSQTDEEDMGMTYAELSVYGKLRKVAKMGPYSMFCKLLGMWRHICTPRQVADKVKRFFSKYSMNRHKMTTLTPAYHAENYSPEDNRFDLRPFLYNTSWPWQFRCIENQVLQLERAEPQSLDGVD

SEQ ID NO: 764908 - protein, 744 aa, Homo sapiens; identical to SEQ ID NO: 764892

SEQ ID NO: 764909 - protein, 744 aa, Homo sapiens; identical to SEQ ID NO: 764892

SEQ ID NO: 764910 - protein, 335 aa, Homo sapiens
MCCQVCEAVRSGNEEVLADVRTIVNQISYTPQDPRDLCGRILTTCYMASKNSSQETCTRARELAQQIGSHHISLNIDPAVKAVMGIFSLVTGKSPLFAAHGGSSRENLALQNVQARIRMVLAYLFAQLSLWSRGVHGGLLVLGSANVDESLLGYLTKYDCSSADINPIGGISKTDLRAFVQFCIQRFQLPALQSILLAPATAELEPLADGQVSQTDEEDMGMTYAELSVYGKLRKVAKMGPYSMFCKLLGMWRHICTPRQVADKVKRFFSKYSMNRHKMTTLTPAYHAENYSPEDNRFDLRPFLYNTSWPWQFRCIENQVLQLERAEPQSLDGVD

SEQ ID NO: 764911 - protein, 439 aa, Homo sapiens
MRICSSSVESASDTPRSEVSFFPLKNPFILPRAGICPDPMESATPTCISVDASLRSMGGAWLIHGHAASPRLCSRCLIGPFQAGFLLPLSGGVDSAATACLIYSMCCQVCEAVRSGNEEVLADVRTIVNQISYTPQDPRDLCGRILTTCYMASKNSSQETCTRARELAQQIGSHHISLNIDPAVKAVMGIFSLVTGKSPLFAAHGGSSRENLALQNVQARIRMVLAYLFAQLSLWSRGVHGGLLVLGSANVDESLLGYLTKYDCSSADINPIGGISKTDLRAFVQFCIQRFQLPALQSILLAPATAELEPLADGQVSQTDEEDMGMTYAELSVYGKLRKVAKMGPYSMFCKLLGMWRHICTPRQVADKVKRFFSKYSMNRHKMTTLTPAYHAENYSPEDNRFDLRPFLYNTSWPWQFRCIENQVLQLERAEPQSLDGVD

SEQ ID NO: 764912 - protein, 160 aa, Homo sapiens
QLGTIRRVWSSASASCLQSILLAPATAELEPLADGQVSQTDEEDMGMTYAELSVYGKLRKVAKMGPYSMFCKLLGMWRHICTPRQVADKVKRFFSKYSMNRHKMTTLTPAYHAENYSPEDNRFDLRPFLYNTSWPWQFRCIENQVLQLERAEPQSLDGVD

SEQ ID NO: 764913 - protein, 72 aa, Homo sapiens
TGRPAVRRPLSPLPRLKPLSPLALAVPGLSQNSPAKPSRGPRALGTGWGRPPCESWLFAEQHVLCLPKSRLL

SEQ ID NO: 764914 - protein, 322 aa, Homo sapiens
MAAPPSPGRTADQADQVCTFLFKKPGRKGAAGLRKRPACDPEHGESSSSGDEGDTVAQPPRVAPRPRGLHSWQKAAHGDRRGEEAAPESLDVVYRSTRSAKPVGPEDMGATADFEQDTEKEHHTPTILKCSQRVQEALRGREHDHIYRGIHSYLRYLKPKDTSMGNSSSGMARKGPIRAPGHLRATVRWDYQPDICKDYKETGFCGFGDSCKFLHDRSDYKLGWEIERELEEGRYCICEDENHEVGSEEEEIPFRCFICRQAFQNPVVTKCRHYFCESCALEHFRATPRCYICDQPTGGIFNPAKELMAKLQKLQAAEGKKR

SEQ ID NO: 764915 - protein, 322 aa, Homo sapiens; identical to SEQ ID NO: 764914

SEQ ID NO: 764916 - protein, 84 aa, Homo sapiens
KTLLSLCSSPGVFAPIENDENRAEKSCLQESSSWRLEEIASKKAMFVSLSCALFQPFWFLPPPSQGPGLTILPHSPGLARRGAP

SEQ ID NO: 764917 - protein, 509 aa, Homo sapiens
MVDGVMILPVLIMIALPSPSMEDEKPKVNPKLYMCVCEGLSCGNEDHCEGQQCFSSLSINDGFHVYQKGCFQVYEQGKMTCKTPPSPGQAVECCQGDWCNRNITAQLPTKGKSFPGTQNFHLEVGLIILSVVFAVCLLACLLGVALRKFKRRNQERLNPRDVEYGTIEGLITTNVGDSTLADLLDHSCTSGSGSGLPFLVQRTVARQITLLECVGKGRYGEVWRGSWQGENVAVKIFSSRDEKSWFRETELYNTVMLRHENILGFIASDMTSRHSSTQLWLITHYHEMGSLYDYLQLTTLDTVSCLRIVLSIASGLAHLHIEIFGTQGKPAIAHRDLKSKNILVKKNGQCCIADLGLAVMHSQSTNQLDVGNNPRVGTKRYMAPEVLDETIQVDCFDSYKRVDIWAFGLVLWEVARRMVSNGIVEDYKPPFYDVVPNDPSFEDMRKVVCVDQQRPNIPNRWFSDPTLTSLAKLMKECWYQNPSARLTALRIKKTLTKIDNSLDKLKTDC

SEQ ID NO: 764918 - protein, 509 aa, Homo sapiens; identical to SEQ ID NO: 764917

SEQ ID NO: 764919 - protein, 509 aa, Homo sapiens; identical to SEQ ID NO: 764917

SEQ ID NO: 764920 - protein, 462 aa, Homo sapiens
MSDAQLGPLRLTLLSVSARTGFCKKQQELWQRRKEAAEALGTRKVSVLLATSHSGARPAVSTMDSSAAPTNASNCTDALAYSSCSPAPSPGSWVNLSHLDGNLSDPCGPNRTDLGGRDSLCPPTGSPSMITAITIMALYSIVCVVGLFGNFLVMYVIVRYTKMKTATNIYIFNLALADALATSTLPFQSVNYLMGTWPFGTILCKIVISIDYYNMFTSIFTLCTMSVDRYIAVCHPVKALDFRTPRNAKIINVCNWILSSAIGLPVMFMATTKYRQGSIDCTLTFSHPTWYWENLLKICVFIFAFIMPVLIITVCYGLMILRLKSVRMLSGSKEKDRNLRRITRMVLVVVAVFIVCWTPIHIYVIIKALVTIPETTFQTVSWHFCIALGYTNSCLNPVLYAFLDENFKRCFREFCIPTSSNIEQQNSTRIRQNTRDHPSTANTVDRTNHQLENLEAETAPLP

SEQ ID NO: 764921 - protein, 454 aa, Homo sapiens
MSDAQLGPLRLTLLSVSARTGFCKKQQELWQRRKEAAEALGTRKVSVLLATSHSGARPAVSTMDSSAAPTNASNCTDALAYSSCSPAPSPGSWVNLSHLDGNLSDPCGPNRTDLGGRDSLCPPTGSPSMITAITIMALYSIVCVVGLFGNFLVMYVIVRYTKMKTATNIYIFNLALADALATSTLPFQSVNYLMGTWPFGTILCKIVISIDYYNMFTSIFTLCTMSVDRYIAVCHPVKALDFRTPRNAKIINVCNWILSSAIGLPVMFMATTKYRQGSIDCTLTFSHPTWYWENLLKICVFIFAFIMPVLIITVCYGLMILRLKSVRMLSGSKEKDRNLRRITRMVLVVVAVFIVCWTPIHIYVIIKALVTIPETTFQTVSWHFCIALGYTNSCLNPVLYAFLDENFKRCFREFCIPTSSNIEQQNSTRIRQNTRDHPSTANTVDRTNHQVRSL

SEQ ID NO: 764922 - protein, 93 aa, Homo sapiens
  misc_feature (1)..(1): Xaa can be any naturally occurring amino acid
XPLRPLSCEEDDRMGQPTEFHLLTGWLAQPRWCPALSIQAKPILHHGQVQMLSQPEPEQILPPETKKSQTKEAELPDTEESHEVLPPQVQTEM

SEQ ID NO: 764923 - protein, 93 aa, Homo sapiens; identical to SEQ ID NO: 764922
  misc_feature (1)..(1): Xaa can be any naturally occurring amino acid

SEQ ID NO: 764924 - protein, 93 aa, Homo sapiens; identical to SEQ ID NO: 764922
  misc_feature (1)..(1): Xaa can be any naturally occurring amino acid

SEQ ID NO: 764925 - protein, 161 aa, Homo sapiens
SRCSSSASFPCPRPPYCPVPSFLFKMASPVAAQAGKLLRALALRPRFLAAGSQAVQLTSRRWLNLQEYQSKKLMSDNGVRVQRFFVADTANEALEAAKRLNAKEIVLKAQILAGGRGKGVFNSGLKGGVHLTKDPNVVGQLAKQMIGYNLATKLPEPTWLL

SEQ ID NO: 764926 - protein, 457 aa, Homo sapiens
SRCSSSASFPCPRPPYCPVPSFLFKMASPVAAQAGKLLRALALRPRFLAAGSQAVQLTSRRWLNLQEYQSKKLMSDNGVRVQRFFVADTANEALEAAKRLNAKEIVLKAQILAGGRGKGVFNSGLKGGVHLTKDPNVVGQLAKQMIGYNLATKQTPKEGVKVNKVMVAEALDISRETYLAILMDRSCNGPVLVGSPQGGVDIEEVAASNPELIFKEQIDIFEGIKDSQAQRMAENLGFVGPLKSQAADQITKLYNLFLKIDATQVEVNPFGETPEGQVVCFDAKINFDDNAEFRQKDIFAMDDKSENEPIENEAAKYDLKYIGLDGNIACFVNGAGLAMATCDIIFLNGGKPANFLDLGGGVKEAQVYQAFKLLTADPKVEAILVNIFGGIVNCAIIANGITKACRELELKVPLVVRLEGTNVQEAQKILNNSGLPITSAIDLEDAAKKAVASVAKK

SEQ ID NO: 764927 - protein, 457 aa, Homo sapiens; identical to SEQ ID NO: 764926

SEQ ID NO: 764928 - protein, 457 aa, Homo sapiens; identical to SEQ ID NO: 764926

SEQ ID NO: 764929 - protein, 457 aa, Homo sapiens; identical to SEQ ID NO: 764926

SEQ ID NO: 764930 - protein, 233 aa, Homo sapiens
SRCSSSASFPCPRPPYCPVPSFLFKMASPVAAQAGKLLRALALRPRFLAAGSQAVQLTSRRWLNLQEYQSKKLMSDNGVRVQRFFVADTANEALEAAKRLNAKEIVLKAQILAGGRGPNVVGQLAKQMIGYNLATKQTPKEGVKVNKVMVAEALDISRETYLAILMDRSCNGPVLVGSPQGGVDIEEVAASNPELIFKEQIDIFEGIKDSQAQRMAENLGFVGPLKSQLSQYD

SEQ ID NO: 764931 - protein, 416 aa, Homo sapiens
MNEQSIGLPVSLAVQLTSRRWLNLQEYQSKKLMSDNGVRVQRFFVADTANEALEAAKRLNAKEIVLKAQILAGGRGKGVFNSGLKGGVHLTKDPNVVGQLAKQMIGYNLATKQTPKEGVKVNKVMVAEALDISRETYLAILMDRSCNGPVLVGSPQGGVDIEEVAASNPELIFKEQIDIFEGIKDSQAQRMAENLGFVGPLKSQAADQITKLYNLFLKIDATQVEVNPFGETPEGQVVCFDAKINFDDNAEFRQKDIFAMDDKSENEPIENEAAKYDLKYIGLDGNIACFVNGAGLAMATCDIIFLNGGKPANFLDLGGGVKEAQVYQAFKLLTADPKVEAILVNIFGGIVNCAIIANGITKACRELELKVPLVVRLEGTNVQEAQKILNNSGLPITSAIDLEDAAKKAVASVAKK

SEQ ID NO: 764932 - protein, 323 aa, Homo sapiens
SRCSSSASFPCPRPPYCPVPSFLFKMASPVAAQAGKLLRALALRPRFLAAGSQAVQLTSRRWLNLQEYQSKKLMSDNGVRVQRFFVADTANEALEAAKRLNAKEIVLKAQILAGGRGKGVFNSGLKGGVHLTKDPNVVGQLAKQMIGYNLATKQTPKEGVKVNKVMVAEALDISRETYLAILMDRSCNGPVLVGSPQGGVDIEEVAASNPELIFKEQIDIFEGIKDSQAQRMAENLGFVGPLKSQVEAILVNIFGGIVNCAIIANGITKACRELELKVPLVVRLEGTNVQEAQKILNNSGLPITSAIDLEDAAKKAVASVAKK

SEQ ID NO: 764933 - protein, 106 aa, Homo sapiens
RTSAHAQRTAHTRHTVITRQLVPSAQSAHTQHTVSAHQHVLSAQSAHSTHSVSARQHVLSAQSAHTAHTCLVHISTCSAHTWHTRLAHYTCSAHGQCTSALCARRG

SEQ ID NO: 764934 - protein, 384 aa, Homo sapiens
MLTGDKLETATCIAKSSHLVSRTQDIHIFRQVTSRGEAHLELNAFRRKHDCALVISGDSLEVCLKYYEHEFVELACQCPAVVCCRCSPTQKARIVTLLQQHTGRRTCAIGDGGNDVSMIQAADCGIGIEGKEGKQASLAADFSITQFRHIGRLLMVHGRNSYKRSAALGQFVMHRGLIISTMQAVFSSVFYFASVPLYQGFLMVGYATIYTMFPVFSLVLDQDVKPEMAMLYPELYKDLTKGRSLSFKTFLIWVLISIYQGGILMYGALVLFESEFVHVVAISFTALILTELLMVALTVRTWHWLMVVAEFLSLGCYVSSLAFLNEYFGIGRVSFGAFLDVAFITTVTFLWKVSAITVVSCLPLYVLKYLRRKLSPPSYCKLAS

SEQ ID NO: 764935 - protein, 426 aa, Homo sapiens
MLTGDKLETATCIAKSSHLVSRTQDIHIFRQVTSRGEAHLELNAFRRKHDCALVISGDSLEVCLKYYEHEFVELACQCPAVVCCRCSPTQKARIVTLLQQHTGRRTCAIGDGGNDVSMIQAADCGIGIEGKEGKQASLAADFSITQFRHIGRLLMVHGRNSYKRSAALGQFVMHRGLIISTMQAVFSSVFYFASVPLYQGFLMVGYATIYTMFPVFSLVLDQDVKPEMAMLYPELYKDLTKSQQDGRSNRRQHERLTSGTSGHVWDPGSFFRIRVSGKGARKLGRSLSFKTFLIWVLISIYQGGILMYGALVLFESEFVHVVAISFTALILTELLMVALTVRTWHWLMVVAEFLSLGCYVSSLAFLNEYFGIGRVSFGAFLDVAFITTVTFLWKVSAITVVSCLPLYVLKYLRRKLSPPSYCKLAS

SEQ ID NO: 764936 - protein, 373 aa, Homo sapiens
MLTGDKLETATCIAKSSHLVSRTQDIHIFRQVTSRGEAHLELNAFRRKHDCALVISGDSLEVCLKYYEHEFVELACQCPAVVCCRCSPTQKARIVTLLQQHTGRRTCAIGDGGNDVSMIQAADCGIGIEGKEGKQASLAADFSITQFRHIGRLLMVHGRNSYKRSAALGQFVMHRGLIISTMQAVFSSVFYFASVPLYQGFLMVGYATIYTMFPVFSLVLDQDVKPEMAMLYPELYKDLTKGRSLSFKTFLIWVLISIYQGGILMYGALVLFESEFVHVVAISFTALILTELLMVALTVRTWHWLMVVAEFLSLGCYVSSLAFLNEYFDVAFITTVTFLWKVSAITVVSCLPLYVLKYLRRKLSPPSYCKLAS

SEQ ID NO: 764937 - protein, 134 aa, Homo sapiens
MLGRSLSFKTFLIWVLISIYQGGILMYGALVLFESEFVHVVAISFTALILTELLMVALTVRTWHWLMVVAEFLSLGCYVSSLAFLNEYFDVAFITTVTFLWKVSAITVVSCLPLYVLKYLRRKLSPPSYCKLAS

SEQ ID NO: 764938 - protein, 180 aa, Homo sapiens
MHSDVSVASLDRLVAWPGSVAVAMRAQGLLGQLLPFSLFPANRCCLYHHRDLPVESVGDHRGQLPPAVCPQVPEAQALSSQLLQAGLLRGCAPPAGWPQHLLPFPAPCALASERRVCHCYQASTTRKGGYARRAQGTDAETASPSQCRDVTPARQAQGTDARMASPSQCEASPLPGKPRA

SEQ ID NO: 764939 - protein, 125 aa, Homo sapiens
MIQAADCGIGIEGKVGSPFYQHISTQSAHINTTQHMLGHCTLSTYLVSARQHVLSVRSVSKHSAHAWSTHISTCSAHSQHTLGTRSVGARQHMLSAQHTLGTRSSHVSLCPAHSQHTLSTRSAHI

SEQ ID NO: 764940 - protein, 266 aa, Homo sapiens
MHSDVSVASLDRLVAWPGSVAVAMRAQGLLGQLLPFSLFPANRCCLYHHRDLPVESVGDHRGQLPPAVCPQVPEAQALSSQLLQAGLLRGCAPPAGWPQHLLPFPAPCALASERRVCHCYQASTTRKGGYARRAQGTDAETASPSQCRDVTPARQAQGTEAGTASPSQCEASPMLGKPRAQMPGWPLPLSAGTSPLPGKPRAQMLRWPLPLKCGASPLLFFLFLYCQNCISILKQLEFLLKMSPNYFTITVKGSSYSGILRIRLKV

SEQ ID NO: 764941 - protein, 379 aa, Homo sapiens
ANNALFLCACNLDNILIWDSFSPLMEVTSRGEAHLELNAFRRKHDCALVISGDSLEVCLKYYEHEFVELACQCPAVVCCRCSPTQKARIVTLLQQHTGRRTCAIGDGGNDVSMIQAADCGIGIEGKEGKQASLAADFSITQFRHIGRLLMVHGRNSYKRSAALGQFVMHRGLIISTMQAVFSSVFYFASVPLYQGFLMVGYATIYTMFPVFSLVLDQDVKPEMAMLYPELYKDLTKGRSLSFKTFLIWVLISIYQGGILMYGALVLFESEFVHVVAISFTALILTELLMVALTVRTWHWLMVVAEFLSLGCYVSSLAFLNEYFGIGRVSFGAFLDVAFITTVTFLWKVSAITVVSCLPLYVLKYLRRKLSPPSYCKLAS

SEQ ID NO: 764942 - protein, 384 aa, Homo sapiens; identical to SEQ ID NO: 764934

SEQ ID NO: 764943 - protein, 351 aa, Homo sapiens
MLTGDKLETATCIAKSSHLVSRTQDIHIFRQVTSRGEAHLELNAFRRKHDCALVISGDSLEVCLKYYEHEFVELACQCPAVVCCRCSPTQKARIVTLLQQHTGRRTCAIGDGGNDVSMIQAADCGIGIEGKEGKQASLAADFSITQFRHIGRLLMVHGRNSYKRSAALGQFVMHRGLIISTMQVCTIYTMFPVFSLVLDQDVKPEMAMLYPELYKDLTKGRSLSFKTFLIWVLISIYQGGILMYGALVLFESEFVHVVAISFTALILTELLMVALTVRTWHWLMVVAEFLSLGCYVSSLAFLNEYFDVAFITTVTFLWKVSAITVVSCLPLYVLKYLRRKLSPPSYCKLAS

SEQ ID NO: 764944 - protein, 220 aa, Homo sapiens
MLTGDKLETATCIAKSSHLVSRTQDIHIFRQVTSRGEAHLELNAFRRKHDCALVISGDSLEVCLKYYEHEFVELACQCPAVVCCRCSPTQKARIVTLLQQHTGRRTCAIGDGGNDVSMIQAADCGIGIEGKEGKQASLAADFSITQFRHIGRLLMVHGRNSYKRSAALGQFVMHRGLIISTMQLCFSQSSTSHTRPCITGSLIGVGCHTIHPVSRVLLMS

SEQ ID NO: 764945 - protein, 276 aa, Homo sapiens
MLRSAAGPSSNATPTTTKAKRPVPTPSSRPDPQPSGDAASCLLFILQRGPPCSPHEKFCSGVPQRGALLETLKEKARLVDHTRAARARAWTGSTCVLRSLTTALGPALVQGAAVQGRPRGPACSAAALIPSPGLGWVTGRQTQEGPRPRPRRAHKRRGRPNLRPRSIRLQDRDTAGPRLCALRSGRSAREDVRSRLPRWPRGVGAFQSAQAMVAKQRIRMANEKHSKNITQRGNVAKTLRPQEEKYPVGPWLLALFVFVVCGSAIFQIIQSIRMGM

SEQ ID NO: 764946 - protein, 295 aa, Homo sapiens
MLRSAAGPSSNATPTTTKAKRPVPTPSSRPDPQPSGDAASCLLFILQRGPPCSPHEKFCSGVPQRGALLETLKEKARLVDHTRAARARAWTGSTCVLRSLTTALGPALVQGAAVQGRPRGPACSAAALIPSPGLGWVTGRQTQEGPRPRPRRAHKRRGRPNLRPRSIRLQDRDTAGPRLCALRSGRSAREDVRSRLPRWPRGVGAFQSAQAMVAKQRIRMANEKHSKNITQRGNVAKTLRPQEEKYPVGPWLLALFVFVVCGSGQPHKLASPGDCQNFLKVVTSRGSHPTPKTGN

SEQ ID NO: 764947 - protein, 295 aa, Homo sapiens; identical to SEQ ID NO: 764946

SEQ ID NO: 764948 - protein, 290 aa, Homo sapiens
MLRSAAGPSSNATPTTTKAKRPVPTPSSRPDPQPSGDAASCLLFILQRGPPCSPHEKFCSGVPQRGALLETLKEKARLVDHTRAARARAWTGSTCVLRSLTTALGPALVQGAAVQGRPRGPACSAAALIPSPGLGWVTGRQTQEGPRPRPRRAHKRRGRPNLRPRSIRLQDRDTAGPRLCALRSGRSAREDVRSRLPRWPRGVGAFQSAQAMVAKQRIRMANEKHSKNITQRGNVAKTLRPQEEKYPVGPWLLALFVFVVCGSVSVFSLVYGNKIIVQDPLQIGVVIQEM

SEQ ID NO: 764949 - protein, 139 aa, Homo sapiens
MPGLGERGAQGSGPRLATCSARVGRGGLGGTRSALSQELTQGESLQVGAFQSAQAMVAKQRIRMANEKHSKNITQRGNVAKTLRPQEEKYPVGPWLLALFVFVVCGSGQPHKLASPGDCQNFLKVVTSRGSHPTPKTGN

SEQ ID NO: 764950 - protein, 42 aa, Homo sapiens
MCETRAPKGGVTRDKRRVNTLERKHAGDKGRDTPGGHSGHTR

SEQ ID NO: 764951 - protein, 290 aa, Homo sapiens; identical to SEQ ID NO: 764948

SEQ ID NO: 764952 - protein, 42 aa, Homo sapiens; identical to SEQ ID NO: 764950

SEQ ID NO: 764953 - protein, 335 aa, Homo sapiens
MQGSGKESFKRGSPHGNNQGGFCDDKWGTRYWTELSPWLGRGEAEAHSEMGQPEVMKLVWGIGGSLEMGEAWVLHSLLIHCLLRPRPLLAVERTGQRPLWAPSLELPKPVMQPLPAGAFLEEVAEGTPAQTESEPKVLDPEEDLLCIAKTFSYLRESGWYWGSITASEARQHLQKMPEGTFLVRDSTHPSYLFTLSVKTTRGPTNVRIEYADSSFRLDSNCLSRPRILAFPDVVSLVQHYVASCTADTRSDSPDPAPTPALPMPKEDAPSDPALPAPPPATAVHLKLVQPFVRRSSARSLQHLCRLVINRLVADVDCLPLPRRMADYLRQYPFQL

SEQ ID NO: 764954 - protein, 296 aa, Homo sapiens
MRPRAPGAYPARAPRPLVPSSRRRPAESPLRSRRCRGDMVLCVQGPRPLLAVERTGQRPLWAPSLELPKPVMQPLPAGAFLEEVAEGTPAQTESEPKVLDPEEDLLCIAKTFSYLRESGWYWGSITASEARQHLQKMPEGTFLVRDSTHPSYLFTLSVKTTRGPTNVRIEYADSSFRLDSNCLSRPRILAFPDVVSLVQHYVASCTADTRSDSPDPAPTPALPMPKEDAPSDPALPAPPPATAVHLKLVQPFVRRSSARSLQHLCRLVINRLVADVDCLPLPRRMADYLRQYPFQL

SEQ ID NO: 764955 - protein, 305 aa, Homo sapiens
GAGTLGIMGLRPRAPGAYPARAPRPLVPSSRRRPAESPLRSRRCRGDMVLCVQGPRPLLAVERTGQRPLWAPSLELPKPVMQPLPAGAFLEEVAEGTPAQTESEPKVLDPEEDLLCIAKTFSYLRESGWYWGSITASEARQHLQKMPEGTFLVRDSTHPSYLFTLSVKTTRGPTNVRIEYADSSFRLDSNCLSRPRILAFPDVVSLVQHYVASCTADTRSDSPDPAPTPALPMPKEDAPSDPALPAPPPATAVHLKLVQPFVRRSSARSLQHLCRLVINRLVADVDCLPLPRRMADYLRQYPFQL

SEQ ID NO: 764956 - protein, 296 aa, Homo sapiens; identical to SEQ ID NO: 764954

SEQ ID NO: 764957 - protein, 209 aa, Homo sapiens
ANSLVISCEAVLDPEEDLLCIAKTFSYLRESGWYWGSITASEARQHLQKMPEGTFLVRDSTHPSYLFTLSVKTTRGPTNVRIEYADSSFRLDSNCLSRPRILAFPDVVSLVQHYVASCTADTRSDSPDPAPTPALPMPKEDAPSDPALPAPPPATAVHLKLVQPFVRRSSARSLQHLCRLVINRLVADVDCLPLPRRMADYLRQYPFQL

SEQ ID NO: 764958 - protein, 296 aa, Homo sapiens; identical to SEQ ID NO: 764954

SEQ ID NO: 764959 - protein, 157 aa, Homo sapiens
GAGTLGIMGLRPRAPGAYPARAPRPLVPSSRRRPAESPLRSRRCRGDMVLCVQGPRPLLAVERTGQRPLWAPSLELPKPVMQPLPAGAFLEEVAEGTPAQTESEPKVLDPEEDLLCIAKTFSYLRESGWYWGSITASEARQHLLHMRGEKYTSDKTS

SEQ ID NO: 764960 - protein, 358 aa, Homo sapiens
QAGTGRKSFGCARAPREPTQHALRAHWFPPAAAVQPSPHSGVAAAAGTWSSAFRGEHPLVSSGLLLGVREQSFRLLRSKAGTHMYLEHTSHCPHHDDDTAMDTPLPRPRPLLAVERTGQRPLWAPSLELPKPVMQPLPAGAFLEEVAEGTPAQTESEPKVLDPEEDLLCIAKTFSYLRESGWYWGSITASEARQHLQKMPEGTFLVRDSTHPSYLFTLSVKTTRGPTNVRIEYADSSFRLDSNCLSRPRILAFPDVVSLVQHYVASCTADTRSDSPDPAPTPALPMPKEDAPSDPALPAPPPATAVHLKLVQPFVRRSSARSLQHLCRLVINRLVADVDCLPLPRRMADYLRQYPFQL

SEQ ID NO: 764961 - protein, 296 aa, Homo sapiens; identical to SEQ ID NO: 764954

SEQ ID NO: 764962 - protein, 160 aa, Homo sapiens
MPEGTFLVRDSTHPSYLFTLSVKTTRGPTNVRIEYADSSFRLDSNCLSRPRILAFPDVVSLVQHYVASCTADTRSDSPDPAPTPALPMPKEDAPSDPALPAPPPATAVHLKLVQPFVRRSSARSLQHLCRLVINRLVADVDCLPLPRRMADYLRQYPFQL

SEQ ID NO: 764963 - protein, 183 aa, Homo sapiens
GAGTLGIMGLRPRAPGAYPARAPRPLVPSSRRRPAESPLRSRRCRGDMVLCVQGPRPLLAVERTGQRPLWAPSLELPKPVMQPLPAGAFLEEVAEGTPAQTESEPKVLDPEEDLLCIAKTFSYLRESATAVHLKLVQPFVRRSSARSLQHLCRLVINRLVADVDCLPLPRRMADYLRQYPFQL

SEQ ID NO: 764964 - protein, 655 aa, Homo sapiens [sequence omitted]

SEQ ID NO: 764965 - protein, 166 aa, Homo sapiens
MQASEQAGALQQSKKRGGVGILLSALHNVFQNPQLATRYTLCSPKDMRSWTLPSGLPGNSLHPPQTAALTATSQLRRMRTGLRCTSPSVEDMRCLTRSLRRALDMTQPLRAKQTMIPSLHMSRKLSLWLERTPCMHKCSTYRERPQFLRRKRAQPQSTAPYGNLRW

SEQ ID NO: 764966 - protein, 162 aa, Homo sapiens
MAKYQLPRCLGLRASGKDSAPTVVSGILGGSVTLPLNISVDTEIENVIWIGPKNALAFARPKENVTIMVKSYLGRLDITKWSYSLCISNLTLNDAGSYKAQINQRNFEVTTEEEFTLFVYAPFIEKLSVHVIEGDHRTLLEGSGLESIISTLAEPRVSVREG

SEQ ID NO: 764967 - protein, 641 aa, Homo sapiens [sequence omitted]

SEQ ID NO: 764968 - protein, 633 aa, Homo sapiens
GLYGPEVGISKPQRSQLQIFSSVLQTSLLFLLMGLRASGKDSAPTVVSGILGGSVTLPLNISVDTEIENVIWIGPKNALAFARPKENVTIMVKSYLGRLDITKWSYSLCISNLTLNDAGSYKAQINQRNFEVTTEEEFTLFVYEQLQEPQVTMKSVKVSENFSCNITLMCSVKGAEKSVLYSWTPREPHASESNGGSILTVSRTPCDPDLPYICTAQNPVSQRSSLPVHVGQFCTDPGASRGGTTGETVVGVLGEPVTLPLALPACRDTEKVVWLFNTSIISKEREEAATADPLIKSRDPYKNRVWVSSQDCSLKISQLKIEDAGPYHAYVCSEASSVTSMTHVTLLIYRRLRKPKITWSLRHSEDGICRISLTCSVEDGGNTVMYTWTPLQKEAVVSQGESHLNVSWRSSENHPNLTCTASNPVSRSSHQFLSENICSGPERNTKLWIGLFLMVCLLCVGIFSWCIWKRKGRCSVPAFCSSQAEAPADTPGYEKLDTPLRPARQQPTPTSDSSSDSNLTTEEDEDRPEVHKPISGRYEVFDQVTQEGAGHDPAPEGQADYDPVTPYVTEVESVVGENTVYAQVFNLQGKTPVSQKEESSATIYCSIRKPQVVPPPQQNDLEIPESPTYENFT

SEQ ID NO: 764969 - protein, 618 aa, Homo sapiens
MVAPKSHTDDWAPGPFSSKPQRSQLQIFSSVLQTSLLFLLMGLRASGKDSAPTVVSGILGGSVTLPLNISVDTEIENVIWIGPKNALAFARPKENVTIMVKSYLGRLDITKWSYSLCISNLTLNDAGSYKAQINQRNFEVTTEEEFTLFVYEQLQEPQVTMKSVKVSENFSCNITLMCSVKGAEKSVLYSWTPREPHASESNGGSILTVSRTPCDPDLPYICTAQNPVSQRSSLPVHVGQFCTDPGASRGGTTGETVVGVLGEPVTLPLALPACRDTEKVVWLFNTSIISKEREEAATADPLIKSRDPYKNRVWVSSQDCSLKISQLKIEDAGPYHAYVCSEASSVTSMTHVTLLIYRRLRKPKITWSLRHSEDGICRISLTCSVEDGGNTVMYTWTPLQKEAVVSQGESHLNVSWRSSENHPNLTCTASNPVSRSSHQFLSENICSGPERNTKLWIGLFLMVCLLCVGIFSWCIWKRKGRCSVPAFCSSQAEAPADTPGYEKLDTPLRPARQQPTPTSDSSSDSNLTTEEDEDRPEVHKPISGRYEVFDQVTQEGAGHDPAPEGQADYDPVTPYVTEVESVVGENTVYAQVFNLQVVPPPQQNDLEIPESPTYENFT

SEQ ID NO: 764970 - protein, 632 aa, Homo sapiens
MVAPKSHTDDWAPGPFSSKPQRSQLQIFSSVLQTSLLFLLMGLRASGKDSAPTVVSGILGGSVTLPLNISVDTEIENVIWIGPKNALAFARPKENVTIMVKSYLGRLDITKWSYSLCISNLTLNDAGSYKAQINQRNFEVTTEEEFTLFVYEQLQEPQVTMKSVKVSENFSCNITLMCSVKGAEKSVLYSWTPREPHASESNGGSILTVSRTPCDPDLPYICTAQNPVSQRSSLPVHVGQFCTDPGASRGGTTGETVVGVLGEPVTLPLALPACRDTEKVVWLFNTSIISKEREEAATADPLIKSRDPYKNRVWVSSQDCSLKISQLKIEDAGPYHAYVCSEASSVTSMTHVTLLIYRRLRKPKITWSLRHSEDGICRISLTCSVEDGGNTVMYTWTPLQKEAVVSQGESHLNVSWRSSENHPNLTCTASNPVSRSSHQFLSENICSGPERNTKLWIGLFLMVCLLCVGIFSWCIWKRKGRCSVPAFCSSQAEAPADTPEPTAGHTLYSVLSQGYEKLDTPLRPARQQPTPTSDSSSDSNLTTEEDEDRPEVHKPISGRYEVFDQVTQEGAGHDPAPEGQADYDPVTPYVTEVESVVGENTVYAQVFNLQVVPPPQQNDLEIPESPTYENFT

SEQ ID NO: 764971 - protein, 737 aa, Homo sapiens
THAEAVTRAEAVVSASSFSLSSENRSSWWHQRVTQMTGLLGLSPVSHRGVSCKYSLLFYRPLSSSCSWAQLLGNISPLHGPEPHCPADRANPVPQRGSQPPGTVAATVLLCSRFLQGFRDDGAGLRASGKDSAPTVVSGILGGSVTLPLNISVDTEIENVIWIGPKNALAFARPKENVTIMVKSYLGRLDITKWSYSLCISNLTLNDAGSYKAQINQRNFEVTTEEEFTLFVYEQLQEPQVTMKSVKVSENFSCNITLMCSVKGAEKSVLYSWTPREPHASESNGGSILTVSRTPCDPDLPYICTAQNPVSQRSSLPVHVGQFCTDPGASRGGTTGETVVGVLGEPVTLPLALPACRDTEKVVWLFNTSIISKEREEAATADPLIKSRDPYKNRVWVSSQDCSLKISQLKIEDAGPYHAYVCSEASSVTSMTHVTLLIYRRLRKPKITWSLRHSEDGICRISLTCSVEDGGNTVMYTWTPLQKEAVVSQGESHLNVSWRSSENHPNLTCTASNPVSRSSHQFLSENICSGPERNTKLWIGLFLMVCLLCVGIFSWCIWKRKGRCSVPAFCSSQAEAPADTPEPTAGHTLYSVLSQGYEKLDTPLRPARQQPTPTSDSSSDSNLTTEEDEDRPEVHKPISGRYEVFDQVTQEGAGHDPAPEGQADYDPVTPYVTEVESVVGENTVYAQVFNLQGKTPVSQKEESSATIYCSIRKPQVVPPPQQNDLEIPESPTYENFT

SEQ ID NO: 764972 - protein, 684 aa, Homo sapiens
AGTGPEDVMDQRVTQMTGLLGLSPVSHRGVSCKYSLLFYRPLSSSCSWSERKKASSRSLAAPPSPSSISAGLRASGKDSAPTVVSGILGGSVTLPLNISVDTEIENVIWIGPKNALAFARPKENVTIMVKSYLGRLDITKWSYSLCISNLTLNDAGSYKAQINQRNFEVTTEEEFTLFVYEQLQEPQVTMKSVKVSENFSCNITLMCSVKGAEKSVLYSWTPREPHASESNGGSILTVSRTPCDPDLPYICTAQNPVSQRSSLPVHVGQFCTDPGASRGGTTGETVVGVLGEPVTLPLALPACRDTEKVVWLFNTSIISKEREEAATADPLIKSRDPYKNRVWVSSQDCSLKISQLKIEDAGPYHAYVCSEASSVTSMTHVTLLIYRRLRKPKITWSLRHSEDGICRISLTCSVEDGGNTVMYTWTPLQKEAVVSQGESHLNVSWRSSENHPNLTCTASNPVSRSSHQFLSENICSGPERNTKLWIGLFLMVCLLCVGIFSWCIWKRKGRCSVPAFCSSQAEAPADTPEPTAGHTLYSVLSQGYEKLDTPLRPARQQPTPTSDSSSDSNLTTEEDEDRPEVHKPISGRYEVFDQVTQEGAGHDPAPEGQADYDPVTPYVTEVESVVGENTVYAQVFNLQGKTPVSQKEESSATIYCSIRKPQVVPPPQQNDLEIPESPTYENFT

SEQ ID NO: 764973 - protein, 350 aa, Homo sapiens
GWYRSRGFRKKVVWLFNTSIISKEREEAATADPLIKSRDPYKNRVWVSSQDCSLKISQLKIEDAGPYHAYVCSEASSVTSMTHVTLLIYRRLRKPKITWSLRHSEDGICRISLTCSVEDGGNTVMYTWTPLQKEAVVSQGESHLNVSWRSSENHPNLTCTASNPVSRSSHQFLSENICSGPERNTKLWIGLFLMVCLLCVGIFSWCIWKRKGRCSVPAFCSSQAEAPADTPGYEKLDTPLRPARQQPTPTSDSSSDSNLTTEEDEDRPEVHKPISGRYEVFDQVTQEGAGHDPAPEGQADYDPVTPYVTEVESVVGENTVYAQVFNLQVVPPPQQNDLEIPESPTYENFT

SEQ ID NO: 764974 - protein, 193 aa, Homo sapiens
MVAPKSHTDDWAPGPFSSKPQRSQLQIFSSVLQTSLLFLLMGLRASGKDSAPTVVSGILGGSVTLPLNISVDTEIENVIWIGPKNALAFARPKENVTIMVKSYLGRLDITKWSYSLCISNLTLNDAGSYKAQINQRNFEVTTEEEFTLFVYAPFIEKLSVHVIEGDHRTLLEGSGLESIISTLAEPRVSVREG

SEQ ID NO: 764975 - protein, 83 aa, Homo sapiens
MESASLLTGRLRKPKITWSLRHSEDGICRISLTCSVEDGGNTVMYTWTPLQKEAVVSQGESHLNVSWRSSENHPNLTCTASNP

SEQ ID NO: 764976 - protein, 1186 aa, Homo sapiens
MEVDTEEKRHRTRSKGVRVPVEPAIQELFSCPTPGCDGSGHVSGKYARHRSVYGCPLAKKRKTQDKQPQEPAPKRKPFAVKADSSSVDECDDSDGTEDMDEKEEDEGEEYSEDNDEPGDEDEEDEEGDREEEEEIEEEDEDDDEDGEDVEDEEEEEEEEEEEEEEEENEDHQMNCHNTRIMQDTEKDDNNNDEYDNYDELVAKSLLNLGKIAEDAAYRARTESEMNSNTSNSLEDDSDKNENLGRKSELSLDLDSDVVRETVDSLKLLAQGHGVVLSENMNDRNYADSMSQQDSRNMNYVMLGKPMNNGLMEKMVEESDEEVCLSSLECLRNQCFDLARKLSETNPQERNPQQNMNIRQHVRPEEDFPGRTPDRNYSDMLNLMRLEEQLSPRSRVFASCAKEDGCHERDDDTTSVNSDRSEEVFDMTKGNLTLLEKAIALETERAKAMREKMAMEAGRRDNMRSYEDQSPRQLPGEDRKPKSSDSHVKKPYYGKDPSRTEKKESKCPTPGCDGTGHVTGLYPHHRSLSGCPHKDRVPPEILAMHESVLKCPTPGCTGRGHVNSNRNSHRSLSGCPIAAAEKLAKAQEKHQSCDVSKSSQASDRVLRPMCFVKQLEIPQYGYRNNVPTTTPRSNLAKELEKYSKTSFEYNSYDNHTYGKRAIAPKVQTRDISPKGYDDAKRYCKDPSPSSSSTSSYAPSSSSNLSCGGGSSASSTCSKSSFDYTHDMEAAHMAATAILNLSTRCREMPQNLSTKPQDLCATRNPDMEVDENGTLDLSMNKQRPRDSCCPILTPLEPMSPQQQAVMNNRCFQLGEGDCWDLPVDYTKMKPRRIDEDESKDITPEDLDPFQEALEERRYPGEVTIPSPKPKYPQCKESKKDLITLSGCPLADKSIRSMLATSSQELKCPTPGCDGSGHITGNYASHRSLSGCPRAKKSGIRIAQSKEDKEDQEPIRCPVPGCDGQGHITGKYASHRSASGCPLAAKRQKDGYLNGSQFSWKSVKTEGMSCPTPGCDGSGHVSGSFLTHRSLSGCPRATSAMKKAKLSGEQMLTIKQRASNGIENDEEIKQLDEEIKELNESNSQMEADMIKLRTQITTMESNLKTIEEENKVIEQQNESLLHELANLSQSLIHSLANIQLPHMDPINEQNFDAYVTTLTEMYTNQDRYQSPENKALLENIKQAVRGIQV

SEQ ID NO: 764977 - protein, 904 aa, Homo sapiens
MEVDTEEKRHRTRSKGVRVPVEPAIQELFSCPTPGCDGSGHVSGKYARHRSVYGCPLAKKRKTQDKQPQEPAPKRKPFAVKADSSSVDECDDSDGTEDMDEKEEDEGEEYSEDNDEPGDEDEEDEEGDREEEEEIEEEDEDDDEDGEDVEDEEEEEEEEEEEEEEEENEDHQMNCHNTRIMQDTEKDDNNNDEYDNYDELVAKSLLNLGKIAEDAAYRARTESEMNSNTSNSLEDDSDKNENLGRKSELSLDLDSDVVRETVDSLKLLAQGHGVVLSENMNDRNYADSMSQQDSRNMNYVMLGKPMNNGLMEKMVEESDEEVCLSSLECLRNQCFDLARKLSETNPQERNPQQNMNIRQHVRPEEDFPGRTPDRNYSDMLNLMRLEEQLSPRSRVFASCAKEDGCHERDDDTTSVNSDRSEEVFDMTKGNLTLLEKAIALETERAKAMREKMAMEAGRRDNMRSYEDQSPRQLPGEDRKPKSSDSHVKKPYYGKDPSRTEKKESKCPTPGCDGTGHVTGLYPHHRSLSGCPHKDRVPPEILAMHESVLKCPTPGCTGRGHVNSNRNSHRSLSGCPIAAAEKLAKAQEKHQSCDVSKSSQASDRVLRPMCFVKQLEIPQYGYRNNVPTTTPRSNLAKELEKYSKTSFEYNSYDNHTYGKRAIAPKVQTRDISPKGYDDAKRYCKDPSPSSSSTSSYAPSSSSNLSCGGGSSASSTCSKSSFDYTHDMEAAHMAATAILNLSTRCREMPQNLSTKPQDLCATRNPDMEVDENGTLDLSMNKQRPRDSCCPILTPLEPMSPQQQAVMNNRCFQLGEGDCWDLPVDYTKMKPRRIDEDESKDITPEDLDPFQEALEERRYPGEVTIPSPKPKYPQCKESKKDLITLSGCPLADKSIRSMLATSSQELK

SEQ ID NO: 764978 - protein, 186 aa, Homo sapiens
RKEPESFVLFSFAVLFVSLRVSPSTLRPVPRGCVWLRPGRAGPAVCCLPCALRPGPESSLSLSPQRSGYCKDPSPSSSSTSSYAPSSSSNLSCGGGSSASSTCSKSSFDYTHDMEAAHMAATAILNLSTRCREMPQNLSTKPQDLCATRVRAPGQVEPPGGWGRPGRGPSHRDTRRFRGSCMGQTP

SEQ ID NO: 764979 - protein, 1134 aa, Homo sapiens
MEVDTEEKRHRTRSKGVRVPVEPAIQELFSCPTPGCDGSGHVSGKYARHRSVYGCPLAKKRKTQDKQPQEPAPKRKPFAVKADSSSVDECDDSDGTEDMDEKEEDEGEEYSEDNDEKTINMNCHNTRIMQDTEKDDNNNDEYDNYDELVAKSLLNLGKIAEDAAYRARTESEMNSNTSNSLEDDSDKNENLGRKSELSLDLDSDVVRETVDSLKLLAQGHGVVLSENMNDRNYADSMSQQDSRNMNYVMLGKPMNNGLMEKMVEESDEEVCLSSLECLRNQCFDLARKLSETNPQERNPQQNMNIRQHVRPEEDFPGRTPDRNYSDMLNLMRLEEQLSPRSRVFASCAKEDGCHERDDDTTSVNSDRSEEVFDMTKGNLTLLEKAIALETERAKAMREKMAMEAGRRDNMRSYEDQSPRQLPGEDRKPKSSDSHVKKPYYGKDPSRTEKKESKCPTPGCDGTGHVTGLYPHHRSLSGCPHKDRVPPEILAMHESVLKCPTPGCTGRGHVNSNRNSHRSLSGCPIAAAEKLAKAQEKHQSCDVSKSSQASDRVLRPMCFVKQLEIPQYGYRNNVPTTTPRSNLAKELEKYSKTSFEYNSYDNHTYGKRAIAPKVQTRDISPKGYDDAKRYCKDPSPSSSSTSSYAPSSSSNLSCGGGSSASSTCSKSSFDYTHDMEAAHMAATAILNLSTRCREMPQNLSTKPQDLCATRNPDMEVDENGTLDLSMNKQRPRDSCCPILTPLEPMSPQQQAVMNNRCFQLGEGDCWDLPVDYTKMKPRRIDEDESKDITPEDLDPFQEALEERRYPGEVTIPSPKPKYPQCKESKKDLITLSGCPLADKSIRSMLATSSQELKCPTPGCDGSGHITGNYASHRSLSGCPRAKKSGIRIAQSKEDKEDQEPIRCPVPGCDGQGHITGKYASHRSASGCPLAAKRQKDGYLNGSQFSWKSVKTEGMSCPTPGCDGSGHVSGSFLTHRSLSGCPRATSAMKKAKLSGEQMLTIKQRASNGIENDEEIKQLDEEIKELNESNSQMEADMIKLRTQITTMESNLKTIEEENKVIEQQNESLLHELANLSQSLIHSLANIQLPHMDPINEQNFDAYVTTLTEMYTNQDRYQSPENKALLENIKQAVRGIQV

SEQ ID NO: 764980 - protein, 913 aa, Homo sapiens
MEVDTEEKRHRTRSKGVRVPVEPAIQELFSCPTPGCDGSGHVSGKYARHRSVYGCPLAKKRKTQDKQPQEPAPKRKPFAVKADSSSVDECDDSDGTEDMDEKEEDEGEEYSEDNDEPGDEDEEDEEGDREEEEEIEEEDEDDDEDGEDVEDEEEEEEEEEEEEEEEENEDHQMNCHNTRIMQDTEKDDNNNDEYDNYDELVAKSLLNLGKIAEDAAYRARTESEMNSNTSNSLEDDSDKNENLGRKSELSLDLDSDVVRETVDSLKLLAQGHGVVLSENMNDRNYADSMSQQDSRNMNYVMLGKPMNNGLMEKMVEESDEEVCLSSLECLRNQCFDLARKLSETNPQERNPQQNMNIRQHVRPEEDFPGRTPDRNYSDMLNLMRLEEQLSPRSRVFASCAKEDGCHERDDDTTSVNSDRSEEVFDMTKGNLTLLEKAIALETERAKAMREKMAMEAGRRDNMRSYEDQSPRQLPGEDRKPKSSDSHVKKPYYGKDPSRTEKKESKCPTPGCDGTGHVTGLYPHHRSLSGCPHKDRVPPEILAMHESVLKCPTPGCTGRGHVNSNRNSHRSLSGCPIAAAEKLAKAQEKHQSCDVSKSSQASDRVLRPMCFVKQLEIPQYGYRNNVPTTTPRSNLAKELEKYSKTSFEYNSYDNHTYGKRAIAPKRSGYCKDPSPSSSSTSSYAPSSSSNLSCGGGSSASSTCSKSSFDYTHDMEAAHMAATAILNLSTRCREMPQNLSTKPQDLCATRNPDMEVDENGTLDLSMNKQRPRDSCCPILTPLEPMSPQQQAVMNNRCFQLGEGDCWDLPVDYTKMKPRRIDEDESKDITPEDLDPFQEALEERRYPGEVTIPSPKPKYPQCKESKKDLITLSGCPLADKSIRSMLATSSQELKTFLIMDKTNFPDKLSLLDPLSS

SEQ ID NO: 764981 - protein, 924 aa, Homo sapiens
MEVDTEEKRHRTRSKGVRVPVEPAIQELFSCPTPGCDGSGHVSGKYARHRSVYGCPLAKKRKTQDKQPQEPAPKRKPFAVKADSSSVDECDDSDGTEDMDEKEEDEGEEYSEDNDEPGDEDEEDEEGDREEEEEIEEEDEDDDEDGEDVEDEEEEEEEEEEEEEEEENEDHQMNCHNTRIMQDTEKDDNNNDEYDNYDELVAKSLLNLGKIAEDAAYRARTESEMNSNTSNSLEDDSDKNENLGRKSELSLDLDSDVVRETVDSLKLLAQGHGVVLSENMNDRNYADSMSQQDSRNMNYVMLGKPMNNGLMEKMVEESDEEVCLSSLECLRNQCFDLARKLSETNPQERNPQQNMNIRQHVRPEEDFPGRTPDRNYSDMLNLMRLEEQLSPRSRVFASCAKEDGCHERDDDTTSVNSDRSEEVFDMTKGNLTLLEKAIALETERAKAMREKMAMEAGRRDNMRSYEDQSPRQLPGEDRKPKSSDSHVKKPYYGKDPSRTEKKESKCPTPGCDGTGHVTGLYPHHRSLSGCPHKDRVPPEILAMHESVLKCPTPGCTGRGHVNSNRNSHRSLSGCPIAAAEKLAKAQEKHQSCDVSKSSQASDRVLRPMCFVKQLEIPQYGYRNNVPTTTPRSNLAKELEKYSKTSFEYNSYDNHTYGKRAIAPKVQTRDISPKGYDDAKRYCKDPSPSSSSTSSYAPSSSSNLSCGGGSSASSTCSKSSFDYTHDMEAAHMAATAILNLSTRCREMPQNLSTKPQDLCATRNPDMEVDENGTLDLSMNKQRPRDSCCPILTPLEPMSPQQQAVMNNRCFQLGEGDCWDLPVDYTKMKPRRIDEDESKDITPEDLDPFQEALEERRYPGEVTIPSPKPKYPQCKESKKDLITLSGCPLADKSIRSMLATSSQELKIPVQGPRALDHLLMFSDFLN

SEQ ID NO: 764982 - protein, 519 aa, Homo sapiens
SSPPPPPSSAPGQRGGGGGGSSRSSPGCGSRRRRGAPSPVPGRGGGMWGLAGGRLFGIFSAPVLVAVVCCAQSVNDPGNMSFVKETVDKLLKGYDIRLRPDFGGPPVCVGMNIDIASIDMVSEVNMDYTLTMYFQQYWRDKRLAYSGIPLNLTLDNRVADQLWVPDTYFLNDKKSFVHGVTVKNRMIRLHPDGTVLYGLRITTTAACMMDLRRYPLDEQNCTLEIESYGYTTDDIEFYWRGGDKAVTGVERIELPQFSIVEHRLVSRNVVFATGAYPRLSLSFRLKRNIGYFILQTYMPSILITILSWVSFWINYDASAARVALGITTVLTMTTINTHLRETLPKIPYVKAIDMYLMGCFVFVFLALLEYAFVNYIFFGRGPQRQKKLAEKTAKAKNDRSKSESNRVDAHGNILLTSLEVHNEMNEVSGGIGDTRNSAISFDNSGIQYRKQSMPREGHGRFLGDRSLPHKKTHLRRRSSQLKIKIPDLTDVNAIDRWSRIVFPFTFSLFNLVYWLYYVN

SEQ ID NO: 764983 - protein, 519 aa, Homo sapiens; identical to SEQ ID NO: 764982

SEQ ID NO: 764984 - protein, 491 aa, Homo sapiens
RRVGGTADPSRLGRRNSAMCSGLLELLLPIWLSWTLGTRGSEPRSVNDPGNMSFVKETVDKLLKGYDIRLRPDFGGPPVCVGMNIDIASIDMVSEVNMDYTLTMYFQQYWRDKRLAYSGIPLNLTLDNRVADQLWVPDTYFLNDKKSFVHGVTVKNRMIRLHPDGTVLYGLRITTTAACMMDLRRYPLDEQNCTLEIESYGYTTDDIEFYWRGGDKAVTGVERIELPQFSIVEHRLVSRNVVFATGAYPRLSLSFRLKRNIGYFILQTYMPSILITILSWVSFWINYDASAARVALGITTVLTMTTINTHLRETLPKIPYVKAIDMYLMGCFVFVFLALLEYAFVNYIFFGRGPQRQKKLAEKTAKAKNDRSKSESNRVDAHGNILLTSLEVHNEMNEVSGGIGDTRNSAISFDNSGIQYRKQSMPREGHGRFLGDRSLPHKKTHLRRRSSQLKIKIPDLTDVNAIDRWSRIVFPFTFSLFNLVYWLYYVN

SEQ ID NO: 764985 - protein, 212 aa, Homo sapiens
SSPPPPPSSAPGQRGGGGGGSSRSSPGCGSRRRRGAPSPVPGRGGGMWGLAGGRLFGIFSAPVLVAVVCCAQSVNDPGNMSFVKETVDKLLKGYDIRLRPDFGGPPVCVGMNIDIASIDMVSEVNMDYTLTMYFQQYWRDKRLAYSGIPLNLTLDNRVADQLWVPDTYFLNDKKSFVHGVTVKNRMIRLHPDGTVLYGLRYYGPGLEEVWHS

SEQ ID NO: 764986 - protein, 271 aa, Homo sapiens
QAVRSRVFRILVLILQLLTLWPLCHTDITPSVPPASYHPKPWLGAQPATVVTPGVNVTLRCRAPQPAWRFGLFKPGEIAPLLFRDVSSELAEFFLEEVTPAQGGSYRCCYRRPDWGPGVWSQPSDVLELLVTEELPRPSLVALPGPVVGPGANVSLRCAGRLRNMSFVLYREGVAAPLQYRHSAQPWADFTLLGARAPGTYSCYYHTPSAPYVLSQRSEVLVISWEDSGSSDYTRGNLVRLGLAGLVLISLGALVTFDWRSQNRAPAGIRP

SEQ ID NO: 764987 - protein, 305 aa, Homo sapiens
MLPHFLGGERVRPSPGSSSSGYLPTMALVLILQLLTLWPLCHTDITPSVPPASYHPKPWLGAQPATVVTPGVNVTLRCRAPQPAWRFGLFKPGEIAPLLFRDVSSELAEFFLEEVTPAQGGSYRCCYRRPDWGPGVWSQPSDVLELLVTEELPRPSLVALPGPVVGPGANVSLRCAGRLRNMSFVLYREGVAAPLQYRHSAQPWADFTLLGARAPGTYSCYYHTPSAPYVLSQRSEVLVISWEGEGPEARPASSAPGMQAPGPPPSDPGLQAPSPSFLDPGLQAPSPSFLIQQSRPQPLLPGPRS

SEQ ID NO: 764988 - protein, 307 aa, Homo sapiens [sequence omitted]

SEQ ID NO: 764989 - protein, 296 aa, Homo sapiens
MLPHFLGGERVRPSPGSSSSGYLPTMALVLILQLLTLFPPASYHPKPWLGAQPATVVTPGVNVTLRCRAPQPAWRFGLFKPGEIAPLLFRDVSSELAEFFLEEVTPAQGGSYRCCYRRPDWGPGVWSQPSDVLELLVTEELPRPSLVALPGPVVGPGANVSLRCAGRLRNMSFVLYREGVAAPLQYRHSAQPWADFTLLGARAPGTYSCYYHTPSAPYVLSQRSEVLVISWEGEGPEARPASSAPGMQAPGPPPSDPGAQAPSLSSFRPRGLVLQPLLPQTQDSWDPAPPPSDPGV

SEQ ID NO: 764990 - protein, 294 aa, Homo sapiens
MLPHFLGGERVRPSPGSSSSGYLPTMALVLILQLLTLFPPASYHPKPWLGAQPATVVTPGVNVTLRCRAPQPAWRFGLFKPGEIAPLLFRDVSSELAEFFLEEVTPAQGGSYRCCYRRPDWGPGVWSQPSDVLELLVTEELPRPSLVALPGPVVGPGANVSLRCAGRLRNMSFVLYREGVAAPLQYRHSAQPWADFTLLGARAPGTYSCYYHTPSAPYVLSQRSEVLVISWEGEGPEARPASSAPGMQAPGPPPSDPGLQAPSPSFLDPGLQAPSPSFLIQQSRPQPLLPGPRS

SEQ ID NO: 764991 - protein, 107 aa, Homo sapiens
MAFLLSLLVLIFLAEFSQSPHIWVSSLLEAGMAETVSCEVARVFPAKEVMFHMFLEDQELSSFLSWEGDTAWANATIRTMEAGDQELSCFASLGAMEQKTRKLVHSY

SEQ ID NO: 764992 - protein, 538 aa, Homo sapiens
RREAQPGQSSAWSRRPAGAPWRSHAGAPQTDPSAMNQSIPVAPTPPRRVRLKPWLVAQVNSCQYPGLQWVNGEKKLFCIPWRHATRHGPSQDGDNTIFKAWAKETGKYTEGVDEADPAKWKANLRCALNKSRDFRLIYDGPRDMPPQPYKIYEVCSNGPAPTDSQPPEDYSFGAGEEEEEEEELQRMLPSLSLTDAVQSGPHMTPYSLLKEDVKWPPTLQPPTLQPPVVLGPPAPDPSPLAPPPGNPAGFRELLSEVLEPGPLPASLPPAGEQLLPDLLISPHMLPLTDLEIKFQYRGRPPRALTISNPHGCRLFYSQLEATQEQVELFGPISLEQVRFPSPEDIPSDKQRFYTNQLLDVLDRGLILQLQGQDLYAIRLCQCKVFWSGPCASAHDSCPNPIQREVKTKLFSLEHFLNELILFQKGQTNTPPPFEIFFCFGEEWPDRKPREKKLITVQVVPVAARLLLEMFSGELSWSADSIRLQISNPDLKDRMVEQFKELHHIWQSQQRLQPVAQAPPGAGLGVGQGPWPMHPAGMQ

SEQ ID NO: 764993 - protein, 514 aa, Homo sapiens
MNQSIPVAPTPPRRVRLKPWLVAQVNSCQYPGLQWVNGEKKLFCIPWRHATRHGPSQDGDNTIFKAWAKETGKYTEGVDEADPAKWKANLRCALNKSRDFRLIYDGPRDMPPQPYKIYEVCSNGPAPTDSQPPEDYSFGAGEEEEEEEELQRMLPSLSLTDAVQSGPHMTPYSLLKEDVKWPPTLQPPTLRPPTLQPPTLQPPVVLGPPAPDPSPLAPPPGNPAGFRELLSEVLEPGPLPASLPPAGEQLLPDLLISPHMLPLTDLEIKFQYRGRPPRALTISNPHGCRLFYSQLEATQEQVELFGPISLEQVRFPSPEDIPSDKQRFYTNQLLDVLDRGLILQLQGQDLYAIRLCQCKVFWSGPCASAHDSCPNPIQREVKTKLFSLEHFLNELILFQKGQTNTPPPFEIFFCFGEEWPDRKPREKKLITVQVVPVAARLLLEMFSGELSWSADSIRLQISNPDLKDRMVEQFKELHHIWQSQQRLQPVAQAPPGAGLGVGQGPWPMHPAGMQ

SEQ ID NO: 764994 - protein, 514 aa, Homo sapiens; identical to SEQ ID NO: 764993

SEQ ID NO: 764995 - protein, 606 aa, Homo sapiens
RREAQPGQSSAWSRRPAGAPWRSHAGAPQTDPSAMNQSIPVAPTPPRRVRLKPWLVAQVNSCQYPGLQWVNGEKKLFCIPWRHATRHGPSQDGDNTIFKAWAKETGKYTEGVDEADPAKWKANLRCALNKSRDFRLIYDGPRDMPPQPYKIYEVCSNGPAPTDSQPPEDYSFGAGEEEEEEEELQRMLPSLSLTGGAEEVVVGGLVYREAIGTIGTWKGADGRLGWPRAGRRCAWEAVRGGGTDSRPHALSVDAVQSGPHMTPYSLLKEDVKWPPTLQPPTLRPPTLQPPTLQPPVVLGPPAPDPSPLAPPPGNPAGFRELLSEVLEPGPLPASLPPAGEQLLPDLLISPHMLPLTDLEIKFQYRGRPPRALTISNPHGCRLFYSQLEATQEQVELFGPISLEQVRFPSPEDIPSDKQRFYTNQLLDVLDRGLILQLQGQDLYAIRLCQCKVFWSGPCASAHDSCPNPIQREVKTKLFSLEHFLNELILFQKGQTNTPPPFEIFFCFGEEWPDRKPREKKLITVQVVPVAARLLLEMFSGELSWSADSIRLQISNPDLKDRMVEQFKELHHIWQSQQRLQPVAQAPPGAGLGVGQGPWPMHPAGMQ

SEQ ID NO: 764996 - protein, 346 aa, Homo sapiens [sequence omitted]

SEQ ID NO: 764997 - protein, 514 aa, Homo sapiens
ARGSSCAWKASSDPSAMNQSIPVAPTPPRRVRLKPWLVAQVNSCQYPGLQWVNGEKKLFCIPWRHATRHGPSQDGDNTIFKAWAKETGKYTEGVDEADPAKWKANLRCALNKSRDFRLIYDGPRDMPPQPYKIYEVCSNGPAPTDSQPPEDYSFGAGEEEEEEEELQRMLPSLSLTEDVKWPPTLQPPTLRPPTLQPPTLQPPVVLGPPAPDPSPLAPPPGNPAGFRELLSEVLEPGPLPASLPPAGEQLLPDLLISPHMLPLTDLEIKFQYRGRPPRALTISNPHGCRLFYSQLEATQEQVELFGPISLEQVRFPSPEDIPSDKQRFYTNQLLDVLDRGLILQLQGQDLYAIRLCQCKVFWSGPCASAHDSCPNPIQREVKTKLFSLEHFLNELILFQKGQTNTPPPFEIFFCFGEEWPDRKPREKKLITVQVVPVAARLLLEMFSGELSWSADSIRLQISNPDLKDRMVEQFKELHHIWQSQQRLQPVAQAPPGAGLGVGQGPWPMHPAGMQ

SEQ ID NO: 764998 - protein, 548 aa, Homo sapiens
RREAQPGQSSAWSRRPAGAPWRSHAGAPQTDPSAMNQSIPVAPTPPRRVRLKPWLVAQVNSCQYPGLQWVNGEKKLFCIPWRHATRHGPSQDGDNTIFKAWAKETGKYTEGVDEADPAKWKANLRCALNKSRDFRLIYDGPRDMPPQPYKIYEVCSNGPAPTDSQPPEDYSFGAGEEEEEEEELQRMLPSLSLTDAVQSGPHMTPYSLLKEDVKWPPTLQPPTLRPPTLQPPTLQPPVVLGPPAPDPSPLAPPPGNPAGFRELLSEVLEPGPLPASLPPAGEQLLPDLLISPHMLPLTDLEIKFQYRGRPPRALTISNPHGCRLFYSQLEATQEQVELFGPISLEQVRFPSPEDIPSDKQRFYTNQLLDVLDRGLILQLQGQDLYAIRLCQCKVFWSGPCASAHDSCPNPIQREVKTKLFSLEHFLNELILFQKGQTNTPPPFEIFFCFGEEWPDRKPREKKLITVQVVPVAARLLLEMFSGELSWSADSIRLQISNPDLKDRMVEQFKELHHIWQSQQRLQPVAQAPPGAGLGVGQGPWPMHPAGMQ

SEQ ID NO: 764999 - protein, 548 aa, Homo sapiens; identical to SEQ ID NO: 764998

SEQ ID NO: 765000 - protein, 255 aa, Homo sapiens
RREAQPGQSSAWSRRPAGAPWRSHAGAPQTDPSAMNQSIPVAPTPPRRVRLKPWLVAQVNSCQYPGLQWVNGEKKLFCIPWRHATRHGPSQDGDNTIFKAWAKETGKYTEGVDEADPAKWKANLRCALNKSRDFRLIYDGPRDMPPQPYKIYEVCSNGPAPTDSQPPEDYSFGAGEEEEEEEELQRMLPSLSLTDAVQSGPHMTPYSLLKEDVKWPPTSAAAHSAAARGAGSPCSRPQPPGSSPWQPCWLQGASL

SEQ ID NO: 765001 - protein, 327 aa, Homo sapiens
MSSGRPLLQPPTLQPPVVLGPPAPDPSPLAPPPGNPAGFRELLSEVLEPGPLPASLPPAGEQLLPDLLISPHMLPLTDLEIKFQYRGRPPRALTISNPHGCRLFYSQLEATQEQVELFGPISLEQVRFPSPEDIPSDKQRFYTNQLLDVLDRGLILQLQGQDLYAIRLCQCKVFWSGPCASAHDSCPNPIQREVKTKLFSLEHFLNELILFQKGQTNTPPPFEIFFCFGEEWPDRKPREKKLITVQVVPVAARLLLEMFSGELSWSADSIRLQISNPDLKDRMVEQFKELHHIWQSQQRLQPVAQAPPGAGLGVGQGPWPMHPAGMQ

SEQ ID NO: 765002 - protein, 354 aa, Homo sapiens
MLFNLRILLNNAAFRNGHNFMVRNFRCGQPLQNKVQLKGRDLLTLKNFTGEEIKYMLWLSADLKFRIKQKGEYLPLLQGKSLGMIFEKRSTRTRLSTETGFALLGGHPCFPTTQDIHLGVNESLTDTARVLSSMADAVLARVYKQSDLDTLAKEASIPIINGLSDLYHPIQILADYLTLQEHYSSLKGLTLSWIGDGNNILHSIMMSAAKFGMHLQAATPKGYEPDASVTKLAEQYAKENGTKLLLTNDPLEAAHGGNVLITDTWISMGQEEEKKKRLQAFQGYQVTMKTAKVAASDWTFLHCLPRKPEEVDDEVFYSPRSLVFPEAENRKWTIMAVMVSLLTDYSPQLQKPKF

SEQ ID NO: 765003 - protein, 354 aa, Homo sapiens; identical to SEQ ID NO: 765002

SEQ ID NO: 765004 - protein, 81 aa, Homo sapiens
DSGPSELPGPTHTTTGSTYSAITTTHSAPSPLTHTTTGSTHKPIISTLTTTGPTLNIIGPVQTTTSPTHTYAKPSLPCPDA

SEQ ID NO: 765005 - protein, 183 aa, Homo sapiens
MREYKVVVLGSGGVGKSALTVQFVTGSFIEKYDPTIEDFYRKEIEVDSSPSVLEILDTAGTEQFASMRDLYIKNGQGFILVYSLVNQQSFQDIKPMRDQIIRVKRYERVPMILVGNKVDLEGEREVSYGEGKALAEEWSCPFMETSAKNKASVDELFAEIVRQMNYAAQPNGDEGCCSACVIL

SEQ ID NO: 765006 - protein, 183 aa, Homo sapiens; identical to SEQ ID NO: 765005

SEQ ID NO: 765007 - protein, 183 aa, Homo sapiens; identical to SEQ ID NO: 765005

SEQ ID NO: 765008 - protein, 125 aa, Homo sapiens
MREYKVVVLGSGGVGKSALTVQFVTGSFIEKYDPTIEDFYRKEIEVDSSPSVLEILDTAGTEQFASMRDLYIKNGQGFILVYSLVNQQSFQDIKPMRDQIIRVKRSSWKLRSGSFSASLEGQPHD

SEQ ID NO: 765009 - protein, 259 aa, Homo sapiens
MPVNKSPMINTCGGISSPYHEELWKLNFQHLSGERGHKSRPTFSITKEFILRFNQTQNSKEKEELLELARKIILRCKRKLGLKTLGSGRHVHLPAAWTEVIYLAQCKGEIQDESLNMLYASLDHASFDYDHLPALFFVAESVLYRLCCDASLKTYLYSVEIKLAKIGYLVFLRLFIFFLHGHLESFKQHLLRLQPYLYALSFSGASYHKYPNIFSNVQFILKASEIIGKRELRSESIFRPVEDKKQIENTDLEWGGLKY

SEQ ID NO: 765010 - protein, 143 aa, Homo sapiens
MLYASLDHASFDYDHLPALFFVAESVLYRLCCDASLKTYLYSVEIKLAKIGYLVFLRLFIFFLHGHLESFKQHLLRLQPYLYALSFSGASYHKYPNIFSNVQFILKASEIIGKRELRSESIFRPVEDKKQIENTDLEWGGLKY

SEQ ID NO: 765011 - protein, 259 aa, Homo sapiens; identical to SEQ ID NO: 765009

SEQ ID NO: 765012 - protein, 259 aa, Homo sapiens; identical to SEQ ID NO: 765009

SEQ ID NO: 765013 - protein, 137 aa, Homo sapiens
SRTPEDKQRDSSRPTQTTCTPSKMVSRKAVAALLVVHVAAMLASQTEAFVPIFTYGELQRMQEKERNKGQKKSLSVWQRSGEEGPVDPAEPIREEENEMIKLTAPLEIGMRMNSRQLEKYPATLEGLLSEMLPQHAK

SEQ ID NO: 765014 - protein, 503 aa, Homo sapiens
MALRAKAEVCVAAPWLSLQRARALGTRAARAPRTVLPFEAMPQHPGNRWLRLLQIWREQGYEHLHLEMHQTFQELGPIFRYNLGGPRMVCVMLPEDVEKLQQVDSLHPCRMILEPWVAYRQHRGHKCGVFLLNGPEWRFNRLRLNPDVLSPKAVQRFLPMVDAVARDFSQALKKKVLQNARGSLTLDVQPSIFHYTIEASNLALFGERLGLVGHSPSSASLNFLHALEVMFKSTVQLMFMPRSLSRWIRPKVWKEHFEAWDCIFQYGDNCIQKIYQELAFNRPQHYTGIVAELLLKAELSLEAIKANSMELTAGSVDTTAFPLLMTLFELARNPDVQQILRQESLAAAASISEHPQKATTELPLLRAALKETLRLYPVGLFLERVVSSDLVLQNYHIPAGTLVQVFLYSLGRNAALFPRPERYNPQRWLDIRGSGRNFHHVPFGFGMRQCLGRRLAEAEMLLLLHHVLKHFLVETLTQEDIKMVYSFILRPGTSPLLTFRAIN

SEQ ID NO: 765015 - protein, 87 aa, Homo sapiens
DLLLWVMGQCQEAQARQAQCFRKTAAFREQLQDNCSIPLGILAPNAPRNLAPVSPPGELRGPPLHTLAGFLFDLFNFQEPSLLESRI

SEQ ID NO: 765016 - protein, 160 aa, Homo sapiens
AVPPAEARQQRPVCLCWPEDGAHGHTLALQMSLVLLLVTPDYRLAPQSHPSPPEKGAQDTLDPKSSASRDFQTGAHPLTPPGWQLQLSLSAWKGTLWDTEGTRFLRLSLQSLPFSEDRSCWSRTSSSSTWLKLGQSVWFSQGWLDPRTEDQSPLIAWPWR

SEQ ID NO: 765017 - protein, 67 aa, Homo sapiens
  misc_feature (15)..(15): Xaa can be any naturally occurring amino acid
NGSKPTWGLSTKTRXYFTSWKYHNSSSSCDNQKCIQTSPMSPGVWGGNLLKLRTTALEIKAVRNPRY

SEQ ID NO: 765018 - protein, 280 aa, Homo sapiens
RQSEQPWSRRSSSSSSRRRLRSAAEPAMALSMPLNGLKEEDKEPLIELLVKAGSDGESIGNCPFSQRLFMILWLKGVVFSVTTVDLKRKPADLQNLAPGTHPPFITFNSEVKTDVNKIEEFLEEVLCPPKYLKLSPKHPESNTAGMDIFAKFSAYIKNSRPEANEALERGLLKTLQKLDEYLNSPLPDEIDENSMEDIKFSTRKFLDGNEMTLADCNLLPKLHIVKVVAKKYRNFDIPKEMTGIWRYLTNAYSRDEFTNTCPSDKEVEIAYSDVAKRLTK

SEQ ID NO: 765019 - protein, 80 aa, Homo sapiens
RQSEQPWSRRSSSSSSRRRLRSAAEPAMALSMPLNGLKEEDKEPLIELLVKAGSDGESIGNCPFSQRLFMILGSKELYLV

SEQ ID NO: 765020 - protein, 280 aa, Homo sapiens
RQSEQPWSRRSSSSSSRRRLRSAAEPAMALSMPLNGLKEEDKEPLIELLVKAGSDGESIGNCPFSQRLFMILWLKGVVFSVTTVDLKRKPADLQNLAPGTHPPFITFNSEVKTDVNKIEEFLEEVLCPPKYLKLSPKHPESNTAGMDIFAKFSAYIKNSRPEANEALERGLLKTLQKLDEYLNSPLPDEIDENSMEDIKFSTRKFLDGNEMTLADCNLLPKLHIVKVVAKKYRNFDIPKEMTGIWRYLTNAYSRDEFTRGWGGGGGGGGIGDVGGDSPSK

SEQ ID NO: 765021 - protein, 50 aa, Homo sapiens
NRTASETARLPIINPVWLRNCQAPHHKSCVATNGENSRKWKETNCPVGKT

SEQ ID NO: 765022 - protein, 69 aa, Homo sapiens
DEPGHYYGAVCLEYRLGSFQKEVSSKQTHLEREKCAYYIHINSIHAASLSFSLSLSHSRIELHTNMSFV

SEQ ID NO: 765023 - protein, 376 aa, Homo sapiens
MQKTDIHYHSLTGEADFNWRFIFTMDYLAAERTCVQSQKVTGLGREGQQATTNRPRLLELLPPPLQRLAICPRTSETCPQVETLFLDSLSLLGGGPLRGARETSRRQAGEHALPPFPQDYIWSLDATSMKFPARLIIQVWDNDIFSPDDFLGVLELDLSDMPLPARHAKQCSIRMMDADPKWPYFIQYKHFSLFKKKTVTGWWPCQVLDGGKWRLSGKVKMSLEILSEKEALIKPAGRGQSEPNQYPTLHPPLRTNTSFTWLRSPVQNFCYIFWKRYRFKLIAFMVISIIALMLFNFIYSAPHYLAMSWIKPQLQLYPPIKIFNIINSLNTSNASSSILPTQDPNLKPTIDHEWKLHPGPTNHLSDIFPELPAPGD

SEQ ID NO: 765024 - protein, 1891 aa, Homo sapiens
MLSHEVTRIEKHQNRQKYGLCVIFLSCTMMPNFKELIHFEVSIGHYGNKMDLNYKPLVSSTPYSPVIYDGNIYHYVPWYNTKPVVAVTSNWEDVSFRMNCLNLLHFTRDRLKANLDTLKSTRNPKDPALLYQWEKLLRELAEDCKRPLPCMTYQPKATSLDRKRWQLRSLLLQELAQKAKQAKPKDMVATAEDWLYRLNTVLPEPQMGLPDVMIWLVAKEQRVAYAQYPEGEGQKDVLPAHLRVCMWLGNVTDSKDLQLLRQGDTAVYAEMVSDENQAKYKDQWGQQGLYHCPNFSDVMGNKTLPMTDFQPPLGWHWQDSWTVEPQRRLLLDIDINKSQVLEEVYENQGRDTRGAWGPAAIPNTDVNGQPMEARENVKCPQGWHFKKDWVVELNHAVDSKGWEYGVGIPPSGLPQVWSPVEKTYHSCRRRRWARVRFRNHGELSHEQETLSFLQLGLAKGEEEGWEYDTFGSKFHLNPQPQSRFRRRCWRRRLAPNKDKGIAPIFLLEGSLAMDLKYHAGKEEDSKTWPWGLDRQFRDPQRQDTRPPNLPFIYCTFNKPHYYQLFCYIYQARNLVSNQILTFQGPFIRVVFLNHSQCTQTLRSSAGPTWAQTLIFQHLLLYENPQDTKESPPLVVLELWQRDFWGKESLWGRSVWPPMVWLDLQDRILPPMRWHPLVKELGKEEGEILASCELILQTEKLGEKQLPILSVPWKNGAYTLPKSIQPTIKRMAIEVLAMWDGDGGQDRRGWSGVRCSLLLVLPDYWIQSSHPEKDYLGGGGRQERNEEVLVYTLEIILPQTSAVRSRQRAVACMITVGLTLPLRSSNYFAEKEIEAPRDNTFHSTVMQGLTDEAISGPALSDCRCQDVAHLSSESSMRVLIQKLCALPQMWQRAQDGQASGTEGFPKIRQLGWFPLYGPEEAQSQGAAISWQDARSLNGHGVLNELDGTGALRNPGTSCFFRPQRQSASGTPTSELMRPDKAAGEEGQCLRAMEVSGGCSQWPEVTSLMGWGTASQPRGQALIPHRTGKPVLVRLQTLAPLQPHSLALQAPAAPAIAPQPPSLARTPLQRRCLPLVLPSFFVLVDPGLGLRNMKKASSPQLLVEFGEESLRTEPIRDFQTNPNFPESESVLVLTVLMPTEEAYALPLVVKVVDNWAFGQQTVTGQANIDFLQPYFCDPWAQDYMHPKLPTLSEKKHQDFLGYLYRKFWFKSSKAEDEYEHEVDWWSKLFWATDEHKSLKYKYKDYHTLKVYECELEAVPAFQGLQDFCQTFKLYQEQPKLDSPVVGEFKGLFRIYPFPENPEAPKPPLQFLVWPEREDFPQPCLVRVYMVRAINLQPQDYNGLDPYVILKLGKTELGNRDMYQPNTLDPIFGMMFELTCNIPLEKDLEIQLYDFDLFSPDDKIGTTVIDLENRLLSGFGAHCGLSKSYCQSGPFRWRDQMPPSYLLERYAKRKGLPPPLFSPEEDAVFYNGKKFKLQSFEPKTPTVHGLGPKKERLALYLLHTQGLVPEHVETRTLYSHSQPGIDQGKVQMWVDIFPKKLGPPGPQVNINPRKPKRYELRCIIWKTANVDLVDDNLSREKTSDIYIKGWLYGLEKDMQKTDIHYHSLTGEADFNWRFIFTMDYLAAERTCVQSQKDYIWSLDATSMKFPARLIIQVWDNDIFSPDDFLGVLELDLSDMPLPARHAKQCSIRMMDADPKWPYFIQYKHFSLFKKKTVTGWWPCQVLDGGKWRLSGKVKMSLEILSEKEALIKPAGRGQSEPNQYPTLHPPLRTNTSFTWLRSPVQNFCYIFWKRYRFKLIAFMVISIIALMLFNFIYSAPHYLAMSWIKPQLQLYPPIKIFNIINSLNTSNASSSILPTQDPNLKPTIDHEWKLHPGPTNHLSDIFPELPAPGD

SEQ ID NO: 765025 - protein, 128 aa, Homo sapiens [sequence omitted]

SEQ ID NO: 765026 - protein, 521 aa, Homo sapiens
PRVRARTAKMKAIIHLTLLALLSVNTATNQGNSADAVTTTETATSGPTVAAADTTETNFPETASTTANTPSFPTATSPAPPIISTHSSSTIPTPAPPIISTHSSSTIPIPTAADSESTTNVNSLATSDIITASSPNDGLITMVPSETQSNNEMSPTTEDNQSSGPPTGTALLETSTLNSTGPSNPCQDDPCADNSLCVKLHNTSFCLCLEGYYYNSSTCKKGKVFPGKISVTVSETFDPEEKHSMAYQDLHSEITSLFKDVFGTSVYGQTVILTVSTSLSPRSEMRADDKFVNVTIVTILAETTSDNEKTVTEKINKAIRSSSSNFLNYDLTLRCDYYGCNQTADDCLNGLACDCKSDLQRPNPQSPFCVASSLKCPDACNAQHKQCLIKKSGGAPECACVPGYQEDANGNCQKCAFGYSGLDCKDKFQLILTIVGTIAGIVILSMIIALIVTARSNNKTKHIEEENLIDEDFQNLKLRSTGFTNLGAEGSVFPKVRITASRDSQMQNPYSRHSSMPRPDY

SEQ ID NO: 765027 - protein, 97 aa, Homo sapiens
EDPSSYDTTRGVLFCGIVILSMIIALIVTARSNNKTKHIEEENLIDEDFQNLKLRSTGFTNLGAEGSVFPKVRITASRDSQMQNPYSRHSSMPRPDY

SEQ ID NO: 765028 - protein, 87 aa, Homo sapiens
  misc_feature (1)..(1): Xaa can be any naturally occurring amino acid
XRSHESAFLTDGHFTDKCHYEVLTTSAPGATETLYCELFQNLKLRSTGFTNLGAEGSVFPKVRITASRDSQMQNPYSRHSSMPRPDY

SEQ ID NO: 765029 - protein, 521 aa, Homo sapiens; identical to SEQ ID NO: 765026

SEQ ID NO: 765030 - protein, 521 aa, Homo sapiens; identical to SEQ ID NO: 765026

SEQ ID NO: 765031 - protein, 379 aa, Homo sapiens
PRVRARTAKMKAIIHLTLLALLSVNTATNQGNSADAVTTTETATSGPTVAAADTTETNFPETASTTANTPSFPTATSPAPPIISTHSSSTIPTPAPPIISTHSSSTIPIPTAADSESTTNVNSLATSDIITASSPNDGLITMVPSETQSNNEMSPTTEDNQSSGPPTGTALLETSTLNSTGPSNPCQDDPCADNSLCVKLHNTSFCLCLEGYYYNSSTCKKGKVFPGKISVTVSETFDPEEKHSMAYQDLHSEITSLFKDVFGTSVYGQTVILTVSTSLSPRSEMRADDKFVNVTIVTILAETTSDNEKTVTEKINKAIRSSSSNFLNYDLTLRCDYYGCNQTADDCLNGLACDCKSDLQRPNPQSPFCVGVGKCFTCF

SEQ ID NO: 765032 - protein, 383 aa, Homo sapiens
PRVRARTAKMKAIIHLTLLALLSVNTATNQGNSADAVTTTETATSGPTVAAADTTETNFPETASTTANTPSFPTATSPAPPIISTHSSSTIPTPAPPIISTHSSSTIPIPTAADSESTTNVNSLATSDIITASSPNDGLITMVPSETQSNNEMSPTTEDNQSSGPPTGTALLETSTLNSTGPSNPCQDDPCADNSLCVKLHNTSFCLCLEGYYYNSSTCKKGKVFPGKISVTVSETFDPEEKHSMAYQDLHSEITSLFKDVFGTSVYGQTVILTVSTSLSPRSEMRADDKFVNVTIVTILAETTSDNEKTVTEKINKAIRSSSSNFLNYDLTLRCDYYGCNQTADDCLNGLACDCKSDLQRPNPQSPFCVAQAMLNKEEWWGP

SEQ ID NO: 765033 - protein, 314 aa, Homo sapiens
RPLAIGTNSSTCKKGKVFPGKISVTVSETFDPEEKHSMAYQDLHSEITSLFKDVFGTSVYGQTVILTVSTSLSPRSEMRADDKFVNVTIVTILAETTSDNEKTVTEKINKAIRSSSSNFLNYDLTLRCDYYGCNQTADDCLNGLACDCKSDLQRPNPQSPFCVASSLKCPDACNAQHKQCLIKKSGGAPECACVPGYQEDANGNCQKCAFGYSGLDCKDKFQLILTIVGTIAGIVILSMIIALIVTARSNNKTKHIEEENLIDEDFQNLKLRSTGFTNLGAEGSVFPKVRITASRDSQMQNPYSRHSSMPRPDY

SEQ ID NO: 765034 - protein, 129 aa, Homo sapiens
GTLTCSPQGLFNTVSYCSLYFRCAFGYSGLDCKDKFQLILTIVGTIAGIVILSMIIALIVTARSNNKTKHIEEENLIDEDFQNLKLRSTGFTNLGAEGSVFPKVRITASRDSQMQNPYSRHSSMPRPDY

SEQ ID NO: 765035 - protein, 521 aa, Homo sapiens; identical to SEQ ID NO: 765026

SEQ ID NO: 765036 - protein, 116 aa, Homo sapiens
LSVADSRLKLRTSILINALGSNTCLAKVDLSGNGMEDIGAKMLSKALQINSSLRTILWDRNNTSALGFLDIARALESNHTLRFMSFPVSDISQAYRSAPERTEDVWQKIQWCLVRN

SEQ ID NO: 765037 - protein, 130 aa, Homo sapiens
IYLPIPDVHVKDNLWAFVSDTAELCAVAAHPCCGRAWCRGGAPLLQQASEHSPPCGRVMRVMHPSADGHLNGLCLALCSAAVNTDLRVSWRRVGISRAYLGVGRCTAFCLETSPLKIIVSYSLLGKLLGF

SEQ ID NO: 765038 - protein, 107 aa, Homo sapiens
YPLLLSLLQVTPAMRTIAILAAILLVALQAQAESLQERADEATTQKQSGEDNQDLAISFAGNGLSALRTSGSQARATCYCRTGRCATRESLSGVCEISGRLYRLCCR

SEQ ID NO: 765039 - protein, 1311 aa, Homo sapiens
MSLLQSALDFLAGPGSLGGASGRDQSDFVGQTVELGELRLRVRRVLAEGGFAFVYEAQDVGSGREYALKRLLSNEEEKNRAIIQEVCFMKKLSGHPNIVQFCSAASIGKEESDTGQAEFLLLTELCKGQLVEFLKKMESRGPLSCDTVLKIFYQTCRAVQHMHRQKPPIIHRDLKVENLLLSNQGTIKLCDFGSATTISHYPDYSWSAQRRALVEEEITRNTTPMYRTPEIIDLYSNFPIGEKQDIWALGCILYLLCFRQHPFEDGAKLRIVNGKYSIPPHDTQYTVFHSLIRAMLQVNPEERLSIAEVVHQLQEIAAARNVNPKSPITELLEQNGGYGSATLSRGPPPPVGPAGSGYSGGLALAEYDQPYGGFLDILRGGTERLFTNLKDTSSKVIQSVANYAKGDLDISYITSRIAVMSFPAEGVESALKNNIEDVRLFLDSKHPGHYAVYNLSPRTYRPSRFHNRVSECGWAARRAPHLHTLYNICRNMHAWLRQDHKNVCVVHCMDGRAASAVAVCSFLCFCRLFSTAEAAVYMFSMKRCPPGIWPSHKRYIEYMCDMVAEEPITPHSKPILVRAVVMTPVPLFSKQRSGCRPFCEVYVGDERVASTSQEYDKMRDFKIEDGKAVIPLGVTVQGDVLIVIYHARSTLGGRLQAKMASMKMFQIQFHTGFVPRNATTVKFAKYDLDACDIQEKYPDLFQVNLEVEVEPRDRPSREAPPWENSSMRGLNPKILFSSREEQQDILSKFGKPELPRQPGSTAQYDAGAGSPEAEPTDSDSPPSSSADASRFLHTLDWQEEKEAETGAENASSKESESALMEDRDESEVSDEGGSPISSEGQEPRADPEPPGLAAGLVQQDLVFEVETPAVLPEPVPQEDGVDLLGLHSEVGAGPAVPPQACKAPSSNTDLLSCLLGPPEAASQGPPEDLLSEDPLLLASPAPPLSVQSTPRGGPPAAADPFGPLLPSSGNNSQPCSNPDLFGEFLNSDSVTVPPSFPSAHSAPPPSCSADFLHLGDLPGEPSKMTASSSNPDLLGGWAAWTETAASAVAPTPATEGPLFSPGGQPAPCGSQASWTKSQNPDPFADLGDLSSGLQGSPAGFPPGGFIPKTATTPKGSSSWQTSRPPAQGASWPPQAKPPPKACTQPRPNYASNFSVIGAREERGVRAPSFAQKPKVSENDFEDLLSNQGFSSRSDKKGPKTIAEMRKQDLAKDTDPLKLKLLDWIEGKERNIRALLSTLHTVLWDGESRWTPVGMADLVAPEQVKKHYRRAVLAVHPDKAAGQPYEQHAKMIFMELNDAWSEFENQGSRPLF

SEQ ID NO: 765040 - protein, 129 aa, Homo sapiens
TGDTGYGYSRVLAEGGFAFVYEAQDVGSGREYALKRLLSNEEEKNRAIIQEVCFMKKLSGHPKAPVLAAVSTPVSNSPPGLPALTVGPPSGHLPVYEKAFSPDCFLTLPPWPPCGAIPACADSTARQKC

SEQ ID NO: 765041 - protein, 1333 aa, Homo sapiens
MSLLQSALDFLAGPGSLGGASGRDQSDFVGQTVELGELRLRVRRVLAEGGFAFVYEAQDVGSGREYALKRLLSNEEEKNRAIIQEVCFMKKLSGHPNIVQFCSAASIGKEESDTGQAEFLLLTELCKGQLVEFLKKMESRGPLSCDTVLKIFYQTCRAVQHMHRQKPPIIHRDLKVENLLLSNQGTIKLCDFGSATTISHYPDYSWSAQRRALVEEEITRNTTPMYRTPEIIDLYSNFPIGEKQDIWALGCILYLLCFRQHPFEDGAKLRIVNGKYSIPPHDTQYTVFHSLIQGVASGGSVTSASAGGADPPGEPWGRARCASAAGAMLQVNPEERLSIAEVVHQLQEIAAARNVNPKSPITELLEQNGGYGSATLSRGPPPPVGPAGSGYSGGLALAEYDQPYGGFLDILRGGTERLFTNLKDTSSKVIQSVANYAKGDLDISYITSRIAVMSFPAEGVESALKNNIEDVRLFLDSKHPGHYAVYNLSPRTYRPSRFHNRVSECGWAARRAPHLHTLYNICRNMHAWLRQDHKNVCVVHCMDGRAASAVAVCSFLCFCRLFSTAEAAVYMFSMKRCPPGIWPSHKRYIEYMCDMVAEEPITPHSKPILVRAVVMTPVPLFSKQRSGCRPFCEVYVGDERVASTSQEYDKMRDFKIEDGKAVIPLGVTVQGDVLIVIYHARSTLGGRLQAKMASMKMFQIQFHTGFVPRNATTVKFAKYDLDACDIQEKYPDLFQVNLEVEVEPRDRPSREAPPWENSSMRGLNPKILFSSREEQQDILSKFGKPELPRQPGSTAQYDAGAGSPEAEPTDSDSPPSSSADASRFLHTLDWQEEKEAETGAENASSKESESALMEDRDESEVSDEGGSPISSEGQEPRADPEPPGLAAGLVQQDLVFEVETPAVLPEPVPQEDGVDLLGLHSEVGAGPAVPPQACKAPSSNTDLLSCLLGPPEAASQGPPEDLLSEDPLLLASPAPPLSVQSTPRGGPPAAGNNSQPCSNPDLFGEFLNSDSVTVPPSFPSAHSAPPPSCSADFLHLGDLPGEPSKMTASSSNPDLLGGWAAWTETAASAVAPTPATEGPLFSPGGQPAPCGSQASWTKSQNPDPFADLGDLSSGLQGSPAGFPPGGFIPKTATTPKGSSSWQTSRPPAQGASWPPQAKPPPKACTQPRPNYASNFSVIGAREERGVRAPSFAQKPKVSENDFEDLLSNQGFSSRSDKKGPKTIAEMRKQDLAKDTDPLKLKLLDWIEGKERNIRALLSTLHTVLWDGESRWTPVGMADLVAPEQVKKHYRRAVLAVHPDKAAGQPYEQHAKMIFMELNDAWSEFENQGSRPLF

SEQ ID NO: 765042 - protein, 1164 aa, Homo sapiens
MESRGPLSCDTVLKIFYQTCRAVQHMHRQKPPIIHRDLKVENLLLSNQGTIKLCDFGSATTISHYPDYSWSAQRRALVEEEITRNTTPMYRTPEIIDLYSNFPIGEKQDIWALGCILYLLCFRQHPFEDGAKLRIVNGKYSIPPHDTQYTVFHSLIRAMLQVNPEERLSIAEVVHQLQEIAAARNVNPKSPITELLEQNGGYGSATLSRGPPPPVGPAGSGYSGGLALAEYDQPYGGFLDILRGGTERLFTNLKDTSSKVIQSVANYAKGDLDISYITSRIAVMSFPAEGVESALKNNIEDVRLFLDSKHPGHYAVYNLSPRTYRPSRFHNRVSECGWAARRAPHLHTLYNICRNMHAWLRQDHKNVCVVHCMDGRAASAVAVCSFLCFCRLFSTAEAAVYMFSMKRCPPGIWPSHKRYIEYMCDMVAEEPITPHSKPILVRAVVMTPVPLFSKQRSGCRPFCEVYVGDERVASTSQEYDKMRDFKIEDGKAVIPLGVTVQGDVLIVIYHARSTLGGRLQAKMASMKMFQIQFHTGFVPRNATTVKFAKYDLDACDIQEKYPDLFQVNLEVEVEPRDRPSREAPPWENSSMRGLNPKILFSSREEQQDILSKFGKPELPRQPGSTAQYDAGAGSPEAEPTDSDSPPSSSADASRFLHTLDWQEEKEAETGAENASSKESESALMEDRDESEVSDEGGSPISSEGQEPRADPEPPGLAAGLVQQDLVFEVETPAVLPEPVPQEDGVDLLGLHSEVGAGPAVPPQACKAPSSNTDLLSCLLGPPEAASQGPPEDLLSEDPLLLASPAPPLSVQSTPRGGPPAAGNNSQPCSNPDLFGEFLNSDSVTVPPSFPSAHSAPPPSCSADFLHLGDLPGEPSKMTASSSNPDLLGGWAAWTETAASAVAPTPATEGPLFSPGGQPAPCGSQASWTKSQNPDPFADLGDLSSGLQGSPAGFPPGGFIPKTATTPKGSSSWQTSRPPAQGASWPPQAKPPPKACTQPRPNYASNFSVIGAREERGVRAPSFAQKPKVSENDFEDLLSNQGFSSRSDKKGPKTIAEMRKQDLAKDTDPLKLKLLDWIEGKERNIRALLSTLHTVLWDGESRWTPVGMADLVAPEQVKKHYRRAVLAVHPDKAAGQPYEQHAKMIFMELNDAWSEFENQGSRPLF

SEQ ID NO: 765043 - protein, 1129 aa, Homo sapiens
SPLLFPQAPVSPLHFPCSRYHPCVPCSPQCHPCAPHGSDVTPAFPVGLGITPALPAGPGVTPALPVGLGITLLSPQALGCILYLLCFRQHPFEDGAKLRIVNGKYSIPPHDTQYTVFHSLIRAMLQVNPEERLSIAEVVHQLQEIAAARNVNPKSPITELLEQNGGYGSATLSRGPPPPVGPAGSGYSGGLALAEYDQPYGGFLDILRGGTERLFTNLKDTSSKVIQSVANYAKGDLDISYITSRIAVMSFPAEGVESALKNNIEDVRLFLDSKHPGHYAVYNLSPRTYRPSRFHNRVSECGWAARRAPHLHTLYNICRNMHAWLRQDHKNVCVVHCMDGRAASAVAVCSFLCFCRLFSTAEAAVYMFSMKRCPPGIWPSHKRYIEYMCDMVAEEPITPHSKPILVRAVVMTPVPLFSKQRSGCRPFCEVYVGDERVASTSQEYDKMRDFKIEDGKAVIPLGVTVQGDVLIVIYHARSTLGGRLQAKMASMKMFQIQFHTGFVPRNATTVKFAKYDLDACDIQEKYPDLFQVNLEVEVEPRDRPSREAPPWENSSMRGLNPKILFSSREEQQDILSKFGKPELPRQPGSTAQYDAGAGSPEAEPTDSDSPPSSSADASRFLHTLDWQEEKEAETGAENASSKESESALMEDRDESEVSDEGGSPISSEGQEPRADPEPPGLAAGLVQQDLVFEVETPAVLPEPVPQEDGVDLLGLHSEVGAGPAVPPQACKAPSSNTDLLSCLLGPPEAASQGPPEDLLSEDPLLLASPAPPLSVQSTPRGGPPAAGNNSQPCSNPDLFGEFLNSDSVTVPPSFPSAHSAPPPSCSADFLHLGDLPGEPSKMTASSSNPDLLGGWAAWTETAASAVAPTPATEGPLFSPGGQPAPCGSQASWTKSQNPDPFADLGDLSSGLQGSPAGFPPGGFIPKTATTPKGSSSWQTSRPPAQGASWPPQAKPPPKACTQPRPNYASNFSVIGAREERGVRAPSFAQKPKVSENDFEDLLSNQGFSSRSDKKGPKTIAEMRKQDLAKDTDPLKLKLLDWIEGKERNIRALLSTLHTVLWDGESRWTPVGMADLVAPEQVKKHYRRAVLAVHPDKAAGQPYEQHAKMIFMELNDAWSEFENQGSRPLF

SEQ ID NO: 765044 - protein, 1367 aa, Homo sapiens
MSLLQSALDFLAGPGSLGGASGRDQSDFVGQTVELGELRLRVRRVLAEGGFAFVYEAQDVGSGREYALKRLLSNEEEKNRAIIQEVCFMLCSLGEPAGCLSVGSGGHSHAAASLLHSPLRALPPPATRGMDFGVAVVSAQNCGHGYVRSPLTRQLQKKLSGHPNIVQFCSAASIGKEESDTGQAEFLLLTELCKGQLVEFLKKMESRGPLSCDTVLKIFYQTCRAVQHMHRQKPPIIHRDLKVENLLLSNQGTIKLCDFGSATTISHYPDYSWSAQRRALVEEEITRNTTPMYRTPEIIDLYSNFPIGEKQDIWALGCILYLLCFRQHPFEDGAKLRIVNGKYSIPPHDTQYTVFHSLIRAMLQVNPEERLSIAEVVHQLQEIAAARNVNPKSPITELLEQNGGYGSATLSRGPPPPVGPAGSGYSGGLALAEYDQPYGGFLDILRGGTERLFTNLKDTSSKVIQSVANYAKGDLDISYITSRIAVMSFPAEGVESALKNNIEDVRLFLDSKHPGHYAVYNLSPRTYRPSRFHNRVSECGWAARRAPHLHTLYNICRNMHAWLRQDHKNVCVVHCMDGRAASAVAVCSFLCFCRLFSTAEAAVYMFSMKRCPPGIWPSHKRYIEYMCDMVAEEPITPHSKPILVRAVVMTPVPLFSKQRSGCRPFCEVYVGDERVASTSQEYDKMRDFKIEDGKAVIPLGVTVQGDVLIVIYHARSTLGGRLQAKMASMKMFQIQFHTGFVPRNATTVKFAKYDLDACDIQEKYPDLFQVNLEVEVEPRDRPSREAPPWENSSMRGLNPKILFSSREEQQDILSKFGKPELPRQPGSTAQYDAGAGSPEAEPTDSDSPPSSSADASRFLHTLDWQEEKEAETGAENASSKESESALMEDRDESEVSDEGGSPISSEGQEPRADPEPPGLAAGLVQQDLVFEVETPAVLPEPVPQEDGVDLLGLHSEVGAGPAVPPQACKAPSSNTDLLSCLLGPPEAASQGPPEDLLSEDPLLLASPAPPLSVQSTPRGGPPAAGNNSQPCSNPDLFGEFLNSDSVTVPPSFPSAHSAPPPSCSADFLHLGDLPGEPSKMTASSSNPDLLGGWAAWTETAASAVAPTPATEGPLFSPGGQPAPCGSQASWTKSQNPDPFADLGDLSSGLQGSPAGFPPGGFIPKTATTPKGSSSWQTSRPPAQGASWPPQAKPPPKACTQPRPNYASNFSVIGAREERGVRAPSFAQKPKVSENDFEDLLSNQGFSSRSDKKGPKTIAEMRKQDLAKDTDPLKLKLLDWIEGKERNIRALLSTLHTVLWDGESRWTPVGMADLVAPEQVKKHYRRAVLAVHPDKAAGQPYEQHAKMIFMELNDAWSEFENQGSRPLF

SEQ ID NO: 765045 - protein, 1311 aa, Homo sapiens
MSLLQSALDFLAGPGSLGGASGRDQSDFVGQTVELGELRLRVRRVLAEGGFAFVYEAQDVGSGREYALKRLLSNEEEKNRAIIQEVCFMLCSLGEPAGCLSVGSGGHSHAAASLLHSPLRALPPPATRGMDFGVAVVSAQNCGHGYVRSPLTRQLQKKLSGHPNIVQFCSAASIGKEESDTGQAEFLLLTELCKGQLVEFLKKMESRGPLSCDTVLKIFYQTCRAVQHMHRQKPPIIHRDLKVENLLLSNQGTIKLCDFGSATTISHYPDYSWSAQRRALVEEEITRNTTPMYRTPEIIDLYSNFPIGEKQDIWALGCILYLLCFRQHPFEDGAKLRIVNGKYSIPPHDTQYTVFHSLIRAMLQVNPEERLSIAEVVHQLQEIAAARNVNPKSPITELLEQNGGYGSATLSRGPPPPVGPAGSGYSGGLALAEYDQPYGGFLDILRGGTERLFTNLKDTSSKVIQSVANYAKGDLDISYITSRIAVMSFPAEGVESALKNNIEDVRLFLDSKHPGHYAVYNLSPRTYRPSRFHNRVSECGWAARRAPHLHTLYNICRNMHAWLRQDHKNVCVVHCMDGRAASAVAVCSFLCFCRLFSTAEAAVYMFSMKRCPPGIWPSHKRYIEYMCDMVAEEPITPHSKPILVRAVVMTPVPLFSKQRSGCRPFCEVYVGDERVASTSQEYDKMRDFKIEDGKAVIPLGVTVQGDVLIVIYHARSTLGGRLQAKMASMKMFQIQFHTGFVPRNATTVKFAKYDLDACDIQEKYPDLFQVNLEVEVEPRDRPSREAPPWENSSMRGLNPKILFSSREEQQDILSKFGKPELPRQPGSTAQYDAGAGSPEAEPTDSDSPPSSSADASRFLHTLDWQEEKEAETGAENASSKESESALMEDRDESEVSDEGGSPISSEGQEPRADPEPPGLAAGLVQQDLVFEVETPAVLPEPVPQEDGVDLLGLHSEVGAGPAVPPQACKAPSSNTDLLSCLLGPPEAASQGPPEDLLSEDPLLLASPAPPLSVQSTPRGGPPAAGNNSQPCSNPDLFGEFLNSDSVTVPPSFPSAHSAPPPSCSADFLHLGDLPGEPSKMTASSSNPDLLGGWAAWTETAASAVAPTPATEGPLFSPGGQPAPCGSQASWTKSQNPDPFADLGDLSSGLQGSPAGFPPGGFIPKTATTPKGSSSWQTSRPPAQGASWPPQAKPPPKACTQPRPNYASNFSVIGAREERGVRAPSFAQKPKVSENDFEDLLSNQGFSSRSDKKGPKTIAEMRKQDLAKDTDPLKLKLLDWIEGKERNIRALLSTLQGHAAGAHGPWCLHRTL

SEQ ID NO: 765046 - protein, 579 aa, Homo sapiens
MSLLQSALDFLAGPGSLGGASGRDQSDFVGQTVELGELRLRVRRVLAEGGFAFVYEAQDVGSGREYALKRLLSNEEEKNRAIIQEVCFMKKLSGHPNIVQFCSAASIGKEESDTGQAEFLLLTELCKPPGLAAGLVQQDLVFEVETPAVLPEPVPQEDGVDLLGLHSEVGAGPAVPPQACKAPSSNTDLLSCLLGPPEAASQGPPEDLLSEDPLLLASPAPPLSVQSTPRGGPPAAGNNSQPCSNPDLFGEFLNSDSVTVPPSFPSAHSAPPPSCSADFLHLGDLPGEPSKMTASSSNPDLLGGWAAWTETAASAVAPTPATEGPLFSPGGQPAPCGSQASWTKSQNPDPFADLGDLSSGLQGSPAGFPPGGFIPKTATTPKGSSSWQTSRPPAQGASWPPQAKPPPKACTQPRPNYASNFSVIGAREERGVRAPSFAQKPKVSENDFEDLLSNQGFSSRSDKKGPKTIAEMRKQDLAKDTDPLKLKLLDWIEGKERNIRALLSTLHTVLWDGESRWTPVGMADLVAPEQVKKHYRRAVLAVHPDKAAGQPYEQHAKMIFMELNDAWSEFENQGSRPLF

SEQ ID NO: 765047 - protein, 443 aa, Homo sapiens
MSAVLLLTPLSPWARASPLLSPQTWESPLHSEVGAGPAVPPQACKAPSSNTDLLSCLLGPPEAASQGPPEDLLSEDPLLLASPAPPLSVQSTPRGGPPAAGNNSQPCSNPDLFGEFLNSDSVTVPPSFPSAHSAPPPSCSADFLHLGDLPGEPSKMTASSSNPDLLGGWAAWTETAASAVAPTPATEGPLFSPGGQPAPCGSQASWTKSQNPDPFADLGDLSSGLQGSPAGFPPGGFIPKTATTPKGSSSWQTSRPPAQGASWPPQAKPPPKACTQPRPNYASNFSVIGAREERGVRAPSFAQKPKVSENDFEDLLSNQGFSSRSDKKGPKTIAEMRKQDLAKDTDPLKLKLLDWIEGKERNIRALLSTLHTVLWDGESRWTPVGMADLVAPEQVKKHYRRAVLAVHPDKAAGQPYEQHAKMIFMELNDAWSEFENQGSRPLF

SEQ ID NO: 765048 - protein, 354 aa, Homo sapiens
ASCRIGTRPAAGNNSQPCSNPDLFGEFLNSDSVTVPPSFPSAHSAPPPSCSADFLHLGDLPGEPSKMTASSSNPDLLGGWAAWTETAASAVAPTPATEGPLFSPGGQPAPCGSQASWTKSQNPDPFADLGDLSSGLQGSPAGFPPGGFIPKTATTPKGSSSWQTSRPPAQGASWPPQAKPPPKACTQPRPNYASNFSVIGAREERGVRAPSFAQKPKVSENDFEDLLSNQGFSSRSDKKGPKTIAEMRKQDLAKDTDPLKLKLLDWIEGKERNIRALLSTLHTVLWDGESRWTPVGMADLVAPEQVKKHYRRAVLAVHPDKAAGQPYEQHAKMIFMELNDAWSEFENQGSRPLF

SEQ ID NO: 765049 - protein, 288 aa, Homo sapiens [sequence omitted]

SEQ ID NO: 765050 - protein, 180 aa, Homo sapiens
LEAGRQRLQRAEITPLHSGLGDRVETLSQTKKSFCSFLAQKPKVSENDFEDLLSNQGFSSRSDKKGPKTIAEMRKQDLAKDTDPLKLKLLDWIEGKERNIRALLSTLHTVLWDGESRWTPVGMADLVAPEQVKKHYRRAVLAVHPDKAAGQPYEQHAKMIFMELNDAWSEFENQGSRPLF

SEQ ID NO: 765051 - protein, 264 aa, Homo sapiens
MSLLQSALDFLAGPGSLGGASGRDQSDFVGQTVELGELRLRVRRVLAEGGFAFVYEAQDVGSGREYALKRLLSNEEEKNRAIIQEVCFMKKLSGHPNIVQFCSAASIGKEESDTGQAEFLLLTELCKGQLVEFLKKMESRGPLSCDTVLKIFYQTCRAVQHMHRQKPPIIHRDLKVENLLLSNQGTIKLCDFGSATTISHYPDYSWSAQRRALVEEEKLLWVRPLWSGALVPGETPFSSASGLGAQQANTSVPTCHEAREAVGD

SEQ ID NO: 765052 - protein, 142 aa, Homo sapiens
MSLLQSALDFLAGPGSLGGASGRDQSDFVGQTVELGELRLRVRRVLAEGGFAFVYEAQDVGSGREYALKRLLSNEEEKNRAIIQEVCFMKKLSGHPNIVQFCSAASIGKEESDTGQAEFLLLTELCKAPRPGSRAGAAGLGF

SEQ ID NO: 765053 - protein, 288 aa, Homo sapiens [sequence omitted]

SEQ ID NO: 765054 - protein, 1367 aa, Homo sapiens; identical to SEQ ID NO: 765044

SEQ ID NO: 765055 - protein, 1425 aa, Homo sapiens
MSLLQSALDFLAGPGSLGGASGRDQSDFVGQTVELGELRLRVRRVLAEGGFAFVYEAQDVGSGREYALKRLLSNEEEKNRAIIQEVCFMKKLSGHPNIVQFCSAASIGKEESDTGQAEFLLLTELCKGQLVEFLKKMESRGPLSCDTVLKIFYQTCRAVQHMHRQKPPIIHRDLKVENLLLSNQGTIKLCDFGSATTISHYPDYSWSAQRRALVEEEKLLWVRPLWSGALVPGETPFSSASGLGAQQANTSVPTCHEAREAVGDLREVNDSVLIVKERAEAEDEQRSWCMGPTGLRSSRGIVCGTGCPSVCCAFGKLHGSGATEKILFVGCNFSFEMFVFFQITRNTTPMYRTPEIIDLYSNFPIGEKQDIWALGCILYLLCFRQHPFEDGAKLRIVNGKYSIPPHDTQYTVFHSLIRAMLQVNPEERLSIAEVVHQLQEIAAARNVNPKSPITELLEQNGGYGSATLSRGPPPPVGPAGSGYSGGLALAEYDQPYGGFLDILRGGTERLFTNLKDTSSKVIQSVANYAKGDLDISYITSRIAVMSFPAEGVESALKNNIEDVRLFLDSKHPGHYAVYNLSPRTYRPSRFHNRVSECGWAARRAPHLHTLYNICRNMHAWLRQDHKNVCVVHCMDGRAASAVAVCSFLCFCRLFSTAEAAVYMFSMKRCPPGIWPSHKRYIEYMCDMVAEEPITPHSKPILVRAVVMTPVPLFSKQRSGCRPFCEVYVGDERVASTSQEYDKMRDFKIEDGKAVIPLGVTVQGDVLIVIYHARSTLGGRLQAKMASMKMFQIQFHTGFVPRNATTVKFAKYDLDACDIQEKYPDLFQVNLEVEVEPRDRPSREAPPWENSSMRGLNPKILFSSREEQQDILSKFGKPELPRQPGSTAQYDAGAGSPEAEPTDSDSPPSSSADASRFLHTLDWQEEKEAETGAENASSKESESALMEDRDESEVSDEGGSPISSEGQEPRADPEPPGLAAGLVQQDLVFEVETPAVLPEPVPQEDGVDLLGLHSEVGAGPAVPPQACKAPSSNTDLLSCLLGPPEAASQGPPEDLLSEDPLLLASPAPPLSVQSTPRGGPPAAGNNSQPCSNPDLFGEFLNSDSVTVPPSFPSAHSAPPPSCSADFLHLGDLPGEPSKMTASSSNPDLLGGWAAWTETAASAVAPTPATEGPLFSPGGQPAPCGSQASWTKSQNPDPFADLGDLSSGLQGSPAGFPPGGFIPKTATTPKGSSSWQTSRPPAQGASWPPQAKPPPKACTQPRPNYASNFSVIGAREERGVRAPSFAQKPKVSENDFEDLLSNQGFSSRSDKKGPKTIAEMRKQDLAKDTDPLKLKLLDWIEGKERNIRALLSTLHTVLWDGESRWTPVGMADLVAPEQVKKHYRRAVLAVHPDKAAGQPYEQHAKMIFMELNDAWSEFENQGSRPLF

SEQ ID NO: 765056 - protein, 1076 aa, Homo sapiens [sequence omitted]

SEQ ID NO: 765057 - protein, 1367 aa, Homo sapiens; identical to SEQ ID NO: 765044

SEQ ID NO: 765058 - protein, 1342 aa, Homo sapiens
MSLLQSALDFLAGPGSLGGASGRDQSDFVGQTVELGELRLRVRRVLAEGGFAFVYEAQDVGSGREYALKRLLSNEEEKNRAIIQEVCFMLCSLGEPAGCLSVGSGGHSHAAASLLHSPLRALPPPATRGMDFGVAVVSAQNCGHGYVRSPLTRQLQKKLSGHPNIVQFCSAASIGKEESDTGQAEFLLLTELCKGQLVEFLKKMESRGPLSCDTVLKIFYQTCRAVQHMHRQKPPIIHRDLKVENLLLSNQGTIKLCDFGSATTISHYPDYSWSAQRRALVEEEITRNTTPMYRTPEIIDLYSNFPIGEKQDIWALGCILYLLCFRQHPFEDGAKLRIVNGKYSIPPHDTQYTVFHSLIRAMLQVNPEERLSIAEVVHQLQEIAAARNVNPKSPITELLEQNGGYGSATLSRGPPPPVGPAGSGYSGGLALAEYDQPYGGFLDILRGGTERLFTNLKDTSSKVIQSVANYAKGDLDISYITSRIAVMSFPAEGVESALKNNIEDVRLFLDSKHPGHYAVYNLSPRTYRPSRFHNRVSECGWAARRAPHLHTLYNICRNMHAWLRQDHKNVCVVHCMDGRAASAVAVCSFLCFCRLFSTAEAAVYMFSMKRCPPGIWPSHKRYIEYMCDMVAEEPITPHSKPILVRAVVMTPVPLFSKQRSGCRPFCEVYVGDERVASTSQEYDKMRDFKIEDGKAVIPLGVTVQGDVLIVIYHARSTLGGRLQAKMASMKMFQIQFHTGFVPRNATTVKFAKYDLDACDIQEKYPDLFQVNLEVEVEPRDRPSREAPPWENSSMRGLNPKILFSSREEQQDILSKFGKPELPRQPGSTAQYDAGAGSPEAEPTDSDSPPSSSADASRFLHTLDWQEEKEAETGAENASSKESESALMEDRDESEVSDEGGSPISSEGQEPRADPEPPGLAAGLVQQDLVFEVETPAVLPEPVPQEDGVDLLGLHSEVGAGPAVPPQACKAPSSNTDLLSCLLGPPEAASQGPPEDLLSEDPLLLASPAPPLSVQSTPRGGPPAAGNNSQPCSNPDLFGEFLNSDSVTVPPSFPSAHSAPPPSCSADFLHLGDLPGEPSKMTASSSNPDLLGGWAAWTETAASAVAPTPATEGPLFSPGGQPAPCGSQASWTKSQNPDPFADLGDLSSGLQGSPAGFPPGGFIPKTATTPKGSSSWQTSRPPAQGASWPPQAKPPPKACTQPRPNYASNFSVIGAREERGVRAPSFAQKPKVSENDFEDLLSNQGFSSRSDKKGPKTIAEMRKQDLAKDTDPLKLKLLDWIEGKERNIRALLSTLHTVLWDGESRWTPVGMADLVAPEQVKKHYRRAVLAVHPDKVSRAARRP

SEQ ID NO: 765059 - protein, 1129 aa, Homo sapiens
MSLLQSALDFLAGPGSLGGASGRDQSDFVGQTVELGELRLRVRRVLAEGGFAFVYEAQDVGSGREYALKRLLSNEEEKNRAIIQEVCFMLCSLGEPAGCLSVGSGGHSHAAASLLHSPLRALPPPATRGMDFGVAVVSAQNCGHGYVRSPLTRQLQKKLSGHPNIVQFCSAASIGKEESDTGQAEFLLLTELCKGQLVEFLKKMESRGPLSCDTVLKIFYQTCRAVQHMHRQKPPIIHRDLKVENLLLSNQGTIKLCDFGSATTISHYPDYSWSAQRRALVEEEITRNTTPMYRTPEIIDLYSNFPIGEKQDIWALGCILYLLCFRQHPFEDGAKLRIVNGKYSIPPHDTQYTVFHSLIRAMLQVNPEERLSIAEVVHQLQEIAAARNVNPKSPITELLEQNGGYGSATLSRGPPPPVGPAGSGYSGGLALAEYDQPYGGFLDILRGGTERLFTNLKDTSSKVIQSVANYAKGDLDISYITSRIAVMSFPAEGVESALKNNIEDVRLFLDSKHPGHYAVYNLSPRTYRPSRFHNRVSECGWAARRAPHLHTLYNICRNMHAWLRQDHKNVCVVHCMDGRAASAVAVCSFLCFCRLFSTAEAAVYMFSMKRCPPGIWPSHKRYIEYMCDMVAEEPITPHSKPILVRAVVMTPVPLFSKQRSGCRPFCEVYVGDERVASTSQEYDKMRDFKIEDGKAVIPLGVTVQGDVLIVIYHARSTLGGRLQAKMASMKMFQIQFHTGFVPRNATTVKFAKYDLDACDIQEKYPDLFQVNLEVEVEPRDRPSREAPPWENSSMRGLNPKILFSSREEQQDILSKFGKPELPRQPGSTAQYDAGAGSPEAEPTDSDSPPSSSADASRFLHTLDWQEEKEAETGAENASSKESESALMEDRDESEVSDEGGSPISSEGQEPRADPEPPGLAAGLVQQDLVFEVETPAVLPEPVPQEDGVDLLGLHSEVGAGPAVPPQACKAPSSNTDLLSCLLGPPEAASQGPPEDLLSEDPLLLASPAPPLSVQSTPRGGPPAAADPFGPLLPSSGNNSQPCSNPDLFGEFLNSDSVTVPPSFPSAHSAPPPSCSADFLHLGDLPGEPSKMTASSSNPDLLGGWAAWTETAASAVAPTPATEEAPHPKD

SEQ ID NO: 765060 - protein, 454 aa, Homo sapiens
MSAVLLLTPLSPWARASPLLSPQTWESPLHSEVGAGPAVPPQACKAPSSNTDLLSCLLGPPEAASQGPPEDLLSEDPLLLASPAPPLSVQSTPRGGPPAAADPFGPLLPSSGNNSQPCSNPDLFGEFLNSDSVTVPPSFPSAHSAPPPSCSADFLHLGDLPGEPSKMTASSSNPDLLGGWAAWTETAASAVAPTPATEGPLFSPGGQPAPCGSQASWTKSQNPDPFADLGDLSSGLQGSPAGFPPGGFIPKTATTPKGSSSWQTSRPPAQGASWPPQAKPPPKACTQPRPNYASNFSVIGAREERGVRAPSFAQKPKVSENDFEDLLSNQGFSSRSDKKGPKTIAEMRKQDLAKDTDPLKLKLLDWIEGKERNIRALLSTLHTVLWDGESRWTPVGMADLVAPEQVKKHYRRAVLAVHPDKAAGQPYEQHAKMIFMELNDAWSEFENQGSRPLF

SEQ ID NO: 765061 - protein, 586 aa, Homo sapiens
MSLLQSALDFLAGPGSLGGASGRDQSDFVGQTVELGELRLRVRRVLAEGGFAFVYEAQDVGSGREYALKRLLSNEEEKNRAIIQEVCFMLCSLGEPAGCLSVGSGGHSHAAASLLHSPLRALPPPATRGMDFGVAVVSAQNCGHGYVRSPLTRQLQKKLSGHPNIVQFCSAASIGKEESDTGQAEFLLLTELCKGQLVEFLKKMESRGPLSCDTVLKIFYQTCRAVQHMHRQKPPIIHRDLKVENLLLSNQGTIKLCDFGSATTISHYPDYSWSAQRRALVEEEITRNTTPMYRTPEIIDLYSNFPIGEKQDIWALGCILYLLCFRQHPFEDGAKLRIVNGKYSIPPHDTQYTVFHSLIRAMLQVNPEERLSIAEVVHQLQEIAAARNVNPKSPITELLEQNGGYGSATLSRGPPPPVGPAGSGYSGGLALAEYDQPYGGFLDILRGGTERLFTNLKDTSSKVIQSVANYAKGDLDISYITSRIAVMSFPAEGVESALKNNIEDVRLFLDSKHPGHYAVYNLSPRTYRPSRFHNRVSECGWAARRAPHLHTLYNICRNMHAWLRQDHKNVCVVHCMDGRAASAVAV

SEQ ID NO: 765062 - protein, 265 aa, Homo sapiens
SGDPPNPKEGPLFSPGGQPAPCGSQASWTKSQNPDPFADLGDLSSGLQGSPAGFPPGGFIPKTATTPKGSSSWQTSRPPAQGASWPPQAKPPPKACTQPRPNYASNFSVIGAREERGVRAPSFAQKPKVSENDFEDLLSNQGFSSRSDKKGPKTIAEMRKQDLAKDTDPLKLKLLDWIEGKERNIRALLSTLHTVLWDGESRWTPVGMADLVAPEQVKKHYRRAVLAVHPDKAAGQPYEQHAKMIFMELNDAWSEFENQGSRPLF

SEQ ID NO: 765063 - protein, 219 aa, Homo sapiens
MSLLQSALDFLAGPGSLGGASGRDQSDFVGQTVELGELRLRVRRVLAEGGFAFVYEAQDVGSGREYALKRLLSNEEEKNRAIIQEVCFMKKLSGHPNIVQFCSAASIGKEESDTGQAEFLLLTELCKGQLVEFLKKMESRGPLSCDTVLKIFYQTCRAVQHMHRQKPPIIHRDLKVENLLLSNQGTIKLCDFGSATTISHYPDYSWSAQRRALVEEEVS

SEQ ID NO: 765064 - protein, 123 aa, Homo sapiens
MKTTWPCVVRSGLYIVEGRACSGTVSVSRAEPTPRDQALPQRRASVSAVQRRRAGRCPGLGKLRVSQQLLDWIEGKERNIRALLSTLHTVLWDGESRWTPVGMADLVAPEQVKKHYRRAVLAV

SEQ ID NO: 765065 - protein, 111 aa, Homo sapiens
DLPQCNTTSKRRVRFQEIDDSLDHDEVGGGSCILLVLLCIATVFLSVGGTALYCTFGDMESPVCTDFADNMDFYYTKLLQGVAELKHWIYLSQQHSRHRHAGSESERRETF

SEQ ID NO: 765066 - protein, 111 aa, Homo sapiens; identical to SEQ ID NO: 765065

SEQ ID NO: 765067 - protein, 111 aa, Homo sapiens; identical to SEQ ID NO: 765065

SEQ ID NO: 765068 - protein, 111 aa, Homo sapiens; identical to SEQ ID NO: 765065

SEQ ID NO: 765069 - protein, 111 aa, Homo sapiens; identical to SEQ ID NO: 765065

SEQ ID NO: 765070 - protein, 111 aa, Homo sapiens; identical to SEQ ID NO: 765065

SEQ ID NO: 765071 - protein, 111 aa, Homo sapiens; identical to SEQ ID NO: 765065

SEQ ID NO: 765072 - protein, 252 aa, Homo sapiens
MGVLLTQRTLLSLVLALLFPSMASMAAIGSCSKEYRVLLGQLQKQTDLMQDTSRLLDPYIRIQGLDVPKLREHCRERPGAFPSEETLRGLGRRGFLQTLNATLGCVLHRLADLEQRLPKAQDLERSGLNIEDLEKLQMARPNILGLRNNIYCMAQLLDNSDTAEPTKAGRGASQPPTPTPASDAFQRKLEGCRFLHGYHRFMHSVGRVFSKWGESPNRSRRHSPHQALRKGVRRTRPSRKGKRLMTRGQLPR

SEQ ID NO: 765073 - protein, 111 aa, Homo sapiens
VYKCLAQSLAHRKCSVNSTSHQILGMNESECLALHIRKDVAANHPPDMTCCVGAFTSLFLLKDSKLCWSYWCTFVRPALTTAPLGRALLYEVAVFPGRLVNPYNVKKKEAM

SEQ ID NO: 765074 - protein, 243 aa, Homo sapiens
VNMAEYGGVHLFIITCIIMKRDRAPRYSRESQRAWRVERSKSYNQRPLYVTVKLSLYKDLTCLDSYVNDEFQGTNGTSLEQSLCLIDGNTYNIPICLWLLDTYPYNPPICFVKPTSSMTIKTGKHVDANGKIYLPYLHEWKHPQSDLLGLIQVMIVVFGDEPPVFSRPISASYPPYQATGPPNTSYMPGMPGGISPYPSGYPPNPSGYPGCPYPPGGPYPATTSSQYPSQPPVTTVAHYGWPI

SEQ ID NO: 765075 - protein, 390 aa, Homo sapiens
MAVSESQLKKMVSKYKYRDLTVRETVNVITLYKDLKPVLDSYVFNDGSSRELMNLTGTIPVPYRGNTYNIPICLWLLDTYPYNPPICFVKPTSSMTIKTGKHVDANGKIYLPYLHEWKHPQSDLLGLIQVMIVVFGDEPPVFSRPISASYPPYQATGPPNTSYMPGMPGGISPYPSGYPPNPSGYPGCPYPPGGPYPATTSSQYPSQPPVTTVGPSRDGTISEDTIRASLISAVSDKLRWRMKEEMDRAQAELNALKRTEEDLKKGHQKLEEMVTRLDQEVAEVDKNIELLKKKDEELSSALEKMENQSENNDIDEVIIPTAPLYKQILNLYAEENAIEDTIFYLGEALRRGVIDLDVFLKHVRLLSRKQFQLRALMQKARKTAGLSDLY

SEQ ID NO: 765076 - protein, 355 aa, Homo sapiens
MLLLYTKISNLFWIHMLMNLTGTIPVPYRGNTYNIPICLWLLDTYPYNPPICFVKPTSSMTIKTGKHVDANGKIYLPYLHEWKHPQSDLLGLIQVMIVVFGDEPPVFSRPISASYPPYQATGPPNTSYMPGMPGGISPYPSGYPPNPSGYPGCPYPPGGPYPATTSSQYPSQPPVTTVGPSRDGTISEDTIRASLISAVSDKLRWRMKEEMDRAQAELNALKRTEEDLKKGHQKLEEMVTRLDQEVAEVDKNIELLKKKDEELSSALEKMENQSENNDIDEVIIPTAPLYKQILNLYAEENAIEDTIFYLGEALRRGVIDLDVFLKHVRLLSRKQFQLRALMQKARKTAGLSDLY

SEQ ID NO: 765077 - protein, 285 aa, Homo sapiens
MAVSESQLKKMVSKPQSDLLGLIQVMIVVFGDEPPVFSRPISASYPPYQATGPPNTSYMPGMPGGISPYPSGYPPNPSGYPGCPYPPGGPYPATTSSQYPSQPPVTTVGPSRDGTISEDTIRASLISAVSDKLRWRMKEEMDRAQAELNALKRTEEDLKKGHQKLEEMVTRLDQEVAEVDKNIELLKKKDEELSSALEKMENQSENNDIDEVIIPTAPLYKQILNLYAEENAIEDTIFYLGEALRRGVIDLDVFLKHVRLLSRKQFQLRALMQKARKTAGLSDLY

SEQ ID NO: 765078 - protein, 271 aa, Homo sapiens
MVKASRVAKAPSSARSDNTAAQPADDAGARCWPASGGCTPYSSYMPGMPGGISPYPSGYPPNPSGYPGCPYPPGGPYPATTSSQYPSQPPVTTVGPSRDGTISEDTIRASLISAVSDKLRWRMKEEMDRAQAELNALKRTEEDLKKGHQKLEEMVTRLDQEVAEVDKNIELLKKKDEELSSALEKMENQSENNDIDEVIIPTAPLYKQILNLYAEENAIEDTIFYLGEALRRGVIDLDVFLKHVRLLSRKQFQLRALMQKARKTAGLSDLY

SEQ ID NO: 765079 - protein, 390 aa, Homo sapiens; identical to SEQ ID NO: 765075

SEQ ID NO: 765080 - protein, 387 aa, Homo sapiens
MAVSESQLKKMVSKYKYRDLTVRETVNVITLYKDLKPVLDSYVFNDGSSRELMNLTGTIPVPYRGNTYNIPICLWLLDTYPYNPPICFVKPTSSMTIKTGKHVDANGKIYLPYLHEWKHPQSDLLGLIQVMIVVFGDEPPVFSRPISASYPPYQATGPPNTSYMPGMPGGISPYPSGYPPNPSGYPGCPYPPGGPYPATTSSQYPSQPPVTTVGPSRDGTISEDTIRASLISAVSDKLRWRMKEEMDRAQAELNALKRTEEDLKKGHQKLEEMVTRLDQEVAEVDKNIELLKKKDEELSSALEKMENQSENNDIDEVIIPTAPLYKQILNLYAEENAIEDTIFYLGEALRRGVIDLDVFLKSTEDWSEQGKRSGLVAAVLCPQAALR

SEQ ID NO: 765081 - protein, 387 aa, Homo sapiens; identical to SEQ ID NO: 765080

SEQ ID NO: 765082 - protein, 180 aa, Homo sapiens
MLFQRIPSTFSHRDTIRASLISAVSDKLRWRMKEEMDRAQAELNALKRTEEDLKKGHQKLEEMVTRLDQEVAEVDKNIELLKKKDEELSSALEKMENQSENNDIDEVIIPTAPLYKQILNLYAEENAIEDTIFYLGEALRRGVIDLDVFLKHVRLLSRKQFQLRALMQKARKTAGLSDLY

SEQ ID NO: 765083 - protein, 315 aa, Homo sapiens
MAVSESQLKKMVSKYKYRDLTVRETVNVITLYKDLKPVLDSYVFNDGSSRELMNLTGTIPVPYRGNTYNIPICLWLLDTYPYNPPICFVKPTSSMTIKTGKHVDANGKIYLPYLHEWKHPQSDLLGLIQVMIVVFGDEPPVFSRPISASYPPYQATGPPNTSYMPGMPGGISPYPSGYPPNPSGYPGCPYPPGGPYPATTSSQYPSQPPVTTVGPSRDGTISEDTIRASLISAVSDKLRWRMKEEMDRAQAELNALKRTEEDLKKGHQKLEEMVTRLDQEVAEVDKNIELLKKKDEELSSAHAYRDIHLGNIHFR

SEQ ID NO: 765084 - protein, 119 aa, Homo sapiens
IIEVGTLSRGAEVDKNIELLKKKDEELSSALEKMENQSENNDIDEVIIPTAPLYKQILNLYAEENAIEDTIFYLGEALRRGVIDLDVFLKHVRLLSRKQFQLRALMQKARKTAGLSDLY

SEQ ID NO: 765085 - protein, 220 aa, Homo sapiens
MAVSESQLKKMVSKYKYRDLTVRETVNVITLYKDLKPVLDSYVFNDGSSRELMNLTGTIPVPYRGNTYNIPICLWLLDTYPYNPPICFVKPTSSMTIKTGKHVDANGKIYLPYLHEWKHPQSDLLGLIQVMIVVFGDEPPVFSRPISASYPPYQATGPPNTSYMPGMPGGISPYPSGYPPNPSGYPGCPYPPGGPYPATTSSQYPSQPPVTTVAHYGWPI

SEQ ID NO: 765086 - protein, 248 aa, Homo sapiens
MLLLYTKISNLFWIHMLMNLTGTIPVPYRGNTYNIPICLWLLDTYPYNPPICFVKPTSSMTIKTGKHVDANGKIYLPYLHEWKHPQSDLLGLIQVMIVVFGDEPPVFSRPISASYPPYQATGPPNTSYMPGMPGGISPYPSGYPPNPSGYPGCPYPPGGPYPATTSSQYPSQPPVTTVGAAATVAAATAGTATAARGVGLGKKWSPHLELCSEASSSPAALPRERLDKSELVQKANSLSRLSAMMIWL

SEQ ID NO: 765087 - protein, 390 aa, Homo sapiens; identical to SEQ ID NO: 765075

SEQ ID NO: 765088 - protein, 390 aa, Homo sapiens; identical to SEQ ID NO: 765075

SEQ ID NO: 765089 - protein, 421 aa, Homo sapiens
MAVSESQLKKMVSKYKYRDLTVRETVNVITLYKDLKPVLDSYVFNDGSSRELMNLTGTIPVPYRGNTYNIPICLWLLDTYPYNPPICFVKPTSSMTIKTGKHVDANGKIYLPYLHEWKHRWDFAMLAQLVSNSWLQAVHPPWPPKVLGLQPQSDLLGLIQVMIVVFGDEPPVFSRPISASYPPYQATGPPNTSYMPGMPGGISPYPSGYPPNPSGYPGCPYPPGGPYPATTSSQYPSQPPVTTVGPSRDGTISEDTIRASLISAVSDKLRWRMKEEMDRAQAELNALKRTEEDLKKGHQKLEEMVTRLDQEVAEVDKNIELLKKKDEELSSALEKMENQSENNDIDEVIIPTAPLYKQILNLYAEENAIEDTIFYLGEALRRGVIDLDVFLKHVRLLSRKQFQLRALMQKARKTAGLSDLY

SEQ ID NO: 765090 - protein, 225 aa, Homo sapiens
MLMQMGRYIFLIYMNGNTGYPGCPYPPGGPYPATTSSQYPSQPPVTTVGPSRDGTISEDTIRASLISAVSDKLRWRMKEEMDRAQAELNALKRTEEDLKKGHQKLEEMVTRLDQEVAEVDKNIELLKKKDEELSSALEKMENQSENNDIDEVIIPTAPLYKQILNLYAEENAIEDTIFYLGEALRRGVIDLDVFLKHVRLLSRKQFQLRALMQKARKTAGLSDLY

SEQ ID NO: 765091 - protein, 233 aa, Homo sapiens
PSGYPGLGGYPDGYGEIPPGMPPNPSGYPGCPYPPGGPYPATTSSQYPSQPPVTTVGPSRDGTISEDTIRASLISAVSDKLRWRMKEEMDRAQAELNALKRTEEDLKKGHQKLEEMVTRLDQEVAEVDKNIELLKKKDEELSSALEKMENQSENNDIDEVIIPTAPLYKQILNLYAEENAIEDTIFYLGEALRRGVIDLDVFLKHVRLLSRKQFQLRALMQKARKTAGLSDLY

SEQ ID NO: 765092 - protein, 390 aa, Homo sapiens; identical to SEQ ID NO: 765075

SEQ ID NO: 765093 - protein, 398 aa, Homo sapiens
MAVSESQLKKMVSKYKYRDLTVRETVNVITLYKDLKPVLDSYVFNDGSSRELMNLTGTIPVPYRGNTYNIPICLWLLDTYPYNPPICFVKPTSSMTIKTGKHVDANGKIYLPYLHEWKHPQSDLLGLIQVMIVVFGDEPPVFSRPISASYPPYQATGPPNTSYMPGMPGGISPYPSGYPPNPSGYPGCPYPPGGPYPATTSSQYPSQPPVTTVGPSRDGTISEDTIRASLISAVSDKLRWRMKEEMDRAQAELNALKRTEEDLKKGHQKLEEMVTRLDQEVAEVDKNIELLKKKDEELSSALEKMENQSENNDIDEVIIPTAPLYKQILNLYAEENAIEDTIFYLGEALRRGVIDLDVFLKHVRLLSRKQFQLRALMQLEVELFLKYSSLPFISRCPE

SEQ ID NO: 765094 - protein, 348 aa, Homo sapiens
MAVSESQLKKMVSKYKYRDLTVRETVNVITLYKDLKPVLDSYVFNDGSSRELMNLTGTIPVPYRGNTYNIPICLWLLDTYPYNPPICFVKPTSSMTIKTGKHVDANGKIYLPYLHEWKHPQSDLLGLIQVMIVVFGDEPPVFSRPISASYPPYQATGPPNTSYMPGMPGGISPYPSGYPPNPSGYPGCPYPPGGPYPATTSSQYPSQPPVTTVGPSRDGTISEDTIRASLISAVSDKLRWRMKEEMDRAQAELNALKRTEEDLKKGHQKLEEMVTRLDQEVAEVDKNIELLKKKDEELSSALEKMENQSENNDIDEVIIPTAPLYKQILNLYAEENAIEDIQVYHAPR

SEQ ID NO: 765095 - protein, 283 aa, Homo sapiens
MAVSESQLKKMVSKYKYRDLTVRETVNVITLYKDLKPVLDSYVFNDGSSRELMNLTGTIPVPYRGNTYNIPICLWLLDTYPYNPPICFVKPTSSMTIKTGKHVDANGKIYLPYLHEWKHPQSDLLGLIQVMIVVFGDEPPVFSRPISASYPPYQATGPPNTSYMPGMPGGISPYPSGYPPNPSGYPGCPYPPGGPYPATTSSQYPSQPPVTTVGAAATVAAATAGTATAARGVGLGKKWSPHLELCSEASSSPAALPRERLDKSELVQKANSLSRLSAMMIWL

SEQ ID NO: 765096 - protein, 185 aa, Homo sapiens
  misc_feature (185)..(185): Xaa can be any naturally occurring amino acid
MAVSESQLKKMVSKYKYRDLTVRETVNVITLYKDLKPVLDSYVFNDGSSRELMNLTGTIPVPYRGNTYNIPICLWLLDTYPYNPPICFVKPTSSMTIKTGKHVDANGKIYLPYLHEWKHPQSDLLGLIQVMIVVFGDEPPVFSRPISASYPPYQATGPPNTSYMPGMPGGISPYPSGYPPNPSGX

SEQ ID NO: 765097 - protein, 212 aa, Homo sapiens
MEDLCVANTLFALNLFKHLAKASPTQNLFLSPWSISSTMAMVYMGSRGSTEDQMAKVLQFNEVGANAVTPMTPENFTSCGFMQQIQKGSYPDAILQAQAADKIHSSFRSLSSAINASTGDYLLESVNKLFGEKSASFREEYIRLCQKYYSSEPQAVDFLECAEEARKKINSWVKTQTKGKIPNLLPEGSVDGDTKDGPGECCLLQRKVENSI

SEQ ID NO: 765098 - protein, 212 aa, Homo sapiens; identical to SEQ ID NO: 765097

SEQ ID NO: 765099 - protein, 201 aa, Homo sapiens
ESTLDTQPSPASSVSPARYPATSSVTLVDVSALRPNTTPQPSNSSMTTRGFNYPWTSSGTDTKKSVSRIPSETYSSSPSGAGSTLHDNVFTSTARAFSEVPTTANGSTKTNHVHITGIVVNKPKDGMSWPVIVAALLFCCMILFGLGVRKWCQYQKEMMVLVNAVYFKGKWKTPFEKKLNGLYPFRVNSAQRTPVQDDVLA

SEQ ID NO: 765100 - protein, 524 aa, Homo sapiens
MELGPEPPHRRRLLFACSPPPASQPVVKALFGASAAGGLSPVTNLTVTMDQLQGLGSDYEQPLEVKNNSNLQRMGSSESTDSGFCLDSPGPLDSKENLENPMRRIHSLPQKLLGCSPALKRSHSDSLDHDIFQLIDPDENKENEAFEFKKPVRPVSRGCLHSHGLQEGKDLFTQRQNSAPARMLSSNERDSSEPGNFIPLFTPQSPVTATLSDEDDGFVDLLDGENLKNEEETPSCMASLWTAPLVMRTTNLDNRCKLFDSPSLCSSSTRSVLKRPERSQEESPPGSTKRRKSMSGASPKESTNPEKAHETLHQSLSLASSPKGTIENILDNDPRDLIGDFSKGYLFHTVAGKHQDLKYISPEIMASVLNGKFANLIKEFVIIDCRYPYEYEGGHIKGAVNLHMEEEVEDFLLKKPIVPTDGKRVIVVFHCEFSSERGPRMCRYVRERDRLGNEYPKLHYPELYVLKGGYKEFFMKCQSYCEPPSYRPMHHEDFKEDLKKFRTKSRTWAGEKSKREMYSRLKKL

SEQ ID NO: 765101 - protein, 484 aa, Homo sapiens
MELGPEPPHRRRLLFACSPPPASQPVVKALFGASAAGGLSPVTNLTVTMDQLQGLGSDYEQPLEVKNNSNLQRMGSSESTDSGFCLDSPGPLDSKENLENPMRRIHSLPQKLLGCSPALKRSHSDSLDHDIFQLIDPDENKENLSSNERDSSEPGNFIPLFTPQSPVTATLSDEDDGFVDLLDGENLKNEEETPSCMASLWTAPLVMRTTNLDNRCKLFDSPSLCSSSTRSVLKRPERSQEESPPGSTKRRKSMSGASPKESTNPEKAHETLHQSLSLASSPKGTIENILDNDPRDLIGDFSKGYLFHTVAGKHQDLKYISPEIMASVLNGKFANLIKEFVIIDCRYPYEYEGGHIKGAVNLHMEEEVEDFLLKKPIVPTDGKRVIVVFHCEFSSERGPRMCRYVRERDRLGNEYPKLHYPELYVLKGGYKEFFMKCQSYCEPPSYRPMHHEDFKEDLKKFRTKSRTWAGEKSKREMYSRLKKL

SEQ ID NO: 765102 - protein, 524 aa, Homo sapiens; identical to SEQ ID NO: 765100

SEQ ID NO: 765103 - protein, 125 aa, Homo sapiens
KGRPGCDSLGCRRPPARWPRGVRGKHPCLWLVAGAWRVRTPARPRRLPAAAASLNRGVVFVFDPRAPVARGRGRCRRGGAVAAEAEEEGAGALRGRAPPWNWARSPRTAAACSSPAAPLPRRSPS

SEQ ID NO: 765104 - protein, 518 aa, Homo sapiens
MELGPEPPHRRRLLFACSPPPASQPVVKALFGASAAGGLSPVTNLTVTMDQLQGLGSDYEQPLEVKNNSNLQRMGSSESTDSGFCLDSPGPLDSKENLENPMRRIHSLPQKLLGCSPALKRSHSDSLDHDIFQLIDPDENKENEAFEFKKPVRPVSRGCLHSHGLQEGKDLFTQRQNSAPARMLSSNERDSSEPFTPQSPVTATLSDEDDGFVDLLDGENLKNEEETPSCMASLWTAPLVMRTTNLDNRCKLFDSPSLCSSSTRSVLKRPERSQEESPPGSTKRRKSMSGASPKESTNPEKAHETLHQSLSLASSPKGTIENILDNDPRDLIGDFSKGYLFHTVAGKHQDLKYISPEIMASVLNGKFANLIKEFVIIDCRYPYEYEGGHIKGAVNLHMEEEVEDFLLKKPIVPTDGKRVIVVFHCEFSSERGPRMCRYVRERDRLGNEYPKLHYPELYVLKGGYKEFFMKCQSYCEPPSYRPMHHEDFKEDLKKFRTKSRTWAGEKSKREMYSRLKKL

SEQ ID NO: 765105 - protein, 524 aa, Homo sapiens; identical to SEQ ID NO: 765100

SEQ ID NO: 765106 - protein, 109 aa, Homo sapiens
MLKLTPLPSKMKVSAALLCLLLMAATFSPQGLAQPDSVSIPITCCFNVINRKIPIQRLESYTRITNIQCPKEAVIFKTKRGKEVCADPKERWVRDSMKHLDQIFQNLKP

SEQ ID NO: 765107 - protein, 109 aa, Homo sapiens; identical to SEQ ID NO: 765106

SEQ ID NO: 765108 - protein, 109 aa, Homo sapiens; identical to SEQ ID NO: 765106

SEQ ID NO: 765109 - protein, 72 aa, Homo sapiens
PGPSPKDQGLISSRDQWPTVLCRIFKVFHLIVPSLPHSFKTKRGKEVCADPKERWVRDSMKHLDQIFQNLKP

SEQ ID NO: 765110 - protein, 342 aa, Homo sapiens
MEPHDSSHMDSEFRYTLFPIVYSIIFVLGVIANGYVLWVFARLYPCKKFNEIKIFMVNLTMADMLFLITLPLWIVYYQNQGNWILPKFLCNVAGCLFFINTYCSVAFLGVITYNRFQAVTRPIKTAQANTRKRGISLSLVIWVAIVGAASYFLILDSTNTVPDSAGSGNVTRCFEHYEKGSVPVLIIHIFIVFSFFLVFLIILFCNLVIIRTLLMQPVQQQRNAEVKRRALWMVCTVLAVFIICFVPHHVVQLPWTLAELGFQDSKFHQAINDAHQVTLCLLSTNCVLDPVIYCFLTKKFRKHLTEKFYSMRSSRKCSRATTDTVTEVVVPFNQIPGNSLKN

SEQ ID NO: 765111 - protein, 342 aa, Homo sapiens; identical to SEQ ID NO: 765110

SEQ ID NO: 765112 - protein, 342 aa, Homo sapiens; identical to SEQ ID NO: 765110

SEQ ID NO: 765113 - protein, 324 aa, Homo sapiens
MEPHDSSHMDSEFRYTLFPIVYSIIFVLGVIANGYVLWVFARLYPCKKFNEIKIFMVNLTMADMLFLITLPLWIVYYLFFINTYCSVAFLGVITYNRFQAVTRPIKTAQANTRKRGISLSLVIWVAIVGAASYFLILDSTNTVPDSAGSGNVTRCFEHYEKGSVPVLIIHIFIVFSFFLVFLIILFCNLVIIRTLLMQPVQQQRNAEVKRRALWMVCTVLAVFIICFVPHHVVQLPWTLAELGFQDSKFHQAINDAHQVTLCLLSTNCVLDPVIYCFLTKKFRKHLTEKFYSMRSSRKCSRATTDTVTEVVVPFNQIPGNSLKN

SEQ ID NO: 765114 - protein, 274 aa, Homo sapiens
MEPHDSSHMDSEFRYTLFPIVYSIIFVLGVIANGYVLWVFARLYPCKKFNEIKIFMVNLTMADMLFLITLPLWIVYYQNQGNWILPKFLCNVAGCLFFINTYCSVAFLGVITYNRFQAVTRPIKTAQANTRKRGISLSLVIIRTLLMQPVQQQRNAEVKRRALWMVCTVLAVFIICFVPHHVVQLPWTLAELGFQDSKFHQAINDAHQVTLCLLSTNCVLDPVIYCFLTKKFRKHLTEKFYSMRSSRKCSRATTDTVTEVVVPFNQIPGNSLKN

SEQ ID NO: 765115 - protein, 1849 aa, Homo sapiens
MAVSRLDRLFILLDTGTTPVTRKAAAQQLGEVVKLHPHELNNLLSKVLIYLRSANWDTRIAAGQAVEAIVKNVPEWNPVPRTRQEPTSESSMEDSPTTERLNFDRFDICRLLQHGASLLGSAGAEFEVQDEKSGEVDPKERIARQRKLLQKKLGLNMGEAIGMSTEELFNDEDLDYTPTSASFVNKQPTLQAAELIDSEFRAGMSNRQKNKAKRMAKLFAKQRSRDAVETNEKSNDSTDGEPEEKRRKIANVVINQSANDSKVLIDNIPDSSSLIEETNEWPLESFCEELCNDLFNPSWEVRHGAGTGLREILKAHGKSGGKMGDSTLEEMIQQHQEWLEDLVIRLLCVFALDRFGDFVSDEVVAPVRETCAQTLGVVLKHMNETGVHKTVDVLLKLLTQEQWEVRHGGLLGIKYALAVRQDVINTLLPKVLTRIIEGLQDLDDDVRAVAAASLVPVVESLVYLQTQKVPFIINTLWDALLELDDLTASTNSIMTLLSSLLTYPQVQQCSIQQSLTVLVPRVWPFLHHTISSVRRAALETLFTLLSTQDQNSSSWLIPILPDMLRHIFQFCVLESSQEILDLIHKVWMELLSKASVQYVVAAACPWMGAWLCLMMQPSHLPIDLNMLLEVKARAKEKTGGKVRQGQSQNKEVLQEYIAGADTIMEDPATRDFVVMRARMMAAKLLGALCCCICDPGVNVVTQEIKPAESLGQLLLFHLNSKSALQRISVALVICEWAALQKECKAVTLAVQPRLLDILSEHLYYDEIAVPFTRMQNECKQLISSLADVHIEVGNRVNNNVLTIDQASDLVTTVFNEATSSFDLNPQVLQQLDSKRQQVQMTVTETNQEWQVLQLRVHTFAACAVVSLQQLPEKLNPIIKPLMETIKKEENTLVQNYAAQCIAKLLQQCTTRTPCPNSKIIKNLCSSLCVDPYLTPCVTCPVPTQSGQENSKGSTSEKDGMHHTVTKHRGIITLYRHQKAAFAITSRRGPTPKAVKAQIADLPAGSSGNILVELDEAQKPYLVQRRGAEFALTTIVKHFGGEMAVKLPHLWDAMVGPLRNTIDINNFDGKSLLDKGDSPAQELVNSLQVFETAAASMDSELHPLLVQHLPHLYMCLQYPSTAVRHMAARCVGVMSKIATMETMNIFLEKVLPWLGAIDDSVKQEGAIEALACVMEQLDVGIVPYIVLLVVPVLGRMSDQTDSVRFMATQCFATLIRLMPLEAGIPDPPNMSAELIQLKAKERHFLEQLLDGKKLENYKIPVPINAELRKYQQDGVNWLAFLNKYKLHGILCDDMGLGKTLQSICILAGDHCHRAQEYARSKLAECMPLPSLVVCPPTLTGHWVDEVGKFCSREYLNPLHYTGPPTERIRLQHQVKRHNLIVASYDVVRNDIDFFRNIKFNYCILDEGHVIKNGKTKLSKAVKQLTANYRIILSGTPIQNNVLELWSLFDFLMPGFLGTERQFAARYGKPILASRDARSSSREQEAGVLAMDALHRQVLPFLLRRMKEDVLQDLPPKIIQDYYCTLSPLQVQLYEDFAKSRAKCDVDETVSSATLSEETEKPKLKATGHVFQALQYLRKLCNHPALVLTPQHPEFKTTAEKLAVQNSSLHDIQHAPKLSALKQLLLDCGLGNGSTSESGTESVVAQHRILIFCQLKSMLDIVEHDLLKPHLPSVTYLRLDGSIPPGQRHSIVSRFNNDPSIDVLLLTTHVGGLGLNLTGADTVVFVEHDWNPMRDLQAMDRAHRIGQKRVVNVYRLITRGTLEEKIMGLQKFKMNIANTVISQENSSLQSMGTDQLLDLFTLDKDGKAEKADTSTSGKASMKSILENLSDLWDQEQYDSEYSLENFMHSLK

SEQ ID NO: 765116 - protein, 1891 aa, Homo sapiens
MAVSRLDRLFILLDTGTTPVTRKAAAQQLGEVVKLHPHELNNLLSKVLIYLRSANWDTRIAAGQAVEAIVKNVPEWNPVPRTRQEPTSESSMEDSPTTERLNFDRFDICRLLQHGASLLGSAGAEFEVQDEKSGEVDPKERIARQRKLLQKKLGLNMGEAIGMSTEELFNDEDLDYTPTSASFVNKQPTLQAAELIDSEFRAGMSNRQKNKAKRMAKLFAKQRSRDAVETNEKSNDSTDGEPEEKRRKIANVVINQSANDSKVLIDNIPDSSSLIEETNEWPLESFCEELCNDLFNPSWEVRHGAGTGLREILKAHGKSGGKMGDSTLEEVSVLMQQLSPSINVGIFFQCREVTSMCREVGMRGNKRKRYEKMIQQHQEWLEDLVIRLLCVFALDRFGDFVSDEVVAPVRETCAQTLGVVLKHMNETGVHKTVDVLLKLLTQEQWEVRHGGLLGIKYALAVRQDVINTLLPKVLTRIIEGLQDLDDDVRAVAAASLVPVVESLVYLQTQKVPFIINTLWDALLELDDLTASTNSIMTLLSSLLTYPQVQQCSIQQSLTVLVPRVWPFLHHTISSVRRAALETLFTLLSTQDQNSSSWLIPILPDMLRHIFQFCVLESSQEILDLIHKVWMELLSKASVQYVVAAACPWMGAWLCLMMQPSHLPIDLNMLLEVKARAKEKTGGKVRQGQSQNKEVLQEYIAGADTIMEDPATRDFVVMRARMMAAKLLGALCCCICDPGVNVVTQEIKPAESLGQLLLFHLNSKSALQRISVALVICEWAALQKECKAVTLAVQPRLLDILSEHLYYDEIAVPFTRMQNECKQLISSLADVHIEVGNRVNNNVLTIDQASDLVTTVFNEATSSFDLNPQVLQQLDSKRQQVQMTVTETNQEWQVLQLRVHTFAACAVVSLQQLPEKLNPIIKPLMETIKKEENTLVQNYAAQCIAKLLQQCTTRTPCPNSKIIKNLCSSLCVDPYLTPCVTCPVPTQSGQENSKGSTSEKDGMHHTVTKHRGIITLYRHQKAAFAITSRRGPTPKAVKAQIADLPAGSSGNILVELDEAQKPYLVQRRGAEFALTTIVKHFGGEMAVKLPHLWDAMVGPLRNTIDINNFDGKSLLDKGDSPAQELVNSLQVFETAAASMDSELHPLLVQHLPHLYMCLQYPSTAVRHMAARCVGVMSKIATMETMNIFLEKVLPWLGAIDDSVKQEGAIEALACVMEQLDVGIVPYIVLLVVPVLGRMSDQTDSVRFMATQCFATLIRLMPLEAGIPDPPNMSAELIQLKAKERHFLEQLLDGKKLENYKIPVPINAELRKYQQDGVNWLAFLNKYKLHGILCDDMGLGKTLQSICILAGDHCHRAQEYARSKLAECMPLPSLVVCPPTLTGHWVDEVGKFCSREYLNPLHYTGPPTERIRLQHQVKRHNLIVASYDVVRNDIDFFRNIKFNYCILDEGHVIKNGKTKLSKAVKQLTANYRIILSGTPIQNNVLELWSLFDFLMPGFLGTERQFAARYGKPILASRDARSSSREQEAGVLAMDALHRQVLPFLLRRMKEDVLQDLPPKIIQDYYCTLSPLQVQLYEDFAKSRAKCDVDETVSSATLSEETEKPKLKATGHVFQALQYLRKLCNHPALVLTPQHPEFKTTAEKLAVQNSSLHDIQHAPKLSALKQLLLDCGLGNGSTSESGTESVVAQHRILIFCQLKSMLDIVEHDLLKPHLPSVTYLRLDGSIPPGQRHSIVSRFNNDPSIDVLLLTTHVGGLGLNLTGADTVVFVEHDWNPMRDLQAMDRAHRIGQKRVVNVYRLITRGTLEEKIMGLQKFKMNIANTVISQENSSLQSMGTDQLLDLFTLDKDGKAEKADTSTSGKASMKSILENLSDLWDQEQYDSEYSLENFMHSLK

SEQ ID NO: 765117 - protein, 1891 aa, Homo sapiens; identical to SEQ ID NO: 765116

SEQ ID NO: 765118 - protein, 1221 aa, Homo sapiens
MAVSRLDRLFILLDTGTTPVTRKAAAQQLGEVVKLHPHELNNLLSKVLIYLRSANWDTRIAAGQAVEAIVKNVPEWNPVPRTRQEPTSESSMEDSPTTERLNFDRFDICRLLQHGASLLGSAGAEFEVQDEKSGEVDPKERIARQRKLLQKKLGLNMGEAIGMSTEELFNDEDLDYTPTSASFVNKQPTLQAAELIDSEFRAGMSNRQKNKAKRMAKLFAKQRSRDAVETNEKSNDSTDGEPEEKRRKIANVVINQSANDSKVLIDNIPDSSSLIEETNEWPLESFCEELCNDLFNPSWEVRHGAGTGLREILKAHGKSGGKMGDSTLEEVSVLMQQLSPSINVGIFFQCREVTSMCREVGMRGNKRKRYEKMIQQHQEWLEDLVIRLLCVFALDRFGDFVSDEVVAPVRETCAQTLGVVLKHMNETGVHKTVDVLLKLLTQEQWEVRHGGLLGIKYALAVRQDVINTLLPKVLTRIIEGLQDLDDDVRAVAAASLVPVVESLVYLQTQKVPFIINTLWDALLELDDLTASTNSIMTLLSSLLTYPQVQQCSIQQSLTVLVPRVWPFLHHTISSVRRAALETLFTLLSTQDQNSSSWLIPILPDMLRHIFQFCVLESSQEILDLIHKVWMELLSKASVQYVVAAACPWMGAWLCLMMQPSHLPIDLNMLLEVKARAKEKTGGKVRQGQSQNKEVLQEYIAGADTIMEDPATRDFVVMRARMMAAKLLGALCCCICDPGVNVVTQEIKPAESLGQLLLFHLNSKSALQRISVALVICEWAALQKECKAVTLAVQPRLLDILSEHLYYDEIAVPFTRMQNECKQLISSLADVHIEVGNRVNNNVLTIDQASDLVTTVFNEATSSFDLNPQVLQQLDSKRQQVQMTVTETNQEWQVLQLRVHTFAACAVVSLQQLPEKLNPIIKPLMETIKKEENTLVQNYAAQCIAKLLQQCTTRTPCPNSKIIKNLCSSLCVDPYLTPCVTCPVPTQSGQENSKGSTSEKDGMHHTVTKHRGIITLYRHQKAAFAITSRRGPTPKAVKAQIADLPAGSSGNILVELDEAQKPYLVQRRGAEFALTTIVKHFGGEMAVKLPHLWDAMVGPLRNTIDINNFDGKSLLDKGDSPAQELVNSLQVFETAAASMDSELHPLLVQHLPHLYMCLQYPSTAVRHMAARCVGVMSKIATMETMNIFLEKVLPWLGAIDDSVKQEGAIEALAYISQSSKDG

SEQ ID NO: 765119 - protein, 350 aa, Homo sapiens
MAVSRLDRLFILLDTGTTPVTRKAAAQQLGEVVKLHPHELNNLLSKVLIYLRSANWDTRIAAGQAVEAIVKNVPEWNPVPRTRQEPTSESSMEDSPTTERLNFDRFDICRLLQHGASLLGSAGAEFEVQDEKSGEVDPKERIARQRKLLQKKLGLNMGEAIGMSTEELFNDEDLDYTPTSASFVNKQPTLQAAELIDSEFRAGMSNRQKNKAKRMAKLFAKQRSRDAVETNEKSNDSTDGEPEEKRRKIANVVINQSANDSKVLIDNIPDSSSLIEETNEWPLESFCEELCNDLFNPSWEVRHGAGTGLREILKAHGKSGGKMGDSTLEEVSVLMQQLSPSINSWHLFPM

SEQ ID NO: 765120 - protein, 1849 aa, Homo sapiens; identical to SEQ ID NO: 765115

SEQ ID NO: 765121 - protein, 1873 aa, Homo sapiens
MAVSRLDRLFILLDTGTTPVTRKAAAQQLGEVVKLHPHELNNLLSKVLIYLRSANWDTRIAAGQAVEAIVKNVPEWNPVPRTRQEPTSESSMEDSPTTERLNFDRFDICRLLQHGASLLGSAGAEFEVQDEKSGEVDPKERIARQRKLLQKKLGLNMGEAIGMSTEELFNDEDLDYTPTSASFVNKQPTLQAAELIDSEFRAGMSNRQKNKAKRMAKLFAKQRSRDAVETNEKSNDSTDGEPEEKRRKIANVVINQSANDSKVLIDNIPDSSSLIEETNEWPLESFCEELCNDLFNPSWEVRHGAGTGLREILKAHGKSGGKMGDSTLEEVSVLMQQLSPSINVGIFFQCREVTSMCREVGMRGNKRKRYEKMIQQHQEWLEDLVIRLLCVFALDRFGDFVSDEVVAPVRETCAQTLGVVLKHMNETGVHKTVDVLLKLLTQEQWEVRHGGLLGIKYALAVRQDVINTLLPKVLTRIIEGLQDLDDDVRAVAAASLVPVVESLVYLQTQKVPFIINTLWDALLELDDLTASTNSIMTLLSSLLTYPQVQQCSIQQSLTVLVPRVWPFLHHTISSVRRAALETLFTLLSTQDQNSSSWLIPILPDMLRHIFQFCVLESSQEILDLIHKVWMELLSKASVQYVVAAACPWMGAWLCLMMQPSHLPIDLNMLLEVKARAKEKTGGKVRQGQSQNKEVLQEYIAGADTIMEDPATRDFVVMRARMMAAKLLGALCCCICDPGVNVVTQEIKPAESLGQLLLFHLNSKSALQRISVALVICEWAALQKECKAVTLAVQPRLLDILSEHLYYDEIAVPFTRMQNECKQLISSLADVHIEVGNRVNNNVLTIDQASDLVTTVFNEATSSFDLNPQVLQQLDSKRQQVQMTVTETNQEWQVLQLRVHTFAACAVVSLQQLPEKLNPIIKPLMETIKKEENTLVQNYAAQCIAKLLQQCTTRTPCPNSKIIKNLCSSLCVDPYLTPCVTCPVPTQSGQENSKGSTSEKDGMHHTVTKHRGIITLYRHQKAAFAITSRRGPTPKAVKAQIADLPAGSSGNILVELDEAQKPYLVQRRGAEFALTTIVKHFGGEMAVKLPHLWDAMVGPLRNTIDINNFDGKSLLDKGDSPAQELVNSLQVFETAAASMDSELHPLLVQHLPHLYMCLQYPSTAVRHMAARCVGVMSKIATMETMNIFLEKVLPWLGAIDDSVKQEGAIEALACVMEQLDVGIVPYIVLLVVPVLGRMSDQTDSVRFMATQCFATLIRLMPLEAGIPDPPNMSAELIQLKAKERHFLEQLLDGKKLENYKIPVPINAELRKYQQDGVNWLAFLNKYKLHGILCDDMGLGKTLQSICILAGDHCHRAQEYARSKLAECMPLPSLVVCPPTLTGHWVDEVGKFCSREYLNPLHYTGPPTERIRLQHQVKRHNLIVASYDVVRNDIDFFRNIKFNYCILDEGHVIKNGKTKLSKAVKQLTANYRIILSGTPIQNNVLELWSLFDFLMPGFLGTERQFAARYGKPILASRDARSSSREQEAGVLAMDALHRQVLPFLLRRMKEDVLQDLPPKIIQDYYCTLSPLQVQLYEDFAKSRAKCDVDETVSSATLSEETEKPKLKATGHVFQALQYLRKLCNHPALVLTPQHPEFKTTAEKLAVQNSSLHDIQHAPKLSALKQLLLDCGLGNGSTSESGTESVVAQHRILIFCQLVTYLRLDGSIPPGQRHSIVSRFNNDPSIDVLLLTTHVGGLGLNLTGADTVVFVEHDWNPMRDLQAMDRAHRIGQKRVVNVYRLITRGTLEEKIMGLQKFKMNIANTVISQENSSLQSMGTDQLLDLFTLDKDGKAEKADTSTSGKASMKSILENLSDLWDQEQYDSEYSLENFMHSLK

SEQ ID NO: 765122 - protein, 1269 aa, Homo sapiens
MAVSRLDRLFILLDTGTTPVTRKAAAQQLGEVVKLHPHELNNLLSKVLIYLRSANWDTRIAAGQAVEAIVKNVPEWNPVPRTRQEPTSESSMEDSPTTERLNFDRFDICRLLQHGASLLGSAGAEFEVQDEKSGEVDPKERIARQRKLLQKKLGLNMGEAIGMSTEELFNDEDLDYTPTSASFVNKQPTLQAAELIDSEFRAGMSNRQKNKAKRMAKLFAKQRSRDAVETNEKSNDSTDGEPEEKRRKIANVVINQSANDSKVLIDNIPDSSSLIEETNEWPLESFCEELCNDLFNPSWEVRHGAGTGLREILKAHGKSGGKMGDSTLEEVSVLMQQLSPSINVGIFFQCREVTSMCREVGMRGNKRKRYEKMIQQHQEWLEDLVIRLLCVFALDRFGDFVSDEVVAPVRETCAQTLGVVLKHMNETGVHKTVDVLLKLLTQEQWEVRHGGLLGIKYALAVRQDVINTLLPKVLTRIIEGLQDLDDDVRAVAAASLVPVVESLVYLQTQKVPFIINTLWDALLELDDLTASTNSIMTLLSSLLTYPQVQQCSIQQSLTVLVPRVWPFLHHTISSVRRAALETLFTLLSTQDQNSSSWLIPILPDMLRHIFQFCVLESSQEILDLIHKVWMELLSKASVQYVVAAACPWMGAWLCLMMQPSHLPIDLNMLLEVKARAKEKTGGKVRQGQSQNKEVLQEYIAGADTIMEDPATRDFVVMRARMMAAKLLGALCCCICDPGVNVVTQEIKPAESLGQLLLFHLNSKSALQRISVALVICEWAALQKECKAVTLAVQPRLLDILSEHLYYDEIAVPFTRMQNECKQLISSLADVHIEVGNRVNNNVLTIDQASDLVTTVFNEATSSFDLNPQVLQQLDSKRQQVQMTVTETNQEWQVLQLRVHTFAACAVVSLQQLPEKLNPIIKPLMETIKKEENTLVQNYAAQCIAKLLQQCTTRTPCPNSKIIKNLCSSLCVDPYLTPCVTCPVPTQSGQENSKGSTSEKDGMHHTVTKHRGIITLYRHQKAAFAITSRRGPTPKAVKAQIADLPAGSSGNILVELDEAQKPYLVQRRGAEFALTTIVKHFGGEMAVKLPHLWDAMVGPLRNTIDINNFDGKSLLDKGDSPAQELVNSLQVFETAAASMDSELHPLLVQHLPHLYMCLQYPSTAVRHMAARCVGVMSKIATMETMNIFLEKVLPWLGAIDDSVKQEGAIEALACVMEQLDVGIVPYIVLLVVPVLGRMSDQTDSVRFMATQCFATLIRLMPLEVSQRYLL

SEQ ID NO: 765123 - protein, 350 aa, Homo sapiens; identical to SEQ ID NO: 765119

SEQ ID NO: 765124 - protein, 103 aa, Homo sapiens
LVSWGCHNKVPQTGWLKTTEICALMVQEARSLKSRCQQGWFLPGVSERETVPHTSFLSFCWCLAILGTPRLVAASLQSLPPLSYGLCVSVSKSFLLSSNSHWI

SEQ ID NO: 765125 - protein, 487 aa, Homo sapiens
MSKLLRHRRKHDDDRRFTCPVEGCGKSFTRAEHLKGHSITHLGTKPFECPVEGCCARFSARSSLYIHSKKHVQDVGAPKSRCPVSTCNRLFTSKHSMKAHMVRQHSRRQDLLPQLEAPSSLTPSSELSSPGQSELTNMDLAALFSDTPANASGSAGGSDEALNSGILTIDVTSVSSSLGGNLPANNSSLGPMEPLVLVAHSDIPPSLDSPLVLGTAATVLQQGSFSVDDVQTVSAGALGCLVALPMKNLSDDPLALTSNSNLAAHITTPTSSSTPRENASVPELLAPIKVEPDSPSRPGAVGQQEGSHGLPQSTLPSPAEQHGAQDTELSAGTGNFYLESGGSARTDYRAIQLAKEKKQRGAGSNAGASQSTQRKIKEGKMSPPHFHASQNSWLCGSLVVPSGGRPGPAPAAGVQCGAQGVQVQLVQDDPSGEGVLPSARGPATFLPFLTVDLPVYVLQEVLPSSGGPAGPEATQFPGSTINLQDLQ

SEQ ID NO: 765126 - protein, 379 aa, Homo sapiens
MSKLLRHRRKHDDDRRFTCPVEGCGKSFTRAEHLKGHSITHLGTKPFECPVEGCCARFSARSSLYIHSKKHVQDVGAPKSRCPVSTCNRLFTSKHSMKAHMVRQHSRRQDLLPQLEAPSSLTPSSELSSPGQSELTNMDLAALFSDTPANASGSAGGSDEALNSGILTIDVTSVSSSLGGNLPANNSSLGPMEPLVLVAHSDIPPSLDSPLVLGTAATVLQQGSFSVDDVQTVSAGALGCLVALPMKNLSDDPLALTSNSNLAAHITTPTSSSTPRENASVPELLAPIKVEPDSPSRPGAVGQQEGSHGLPQSTLPSPAEQHGAQDTELSAGTGNFYLESGGSARTDYRAIQLAKEKKQRGAGSNAGEAVCAAAGRARA

SEQ ID NO: 765127 - protein, 379 aa, Homo sapiens; identical to SEQ ID NO: 765126

SEQ ID NO: 765128 - protein, 195 aa, Homo sapiens
SACTDCICAPLVLVAHSDIPPSLDSPLVLGTAATVLQQGSFSVDDVQTVSAGALGCLVALPMKNLSDDPLALTSNSNLAAHITTPTSSSTPRENASVPELLAPIKVEPDSPSRPGAVGQQEGSHGLPQSTLPSPAEQHGAQDTELSAGTGNFYLESGGSARTDYRAIQLAKEKKQRGAGSNAGEAVCAAAGRARA

SEQ ID NO: 765129 - protein, 77 aa, Homo sapiens
KLRPFGCPVGGCGKKFTTVYNLKAHMKGHEQESLFKCEVCAERFPTHAKLSSHQRSTSSPSALTSVTFPAVRRHLSQ

SEQ ID NO: 765130 - protein, 135 aa, Homo sapiens
MSKLLRHRRKHDDDRRFTCPVEGCGKSFTRAEHLKGHSITHLGTKPFECPVEGCCARFSARSSLYIHSKKHVQDVGAPKSRCPVSTCNRLFTSKRCSPHLEALLDRRPPSSQEALSTCRICSDGSLGLGRPKATV

SEQ ID NO: 765131 - protein, 241 aa, Homo sapiens
MQVQDRRSVGQMKFLAWTVRGLAASPLRSPSTCPGPSSWPVGKLGHAGKALCGARGFAGEHCGYTRLVGVQGVPGHLQGVEERALGGKSVFGLTEGRSWRAEGSRPSKSCWDQGDRMRTRWEQVVPSPHKQFLLGPRASLGIQGVGWFCHALQLEETSQVRRGPLLHSHRHVTGLSVLPSQDDPSGEGVLPSARGPATFLPFLTVDLPVYVLQEVLPSSGGPAGPEATQFPGSTINLQDLQ

SEQ ID NO: 765132 - protein, 563 aa, Homo sapiens
SRGLYLNGCEKTFITVSALFSHNRAHFREQELFSCSFPGCSKQYDKACRLKIHLRSHTGERPFICDSDSCGWTFTSMSKLLRHRRKHDDDRRFTCPVEGCGKSFTRAEHLKGHSITHLGTKPFECPVEGCCARFSARSSLYIHSKKHVQDVGAPKSRCPVSTCNRLFTSKHSMKAHMVRQHSRRQDLLPQLEAPSSLTPSSELSSPGQSELTNMDLAALFSDTPANASGSAGGSDEALNSGILTIDVTSVSSSLGGNLPANNSSLGPMEPLVLVAHSDIPPSLDSPLVLGTAATVLQQGSFSVDDVQTVSAGALGCLVALPMKNLSDDPLALTSNSNLAAHITTPTSSSTPRENASVPELLAPIKVEPDSPSRPGAVGQQEGSHGLPQSTLPSPAEQHGAQDTELSAGTGNFYLESGGSARTDYRAIQLAKEKKQRGAGSNAGASQSTQRKIKEGKMSPPHFHASQNSWLCGSLVVPSGGRPGPAPAAGVQCGAQGVQVQLVQDDPSGEGVLPSARGPATFLPFLTVDLPVYVLQEVLPSSGGPAGPEATQFPGSTINLQDLQ

SEQ ID NO: 765133 - protein, 514 aa, Homo sapiens
MKIHLRSHTGERPFICDSDSCGWTFTSMSKLLRHRRKHDDDRRFTCPVEGCGKSFTRAEHLKGHSITHLGTKPFECPVEGCCARFSARSSLYIHSKKHVQDVGAPKSRCPVSTCNRLFTSKHSMKAHMVRQHSRRQDLLPQLEAPSSLTPSSELSSPGQSELTNMDLAALFSDTPANASGSAGGSDEALNSGILTIDVTSVSSSLGGNLPANNSSLGPMEPLVLVAHSDIPPSLDSPLVLGTAATVLQQGSFSVDDVQTVSAGALGCLVALPMKNLSDDPLALTSNSNLAAHITTPTSSSTPRENASVPELLAPIKVEPDSPSRPGAVGQQEGSHGLPQSTLPSPAEQHGAQDTELSAGTGNFYLESGGSARTDYRAIQLAKEKKQRGAGSNAGASQSTQRKIKEGKMSPPHFHASQNSWLCGSLVVPSGGRPGPAPAAGVQCGAQGVQVQLVQDDPSGEGVLPSARGPATFLPFLTVDLPVYVLQEVLPSSGGPAGPEATQFPGSTINLQDLQ

SEQ ID NO: 765134 - protein, 339 aa, Homo sapiens [sequence omitted]

SEQ ID NO: 765135 - protein, 107 aa, Homo sapiens [sequence omitted]

SEQ ID NO: 765136 - protein, 93 aa, Homo sapiens
SPETLPAETSQVRRGPLLHSHRHVTGLSVLPSQDDPSGEGVLPSARGPATFLPFLTVDLPVYVLQEVLPSSGGPAGPEATQFPGSTINLQDLQ

SEQ ID NO: 765137 - protein, 88 aa, Homo sapiens
LGTNPRKGLGVDPIPPKLVSEVEELYKSITALREKLLQAEQSLRNLKDIHMSLEKDVTAMTNSLFIDRQKCMAHRTCYPTILQLAGYQ

SEQ ID NO: 765138 - protein, 150 aa, Homo sapiens
MFPVSSGCFQEQQETNKSLPRSASTPETRTKFTQDNLCHAQRERLDSANLWVLVDCILRDTSEDLGLQCDAVNLAFGRRCEELEDVRHKLQHHLHKVGHPEPRRRLRRLPTTLPPLITWPGPSTPFSSVPLIPRDPRSKCHLSVNLCKTR

SEQ ID NO: 765139 - protein, 150 aa, Homo sapiens; identical to SEQ ID NO: 765138

SEQ ID NO: 765140 - protein, 124 aa, Homo sapiens
MLCPRAAFLVGSFHGVFPGPPASSHWEFWVPSTPVGAYFCPPQPQLTPPNTPKLVSEVEELYKSITALREKLLQAEQSLRNLKDIHMSLEKDVTAMTNSLFIDRQKCMAHRTCYPTILQLAGYQ

SEQ ID NO: 765141 - protein, 208 aa, Homo sapiens
MGVLGPELRDNRLPDSPEPAGGPVHIVPLTHASPGPLVRTTLWTQPQELGRTRLVSTFHMPGHGGTGPRGTVLSADAAGNHRSGTQRGGTEGGHQGQGGTSAHSPDPAVAALTPAQHAAVPRCSPVQPQLTPPNTPKLVSEVEELYKSITALREKLLQAEQSLRNLKDIHMSLEKDVTAMTNSLFIDRQKCMAHRTCYPTILQLAGYQ

SEQ ID NO: 765142 - protein, 206 aa, Homo sapiens
MFPVSSGCFQEQQETNKSLPRSASTPETRTKFTQDNLCHAQRERLDSANLWVLVDCILRDTSEDLGLQCDAVNLAFGRRCEELEDVRHKLQHHLHKMLREITDQEHNVVALKEAIKDKEEPLHIAQTRLYLLSHRPNMQLCREAAQFRALWEKLLEGEQSLCNLEDIHMSLEKDVTAMTNSLFIDRQKCMAHRTCYTPILQLAGYQ

SEQ ID NO: 765143 - protein, 219 aa, Homo sapiens
MFPVSSGCFQEQQETNKSLPRSASTPETRTKFTQDNLCHAQRERLDSANLWVLVDCILRDTSEDLGLQCDAVNLAFGRRCEELEDVRHKLQHHLHKMLREITDQEHNVVALKEAIKDKEEPLHIAQTRLYLLSHRPNMQLCREAAQFSWLSEVEELNMSITALWEKLLEGEQSLCNLEDIHMSLEKDVTAMTNSLFIDRQKCMAHRTCYTPILQLAGYQ

SEQ ID NO: 765144 - protein, 144 aa, Homo sapiens
MLPVLRDFGKSFLVYEDDVQDVGLVSLRQTNRSMAGSRSFLDSLAKELTDVLEGISGEVDGLVKFQGPGEADRKTGTVLMLFLSALCMSSDVAVNSWAVQDEAAWPVYIFLDEALEASVVLSTLKGAVPTEGCLKVSQKRRKSL

SEQ ID NO: 765145 - protein, 129 aa, Homo sapiens
MFPVSSGCFQEQQETNKSLPRSASTPETRTKFTQDNLCHAQRERLDSANLWVLVDCILRDTSEDLGLQCDAVNLAFGRRCEELEDARHKLQHHLHKMLREITDQEHNVVALKEAIKDKEEPLHIAQTRL

SEQ ID NO: 765146 - protein, 129 aa, Homo sapiens
MFPVSSGCFQEQQETNKSLPRSASTPETRTKFTQDNLCHAQRERLDSANLWVLVDCILRDTSEDLGLQCDAVNLAFGRRCEELEDVRHKLQHHLHKMLREITDQEHNVVALKEAIKDKEEPLHIAQTRL

SEQ ID NO: 765147 - protein, 150 aa, Homo sapiens; identical to SEQ ID NO: 765138

SEQ ID NO: 765148 - protein, 129 aa, Homo sapiens; identical to SEQ ID NO: 765146

SEQ ID NO: 765149 - protein, 237 aa, Homo sapiens
MSLWLCFQCPLGVSKSNKKRINLWDPVDGAQYLRLRKRFWWGLRLRPRPWGLSRVHVNAERSIHHPLPETAVPEVLHRQGRAGQGGAQPLNEAALSGGDARRARRLHQPLPQMQDLRPERTWSPRPTVARRRTGAAPGGATAPRPFRQNLSDLGRRSALPLKRNLCAGGSSLGAPPPRTPQRRVTLAAQRWLSRPRRRAVGLGELDQWSTGGCSRPPMGSGQLGGCPHAQPDAGHSG

SEQ ID NO: 765150 - protein, 534 aa, Homo sapiens
ALPLTGGCRTLYTQTAVQHGRWAEARVNMPANGTSPQRFPALIPGEPGRSFEGSVSFEDVAVDFTRQEWHRLDPAQRTMHKDVMLETYSNLASVGLCVAKPEMIFKLERGEELWILEEESSGHGYSGSLSLLCGNGSVGDNALRHDNDLLHHQKIQTLDQNVEYNGCRKAFHEKTGFVRRKRTPRGDKNFECNECGKAYCRKSNLVEHLRIHTGERPYECGECAKTFSARSYLIAHQKTHTGERPFECNECGKSFGRKSQLILHTRTHTGERPYECTECGKTFSEKATLTIHQRTHTGEKPYECSECGKTFRVKISLTQHHRTHTGEKPYECGECGKNFRAKKSLNQHQRIHTGEKPYECGECGKFFRMKMTLNNHQRTHTGEKPYQCNECGKSFRVHSSLGIHQRIHTGEKPYECNECGNAFYVKARLIEHQRMHSGEKPYECSECGKIFSMKKSLCQHRRTHTGEKPYECSECGNAFYVKVRLIEHQRIHTGERPFECQECGKAFCRKAHLTEHQRTHIGWSWRCTMKKASH

SEQ ID NO: 765151 - protein, 400 aa, Homo sapiens
MNPASAPPPLPPPGQQVIHVTQDLDTDLEALFNSVMNPKPSSWRKKILPESFFKEPDSGSHSRQSSTDSSGGHPGPRLAGGAQHVRSHSSPASLQLGTGAGAAGSPAQQHAHLRQQSYDVTDELPLPPGWEMTFTATGQRYFLNHIEKITTWQDPRKAMNQPLNHMNLHPAVSSTPVPQRSMAVSQPNLVMNHQHQQQMAPSTLSQQNHPTQNPPAGLMSMPNALTTQQQQQQKLRLQRIQMERERIRMRQEELMRQEAALCRQLPMEAETLAPVQAAVNPPTMTPDMRSITNNSSDPFLNGGPYHSREQSTDSGLGLGCYSVPTTPEDFLSNVDEMDTGENAGQTPMNINPQQTRFPDFLDCLPGTNVDLGTLESEDLIPLFNDVESALNKSEPFLTWL

SEQ ID NO: 765152 - protein, 400 aa, Homo sapiens; identical to SEQ ID NO: 765151

SEQ ID NO: 765153 - protein, 400 aa, Homo sapiens; identical to SEQ ID NO: 765151

SEQ ID NO: 765154 - protein, 400 aa, Homo sapiens; identical to SEQ ID NO: 765151

SEQ ID NO: 765155 - protein, 400 aa, Homo sapiens; identical to SEQ ID NO: 765151

SEQ ID NO: 765156 - protein, 269 aa, Homo sapiens [sequence omitted]

SEQ ID NO: 765157 - protein, 400 aa, Homo sapiens; identical to SEQ ID NO: 765151

SEQ ID NO: 765158 - protein, 77 aa, Homo sapiens
  misc_feature (12)..(13): Xaa can be any naturally occurring amino acid
PTYHHQHPTKNXXLYERENAGQTPMNINPQQTRFPDFLDCLPGTNVDLGTLESEDLIPLFNDVESALNKSEPFLTWL

SEQ ID NO: 765159 - protein, 400 aa, Homo sapiens; identical to SEQ ID NO: 765151

SEQ ID NO: 765160 - protein, 400 aa, Homo sapiens; identical to SEQ ID NO: 765151

SEQ ID NO: 765161 - protein, 400 aa, Homo sapiens; identical to SEQ ID NO: 765151

SEQ ID NO: 765162 - protein, 400 aa, Homo sapiens; identical to SEQ ID NO: 765151

SEQ ID NO: 765163 - protein, 269 aa, Homo sapiens [sequence omitted]

SEQ ID NO: 765164 - protein, 274 aa, Homo sapiens
PPTRRGRVGGTGQRYFLNHIEKITTWQDPRKAMNQPLNHMNLHPAVSSTPVPQRSMAVSQPNLVMNHQHQQQMAPSTLSQQNHPTQNPPAGLMSMPNALTTQQQQQQKLRLQRIQMERERIRMRQEELMRQEAALCRQLPMEAETLAPVQAAVNPPTMTPDMRSITNNSSDPFLNGGPYHSREQSTDSGLGLGCYSVPTTPEDFLSNVDEMDTGENAGQTPMNINPQQTRFPDFLDCLPGTNVDLGTLESEDLIPLFNDVESALNKSEPFLTWL

SEQ ID NO: 765165 - protein, 230 aa, Homo sapiens
  misc_feature (49)..(49): Xaa can be any naturally occurring amino acid
  misc_feature (58)..(58): Xaa can be any naturally occurring amino acid
  misc_feature (67)..(67): Xaa can be any naturally occurring amino acid
  misc_feature (81)..(81): Xaa can be any naturally occurring amino acid
  misc_feature (99)..(99): Xaa can be any naturally occurring amino acid
KPAPQPAESATRRMGAALMVLARKWRLERSCRPGRQGRQEKLAGLAGEXARIGRRKKXGFAKLAAQXRDGCIGGAGRGWRXLVRAGCAHWERLESCLAXQFAGLLCKRAARSDERPDMRSITNNSSDPFLNGGPYHSREQSTDSGLGLGCYSVPTTPEDFLSNVDEMDTGENAGQTPMNINPQQTRFPDFLDCLPGTNVDLGTLESEDLIPLFNDVESALNKSEPFLTWL

SEQ ID NO: 765166 - protein, 400 aa, Homo sapiens; identical to SEQ ID NO: 765151

SEQ ID NO: 765167 - protein, 400 aa, Homo sapiens; identical to SEQ ID NO: 765151

SEQ ID NO: 765168 - protein, 251 aa, Homo sapiens
TLPLRWQRNTWIQAKVEEVGRLAAGLAGSLEEQMAGLRQQEQNIINYKTNIDRLEGDHQLLQESLVFDNKHTVYSMEHIRVGWEQLLTSIARTINEVENQVLTRDAKGLSQEQLNEFRASFNHFDRKRNGMMEPDDFRACLISMGYDLGEVEFARIMTMVDPNAAGVVTFQAFIDFMTRETAETDTTEQVVASFKILAGDKNYFTPRSWGKLLPRGRILIRDGAYKVPCPLNLDKCLSVPLGEALPNWVLE

SEQ ID NO: 765169 - protein, 318 aa, Homo sapiens
GIQGEIQKFCQTYGLRPCSTNPYITLSPQDINTKWDMVRKLVPSRDQTLQEELARQQVNERLRRQFAAQANAIGPWIQAKVEEVGRLAAGLAGSLEEQMAGLRQQEQNIINYKTNIDRLEGDHQLLQESLVFDNKHTVYSMEHIRVGWEQLLTSIARTINEVENQVLTRDAKGLSQEQLNEFRASFNHFDRKRNGMMEPDDFRACLISMGYDLGEVEFARIMTMVDPNAAGVVTFQAFIDFMTRETAETDTTEQVVASFKILAGDKNYITPEELRRELPAKQAEYCIRRMVPYKGSGAPAGALDYVAFSSALYGESDL

SEQ ID NO: 765170 - protein, 91 aa, Homo sapiens
QVVASFKILAGDKVSPRRWRGWWARAGHGTCGLNASSPQNYITPEELRRELPAKQAEYCIRRMVPYKGSGAPAGALDYVAFSSALYGESDL

SEQ ID NO: 765171 - protein, 348 aa, Homo sapiens
MAEKVLVTGGAGYIGSHTVLELLEAGYLPVVIDNFHNAFRGGGSLPESLRRVQELTGRSVEFEEMDILDQGALQRLFKKYSFMAVIHFAGLKAVGESVQKPLDYYRVNLTGTIQLLEIMKAHGVKNLVFSSSATVYGNPQYLPLDEAHPTGGCTNPYGKSKFFIEEMIRDLCQADKTWNAVLLRYFNPTGAHASGCIGEDPQGIPNNLMPYVSQVAIGRREALNVFGNDYDTEDGTGVRDYIHVVDLAKGHIAALRKLKEQCGCRIYNLGTGTGYSVLQMVQAMEKASGKKIPYKVVARREGDVAACYANPSLAQEELGWTAALGLDRMCEDLWRWQKQNPSGFGTQA

SEQ ID NO: 765172 - protein, 390 aa, Homo sapiens
GCTVWKLRIVGRGNPSRTLQSSVTLDKEVWILRFHLFQLQGAMAEKVLVTGGAGYIGSHTVLELLEAGYLPVVIDNFHNAFRGGGSLPESLRRVQELTGRSVEFEEMDILDQGALQRLFKKYSFMAVIHFAGLKAVGESVQKPLDYYRVNLTGTIQLLEIMKAHGVKNLVFSSSATVYGNPQYLPLDEAHPTGGCTNPYGKSKFFIEEMIRDLCQADKTWNAVLLRYFNPTGAHASGCIGEDPQGIPNNLMPYVSQVAIGRREALNVFGNDYDTEDGTGVRDYIHVVDLAKGHIAALRKLKEQCGCRIYNLGTGTGYSVLQMVQAMEKASGKKIPYKVVARREGDVAACYANPSLAQEELGWTAALGLDRMCEDLWRWQKQNPSGFGTQA

SEQ ID NO: 765173 - protein, 348 aa, Homo sapiens; identical to SEQ ID NO: 765171

SEQ ID NO: 765174 - protein, 348 aa, Homo sapiens; identical to SEQ ID NO: 765171

SEQ ID NO: 765175 - protein, 348 aa, Homo sapiens; identical to SEQ ID NO: 765171

SEQ ID NO: 765176 - protein, 284 aa, Homo sapiens [sequence omitted]

SEQ ID NO: 765177 - protein, 400 aa, Homo sapiens
MAEKVLVTGGAGYIGSHTVLELLEAGYLPVVIDNFHNAFRGERGSGAGGYLRGWQKQNPGFHLHHRAGNVCLASPWEHSTPCRDDVAYMYPTRGGSLPESLRRVQELTGRSVEFEEMDILDQGALQRLFKKYSFMAVIHFAGLKAVGESVQKPLDYYRVNLTGTIQLLEIMKAHGVKNLVFSSSATVYGNPQYLPLDEAHPTGGCTNPYGKSKFFIEEMIRDLCQADKTWNAVLLRYFNPTGAHASGCIGEDPQGIPNNLMPYVSQVAIGRREALNVFGNDYDTEDGTGVRDYIHVVDLAKGHIAALRKLKEQCGCRIYNLGTGTGYSVLQMVQAMEKASGKKIPYKVVARREGDVAACYANPSLAQEELGWTAALGLDRMCEDLWRWQKQNPSGFGTQA

SEQ ID NO: 765178 - protein, 314 aa, Homo sapiens
GCTVWKLRIVGRGNPSRTLQSSVTLDKEVWILRFHLFQLQGAMAEKVLVTGGAGYIGSHTVLELLEAGYLPVVIDNFHNAFRGGGSLPESLRRVQELTGRSVEFEEMDILDQGALQRLFKKYSFMAVIHFAGLKAVGESVQKPLDYYRVNLTGTIQLLEIMKAHGVKNLVFSSSATVYGNPQYLPLDEAHPTGGCTNPYGKSKFFIEEMIRDLCQADKTWNAVLLRYFNPTGAHASGCIGEDPQGIPNNLMPYVSQVAIGRREALNVFGNDYDTEDGTGVRDYIHVVDLAKGHIAALRKLKEQCGCRGRKRREK

SEQ ID NO: 765179 - protein, 331 aa, Homo sapiens
MAEKVLVTGGAGYIGSHTVLELLEAGYLPVVIDNFHNAFRGGGSLPESLRRVQELTGRSVEFEEMDILDQGALQRLFKKSVQKPLDYYRVNLTGTIQLLEIMKAHGVKNLVFSSSATVYGNPQYLPLDEAHPTGGCTNPYGKSKFFIEEMIRDLCQADKTWNAVLLRYFNPTGAHASGCIGEDPQGIPNNLMPYVSQVAIGRREALNVFGNDYDTEDGTGVRDYIHVVDLAKGHIAALRKLKEQCGCRIYNLGTGTGYSVLQMVQAMEKASGKKIPYKVVARREGDVAACYANPSLAQEELGWTAALGLDRMCEDLWRWQKQNPSGFGTQA

SEQ ID NO: 765180 - protein, 221 aa, Homo sapiens
HTHPQSSVDLVLIGRGPDEAHPTGGCTNPYGKSKFFIEEMIRDLCQADKTWNAVLLRYFNPTGAHASGCIGEDPQGIPNNLMPYVSQVAIGRREALNVFGNDYDTEDGTGVRDYIHVVDLAKGHIAALRKLKEQCGCRIYNLGTGTGYSVLQMVQAMEKASGKKIPYKVVARREGDVAACYANPSLAQEELGWTAALGLDRMCEDLWRWQKQNPSGFGTQA

SEQ ID NO: 765181 - protein, 314 aa, Homo sapiens; identical to SEQ ID NO: 765178

SEQ ID NO: 765182 - protein, 140 aa, Homo sapiens [sequence omitted]

SEQ ID NO: 765183 - protein, 314 aa, Homo sapiens; identical to SEQ ID NO: 765178

SEQ ID NO: 765184 - protein, 390 aa, Homo sapiens; identical to SEQ ID NO: 765172

SEQ ID NO: 765185 - protein, 284 aa, Homo sapiens [sequence omitted]

SEQ ID NO: 765186 - protein, 477 aa, Homo sapiens
MAEKVLVTGGAGYIGSHTVLELLEAGYLPVVIDNFHNAFRGGGSLPESLRRVQELTGRSVEFEEMDILDQGALQRLFKKGGCRLGTVAHACNSSTLEGRGEEITGAQVFKTSLLNTVKPHLYRKIQKLAGHGSPYLWSQLLGRLAWEDGLSLGGGGCGELRWHHCTPAWTTERDCQKKKQQVSAGRQAEGIAKDYKPVEQPLAMSPLQYSFMAVIHFAGLKAVGESVQKPLDYYRVNLTGTIQLLEIMKAHGVKNLVFSSSATVYGNPQYLPLDEAHPTGGCTNPYGKSKFFIEEMIRDLCQADKTWNAVLLRYFNPTGAHASGCIGEDPQGIPNNLMPYVSQVAIGRREALNVFGNDYDTEDGTGVRDYIHVVDLAKGHIAALRKLKEQCGCRIYNLGTGTGYSVLQMVQAMEKASGKKIPYKVVARREGDVAACYANPSLAQEELGWTAALGLDRMCEDLWRWQKQNPSGFGTQA

SEQ ID NO: 765187 - protein, 274 aa, Homo sapiens
MSPLQYSFMAVIHFAGLKAVGESVQKPLDYYRVNLTGTIQLLEIMKAHGVKNLVFSSSATVYGNPQYLPLDEAHPTGGCTNPYGKSKFFIEEMIRDLCQADKTWNAVLLRYFNPTGAHASGCIGEDPQGIPNNLMPYVSQVAIGRREALNVFGNDYDTEDGTGVRDYIHVVDLAKGHIAALRKLKEQCGCRIYNLGTGTGYSVLQMVQAMEKASGKKIPYKVVARREGDVAACYANPSLAQEELGWTAALGLDRMCEDLWRWQKQNPSGFGTQA

SEQ ID NO: 765188 - protein, 364 aa, Homo sapiens
GCTVWKLRIVGRGNPSRTLQSSVTLDKEVWILRFHLFQLQGAMAEKVLVTGGAGYIGSHTVLELLEAGYLPVVIDNFHNAFRGGGSLPESLRRVQELTGRSVEFEEMDILDQGALQRLFKKYSFMAVIHFAGLKAVGESVQKPLDYYRVNLTGTIQLLEIMKAHGVKNLVFSSSATVYGNPQYLPLDEAHPTGGCTNPYGKSKFFIEEMIRDLCQADKTWNAVLLRYFNPTGAHASGCIGEDPQGIPNNLMPYVSQVAIGRREALNVFGNDYDTEDGTGVRDYIHVVDLAKGHIAALRKLKEQCGCRIPYKVVARREGDVAACYANPSLAQEELGWTAALGLDRMCEDLWRWQKQNPSGFGTQA

SEQ ID NO: 765189 - protein, 145 aa, Homo sapiens
MDILDQGALQRLFKKYSFMAVIHFAGLKAVGESVQKPLDYYRVNLTGTIQLLEIMKAHGVKNLVFSSSATVYGNPQYLPLDEAHPTGGCTNPYGKSKFFIEEMIRDLCQADKVPMPLAALVRIPRAYPTTSCLMSPRWRSGDGRP

SEQ ID NO: 765190 - protein, 390 aa, Homo sapiens; identical to SEQ ID NO: 765172

SEQ ID NO: 765191 - protein, 670 aa, Homo sapiens
MASGSKASVPADSFRTISPDRRGEKSASAVSGDTAAATTLKGTAIPVRSVVASPRPVKGKAGRETARLRLQRLPAAQAEDTGEAAAAAAEEPLLPVPEDEEEAQPLPPVCVSRMRGMWRDEKVSLYCDEVLQDCKYRWGFSSVVRLDSNSRPQAEDADEVMGKYLSEKLKLKDKWLGVWKTNPSVFFVKYEEASIPFVGILVEVTCEPYQDSSSRFKVTVSVAEPFSSNIANIPRDWLMRFWRNWNTVCLFWKCILLRDKILIYMLLLWPWKLSGFYDFLWRDWDDEESCENYTALIEERINLWCDIQDGTIPGPIAQRFKKTLEKYKNKRVELIEYQSNIKEDPSAAEAVECWKKYYEIVMLCGLLKMWEDLRLRVHGPFFPRILRRRKGKREFGKTITHIVAKMMTTEMIKDLSSDTLLQQHGDLDLALDNCYSGDTVIIFPGEYQAANLALLTDDIIIKGVGKREEIMITSEPSRDSFVVSKADNVKLMHLSLIQQGTVDGIVVVESGHMTLENCILKCEGTGVCVLTGAALTITDSEITGAQGAGVELYPGSIAILERNEIHHCNNLRTSNSSKSTLGGVNMKVLPAPKLKMTNNHIYSNKGYGVSILQPMEQFFIVAEEALNKRASSGDKKDDKMLFKVMQNLNLEMNNNKIEANVKGDIRIVTS

SEQ ID NO: 765192 - protein, 652 aa, Homo sapiens
MASGSKASVPADSFRTISPDRRGEKSASAVSGDTAAATTLKGTAIPVRSVVASPRPVKGKAGRETARLRLQRLPAAQAEDTGEAAAAAAEEPLLPVPEDEEEAQPLPPVCVSRMRGMWRDEKVSLYCDEVLQDCKAEDADEVMGKYLSEKLKLKDKWLGVWKTNPSVFFVKYEEASIPFVGILVEVTCEPYQDSSSRFKVTVSVAEPFSSNIANIPRDWLMRFWRNWNTVCLFWKCILLRDKILIYMLLLWPWKLSGFYDFLWRDWDDEESCENYTALIEERINLWCDIQDGTIPGPIAQRFKKTLEKYKNKRVELIEYQSNIKEDPSAAEAVECWKKYYEIVMLCGLLKMWEDLRLRVHGPFFPRILRRRKGKREFGKTITHIVAKMMTTEMIKDLSSDTLLQQHGDLDLALDNCYSGDTVIIFPGEYQAANLALLTDDIIIKGVGKREEIMITSEPSRDSFVVSKADNVKLMHLSLIQQGTVDGIVVVESGHMTLENCILKCEGTGVCVLTGAALTITDSEITGAQGAGVELYPGSIAILERNEIHHCNNLRTSNSSKSTLGGVNMKVLPAPKLKMTNNHIYSNKGYGVSILQPMEQFFIVAEEALNKRASSGDKKDDKMLFKVMQNLNLEMNNNKIEANVKGDIRIVTS

SEQ ID NO: 765193 - protein, 728 aa, Homo sapiens
MASGSKASVPADSFRTISPDRRGEKSASAVSGDTAAATTLKGTAIPVRSVVASPRPVKGKAGRETARLRLQRLPAAQAEDTGEAAAAAAEEPLLPVPEDEEEAQPLPPVCVSRMRGMWRDEKVSLYCDEVLQDCKVSGSGTGRLRSEARRNLGTGIWGFPLRRMGIHRAQRKLAFQKSKWSQHVYEQFTLLEVPASCPRGVKVRVSDKIRQAEDADEVMGKYLSEKLKLKDKWLGVWKTNPSVFFVKYEEASIPFVGILVEVTCEPYQDSSSRFKVTVSVAEPFSSNIANIPRDWLMRFWRNWNTVCLFWKCILLRDKILIYMLLLWPWKLSGFYDFLWRDWDDEESCENYTALIEERINLWCDIQDGTIPGPIAQRFKKTLEKYKNKRVELIEYQSNIKEDPSAAEAVECWKKYYEIVMLCGLLKMWEDLRLRVHGPFFPRILRRRKGKREFGKTITHIVAKMMTTEMIKDLSSDTLLQQHGDLDLALDNCYSGDTVIIFPGEYQAANLALLTDDIIIKGVGKREEIMITSEPSRDSFVVSKADNVKLMHLSLIQQGTVDGIVVVESGHMTLENCILKCEGTGVCVLTGAALTITDSEITGAQGAGVELYPGSIAILERNEIHHCNNLRTSNSSKSTLGGVNMKVLPAPKLKMTNNHIYSNKGYGVSILQPMEQFFIVAEEALNKRASSGDKKDDKMLFKVMQNLNLEMNNNKIEANVKGDIRIVTS

SEQ ID NO: 765194 - protein, 86 aa, Homo sapiens
PVESDLTCRLRGSKEEYVTCGAGCAQTRCAGSCRRSEPKGDGGRKWSVSDHQTRMRVNWEKMVRPPHPENPPPPAHTPSEHPGGGL

SEQ ID NO: 765195 - protein, 179 aa, Homo sapiens
EATLVGDRTTGLGGAQGLPDPPLPSQEILEAGVGVFLIWTSETHEKLSQMCLNTEWVEMKSKALLNEETVSSGIIERVTGLPATGFGAVFPRHPPDWSKMCALTTYSEDYVPPYDYQPHAYPCQDDYSIVHRKCRSQFTDLNGSKRFGINTWHDESGIYANSDVKQKLYPLTSGPIVPI

SEQ ID NO: 765196 - protein, 125 aa, Homo sapiens
EATLVGDRTTGLGGAQGLPDPPLPSQEILEAGVGVFLIWTSETHEKLSQMCLNTEWVEMKSKALLNEETVSSGIIERVTGLPATGFGAVFPRHPPDWSKMLVVPKLLQLYKMFLDSEGLFAGAKV

SEQ ID NO: 765197 - protein, 161 aa, Homo sapiens
KQHWLEIGPPDLVERKGSLTLRSHHKKYSKPVLVYSWHRDREAFPKGYDIEGPEKVKKLCNSTYRRLGTDESPIWTSETHEKLSQMCLNTEWVEMKSKALLNEETVSSGIIERVTGLPATGFGAVFPRHPPDWSKMLVVPKLLQLYKMFLDSEGLFAGAKV

SEQ ID NO: 765198 - protein, 179 aa, Homo sapiens; identical to SEQ ID NO: 765195

SEQ ID NO: 765199 - protein, 145 aa, Homo sapiens
KQHWLEIGPPDLVERKGSLTLRSHHKKYSKPVLVYSWHRDREAFPKGYDIEGPEKVKKLCNSTYRRLGTDESPIWTSETHEKLSQMCLNTEWVEMKSKALLNEETVSSGIIERVTGLPATGFGAVFPRHPPDWSKMLIPVKMIIP

SEQ ID NO: 765200 - protein, 125 aa, Homo sapiens; identical to SEQ ID NO: 765196

SEQ ID NO: 765201 - protein, 281 aa, Homo sapiens
AGVRTASRDPGAGFRRTANKRCCRRRFLIGCGWLPLRSDWPLVSKMLSKGLKRKREEEEEKEPLAVDSWWLDPGHTAVAQAPPAVASSSLFDLSVLKLHHSLQQSEPDLRHLVLVVNTLRRIQASMAPAAALPPVPSPPAAPSVADNLLASSDAALSASMASLLEDLSHIEGLSQAPQPLADEGPPGRSIGGAAPSLGALDLLGPATGCLLDDGLEGLFEDIDTSMYDNELWAPASEGLKPGPEDGPGKEEAPELDEAELDYLMDVLVGTQALERPPGPGR

SEQ ID NO: 765202 - protein, 87 aa, Homo sapiens
AGVRTASRDPGAGFRRTANKRCCRRRFLIGCGWLPLRSDWPLVSKMLSKGLKRKREEEEEKEPLAVDSWWLDPGHTAVVQEHGGLAL

SEQ ID NO: 765203 - protein, 281 aa, Homo sapiens; identical to SEQ ID NO: 765201

SEQ ID NO: 765204 - protein, 209 aa, Homo sapiens
MEPLAAYPLKCSGPRAKVFAVLLSIVLCTVTLFLLQLKFLKPKINSFYAFEVKDAKGRTVSLEKYKGKVSLVVNVASDCQLTDRNYLGLKELHKEFGPSHFSVLAFPCNQFGESEPRPSKEVESFARKNYGVTFPIFHKIKILGSEGEPAFRFLVDSSKKEPRWNFWKYLVNPEGQVVKFWRPEEPIEVIRPDIAALVRQVIIKKKEDL

SEQ ID NO: 765205 - protein, 158 aa, Homo sapiens [sequence omitted]

SEQ ID NO: 765206 - protein, 209 aa, Homo sapiens; identical to SEQ ID NO: 765204

SEQ ID NO: 765207 - protein, 210 aa, Homo sapiens
MEPLAAYPLKCSGPRAKVFAVLLSIVLCTVTLFLLQLKFLKPKINSFYAFEVKDAKGRTVSLEKYKGKVSLVVNVASDCQLTDRNYLGLKELHKEFGPSHFSVLAFPCNQFGESEPRPSKEVESFARKNYGVTFPIFHKIKILGSEGEPAFRFLVDSSKKEPRWNFWKYLVNPEGQVVKFWRPEEPIEVIRPDIAALVRQVIIKKKKNST

SEQ ID NO: 765208 - protein, 209 aa, Homo sapiens; identical to SEQ ID NO: 765204

SEQ ID NO: 765209 - protein, 209 aa, Homo sapiens; identical to SEQ ID NO: 765204

SEQ ID NO: 765210 - protein, 69 aa, Homo sapiens
RSACREGALGGAAGRGSHRYELGRPSNQRRRAVRGNLKCLTGWPGDGVSGSRAPGRPGRLQCPGERQEN

SEQ ID NO: 765211 - protein, 374 aa, Homo sapiens
MAKERRRAVLELLQRPGNARCADCGAPDPDWASYTLGVFICLSCSGIHRNIPQVSKVKSVRLDAWEEAQVEFMASHGNDAARARFESKVPSFYYRPTPSDCQLLREQWIRAKYERQEFIYPEKQEPYSAGYREGFLWKRGRDNGQFLSRKFVLTEREGALKYFNRNDAKEPKAVMKIEHLNATFQPAKIGHPHGLQVTYLKDNSTRNIFIYHEDGKEIVDWFNALRAARFHYLQVAFPGASDADLVPKLSRNYLKEGYMEKTGPKQTEGFRKRWFTMDDRRLMYFKDPLDAFARGEVFIGSKESGYTVLHGFPPSTQGHHWPHGITIVTPDRKFLFACETESDQREWVAAFQKAVDRPMLPQEYAVEAHFKHKP

SEQ ID NO: 765212 - protein, 374 aa, Homo sapiens; identical to SEQ ID NO: 765211

SEQ ID NO: 765213 - protein, 355 aa, Homo sapiens
VNVRLSLADPDWASYTLGVFICLSCSGIHRNIPQVSKVKSVRLDAWEEAQVEFMASHGNDAARARFESKVPSFYYRPTPSDCQLLREQWIRAKYERQEFIYPEKQEPYSAGYREGFLWKRGRDNGQFLSRKFVLTEREGALKYFNRNDAKEPKAVMKIEHLNATFQPAKIGHPHGLQVTYLKDNSTRNIFIYHEDGKEIVDWFNALRAARFHYLQVAFPGASDADLVPKLSRNYLKEGYMEKTGPKQTEGFRKRWFTMDDRRLMYFKDPLDAFARGEVFIGSKESGYTVLHGFPPSTQGHHWPHGITIVTPDRKFLFACETESDQREWVAAFQKAVDRPMLPQEYAVEAHFKHKP

SEQ ID NO: 765214 - protein, 390 aa, Homo sapiens
IPSAAVAERGRRECGTGARAEAARDGAGAAAAGGLRGALASRADAPGPGPGIGIAGASRPWPRSGAGRSWSCCSGRGTRAARTAAPRFMASHGNDAARARFESKVPSFYYRPTPSDCQLLREQWIRAKYERQEFIYPEKQEPYSAGYREGFLWKRGRDNGQFLSRKFVLTEREGALKYFNRNDAKEPKAVMKIEHLNATFQPAKIGHPHGLQVTYLKDNSTRNIFIYHEDGKEIVDWFNALRAARFHYLQVAFPGASDADLVPKLSRNYLKEGYMEKTGPKQTEGFRKRWFTMDDRRLMYFKDPLDAFARGEVFIGSKESGYTVLHGFPPSTQGHHWPHGITIVTPDRKFLFACETESDQREWVAAFQKAVDRPMLPQEYAVEAHFKHKP

SEQ ID NO: 765215 - protein, 137 aa, Homo sapiens
EDPRLSTLCSLHHWILKERLHGEDLGPKQTEGFRKRWFTMDDRRLMYFKDPLDAFARGEVFIGSKESGYTVLHGFPPSTQGHHWPHGITIVTPDRKFLFACETESDQREWVAAFQKAVDRPMLPQEYAVEAHFKHKP

SEQ ID NO: 765216 - protein, 274 aa, Homo sapiens
MAKERRRAVLELLQRPGNARCADCGAPDPDWASYTLGVFICLSCSGIHRNIPQVSKVKSVRLDAWEEAQVEFMASHGNDAARARFESKVPSFYYRPTPSDCQLLREQWIRAKYERQEFIYPEKQEPYSAGYREGFLWKRGRDNGQFLSRKFVLTEREGALKYFNRNDAKEPKAVMKIEHLNATFQPAKIGHPHGLQVTYLKDNSTRNIFIYHEDGKEIVDWFNALRAARFHYLQVAFPGASDADLVPKLSRNYLKEGYMEKTGPKNRSFRSAVT

SEQ ID NO: 765217 - protein, 253 aa, Homo sapiens
MAKERRRAVLELLQRPGNARCADCGAPDPDWASYTLGVFICLSCSGIHRNIPQVSKVKSVRLDAWEEAQVEFMASHGNDAARARFESKVPSFYYRPTPSDCQLLREQWIRAKYERQEFIYPEKQEPYSAGYREGFLWKRGRDNGQFLSRKFVLTEREGALKYFNRNDAKEPKAVMKIEHLNATFQPAKIGHPHGLQVTYLKDNSTRNIFIYHEDGKVGAGEHSGPGGTGGWALRPGWRRKVGAWTVREGRHLS

SEQ ID NO: 765218 - protein, 374 aa, Homo sapiens; identical to SEQ ID NO: 765211

SEQ ID NO: 765219 - protein, 407 aa, Homo sapiens
AGTRSATAAETRAAAAEPRGRRECGTGARGIAAMAKERRRAVLELLQRPGNARCADCGAPDPDWASYTLGVFICLSCSGIHRNIPQVSKVKSVRLDAWEEAQVEFMASHGNDAARARFESKVPSFYYRPTPSDCQLLREQWIRAKYERQEFIYPEKQEPYSAGYREGFLWKRGRDNGQFLSRKFVLTEREGALKYFNRNDAKEPKAVMKIEHLNATFQPAKIGHPHGLQVTYLKDNSTRNIFIYHEDGKEIVDWFNALRAARFHYLQVAFPGASDADLVPKLSRNYLKEGYMEKTGPKQTEGFRKRWFTMDDRRLMYFKDPLDAFARGEVFIGSKESGYTVLHGFPPSTQGHHWPHGITIVTPDRKFLFACETESDQREWVAAFQKAVDRPMLPQEYAVEAHFKHKP

SEQ ID NO: 765220 - protein, 374 aa, Homo sapiens; identical to SEQ ID NO: 765211

SEQ ID NO: 765221 - protein, 190 aa, Homo sapiens
MSSSALTCGSTLEKSGDTWEMKALDSSRLVPWPPRGLGSSTQHPNKPHCALASCQGPGVLPGAASALPELTFQGDVCQSETCQRYLQAAISLDIAVSQINLLGRPSSPPALLIQQGSCEQVIHNSTPQFLGMEDGDNERTTGWLWRLCEDIDAEPSSTGCSRSNQLTFTEGCFVRSLSTVYSNTHIHTHL

SEQ ID NO: 765222 - protein, 98 aa, Homo sapiens
ILALFLVTDFFSTEPAKAIKPIDRKSVHQICSGPVVPSLSTAVKELVENSLDAGATNIDLKLKDYGVDLIEVSGNGCGVEEENFEGLSKLTFSNPIIK

SEQ ID NO: 765223 - protein, 646 aa, Homo sapiens
MGLPRLVCAFLLAACCCCPRVAGVPGEAEQPAPELVEVEVGSTALLKCGLSQSQGNLSHVDWFSVHKEKRTLIFRVRQGQGQSEPGEYEQRLSLQDRGATLALTQVTPQDERIFLCQGKRPRSQEYRIQLRVYKAPEEPNIQVNPLGIPVNSKEPEEVATCVGRNGYPIPQVIWYKNGRPLKEEKNRVHIQSSQTVESSGLYTLQSILKAQLVKEDKDAQFYCELNYRLPSGNHMKESREVTVPVFYPTEKVWLEVEPVGMLKEGDRVEIRCLADGNPPPHFSISKQNPSTREAEEETTNDNGVLVLEPARKEHSGRYECQAWNLDTMISLLSEPQELLVNYVSDVRVSPAAPERQEGSSLTLTCEAESSQDLEFQWLREETDQVLERGPVLQLHDLKREAGGGYRCVASVPSIPGLNRTQLVKLAIFGPPWMAFKERKVWVKENMVLNLSCEASGHPRPTISWNVNGTASEQDQDPQRVLSTLNVLVTPELLETGVECTASNDLGKNTSILFLELVNLTTLTPDSNTTTGLSTSTASPHTRANSTSTERKLPEPESRGVVIVAVIVCILVLAVLGAVLYFLYKKGKLPCRRSGKQEITLPPSRKTELVVEVKSDKLPEEMGLLQGSSGDKRAPGDQGEKYIDLRH

SEQ ID NO: 765224 - protein, 646 aa, Homo sapiens; identical to SEQ ID NO: 765223

SEQ ID NO: 765225 - protein, 337 aa, Homo sapiens
MGLPRLVCAFLLAACCCCPRVAGVPGEAEQPAPELVEVEVGSTALLKCGLSQSQGNLSHVDWFSVHKEKRTLIFRVRQGQGQSEPGEYEQRLSLQDRGATLALTQVTPQDERIFLCQGKRPRSQEYRIQLRVYKAPEEPNIQVNPLGIPVNSKEPEEVATCVGRNGYPIPQVIWYKNGRPLKEEKNRVHIQSSQTVESSGLYTLQSILKAQLVKEDKDAQFYCELNYRLPSGNHMKESREVTVPVFYPTEKVWLEVEPVGMLKEGDRVEIRCLADGNPPPHFSISKQNPSTREAEEETTNDNPPCSLGSHSPLDGSRKTERQRGADKDEVYTVLHGD

SEQ ID NO: 765226 - protein, 360 aa, Homo sapiens
MNAPLGGIWLWLPLLLTWLTPEVNSSWWYMRATGGSSRVMCDNVPGLVSSQRQLCHRHPDVMRAISQGVAEWTAECQHQFRQHRWNCNTLDRDHSLFGRVLLRSSRESAFVYAISSAGVVFAITRACSQGEVKSCSCDPKKMGSAKDSKGIFDWGGCSDNIDYGIKFARAFVDAKERKGKDARALMNLHNNRAGRKAVKRFLKQECKCHGVSGSCTLRTCWLAMADFRKTGDYLWRKYNGAIQVVMNQDGTGFTVANERFKKPTKNDLVYFENSPDYCIRDREAGSLGTAGRVCNLTSRGMDSCEVMCCGRGYDTSHVTRMTKCGCKFHWCCAVRCQDCLEALDVHTCKAPKNADWTTAT

SEQ ID NO: 765227 - protein, 264 aa, Homo sapiens
MPAPVPPAPLELQHPGQGSQPFWQGPTPKACSQGEVKSCSCDPKKMGSAKDSKGIFDWGGCSDNIDYGIKFARAFVDAKERKGKDARALMNLHNNRAGRKAVKRFLKQECKCHGVSGSCTLRTCWLAMADFRKTGDYLWRKYNGAIQVVMNQDGTGFTVANERFKKPTKNDLVYFENSPDYCIRDREAGSLGTAGRVCNLTSRGMDSCEVMCCGRGYDTSHVTRMTKCGCKFHWCCAVRCQDCLEALDVHTCKAPKNADWTTAT

SEQ ID NO: 765228 - protein, 179 aa, Homo sapiens
MNAPLGGIWLWLPLLLTWLTPEVNSSWWYMRATGGSSRVMCDNVPGLVSSQRQLCHRHPDVMRAISQGVAEWTAECQHQFRQHRWNCNTLDRDHSLFGRVLLRSSRESAFVYAISSAGVVFAITRACSQGEVKSCSCDPKKMGSAKDSKGIFDWVLFGNSMTGCSAGRVVGPDHCLHPP

SEQ ID NO: 765229 - protein, 141 aa, Homo sapiens
FLTPEVRAGAEPGAFCHRAVKARGNMGLYAAAAGVLAGVESRQGSIKGLVYSSNFQNVKQLYALVCETQRYSAVLDAVIASAGLLRAEKKLRPHLAKVDGKHVVFGKVKEGMNIVEAMERFGSRNGKTSKKITIADCGQLE

SEQ ID NO: 765230 - protein, 444 aa, Homo sapiens
PTKTGPPCSVKARGNMGLYAAAAGVLAGVESRQGSIKGLVYSSNFQNVKQLYALVCETQRYSAVLDAVIASAGLLRAEKKLRPHLAKVLVYELLLGKGFRGGGGRWKALLGRHQARLKAELARLKVHRGVSRNEDLLEVGSRPGPASQLPRFVRVNTLKTCSDDVVDYFKRQGFSYQGRASSLDDLRALKGKHFLLDPLMPELLVFPAQTDLHEHPLYRAGHLILQDRASCLPAMLLDPPPGSHVIDACAAPGNKTSHLAALLKNQGKIFAFDLDAKRLASMATLLARAGVSCCELAEEDFLAVSPSDPRYHEVHYILLDPSCSGSGMPSRQLEEPGAGTPSPVRLHALAGFQQRALCHALTFPSLQRLVYSTCSLCQEENEDVVRDALQQNPGAFRLAPALPAWPHRGLSTFPGAEHCLRASPETTLSSGFFVAVIERVEVPR

SEQ ID NO: 765231 - protein, 475 aa, Homo sapiens
NLRSRYEAGCWLYAAAAGVLAGVESRQGSIKGLVYSSNFQNVKQLYALVCETQRYSAVLDAVIASAGLLRAEKKLRPHLAKVLVYELLLGKGFRGGGGRWKALLGRHQARLKAELARLKVHRGVSRNEDLLEVGSRPGPASQLPRFVRVNTLKTCSDDVVDYFKRQGFSYQGRASSLDDLRALKGKHFLLDPLMPELLVFPAQTDLHEHPLYRAGHLILQDRASCLPAMLLDPPPGSHVIDACAAPGNKTSHLAALLKNQGKIFAFDLDAKRLASMATLLARAGVSCCELAEEDFLAVSPSDPRYHEVHYILLDPSCSGSGMPSRQLEEPGAGTPSPVRLHALAGFQQRALCHALTFPSLQRLVYSTCSLCQEENEDVVRDALQQNPGAFRLAPALPAWPHRGLSTFPGAEHCLRASPETTLSSGFFVAVIERVEVPSSASQAKASAPERTPSPAPKRKKRQQRAAAGACTPPCT

SEQ ID NO: 765232 - protein, 100 aa, Homo sapiens
FDPGSPGGRRAGCVLPQSRKGAREHGAVCCSCRRVGRRGEPPGLYQGVGVLQQLPEREAAVRAGVRNAALLRRAGCCDRQRRPPPCGEEAAAAPGQGASV

SEQ ID NO: 765233 - protein, 277 aa, Homo sapiens
FLTPEVRAGAEPGAFCHRAVKARGNMGLYAAAAGVLAGVESRQGSIKGLVYSSNFQNVKQLYALVCETQRYSAVLDAVIASAGLLRAEKKLRPHLAKVLVYELLLGKGFRGGGGRWKALLGRHQARLKAELARLKVHRGVSRNEDLLEVGSRPGPASQLPRFVRVNTLKTCSDDVVDYFKRQGFSYQGRASSLDDLRALKGKHFLLDPLMPELLVFPAQTDLHEHPLYRAGHLILQDRASCLPAMLLDPPPGSHVIDACAAPGNKTSHLAALLKNQG

SEQ ID NO: 765234 - protein, 443 aa, Homo sapiens
PTKTGPPCSVKARGNMGLYAAAAGVLAGVESRQGSIKGLVYSSNFQNVKQLYALVCETQRYSAVLDAVIASAGLLRAEKKLRPHLAKVHRGVSRNEDLLEVGSRPGPASQLPRFVRVNTLKTCSDDVVDYFKRQGFSYQGRASSLDDLRALKGKHFLLDPLMPELLVFPAQTDLHEHPLYRAGHLILQDRASCLPAMLLDPPPGSHVIDACAAPGNKTSHLAALLKNQGKIFAFDLDAKRLASMATLLARAGVSCCELAEEDFLAVSPSDPRYHEVHYILLDPSCSGSGMPSRQLEEPGAGTPSPVRLHALAGFQQRALCHALTFPSLQRLVYSTCSLCQEENEDVVRDALQQNPGAFRLAPALPAWPHRGLSTFPGAEHCLRASPETTLSSGFFVAVIERVEVPSSASQAKASAPERTPSPAPKRKKRQQRAAAGACTPPCT

SEQ ID NO: 765235 - protein, 258 aa, Homo sapiens
DYDRTPVFRKGAREHGAVCCSCRRVGRRGEPPGLYQGNVKQLYALVCETQRYSAVLDAVIASAGLLRAEKKLRPHLAKVLVYELLLGKGFRGGGGRWKALLGRHQARLKAELARLKVHRGVSRNEDLLEVGSRPGPASQLPRFVRVNTLKTCSDDVVDYFKRQGFSYQGRASSLDDLRALKGKHFLLDPLMPELLVFPAQTDLHEHPLYRAGHLILQDRASCLPAMLLDPPPGSHVIDACAAPGNKTSHLAALLKNQG

SEQ ID NO: 765236 - protein, 263 aa, Homo sapiens
PTKTGPPCSVKARGNMGLYAAAAGVLAGVESRQGSIKGLVYSSNFQNVKQLYALVCETQRYSAVLDAVIASAGLLRAEKKLRPHLAKVHRGVSRNEDLLEVGSRPGPASQLPRFVRVNTLKTCSDDVVDYFKRQGFSYQGRASSLDDLRALKGKHFLLDPLMPELLVFPAQTDLHEHPLYRAGHLILQDRASCLPAMLLDPPPGSHVIDACAAPGNKTSHLAALLKNQGEIFALTGAKRWIMAAVAGWVLGTGGGPGPLVRLG

SEQ ID NO: 765237 - protein, 124 aa, Homo sapiens
PTKTGPPCSVKARGNMGLYAAAAGVLAGVESRQGSIKGLVYSSNFQNVKQLYALVCETQRYSAVLDAVIASAGLLRAEKKLRPHLAKVRGGEGRGSEPRRSALCHLVSALLPCTAGLEQVAHLK

SEQ ID NO: 765238 - protein, 454 aa, Homo sapiens
FLTPEVRAGAEPGAFCHRAVKARGNMGLYAAAAGVLAGVESRQGSIKGLVYSSNFQNVKQLYALVCETQRYSAVLDAVIASAGLLRAEKKLRPHLAKVLVYELLLGKGFRGGGGRWKALLGRHQARLKAELARLKVHRGVSRNEDLLEVGSRPGPASQLPRFVRVNTLKTCSDDVVDYFKRQGFSYQGRASSLDDLRALKGKHFLLDPLMPELLVFPAQTDLHEHPLYRAGHLILQDRASCLPAMLLDPPPGSHVIDACAAPGNKTSHLAALLKNQGKIFAFDLDAKRLASMATLLARAGVSCCELAEEDFLAVSPSDPRYHEVHYILLDPSCSGSGMPSRQLEEPGAGTPSPVRLHALAGFQQRALCHALTFPSLQRLVYSTCSLCQEENEDVVRDALQQNPGAFRLAPALPAWPHRGLSTFPGAEHCLRASPETTLSSGFFVAVIERVEVPR

SEQ ID NO: 765239 - protein, 491 aa, Homo sapiens
FLTPEVRAGAEPGAFCHRAVKARGNMGLYAAAAGVLAGVESRQGSIKGLVYSSNFQNVKQLYALVCETQRYSAVLDAVIASAGLLRAEKKLRPHLAKVLVYELLLGKGFRGGGGRWKALLGRHQARLKAELARLKVHRGVSRNEDLLEVGSRPGPASQLPRFVRVNTLKTCSDDVVDYFKRQGFSYQGRASSLDDLRALKGKHFLLDPLMPELLVFPAQTDLHEHPLYRAGHLILQDRASCLPAMLLDPPPGSHVIDACAAPGNKTSHLAALLKNQGKIFAFDLDAKRLASMATLLARAGVSCCELAEEDFLAVSPSDPRYHEVHYILLDPSCSGSGMPSRQLEEPGAGTPSPVRLHALAGFQQRALCHALTFPSLQRLVYSTCSLCQEENEDVVRDALQQNPGAFRLAPALPAWPHRGLSTFPGAEHCLRASPETTLSSGFFVAVIERVEVPSSASQAKASAPERTPSPAPKRKKRQQRAAAGACTPPCT

SEQ ID NO: 765240 - protein, 479 aa, Homo sapiens
MSLPGWGSLVTYVVRCSDTCERVLAGVESRQGSIKGLVYSSNFQNVKQLYALVCETQRYSAVLDAVIASAGLLRAEKKLRPHLAKVLVYELLLGKGFRGGGGRWKALLGRHQARLKAELARLKVHRGVSRNEDLLEVGSRPGPASQLPRFVRVNTLKTCSDDVVDYFKRQGFSYQGRASSLDDLRALKGKHFLLDPLMPELLVFPAQTDLHEHPLYRAGHLILQDRASCLPAMLLDPPPGSHVIDACAAPGNKTSHLAALLKNQGKIFAFDLDAKRLASMATLLARAGVSCCELAEEDFLAVSPSDPRYHEVHYILLDPSCSGSGMPSRQLEEPGAGTPSPVRLHALAGFQQRALCHALTFPSLQRLVYSTCSLCQEENEDVVRDALQQNPGAFRLAPALPAWPHRGLSTFPGAEHCLRASPETTLSSGFFVAVIERVEVPSSASQAKASAPERTPSPAPKRKKRQQRAAAGACTPPCT

SEQ ID NO: 765241 - protein, 382 aa, Homo sapiens
EYCTRLGGALLGRHQARLKAELARLKVHRGVSRNEDLLEVGSRPGPASQLPRFVRVNTLKTCSDDVVDYFKRQGFSYQGRASSLDDLRALKGKHFLLDPLMPELLVFPAQTDLHEHPLYRAGHLILQDRASCLPAMLLDPPPGSHVIDACAAPGNKTSHLAALLKNQGKIFAFDLDAKRLASMATLLARAGVSCCELAEEDFLAVSPSDPRYHEVHYILLDPSCSGSGMPSRQLEEPGAGTPSPVRLHALAGFQQRALCHALTFPSLQRLVYSTCSLCQEENEDVVRDALQQNPGAFRLAPALPAWPHRGLSTFPGAEHCLRASPETTLSSGFFVAVIERVEVPSSASQAKASAPERTPSPAPKRKKRQQRAAAGACTPPCT

SEQ ID NO: 765242 - protein, 245 aa, Homo sapiens
FLTPEVRAGAEPGAFCHRAVKARGNMGLYAAAAGVLAGVESRQGSIKGLVYSSNFQNVKQLYALVCETQRYSAVLDAVIASAGLLRAEKKLRPHLAKVLVYELLLGKGFRGGGGRWKALLGRHQARLKAELARLKVHRGVSRNEDLLEVGSRPGPASQLPRFVRVNTLKTCSDDVVDYFKRQGFSYQGRASSLDDLRALKGKHFLLDPLMPELLVFPAQTDLHEHPLYRAGIHGHAAGPGWRLLL

SEQ ID NO: 765243 - protein, 166 aa, Homo sapiens
FLTPEVRAGAEPGAFCHRAVKARGNMGLYAAAAGVLAGVESRQGSIKGLVYSSNFQNVKQLYALVCETQRYSAVLDAVIASAGLLRAEKKLRPHLAKVLVYELLLGKGFRGGGGRWKALLGRHQARLKAELARLKVHRGVSRNEDLLEVGSRPGPGKLEGVGGWGR

SEQ ID NO: 765244 - protein, 183 aa, Homo sapiens
RTRGSTHASACIFICENNRYGMGTSVERAAASTDYYKRGDFIPGLRVDGMDILCVREATRFAAAYCRSGKGPILMELQTYRYHGHSMSDPGVSYRTREEIQEVRSKSDPIMLLKDRMVNSNLASVEELKEIDVEVRKEIEDAAQFATADPEPPLEELGYHIYSSDPPFEVRGANQWIKFKSVS

SEQ ID NO: 765245 - protein, 224 aa, Homo sapiens
ITTLSRRGATEAWRLLGHLKETWGHPRRASWVVRSRRCRHCLCFMRKMLAAVSRVLSGASQKPASRVLVASRNFANDATFEIKKCDLHRLEEGPPVTTVLTREDGLKYYRMMQTVRRMELKADQLYKQKIIRGFCHLCDGQEACCVGLEAGINPTDHLITAYRAHGFTFTRGLSVREILAELTGRKGGCAKGKGGSMHMYAKNFYGGNGIVGAQVVKDEDCVLL

SEQ ID NO: 765246 - protein, 193 aa, Homo sapiens
ITTLSRRGATEAWRLLGHLKETWGHPRRASWVVRSRRCRHCLCFMRKMLAAVSRVLSGASQKPASRVLVASRNFANDATFEIKKCDLHRLEEGPPVTTVLTREDGLKYYRMMQTVRRMELKADQLYKQKIIRGFCHLCDGQEACCVGLEAGINPTDHLITAYRAHGFTFTRGLSVREILAELTGLLLIYRKGK

SEQ ID NO: 765247 - protein, 284 aa, Homo sapiens
IRARRAWGESAEKMLAAVSRVLSGASQKPASRVLVASRNFANDATFEIKKCDLHRLEEGPPVTTVLTREDGLKYYRMMQTVRRMELKADQLYKQKIIRGFCHLCDGQEACCVGLEAGINPTDHLITAYRAHGFTFTRGLSVREILAELTGRKGGCAKGKGGSMHMYAKNFYGGNGIVGAQGQIFEAYNMAALWKLPCIFICENNRYGMGTSVERAAASTDYYKRGDFIPGLRVDGMDILCVREATRFAAAYCRSGKGPSDGGCDLRSTAVLVTLESYGPEKKSG

SEQ ID NO: 765248 - protein, 419 aa, Homo sapiens
LRLGSEAWVVPRRASWVVRSRRCRHCLCFMRKMLAAVSRVLSGASQKPASRVLVASRNFANDATFEIKKCDLHRLEEGPPVTTVLTREDGLKYYRMMQTVRRMELKADQLYKQKIIRGFCHLCDGQEACCVGLEAGINPTDHLITAYRAHGFTFTRGLSVREILAELTGRKGGCAKGKGGSMHMYAKNFYGGNGIVGAQVPLGAGIALACKYNGKDEVCLTLYGDGAANQGQIFEAYNMAALWKLPCIFICENNRYGMGTSVERAAASTDYYKRGDFIPGLRVDGMDILCVREATRFAAAYCRSGKGPILMELQTYRYHGHSMSDPGVSYRTREEIQEVRSKSDPIMLLKDRMVNSNLASVEELKEIDVEVRKEIEDAAQFATADPEPPLEELGYHIYSSDPPFEVRGANQWIKFKSVS

SEQ ID NO: 765249 - protein, 271 aa, Homo sapiens
ITTLSRRGATEAWRLLGHLKETWGHPRRASWVVRSRRCRHCLCFMRKMLAAVSRVLSGASQKPASRVLVASRNFANDATFEIKKCDLHRLEEGPPVTTVLTREDGLKYYRMMQTVRRMELKADQLYKQKIIRGFCHLCDGQEACCVGLEAGINPTDHLITAYRAHGFTFTRGLSVREILAELTGRKGGCAKGKGGSMHMYAKNFYGGNGIVGAQVPLGAGIALACKYNGKDEVCLTLYGDGAANQVIMSLNFPKTVLFSKSLIFTVEFLKK

SEQ ID NO: 765250 - protein, 238 aa, Homo sapiens [sequence omitted]

SEQ ID NO: 765251 - protein, 343 aa, Homo sapiens
ITTLSRRGATEAWRLLGHLKETWGHPRRASWVVRSRRCRHCLCFMRKMLAAVSRVLSGASQKPRHGLATLPSLVSISFTRGLSVREILAELTGRKGGCAKGKGGSMHMYAKNFYGGNGIVGAQVPLGAGIALACKYNGKDEVCLTLYGDGAANQGQIFEAYNMAALWKLPCIFICENNRYGMGTSVERAAASTDYYKRGDFIPGLRVDGMDILCVREATRFAAAYCRSGKGPILMELQTYRYHGHSMSDPGVSYRTREEIQEVRSKSDPIMLLKDRMVNSNLASVEELKEIDVEVRKEIEDAAQFATADPEPPLEELGYHIYSSDPPFEVRGANQWIKFKSVS

SEQ ID NO: 765252 - protein, 403 aa, Homo sapiens
ITTLSRRGATEAWRLLGHLKETWGHPRRASWVVRSRRCRHCLCFMRKMLAAVSRVLSGASQKPASRVLVASRNFANDATFEIKKCDLHRLEEGPPVTTVLTREDGLKYYRMMQTVRRMELKADQLYKQKIIRGFCHLCDGQEACCVGLEAGINPTDHLITAYRAHGFTFTRGLSVREILAELTGRKGGCAKGKGGSMHMYAKNFYGGNGIVGAQGQIFEAYNMAALWKLPCIFICENNRYGMGTSVERAAASTDYYKRGDFIPGLRVDGMDILCVREATRFAAAYCRSGKGPILMELQTYRYHGHSMSDPGVSYRTREEIQEVRSKSDPIMLLKDRMVNSNLASVEELKEIDVEVRKEIEDAAQFATADPEPPLEELGYHIYSSDPPFEVRGANQWIKFKSVS

SEQ ID NO: 765253 - protein, 282 aa, Homo sapiens
MVEPQSTYLGCGLVCFVELVCSAHVYVLPFPGRKGGCAKGKGGSMHMYAKNFYGGNGIVGAQVPLGAGIALACKYNGKDEVCLTLYGDGAANQGQIFEAYNMAALWKLPCIFICENNRYGMGTSVERAAASTDYYKRGDFIPGLRVDGMDILCVREATRFAAAYCRSGKGPILMELQTYRYHGHSMSDPGVSYRTREEIQEVRSKSDPIMLLKDRMVNSNLASVEELKEIDVEVRKEIEDAAQFATADPEPPLEELGYHIYSSDPPFEVRGANQWIKFKSVS

SEQ ID NO: 765254 - protein, 249 aa, Homo sapiens
LAADQALPAPSASPQELATTSTMPYQYPAVPLGAGIALACKYNGKDEVCLTLYGDGAANQGQIFEAYNMAALWKLPCIFICENNRYGMGTSVERAAASTDYYKRGDFIPGLRVDGMDILCVREATRFAAAYCRSGKGPILMELQTYRYHGHSMSDPGVSYRTREEIQEVRSKSDPIMLLKDRMVNSNLASVEELKEIDVEVRKEIEDAAQFATADPEPPLEELGYHIYSSDPPFEVRGANQWIKFKSVS

SEQ ID NO: 765255 - protein, 98 aa, Homo sapiens
  misc_feature (7)..(8): Xaa can be any naturally occurring amino acid
WIGFERXXYRTREEIQEVRSKSDPIMLLKDRMVNSNLASVEELKEIDVEVRKEIEDAAQFATADPEPPLEELGYHIYSSDPPFEVRGANQWIKFKSVS

SEQ ID NO: 765256 - protein, 74 aa, Homo sapiens
AEVTLEDFWKRLLASVEELKEIDVEVRKEIEDAAQFATADPEPPLEELGYHIYSSDPPFEVRGANQWIKFKSVS

SEQ ID NO: 765257 - protein, 96 aa, Homo sapiens
VDAMKLGVKEMKKAEAGRRLRMLPSLPRPILSHLWKSWATTSTPATHLLKFVVPISGSSLSQSVKGRRRRGYTFRGLPDSVLNLVKEEENPVNEIQ

SEQ ID NO: 765258 - protein, 224 aa, Homo sapiens; identical to SEQ ID NO: 765245

SEQ ID NO: 765259 - protein, 434 aa, Homo sapiens
ITTLSRRGATEAWRLLGHLKETWGHPRRASWVVRSRRCRHCLCFMRKMLAAVSRVLSGASQKPASRVLVASRNFANDATFEIKKCDLHRLEEGPPVTTVLTREDGLKYYRMMQTVRRMELKADQLYKQKIIRGFCHLCDGQEACCVGLEAGINPTDHLITAYRAHGFTFTRGLSVREILAELTGRKGGCAKGKGGSMHMYAKNFYGGNGIVGAQVPLGAGIALACKYNGKDEVCLTLYGDGAANQGQIFEAYNMAALWKLPCIFICENNRYGMGTSVERAAASTDYYKRGDFIPGLRVDGMDILCVREATRFAAAYCRSGKGPILMELQTYRYHGHSMSDPGVSYRTREEIQEVRSKSDPIMLLKDRMVNSNLASVEELKEIDVEVRKEIEDAAQFATADPEPPLEELGYHIYSSDPPFEVRGANQWIKFKSVS

SEQ ID NO: 765260 - protein, 109 aa, Homo sapiens
MELQTYRYHGHSMSDPGVSYRTREEIQEVRSKSDPIMLLKDRMVNSNLASVEELKEIDVEVRKEIEDAAQFATADPEPPLEELGYHIYSSDPPFEVRGANQWIKFKSVS

SEQ ID NO: 765261 - protein, 284 aa, Homo sapiens
ITTLSRRGATEAWRLLGHLKETWGHPRRASWVVRSRRCRHCLCFMRKMLAAVSRVLSGASQKPRHGLATLPSLVSISRLKQSSHLGLPKCWDYSHSLKTRQASRVLVASRNFANDATFEIKKCDLHRLEEGPPVTTVLTREDGLKYYRMMQTVRRMELKADQLYKQKIIRGFCHLCDGQEACCVGLEAGINPTDHLITAYRAHGFTFTRGLSVREILAELTGRKGGCAKGKGGSMHMYAKNFYGGNGIVGAQAPGAGDGLPVSFGGHEGWGIIWEGVVTRRIQV

SEQ ID NO: 765262 - protein, 434 aa, Homo sapiens; identical to SEQ ID NO: 765259

SEQ ID NO: 765263 - protein, 472 aa, Homo sapiens
ITTLSRRGATEAWRLLGHLKETWGHPRRASWVVRSRRCRHCLCFMRKMLAAVSRVLSGASQKPRHGLATLPSLVSISRLKQSSHLGLPKCWDYSHSLKTRQASRVLVASRNFANDATFEIKKCDLHRLEEGPPVTTVLTREDGLKYYRMMQTVRRMELKADQLYKQKIIRGFCHLCDGQEACCVGLEAGINPTDHLITAYRAHGFTFTRGLSVREILAELTGRKGGCAKGKGGSMHMYAKNFYGGNGIVGAQVPLGAGIALACKYNGKDEVCLTLYGDGAANQGQIFEAYNMAALWKLPCIFICENNRYGMGTSVERAAASTDYYKRGDFIPGLRVDGMDILCVREATRFAAAYCRSGKGPILMELQTYRYHGHSMSDPGVSYRTREEIQEVRSKSDPIMLLKDRMVNSNLASVEELKEIDVEVRKEIEDAAQFATADPEPPLEELGYHIYSSDPPFEVRGANQWIKFKSVS

SEQ ID NO: 765264 - protein, 418 aa, Homo sapiens
ITTLSRRGATEAWRLLGHLKETWGHPRRASWVVRSRRCRHCLCFMRKMLAAVSRVLSGASQKPASRVLVASRNFANDATFEIKKCDLHRLEEGPPVTTVLTREDGLKYYRMMQTVRRMELKADQLYKQKIIRGFCHLCDGQEACCVGLEAGINPTDHLITAYRAHGFTFTRGLSVREILAELTGRKGGCAKGKGGSMHMYAKNFYGGNGIVGAQVPLGAGIALACKYNGGQIFEAYNMAALWKLPCIFICENNRYGMGTSVERAAASTDYYKRGDFIPGLRVDGMDILCVREATRFAAAYCRSGKGPILMELQTYRYHGHSMSDPGVSYRTREEIQEVRSKSDPIMLLKDRMVNSNLASVEELKEIDVEVRKEIEDAAQFATADPEPPLEELGYHIYSSDPPFEVRGANQWIKFKSVS

SEQ ID NO: 765265 - protein, 500 aa, Homo sapiens
  misc_feature (413)..(413): Xaa can be any naturally occurring amino acid
ITTLSRRGATEAWRLLGHLKETWGHPRRASWVVRSRRCRHCLCFMRKMLAAVSRVLSGASQKPASRVLVASRNFANDATFEIKKCDLHRLEEGPPVTTVLTREDGLKYYRMMQTVRRMELKADQLYKQKIIRGFCHLCDGQEACCVGLEAGINPTDHLITAYRAHGFTFTRGLSVREILAELTGRKGGCAKGKGGSMHMYAKNFYGGNGIVGAQVPLGAGIALACKYNGKDEVCLTLYGDGAANQGQIFEAYNMAALWKLPCIFICENNRYGMGTSVERAAASTDYYKRGDFIPGLRVDGMDILCVREATRFAAAYCRSGKGPILMELQTYRYHGHSMSDPGVSYRTREEIQEVRSKSDPIMLLKDRMVNSNLASVEELKDMVLEVRQEMGMCQLAGRSETPGHDRATPFIPXNHSGVSVAPGANLNHHQGGRREYTPRRHQGSMGREKHVETEWRPSVGLNMTGKLHYVKQHLAERESSFITEYFNTYFDVFSLVSPTS

SEQ ID NO: 765266 - protein, 276 aa, Homo sapiens
MVRKLAVWAWRPASTPQTISSQPTGLTALLSPGAFPSEKFSQSLQFYGGNGIVGAQVPLGAGIALACKYNGKDEVCLTLYGDGAANQGQIFEAYNMAALWKLPCIFICENNRYGMGTSVERAAASTDYYKRGDFIPGLRVDGMDILCVREATRFAAAYCRSGKGPILMELQTYRYHGHSMSDPGVSYRTREEIQEVRSKSDPIMLLKDRMVNSNLASVEELKEIDVEVRKEIEDAAQFATADPEPPLEELGYHIYSSDPPFEVRGANQWIKFKSVS

SEQ ID NO: 765267 - protein, 181 aa, Homo sapiens
MAALWKLPCIFICENNRYGMGTSVERAAASTDYYKRGDFIPGLRVDGMDILCVREATRFAAAYCRSGKGPILMELQTYRYHGHSMSDPGVSYRTREEIQEVRSKSDPIMLLKDRMVNSNLASVEELKEIDVEVRKEIEDAAQFATADPEPPLEELGYHIYSSDPPFEVRGANQWIKFKSVS

SEQ ID NO: 765268 - protein, 71 aa, Homo sapiens
LEDLPNTAILPVWNELKEIDVEVRKEIEDAAQFATADPEPPLEELGYHIYSSDPPFEVRGANQWIKFKSVS

SEQ ID NO: 765269 - protein, 84 aa, Homo sapiens
YWGLIYTYIIYVITGLTLGSSNLASVEELKEIDVEVRKEIEDAAQFATADPEPPLEELGYHIYSSDPPFEVRGANQWIKFKSVS

SEQ ID NO: 765270 - protein, 141 aa, Homo sapiens
ITTLSRRGATEAWRLLGHLKETWGHPRRASWVVRSRRCRHCLCFMRKMLAAVSRVLSGASQKPASRVLVASRNFANDATFEIKKCDLHRLEEGPPVTTVLTREDGLKYYRMMQTVRRMELKADQLYKGVVVHACNPSYLGG

SEQ ID NO: 765271 - protein, 108 aa, Homo sapiens
HVGQAGLKLRTSSDPPPLASQSARITGVSHHTQPHVLSFIQSEYRQNKGTHTFGVWTKERFSRDSPPVLNVVIAQKSNIALCIMSIDEICLQHQRGFGPRDQMWPQLP

SEQ ID NO: 765272 - protein, 511 aa, Homo sapiens
VLRCRGWYDKVVYKLHYYHDGQAVRYFHSSANYTVLQARASDSGRYQCSGTMRIPVESAPMFSAKVAVTVQGGRDQGPREGGKCSIEKFWDRSSARKEGAEVQIAATWRVSLRLWTLSPLLCREAALDPPPAWRLVPFPDAHPGFSLWLGTPTERAALAGAGATVGLGRRSDSLASCKAGAASPILGCRTRAECQSGCDMKRLAWSLFLSSFPRPSWTRSPCPTFQKAPLPPPRGHTASSPPPLVCGSARSPRGKQEGAGSGAVDKPAPLLPALSVELFRAPVLRVMGPREARGAALGGVVLRCDTRLHPQKRDTPLQFAFYKYSRAVRRFDWGAEYTVPEPEVEELESYWCEAATATRSVRKRSPWLQLPGPGSPLDPASTTAPAPWAAALAPGNRPLSFRKPPVSRSVPLVTSVRNTTSTGLQFPASGAPTAGPPACAPPTPLEQSAGALKPDVDLLLREMQLLKGLLSRVVLELKEPQALRELRGTPETPTSHFAVSPGTPETTPVES

SEQ ID NO: 765273 - protein, 148 aa, Homo sapiens
PRVTGRNAFTGSPLDPASTTAPAPWAAALAPGNRPLSFRKPPVSRSVPLVTSVRNTTSTGLQFPASGAPTAGPPACAPPTPLEQSAGALKPDVDLLLREMQLLKGLLSRVVLELKEPQALRELRGTPETPTSHFAVSPGTPETTPVES

SEQ ID NO: 765274 - protein, 511 aa, Homo sapiens; identical to SEQ ID NO: 765272

SEQ ID NO: 765275 - protein, 306 aa, Homo sapiens
VLRCRGWYDKVVYKLHYYHDGQAVRYFHSSANYTVLQARASDSGRYQCSGTMRIPVESAPMFSAKVAVTVQELFRAPVLRVMGPREARGAALGGVVLRCDTRLHPQKRDTPLQFAFYKYSRAVRRFDWGAEYTVPEPEVEELESYWCEAATATRSVRKRSPWLQLPGPGSPLDPASTTAPAPWAAALAPGNRPLSFRKPPVSRSVPLVTSVRNTTSTGLQFPASGAPTAGPPACAPPTPLEQSAGALKPDVDLLLREMQLLKGLLSRVVLELKEPQALRELRGTPETPTSHFAVSPGTPETTPVES

SEQ ID NO: 765276 - protein, 261 aa, Homo sapiens
  misc_feature (253)..(253): Xaa can be any naturally occurring amino acid
TGLERLCDPLRTTELENYVYQGRQECYAFNGTQRFLERYIYNREEFVRFDSDVGEFRAVTELGRPDAEYWNSQKDILEEKRAVPDRVCRHNYELDEAVTLQRRVQPKVNVSPSKKGPLQHHNLLVCHVTDFYPGSIQVRWFLNGQEETAGVVSTNLIRNGDWTFQILVMLEMTPQQGDVYICQVEHTSLDSPVTVEWKAQSDSARSKTLTGAGGFVLGLIICGVGIFMHRRSKKVHEDLINKVSDLTKDLCAXNSICGFVT

SEQ ID NO: 765277 - protein, 257 aa, Homo sapiens
MVLQVSAAPRTVALTALLMVLLTSVVQGRATPENYVYQGRQECYAFNGTQRFLERYIYNREEFVRFDSDVGEFRAVTELGRPDAEYWNSQKDILEEKRAVPDRVCRHNYELDEAVTLQRRVQPKVNVSPSKKGPLQHHNLLVCHVTDFYPGSIQVRWFLNGQEETAGVVSTNLIRNGDWTFQILVMLEMTPQQGDVYICQVEHTSLDSPVTVEWKAQSDSARSKTLTGAGGFVLGLIICGVGIFMHRRSKKVQRGSA

SEQ ID NO: 765278 - protein, 257 aa, Homo sapiens; identical to SEQ ID NO: 765277

SEQ ID NO: 765279 - protein, 240 aa, Homo sapiens
TGLERLCDPLRTTELENYVYQGRQECYAFNGTQRFLERYIYNREEFVRFDSDVGEFRAVTELGRPDAEYWNSQKDILEEKRAVPDRVCRHNYELDEAVTLQRRVQPKVNVSPSKKGPLQHHNLLVCHVTDFYPGSIQVRWFLNGQEETAGVVSTNLIRNGDWTFQILVMLEMTPQQGDVYICQVEHTSLDSPVTVEWKAQSDSARSKTLTGAGGFVLGLIICGVGIFMHRRSKKVQRGSA

SEQ ID NO: 765280 - protein, 194 aa, Homo sapiens
PDCLIRPPQFRAVTELGRPDAEYWNSQKDILEEKRAVPDRICRHNYELDEAVTLQRRVQPKVNVSPSKKGPLQHHNLLVCHVTDFYPGSIQVRWFLNGQEETAGVVSTNLIRNGDWTFQILVMLEMTPQQGDVYICQVEHTSLDSPVTVEWKAQSDSARSKTLTGAGGFVLGLIICGVGIFMHRRSKKVQRGSA

SEQ ID NO: 765281 - protein, 189 aa, Homo sapiens
CALDGLPLLRLWGADAEYWNSQKDILEEKRAVPDRICRHNYELDEAVTLQRRVQPKVNVSPSKKGPLQHHNLLVCHVTDFYPGSIQVRWFLNGQEETAGVVSTNLIRNGDWTFQILVMLEMTPQQGDVYICQVEHTSLDSPVTVEWKAQSDSARSKTLTGAGGFVLGLIICGVGIFMHRRSKKVQRGSA

SEQ ID NO: 765282 - protein, 227 aa, Homo sapiens
MVLQVSAAPRTVALTALLMVLLTSVVQGRATPENYVYQGRQECYAFNGTQRFLERYIYNREEFVRFDSDVGEFRAVTELGRPDAEYWNSQKDILEEKRAVPDRVCRHNYELDEAVTLQRRGSIQVRWFLNGQEETAGVVSTNLIRNGDWTFQILVMLEMTPQQGDVYICQVEHTSLDSPVTVEWKAQSDSARSKTLTGAGGFVLGLIICGVGIFMHRRSKKVQRGSA

SEQ ID NO: 765283 - protein, 205 aa, Homo sapiens
MVLQVSAAPRTVALTALLMVLLTSVVQGRATPENYVYQGRQECYAFNGTQRFLERYIYNREEFVRFDSDVGEFRAVTELGRPDAEYWNSQKDILEEKRAVPDRVCRHNYELDEAVTLQRRVQPKVNVSPSKKGPLQHHNLLVCHVTDFYPGSIQVRWFLNGQEETAGVVSTNLIRNGDWTFQILVMLEMTPQQGRHSLILPGVRH

SEQ ID NO: 765284 - protein, 230 aa, Homo sapiens
MVLQVSAAPRTVALTALLMVLLTSVVQGRATPENYVYQGRQECYAFNGTQRFLERYIYNREEFVRFDSDVGEFRAVTELGRPDAEYWNSQKDILEEKRAVPDRVCRHNYELDEAVTLQRRVQPKVNVSPSKKGPLQHHNLLVCHVTDFYPGSIQVRWFLNGQEETAGVVSTNLIRNGDWTFQILVMLEMTPQQGDVYICQVEHTSLDSPVTVEWKAQSDSARSKTFAVFC

SEQ ID NO: 765285 - protein, 231 aa, Homo sapiens
MVLQVSAAPRTVALTALLMVLLTSVVQGRATPENYVYQGRQECYAFNGTQRFLERYIYNREEFVRFDSDVGEFRAVTELGRPDAEYWNSQKDILEEKRAVPDRVCRHNYELDEAVTLQRRVQPKVNVSPSKKGPLQHHNLLVCHVTDFYPGSIQVRWFLNGQEETAGVVSTNLIRNGDWTFQILVMLEMTPQQGDVYICQVEHTSLDSPVTVEWNAQEEQESSTRICINGS

SEQ ID NO: 765286 - protein, 248 aa, Homo sapiens
  misc_feature (221)..(221): Xaa can be any naturally occurring amino acid
MVLQVSAAPRTVALTALLMVLLTSVVQGRATPENYVYQGRQECYAFNGTQRFLERYIYNREEFVRFDSDVGEFRAVTELGRPDAEYWNSQKDILEEKRAVPDRVCRHNYELDEAVTLQRRVQPKVNVSPSKKGPLQHHNLLVCHVTDFYPGSIQVRWFLNGQEETAGVVSTNLIRNGDWTFQILVMLEMTPQQGDVYICQVEHTSLDSLARGGGRPADSPXVLTGRGAKLGPSSGRGSHARDEKSRGC

SEQ ID NO: 765287 - protein, 216 aa, Homo sapiens
MVLQVSAAPRTVALTALLMVLLTSVVQGRATPENYVYQGRQECYAFNGTQRFLERYIYNREEFVRFDSDVGEFRAVTELGRPDAEYWNSQKDILEEKRAVPDRVCRHNYELDEAVTLQRRVQPKVNVSPSKKGPLQHHNLLVCHVTDFYPGSIQVRWFLNGQEETAGVVSTNLIRNGDWTFQILVMLEMTPQQGRSPQLPSMSYSGQNQTVPSTPR

SEQ ID NO: 765288 - protein, 186 aa, Homo sapiens
  misc_feature (179)..(179): Xaa can be any naturally occurring amino acid
MVLQVSAAPRTVALTALLMVLLTSVVQGRATPENYVYQGRQECYAFNGTQRFLERYIYNREEFVRFDSDVGEFRAVTELGRPDAEYWNSQKDILEEKRAVPDRVCRHNYELDEAVTLQRRVQPRVNVAHSTDDEPQHEAPSSRQCLTPGRIRLCLPLHGDRTVQAGVLHLADVDISLLXGHFQHRV

SEQ ID NO: 765289 - protein, 186 aa, Homo sapiens; identical to SEQ ID NO: 765288
  misc_feature (179)..(179): Xaa can be any naturally occurring amino acid

SEQ ID NO: 765290 - protein, 459 aa, Homo sapiens
MAPLCPSPWLPLLIPAPAPGLTVQLLLSLLLLMPVHPQRLPRMQEDSPLGGGSSGEDDPLGEEDLPSEEDSPREEDPPGEEDLPGEEDLPGEEDLPEVKPKSEEEGSLKLEDLPTVEAPGDPQEPQNNAHRDKEGDDQSHWRYGGDPPWPRVSPACAGRFQSPVDIRPQLAAFCPALRPLELLGFQLPPLPELRLRNNGHSVQLTLPPGLEMALGPGREYRALQLHLHWGAAGRPGSEHTVEGHRFPAEIHVVHLSTAFARVDEALGRPGGLAVLAAFLEEGPEENSAYEQLLSRLEEIAEEGSETQVPGLDISALLPSDFSRYFQYEGSLTTPPCAQGVIWTVFNQTVMLSAKQLHTLSDTLWGPGDSRLQLNFRATQPLNGRVIEASFPAGVDSSPRAAEPVQLNSCLAAGDILALVFGLLFAVTSVAFLVQMRRQHRRGTKGGVSYRPAEVAETGA

SEQ ID NO: 765291 - protein, 222 aa, Homo sapiens
MAPLCPSPWLPLLIPAPAPGLTVQLLLSLLLLMPVHPQRLPRMQEDSPLGGGSSGEDDPLGEEDLPSEEDSPREEDPPGEEDLPGEEDLPGEEDLPEVKPKSEEEGSLKLEDLPTVEAPGDPQEPQNNAHRDKEGDDQSHCRYGGQAALGQGLHNDLRRAHLQLCRRLQRHHHHLLVLDDQVAELALPRVVVLYPVVDLHVPPQVGLSGKLVATLGALKLPH

SEQ ID NO: 765292 - protein, 428 aa, Homo sapiens
MAPLCPSPWLPLLIPAPAPGLTVQLLLSLLLLMPVHPQRLPRMQEDSPLGGGSSGEDDPLGEEDLPSEEDSPREEDPPGEEDLPGEEDLPGEEDLPEVKPKSEEEGSLKLEDLPTVEAPGDPQEPQNNAHRDKEGDDQSHWRYGGDPPWPRVSPACAGRFQSPVDIRPQLAAFCPALRPLELLGFQLPPLPELRLRNNGHSVQLTLPPGLEMALGPGREYRALQLHLHWGAAGRPGSEHTVEGHRFPAEEGPEENSAYEQLLSRLEEIAEEGSETQVPGLDISALLPSDFSRYFQYEGSLTTPPCAQGVIWTVFNQTVMLSAKQLHTLSDTLWGPGDSRLQLNFRATQPLNGRVIEASFPAGVDSSPRAAEPVQLNSCLAAGDILALVFGLLFAVTSVAFLVQMRRQHRRGTKGGVSYRPAEVAETGA

SEQ ID NO: 765293 - protein, 502 aa, Homo sapiens
MFGTLLLYCFFLATVPALAETGGERQLSPEKSEIWGPGLKADVVLPARYFYIQAVDTSGNKFTSSPGEKVFQVKVSAPEEQFTRVGVQVLDRKDGSFIVRYRMYASYKNLKVEIKFQGQHVAKSPYILKGPVYHENCDCPLQDSAAWLREMNCPETIAQIQRDLAHFPAVDPEKIAVEIPKRFGQRQSLCHYTLKDNKVYIKTHGEHVGFRIFMDAILLSLTRKVKMPDVELFVNLGDWPLEKKKSNSNIHPIFSWCGSTDSKDIVMPTYDLTDSVLETMGRVSLDMMSVQANTGPPWESKNSTAVWRGRDSRKERLELVKLSRKHPELIDAAFTNFFFFKHDENLYGPIVKHISFFDFFKHKYQINIDGTVAAYRLPYLLVGDSVVLKQDSIYYEHFYNELQPWKHYIPVKSNLSDLLEKLKWAKDHDEEAKKIAKAGQEFARNNLMGDDIFCYYFKLFQEYANLQVSEPQIREGMKRVEPQTEDDLFPCTCHRKKTKDEL

SEQ ID NO: 765294 - protein, 112 aa, Homo sapiens
  misc_feature (28)..(28): Xaa can be any naturally occurring amino acid
MDTALLLKPPKIFFSAPGIYPRAHPPIXRPTPLLQTVLGKLLISPLTKAMFFFPGQGFGPGTSQTHGWSKRLPIGAQAKDSQSRPNFAKKNLMGDDIFGIISHFSRNMPIYK

SEQ ID NO: 765295 - protein, 218 aa, Homo sapiens
MALLTAAARLLGTKNASCLVLAARHASASSTNLKDILADLIPKEQARIKTFRQQHGKTVVGQITVDMMYGGMRGMKGLVYETSVLDPDEGIRFRGFSIPECQKLLPKAKGGEEPLPEGLFWLLVTGHIPTEEQVSWLSKEWAKRAALPSHVVTMLDNFPTNLHPMSQLSAAVTALNSESNFARAYAQGISRTKYWEMMKKTMVYRKYCLSKLPNPRRQ

SEQ ID NO: 765296 - protein, 96 aa, Homo sapiens
PVGGASLRTPGWAPPPVRLLFPSAASFFNLVNPSARPLVQRRRLLFLPQLSPFLTSPPDPGDRPPWLYLLRPPGSWEPRMHLVLFLQPGMPVLPPR

SEQ ID NO: 765297 - protein, 466 aa, Homo sapiens [sequence omitted]

SEQ ID NO: 765298 - protein, 399 aa, Homo sapiens [sequence omitted]

SEQ ID NO: 765299 - protein, 399 aa, Homo sapiens [sequence omitted]

SEQ ID NO: 765300 - protein, 399 aa, Homo sapiens [sequence omitted]

SEQ ID NO: 765301 - protein, 399 aa, Homo sapiens [sequence omitted]

SEQ ID NO: 765302 - protein, 466 aa, Homo sapiens [sequence omitted]

SEQ ID NO: 765303 - protein, 466 aa, Homo sapiens [sequence omitted]

SEQ ID NO: 765304 - protein, 466 aa, Homo sapiens [sequence omitted]

SEQ ID NO: 765305 - protein, 399 aa, Homo sapiens [sequence omitted]

SEQ ID NO: 765306 - protein, 466 aa, Homo sapiens [sequence omitted]

SEQ ID NO: 765307 - protein, 420 aa, Homo sapiens
PRWRPRVNRPRRWSGHITVDMMYGGMRGMKGLVYETSVLDPDEGIRFRGFSIPECQKLLPKAKGGEEPLPEGLFWLLVTGHIPTEEQVSWLSKEWAKRAALPSHVVTMLDNFPTNLHPMSQLSAAVTALNSESNFARAYAQGISRTKYWELIYEDSMDLIAKLPCVAAKIYRNLYREGSGIGAIDSNLDWSHNFTNMLGYTDHQFTELTRLYLTIHSDHEGGNVSAHTSHLVGSALSDPYLSFAAAMNGLAGPLHGLANQEVLVWLTQLQKEVGKDVSDEKLRDYIWNTLNSGRVVPGYGHAVLRKTDPRYTCQREFALKHLPNDPMFKLVAQLYKIVPNVLLEQGKAKNPWPNVDAHSGVLLQYYGMTEMNYYTVLFGVSRALGVLAQLIWSRALGFPLERPKSMSTEGLMKFVDSKSG

SEQ ID NO: 765308 - protein, 550 aa, Homo sapiens
MALLTAAARLLGTKNASCLVLAARHASASSTNLKDILADLIPKEQARIKTFRQQHGKTVVGQITVDMMYGGMRGMKGLVYETSVLDPDEGIRFRGFSIPECQKLLPKAKGGEEPLPEGLFWLLVTGHIPTEEQVKQKDIISSSHSPSSLPFSNLRHLMLIRHLYEMRSEGKESAEFCCINGLGDLSWVFFTQMLLSFFIFLLPCPCWCSEHCLFFQQVSWLSKEWAKRAALPSHVVTMLDNFPTNLHPMSQLSAAVTALNSESNFARAYAQGISRTKYWELIYEDSMDLIAKLPCVAAKIYRNLYREGSGIGAIDSNLDWSHNFTNMLGYTDHQFTELTRLYLTIHSDHEGGNVSAHTSHLVGSALSDPYLSFAAAMNGLAGPLHGLANQEVLVWLTQLQKEVGKDVSDEKLRDYIWNTLNSGRVVPGYGHAVLRKTDPRYTCQREFALKHLPNDPMFKLVAQLYKIVPNVLLEQGKAKNPWPNVDAHSGVLLQYYGMTEMNYYTVLFGVSRALGVLAQLIWSRALGFPLERPKSMSTEGLMKFVDSKSG

SEQ ID NO: 765309 - protein, 278 aa, Homo sapiens
PRADSARGLIYEDSMDLIAKLPCVAAKIYRNLYREGSGIGAIDSNLDWSHNFTNMLGYTDHQFTELTRLYLTIHSDHEGGNVSAHTSHLVGSALSDPYLSFAAAMNGLAGPLHGLANQEVLVWLTQLQKEVGKDVSDEKLRDYIWNTLNSGRVVPGYGHAVLRKTDPRYTCQREFALKHLPNDPMFKLVAQLYKIVPNVLLEQGKAKNPWPNVDAHSGVLLQYYGMTEMNYYTVLFGVSRALGVLAQLIWSRALGFPLERPKSMSTEGLMKFVDSKSG

SEQ ID NO: 765310 - protein, 466 aa, Homo sapiens [sequence omitted]

SEQ ID NO: 765311 - protein, 466 aa, Homo sapiens [sequence omitted]

SEQ ID NO: 765312 - protein, 466 aa, Homo sapiens [sequence omitted]

SEQ ID NO: 765313 - protein, 466 aa, Homo sapiens [sequence omitted]

SEQ ID NO: 765314 - protein, 368 aa, Homo sapiens
MALLTAAARLLGTKNASCLVLAARHASASSTNLKDILADLIPKEQARIKTFRQQHGKTVVGQITVDMMYGGMRGMKGLVYETSVLDPDEGIRFRGFSIPECQKLLPKAKGGEEPLPEGLFWLLVTGHIPTEEQVSWLSKEWAKRAALPSHVVTMLDNFPTNLHPMSQLSAAVTALNSESNFARAYAQGISRTKYWELIYEDSMDLIAKLPCVAAKIYRNLYREGSGIGAIDSNLDWSHNFTNMLGYTDHQFTELTRLYLTIHSDHEGGNVSAHTSHLVGSALSDPYLSFAAAMNGLAGPLHGLANQEVLVWLTQLQKEVGKDVSDEKLRDYIWNTLNSGRWSRNGMATTEDVRKNRRESCRTWYDPVR

SEQ ID NO: 765315 - protein, 263 aa, Homo sapiens
MALLTAAARLLGTKNASCLVLAARHASASSTNLKDILADLIPKEQARIKTFRQQHGKTVVGQITVDMMYGGMRGMKGLVYETSVLDPDEGIRFRGFSIPECQKLLPKAKGGEEPLPEGLFWLLVTGHIPTEEQVSWLSKEWAKRAALPSHVVTMLDNFPTNLHPMSQLSAAVTALNSESNFARAYAQGISRTKYWELIYEDSMDLIAKLPCVAAKIYRNLYREGSGIGAIDSNLDWSHNFTNMLGYTDHQFTELTRLYLTIHR

SEQ ID NO: 765316 - protein, 103 aa, Homo sapiens
MGGYSWKTTAPVPDNQGVLAPLFEQGIDSRLDMVSSDYQVLGLRALKIVSLPPRPLPQEIASLFINIFFLPFPESSQYNVSEAPFAQVFSNSECSTSFSLRKD

SEQ ID NO: 765317 - protein, 165 aa, Homo sapiens
MALLTAAARLLGTKNASCLVLAARHASASSTNLKDILADLIPKEQARIKTFRQQHGKTVVGQITVDMMYGGMRGMKGLVYETSVLDPDEGIRFRGFSIPECQKLLPKAKGGEEPLPEGLFWLLVTGHIPTEEQVSWLSKEWAKRAALPSHVVTLLRAKKNLVPNS

SEQ ID NO: 765318 - protein, 163 aa, Homo sapiens
MALLTAAARLLGTKNASCLVLAARHASASSTNLKDILADLIPKEQARIKTFRQQHGKTVVGQITVDMMYGGMRGMKGLVYETSVLDPDEGIRFRGFSIPECQKLLPKAKGGEEPLPEGLFWLLVTGHIPTEEQVKQKDIISSSHSPSSLPFSNLRHLMLIRHL

SEQ ID NO: 765319 - protein, 68 aa, Homo sapiens
ARTSWVVSTLSTRRRGLWCSGGGSCSCRSSLPFLPPHQIPEIARHGFTYCGRPALGNQGADLLSEMTA

SEQ ID NO: 765320 - protein, 68 aa, Homo sapiens; identical to SEQ ID NO: 765319

SEQ ID NO: 765321 - protein, 472 aa, Homo sapiens
MDELGCFNLVNPSARPLVQRRRLLFLPQLSPFLTSPPNLKDILADLIPKEQARIKTFRQQHGKTVVGQITVDMMYGGMRGMKGLVYETSVLDPDEGIRFRGFSIPECQKLLPKAKGGEEPLPEGLFWLLVTGHIPTEEQVSWLSKEWAKRAALPSHVVTMLDNFPTNLHPMSQLSAAVTALNSESNFARAYAQGISRTKYWELIYEDSMDLIAKLPCVAAKIYRNLYREGSGIGAIDSNLDWSHNFTNMLGYTDHQFTELTRLYLTIHSDHEGGNVSAHTSHLVGSALSDPYLSFAAAMNGLAGPLHGLANQEVLVWLTQLQKEVGKDVSDEKLRDYIWNTLNSGRVVPGYGHAVLRKTDPRYTCQREFALKHLPNDPMFKLVAQLYKIVPNVLLEQGKAKNPWPNVDAHSGVLLQYYGMTEMNYYTVLFGVSRALGVLAQLIWSRALGFPLERPKSMSTEGLMKFVDSKSG

SEQ ID NO: 765322 - protein, 423 aa, Homo sapiens
RLQYPRLGTRLGGETVVGQITVDMMYGGMRGMKGLVYETSVLDPDEGIRFRGFSIPECQKLLPKAKGGEEPLPEGLFWLLVTGHIPTEEQVSWLSKEWAKRAALPSHVVTMLDNFPTNLHPMSQLSAAVTALNSESNFARAYAQGISRTKYWELIYEDSMDLIAKLPCVAAKIYRNLYREGSGIGAIDSNLDWSHNFTNMLGYTDHQFTELTRLYLTIHSDHEGGNVSAHTSHLVGSALSDPYLSFAAAMNGLAGPLHGLANQEVLVWLTQLQKEVGKDVSDEKLRDYIWNTLNSGRVVPGYGHAVLRKTDPRYTCQREFALKHLPNDPMFKLVAQLYKIVPNVLLEQGKAKNPWPNVDAHSGVLLQYYGMTEMNYYTVLFGVSRALGVLAQLIWSRALGFPLERPKSMSTEGLMKFVDSKSG

SEQ ID NO: 765323 - protein, 400 aa, Homo sapiens
MMYGGMRGMKGLVYETSVLDPDEGIRFRGFSIPECQKLLPKAKGGEEPLPEGLFWLLVTGHIPTEEQVSWLSKEWAKRAALPSHVVTMLDNFPTNLHPMSQLSAAVTALNSESNFARAYAQGISRTKYWELIYEDSMDLIAKLPCVAAKIYRNLYREGSGIGAIDSNLDWSHNFTNMLGYTDHQFTELTRLYLTIHSDHEGGNVSAHTSHLVGSALSDPYLSFAAAMNGLAGPLHGLANQEVLVWLTQLQKEVGKDVSDEKLRDYIWNTLNSGRVVPGYGHAVLRKTDPRYTCQREFALKHLPNDPMFKLVAQLYKIVPNVLLEQGKAKNPWPNVDAHSGVLLQYYGMTEMNYYTVLFGVSRALGVLAQLIWSRALGFPLERPKSMSTEGLMKFVDSKSG

SEQ ID NO: 765324 - protein, 444 aa, Homo sapiens
MALLTAAARLLGTKNASCLVLAARHASASSTNLKDILADLIPKEQARIKTFRQQHGKTVVGQITVDMGIRFRGFSIPECQKLLPKAKGGEEPLPEGLFWLLVTGHIPTEEQVSWLSKEWAKRAALPSHVVTMLDNFPTNLHPMSQLSAAVTALNSESNFARAYAQGISRTKYWELIYEDSMDLIAKLPCVAAKIYRNLYREGSGIGAIDSNLDWSHNFTNMLGYTDHQFTELTRLYLTIHSDHEGGNVSAHTSHLVGSALSDPYLSFAAAMNGLAGPLHGLANQEVLVWLTQLQKEVGKDVSDEKLRDYIWNTLNSGRVVPGYGHAVLRKTDPRYTCQREFALKHLPNDPMFKLVAQLYKIVPNVLLEQGKAKNPWPNVDAHSGVLLQYYGMTEMNYYTVLFGVSRALGVLAQLIWSRALGFPLERPKSMSTEGLMKFVDSKSG

SEQ ID NO: 765325 - protein, 491 aa, Homo sapiens
MALLTAAARLLGTKNASCLVLAARHASASSTNLKDILADLIPKEQARIKTFRQQHGKTVVGQITVDMMYGGMRGMRGIASYDKHRGFLNPVVAVCQSRLSGGRNRYRHVMPEEQADPKAYRMRRTQLRACSLRGHIFIEQCMGKRENIMRDLEEQGIVGVISKGEQIGSAALPSHVVTMLDNFPTNLHPMSQLSAAVTALNSESNFARAYAQGISRTKYWELIYEDSMDLIAKLPCVAAKIYRNLYREGSGIGAIDSNLDWSHNFTNMLGYTDHQFTELTRLYLTIHSDHEGGNVSAHTSHLVGSALSDPYLSFAAAMNGLAGPLHGLANQEVLVWLTQLQKEVGKDVSDEKLRDYIWNTLNSGRVVPGYGHAVLRKTDPRYTCQREFALKHLPNDPMFKLVAQLYKIVPNVLLEQGKAKNPWPNVDAHSGVLLQYYGMTEMNYYTVLFGVSRALGVLAQLIWSRALGFPLERPKSMSTEGLMKFVDSKSG

SEQ ID NO: 765326 - protein, 182 aa, Homo sapiens
MVTSAELVRGGSAQVLDFVKNQEVLVWLTQLQKEVGKDVSDEKLRDYIWNTLNSGRVVPGYGHAVLRKTDPRYTCQREFALKHLPNDPMFKLVAQLYKIVPNVLLEQGKAKNPWPNVDAHSGVLLQYYGMTEMNYYTVLFGVSRALGVLAQLIWSRALGFPLERPKSMSTEGLMKFVDSKSG

SEQ ID NO: 765327 - protein, 466 aa, Homo sapiens [sequence omitted]

SEQ ID NO: 765328 - protein, 466 aa, Homo sapiens [sequence omitted]

SEQ ID NO: 765329 - protein, 372 aa, Homo sapiens
MALLTAAARLLGTKNASCLVLAARHASASSTNLKDILADLIPKEQARIKTFRQQHGKTVVGQITVDMMYGGMRGMKGLVYETSVLDPDEGIRFRGFSIPECQKLLPKAKGGEEPLPEGLFWLLVTGHIPTEEQVSWLSKEWAKRAALPSHVVTMLDNFPTNLHPMSQLSAAVTALNSESNFARAYAQGISRTKYWELIYEDSMDLIAKLPCVAAKIYRNLYREGSGIGAIDSNLDWSHNFTNMLGYTDHQFTELTRLYLTIHSDHEGGNVSAHTSHLVGSALSDPYLSFAAAMNGLAGPLHGLANQEVVVLVKTVQKAGWARMCPIEKVRRLILGENSIRRGWPRVRAWRLKGKGSGNNVKEVGWKTGYDPF

SEQ ID NO: 765330 - protein, 250 aa, Homo sapiens
MALLTAAARLLGTKNASCLVLAARHASASSTNLKDILADLIPKEQARIKTFRQQHGKTVVGQITVDMMYGGMRGMKGLVYETSVLDPDEGIRFRGFSIPECQKLLPKAKGGEEPLPEGLFWLLVTGHIPTEEQVSWLSKEWAKRAALPSHVVTMLDNFPTNLHPMSQLSAAVTALNSESNFARAYAQGISRTKYWELIYEDSMDLIAKLPCVAAKIYRNLYREGSGIGAIDSNLDWSQYRCLLCRDFGRS

SEQ ID NO: 765331 - protein, 206 aa, Homo sapiens
MALLTAAARLLGTKNASCLVLAARHASASSTNLKDILADLIPKEQARIKTFRQQHGKTVVGQITVDMMYGGMRGMKGLVYETSVLDPDEGIRFRGFSIPECQKLLPKAKGGEEPLPEGLFWLLVTGHIPTEEQVSWLSKEWAKRAALPSHVVTMLDNFPTNLHPMSQLSAAVTALNSESNFARAYAQGISRTKYWEVGNLGGVIGV

SEQ ID NO: 765332 - protein, 107 aa, Homo sapiens
ARTSWVVSTLSTRRRGLWCSGGGSCSCRSSLPFLPPHQIPEIARHGFTYCGRPALGNQECILSCSCSPACQCFLHGKVWKRRLRIRIIAASLTLGQRIWQPPGLLLS

SEQ ID NO: 765333 - protein, 148 aa, Homo sapiens
ARTSWVVSTLSTRRRGLWCSGGGSCSCRSSLPFLPPHQIPEIARHGFTYCGRPALGNQGEQRGEGARRPRVGLRRPQALRRRGLPPTPVRTLRALKGPALGWPPALREATGPCAALPFWLLGVKCTPPALGPQSRTREEADPAVTPHV

SEQ ID NO: 765334 - protein, 72 aa, Homo sapiens
RDVRFESIRLPGCPRGVNPVVSYAVALSCQCALCRRSTTDCGGPKDHPLTCDDPRFQDSSSSKAPPPSLPSP

SEQ ID NO: 765335 - protein, 4368 aa, Homo sapiens
MSGEDAEVRAVSEDVSNGSSGSPSPGDTLPWNLGKTQRSRRSGGGAGSNGSVLDPAERAVIRIADERDRVQKKTFTKWVNKHLIKAQRHISDLYEDLRDGHNLISLLEVLSGDSLPREKGRMRFHKLQNVQIALDYLRHRQVKLVNIRDDDIADGNPKLTLGLIWTIILHFQISDIQVSGQSEDMTAKEKLLLWSQRMVEGYQGLRCDNFTSSWRDGRLFNAIIHRHKPLLIDMNKVYRQTNLENLDQAFSVAERDLGVTRLLDPEDVDVPQPDEKSIITYVSSLYDAMPRVPDVQDGVRANELQLRWQEYRELVLLLLQWMRHHTAAFEERRFPSSFEEIEILWSQFLKFKEMELPAKEADKNRSKGIYQSLEGAVQAGQLKVPPGYHPLDVEKEWGKLHVAILEREKQLRSEFERLECLQRIVTKLQMEAGLCEEQLNQADALLQSDVRLLAAGKVPQRAGEVERDLDKADSMIRLLFNDVQTLKDGRHPQGEQMYRRVYRLHERLVAIRTEYNLRLKAGVAAPATQVAQVTLQSVQRRPELEDSTLRYLQDLLAWVEENQHRVDGAEWGVDLPSVEAQLGSHRGLHQSIEEFRAKIERARSDEGQLSPATRGAYRDCLGRLDLQYAKLLNSSKARLRSLESLHSFVAAATKELMWLNEKEEEEVGFDWSDRNTNMTAKKESYSALMRELELKEKKIKELQNAGDRLLREDHPARPTVESFQAALQTQWSWMLQLCCCIEAHLKENAAYFQFFSDVREAEGQLQKLQEALRRKYSCDRSATVTRLEDLLQDAQDEKEQLNEYKGHLSGLAKRAKAVVQLKPRHPAHPMRGRLPLLAVCDYKQVEVTVHKGDECQLVGPAQPSHWKVLSSSGSEAAVPSVCFLVPPPNQEAQEAVTRLEAQHQALVTLWHQLHVDMKSLLAWQSLRRDVQLIRSWSLATFRTLKPEEQRQALHSLELHYQAFLRDSQDAGGFGPEDRLMAEREYGSCSHHYQQLLQSLEQGAQEESRCQRCISELKDIRLQLEACETRTVHRLRLPLDKEPARECAQRIAEQQKAQAEVEGLGKGVARLSAEAEKVLALPEPSPAAPTLRSELELTLGKLEQVRSLSAIYLEKLKTISLVIRGTQGAEEVLRAHEEQLKEAQAVPATLPELEATKASLKKLRAQAEAQQPTFDALRDELRGAQEVGERLQQRHGERDLEVERWRERVAQVLERWQAVLAQTDLRQRELEQLGRQLRYYRESADPLGAWLQDARRRQEQIQAMPLADSQAVREQLRQEQALLEEIERHGEKVEECQRFAKQYINAIKDYELQLVTYKAQLEPVASPAKKPKVQSGSESVIQEYVDLRTHYSELTTLTSQYIKFISETLRRMEEEERLAEQQRAEERERLAEVEAALEKQRQLAEAHAQAKAQAEREAKELQQRMQEEVVRREEAAVDAQQQKRSIQEELQQLRQSSEAEIQAKARQAEAAERSRLRIEEEIRVVRLQLEATERQRGGAEGELQALRARAEEAEAQKRQAQEEAERLRRQVQDESQRKRQAEVELASRVKAETEAAREKQRALQALEELRLQAEEAERRLRQAEVERARQVQVALETAQRSAEAELQSKRASFAEKTAQLERSLQEEHVAVAQLREEAERRAQQQAEAERAREEAERELERWQLKANEALRLRLQAEEVAQQKSLAQAEAEKQKEEAEREARRRGKAEEQAVRQRELAEQELEKQRQLAEGTAQQRLAAEQELIRLRAETEQGEQQRQLLEEELARLQREAAAATQKRQELEAELAKVRAEMEVLLASKARAEEESRSTSEKSKQRLEAEAGRFRELAEEAARLRALAEEAKRQRQLAEEDAARQRAEAERVLAEKLAAIGEATRLKTEAEIALKEKEAENERLRRLAEDEAFQRRRLEEQAAQHKADIEERLAQLRKASDSELERQKGLVEDTLRQRRQVEEEILALKASFEKAAAGKAELELELGRIRSNAEDTLRSKEQAELEAARQRQLAAEEERRRREAEERVQKSLAAEEEAARQRKAALEEVERLKANVEEARRLRERAEQESARQLQLAQEAAQKRLQAEEKAHAFAVQQKEQELQQTLQQEQSVLDQLRGEAEAARRAAEEAEEARVQAEREAAQARRQVEEAERLKQSAEEQAQARAQAQAAAEKLRKEAEQEAARRAQAEQAALRQKQAADAEMEKHKKFAEQTLRQKAQVEQELTTLRLQLEETDHQKNLLDEELQRLKAEATEAARQRSQVEEELFSVRVQMEELSKLKARIEAENRALILRDKDNTQRFLQEEAEKMKQVAEEAARLSVAAQEAARLRQLAEEDLAQQRALAEKMLKEKMQAVQEATRLKAEAELLQQQKELAQEQARRLQEDKEQMAQQLAEETQGFQRTLEAERQRQLEMSAEAERLKLRVAEMSRAQARAEEDAQRFRKQAEEIGEKLHRTELATQEKVTLVQTLEIQRQQSDHDAERLREAIAELEREKEKLQQEAKLLQLKSEEMQTVQQEQLLQETQALQQSFLSEKDSLLQRERFIEQEKAKLEQLFQDEVAKAQQLREEQQRQQQQMEQERQRLVASMEEARRRQHEAEEGVRRKQEELQQLEQQRRQQEELLAEENQRLREQLQLLEEQHRAALAHSEEVTASQVAATKTLPNGRDALDGPAAEAEPEHSFDGLRRKVSAQRLQEAGILSAEELQRLAQGHTTVDELARREDVRHYLQGRSSIAGLLLKATNEKLSVYAALQRQLLSPGTALILLEAQAASGFLLDPVRNRRLTVNEAVKEGVVGPELHHKLLSAERAVTGYKDPYTGQQISLFQAMQKGLIVREHGIRLLEAQIATGGVIDPVHSHRVPVDVAYRRGYFDEEMNRVLADPSDDTKGFFDPNTHENLTYLQLLERCVEDPETGLCLLPLTDKAAEGGELVYTDSEARDVFEKATVSAPFGKFQGKTVTIWEIINSEYFTAEQRRDLLRQFRTGRITVEKIIKIIITVVEEQEQKGRLCFEGLRSLVPAAELLESRVIDRELYQQLQRGERSVRDVAEVDTVRRALRGANVIAGVWLEEAGQKLSIYNALKKDLLPSDMAVALLEAQAGTGHIIDPATSARLTVDEAVRAGLVGPEFHEKLLSAEKAVTGYRDPYTGQSVSLFQALKKGLIPREQGLRLLDAQLSTGGIVDPSKSHRVPLDVACARGCLDEETSRALSAPRADAKAYSDPSTGEPATYGELQQRCRPDQLTGLSLLPLSEKAARARQEELYSELQARETFEKTPVEVPVGGFKGRTVTVWELISSEYFTAEQRQELLRQFRTGKVTVEKVIKILITIVEEVETLRQERLSFSGLRAPVPASELLASGVLSRAQFEQLKDGKTTVKDLSELGSVRTLLQGSGCLAGIYLEDTKEKVSIYEAMRRGLLRATTAALLLEAQAATGFLVDPVRNQRLYVHEAVKAGVVGPELHEQLLSAEKAVTGYRDPYSGSTISLFQAMQKGLVLRQHGIRLLEAQIATGGIIDPVHSHRVPVDVAYQRGYFSEEMNRVLADPSDDTKGFFDPNTHENLTYRQLLERCVEDPETGLRLLPLKGAEKAEVVETTQVYTEEETRRAFEETQIDIPGGGSHGGSTMSLWEVMQSDLIPEEQRAQLMADFQAGRVTKERMIIIIIEIIEKTEIIRQQGLASYDYVRRRLTAEDLFEARIISLETYNLLREGTRSLREALEAESAWCYLYGTGSVAGVYLPGSRQTLSIYQALKKGLLSAEVARLLLEAQAATGFLLDPVKGERLTVDEAVRKGLVGPELHDRLLSAERAVTGYRDPYTEQTISLFQAMKKELIPTEEALRLLDAQLATGGIVDPRLGFHLPLEVAYQRGYLNKDTHDQLSEPSEVRSYVDPSTDERLSYTQLLRRCRRDDGTGQLLLPLSDARKLTFRGLRKQITMEELVRSQVMDEATALQLREGLTSIEEVTKNLQKFLEGTSCIAGVFVDATKERLSVYQAMKKGIIRPGTAFELLEAQAATGYVIDPIKGLKLTVEEAVRMGIVGPEFKDKLLSAERAVTGYKDPYSGKLISLFQAMKKGLILKDHGIRLLEAQIATGGIIDPEESHRLPVEVAYKRGLFDEEMNEILTDPSDDTKGFFDPNTEENLTYLQLMERCITDPQTGLCLLPLKEKKRERKTSSKSSVRKRRVVIVDPETGKEMSVYEAYRKGLIDHQTYLELSEQECEWEEITISSSDGVVKSMIIDRRSGRQYDIDDAIAKNLIDRSALDQYRAGTLSITEFADMLSGNAGGFRSRSSSVGSSSSYPISPAVSRTQLASWSDPTEETGPVAGILDTETLEKVSITEAMHRNLVDNITGQRLLEAQACTGGIIDPSTGERFPVTDAVNKGLV

SEQ ID NO: 765336 - protein, 108 aa, Homo sapiens
MGRRGRGAPHISDDGRLGRDAPHFLDGMAAGKRRSSLPRLGSWAEGLLTSQTMGGQAETLLTSQKGWRPGRGCNLGTLGGQGRRLGGGGCSEPRSRHCTPAWATLSIE

SEQ ID NO: 765337 - protein, 67 aa, Homo sapiens
AAGPGHRARPAGDPAPRRVRVVSCRPKRQPKPSSDEGYWDCSVCTFRNSAEAFKCMMCDVRKGTSTR

SEQ ID NO: 765338 - protein, 133 aa, Homo sapiens
AAGPGHRARPAGDPAPRRVRVVSCRPKRQPKPSSDEGYWDCSVCTFRNSAEAFKCMMCDVRKGTSTRDSKEGGKLVSYSTASLGVRGTLRNRVGGGSSEEKKQAEYLAPGRRRNIVHRGVGPGQRSGPSLKEA

SEQ ID NO: 765339 - protein, 180 aa, Homo sapiens
MGDKKSPTRPKRQPKPSSDEGYWDCSVCTFRNSAEAFKCMMCDVRKGTSTRKPRPVSQLVAQQVTQQFVPPTQSKKEKKDKVEKEKSEKETTSKKNSHKKTRPRLKNVDRSSAQHLEVTVGDLTVIITDFKEKTKSPPASSAASADQHSQSGSSSDNTERGMSRSSSPRGEASSLNGESH

SEQ ID NO: 765340 - protein, 180 aa, Homo sapiens; identical to SEQ ID NO: 765339

SEQ ID NO: 765341 - protein, 204 aa, Homo sapiens
MGDKKSPTRPKRQPKPSSDEGYWDCSVCTFRNSAEAFKCMMCDVRKGTSTRSTLFEVIVSASRTKEPLKFPISGRKPRPVSQLVAQQVTQQFVPPTQSKKEKKDKVEKEKSEKETTSKKNSHKKTRPRLKNVDRSSAQHLEVTVGDLTVIITDFKEKTKSPPASSAASADQHSQSGSSSDNTERGMSRSSSPRGEASSLNGESH

SEQ ID NO: 765342 - protein, 196 aa, Homo sapiens
AAGPGHRARPAGDPAPRRVRVVSCRPKRQPKPSSDEGYWDCSVCTFRNSAEAFKCMMCDVRKGTSTRKPRPVSQLVAQQVTQQFVPPTQSKKEKKDKVEKEKSEKETTSKKNSHKKTRPRLKNVDRSSAQHLEVTVGDLTVIITDFKEKTKSPPASSAASADQHSQSGSSSDNTERGMSRSSSPRGEASSLNGESH

SEQ ID NO: 765343 - protein, 104 aa, Homo sapiens
QGGNGGTARRGGAGARGSRGHRGHPRTARRLTRRGCWAALAAFEVSGAAAGWPARVTCAQAGVSPTAGGCVGSGGGSRARRCGLPRPLPPSSPARFRPAYYPPY

SEQ ID NO: 765344 - protein, 171 aa, Homo sapiens
MCGRAPPPEITGREPGYHLVEQSCWLKPLPRNLGHSLFWTVWKPRPVSQLVAQQVTQQFVPPTQSKKEKKDKVEKEKSEKETTSKKNSHKKTRPRLKNVDRSSAQHLEVTVGDLTVIITDFKEKTKSPPASSAASADQHSQSGSSSDNTERGMSRSSSPRGEASSLNGESH

SEQ ID NO: 765345 - protein, 180 aa, Homo sapiens; identical to SEQ ID NO: 765339

SEQ ID NO: 765346 - protein, 141 aa, Homo sapiens
MKILQGWYQWRWKPRPVSQLVAQQVTQQFVPPTQSKKEKKDKVEKEKSEKETTSKKNSHKKTRPRLKNVDRSSAQHLEVTVGDLTVIITDFKEKTKSPPASSAASADQHSQSGSSSDNTERGMSRSSSPRGEASSLNGESH

SEQ ID NO: 765347 - protein, 104 aa, Homo sapiens; identical to SEQ ID NO: 765343

SEQ ID NO: 765348 - protein, 55 aa, Homo sapiens
AVRIQGEERKQKRGRRPGHLWVAEPLSHVGSQATLATRSPTQSRAALGSGASGPG

SEQ ID NO: 765349 - protein, 116 aa, Homo sapiens
MVAQGAGRPCSASTRATEERRGLWGRSGGPCWGRLGFWTPGISFSDVTMWRKAPGGQQCSCRWGLGNARPFPSLPAKTHIPASGSWGRFQSLENTQGLKLEVTPPMSGTCQLSPLG

SEQ ID NO: 765350 - protein, 503 aa, Homo sapiens
VDTAGCGLFELEEEDEQSKGNPGEVRLVSLHIQALVDAGVPARDIAVVSPYNLQVDLLRQSLVHRHPELEIKSVDGFQGREKEAVILSFVRSNRKGEVGFLAEDRRINVAVTRARRHVAVICDSRTVNNHAFLKTLVEYFTQHGEVRTAFEYLDDIVPENYSHENSQGSSHAATKPQGPAASTRTGSQRQEGGQEAAAPARQGRKKPAGKSLASEAPSQPSLNGGSPEGVESQDGVDHFRAMIVEFMASKKMQLEFPPSLNSHDRLRVHQIAEEHGLRHDSSGEGKRRFITVSKRAPRPRAALGPPAGTGGPAPLQPVPPTPAQTEQPPREQRGPDQPDLRTLHLERLQRVRSAQGQPASKEQQASGQQKLPEKKKKKAKGHPATDLPTEEDFEALVSAAVKADNTCGFAKCTAGVTTLGQFCQLCSRRYCLSHHLPEIHGCGERARAHARQRISREGVLYAGSGTKNGSLDPAKRAQLQRRLDKKLSELSNQRTSRRKERGT

SEQ ID NO: 765351 - protein, 165 aa, Homo sapiens [sequence omitted]

SEQ ID NO: 765352 - protein, 435 aa, Homo sapiens
LVRPRELRDHHWEIRSSSWLSAATAPPKGGGGRGGLNSELRGEAGVCRCITWIMRSPLCWLLPLLILASVAQGQPTRRPRPGTGPGRRPRPRPRPTPSFPQPDEPAEPTDLPPPLPPGPPSIFPDCPRECYCPPDFPSALYCDSRNLRKVPVIPPRIHYLYLQNNFITELPVESFQNATGLRWINLDNNRIRKIDQRVLEKLPGLVFLYMEKNQLEEVPSALPRNLEQLRLSQNHISRIPPGVFSKLENLLLLDLQHNRLSDGVFKPDTFHGLKNLMQLNLAHNILRKMPPRVPTAIHQLYLDSNKIETIPNGYFKSFPNLAFIRLNYNKLTDRGLPKNSFNISNLLVLHLSHNRISSVPAINNRLEHLYLNNNSIEKINGTQICPNDLVAFHDFSSDLENVPHLRYLRLDGNYLKPPIPLDLMMCFRLLQSVVI

SEQ ID NO: 765353 - protein, 435 aa, Homo sapiens; identical to SEQ ID NO: 765352

SEQ ID NO: 765354 - protein, 337 aa, Homo sapiens
RGGIVVVVNPTDLPPPLPPGPPSIFPDCPRECYCPPDFPSALYCDSRNLRKVPVIPPRIHYLYLQNNFITELPVESFQNATGLRWINLDNNRIRKIDQRVLEKLPGLVFLYMEKNQLEEVPSALPRNLEQLRLSQNHISRIPPGVFSKLENLLLLDLQHNRLSDGVFKPDTFHGLKNLMQLNLAHNILRKMPPRVPTAIHQLYLDSNKIETIPNGYFKSFPNLAFIRLNYNKLTDRGLPKNSFNISNLLVLHLSHNRISSVPAINNRLEHLYLNNNSIEKINGTQICPNDLVAFHDFSSDLENVPHLRYLRLDGNYLKPPIPLDLMMCFRLLQSVVI

SEQ ID NO: 765355 - protein, 46 aa, Homo sapiens
MGLFYELSDVATWRVNREKEDGEITLQTSSPGRGPKIAIEEPNTGL

SEQ ID NO: 765356 - protein, 2449 aa, Homo sapiens
MGFLHQLQLLLWKNVTLKRRSPWVLAFEIFIPLVLFFILLGLRQKKPTISVKEVSFYTAAPLTSAGILPVMQSLCPDGQRDEFGFLQYANSTVTQLLERLDRVVEEGNLFDPARPSLGSELEALRQHLEALSAGPGTSGSHLDRSTVSSFSLDSVARNPQELWRFLTQNLSLPNSTAQALLAARVDPPEVYHLLFGPSSALDSQSGLHKGQEPWSRLGGNPLFRMEELLLAPALLEQLTCTPGSGELGRILTVPESQKGALQGYRDAVCSGQAAARARRFSGLSAELRNQLDVAKVSQQLGLDAPNGSDSSPQAPPPRRLQALLGDLLDAQKVLQDVDVLSALALLLPQGACTGRTPGPPASGAGGAANGTGAGAVMGPNATAEEGAPSAAALATPDTLQGQCSAFVQLWAGLQPILCGNNRTIEPEALRRGNMSSLGFTSKEQRNLGLLVHLMTSNPKILYAPAGSEVDRVILKANETFAFVGNVTHYAQVWLNISAEIRSFLEQGRLQQHLRWLQQYVAELRLHPEALNLSLDELPPALRQDNFSLPSGMALLQQLDTIDNAACGWIQFMSKVSVDIFKGFPDEESIVNYTLNQAYQDNVTVFASVIFQTRKDGSLPPHVHYKIRQNSSFTEKTNEIRRAYWRPGPNTGGRFYFLYGFVWIQDMMERAIIDTFVGHDVVEPGSYVQMFPYPCYTRDDFLFVIEHMMPLCMVISWVYSVAMTIQHIVAEKEHRLKEVMKTMGLNNAVHWVAWFITGFVQLSISVTALTAILKYGQVLMHSHVVIIWLFLAVYAVATIMFCFLVSVLYSKAKLASACGGIIYFLSYVPYMYVAIREEVAHDKITAFEKCIASLMSTTAFGLGSKYFALYEVAGVGIQWHTFSQSPVEGDDFNLLLAVTMLMVDAVVYGILTWYIEAVHPGMYGLPRPWYFPLQKSYWLGSGRTEAWEWSWPWARTPRLSVMEEDQACAMESRRFEETRGMEEEPTHLPLVVCVDKLTKVYKDDKKLALNKLSLNLYENQVVSFLGHNGAGKTTTMSILTGLFPPTSGSATIYGHDIRTEMDEIRKNLGMCPQHNVLFDRLTVEEHLWFYSRLKSMAQEEIRREMDKMIEDLELSNKRHSLVQTLSGGMKRKLSVAIAFVGGSRAIILDEPTAGVDPYARRAIWDLILKYKPGRTILLSTHHMDEADLLGDRIAIISHGKLKCCGSPLFLKGTYGDGYRLTLVKRPAEPGGPQEPGLASSPPGRAPLSSCSELQVSQFIRKHVASCLLVSDTSTELSYILPSEAAKKGAFERLFQHLERSLDALHLSSFGLMDTTLEEVFLKVSEEDQSLENSEADVKESRKDVLPGAEGPASGEGHAGNLARCSELTQSQASLQSASSVGSARGDEGAGYTDVYGDYRPLFDNPQDPDNVSLQEVEAEALSRVGQGSRKLDGGWLKVRQFHGLLVKRFHCARRNSKALFSQILLPAFFVCVAMTVALSVPEIGDLPPLVLSPSQYHNYTQPRGNFIPYANEERREYRLRLSPDASPQQLVSTFRLPSGVGATCVLKSPANGSLGPTLNLSSGESRLLAARFFDSMCLESFTQGLPLSNFVPPPPSPAPSDSPASPDEDLQAWNVSLPPTAGPEMWTSAPSLPRLVREPVRCTCSAQGTGFSCPSSVGGHPPQMRVVTGDILTDITGHNVSEYLLFTSDRFRLHRYGAITFGNVLKSIPASFGTRAPPMVRKIAVRRAAQVFYNNKGYHSMPTYLNSLNNAILRANLPKSKGNPAAYGITVTNHPMNKTSASLSLDYLLQGTDVVIAIFIIVAMSFVPASFVVFLVAEKSTKAKHLQFVSGCNPIIYWLANYVWDMLNYLVPATCCVIILFVFDLPAYTSPTNFPAVLSLFLLYGWSITPIMYPASFWFEVPSSAYVFLIVINLFIGITATVATFLLQLFEHDKDLKVVNSYLKSCFLIFPNYNLGHGLMEMAYNEYINEYYAKIGQFDKMKSPFEWDIVTRGLVAMAVEGVVGFLLTIMCQYNFLRRPQRMPVSTKPVEDDVDVASERQRVLRGDADNDMVKIENLTKVYKSRKIGRILAVDRLCLGVRPGECFGLLGVNGAGKTSTFKMLTGDESTTGGEAFVNGHSVLKELLQVQQSLGYCPQCDALFDELTAREHLQLYTRLRGISWKDEARVVKWALEKLELTKYADKPAGTYSGGNKRKLSTAIALIGYPAFIFLDEPTTGMDPKARRFLWNLILDLIKTGRSVVLTSHSMEECEALCTRLAIMVNGRLRCLGSIQHLKNRFGDGYMITVRTKSSQSVKDVVRFFNRNFPEAMLKERHHTKVQYQLKSEHISLAQVFSKMEQVSGVLGIEDYSVSQTTLDNVFVNFAKKQSDNLEQQETEPPSALQSPLGCLLSLLRPRSAPTELRALVADEPEVPGHGGRGPHQLRGGAGPAVLQHGHALLTTQSWAREDTLH

SEQ ID NO: 765357 - protein, 2449 aa, Homo sapiens; identical to SEQ ID NO: 765356

SEQ ID NO: 765358 - protein, 2504 aa, Homo sapiens
MGFLHQLQLLLWKNVTLKRRSPWVLAFEIFIPLVLFFILLGLRQKKPTISVKEVSFYTAAPLTSAGILPVMQSLCPDGQRDEFGFLQYANSTVTQLLERLDRVVEEGNLFDPARPSLGSELEALRQHLEALSAGPGTSGSHLDRSTVSSFSLDSVARNPQELWRFLTQNLSLPNSTAQALLAARVDPPEVYHLLFGPSSALDSQSGLHKGQEPWSRLGGNPLFRMEELLLAPALLEQLTCTPGSGELGRILTVPESQKGALQGYRDAVCSGQAAARARRFSGLSAELRNQLDVAKVSQQLGLDAPNGSDSSPQAPPPRRLQALLGDLLDAQKVLQDVDVLSALALLLPQGACTGRTPGPPASGAGGAANGTGAGAVMGPNATAEEGAPSAAALATPDTLQGQCSAFVQLWAGLQPILCGNNRTIEPEALRRGNMSSLGFTSKEQRNLGLLVHLMTSNPKILYAPAGSEVDRVILKANETFAFVGNVTHYAQVWLNISAEIRSFLEQGRLQQHLRWLQQYVAELRLHPEALNLSLDELPPALRQDNFSLPSGMALLQQLDTIDNAACGWIQFMSKVSVDIFKGFPDEESIVNYTLNQAYQDNVTVFASVIFQTRKDGSLPPHVHYKIRQNSSFTEKTNEIRRAYWRPGPNTGGRFYFLYGFVWIQDMMERAIIDTFVGHDVVEPGSYVQMFPYPCYTRDEECWAPGAGAGAGAEWRLSGGLPAASCLSFEHMMPLCMVISWVYSVAMTIQHIVAEKEHRLKEVRGPGLSLEARAGREGRRPPGACPKPLAHPQVMKTMGLNNAVHWVAWFITGFVQLSISVTALTAILKYGQVLMHSHVVIIWLFLAVYAVATIMFCFLVSVLYSKAKLASACGGIIYFLSYVPYMYVAIREEVAHDKITAFEKCIASLMSTTAFGLGSKYFALYEVAGVGIQWHTFSQSPVEGDDFNLLLAVTMLMVDAVVYGILTWYIEAVHPGMYGLPRPWYFPLQKSYWLGSGRTEAWEWSWPWARTPRLSVMEEDQACAMESRRFEETRGMEEEPTHLPLVVCVDKLTKVYKDDKKLALNKLSLNLYENQVVSFLGHNGAGKTTTMSILTGLFPPTSGSATIYGHDIRTEMDEIRKNLGMCPQHNVLFDRLTVEEHLWFYSRLKSMAQEEIRREMDKMIEDLELSNKRHSLVQTLSGGMKRKLSVAIAFVGGSRAIILDEPTAGVDPYARRAIWDLILKYKPGRTILLSTHHMDEADLLGDRIAIISHGKLKCCGSPLFLKGTYGDGYRLTLVKRPAEPGGPQEPGLASSPPGRAPLSSCSELQVSQFIRKHVASCLLVSDTSTELSYILPSEAAKKGAFERLFQHLERSLDALHLSSFGLMDTTLEEVFLKVSEEDQSLENSEADVKESRKDVLPGAEGPASGEGHAGNLARCSELTQSQASLQSASSVGSARGDEGAGYTDVYGDYRPLFDNPQDPDNVSLQEVEAEALSRVGQGSRKLDGGWLKVRQFHGLLVKRFHCARRNSKALFSQILLPAFFVCVAMTVALSVPEIGDLPPLVLSPSQYHNYTQPRGNFIPYANEERREYRLRLSPDASPQQLVSTFRLPSGVGATCVLKSPANGSLGPTLNLSSGESRLLAARFFDSMCLESFTQGLPLSNFVPPPPSPAPSDSPASPDEDLQAWNVSLPPTAGPEMWTSAPSLPRLVREPVRCTCSAQGTGFSCPSSVGGHPPQMRVVTGDILTDITGHNVSEYLLFTSDRFRLHRYGAITFGNVLKSIPASFGTRAPPMVRKIAVRRAAQVFYNNKGYHSMPTYLNSLNNAILRANLPKSKGNPAAYGITVTNHPMNKTSASLSLDYLLQGTDVVIAIFIIVAMSFVPASFVVFLVAEKSTKAKHLQFVSGCNPIIYWLANYVWDMLNYLVPATCCVIILFVFDLPAYTSPTNFPAVLSLFLLYGWSITPIMYPASFWFEVPSSAYVFLIVINLFIGITATVATFLLQLFEHDKDLKVVNSYLKSCFLIFPNYNLGHGLMEMAYNEYINEYYAKIGQFDKMKSPFEWDIVTRGLVAMAVEGVVGFLLTIMCQYNFLRRPQRMPVSTKPVEDDVDVASERQRVLRGDADNDMVKIENLTKVYKSRKIGRILAVDRLCLGVRPGECFGLLGVNGAGKTSTFKMLTGDESTTGGEAFVNGHSVLKELLQVQQSLGYCPQCDALFDELTAREHLQLYTRLRGISWKDEARVVKWALEKLELTKYADKPAGTYSGGNKRKLSTAIALIGYPAFIFLDEPTTGMDPKARRFLWNLILDLIKTGRSVVLTSHSMEECEALCTRLAIMVNGRLRCLGSIQHLKNRFGDGYMITVRTKSSQSVKDVVRFFNRNFPEAMLKERHHTKVQYQLKSEHISLAQVFSKMEQVSGVLGIEDYSVSQTTLDNVFVNFAKKQSDNLEQQETEPPSALQSPLGCLLSLLRPRSAPTELRALVADEPEVPGHGGRGPHQLRGGAGPAVLQHGHALLTTQSWAREDTLH

SEQ ID NO: 765359 - protein, 2474 aa, Homo sapiens
MGFLHQLQLLLWKNVTLKRRSPWVLAFEIFIPLVLFFILLGLRQKKPTISVKEVSFYTAAPLTSAGILPVMQSLCPDGQRDEFGFLQYANSTVTQLLERLDRVVEEGNLFDPARPSLGSELEALRQHLEALSAGPGTSGSHLDRSTVSSFSLDSVARNPQELWRFLTQNLSLPNSTAQALLAARVDPPEVYHLLFGPSSALDSQSGLHKGQEPWSRLGGNPLFRMEELLLAPALLEQLTCTPGSGELGRILTVPESQKGALQGYRDAVCSGQAAARARRFSGLSAELRNQLDVAKVSQQLGLDAPNGSDSSPQAPPPRRLQALLGDLLDAQKVLQDVDVLSALALLLPQGACTGRTPGPPASGAGGAANGTGAGAVMGPNATAEEGAPSAAALATPDTLQGQCSAFVQLWAGLQPILCGNNRTIEPEALRRGNMSSLGFTSKEQRNLGLLVHLMTSNPKILYAPAGSEVDRVILKANETFAFVGNVTHYAQVWLNISAEIRSFLEQGRLQQHLRWLQQYVAELRLHPEALNLSLDELPPALRQDNFSLPSGMALLQQLDTIDNAACGWIQFMSKVSVDIFKGFPDEESIVNYTLNQAYQDNVTVFASVIFQTRKDGSLPPHVHYKIRQNSSFTEKTNEIRRAYWRPGPNTGGRFYFLYGFVWIQDMMERAIIDTFVGHDVVEPGSYVQMFPYPCYTRDDNMMPLCMVISWVYSVAMTIQHIVAEKEHRLKEVRGPGLSLEARAGREGRRPPGACPKPLAHPQVMKTMGLNNAVHWVAWFITGFVQLSISVTALTAILKYGQVLMHSHVVIIWLFLAVYAVATIMFCFLVSVLYSKAKLASACGGIIYFLSYVPYMYVAIREEVAHDKITAFEKCIASLMSTTAFGLGSKYFALYEVAGVGIQWHTFSQSPVEGDDFNLLLAVTMLMVDAVVYGILTWYIEAVHPGMYGLPRPWYFPLQKSYWLGSGRTEAWEWSWPWARTPRLSVMEEDQACAMESRRFEETRGMEEEPTHLPLVVCVDKLTKVYKDDKKLALNKLSLNLYENQVVSFLGHNGAGKTTTMSILTGLFPPTSGSATIYGHDIRTEMDEIRKNLGMCPQHNVLFDRLTVEEHLWFYSRLKSMAQEEIRREMDKMIEDLELSNKRHSLVQTLSGGMKRKLSVAIAFVGGSRAIILDEPTAGVDPYARRAIWDLILKYKPGRTILLSTHHMDEADLLGDRIAIISHGKLKCCGSPLFLKGTYGDGYRLTLVKRPAEPGGPQEPGLASSPPGRAPLSSCSELQVSQFIRKHVASCLLVSDTSTELSYILPSEAAKKGAFERLFQHLERSLDALHLSSFGLMDTTLEEVFLKVSEEDQSLENSEADVKESRKDVLPGAEGPASGEGHAGNLARCSELTQSQASLQSASSVGSARGDEGAGYTDVYGDYRPLFDNPQDPDNVSLQEVEAEALSRVGQGSRKLDGGWLKVRQFHGLLVKRFHCARRNSKALFSQILLPAFFVCVAMTVALSVPEIGDLPPLVLSPSQYHNYTQPRGNFIPYANEERREYRLRLSPDASPQQLVSTFRLPSGVGATCVLKSPANGSLGPTLNLSSGESRLLAARFFDSMCLESFTQGLPLSNFVPPPPSPAPSDSPASPDEDLQAWNVSLPPTAGPEMWTSAPSLPRLVREPVRCTCSAQGTGFSCPSSVGGHPPQMRVVTGDILTDITGHNVSEYLLFTSDRFRLHRYGAITFGNVLKSIPASFGTRAPPMVRKIAVRRAAQVFYNNKGYHSMPTYLNSLNNAILRANLPKSKGNPAAYGITVTNHPMNKTSASLSLDYLLQGTDVVIAIFIIVAMSFVPASFVVFLVAEKSTKAKHLQFVSGCNPIIYWLANYVWDMLNYLVPATCCVIILFVFDLPAYTSPTNFPAVLSLFLLYGWSITPIMYPASFWFEVPSSAYVFLIVINLFIGITATVATFLLQLFEHDKDLKVVNSYLKSCFLIFPNYNLGHGLMEMAYNEYINEYYAKIGQFDKMKSPFEWDIVTRGLVAMAVEGVVGFLLTIMCQYNFLRRPQRMPVSTKPVEDDVDVASERQRVLRGDADNDMVKIENLTKVYKSRKIGRILAVDRLCLGVRPGECFGLLGVNGAGKTSTFKMLTGDESTTGGEAFVNGHSVLKELLQVQQSLGYCPQCDALFDELTAREHLQLYTRLRGISWKDEARVVKWALEKLELTKYADKPAGTYSGGNKRKLSTAIALIGYPAFIFLDEPTTGMDPKARRFLWNLILDLIKTGRSVVLTSHSMEECEALCTRLAIMVNGRLRCLGSIQHLKNRFGDGYMITVRTKSSQSVKDVVRFFNRNFPEAMLKERHHTKVQYQLKSEHISLAQVFSKMEQVSGVLGIEDYSVSQTTLDNVFVNFAKKQSDNLEQQETEPPSALQSPLGCLLSLLRPRSAPTELRALVADEPEVPGHGGRGPHQLRGGAGPAVLQHGHALLTTQSWAREDTLH

SEQ ID NO: 765360 - protein, 2474 aa, Homo sapiens
MGFLHQLQLLLWKNVTLKRRSPWVLAFEIFIPLVLFFILLGLRQKKPTISVKEVSFYTAAPLTSAGILPVMQSLCPDGQRDEFGFLQYANSTECPPAPRSTHPSPAHPVSDIRHGARVTQLLERLDRVVEEGNLFDPARPSLGSELEALRQHLEALSAGPGTSGSHLDRSTVSSFSLDSVARNPQELWRFLTQNLSLPNSTAQALLAARVDPPEVYHLLFGPSSALDSQSGLHKGQEPWSRLGGNPLFRMEELLLAPALLEQLTCTPGSGELGRILTVPESQKGALQGYRDAVCSGQAAARARRFSGLSAELRNQLDVAKVSQQLGLDAPNGSDSSPQAPPPRRLQALLGDLLDAQKVLQDVDVLSALALLLPQGACTGRTPGPPASGAGGAANGTGAGAVMGPNATAEEGAPSAAALATPDTLQGQCSAFVQLWAGLQPILCGNNRTIEPEALRRGNMSSLGFTSKEQRNLGLLVHLMTSNPKILYAPAGSEVDRVILKANETFAFVGNVTHYAQVWLNISAEIRSFLEQGRLQQHLRWLQQYVAELRLHPEALNLSLDELPPALRQDNFSLPSGMALLQQLDTIDNAACGWIQFMSKVSVDIFKGFPDEESIVNYTLNQAYQDNVTVFASVIFQTRKDGSLPPHVHYKIRQNSSFTEKTNEIRRAYWRPGPNTGGRFYFLYGFVWIQDMMERAIIDTFVGHDVVEPGSYVQMFPYPCYTRDDFLFVIEHMMPLCMVISWVYSVAMTIQHIVAEKEHRLKEVMKTMGLNNAVHWVAWFITGFVQLSISVTALTAILKYGQVLMHSHVVIIWLFLAVYAVATIMFCFLVSVLYSKAKLASACGGIIYFLSYVPYMYVAIREEVAHDKITAFEKCIASLMSTTAFGLGSKYFALYEVAGVGIQWHTFSQSPVEGDDFNLLLAVTMLMVDAVVYGILTWYIEAVHPGMYGLPRPWYFPLQKSYWLGSGRTEAWEWSWPWARTPRLSVMEEDQACAMESRRFEETRGMEEEPTHLPLVVCVDKLTKVYKDDKKLALNKLSLNLYENQVVSFLGHNGAGKTTTMSILTGLFPPTSGSATIYGHDIRTEMDEIRKNLGMCPQHNVLFDRLTVEEHLWFYSRLKSMAQEEIRREMDKMIEDLELSNKRHSLVQTLSGGMKRKLSVAIAFVGGSRAIILDEPTAGVDPYARRAIWDLILKYKPGRTILLSTHHMDEADLLGDRIAIISHGKLKCCGSPLFLKGTYGDGYRLTLVKRPAEPGGPQEPGLASSPPGRAPLSSCSELQVSQFIRKHVASCLLVSDTSTELSYILPSEAAKKGAFERLFQHLERSLDALHLSSFGLMDTTLEEVFLKVSEEDQSLENSEADVKESRKDVLPGAEGPASGEGHAGNLARCSELTQSQASLQSASSVGSARGDEGAGYTDVYGDYRPLFDNPQDPDNVSLQEVEAEALSRVGQGSRKLDGGWLKVRQFHGLLVKRFHCARRNSKALFSQILLPAFFVCVAMTVALSVPEIGDLPPLVLSPSQYHNYTQPRGNFIPYANEERREYRLRLSPDASPQQLVSTFRLPSGVGATCVLKSPANGSLGPTLNLSSGESRLLAARFFDSMCLESFTQGLPLSNFVPPPPSPAPSDSPASPDEDLQAWNVSLPPTAGPEMWTSAPSLPRLVREPVRCTCSAQGTGFSCPSSVGGHPPQMRVVTGDILTDITGHNVSEYLLFTSDRFRLHRYGAITFGNVLKSIPASFGTRAPPMVRKIAVRRAAQVFYNNKGYHSMPTYLNSLNNAILRANLPKSKGNPAAYGITVTNHPMNKTSASLSLDYLLQGTDVVIAIFIIVAMSFVPASFVVFLVAEKSTKAKHLQFVSGCNPIIYWLANYVWDMLNYLVPATCCVIILFVFDLPAYTSPTNFPAVLSLFLLYGWSITPIMYPASFWFEVPSSAYVFLIVINLFIGITATVATFLLQLFEHDKDLKVVNSYLKSCFLIFPNYNLGHGLMEMAYNEYINEYYAKIGQFDKMKSPFEWDIVTRGLVAMAVEGVVGFLLTIMCQYNFLRRPQRMPVSTKPVEDDVDVASERQRVLRGDADNDMVKIENLTKVYKSRKIGRILAVDRLCLGVRPGECFGLLGVNGAGKTSTFKMLTGDESTTGGEAFVNGHSVLKELLQVQQSLGYCPQCDALFDELTAREHLQLYTRLRGISWKDEARVVKWALEKLELTKYADKPAGTYSGGNKRKLSTAIALIGYPAFIFLDEPTTGMDPKARRFLWNLILDLIKTGRSVVLTSHSMEECEALCTRLAIMVNGRLRCLGSIQHLKNRFGDGYMITVRTKSSQSVKDVVRFFNRNFPEAMLKERHHTKVQYQLKSEHISLAQVFSKMEQVSGVLGIEDYSVSQTTLDNVFVNFAKKQSDNLEQQETEPPSALQSPLGCLLSLLRPRSAPTELRALVADEPEVPGHGGRGPHQLRGGAGPAVLQHGHALLTTQSWAREDTLH

SEQ ID NO: 765361 - protein, 2058 aa, Homo sapiens
RPRWIQFSPSERDIFKAFPDEESIVNYTLNQAYQDNVTVFASVIFQTRKDGSLPPHVHYKIRQNSSVEELYAPAGSEVDRVILKANETFAFVGNVTHYAQVWLNISAEIRSFLEQGRLQQHLRWLQQYVAELRLHPEALNLSLDELPPALRQDNFSLPSGMALLQQLDTIDNAACGWIQFMSKVSVDIFKGFPDEESIVNYTLNQAYQDNVTVFASVIFQTRKDGSLPPHVHYKIRQNSSFTEKTNEIRRAYWRPGPNTGGRFYFLYGFVWIQDMMERAIIDTFVGHDVVEPGSYVQMFPYPCYTRDDFLFVIEHMMPLCMVISWVYSVAMTIQHIVAEKEHRLKEVMKTMGLNNAVHWVAWFITGFVQLSISVTALTAILKYGQVLMHSHVVIIWLFLAVYAVATIMFCFLVSVLYSKAKLASACGGIIYFLSYVPYMYVAIREEVAHDKITAFEKCIASLMSTTAFGLGSKYFALYEVAGVGIQWHTFSQSPVEGDDFNLLLAVTMLMVDAVVYGILTWYIEAVHPGMYGLPRPWYFPLQKSYWLGSGRTEAWEWSWPWARTPRLSVMEEDQACAMESRRFEETRGMEEEPTHLPLVVCVDKLTKVYKDDKKLALNKLSLNLYENQVVSFLGHNGAGKTTTMSILTGLFPPTSGSATIYGHDIRTEMDEIRKNLGMCPQHNVLFDRLTVEEHLWFYSRLKSMAQEEIRREMDKMIEDLELSNKRHSLVQTLSGGMKRKLSVAIAFVGGSRAIILDEPTAGVDPYARRAIWDLILKYKPGRTILLSTHHMDEADLLGDRIAIISHGKLKCCGSPLFLKGTYGDGYRLTLVKRPAEPGGPQEPGLASSPPGRAPLSSCSELQVSQFIRKHVASCLLVSDTSTELSYILPSEAAKKGAFERLFQHLERSLDALHLSSFGLMDTTLEEVFLKVSEEDQSLENSEADVKESRKDVLPGAEGPASGEGHAGNLARCSELTQSQASLQSASSVGSARGDEGAGYTDVYGDYRPLFDNPQDPDNVSLQEVEAEALSRVGQGSRKLDGGWLKVRQFHGLLVKRFHCARRNSKALFSQILLPAFFVCVAMTVALSVPEIGDLPPLVLSPSQYHNYTQPRGNFIPYANEERREYRLRLSPDASPQQLVSTFRLPSGVGATCVLKSPANGSLGPTLNLSSGESRLLAARFFDSMCLESFTQGLPLSNFVPPPPSPAPSDSPASPDEDLQAWNVSLPPTAGPEMWTSAPSLPRLVREPVRCTCSAQGTGFSCPSSVGGHPPQMRVVTGDILTDITGHNVSEYLLFTSDRFRLHRYGAITFGNVLKSIPASFGTRAPPMVRKIAVRRAAQVFYNNKGYHSMPTYLNSLNNAILRANLPKSKGNPAAYGITVTNHPMNKTSASLSLDYLLQGTDVVIAIFIIVAMSFVPASFVVFLVAEKSTKAKHLQFVSGCNPIIYWLANYVWDMLNYLVPATCCVIILFVFDLPAYTSPTNFPAVLSLFLLYGWSITPIMYPASFWFEVPSSAYVFLIVINLFIGITATVATFLLQLFEHDKDLKVVNSYLKSCFLIFPNYNLGHGLMEMAYNEYINEYYAKIGQFDKMKSPFEWDIVTRGLVAMAVEGVVGFLLTIMCQYNFLRRPQRMPVSTKPVEDDVDVASERQRVLRGDADNDMVKIENLTKVYKSRKIGRILAVDRLCLGVRPGECFGLLGVNGAGKTSTFKMLTGDESTTGGEAFVNGHSVLKELLQVQQSLGYCPQCDALFDELTAREHLQLYTRLRGISWKDEARVVKWALEKLELTKYADKPAGTYSGGNKRKLSTAIALIGYPAFIFLDEPTTGMDPKARRFLWNLILDLIKTGRSVVLTSHSMEECEALCTRLAIMVNGRLRCLGSIQHLKNRFGDGYMITVRTKSSQSVKDVVRFFNRNFPEAMLKERHHTKVQYQLKSEHISLAQVFSKMEQVSGVLGIEDYSVSQTTLDNVFVNFAKKQSDNLEQQETEPPSALQSPLGCLLSLLRPRSAPTELRALVADEPEVPGHGGRGPHQLRGGAGPAVLQHGHALLTTQSWAREDTLH

SEQ ID NO: 765362 - protein, 1993 aa, Homo sapiens
PQVGGGPSRNSMPLPHPLQANETFAFVGNVTHYAQVWLNISAEIRSFLEQGRLQQHLRWLQQYVAELRLHPEALNLSLDELPPALRQDNFSLPSGMALLQQLDTIDNAACGWIQFMSKVSVDIFKGFPDEESIVNYTLNQAYQDNVTVFASVIFQTRKDGSLPPHVHYKIRQNSSFTEKTNEIRRAYWRPGPNTGGRFYFLYGFVWIQDMMERAIIDTFVGHDVVEPGSYVQMFPYPCYTRDDFLFVIEHMMPLCMVISWVYSVAMTIQHIVAEKEHRLKEVMKTMGLNNAVHWVAWFITGFVQLSISVTALTAILKYGQVLMHSHVVIIWLFLAVYAVATIMFCFLVSVLYSKAKLASACGGIIYFLSYVPYMYVAIREEVAHDKITAFEKCIASLMSTTAFGLGSKYFALYEVAGVGIQWHTFSQSPVEGDDFNLLLAVTMLMVDAVVYGILTWYIEAVHPGMYGLPRPWYFPLQKSYWLGSGRTEAWEWSWPWARTPRLSVMEEDQACAMESRRFEETRGMEEEPTHLPLVVCVDKLTKVYKDDKKLALNKLSLNLYENQVVSFLGHNGAGKTTTMSILTGLFPPTSGSATIYGHDIRTEMDEIRKNLGMCPQHNVLFDRLTVEEHLWFYSRLKSMAQEEIRREMDKMIEDLELSNKRHSLVQTLSGGMKRKLSVAIAFVGGSRAIILDEPTAGVDPYARRAIWDLILKYKPGRTILLSTHHMDEADLLGDRIAIISHGKLKCCGSPLFLKGTYGDGYRLTLVKRPAEPGGPQEPGLASSPPGRAPLSSCSELQVSQFIRKHVASCLLVSDTSTELSYILPSEAAKKGAFERLFQHLERSLDALHLSSFGLMDTTLEEVFLKVSEEDQSLENSEADVKESRKDVLPGAEGPASGEGHAGNLARCSELTQSQASLQSASSVGSARGDEGAGYTDVYGDYRPLFDNPQDPDNVSLQEVEAEALSRVGQGSRKLDGGWLKVRQFHGLLVKRFHCARRNSKALFSQILLPAFFVCVAMTVALSVPEIGDLPPLVLSPSQYHNYTQPRGNFIPYANEERREYRLRLSPDASPQQLVSTFRLPSGVGATCVLKSPANGSLGPTLNLSSGESRLLAARFFDSMCLESFTQGLPLSNFVPPPPSPAPSDSPASPDEDLQAWNVSLPPTAGPEMWTSAPSLPRLVREPVRCTCSAQGTGFSCPSSVGGHPPQMRVVTGDILTDITGHNVSEYLLFTSDRFRLHRYGAITFGNVLKSIPASFGTRAPPMVRKIAVRRAAQVFYNNKGYHSMPTYLNSLNNAILRANLPKSKGNPAAYGITVTNHPMNKTSASLSLDYLLQGTDVVIAIFIIVAMSFVPASFVVFLVAEKSTKAKHLQFVSGCNPIIYWLANYVWDMLNYLVPATCCVIILFVFDLPAYTSPTNFPAVLSLFLLYGWSITPIMYPASFWFEVPSSAYVFLIVINLFIGITATVATFLLQLFEHDKDLKVVNSYLKSCFLIFPNYNLGHGLMEMAYNEYINEYYAKIGQFDKMKSPFEWDIVTRGLVAMAVEGVVGFLLTIMCQYNFLRRPQRMPVSTKPVEDDVDVASERQRVLRGDADNDMVKIENLTKVYKSRKIGRILAVDRLCLGVRPGECFGLLGVNGAGKTSTFKMLTGDESTTGGEAFVNGHSVLKELLQVQQSLGYCPQCDALFDELTAREHLQLYTRLRGISWKDEARVVKWALEKLELTKYADKPAGTYSGGNKRKLSTAIALIGYPAFIFLDEPTTGMDPKARRFLWNLILDLIKTGRSVVLTSHSMEECEALCTRLAIMVNGRLRCLGSIQHLKNRFGDGYMITVRTKSSQSVKDVVRFFNRNFPEAMLKERHHTKVQYQLKSEHISLAQVFSKMEQVSGVLGIEDYSVSQTTLDNVFVNFAKKQSDNLEQQETEPPSALQSPLGCLLSLLRPRSAPTELRALVADEPEVPGHGGRGPHQLRGGAGPAVLQHGHALLTTQSWAREDTLH

SEQ ID NO: 765363 - protein, 2449 aa, Homo sapiens; identical to SEQ ID NO: 765356

SEQ ID NO: 765364 - protein, 2449 aa, Homo sapiens; identical to SEQ ID NO: 765356

SEQ ID NO: 765365 - protein, 2449 aa, Homo sapiens; identical to SEQ ID NO: 765356

SEQ ID NO: 765366 - protein, 2053 aa, Homo sapiens
MGFLHQLQLLLWKNVTLKRRSPWVLAFEIFIPLVLFFILLGLRQKKPTISVKEVSFYTAAPLTSAGILPVMQSLCPDGQRDEFGFLQYANSTVTQLLERLDRVVEEGNLFDPARPSLGSELEALRQHLEALSAGPGTSGSHLDRSTVSSFSLDSVARNPQELWRFLTQNLSLPNSTAQALLAARVDPPEVYHLLFGPSSALDSQSGLHKGQEPWSRLGGNPLFRMEELLLAPALLEQLTCTPGSGELGRILTVPESQKGALQGYRDAVCSGQAAARARRFSGLSAELRNQLDVAKVSQQLGLDAPNGSDSSPQAPPPRRLQALLGDLLDAQKVLQDVDVLSALALLLPQGACTGRTPGPPASGAGGAANGTGAGAVMGPNATAEEGAPSAAALATPDTLQGQCSAFVQLWAGLQPILCGNNRTIEPEALRRGNMSSLGFTSKEQRNLGLLVHLMTSNPKILYAPAGSEVDRVILKANETFAFVGNVTHYAQVWLNISAEIRSFLEQGRLQQHLRWLQQYVAELRLHPEALNLSLDELPPALRQDNFSLPSGMALLQQLDTIDNAACGWIQFMSKVSVDIFKGFPDEESIVNYTLNQAYQDNVTVFASVIFQTRKDGSLPPHVHYKIRQNSSFTEKTNEIRRAYWRPGPNTGGRFYFLYGFVWIQDMMERAIIDTFVGHDVVEPGSYVQMFPYPCYTRDDFLFVIEHMMPLCMVISWVYSVAMTIQHIVAEKEHRLKEVMKTMGLNNAVHWVAWFITGFVQLSISVTALTAILKYGQVLMHSHVVIIWLFLAVYAVATIMFCFLVSVLYSKAKLASACGGIIYFLSYVPYMYVAIREEVAHDKITAFEKCIASLMSTTAFGLGSKYFALYEVAGVGIQWHTFSQSPVEGDDFNLLLAVTMLMVDAVVYGILTWYIEAVHPGMYGLPRPWYFPLQKSYWLGSGRTEAWEWSWPWARTPRLSVMEEDQACAMESRRFEETRGMEEEPTHLPLVVCVDKLTKVYKDDKKLALNKLSLNLYENQVVSFLGHNGAGKTTTMSILTGLFPPTSGSATIYGHDIRTEMDEIRKNLGMCPQHNVLFDRLTVEEHLWFYSRLKSMAQEEIRREMDKMIEDLELSNKRHSLVQTLSGGMKRKLSVAIAFVGGSRAIILDEPTAGVDPYARRAIWDLILKYKPGRTILLSTHHMDEADLLGDRIAIISHGKLKCCGSPLFLKGTYGDGYRLTLVKRPAEPGGPQEPGLASSPPGRAPLSSCSELQVSQFIRKHVASCLLVSDTSTELSYILPSEAAKKGAFERLFQHLERSLDALHLSSFGLMDTTLEEVFLKVSEEDQSLENSEADVKESRKDVLPGAEGPASGEGHAGNLARCSELTQSQASLQSASSVGSARGDEGAGYTDVYGDYRPLFDNPQDPDNVSLQEVEAEALSRVGQGSRKLDGGWLKVRQFHGLLVKRFHCARRNSKALFSQILLPAFFVCVAMTVALSVPEIGDLPPLVLSPSQYHNYTQPRGNFIPYANEERREYRLRLSPDASPQQLVSTFRLPSGVGATCVLKSPANGSLGPTLNLSSGESRLLAARFFDSMCLESFTQGLPLSNFVPPPPSPAPSDSPASPDEDLQAWNVSLPPTAGPEMWTSAPSLPRLVREPVRCTCSAQGTGFSCPSSVGGHPPQMRVVTGDILTDITGHNVSEYLLFTSDRFRLHRYGAITFGNVLKSIPASFGTRAPPMVRKIAVRRAAQVFYNNKGYHSMPTYLNSLNNAILRANLPKSKGNPAAYGITVTNHPMNKTSASLSLDYLLQGTDVVIAIFIIVAMSFVPASFVVFLVAEKSTKAKHLQFVSGCNPIIYWLANYVWDMLNYLVPATCCVIILFVFDLPAYTSPTNFPAVLSLFLLYGWSITPIMYPASFWFEVPSSAYVFLIVINLFIGITATVATFLLQLFEHDKDLKVVNSYLKSCFLIFPNYNLGHGLMEMAYNEYINEYYAKIGQFDKMKSPFEWDIVTRGLVAMAVEGVVGFLLTIMCQYNFLRRPQRMPVSTKPVEDDVDVASERQRVLRGDADNDMVTC

SEQ ID NO: 765367 - protein, 2127 aa, Homo sapiens
  misc_feature (2106)..(2106): Xaa can be any naturally occurring amino acid
  misc_feature (2123)..(2123): Xaa can be any naturally occurring amino acid
MGFLHQLQLLLWKNVTLKRRSPWVLAFEIFIPLVLFFILLGLRQKKPTISVKEVSFYTAAPLTSAGILPVMQSLCPDGQRDEFGFLQYANSTVTQLLERLDRVVEEGNLFDPARPSLGSELEALRQHLEALSAGPGTSGSHLDRSTVSSFSLDSVARNPQELWRFLTQNLSLPNSTAQALLAARVDPPEVYHLLFGPSSALDSQSGLHKGQEPWSRLGGNPLFRMEELLLAPALLEQLTCTPGSGELGRILTVPESQKGALQGYRDAVCSGQAAARARRFSGLSAELRNQLDVAKVSQQLGLDAPNGSDSSPQAPPPRRLQALLGDLLDAQKVLQDVDVLSALALLLPQGACTGRTPGPPASGAGGAANGTGAGAVMGPNATAEEGAPSAAALATPDTLQGQCSAFVQLWAGLQPILCGNNRTIEPEALRRGNMSSLGFTSKEQRNLGLLVHLMTSNPKILYAPAGSEVDRVILKANETFAFVGNVTHYAQVWLNISAEIRSFLEQGRLQQHLRWLQQYVAELRLHPEALNLSLDELPPALRQDNFSLPSGMALLQQLDTIDNAACGWIQFMSKVSVDIFKGFPDEESIVNYTLNQAYQDNVTVFASVIFQTRKDGSLPPHVHYKIRQNSSFTEKTNEIRRAYWRPGPNTGGRFYFLYGFVWIQDMMERAIIDTFVGHDVVEPGSYVQMFPYPCYTRDDFLFVIEHMMPLCMVISWVYSVAMTIQHIVAEKEHRLKEVMKTMGLNNAVHWVAWFITGFVQLSISVTALTAILKYGQVLMHSHVVIIWLFLAVYAVATIMFCFLVSVLYSKAKLASACGGIIYFLSYVPYMYVAIREEVAHDKITAFEKCIASLMSTTAFGLGSKYFALYEVAGVGIQWHTFSQSPVEGDDFNLLLAVTMLMVDAVVYGILTWYIEAVHPGMYGLPRPWYFPLQKSYWLGSGRTEAWEWSWPWARTPRLSVMEEDQACAMESRRFEETRGMEEEPTHLPLVVCVDKLTKVYKDDKKLALNKLSLNLYENQVVSFLGHNGAGKTTTMSILTGLFPPTSGSATIYGHDIRTEMDEIRKNLGMCPQHNVLFDRLTVEEHLWFYSRLKSMAQEEIRREMDKMIEDLELSNKRHSLVQTLSGGMKRKLSVAIAFVGGSRAIILDEPTAGVDPYARRAIWDLILKYKPGRTILLSTHHMDEADLLGDRIAIISHGKLKCCGSPLFLKGTYGDGYRLTLVKRPAEPGGPQEPGLASSPPGRAPLSSCSELQVSQFIRKHVASCLLVSDTSTELSYILPSEAAKKGAFERLFQHLERSLDALHLSSFGLMDTTLEEVFLKVSEEDQSLENSEADVKESRKDVLPGAEGPASGEGHAGNLARCSELTQSQASLQSASSVGSARGDEGAGYTDVYGDYRPLFDNPQDPDNVSLQEVEAEALSRVGQGSRKLDGGWLKVRQFHGLLVKRFHCARRNSKALFSQILLPAFFVCVAMTVALSVPEIGDLPPLVLSPSQYHNYTQPRGNFIPYANEERREYRLRLSPDASPQQLVSTFRLPSGVGATCVLKSPANGSLGPTLNLSSGESRLLAARFFDSMCLESFTQGLPLSNFVPPPPSPAPSDSPASPDEDLQAWNVSLPPTAGPEMWTSAPSLPRLVREPVRCTCSAQGTGFSCPSSVGGHPPQMRVVTGDILTDITGHNVSEYLLFTSDRFRLHRYGAITFGNVLKSIPASFGTRAPPMVRKIAVRRAAQVFYNNKGYHSMPTYLNSLNNAILRANLPKSKGNPAAYGITVTNHPMNKTSASLSLDYLLQGTDVVIAIFIIVAMSFVPASFVVFLVAEKSTKAKHLQFVSGCNPIIYWLANYVWDMLNYLVPATCCVIILFVFDLPAYTSPTNFPAVLSLFLLYGWSITPIMYPASFWFEVPSSAYVFLIVINLFIGITATVATFLLQLFEHDKDLKVVNSYLKSCFLIFPNYNLGHGLMEMAYNEYINEYYAKIGQFDKMKSPFEWDIVTRGLVAMAVEGVVGFLLTIMCQYNFLRRPQRMPVSTKPVEDDVDVASERQRVLRGDADNDMVKIENLTKVGSGHVGWGLGGVGPGPGGVGPQQWRWSLGGQGPELWGWGLHGVGLWXRGPWALEVGRVWVGWAXGRVG

SEQ ID NO: 765368 - protein, 2070 aa, Homo sapiens
MGFLHQLQLLLWKNVTLKRRSPWVLAFEIFIPLVLFFILLGLRQKKPTISVKEVSFYTAAPLTSAGILPVMQSLCPDGQRDEFGFLQYANSTVTQLLERLDRVVEEGNLFDPARPSLGSELEALRQHLEALSAGPGTSGSHLDRSTVSSFSLDSVARNPQELWRFLTQNLSLPNSTAQALLAARVDPPEVYHLLFGPSSALDSQSGLHKGQEPWSRLGGNPLFRMEELLLAPALLEQLTCTPGSGELGRILTVPESQKGALQGYRDAVCSGQAAARARRFSGLSAELRNQLDVAKVSQQLGLDAPNGSDSSPQAPPPRRLQALLGDLLDAQKVLQDVDVLSALALLLPQGACTGRTPGPPASGAGGAANGTGAGAVMGPNATAEEGAPSAAALATPDTLQGQCSAFVQLWAGLQPILCGNNRTIEPEALRRGNMSSLGFTSKEQRNLGLLVHLMTSNPKILYAPAGSEVDRVILKANETFAFVGNVTHYAQVWLNISAEIRSFLEQGRLQQHLRWLQQYVAELRLHPEALNLSLDELPPALRQDNFSLPSGMALLQQLDTIDNAACGWIQFMSKVSVDIFKGFPDEESIVNYTLNQAYQDNVTVFASVIFQTRKDGSLPPHVHYKIRQNSSFTEKTNEIRRAYWRPGPNTGGRFYFLYGFVWIQDMMERAIIDTFVGHDVVEPGSYVQMFPYPCYTRDDFLFVIEHMMPLCMVISWVYSVAMTIQHIVAEKEHRLKEVMKTMGLNNAVHWVAWFITGFVQLSISVTALTAILKYGQVLMHSHVVIIWLFLAVYAVATIMFCFLVSVLYSKAKLASACGGIIYFLSYVPYMYVAIREEVAHDKITAFEKCIASLMSTTAFGLGSKYFALYEVAGVGIQWHTFSQSPVEGDDFNLLLAVTMLMVDAVVYGILTWYIEAVHPGMYGLPRPWYFPLQKSYWLGSGRTEAWEWSWPWARTPRLSVMEEDQACAMESRRFEETRGMEEEPTHLPLVVCVDKLTKVYKDDKKLALNKLSLNLYENQVVSFLGHNGAGKTTTMSILTGLFPPTSGSATIYGHDIRTEMDEIRKNLGMCPQHNVLFDRLTVEEHLWFYSRLKSMAQEEIRREMDKMIEDLELSNKRHSLVQTLSGGMKRKLSVAIAFVGGSRAIILDEPTAGVDPYARRAIWDLILKYKPGRTILLSTHHMDEADLLGDRIAIISHGKLKCCGSPLFLKGTYGDGYRLTLVKRPAEPGGPQEPGLASSPPGRAPLSSCSELQVSQFIRKHVASCLLVSDTSTELSYILPSEAAKKGAFERLFQHLERSLDALHLSSFGLMDTTLEEVFLKVSEEDQSLENSEADVKESRKDVLPGAEGPASGEGHAGNLARCSELTQSQASLQSASSVGSARGDEGAGYTDVYGDYRPLFDNPQDPDNVSLQEVEAEALSRVGQGSRKLDGGWLKVRQFHGLLVKRFHCARRNSKALFSQILLPAFFVCVAMTVALSVPEIGDLPPLVLSPSQYHNYTQPRGNFIPYANEERREYRLRLSPDASPQQLVSTFRLPSGVGATCVLKSPANGSLGPTLNLSSGESRLLAARFFDSMCLESFTQGLPLSNFVPPPPSPAPSDSPASPDEDLQAWNVSLPPTAGPEMWTSAPSLPRLVREPVRCTCSAQGTGFSCPSSVGGHPPQMRVVTGDILTDITGHNVSEYLLFTSDRFRLHRYGAITFGNVLKSIPASFGTRAPPMVRKIAVRRAAQVFYNNKGYHSMPTYLNSLNNAILRANLPKSKGNPAAYGITVTNHPMNKTSASLSLDYLLQGTDVVIAIFIIVAMSFVPASFVVFLVAEKSTKAKHLQFVSGCNPIIYWLANYVWDMLNYLVPATCCVIILFVFDLPAYTSPTNFPAVLSLFLLYGWSITPIMYPASFWFEVPSSAYVFLIVINLFIGITATVATFLLQLFEHDKDLKVVNSYLKSCFLIFPNYNLGHGLMEMAYNEYINEYYAKIGQFDKMKSPFEWDIVTRGLVAMAVEGVVGFLLTIMCQYNFLRRPQRMPVSTKPVEDDVDVASERQRVLRGDADNDMVKIENLTKVGSGHVGWGLGG

SEQ ID NO: 765369 - protein, 158 aa, Homo sapiens
MGTEVPQCLPGPGVEVQDQGASGPPAPVLGHALRSLRLPPLIVPKADPARAAYTLALLCLKASGSARPLAPAWHCSPPKATPAGPGTAGLSPARPRNQLFSLTMKADAESGLWAELGQSRIYFALRRGSSGPALLQGGGCPAGSHQLGPAGRWQEWRS

SEQ ID NO: 765370 - protein, 1878 aa, Homo sapiens
MGFLHQLQLLLWKNVTLKRRSPWVLAFEIFIPLVLFFILLGLRQKKPTISVKEVSFYTAAPLTSAGILPVMQSLCPDGQRDEFGFLQYANSTVTQLLERLDRVVEEGNLFDPARPSLGSELEALRQHLEALSAGPGTSGSHLDRSTVSSFSLDSVARNPQELWRFLTQNLSLPNSTAQALLAARVDPPEVYHLLFGPSSALDSQSGLHKGQEPWSRLGGNPLFRMEELLLAPALLEQLTCTPGSGELGRILTVPESQKGALQGYRDAVCSGQAAARARRFSGLSAELRNQLDVAKVSQQLGLDAPNGSDSSPQAPPPRRLQALLGDLLDAQKVLQDVDVLSALALLLPQGACTGRTPGPPASGAGGAANGTGAGAVMGPNATAEEGAPSAAALATPDTLQGQCSAFVQLWAGLQPILCGNNRTIEPEALRRGNMSSLGFTSKEQRNLGLLVHLMTSNPKILYAPAGSEVDRVILKANETFAFVGNVTHYAQVWLNISAEIRSFLEQGRLQQHLRWLQQYVAELRLHPEALNLSLDELPPALRQDNFSLPSGMALLQQLDTIDNAACGWIQFMSKVSVDIFKGFPDEESIVNYTLNQAYQDNVTVFASVIFQTRKDGSLPPHVHYKIRQNSSFTEKTNEIRRAYWRPGPNTGGRFYFLYGFVWIQDMMERAIIDTFVGHDVVEPGSYVQMFPYPCYTRDDFLFVIEHMMPLCMVISWVYSVAMTIQHIVAEKEHRLKEVMKTMGLNNAVHWVAWFITGFVQLSISVTALTAILKYGQVLMHSHVVIIWLFLAVYAVATIMFCFLVSVLYSKAKLASACGGIIYFLSYVPYMYVAIREEVAHDKITAFEKCIASLMSTTAFGLGSKYFALYEVAGVGIQWHTFSQSPVEGDDFNLLLAVTMLMVDAVVYGILTWYIEAVHPGMYGLPRPWYFPLQKSYWLGSGRTEAWEWSWPWARTPRLSVMEEDQACAMESRRFEETRGMEEEPTHLPLVVCVDKLTKVYKDDKKLALNKLSLNLYENQVVSFLGHNGAGKTTTMSILTGLFPPTSGSATIYGHDIRTEMDEIRKNLGMCPQHNVLFDRLTVEEHLWFYSRLKSMAQEEIRREMDKMIEDLELSNKRHSLVQTLSGGMKRKLSVAIAFVGGSRAIILDEPTAGVDPYARRAIWDLILKYKPGRTILLSTHHMDEADLLGDRIAIISHGKLKCCGSPLFLKGTYGDGYRLTLVKRPAEPGGPQEPGLASSPPGRAPLSSCSELQVSQFIRKHVASCLLVSDTSTELSYILPSEAAKKGAFERLFQHLERSLDALHLSSFGLMDTTLEEVFLKVSEEDQSLENSEADVKESRKDVLPGAEGPASGEGHAGNLARCSELTQSQASLQSASSVGSARGDEGAGYTDVYGDYRPLFDNPQDPDNVSLQEVEAEALSRVGQGSRKLDGGWLKVRQFHGLLVKRFHCARRNSKALFSQILLPAFFVCVAMTVALSVPEIGDLPPLVLSPSQYHNYTQPRGNFIPYANEERREYRLRLSPDASPQQLVSTFRLPSGVGATCVLKSPANGSLGPTLNLSSGESRLLAARFFDSMCLESFTQGLPLSNFVPPPPSPAPSDSPASPDEDLQAWNVSLPPTAGPEMWTSAPSLPRLVREPVRCTCSAQGTGFSCPSSVGGHPPQMRVVTGDILTDITGHNVSEYLLFTSDRFRLHRYGAITFGNVLKSIPASFGTRAPPMVRKIAVRRAAQVFYNNKGYHSMPTYLNSLNNAILRANLPKSKGNPAAYGITVTNHPMNKTSASLSLDYLLQGTDVVIAIFIIVAMSFVPASFVVFLVAEKSTKAKHLQFVSGCNPIIYWLANYVWDMLNYLVPATCCVIILFVFDLPAYTSPGRVGDAWV

SEQ ID NO: 765371 - protein, 216 aa, Homo sapiens
EIFKGESGYLDTKYRGLISFEEERPSCPSTRTRSADHPELGQGGHAPLTTQSWARDSTMGTEVPQCLPGPGVEVQDQGASGPPAPVLGHALRSLRLPPLIVPKADPARAAYTLALLCLKASGSARPLAPAWHCSPPKATPAGPGTAGLSPARPRNQLFSLTMKADAESGLWAELGQSRIYFALRRGSSGPALLQGGGCPAGSHQLGPAGRWQEWRS

SEQ ID NO: 765372 - protein, 110 aa, Homo sapiens
MGTEVPQCLPGPGVEVQDQGASGPPAPVLGHALRSLRLPPLIVPKADPARAAYTLALLCLKASGSARPLAPAWHCSPPKATPAGPGTAGLSPARPRNQLFSLTMKADAES

SEQ ID NO: 765373 - protein, 203 aa, Homo sapiens
MGSRDHLFKVLVVGDAAVGKTSLVQRYSQDSFSKHYKSTVGVDFALKVLQWSDYEIVRLQLWDIAGQERFTSMTRLYYRDASACVIMFDVTNATTFSNSQRWKQDLDSKLTLPNGEPVPCLLLANKCDLSPWAVSRDQIDRFSKENGFTGWTETSVKENKNINEAMRVLIEKMMRNSTEDIMSLSTQGDYINLQTKSSSWSCC

SEQ ID NO: 765374 - protein, 203 aa, Homo sapiens; identical to SEQ ID NO: 765373

SEQ ID NO: 765375 - protein, 179 aa, Homo sapiens
MGSRDHLFKVLVVGDAAVGKTSLVQRYSQDSFSKHYKSTVGGQERFTSMTRLYYRDASACVIMFDVTNATTFSNSQRWKQDLDSKLTLPNGEPVPCLLLANKCDLSPWAVSRDQIDRFSKENGFTGWTETSVKENKNINEAMRVLIEKMMRNSTEDIMSLSTQGDYINLQTKSSSWSCC

SEQ ID NO: 765376 - protein, 203 aa, Homo sapiens; identical to SEQ ID NO: 765373

SEQ ID NO: 765377 - protein, 203 aa, Homo sapiens; identical to SEQ ID NO: 765373

SEQ ID NO: 765378 - protein, 118 aa, Homo sapiens
SRSCFHLWQLLKEWHWWKQDLDSKLTLPNGEPVPCLLLANKCDLSPWAVSRDQIDRFSKENGFTGWTETSVKENKNINEAMRVLIEKMMRNSTEDIMSLSTQGDYINLQTKSSSWSCC

SEQ ID NO: 765379 - protein, 203 aa, Homo sapiens; identical to SEQ ID NO: 765373

SEQ ID NO: 765380 - protein, 203 aa, Homo sapiens; identical to SEQ ID NO: 765373

SEQ ID NO: 765381 - protein, 203 aa, Homo sapiens; identical to SEQ ID NO: 765373

SEQ ID NO: 765382 - protein, 203 aa, Homo sapiens; identical to SEQ ID NO: 765373

SEQ ID NO: 765383 - protein, 203 aa, Homo sapiens; identical to SEQ ID NO: 765373

SEQ ID NO: 765384 - protein, 131 aa, Homo sapiens
MTRLYYRDASACVIMFDVTNATTFSNSQRWKQDLDSKLTLPNGEPVPCLLLANKCDLSPWAVSRDQIDRFSKENGFTGWTETSVKENKNINEAMRVLIEKMMRNSTEDIMSLSTQGDYINLQTKSSSWSCC

SEQ ID NO: 765385 - protein, 154 aa, Homo sapiens
RRRPSLSPRLKCGGMIWQERFTSMTRLYYRDASACVIMFDVTNATTFSNSQRWKQDLDSKLTLPNGEPVPCLLLANKCDLSPWAVSRDQIDRFSKENGFTGWTETSVKENKNINEAMRVLIEKMMRNSTEDIMSLSTQGDYINLQTKSSSWSCC

SEQ ID NO: 765386 - protein, 121 aa, Homo sapiens
MGSRDHLFKVLVVGDAAVGKTSLVQRYSQDSFSKHYKSTVGGQERFTSMTRLYYRDASACVIMFDVTNATTFSNSQRWKQDLDSKLTLPNGEPVPCLLLANKVCGQSQKMVPSLYLWLERK

SEQ ID NO: 765387 - protein, 131 aa, Homo sapiens; identical to SEQ ID NO: 765384

SEQ ID NO: 765388 - protein, 458 aa, Homo sapiens
MTRGAWMCRQYDDGLKIWLAAPRENEKPFIDSERAQKWRLSLASLLFFTVLLSDHLWFCAEAKLTRARDKEHQQQQRQQQQQQQQQRQRQQQQQQRRQQEPSWPALLASMGESSPAAQAHRLLSASSSPTLPPSPGDGGGGGGKGNRGKDDRGKALFLGNSAKPVWRLETCYPQGASSGQCFTVENADAVCARNWSRGAAGGDGQEVRSKHPTPLWNLSDFYLSFCNSYTLWELFSGLSSPNTLNCSLDVVLKEGGEMTTCRQCVEAYQDYDHHAQEKYEEFESVLHKYLQSEEYSVKSCPEDCKIVYKAWLCSQYFEVTQFNCRKTIPCKQYCLEVQTRCPFILPDNDEVIYGGLSSFICTGLYETFLTNDEPECCDVRREEKSNNPSKGTVEKSGSCHRTSLTVSSATRLCNSRLKLCVLVLILLHTVLTASAAQNTAGLSFGGINTLEENSTNEE

SEQ ID NO: 765389 - protein, 458 aa, Homo sapiens; identical to SEQ ID NO: 765388

SEQ ID NO: 765390 - protein, 458 aa, Homo sapiens; identical to SEQ ID NO: 765388

SEQ ID NO: 765391 - protein, 191 aa, Homo sapiens
IRGRVDTADEKLQKGGVSPPQSSPPCRPTPWSISQFEAAARPWRMLLADQGQSWKEEVVTVETWQEGSLKASCLYGQLPKFQDGDLTLYQSNTILRHLGRTLGLYGKDQQEAALVDMVNDGVEDLRCKYISLIYTNYEAGKDDYVKALPGQLKPFETLLSQNQGGKTFIVGDQISFADYNLLDLLLIHEVH

SEQ ID NO: 765392 - protein, 151 aa, Homo sapiens
MLLADQGQSWKEEVVTVETWQEGSLKASCLYGQLPKFQDGDLTLYQSNTILRHLGRTLGLYGKDQQEAALVDMVNDGVEDLRCKYISLIYTNYEAGKDDYVKALPGQLKPFETLLPLLSAYVGRLSARPKLKAFLASPEYVNLPINGNGKQ

SEQ ID NO: 765393 - protein, 184 aa, Homo sapiens
HASRTRGSTHASPQSSPPCRPTPWSISQFEAAARPWRMLLADQGQSWKEEVVTVETWQEGSLKASCLYGQLPKFQDGDLTLYQSNTILRHLGRTLGLYGKDQQEAALVDMVNDGVEDLRCKYISLIYTNYEAGKDDYVKALPGQLKPFETLLSQNQGGKTFIVGDQISFADYNLLDLLLIHEVH

SEQ ID NO: 765394 - protein, 182 aa, Homo sapiens
KKPTTARYEASQSSPPCRPTPWSISQFEAAARPWRMLLADQGQSWKEEVVTVETWQEGSLKASCLYGQLPKFQDGDLTLYQSNTILRHLGRTLGLYGKDQQEAALVDMVNDGVEDLRCKYISLIYTNYEAGKDDYVKALPGQLKPFETLLSQNQGGKTFIVGDQISFADYNLLDLLLIHEVH

SEQ ID NO: 765395 - protein, 191 aa, Homo sapiens; identical to SEQ ID NO: 765391

SEQ ID NO: 765396 - protein, 147 aa, Homo sapiens
MLLADQGQSWKEEVVTVETWQEGSLKASCLYGQLPKFQDGDLTLYQSNTILRHLGRTLGLYGKDQQEAALVDMVNDGVEDLRCKYISLIYTNYEAGKDDYVKALPGQLKPFETLLSQNQGGKTFIVGDQISFADYNLLDLLLIHEVH

SEQ ID NO: 765397 - protein, 173 aa, Homo sapiens
TRRGRVGRPTRRPRVAQFEAAARPWRMLLADQGQSWKEEVVTVETWQEGSLKASCLYGQLPKFQDGDLTLYQSNTILRHLGRTLGLYGKDQQEAALVDMVNDGVEDLRCKYISLIYTNYEAGKDDYVKALPGQLKPFETLLSQNQGGKTFIVGDQISFADYNLLDLLLIHEVH

SEQ ID NO: 765398 - protein, 147 aa, Homo sapiens; identical to SEQ ID NO: 765396

SEQ ID NO: 765399 - protein, 144 aa, Homo sapiens
GYPLRSHQLEVVTVETWQEGSLKASCLYGQLPKFQDGDLTLYQSNTILRHLGRTLGLYGKDQQEAALVDMVNDGVEDLRCKYISLIYTNYEAGKDDYVKALPGQLKPFETLLSQNQGGKTFIVGDQISFADYNLLDLLLIHEVP

SEQ ID NO: 765400 - protein, 104 aa, Homo sapiens
NYTLSFRVHVHIVQVSYICIHVPCQCAAPTNSSSSIRYISQCYSLIYTNYEAGKDDYVKALPGQLKPFETLLSQNQGGKTFIVGDQISFADYNLLDLLLIHEVH

SEQ ID NO: 765401 - protein, 147 aa, Homo sapiens
MLLADQGQSWKEEVVTVETWQEGSLKASCLYGQLPKFQDGDLTLYQSNTILRHLGRTLGLYGKDQQEAALVDMVNDGVEDLRCKYISLIYTNYEAGKDDYVKALPGQLKPFETLLSQNQGGKTFIVGDQRSPSLTTNSELVRYRARF

SEQ ID NO: 765402 - protein, 147 aa, Homo sapiens; identical to SEQ ID NO: 765396

SEQ ID NO: 765403 - protein, 179 aa, Homo sapiens
PGLQEFGTQSSPPCRPTPWSISQFEAAARPWRMLLADQGQSWKEEVVTVETWQEGSLKASCLYGQLPKFQDGDLTLYQSNTILRHLGRTLGLYGKDQQEAALVDMVNDGVEDLRCKYISLIYTNYEAGKDDYVKALPGQLKPFETLLSQNQGGKTFIVGDQISFADYNLLDLLLIHEVH

SEQ ID NO: 765404 - protein, 227 aa, Homo sapiens
GFGILVVGNKSSRVSVFSSFFAKLMESIKASTAFNCASVGAYFLLFFKDENMYCRKSSMKGSCTTPRSISKYEAAARPWRMLLADQGQSWKEEVVTVETWQEGSLKASCLYGQLPKFQDGDLTLYQSNTILRHLGRTLGLYGKDQQEAALVDMVNDGVEDLRCKYISLIYTNYEAGKDDYVKALPGQLKPFETLLSQNQGGKTFIVGDQISFADYNLLDLLLIHEVH

SEQ ID NO: 765405 - protein, 259 aa, Homo sapiens
AARVPGDGAQSSQHGANPQHQARAPGRPPRPPRDPGRGPRGPRTSPVPLAAFRGPGAPRGGMGPRGRGGGAGCAHRALASSPGLQQTFLCSLQCRPTPWSISQFEAAARPWRMLLADQGQSWKEEVVTVETWQEGSLKASCLYGQLPKFQDGDLTLYQSNTILRHLGRTLGLYGKDQQEAALVDMVNDGVEDLRCKYISLIYTNYEAGKDDYVKALPGQLKPFETLLSQNQGGKTFIVGDQISFADYNLLDLLLIHEVH

SEQ ID NO: 765406 - protein, 173 aa, Homo sapiens; identical to SEQ ID NO: 765397

SEQ ID NO: 765407 - protein, 168 aa, Homo sapiens
VRGWCESAEDSQFEAAARPWRMLLADQGQSWKEEVVTVETWQEGSLKASCLYGQLPKFQDGDLTLYQSNTILRHLGRTLGLYGKDQQEAALVDMVNDGVEDLRCKYISLIYTNYEAGKDDYVKALPGQLKPFETLLSQNQGGKTFIVGDQISFADYNLLDLLLIHEVH

SEQ ID NO: 765408 - protein, 191 aa, Homo sapiens; identical to SEQ ID NO: 765391

SEQ ID NO: 765409 - protein, 191 aa, Homo sapiens; identical to SEQ ID NO: 765391

SEQ ID NO: 765410 - protein, 191 aa, Homo sapiens; identical to SEQ ID NO: 765391

SEQ ID NO: 765411 - protein, 191 aa, Homo sapiens; identical to SEQ ID NO: 765391

SEQ ID NO: 765412 - protein, 144 aa, Homo sapiens; identical to SEQ ID NO: 765399

SEQ ID NO: 765413 - protein, 147 aa, Homo sapiens
SLECSPHPAGCTEVVTVETWQEGSLKASCLYGQLPKFQDGDLTLYQSNTILRHLGRTLGLYGKDQQEAALVDMVNDGVEDLRCKYISLIYTNYEAGKDDYVKALPGQLKPFETLLSQNQGGKTFIVGDQISFADYNLLDLLLIHEVH

SEQ ID NO: 765414 - protein, 191 aa, Homo sapiens; identical to SEQ ID NO: 765391

SEQ ID NO: 765415 - protein, 105 aa, Homo sapiens
IRGRVDTADEKLQKGGVSPPQSSPPCRPTPWSISQFEAAARPWRMLLADQGQSWKEEVVTVETWQEGSLKASCLYGQLPKFQDGDLTLYQSNTILRHLGRTLGES

SEQ ID NO: 765416 - protein, 200 aa, Homo sapiens
MPPYTVVYFPVRGRCAALAHAAGRSGPELEGGGGDRGDVAGGLTQSLLPIRAAPQVPGRRPHPVPVQYHPASPGPHPWLGLTDSPLVGPSPVTVCVIRRPVTRPAPLHPTPGLYGKDQQEAALVDMVNDGVEDLRCKYISLIYTNYEAGKDDYVKALPGQLKPFETLLSQNQGGKTFIVGDQISFADYNLLDLLLIHEVP

SEQ ID NO: 765417 - protein, 191 aa, Homo sapiens; identical to SEQ ID NO: 765391

SEQ ID NO: 765418 - protein, 112 aa, Homo sapiens
SSIQVRSRLTCTVQYILRPWPHSWLYGKDQQEAALVDMVNDGVEDLRCKYISLIYTNYEAGKDDYVKALPGQLKPFETLLSQNQGGKTFIVGDQISFADYNLLDLLLIHEVP

SEQ ID NO: 765419 - protein, 191 aa, Homo sapiens; identical to SEQ ID NO: 765391

SEQ ID NO: 765420 - protein, 191 aa, Homo sapiens; identical to SEQ ID NO: 765391

SEQ ID NO: 765421 - protein, 191 aa, Homo sapiens; identical to SEQ ID NO: 765391

SEQ ID NO: 765422 - protein, 90 aa, Homo sapiens
HLTRNLTLTAYPNLRMVNDGVEDLRCKYISLIYTNYEAGKDDYVKALPGQLKPFETLLSQNQGGKTFIVGDQISFADYNLLDLLLIHEVH

SEQ ID NO: 765423 - protein, 212 aa, Homo sapiens
IRGRVDTADEKLQKGGVSPPQSSPPCRPTPWSISQFEAAARPWRMLLADQGQSWKEEVVTVETWQEGSLKASCLYGQLPKFQDGDLTLYQSNTILRHLGRTLGLYGKDQQEAALVDMVNDGVEDLRCKYISLIYTNYEAGKDDYVKALPGQLKPFETLLSQNQGGKTFIVGDQGEHLAPCCSFLATLCFQMDTGISFADYNLLDLLLIHEVH

SEQ ID NO: 765424 - protein, 205 aa, Homo sapiens
IRGRVDTADEKLQKGGVSPPQSSPPCRPTPWSISQFEAAARPWRMLLADQGQSWKEEVVTVETWQEGSLKASCLYGQLPKFQDGDLTLYQSNTILRHLGRTLGLYGKDQQEAALVDMVNDGVEDLRCKYISLIYTNYEAGKDDYVKALPGQLKPFETLLSQNQGGKTFIVGDQGEHLAPCCSFLATLCFQMDTGVSHLFSKAEQT

SEQ ID NO: 765425 - protein, 68 aa, Homo sapiens
GRDESRMIHGGVWQEAGKDDYVKALPGQLKPFETLLSQNQGGKTFIVGDQISFADYNLLDLLLIHEVH

SEQ ID NO: 765426 - protein, 84 aa, Homo sapiens
ISVSYVQYHWWTIDLIGQGGIEDSVLTNYEEAGKDDYVKALPGQLKPFETLLSQNQGGKTFIVGDQISFADYNLLDLLLIHEVP

SEQ ID NO: 765427 - protein, 195 aa, Homo sapiens
IRGRVDTADEKLQKGGVSPPQSSPPCRPTPWSISQFEAAARPWRMLLADQGQSWKEEVVTVETWQEGSLKASCLYGQLPKFQDGDLTLYQSNTILRHLGRTLGLYGKDQQEAALVDMVNDGVEDLRCKYISLIYTNYEAGKDDYVKALPGQLKPFETLLPLLSAYVGRLSARPKLKAFLASPEYVNLPINGNGKQ

SEQ ID NO: 765428 - protein, 105 aa, Homo sapiens; identical to SEQ ID NO: 765415

SEQ ID NO: 765429 - protein, 160 aa, Homo sapiens
IRGRVDTADEKLQKGGVSPPQSSPPCRPTPWSISQFEAAARPWRMLLADQGQSWKEEVVTVETWQEGSLKASCLYGQLPKFQDGDLTLYQSNTILRHLGRTLGLYGKDQQEAALVDMVNDGVEDLRCKYISLIYTNYPPALSICGAPQCPAQAQGLPGLP

SEQ ID NO: 765430 - protein, 141 aa, Homo sapiens
IRGRVDTADEKLQKGGVSPPQSSPPCRPTPWSISQFEAAARPWRMLLADQGQSWKEEVVTVETWQEGSLKASCLYGQLPKFQDGDLTLYQSNTILRHLGRTLGLYGKDQQEAALVDMVNDGVEDLRCKYISLIYTNYRRKG

SEQ ID NO: 765431 - protein, 82 aa, Homo sapiens
GRDESRMIHGGVWQEAGKDDYVKALPGQLKPFETLLSQNQGGKTFIVGDQGEHLAPCCSFLATLCFQMDTGVSHLFSKAEQT

SEQ ID NO: 765432 - protein, 167 aa, Homo sapiens
IRGRVDTADEKLQKGGVSPPQSSPPCRPTPWSISQFEAAARPWRMLLADQGQSWKEEVVTVETWQEGSLKASCLYGQLPKFQDGDLTLYQSNTILRHLGRTLGFYGKDQQEPQGVHMLDVGMQHPRSRENSLMYTIEDPRTDSYLMPSWPFRRLRIRWSVGRHKGNL

SEQ ID NO: 765433 - protein, 119 aa, Homo sapiens [sequence omitted]

SEQ ID NO: 765434 - protein, 275 aa, Homo sapiens
MLQGSQAALYIQKIPEQPQKNQDLLLSVQGVPDTFQDFNWYLGEETYGGTRLFTYIPGIQRPQRDGSAMGQRDIVGFPNGSMLLRRAQPTDSGTYQVAITINSEWTMKAKTEVQVAEKNKELPSTHLPTNAGILAATIIGSLAAGALLISCIAYLLVTRNWRGQSHRLPAPRGQGSLSILCSAVSPVPSVTPSTWMATTEKPELGPAHDAGDNNIYEVMPSPVLLVSPISDTRSINPARPLPTPPHLQAEPENHQYQQDLLNPDPAPYCQLVPTS

SEQ ID NO: 765435 - protein, 117 aa, Homo sapiens
MLQGSQAALYIQKIPEQPQKNQDLLLSVQGVPDTFQDFNWYLGEETYGGTRLFTYIPGIQRPQRDGSAMGQRDIVGFPNGSMLLRRAQPTDSGTYQVAITINSEWTMKAKTEVQVAD

SEQ ID NO: 765436 - protein, 117 aa, Homo sapiens; identical to SEQ ID NO: 765435

SEQ ID NO: 765437 - protein, 275 aa, Homo sapiens; identical to SEQ ID NO: 765434

SEQ ID NO: 765438 - protein, 554 aa, Homo sapiens
WAPARRWGGAGRGGARSRSEWGRPPGRGHCRPAPRFPTRLRRRTPLTEAMEGGPAVCCQDPRAELVERVAAIDVTHLEEADGGPEPTRNGVDPPPRARAASVIPGSTSRLLPARPSLSARKLSLQERPAGSYLEAQAGPYATGPASHISPRAWRRPTIESHHVAISDAEDCVQLNQYKLQSEIGKGAYGVVRLAYNESEDRHYAMKVLSKKKLLKQYGFPRRPPPRGSQAAQGGPAKQLLPLERVYQEIAILKKLDHVNVVKLIEVLDDPAEDNLYLVFDLLRKGPVMEVPCDKPFSEEQARLYLRDVILGLEYLHCQKIVHRDIKPSNLLLGDDGHVKIADFGVSNQFEGNDAQLSSTAGTPAFMAPEAISDSGQSFSGKALDVWATGVTLYCFVYGKCPFIDDFILALHRKIKNEPVVFPEEPEISEELKDLILKMLDKNPETRIGVPDIKLHPWVTKNGEEPLPSEEEHCSVVEVTEEEVKNSVRLIPSWTTVILVKSMLRKRSFGNPFEPQARREERSMSAPGNLLVKEGFGEGGKSPELPGVQEDEAAS

SEQ ID NO: 765439 - protein, 268 aa, Homo sapiens
WAPARRWGGAGRGGARSRSEWGRPPGRGHCRPAPRFPTRLRRRTPLTEAMEGGPAVCCQDPRAELVERVAAIDVTHLEEADGGPEPTRNGVDPPPRARAASVIPGSTSRLLPARPSLSARKLSLQERPAGSYLEAQAGPYATGPASHISPRAWRRPTIESHHVAISDAEDCVQLNQYKLQSEIGKGAYGVVRLAYNESEDRHYAMKVLSKKKLLKQYGFPRRPPPRGSQAAQGGPAKQLLPLERVYQEIAILKKLDHVNVVKLIEGLD

SEQ ID NO: 765440 - protein, 177 aa, Homo sapiens
SPCCEIPACCPELSLPIRGTKVSGREVDRKGSSSAVPPSSPSFALSRPEISEELKDLILKMLDKNPETRIGVPDIKLHPWVTKNGEEPLPSEEEHCSVVEVTEEEVKNSVRLIPSWTTVILVKSMLRKRSFGNPFEPQARREERSMSAPGNLLVKEGFGEGGKSPELPGVQEDEAAS

SEQ ID NO: 765441 - protein, 554 aa, Homo sapiens; identical to SEQ ID NO: 765438

SEQ ID NO: 765442 - protein, 214 aa, Homo sapiens
SCLGSEKGYQCECPRGLVLSEDNHTCQVPVLCKSNAIEVNIPRELVGGLELFLTNTSCRGVSNGTHVNILFSLKTCGTVVDVVNDKIVASNLVTGLPKQTPGSSGDFIIRTSKLLIPVTCEFPRLYTISEGYVPNLRNSPLEIMSRNHGIFPFTLEIFKDNEFEEPYREALPTLKLRDSLYFGIEPVVHVSGLESLVESCFATPTSKIDELCFR

SEQ ID NO: 765443 - protein, 309 aa, Homo sapiens
SCLGSEKGYQCECPRGLVLSEDNHTCQVPVLCKSNAIEVNIPRELVGGLELFLTNTSCRGVSNGTHVNILFSLKTCGTVVDVVNDKIVASNLVTGLPKQTPGSSGDFIIRTSKLLIPVTCEFPRLYTISEGYVPNLRNSPLEIMSRNHGIFPFTLEIFKDNEFEEPYREALPTLKLRDSLYFGIEPVVHVSGLESLVESCFATPTSKIDEVLKYYLIRDGCVSDDSVKQYTSRDHLAKHFQVPVFKFVGKDHKEVFLHCRVLVCGVLDERSRCAQGCHRRMRRGAGGEDSAGLQGQTLTGGPIRIDWED

SEQ ID NO: 765444 - protein, 214 aa, Homo sapiens; identical to SEQ ID NO: 765442

SEQ ID NO: 765445 - protein, 214 aa, Homo sapiens; identical to SEQ ID NO: 765442

SEQ ID NO: 765446 - protein, 227 aa, Homo sapiens
MSHHTRTLGVVLSPQQGAPAGPGGGLGTPYHSHPCKPRQVPVSESQPPPHTMQVGRWAGLGVGQAEATSVRLGLHGLEPVFPYLGHDLQGPAVSHGDGLAGVGRELALLLGGPEQRGAKHRAKVVQGHLIDCLLLCHPVEDRSRGCCFNATTRREAEGLCRARVLREGVTSTLAVLQADSSLGVSSTRRTAAGGAARAAADGQSSPRATPATTPSPGSPRQGRLSME

SEQ ID NO: 765447 - protein, 102 aa, Homo sapiens [sequence omitted]

SEQ ID NO: 765448 - protein, 101 aa, Homo sapiens
CHIKFNPPATDFTYAQNNTWTLLGIGLAFLMTHITVAVLCFLANRKVPIRKTEGSGNCAFVNPVYGNWSNPEKTESSVYSFSNPLYGTTSGSLETLSHHLK

SEQ ID NO: 765449 - protein, 100 aa, Homo sapiens
PVGRIHRHLKTRTTSHGRVGATAAVHRAAIPGYLTAEVLELAGLWVIVALNVWLILSGSPFIDNSRNLLGPKCGRLQLPSPPQDPITSLFCLNSADSKVK

SEQ ID NO: 765450 - protein, 108 aa, Homo sapiens
FQSHFLLQSKDCNHPSSADKHSHQIHSYQLYTHPLLHPWDHRDPPRTDHHTHGHHVHNPPLLHSGDHPHLHSADHEGHHDKGHQFHVHPLLHSGDDLDPHRADHSSHY

SEQ ID NO: 765451 - protein, 376 aa, Homo sapiens
GGRPRGSERWDTGTLPEQTTTPMATMSTIHPSSTPETTHTSTVLTTKATTTRATSSMSTPSSTPGTTWILTELTTAATTTAATGPTATPSSTPGTTWILTEPSTTATVTVPTGSTPTASSTRATAGTLKVLTSTTTTPTVISSRATPSSSPGTATALPALRSTATTPTATSVTAIPSSSLGTAWTRLSQTTTPTATMSTATPSSTPETVHTSTVLTTTATTTRATGSVATPSSTPGTAHTTKVPTTTTTGFTATPSSSPGTALTPPVWISTTTTPTTRGSTVTPSSIPGTTHTATVLTTTTTTVATGSMATPSSSTQTSGTPPSLTTTATTITATGSTTNPSSTPGTTPIPPVLTTTATTPAATSSTVTPSSALGT

SEQ ID NO: 765452 - protein, 736 aa, Homo sapiens
MSLSENSVFAYESSVHSTNVLLSLNDQRKKDVLCDVTIFVEGQRFRAHRSVLAACSSYFHSRIVGQADGELNITLPEEVTVKGFEPLIQFAYTAKLILSKENVDEVCKCVEFLSVHNIEESCFQFLKFKFLDSTADQQECPRKKCFSSHCQKTDLKLSLLDQRDLETDEVEEFLENKNVQTPQCKLRRYQGNAKASPPLQDSASQTYESMCLEKDAALALPSLCPKYRKFQKAFGTDRVRTGESSVKDIHASVQPNERSENECLGGVPECRDLQVMLKCDESKLAMEPEETKKDPASQCPTEKSEVTPFPHNSSIDPHGLYSLSLLHTYDQYGDLNFAGMQNTTVLTEKPLSGTDVQEKTFGESQDLPLKSDLGTREDSSVASSDRSSVEREVAEHLAKGFWSDICSTDTPCQMQLSPAVAKDGSEQISQKRSECPWLGIRISESPEPGQRTFTTLSSVNCPFISTLSTEGCSSNLEIGNDDYVSEPQQEPCPYACVISLGDDSETDTEGDSESCSAREQECEVKLPFNAQRIISLSRNDFQSLLKMHKLTPEQLDCIHDIRRRSKNRIAAQRCRKRKLDCIQNLESEIEKLQSEKESLLKERDHILSTLGETKQNLTGLCQKVCKEAALSQEQIQILAKYSAADCPLSFLISEKDKSTPDGELALPSIFSLSDRPPAVLPPCARGNSEPGYARGQESQQMSTATSEQAGPAEQCRQSGGISDFCQQMTDKCTTDE

SEQ ID NO: 765453 - protein, 736 aa, Homo sapiens; identical to SEQ ID NO: 765452

SEQ ID NO: 765454 - protein, 736 aa, Homo sapiens; identical to SEQ ID NO: 765452

SEQ ID NO: 765455 - protein, 736 aa, Homo sapiens; identical to SEQ ID NO: 765452

SEQ ID NO: 765456 - protein, 361 aa, Homo sapiens
CLGNIARPLSPEKGKKKKKIDTIDLEEGRAQSGGELGGGGRGKMAAAAAAAAEQQSSNGPVKKSMREKAVERRSVNKEHNSNFKAGYIPIDEDRLHKTGLRGRKGNLAICVIILLFILAVINLIITLVIWAVIRIGPNGCDSMEFHESGLLRFKQVSDMGVIHPLYKSTVGGRRNENLVITGNNQPIVFQQGTTKLSVENNKTSITSDIGMQFFDPRTQNILFSTDYETHEFHLPSGVKSLNVQKASTERITSNATSDLNIKVDGRAIVRGNEGVFIMGKTIEFHMGGNMELKAENSIILNGSVMVSTTRLPSSSSGDQLGSGDWVRYKLCMCADGTLFKVQVTSQNMGCQISDNPCGNTH

SEQ ID NO: 765457 - protein, 291 aa, Homo sapiens
CLGNIARPLSPEKGKKKKKIDTIDLEEGRAQSGGELGGGGRGKMAAAAAAAAEQITLVIWAVIRIGPNGCDSMEFHESGLLRFKQVSDMGVIHPLYKSTVGGRRNENLVITGNNQPIVFQQGTTKLSVENNKTSITSDIGMQFFDPRTQNILFSTDYETHEFHLPSGVKSLNVQKASTERITSNATSDLNIKVDGRAIVRGNEGVFIMGKTIEFHMGGNMELKAENSIILNGSVMVSTTRLPSSSSGDQLGSGDWVRYKLCMCADGTLFKVQVTSQNMGCQISDNPCGNTH

SEQ ID NO: 765458 - protein, 257 aa, Homo sapiens
MCEGEEGLGWRPLSYFSTATITLVIWAVIRIGPNGCDSMEFHESGLLRFKQVSDMGVIHPLYKSTVGGRRNENLVITGNNQPIVFQQGTTKLSVENNKTSITSDIGMQFFDPRTQNILFSTDYETHEFHLPSGVKSLNVQKASTERITSNATSDLNIKVDGRAIVRGNEGVFIMGKTIEFHMGGNMELKAENSIILNGSVMVSTTRLPSSSSGDQLGSGDWVRYKLCMCADGTLFKVQVTSQNMGCQISDNPCGNTH

SEQ ID NO: 765459 - protein, 361 aa, Homo sapiens; identical to SEQ ID NO: 765456

SEQ ID NO: 765460 - protein, 361 aa, Homo sapiens; identical to SEQ ID NO: 765456

SEQ ID NO: 765461 - protein, 361 aa, Homo sapiens; identical to SEQ ID NO: 765456

SEQ ID NO: 765462 - protein, 398 aa, Homo sapiens
CLGNIARPLSPEKGKKKKKIDTIDLEEGRAQSGGELGGGGRGKMAAAAAAAAEQQSSNGPVKKSMREKAVERRSVNKEHNSNFKAGYIPIDEDRLHKTGLRGRKGNLAICVIILLFILAVINLILPGSQARDRRAFSGIPDAYEKKDLKILSFGKSRGKSHITLVIWAVIRIGPNGCDSMEFHESGLLRFKQVSDMGVIHPLYKSTVGGRRNENLVITGNNQPIVFQQGTTKLSVENNKTSITSDIGMQFFDPRTQNILFSTDYETHEFHLPSGVKSLNVQKASTERITSNATSDLNIKVDGRAIVRGNEGVFIMGKTIEFHMGGNMELKAENSIILNGSVMVSTTRLPSSSSGDQLGSGDWVRYKLCMCADGTLFKVQVTSQNMGCQISDNPCGNTH

SEQ ID NO: 765463 - protein, 361 aa, Homo sapiens; identical to SEQ ID NO: 765456

SEQ ID NO: 765464 - protein, 361 aa, Homo sapiens; identical to SEQ ID NO: 765456

SEQ ID NO: 765465 - protein, 147 aa, Homo sapiens
CLGNIARPLSPEKGKKKKKIDTIDLEEGRAQSGGELGGGGRGKMAAAAAAAAEQQSSNGPVKKSMREKAVERRSVNKEHNSNFKAGYIPIDEDRLHKTGLRGRKGNLAICVIILLFILAVINLIVSICKNTHFNCHGEFFICFIVKS

SEQ ID NO: 765466 - protein, 183 aa, Homo sapiens
FNKWCWENWLAKCRKLKLDPFLTPYTKINSRWIKDLNVRPKTINTLEENLGNTIQDIGMGKDFMAETPKAMGTKVKIDRWDLIKLKSFCTAKETTIRVNRQPTKWEKIFAIYLSNKGLIPRIYNELKQIYKKKPHQQVGEGYEQTLLKRRHLCSQQTHEKMLIITGHQRNANQNHNEIPSHTS

SEQ ID NO: 765467 - protein, 56 aa, Homo sapiens
MKNDFDELREEGFRRSNYSELREDIQTKGKEVENFEKKLEECITRITNTEKCLKEL

SEQ ID NO: 765468 - protein, 492 aa, Homo sapiens
MGSCCSCLNRDSVPDNHPTKFKVTNVDDEGVELGSGVMELTQSELVLHLHRREAVRWPYLCLRRYGYDSNLFSFESGRRCQTGQGIFAFKCSRAEEIFNLLQDLMQCNSINVMEEPVIITRNSHPAELDLPRAPQPPNALGYTVSSFSNGCPGEGPRFSAPRRLSTSSLRHPSLGEESTHALIAPDEQSHTYVNTPASEDDHRRGRHCLQPLPEGQAPFLPQARGPDQRDPQVFLQPGQVKFVLGPTPARRHMVKCQGLCPSLHDPPHHNNNNEAPSECPAQPKCTYENVTGGLWRGAGWRLSPEEPGWNGLAHRRAALLHYENLPPLPPVWESQAQQLGGEAGDDGDSRDGLTPSSNGFPDGEEDETPLQKPTSTRAAIRSHGSFPVPLTRRRGSPRVFNFDFRRPGPEPPRQLNYIQVELKGWGGDRPKGPQNPSSPQAPMPTTHPARSSDSYAVIDLKKTVAMSNLQRALPRDDGTARKTRHNSTDLPL

SEQ ID NO: 765469 - protein, 74 aa, Homo sapiens
EGLAPGGRRLLQRDPGAGPGAARAAGRCEPQVYPRGIRVTSLQTVCHDSPPRTGGIKWEPFPMPLPRSAPRWPG

SEQ ID NO: 765470 - protein, 208 aa, Homo sapiens
MASSLLAGERLVRALGPGGELEPERLPRKLRAELEAALGKKHKGGDSSSGPQRLVSFRLIRDLHQHLRERDSKLYLHELLEGSEIYLPEVVKPPRNPELVARLEKIKIQLANEEYKRITRNVTCQDTRHGGTLSDLGKQVRSLKALVITIFNFIVTVVAAFVCTYLGSQYIFTEMASRVLAALIVASVVGLAELYVMVRAMEGELGEL

SEQ ID NO: 765471 - protein, 208 aa, Homo sapiens; identical to SEQ ID NO: 765470

SEQ ID NO: 765472 - protein, 208 aa, Homo sapiens; identical to SEQ ID NO: 765470

SEQ ID NO: 765473 - protein, 208 aa, Homo sapiens; identical to SEQ ID NO: 765470

SEQ ID NO: 765474 - protein, 152 aa, Homo sapiens
MASSLLAGERLVRALGPGGELEPERLPRKLRAELEAALGKKHKGGDSSSGPQRLVSFRLIRDLHQHLRERDSKLYLHELLEGSEIYLPEVVKPPRNPELVARLEKIKIQLANEEYKRITRNVTCQDTRHGGTLSDLGKQGEVLGDQASKTFS

SEQ ID NO: 765475 - protein, 208 aa, Homo sapiens; identical to SEQ ID NO: 765470

SEQ ID NO: 765476 - protein, 208 aa, Homo sapiens; identical to SEQ ID NO: 765470

SEQ ID NO: 765477 - protein, 208 aa, Homo sapiens; identical to SEQ ID NO: 765470

SEQ ID NO: 765478 - protein, 199 aa, Homo sapiens
MASSLLAGERLVRALGPGGELEPERLPRKLRAELEAALGKKHKGGDSSSGPQRLVSFRLIRDLHQHLRERDSKLYLHELLEGSEIYLPEVVKPPRNPELVARLEKIKIQLANEEYKRITRNVTCQDTRHGGTLSDLGKQVRSLKALVITIFNFIVTVVAAFVCTYLGSQYIFTEMASVSRHWAGQGALVGVLVGKGGRM

SEQ ID NO: 765479 - protein, 152 aa, Homo sapiens
NSFKALELRLVCGSPDTFSSALPLEPMIVMCFLTSWEYHSSHLIFLLQNPELVARLEKIKIQLANEEYKRITRNVTCQDTRHGGTLSDLGKQVRSLKALVITIFNFIVTVVAAFVCTYLGSQYIFTEMASVSRHWAGQGALVGVLVGKGGRM

SEQ ID NO: 765480 - protein, 151 aa, Homo sapiens
MLGLLSREPVDEVLQIPPSLLTCGGCQQNIGDRYFLKAIDQYWHEDCLSCDLCGCRLGEVGRRLYYKLGRKLCRRDYLRLFGQDGLCASCDKRIRAYEMTMRVKDKVYHLECFKCAACQKHFCVGDRYLLINSDIVCEQDIYEWTKINGMI

SEQ ID NO: 765481 - protein, 158 aa, Homo sapiens
MSSAIERKSLDPSEEPVDEVLQIPPSLLTCGGCQQNIGDRYFLKAIDQYWHEDCLSCDLCGCRLGEVGRRLYYKLGRKLCRRDYLRLFGQDGLCASCDKRIRAYEMTMRVKDKVYHLECFKCAACQKHFCVGDRYLLINSDIVCEQDIYEWTKINGMI

SEQ ID NO: 765482 - protein, 227 aa, Homo sapiens
MEGSAVTVLERGGASSPAERRSKRRRRSGGDGGGGGGARAPEGVRAPAAGQPRATKGAPPPPGTPPPSPMSSAIERKSLDPSEEPVDEVLQIPPSLLTCGGCQQNIGDRYFLKAIDQYWHEDCLSCDLCGCRLGEVGRRLYYKLGRKLCRRDYLRLFGQDGLCASCDKRIRAYEMTMRVKDKVYHLECFKCAACQKHFCVGDRYLLINSDIVCEQDIYEWTKINGMI

SEQ ID NO: 765483 - protein, 158 aa, Homo sapiens; identical to SEQ ID NO: 765481

SEQ ID NO: 765484 - protein, 156 aa, Homo sapiens
MGEATKDYIICWEPVDEVLQIPPSLLTCGGCQQNIGDRYFLKAIDQYWHEDCLSCDLCGCRLGEVGRRLYYKLGRKLCRRDYLRLFGQDGLCASCDKRIRAYEMTMRVKDKVYHLECFKCAACQKHFCVGDRYLLINSDIVCEQDIYEWTKINGMI

SEQ ID NO: 765485 - protein, 706 aa, Homo sapiens
MSPFLRIGLSNFDCGSCQSCQGEAVNPYCAVLVKEYVESENGQMYIQKKPTMYPPWDSTFDAHINKGRVMQIIVKGKNVDLISETTVELYSLAERCRKNNGKTEIWLELKPQGRMLMNARYFLEMSDTKDMNEFETEGFFALHQRRGAIKQAKVHHVKCHEFTATFFPQPTFCSVCHEFVWGLNKQGYQCRQCNAAIHKKCIDKVIAKCTGSAINSRETMFHKERFKIDMPHRFKVYNYKSPTFCEHCGTLLWGLARQGLKCDACGMNVHHRCQTKVANLCGINQKLMAEALAMIESTQQARCLRDTEQIFREGPVEIGLPCSIKNEARPPCLPTPGKREPQGISWESPLDEVDKMCHLPEPELNKERPSLQIKLKIEDFILHKMLGKGSFGKVFLAEFKKTNQFFAIKALKKDVVLMDDDVECTMVEKRVLSLAWEHPFLTHMFCTFQTKENLFFVMEYLNGGDLMYHIQSCHKFDLSRATFYAAEIILGLQFLHSKGIVYRDLKLDNILLDKDGHIKIADFGMCKENMLGDAKTNTFCGTPDYIAPEILLGQKYNHSVDWWSFGVLLYEMLIGQSPFHGQDEEELFHSIRMDNPFYPRWLEKEAKDLLVKLFVREPEKRLGVRGDIRQHPLFREINWEELERKEIDPPFRPKVKSPFDCSNFDKEFLNEKPRLSFADRALINSMDQNMFRNFSFMNPGMERLIS

SEQ ID NO: 765486 - protein, 648 aa, Homo sapiens
MSPFLRIGLSNFDCGSCQSCQGEAVNPYCAVLVKEYVESENGQMYIQKKPTMYPPWDSTFDAHINKGRVMQIIVKGKNVDLISETTVELYSLAERCRKNNGKTEIWLELKPQGRMLMNARYFLEMSDTKDMNEFETEGFFALHQRRGAIKQAKVHHVKCHEFTATFFPQPTFCSVCHEFVWGLNKQGYQCRQCNAAIHKKCIDKVIAKCTGSAINSRETMFHKERFKIDMPHRFKVYNYKSPTFCEHCGTLLWGLARQGLKCDACGMNVHHRCQTKVANLCGINQKLMAEALAMIESTQQARCLRDTEQIFREGPVEIGLPCSIKNEARPPCLPTPGKREPQGISWESPLDEVDKMCHLPEPELNKERPSLQIKLKIEDFILHKMLGKGSFGKVFLAEFKKTNQFFAIKALKKDVVLMDDDVECTMVEKRVLSLAWEHPFLTHMFCTFQTKENLFFVMEYLNGGDLMYHIQSCHKFDLSRATFYAAEIILGLQFLHSKGIVYRDLKLDNILLDKDGHIKIADFGMCKENMLGDAKTNTFCGTPDYIAPEILLGQKYNHSVDWWSFGVLLYEMLIGQSPFHGQDEEELFHSIRMDNPFYPRWLEKEAKDLLVKVRSEAKSVFIRRALGLLVSFLFLLVSNLHVANNDYY

SEQ ID NO: 765487 - protein, 315 aa, Homo sapiens
GEKEEGRGERRELAPKWEKAASERGRGARRAPGSQRDLGRGARSRRAWRAPRGDPAGRERSTARTSPGPMYQVSGQRPSGCDAPYGAPSAAPGPAQTLSLLPGLEVVTGSTHPAEAAPEEGSLEEAATPMPQGNGPGIPQGLDSTDLDVPTEAVTCQPQGNPLGCTPLLPNDSGHPSELGGTRRAGNGALGGPKAHRKLQTHPSLASQGSKKSKSSSKSTTSQIPLQAQEDCCVHCILSCLFCEFLTLCNIVLDCATCGSCSSEDSCLCCCCCGSGECADCDLPCDLDCGILDACCESADCLEICMECCGLCFSS

SEQ ID NO: 765488 - protein, 109 aa, Homo sapiens
GEKEEGRGERRELAPKWEKAASERGRGARRAPGSQRDLGRGARSRRAWRAPRGDPAGRERSTARTSPGPMYQVSGQRPSGCDAPYGAPSAAPGPGLPLSSTPGLEDRKM

SEQ ID NO: 765489 - protein, 307 aa, Homo sapiens
GEKEEGRGERRELAPKWEKAASERGRGARRAPGSQRDLGRGARSRRAWRAPRGDPAGRERSTARTSPGPMYQVSGQRPSGCDAPYGAPSAAPGPAQTLSLLPGLEVVTGSTHPAEAAPEEGSLEEAATPMPQGNGPGIPQGLDSTDLDVPTEAVTCQPQGNPLGCTPLLPNDSGHPSELGGTRRAGNGALGGPKAHRKLQTHPSLASQGSKKSKSSSKSTTSQIPLQAQEDCCVHCILSCLFCEFLTLCNIVLDCATSSAVGGGPMAEKPELFTGLPGSYIAEDLTGQPRGRAGVGTAGGSQGWGTL

SEQ ID NO: 765490 - protein, 315 aa, Homo sapiens; identical to SEQ ID NO: 765487

SEQ ID NO: 765491 - protein, 177 aa, Homo sapiens
GEKEEGRGERRELAPKWEKAASERGRGARRAPGSQRDLGRGARSRRAWRAPRGDPAGRERSTARTSPGPMYQVSGQRPSGCDAPYGAPSAAPGPAQTLSLLPGLEVVTGSTHPAEAAPEEGSLEEAATPMPQGNGPGIPQGLDSTDLDVPTEAVTCQPQGNPLGCTPLACLSPPPQA

SEQ ID NO: 765492 - protein, 224 aa, Homo sapiens
GEKEEGRGERRELAPKWEKAASERGRGARRAPGSQRDLGRGARSRRAWRAPRGDPAGRERSTARTSPGPMYQVSGQRPSGCDAPYGAPSAAPGPAQTLSLLPGLEVVTGSTHPAEAAPEEGSLEEAATPMPQGNGPGIPQGLDSTDLDVPTEAVTCQPQGNPLGCTPLLPNDSGHPSELGGTRRAGNGALGGPKAHRKLQTHPSLASQGSKKSKSSSKSTTLLS

SEQ ID NO: 765493 - protein, 254 aa, Homo sapiens
GEKEEGRGERRELAPKWEKAASERGRGARRAPGSQRDLGRGARSRRAWRAPRGDPAGRERSTARTSPGPMYQVSGQRPSGCDAPYGAPSAAPGPGQPQGNPLGCTPLLPNDSGHPSELGGTRRAGNGALGGPKAHRKLQTHPSLASQGSKKSKSSSKSTTSQIPLQAQEDCCVHCILSCLFCEFLTLCNIVLDCATCGSCSSEDSCLCCCCCGSGECADCDLPCDLDCGILDACCESADCLEICMECCGLCFSS

SEQ ID NO: 765494 - protein, 306 aa, Homo sapiens
GEKEEGRGERRELAPKWEKAASERGRGARRAPGSQRDLGRGARSRRAWRAPRGDPAGRERSTARTSPGPMYQVSGQRPSGCDAPYGAPSAAPGPAQTLSLLPGLEVVTGSTHPAEAAPEEGSLEEAATPMPQGNGPGIPQGLDSTDLDVPTEAVTCQPQGNPLGCTPLLPNDSGHPSELGGTRRAGNGALGGPKAHRKLQTHPSLASQGSTLGTQRDLGKGALEPGAPADSSRVPLSGARPRTVTQGLRSPLSLVLSYPPMSSQNPSLENSGGHSEGPPPQPWVVGPWQRSLNSLLGYQVHTLLRT

SEQ ID NO: 765495 - protein, 250 aa, Homo sapiens
GEKEEGRGERRELAPKWEKAASERGRGARRAPGSQRDLGRGARSRRAWRAPRGDPAGRERSTARTSPGPMYQVSGQRPSGCDAPYGAPSAAPGPAQTLSLLPGLEVVTGSTHPAEAAPEEGSLEEAATPMPQGNGPGIPQGLDSTDLDVPTEAVTCQPQGNPLGCTPLLPNDSGHPSELGGTRRAGNGALGGPKAHRKLQTHPSLASQGSKKSKSSSKSTTSQIPLQAQEGKHPSHLSLGEASKAGFLEA

SEQ ID NO: 765496 - protein, 311 aa, Homo sapiens
MEPQPPLGPGTPARLCADPPVAPSPGLSSDHPCLHPPSFACSTNPGRVAGGGVRLLAPLQGQNTNLTVGGALRYPPPIKAIPTLKKKKKKKTKKKKKKKNTTKTTETKQRKRGPATRNNHTPLGGDPNELIGRKPQSYARTERRPPQTKSRCPQLHTTRQARARLDHTQVDAWGNTNDYRLPPSAAQATPLPRGRAQQRKAHSTEKSAHRGYITNISAASSAPHTANYAAPETPCTSHSIIKSNPAEKYKSDTQQKRRTYKRPARERNHSRNHAQQATHSRKHPTAEQLRPIRIRDSLRDNRTQTTITNNS

SEQ ID NO: 765497 - protein, 71 aa, Homo sapiens
IELGLILLTDLELDLSGHRSQVKFMDLRCSQGGWCLWIQFRSPRALTFITRPPSPTSNIRLGNPASYSHEE

SEQ ID NO: 765498 - protein, 324 aa, Homo sapiens
EASRGPLTPVTKDSTLQDTPPPDPEIFRQRFRRFCYQNTFGPREALSRLKELCHQWLRPEINTKEQILELLVLEQFLSILPKELQVWLQEYRPDSGEEAVTLLEDLELDLSGQQVPGQVHGPEMLARGMVPLDPVQESSSFDLHHEATQSHFKHSSRKPRLLQSRALPAAHIPAPPHEGSPRDQAMASALFTADSQAMVKIEDMAVSLILEEWGCQNLARRNLSRDNRQENYGSAFPQGGENRNENEESTSKAETSEDSASRGETTGRSQKEFGEKRDQEGKTGERQQKNPEEKTRKEKRDSGPAIGKDKKTITGERGHKGEGE

SEQ ID NO: 765499 - protein, 205 aa, Homo sapiens
MTAESREATGLSPQAAQEKDGIVIVKVEEEDEEDHMWGQDSTLQDTPPPDPEIFRQRFRRFCYQNTFGPREALSRLKELCHQWLRPEINTKEQILELLVLEQFLSILPKELQVWLQEYRPDSGEEAVTLLEDLELDLSGQQVPGQVHGPEMLARGMVPLDPVQESSSFDLHHEATQSHFKHSSRKPRLLQSRGIVKKHIIKPPRT

SEQ ID NO: 765500 - protein, 120 aa, Homo sapiens
QPVCLQVPGQVHGPEMLARGMVPLDPVQESSSFDLHHEATQSHFKHSSRKPRLLQSRALPAAHIPAPPHEGSPRDQAMASALFTADSQAMVKIEDMAVSLILEEWGCQNLARRNLSRDNS

SEQ ID NO: 765501 - protein, 351 aa, Homo sapiens
MTAESREATGLSPQAAQEKDGIVIVKVEEEDEEDHMWGQDSTLQDTPPPDPEIFRQRFRRFCYQNTFGPREALSRLKELCHQWLRPEINTKEQILELLVLEQFLSILPKELQVWLQEYRPDSGEEAVTLLEDLELDLSGQQVPGQVHGPEMLARGMVPLDPVQESSSFDLHHEATQSHFKHSSRKPRLLQSRALPAAHIPAPPHEGSPRDQAMASALFTADSQAMVKIEDMAVSLILEEWGCQNLARRNLSRDNRQENYGSAFPQGGENRNENEESTSKAETSEDSASRGETTGRSQKEFGEKRDQEGKTGERQQKNPEEKTRKEKRDSGPAIGKDKKTITGERGHKGEGE

SEQ ID NO: 765502 - protein, 199 aa, Homo sapiens
MTAESREATGLSPQAAQEKDGIVIVKVEEEDEEDHMWGQDSTLQDTPPPDPEIFRQRFRRFCYQNTFGPREALSRLKELCHQWLRPEINTKEQILELLVLEQFLSILPKELQVWLQEYRPDSGEEAVTLLEDLELDLSGQQVPGQVHGPEMLARGMVPLDPVQESSSFDLHHEATQSHFKHSSRKPRLLQSRGKKQGFI

SEQ ID NO: 765503 - protein, 1184 aa, Homo sapiens
NSCHSSCNGPGAQSSTSDLLVMTRTRAALLLFTALATSLGFNLDTEELTAFRVDSAGFGDSVVQYANSWVVVGAPQKITAANQTGGLYQCGYSTGACEPIGLQVPPEAVNMSLGLSLASTTSPSQLLACGPTVHHECGRNMYLTGLCFLLGPTQLTQRLPVSRQECPRQEQDIVFLIDGSGSISSRNFATMMNFVRAVISQFQRPSTQFSLMQFSNKFQTHFTFEEFRRTSNPLSLLASVHQLQGFTYTATAIQNVVHRLFHASYGARRDATKILIVITDGKKEGDSLDYKDVIPMADAAGIIRYAIGVGLAFQNRNSWKELNDIASKPSQEHIFKVEDFDALKDIQNQLKEKIFAIEGTETTSSSSFELEMAQEGFSAVFTPDGPVLGAVGSFTWSGGAFLYPPNMSPTFINMSQENVDMRDSYLGYSTELALWKGVQSLVLGAPRYQHTGKAVIFTQVSRQWRMKAEVTGTQIGSYFGASLCSVDVDTDGSTDLVLIGAPHYYEQTRGGQVSVCPLPRGWRRWWCDAVLYGEQGHPWGRFGAALTVLGDVNGDKLTDVVIGAPGEEENRGAVYLFHGVLGPSISPSHSQRIAGSQLSSRLQYFGQALSGGQDLTQDGLVDLAVGARGQVLLLRTRPVLWVGVSMQFIPAEIPRSAFECREQVVSEQTLVQSNICLYIDKRSKNLLGSRDLQSSVTLDLALDPGRLSPRATFQETKNRSLSRVRVLGLKAHCENFNLLLPSCVEDSVTPITLRLNFTLVGKPLLAFRNLRPMLAALAQRYFTASLPFEKNCGADHICQDNLGISFSFPGLKSLLVGSNLELNAEVMVWNDGEDSYGTTITFSHPAGLSYRYVAEGQKQGQLRSLHLTCDSAPVGSQGTWSTSCRINHLIFRGGAQITFLATFDVSPKAVLGDRLLLTANVSSENNTPRTSKTTFQLELPVKYAVYTVVSSHEQFTKYLNFSESEEKESHVAMHRYQVNNLGQRDLPVSINFWVPVELNQEAVWMDVEVSHPQNPSLRCSSEKIAPPASDFLAHIQKNPVLDCSIAGCLRFRCDVPSFSVQEELDFTLKGNLSFGWVRQILQKKVSVVSVAEITFDTSVYSQLPGQEAFMRAQTTTVLEKYKVHNPTPLIVGSSIGGLLLLALITAVLYKVGFFKRQYKEMMEEANGQIAPENGTQTPSPPSEK

SEQ ID NO: 765504 - protein, 1170 aa, Homo sapiens
ISVPTVPPEAVNMSLGLSLASTTSPSQLLACGPTVHHECGRNMYLTGLCFLLGPTQLTQRLPVSRQECPRQEQDIVFLIDGSGSISSRNFATMMNFVRAVISQFQRPSTQFSLMQFSNKFQTHFTFEEFRRTSNPLSLLASVHQLQGFTYTATAIQNVVHRLFHASYGARRDATKILIVITDGKKEGDSLDYKDVIPMADAAGIIRYAIGVGLAFQNRNSWKELNDIASKPSQEHIFKVEDFDALKDIQNQLKEKIFAIEGTETTSSSSFELEMAQEGFSAVFTPDGPVLGAVGSFTWSGGAFLYPPNMSPTFINMSQENVDMRDSYLGYSTELALWKGVQSLVLGAPRYQHTGKAVIFTQVSRQWRMKAEVTGTQIGSYFGASLCSVDVDTDGSTDLVLIGAPHYYEQTRGGQVSVCPLPRGWRRWWCDAVLYGEQGHPWGRFGAALTVLGDVNGDKLTDVVIGAPGEEENRGAVYLFHGVLGPSISPSHSQRIAGSQLSSRLQYFGQALSGGQDLTQDGLVDLAVGARGQVLLLRLRAAFLRGSPGGPRFRWGCPPHVVLPGADGLSSARCSARRTRPVLWVGVSMQFIPAEIPRSAFECREQVVSEQTLVQSNICLYIDKRSKNLLGSRESPPLQPRTPWPLESPIPGPCLPPCSLSTQGVPVSTPSLRPPTGDLQSSVTLDLALDPGRLSPRATFQETKNRSLSRVRVLGLKAHCENFNLLLPSCVEDSVTPITLRLNFTLVGKPLLAFRNLRPMLAALAQRYFTASLPFEKNCGADHICQDNLGISFSFPGLKSLLVGSNLELNAEVMVWNDGEDSYGTTITFSHPAGLSYRYVAEGQKQGQLRSLHLTCDSAPVGSQGTWSTSCRINHLIFRGGAQITFLATFDVSPKAVLGDRLLLTANVSSENNTPRTSKTTFQLELPVKYAVYTVVSSHEQFTKYLNFSESEEKESHVAMHRYQVNNLGQRDLPVSINFWVPVELNQEAVWMDVEVSHPQNPSLRCSSEKIAPPASDFLAHIQKNPVLDCSIAGCLRFRCDVPSFSVQEELDFTLKGNLSFGWVRQILQKKVSVVSVAEITFDTSVYSQLPGQEAFMRAQTTTVLEKYKVHNPTPLIVGSSIGGLLLLALITAVLYKVGFFKRQYKEMMEEANGQIAPENGTQTPSPPSEK

SEQ ID NO: 765505 - protein, 171 aa, Homo sapiens
NSCHSSCNGPGAQSSTSDLLVMTRTRAALLLFTALATSLGFNLDTEELTAFRVDSAGFGDSVVQYANSWVVVGAPQKITAANQTGGLYQCGYSTGACEPIGLQVPPEAVNMSLGLSLASTTSPSQLLACGPTVHHECGRNMYLTGLCFLLGPTQLTQRLPVSRQEMVLLCH

SEQ ID NO: 765506 - protein, 146 aa, Homo sapiens
AHHLGPVISTFPSTRPSPPWMLHDFIPFLPSRSHQMPIPAAALHPKGAGFPENEGLLFLAKVKKALLKNRQRGCSRWLTSVIPISQAELGVRCLHAGFCTAGLPRWATLLAGREERPLGRDMAPVRLQLTQPQGQKRPNHFYFLRL

SEQ ID NO: 765507 - protein, 127 aa, Homo sapiens
LCCLGWSQTPGLKQSSRLSLPKCWDSRCEPPHPDSTNISCLHTPENPTDRNPFHMDFKLLKSILQMRKLRLREGTQTCRSGSCAAASTLLPKVFFVSSQGGGWSPPKDNSCQPNGWPLPVWLQHWCL

SEQ ID NO: 765508 - protein, 755 aa, Homo sapiens
MNDTRVTRTPFLSPLLHLFLSNHLPTPTSSFQVLLGDICSQLTPSLPFRWSYLHIPLVTYFQLLPLLSILIHPSLLWPADRGLPALLQAAVFWAGTERGSRPHPGWTGGPGCGGPGPGAPAQVRAAFLRGSPGGPRFRWGCPPHVVLPGADGLSSARCSARRTRPVLWVGVSMQFIPAEIPRSAFECREQVVSEQTLVQSNICLYIDKRSKNLLGSRESPPLQPRTPWPLESPIPGPCLPPCSLSTQGVPVSTPSLRPPTGDLQSSVTLDLALDPGRLSPRATFQETKNRSLSRVRVLGLKAHCENFNLLLPSCVEDSVTPITLRLNFTLVGKPLLAFRNLRPMLAALAQRYFTASLPFEKNCGADHICQDNLGISFSFPGLKSLLVGSNLELNAEVMVWNDGEDSYGTTITFSHPAGLSYRYVAEGQKQGQLRSLHLTCDSAPVGSQGTWSTSCRINHLIFRGGAQITFLATFDVSPKAVLGDRLLLTANVSSENNTPRTSKTTFQLELPVKYAVYTVVSSHEQFTKYLNFSESEEKESHVAMHRYQVNNLGQRDLPVSINFWVPVELNQEAVWMDVEVSHPQNPSLRCSSEKIAPPASDFLAHIQKNPVLDCSIAGCLRFRCDVPSFSVQEELDFTLKGNLSFGWVRQILQKKVSVVSVAEITFDTSVYSQLPGQEAFMRAQTTTVLEKYKVHNPTPLIVGSSIGGLLLLALITAVLYKVGFFKRQYKEMMEEANGQIAPENGTQTPSPPSEK

SEQ ID NO: 765509 - protein, 755 aa, Homo sapiens; identical to SEQ ID NO: 765508

SEQ ID NO: 765510 - protein, 48 aa, Homo sapiens
MDVEVSHPQVPKDCMWLLHECPFYLDSLCPMWVPDVPAETLVLCIFPQ

SEQ ID NO: 765511 - protein, 61 aa, Homo sapiens
DLQSSVTLDLALDPGRLSPRATFQETKNRSLSRVRVLGLKAHCENFNLLLPVRLGMNVGGG

SEQ ID NO: 765512 - protein, 480 aa, Homo sapiens
NSPQASPFKMHPGVLAAFLFLSWTHCRALPLPSGGDEDDLSEEDLQFAERYLRSYYHPTNLAGILKENAASSMTERLREMQSFFGLEVTGKLDDNTLDVMKKPRCGVPDVGEYNVFPRTLKWSKMNLTYRIVNYTPDMTHSEVEKAFKKAFKVWSDVTPLNFTRLHDGIADIMISFGIKEHGDFYPFDGPSGLLAHAFPPGPNYGGDAHFDDDETWTSSSKGYNLFLVAAHEFGHSLGLDHSKDPGALMFPIYTYTGKSHFMLPDDDVQGIQSLYGPGDEDPNPKHPKTPDKCDPSLSLDAITSLRGETMIFKDRFFWRLHPQQVDAELFLTKSFWPELPNRIDAAYEHPSHDLIFIFRGRKFWALNGYDILEGYPKKISELGLPKEVKKISAAVHFEDTGKTLLFSGNQVWRYDDTNHIMDKDYPRLIEEDFPGIGDKVDAVYEKNGYIYFFNGPIQFEYSIWSNRIVRVMPANSILWC

SEQ ID NO: 765513 - protein, 228 aa, Homo sapiens
MFPIYTYTGKSHFMLPDDDVQGIQSLYGPGDEDPNPKHPKTPDKCDPSLSLDAITSLRGETMIFKDRFFWRLHPQQVDAELFLTKSFWPELPNRIDAAYEHPSHDLIFIFRGRKFWALNGYDILEGYPKKISELGLPKEVKKISAAVHFEDTGKTLLFSGNQVWRFVVLPYFGYRTIATIEKEFRNWVQSCVCETGFSFFTAPTVWYPWEPCGLRHLGVSLPVIALGV

SEQ ID NO: 765514 - protein, 92 aa, Homo sapiens
CSAWTNLGSVSHLDQSHQGKGAACPHLWSCERPARPVAQRSGTVYGTMHTGQQVALMWPLEGWRRAHYRNRRRASSPLTQDVLGNALALSED

SEQ ID NO: 765515 - protein, 268 aa, Homo sapiens
MSLSFLLLLFFSHLILSAWAHGEKRLAPKGQPGPAATDRNPRGSSSRQSSSSAMSSSSASSSPAASLGSQGSGLEQSSFQWSPSGRRTGSLYCRVGIGFHLQIYPDGKVNGSHEANMLSVLEIFAVSQGIVGIRGVFSNKFLAMSKKGKLHASAKFTDDCKFRERFQENSYNTYASAIHRTEKTGREWYVALNKRGKAKRGCSPRVKPQHISTHFLPRFKQSEQPELSFTVTVPEKKKPPSPIKPKIPLSAPRKNTNSVKYRLKFRFG

SEQ ID NO: 765516 - protein, 123 aa, Homo sapiens
MSLSFLLLLFFSHLILSAWAHGEKRLAPKGQPGPAATDRNPRGSSSRQSSSSAMSSSSASSSPAASLGSQGSGLEQSSFQWSPSGRRTGSLYCRVGIGFHLQIYPDGKVNGSHEANMLSQVHR

SEQ ID NO: 765517 - protein, 128 aa, Homo sapiens
RSSTGLERNDNSNQSSIADASPIKQENSSNSSPAPEPNSAVPSDGTEAKVDEAQADGKEHPGAEDASDEQNSQSSMEHSMNSSEKVDRQPSGDSGLAAETSAISQDLEGVPPSKKMKLEASQQNSEEM

SEQ ID NO: 765518 - protein, 444 aa, Homo sapiens
MPNSFQEHLASRTGAFNSEKSRDPQETCTTAPAAALLGAGQGQLGWLPGRRDPPAPRRPAVSHGPLGTCSSEEGSARVSAPRPHRAPRAGGRRGPSPPPQEGVRGVPSGRREARGAAVAAARSRTPAAAAARLPLLCAAAARACAGPGARRPRALCVCCVCVCVCVCVRVCACESASVCARVSERRAGASVAAAEREQDPAGALPSLRLPAGTMSGRSVRAETRSRAKDDIKRVMAAIEKVRKWEKKWVTVGDTSLRIYKWVPVTEPKVDDKNKNKKKGKDEKCGSEVTTPENSSSPGMMDMHDDNSNQSSIADASPIKQENSSNSSPAPEPNSAVPSDGTEAKVDEAQADGKEHPGAEDASDEQNSQSSMEHSMNSSEKVDRQPSGDSGLAAETSAISQVPRSRSQRGSQIGREPIGLSGDLEGVPPSKKMKLEASQQNSEEM

SEQ ID NO: 765519 - protein, 372 aa, Homo sapiens
MPNSFQEHLASRTGAFNSEKSRDPQETCTTAPAAALLGAGQGQLGWLPGRRDPPAPRRPAVSHGPLGTCSSEEGSARVSAPRPHRAPRAGGRRGPSPPPQEGVRGVPSGRREARGAAVAAARSRTPAAAAARLPLLCAAAARACAGPGARRPRALCVCCVCVCVCVCVRVCACESASVCARVSERRAGASVAAAEREQDPAGALPSLRLPAGTMSGRSVRAETRSRAKDDIKRVMAAIEKVRKWEKKWVTVGDTSLRIYKWVPVTEPKVDDKNKNKKKGKDEKCGSEVTTPENSSSPGMMDMHGECPWPASLSCPARGLGQALGHVFVSPAGLFTFQARGRRAGQGPAASVPRRRVSGGEDVSFPSVPSQET

SEQ ID NO: 765520 - protein, 210 aa, Homo sapiens
MSGRSVRAETRSRAKDDIKRVMAAIEKVRKWEKKWVTVGDTSLRIYKWVPVTEPKVDDKNKNKKKGKDEKCGSEVTTPENSSSPGMMDMHDDNSNQSSIADASPIKQENSSNSSPAPEPNSAVPSDGTEAKVDEAQADGKEHPGAEDASDEQNSQSSMEHSMNSSEKVDRQPSGDSGLAAETSAISQDLEGVPPSKKMKLEASQQNSEEM

SEQ ID NO: 765521 - protein, 434 aa, Homo sapiens
MTGPRATRDARCPTLSKSTSRPEPVPSTRRSQETRKKLARLHPPPRCWGLGRGSWAGSRGDATPPRPADRLSPMDPSAPAAPRKGQRACPHPAPTARPEPGVAVALRHLPRRASGASPLGDARPGGLRWPRRGAALRRRRRRGSPCSVQLPPGLALGQARGGPGLCVCVCVCVCVCVCVRVCACESASVCARVSERRAGASVAAAEREQDPAGALPSLRLPAGTMSGRSVRAETRSRAKDDIKRVMAAIEKVRKWEKKWVTVGDTSLRIYKWVPVTEPKVDDKNKNKKKGKDEKCGSEVTTPENSSSPGMMDMHDDNSNQSSIADASPIKQENSSNSSPAPEPNSAVPSDGTEAKVDEAQADGKEHPGAEDASDEQNSQSSMEHSMNSSEKVDRQPSGDSGLAAETSAISQDLEGVPPSKKMKLEASQQNSEEM

SEQ ID NO: 765522 - protein, 356 aa, Homo sapiens
MTGPRATRDARCPTLSKSTSRPEPVPSTRRSQETRKKLARLHPPPRCWGLGRGSWAGSRGDATPPRPADRLSPMDPSAPAAPRKGQRACPHPAPTARPEPGVAVALRHLPRRASGASPLGDARPGGLRWPRRGAALRRRRRRGSPCSVQLPPGLALGQARGGPGLCVCVCVCVCVCVCVRVCACESASVCARVSERRAGASVAAAEREQDPAGALPSLRLPAGTMSGRSVRAETRSRAKDDIKRVMAAIEKVRKWEKKWVTVGDTSLRIYKWVPVTEPKVDDKNKNKKKGKDEKCGSEVTTPENSSSPGMMDMHAGLFTFQARGRRAGQGPAASVPRRRVSGGEDVSFPSVPSQET

SEQ ID NO: 765523 - protein, 210 aa, Homo sapiens; identical to SEQ ID NO: 765520

SEQ ID NO: 765524 - protein, 402 aa, Homo sapiens
GAAELGSSPPSGPLSTRALCWAMEPAPDAQEARTVREALGRYEAALEGAVRALHEDMRGLQRGVERRVAEAMRLAGPLARTVADLQRDNQRLQAQLERLTRQVEALGLASGMSPVPGTPGTPSPPPAPGVPDRAPRLGSARFASHATFSLSGRGQSLDHDEASESEMRKTSNSCIMENGHQPGAEKNSSFTWSVPSSGYGAVTASKHSNSPPLVTPPQSPVSPQPPAITQVHRQGERRRELVRSQTLPRTSEAQARKALFEKWEQETAAGKGKGEARARLKRSQSFGVASASSIKQILLEWCRSKTLGYQHVDLQNFSSSWSDGMAFCALVHSFFPDAFDYNSLSPTQRQKNFELAFTMAENLANCERLIEVEDMMVMGRKPDPMCVFTYVQSLYNHLRRFE

SEQ ID NO: 765525 - protein, 402 aa, Homo sapiens; identical to SEQ ID NO: 765524

SEQ ID NO: 765526 - protein, 262 aa, Homo sapiens
GAAELGSSPPSGPLSTRALCWAMEPAPDAQEARTVREALGRYEAALEGAVRALHEDMRGLQRGVERRVAEAMRLAGPLARTVADLQRDNQRLQAQLERLTRQVEALGLASGMSPVPGTPGTPSPPPAPGVPDRAPRLGSARFASHATFSLSGRGQSLDHDEASESEMRKTSNSCIMENGHQPGAGPGDGPPEIAQNFSAPDPPRPRPVSLSLRLPHQPVTAITRVSDRFSGETSAAALSPMSAATLGGLNPSPSEVITPWTP

SEQ ID NO: 765527 - protein, 69 aa, Homo sapiens
PGVNRPRVASGISSLIHFHLSSPGNPMTNWPLAGALIRLQFLKRTSGGKSYTSGEVGLELLQYGGKGSS

SEQ ID NO: 765528 - protein, 477 aa, Homo sapiens
MLAENLVEEFEMKEDEPWYDHQDLQQDLQLAAELGKTLLDRNTELEDSVQQMYTTNQEQLQEIEEFTWQESYTFDTSMCCCYANHILYLTKQVELLRQMNEQHAKVYEQLDVTARELEETNQKLVADSKASQQKILSLTETIECLQTNIDHLQSQVEELKSSGQGRRSPGKCDQEKPAPSFACLKELYDLRQHFVYDHVFAEKITSLQGQPSPDEEENEHLKKTVTMLQAQLSLERQKRVTMEEEYGLVLKENSELEQQLGATGAYRARALELEAEVAEMRQMLQSEHPFVNGVEKLVPDSLYVPFKEPSQSLLEEMFLTVPESHRKPLKRSSSETILSSLAGSDIVKGHEETCIRRAKAVKQRGISLLHEVDTQYSALKVKYEELLKKCQEEQDSLSHKAVQTSRAAAKDLTGVNAQSEPVASGWELASVNPEPVSSPTTPPEYKALFKEIFSCIKKTKQEIDEQRTKYRSLSSHS

SEQ ID NO: 765529 - protein, 169 aa, Homo sapiens
MLAENLVEEFEMKEDEPWYDHQDLQQDLQLAAELGKTLLDRNTELEDSVQQMYTTNQEQLQEIEYLTKQVELLRQMNEQHAKVYEQLDVTARELEETNQKLVADSKASQQKILSLTETIECLQTNIDHLQSQVEELKSSGQGRRSPGKCDQEKPAPSFACLKELYDLRQ

SEQ ID NO: 765530 - protein, 454 aa, Homo sapiens
MLAENLVEEFEMKEDEPWYDHQDLQQDLQLAAELGKTLLDRNTELEDSVQQMYTTNQEQLQEIEYLTKQVELLRQMNEQHAKVYEQLDVTARELEETNQKLVADSKASQQKILSLTETIECLQTNIDHLQSQVEELKSSGQGRRSPGKCDQEKPAPSFACLKELYDLRQHFVYDHVFAEKITSLQGQPSPDEEENEHLKKTVTMLQAQLSLERQKRVTMEEEYGLVLKENSELEQQLGATGAYRARALELEAEVAEMRQMLQSEHPFVNGVEKLVPDSLYVPFKEPSQSLLEEMFLTVPESHRKPLKRSSSETILSSLAGSDIVKGHEETCIRRAKAVKQRGISLLHEVDTQYSALKVKYEELLKKCQEEQDSLSHKAVQTSRAAAKDLTGVNAQSEPVASGWELASVNPEPVSSPTTPPEYKALFKEIFSCIKKTKQEIDEQRTKYRSLSSHS

SEQ ID NO: 765531 - protein, 379 aa, Homo sapiens
MNEQHAKVYEQLDVTARELEETNQKLVADSKASQQKILSLTETIECLQTNIDHLQSQVEELKSSGQGRRSPGKCDQEKPAPSFACLKELYDLRQHFVYDHVFAEKITSLQGQPSPDEEENEHLKKTVTMLQAQLSLERQKRVTMEEEYGLVLKENSELEQQLGATGAYRARALELEAEVAEMRQMLQSEHPFVNGVEKLVPDSLYVPFKEPSQSLLEEMFLTVPESHRKPLKRSSSETILSSLAGSDIVKGHEETCIRRAKAVKQRGISLLHEVDTQYSALKVKYEELLKKCQEEQDSLSHKAVQTSRAAAKDLTGVNAQSEPVASGWELASVNPEPVSSPTTPPEYKALFKEIFSCIKKTKQEIDEQRTKYRSLSSHS

SEQ ID NO: 765532 - protein, 110 aa, Homo sapiens
MSRRQELPLSGRFLNPNSRSTSSLPAGPGANLRVKMREGVAGRRTSGFRHPCASRRHEGLPWTTARLSEAGVLGPPACVACPQTRRPRDTHHRGKTRLCQLPSPKPRTPS

SEQ ID NO: 765533 - protein, 136 aa, Homo sapiens
DSCHSHHSLDRNHVISKNQVIYMIPAKTLVQVAIYALGREPTFFFDPENFDPTRWLSKDKNITYFRNLGFGWGVRQCLGRRIAELEMTIFLINMLENFRVEIQHLSDVGTTFNLILMPEKPISFTFWPFNQEATQQ

SEQ ID NO: 765534 - protein, 99 aa, Homo sapiens
MEKLGNVESVYVIDPEDVALLFKSEGPNPERFLIPPWVAYHQYYQRPIGVLLKSRQPEKKDNHNLIERRRRFNINDRIKELGTLIPKSSDPEMRWNKGT

SEQ ID NO: 765535 - protein, 521 aa, Homo sapiens
MLAKGLPPRSVLVKGCQTFLSAPREGLGRLRVPTGEGAGISTRSPRPFNEIPSPGDNGWLNLYHFWRETGTHKVHLHHVQNFQKYGPIYREKLGNVESVYVIDPEDVALLFKSEGPNPERFLIPPWVAYHQYYQRPIGVLLKKSAAWKKDRVALNQEVMAPEATKNFLPLLDAVSRDFVSVLHRRIKKAGSGNYSGDISDDLFRFAFESITNVIFGERQGMLEEVVNPEAQRFIDAIYQMFHTSVPMLNLPPDLFRLFRTKTWKDHVAAWDVIFSKADIYTQNFYWELRQKGSVHHDYRGILYRLLGDSKMSFEDIKANVTEMLAGGVDTTSMTLQWHLYEMARNLKVQDMLRAEVLAARHQAQGDMATMLQLVPLLKASIKETLRLHPISVTLQRYLVNDLVLRDYMIPAKTLVQVAIYALGREPTFFFDPENFDPTRWLSKDKNITYFRNLGFGWGVRQCLGRRIAELEMTIFLINMLENFRVEIQHLSDVGTTFNLILMPEKPISFTFWPFNQEATQQ

SEQ ID NO: 765536 - protein, 450 aa, Homo sapiens
MLAKGLPPRSVLVKGCQTFLSAPREGLGRLRVPTGEGAGISTRSPRPFNEIPSPGDNGWLNLYHFWRETGTHKVHLHHVQNFQKYGPIYREKLGNVESVYVIDPEDVALLFKSEGPNPERFLIPPWVAYHQYYQRPIGVLLKKSAAWKKDRVALNQEVMAPEATKNFLPLLDAVSRDFVSVLHRRIKKAGSGNYSGDISDDLFRFAFESITNVIFGERQGMLEEVVNPEAQRFIDAIYQMFHTSVPMLNLPPDLFRLFRTKTWKDHVAAWDVIFSKADIYTQNFYWELRQKGSVHHDYRGILYRLLGDSKMSFEDIKANVTEMLAGGVDTTSMTLQWHLYEMARNLKVQDMLRAEVLAARHQAQGDMATMLQLVPLLKASIKETLRLHPISVTLQRYLVNDLVLRDYMIPAKVGAASRLQALPVREGWGRLELQTEGGTGALVGPLMAAV

SEQ ID NO: 765537 - protein, 544 aa, Homo sapiens
FPGLHEFGTSLKWSRYSHSCGDSMLAKGLPPRSVLVKGCQTFLSAPREGLGRLRVPTGEGAGISTRSPRPFNEIPSPGDNGWLNLYHFWRETGTHKVHLHHVQNFQKYGPIYREKLGNVESVYVIDPEDVALLFKSEGPNPERFLIPPWVAYHQYYQRPIGVLLKKSAAWKKDRVALNQEVMAPEATKNFLPLLDAVSRDFVSVLHRRIKKAGSGNYSGDISDDLFRFAFESITNVIFGERQGMLEEVVNPEAQRFIDAIYQMFHTSVPMLNLPPDLFRLFRTKTWKDHVAAWDVIFSKADIYTQNFYWELRQKGSVHHDYRGILYRLLGDSKMSFEDIKANVTEMLAGGVDTTSMTLQWHLYEMARNLKVQDMLRAEVLAARHQAQGDMATMLQLVPLLKASIKETLRLHPISVTLQRYLVNDLVLRDYMIPAKTLVQVAIYALGREPTFFFDPENFDPTRWLSKDKNITYFRNLGFGWGVRQCLGRRIAELEMTIFLINMLENFRVEIQHLSDVGTTFNLILMPEKPISFTFWPFNQEATQQ

SEQ ID NO: 765538 - protein, 498 aa, Homo sapiens
MLAKGLPPRSVLVKGCQTFLSAPREGLGRLRVPTGEGAGISTRSPRPFNEIPSPGDNGWLNLYHFWRETGTHKVHLHHVQNFQKYGPIYREKLGNVESVYVIDPEDVALLFKSEGPNPERFLIPPWVAYHQYYQRPIGVLLKKSAAWKKDRVALNQEVMAPEATKNFLPLLDAVSRDFVSVLHRRIKKAGSGNYSGDISDDLFRFAFESITNVIFGERQGMLEEVVNPEAQRFIDAIYQMFHTSVPMLNLPPDLFRLFRTKTWKDHVAAWDVIFSKADIYTQNFYWELRQKGSVHHDYRGILYRLLGDSKMSFEDIKANVTEMLAGGVDTTSMTLQWHLYEMARNLKVQDMLRAEVLAARHQAQGDMATMLQLVPLLKASIKETLRLHPISVTLQRYLVNDLVLRDYMIPAKTLVQVAIYALGREPTFFFDPENFDPTRWLSKDKNITYFRNLGFGWGVRQCLGRRIAELEMTIFLINMPEKPISFTFWPFNQEATQQ

SEQ ID NO: 765539 - protein, 502 aa, Homo sapiens
MLAKGLPPRSVLVKGCQTFLSAPREGLGRLRVPTGEGAGISTRSPRPFNEIPSPGDNGWLNLYHFWRETGTHKVHLHHVQNFQKYGPIYREKLGNVESVYVIDPEDVALLFKSEGPNPERFLIPPWVAYHQYYQRPIGVLLKKSAAWKKDRVALNQEVMAPEATKNFLPLLDAVSRDFVSVLHRRIKKAGSGNYSGDISDDLFRFAFESITNVIFGERQGMLEEVVNPEAQRFIDAIYQMFHTSVPMLNLPPDLFRLFRTKTWKDHVAAWDVIFSKADIYTQNFYWELRQKGSVHHDYRGILYRLLGDSKMSFEDIKANVTEMLAGGVDTTSMTLQWHLYEMARNLKVQDMLRAEVLAARHQAQGDMATMLQLVPLLKASIKETLRLHPISVTLQRYLVNDLVLRDYMIPAKTLVQVAIYALGREPTFFFDPENFDPTRWLSKDKNITYFRNLGFGWGVRQCLGRRIAELEMTIFLINMLENFRVEIQHLSDVGTTFNLILQ

SEQ ID NO: 765540 - protein, 641 aa, Homo sapiens
MSLHSRPGQQKRNSVSKKKKKKKSGEGDLKVRAQSEKVAAWSSLALATDPAFLPAHAAARAALFRNWVRPSVAPGLLLRSSRVAHLRLPSTQPEPIRPPGRPAFTSGRGPGARPRGGGGGPPQFLGPSHSAAKFPNTDSVRFEVLRGRWSTGFAGPARRRRRTGSDPVCVSLPGLRPCSIHSSPLLASALARCVHPSSPEPTGADSGALREKLGNVESVYVIDPEDVALLFKSEGPNPERFLIPPWVAYHQYYQRPIGVLLKKSAAWKKDRVALNQEVMAPEATKNFLPLLDAVSRDFVSVLHRRIKKAGSGNYSGDISDDLFRFAFESITNVIFGERQGMLEEVVNPEAQRFIDAIYQMFHTSVPMLNLPPDLFRLFRTKTWKDHVAAWDVIFSKADIYTQNFYWELRQKGSVHHDYRGILYRLLGDSKMSFEDIKANVTEMLAGGVDTTSMTLQWHLYEMARNLKVQDMLRAEVLAARHQAQGDMATMLQLVPLLKASIKETLRLHPISVTLQRYLVNDLVLRDYMIPAKTLVQVAIYALGREPTFFFDPENFDPTRWLSKDKNITYFRNLGFGWGVRQCLGRRIAELEMTIFLINMLENFRVEIQHLSDVGTTFNLILMPEKPISFTFWPFNQEATQQ

SEQ ID NO: 765541 - protein, 443 aa, Homo sapiens
RHEDGSVTEREGEKLGNVESVYVIDPEDVALLFKSEGPNPERFLIPPWVAYHQYYQRPIGVLLKKSAAWKKDRVALNQEVMAPEATKNFLPLLDAVSRDFVSVLHRRIKKAGSGNYSGDISDDLFRFAFESITNVIFGERQGMLEEVVNPEAQRFIDAIYQMFHTSVPMLNLPPDLFRLFRTKTWKDHVAAWDVIFSKADIYTQNFYWELRQKGSVHHDYRGILYRLLGDSKMSFEDIKANVTEMLAGGVDTTSMTLQWHLYEMARNLKVQDMLRAEVLAARHQAQGDMATMLQLVPLLKASIKETLRLHPISVTLQRYLVNDLVLRDYMIPAKTLVQVAIYALGREPTFFFDPENFDPTRWLSKDKNITYFRNLGFGWGVRQCLGRRIAELEMTIFLINMLENFRVEIQHLSDVGTTFNLILMPEKPISFTFWPFNQEATQQ

SEQ ID NO: 765542 - protein, 469 aa, Homo sapiens
MLAKGLPPRSVLVKGCQTFLSAPREGLGRLRVPTGEGAGISTRSPRPFNEIPSPGDNGWLNLYHFWRETGTHKVHLHHVQNFQKYGPIYRKSAAWKKDRVALNQEVMAPEATKNFLPLLDAVSRDFVSVLHRRIKKAGSGNYSGDISDDLFRFAFESITNVIFGERQGMLEEVVNPEAQRFIDAIYQMFHTSVPMLNLPPDLFRLFRTKTWKDHVAAWDVIFSKADIYTQNFYWELRQKGSVHHDYRGILYRLLGDSKMSFEDIKANVTEMLAGGVDTTSMTLQWHLYEMARNLKVQDMLRAEVLAARHQAQGDMATMLQLVPLLKASIKETLRLHPISVTLQRYLVNDLVLRDYMIPAKTLVQVAIYALGREPTFFFDPENFDPTRWLSKDKNITYFRNLGFGWGVRQCLGRRIAELEMTIFLINMLENFRVEIQHLSDVGTTFNLILMPEKPISFTFWPFNQEATQQ

SEQ ID NO: 765543 - protein, 301 aa, Homo sapiens [sequence omitted]

SEQ ID NO: 765544 - protein, 370 aa, Homo sapiens
ETLRLHPISVTLQRYLVNDLVLRDYKIPAKTLVQVAIYCSGNYSGDISDDLFRFAFESITNVIFGERQGMLEEVVNPEAQRFIDAIYQMFHTSVPMLNLPPDLFRLFRTKTWKDHVAAWDVIFSKADIYTQNFYWELRQKGSVHHDYRGILYRLLGDSKMSFEDIKANVTEMLAGGVDTTSMTLQWHLYEMARNLKVQDMLRAEVLAARHQAQGDMATMLQLVPLLKASIKETLRLHPISVTLQRYLVNDLVLRDYMIPAKTLVQVAIYALGREPTFFFDPENFDPTRWLSKDKNITYFRNLGFGWGVRQCLGRRIAELEMTIFLINMLENFRVEIQHLSDVGTTFNLILMPEKPISFTFWPFNQEATQQ

SEQ ID NO: 765545 - protein, 521 aa, Homo sapiens; identical to SEQ ID NO: 765535

SEQ ID NO: 765546 - protein, 521 aa, Homo sapiens; identical to SEQ ID NO: 765535

SEQ ID NO: 765547 - protein, 495 aa, Homo sapiens
MLAKGLPPRSVLVKGCQTFLSAPREGLGRLRVPTGEGAGISTRSPRPFNEIPSPGDNGWLNLYHFWRETGTHKVHLHHVQNFQKYGPIYREKLGNVESVYVIDPEDVALLFKSEGPNPERFLIPPWVAYHQYYQRPIGVLLKKSAAWKKDRVALNQEVMAPEATKNFLPLLDAVSRDFVSVLHRRIKKAGSGNYSGDISDDLFRFAFESITNVIFGERQGMLEEVVNPEAQRFIDAIYQMFHTSVPMLNLPPDLFRLFRTKTWKDHVAAWDVIFSKADIYTQNFYWELRQKGSVHHDYRGILYRLLGDSKMSFEDIKANVTEMLAGGVDTTSMTLQWHLYEMARNLKVQDMLRAEVLAARHQAQGDMATMLQLVPLLKASIKETLRLHPISVTLQRYLVNDLVLRDYMIPAKTLVQVAIYALGREPTFFFDPENFDPTRWLSKDKNITYFRNLGFGWGVRQCLGRRIAELEMTIFLINQCESSWGHLGTLGWPWP

SEQ ID NO: 765548 - protein, 450 aa, Homo sapiens; identical to SEQ ID NO: 765536

SEQ ID NO: 765549 - protein, 537 aa, Homo sapiens
MRFSARPAALQHPLLASAGLCPRSLRSPELTRAHRSRQWRAKQRCETGTVFVSILQKRKLRLRGVKGLDSGPTVSKLWNCEAAVLSLYPELSSDPSISPSPPPLQGEKLGNVESVYVIDPEDVALLFKSEGPNPERFLIPPWVAYHQYYQRPIGVLLKKSAAWKKDRVALNQEVMAPEATKNFLPLLDAVSRDFVSVLHRRIKKAGSGNYSGDISDDLFRFAFESITNVIFGERQGMLEEVVNPEAQRFIDAIYQMFHTSVPMLNLPPDLFRLFRTKTWKDHVAAWDVIFSKADIYTQNFYWELRQKGSVHHDYRGILYRLLGDSKMSFEDIKANVTEMLAGGVDTTSMTLQWHLYEMARNLKVQDMLRAEVLAARHQAQGDMATMLQLVPLLKASIKETLRLHPISVTLQRYLVNDLVLRDYMIPAKTLVQVAIYALGREPTFFFDPENFDPTRWLSKDKNITYFRNLGFGWGVRQCLGRRIAELEMTIFLINMLENFRVEIQHLSDVGTTFNLILMPEKPISFTFWPFNQEATQQ

SEQ ID NO: 765550 - protein, 443 aa, Homo sapiens
SQDEPGEGISQGEKLGNVESVYVIDPEDVALLFKSEGPNPERFLIPPWVAYHQYYQRPIGVLLKKSAAWKKDRVALNQEVMAPEATKNFLPLLDAVSRDFVSVLHRRIKKAGSGNYSGDISDDLFRFAFESITNVIFGERQGMLEEVVNPEAQRFIDAIYQMFHTSVPMLNLPPDLFRLFRTKTWKDHVAAWDVIFSKADIYTQNFYWELRQKGSVHHDYRGILYRLLGDSKMSFEDIKANVTEMLAGGVDTTSMTLQWHLYEMARNLKVQDMLRAEVLAARHQAQGDMATMLQLVPLLKASIKETLRLHPISVTLQRYLVNDLVLRDYMIPAKTLVQVAIYALGREPTFFFDPENFDPTRWLSKDKNITYFRNLGFGWGVRQCLGRRIAELEMTIFLINMLENFRVEIQHLSDVGTTFNLILMPEKPISFTFWPFNQEATQQ

SEQ ID NO: 765551 - protein, 391 aa, Homo sapiens
MRTDSLTNQRYRKSAAWKKDRVALNQEVMAPEATKNFLPLLDAVSRDFVSVLHRRIKKAGSGNYSGDISDDLFRFAFESITNVIFGERQGMLEEVVNPEAQRFIDAIYQMFHTSVPMLNLPPDLFRLFRTKTWKDHVAAWDVIFSKADIYTQNFYWELRQKGSVHHDYRGILYRLLGDSKMSFEDIKANVTEMLAGGVDTTSMTLQWHLYEMARNLKVQDMLRAEVLAARHQAQGDMATMLQLVPLLKASIKETLRLHPISVTLQRYLVNDLVLRDYMIPAKTLVQVAIYALGREPTFFFDPENFDPTRWLSKDKNITYFRNLGFGWGVRQCLGRRIAELEMTIFLINMLENFRVEIQHLSDVGTTFNLILMPEKPISFTFWPFNQEATQQ

SEQ ID NO: 765552 - protein, 160 aa, Homo sapiens
CISQNLSLLFNDVCLYSGAITKTYVAQAGKIALTFSWAPHFPQTQVVCSLDQWLPGHGLRCRGQWEAPAQAKAQADISGSLLGLALRAETEGSPCPLENLTLQKFQTEPSYRVGEELSAGLSLQQEEGREHFISFWYGLELVVIILALVAQGYSHPSSPR

SEQ ID NO: 765553 - protein, 109 aa, Homo sapiens
MWKPMPSPSNMKASAALLCLLLTAAAFSPQGLAQPVGINTSTTCCYRFINKKIPKQRLESYRRTTSSHCPREAVIFKTKLDKEICADPTQKWVQDFMKHLDKKTQTPKL

SEQ ID NO: 765554 - protein, 106 aa, Homo sapiens
EKPFCRSCEAWILVQIPGIWNPWKNHCPVLGLGFPIYIMSTLCNHRTSKVRGNGGGCYFIINKDGKWLSAVAHACNPSTLGGRGRKITYGSEFKTILANMAKPRLY

SEQ ID NO: 765555 - protein, 212 aa, Homo sapiens
DVLENLEDPRSGPTELPELLKLYYRRLFPYSQYYRWLNYGGVIKNYFQHREFSFTLKDDIYIRYQSFNNQSDLEKEMQKMNPYKIDIGAVYSHRPNQHNTVKLGAFQAQEKELVFDIDMTDYDDVRRCCSSADICPKCWTLMTMAIRIIDRALKEDFGFKHRLWVYSGRRGVHCWVCDESVRKLSSAVRSGIVEYLSLVKGVTRRLKRYMIT

SEQ ID NO: 765556 - protein, 413 aa, Homo sapiens
METFDPTELPELLKLYYRRLFPYSQYYRWLNYGGVIKNYFQHREFSFTLKDDIYIRYQSFNNQSDLEKEMQKMNPYKIDIGAVYSHRPNQHNTVKLGAFQAQEKELVFDIDMTDYDDVRRCCSSADICPKCWTLMTMAIRIIDRALKEDFGFKHRLWVYSGRRGVHCWVCDESVRKLSSAVRSGIVEYLSLVKGGQDVKKKVHLSEKIHPFIRKSINIIKKYFEEYALVNQDILENKESWDKILALVPEKSFQKSHNSLQRWEHLKKVASRYQNNIKNDKYGPWLEWEIMLQYCFPRLDINVSKGINHLLKSPFSVHPKTGRISVPIDLQKVDQFDPFTVPTISFICRELDAISTNEEEKEENEAESDVKHRTRDYKKTSLAPYVKVFEHFLENLDKSRKGELLKKSDLQKDF

SEQ ID NO: 765557 - protein, 252 aa, Homo sapiens
METFDPTELPELLKLYYRRLFPYSQYYRWLNYGGVIKNYFQHREFSFTLKDDIYIRYQSFNNQSDLEKEMQKMNPYKIDIGAVYSHRPNQHNTVKLGAFQAQEKELVFDIDMTDYDDVRRCCSSADICPKCWTLMTMAIRIIDRALKEDFGFKHRLWVYSGRRGVHCWVCDESVRKLSSAVRSGIVEYLSLVKGGQDVKKKVHLSEKIHPFIRKSINIIKKYFEEYALVNQDILENKESWDHATALHPGQHK

SEQ ID NO: 765558 - protein, 243 aa, Homo sapiens
METFDPTELPELLKLYYRRLFPYSQYYRWLNYGGVIKNYFQHREFSFTLKDDIYIRYQSFNNQSDLEKEMQKMNPYKIDIGAVYSHRPNQHNTVKLGAFQAQEKELVFDIDMTDYDDVRRCCSSADICPKCWTLMTMAIRIIDRALKEDFGFKHRLWVYSGRRGVHCWVCDESVRKLSSAVRSGIVEYLSLVKGGQDVKKKVHLSEKIHPFIRSVGKVSKHFKVSDLPACAFRVTLLSIFTAG

SEQ ID NO: 765559 - protein, 284 aa, Homo sapiens
MAIRIIDRALKEDFGFKHRLWVYSGRRGVHCWVCDESVRKLSSAVRSGIVEYLSLVKGGQDVKKKVHLSEKIHPFIRKSINIIKKYFEEYALVNQDILENKESWDKILALVPETIHDELQQSFQKSHNSLQRWEHLKKVASRYQNNIKNDKYGPWLEWEIMLQYCFPRLDINVSKGINHLLKSPFSVHPKTGRISVPIDLQKVDQFDPFTVPTISFICRELDAISTNEEEKEENEAESDVKHRTRDYKKTSLAPYVKVFEHFLENLDKSRKGELLKKSDLQKDF

SEQ ID NO: 765560 - protein, 205 aa, Homo sapiens
METFDPTELPELLKLYYRRLFPYSQYYRWLNYGGVIKNYFQHREFSFTLKDDIYIRYQSFNNQSDLEKEMQKMNPYKIDIGAVYSHRPNQHNTVKLGAFQAQEKELVFDIDMTDYDDVRRCCSSADICPKCWTLMTMAIRIIDRALKEDFGFKHRLWVYSGRRGVHCWVCDESVRKLSSAVRSGIVEYLSLVKGVTRRLKRYMIT

SEQ ID NO: 765561 - protein, 128 aa, Homo sapiens
SSRLECSGMISAHCSLRLPGSSDSPASPSRVAGITGRISVPIDLQKVDQFDPFTVPTISFICRELDAISTNEEEKEENEAESDVKHRTRDYKKTSLAPYVKVFEHFLENLDKSRKGELLKKSDLQKDF

SEQ ID NO: 765562 - protein, 420 aa, Homo sapiens
METFDPTELPELLKLYYRRLFPYSQYYRWLNYGGVIKNYFQHREFSFTLKDDIYIRYQSFNNQSDLEKEMQKMNPYKIDIGAVYSHRPNQHNTVKLGAFQAQEKELVFDIDMTDYDDVRRCCSSADICPKCWTLMTMAIRIIDRALKEDFGFKHRLWVYSGRRGVHCWVCDESVRKLSSAVRSGIVEYLSLVKGGQDVKKKVHLSEKIHPFIRKSINIIKKYFEEYALVNQDILENKESWDKILALVPETIHDELQQSFQKSHNSLQRWEHLKKVASRYQNNIKNDKYGPWLEWEIMLQYCFPRLDINVSKGINHLLKSPFSVHPKTGRISVPIDLQKVDQFDPFTVPTISFICRELDAISTNEEEKEENEAESDVKHRTRDYKKTSLAPYVKVFEHFLENLDKSRKGELLKKSDLQKDF

SEQ ID NO: 765563 - protein, 420 aa, Homo sapiens; identical to SEQ ID NO: 765562

SEQ ID NO: 765564 - protein, 284 aa, Homo sapiens; identical to SEQ ID NO: 765559

SEQ ID NO: 765565 - protein, 124 aa, Homo sapiens
METFDPTELPELLKLYYRRLFPYSQYYRWLNYGGVIKNYFQHREFSFTLKDDIYIRYQSFNNQSDLEKEMQKMNPYKIDIGAVYSHRRTLDLSIVSGYILEGEVFIVGSVMNQLENCLLQYVLG

SEQ ID NO: 765566 - protein, 131 aa, Homo sapiens
METFDPTELPELLKLYYRRLFPYSQYYRWLNYGGVIKNYFQHREFSFTLKDDIYIRYQSFNNQSDLEKEMQKMNPYKIDIGAVYSHRPNQHNTVKLGAFQAQEKELVFDIDMTDYDDVRRCCRGEHCVSCC

SEQ ID NO: 765567 - protein, 93 aa, Homo sapiens
GEGTNLKDKQKETLAGGELGESVKGMALTRNQRNAPCSLIFLAPKHTAWELVEDTTFRFSELLRVCVSNKLSLLPAWGPHLETKNCVCCFSHL

SEQ ID NO: 765568 - protein, 99 aa, Homo sapiens
LVLEVSIAKVENEVDRSIQKVYKTYNGTNPDAASRAIDYVQRQLHCCGIHNYSDWENTDWFKETKNQSVPLSCCRETASNCNGSLAHPSDLYAEVSLLA

SEQ ID NO: 765569 - protein, 325 aa, Homo sapiens
LPGSGAGALRGLRRLRGGARRLLGSGLRDGAGAAGSAAQAVQFLARRRRRHCRSLGERSPALRAGPSRATGAMGQCGITSSKTVLVFLNLIFWGAAGILCYVGAYVFITYDDYDHFFEDVYTLIPAVVIIAVGALLFIIGLIGCCATIRESRCGLATFVIILLLVFVTEVVVVVLGYVYRAKVENEVDRSIQKVYKTYNGTNPDAASRAIDYVQRQLHCCGIHNYSDWENTDWFKETKNQSVPLSCCRETASNCNGSLAHPSDLYAEGCEALVVKKLQEIMMHVIWAALAFAAIQLLGMLCACIVLCRRSRDPAYELLITGGTYA

SEQ ID NO: 765570 - protein, 325 aa, Homo sapiens; identical to SEQ ID NO: 765569

SEQ ID NO: 765571 - protein, 325 aa, Homo sapiens; identical to SEQ ID NO: 765569

SEQ ID NO: 765572 - protein, 325 aa, Homo sapiens; identical to SEQ ID NO: 765569

SEQ ID NO: 765573 - protein, 325 aa, Homo sapiens; identical to SEQ ID NO: 765569

SEQ ID NO: 765574 - protein, 325 aa, Homo sapiens; identical to SEQ ID NO: 765569

SEQ ID NO: 765575 - protein, 92 aa, Homo sapiens
QCWYRLGVMDIVDPRRSAARRSEALAGVGAARRRRGCGERRAGRAVPSEEAPPPLPLSRGQLAFYAMWEPMSSSLMMTMTTSLKMCTRSSLL

SEQ ID NO: 765576 - protein, 274 aa, Homo sapiens
LPGSGAGALRGLRRLRGGARRLLGSGLRDGAGAAGSAAQAVQFLARRRRRHCRSLGERSPALRAGPSRATGAMGQCGITSSKTVLVFLNLIFWGAAGILCYVGAYVFITYDDYDHFFEDVYTLIPAVVIIAVGALLFIIGLIGCCATIRESRCGLATFVIILLLVFVTEVVVVVLGYVYRAKVENEVDRSIQKVYKTYNGTNPDAASRAIDYVQRQGCEALVVKKLQEIMMHVIWAALAFAAIQLLGMLCACIVLCRRSRDPAYELLITGGTYA

SEQ ID NO: 765577 - protein, 99 aa, Homo sapiens
MSGQAQWLTPVIPALWEAEAGGSRGQDIETILAHPSDLYAEGCEALVVKKLQEIMMHVIWAALAFAAIQLLGMLCACIVLCRRSRDPAYELLITGGTYA

SEQ ID NO: 765578 - protein, 220 aa, Homo sapiens
  misc_feature (218)..(218): Xaa can be any naturally occurring amino acid
LPGSGAGALRGLRRLRGGARRLLGSGLRDGAGAAGSAAQAVQFLARRRRRHCRSLGERSPALRAGPSRATGAMGQCGITSSKTVLVFLNLIFWGAAGILCYVGAYVFITYDDYDHFFEDVYTLIPAVVIIAVGALLFIIGLIGCCATIRESRCGLATFVIILLLVFVTEVVVVVLGYVYRAKVENEVDRSIQKVYKTYNGTNPDAASRAIDYVQRQLXWV

SEQ ID NO: 765579 - protein, 171 aa, Homo sapiens
SAGTGWGLWISSTHGARLRGGARRLLGSGLRDGAGAAGSAAQAVQFLARRRRRHCRSLGERSPALRAGPSRATGAMGQCGITSSKTVLVFLNLIFWGAAGILCYVGAYVFITYDDYDHFFEDVYTLIPAVVIIAVGALLFIIGLIGCCATIRESRCGLATVRCVVRTCRSI

SEQ ID NO: 765580 - protein, 117 aa, Homo sapiens
SAGTGWGLWISSTHGARLRGGARRLLGSGLRDGAGAAGSAAQAVQFLARRRRRHCRSLGERSPALRAGPSRATGAMGQCGITSSKTVLVFLNLIFWPIWTLHPDKSFKTFPLSHHLI

SEQ ID NO: 765581 - protein, 325 aa, Homo sapiens; identical to SEQ ID NO: 765569

SEQ ID NO: 765582 - protein, 328 aa, Homo sapiens
SAGTGWGLWISSTHGARLRGGARRLLGSGLRDGAGAAGSAAQAVQFLARRRRRHCRSLGERSPALRAGPSRATGAMGQCGITSSKTVLVFLNLIFWGAAGILCYVGAYVFITYDDYDHFFEDVYTLIPAVVIIAVGALLFIIGLIGCCATIRESRCGLATFVIILLLVFVTEVVVVVLGYVYRAKVENEVDRSIQKVYKTYNGTNPDAASRAIDYVQRQLHCCGIHNYSDWENTDWFKETKNQSVPLSCCRETASNCNGSLAHPSDLYAEGCEALVVKKLQEIMMHVIWAALAFAAIQLLGMLCACIVLCRRSRDPAYELLITGGTYA

SEQ ID NO: 765583 - protein, 325 aa, Homo sapiens; identical to SEQ ID NO: 765569

SEQ ID NO: 765584 - protein, 325 aa, Homo sapiens; identical to SEQ ID NO: 765569

SEQ ID NO: 765585 - protein, 325 aa, Homo sapiens; identical to SEQ ID NO: 765569

SEQ ID NO: 765586 - protein, 313 aa, Homo sapiens
LPGSGAGALRGLRRLRGGARRLLGSGLRDGAGAAGSAAQAVQFLARRRRRHCRSLGERSPALRAGPSRATGAMGQCGITSSKTVLVFLNLIFWGAAGILCYVGAYVFITYDDYDHFFEDVYTLIPAVVIIAVGALLFIIGLIGCCATIRESRCGLATFVIILLLVFVTEVVVVVLGYVYRAKVENEVDRSIQKVYKTYNGTNPDAASRAIDYVQRQLHCCGIHNYSDWENTDWFKETKNQSVPLSCCRETASNCNGSLAHPSDLYAEGCEALVVKKLQEIMMHLLGMLCACIVLCRRSRDPAYELLITGGTYA

SEQ ID NO: 765587 - protein, 325 aa, Homo sapiens; identical to SEQ ID NO: 765569

SEQ ID NO: 765588 - protein, 325 aa, Homo sapiens; identical to SEQ ID NO: 765569

SEQ ID NO: 765589 - protein, 325 aa, Homo sapiens; identical to SEQ ID NO: 765569

SEQ ID NO: 765590 - protein, 97 aa, Homo sapiens
IGPLRKIGPLRKIVPLSCCRETASNCNGSLAHPSDLYAEGCEALVVKKLQEIMMHVIWAALAFAAIQLLGMLCACIVLCRRSRDPAYELLITGGTYA

SEQ ID NO: 765591 - protein, 136 aa, Homo sapiens
  misc_feature (4)..(5): Xaa can be any naturally occurring amino acid
  misc_feature (7)..(7): Xaa can be any naturally occurring amino acid
  misc_feature (17)..(17): Xaa can be any naturally occurring amino acid
  misc_feature (21)..(21): Xaa can be any naturally occurring amino acid
  misc_feature (29)..(29): Xaa can be any naturally occurring amino acid
FIFXXRXVNISHPHYYXFCDXNQEQDDDXRGKSTATFPDCGTAANEPNDEKQGSYSYDHYSRDERVHIFKEVVIVIIKGCEALVVKKLQEIMMHVIWAALAFAAIQLLGMLCACIVLCRRSRDPAYELLITGGTYA

SEQ ID NO: 765592 - protein, 300 aa, Homo sapiens
LPGSGAGALRGLRRLRGGARRLLGSGLRDGAGAAGSAAQAVQFLARRRRRHCRSLGERSPALRAGPSRATGAMGQCGITSSKTVLVFLNLIFWGAAGILCYVGAYVFITYDDYDHFFEDVYTLIPAVVIIAVGALLFIIGLIGCCATIRESRCGLATFVIILLLVFVTEVVVVVLGYVYRAKVENEVDRSIQKVYKTYNGTNPDAASRAIDYVQRQFAEEPHWPPSLTGPVMPVRNVYKKEKARVITEEEKNFKAFASLRMARANARLFGIRAKRAKEAAEQDVEKKKYSPPGDLESVGS

SEQ ID NO: 765593 - protein, 156 aa, Homo sapiens
PWKGVVTFRCCHHCGKLTWCCWVCLMERCFHCFPVHLVFNLVQSFSPTSGVESCLLPQCDKCWPMVYRSCDASRGLVNACILGFVLLECSFVGALNNYVRSLATLLERTHGGKRLKLCEESQASHPSFSAEPRHQPTCQLNATVRVITSKITRKTT

SEQ ID NO: 765594 - protein, 116 aa, Homo sapiens
KLLSHSAKEHYQTQFPISQQNHSPVTDYPTQFHWGSQMARVCLKCKSLSPTLREASGAVEYALNTSGTNSCANGCTWTYTTLGLWAPFVPAAPSVLKTGALLFSSCESCCPASPSH

SEQ ID NO: 765595 - protein, 622 aa, Homo sapiens
MKENVASATVFTLLLFLNTCLLNGQLPPGKPEIFKCRSPNKETFTCWWRPGTDGGLPTNYSLTYHREGETLMHECPDYITGGPNSCHFGKQYTSMWRTYIMMVNATNQMGSSFSDELYVDVTYIVQPDPPLELAVEVKQPEDRKPYLWIKWSPPTLIDLKTGWFTLLYEIRLKPEKAAEWEIHFAGQQTEFKILSLHPGQKYLVQVRCKPDHGYWSAWSPATFIQIPSDFTMNDTTVWISVAVLSAVICLIIVWAVALKGYSMVTCIFPPVPGPKIKGFDAHLLEKGKSEELLSALGCQDFPPTSDYEDLLVEYLEVDDSEDQHLMSVHSKEHPSQGMKPTYLDPDTDSGRGSCDSPSLLSEKCEEPQANPSTFYDPEVIEKPENPETTHTWDPQCISMEGKIPYFHAGGSKCSTWPLPQPSQHNPRSSYHNITDVCELAVGPAGAPATLLNEAGKDALKSSQTIKSREEGKATQQREVESFHSETDQDTPWLLPQEKTPFGSAKPLDYVEIHKVNKDGALSLLPKQRENSGKPKKPGTPENNKEYAKVSGVMDNNILVLVPDPHAKNVACFEESAKEAPPSLEQNQAEKALANFTATSSKCRLQLGGLDYLDPACFTHSFH

SEQ ID NO: 765596 - protein, 521 aa, Homo sapiens
MKENVASATVFTLLLFLNTCLLNVQPDPPLELAVEVKQPEDRKPYLWIKWSPPTLIDLKTGWFTLLYEIRLKPEKAAEWEIHFAGQQTEFKILSLHPGQKYLVQVRCKPDHGYWSAWSPATFIQIPSDFTMNDTTVWISVAVLSAVICLIIVWAVALKGYSMVTCIFPPVPGPKIKGFDAHLLEKGKSEELLSALGCQDFPPTSDYEDLLVEYLEVDDSEDQHLMSVHSKEHPSQGMKPTYLDPDTDSGRGSCDSPSLLSEKCEEPQANPSTFYDPEVIEKPENPETTHTWDPQCISMEGKIPYFHAGGSKCSTWPLPQPSQHNPRSSYHNITDVCELAVGPAGAPATLLNEAGKDALKSSQTIKSREEGKATQQREVESFHSETDQDTPWLLPQEKTPFGSAKPLDYVEIHKVNKDGALSLLPKQRENSGKPKKPGTPENNKEYAKVSGVMDNNILVLVPDPHAKNVACFEESAKEAPPSLEQNQAEKALANFTATSSKCRLQLGGLDYLDPACFTHSFH

SEQ ID NO: 765597 - protein, 521 aa, Homo sapiens; identical to SEQ ID NO: 765596

SEQ ID NO: 765598 - protein, 589 aa, Homo sapiens
MKENVASATVFTLLLFLNTCLLNGQLPPGKPEIFKCRSPNKETFTCWWRPGTDGGLPTNYSLTYHREGETLMHECPDYITGGPNSCHFGKQYTSMWRTYIMMVNATNQMGSSFSDELYVDVTYIVQPDPPLELAVEVKQPEDRKPYLWIKWSPPTLIDLKTGWFTLLYEIRLKPEKAAEWEIHFAGQQTEFKILSLHPGQKYLVQVRCKPDHGYWSAWSPATFIQIPSAWWTCIFPPVPGPKIKGFDAHLLEKGKSEELLSALGCQDFPPTSDYEDLLVEYLEVDDSEDQHLMSVHSKEHPSQGMKPTYLDPDTDSGRGSCDSPSLLSEKCEEPQANPSTFYDPEVIEKPENPETTHTWDPQCISMEGKIPYFHAGGSKCSTWPLPQPSQHNPRSSYHNITDVCELAVGPAGAPATLLNEAGKDALKSSQTIKSREEGKATQQREVESFHSETDQDTPWLLPQEKTPFGSAKPLDYVEIHKVNKDGALSLLPKQRENSGKPKKPGTPENNKEYAKVSGVMDNNILVLVPDPHAKNVACFEESAKEAPPSLEQNQAEKALANFTATSSKCRLQLGGLDYLDPACFTHSFH

SEQ ID NO: 765599 - protein, 118 aa, Homo sapiens
LNSLPCHLRTSGGGNFPSVCELMFLCQAIQPCYIFLHSFPPILSFTLSKEQQSVANTQNKVVDVPDQTAISQKLPATFSSSELLIHFLQQEKAANMKENVASATVFTLLLFLNTCLLN

SEQ ID NO: 765600 - protein, 193 aa, Homo sapiens [sequence omitted]

SEQ ID NO: 765601 - protein, 349 aa, Homo sapiens
MKENVASATVFTLLLFLNTCLLNGQLPPGKPEIFKCRSPNKETFTCWWRPGTDGGLPTNYSLTYHREGETLMHECPDYITGGPNSCHFGKQYTSMWRTYIMMVNATNQMGSSFSDELYVDVTYIVQPDPPLELAVEVKQPEDRKPYLWIKWSPPTLIDLKTGWFTLLYEIRLKPEKAAEWEIHFAGQQTEFKILSLHPGQKYLVQVRCKPDHGYWSAWSPATFIQIPSDFTMNDTTVWISVAVLSAVICLIIVWAVALKGYSMVTCIFPPVPGPKIKGFDAHLLEKGKSEELLSALGCQDFPPTSDYEDLLVEYLEVDDSEDQHLMSVHSKEHPSQEREQRQAQEARDS

SEQ ID NO: 765602 - protein, 230 aa, Homo sapiens
MKENVASATVFTLLLFLNTCLLNGQLPPGKPEIFKCRSPNKETFTCWWRPGTDGGLPTNYSLTYHREGETLMHECPDYITGGPNSCHFGKQYTSMWRTYIMMVNATNQMGSSFSDELYVDVTYIVQPDPPLELAVEVKQPEDRKPYLWIKWSPPTLIDLKTGWFTLLYEIRLKPEKAAEWEIHFAGQQTEFKILSLHPGQKYLVQVRCKPDHGYWSAWSPATFIQIPSAW

SEQ ID NO: 765603 - protein, 262 aa, Homo sapiens
YIRTKTYECNICEKIFKQPIHLTEHMRIHTGEKPFRCKECGRAFSQSASLSTHQRIHTGEKPFECEECGKAFRHRSSLNQHHRTHTGEKPYVCDKCQKAFSQNISLVQHLRTHSGEKPFTCNECGKTFRQIRHLSEHIRIHTGEKPYACTACCKTFSHRAYLTHHQRIHTGERPYKCKECGKAFRQRIHLSNHKTVHTGVKAYECNRCGKAYRHDSSFKKHQRHHTGEKPYECNECGKAFSYNSSLSRHHEIHRRNAFRNKV

SEQ ID NO: 765604 - protein, 145 aa, Homo sapiens
PRCTYHHLIPYILICTVNMSSTKVRQDDGRDDICCIHCYLTTTWLIVEIPECYCYKCTVSAYMSKITHSKARCGGSCLQFPALWKVEEGGSLEVRSSRPAWLTWRNPISTETTKISWAWWRVPVIPATQDAEAGELLKPGRQRLQ

SEQ ID NO: 765605 - protein, 124 aa, Homo sapiens
FNYCSQLEDENSSAGLDIPGPPCTKASPEPAKPKPGAEPEPEPSTACPQKQRHRPASVRRAMGTVIIAGVVCGVVCIMMVVAAAYGCIYASLMAKYHRELKKRQPLMGDPEGEHEDQKQISSVA

SEQ ID NO: 765606 - protein, 101 aa, Homo sapiens
MAWSLSRSPAHLPTTPCPTHREGGGSTGCFEQSSCLYLEPVLTVLGAGISQEGYCVFPCLFLFLECELFQNELKIIHLHPSALSIEVCTEYMLSKCLTDIK

SEQ ID NO: 765607 - protein, 272 aa, Homo sapiens
  misc_feature (268)..(268): Xaa can be any naturally occurring amino acid
MLGLWGQRLPAAWVLLLLPFLPLLLLAAPAPHRASYKPVIVVHGLFDSSYSFRHLLEYINETHPGTVVTVLDLFDGRESLRPLWEQVQGFREAVVPIMAKAPQGVHLICYSQGGLVCRALLSVMDDHNVDSFISLSSPQMGQYGDTDYLKWLFPTSMRSNLYRICYSPWGQEFSICNYWHDPHHDDLYLNASSFLALINGERDHPNATVWRKNFLRVGHLVLIGGPDDGVITPWQSSFFGFYDANETVLEMEEQLVYLRDSFGLKTLXARGH

SEQ ID NO: 765608 - protein, 405 aa, Homo sapiens
MNAGKQLQRTLHNMVSSFRVSELQVLLGFAGRNKSGRKHDLLMRALHLLKSGCSPAVQIKIRELYRRRYPRTLEGLSDLSTIKSSVFSLDGGSSPVEPDLAVAGIHSLPSTSVTPHSPSSPVGSVLLQDTKPTFEMQQPSPPIPPVHPDVQLKNLPFYDVLDVLIKPTSLVQSSIQRFQEKFFIFALTPQQVREICISRDFLPGGRRDYTVQVQLRLCLAETSCPQEDNYPNSLCIKVNGKLFPLPGYAPPPKNGIEQKRPGRPLNITSLVRLSSAVPNQISISWASEIGKNYSMSVYLVRQLTSAMLLQRLKMKGIRNPDHSRALIKEKLTADPDSEIATTSLRVSLMCPLGKMRLTIPCRAVTCTHLQCFDAALYLQMNEKKPTWICPVCDKKAAYESLILDG

SEQ ID NO: 765609 - protein, 622 aa, Homo sapiens
MADFEELRNMVSSFRVSELQVLLGFAGRNKSGRKHDLLMRALHLLKSGCSPAVQIKIRELYRRRYPRTLEGLSDLSTIKSSVFSLDGGSSPVEPDLAVAGIHSLPSTSVTPHSPSSPVGSVLLQDTKPTFEMQQPSPPIPPVHPDVQLKNLPFYDVLDVLIKPTSLVQSSIQRFQEKFFIFALTPQQVREICISRDFLPGGRRDYTVQVQLRLCLAETSCPQEDNYPNSLCIKVNGKLFPLPGYAPPPKNGIEQKRPGRPLNITSLVRLSSAVPNQISISWASEIGKNYSMSVYLVRQLTSAMLLQRLKMKGIRNPDHSRALIKEKLTADPDSEIATTSLRVSLMCPLGKMRLTIPCRAVTCTHLQCFDAALYLQMNEKKPTWICPVCDKKAAYESLILDGLFMEILNDCSDVDEIKFQEDGSWCPMRPKKEAMKVSSQPCTKIESSSVLSKPCSVTVASEASKKKVDVIDLTIESSSDEEEDPPAKRKCIFMSETQSSPTKGVLMYQPSSVRVPSVTSVDPAAIPPSLTDYSVPFHHTPISSMSSDLPGLDFLSLIPVDPQQYCPPMFLDSLTSPLTASSTSVTTTSSHESSTHVSSSSSRSETGVITSSGSNIPDIISLD

SEQ ID NO: 765610 - protein, 553 aa, Homo sapiens
MADFEELRNMVSSFRVSELQVLLGFAGRNKSGRKHDLLMRALHLLKSGCSPAVQIKIRELYRRRYPRTLEGLSDLSTIKSSVFSLDGGSSPVEPDLAVAGIHSLPSTSVTPHSPSSPVGSVLLQDTKPTFEMQQPSPPIPPVHPDVQLKNLPFYDVLDVLIKPTSLVQSSIQRFQEKFFIFALTPQQVREICISRDFLPGGRRDYTVQVQLRLCLAETSCPQEDNYPNSLCIKVNGKLFPLPGYAPPPKNGIEQKRPGRPLNITSLVRLSSAVPNQISISWASEIGKNYSMSVYLVRQLTSAMLLQRLKMKGIRNPDHSRALIKEKLTADPDSEIATTSLRVSLMCPLGKMRLTIPCRAVTCTHLQCFDAALYLQMNEKKPTWICPVCDKKAAYESLILDGLFMEILNDCSDVDEIKFQEDGSWCPMRPKKEAMKVSSQPCTKIESSSVLSKPCSVTVASEASKKKVDVIDLTIESSSDEEEDPPAKRKCIFMSETQSSPTKGVLMYQPSSVRVPSVTSVDPAAIPPSLTDYSVPFHHTPISSMSSDLPENKV

SEQ ID NO: 765611 - protein, 572 aa, Homo sapiens
MADFEELRNMVSSFRVSELQVLLGFAGRNKSGRKHDLLMRALHLLKSGCSPAVQIKIRELYRRRYPRTLEGLSDLSTIKSSVFSLDGGSSPVEPDLAVAGIHSLPSTSVTPHSPSSPVGSVLLQDTKPTFEMQQPSPPIPPVHPDVQLKNLPFYDVLDVLIKPTSLVQSSIQRFQEKFFIFALTPQQVREICISRDFLPGGRRDYTVQVQLRLCLAETSCPQEDNYPNSLCIKVNGKLFPLPGYAPPPKNGIEQKRPGRPLNITSLVRLSSAVPNQISISWASEIGKNYSMSVYLVRQLTSAMLLQRLKMKGIRNPDHSRALIKEKLTADPDSEIATTSLRVSLMCPLGKMRLTIPCRAVTCTHLQCFDAALYLQMNEKKPTWICPVCDKKAAYESLILDGLFMEILNDCSDVDEIKFQEDGSWCPMRPKKEAMKVSSQPCTKIESSSVLSKPCSVTVASEASKKKVDVIDLTIESSSDEEEDPPAKRKCIFMSETQSSPTKGVLMYQPSSVRVPSVTSVDPAAIPPSLTDYSVPFHHTPISSMSSDLPGEQRRNDINNELKLGTSSDTVQQ

SEQ ID NO: 765612 - protein, 349 aa, Homo sapiens
SESSRNLARADIGKNYSMSVYLVRQLTSAMLLQRLKMKGIRNPDHSRALIKEKLTADPDSEIATTSLRVSLMCPLGKMRLTIPCRAVTCTHLQCFDAALYLQMNEKKPTWICPVCDKKAAYESLILDGLFMEILNDCSDVDEIKFQEDGSWCPMRPKKEAMKVSSQPCTKIESSSVLSKPCSVTVASEASKKKVDVIDLTIESSSDEEEDPPAKRKCIFMSETQSSPTKGVLMYQPSSVRVPSVTSVDPAAIPPSLTDYSVPFHHTPISSMSSDLPGLDFLSLIPVDPQQYCPPMFLDSLTSPLTASSTSVTTTSSHESSTHVSSSSSRSETGVITSSGSNIPDIISLD

SEQ ID NO: 765613 - protein, 282 aa, Homo sapiens
MADFEELRNMVSSFRVSELQVLLGFAGRNKSGRKHDLLMRALHLLKSGCSPAVQIKIRELYRRRYPRTLEGLSDLSTIKSSVFSLDGGSSPVEPDLAVAGIHSLPSTSVTPHSPSSPVGSVLLQDTKPTFEMQQPSPPIPPVHPDVQLKNLPFYDVLDVLIKPTSLGKCLRIHKKKVDVIDLTIESSSDEEEDPPAKRKCIFMSETQSSPTKGVLMYQPSSVRVPSVTSVDPAAIPPSLTDYSVPFHHTPISSMSSDLPGEQRRNDINNELKLGTSSDTVQQ

SEQ ID NO: 765614 - protein, 572 aa, Homo sapiens; identical to SEQ ID NO: 765611

SEQ ID NO: 765615 - protein, 622 aa, Homo sapiens; identical to SEQ ID NO: 765609

SEQ ID NO: 765616 - protein, 622 aa, Homo sapiens; identical to SEQ ID NO: 765609

SEQ ID NO: 765617 - protein, 572 aa, Homo sapiens; identical to SEQ ID NO: 765611

SEQ ID NO: 765618 - protein, 507 aa, Homo sapiens
MADFEELRNMVSSFRVSELQVLLGFAGRNKSGRKHDLLMRALHLLKSGCSPAVQIKIRELYRRRYPRTLEGLSDLSTIKSSVFSLDGGSSPVEPDLAVAGIHSLPSTSVTPHSPSSPVGSVLLQDTKPTFEMQQPSPPIPPVHPDVQLKNLPFYDVLDVLIKPTSLVQSSIQRFQEKFFIFALTPQQVREICISRDFLPGGRRDYTVQVQLRLCLAETSCPQEDNYPNSLCIKVNGKLFPLPGYAPPPKNGIEQKRPGRPLNITSLVRLSSAVPNQISISWASEIGKNYSMSVYLVRQLTSAMLLQRLKMKGIRNPDHSRALIKEKLTADPDSEIATTSLRVSLMCPLGKMRLTIPCRAVTCTHLQCFDAALYLQMNEKKPTWICPVCDKKAAYESLILDGLFMEILNDCSDVDEIKFQEDGSWCPMRPKKEAMKVSSQPCTKIESSSVLSKPCSVTVASEASKKKVDVIDLTIESSSDEEEDPPAKRKCIFMSETQSSPTKGFVNL

SEQ ID NO: 765619 - protein, 290 aa, Homo sapiens
STFYATSLRVSLMCPLGKMRLTIPCRAVTCTHLQCFDAALYLQMNEKKPTWICPVCDKKAAYESLILDGLFMEILNDCSDVDEIKFQEDGSWCPMRPKKEAMKVSSQPCTKIESSSVLSKPCSVTVASEASKKKVDVIDLTIESSSDEEEDPPAKRKCIFMSETQSSPTKGVLMYQPSSVRVPSVTSVDPAAIPPSLTDYSVPFHHTPISSMSSDLPGLDFLSLIPVDPQQYCPPMFLDSLTSPLTASSTSVTTTSSHESSTHVSSSSSRSETGVITSSGSNIPDIISLD

SEQ ID NO: 765620 - protein, 259 aa, Homo sapiens
MADFEELRNMVSSFRVSELQVLLGFAGRNKSGRKHDLLMRALHLLKSGCSPAVQIKIRELYRRRYPRTLEGLSDLSTIKSSVFSLDGGSSPVEPDLAVAGIHSLPSTSVTPHSPSSPVGSVLLQDTKPTFEMQQPSPPIPPVHPDVQLKNLPFYDVLDVLIKPTSLVQSSIQRFQEKFFIFALTPQQVREICISRDFLPGGRRDYTVQVQLRLCLAETSCPQEDNYPNSLCIKVNGKLFPLPVPLVQGRQQLIVGLVGW

SEQ ID NO: 765621 - protein, 144 aa, Homo sapiens
DDKGEMLWFKRGKSLLPILSVSSPNTSSSSSSLEYASSSSSSPGSVGSLLTGHSPFGCKTLLSFGLSQLFSWSLLSDILLDSDDEWLRETEVIGVFTTKLDSPPRFTSAFGIWVIPSGCSAELEVLALPFKKAKPAGKESPFST

SEQ ID NO: 765622 - protein, 67 aa, Homo sapiens
  misc_feature (1)..(1): Xaa can be any naturally occurring amino acid
XQYQDFLEDLEEDEAIRKNVNIYRDSAIPVESDTDDEGAPRISLAEMLEDLHISQDATGEEGASMLT

SEQ ID NO: 765623 - protein, 190 aa, Homo sapiens
RTRGSAELRVPGGAKHGMCLLLGATGVGKTLLVKRLQEVSSRDGKGDLGEPPPTRPTVGTNLTDIVAQRKITIRELGGCMGPIWSSYYGNCRSLLFVMDASDPTQLSASCVQLLGLLSAEQLAEASVLILFNKIDLPCYMSTEEMKSLIRLPDIIACAKQNITTAEISAREGTGLAGVLAWLQATHRAND

SEQ ID NO: 765624 - protein, 136 aa, Homo sapiens
AESAGTAWISSARGRDGGAGGTRSGAGTHPLAARVLDRFAQFVMDASDPTQLSASCVQLLGLLSAEQLAEASVLILFNKIDLPCYMSTEEMKSLIRLPDIIACAKQNITTAEISAREGTGLAGVLAWLQATHRAND

SEQ ID NO: 765625 - protein, 166 aa, Homo sapiens
  misc_feature (3)..(3): Xaa can be any naturally occurring amino acid
GRXKKSAWVKRLQEVSSRDGKGDLGEPPPTRPTVGTNLTDIVAQRKITIRELGGCMGPIWSSYYGNCRSLLFVMDASDPTQLSASCVQLLGLLSAEQLAEASVLILFNKIDLPCYMSTEEMKSLIRLPDIIACAKQNITTAEISAREGTGLAGVLAWLQATHRAND

SEQ ID NO: 765626 - protein, 129 aa, Homo sapiens
KKKMQFCSPSARSVRPRGGSLAAGRCCHLFLFPQFVMDASDPTQLSASCVQLLGLLSAEQLAEASVLILFNKIDLPCYMSTEEMKSLIRLPDIIACAKQNITTAEISAREGTGLAGVLAWLQATHRAND

SEQ ID NO: 765627 - protein, 193 aa, Homo sapiens
AESAGTAWISSARGRDGGAGGTRSGAGTHPLAARVLDRFAQVSSRDGKGDLGEPPPTRPTVGTNLTDIVAQRKITIRELGGCMGPIWSSYYGNCRSLLFVMDASDPTQLSASCVQLLGLLSAEQLAEASVLILFNKIDLPCYMSTEEMKSLIRLPDIIACAKQNITTAEISAREGTGLAGVLAWLQATHRAND

SEQ ID NO: 765628 - protein, 155 aa, Homo sapiens
RTRGSAELRVPGGAKHGMCLLLGATGVGKTLLVKRLQEVSSRDGKGDLGEPPPTRPTVGTFVMDASDPTQLSASCVQLLGLLSAEQLAEASVLILFNKIDLPCYMSTEEMKSLIRLPDIIACAKQNITTAEISAREGTGLAGVLAWLQATHRAND

SEQ ID NO: 765629 - protein, 174 aa, Homo sapiens
RTRGSAELRVPGGAKHGMCLLLGATGVGKTLLVKRLQEVSSRDGKGDLGEPPPTRPTVGTNLTDIVAQRKITIRELGGCMGPIWSSYYGNCRSLLFVMDASDPTQLSASCVQLLGLLSAEQLAEASVLILFNKMLPDIIACAKQNITTAEISAREGTGLAGVLAWLQATHRAND
